United States Patent Application Publication US 2020/0163878 A1 - sequence listing, part 58

SEQ ID NO: 221158 - RNA, 1401 nt, Artificial Sequence
  derived and/or modified CDS sequence (opt5) from neuraminidase__InfluenzaB__AFU34642
augcugcccagcaccauccagacacucacgcuguuccuuaccuccggcggggugcugcucucucuguacgucagcgccucccuuucuuaucugcucuacagcgacauucugcugaaguuuuccccuacagagaucaccgcuccgacaaugucucucgauugcgccaacgcgagcaauguucaagcugugaacagauccgccaccaaaggaaugacauuccugcuucccgaaccugaguggaccuauccccggcugagcuguccuggcucuacguuucagaaggcccuccugauuagcccccaccgcuucggggaaaccaaaggaaauuccgcuccucuuaucauuagagagccguuuaucgccugcggccccaacggguguaagcauuucgcucugacacacuacgccgcgcagccuggaggcuauuacaauggcacccgcggggaccggaacaaacucagacaucugaucucugugaagcugggaaagauucccacagucgaaaauuccaucuuucacauggccgcuuggagcggcucugccugccaugaugggaaagaguggaccuauauuggaguggacggcccugauaacaaugcucuccugaagguuaaauacggggaggccuacacggacacauaucacuccuacgcgaacaagauccuucggacccaggaaagcgccuguaauugcauuggaggcaacuguuaucugaugaucacagauggcuccgcuucuggggugagcgagugccgcuuccucaaaauuagagaaggacggaucaucaaggagauuuuucccaccggccgcgucaagcacaccgaggaauguacaugcggguucgccuccaauaaaacgaucgagugugcuugcagagacaacagcuacaccgccaagcggccguuugugaaacugaauguugaaacagauaccgccgagauucgccuuaugugcacagacaccuaucuggauacgccuagacccgacgauggaucuaucacaggcccuugugaauccuacggggacaagggaagcggcggcauuaaagggggauucgugcaucaacggauggagucuaagaucggccgcugguauagcagaaccauguccaaaaccgagcggauggggaugggacucuacgucaaguacgacggcgaucccugggcugacucugaugcgcuggccuuuagcggggugaugguguccaugaaggaacccggcugguauagcuucggauucgagaucaaagacaagaaaugcgaugucccuuguauuggcaucgaaaugguucacgacgggggaaaggagacauggcauucugcugccaccgccauuuacugccugaugggcuccgggcagcuccugugggauacagugacgggaguggacauggcucuuuga

SEQ ID NO: 221159 - RNA, 1401 nt, Artificial Sequence
  derived and/or modified CDS sequence (opt5) from neuraminidase__InfluenzaB__AGB97261
augcugcccagcaccauccagacacucacgcuguuccuuaccuccggcggggugcugcucucucuguacgucagcgccucccuuucuuaucugcucuacagcgacaugcugcugaaguuuuccagaacagagauuaccgcuccuaucaugccgcucgauugcgccaacgcgucuaauguucaagcugugaaccggagcgccacaaaaggagugacccugcuucugcccgaaccugaguggacauauccccgccucuccuguccuggcagcaccuuccagaaggcccugcuuauuucuccccacagauuuggggaaacgaaaggaaauuccgcuccucugaucauucgggagccguucaucgccugcggccccaaggaauguaaacauuuugcucucacccacuacgccgcgcagccugggggauauuacaacggcacacgcgaggacagaaauaagcugcggcaucugaucagcgucaagcucggcaaaauucccaccguggagaacucuaucuuccacauggccgcuugguccgggagcgccugccaugauggacgcgaauggacauauauuggcguugacgggccugauucuaaugcucugcuuaagaucaaauacggagaggccuacaccgacacguaucacuccuacgcgaagaacauucugagaacacaggaaagcgccuguaauugcaucggcggggauuguuaucucaugauuaccgacggacccgcuuccggcaucucugagugccgguuucugaaaauccgcgagggcagaauuaucaaggaaauuuucccgacagggcgggugaagcacaccgaggaauguaccugcggauuugccagcaacaaaacaaucgagugugcuugccgcgauaauuccuacacggccaagagaccuuucgucaaacuuaacguggaaaccgacacagccgagauucggcugaugugcaccgagacauaucucgauacgccccgcccuaaugacggcagcaucaccgggcccugugaaucuaacggagauaagggcuccgggggaaucaaaggcggcuuuguucaucaaagaauggcuagcaagauugggcggugguacucuagaacaaugagcaaaaccaagcgcaugggaaugggccuguaugugaaguacgacggggaccccuggaccgauuccgaggcgcuggcccucucuggagucauggugagcauggaggaaccuggcugguacuccuucggguuugaaaucaaagacaagaaaugcgaugugccguguauuggcaucgagaugguccacgacggaggcaagacaaccuggcauagcgcugccacagccauuuauugccugauggggucuggacagcuucugugggauacgguuaccggcgugaauaugacacucuga

SEQ ID NO: 221160 - RNA, 1401 nt, Artificial Sequence
  derived and/or modified CDS sequence (opt5) from neuraminidase__InfluenzaB__AGB97267
augcugcccagcaccauccagacacucacgcuguuccuuaccuccggcggggugcugcucucucuguacgucagcgccucccuuucuuaucugcucuacagcgacauucugcugaaguuuucccaaacagagaucaccgcuccuauuaugccgcucgauugcacaaacgccucuaauguucaggcggugaacagaagcgcugccaaaggagugacccugcuucugcccgaaccugaguggacauauccccggcucuccuguccuggcagcaccuuccagaaggcccugcuuaucucuccccaccgcuuuggggaaauuaaaggaaauuccgcuccucugaucaucagagagccguucauugccugcggccccacggaauguaagcauuuugcucucacccacuacgccgcgcagccugggggauauuacaacggcacacgggaggaccgcaauaaacugagacaucugaucagcgucaagcucggcaagauucccaccguggagaacucuaucuuccacauggccgcuugguccgggagcgccugccaugauggaaaagaauggacauauauuggcaucgacgggccugauucuaaugcucugcuuaagauuaaauacggagaggccuacaccgacacguaucacuccuacgcgaagaacauccugcggacacaagaaagcgccuguaauugcaucggcggggauuguuaucucaugauuaccgacggacccgcuuccggcguuucugagugccgcuuucugaaaaucagagagggccggauuaucaaggaaauuuucccgacagggcgcgugaagcacaccgaggaauguaccugcggauuugccagcaacaaaacaaucgagugugcuugcagagauaaucgguacacggccaagcgcccuuucgucaaacuuaacguggaaaccgacacagccgagaucagacugaugugcaccgagacauaucucgauacgccccggccuaaugacggcuccauuaccgggcccugugaaagcgauggagacaagggcucugggggaaucaaaggcggcuuuguucaucagcgcauggcuuccaagauugggagaugguacagccggacaaugucuaaaaccaagagaaugggaaugggccuguaugugaaguacgacggggaucccuggaccgacagcgaggcgcuggcccucuccggagucauggugucuauggaggaaccuggcugguacagcuucggguuugaaaucaaagauaagaaaugcgacgugccguguauuggcaucgagaugguccacgauggaggcaagacaaccuggcauuccgcugccacagccaucuauugccugauggggagcggacagcuucugugggacacgguuaccggcguggauauggcucucuga

SEQ ID NO: 221161 - RNA, 1401 nt, Artificial Sequence; identical to SEQ ID NO: 220889
  derived and/or modified CDS sequence (opt5) from neuraminidase__InfluenzaB__AGR54784

SEQ ID NO: 221162 - RNA, 1401 nt, Artificial Sequence; identical to SEQ ID NO: 220754
  derived and/or modified CDS sequence (opt5) from neuraminidase__InfluenzaB__AGX15491

SEQ ID NO: 221163 - RNA, 1401 nt, Artificial Sequence
  derived and/or modified CDS sequence (opt5) from neuraminidase__InfluenzaB__AGX15533
augcugcccagcaccauccagacacucacgcuguuccuuaccuccggcggggugcugcucucucuguacgucagcgccucccuuucuuaucugcucuacagcgacauucugcugaaguuuuccccuacagagaucaccgcuccgacaaugccccucgauugcgccaacgcgucuaauguucaagcugugaacagaagcgccaccaaaggagugacacugcuucugccugaacccgaguggaccuauccucggcucuccugucccggcagcacguuccagaaggcccugcuuauuucuccucaccgcuuuggggaaaccaaaggaaauuccgcuccgcugaucauuagagagcccuucaucgccugcggcccuaacgaauguaagcauuuugcucucacacacuacgccgcgcagcccgggggauauuacaauggcaaacggggcgaccgcaacaagcugagacaucugaucagcgucaagcucgggaaaauuccuaccguggaaaauucuaucuuccacauggccgcuugguccggaagcgccugccaugauggcaaggaguggacauauauugggguugacggacccgauaacaaugcucugcuuaaaaucaaguacggcgaggccuacaccgacacguaucacucuuacgcgaacaauauucugcggacacaggaguccgccuguaacugcaucgggggaaauuguuaucucaugauuaccgauggcagcgcuuccggcgugucugaaugccgcuuucugaaaaucagagaggggcggaucauuaaggagaucuucccgacaggacgcgucaagcacaccgaagaguguaccugcggcuuugccagcaacaaaacaauugaaugugcuugcagagacaauuccuacacggccaagcggccuuucgugaaacuuaacguugagaccgauacagccgaaauccgccugaugugcaccgacacauaucucgauacccccagaccugacgaugggagcauuacgggacccugugagucuaacggcgacaagggguccggaggcaucaaaggcggguuugugcaucaacggauggcuagcaaggucggacgcugguacucuagaacaaugagcaaaaccgagcggaugggcauggggcuguaugugaaguacgacggagaucccugggcggacuccgaugcccuggcuuucucuggcgugauggucagcaugaaggaaccugggugguacuccuuuggcuucgagaucaaagacaagaaaugcgauguuccguguauuggaaucgaaauggugcacgacggcgggaaggagaccuggcauagcgccgccacagcuauuuauugccucaugggaucuggccagcugcuuugggauaccgugacaggggucgacauggcccuguga

SEQ ID NO: 221164 - RNA, 1401 nt, Artificial Sequence; identical to SEQ ID NO: 220707
  derived and/or modified CDS sequence (opt5) from neuraminidase__InfluenzaB__AGX15545

SEQ ID NO: 221165 - RNA, 1401 nt, Artificial Sequence; identical to SEQ ID NO: 220707
  derived and/or modified CDS sequence (opt5) from neuraminidase__InfluenzaB__AGX15556

SEQ ID NO: 221166 - RNA, 1401 nt, Artificial Sequence
  derived and/or modified CDS sequence (opt5) from neuraminidase__InfluenzaB__AGX15567
augcugcccagcaccauccagacacucacgcuguuccuuaccuccggcggggugcugcucucucuguacgucagcgccucccuuucuuaucugcucuacagcgacauucugcugaaguuuccuuccacagagaucaccgcuccgacaaugccccucgauugcgccaacgcgucuaauguucaagcugugaacagaagcgccaccaaaggagugacacugcuucugccugaacccgaguggaccuauccucggcucuccugucccggcagcacguuccagaaggcccugcuuauuucuccucaccgcuuuggggaaaccaaaggaaauuccgcuccgcugaucauuagagagcccuucaucgccugcggcccuaaggaauguaaacauuuugcucucacacacuacgccgcgcagcccgggggauauuacaacggcacccggggcgaccgcaauaagcugagacaucugaucagcgucaagcucgggaaaauuccuacaguggagaacucuaucuuccacauggccgcuugguccggaagcgccugccaugauggcaaggaguggaccuauauugggguugacggacccgauaauaacgcucugcuuaaaaucaaguacggcgaagccuacacggacacauaucacucuuacgcgaauaacauucugcggacccaggaguccgccuguaauugcaucgggggaaacuguuaucucaugauuacagauggcagcgcuuccggcgugucugaaugccgcuuucugaaaaucagagaggggcggaucauuaaggagaucuucccgaccggacgcauuaagcacaccgaagaguguacaugcggcuuugccagcaauaaaacgaucgaaugugcuugcagagacaacuccuacaccgccaagcggccuuucgucaaacuuaauguggagacagauaccgccgaaauucgccugaugugcacagagaccuaucucgacacgcccagaccugaugacgggagcaucacaggacccugugagucuaacggcgauaagggguccggaggcaucaaaggcggguuuguucaucaacggauggcuagcaagauuggacgcugguacucuagaaccaugagcaaaaccgaacggaugggcauggggcuguaugugaaguacgacggagaccccugggcggauuccgacgcccuggcuuucucuggcgucauggugagcauggaggaaccugggugguacuccuuuggcuucgagaucaaggauaaaaagugcgacgugccguguauuggaaucgaaaugguccacgauggcgggaaagagacauggcauagcgccgccaccgcuauuuauugccucaugggaucuggccagcugcuuugggacacaguuacgggggugaacauggcccuguga

SEQ ID NO: 221167 - RNA, 1401 nt, Artificial Sequence; identical to SEQ ID NO: 220707
  derived and/or modified CDS sequence (opt5) from neuraminidase__InfluenzaB__AGX15578

SEQ ID NO: 221168 - RNA, 1401 nt, Artificial Sequence; identical to SEQ ID NO: 220707
  derived and/or modified CDS sequence (opt5) from neuraminidase__InfluenzaB__AGX15589

SEQ ID NO: 221169 - RNA, 1401 nt, Artificial Sequence; identical to SEQ ID NO: 220913
  derived and/or modified CDS sequence (opt5) from neuraminidase__InfluenzaB__AGX15600

SEQ ID NO: 221170 - RNA, 1401 nt, Artificial Sequence; identical to SEQ ID NO: 220913
  derived and/or modified CDS sequence (opt5) from neuraminidase__InfluenzaB__AGX15611

SEQ ID NO: 221171 - RNA, 1401 nt, Artificial Sequence; identical to SEQ ID NO: 221033
  derived and/or modified CDS sequence (opt5) from neuraminidase__InfluenzaB__AGX15644

SEQ ID NO: 221172 - RNA, 1401 nt, Artificial Sequence; identical to SEQ ID NO: 221033
  derived and/or modified CDS sequence (opt5) from neuraminidase__InfluenzaB__AGX15655

SEQ ID NO: 221173 - RNA, 1401 nt, Artificial Sequence; identical to SEQ ID NO: 221033
  derived and/or modified CDS sequence (opt5) from neuraminidase__InfluenzaB__AGX15666

SEQ ID NO: 221174 - RNA, 1401 nt, Artificial Sequence; identical to SEQ ID NO: 221033
  derived and/or modified CDS sequence (opt5) from neuraminidase__InfluenzaB__AGX15679

SEQ ID NO: 221175 - RNA, 1401 nt, Artificial Sequence
  derived and/or modified CDS sequence (opt5) from neuraminidase__InfluenzaB__AGX15690
augcugcccagcaccauccagacacucacgcuguuccuuaccuccggcggggugcugcucucucuguacgucagcgccucccuuucuuaucugcucuacagcgacauucugcugaaguuuuccccuacagagaucaccgcuccgacaaugccccucgauugcgccaacgcgucuaauguucaagcugugaacagaagcgccaccaaaggagugacacugcuucugccugaacccgaguggaccuauccucggcucuccugucccggcagcacguuccagaaggcccugcuuauuucuccucaccgcuuuggggaaaccaaaggaaauuccgcuccgcugaucauuagagagcccuucaucgccugcggcccuaacgaauguaagcauuuugcucucacacacuacgccgcgcagcccgggggauauuacaauggcacccggggcgaccgcaacaaacugagacaucugaucagcgucaagcucgggaagauuccuacaguggagaauagcaucuuccacauggccgcuugguccggaagcgccugccaugauggcaaagaguggaccuauauugggguugacggacccgauaacaaugcucugcuuaaggugaaauacggcgaagccuacacggacacauaucacucuuacgcgaacaagauccugcggacccaggaguccgccuguaauugcauugggggaaacuguuaucucaugaucacagauggcagcgcuuccggcgucucugaaugccgcuuucugaaaauuagagaggggcggaucaucaaggagauuuucccgaccggacgcgugaagcacaccgaagaguguacaugcggcuuugccagcaauaaaacgaucgaaugugcuugcagagacaacuccuacaccgccaagcggccuuucguuaaacuuaauguggagacagauaccgccgaaauucgccugaugugcacagacaccuaucucgauacgcccagaccuaacgacgggagcaucacaggacccugugagucuaacggcgauaagggguccggaggcauuaaaggcggguuuguccaucaacggaugaagucuaaaaucggacgcugguacucuagaaccaugagcaagaccgagcggaugggcauggggcuguaugugaaguacgacggagaccccugggcugauuccgacgcgcuggccuucucuggcgugauggucagcaugaaagaaccugggugguacuccuuuggcuucgagaucaaggauaaaaagugcgacguuccguguauuggaaucgaaauggugcacgauggcgggaaagagacauggcauagcgcugccaccgccauuuauugccucaugggaucuggccagcugcuuugggacacagugacgggggucgauauggcucuguga

SEQ ID NO: 221176 - RNA, 1401 nt, Artificial Sequence; identical to SEQ ID NO: 221033
  derived and/or modified CDS sequence (opt5) from neuraminidase__InfluenzaB__AGX15701

SEQ ID NO: 221177 - RNA, 1401 nt, Artificial Sequence
  derived and/or modified CDS sequence (opt5) from neuraminidase__InfluenzaB__AGX15712
augcugcccagcaccauccagacacucacgcuguuccuuaccuccggcggggugcugcucucucuguacgucagcgccucccuuucuuaucugcucuacagcgacauucugcugaaguuuuccccuacagagaucaccgcuccgacaaugccccucgauugcgccaacgcgucuaauguucaagcugugaacagaagcgccaccaaaggagugacacugcuucugccugaacccgaguggaccuauccucggcucuccugucccggcagcacguuccagaaggcccugcuuauuucuccucaccgcuuuggggaaccgaaaggaaauuccgcuccccugaucauuagagagccuuucaucgccugcggccccaacgaauguaagcauuuugcucucacccacuacgccgcgcagccugggggauauuacaauggcacacggggcgaccgcaacaaacugagacaucugaucagcgucaagcucgggaagauucccaccguggaaaauucuaucuuccacauggccgcuugguccggaagcgccugccaugauggcaaagaguggacauauauugggguugacggaccggauaacaaugcucugcuuaaggugaaauacggcgaggccuacaccgacacguaucacucuuacgcgaacaagauccugcggacacaggaguccgccuguaauugcauugggggaaacuguuaucucaugaucaccgauggcagcgcuuccggcgucucugaaugccgcuuucugaaaauuagagaggggcggaucaucaaggagauuuucccuacaggacgcgugaagcacaccgaagaguguaccugcggcuuugccagcaauaaaacaaucgaaugugcuugcagagacaacuccuacacggccaagcggcccuucguuaaacuuaauguggagaccgauacagccgaaauucgccugaugugcaccgacacauaucucgauaccccuagacccaacgacgggagcaucacgggacccugugagucugauggcgacaagggguccggaggcauuaaaggcggguuuguccaucaacggauggagagcaagaucggacgcugguacucuagaacaaugagcaaaaccgaacggaugggcauggggcuguaugugaaguacgacggagauccuugggcugacuccgaugcgcuggccuucucuggcgugauggucagcaugaaggagccggggugguacuccuuuggcuucgaaaucaaagacaagaaaugcgauguucccuguauuggaaucgagauggugcacgacggcgggaaggaaaccuggcauagcgcugccacagccauuuauugccucaugggaucuggccagcugcuuugggauaccgugacaggggucaacauggcucuguga

SEQ ID NO: 221178 - RNA, 1401 nt, Artificial Sequence; identical to SEQ ID NO: 221033
  derived and/or modified CDS sequence (opt5) from neuraminidase__InfluenzaB__AGX15723

SEQ ID NO: 221179 - RNA, 1401 nt, Artificial Sequence; identical to SEQ ID NO: 221033
  derived and/or modified CDS sequence (opt5) from neuraminidase__InfluenzaB__AGX15745

SEQ ID NO: 221180 - RNA, 1401 nt, Artificial Sequence; identical to SEQ ID NO: 221033
  derived and/or modified CDS sequence (opt5) from neuraminidase__InfluenzaB__AGX15757

SEQ ID NO: 221181 - RNA, 1401 nt, Artificial Sequence
  derived and/or modified CDS sequence (opt5) from neuraminidase__InfluenzaB__AGX15768
augcugcccagcaccauccagacacucacgcuguuccuuaccuccggcggggugcugcucucucuguacgucagcgccucccuuucuuaucugcucuacagcgacauucugcugaaguuuuccccuacagagaucaccgcuccgacaaugccccucgauugcgccaacgcgucuaauguucaagcugugaacagaagcgccaccaaaggagugacacugcuucugccugaacccgaguggaccuauccucggcucuccugucccggcagcacguuccagaaggcccugcuuauuucuccucaccgcuuuggggaaaccaaaggaaauuccgcuccgcugaucauuagagagcccuucaucgccugcggcccuaacgaauguaagcauuuugcucucacacacuacgccgcgcagcccgggggauauuacaauggcacccggggcgaccgcaacaaacugagacaucugaucagcgucaagcucgggaagauuccuacaguggaaaauucuaucuuccacauggccgcuugguccggaagcgccugccaugauggcaaagaguggaccuauauugggguugacggacccgauaacaaugcucugcuuaaggugaaauacggcgaggccuacacggacacauaucacucuuacgcgaacaagauccugcggacccaggaguccgccuguaauugcauugggggaaacuguuaucucaugaucacagauggcagcgcuuccggcgucucugaaugccgcuuucugaaaauuagagaggggcggaucaucaaggagauuuucccgaccggacgcgugaagcacaccgaagaguguacaugcggcuuugccagcaauaaaacgaucgaaugugcuugcagagacaacuccuacaccgccaagcggccuuucguuaaacuuaauguggagacagauaccgccgaaauucgccugaugugcacagacaccuaucucgauacgcccagaccuaacgacgggagcaucacaggacccugugagucuaacggcgauaagggguccggaggcauuaaaggcggguuuguccaucaacggauggagagcaagaucggacgcugguacucuagaaccaugagcaaaaccgaacggaugggcauggggcuguaugugaaguacgacggagaccccugggcugauuccgacgcgcuggccuucucuggcgugaugaucagcaugaaggagccugggugguacuccuuuggcuucgaaauuaaagauaagaaaugcgacgucccguguaucggaauugagaugguucacgauggcgggaaggaaacauggcauagcgcugccaccgccaucuauugccucaugggaucuggccagcugcuuugggacacagugacggggguggauauggcucuguga

SEQ ID NO: 221182 - RNA, 1401 nt, Artificial Sequence
  derived and/or modified CDS sequence (opt5) from neuraminidase__InfluenzaB__AGX15801
augcugcccagcaccauccagacacucacgcuguuccuuaccuccggcggggugcugcucucucuguacgucagcgccucccuuucuuaucugcucuacagcgacauucugcugaaguuuuccccuacagagaucaccgcuccgacaaugucucucgauugcguuaacgccagcaaugugcaagcggugaacagauccgcuaccaaaggagucacacugcuucugcccgaaccugaguggaccuauccccggcucagcuguccuggcucuacguuccagaaggcccugcuuauuagcccccaccgcuuuggggaaaccaaaggaaauuccgccccucugaucauuagagagccguucaucgcuugcggccccaacgaauguaagcauuuugcccucacacacuacgcugcccagccugggggauauuacaauggcacccggggcgaccgcaacaaacugagacaucugaucucugugaagcucgggaagauucccacaguugaaaauuccaucuuccacauggcggccuggagcggaucugcuugccaugauggcaaagaguggaccuauauugggguggacggaccugauaacaaugcccugcuuaaggucaaauacggcgaggcuuacacggacacauaucacuccuacgccaacaagauccugcggacccaggagagcgcguguaauugcauugggggaaacuguuaucucaugaucacagauggcuccgccucuggcgugagcgaaugccgcuuucugaaaauuagagaggggcggaucaucaaggagauuuuccccaccggacgcguuaagcacaccgaagaguguacaugcggcuuugcuuccaauaaaacgaucgaaugugccugcagagacaacagcuacaccgcuaagcggccguucgugaaacuuaaugucgagacagauaccgccgaaauucgccugaugugcacagacaccuaucucgauacgccuagacccaacgacgggucuaucacaggaccuugugaguccaacggcgauaaggggagcggaggcauuaaaggcggguuugugcaucaacggauggagucuaagaucggacgcugguacagcagaaccauguccaaaaccgaacggaugggcauggggcuguaugugaaguacgacggagaccccugggccgauucugacgcucuggcguucagcggcgucaugguuuccaugaaggagcccgggugguacagcuuuggcuucgaaaucaaagauaagaaaugcgacgugccuuguauuggaaucgagauggugcacgauggcgggaaggaaacauggcauucugccgcuaccgccauuuauugccucaugggauccggccagcugcuuugggacacagucacggggguggauauggcccuguga

SEQ ID NO: 221183 - RNA, 1401 nt, Artificial Sequence; identical to SEQ ID NO: 221033
  derived and/or modified CDS sequence (opt5) from neuraminidase__InfluenzaB__AGX15812

SEQ ID NO: 221184 - RNA, 1401 nt, Artificial Sequence; identical to SEQ ID NO: 221033
  derived and/or modified CDS sequence (opt5) from neuraminidase__InfluenzaB__AGX15823

SEQ ID NO: 221185 - RNA, 1401 nt, Artificial Sequence; identical to SEQ ID NO: 220967
  derived and/or modified CDS sequence (opt5) from neuraminidase__InfluenzaB__AGX15845

SEQ ID NO: 221186 - RNA, 1401 nt, Artificial Sequence; identical to SEQ ID NO: 220944
  derived and/or modified CDS sequence (opt5) from neuraminidase__InfluenzaB__AGX15856

SEQ ID NO: 221187 - RNA, 1401 nt, Artificial Sequence; identical to SEQ ID NO: 220967
  derived and/or modified CDS sequence (opt5) from neuraminidase__InfluenzaB__AGX15867

SEQ ID NO: 221188 - RNA, 1401 nt, Artificial Sequence; identical to SEQ ID NO: 220967
  derived and/or modified CDS sequence (opt5) from neuraminidase__InfluenzaB__AGX15889

SEQ ID NO: 221189 - RNA, 1401 nt, Artificial Sequence
  derived and/or modified CDS sequence (opt5) from neuraminidase__InfluenzaB__AGX15900
augcugcccagcaccauccagacacucacgcuguuccuuaccuccggcggggugcugcucucucuguacgucagcgcccuucuguccuaucuccuguacucugacauucugcucaaguuuagcccuacagagaucaccgcuccgacaaugucccuggauugcgccaacaccucuaauguucaagcggugaacagaagcgcuacaaaaggagugaccuuccuucugcccgaaccugaguggacguauccccggcucuccuguccuggcagcaccuuucagaaggcccugcuuauuucuccccaccgcuucggggaaacaaaaggaaauuccgccccucugaucauuagagagccguuuaucgcuugcggccccaacgaauguaagcauuucgcccucacccacuacgcugcccagccugggggauauuacaauggcacacggggcgaccgcaacaaacugagacaucugaucagcgucaagcucgggaagauucccaccguggaaaauucuaucuuucacauggcggccugguccggaagcgcuugccaugauggcaaagaguggacguauauugggguugacggaccugauaacgacgcccugcuuaaggugaaauacggcgaggcuuacacagauaccuaucacucuuacgccaauaagauccugcggacacaggaguccgcguguaacugcauugggggaaauuguuaucucaugaucaccgacggcagcgccuccggcgucucugaaugccgcuuccugaaaauuagagaggggcggaucaucaaggagauuuuucccaccggacgcgugaagcacacagaagaguguacgugcggcuucgcuagcaacaaaaccaucgaaugugccugcagagauaauuccuacacagcuaagcggccguuuguuaaacuuaacguggagaccgacacagccgaaauucgccugaugugcaccgauacguaucucgacacaccuagacccgaugacgggagcaucaccggaccuugugagucuaauggcgacaagggguccggaggcauuaaaggcggguucguccaucaacggauggagagcaagaucggacgcugguacucuagaaccaugagcaaaacagaacggagaggcauggggcuguaugugaaguacgauggagaccccugggccgauuccgacgcucuggcguuuucuggcgugauggucagcaugaaggagcccgggugguacuccuucggcuucgaaaucaaagauaagaaaugcgacguuccuuguauuggaaucgagauggugcacgauggcgggaaggaaaccuggcauagcgccgcuacagccauuuauugccucaugggaucuggccagcugcuuugggacacggugaccggggucgauauggcccuguga

SEQ ID NO: 221190 - RNA, 1401 nt, Artificial Sequence; identical to SEQ ID NO: 220967
  derived and/or modified CDS sequence (opt5) from neuraminidase__InfluenzaB__AGX15911

SEQ ID NO: 221191 - RNA, 1401 nt, Artificial Sequence
  derived and/or modified CDS sequence (opt5) from neuraminidase__InfluenzaB__AGX15933
augcugcccagcaccauccagacacucacgcuguuccuuaccuccggcggggugcugcucucucuguacgucagcgccucccuuucuuaucugcucuacagcgacauucugcugaaguuuuccccuacagagaucaccgcuccggccaugccccucgauugcgcgaacgcuucuaauguucaagccgugaacagaagcgccacaaaaggagugacccugcuucugccugaacccgaguggacauauccucggcucuccugucccggcagcaccuuccagaaggcucugcuuauuucuccucaccgcuuuggggaaacgaaaggaaauuccgccccgcugaucauuagagagcccuucaucgcuugcggcccuaacgaauguaagcauuuugcccucacccacuacgcggcccagcccgggggauauuacaauggcacacggggcgaccgcaacaaacugagacaucugaucagcgucaagcucgggaagauuccuaccguggaaaauucuaucuuccacauggcugccugguccggaagcgcuugccaugauggcaaagaguggacauauauugggguugacggacccgauaacaaugcccugcuuaaggugaaauacggcgaggcguacaccgacacguaucacucuuacgccaacaagauccugcggacacaggaguccgcuuguaauugcauugggggaaacuguuaucucaugaucaccgauggcagcgccuccggcgucucugaaugccgcuuucugaaaauuagagaggggcggaucaucaaggagauuuucccgacaggacgcgugaagcacaccgaagaguguaccugcggcuuugcuagcaauaaaacaaucgaaugugccugcagagacaacuccuacacggccaagcggccuuucguuaaacuuaauguggagaccgauacagcugaaauucgccugaugugcaccgacacauaucucgauacccccagaccuaacgacgggagcaucacgggacccugugagucugauggcgacaagggguccggaggcauuaaaggcggguuuguccaucaacggauggagagcaagaucggacgcugguacucuagaacaaugagcaaaaccgaacggaugggcauggggcuguaugugaaguacgacggagaucccugggcggacuccgaugcccuggcuuucucuggcgugauggucagcaugaaggagccugggugguacuccuuuggcuucgaaaucaaagacaagaaaugcgauguuccguguauuggaaucgagauggugcacgacggcgggaaggaaaccuggcauagcgccgccacagcuauuuauugccucaugggaucuggccagcugcuuugggauaccgugacaggggucgacauggcccuguga

SEQ ID NO: 221192 - RNA, 1401 nt, Artificial Sequence; identical to SEQ ID NO: 220967
  derived and/or modified CDS sequence (opt5) from neuraminidase__InfluenzaB__AGX15944

SEQ ID NO: 221193 - RNA, 1401 nt, Artificial Sequence; identical to SEQ ID NO: 221028
  derived and/or modified CDS sequence (opt5) from neuraminidase__InfluenzaB__AGX15966

SEQ ID NO: 221194 - RNA, 1401 nt, Artificial Sequence
  derived and/or modified CDS sequence (opt5) from neuraminidase__InfluenzaB__AGX15988
augcugcccagcaccauccagacacucacgcuguuccuuaccuccggcggggugcugcucucucuguacgucagcgccucccuuucuuaucugcucuacagcgacauucugcugaaguuuuccccuacagagaucaccgcuccgacaaugccccucgauugcgccaacgcgucuaauguucaagcugugaacagaagcgccaccaaaggagugacacugcuucugccugaacccgaguggaccuauccucggcucuccugucccggcagcacguuccagaaggcccugcuuauuucuccucaccgcuuuggggaaaccaaaggaaauuccgcuccgcugaucauuagagagcccuucaucgccugcggcccuaacgaauguaagcauuuugcucucacacacuacgccgcgcagcccgggggauauuacaauggcacccggggcgaccgcaacaaacugagacaucugaucagcgucaagcucgggaagauuccuacaguggaaaauucuaucuuccacauggccgcuugguccggaagcgccugccaugauggcaaagaguggaccuauauugggguugacggacccgauaacaaugcucugcuuaaggugaaauacggcgaggccuacacggacacauaucacucuuacgcgaacaagauccugcggacccaggaguccgccuguaauugcauugggggaaacuguuaucucaugaucacagauggcagcgcuuccggcgucucugaaugccgcuuucugaaaauuagagaggggcggaucaucaaggagauuuucccgaccggacgcgugaagcacaccgaagaguguacaugcggcuuugccagcaauaaaacgaucgaaugugcuugcagagacaacuccuacaccgccaagcggccuuucguuaaacuuaauguggagacagauaccgccgaaguccgccugaugugcacagacaccuaucucgauacgcccagaccuaacgacgggagcauuacaggacccugugagucugauggcgacaagggguccggaggcaucaaaggcggguuugugcaucaacggauggagagcaagauuggacgcugguacucuagaaccaugagcaaaaccgaacggaugggcauggggcuguaugugaaguacgacggagaucccugggcugacuccgaugcgcugacauucucuggcgucaugguuagcaugaaggagccugggugguacuccuuuggcuucgaaaucaaagacaagaaaugcgaugugccguguaucggaauugagauggugcacgacggcgggaaggaaaccuggcauagcgccgcuacagccaucuauugccucaugggaucuggccagcugcuuugggauacggucaccgggguggacauggcccuguga

SEQ ID NO: 221195 - RNA, 1401 nt, Artificial Sequence; identical to SEQ ID NO: 221028
  derived and/or modified CDS sequence (opt5) from neuraminidase__InfluenzaB__AGX15999

SEQ ID NO: 221196 - RNA, 1401 nt, Artificial Sequence; identical to SEQ ID NO: 221028
  derived and/or modified CDS sequence (opt5) from neuraminidase__InfluenzaB__AGX16010

SEQ ID NO: 221197 - RNA, 1401 nt, Artificial Sequence; identical to SEQ ID NO: 221028
  derived and/or modified CDS sequence (opt5) from neuraminidase__InfluenzaB__AGX16021

SEQ ID NO: 221198 - RNA, 1401 nt, Artificial Sequence
  derived and/or modified CDS sequence (opt5) from neuraminidase__InfluenzaB__AGX16032
augcugcccagcaccauccagacacucacgcuguuccuuaccuccggcggggugcugcucucucuguacgucagcgccucccuuucuuaucugcucuacagcgacauucugcugaaguuuucccaaacagagaucaccgcuccuauuaugccgcucgauugcgccaacgcgucuaauguucaggcugugaacagaagcgccacaaaaggagugacccugcuucugcccgaaccugaguggacauauccccggcucuccuguccuggcagcaccuuccagaaggcccugcuuaucucuccccaccgcuuuggggaaacgaaaggaaauuccgcuccucugauuaucagagagccguucaucgccugcggccccaaggaauguaaacauuuugcucucacccacuacgccgcgcagccugggggauauuacaacggcacacgggaggaccgcaauaagcugagacaucugauuagcgucaagcucggcaaaauccccaccguggagaacucuauuuuccacauggccgcuugguccgggagcgccugccaugauggaaaggaauggacauauaucggcguugacgggccugauucuaaugcucugcuuaaaauuaaguacggagaggccuacaccgacacguaucacuccuacgcgaaaaacauccugcggacacaagaaagcgccuguaauugcauuggcggggauuguuaucucaugaucaccgacggacccgcuuccggcaucucugagugccgcuuucugaagauuagagagggccggaucauuaaggaaaucuucccgacagggcgcgugaaacacaccgaggaauguaccugcggauuugccagcaacaagacaauugagugugcuugcagagauaauuccuacacggccaaacggccuuucgucaaacuuaacguggaaaccgacacagccgagauccgccugaugugcaccgagacauaucucgauacccccagaccuaaugacggcagcaucacggggcccugugaaucugauggagacaagggcuccgggggaauuaagggcggcuuuguucaucagcggauggcuagcaaaaucgggcgcugguacucuagaacaaugagcaagaccaagcggaugggaaugggccuguaugugaaauacgacggggaucccuggaccgacuccgaggcgcuggcccucucuggagucauggugagcauggaggaaccuggcugguacuccuucggguuugaaauuaaggauaaaaagugcgacgugccguguaucggcauugagaugguccacgauggaggcaaaacaaccuggcauagcgcugccacagccaucuauugccugauggggucuggacagcuucugugggacacgguuaccggcguggauauggcucucuga

SEQ ID NO: 221199 - RNA, 1401 nt, Artificial Sequence; identical to SEQ ID NO: 220815
  derived and/or modified CDS sequence (opt5) from neuraminidase__InfluenzaB__AGX16043

SEQ ID NO: 221200 - RNA, 1401 nt, Artificial Sequence; identical to SEQ ID NO: 220817
  derived and/or modified CDS sequence (opt5) from neuraminidase__InfluenzaB__AGX16054

SEQ ID NO: 221201 - RNA, 1401 nt, Artificial Sequence
  derived and/or modified CDS sequence (opt5) from neuraminidase__InfluenzaB__AGX16087
augcugcccagcaccauccagacacucacgcuguuccuuaccuccggcggggugcugcucucucuguacgucagcgccucccuuucuuaucugcucuacagcgacauucugcugaaguuuucccaaacagagaucaccgcuccuauuaugccgcucgauugcgccaacgcgucuaauguucaggcugugaacagaagcgccacaaaaggagugacccugcuucugcccgaaccugaguggacauauccccggcucuccuguccuggcagcaccuuccagaaggcccugcuuaucucuccccaccgcuuuggggaaacgaaaggaaauuccgcuccucugauuaucagagagccguucaucgccugcggccccaaggaauguaaacauuuugcucucacccacuacgccgcgcagccugggggauauuacaacggcacacgggaggaccgcaauaagcugagacaucugauuagcgucaagcucggcaaaauccccaccguggagaacucuauuuuccacauggccgcuugguccgggagcgccugccaugauggacgggaauggacauauaucggcguugacgggccugauucuaaugcucugcuuaagauuaaauacggagaggccuacaccgacacguaucacuccuacgcgaagaacauccugcgcacacaagaaagcgccuguaauugcauuggcggggauuguuaucucaugaucaccgacggacccgcuuccggcaucucugagugcagauuucugaaaauucgggagggccgcaucauuaaggaaaucuucccgacagggagagugaagcacaccgaggaauguaccugcggauuugccagcaacaaaacaauugagugugcuugccgggauaauaacuacacggccaagcgcccuuucgucaaacuuaauguggaaaccgacacagccgagaucagacugaugugcaccgagacauaucucgauacgccccggccuaacgacggcuccaucaccgggcccugugaaagcaauggagauaagggcucugggggaauuaaaggcggcuuuguucaucagcgcauggcuuccaagaucgggagaugguacagccggacaaugucuaaaaccaagagaaugggaaugggccuguaugugaaguacgacggggaccccuggaccgauagcgaggcgcuggcccucuccggagucauggugucuauggaggaaccuggcugguacagcuucggguuugaaauuaaagacaagaaaugcgaugugccguguaucggcauugagaugguccacgacggaggcaagacaaccuggcauuccgcugccacagccaucuauugccugauggggagcggacagcuucugugggauacgguuaccggcguggacauggcucucuga

SEQ ID NO: 221202 - RNA, 1401 nt, Artificial Sequence
  derived and/or modified CDS sequence (opt5) from neuraminidase__InfluenzaB__AGX16109
augcugcccagcaccauccagacacucacgcuguuccuuaccuccggcggggugcugcucucucuguacgucagcgccucccuuucuuaucugcucuacagcgacauucugcugaaguuuucccaaacagagaucaccgcuccuacaaugccgcucgauugcgccaacgcgucuaauguucaggcugugaacagaagcgccaccaaaggagugacacugcuucugcccgaaccugaguggaccuauccccggcucuccuguccuggcagcacguuccagaaggcccugcuuauuucuccccaccgcuuuggggaaaccaaaggaaauuccgcuccucugaucauuagagagccguucaucgccugcggccccaaggaauguaaacauuuugcucucacacacuacgccgcgcagccugggggauauuacaacggcacccgggaggaccgcaauaagcugagacaucugaucagcgucaagcucggcaaaauucccacaguggagaacucuaucuuccacauggccgcuugguccgggagcgccugccaugauggacgggaauggaccuauguuggcguggacgggccugauucuaaugcucugcuuaagauuaaauacggagaggccuacacggacacauaucacuccuacgcgaagaacauccugcgcacccaagaaagcgccuguaauugcauuggcggggauuguuaucucaugaucacagacggacccgcuuccggcauuucugagugcagauuucugaaaauccgggagggccgcaucauuaaggaaaucuucccgaccgggagagucaagcacaccgaggaauguacaugcggauuugccagcaacaaaacgauugagugugcuugccgggauaauuccuacaccgccaagcgcccuuucgugaaacuugacguugaaacagauaccgccgagaucagacugaugugcacagagaccuaucucgacacgccccggccuaacgauggcagcauuacagggcccugugaagcuaauggagacaagggcucugggggaaucaaaggcggcuuugugcaucagcgcauggcguccaagaucgggagaugguacagccggaccaugucuaaaaccaagagaaugggaaugggccuguaugucaaguacgacggggaucccuggacagacagcgaggcccuggcucucuccggagugauggugucuauggaggaaccuggcugguacagcuucggguuugaaauuaaagauaagaaaugcgacgucccguguaucggcauugagaugguucacgauggaggcaagaccacauggcauuccgccgccacggcuaucuauugccugauggggagcggacagcuucugugggacaccgugacaggcguggauauggcccucuga

SEQ ID NO: 221203 - RNA, 1401 nt, Artificial Sequence
  derived and/or modified CDS sequence (opt5) from neuraminidase__InfluenzaB__AGX16120
augcugcccagcaccauccagacacucacgcuguuccuuaccuccggcggggugcugcucucucuguacgucagcgccucccuuucuuaucugcucuacagcgacauucugcugaaguuuuccacaaccgagaucacagcuccuaccaugccgcucgauugcgccaacgcgucuaauguucaagcugugaacagaagcgccacaaaaggagugaccuuccugcuucccgaaccugaguggacguauccccggcuguccuguccuggcagcaccuuucagaaggcccuccugauuucuccccaccgcuucggggaaacaaaaggaaauuccgcuccucuuaucauuagagagccguuuaucgccugcggccccaaggaauguaaacauuucgcucugacccacuacgccgcgcagccugggggauauuacaacggcacacgggaggaccgcaauaagcucagacaucugaucagcgucaagcugggcaaaauucccaccguggagaacucuaucuuucacauggccgcuugguccgggagcgccugccaugauggaaaggaauggacguauauuggcguugacgggccugauucuaaugcucuccugaaaaucaaguacggagaggccuacacagacaccuaucacuccuacgcgaacaauauucuucggacacaggaaagcgccuguaacugcaucggcgggaauuguuaucugaugauuaccgauggauccgcuucuggcaucagcgagugccgcuuccucaaaaucagagagggccggauuaucaaggaaauuuuucccaccgggcgcgugaagcacacagaggaauguacgugcggauucgccuccaacaaaaccaucgagugugcuugcagagacaauagcuacacagccaagcggccguuugucaaacugaacguggaaaccgauacagccgagauucgccuuaugugcaccgagacguaucuggacacaccuagacccgaugacggcucuaucaccgggccuugugaauccaauggaaacaagggcagcgggggaaucaaaggcggcuucguucaucaacggauggcuucuaagauugggcgcugguacagcagaaccauguccaaaacaaagcggaugggaaugggccucuaugugaaguacgauggggaccccuggaccgacucugaugcgcuggcccugagcggagucaugguguccauggaggaacccggcugguacagcuuuggguucgagaucaaagacaagaaaugcgaugugccuuguauuggcaucgaaaugguccacgacggaggcaaggagacauggcauucugcugccacggccauuuauugccucaugggguccggacagcugcuuugggauaccguuacaggcguggacauggcucuguga

SEQ ID NO: 221204 - RNA, 1401 nt, Artificial Sequence; identical to SEQ ID NO: 221203
  derived and/or modified CDS sequence (opt5) from neuraminidase__InfluenzaB__AGX16131

SEQ ID NO: 221205 - RNA, 1401 nt, Artificial Sequence; identical to SEQ ID NO: 221203
  derived and/or modified CDS sequence (opt5) from neuraminidase__InfluenzaB__AGX16142

SEQ ID NO: 221206 - RNA, 1401 nt, Artificial Sequence
  derived and/or modified CDS sequence (opt5) from neuraminidase__InfluenzaB__AGX16153
augcugcccagcaccauccagacacucacgcuguuccuuaccuccggcggggugcugcucucucuguacgucagcgccucccuuucuuaucugcucuacagcgacauucugcugaaguuuucccaaacagagaucaccgcuccuauuaugccgcucgauugcgccaacgcgucuaauguucaggcugugaacagaagcgccacacggggagugacccugcuucugcccgaaccugaguggacauauccccgccucuccuguccuggcagcaccuuccagaaagcccugcuuaucucuccccacagauuuggggaaacgaagggaaauuccgcuccucugauuauccgggagccguucaucgccugcggccccaaagaauguaagcauuuugcucucacccacuacgccgcgcagccugggggauauuacaacggcacacgcgaggacagaaauaaacugcggcaucugauuagcgucaagcucggcaagauccccaccguggagaacucuauuuuccacaugacagccugguccgggagcgcuugccaugauggacgcgaauggaccuauaucggcguugacgggccugauucuaaugcccugcuuaaaauuaaguacggagaggcuuacacggacacauaucacuccuacgccaaaaacauccugagaacccaagaaagcgcguguaauugcauuggcggggauuguuaucucaugaucacagacggacccgccuccggcaucucugagugccgguuucugaagauucgcgagggcagaaucauuaaagaaaucuucccgaccgggcgggugaagcacaccgaggaauguacaugcggauuugcuagcaacaagacgauugagugugccugccgcgauaauuccuacaccgcuaaaagaccuuucgucaaacuuaacguggaaacagacaccgccgagauccggcugaugugcacagagaccuaucucgauacgccccgcccuaaugacggcagcaucacagggcccugugaaucuaacggagauaagggcuccgggggaauuaagggcggcuuuguucaucagagaauggccagcaaaaucgggcggugguacucuagaaccaugagcaagaccaaacgcaugggaaugggccuguaugugaaguacgacggggaccccuggacagauuccgaggcucuggcgcucucuggagucauggugagcauggaggaaccuggcugguacuccuucggguuugaaauuaaggacaaaaagugcgaugugccguguaucggcauugagaugguccacgacggaggcaaaaccacauggcauagcgccgcuacggccaucuauugccugauggggucuggacagcuucugugggauaccguuacaggcguggacauggcccucuga

SEQ ID NO: 221207 - RNA, 1401 nt, Artificial Sequence; identical to SEQ ID NO: 221201
  derived and/or modified CDS sequence (opt5) from neuraminidase__InfluenzaB__AGX16164

SEQ ID NO: 221208 - RNA, 1401 nt, Artificial Sequence; identical to SEQ ID NO: 220860
  derived and/or modified CDS sequence (opt5) from neuraminidase__InfluenzaB__AGX16197

SEQ ID NO: 221209 - RNA, 1401 nt, Artificial Sequence; identical to SEQ ID NO: 220860
  derived and/or modified CDS sequence (opt5) from neuraminidase__InfluenzaB__AGX16208

SEQ ID NO: 221210 - RNA, 1401 nt, Artificial Sequence; identical to SEQ ID NO: 220860
  derived and/or modified CDS sequence (opt5) from neuraminidase__InfluenzaB__AGX16219

SEQ ID NO: 221211 - RNA, 1401 nt, Artificial Sequence; identical to SEQ ID NO: 220699
  derived and/or modified CDS sequence (opt5) from neuraminidase__InfluenzaB__AGX16230

SEQ ID NO: 221212 - RNA, 1401 nt, Artificial Sequence
  derived and/or modified CDS sequence (opt5) from neuraminidase__InfluenzaB__AGX16241
augcugcccagcaccauccagacacucacgcuguuccuuaccuccggcggggugcugcucucucuguacgucagcgccucccuuucuuaucugcucuacagcgacauucugcugaaguuuucccaaacagagaucaccgcuccuauuaugccgcucgauugcgccaacgcgucuaauguucaggcugugaaccacagcgccacaaaaggagugacccugcuucugcccgaaccugaguggacauaucccagacucuccuguccuggcagcaccuuccagaaggcccugcuuaucucuccccaucgguuuggggaaacgaaaggaaauuccgcuccucugauuauccgcgagccguucaucgccugcggccccaaggaauguaaacacuuugcucucacccauuacgccgcgcagccugggggauauuacaacggcacaagagaggaccggaauaagcugcgccaccugauuagcgucaagcucggcaaaauccccaccguggagaacucuauuuuccauauggccgcuugguccgggagcgccugccacgauggaagagaauggacauauaucggcguugacgggccugauucuaaugcucugcuuaagauuaaauacggagaggccuacaccgacacguaucacuccuacgcgaagaacauccugcggacacaagaaagcgccuguaauugcauuggcggggauuguuaucucaugaucaccgacggacccgcuuccggcaucucugagugccgcuuucugaaaauuagagagggccggaucauuaaggaaaucuucccgacagggcgcgugaagcauaccgaggaauguaccugcggauuugccagcaacaaaacaauugagugugcuugcagagauaauuccuacacggccaagcggccuuucgucaaacuuaacguggaaaccgacacagccgagauccgccugaugugcaccgagacauaucucgauacccccagaccuaaugacggcagcaucauugggcccugugaaucuaacggagauaagggcuccgggggaaucaaaggcggcuuuguucaccagcggauggcuagcaagauugggcgcugguacucuagaacgaugagcaaaacaaagcggaugggaaugggccuguaugugaaguacgacggggaccccuggaccgauuccgaggcgcugacccucucuggagucauggugagcauggaggaaccuggcugguacuccuucggguuugaaaucaaagacaagaaaugcgaugugccguguauuggcaucgagaugguccaugacggaggcaagacaaccuggcacagcgccgcuacagccaucuauugccugauggggucuggacagcuucugugggauacgguuaccggcguggacauggcccucuga

SEQ ID NO: 221213 - RNA, 1401 nt, Artificial Sequence
  derived and/or modified CDS sequence (opt5) from neuraminidase__InfluenzaB__AGX16252
augcugcccagcaccauccagacacucacgcuguuccuuaccuccggcggggugcugcucucucuguacgucagcgccucccuuucuuaucugcucuacagcgacauucugcugaaguuuucccaaacagagaucaccgcuccuauuaugccgcucgauugcgccaacgcgucuaauguucaggcugugaacagaagcgccgccaaaggagugacacugcuucugcccgaaccugagugggcuuauccccggcucuccuguccuggcagcaccuuccagaaggcccugcuuaucucuccccaccgcuuuggggaaacaaaaggaaauuccgcuccucugauuaucagagagccguucaucgccugcggccccaccgaauguaagcauuuugcgcucacgcacuacgccgcucagccugggggauauuacaacggcacccgggaggaccgcaauaaacugagacaucugauuagcgucaagcucggcaagauccccacaguggagaacucuauuuuccacauggccgcuugguccgggagcgccugccaugauggaaaagaauggaccuauaucggcguugacgggccugauucuaaugcgcugcuuaagauuaaauacggagaggccuacacagacaccuaucacuccuacgcuaagaacauccugcggacgcaagaaagcgccuguaauugcauuggcggggauuguuaucucaugaucacagacggacccgcuuccggcaucucugagugccgcuuucugaaaauuagagagggccggaucauuaaggaaaucuucccgaccgggcgcgugaagcacacagaggaauguaccugcggauuugccagcaacaaaaccauugagugugccugcagagauaaucgguacacagcuaagcgcccuuucgucaaacuuaacguggaaacggacaccgcggagaucagacugaugugcacagagaccuaucucgauacaccccggccuaaugacggcuccaucaccgggcccugugaaagcgauggagacaagggcucugggggaauuaaaggcggcuuuguucaucagcgcauggccuccaagaucgggagaugguacagccggacgaugucuaaaacaaagagaaugggaaugggccuguaugugaaguacgacggggaucccuggaccgacagcgaggcucuggcccucuccggagucauggugucuauggaggaaccuggcugguacagcuucggguuugaaauuaaagauaagaaaugcgacgugccguguaucggcauugagaugguccacgauggaggcaagaccacauggcauuccgccgcuaccgccaucuauugccugauggggagcggacagcuucugugggacacaguuacgggcguggauauggcgcucuga

SEQ ID NO: 221214 - RNA, 1401 nt, Artificial Sequence; identical to SEQ ID NO: 220860
  derived and/or modified CDS sequence (opt5) from neuraminidase__InfluenzaB__AGX16274

SEQ ID NO: 221215 - RNA, 1401 nt, Artificial Sequence
  derived and/or modified CDS sequence (opt5) from neuraminidase__InfluenzaB__AGX16285
augcugcccagcaccauccagacacucacgcuguuccuuaccuccggcggggugcugcucucucuguacgucagcgccucccuuucuuaucugcucuacagcgacauucugcugaaguuuucccaaacagagaucaccgcuccuauuaugccgcucgauugcgccaacgcgucuaauguucaggcugugaacagaagcgccgccaaaggagugacacugcuucugcccgaaccugaguggaccuauccccggcucuccuguccuggcagcacauuccagaaggcucugcuuaucucuccccaccgcuuuggggaaaccaaaggaaauuccgccccucugauuaucagagagccguucaucgcuugcggccccacggaauguaagcauuuugcccucacccacuacgcggcccagccugggggauauuacaacggcacacgggaggaccgcaauaaacugagacaucugauuagcgucaagcucggcaagauccccaccguggagaacucuauuuuccacauggcugccugguccgggagcgcuugccaugauggaaaagaauggacauauaucggcguugacgggccugauucuaaugcccugcuuaagauuaaauacggagaggcguacaccgacacguaucacuccuacgccaagaacauccugcggacacaagaaagcgcuuguaauugcauuggcggggauuguuaucucaugaucaccgacggacccgccuccggcaucucugagugccgcuuucugaaaauuagagagggccggaucauuaaggaaaucuucccgacagggcgcgugaagcacaccgaggaauguaccugcggauuugcuagcaacaaaacaauugagugugccugcagagauaauuccuacacggccaagcggccuuucgucaaacuuaacguggaaaccgacacagcugagauccgccugaugugcaccgagacauaucucgauacccccagaccuaaugacggcagcacgacagggcccugugaaucugauggagacaagggcuccgggggaaucaaaggcggcuuuguucaucagcggauggcgagcaagauugggcgcugguacucuagaaccaugagcaaaaccaagcggaugggaaugggccuguaugugaaguacgacggggaucccuggacagacuccgaggcccuggcucucucuggagucauggugagcauggaggaaccuggcugguacuccuucggguuugaaaucaaagauaagaaaugcgacgugccguguauuggcaucgagaugguccacgauggaggcaagaccacauggcauagcgccgccacggcuauuuauugccugauggggucuggacagcuucugugggacaccguuacaggcguggauauggcccucuga

SEQ ID NO: 221216 - RNA, 1401 nt, Artificial Sequence; identical to SEQ ID NO: 220860
  derived and/or modified CDS sequence (opt5) from neuraminidase__InfluenzaB__AGX16296

SEQ ID NO: 221217 - RNA, 1401 nt, Artificial Sequence; identical to SEQ ID NO: 220707
  derived and/or modified CDS sequence (opt5) from neuraminidase__InfluenzaB__AGX16307

SEQ ID NO: 221218 - RNA, 1401 nt, Artificial Sequence; identical to SEQ ID NO: 220860
  derived and/or modified CDS sequence (opt5) from neuraminidase__InfluenzaB__AGX16329

SEQ ID NO: 221219 - RNA, 1401 nt, Artificial Sequence
  derived and/or modified CDS sequence (opt5) from neuraminidase__InfluenzaB__AGX16362
augcugcccagcaccauccagacacucacgcuguuccuuaccuccggcggggugcugcucucucuguacgucagcgccucccuuucuuaucugcucuacagcgacauucugcugaaguuuucccaaacagagaucaccgcuccuauuaugccgcucgauugcgccaacgcgucuaauguucaggcugugaacagaagcgccgccaaaggagugacacugcuucugcccgaaccugaguggaccuauccccggcucuccuguccuggcagcacauuccagaaggcucugcuuaucucuccccaccgcuuuggggaaaccaaaggaaauuccgccccucugauuaucagagagccguucaucgcuugcggccccacggaauguaagcauuuugcccucacccacuacgcggcccagccugggggauauuacaacggcacacgggaggaccgcaauaaacugagacaucugauuagcgucaagcucggcaagauccccaccguggagaacucuauuuuccacauggcugccugguccgggagcgcuugccaugauggaaaagaauggacauauaucggcguugacgggccugauucuaaugcccugcuuaagauuaaauacggagaggcguacaccgacacguaucacuccuacgccaagaacauccugcggacacaagaaagcgcuuguaauugcauuggcggggauuguuaucucaugaucaccgacggacccgccuccggcgugucugagugccgcuuucugaaaaucagagagggccggauuaucaaggaaauuuucccgacagggcgcgucaagcacaccgaggaauguaccugcggauuugcuagcaacaaaacaaucgagugugccugcagagauaauuccuacacggccaagcggccuuucgugaaacuuaacguugaaaccgacacagcugagauucgccugaugugcaccgagacauaucucgauacccccagaccuaaugacggcagcaucacggggcccugugaaucugauggagacaagggcuccgggggaaucaaaggcggcuuugugcaucagcggauggcgagcaagauugggcgcugguacucuagaacaaugagcaaaaccaagcggaugggaaugggccuguaugucaaguacgacggggaucccuggaccgacuccgaggcccuggcucucucuggagugauggugagcauggaggaaccuggcugguacuccuucggguuugaaaucaaagauaagaaaugcgacgucccguguauuggcaucgagaugguucacgauggaggcaagacaaccuggcauagcgccgccacagcuauuuauugccugauggggucuggacagcuucugugggacacggugaccggcguggauauggcccucuga

SEQ ID NO: 221220 - RNA, 1401 nt, Artificial Sequence; identical to SEQ ID NO: 221032
  derived and/or modified CDS sequence (opt5) from neuraminidase__InfluenzaB__AGX16373

SEQ ID NO: 221221 - RNA, 1401 nt, Artificial Sequence
  derived and/or modified CDS sequence (opt5) from neuraminidase__InfluenzaB__AGX16384
augcugcccagcaccauccagacacucacgcuguuccuuaccuccggcggggugcugcucucucuguacgucagcgccucccuuucuuaucugcucuacagcgacauucugcugaaguuuucccaaacagagaucaccgcuccuauuaugccgcucgauugcgccaacgcgucuaauguucaggcugugaacagaagcgccgccaaaggagugacacugcuucugcccgaaccugaguggaccuauccccggcucuccuguccuggcagcacauuccagaaggcucugcuuaucucuccccaccgcuuuggggaaaccaaaggaaauuccgccccucugauuaucagagagccguucaucgcuugcggccccacggaauguaagcauuuugcccucacccacuacgcggcccagccugggggauauuacaacggcacacgggaggaccgcaauaaacugaagcaucugauuagcgucaagcucggcaaaauccccaccguggagaacucuauuuuccacauggcugccugguccgggagcgcuugccaugauggaaaggaauggacauauaucggcguugacgggccugauucuaaugcccugcuuaaaauuaaguacggagaggcguacaccgacacguaucacuccuacgccaaaaacauccugagaacacaagaaagcgcuuguaauugcauuggcggggauuguuaucucaugaucaccgacggacccgccuccggcaucucugagugccgguuucugaagauucgcgagggcagaaucauuaaggaaaucuucccgacagggcgggugaaacacaccgaggaauguaccugcggauuugcuagcaacaagacaauugagugugccugccgcgauaauuccuacacggccaaaagaccuuucgucaaacuuaacguggaaaccgacacagcugagauccggcugaugugcaccgagacauaucucgauacgccccgcccuaaugacggcagcaucaccgggcccugugaaucugauggagacaagggcuccgggggaauuaagggcggcuuuguucaucagagaauggcgagcaaaaucgggcggugguacucucgcacaaugagcaagaccaagagaaugggaaugggccuguaugugaaauacgacggggaucccuggaccgacuccgaggcccuggcucucucuggagucauggugagcauggaggaaccuggcugguacuccuucggguuugaaauuaaggauaaaaagugcgacgugccguguaucggcauugagaugguccacgauggaggcaaaacaaccuggcauagcgccgccacagcuaucuauugccugauggggucuggacagcuucugugggacacgguuaccggcguggauauggcccucuga

SEQ ID NO: 221222 - RNA, 1401 nt, Artificial Sequence; identical to SEQ ID NO: 220889
  derived and/or modified CDS sequence (opt5) from neuraminidase__InfluenzaB__AGX16406

SEQ ID NO: 221223 - RNA, 1401 nt, Artificial Sequence; identical to SEQ ID NO: 220889
  derived and/or modified CDS sequence (opt5) from neuraminidase__InfluenzaB__AGX16427

SEQ ID NO: 221224 - RNA, 1401 nt, Artificial Sequence; identical to SEQ ID NO: 220889
  derived and/or modified CDS sequence (opt5) from neuraminidase__InfluenzaB__AGX16438

SEQ ID NO: 221225 - RNA, 1401 nt, Artificial Sequence; identical to SEQ ID NO: 220889
  derived and/or modified CDS sequence (opt5) from neuraminidase__InfluenzaB__AGX16449

SEQ ID NO: 221226 - RNA, 1401 nt, Artificial Sequence; identical to SEQ ID NO: 220889
  derived and/or modified CDS sequence (opt5) from neuraminidase__InfluenzaB__AGX16460

SEQ ID NO: 221227 - RNA, 1401 nt, Artificial Sequence
  derived and/or modified CDS sequence (opt5) from neuraminidase__InfluenzaB__AGX16471
augcugcccagcaccauccagacacucacgcuguuccuuaccuccggcggggugcugcucucucuguacgucagcgccucccuuucuuaucugcucuacagcgacauucugcugaaguuuucccaaacagagaucaccgcuccuauuaugccgcucgauugcgccaacgcgucuaauguucaggcugugaacagaagcgccgccaaaggagugacacugcuucugcccgaaccugaguggaccuauccccggcucuccuguccuggcagcacauuccagaaggcucugcuuaucucuccccaccgcuuuggggaaaccaaaggaaauuccgccccucugauuaucagagagccguucaucgcuugcggccccacggaauguaagcauuuugcccucacccacuacgcggcccagccugggggauauuacaacggcacacgggaggaccgcaauaaacugagacaucugauuagcgucaagcucggcaagauccccaccguggagaacucuauuuuccacauggcugccugguccgggagcgcuugccaugauggaaaagaauggacauauaucggcguugacgggccugauucuaaugcccugcuuaagauuaaauacggagaggcguacaccgacacguaucacuccuacgccaagaacauccugcggacacaagaaagcgcuuguaauugcauuggcggggauuguuaucucaugaucaccgacggacccgccuccggcaucucugagugccgcuuucugaaaauuagagagggccggaucauuaaggaaaucuucccgacagggcgcgugaagcacaccgaggaauguaccugcggauuugcuagcaacaaaacaauugagugugccugcagagauaauuccuacacggccaagcggccuuucgucaaacuuaacguggaaaccgacacagcugagauccgccugaugugcaccaagacauaucucgauacccccagaccuaaugacggcagcaucacggggcccugugagucugauggagacaaaggcuccgggggaauuaagggcggcuuuguucaucagcggauggcgagcaaaaucgggcgcugguacucuagaacaaugagcaagacccggagaaugggaaugggccuguaugugaaguacgacggggaucccuggaccgacuccgaagcccuggcucucucuggagucauggugagcauggaggaaccuggcugguacuccuucggguuugagauuaaagauaagaaaugcgacgugccguguaucggcauugaaaugguccacgauggaggcaagacaaccuggcauagcgccgccacagcuaucuauugccugauggggucuggacagcuucugugggacacgguuaccggcguggauauggcccucuga

SEQ ID NO: 221228 - RNA, 1401 nt, Artificial Sequence; identical to SEQ ID NO: 220889
  derived and/or modified CDS sequence (opt5) from neuraminidase__InfluenzaB__AGX16482

SEQ ID NO: 221229 - RNA, 1401 nt, Artificial Sequence
  derived and/or modified CDS sequence (opt5) from neuraminidase__InfluenzaB__AGX16493
augcugcccagcaccauccagacacucacgcuguuccuuaccuccggcggggugcugcucucucuguacgucagcgccucccuuucuuaucugcucuacagcgacauucugcugaaguuuucccaaacagagaucaccgcuccuauuaugccgcucgauugcgccaacgcgucuaauguucaggcugugaacagaagcgccgccaaaggagugacacugcuucugcccgaaccugaguggaccuauccccggcucuccuguccuggcagcacauuccagaaggcucugcuuaucucuccccaccgcuuuggggaaaccaaaggaaauuccgccccucugauuaucagagagccguucaucgcuugcggccccacggaauguaagcauuuugcccucacccacuacgcggcccagccugggggauauuacaacggcacacgggaggaccgcaauaaacugagacaucugauuagcgucaagcucggcaagauccccaccguggagaacucuauuuuccacauggcugccugguccgggagcgcuugccaugauggaaaagaauggacauauaucggcguugacgggccugauucuaaugcccugcuuaagauuaaauacggagaggcguacaccgacacguaucacuccuacgccaagaacauccugcggacacaagaaagcgcuuguaauugcauuggcggggauuguuaucucaugaucaccgacggacccgccuccggcaucucugagugccgcuuucugaaaauuagagagggccggaucauuaaggaaaucuucccgacagggcgcgugaagcacaccgaggaauguaccugcggauuugcuagcaacaaaacaauugagugugccugcagagauaauuccuacacggccaagcggccuuucgucaaacuuaacguggaaaccgacacagcugagauccgccugaugugcaccgagacauaucucgauacccccagaccuaaugacggcagcaucacggggcccugugaaucugauggagacaagggcuccgggggaauuaaaggcggcuuuguucaucagcggauggcgagcaagaucgggcgcugguacucuagaacaaugagcaaaaccaagcggaugggaaugggccuguaugugaaguacgacggggaucccuggaccgacuccgaggcccuggcucucucuggagucguggugagcauggaggaaccuggcugguacuccuucggguuugaaauuaaagauaagaaaugcgacgucccguguaucggcauugagaugguucacgauggaggcaagacaaccuggcauagcgccgccacagcuaucuauugccugauggggucuggacagcuucugugggacacggugaccggcguggauauggcccucuga

SEQ ID NO: 221230 - RNA, 1401 nt, Artificial Sequence; identical to SEQ ID NO: 220688
  derived and/or modified CDS sequence (opt5) from neuraminidase__InfluenzaB__AGX16504

SEQ ID NO: 221231 - RNA, 1401 nt, Artificial Sequence; identical to SEQ ID NO: 220688
  derived and/or modified CDS sequence (opt5) from neuraminidase__InfluenzaB__AGX16515

SEQ ID NO: 221232 - RNA, 1401 nt, Artificial Sequence
  derived and/or modified CDS sequence (opt5) from neuraminidase__InfluenzaB__AGX16548
augcugcccagcaccauccagacacucacgcuguuccuuaccuccggcggggugcugcucucucuguacgucagcgccucccuuucuuaucugcucuacagcgacauucugcugaaguuuuccccuacagagaucaccgcuccgacaaugccccucgauugcgccaacgcgucuaauguucaagcugugaacagaagcgccaccaaaggagugacacugcuucugccugaacccgaguggaccuauccucggcucuccugucccggcagcacguuccagaaggcccugcuuauuucuccucaccgcuuuggggaaaccaaaggaaauuccgcuccgcugaucauuagagagcccuucaucgccugcggcccuaaggaauguaaacauuuugcucucacacacuacgccgcgcagcccgggggauauuacaacggcacccggggcgaccgcaauaagcugagacaucugaucagcgucaagcucgggaaaauuccuacaguggagaacucuaucuuccacauggccgcuugguccggaagcgccugccaugauggcaaggaguggaccuauauugggguugacggacccgauaauaacgcucugcuuaaaaucaaguacggcgaagccuacacggacacauaucacucuuacgcgaauaacauucugcggacccaggaguccgccuguaauugcaucgggggaaacuguuaucucaugauuacagauggcagcgcuuccggcaucucugaaugccgcuuucugaaaaucagagaggggcggauuaucaaggagauuuucccgaccggacgcgugaagcacaccgaagaguguacaugcggcuuugccagcaauaaaacgaucgaaugugcuugcagagacaacuccuacaccgccaagcggccuuucgucaaacuuaauguggagacagauaccgccgaaauucgccugaugugcacagagaccuaucucgacacgcccagaccugaugacgggagcaucacaggacccugugagucuaacggcgauaacggguccggaggcaucaagggcggguuuguucaucaacggauggcuagcaaaauuggacgcugguacucuagaaccaugagcaagaccaaacggaugggcauggggcuguaugugaaguacgacggagaccccugggcggauuccgacgcccuggcucucucuggcgucauggugagcauggaggaaccugggugguacuccuucggcuuugaaaucaaggauaaaaagugcgacgugccguguauuggaaucgagaugguccacgauggcgggaaagaaacauggcauagcgccgccaccgcuauuuauugccugaugggaucuggccagcuucugugggacacaguuacggggguggauauggcccucuga

SEQ ID NO: 221233 - RNA, 1401 nt, Artificial Sequence
  derived and/or modified CDS sequence (opt5) from neuraminidase__InfluenzaB__AGX16559
augcugcccagcaccauccagacacucacgcuguuccuuaccuccggcggggugcugcucucucuguacgucagcgccucccuuucuuaucugcucuacagcgacauucugcugaaguuuuccccuacagagaucauugcuccgaccaugccccucgauugcgccaacgcgucuaauguucaagcugugaacagaagcgccacaaaaggagugacccugcuucugccugaacccgaguggacauauccucggcucuccugucccggcagcaccuuccagaaggcccugcuuaucucuccucaccgcuuuggggaaacgaaaggaaauuccgcuccgcugauuaucagagagcccuucaucgccugcggcccuaaggaauguaaacauuuugcucucacccacuacgccgcgcagcccgggggauauuacaacggcacacggggcgaccgcaauaagcugagacaucugauuagcgucaagcucgggaaaaucccuaccguggagaacucuauuuuccacauggccgcuugguccggaagcgccugccaugauggcaaggaguggacauauaucgggguugacggacccgauaauaacgcucugcuuaaaauuaaguacggcgaagccuacaccgacacguaucacucuuacgcgaauaacauccugcggacacaggaguccgccuguaauugcauugggggaaacuguuaucucaugaucaccgauggcagcgcuuccggcaucucugaaugccgcuuucugaaaauuagagaggggcggaucauuaaggagaucuucccgacaggacgcgugaagcacaccgaagaguguaccugcggcuuugccagcaauaaaacaauugaaugugcuugcagagacaacuccuacacggccaagcggccuuucgucaaacuuaauguggagaccgauacagccgaaauccgccugaugugcaccgagacauaucucgacacccccagaccugaugacgggagcaucacgggacccugugagucuaacggcgauaagggguccggaggcauuaaaggcggguuuguucaucaacggauggcuagcaagaucggacgcugguacucuagaacaaugagcaaaaccaagcggaugggcauggggcuguaugugaaguacgacggagaccccugggcggauuccgacgcccuggcucucucuggcgucauggugagcauggaggaaccugggugguacuccuucggcuuugaaauuagagauaaaaagugcgacgugccguguaucggaauugagaugguccacgauggcgggaaagaaaccuggcauagcgccgccacagcuaucuauugccugaugggaucuggccagcuucugugggacaccguuacagggguggauauggcccucuga

SEQ ID NO: 221234 - RNA, 1401 nt, Artificial Sequence
  derived and/or modified CDS sequence (opt5) from neuraminidase__InfluenzaB__AGX16581
augcugcccagcaccauccagacacucacgcuguuccuuaccuccggcggggugcugcucucucuguacgucagcgccucccuuucuuaucugcucuacagcgacauucugcugaaguuuuccccuacagagaucauugcuccgaccaugccccucgauugcgccaacgcgucuaauguucaagcugugaacagaagcgccacaaaaggagugacccugcuucugccugaacccgaguggacauauccucggcucuccugucccggcagcaccuuccagaaggcccugcuuaucucuccucaccgcuuuggggaaacgaaaggaaauuccgcuccgcugauuaucagagagcccuucaucgccugcggcccuaaggaauguaaacauuuugcucucacccacuacgccgcgcagcccgggggauauuacaacggcacacggggcgaccgcaauaagcugagacaucugauuagcgucaagcucgggaaaaucccuaccguggagaacucuauuuuccacauggccgcuugguccggaagcgccugccaugauggcaaggaguggacauauaucgggguugacggacccgauaauaacgcucugcuuaaaauuaaguacggcgaagccuacaccgacacguaucacucuuacgcgaauaacauccugcggacacaggaguccgccuguaauugcauugggggaaacuguuaucucaugaucaccgauggcagcgcuuccggcaucucugaaugccgcuuucugaaaauuagagaggggcggaucauuaaggagaucuucccgacaggacgcgugaagcacaccgaagaguguaccugcggcuuugccagcaauaaaacaauugaaugugcuugcagagacaacuccuacacggccaagcggccuuucgucaaacuuaauguggagaccgauacagccgaaauccgccugaugugcaccgagacauaucucgacacccccagaccugaugacgggagcaucacgggacccugugagucuaacggcgauaagggguccggaggcauuaaaggcggguuuguucaucaacggauggcuagcaagaucggacgcugguacucuagaacaaugagcaaaaccaagcggaugggcauggggcuguaugugaaguacgacggagaccccugggcggauuccgacgcccuggcucucucuggcgucauggugagcauggaggaaccugggugguacuccuucggcuuugaaauuaaagauaagaaaugcgacgugccguguaucggaauugagaugguccacgauggcgggaaggaaaccuggcauagcgccgccacagcuaucuauugccugaugggaucuggccagcuucugugggacaccguuacagggguggauauggcccucuga

SEQ ID NO: 221235 - RNA, 1401 nt, Artificial Sequence; identical to SEQ ID NO: 221234
  derived and/or modified CDS sequence (opt5) from neuraminidase__InfluenzaB__AGX16592

SEQ ID NO: 221236 - RNA, 1401 nt, Artificial Sequence; identical to SEQ ID NO: 220688
  derived and/or modified CDS sequence (opt5) from neuraminidase__InfluenzaB__AGX16603

SEQ ID NO: 221237 - RNA, 1401 nt, Artificial Sequence; identical to SEQ ID NO: 220754
  derived and/or modified CDS sequence (opt5) from neuraminidase__InfluenzaB__AGX16614

SEQ ID NO: 221238 - RNA, 1401 nt, Artificial Sequence; identical to SEQ ID NO: 221232
  derived and/or modified CDS sequence (opt5) from neuraminidase__InfluenzaB__AGX16625

SEQ ID NO: 221239 - RNA, 1401 nt, Artificial Sequence
  derived and/or modified CDS sequence (opt5) from neuraminidase__InfluenzaB__AGX16636
augcugcccagcaccauccagacacucacgcuguuccuuaccuccggcggggugcugcucucucuguacgucagcgccucccuuucuuaucugcucuacagcgacauucugcugaaguuuuccccuacagagaucauugcuccgaccaugccccucgauugcgccaacgcgucuaauguucaagcugugaacagaagcgccacaaaaggagugacccugcuucugccugaacccgaguggacauauccucggcucuccugucccggcagcaccuuccagaaggcccugcuuaucucuccucaccgcuuuggggaaacgaaaggaaauuccgcuccgcugauuaucagagagcccuucaucgccugcggcccuaaggaauguaaacauuuugcucucacccacuacgccgcgcagcccgggggauauuacaacggcacacggggcgaccgcaauaagcugagacaucugauuagcgucaagcucgggaaaaucccuaccguggagaacucuauuuuccacauggccgcuugguccggaagcgccugccaugauggcaaggaguggacauauaucgggguugacggacccgauaauaacgcucugcuuaaaauuaaguacggcgaagccuacaccgacacguaucacucuuacgcgaauaacauccugcggacacaggaguccgccuguaauugcauugggggaaacuguuaucucaugaucaccgauggcagcgcuuccggcaucucugaaugccgcuuucugaaaauuagagaggggcggaucauuaaggagaucuucccgacaggacgcgugaagcacaccgaagaguguaccugcggcuuugccagcaauaaaacaauugaaugugcuugcagagacaacuccuacacggccaagcggccuuucgucaaacuuaauguggagaccgauacagccgaaauccgccugaugugcaccgagacauaucucgacacccccagaccugaugacgggagcaucacgggacccugugagucuaacggcgauaagggguccggaggcauuaaaggcggguuuguucaucaacggauggcuagcaagaucggacgcugguacucuagaacaaugagcaaaaccaagcggaugggcauggggcuguaugugaaguacgacggagaccccugggcggauuccgacgcccuggcucucucuggcgucauggugagcauggaggaaccugggugguacuccuucggcuuugaaauuaaagauaagaaaugcgacgugccguguaucggaauugagaugguccacgauggcgggaaggaaaccuggcauagcgccgccacagcuaucuauugccugaugggaucuggccagcuucuguggaacaccguuacagggguggacauggcccucuga

SEQ ID NO: 221240 - RNA, 1401 nt, Artificial Sequence; identical to SEQ ID NO: 220686
  derived and/or modified CDS sequence (opt5) from neuraminidase__InfluenzaB__AGX16647

SEQ ID NO: 221241 - RNA, 1401 nt, Artificial Sequence; identical to SEQ ID NO: 221234
  derived and/or modified CDS sequence (opt5) from neuraminidase__InfluenzaB__AGX16658

SEQ ID NO: 221242 - RNA, 1401 nt, Artificial Sequence; identical to SEQ ID NO: 220688
  derived and/or modified CDS sequence (opt5) from neuraminidase__InfluenzaB__AGX16669

SEQ ID NO: 221243 - RNA, 1401 nt, Artificial Sequence; identical to SEQ ID NO: 220754
  derived and/or modified CDS sequence (opt5) from neuraminidase__InfluenzaB__AGX16680

SEQ ID NO: 221244 - RNA, 1401 nt, Artificial Sequence; identical to SEQ ID NO: 220688
  derived and/or modified CDS sequence (opt5) from neuraminidase__InfluenzaB__AGX16691

SEQ ID NO: 221245 - RNA, 1401 nt, Artificial Sequence
  derived and/or modified CDS sequence (opt5) from neuraminidase__InfluenzaB__AGX16702
augcugcccagcaccauccagacacucacgcuguuccuuaccuccggcggggugcugcucucucuguacgucagcgccucccuuucuuaucugcucuacagcgacauucugcugaaguuuuccccuacagagaucaccgcuccgacaaugccccucgauugcgccaacgcgucuaauguucaagcugugaacagaagcgccaccaaaggagugacacugcuucugccugaacccgaguggaccuauccucggcucuccugucccggcagcacguuccagaaggcccugcuuauuucuccucaccgcuuuggggaaaccaaaggaaauuccgcuccgcugaucauuagagagcccuucaucgccugcggcccuaaggaauguaaacauuuugcucucacacacuacgccgcgcagcccgggggauauuacaacggcaagcggggcgaccgcaauaagcugagacaucugaucagcgucaaacucgggaagauuccuaccguggagaacucuaucuuccacauggccgcuugguccggaagcgccugccaugauggcaaagaguggacauauauugggguugacggacccgauaauaacgcucugcuuaagaucaaauacggcgaagccuacaccgacacguaucacucuuacgcgaauaacauucugcggacacaggaguccgccuguaauugcaucgggggaaacuguuaucucaugauuaccgauggcagcgcuuccggcaucucugaaugccgcuuucugaagaucagagaggggcggauuaucaaggagauuuucccgacaggacgcgugaaacacaccgaagaguguaccugcggcuuugccagcaauaagacaaucgaaugugcuugcagagacaacuccuacacggccaaacggccuuucgucaaacuuaauguggagaccgauacagccgaaauucgccugaugugcaccgagacauaucucgacacccccagaccugaugacgggagcaucacgggacccugugagucuaacggcgauaagggguccggaggcaucaagggcggguuuguucaucaacggauggcuagcaaaauuggacgcugguacucuagaacaaugagcaagaccaagcggaugggcauggggcuguaugugaaauacgacggagaccccugggcggauuccgacgcccuggcucucucuggcgucauggugagcauggaggaaccugggugguacuccuucggcuuugaaaucaaggauaaaaagugcgacgugccguguauuggaaucgagaugguccacgauggcgggaaagaaaccuggcauagcgccgccacagcuauuuauugccugaugggaucuggccagcuucugugggacaccguuacagggguggauauggcccucuga

SEQ ID NO: 221246 - RNA, 1401 nt, Artificial Sequence
  derived and/or modified CDS sequence (opt5) from neuraminidase__InfluenzaB__AGX16713
augcugcccagcaccauccagacacucacgcuguuccuuaccuccggcggggugcugcucucucuguacgucagcgccucccuuucuuaucugcucuacagcgacauucugcugaaguuuuccccuacagagaucaccgcuccgacaaugccccucgauugcgccaacgcgucuaauguucaagcugugaacagaagcgccaccaaaggagugacacugcuucugccugaacccgaguggaccuauccucggcucuccugucccggcagcauuuuccagaaggcccugcuuaucucuccucaccgcuuuggggaaacgaaaggaaauuccgcuccgcugauuaucagagagcccuucaucgccugcggcccuaaggaauguaaacauuuugcucucacccacuacgccgcgcagcccgggggauauuacaacggcacacggggcgaccgcaauaagcugagacaucugauuagcgucaagcucgggaaaaucccuaccguggagaacucuauuuuccacauggccgcuugguccggaagcgccugccaugauggcaaggaguggacauauaucgggguugacggacccgauaauaacgcucugcuuaaaauuaaguacggcgaagccuacaccgacacguaucacucuuacgcgaauaacauccugcggacacaggaguccgccuguaauugcauugggggaaacuguuaucucaugaucaccgauggcagcgcuuccggcaucucugaaugccgcuuucugaaaauuagagaggggcggaucauuaaggagaucuucccgacaggacgcgugaagcacaccgaagaguguaccugcggcuuugccagcaauaaaacaauugaaugugcuugcagagacaacuccuacacggccaagcggccuuucgucaaacuuaauguggagaccgauacagccgaaauccgccugaugugcaccgagacauaucucgacacccccagaccugaugacgggagcaucacgggacccugugagucuaacggcgauaagggguccggaggcauuaaaggcggguuuguucaucaacggauggcuagcaagaucggacgcugguacucuagaacaaugagcaaaaccaagcggaugggcauggggcuguaugugaaguacgacggagaccccugggcggauuccgacgcccuggcucucucuggcgucauggugagcauggaggaaccugggugguacuccuucggcuuugaaauuagagauaaaaagugcgacgugccguguaucggaauugagaugguccacgauggcgggaaagaaaccuggcauagcgccgccacagcuaucuauugccugaugggaucuggccagcuucugugggacaccguuacagggguggauauggcccucuga

SEQ ID NO: 221247 - RNA, 1401 nt, Artificial Sequence; identical to SEQ ID NO: 220688
  derived and/or modified CDS sequence (opt5) from neuraminidase__InfluenzaB__AGX16724

SEQ ID NO: 221248 - RNA, 1401 nt, Artificial Sequence; identical to SEQ ID NO: 221234
  derived and/or modified CDS sequence (opt5) from neuraminidase__InfluenzaB__AGX16735

SEQ ID NO: 221249 - RNA, 1401 nt, Artificial Sequence; identical to SEQ ID NO: 221234
  derived and/or modified CDS sequence (opt5) from neuraminidase__InfluenzaB__AGX16746

SEQ ID NO: 221250 - RNA, 1401 nt, Artificial Sequence; identical to SEQ ID NO: 220688
  derived and/or modified CDS sequence (opt5) from neuraminidase__InfluenzaB__AGX16757

SEQ ID NO: 221251 - RNA, 1401 nt, Artificial Sequence
  derived and/or modified CDS sequence (opt5) from neuraminidase__InfluenzaB__AGX16768
augcugcccagcaccauccagacacucacgcuguuccuuaccuccggcggggugcugcucucucuguacgucagcgccucccuuucuuaucugcucuacagcgacauucugcugaaguuuuccccuacagagaucauugcuccgaccaugccccucgauugcgccaacgcgucuaauguucaagcugugaacagaagcgccacaaaaggagugacccugcuucugccugaacccgaguggacauauccucggcucuccugucccggcagcaccuuccagaaggcccugcuuaucucuccucaccgcuuuggggaaacgaaaggaaauuccgcuccgcugauuaucagagagcccuucaucgccugcggcccuaaggaauguaaacauuuugcucucacccacuacgccgcgcagcccgggggauauuacaacggcacacggggcgaccgcaauaagcugagacaucugauuagcgucaagcucgggaaaaucccuaccguggagaacucuauuuuccacauggccgcuugguccggaagcgccugccaugauggcaaggaguggacauauaucgggguugacggacccgauaauaacgcucugcuuaaaauuaaguacggcgaagccuacaccgacacguaucacucuuacgcgaauaacauccugcggacacaggaguccgccuguaauugcauugggggaaacuguuaucucaugaucaccgauggcagcgcuuccggcaucucugaaugccgcuuucugaaaauuagagaggggcggaucauuaaggagaucuucccgacaggacgcgugaagcacaccgaagaguguaccugcggcuuugccagcaauaaaacaauugaaugugcuugcagagacaacuccuacacggccaagcggccuuucgucaaacuuaauguggagaccgauacagccgaaauccgccugaugugcaccgagacauaucucgacacccccagaccugaugacgggagcaucacgggacccuguaagucuaacggcgauaaaggguccggaggcauuaagggcggguuuguucaucaacggauggcuagcaaaaucggacgcugguacucuagaacaaugagcaagaccaagcggaugggcauggggcuguaugugaaauacgacggagaccccugggcggauuccgacgcccuggcucucucuggcgucauggugagcauggaggaaccugggugguacuccuucggcuuugagauuaaggauaaaaagugcgacgugccguguaucggaauugaaaugguccacgauggcgggaaagagaccuggcauagcgccgccacagcuaucuauugccugaugggaucuggccagcuucugugggacaccguuacagggguggauauggcccucuga

SEQ ID NO: 221252 - RNA, 1401 nt, Artificial Sequence; identical to SEQ ID NO: 220754
  derived and/or modified CDS sequence (opt5) from neuraminidase__InfluenzaB__AGX16779

SEQ ID NO: 221253 - RNA, 1401 nt, Artificial Sequence
  derived and/or modified CDS sequence (opt5) from neuraminidase__InfluenzaB__AGX16790
augcugcccagcaccauccagacacucacgcuguuccuuaccuccggcggggugcugcucucucuguacgucagcgccucccuuucuuaucugcucuacagcgacauucugcugaaguuuuccccuacagagaucaccgcuccgacaaugccccucgauugcgccaacgcgucuaauguucaagcugugaacagaagcgccaccaaaggagugacacugcuucugccugaacccgaguggaccuauccucggcucuccugucccggcagcacguuccagaaggcccugcuuauuucuccucaccgcuuuggggaaaccaaaggaaauuccgcuccgcugaucauuagagagcccuucaucgccugcggcccuaaggaauguaaacauuuugcucucacacacuacgccgcgcagcccgggggauauuacaacggcacccggggcgggcgcaauaagcugagacaucugaucagcgucaagcucggaaaaauuccuacaguggagaacucuaucuuccacauggccgcuugguccggcagcgccugccaugacgggaaggaguggaccuauauuggaguugauggccccgacaauaacgcucugcuuaaaaucaaguacggggaagccuacacggauacauaucacucuuacgcgaauaacauucugcggacccaggaguccgccuguaauugcaucggaggcaacuguuaucucaugauuacagacggcagcgcuuccgggaucucugaaugccgcuuucugaaaaucagagagggacggauuaucaaggagauuuucccgaccggccgcgugaagcacaccgaagaguguacaugcggguuugccagcaauaaaacgaucgaaugugcuugcagagauaacuccuacaccgccaagcggccuuucgucaaacuuaauguggagacagacaccgccgaaauucgccugaugugcacagagaccuaucucgauacgcccagaccugacgauggaagcaucacaggccccugugagucuaacggggacaagggauccggcggcaucaaagggggauuuguucaucaacggauggcuagcaagauuggccgcugguacucuagaaccaugagcaaaaccaagcggauggggaugggacuguaugugaaguacgauggcgaccccugggcggacuccgaugcccuggcucucucuggggucauggugagcauggaggaaccuggcugguacuccuucggauuugaaaucagagacaaaaagugcgaugugccguguauuggcaucgagaugguccacgacgggggaaaagaaacauggcauagcgccgccaccgcuauuuauugccugaugggcucugggcagcuucugugggauacaguuacgggaguggacauggcccucuga

SEQ ID NO: 221254 - RNA, 1401 nt, Artificial Sequence
  derived and/or modified CDS sequence (opt5) from neuraminidase__InfluenzaB__AGX16801
augcugcccagcaccauccagacacucacgcuguuccuuaccuccggcggggugcugcucucucuguacgucagcgccucccuuucuuaucugcucuacagcgacauucugcugaaguuuuccccuacagagaucauugcuccgaccaugccccucgauugcgccaacgcgucuaauguucaagcugugaacagaagcgccacaaaaggagugacccugcuucugccugaacccgaguggacauauccucggcucuccugucccggcagcaccuuccagaaggcccugcuuaucucuccucaccgcuuuggggaaacgaaaggaaauuccgcuccgcugauuaucagagagcccuucaucgccugcggcccuaaggaauguaaacauuuugcucucacccacuacgccgcgcagcccgggggauauuacaacggcacacggggcgaccgcaauaagcugagacaucugauuagcgucaagcucgggaaaaucccuaccguggagaacucuauuuuccacauggccgcuugguccggaagcgccugccaugauggcaaggaguggacauauaucgggguugacggacccgauaauaacgcucugcuuaaaauuaaguacggcgaagccuacaccgacacguaucacucuuacgcgaauaacauccugcggacacaggaguccgccuguaauugcauugggggaaacuguuaucucaugaucaccgauggcagcgcuuccggcaucucugaaugccgcuuucugaaaauuagagaggggcggaucauuaaggagaucuucccgacaggacgcgugaagcacaccgaagaguguaccugcggcuuugccagcaauaaaacaauugaaugugcuugcagagacaacuccuacacggccaagcggccuuucgucaaacuuaauguggagaccgauacagccgaaauccgccugaugugcaccgagacauaucucgacacccccagaccuaacgaugggagcaucacgggacccugugagucuaacggcgacaagggguccggaggcauuaaaggcggguuuguucaucaacggauggcuagcaagaucggacgcugguacucuagaacaaugagcaaaaccaagcggaugggcauggggcuguaugugaaguacgauggagaccccugggcggacuccgaugcccuggcucucucuggcgucauggugagcauggaggaaccugggugguacuccuucggcuuugaaauuaaagacaagaaaugcgaugugccguguaucggaauugagaugguccacgacggcgggaaggaaaccuggcauagcgccgccacagcuaucuauugccugaugggaucuggccagcuucugugggauaccguuacagggguggacauggcccucuga

SEQ ID NO: 221255 - RNA, 1401 nt, Artificial Sequence; identical to SEQ ID NO: 220688
  derived and/or modified CDS sequence (opt5) from neuraminidase__InfluenzaB__AGX16812

SEQ ID NO: 221256 - RNA, 1401 nt, Artificial Sequence
  derived and/or modified CDS sequence (opt5) from neuraminidase__InfluenzaB__AGX16823
augcugcccagcaccauccagacacucacgcuguuccuuaccuccggcggggugcugcucucucuguacgucagcgccucccuuucuuaucugcucuacagcgacauucugcugaaguuuuccccuacagagaucaccgcuccgacaaugccccucgauugcgccaacgcgucuaauguucaagcugugaacagaagcgccaccaaaggagugacacugcuucugccugaacccgaguggaccuauccucggcucuccugucccggcagcacguuccagaaggcccugcuuauuucuccucaccgcuuuggggaaaccaaaggaaauuccgcuccgcugaucauuagagagcccuucaucgccugcggcccuaaggaauguaaacauuuugcucucacacacuacgccgcgcagcccgggggauauuacaacggcacccggggcgaccgcaauaagcugagacaucugaucagcgucaagcucgggaaaauuccuacaguggagaacucuaucuuccacauggccgcuugguccggaagcgccugccaugauggcaaggaguggaccuauauugggguugacggacccgauaauaacgcucugcuuaaaaucaaguacggcgaagccuacacggacacauaucacucuuacgcgaauaacauucugcggacccaggaguccgccuguaauugcaucgggggaaacuguuaucucaugauuacagauggcagcgcuuccggcaucucugaaugccgcuuucugaaaaucagagaggggcggauuaucaaggagauuuucccgaccggacgcgugaagcacaccgaagaguguacaugcggcuuugccagcaauaaaacgaucgaaugugcuugcagagacaacuccuacaccgccaagcggccuuucgucaaacuuaauguggagacagauaccgccgaaauucgccugaugugcacagagaccuaucucgacacgcccagaccugcugaugggagcaucacaggacccugugagucuaacggcgacaagggguccggaggcaucaaaggcggguuuguucaucaacggauggcgagcaagauuggacgcugguacucuagaaccaugagcaaaaccaagcggaugggcauggggcuguaugugaaguacgauggagaccccugggccgacuccgaugcucuggcccucucuggcgucauggugagcauggaggaaccugggugguacuccuucggcuuugaaaucaaagacaagaaaugcgaugugccguguauuggaaucgagaugguccacgacggcgggaaggaaacauggcauagcgccgcuaccgccauuuauugccugaugggaucuggccagcuucugugggauacaguuacggggguggacauggcgcucuga

SEQ ID NO: 221257 - RNA, 1401 nt, Artificial Sequence; identical to SEQ ID NO: 220688
  derived and/or modified CDS sequence (opt5) from neuraminidase__InfluenzaB__AGX16834

SEQ ID NO: 221258 - RNA, 1401 nt, Artificial Sequence
  derived and/or modified CDS sequence (opt5) from neuraminidase__InfluenzaB__AGX16845
augcugcccagcaccauccagacacucacgcuguuccuuaccuccggcggggugcugcucucucuguacgucagcgccucccuuucuuaucugcucuacagcgacauucugcugaaguuuuccccuacagagaucaccacaccgaccaugccccucgauugcgcuaacgccucuaauguucaagcggugaacagaagcgcuacaaaaggagugacccugcuucugccugaacccgaguggacguauccucggcucuccugucccggcagcaccuuccagaaggcccugcuugucucuccucaccgcuuuggggaaacaaaaggaaauuccgccccgcugauuaucagagagcccuucauugcuugcggcccuaaggaauguaaacauuuugcccucacccacuacgcugcccagcccgggggauauuacaacggcacacggggcgaccgcaauaagcugagacaucugaucagcgugaagcucgggaaaaucccuaccguugagaacucuauuuuccacauggcggccugguccggaagcgcuugccaugauggcaaggaguggacguauaucgggguggacggacccgauaauaacgcccugcuuaaaauuaaguacggcgaggcuuacacagacaccuaucacucuuacgccaauaacauccugcggacacaggaguccgcguguaauugcauugggggaaacuguuaucucaugaucaccgauggcagcgccuccggcauuucugaaugccgcuuucugaaaaucagagaggggcggaucauuaaggagaucuucccgaccggacgcgucaagcacacagaagaguguacgugcggcuuugcuagcaauaaaaccauugaaugugccugcagagacaacuccuacacagcuaagcggccuuucgugaaacuuaauguugagaccgauacagccgaaauccgccugaugugcaccgagacguaucucgacacacccagaccugaugacgggagcauuaccggacccugugagucuaacggcgauaagggguccggaggcaucaaaggcggguuugugcaucaacggauggccagcaagaucggacgcugguacucuagaaccaugagcaaaacaaagcggaugggcauggggcuguaugucaaguacgacggagaccccugggcugauuccgacgcgcuggcccucucuggcgugauggugagcauggaagaaccugggugguacuccuucggcuuugaaauuaaagauaagaaaugcgacgucccguguaucggaauugagaugguucacgauggcgggaaggaaaccuggcauagcgcugccacagccaucuauugccugaugggaucuggccagcuucugugggacacggugaccgggguggauauggcucucuga

SEQ ID NO: 221259 - RNA, 1401 nt, Artificial Sequence
  derived and/or modified CDS sequence (opt5) from neuraminidase__InfluenzaB__AGX16856
augcugcccagcaccauccagacacucacgcuguuccuuaccuccggcggggugcugcucucucuguacgucagcgccucccuuucuuaucugcucuacagcgacauucugcugaaguuuuccccuacagagaucaccgcuccgacaguuccccucgauugcgccaacgcgucuaaugugcaagcugugaacagaagcgccaccaaaggagucacacugcuucugccugaacccgaguggaccuauccucggcucuccugucccggcagcacguuccagaaggcccugcuuauuucuccucaccgcuuuggggaaaccaaaggaaauuccgcuccgcugaucauuagagagcccuucaucgccugcggcccuaaggaauguaaacauuuugcucucacacacuacgccgcgcagcccgggggauauuacagcggcacccggggcgaccgcaacaagcugagacaucugaucucugugaagcucgggaaaauuccuacaguugaaaauuccaucuuccacauggccgcuuggagcggaucugccugccaugauggcaaggaguggaccuauauugggguggacggacccgauaacaaugcucugcuuaaaaucaaguacggcgaagccuacacggacacauaucacuccuacgcgaacaauauucugcggacccaggagagcgccuguaacugcaucgggggaaauuguuaucucaugauuacagauggcuccgcuucuggcaucagcgaaugccgcuuucugaaaaucagagaggggcggauuaucaaggagauuuucccgaccggacgcgucaagcacaccgaagaguguacaugcggcuuugccuccaacaaaacgaucgaaugugcuugcagagacaauagcuacaccgccaagcggccuuucgugaaacuuaacguugagacagauaccgccgaaauucgccugaugugcacagagaccuaucucgacacgcccagaccugaugacgggucuaucacaggacccugugaguccaauggcgauaaggggagcggaggcaucaaaggcggguuugugcaucaacggauggcuucuaagauuggacgcugguacagcagaaccauguccaaaaacaagcggaugggcauggggcuguaugucaaguacgacggagaccccugggcggauucugacgcccuggcucucagcggcgugaugguguccauggaggagccugggugguacagcuucggcuuugaaaucaaagauaagaaaugcgacgucccguguauuggaaucgagaugguucacgauggcgggaaggaaaccuggcauucugccgccacagcuauuuauugccugaugggauccggccagcuucugugggacaccgugacagggguggauauggcccucuga

SEQ ID NO: 221260 - RNA, 1401 nt, Artificial Sequence; identical to SEQ ID NO: 220688
  derived and/or modified CDS sequence (opt5) from neuraminidase__InfluenzaB__AGX16867

SEQ ID NO: 221261 - RNA, 1401 nt, Artificial Sequence
  derived and/or modified CDS sequence (opt5) from neuraminidase__InfluenzaB__AGX16878
augcugcccagcaccauccagacacucacgcuguuccuuaccuccggcggggugcugcucucucuguacgucagcgccucccuuucuuaucugcucuacagcgacauucugcugaaguuuuccccuacagagcucaccgcuccgacaaugccccuggauugcgccaacgcgucuaauguucaagcugugaacagaagcgccaccaaaggagugacacuucugcucccugaacccgaguggaccuauccucggcuguccugucccggcagcacguuccagaaggcccuucugaucucuccucaccgcuuuggggaaaccaaaggaaauuccgcuccgcucauuaucagagagcccuucauugccugcggcccuaaggaauguaaacauuuugcucugacacacuacgccgcgcagcccgggggauauuacaacggcaagcggggcgaccgcaauaagcugagacaucucaucagcgucaaacuggggaagaucccuaccguggagaacucuauuuuccacauggccgcuugguccggaagcgccugccaugauggcaaagaguggacauauaucgggguugacggacccgauaauaacgcucugcuuaagauuaaauacggcgaagccuacaccgacacguaucacucuuacgcgaauaacauccuccggacacaggaguccgccuguaauugcauugggggaaacuguuaucugaugaucaccgauggcagcgcuuccggcauuucugaaugccgcuuucuuaagaucagagaggggcggaucauuaaggagaucuucccgacaggacgcgugaaacacaccgaagaguguaccugcggcuuugccagcaauaagacaauugaaugugcuugcagagacaacuccuacacggccaaacggccuuucgucaagcugaauguggagaccgauacagccgaaauccgccucaugugcaccgagacauaucuggacacccccagaccugaugacgggagcauuacgggacccugugagucuaacggcgauaacggguccggaggcaucaaaggcggguuuguucaucaacggauggcuagcaagaucggacgcugguacucuagaacaaugagcaaaaccaagcggaugggcauggggcuguaugugaaguacgacggagaccccugggcggauuccgacgcccucgcucugucuggcgucauggugagcauggaggaaccugggugguacuccuucggcuuugaaauuaaagauaagaaaugcgacgugccguguaucggaauugagaugguccacgauggcgggaaggaaaccuggcauagcgccgccacagcuaucuauugccuuaugggaucuggccagcugcucugggacaccguuacagggguggauauggcccuguga

SEQ ID NO: 221262 - RNA, 1401 nt, Artificial Sequence; identical to SEQ ID NO: 221234
  derived and/or modified CDS sequence (opt5) from neuraminidase__InfluenzaB__AGX16889

SEQ ID NO: 221263 - RNA, 1401 nt, Artificial Sequence
  derived and/or modified CDS sequence (opt5) from neuraminidase__InfluenzaB__AGX16900
augcugcccagcaccauccagacacucacgcuguuccuuaccacaggcggggugcugcucucccuguacgucucugccagccuuuccuaucugcucuacucugacauucugcugaaguuuagcccuaccgagaucauugcuccgacaaugccccucgauugcgccaacgcguccaauguucaagcugugaacagaucugccaccaaaggagugacacugcuucugccugaacccgaguggaccuauccucggcucagcugucccggcuccacguuccagaaggcccugcuuaucagcccucaccgcuuuggggaaaccaaaggaaauucugcuccgcugauuaucagagagcccuucaucgccugcggcccuaaggaauguaaacauuuugcucucacacacuacgccgcgcagcccgggggauauuacaacggcacccggggcgaccgcaauaagcugagacaucugauuuccgucaagcucgggaaaaucccuacaguggagaacagcauuuuccacauggccgcuuggucuggauccgccugccaugauggcaaggaguggaccuauaucgggguugacggacccgauaauaacgcucugcuuaaaauuaaguacggcgaagccuacacggacacauaucacagcuacgcgaauaacauccugcggacccaggagucugccuguaauugcauugggggaaacuguuaucucaugaucacagauggcuccgcuagcggcaucuccgaaugccgcuuucugaaaauuagagaggggcggaucauuaaggagaucuucccgaccggacgcgugaagcacaccgaagaguguacaugcggcuuugccucuaauaaaacgauugaaugugcuugcagagacaacagcuacaccgccaagcggccuuucgucaaacuuaauguggagacagauaccgccgaaauccgccugaugugcacagagaccuaucucgacacgcccagaccugaugacggguccaucacaggacccugugagagcaacggcgauaaggggucuggaggcauuaaaggcggguuuguucaucaacggauggcuuccaagaucggacgcugguacagcagaaccaugucuaaaaccaagcggaugggcauggggcuguaugugaaguacgacggagaccccugggcggauagcgacgcccuggcucucuccggcgucauggugucuauggaggaaccugggugguacagcuucggcuuugaaauuaaagauaagaaaugcgacgugccguguaucggaauugagaugguccacgauggcgggaaggaaacauggcauuccgccgccaccgcuaucuauugccugaugggaagcggccagcuucugugggacacaguuacggggguggauauggcccucuga

SEQ ID NO: 221264 - RNA, 1401 nt, Artificial Sequence
  derived and/or modified CDS sequence (opt5) from neuraminidase__InfluenzaB__AGX16911
augcugcccagcaccauccagacacucacgcuguuccuuaccuccggcggggugcugcucucucuguacgucagcgcccuucuguccuaucuccuguacucugacauucugcucaaguuuagcccuacagagaucaccgcuccgacaaugccccuggauugcgccaacgcguccaauguucaagcugugaacagaucugccaccaaaggagugacacuucugcucccugaacccgaguggaccuauccucggcugagcugucccggcuccacguuccagaaggcccuucugauuagcccucaccgcuuuggggaaaccaaaggaaauucugcuccgcucaucauuagagagcccuucaucgccugcggcccuaaggaauguaaacauuuugcucugacacacuacgccgcgcagcccgggggauauuacaacggcacccggggcgaccgcaauaagcugagacaucucaucuccgucaagcuggggaaaauuccuacaguggagaacagcaucuuccacauggccgcuuggucuggauccgccugccaugauggcaaggaguggaccuauauugggguugacggacccgauaauaacgcucugcuuaaaaucaaguacggcgaagccuacacggacacauaucacagcuacgcgaauaacauucuccggacccaggagucugccuguaauugcaucgggggaaacuguuaucugaugauuacagauggcuccgcuagcggcaucuccgaaugccgcuuucuuaaaaucagagaggggcggauuaucaaggagauuuucccgaccggacgcgugaagcacaccgaagaguguacaugcggcuuugccucuaauaaaacgaucgaaugugcuugcagagacaacagcuacaccgccaagcggccuuucgucaaacugaauguggagacagauaccgccgaaauucgccucaugugcacagagaccuaucuggacacgcccagaccugaugacggguccaucacaggacccugugagagcaacggcgauaaggggucuggaggcaucaaaggcggguuuguucaucaacggauggcuuccaagauuggacgcugguacagcagaaccaugucuaaaaccaagcggaugggcauggggcuguaugugaaguacgacggagaccccugggcggauagcgacgcccucgcucuguccggcgucauggugucuauggaggaaccugggugguacagcuucggcuuugaaaucaaagauaagaaaugcgacgugccguguauuggaaucgagaugguccacgauggcgggaaggaaacauggcauuccgccgccaccgcuauuuauugccuuaugggaagcggccagcugcucugggacacaguuacggggguggauauggcccuguga

SEQ ID NO: 221265 - RNA, 1401 nt, Artificial Sequence
  derived and/or modified CDS sequence (opt5) from neuraminidase__InfluenzaB__AGX16922
augcugcccagcaccauccagacacucacgcuguuccuuaccuccggcggggugcugcucucucuguacgucagcgccucccuuucuuaucugcucuacagcgacauucugcugaaguuuuccccuacagagaucaccgcuccgacaaugccccucgauugcgccaacgcgucuaauguucaagcugugaacagaagcgccaccaaaggagugacauuccugcuuccugaacccgaguggaccuauccucggcuguccugucccggcagcacguuucagaaggcccuccugauuucuccucaccgcuucggggaaaccaaaggaaauuccgcuccgcuuaucauuagagagcccuuuaucgccugcggcccuaaggaauguaaacauuucgcucugacacacuacgccgcgcagcccgggggauauuacaacggcacccggggcgaccgcaauaagcucagacaucugaucagcgucaagcuggggaaaauuccuacaguggagaacucuaucuuucacauggccgcuugguccggaagcgccugccaugauggcaaggaguggaccuauauugggguugacggacccgauaauaacgcucuccugaaaaucaaguacggcgaagccuacacggacacauaucacucuuacgcgaauaacauucuucggacccaggaguccgccuguaauugcaucgggggaaacuguuaucugaugauuacagauggcagcgcuuccggcaucucugaaugccgcuuccucaaaaucagagaggggcggauuaucaaggagauuuuuccgaccggacgcgugaagcacaccgaagaguguacaugcggcuucgccagcaauaaaacgaucgaaugugcuugcagagacaacuccuacaccgccaagcggccuuuugucaaacugaauguggagacagauaccgccgaaauucgccuuaugugcacagagaccuaucuggacacgcccagaccugaugacgggagcaucacaggacccugugagucuaacggcgauaagggguccggaggcaucaaaggcggguucguucaucaacggauggcuagcaagauuggacgcugguacucuagaaccaugagcaaaaccaagcggaugggcauggggcucuaugugaaguacgacggagaccccugggcggauuccgacgcccuggcucugucuggcgucauggugagcauggaggaaccugggugguacuccuuuggcuucgaaaucaaagauaagaaaugcgacgugccguguauuggaaucgagaugguccacgauggcgggaaggaaacauggcauagcgccgccaccgcuauuuauugccucaugggaucuggccagcugcuuugggacacaguuacggggguggauauggcccuguga

SEQ ID NO: 221266 - RNA, 1401 nt, Artificial Sequence
  derived and/or modified CDS sequence (opt5) from neuraminidase__InfluenzaB__AGX16933
augcugcccagcaccauccagacacucacgcuguuccuuaccuccggcggggugcugcucucucuguacgucagcgccucccuuucuuaucugcucuacagcgacauucugcugaaguuuuccccuacagagaucaacgcuccgaccaugccccucgauugcgccaaugcgucuaacguucaagcugugaauagaagcgccacaaaaggagugacccugcuucugccugaacccgaguggacauauccucggcucuccugucccggcagcaccuuccagaaggcccugcuuauuucuccucaccgcuuuggggaaacgaaaggaaacuccgcuccgcugaucauuagagagcccuucaucgccugcggcccuaaggaauguaaacauuuugcucucacccacuacgccgcgcagcccgggggauauuacaauggcacacggggcgaccgcaacaagcugagacaucugaucagcgucaagcucgggaaaauuccuaccguggaaaauucuaucuuccacauggccgcuugguccggaagcgccugccaugauggcaaggaguggacauauauugggguugacggacccgauaacaaugcucugcuuaaaaucaaguacggcgaagccuacaccgacacguaucacucuuacgcgaacaauauucugcggacacaggaguccgccuguaacugcaucgggggaaauuguuaucucaugauuaccgauggcagcgcuuccggcaucucugaaugccgcuuucugaaaaucagagaggggcggauuaucaaggagauuuucccgacaggacgcgugaagcacaccgaagaguguaccugcggcuuugccagcaacaaaacaaucgaaugugcuugcagagacaauuccuacacggccaagcggccuuucgucaaacuuaacguggagaccgauacagccgaaauucgccugaugugcaccgagacauaucucgacacccccagaccugaugacgggagcaucacgggacccugugagucuaacggcgauaagggguccggaggcaucaaaggcggguuuguucaucaacggauggcuagcaagauuggacgcugguacucuagaacaaugagcaaaaccaagcggaugggcauggggcuguaugugaaguacgacggagaccccugggcggauuccgacgcccuggcucucucuggcgucauggugagcauggaggagccugggugguacuccuucggcuuugaaaucaaagauaagaaaugcgacgugccguguauuggaaucgagaugguccacgauggcgggaaggaaaccuggcauagcgccgccacagcuauuuauugccugaugggaucuggccagcuucugcucgacaccguuacagggguggauauggcccuguga

SEQ ID NO: 221267 - RNA, 1401 nt, Artificial Sequence
  derived and/or modified CDS sequence (opt5) from neuraminidase__InfluenzaB__AGX16944
augcugcccagcaccauccagacacucacgcuguuccuuaccuccggcggggugcugcucucucuguacgucagcgccucccuuucuuaucugcucuacagcgacauucugcugaaguuuuccccuacagagaucaccgcuccgacaaugccccucgauugcgccaacgcgucuaauguucaagcugugaacagaagcgccaccaaaggagugacacugcuucugccugaacccgaguggaccuauccucggcucuccugucccggcagcacguuccagaaggcccugcuuauuucuccucaccgcuuuggggaaaccaaaggaaauuccgcuccgcugaucauuagagagcccuucaucgccugcggcccuaaggaauguaaacauuuugcucucacacacuacgccgcgcagcccgggggauauuacagcggcacccggggcgaccgcaacaagcugagacaucugaucucugucaagcucgggaaaauuccuacaguggaaaauuccaucuuccacauggccgcuuggagcggaucugccugccaugauggcaaggaguggaccuauauugggguugacggacccgauaacaaugcucugcuuaaaaucaaguacggcgaagccuacacggacacauaucacuccuacgcgaacaauauucugcggacccaggagagcgccuguaacugcaucgggggaaauuguuaucucaugauuacagauggcuccgcuucuggcaucagcgaaugccgcuuucugaaaaucagagaggggcggauuaucaaggagauuuucccgaccggacgcgugaagcacaccgaagaguguacaugcggcuuugccuccaacaaaacgaucgaaugugcuugcagagacaauagcuacaccgccaagcggccuuucgucaaacuuaacguggagacagauaccgccgaaauucgccugaugugcacagagaccuaucucgacacgcccagaccugaugacgggucuaucacaggacccugugaguccaauggcgauaaggggagcggaggcaucaaaggcggguuuguucaucaacggauggcuucuaagauuggacgcugguacagcagaaccauguccaaaaacaagcggaugggcauggggcuguaugugaaguacgacggagaccccugggcggauucugacgcccuggcucucagcggcgucaugguguccauggaggagccugggugguacagcuucggcuuugaaaucaaagauaagaaaugcgacgugccguguauuggaaucgagaugguccacgauggcgggaaggaaaccuggcauucugccgccacagcuauuuauugccugaugggauccggccagcuucugugggacaccguuacagggguggauauggcccucuga

SEQ ID NO: 221268 - RNA, 1401 nt, Artificial Sequence; identical to SEQ ID NO: 220688
  derived and/or modified CDS sequence (opt5) from neuraminidase__InfluenzaB__AGX16955

SEQ ID NO: 221269 - RNA, 1401 nt, Artificial Sequence; identical to SEQ ID NO: 220686
  derived and/or modified CDS sequence (opt5) from neuraminidase__InfluenzaB__AGX16966

SEQ ID NO: 221270 - RNA, 1401 nt, Artificial Sequence; identical to SEQ ID NO: 220688
  derived and/or modified CDS sequence (opt5) from neuraminidase__InfluenzaB__AGX16977

SEQ ID NO: 221271 - RNA, 1401 nt, Artificial Sequence; identical to SEQ ID NO: 220688
  derived and/or modified CDS sequence (opt5) from neuraminidase__InfluenzaB__AGX16988

SEQ ID NO: 221272 - RNA, 1401 nt, Artificial Sequence; identical to SEQ ID NO: 221232
  derived and/or modified CDS sequence (opt5) from neuraminidase__InfluenzaB__AGX16999

SEQ ID NO: 221273 - RNA, 1401 nt, Artificial Sequence; identical to SEQ ID NO: 220688
  derived and/or modified CDS sequence (opt5) from neuraminidase__InfluenzaB__AGX17010

SEQ ID NO: 221274 - RNA, 1401 nt, Artificial Sequence; identical to SEQ ID NO: 221234
  derived and/or modified CDS sequence (opt5) from neuraminidase__InfluenzaB__AGX17021

SEQ ID NO: 221275 - RNA, 1401 nt, Artificial Sequence
  derived and/or modified CDS sequence (opt5) from neuraminidase__InfluenzaB__AGX17032
augcugcccagcaccauccagacacucacgcuguuccuuaccuccggcggggugcugcucucucuguacgucagcgccucccuuucuuaucugcucuacagcgacauucugcugaaguuuuccccuacagagaucaccgcuccgacaaugccccucgauugcgccaacgcgucugacguucaagcugugaauagaagcgccaccaaaggagugacacugcuucugccugaacccgaguggaccuauccucggcucuccugucccggcagcacguuccagaaggcccugcuuauuucuccucaccgcuuuggggaaaccaaaggaaacuccgcuccgcugaucauuagagagcccuucaucgccugcggcccuaaggaauguaaacauuuugcucucacacacuacgccgcgcagcccgggggauauuacaaucggacccgcggcgauagaaacaagcugcggcaucugaucagcgucaagcucggcaaaauuccuacaguggaaaauucuaucuuccacauggccgcuugguccgggagcgccugccaugacggaaaggaguggaccuauauuggcguugaugggcccgacaacaaugcucugcuuaaaaucaaguacggagaagccuacacggauacauaucacucuuacgcgaacaauauucugcgcacccaggaguccgccuguaacugcaucggcgggaauuguuaucucaugauuacagacggaagcgcuuccggcaucucugaaugcagauuucugaaaauccgggagggccgcauuaucaaggagauuuucccgaccgggagagugaagcacaccgaagaguguacaugcggauuugccagcaacaaaacgaucgaaugugcuugccgggauaauuccuacaccgccaagcgcccuuucgucaaacuuaacguggagacagacaccgccgaaauuagacugaugugcacagagaccuaucucgauacgccccggccugacgauggcagcaucacagggcccugugagucuaauggagacaagggcuccgggggaaucaaaggcggcuuuguucaucaacgcauggcuagcaagauugggagaugguacucucggaccaugagcaaaaccaagagaaugggaaugggccuguaugugaaguacgacggggaucccugggcggacuccgaugcccuggcucucucuggagucauggugagcauggaggagccuggcugguacuccuucggguuugaaaucaaagacaagaaaugcgaugugccguguauuggcaucgagaugguccacgacggaggcaaggaaacauggcauagcgccgccaccgcuauuuauugccugauggggucuggacagcuucugugggauacaguuacgggcguggacauggcccucuga

SEQ ID NO: 221276 - RNA, 1401 nt, Artificial Sequence; identical to SEQ ID NO: 220686
  derived and/or modified CDS sequence (opt5) from neuraminidase__InfluenzaB__AGX17043

SEQ ID NO: 221277 - RNA, 1401 nt, Artificial Sequence
  derived and/or modified CDS sequence (opt5) from neuraminidase__InfluenzaB__AGX17054
augcugcccagcaccauccagacacucacgcuguuccuuaccuccggcggggugcugcucucucuguacgucagcgccucccuuucuuaucugcucuacagcgacauucugcugaaguuuuccccuacagagaucaccgcuccgacaaugccccucgauugcgccaacgcgucuaauguucaagcugugaacagaagcgccaccaaaggagugacacugcuucugccugaacccgaguggaccuauccucggcucuccugucccggcagcacguuccagaaggcccugcuuauuucuccucaccgcuuuggggaaaccaaaggaaauuccgcuccgcugaucauuagagagcccuucaucgccugcggcccuaaggaauguaaacauuuugcucucacacacuacgccgcgcagcccgggggauauuacaacggcacccggggcgaccgcaauaagcugagacaucugaucagcgucaagcucgggaaaauuccuacaguggagaacucuaucuuccacauggccgcuugguccggaagcgccugccaugauggcaaggaguggaccuauauugggguugacggacccgauaauaacgcucugcuuaaaaucaaguacggcgaagccuacacggacacauaucacucuuacgcgaauaacauucugcggacccaggaguccgccuguaauugcaucgggggaaacuguuaucucaugauuacagauggcagcgcuuccggcaucucugaaugccgcuuucugaaaaucagagaggggcggauuaucaaggagauuuucccgaccggacgcgugaagcacaccgaagaguguacaugcggcuuugccagcaauaaaacgaucgaaugugcuugcagagacaacuccuacaccgccaagcggccuuucgucaaacuuaauguggagacagauaccgccgaaauucgccugaugugcacagagaccuaucucgacacgcccagaccugaugacgggagcaucacaggacccugugagucuaacggcgauaacgggaauggaggcaucaagggcggguuuguucaucaacggauggcuuccaaaauuggacgcugguacagcagaaccaugucuaagaccaaacggaugggcauggggcuguaugugaaguacgacggagaccccugggcggauagcgacgcccuggcucucuccggcgucauggugucuauggaggaaccugggugguacagcuucggcuuugaaaucaaggauaaaaagugcgacgugccguguauuggaaucgagaugguccacgauggcgggaaagaaacauggcauuccgccgccaccgcuauuuauugccugaugggaagcggccagcuucugugggacacaguuacggggguggauauggcccucuga

SEQ ID NO: 221278 - RNA, 1401 nt, Artificial Sequence
  derived and/or modified CDS sequence (opt5) from neuraminidase__InfluenzaB__AGX17065
augcugcccagcaccauccagacacucacgcuguuccuuaccuccggcggggugcugcucucucuguacgucagcgcccuucuguccuaucuccuguacucugacauucugcucaaguuuagcccuacaaaaaucauugcuccgaccacaucccuggauucugccaacgcgagcaauuuccaagcuguuaaccacuccgccaccaaggagaugacauuucuucugcccgaaccugaguggaccuaucccagacucagcugccagggaucuacguuccagaaagcccugcuuaucuccccucaucgguuuggcgaagcuaaggggaauagcgcuccccugauuauccgcgagccuuucaucgccuguggaccgaaagaaugcaagcacuuugcccucacccauuacgcggcccagcccggcggguauuacaacggaacaagagaggaccggaauaagcugcgccaccugauuucugugaaccucggcaaaaucccuaccguggaaaauuccauuuuccauauggcugccuggagcggcucugcuugucacgaugggagagaauggacauauaucggagucgacggccccgauuccaacgcccugauuaagaucaaauacggggaggcguacaccgacacguaucacagcuacgccaauaacauucuucggacacaagaauccgcuugcaauuguaucggaggcgauugcuaucugaugaucaccgacgggucugccagcggaauuuccaagugucgcuuucucaaaaucagagagggccggauuaucaaggagauuuucccuacaggccgcguggaacauaccgaggaaugcaccuguggguuugcuagcaacaagacaaucgagugcgccuguagagauaauucuuacacggccaaacggcccuucguuaagcugaacguggaaaccgacacagcugagauccgccuuaugugcaccgagacauaucuggauaccccgagaccugacgauggauccauuacgggccccugcgaaagcaauggggacaaaggaucuggcgggaucaagggaggcuuuguccaccagcggauggcgagcaaaauuggccgcugguacuccagaacaaucucuaagaccaaacggauggggauggagcucuaugugaaguacgacggagauccuuggaccgacagcgaugcccuggcucccuccggcguuauggugagcauugaggagcccgggugguacucuuucggauucgaaaucaaggacaaaaagugugaugucccuugcaucggcauugagauggugcaugacgggggcaaaacaaccuggcacuccgccgccacagcuaucuauugucugaugggaagcggccagcuccugugggauacggugaccggggucgacauggcccuuuga

SEQ ID NO: 221279 - RNA, 1401 nt, Artificial Sequence
  derived and/or modified CDS sequence (opt5) from neuraminidase__InfluenzaB__AGX17076
augcugcccagcaccauccagacacucacgcuguuccuuaccuccggcggggugcugcucucucuguacgucagcgccucccuuucuuaucugcucuacagcgacauucugcugaaguuuuccccuacagagaucaccgcuccgacaaugccccucgauugcgccaacgcgucuaauguucaagcugugaacagaagcgccaccaaaggagugacacugcuucugccugaacccgaguggaccuauccucggcucuccugucccggcagcacguuccagaaggcccugcuuauuucuccucaccgcuuuggggaaaccaaaggaaauuccgcuccgcugaucauuagagagcccuucaucgccugcggcccuaaggaauguaaacauuuugcucucacacacuacgccgcgcagcccgggggauauuacaacggcacccggggcgaccgcaauaagcugagacaucugaucagcgucaagcucgggaaaauuccuacaguggagaacucuaucuuccacauggccgcuugguccggaagcgccugccaugauggcaaggaguggaccuauauugggguugacggacccgauaauaacgcucugcuuaaaaucaaguacggcgaagccuacacggacacauaucacucuuacgcgaauaacauucugcggacccaggaguccgccuguaauugcaucgggggaaacuguuaucucaugauuacagauggcagcgcuuccggcaucucugaaugccgcuuucugaaaaucagagaggggcggauuaucaaggagauuuucccgaccggacgcgugaagcacaccgaagaguguacaugcggcuuugccagcaauaaaacgaucgaaugugcuugcagagacaacuccuacaccgccaagcggccuuucgucaaacuuaauguggagacagauaccgccgaaauucgccugaugugcacagagaccuaucucgacacgcccagaccugaugacgggagcaucacaggacccugugagucuaacggcgauaagggguccggaggcaucaaaggcggguuuguucaucaacggauggcuagcaagauuggacgcugguacucuagaaccaugagcaaaaccaagcggaugggcauggggcuguaugugaaguacgacggagaccccugggcggauuccgacgcccuggcucucucuggcgucauggugagcauggaggaaccugggugguacuccuucggcuuugaaaucagagauaaaaagugcgacgugccguguauuggaaucgagauuguccacgauggcgggaaagaaacauggcauagcgccgccaccgcuaucuauugccugaugggaucuggccagcuucugugggacacaguuacggggguggauauggcccucuga

SEQ ID NO: 221280 - RNA, 1401 nt, Artificial Sequence; identical to SEQ ID NO: 221234
  derived and/or modified CDS sequence (opt5) from neuraminidase__InfluenzaB__AGX17087

SEQ ID NO: 221281 - RNA, 1401 nt, Artificial Sequence; identical to SEQ ID NO: 221234
  derived and/or modified CDS sequence (opt5) from neuraminidase__InfluenzaB__AGX17098

SEQ ID NO: 221282 - RNA, 1401 nt, Artificial Sequence; identical to SEQ ID NO: 221234
  derived and/or modified CDS sequence (opt5) from neuraminidase__InfluenzaB__AGX17109

SEQ ID NO: 221283 - RNA, 1401 nt, Artificial Sequence; identical to SEQ ID NO: 221234
  derived and/or modified CDS sequence (opt5) from neuraminidase__InfluenzaB__AGX17120

SEQ ID NO: 221284 - RNA, 1401 nt, Artificial Sequence; identical to SEQ ID NO: 220686
  derived and/or modified CDS sequence (opt5) from neuraminidase__InfluenzaB__AGX17131

SEQ ID NO: 221285 - RNA, 1401 nt, Artificial Sequence; identical to SEQ ID NO: 220688
  derived and/or modified CDS sequence (opt5) from neuraminidase__InfluenzaB__AGX17142

SEQ ID NO: 221286 - RNA, 1401 nt, Artificial Sequence
  derived and/or modified CDS sequence (opt5) from neuraminidase__InfluenzaB__AGX17153
augcugcccagcaccauccagacacucacgcuguuccuuaccuccggcggggugcugcucucucuguacgucagcgccucccuuucuuaucugcucuacagcgacauucugcugaaguuuuccccuacagagaucaccgcuccgacaaugccccucgauugcgccaacgcgucuaauguucaagcugugaacagaagcgccaccaaaggagugacacugcuucugccugaacccgaguggaccuauccucggcucuccugucccggcagcacguuccagaaggcccugcuuauuucuccucaccgcuuuggggaaaccaaaggaaauuccgcuccgcugaucauuagagagcccuucaucgccugcggcccuaaggaauguaaacauuuugcucucacacacuacgccgcgcagcccgggggauauuacaacggcacccggggcgaccgcaauaagcugagacaucugaucagcgucaagcucgggaaaauuccuacaguggagaacucuaucuuccacauggccgcuugguccggaagcgccugccaugauggcaaggaguggaccuauauugggguugacggacccgauaauaacgcucugcuuaaaaucaaguacggcgaagccuacacggacacauaucacucuuacgcgaauaacauucugcggacccaggaguccgccuguaauugcaucgggggaaacuguuaucucaugauuacagauggcagcgcuuccggcaucucugaaugccgcuuucugaaaaucagagaggggcggauuaucaaggagauuuucccgaccggacgcgugaagcacaccgaagaguguacaugcggcuuugccagcaauaaaacgaucgaaugugcuugcagagacaacuccuacaccgccaagcggccuuucgucaaacuuaauguggagacagauaccgccgaaauucgccugaugugcacagagaccuaucucgacacgcccagaccugaugacgggagcaucaucggacccugugagucuaacggcgauaagggguccggaggcauuaaaggcggguuuguucaucaacggauggcuagcaagaucggacgcugguacucuagaacaaugagcaaaaccaagcggaugggcauggggcuguaugugaaguacgacggagaccccugggcggauuccgacgcccuggcucucucuggcgucauggugagcauggaggaaccugggugguacuccuucggcuuugaaauuaaagauaagaaaugcgacgugccguguaucggaauugagaugguccacgauggcgggaaggaaaccuggcauagcgccgccacagcuaucuauugccugaugggaucuggccagcuucugugggacaccguuacagggguggauauggcccucuga

SEQ ID NO: 221287 - RNA, 1401 nt, Artificial Sequence; identical to SEQ ID NO: 221234
  derived and/or modified CDS sequence (opt5) from neuraminidase__InfluenzaB__AGX17164

SEQ ID NO: 221288 - RNA, 1404 nt, Artificial Sequence
  derived and/or modified CDS sequence (opt5) from neuraminidase__InfluenzaB__AGX17175
augcugcccagcaccauccagacacucacgcuguuccuuaccuccggcggggugcugcucucucuguacgucagcgccucccuuucuuaucugcucuacagcgacauucugcugaaguuuuccccuacagagaucaccgcuccgacaaugccccucgauugcgccaacgcgucuaauguucaagcugugaacagaagcgccaccaaaggagugacacugcuucugcucccugaacccgaguggaccuauccucggcuguccugucccggcagcacguuccagaaggcccuucugauuucuccucaccgcuuuggggaaaccaaaggaaauuccgcuccgcucaucauuagagagcccuucaucgccugcggcccuaaggaauguaaacauuuugcucugacacacuacgccgcgcagcccgggggauauuacaacggcacccggggcgaccgcaauaagcugagacaucucaucagcgucaagcuggggaaaauuccuacaguggagaacucuaucuuccacauggccgcuugguccggaagcgccugccaugauggcaaggaguggaccuauauugggguugacggacccgauaauaacgcucugcuuaaaaucaaguacggcgaagccuacacggacacauaucacucuuacgcgaauaacauucuccggacccaggaguccgccuguaauugcaucgggggaaacuguuaucugaugauuacagauggcagcgcuuccggcaucucugaaugccgcuuucuuaaaaucagagaggggcggauuaucaaggagauuuucccgaccggacgcgugaagcacaccgaagaguguacaugcggcuuugccagcaauaaaacgaucgaaugugcuugcagagacaacuccuacaccgccaagcggccuuucgucaaacugaauguggagacagauaccgccgaaauucgccucaugugcacagagaccuaucuggacacgcccagaccugaugacgggagcaucacaggacccugugagucuaacggcgauaagggguccggaggcaucaaaggcggguuuguucaucaacggauggcuagcaagauuggacgcugguacucuagaaccaugagcaaaaccaagcggaugggcauggggcuguaugugaaguacgacggagaccccugggcggauuccgacgcccucgcucugucuggcgucauggugagcauggaggaaccugggugguacuccuucggcuuugaaaucagagauaaaaagugcgacgugccguguauuggaaucgagaugguccacgauggcgggaaagaaacauggcauagcgccgccaccgcuauuuauugccuuaugggaucuggccagcugcucugggacacaguuacggggguggauauggcccuguga

SEQ ID NO: 221289 - RNA, 1401 nt, Artificial Sequence
  derived and/or modified CDS sequence (opt5) from neuraminidase__InfluenzaB__AGX17186
augcugcccagcaccauccagacacucacgcuguuccuuaccuccggcggggugcugcucucucuguacgucagcgccucccuuucuuaucugcucuacagcgacauucugcugaaguuuuccccuacagagaucaccacaccgaccaugccccucgauugcgcuaacgccucuaauguucaagcggugaacagaagcgcuacaaaaggagugacccugcuucugccugaacccgaguggacguauccucggcucuccugucccggcagcaccuuccagaaggcccugcuuauuucuccucaccgcuuuggggaaacaaaaggaaauuccgccccgcugaucauuagagagcccuucaucgcuugcggcccuaaggaauguaaacauuuugcccucacccacuacgcugcccagcccgggggauauuacaacggcacacggggcgaccgcaauaagcugagacaucugaucagcgucaagcucgggaaaauuccuaccguggagaacucuaucuuccacauggcggccugguccggaagcgcuugccaugauggcaaggaguggacguauauugggguugacggacccgauaauaacgcccugcuuaaaaucaaguacggcgaggcuuacacagacaccuaucacucuuacgccaauaacauucugcggacacaggaguccgcguguaauugcaucgggggaaacuguuaucucaugauuaccgauggcagcgccuccggcaucucugaaugccgcuuucugaaaaucagagaggggcggauuaucaaggagauuuucccgaccggacgcgugaaguacacagaagaguguacgugcggcuuugcuagcaauaaaaccaucgaaugugccugcagagacaacuccuauacagcuaagcggccuuucgucaaacuuaauguggagaccgauacagccgaaauucgccugaugugcaccgagacguaccucgacacacccagaccugaugacgggagcaucaccggacccugugagucuaacggcgauaagggguccggaggcaucaaaggcggguuuguucaccaacggauggccagcaagauuggacgcugguauucuagaaccaugagcaaaacacggagaaugggcauggggcuguacgugaaguacgacggagaccccugggcugauuccgacgcgcuggcccucucuggcgucauggugagcauggaagaaccugggugguauuccuucggcuuugaaaucaaggauaaaaagugcgacgugccguguauuggaaucgagaugguccaugauggcgggaaagaaaccuggcacagcgcugccacagccauuuacugccugaugggaucuggccagcuucugugggacacgguuaccgggguggauauggcucucuga

SEQ ID NO: 221290 - RNA, 1401 nt, Artificial Sequence; identical to SEQ ID NO: 221265
  derived and/or modified CDS sequence (opt5) from neuraminidase__InfluenzaB__AGX17197

SEQ ID NO: 221291 - RNA, 1401 nt, Artificial Sequence
  derived and/or modified CDS sequence (opt5) from neuraminidase__InfluenzaB__AGX17208
augcugcccagcaccauccagacacucacgcuguuccuuaccuccggcggggugcugcucucucuguacgucagcgccucccuuucuuaucugcucuacagcgacauucugcugaaguuuuccccuacagagaucaccacaccgaccaugccccucgauugcgcuaacgccucuaauguucaagcggugaacagaagcgcuacaaaaggagugacccugcuucugccugaacccgaguggacguauccucggcucuccugucccggcagcaccuuccagaaggcccugcuuauuucuccucaccgcuuuggggaaacaaaaggaaauuccgccccgcugaucauuagagagcccuucaucgcuugcggcccuaaggaauguaaacauuuugcccucacccacuacgcugcccagcccgggggauauuacaacggcacacggggcgaccgcaauaagcugagacaucugaucagcgucaagcucgggaaaauuccuaccguggagaacucuaucuuccacauggcggccugguccggaagcgcuugccaugauggcaaggaguggacguauauugggguugacggacccgauaauaacgcccugcuuaaaaucaaguacggcgaggcuuacacagacaccuaucacucuuacgccaauaacauucugcggacacaggaguccgcguguaauugcaucgggggaaacuguuaucucaugauuaccgauggcagcgccuccggcaucucugaaugccgcuuucugaaaaucagagaggggcggauuaucaaggagauuuucccgaccggacgcgugaagcacacagaagaguguacgugcggcuuugcuagcaauaaaaccaucgaaugugccugcagagacaacuccuacacagcuaagcggccuuucgucaaacuuaauguggagaccgauacagccgaaauucgccugaugugcaccgagacguaucucgacacacccagaccugaugacgggagcaucaccggacccugugagucuaacggcgauaagggguccggaggcaucaaaggcggguuuguucaucaacggauggccagcaagauuggacgcugguacucuagaaccaugagcaaaacacggagaaugggcauggggcuguaugugaaguacgacggagaccccugggcugauuccgacgcgcuggcccucucuggcgucauggugagcauggaagaaccugggugguacuccuucggcuuugaaaucaaggauaaaaagugcgacgugccguguauuggaaucgagaugguccacgauggcgggaaagaaaccuggcauagcgcugccacagccauuuauugccugaugggaucuggccagcuucugugggacacgguuaccgggguggauauggcucucuga

SEQ ID NO: 221292 - RNA, 1401 nt, Artificial Sequence; identical to SEQ ID NO: 221234
  derived and/or modified CDS sequence (opt5) from neuraminidase__InfluenzaB__AGX17219

SEQ ID NO: 221293 - RNA, 1401 nt, Artificial Sequence; identical to SEQ ID NO: 220688
  derived and/or modified CDS sequence (opt5) from neuraminidase__InfluenzaB__AGX17230

SEQ ID NO: 221294 - RNA, 1401 nt, Artificial Sequence; identical to SEQ ID NO: 221234
  derived and/or modified CDS sequence (opt5) from neuraminidase__InfluenzaB__AGX17241

SEQ ID NO: 221295 - RNA, 1401 nt, Artificial Sequence
  derived and/or modified CDS sequence (opt5) from neuraminidase__InfluenzaB__AGX17252
augcugcccagcaccauccagacacucacgcuguuccuuaccuccggcggggugcugcucucucuguacgucagcgccucccuuucuuaucugcucuacagcgacauucugcugaaguuuuccccuacagagaucaccgcuccgacaaugccccucgauugcgccaacgcgucuaauguucaagcugugaacagaagcgccaccaaaggagugacacugcuucugccugaacucgaguggaccuauccccggcuguccuguccuggcagcacguuccagaaggcccuucugauuucuccccaccgcuuuggggaaaccaaaggaaauuccgcuccucucaucauuagagagccguucaucgccugcggccccaaggaauguaaacauuuugcucugacauacuaugccgcgcagccugggggauacuauaacggcacccggggcgaccgcaauaagcugagacaccucaucagcgucaagcuggggaaaauucccacaguggagaacucuaucuuccauauggccgcuugguccggaagcgccugccacgauggcaaggaguggaccuacauugggguugacggaccugauaauaacgcucugcuuaaaaucaaguacggcgaagccuauacggacacauaccauucuuaugcgaauaacauucuccggacccaggaguccgccuguaauugcaucgggggaaacuguuaccugaugauuacagauggcagcgcuuccggcaucucugaaugccgcuuucuuaaaaucagagaggggcggauuaucaaggagauuuuccccaccggacgcgugaagcacaccgaagaguguacaugcggcuuugccagcaauaaaacgaucgaaugugcuugcagagacaacuccuauaccgccaagcggccguucgucaaacugaauguggagacagauaccgccgaaauucgccucaugugcacagagaccuaccuggacacgccuagacccgcugaugggagcaucacaggaccuugugagucuaacggcgacaagggguccggaggcaucaaaggcggguuuguucaccaacggauggcgagcaagauuggacgcugguauucuagaaccaugagcaaaaccaagcggaugggcauggggcuguacgugaaguacgauggagaccccugggccgacuccgaugcucucgcccugucuggcgucauggugagcauggaggaacccgggugguauuccuucggcuuugaaaucaaagacaagaaaugcgaugugccuuguauuggaaucgagaugguccaugacggcgggaaggaaacauggcacagcgccgcuaccgccauuuacugccuuaugggaucuggccagcugcucugggauacaguuacggggguggacauggcgcuguga

SEQ ID NO: 221296 - RNA, 1401 nt, Artificial Sequence
  derived and/or modified CDS sequence (opt5) from neuraminidase__InfluenzaB__AGX17263
augcugcccagcaccauccagacacucacgcuguuccuuaccuccggcggggugcugcucucucuguacgucagcgccucccuuucuuaucugcucuacagcgacauucugcugaagcucuccccuacagagaucaccgcuccgacaaugccccuggauugcgccaacgcgucuaauguucaagcugugaacagaagcgccaccaaaggagugacacuucugcucccugaacccgaguggaccuauccucggcuguccugucccggcagcacguuucagaaggcccuucugauuucuccucaccgcuucggggaaaccaaaggaaauuccgcuccgcucaucauuagagagcccuuuaucgccugcggcccuaaggaauguaaacauuucgcucugacacacuacgccgcgcagcccgggggauauuacaacggcacccggggcgaccgcaauaagcugagacaucucaucagcgucaagcuggggaaaauuccuacaguggagaacucuaucuuucacauggccgcuugguccggaagcgccugccaugauggcaaggaguggaccuauauugggguugacggacccgauaauaacgcucugcuuaaaaucaaguacggcgaagccuacacggacacauaucacucuuacgcgaauaacauucuccggacccaggaguccgccuguaauugcaucgggggaaacuguuaucugaugauuacagauggcagcgcuuccggcaucucugaaugccgcuuccuuaaaaucagagaggggcggauuaucaaggagauuuuuccgaccggacgcgugaagcacaccgaagaguguacaugcggcuucgccagcaauaaaacgaucgaaugugcuugcagagacaacuccuacaccgccaagcggccuuuugucaaacugaauguggagacagauaccgccgaaauucgccucaugugcacagagaccuaucuggacacgcccagaccugaugacgggagcaucacaggacccugugagucuaacggcgauaagggguccggaggcaucaaaggcggguucguucaucaacggauggcuagcaagauuggacgcugguacucuagaaccaugagcaaaaccaagcggaugggcauggggcuguaugugaaguacgacggagaccccugggcggauuccgacgcccucgcucugucuggcgucauggugagcauggaggaaccugggugguacuccuuuggcuucgaaaucaaagauaagaaaugcgacgugccguguauuggaaucgagaugguccacgauggcgggaaggaaacauggcauagcgccgccaccgcuauuuauugccuuaugggaucuggccagcugcucugggacacaguuacggggguggauauggcccuguga

SEQ ID NO: 221297 - RNA, 1401 nt, Artificial Sequence
  derived and/or modified CDS sequence (opt5) from neuraminidase__InfluenzaB__AGX17274
augcugcccagcaccauccagacacucacgcuguuccuuaccuccggcggggugcugcucucucuguacgucagcgccucccuuucuuaucugcucuacagcgacauucugcugaaguuuuccccuacagagaucaacgcuccgaccaugccccucgauugcgccaaugcgucuaacguucaagcugugaauagaagcgccacaaaaggagugacccugcuucugccugaacccgaguggacauauccucggcucuccugucccggcagcaccuuccagaaggcccugcuuauuucuccucaccgcuuuggggaaacgaaaggaaacuccgcuccgcugaucauuagagagcccuucaucgccugcggcccuaaggaauguaaacauuuugcucucacccacuacgccgcgcagcccgggggauauuacaauggcacacggggcgaccgcaacaagcugagacaucugaucagcgucaagcucgggaaaauuccuaccguggaaaauucuaucuuccacauggccgcuugguccggaagcgccugccaugauggcaaggaguggacauauauugggguugacggacccgauaacaaugcucugcuuaaaaucaaguacggcgaagccuacaccgacacguaucacucuuacgcgaacaauauucugcggacacaggaguccgccuguaacugcaucgggggaaauuguuaucucaugauuaccgauggcagcgcuuccggcaucucugaaugccgcuuucugaaaaucagagaggggcggauuaucaaggagauuuucccgacaggacgcgugaagcacaccgaagaguguaccugcggcuuugccagcaacaaaacaaucgaaugugcuugcagagacaauuccuacacggccaagcggccuuucgucaaacuuaacguggagaccgauacagccgaaauucgccugaugugcaccgagacauaucucgacacccccagaccugaugacgggagcaucacgggacccugugagucuaacggcgauaagggguccggaggcaucaaaggcggguuuguucaucaacggauggcuagcaagauuggacgcugguacucuagaacaaugagcaaaaccaagcggaugggcauggggcuguaugugaaguacgacggagaccccugggcggauuccgacgcccuggcucucucuggcgucauggugagcauggaggagccugggugguacuccuucggcuuugaaaucaaagauaagaaaugcgacgugccguguauuggaaucgagaugguccacgauggcgggaaggaaaccuggcauagcgccgccacagcuauuuauugccugaugggaucuggccagcuucugugggacaccguuacagggguggauauggcccucuga

SEQ ID NO: 221298 - RNA, 1401 nt, Artificial Sequence
  derived and/or modified CDS sequence (opt5) from neuraminidase__InfluenzaB__AGX17285
augcugcccagcaccauccagacacucacgcuguuccuuaccuccggcggggugcugcucucucuguacaugagcgccucccuuucuuaucugcucuacagcgacauucugcugaaguuuuccccuacagagaucaccgcuccgacaaugccccucgauugcgccaacgcgucuaauguccaagcuguuaacagaagcgccaccaaaggagugacacugcuucugccugaacccgaguggaccuauccucggcucuccugucccggcagcacguuccagaaggcccugcuuauuucuccucaccgcuuuggggaaaccaaaggaaauuccgcuccgcugaucauuagagagcccuucaucgccugcggcccuaaggaauguaaacauuuugcucucacacacuacgccgcgcagcccgggggauauuacaacggcacccggggcgaccgcaauaagcugagacaucugaucagcgugaagcucgggaaaauuccuacagucgagaacucuaucuuccacauggccgcuugguccggaagcgccugccaugauggcaaggaguggaccuauauugggguggacggacccgauaauaacgcucugcuuaaaaucaaguacggcgaagccuacacggacacauaucacucuuacgcgaauaacauucugcggacccaggaguccgccuguaauugcaucgggggaaacuguuaucucaugauuacagauggcagcgcuuccggcaucucugaaugccgcuuucugaaaaucagagaggggcggauuaucaaggagauuuucccgaccggacgcguuaagcacaccgaagaguguacaugcggcuuugccagcaauaaaacgaucgaaugugcuugcagagacaacuccuacaccgccaagcggccuuucgugaaacuuaaugucgagacagauaccgccgaaauucgccugaugugcacagagaccuaucucgacacgcccagaccugaugacgggagcaucacaggacccugugagucuaacggcgauaagggguccggaggcaucaaaggcggguuugugcaucaacggauggcuagcaagauuggacgcugguacucuagaaccaugagcaaaaccaagcggaugggcauggggcuguauguuaaguacgacggagaccccugggcggauuccgacgcccuggcucucucuggcgugauggucagcauggaggaaccugggugguacuccuucggcuuugaaaucaaagauaagaaaugcgacgugccguguauuggaaucgagauggugcacgauggcgggaaggaaacauggcauagcgccgccaccgcuauuuauugccugaugggaucuggccagcuucugugggacacagucacggggguugauauggcccucuga

SEQ ID NO: 221299 - RNA, 1401 nt, Artificial Sequence
  derived and/or modified CDS sequence (opt5) from neuraminidase__InfluenzaB__AGX17296
augcugcccagcaccauccagacacucacgcuguuccuuaccuccggcggggugcugcucucucuguacgucagcgccucccuuucuuaucugcucuacagcgacauucugcugaaguuuuccccuacagagaucaccgcuccgacaaugccccucgauugcgccaacgcgucuaauguucaagcugugaacagaagcgccaccaaaggagugacacugcuucugccugaacccgaguggaccuauccucggcucuccugucccggcagcacguuccagaaggcccugcuuauuucuccucaccgcuuuggggaagcuaaaggaaauuccgccccgcugaucauuagagagcccuucaucgcuugcggcccuaaggaauguaaacauuuugcccucacccacuacgcggcccagcccgggggauauuacaacggcacacggggcgaccgcaauaagcugagacaucugaucagcgucaagcucgggaaaauuccuaccguggagaacucuaucuuccacauggcugccugguccggaagcgcuugccaugauggcaaggaguggacauauauugggguugacggacccgauaauaacgcccugcuuaaaaucaaguacggcgaagcguacaccgacacguaucacucuuacgccaauaacauucugcggacacaggaguccgcuuguaauugcaucgggggaaacuguuaucucaugauuaccgauggcagcgccuccggcaucucugaaugccgcuuucugaaaaucagagaggggcggauuaucaaggagauuuucccgacaggacgcgugaagcacaccgaagaguguaccugcggcuuugcuagcaauaaaacaaucgaaugugccugcagagacaacuccuacacggccaagcggccuuucgucaaacuuaauguggagaccgauacagcugaaauucgccugaugugcaccgagacauaucucgacacccccagaccugaugacgggagcaucacgggacccugugagucuaacggcgauaagggguccggaggcaucaaaggcggguuuguucaucaacggauggcgagcaagauuggacgcugguacucuagaacaaugagcaaaaccaagcggaugggcauggggcuguaugugaaguacgacggagaccccugggccgauuccgacgcucuggcccucucuggcgucauggugagcauggaggaaccugggugguacuccuucggcuuugaaaucaaagauaagaaaugcgacgugccguguauuggaaucgagaugguccacgauggcgggaaggaaaccuggcauagcgccgcuacagccauuuauugccugaugggaucuggccagcuucugugggacaccguuacagggguggauauggcgcucuga

SEQ ID NO: 221300 - RNA, 1401 nt, Artificial Sequence; identical to SEQ ID NO: 221232
  derived and/or modified CDS sequence (opt5) from neuraminidase__InfluenzaB__AGX17307

SEQ ID NO: 221301 - RNA, 1401 nt, Artificial Sequence; identical to SEQ ID NO: 220686
  derived and/or modified CDS sequence (opt5) from neuraminidase__InfluenzaB__AGX17318

SEQ ID NO: 221302 - RNA, 1401 nt, Artificial Sequence
  derived and/or modified CDS sequence (opt5) from neuraminidase__InfluenzaB__AGX17329
augcugcccagcaccauccagacacucacgcuguuccuuaccuccggcggggugcugcucucucuguacgucagcgccucccuuucuuaucugcucuacagcgacaugcugcugaaguuuuccccuacagagauuaccgcuccgacaaugccccucgauugcgccaacgcgucuaauguucaagcugugaacagaagcgccaccaaaggagugacacugcuucugccugaacccgaguggaccuauccucggcucuccugucccggcagcacguuccagaaggcccugcuuaucucuccucaccgcuuuggggaaaccaaaggaaauuccgcuccgcugauuaucagagagcccuucauugccugcggcccuaaggaauguaaacauuuugcucucacacacuacgccgcgcagcccgggggauauuacagcggcacccggggcgaccgcaacaagcugagacaucugaucucugucaagcucgggaaaaucccuacaguggaaaauuccauuuuccacauggccgcuuggagcggaucugccugccaugauggcaaggaguggaccuauaucgggguugacggacccgauaacaaugcucugcuuaaaauuaaguacggcgaagccuacacggacacauaucacuccuacgcgaacaauauccugcggacccaggagagcgccuguaacugcauugggggaaauuguuaucucaugaucacagauggcuccgcuucuggcauuagcgaaugccgcuuucugaaaaucagagaggggcggaucauuaaggagaucuucccgaccggacgcgugaagcacaccgaagaguguacaugcggcuuugccuccaacaaaacgauugaaugugcuugcagagacaauagcuacaccgccaagcggccuuucgucaaacuuaacguggagacagauaccgccgaaauccgccugaugugcacagagaccuaucucgacacgcccagaccugaugacgggucuauuacaggacccugugaguccaauggcgauaaggggagcggaggcaucaaaggcggguuuguucaucaacggauggcuucuaagaucggacgcugguacagcagaaccauguccaaaaacaagcggaugggcauggggcuguaugugaaguacgacggagaccccugggcggauucugacgcccuggcucucagcggcgucaugguguccauggaggagccugggugguacagcuucggcuuugaaauuaaagauaagaaaugcgacgugccguguaucggaauugagaugguccacgauggcgggaaggaaaccuggcauucugccgccacagcuaucuauugccugaugggauccggccagcuucugugggacaccguuacagggguggauauggcccucuga

SEQ ID NO: 221303 - RNA, 1401 nt, Artificial Sequence; identical to SEQ ID NO: 221234
  derived and/or modified CDS sequence (opt5) from neuraminidase__InfluenzaB__AGX17340

SEQ ID NO: 221304 - RNA, 1401 nt, Artificial Sequence
  derived and/or modified CDS sequence (opt5) from neuraminidase__InfluenzaB__AGX17351
augcugcccagcaccauccagacacucacgcuguuccuuaccuccggcggggugcugcucucucuguacgucagcgccucccuuucuuaucugcucuacagcgacauucugcugaaguuuuccccuacagagaucaccgcuccgacaaugccccucgauugcgccaacgcgucuaauguucaagcugugaacagaagcgccaccaaaggagugacacugcuucugccugaacccgaguggaccuauccucggcucuccugucccggcagcacguuccagaaggcccugcuuauuucuccucaccgcuuuggggaaaccaaaggaaauuccgcuccgcugaucauuagagagcccuucaucgccugcggcccuaaggaauguaaacauuuugcucucacacacuacgccgcgcagcccgggggauauuacaacggcacccggggcgaccgcaauaagcugagacaucugaucagcgucaagcucgggaaaauuccuacaguggagaacucuaucuuccacauggccgcuugguccggaagcgccugccaugauggcaaggaguggaccuauauugggguugacggacccgauaauaacgcucugcuuaaaaucaaguacggcgaagccuacacggacacauaucacucuuacgcgaauaacauucugcggacccaggaguccgccuguaauugcaucgggggaaacuguuaucucaugauuacagauggcagcgcuuccggcaucucugaaugccgcuuucugaaaaucagagaggggcggauuaucaaggagauuuucccgaccggacgcgugaagcacaccgaagaguguacaugcggcuuugccagcaauaaaacgaucgaaugugcuugcagagacaacuccuacaccgccaagcggccuuucgucaaacuuaauguggagacagauaccgccgaaauucgccugaugugcacagagaccuaucucgacacgcccagaccugaugacgggagcaucacaggacccugugagaccaacggcgauaaggggucuggaggcaucaaaggcggguuuguucaucaacggauggcuuccaagauuggacgcugguacagcagaaccaugucuaaaacaaagcggaugggcauggggcuguaugugaaguacgacggagaccccugggcggauagcgacgcccuggcucucuccggcgucauggugucuauggaggaaccugggugguacagcuucggcuuugaaaucaaagauaagaaaugcgacgugccguguauuggaaucgagaugguccacgauggcgggaaggaaaccuggcauuccgccgccacagcuauuuauugccugaugggaagcggccagcuucugugggacacgguuaccgggguggauauggcccucuga

SEQ ID NO: 221305 - RNA, 1401 nt, Artificial Sequence
  derived and/or modified CDS sequence (opt5) from neuraminidase__InfluenzaB__AGX17362
augcugcccagcaccauccagacacucacgcuguuccuuaccuccggcggggugcugcucucucuguacgucagcgccucccuuucuuaucugcucuacagcgacauucugcugaaguuuuccccuacagagaucaccgcuccgacaauuccccucgauugcgccaacgcgucuaauauccaagcuguuaacagaagcgccaccaaaggagugacacugcuucugccugaacccgaguggaccuauccucggcucuccugucccggcagcacguuccagaaggcccugcuuauuucuccucaccgcuuuggggaaaccaaaggaaauuccgcuccgcugaucaucagagagcccuucauugccugcggcccuaaggaauguaaacauuuugcucucacacacuacgccgcgcagcccgggggauauuacaacggcacccggggcgaccgcaauaagcugagacaucugaucagcgugaagcucgggaaaauuccuacagucgagaacucuaucuuccacauggccgcuugguccggaagcgccugccaugauggcaaggaguggaccuauauugggguggacggacccgauaauaacgcucugcuuaaaaucaaguacggcgaagccuacacggacacauaucacucuuacgcgaauaacauucugcggacccaggaguccgccuguaauugcaucgggggaaacuguuaucucaugaucacagauggcagcgcuuccggcauuucugaaugccgcuuucugaaaaucagagaggggcggauuaucaaggagauuuucccgaccggacgcguuaagcacaccgaagaguguacaugcggcuuugccagcaauaaaacgaucgaaugugcuugcagagacaacuccuacaccgccaagcggccuuucgugaaacuuaaugucgagacagauaccgccgaaauccgccugaugugcacagagaccuaucucgacacgcccagaccugaugacgggagcauuacaggacccugugagucuaacggcgauaagggguccggaggcaucaaaggcggguuugugcaucaacggauggcuagcaagauuggacgcugguacucuagaaccaugagcaaaaccaagcggaugggcauggggcuguauguuaaguacgacggagaccccugggcggauuccgacgcccuggcucucucuggcgugauggucagcauggaggaaccugggugguacuccuucggcuuugaaaucaaagauaagaaaugcgacgugccguguauuggaaucgagauggugcacgauggcgggaaggaaacauggcauagcgccgccaccgcuaucuauugccugaugggaucuggccagcuucugugggacacagucacggggguugauauggcccucuga

SEQ ID NO: 221306 - RNA, 1401 nt, Artificial Sequence
  derived and/or modified CDS sequence (opt5) from neuraminidase__InfluenzaB__AGX17373
augcugcccagcaccauccagacacucacgcuguuccuuaccuccggcggggugcugcucucucuguacgucagcgccucccuuucuuaucugcucuacagcgacauucugcugaaguuuuccccuacagagaucaccgcuccgacaaugccccucgauugcgccaacgcgucuaauguucaagcugugaacagaagcgccaccaaaggagugacacugcuucugccugaacccgaguggaccuauccucggcucuccugucccggcagcacguuccagaaggcccugcuuauuucuccucaccgcuuuggggaaaccaaaggaaauuccgcuccgcugaucauuagagagcccuucaucgccugcggcccuaaggaauguaaacauuuugcucucacacacuacgccgcgcagcccgggggauauuacaacggcacccggggcgaccgcaauaagcugagacaucugaucagcgucaagcucgggaaaauuccuacaguggagaacucuaucuuccacauggccgcuugguccggaagcgccugccaugauggcaaggaguggaccuauauugggguugacggacccgauaauaacgcucugcuuaaaaucaaguacggcgaagccuacacggacacauaucacucuuacgcgaauaacauucugcggacccaggaguccgccuguaauugcaucgggggaaacuguuaucucaugauuacagauggcagcgcuuccggcgugucugaaugccgcuuucugaaaaucagagaggggcggaucauuaaggagaucuucccgaccggacgcgucaagcacaccgaagaguguacaugcggcuuugccaauaacaaaacgauugaaugugcuugcagagacaauagcuacaccgccaagcggccuuucgugaaacuuaacguugagacagauaccgccgaaauccgccugaugugcacagagaccuaucucgacacgcccagaccugaugacggguccauuacaggacccugugagagcaacggcgauaaggggucuggaggcaucaaaggcggguuugugcaucaacggauggcuuccaagaucggacgcugguacagcagaaccaugucuaaaaccaagcggaugggcauggggcuguaugucaaguacgacggagaccccugggcggauagcgacgcccuggcucucuccggcgugauggugucuauggaggaaccugggugguacagcuucggcuuugaaauuaaagauaagaaaugcgacgucccguguaucggaauugagaugguucacgauggcgggaaggaaacauggcauuccgccgccaccgcuaucuauugccugaugggaagcggccagcuucugugggacacagugacgggggugaauauggcccucuga

SEQ ID NO: 221307 - RNA, 1401 nt, Artificial Sequence; identical to SEQ ID NO: 220686
  derived and/or modified CDS sequence (opt5) from neuraminidase__InfluenzaB__AGX17384

SEQ ID NO: 221308 - RNA, 1401 nt, Artificial Sequence; identical to SEQ ID NO: 220754
  derived and/or modified CDS sequence (opt5) from neuraminidase__InfluenzaB__AGX17395

SEQ ID NO: 221309 - RNA, 1401 nt, Artificial Sequence
  derived and/or modified CDS sequence (opt5) from neuraminidase__InfluenzaB__AGX17404
augcugcccagcaccauccagacacucacgcuguuccuuaccuccggcggggugcugcucucucuguacgucagcgccucccuuucuuaucugcucuacagcgacauucugcugaaguuuuccccuacagagaucaccgcuccgacaaugccccucgauugcgccaacgcgucuaauguucaagcugugaacagaagcgccaccaaaggagugacacugcuucugccugaacccgaguggaccuauccucggcucuccugucccggcagcacguuccagaaggcccugcuuauuucuccucaccgcuuuggggaaaccaaaggaaauuccgcuccgcugaucauuagagagcccuucaucgccugcggcccuaaggaauguaaacauuuugcucucacacacuacgccgcgcagcccgggggauauuacaacggcacccggggcgaccgcaauaagcugagacaucugaucagcgucaagcucgggaaaauuccuacaguggagaacucuaucuuccacauggccgcuugguccggaagcgccugccaugauggcaaggaguggaccuauauugggguugacggaucugauaauaacgcucugcuuaaaaucaaguacggcgaagccuacacggacacauaucacuccuacgcgaauaacauucugcggacccaggagagcgccuguaauugcaucgggggaaacuguuaucucaugauuacagauggcuccgcuucuggcaucagcgaaugccgcuuucugaaaaucagagaggggcggauuaucaaggagauuuuccccaccggacgcgugaagcacaccgaagaguguacaugcggcuuugccuccaauaaaacgaucgaaugugcuugcagagacaacagcuacaccgccaagcggccguucgucaaacuuaauguggagacagauaccgccgaaauucgccugaugugcacagagaccuaucucgacacgccuagacccgaugacgggucuaucacaggaccuugugaguccaacggcgauaaggggagcggaggcaucaaaggcggguuuguucaucaacggauggcuucuaagauuggacgcugguacagcagaaccauguccaaaaccaagcggaugggcauggggcuguaugugaaguacgacggagaccccugggcggauucugacgcccuggcucucagcggcaucauggucuccauggaggaacccgggugguacagcuucggcuuugaaauuaaagauaagaaaugcgacgugccuuguaucggaauugagauggugcacgauggcgggaaggaaacauggcauucugccgccaccgcuaucuauugccugaugggauccggccagcuucugugggacacagucacggggguugauauggcccucuga

SEQ ID NO: 221310 - RNA, 1401 nt, Artificial Sequence
  derived and/or modified CDS sequence (opt5) from neuraminidase__InfluenzaB__AGX17415
augcugcccagcaccauccagacacucacgcuguuccuuaccuccggcggggugcugcucucucuguacgucagcgccucccuuucuuaucugcucuacagcgacauucugcugaaguuuuccccuacagagaucaccgcuccgacaaugccccucgauugcgccaacgcgucuaauguucaagcugugaacagaagcgccaccaaaggagugacacugcuucugccugaacccgacuggaccuauccucggcucuccugucccggcagcacguuccagaaggcccugcuuauuucuccucaccgcuuuggggagaccaaaggaaauuccgcuccgcugaucauuagagaacccuucaucgccugcggcccuaaggaguguaaacauuuugcucucacacacuacgccgcgcagcccgggggauauuacaacggcacccggggcgaucgcaauaagcugagacaucugaucagcgucaagcucgggaaaauuccuacaguggaaaacucuaucuuccacauggccgcuugguccggaagcgccugccaugacggcaaggaguggaccuauauugggguugauggacccgacaauaacgcucugcuuaaaaucaaguacggcgaggccuacacggauacauaucacucuuacgcgaauaacauucugcggacccaggaauccgccuguaauugcaucgggggaaacuguuaucucaugauuacagacggcagcgcuuccggcaucucugagugccgcuuucugaaaaucagagaagggcggauuaucaaggagauuuucccgaccggacgcgugaagcacaccgaggaauguacaugcggcuuugccagcaauaaaacgaucgagugugcuugcagagauaacuccuacaccgccaagcggccuuucgucaaacuuaauguggaaacagacaccgccgagauucgccugaugugcacagaaaccuaucucgauacgcccagaccugacgaugggagcaucacaggacccugugagucuaacggcgacaagggguccggaggcaucaaaggcggguuuguucaucaacggauggcuagcaagauuggacgcugguacucuagaaccaugagcaaaaccaagcggaugggcauggggcuguaugugaaguacgacggagaucccugggcggacuccgaugcccuggcucucucuggcgucauggugagcauggaggaaccugggugguacuccuucggcuuugagaucaaagacaagaaaugcgaugugccguguauuggaaucgaaaugguccacgacggcgggaaggagacauggcauagcgccgccaccgcuauuuauugccugaugggaucuggccagcuucugugggauacaguuacggggguggacauggcccucuga

SEQ ID NO: 221311 - RNA, 1401 nt, Artificial Sequence
  derived and/or modified CDS sequence (opt5) from neuraminidase__InfluenzaB__AGX17426
augcugcccagcaccauccagacacucacgcuguuccuuaccuccggcggggugcugcucucucuguacgucagcgccucccuuucuuaucugcucuacagcgacauucugcugaaguuuuccccuacagagaucaccgcuccgacaaugccccucgauugcgccaacgcgucuaauguucaagcugugaacagaagcgccaccaaaggagugacauuccugcuuccugaacccgaguggaccuauccucggcuguccugucccggcagcacguuucagaaggcccuccugauuucuccucaccgcuucggggaaaccaaaggaaauuccgcuccgcuuaucauuagagagcccuuuaucgccugcggcccuaaggaauguaaacauuucgcucugacacacuacgccgcgcagcccgggggauauuacaacggcacccggggcgaccgcaauaagcucagacaucugaucagcgucaagcuggggaaaauuccuacaguggagaacucuaucuuucacauggccgcuugguccggaagcgccugccaugauggcaaggaguggaccuauauugggguugacggacccgauaauaacgcucuccugaaaaucaaguacggcgaagccuacacggacacauaucacucuuacgcgaauaacauucuucggacccaggaguccgccuguaauugcaucgggggaaacuguuaucugaugauuacagauggcagcgcuuccggcaucucugaaugccgcuuccucaaaaucagagaggggcggauuaucaaggagauuuuuccgaccggacgcgugaagcacaccgaagaguguacaugcggcuucgccagcaauaaaacgaucgaaugugcuugcagagacaacuccuacaccgccaagcggccuuuugucaaacugaauguggagacagauaccgccgaaauucgccuuaugugcacagagaccuaucuggacacgcccagaccugaugacgggagcaucacaggacccugugagucuaacggcgauaagggguccggaggcaucaaaggcggguucguucaucaacggauggcuagcaagauuggacgcugguacucuagaaccaugagcaaaaccaagcggaugggcauggggcucuaugugaaguacgacggagaccccugggcggauuccgacgcccuggcucugucuggcgucauggugagcauggaggaaccugggugguacuccuuuggcuucgaaaucagagauaaaaagugcgacgugccguguauuggaaucgagaugguccacgauggcgggaaagaaacauggcauagcgccgccaccgcuauuuauugccucaugggaucuggccagcugcuuugggacacaguuacggggguggauauggcccuguga

SEQ ID NO: 221312 - RNA, 1401 nt, Artificial Sequence
  derived and/or modified CDS sequence (opt5) from neuraminidase__InfluenzaB__AGX17437
augcugcccagcaccauccagacacucacgcuguuccuuaccuccggcggggugcugcucucucuguacgucagcguuucccuuucuuaucugcucuacagcgacauucugcugaaguuuuccccuacagagaucaccgcccaaacaaugccgcucgauuucgcuaacgccucuaaugugcaggcggugaacagaagcgcuaccaaaggagucacacugcuucugcccgaaccugaguggaccuauccccggcucuccugcccuggcagcacguuucagaaggcccugcuuauuucuccccaccgcuucggggaaaccaaaggaaauuccgccccucugaucauuagagagccguuuaucgcuuguggccccaaggaaugcaaacauuucgcccucacacacuacgcugcccagccugggggauauuacaacggcacccggggcgaccgcaauaagcugagacaucugaucagcgugaagcucgggaaaauucccacaguugagaacucuaucuuucacauggcggccugguccggaagcgcuugucaugauggcaaggaguggaccuauauugggguggacggaccugauaauaacgcccugcuuaaaaucaaguacggcgaggcuuacacggacacauaucacucuuacgccaauaacauucugcggacccaagaguccgcgugcaauuguaucgggggaaacugcuaucucaugauuacagauggcagcgccuccggcaucucugaaugucgcuuccugaaaaucagagaggggcggauuaucaaggagauuuuucccaccggacgcgucaagcacaccgaagagugcacauguggcuucgcuagcaauaaaacgaucgaaugcgccuguagagacaacuccuacaccgcuaagcggccguuugugaaacuuaauguugagacagauaccgccgaaauucgccugaugugcacagagaccuaucucgacacgccuagacccgaugacgggagcaucacaggaccuugcgagucuaacggcgauaagggguccggaggcaucaaaggcggguucgugcaucagcggauggccagcaagauuggacgcugguacucuagaaccaugagcaaaaccaagcggaugggcauggggcuguaugucaaguacgacggagaccccugggcugauuccgacgcgcuggcccucucuggcgugauggugagcauggaagaacccgggugguacuccuuuggcuucgaaaucagagauaaaaagugugacgucccuugcauuggaaucgagaugguucacgauggcgggaaagaaacauggcauagcgcugccaccgccauuuauugucugaugggaucuggccagcuucugugggacacagugacggggguggauauggcucucuga

SEQ ID NO: 221313 - RNA, 1401 nt, Artificial Sequence
  derived and/or modified CDS sequence (opt5) from neuraminidase__InfluenzaB__AGX17448
augcugcccagcaccauccagacacucacgcuguuccuuaccuccggcggggugcugcucucucuguacgucagcgccucccuuucuuaucugcucuacagcgacauucugcugaaguuuuccccuacagagaucaccgcuccgacaaugccccucgauugcgccaacgcgucuaauguucaagcugugaacagaagcgccaccaaaggagugacacugcuucugccugaacccgaguggaccuauccucggcucuccugucccggcagcacguuccagaaggcccugcuuauuucuccucaccgcuuuggggaaaccaaaggaaauuccgcuccgcugaucauuagagagcccuucaucgccugcggcccuaaggaauguaaacauuuugcucucacacacuacgccgcgcagcccgggggauauuacaacggcacccggggcgaccgcaauaagcugagacaucugaucagcgucaagcucgggaaaauuccuacaguggagaacucuaucuuccacauggccgcuugguccggaagcgccugccaugauggcaaggaguggaccuauauugggguugacggacccgauaauaacgcucugcuuaaaaucaaguacggcgaagccuacacggacacauaucacucuuacgcgaauaacauucugcggacccaggaguccgccuguaauugcaucgggggaaacuguuaucucaugauuacagauggcagcgcuuccggcaucucugaaugccgcuuucugaaaaucagagaggggcggauuaucaaggagauuuucccgaccggacgcgugaagcacaccgaagaguguacaugcggcuuugccagcaauaaaacgaucgaaugugcuugcagagacaacuccuacaccgccaagcggccuuucgucaaacuuaauguggagacagauaccgccgaaauucgccugaugugcacagagaccuaucucgacacgcccagaccugaugacgggagcaucacaggacccugugagaccaacggcgauaaggggucuggaggcaucaaaggcggguuuguucaucaacggauggcuuccaagauuggacgcugguacagcagaaccaugucuaaaacaaagcggaugggcauggggcuguaugugaaguacgacggagaccccugggcggauagcgacgcccugguccucuccggcgugauggugucuauggaggaaccugggugguacagcuucggcuuugaaaucaaagauaagaaaugcgacgucccguguauuggaaucgagaugguucacgauggcgggaaggaaaccuggcauuccgcugccacagccauuuauugccugaugggaagcggccagcuucugugggacacggugaccgggguggauauggcucucuga

SEQ ID NO: 221314 - RNA, 1401 nt, Artificial Sequence
  derived and/or modified CDS sequence (opt5) from neuraminidase__InfluenzaB__AGX17459
augcugcccagcaccauccagacacucacgcuguuccuuaccuccggcggggugcugcucucucuguacgucagcgccucccuuucuuaucugcucuacagcgacauucugcugaaguuuuccccuacagagaucaccgcuucuacaaugccgcucgauugcgccaacgcgagcaauguucaagcugugaacagauccgccaccaaaggagugacacugcuucugcccgaaccugacuggaccuauccccggcucagcuguccuggcucuacguuccagaaggcccugcuuauuagcccccaccgcuuuggggagaccaaaggaaauuccgcuccucugaucauuagagaaccguucaucgccugcggccccaaggaguguaaacauuuugcucucacacacuacgccgcgcagccugggggauauuacaacggcacccggggcgaucgcaauaagcugagacaucugaucucugucaagcucgggaaaauucccacaguggaaaacuccaucuuccacauggccgcuuggagcggaucugccugccaugacggcaaggaguggaccuauauugggguugauggaccugacaauaacgcucugcuuaaaaucaaguacggcgaggccuacacggauacauaucacuccuacgcgaauaacauucugcggacccaggaaagcgccuguaauugcaucgggggaaacuguuaucucaugauuacagacggcuccgcuucuggcaucagcgagugccgcuuucugaaaaucagagaagggcggauuaucaaggagauuuuccccaccggacgcgugaagcacaccgaggaauguacaugcggcuuugccuccaauaaaacgaucgagugugcuugcagagauaacagcuacaccgccaagcggccguucgucaaacuuaauguggaaacagacaccgccgagauucgccugaugugcacagaaaccuaucucgauacgccuagacccgacgaugggucuaucacaggaccuugugaguccaacggcgacaaggggagcggaggcaucaaaggcggguuuguucaucaacggauggcuucuaagauuggacgcugguacagcagaaccauguccaaaaccaagcggaugggcauggggcuguaugugaaguacgacggagaucccugggcggacucugaugcccuggcucucagcggcgucaugguguccauggaggaacccgggugguacagcuucggcuuugagaucaaagacaagaaaugcgaugugccuuguauuggaaucgaaaugguccacgacggcgggaaggagacauggcauucugccgccaccgcuauuuauugccugaugggauccggccagcuucugugggauacaguuacggggguggacauggcccucuga

SEQ ID NO: 221315 - RNA, 1401 nt, Artificial Sequence; identical to SEQ ID NO: 220686
  derived and/or modified CDS sequence (opt5) from neuraminidase__InfluenzaB__AGX17470

SEQ ID NO: 221316 - RNA, 1401 nt, Artificial Sequence
  derived and/or modified CDS sequence (opt5) from neuraminidase__InfluenzaB__AGX17481
augcugcccagcaccauccagacacucacgcuguuccuuaccuccggcggggugcugcucucucuguacgucagcgccucccuuucuuaucugcucuacagcgacauucugcugaaguuuuccccuacagagaucaccgcuccgacaaugccccucgauugcgccaacgcgucuaauguucaagcugugaacagaagcgccaccaaaggagugacacugauucuuccugaacccgaguggaccuauccucggcuguccugucccggcagcacguuccagaaggcccuccugaucucuccucaccgcuuuggggaaaccaaaggaaauuccgcuccgcuuauuaucagagagcccuucaucgccugcggcccuaaggaauguaaacauuuugcucugacacacuacgccgcgcagcccgggggauauuacaacggcacccggggcgaccgcaauaagcucagacaucugauuagcgucaagcuggggaaaaucccuacaguggagaacucuauuuuccacauggccgcuugguccggaagcgccugccaugauggcaaggaguggaccuauaucgggguugacggacccgauaauaacgcucuccugaaaauuaaguacggcgaagccuacacggacacauaucacucuuacgcgaauaacauccuucggacccaggaguccgccuguaauugcauugggggaaacuguuaucugaugaucacagauggcagcgcuuccggcaucucugaaugccgcuuucucaaaauuagagaggggcggaucauuaaggagaucuucccgaccggacgcgugaagcacaccgaagaguguacaugcggcuuugccagcaauaaaacgauugaaugugcuugcagagacaacuccuacaccgccaagcggccuuucgucaaacugaauguggagacagauaccgccgaaauccgccuuaugugcacagagaccuaucuggacacgcccagaccugaugacgggagcaucacaggacccugugagucuaacggcgauaagggguccggaggcauuaaaggcggguuuguucaucaacggauggcuagcaagaucggacgcugguacucuagaaccaugagcaaaaccaagcggaugggcauggggcucuaugugaaguacgacggagaccccugggcggauuccgacgcccuggcucugucuggcgucauggugagcguggaggaaccugggugguacuccuucggcuuugaaauuaaagauaagaaaugcgacgucccguguaucggaauugagaugguucacgauggcgggaaggaaacauggcauagcgccgccaccgcuaucuauugccucaugggaucuggccagcugcuuugggacacagugacggggguggauauggcccuguga

SEQ ID NO: 221317 - RNA, 1401 nt, Artificial Sequence
  derived and/or modified CDS sequence (opt5) from neuraminidase__InfluenzaB__AGX17492
augcugcccagcaccauccagacacucacgcuguuccuuaccuccggcggggugcugcucucucuguacgucagcgccucccuuucuuaucugcucuacagcgacauucugcugaaguuuuccccuacagagaucaccgcuccgacaaugccccucgauugcgccaacgcgucuaauguucaagcugugaacagaagcgccaccaaaggagugacacugcuucugccugaacccgaguggaccuauccucggcucuccugucccggcagcacguuccagaaggcccugcuuauuucuccucaccgcuuuggggaaaccaaaggaaauuccgcuccgcugaucauuagagagcccuucaucgccugcggcccuaaggaauguaaacauuuugcucucacacacuacgccgcgcagcccgggggauauuacaacggcacccggggcgaccgcaauaagcugagacaucugaucagcgucaagcucgggaaaauuccuacaguggagaacucuaucuuccacauggccgcuugguccggaagcgccugccaugauggcaaggaguggaccuauauugggguugacggacccgauaauaacgcucugcuuaaaaucaaguacggcgaagccuacacggacacauaucacucuuacgcgaauaacauucugcggacccaggaguccgccuguaauugcaucgggggaaacuguuaucucaugauuacagauggcagcgcuuccggcaucucugaaugccgcuuucugaaaaucagagaggggcggauuaucaaggagauuuucccgaccggacgcgugaagcacaccgaagaguguacaugcggcuuugccagcaauaaaacgaucgaaugugcuugcagagacaacuccuacaccgccaagcggccuuucgucaaacuuaauguggagacagauaccgccgaaauucgccugaugugcacagagaccuaucucgacacgcccagaccugaugacgggagcaucacaggacccugugagucuaacggcgauaagggguccggaggcaucaaaggcggguuuguucaucaacggauggcuagcaagauuggacgcugguacucuagaaccaugagcaaaaccaagcggaugggcauggggcuguaugugaaguacgacggagaccccugggcggauuccgacgcccuggcucucucuggcgucauggugagcauggaggaaccugggugguacuccuucggcuuugaaaucaaagauaagaaaugcgacgugccguguauuggaaucgagaugguccacgauggcgggaaggaaacauggcauagcgccgccaccgcuauuuauugccugaugggaucuggccagcuucugugggacacaguuacggggguggauaucgcccucuga

SEQ ID NO: 221318 - RNA, 1401 nt, Artificial Sequence
  derived and/or modified CDS sequence (opt5) from neuraminidase__InfluenzaB__AGX17503
augcugcccagcaccauccagacacucacgcuguuccuuaccuccggcggggugcugcucucucuguacgucagcgccucccuuucuuaucugcucuacagcgacauucugcugaaguuuuccccuacagagaucaccgcuccgacaaugccccucgauugcgccaacgcgucuaauguucaagcugugaacagaagcgccaccaaaggagugacacugcuucugccugaacccgaguggaccuauccucggcucuccugucccggccugacguuccagaaggcccuucugauuagcccucaccgcuuuggggaaaccaaaggaaauucugcuccgcucaucauuagagagcccuucaucgccugcggcccuaaggaauguaaacauuuugcucugacacacuacgccgcgcagcccgggggauauuacaacggcacccggggcgaccgcaauaagcugagacaucucaucuccgucaagcuggggaaaauuccuacaguggagaacagcaucuuccacauggccgcuuggucuggauccgccugccaugauggcaaggaguggaccuauauugggguugacggacccgauaauaacgcucugcuuaaaaucaaguacggcgaagccuacacggacacauaucacagcuacgcgaauaacauucuccggacccaggagucugccuguaauugcaucgggggaaacuguuaucugaugauuacagauggcuccgcuagcggcaucuccgaaugccgcuuucuuaaaaucagagaggggcggauuaucaaggagauuuucccgaccggacgcgugaagcacaccgaagaguguacaugcggcuuugccucuaauaaaacgaucgaaugugcuugcagagacaacagcuacaccgccaagcggccuuucgucaaacugaauguggagacagauaccgccgaaauucgccucaugugcacagagaccuaucuggacacgcccagaccugaugacggguccaucacaggacccugugagagcaacggcgauaaggggucuggaggcaucaaaggcggguuuguucaucaacggauggcuuccaagauuggacgcugguacagcagaaccaugucuaaaaccaagcggaugggcauggggcuguaugugaaguacgacggagaccccugggcggauagcgacgcccucgcucuguccggcgucauggugucuauggaggaaccugggugguacagcuucggcuuugaaaucaaagauaagaaaugcgacgugccguguauuggaaucgagaugguccacgauggcgggaaggaaacauggcauuccgccgccaccgcuauuuauugccuuaugggaagcggccagcugcucugggacacaguuacggggguggauauggcccuguga

SEQ ID NO: 221319 - RNA, 1401 nt, Artificial Sequence; identical to SEQ ID NO: 220686
  derived and/or modified CDS sequence (opt5) from neuraminidase__InfluenzaB__AGX17514

SEQ ID NO: 221320 - RNA, 1401 nt, Artificial Sequence
  derived and/or modified CDS sequence (opt5) from neuraminidase__InfluenzaB__AGX17525
augcugcccagcaccauccagacacucacgcuguuccuuaccuccggcggggugcugcucucucuguacgucagcgccucccuuucuuaucugcucuacagcgacauucugcugaaguuuuccccuacagagaucaccgcuccgacaaugccccucgauugcgccaacgcgucuaauguucaagcugugaacagaagcgccaccaaaggagugacacugcuucugccugaacccgaguggaccuauccucggcucuccugucccggcagcacguuccagaaggcccugcuuauuucuccucaccgcuuuggggaaaccaaaggaaauuccgcuccgcugaucauuagagagcccuucaucgccugcggcccuaaggaauguaaacauuuugcucucacacacuacgccgcgcagcccgggggauauuacaacggcaagcggggcgaccgcaauaagcugagacaucugaucagcgucaaacucgggaagauuccuaccguggagaacucuaucuuccacauggccgcuugguccggaagcgccugccaugauggcaaagaguggacauauauugggguugacggacccgauaauaacgcucugcuuaagaucaaauacggcgaagccuacaccgacacguaucacucuuacgcgaauaacauucugcggacacaggaguccgccuguaauugcaucgggggaaacuguuaucucaugauuaccgauggcagcgcuuccggcaucucugaaugccgcuuucugaagaucagagaggggcggauuaucaaggagauuuucccgacaggacgcgugaaacacaccgaagaguguaccugcggcuuugccagcaauaagacaaucgaaugugcuugcagagacaacuccuacacggccaaacggccuuucgucaaacuuaauguggagaccgauacagccgaaauucgccugaugugcaccgagacauaucucgacacccccagaccugaugacgggagcaucacgggacccugugagucuaacggcgauaagggguccggaggcaucaagggcggguuuguucaucaacggauggcuagcaaaauuggacgcugguacucuagaacaaugagcaagaccaagcggaugggcauggggcuguaugugaaauacgacggagaccccugggcggauuccgacgcccuggcucucucuggcgucauggugagcauggaggaaccugggugguacuccuucggcuuugaaaucagagauaagaaaugcgacgugccguguauuggaaucgagaugguccacgauggcgggaaggaaaccuggcauagcgccgccacagcuauuuauugccugaugggaucuggccagcuucugugggacaccguuacagggguggauauggcccucuga

SEQ ID NO: 221321 - RNA, 1401 nt, Artificial Sequence; identical to SEQ ID NO: 221265
  derived and/or modified CDS sequence (opt5) from neuraminidase__InfluenzaB__AGX17536

SEQ ID NO: 221322 - RNA, 1401 nt, Artificial Sequence; identical to SEQ ID NO: 221296
  derived and/or modified CDS sequence (opt5) from neuraminidase__InfluenzaB__AGX17547

SEQ ID NO: 221323 - RNA, 1401 nt, Artificial Sequence
  derived and/or modified CDS sequence (opt5) from neuraminidase__InfluenzaB__AGX17558
augcugcccagcaccauccagacacucacgcuguuccuuaccuccggcggggugcugcucucucuguacgucagcgccucccuuucuuaucugcucuacagcgacguucugcugaaguuuuccccugcugagauuacagccccgaccaugccccucgauugcgcgaacgcuucuaaugugcaagccgugaacagaagcgccacaaaaggagucacccugcuucugccugaacccgaguggacauauccucggcucuccugucccggcagcaccuuccagaaggcucugcuuaucucuccucaccgcuuuggggaaacgaaaggaaauuccgccccgcugauuaucagagagcccuucauugcuugcggcccuaaggaauguaaacauuuugcccucacccacuacgcggcccagcccgggggauauuacaacggcacacggggcgaccgcaauaagcugagacaucugaucagcgugaagcucgggaaaaucccuaccguugagaacucuauuuuccacauggcugccugguccggaagcgcuugccaugauggcaaggaguggacauauaucgggguggacggacccgauaauaacgcccugcuuaaaauuaaguacggcgaagcguacaccgacacguaucacucuuacgccaauaacauccugcggacacaggaguccgcuuguaauugcauugggggaaacuguuaucucaugaucaccgauggcagcgccuccggcgucucugaaugccgcuuucugaaaauuagagaggggcggaucaucaaggagauuuucccgacaggacgcgugaagcacaccgaagaguguaccugcggcuuugcuagcaauaaaacaaucgaaugugccugcagagacaacuccuacacggccaagcggccuuucguuaaacuuaauguggagaccgauacagcugaaauucgccugaugugcaccgagacauaucucgacacccccagaccugaugacgggagcaucacgggacccugugagucuaacggcgauaagggguccggaggcauuaaaggcggguuuguccaucaacggauggcgagcaagaucggacgcugguacucuagaacaaugagcaaaaccaagcggaugggcauggggcuguaugugaaguacgacggagaccccugggccgauuccgacgcucuggcccucucuggcgugauggucagcauggaggaaccugggugguacuccuucggcuuugaaaucaaagauaagaaaugcgacguuccguguauuggaaucgagauggugcacgauggcgggaaggaaaccuggcauagcgccgcuacagccauuuauugccugaugggaucuggccagcuucugugggacaccgugacaggggucgauauggcgcucuga

SEQ ID NO: 221324 - RNA, 1401 nt, Artificial Sequence; identical to SEQ ID NO: 220815
  derived and/or modified CDS sequence (opt5) from neuraminidase__InfluenzaB__AGX17569

SEQ ID NO: 221325 - RNA, 1401 nt, Artificial Sequence; identical to SEQ ID NO: 220742
  derived and/or modified CDS sequence (opt5) from neuraminidase__InfluenzaB__AGX17580

SEQ ID NO: 221326 - RNA, 1401 nt, Artificial Sequence
  derived and/or modified CDS sequence (opt5) from neuraminidase__InfluenzaB__AGX17591
augcugcccagcaccauccagacacucacgcuguuccuuaccuccggcggggugcugcucucucuguacgucagcgccucccuuucuuaucugcucuacagcgacauucugcugaaguuuccuccgacagagaucaccgcucccacaaugccucucgauugcgccaacgcguccaauguucaagcugugaacagaucugccaccaaaggagugacacugcuucugcccgaaccugaguggaccuauccccggcucagcuguccuggcuccacguuccagaaggcccugcuuauuagcccgcaccgcuuuggggaaaccaaaggaaauucugcuccccugaucauuagagagccuuucaucgccugcggccccaaggaauguaaacauuuugcucucacacacuacgccgcgcagccugggggauauuacaacggcacccggggcgaccgcaauaagcugagacaucugaucuccgucaagcucgggaaaauucccacaguggagaacagcaucuuccacauggccgcuuggucuggauccgccugccaugauggcaaggaguggaccuauauugggguugacggaccggauaauaacgcucugcuuaaaaucaaguacggcgaagccuacacggacacauaucacagcuacgcgaauaacauucugcggacccaggagucugccuguaauugcaucgggggaaacuguuaucucaugauuacagauggcuccgcuagcggcguguccgaaugccgcuuucugaaaaucagagaggggcggaucauuaaggagaucuucccuaccggacgcgucaagcacaccgaagaguguacaugcggcuuugccucuaauaaaacgauugaaugugcuugcagagacaacagcuacaccgccaagcggcccuucgugaaacuuaauguugagacagauaccgccgaaauccgccugaugugcacagagaccuaucucgacacgccuagacccgaugacggguccauuacaggacccugugagagcaacggcgauaaggggucuggaggcaucaaaggcggguuugugcaucaacggauggcuuccaagaucggacgcugguacagcagaaccaugucuaaaaccaagcggaugggcauggggcuguaugucaaguacgacggagacccuugggcggauagcgacgcccuggcuuucuccggcgugauggugucuauggaggaaccggggugguacagcuuuggcuucgaaauuaaagauaagaaaugcgacguccccuguaucggaauugagaugguucacgauggcgggaaggaaacauggcauuccgccgccaccgcuaucuauugccucaugggaagcggccagcugcuuugggacacagugacgggggugaacauggcccuguga

SEQ ID NO: 221327 - RNA, 1401 nt, Artificial Sequence; identical to SEQ ID NO: 220740
  derived and/or modified CDS sequence (opt5) from neuraminidase__InfluenzaB__AGX17602

SEQ ID NO: 221328 - RNA, 1401 nt, Artificial Sequence; identical to SEQ ID NO: 221326
  derived and/or modified CDS sequence (opt5) from neuraminidase__InfluenzaB__AGX17613

SEQ ID NO: 221329 - RNA, 1401 nt, Artificial Sequence; identical to SEQ ID NO: 220913
  derived and/or modified CDS sequence (opt5) from neuraminidase__InfluenzaB__AGX17624

SEQ ID NO: 221330 - RNA, 1401 nt, Artificial Sequence
  derived and/or modified CDS sequence (opt5) from neuraminidase__InfluenzaB__AGX17635
augcugcccagcaccauccagacacucacgcuguuccuuaccuccggcggggugcugcucucucuguacgucagcgccucccuuucuuaucugcucuacagcgacauucugcugaaguuuccuccgacagagaucaccgcucccacaaugccucucgauugcgccaacgcguccaauguucaagcugugaacagaucugccaccaaaggagugacacugcuucugcccgaaccugaguggaccuauccccggcucagcuguccuggcuccacguuccagaaggcccugcuuauuagcccgcaccgcuuuggggaaaccaaaggaaauucugcuccccugaucauuagagagccuuucaucgccugcggccccaaggaauguaaacauuuugcucucacacacuacgccgcgcagccugggggauauuacaacggcacccggggcgaccgcaauaagcugagacaucugaucuccgucaagcucgggaaaauucccacaguggagaacagcaucuuccacauggccgcuuggucuggauccgccugccaugauggcaaggaguggaccuauauugggguugacggaccggauaauaacgcucugcuuaaaaucaaguacggcgaagccuacacggacacauaucacagcuacgcgaauaacauucugcggacccaggagucugccuguaauugcaucgggggaaacuguuaucucaugauuacagauggcuccgcuagcggcaucuccgaaugccgcuuucugaaaaucagagaggggcggauuaucaaggagauuuucccuaccggacgcgugaagcacaccgaagaguguacaugcggcuuugccucuaauaaaacgaucgaaugugcuugcagagacaacagcuacaccgccaagcggcccuucgucaaacuuaauguggagacagauaccgccgaaauucgccugaugugcacagagaccuaucucgacacgccuagacccgaugacggguccaucacaggacccugugagagcaacggcgauaaggggucuggaggcaucaaaggcggguuuguucaucaacggauggcuuccaagauuggacgcugguacagcagaaccaugucuaaaaccaagcggaugggcauggggcuguaugugaaguacgacggagacccuugggcggauagcgacgcccuggcuuucuccggcgucauggugucuauggaggaaccggggugguacagcuuuggcuucgaaaucaaagauaagaaaugcgacgugcccuguauuggaaucgagaugguccacgauggcgggaaggaaacauggcauuccgccgccaccgcuauuuauugccucaugggaagcggccagcugcuuugggacacaguuacgggggugaacauggcccuguga

SEQ ID NO: 221331 - RNA, 1401 nt, Artificial Sequence; identical to SEQ ID NO: 220913
  derived and/or modified CDS sequence (opt5) from neuraminidase__InfluenzaB__AGX17657

SEQ ID NO: 221332 - RNA, 1401 nt, Artificial Sequence; identical to SEQ ID NO: 221326
  derived and/or modified CDS sequence (opt5) from neuraminidase__InfluenzaB__AGX17668

SEQ ID NO: 221333 - RNA, 1401 nt, Artificial Sequence
  derived and/or modified CDS sequence (opt5) from neuraminidase__InfluenzaB__AGX17679
augcugcccagcaccauccagacacucacgcuguuccuuaccuccggcggggugcugcucucucuguacgucagcgccucccuuucuuaucugcucuacagcgacauucugcugaaguuuuccccuacagagaucaccgcuccgacaaugccccucgauugcgccaacgcgucuaauguucaagcugugaacagaagcgccaccaaaggagugacacugcuucugccugaacccgaguggaccuauccucggcucuccugucccggcagcacguuccagaaggcccugcuuauuucuccucaccgcuuuggggaaaccaaaggaaauuccgcuccgcugaucauuagagagcccuucaucgccugcggcccuaacgaauguaagcauuuugcucucacacacuacgccgcgcagcccgggggauauuacaauggcacccggggcgaccgcaacaaacugagacaucugaucagcgucaagcucgggaagauuccuacaguggaaaauucuaucuuccacauggccgcuugguccggaagcgccugccaugauggcaaagaguggaccuauauugggguugacggacccgauaacaaugcucugcuuaagaucaaauacggcgaggccuacacggacacauaucacucuuacgcgaacaauauucugcggacccaggaguccgccuguaacugcaucgggggaaauuguuaucucaugauuacagauggcagcgcuuccggcgugucugaaugccgcuuucugaagaucagagaggggcggaucauuaaagagaucuucccgaccggacgcgucaagcacaccgaagaguguacaugcggcuuugccagcaacaagacgauugaaugugcuugcagagacaauuccuacaccgccaaacggccuuucgugaaacuuaacguugagaucgauacagccgaaauucgccugaugugcaccgacacauaucucgauacccccagaccugacgaugggagcaucacgggacccugugagucuaacggcgacaagggguccggaggcaucaagggcggguuugugcaucaacggauggcuagcaaaauuggacgcugguacucuagaacaaugagcaagaccgagcggaugggcauggggcuguaugucaaauacgacggagaucccugggcggacuccgaugcccuggcuuucucuggcgugauggugagcaugaaggaaccugggugguacuccuuuggcuucgagaucaaggacaaaaagugcgaugucccguguauuggaaucgaaaugguucacgacggcgggaaagagaccuggcauagcgccgccacagcuauuuauugccucaugggaucuggccagcugcuuugggauaccgugacagggguggacauggcccuguga

SEQ ID NO: 221334 - RNA, 1401 nt, Artificial Sequence; identical to SEQ ID NO: 220913
  derived and/or modified CDS sequence (opt5) from neuraminidase__InfluenzaB__AGX17690

SEQ ID NO: 221335 - RNA, 1401 nt, Artificial Sequence
  derived and/or modified CDS sequence (opt5) from neuraminidase__InfluenzaB__AGX17701
augcugcccagcaccauccagacacucacgcuguuccuuaccuccggcggggugcugcucucucuguacgucagcgccucccuuucuuaucugcucuacagcgacauucugcugaaguuuccuccgacagagaucaccgcucccacaaugccucucgauugcgccaacgcguccaauguucaagcugugaacagaucugccaccaaaggagugacacugcuucugcccgaaccugaguggaccuauccccggcucagcuguccuggcuccacguuccagaaggcccugcuuauuagcccgcaccgcuuuggggaaaccaaaggaaauucugcuccccugaucauuagagagccuuucaucgccugcggccccaaggaauguaaacauuuugcucucacacacuacgccgcgcagccugggggauauuacaacggcaagcggggcgaccgcaauaagcugagacaucugaucuccgucaaacucgggaagauucccaccguggagaacagcaucuuccacauggccgcuuggucuggauccgccugccaugauggcaaagaguggacauauauugggguugacggaccggauaauaacgcucugcuuaagaucaaauacggcgaagccuacaccgacacguaucacagcuacgcgaauaacauucugcggacacaggagucugccuguaauugcaucgggggaaacuguuaucucaugauuaccgauggcuccgcuagcggcguguccgaaugccgcuuucugaagaucagagaggggcggaucauuaaggagaucuucccuacaggacgcgucaaacacaccgaagaguguaccugcggcuuugccucuaauaagacaauugaaugugcuugcagagacaacagcuacacggccaaacggcccuucgugaaacuuaauguugagaccgauacagccgaaauccgccugaugugcaccgagacauaucucgacaccccuagacccgaugacggguccauuacgggacccugugagagcaacggcgauaaggggucuggaggcaucaagggcggguuugugcaucaacggauggcuuccaaaaucggacgcugguacagcagaacaaugucuaagaccaagcggaugggcauggggcuguaugucaaauacgacggagacccuugggcggauagcgacgcccuggcuuucuccggcgugauggugucuauggaggaaccggggugguacagcuuuggcuucgaaauuaaggauaaaaagugcgacguccccuguaucggaauugagaugguucacgauggcgggaaagaaaccuggcauuccgccgccacagcuaucuauugccucaugggaagcggccagcugcuuugggacaccgugacaggggugaacauggcccuguga

SEQ ID NO: 221336 - RNA, 1401 nt, Artificial Sequence; identical to SEQ ID NO: 220913
  derived and/or modified CDS sequence (opt5) from neuraminidase__InfluenzaB__AGX17723

SEQ ID NO: 221337 - RNA, 1401 nt, Artificial Sequence; identical to SEQ ID NO: 221333
  derived and/or modified CDS sequence (opt5) from neuraminidase__InfluenzaB__AGX17734

SEQ ID NO: 221338 - RNA, 1401 nt, Artificial Sequence
  derived and/or modified CDS sequence (opt5) from neuraminidase__InfluenzaB__AGX17745
augcugcccagcaccauccagacacucacgcuguuccuuaccuccggcggggugcugcucucucuguacgucagcgccucccuuucuuaucugcucuacagcgacauucugcugaaguuuccuccgacagagaucaccgcucccacaaugccucucgauugcgccaacgcguccaauguucaagcugugaacagaucugccaccaaaggagugacacugcuucugcccgaaccugaguggaccuauccccggcucagcuguuccggcagcacguuccagaaggcccugcuuauuucuccucaccgcuuuggggaaaucaaaggaaauuccgcuccgcugauuaucagagagcccuucaucgccugcggcccuaaggaauguaaacauuuugcucucacccacuacgccgcgcagcccgggggauauuacaacggcacacggggcgaccgcaauaagcugagacaucugauuagcgucaagcucgggaaaaucccuaccguggagaacucuauuuuccacauggccgcuugguccggaagcgccugccaugauggcaaggaguggacauauaucgggguugacggacccgauaauaacgcucugcuuaaaauuaaguacggcgaagccuacaccgacacguaucacucuuacgcgaauaacauccugcggacacaggaguccgccuguaauugcauugggggaaacuguuaucucaugaucaccgauggcagcgcuuccggcgugucugaaugccgcuuucugaaaaucagagaggggcggauuaucaaggagauuuucccgacaggacgcgucaagcacaccgaagaguguaccugcggcuuugccagcaauaaaacaaucgaaugugcuugcagagacaacuccuacacggccaagcggccuuucgugaaacuuaauguugagaccgauacagccgaaauucgccugaugugcaccgagacauaucucgacacccccagaccugaugacgggagcaucacgggacccugugagucuaacggcgauaagggguccggaggcaucaaaggcggguuugugcaucaacggauggcuagcaagauuggacgcugguacucuagaacaaugagcaaaaccaagcggaugggcauggggcuguaugucaaguacgacggagaccccugggcggauuccgacgcccuggcuuucucuggcgugauggugagcauggaggaaccugggugguacuccuuuggcuucgaaaucaaagauaagaaaugcgacgucccguguauuggaaucgagaugguucacgauggcgggaaggaaaccuggcauagcgccgccacagcuauuuauugccucaugggaucuggccagcugcuuugggacaccgugacaggggugaacauggcccuguga

SEQ ID NO: 221339 - RNA, 1401 nt, Artificial Sequence
  derived and/or modified CDS sequence (opt5) from neuraminidase__InfluenzaB__AGX17756
augcugcccagcaccauccagacacucacgcuguuccuuaccuccggcggggugcugcucucucuguacgucagcgccucccuuucuuaucugcucuacagcgacauucugcugaaguuuuccccuacagagaucaccgcuccgacaaugccccucgauugcgccaacgcgucuaauguucacgcugugaacagaagcgccaccaaaggagugacacugcuucugccugaacccgaguggaccuauccucggcucuccugucccggcagcacguuccaaaaggcccugcuuauuucuccucaucgcuuuggggaaaccaaaggaaauuccgcuccgcugaucauuagagagcccuucaucgccugcggcccuaacgaauguaagcacuuugcucucacacauuacgccgcgcggcccgggggauauuacaauggcacccgcggcgacagaaacaaacugcggcaccugaucagcgucaagcucgggaagauuccuacaguggaaaauucuaucuuccauauggccgcuugguccggaagcgccugccacgauggcaaagaguggaccuauauugggguugacggacccgauaacaaugcucugcuuaagaucaaauacggcgaggccuacacggacacauaucacucuuacgcgaacaauauucugcgcacccaggaguccgccuguaacugcaucgggggaaauuguuaucucaugauuacagauggcagcgcuuccggcgugucugaaugcagauuucugaagauccgggaggggcgcaucauuaaagagaucuucccgaccggaagagucaagcauaccgaagaguguacaugcggcuuugccagcaacaagacgauugaaugugcuugccgggacaauuccuacaccgccaaacgcccuuucgugaaacuuaacguugagacagauaccgccgaaaucagacugaugugcacagacaccuaucucgauacgccccggccugacgaugggagcauuacaggacccugugagucuaacggcgacaagggguccggaggcaucaagggcggguuugugcaccagcgcauggcuagcaaaaucggaagaugguacucucggaccaugagcaagaccgagagaaugggcauggggcuguaugucaaauacgacggagaucccugggcggacuccgaugcccuggcuuucucuggcgugauggugagcaugaaggaaccugggugguacuccuuuggcuucgagauuaaggacaaaaagugcgaugucccguguaucggaauugaaaugguucaugacggcgggaaagagacauggcacagcgccgccaccgcuaucuauugccucaugggaucuggccagcugcuuugggauacagugacggggguggacauggcccuguga

SEQ ID NO: 221340 - RNA, 1401 nt, Artificial Sequence; identical to SEQ ID NO: 220960
  derived and/or modified CDS sequence (opt5) from neuraminidase__InfluenzaB__AGX17767

SEQ ID NO: 221341 - RNA, 1401 nt, Artificial Sequence
  derived and/or modified CDS sequence (opt5) from neuraminidase__InfluenzaB__AGX17778
augcugcccagcaccauccagacacucacgcuguuccuuaccuccggcggggugcugcucucucuguacgucagcgccucccuuucuuaucugcucuacagcgacauucugcugaaguuuuccccuacagagaucaccgcuccgacaaugccccucgauugcgccaacgcgucuaauguucacgcugugaacagaagcgccaccaaaggagugacacugcuucugccugaacccgaguggaccuauccucggcucuccugucccggcagcacguuccaaaaggcccugcuuauuucuccucaucgcuuuggggaaaccaaaggaaauuccgcuccgcugaucauuagagagcccuucaucgccugcggcccuaacgaauguaagcacuuugcucucacacauuacgccgcgcagcccgggggauauuacaauggcacccggggcgaccgcaacaaacugagacaccugaucagcgucaagcucgggaagauuccuacaguggaaaauucuaucuuccauauggccgcuugguccggaagcgccugccacgauggcaaagaguggaccuauauugggguugacggacccgauaacaaugcucugcuuaagaucaaauacggcgaggccuacacggacacauaucacucuuacgcgaacaauauucugcggacccaggaguccgccuguaacugcaucgggggaaauuguuaucucaugauuacagauggcagcgcuuccggcgugucugaaugccgcuuucugaagaucagagaggggcggaucauuaaagagaucuucccgaccggacgcgucaagcauaccgaagaguguacaugcggcuuugccagcaacaagacgauugaaugugcuugcagagacaauuccuacaccgccaaacggccuuucgugaaacuuaacguugagacagauaccgccgaaauccgccugaugugcacagacaccuaucucgauacgcccagaccugacgaugggagcauuacaggacccugugagucuaacggcgacaagggguccggaggcaucaagggcggguuugugcaccagcggauggcuagcaaaaucggacgcugguacucuagaaccaugagcaagaccgagcggaugggcauggggcuguaugucaaauacgacggagaucccugggcggaauccgacgcccuggcuuucucuggcgugauggugagcaugaaggagccugggugguacuccuuuggcuucgaaauuaaggauaaaaagugcgacgucccguguaucggaauugagaugguucaugauggcgggaaagaaacauggcacagcgccgccaccgcuaucuauugccucaugggaucuggccaacugcuuugggacacagugacggggguggauauggcccuguga

SEQ ID NO: 221342 - RNA, 1401 nt, Artificial Sequence
  derived and/or modified CDS sequence (opt5) from neuraminidase__InfluenzaB__AGX17789
augcugcccagcaccauccagacacucacgcuguuccuuaccuccggcggggugcugcucucucuguacgucagcgccucccuuucuuaucugcucuacagcgacauucugcugaaguuuuccccuacagagaucaccgcuccgacaaugccccucgauugcgccaacgcgucuaauguucaagcugugaacagaagcgccaccaaaggagugacacugcuucugccugaacccgaguggaccuauccucggcucuccugucccggcagcacguuccagaaggcccugcuuauuucuccucaccgcuuuggggaaaccaaaggaaauuccgcuccgcugaucauuagagagcccuucaucgccugcggcccuaacgaauguaagcauuuugcucucacacacuacgccgcgcagcccgggggauauuacaauggcacccggggcgaccgcaacaaacugagacaucugaucagcgucaagcucgggaagauuccuacaguggaaaauucuaucuuccacauggccgcuugguccggaagcgccugccaugauggcaaagaguggaccuauauugggguugacggacccgauaacaaugcucugcuuaagaucaaauacggcgaggccuacacggacacauaucacucuuacgcgaacaauauucugcggacccaggaguccgccuguaacugcaucgggggaaauuguuaucucaugauuacagauggcagcgcuuccggcgugucugaaugccgcuuucugaagaucagagaggggcggaucauuaaagagaucuucccgaccggacgcgucaagcacaccgaagaguguacaugcggcuuugccagcaacaagacgauugaaugugcuugcagagacaauuccuacaccgccaaacggccuuucgugaaacuuaacguugagaucgauacagccgaaauucgccugaugugcaccgacacauaucucgauacccccagaccugacgaugggagcaucacgggacccugugagucuaacggcgacaagggguccggaggcaucaagggcggguuugugcaucaacggauggcuagcaaaauuggacgcugguacucuagaacaaugagcaagaccgagcggaugggcauggggcuguaugucaaauacgacggagaucccugggcggacuccgaugcccugguguucucuggcgugauggucagcaugaaggaaccugggugguacuccuuuggcuucgagaucaaggacaaaaagugcgauguuccguguauuggaaucgaaauggugcacgacggcgggaaagagaccuggcauagcgcugccacagccauuuauugccucaugggaucuggccagcugcuuugggauaccgugacaggggucgacauggcucuguga

SEQ ID NO: 221343 - RNA, 1401 nt, Artificial Sequence; identical to SEQ ID NO: 220913
  derived and/or modified CDS sequence (opt5) from neuraminidase__InfluenzaB__AGX17800

SEQ ID NO: 221344 - RNA, 1401 nt, Artificial Sequence
  derived and/or modified CDS sequence (opt5) from neuraminidase__InfluenzaB__AGX17811
augcugcccagcaccauccagacacucacgcuguuccuuaccuccggcggggugcugcucucucuguacgucagcgccucccuuucuuaucugcucuacagcgacauucugcugaaguuuccuccgacagagaucaccgcucccacaaugccucucgauugcgccaacgcguccaauguucaagcugugaacagaucugccaccaaaggagugacacugcuucugcccgaaccugaguggaccuauccccggcucagcuguccuggcuccacguuccagaaggcccugcuuauuagcccgcaccgcuuuggggaaaccaaaggaaauucugcuccccugaucauuagagagccuuucaucgccugcggccccaaggaauguaaacauuuugcucucacacacuacgccgcgcagccugggggauauuacaacggcacccggggcgaccgcaauaagcugagacaucugaucuccgucaagcucgggaaaauucccacaguggagaacagcaucuuccacauggccgcuuggucuggauccgccugccaugauggcaaggaguggaccuauauugggguugacggaccggauaauaacgcucugcuuaaaaucaaguacggcgaagccuacacggacacauaucacagcuacgcgaauaacauucugcggacccaggagucugccuguaauugcaucgggggaaacuguuaucucaugauuacagauggcuccgcuagcggcguguccgaaugccgcuuucugaaaaucagagaggggcggaucauuaaggagaucuucccuaccggacgcgucaagcacaccgaagaguguacaugcggcuuugccucuaauaaaacgauugaaugugcuugcagagacaacagcuacaccgccaagcggcccuucgugaaacuuaauguugagacagauaccgccgaaauccgccugaugugcacagagaccuaucucgacacgccuagacccgaugacggguccauuacaggacccugugagagcaacggcgauaaggggucuggaggcaucaaaggcggguuugugcaucaacggauggcuuccaagaucggacgcugguacagcagaaccaugucuaaaaccaagcggaugggcauggggcuguaugucaaguacgacggagacccuugggcggauagcgacgcccuggcuuucuccggcgugauggugucuauggaggaaccggggugguacagcuuuggcuucgaaauuaaagauaagaaaugcgacguccccuguaucggaauugagaugguucacgauggcgggaaggaaacauggcauuccgccgccaccgcuaucuauugccucaugggaagcggccagcugcuuugggacacagugacgggggugaacauggcccaguga

SEQ ID NO: 221345 - RNA, 1401 nt, Artificial Sequence; identical to SEQ ID NO: 221326
  derived and/or modified CDS sequence (opt5) from neuraminidase__InfluenzaB__AGX17822

SEQ ID NO: 221346 - RNA, 1401 nt, Artificial Sequence
  derived and/or modified CDS sequence (opt5) from neuraminidase__InfluenzaB__AGX17833
augcugcccagcaccauccagacacucacgcuguuccuuaccuccggcggggugcugcucucucuguacgucagcgccucccuuucuuaucugcucuacagcgacauucugcugaaguuuccuccgacagagaucaccgcucccacaaugccucucgauugcgccaacgcguccaauguucaagcugugaacagaucugccaccaaaggagugacacugcuucugcccgaaccugaguggaccuauccccggcucagcuguccuggcuccacguuccagaaggcccugcuuauuagcccgcaccgcuuuggggaaaccaaaggaaauucugcuccccugaucauuagagagccuuucaucgccugcggccccaaggaauguaaacauuuugcucucacacacuacgccgcgcagccugggggauauuacaacggcacccggggcgaccgcaauaagcugagacaucugaucuccauuaagcucgggaaaauccccacagucgagaacagcauuuuccacauggccgcuuggucuggauccgccugccaugauggcaaggaguggaccuauaucgggguggacggaccggauaauaacgcucugcuuaaaauuaaguacggcgaagccuacacggacacauaucacagcuacgcgaauaacauccugcggacccaggagucugccuguaauugcauugggggaaacuguuaucucaugaucacagauggcuccgcuagcggcguuuccgaaugccgcuuucugaaaaucagagaggggcggauuaucaaggagauuuucccuaccggacgcgugaagcacaccgaagaguguacaugcggcuuugccucuaauaaaacgaucgaaugugcuugcagagacaacagcuacaccgccaagcggcccuucgucaaacuuaauguggagacagauaccgccgaaauucgccugaugugcacagagaccuaucucgacacgccuagacccgaugacggguccaucacaggacccugugagagcaacggcgauaaggggucuggaggcaucaaaggcggguuuguucaucaacggauggcuuccaagauuggacgcugguacagcagaaccaugucuaaaaccaagcggaugggcauggggcuguaugugaaguacgacggagacccuugggcggauagcgacgcccuggcuuucuccggcgucauggugucuauggaggaaccggggugguacagcuuuggcuucgaaaucaaagauaagaaaugcgacgugcccuguauuggaaucgagaugguccacgauggcgggaaggaaacauggcauuccgccgccaccgcuauuuauugccucaugggaagcggccagcugcuuugggacacaguuacgggggugaacauggcccuguga

SEQ ID NO: 221347 - RNA, 1401 nt, Artificial Sequence; identical to SEQ ID NO: 221333
  derived and/or modified CDS sequence (opt5) from neuraminidase__InfluenzaB__AGX17844

SEQ ID NO: 221348 - RNA, 1401 nt, Artificial Sequence; identical to SEQ ID NO: 221341
  derived and/or modified CDS sequence (opt5) from neuraminidase__InfluenzaB__AGX17855

SEQ ID NO: 221349 - RNA, 1401 nt, Artificial Sequence; identical to SEQ ID NO: 220960
  derived and/or modified CDS sequence (opt5) from neuraminidase__InfluenzaB__AGX17866

SEQ ID NO: 221350 - RNA, 1401 nt, Artificial Sequence; identical to SEQ ID NO: 221326
  derived and/or modified CDS sequence (opt5) from neuraminidase__InfluenzaB__AGX17877

SEQ ID NO: 221351 - RNA, 1401 nt, Artificial Sequence; identical to SEQ ID NO: 221333
  derived and/or modified CDS sequence (opt5) from neuraminidase__InfluenzaB__AGX17888

SEQ ID NO: 221352 - RNA, 1401 nt, Artificial Sequence; identical to SEQ ID NO: 221326
  derived and/or modified CDS sequence (opt5) from neuraminidase__InfluenzaB__AGX17899

SEQ ID NO: 221353 - RNA, 1401 nt, Artificial Sequence; identical to SEQ ID NO: 221333
  derived and/or modified CDS sequence (opt5) from neuraminidase__InfluenzaB__AGX17910

SEQ ID NO: 221354 - RNA, 1401 nt, Artificial Sequence; identical to SEQ ID NO: 221333
  derived and/or modified CDS sequence (opt5) from neuraminidase__InfluenzaB__AGX17921

SEQ ID NO: 221355 - RNA, 1401 nt, Artificial Sequence; identical to SEQ ID NO: 220960
  derived and/or modified CDS sequence (opt5) from neuraminidase__InfluenzaB__AGX17932

SEQ ID NO: 221356 - RNA, 1401 nt, Artificial Sequence
  derived and/or modified CDS sequence (opt5) from neuraminidase__InfluenzaB__AGX17943
augcugcccagcaccauccagacacucacgcuguuccuuaccuccggcggggugcugcucucucuguacgucagcgccucccuuucuuaucugcucuacagcgacauucugcugaaguuuccuccgacagagaucaccgcucccacaaugccucucgauugcgccaacgcguccaauguucaagcugugaacagaucugccaccaaaggagugacacugcuucugcccgaaccugaguggaccuauccccggcucagcuguccuggcuccacguuccagaaggcccugcuuauuagcccgcaccgcuuuggggaaaccaaaggaaauucugcuccccugaucauuagagagccuuucaucgccugcggccccaaggaauguaaacauuuugcucucacacacuacgccgcgcagccugggggauauuacaacggcacccggggcgaccgcaauaagcugagacaucugaucuccguccggcucgggaagauucccacaguggagaacagcaucuuccacauggccgcuuggucuggauccgccugccaugauggcaaagaguggaccuauauugggguugacggaccggauaauaacgcucugcuuaagaucaaauacggcgaagccuacacggacacauaucacagcuacgcgaauaacauucugcgcacccaggagucugccuguaauugcaucgggggaaacuguuaucucaugauuacagauggcuccgcuagcggcguguccgaaugcagauuucugaagauccgggaggggcgcaucauuaaagagaucuucccuaccggaagagucaagcacaccgaagaguguacaugcggcuuugccucuaauaagacgauugaaugugcuugccgggacaacagcuacaccgccaaacgccccuucgugaaacuuaauguugagacagauaccgccgaaaucagacugaugugcacagagaccuaucucgacacgccucggcccgaugacggguccauuacaggacccugugagagcaacggcgauaaggggucuggaggcaucaagggcggguuugugcaucaacgcauggcuuccaaaaucggaagaugguacagccggaccaugucuaagaccaaaagaaugggcauggggcuguaugucaaguacgacggagacccuugggcggauagcgacgcccuggcuuucuccggcgugauggugucuauggaggaaccggggugguacagcuuuggcuucgaaauuaaggauaaaaagugcgacguccccuguaucggaauugagaugguucacgauggcgggaaagaaacauggcauuccgccgccaccgcuaucuauugccucaugggaagcggccagcugcuuugggacacagugacgggggugaacauggcccuguga

SEQ ID NO: 221357 - RNA, 1401 nt, Artificial Sequence; identical to SEQ ID NO: 221326
  derived and/or modified CDS sequence (opt5) from neuraminidase__InfluenzaB__AGX17954

SEQ ID NO: 221358 - RNA, 1401 nt, Artificial Sequence
  derived and/or modified CDS sequence (opt5) from neuraminidase__InfluenzaB__AGX17976
augcugcccagcaccauccagacacucacgcuguuccuuaccuccggcggggugcugcucucucuguacgucagcgccucccuuucuuaucugcucuacagcgacauucugcugaaguuuuccccuacagagaucaccgcuccgacaaugccccucgauugcgccaacgcgucuaauguucacgcugugaacagaagcgccaccaaaggagugacaccucugcuucccgaaccugaguggaccuauccccggcuguccuguccuggcagcacguuccaaaaggcccuccugauuucuccgcaucgcuuuggggaaaccaaaggaaauuccgcuccccuuaucauuagagagccuuucaucgccugcggccccaacgaauguaagcacuuugcucugacacauuacgccgcgcagccugggggauauuacaauggcacccggggcgaccgcaacaaacucagacaccugaucagcgucaagcuggggaagauucccacaguggaaaauucuaucuuccauauggccgcuugguccggaagcgccugccacgauggcaaagaguggaccuauauugggguugacggaccggauaacaaugcucuccugaagaucaaauacggcgaggccuacacggacacauaucacucuuacgcgaacaauauucuucggacccaggaguccgccuguaacugcaucgggggaaauuguuaucugaugauuacagauggcagcgcuuccggcgugucugaaugccgcuuucucaagaucagagaggggcggaucauuaaagagaucuucccuaccggacgcgucaagcauaccgaagaguguacaugcggcuuugccagcaacaagacgauugaaugugcuugcagagacaauuccuacaccgccaaacggcccuucgugaagcugaacguugagacagauaccgccgaaauccgccuuaugugcacagacaccuaucuggauacgccuagacccgacgaugggagcauuacaggacccugugagucuaacggcgacaaaggguccggaggcaucaagggcggguuugugcaccagcggauggcuagcaaaaucggacgcugguacucuagaaccaugagcaagaccgagcggaugggcauggggcucuaugucaaauacgacggagauccuugggcggacuccgaugcccuggcuuucucuggcgugauggugagcaugaaggaaccggggugguacuccuuuggcuucgagauuaaggacaaaaagugcgauguccccuguaucggaauugaaaugguucaugacggcgggaaagagacauggcacagcgccgccaccgcuaucuauugccugaugggaucuggccaacuccugugggauacagugacggggguggacauggcccuuuga

SEQ ID NO: 221359 - RNA, 1401 nt, Artificial Sequence
  derived and/or modified CDS sequence (opt5) from neuraminidase__InfluenzaB__AGX17987
augcugcccagcaccauccagacacucacgcuguuccuuaccuccggcggggugcugcucucucuguacgucagcguuucccuuucuuaucugcucuacagcgacauucugcugaaguuuccuccgacagagaucaccgcccccacaaugccucucgauugcgcuaacgccuccaaugugcaagcggugaacagaucugcuaccaaaggagucacacugcuucugcccgaaccugaguggaccuauccccggcucagcuguccuggcuccacguuccagaaggcccugcuuauuagcccgcaccgcuuuggggaaaccaaaggaaauucugcuccccugaucauuagagagccuuucaucgcuugcggccccaaggaauguaaacauuuugcccucacacacuacgcugcccagccugggggauauuacaacggcacccggggcgaccgcaauaagcugagacaucugaucuccgugaagcucgggaaaauucccacaguugagaacagcaucuuccacauggcggccuggucuggauccgcuugccaugauggcaaggaguggaccuauauugggguggacggaccggauaauaacgcccugcuuaaaaucaaguacggcgaagccuacacggacacauaucacagcuacgccaauaacauucugcggacccaggagucugcguguaauugcaucgggggaaacuguuaucucaugauuacagauggcuccgccagcggcgucuccgaaugccgcuuucugaaaaucagagaggggcggaucauuaaggagaucuucccuaccggacgcgugaagcacaccgaagaguguacaugcggcuuugcuucuaauaaaacgauugaaugugccugcagagacaacagcuacaccgcuaagcggcccuucguuaaacuuaauguggagacagauaccgccgaaauccgccugaugugcacagagaccuaucucgacacgccuagacccgaugacggguccauuacaggacccugugagagcaacggcgauaaggggucuggaggcaucaaaggcggguuuguccaucaacggauggccuccaagaucggacgcugguacagcagaaccaugucuaaaaccaagcggaugggcauggggcuguaugugaaguacgacggagacccuugggcugauagcgacgcgcuggccuucuccggcgugauggucucuauggaggaaccggggugguacagcuuuggcuucgaaauuaaagauaagaaaugcgacguucccuguaucggaauugagauggugcacgauggcgggaaggaaacauggcauuccgcugccaccgccaucuauugccucaugggaagcggccagcugcuuugggacacagugacgggggucaacauggcucuguga

SEQ ID NO: 221360 - RNA, 1401 nt, Artificial Sequence; identical to SEQ ID NO: 221333
  derived and/or modified CDS sequence (opt5) from neuraminidase__InfluenzaB__AGX17998

SEQ ID NO: 221361 - RNA, 1401 nt, Artificial Sequence; identical to SEQ ID NO: 221326
  derived and/or modified CDS sequence (opt5) from neuraminidase__InfluenzaB__AGX18009

SEQ ID NO: 221362 - RNA, 1401 nt, Artificial Sequence; identical to SEQ ID NO: 221359
  derived and/or modified CDS sequence (opt5) from neuraminidase__InfluenzaB__AGX18020

SEQ ID NO: 221363 - RNA, 1401 nt, Artificial Sequence; identical to SEQ ID NO: 221326
  derived and/or modified CDS sequence (opt5) from neuraminidase__InfluenzaB__AGX18031

SEQ ID NO: 221364 - RNA, 1401 nt, Artificial Sequence
  derived and/or modified CDS sequence (opt5) from neuraminidase__InfluenzaB__AGX18042
augcugcccagcaccauccagacacucacgcuguuccuuaccuccggcggggugcugcucucucuguacgucagcgccucccuuucuuaucugcucuacagcgacauucugcugaaguuuuccccuacagagaucaccgcuccgacaaugccccucaacugcgccaaugcgucuaacguucaagcugugaauagaagcgccaccaaaggagugacacugcuucugccugaacccgaguggaccuauccucggcucuccugucccggcagcacguuccagaaggcccugcuuauuucuccucaccgcuuuggggaaaccaaaggaaacuccgcuccgcugaucauuagagagcccuucaucgccugcggcccuaaugaauguaagcauuuugcucucacacacuacgccgcgcagcccgggggauauuacaacggcacccggggcgaucgcaauaaacugagacaucugaucagcgucaagcucgggaagauuccuacaguggagaacucuaucuuccacauggccgcuugguccggaagcgccugccaugacggcaaagaguggaccuauauugggguugauggacccgacaauaacgcucugcuuaagaucaaauacggcgaagccuacacggauacauaucacucuuacgcgaauaacauucugcggacccaggaguccgccuguaauugcaucgggggaaacuguuaucucaugauuacagacggcagcgcuuccggcgugucugaaugccgcuuucugaagaucagagaggggcggaucauuaaagagaucuucccgaccggacgcgucaagcacaccgaagaguguacaugcggcuuugccagcaauaagacgauugaaugugcuugcagagauaacuccuacaccgccaaacggccuuucgugaaacuuaacguugagaucgacacagccgaaauucgccugaugugcaccgauacauaucucgacacccccagaccugaugacgggagcaucacgggacccugugagucuaauggcgauaagggguccggaggcaucaagggcggguuugugcaucaacggauggcuagcaaaauuggacgcugguacucuagaacaaugagcaagaccgagcggaugggcauggggcuguaugucaaauacgacggagaccccugggcggauuccgacgcccuggcuuucucuggcgugauggugagcaugaaggaaccugggugguacuccuuuggcuucgagaucaaggauaaaaagugcgacgucccguguauuggaaucgaaaugguucacgauggcgggaaagagaccuggcauagcgccgccacagcuauuuauugccucaugggaucuggccagcugcuuugggacaccgugacagggguggauauggcccuguga

SEQ ID NO: 221365 - RNA, 1401 nt, Artificial Sequence; identical to SEQ ID NO: 221333
  derived and/or modified CDS sequence (opt5) from neuraminidase__InfluenzaB__AGX18053

SEQ ID NO: 221366 - RNA, 1401 nt, Artificial Sequence; identical to SEQ ID NO: 221333
  derived and/or modified CDS sequence (opt5) from neuraminidase__InfluenzaB__AGX18064

SEQ ID NO: 221367 - RNA, 1401 nt, Artificial Sequence
  derived and/or modified CDS sequence (opt5) from neuraminidase__InfluenzaB__AGX18075
augcugcccagcaccauccagacacucacgcuguuccuuaccuccggcggggugcugcucucucuguacgucagcgccucccuuucuuaucugcucuacagcgacauucugcugaaguuuccuccgacagagaucaccgcucccacaaugccucucgauugcgccaacgcguccaauguucaagcugugaacagaucugccaccaaaggagugacacugcuucugcccgaaccugaguggaccuauccccggcucagcuguccuggcuccacguuccagaaggcccugcuuauuagcccgcaccgcuuuggggaaaccaaaggaaauucugcuccccugaucauuagagagccuuucaucgccugcggccccaaggaauguaaacauuuugcucucacacacuacgccgcgcagccugggggauauuacaacggcacccggggcgaccgcaauaagcugagacaucugaucuccgucaagcucgggaaaauucccacaguggagaacagcaucuuccacauggccgcuuggucuggauccagcugccaugauggcaaggaguggaccuauauugggguugacggaccggauaauaacgcccugcuuaaaaucaaguacggcgaggcuuacacggacacauaucacucuuacgccaauaacauucugcggacccaggaguccgcguguaauugcaucgggggaaacuguuaucucaugauuacagauggcagcgccuccggcgugucugaaugccgcuuucugaaaaucagagaggggcggaucauuaaggagaucuucccuaccggacgcgucaagcacaccgaagaguguacaugcggcuuugcuagcaauaaaacgauugaaugugccugcagagacaacuccuacaccgcuaagcggcccuucgugaaacuuaauguugagacagauaccgccgaaauccgccugaugugcacagagaccuaucucgacacgccuagacccgaugacgggagcauuacaggacccugugagucuaacggcgauaagggguccggaggcaucaaaggcggguuugugcaucaacggauggccagcaagaucggacgcugguacucuagaaccaugagcaaaaccaagcggaugggcauggggcuguaugucaaguacgacggagacccuugggcugauuccgacgcgcuggccuucucuggcgugauggugagcauggaagaaccggggugguacuccuuuggcuucgaaauuaaagauaagaaaugcgacguccccuguaucggaauugagaugguucacgauggcgggaaggaaacauggcauagcgcugccaccgccaucuauugccucaugggaucuggccagcugcuuugggacacagugacgggggugaacauggcucuguga

SEQ ID NO: 221368 - RNA, 1401 nt, Artificial Sequence; identical to SEQ ID NO: 220960
  derived and/or modified CDS sequence (opt5) from neuraminidase__InfluenzaB__AGX18086

SEQ ID NO: 221369 - RNA, 1401 nt, Artificial Sequence; identical to SEQ ID NO: 220960
  derived and/or modified CDS sequence (opt5) from neuraminidase__InfluenzaB__AGX18097

SEQ ID NO: 221370 - RNA, 1401 nt, Artificial Sequence; identical to SEQ ID NO: 220913
  derived and/or modified CDS sequence (opt5) from neuraminidase__InfluenzaB__AGX18108

SEQ ID NO: 221371 - RNA, 1401 nt, Artificial Sequence
  derived and/or modified CDS sequence (opt5) from neuraminidase__InfluenzaB__AGX18119
augcugcccagcaccauccagacacucacgcuguuccuuaccuccggcggggugcugcucucucuguacgucagcgccucccuuucuuaucugcucuacagcgacauucugcugaaguuuuccccuacagagaucaccgcuccgacaaugccccucgauugcgccaacaccucuaauguucaagcggugaacagaagcgcuacaaaaggagugacccugcuucugccugaacccgaguggacguauccucggcucuccugucccggcagcaccuuccagaaggcccugcuuauuucuccucaccgcuuuggggaaacaaaaggaaauuccgccccgcugaucauuagagagcccuucaucgcuugcggcccuaacgaauguaagcauuuugcccucacccacuacgcugcccagcccgggggauauuacaauggcacacggggcgaccgcaacaaacugagacaucugaucagcgucaagcucgggaagauuccuaccguggaaaauucuaucuuccacauggcggccugguccggaagcgcuugccaugauggcaaagaguggacguauauugggguugacggacccgauaacaaugcccugcuuaagaucaaauacggcgaggcuuacacagacaccuaucacucuuacgccaacaauauucugcggacacaggaguccgcguguaacugcaucgggggaaauuguuaucucaugauuaccgauggcagcgccuccggcgugucugaaugccgcuuucugaagaucagagaggggcggaucauuaaagagaucuucccgaccggacgcgucaagcacacagaagaguguacgugcggcuuugcuagcaacaagaccauugaaugugccugcagagacaauuccuacacagcuaaacggccuuucgugaaacuuaacauggagaccgauacagccgaaaucaagcugaugugcaccgacacguaucucgauacaccccgcccugacgaugggagcauuaccggacccugugagucuaacggcgacaagggguccggaggcaucaaaggcggguuuguucaucaaagaauggccagcaagaucggacggugguacucucgcaccaugagcaaaacagagagaaugggcauggggcuguaugugaaguacgacggagaucccugggcugacuccgaugcgcuggccuucucuggcgucauggugagcaugaaggaaccugggugguacuccuuuggcuucgagauuaaagacaagaaaugcgaugugccguguaucggaauugaaaugguccacgacggcgggaaggagaccuggcauagcgcugccacagccaucuauugccucaugggaucuggccagcugcuuugggauacgguuaccgggguggacauggcucuguga

SEQ ID NO: 221372 - RNA, 1401 nt, Artificial Sequence
  derived and/or modified CDS sequence (opt5) from neuraminidase__InfluenzaB__AGX18130
augcugcccagcaccauccagacacucacgcuguuccuuaccuccggcggggugcugcucucucuguacgucagcgccucccuuucuuaucugcucuacagcgacauucugcugaaguuuuccccuacagagaucaccgcuccgacaaugccccucgauugcgccaacgcgucuaauguucaagcugugaacagaagcgccaccaaaggagugacacugcuucugccugaacccgaguggaccuauccucggcucuccugucccggcagcacguuccagaaggcccugcuuauuucuccucaccgcuuuggggaaaccaaaggaaauuccgcuccgcugaucauuagagagcccuucaucgccugcggcccuaacgaauguaagcauuuugcucucacacacuacgccgcgcagcccgggggauauuacaauggcacccggggcgaccgcaacaaacugagacaucugaucagcgucaagcucgggaagauuccuacaguggaaaauucuaucuuccacauggccgcuugguccggaagcgccugccaugauggcaaagaguggaccuauauugggguugacggacccgauaacaaugcucugcuuaagaucaaauacggcgaggccuacacggacacauaucacucuuacgcgaacaauauucugcggacccaggaguccgccuguaacugcaucgggggaaauuguuaucucaugauuacagauggcagcgcuuccggcgugucugaaugccgcuuucugaagaucagagaggggcggaucauuaaagagaucuucccgaccggacgcgucaagcacaccgaagaguguacaugcggcuuugccagcaacaagacgauugaaugugcuugcagagacaauuccuacaccgccaaacggccuuucgugaaacuuaacguugagaucgauacagccgaaauucgccugaugugcaccgacacauaucucgauacccccagaccugacgaugggagcaucacgggacccugugagucuaacggcgacaagggguccggaggcaucaagggcggguuugugcaucaacggauggcuagcaaaauuggacgcugguacucuagaacaaugagccggaccgagagaaugggcauggggcuguaugucaaguacgacggagaucccugggcggacuccgaugcccuggcuuucucuggcgugauggugagcaugaaagaaccugggugguacuccuuuggcuucgagaucaaggacaagaaaugcgaugucccguguauuggaaucgaaaugguucacgacggcgggaaggagaccuggcauagcgccgccacagcuauuuauugccucaugggaucuggccagcugcuuugggauaccgugacagggguggacauggcccuguga

SEQ ID NO: 221373 - RNA, 1401 nt, Artificial Sequence
  derived and/or modified CDS sequence (opt5) from neuraminidase__InfluenzaB__AGX18141
augcugcccagcaccauccagacacucacgcuguuccuuaccuccggcggggugcugcucucucuguacgucagcgccucccuuucuuaucugcucuacagcgacauucugcugaaguuuccuuccacagagaucaccgcuccgacaaugccccucgauugcgccaacgcgucuaauguucaagcugugaacagaagcgccaccaaaggaaugacacugcuucugccugaacccgaguggaccuauccucggcucuccugucccggcagcacguuccagaaggcccugcuuauuucuccucaccgcuuuggggaaaccaaaggaaauuccgcuccgcugaucauuagagagcccuucaucgccugcggcccuaaggaauguaaacauuuugcucucacacacuacgccgcgcagcccgggggauauuacaacggcacccggggcgaccgcaauaagcugagacaucugaucagcgugaagcucgggaaaauuccuacagucgagaacucuaucuuccacauggccgcuugguccggaagcgccugccaugauggcaaggaguggaccuauauugggguggacggacccgauaauaacgcucugcuuaaaaucaaguacggcgaagccuacacggacacauaucacucuuacgcgaauaacauucugcggacccaggaguccgccuguaauugcaucgggggaaacuguuaucucaugauuacagauggcagcgcuuccggcguuucugaaugccgcuuucugaaaaucagagaggggcggaucauuaaggagaucuucccgaccggacgcauuaagcacaccgaagaguguacaugcggcuuugccagcaauaaaacgaucgaaugugcuugcagagacaacuccuacaccgccaagcggccuuucgugaaacuuaaugucgagacagauaccgccgaaauucgccugaugugcacagagaccuaucucgacacgcccagaccugaugacgggagcaucacaggacccugugagucuaacggcgauaagggguccggaggcaucaaaggcggguuugugcaucaacggauggcuagcaagauuggacgcugguacucuagaaccaugagcaaaaccgaacggaugggcauggggcuguauguuaaguacgacggagaccccugggcggaguccgaugcccuggcuuucucuggcgugauggucagcauggaggaaccugggugguacuccuuuggcuucgaaaucaaggacaaaaagugcgaugugccguguauuggaaucgagauggugcacgacggcgggaaagagacauggcauagcgccgccaccgcuauuuauugccucaugggaucuggccagcugcuuugggauacagucacggggguuaacauggcccuguga

SEQ ID NO: 221374 - RNA, 1401 nt, Artificial Sequence; identical to SEQ ID NO: 220960
  derived and/or modified CDS sequence (opt5) from neuraminidase__InfluenzaB__AGX18152

SEQ ID NO: 221375 - RNA, 1401 nt, Artificial Sequence
  derived and/or modified CDS sequence (opt5) from neuraminidase__InfluenzaB__AGX18163
augcugcccagcaccauccagacacucacgcuguuccuuaccuccggcggggugcugcucucucuguacgucagcgccucccuuucuuaucugcucuacagcgacauucugcugaaguuuccuuccacagagaucaccgcuccgacaaugccccucgauugcgccaacgcgucuaauguucaagcugugaacagaagcgccaccaaaggagugacacugcuucugccugaacccgaguggaccuauccucggcucuccugucccggcagcacguuccagaaggcccugcuuauuucuccucaccgcuuuggggaaaccaaaggaaauuccgcuccgcugaucauuagagagcccuucaucgccugcggcccuaaggaauguaaacauuuugcucucacacacuacgccgcgcagcccgggggauauuacaacggcaagcggggcgaccgcaauaagcugagacaucugaucagcgucaaacucgggaagauuccuaccguggagaacucuaucuuccacauggccgcuugguccggaagcgccugccaugauggcaaagaguggacauauauugggguugacggacccgauaauaacgcucugcuuaagaucaaauacggcgaagccuacaccgacacguaucacucuuacgcgaauaacauucugcggacacaggaguccgccuguaauugcaucgggggaaacuguuaucucaugauuaccgauggcagcgcuuccggcgugucugaaugccgcuuucugaagaucagagaggggcggaucauuaaggagaucuucccgacaggacgcauuaaacacaccgaagaguguaccugcggcuuugccagcaauaagacaaucgaaugugcuugcagagacaacuccuacacggccaaacggccuuucgucaaacuuaauguggagaccgauacagccgaaauucgccugaugugcaccgagacauaucucgacacccccagaccugaugacgggagcaucacgggacccugugagucuaacggcgauaagggguccggaggcaucaagggcggguuuguucaucaacggauggcuagcaaaauuggacgcugguacucuagaacaaugagcaagaccgaacggaugggcauggggcuguaugugaaguacgacggagaccccugggcggauuccgacgcccuggcuuucucuggcgucauggugagcauggaggaaccugggugguacuccuuuggcuucgagaucaaagauaagaaaugcgacgugccguguauuggaaucgaaaugguccacgauggcgggaaggagaccuggcauagcgccgccacagcuauuuauugccucaugggaucuggccagcugcuuugggacaccguuacaggggugaacauggcccuguga

SEQ ID NO: 221376 - RNA, 1401 nt, Artificial Sequence; identical to SEQ ID NO: 221326
  derived and/or modified CDS sequence (opt5) from neuraminidase__InfluenzaB__AGX18174

SEQ ID NO: 221377 - RNA, 1401 nt, Artificial Sequence; identical to SEQ ID NO: 220960
  derived and/or modified CDS sequence (opt5) from neuraminidase__InfluenzaB__AGX18185

SEQ ID NO: 221378 - RNA, 1401 nt, Artificial Sequence; identical to SEQ ID NO: 220913
  derived and/or modified CDS sequence (opt5) from neuraminidase__InfluenzaB__AGX18196

SEQ ID NO: 221379 - RNA, 1401 nt, Artificial Sequence
  derived and/or modified CDS sequence (opt5) from neuraminidase__InfluenzaB__AGX18207
augcugcccagcaccauccagacacucacgcuguuccuuaccuccggcggggugcugcucucucuguacgucagcgccucccuuucuuaucugcucuacagcgacauucugcugaaguuuccuccgacagagaucaccgcucccacaaugccucucgauugcgccaacgcguccaauguucaagcugugaacagaucugccaccaaaggagugacacugcuucugcccgaaccugaguggaccuauccccggcucagcuguccuggcuccacguuccagaaggcccugcuuauuagcccgcaccgcuuuggggaaaccaaaggaaauucugcuccccugaucauuagagagccuuucaucgccugcggccccaaggaauguaaacauuuugcucucacacacuacgccgcgcagccugggggauauuacaacggcacccggggcgaccgcaauaagcugagacaucugaucuccgucaagcucgggaaaauucccacaguggagaccagcaucuuccacauggccgcuuggucuggauccgccugccaugauggcaaggaguggacguauauugggguugacggaccggauaacaaugcucugcuuaaaaucaaguacggcgaagccuacacagacaccuaucacagcuacgcgaacaauauucugcggacacaggagucugccuguaacugcaucgggggaaauuguuaucucaugauuaccgauggcuccgcuagcggcguguccgaaugccgcuuucugaaaaucagagaggggcggaucauuaaggagaucuucccuaccggacgcgucaagcacacagaagaguguacgugcggcuuugccucuaacaaaaccauugaaugugcuugcagagacaauagcuacacagccaagcggcccuucgugaaacuuaacguugagaccgauacagccgaaauccgccugaugugcaccgagacguaucucgacacaccuagacccgaugacggguccauuaccggacccugugagagcaauggcgauaaggggucuggaggcaucaaaggcggguuugugcaucaacggauggcuuccaagaucggacgcugguacagcagaaccaugucuaaaacaaagcggaugggcauggggcuguaugucaaguacgacggagacccuugggcggauagcgacgcccuggcuuucuccggcgugauggugucuauggaggaaccggggugguacagcuuuggcuucgaaauuaaagauaagaaaugcgacguccccuguaucggaauugagaugguucacgauggcgggaaggaaaccuggcauuccgccgccacagcuaucuauugccucaugggaagcggccagcugcuuugggacacggugaccggggugaacauggcccuguga

SEQ ID NO: 221380 - RNA, 1401 nt, Artificial Sequence
  derived and/or modified CDS sequence (opt5) from neuraminidase__InfluenzaB__AGX18218
augcugcccagcaccauccagacacucacgcuguuccuuaccuccggcggggugcugcucucucuguacgucagcgccucccuuucuuaucugcucuacagcgacauucugcugaagcucuccccuacagagaucaccgcuccgacaaugccccuggauugcgccaacaccucuaauguucaagcggugaacagaagcgcuacaaaaggagugacccuucugcucccugaacccgaguggacguauccucggcuguccugucccggcagcaccuuucagaaggcccuucugauuucuccucaccgcuucggggaaacaaaaggaaauuccgccccgcucaucauuagagagcccuuuaucgcuugcggcccuaacgaauguaagcauuucgcccugacccacuacgcugcccagcccgggggauauuacaaucggacacgcggcgacagaaacaaacugcggcaucucaucagcgucaagcugggcaagauuccuaccguggaaaauucuaucuuucacauggcggccugguccgggagcgcuugccaugauggaaaagaguggacguauauuggcguugacgggcccgauaacaaugcccuucugaagaucaaauacggagaggcuuacacagacaccuaucacucuuacgccaacaauauucuccgcacacaggaguccgcguguaacugcaucggcgggaauuguuaucugaugauuaccgauggaagcgccuccggcgugucugaaugcagauuccuuaagauccgggagggccgcaucauuaaagagaucuuuccgaccgggagagucaagcacacagaagaguguacgugcggauucgcuagcaacaagaccauugaaugugccugccgggacaauuccuacacagcuaaacgcccuuuugugaagcugaacauggagaccgauacagccgaaaucagacucaugugcaccgacacguaucuggauacaccccggccugacgauggcagcauuaccgggcccugugagucuaacggagacaaaggcuccgggggaaucaagggcggcuucguucaucaacgcauggccagcaaaaucgggagaugguacucucggaccaugagcaagacagagagaaugggaaugggccuguaugugaaauacgacggggaucccugggcugacuccgaugcgcucgccuuuucuggagucauggugagcaugaaggaaccuggcugguacuccuucggguuugagauuaaggacaaaaagugcgaugugccguguaucggcauugaaaugguccacgacggaggcaaagagaccuggcauagcgcugccacagccaucuauugccugauggggucuggacagcuucugugggauacgguuaccggcguggacauggcucucuga

SEQ ID NO: 221381 - RNA, 1401 nt, Artificial Sequence; identical to SEQ ID NO: 221333
  derived and/or modified CDS sequence (opt5) from neuraminidase__InfluenzaB__AGX18229

SEQ ID NO: 221382 - RNA, 1401 nt, Artificial Sequence
  derived and/or modified CDS sequence (opt5) from neuraminidase__InfluenzaB__AGX18240
augcugcccagcaccauccagacacucacgcuguuccuuaccuccggcggggugcugcucucucuguacgucagcgccucccuuucuuaucugcucuacagcgacauucugcugaaguuuuccccuacagagaucaccgcuccgacaaugccccucgauugcgccaacgcgucuaauguucaaaccgugaacagaagcgcuacaaaaggagugacccugcuucugccugaacccgaguggacguauccucggcucuccugucccggcagcaccuuccagaaggcccugcuuauuucuccucaccgcuuuggggaaacaaaaggaaauuccgccccgcugaucauuagagagcccuucaucgcuugcggcccuaacgaauguaagcauuuugcccucacccacuacgcugcccagcccgggggauauuacaauggcacacggggcgaccgcaacaaacugagacaucugaucagcgucaagcucgggaagauuccuaccguggaaaauucuaucuuccacauggcggccugguccggaagcgcuugccaugauggcaaagaguggacguauauugggguugacggacccgauaacaaugcccugcuuaagaucaaauacggcgaggcuuacacagacaccuaucacucuuacgccaacaauauucugcggacacaggaguccgcguguaacugcaucgggggaaauuguuaucucaugauuaccgauggcagcgccuccggcgugucugaaugccgcuuucugaagaucagagaggggcggaucauuaaagagaucuucccgaccggacgcgucaagcacacagaagaguguacgugcggcuuugcuagcaacaagaccauugaaugugccugcagagacaauuccuacacagcuaaacggccuuucgugaaacuuaacguugagaucgauaccgccgaaauucgccugaugugcacagacaccuaucucgauacgcccagaccugacgaugggagcaucacaggacccugugagucuaacggcgacaagggguccggaggcaucaagggcggguuugugcaucaacggauggccagcaaaauuggacgcugguacucuagaaccaugagcaagaccgagcggaugggcauggggcuguaugucaaauacgacggagaucccugggcugacuccgaugcgcuggccuucucuggcgugauggugagcaugaaggaaccugggugguacuccuuuggcuucgagaucaaggacaaaaagugcgaugucccguguauuggaaucgaaaugguucacgacggcgggaaagagacauggcauagcgcugccaccgccauuuauugccucaugggaucuggccagcugcuuugggauacagugacggggguggacauggcucuguga

SEQ ID NO: 221383 - RNA, 1401 nt, Artificial Sequence; identical to SEQ ID NO: 221326
  derived and/or modified CDS sequence (opt5) from neuraminidase__InfluenzaB__AGX18251

SEQ ID NO: 221384 - RNA, 1401 nt, Artificial Sequence
  derived and/or modified CDS sequence (opt5) from neuraminidase__InfluenzaB__AGX18262
augcugcccagcaccauccagacacucacgcuguuccuuaccuccggcggggugcugcucucucuguacgucagcgccucccuuucuuaucugcucuacagcaacauucugcugaaguuuuccccuacagagaucaccgcuccgacaaugccccucgacugcgccaaugcgucuaacguucaagcugugaauagaagcgccaccaaaggagugacacugcuucugccugaacccgaguggaccuauccucggcucuccugucccggcagcacguuccagaaggcccugcuuauuucuccucaccgcuuuggggaaaccaaaggaaacuccgcuccgcugaucauuagagagcccuucaucgccugcggcccuaaugaauguaagcauuuugcucucacacacuacgccgcgcagcccgggggauauuacaacggcacccggggcgaucgcaauaaacugagacaucugaucagcgucaagcucgggaagauuccuacaguggagaacucuaucuuccacauggccgcuugguccggaagcgccugccaugacggcaaagaguggaccuauauugggguugauggacccgacaauaacgcucugcuuaagaucaaauacggcgaagccuacacggauacauaucacucuuacgcgaauaacauucugcggacccaggaguccgccuguaauugcaucgggggaaacuguuaucucaugauuacagacggcagcgcuuccggcgugucugaaugccgcuuucugaagaucagagaggggcggaucauuaaagagaucuucccgaccggacgcgucaagcacaccgaagaguguacaugcggcuuugccagcaauaagacgauugaaugugcuugcagagauaacuccuacaccgccaaacggccuuucgugaaacuuaacguugagacagacaccgccgaaauccgccugaugugcacagauaccuaucucgacacgcccagaccugaugacgggagcauuacaggacccugugagucuaauggcgauaagggguccggaggcaucaagggcggguuugugcaucaacggauggcuagcaaagucggacgcugguacucuagaaccaugagcaagaccgagcggaugggcauggggcuguaugugaaauacgacggagaccccugggcggauuccgacgcccuggcuuucucuggcgugauggucagcaugaaggaaccugggugguacuccuuuggcuucgagaucaaggauaaaaagugcgacguuccguguauuggaaucgaaauggugcacgauggcgggaaagagacauggcauagcgccgccaccgcuauuuauugccucaugggaucuggccagcugcuuugggacacagugacgggggucgauauggcccuguga

SEQ ID NO: 221385 - RNA, 1401 nt, Artificial Sequence; identical to SEQ ID NO: 221333
  derived and/or modified CDS sequence (opt5) from neuraminidase__InfluenzaB__AGX18273

SEQ ID NO: 221386 - RNA, 1401 nt, Artificial Sequence; identical to SEQ ID NO: 221358
  derived and/or modified CDS sequence (opt5) from neuraminidase__InfluenzaB__AGX18284

SEQ ID NO: 221387 - RNA, 1401 nt, Artificial Sequence; identical to SEQ ID NO: 221333
  derived and/or modified CDS sequence (opt5) from neuraminidase__InfluenzaB__AGX18295

SEQ ID NO: 221388 - RNA, 1401 nt, Artificial Sequence; identical to SEQ ID NO: 220960
  derived and/or modified CDS sequence (opt5) from neuraminidase__InfluenzaB__AGX18306

SEQ ID NO: 221389 - RNA, 1401 nt, Artificial Sequence
  derived and/or modified CDS sequence (opt5) from neuraminidase__InfluenzaB__AGX18317
augcugcccagcaccauccagacacucacgcuguuccuuaccuccggcggggugcugcucucucuguacgucagcgccucccuuucuuaucugcucuacagcgacauucugcugaaguuuccuuccacagagaucaccgcuccgacaaugccccucgauugcgccaacgcgucuaauguucaagcugugaacagaagcgccaccaaaggagugacacugcuucugccugaacccgaguggaccuauccucggcucuccugucccggcagcacguuccagaaggcccugcuuauuucuccucaccgcuuuggggaaaccaaaggaaauuccgcuccgcugaucauuagagagcccuucaucgccugcggcccuaaggaauguaaacauuuugcucucacacacuacgccgcgcagcccgggggauauuacaacgagacccggggcgaccgcaauaagcugagacaucugaucagcgucaagcucggcaaaauuccuacaguggagaacucuaucuuccacauggccgcuugguccgggagcgccugccaugauggaaaggaauggaccuauauuggcguugacgggcccgauaauaacgcucugcuuaaaaucaaguacggagaggccuacacggacacauaucacucuuacgcgaauaacauucugcggacccaggaauccgccuguaauugcaucggcgggaacuguuaucucaugauuacagauggaagcgcuuccggcgugucugagugccgcuuucugaaaaucagagagggccggaucauuaaggaaaucuucccgaccgggcgcauuaagcacaccgaggaauguacaugcggauuugccagcaauaaaacgaucgagugugcuugcagagacaacuccuacaccgccaagcggccuuucgucaaacuuaauguggaaacagauaccgccgagauucgccugaugugcacagagaccuaucucgacacgcccagaccugaugacggcagcaucacagggcccugugaaucuaacggagauaagggcuccgggggaaucaaaggcggcuuuguucaucaacggauggcuagcaagauugggcgcugguacucuagaaccaugagcaaaaccaagcggaugggaaugggccuguaugugaaguacgacggggaccccugggcggauuccgacgcccuggcuuucucuggagucauggugagcauggaggaaccuggcugguacuccuuuggguucgagaucaaagauaagaaaugcgacgugccguguauuggcaucgaaaugguccacgauggaggcaaggagacauggcauagcgccgccaccgcuauuuauugccucauggggucuggacagcugcuuugggacacaguuacgggcgugaacauggcccuguga

SEQ ID NO: 221390 - RNA, 1401 nt, Artificial Sequence; identical to SEQ ID NO: 221333
  derived and/or modified CDS sequence (opt5) from neuraminidase__InfluenzaB__AGX18328

SEQ ID NO: 221391 - RNA, 1401 nt, Artificial Sequence
  derived and/or modified CDS sequence (opt5) from neuraminidase__InfluenzaB__AGX18339
augcugcccagcaccauccagacacucacgcuguuccuuaccuccggcggggugcugcucucucuguacgucagcgccucccuuucuuaucugcucuacagcgacauucugcugaaguuuuccccuacagagaucaccgcuccgacaaugccccucgauugcgccaacgcgucuaauguucaagcugugaacagaagcgccaccaaaggagugacacugcuucugccugaacccgaguggaccuauccucggcucuccugucccggcagcacguuccagaaggcccugcuuauuucuccucaccgcuuuggggaaaccaaaggaaauuccgcuccgcugaucauuagagagcccuucaucgccugcggcccuaacgaauguaagcauuuugcucucacacacuacgccgcgcagcccgggggauauuacaauggcacccggggcgaccgcaacaaacugagacaucugaucagcgucaagcucgggaagauuccuacaguggaaaauucuaucuuccacauggccgcuugguccggaagcgccugccaugauggcaaagaguggaccuauauugggguugacggacccgauaacaaugcucugcuuaagaucaaauacggcgaggccuacacggacacauaucacucuuacgcgaacaauauucugcggacccaggaguccgccuguaacugcaucgggggaaauuguuaucucaugauuacagauggcagcgcuuccggcgugucugaaugccgcuuucugaagaucagagaggggcggaucauuaaagagaucuucccgaccggacgcgucaagcacaccgaagaguguacaugcggcuuugccagcaacaagacgauugaaugugcuugcagagacaauuccuacaccgccaaacggccuuucgugaaacuuaacguugagacagauaccgccgaaauccgccugaugugcacagacaccuaucucgauacgcccagaccugacgaugggagcauuacaggacccugugagucuaacggcgacaagggguccggaggcaucaagggcggguuugugcaucaacggauggcuagcaaagucggacgcugguacucuagaaccaugagcaagaccgagcggaugggcauggggcuguaugugaaauacgacggagaucccugggcggacuccgaugcccuggcuuucggcggggugauggucucuaugaaggaaccuggcugguacagcuuuggauucgagaucaaggacaaaaagugcgauguuccguguauuggcaucgaaauggugcacgacgggggaaaagagacauggcauuccgccgccaccgcuauuuauugccucaugggcagcgggcagcugcuuugggauacagugacgggagucgacauggcccuguga

SEQ ID NO: 221392 - RNA, 1401 nt, Artificial Sequence
  derived and/or modified CDS sequence (opt5) from neuraminidase__InfluenzaB__AGX18350
augcugcccagcaccauccagacacucacgcuguuccuuaccuccggcggggugcugcucucucuguacgucagcgccucccuuucuuaucugcucuacagcgacauucugcugaaguuuuccccuacagagaucaccgcuccgacaaugccccucgauugcgccaacgcgucuaauguucaagcuaugaacagaagcgccaccaaaggagugacacugcuucugccugaacccgaguggaccuauccucggcucuccugucccggcagcacguuccagaaggcccugcuuauuucuccucaccgcuuuggggaaaccaaaggaaauuccgcuccgcugaucauuagagagcccuucaucgccugcggcccuaacgaauguaagcauuuugcucucacacacuacgccgcgcagcccgggggauauuacaauggcacccggggcgaccgcaacaaacugagacaucugaucagcgugaagcucgggaagauuccuacagucgaaaauucuaucuuccacauggccgcuugguccggaagcgccugccaugauggcaaagaguggaccuauauugggguggacggacccgauaacaaugcucugcuuaagaucaaauacggcgaggccuacacggacacauaucacucuuacgcgaacaauauucugcggacccaggaguccgccuguaacugcaucgggggaaauuguuaucucaugauuacagauggcagcgcuuccggcguuucugaaugccgcuuucugaagaucagagaggggcggaucauuaaagagaucuucccgaccggacgcgugaagcacaccgaagaguguacaugcggcuuugccagcaacaagacgauugaaugugcuugcagagacaauuccuacaccgccaaacggccuuucgucaaacuuaacguggagaucgauacagccgaaauucgccugaugugcaccgacacauaucucgauacccccagaccugacgaugggagcaucacgggacccugugagucuaacggcgacaagggguccggaggcaucaagggcggguuuguucaucaacggauggcuagcaaaauuggacgcugguacucuagaacaaugagcaagaccgagcggaugggcauggggcuguaugugaaauacgacggagaucccugggcggacuccgaugcccuggcuuucucuggcgucauggugagcaugaaggaaccugggugguacuccuuuggcuucgagaucaaggacaaaaagugcgaugugccguguauuggaaucgaaaugguccacgacggcgggaaagagaccuggcauagcgccgccacagcuauuuauugccucaugggaucuggccagcugcuuugggauaccguuacagggguggacauggcccuguga

SEQ ID NO: 221393 - RNA, 1401 nt, Artificial Sequence; identical to SEQ ID NO: 221358
  derived and/or modified CDS sequence (opt5) from neuraminidase__InfluenzaB__AGX18361

SEQ ID NO: 221394 - RNA, 1401 nt, Artificial Sequence
  derived and/or modified CDS sequence (opt5) from neuraminidase__InfluenzaB__AGX18383
augcugcccagcaccauccagacacucacgcuguuccuuaccuccggcggggugcugcucucucuguacgucagcgccucccuuucuuaucugcucuacagcgacauucugcugaaguuuuccccuacagagaucaccgcuccgacaaugccccucgauugcgccaacaccucuaauguucaagcggugaacagaagcgcuacaaaaggagugacccugcuucugccugaacccgaguggacguauccucggcucuccugucccggcagcaccuuccagaaggcccugcuuauuucuccucaccgcuuuggggaaacaaaaggaaauuccgccccgcugaucauuagagagcccuucaucgcuugcggcccuaacgaauguaagcauuuugcccucacccacuacgcugcccagcccgggggauauuacaauggcacacggggcgaccgcaacaaacugagacaucugaucagcgucaagcucgggaagauuccuaccguggaaaauucuaucuuccacauggcggccugguccggaagcgcuugccaugauggcaaagaguggacguauauugggguugacggacccgauaacaaugcccugcuuaagaucaaauacggcgaggcuuacacagacaccuaucacucuuacgccaacaauauucugcggacacaggaguccgcguguaacugcaucgggggaaauuguuaucucaugauuaccgauggcagcgccuccggcgugucugaaugccgcuuucugaagaucagagaggggcggaucauuaaagagaucuucccgaccggacgcgucaagcacacagaagaguguacgugcggcuuugcuagcaacaagaccauugaaugugccugcagagacaauuccuacacagcuaaacggccuuucgugaaacuuaacauggagaccgauacagccgaaauccgccugaugugcaccgacacguaucucgauacacccagaccugacgaugggagcauuaccggacccugugagucuaacggcgacaagggguccggaggcaucaagggcggguuuguucaucaacggauggccagcaaaaucggacgcugguacucuagaaccaugagcaagacagagcggaugggcauggggcuguaugugaaauacgacggagaucccugggcugacuccgaugcgcuggucuucucuggcgugauggugagcaugaaggaaccugggugguacuccuuuggcuucgagauuaaggacaaaaagugcgaugucccguguaucggaauugaaaugguucacggcgggggaaaagagaccuggcauagcgccgcuacagccaucuauugccucaugggcucugggcagcugcuuugggacacggugaccggaguggauauggcccuguga

SEQ ID NO: 221395 - RNA, 1401 nt, Artificial Sequence; identical to SEQ ID NO: 220960
  derived and/or modified CDS sequence (opt5) from neuraminidase__InfluenzaB__AGX18394

SEQ ID NO: 221396 - RNA, 1401 nt, Artificial Sequence
  derived and/or modified CDS sequence (opt5) from neuraminidase__InfluenzaB__AGX18405
augcugcccagcaccauccagacacucacgcuguuccuuaccuccggcggggugcugcucucucuguacgucagcgccucccuuucuuaucugcucuacagcgacauucugcugaaguuuuccccuacagagaucaccgcuccgacaaugccccucgauugcgccaacgcgucuaauguucacgcugugaacagaagcgccaccaaaggagugacaccucugcuucccgaaccugaguggaccuauccccggcuguccuguccuggcagcacguuccaaaaggcccuccugauuucuccgcaucgcuuuggggaaaccaaaggaaauuccgcuccccuuaucauuagagagccuuucaucgccugcggccccaacgaauguaagcacuuugcucugacacauuacgccgcgcagccugggggauauuacaauggcacccggggcgaccgcaacaaacucagacaccugaucagcgucaagcuggggaagauucccacaguggaaaauucuaucuuccauauggccgcuugguccggaagcgccugccacgauggcaaagaguggaccuauauugggguugacggaccggauaacaaugcucuccugaagaucaaauacggcgaggccuacacggacacauaucacucuuacgcgaacaauauucuucggacccaggaguccgccuguaacugcaucgggggaaauuguuaucugaugauuacagauggcagcgcuuccggcgugucugaaugccgcuuucucaagaucagagaggggcggaucauuaaagagaucuucccuaccggacgcgucaagcauaccgaagaguguacaugcggcuuugccagcaacaagacgauugaaugugugugcagagacaauuccuacaccgcuaaacggcccuucguuaagcugaacguggagacagauaccgccgaaauccgccuuaugugcacagacaccuaucuggauacgccuagacccgacgaugggagcauuacaggacccugugagucuaacggcgacaaaggguccggaggcaucaagggcggguuuguccaccagcggauggccagcaaaaucggacgcugguacucuagaaccaugagcaagaccgagcggaugggcauggggcucuaugugaaauacgacggagauccuugggcugacuccgaugcgcuggccuucucuggcgugauggucagcaugaaggaaccggggugguacuccuuuggcuucgagauuaaggacaaaaagugcgauguucccuguaucggaauugaaauggugcaugacggcgggaaagagacauggcacagcgcugccaccgccaucuauugccugaugggaucuggccaacuccugugggauacagugacgggggucgacauggcucuuuga

SEQ ID NO: 221397 - RNA, 1401 nt, Artificial Sequence
  derived and/or modified CDS sequence (opt5) from neuraminidase__InfluenzaB__AGX18416
augcugcccagcaccauccagacacucacgcuguuccuuaccuccggcggggugcugcucucucuguacgucagcgccucccuuucuuaucugcucuacagcgacauucugcugaaguuuuccccuacagagaucaccgcuccgacaaugccccucgauugcgccaacgcgucuaauguucaagcugugaacagaagcgccaccaaaggagugacacugcuucugccugaacccgaguggaccuauccucggcucuccugucccggcagcacguuccagaaggcccugcuuauuucuccucaccgcuuuggggaaaccaaaggaaauuccgcuccgcugaucauuagagagcccuucaucgccugcggcccuaacgaauguaagcauuuugcucucacacacuacgccgcgcagcccgggggauauuacaauggcacccggggcgaccgcaacaaacugagacaucugaucagcgucaagcucgggaagauuccuacaguggaaaauucuaucuuccacauggccgcuugguccggaagcgccugccaugauggcaaagaguggaccuauauugggguugacggacccgauaacaaugcucugcuuaagaucaaauacggcgaggccuacacggacacauaucacucuuacgcgaacaauauucugcggacccaggaguccgccuguaacugcaucgggggaaauuguuaucucaugauuacagauggcagcgcuuccggcgugucugaaugccgcuuucugaagaucagagaggggcggaucauuaaagagaucuucccgaccggacgcgucaagcacaccgaagaguguacaugcggcuuugccagcaacaagacgauugaaugugcuugcagagacaauuccuacaccgccaaacggccuuucgugaaacuuaacguugagaucgauacagccgaaauucgccugaugugcaccgacacauaucucgauacccccagaccugacgaugggagcaucacgggaucuugugaguccaacggcgacaaggggagcggaggcaucaagggcggguuugugcaucaacggauggcuucuaaaauuggacgcugguacagcagaacaauguccaagaccgagcggaugggcauggggcuguaugucaaauacgacggagaucccugggcggacucugaugcccuggcuuucagcggcgugaugguguccaugaaggaacccgggugguacagcuuuggcuucgagaucaaggacaaaaagugcgaugucccuuguauuggaaucgaaaugguucacgacggcgggaaagagaccuggcauucugccgccacagcuauuuauugccucaugggauccggccagcugcuuugggauaccgugacagggguggacauggcccuguga

SEQ ID NO: 221398 - RNA, 1401 nt, Artificial Sequence
  derived and/or modified CDS sequence (opt5) from neuraminidase__InfluenzaB__AGX18428
augcugcccagcaccauccagacacucacgcuguuccuuaccuccggcggggugcugcucucucuguacgucagcgccucccuuucuuaucugcucuacagcgacauucugcugaaguuuuccacaaccgagaucacagcuccuaccaugccgcucgauugcgccaacgcgucuaauguucaagcugugaacagaagcgccacaaaaggagugacccugcuucugcccgaaccugaguggacguauccccggcucuccuguccuggcagcaccuuccagaaggcccugcuuauuucuccccaccgcuuuggggaaacaaaaggaaauuccgcuccucugaucauuagagagccguucaucgccugcggccccaaggaauguaaacauuuugcucucacccacuacgccgcgcagccugggggauauuacaacggcacacgggaggaccgcaauaagcugagacaucugaucagcgucaagcucggcaaaauucccaccguggagaacucuaucuuccacauggccgcuugguccgggagcgccugccaugauggaaaggaauggacguauauuggcguugacgggccugauucuaaugcucugcuuaaaaucaaguacggagaggccuacacagacaccuaucacuccuacgcgaacaauauucugcggacacaggaaagcgccuguaacugcaucggcgggaauuguuaucucaugauuaccgauggauccgcuucuggcaucagcgagugccgcuuucugaaaaucagagagggccggauuaucaaggaaauuuuccccaccgggcgcgugaagcacacagaggaauguacgugcggauuugccuccaacaaaaccaucgagugugcuugcagagacaauagcuacacagccaagcggccguucgucaaacuuaacguggaaaccgauacagccgagauucgccugaugugcaccgagacguaucucgacacaccuagacccgaugacggcucuaucaccgggccuugugaauccaauggaaacaagggcagcgggggaaucaaaggcggcuuuguucaucaacggauggcuucuaagauugggcgcugguacagcagaaccauguccaaaacaaagcggaugggaaugggccuguaugugaaguacgauggggaccccuggaucgacucugaugcgcuggcccucagcggagucaugguguccauggaggaacccggcugguacagcuucggguuugagauuaaagacaagaaaugcgaugugccuuguaucggcauugaaaugguccacgacggaggcaaggagaccuggcauucugcugccacagccaucuauugccugaugggguccggacagcuucugugggauacgguuaccggcguggacauggcucucuga

SEQ ID NO: 221399 - RNA, 1401 nt, Artificial Sequence
  derived and/or modified CDS sequence (opt5) from neuraminidase__InfluenzaB__AGX18439
augcugcccagcaccauccagacacucacgcuguuccuuaccuccggcggggugcugcucucucuguacgucagcgccucccuuucuuaucugcucuacagcgacauucugcugaaguuuuccccuacagagaucaccgcuccgacaaugccccucgauugcgccaacgcgucuaauguucaagcugugaacagaagcgccaccaaaggagugacacugcuucugccugaacccgaguggaccuauccucggcucuccugucccggcagcacguuccagaaggcccugcuuauuucuccucaccgcuuuggggaaaccaaaggaaauuccgcuccgcugaucauuagagagcccuucaucgccugcggcccuaacgaauguaagcauuuugcucucacacacuacgccgcgcagcccgggggauauuacaauggcacccggggcgaccgcaacaaacugagacaucugaucagcgucaagcucgggaagauuccuacaguggaaaauucuaucuuccacauggccgcuugguccggaagcgccugccaugauggcaaagaguggaccuauauugggguugacggacccgauaacaaugcucugcuuaagaucaaauacggcgaggccuacacggacacauaucacucuuacgcgaacaauauucugcggacccaggaguccgccuguaacugcaucgggggaaauuguuaucucaugauuacagauggcagcgcuuccggcgugucugaaugccgcuuucugaagaucagagaggggcggaucauuaaagagaucuucccgaccggacgcgucaagcacaccgaagaguguacaugcggcuuugccagcaacaagacgauugaaugugcuugcagagacaauuccuacaccgccaaacggccuuucgugaaacuuaacguugagaucgauacagccgaaauucgccugaugugcaccgacacauaucucgauacccccagaccugacgaugggagcaucacgggacccugugagucuaacggcgacaagggguccggaggcaucaagggcggguuugugcaucaacggauggcuagcaaaauuggacgcugguacucuagaacaaugagcaagaccgagcggaugggcauggggcuguaugucaaauacgacggagaucccugggcggacuccgaugcccuggcuuucucuggccucauggugagcaugaaggaaccugggugguacuccuuuggcuucgagaucaaggacaaaaagugcgaugugccguguauuggaaucgaaaugguccacgacggcgggaaagagaccuggcauagcgccgccacagcuauuuauugccugaugggaucuggccagcuucugugggauaccguuacagggguggacauggcccucuga

SEQ ID NO: 221400 - RNA, 1401 nt, Artificial Sequence
  derived and/or modified CDS sequence (opt5) from neuraminidase__InfluenzaB__AGX18450
augcugcccagcaccauccagacacucacgcuguuccuuaccuccggcggggugcugcucucucuguacgucagcgccucccuuucuuaucugcucuacagcgacauucugcugaaguuuuccccuacagagaucaccgcuucuacaaugccgcucgauugcgccaacgcgagcaauguucaagcugugaacagauccgccaccaaaggagugacacugcuucugcccgaaccugaguggaccuauccccggcucagcuguccuggcucuacguuccagaaggcccugcuuauuagcccccaccgcuuuggggaaaccaaaggaaauuccgcuccucugaucauuagagagccguucaucgccugcggccccaacgaauguaagcauuuugcucucacacacuacgccgcgcagccugggggauauuacaauggcacccggggcgaccgcaacaaacugagacaucugaucucugucaagcucgggaagauucccacaguggaaaauuccaucuuccacauggccgcuuggagcggaucugccugccaugauggcaaagaguggaccuauauugggguugacggaccugauaacaaugcucugcuuaagaucaaauacggcgaggccuacacggacacauaucacuccuacgcgaacaauauucugcggacccaggagagcgccuguaacugcaucgggggaaauuguuaucucaugauuacagauggcuccgcuucuggcgugagcgaaugccgcuuucugaagaucagagaggggcggaucauuaaagagaucuuccccaccggacgcgucaagcacaccgaagaguguacaugcggcuuugccuccaacaagacgauugaaugugcuugcagagacaauagcuacaccgccaaacggccguucgugaaacuuaacguugagaucgauacagccgaaauucgccugaugugcaccgacacauaucucgauaccccuagacccgacgaugggucuaucacgggaccuugugaguccaacggcgacaaggggagcggaggcaucaagggcggguuugugcaucaacggauggcuucuaaaauuggacgcugguacagcagaacaauguccaagaccgagcggaugggcauggggcuguaugucaaauacgacggagaucccugggcggacucugaugcccuggcuuucagcggcgugaugguguccaugaaggaacccgggugguacagcuuuggcuucgagaucaaggacaaaaagugcgaugucccuuguauuggaaucgaaaugguucacgacggcgggaaagagaccuggcauucugccgccacagcuauuuauugccucaugggauccggccagcugcuuugggauaccgugacagggguggacauggcccuguga

SEQ ID NO: 221401 - RNA, 1401 nt, Artificial Sequence; identical to SEQ ID NO: 220960
  derived and/or modified CDS sequence (opt5) from neuraminidase__InfluenzaB__AGX18461

SEQ ID NO: 221402 - RNA, 1401 nt, Artificial Sequence
  derived and/or modified CDS sequence (opt5) from neuraminidase__InfluenzaB__AGX18472
augcugcccagcaccauccagacacucacgcuguuccuuaccuccggcggggugcugcucucucuguacgucagcgccucccuuucuuaucugcucuacagcgacauucugcugaaguuuuccccuacagagaucaccgcuccgacaaugccccucgauugcgccaacgcgucuaauguucacgcugugaaccauagcgccaccaaaggagugacaccucugcuucccgaaccugaguggaccuaucccagacuguccuguccuggcagcacguuccaaaaggcccuccugauuucuccgcaccgguuuggggaaaccaaaggaaauuccgcuccccuuaucauucgcgagccuuucaucgccugcggccccaacgaauguaagcauuuugcucugacacacuacgccgcgcagccugggggauauuacaauggcaccagaggcgaccggaacaaacuccgccaucugaucagcgucaagcuggggaagauucccacaguggaaaauucuaucuuccacauggccgcuugguccggaagcgccugccacgauggcaaagaguggaccuauauugggguugacggaccggauaacaaugcucuccugaagaucaaauacggcgaggccuacacggacacauaucauucuuacgcgaacaauauucuuagaacccaggaguccgccuguaacugcaucgggggaaauuguuaucugaugauuacagauggcagcgcuuccggcgugucugaaugccgguuucucaagauccgcgaggggagaaucauuaaagagaucuucccuaccggacgggucaagcacaccgaagaguguacaugcggcuuugccagcaacaagacgauugaaugugcuugccgcgacaauuccuacaccgccaaaagacccuucgugaagcugaacguugagacagauaccgccgaaauccggcuuaugugcacagacaccuaucuggauacgccucgccccgacgaugggagcauuacaggacccugugagucuaacggcgacaaaggguccggaggcaucaagggcggguuugugcaucagagaauggcuagcaaaaucggacggugguacucucgcaccaugagcaagaccgagagaaugggcauggggcucuaugucaaauacgacggagauccuugggcggacuccgaugcccuggcuuucucuggcgugauggugagcaugaaggaaccggggugguacuccuuuggcuucgagauuaaggacaaaaagugcgauguccccuguaucggaauugaaaugguucacgacggcgggaaagagacauggcacagcgccgccaccgcuaucuauugccugaugggaucuggccaacuccugugggauacagugacggggguggacauggcccuuuga

SEQ ID NO: 221403 - RNA, 1401 nt, Artificial Sequence; identical to SEQ ID NO: 220960
  derived and/or modified CDS sequence (opt5) from neuraminidase__InfluenzaB__AGX18483

SEQ ID NO: 221404 - RNA, 1401 nt, Artificial Sequence; identical to SEQ ID NO: 220707
  derived and/or modified CDS sequence (opt5) from neuraminidase__InfluenzaB__AGX18494

SEQ ID NO: 221405 - RNA, 1401 nt, Artificial Sequence
  derived and/or modified CDS sequence (opt5) from neuraminidase__InfluenzaB__AGX18505
augcugcccagcaccauccagacacucacgcuguuccuuaccuccggcggggugcugcucucucuguacgucagcgccucccuuucuuaucugcucuacagcgacauucugcugaaguuuuccccuacagagaucaccgcuccgacaaugccccucgauugcgccaacgcgucuaauguucaagcugugaacagaagcgccaccaaaggagugacacugcuucugccugaacccgaguggaccuauccucggcucuccugucccggcagcacguuccagaaggcccugcuuauuucuccucaccgcuuuggggaaaccaaaggaaauuccgcuccgcugaucauuagagagcccuucaucgccugcggcccuaacgaauguaagcauuuugcucucacacacuacgccgcgcagcccgggggauauuacaauggcacccggggcgaccgcaacaaacugagacaucugaucagcgucaagcucgggaagauuccuacaguggaaaauucuaucuuccacauggccgcuugguccggaagcgccugccaugauggcaaagaguggaccuauauugggguugacggacccgauaacaaugcucugcuuaagaucaaauacggcgaggccuacacggacacauaucacucuuacgcgaacaagauucugcggacccaggaguccgccuguaauugcaucgggggaaacuguuaucucaugauuacagauggcagcgcuuccggcgugucugaaugccgcuuucugaaaaucagagaggggcggaucauuaaggagaucuucccgaccggacgcgucaagcacaccgaagaguguacaugcggcuuugccagcaauaaaacgauugaaugugcuugcagagacaacuccuacaccgccaagcggccuuucgugaaacuuaauguugagacagauaccgccgaaauccgccugaugugcacagacaccuaucucgauacgcccagaccugacgaugggagcauuacaggacccugugagucuaacggcgacaagggguccggaggcaucaaaggcggguuugugcaucaacggauggcuagcaagaucggacgcugguacucuagaaccauuagcaaaaccgagcggaugggcauggggcuguaugucaaguacgacggagaucccugggcggacuccgaugcccuggcuuucucuggcgugauggugagcaugaaggaaccugggugguacuccuuuggcuucgagaucaaagacaagaaaugcgaugucccguguauuggaaucgaaaugguucacgacggcgggaaggagacauggcauagcgccgccaccgcuauuuauugccucaugggaucuggccagcugcuuugggauacagugacggggguggacauggcccuguga

SEQ ID NO: 221406 - RNA, 1401 nt, Artificial Sequence
  derived and/or modified CDS sequence (opt5) from neuraminidase__InfluenzaB__AGX18516
augcugcccagcaccauccagacacucacgcuguuccuuaccuccggcggggugcugcucucucuguacgucagcgccucccuuucuuaucugcucuacagcgacauucugcugaaguuuuccccuacagagaucaccgcuccgacaaugccccucgauugcgccaacgcgucuaauguucaagcugugaacagaagcgccaccaaaggagugacacugcuucugccugaacccgaguggaccuauccucggcucuccugucccggcagcacguuccagaaggcccugcuuauuucuccucaccgcuuuggggaaaccaaaggaaauuccgcuccgcugaucauuagagagcccuucaucgccugcggcccuaacgaauguaagcauuuugcucucacacacuacgccgcgcagcccgggggauauuacaauggcacccggggcgaccgcaacaaacugagacaucugaucagcgucaagcucgggaagauuccuacaguggaaaauucuaucuuccacauggccgcuugguccggaagcgccugccaugauggcaaagaguggaccuauauugggguugacggacccgauaacaaugcucugcuuaagaucaaauacggcgaggccuacacggacacauaucacucuuacgcgaacaagauucugcggacccaggaguccgccuguaauugcaucgggggaaacuguuaucucaugauuacagauggcagcgcuuccggcgugucugaaugccgcuuucugaaaaucagagaggggcggaucauuaaggagaucuucccgaccggacgcgucaagcacaccgaagaguguacaugcggcuuugccagcaauaaaacgauugaaugugcuugcagagacaacuccuacaccgccaagcggccuuucgugaaacuuaauguugagacagauaccgccgaaauccgccugaugugcacagacaccuaucucgauacgcccagaccugacgaugggagcauuacaggacccugugagucuaacggcgacaagggguccggaggcaucaaaggcggguuugugcaucaacggauggcuagcaagaucggacgcugguacucuagaaccauuagcaaaaccgagcggaugggcauggggcuguaugucaaguacgacggagaucccugggcggacuccgaugcccuggcuuucucuggcgugauggugagcaugaaggaaccugggugguacuccuuuggcuucgagaucaaagacaagaaaugcgaugucccguguauuggaaucgaaaugguucacggcgggggaaaggagacauggcauagcgccgccaccgcuauuuauugccucaugggcucugggcagcugcuuugggacacagugacgggaguggauauggcccuguga

SEQ ID NO: 221407 - RNA, 1401 nt, Artificial Sequence; identical to SEQ ID NO: 220707
  derived and/or modified CDS sequence (opt5) from neuraminidase__InfluenzaB__AGX18527

SEQ ID NO: 221408 - RNA, 1401 nt, Artificial Sequence; identical to SEQ ID NO: 220707
  derived and/or modified CDS sequence (opt5) from neuraminidase__InfluenzaB__AGX18538

SEQ ID NO: 221409 - RNA, 1401 nt, Artificial Sequence; identical to SEQ ID NO: 220707
  derived and/or modified CDS sequence (opt5) from neuraminidase__InfluenzaB__AGX18549

SEQ ID NO: 221410 - RNA, 1401 nt, Artificial Sequence; identical to SEQ ID NO: 220707
  derived and/or modified CDS sequence (opt5) from neuraminidase__InfluenzaB__AGX18560

SEQ ID NO: 221411 - RNA, 1401 nt, Artificial Sequence; identical to SEQ ID NO: 220707
  derived and/or modified CDS sequence (opt5) from neuraminidase__InfluenzaB__AGX18571

SEQ ID NO: 221412 - RNA, 1401 nt, Artificial Sequence
  derived and/or modified CDS sequence (opt5) from neuraminidase__InfluenzaB__AGX18582
augcugcccagcaccauccagacacucacgcuguuccuuaccuccggcggggugcugcucucucuguacguccuugccagccuguccuaucuccuguacucugacauucugcucaaguuuagcccuacagagaucaccgcuccgacaaugccccuggauugcgccaacgcguccaauguucacgcugugaacagaucugccaccaaaggagugacacuucugcucccugaacccgagugggccuauccucggcugagcugucccggcuccaccuuccaaaaggcccuucugauuagcccucaucgcuuuggggaaacgaaaggaaauucugcuccgcucaucauuagagagcccuucaucgcuugcggcccuaacgaauguaagcacuuugcccugacccauuacgcggcccagcccgggggauauuacaauggcacacggggcgaccgcaacaaacugagacaccucaucuccgucaagcuggggaagauuccuaccguggagaauagcaucuuccauauggcugccuggucuggauccgcuugccacgauggcaaagaguggacauauauugggguugacggacccgauaacaaugcccuucugaagaucaaauacggcgaagcguacaccgacacguaucacagcuacgccaacaauauucuccggacacaggagucugcuuguaacugcaucgggggaaauuguuaucugaugauuaccgauggcuccgccagcggcguguccgaaugccgcuuucuuaagaucagagaggggcggaucauuaaagagaucuucccgacaggacgcgucaagcauaccgaagaguguaccugcggcuuugcuucuaacaagacaauugaaugugccugcagagacaauagcuacacggccaaacggccuuucgugaagcugaacguugagaccgauacagcugaaauccgccucaugugcaccgacacauaucuggauacccccagaccugacgauggguccauuacgggacccugugagagcaacggcgacaaagggucuggaggcaucaagggcggguuugugcaccagcggauggcguccaaaaucggacgcugguacagcagaacaaugucuaagaccgagcggaugggcauggggcuguaugucaaauacgacggagaucccugggccgacagcgaugcucucgccuucuccggcgugauggugucuaugaaggaaccugggugguacagcuuuggcuucgagauuaaggacaaaaagugcgaugucccguguaucggaauugaaaugguucaugacggcgggaaagagaccuggcacuccgccgcuacagccaucuauugccugaugggaagcggccaacuucugugggauaccgugacagggguggacauggcgcucuga

SEQ ID NO: 221413 - RNA, 1401 nt, Artificial Sequence; identical to SEQ ID NO: 220707
  derived and/or modified CDS sequence (opt5) from neuraminidase__InfluenzaB__AGX18593

SEQ ID NO: 221414 - RNA, 1401 nt, Artificial Sequence; identical to SEQ ID NO: 220707
  derived and/or modified CDS sequence (opt5) from neuraminidase__InfluenzaB__AGX18604

SEQ ID NO: 221415 - RNA, 1401 nt, Artificial Sequence
  derived and/or modified CDS sequence (opt5) from neuraminidase__InfluenzaB__AGX18615
augcugcccagcaccauccagacacucacgcuguuccuuaccuccggcggggugcugcucucucuguacgucagcgccucccuuucuuaucugcucuacagcgacauucugcugaaguuuuccccuacagagaucaccgcuccgacaaugccccucgauugcgccaacgcgucuaauguucaagcugugaacagaagcgccaccaaaggagugacacugcuucugccugaacccgaguggaccuauccucggcucuccugucccggcagcacguuccagaaggcccugcuuauuucuccucaccgcuuuggggaaaccaaaggaaauuccgcuccgcugaucauuagagagcccuucaucgccugcggcccuaacgaauguaagcauuuugcucucacacacuacgccgcgcagcccgggggauauuacaauggcacccggggcgaccgcaacaaacugagacaucugaucagcgucaagcucgggaagauuccuacaguggaaaauucuaucuuccacauggccgcuugguccggaagcgccugccaugauggcaaagaguggaccuauauugggguugacggacccgauaacaaugcucugcuuaagaucaaauacggcgaggccuacacggacacauaucacucuuacgcgaacaagauucugcggacccaggaguccgccuguaauugcaucgggggaaacuguuaucucaugauuacagauggcagcgcuuccggcgugucugaaugccgcuuucugaaaaucagagaggggcggaucauuaaggagaucuucccgaccggacgcgucaagcacaccgaagaguguacaugcggcuuugccagcaauaaaacgauugaaugugcuugcagagacaacuccuacaccgccaagcggccuuucgugaaacuuaauguugagacagauaccgccgaaauccgccugaugugcacagacaccuaucucgauacgcccagaccugacgaugggagcauuacaggacccugugagucuaacggcaacaagggguccggaggcaucaaaggcggguuugugcaucaacggauggcuagcaagaucggacgcugguacucuagaaccaugagcaaaaccgagcggaugggcauggggcuguaugucaaguacgacggagaccccugggcggauuccgacgcccuggcuuucucuggcgugauggugagcaugaaggaaccugggugguacuccuuuggcuucgagauuaaagauaagaaaugcgacgucccguguaucggaauugaaaugguucacgauggcgggaaggagacauggcauagcgccgccaccgcuaucuauugccucaugggaucuggccagcugcuuugggacacagugacggggguggauauggcccuguga

SEQ ID NO: 221416 - RNA, 1401 nt, Artificial Sequence
  derived and/or modified CDS sequence (opt5) from neuraminidase__InfluenzaB__AGX18626
augcugcccagcaccauccagacacucacgcuguuccuuaccuccggcggggugcugcucucucuguacgucagcgccucccuuucuuaucugcucuacagcgacauucugcugaaguuuuccccuacagagaucaccgcuccgacaaugccccucgauugcgccaacgcgucuaauguucaagcugugaacagaagcgccaccaaaggagugacacugcuucugccugaacccgaguggaccuauccucggcucuccugucccggcagcacguuccagaaggcccugcuuauuucuccucaccgcuuuggggaaaccaaaggaaauuccgcuccgcugauccucagagagcccuucauugccugcggcccuaacgaauguaagcauuuugcucugacacacuacgccgcgcagcccgggggauauuacaauggcacccggggcgaccgcaacaaacugagacaucucaucagcgucaagcuggggaagaucccuacaguggaaaauucuauuuuccacauggccgcuugguccggaagcgccugccaugauggcaaagaguggaccuauaucgggguugacggacccgauaacaaugcccuucugaagauuaaauacggcgaggcuuacacggacacauaucacucuuacgcgaacaagauccuccggacccaggaguccgccuguaauugcauugggggaaacuguuaucugaugaucacagauggcagcgcuuccggcgugucugaaugccgcuuucuuaaaauuagagaggggcggaucaucaaggagauuuucccgaccggacgcgucaagcacaccgaagaguguacaugcggcuuugccagcaauaaaacgaucgaaugugcuugcagagacaacuccuacaccgccaagcggccuuucgugaaacugaauguugagacagauaccgccgaaauucgccucaugugcacagacaccuaucuggauacgcccagaccugacgaugggagcaucacaggacccugugagucuaacggcgacaagggguccggaggcauuaaaggcggguuugugcaucaacggauggcuagcaagaucggacgcugguacucuagaaccaugagcaaaaccgagcggaugggcauggggcuguaugucaaguacgacggagaucccugggcggacuccgaugcccucgcuuucucuggcgugauggugagcaugaaggaaccugggugguacuccuuuggcuucgagaucaaagacaagaaaugcgaugucccguguauuggaaucgaaaugguucacgacggcgggaaggagacauggcauagcgccgccaccgcuauuuauugccugaugggaucuggccagcuucugugggauacagugacggggguggacauggcccucuga

SEQ ID NO: 221417 - RNA, 1401 nt, Artificial Sequence; identical to SEQ ID NO: 220707
  derived and/or modified CDS sequence (opt5) from neuraminidase__InfluenzaB__AGX18637

SEQ ID NO: 221418 - RNA, 1401 nt, Artificial Sequence; identical to SEQ ID NO: 220707
  derived and/or modified CDS sequence (opt5) from neuraminidase__InfluenzaB__AGX18648

SEQ ID NO: 221419 - RNA, 1401 nt, Artificial Sequence; identical to SEQ ID NO: 220707
  derived and/or modified CDS sequence (opt5) from neuraminidase__InfluenzaB__AGX18659

SEQ ID NO: 221420 - RNA, 1401 nt, Artificial Sequence; identical to SEQ ID NO: 220707
  derived and/or modified CDS sequence (opt5) from neuraminidase__InfluenzaB__AGX18670

SEQ ID NO: 221421 - RNA, 1401 nt, Artificial Sequence
  derived and/or modified CDS sequence (opt5) from neuraminidase__InfluenzaB__AGX18681
augcugcccagcaccauccagacacucacgcuguuccuuaccuccggcggggugcugcucucucuguacgucagcgccucccuuucuuaucugcucuacagcgacauucugcugaaguuuuccccuacagagaucaccgcuccgacaaugccccucgauugcgccaacgcgucuaauguucaagcugugaacagaagcgccaccaaaggagugacacugcuucugccugaacccgaguggaccuauccucggcucuccugucccggcagcacguuccagaaggcccugcuuauuucuccucaccgcuuuggggaaaccaaaggaaauuccgcuccgcugaucgucagagagcccuucauugccugcggcccuaacgaauguaagcauuuugcucucacacacuacgccgcgcagcccgggggauauuacaauggcacccggggcgaccgcaacaaacugagacaucugaucagcgugaagcucgggaagaucccuacaguugaaaauucuauuuuccacauggccgcuugguccggaagcgccugccaugauggcaaagaguggaccuauaucgggguggacggacccgauaacaaugcucugcuuaagauuaaauacggcgaggccuacacggacacauaucacucuuacgcgaacaagauccugcggacccaggaguccgccuguaauugcauugggggaaacuguuaucucaugaucacagauggcagcgcuuccggcgucucugaaugccgcuuucugaaaauuagagaggggcggaucaucaaggagauuuucccgaccggacgcgugaagcacaccgaagaguguacaugcggcuuugccagcaauaaaacgaucgaaugugcuugcagagacaacuccuacaccgccaagcggccuuucguuaaacuuaauguggagacagauaccgccgaaauucgccugaugugcacagacaccuaucucgauacgcccagaccugacgaugggagcaucacaggacccugugagucuaacggcgacaagggguccggaggcauuaaaggcggguuuguccaucaacggauggcuagcaagaucggacgcugguacucuagaaccaugagcaaaaccgagcggaugggcauggggcuguaugugaaguacgacggagaucccugggcggacuccgaugcccuggcuuucucuggcgugauggucagcaugaaggaaccugggugguacuccuuuggcuucgagaucaaagacaagaaaugcgauguuccguguauuggaaucgaaauggugcacgacggcgggaaggagacauggcauagcgccgccaccgcuauuuauugccucaugggaucuggccagcugcuuugggauacagugacgggggucgacauggcccuguga

SEQ ID NO: 221422 - RNA, 1401 nt, Artificial Sequence; identical to SEQ ID NO: 220707
  derived and/or modified CDS sequence (opt5) from neuraminidase__InfluenzaB__AGX18692

SEQ ID NO: 221423 - RNA, 1401 nt, Artificial Sequence
  derived and/or modified CDS sequence (opt5) from neuraminidase__InfluenzaB__AGX18703
augcugcccagcaccauccagacacucacgcuguuccuuaccuccggcggggugcugcucucucuguacgucagcgccucccuuucuuaucugcucuacagcgacauucugcugaaguuuccuuccacagagaucaccgcuccgacaaugccccucgauugcgccaacgcgucuaauguucaagcugugaaccugagcgccaccaaaggagugacacuucugcucccugaacccgaguggaccuauccuagacuguccugucccggcagcacguuccagaaggcccuucugauuucuccucaccgguuuggggaaaccaaaggaaauuccgcuccgcucaucauucgcgagcccuucaucgccugcggcccuaaggaauguaaacauuuugcucugacacacuacgccgcgcagcccgggggauauuacaacggcaccagaggcgaccggaauaagcugcgccaucucaucagcgucaagcuggggaaaauuccuacaguggagaacucuaucuuccacauggccgcuugguccggaagcgccugccaugauggcaaggaguggaccuauauugggguugacggacccgauaauaacgcucugcuuaaaaucaaguacggcgaagccuacacggacacauaucacucuuacgcgaauaacauucucagaacccaggaguccgccuguaauugcaucgggggaaacuguuaucugaugauuacagauggcagcgcuuccggcgugucugaaugccgguuucuuaaaauccgcgaggggagaaucauuaaggagaucuucccgaccggacggauuaagcacaccgaagaguguacaugcggcuuugccagcaauaaaacgaucgaaugugcuugccgcgacaacuccuacaccgccaagagaccuuucgucaaacugaauguggagacagauaccgccgaaauucggcucaugugcacagagaccuaucuggacacgccccgcccugaugacgggagcaucacaggacccugugagucuaacggcgauaagggguccggaggcaucaaaggcggguuuguucaucaaagaauggcuagcaagauuggacggugguacucucgcaccaugagcaaaaccgaaagaaugggcauggggcuguaugugaaguacgacggagaccccugggcggauuccgacgcccucgcuuucucuggcgucauggugagcauggaggaaccugggugguacuccuuuggcuucgagaucaaggauaaaaagugcgacgugccguguauuggaaucgaaaugguccacgauggcgggaaagagacauggcauagcgccgccaccgcuauuuauugccugaugggaucuggccagcuucugugggacacaguuacgggggugaacauggcccucuga

SEQ ID NO: 221424 - RNA, 1401 nt, Artificial Sequence; identical to SEQ ID NO: 220707
  derived and/or modified CDS sequence (opt5) from neuraminidase__InfluenzaB__AGX18714

SEQ ID NO: 221425 - RNA, 1401 nt, Artificial Sequence; identical to SEQ ID NO: 220707
  derived and/or modified CDS sequence (opt5) from neuraminidase__InfluenzaB__AGX18725

SEQ ID NO: 221426 - RNA, 1401 nt, Artificial Sequence
  derived and/or modified CDS sequence (opt5) from neuraminidase__InfluenzaB__AGX18736
augcugcccagcaccauccagacacucacgcuguuccuuaccuccggcggggugcugcucucucuguacgucagcgccucccuuucuuaucugcucuacagcgacauucugcugaaguuuuccccuacagagaucaccgcuccgacaaugccccucgauugcgccaacgcgucuaauguucaagcugugaacagaagcgccaccaaaggagugacacugcuucugccugaacccgaguggaccuauccucggcucuccugucccggcagcacguuccagaaggcccugcuuauuucuccucaccgcuuuggggaaaccaaaggaaauuccgcuccgcugaucauuagagagcccuucaucgccugcggcccuaacgaauguaagcauuuugcucucacacacuacgccgcgcagcccgggggauauuacaauggcaccggcggggaccggaacaaacugcgccaucugaucagcgucaagcucggaaagauuccuacaguggaaaauucuaucuuccacauggccgcuugguccggcagcgccugccaugaugggaaagaguggaccuauauuggaguugacggccccgauaacaaugcucugcuuaagaucaaauacggggaggccuacacggacacauaucacucuuacgcgaacaagauucugagaacccaggaguccgccuguaauugcaucggaggcaacuguuaucucaugauuacagauggcagcgcuuccggggugucugaaugccgguuucugaaaauccgcgagggaagaaucauuaaggagaucuucccgaccggccgggucaagcacaccgaagaguguacaugcggguuugccagcaauaaaacgauugaaugugcuugccgcgacaacuccuacaccgccaagagaccuuucgugaaacuuaauguugagacagauaccgccgaaauccggcugaugugcacagacaccuaucucgauacgccccgcccugacgauggaagcauuacaggccccugugagucuaacggggacaagggauccggcggcaucaaagggggauuugugcaucaaagaauggcuagcaagaucggccggugguacucucgcaccaugagcaaaaccgagagaauggggaugggacuguaugucaaguacgacggcgaucccugggcggacuccgaugcccuggcuuucucuggggugauggugagcaugaaggaaccuggcugguacuccuuuggauucgagauuaaagacaagaaaugcgaugucccguguaucggcauugaaaugguucacgacgggggaaaggagacauggcauagcgccgccaccgcuaucuauugccucaugggcucugggcagcugcuuugggauacagugacgggaguggacauggcccuguga

SEQ ID NO: 221427 - RNA, 1401 nt, Artificial Sequence; identical to SEQ ID NO: 220707
  derived and/or modified CDS sequence (opt5) from neuraminidase__InfluenzaB__AGX18758

SEQ ID NO: 221428 - RNA, 1401 nt, Artificial Sequence; identical to SEQ ID NO: 220707
  derived and/or modified CDS sequence (opt5) from neuraminidase__InfluenzaB__AGX18769

SEQ ID NO: 221429 - RNA, 1401 nt, Artificial Sequence; identical to SEQ ID NO: 221166
  derived and/or modified CDS sequence (opt5) from neuraminidase__InfluenzaB__AGX18780

SEQ ID NO: 221430 - RNA, 1401 nt, Artificial Sequence; identical to SEQ ID NO: 220707
  derived and/or modified CDS sequence (opt5) from neuraminidase__InfluenzaB__AGX18791

SEQ ID NO: 221431 - RNA, 1401 nt, Artificial Sequence; identical to SEQ ID NO: 220707
  derived and/or modified CDS sequence (opt5) from neuraminidase__InfluenzaB__AGX18802

SEQ ID NO: 221432 - RNA, 1401 nt, Artificial Sequence
  derived and/or modified CDS sequence (opt5) from neuraminidase__InfluenzaB__AGX18813
augcugcccagcaccauccagacacucacgcuguuccuuaccuccggcggggugcugcucucucuguacgucagcgccucccuuucuuaucugcucuacagcgacauucugcugaaguuuccuuccacagagaucaccgcuccgacaaugccccucgauugcgccaacgcgucuaauguucaagcugugaacagaagcgccaccaaaggagugacacugcuucugccugaacccgaguggaccuauccucggcucuccugucccggcagcacguuccagaaggcccugcuuauuucuccucaccgcuuuggggaaaccaaaggaaauuccgcuccgcugaucauuagagagcccuucaucgccugcggcccuaaggaauguaaacauuuugcucucacacacuacgccgcgcagcccgggggauauuacaacggcacccggggcgaccgcaauaagcugagacaucugaucagcgucaagcucgggaaaauuccuacaguggagaacucuaucuuccacauggccgcuugguccggaagcgccugccaugauggcaaggaguggaccuauauugggguugacggacccgauaauaacgcucugcuuaaaaucaaguacggcgaagccuacacggacacauaucacucuuacgcgaauaacauucugcggacccaggaguccgccuguaauugcaucgggggaaacuguuaucucaugauuacagauggcagcgcuuccggcgugucugaaugccgcuuucugaaaaucagagaggggcggaucauuaaggagaucuucccgaccggacgcauuaagcacaccgaagaguguacaugcggcuuugccagcaauaaaacgaucgaaugugcuugcagagacaacuccuacaccgccaagcggccuuucgucaaacuuaauguggagacagauaccgccgaaauucgccugaugugcacagagaccuaucucgacacgcccagaccugaugacgggagcaucacaggacccugugagucuaacggcgauaagggguccggaggcaucaaaggcggguuuguucaucaacggauggcuagcaagauuggacgcugguacucuagaaccaugagcaaaaccgaacggaugggcauggggcuguaugugaaguacgacggagaccccugggcggauuccgacgcccuggucuucucuggcgugauggugagcauggaggaaccugggugguacuccuuuggcuucgagaucaaggauaaaaagugcgacgucccguguauuggaaucgaaaugguucacgauggcgggaaagagacauggcauagcgcugccaccgccauuuauugccucaugggaucuggccagcugcuuugggacacagugacgggggugaacauggcucuguga

SEQ ID NO: 221433 - RNA, 1401 nt, Artificial Sequence; identical to SEQ ID NO: 221166
  derived and/or modified CDS sequence (opt5) from neuraminidase__InfluenzaB__AGX18824

SEQ ID NO: 221434 - RNA, 1401 nt, Artificial Sequence
  derived and/or modified CDS sequence (opt5) from neuraminidase__InfluenzaB__AGX18846
augcugcccagcaccauccagacacucacgcuguuccuuaccuccggcggggugcugcucucucuguacgucagcgccucccuuucuuaucugcucuacagcgacauucugcugaaguuuuccccuacagagaucaccgcuccgacaaugccccucgauugcgccaacgcgucuaauguucaagcugugaacagaagcgccaccaaaggagugacacugcuucuguccgaaccugaguggaccuauccccggcucagcuguccuggcucuacguuccagaaggcccugcuuauuagcccccaccgcuuuggggaaaccaaaggaaauuccgcuccucugaucauuagagagccguucaucgccugcggccccaacgaauguaagcauuuugcucucacacacuacgccgcgcagccugggggauauuacaauggcacccggggcgaccgcaacaaacugagacaucugaucucugucaagcucgggaagauucccacaguggaaaauuccaucuuccacauggccgcuuggagcggaucugccugccaugauggcaaagaguggaccuauauugggguugacggaccugauaacaaugcucugcuuaagaucaaauacggcgaggccuacacggacacauaucacuccuacgcgaacaagauucugcggacccaggagagcgccuguaauugcaucgggggaaacuguuaucucaugauuacagauggcuccgcuucuggcgugagcgaaugccgcuuucugaaaaucagagaggggcggaucauuaaggagaucuuccccaccggacgcgucaagcacaccgaagaguguacaugcggcuuugccuccaauaaaacgauugaaugugcuugcagagacaacagcuacaccgccaagcggccguucgugaaacuuaauguugagacagauaccgccgaaauccgccugaugugcacagacaccuaucucgauacgccuagacccgacgaugggucuauuacaggaccuugugaguccaacggcgacaaggggagcggaggcaucaaaggcggguuugugcaucaacggauggcuucuaagaucggacgcugguacagcagaaccauguccaaaaccgagcggaugggcauggggcuguaugucaaguacgacggagaucccugggcggacucugaugcccuggcuuucagcggcgugaugguguccaugaaggaacccgggugguacagcuuuggcuucgagauuaaagacaagaaaugcgaugucccuuguaucggaauugaaaugguucacgacggcgggaaggagacauggcauucugccgccaccgcuaucuauugccucaugggauccggccagcugcuuugggauacagugacggggguggacauggcccuguga

SEQ ID NO: 221435 - RNA, 1401 nt, Artificial Sequence; identical to SEQ ID NO: 220707
  derived and/or modified CDS sequence (opt5) from neuraminidase__InfluenzaB__AGX18857

SEQ ID NO: 221436 - RNA, 1401 nt, Artificial Sequence; identical to SEQ ID NO: 221434
  derived and/or modified CDS sequence (opt5) from neuraminidase__InfluenzaB__AGX18868

SEQ ID NO: 221437 - RNA, 1401 nt, Artificial Sequence; identical to SEQ ID NO: 221434
  derived and/or modified CDS sequence (opt5) from neuraminidase__InfluenzaB__AGX18879

SEQ ID NO: 221438 - RNA, 1401 nt, Artificial Sequence
  derived and/or modified CDS sequence (opt5) from neuraminidase__InfluenzaB__AGX18890
augcugcccagcaccauccagacacucacgcuguuccuuaccuccggcggggugcugcucucucuguacgucagcgccucccuuucuuaucugcucuacagcgacauucugcugaaguuuccuuccacagagaucaccgcuccgacaaugccccucgauugcgccaacgcgucuaauguucaagcugugaacagaagcgccaccaaaggagugacacugcuucugccugaacccgaguggaccuauccucggcucuccugucccggcagcacguuccagaaggcccugcuuauuucuccucaccgcuuuggggaaaccaaaggaaauuccgcuccgcugaucauuagagagcccuucaucgccugcggcccuaaggaauguaaacauuuugcucucacacacuacgccgcgcagcccgggggauauuacaacggcacccggggcgaccgcaauaagcugagacaucugaucagcgucaagcucgggaaaauuccuacaguggagaacucuaucuuccacauggccgcuugguccggaagcgccugccaugauggcaaggaguggaccuauauugggguugacggacccgauaauaacgcucugcuuaaaaucaaguacggcgaagccuacacggacacauaucacucuuacgcgaauaacauucugcggacccaggaguccgccuguaauugcaucgggggaaacuguuaucucaugauuacagauggcagcgcuuccggcgugucugaaugccgcuuucugaaaaucagagaggggcggaucauuaaggagaucuucccgaccggacgcauuaagcacaccgaagaguguacaugcggcuuugccagcaauaaaacgaucgaaugugcuugcagagacaacuccuacaccgccaagcggccuuucgucaaacuuaauguggagacagauaccgccgaaauucgccugaugugcacagagaccuaucucgacacgcccagaccugaugacgggagcaucacaggacccugugagucuaacggcgauaagggguccggaggcaucaaaggcggguuuguucaucaacggauggcuagcaagauuggacgcugguacucuagaaccaugagcaaaaccgaacggaugggcauggggcuguaugugaaguacgacggagaccccugggcggauuccgacgcccuggcuuucucuggcgucauggugagcauggaggaaccugggugguacuccuuuggcuucgagaucaaggauaaaaagugcgacgugccguguauuggaaucgaaaugguccacgauggcgggaaagagacauggcauagcgccgccaccacaauuuauugccucaugggaucuggccagcugcuuugggacacgguuaccggggugaacauggcucuguga

SEQ ID NO: 221439 - RNA, 1401 nt, Artificial Sequence; identical to SEQ ID NO: 220707
  derived and/or modified CDS sequence (opt5) from neuraminidase__InfluenzaB__AGX18912

SEQ ID NO: 221440 - RNA, 1401 nt, Artificial Sequence
  derived and/or modified CDS sequence (opt5) from neuraminidase__InfluenzaB__AGX18923
augcugcccagcaccauccagacacucacgcuguuccuuaccuccggcggggugcugcucucucuguacgucagcgccucccuuucuuaucugcucuacagcgacauucugcugaaguuuuccccuacagagaucaccgcuccgacaaugccccucgauugcgccaacgcgucuaauguucaagcugugaacagaagcgccaccaaaggagugacacugcuucugccugaacccgaguggaccuauccucggcucuccugucccggcagcacguuccagaaggcccugcuuauuucuccucaccgcuuuggggaaaccaaaggaaauuccgcuccgcugaucauuagagagcccuucaucgccugcggcccuaacgaauguaagcauuuugcucucacacacuacgccgcgcagcccgggggauauuacaaucggacccgcggcgacagaaacaaacugcggcaucugaucagcgucaagcucggcaagauuccuacaguggaaaauucuaucuuccacauggccgcuugguccgggagcgccugccaugauggaaaagaguggauuuauaucggcguugacgggcccgauaacaaugcucugcuuaagauuaaauacggagaggccuacaccgacacguaucacucuuacgcgaacaagauccugcgcacacaggaguccgccuguaauugcauuggcgggaacuguuaucucaugaucaccgauggaagcgcuuccggcgugucugaaugcagauuucugaaaauccgggagggccgcauuaucaaggagauuuucccgacagggagagucaagcacaccgaagaguguaccugcggauuugccagcaauaaaacaaucgaaugugcuugccgggacaacuccuacacggccaagcgcccuuucgugaaacuuaauguugagaccgauacagccgaaauuagacugaugugcaccgacacauaucucgauacgccccggccugacgauggcagcaucaccgggcccugugagucuaacggagacaagggcuccgggggaaucaaaggcggcuuugugcaucaacgcauggcuagcaagauugggagaugguacucucggacaaugagcaaaaccgagagaaugggaaugggccuguaugucaaguacgacggggaucccugggcggacuccgaugcccuggcuuucucuggagugauggugagcaugaaggaaccuggcugguacuccuuuggguucgagaucaaagacaagaaaugcgaugucccguguauuggcaucgaaaugguucacgacggaggcaaggagaccuggcauagcgccgccacagcuauuuauugccucauggggucuggacagcugcuuugggauaccgugacaggcguggacauggcccuguga

SEQ ID NO: 221441 - RNA, 1401 nt, Artificial Sequence; identical to SEQ ID NO: 220707
  derived and/or modified CDS sequence (opt5) from neuraminidase__InfluenzaB__AGX18934

SEQ ID NO: 221442 - RNA, 1401 nt, Artificial Sequence
  derived and/or modified CDS sequence (opt5) from neuraminidase__InfluenzaB__AGX18956
augcugcccagcaccauccagacacucacgcuguuccuuaccuccggcggggugcugcucucucuguacgucagcgccucccuuucuuaucugcucuacagcgacauucugcugaaguuuuccccuacagagaucaccgcuccgacaaugccccucgauugcgccaacgcgucuaauguucaagcugugaacagaagcgccaccaaaggagugacacugcuucugccugaacccgaguggaccuauccucggcucuccugucccggcagcacguuccagaaggcccugcuuauuucuccucaccgcuuuggggaaaccaaaggaaauuccgcuccgcugaucauuagagagcccuucaucgccugcggcccuaacgaauguaagcauuuugcucucacacacuacgccgcgcagcccgggggauauuacaauggcacccggggcgaccgcaacaaacugagacaucugaucagcgucaagcucgggaagauuccuacaguggaaaauucuaucuuccacguugccgcuugguccggaagcgccugccaugauggcaaagaguggaccuauauugggguggacggacccgauaacaaugcucugcuuaagaucaaauacggcgaggccuacacggacacauaucacucuuacgcgaacaagauucugcggacccaggaguccgccuguaauugcaucgggggaaacuguuaucucaugauuacagauggcagcgcuuccggcgucucugaaugccgcuuucugaaaaucagagaggggcggaucauuaaggagaucuucccgaccggacgcgugaagcacaccgaagaguguacaugcggcuuugccagcaauaaaacgauugaaugugcuugcagagacaacuccuacaccgccaagcggccuuucguuaaacuuaauguggagacagauaccgccgaaauccgccugaugugcacagacaccuaucucgauacgcccagaccugacgaugggagcauuacaggacccugugagucuaacggcgacaagggguccggaggcaucaaaggcggguuuguccaucaacggauggcuagcaagaucggacgcugguacucuagaaccaugagcaaaaccgagcggaugggcauggggcuguaugugaaguacgacggagaucccugggcggacuccgaugcccuggcuuucucuggcgugauggucagcaugaaggaaccugggugguacuccuuuggcuucgagauuaaagacaagaaaugcgauguuccguguaucggaauugaaauggugcacgacggcgggaaggagacauggcauagcgccgccaccgcuaucuauugccucaugggaucuggccagcugcuuugggauacagugacgggggucgacauggcccuguga

SEQ ID NO: 221443 - RNA, 1401 nt, Artificial Sequence
  derived and/or modified CDS sequence (opt5) from neuraminidase__InfluenzaB__AGX18967
augcugcccagcaccauccagacacucacgcuguuccuuaccuccggcggggugcugcucucucuguacgucagcgccucccuuucuuaucugcucuacagcgacauucugcugaaguuuuccccuacagagaucaccgcuccgacaaugccccucgauugcgccaacgcgucuaauguucaagcugugaacagaagcgccaccaaaggagugacaccucugcuucccgaaccugaguggaccuauccccggcuguccuguccuggcagcacguuccagaaggcccuccugauuucuccgcaccgcuuuggggaaaccaaaggaaauuccgcuccccuuaucauuagagagccuuucaucgccugcggccccaacgaauguaagcauuuugcucugacacacuacgccgcgcagccugggggauauuacaauggcacccggggcgaccgcaacaaacucagacaucugaucagcgucaagcuggggaagauucccacaguggaaaauucuaucuuccacauggccgcuugguccggaagcgccugccaugauggcaaagaguggaccuauauugggguugacggaccggauaacaaugcucuccugaagaucaaauacggcgaggccuacacggacacauaucacucuuacgcgaacaagauucuucggacccaggaguccgccuguaauugcaucgggggaaacuguuaucugaugauuacagauggcagcgcuuccggcgugucugaaugccgcuuucucaaaaucagagaggggcggaucauuaaggagaucuucccuaccggacgcgucaagcacaccgaagaguguacaugcggcuuugccagcaauaaaacgauugaaugugcuugcagagacaacuccuacaccgccaagcggcccuucgugaaacugaauguugagacagauaccgccgaaauccgccuuaugugcacagacaccuaucuggauacgccuagacccgacgaugggagcauuacaggacccugugagucuaacggcgacaagggguccggaggcaucaaaggcggguuugugcaucaacggauggcuagcaagaucggacgcugguacucuagaaccaugagcaaaaccgagcggaugggcauggggcucuaugucaaguacgacggagauccuugggcggacuccgaugcccuggcuuucucuggcgugauggugagcaugaaggaaccggggugguacuccuuuggcuucgagauuaaagacaagaaaugcgauguccccuguaucggaauugaaaugguucacgacggcgggaaggagacauggcauagcgccgccaccgcuaucuauugccugaugggaucuggccagcuccugugggauacagugacggggguggacauggcccuuuga

SEQ ID NO: 221444 - RNA, 1401 nt, Artificial Sequence; identical to SEQ ID NO: 221166
  derived and/or modified CDS sequence (opt5) from neuraminidase__InfluenzaB__AGX18978

SEQ ID NO: 221445 - RNA, 1401 nt, Artificial Sequence
  derived and/or modified CDS sequence (opt5) from neuraminidase__InfluenzaB__AGX18989
augcugcccagcaccauccagacacucacgcuguuccuuaccuccggcggggugcugcucucucuguacgucagcgccucccuuucuuaucugcucuacagcgacauucugcugaaguuuuccccuacagagaucaccgcuccgacaaugccccucgauuaugccaacgcgucuaauguucaagcugugaacagaagcgccaccaaaggagugacacugcuucugccugaacccgaguggaccuacccucggcucuccugccccggcagcacguuccagaaggcccugcuuauuucuccucaccgcuuuggggaaaccaaaggaaauuccgcuccgcugaucauuagagagcccuucaucgccuguggcccuaacgaaugcaagcauuuugcucucacacacuaugccgcgcagcccgggggauacuauaauggcacccggggcgaccgcaacaaacugagacaucugaucagcgucaagcucgggaagauuccuacaguggaaaauucuaucuuccacauggccgcuugguccggaagcgccugucaugauggcaaagaguggaccuacauugggguugacggacccgauaacaaugcucugcuuaagaucaaauacggcgaggccuauacggacacauaccacucuuaugcgaacaagauucugcggacccaggaguccgccugcaauuguaucgggggaaacugcuaccucaugauuacagauggcagcgcuuccggcgugucugaaugucgcuuucugaaaaucagagaggggcggaucaccaaggagauuuucccgaccggacgcgucaagcacacagaagagugcacguguggcuuugccagcaauaaaaccaucgaaugcgcuuguagagacaacuccuauacagccaagcggccuuucgugaaacuuaauguugagaccgauacagccgaaauucgccugaugugcaccgacacguaccucgauacacccagaccugacgaugggagcaucaccggacccugcgagucuaacggcgacaagggguccggaggcauuaaaggcggguuugugcaucaacggauggcuagcaagaucggacgcugguauucuagaaccaugagcaaaacagagcggaugggcauggggcuguacgucaaguacgacggagaucccugggcggacuccgaugcccuggcuuucucuggcgugauggugagcaugaaggaaccugggugguauuccuuuggcuucgagaucaaagacaagaaaugugaugucccgugcauuggaaucgaaaugguucacgacggcgggaaggagaccuggcauagcgccgccacagcuauuuacugucucaugggaucuggccagcugcuuugggauacggugaccgggguggacauggcccuguga

SEQ ID NO: 221446 - RNA, 1401 nt, Artificial Sequence
  derived and/or modified CDS sequence (opt5) from neuraminidase__InfluenzaB__AGX19000
augcugcccagcaccauccagacacucacgcuguuccuuaccuccggcggggugcugcucucucuguacgucagcgccucccuuucuuaucugcucuacagcgacauucugcugaaguuuuccccuacagagaucaccgcuccgacaaugccccucgauugcgccaacgcgucuaauguucacgcugugaacagaagcgccaccaaaggagugacacugcuucugccugaacccgaguggaccuauccucggcucuccugucccggcagcacguuccaaaaggcccugcuuauuucuccucaucgcuuuggggaaaccaaaggaaauuccgcuccgcugaucauuagagagcccuucaucgccugcggcccuaacgaauguaagcacuuugcucucacauacuaugccgcgcagcccgggggauacuauaauggcacccggggcgaccgcaacaaacugagacaucugaucagcgucaagcucgggaagauuccuacaguggaaaauucuaucuuccacauggccgcuugguccggaagcgccugccaugauggcaaagaguggaccuacauugggguugacggacccgauaacaaugcucugcuuaagaucaaauacggcgaggccuauacggacacauaccacucuuaugcgaacaauauucugcggacccaggaguccgccuguaacugcaucgggggaaauuguuaccucaugauuacagauggcagcgcuuccggcgugucugaaugccgcuuucugaagaucagagaggggcggaucauuaaagagaucuucccgaccggacgcgucaagcacaccgaagaguguacaugcggcuuugccagcaacaagacgauugaaugugcuugcagagacaauuccuauaccgccaaacggccuuucgugaaacuuaacguugagacagauaccgccgaaauccgccugaugugcacagacaccuaccucgauacgcccagaccugacgaugggagcauuacaggacccugugagucuaacggcgacaagggguccggaggcaucaagggcggguuugugcaucagcggauggcuagcaaaaucggacgcugguauucuagaaccaugagcaagaccgagcggaugggcauggggcuguacgucaaauacgacggagaucccugggcggacuccgaugcccuggcuuucucuggcgugauggugagcaugaaggaaccugggugguauuccuuuggcuucgagauuaaggacaaaaagugcgaugucccguguaucggaauugaaaugguucacgacggcgggaaagagacauggcauagcgccgccaccgcuaucuacugccucaugggaucuggccaacugcuuugggauacagugacggggguggacauggcccuguga

SEQ ID NO: 221447 - RNA, 1401 nt, Artificial Sequence; identical to SEQ ID NO: 220707
  derived and/or modified CDS sequence (opt5) from neuraminidase__InfluenzaB__AGX19011

SEQ ID NO: 221448 - RNA, 1401 nt, Artificial Sequence; identical to SEQ ID NO: 220707
  derived and/or modified CDS sequence (opt5) from neuraminidase__InfluenzaB__AGX19022

SEQ ID NO: 221449 - RNA, 1401 nt, Artificial Sequence
  derived and/or modified CDS sequence (opt5) from neuraminidase__InfluenzaB__AGX19033
augcugcccagcaccauccagacacucacgcuguuccuuaccuccggcggggugcugcucucucuguacgucagcgccucccuuucuuaucugcucuacagcgacauucugcugaaguuuccuuccacagagaucaccgcuccgacaaugccccucaacugcgccaaugcgucuaacguucaagcugugaauagaagcgccaccaaaggagugacacugcuucugccugaacccgaguggaccuauccucggcucuccugucccggcagcacguuccagaaggcccugcuuauuucuccucaccgcuuuggggaaaccaaaggaaacuccgcuccgcugaucauuagagagcccuucaucgccugcggcccuaaggaauguaaacauuuugcucucacacacuacgccgcgcagcccgggggauauuacaauggcacccggggcgaucgcaacaagcugagacaucugaucagcgucaagcucgggaaaauuccuacaguggaaaauucuaucuuccacauggccgcuugguccggaagcgccugccaugacggcaaggaguggaccuauauugggguugauggacccgacaacaaugcucugcuuaaaaucaaguacggcgaagccuacacggauacauaucacucuuacgcgaacaauauucugcggacccaggaguccgccuguaacugcaucgggggaaauuguuaucucaugauuacagacggcagcgcuuccggcgugucugaaugccgcuuucugaaaaucagagaggggcggaucauuaaggagaucuucccgaccggacgcauuaagcacaccgaagaguguacaugcggcuuugccagcaacaaaacgaucgaaugugcuugcagagauaauuccuacaccgccaagcggccuuucgucaaacuuaacguggagacagacaccgccgaaauucgccugaugugcacagagaccuaucucgauacgcccagaccugacgaugggagcaucacaggacccugugagucuaacggcgacaagggguccgaaggaaucaaaggcggcuuuguucaucaacggauggcuagcaagauugggcgcugguacucuagaaccaugagcaaaaccgagcggaugggaaugggccuguaugugaaguacgauggggaccccugggcggacuccgaugcccuggcuuucucuggagucauggugagcauggaggagccuggcugguacuccuuuggguucgaaaucaaggacaaaaagugcgaugugccguguauuggcaucgagaugguccacgacggaggcaaagagacauggcauagcgccgccaccgcuauuuauugccucauggggucuggacagcugcuuugggauacaguuacgggcgugaauauggcccuguga

SEQ ID NO: 221450 - RNA, 1401 nt, Artificial Sequence; identical to SEQ ID NO: 220707
  derived and/or modified CDS sequence (opt5) from neuraminidase__InfluenzaB__AGX19044

SEQ ID NO: 221451 - RNA, 1401 nt, Artificial Sequence; identical to SEQ ID NO: 220707
  derived and/or modified CDS sequence (opt5) from neuraminidase__InfluenzaB__AGX19055

SEQ ID NO: 221452 - RNA, 1401 nt, Artificial Sequence
  derived and/or modified CDS sequence (opt5) from neuraminidase__InfluenzaB__AGX19066
augcugcccagcaccauccagacacucacgcuguuccuuaccuccggcggggugcugcucucucuguacgucagcgccucccuuucuuaucugcucuacagcgacauucugcugaaguuuuccccuacagagaucaccgcuccgacaaugccccucgauugcgccaacgcgucuaauguucaagcugugaacagaagcgccaccaaaggagugacacugcuucugccugaacccgaguggaccuauccucggcucuccugucccggcagcacguuccagaaggcccugcuuauuucuccucaccgcuuuggggaaaccaaaggaaauuccgcuccgcugaucauuagagagcccuucaucgccugcggcccuaacgaauguaagcauuuugcucucacacacuacgccgcgcagcccgggggauauuacaauggcacccggggcgaccgcaacaaacugagacaucugaucagcgucaagcucgggaagauuccuacaguggaaaauucuaucuuccacauggccgcuugguccggaagcgccugccaugauggcaaagaguggauuuauaucgggguugacggacccgauaacaaugcucugcuuaagauuaaauacggcgaggccuacaccgacacguaucacucuuacgcgaacaagauccugcggacacaggaguccgccuguaauugcauugggggaaacuguuaucucaugaucaccgauggcagcgcuuccggcgugucugaaugccgcuuucugaaaaucagagaggggcggauuaucaaggagauuuucccgacaggacgcgucaagcacaccgaagaguguaccugcggcuuugccagcaauaaaacaaucgaaugugcuugcagagacaacuccuacacggccaagcggccuuucgugaaacuuaauguugagaccgauacagccgaaauucgccugaugugcaccgacacauaucucgauacccccagaccugacgaugggagcaucacgggacccugugagucuaacggcgacaagggguccggaggcaucaaaggcggguuugugcaucaacggauggcuagcaagauuggacgcugguacucuagaacaaugagcaaaaccgagcggaugggcauggggcuguaugucaaguacgacggagaucccugggcggacuccgaugcccuggcuuucucuggcgugauggugagcaugaaggaaccugggugguacuccuuuggcuucgagaucaaagacaagaaaugcgaugucccguguauuggaaucgaaaugguucacgacggcgggaaggagaccuggcauagcgccgccacagcuauuuauugccucaugggaucuggccagcugcuuugggauaccgugacagggguggacauggcccuguga

SEQ ID NO: 221453 - RNA, 1401 nt, Artificial Sequence
  derived and/or modified CDS sequence (opt5) from neuraminidase__InfluenzaB__AGX19077
augcugcccagcaccauccagacacucacgcuguuccuuaccuccggcggggugcugcucucucuguacgucagcgccucccuuucuuaucugcucuacagcgacauucugcugaaguuuacaccuaccgagaucacagcuccgaccaugccccucgauugcgccaacgcguccaauguucaagcugugaacagaucugccacaaaaggagugaccccucugcuucccgaaccugaguggacguauccccggcugagcuguccuggcuccaccuuccagaaggcccuccugauuagcccgcaccgcuuuggggaaacaaaaggaaauucugcuccccuuaucauuagagagccuuucaucgccugcggccccaacgaauguaagcauuuugcucugacccacuacgccgcgcagccugggggauauuacaauggcacacggggcgaccgcaacaaacucagacaucugaucuccgucaagcuggggaagauucccaccguggagaauagcaucuuccacauggccgcuuggucuggauccgccugccaugauggcaaagaguggacguauauugggguugacggaccggauaacaaugcucuccugaagaucaaauacggcgaagccuacacagacaccuaucacagcuacgcgaacaagauucuucggacacaggagucugccuguaauugcaucgggggaaacuguuaucugaugauuaccgauggcuccgcuagcggcguguccgaaugccgcuuucucaaaaucagagaggggcggaucauuaaggagaucuucccuaccggacgcgucaagcacacagaagaguguacgugcggcuuugccucuaauaaaaccauugaaugugcuugcagagacaacagcuacacagccaagcggcccuucgugaaacugaauguugagaccgauacagccgaaauccgccuuaugugcaccgacacguaucuggauacaccuagacccgacgauggguccauuaccggacccugugagagcaacggcgacaaggggucuggaggcaucaaaggcggguuugugcaucaacggauggcuuccaagaucggacgcugguacagcagaaccaugucuaaaacagagcggaugggcauggggcucuaugucaaguacgacggagauccuugggcggacagcgaugcccuggcuuucuccggcgugauggugucuaugaaggaaccggggugguacagcuuuggcuucgagauuaaagacaagaaaugcgauguccccuguaucggaauugaaaugguucacgacggcgggaaggagaccuggcauuccgccgccacagcuaucuauugccugaugggaagcggccagcuccugugggauacggugaccgggguggacauggcccuuuga

SEQ ID NO: 221454 - RNA, 1401 nt, Artificial Sequence
  derived and/or modified CDS sequence (opt5) from neuraminidase__InfluenzaB__AGX19088
augcugcccagcaccauccagacacucacgcuguuccuuaccuccggcggggugcugcucucucuguacgucagcgccucccuuucuuaucugcucuacagcgacauucugcugaaguuuuccccuacagagaucaccgcuccgacaaugccccucgauugcgccaacgcgucuaauguucaagcugugaacagaagcgccaccaaaggagugacacugcuucugccugaacccgaguggaccuauccucggcucuccugucccggcagcacguuccagaaggcccugcuuauuucuccucaccgcuuuggggaaaccaaaggaaauuccgcuccgcugaucauuagagagcccuucaucgccugcggcccuaacgaauguaagcauuuugcucucacacacuacgccgcgcagcccgggggauauuacaauggcacccggggcgaccgcaacaaacugagacaucugaucagcgucaagcucgggaagauuccuacaguggaaaauucuaucuuccacauggccgcuugguccggaagcgccugccaugauggcaaagaguggaccuauauugggguugacggacccgauaacaaugcucugcuuaagaucaaauacggcgaggccuacacggacacauaucacucuuacgcgaacaagauucugcggacccaggaguccgccuguaauugcaucgggggaaacuguuaucucaugauuacagauggcagcgcuuccggcgugucugaaugccgcuuucugaaaaucagagaggggcggaucgucaaggagauuuucccgaccggacgcgugaagcacaccgaagaguguacaugcggcuuugccagcaauaaaacgaucgaaugugcuugcagagacaacuccuacaccgccaagcggccuuucguuaaacuuaauguggagacagauaccgccgaaauucgccugaugugcacagacaccuaucucgauacgcccagaccugacgaugggagcaucacaggacccugugagucuaacggcgacaagggguccggaggcauuaaaggcggguuuguccaucaacggauggcuagcaagaucggacgcugguacucuagaaccaugagcaaaaccgagcggaugggcauggggcuguaugugaaguacgacggagaucccugggcggacuccgaugcccuggcuuucucuggcgugauggucagcaugaaggaaccugggugguacuccuuuggcuucgagaucaaagacaagaaaugcgauguuccguguauuggaaucgaaauggugcacgacggcgggaaggagacauggcauagcgccgccaccgcuauuuauugccucaugggaucuggccagcugcuuugggauacagugacgggggucgacauggcccuguga

SEQ ID NO: 221455 - RNA, 1401 nt, Artificial Sequence; identical to SEQ ID NO: 220707
  derived and/or modified CDS sequence (opt5) from neuraminidase__InfluenzaB__AGX19099

SEQ ID NO: 221456 - RNA, 1401 nt, Artificial Sequence
  derived and/or modified CDS sequence (opt5) from neuraminidase__InfluenzaB__AGX19110
augcugcccagcaccauccagacacucacgcuguuccuuaccuccggcggggugcugcucucucuguacgucagcgccucccuuucuuaucugcucuacagcgacauucugcugaaguuuccuuccacagagaucaccgcuccgacaaugccccucgauugcgccaacgcgucuaauguucaagcugugaacagaagcgccaccaaaggagugacacugcuucugccugaacccgaguggaccuauccucggcucuccugucccggcagcacguuccagaaggcccugcuuauuucuccucaccgcuuuggggaaaccaaaggaaauuccgcuccgcugaucauuagagagcccuucaucgccugcggcccuaaggaauguaaacauuuugcucucacacacuacgccgcgcagcccgggggauauuacaacggcacccggggcgaccgcaauaagcugagacaucugaucagcgucaagcucgggaaaauuccuacaguggagaacucuaucuuccacauggccgcuugguccggaagcgccugccaugauggcaaggaguggaccuauauugggguugacggacccgauaauaacgcucugcuuaaaaucaaguacggcgaagccuacacggacacauaucacucuuacgcgaauaacauucugcggacccaggaguccgccuguaauugcaucgggggaaacuguuaucucaugauuacagauggcagcgcuuccggcgugucugaaugccgcuuucugaaaaucagagaggggcggaucauuaaggagaucuucccgaccggacgcauuaagcacaccgaagaguguacaugcggcuuugccagcaauaaaacgaucgaaugugcuugcagagacaacuccuacaccgccaagcggccuuucauuaaacuuaaugucgagacagauaccgccgaaauccgccugaugugcacagagaccuaucucgacacgcccagaccugaugacgggagcaucacaggacccugugagucuaacggcgauaagggguccggaggcauuaaaggcggguuugugcaucaacggauggcuagcaagaucggacgcugguacucuagaaccaugagcaaaaccgaacggaugggcauggggcuguauguuaaguacgacggagaccccugggcggauuccgacgcccugguguucucuggcgucauggugagcauggaggaaccugggugguacuccuuuggcuucgagauuaaggauaaaaagugcgacgugccguguaucggaauugaaaugguccacgauggcgggaaagagacauggcauagcgcugccaccgccaucuauugccucaugggaucuggccagcugcuuugggacacaguuacgggggugaacauggcucuguga

SEQ ID NO: 221457 - RNA, 1401 nt, Artificial Sequence
  derived and/or modified CDS sequence (opt5) from neuraminidase__InfluenzaB__AGX19121
augcugcccagcaccacacagacgcucacccuguuccuuacauccggcggggugcugcucucucuguacgucagcgccucccuuucuuaucugcucuacagcgacauccugcugaaguuuuccccuaccgagauuacagcuccgaccaugccccucgauugcgccaacgcgucuaauguucaagcugugaacagaagcgccacaaaaggagugacccugcuucugccugaacccgaguggacguauccucggcucuccugucccggcagcaccuuccagaaggcccugcuuaucucuccucaccgcuuuggggaaacaaaaggaaauuccgcuccgcugauuaucagagagcccuucauugccugcggcccuaacgaauguaagcauuuugcucucacccacuacgccgcgcagcccgggggauauuacaauggcacacggggcgaccgcaacaaacugagacaucugaucagcgucaagcucgggaagaucccuaccguggaaaauucuauuuuccacauggccgcuugguccggaagcgccugccaugauggcaaagaguggacguauaucgggguugacggacccgauaacaaugcucugcuuaagauuaaauacggcgaggccuacacagacaccuaucacucuuacgcgaacaagauccugcggacacaggaguccgccuguaauugcauugggggaaacuguuaucucaugaucaccgauggcagcgcuuccggcgugucugaaugccgcuuucugaaaauuagagaggggcggaucaucaaggagauuuucccgaccggacgcgucaagcacacagaagaguguacgugcggcuuugccagcaauaaaaccaucgaaugugcuugcagagacaacuccuacacagccaagcggccuuucgugaaacuuaauguugagaccgauacagccgaaauucgccugaugugcaccgacacguaucucgauacacccagaccugacgaugggagcaucaccggacccugugagucuaacggcgacaagggguccggaggcauuaaaggcggguuugugcaucaacggauggcuagcaagaucggacgcugguacucuagaaccaugagcaaaacagagcggaugggcauggggcuguaugucaaguacgacggagaucccugggcggacuccgaugcccuggcuuucagaggcgugauggugucuaugaaggaaccugggugguacagcuuuggcuucgagaucaaagacaagaaaugcgaugucccguguauuggaaucgaaaugguucacgacggcgggaaggagaccuggcauuccgccgccacagcuauuuauugccucaugggaagcggccagcugcuuugggauacggugaccgggguggacauggcccuguga

SEQ ID NO: 221458 - RNA, 1401 nt, Artificial Sequence; identical to SEQ ID NO: 221341
  derived and/or modified CDS sequence (opt5) from neuraminidase__InfluenzaB__AGX19132

SEQ ID NO: 221459 - RNA, 1401 nt, Artificial Sequence; identical to SEQ ID NO: 221445
  derived and/or modified CDS sequence (opt5) from neuraminidase__InfluenzaB__AGX19143

SEQ ID NO: 221460 - RNA, 1401 nt, Artificial Sequence
  derived and/or modified CDS sequence (opt5) from neuraminidase__InfluenzaB__AGX19154
augcugcccagcaccauccagacacucacgcuguuccuuaccuccggcggggugcugcucucucuguacgucagcgccucccuuucuuaucugcucuacagcaacauucugcugaaguuuuccccuacagagaucaccgcuccgacaaugccccucgacugcgccaaugcgucuaacguucacgcugugaauagaagcgccaccaaaggagugacacugcuucugccugaacccgaguggaccuauccucggcucuccugucccggcagcacguuccaaaaggcccugcuuauuucuccucaucgcuuuggggaaaccaaaggaaacuccgcuccgcugaucauuagagagcccuucaucgccugcggcccuaaugaauguaagcacuuugcucucacacauuacgccgcgcagcccgggggauauuacaacggcacccggggcgaucgcaauaaacugagacaccugaucagcgucaagcucgggaagauuccuacaguggagaacucuaucuuccauauggccgcuugguccggaagcgccugccacgacggcaaagaguggaccuauauugggguugauggacccgacaauaacgcucugcuuaagaucaaauacggcgaagccuacacggauacauaucacucuuacgcgaauaacauucugcggacccaggaguccgccuguaauugcaucgggggaaacuguuaucucaugauuacagacggcagcgcuuccggcgugucugaaugccgcuuucugaagaucagagaggggcggaucauuaaagagaucuucccgaccggacgcgucaagcauaccgaagaguguacaugcggcuuugccagcaauaagacgauugaaugugcuugcagagauaacuccuacaccgccaaacggccuuucgugaaacuuaacguugagacagacaccgccgaaauccgccugaugugcacagauaccuaucucgacacgcccagaccugaugacgggagcauuacaggacccugugagucuaauggcgauaagggguccggaggcaucaagggcggguuugugcaccagcggauggcuagcaaaaucggacgcugguacucuagaaccaugagcaagaccgagcggaugggcauggggcuguaugucaaauacgacggagaccccugggcggauuccgacgcccuggcuuucucuggcgugauggugagcaugaaggaaccugggugguacuccuuuggcuucgagauuaaggauaaaaagugcgacgucccguguaucggaauugaaaugguucaugauggcgggaaagagacauggcacagcgccgccaccgcuaucuauugccucaugggaucuggccaacugcuuugggacacagugacggggguggauauggcccuguga

SEQ ID NO: 221461 - RNA, 1401 nt, Artificial Sequence; identical to SEQ ID NO: 220707
  derived and/or modified CDS sequence (opt5) from neuraminidase__InfluenzaB__AGX19165

SEQ ID NO: 221462 - RNA, 1401 nt, Artificial Sequence
  derived and/or modified CDS sequence (opt5) from neuraminidase__InfluenzaB__AGX19176
augcugcccagcaccauccagacacucacgcuguuccuuaccuccggcggggugcugcucucucuguacgucagcgccucccuuucuuaucugcucuacagcgacauucugcugaaguuuuccccuacagagaucaccgcuccgacaaugccccucgauugcgccaacgcgucuaauguucacgcugugaacagaagcgccaccaaaggagugacacugcuucugccugaacccgaguggaccuauccucggcucuccugucccggcagcacguuccaaaaggcccugcuuauuucuccucaucgcuuuggggaaaccaaaggaaauuccgcuccgcugaucauuagagagcccuucaucgccugcggcccuaacgaauguaagcacuuugcucucacacauuacgccgcgcagcccgggggauauuacaaucggacccgcggcgacagaaacaaacugcggcaccugaucagcgucaagcucggcaagauuccuacaguggaaaauucuaucuuccauauggccgcuugguccgggagcgccugccacgauggaaaagaguggaccuauauuggcguugacgggcccgauaacaaugcucugcuuaagaucaaauacggagaggccuacacggacacauaucacucuuacgcgaacaauauucugcgcacccaggaguccgccuguaacugcaucggcgggaauuguuaucucaugauuacagauggaagcgcuuccggcgugucugaaugcagauuucugaagauccgggagggccgcaucauuaaagagaucuucccgaccgggagagucaagcauaccgaagaguguacaugcggauuugccagcaacaagacgauugaaugugcuugccgggacaauuccuacaccgccaaacgcccuuucgugaaacuuaacguugagacagauaccgccgaaaucagacugaugugcacagacaccuaucucgauacgccccggccugacgauggcagcauuacagggcccugugagucuaacggagacaagggcuccgggggaaucaagggcggcuuugugcaccagcgcauggcuagcaaaaucgggagaugguacucucggaccaugagcaagaccgagagaaugggaaugggccuguaugucaaauacgacggggaucccugggcggacuccgaugcccuggcuuucucuggagugauggugagcaugaaggaaccuggcugguacuccuuuggguucgagauuaaggacaaaaagugcgaugucccguguaucggcauugaaaugguucaugacggaggcaaagagacauggcacagcgccgccaccgcuaucuauugccucauggggucuggacaacugcuuugggauacagugacgggcguggacauggcccuguga

SEQ ID NO: 221463 - RNA, 1401 nt, Artificial Sequence
  derived and/or modified CDS sequence (opt5) from neuraminidase__InfluenzaB__AGX19187
augcugcccagcaccauccagacacucacgcuguuccuuaccuccggcggggugcugcucucucuguacgucagcgccucccuuucuuaucugcucuacagcgacauucugcugaaguuuuccccuacagagaucaccgcuccgacaaugccccucgauugcgccaacgcgucuaauguucaagcugugaacagaagcgccaccaaaggagugacacugcuucugccugaacccgaguggaccuauccucggcucuccuguagcggcucuacguuccagaaggcccugcuuauuagcccccaccgcuuuggggaaaccaaaggaaauuccgcuccucugaucauuagagagccguucaucgccugcggccccaacgaauguaagcauuuugcucucacacacuacgccgcgcagccugggggauauuacaauggcacccggggcgaccgcaacaaacugagacaucugaucucugucaagcucgggaagauucccacaguggaaaauuccaucuuccacauggccgcuuggagcggaucugccugccaugauggcaaagaguggaccuauauugggguugacggaccugauaacaaugcucugcuuaagaucaaauacggcgaggccuacacggacacauaucacuccuacgcgaacaagauucugcggacccaggagagcgccuguaauugcaucgggggaaacuguuaucucaugauuacagauggcuccgcuucuggcgugagcgaaugccgcuuucugaaaaucagagaggggcggaucauuaaggagaucuuccccaccggacgcgucaagcacaccgaagaguguacaugcggcuuugccuccaauaaaacgauugaaugugcuugcagagacaacagcuacaccgccaagcggccguucgugaaacuuaauguugagacagauaccgccgaaauccgccugaugugcacagacaccuaucucgauacgccuagacccgacgaugggucuauuacaggaccuugugaguccaacggcgacaaggggagcggaggcaucaaaggcggguuugugcaucaacggauggcuucuaagaucggacgcugguacagcagaaccauguccaaaaccgagcggaugggcauggggcuguaugucaaguacgacggagaucccugggcggacucugaugcccuggcuuucagcggcgugaugguguccaugaaggaacccgggugguacagcuuuggcuucgagauuaaagacaagaaaugcgaugucccuuguaucggaauugaaaugguucacgacggcgggaaggagacauggcauucugccgccaccgcuaucuauugccucaugggauccggccagcugcuuugggauacagugacggggguggacauggcccuguga

SEQ ID NO: 221464 - RNA, 1401 nt, Artificial Sequence
  derived and/or modified CDS sequence (opt5) from neuraminidase__InfluenzaB__AGX19198
augcugcccagcaccauccagacacucacgcuguuccuuaccuccggcggggugcugcucucucuguacgucagcgccucccuuucuuaucugcucuacagcgacauucugcugaaguuuuccccuacagagaucaccgcuccgacaaugccccucgauuaugccaacgcgucuaauguucaagcugugaacagaagcgccaccaaaggagugacacugcuucugccugaacccgaguggaccuacccucggcucuccugccccggcagcacguuccagaaggcccugcuuauuucuccucaccgcuuuggggaaaccaaaggaaauuccgcuccgcugaucauuagagagcccuucaucgccuguggcccuaacgaaugcaagcauuuugcucucacacacuaugccgcgcagcccgggggauacuauaauggcacccggggcgaccgcaacaaacugagacaucugaucagcgucaagcucgggaagauuccuacaguggaaaauucuaucuuccacauggccgcuugguccggaagcgccugucaugauggcaaagaguggaccuacauugggguugacggacccgauaacaaugcucugcuuaagaucaaauacggcgaggccuauacggacacauaccacucuuaugcgaacaagauucugcggacccaggaguccgccugcaauuguaucgggggaaacugcuaccucaugauuacagauggcagcgcuuccggcgugucugaaugucgcuuucugaaaaucagagaggggcggaucauuaaggagaucuucccgaccggacgcgucaagcacaccgaagagugcacauguggcuuugccagcaauaaaacgauugaaugcgcuuguagagacaacuccuauaccgccaagcggccuuucgugaaacuuaauguugagacagauaccgccgaaauccgccugaugugcacagacaccuaccucgauacgcccagaccugacgaugggagcauuacaggacccugcgagucuaacggcgacaagggguccggaggcaucaaaggcggguuugugcaucaacggauggcuagcaagaucggacgcugguauucuagaaccaugagcaaaaccgagcggaugggcauggggcuguacgucaaguacgacggagaucccugggcggacuccgaugcccuggcuuucucuggcgugauggugagcaugaaggaaccugggugguauuccuuuggcuucgagauuaaagacaagaaaugugaugucccgugcaucggaauugaaaugguucacgacggcgggaaggagacauggcauagcgccgccaccgcuaucuacugucucaugggaucuggccagcugcuuugggauacagugacggggguggacauggcccuguga

SEQ ID NO: 221465 - RNA, 1401 nt, Artificial Sequence; identical to SEQ ID NO: 221445
  derived and/or modified CDS sequence (opt5) from neuraminidase__InfluenzaB__AGX19209

SEQ ID NO: 221466 - RNA, 1401 nt, Artificial Sequence
  derived and/or modified CDS sequence (opt5) from neuraminidase__InfluenzaB__AGX19220
augcugcccagcaccauccagacacucacgcuguuccuuaccuccggcggggugcugcucucucuguacgucagcgccucccuuucuuaucugcucuacagcgacauucugcugaaguuuuccccuacagagaucaccgcuccgacaaugucucucgauugcgccaacgcgagcaauguucaagcugugaacagauccgccaccaaaggagugacacugcuucugcccgaaccugaguggaccuauccccggcucagcuguccuggcucuacguuccagaaggcccugcuuauuagcccccaccgcuuuggggaaaccaaaggaaauuccgcuccucugaucauuagagagccguucaucgccugcggccccaacgaauguaagcauuuugcucucacacacuacgccgcgcagccugggggauauuacaauggcacccggggcgaccgcaacaaacugagacaucugaucucugucaagcucgggaagauucccacaguggaaaauuccaucuuccacauggccgcuuggagcggaucugccugccaugauggcaaagaguggaccuauauugggguugacggaccugauaacaaugcucugcuuaagaucaaauacggcgaggccuacacggacacauaucacuccuacgcgaacaagauucugcggacccaggagagcgccuguaauugcaucgggggaaacuguuaucucaugauuacagauggcuccgcuucuggcgugagcgaaugccgcuuucugaaaaucagagaggggcggaucauuaaggagaucuuccccaccggacgcgucaagcacaccgaagaguguacaugcggcuuugccuccaauaaaacgauugaaugugcuugcagagacaacagcuacaccgccaagcggccguucgugaaacuuaauguugagacagauaccgccgaaauccgccugaugugcacagacaccuaucucgauacgccuagacccgacgaugggucuauuacaggaccuugugaguccaacggcgaccgggggagcggaggcaucaagggcggguuugugcaucaacgcauggcuucuaaaaucggaagaugguacagccggaccauguccaagaccgagagaaugggcauggggcuguaugucaaauacgacggagaucccugggcggacucugaugcccuggcuuucagcggcgugaugguguccaugaaggaacccgggugguacagcuuuggcuucgagauuaaggacaaaaagugcgaugucccuuguaucggaauugaaaugguucacgacggcgggaaagagacauggcauucugccgccaccgcuaucuauugccucaugggauccggccagcugcuuugggauacagugacggggguggacauggcccuguga

SEQ ID NO: 221467 - RNA, 1401 nt, Artificial Sequence; identical to SEQ ID NO: 220913
  derived and/or modified CDS sequence (opt5) from neuraminidase__InfluenzaB__AGX19231

SEQ ID NO: 221468 - RNA, 1401 nt, Artificial Sequence
  derived and/or modified CDS sequence (opt5) from neuraminidase__InfluenzaB__AGX19253
augcugcccagcaccauccagacacucacgcuguuccuuaccuccggcggggugcugcucucucuguacgucagcgccucccuuucuuaucugcucuacagcgacauucugcugaaguuuuccccuacagagaucaccgcuccgacaaugccccucgauugcgccaacgcgucuaauguucaagcugugaaccacagcgccaccaaaggagugacacugcuucugccugaacccgaguggaccuauccuagacucuccugucccggcagcacguuccagaaggcccugcuuauuucuccucaucgguuuggggaaaccaaaggaaauuccgcuccgcugaucauucgcgagcccuucaucgccugcggcccuaacgaauguaagcacuuugcucucacacauuacgccgcgcagcccgggggauauuacaauggcaccagaggcgaccggaacaaacugcgccaccugaucagcgucaagcucgggaagauuccuacaguggaaaauucuaucuuccauauggccgcuugguccggaagcgccugccacgauggcaaagaguggaccuauauugggguugacggacccgauaacaaugcucugcuuaagaucaaauacggcgaggccuacacggacacauaucacucuuacgcgaacaagauucugagaacccaggaguccgccuguaauugcaucgggggaaacuguuaucucaugauuacagauggcagcgcuuccggcgugucugaaugccgguuucugaaaauccgcgaggggagaaucauuaaggagaucuucccgaccggacgggucaagcauaccgaagaguguacaugcggcuuugccagcaauaaaacgauugaaugugcuugccgcgacaacuccuacaccgccaagagaccuuucgugaaacuuaauguugagacagauaccgccgaaauccggcugaugugcacagacaccuaucucgauacgccccgcccugacgaugggagcauuacaggacccugugagucuaacggcgacaagggguccggaggcaucaaaggcggguuugugcaccaaagaauggcuagcaagaucggacggugguacucucgcaccaugagcaaaaccgagagaaugggcauggggcuguaugucaaguacgacggagaucccugggcggacuccgauucucuggccuucagcggcgugaugguguccaugaaggaaccugggugguacagcuuuggcuucgagauuaaagacaagaaaugcgaugucccguguaucggaauugaaaugguucaugacggcgggaaggagacauggcacucugcugccaccgccaucuauugccucaugggauccggccagcugcuuugggauacagugacggggguggacauggcucuguga

SEQ ID NO: 221469 - RNA, 1401 nt, Artificial Sequence; identical to SEQ ID NO: 221443
  derived and/or modified CDS sequence (opt5) from neuraminidase__InfluenzaB__AGX19264

SEQ ID NO: 221470 - RNA, 1401 nt, Artificial Sequence; identical to SEQ ID NO: 220707
  derived and/or modified CDS sequence (opt5) from neuraminidase__InfluenzaB__AGX19275

SEQ ID NO: 221471 - RNA, 1401 nt, Artificial Sequence
  derived and/or modified CDS sequence (opt5) from neuraminidase__InfluenzaB__AGX19286
augauccccagcaccauucagacacugacccucuuccugacguccggcggggugcuucugucucucuacgucagcgccucccugucuuaucuucuguacagcgacauccuccugaaguuuuccccuacagagauuaucgcuccgaccaugccccuggauugcgccaacgcgucuaauguucacgcugugaacagaagcgccacaaaaggagugacccuccugcuuccugaacccgaguggacauauccucggcuguccugucccggcagcaccuuccaaaaggcccuccugauuucuccucaucgcuuuggggaaacgaaaggaaauuccgcuccgcuuaucaucagagagcccuucauugccugcggcccuaacgaauguaagcacuuugcucugacccauuacgccgcgcagcccgggggauauuacaauggcacacggggcgaccgcaacaaacucagacaccugaucagcgucaagcuggggaagauuccuaccguggaaaauucuaucuuccauauggccgcuugguccggaagcgccugccacgauggcaaagaguggacauauauugggguugacggacccgauaacaaugcucuccugaagaucaaauacggcgaggccuacaccgacacguaucacucuuacgcgaacaauauucuucggacacaggaguccgccuguaacugcaucgggggaaauuguuaucugaugaucaccgauggcagcgcuuccggcgugucugaaugccgcuuucucaagauuagagaggggcggaucauuaaagagaucuucccgacaggacgcgucaagcauaccgaagaguguaccugcggcuuugccagcaacaagacaauugaaugugcuugcagagacaauuccuacacggccaaacggccuuucgugaagcugaacguugagaccgauacagccgaaauccgccuuaugugcaccgacacauaucuggauacccccagaccugacgaugggagcaucacgggacccugugagucuaacggcgacaaaggguccggaggcauuaagggcggguuugugcaccagcggauggcuagcaaaaucggacgcugguacucuagaacaaugagcaagaccgagcggaugggcauggggcucuaugucaaauacgacggagaucccugggcggacuccgaugcccuggcuuucucuggcgugauggugagcaugaaggaaccugggugguacuccuuuggcuucgagauuaaggacaaaaagugcgaugucccguguaucggaauugaaaugguucaugacggcgggaaagagaccuggcacagcgccgccacagcuaucuauugccugaugggaucuggccaacuccugugggauaccgugacagggguggacauggcccuuuga

SEQ ID NO: 221472 - RNA, 1401 nt, Artificial Sequence
  derived and/or modified CDS sequence (opt5) from neuraminidase__InfluenzaB__AGX19297
augcugcccagcaccauccagacacucacgcuguuccuuaccuccggcggggugcugcucucucuguacgucagcgccucccuuucuuaucugcucuacagcgacauucugcugaaguuuuccccuacagagaucauugcuccgaccaugccccucgauugcgccaacgcgucuaauguucacgcugugaacagaagcgccacaaaaggagugacccugcuucugccugaacccgaguggacauauccucggcucuccugucccggcagcaccuuccaaaaggcccugcuuaucucuccucaucgcuuuggggaaacgaaaggaaauuccgcuccgcugauuaucagagagcccuucaucgccugcggcccuaacgaauguaagcacuuugcucucacccauuacgccgcgcagcccgggggauauuacaauggcacacggggcgaccgcaacaaacugagacaccugauuagcgucaagcucgggaagaucccuaccguggaaaauucuauuuuccauauggccgcuugguccggaagcgccugccacgauggcaaagaguggacauauaucgggguugacggacccgauaacaaugcucugcuuaagauuaaauacggcgaggccuacaccgacacguaucacucuuacgcgaacaauauccugcggacacaggaguccgccuguaacugcauugggggaaauuguuaucucaugaucaccgauggcagcgcuuccggcgugucugaaugccgcuuucugaagaucagagaggggcggauuaucaaagagauuuucccgacaggacgcgucaagcauaccgaagaguguaccugcggcuuugccagcaacaagacaaucgaaugugcuugcagagacaauuccuacacggccaaacggccuuucgugaaacuuaacguugagaccgauacagccgaaauucgccugaugugcaccgacacauaucucgauacccccagaccugacgaugggagcaucacgggacccugugagucuaacggcgacaagggguccggaggcaucaagggcggguuugugcaccagcggauggcuagcaaaauuggacgcugguacucuagaacaaugagcaagaccgagcggaugggcauggggcuguaugucaaauacgacggagaucccugggcggacuccgaugcccuggcuuucucuggcgugauggugagcaugaaggaaccugggugguacuccuuuggcuucgagaucaaggacaaaaagugcgaugucccguguauuggaaucgaaaugguucaugacggcgggaaagagaccuggcacagcgccgccacagcuauuuauugccucaugggaucuggccaacugcuuugggauaccgugacagggguggacauggcccuguga

SEQ ID NO: 221473 - RNA, 1401 nt, Artificial Sequence; identical to SEQ ID NO: 221472
  derived and/or modified CDS sequence (opt5) from neuraminidase__InfluenzaB__AGX19308

SEQ ID NO: 221474 - RNA, 1401 nt, Artificial Sequence; identical to SEQ ID NO: 221472
  derived and/or modified CDS sequence (opt5) from neuraminidase__InfluenzaB__AGX19319

SEQ ID NO: 221475 - RNA, 1401 nt, Artificial Sequence
  derived and/or modified CDS sequence (opt5) from neuraminidase__InfluenzaB__AGX19330
augcugcccagcaccauccagacacucacgcuguuccuuaccuccggcggggugcugcucucucuguacgucagcgccucccuuucuuaucugcucuacagcgacauucugcugaaguuuuccccuacagagaucauugcuccgaccaugccccucgauugcgccaacgcgucuaauguucacgcugugaacagaagcgccacaaaaggagugacccugcuucugccugaacccgaguggacauauccucggcucuccugucccggcagcaccuuccaaaaggcccugcuuaucucuccucaucgcuuuggggaaacgaaaggaaauuccgcuccgcugauuaucagagagcccuucaucgccugcggcccuaacgaauguaagcacuuugcucucacccauuacgccgcgcagcccgggggauauuacaauggcacacggggcaaccgcaauaaacugagacaccugauuagcgucaagcucgggaagaucccuaccguggagaacucuauuuuccauauggccgcuugguccggaagcgccugccacgacggcaaagaguggacauauaucgggguugauggacccgacaauaacgcucugcuuaagauuaaauacggcgaagccuacaccgauacguaucacucuuacgcgaauaacauccugcggacacaggaguccgccuguaauugcauugggggaaacuguuaucucaugaucaccgacggcagcgcuuccggcgugucugaaugccgcuuucugaagaucagagaggggcggauuaucaaagagauuuucccgacaggacgcgucaagcauaccgaagaguguaccugcggcuuugccagcaauaagacaaucgaaugugcuugcagagauaacuccuacacggccaaacggccuuucgugaaacuuaacguugagaccgacacagccgaaauucgccugaugugcaccgauacauaucucgacacccccagaccugaugacgggagcaucacgggacccugugagucuaauggcgauaagggguccggaggcaucaagggcggguuugugcaccagcggauggcuagcaaaauuggacgcugguacucuagaacaaugagcaagaccgagcggaugggcauggggcuguaugucaaauacgacggagaccccugggcggauuccgacgcccuggcuuucucuggcgugauggugagcaugaaggaaccugggugguacuccuuuggcuucgagaucaaggauaaaaagugcgacgucccguguauuggaaucgaaaugguucaugauggcgggaaagagaccuggcacagcgccgccacagcuauuuauugccucaugggaucuggccaacugcuuugggacaccgugacagggguggauauggcccuguga

SEQ ID NO: 221476 - RNA, 1401 nt, Artificial Sequence; identical to SEQ ID NO: 221472
  derived and/or modified CDS sequence (opt5) from neuraminidase__InfluenzaB__AGX19341

SEQ ID NO: 221477 - RNA, 1401 nt, Artificial Sequence; identical to SEQ ID NO: 221472
  derived and/or modified CDS sequence (opt5) from neuraminidase__InfluenzaB__AGX19352

SEQ ID NO: 221478 - RNA, 1401 nt, Artificial Sequence
  derived and/or modified CDS sequence (opt5) from neuraminidase__InfluenzaB__AGX19363
augcugcccagcaccauccagacacucacgcuguuccuuaccuccggcggggugcugcucucucuguacgucagcgccucccuuucuuaucugcucuacagcgacauucugcugaaguuuuccccuacagagaucauugcuccgaccaugccccucgauugcgccaacgcgucuaauguucacgcugugaacagaagcgccacaaaaggagugacccugcuucugccugaacccgaguggacauauccucggcucuccugucccggcagcaccuuccaaaaggcccugcuuaucucuccucaucgcuuuggggaaacgaaaggaaauuccgcuccgcugauuaucagagagcccuucaucgccugcggcccuaacgaauguaagcacuuugcucucaccuacuaugccgcgcagcccgggggauacuauaauggcacacggggcgaccgcaacaaacugagacaucugauuagcgucaagcucgggaagaucccuaccguggaaaauucuauuuuccacauggccgcuugguccggaagcgccugccaugauggcaaagaguggacauacaucgggguugacggacccgauaacaaugcucugcuuaagauuaaauacggcgaggccuauaccgacacguaccacucuuaugcgaacaauauccugcggacacaggaguccgccuguaacugcauugggggaaauuguuaccucaugaucaccgauggcagcgcuuccggcgugucugaaugccgcuuucugaagaucagagaggggcggauuaucaaagagauuuucccgacaggacgcgucaagcacaccgaagaguguaccugcggcuuugccagcaacaagacaaucgaaugugcuugcagagacaauuccuauacggccaaacggccuuucgugaaacuuaacguugagaccgauacagccgaaauucgccugaugugcaccgacacauaccucgauacccccagaccugacgaugggagcaucacgggacccugugagucuaacggcgacaagggguccggaggcaucaagggcggguuugugcaucagcggauggcuagcaaaauuggacgcugguauucuagaacaaugagcaagaccgagcggaugggcauggggcuguacgucaaauacgacggagaucccugggcggacuccgaugcccuggcuuucucuggcgugauggugagcaugaaggaaccugggugguauuccuuuggcuucgagaucaaggacaaaaagugcgaugucccguguauuggaaucgaaaugguucacgacggcgggaaagagaccuggcauagcgccgccacagcuauuuacugccucaugggaucuggccaacugcuuugggauaccgugacagggguggacauggcccuguga

SEQ ID NO: 221479 - RNA, 1401 nt, Artificial Sequence
  derived and/or modified CDS sequence (opt5) from neuraminidase__InfluenzaB__AGX19374
augcugcccagcaccauccagacacucacgcuguuccuuaccuccggcggggugcugcucucucuguacgucagcgccucccuuucuuaucugcucuacagcgacauucugcugaaguuuucccaaacagagaucaccgcuccuauuaugccgcucgauugcgccaacgcgucuaauguucaggcugugaacagaagcgccgccaaaggagugacacugcuucuguccgaacccgaguggaccuauccucggcucagcugucccggcucuacauuccagaaggcucugcuuaucuccccucaccgcuuuggggaaaccaaaggaaauagcgcuccccugauuaucagagagccuuucaucgccugcggcccgacggaauguaagcauuuugcccucacccacuacgcggcccagcccgggggauauuacaacggcacacgggaggaccgcaauaaacugagacaucugauuucugucaagcucggcaagaucccuaccguggagaacuccauuuuccacauggcugccuggagcgggucugcuugccaugauggaaaagaauggacauauaucggcguugacgggcccgauuccaaugcccugcuuaagauuaaauacggagaggcguacaccgacacguaucacagcuacgccaagaacauccugcggacacaagaauccgcuuguaauugcauuggcggggauuguuaucucaugaucaccgacggaccugccucuggcgugagcgagugccgcuuucugaaaaucagagagggccggauuaucaaggaaauuuuccccacagggcgcgucaagcacaccgaggaauguaccugcggauuugcuuccaacaaaacaaucgagugugccugcagagauaauagcuacacggccaagcggccguucgugaaacuuaacguugaaaccgacacagcugagauucgccugaugugcaccgagacauaucucgauaccccuagacccaaugacggcucuaucacggggccuugugaauccgauggagacaagggcagcgggggaaucaaaggcggcuuugugcaucagcggauggcgucuaagauugggcgcugguacagcagaacaauguccaaaaccaagcggaugggaaugggccuguaugucaaguacgacggggaucccuggaccgacucugaggcccuggcucucagcggagugaugguguccauggaggaacccggcugguacagcuucggguuugaaaucaaagauaagaaaugcgacgucccuuguauuggcaucgagaugguucacgauggaggcaagacaaccuggcauucugccgccacagcuauuuauugccugaugggguccggacagcuucugugggacacggugaccggcguggauauggcccucuga

SEQ ID NO: 221480 - RNA, 1401 nt, Artificial Sequence; identical to SEQ ID NO: 221472
  derived and/or modified CDS sequence (opt5) from neuraminidase__InfluenzaB__AGX19385

SEQ ID NO: 221481 - RNA, 1401 nt, Artificial Sequence
  derived and/or modified CDS sequence (opt5) from neuraminidase__InfluenzaB__AGX19396
augcugcccagcaccauccagacacucacgcuguuccuuaccuccggcggggugcugcucucucuguacgucagcgccucccuuucuuaucugcucuacagcgacauucugcugaaguuuuccccuacagagaucauugcuccgaccaugccccucgauugcgccaacgcgucuaauguucacgcugugaacagaagcgccacaaaaggagugacccugcuucugccugaacccgaguggacauauccucggcucuccugucccggcagcaccuuccaaaaggcccugcuuaucucuccucaucgcuuuggggaaacgaaaggaaauuccgcuccgcugauuaucagagagcccuucaucgccugcggcccuaacgaauguaagcacuuugcucucacccauuacgccgcgcagcccgggggauauuacaauggcccucggggcgaccgcaacaaacugagacaccugauuagcgucaagcucgggaagauccccacaguggaaaauucuauuuuccauauggccgcuugguccggaagcgccugccacgauggcaaagaguggaccuauaucgggguugacggaccggauaacaaugcucugcuuaagauuaaauacggcgaggccuacacagacaccuaucacucuuacgcgaacaauauccugcggacgcaggaguccgccuguaacugcauugggggaaauuguuaucucaugaucacagauggcagcgcuuccggcgugucugaaugccgcuuucugaagaucagagaggggcggauuaucaaagagauuuucccuaccggacgcgucaagcauacagaagaguguaccugcggcuuugccagcaacaagaccaucgaaugugcuugcagagacaauuccuacacagccaaacggcccuucgugaaacuuaacguugagacggauaccgccgaaauucgccugaugugcacagacaccuaucucgauacaccuagacccgacgaugggagcaucaccggacccugugagucuaacggcgacaagggguccggaggcaucaagggcggguuugugcaccagcggauggcuagcaaaauuggacgcugguacucuagaacgaugagcaagacagagcggaugggcauggggcuguaugucaaauacgacggagauccuugggcggacuccgaugcccuggcuuucucuggcgugauggugagcaugaaggaaccggggugguacuccuuuggcuucgagaucaaggacaaaaagugcgauguccccuguauuggaaucgaaaugguucaugacggcgggaaagagaccuggcacagcgccgccaccgcuauuuauugccucaugggaucuggccaacugcuuugggauacagugaccgggguggacauggcccuguga

SEQ ID NO: 221482 - RNA, 1401 nt, Artificial Sequence; identical to SEQ ID NO: 221472
  derived and/or modified CDS sequence (opt5) from neuraminidase__InfluenzaB__AGX19407

SEQ ID NO: 221483 - RNA, 1401 nt, Artificial Sequence; identical to SEQ ID NO: 221033
  derived and/or modified CDS sequence (opt5) from neuraminidase__InfluenzaB__AGX19418

SEQ ID NO: 221484 - RNA, 1401 nt, Artificial Sequence
  derived and/or modified CDS sequence (opt5) from neuraminidase__InfluenzaB__AGX19429
augcugcccagcaccauccagacacucacgcuguuccuuaccuccggcggggugcugcucucucuguacgucagcgccucccuuucuuaucugcucuacagcgacauucugcugaaguuuucccaaacagagaucaccgcuccuauuaugccgcucgauugcgccaacgcgucuaauguucaggcugugaacagaagcgccgccaaaggagugacacugcuucugcccgaaccugaguggaccuauccccggcucuccuguccuggcagcacauuccagaaggcucugcuuaucucuccccaccgcuuuggggaaaccaaaggaaauuccgccccucugauuaucagagagccguucaucgcuugcggccccacggaauguaagcauuuugcccucacccacuacgcggcccagccugggggauauuacaacggcacacgggaggaccgcaauaaacugagacaucugauuagcgucaagcucggcaagauccccaccguggagaacucuauuuuccacauggcugccugguccgggagcgcuugccaugauggaaaagaauggacauauaucggcguugacgggccugauucuaaugcccugcuuaagauuaaauacggagaggcguacaccgacacguaucacuccuacgccaagaacauccugcggacacaagaaagcgcuuguaauugcauuggcggggauuguuaucucaugaucaccgacggacccgccuccggcaucucugagugccgcuuucugaaaauuagagagggccggaucauuaaggaaaucuucccgacagggcgcgugaagcacaccgaggaauguaccugcggauuugcuagcaacaaaacaauugagugugccugcagagauaauuccuacacggccaagcggccuuucgucaaacuuaacguggaaaccgacacagcugagauccgccugaugugcaccgagacauaucucgauacccccagaccuaaugacggcagcaucacggggcccugugaaucugauggagacaagggcuccgggggaauuaaaggcggcuuuguucaucagcggauggcgagcaagaucgggcgcugguacucuagaacaaugagcaaaacccggagaaugggaaugggccuguaugugaaguacgacggggaucccuggaccgacuccgaggcccuggcucucucuggagucauggugagcauggaggaaccuggcugguacuccuucggguuugaaauuaaggauaaaaagugcgacgugccguguaucggcauugagaugguccacgauggaggcaaaacaaccuggcauagcgccgccacagcuaucuauugccugauggggucuggacagcuucugugggacacgguuaccggcguggauauggcccucuga

SEQ ID NO: 221485 - RNA, 1401 nt, Artificial Sequence
  derived and/or modified CDS sequence (opt5) from neuraminidase__InfluenzaB__AGX19451
augcugcccagcaccauccagacacucacgcuguuccuuaccuccggcggggugcugcucucucuguacgucagcgccucccuuucuuaucugcucuacagcgacauucugcugaaguuuuccccuacagagaucaccgcuccgacaaugccccucgauugcgccaacgcgucuaauguucacgcugugaaccauagcgccaccaaaggagugacacugcuucugccugaacccgaguggaccuauccuagacucuccugucccggcagcacguuccaaaaggcccugcuuauuucuccucaccgguuuggggaaaccaaaggaaauuccgcuccgcugaucauucgcgagcccuucaucgccugcggcccuaacgaauguaagcauuuugcucucacacacuacgccgcgcagcccgggggauauuacaauggcaccagaggcgaccggaacaaacugcgccaucugaucagcgucaagcucgggaagauuccuacaguggaaaauucuaucuuccacauggccgcuugguccggaagcgccugccacgauggcaaagaguggaccuauauugggguugacggacccgauaacaaugcucugcuuaagaucaaauacggcgaggccuacacggacacauaucauucuuacgcgaacaauauucugagaacccaggaguccgccuguaacugcaucgggggaaauuguuaucucauggugacagauggcagcgcuuccggcgucucugaaugccgguuucugaagauucgcgaggggagaaucaucaaagagauuuucccgaccggacgggugaagcacaccgaagaguguacaugcggcuuugccagcaacaagacgaucgaaugugcuugccgcgacaauuccuacaccgccaaaagaccuuucguuaaacuuaacguggagacagauaccgccgaaauucggcugaugugcacagacaccuaucucgauacgccccgcccugacgaugggagcaucacaggacccugugagucuaacggcgacaagggguccggaggcauuaagggcggguuuguccaucagagaauggcuagcaaaaucggacggugguacucucgcaccaugagcaagaccgagagaaugggcauggggcuguaugugaaauacgacggagaucccugggcggacuccgaugcccuggcuuucucuggcgugauggucagcaugaaggaaccugggugguacuccuuuggcuucgagaucaaggacaaaaagugcgauguuccguguauuggaaucgaaauggugcacgacggcgggaaagagacauggcacagcgccgccaccgcuauuuauugccucaugggaucuggccaacugcuuugggauacagugacgggggucgacauggcccuguga

SEQ ID NO: 221486 - RNA, 1401 nt, Artificial Sequence; identical to SEQ ID NO: 221484
  derived and/or modified CDS sequence (opt5) from neuraminidase__InfluenzaB__AGX19462

SEQ ID NO: 221487 - RNA, 1401 nt, Artificial Sequence; identical to SEQ ID NO: 221484
  derived and/or modified CDS sequence (opt5) from neuraminidase__InfluenzaB__AGX19473

SEQ ID NO: 221488 - RNA, 1401 nt, Artificial Sequence; identical to SEQ ID NO: 221033
  derived and/or modified CDS sequence (opt5) from neuraminidase__InfluenzaB__AGX19484

SEQ ID NO: 221489 - RNA, 1401 nt, Artificial Sequence; identical to SEQ ID NO: 221485
  derived and/or modified CDS sequence (opt5) from neuraminidase__InfluenzaB__AGX19495

SEQ ID NO: 221490 - RNA, 1401 nt, Artificial Sequence; identical to SEQ ID NO: 221033
  derived and/or modified CDS sequence (opt5) from neuraminidase__InfluenzaB__AGX19506

SEQ ID NO: 221491 - RNA, 1401 nt, Artificial Sequence; identical to SEQ ID NO: 221033
  derived and/or modified CDS sequence (opt5) from neuraminidase__InfluenzaB__AGX19517

SEQ ID NO: 221492 - RNA, 1401 nt, Artificial Sequence; identical to SEQ ID NO: 221033
  derived and/or modified CDS sequence (opt5) from neuraminidase__InfluenzaB__AGX19528

SEQ ID NO: 221493 - RNA, 1401 nt, Artificial Sequence; identical to SEQ ID NO: 221485
  derived and/or modified CDS sequence (opt5) from neuraminidase__InfluenzaB__AGX19539

SEQ ID NO: 221494 - RNA, 1401 nt, Artificial Sequence
  derived and/or modified CDS sequence (opt5) from neuraminidase__InfluenzaB__AGX19550
augcugcccagcaccauccagacacucacgcuguuccuuaccuccggcggggugcugcucucucuguacgucagcgccucccuuucuuaucugcucuacagcgacauucugcugaaguuuuccccuacagagaucaccgcuccgacaaugccccucgauugcgccaacgcgucuaauguucacgcugugaaccauagcgccaccaaaggagugacacugcuucugccugaacccgaguggaccuauccuagacucuccugucccggcagcacguuccaaaaggcccugcuuauuucuccucaccgguuuggggaaaccaaaggaaauuccgcuccgcugaucauucgcgagcccuucaucgccugcggcccuaacgaauguaagcauuuugcucucacacacuacgccgcgcagcccgggggauauuacaauggcaccagaggcgaccggaacaaacugcgccaucugaucagcgucaagcucgggaagauuccuacaguggaaaauucuaucuuccacauggccgcuugguccggaagcgccugccacgauggcaaagaguggaccuauauugggguugacggacccgauaacaaugcucugcuuaagaucaaauacggcgaggccuacacggacacauaucauucuuacgcgaacaauauucugagaacccaggaguccgccuguaacugcaucgggggaaauuguuaucucauggugacagauggcagcgcuuccggcgucucugaaugccgguuucugaagauucgcgaggggagaaucaucaaagagauuuucccgaccggacgggugaagcacaccgaagaguguacaugcggcuuugccagcaacaagacgaucgaaugugcuugccgcgacaauuccuacaccgccaaaagaccuuucguuaaacuuaacguggagacagauaccgccgaaauucggcugaugugcacagacaccuaucucgauacgccccgcccugacgaugggagcaucacaggacccugugagucuaacggcgacaagggguccggaggcauuaagggcggguuuguccaucagagaauggcuagcaaaaucggacggugguacucucgcaccaugagcaagaccgagagaaugggcauggggcuguaugugaaauacgacggagaucccugggcggacuccgaugcccuggcuuucucuggcgugauggucagcaugaaugaaccugggugguacuccuuuggcuucgagaucaaggacaagaaaugcgauguuccguguauuggaaucgaaauggugcacgacggcgggaaggagacauggcacagcgccgccaccgcuauuuauugccucaugggaucuggccaacugcuuugggauacagugacgggggucgacauggcccuguga

SEQ ID NO: 221495 - RNA, 1401 nt, Artificial Sequence
  derived and/or modified CDS sequence (opt5) from neuraminidase__InfluenzaB__AGX19561
augcugcccagcaccauccagacacucacgcuguuccuuaccuccggcggggugcugcucucucuguacgucagcgccucccuuucuuaucugcucuacagcgacauucugcugaaguuuuccccuacagagaucaccgcuccgacaaugccccucgauugcgccaacgcgucuaauguucacgcugugaaccauagcgccaccaaaggagugacacugcuucugccugaacccgaguggaccuauccuagacucuccugucccggcagcacguuccaaaaggcccugcuuauuucuccucaccgguuuggggaaaccaaaggaaauuccgcuccgcugaucauucgcgagcccuucaucgccugcggcccuaacgaauguaagcauuuugcucucacacacuacgccgcgcagcccagaggguauuacaauggaacccggggcgaccgcaacaaacugagacaucugaucagcgucaagcucggcaagauuccuacaguggaaaauucuaucuuccacauggccgcuugguccgggagcgccugccacgauggaaaagaguggaccuauauuggcguugacgggcccgauaacaaugcucugcuuaagaucaaauacggagaggccuacacggacacauaucauucuuacgcgaacaauauucugcggacccaggaguccgccuguaacugcaucggcgggaauuguuaucucauggugacagauggaagcgcuuccggcgucucugaaugccgcuuucugaagauuagagagggccggaucaucaaagagauuuucccgaccgggcgcgugaagcacaccgaagaguguacaugcggauuugccagcaacaagacgaucgaaugugcuugcagagacaauuccuacaccgccaaacggccuuucguuaaacuuaacguggagacagauaccgccgaaauucgccugaugugcacagacaccuaucucgauacgcccagaccugacgauggcagcaucacagggcccugugagucuaacggagacaagggcuccgggggaauuaagggcggcuuuguccaucagcggauggcuagcaaaaucgggcgcugguacucuagaaccaugagcaagaccgagcggaugggaaugggccuguaugugaaauacgacggggaucccugggcggacuccgaugcccuggcuuucucuggagugauggucagcaugaaggaaccuggcugguacuccuuuggguucgagaucaaggacaaaaagugcgauguuccguguauuggcaucgaaauggugcacgacggaggcaaagagacauggcacagcgccgccaccgcuauuuauugccucauggggucuggacaacugcuuugggauacagugacgggcgucgacauggcccuguga

SEQ ID NO: 221496 - RNA, 1401 nt, Artificial Sequence
  derived and/or modified CDS sequence (opt5) from neuraminidase__InfluenzaB__AGX19572
augcugcccagcaccauccagacacucacgcuguuccuuaccuccggcggggugcugcucucucuguacgucagcgccucccuuucuuaucugcucuacagcgacauucugcugaaguuuuccccuacagagaucaccgcuccgacaaugccccucgauugcgccaacgcgucuaauguucaagcugugaacagaagcgccaccaaaggagugacacugcuucugccugaacccgaguggaccuauccucggcucuccugucccggcagcacguuccagaaggcccugcuuauuucuccucaccgcuuuggggaaaccaaaggaaauuccgcuccgcugaucauuagagagcccuucaucgccugcggcccuaacgaauguaagcauuuugcucucacacacuacgccgcgcagcccgggggauauuacaauggcacccggggcgaccgcaacaaacugagacaucugaucagcgucaagcucgggaagauuccuacaguggaaaauucuaucuuccacauggccgcuugguccggaagcgccugccaugauggcaaagaguggaccuauauugggguugacggacccgauaacaaugcucugcuuaaggugaaauacggcgaggccuacacggacacauaucacucuuacgcgaacaagauccugcggacccaggaguccgccuguaauugcauugggggaaacuguuaucucaugaucacagauggcagcgcuuccggcgucucugaaugccgcuuucugaaaauuagagaggggcggaucaucaaggagauuuucccgaccggacgcgugaagcacaccgaagaguguacaugcggcuuugccagcaauaaaacgaucgaaugugcuugcagagacaacuccuacaccgccaagcggccuuucguuaaacuuaauguggagacagauaccgccgaaauucgccugaugugcacagacaccuaucucgauacgcccagaccuaacgacgggagcaucacaggacccugugagucuaacggcgauaagggguccggaggcauuaaaggcggguuuguccaucaacggauggagagcaagaucggacgcugguacucuagaaccaugagcaaaaccgaacggaugggcauggggcuguaugugaaguacgacggagaccccugggcugauuccgacgcgcuggccuucucuggcgugauggucagcaugaaggagccugggugguacuccuuuggcuucgaaaucaaagauaagaaaugcgacguuccguguauuggaaucgagauggugcacgauggcgggaaggaaacauggcauagcgcugccaccgccauuuauugccucaugggaucuggccagcugcuuugggacacagugacgggggucaauauggcucuguga

SEQ ID NO: 221497 - RNA, 1401 nt, Artificial Sequence; identical to SEQ ID NO: 221033
  derived and/or modified CDS sequence (opt5) from neuraminidase__InfluenzaB__AGX19583

SEQ ID NO: 221498 - RNA, 1401 nt, Artificial Sequence; identical to SEQ ID NO: 221033
  derived and/or modified CDS sequence (opt5) from neuraminidase__InfluenzaB__AGX19594

SEQ ID NO: 221499 - RNA, 1401 nt, Artificial Sequence; identical to SEQ ID NO: 221033
  derived and/or modified CDS sequence (opt5) from neuraminidase__InfluenzaB__AGX19605

SEQ ID NO: 221500 - RNA, 1401 nt, Artificial Sequence; identical to SEQ ID NO: 221033
  derived and/or modified CDS sequence (opt5) from neuraminidase__InfluenzaB__AGX19616

SEQ ID NO: 221501 - RNA, 1401 nt, Artificial Sequence; identical to SEQ ID NO: 221485
  derived and/or modified CDS sequence (opt5) from neuraminidase__InfluenzaB__AGX19627

SEQ ID NO: 221502 - RNA, 1401 nt, Artificial Sequence; identical to SEQ ID NO: 221033
  derived and/or modified CDS sequence (opt5) from neuraminidase__InfluenzaB__AGX19638

SEQ ID NO: 221503 - RNA, 1401 nt, Artificial Sequence; identical to SEQ ID NO: 221485
  derived and/or modified CDS sequence (opt5) from neuraminidase__InfluenzaB__AGX19649

SEQ ID NO: 221504 - RNA, 1401 nt, Artificial Sequence; identical to SEQ ID NO: 221485
  derived and/or modified CDS sequence (opt5) from neuraminidase__InfluenzaB__AGX19660

SEQ ID NO: 221505 - RNA, 1401 nt, Artificial Sequence; identical to SEQ ID NO: 221033
  derived and/or modified CDS sequence (opt5) from neuraminidase__InfluenzaB__AGX19671

SEQ ID NO: 221506 - RNA, 1401 nt, Artificial Sequence; identical to SEQ ID NO: 221033
  derived and/or modified CDS sequence (opt5) from neuraminidase__InfluenzaB__AGX19682

SEQ ID NO: 221507 - RNA, 1401 nt, Artificial Sequence; identical to SEQ ID NO: 221485
  derived and/or modified CDS sequence (opt5) from neuraminidase__InfluenzaB__AGX19704

SEQ ID NO: 221508 - RNA, 1401 nt, Artificial Sequence
  derived and/or modified CDS sequence (opt5) from neuraminidase__InfluenzaB__AGX19715
augcugcccagcaccauccagacacucacgcuguuccuuaccuccggcggggugcugcucucucuguacgucagcgccucccuuucuuaucugcucuacagcgacauucugcugaaguuuuccccuacagagaucaccgcuccgacaaugccccucgauugcgccaacgcgucuaauguucacgcugugaacagaagcaccacaaaaggagugacccugcuucugccugaacccgaguggacguauccucggcucuccugucccggcagcaccuuccaaaaggcccugcuuauuucuccucaucgcuuuggggaaacaaaaggaaauuccgccccgcugaucauuagagagcccuucaucgcuugcggcccuaacgaauguaagcacuuugcccucacccauuacgcugcccagcccgggggauauuacaauggcacacggggcgaccgcaacaaacugagacaccugaucagcgucaagcucgggaagauuccuaccguggaaaauucuaucuuccauauggcggccugguccggaagcgcuugccacgauggcaaagaguggacguauauugggguugacggacccgauaacaaugcccugcuuaagaucaaauacggcgaggcuuacacagacaccuaucacucuuacgccaacaauauucugcggacacaggaguccgcguguaacugcaucgggggaaauuguuaucucaugauuaccgauggcagcgccuccggcgugucugaaugccgcuuucugaagaucagagaggggcggaucauuaaagagaucuucccgaccggacgcgucaagcauacagaagaguguacgugcggcuuugcuagcaacaagaccauugaaugugccugcagagacaauuccuacacagcuaaacggccuuucgugaaacuuaacguugagaccgauacagccgaaauccgccugaugugcaccgacacguaucucgauacacccagaccugacgaugggagcauuaccggacccugugagucuaacggcgacaagggguccggaggcaucaagggcggguuugugcaccagcggauggccagcaaaaucggacgcugguacucuagaaccaugagcaagacagagcggaugggcauggggcuguaugucaaauacgacggagaucccugggcugacuccgaugcgcuggccuucucuggcgugauggugagcaugaaggaaccugggugguacuccuuuggcuucgagauuaaggacaaaaagugcgaugucccguguaucggaauugaaaugguucaugacggcgggaaagagaccuggcacagcgcugccacagccaucuauugccucaugggaucuggccaacugcuuugggauacggugaccgggguggacauggcucuguga

SEQ ID NO: 221509 - RNA, 1401 nt, Artificial Sequence; identical to SEQ ID NO: 221033
  derived and/or modified CDS sequence (opt5) from neuraminidase__InfluenzaB__AGX19726

SEQ ID NO: 221510 - RNA, 1401 nt, Artificial Sequence; identical to SEQ ID NO: 221033
  derived and/or modified CDS sequence (opt5) from neuraminidase__InfluenzaB__AGX19737

SEQ ID NO: 221511 - RNA, 1401 nt, Artificial Sequence; identical to SEQ ID NO: 221033
  derived and/or modified CDS sequence (opt5) from neuraminidase__InfluenzaB__AGX19748

SEQ ID NO: 221512 - RNA, 1401 nt, Artificial Sequence; identical to SEQ ID NO: 221485
  derived and/or modified CDS sequence (opt5) from neuraminidase__InfluenzaB__AGX19759

SEQ ID NO: 221513 - RNA, 1401 nt, Artificial Sequence; identical to SEQ ID NO: 221033
  derived and/or modified CDS sequence (opt5) from neuraminidase__InfluenzaB__AGX19770

SEQ ID NO: 221514 - RNA, 1401 nt, Artificial Sequence; identical to SEQ ID NO: 221033
  derived and/or modified CDS sequence (opt5) from neuraminidase__InfluenzaB__AGX19781

SEQ ID NO: 221515 - RNA, 1401 nt, Artificial Sequence; identical to SEQ ID NO: 221033
  derived and/or modified CDS sequence (opt5) from neuraminidase__InfluenzaB__AGX19792

SEQ ID NO: 221516 - RNA, 1401 nt, Artificial Sequence; identical to SEQ ID NO: 221033
  derived and/or modified CDS sequence (opt5) from neuraminidase__InfluenzaB__AGX19803

SEQ ID NO: 221517 - RNA, 1401 nt, Artificial Sequence; identical to SEQ ID NO: 221033
  derived and/or modified CDS sequence (opt5) from neuraminidase__InfluenzaB__AGX19814

SEQ ID NO: 221518 - RNA, 1401 nt, Artificial Sequence
  derived and/or modified CDS sequence (opt5) from neuraminidase__InfluenzaB__AGX19825
augcugcccagcaccauccagacacucacgcuguuccuuaccuccggcggggugcugcucucucuguacgucagcgccucccuuucuuaucugcucuacagcgacauucugcugaaguuuuccccuacagagaucaccgcuccgacaaugccccucgauugcgccaacgcgucuaauguucacgcugugaaccauagcgccaccaaaggagugacacugcuucugccugaacccgaguggaccuauccuagacucuccugucccggcagcacguuccaaaaggcccugcuuauuucuccucaccgguuuggggaaaccaaaggaaauuccgcuccgcugaucauucgcgagcccuucaucgccugcggcccuaacgaauguaagcauuuugcucucacacacuacgccgcgcagcccgggggauauuacaauggcaccagaggcgaccggaacaaacugcgccaucugaucagcgucaagcucgggaagauuccuacaguggaaaauucuaucuuccacauggccgcuugguccggaagcgccugccacgauggcaaagaguggaccuauauugggguugacggacccgauaacaaugcucugcuuaagaucaaauacggcgaggccuacacggacacauaucauucuuacgcgaacaauauucugagaacccaggaguccgccuguaacugcaucgggggaaauuguuaucucauggugacagauggcagcgcuuccggcgucucugaaugccgguuucugaagauucgcgaggggagaaucaucaaagagauuuucccgaccggacgggugaagcacaccgaagaguguacaugcggcuuugccaacaauaagacgaucgaaugugcuugccgcgacaacagcuacaccgccaaaagaccuuucguuaaacuuaacguggagacagauaccgccgaaauucggcugaugugcacagacaccuaucucgauacgccccgcccugacgauggguccaucacaggacccugugagagcaauggcgacaaggggucuggaggcauuaagggcggguuuguccaucagagaauggcuuccaaaaucggacggugguacagccgcaccaugucuaagaccgagagaaugggcauggggcuguaugugaaauacgacggagaucccugggcggacagcgaugcccuggcuuucuccggcgugauggucucuaugaaggaaccugggugguacagcuuuggcuucgagaucaaggacaaaaagugcgauguuccguguauuggaaucgaaauggugcacgacggcgggaaagagacauggcacuccgccgccaccgcuauuuauugccucaugggaagcggccaacugcuuugggauacagugacgggggucgacauggcccuguga

SEQ ID NO: 221519 - RNA, 1401 nt, Artificial Sequence; identical to SEQ ID NO: 221033
  derived and/or modified CDS sequence (opt5) from neuraminidase__InfluenzaB__AGX19836

SEQ ID NO: 221520 - RNA, 1401 nt, Artificial Sequence; identical to SEQ ID NO: 221033
  derived and/or modified CDS sequence (opt5) from neuraminidase__InfluenzaB__AGX19847

SEQ ID NO: 221521 - RNA, 1401 nt, Artificial Sequence; identical to SEQ ID NO: 221033
  derived and/or modified CDS sequence (opt5) from neuraminidase__InfluenzaB__AGX19858

SEQ ID NO: 221522 - RNA, 1401 nt, Artificial Sequence; identical to SEQ ID NO: 221033
  derived and/or modified CDS sequence (opt5) from neuraminidase__InfluenzaB__AGX19869

SEQ ID NO: 221523 - RNA, 1401 nt, Artificial Sequence; identical to SEQ ID NO: 221033
  derived and/or modified CDS sequence (opt5) from neuraminidase__InfluenzaB__AGX19880

SEQ ID NO: 221524 - RNA, 1401 nt, Artificial Sequence; identical to SEQ ID NO: 221033
  derived and/or modified CDS sequence (opt5) from neuraminidase__InfluenzaB__AGX19891

SEQ ID NO: 221525 - RNA, 1401 nt, Artificial Sequence; identical to SEQ ID NO: 221033
  derived and/or modified CDS sequence (opt5) from neuraminidase__InfluenzaB__AGX19902

SEQ ID NO: 221526 - RNA, 1401 nt, Artificial Sequence
  derived and/or modified CDS sequence (opt5) from neuraminidase__InfluenzaB__AGX19913
augcugcccagcaccauccagacacucacgcuguuccuuaccuccggcggggugcugcucucucuguacgucagcgccucccuuucuuaucugcucuacagcgacauucugcugaaguuuuccccuacagagaucaccgcuccgacaaugccccucgauugcgccaacgcgucuaauguucacgcuaugaaccauagcgccaccaaaggagugacacugcuucugccugaacccgaguggaccuauccuagacucuccugucccggcagcacguuccaaaaggcccugcuuauuucuccucaccgguuuggggaaaccaaaggaaauuccgcuccgcugaucauucgcgagcccuucaucgccugcggcccuaacgaauguaagcauuuugcucucacacacuacgccgcgcagcccgggggauauuacaauggcaccagaggcgaccggaacaaacugcgccaucugaucagcgugaagcucgggaagauuccuacagucgaaaauucuaucuuccacauggccgcuugguccggaagcgccugccacgauggcaaagaguggaccuauauugggguggacggacccgauaacaaugcucugcuuaagaucaaauacggcgaggccuacacggacacauaucauucuuacgcgaacaauauucugagaacccaggaguccgccuguaacugcaucgggggaaauuguuaucucaugguuacagauggcagcgcuuccggcgugucugaaugccgguuucugaagauucgcgaggggagaaucaucaaagagauuuucccgaccggacgggucaagcacaccgaagaguguacaugcggcuuugccagcaacaagacgaucgaaugugcuugccgcgacaauuccuacaccgccaaaagaccuuucgugaaacuuaacguugagacagauaccgccgaaauucggcugaugugcacagacaccuaucucgauacgccccgcccugacgaugggagcaucacaggacccugugagucuaacggcgacaagggguccggaggcauuaagggcggguuugugcaucagagaauggcuagcaaaaucggacggugguacucucgcaccaugagcaagaccgagagaaugggcauggggcuguaugucaaauacgacggagaucccugggcggacuccgaugcccuggcuuucucuggcgugauggugagcaugaaggaaccugggugguacuccuuuggcuucgagaucaaggacaaaaagugcgaugucccguguauuggaaucgaaaugguucacgacggcgggaaagagacauggcacagcgccgccaccgcuauuuauugccucaugggaucuggccaacugcuuugggauacagugacggggguggacauggcccuguga

SEQ ID NO: 221527 - RNA, 1401 nt, Artificial Sequence; identical to SEQ ID NO: 221033
  derived and/or modified CDS sequence (opt5) from neuraminidase__InfluenzaB__AGX19924

SEQ ID NO: 221528 - RNA, 1401 nt, Artificial Sequence; identical to SEQ ID NO: 221033
  derived and/or modified CDS sequence (opt5) from neuraminidase__InfluenzaB__AGX19935

SEQ ID NO: 221529 - RNA, 1401 nt, Artificial Sequence; identical to SEQ ID NO: 221033
  derived and/or modified CDS sequence (opt5) from neuraminidase__InfluenzaB__AGX19946

SEQ ID NO: 221530 - RNA, 1401 nt, Artificial Sequence; identical to SEQ ID NO: 221033
  derived and/or modified CDS sequence (opt5) from neuraminidase__InfluenzaB__AGX19957

SEQ ID NO: 221531 - RNA, 1401 nt, Artificial Sequence
  derived and/or modified CDS sequence (opt5) from neuraminidase__InfluenzaB__AGX19968
augcugcccagcaccauccagacacucacgcuguuccuuaccuccggcggggugcugcucucucuguacgucagcgccucccuuucuuaucugcucuacagcgacauucugcugaaguuuuccccuacagagaucaccgcuccgacaaugccccucgauugcgccaacgcgucuaauguucaagcugugaacagaagcgccaccaaaggagugacacugcuucugccugaacccgaguggaccuauccucggcucuccugucccggcagcacguuccagaaggcccugcuuauuucuccucaccgcuuuggggaaaccaaaggaaauuccgcuccgcugaucauuagagagcccuucaucgccugcggcccuaacgaauguaagcauuuugcucucacacacuacgccgcgcagcccgggggauauuacaauggcacccggggcgaccgcaacaaacugagacaucugaucagcgucaagcucgggaagauuccuacaguggaaaauucuaucuuccacauggccgcuugguccggaagcgccugccaugauggcaaagaguggaccuauauugggguugacggacccgauaacgacgcucugcuuaaggugaaauacggcgaggccuacacggauacauaucacucuuacgcgaauaagauccugcggacccaggaguccgccuguaacugcauugggggaaauuguuaucucaugaucacagacggcagcgcuuccggcgucucugaaugccgcuuucugaaaauuagagaggggcggaucaucaaggagauuuucccgaccggacgcgugaagcacaccgaagaguguacaugcggcuuugccagcaacaaaacgaucgaaugugcuugcagagauaauuccuacaccgccaagcggccuuucguuaaacuuaacguggagacagacaccgccgaaauucgccugaugugcacagauaccuaucucgacacgcccagaccuaaugaugggagcaucacaggacccugugagucuaacggcgacaagggguccggaggcauuaaaggcggguuuguccaucaacggauggagagcaagaucggacgcugguacucuagaaccaugagcaaaaccgaacggaugggcauggggcuguaugugaaguacgacggagaucccugggcugacuccgaugcgcuggccuucucuggcgugauggucagcaugaaggagccugggugguacuccuuuggcuucgaaaucaaagacaagaaaugcgauguuccguguauuggaaucgagauggugcacgacggcgggaaggaaacauggcauagcgcugccaccgccauuuauugccucaugggaucuggccagcugcuuugggauacagugacgggggucaacauggcucuguga

SEQ ID NO: 221532 - RNA, 1401 nt, Artificial Sequence; identical to SEQ ID NO: 221485
  derived and/or modified CDS sequence (opt5) from neuraminidase__InfluenzaB__AGX19979

SEQ ID NO: 221533 - RNA, 1401 nt, Artificial Sequence; identical to SEQ ID NO: 221485
  derived and/or modified CDS sequence (opt5) from neuraminidase__InfluenzaB__AGX19990

SEQ ID NO: 221534 - RNA, 1401 nt, Artificial Sequence; identical to SEQ ID NO: 221033
  derived and/or modified CDS sequence (opt5) from neuraminidase__InfluenzaB__AGX20001

SEQ ID NO: 221535 - RNA, 1401 nt, Artificial Sequence; identical to SEQ ID NO: 221033
  derived and/or modified CDS sequence (opt5) from neuraminidase__InfluenzaB__AGX20012

SEQ ID NO: 221536 - RNA, 1401 nt, Artificial Sequence; identical to SEQ ID NO: 221033
  derived and/or modified CDS sequence (opt5) from neuraminidase__InfluenzaB__AGX20023

SEQ ID NO: 221537 - RNA, 1401 nt, Artificial Sequence; identical to SEQ ID NO: 221033
  derived and/or modified CDS sequence (opt5) from neuraminidase__InfluenzaB__AGX20034

SEQ ID NO: 221538 - RNA, 1401 nt, Artificial Sequence; identical to SEQ ID NO: 221033
  derived and/or modified CDS sequence (opt5) from neuraminidase__InfluenzaB__AGX20045

SEQ ID NO: 221539 - RNA, 1401 nt, Artificial Sequence
  derived and/or modified CDS sequence (opt5) from neuraminidase__InfluenzaB__AGX20056
augcugcccagcaccauccagacacucacgcuguuccuuaccuccggcggggugcugcucucucuguacgucagcgccucccuuucuuaucugcucuacagcgacauucugcugaaguuuuccccuacagagaucaccgcuccgacaaugccccucgauugcgccaacgcgucuaauguucaagcugugaacagaagcgccaccaaaggagugacacugcuucugccugaacccgaguggaccuauccucggcucuccugucccggcagcacguuccagaaggcccugcuuauuucuccucaccgcuuuggggaaaccaaaggaaauuccgcuccgcugaugaucagagagcccuucauugccugcggcccuaacgaauguaagcauuuugcucucacacacuacgccgcgcagcccgggggauauuacaauggcacccggggcgaccgcaacaaacugagacaucugaucagcgucaagcucgggaagaucccuacaguggaaaauucuauuuuccacauggccgcuugguccggaagcgccugccaugauggcaaagaguggaccuauaucgggguugacggacccgauaacaaugcucugcuuaaggugaaauacggcgaggccuacacggacacauaucacucuuacgcgaacaagauucugcggacccaggaguccgccuguaauugcaucgggggaaacuguuaucucauggucacagauggcagcgcuuccggcgugucugaaugccgcuuucugaaaauuagagaggggcggaucauuaaggagaucuucccgaccggacgcguuaagcacaccgaagaguguacaugcggcuuugccagcaauaaaacgaucgaaugugcuugcagagacaacuccuacaccgccaagcggccuuucgugaaacuuaaugucgagacagauaccgccgaaauucgccugaugugcacagacaccuaucucgauacgcccagaccuaacgacgggagcaucacaggacccugugagucuaacggcgauaagggguccggaggcauuaaaggcggguuugugcaucaacggauggagagcaagaucggacgcugguacucuagaaccaugagcaaaaccgaacggaugggcauggggcuguaugugaaguacgacggagaccccugggcugauuccgacgcgcuggccuucucuggcgucaugguuagcaugaaggagccugggugguacuccuuuggcuucgaaauuaaagauaagaaaugcgacgugccguguaucggaaucgagauggugcacgauggcgggaaggaaacauggcauagcgcugccaccgccauuuauugccucaugggaucuggccagcugcuuugggacacagucacggggguggauauggcucuguga

SEQ ID NO: 221540 - RNA, 1401 nt, Artificial Sequence
  derived and/or modified CDS sequence (opt5) from neuraminidase__InfluenzaB__AGX20067
augcugcccagcaccauccagacacucacgcuguuccuuaccuccggcggggugcugcucucucuguacgucagcgccucccuuucuuaucugcucuacagcgacauucugcugaaguuuuccccuacagagaucaccgcuccgacaaugccccucgauugcgccaacgcgucuaauguucaagcugugaacagaagcgccaccaaaggagugacacugcuucugccugaacccgaguggaccuauccucggcucuccugucccggcagcacguuccagaaggcccugcuuauuucuccucaccgcuuuggggaaaccaaaggaaauuccgcuccgcugaucauuagagagcccuucaucgccugcggcccuaacgaauguaagcauuuugcucucacacacuacgccgcgcagcccgggggauauuacaauggcacccggggcgaccgcaacaaacugagacaucugaucagcgucaagcucgggaagauuccuacaguggaaaauucuaucuuccacauggccgcuugguccggaagcgccugccaugauggcaaagaguggaccuauauugggguugacggacccgauaacaaugcucugcuuaaggugaaauacggcgaggccuacacggacacauaucacucuuacgcgaacaagauccugcggacccaggaguccgccuguaauugcauugggggaaacuguuaucucauggucacagauggcagcgcuuccggcgugucugaaugccgcuuucugaaaaucagagaggggcggauuaucaaggagaucuucccgaccggacgcguuaagcacaccgaagaguguacaugcggcuuugccagcaauaaaacgauugaaugugcuugcagagacaacuccuacaccgccaagcggccuuucgugaaacuuaaugucgagacagauaccgccgaaauccgccugaugugcacagacaccuaucucgauacgcccagaccuaacgacgggagcauuacaggacccugugagucuaacggcgauaagggguccggaggcaucaaaggcggguuugugcaucaacggauggagagcaagauuggacgcugguacucuagaaccaugagcaaaaccgaacggaugggcauggggcuguaugugaaguacgacggagaccccugggcugauuccgacgcgcuggccuucucuggcgucaugguuagcaugaaggagccugggugguacuccuuuggcuucgaaaucaaagauaagaaaugcgacgugccguguaucggaauugagauggugcacgauggcgggaaggaaacauggcauagcgcugccaccgccaucuauugccucaugggaucuggccagcugcuuugggacacagucacggggguggauauggcucuguga

SEQ ID NO: 221541 - RNA, 1401 nt, Artificial Sequence; identical to SEQ ID NO: 221033
  derived and/or modified CDS sequence (opt5) from neuraminidase__InfluenzaB__AGX20078

SEQ ID NO: 221542 - RNA, 1401 nt, Artificial Sequence; identical to SEQ ID NO: 221033
  derived and/or modified CDS sequence (opt5) from neuraminidase__InfluenzaB__AGX20089

SEQ ID NO: 221543 - RNA, 1401 nt, Artificial Sequence
  derived and/or modified CDS sequence (opt5) from neuraminidase__InfluenzaB__AGX20100
augcugcccagcaccauccagacacucacgcuguuccuuaccuccggcggggugcugcucucucuguacgucagcgccucccuuucuuaucugcucuacagcgacauucugcugaaguuuccuuccacagagaucaccgcuccgacaaugccccucgauugcgccaacgcgucuaauguucaagcugugaacagaagcgccaccaaaggagugacacugcuucugccugaacccgaguggaccuauccucggcucuccugucccggcagcacguuccagaaggcccugcuuauuucuccucaccgcuuuggggaaaccaaaggaaauuccgcuccgcugaucauuagagagcccuucaucgccugcggcccuaaggaauguaaacauuuugcucucacacacuacgccgcgcagcccgggggauauuacaacggcacccggggcgaccgcaauaagcugagacaucugaucagcgucaagcucgggaaaauuccuacaguggagaacucuaucuuccacauggccgcuugguccggaagcgccugccaugauggcaaggaguggaccuauauugggguugacggacccgauaauaacgcugugcugaaaaucaaguacggcgaagccuacacggacacauaucacucuuacgcgaauaacauucuucggacccaggaguccgccuguaauugcaucgggggaaacuguuaucugaugauuacagauggcagcgcuuccggcgucucugaaugccgcuuucucaaaaucagagaggggcggaucauuaaggagaucuucccgaccggacgcauucaacacaccgaagaguguacaugcggcuuugccagcaauaagacgaucgaaugugcuugcagagacaacuccuacaccgccaaacggccuuucgugaagcugaauguugagacagauaccgccgaaauucgccuuaugugcacaaaaaccuaucuggacacgcccagaccugaugacgggagcaucacaggacccugugagucuaacggcgggaagggauccggcggcaucaaagggggauuugugcaucagcggauggcuagcaagauuggccgcugguacucuagaaccaugagcaaaaccgagcggaaggggaugggacucuaugucaaguacgauggcgaccccugggcggacuccgaugcccuggcuuucucuggggugauggugagcauggaggaaccuggcugguacuccuuuggauucgaaaucaaagacaagaaaugcgaugucccguguauuggcaucgagaugguucacgacgggggaaaggaaacauggcauagcgccgccaccgcuauuuauugccugaugggcucugggcagcuccugugggauacagugacgggagugaacauggcccuuuga

SEQ ID NO: 221544 - RNA, 1401 nt, Artificial Sequence
  derived and/or modified CDS sequence (opt5) from neuraminidase__InfluenzaB__AGX20111
augcugcccagcaccauccagacacucacgcuguuccuuaccuccggcggggugcugcucucucuguacgucagcgccucccuuucuuaucugcucuacagcgacauucugcugaaguuuuccccuacagagaucaccgcuccgacaaugccccucgauugcgccaacgcgucuaauguucaagcugugaacagaagcgccaccaaaggagugacacugcuucugccugaacccgaguggaccuauccucggcucuccugucccggcagcacguuccagaaggcccugcuuauuucuccucaccgcuuuggggaaaccaaaggaaauuccgcuccgcugaucauuagagagcccuucaucgccugcggcccuaacgaauguaagcauuuugcucucacacacuacgccgcgcagcccgggggauauuacaauggcacccggggcgaccgcaacaaacugagacaucugaucagcgucaagcucgggaagauuccuacaguggaaaauucuaucuuccacauggccgcuugguccggaagcgccugccaugauggcaaagaguggaccuauauugggguugacggacccgauaacaaugcucugcuuaaggugaaauacggcgaggccuacacggacacauaucacucuuacgcgaacaagauccugcggacccaggaguccgccuguaauugcauugggggaaacuguuaucucaugaucacagauggcagcgcuuccggcgucucugaaugccgcuuucugaaaauuagagaggggcggaucaucaaggagauuuucccgaccggacgcgugaagcacaccgaagaguguacaugcggcuuugccagcaauaaaacgaucgaaugugcuugcagagacaacuccuacaccgccaagcggccuuucguuaaacuuaauguggagacagauaccgccgaaauucgccugaugugcacagacaccuaucucgauacgcccagaccugacgaugggagcaucacaggacccugugagucuaacggcgacaagggguccggaggcauuaaaggcggguuuguccaucaacggauggagagcaagaucggacgcugguacucuagaaccaugagcaaaaccgaacggaugggcauggggcuguaugugaaguacgacggagaucccugggcugacuccgaugcgcugacauucucuggcgugauggucagcaugaaggagccugggugguacuccuuuggcuucgaaaucaaagacaagaaaugcgauguuccguguauuggaaucgagauggugcacgacggcgggaaggaaaccuggcauagcgccgcuacagccauuuauugccucaugggaucuggccagcugcuuugggauacggugaccggggucgacauggcccuguga

SEQ ID NO: 221545 - RNA, 1401 nt, Artificial Sequence
  derived and/or modified CDS sequence (opt5) from neuraminidase__InfluenzaB__AGX20122
augcugcccagcaccauccagacacucacgcuguuccuuaccuccggcggggugcugcucucucuguacgucagcgcccuucuguccuaucuccuguacucugacauucugcucaaguuuagcccuacagagaucaccgcuccgacaaugucccuggauugcgccaacgcgucuaauguucaagcugugaacagaagcgccaccaaaggagugacauuccuucugcccgaaccugaguggaccuauccccggcucuccuguccuggcagcacguuucagcgcgcccugcuuauuucuccccacagauucggggaaaccaagggaaauuccgcuccucugaucauucgggagccguuuaucgccugcggccccaacgaauguaaacauuucgcucucacacacuacgccgcgcagccugggggauauuacaauggcacccgcggcgacagaaacaagcugcggcaucugaucagcgucaaacucgggaagauucccacaguggaaaauucuaucuuucacauggccgcuugguccggaagcgccugccaugauggcaaggaguggaccuauauugggguugacggaccugauaacgacgcucugcuuaaagugaaguacggcgaggccuacacggauacauaucacucuuacgcgaauaaaauccugcgcacccaggaguccgccuguaacugcauugggggaaauuguuaucucaugaucacagacggcagcgcuuccggcgucucugaaugcagauuccugaagauucgggaggggcgcaucaucaaagagauuuuucccaccggaagagugaagcacaccgaagaguguacaugcggcuucgccagcaacaagacgaucgaaugugcuugccgggauaauuccuacaccgccaaacgcccguuuguuaaacuuaacguggagacagacaccgccgaaauuagacugaugugcacagauaccuaucucgacacgccucggcccgaugacgggagcaucacaggaccuugugagucuaauggcgacaagggguccggaggcauuaagggcggguucguccaucaacgcauggagagcaaaaucggaagaugguacucucggaccaugagcaagaccgaaagaaugggcauggggcuguaugugaaauacgauggagaccccugggcugauuccgacgcgcuggccuuuucuggcgugauggucagcaugaaggagcccgggugguacuccuucggcuucgaaaucaaggauaaaaagugcgacguuccuuguauuggaaucgagauggugcacgauggcgggaaagaaacauggcauagcgcugccaccgccauuuauugccucaugggaucuggccagcugcuuugggacacagugacgggggucgauauggcucuguga

SEQ ID NO: 221546 - RNA, 1401 nt, Artificial Sequence
  derived and/or modified CDS sequence (opt5) from neuraminidase__InfluenzaB__AGX20133
augcugcccagcaccauccagacacucacgcuguuccuuaccuccggcggggugcugcucucucuguacgucagcgcccuucuguccuaucuccuguacucugacguucugcucaaguuuagcccuacagagauuaccgcuccgacaaugucccuggauugcgccaacgcgucuaaugugcaagcugugaacagaagcgccaccaaaggagucacauuccuucugcccgaaccugaguggaccuauccccggcucuccuguccuggcagcacguuucagaaggcccugcuuaucucuccccaccgcuucggggaaaccaaaggaaauuccgcuccucugauuaucagagagccguuuauugccugcggccccaacgaauguaagcauuucgcucucacacacuacgccgcgcagccugggggauauuacaauggcacccggggcgaccgcaacaaacugagacaucugaucagcgugaagcucgggaagauccccacaguugaaaauucuauuuuucacauggccgcuugguccggaagcgccugccaugauggcaaagaguggaccuauaucgggguggacggaccugauaacgacgcucugcuuaaggucaaauacggcgaggccuacacggauacauaucacucuuacgcgaauaagauucugcggacccaggaguccgccuguaacugcaucgggggaaauuguuaucucaugauuacagacggcagcgcuuccggcgugucugaaugccgcuuccugaaaaucagagaggggcggauuaucaaggagaucuuucccaccggacgcguuaagcacaccgaagaguguacaugcggcuucgccagcaacaaaacgauugaaugugcuugcagagauaauuccuacaccgccaagcggccguuugugaaacuuaacgucgagacagacaccgccgaaauccgccugaugugcacagauaccuaucucgacacgccuagacccgaugacgggagcauuacaggaccuugugagucuaauggcgacaagggguccggaggcaucaaaggcggguucgugcaucaacggauggagagcaagauuggacgcugguacucuagaaccaugagcaaaaccgaacggaugggcauggggcuguaugugaaguacgauggagaccccugggcugauuccgacgcgcuggccuuuucuggcgucaugguuagcaugaaggagcccgggugguacuccuucggcuucgaaaucaaagauaagaaaugcgacgugccuuguaucggaauugagauggugcacgauggcgggaaggaaacauggcauagcgcugccaccgccaucuauugccucaugggaucuggccagcugcuuugggacacagucacggggguggauauggcucuguga

SEQ ID NO: 221547 - RNA, 1401 nt, Artificial Sequence
  derived and/or modified CDS sequence (opt5) from neuraminidase__InfluenzaB__AGX20144
augcugcccagcaccauccagacacucacgcuguuccuuaccuccggcggggugcugcucucucuguacgucagcgcccuucuguccuaucuccuguacucugacauucugcucaaguuuagcccuacagagaucaccgcuccgacaaugucccuggauugcgccaacgcgucuaauguucaagcugugaacagaagcgccaccaaaggagugacauuccuucugcccgaaccugaguggaccuauccccggcucuccuguccuggcagcacguuucagaaggcccugcuuauuucuccccaccgcuucggggaaaccaaaggaaauuccgcuccucugaucauuagagagccguuuaucgccugcggccccaacgaauguaagcauuucgcucucacacacuacgccgcgcagccugggggauauuacaauggcacccggggcgaccgcaacaaacugagacaucugaucagcgucaagcucgggaagauucccacaguggaaaauucuaucuuucacauggccgcuugguccggaagcgccugccaugauggcaaagaguggaccuauauugggguugacggaccugauaacgacgcucugcuuaaggugaaauacggcgaggccuacacggauacauaucacucuuacgcgaauaagauccugcggacccaggaguccgccuguaacugcauugggggaaauuguuaucucaugaucacagacggcagcgcuuccggcauuucugaaugccgcuuccugaaaaucagagaggggcggaucauuaaggagaucuuucccaccggacgcgucaagcacaccgaagaguguacaugcggcuucgccagcaacaaaacgauugaaugugcuugcagagauaauuccuacaccgccaagcggccguuugugaaacuuaacguugagacagacaccgccgaaauccgccugaugugcacagauaccuaucucgacacgccuagacccgaugacgggagcauuacaggaccuugugagucuaauggcgacaagggguccggaggcaucaaaggcggguucgugcaucaacggauggagagcaagaucggacgcugguacucuagaaccaugagcaaaaccgaacggaugggcauggggcuguaugucaaguacgauggagaccccugggcugauuccgacgcgcuggccuuuucuggcgugauggugagcaugaaggagcccgggugguacuccuucggcuucgaaauuaaagauaagaaaugcgacgucccuuguaucggaauugagaugguucacgauggcgggaaggaaacauggcauagcgcugccaccgccaucuauugccucaugggaucuggccagcugcuuugggacacagugacggggguggauauggcucuguga

SEQ ID NO: 221548 - RNA, 1401 nt, Artificial Sequence; identical to SEQ ID NO: 221547
  derived and/or modified CDS sequence (opt5) from neuraminidase__InfluenzaB__AGX20155

SEQ ID NO: 221549 - RNA, 1401 nt, Artificial Sequence; identical to SEQ ID NO: 221547
  derived and/or modified CDS sequence (opt5) from neuraminidase__InfluenzaB__AGX20166

SEQ ID NO: 221550 - RNA, 1401 nt, Artificial Sequence; identical to SEQ ID NO: 220967
  derived and/or modified CDS sequence (opt5) from neuraminidase__InfluenzaB__AGX20177

SEQ ID NO: 221551 - RNA, 1401 nt, Artificial Sequence; identical to SEQ ID NO: 220967
  derived and/or modified CDS sequence (opt5) from neuraminidase__InfluenzaB__AGX20188

SEQ ID NO: 221552 - RNA, 1401 nt, Artificial Sequence; identical to SEQ ID NO: 220944
  derived and/or modified CDS sequence (opt5) from neuraminidase__InfluenzaB__AGX20199

SEQ ID NO: 221553 - RNA, 1401 nt, Artificial Sequence; identical to SEQ ID NO: 220967
  derived and/or modified CDS sequence (opt5) from neuraminidase__InfluenzaB__AGX20210

SEQ ID NO: 221554 - RNA, 1401 nt, Artificial Sequence; identical to SEQ ID NO: 221547
  derived and/or modified CDS sequence (opt5) from neuraminidase__InfluenzaB__AGX20221

SEQ ID NO: 221555 - RNA, 1401 nt, Artificial Sequence
  derived and/or modified CDS sequence (opt5) from neuraminidase__InfluenzaB__AGX20232
augcugcccagcaccauccagacacucacgcuguuccuuaccuccggcggggugcugcucucucuguacgucagcgccucccuuucuuaucugcucuacagcgggauucugcugaaguuuuccccuacagagaucaccgcuccgacaaugccccucgacugcgccaacgcgucuaauguucaagcugugaacagaagcgccaccaaaggcgugacauuccugcuuccugaacccgaguggaccuauccucggcuguccugucccgggagcacguuucagaaggcccuccugauuucuccucaccgcuucggagaaaccaaaggcaauuccgcuccgcuuaucauuagagagcccuuuaucgccugcgggccuaacgaauguaagcauuucgcucugacacacuacgccgcgcagcccggaggcuauuacaauggcacccggggagaucgcaacaaacucagacaucugaucagcgucaagcugggaaagauuccuacaguggaaaauucuaucuuucacauggccgcuugguccggcagcgccugccaugacgggaaagaguggaccuauauuggaguugauggccccgacaacaaugcucuccugaaggugaaauacggggaggccuacacggauacauaucacucuuacgcgaacaagauccuucggacccaggaguccgccuguaauugcauuggaggcaacuguuaucugaugaucacagacggcagcgcuuccggggucucugaaugccgcuuccucaaaauuagagagggacggaucaucaaggagauuuuuccgaccggccgcgugaagcacaccgaagaguguacaugcggguucgccagcaaugaaacgaucgagugugcuugcagagauaacuccuacaccgccaaacggccuuuuguuaagcugaauguggaaacagacaccgccgagauucgccuuaugugcacagauaccuaucuggacacgcccagaccuaacgauggaagcaucacaggccccugugagucuaacggggacaaaggaggcggcgggauuaagggaggcuucguccaucaacggauggaauccaaaaucgggcgcugguacagcagaaccaugucuaagaccgagcggaugggaaugggccucuaugugaaauacgauggggaccccugggcugacagcgaugcgcuggccuuuuccggcgugauggucucuaugaaggaaccuggaugguacagcuucggcuucgagaucaaggacaaaaagugcgauguuccguguauugggaucgaaauggugcacgacggaggcaaagagacauggcauuccgcugccaccgccauuuauugccugauggggagcggacagcuccugugggauacagugacgggcgucgacauggcucuuuga

SEQ ID NO: 221556 - RNA, 1401 nt, Artificial Sequence; identical to SEQ ID NO: 220967
  derived and/or modified CDS sequence (opt5) from neuraminidase__InfluenzaB__AGX20243

SEQ ID NO: 221557 - RNA, 1401 nt, Artificial Sequence; identical to SEQ ID NO: 221547
  derived and/or modified CDS sequence (opt5) from neuraminidase__InfluenzaB__AGX20254

SEQ ID NO: 221558 - RNA, 1401 nt, Artificial Sequence; identical to SEQ ID NO: 220944
  derived and/or modified CDS sequence (opt5) from neuraminidase__InfluenzaB__AGX20265

SEQ ID NO: 221559 - RNA, 1401 nt, Artificial Sequence; identical to SEQ ID NO: 221547
  derived and/or modified CDS sequence (opt5) from neuraminidase__InfluenzaB__AGX20276

SEQ ID NO: 221560 - RNA, 1401 nt, Artificial Sequence; identical to SEQ ID NO: 220967
  derived and/or modified CDS sequence (opt5) from neuraminidase__InfluenzaB__AGX20287

SEQ ID NO: 221561 - RNA, 1401 nt, Artificial Sequence
  derived and/or modified CDS sequence (opt5) from neuraminidase__InfluenzaB__AGX20298
augcugcccagcaccauccagacacucacgcuguuccuuaccuccggcggggugcugcucucucuguacgucagcgcccuucuguccuaucuccuguacucugacauucugcucaaguuuagcccuacagagaucaccgcuccgacaaugucccuggauugcgccaacgcgucuaauguucaagcugugaacagaagcgccaccaaaggagugacauuccuucugcccgaaccugaguggaccuauccccggcucuccuguccuggcagcacguuucagaaggcccugcuuauuucuccccaccgcuucggggaaaccaaaggaaauuccgcuccucugaucauuagagagccguuuaucgccugcggccccaacgaauguaagcauuucgcucucacacacuacgccgcgcagccugggggauauuacaauggcacccggggcgaccgcaacaaacugagacaucugaucagcgucaagcucgggaagauucccacaguggaaaauucuaucuuucacauggccgcuugguccggaagcgccugccaugauggcaaagaguggaccuauauugggguugacggaccugauaacgacgcucugcuuaaggugaaauacggcgaggccuacacggauacauaucacucuuacgcgaauaagauccugcggacccaggaguccgccuguaacugcauugggggaaauuguuaucucaugaucacagacggcagcgcuuccggcgucucugaaugccgcuuccugaaaauuagagaggggcggaucaucaaggagauuuuucccaccggacgcgugaagcacaccgaagaguguacaugcggcuucgccagcaacaaaacgaucgaaugugcuugcagagauaauuccuacaccgccaagcggccguuuguuaaacuuaacguggagacagacaccgccgaaauucgccugaugugcacagauaccuaucucgacacgccuagacccgaugacgggagcaucacaggaccuugugagucuaauggcgacaagggguccggaggcauuaaaggcggguucguccaucaacggauggagagcaagaucggacgcugguacucuagaaccaugagcaaaaccgaacggaugggcauggggcuguaugugaaguacgauggagaccccugggcugauuccgacgcgcuggccuuuucuggcgugauggucagcaugaaggagcccgggugguacuccuucggcuucgaaaucaaagauaagaaaugcgacguuccuuguauuggaaucgagauggugcacgauggcgggaaggaaacauggcagagcgcugccaccgccauuuauugccucaugggaucuggccagcugcuuugggacacagugacgggggucgauauggcucuguga

SEQ ID NO: 221562 - RNA, 1401 nt, Artificial Sequence; identical to SEQ ID NO: 220944
  derived and/or modified CDS sequence (opt5) from neuraminidase__InfluenzaB__AGX20320

SEQ ID NO: 221563 - RNA, 1401 nt, Artificial Sequence; identical to SEQ ID NO: 220967
  derived and/or modified CDS sequence (opt5) from neuraminidase__InfluenzaB__AGX20331

SEQ ID NO: 221564 - RNA, 1401 nt, Artificial Sequence
  derived and/or modified CDS sequence (opt5) from neuraminidase__InfluenzaB__AGX20342
augcugcccagcaccauccagacacucacgcuguuccuuaccuccggcggggugcugcucucucuguacgucagcgccucccuuucuuaucugcucuacagcgacauucugcugaaguuuuccccuacagagaucaccgcuccgacaaugccccucgauugcgccaacgcgucuaauguucaagcugugaacagaagcgccaccaaaggagugacacugcuucugccugaacccgaguggaccuauccucggcucuccugucccggcagcacguuccagaaggcccugcuuauuucuccucaccgcuuuggggaaaccaaaggaaauuccgcuccgcugaucauuagagagcccuucaucgccugcggcccuaacgaauguaagcauuuugcucucacacacuacgccgcgcagcccgggggauauuacaauggcacccggggcgaccgcaacaaacugagacaucugaucagcgucaagcucgggaagauuccuacaguggaaaauucuaucuuccacauggccgcuugguccggaagcgccugccaugauggcaaagaguggaccuauauugggguugacggacccgauaacaaugcucugcuuaaggugaaauacggcgaggccuacacggacacauaucacucuuacgcgaacaagauccugcggacccaggaguccgccuguaauugcauugggggaaacuguuaucucauggucacagauggcagcgcuuccggcgugucugaaugccgcuuucugaaaaucagagaggggcggauuaucaaggagaucuucccgaccggacgcguuaagcacaccgaagaguguacaugcggcuuugccagcaauaaaacgauugaaugugcuugcagagacaacuccuacaccgccaagcggccuuucgugaaacuuaaugucgagacagauaccgccgaaauccgccugaugugcacagacaccuaucucgauacgcccagaccugacgaugggagcauuacaggacccugugagucuaacggcgacaagggguccggaggcaucaaaggcggguuugugcaucaacggauggagagcaagauuggacgcugguacucuagaaccaugagcaaaaccgaacggaugggcauggggcuguaugugaaguacgacggagaucccugggcugacuccgaugcgcuggccuucucuggcgucaugguuagcaugaaggagccugggugguacuccuuuggcuucgaaaucaaagacaagaaaugcgaugugccguguaucggaauugagauggugcacgacggcgggaaggaaacauggcauagcgcugccaccgccaucuauugccucaugggaucuggccagcugcuuugggauacagucacggggguggacauggcucuguga

SEQ ID NO: 221565 - RNA, 1401 nt, Artificial Sequence
  derived and/or modified CDS sequence (opt5) from neuraminidase__InfluenzaB__AGX20353
augcugcccagcaccauccagacacucacgcuguuccuuaccuccggcggggugcugcucucucuguacgucagcgcccuucuguccuaucuccuguacucugacauucugcucaaguuuagcccuacagagaucauugcuccgaccaugucccuggauugcgccaacgcgucuaauguucaagcugugaacagaagcgccacaaaaggagugaccuuccuucugcccgaaccugaguggacauauccccggcucuccuguccuggcagcaccuuucagaaggcccugcuuaucucuccccaccgcuucggggaaacgaaaggaaauuccgcuccucugauuaucagagagccguuuaucgccugcggccccaacgaauguaagcauuucgcucucacccacuacgccgcgcagccugggggauauuacaaucggacacgcggcgacagaaacaaacugcggcaucugauuagcgucaagcucggcaagauccccaccguggaaaauucuauuuuucacauggccgcuugguccgggagcgccugccaugauggaaaagaguggacauauaucggcguugacgggccugauaacgacgcucugcuuaaggugaaauacggagaggccuacaccgauacguaucacucuuacgcgaauaagauucugcgcacacaggaguccgccuguaacugcaucggcgggaauuguuaucucaugauuaccgacggaagcgcuuccggcaucucugaaugcagauuccugaaaauccgggagggccgcauuaucaaggagauuuuucccacagggagagucaagcacaccgaagaguguaccugcggauucgccagcaacaaaacaaucgaaugugcuugccgggauaauuccuacacggccaagcgcccguuugugaaacuuaacguugagaccgacacagccgaaauuagacugaugugcaccgauacauaucucgacaccccucggcccgaugacggcagcaucacggggccuugugagucuaauggagacaagggcuccgggggaaucaaaggcggcuucgugcaucaacgcauggagagcaagauugggagaugguacucucggacaaugagcaaaaccgaaagaaugggaaugggccuguaugucaaguacgauggggaccccugggcugauuccgacgcgcuggccuuuucuggagugauggugagcaugaaggagcccggcugguacuccuucggguucgaaaucaaagauaagaaaugcgacgucccuuguauuggcaucgagaugguucacgauggaggcaaggaaaccuggcauagcgcugccacagccauuuauugccucauggggucuggacagcugcuuugggacaccgugacaggcguggauauggcucuguga

SEQ ID NO: 221566 - RNA, 1401 nt, Artificial Sequence; identical to SEQ ID NO: 220967
  derived and/or modified CDS sequence (opt5) from neuraminidase__InfluenzaB__AGX20364

SEQ ID NO: 221567 - RNA, 1401 nt, Artificial Sequence; identical to SEQ ID NO: 220962
  derived and/or modified CDS sequence (opt5) from neuraminidase__InfluenzaB__AGX20375

SEQ ID NO: 221568 - RNA, 1401 nt, Artificial Sequence
  derived and/or modified CDS sequence (opt5) from neuraminidase__InfluenzaB__AGX20386
augcugcccagcaccauccagacacucacgcuguuccuuaccuccggcggggugcugcucucucuguacgucagcgcccuucuguccuaucuccuguacucugacauucugcucaaguuuagcccuacagagaucaccgcuccgacaaugucccuggauugcgccaacgcgucuaauguucaagcugugaacagaagcgccaccaaaggagugacauuccuucugcccgaaccugaguggacccacccccggcucuccuguccuggcagcacguuucagaaggcccugcuuauuucuccccaucgcuucggggaaaccaaaggaaauuccgcuccucugaucauuagagagccguuuaucgccugcggccccaacgaauguaagcacuucgcucucacacauuaugccgcgcagccugggggauacuauaauggcacccggggcgaccgcaacaaacugagacaccugaucagcgucaagcucgggaagauucccacaguggaaaauucuaucuuucauauggccgcuugguccggaagcgccugccacgauggcaaagaguggaccuacauugggguugacggaccugauaacgacgcucugcuuaaggugaaauauggcgaggccuacacggauacauaccacucuuaugcgaauaagauccugcggacccaggaguccgccuguaacugcauugggggaaauuguuaccucaugaucacagacggcagcgcuuccggcauuucugaaugccgcuuccugaaaaucagagaggggcggaucauuaaggagaucuuucccaccggacgcgucaagcauaccgaagaguguacaugcggcuucgccagcaacaaaacgauugaaugugcuugcagagauaauuccuauaccgccaagcggccguuugugaaacuuaacguugagacagacaccgccgaaauccgccugaugugcacagauaccuaccucgacacgccuagacccgaugacgggagcauuacaggaccuugugagucuaauggcgacaagggguccggaggcaucaaaggcggguucgugcaccaacggauggagagcaagaucggacgcugguauucuagaaccaugagcaaaaccgaacggaugggcauggggcuguacgucaaguaugauggagaccccugggcugauuccgacgcgcuggccuuuucuggcgugauggugagcaugaaggagcccgggugguacuccuucggcuucgaaauuaaagauaagaaaugcgacgucccuuguaucggaauugagaugguucaugauggcgggaaggaaacauggcacagcgcugccaccgccaucuacugccucaugggaucuggccagcugcuuugggacacagugacggggguggauauggcucuguga

SEQ ID NO: 221569 - RNA, 1401 nt, Artificial Sequence; identical to SEQ ID NO: 220967
  derived and/or modified CDS sequence (opt5) from neuraminidase__InfluenzaB__AGX20397

SEQ ID NO: 221570 - RNA, 1401 nt, Artificial Sequence; identical to SEQ ID NO: 220962
  derived and/or modified CDS sequence (opt5) from neuraminidase__InfluenzaB__AGX20408

SEQ ID NO: 221571 - RNA, 1401 nt, Artificial Sequence; identical to SEQ ID NO: 220944
  derived and/or modified CDS sequence (opt5) from neuraminidase__InfluenzaB__AGX20419

SEQ ID NO: 221572 - RNA, 1401 nt, Artificial Sequence
  derived and/or modified CDS sequence (opt5) from neuraminidase__InfluenzaB__AGX20430
augcugcccagcaccauccagacacucacgcuguuccuuaccuccggcggggugcugcucucucuguacgucagcgcccuucuguccuaucuccuguacucugacauucugcucaaguuuagcccuacagagaucaccgcuccgacaaugucccuggauugcgccaacgcgucuaauguucaagcugugaacagaagcgccaccaaaggagugacauuccuucugcccgaaccugaguggaccuauccccggcucuccuguccuggcagcacguuucagcgcgcccugcuuauuucuccccacagauucggggaagcuaagggaaauuccgccccucugaucauucgggagccguuuaucgcuugcggccccaacgaauguaaacauuucgcccucacccacuacgcggcccagccugggggauauuacaauggcacacgcggcgacagaaacaagcugcggcaucugaucagcgucaaacucgggaagauucccaccguggaaaauucuaucuuucacauggcugccugguccggaagcgcuugccaugauggcaaggaguggacauauauugggguugacggaccugauaacgacgcccugcuuaaagugaaguacggcgaggcguacaccgauacguaucacucuuacgccaauaaaauccugcgcacacaggaguccgcuuguaacugcauugggggaaauuguuaucucaugaucaccgacggcagcgccuccggcgucucugaaugcagauuccugaagauucgggaggggcgcaucaucaaagagauuuuucccacaggaagagugaagcacaccgaagaguguaccugcggcuucgcuagcaacaagacaaucgaaugugccugccgggauaauuccuacacggccaaacgcccguuuguuaaacuuaacguggagaccgacacagcugaaauuagacugaugugcaccgauacauaucucgacaccccucggcccgaugacgggagcaucacgggaccuugugagucuaauggcgacaagggguccggaggcauuaagggcggguucguccaucaacgcauggagagcaaaaucggaagaugguacucucggacaaugagcaagaccgaaagaaugggcauggggcuguaugugaaauacgauggagaccccugggcggauuccgacgcccuggcuuuuucuggcgugauggucagcaugaaggagcccgggugguacuccuucggcuucgaaaucaaggauaaaaagugcgacguuccuuguauuggaaucgagauggugcacgauggcgggaaagaaaccuggcauagcgccgccacagcuauuuauugccucaugggaucuggccagcugcuuugggacaccgugacaggggucgauauggcccuguga

SEQ ID NO: 221573 - RNA, 1401 nt, Artificial Sequence; identical to SEQ ID NO: 220944
  derived and/or modified CDS sequence (opt5) from neuraminidase__InfluenzaB__AGX20441

SEQ ID NO: 221574 - RNA, 1401 nt, Artificial Sequence
  derived and/or modified CDS sequence (opt5) from neuraminidase__InfluenzaB__AGX20452
augcugcccagcaccauccagacacucacgcuguuccuuaccuccggcggggugcugcucucucuguacgucagcgccucccuuucuuaucugcucuacagcgacauucugcugaaguuuuccccuacagagaucaccgcuccgacaaugucucucgauugcgccaacgcgagcaauguucaagcugugaacagauccgccaccaaaggagugacauuccugcuucccgaaccugaguggaccuauccccggcugagcuguccuggcucuacguuucagaaggcccuccugauuagcccccaccgcuucggggaaaccaaaggaaauuccgcuccucuuaucauuagagagccguuuaucgccugcggccccaacgaauguaagcauuucgcucugacacacuacgccgcgcagccugggggauauuacaauggcacccggggcgaccgcaacaaacucagacaucugaucucugucaagcuggggaagauucccacaguggaaaauuccaucuuucacauggccgcuuggagcggaucugccugccaugauggcaaagaguggaccuauauugggguugacggaccugauaacgacgcucuccugaaggugaaauacggcgaggccuacacggauacauaucacuccuacgcgaauaagauccuucggacccaggagagcgccuguaacugcauugggggaaauuguuaucugaugaucacagacggcuccgcuucuggcgucagcgaaugccgcuuccucaaaauuagagaggggcggaucaucaaggagauuuuucccaccggacgcgugaagcacaccgaagaguguacaugcggcuucgccuccaacaaaacgaucgaaugugcuugcagagauaauagcuacaccgccaagcggccguuuguuaaacugaacguggagacagacaccgccgaaauucgccuuaugugcacagauaccuaucuggacacgccuagacccgaugacgggucuaucacaggaccuugugaguccaauggcgacaaggggagcggaggcauuaaaggcggguucguccaucaacggauggagucuaagaucggacgcugguacagcagaaccauguccaaaaccgaacggaugggcauggggcucuaugugaaguacgauggagaccccugggcugauucugacgcgcuggccuuuagcggcgugauggucuccaugaaggagcccgggugguacagcuucggcuucgaaaucagagauaaaaagugcgacguuccuuguauuggaaucgagauggugcacgauggcgggaaagaaacauggcauucugcugccaccgccauuuauugccugaugggauccggccagcuccugugggacacagugacgggggucgauauggcucuuuga

SEQ ID NO: 221575 - RNA, 1401 nt, Artificial Sequence; identical to SEQ ID NO: 220967
  derived and/or modified CDS sequence (opt5) from neuraminidase__InfluenzaB__AGX20463

SEQ ID NO: 221576 - RNA, 1401 nt, Artificial Sequence; identical to SEQ ID NO: 220967
  derived and/or modified CDS sequence (opt5) from neuraminidase__InfluenzaB__AGX20474

SEQ ID NO: 221577 - RNA, 1401 nt, Artificial Sequence; identical to SEQ ID NO: 220967
  derived and/or modified CDS sequence (opt5) from neuraminidase__InfluenzaB__AGX20485

SEQ ID NO: 221578 - RNA, 1401 nt, Artificial Sequence; identical to SEQ ID NO: 221547
  derived and/or modified CDS sequence (opt5) from neuraminidase__InfluenzaB__AGX20496

SEQ ID NO: 221579 - RNA, 1401 nt, Artificial Sequence; identical to SEQ ID NO: 220967
  derived and/or modified CDS sequence (opt5) from neuraminidase__InfluenzaB__AGX20507

SEQ ID NO: 221580 - RNA, 1401 nt, Artificial Sequence; identical to SEQ ID NO: 220967
  derived and/or modified CDS sequence (opt5) from neuraminidase__InfluenzaB__AGX20518

SEQ ID NO: 221581 - RNA, 1401 nt, Artificial Sequence
  derived and/or modified CDS sequence (opt5) from neuraminidase__InfluenzaB__AGX20529
augcugcccagcaccauccagacacucacgcuguuccuuaccuccggcggggugcugcucucucuguacgucagcgcccuucuguccuaucuccuguacucugacauucugcucaaguuuagcccuacagagaucaccgcuccgacaaugucccuggauugcgccaacgcgucuaauguucaagcugugaacagaagcgccaccaaaggagugacauuccuucugcccgaaccugaguggaccuauccccggcucuccuguccuggcagcacguuucagaaggcccugcuuauuucuccccaccgcuucggggaaaccaaaggaaauuccgcuccucugaucauuagagagccguuuaucgccugcggccccaacgaauguaagcauuucgcucucacacacuacgccgcgcagccugggggauauuacaauggcacccggggcgaccgcaacaaacugagacaucugaucagcgucaagcucgggaagauucccacaguggaaaauucuaucuuucacauggccgcuugguccggaagcgccugccaugauggcaaagaguggaccuauauugggguugacggaccugauaacgacgcucugcuuaaggugaaauacggcgaggccuacacggauacauaucacucuuacgcgaauaagauccugcggacccaggaguccgccuguaacugcauugggggaaauuguuaucucaugaucacagacggcagcgcuuccggcgucucugaaugccgcuuccugaaaauuagagaggggcggaucaucaaggagauuuuucccaccggacgcgugaagcacaccgaagaguguacaugcggcuucgccagcaacaaaacgaucgaauguaccugcagagauaauuccuacacagcuaagcggccguuuguuaaacuuaacguggagaccgacacagccgaaauucgccugaugugcaccgauacguaucucgacacaccuagacccgaugacgggagcaucaccggaccuugugagucuaauggcgacaagggguccggaggcauuaaaggcggguucguccaucaacggauggagagcaagaucggacgcugguacucuagaaccaugagcaaaacagaacggaugggcauggggcuguaugugaaguacgauggagaccccugggccgauuccgacgcucuggcguuuucuggcgugauggucagcaugaaggagcccgggugguacuccuucggcuucgaaaucaaagauaagaaaugcgacguuccuuguauuggaaucgagauggugcacgauggcgggaaggaaaccuggcauagcgccgcuacagccauuuauugccucaugggaucuggccagcugcuuugggacacggugaccggggucgauauggcccuguga

SEQ ID NO: 221582 - RNA, 1401 nt, Artificial Sequence; identical to SEQ ID NO: 221545
  derived and/or modified CDS sequence (opt5) from neuraminidase__InfluenzaB__AGX20540

SEQ ID NO: 221583 - RNA, 1401 nt, Artificial Sequence; identical to SEQ ID NO: 221191
  derived and/or modified CDS sequence (opt5) from neuraminidase__InfluenzaB__AGX20551

SEQ ID NO: 221584 - RNA, 1401 nt, Artificial Sequence; identical to SEQ ID NO: 220944
  derived and/or modified CDS sequence (opt5) from neuraminidase__InfluenzaB__AGX20562

SEQ ID NO: 221585 - RNA, 1401 nt, Artificial Sequence; identical to SEQ ID NO: 220967
  derived and/or modified CDS sequence (opt5) from neuraminidase__InfluenzaB__AGX20573

SEQ ID NO: 221586 - RNA, 1401 nt, Artificial Sequence
  derived and/or modified CDS sequence (opt5) from neuraminidase__InfluenzaB__AGX20584
augcugcccagcaccauccagacacucacgcuguuccuuaccuccggcggggugcugcucucucuguacgucagcgccucccuuucuuaucugcucuacagcgacauucugcugaaguuuuccucuacagagaucaccgcuccuacaaugccgcucgauugcgccaacgcgagcaauguucaagcugugaacagauccgccaccaaaggagugacacugcuucugcccgaaccugaguggaccuauccccggcucagcuguccuggcucuacguuccagaaggcccugcuuauuagcccccaccgcuuuggggaaaccaaaggaaauuccgcuccucugaucauuagagagccguucaucgccugcggccccaacgaauguaagcauuuugcucucacacacuacgccgcgcagccugggggauauuacaauggcacccggggcgaccgcaacaaacugagacaucugaucucugucaagcucgggaagauucccacaguggaaaauuccaucuuccacauggccgcuuggagcggaucugccugccaugauggcaaagaguggaccuauauugggguugacggaccugauaacaaugcucugcuuaaggugaaauacggcgaggccuacacggacacauaucacuccuacgcgaacaagauccugcggacccaggagagcgccuguaauugcauugggggaaacuguuaucucaugaucacagauggcuccgcuucuggcgucagcgaaugccgcuuucugaaaauuagagaggggcggaucaucaaggagauuuuccccaccggacgcgugaagcacaccgaagaguguacaugcggcuuugccuccaauaaaacgaucgaaugugcuugcagagacaacagcuacaccgccaagcggccguucguuaaacuuaauguggagacagauaccgccgaaauucgccugaugugcacagacaccuaucucgauacgccuagacccaacgacgggucuaucacaggaccuugugaguccaacggcgauaaggggagcggaggcauuaaaggcggguuuguccaucaacggauggagucucgcaucggaagaugguacagccggaccauguccaagaccgaaagaaugggcauggggcuguaugugaaauacgacggagaccccuggacagauucugacgcucugaccuucagcggcgugauggucuccaugaaggagcccgggugguacagcuuuggcuucgaaaucaaggauaaaaagugcgacguuccuuguauuggaaucgagauggugcacgauggcgggaaagaaacauggcauucugcggccacggcuauuuauugccucaugggauccggccagcugcuuugggacaccgugacaggggucgauauggcccuguga

SEQ ID NO: 221587 - RNA, 1401 nt, Artificial Sequence; identical to SEQ ID NO: 220967
  derived and/or modified CDS sequence (opt5) from neuraminidase__InfluenzaB__AGX20595

SEQ ID NO: 221588 - RNA, 1401 nt, Artificial Sequence; identical to SEQ ID NO: 221545
  derived and/or modified CDS sequence (opt5) from neuraminidase__InfluenzaB__AGX20606

SEQ ID NO: 221589 - RNA, 1401 nt, Artificial Sequence; identical to SEQ ID NO: 221545
  derived and/or modified CDS sequence (opt5) from neuraminidase__InfluenzaB__AGX20617

SEQ ID NO: 221590 - RNA, 1401 nt, Artificial Sequence; identical to SEQ ID NO: 221572
  derived and/or modified CDS sequence (opt5) from neuraminidase__InfluenzaB__AGX20628

SEQ ID NO: 221591 - RNA, 1401 nt, Artificial Sequence; identical to SEQ ID NO: 220972
  derived and/or modified CDS sequence (opt5) from neuraminidase__InfluenzaB__AGX20639

SEQ ID NO: 221592 - RNA, 1401 nt, Artificial Sequence
  derived and/or modified CDS sequence (opt5) from neuraminidase__InfluenzaB__AGX20650
augcugcccagcaccauccagacacucacgcuguuccuuaccuccggcggggugcugcucucucuguacgucagcgcccuucuguccuaucuccuguacucugacauucugcucaaguuuagcccuacagagaucaccgcuccgacaaugucccuggauugcgccaacgcgucuaauguucaagcugugaacagaagcgccaccaaaggagugacauuccuucugcccgaaccugaguggaccuauccccggcucuccuguccuggcagcacguuucagaaggcccugcuuauuucuccccaccgcuucggggaaaccaaaggaaauuccgcuccucugaucauuagagagccguuuaucgccugcggccccaacgaauguaagcauuucgcucucacacacuacgccgcgcagccugggggauauuacaauggcacccggggcgaccgcaacaaacugagacaucugaucagcgucaagcucgggaagauucccacaguggaaaauucuaucuuucacauggccgcuugguccggaagcgccugccaugauggcaaagaguggaccuauauugggguugacggaccugauaacgacgcucugcuuaaggugaaauacggcgaggccuacacggauacauaucacucuuacgcgaauaagauccugcggacccaggaguccacauguaacugcauugggggaaauuguuaucucaugaucaccgacggcagcgccuccggcgucucugaaugccgcuuccugaaaauuagagaggggcggaucaucaaggagauuuuucccaccggacgcgugaagcacacagaagaguguacgugcggcuucgcuagcaacaaaaccaucgaaugugccugcagagauaauuccuacacagcuaagcggccguuuguuaaacuuaacguggagaccgacacagccgaaauucgccugaugugcaccgauacguaucucgacacaccuagacccgaugacgggagcaucaccggaccuugugagucuaauggcgacaagggguccggaggcauuaaaggcggguucguccaucaacggauggagagcaagaucggacgcugguacucuagaaccaugagcaaaacagaacggaugggcauggggcuguaugugaaguacgauggagaccccugggccgauuccgacgcucuggcguuuucuggcgugauggucagcaugaaggagcccgggugguacuccuucggcuucgaaaucaaagauaagaaaugcgacguuccuuguauuggaaucgagauggugcacgauggcgggaaggaaaccuggcauagcgccgcuacagccauuuauugccucaugggaucuggccagcugcuuugggacacggugaccggggucgauauggcccuguga

SEQ ID NO: 221593 - RNA, 1401 nt, Artificial Sequence
  derived and/or modified CDS sequence (opt5) from neuraminidase__InfluenzaB__AGX20661
augcugcccagcaccauccagacacucacgcuguuccuuaccuccggcggggugcugcucucucuguacgucagcgccucccuuucuuaucugcucuacagcgacauucugcugaaguuuuccccuacagagaucaccgcuccgacaaugccccucgauugcgccaacgcgucuaauguucaagcugugaacagaagcgccaccaaaggagugacacugcuucugccugaacccgaguggaccuauccucggcucuccugucccggcagcacguuccagaaggcccugcuuauuucuccucaccgcuuuggggaaaccaaaggaaauuccgcuccgcugaucauuagagagcccuucaucgccugcggcccuaacgaauguaagcauuuugcucucacacacuacgccgcgcagcccgggggauauuacaauggcacccggggcgaccgcaacaaacugagacaucugaucagcgucaaucucgggaagauuccuacaguggagaacucuaucuuccacauggccgcuugguccggaagcgccugccaugauggcaaggaguggaccuauauugggguugacggacccgauaauaacgcucugcuuaaagugaaguacggcgaagccuacacggacacauaucacucuuacgcgaauaacauccugcggacccaggaguccgccuguaauugcauugggggaaacuguuaucucaugaucacagauggcagcgcuuccggcgucucugaaugccgcuuucugaaaauuagagaggggcggaucaucaaggagauuuucccgaccggacgcgugaaacacaccgaagaguguacaugcggcuuugccagcaauaagacgaucgaaugugcuugcagagacaacuccuacaccgccaagcggccuuucguuaaacuuaacguggagacagauaccgccgaaauucgccugaugugcacagacaccuaucucgauacgcccagaccuaaugacgggagcaucacaggacccugugagucuaacggcgauaagggguccggaggcauuaaaggcggguuuguccaucaacggauggagagcaagaucggacgcugguacucuagaaccaugagcaaaaccgaacggaugggcauggggcuguaugugaaguacgacggagaccccuggacagauuccgacgcucuggcguucucuggcgugauggucagcaugaaagagccugggugguacuccuuuggcuucgaaaucaaggauaagaaaugcgacguuccguguauuggaaucgagauggugcacgauggcgggaaggaaaccuggcauagcgccgcuacagccauuuauugccucaugggaucuggccagcugcuuugggacacggugaccggggucgauauggcccuguga

SEQ ID NO: 221594 - RNA, 1401 nt, Artificial Sequence; identical to SEQ ID NO: 221028
  derived and/or modified CDS sequence (opt5) from neuraminidase__InfluenzaB__AGX20683

SEQ ID NO: 221595 - RNA, 1401 nt, Artificial Sequence; identical to SEQ ID NO: 221191
  derived and/or modified CDS sequence (opt5) from neuraminidase__InfluenzaB__AGX20694

SEQ ID NO: 221596 - RNA, 1401 nt, Artificial Sequence
  derived and/or modified CDS sequence (opt5) from neuraminidase__InfluenzaB__AGX20705
augcugcccagcaccauccagacacucacgcuguuccuuaccuccggcggggugcugcucucucuguacgucagcgccucccuuucuuaucugcucuacagcgggauucugcugaaguuuuccccuacagagaucaccgcuccgacaaugccccucgacugcgccaacgcgucugauguucaagcugugaauagaagcgccaccaaaggcgugacacugcuucugccugaacccgaguggaccuauccucggcucuccugucccgggagcacguuccagaaggcccugcuuauuucuccucaccgcuuuggagaaaccaaaggcaacuccgcuccgcugaucauuagagagcccuucaucgccugcgggccuaaugaauguaagcauuuugcucucacacacuacgccgcgcagcccggaggcuauuacaacggcacccggggagaccgcaauaaacugagacaucugaucagcgucaagcucggaaagauuccuacaguggagaacucuaucuuccacauggccgcuugguccggcagcgccugccaugaugggaaagaguggaccuauauuggaguugacggccccgauaauaacgcucugcuuaaggugaaauacggggaagccuacacggacacauaucacucuuacgcgaauaagauccugcggacccaggaguccgccuguaacugcauuggaggcaauuguuaucucaugaucacagauggcagcgcuuccggggucucugaaugccgcuuucugaaaauuagagagggacggaucaucaaggagauuuucccgaccggccgcgugaagcacaccgaagaguguacaugcggguuugccagcaacaaaacgaucgaaugugcuugcagagacaauuccuacaccgccaagcggccuuucguuaaacuuaacguggagacagauaccgccgaaauucgccugaugugcacagacaccuaucucgauacgcccagaccuaaugacggaagcaucacaggccccugugagucuaacggggauaagggauccggcggcauuaaagggggauuuguccaucaacggauggagagcaagaucggccgcugguacucuagaaccaugagcaaaaccgaacggauggggaugggacuguaugugaaguacgacggcgaccccugggcugauuccgacgcgcugacauucucuggggugauggucagcaugaaggagccuggcugguacuccuuuggauucgaaaucaaagauaagaaaugcgacguuccguguauuggcaucgagauggugcacgaugggggaaaggaaaccuggcauagcgccgcuacagccauuuauugccucaugggcucugggcagcugcuuugggacacggugaccggagucgauauggcccuguga

SEQ ID NO: 221597 - RNA, 1401 nt, Artificial Sequence
  derived and/or modified CDS sequence (opt5) from neuraminidase__InfluenzaB__AGX20716
augcugcccagcaccauccagacacucacgcuguuccuuaccuccggcggggugcugcucucucuguacgucagcgccucccuuucuuaucugcucuacagcgacauucugcugaaguuuuccccuacagagaucaccgcuccgacaaugccccucgauugcgccaacgcgucuaauguucaagcugugaacagaagcgccaccaaaggagugacacugcuucugccugaacccgaguggaccuauccucggcucuccugucccggcagcacguuccagaaggcccugcuuauuucuccucaccgcuuuggggaaaccaaaggaaauuccgcuccgcugaucauuagagagcccuucaucgccugcggcccuaacgaauguaagcauuuugcucucacacacuacgccgcgcagcccgggggauauuacaauggcacccggggcgaccgcaacaaacugagacaucugaucagcgucaagcucgggaagauuccuacaguggaaaauucuaucuuccacauggccgcuugguccggaagcgccugccaugauggcaaagaguggaccuauauugggguugacggacccgauaacaaugcucugcuuaaggugaaauacggcgaggccuacacggacacauaucacucuuacgcgaacaagauccugcggacccaggaguccgccuguaauugcauugggggaaacuguuaucucaugaucacagauggcagcgcuuccggcgucucugaaugccgcuuucugaaaauuagagaggggcggaucaucaaggagauuuucccgaccggacgcgugaagcacaccgaagaguguacaugcggcuuugccagcaauaaaacgaucgaaugugcuugcagagacaacuccuacaccgccaagcggccuuucguuaaacuuaauguggagacagauaccgccgaaauucgccugaugugcacagacaccuaucucgauacgcccagaccuaacgacgggagcaucacaggacccugugagucugauggcgacaagggguccggaggcauuaaaggcggguuuguccaucaacggaucgagagccgcaucggaagaugguacucucggaccaugagcaagaccgaaagaaugggcauggggcuguaugugaaauacgacggagaucccugggcugacuccgaugcgcuggccuucucuggcgugauggucagcaugaaggagccugggugguacuccuuuggcuucgaaauuaaggacaaaaagugcgauguuccguguaucggaauugagauggugcacgacggcgggaaagaaacauggcauagcgcugccaccgccaucuauugccucaugggaucuggccagcugcuuugggauacagugacgggggucgacauggcucuguga

SEQ ID NO: 221598 - RNA, 1401 nt, Artificial Sequence
  derived and/or modified CDS sequence (opt5) from neuraminidase__InfluenzaB__AGX20727
augcugcccagcaccauccagacacucacgcuguuccuuaccuccggcggggugcugcucucucuguacgucagcgcccuucuguccuaucuccuguacucugacauucugcucaaguuuagcccuacagagaucaccgcuccgacaaugucccuggauugcgccaacgcgucuaauguucaagcugugaacagaagcgccaccaaaggagugacauuccuucugcccgaaccugaguggaccuauccccggcucuccuguccuggcagcacguuucagaaggcccugcuuauuucuccccaccgcuucggggaaaccaaaggaaauuccgcuccucugaucauuagagagccguuuaucgccugcggccccaacgaauguaagcauuucgcucucacacacuacgccgcgcagccugggggauauuacaauggcacccggggcgaccgcaacaaacugagacaucugaucagcgucaagcucgggaagauucccacaguggaaaauucuaucuuucacauggccgcuugguccggaagcgccugccaugauggcaaagaguggaccuauauugggguugacggaccugauaacgacgcucugcuuaaggugaaauacggcgaggccuacacggauacauaucacucuuacgcgaauaagauccugcggacccaggaguccgccuguaacugcauugggggaaauuguuaucucaugaucacagacggcagcgcuuccggcgucucugaaugccgcuuccugaaaauuagagaggggcggaucaucaaggagauuuuucccaccggacgcgugaagcacaccgaagaguguacaugcggcuucgccagcaacaaaacgaucgaaugugcuugcagagauaauuccuacaccgccaagcggccguuuguuaaacuuaacguggagacagacaccgccgaaauucgccugaugugcacagauaccuaucucgacacgccuagacccgaugacgggagcacaaccggaccuugugagucuaauggcgacaagggguccggaggcaucaaaggcggguucguccaucaacggauggagagcaagauuggacgcugguacucuagaaccaugagcaaaacagaacggaugggcauggggcuguaugugaaguacgauggagaccccugggcugauuccgacgcgcuggccuuuucuggcgugauggucagcaugaaggagcccgggugguacuccuucggcuucgaaaucaaagauaagaaaugcgacguuccuuguaucggaauugagauggugcacgauggcgggaaggaaaccuggcauagcgcugccacagccaucuauugccucaugggaucuggccagcugcuuugggacacggugaccggggucgauauggcucuguga

SEQ ID NO: 221599 - RNA, 1401 nt, Artificial Sequence; identical to SEQ ID NO: 221191
  derived and/or modified CDS sequence (opt5) from neuraminidase__InfluenzaB__AGX20738

SEQ ID NO: 221600 - RNA, 1401 nt, Artificial Sequence; identical to SEQ ID NO: 220967
  derived and/or modified CDS sequence (opt5) from neuraminidase__InfluenzaB__AGX20749

SEQ ID NO: 221601 - RNA, 1401 nt, Artificial Sequence
  derived and/or modified CDS sequence (opt5) from neuraminidase__InfluenzaB__AGX20760
augcugcccagcaccauccagacacucacgcuguuccuuaccuccggcggggugcugcucucucuguacgucagcgccucccuuucuuaucugcucuacagcgacauucugcugaaguuuuccccuacagagaucaccgcuccgacaaugccccucgauugcgccaacgcgucuaauguucaagcugugaacagaagcgccaccaaaggagugacacugcuucugccugaacccgaguggaccuauccucggcucuccugucccggcagcacguuccagaaggcccugcuuauuucuccucaccgcuuuggggaaaccaaaggaaauuccgcuccgcugaucauuagagagcccuucaucgccugcggcccuaacgaauguaagcauuuugcucucacacacuacgccgcgcagcccgggggauauuacaauggcacccggggcgaccgcaacaaacugagacaucugaucagcgucaagcucgggaagauuccuacaguggaaaauucuaucuuccacauggccgcuugguccggaagcgccugccaugauggcaaagaguggaccuauauugggguugacggacccgauaacaaugcucugcuuaaggugaaauacggcgaggccuacacggacacauaucacucuuacgcgaacaagauccugcggacccaggaguccgccuguaauugcauugggggaaacuguuaucucaugaucacagauggcagcgcuuccggcgucucugaaugccgcuuucugaaaauuagagaggggcggaucaucaaggagauuuucccgaccggacgcgugaagcacaccgaagaguguacaugcggcuuugccagcaauaaaacgaucgaaugugcuugcagagacaacuccuacaccgccaagcggccuuucguuaaacuuaauguggagacagauaccgccgaaauucgccugaugugcacagacaccuaucucgauacgcccagaccuaacgacgggagcaucacaggacccugugagucugauggcgacaagggguccggaggcauuaaaggcggguuuguccaucaacggauggagagccgcaucggaagaugguacucucggaccaugagcaagaccgaaagaaugggcauggggcuguaugugaaauacgacggagaucccugggcugacuccgaugcgcuggccuucucuggcgugauggucagcaugaaggagccugggugguacuccuuuggcuucgaaaucaaggacaaaaagugcgauguuccguguauuggaaucgagauggugcacgacggcgggaaagaaacauggcauagcgcugccaccgccauuuauugccucaugggaucuggccagcugcuuugggauacagugacgggggucgacauggcucuguga

SEQ ID NO: 221602 - RNA, 1401 nt, Artificial Sequence; identical to SEQ ID NO: 220967
  derived and/or modified CDS sequence (opt5) from neuraminidase__InfluenzaB__AGX20771

SEQ ID NO: 221603 - RNA, 1401 nt, Artificial Sequence
  derived and/or modified CDS sequence (opt5) from neuraminidase__InfluenzaB__AGX20782
augcugcccagcaccauccagacacucacgcuguuccuuaccuccggcggggugcugcucucucuguacgucagcgccucccuuucuuaucugcucuacagcgacauucugcugaaguuuuccccuacagagaucaccgcuccgacaaugccccucgauugcgccaacgcgucuaauguucaagcugugaaccacagcgccaccaaaggagugacacugcuucugccugaacccgaguggaccuauccuagacucuccugucccggcagcacguuccagaaggcccugcuuauuucuucccaucgguuuggggaaaccaaaggaaauagcgcuccucugaucauucgcgagccguucgucgccugcggccccaacgaauguaagcacuuugcucucacacauuacgccgcgcagccugggggauauuacaauggcaccagaggcgaccggaacaaacugcgccaccugaucucugugaagcucgggaagauccccacaguugaaaauuccauuuuccauauggccgcuuggagcggaucugccugccacgauggcaaagaguggaccuauaucgggguggacggaccugauaacaaugcucugcuuaaggucaaauacggcgaggccuacacggacacauaucacuccuacgcgaacaagauucugagaacccaggagagcgccuguaauugcaucgggggaaacuguuaucucaugauuacagauggcuccgcuucuggcgugagcgaaugccgguuucugaaaauccgcgaggggagaauuaucaaggagaucuuccccaccggacggguuaagcauaccgaagaguguacaugcggcuuugccuccaauaaaacgauugaaugugcuugccgcgacaacagcuacaccgccaagagaccguucgugaaacuuaaugucgagacagauaccgccgaaauccggcugaugugcacagacaccuaucucgauacgccucgccccaacgacgggucuauuacaggaccuugugaguccgauggcgacaaggggagcggaggcaucaaaggcggguuugugcaccaaagaauggagucuaagauuggacggugguacagccgcaccauguccagaaccgaacggaugggcauggggcuguaugugaaauacgacggagaucccugggcugacucugaugcgcuggccuucagcggcgucaugguuuccaugaaggagcccgggugguacagcuuuggcuucgaaaucaaggacaaaaagugcgaugugccuuguaucggaauugagauggugcaugacggcgggaaagaaacauggcacucugcugccaccgccaucuauugccucaugggauccggccagcugcuuugggauacagucacggggguggacauggcucuguga

SEQ ID NO: 221604 - RNA, 1401 nt, Artificial Sequence
  derived and/or modified CDS sequence (opt5) from neuraminidase__InfluenzaB__AGX20793
augcugcccagcaccauccagacacucacgcuguuccuuaccuccggcggggugcugcucucucuguacgucagcgcccuucuguccuaucuccuguacucugacauucugcucaaguuuagcccuacagagaucaccgcuccgacaaugucccuggauugcgccaacaccucuaauguucaagcggugaacagaagcgcuacaaaaggagugaccuuccuucugcccgaaccugaguggacguauccccggcucuccuguccuggcagcaccuuucagaaggcccugcuuauuucuccccaccgcuucggggaaacaaaaggaaauuccgccccucugaucauuagagagccguuuaucgcuugcggccccaacgaauguaagcauuucgcccucacccacuacgcugcccagccugggggauauuacaauggcacacggggcgaccgcaacaaacugagacaucugaucagcgucaagcucgggaagauucccaccguggaaaauucuaucuuucacauggcggccugguccggaagcgcuugccaugauggcaaagaguggacguauauugggguugacggaccugauaacgacgcccugcuuaaggugaaauacggcgaggcuuacacagauaccuaucacucuuacgccaauaagauccugcggacacaggaguccgcguguaacugcauugggggaaauuguuaucucaugaucaccgacggcagcgccuccggcgucucugaaugccgcuuccugaaaauuagagaggggcggaucaucaaggagauuuuucccaccggacgcgugaagcacacagaagaguguacgugcggcuucgcuagcaacaaaaccaucgaaugugccugcagagauaauuccuacacagcuaagcggccguuuguuaaacuuaacguggagaccgacacagccgaaauucgccugaugugcaccgauacguaucucgacacaccuagacccgaugacgggagcaucaccggaccuugugagucuaauggcgacaagggguccggaggcauuaaaggcggguucguccaucaacggauggagagcaagaucggacgcugguacucuagaaccaugagcaaaacagaacggaugggcauggggcuguaugugaaguacgauggagaccccugggccgauuccgacgcucuggcguuuucuggcgugauggucagcaugaaggagcccgggugguacuccuucggcuucgaaaucaaagauaagaaaugcgacguuccuuguauuggaaucgagauggugcacgauggcgggaaggaaaccuggcauagcgccgcuacagccauuuauugccucaugggaucuggccagcugcuuugggacacggugaccggggucaacauggcccuguga

SEQ ID NO: 221605 - RNA, 1401 nt, Artificial Sequence
  derived and/or modified CDS sequence (opt5) from neuraminidase__InfluenzaB__AGX20804
augcugcccagcaccauccagacacucacgcuguucauuaccuccggcggggugcuucugucucucuacgucagcgcccugcuuuccuaucugcucuacucugacauccugcugaaguuuagcccuacagagauuaccgcuccgacaaugucccucgauugcgccaacgcgucuaauguucaagcugugaacagaagcgccaccaaaggagugacauuccugcuucccgaaccugaguggaccuauccccggcuguccuguccuggcagcacguuucagaaggcccuccugaucucuccccaccgcuucggggaaaccaaaggaaauuccgcuccucuuauuaucagagagccguuuaucgccugcggccccaacgaauguaagcauuucgcucugacacacuacgccgcgcagccugggggauauuacaauggcacccggggcgaccgcaacaaacucagacaucugauuagcgucaagcuggggaagauccccacaguggaaaauucuauuuuucacauggccgcuugguccggaagcgccugccaugauggcaaagaguggaccuauaucgggguugacggaccugauaacgacgcucuccugaaggugaaauacggcgaggccuacacggauacauaucacucuuacgcgaauaagauucuucggacccaggaguccgccuguaacugcaucgggggaaauuguuaucugaugauuacagacggcagcgcuuccggcgucucugaaugccgcuuccucaaaaucagagaggggcggaucauuaaggagaucuuucccaccggacgcgugaagcacaccgaagaguguacaugcggcuucgccagcaacaaaacgauugaaugugcuugcagagauaauuccuacaccgccaagcggccguuuguuaaacugaacguggagacagacaccgccgaaauccgccuuaugugcacagauaccuaucuggacacgccuagacccgaugacgggagcauuacaggaccuugugagucuaauggcgacaagggguccggaggcaucaaaggcggguucguccaucaacggauggagagcaagaucggacgcugguacucuagaaccaugagcaaaaccgaacggaugggcauggggcucuaugugaaguacgauggagaccccugggcugauuccgacgcgcuggccuuuucuggcgugauggucagcaugaaggagcccgggugguacuccuucggcuucgaaauuaaagauaagaaaugcgacguuccuuguaucggaauugagauggugcacgauggcgggaaggaaacauggcauagcgcugccaccgccaucuauugccugaugggaucuggccagcuccugugggacacagugacgggggucgauauggcucuuuga

SEQ ID NO: 221606 - RNA, 1401 nt, Artificial Sequence; identical to SEQ ID NO: 221028
  derived and/or modified CDS sequence (opt5) from neuraminidase__InfluenzaB__AGX20815

SEQ ID NO: 221607 - RNA, 1401 nt, Artificial Sequence; identical to SEQ ID NO: 221028
  derived and/or modified CDS sequence (opt5) from neuraminidase__InfluenzaB__AGX20826

SEQ ID NO: 221608 - RNA, 1401 nt, Artificial Sequence; identical to SEQ ID NO: 221028
  derived and/or modified CDS sequence (opt5) from neuraminidase__InfluenzaB__AGX20837

SEQ ID NO: 221609 - RNA, 1401 nt, Artificial Sequence; identical to SEQ ID NO: 221028
  derived and/or modified CDS sequence (opt5) from neuraminidase__InfluenzaB__AGX20848

SEQ ID NO: 221610 - RNA, 1401 nt, Artificial Sequence
  derived and/or modified CDS sequence (opt5) from neuraminidase__InfluenzaB__AGX20870
augcugcccagcaccauccagaugcucacacuguuccuuacguccggcggggugcugcucucucuguacgucagcgccucccuuucuuaucugcucuacagcgacauucugcugaaguuuuccccuaccgagaucacagcuccgaccaugccccucgauugcgccaacgcgucuaauguucacgcugugaacagaagcgccacaaaaggagugaccuuccugcuuccugaacccgaguggacauauccucggcuguccugucccggcagcaccuuucaaaaggcccuccugauuucuccucaucgcuucggggaaacgaaaggaaauuccgcuccgcuuaucauuagagagcccuuuaucgccugcggcccuaacgaauguaagcacuucgcucugacccauuacgccgcgcagcccgggggauauuacaauggcacacggggcgaccgcaacaaacucagacaccugaucagcgucaagcuggggaagauuccuaccguggaaaauucuaucuuucauauggccgcuugguccggaagcgccugccacgauggcaaagaguggacauauauugggguugacggacccgauaacaaugcucuccugaagaucaaauacggcgaggccuacaccgacacguaucacucuuacgcgaacaauauucuucggacacaggaguccgccuguaacugcaucgggggaaauuguuaucugaugauuaccgauggcagcgcuuccggcgugucugaaugccgcuuccucaagaucagagaggggcggaucauuaaagagaucuuuccgacaggacgcgucaagcauaccgaagaguguaccugcggcuucgccagcaacaagacaauugaaugugcuugcagagacaauuccuacacggccaaacggccuuuugugaagcugaacguugagaccgauacagccgaaauccgccuuaugugcaccgacacauaucuggauacccccagaccugacgaugggagcauuacgggacccugugagucuaacggcgacaaaggguccggaggcaucaagggcggguucgugcaccagcggauggcuagcaaaaucggacgcugguacucuagaacaaugagcaagaccgagcggaaaggcauggggcucuaugucaaguacgacggagaacccuggaccgauuccgacgcgcuggccuuuagaggcgugauggugucuaugaaggagccugggugguacagcuucggcuucgaaauuaaagauaagaaaugcgacgucccguguaucggaauugagaugguucaugauggcgggaaggaaacauggcacuccgcugccaccgccaucuauugccugaugggaagcggccaacuccugugggacacagugacggggguggauauggcucuuuga

SEQ ID NO: 221611 - RNA, 1401 nt, Artificial Sequence
  derived and/or modified CDS sequence (opt5) from neuraminidase__InfluenzaB__AGX20881
augcugcccagcaccauccagaugcucacacuguuccuuacguccggcggggugcugcucucucuguacgucagcgccucccuuucuuaucugcucuacagcgacauucugcugaaguuuuccccuaccgagaucacagcuccgaccaugccccucgauugcgccaacgcgucuaauguucacgcugugaacagaagcgccacaaaaggagugaccuuccugcuuccugaacccgaguggacauauccucggcuguccugucccggcagcaccuuucaaaaggcccuccugauuucuccucaucgcuucggggaaacgaaaggaaauuccgcuccgcuuaucauuagagagcccuuuaucgccugcggcccuaacgaauguaagcacuucgcucugacccauuacgccgcgcagcccgggggauauuacaauggcacacggggcaaccgcaauaaacucagacaccugaucagcgucaagcuggggaagauuccuaccguggagaacucuaucuuucauauggccgcuugguccggaagcgccugccacgacggcaaagaguggacauauauugggguugauggacccgacaauaacgcucuccugaagaucaaauacggcgaagccuacaccgauacguaucacucuuacgcgaauaacauucuucggacacaggaguccgccuguaauugcaucgggggaaacuguuaucugaugauuaccgacggcagcgcuuccggcgugucugaaugccgcuuccucaagaucagagaggggcggaucauuaaagagaucuuuccgacaggacgcgucaagcauaccgaagaguguaccugcggcuucgccagcaauaagacaauugaaugugcuugcagagauaacuccuacacggccaaacggccuuuugugaagcugaacguugagaccgacacagccgaaauccgccuuaugugcaccgauacauaucuggacacccccagaccugaugacgggagcauuacgggacccugugagucuaauggcgauaaaggguccggaggcaucaagggcggguucgugcaccagcggauggcuagcaaaaucggacgcugguacucuagaacaaugagcaagaccgagcggaaaggcauggggcucuaugucaaguacgacggagaccccuggaccgauuccgacgcgcuggccuuuagaggcgugauggugucuaugaaggaaccugggugguacagcuucggcuucgagauuaaagauaagaaaugcgacgucccguguaucggaauugaaaugguucaugauggcgggaaggagacauggcacuccgcugccaccgccaucuauugccugaugggaagcggccaacuccugugggacacagugacggggguggauauggcucuuuga

SEQ ID NO: 221612 - RNA, 1401 nt, Artificial Sequence
  derived and/or modified CDS sequence (opt5) from neuraminidase__InfluenzaB__AGX20892
augcugcccagcaccauccagacacucacgcuguuccuuaccuccggcggggugcugcucucucuguacgucagcgcccuucuguccuaucuccuguacucugacauucugcucaaguuuagcccuacagagaucaccgcuccgacaaugucccuggauugcgccaacgcgucuaauguucaagcugugaacagaagcgccaccaaaggagugacauuccuucugcccgaaccugaguggaccuauccccggcucuccuguccuggcagcacguuucagcgcgcccugcuuauuucuccccacagauucggggaagcuaagggaaauuccgccccucugaucauucgggagccguuuaucgcuugcggccccaacgaauguaaacauuucgcccucacccacuacgcggcccagccugggggauauuacaauggcacacgcggcgacagaaacaagcugcggcaucugaucagcgucaaacucgggaagauucccaccguggaaaauucuaucuuucacauggcugccugguccggaagcgcuugccaugauggcaaggaguggacauauauugggguugacggaccugauaacgacgcccugcuuaaagugaaguacggcgaggcguacaccgauacguaucacucuuacgccaauaaaauccugcgcacacaggaguccgcuuguaacugcauugggggaaauuguuaucucaugaucaccgacggcagcgccuccggcgucucugaaugcagauuccugaagauucgggaggggcgcaucaucaaagagauucuucccacaggaagagugaagcacaccgaagaguguaccugcggcuuugcuagcaacaagacaaucgaaugugccugccgggauaauuccuacacggccaaacgcccguucguuaagcugaacguggagaccgacacagcugaaauuagacucaugugcaccgauacauaucuggacaccccucggcccgaugacgggagcaucacgggaccuugugagucuaauggcgacaaaggguccggaggcauuaagggcggguuuguccaucaacgcauggagagcaaaaucggaagaugguacucucggacaaugagcaagaccgaaagaaugggcauggggcuguaugugaaauacgauggagaccccugggcggauuccgacgcccucgcuuucucuggcgugauggucagcaugaaggagcccgggugguacuccuuuggcuucgaaaucaaggauaaaaagugcgacguuccuuguauuggaaucgagauggugcacgauggcgggaaagaaaccuggcauagcgccgccacagcuauuuauugccugaugggaucuggccagcuucugugggacaccgugacaggggucgauauggcccucuga

SEQ ID NO: 221613 - RNA, 1401 nt, Artificial Sequence; identical to SEQ ID NO: 221028
  derived and/or modified CDS sequence (opt5) from neuraminidase__InfluenzaB__AGX20903

SEQ ID NO: 221614 - RNA, 1401 nt, Artificial Sequence; identical to SEQ ID NO: 221028
  derived and/or modified CDS sequence (opt5) from neuraminidase__InfluenzaB__AGX20914

SEQ ID NO: 221615 - RNA, 1401 nt, Artificial Sequence
  derived and/or modified CDS sequence (opt5) from neuraminidase__InfluenzaB__AGX20925
augcugcccagcaccauccagacacucacgcuguuccuuaccuccggcggggugcugcucucucuguacgucagcgcccuucuguccuaucuccuguacucugacauucugcucaaguuuagcccuacagagaucaccgcuccgacaaugucccuggauugcgccaacgcgucuaauguucaagcugugaacagaagcgccaccaaaggagugacauuccuucugcccgaaccugaguggaccuauccccggcucuccuguccuggcagcacguuucagaaggcccugcuuauuucuccccaccgcuucggggaaaccaaaggaaauuccgcuccucugaucauuagagagccguuuaucgccugcggccccaacgaauguaagcauuucgcucucacacacuacgccgcgcagccugggggauauuacaauggcacccggggcgaccgcaacaaacugagacaucugaucagcgucaagcucgggaagauucccacaguggaaaauucuaucuuucacauggccgcuugguccggaagcgccugccaugauggcaaagaguggaccuauauugggguugacggaccugauaacgacgcucugcuuaaggugaaauacggcgaggccuacacggauacauaucacucuuacgcgaauaagauccugcggacccaggaguccgccuguaacugcauugggggaaauuguuaucucaugaucacagacggcagcgcuuccggcgucucugaaugccgcuuccugaaaauucaagaggggagaaucaucaaggagauuuuucccaccggacgggugaagcacaccgaagaguguacaugcggcuucgccagcaacaaaacgaucgaaugugcuugccgcgauaauuccuacaccgccaagagaccguuuguuaaacuuaacguggagacagacaccgccgaaauucggcugaugugcacagauaccuaucucgacacgccucgccccgaugacgggagcaucacaggaccuugugagucuaauggcgacaagggguccggaggcauuaaaggcggguucguccaucagagaauggagagcaagaucggacggugguacucucgcaccaugagcaaaaccgaaagaaugggcauggggcuguaugugaaguacgauggagaccccugggcugauuccgacgcgcuggccuuuucuggcgugauggucagcaugaaggagcccgggugguacuccuucggcuucgaaaucaaagauaagaaaugcgacguuccuuguauuggaaucgagauggugcacgauggcgggaaggaaacauggcauagcgcugccaccgccauuuauugccucaugggaucuggccagcugcuuugggacacagugacgggggucgauauggcucuguga

SEQ ID NO: 221616 - RNA, 1401 nt, Artificial Sequence
  derived and/or modified CDS sequence (opt5) from neuraminidase__InfluenzaB__AGX20936
augcugcccagcaccauccagacacucacgcuguuccuuaccuccggcggggugcugcucucucuguacgucagcgcccuucuguccuaucuccuguacucugacauucugccuaaguuuagcccgacagagaucaccgcucccacaaugucccucgauugcgccaacgcgucuaauguucaagcugugaacagaagcgccaccaaaggagugacauuccugcuuccugaacccgaguggaccuauccucggcuguccugucccggcagcacguuucagaaggcccuccugauuucuccucaccgcuucggggaaaccaaaggaaauuccgcuccgcuuaucauuagagagcccuuuaucgccugcggcccuaacgaauguaagcauuucgcucugacacacuacgccgcgcagcccgggggauauuacaauggcacccggggcgaccgcaacaaacucagacaucugaucagcgucaagcuggggaagauuccuacaguggaaaauucuaucuuucacauggccgcuugguccggaagcgccugccaugauggcaaagaguggaccuauauugggguugacggacccgauaacgacgcucuccugaaggugaaauacggcgaggccuacacggauacauaucacucuuacgcgaauaagauccuucggacccaggaguccgccuguaacugcauugggggaaauuguuaucugaugaucacagacggcagcgcuuccggcgucucugaaugccgcuuccucaaaauuagagaggggcggaucaucaaggagauuuuuccgaccggacgcgugaagcacaccgaagaguguacaugcggcuucgccagcaacaaaacgaucgaaugugcuugcagagauaauuccuacaccgccaagcggccuuuuguuaaacugaacguggagacagacaccgccgaaauucgccuuaugugcacagauaccuaucuggacacgcccagaccugaugacgggagcaucacaggacccugugagucuaauggcgacaagggguccggaggcauuaaaggcggguucguccaucaacggauggagagcaagaucggacgcugguacucuagaaccaugagcaaaaccgaacggaugggcauggggcucuaugugaaguacgauggagaccccugggcugauuccgacgcgcugguguuuucuggcgucaugguuagcaugaaggagccugggugguacuccuucggcuucgaaaucaaagauaagaaaugcgacgugccguguauuggaaucgagauggugcacgauggcgggaaggaaacauggcauagcgccgcuaccgccauuuauugccugaugggaucuggccagcuccugugggacacagucacggggguggauauggcccuuuga

SEQ ID NO: 221617 - RNA, 1401 nt, Artificial Sequence; identical to SEQ ID NO: 220967
  derived and/or modified CDS sequence (opt5) from neuraminidase__InfluenzaB__AGX20947

SEQ ID NO: 221618 - RNA, 1401 nt, Artificial Sequence
  derived and/or modified CDS sequence (opt5) from neuraminidase__InfluenzaB__AGX20958
augcugcccagcaccauccagacacucacgcuguuccuuaccuccggcggggugcugcucucucuguacgucagcgcccuucuguccuaucuccuguacucugacauucugcucaaguuuagcccuacagagaucaccacaccgaccaugucccuggauugcacaaacgcuucuaauguucaagccgugaacagaagcgcgaccaaaggagugacguuccuucugcccgaaccugaguggaccuauccccggcucuccuguccuggcagcacauuucagaaggcucugcuuauuucuccccaccgcuucggggaaaccaaaggaaauuccgccccucugaucauuagagagccguuuaucgccugcggccccaacgaauguaagcauuucgcucucacacacuacgccgcucagccugggggauauuacaauggcacccggggcgaccgcaacaaacugagacaucugaucagcgucaagcucgggaagauucccacgguggaaaauucuaucuuucacauggccgcgugguccggaagcgccugccaugauggcaaagaguggacauauauugggguugacggaccugauaacgacgcucugcuuaaggugaaauacggcgaggccuacaccgauacauaucacucuuacgcuaauaagauccugcggacccaggaguccgccuguaacugcauugggggaaauuguuaucucaugaucaccgacggcagcgcguccggcgucucugaaugccgcuuccugaaaauucaagaggggagaaucaucaaggagauuuuucccacaggacgggugaagcacacggaagaguguaccugcggcuucgccagcaacaaaacaaucgaaugugcuugccgcgauaauuccuacaccgccaagagaccguuuguuaaacuuaacguggagacagacaccgcugaaauucggcugaugugcacggauacauaucucgacaccccucgccccgaugacgggagcaucaccggaccuugugagucuaauggcgacaagggguccggaggcauuaaaggcggguucguccaucagagaauggagagcaagaucggacggugguacucucgcacaaugagcaaaaccgaaagaaugggcauggggcuguaugugaaguacgauggagaccccugggccgauuccgacgcccuggcuuuuucuggcgugauggucagcaugaaggagcccgggugguacuccuucggcuucgaaaucaaagauaagaaaugcgacguuccuuguauuggaaucgagauggugcacgauggcgggaaggaaacauggcauagcgcggccacggcuauuuauugccucaugggaucuggccagcugcuuugggacaccgugacaggggucgauauggcccuguga

SEQ ID NO: 221619 - RNA, 1401 nt, Artificial Sequence; identical to SEQ ID NO: 221191
  derived and/or modified CDS sequence (opt5) from neuraminidase__InfluenzaB__AGX20969

SEQ ID NO: 221620 - RNA, 1401 nt, Artificial Sequence; identical to SEQ ID NO: 221604
  derived and/or modified CDS sequence (opt5) from neuraminidase__InfluenzaB__AGX20980

SEQ ID NO: 221621 - RNA, 1401 nt, Artificial Sequence
  derived and/or modified CDS sequence (opt5) from neuraminidase__InfluenzaB__AGX20991
augcugcccagcaccauccagacacucacgcuguuccuuaccuccggcggggugcugcucucucuguacgucagcgcccuucuguccuaucuccuguacucugacauucugccuaaguuuagcccgacagagaucaccgcucccacaaugucccucgauugcgccaacgcgucuaauguucaagcugugaacagaagcgccaccaaaggagugacauuccugcuuccugaacccgaguggaccuauccucggcuguccugucccggcagcacguuucagaaggcccuccugauuucuccucaccgcuucggggaaaccaaaggaaauuccgcuccgcuuaucauuagagagcccuuuaucgccugcggcccuaacgaauguaagcauuucgcucugacacacuacgccgcgcagcccgggggauauuacaauggcacccggggcgaccgcaacaaacucagacaucugaucagcgucaagcuggggaagauuccuacaguggaaaauucuaucuuucacauggccgcuugguccggaagcgccugccaugauggcaaagaguggaccuauauugggguugacggacccgauaacgacgcucuccugaaggugaaauacggcgaggccuacacggauacauaucacucuuacgcgaauaagauccuucggacccaggaguccgccuguaacugcauugggggaaauuguuaucugaugaucacagacggcagcgcuuccggcgucucugaaugccgcuuccucaaaauuagaaaggggcggaucaucaaggagauuuuuccgaccggacgcgugaaacacaccgaggaauguacaugcggcuucgccagcaacaagacgaucgagugugcuugcagagauaauuccuacaccgccaaacggccuuuuguuaagcugaacguggaaacagacaccgccgagauucgccuuaugugcacagauaccuaucuggacacgcccagaccugaugacgggagcaucacaggacccugugaaucuaauggcgacaaaggguccggaggcauuaagggcggguucguccaucaacggauggagagcaaaaucggacgcugguacucuagaaccaugagcaagaccgagcggaugggcauggggcucuaugugaaguacgauggagaccccugggcugauuccgacgcgcugguguuuucuggcgucaugguuagcaugaaagaaccugggugguacuccuucggcuucgagaucaaggauaaaaagugcgacgugccguguauuggaaucgaaauggugcacgauggcgggaaagagacauggcauagcgccgcuaccgccauuuauugccugaugggaucuggccagcuccugugggacacagucacggggguggauauggcccuuuga

SEQ ID NO: 221622 - RNA, 1401 nt, Artificial Sequence; identical to SEQ ID NO: 221028
  derived and/or modified CDS sequence (opt5) from neuraminidase__InfluenzaB__AGX21002

SEQ ID NO: 221623 - RNA, 1401 nt, Artificial Sequence
  derived and/or modified CDS sequence (opt5) from neuraminidase__InfluenzaB__AGX21013
augcugcccagcaccauccagacacucacgcuguuccuuaccuccggcggggugcugcucucucuguacgucagcgcccuucuguccuaucuccuguacucugacauucugcucaaguuuagcccuacagagaucaccgcuccgacaaugucccuggauugcgccaacgcgucuaauguucaagcugugaacagaagcgccaccaaaggagugacauuccuucugcccgaaccugaguggaccuauccccggcucuccuguccuggcagcacguuucagaaggcccugcuuauuucuccccaccgcuucggggaaaccaaaggaaauuccgcuccucugaucauuagagagccguuuaucgccugcggccccaacgaauguaagcauuucgcucucacacacuacgccgcgcagccugggggauauuacaauggcacccggggcgaccgcaacaaacugagacaucugaucagcgucaagcucgggaagauucccacaguggaaaauucuaucuuucacauggccgcuugguccggaagcgccugccaugauggcaaagaguggaccuauauugggguugacggaccugauaacgacgcucugcuuaaggugaaauacggcgaggccuacacggauacauaucacucuuacgcgaauaagauccugcggacccaggaguccgccuguaacugcauugggggaaauuguuaucucaugaucacagacggcagcgcuuccggcgucucugaaugccgcuuccugaaaauuagagaggggcggaucaucaaggagauuuuucccaccggacgcgugaagcacaccgaagaguguacaugcggcuucgccagcaacaaaacgaucgaaugugcuugcagagauaauuccuacaccgccaagcggccguuuguuaaacuuaacguggagacagacaccgccgaaauucgccugaugugcacaaauaccuaucucgauacgccuagacccgacgaugggagcaucacaggaccuugugagucuaacggcgacaagggguccggaggcauuaaaggcggguucguccaucaacggauggagagcaagaucggacgcugguacucuagaaccaugagcaaaaccgaacggaugggcauggggcuguaugugaaguacgacggagaucccugggcugacuccgaugcgcuggccuuuucuggcgugauggucagcaugaaggagcccgggugguacuccuucggcuucgaaaucaaagacaagaaaugcgauguuccuuguauuggaaucgagauggugcacgacggcgggaaggaaacauggcauagcgcugccaccgccauuuauugccucaugggaucuggccagcugcuuugggauacagugacgggggucgacauggcucuguga

SEQ ID NO: 221624 - RNA, 1401 nt, Artificial Sequence
  derived and/or modified CDS sequence (opt5) from neuraminidase__InfluenzaB__AGX21024
augcugcccagcaccauccagacacucacgcuguuccuuaccuccggcggggugcugcucucucuguacgucagcgccucccuuucuuaucugcucuacagcgacauucugcugaaguuuuccccuacagagaucaccgcuccgacaaugccccucgauugcgccaacgcgucuaauguucaagcugugaacagaagcgccaccaaaggagugacacugcuucugccugaacccgaguggaccuauccucggcucuccugucccggcagcacguuccagaaggcccugcuuauuucuccuaaucgcuuuggggaaaccaaaggaaacuccgcuccgcugaucauuagagagcccuucaucgccugcggcccuaaugaauguaagcacuuugcucucacacauuacgccgcgcagcccgggggauauuacaacggcacccggggcgaccgcaauaaacugagacaccugaucagcgucaagcucgggaagauuccuacaguggagaacucuaucuuccauauggccgcuugguccggaagcgccugccacgauggcaaagaguggaccuauauugggguugacggacccgauaauaacgcucugcuuaaggugaaauacggcgaagccuacacggacacauaucauucuuacgcgaauaagauccugcggacccaggaguccgccuguaacugcauugggggaaauuguuaucucaugaucacagauggcagcgcuuccggcgucucugaaugccgcuuucugaaaauuagagaggggcggaucaucaaggagauuuucccgaccggacgcgugaagcacaccgaagaguguacaugcggcuuugccagcaacaaaacgaucgaaugugcuugcagagacaauuccuacaccgccaagcggccuuucguuaaacuuaacguggagacagauaccgccgaaguccgccugaugugcacagacaccuaucucgauacgcccagaccuaacgacgggagcauuacaggacccugugagucugauggcgacaagggguccggaggcaucaaaggcggguuugugcaccaacggauggagagcaagauuggacgcugguacucuagaaccaugagcaaaaccgaacggaugggcauggggcuguaugugaaguacgacggagaucccugggcugacuccgaugcgcugacauucucuggcgucaugguuagcaugaaggagccugggugguacuccuuuggcuucgaaaucaaagacaagaaaugcgaugugccguguaucggaauugagauggugcaugacggcgggaaggaaaccuggcacagcgccgcuacagccaucuauugccucaugggaucuggccagcugcuuugggauacggucaccgggguggacauggcccuguga

SEQ ID NO: 221625 - RNA, 1401 nt, Artificial Sequence; identical to SEQ ID NO: 221028
  derived and/or modified CDS sequence (opt5) from neuraminidase__InfluenzaB__AGX21035

SEQ ID NO: 221626 - RNA, 1401 nt, Artificial Sequence; identical to SEQ ID NO: 221191
  derived and/or modified CDS sequence (opt5) from neuraminidase__InfluenzaB__AGX21046

SEQ ID NO: 221627 - RNA, 1401 nt, Artificial Sequence; identical to SEQ ID NO: 221194
  derived and/or modified CDS sequence (opt5) from neuraminidase__InfluenzaB__AGX21057

SEQ ID NO: 221628 - RNA, 1401 nt, Artificial Sequence; identical to SEQ ID NO: 221612
  derived and/or modified CDS sequence (opt5) from neuraminidase__InfluenzaB__AGX21068

SEQ ID NO: 221629 - RNA, 1401 nt, Artificial Sequence
  derived and/or modified CDS sequence (opt5) from neuraminidase__InfluenzaB__AGX21079
augcugcccagcaccauccagacacucacgcuguuccuuaccuccggcggggugcugcucucucuguacgucagcgccucccuuucuuaucugcucuacagcgacauucugcugaaguuuuccccuacagagaucaccgcuccggccaugccccucgauugcgcgaacgcuucuaauguucaagccgugaacagaagcgccacaaaaggagugacccugcuucugccugaacccgaguggacauauccucggcucuccugucccggcagcaccuuccagaaggcucugcuuauuucuccucaccgcuuuggggaaacgaaaggaaauuccgccccgcugaucauuagagagcccuucaucgcuugcggcccuaacgaauguaagcauuuugcccucacccacuacgcggcccagcccgggggauauuacaauggcacacggggcgaccgcaacaaacugagacaucugaucagcgucaagcucgggaagauuccuaccguggaaaauucuaucuuccacauggcugccugguccggaagcgcuugccaugauggcaaagaguggacauauauugggguugacggacccgauaacaaugcccugcuuaaggugaaauacggcgaggcguacaccgacacguaucacucuuacgccuccaagauccugcggacacaggagagcgcuuguaacugcauugggggaaauuguuaucucaugaucaccgauggcuccgccucuggcgucagcgaaugccgcuuucugaaaauuagagaggggcggaucaucaaggagauuuucccgacaggacgcgugaagcacaccgaagaguguaccugcggcuuugcuuccaacaaaacaaucgaaugugccugcagagacaauagcuacacggccaagcggccuuucguuaaacuuaacguggagaccgauacagcugaaauucgccugaugugcaccgacacauaucucgauacccccagaccuaaugacgggucuaucacgggacccugugaguccgauggcgacaaggggagcggaggcauuaaaggcggguuuguccaucaacggauggagucuaagaucggacgcugguacagcagaacaauguccaaaaccgaacggaugggcauggggcuguaugugaaguacgacggagaucccugggcggacucugaugcccuggcuuucagcggcgugauggucuccaugaaggagccugggugguacagcuuuggcuucgaaaucaaagacaagaaaugcgauguuccguguauuggaaucgagauggugcacgacggcgggaaggaaaccuggcauucugccgccacagcuauuuauugccucaugggauccggccagcugcuuugggauaccgugacaggggucgacauggcccuguga

SEQ ID NO: 221630 - RNA, 1401 nt, Artificial Sequence; identical to SEQ ID NO: 221194
  derived and/or modified CDS sequence (opt5) from neuraminidase__InfluenzaB__AGX21088

SEQ ID NO: 221631 - RNA, 1401 nt, Artificial Sequence; identical to SEQ ID NO: 221194
  derived and/or modified CDS sequence (opt5) from neuraminidase__InfluenzaB__AGX21099

SEQ ID NO: 221632 - RNA, 1401 nt, Artificial Sequence
  derived and/or modified CDS sequence (opt5) from neuraminidase__InfluenzaB__AGX21110
augcugcccagcaccauccagacacucacgcuguuccuuaccuccggcggggugcugcucucucuguacgucagcgcccuucuguccuaucuccuguacucugacauucugcucaaguuuagcccuacagagaucaccgcuccgacaaugucccuggauugcgccaacgcgucuaauguucaagcugugaacagauucgccaccaaaggagugacauuucuucugcccgaaccugaguggaccuauccccggcucagcuguccuggcuccacguuccagaaggcccugcuuauuagcccccaccgcuuuggggaaaccaaaggaaauucugcuccucugaucauuagagagccguucaucgccugcggccccaacgaauguaagcauuuugcucucacacacuacgccgcgcagccugggggauauuacaauggcacccggggcgaccgcaacaaacugagacaucugaucuccgucaagcucgggaagauucccacaguggagaauagcaucuuccacauggccgcuuggucuggauccgccugccaugauggcaaagaguggaccuauauugggguugacggaccugauaacgacgcucugcuuaaggugaaauacggcgaagccuacacggauacauaucacagcuacgcgaauaagauccugcggacccaggagucugccuguaacugcauugggggaaauuguuaucucaugaucacagacggcuccgcuagcggcgucuccgaaugccgcuuucugaaaauuagagaggggcggaucaucaaggagauuuuccccaccggacgcgugaagcacaccgaagaguguacaugcggcuuugccucuaacaaaacgaucgaaugugcuugcagagauaauagcuacaccgccaagcggccguucguuaaacuuaacguggagacagacaccgccgaaauucgccugaugugcacagauaccuaucucgacacgccuagacccgaugacggguccaucacaggaccuugugagagcaauggcgacaaggggucuggaggcauuaaaggcggguuuguccaucaacggauggaguccaagaucggacgcugguacagcagaaccaugucuaaaaccgaacggaugggcauggggcuguaugugaaguacgauggagaccccugggcugauagcgacgcgcuggccuucuccggcgugauggucucuaugaaggagcccgggugguacagcuucggcuuugaaaucaaagauaagaaaugcgacguuccuuguauuggaaucgagauggugcacgauggcgggaaggaaacauggcauuccgcugccaccgccauuuauugccucaugggaagcggccagcugcuuugggacacagugacgggggucgauauggcucuguga

SEQ ID NO: 221633 - RNA, 1401 nt, Artificial Sequence
  derived and/or modified CDS sequence (opt5) from neuraminidase__InfluenzaB__AGX21121
augcugcccagcaccauccagacacucacgcuguuccuuaccuccggcggggugcugcucucucuguacgucagcgcccuucuguccuaucuccuguacucugacauucugcucaaguuuagcccuacagagaucaccgcuccgacaaugucccuggauugcgccaacgcgucuaauguucaagcugugaacagaagcgccaccaaaggagugacauuccuucugcccgaaccugaguggaccuauccccggcucuccuguccuggcagcacguuucagaaggcccugcuuauuucuccccaccgcuucggggaaaccaaaggaaauuccgcuccucugaucauuagagagccguuuaucgccugcggccccaacgaauguaagcauuucgcucucacacacuacgccgcgcagccugggggauauuacaauggcacccggggcgaccgcaacaaacugagacaucugaucagcgucaagcucgggaagauucccacaguggaaaauucuaucuuucacauggccgcuugguccggaagcgccugccaugauggcaaagaguggaccuauauugggguugacggaccugauaacgacgcucugcuuaaggugaaauacggcgaggccuacacggauacauaucacucuuacgcgaauaagauccugcggacccaggaguccgccuguaacugcauugggggaaauuguuaucucaugaucacagacggcagcgcuuccggcgucucugaaugccgcuuccugaaaauuagagaggggcggaucaccaaggagaucuuucccaccggacgcgugaagcacacagaagaguguacgugcggcuucgccagcaacaaaaccauugaaugugcuugcagagauaauuccuacacagccaagcggccguuuguuaaacuuaacguggagaccgacacagccgaaauccgccugaugugcaccgauacguaucucgacacaccuagacccgaugacgggagcauuaccggaccuugugagucuaauggcgacaagggguccggaggcaucaaaggcggguucguccaucaacggauggagagcaagauuggacgcugguacucuagaaccaugagcaaaacagaacggaugggcauggggcuguaugugaaguacgauggagaccccugggcugauuccgacgcgcuggccuuuucuggcgugauggucagcaugaaggagcccgggugguacuccuucggcuucgaaaucaaagauaagaaaugcgacguuccuuguaucggaauugagauggugcacgauggcgggaaggaaaccuggcauagcgcugccacagccaucuauugccucaugggaucuggccagcugcuuugggacacggugaccggggucgauauggcucuguga

SEQ ID NO: 221634 - RNA, 1401 nt, Artificial Sequence; identical to SEQ ID NO: 221191
  derived and/or modified CDS sequence (opt5) from neuraminidase__InfluenzaB__AGX21132

SEQ ID NO: 221635 - RNA, 1401 nt, Artificial Sequence; identical to SEQ ID NO: 220967
  derived and/or modified CDS sequence (opt5) from neuraminidase__InfluenzaB__AGX21143

SEQ ID NO: 221636 - RNA, 1401 nt, Artificial Sequence; identical to SEQ ID NO: 221028
  derived and/or modified CDS sequence (opt5) from neuraminidase__InfluenzaB__AGX21154

SEQ ID NO: 221637 - RNA, 1401 nt, Artificial Sequence
  derived and/or modified CDS sequence (opt5) from neuraminidase__InfluenzaB__AGX21165
augcugcccagcaccauccagacacucacgcuguuccuuaccuccggcggggugcugcucucucuguacgucagcgcccuucuguccuaucuccuguacucugacauucugcucaaguuuagcccuacagagaucaccgcuccgacaaugucccuggauugcgccaacgcgucuaauguucaagcugugaacagaagcgccaccaaaggagugacauuccuucugcccgaaccugaguggaccuauccccggcucuccuguccuggcagcacguuucagaaggcccugcuuauuucuccccaccgcuucggggaaaccaaaggaaauuccgcuccucugaucauuagagagccguuuaucgccugcggccccaacgaauguaagcauuucgcucucacacacuacgccgcgcagccugggggauauuacaauggcacccggggcgaccgcaacaaacugagacaucugaucagcgucaagcucgggaagauucccacaguggaaaauucuaucuuucacauggccgcuugguccggaagcgccugccaugauggcaaagaguggaccuauauugggguugacggaccugauaacgacgcucugcuuaaggugaaauacggcgaggccuacacggauacauaucacucuuacgcgaauaagauccugcggacccaggaguccgccuguaacugcauugggggaaauuguuaucucaugaucacagacggcagcgcuuccggcgucucugaaugccgcuuccugaaaauuagagaggggcggaucaucaaggagauuuuucccaccggacgcgugaagcacaccgaagaguguacaugcggcuucgccagcaacaaaacgaucgaaugugcuugcagagauaauuccuacaccgccaagcggccguuuguuaaacuuaacauggagacagacaccgccgaaauucgccugaugugcacagauaccuaucucgacacgccuagacccgaugacgggagcaucacaggaccuugugagucuaauggcgacaagggguccggaggcauuaaaggcggguucgugcaucaacggauggagagcaagaucggacgcugguacucuagaaccaugagcaaaaccgaacggaugggcauggggcuguaugucaaguacgauggagaccccugggcugauuccgacgcgcuggccuuuucuggcgugauggugagcaugaaggagcccgggugguacuccuucggcuucgaaaucaaagauaagaaaugcgacgucccuuguauuggaaucgagaugguucacgauggcgggaaggaaacauggcauagcgcugccaccgccauuuauugccucaugggaucuggccagcugcuuugggacacagugacggggguggauauggcucuguga

SEQ ID NO: 221638 - RNA, 1401 nt, Artificial Sequence; identical to SEQ ID NO: 221028
  derived and/or modified CDS sequence (opt5) from neuraminidase__InfluenzaB__AGX21176

SEQ ID NO: 221639 - RNA, 1401 nt, Artificial Sequence
  derived and/or modified CDS sequence (opt5) from neuraminidase__InfluenzaB__AGX21187
augcugcccagcaccauccagacacucacgcuguuccuuaccuccggcggggugcugcucucucuguacgucagcgccucccuuucuuaucugcucuacagcgacauucugcugaaguuuuccccuacagagaucaccgcuccgacaaugccccucgauugcgccaacgcgucuaauguucaagcugugaacagaagcgccaccaaaggagugacacugcuucugccugaacccgaguggaccuauccucggcucuccugucccggcagcacguuccagaaggcccugcuuauuucuccucaccgcuuuggggaaaccaaaggaaauuccgcuccgcugaucauuagagagcccuucaucgccugcggcccuaacgaauguaagcauuuugcucucacacacuacgccgcgcagcccgggggauauuacaauggcacccggggcgaccgcaacaaacugagacaucugaucagcgucaagcucgggaagauuccuacaguggaaaauucuaucuuccacauggccgcuugguccggaagcgccugccaugauggcaaagaguggaccuauauugggguugacggacccgauaacaaugcucugcuuaaggugaaauacggcgaggccuacacggacacauaucacucuuacgcgaacaagauccugcggacccaggaguccgccuguaauugcauugggggaaacuguuaucucaugaucacagauggcagcgcuuccggcgucucugaaugccgcuuucugaaaauuagagaggggcggaucaucaaggagauuuucccgaccggacgcgugaagcacaccgaagaguguacaugcggcuuugccagcaauaaaacgaucgaauguguuugcagagacaacuccuacaccgcuaagcggccuuucgugaaacuuaaugucgagacagauaccgccgaagugcgccugaugugcacagacaccuaucucgauacgcccagaccuaacgacgggagcauuacaggacccugugagucugauggcgacaagggguccggaggcaucaaaggcggguuugugcaucaacggauggagagcaagauuggacgcugguacucuagaaccaugagcaaaaccgaacggaugggcauggggcuguaugucaaguacgacggagaucccugggccgacuccgaugcucugacauucucuggcguuauggugagcaugaaggagccugggugguacuccuuuggcuucgaaaucaaagacaagaaaugcgaugugccguguaucggaauugagaugguccacgacggcgggaaggaaaccuggcauagcgcggccacagcuaucuauugccucaugggaucuggccagcugcuuugggauacggugaccgggguugacauggcccuguga

SEQ ID NO: 221640 - RNA, 1401 nt, Artificial Sequence
  derived and/or modified CDS sequence (opt5) from neuraminidase__InfluenzaB__AGX21198
augcugcccagcaccauccagaugcucacacuguuccuuacguccggcggggugcugcucucucuguacgucagcgccucccuuucuuaucugcucuacagcgacauucugcugaaguuuuccccuaccgagaucacagcuccgaccaugccccucgauugcgccaacgcgucuaauguucacgcugugaacagaagcgccacaaaaggagugaccuuccugcuuccugaacccgaguggacauauccucggcuguccugucccggcagcaccuuucaaaaggcccuccugauuucuccucaucgcuucggggaaacgaaaggaaauuccgcuccgcuuaucauuagagagcccuuuaucgccugcgaaccuaacgaguguaagcacuucgcucugacccauuacgccgcgcagcccggcggguauuacaauggaacacggggcgaccgcaacaaacucagacaccugaucagcgucaagcugggcaagauuccuaccguggaaaauucuaucuuucauauggccgcuugguccgggagcgccugccacgauggaaaagaguggacauauauuggcguugacgggcccgauaacaaugcucuccugaagaucaaauacggagaggccuacaccgacacguaucacucuuacgcgaacaauauucuucggacacaggaauccgccuguaacugcaucggcgggaauuguuaucugaugauuaccgauggaagcgcuuccggcgugucugagugccgcuuccucaagaucagagagggccggaucauuaaagaaaucuuuccgacagggcgcgucaagcauaccgaggaauguaccugcggauucgccagcaacaagacaauugagugugcuugcagagacaauuccuacacggccaaacggccuuuugugaagcugaacguugaaaccgauacagccgagauccgccuuaugugcaccgacacauaucuggauacccccagaccugacgauggcagcauuacggggcccugugagucuaacggagacaaaggcuccgggggaaucaagggcggcuucgugcaccagcggauggcuagcaaaaucgggcgcugguacucuagaacaaugagcaagaccgaacggaaaggaaugggccucuaugucaaguacgacggggaucccuggaccgacuccgaugcgcuggccuuuagaggagugauggugucuaugaaggagccuggcugguacagcuucggguucgaaauuaaagacaagaaaugcgaugucccguguaucggcauugagaugguucaugacggaggcaaggaaacauggcacuccgcugccaccgccaucuauugccugauggggagcggacaacuccugugggauacagugacgggcguggacauggcucuuuga

SEQ ID NO: 221641 - RNA, 1401 nt, Artificial Sequence; identical to SEQ ID NO: 221028
  derived and/or modified CDS sequence (opt5) from neuraminidase__InfluenzaB__AGX21209

SEQ ID NO: 221642 - RNA, 1401 nt, Artificial Sequence; identical to SEQ ID NO: 221191
  derived and/or modified CDS sequence (opt5) from neuraminidase__InfluenzaB__AGX21220

SEQ ID NO: 221643 - RNA, 1401 nt, Artificial Sequence
  derived and/or modified CDS sequence (opt5) from neuraminidase__InfluenzaB__AGX21231
augcugcccagcaccauccagacacucacgcuguuccuuaccuccggcggggugcugcucucucuguacgucagcgcccuucuguccuaucuccuguacucugacauucugcucaaguuuagcccuacagagaucaccgcuccgacaaugucccuggauugcgccaacgcgucuaauguucaagcugugaacagaagcgccaccaaaggagugacauuccuucugcccgaauccgaguggaccuauccucggcucagcugucccggcucuacguuucagaaggcccugcuuauuuccccucaccgcuucggggaaaccaaaggaaauagcgcuccccugaucauuagagagccuuuuaucgccugcggcccgaacgaauguaagcauuucgcucucacacacuacgccgcgcagcccgggggauauuacaauggcacccggggcgaccgcaacaaacugagacaucugaucucugucaagcucgggaagauuccuacaguggaaaauuccaucuuucacauggccgcuuggagcggaucugccugccaugauggcaaagaguggaccuauauugggguugacggacccgauaacgacgcucugcuuaaggugaaauacggcgaggccuacacggauacauaucacuccuacgcgaauaagauccugcggacccaggagagcgccuguaacugcauugggggaaauuguuaucucaugaucacagacggcuccgcuucuggcgucagcgaaugccgcuuccugaaaauuagagaggggcggaucaucaaggagauuuuuccuaccggacgcgugaagcacaccgaagaguguacaugcggcuucgccuccaacaaaacgaucgaaugugcuugcagagauaauagcuacaccgccaagcggcccuuuguuaaacuuaacguggagacagacaccgccgaaauucgccugaugugcacagauaccuaucucgacacgccgagaccugaugacgggucuaucacaggacccugugaguccaauggcgacaaggggagcggaggcauuaaaggcggguucguccaucaacggauggagucuaagaucggacgcugguacagcagaaccauguccaaaaccgaacggaugggcauggggcuguaugugaaguacgauggagacccuugggcugauucugacgcgcuggccuuuagcggcgugauggucuccaugaaggagcccgggugguacagcuucggcuucgaaaucaaagauaagaaaugcgacguucccuguauuggaaucgagauggugcacgauggcgggaaggaaacauggcauucugcugccaccgccauuuauugccucaugggauccggccagcugcuuugggacacagugacgggggucgauauggcucuguga

SEQ ID NO: 221644 - RNA, 1401 nt, Artificial Sequence; identical to SEQ ID NO: 221194
  derived and/or modified CDS sequence (opt5) from neuraminidase__InfluenzaB__AGX21242

SEQ ID NO: 221645 - RNA, 1401 nt, Artificial Sequence; identical to SEQ ID NO: 221028
  derived and/or modified CDS sequence (opt5) from neuraminidase__InfluenzaB__AGX21253

SEQ ID NO: 221646 - RNA, 1401 nt, Artificial Sequence
  derived and/or modified CDS sequence (opt5) from neuraminidase__InfluenzaB__AGX21264
augcugcccagcaccauccagacacucacgcuguuccuuaccuccggcggggugcugcucucucuguacgucagcgccucccuuucuuaucugcucuacagcgacauucugcugaaguuuuccacaaccgagaucacagcuccuaccaugccgcucgauugcgccaacgcgucuaauguucaagcugugaacagaagcgccacaaaaggagugacccugcuucugcccgaaccugaguggacguauccccggcucuccuguccuggcagcaccuuccagaaggcccugcuuauuucuccccaccgcuuuggggaaaauaaaggaaacuccgcuccucugaucauuagagagccguucaucgccugcggccccaaugaauguaagcauuuugcucucacacacuacgccgcgcagccugggggauauuacaacggcacccggggcgaccgcaauaaacugagacaucugaucagcgucaagcucgggaagauucccacaguggagaacucuaucuuccacauggccgcuugguccggaagcgccugccaugauggcaaagaguggaccuauauugggguugacggaccugauaauaacgcucugcuuaaggugaaauacggcgaagccuacacggacacauaucacucuuacgcgaauaagauccugcggacccaggaguccgccuguaacugcauugggggaaauuguuaucucaugaucacagauggcagcgcuuccggcgucucugaaugccgcuuucugaaaauuagagaggggcggaucaucaaggagauuuuccccaccggacgcgugaagcacaccgaagaguguacaugcggcuuugccagcaacaaaacgaucgaaugugcuugcagagacaauuccuacaccgccaagcggccguucguuaaacuuaacguggagacagauaccgccgaaauucgccugaugugcacagacaccuaucucgauacgccuagacccaacgacgggagcaucacaggaccuugugagucugauggcgacaagggguccggaggcauuaaaggcggguuuguccaucaacggauggagagcaagaucggacgcugguacucuagaaccaugagcaaaaccgaacggaugggcauggggcuguaugugaaguacgacggagaucccugggcugacuccgaugcgcuggccuucucuggcgugauggucagcaugaaggagcccuccugguacagcuuuggguucgaaaucaaagacaagaaaugcgauguuccuuguauuggcaucgagauggugcacgacggaggcaaggaaacauggcauucugcugccaccgccauuuauugccucaugggguccggacagcugcuuugggauacagugacgggcgucgacauggcucuguga

SEQ ID NO: 221647 - RNA, 1401 nt, Artificial Sequence; identical to SEQ ID NO: 220967
  derived and/or modified CDS sequence (opt5) from neuraminidase__InfluenzaB__AGX21275

SEQ ID NO: 221648 - RNA, 1401 nt, Artificial Sequence; identical to SEQ ID NO: 221028
  derived and/or modified CDS sequence (opt5) from neuraminidase__InfluenzaB__AGX21286

SEQ ID NO: 221649 - RNA, 1401 nt, Artificial Sequence
  derived and/or modified CDS sequence (opt5) from neuraminidase__InfluenzaB__AGX21297
augcugcccagcaccauccagacacucacgcuguuccuuaccuccggcggggugcugcucucucuguacgucagcgccucccuuucuuaucugcucuacagcgacauucugcugaaguuuuccccuacagagaucaccgcuccgacaaugccccucgauugcgccaacgcgucuaauguucaagcugugaacagaagcgccaccaaaggagugacacugcuucugccugaacccgacuggaccuauccucggcucuccugucccggcagcacguuccagaaggcccugcuuauuucuccucaccgcuuuggggagaccaaaggaaauuccgcuccgcugaucauuagagaacccuucaucgccugcggcccuaacgaguguaagcauuuugcucucacacacuacgccgcgcagcccgggggauauuacaauggcacccggggcgaucgcaacaaacugagacaucugaucagcgucaagcucgggaagauuccuacaguggaaaauucuaucuuccacauggccgcuugguccggaagcgccugccaugacggcaaagaguggaccuauauugggguugauggacccgacaacaaugcucugcuuaaggugaaauacggcgaggccuacacggauacauaucacucuuacgcgaacaagauccugcggacccaggaauccgccuguaauugcauugggggaaacuguuaucucaugaucacagacggcagcgcuuccggcgucucugagugccgcuuucugaaaauuagagaagggcggaucaucaaggagauuuucccgaccggacgcgugaagcacaccgaggaauguacaugcggcuuugccagcaauaaaacgaucgagugugcuugcagagauaacuccuacaccgccaagcggccuuucguuaaacuuaauguggaaacagacaccgccgagguccgccugaugugcacagauaccuaucucgacacgcccagaccuaacgaugggagcauuacaggacccugugaaucugacggcgacaagggguccggaggcaucaaaggcggguuugugcaucaacggauggagagcaagauuggacgcugguacucuagaaccaugagcaaaaccgagcggaugggcauggggcuguaugugaaguacgauggagaccccugggcugauuccgacgcgcugacauucucuggcgucaugguuagcaugaaggaaccugggugguacuccuuuggcuucgagaucaaagauaagaaaugcgacgugccguguaucggaauugaaauggugcacgauggcgggaaggagaccuggcauagcgccgcuacagccaucuauugccucaugggaucuggccagcugcuuugggacacggucaccgggguggauauggcccuguga

SEQ ID NO: 221650 - RNA, 1401 nt, Artificial Sequence
  derived and/or modified CDS sequence (opt5) from neuraminidase__InfluenzaB__AGX21308
augcugcccagcaccauccagaugcucacacuguuccuuacguccggcggggugcugcucucucuguacgucagcgccucccuuucuuaucugcucuacagcgacauucugcugaaguuuuccccuaccgagaucacagcuccgaccaugccccucgauugcgccaacgcgucuaauguucacgcugugaacagaagcgccacaaaaggagugaccuuccugcuuccugaacccgaguggacauauccucggcuguccugucccggcagcaccuuucaaaaggcccuccugauuucuccucaucgcuucggggaaacgaaaggaaauuccgcuccgcuuaucauuagagagcccuuuaucgccugcggcccuaacgaauguaagcacuucgcucugacccauuacgccgcgcagcccgggggauauuacaauggcacacggggcgaccgcaacaaacucagacaccugaucagcgucaagcuggggaagauuccuaccguggaaaauucuaucuuucauauggccgcuugguccggaagcgccugccacgauggcaaagaguggacauauauugggguugacggacccgauaacaaugcucuccugaagaucaaauacggcgaggccuacaccgacacguaucacucuuacgcgaacaauauucuucggacacaggaguccgccuguaacugcaucgggggaaauuguuaucugaugauuaccgauggcagcgcuuccggcgugucugaaugccgcuuccucaagaucagagaggggcggaucauuaaagagaucuuuccgacaggacgcgucaagcauaccgaagaguguaccugcggcuucgccagcaacaagacaauugaaugugcuugcagagacaauuccuacacggccaaacggccuuuugugaagcugaacguugagaccgauacagccgaaauccgccuuaugugcaccgacacauaucuggauacccccagaccugacgaugggagcauuacgggacccugugagucuaacggcgacaaaggguccggaggcaucaagggcggguucgugcaccagcggauggcuagcaaaaucggacgcugguacucuagaacaaugagcaagaccgagcggaaaggcauggggcucuaugucaaguacgacggagaucccuggaccgacuccgaugcgcuggcccugagaggcgugauggugucuaugaaggaaccugggugguacagcuuuggcuucgagauuaaagacaagaaaugcgaugucccguguaucggaauugaaaugguucaugacggcgggaaggagacauggcacuccgcugccaccgccaucuauugccucaugggaagcggccaacugcuuugggauacagugacggggguggacauggcucuguga

SEQ ID NO: 221651 - RNA, 1401 nt, Artificial Sequence; identical to SEQ ID NO: 220972
  derived and/or modified CDS sequence (opt5) from neuraminidase__InfluenzaB__AGX21319

SEQ ID NO: 221652 - RNA, 1401 nt, Artificial Sequence; identical to SEQ ID NO: 220967
  derived and/or modified CDS sequence (opt5) from neuraminidase__InfluenzaB__AGX21330

SEQ ID NO: 221653 - RNA, 1401 nt, Artificial Sequence; identical to SEQ ID NO: 220967
  derived and/or modified CDS sequence (opt5) from neuraminidase__InfluenzaB__AGX21341

SEQ ID NO: 221654 - RNA, 1401 nt, Artificial Sequence; identical to SEQ ID NO: 221194
  derived and/or modified CDS sequence (opt5) from neuraminidase__InfluenzaB__AGX21352

SEQ ID NO: 221655 - RNA, 1401 nt, Artificial Sequence
  derived and/or modified CDS sequence (opt5) from neuraminidase__InfluenzaB__AGX21363
augcugcccagcaccauccagacacucacgcuguuccuuaccuccggcggggugcugcucucucuguacgucagcgccucccuuucuuaucugcucuacagcgacauucugcugaaguuuuccccuacagagaucaccgcuccgacaaugccccucgauugcgccaacgcgucuaauguucaagcugugaacagaagcgccaccaaaggagugacacugcuucugccugaacccgaguggaccuauccucggcucuccugucccggcagcacguuccagaaggcccugcuuauuucuucccaccgcuuuggggaaaccaaaggaaauagcgcuccucugaucauuagagagccguucgucgccugcggccccaacgaauguaagcauuuugcucucacacacuacgccgcgcagccugggggauauuacaauggcacccggggcgaccgcaacaaacugagacaucugaucucugugaagcucgggaagauccccacaguugaaaauuccauuuuccacauggccgcuuggagcggaucugccugccaugauggcaaagaguggaccuauaucgggguggacggaccugauaacaaugcucugcuuaaggucaaauacggcgaggccuacacggacacauaucacuccuacgcgaacaagauucugcggacccaggagagcgccuguaauugcaucgggggaaacuguuaucucaugauuacagauggcuccgcuucuggcgugagcgaaugccgcuuucugaaaaucagagaggggcggauuaucaaggagaucuuccccaccggacgcguuaagcacaccgaagaguguacaugcggcuuugccuccaauaaaacgauugaaugugcuugcagagacaacagcuacaccgccaagcggccguucgugaaacuuaaugucgagacagauaccgccgaaauccgccugaugugcacagacaccuaucucgauacgccuagacccaacgacgggucuauuacaggaccuugugaguccgauggcgacaaggggagcggaggcaucaaaggcggguuugugcaucaacggauggagucuaagauuggacgcugguacagcagaaccauguccaaaaccgaacggaugggcauggggcuguaugugaaguacgacggagaucccugggcugacucugaugcgcuggccuucagcggcgucaugguuuccaugaaggagcccgggugguacagcuuuggcuucgaaaucaaagacaagaaaugcgaugugccuuguaucggaauugagauggugcacgacggcgggaaggaaacauggcauucugcugccaccgccaucuauugccucaugggauccggccagcugcuuugggauacagucacggggguggacauggcucuguga

SEQ ID NO: 221656 - RNA, 1401 nt, Artificial Sequence; identical to SEQ ID NO: 220967
  derived and/or modified CDS sequence (opt5) from neuraminidase__InfluenzaB__AGX21374

SEQ ID NO: 221657 - RNA, 1401 nt, Artificial Sequence; identical to SEQ ID NO: 221028
  derived and/or modified CDS sequence (opt5) from neuraminidase__InfluenzaB__AGX21385

SEQ ID NO: 221658 - RNA, 1401 nt, Artificial Sequence; identical to SEQ ID NO: 221028
  derived and/or modified CDS sequence (opt5) from neuraminidase__InfluenzaB__AGX21396

SEQ ID NO: 221659 - RNA, 1401 nt, Artificial Sequence; identical to SEQ ID NO: 220967
  derived and/or modified CDS sequence (opt5) from neuraminidase__InfluenzaB__AGX21407

SEQ ID NO: 221660 - RNA, 1401 nt, Artificial Sequence; identical to SEQ ID NO: 220967
  derived and/or modified CDS sequence (opt5) from neuraminidase__InfluenzaB__AGX21418

SEQ ID NO: 221661 - RNA, 1401 nt, Artificial Sequence
  derived and/or modified CDS sequence (opt5) from neuraminidase__InfluenzaB__AGX21429
augcugcccagcaccauccagacacucacgcuguuccuuaccuccggcggggugcugcucucucuguacgucagcgcccuucuguccuaucuccugcacucugacauucugcucaaguuuagcccuacagagaucaccgcuccgacaaugucccuggauugcgccaacgcgucuaauguucaagcugugaacagaagcgugaccaaaggagucacauuccuucugcccgaaccugaguggaccuacccccggcucuccuguccuggcagcacguuucagaaggcccugcuuauuucuccccaucgcuucggggaaaccaaaggaaauuccgccccucugaucauuagagagccguuuaucgcuugcggccccaacgaauguaagcacuucgcccucacacauuaugcugcccagccugggggauacuauaauggcacccggggcgaccgcaacaaacugagacaccugaucagcgugaagcucgggaagauucccacaguugaaaauucuaucuuucauauggcggccugguccggaagcgcuugccacgauggcaaagaguggaccuacauugggguggacggaccugauaacgacgcccugcuuaaggucaaauauggcgaggcuuacacggauacauaccacucuuaugccaauaagauccugcggacccaggaguccgcguguaacugcauugggggaaauuguuaccucaugaucacagacggcagcgccuccggcgugucugaaugccgcuuccugaaaauuagagaggggcggaucaucaaggagauuuuucccaccggacgcguuaagcauaccgaagaguguacaugcggcuucgcuagcaacaaaacgaucgaaugugccugcagagauaauuccuauaccgcuaagcggccguuugugaaacuuaacgucgagacagacaccgccgaaauucgccugaugugcacagauaccuaccucgacacgccuagacccgaugacgggagcaucacaggaccuugugagucuaauggcgacaagggguccggaggcauuaaaggcggguucgugcaccaacggauggagagcaagaucggacgcugguauucuagaaccaugagcaaaaccgaacggaugggcauggggcuguacgugaaguaugauggagaccccugggccgauuccgacgcucuggcguuuucuggcgucaugguuagcaugaaggagcccgggugguacuccuucggcuucgaaaucaaagauaagaaaugcgacgugccuuguauuggaaucgagauggugcaugauggcgggaaggaaacauggcacagcgccgcuaccgccauuuacugccucaugggaucuggccagcugcuuugggacacagucacggggguggauauggcccuguga

SEQ ID NO: 221662 - RNA, 1401 nt, Artificial Sequence; identical to SEQ ID NO: 221028
  derived and/or modified CDS sequence (opt5) from neuraminidase__InfluenzaB__AGX21440

SEQ ID NO: 221663 - RNA, 1401 nt, Artificial Sequence; identical to SEQ ID NO: 221028
  derived and/or modified CDS sequence (opt5) from neuraminidase__InfluenzaB__AGX21451

SEQ ID NO: 221664 - RNA, 1401 nt, Artificial Sequence; identical to SEQ ID NO: 221612
  derived and/or modified CDS sequence (opt5) from neuraminidase__InfluenzaB__AGX21462

SEQ ID NO: 221665 - RNA, 1401 nt, Artificial Sequence
  derived and/or modified CDS sequence (opt5) from neuraminidase__InfluenzaB__AGX21473
augcugcccagcaccauccagacacucacgcuguuccuuaccuccggcggggugcugcucucucuguacgucagcgcccuucuguccuaucuccuguacucugacauucugcucaaguuuagcccuacagagaucaccgcuccgacaaugucccuggauugcgccaacgcgucuaauguucaagcugugaacagaagcgccaccaaaggagugacauuccuucugcccgaaccugaguggaccuauccccggcucuccuguccuggcagcacguuucagcgcgcccugcuuauuucuccccacagauucggggaagcuaagggaaauuccgccccucugaucauucgggagccguuuaucgcuugcggccccaacgaauguaaacauuucgcccucacccacuacgcggcccagccugggggauauuacaauggcacacgcggcgacagaaacaagcugcggcaucugaucagcgucaaacucgggaagauucccaccguggaaaauucuaucuuucacauggcugccugguccggaagcgcuugccaugauggcaaggaguggacauauauugggguugacggaccugauaacgacgcccugcuuaaagugaaguacggcgaggcguacaccgauacguaucacucuuacgccaauaaaauccugcgcacacaggaguccgcuuguaacugcauugggggaaauuguuaucucaugaucaccgacggcagcgccuccggcgucucugaaugcagauuccugaagauucgggaggggcgcaucaucaaagagauucuucccacaggaagagugaagcacaccgaagaguguaccugcggcuuugcuagcaacaagacaaucgaaugugccugccgggauaauuccuacacggccaaacgcccguucguuaagcugaacguggagaccgacacagcugaaauuagacucaugugcaccgauacauaucuggacaccccucggcccgaugacgggagcaucacgggaccuugugagucuaauggcgacaaaggguccggaggcauuaagggcggguuuguccaucaacgcauggagagcaaaaucggaagaugguacucucggacaaugagcaagaccgaaagaaugggcauggggcuguaugugaaauacgauggagaccccugggcggauuccgacgcccucguguucucuggcgucaugguuagcaugaaggagcccgggugguacuccuuuggcuucgaaaucaaggauaaaaagugcgacgugccuuguauuggaaucgagauggugcacgauggcgggaaagaaaccuggcauagcgcugccacagccauuuauugccugaugggaucuggccagcuucugugggacaccgucacagggguggauauggcucucuga

SEQ ID NO: 221666 - RNA, 1401 nt, Artificial Sequence; identical to SEQ ID NO: 220972
  derived and/or modified CDS sequence (opt5) from neuraminidase__InfluenzaB__AGX21484

SEQ ID NO: 221667 - RNA, 1401 nt, Artificial Sequence; identical to SEQ ID NO: 221028
  derived and/or modified CDS sequence (opt5) from neuraminidase__InfluenzaB__AGX21495

SEQ ID NO: 221668 - RNA, 1401 nt, Artificial Sequence; identical to SEQ ID NO: 221028
  derived and/or modified CDS sequence (opt5) from neuraminidase__InfluenzaB__AGX21506

SEQ ID NO: 221669 - RNA, 1401 nt, Artificial Sequence
  derived and/or modified CDS sequence (opt5) from neuraminidase__InfluenzaB__AGX21517
augcugcccagcaccauccagacacucacgcuguuccuuaccuccggcggggugcugcucucucuguacgucagcgcccuucuguccuaucuccuguacucuaacauucugcucaaguuuagcccuacagagaucaccgcuccgacaaugucccuggacugcgccaaugcgucuaacguucaagcugugaauagaagcgccaccaaaggagugacauuccuucugcccgaaccugaguggaccuauccccggcucuccuguccuggcagcacguuucagaaggcccugcuuauuucuccccaccgcuucggggaaaccaaaggaaacuccgcuccucugaucauuagagagccguuuaucgccugcggccccaaugaauguaagcauuucgcucucacacacuacgccgcgcagccugggggauauuacaacggcacccggggcgaucgcaauaaacugagacaucugaucagcgucaagcucgggaagauucccacaguggagaacucuaucuuucacauggccgcuugguccggaagcgccugccaugacggcaaagaguggaccuauauugggguugauggaccugacaaugaugcucugcuuaaggugaaauacggcgaagccuacacggacacauaucacucuuacgcgaacaagauccugcggacccaggaguccgccuguaauugcauugggggaaacuguuaucucaugaucacagauggcagcgcuuccggcgucucugaaugccgcuuccugaaaauuagagaggggcggaucaucaaggagauuuuucccaccggacgcgugaagcacaccgaagaguguacaugcggcuucgccagcaauaaaacgaucgaaugugcuugcagagacaacuccuacaccgccaagcggccguuuguuaaacuuaauguggagacagauaccgccgaaauucgccugaugugcacagacaccuaucucgauacgccuagacccgacgaugggagcaucacaggaccuugugagucuaacggcgacaagggguccggaggcauuaaaggcggguucguccaucaacggauggagagcaagaucggacgcugguacucuagaaccaugagcaaaaccgaacggaugggcauggggcuguaugugaaguacgacggagaucccugggcugacuccgaugcgcuggccuuuucuggcgugauggucagcaugaaggagcccgggugguacuccuucggcuucgaaaucaaagacaagaaaugcgauguuccuuguauuggaaucgagauggugcacgacggcgggaaggaaacauggcauagcgcugccaccgccauuuauugccucaugggaucuggccagcugcuuugggauacagugacgggggucgacauggcucuguga

SEQ ID NO: 221670 - RNA, 1401 nt, Artificial Sequence
  derived and/or modified CDS sequence (opt5) from neuraminidase__InfluenzaB__AGX21528
augcugcccagcaccauccagacacucacgcuguuccuuaccuccggcggggugcugcucucucuguacgucagcgccucccuuucuuaucugcucuacagcgacauucugcugaaguuuuccccuacagagaucaccgcuccgacaaugccccucgauugcgccaacgcgucuaauguucaagcugugaacagaagcgccaccaaaggagugacacugcuucugccugaacccgaguggaccuauccucggcucuccugucccggcagcacguuccagaaggcccugcuuauuucuccucaccgcuuuggggaaaccaaaggaaauuccgcuccgcugaucauuagagagcccuucaucgccugcggcccuaacgaauguaagcauuuugcucucacacacuacgccgcgcagcccgggggauauuacaauggcacccggggcgaccgcaacaaacugagacaucugaucagcgucaagcucgggaagauuccuacaguggaaaauucuaucuuccacauggccgcuugguccggaagcgccugccaugauggcaaagaguggaccuauauugggguugacggacccgauaacaaugcucugcuuaaggugaaauacggcgaggccuacacggacacauaucacucuuacgcgaacaagauccugcggacccaggaguccgccuguaauugcauugggggaaacuguuaucucaugaucacagauggcagcgcuuccggcgucucugaaugccgcuuucugaaaauuagagaggggcggaucaucaaggagauuuucccgaccggacgcgugaagcacaccgaagaguguacaugcggcuuugccagcaauaaaacgaucgaaugugcuugcagagacaacuccuacaccgccaagcggccuuucguuaaacuuaauguggagacagauaccgccgaaguccgccugaugugcacagacaccuaucucgauacgcccagaccuaacgacgggagcauuacaggacccugugagucugauggcgacaagggguccggaggcaucaaaggcggguuugugcaucaacggauggagagcaagauuggacgcugguacucuagaaccaugagcaaaaccgaacggaugggcauggggcuguaugugaaguacgacggagaucccugggcugacuccgaugcgcugacauucucuggcgucaugguuagcaugaaggagccugggugguacuccuuuggcuucgaaaucaaagacaagaaaugcgaugugccguguaucggaauugagauggugcacgacagcggcaaggaaaccuggcauucugccgcuacagccaucuauugccucaugggguccggacagcugcuuugggauacggucaccggcguggacauggcccuguga

SEQ ID NO: 221671 - RNA, 1401 nt, Artificial Sequence; identical to SEQ ID NO: 221028
  derived and/or modified CDS sequence (opt5) from neuraminidase__InfluenzaB__AGX21539

SEQ ID NO: 221672 - RNA, 1401 nt, Artificial Sequence
  derived and/or modified CDS sequence (opt5) from neuraminidase__InfluenzaB__AGX21550
augcugcccagcaccauccagacacucacgcuguuccuuaccuccggcggggugcugcucucucuguacgucagcgccucccuuucuuaucugcucuacagcgacauucugcugaaguuuuccccuacagagaucaccgcuccgacaaugccccucgauugcgccaacgcgucuaauguucaagcugugaacagaagcgccaccaaaggagugacacugcuucugccugaacccgaguggaccuauccucggcucuccugucccggcagcacguuccagaaggcccugcuuauuucuccucaccgcuuuggggaaaccaaaggaaauuccgcuccgcugaucauuagagagcccuucaucgccugcggcccuaacgaauguaagcauuuugcucucacacacuacgccgcgcagcccgggggauauuacaauggcacccggggcgaccgcaacaaacugagacaucugaucagcgucaagcucgggaagauuccuacaguggaaaauucuaucuuccacauggccgcuugguccggaagcgccugccaugauggcaaagaguggaccuauauugggguugacggacccgauaacaaugcucugcuuaaggugaaauacggcgaggccuacacggacacauaucacucuuacgcgaacaagauccugcggacccaggaguccgccuguaauugcauugggggaaacuguuaucucaugaucacagauggcagcgcuuccggcgucucugaaugccgcuuucugaaaauuagagaggggcggaucaucaaggagauuuucccggccggacgcgugaagcacaccgaagaguguaccugcggcuuugcuagcaauaaaacaaucgaaugugccugcagagacaacuccuacacggccaagcggccuuucguuaaacuuaauguggagaccgauacagcugaaguccgccugaugugcaccgacacauaucucgauacccccagaccuaacgacgggagcauuacgggacccugugagucugauggcgacaagggguccggaggcaucaaaggcggguuugugcaucaacggauggagagcaagauuggacgcugguacucuagaacaaugagcaaaaccgaacggaugggcauggggcuguaugugaaguacgacggagaucccugggcggacuccgaugcccugaccuucucuggcgucaugguuagcaugaaggagccugggugguacuccuuuggcuucgaaaucaaagacaagaaaugcgaugugccguguaucggaauugagauggugcacgacggcgggaaggaaacauggcauagcgcugccaccgccaucuauugccucaugggaucuggccagcugcuuugggauacagucacggggguggacauggcucuguga

SEQ ID NO: 221673 - RNA, 1401 nt, Artificial Sequence
  derived and/or modified CDS sequence (opt5) from neuraminidase__InfluenzaB__AGX21561
augcugcccagcaccauccagacacucacgcuguuccuuaccuccggcggggugcugcucucucuguacgucagcgccucccuuucuuaucugcucuacagcgacauucugcugaaguuuuccccuacagagaucaccgcuccgacaaugccccucgauugcgccaacgcgucuaauguucaagcugugaacagaagcgccaccaaaggagugacacugcuucugccugaacccgaguggaccuauccucggcucuccugucccggcagcacguuccagaaggcccugcuuauuucuccucaccgcuuuggggaaaccaaaggaaauuccgcuccgcugaucauuagagagcccuucaucgccugcggcccuaacgaauguaagcauuuugcucucacacacuacgccgcgcagcccgggggauauuacaauggcacccggggcgaccgcaacaaacugagacaucugaucagcgucaagcucgggaagauuccuacaguggaaaauucuaucuuccacauggccgcuugguccggaagcgccugccaugauggcaaagaguggaccuauauugggguugacggacccgauaacaaugcucugcuuaaggugaaauacggcgaggccuacacggacacauaucacucuuacgcgaacaagauccugcggacccaggaguccgccuguaauugcauugggggaaacuguuaucucaugaucacagauggcagcgcuuccggcgucucugaaugccgcuuucugaaagugagagaggggcggauuaucaaggagaucuucccgaccggacgcguuaagcacaccgaagaguguacaugcggcuuugccagcaauaaaacgauugaaugugcuugcagagacaacuccuacaccgccaagcggccuuucgugaaacuuaaugucgagacagauaccgccgaagugcgccugaugugcacagacaccuaucucgauacgcccagaccuaacgacgggagcaucacaggacccugugagucugauggcgacaagggguccggaggcauuaaaggcggguuugugcaucaacggauggagagcaagaucggacgcugguacucuagaaccaugagcaaaaccgaacggaugggcauggggcuguaugucaaguacgacggagaucccugggcugacuccgaugcgcugacauucucuggcguuauggugagcaugaaggagccugggugguacuccuuuggcuucgaaauuaaagacaagaaaugcgaugugccguguaucggaaucgagaugguccacgacggcgggaaggaaaccuggcauagcgccgcuacagccauuuauugccucaugggaucuggccagcugcuuugggauacggugaccgggguugacauggcccuguga

SEQ ID NO: 221674 - RNA, 1401 nt, Artificial Sequence; identical to SEQ ID NO: 220972
  derived and/or modified CDS sequence (opt5) from neuraminidase__InfluenzaB__AGX21572

SEQ ID NO: 221675 - RNA, 1401 nt, Artificial Sequence
  derived and/or modified CDS sequence (opt5) from neuraminidase__InfluenzaB__AGX21583
augcugcccagcaccauccagacacucacgcuguuccuuaccuccggcggggugcugcucucucuguacgucagcgcccuucuguccuaucuccuguacucugacauucugcucaaguuuagcccuacagagaucaccgcuccgacaaugucccuggauugcgccaacgcgucuaauguucaagcugugaacagaagcgccaccaaaggagugacauuccuucugcccgaaccugaguggaccuauccccggcucuccuguccuggcagcacguuucagcgcgcccugcuuauuucuccccacagauucggggaagcuaagggaaauuccgccccucugaucauucgggagccguuuaucgcuugcggccccaacgaauguaaacauuucgcccucacccacuacgcggcccagccugggggauauuacaauggcacacgcggcgacagaaacaagcugcggcaucugaucagcgucaaacucgggaagauucccaccguggaaaauucuaucuuucacauggcugccugguccggaagcgcuugccaugauggcaaggaguggacauauauugggguugacggaccugauaacgacgcccugcuuaaagugaaguacggcgaggcguacaccgauacguaucacucuuacgccaauaaaauccugcgcacacaggaguccgcuuguaacugcauugggggaaauuguuaucucaugaucaccgacggcagcgccuccggcgucucugaaugcagauuccugaagauucgggaggggcgcaucaucaaagagauucuucccacaggaagagugaagcacaccgaagaguguaccugcggcuuugcuagcaacaagacaaucgaaugugccugccgggauaauuccuacacggccaaacgcccguucguuaagcugaacguggagaccgacacagcugaaauuagacucaugugcaccgauacauaucuggacaccccucggcccgaugacgggagcaucacgggaccuugugagucuaauggcgacaaaggguccggaggcauuaagggcggguuuguccaucaacgcauggagagcaaaaucggaagaugguacucucggacaaugagcaagaccgaaagaaugggcauggagcuguaugugaaauacgauggggaccccugggcggauuccgacgcccucgcuuucucuggagugauggucagcaugaaggaacccggcugguacuccuuuggguucgagaucaaggauaaaaagugcgacguuccuuguauuggcaucgaaauggugcacgauggaggcaaagagaccuggcauagcgccgccacagcuauuuauugccugauggggucuggacagcuucugugggacaccgugacaggcgucgauauggcccucuga

SEQ ID NO: 221676 - RNA, 1401 nt, Artificial Sequence; identical to SEQ ID NO: 220972
  derived and/or modified CDS sequence (opt5) from neuraminidase__InfluenzaB__AGX21594

SEQ ID NO: 221677 - RNA, 1401 nt, Artificial Sequence; identical to SEQ ID NO: 221194
  derived and/or modified CDS sequence (opt5) from neuraminidase__InfluenzaB__AGX21605

SEQ ID NO: 221678 - RNA, 1401 nt, Artificial Sequence
  derived and/or modified CDS sequence (opt5) from neuraminidase__InfluenzaB__AGX21615
augcugcccagcaccauccagacacucacgcuguuccuuaccuccggcggggugcugcucucucuguacgucagcgccucccuuucuuaucugcucuacagcgacauucugcugaaguuuuccacaaccgagaucacagcuccuaccaugccgcucgauugcgccaacgcgucuaauguucaagcugugaacagaagcgccacaaaaggagugacccugcuucugcccgaaccugaguggacguauccccggcucuccuguccuggcagcaccuuccagaaggcccugcuuauuucuccccaccgcuuuggggaaaauaaaggaaacuccgcuccucugaucauuagagagccguucaucgccugcggccccaaugaauguaagcauuuugcucucacacacuacgccgcgcagccugggggauauuacaacggcacccggggcgaccgcaauaaacugagacaucugaucagcgucaagcucgggaagauucccacaguggagaacucuaucuuccacauggccgcuugguccggaagcgccugccaugauggcaaagaguggaccuauauugggguugacggaccugauaauaacgcucugcuuaaggugaaauacggcgaagccuacacggacacauaucacucuuacgcgaauaagauccugcggacccaggaguccgccuguaacugcauugggggaaauuguuaucucaugaucacagauggcagcgcuuccggcgucucugaaugccgcuuucugaaaauuagagaggggcggaucaucaaggagauuuuccccaccggacgcgugaagcacaccgaagaguguacaugcggcuuugccagcaacaaaacgaucgaaugugcuugcagagacaauuccuacaccgccaagcggccguucguuaaacuuaacguggagacagauaccgccgaaauucgccugaugugcacagacaccuaucucgauacgccuagacccaacgacgggagcaucacaggaccuugugagucugauggcgacaagggguccggaggcauuaaaggcggguuuguccaucaacggauggagagcaagaucggacgcugguacucuagaaccaugagcaaaaccgaacggaugggcauggggcuguaugugaaguacgacggagaucccugggcugacuccgaugcgcuggccuucucuggcgugauggucagcaugaaggagcccgggugguacuccuuuggcuucgaaaucaaagacaagaaaugcgauguuccuuguauuggaaucgagauggugcacgacggcgggaaggaaacauggcauagcgcugccaccgccauuuauugccucaugggaucuggccagcugcuuugggauacagugacgggggucgacauggcucuguga

SEQ ID NO: 221679 - RNA, 1401 nt, Artificial Sequence; identical to SEQ ID NO: 221028
  derived and/or modified CDS sequence (opt5) from neuraminidase__InfluenzaB__AGX21626

SEQ ID NO: 221680 - RNA, 1401 nt, Artificial Sequence; identical to SEQ ID NO: 221028
  derived and/or modified CDS sequence (opt5) from neuraminidase__InfluenzaB__AGX21637

SEQ ID NO: 221681 - RNA, 1401 nt, Artificial Sequence; identical to SEQ ID NO: 221028
  derived and/or modified CDS sequence (opt5) from neuraminidase__InfluenzaB__AGX21648

SEQ ID NO: 221682 - RNA, 1401 nt, Artificial Sequence
  derived and/or modified CDS sequence (opt5) from neuraminidase__InfluenzaB__AGX21659
augcugcccagcaccauccagacacucacgcuguuccuuaccuccggcggggugcugcucucucuguacgucagcgcccuucuguccuaucuccuguacucugacauucugcucaaguuuagcccuacagagaucaccgcuccgacaaugucccuggauugcgccaacgcgucuaauguucaagcugugaacagaagcgccaccaaaggagugacauuccuucugcccgaaccugaguggaccuauccccggcucuccuguccuggcagcacguuucagaaggcccugcuuauuucuccccaccgcuucggggaaaccaaaggaaauuccgcuccucugaucauuagagagccguuuaucgccugcggccccaacgaauguaagcauuucgcucucacacacuacgccgcgcagccugggggauauuacaauggcacccggggcgaccgcaacaaacugagacaucuggucagcgugaagcucgggaagauccccacaguugaaaauucuauuuuucacauggccgcuugguccggaagcgccugccaugauggcaaagaguggaccuauaucgggguggacggaccugauaacgacgcucugcuuaaggucaaauacggcgaggccuacacggauacauaucacucuuacgcgaauaagauucugcggacccaggaguccgccuguaacugcaucgggggaaauuguuaucucaugauuacagacggcagcgcuuccggcgugucugaaugccgcuuccugaaaaucagagaggggcggauuaucaaggagaucuuucccaccggacgcguuaagcacaccgaagaguguacaugcggcuucgccagcaacaaaacgauugaaugugcuugcagagauaauuccuacaccgccaagcggccguuugugaaacuuaacgucgagacagacaccgccgaaauccgccugaugugcacagauaccuaucucgacacgccuagacccgaugacgggagcauuacaggaccuugugagucuaauggcgacaagggguccggaggcaucaaaggcggguucgugcaucaacggauggagagcaagauuggacgcugguacucuagaaccaugagcaaaaccgaacggaugggcauggggcuguaugugaaguacggaggcgaucccugggcugacuccgaugcgcuggccuuuucuggggucaugguuagcaugaaggagcccggcugguacuccuucggauucgaaaucaaagacaagaaaugcgaugugccuuguaucggcauugagauggugcacgacgggggaaaggaaacauggcauagcgcugccaccgccaucuauugccucaugggcucugggcagcugcuuugggauacagucacgggaguggacauggcucuguga

SEQ ID NO: 221683 - RNA, 1401 nt, Artificial Sequence
  derived and/or modified CDS sequence (opt5) from neuraminidase__InfluenzaB__AGX21670
augcugcccagcaccauccagacacucacgcuguuccuuaccuccggcggggugcugcucucucuguacgucagcgcccuucuguccuaucuccuguacucugacauucugcucaaguuuagcccuacagagaucaccgcuccgacaaugucccuggauugcgccaacgcgucuaauguucaagcugugaacagaagcgccaccaaaggagugacauuccuucugcccgaaccugaguggaccuauccccggcucuccuguccuggcagcacguuucagaaggcccugcuuauuucuccccaccgcuucggggaaaccaaaggaaauuccgcuccucugaucauuagagagccguuuaucgccugcggccccaacgaauguaagcauuucgcucucacacacuacgccgcgcagccugggggauauuacaauggcacccggggcgaccgcaacaaacugagacaucugaucagcgucaagcucgggaagauucccacaguggaaaauucuaucuuucacauggccgcuugguccggaagcgccugccaugauggcaaagaguggaccuauauugggguugacggaccugauaacgacgcucugcuuaaggugaaauacggcgaggccuacacggauacauaucacucuuacgcgaauaagauccugcggacccaggaguccgccuguaacugcauugggggaaauuguuaucucaugaucacagacggcagcgcuuccggcgucucugaaugccgcuuccugaaaauuagagaggggcggaucaucaaggagauuuuucccaccggacgcgugaagcacaccgaagaguguacaugcggcuucgccagcaacaaaacgaucgaaugugcuugcagagauaauuccuacaccgccaagcggccguuuguuaaacuuaacguggagacagacaccgccgaaauucgccugaugugcacagauaccuaucucgacacgccuagacccgaugacgggagcaucacaggaccuugugagucuaauggcgacaagggguccggaggcauuaaaggcggguucguccaucaacggauggagagcaagaucggacgcugguacucuagaaccaugagcaaaaccgaacggaugggcauggggcuguaugugaaguacgauggagaccccugggcugauuccgacgcgcuggccuuuucuggcgugauggucagcaugaaggagcccgggugguacuccuucggcuucgaaaucaaagauaagaaaugcgacguuccuuguauuggaacagagauggugcacgauggcgggaaggaaaccuggcauagcgcugccacagccaucuauugccucaugggaucuggccagcugcuuugggacacggugaccggggucgauauggcucuguga

SEQ ID NO: 221684 - RNA, 1401 nt, Artificial Sequence
  derived and/or modified CDS sequence (opt5) from neuraminidase__InfluenzaB__AGX21681
augcugcccagcaccauccagaugcucacacuguuccuuacguccggcggggugcugcucucucuguacgucagcgccucccuuucuuaucugcucuacagcgacauucugcugaaguuuuccccuaccgagaucacagcuccgaccaugccccucgauugcgccaacgcgucuaauguucacgcugugaacagaagcgccacaaaaggagugaccuuccugcuuccugaacccgaguggacauauccucggcuguccugucccggcagcaccuuucaaaaggcccuccugauuucuccucaucgcuucggggaaacgaaaggaaauuccgcuccgcuuaucauuagagagcccuuuaucgccugcggcccuaacgaauguaagcacuucgcucugacccauuacgccgcgcagcccgggggauauuacaauggcacacggggcgaccgcaacaaacucagacaccugaucagcgucaagcuggggaagauuccuaccguggaaaauucuaucuuucauauggccgcuugguccggaagcgccugccacgauggcaaagaguggacauauauugggguugacggacccgauaacaaugcucuccugaagaucaaauacggcgaggccuacaccgacacguaucacucuuacgcgaacaauauucuucggacacaggaguccgccuguaacugcaucgggggaaauuguuaucugaugauuaccgauggcagcgcuuccggcgugucugaaugccgcuuccucaagaucagagaggggcggaucauuaaagagaucuuuccgacaggacgcgucaagcauaccgaagaguguaccugcggcuucgccagcaacaagacaauugaaugugcuugcagagacaauuccuacacggccaaacggccuuuugugaagcugaacguugagaccgauacagccgaaauccgccuuaugugcaccgacacauaucuggauacccccagaccugacgaugggagcauuacgggacccugugagucuaacggcgacaaagggaauggaggcaucaagggcggguucgugcaccagcggauggcuuccaaaaucggacgcugguacagcagaacaaugucuaagaccgagcggaaaggcauggggcucuaugucaaguacgacggagaucccuggaccgacagcgaugcgcuggccuuuagaggcgugaugguguccaugaaggaaccugggugguacucuuucggcuucgagauuaaagacaagaaaugcgaugucccguguaucggaauugaaaugguucaugacggcgggaaggagacauggcacagcgcugccaccgccaucuauugccugaugggauccggccaacuccugugggauacagugacggggguggacauggcucuuuga

SEQ ID NO: 221685 - RNA, 1401 nt, Artificial Sequence; identical to SEQ ID NO: 220967
  derived and/or modified CDS sequence (opt5) from neuraminidase__InfluenzaB__AGX21692

SEQ ID NO: 221686 - RNA, 1401 nt, Artificial Sequence; identical to SEQ ID NO: 221194
  derived and/or modified CDS sequence (opt5) from neuraminidase__InfluenzaB__AGX21703

SEQ ID NO: 221687 - RNA, 1401 nt, Artificial Sequence
  derived and/or modified CDS sequence (opt5) from neuraminidase__InfluenzaB__AGX21714
augcugcccagcaccauccagacacucacgcuguuccuuaccuccggcggggugcugcucucucuguacgucagcgccucccuuucuuaucugcucuacagcgacauucugcugaaguuuuccccuacagagaucaccgcuccggccaugccccucgauugcgcgaacgcuucuaauguucaagccgugaacagaagcgccacaaaaggacugacccuucugcucccugaacccgaguggacauauccucggcuguccugucccggcagcaccuuccagaaggcccuucugauuucuccucaccgcuuuggggaaacgaaaggaaauuccgcuccgcucaucauuagagagcccuucaucgcuugcggcccuaacgaauguaagcauuuugcccugacccacuacgcggcccagcccgggggauauuacaauggcacacggggcgaccgcaacaaacugagacaucucaucagcgugaagcuggggaagauuccuaccgucgaaaauucuaucuuccacauggcugccugguccggaagcgcuugccaugauggcaaagaguggacauauauugggguggacggacccgauaacaaugcccuucugaagguuaaauacggcgaggcguacaccgacacguaucacucuuacgccaacaagauccuccggacacaggaguccgcuuguaauugcauugggggaaacuguuaucugaugaucaccgauggcagcgccuccggcgugucugaaugccgcuuucuuaaaauuagagaggggcggaucaucaaggagauuuucccgacaggacgcgucaagcacaccgaagaguguaccugcggcuuugcuagcaauaaaacaaucgaaugugccugcagagacaacuccuacacggccaagcggccuuucgugaaacugaauguugagaccgauacagcugaaauucgccucaugugcaccgacacauaucuggauacccccagaccuaacgacgggagcaucacgggacccugugagucugauggcgacaagggguccggaggcauuaaaggcggguuugugcaucaacggauggagagcaagaucggacgcugguacucuagaacaaugagcaaaaccgaacggaugggcauggggcuguaugucaaguacgacggagaucccugggcggacuccgaugcccucgcuuucucuggcgugauggugagcaugaaggagccugggugguacuccuuuggcuucgaaaucaaagacaagaaaugcgaugucccguguauuggaaucgagaugguucacgacggcgggaaggaaaccuggcauagcgccgccacagcuauuuauugccugaugggaucuggccagcuucugugggauaccgugacagggguggacauggcccucuga

SEQ ID NO: 221688 - RNA, 1401 nt, Artificial Sequence
  derived and/or modified CDS sequence (opt5) from neuraminidase__InfluenzaB__AGX21725
augcugcccagcaccauccagaugcucacacuguuccuuacguccggcggggugcugcucucucuguacgucagcgccucccuuucuuaucugcucuacagcgacauucugcugaaguuuuccccuaccgagaucacagcuccgaccaugccccucgauugcgccaacgcgucuaauguucacgcugugaacagaagcgccacaaaaggagugaccuuccugcuuccugaacccgaguggacauauccucggcuguccugucccggcagcaccuuucaacgcgcccuccugauuucuccucauagauucggggaaacgaagggaaauuccgcuccgcuuaucauucgggagcccuuuaucgccugcggcccuaacgaauguaaacacuucgcucugacccauuacgccgcgcagcccgggggauauuacaauggcacacgcggcgacagaaacaagcuccggcaccugaucagcgucaaacuggggaagauuccuaccguggaaaauucuaucuuucauauggccgcuugguccggaagcgccugccacgauggcaaggaguggacauauauugggguugacggacccgauaacaaugcucuccugaaaaucaaguacggcgaggccuacaccgacacguaucacucuuacgcgaacaauauucuucgcacacaggaguccgccuguaacugcaucgggggaaauuguuaucugaugauuaccgauggcagcgcuuccggcgugucugaaugcagauuccucaaaauccgggaggggcgcaucauuaaggagaucuuuccgacaggaagagucaaacauaccgaagaguguaccugcggcuucgccagcaacaagacaauugaaugugcuugccgggacaauuccuacacggccaagcgcccuuuugugaaacugaacguugagaccgauacagccgaaaucagacuuaugugcaccgacacauaucuggauacgccccggccugacgaugggagcauuaccggacccugugagucuaacggcgacaagggguccggaggcaucaaaggcggguucgugcaccagcgcauggcuagcaagaucggaagaugguacucucggacaaugagcaaaaccgagagaaagggcauggggcucuaugucaaauacgacggagaucccuggaccgacuccgaugcgcuggccuuucgcggcgugauggugucuaugaaggaaccugggugguacagcuucggcuucgagauuaaggacaaaaagugcgaugucccguguaucggaauugaaaugguucaugacggcgggaaagagacauggcacuccgcugccaccgccaucuauugccugaugggaagcggccaacuccugugggauacagugacggggguggacauggcucuuuga

SEQ ID NO: 221689 - RNA, 1401 nt, Artificial Sequence
  derived and/or modified CDS sequence (opt5) from neuraminidase__InfluenzaB__AGX21747
augcugcccagcaccauccagacacucacgcuguuccuuaccuccggcggggugcugcucucucuguacgucagcgccucccuuucuuaucugcucuacagcgacauucugcugaagguuucccaaacagagaucaccgcuccuacaaugccgcucgauugcgccaacgcgucuaaugugcaggcugugaacagaagcgccaccaaaggagucacacugcuucugcccgaaccugaguggaccuauccccggcucuccuguccuggcagcacguuucagaaggcccugcuuauuucuccccaccgcuucggggaaaccaaaggaaauuccgcuccucugaucauuagagagccguuuaucgccugcggccccaaggaauguaaacauuucgcucucacacacuacgccgcgcagccugggggauauuacaacggcacccgggaggaccgcaauaagcugagacaucugaucagcgugaagcucggcaaaauucccacaguugagaacucuaucuuucacauggccgcuugguccgggagcgccugccaugauggacgggaauggaccuauauuggcguggacgggccugauucuaaugcucugcuuaagaucaaauacggagaggccuacacggacacauaucacuccuacgcgaagaacauucugcgcacccaagaaagcgccuguaauugcaucggcggggauuguuaucucaugauuacagacggauccgcuucuggcaucagcgagugcagauuccugaaaauccgggagggccgcauuaucaaggaaauuuuucccaccgggagagucaagcacaccgaggaauguacaugcggauucgccuccaacaaaacgaucgagugugcuugccgggauaauagcuacaccgccaagcgcccguuugugaaacuuaacguugaaacagacaccgccgagauuagacugaugugcacagagaccuaucucgauacgccucggcccgacgauggcucuaucacagggccuugugaauccaauggagacaagggcagcgggggaaucaaaggcggcuucgugcaucagcgcauggcuucuaagauugggagaugguacagccggaccauguccaaaaccaagagaaugggaaugggccuguaugucaaguacgacggggaucccuggacagacucugaggcgcuggcccucagcggagugaugguguccauggaggaacccggcugguacagcuuuggguucgaaaucaaagauaagaaaugcgacgucccuuguauuggcaucgagaugguucacgauggaggcaagaccacauggcauucugcugccacggccauuuauugccugaugggguccggacagcuucugugggacaccgugacaggcguggauauggcucucuga

SEQ ID NO: 221690 - RNA, 1401 nt, Artificial Sequence
  derived and/or modified CDS sequence (opt5) from neuraminidase__InfluenzaB__AGX21758
augcugcccagcaccauccagacacucacgcuguuccuuaccuccggcggggugcugcucucucuguacgucagcgccucccuuucuuaucugcucuacagcgacauucugcugaaguuuacaccuaccgagaucacaguuccgaccaugccccucgauugcgcuaacgccuccaaugugcaagcggugaacagaucugcuacaaaaggagucacccugcuucugccugaacccgaguggacguauccucggcucagcugucccggcuccaccuuccagaaggcccugcuuauuagcccucaccgcuuuggggaaacaaaaggaaauucugccccgcugaucauuagagagcccuucaucgcuugcggcccuaaggaauguaaacauuuugcccucacccacuacgcugcccagcccgggggauauuacaacggcacacgggaggaccgcaauaagcugagacaucugaucuccgugaagcucggcaaaauuccuaccguugagaacagcaucuuccacauggcggccuggucuggguccgcuugccaugauggaaaggaauggacguauauuggcguggacgggcccgauagcaaugcccugcuuaaaaucaaguacggagaggcuuacacagacaccuaucacucuuacgccaacaauauucugcggacacaggaauccgcguguaacugcaucggcgggaauuguuaucucaugauuaccgauggaagcgccuccggcaucucugagugccgcuuucugaaaaucagagagggccggauuaucaaggaaauuuucccgaccgggcgcgucaagcacacagaggaauguacgugcggauuugcuagcaacaaaaccaucgagugugccugcagagacaauuccuacacagcuaagcggccuuucgugaaacuuaacguugaaaccgauacagccgagauucgccugaugugcaccgagacguaucucgacacacccagaccugaugacggcagcaucaccgggcccugugaaucuaauggaaacaagggcuccgggggaaucaaaggcggcuuugugcaucaacggauggccagcaagauugggcgcugguacucuagaaccaugagcaaaacaaagcggaugggaaugggccuguaugucaaguacgauggggaccccuggaccgacuccgaugcucuggcgcucucuggagugauggugagcauggaggaaccuggcugguacuccuucggguuugagaucaaagacaagaaaugcgaugucccguguauuggcaucgaaaugguucacgacggaggcaaggagacauggcauagcgccgcuacggccauuuauugccugauggggucuggacagcuucugugggauaccgugacaggcguggacauggcccucuga

SEQ ID NO: 221691 - RNA, 1401 nt, Artificial Sequence
  derived and/or modified CDS sequence (opt5) from neuraminidase__InfluenzaB__AGX21769
augcugcccagcaccauccagacacucacgcuguuccuuaccuccggcggggugcugcucucucuguacgucagcgccucccuuucuuaucugcucuacagcgacauucugcugaaguuuucccaaacagagaucaccgcuccuacaaugccgcucgauugcgccaacgcgucuaauguucaggcugccaacagaagcgccaccaaaggagugacacugcuucugcccgaaccugaguggaccuauccccggcucuccuguccuggcagcacguuccagaaggcucugcuuauuucuccccaccgcuuuggggaaaccaaaggaaauuccgccccucugaucauuagagagccguucaucgcuugcggccccaaggaauguaaacauuuugcccucacacacuacgcggcccagccugggggauauuacaacggcacccgggaggaccgcaauaagcugagacaucugaucagcgugaagcucggcaaaauucccacagucgagaacucuaucuuccacauggcugccugguccgggagcgcuugccaugauggacgggaauggaccuauauuggcguggacgggccugauucuaaugcccugcuuaagaucaaauacggagaggcguacacggacacauaucacuccuacgccaagaacauucugcgcacccaagaaagcgcuuguaauugcaucggcggggauuguuaucucaugauuacagacggauccgccucuggcaucagcgagugcagauuucugaaaauccgggagggccgcauuaucaaggaaauuuuccccaccgggagaguuaagcacaccgaggaauguacaugcggauuugcuuccaacaaaacgaucgagugugccugccgggauaauagcuacaccgccaagcgcccguucgugaaacuuaacgucgaaacagacaccgcugagauuagacugaugugcacaaagaccuaucucgauacgccucggcccaaugacggcucuaucacagggccuugugaguccgauggagacaaaggcagcgggggaaucaagggcggcuuugugcaucagcgcauggcgucuaaaauugggagaugguacagccggaccauguccaagaccaagagaaugggaaugggccuguauguuaaauacgacggggaucccuggacagacucugaagcccuggcucucagcggagugauggucuccauggaggaacccggcugguacagcuucggguuugagaucaaggauaaaaagugcgacgugccuuguauuggcaucgaaauggugcacgauggaggcaaaaccacauggcauucugccgccacggcuauuuauugccugaugggguccggacagcuucugugggacaccgucacaggcguugauauggcccucuga

SEQ ID NO: 221692 - RNA, 1401 nt, Artificial Sequence
  derived and/or modified CDS sequence (opt5) from neuraminidase__InfluenzaB__AGX21780
augcugcccagcaccauccagacacucacgcuguuccuuaccuccggcggggugcugcucucucuguacgucagcgccucccuuucuuaucugcucuacagcgacauucugcugaaguuuucccaaacagagaucaccgcuccuacaaugccgcucgauugcgccaacgcgucuaauguucaggcugugaacagaagcgccaccaaaggagugacacugcuucugcccgaaccugaguggaccuauccccggcucuccuguccuggcagcacguuccagaaggcccugcuuauuucuccccaccgcuuuggggaaaccaaaggaaauuccgcuccucugaucauuagagagccguucaucgccugcggccccaaggaauguaaacauuuugcucucacacacuacgccgcgcagccugggggauauuacaacggcacccgggaggaccgcaauaagcugagacaucugaucagcgucaagcucggcaaaauucccacaguggagaacucuaucuuccacauggccgcuugguccgggagcgccugccaugauggacgggaauggaccuauauuggcguugacgggccugauucuaaugcucugcuuaagaucaaauacggagaggccuacacggacacauaucacuccuacgcgaagaacauucugcgcacccaagaaagcgccuguaauugcaucggcggggauuguuaucucaugauuacagacggauccgcuucuggcaucagcgagugcagauuucugaaaauccgggagggccgcauuaucaaggaaauuuuccccaccgggagagugaagcacaccgaggaauguacaugcggauuugccuccaacaaaacgaucgagugugcuugccgggauaauagcuacaccgccaagcgcccguucgucaaacuuaacguggaaacagacaccgccgagauuagacugaugugcacagagaccuaucucgauacgccucggcccaaugacggcucuaucacagggccuugugaauccaacggagauaagggcagcgggggaaucaaaggcggcuuuguucaucagcgcauggagucuaagauugggagaugguacagccggaccauguccaaaaccaagagaaugggaaugggccuguaugugaaguacgacggggaccccuggacagauucugaagcucuggcgcucagcggagucaugguguccauggaggaacccggcugguacagcuucggguuugagaucaaagacaagaaaugcgaugugccuuguauuggcaucgagaugguccacgacggaggcaagaccacauggcauucugccgcuacggccauuuauugccugaugggguccggacagcuucugugggauaccguuacaggcguggacaugacccucuga

SEQ ID NO: 221693 - RNA, 1401 nt, Artificial Sequence
  derived and/or modified CDS sequence (opt5) from neuraminidase__InfluenzaB__AGX21791
augcugcccagcaccauccagacacucacgcuguuccuuaccuccggcggggugcugcucucucuguacgucagcgccucccuuucuuaucugcucuacagcgacauucugcugaaguuuuccccuacagagaucaccgcuccgacaaugccccucgauugcgccaacgcgucuaauguucaagcugugaacagaagcgccaccaaaggagugacacugcuucugccugaacccgaguggaccuauccucggcucuccugucccggcagcacguuccagaaggcccugcuuauuucuccucaccgcuuuggggaaaccaaaggaaauuccgcuccgcugaucauuagagagcccuucaucgccugcggcccuaaggaauguaaacauuuugcucucacacacuacgccgcgcagcccgggggauauuacagcggcacccggggcgaccgcaacaagcugagacaucugaucucugucaagcucgggaaaauuccuacaguggaaaauuccaucuuccacauggccgcuuggagcggaucugccugccaugauggcaaggaguggaccuauauugggguugacggacccgauaacaaugcucugcuuaaaaucaaguacggcgaagccuacacggacacauaucacuccuacgcgaacaauauucugcggacccaggagagcgccuguaacugcaucgggggaaauuguuaucucaugauuacagauggcuccgcuucuggcaucagcgaaugccgcuuucugaaaaucagagaggggcggauuaucaaggagauuuucccgaccggacgcgugaagcacaccgaagaguguacaugcggcuuugccuccaacaaaacgaucgaaugugcuugcagagacaauaacuacaccgccaagcggccuuucgucaaacuuaauguggagacagauaccgccgaaauucgccugaugugcacagagaccuaucucgacacgcccagaccugaugacgggagcaucacaggacccugugagucuaacggcgauaagggguccggaggcaucaaaggcggguuuguucaucaacggauggcuagcaagauuggacgcugguacucuagaaccaugagcaaaaacaagcggaugggcauggggcuguaugugaaguacgacggagaccccugggcggauuccgacgcccuggcucucucuggcgucauggugagcauggaggagccugggugguacuccuucggcuuugaaaucaaagauaagaaaugcgacgugccguguauuggaaucgagaugguccacgauggcgggaaggaaaccuggcauagcgccgccacagcuauuuauugccugaugggaucuggccagcuucugugggacaccguuacagggguggauauggcccucuga

SEQ ID NO: 221694 - RNA, 1401 nt, Artificial Sequence
  derived and/or modified CDS sequence (opt5) from neuraminidase__InfluenzaB__AGX21802
augcugcccagcaccauccagacacucacgcuguuccuuaccuccggcggggugcugcucucucuguacgucagcgccucccuuucuuaucugcucuacagcgacauucugcugaaguuuucccaaacagagaucaccgcuccuacaaugccgcucgauugcgccaacgcgucuaauguucaggcugccaacagaagcgccaccaaaggagugacacugcuucugcccgaaccugaguggaccuauccccggcucuccuguccuggcagcacguuccagaaggcucugcuuauuucuccccaccgcuuuggggaaaccaaaggaaauuccgccccucugaucauuagagagccguucaucgcuugcggccccaaggaauguaaacauuuugcccucacacacuacgcggcccagccugggggauauuacaacggcacccgggaggaccgcaauaagcugagacaucugaucagcgugaagcucggcaaaauucccacagucgagaacucuaucuuccacauggcugccugguccgggagcgcuugccaugauggacgggaauggaccuauauuggcguggacgggccugauucuaaugcccugcuuaagaucaaauacggagaggcguacacggacacauaucacuccuacgccaagaacauucugcgcacccaagaaagcgcuuguaauugcaucggcggggauuguuaucucaugauuacagacggauccgccucuggcaucagcgagugcagauuucugaaaauccgggagggccgcauuaucaaggaaauuuuccccaccgggagaguuaagcacaccgaggaauguacaugcggauuugcuuccaacaaaacgaucgagugugccugccgggauaauagcuacaccgccaagcgcccguucgugaaacuuaacgucgaaacagacaccgcugagauuagacugaugugcacagagaccuaucucgauacgccucggcccaaugacggcucuaucacagggccuugugaauccgauggagacaagggcagcgggggaaucaaaggcggcuuugugcaucagcgcauggcgucuaagauugggagaugguacagccggaccauguccaaaaccaagagaaugggaaugggccuguauguuaaguacgacggggaucccuggacagacucugaggcccuggcucucagcggagugauggucuccauggaggaacccggcugguacagcuucggguuugaaaucaaagauaagaaaugcgacgugccuuguauuggcaucgagauggugcacgauggaggcaagaccacauggcauucugccgccacggcuauuuauugccugaugggguccggacagcuucugugggacaccgucacaggcguugauauggcccucuga

SEQ ID NO: 221695 - RNA, 1401 nt, Artificial Sequence
  derived and/or modified CDS sequence (opt5) from neuraminidase__InfluenzaB__AGX21813
augcugcccagcaccauccagacacucacgcuguuccuuaccuccggcggggugcugcucucucuguacgucagcgccucccuuucuuaucugcucuacagcgacauucugcugaaguuuucccaaacagagaucaccgcuccuaaaaugccgcucgauugcgccaacgcgucuaauguucaggcugccaacagaagcgccacaaagggagugacccugcuucugcccgaaccugaguggacauauccccggcucuccuguccuggcagcaccuuccagaaagcucugcuuauuucuccccaccgcuuuggggaaacgaagggaaauuccgccccucugaucauuagagagccguucaucgcuugcggccccaaagaauguaagcauuuugcccucacccacuacgcggcccagccugggggauauuacaacggcacacgggaggaccgcaauaagcugagacaucugaucagcgugaaacucggcaagauucccaccgucgagaacucuaucuuccacauggcugccugguccgggagcgcuugccaugauggacgggaauggacauauauuggcguggacgggccugauucuaaugcccugcuuaaaaucaaguacggagaggcguacaccgacacguaucacuccuacgccaaaaacauucugcgcacacaagaaagcgcuuguaauugcaucggcggggauuguuaucucaugauuaccgacggauccgccucuggcaucagcgagugcagauuucugaagauccgggagggccgcauuaucaaggaaauuuuccccacagggagaguuaaacacaccgaggaauguaccugcggauuugcuuccaacaagacaaucgagugugccugccgggauaauagcuacacggccaaacgcccguucgugaaacuuaacgucgaaaccgacacagcugagauuagacugaugugcaccgagacauaucucgauaccccucggcccaaugacggcucuaucacggggccuugugaauccgauggagacaagggcagcgggggaaucaagggcggcuuugugcaucagcgcauggcgucuaaaauugggagaugguacagccggacaauguccaagaccaagagaaugggaaugggccuguauguuaaauacgacggggaucccuggaccgacucugaggcccuggcucucagcggagugauggucuccauggaggaacccggcugguacagcuucggguuugaaaucaaggauaaaaagugcgacgugccuuguauuggcaucgagauggugcacgauggaggcaaaacaaccuggcauucugccgccacagcuauuuauugccugaugggguccggacagcuucugugggacacggucaccggcguugauauggcccucuga

SEQ ID NO: 221696 - RNA, 1401 nt, Artificial Sequence
  derived and/or modified CDS sequence (opt5) from neuraminidase__InfluenzaB__AGX21824
augcugcccagcaccauccagacacucacgcuguuccuuaccuccggcggggugcugcucucucuguacgucagcgccucccuuucuuaucugcucuacagcgacauucugcugaaguuuucccaaacagagaucaccgcuccuauuaugccgcucgauugcgccaacgcgucuaauguucaggcugugaacagaagcgccacaaaaggagugacccugcuucugcccgaaccugaguggacauauccccggcucuccuguccuggcagcaccuuccagaaggcccugcuuaucucuccccaccgcuuuggggaaacgaaaggaaauuccgcuccucugauuaucagagagccguucaucgccugcggccccaaggaauguaaacauuuugcucucacccacuacgccgcgcagccugggggauauuacaacggcacacgggaggaccgcaauaagcugagacaucugauuagcgucaagcucggcaaaauccccaccguggagaacucuauuuuccacauggccgcuugguccgggagcgccugccaugauggacgggaauggacauauaucggcguugacgggccugauucuaaugcucugcuuaagauuaaauacggagaggccuacaccgacacguaucacuccuacgcgaagaacauccugcgcacacaagaaagcgccuguaauugcauuggcggggauuguuaucucaugaucaccgacggacccgcuuccggcaucucugagugcagauuucugaaaauucgggagggccgcaucauuaaggaaaucuucccgacagggagagugaagaacaccgaggaauguaccugcggauuugccagcaauaaaacaauugagugugcuugccgggauaacuccuacacggccaagcgcccuuucgucaaacuuaauguggaaaccgacacagccgagaucagacugaugugcaccgagacauaucucgauacgccccggccuaacgacggcagcaucaccgggcccugugaaucuaauggagauaagggcuccgggggaauuaaaggcggcuuuguucaccagcgcauggcuagcaagaucgggagaugguacucucggacaaugagcaaaaccaagagaaugggaaugggccuguaugugaaguacgacggggaccccuggaccgauuccgaggcgcuggcccucucuggagucauggugagcauggaggaaccuggcugguacuccuucggguuugaaauuaaagacaagaaaugcgaugugccguguaucggcauugagaugguccaugacggaggcaagacaaccuggcacagcgcugccacagccaucuauugccugauggggucuggacagcuucugugggauacgguuaccggcguggacauggcucucuga

SEQ ID NO: 221697 - RNA, 1401 nt, Artificial Sequence; identical to SEQ ID NO: 220815
  derived and/or modified CDS sequence (opt5) from neuraminidase__InfluenzaB__AGX21835

SEQ ID NO: 221698 - RNA, 1401 nt, Artificial Sequence; identical to SEQ ID NO: 221203
  derived and/or modified CDS sequence (opt5) from neuraminidase__InfluenzaB__AGX21846

SEQ ID NO: 221699 - RNA, 1401 nt, Artificial Sequence; identical to SEQ ID NO: 221203
  derived and/or modified CDS sequence (opt5) from neuraminidase__InfluenzaB__AGX21857

SEQ ID NO: 221700 - RNA, 1401 nt, Artificial Sequence; identical to SEQ ID NO: 220815
  derived and/or modified CDS sequence (opt5) from neuraminidase__InfluenzaB__AGX21868

SEQ ID NO: 221701 - RNA, 1401 nt, Artificial Sequence; identical to SEQ ID NO: 221201
  derived and/or modified CDS sequence (opt5) from neuraminidase__InfluenzaB__AGX21879

SEQ ID NO: 221702 - RNA, 1401 nt, Artificial Sequence
  derived and/or modified CDS sequence (opt5) from neuraminidase__InfluenzaB__AGX21890
augcugcccagcaccauccagacacucacgcuguuccuuaccuccggcggggugcugcucucucuguacgucagcgccucccuuucuuaucugcucuacagcgacauucugcugaaguuuucccaaacagagaucauugcuccuaucaugccgcucgauugcgccaacgcgucuaauguucaggcugugaaccacagcgccaccaaaggagugacacugcuucugcccgaaccugaguggaccuaucccagacucuccuguccuggcagcacauuccagaaggcccugcuuauuucuccccaucgguuuggggaaaccaaaggaaauuccgcuccucugaucauccgcgagccguucauugccugcggccccaaggaauguaaacacuuugcucucacgcauuacgccgcgcagccugggggauauuacaacggcaccagagaggaccggaauaagcugcgccaccugaucagcgucaagcucggcaaaauucccacaguggagaacucuaucuuccauauggccgcuugguccgggagcgccugccacgauggaagagaauggaccuauauuggcguugacgggccugauucuaaugcucugcuuaagaucaaauacggagaggccuacacagacaccuaucacuccuacgcgaagaacauucugcggacgcaagaaagcgccuguaauugcaucggcggggauuguuaucucaugaucacagacggacccgcuuccggcauuucugagugccgcuuucugaaaaucagagagggccggauuaucaaggaaauuuucccgaccgggcgcgugaagcauacagaggaauguaccugcggauuugccagcaacaaaaccaucgagugugcuugcagagauaauuccuacacagccaagcggccuuucgucaaacuuaacguggaaacggacaccgccgagauccgccugaugugcacagagaccuaucucgauacacccagaccuaaugacggcagcauuaccgggcccugugaaucuaacggagauaagggcuccgggggaaucaaaggcggcuuuguucaccagcggauggcuagcaagauugggcgcugguacucuagaacgaugagcaaaacaaagcggaugggaaugggccuguaugugaaguacgacggggaccccuggaccgauuccgaggcgcuggcccucucuggagucauggugagcauggaggaaccuggcugguacuccuucggguuugaaaucaaagacaagaaaugcgaugugccguguauuggcaucgagaugguccaugacggaggcaagaccacauggcacagcgcugccaccgccaucuauugccugauggggucuggacagcuucugugggauacaguuacgggcguggacauggcucucuga

SEQ ID NO: 221703 - RNA, 1401 nt, Artificial Sequence; identical to SEQ ID NO: 220815
  derived and/or modified CDS sequence (opt5) from neuraminidase__InfluenzaB__AGX21901

SEQ ID NO: 221704 - RNA, 1401 nt, Artificial Sequence; identical to SEQ ID NO: 220815
  derived and/or modified CDS sequence (opt5) from neuraminidase__InfluenzaB__AGX21912

SEQ ID NO: 221705 - RNA, 1401 nt, Artificial Sequence
  derived and/or modified CDS sequence (opt5) from neuraminidase__InfluenzaB__AGX21923
augcugcccagcaccauccagacacucacgcuguuccuuaccuccggcggggugcugcucucucuguacgucagcgccucccuuucuuaucugcucuacagcgacauucugcugaaguuuucccaaacagagaucaccgcuccuauuaugccgcucgauugcacaaacgccucuaauguucaggcggugaacagaagcgcuaccaaaggagugacacugcuucugcccgaaccugaguggaccuauccccggcucuccuguccuggcagcacguuccagaaggcccugcuuaucucuccccaccgcuuuggggaaaccaaaggaaauuccgccccucugauuaucagagagccguucaucgcuugcggccccaaggaauguaaacauuuugcccucacacacuacgcugcccagccugggggauauuacaacggcacccgggaggaccgcaauaagcugagacaucugauuagcgucaagcucggcaaaauccccacaguggagaacucuauuuuccacauggcggccugguccgggagcgcuugccaugauggacgggaauggaccuauaucggcguugacgggccugauucuaaugcccugcuuaagauuaaauacggagaggcuuacacggacacauaucacuccuacgccaagaacauccugcgcacccaagaaagcgcguguaauugcauuggcggggauuguuaucucaugaucacagacggacccgccuccggcaucucugagugcagauuucugaaaauucgggagggccgcaucauuaaggaaaucuucccgaccgggagagugaagcacaccgaggaauguacaugcggauuugcuagcaacaaaacgauugagugugccugccgggauaauuccuacaccgcuaagcgcccuuucgucaaacuuaacguggaaacagacaccgccgagaucagacugaugugcacagagaccuaucucgauacgccccggccuaaugacggcagcaucacagggcccugugaaucuaacggagauaagggcuccgggggaauuaaaggcggcuuuguucaucagcgcauggccagcaagaucgggagaugguacucucggaccaugagcaaaaccaagagaaugggaaugggccuguaugugaaguacgacggggaccccuggacagauuccgaggcucuggcgcucucuggagucauggugagcauggaggaaccuggcugguacuccuucggguuugaaauuaaagacaagaaaugcgaugugccguguaucggcauugagaugguccacgacggaggcaagaccacauggcauagcgccgcuacggccaucuauugccugauggggucuggacagcuucugugggauaccguuacaggcguggacauggcccucuga

SEQ ID NO: 221706 - RNA, 1401 nt, Artificial Sequence; identical to SEQ ID NO: 221702
  derived and/or modified CDS sequence (opt5) from neuraminidase__InfluenzaB__AGX21934

SEQ ID NO: 221707 - RNA, 1401 nt, Artificial Sequence; identical to SEQ ID NO: 221203
  derived and/or modified CDS sequence (opt5) from neuraminidase__InfluenzaB__AGX21945

SEQ ID NO: 221708 - RNA, 1401 nt, Artificial Sequence
  derived and/or modified CDS sequence (opt5) from neuraminidase__InfluenzaB__AGX21956
augcugcccagcaccauccagacacucacgcuguuccuuaccuccggcggggugcugcucucucuguacgucagcgccucccuuucuuaucugcucuacagcgacauucugcugaaguuuucccaaacagagaucaccgcuccuauuaugccgcucgauugcgccaacacaucuaauauccaggcgguuaacagaagcgcuaccaaaggagugacacugcuucugcccgaaccugaguggaccuauccccggcucuccuguccuggcagcacguuccagaaggcccugcuuauuucuccccaccgcuuuggggaaaccaaaggaaauuccgccccucugaucaucagagagccguucauugcuugcggccccaaggaauguaaacauuuugcccucacacacuacgcugcccagccugggggauauuacaacggcacccgggaggaccgcaauaagcugagacaucugaucagcgugaagcucggcaaaauucccacagucgagaacucuaucuuccacauggcggccugguccgggagcgcuugccaugauggacgggaauggaccuauauuggcguggacgggccugauucuaaugcccugcuuaagaucaaauacggagaggcuuacacggacacauaucacuccuacgccaagaacauucugcgcacccaagaaagcgcguguaauugcaucggcggggauuguuaucucaugaucacagacggacccgccuccggcauuucugagugcagauuucugaaaauccgggagggccgcauuaucaaggaaauuuucccgaccgggagaguuaagcacaccgaggaauguacaugcggauuugcuagcaacaaaacgaucgagugugccugccgggauaauuccuacaccgcuaagcgcccuuucgugaaacuuaacgucgaaacagacaccgccgagaucagacugaugugcacagagaccuaucucgauacgccccggccuaaugacggcagcauuacagggcccugugaaucuaacggagauaagggcuccgggggaaucaaaggcggcuuugugcaucagcgcauggccagcaagauugggagaugguacucucggaccaugagcaaaaccaagagaaugggaaugggccuguauguuaaguacgacggggaccccuggacagauuccgaggcucuggcgcucucuggagugauggucagcauggaggaaccuggcugguacuccuucggguuugaaaucaaagacaagaaaugcgaugugccguguauuggcaucgagauggugcacgacggaggcaagaccacauggcauagcgccgcuacggccaucuauugccugauggggucuggacagcuucugugggauaccgucacaggcguugacauggcccucuga

SEQ ID NO: 221709 - RNA, 1401 nt, Artificial Sequence; identical to SEQ ID NO: 221203
  derived and/or modified CDS sequence (opt5) from neuraminidase__InfluenzaB__AGX21967

SEQ ID NO: 221710 - RNA, 1401 nt, Artificial Sequence; identical to SEQ ID NO: 220815
  derived and/or modified CDS sequence (opt5) from neuraminidase__InfluenzaB__AGX21978

SEQ ID NO: 221711 - RNA, 1401 nt, Artificial Sequence; identical to SEQ ID NO: 221203
  derived and/or modified CDS sequence (opt5) from neuraminidase__InfluenzaB__AGX21989

SEQ ID NO: 221712 - RNA, 1401 nt, Artificial Sequence; identical to SEQ ID NO: 221201
  derived and/or modified CDS sequence (opt5) from neuraminidase__InfluenzaB__AGX22000

SEQ ID NO: 221713 - RNA, 1401 nt, Artificial Sequence
  derived and/or modified CDS sequence (opt5) from neuraminidase__InfluenzaB__AGX22011
augcugcccagcaccauccagacacucacgcuguuccuuaccuccggcggggugcugcucucucuguacgucagcgccucccuuucuuaucugcucuacagcgacauucugcugaaguuuucccaaacagagaucaccgcuccuauuaugccgcucgauugcgccaacgcgucuaauguucaggcugugaacagaagcgccacaaaaggagugacccugcuucugcccgaaccugaguggacauauccccggcucuccuguccuggcagcaccuuccagaaggcccugcuuaucucuccccaccgcuuuggggaaacgaaaggaaauuccgcuccucugauuaucagagagccguucaucgccugcggccccaaggaauguaaacauuuugcucucacccacuacgccgcgaagccugggggauauuacaacggcacacgggaggaccgcaauaagcugagacaucugauuagcgucaaacucggcaagauccccaccguggagaacucuauuuuccacauggccgcuugguccgggagcgccugccaugauggacgggaauggacauauaucggcguugacgggccugauucuaaugcucugcuuaaaauuaaguacggagaggccuacaccgacacguaucacuccuacgcgaaaaacauccugcgcacacaggaaagcgccuguaauugcauuggcggggauuguuaucucaugaucaccgacggacccgcuuccggcaucucugagugcagauuucugaagauucgggagggccgcaucauuaaggaaaucuucccgacagggagagugaaacacaccgaggaauguaccugcggauuugccagcaacaagacaauugagugugcuugccgggauaauaacuacacggccaaacgcccuuucgucaaacuuaauguggaaaccgacacagccgagaucagacugaugugcaccgagacauaucucgauacgccccggccuaacgacggcuccaucaccgggcccugugaaagcaauggagauaagggcucugggggaauuaagggcggcuuuguucaucaacgcauggcuuccaaaaucgggagaugguacagccggacaaugucuaagaccaagagaaugggaaugggccuguaugugaaauacgacggggaccccuggaccgauagcgaggcgcuggcccucuccggagucauggugucuauggaggaaccuggcugguacagcuucggguuugaaauuaaggacaaaaagugcgaugugccguguaucggcauugagaugguccacgacggaggcaaaacaaccuggcauuccgcugccacagccaucuauugccugauggggagcggacagcuucugugggauacgguuaccggcguggacauggcucucuga

SEQ ID NO: 221714 - RNA, 1401 nt, Artificial Sequence; identical to SEQ ID NO: 220815
  derived and/or modified CDS sequence (opt5) from neuraminidase__InfluenzaB__AGX22033

SEQ ID NO: 221715 - RNA, 1401 nt, Artificial Sequence; identical to SEQ ID NO: 220815
  derived and/or modified CDS sequence (opt5) from neuraminidase__InfluenzaB__AGX22044

SEQ ID NO: 221716 - RNA, 1401 nt, Artificial Sequence; identical to SEQ ID NO: 221201
  derived and/or modified CDS sequence (opt5) from neuraminidase__InfluenzaB__AGX22055

SEQ ID NO: 221717 - RNA, 1401 nt, Artificial Sequence; identical to SEQ ID NO: 220815
  derived and/or modified CDS sequence (opt5) from neuraminidase__InfluenzaB__AGX22066

SEQ ID NO: 221718 - RNA, 1401 nt, Artificial Sequence; identical to SEQ ID NO: 221702
  derived and/or modified CDS sequence (opt5) from neuraminidase__InfluenzaB__AGX22077

SEQ ID NO: 221719 - RNA, 1401 nt, Artificial Sequence; identical to SEQ ID NO: 220817
  derived and/or modified CDS sequence (opt5) from neuraminidase__InfluenzaB__AGX22088

SEQ ID NO: 221720 - RNA, 1401 nt, Artificial Sequence; identical to SEQ ID NO: 221203
  derived and/or modified CDS sequence (opt5) from neuraminidase__InfluenzaB__AGX22099

SEQ ID NO: 221721 - RNA, 1401 nt, Artificial Sequence; identical to SEQ ID NO: 221201
  derived and/or modified CDS sequence (opt5) from neuraminidase__InfluenzaB__AGX22110

SEQ ID NO: 221722 - RNA, 1401 nt, Artificial Sequence; identical to SEQ ID NO: 221203
  derived and/or modified CDS sequence (opt5) from neuraminidase__InfluenzaB__AGX22132

SEQ ID NO: 221723 - RNA, 1401 nt, Artificial Sequence
  derived and/or modified CDS sequence (opt5) from neuraminidase__InfluenzaB__AGX22143
augcugcccagcaccauccagacacucacgcuguuccuuaccuccggcggggugcugcucucucuguacgucagcgccucccuuucuuaucugcucuacagcgacauucugcugaaguuuucccaaacagagaucaccgcuccuauuaugccgcucgauugcgccaacgcgucuaauguucaggcugugaacagaagcgccacaaaaggagugacccugcuucugcccgaaccugaguggacauauccccggcucuccuguccuggcagcaccuuccagaaggcccugcuuaucucuccccaccgcuuuggggaaacgaaaggaaauuccgcuccucugauuaucagagagccguucaucgccugcggccccaaggaauguaaacauuuugcucucacccacuacgccgcgcagccugggggauauuacaacggcacacgggaggaccgcaauaagcugagacaucugauuagcgucaagcucggcaaaauccccaccguggagaacucuauuuuccacauggccgcuugguccgggagcgccugccaugauggacgggaauggacauauaucggcguugacgggccugauucuaaugcucugcuuaagauuaaauacggagaggccuacaccgacacguaucacuccuacgcgaagaacauccugcgcacacaagaaagcgccuguaauugcauuggcggggauuguuaucucaugaucaccgacggacccgcuuccggcaucucugagugcagauuucugaaaauucgggagggccgcaucauuaaggaaaucuucccgacagggagagugaagcacaccgaggaauguaccugcggauuugccagcaacaaaacaauugagugugcuugccgggauaauuccuacacggccaagcgcccuuucgucaaacuuaacguggaaaccgacacagccgagaucagacugaugugcaccgagacauaucucgauacgccccggccuaaugacggcagcaucaccgggcccugugaaucuaacggagauaagggcuccgggggaauuaaaggcggcuuuguucaucagcgcauggcuagcaagaucgggagaugguacucucggacaauuagcaaaaccaagagaaugggaaugggccuguaugugaaguacgacggggaccccuggaccgauuccgaggcgcuggcccucucuggagucauggugagcauggaggaaccuggcugguacuccuucggguuugaaaucaaagacaagaaaugcgaugugccguguauuggcaucgagaugguccacgacggaggcaagacaaccuggcauagcgcugccacagccaucuauugccugauggggucuggacagcuucugugggauacgguuaccggcguggacauggcucucuga

SEQ ID NO: 221724 - RNA, 1401 nt, Artificial Sequence; identical to SEQ ID NO: 221723
  derived and/or modified CDS sequence (opt5) from neuraminidase__InfluenzaB__AGX22154

SEQ ID NO: 221725 - RNA, 1401 nt, Artificial Sequence; identical to SEQ ID NO: 221723
  derived and/or modified CDS sequence (opt5) from neuraminidase__InfluenzaB__AGX22165

SEQ ID NO: 221726 - RNA, 1401 nt, Artificial Sequence; identical to SEQ ID NO: 221702
  derived and/or modified CDS sequence (opt5) from neuraminidase__InfluenzaB__AGX22176

SEQ ID NO: 221727 - RNA, 1401 nt, Artificial Sequence; identical to SEQ ID NO: 221723
  derived and/or modified CDS sequence (opt5) from neuraminidase__InfluenzaB__AGX22187

SEQ ID NO: 221728 - RNA, 1401 nt, Artificial Sequence; identical to SEQ ID NO: 221723
  derived and/or modified CDS sequence (opt5) from neuraminidase__InfluenzaB__AGX22198

SEQ ID NO: 221729 - RNA, 1401 nt, Artificial Sequence; identical to SEQ ID NO: 221723
  derived and/or modified CDS sequence (opt5) from neuraminidase__InfluenzaB__AGX22209

SEQ ID NO: 221730 - RNA, 1401 nt, Artificial Sequence; identical to SEQ ID NO: 221201
  derived and/or modified CDS sequence (opt5) from neuraminidase__InfluenzaB__AGX22220

SEQ ID NO: 221731 - RNA, 1401 nt, Artificial Sequence; identical to SEQ ID NO: 221203
  derived and/or modified CDS sequence (opt5) from neuraminidase__InfluenzaB__AGX22231

SEQ ID NO: 221732 - RNA, 1401 nt, Artificial Sequence; identical to SEQ ID NO: 221702
  derived and/or modified CDS sequence (opt5) from neuraminidase__InfluenzaB__AGX22242

SEQ ID NO: 221733 - RNA, 1401 nt, Artificial Sequence; identical to SEQ ID NO: 221201
  derived and/or modified CDS sequence (opt5) from neuraminidase__InfluenzaB__AGX22253

SEQ ID NO: 221734 - RNA, 1401 nt, Artificial Sequence; identical to SEQ ID NO: 220815
  derived and/or modified CDS sequence (opt5) from neuraminidase__InfluenzaB__AGX22264

SEQ ID NO: 221735 - RNA, 1401 nt, Artificial Sequence; identical to SEQ ID NO: 221201
  derived and/or modified CDS sequence (opt5) from neuraminidase__InfluenzaB__AGX22275

SEQ ID NO: 221736 - RNA, 1401 nt, Artificial Sequence; identical to SEQ ID NO: 220815
  derived and/or modified CDS sequence (opt5) from neuraminidase__InfluenzaB__AGX22286

SEQ ID NO: 221737 - RNA, 1401 nt, Artificial Sequence
  derived and/or modified CDS sequence (opt5) from neuraminidase__InfluenzaB__AGX22297
augcugcccagcaccauccagacacucacgcuguuccuuacccugggcggggugcuccugucccuuuacgucucugccagccuguccuaucuccuguacucugacauucugcucaaguuuagccaaacagagaucaccgcuccuauuaugccgcuggauugcgccaacgcguccaauguucaggcugugaacagaucugccacaaaaggagugacccuucugcuccccgaaccugaguggacauauccccggcugagcuguccuggcuccaccuuccagaaggcccuucugaucagcccccaccgcuuuggggaaacgaaaggaaauucugcuccucucauuaucagagagccguucaucgccugcggccccaaggaauguaaacauuuugcucugacccacuacgccgcgcagccugggggauauuacaacggcacacgggaggaccgcaauaagcugagacaucucauuuccgucaagcugggcaaaauccccaccguggagaacagcauuuuccacauggccgcuuggucuggguccgccugccaugauggacgggaauggacauauaucggcguugacgggccugauagcaaugcccuucugaagauuaaauacggagaggcuuacaccgacacguaucacucuuacgcgaagaacauccuccgcacacaagaauccgccuguaauugcauuggcggggauuguuaucugaugaucaccgacggacccgcuagcggcaucuccgagugcagauuucuuaaaauucgggagggccgcaucauuaaggaaaucuucccgacagggagagugaagcacaccgaggaauguaccugcggauuugccucuaacaaaacaauugagugugcuugccgggauaauagcuacacggccaagcgcccuuucgucaaacugaacguggaaaccgacacagccgagaucagacucaugugcaccgagacauaucuggauacgccccggccuaaugacggcuccaucaccgggcccugugaaagcaacggagauaagggcucugggggaauuaaaggcggcuuuguucaucagcgcauggcuuccaagaucgggagaugguacagccggacaaugucuaaaaccaagagaaugggaaugggccuguaugugaaguacgacggggaccccuggaccgauagcgaggcgcucgcccuguccggagucauggugucuauggaggaaccuggcugguacagcuucggguuugaaauuaaagacaagaaaugcgaugugccguguaucggcauugagaugguccacgacggaggcaagacaaccuggcauuccgcugccacagccaucuauugccuuauggggagcggacagcugcucugggauacgguuaccggcguggacauggcucuguga

SEQ ID NO: 221738 - RNA, 1401 nt, Artificial Sequence; identical to SEQ ID NO: 220815
  derived and/or modified CDS sequence (opt5) from neuraminidase__InfluenzaB__AGX22308

SEQ ID NO: 221739 - RNA, 1401 nt, Artificial Sequence
  derived and/or modified CDS sequence (opt5) from neuraminidase__InfluenzaB__AGX22330
augcugcccagcaccauccagacacucacgcuguuccuuaccuccggcggggugcugcucucucuguacgucagcgccucccuuucuuaucugcucuacagcgacauucugcugaaguuuucccaaacagagaucaccgcuccuauuaugccgcucgauugcgccaacgcgucuaauguucaggcugugaacagaagcgccacaaaaggagugacccugcuucugcccgaaccugaguggacauauccccggcucuccuguccuggcagcaccuuccagaaggcccugcuuaucucuccccaccgcuuuggggaaacgaaaggaaauuccgcuccucugauuaucagagagccguucaucgccugcggccccaaggaauguaaacauuuugcucucacccacuacgccgcgcagccugggggauauuacaacggcacacgggaggaccgcaauaagcugagacaucugauuagcgucaagcucggcaaaauccccaccguggagaacucuauuuuccacaugacagccugguccgggagcgcuugccaugauggaaaggaauggaccuauaucggcguugacgggccugauucuaaugcccugcuuaaaauuaaguacggagaggcuuacacggacacauaucacuccuacgccaaaaacauccugcggacccaagaaagcgcguguaauugcauuggcggggauuguuaucucaugaucacagacggacccgccuccggcaucucugagugccgcuuucugaagauuagagagggccggaucauuaaggaaaucuucccgaccgggcgcgugaaacacaccgaggaauguacaugcggauuugcuagcaacaagacgauugagugugccugcagagauaauuccuacaccgcuaaacggccuuucgucaaacuuaacguggaaacagacaccgccgagauccgccugaugugcacagagaccuaucucgauacgcccagaccuaaugacggcagcaucacagggcccugugaaucugauggagacaagggcuccgggggaauuaagggcggcuuuguucaucagcggauggccaccaaaaucgggcgcugguacagcagaaccaugucuaagacaaagcggaugggaaugggccuguaugugaaauacgacggggaucccuggaccgacagcgaggcucuggcgcucuccggagucauggugucuauggaggaaccuggcugguacagcuucggguuugaaauuaaggauaaaaagugcgacgugccguguaucggcauugagaugguccacgauggaggcaaaacaacguggcauuccgccgcuaccgccaucuauugccugauggggagcggacagcuucugugggacacaguuaccggcguggauauggcccucuga

SEQ ID NO: 221740 - RNA, 1401 nt, Artificial Sequence; identical to SEQ ID NO: 221203
  derived and/or modified CDS sequence (opt5) from neuraminidase__InfluenzaB__AGX22341

SEQ ID NO: 221741 - RNA, 1401 nt, Artificial Sequence; identical to SEQ ID NO: 221203
  derived and/or modified CDS sequence (opt5) from neuraminidase__InfluenzaB__AGX22352

SEQ ID NO: 221742 - RNA, 1401 nt, Artificial Sequence; identical to SEQ ID NO: 221203
  derived and/or modified CDS sequence (opt5) from neuraminidase__InfluenzaB__AGX22363

SEQ ID NO: 221743 - RNA, 1401 nt, Artificial Sequence; identical to SEQ ID NO: 221201
  derived and/or modified CDS sequence (opt5) from neuraminidase__InfluenzaB__AGX22374

SEQ ID NO: 221744 - RNA, 1401 nt, Artificial Sequence; identical to SEQ ID NO: 220815
  derived and/or modified CDS sequence (opt5) from neuraminidase__InfluenzaB__AGX22385

SEQ ID NO: 221745 - RNA, 1401 nt, Artificial Sequence; identical to SEQ ID NO: 220815
  derived and/or modified CDS sequence (opt5) from neuraminidase__InfluenzaB__AGX22396

SEQ ID NO: 221746 - RNA, 1401 nt, Artificial Sequence; identical to SEQ ID NO: 221702
  derived and/or modified CDS sequence (opt5) from neuraminidase__InfluenzaB__AGX22407

SEQ ID NO: 221747 - RNA, 1401 nt, Artificial Sequence
  derived and/or modified CDS sequence (opt5) from neuraminidase__InfluenzaB__AGX22418
augcugcccagcaccauccagacacucacgcuguuccuuaccuccggcggggugcugcucucucuguacgucagcgccucccuuucuuaucugcucuacagcgacauucugcugaaguuuucccaaacagagaucauugcuccuaucaugccgcucgauugcgccaacgcgucuaauguucaggcugugaaccacagcgccaccaaaggagugacacugcuucugcccgaaccugaguggaccuaucccagacucuccuguccuggcagcacauuccagaaggcccugcuuauuucuccccaucgguuuggggaaaccaaaggaaauuccgcuccucugaucauccgcgagccguucauugccugcggccccaaggaauguaaacacuuugcucucacgcauuacgccgcgcagccugggagauauuacaacggaacccgggaggaccgcaauaagcugagacaccugaucagcgucaagcucggcaaaauucccacaguggagaacucuaucuuccauauggccgcuugguccggcagcgccugccacgaugggcgggaauggaccuauauuggaguugacggcccugauucuaaugcucugcuuaagaucaaauacggggaggccuacacagacaccuaucacuccuacgcgaagaacauucugcgcacgcaagaaagcgccuguaauugcaucggaggcgauuguuaucucaugaucacagacgggcccgcuuccggaauuucugagugcagauuucugaaaauccgggagggccgcauuaucaaggaaauuuucccgaccggcagagugaagcauacagaggaauguaccugcggguuugccagcaacaaaaccaucgagugugcuugccgggauaauuccuacacagccaagcgcccuuucgucaaacuuaacguggaaacggacaccgccgagaucagacugaugugcacagagaccuaucucgauacaccccggccuaaugacggaagcauuaccggccccugugaaucuaacggggauaagggauccggcgggaucaaaggaggcuuuguucaccagcgcauggcuagcaagauuggcagaugguacucucggacgaugagcaaaacaaagagaauggggaugggacuguaugugaaguacgacggcgaccccuggaccgauuccgaggcgcuggcccucucuggggucauggugagcauggaggaaccuggaugguacuccuucggcuuugaaaucaaagacaagaaaugcgaugugccguguauugggaucgagaugguccaugacggcggaaagaccacauggcacagcgcugccaccgccaucuauugccugaugggcucugggcagcuucugugggauacaguuacgggaguggacauggcucucuga

SEQ ID NO: 221748 - RNA, 1401 nt, Artificial Sequence; identical to SEQ ID NO: 221201
  derived and/or modified CDS sequence (opt5) from neuraminidase__InfluenzaB__AGX22429

SEQ ID NO: 221749 - RNA, 1401 nt, Artificial Sequence; identical to SEQ ID NO: 221201
  derived and/or modified CDS sequence (opt5) from neuraminidase__InfluenzaB__AGX22440

SEQ ID NO: 221750 - RNA, 1401 nt, Artificial Sequence; identical to SEQ ID NO: 221201
  derived and/or modified CDS sequence (opt5) from neuraminidase__InfluenzaB__AGX22449

SEQ ID NO: 221751 - RNA, 1401 nt, Artificial Sequence
  derived and/or modified CDS sequence (opt5) from neuraminidase__InfluenzaB__AGX22460
augcugcccagcaccauccagacacucacgcuguuccuuaccuccggcggggugcugcucucucuguacgucagcgccucccuuucuuaucugcucuacagcgacauucugcugaaguuuucccaaacagagaucaccgcuccuacaaugccgcucgauugcgccaacgcgucuaauguucaggcugugaacagaagcgccaccaaaggagugacacugcuucugcccgaacucgaguggaccuauccucggcuguccugucccggcagcacguuccagaaggcccuucugauuucuccucaccgcuuuggggaaaccaaaggaaauuccgcuccccucaucauuagagagccuuucaucgccugcggcccgaaggaauguaaacauuuugcucugacacacuacgccgcgcagcccgggggauauuacaacggcacccgggaggaccgcaauaagcugagacaucucaucagcgucaagcugggcaaaauuccuacaguggagaacucuaucuuccacauggccgcuugguccgggagcgccugccaugauggacgggaauggaccuauguuggcguggacgggcccgauucuaaugcccuucugaagauuaaauacggagaggcuuacacggacacauaucacuccuacgcgaagaacauccuccgcacccaagaaagcgccuguaauugcauuggcggggauuguuaucugaugaucacagacggaccugcuuccggcauuucugagugcagauuucuuaaaauccgggagggccgcaucauuaaggaaaucuuccccaccgggagagucaagcacaccgaggaauguacaugcggauuugccagcaacaaaacgauugagugugcuugccgggauaauuccuacaccgccaagcgcccguucgugaaacuggacguugaaacagauaccgccgagaucagacucaugugcacagagaccuaucuggacacgccucggcccaacgauggcagcauuacagggccuugugaagcuaauggagacaagggcucugggggaaucaaaggcggcuuugugcaucagcgcauggcguccaagaucgggagaugguacagccggaccaugucuaaaaccaagagaaugggaaugggccuguaugucaaguacgacggggaucccuggacagacagcgaggcccucgcucuguccggagugauggugucuauggaggaacccggcugguacagcuucggguuugaaauuaaagauaagaaaugcgacgucccuuguaucggcauugagaugguucacgauggaggcaagaccacauggcauuccgccgccacggcuaucuauugccuuauggggagcggacagcugcucugggacaccgugacaggcguggauauggcccuguga

SEQ ID NO: 221752 - RNA, 1401 nt, Artificial Sequence; identical to SEQ ID NO: 220815
  derived and/or modified CDS sequence (opt5) from neuraminidase__InfluenzaB__AGX22471

SEQ ID NO: 221753 - RNA, 1401 nt, Artificial Sequence; identical to SEQ ID NO: 220815
  derived and/or modified CDS sequence (opt5) from neuraminidase__InfluenzaB__AGX22482

SEQ ID NO: 221754 - RNA, 1401 nt, Artificial Sequence; identical to SEQ ID NO: 220815
  derived and/or modified CDS sequence (opt5) from neuraminidase__InfluenzaB__AGX22493

SEQ ID NO: 221755 - RNA, 1401 nt, Artificial Sequence
  derived and/or modified CDS sequence (opt5) from neuraminidase__InfluenzaB__AGX22504
augcugcccagcaccauccagacacucacgcuguuccuuaccuccggcggggugcugcucucucuguacgucagcgccucccuuucuuaucugcucuacagcgacauucugcugaaguuuuccacaaccgagaucacagcuccuaccauuccgcucgauugcgccaacgcgucuaauguucaagcugugaacagaagcgccacaaaaggagugacccugcuucugcccgaaccugaguggacguauccccggcucuccuguccuggcagcaccuuccagaaggcccugcuuaucucuccccaccgcuuuggggaaacaaaaggaaauuccgcuccucugauuaucagagagccguucaucgccugcggccccaaggaauguaaacauuuugcucucacccacuacgccgcgcagccugggggauauuacaacggcacacgggaggaccgcaauaagcugagacaucugauuagcgucaagcucggcaaaauccccaccguggagaacucuauuuuccacauggccgcuugguccgggagcgccugccaugauggaaaggaauggacguauaucggcguugacgggccugauucuaaugcucugcuuaaaauuaaguacggagaggccuacacagacaccuaucacuccuacgcgaacaauauccugcggacacaggaaagcgccuguaacugcauuggcgggaauuguuaucucaugaucaccgauggauccgcuucuggcaucagcgagugccgcuuucugaaaauuagagagggccggaucauuaaggaaaucuuccccaccgggcgcgugaagcacacagaggaauguacgugcggauuugccuccaacaaaaccauugagugugcuugcagagacaauagcuacacagccaagcggccguucgucaaacuuaacguggaaaccgauacagccgagauccgccugaugugcaccgagacguaucucgacacaccuagacccgaugacggcucuaucaccgggccuugugaauccaauggaaacaagggcagcgggggaauuaaaggcggcuuuguucaucaacggauggcuucuaagaucgggcgcugguacagcagaaccauguccaaaacaaagcggaugggaaugggccuguaugugaaguacgauggggaccccuggaccgacucugaugcgcuggcccucagcggagucaugguguccauggaggaacccggcugguacagcuucggguuugagauuaaagacaagaaaugcgaugugccuuguaucggcauugaaaugguccacgacggaggcaaggagacauggcauucugcugccacggccaucuauugccugaugggguccggacagcuucugugggauaccguuacaggcguggacauggcucucuga

SEQ ID NO: 221756 - RNA, 1401 nt, Artificial Sequence; identical to SEQ ID NO: 221201
  derived and/or modified CDS sequence (opt5) from neuraminidase__InfluenzaB__AGX22515

SEQ ID NO: 221757 - RNA, 1401 nt, Artificial Sequence
  derived and/or modified CDS sequence (opt5) from neuraminidase__InfluenzaB__AGX22526
augcugcccagcaccauccagacacucacgcuguuccuuaccuccggcggggugcugcucucucuguacgucagcgccucccuuucuuaucugcucuacagcgacauucugcaaaaguuuucccagacagagaucaccgcuccuauuaugccgcuggauugcgccaacgcgucuaauguucaggcugugaacagaagcgccacaaaaggagugacccuccugcuucccgaaccugaguggacauauccccggcuguccuguccuggcagcaccuuccagaaggcccuccugaucucuccccaccgcuuuggggaaacgaaaggaaauuccgcuccucuuauuaucagagagccguucaucgccugcggccccaccgaauguaagcauuuugcucugacacacuacgccgcgcaaccugggggauauuacaacggcacccgggaggaccgcaauaaacucagacaucugauuagcgucaagcugggcaagauccccacaguggagaacucuauuuuccacauggccgcuugguccgggagcgccugccaugauggaaaagaauggaccuauaucggcguugacgggccugauucuaaugcucuccugaagauuaaauacggagaggccuacacggacacauaucacuccuacgcgaagaacauccuucggacccaggaaagcgccuguaauugcauuggcggggauuguuaucugaugaucacagacggacccgcuuccggcaucucugagugccgcuuucucaaaauuagagagggccggaucauuaaggaaaucuucccgaccgggcgcgugaagcacaccgaggaauguacaugcggauuugccagcaacaaaacgauugagugugcuugcagagauaauuccuacaccgccaagcggccuuucgucaaacugaacguggaaacagacaccgccgagauccgccuuaugugcacagagaccuaucuggauacgcccagaccuaaugacggcagcaucacagggcccugugaaucugauggagacaagggcuccgggggaauuaaaggcggcuuuguucaucagcggauggcuagcaagaucgggcgcugguacucuagaaccaugagcaaaaccaagcggaugggaaugggccucuaugugaaguacgacggggaucccuggacagacuccgaggcgcuggcccugucuggagucauggugagcauggaggaaccuggcugguacuccuucggguuugaaauuaaagauaagaaaugcgacgugccguguaucggcauugagaugguccacgauggaggcaagaccacauggcauagcgcugccacggccaucuauugccucauggggucuggacagcugcuuugggacaccguuacaggcguggauauggcucuguga

SEQ ID NO: 221758 - RNA, 1401 nt, Artificial Sequence; identical to SEQ ID NO: 220860
  derived and/or modified CDS sequence (opt5) from neuraminidase__InfluenzaB__AGX22548

SEQ ID NO: 221759 - RNA, 1401 nt, Artificial Sequence; identical to SEQ ID NO: 220699
  derived and/or modified CDS sequence (opt5) from neuraminidase__InfluenzaB__AGX22559

SEQ ID NO: 221760 - RNA, 1401 nt, Artificial Sequence; identical to SEQ ID NO: 220860
  derived and/or modified CDS sequence (opt5) from neuraminidase__InfluenzaB__AGX22570

SEQ ID NO: 221761 - RNA, 1401 nt, Artificial Sequence
  derived and/or modified CDS sequence (opt5) from neuraminidase__InfluenzaB__AGX22581
augcugcccagcaccauccagacacucacgcuguuccuuaccuccggcggggugcugcucucucuguacgucagcgccucccuuucuuaucugcucuacagcgacauucugcugaaguuuucccaaacagagaucaccgcuccuauuaugccgcucgauugcgccaacgcgucuaauguucaggcugugaacagaagcgccacaaaaggagugacccugcuucugcccgaaccugaguggacauauccccggcucuccuguccuggcagcaccuuccagaaggcccugcuuaucucuccccaccgcuuuggggaaacgaaaggaaauuccgcuccucugauuaucagagagccguucaucgccugcggccccaaggaauguaaacauuuugcucucacccacuacgccgcgcagccugggggauauuacaacggcacacgggaggaccgcaauaagcugagacaucugauuagcgucaagcucggcaaaauccccaccguggagaacucuauuuuccacauggccgcuugguccgggagcgccugccaugauggacgggaauggacauauaucggcguugacgggccugauaauaacgcucugcuuaagauuaaauacggagaggccuacaccgacacguaucacucuuacgcgaagaauauccugcgcacacaagaauccgccuguaacugcauuggcggggauuguuaucucaugaucaccgacggacccgcuagcggcaucuccgagugcagauuucugaaaauucgggagggccgcaucauuaaggaaaucuucccgacagggagagugaagcacaccgaggaauguaccugcggauuugccucuaauaaaacaauugagugugcuugccgggauaacaauuacacggccaagcgcccuuucgucaaacuuaacguggaaaccgacacagccgagaucagacugaugugcaccgagacauaucucgauacgccccggccuaaugacggcagcaucaccgggcccugugaauccaacggagauaagggcagcgggggaauuaaaggcggcuuuguucaucagcgcauggcuucuaagaucgggagaugguacucccggacaaugagcaaaaccaagagaaugggaaugggccuguaugugaaguacgacggggaccccuggaccgauucugaggcgcuggcccucagcggagucaugguguccauggaggaaccuggcugguacucuuucggguuugaaauuaaagacaagaaaugcgaugugccguguaucggcauugagaugguccacgacggaggcaagacaaccuggcauagcgcugccacagccaucuauugccugaugggguccggacagcuucugugggauacgguuaccggcguggacauggcucucuga

SEQ ID NO: 221762 - RNA, 1401 nt, Artificial Sequence; identical to SEQ ID NO: 220860
  derived and/or modified CDS sequence (opt5) from neuraminidase__InfluenzaB__AGX22592

SEQ ID NO: 221763 - RNA, 1401 nt, Artificial Sequence; identical to SEQ ID NO: 220860
  derived and/or modified CDS sequence (opt5) from neuraminidase__InfluenzaB__AGX22603

SEQ ID NO: 221764 - RNA, 1401 nt, Artificial Sequence; identical to SEQ ID NO: 221100
  derived and/or modified CDS sequence (opt5) from neuraminidase__InfluenzaB__AGX22614

SEQ ID NO: 221765 - RNA, 1401 nt, Artificial Sequence; identical to SEQ ID NO: 220860
  derived and/or modified CDS sequence (opt5) from neuraminidase__InfluenzaB__AGX22625

SEQ ID NO: 221766 - RNA, 1401 nt, Artificial Sequence
  derived and/or modified CDS sequence (opt5) from neuraminidase__InfluenzaB__AGX22636
augcugcccagcaccauccagacacucacgcuguuccuuaccuccggcggggugcugcucucucuguacgucagcgccucccuuucuuaucugcucuacagcgacauucugcugaaguuuucccaaacagagaucaccgcuccuauuaugccgcucgauugcgccaacgcgucuaauguucaggcugugaacagaagcgccgccaaaggaguggcucugcuucugcccgaaccugaguggacauauccccggcucuccuguccuggcagcaccuuccagaaggcccugcuuaucucuccccaccgcuuuggggaaacaaaaggaaauuccgcuccucugauuaucagagagccguucaucgccugcggccccaccgaauguaagcauuuugcgcucacgcacuacgccgcucagccugggggauauuacaacggcacccgggaggaccgcaauaaacugagacaucugauuagcgucaagcucggcaagauccccacaguggagaacucuauuuuccacauggccgcuugguccgggagcgccugccaugauggaaaagaauggaccuauaucggcguugacgggccugauucuaaugcgcugcuuaagauuaaauacggagaggccuacacagacaccuaucacuccuacgcuaagaacauccugcggacgcaagaaagcgccuguaauugcauuggcggggauuguuaucucaugaucacagacggacccgcuuccggcaucucugagugccgcuuucugaaaauuagagagggccggaucauuaaggaaaucuucccgaccgggcgcgugaagcacacagaggaauguaccugcggauuugccagcaacaaaaccauugagugugccugcagagauaauuccuacacagcuaagcggccuuucgucaaacuuaacguggaaacggacaccgcggagauccgccugaugugcacagagaccuaucucgauacacccagaccuaaugacggcagcaucaccgggcccugugaaucugauggagacaagggcuccgggggaauuaaaggcggcuuuguucaucagcggauggccagcaagaucgggcgcugguacucuagaacgaugagcaaaacaaagcggaugggaaugggccuguaugugaaguacgacggggaucccuggaccgacuccgaggcucuggcccucucuggagucauggugagcauggaggaaccuggcugguacuccuucggguuugaaauuaaagauaagaaaugcgacgugccguguaucggcauugagaugguccacgauggaggcaagaccacauggcauagcgccgcuaccgccaucuauugccugauggggucuggacagcuucugugggacacaguuacgggcguggauauggcgcucuga

SEQ ID NO: 221767 - RNA, 1401 nt, Artificial Sequence; identical to SEQ ID NO: 220860
  derived and/or modified CDS sequence (opt5) from neuraminidase__InfluenzaB__AGX22647

SEQ ID NO: 221768 - RNA, 1401 nt, Artificial Sequence; identical to SEQ ID NO: 220699
  derived and/or modified CDS sequence (opt5) from neuraminidase__InfluenzaB__AGX22658

SEQ ID NO: 221769 - RNA, 1401 nt, Artificial Sequence; identical to SEQ ID NO: 220860
  derived and/or modified CDS sequence (opt5) from neuraminidase__InfluenzaB__AGX22669

SEQ ID NO: 221770 - RNA, 1401 nt, Artificial Sequence; identical to SEQ ID NO: 220860
  derived and/or modified CDS sequence (opt5) from neuraminidase__InfluenzaB__AGX22680

SEQ ID NO: 221771 - RNA, 1401 nt, Artificial Sequence; identical to SEQ ID NO: 220860
  derived and/or modified CDS sequence (opt5) from neuraminidase__InfluenzaB__AGX22691

SEQ ID NO: 221772 - RNA, 1401 nt, Artificial Sequence; identical to SEQ ID NO: 220860
  derived and/or modified CDS sequence (opt5) from neuraminidase__InfluenzaB__AGX22702

SEQ ID NO: 221773 - RNA, 1401 nt, Artificial Sequence; identical to SEQ ID NO: 220860
  derived and/or modified CDS sequence (opt5) from neuraminidase__InfluenzaB__AGX22713

SEQ ID NO: 221774 - RNA, 1401 nt, Artificial Sequence
  derived and/or modified CDS sequence (opt5) from neuraminidase__InfluenzaB__AGX22724
augcugcccagcaccauccagacacucacgcuguuccuuaccuccggcggggugcugcucucucuguacgucagcgcccuucuguccuaucuccuguacucugacauucugcucaaguuuagccaaacagagaucaccgcuccuauuaugccgcuggauugcgccaacgcguccaauguucaggcugugaacagaucugccacaaaaggagugacccuucugcuccccgaaccugaguggacauauccccggcugagcuguccuggcuccaccuuccagaaggcccuucugaucagcccccaccgcuuuggggaaacgaaaggaaauucugcuccucucauuaucagagagccguucaucgccugcggccccaaggaauguaaacauuuugcucugacccacuacgccgcgcagccugggggauauuacaacggcacacgggaggaccgcaauaagcugagacaucucauuuccgucaagcugggcaaaauccccaccguggagaacagcauuuuccacauggccgcuuggucuggguccgccugccaugauggacgggaauggacauauaucggcguugacgggccugauagcaaugcccuucugaagauuaaauacggagaggcuuacaccgacacguaucacucuuacgcgaagaacauccuccgcacacaagaauccgccuguaauugcauuggcggggauuguuaucugaugaucaccgacggacccgcuagcggcaucuccgagugcagauuucuuaaaauucgggagggccgcaucauuaaggaaaucuucccgacagggagagugaagcacaccgaggaauguaccugcggauuugccucuaacaaaacaauugagugugcuugccgggauaauagcuacacggccaagcgcccuuucgucaaacugaacguggaaaccgacacagccgagaucagacucaugugcaccgagacauaucuggauacgccccggccuaaugacggcuccaucaccgggcccugugaaagcaacggagauaagggcucugggggaauuaaaggcggcuuuguucaucagcgcauggcuuccaagaucgggagaugguacagccggacaaugucuaaaaccaagagaaugggaaugggccuguaugugaaguacgacggggaccccuggaccgauagcgaggcgcucgcccuguccggagucauggugucuauggaggaaccuggcugguacagcuucggguuugaaauuaaagacaagaaaugcgaugugccguguaucggcauugagaugguccacgacggaggcaagacaaccuggcauuccgcugccacagccaucuauugccuuauggggagcggacagcugcucugggauacgguuaccggcguggacauggcucuguga

SEQ ID NO: 221775 - RNA, 1401 nt, Artificial Sequence; identical to SEQ ID NO: 220860
  derived and/or modified CDS sequence (opt5) from neuraminidase__InfluenzaB__AGX22735

SEQ ID NO: 221776 - RNA, 1401 nt, Artificial Sequence
  derived and/or modified CDS sequence (opt5) from neuraminidase__InfluenzaB__AGX22746
augcugcccagcaccauccagacacucacgcuguuccuuaccuccggcggggugcugcucucucuguacgucagcgccucccuuucuuaucugcucuacagcgacauucugcugaaguuuucccaaacagagaucaccgcuccuauuaugccgcucgauugcgccaacgcgucuaauguucaggcugugaacagaagcgccacaaaaggagugacccugcuucugcccgaaccugaguggacauauccccggcucuccuguccuggcagcaccuuccagaaggcccugcuuaucucuccccaccgcuuuggggaaacgaaaggaaauuccgcuccucugauuaucagagagccguucaucgccugcggccccaccgaauguaagcauuuugcucucacacacuacgccgcgcagccugggggauauuacaaccggacccgcgaggacagaaauaaacugcggcaucugauuagcgucaagcucggcaagauccccacaguggagaacucuauuuuccacauggccgcuugguccggcagcgccugccaugaugggaaagaauggaccuauaucggaguugacggcccugauucuaaugcucugcuuaagauuaaauacggggaggccuacacggacacauaucacuccuacgcgaagaacauccugcgcacccaagaaagcgccuguaauugcauuggaggcgauuguuaucucaugaucacagacgggcccgcuuccggaaucucugagugcagauuucugaaaauucgggagggccgcaucauuaaggaaaucuucccgaccggcagagugaagcacaccgaggaauguacaugcggguuugccagcaacaaaacgauugagugugcuugccgggauaauuccuacaccgccaagcgcccuuucgucaaacuuaacguggaaacagacaccgccgagaucagacugaugugcacagagaccuaucucgauacgccccggccuaaugacggaagcaucacaggccccugugaaucugauggggacaagggauccggcgggauuaaaggaggcuuuguucaucagcgcauggcuagcaagaucggcagaugguacucucggaccaugagcaaaaccaagagaauggggaugggacuguaugugaaguacgacggcgaucccuggacagacuccgaggcgcuggcccucucuggggucauggugagcauggaggaaccuggaugguacuccuucggcuuugaaauuaaagauaagaaaugcgacgugccguguaucgggauugagaugguccacgauggcggaaagaccacauggcauagcgcugccacggccaucuauugccugaugggcucugggcagcuucugugggacaccguuacaggaguggauauggcucucuga

SEQ ID NO: 221777 - RNA, 1401 nt, Artificial Sequence; identical to SEQ ID NO: 220860
  derived and/or modified CDS sequence (opt5) from neuraminidase__InfluenzaB__AGX22757

SEQ ID NO: 221778 - RNA, 1401 nt, Artificial Sequence; identical to SEQ ID NO: 220860
  derived and/or modified CDS sequence (opt5) from neuraminidase__InfluenzaB__AGX22768

SEQ ID NO: 221779 - RNA, 1401 nt, Artificial Sequence; identical to SEQ ID NO: 221201
  derived and/or modified CDS sequence (opt5) from neuraminidase__InfluenzaB__AGX22779

SEQ ID NO: 221780 - RNA, 1401 nt, Artificial Sequence; identical to SEQ ID NO: 220860
  derived and/or modified CDS sequence (opt5) from neuraminidase__InfluenzaB__AGX22790

SEQ ID NO: 221781 - RNA, 1401 nt, Artificial Sequence
  derived and/or modified CDS sequence (opt5) from neuraminidase__InfluenzaB__AGX22801
augcugcccagcaccauccagacacucacgcuguuccuuaccuccggcggggugcugcucucucuguacgucagcgccucccuuucuuaucugcucuacagcgacauucugcugaaguuuucccaaacagagaucaccgcuccuauuaugccgcucgauugcgccaacgcgucuaauguucaggcugugaacagaagcgccgccaaaggagugacacugcuucugcccgaaccugaguggaccuauccccggcucuccuguccuggcagcacauuccagaaggcucugcuuaucucuccccaccgcuuuggggaaaccaaaggaaauuccgccccucugauuaucagagagccguucaucgcuugcggccccacggaauguaagcauuuugcccucacccacuacgcggcccagccugggggauauuacaacggcacacggggcgaccgcaauaaacugagacaucugauuagcgucaagcucgggaagauccccaccguggagaacucuauuuuccacauggcugccugguccggaagcgcuugccaugauggcaaagaguggacauauaucgggguugacggaccugauucuaaugcccugcuuaagauuaaauacggcgaagcguacaccgacacguaucacuccuacgccaagaacauccugcggacacaagagagcgcuuguaauugcauugggggaaacuguuaucucaugaucaccgauggcuccgccucuggcgugagcgaaugccgcuuucugaaaaucagagaggggcggauuaucaaggagauuuuccccacaggacgcgucaagcacaccgaagaguguaccugcggcuuugcuuccaauaaaacaaucgaaugugccugcagagacaacagcuacacggccaagcggccguucgugaaacuuaauguugagaccgauacagcugaaauucgccugaugugcaccgagacauaucucgacaccccuagacccaacgaugggucuaucacgggaccuugugaguccgacggcgauaaggggagcggaggcaucaaaggcggguuugugcaucagcggauggcgucuaagauuggacgcugguacagcagaacaauguccaaaaccaagcggaugggcauggggcuguaugucaaguacgacggagaccccuggaccgauucugaagcccuggcucucagcggcgugaugguguccauggaggaacccgggugguacagcuucggcuuugagaucaaagacaagaaaugcgaugucccuuguauuggaaucgaaaugguucacgacggcgggaagacaaccuggcauucugccgccacagcuauuuauugccugaugggauccggccagcuucugugggauacggugaccgggguggacauggcccucuga

SEQ ID NO: 221782 - RNA, 1401 nt, Artificial Sequence; identical to SEQ ID NO: 220860
  derived and/or modified CDS sequence (opt5) from neuraminidase__InfluenzaB__AGX22812

SEQ ID NO: 221783 - RNA, 1401 nt, Artificial Sequence; identical to SEQ ID NO: 220860
  derived and/or modified CDS sequence (opt5) from neuraminidase__InfluenzaB__AGX22823

SEQ ID NO: 221784 - RNA, 1401 nt, Artificial Sequence; identical to SEQ ID NO: 220860
  derived and/or modified CDS sequence (opt5) from neuraminidase__InfluenzaB__AGX22834

SEQ ID NO: 221785 - RNA, 1401 nt, Artificial Sequence; identical to SEQ ID NO: 220860
  derived and/or modified CDS sequence (opt5) from neuraminidase__InfluenzaB__AGX22845

SEQ ID NO: 221786 - RNA, 1401 nt, Artificial Sequence; identical to SEQ ID NO: 220860
  derived and/or modified CDS sequence (opt5) from neuraminidase__InfluenzaB__AGX22856

SEQ ID NO: 221787 - RNA, 1401 nt, Artificial Sequence; identical to SEQ ID NO: 220860
  derived and/or modified CDS sequence (opt5) from neuraminidase__InfluenzaB__AGX22867

SEQ ID NO: 221788 - RNA, 1401 nt, Artificial Sequence; identical to SEQ ID NO: 220860
  derived and/or modified CDS sequence (opt5) from neuraminidase__InfluenzaB__AGX22878

SEQ ID NO: 221789 - RNA, 1401 nt, Artificial Sequence
  derived and/or modified CDS sequence (opt5) from neuraminidase__InfluenzaB__AGX22889
augcugcccagcaccauccagacacucacgcuguuccuuaccuccggcggggugcugcucucucuguacgucagcgccucccuuucuuaucugcucuacagcgacauucugcugaaguuuucccaaacagagaucaccgcuccuauuaugccgcucgauugcgccaacgcgucuaauguucaggcugugaacagaagcgccgccaaaggagugacacugcuucugcccgaaccugaguggaccuauccccggcucuccuguccuggcagcacauuccagaaggcucugcuuaucucuccccaccgcuuuggggaaaccaaaggaaauuccgccccucugauuaucagagagccguucaucgcuugcggccccacggaauguaagcauuuugcccucacccacuacgcggcccagccugggggauauuacaacggcacacgggaggaccgcaauaaacugagacaucugauuagcgucaagcucggcaagauccccaccguggagaacucuauuuuccacauggcugccugguccgggagcgcuugccaugauggaaaagaauggacauauaucggcguugacgggccugauucuaaugcccugcuuaagauuaaauacggagaggcguacaccgacacguaucacuccuacgccaagaacauccugcggacacaagaaagcgcuuguaauugcauuggcggggauuguuaucucaugaucaccgacggacccgccuccggcaucucugagugccgcuuucugaaaauuagagagggccggaucauuaaggaaaucuucccgacagggcgcgugaagcacaccgaggaauguaccugcggauuugcuagcaacaaaacaauugagugugccugcagagauaauucccauacggccaagcggccuuucgucaaacuuaacguggaaaccgacacagcugagauccgccugaugugcaccgagacauaccucgauacccccagaccuaaugacggcagcaucacggggcccugugaaucugauggagacaagggcuccgggggaauuaaaggcggcuuuguucaccagcggauggcgagcaagaucgggcgcugguauucuagaacaaugagcaaaaccaagcggaugggaaugggccuguacgugaaguaugacggggaucccuggaccgacuccgaggcccuggcucucucuggagucauggugagcauggaggaaccuggcugguacuccuucggguuugaaauuaaagauaagaaaugcgacgugccguguaucggcauugagaugguccaugauggaggcaagacaaccuggcacagcgccgccacagcuaucuacugccugauggggucuggacagcuucugugggacacgguuaccggcguggauauggcccucuga

SEQ ID NO: 221790 - RNA, 1401 nt, Artificial Sequence; identical to SEQ ID NO: 220699
  derived and/or modified CDS sequence (opt5) from neuraminidase__InfluenzaB__AGX22900

SEQ ID NO: 221791 - RNA, 1401 nt, Artificial Sequence
  derived and/or modified CDS sequence (opt5) from neuraminidase__InfluenzaB__AGX22911
augcugcccagcaccauccagacacucacgcuguuccuuaccuccggcggggugcugcucucucuguacgucagcgccucccuuucuuaucugcucuacagcgacauucugcugaaguuuucccaaacagagaucaccgcuccuauuaugccgcucgauugcgccaacgcgucuaauguucaggcugugaacagaagcgccgccaaaggagugacacugcuucugcccgaaccugaguggaccuauccccggcucuccuguccuggcagcacauuccagaaggcucugcuuaucucuccccaccgcuuuggggaaaccaaaggaaauuccgccccucugauuaucagagagccguucaucgcuugcggccccacggaauguaagcauuuugcccucacccacuacgcggcccagccugggggauauuacaacggcacacgggaggaccgcaauaaacugagacaucugauuagcgucaagcucggcaagauccccaccguggagaacucuauuuuccacauggcugccugguccgggagcgcuugccaugauggaaaagaauggacauauaucggcguugacgggccugauucuaaugcccugcuuaagauuaaauacggagaggcguacaccgacacguaucacuccuacgccaagaacauccugcggacacaagaaagcgcuuguaauugcauuggcggggauuguuaucucaugaucaccgacggacccgccuccggcacaucugagugccgcuuucugaaaaucagagagggccggauuaucaaggaaauuuucccgaccgggcgcgugaagcacaccgaggaauguacaugcggauuugcuagcaacaaaacgaucgagugugccugcagagauaauuccuacaccgccaagcggccuuucgucaaacuuaacguggaaacagacaccgcugagauucgccugaugugcacagagaccuaucucgauacgcccagaccuaaugacggcagcaucacagggcccugugaaucugauggagacaagggcuccgggggaaucaaaggcggcuuuguucaucagcggauggcgagcaagauugggcgcugguacucuagaaccaugagcaaaaccaagcggaugggaaugggccuguaugugaaguacgacggggaucccuggacagacuccgaggcccuggcucucucuggagucauggugagcauggaggaaccuggcugguacuccuucggguuugaaaucaaagauaagaaaugcgacgugccguguauuggcaucgagaugguccacgauggaggcaagaccacauggcauagcgccgccacggcuauuuauugccugauggggucuggacagcuucugugggacaccguuacaggcguggauauggcccucuga

SEQ ID NO: 221792 - RNA, 1401 nt, Artificial Sequence
  derived and/or modified CDS sequence (opt5) from neuraminidase__InfluenzaB__AGX22922
augcugcccagcaccauccagacacucacgcuguuccuuaccuccggcggggugcugcucucucuguacgucagcgccucccuuucuuaucugcucuacagcgacauucugcugaaguuuucccaaacagagaucaccgcuccuauuaugccgcucgauugcgccaacgcgucuaauguucaggcugugaacagaagcgccacaaaaggagugacccugcuucugcccgaaccugaguggacauauccccggcucuccuguccuggcagcaccuuccagaaggcccugcuuaucucuccccaccgcuuuggggaaacgaaaggaaauuccgcuccucugauuaucagagagccguucaucgccugcggccccaccgaauguaagcauuuugcucucacacacuacgccgcgcagccugggggauauuacaacggcacccgggaggaccgcaauaaacugagacaucugauuagcgucaagcucggcaagauccccacaguggagaacucuauuuuccacauggccgcuugguccgggagcgccugccaugauggaaaagaauggaccuauaucggcguugacgggccugauucuaaugcucugcuuaagauuaaauacggagaggccuacacggacacauaucacuccuacgcgaagaacauccugcggacccaagaaagcgccuguaauugcauuggcggggauuguuaucucaugaucacagacggacccgcuuccggcaucucugagugccgcuuucugaaaauuagagagggccggaucauuaaggaaaucuucccgaccgggcgcgugaagcacaccgaggaauguacaugcggauuugccagcaacaaaacgauugagugugcuugcagagauaauuccuacaccgccaagcggccuuucgucaaacuuaacguggaaacagacaccgccgagauccgccugaugugcacagagaccuaucucgauacgcccagaccuaaugacggcagcaucacagggcccugugaaucugauggagacaagggcuccgggggaauuaaaggcggcuuuguucaucagcggauggcuagcaagaucgggcgcugguacucuagaaccaugagcaaaaccaagcggaugggaaugggccuguaugugaaguacgacggggaucccuggacagacaacgaggcgcuggcccucuccggagucauggugucuauggaggaaccuggcugguacagcuucggguuugaaauuaaagauaagaaaugcgacgugccguguaucggcauugagaugguccacgauggaggcaagaccacauggcauuccgcugccacggccaucuauugccugauggggagcggacagcuucugugggacaccguuacaggcguggauauggcucucuga

SEQ ID NO: 221793 - RNA, 1401 nt, Artificial Sequence; identical to SEQ ID NO: 220860
  derived and/or modified CDS sequence (opt5) from neuraminidase__InfluenzaB__AGX22933

SEQ ID NO: 221794 - RNA, 1401 nt, Artificial Sequence; identical to SEQ ID NO: 220860
  derived and/or modified CDS sequence (opt5) from neuraminidase__InfluenzaB__AGX22944

SEQ ID NO: 221795 - RNA, 1401 nt, Artificial Sequence; identical to SEQ ID NO: 220860
  derived and/or modified CDS sequence (opt5) from neuraminidase__InfluenzaB__AGX22955

SEQ ID NO: 221796 - RNA, 1401 nt, Artificial Sequence; identical to SEQ ID NO: 220860
  derived and/or modified CDS sequence (opt5) from neuraminidase__InfluenzaB__AGX22966

SEQ ID NO: 221797 - RNA, 1401 nt, Artificial Sequence; identical to SEQ ID NO: 220699
  derived and/or modified CDS sequence (opt5) from neuraminidase__InfluenzaB__AGX22977

SEQ ID NO: 221798 - RNA, 1401 nt, Artificial Sequence; identical to SEQ ID NO: 221115
  derived and/or modified CDS sequence (opt5) from neuraminidase__InfluenzaB__AGX22988

SEQ ID NO: 221799 - RNA, 1401 nt, Artificial Sequence
  derived and/or modified CDS sequence (opt5) from neuraminidase__InfluenzaB__AGX22999
augcugcccagcaccauccagacacucacgcuguuccuuaccuccggcggggugcugcucucucuguacgucagcgccucccuuucuuaucugcucuacagcgacauucugcugaaguuuucccaaacagagaucaccgcuccuauuaugccgcucgauugcgccaacgcgucuaauguucaggcugugaacagaagcgccgccaaaggagugacacugcuucugcccgaaccugagugggcuuauccccggcucuccuguccuggcagcaccuuccagaaggcccugcuuaucucuccccaccgcuuuggggaaacaaaaggaaauuccgcuccucugauuaucagagagccguucaucgccugcggccccaccgaauguaagcauuuugcgcucacgcacuacgccgcucagccugggggauauuacaacggcacccgggaggaccgcaauaaacugagacaucugauuagcgucaagcucggcaagauccccacaguggagaacucuauuuuccacauggccgcuugguccgggagcgccugccaugauggaaaagaauggaccuauaucggcguugacgggccugauucuaaugcgcugcuuaagauuaaauacggagaggccuacacagacaccuaucacuccuacgcuaagaacauccugcggacgcaagaaagcgccuguaauugcauuggcggggauuguuaucucaugaucacagacggacccgcuuccggcaucucugagugccgcuuucugaaaauuagagagggccggaucauuaaggaaaucuucccgaccgggcgcgugaagcacacagaggaauguaccugcggauuugccagcaacaaaaccauugagugugccugcagagauaauuccuacacagcuaagcggccuuucgucaaacuuaacguggaaacggacaccgcggagauccgccugaugugcacagagaccuaucucgauacacccagaccuaaugacggcagcaucaccgggcccugugaaucugauggagacaagggcuccgggggaauuaaaggcggcuuuguucaucagcggauggccagcaagaucgggcgcugguacucuagaacgaugagcaaaacaaagcggaugggaaugggccuguaugugaaguacgacggggaucccuggaccgacuccgaggcucuggcccucucuggagucauggugagcauggaggaaccuggcugguacuccuucggguuugaaauuaaagauaagaaaugcgacgugccguguaucggcauugagaugguccacgauggaggcaagaccacauggcauagcgccgcuaccgccaucuauugccugauggggucuggacagcuucugugggacacaguuacgggcguggauauggcgcucuga

SEQ ID NO: 221800 - RNA, 1401 nt, Artificial Sequence; identical to SEQ ID NO: 221799
  derived and/or modified CDS sequence (opt5) from neuraminidase__InfluenzaB__AGX23010

SEQ ID NO: 221801 - RNA, 1401 nt, Artificial Sequence; identical to SEQ ID NO: 220699
  derived and/or modified CDS sequence (opt5) from neuraminidase__InfluenzaB__AGX23021

SEQ ID NO: 221802 - RNA, 1401 nt, Artificial Sequence; identical to SEQ ID NO: 220860
  derived and/or modified CDS sequence (opt5) from neuraminidase__InfluenzaB__AGX23032

SEQ ID NO: 221803 - RNA, 1401 nt, Artificial Sequence
  derived and/or modified CDS sequence (opt5) from neuraminidase__InfluenzaB__AGX23043
augcugcccagcaccauccagacacucacgcuguuccuuaccuccggcggggugcugcucucucuguacgucagcgccucccuuucuuaucugcucuacagcgacauucugcugaaguuuucccaaacagagaucaccgcuccuauuaugccgcucgauugcgccaacgcgucuaauguucaggcugugaacagaagcgccgccaaaggagugacacugcuucugcccgaaccugaguggaccuauccccggcucuccuguccuggcagcacauuccagaaggcucugcuuaucucuccccaccgcuuuggggaaaccaaaggaaauuccgccccucugauuaucagagagccguucaucgcuugcggccccacggaauguaagcauuuugcccucacccacuacgcggcccagccugggggauauuacaacggcacacgggaggaccgcaauaaacugagacaucugauuagcgucaagcucggcaagauccccaccguggagaacucuauuuuccacauggcugccugguccgggagcgcuugccaugauggaaaagaauggacauauaucggcguugacgggccugauucuaaugcccugcuuaagauuaaauacggagaggcguacaccgacacguaucacuccuacgccaagaacauccugcggacacaagaaagcgcuuguaauugcauuggcggggauuguuaucucaugaucaccgacggacccgcccugggcaucuccgagugccgcuuucuuaaaauuagagagggccggaucauuaaggaaaucuucccgacagggcgcgugaagcacaccgaggaauguaccugcggauuugcuucuaacaaaacaauugagugugccugcagagauaauagcuacacggccaagcggccuuucgucaaacugaacguggaaaccgacacagcugagauccgccucaugugcaccgagacauaucuggauacccccagaccuaaugacggcuccaucacggggcccugugaaagcgauggagacaagggcucugggggaauuaaaggcggcuuuguucaucagcggauggcguccaagaucgggcgcugguacagcagaacaaugucuaaaaccaagcggaugggaaugggccuguaugugaaguacgacggggaucccuggaccgacagcgaggcccucgcucuguccggagucauggugucuauggaggaaccuggcugguacagcuucggguuugaaauuaaagauaagaaaugcgacgugccguguaucggcauugagaugguccacgauggaggcaagacaaccuggcauuccgccgccacagcuaucuauugccuuauggggagcggacagcugcucugggacacgguuaccggcguggauauggcccuguga

SEQ ID NO: 221804 - RNA, 1401 nt, Artificial Sequence; identical to SEQ ID NO: 220699
  derived and/or modified CDS sequence (opt5) from neuraminidase__InfluenzaB__AGX23054

SEQ ID NO: 221805 - RNA, 1401 nt, Artificial Sequence; identical to SEQ ID NO: 220699
  derived and/or modified CDS sequence (opt5) from neuraminidase__InfluenzaB__AGX23065

SEQ ID NO: 221806 - RNA, 1401 nt, Artificial Sequence; identical to SEQ ID NO: 220699
  derived and/or modified CDS sequence (opt5) from neuraminidase__InfluenzaB__AGX23076

SEQ ID NO: 221807 - RNA, 1401 nt, Artificial Sequence; identical to SEQ ID NO: 220860
  derived and/or modified CDS sequence (opt5) from neuraminidase__InfluenzaB__AGX23087

SEQ ID NO: 221808 - RNA, 1401 nt, Artificial Sequence; identical to SEQ ID NO: 220699
  derived and/or modified CDS sequence (opt5) from neuraminidase__InfluenzaB__AGX23098

SEQ ID NO: 221809 - RNA, 1401 nt, Artificial Sequence
  derived and/or modified CDS sequence (opt5) from neuraminidase__InfluenzaB__AGX23109
augcugcccagcaccauccagacacucacgcuguuccuuaccuccggcggggugcugcucucucuguacgucagcgccucccuuucuuaucugcucuacagcgacauucugcugaaguuuucccaaacagagaucaccgcuccuauuaugccgcucgauugcgccaacgcgucuaauguucaggcugugaacagaagcgccacaaaaggagugacccugcuucugcccgaaccugaguggacauauccccggcucuccuguccuggcagcaccuuccagaaggcccugcuuaucucuccccaccgcuuuggggaaacgaaaggaaauuccgcuccucugauuaucagagagccguucaucgccugcggccccaccgaauguaagcauuuugcucucacacacuacgccgcgcagccugggggauauuacaacggcacccgggaggaccgcaauaaacugagacaucugauuagcgucaagcucggcaagauccccacaguggagaacucuauuuuccacauggccgcuugguccgggagcgccugccaugauggaaaagaauggaccuauaucggcguugacgggccugauucuaaugcucugcuuaagauuaaauacggagaggccuacacggacacauaucacuccuacgcgaagaacauccugcggacccaagaaagcgccuguaauugcauucgcggcgauuguuaucucaugaucacagacgggcccgcuuccggaaucucugagugcagauuucugaaaauucgggagggccgcaucauuaaggaaaucuucccgaccggcagagugaagcacaccgaggaauguacaugcggguuugccagcaacaaaacgauugagugugcuugccgggauaauuccuacaccgccaagcgcccuuucgucaaacuuaacguggaaacagacaccgccgagaucagacugaugugcacagagaccuaucucgauacgccccggccuaaugacggaagcaucacaggccccugugaaucugauggggacaagggauccggcgggauuaaaggaggcuuuguucaucagcgcauggcuagcaagaucggcagaugguacucucggaccaugagcaaaaccaagagaauggggaugggacuguaugugaaguacgacggcgaucccuggacagacuccgaggcgcuggcccucucuggggucauggugagcauggaggaaccuggaugguacuccuucggcuuugaaauuaaagauaagaaaugcgacgugccguguaucgggauugagaugguccacgauggcggaaagaccacauggcauagcgcugccacggccaucuauugccugaugggcucugggcagcuucugugggacaccguuacaggaguggauauggcucucuga

SEQ ID NO: 221810 - RNA, 1401 nt, Artificial Sequence; identical to SEQ ID NO: 220860
  derived and/or modified CDS sequence (opt5) from neuraminidase__InfluenzaB__AGX23120

SEQ ID NO: 221811 - RNA, 1401 nt, Artificial Sequence
  derived and/or modified CDS sequence (opt5) from neuraminidase__InfluenzaB__AGX23131
augcugcccagcaccauccagacacucacgcuguuccuuaccuccggcggggugcugcucucucuguacgucagcgccucccuuucuuaucugcucuacagcgacauucugcugaaguuuucccaaacagagaucauugcuccuaucaugccgcucgauugcgccaacgcgucuaauguucaggcugugaacagaagcgccgccaaaggagugacccugcuucugcccgaaccugaguggacauauccccggcucuccuguccuggcagcaccuuccagaaggcucugcuuauuucuccccaccgcuuuggggaaacaaaaggaaauuccgccccucugaucaucagagagccguucauugcuugcggccccaccgaauguaagcauuuugcccucacgcacuacgcggcccagccugggggauauuacaacggcacccgggaggaccgcaauaaacugagacaucugaucagcgucaagcucggcaagauucccacaguggagaacucuaucuuccacauggcugccugguccgggagcgcuugccaugauggaaaagaauggaccuauauuggcguugacgggccugauucuaaugcccugcuuaagaucaaauacggagaggcguacacagacaccuaucacuccuacgccaagaacauucugcggacgcaagaaagcgcuuguaauugcaucggcggggauuguuaucucaugaucacagacggacccgccuccggcauuucugagugccgcuuucugaaaaucagagagggccggauuaucaaggaaauuuucccgaccgggcgcgugaagcacacagaggaauguaccugcggauuugcuagcaacaaaaccaucgagugugccugcagagauaauuccuacacagccaagcggccuuucgucaaacuuaacguggaaacggacaccgcugagauccgccugaugugcacagagaccuaucucgauacacccagaccuaaugacggcagcauuaccgggcccugugaaucugauggagacaagggcuccgggggaaucaaaggcggcuuuguucaucagcggauggcgagcaagauugggcgcugguacucuagaacgaugagcaaaacaaagcggaugggaaugggccuguaugugaaguacgacggggaucccuggaccgacuccgaggcccuggcucucucuggagucauggugagcauggaggaaccuggcugguacuccuucggguuugaaaucaaagauaagaaaugcgacgugccguguauuggcaucgagaugguccacgauggaggcaagaccacauggcauagcgccgccaccgcuaucuauugccugauggggucuggacagcuucugugggacacaguuacgggcguggauauggcccucuga

SEQ ID NO: 221812 - RNA, 1401 nt, Artificial Sequence; identical to SEQ ID NO: 220860
  derived and/or modified CDS sequence (opt5) from neuraminidase__InfluenzaB__AGX23142

SEQ ID NO: 221813 - RNA, 1401 nt, Artificial Sequence; identical to SEQ ID NO: 220699
  derived and/or modified CDS sequence (opt5) from neuraminidase__InfluenzaB__AGX23153

SEQ ID NO: 221814 - RNA, 1401 nt, Artificial Sequence; identical to SEQ ID NO: 220699
  derived and/or modified CDS sequence (opt5) from neuraminidase__InfluenzaB__AGX23164

SEQ ID NO: 221815 - RNA, 1401 nt, Artificial Sequence; identical to SEQ ID NO: 220699
  derived and/or modified CDS sequence (opt5) from neuraminidase__InfluenzaB__AGX23175

SEQ ID NO: 221816 - RNA, 1401 nt, Artificial Sequence
  derived and/or modified CDS sequence (opt5) from neuraminidase__InfluenzaB__AGX23186
augcugcccagcaccacacagacgcucacccuguuccuuacauccggcggggugcugcucucucuguacgucagcgccucccuuucuuaucugcucuacagcgacauccugcugaaguuuucccaaaccgagauuacagcuccuaucaugccgcucgauugcgccaacgcgucuaauguucaggcugugaacagaagcgccgccaaaggagugacccugcuucugcccgaaccugaguggacauauccccggcucuccuguccuggcagcaccuuccagaaggcucugcuuauuucuccccaccgcuuuggggaaacgaaaggaaauuccgccccucugaucauuagagagccguucaucgcuugcggccccaccgaauguaagcauuuugcccucacacacuacgcggcccagccugggggauauuacaacggcacccgggaggaccgcaauaaacugagacaucugaucagcgucaagcucggcaagauucccacaguggagaacucuaucuuccacauggcugccugguccgggagcgcuugccaugauggaaaagaauggaccuauauuggcguugacgggccugauucuaaugcccugcuuaagaucaaauacggagaggcguacacggacacauaucacuccuacgccaagaacauucugcggacccaagaaagcgcuuguaauugcaucggcggggauuguuaucucaugauuacagacggacccgccuccggcaucucugagugccgcuuucugaaaaucagagagggccggauuaucaaggaaauuuucccgaccgggcgcgugaagcacaccgaggaauguacaugcggauuugcuagcaacaaaacgaucgagugugccugcagagauaauuccuacaccgccaagcggccuuucgucaaacuuaacguggaaacagacaccgcugagauucgccugaugugcacagagaccuaucucgauacgcccagaccuaaugacggcagcaucacagggcccugugaaucugauggagacaagggcuccgggggaaucaaaggcggcuuuguucaucagcggauggcgagcaagauugggcgcugguacucuagaaccaugagcaaaaccaagcggaugggaaugggccuguaugugaaguacgacggggaucccuggacagacuccgaggcccuggcucucucuggagucauggugagcauggaggaaccuggcugguacuccuucggguuugaaaucaaagauaagaaaugcgacgugccguguauuggcaucgagaugguccacgauggaggcaagaccacauggcauagcgccgccacggcuauuuauugccugauggggucuggacagcuucugugggacaccguuacaggcguggauauggcccucuga

SEQ ID NO: 221817 - RNA, 1401 nt, Artificial Sequence; identical to SEQ ID NO: 220860
  derived and/or modified CDS sequence (opt5) from neuraminidase__InfluenzaB__AGX23197

SEQ ID NO: 221818 - RNA, 1401 nt, Artificial Sequence; identical to SEQ ID NO: 220860
  derived and/or modified CDS sequence (opt5) from neuraminidase__InfluenzaB__AGX23208

SEQ ID NO: 221819 - RNA, 1401 nt, Artificial Sequence; identical to SEQ ID NO: 220860
  derived and/or modified CDS sequence (opt5) from neuraminidase__InfluenzaB__AGX23219

SEQ ID NO: 221820 - RNA, 1401 nt, Artificial Sequence
  derived and/or modified CDS sequence (opt5) from neuraminidase__InfluenzaB__AGX23230
augcugcccagcaccauccagacacucacgcuguuccuuaccuccggcggggugcugcucucucuguacgucagcgccucccuuucuuaucugcucuacagcgacauucugcugaaguuuucccaaacagagaucaccgcuccuauuaugccgcucgauugcgccaacgcgucuaauguucaggcugugaacagaagcgccgccaaaggagugacacugcuucugcccgaaccugaguggaccuauccccggcucuccuguccuggcagcacauuccagaaggcucugcuuaucucuccccaccgcuuuggggaaaccaaaggaaauuccgccccucugauuaucagagagccguucaucgcuugcggccccacggaauguaagcauuuugcccucacccacuacgcggcccagccuggggaguauuacaacggaacacgggaggaccgcaauaaacugagacaucugauuagcgucaagcucggcaagauccccaccguggaaaacucuauuuuccacauggcugccugguccggcagcgcuugccaugaugggaaagaguggacauauaucggaguugacggcccugauucuaaugcccugcuuaagauuaaauacggggaagcguacaccgacacguaucacuccuacgccaagaacauccugcggacacaagagagcgcuuguaauugcauuggaggcgauuguuaucucaugaucaccgacgggcccuccucuggaaucagcgagugccgcuuucugaaaauuagagaaggccggaucauuaaggagaucuucccgacaggccgcgugaagcacaccgaagaguguaccugcggguuugccuccaacaaaacaauugaaugugcuugcagagauaauagcuacacggccaagcggccuuucgucaaacuuaacguggagaccgacacagccgagauccgccugaugugcaccgaaacauaucucgauacccccagaccuaaugacggaucuaucacgggccccugugaguccgauggggacaagggaagcggcgggauuaaaggaggcuuuguucaucagcggauggcuucuaagaucggccgcugguacagcagaacaauguccaaaaccaagcggauggggaugggacuguaugugaaguacgacggcgaucccuggaccgacucugaagcgcuggcccucagcggggucaugguguccauggaggaaccuggaugguacagcuucggcuuugagauuaaagauaagaaaugcgacgugccguguaucgggauugagaugguccacgauggcggaaagacaaccuggcauucugcugccacagccaucuauugccugaugggcuccgggcagcuucugugggacacgguuaccggaguggauauggcucucuga

SEQ ID NO: 221821 - RNA, 1401 nt, Artificial Sequence; identical to SEQ ID NO: 220699
  derived and/or modified CDS sequence (opt5) from neuraminidase__InfluenzaB__AGX23241

SEQ ID NO: 221822 - RNA, 1401 nt, Artificial Sequence; identical to SEQ ID NO: 220860
  derived and/or modified CDS sequence (opt5) from neuraminidase__InfluenzaB__AGX23252

SEQ ID NO: 221823 - RNA, 1401 nt, Artificial Sequence; identical to SEQ ID NO: 220860
  derived and/or modified CDS sequence (opt5) from neuraminidase__InfluenzaB__AGX23263

SEQ ID NO: 221824 - RNA, 1401 nt, Artificial Sequence; identical to SEQ ID NO: 220860
  derived and/or modified CDS sequence (opt5) from neuraminidase__InfluenzaB__AGX23274

SEQ ID NO: 221825 - RNA, 1401 nt, Artificial Sequence; identical to SEQ ID NO: 220699
  derived and/or modified CDS sequence (opt5) from neuraminidase__InfluenzaB__AGX23285

SEQ ID NO: 221826 - RNA, 1401 nt, Artificial Sequence; identical to SEQ ID NO: 220860
  derived and/or modified CDS sequence (opt5) from neuraminidase__InfluenzaB__AGX23296

SEQ ID NO: 221827 - RNA, 1401 nt, Artificial Sequence
  derived and/or modified CDS sequence (opt5) from neuraminidase__InfluenzaB__AGX23307
augcugcccagcaccauccagacacucacgcuguuccuuaccuccggcggggugcugcucucucuguacgucagcgccucccuuucuuaucugcucuacagcgacauucugcugaaguuuucccaaacagagaucaccgcuccuauuaugccgcucgauugcgccaacgcgucuaauguucaggcugugaacagaagcgccgccaaaggagugacacugcuucugcccgaaccugaguggaccuauccccggcucuccuguccuggcagcacauuccagaaggcucugcuuaucucuccccaccgcuuuggggaaaccaaaggaaauuccgccccucugauuaucagagagccguucaucgcuugcggccccacggaauguaagcauuuugcccucacccacuacgcggcccagccugggggauauuacaacggcacacgggaggaccgcaauaaacugagacaucugauuagcgucaagcucggcaagauccccaccguggagaacucuauuuuccacauggcugccugguccgggagcgcuugccaugauggaaaagaauggacauauguuggcguggacgggccugauucuaaugcccugcuuaagaucaaauacggagaggcguacaccgacacguaucacuccuacgccaagaacauucugcggacacaagaaagcgcuuguaauugcaucggcggggauuguuaucucaugauuaccgacggacccgccuccggcaucucugagugccgcuuucugaaaaucagagagggccggauuaucaaggaaauuuucccgacagggcgcgucaagcacaccgaggaauguaccugcggauuugcuagcaacaaaacaaucgagugugccugcagagauaauuccuacacggccaagcggccuuucgugaaacuuaacguugaaaccgacacagcugagauucgccugaugugcaccgagacauaucucgauacccccagaccuaaugacggcagcaucacggggcccugugaaucugauggagacaagggcuccgggggaaucaaaggcggcuuugugcaucagcggauggcgagcaagauugggcgcugguacucuagaacaaugagcaaaaccaagcggaugggaaugggccuguaugucaaguacgacggggaucccuggaccgacuccgaggcccuggcucucucuggagugauggugagcauggaggaaccuggcugguacuccuucggguuugaaaucaaagauaagaaaugcgacgucccguguauuggcaucgagaugguucacgauggaggcaagacaaccuggcauagcgccgccacagcuauuuauugccugauggggucuggacagcuucugugggacacggugaccggcguggauauggcccucuga

SEQ ID NO: 221828 - RNA, 1401 nt, Artificial Sequence; identical to SEQ ID NO: 221827
  derived and/or modified CDS sequence (opt5) from neuraminidase__InfluenzaB__AGX23318

SEQ ID NO: 221829 - RNA, 1401 nt, Artificial Sequence; identical to SEQ ID NO: 221827
  derived and/or modified CDS sequence (opt5) from neuraminidase__InfluenzaB__AGX23329

SEQ ID NO: 221830 - RNA, 1401 nt, Artificial Sequence; identical to SEQ ID NO: 221827
  derived and/or modified CDS sequence (opt5) from neuraminidase__InfluenzaB__AGX23340

SEQ ID NO: 221831 - RNA, 1401 nt, Artificial Sequence; identical to SEQ ID NO: 221827
  derived and/or modified CDS sequence (opt5) from neuraminidase__InfluenzaB__AGX23351

SEQ ID NO: 221832 - RNA, 1401 nt, Artificial Sequence; identical to SEQ ID NO: 221827
  derived and/or modified CDS sequence (opt5) from neuraminidase__InfluenzaB__AGX23362

SEQ ID NO: 221833 - RNA, 1401 nt, Artificial Sequence; identical to SEQ ID NO: 221827
  derived and/or modified CDS sequence (opt5) from neuraminidase__InfluenzaB__AGX23373

SEQ ID NO: 221834 - RNA, 1401 nt, Artificial Sequence; identical to SEQ ID NO: 221827
  derived and/or modified CDS sequence (opt5) from neuraminidase__InfluenzaB__AGX23384

SEQ ID NO: 221835 - RNA, 1401 nt, Artificial Sequence
  derived and/or modified CDS sequence (opt5) from neuraminidase__InfluenzaB__AGX23395
augcugcccagcaccauccagacacucacgcuguuccuuaccuccggcggggugcugcucucucuguacgucagcgccucccuuucuuaucugcucuacagcgacauucugcugaaguuuucccaaacagagaucaccgcuccuauuaugccgcucgauugcgccaacgcgucuaauguucaggcugugaacagaagcgccgccaaaggagugacacugcuucugcccgaaccugaguggaccuauccccggcucuccuguccuggcagcacauuccagaaggcucugcuuaucucuccccaccgcuuuggggaaaccaaaggaaauuccgccccucugauuaucagagagccguucaucgcuugcggccccacggaauguaagcauuuugcccucacccacuacgcggcccagccugggggauauuacaacggcacacgggaggaccgcaauaaacugagacaucugauuagcgucaagcucggcaagauccccaccguggagaacucuauuuuccacauggcugccugguccgggagcgcuugccaugauggaaaagaauggacauauguuggcguggacgggccugauucuaaugcccugcuuaagaucaaauacggagaggcguacaccgacacguaucacuccuacgccaagaacauucugcggacacaagaaagcgcuuguaauugcaucggcggggauuguuaucucaugauuaccgacggacccgccuccggcaucucugagugccgcuuucugaaaaucagagagggccggauuaucaaggaaauuuucccgacagggcgcgucaagcacaccgaggaauguaccugcggauuugcuagcaacaaaacaaucgagugugccugcagagauaauuccuacacggccaagcggccuuucgugaaacuuaacguugaaaccgacacagcugagauucgccugaugugcaccgagacauaucucgauacccccagaccuaaugacggcagcaucacggggcccugugaaucugauggagacaagggcuccgggggaaucaaaggcggcuuugugcaucagcggauggcgagcaagauugggcgcugguacucuagaacaaugagcaaaaccaagcggaugggaaugggccuguaugucaaguacgacggggaucccuggaccgacuccgaggcccuggcucucucuggagugauggugagcauggaggaaccuggcugguacuccuucggguuugaaaucaaagauaagaaaugcgacgucccguguauuggcaucgagaugguucacgauggaggcaagacaaccuggcauagcgccgccacagcuauuuauugccugauggggucuggacagcuucuguggaacacggugaccggcguggacauggcccucuga

SEQ ID NO: 221836 - RNA, 1401 nt, Artificial Sequence
  derived and/or modified CDS sequence (opt5) from neuraminidase__InfluenzaB__AGX23417
augcugcccagcaccauccagacacucacgcuguuccuuaccuccggcggggugcugcucucucuguacgucagcgccucccuuucuuaucugcucuacagcgacauucugcugaaguuuucccaaacagagaucaccgcuccuauuaugccgcucgauugcgccaacgcgucuaauguucaggcugugaacagaagcgccgccaaaggagugacauuccugcuucccgaaccugaguggaccuauccccggcuguccuguccuggcagcacauuucagaaggcucuccugaucucuccccaccgcuucggggaaaccaaaggaaauuccgccccucuuauuaucagagagccguuuaucgcuugcggccccacggaauguaagcauuucgcccugacccacuacgcggcccagccugggggauauuacaacggcacacgggaggaccgcaauaaacucagacaucugauuagcgucaagcugggcaagauccccaccguggagaacucuauuuuucacauggcugccugguccgggagcgcuugccaugauggaaaagaauggacauauaucggcguugacgggccugauucuaaugcccuccugaagauuaaauacggagaggcguacaccgacacguaucacuccuacgccaagaacauccuucggacacaagaaagcgcuuguaauugcauuggcggggauuguuaucugaugaucaccgacggacccgccuccggcaucucugagugccgcuuccucaaaauuagagagggccggaucauuaaggaaaucuuuccgacagggcgcgugaagcacaccgaggaauguaccugcggauucgcuagcaacaaaacaauugagugugccugcagagauaauuccuacacggccaagcggccuuuugucaaacugaacguggaaaccgacacagcugagauccgccuuaugugcaccgagacauaucuggauacccccagaccuaaugacggcagcaucacggggcccugugaaucugauggagacaagggcuccgggggaauuaaaggcggcuucguucaucagcggauggcgagcaagaucgggcgcugguacucuagaacaaugagcaaaaccaagcggaugggaaugggccucuaugugaaguacgacggggaucccuggaccgacuccgaggcccuggcucugucuggagucauggugagcauggaggaaccuggcugguacuccuuuggguucgaaauuaaagauaagaaaugcgacgugccguguaucggcauugagaugguccacgauggaggcaagacaaccuggcauagcgccgccacagcuaucuauugccucauggggucuggacagcugcuuugggacacgguuaccggcguggauauggcccuguga

SEQ ID NO: 221837 - RNA, 1401 nt, Artificial Sequence; identical to SEQ ID NO: 221836
  derived and/or modified CDS sequence (opt5) from neuraminidase__InfluenzaB__AGX23428

SEQ ID NO: 221838 - RNA, 1401 nt, Artificial Sequence; identical to SEQ ID NO: 221219
  derived and/or modified CDS sequence (opt5) from neuraminidase__InfluenzaB__AGX23450

SEQ ID NO: 221839 - RNA, 1401 nt, Artificial Sequence
  derived and/or modified CDS sequence (opt5) from neuraminidase__InfluenzaB__AGX23461
augcugcccagcaccauccagacacucacgcuguuccuuaccuccggcggggugcugcucucucuguacgucagcgccucccuuucuuaucugcucuacagcgacauucugcugaaguuuuccagaacagagaucaccgcuccuauuaugccgcucgauugcgccaacgcgucuaauauccaagcuguuaaccggagcgccacaaaaggagugacccugcuucugcccgaaccugaguggacauauccccgccucuccuguccuggcagcaccuuccagaaggcccugcuuauuucuccccacagauuuggggaaacgaaaggaaauuccgcuccucugaucauccgggagccguucauugccugcggccccaaggaauguaaacauuuugcucucacccacuacgccgcgcagccugggggauauuacaacggcacacgcgaggacagaaauaagcugcggcaucugaucagcgugaagcucggcaaaauucccaccgucgagaacucuaucuuccacauggccgcuugguccgggagcgccugccaugauggacgcgaauggacauauauuggcguggacgggccugauucuaaugcucugcuuaagaucaaauacggagaggccuacaccgacacguaucacuccuacgcgaagaacauucugagaacacaggaaagcgccuguaauugcaucggcggggauuguuaucucaugaucaccgacggacccgcuuccggcauuucugagugccgguuucugaaaauccgcgagggcagaauuaucaaggaaauuuucccgacagggcggguuaagcacaccgaggaauguaccugcggauuugccagcaacaaaacaaucgagugugcuugccgcgauaauuccuacacggccaagagaccuuucgugaaacuuaacgucgaaaccgacacagccgagauccggcugaugugcaccgagacauaucucgauacgccccgcccuaaugacggcagcauuaccgggcccugugaaucuaacggagauaagggcuccgggggaaucaaaggcggcuuugugcaucaaagaauggcuagcaagauugggcggugguacucuagaacaaugagcaaaaccaagcgcaugggaaugggccuguauguuaaguacgacggggaccccuggaccgauuccgaggcgcuggcccucucuggagugauggucagcaucgaggaaccuggcugguacuccuucggguuugaaauuaaagacaagaaaugcgaugugccguguaucggcaucgagauggugcacgacggaggcaagacaaccuggcauagcgcugccacagccauuuauugccugauggggucuggacagcuucugugggauacggucaccggcguugacauggcucucuga

SEQ ID NO: 221840 - RNA, 1401 nt, Artificial Sequence; identical to SEQ ID NO: 221219
  derived and/or modified CDS sequence (opt5) from neuraminidase__InfluenzaB__AGX23472

SEQ ID NO: 221841 - RNA, 1401 nt, Artificial Sequence; identical to SEQ ID NO: 220860
  derived and/or modified CDS sequence (opt5) from neuraminidase__InfluenzaB__AGX23483

SEQ ID NO: 221842 - RNA, 1401 nt, Artificial Sequence
  derived and/or modified CDS sequence (opt5) from neuraminidase__InfluenzaB__AGX23494
augcugcccagcaccauccagacacucacgcuguuccuuaccuccggcggggugcugcucucucuguacgucagcgccucccuuucuuaucugcucuacagcgacauucugcugaaguuuucccaaacagagaucaccgcuccuauuaugccgcucgauugcgccaacgcgucuaauguucaggcugugaacagaagcgccgccaaaggagugacacugcuucugcccgaaccugaguggaccuauccccggcucuccuguccuggcagcacauuccagaaggcucugcuuaucucuccccaccgcuuuggggaaaccaaaggaaauuccgccccucugauuaucagagagccguucaucgcuugcggccccacggaauguaagcauuuugcccucacccacuacgcggcccagccugggggauauuacaacggcacacgggaggaccgcaauaaacugagacaucugauuagcgucaagcucggcaagauccccaccguggagaacucuauuuuccacauggcugccugguccgggagcgcuugccaugauggaaaagaauggacauauguuggcguggacgggccugauucuaaugcccugcuuaagaucaaauacggagaggcguacaccgacacguaucacuccuacgccaagaacauucugcggacacaagaaagcgcuuguaauugcaucggcggggauuguuaucucaugauuaccgacggacccgccuccggcaucucugagugccgcuuucugaaaaucagagagggccggauuaucaaggaaauuuucccgacagggcgcgucaagcacaccgaggaauguaccugcggauuugcuagcaacaaaacaaucgagugugccugcagagauaauuccuacacggccaagcggccuuucgugaaacuuaacguugaaaccgacacagcugagauucgccugaugugcaccgagacauaucucgauacccccagaccuaaugacggcagcaucacggggcccuguggaucugauggcgacaagggguccggaggcaucaaaggcggguuugugcaucagcggauggcgagcaagauuggacgcugguacucuagaacaaugagcaaaaccaagcggaugggcauggggcuguaugucaaguacgacggagaucccuggaccgacuccgaagcccuggcucucucuggcgugauggugagcauggaugagccugggugguacuccuucggcuuugaaaucaaagacaagaaaugcgaugucccguguauuggaaucgagaugguucacgacggcgggaagacaaccuggcauagcgccgccacagcuauuuauugccugaugggaucuggccagcuucugugggauacggugaccgggguggacauggcccucuga

SEQ ID NO: 221843 - RNA, 1401 nt, Artificial Sequence
  derived and/or modified CDS sequence (opt5) from neuraminidase__InfluenzaB__AGX23505
augcugcccagcaccauccagacacucacgcuguuccuuaccuccggcggggugcugcucucucuguacgucagcgccucccuuucuuaucugcucuacagcgacauucugcugaaguuuucccaaacagagaucaccgcuccuauuaugccgcucgauugcgccaacgcgucuaauguucaggcugugaacagaagcgccgccaaaggagugacacugcuucugcccgaaccugaguggaccuauccccggcucuccuguccuggcagcacauuccagaaggcucugcuuaucucuccccaccgcuuuggggaaaccaaaggaaauuccgccccucugauuaucagagagccguucaucgcuugcggccccacggaauguaagcauuuugcccucacccacuacgcggcccagccugggggauauuacaacggcacacgggaggaccgcaauaaacugagacaucugauuagcgucaagcucggcaagauccccaccguggagaacucuauuuuccacauggcugccugguccgggagcgcuugccaugauggaaaagaauggacauauaucggcguugacgggccugauaauaacgcccugcuuaagauuaaauacggagaggcguacaccgacacguaucacucuuacgccaagaauauccugcggacacaagaauccgcuuguaacugcauuggcggggauuguuaucucaugaucaccgacggacccgccagcggcaucuccgagugccgcuuucugaaaauuagagagggccggaucauuaaggaaaucuucccgacagggcgcgugaagcacaccgaggaauguaccugcggauuugcuucuaauaaaacaauugagugugccugcagagauaacagcuacacggccaagcggccuuucgucaaacuuaauguggaaaccgacacagcugagauccgccugaugugcaccgagacauaucucgauacccccagaccuaacgacggcuccaucacggggcccugugaaagcgauggagacaagggcucugggggaauuaaaggcggcuuuguucaucagcggauggcguccaagaucgggcgcugguacagcagaacaaugucuaaaaccaagcggaugggaaugggccuguaugugaaguacgacggggaucccuggaccgacagcgaggcccuggcucucuccggagucauggugucuauggaggaaccuggcugguacagcuucggguuugaaauuaaagauaagaaaugcgacgugccguguaucggcauugagaugguccacgauggaggcaagacaaccuggcauuccgccgccacagcuaucuauugccugauggggagcggacagcuucugugggacacgguuaccggcguggauauggcccucuga

SEQ ID NO: 221844 - RNA, 1401 nt, Artificial Sequence
  derived and/or modified CDS sequence (opt5) from neuraminidase__InfluenzaB__AGX23516
augcugcccagcaccauccagacacucacgcuguuccuuaccuccggcggggugcugcucucucuguacgucagcgccucccuuucuuaucugcucuacagcgacauucugcugaaguuuucccaaacagagaucaccgcuccuauuaugccgcucgauugcgccaacgcgucuaauguucaggcugugaacagaagcgccgccaaaggagugacacugcuucugcccgaaccugaguggaccuauccccggcucuccuguccuggcagcacauuccagaaggcucugcuuaucucuccccaccgcuuuggggaaaccaaaggaaauuccgccccucugauuaucagagagccguucaucgcuugcggccccacggaauguaagcauuuugcccucacccacuacgcggcccagccugggggauauuacaacggcacacgggaggaccgcaauaaacugagacaucugauuagcgucaagcucggcaagauccccaccguggagaacucuauuuuccacauggcugccugguccgggagcgcuugccaugauggaaaagaauggacauauaucggcguugacgggccugauucuaaugcccugcuuaagauuaaauacggagaggcguacaccgacacguaucacuccuacgccaagaacauccugcggacacaagaaagcgcuuguaauugcauuggcggggauuguuaucucaugaucaccgacggacccgccuccggcgugucugagugccgcuuucugaaaaucagagagggccggauuaucaaggaaauuuucccgacagggcgcgucaagcacaccgaggaauguaccugcggauuugcuagcaacaaaacaaucgagugugccugcagagauaauuccuacacggccaagcggccuuucgugaaacuuaacguugaaaccgacacagcugagauucgccugaugugcaccgagacauaucucgauacccccagaccuaaugacggcagcaucacggggcccugugaaucugauggagacaagggcuccgggggaaucaaaggcggcuuugugcaucagcggauggcgagcaagauugggcgcugguacucuagaacaaugagcaaagccaagcggaugggaaugggccuguaugucaaguacgacggggaucccuggaccgacuccgaggcucuggcccucucuggagugauggugagcauggaggaaccuggcugguacuccuucggguuugaaaucaaagauaagaaaugcgacgucccguguauuggcaucgagaugguucacgauggaggcaagaccacauggcauagcgccgcuaccgccauuuauugccugauggggucuggacagcuucugugggacacagugacgggcguggauauggcgcucuga

SEQ ID NO: 221845 - RNA, 1401 nt, Artificial Sequence; identical to SEQ ID NO: 220860
  derived and/or modified CDS sequence (opt5) from neuraminidase__InfluenzaB__AGX23527

SEQ ID NO: 221846 - RNA, 1401 nt, Artificial Sequence
  derived and/or modified CDS sequence (opt5) from neuraminidase__InfluenzaB__AGX23538
augcugcccagcaccauccagacacucacgcuguuccuuaccuccggcggggugcugcucucucuguacgucagcgccucccuuucuuaucugcucuacagcgacauucugcugaaguuuucccaaacagagaucaccgcuccuauuaugccgcucgauugcgccaacgcgucuaauguucaggcugugaacagaagcgccgccaaaggagugacacugcuucugcccaagccugaauggaccuauccccggcucuccuguccuggcagcacauuccagaaagcucugcuuaucucuccccaccgcuuuggggagaccaagggaaauuccgccccucugauuaucagagaaccguucaucgcuugcggccccacggaguguaaacauuuugcccucacccacuacgcggcccagccugggggauauuacaacggcacacgggaagaccgcaauaagcugagacaucugauuagcgucaagcucggcaaaauccccaccguggagaacucuauuuuccacauggcugccugguccgggagcgcuugccaugauggaaaggaguggacauauaucggcguugacgggccugauucuaaugcccugcuuaaaauuaaguacggagaagcguacaccgacacguaucacuccuacgccaaaaacauccugcggacacaagagagcgcuuguaauugcauuggcggggauuguuaucucaugaucaccgacggacccgccuccggcgugucugaaugccgcuuucugaagaucagagagggccggauuaucaaggagauuuucccgacagggcgcgucaaacacaccgaagaguguaccugcggauuugcuagcaacaagacaaucgaaugugccugcagagauaauuccuacacggccaaacggccuuucgugaaacuuaacguugagaccgacacagcugaaauucgccugaugugcaccgagacauaucucgauacccccagaccuaaugacggcagcaucacggggcccugugagucugauggagacaagggcuccgggggaaucaagggcggcuuugugcaucagcggauggcgagcaaaauugggcgcugguacucuagaacaaugagcaccaccaagcggaugggaaugggccuguaugucaaguacgacggggaucccuggacagacuccgaagcccuggcucucucuggagugauggugagcauggaggaaccuggcugguacuccuucggguuugagaucaaagauaagaaaugcgacgucccguguauuggcaucgaaaugguucacgauggaggcaagaccacauggcauagcgccgccacggcuauuuauugccugauggggucuggacagcuucugugggacaccgugacaggcguggauauggcccucuga

SEQ ID NO: 221847 - RNA, 1401 nt, Artificial Sequence
  derived and/or modified CDS sequence (opt5) from neuraminidase__InfluenzaB__AGX23549
augcugcccagcaccauccagacacucacgcuguuccuuaccuccggcggggugcugcucucucuguacgucagcgccucccuuucuuaucugcucuacagcgacauucugcugaaguuuucccaaacagagaucaccgcuccuauuaugccgcucgauugcgccaacgcgucuaauguucaggcugugaacagaagcgccgccaaaggagugacacugcuucugcccgaaccugaguggaccuauccccggcucuccuguccuggcagcacauuccagaaggcucugcuuaucucuccccaccgcuuuggggaaaccaaaggaaauuccgccccucugauuaucagagagccguucaucgcuugcggccccacggaauguaagcauuuugcccucacccacuacgcggcccagccugggggauauuacaacggcacacgggaggaccgcaauaaacugagacaucugauuagcgucaagcucggcaagauccccaccguggagaacucuauuuuccacauggcugccugguccgggagcgcuugccaugauggaaaagaauggacauauaucggcguugacgggccugauucuaaugcccugcuuaagauuaaauacggagaggcguacaccgacacguaucacuccuacgccaagaacauccugcggacacaagaaagcgcuuguaauugcauuggcggggauuguuaucucaugaucaccgacggacccgccuccggcgugucugagugccgcuuucugaaaaucagagagggccggauuaucaaggaaauuuucccgacagggcgcgucaagcacaccgaggaauguaccugcggauuugcuagcaacaaaacaaucgagugugccugcagagauaauuccuacacggccaagcggccuuucgugaaacuuaacguugaaaccgacacagcugagauucgccugaugugcaccgagacauaucucgauacccccagaccuaaugacggcagcaucacggggcccugugaaucugauggagacaagggcuccgggggaaucaaaggcggcuuugugcaucagcggauggcgagcaagauugggcgcugguacucuagaacaaugagcaccaccaaacggaugggaaugggccuguaugucaaguacgacggggaucccuggacagacuccgaggcccuggcucucucuggagugauggugagcauggaggaaccuggcugguacuccuucggguuugaaaucaaggauaaaaagugcgacgucccguguauuggcaucgagaugguucacgauggaggcaaaaccacauggcauagcgccgccacggcuauuuauugccugauggggucuggacagcuucugugggacaccgugacaggcguggauauggcccucuga

SEQ ID NO: 221848 - RNA, 1401 nt, Artificial Sequence; identical to SEQ ID NO: 220860
  derived and/or modified CDS sequence (opt5) from neuraminidase__InfluenzaB__AGX23560

SEQ ID NO: 221849 - RNA, 1401 nt, Artificial Sequence; identical to SEQ ID NO: 221842
  derived and/or modified CDS sequence (opt5) from neuraminidase__InfluenzaB__AGX23571

SEQ ID NO: 221850 - RNA, 1401 nt, Artificial Sequence; identical to SEQ ID NO: 221842
  derived and/or modified CDS sequence (opt5) from neuraminidase__InfluenzaB__AGX23582

SEQ ID NO: 221851 - RNA, 1401 nt, Artificial Sequence
  derived and/or modified CDS sequence (opt5) from neuraminidase__InfluenzaB__AGX23593
augcugcccagcaccauccagacacucacgcuguuccuuaccuccggcggggugcugcucucucuguacgucagcgccucccuuucuuaucugcucuacagcgacauucugcugaaguuuucccaaacagagaucaccgcuccuauuaugccgcucgauugcgccaacgcgucuaauguucaggcugugaacagaagcgccgccaaaggagugacacugcuucugcccgaaccugaguggaccuauccccggcucuccuguccuggcagcacauuccagaaggcucugcuuaucucuccccaccgcuuuggggaaaccaaaggaaauuccgccccucugauuaucagagagccguucaucgcuugcggccccacggaauguaagcauuuugcccucacccacuacgcggcccagccugggggauauuacaacggcacacgggaggaccgcaauaaacugagacaucugauuagcgucaagcucggcaagauccccaccguggagaacucuauuuuccacauggcugccugguccgggagcgcuugccaugauggaaaagaauggacauauaucggcguugacgggccugauucuaaugcccugcuuaagauuaaauacggagaggcguacaccgacacguaucacuccuacgccaagaacauccugcggacacaagaaagcgcuuguaauugcauuggcggggauuguuaucucaugaucaccgacggacccgccuccggcaucucugagugccgcuuucugaaaauuagagagggccggaucauuaaggaaaucuucccgacagggcgcgugaagcacaccgaggaauguaccugcggauuugcuagcaacaaaacaauugagugugccugcagagauaauuccuacacggccaagcggccuuucgucaaacuuaacguggaaaccgacacagcugagauccgccugaugugcaccgagacauaucucgauacccccagaccuaaugacggcagcaucacggggcccugugaaucugauggagacaagggcuccgggggaauuaaaggcggcuuuguucaucagcggauggcgagcaagaucgggcgcugguacucuagaacaaugagcaaaaccaagcggaugggaaugggccuguaugugaaguacgacggggaucccuggaccgacuccgaggcccugacacucucuggagucauggugagcauggaggaaccuggcugguacuccuucggguuugaaauuaaagauaagaaaugcgacgugccguguaucggcauugagaugguccacgauggaggcaagaccacauggcauagcgcugccacggccaucuauugccugauggggucuggacagcuucugugggacaccguuacaggcguggauauggcucucuga

SEQ ID NO: 221852 - RNA, 1401 nt, Artificial Sequence; identical to SEQ ID NO: 220860
  derived and/or modified CDS sequence (opt5) from neuraminidase__InfluenzaB__AGX23604

SEQ ID NO: 221853 - RNA, 1401 nt, Artificial Sequence
  derived and/or modified CDS sequence (opt5) from neuraminidase__InfluenzaB__AGX23615
augcugcccagcaccauccagacacucacgcuguuccuuaccuccggcggggugcugcucucucuguacgucagcgccucccuuucuuaucugcucuacagcgacauucugcugaaguuuucccaaacagagaucaccacaccuauuaugccgcucgauugcgcuaacgccucuaauguucaggcggugaacagaagcgcugccaaaggagugacccugcuucugcccgaaccugaguggacauauccccggcucuccuguccuggcagcaccuuccagaaggcccugcuuaucucuccccaccgcuuuggggaaacgaaaggaaauuccgcuccucugauuaucagagagccguucaucgccugcggccccaccgaauguaagcauuuugcucucacacacuacgccgcgcagccugggggauauuacaacggcacccgggaggaccgcaauaaacugagacaucugauuagcgucaagcucggcaagauccccacaguggagaacucuauuuuccacauggccgcuugguccgggagcgccugccaugauggaaaagaauggaccuauaucggcguugacgggccugauucuaaugcucugcuuaagauuaaauacggagaggccuacacggacacauaucacuccuacgcgaagaacauccugcggacccaagaaagcgccuguaauugcauuggcggggauuguuaucucaugaucacagacggacccgcuuccggcaucucugagugccgcuuucugaaaauuagagagggccggaucauuaaggaaaucuucccgaccgggcgcgugaagcacaccgaggaauguacaugcggauuugccagcaacaaaacgauugagugugcuugcagagauaauuccuacaccgccaagcggccuuucgucaaacuuaacguggaaacagacaccgccgagauccgccugaugugcacagagaccuaucucgauacgcccagaccuaaugacggcagcaucacagggcccugugaaucugauggagacaagggcuccgggggaauuaaaggcggcuuuguucaucagcggauggcuagcaagaucgggcgcugguacucuagaaccaugagcaaaaccaagcggaugggaaugggccuguaugugaaguacgacggggaucccuggacagacuccgaggcgcuggcccucucuggagucauggugagcauggaggaaccuggcugguacuccuucggguuugaaauuaaagauaagaaaugcgacgugccguguaucggcauugagaugguccacgauggaggcaagaccacauggcauagcgcugccacggccaucuauugccugauggggucuggacagcuucugugggacaccguuacaggcguggauauggcucucuga

SEQ ID NO: 221854 - RNA, 1401 nt, Artificial Sequence; identical to SEQ ID NO: 221842
  derived and/or modified CDS sequence (opt5) from neuraminidase__InfluenzaB__AGX23626

SEQ ID NO: 221855 - RNA, 1401 nt, Artificial Sequence; identical to SEQ ID NO: 221219
  derived and/or modified CDS sequence (opt5) from neuraminidase__InfluenzaB__AGX23637

SEQ ID NO: 221856 - RNA, 1401 nt, Artificial Sequence; identical to SEQ ID NO: 220860
  derived and/or modified CDS sequence (opt5) from neuraminidase__InfluenzaB__AGX23659

SEQ ID NO: 221857 - RNA, 1401 nt, Artificial Sequence; identical to SEQ ID NO: 221219
  derived and/or modified CDS sequence (opt5) from neuraminidase__InfluenzaB__AGX23670

SEQ ID NO: 221858 - RNA, 1401 nt, Artificial Sequence; identical to SEQ ID NO: 221219
  derived and/or modified CDS sequence (opt5) from neuraminidase__InfluenzaB__AGX23681

SEQ ID NO: 221859 - RNA, 1401 nt, Artificial Sequence; identical to SEQ ID NO: 221219
  derived and/or modified CDS sequence (opt5) from neuraminidase__InfluenzaB__AGX23692

SEQ ID NO: 221860 - RNA, 1401 nt, Artificial Sequence; identical to SEQ ID NO: 221219
  derived and/or modified CDS sequence (opt5) from neuraminidase__InfluenzaB__AGX23703

SEQ ID NO: 221861 - RNA, 1401 nt, Artificial Sequence
  derived and/or modified CDS sequence (opt5) from neuraminidase__InfluenzaB__AGX23714
augcugcccagcaccauccagacacucacgcuguuccuuaccuccggcggggugcugcucucucuguacgucagcgccucccuuucuuaucugcucuacagcgacauucugcugaaguuuucccaaacagagaucaccgcuccuauuaugccgcucgauugcgccaacgcgucuaauguucaggcugugaacagaagcgccgccaaaggagugacacugcuucugcccgaaccugaguggaccuauccccggcucuccuguccuggcagcacauuccagaaggcucugcuuaucucuccccaccgcuuuggggaaaccaaaggaaauuccgccccucugauuaucagagagccguucaucgcuugcggccccacggaauguaagcauuuugcccucacccacuacgcggcccagccugggggauauuacaacggcacacgggaggaccgcaauaaacugagacaucugauuagcgucaagcucggcaagauccccaccguggagaacucuauuuuccacauggcugccugguccgggagcgcuugccaugauggaaaagaauggacauauguuggcguggacgggccugauucuaaugcccugcuuaagaucaaauacggagaggcguacaccgacacguaucacuccuacgaaaagaacauucugcggacacaagagagcgccuguaauugcaucggcggggauuguuaucucaugauuaccgacggacccgcuuccggcaucucugagugccgcuuucugaaaaucagagaaggccggauuaucaaggagauuuucccgacagggcgcgucaagcacaccgaagaguguaccugcggauuugccagcaacaaaacaaucgaaugugcuugcagagauaauuccuacacggccaagcggccuuucgugaaacuuaacguugagaccgacacagccgagauucgccugaugugcaccgaaacauaucucgauacccccagaccuaaugacggcagcaucacggggcccuguggaucugauggcgacaagggguccggaggcaucaaaggcggguuugugcaucagcggauggcuagcaagauuggacgcugguacucuagaacaaugagcaaaaccaagcggaugggcauggggcuguaugucaaguacgacggagaucccuggaccgacuccgaggcgcuggcccucucuggcgugauggugagcauggaugaaccugggugguacuccuucggcuuugagaucaaagacaagaaaugcgaugucccguguauuggaaucgaaaugguucacgacggcgggaagacaaccuggcauagcgcugccacagccauuuauugccugaugggaucuggccagcuucugugggauacggugaccgggguggacauggcucucuga

SEQ ID NO: 221862 - RNA, 1401 nt, Artificial Sequence; identical to SEQ ID NO: 221219
  derived and/or modified CDS sequence (opt5) from neuraminidase__InfluenzaB__AGX23725

SEQ ID NO: 221863 - RNA, 1401 nt, Artificial Sequence; identical to SEQ ID NO: 221842
  derived and/or modified CDS sequence (opt5) from neuraminidase__InfluenzaB__AGX23736

SEQ ID NO: 221864 - RNA, 1401 nt, Artificial Sequence; identical to SEQ ID NO: 221219
  derived and/or modified CDS sequence (opt5) from neuraminidase__InfluenzaB__AGX23747

SEQ ID NO: 221865 - RNA, 1401 nt, Artificial Sequence; identical to SEQ ID NO: 221219
  derived and/or modified CDS sequence (opt5) from neuraminidase__InfluenzaB__AGX23758

SEQ ID NO: 221866 - RNA, 1401 nt, Artificial Sequence; identical to SEQ ID NO: 221842
  derived and/or modified CDS sequence (opt5) from neuraminidase__InfluenzaB__AGX23769

SEQ ID NO: 221867 - RNA, 1401 nt, Artificial Sequence
  derived and/or modified CDS sequence (opt5) from neuraminidase__InfluenzaB__AGX23780
augcugcccagcaccauccagacacucacgcugcuucugaccuccggcggggugcuccugucucuuuacgucagcgccucccugucuuaucuccuguacagcgacauucugcucaaguucucccaaacagagaucaccgcuccuauuaugccgcuggauugcgccaacgcgucuaauguucaggcugugaacagaagcgccgccaaaggagugacacuucugcuccccgaaccugaguggaccuauccccggcuguccuguccuggcagcacauuucagaaggcccuucugaucucuccccaccgcuucggggaaaccaaaggaaauuccgcuccucucauuaucagagagccguuuaucgcuugcggccccacggaauguaagcauuucgcccugacccacuacgcggcccagccugggggauauuacaacggcacacgggaggaccgcaauaaacugagacaucucauuagcgucaagcugggcaagauccccaccguggagaacucuauuuuucacauggcugccugguccgggagcgcuugccaugauggaaaagaauggacauauaucggcguugacgggccugauucuaaugcccuucugaagauuaaauacggagaggcguacaccgacacguaucacuccuacgccaagaacauccuccggacacaagaaagcgcuuguaauugcauuggcggggauuguuaucugaugaucaccgacggacccgccuccggcgugucugagugccgcuuccuuaaaaucagagagggccggauuaucaaggaaauuuuuccgacagggcgcgucaagcacaccgaggaauguaccugcggauucgcuagcaacaaaacaaucgagugugccugcagagauaauuccuacacggccaagcggccuuuugugaaacugaacguugaaaccgacacagcugagauucgccucaugugcaccgagacauaucuggauacccccagaccuaaugacggcagcaucacggggcccugugaaucugauggagacaagggcuccgggggaaucaaaggcggcuucgugcaucagcggauggcgagcaagauugggcgcugguacucuagaacaaugagcaaaaccaagcggaugggaaugggccuguaugucaaguacgacggggaucccuggaccgacuccgaggcccucgcucugucuggagugauggugagcauggaggaaccuggcugguacuccuuuggguucgaaaucaaagauaagaaaugcgacgucccguguauuggcaucgagaugguucacgauggaggcaagacaaccuggcauagcgccgccacagcuauuuauugccuuauggggucuggacagcugcucugggacacggugaccggcguggauauggcccuguga

SEQ ID NO: 221868 - RNA, 1401 nt, Artificial Sequence
  derived and/or modified CDS sequence (opt5) from neuraminidase__InfluenzaB__AGX23791
augcugcccagcaccauccagacacucacgcuguuccuuaccuccggcggggugcugcucucucuguacgucagcgccucccuuucuuaucugcucuacagcgacauucugcugaaguuuucccaaacagagaucaccgcuccuauuaugccgcucgauugcgccaacgcgucuaaugcucaggccguuaacagaagcgccgcuaaaggagugacacugcuucugcccgaaccugaguggaccuauccccggcucuccuguccuggcagcacauuccagaaggcccugcuuaucucuccccaccgcuuuggggaaaccaaaggaaauuccgcuccucugauuaucagagagccguucaucgccugcggccccacggaauguaagcauuuugcgcucacccacuacgccgcucagccugggggauauuacaacggcacacgggaggaccgcaauaaacugagacaucugauuagcgugaagcucggcaagauccccaccgucgagaacucuauuuuccacauggccgcuugguccgggagcgccugccaugauggaaaagaauggacauauaucggcguggacgggccugauucuaaugcgcugcuuaagauuaaauacggagaggccuacaccgacacguaucacuccuacgcuaagaacauccugcggacacaagaaagcgccuguaauugcauuggcggggauuguuaucucaugaucaccgacggacccgcuuccggcguuucugagugccgcuuucugaaaaucagagagggccggauuaucaaggaaauuuucccgacagggcgcgugaagcacaccgaggaauguaccugcggauuugccagcaacaaaacaaucgagugugccugcagagauaauuccuacacggcuaagcggccuuucgucaaacuuaacguggaaaccgacacagcggagauucgccugaugugcaccgagacauaucucgauacccccagaccuaaugacggcagcaucacggggcccugugaaucugauggagacaagggcuccgggggaaucaaaggcggcuuuguucaucagcggauggccagcaagauugggcgcugguacucuagaacaaugagcaaaaccaagcggaugggaaugggccuguaugugaaguacgacggggaucccuggaccgacuccgaggcucuggcccucucuggagucauggugagcauggaggaaccuggcugguacuccuucggguuugaaaucaaagauaagaaaugcgacgugccguguauuggcaucgagaugguccacgauggaggcaagacaaccuggcauagcgccgcuacagccauuuauugccugauggggucuggacagcuucugugggacacgguuaccggcguggauauggcgcucuga

SEQ ID NO: 221869 - RNA, 1401 nt, Artificial Sequence; identical to SEQ ID NO: 221842
  derived and/or modified CDS sequence (opt5) from neuraminidase__InfluenzaB__AGX23802

SEQ ID NO: 221870 - RNA, 1401 nt, Artificial Sequence; identical to SEQ ID NO: 221842
  derived and/or modified CDS sequence (opt5) from neuraminidase__InfluenzaB__AGX23813

SEQ ID NO: 221871 - RNA, 1401 nt, Artificial Sequence; identical to SEQ ID NO: 221842
  derived and/or modified CDS sequence (opt5) from neuraminidase__InfluenzaB__AGX23824

SEQ ID NO: 221872 - RNA, 1401 nt, Artificial Sequence; identical to SEQ ID NO: 221842
  derived and/or modified CDS sequence (opt5) from neuraminidase__InfluenzaB__AGX23846

SEQ ID NO: 221873 - RNA, 1401 nt, Artificial Sequence; identical to SEQ ID NO: 220860
  derived and/or modified CDS sequence (opt5) from neuraminidase__InfluenzaB__AGX23857

SEQ ID NO: 221874 - RNA, 1401 nt, Artificial Sequence; identical to SEQ ID NO: 221842
  derived and/or modified CDS sequence (opt5) from neuraminidase__InfluenzaB__AGX23868

SEQ ID NO: 221875 - RNA, 1401 nt, Artificial Sequence
  derived and/or modified CDS sequence (opt5) from neuraminidase__InfluenzaB__AGX23879
augcugcccagcaccauccagacacucacgcuguuccuuaccuccggcggggugcugcucucucuguacgucagcgccucccuuucuuaucugcucuacagcgacauucugcugaaguuuucccaaacagagaucaccgcuccuauuaugccgcucgauugcgccaacgcgucuaauguucaggcugugaacagaagcgccgccaaaggagugacacugcuucugcccgaaccugaguggaccuauccccggcucuccuguccuggcagcacauuccagaaggcucugcuuaucucuccccaccgcuuuggggaaaccaaaggaaauuccgccccucugauuaucagagagccguucaucgcuugcggccccacggaauguaagcauuuugcccucacccacuacgcggcccagccugggggauauuacaacggcacacgggaggaccgcaauaaacugagacaucugauuagcgucaagcucggcaagauccccaccguggagacaucuauuuuccacauggcugccugguccgggagcgcuugccaugauggaaaagaauggaccuauaucggcguugacgggccugauucuaacgcccugcuuaagauuaaauacggagaggcguacacggacacauaucacuccuacgccaagaauauccugcggacccaagaaagcgcuuguaacugcauuggcggggauuguuaucucaugaucacagacggacccgccuccggcgugucugagugccgcuuucugaaaaucagagagggccggauuaucaaggaaauuuucccgaccgggcgcgucaagcacaccgaggaauguacaugcggauuugcuagcaauaaaacgaucgagugugccugcagagauaacuccuacaccgccaagcggccuuucgugaaacuuaauguugaaacagacaccgcugagauucgccugaugugcacagagaccuaucucgauacgcccagaccuaacgacggcagcaucacagggcccugugaaucugauggagacaagggcuccgggggaaucaaaggcggcuuugugcaucagcggauggcgagcaagauugggcgcugguacucuagaaccaugagcaaaaccaagcggaugggaaugggccuguaugucaaguacgacggggaucccuggacagacuccgaggcccuggcucucucuggagugauggugagcauggaggaaccuggcugguacuccuucggguuugaaaucaaagauaagaaaugcgacgucccguguauuggcaucgagaugguucacgauggaggcaagaccacauggcauagcgccgccacggcuauuuauugccugauggggucuggacagcuucugugggacaccgugacaggcguggauauggcccucuga

SEQ ID NO: 221876 - RNA, 1401 nt, Artificial Sequence; identical to SEQ ID NO: 221842
  derived and/or modified CDS sequence (opt5) from neuraminidase__InfluenzaB__AGX23890

SEQ ID NO: 221877 - RNA, 1401 nt, Artificial Sequence; identical to SEQ ID NO: 220860
  derived and/or modified CDS sequence (opt5) from neuraminidase__InfluenzaB__AGX23901

SEQ ID NO: 221878 - RNA, 1401 nt, Artificial Sequence
  derived and/or modified CDS sequence (opt5) from neuraminidase__InfluenzaB__AGX23912
augcugcccagcaccauccagacacucacgcuguuccuuaccuccggcggggugcugcucucucuguacgucagcgccucccuuucuuaucugcucuacagcgacauucugcugaaguuuucccaaacagagaucaccgcuccuauuaugccgcucgauugcgccaacgcgucuaauguucaggcugugaacagaagcgccgccaaaggagugacacugcuucugcccgaaccugaguggaccuauccccggcucuccuguccuggcagcacauuccagaaggcucugcuuaucucuccccaccgcuuuggggaaaccaaaggaaauuccgccccucugauuaucagagagccguucaucgcuugcggccccacggaauguaagcauuuugcccucacccacuacgcggcccagccugggggauauuacaacggcacacgggaggaccgcaauagacugcggcaucugauuagcgucaaacucggcaagauccccaccguggagaacucuauuuuccacauggcugccugguccgggagcgcuugccaugauggaaaggaauggacauauguuggcguggacgggccugauucuaaugcccugcuuaaaaucaaguacggagaggcguacaccgacacguaucacuccuacgccaaaaacauucugcgcacacaagaaagcgcuuguaauugcaucggcggggauuguuaucucaugauuaccgacggacccgccuccggcaucucugagugcagauuucugaagauccgggagggccgcauuaucaaagaaauuuucccgacagggagagucaagcacaccgaggaauguaccugcggauuugcuagcaacaagacaaucgagugugccugccgggauaauuccuacacggccaaacgcccuuucgugaaacuuaacguugaaaccgacacagcugagauuagacugaugugcaccgagacauaucucgauacgccccggccuaaugacggcagcaucaccgggcccuguggaucugauggcgacaagggguccggaggcaucaagggcggguuugugcaucagcgcauggcgagcaaaauuggaagaugguacucucggacaaugagcaagaccaaaagaaugggcauggggcuguaugucaaguacgacggagaucccuggaccgacuccgaagcccuggcucucucuggcgugauggugagcauggaugagccugggugguacuccuucggcuuugaaaucaaggacaaaaagugcgaugucccguguauuggaaucgagaugguucacgacggcgggaaaacaaccuggcauagcgccgccacagcuauuuauugccugaugggaucuggccagcuucugugggauacggugaccgggguggacauggcccucuga

SEQ ID NO: 221879 - RNA, 1401 nt, Artificial Sequence; identical to SEQ ID NO: 221032
  derived and/or modified CDS sequence (opt5) from neuraminidase__InfluenzaB__AGX23934

SEQ ID NO: 221880 - RNA, 1401 nt, Artificial Sequence
  derived and/or modified CDS sequence (opt5) from neuraminidase__InfluenzaB__AGX23945
augcugcccagcaccauccagacacucacgcuguuccuuaccuccggcggggugcugcucucucuguacgucagcgccucccuuucuuaucugcucuacagcgacauucugcugaaguuuucccaaacagagaucaccgcuccuauuaugccgcucgauugcgccaacgcgucuaauguucaggcugugaacagaagcgccgccaaaggagugacacugcuucugcccgaaccugaguggaccuauccccggcucuccuguccuggcagcacauuccagaaggcucugcuuaucucuccccaccgcuuuggggaaaccaaaggaaauuccgccccucugauuaucagagagccguucaucgcuugcggccccacggaauguaagcauuuugcccucacccacuacgcggcccagccugggggauauuacaacggcacacgggaggaccgcaauaaacugagacaucugauuagcgucaagcucggcaagauccccaccguggagaacucuauuuuccacauggcugccugguccgggagcgcuugccaugauggaaaagaauggacauauguuggcguggacgggccugauucuaaugcccugcuuaagaucaaauacggagaggcguacaccgacacguaucacuccuacgccaagaacauucugcggacacaagaaagcgcuuguaauugcaucggcggggauuguuaucucaugauuaccgacggacccgccuccggcaucucugagugccgcuuucugaaaaucagagagggccggauuaucaaggaaauuuucccgacagggcgcaucaagcacaccgaggaauguaccugcggauuugcuagcaacaaaacaauugagugugccugcagagauaauuccuacacggccaagcggccuuucgucaaacuuaacguggaaaccgacacagcugagauccgccugaugugcaccgagacauaucucgauacccccagaccuaaugacggcagcaucacggggcccuguggaucugauggcgacaagggguccggaggcauuaaaggcggguuuguucaucagcggauggcgagcaagaucggacgcugguacucuagaacaaugagcaaaaccaagcggaugggcauggggcuguaugugaaguacgacggagaucccuggaccgacuccgaagcccuggcucucucuggcgucauggugagcauggaugagccugggugguacuccuucggcuuugaaauuaaagacaagaaaugcgaugugccguguaucggaauugagaugguccacgacggcgggaagacaaccuggcauagcgccgccacagcuaucuauugccugaugggaucuggccagcuucugugggauacgguuaccgggguggacauggcccucuga

SEQ ID NO: 221881 - RNA, 1401 nt, Artificial Sequence
  derived and/or modified CDS sequence (opt5) from neuraminidase__InfluenzaB__AGX23956
augcugcccagcaccauccagacacucacgcuguuccuuaccuccggcggggugcugcucucucuguacgucagcgccucccuuucuuaucugcucuacagcgacauucugcugaaguuuucccaaacagagaucaccgcuccuauuaugccgcucgauugcgccaacgcgucuaauguucaggcugugaacagaagcgccgccaaaggagugacacugcuucugcccgaaccugaguggaccuauccccggcucuccuguccuggcagcacauuccagaaggcucugcuuaucucuccccaccgcuuuggggaaaccaaaggaaauuccgccccucugauuaucagagagccguucaucgcuugcggccccacggaauguaagcauuuugcccucacccacuacgcggcccagccugggggauauuacaacggcacacgggaggaccgcaauaaacugagacaucugauuagcgucaagcucggcaagauccccaccguggagaacucuauuuuccacauggcugccugguccgggagcgcuugccaugauggaaaagaauggacauauaucggcauugacgggccugauucuaaugcccugcuuaagaucaaauacggagaggcguacaccgacacguaucacuccuacgccaagaacauucugcggacacaagaaagcgcuuguaauugcaucggcggggauuguuaucucaugaucaccgacggacccgccuccggcguuucugagugccgcuuucugaaaauuagagagggccggaucauuaaggaaaucuucccgacagggcgcgugaagcacaccgaggaauguaccugcggauuugcuagcaacaaaacaauugagugugccugcagagauaauuccuacacggccaagcggccuuucgucaaacuuaacguggaaaccgacacagcugagauccgccugaugugcaccgagacauaucucgauacccccagaccuaaugacggcagcaucacggggcccugugaaucugauggagacaagggcuccgggggaauuaaaggcggcuuuguucaucagcggauggcgagcaagaucgggcgcugguacucuagaacaaugagcaaaaccaagcggaugggaaugggccuguaugugaaguacgacggggaucccuggaccgacuccgaggcccuggcucucucuggagucauggugagcauggaggaaccuggcugguacuccuucggguuugaaauuaaagauaagaaaugcgacgugccguguaucggcauugagaugguccacgauggaggcaagacaaccuggcauagcgccgccacagcuaucuauugccugauggggucuggacagcuucugugggacacgguuaccggcguggauauggcccucuga

SEQ ID NO: 221882 - RNA, 1401 nt, Artificial Sequence; identical to SEQ ID NO: 221219
  derived and/or modified CDS sequence (opt5) from neuraminidase__InfluenzaB__AGX23967

SEQ ID NO: 221883 - RNA, 1401 nt, Artificial Sequence; identical to SEQ ID NO: 221032
  derived and/or modified CDS sequence (opt5) from neuraminidase__InfluenzaB__AGX23978

SEQ ID NO: 221884 - RNA, 1401 nt, Artificial Sequence
  derived and/or modified CDS sequence (opt5) from neuraminidase__InfluenzaB__AGX23989
augcugcccagcaccauccagacacucacgcuguuccuuaccuccggcggggugcugcucucucuguacgucagcgccucccuuucuuaucugcucuacagcgacauucugcugaaguuuucccaaacagagaucaccgcuccuauuaugccgcucgauugcgccaacgcgucuaauguucaggcugugaacagaagcgccgccaaaggagugacacugcuucugcccgaaccugaguggaccuauccccggcucuccuguccuggcagcacauuccagaaggcucugcuuaucucuccccaccgcuuuggggaaaccaaaggaaauuccgccccucugauuaucagagagccguucaucgcuugcggccccacggaauguaagcauuuugcccucacccacuacgcggcccagccugggggauauuacaacggcacacgggaggaccgcaauaaacugagacaucugauuagcgucaagcucggcaagauccccaccguggagaacucuauuuuccacauggcugccugguccgggagcgcuugccaugauggaaaagaauggacauauaucggcguugacgggccugauucuaaugcccugcuuaagauuaaauacggagaggcguacaccgacacguaucacuccuacgccaagaacauccugcggacacaagaaagcgcuuguaauugcauuggcggggauuguuaucucaugaucaccgacggacccgccuccggcaucucugagugccgcuuucugaaaauuagagagggccggaucauuaaggaaaucuucccgacagggcgcgugaagcacaccgaggaauguaccugcggauuugcuagcaacaaaacaauugagugugccugcagagauaaucgguacacggccaagcgcccuuucgucaaacuuaacguggaaaccgacaaggcugagaucagacugaugugcacagagaccuaucucgauacaccccggccuaaugacggcuccaucaccgggcccugugaaagcgauggagacaaaggcucugggggaauuaagggcggcuuuguucaucagcgcauggcguccaaaaucgggagaugguacagccggacgaugucuaagacaaagagaaugggaaugggccuguaugugaaauacgacggggaucccuggaccgacagcggagcccuggcucucuccggcgucauggugucuauugaggaaccugggugguacagcuucggcuuugagaucaaggauaaaaagugcgacgugccguguauuggaaucgaaaugguccacgauggcgggaaaaccacauggcauuccgccgccaccgcuaucuauugccugaugggaagcggccagcuucugugggacacaguuacggggguggauauggcccucuga

SEQ ID NO: 221885 - RNA, 1401 nt, Artificial Sequence; identical to SEQ ID NO: 221842
  derived and/or modified CDS sequence (opt5) from neuraminidase__InfluenzaB__AGX24000

SEQ ID NO: 221886 - RNA, 1401 nt, Artificial Sequence
  derived and/or modified CDS sequence (opt5) from neuraminidase__InfluenzaB__AGX24011
augcugcccagcaccauccagacacucacgcuguuccuuaccuccggcggggugcugcucucucuguacgucagcgccucccuuucuuaucugcucuacagcgacauucugcugaaguuuucccaaacagagaucaccgcuccuauuaugccgcucgauuaugccaacgcgucuaauguucaggcugugaaccacagcgccgccaaaggagugacacugcuucugcccgaaccugaguggaccuaccccagacucuccugcccuggcagcacauuccagaaggcucugcuuaucucuccccaucgguuuggggaaaccaaaggaaauuccgccccucugauuauccgcgagccguucaucgcuuguggccccacggaaugcaagcacuuugcccucacccauuaugcggcccagccugggggauacuauaacggcacaagagaggaccggaauaaacugcgccaccugauuagcgucaagcucggcaagauccccaccguggagaacucuauuuuccauauggcugccugguccgggagcgcuugucacgauggaaaagaauggacauacaucggcguugacgggccugauucuaaugcccugcuuaagauuaaauacggagaggcguauaucgacaccuaccacuccuaugccaagaacauucugagaacgcaagaaagcgcuugcaauuguaucggcggggauugcuaccucaugaucacagacggacccgccuccggcauuucugagugucgguuucugaaaauccgcgagggcagaauuaucaaggaaauuuucccgaccgggcgggugaagcauacagaggaaugcaccuguggauuugcuagcaacaaaaccaucgagugcgccugucgcgauaauuccuauacagccaagagaccuuucgucaaacuuaacguggaaacggacaccgcugagauccggcugaugugcacagagaccuaccucgauacaccccgcccuaaugacggcagcauuaccgggcccugcgaaucugauggagacaagggcuccgggggaaucaaaggcggcuuuguucaccagagaauggcgagcaagauugggcggugguauucucgcacgaugagcaaaacaaagagaaugggaaugggccuguacgugaaguacgacggggaucccuggaccgacuccgaggcccuggcucucucuggagucauggugagcauggaggaaccuggcugguauuccuucggguuugaaaucaaagauaagaaaugugacgugccgugcauuggcaucgagaugguccaugauggaggcaagaccacauggcacagcgccgccaccgcuaucuacugucugauggggucuggacagcuucugugggacacaguuacgggcguggauauggcccucuga

SEQ ID NO: 221887 - RNA, 1401 nt, Artificial Sequence; identical to SEQ ID NO: 221032
  derived and/or modified CDS sequence (opt5) from neuraminidase__InfluenzaB__AGX24022

SEQ ID NO: 221888 - RNA, 1401 nt, Artificial Sequence
  derived and/or modified CDS sequence (opt5) from neuraminidase__InfluenzaB__AGX24033
augcugcccagcaccauccagacacucacgcuguuccuuaccuccggcggggugcugcucucucuguacgucagcgccucccuuucuuaucugcucuacagcgacauucugcugaaguuuucccaaacagagaucaccgcucagauuaugccucucgauugcgccaacgcgucuaauguucaggcugugaacagaagcgccgccaaaggagugacacugcuucugccggaacccgaguggaccuauccucggcucuccugucccggcagcacauuccagaaggcucugcuuaucucuccucaccgcuuuggggaaaccaaaggaaauuccgcuccccugauuaucagagagccuuucaucgccugcggcccgacggaauguaagcauuuugcccucacccacuacgcggcccaacccgggggauauuacaacggcacacgggaggaccgcaauaaacugagacaucugauuagcgucaagcucggcaagaucccuaccguggagaacucuauuuuccacauggcugccugguccgggagcgcuugccaugauggaaaagaauggacauauaucggcguugacgggcccgauucuaaugcccugcuuaagauuaaauacggagaggcguacaccgacacguaucacuccuacgccaagaacauccugcggacacaggaaagcgcuuguaauugcauuggcggggauuguuaucucaugaucaccgacggaccugccuccggcaucucugagugccgcuuucugaaaauuagagagggccggaucauuaaggaaaucuuccccacagggcgcgugaagcacaccgaggaauguaccugcggauuugcuagcaacaaaacaauugagugugccugcagagauaaucgguacacggccaagcgcccguucgucaaacuuaacguggaaaccgacaaggcugagaucagacugaugugcacagagaccuaucucgauacaccucggcccaaugacggcuccaucaccgggccuugugaaagcgauggagacaaaggcucugggggaauuaagggcggcuuuguucaucagcgcauggcguccaaaaucgggagaugguacagccggacgaugucuaagacaaagagaaugggaaugggccuguaugugaaauacgacggggaucccuggaccgacagcggagcccuggcucucuccggcgucauggugucuauugaggaacccgggugguacagcuucggcuuugagaucaaggauaaaaagugcgacgugccuuguauuggaaucgaaaugguccacgauggcgggaaaaccacauggcauuccgccgccaccgcuaucuauugccugaugggaagcggccagcuucugugggacacaguuacggggguggauauggcccucuga

SEQ ID NO: 221889 - RNA, 1401 nt, Artificial Sequence; identical to SEQ ID NO: 221032
  derived and/or modified CDS sequence (opt5) from neuraminidase__InfluenzaB__AGX24044

SEQ ID NO: 221890 - RNA, 1401 nt, Artificial Sequence
  derived and/or modified CDS sequence (opt5) from neuraminidase__InfluenzaB__AGX24055
augcugcccagcaccauccagacacucacgcuguuccuuaccuccggcggggugcugcucucucuguacgucagcgccucccuuucuuaucugcucuacagcgacauucugcugaaguuuucccaaacagagaucaccgcuccuauuaugccgcucgauugcgccaacgcgucuaauguucaggcugugaacagaagcgccacaaaaggagugacccugcuucugcccgaacucgaguggacauauccucggcuguccugucccggcagcaccuuccagaaggcccuucugaucucuccucaccgcuuuggggaaacgaaaggaaauuccgcuccccucauuaucagagagccuuucgucgccugcggcccgaccgaauguaagcauuuugcucugacacacuacgccgcgcagcccgggggauauuacaacggcacccgggaggaccgcaauaaacugagacaucucaucagcgugaagcugggcaagauuccuacaguugagaacucuaucuuccacauggccgcuugguccgggagcgccugccaugauggaaaagaauggaccuauauuggcguggacgggcccaauucuaacgcccuucugaagaucaaauacggagaggcuuacacggauacauaucacuccuacgcgaagaauauucuccggacccaagaaagcgccuguaacugcaucggcggggacuguuaucugaugauuacagauggaccugcuuccggcgucucugagugccgcuuucuuaaaaucagagagggccggaucauuaaggaaaucuuccccaccgggcgcgugaagcacaccgaggaauguacaugcggauuugccagcaauaaaacgauugagugugcuugcagagacaacuccuacaccgccaagcggccguucguuaaacugaauguggaaacagauaccgccgagauccgccucaugugcacagagaccuaucuggacacgccuagacccaacgauggcagcauuacagggccuugugaaucugacggagauaagggcuccgggggaaucaaaggcggcuuuguccaucagcggauggcuagcaagaucgggcgcugguacucuagaaccaugagcaaaaccaagcggaugggaaugggccuguaugugaaguacgacggggaccccuggacagauuccgaggcgcucgcccugucuggagugauggucagcauggaggaacccggcugguacuccuucggguuugaaauuaaagacaagaaaugcgauguuccuuguaucggcauugagauggugcacgacggaggcaagaccacauggcauagcgcugccacggccaucuauugccuuauggggucuggacagcugcucugggauaccgugacaggcgucgacauggcucuguga

SEQ ID NO: 221891 - RNA, 1401 nt, Artificial Sequence; identical to SEQ ID NO: 220889
  derived and/or modified CDS sequence (opt5) from neuraminidase__InfluenzaB__AGX24066

SEQ ID NO: 221892 - RNA, 1401 nt, Artificial Sequence
  derived and/or modified CDS sequence (opt5) from neuraminidase__InfluenzaB__AGX24077
augcugcccagcaccauccagacacucacgcuguuccuuaccuccggcggggugcugcucucucuguacgucagcgccucccuuucuuaucugcucuacagcgacauucugcugaaguuuucccaaacagagaucaccgcuccuauuaugccgcucgauugcgccaacgcgucuaauguucaggcugugaacagaagcgccgccaaaggagugacacugcuucugcccgaaccugaguggaccuauccccggcucuccuguccuggcagcacauuccagaaggcucugcuuaucucuccccaccgcuuuggggaaaccaaaggaaauuccgccccucugauuaucagagagccguucaucgcuugcggccccacggaauguaagcauuuugcccucacccacuacgcggcccagccugggggauauuacaacggcacacgggaggaccgcaauaaacugagacaucugauuagcgucaagcucggcaagauccccaccguggagaacucuauuuuccacauggcugccugguccgggagcgcuugccaugauggaaaagaauggacauauaucggcguugacgggccugauucuaaugcccugcuuaagauuaaauacggagaggcguacaccgacacguaucacuccuacgccaagaacauccugcggacacaagaaagcgcuuguaauugcauuggcgggaacuguuaucucaugaucaccgauggacccgccuccggcaucucugagugccgcuuucugaaaauuagagagggccggaucauuaaggaaaucuucccgacagggcgcgugaagcacaccgaggaauguaccugcggauuugcuagcaauaaaacaauugagugugccugcagagacaaccgguacacggccaagcgcccuuucgucaaacuuaauguggaaaccgauaaggcugagaucagacugaugugcacagagaccuaucucgacacaccccggccuaacgauggcuccaucaccgggcccugugaaagcgacggagauaaaggcucugggggaauuaagggcggcuuuguucaucagcgcauggcguccaaaaucgggagaugguacagccggacgaugucuaagacaaagagaaugggaaugggccuguaugugaaauacgacggggaccccugggccgauagcggagcucuggcccucuccggcgucauggugucuauugaggaaccugggugguacagcuucggcuuugagaucaaggacaaaaagugcgaugugccguguauuggaaucgaaaugguccacgacggcgggaaaaccaccuggcauuccgccgcuacagccaucuauugccugaugggaagcggccagcuucugugggauaccguuacagggguggacauggcgcucuga

SEQ ID NO: 221893 - RNA, 1401 nt, Artificial Sequence
  derived and/or modified CDS sequence (opt5) from neuraminidase__InfluenzaB__AGX24088
augcugcccagcaccauccagacacucacgcuguucauuaccuccggcggggugcuucugucucucuacgucagcgccucccugucuuaucuucuguacagcgacauccuccugaaguuuucccaaacagagauuaccgcuccuaucaugccgcuggauugcgccaacgcgucuaauguucaggcugugaacagaagcgccgccaaaggagugacacuccugcuucccgaaccugaguggaccuauccccggcuguccuguccuggcagcacauuccagaaggcucuccugauuucuccccaccgcuuuggggaaaccaaaggaaauuccgccccucuuaucaucagagagccguucauugcuugcggccccacggaauguaagcauuuugcccugacccacuacgcggcccagccugggggauauuacaacggcacacgggaggaccgcaauaaacucagacaucugaucagcgucaagcugggcaagauucccaccguggagaacucuaucuuccacauggcugccugguccgggagcgcuugccaugauggaaaagaauggacauauguuggcguggacgggccugauucugacgcccuccugaagauuaaauacggagaggcguacaccgauacguaucacuccuacgccaagaauauccuucggacacaagaaagcgcuuguaacugcauuggcggggacuguuaucugaugaucaccgauggacccgccuccggcaucucugagugccgcuuucucaaaauuagagagggccggaucauuaaggaaaucuucccgacagggcgcgucaagcacaccgaggaauguaccugcggauuugcuagcaauaaaacaauugagugugccugcagagacaacuccuacacggccaagcggccuuucgugaaacugaauguugaaaccgauacagcugagauccgccuuaugugcaccgagacauaucuggacacccccagaccuaacgauggcagcaucacggggcccuguggaucugacggcgacaagggguccggaggcauuaaaggcggguuugugcaucagcggauggcgagcaagaucggacgcugguacucuagaacaaugagcaaaaccaagcggaugggcauggggcucuaugucaaguacgauggagaccccuggaccgauuccgaagcccuggcucugucuggcgugauggugagcauggacgagccugggugguacuccuucggcuuugaaauuaaagauaagaaaugcgacgucccguguaucggaauugagaugguucacgauggcgggaagacaaccuggcauagcgccgccacagcuaucuauugccucaugggaucuggccagcugcuuugggacacggugaccgggguggauauggcccuguga

SEQ ID NO: 221894 - RNA, 1401 nt, Artificial Sequence; identical to SEQ ID NO: 221032
  derived and/or modified CDS sequence (opt5) from neuraminidase__InfluenzaB__AGX24099

SEQ ID NO: 221895 - RNA, 1401 nt, Artificial Sequence
  derived and/or modified CDS sequence (opt5) from neuraminidase__InfluenzaB__AGX24110
augcugcccagcaccauccagacacucacgcuguuccuuaccuccggcggggugcugcucucucuguacgucagcgccucccuuucuuaucugcucuacagcgacauucugcugaaguuuucccaaacagagaucaccgcuccuauuaugccgcucgauugcgccaacgcgucuaauguucaggcugugaacagaagcgccgccaaaggagugacacugcuucugcccgaaccugaguggaccuauccccggcucuccuguccuggcagcacauuccagaaggcucugcuuaucucuccccaccgcuuuggggaaaccaaaggaaauuccgccccucugauuaucagagagccguucaucgcuugcggccccacggaauguaagcauuuugcccucacccacuacgcggcccagccugggggauauuacaacggcacacgggaggaccgcaauaaacugagacaucugauuagcgucaagcucggcaagauccccaccguggagaacucuauuuuccacauggcugccugguccgggagcgcuugccaugauggaaaagaauggacauauguuggcguggacgggccugauucuaaugcccugcuuaagaucaaauacggagaggcguacaccgacacguaucacuccuacgccaagaacauucugcggacacaagaaagcgcuuguaauugcaucggcggggauuguuaucucaugauuaccgacggacccgccuccggcaucucugagugccgcuuucugaaaaucagagagggccggauuaucaaggaaauuuucccgacagggcgcgucaagcacaccgaggaauguaccugcggauuugcuagcaacaaaacaaucgaguguacgugcagagauaauuccuacaccgccaagcggccuuucgugaaacuuaacguugaaacagacaccgccgagauucgccugaugugcacagagaccuaucucgauacgcccagaccuaaugacggcagcaucacagggcccuguggaucugauggcgacaagggguccggaggcaucaaaggcggguuugugcaucagcggauggcuagcaagauuggacgcugguacucuagaaccaugagcaaaaccaagcggaugggcauggggcuguaugucaaguacgacggagaucccuggacagacuccgaagcgcuggcccucucuggcgugauggugagcauggaugagccugggugguacuccuucggcuuugaaaucaaagacaagaaaugcgaugucccguguauuggaaucgagaugguucacgacggcgggaagaccacauggcauagcgcugccacggccauuuauugccugaugggaucuggccagcuucugugggauaccgugacagggguggacauggcucucuga

SEQ ID NO: 221896 - RNA, 1401 nt, Artificial Sequence
  derived and/or modified CDS sequence (opt5) from neuraminidase__InfluenzaB__AGX24121
augcugcccagcaccauccagacacucacgcuguuccuuaccuccggcggggugcugcucucucuguacgucagcgccucccuuucuuaucugcucuacagcgacauucugcugaaguuuucccaaacagagaucaccgcuccuauuaugccgcucgauuaugccaacgcgucuaauguucaggcugugaaccacagcgccgccaaaggagugacacugcuucugcccgaaccugaguggaccuaccccagacucuccugcccuggcagcacauuccagaaggcucugcuuaucucuccccaucgguuuggggaaaccaaaggaaauuccgccccucugauuauccgcgagccguucaucgcuuguggccccacggaaugcaagcacuuugcccucacccauuaugcggccaaaccugggggauacuauaacggcacaagagaggaccggaauaagcugcgccaccugauuagcgucaagcucggcaaaauccccaccguggagaacucuauuuuccauauggcugccugguccgggagcgcuugucacgauggaaaggaauggacauacaucggcguugacgggccugauucuaaugcccugcuuaaaauuaaguacggagaggcguauaccgacacguaccacuccuaugccaaaaacauccugagaacacaggaaagcgcuugcaauuguauuggcggggauugcuaccucaugaucaccgacggacccgccuccggcaucucugagugucgguuucugaagauucgcgagggcagaaucauuaaggaaaucuucccgacagggcgggugaaacauaccgaggaaugcaccuguggauuugcuagcaacaagacaauugagugcgccugucgcgauaauuccuauacggccaaaagaccuuucgucaaacuuaacguggaaaccgacacagcugagauccggcugaugugcaccgagacauaccucgauacgccccgcccuaaugacggcagcaucaccgggcccugcgaaucugauggagacaagggcuccgggggaauuaagggcggcuuuguucaccaaagaauggcgagcaaaaucgggcggugguauucucgcacaaugagcaagaccaagagaaugggaaugggccuguacgugaaauacgacggggaucccuggaccgacuccgaggcccuggcucucucuggagucauggugagcauggaggaaccuggcugguauuccuucggguuugaaauuaaggauaaaaagugugacgugccgugcaucggcauugagaugguccaugauggaggcaaaacaaccuggcacagcgccgccacagcuaucuacugucugauggggucuggacagcuucugugggacacgguuaccggcguggauauggcccucuga

SEQ ID NO: 221897 - RNA, 1401 nt, Artificial Sequence
  derived and/or modified CDS sequence (opt5) from neuraminidase__InfluenzaB__AGX24132
augcugcccagcaccauccagacacucacgcuguuccuuaccuccggcggggugcugcucucucuguacgucagcgccucccuuucuuaucugcucuacagcgacauucugcugaaguuuuccagaacagagaucaccgcuccuauuaugccgcucgauugcgccaacgcgucuaauguucaagcugugaaccggagcgccacaaaaggagugacccugccccuuccugaacccgaguggacauauccucgccuguccugucccggcagcaccuuccagaaggcccuccugaucucuccucacagauuuggggaaacgaaaggaaauuccgcuccgcuuauuauccgggagcccuucaucgccugcggcccuaaggaauguaaacauuuugcucugacccacuacgccgcgcagcccgggggauauuacaacggcacacgcgaggacagaaauaagcuccggcaucugauuagcgucaagcugggcaaaaucccuaccguggagaacucuauuuuccacauggccgcuugguccgggagcgccugccaugauggacgcgaauggacauauaucggcguugacgggcccgauucuaaugcucuccugaagauuaaauacggagaggccuacaccgacacguaucacuccuacgcgaagaacauccuuagaacacaggaaagcgccuguaauugcauuggcggggauuguuaucugaugaucaccgacggaccggcucucggcaucuccgagugccgguuucugaaaauucgcgagggcagaaucauuaaggaaaucuucccuacagggcgggugaagcacaccgaggaauguaccugcggauuugccucuaacaaaacaauugagugugcuugccgcgauaauagcuacacggccaagagacccuucgucaaacuuaacguggaaaccgacacagccgagauccggcugaugugcaccgagacauaucucgauaccccucgccccaaugacggcuccaucacggggcccugugaaagcaacggagauaagggcucugggggaauuaaaggcggcuuuguucaucaaagaauggcuuccaagaucgggcggugguacagcagaacaaugucuaaaaccaagcgcaugggaaugggccuguaugugaaguacgacggggacccuuggaccgauagcgaggcgcuggcccucuccggagucauggugucuauggaggaaccgggcugguacagcuucggguuugaaauuaaagacaagaaaugcgaugugcccuguaucggcauugagaugguccacgacggaggcaagacaaccuggcauuccgcugccacagccaucuauugccugauggggagcggacagcuucugugggauacgguuaccggcgugaauaugacacucuga

SEQ ID NO: 221898 - RNA, 1401 nt, Artificial Sequence
  derived and/or modified CDS sequence (opt5) from neuraminidase__InfluenzaB__AGX24143
augcugcccagcaccauccagacacucacgcuguuccuuaccuccggcggggugcugcucucucuguacgucagcgccucccuuucuuaucugcucuacagcgacauucugcugaaguuuucccaaacagagaucaccgcuccuauuaugccgcucgauugcgccaacgcgucuaauguucaggcugugaacagaagcgccgccaaaggagugacacugcuucugcccgaaccugaguggaccuauccccggcucuccuguccuggcagcacauuccagaaggcucugcuuaucucuccccaccgcuuuggggaaaccaaaggaaauuccgccccucugauuaucagagagccguucaucgcuugcggccccacggaauguaagcauuuugcccucacccacuacgcggcccagccugggggauauuacaacggcacacgggaggaccgcaauaaacugagacaucugauuagcgucaagcucggcaagauccccaccguggagaacucuauuuuccacauggcugccugguccgggagcgcuugccaugauggaaaagaauggacauauaucggcguugacgggccugauggaaaugcccugcuuaagauuaaauacggcgaggcguacaccgacacguaucacucuuacgccaagaacauccugcggacacaagaauccgcuuguaauugcauugggggagauuguuaucucaugaucaccgacggccccgccagcggcaucuccgagugccgcuuucugaaaauuagagaggggcggaucauuaaggaaaucuucccgacaggacgcgugaagcacaccgaggaauguaccugcggcuuugcuucuaacaaaacaauugagugugccugcagagauaauagcuacacggccaagcggccuuucgucaaacuuaacguggaaaccgacacagcugagauccgccugaugugcaccgagacauaucucgauacccccagaccuaaugacggguccaucacgggacccugugaaagcgauggcgacaaggggucuggaggcauuaaaggcggguuuguucaucagcggauggcguccaagaucggacgcugguacagcagaacaaugucuaaaaccaagcggaugggcauggggcuguaugugaaguacgacggagaucccuggaccgacagcgaggcccuggcucucuccggcgucauggugucuauggaggaaccugggugguacagcuucggcuuugaaauuaaagauaagaaaugcgacgugccguguaucggaauugagaugguccacgauggcgggaagacaaccuggcauuccgccgccacagcuaucuauugccugaugggaagcggccagcuucugugggacacgguuaccgggguggauauggcccucuga

SEQ ID NO: 221899 - RNA, 1401 nt, Artificial Sequence; identical to SEQ ID NO: 221032
  derived and/or modified CDS sequence (opt5) from neuraminidase__InfluenzaB__AGX24154

SEQ ID NO: 221900 - RNA, 1401 nt, Artificial Sequence
  derived and/or modified CDS sequence (opt5) from neuraminidase__InfluenzaB__AGX24165
augcugcccagcaccauccagacacucacgcuguuccuuaccuccggcggggugcugcucucucuguacgucagcgccucccuuucuuaucugcucuacagcgacauucugcugaaguuuucccaaacagagaucaccgcuccuauuaugccgcucgauuaugccaacgcgucuaauguucaggcugugaaccacagcgccgccaaaggagugacacugcuucugcccgaaccugaguggaccuaccccagacucuccugcccuggcagcacauuccagaaggcucugcuuaucucuccccaucgguuuggggaaaccaaaggaaauuccgccccucugauuauccgcgagccguucaucgcuuguggccccacggaaugcaagcacuuugcccucacccauuaugcggcccagccugggggauacuauaacggcacaagagaggaccggaauaaacugcgccaccugauuagcgucaagcucggcaagauccccaccguggagaacucuauuuuccauauggcugccugguccgggagcgcuugucacgauggaaaagaauggacauacaucggcguugacgggccugauucuaaugcccugcuuaagauuaaauacggagaggcguauaccgacacguaccacuccuaugccaagaacauccugagaacacaagaaagcgcuugcaauuguauuggcggggauugcuaccucaugaucaccgacggacccgccuccggcaucucugagugucgguuucugaaaauucgcgagggcagaaucauuaaggaaaucuucccgacagggcgggugaagcauaccgaggaaugcaccuguggauuugcuagcaacaaaacaauugagugcgccugucgcgauaauuccuauacggccaagagaccuuucgucaaacuuaacguggaaaccgacacagcugagauccggcugaugugcaccgagacauaccucgauacgccccgcccuaaugacggcagcaucaccgggcccugcgaaucugauggagacaagggcuccgggggaauuaaaggcggcuuuguucaccagagaauggcgagcaagaucgggcggugguauucucgcacaaugagcaaaaccaagagaaugggaaugggccuguacgugaaguacgacggggaucccuggaccgacuccgaggcccuggcucucaacggagucauggugucuauggaggaaccuggcugguauagcuucggguuugaaauuaaagauaagaaaugugacgugccgugcaucggcauugagaugguccaugauggaggcaagacaaccuggcacuccgccgccacagcuaucuacugucugauggggagcggacagcuucugugggacacgguuaccggcguggauauggcccucuga

SEQ ID NO: 221901 - RNA, 1401 nt, Artificial Sequence; identical to SEQ ID NO: 220889
  derived and/or modified CDS sequence (opt5) from neuraminidase__InfluenzaB__AGX24176

SEQ ID NO: 221902 - RNA, 1401 nt, Artificial Sequence; identical to SEQ ID NO: 220889
  derived and/or modified CDS sequence (opt5) from neuraminidase__InfluenzaB__AGX24187

SEQ ID NO: 221903 - RNA, 1401 nt, Artificial Sequence; identical to SEQ ID NO: 220889
  derived and/or modified CDS sequence (opt5) from neuraminidase__InfluenzaB__AGX24198

SEQ ID NO: 221904 - RNA, 1401 nt, Artificial Sequence; identical to SEQ ID NO: 221219
  derived and/or modified CDS sequence (opt5) from neuraminidase__InfluenzaB__AGX24231

SEQ ID NO: 221905 - RNA, 1401 nt, Artificial Sequence; identical to SEQ ID NO: 220889
  derived and/or modified CDS sequence (opt5) from neuraminidase__InfluenzaB__AGX24242

SEQ ID NO: 221906 - RNA, 1401 nt, Artificial Sequence
  derived and/or modified CDS sequence (opt5) from neuraminidase__InfluenzaB__AGX24275
augcugcccagcaccauccagacacucacgcuguuccuuaccuccggcggggugcugcucucucuguacgucagcgccucccuuucuuaucugcucuacagcgacauucugcugaaguuuucccaaacagagaucaccgcuccuauuaugccgcucgauugcgccaacgcgucuaauguucaggcugugaacagaagcgccgccaaaggagugacacugcuucugcccgaaccugaguggaccuauccccggcucuccuguccuggcagcacauuccagaaggcucugcuuaucucuccccaccgcuuuggggaaaccaaaggaaauuccgccccucugauuaucagagagccguucaucgcuugcggccccacggaauguaagcauuuugcccucacccacuacgcggcccagccugggggauauuacaacggcacacgggaggaccgcaauaaacugagacaucugauuagcgucaagcucggcaagauccccaccguggagaacucuauuuuccacauggcugccugguccgggagcgcuugccaugauggaaaagaauggacauauaucggcguugacgggccugauucuaaugcccugcuuaagauuaaauacggagaggcguacaccgacacguaucacuccuacgccaagaacauccugcggacacaagaaagcgcuuguaauugcauuggcggggauuguuaucucaugaucaccgacggacccgccuccggcaucucugagugccgcuuucugaaaauuagagagggccggaucauuaaggaaaucuucccgacagggcgcgugaagcacaccgaggaauguaccugcggauuugcuagcaacagaacaauugagugugccugccgggauaauuccuacacggccaaacgcccuuucgucaaacuuaacguggaaaccgacacagcugagaucagacugaugugcaccgagacauaucucgauacgccccggccuaaugacggcagcaucaccgggcccugugaaucugauggagacaagggcuccgggggaauuaagggcggcuuuguucaucagcgcauggcgagcaaaaucgggagaugguacucucggacaaugagcaagaccagacgcaugggaaugggccuguaugugaaauacgacggggaucccuggaccgacuccgaggcccuggcucucucuggagucauggugagcauggaggaaccuggcugguacuccuucggguuugaaauuaaggauaagaaaugcgacgugccguguaucggcauugagaugguccacgauggaggcaagacaaccuggcauagcgccgccacagcuaucuauugccugauggggucuggacagcuucugugggacacgguuaccggcguggauauggcccucuga

SEQ ID NO: 221907 - RNA, 1401 nt, Artificial Sequence; identical to SEQ ID NO: 221484
  derived and/or modified CDS sequence (opt5) from neuraminidase__InfluenzaB__AGX24286

SEQ ID NO: 221908 - RNA, 1401 nt, Artificial Sequence
  derived and/or modified CDS sequence (opt5) from neuraminidase__InfluenzaB__AGX24297
augcugcccagcaccauccagacacucacgcuguuccuuaccuccggcggggugcugcucucucuguacgucagcgccucccuuucuuaucugcucuacagcgacauucugcugaaguuuucccaaacagagaucaccgcuccuauuaugccgcucgauugcgccaacgcgucuaauguucaggcugugaacagaagcgccgccaaaggagugacacugcuucugcccgaaccugaguggaccuauccccggcucuccuguccuggcagcacauuccagaaggcucugcuuaucucuccccaccgcuuuggggaaaccagaggaaauuccgccccucugauuauccgggagccguucaucgcuugcggccccacggaauguaaacauuuugcccucacccacuacgcggcccagccugggggauauuacaacggcacacgcgaggacagaaauaagcugcggcaucugauuagcgucaaacucggcaagauccccaccguggagaacucuauuuuccacauggcugccugguccgggagcgcuugccaugauggaaaggaauggacauauaucggcguugacgggccugauucuaaugcccugcuuaaaauuaaguacggagaggcguacaccgacacguaucacuccuacgccaaaaacauccugcgcacacaagaaagcgcuuguaauugcauuggcggggauuguuaucucaugaucaccgacggacccgccuccggcaucucugagugcagauuucugaagauucgggagggccgcaucauuaaagaaaucuucccgacagggagagugaagcacaccgaggaauguaccugcggauuugcuagcaacaagacaauugagugugccugccgggauaauuccuacacggccaaacgcccuuucgucaaacuuaacguggaaaccgacacagcugagaucagacugaugugcaccgagacauaucucgauacgccccggccuaaugacggcagcaucaccgggcccugugaaucugauggagacaagggcuccgggggaauuaagggcggcuuuguucaucagcgcauggcgagcaaaaucgggagaugguacucucggacaaugagcaagaccaaaagaaugggaaugggccuguaugugaaguacgacggggaucccuggaccgacuccgaggcccuggcucucucuggagucauggugagcauggaggaaccuggcugguacuccuucggguuugaaauuaaggauaaaaagugcgacgugccguguaucggcauugagaugguccacgauggaggcaaaacaaccuggcauagcgccgccacagcuaucuauugccugauggggucuggacagcuucugugggacacgguuaccggcguggauauggcccucuga

SEQ ID NO: 221909 - RNA, 1401 nt, Artificial Sequence; identical to SEQ ID NO: 221484
  derived and/or modified CDS sequence (opt5) from neuraminidase__InfluenzaB__AGX24319

SEQ ID NO: 221910 - RNA, 1401 nt, Artificial Sequence
  derived and/or modified CDS sequence (opt5) from neuraminidase__InfluenzaB__AGX24330
augcugcccagcaccauccagacacucacgcuguuccuuaccuccggcggggugcugcucucucuguacgucagcgccucccuuucuuaucugcucuacagcgacauucugcugaaguuuucccaaacagagaucaccgcuccuauuaugccgcucgauuaugccaacgcgucuaauguucaggcugugaaccacagcgccgccaaaggagugacacugcuucugcccgaaccugaguggaccuaccccagacucuccugcccuggcagcacauuccagaaggcucugcuuaucucuccccaucgguuuggggaaaccaaaggaaauuccgccccucugauuauccgcgagccguucaucgcuuguggccccacggaaugcaagcacuuugcccucacccauuaugcggcccagccugggggauacuauaacggcacaagagaggaccggaauaaacugcgccaccugauuagcgucaagcucggcaagauccccaccguggagaacucuauuuuccauauggcugccugguccgggagcgcuugucacgauggaaaagaauggacauacaucggcguugacgggccugauucuaaugcccugcuuaagauuaaauacggagaggcguauaccgacacguaccacuccuaugccaagaacauccugagaacacaagaaagcgcuugcaauuguauuggcggggauugcuaccucaugaucaccgacggacccgccuccggcaucucugagugucgguuucugaaaauucgcgagggcagaaucauuaaggaaaucuucccgacagggcgggugaagcauaccgaggaaugcaccuguggauuugcuagcaacaaaacaauugagugcacgugucgcgauaauuccuauaccgccaagagaccuuucgucaaacuuaacguggaaacagacaccgccgagauccggcugaugugcacagagaccuaccucgauacgccccgcccuaaugacggcagcaucacagggcccugcgaaucugauggagacaagggcuccgggggaauuaaaggcggcuuuguucaccagagaauggcuagcaagaucgggcggugguauucucgcaccaugagcaaaaccaagagaaugggaaugggccuguacgugaaguacgacggggaucccuggacagacuccgaggcgcuggcccucucuggagucaugauuagcauggaggaaccuggcugguauuccuucggguuugaaaucaaagauaagaaaugugacgugccgugcauuggcaucgagauggugcaugauggaggcaagaccacaugguacagcgcugccacggccaucuauugucugauggggucuggacagcuucugugggacaccgucacaggcguugauauggcucucuga

SEQ ID NO: 221911 - RNA, 1401 nt, Artificial Sequence
  derived and/or modified CDS sequence (opt5) from neuraminidase__InfluenzaB__AGX24341
augcugcccagcaccauccagacacucacgcuguuccuuaccuccggcggggugcugcucucucuguacgucagcgccucccuuucuuaucugcucuacagcgacauucugcugaaguuuuccagaacagagaucaccgcuccuauuaugccgcucgauugcgccaacgcgucuaauguucaagcugugaaccggagcgccacaaaaggagugacccugcuucugcccgaaccugaguggacauauccccgccucuccuguccuggcagcaccuuccagaaggcccugcuuaucucuccccacagauuuggggaaacgaaaggaaauuccgcuccucugauuauccgggagccguucaucgccugcggccccaaggaauguaaacauuuugcucucacccacuacgccgcgcagccugggggauauuacaacggcacacgcgaggacagaaauaagcugcggcaucugauuagcgucaagcucggcaaaauccccaccguggagaacucuauuuuccacauggccgcuugguccgggagcgccugccaugauggacgcgaauggacauauaucggcguugacgggccugauucuaaugcucugcuuaagauuaaauacggagaggccuacaccgacacguaucacuccuacgcgaagaacauccugagaacacaggaaagcgccuguaauugcauuggcggggauuguuaucucaugaucaccgacggacccgcuuccggcaucucugagugccgguuucugaaaauucgcgagggcagaaucauuaaggaaaucuucccgacagggcgggugaagcacaccgaggaauguaccugcggauuugccagcaacaaaacaauugagugugcuugccgcgauaauuccuacacggccaagagaccuuucgucaaacuuaacguggaaaccgacacagccgagauccggcugaugugcaccgagacauaucucgauacgccccgcccuaaugacggcagcaucaccgggcccugugaaucuaacggagauaagggcuccgggggaauuaaaggcggcuuuguucaucaaagaauggcuagcaagaucgggcggugguacucuagaacaaugagcaaaaccaagcgcaugggaaugggccuguaugugaaguacgacggggaccccuggaccgauuccgaggcgcugacacucucuggagucauggugagcauggaggaaccuggcugguacuccuucggguuugaaauuaaagacaagaaaugcgaugugccguguaucggcauugagaugguccacgacggaggcaagaccacauggcauagcgccgcuacggccaucuauugccugauggggucuggacagcuucugugggauaccguuacaggcgugaauaugacccucuga

SEQ ID NO: 221912 - RNA, 1401 nt, Artificial Sequence
  derived and/or modified CDS sequence (opt5) from neuraminidase__InfluenzaB__AGX24352
augcugcccagcaccauccagacacucacgcuguuccuuaccuccggcggggugcugcucucucuguacgucagcgccucccuuucuuaucugcucuacagcgacauucugcugaaguuuuccagaacagagaucaccgcuccuauuaugccgcucgauugcgccaacgcgucuaauguucaagcugugaaccggagcgccacaaaaggagugacccugcuucugcccgaaccugaguggacauauccccgccucuccuguccuggcagcaccuuccagaaggcccugcuuaucucuccccacagauuuggggaaacgaaaggaaauuccgcuccucugauuauccgggagccguucaucgccugcggccccaaggaauguaaacauuuugcucucacccacuacgccgcgcagccugggggauauuacaacggcacacgcgaggacagaaauaagcugcggcaucugauuagcgucaagcucggcaaaauccccaccguggagaacucuauuuuccacauggccgcuugguccgggagcgccugccaugauggacgcgaauggacauauaucggcguugacgggccugauaauaacgcucugcuuaagauuaaauacggagaggccuacaccgacacguaucacucuuacgcgaagaauauccugagaacacaggaauccgccuguaacugcauuggcggggauuguuaucucaugaucaccgacggacccgcuagcggcaucuccgagugccgguuucugaaaauucgcgagggcagaaucauuaaggaaaucuucccgacagggcgggugaagcacaccgaggaauguaccugcggauuugccucuaauaaaacaauugagugugcuugccgcgauaacagcuacacggccaagagaccuuucgucaaacuuaauguggaaaccgacacagccgagauccggcugaugugcaccgagacauaucucgauacgccccgcccuaacgacggcuccaucaccgggcccugugaaagcaauggagauaagggcucugggggaauuaaaggcggcuuuguucaucaaagaauggcuuccaagaucgggcggugguacagcagaacaaugucuaaaaccaagcgcaugggaaugggccuguaugugaaguacgacggggaccccuggaccgauagcgaggcgcuggcccucuccggagucauggugucuauggaggaaccuggcugguacagcuucggguuugaaauuaaagacaagaaaugcgaugugccguguaucggcauugagaugguccacgacggaggcaagacaaccuggcauuccgcugccacagccaucuauugccugauggggagcggacagcuucugugggauacgguuaccggcgugaacaugacacucuga

SEQ ID NO: 221913 - RNA, 1401 nt, Artificial Sequence; identical to SEQ ID NO: 221908
  derived and/or modified CDS sequence (opt5) from neuraminidase__InfluenzaB__AGX24363

SEQ ID NO: 221914 - RNA, 1401 nt, Artificial Sequence; identical to SEQ ID NO: 221912
  derived and/or modified CDS sequence (opt5) from neuraminidase__InfluenzaB__AGX24374

SEQ ID NO: 221915 - RNA, 1401 nt, Artificial Sequence
  derived and/or modified CDS sequence (opt5) from neuraminidase__InfluenzaB__AGX24385
augcugcccagcaccauccagacacucacgcuguuccuuaccuccggcggggugcugcucucucuguacgucagcgccucccuuucuuaucugcucuacagcgacauucugcugaaguuuuccagaacagagaucaccgcuccuacaaugccgcucgauugcgccaacgcgucuaauguucaagcugugaaccggagcgccaccaaaggagugacacugcuucugcccgaaccugaguggaccuauccccgccucuccuguccuggcagcacguuccagaaggcccugcuuauuucuccccacagauuuggggaaaccaaaggaaauuccgcuccucugaucauucgggagccguucaucgccugcggccccaaggaauguaaacauuuugcucucacacacuacgccgcgcagccugggggauauuacaacggcacccgcgaggacagaaauaagcugcggcaucugaucagcgucaagcucggcaaaauucccacaguggagaacucuaucuuccacauggccgcuugguccgggagcgccugccaugauggacgcgaauggaccuauauuggcguugacgggccugauucuaaugcucugcuuaagaucaaauacggagaggccuacacggacacauaucacuccuacgcgaagaacauucugagaacccaggaaagcgccuguaauugcaucggcggggauuguuaucucaugauuacagacggacccgcuuccggcaucucugagugccgguuucugaaaauccgcgagggcagaauuaucaaggaaauuuucccgaccgggcgggugaagcacaccgaggaauguacaugcggauuugccagcaacaaaacgaucgagugugcuugccgcgauaauuccuacaccgccaagagaccuuucgucaaacuuaacguggaaacagacaccgccgagauucggcugaugugcacagagaccuaucucgauacgccccgcccuaaugacggcagcaucacagggcccugugaaucuaacggagauaagggcuccgggggaaucaaaggcggcuuuguucaucaaagaauggcuagcaagauugggcggugguacucuagaaccaugagcaaaaccaagcgcaugggaaugggccuguaugugaaguacgacggggaccccuggacagauuccgaggcgcuggcccucucuggagucauggugagcauggaggaaccuggcugguacuccuucggguuugaaaucaaagacaagaaaugcgaugugccguguauuggcaucgagaugguccacgacggaggcaagaccacauggcauagcgcugccacggccauuuauugccugauggggucuggacagcuucugugggauaccguuacaggcgugaauaugacccucuga

SEQ ID NO: 221916 - RNA, 1401 nt, Artificial Sequence
  derived and/or modified CDS sequence (opt5) from neuraminidase__InfluenzaB__AGX24396
augcugcccagcaccauccagacacucacgcuguuccuuaccuccggcggggugcugcucucucuguacgucagcgccucccuuucuuaucugcucuacagcgacauucugcugaaguuuucccaaacagagaucaccgcuccuauuaugccgcucgauugcgccaacgcgucuaauguucaggcugugaacagaagcgccgccaaaggagugacacugcuucugcccgaaccugaguggaccuauccccggcucuccuguccuggcagcacauuccagaaggcucugcuuaucucuccccaccgcuuuggggaaaccaaaggaaauuccgccccucugauuaucagagagccguucaucgcuugcggccccacggaauguaagcauuuugcccucacccacuacgcggcccagccugggggauauuacaacggcacacgggaggaccgcaauaaacugagacaucugauuagcgucaagcucggcaagauccccaccguggagaacucuauuuuccacauggcugccugguccgggagcgcuugccaugauggaaaagaauggacauauaucggcguugacgggccugauucuaaugcccugcuuaagauuaaauacggagaggcguacaccgacacguaucacuccuacgccaagaacauccugcggacacaagaaagcgcuuguaauugcauuggcggggauuguuaucucaugaucaccgacggacccgccuccggcaucucugagugccgcuuucugaaaauuagagagggccggaucauuaaggaaaucuucccgacagggcgcgugaagcacaccgaggaauguaccugcggauuugcuagcaacaaaacaauugagugugccugcagagauaaucgguacacggccaagcgcccuuucgucaaacuuaacguggaaaccgacacagcugagaucagacugaugugcaccgagacauaucucgauacgccccggccuaaugacggcuccaucaccgggcccugugaaagcgauggagacaagggcucugggggaauuaaaggcggcuuuguucaucagcgcauggcguccaagaucgggagaugguacagccggacaaugucuaaaaccaagagaaugggaaugggccuguaugugaaguacgacggggaucccuggaccgacagcggagcccuggcucucuccggcgucauggugucuauugaggaaccugggugguacagcuucggcuuugagaucaaagauaagaaaugcgacgugccguguauuggaaucgaaaugguccacgauggcgggaagacaaccuggcauuccgccgccacagcuaucuauugccugaugggaagcggccagcuucugugggacacgguuaccgggguggauauggcccucuga

SEQ ID NO: 221917 - RNA, 1401 nt, Artificial Sequence; identical to SEQ ID NO: 221916
  derived and/or modified CDS sequence (opt5) from neuraminidase__InfluenzaB__AGX24407

SEQ ID NO: 221918 - RNA, 1401 nt, Artificial Sequence; identical to SEQ ID NO: 220889
  derived and/or modified CDS sequence (opt5) from neuraminidase__InfluenzaB__AGX24418

SEQ ID NO: 221919 - RNA, 1401 nt, Artificial Sequence; identical to SEQ ID NO: 220860
  derived and/or modified CDS sequence (opt5) from neuraminidase__InfluenzaB__AGX24429

SEQ ID NO: 221920 - RNA, 1401 nt, Artificial Sequence
  derived and/or modified CDS sequence (opt5) from neuraminidase__InfluenzaB__AGX24440
augcugcccagcaccauccagacacucacgcuguuccuuaccuccggcggggugcugcucucucuguacgucagcgccucccuuucuuaucugcucuacagcgacauucugcugaaguuuucccaaacagagaucaccgcuccuauuaugccgcucgauugcgccaacgcgucuaauguucaggcugugaacagaagcgccgccaaaggagugacacugcuucugcccgaaccugaguggaccuauccccggcucuccuguccuggcagcacauuccagaaggcucugcuuaucucuccccaccgcuuuggggaaaccaaaggaaauuccgccccucugauuaucagagagccguucaucgcuugcggcacgaccgaauguaagcauuuugcccucacacacuacgcggcccagcccgggggauauuacaacggcacccgggaggaccgcaauaaacugagacaucugauuagcgucaagcucggcaagaucccuacaguggagaacucuauuuuccacauggcugccugguccgggagcgcuugccaugauggaaaagaauggaccuauaucggcguugacgggcccgauucuaaugcccugcuuaagauuaaauacggagaggcguacacggacacauaucacuccuacgccaagaacauccugcggacccaagaaagcgcuuguaauugcauuggcggggauuguuaucucaugaucacagacggaccugccuccggcaucucugagugccgcuuucugaaaauuagagagggccggaucauuaaggaaaucuuccccaccgggcgcgugaagcacaccgaggaauguacaugcggauuugcuagcaacaaaacgauugagugugccugcagagauaaucgguacaccgccaagcgcccguucgucaaacuuaacguggaaacagacaccgcugagaucagacugaugugcacagagaccuaucucgauacgccucggcccaaugacggcuccaucacagggccuugugaaagcgauggagacaagggcucugggggaauuaaaggcggcuuuguucaucagcgcauggcguccaagaucgggagaugguacagccggaccaugucuaaaaccaagagaaugggaaugggccuguaugugaaguacgacggggaucccuggacagacagcggagcccuggcucucuccggcgucauggugucuauugaggaacccgggugguacagcuucggcuuugagaucaaagauaagaaaugcgacgugccuuguauuggaaucgaaaugguccacgauggcgggaagaccacauggcauuccgccgccacgaccaucuauugccugaugggaagcggccagcuucugugggacacaguuaccgggguggauauggcucucuga

SEQ ID NO: 221921 - RNA, 1401 nt, Artificial Sequence; identical to SEQ ID NO: 221484
  derived and/or modified CDS sequence (opt5) from neuraminidase__InfluenzaB__AGX24451

SEQ ID NO: 221922 - RNA, 1401 nt, Artificial Sequence
  derived and/or modified CDS sequence (opt5) from neuraminidase__InfluenzaB__AGX24462
augcugcccagcaccauccagacacucacgcuguuccuuaccuccggcggggugcugcucucucuguacgucagcgccucccuuucuuaucugcucuacagcgacauucugcugaaguuuucccaaacagagaucaccgcuccuauuaugccgcucgauuaugccaacgcgucuaauguucaggcugugaaccacagcgccgccaaaggagugacacugcuucugcccgaaccugaguggaccuaccccagacucuccugcccuggcagcacauuccagaaggcucugcuuaucucuccccaucgguuuggggaaaccaaaggaaauuccgccccucugauuauccgcgagccguucaucgcuuguggccccacggaaugcaagcacuuugcccucacccauuaugcggcccagccugggggauacuauaacggcacaagagaggaccggaauaaacugcgccaccugauuagcgucaagcucggcaagauccccaccguggagaacucuauuuuccauauggcugccugguccgggagcgcuugucacgauggaaaagaauggacauacaucggcguugacgggccugauucuaaugcccugcuuaagauuaaauacggagaggcguauaccgacacguaccacuccuaugccaagaacauccugagaacacaagaaagcgcuugcaauuguauuggcggggauugcuaccucaugaucaccgacggacccgccuccggcaucucugagugucgguuucugaaaauucgcgagggcagaaucauuaaggaaaucuucccgacagggcgggugaagcauaccgaggaaugcaccuguggauuugcuagcaacaaaacaauugagugcgccugucgcgauaauuccuauacggccaagagaccuuucgucaaacuuaacguggaaaccgacacagcugagauccggcugaugugcaccgagacauaccucgauacgccccgcccuaaugacggcagcaucaccgggcccugcgaaucugauggagacaagggcuccgggggaauuaaaggcggcuuuguucaccagagaauggcgagcaagaucgggcggugguauucucgcacaaugagcaaaaccaagagaaugggaaugggccuguacgugaaguacgacggggaucccuggaccgacuccgaggcccuggcucucucuggagucaugauuagcauggaggaaccuggcugguauuccuucggguuugaaaucaaagauaagaaaugugacgugccgugcauuggcaucgagauggugcaugauggaggcaagacaaccuggcacagcgccgccacagcuaucuacugucugauggggucuggacagcuucugugggacacggucaccggcguugauauggcccucuga

SEQ ID NO: 221923 - RNA, 1401 nt, Artificial Sequence; identical to SEQ ID NO: 221922
  derived and/or modified CDS sequence (opt5) from neuraminidase__InfluenzaB__AGX24473

SEQ ID NO: 221924 - RNA, 1401 nt, Artificial Sequence
  derived and/or modified CDS sequence (opt5) from neuraminidase__InfluenzaB__AGX24484
augcugcccagcaccauccagacacucacgcuguuccuuaccuccggcggggugcugcucucucuguacgucagcgccucccuuucuuaucugcucuacagcgacauucugcugaaguuuucccaaacagagaucaccgcuccuauuaugccgcucgauugcgccaacgcgucuaauguucaggcugugaacagaagcgccgccaaaggagugacacugcuucugcccgaaccugaguggaccuauccccggcucuccuguccuggcagcacauuccagaaggcucugcuuaucucuccccaccgcuuuggggaaaccaaaggaaauuccgccccucugauuaucagagagccguucaucgcuugcggccccacggaauguaagcauuuugcccucacccacuacgcggcccagccugggggauauuacaacggcacacgggaggaccgcaauaaacugagacaucugauuagcgucaagcucggcaagauccccaccguggagaacucuauuuuccacauggcugccugguccgggagcgcuugccaugauggaaaagaauggacauauaucggcguugacgggccugauucuaaugcccugcuuaagauuaaauacggagaggcguacaccgacacguaucacuccuacgccaagaacauccugcggacacaagaaagcgcuuguaauugcauuggcggggauuguuaucucaugaucaccgacggacccgccuccggcaucucugagugccgcuuucugaaaauuagagagggccggaucauuaaggaaaucuucccgacagggcgcgugaagcacaccgaggaauguaccugcggauuugcuagcaacaaaacaauugagugugccugcagagauaauggcuacacggccaagcggccuuucgucaaacuuaacguggaaaccgacacagcugagauccgccugaugugcaccgagacauaucucgauacccccagaccuaaugacggguccaucacgggacccugugaaagcgauggcgacaaggggucuggaggcauuaaaggcggguuuguucaucagcggauggcguccaagaucggacgcugguacagcagaacaaugucuaaaacccggagaaugggcauggggcuguaugugaaguacgacggagaucccuggaccgacagcgaggcccuggcucucuccggcgucauggugucuauggaggaaccugggugguacagcuucggcuuugaaauuaaggauaaaaagugcgacgugccguguaucggaauugagaugguccacgauggcgggaaaacaaccuggcauuccgccgccacagcuaucuauugccugaugggaagcggccagcuucugugggacacgguuaccgggguggauauggcccucuga

SEQ ID NO: 221925 - RNA, 1401 nt, Artificial Sequence
  derived and/or modified CDS sequence (opt5) from neuraminidase__InfluenzaB__AGX24495
augcugcccagcaccauccagacacucacgcuguuccuuaccuccggcggggugcugcucucucuguacgucagcgccucccuuucuuaucugcucuacagcgacauucugcugaaguuuucccaaacagagaucaccgcuccuauuaugccgcucgauugcgccaacgcgucuaauguucagguggugaacagaagcgcugccaaaggagucacacugcuucugcccgaaccugaguggaccuauccccggcucuccuguccuggcagcacauuccagaaggcccugcuuaucucuccccaccgcuuuggggaaaccaaaggaaauuccgcuccucugauuaucagagagccguucaucgccugcggccccacggaauguaagcauuuugcucucacccacuacgccgcgcagccugggggauauuacaacggcacacgggaggaccgcaauaaacugagacaucugauuagcgugaagcucggcaagauccccaccguugagaacucuauuuuccacauggccgcuugguccgggagcgccugccaugauggaaaagaauggacauauaucggcguggacgggccugauucuaaugcucugcuuaagauuaaauacggagaggccuacaccgacacguaucacuccuacgcgaagaacauccugcggacacaagaaagcgccuguaauugcauuggcggggauuguuaucucaugaucaccgacggacccgcuuccggcaucucugagugccgcuuucugaaaauuagagagggccggaucauuaaggaaaucuucccgacagggcgcgucaagcacaccgaggaauguaccugcggauuugccagcaacaaaacaauugagugugcuugcagagauaauuccuacacggccaagcggccuuucgugaaacuuaacguugaaaccgacacagccgagauccgccugaugugcaccgagacauaucucgauacccccagaccuaaugacggcagcaucacggggcccugugaaucugauggagacaagggcuccgggggaauuaaaggcggcuuugugcaucagcggauggcuagcaagaucgggcgcugguacucuagaacaaugagcaaaacccggagaaugggaaugggccuguaugucaaguacgacggggaucccuggaccgacuccgaggcgcuggcccucucuggagugauggugagcauggaggaaccuggcugguacuccuucggguuugaaauuaaggauaaaaagugcgacgucccguguaucggcauugagaugguucacgauggaggcaaaacaaccuggcauagcgcugccacagccaucuauugccugauggggucuggacagcuucugugggacacggugaccggcguggauauggcucucuga

SEQ ID NO: 221926 - RNA, 1401 nt, Artificial Sequence; identical to SEQ ID NO: 221484
  derived and/or modified CDS sequence (opt5) from neuraminidase__InfluenzaB__AGX24506

SEQ ID NO: 221927 - RNA, 1401 nt, Artificial Sequence
  derived and/or modified CDS sequence (opt5) from neuraminidase__InfluenzaB__AGX24517
augcugcccagcaccauccagacacucacgcuguuccuuaccuccggcggggugcugcucucucuguacgucagcgccucccuuucuuaucugcucuacagcgacauucugcugaaguuuucccaaacagagaucaccgcuccuauuaugccgcucgauugcgccaacgcgucuaauguucaggcugugaaccacagcgccgccaaaggagugacacugcuucugcccgaaccugaguggaccuaucccagacucuccuguccuggcagcacauuccagaaggcucugcuuaucucuccccaucgguuuggggaaaccaaaggaaauuccgccccucugauuauccgcgagccguucaucgcuugcggccccacggaauguaagcacuuugcccucacccauuacgcggcccagccugggggauauuacaacggcacaagagaggaccggaauaaacugcgccaccugauuagcgucaagcucggcaagauccccaccguggagaacucuauuuuccauauggcugccugguccgggagcgcuugccacgauggaaaagaauggacauauaucggcguugacgggccugauucuaaugcccugcuuaagauuaaauacggagaggcguacaccgacacguaucacuccuacgccaagaacauccugagaacacaagaaagcgcuuguaauugcauuggcggggauuguuaucucaugaucaccgacggacccgccuccggcgugucugagugccgguuucugaaaauccgcgagggcagaauuaucaaggaaauuuucccgacagggcgggucaagcauaccgaggaauguaccugcggauuugcuagcaacaaaacaaucgagugugccugccgcgauaauuccuacacggccaagagaccuuucgugaaacuuaacguugaaaccgacacagcugagauucggcugaugugcaccgagacauaucucgauacgccccgcccuaaugacggcagcaucaccgggcccugugaaucugauggagacaagggcuccgggggaaucaaaggcggcuuugugcaccagagaauggcgagcaagauugggcggugguacucucgcacaaugagcaaaaccaagagaaugggaaugggccuguaugucaaguacgacggggaucccuggaccgacuccgaggcccuggcucucucuggagugauggugagcauggaggaaccuggcugguacuccuucggguuugaaaucaaagauaagaaaugcgacgucccguguauuggcaucgagaugguucaugauggaggcaagacaaccuggcacagcgccgccacagcuauuuauugccugauggggucuggacagcuucugugggacacggugaccggcguggauauggcccucuga

SEQ ID NO: 221928 - RNA, 1401 nt, Artificial Sequence; identical to SEQ ID NO: 221484
  derived and/or modified CDS sequence (opt5) from neuraminidase__InfluenzaB__AGX24528

SEQ ID NO: 221929 - RNA, 1401 nt, Artificial Sequence; identical to SEQ ID NO: 221912
  derived and/or modified CDS sequence (opt5) from neuraminidase__InfluenzaB__AGX24539

SEQ ID NO: 221930 - RNA, 1401 nt, Artificial Sequence
  derived and/or modified CDS sequence (opt5) from neuraminidase__InfluenzaB__AGX24550
augcugcccagcaccauccagacacucacgcuguuccuuaccuccggcggggugcugcucucucuguacgucagcgccucccuuucuuaucugcucuacagcgacauucugcugaaguuuucccaaacagagaucaccgcuccuauuaugccgcucgauugcgccaacgcgucuaauguucaggcugugaacagaagcgccgccaaaggagugacacugcuuauccccgaaccugaguggaccuauccccggcuguccuguccuggcagcacauuccagaaggcucuccugauuucuccccaccgcuuuggggaaaccaaaggaaauuccgccccucuuaucaucagagagccguucauugcuugcggccccacggaauguaagcauuuugcccugacccacuacgcggcccagccugggggauauuacaacggcacacgggaggaccgcaauaaacucagacaucugaucagcgucaagcugggcaagauucccaccguggagaacucuaucuuccacauggcugccugguccgggagcgcuugccaugauggaaaagaauggacauauauuggcguugacgggccugauucuaaugcccuccugaagaucaaauacggagaggcguacaccgacacguaucacuccuacgccaagaacauucuucggacacaagaaagcgcuuguaauugcaucggcggggauuguuaucugaugaucaccgacggacccgccuccggcauuucugagugccgcuuucucaaaaucagagagggccggauuaucaaggaaauuuucccgacagggcgcgugaagcacaccgaggaauguaccugcggauuugcuagcaacaaaacaaucgagugugccugcagagauaauuccuacacggccaagcggccuuucgucaaacugaacguggaaaccgacacagcugagauccgccuuaugugcaccgagacauaucuggauacccccagaccuaaugacggcagcauuacggggcccugugaaucugauggagacaagggcuccgggggaaucaaaggcggcuuuguucaucagcggauggcgagcaagauugggcgcugguacucuagaacaaugagcaaaaccaagcggaugggaaugggccucuaugugaaguacgacggggaucccuggaccgacuccgaggcccuggcucugucuggagucauggugagcauggaggaaccuggcugguacuccuucggguuugaaaucaaagauaagaaaugcgacgugccguguauuggcaucgagaugguccacgauggaggcaagacaaccuggcauagcgccgccacagcuaucuauugccucauggggucuggacagcugcuuugggacacgguuaccggcguggauauggcccuguga

SEQ ID NO: 221931 - RNA, 1401 nt, Artificial Sequence; identical to SEQ ID NO: 221922
  derived and/or modified CDS sequence (opt5) from neuraminidase__InfluenzaB__AGX24561

SEQ ID NO: 221932 - RNA, 1401 nt, Artificial Sequence; identical to SEQ ID NO: 220889
  derived and/or modified CDS sequence (opt5) from neuraminidase__InfluenzaB__AGX24572

SEQ ID NO: 221933 - RNA, 1401 nt, Artificial Sequence
  derived and/or modified CDS sequence (opt5) from neuraminidase__InfluenzaB__AGX24583
augcugcccagcaccauccagacacucacgcuguuccuuaccuccggcggggugcugcucucucuguacgucagcgccucccuuucuuaucugcucuacagcgacauucugcugaaguuuucccaaacagagaucaccgcuccuauuaugccgcucgauugcgccaacgcgucuaauguucaggcugugaacagaagcgccgccaaaggagugacacugcuucugcccgaaccugaguggaccuauccccggcucuccuguccuggcagcacauuccagaaggcucugcuuaucucuccccaccgcuuuggggaaaccaaaggaaauuccgccccucugauuaucagagagccguucaucgcuugcggccccacggaauguaagcauuuugcccucacccacuacgcggcccagccugggggauauuacaacggcacacgggaggaccgcaauaaacugagacaucugauuagcgucaagcucggcaagauccccaccguggagaacucuauuuuccacauggcugccugguccgggagcgcuugccaugauggaaaagaauggacauauaucggcguugacgggccugauucuaaugcccugcuuaagauuaaauacggagaggcguacaccgacacguaucacuccuacgccaagaacauccugcggacacaagaaagcgcuuguaauugcauuggcggggauuguuaucucaugaucaccgacggacccgccuccggcaucucugagugccgcuuucugaaaauuagagagggccggaucauuaaggaaaucuucccgacagggcgcgugaagcacaccgaggaauguaccugcggauuugcuagcaacaaaacaauugagugugccugcagagauaauuccuacacggccaagcggccuuucgucaaacuuaacguggaaaccgacacagcugagauccgccugaugugcaccgagacauaucucgauacccccagaccuaaugacggcagcaucacggggcccugugaaucugauggagacaagggcuccgggggaauuaaaggcggcuuuguucaucagcggauggcgagcaagaucgggcgcugguacucuagaacaaugagcaaaacccggagaaugggaaugggccuguaugugaaguacgacggggaucccuggaccgacuccggagcccuggcucucucuggcgucauggugagcauugaggaaccugggugguacuccuucggcuuugagaucaaggauaaaaagugcgacgugccguguauuggaaucgaaaugguccacgauggcgggaaaacaaccuggcauagcgccgccacagcuaucuauugccugaugggaucuggccagcuucugugggacacgguuaccgggguggauauggcccucuga

SEQ ID NO: 221934 - RNA, 1401 nt, Artificial Sequence; identical to SEQ ID NO: 221484
  derived and/or modified CDS sequence (opt5) from neuraminidase__InfluenzaB__AGX24594

SEQ ID NO: 221935 - RNA, 1401 nt, Artificial Sequence; identical to SEQ ID NO: 221484
  derived and/or modified CDS sequence (opt5) from neuraminidase__InfluenzaB__AGX24605

SEQ ID NO: 221936 - RNA, 1401 nt, Artificial Sequence; identical to SEQ ID NO: 221484
  derived and/or modified CDS sequence (opt5) from neuraminidase__InfluenzaB__AGX24616

SEQ ID NO: 221937 - RNA, 1401 nt, Artificial Sequence; identical to SEQ ID NO: 221908
  derived and/or modified CDS sequence (opt5) from neuraminidase__InfluenzaB__AGX24627

SEQ ID NO: 221938 - RNA, 1401 nt, Artificial Sequence; identical to SEQ ID NO: 221484
  derived and/or modified CDS sequence (opt5) from neuraminidase__InfluenzaB__AGX24638

SEQ ID NO: 221939 - RNA, 1401 nt, Artificial Sequence
  derived and/or modified CDS sequence (opt5) from neuraminidase__InfluenzaB__AGX24660
augcugcccagcaccauccagacacucacgcuguuccuuaccuccggcggggugcugcucucucuguacgucagcgccucccuuucuuaucugcucuacagcgacauucugcugaaguuuuccagaacagagaucaccgcuccuauuaugccgcucgauugcgccaacgcgucuaauguucaagcugugaaccggagcgccacaaaaggagugacccugcuucugcccgaaccugaguggacauauccccgccucuccuguccuggcagcaccuuccagaaggcccugcuuaucucuccccacagauuuggggaaacgaaaggaaauuccgcuccucugauuauccgggagccguucaucgccugcggccccaaggaauguaaacauuuugcucucaccuacuaugccgcgcagccugggggauacuauaacggcacacgcgaggacagaaauaagcugcggcaccugauuagcgucaagcucggcaaaauccccaccguggagaacucuauuuuccauauggccgcuugguccgggagcgccugccacgauggacgcgaauggacauacaucggcguugacgggccugauucuaaugcucugcuuaagauuaaauacggagaggccuauaccgacacguaccauuccuaugcgaagaacauccugagaacacaggaaagcgccuguaauugcauuggcggggauuguuaccucaugaucaccgacggacccgcuuccggcaucucugagugccgguuucugaaaauucgcgagggcagaaucauuaaggaaaucuucccgacagggcgggugaagcacaccgaggaauguaccugcggauuugccagcaacaaaacaauugagugugcuugccgcgauaauuccuauacggccaagagaccuuucgucaaacuuaacguggaaaccgacacagccgagauccggcugaugugcaccgagacauaccucgauacgccccgcccuaaugacggcagcaucaccgggcccugugaaucuaacggagauaagggcuccgggggaauuaaaggcggcuuuguucaccaaagaauggcuagcaagaucgggcggugguauucuagaacaaugagcaaaaccaagcgcaugggaaugggccuguacgugaaguacgacggggaccccuggaccgauuccgaggcgcuggcccucucuggagucauggugagcauggaggaaccuggcugguauuccuucggguuugaaauuaaagacaagaaaugcgaugugccguguaucggcauugagaugguccaugacggaggcaagacaaccuggcacagcgcugccacagccaucuacugccugauggggucuggacagcuucugugggauacgguuaccggcgugaauaugacacucuga

SEQ ID NO: 221940 - RNA, 1401 nt, Artificial Sequence
  derived and/or modified CDS sequence (opt5) from neuraminidase__InfluenzaB__AGX24671
augcugcccagcaccauccagacacucacgcuguuccuuaccuccggcggggugcugcuccugcuuuacgucucugccagccuguccuaucuccuguacucugacauucugcucaaguuuagccaaacagagaucaccgcuccuauuaugccgcuggauugcgccaacgcguccaauguucaggcugugaacagaucugccgccaaaggagugacacuucugcuccccgaaccugaguggaccuauccccggcugagcuguccuggcuccacauuccagaaggcccuucugaucagcccccaccgcuuuggggaaaccaaaggaaauucugcuccucucauuaucagagagccguucaucgcuugcggccccacggaauguaagcauuuugcccugacccacuacgcggcccagccugggggauauuacaacggcacacgggaggaccgcaauaaacugagacaucucauuuccgucaagcugggcaagauccccaccguggagaacagcauuuuccacauggcugccuggucuggguccgcuugccaugauggaaaagaauggacauauaucggcguugacgggccugauagcaaugcccuucugaagauuaaauacggagaggcguacaccgacacguaucacucuuacgccaagaacauccuccggacacaagaauccgcuuguaauugcauuggcggggauuguuaucugaugaucaccgacggacccgccagcggcaucuccgagugccgcuuucuuaaaauuagagagggccggaucauuaaggaaaucuucccgacagggcgcgugaagcacaccgaggaauguaccugcggauuugcuucuaacaaaacaauugagugugccugcagagauaauagcuacacggccaagcggccuuucgucaaacugaacguggaaaccgacacagcugagauccgccucaugugcaccgagacauaucuggauacccccagaccuaaugacggcuccaucacggggcccugugaaagcgauggagacaagggcucugggggaauuaaaggcggcuuuguucaucagcggauggcguccaagaucgggcgcugguacagcagaacaaugucuaaaaccaagcggaugggaaugggccuguaugugaaguacgacggggaucccuggaccgacagcgaggcccucgcucuguccggagucauggugucuauggaggaaccuggcugguacagcuucggguuugaaauuaaagauaagaaaugcgacaucccguguauuggcaucgagauggugcacgauggaggcaagacaaccuggcauuccgccgccacagcuaucuauugccuuauggggagcggacagcugcucugggacacggucaccggcguugauauggcccuguga

SEQ ID NO: 221941 - RNA, 1401 nt, Artificial Sequence
  derived and/or modified CDS sequence (opt5) from neuraminidase__InfluenzaB__AGX24682
augcugcccagcaccauccagacacucacgcuguuccuuaccuccggcggggugcugcucucucuguacgucagcgccucccuuucuuaucugcucuacagcgacauucugcugaaguuuuccagaacagagaucaccgcuccuauuaugccgcucgauugcgccaacgcgucuaauguucaagcugugaaccggagcgccacaaaaggagugacccugcuucugcccgaaccugaguggacauauccccgccucuccuguccuggcagcaccuuccagaaggcccugcuuaucucuccccacagauuuggggaaacgaaaggaaauuccgcuccucugauuauccgggagccguucaucgccugcggccccaaggaauguaaacauuuugcucucacccacuacgccgcgcagccugggggauauuacaacggcacacgcgaggacagaaauaagcugcggcaucugauuagcgucaagcucggcaaaauccccaccguggagaacucuauuuuccacauggccgcuugguccgggagcgccugccaugauggacgcgaauggacauauaucggcguugacgggccugauucuaaugcucugcuuaagauuaaauacggagaggccuacaccgacacguaucacuccuacgcgaagaacauccugagaacacaggaaagcgccuguaauugcauuggcggggauuguuaucucaugaucaccgacggacccgcuuccggcaucucugagugccgguuucugaaaauucgcgagggcagaaucauuaaggaaaucuucccgacagggcgggugaagcacaccgaggaauguaccugcggauuugccagcaacaaaacaauugagugugcuugccgcgauaauuccuacacggccaagagaccuuucgucaaacuuaacguggaaaccgacacagccgagauccggcugaugugcaccgagacauaucucgauacgccccgcccuaaugacggcagcaucaccgggcccugugaaucuaacggagauaagggcuccgggggaauuaaaggcggcuuuguucaucaaagaauggcuagcaagaucgggcggugguacucuagaacaaugagcaaaaccaagcgcaugggaaugggccuguaugugaaguacgacggggaccccuggaccgauuccgaggcgcugguccucucuggagugauggugagcauggaggaaccuggcugguacuccuucggguuugaaauuaaagacaagaaaugcgaugucccguguaucggcauugagaugguucacgacggaggcaagacaaccuggcauagcgccgcuacagccaucuauugccugauggggucuggacagcuucugugggauacggugaccggcgugaauaugacacucuga

SEQ ID NO: 221942 - RNA, 1401 nt, Artificial Sequence; identical to SEQ ID NO: 221484
  derived and/or modified CDS sequence (opt5) from neuraminidase__InfluenzaB__AGX24693

SEQ ID NO: 221943 - RNA, 1401 nt, Artificial Sequence; identical to SEQ ID NO: 221484
  derived and/or modified CDS sequence (opt5) from neuraminidase__InfluenzaB__AGX24704

SEQ ID NO: 221944 - RNA, 1401 nt, Artificial Sequence; identical to SEQ ID NO: 221484
  derived and/or modified CDS sequence (opt5) from neuraminidase__InfluenzaB__AGX24715

SEQ ID NO: 221945 - RNA, 1401 nt, Artificial Sequence
  derived and/or modified CDS sequence (opt5) from neuraminidase__InfluenzaB__AGX24737
augcugcccagcaccauccagacacucacgcuguuccuuaccuccggcggggugcugcucucucuguacgucagcgccucccuuucuuaucugcucuacagcgacauucugcugaaguuuucccaaacagagaucaccgcuccuauuaugccgcucgauugcgccaacgcgucuaauguucaggcugugaacagaagcgccgccaaaggagugacacugcuucugcccgaaccugaguggaccuauccccggcucuccuguccuggcagcacauuccagaaggcucugcuuaucucuccccaccgcuuuggggaaaccaaaggaaauuccgccccucugauuaucagagagccguucaucgcuugcggcacgaccgaauguaagcauuuugcccucacacacuacgcggcccagcccgggggauauuacaacggcacccgggaggaccgcaauaaacugagacaucugauuagcgucaagcucggcaagaucccuacaguggagaacucuauuuuccacauggcugccugguccgggagcgcuugccaugauggaaaagaauggaccuauaucggcguugacgggcccgauucuaaugcccugcuuaagauuaaauacggagaggcguacacggacacauaucacuccuacgccaagaacauccugcggacccaagaaagcgcuuguaauugcauuggcggggauuguuaucucaugaucacagacggaccugccuccggcaucucugagugccgcuuucugaaaauuagagagggccggaucauuaaggaaaucuuccccaccgggcgcgugaagcacaccgaggaauguacaugcggauuugcuagcaacaaaacgauugagugugccugcagagauaaucgguacaccgccaagcgcccguucgucaaacuuaacguggaaacagacaccgcugagaucagacugaugugcacagagaccuaucucgauacgccucggcccaaugacggcuccaucacagggccuugugaaagcgauggagacaagggcucugggggaauuaaaggcggcuuuguucaucagcgcauggcguccaagaucgggagaugguacagccggaccaugucuaaaaccaagagaaugggaaugggccuguaugugaaguacgacggggaucccuggacagacagcggagcccuggcucucuccggcgucauggugucuauugaggaacccgggugguacagcuucggcuuugagaucaaagauaagaaaugcgacgugccuuguauuggaaucgaaaugguccacgauggcgggaagaccacauggcauuccgccgccacggcuaucuauugccugaugggaagcggccagcuucugugggacaccguuacagggguggauauggcccucuga

SEQ ID NO: 221946 - RNA, 1401 nt, Artificial Sequence
  derived and/or modified CDS sequence (opt5) from neuraminidase__InfluenzaB__AGX24748
augcugcccagcaccauccagacacucacgcuguuccuuaccuccggcggggugcugcucucucuguacgucagcgccucccuuucuuaucugcucuacagcgacauucugcugaaguuuucccaaacagagaucaccgcuccuauuaugccgcucgauugcgccaacgcgucuaauguucaggcugugaacagaagcgccgccaaaggagugacacugcuucugcccgaaccugaguggaccuauccccggcucuccuguccuggcagcacauuccagaaggcucugcuuaucucuccccaccgcuuuggggaaaccaaaggaaauuccgccccucugauuaucagagagccguucaucgcuugcggccccacggaauguaagcauuuugcccucacccacuacgcggcccagccugggcgguauuacaacggaacacgcgaggacagaaauaaacugcggcaucugauuagcgucaagcucggcaagauccccaccguggagaacucuauuuuccacauggcugccugguccggcagcgcuugccaugaugggaaagaauggacauauaucggaguugacggcccugauucuaaugcccugcuuaagauuaaauacggggaggcguacaccgacacguaucacuccuacgccaagaacauccugcgcacacaagaaagcgcuuguaauugcauuggaggcgauuguuaucucaugaucaccgacgggcccgccuccggaaucucugagugcagauuucugaaaauucgggagggccgcaucauuaaggaaaucuucccgacaggcagagugaagcacaccgaggaauguaccugcggguuugcuagcaacaaaacaauugagugugccugccgggauaauuccuacacggccaagcgcccuuucgucaaacuuaacguggaaaccgacacagcugagaucagacugaugugcaccgagacauaucucgauacgccccggccuaaugacggaagcaucaccggccccugugaaucugauggggacaagggauccggcgggauuaaaggaggcuuuguucaucagcgcauggcgagcaagaucggcagaugguacucucggacaaugagcaaaaccaagagaauggggaugggacuguaugugaaguacgacggcgaucccuggaccgacuccgaggcccuggcucucucuggggucauggugagcauggaggaaccuggaugguacuccuucggcuuugaaauuaaagauaagaaaugcgacgugccguguaucgggauugagaugguccacgauggcggaaagacaaccuggcauagcgccgccacagcuguuuauugccugaugggcucugggcagcuucugugggacacggugaccggaguggauauggcccucuga

SEQ ID NO: 221947 - RNA, 1401 nt, Artificial Sequence
  derived and/or modified CDS sequence (opt5) from neuraminidase__InfluenzaB__AGX24759
augcugcccagcaccauccagacacucacgcuguuccuuaccuccggcggggugcugcucucucuguacgucagcgccucccuuucuuaucugcucuacagcgacauucugcugaaguuuucccaaacagagaucaccgcuccuauuaugccgcucgauugcgccaacgcgucuaauguucaggcugugaacagaagcgccgccaaaggagugacacugcuucugcccgaaccugaguggaccuauccccggcucuccuguccuggcagcacauuccagaaggcucugcuuaucucuccccaccgcuuuggggaaaccaaaggaaauuccgccccucugauuaucagagagccguucaucgcuugcggccccacggaauguaagcauuuugcccucacccacuacgcggcccagccugggggauauuacaacggcacacgggaggaccgcaauaaacugagacaucugauuagcgucaagcucggcaagauccccaccguggagaacucuauuuuccacauggcugccugguccgggagcgcuugccaugauggaaaagaauggacauauaucggcguugacgggccugauucuaaugcccugcuuaagauuaaauacggagaggcguacaccgacacguaucacuccuacgccaagaacauccugcggacacaagaaagcgcuuguaauugcauuggcggggauuguuaucucaugaucaccgacggacccgccuccggcaucucugagugccgcuuucugaaaauuagagagggccggaucauuaaggaaaucuucccgacagggcgcgugaagcacaccgaggaauguaccugcggauuugcuagcaacaaaacaauugagugugccugcagagauaauuccuacacggccaagcggccuuucgucaaacuuaacguggaaaccgacacagcugagauccgccugaugugcaccgagacauaucucgauacccccagaccuaaugacggcagcaucacggggcccugugaaucugauggagacaagggcuccgggggaauuaaaggcggcuuuguucaucagcggauggcgagcaagaucgggcgcugguacucuagaacaaugagcaaaaccaagcggaugggaaugggccuguaugugaaguacgacggggaucccuggaccgacuccgaggcccuggcucucucuggagucauggugagcauggaggaaccuggcugguacuccuucggguuugaaauuaaagauaagaaaugcgacaucccguguauuggcaucgagauggugcacgauggaggcaagacaaccuggcauagcgccgccacagcuaucuauugccugauggggucuggacagcuucugugggacacggucaccggcguugauauggcccucuga

SEQ ID NO: 221948 - RNA, 1401 nt, Artificial Sequence; identical to SEQ ID NO: 221484
  derived and/or modified CDS sequence (opt5) from neuraminidase__InfluenzaB__AGX24770

SEQ ID NO: 221949 - RNA, 1401 nt, Artificial Sequence; identical to SEQ ID NO: 221946
  derived and/or modified CDS sequence (opt5) from neuraminidase__InfluenzaB__AGX24781

SEQ ID NO: 221950 - RNA, 1401 nt, Artificial Sequence; identical to SEQ ID NO: 220860
  derived and/or modified CDS sequence (opt5) from neuraminidase__InfluenzaB__AGX24792

SEQ ID NO: 221951 - RNA, 1401 nt, Artificial Sequence; identical to SEQ ID NO: 221908
  derived and/or modified CDS sequence (opt5) from neuraminidase__InfluenzaB__AGX24803

SEQ ID NO: 221952 - RNA, 1401 nt, Artificial Sequence; identical to SEQ ID NO: 221484
  derived and/or modified CDS sequence (opt5) from neuraminidase__InfluenzaB__AGX24814

SEQ ID NO: 221953 - RNA, 1401 nt, Artificial Sequence
  derived and/or modified CDS sequence (opt5) from neuraminidase__InfluenzaB__AGX24825
augcugcccagcaccauccagacacucacgcuguuccuuaccuccggcggggugcugcucucucuguacgucagcgccucccuuucuuaucugcucuacagcgacauucugcugaaguuuucccaaacagagaucaccgcuccuauuaugccgcucgauugcgccaacgcgucuaauguucaggcugugaacagaagcgccgccaaaggagugacacugcuucugcccgaaccugaguggaccuauccccggcucuccuguccuggcagcacauuccagaaggcucugcuuaucucuccccaccgcuuuggggaaaccaaaggaaauuccgccccucugauuaucagagagccguucaucgcuugcggccccacggaauguaagcauuuugcccucacccacuacgcggcccagccuggggaguauuacaacggaacacgggaggaccgcaauaaacugagacaucugauuagcgucaagcucggcaagauccccaccguggaaaacucuauuuuccacauggcugccugguccggcagcgcuugccaugaugggaaagaguggacauauaucggaguugacggcccugauucuaaugcccugcuuaagauuaaauacggggaagcguacaccgacacguaucacuccuacgccaagaacauccugcggacacaagagagcgcuuguaauugcauuggaggcgauuguuaucucaugaucaccgacgggcccgccuccggaaucucugagugccgcuuucugaaaauuagagaaggccggaucauuaaggagaucuucccgacaggccgcgugaagcacaccgaagaguguaccugcggguuugcuagcaacaaaacaauugaaugugccugcagagauaauuccuacacggccaagcggccuuucgucaaacuuaacguggagaccgacacagcugagauccgccugaugugcaccgaaacauaucucgauacccccagaccuaaugacggaagcaucacgggccccugugagucugauggggacaagggauccggcgggauuaaaggaggcuuuguucaucagcggauggcgagcaagaucggccgcugguacucuagaacaaugagcaaaacccggagaauggggaugggacuguaugugaaguacgacggcgaucccuggaccgacuccgaagcccuggcucucucuggggucauggugagcauggaggaaccuggaugguacuccuucggcuuugagauuaaggauaaaaagugcgacgugccguguaucgggauugagaugguccacgauggcggaaaaacaaccuggcauagcgccgccacagcuaucuauugccugaugggcucugggcagcuucugugggacacgguuaccggaguggauauggcccucuga

SEQ ID NO: 221954 - RNA, 1401 nt, Artificial Sequence; identical to SEQ ID NO: 221484
  derived and/or modified CDS sequence (opt5) from neuraminidase__InfluenzaB__AGX24836

SEQ ID NO: 221955 - RNA, 1401 nt, Artificial Sequence
  derived and/or modified CDS sequence (opt5) from neuraminidase__InfluenzaB__AGX24847
augcugcccagcaccauccagacacucacgcuguuccuuaccuccggcggggugcugcucucucuguacgucagcgccucccuuucuuaucugcucuacagcgacauucugcugaaguuuuccagaacagagaucaccgcuccuauuaugccgcucgauugcgccaacgcgucuaauguucaagcugugaaccggagcgccacaaaaggagugacccugcuucugcccgaaccugaguggacauauccccgccucuccuguccuggcagcaccuuccagaaggcccugcuuaucucuccccacagauuuggggaaacgaaaggaaauuccgcuccucugauuauccgggagccguucaucgccugcggccccaaggaauguaaacauuuugcucucacccacuacgccgcgcagccugggggauauuacaacggcacacgcgaggacagaaauaagcugcggcaucugauuagcgucaagcucggcaaaauccccaccguggagaacucuauuuuccacauggccgcuugguccgggagcgccugccaugauggacgcgaauggacauauaucggcguugacgggccugauucuaaugcucugcuuaagauuaaauacggagaggccuacaccgacacguaucacuccuacgcgaagaacauccugagaacacaggaaagcgccuguaauugcauuggcggggauuguuaucucaugaucaccgacggacccgcuuccggcaucucugagugccgguuucugaaaauucgcgagggcagaaucauuaaggaaaucuucccgacagggcgggugaagcacaccgaggaauguaccugcggauuugccagcaacaaaacaauugagugugcuugccgcgauaauuccuacacggccaagagaccuuucgucaaacuuaacguggaaaccgacacagccgagauccggcugaugugcaccgagacauaucucgauacgccccgcccuaaugacggcagcaucaccgggcccugugaaucuaacggagauaagggcuccgggggaauuaaaggcggcuuuguucaucaaagaauggcuagcaagaucgggcggugguacucuagaacaaugagcaaaaccaagcgcaugggaaugggccuguaugugaaguacgacggggaccccuggaccgauuccgaggcgcuggcccucucuggagucauggugagcauggaggaaccuggcugguacuccuucggguuugaaauuaaagacaagaaaugcgaugugccguguaucggcauugagaugguccacgacggaggcaagacaaccuggcauagcgcugccacagccguuuauugccugauggggucuggacagcuucugugggauacggugaccggcgugaauaugacacucuga

SEQ ID NO: 221956 - RNA, 1401 nt, Artificial Sequence; identical to SEQ ID NO: 220968
  derived and/or modified CDS sequence (opt5) from neuraminidase__InfluenzaB__AGX24858

SEQ ID NO: 221957 - RNA, 1401 nt, Artificial Sequence
  derived and/or modified CDS sequence (opt5) from neuraminidase__InfluenzaB__AGX24869
augcugcccagcaccauccagacacucacgcuguuccuuaccuccggcggggugcugcucucucuguacgucagcgccucccuuucuuaucugcucuacagcgacauucugcugaaguuuuccagaacagagaugaccgcuccuaucaugccgcucggaugcgccaacgcgucuaauguucaagcugugaaccggagcgccacaaaaggcgugacccugcuucugcccgaaccugaguggacauauccccgccucuccuguccugggagcaccuuccagaaggcccugcuuauuucuccccacagauuuggagaaacgaaaggcaauuccgcuccucugaucauucgggagccguucaucgccugcgggcccaaggaauguaaacauuuugcucucacccacuacgccgcgcagccuggaggcuauuacaacggcacacgcgaggauagaaauaagcugcggcaucugaucagcgucaagcucgggaaaauucccaccguggagaacucuaucuuccacauggccgcuugguccggaagcgccugccaugacggccgcgaauggacauauauugggguugauggaccugacucuaaugcucugcuuaagaucaaauacggcgaggccuacaccgauacguaucacuccuacgcgaagaacauucugagaacacaggaaagcgccuguaauugcaucgggggagacuguuaucucaugauuaccgauggccccgcuuccggcaucucugagugccgguuucugaaaauccgcgaggggagaauuaucaaggaaauuuucccgacaggacgggugaagcacaccgaggaauguaccugcggcuuugccagcaacaaaacaaucgagugugcuugccgcgacaauuccuacacggccaagagaccuuucgucaaacuuaacguggaaaccgauacagccgagauucggcugaugugcaccgagacauaucucgacacgccccgcccuaaugaugggagcaucaccggacccugugaaucuaacggcgacaagggguccggaggcaucaaaggcggguuuguucaucaaagaauggcuagcaagauuggacggugguacucuagaacaaugagcaaaaccaagcgcaugggcauggggcuguaugugaaguacgauggagaccccuggaccgacuccgaggcgcuggcccucucuggcgucauggugagcauggaggaaccugggugguacuccuucggcuuugaaaucaaagauaagaaaugcgacgugccguguauuggaaucgagaugguccacgauggcgggaagacaaccuggcauagcgcugccacagccauuuauugccugaugggaucuggccagcuucugugggacacgguuaccggggugaauaugacacucuga

SEQ ID NO: 221958 - RNA, 1401 nt, Artificial Sequence
  derived and/or modified CDS sequence (opt5) from neuraminidase__InfluenzaB__AGX24880
augcugcccagcaccauccagaugcucacacuguuccuuacguccggcggggugcugcucucucuguacgucagcgccucccuuucuuaucugcucuacagcgacauucugcugaaguuuuccagaaccgagaucacagcuccuauuaugccgcucgauugcgccaacgcgucuaauguucaagcugugaaccggagcgccaccaaaggagugacacugcuucugcccgaaccugaguggaccuauccccgccucuccuguccuggcagcacauuccagaaggcccugcuuaucucuccccacagauuuggggaaaccaaaggaaauuccgcuccucugauuauccgggagccguucaucgccugcggccccaaggaauguaaacauuuugcucucacgcacuacgccgcgcagccugggggauauuacaacggcacccgcgaggacagaaauaagcugcggcaucugauuagcgucaagcucggcaaaauccccacaguggagaacucuauuuuccacauggccgcuugguccgggagcgccugccaugauggacgcgaauggaccuauaucggcguugacgggccugauucuaaugcucugcuuaagauuaaauacggagaggccuacacagacaccuaucacuccuacgcgaagaacauccugagaacgcaggaaagcgccuguaauugcauuggcggggauuguuaucucaugaucacagacggacccgcuuccggcaucucugagugccgguuucugaaaauucgcgagggcagaaucauuaaggaaaucuucccgaccgggcgggugaagcacacagaggaauguaccugcggauuugccagcaacaaaaccauugagugugcuugccgcgauaauuccuacacagccaagagaccuuucgucaaacuuaacguggaaacggacaccgccgagauccggcugaugugcacagagaccuaucucgauacaccccgcccuaaugacggcagcaucaccgggcccugugaaucuaacggagauaagggcuccgggggaauuaaaggcggcuuuguucaucaaagaauggcuagcaagaucgggcggugguacucuagaacgaugagcaaaacaaagcgcaugggaaugggccuguaugugaaguacgacggggaccccuggaccgauuccgaggcgcuggcccucucuggagucauggugagcauggaggaaccuggcugguacuccuucggguuugaaauuaaagacaagaaaugcgaugugccguguaucggcauugagaugguccacgacggaggcaagaccacauggcauagcgcugccaccgccaucuauugccugauggggucuggacagcuucugugggauacaguuacgggcgugaauaugacccucuga

SEQ ID NO: 221959 - RNA, 1401 nt, Artificial Sequence
  derived and/or modified CDS sequence (opt5) from neuraminidase__InfluenzaB__AGX24902
augcugcccagcaccauccagacacucacgcuguuccuuaccuccggcggggugcugcucucucuguacgucagcgcccuucuguccuaucuccuguacucugacauucugcucaaguuuagcagaacagagaucaccgcuccuauuaugccgcuggauugcgccaacgcguccaauguucaagcugugaaccggucugccacaaaaggagugacccuucugcuccccgaaccugaguggacauauccccgccugagcuguccuggcuccaccuuccagaaggcccuucugaucagcccccacagauuuggggaaaauaaaggaaacucugcuccucucauuauccgggagccguucaucgccugcggccccaaggaauguaaacauuuugcucugacgcacuacgccgcgcagccugggggauauuacaauggcacccgcgaggacagaaacaagcugcggcaucucauuuccgucaagcugggcaaaauccccacaguggagaauagcauuuuccacauggccgcuuggucuggguccgccugccaugauggacgcgaauggaccuauaucggcguugacgggccugauagcaacgcccuucugaagauuaaauacggagaggcuuacacagacaccuaucacucuuacgcgaagaauauccucagaacgcaggaauccgccuguaacugcauuggcggggauuguuaucugaugaucacagacggacccgcuagcggcaucuccgagugccgguuucuuaaaauucgcgagggcagaaucauuaaggaaaucuucccgaccgggcgggugaagcacacagaggaauguaccugcggauuugccucuaauaaaaccauugagugugcuugccgcgauaacaauuacacagccaagagaccuuucgucaaacugaacguggaaacggacaccgccgagauccggcucaugugcacagagaccuaucuggauacaccccgcccuaaugacggcagcaucaccgggcccugugaauccaacggagauaagggcagcgggggaauuaaaggcggcuuuguucaucaaagaauggcuucuaagaucgggcggugguacuccagaacgaugagcaaaacaaagcgcaugggaaugggccuguaugugaaguacgacggggaccccuggaccgauucugaggcgcucgcccugagcggagucaugguguccauggaggaaccuggcugguacucuuucggguuugaaauuaaagacaagaaaugcgaugugccguguaucggcauugagaugguccacgacggaggcaagaccacauggcauagcgcugccaccgccaucuauugccuuaugggguccggacagcugcucugggauacaguuacgggcgugaacaugacccuguga

SEQ ID NO: 221960 - RNA, 1401 nt, Artificial Sequence; identical to SEQ ID NO: 220973
  derived and/or modified CDS sequence (opt5) from neuraminidase__InfluenzaB__AGX84846

SEQ ID NO: 221961 - RNA, 1401 nt, Artificial Sequence; identical to SEQ ID NO: 221028
  derived and/or modified CDS sequence (opt5) from neuraminidase__InfluenzaB__AGX84858

SEQ ID NO: 221962 - RNA, 1401 nt, Artificial Sequence; identical to SEQ ID NO: 220973
  derived and/or modified CDS sequence (opt5) from neuraminidase__InfluenzaB__AGX84869

SEQ ID NO: 221963 - RNA, 1401 nt, Artificial Sequence
  derived and/or modified CDS sequence (opt5) from neuraminidase__InfluenzaB__AGX84880
augcugcccagcaccauccagacacucacgcuguuccuuaccuccggcggggugcugcucucucuguacgucagcgccucccuuucuuaucugcucuacagcgacauucugcugaaguuuuccccuacagagaucaccgcuccgacaaugucucucgauugcgccaacgcgagcaauguucaagcugugaacagauccgccaccaaaggagugauuuuccugcuucccgaaccugaguggacauauccccggcugagcuguccuggcucuaccuuucagaaggcccuccugaucagcccccaccgcuucggggaaacgaaaggaaauuccgcuccucuuauuaucagagagccguuuaucgccugcggccccaacgaauguaagcauuucgcucugacccacuacgccgcgcagccugggggauauuacaauggcacacggggcgaccgcaacaaacucagacaucugauuucugucaagcuggggaagauccccaccguggaaaauuccauuuuucacauggccgcuuggagcggaucugccugccaugauggcaaagaguggacauauaucgggguugacggaccugauaacgacgcucuccugaaggugaaauacggcgaggccuacaccgauacguaucacuccuacgcgaauaagauucuucggacacaggagagcgccuguaacugcaucgggggaaauuguuaucugaugauuaccgacggcuccgcuucuggcgucagcgaaugccgcuuccucaaaaucagagaggggcggaucauuaaggagaucuuucccacaggacgcgugaagcacaccgaagaguguaccugcggcuucgccuccaacaaaacaauugaaugugcuugcagagauaauagcuacacggccaagcggccguuuguuaaacugaacguggagaccgacacagccgaaauccgccuuaugugcaccgauacauaucuggacaccccuagacccgaugacgggucuauuacgggaccuugugaguccaauggcgacaaggggagcggaggcaucaaaggcggguucguccaucaacggauggagucuaagaucggacgcugguacagcagaacaauguccaaaaccgaacggaugggcauggggcucuaugugaaguacgauggagaccccugggcugauucugacgcgcuggccuuuagcggcgugauggucuccaugaaggagcccgggugguacagcuucggcuucgaaauuaaagauaagaaaugcgacguuccuuguaucggaauugagauggugcacgauggcgggaaggaaaccuggcauucugcugccacagccaucuauugccugaugggauccggccagcuccugugggacaccgugacaggggucgauauggcucuuuga

SEQ ID NO: 221964 - RNA, 1401 nt, Artificial Sequence; identical to SEQ ID NO: 220973
  derived and/or modified CDS sequence (opt5) from neuraminidase__InfluenzaB__AGX84891

SEQ ID NO: 221965 - RNA, 1401 nt, Artificial Sequence; identical to SEQ ID NO: 221028
  derived and/or modified CDS sequence (opt5) from neuraminidase__InfluenzaB__AGX84902

SEQ ID NO: 221966 - RNA, 1401 nt, Artificial Sequence
  derived and/or modified CDS sequence (opt5) from neuraminidase__InfluenzaB__AGX84924
augcugcccagcaccauccagacacucacgcuguuccuuaccuccggcggggugcugcucucucuguacgucagcgcccuucuguccuaucuccuguacucugacauucugcucaaguuuagcccuacagagaucaccgcuccgacaaugucccuggauuaugccaacgcgucuaauguucaagcugugaacagaagcgccaccaaaggagugacauuccuucugcccgaaccugaguggaccuacccccggcucuccugcccuggcagcacguuucagaaggcccugcuuauuucuccccaccgcuucggggaaaccaaaggaaauuccgcuccucugaucauuagagagccguuuaucgccuguggccccaacgaaugcaagcauuucgcucucacacacuaugccgcgcagccugggggauacuauaauggcacccggggcgaccgcaacaaacugagacaucugaucagcgucaagcucgggaagauucccacaguggaaaauucuaucuuucacauggccgcuugguccggaagcgccugucaugauggcaaagaguggaccuacauugggguugacggaccugauaacgacgcucugcuuaaggugaaauacggcgaggccuauacggauacauaccacucuuaugcgaauaagauccugcggacccaggaguccgccugcaacuguauugggggaaauugcuaccucaugaucacagacggcagcgcuuccggcgucucugaaugucgcuuccugaaaauuagagaggggcggaucaucaaggagauuuuucccaccggacgcgugaagcacaccgaagagugcacauguggcuucgccagcaacaaaacgaucgaaugcgcuuguagagauaauuccuauaccgccaagcggccguuuguuaaacuuaacguggagacagacaccgccgaaauucgccugaugugcacagauaccuaccucgacacgccuagacccgaugacgggagcaucacaggaccuugcgagucuaauggcgacaagggguccggaggcauuaaaggcggguucguccaucaacggauggagagcaagaucggacgcugguauucuagaaccaugagcaaaaccgaacggaugggcauggggcuguacgugaaguacgauggagaccccugggcugauuccgacgcgcuggccuuuucuggcgugauggucagcaugaaggagcccgggugguauuccuucggcuucgaaaucaaagauaagaaaugugacguuccuugcauuggaaucgagauggugcacgauggcgggaaggaaacauggcauagcgcugccaccgccauuuacugucucaugggaucuggccagcugcuuugggacacagugacgggggucgauauggcucuguga

SEQ ID NO: 221967 - RNA, 1401 nt, Artificial Sequence
  derived and/or modified CDS sequence (opt5) from neuraminidase__InfluenzaB__AGY46393
augcugcccagcaccauccagacacucacgcuguuccuuaccuccggcggggugcugcucucucuguacgucagcgccucccuuucuuaucugcucuacagcgacauucugcugaaguuuccuuccacagagaucaccgcuccgacaaugccccucgauugcgccaacgcgaccaauguucaagcugugaacagaucugccacaaaaggagugacccugcuucugccugaacccgaguggacguauccucggcucagcugucccggcuccaccuuccagaaggcccugcuuauuagcccucaccgcuuuggggaaaucaaaggaaauucugcuccgcugauuaucagagagcccuucaucgccugcggcccuaacgaauguaagcauuuugcucucacacacuacgccgcgcagcccgggggauauuacaauggcacccgggaggaccgcaacaaacugagacaucugauuuccgucaagcucggcaagaucccuacaguggagaauagcauuuuccacauggccgcuuggucuggguccgccugccaugauggacgggaauggaccuauaucggcguugacgggcccgauagcaacgcucugcuuaaaauuaaguacggagaggccuacacggacacauaucacucuuacgcgaaaaauauccugcgcacccaggaauccgccuguaacugcauuggcggggauuguuaucucaugaucacagacggaccggcuagcggcaucuccgagugcagauuucugaagauucgggagggccgcaucauuaaagaaaucuucccuaccgggagagugaagcacaccgaggaauguacaugcggauuugccucuaauaagacgauugagugugcuugccgggauaacagcuacaccgccaaacgccccuucgucaaacuuaauguggaaacagacaccgccgagaucagacugaugugcacagagaccuaucucgauacgccucggcccaacgacggcuccaucacagggcccugugaaagcaauggagauaagggcucugggggaauuaagggcggcuuuguucaucaacgcauggcuuccaaaaucgggagaugguacagccggaccaugucuaagaccgagagaaugggaaugggccuguaugugaaauacgacggggacccuugggcggauagcgacgcccuggcuuucuccggagucauggugucuauggaggaaccgggcugguacagcuuuggguucgaaauuaaggauaagaaaugcgacgugcccuguaucggcauugagaugguccacgauggaggcaaggagacauggcauuccgccgccaccgcuaucuauugccucauggggagcggacagcugcuuugggacacaguuacgggcgugaacauggcccuguga

SEQ ID NO: 221968 - RNA, 1401 nt, Artificial Sequence
  derived and/or modified CDS sequence (opt5) from neuraminidase__InfluenzaB__AGY46397
augcugcccagcaccauccagacacucacgcuguuccuuaccuccggcggggugcugcucucucuguacgucagcgccucccuuucuuaucugcucuacagcgacauucugcugaaguuuuccagaacagagaucaccgcuccuauuaugccgcucgauugcgccaacgcgucuaauguucaagcugugaaccggagcgccacaaaaggagugacccugcuucugcccgaaccugaguggacauauccccgccucuccuguccuggcagcaccuuccagaaggcccugcuuaucucuccccacagauuuggggaaacgaaaggaaauuccgcuccucugauuauccgggagccguucaucgccugcggccccaacgaauguaagcauuuugcucucacccacuacgccgcgcagccugggggauauuacaauggcacacgcggcgacagaaacaaacugcggcaucugauuagcgucaagcucgggaagauccccaccguggaaaauucuauuuuccacauggccgcuugguccggaagcgccugccaugauggcaaagaguggacauauaucgggguugacggaccugauaacaaugcucugcuuaaggugaaauacggcgaggccuacaccgacacguaucacucuuacgcgaacaagauucugcgcacacaggaguccgccuguaauugcaucgggggaaacuguuaucucaugauuaccgauggcagcgcuuccggcgucucugaaugcagauuucugaaaauccgggaggggcgcaucauuaaggagaucuuccccacaggaagagugaagcacaccgaagaguguaccugcggcuuugccagcaauaaaacaauugaaugugcuugccgggacaacuccuacacggccaagcgcccguucguuaaacuuaauguggagaccgauacagccgaaaucagacugaugugcaccgacacauaucucgauaccccucggcccaacgacgggagcauuacgggaccuugugagucugauggcgacaagggguccggaggcaucaaaggcggguuuguccaucaacgcauggagagcaagaucggaagaugguacucucggacaaugagcaaaaccgaaagaaugggcauggggcuguaugugaaguacgacggagaucccugggcugacuccgaugcgcuggccuucucuggcgugauggucagcaugaaggagcccgggugguacuccuuuggcuucgaaauuaaagacaagaaaugcgauguuccuuguaucggaauugagauggugcacgacggcgggaagaccacauggcauagcgcugccaccgccaucuauugccucaugggaucuggccagcugcuuugggauacagugacgggggucaacaugacccuguga

SEQ ID NO: 221969 - RNA, 1401 nt, Artificial Sequence
  derived and/or modified CDS sequence (opt5) from neuraminidase__InfluenzaB__AGY46399
augcugcccagcaccauccagacacucacgcuguuccuuaccuccggcggggugcugcucucucuguacgucagcgccucccuuucuuaucugcucuacagcgacauucugcugaaguuuuccccuacagagaucauugcuccgaccacaccccucgauugcgccaacgcgucuaauguucaagcugugaacagaagcgccaccaaaggagugacacugcuucugccugaacccgaguggaccuauccucggcucuccugucccggcagcacguuccagaaggcccugcuuaucucuccucaccgcuuuggggaaaccaaaggaaauuccgcuccgcugauuaucagagagcccuucaucgccugcggcccuaaggaauguaaacauuuugcucucacacacuacgccgcgcagcccgggggauauuacaacggcacccgggaggaccgcaauaagcugagacaucugauuagcgucaagcucggcaaaaucccuacaguggagaacucuauuuuccacauggccgcuugguccgggagcgccugccaugauggacgggaauggaccuauaucggcguugacgggcccgauucuaaugcucugcuuaagauuaaauacggagaggccuacacggacacauaucacuccuacgcgaagaacauccugcgcacccaggaaagcgccuguaauugcauuggcggggauuguuaucucaugaucacagacggaccggcuuccggcaucucugagugcagauuucugaaaauucgggagggccgcaucauuaaggaaaucuucccuaccgggagagugaagcacaccgaggaauguacaugcggauuugccagcaacaaaacgauugagugugcuugccgggauaauuccuacaccgccaagcgccccuucgucaaacuuaacguggaaacagacaccgccgagaucagacugaugugcacagagaccuaucucgauacgccucggcccaaugacggcagcaucacagggcccugugaaucuaacggagauaagggcuccgggggaauuaaaggcggcuuuguucaucaacgcauggcuagcaagaucgggagaugguacucucggaccaugagcaaaaccaagagaaugggaaugggccuguaugugaaguacgacggggacccuugggcggauuccgaggcccuggcucucucuggagucauggugagcauggaggaaccgggcugguacuccuucggguuugaaauuaaagacaagaaaugcgaugugcccuguaucggcauugagaugguccacgacggaggcaaggagacauggcauagcgccgccaccgcuaucuauugccugauggggucuggacagcuucugugggauacaguuacgggcguggacauggcccucuga

SEQ ID NO: 221970 - RNA, 1401 nt, Artificial Sequence
  derived and/or modified CDS sequence (opt5) from neuraminidase__InfluenzaB__AGY46401
augcugcccagcaccauccagacacucacgcuguuccuuaccuccggcggggugcugcucucucuguacgucagcgccucccuuucuuaucugcucuacagcgacauucugcugaaguuuuccccuacagagaucaccgcuccgacaaugccccucgauugcgccaacgcgucuaauguucaagcugugaacagaagcgccaccaaaggagugacacugcuucugccugaacccgaguggaccuauccucggcucuccugucccggcagcacguuccagaaggcccugcuuauuucuccucaccgcuuuggggaaaccaaaggaaauuccgcuccgcugaucauuagagagcccuucaucgccugcggcccuaaggaauguaaacauuuugcucucacacacuacgccgcgcagcccgggggauauuacaacggcacccgggaggaccgcaauaagcugagacaucugaucagcgucaagcucggcaaaauuccuacaguggagaacucuaucuuccacauggccgcuugguccgggagcgccugccaugauggacgggaauggaccuauauuggcguugacgggcccgauucuaaugcucugcuuaagaucaaauacggagaggccuacacggacacauaucacuccuacgcgaagaacauucugcgcacccaggaaagcgccuguaauugcaucggcggggauuguuaucucaugauuacagacggaccggcuuccggcaucucugagugcagauuucugaaaauccgggagggccgcauuaucaaggaaauuuucccuaccgggagagugaagcacaccgaggaauguacaugcggauuugccagcaacaaaacgaucgagugugcuugccgggauaauuccuacaccgccaagcgccccuucgucaaacuuaacguggaaacagacaccgccgagauuagacugaugugcacagagaccuaucucgauacgccucggcccaaugacggcagcaucacagggcccugugaaucuaacggagauaagggcuccgggggaaucaaaggcggcuuuguucaucaacgcauggcuagcaagauugggagaugguacucucggaccaugagcaaaaccaagagaaugggaaugggccuguaugugaaguacgacggggacccuugggcggauuccgacgcccuggcuuucucuggagucauggugagcaugaaagagccgggcugguacuccuuuggguucgaaaucaaggauaaaaagugcgacgugcccuguauuggcaucgagaugguccacgauggaggcaaagaaacauggcauagcgccgccaccgcuauuuauugccucauggggucuggacagcugcuuugggacacaguuacgggcguggauauggcccuguga

SEQ ID NO: 221971 - RNA, 1401 nt, Artificial Sequence; identical to SEQ ID NO: 220688
  derived and/or modified CDS sequence (opt5) from neuraminidase__InfluenzaB__AGZ59825

SEQ ID NO: 221972 - RNA, 1401 nt, Artificial Sequence; identical to SEQ ID NO: 220754
  derived and/or modified CDS sequence (opt5) from neuraminidase__InfluenzaB__AGZ59836

SEQ ID NO: 221973 - RNA, 1401 nt, Artificial Sequence; identical to SEQ ID NO: 221443
  derived and/or modified CDS sequence (opt5) from neuraminidase__InfluenzaB__AGZ59847

SEQ ID NO: 221974 - RNA, 1401 nt, Artificial Sequence
  derived and/or modified CDS sequence (opt5) from neuraminidase__InfluenzaB__AGZ59858
augcugcccagcaccauccagacacucacgcuguuccuuaccuccggcggggugcugcucucucuguacgucagcgccucccuuucuuaucugcucuacagcgacauucugcugaaguuuuccccuacagagaucaccgcuccgacaaugccccucgauugcgccaacgcgucuaauguucacgcugugaacagaagcgccaccaaaggagugacacugcuucugccugaacccgaguggaccuauccucggcucuccugucccggcagcacguuccaaaaggcccugcuuauuucuccucaucgcuuuggggaaaccaaaggaaauuccgcuccgcugaucauuagagagcccuucaucgccugcggcccuaacgaauguaagcacuuugcucucacacauuacgccgcgcagcccgggggauauuacaauggcaaacggggcgaccgcaacaagcugagacaccugaucagcgucaagcucgggaaaauuccuaccguggaaaauucuaucuuccauauggccgcuugguccggaagcgccugccacgauggcaaggaguggacauauauugggguugacggacccgauaacaaugcucugcuuaaaaucaaguacggcgaggccuacaccgacacguaucacucuuacgcgaacaauauucugcggacacaggaguccgccuguaacugcaucgggggaaauuguuaucucaugauuaccgauggcagcgcuuccggcgugucugaaugccgcuuucugaaaaucagagaggggcggaucauuaaggagaucuucccgacaggacgcgucaagcauaccgaagaguguaccugcggcuuugccagcaacaaaacaauugaaugugcuugcagagacaauuccuacacggccaagcggccuuucgugaaacuuaacguugagaccgauacagccgaaauccgccugaugugcaccgacacauaucucgauacccccagaccugacgaugggagcauuacgggacccugugagucuaacggcgacaagggguccggaggcaucaaaggcggguuugugcaccagcggauggcuagcaagaucggacgcugguacucuagaacaaugagcaaaaccgagcggaugggcauggggcuguaugucaaguacgacggagaucccugggcggacuccgaugcccuggcuuucucuggcgugauggugagcaugaaggaaccugggugguacuccuuuggcuucgagauuaaagacaagaaaugcgaugucccguguaucggaauugaaaugguucaugacggcgggaaggagaccuggcacagcgccgccacagcuaucuauugccucaugggaucuggccaacugcuuugggauaccgugacagggguggacauggcccuguga

SEQ ID NO: 221975 - RNA, 1401 nt, Artificial Sequence
  derived and/or modified CDS sequence (opt5) from neuraminidase__InfluenzaB__AGZ59869
augcugcccagcaccauccagacacucacgcuguuccuuaccuccggcggggugcugcucucucuguacgucagcgccucccuuucuuaucugcucuacagcgacauucugcugaaguuuuccccuacagagaucaccgcuccgacaaugccccucgauugcgccaacgcgucuaauguucaagcugugaacagaagcgccaccaaaggagugacacugcuucugccugaacccgaguggaccuauccucggcucuccugucccggcagcacguuccagaaggccguccugauuucuccucaccgcuuuggggaaaccaaaggaaauuccgcuccgcuuaucauuagagagcccuucaucgccugcggcccuaacgaauguaagcauuuugcucugacacacuacgccgcgcagcccgggggauauuacaauggcacccggggcgaccgcaacaaacucagacaucugaucagcgugaagcuggggaagauuccuacaguugaaaauucuaucuuccacauggccgcuugguccggaagcgccugccaugauggcaaagaguggaccuauauugggguggacggacccgauaacaaugcucuccugaagaucaaauacggcgaggccuacacggacacauaucacucuuacgcgaacaagauucuucggacccaggaguccgccuguaauugcaucgggggaaacuguuaucugaugauuacagauggcagcgcuuccggcgucucugaaugccgcuuucucaaaaucagagaggggcggaucauuaaggagaucuucccgaccggacgcgugaagcacaccgaagaguguacaugcggcuuugccagcaauaaaacgauugaaugugcuugcagagacaacuccuacaccgccaagcggccuuucguuaaacugaauguggagacagauaccgccgaaauccgccuuaugugcacagacaccuaucuggauacgcccagaccugacgaugggagcauuacaggacccugugagucuaacggcgacaagggguccggaggcaucaaaggcggguuuguccaucaacggauggcuagcaagaucggacgcugguacucuagaaccaugagcaaaaccgagcggaugggcauggggcucuaugugaaguacgacggagaucccugggcggacuccgaugcccuggcuuucucuggcgugauggucagcaugaaggaaccugggugguacuccuuuggcuucgagauuaaagacaagaaaugcgauguuccguguaucggaauugaaauggugcacgacggcgggaaggagacauggcauagcgccgccaccgcuaucuauugccugaugggaucuggccagcuccugugggauacagugacgggggucgacauggcccuuuga

SEQ ID NO: 221976 - RNA, 1401 nt, Artificial Sequence; identical to SEQ ID NO: 221472
  derived and/or modified CDS sequence (opt5) from neuraminidase__InfluenzaB__AGZ59880

SEQ ID NO: 221977 - RNA, 1401 nt, Artificial Sequence; identical to SEQ ID NO: 221916
  derived and/or modified CDS sequence (opt5) from neuraminidase__InfluenzaB__AGZ59891

SEQ ID NO: 221978 - RNA, 1401 nt, Artificial Sequence; identical to SEQ ID NO: 221033
  derived and/or modified CDS sequence (opt5) from neuraminidase__InfluenzaB__AGZ59902

SEQ ID NO: 221979 - RNA, 1401 nt, Artificial Sequence; identical to SEQ ID NO: 221033
  derived and/or modified CDS sequence (opt5) from neuraminidase__InfluenzaB__AGZ59913

SEQ ID NO: 221980 - RNA, 1401 nt, Artificial Sequence; identical to SEQ ID NO: 221033
  derived and/or modified CDS sequence (opt5) from neuraminidase__InfluenzaB__AGZ59924

SEQ ID NO: 221981 - RNA, 1401 nt, Artificial Sequence; identical to SEQ ID NO: 221033
  derived and/or modified CDS sequence (opt5) from neuraminidase__InfluenzaB__AGZ59935

SEQ ID NO: 221982 - RNA, 1401 nt, Artificial Sequence; identical to SEQ ID NO: 221033
  derived and/or modified CDS sequence (opt5) from neuraminidase__InfluenzaB__AGZ59946

SEQ ID NO: 221983 - RNA, 1401 nt, Artificial Sequence
  derived and/or modified CDS sequence (opt5) from neuraminidase__InfluenzaB__AGZ59957
augcugcccagcaccauccagacacucacgcuguuccuuaccuccggcggggugcugcucucucuguacgucagcgccucccuuucuuaucugcucuacagcgacauucugcugaaguuuuccccuacagagaucaccgcuccgacaaugccccucgauugcgccaacgcgucuaauguucaagcugugaacagaagcgccaccaaaggagugacacugcuucugccugaacccgaguggaccuauccucggcucuccugucccggcagcacguuccagaaggcccugcuuauuucuccucaccgcuuuggggaaaccaaaggaaauuccgcuccgcugaucauuagagagcccuucaucgccugcggcccuaacgaauguaagcauuuugcucucacacacuacgccgcgcagcccgggggauauuacaauggcacccggggcgaccgcaacaaacugagacaucugaucagcgucaagcucgggaagauuccuacaguggaaaauucuaucuuccacauggccgcuugguccggaagcgccugccaugauggcaaagaguggaccuauauugggguugacggacccgauaacaaugcucugcuuaaggugaaauacggcgaggccuacacggacacauaucacucuuacgcgaacaagauccugcggacccaggaguccgccuguaauugcauugggggaaacuguuaucucaugaucacagauggcagcgcuuccggcgucucugaaugccgcuuucugaaaauuagagaggggcggaucaucaaggagauuuucccgaccggacgcgugaagcacaccgaagaguguacaugcggcuuugccagcaauaaaacgaucgaaugugcuugcagagacaacuccuacaccgccaagcggccuuucguuaaacuuaauguggagacagauaccgccgaaauucgccugaugugcacagacaccuaucucgauacgcccagaccuaacgacgggagcaucacaggacccugugagucuaacggcgauaagggguccggaggcauuaaaggcggguuuguccaucaacggauggagagcaagaucggacgcugguacucuagaaccaugagcaaaaccgaacggaugggcauggggcuguaugugaaguacgacggagaccccugggcugauuccgacgcgcuggccuucucuggcgugauggucagcaugaaggagccugggugguacuccuuuggcuucgaaaucaaagauaagaaaugcgacguuccguguauuggaaucgagauggugcacgauggcgggaagggaacauggcauagcgcugccaccgccauuuauugccucaugggcucugggcagcugcuuugggacacagugacgggagucgauauggcucuguga

SEQ ID NO: 221984 - RNA, 1401 nt, Artificial Sequence; identical to SEQ ID NO: 221033
  derived and/or modified CDS sequence (opt5) from neuraminidase__InfluenzaB__AGZ59969

SEQ ID NO: 221985 - RNA, 1401 nt, Artificial Sequence; identical to SEQ ID NO: 221033
  derived and/or modified CDS sequence (opt5) from neuraminidase__InfluenzaB__AGZ59980

SEQ ID NO: 221986 - RNA, 1401 nt, Artificial Sequence; identical to SEQ ID NO: 221033
  derived and/or modified CDS sequence (opt5) from neuraminidase__InfluenzaB__AGZ59991

SEQ ID NO: 221987 - RNA, 1401 nt, Artificial Sequence; identical to SEQ ID NO: 221033
  derived and/or modified CDS sequence (opt5) from neuraminidase__InfluenzaB__AGZ60003

SEQ ID NO: 221988 - RNA, 1401 nt, Artificial Sequence
  derived and/or modified CDS sequence (opt5) from neuraminidase__InfluenzaB__AGZ60014
augcugcccagcaccauccagacacucacgcuguuccuuaccuccggcggggugcugcucucucuguacgucagcgcccuucuguccuaucuccuguacucugacauucugcucaaguuuagcccuacagagaucaccgcuccgacaaugucccuggauugcgccaacgcgucuaauguucaagcugugaacagaagcgccaccaaaggagugacauuccuucugcccgaaccugaguggaccuauccccggcucuccuguccuggcagcacguuucagcgcgcccugcuuauuucuccccacagauucggggaagcuaagggaaauuccgccccucugaucauucgggagccguuuaucgcuugcggccccaacgaauguaaacauuucgcccucacccacuacgcggcccagccugggggauauuacaauggcacacgcggcgacagaaacaagcugcggcaucugaucagcgucaaacucgggaagauucccaccguggaaaauucuaucuuucacauggcugccugguccggaagcgcuugccaugauggcaaggaguggacauauauugggguugacggaccugauaacgacgcccugcuuaaagugaaguacggcgaggcguacaccgauacguaucacucuuacgccaauaaaauccugcgcacacaggaguccgcuuguaacugcauugggggaaauuguuaucucaugaucaccgacggcagcgccuccggcgucucugaaugcagauuccugaagauucgggaggggcaaaucaucaaagagauuuuucccacaggacgcgugaagcacaccgaagaguguaccugcggcuucgcuagcaacaagacaaucgaaugugccugcagagauaauuccuacacggccaaacggccguuuguuaaacuuaacguggagaccgacacagcugaaauucgccugaugugcaccgauacauaucucgacaccccuagacccgaugacgggagcaucacgggaccuugugagucuaauggcgacaagggguccggaggcauuaagggcggguucguccaucagcggauggagagcaaaaucggacgcugguacucuagaacaaugagcaagaccgaacggaugggcauggggcuguaugugaaauacgauggagaccccugggcggauuccgacgcccuggcuuuuucuggcgugauggucagcaugaaggagcccgggugguacuccuucggcuucgaaaucaaggauaaaaagugcgacguuccuuguauuggaaucgagauggugcacgauggcgggaaagaaaccuggcauagcgccgccacagcuauuuauugccucaugggaucuggccagcugcuuugggacaccgugacaggggucgauauggcccuguga

SEQ ID NO: 221989 - RNA, 1401 nt, Artificial Sequence; identical to SEQ ID NO: 220967
  derived and/or modified CDS sequence (opt5) from neuraminidase__InfluenzaB__AGZ60025

SEQ ID NO: 221990 - RNA, 1401 nt, Artificial Sequence
  derived and/or modified CDS sequence (opt5) from neuraminidase__InfluenzaB__AGZ60037
augcugcccagcaccauccagacacucacgcuguuccuuaccuccggcggggugcugcucucucuguacgucagcgcccuucuguccuaucuccuguacucugacauucugcucaaguuuagcccuacagagaucaccgcuccgacaaugucccuggauugcgccaacgcgucuaauguucaagcugugaacagaagcgccaccaaaggagugacauuccuucugcccgaaccugaguggaccuauccccggcucuccuguccuggcagcacguuucagaaggcccugcuuauuucuccccaccgcuucggggaaaccaaaggaaauuccgcuccucugaucauuagagagccguuuaucgccugcggccccaacgaauguaagcauuucgcucucacacacuacgccgcgcagccugggggauauuacaauggcacccggggcgaccgcaacaaacugagacaucugaucagcgucaagcucgggaagauucccacaguggaaaauucuaucuuucacauggccgcuugguccggaagcgccugccaugauggcaaagaguggaccuauauugggguugacggaccugauaacgacgcucugcuuaaggugaaauacggcgaggccuacacggauacauaucacucuuacgcgaauaagauccugcggacccaggaguccgccuguaacugcauugggggaaauuguuaucucaugaucacagacggcagcgcuuccggcgucucugaaugccgcuuccugaaaauuagagaggggcggaucaucaaggagauuuuucccaccggacgcgugaagcacaccgaagaguguacaugcggcuucgccagcaacaaaacgaucgaaugugcuugcagagauaauuccuacaccgccaagcggccguuuguuaaacuuaacguggagacagacaccgccgaaauucgccugaugugcacagauaccuaucucgacacgccuagacccgaugacgggagcaucacaggaccuugugagucuaauggcgacaagggguccggaggcauuaaaggcggguucguccaucaacggauggagagcaagaucggacgcugguacucuagaaccaugagcaaaaccgaacggaugggcauggggcuguaugugaaguacgauggagaccccugggcugaguccgaugcgcuggccuuuucuggcgugauggucagcaugaaggaacccgggugguacuccuucggcuucgagaucaaagacaagaaaugcgauguuccuuguauuggaaucgaaauggugcacgacggcgggaaggagacauggcauagcgcugccaccgccauuuauugccucaugggaucuggccagcugcuuugggauacagugacgggggucgacaucgcucuguga

SEQ ID NO: 221991 - RNA, 1401 nt, Artificial Sequence; identical to SEQ ID NO: 221203
  derived and/or modified CDS sequence (opt5) from neuraminidase__InfluenzaB__AGZ60048

SEQ ID NO: 221992 - RNA, 1401 nt, Artificial Sequence; identical to SEQ ID NO: 221203
  derived and/or modified CDS sequence (opt5) from neuraminidase__InfluenzaB__AGZ60059

SEQ ID NO: 221993 - RNA, 1401 nt, Artificial Sequence
  derived and/or modified CDS sequence (opt5) from neuraminidase__InfluenzaB__AGZ60070
augcugcccagcaccauccagacacucacgcuguuccuuaccuccggcggggugcugcucucucuguacgucagcgccucccuuucuuaucugcucuacagcgacauucugcugaaguuuuccacaaccgagaucacagcuccuaccaugccgcucgauugcgccaacgcgucuaauguucaagcugugaaccacagcgccgccaaaggagugacacugcuucugcccgaaccugaguggaccuaucccagacucuccuguccuggcagcacguuccagaaggcucugcuuauuucuccccaucgguuuggggaaaccaaaggaaauuccgccccucugaucauucgcgagccguucaucgcuugcggccccaaggaauguaaacacuuugcccucacacauuacgcggcccagccugggggauauuacaacggcaccagagaggaccggaauaagcugcgccaccugaucagcgucaagcucggcaaaauucccacaguggagaacucuaucuuccauauggcugccugguccgggagcgcuugccacgauggaaaggaauggaccuauauuggcguugacgggccugauucuaaugcccugcuuaaaaucaaguacggagaggcguacacggacacauaucacuccuacgcccauaacauucugagaacccaggaaagcgcuuguaauugcaucggcgggaacuguuaucucaugauuacagauggauccgccucuggcaucagcgagugccgguuucugaaaauccgcgagggcagaauuaucaaggaaauuuuccccaccgggcgggugaagcacaccgaggaauguacaugcggauuugcuaauaacaaaacgaucgagugugccugccgcgacaauuccuacaccgccaagagaccguucgucaaacuuaacguggaaacagauaccgcugagauucggcugaugugcacagagaccuaucucgacacgccucgccccgaugacggcagcaucacagggccuugugaaucuaauggaaacaagggcuccgggggaaucaaaggcggcuuuguucaucaaagaauggcgagcaagauugggcggugguacucucgcaccaugagcaaaaccaagagaaugggaaugggccuguaugugaaguacgauggggaccccuggacagacuccgaugcccuggucuucucuggagugaugaucagcguggaggaacccggcugguacuccuuuggguucgagauuaaagacaagaaaugcgaugucccuuguaucggcauugaaaugguucacgacggaggcaaggagaccuggcacagcgcugccacagccaucuauugccucauggggucuggacagcugcuuugggauacggugaccggcgugaacaugacacuguga

SEQ ID NO: 221994 - RNA, 1401 nt, Artificial Sequence; identical to SEQ ID NO: 220699
  derived and/or modified CDS sequence (opt5) from neuraminidase__InfluenzaB__AGZ60081

SEQ ID NO: 221995 - RNA, 1401 nt, Artificial Sequence; identical to SEQ ID NO: 221219
  derived and/or modified CDS sequence (opt5) from neuraminidase__InfluenzaB__AGZ60092

SEQ ID NO: 221996 - RNA, 1401 nt, Artificial Sequence; identical to SEQ ID NO: 221842
  derived and/or modified CDS sequence (opt5) from neuraminidase__InfluenzaB__AGZ60103

SEQ ID NO: 221997 - RNA, 1401 nt, Artificial Sequence; identical to SEQ ID NO: 220860
  derived and/or modified CDS sequence (opt5) from neuraminidase__InfluenzaB__AGZ60135

SEQ ID NO: 221998 - RNA, 1401 nt, Artificial Sequence; identical to SEQ ID NO: 221032
  derived and/or modified CDS sequence (opt5) from neuraminidase__InfluenzaB__AGZ60154

SEQ ID NO: 221999 - RNA, 1401 nt, Artificial Sequence
  derived and/or modified CDS sequence (opt5) from neuraminidase__InfluenzaB__AGZ60164
augcugcccagcaccacacagacgcucacccuguuccuuacauccggcggggugcugcucucucuguacgucagcgccucccuuucuuaucugcucuacagcgacauccugcugaaguuuucccaaaccgagauuacagcuccuaucaugccgcucgauugcgccaacgcgucuaauguucaggcugugaacagaagcgccgccaaaggagugacccugcuucugcccgaaccugaguggacauauccccggcucuccuguccuggcagcaccuuccagaaggcucugcuuauuaauccccaccgcuuuggggaaacgaaaggaaacucugccccucugaucauuagagagccguucaucgcuugcggccccaccgaauguaagcauuuugcccucacacacuacgcggcccagccugggggauauuacaauggcacccgggaggaccgcaacaaacugagacaucugaucuccgucaagcucggcaagauucccacaguggagaauagcaucuuccacauggcugccuggucuggguccgcuugccaugauggaaaagaauggaccuauauuggcguugacgggccugauagcaacgcccugcuuaagaucaaauacggagaggcguacacggacacauaucacucuuacgccaagaauauucugcggacccaagaauccgcuuguaacugcaucggcggggauuguuaucucaugauuacagacggacccgccagcggcaucuccgagugccgcuuucugaaaaucagagagggccggauuaucaaggaaauuuucccgaccgggcgcgugaagcacaccgaggaauguacaugcggauuugcuucuaauaaaacgaucgagugugccugcagagauaacagcuacaccgccaagcggccuuucgucaaacuuaauguggaaacagacaccgcugagauucgccugaugugcacagagaccuaucucgauacgcccagaccuaacgacggcuccaucacagggcccugugaaagcgauggagacaagggcucugggggaaucaaaggcggcuuuguucaucagcggauggcguccaagauugggcgcugguacagcagaaccaugucuaaaaccaagcggaugggaaugggccuguaugugaaguacgacggggaucccuggacagacagcgaggcccuggcucucuccggagucauggugucuauggaggaaccuggcugguacagcuucggguuugaaaucaaagauaagaaaugcgacgugccguguauuggcaucgagaugguccacgauggaggcaagaccacauggcauuccgccgccacggcuauuuauugccugauggggagcggacagcuucugugggacaccguuacaggcguggauauggcccucuga

SEQ ID NO: 222000 - RNA, 1401 nt, Artificial Sequence; identical to SEQ ID NO: 221912
  derived and/or modified CDS sequence (opt5) from neuraminidase__InfluenzaB__AGZ60176

SEQ ID NO: 222001 - RNA, 1401 nt, Artificial Sequence; identical to SEQ ID NO: 220889
  derived and/or modified CDS sequence (opt5) from neuraminidase__InfluenzaB__AGZ60187

SEQ ID NO: 222002 - RNA, 1401 nt, Artificial Sequence; identical to SEQ ID NO: 220889
  derived and/or modified CDS sequence (opt5) from neuraminidase__InfluenzaB__AGZ60198

SEQ ID NO: 222003 - RNA, 1401 nt, Artificial Sequence; identical to SEQ ID NO: 220889
  derived and/or modified CDS sequence (opt5) from neuraminidase__InfluenzaB__AGZ60210

SEQ ID NO: 222004 - RNA, 1401 nt, Artificial Sequence
  derived and/or modified CDS sequence (opt5) from neuraminidase__InfluenzaB__AGZ60221
augcugcccaccacaauccagacgcucacccuguuccuuacaagcggcggggugcugcucucccuguacgucucugccagccuuuccuaucugcucuacucugacauucugcugaaguuuagcagaaccgagaucacagcuccuauuaugccgcucgauugcgccaacgcguccaauguucaagcugugaaccggucugccaccaaaggagugacacugcuucugcccgaaccugaguggaccuauccccgccucagcuguccuggcuccacguuccagaaggcccugcuuaucagcccccacagauuuggggaaaccaaaggaaauucugcuccucugauuauccgggagccguucaucgccugcggccccaaggaauguaaacauuuugcucucacacacuacgccgcgcagccugggggauauuacaacggcacccgcgaggacagaaauaagcugcggcaucugauuuccgucaagcucggcaaaauccccacaguggagaacagcauuuuccacauggccgcuuggucuggguccgccugccaugauggacgcgaauggaccuauaucggcguugacgggccugauagcaaugcucugcuuaagauuaaauacggagaggccuacacggacacauaucacucuuacgcgaagaacauccugagaacccaggaauccgccuguaauugcauuggcggggauuguuaucucaugaucacagacggacccgcuagcggcaucuccgagugccgguuucugaaaauucgcgagggcagaaucauuaaggaaaucuucccgaccgggcgggugaagcacaccgaggaauguacaugcggauuugccucuaacaaaacgauugagugugcuugccgcgauaauagcuacaccgccaagagaccuuucgucaaacuuaacguggaaacagacaccgccgagauccggcugaugugcacagagaccuaucucgauacgccccgcccuaaugacggcuccaucacagggcccugugaaagcaacggagauaagggcucugggggaauuaaaggcggcuuuguucaucaaagaauggcuuccaagaucgggcggugguacagcagaaccaugucuaaaaccaagcgcaugggaaugggccuguaugugaaguacgacggggaccccuggacagauagcgaggcgcuggcccucuccggagucauggugucuauggaggaaccuggcugguacagcuucggguuugaaauuaaagacaagaaaugcgaugugccguguaucggcauugagaugguccacgacggaggcaagaccacauggcauuccgcugccacggccaucuauugccugauggggagcggacagcuucugugggauaccguuacaggcgugaauaugacccucuga

SEQ ID NO: 222005 - RNA, 1401 nt, Artificial Sequence
  derived and/or modified CDS sequence (opt5) from neuraminidase__InfluenzaB__AGZ60272
augcugcccagcaccauccagacacucacgcuguuccuuaccuccggcggggugcugcucucucuguacgucagcgccucccuuucuuaucugcucuacagcgacauucugcugaaguuuucccaaacagagaucaccgcuccuauuaugccgcucgauugcgccaacgcgucuaauguucaggcugugaacagaagcgccgccaaaggagugacacugcuucugcccaagccugaauggaccuauccccggcucuccuguccuggcagcacauuccagaaagcucugcuuaucucuccccaccgcuuuggggagaccaagggaaauuccgccccucugauuaucagagaaccguucaucgcuugcggccccacggaguguaaacauuuugcccucacccacuacgcggcccagccugggggauauuacaacggcacacgggaagaccgcaauaagcugagacaucugauuagcgucaagcucggcaaaauccccaccguggagaacucuauuuuccacauggcugccugguccgggagcgcuugccaugauggaaaggaguggacauauaucggcguugacgggccugauucuaaugcccugcuuaaaauuaaguacggagaagcguacaccgacacguaucacuccuacgccaaaaacauccugcggacacaagagagcgcuuguaauugcauuggcggggauuguuaucucaugaucaccgacggacccgccuccggcaucucugaaugccgcuuucugaagauuagagagggccggaucauuaaggagaucuucccgacagggcgcgugaaacacaccgaagaguguaccugcggauuugcuagcaacaagacaauugaaugugccugcagagauaauuccuacacggccaaacggccuuucgucaaacuuaacguggagaccgacacagcugaaauccgccugaugugcaccgagacauaucucgauacccccagaccuaaugacggcagcaucacggggcccugugagucugauggagacaagggcuccgggggaauuaagggcggcuuuguucaucagcggauggcgagcaaaaucgggcgcugguacucuagaacaaugagcaagaccaagcggaugggaaugggccuguaugugaaauacgacggggaucccuggaccgacuccgaagcccuggcucucucuggagucauggugagcauggaggaaccuggcugguacuccuucggguuugagauuaaggauaaaaagugcgacgugccguguaucggcauugaaaugguccacgauggaggcaaaacaaccuggcauagcgccgccacagcuaucuauugccugauggggucuggacagcuucugugggacacgguuaccggcguggauauggcccucuga

SEQ ID NO: 222006 - RNA, 1398 nt, Artificial Sequence
  derived and/or modified CDS sequence (opt5) from neuraminidase__InfluenzaB__AHL91182
augcugcccagcaccauccagacacucacgcuguuccuuaccuccggcggggugcugcucucucuguacgucagcgcccuucuguccuaucuccuguacucugacauucugcucaaguuuagcccuaaaaucauugcuccgacaaugucccuggauugcgccaacgcgucuaauguucaagcugugaaccacagcgccaccaaggagaugaaauuccuucccccugaacccgaguggacauauccuagacuguccugucagggaagcaccuuucagaaggcccuccugaucucuccccaucgguucggcgaagcuaaaggaaauuccgccccucuuauuauccgcgagccguuuaucgcuugcgggcccaaggaauguaagcacuucgcccugacacauuacgcggcccagccuggcggguauuacaacggaaccagagaggaccggaauaaacuccgccaccugauuagcgugaaccugggcaagauccccacggucgaaaauucuauuuuucauauggcugccugguccggcagcgcuugccacgaugggagagaauggaccuauaucggaguggacggcccugauucuaacgcccucauuaaaaucaaguacggggaggcguacacagacaccuaucacuccuacgccaauaacauucugcggacacaagaaagcgcuuguaauugcaucggaggcgauuguuaucuuaugaucaccgacggguccgccucuggaauuagcaaaugccgcuuccugaagaucagagagggccggauuaucaaggagauuuuucccacgggccgcguugaacauacagaggaauguaccugcggguucgcuuccaacaaaacaaucgagugugccugcagagauaauagcuacaccgccaagcggccguuugugaaacucaacgucgaaaccgacacagcugagauccgccugaugugcacggagaccuaucuugauacaccuagacccgacgauggaucuauuaccggcccuugugaauccaauggggacaagggacggggcggggugaaaggaggcuucguucaccagcgcauggcgagcaagaucggcagaugguacucucggacaaugagcaaaaccaagagaauggggauggagcuguaugugaaguacgacggagaucccuggacggacuccgaugcccucgcucccucuggcgucauggugagcauggaggagccugggugguacuccuuuggauucgaaauuaaagacaagaaaugcgaugugccguguaucggcauugagaugguccaugacgggggcaagcgcacauggcacagcgccgccaccgcuaucuauugccugaugggaucuggccagcugcucugggauaccguuacagggguggacauggcccuguga

SEQ ID NO: 222007 - RNA, 1398 nt, Artificial Sequence
  derived and/or modified CDS sequence (opt5) from neuraminidase__InfluenzaB__AHL91193
augcugcccagcaccauccagacacucacgcuguuccuuaccuccggcggggugcugcucucucuguacgucagcgcccuucuguccuaucuccuguacucugacauucugcucaaguuuagcccuaaaaucauugcuccgacaaugucccuggauugcgccaacgcgucuaauguucaagcugugaaccacagcgccaccaaggagaugaaauuccuucccuccgaaccugaguggacauaucccagacugagcugucagggaucuaccuuucagaaggcccuccugaucuccccucaucgguucggcgaagcuaaagggaauagcgcuccccuuauuauccgcgagccuuuuaucgccugcggaccgaaggaauguaagcacuucgcccugacacauuacgcggcccagcccggcggguauuacaacggaaccagagaggaccggaauaaacuccgccaccugauuucugugaaccugggcaagaucccuacggucgaaaauuccauuuuucauauggcugccuggagcggcucugcuugccacgaugggagagaauggaccuauaucggaguggacggccccgauuccaacgcccucauuaaaaucaaguacggggaggcguacacagacaccuaucacagcuacgccaauaacauucugcggacacaagaauccgcuuguaauugcaucggaggcgauuguuaucuuaugaucaccgacgggucugccagcggaauuuccaaaugccgcuuccugaagaucagagagggccggauuaucaaggagauuuuuccuacgggccgcguugaacauacagaggaauguaccugcggguucgcuagcaacaaaacaaucgagugugccugcagagauaauucuuacaccgccaagcggcccuuugugaaacucaacgucgaaaccgacacagcugagauccgccugaugugcacggagaccuaucuugauacaccgagaccugacgauggauccauuaccggccccugugaaagcaauggggacaagggacggggcggggugaaaggaggcuucguucaccagcgcauggcgucuaagaucggcagaugguacagccggacaauguccaaaaccaagagaauggggauggagcuguaugugaaguacgacggagauccuuggacggacucugaugcccucgcucccagcggcgucaugguguccauggaggagcccgggugguacagcuuuggauucgaaauuaaagacaagaaaugcgaugugccuuguaucggcauugagaugguccaugacgggggcaagcgcacauggcacucugccgccaccgcuaucuauugccugaugggauccggccagcugcucugggauaccguuacagggguggacauggcccuguga

SEQ ID NO: 222008 - RNA, 1398 nt, Artificial Sequence
  derived and/or modified CDS sequence (opt5) from neuraminidase__InfluenzaB__AHL91204
augcugcccagcaccauccagacacucacgcuguuccuuaccuccggcggggugcugcucucucuguacgucagcgcccuucuguccuaucuccuguacucugacguucugcucaaguuuagcccuaaaauuaucgcuccgacaaugucccuggauugcgccaacgcgucuaaugugcaagcugugaaccacagcgccaccgaggaaaugacauuccuucugcccgagccugaauggaccuaucccagacucuccugucagggaagcacauuucagaaggcccugcuuauuucuccucaucgguucggcgaggcuaaaggaaauuccgcuccccugaucauucgcgaaccuuuuaucgccugcgggccgaaggaguguaaacacuucgcccucacccauuacgcggcccagcccggcggguauuacaacggaacgagagaggaccggaauaagcugcgccaccugaucagcgucaaccucggcaagauuccuaccguggaaaauucuaucuuucauauggcugccugguccggcagcgcuugccacgaugggagagaguggacauauauuggaguugacggccccgauucuaacgcccugaucaaaauuaaguacggggaagcguacaccgacacauaucacuccuacgccaauaacauccuucggacccaagagagcgcuuguaauugcauuggaggcgauuguuaucugaugaucacggacggguccgccucuggaaucagcaaaugccgcuuccucaagauuagagagggccggaucauuaaagaaaucuuuccuacaggccgcguggagcauaccgaagaguguacaugcggguucgcuuccaacaagaccauugaaugugccugcagagauaauaucuacaccgccaagcggcccuuugucaaacugaacguggagacagacacggcugagauccgccuuaugugcaccgaaacauaucuggauaccccgagaccugacgauggaagcauuacaggccccugugagucuaauggggacaagggacacggcgggaucaaaggaggcuucguucaucagcggauggcguccaagauuggccgcugguacagcagaaccaugucuaaaacgaagcggauggggauggaacucuaugugaaauacgacggagauccuuggacagacagcgaugcccuggcucccuccggcgucauggugucuauggaggaacccgggugguacagcuuuggauucgagaucaaggacaagaaaugcgaugugccuuguauuggcaucgagaugguccacgacgggggcaagaaaaccuggcacuccgccgccaccgcuaucuauugccugaugggaagcggccagcuccugugggauacaguuaccgggguggacauggcccuuuga

SEQ ID NO: 222009 - RNA, 1398 nt, Artificial Sequence
  derived and/or modified CDS sequence (opt5) from neuraminidase__InfluenzaB__AHL91215
augcugcccagcaccauccagacacucacgcuguuccuuaccuccggcggggugcugcucucucuguacgucagcacacuucuguccuaucuccuguacucugacauucugcucaaguuuagcccuaaaaucauugccccgaccacaucccuggauugcgcuaacgccucuaauguucaagcggugaaccacagcgcuaccaaggagaugaaauuccuucccacagaaccugaguggaccuaucccagacuguccugucagggaagcacguuucagaaggcccuccugaucucuccucaucgguucggcgaagccaaaggaaauuccgcuccccuuauuauccgcgagccuuuuaucgccugcgggccgaaggaauguaagcacuucgcucugacccauuacgccgcgcagcccggcggguauuacaacggaacaagagaggaccggaauaaacuccgccaccugauuagcgugaaccugggcaagaucccuaccgucgaaaauucuauuuuucauauggccgcuugguccggcagcgccugccacgaugggagagaauggacauauaucggaguggacggccccgauucuaacgcucucauuaaaaucaaguacggggaggccuacaccgacacguaucacuccuacgcgaauaacauucugcggacacaagaaagcgccuguaauugcaucggaggcgauuguuaucuuaugaucaccgacggguccgcuucuggaauuagcaaaugccgcuuccugaagaucagagagggccggauuaucaaggagauuuuuccuacaggccgcguugaacauaccgaggaauguaccugcggguucgccuccaacaaaacaaucgagugugcuugcagagauaauagcuacacggccaagcggcccuuugugaaacucaacgucgaaaccgacacagccgagauccgccugaugugcaccgagacauaucuugauaccccgagaccugacgauggaucuauuacgggccccugugaauccaauggggacaagggaagcggcggggugaaaggaggcuucguucaccagcggaugacaucuaagaucggccgcugguacagcagaaccauguccaaaaccaagcggauggggauggagcuguaugugaaguacgacggagauccuuggacagacucugaugcucucgcgcccagcggcgucaugguguccauggaggagcccgggugguacagcuuuggauucgaaauuaaagacaagaaaugcgaugugccuuguaucggcauugagaugguccaugacgggggcaagagaaccuggcacucugccgcuacagccaucuauugccugaugggauccggccagcugcucugggauacgguuaccgggguggacauggcccuguga

SEQ ID NO: 222010 - RNA, 1401 nt, Artificial Sequence; identical to SEQ ID NO: 220781
  derived and/or modified CDS sequence (opt5) from neuraminidase__InfluenzaB__AHL91226

SEQ ID NO: 222011 - RNA, 1401 nt, Artificial Sequence; identical to SEQ ID NO: 220782
  derived and/or modified CDS sequence (opt5) from neuraminidase__InfluenzaB__AHL91237

SEQ ID NO: 222012 - RNA, 1401 nt, Artificial Sequence; identical to SEQ ID NO: 220782
  derived and/or modified CDS sequence (opt5) from neuraminidase__InfluenzaB__AHL91248

SEQ ID NO: 222013 - RNA, 1401 nt, Artificial Sequence; identical to SEQ ID NO: 220781
  derived and/or modified CDS sequence (opt5) from neuraminidase__InfluenzaB__AHL91259

SEQ ID NO: 222014 - RNA, 1401 nt, Artificial Sequence; identical to SEQ ID NO: 220781
  derived and/or modified CDS sequence (opt5) from neuraminidase__InfluenzaB__AHL91270

SEQ ID NO: 222015 - RNA, 1398 nt, Artificial Sequence; identical to SEQ ID NO: 220753
  derived and/or modified CDS sequence (opt5) from neuraminidase__InfluenzaB__AHL91281

SEQ ID NO: 222016 - RNA, 1401 nt, Artificial Sequence
  derived and/or modified CDS sequence (opt5) from neuraminidase__InfluenzaB__AHL91303
augcugcccagcaccauccagacacucacgcuguuccuuaccuccggcggggugcugcucucucuguacgucagcgccucccuuucuuaucugcucuacagcgacauucugcugaaguuuuccccuacagagaucaccgcuccgacaaugccccucgauugcgccaacgcgucuaauguucaagcugugaacagaagcgccaccaaaggagugacacugcuucugccugaacccgaguggaccuauccucggcucuccugucccggcagcacguuccagaaggcccugcuuauuucuccucaccgcuuuggggaaaccaaaggaaauuccgcuccgcugaucauuagagagcccuucaucgccugcggcccuaaggaauguaaacauuuugcucucacacacuacgccgcgcagcccgggggauauuacaacggcacccgggaggaccgcaauaagcugagacaucugaucagcgucaagcucggcaaaauuccuacaguggagaacucuaucuuccacauggccgcuugguccgggagcgccugccaugauggacgggaauggaccuauauuggcguugacgggcccgauucuaaugcucugcuuaagaucaaauacggagaggccuacacggacacauaucacuccuacgcgaacaauauucugcgcacccaggaaagcgccuguaacugcaucggcggggauuguuaucucaugauuacagacggauccgcuucuggcaucaaugagugcagauuucugaagauccgggagggccgcauuaucaaagaaauuuucccgaccgggagaguggagcacaccgaagaguguacaugcggauuugccagcaacaagacgaucgaaugugcuugccgggauaauuccuacaccgccaagcgcccuuucgucaaacuuaacguggagacagacaccgccgagauuagacugaugugcacagaaaccuaucucgauacgccccggccugacgauggcagcaucacagggcccugugagucuaauggagacaagggcuccgggggaaucaaaggcggcuuuguucaucaacgcauggcuagcaagauugggagaugguacucucggaccaugagcaaaaccagacgcaugggaaugggccuguaugugaaguacgacggggaucccuggacagacuccgaugcgcuggcccucucuggagucauggugagcauggaggaaccuggcugguacuccuucggguuugaaaucaaagacaagaagugcgaugugccguguauuggcaucgagaugguccacgacggaggcaaaaagaccuggcauagcgcugccacagccauuuauugccugauggggucuggacagcuucugugggauacgguuaccggcguggacauggcucucuga

SEQ ID NO: 222017 - RNA, 1401 nt, Artificial Sequence; identical to SEQ ID NO: 220782
  derived and/or modified CDS sequence (opt5) from neuraminidase__InfluenzaB__AHL91314

SEQ ID NO: 222018 - RNA, 1401 nt, Artificial Sequence; identical to SEQ ID NO: 220782
  derived and/or modified CDS sequence (opt5) from neuraminidase__InfluenzaB__AHL91325

SEQ ID NO: 222019 - RNA, 1401 nt, Artificial Sequence
  derived and/or modified CDS sequence (opt5) from neuraminidase__InfluenzaB__AHL91347
augcugcccagcaccauccagacacucacgcuguuccuuaccuccggcggggugcugcucucucuguacgucagcgccucccuuucuuaucugcucuacagcgacguucugcugaaguuuuccccuacagagauuaccgcuccgacaaugccccucgauugcgccaacgcgucuaaugugcaagcugugaacagaagcgccaccaaaggagucacacugcuucugccugaacccgaguggaccuauccucggcucuccugucccggcagcacguuccagaaggcccugcuuaucucuccucaccgcuuuggggaaaccaaaggaaauuccgcuccgcugauuaucagagagcccuucauugccugcggcccuaaggaauguaaacauuuugcucucacacacuacgccgcgcagcccgggggauauuacaacggcacccgggaggaccgcaauaagcugagacaucugaucagcgugaagcucggcaaaaucccuacaguugagaacucuauuuuccacauggccgcuugguccgggagcgccugccaugauggacgggaauggaccuauaucggcguggacgggcccgauucuaaugcucugcuuaagauuaaauacggagaggccuacacggacacauaucacuccuacgcgaacaauauccugcgcacccaggaaagcgccuguaacugcauuggcggggauuguuaucucaugaucacagacggauccgcuucuggcauuagcgagugcagauuucugaagauccgggagggccgcaucgucaaagaaauuuucccgaccgggagaguggagcacaccgaagaguguacaugcggauuugccuccaauaagacgaucgaaugugcuugccgggauaacagcuacaccgccaagcgcccuuucguuaaacuuaauguggagacagacaccgccgagauuagacugaugugcacagaaaccuaucucgauacgccccggccugaggacggcucuaucacagggcccugugaauccaacggagauaagggcagcgggggaauuaaaggcggcuuuguccaucaacgcauggcuucuaagaucgggagaugguacagccggaccauguccaaaaccaagagaaugggaaugggccuguaugugaaauacgacggggaccccuggacagauucugacgcgcuggcccucagcggagugauggucuccauggaggaaccuggcugguacagcuucggguuugagaucaaggauaagaaaugcgacguuccguguauuggcaucgagauggugcacgauggaggcaaggaaaccuggcauucugcugccacagccauuuauugccugaugggguccggacagcuucugugggacacggugaccggcgucgauauggcucucuga

SEQ ID NO: 222020 - RNA, 1401 nt, Artificial Sequence; identical to SEQ ID NO: 222019
  derived and/or modified CDS sequence (opt5) from neuraminidase__InfluenzaB__AHL91358

SEQ ID NO: 222021 - RNA, 1401 nt, Artificial Sequence; identical to SEQ ID NO: 220757
  derived and/or modified CDS sequence (opt5) from neuraminidase__InfluenzaB__AHL91369

SEQ ID NO: 222022 - RNA, 1401 nt, Artificial Sequence; identical to SEQ ID NO: 220757
  derived and/or modified CDS sequence (opt5) from neuraminidase__InfluenzaB__AHL91380

SEQ ID NO: 222023 - RNA, 1401 nt, Artificial Sequence
  derived and/or modified CDS sequence (opt5) from neuraminidase__InfluenzaB__AHL91391
augcugcccagcaccauccagacacucacgcuguuccuuaccuccggcggggugcugcucucucuguacgucagcgccucccuuucuuaucugcucuacagcgacauucugcugaaguuuuccccuaaagagaucacagcuccgaccaugccccucaacugcgccaaugcgucuaacguucaagcugugaauagaagcgccacaaagggagugacccugccucuucccgaaccugaguggacauauccccggcuguccuguccuggcagcaccuuccagaaagcccuccugauuucuccgcaccgcuuuggggaaacgaagggaaacuccgcuccccuuaucauuagagagccuuucaucgccugcggccccaaagaauguaagcauuuugcucugacccacuacgccgcgcagccugggggauauuacaauggcacacgggaggaucgcaacaagcucagacaucugaucagcgucaaacugggcaagauucccaccguggaaaauucuaucuuccacauggccgcuugguccgggagcgccugccaugacggacgggaauggacauauauuggcguugaugggccggacaacaaugcucuccugaaaaucaaguacggagaggccuacaccgauacguaucacucuuacgcgaacaauauucuucgcacacaggaauccgccuguaacugcaucggcggggacuguuaucugaugauuaccgauggaagcgcuuccggcaucucugagugcagauuucucaaaauccgggagggccgcauuaucaaggaaauuuucccuacagggagaguggagcacaccgaagaguguaccugcggauuugccagcaauaagacaaucgaaugugcuugccgggacaacuccuacacggccaaacgccccuucgucaagcugaauguggagaccgauacagccgagauuagacuuaugugcaccgaaacauaucuggacaccccucggcccgaugacggcagcaucacggggcccugugagucuaacggagauaaaggcuccgggggaaucaagggcggcuuuguucaucaacgcauggcuagcaaaauugggagaugguacucucggacaaugagcaagaccaaaagaaugggaaugggccucuaugugaaguacgacggggacccuuggaucgauuccgacgcgcugacccugucuggagucauggugagcauggaggagccgggcugguacuccuucggguuugaaauuaaggauaaaaagugcgacgugcccuguaucggcauugagaugguccacgauggaggcaaaacaaccuggcauagcgccgcuacagccaucuauugccucauggggucuggacagcugcuuugggacacgguuaccggcguggauauggcccuguga

SEQ ID NO: 222024 - RNA, 1401 nt, Artificial Sequence
  derived and/or modified CDS sequence (opt5) from neuraminidase__InfluenzaB__AHL91413
augcugcccagcaccauccagacacucacgcuguuccuuaccuccggcggggugcugcucucucuguacgucagcgccucccuuucuuaucugcucuacagcgacauucugcugaaguuuacaccuaccgagaucacagcuccgaccaugccccucgauugcgccaacgcguccaauguucaagcugugaaccugucugccacaaaaggagugacccuucugcucccugaacccgaguggacguauccuagacugagcugucccggcuccaccuuccagaaggcccuucugauuagcccucaccgguuuggggaaacaaaaggaaauucugcuccgcucaucauucgcgagcccuucaucgccugcggcccuaaggaauguaaacauuuugcucugacccacuacgccgcgcagcccgggggauauuacaacggcacaagagaggaccggaauaagcugcgccaucucaucuccgucaagcugggcaaaauuccuaccguggagaacagcaucuuccacauggccgcuuggucuggguccgccugccaugauggaaaggaauggacguauauuggcguugacgggcccgauagcaaugcccuucugaaaaucaaguacggagaggcuuacacagacaccuaucacucuuacgcgaacaauauucucagaacacaggaauccgccuguaacugcaucggcgggaauuguuaucugaugauuaccgauggaagcgcuuccggcaucucugagugccgguuucuuaaaauccgcgagggcagaauuaucaaggaaauuuucccgaccgggcgggugaagcacacagaggaauguacgugcggauuugccagcaacaaaaccaucgagugugcuugccgcgacaauuccuacacagccaagagaccuuucgucaaacugaacguggaaaccgauacagccgagauucggcucaugugcaccgagacguaucuggacacaccccgcccugaugacggcagcaucaccgggcccugugaaucuaauggaaacaagggcuccgggggaaucaaaggcggcuuuguucaucaaagaauggcuagcaagauugggcggugguacucucgcaccaugagcaaaacaaagagaaugggaaugggccuguaugugaaguacgauggggaccccuggaccgacuccgaugcgcucgcccugucuggagucauggugagcauggaggaaccuggcugguacuccuucggguuugagaucaaagacaagaaaugcgaugugccguguauuggcaucgaaaugguccacgacggaggcaaggagacauggcauagcgcugccacggccauuuauugccuuauggggucuggacagcugcucugggauaccguuacaggcguggacauggcucuguga

SEQ ID NO: 222025 - RNA, 1401 nt, Artificial Sequence
  derived and/or modified CDS sequence (opt5) from neuraminidase__InfluenzaB__AHL91446
augcugcccagcaccauccagacacucacgcuguuccuuaccuccggcggggugcugcucucucuguacgucagcgccucccuuucuuaucugcucuacagcgacauucugcugaaguuuuccccuacagagaucaccgcuccgacaaugccccucgauugcgccaacgcgucuaauguucaagcugugaacagaagcgccaccaaaggaaugacacugcuucugccugaacccgaguggaccuauccucggcucuccugucccggcagcacguuccagaaggcccugcuuauuucuccucaccgcuuuggggaaaccaaaggaaauuccgcuccgcugaucauuagagagcccuucaucgccugcggcccuaaggaauguaaacauuuugcucucacacacuacgccgcgcagcccgggggauauuacaacggcacccgggaggaccgcaauaagcugagacaucugaucagcgugaagcucggcaaaauuccuacagucgagaacucuaucuuccacauggccgcuugguccgggagcgccugccaugauggaaaggaauggaccuauauuggcguggacgggcccgauucuaaugcucugcuuaaaaucaaguacggagaggccuacacggacacauaucacuccuacgcgaacaauauucugcggacccaggaaagcgccuguaacugcaucggcgggaauuguuaucucaugauuacagauggauccgcuucuggcaucagcgagugccgcuuucugaaaaucagagagggccggauuaucaaggaaauuuucccgaccgggcgcguugagcacaccgaagaguguacaugcggauuugccuccaacaagacgaucgaaugugcuugcagagacaauagcuacaccgccaaacggccuuucgugaaacuuaacgucgagacagauaccgccgagauucgccugaugugcacagaaaccuaucucgacacgcccagaccugaugacggcucuaucacagggcccugugaguccaauggaggcaaggggagcggaggcaucaagggcggguuugugcaucaacggauggaaucuaaaauuggacgcugguacagcagaaccauguccaagaccaaacggaugggcauggggcuguauguuaaguacgauggagaccccuggacagacucugaugcucuggcgcucagcggcgugauggucuccauggaggaaccugggugguacagcuucggcuuugagaucaaggacaaagagugcgaugugccguguauuggaaucgaaauggugcacgacggcgggaaggagaccuggcauucugccgcuacagccauuuauugccugaugggauccggccagcuucugugggauacggucaccgggguuaacauggcccucuga

SEQ ID NO: 222026 - RNA, 1401 nt, Artificial Sequence
  derived and/or modified CDS sequence (opt5) from neuraminidase__InfluenzaB__AHL91457
augcugcccagcaccauccagacacucacgcuguuccuuaccuccggcggggugcugcucucucuguacgucagcgccucccuuucuuaucugcucuacagcgacauucugcugaaguuuuccccuacagagaucaccgcuccgauuaugccccucgauugcgccaacgcgucuaauguucaagcugugaacagaagcgccacaaaaggagugacccugcuucugccugaacccgaguggacauauccucggcucuccugucccggcagcaccuuccagaaggcccugcuuaucucuccucaccgcuuuggggaaacgaaaggaaauuccgcuccgcugauuaucagagagcccuucaucgccugcggcccuaaggaauguaaacauuuugcucucacccacuacgccgcgcagcccgggggauauuacaacggcacacggggcgaccgcaauaagcugagacaucugauuagcgucaagcucgggaaaaucccuaccguggagaacucuauuuuccacauggccgcuugguccggaagcgccugccaugauggcaaggaguggacauauaucgggguugacggacccgauaauaacgcucugcuuaaaauuaaguacggcgaagccuacaccgacacguaucacucuuacgcgaauaacacacugcggacccaggaguccgccuguaauugcaucgggggaaacuguuaucucaugauuacagauggcagcgcuuccggcaucucugaaugccgcuuucugaaaaucagagaggggcggauuaucaaggagauuuucccgaccggacgcgugaagcacaccgaagaguguacaugcggcuuugccagcaauaaaacgaucgaaugugcuugcagagacaacuccuacaccgccaagcggccuuucgucaaacuuaauguggagacagauaccgccgaaauucgccugaugugcacagagaccuaucucgacacgcccagaccugaugacgggagcaucacaggacccugugagucuaacggcaacaagggguccggaggcaucaaaggcggguuuguucaucaacggauggcuagcaagauuggacgcugguacucuagaaccaugagcaaaaccaagcggaugggcauggggcuguaugugaaguacgauggagaccccuggacagacuccgaugcgcuggcccucucuggcgucauggugagcauggaggaaccugggugguacuccuucggcuuugaaaucaaagacaagaaaugcgaugugccguguauuggaaucgagaugguccacgacggcgggaaggaaaccuggcauagcgcugccacagccauuuauugccugaugggaucuggccagcuucugugggauacgguuaccgggguggacauggcucucuga

SEQ ID NO: 222027 - RNA, 1401 nt, Artificial Sequence
  derived and/or modified CDS sequence (opt5) from neuraminidase__InfluenzaB__AHL91468
augcugcccagcaccauccagacacucacgcuguuccuuaccuccggcggggugcugcucucucuguacgucagcgccucccuuucuuaucugcucuacagcgacauucugcugaaguuuuccccuacagagaucaccgcuccgacaaugccccucgauugcgccaacgcgucuaauguucaagcugugaacagaagcgccaccaaaggagugacacugcuucugccugaacccgaguggaccuauccucggcucuccugucccggcagcacguuccagaaggcccugcuuauuucuccucaccgcuuuggggaaaccaaaggaaauuccgcuccgcugaucauuagagagcccuucaucgccugcggcccuaaggaauguaaacauuuugcucucacacacuacgccgcgcagcccgggggauauuacaacggcacccgggaggaccgcaauaagcugagacaucugaucagcgucaagcucggcaaaauuccuacaguggagaacucuaucuuccacauggccgcuugguccgggagcgccugccaugauggaaaggaauggaccuauauuggcguugacgggcccgauucuaaugcucugcuuaaaaucaaguacggagaggccuacacggacacauaucacuccuacgcgaacaauauucugcggacccaggaaagcgccuguaacugcaucggcgggaauuguuaucucaugauuacagauggauccgcuucuggcaucagcgagugccgcuuucugaaaaucagagagggccggauuaucaaggaaauuuucccgaccgggcgcgugaagcacaccgaggaauguacaugcggauuugccuccaacaaaacgaucgagugugcuugcagagacaauagcuacaccgccaagcggccuuucgucaaacuuaacguggaaacagauaccgccgagauucgccugaugugcacagagaccuaucucgacacgcccagaccugaugacggcucuaucacagggcccugugaauccaauggagauaagggcagcgggggaaucaaaggcggcuuuguucaucaacggauggcuucuaagauugggcgcugguacagcagaaccauguccaaaaccaagcggaugggaaugggccuguaugugaaguacgacggggaccccuggacagauucugacgcgcuggcccucagcggagucaugguguccgugggcgagccugggugguacagcuucggcuuugaaaucaaagauaagaaaugcgacgucccguguauuggaaucgagaugguucacgauggcgggaaggaaaccuggcauucugcugccacagccauuuauugccugaugggauccggccagcuucugugggacacggugaccgggguggauauggcucucuga

SEQ ID NO: 222028 - RNA, 1401 nt, Artificial Sequence
  derived and/or modified CDS sequence (opt5) from neuraminidase__InfluenzaB__AHL91479
augcugcccagcaccauccagacacucacgcuguuccuuaccuccggcggggugcugcucucucuguacgucagcgccucccuuucuuaucugcucuacagcgacauucugcugaaguuuuccccuacagagaucaccgcuccgacaaugcccucugauugcgccaacgcgagcaauguucaagcugugaacagauccgccaccaaaggagugacacuccugcuuccugaacccgaguggaccuauccucggcugagcugucccggcucuacguuccagaaggcccuccugauuuccccucaccgcuuuggggaaaccaaaggaaauagcgcuccgcuuaucauuagagagcccuucaucgccugcggcccuaaggaauguaaacauuuugcucugacacacuacgccgcgcagcccgggggauauuacaacggcacccggggcgaccgcaauaagcucagacaucugaucucugucaagcuggggaaaauuccuacaguggagaacuccaucuuccacauggccgcuuggagcggaucugccugccaugauggcaaggaguggaccuauauugggguugacggacccgauuccaaugcucuccugaaaaucaaguacggcgaagccuacacggacacauaucacagcuacgcgaacaauauucuucggacccaggaguccgccuguaacugcaucgggggaaauuguuaucugaugauuacagauggcucugcuagcggcaucuccgaaugccgcuuucucaaaaucagagaggggcggauuaucaaggagauuuucccgaccggacgcgugaagcacaccgaagaguguacaugcggcuuugccagcaacaaaacgaucgaaugugcuugcagagacaauucuuacaccgccaagcggccuuucgucaaacugaacguggagacagauaccgccgaaauucgccuuaugugcacagagaccuaucuggacacgcccagaccugaugacggguccaucacaggacccugugagagcaauggcgauaaggggucuggaggcaucaaaggcggguuuguucaucaacggauggcuagcaagauuggacgcugguacuccagaaccaugucuaaaaccaagcggaugggcauggggcucuaugugaaguacgacggagaccccuggacagauagcgacgcgcuggcccuguccggcgucauggugagcauggaggaaccugggugguacucuuucggcuuugaaaucaaagauaagaaaugcgacgugccguguauuggaaucgagaugguccacgauggcgggaaggaaaccuggcauuccgcugccacagccauuuauugccucaugggaagcggccagcugcuuugggacacgguuaccgggguggauauggcucuguga

SEQ ID NO: 222029 - RNA, 1401 nt, Artificial Sequence
  derived and/or modified CDS sequence (opt5) from neuraminidase__InfluenzaB__AHL91501
augcugcccagcaccauccagacacucacgcuguuccuuaccuccggcggggugcugcucucucuguacgucagcgccucccuuucuuaucugcucuacagcgacauucugcugaaguuuuccccuacagagaucaccgcuccgacaaugccccucgauugcgccaacgcgucuaauguucaagcugugaacagaagcgccaccaaaggaaugacacugcuucugccugaacccgaguggaccuauccucggcucuccugucccggcagcacguuccagaaggcccugcuuauuucuccucaccgcuuuggggaaaccaaaggaaauuccgcuccgcugaucauuagagagcccuucaucgccugcggcccuaaggaauguaaacauuuugcucucacacacuacgccgcgcagcccgggggauauuacaacggcacccgggaggaccgcaauaagcugagacaucugaucagcgugaagcucggcaaaauuccuacagucgagaacucuaucuuccacauggccgcuugguccgggagcgccugccaugauggaaaggaauggaccuauauuggcguggacgggcccgauucuaaugcucugcuuaaaaucaaguacggagaggccuacacggacacauaucacuccuacgcgaacaauauucugcggacccaggaaagcgccuguaacugcaucggcgggaauuguuaucucaugauuacagauggauccgcuucuggcaucagcgagugccgcuuucugaaaaucagagagggccggauuaucaaggaaauuuucccgaccgggcgcguugagcacaccgaagaguguacaugcggauuugccuccaacaagacgaucgaaugugcuugcagagacaauagcuacaccgccaaacggccuuucgugaaacuuaacgucgagacagauaccgccgagauucgccugaugugcacagaaaccuaucucgacacgcccagaccugaugacggcucuaucacagggcccugugaguccaauggaggcaaggggagcggaggcaucaagggcggguuugugcaucaacggauggaaucuaaaauuggacgcugguacagcagaaccauguccaagaccaaacggaugggcauggggcuguauguuaaguacgauggagaccccuggacagacucugaugcucuggcgcucagcggcgugauggucuccauggaggaaccugggugguacagcuucggcuuugagaucaaggacaaaaagugcgaugugccguguauuggaaucgagauggugcacgacggcgggaaagaaaccuggcauucugccgcuacagccauuuauugccugaugggauccggccagcuucugugggauacggucaccgggguuaacauggcccucuga

SEQ ID NO: 222030 - RNA, 1401 nt, Artificial Sequence
  derived and/or modified CDS sequence (opt5) from neuraminidase__InfluenzaB__AHL91512
augcugcccagcaccauccagacacucacgcuguuccuuaccuccggcggggugcugcucucucuguacgucagcgccucccuuucuuaucugcucuacagcgacauucugcugaaguuuuccccuacagagaucaccgcuccgacaaugccccucgauugcgccaacgcgucuaauguucaagcugugaacagaagcgccaccaaaggagugacacugcuucugccugaacccgaguggaccuauccucggcucuccugucccggcagcauuuuccagaaggcccugcuuaucucuccucaccgcuuuggggaaacgaaaggaaauuccgcuccgcugauuaucagagagcccuucaucgccugcggcccuaaggaauguaaacauuuugcucucacccacuacgccgcgcagcccgggggauauuacaacggcacacggggcgaccgcaauaagcugagacaucugauuagcgucaagcucgggaaaaucccuaccguggagaacucuauuuuccacauggccgcuugguccggaagcgccugccaugauggcaaggaguggacauauaucgggguugacggacccgauucuaaugcucugcuuaaaauuaaguacggcgaagccuacaccgacacguaucacuccuacgcgaacaauauccugcggacacaggagagcgccuguaacugcauugggggaaauuguuaucucaugaucaccgauggcuccgcuucuggcaucagcgaaugccgcuuucugaaaauuagagaggggcggaucauuaaggagaucuucccgacaggacgcgugaagcacaccgaagaguguaccugcggcuuugccuccaacaaaacaauugaaugugcuugcagagacaauagcuacacggccaagcggccuuucgucaaacuuaacguggagaccgauacagccgaaauccgccugaugugcaccgagacauaucucgacacccccagaccugaugacgggucuaucacgggacccugugaguccaauggcgauaaggggagcggaggcauuaaaggcggguuuguucaucaacggauggcuucuaagaucggacgcugguacagcagaacaauguccaaaaccaagcggaugggcauggggcuguaugugaaguacgacggagaccccuggaccgauucugacgcgcuggcccucagcggcgucaugguguccauggaggaaccugggugguacagcuucggcuuugaaauuaaagauaagaaaugcgacgugccguguaucggaauugagaugguccacgauggcgggaaggaaacauggcauucugcugccaccgccaucuauugccugaugggauccggccagcuucugugggacacaguuacggggguggauauggcucucuga

SEQ ID NO: 222031 - RNA, 1401 nt, Artificial Sequence
  derived and/or modified CDS sequence (opt5) from neuraminidase__InfluenzaB__AHL91523
augcugcccagcaccauccagacacucacgcuguuccuuaccuccggcggggugcugcucucucuguacgucagcgccucccuuucuuaucugcucuacagcgacauucugcugaaguuuuccccuacagagaucaccgcuccgacaaugccccucgauugcgccaacgcgucuaauguucaagcugugaacagaagcgccaccaaaggagugacacugcuucugccugaacccgaguggaccuauccucggcucuccugucccggcagcacguuccagaaggcccugcuuauuucuccucaccgcuuuggggaaaccaaaggaaauuccgcuccgcugaucauuagagagcccuucaucgccugcggcccuaaggaauguaaacauuuugcucucacacacuacgccgcgcagcccgggggauauuacaacggcacccggggcgaccgcaauaagcugagacaucugaucagcgucaagcucgggaaaauuccuacaguggagaacucuaucuuccacauggccgcuugguccggaagcgccugccaugauggcaaggaguggaccuauauugggguugacggacccgauaauaacgcucugcuuaaaaucaaguacggcgaagccuacacggacacauaucacucuuacgcgaauaacauucugcggacccaggaguccgccuguaauugcaucgggggaaacuguuaucucaugauuacagauggcagcgcuuccggcaucucugaaugccgcuuucugaaaaucagagaggggcggauuaucaaggagauuuucccgaccggacgcgugaagcacaccgaagaguguacaugcggcuuugccagcaauaaaacgaucgaaugugcuugcagagacaacuccuacaccgccaagcggccuuucgucaaacuuaauguggagacagauaccgccgaaauucgccugaugugcacagagaccuaucucgacacgcccagaccugaugacgggagcaucacaggacccugugagucuaacggcgauaagggguccggaggcaucaaaggcggguuuguucaucaacggauggcuagcaagauuggacgcugguacucuagaaccaugagcaaaaccaagcggaugggcauggggcuguaugugaaguacgacggagaccccuggacagauuccgacgcgcuggcccucucuggcgucauggugagcauggaggaaccugggugguacuccuucggcuuugaaaucaaagauaagaaaugcgacgugccguguauuggaaucgagaugguccacgauggcgggaaggaaaccuggcauagcgcugccacagccauuuauugccugaugggaucuggccagcuucugugggacacgguuaccgggguggauauggcucucuga

SEQ ID NO: 222032 - RNA, 1401 nt, Artificial Sequence; identical to SEQ ID NO: 222029
  derived and/or modified CDS sequence (opt5) from neuraminidase__InfluenzaB__AHL91534

SEQ ID NO: 222033 - RNA, 1401 nt, Artificial Sequence
  derived and/or modified CDS sequence (opt5) from neuraminidase__InfluenzaB__AHL91545
augcugcccagcaccauccagacacucacgcuguuccuuaccuccggcggggugcugcucucucuguacgucagcgccucccuuucuuaucugcucuacagcgacauucugcugaaguuuuccccuacagagaucaccgcuccgacaaugccccucgauugcgccaacgcgucuaauguucaagcugugaacagaagcgccaccaaaggagugacacugcuucugccugaacccgaguggaccuauccucggcucuccugucccggcagcacguuccagaaggcccugcuuauuucuccucaccgcuuuggggaaaccaaaggaaauuccgcuccgcugaucauuagagagcccuucaucgccugcggcccuaaggaauguaaacauuuugcucucacacacuacgccgcgcagcccgggggauauuacaacggcacccggggcgaccgcaauaagcugagacaucugaucagcgucaagcucgggaaaauuccuacaguggagaacucuaucuuccacauggccgcuugguccggaagcgccugccaugauggcaaggaguggaccuauauugggguugacggacccgauucuaaugcucugcuuaaaaucaaguacggcgaagccuacacggacacauaucacuccuacgcgaacaauauucugcggacccaggagagcgccuguaacugcaucgggggaaauuguuaucucaugauuacagauggcuccgcuucuggcaucagcgaaugccgcuuucugaaaaucagagaggggcggauuaucaaggagauuuucccgaccggacgcgugaagcacaccgaagaguguacaugcggcuuugccuccaacaaaacgaucgaaugugcuugcagagacaauagcuacaccgccaagcggccuuucgucaaacuuaacguggagacagauaccgccgaaauucgccugaugugcacagagaccuaucucgacacgcccagaccugaugacgggucuaucacaggacccugugaguccaauggcgauaaggggagcggaggcaucaaaggcggguuuguucaucaacggaugaccucuaagauuggacgcugguacagcagaaccauguccaaaacaaagcggaugggcauggggcuguaugugaaguacgacggagaccccuggaccgauucugacgcucuggcgcucagcggcgucaugguguccauggaggaaccugggugguacagcuucggcuuugaaaucaaagauaagaaaugcgacgugccguguauuggaaucgagaugguccacgauggcgggaagggaacauggcauucugccgcuacggccauuuauugccugaugggcuccgggcagcuucugugggacaccguuacaggaguggauauggcccucuga

SEQ ID NO: 222034 - RNA, 1401 nt, Artificial Sequence; identical to SEQ ID NO: 222029
  derived and/or modified CDS sequence (opt5) from neuraminidase__InfluenzaB__AHL91556

SEQ ID NO: 222035 - RNA, 1401 nt, Artificial Sequence; identical to SEQ ID NO: 222029
  derived and/or modified CDS sequence (opt5) from neuraminidase__InfluenzaB__AHL91578

SEQ ID NO: 222036 - RNA, 1401 nt, Artificial Sequence; identical to SEQ ID NO: 220957
  derived and/or modified CDS sequence (opt5) from neuraminidase__InfluenzaB__AHL91589

SEQ ID NO: 222037 - RNA, 1401 nt, Artificial Sequence
  derived and/or modified CDS sequence (opt5) from neuraminidase__InfluenzaB__AHL91600
augcugcccagcaccauccagacacucacgcuguuccuuaccacaggcggggugcugcucucccuguacgucucugccagccuuuccuaucugcucuacucugacauucugcugaaguuuagcccuaccgagaucacagcuccgaccaugccccucgauugcgccaacgcguccaauguucaagcugugaacagaucugccacaaaaggagugaccuuccugcuuccugaacccgaguggacguauccucggcugagcugucccggcuccaccuuucagaaggcccuccugauuagcccucaccgcuucggggaaacaaaaggaaauucugcuccgcuuaucauuagagagcccuuuaucgccugcggcccuaaggaauguaaacauuucgcucugacccacuacgccgcgcagcccgggggauauuacaacggcacacggggcgaccgcaauaagcucagacaucugaucuccgucaagcuggggaaaauuccuaccguggagaacagcaucuuucacauggccgcuuggucuggauccgccugccaugauggcaaggaguggacguauauugggguugacggacccgauagcaaugcucuccugaaaaucaaguacggcgaagccuacacagacaccuaucacucuuacgcgaacaauauucuucggacacaggaguccgccuguaacugcaucgggggaaauuguuaucugaugauuaccgauggcagcgcuuccggcaucucugaaugccgcuuccucaaaaucagagaggggcggauuaucaaggagauuuuuccgaccggacgcgugaagcacacagaagaguguacgugcggcuucgccagcaacaaaaccaucgaaugugcuugcagagacaauuccuacacagccaagcggccuuuugucaaacugaacguggagaccgauacagccgaaauucgccuuaugugcaccgagacguaucuggacacacccagaccugaugacgggagcaucaccggacccugugagucuaauggcgauaagggguccggaggcaucaaaggcggguucguucaucaacggauggcuagcaagauuggacgcugguacucuagaaccaugagcaaaacaaagcggaugggcauggggcucuaugugaaguacgacggagaccccuggaccgauuccgacgcgcuggcccugucuggcgucauggugagcauggaggaaccugggugguacuccuuuggcuucgaaaucaaagauaagaaaugcgacgugccguguauuggaaucgagaugguccacgauggcgggaaggaaacauggcauagcgcugccacggccauuuauugccucaugggaucuggccagcugcuuugggacaccguuacagggguggauauggcucuguga

SEQ ID NO: 222038 - RNA, 1401 nt, Artificial Sequence; identical to SEQ ID NO: 222037
  derived and/or modified CDS sequence (opt5) from neuraminidase__InfluenzaB__AHL91611

SEQ ID NO: 222039 - RNA, 1401 nt, Artificial Sequence; identical to SEQ ID NO: 222029
  derived and/or modified CDS sequence (opt5) from neuraminidase__InfluenzaB__AHL91622

SEQ ID NO: 222040 - RNA, 1401 nt, Artificial Sequence; identical to SEQ ID NO: 222030
  derived and/or modified CDS sequence (opt5) from neuraminidase__InfluenzaB__AHL91633

SEQ ID NO: 222041 - RNA, 1401 nt, Artificial Sequence; identical to SEQ ID NO: 222030
  derived and/or modified CDS sequence (opt5) from neuraminidase__InfluenzaB__AHL91644

SEQ ID NO: 222042 - RNA, 1401 nt, Artificial Sequence
  derived and/or modified CDS sequence (opt5) from neuraminidase__InfluenzaB__AHL91655
augcugcccagcaccauccagacacucacgcuguuccuuaccuccggcggggugcugcucucucuguacgucagcgccucccuuucuuaucugcucuacagcgacauucugcugaaguuuuccccuacagagaucaccgcuccgacaaugccccucgauugcgccaacgcgucuaauguucaagcugugaacagaagcgccaccaaagaagugacacugcuucugccugagcccgaauggaccuauccucggcucuccugucccggaagcacguuccagaaggcccugcuuauuucuccucaccgcuuuggcgagaccaaaggaaauuccgcuccgcugaucauuagagaacccuucaucgccugcgggccuaaggaguguaaacauuuugcucucacacacuacgccgcgcagcccggcggguauuacaacggaacccggggcgaccgcaauaagcugagacaucugaucagcgucaagcucggcaaaauuccuacaguggagaacucuaucuuccacauggccgcuugguccgggagcgccugccaugauggaaaggaauggaccuauauuggcguugacgggcccgauucuaaugcucugcuuaaaaucaaguacggagaggccuacacggacacauaucacuccuacgcgaacaauauucugcggacccaggaaagcgccuguaacugcaucggcgggaauuguuaucucaugauuacagauggauccgcuucuggcaucagcgagugccgcuuucugaaaaucagagagggccggauuaucaaggaaauuuucccgaccgggcgcgugaagcacaccgaggaauguacaugcggauuugccuccaacaaaacgaucgagugugcuugcagagacaauagcuacaccgccaagcggccuuucgucaaacuuaacguggaaacagauaccgccgagauucgccugaugugcacagagaccuaucucgacacgcccagaccugaugacggcucuaucacagggcccugugaauccaauggagauaagggcagcgggggaaucaaaggcggcuuuguucaucaacggauggcuucuaagauugggcgcugguacagcagaaccauguccaaaaccaagcggaugggaaugggccuguaugugaaguacgacggggaccccuggacagauucugacgcgcuggcccucagcggagucaugguguccauggaggaaccuggcugguacagcuucggguuugagaucaaagauaagaaaugcgacgugccguguauuggcaucgaaaugguccacgauggaggcaaggagaccuggcauucugcugccacagccauuuauugccugaugggguccggacagcuucugugggacacgguuaccggcguggauauggcucucuga

SEQ ID NO: 222043 - RNA, 1401 nt, Artificial Sequence; identical to SEQ ID NO: 222029
  derived and/or modified CDS sequence (opt5) from neuraminidase__InfluenzaB__AHL91666

SEQ ID NO: 222044 - RNA, 1401 nt, Artificial Sequence; identical to SEQ ID NO: 222030
  derived and/or modified CDS sequence (opt5) from neuraminidase__InfluenzaB__AHL91677

SEQ ID NO: 222045 - RNA, 1401 nt, Artificial Sequence; identical to SEQ ID NO: 222031
  derived and/or modified CDS sequence (opt5) from neuraminidase__InfluenzaB__AHL91688

SEQ ID NO: 222046 - RNA, 1401 nt, Artificial Sequence; identical to SEQ ID NO: 220759
  derived and/or modified CDS sequence (opt5) from neuraminidase__InfluenzaB__AHL91699

SEQ ID NO: 222047 - RNA, 1401 nt, Artificial Sequence
  derived and/or modified CDS sequence (opt5) from neuraminidase__InfluenzaB__AHL91710
augcugcccagcaccauccagacacucacgcuguuccuuaccuccggcggggugcugcucucucuguacgucagcgccucccuuucuuaucugcucuacagcgacauucugcugaaguuuuccccuacagagaucaccgcuccgacaaugccccucgauugcgccaacgcgucuaauguucaagcugugaaccacagcgccaccaaaggagugacacugcuucugccugaacccgaguggaccuauccuagacucuccugucccggcagcacguuccagaaggcccugcuuauuucuccucaucgguuuggggaaaccaaaggaaauuccgcuccgcugaucauucgcgagcccuucaucgccugcggcccuaaggaauguaaacacuuugcucucacacauuacgccgcgcagcccgggggauauuacaacggcaccagaggcgaccggaauaagcugcgccaccugaucagcgucaagcucgggaaaauuccuacaguggagaacucuaucuuccauauggccgcuugguccggaagcgccugccacgauggcaaggaguggaccuauauugggguugacggacccgauucuaaugcucugcuuaaaaucaaguacggcgaagccuacacggacacauaucacuccuacgcgaacaauauucugagaacccaggagagcgccuguaacugcaucgggggaaauuguuaucucaugauuacagauggcuccgcuucuggcaucagcgaaugccgguuucugaaaauccgcgaggggagaauuaucaaggagauuuucccgaccggacgggugaagcauaccgaagaguguacaugcggcuuugccuccaacaaaacgaucgaaugugcuugccgcgacaauagcuacaccgccaagagaccuuucgucaaacuuaacguggagacagauaccgccgaaauucggcugaugugcacagagaccuaucucgacacgccccgcccugaugacgggucuaucacaggacccugugaguccaauggcgauaaggggagcggaggcaucaaaggcggguuuguucaccaaagaauggcuucuaagauuggacggugguacagccgcaccauguccaaaaccaagagaaugggcauggggcuguaugugaaguacgacggagaccccuggacagauucugacgcgcuggcccucagcggcgucaugguguccauggaggaaccugggugguacagcuucggcuuugaaaucaaagauaagaaaugcgacgugccguguauuggaaucgagaugguccaugauggcgggaaggaaaccuggcacucugcugccacagccauuuauugccugaugggauccggccagcuucugugggacacgguuaccgggguggauauggcucucuga

SEQ ID NO: 222048 - RNA, 1401 nt, Artificial Sequence; identical to SEQ ID NO: 220686
  derived and/or modified CDS sequence (opt5) from neuraminidase__InfluenzaB__AHL91721

SEQ ID NO: 222049 - RNA, 1401 nt, Artificial Sequence; identical to SEQ ID NO: 220754
  derived and/or modified CDS sequence (opt5) from neuraminidase__InfluenzaB__AHL91732

SEQ ID NO: 222050 - RNA, 1401 nt, Artificial Sequence; identical to SEQ ID NO: 220686
  derived and/or modified CDS sequence (opt5) from neuraminidase__InfluenzaB__AHL91743

SEQ ID NO: 222051 - RNA, 1401 nt, Artificial Sequence
  derived and/or modified CDS sequence (opt5) from neuraminidase__InfluenzaB__AHL91754
augcugcccagcaccauccagacacucacgcugcuucugaccuccggcggggugcuccugucucuuuacgucagcgccucccugucuuaucuccuguacagcgacauucugcucaaguucuccccuacagagaucaccgcuccgacaaugccccuggauugcgccaacgcgucuaauguucaagcugugaacagaagcgccaccaaaggagugacacuucugcucccugaacccgaguggaccuauccucggcuguccugucccggcagcacguuucagaaggcccuucugauuucuccucaccgcuucggggaaaccaaaggaaauuccgcuccgcucaucauuagagagcccuuuaucgccugcggcccuaaggaauguaaacauuucgcucugacacacuacgccgcgcagcccgggggauauuacaacggcacccggggcgaccgcaauaagcugagacaucucaucagcgucaagcuggggaaaauuccuacaguggagaacucuaucuuucacauggccgcuugguccggaagcgccugccaugauggcaaggaguggaccuauauugggguugacggacccgauucuaaugcucugcuuaaaaucaaguacggcgaagccuacacggacacauaucacuccuacgcgaacaauauucuccggacccaggagagcgccuguaacugcaucgggggaaauuguuaucugaugauuacagauggcuccgcuucuggcaucagcgaaugccgcuuccuuaaaaucagagaggggcggauuaucaaggagauuuuuccgaccggacgcgugaagcacaccgaagaguguacaugcggcuucgccuccaacaaaacgaucgaaugugcuugcagagacaauagcuacaccgccaagcggccuuuugucaaacugaacguggagacagauaccgccgaaauucgccucaugugcacagagaccuaucuggacacgcccagaccugaugacgggucuaucacaggacccugugaguccaauggcgauaaggggagcggaggcaucaaaggcggguucguucaucaacggauggcuucuaagauuggacgcugguacagcagaaccauguccaaaaccaagcggaugggcauggggcuguaugugaaguacgacggagaccccuggacagauucugacgcgcucgcccugagcggcgucaugguguccauggaggaaccugggugguacagcuuuggcuucgaaaucaaagauaagaaaugcgacgugccguguauuggaaucgagaugguccacgauggcgggaaggaaaccuggcauucugcugccacagccauuuauugccuuaugggauccggccagcugcucugggacacgguuaccgggguggauauggcucuguga

SEQ ID NO: 222052 - RNA, 1401 nt, Artificial Sequence; identical to SEQ ID NO: 220686
  derived and/or modified CDS sequence (opt5) from neuraminidase__InfluenzaB__AHL91765

SEQ ID NO: 222053 - RNA, 1401 nt, Artificial Sequence
  derived and/or modified CDS sequence (opt5) from neuraminidase__InfluenzaB__AHL91776
augcugcccagcaccauccagacacucacgcuguuccuuaccuccggcggggugcugcucucucuguacgucagcgccucccuuucuuaucugcucuacagcgacauucugcugaaguuuuccccuacagagaucaccgcuccgacaaugccccucgauugcgccaacgcgucuaauguucaagcugugaacagaagcgccaccaaaggagugacacugcuucugccugaacccgaguggaccuauccucggcucuccugucccggcagcacguuccagaaggcccugcuuauuucuccucaccgcuuuggggaaaccaaaggaaauuccgcuccgcugaucauuagagagcccuucaucgccugcggcccuaaggaauguaaacauuuugcucucacacacuacgccgcgcagcccgggggauauuacaacggcacccggggcgaccgcaauaagcugagacaucugaucagcgucaagcucgggaaaauuccuacaguggagaccucuaucuuccacauggccgcuugguccggaagcgccugccaugauggcaaggaguggacguauauugggguugacggacccgauaacaaugcucugcuuaaaaucaaguacggcgaagccuacacagacaccuaucacucuuacgcgaacaauauucugcggacacaggaguccgccuguaacugcaucgggggaaauuguuaucucaugauuaccgauggcagcgcuuccggcgugucugaaugccgcuuucugaaaaucagagaggggcggaucauuaaggagaucuucccgaccggacgcgucaagcacacagaagaguguacgugcggcuuugccagcaacaaaaccauugaaugugcuugcagagacaauuccuacacagccaagcggccuuucgugaaacuuaacguugagaccgauacagccgaaauccgccugaugugcaccgagacguaucucgacacacccagaccugaugacgggagcauuaccggacccugugagucuaauggcgauaagggguccggaggcaucaaaggcggguuugugcaucaacggauggcuagcaagaucggacgcugguacucuagaaccaugagcaaaacagaacggaugggcauggggcuguaugucaaguacgacggagaccccugggcggauuccgacgcccuggcucucucuggcgugauggugagcauggaggaaccugggugguacuccuucggcuuugagauuaaggauaaaaagugcgacgucccguguaucggaauugaaaugguucacgauggcgggaaagagaccuggcauagcgccgccacagcuaucuauugccugaugggaucuggccagcuucugugggacacggugaccgggguggauauggcccucuga

SEQ ID NO: 222054 - RNA, 1401 nt, Artificial Sequence; identical to SEQ ID NO: 222053
  derived and/or modified CDS sequence (opt5) from neuraminidase__InfluenzaB__AHL91787

SEQ ID NO: 222055 - RNA, 1401 nt, Artificial Sequence; identical to SEQ ID NO: 222053
  derived and/or modified CDS sequence (opt5) from neuraminidase__InfluenzaB__AHL91798

SEQ ID NO: 222056 - RNA, 1401 nt, Artificial Sequence; identical to SEQ ID NO: 220690
  derived and/or modified CDS sequence (opt5) from neuraminidase__InfluenzaB__AHL91809

SEQ ID NO: 222057 - RNA, 1401 nt, Artificial Sequence
  derived and/or modified CDS sequence (opt5) from neuraminidase__InfluenzaB__AHL91820
augcugcccagcaccauccagacacucacgcuguuccuuaccuccggcggggugcugcucucucuguacgucagcgccucccuuucuuaucugcucuacagcgacauucugcugaaguuuuccccuacagagaucaccgcuccgacaaugccccucgauugcgccaacgcgucuaauguucaagcugugaacagaagcgccaccaaaggagugacacugcuucugccugaacccgaguggaccuauccucggcucuccugucccggcagcacguuccagaaggcccugcuuauuucuccucaccgcuuuggggaaaccaaaggaaauuccgcuccgcugaucauuagagagcccuucaucgccugcggcccuaacgaauguaagcauuuugcucucacacacuacgccgcgcagcccgggggauauuacaauggcacccggggcgaccgcaacaaacugagacaucugaucagcgucaagcucgggaagauuccuacaguggaaaauucuaucuuccacauggccgcuugguccggaagcgccugccaugauggcaaagaguggaccuauauugggguugacggacccgauaacaaugcucugcuuaagaucaaauacggcgaggccuacacggacacauaucacucuuacgcgaacaauauucugcggacccaggaguccgccuguaacugcaucgggggaaauuguuaucucauggugacagauggcagcgcuuccggcgucucugaaugccgcuuucugaagauuagagaggggcggaucaucaaagagauuuucccgaccggacgcgugaagcacaccgaagaguguacaugcggcuuugccagcaacaagacgaucgaaugugcuugcagagacaauuccuacaccgccaaacggccuuucguuaaacuuaacguggagacagauaccgccgaaauucgccugaugugcacagagaccuaucucgacacgcccagaccugaugacgggagcaucacaggacccugugagucuaacggcgauaagggguccggaggcauuaagggcggguuuguccaucaacggauggcuagcaaaaucggacgcugguacucuagaaccaugagcaagaccgaacggaugggcauggggcuguaugugaaauacgacggagaccccugggcggauuccgacgcccuggcucucucuggcgugauggucagcauggaggaaccugggugguacuccuucggcuuugagaucaaggauaagaaaugcgacguuccguguauuggaaucgaaauggugcacgauggcgggaaggagacauggcauagcgccgccaccgcuauuuauugccugaugggaucuggccagcuucugugggacacagugacgggggucgauauggcccucuga

SEQ ID NO: 222058 - RNA, 1401 nt, Artificial Sequence
  derived and/or modified CDS sequence (opt5) from neuraminidase__InfluenzaB__AHL91831
augcugcccagcaccauccagacacucacgcuguuccuuaccuccggcggggugcugcucucucuguacgucagcgccucccuuucuuaucugcucuacagcgacauucugcugaaguuuuccccuacagagaucaccgcuccgacaaugccccucgauugcgccaacgcgucuaauguucaagcugugaacagaagcgccaccaaaggagugacacugcuucugccugaacccgaguggaccuauccucggcucuccugucccggcagcacguuccagaaggcccugcuuauuucuccucaccgcuuuggggaaaccaaaggaaauuccgcuccgcugaucauuagagagcccuucaucgccugcggcccuaacgaauguaagcauuuugcucucacacacuacgccgcgcagcccgggggauauuacaauggcacccggggcgaccgcaacaaacugagacaucugaucagcgucaagcucgggaagauuccuacaguggaaaauucuaucuuccacauggccgcuugguccggaagcgccugccaugauggcaaagaguggaccuauauugggguugacggacccgauaacaaugcucugcuuaagaucaaauacggcgaggccuacacggacacauaucacucuuacgcgaacaauauucugcggacccaggaguccgccuguaacugcaucgggggaaauuguuaucucaugauuacagauggcagcgcuuccggcgugucugaaugccgcuuucugaagaucagagaggggcggaucauuaaagagaucuucccgaccggacgcgucaagcacaccgaagaguguacaugcggcuuugccagcaacaagacgauugaaugugcuugcagagacaauuccuacaccgccaaacggccuuucgugaaacuuaacguugagacagauaccgccgaaauccgccugaugugcacagagaccuaucucgacacgcccagaccugaugacgggagcauuacaggacccugugagucuaacggcgauaagggguccggaggcaucaagggcggguuugugcaucaacggaugaccagcaaaaucggacgcugguacucuagaaccaugagcaagacagaacggaugggcauggggcuguaugucaaauacgacggagaccccugggcugauuccgacgcgcuggcccucucuggcgugauggugagcauggaggaaccugggugguacuccuucggcuuugagauuaaggauaagaaaugcgacgucccguguaucggaauugaaaugguucacgauggcgggaaggagaccuggcauagcgcugccacagccaucuauugccugaugggaucuggccagcuucugugggacacggugaccgggguggauauggcucucuga

SEQ ID NO: 222059 - RNA, 1401 nt, Artificial Sequence; identical to SEQ ID NO: 221203
  derived and/or modified CDS sequence (opt5) from neuraminidase__InfluenzaB__AHL91842

SEQ ID NO: 222060 - RNA, 1401 nt, Artificial Sequence
  derived and/or modified CDS sequence (opt5) from neuraminidase__InfluenzaB__AHL91853
augcugcccagcaccauccagacacucacgcuguuccuuaccuccggcggggugcugcucucucuguacgucagcgccucccuuucuuaucugcucuacagcgacauucugcugaaguuuuccacaaccgagaucacagcuccuaccaugccgucugauugcgccaacgcgagcaauguucaagcugugaacagauccgccacaaaaggagugacccuccugcuucccgaaccugaguggacguauccccggcugagcuguccuggcucuaccuuccagaaggcccuccugauuagcccccaccgcuuuggggaaacaaaaggaaauuccgcuccucuuaucauuagagagccguucaucgccugcggccccaaggaauguaaacauuuugcucugacccacuacgccgcgcagccugggggauauuacaacggcacacgggaggaccgcaauaagcucagacaucugaucucugucaagcugggcaaaauucccaccguggagaacuccaucuuccacauggccgcuuggagcgggucugccugccaugauggaaaggaauggacguauauuggcguugacgggccugauuccaaugcucuccugaaaaucaaguacggagaggccuacacagacaccuaucacagcuacgcgaacaauauucuucggacacaggaauccgccuguaacugcaucggcgggaauuguuaucugaugauuaccgauggaucugcuagcggcaucuccgagugccgcuuucucaaaaucagagagggccggauuaucaaggaaauuuuccccaccgggcgcgugaagcacacagaggaauguacgugcggauuugccagcaacaaaaccaucgagugugcuugcagagacaauucuuacacagccaagcggccguucgucaaacugaacguggaaaccgauacagccgagauucgccuuaugugcaccgagacguaucuggacacaccuagacccgaugacggcuccaucaccgggccuugugaaagcaauggaaacaagggcucugggggaaucaaaggcggcuuuguucaucaacggauggcuagcaagauugggcgcugguacuccagaaccaugucuaaaacaaagcggaugggaaugggccucuaugugaaguacgauggggaccccuggaccgacagcgaugcgcuggcccuguccggagucauggugagcauggaggaacccggcugguacucuuucggguuugagaucaaagacaagaaaugcgaugugccuuguauuggcaucgaaaugguccacgacggaggcaaggagacauggcauuccgcugccacggccauuuauugccucauggggagcggacagcugcuuugggauaccguuacaggcguggacauggcucuguga

SEQ ID NO: 222061 - RNA, 1401 nt, Artificial Sequence; identical to SEQ ID NO: 221201
  derived and/or modified CDS sequence (opt5) from neuraminidase__InfluenzaB__AHL91864

SEQ ID NO: 222062 - RNA, 1401 nt, Artificial Sequence; identical to SEQ ID NO: 221201
  derived and/or modified CDS sequence (opt5) from neuraminidase__InfluenzaB__AHL91875

SEQ ID NO: 222063 - RNA, 1401 nt, Artificial Sequence; identical to SEQ ID NO: 220958
  derived and/or modified CDS sequence (opt5) from neuraminidase__InfluenzaB__AHL91886

SEQ ID NO: 222064 - RNA, 1401 nt, Artificial Sequence; identical to SEQ ID NO: 220699
  derived and/or modified CDS sequence (opt5) from neuraminidase__InfluenzaB__AHL91897

SEQ ID NO: 222065 - RNA, 1401 nt, Artificial Sequence; identical to SEQ ID NO: 220699
  derived and/or modified CDS sequence (opt5) from neuraminidase__InfluenzaB__AHL91908

SEQ ID NO: 222066 - RNA, 1401 nt, Artificial Sequence
  derived and/or modified CDS sequence (opt5) from neuraminidase__InfluenzaB__AHL91919
augcugcccagcaccauccagacacucacgcuguuccuuaccuccggcggggugcugcucucucuguacgucagcgccucccuuucuuaucugcucuacagcgacauucugcugaaguuuucccaaacagagaucaccgcuccuauuaugccgcucgauugcgccaacgcgucuaauguucaggcugugaacagaagcgccacaaaaggagugacaccccugcuuccugaacccgaguggaccuauccucggcuguccugucccggcagcaccuuccagaaggcccuccugaucucuccucaccgcuuuggggaaacgaaaggaaauuccgcuccgcuuauuaucagagagcccuucaucgccugcggcccuaaggaauguaaacauuuugcucugacccacuacgccgcgcagcccgggggauauuacaacggcacacgggaggaccgcaauaagcucagacaucugauuagcgucaagcugggcaaaaucccuaccguggagaacucuauuuuccacauggccgcuugguccgggagcgccugccaugauggacgggaauggacauauaucggcguugacgggcccgauucuaaugcucuccugaagauuaaauacggagaggccuacaccgacacguaucacuccuacgcgaagaacauccuucgcacacaagaaagcgccuguaauugcauuggcggggauuguuaucugaugaucaccgacggaccggcuuccggcaucucugagugcagauuucucaaaauucgggagggccgcaucauuaaggaaaucuucccuacagggagagugaagcacaccgaggaauguaccugcggauuugccagcaacaaaacaauugagugugcuugccgggauaauuccuacacggccaagcgccccuucgucaaacugaacguggaaaccgacacagccgagaucagacuuaugugcaccgagacauaucuggauaccccucggcccaaugacggcagcaucacggggcccugugaaucuaacggagauaagggcuccgggggaauuaaaggcggcuuuguucaucagcgcauggcuagcaagaucgggagaugguacucucggacaaugagcaaaaccaagagaaugggaaugggccucuaugugaaguacgacggggacccuuggaccgauuccgaggcgcuggcccugucuggagucauggugagcauggaggaaccgggcugguacuccuucggguuugaaauuaaagacaagaaaugcgaugugcccuguaucggcauugagaugguccacgacggaggcaagacaaccuggcauagcgcugccacagccaucuauugccucauggggucuggacagcugcuuugggauacgguuaccggcguggacauggcucuguga

SEQ ID NO: 222067 - RNA, 1401 nt, Artificial Sequence; identical to SEQ ID NO: 221761
  derived and/or modified CDS sequence (opt5) from neuraminidase__InfluenzaB__AHL91930

SEQ ID NO: 222068 - RNA, 1401 nt, Artificial Sequence; identical to SEQ ID NO: 220699
  derived and/or modified CDS sequence (opt5) from neuraminidase__InfluenzaB__AHL91941

SEQ ID NO: 222069 - RNA, 1401 nt, Artificial Sequence; identical to SEQ ID NO: 220699
  derived and/or modified CDS sequence (opt5) from neuraminidase__InfluenzaB__AHL91952

SEQ ID NO: 222070 - RNA, 1401 nt, Artificial Sequence; identical to SEQ ID NO: 220742
  derived and/or modified CDS sequence (opt5) from neuraminidase__InfluenzaB__AHL91963

SEQ ID NO: 222071 - RNA, 1401 nt, Artificial Sequence
  derived and/or modified CDS sequence (opt5) from neuraminidase__InfluenzaB__AHL91974
augcugcccagcaccauccagacacucacgcuguuccuuaccuccggcggggugcugcucucucuguacgucagcgccucccuuucuuaucugcucuacagcgacauucugcugaaguuuuccccuacagagaucaccacaccgaccaugccccucgauugcgcuaacgccucuaauguucaagcggugaacagaagcgcuacaaaaggagugacccugcuucugccugaacccgaguggacguauccucggcucuccugucccggcagcaccuuccagaaggcccugcuuauuucuccucaccgcuuuggggaaacaaaaggaaauuccgccccgcugaucauuagagagcccuucaucgcuugcggcccuaacgaauguaagcauuuugcccucacccacuacgcugcccagcccgggggauauuacaauggcacacggggcgaccgcaacaaacugagacaucugaucagcgucaagcucgggaagauuccuaccguggaaaauucuaucuuccacauggcggccugguccggaagcgcuugccaugauggcaaagaguggacguauauugggguugacggacccgauaacaaugcccugcuuaagaucaaauacggcgaggcuuacacagacaccuaucacucuuacgccaacaauauucugcggacacaggaguccgcguguaacugcaucgggggaaauuguuaucucaugauuaccgauggcagcgccuccggcgugucugaaugccgcuuucugaagaucagagaggggcggaucauuaaagagaucuucccgaccggacgcgucaagcacacagaagaguguacgugcggcuuugcuagcaacaagaccauugaaugugccugcagagacaauuccuacacagcuaaacggccuuucgugaaacuuaacguugagaccgauacagccgaaauccgccugaugugcaccgacacguaucucgauacacccagaccugacgaugggagcauuaccggacccugugagucuaacggcgacaagggguccggaggcaucaagggcggguuugugcaucaacggauggccagcaaaaucggacgcugguacucuagaaccaugagcaagacagagcggaugggcauggggcuguaugucaaauacgacggagaucccugggcugacuccgaugcgcuggccuucucuggcgugauggugagcaugaaggaaccugggugguacuccuuuggcuucgagauuaaggacaaaaagugcgaugucccguguaucggaauugaaaugguucacgacggcgggaaagagaccuggcauagcgcugccacagccaucuauugccucaugggaucuggccagcugcuuugggauacggugaccgggguggacauggcucuguga

SEQ ID NO: 222072 - RNA, 1401 nt, Artificial Sequence; identical to SEQ ID NO: 220742
  derived and/or modified CDS sequence (opt5) from neuraminidase__InfluenzaB__AHL91985

SEQ ID NO: 222073 - RNA, 1401 nt, Artificial Sequence; identical to SEQ ID NO: 220699
  derived and/or modified CDS sequence (opt5) from neuraminidase__InfluenzaB__AHL91995

SEQ ID NO: 222074 - RNA, 1401 nt, Artificial Sequence
  derived and/or modified CDS sequence (opt5) from neuraminidase__InfluenzaB__AHL92006
augcugcccagcaccauccagacacucacgcuguuccuuaccuccggcggggugcugcucucucuguacgucagcgccucccuuucuuaucugcucuacagcgacauucugcugaaguuuuccccuacagagaucaccgcuccgacaaugccccucgauugcgccaacgcgucuaauguucaagcugugaacagaagcgccaccaaaggagugacacugcuucugccugaacccgaguggaccuauccucggcucuccugucccggcagcacguuccagaaggcccugcuuauuucuccucaccgcuuuggggaaaccaaaggaaauuccgcuccgcugaucauuagagagcccuucaucgccugcggcccuaacgaauguaagcauuuugcucucacacacuacgccgcgcagcccgggggauauuacaauggcacccggggcgaccgcaacaaacugagacaucugaucagcgucaagcucgggaagauuccuacaguggaaaauucuaucuuccacauggccgcuugguccggaagcgccugccaugauggcaaagaguggaccuauauugggguugacggacccgauaacaaugcucugcuuaagaucaaauacggcgaggccuacacggacacauaucacucuuacgcgaacaagauucugcggacccaggaguccgccuguaauugcaucgggggaaacuguuaucucaugauuacagauggcagcgcuuccggcgugucugaaugccgcuuucugaaaaucagagaggggcggaucauuaaggagaucuucccgaccggacgcgucaagcacaccgaagaguguacaugcggcuuugccagcaauaaaacgauugaaugugcuugcagagacaacuccuacaccgccaagcggccuuucgugaaacuuaauguugagacagauaccgccgaaauccgccugaugugcacagacaccuaucucgauacgcccagaccugacgaugggagcauuacaggacccugugagucuaacggcgacaagggguccggaggcaucaaaggcggguuugugcaucaacggauggcuagcaagaucggacgcugguacucuagaaccaugagcaaaaccgagcggaugggcauggggcuguaugucaaguacgacggagaucccugggcggacuccgaugcccuggcuuucucuggcgugauggugagcaugaaggaaccugggugguacuccuuuggcuucgagauuaaagacaagaaaugcgaugucccguguaucggaguugaaauggugcacgacggcgggaaggagacauggcauagcgccgccaccgcuauuuauugccucaugggaucuggccagcugcuuugggauacagugacgggggucgacauggcccuguga

SEQ ID NO: 222075 - RNA, 1401 nt, Artificial Sequence; identical to SEQ ID NO: 220707
  derived and/or modified CDS sequence (opt5) from neuraminidase__InfluenzaB__AHL92017

SEQ ID NO: 222076 - RNA, 1401 nt, Artificial Sequence; identical to SEQ ID NO: 220707
  derived and/or modified CDS sequence (opt5) from neuraminidase__InfluenzaB__AHL92028

SEQ ID NO: 222077 - RNA, 1401 nt, Artificial Sequence
  derived and/or modified CDS sequence (opt5) from neuraminidase__InfluenzaB__AHL92039
augcugcccagcaccauccagacacucacgcuguuccuuaccuccggcggggugcugcucucucuguacgucagcgccucccuuucuuaucugcucuacagcgacauucugcugaaguuuuccccuacagagaucaccgcuccgacaaugccccucgauugcgccaacgcgucuaauguucacgcugugaacagaagcgccaccaaaggagugacacugcuucugccugaacccgaguggauuuauccucggcucuccugucccggcagcaccuuccaaaaggcccugcuuaucucuccucaucgcuuuggggaaacgaaaggaaauuccgcuccgcugauuaucagagagcccuucaucgccugcggcccuaacgaauguaagcacuuugcucucacccauuacgccgcgcagcccgggggauauuacaauggcacacggggcgaccgcaacaaacugagacaccugauuagcgucaagcucgggaagaucccuaccguggaaaauucuauuuuccauauggccgcuugguccggaagcgccugccacgauggcaaagaguggacauauaucgggguugacggacccgauaacaaugcucugcuuaagauuaaauacggcgaggccuacaccgacacguaucacucuuacgcgaacaauauccugcggacacaggaguccgccuguaacugcauugggggaaauuguuaucucaugaucaccgauggcagcgcuuccggcgugucugaaugccgcuuucugaagaucagagaggggcggauuaucaaagagauuuucccgacaggacgcgucaagcauaccgaagaguguaccugcggcuuugccagcaacaagacaaucgaaugugcuugcagagacaauuccuacacggccaaacggccuuucgugaaacuuaacguugagaccgauacagccgaaauucgccugaugugcaccgacacauaucucgauacccccagaccugacgaugggagcaucacgggacccugugagucuaacggcgacaagggguccggaggcaucaagggcggguuugugcaccagcggauggcuagcaaaauuggacgcugguacucuagaacaaugagcaagaccgagcggaugggcauggggcuguaugucaaauacaauggagaccccugggcggauuccgacgcccuggcuuucucuggcgugauggugagcaugaaggaaccugggugguacuccuuuggcuucgagaucaaggauaaaaagugcgacgucccguguauuggaaucgaaaugguucaugauggcgggaaagagaccuggcacagcgccgccacagcuauuuauugccucaugggaucuggccaacugcuuugggacaccgugacagggguggauauggcccuguga

SEQ ID NO: 222078 - RNA, 1401 nt, Artificial Sequence; identical to SEQ ID NO: 220707
  derived and/or modified CDS sequence (opt5) from neuraminidase__InfluenzaB__AHL92050

SEQ ID NO: 222079 - RNA, 1401 nt, Artificial Sequence
  derived and/or modified CDS sequence (opt5) from neuraminidase__InfluenzaB__AHL92061
augcugcccagcaccacacagacgcucacccuguuccuuacauccggcggggugcugcucucucuguacgucagcgccucccuuucuuaucugcucuacagcgacauccugcugaaguuuuccccuaccgagauuacagcuccgaccaugccccucgauugcgccaacgcgucuaauguucaagcugugaacagaagcgccacaaaaggagugacccugcuucugccugaacccgaguggacguauccucggcucuccugucccggcagcaccuuccagaaggcccugcuuaucucuccucaccgcuuuggggaaacaaaaggaaauuccgcuccgcugauuaucagagagcccuucauugccugcggcccuaacgaauguaagcauuuugcucucacccacuacgccgcgcagcccgggggauauuacaauggcacacggggcgaccgcaacaaacugagacaucugaucagcgucaagcucgggaagaucccuaccguggaaaauucuauuuuccacauggccgcuugguccggaagcgccugccaugauggcaaagaguggacguauaucgggguugacggacccgauaacaaugcucugcuuaagauuaaauacggcgaggccuacacagacaccuaucacucuuacgcgaacaagauccugcggacacaggaguccgccuguaauugcauugggggaaacuguuaucucaugaucaccgauggcagcgcuuccggcgugucugaaugccgcuuucugaaaauuagagaggggcggaucaucaaggagauuuucccgaccggacgcgucaagcacacagaagaguguacgugcggcuuugccagcaauaaaaccaucgaaugugcuugcagagacaacuccuacacagccaagcggccuuucgugaaacuuaauguugagaccgauacagccgaaauucgccugaugugcaccgacacguaucucgauacacccagaccugacgaugggagcaucaccggacccugugagucuaacggcgacaagggguccggaggcauuaaaggcggguuugugcaucaacggauggcuagcaagaucggacgcugguacucuagaaccaugagcaaaacagagcggaugggcauggggcuguaugucaaguacgacggagaucccugggcggacuccgaugcccuggcuuucucuggcgugauggugagcaugaaggaaccugggugguacuccuuuggcuucgagaucaaagacaagaaaugcgaugucccguguauuggaaucgaaaugguucacgacggcgggaaggagaccuggcauagcgccgccacagcuauuuauugccucaugggaucuggccagcugcuuugggauacggugaccgggguggacauggcccuguga

SEQ ID NO: 222080 - RNA, 1401 nt, Artificial Sequence
  derived and/or modified CDS sequence (opt5) from neuraminidase__InfluenzaB__AHL92072
augcugcccagcaccauccagacacucacgcuguuccuuaccuccggcggggugcugcucucucuguacgucagcgccucccuuucuuaucugcucuacagcgacauucugcugaaguuuuccccuacagagaucaccgcuccgacaaugccccucgauugcgccaacgcgucuaauguucaagcugugaaccacagcgccaccaaaggagugacacugcuucugccugaacccgaguggaccuauccuagacucuccugucccggcagcacguuccagaaggcccugcuuauuucuccucaucgguuuggggaaaccaaaggaaauuccgcuccgcugaucauucgcgagcccuucaucgccugcggcccuaacgaauguaagcacuuugcucucacacauuacgccgcgcagcccgggggauauuacaauggcaccagaggcgaccggaacaaacugcgccaccugaucagcgucaagcucgggaagauuccuacaguggaaaauucuaucuuccauauggccgcuugguccggaagcgccugccacgauggcaaagaguggaccuauauugggguugacggacccgauaacaaugcucugcuuaagaucaaauacggcgaggccuacacggacacauaucacucuuacgcgaacaagauucugagaacccaggaguccgccuguaauugcaucgggggaaacuguuaucucaugauuacagauggcagcgcuuccggcgugucugaaugccgguuucugaaaauccgcgaggggagaaucauuaaggagaucuucccgaccggacgggucaagcauaccgaagaguguacaugcggcuuugccagcaauaaaacgauugaaugugcuugccgcgacaacuccuacaccgccaagagaccuuucgugaaacuuaauguugagacagauaccgccgaaauccggcugaugugcacagacaccuaucucgauacgccccgcccugacgaugggagcauuacaggacccugugagucuaacggcgacaagggguccggaggcaucaaaggcggguuugugcaccaaagaauggcuagcaagaucggacggugguacucucgcaccaugagcaaaaccgagagaaugggcauggggcuguaugucaaguacgacggagaucccugggcggacuccgaugcccuggcuuucucuggcgugauggugagcaugaaggaaccugggugguacuccuuuggcuucgagauuaaagacaagaaaugcgaugucccguguaucggaauugaaaugguucaugacggcgggaaggagacauggcacagcgccgccaccgcuaucuauugccucaugggaucuggccagcugcuuugggauacagugacggggguggacauggcccuguga

SEQ ID NO: 222081 - RNA, 1401 nt, Artificial Sequence; identical to SEQ ID NO: 222080
  derived and/or modified CDS sequence (opt5) from neuraminidase__InfluenzaB__AHL92083

SEQ ID NO: 222082 - RNA, 1401 nt, Artificial Sequence; identical to SEQ ID NO: 222080
  derived and/or modified CDS sequence (opt5) from neuraminidase__InfluenzaB__AHL92094

SEQ ID NO: 222083 - RNA, 1401 nt, Artificial Sequence
  derived and/or modified CDS sequence (opt5) from neuraminidase__InfluenzaB__AHL92105
augcugcccagcaccauccagacacucacgcuguuccuuaccuccggcggggugcugcucucucuguacgucagcgccucccuuucuuaucugcucuacagcgacauucugcugaaguuuuccccuacagagaucaccgcuccgacaaugccccucgauugcgccaacgcgucuaauguucacgcugugaacagaagcgccaccaaaggagugacacugcuucugccugaacccgaguggaccuauccucggcucuccugucccggcagcacguuccaaaaggcccugcuuauuucuccucaucgcuuuggggaaaccaaaggaaauuccgcuccgcugaucauuagagagcccuucaucgccugcggcccuaacgaauguaagcacuuugcucucacacauuacgccgcgcagcccgggggauauuacaauggcacccggggcgaccgcaacaaacugagacaccugaucagcgucaagcucgggaagauuccuacaguggaaaauucuaucuuccauauggccgcuugguccggaagcgccugccacgauggcaaagaguggaccuauauugggguugacggacccgauaacaaugcucugcuuaagaucaaauacggcgaggccuacacggacacauaucacucuuacgcgaacaauauucugcggacccaggaguccgccuguaacugcaucgggggaaauuguuaucucaugauuacagauggcagcgcuuccggcgugucugaaugccgcuuucugaagaucagagaggggcggaucauuaaagagaucuucccgaccggacgcgucaagcauaccgaagaguguacaugcggcuuugccagcaacaagacgauugaaugugcuugcagagacaauuccuacaccgccaaacggccuuucgugaagcugaacguugagacagauaccgccgaaauccgccuuaugugcacagacaccuaucucgauacgcccagaccugacgaugggagcauuacaggacccugugagucuaacggcgacaaagggggaggcggcaucaaagggggauuugugcaccagcggauggcuuccaagaucggccgcugguacagcagaaccaugucuaagaccgagcggauggggaugggacuguaugucaaauacgacggcgaucccugggcggacagcgaugcccuggcuuucuccggggugauggugucucucaaggaaccuggcugguacagcuuuggauucgagauuaaggacaaaaagugcgaugucccguguaucggcauugaaaugguucaugacgggggaaaagagacauggcacuccgccgccaccgcuaucuauugccugaugggcagcgggcaacuucugugggauacagugacgggaguggacauggcccucuga

SEQ ID NO: 222084 - RNA, 1401 nt, Artificial Sequence; identical to SEQ ID NO: 220860
  derived and/or modified CDS sequence (opt5) from neuraminidase__InfluenzaB__AHL92116

SEQ ID NO: 222085 - RNA, 1401 nt, Artificial Sequence; identical to SEQ ID NO: 222080
  derived and/or modified CDS sequence (opt5) from neuraminidase__InfluenzaB__AHL92127

SEQ ID NO: 222086 - RNA, 1401 nt, Artificial Sequence; identical to SEQ ID NO: 222080
  derived and/or modified CDS sequence (opt5) from neuraminidase__InfluenzaB__AHL92138

SEQ ID NO: 222087 - RNA, 1401 nt, Artificial Sequence; identical to SEQ ID NO: 222080
  derived and/or modified CDS sequence (opt5) from neuraminidase__InfluenzaB__AHL92149

SEQ ID NO: 222088 - RNA, 1401 nt, Artificial Sequence
  derived and/or modified CDS sequence (opt5) from neuraminidase__InfluenzaB__AHL92171
augcugcccagcaccauccagacacucacgcuguuccuuaccuccggcggggugcugcucucucuguacgucagcgccucccuuucuuaucugcucuacagcgacauucugcugaaguuuuccccuacagagaucaccgcuccgacaaugccccucgauugcgccaacgcgucuaauguucaagcugugaaccacagcgccaccaaaggagugacacugcuucugccugaacccgaguggaccuauccuagacucuccugucccggcagcacguuccagaaggcccugcuugucucuccucaucgguuuggggaaaccaaaggaaauuccgcuccgcugauuauccgcgagcccuucauugccugcggcccuaacgaauguaagcacuuugcucucacacauuacgccgcgcagcccgggggauauuacaauggcaccagaggcgaccggaacaaacugcgccaccugaucagcgugaagcucgggaagaucccuacaguugaaaauucuauuuuccauauggccgcuugguccggaagcgccugccacgauggcaaagaguggaccuauaucgggguggacggacccgauaacaaugcucugcuuaagauuaaauacggcgaggccuacacggacacauaucacucuuacgcgaacaagauccugagaacccaggaguccgccuguaauugcauugggggaaacuguuaucucaugaucacagauggcagcgcuuccggcgucucugaaugccgguuucugaaaauucgcgaggggagaaucaucaaggagauuuucccgaccggacgggugaagcauaccgaagaguguacaugcggcuuugccagcaauaaaacgaucgaaugugcuugccgcgacaacuccuacaccgccaagagaccuuucguuaaacuuaauguggagacagauaccgccgaaauucggcugaugugcacagacaccuaucucgauacgccccgcccugacgaugggagcaucacaggacccugugagucuaacggcgacaagggguccggaggcauuaaaggcggguuuguccaccaaagaauggcuagcaagaucggacggugguacucucgcaccaugagcaaaaccgagagaaugggcauggggcuguaugugaaguacgacggagaucccugggcggacuccgaugcccuggcuuucucuggcgugauggucagcaugaaggaaccugggugguacuccuuuggcuucgagaucaaagacaagaaaugcgauguuccguguauuggaaucgaaauggugcaugacggcgggaaggagacauggcacagcgccgccaccgcuauuuauugccucaugggaucuggccagcugcuuugggauacagugacgggggucgacauggcccuguga

SEQ ID NO: 222089 - RNA, 1401 nt, Artificial Sequence
  derived and/or modified CDS sequence (opt5) from neuraminidase__InfluenzaB__AHL92182
augcugcccagcaccauccagacacucacgcuguuccuuaccuccggcggggugcugcucucucuguacgucagcgccucccuuucuuaucugcucuacagcgacauucugcugaaguuuuccccuacagagaucaccgcuccgacaaugccccucgauugcgccaacgcgucuaauguucacgcugugaacagaagcgccaccaaaggagugacacugcuucugccugaacccgagugggccuauccucggcucuccugucccggcagcaccuuccaaaaggcucugcuuauuucuccucaucgcuuuggggaaacgaaaggaaauuccgccccgcugaucauuagagagcccuucaucgcuugcggcccuaacgaauguaagcacuuugcccucacccauuacgcggcccagcccgggggauauuacagcggcacacggggcgaccgcaauaaacugagacaccugaucucugucaagcucgggaagauuccuaccguggagaacuccaucuuccauauggcugccuggagcggaucugcuugccacgauggcaaagaguggacauauauugggguugacggacccgauaauaacgcccugcuuaagaucaaauacggcgaagcguacaccgacacguaucacuccuacgccaauaacauucugcggacacaggagagcgcuuguaauugcaucgggggaaacuguuaucucaugauuaccgauggcuccgccucuggcgugagcgaaugccgcuuucugaagaucagagaggggcggaucauuaaagagaucuucccgacaggacgcgucaagcauaccgaagaguguaccugcggcuuugcuuccaauaagacaauugaaugugccugcagagacaacagcuacacggccaaacggccuuucgugaaacuuaauguugagaccgauacagcugaaauccgccugaugugcaccgacacauaucucgauacccccagaccugacgaugggucuauuacgggacccugugaguccaacggcgacaaggggagcggaggcaucaagggcggguuugugcaccagcggauggcgucuaaaaucggacgcugguacagcagaacaauguccaagaccgagcggaugggcauggggcuguaugucaaauacgacggagaucccugggccgacucugaugcucuggccuucagcggcgugaugguguccaugaaggaaccugggugguacagcuuuggcuucgagauuaaggacaaaaagugcgaugucccguguaucggaauugaaaugguucaugacggcgggaaagagaccuggcacucugccgcuacagccaucuauugccucaugggauccggccaacugcuuugggauaccgugacagggguggacauggcgcuguga

SEQ ID NO: 222090 - RNA, 1401 nt, Artificial Sequence; identical to SEQ ID NO: 222089
  derived and/or modified CDS sequence (opt5) from neuraminidase__InfluenzaB__AHL92193

SEQ ID NO: 222091 - RNA, 1401 nt, Artificial Sequence; identical to SEQ ID NO: 220860
  derived and/or modified CDS sequence (opt5) from neuraminidase__InfluenzaB__AHL92204

SEQ ID NO: 222092 - RNA, 1401 nt, Artificial Sequence
  derived and/or modified CDS sequence (opt5) from neuraminidase__InfluenzaB__AHL92215
augcugcccagcaccauccagacacucacgcuguuccuuaccuccggcggggugcugcucucucuguacgucagcgccucccuuucuuaucugcucuacagcgacauucugcugaaguuuuccccuacagagaucaccgcuccgacaaugccccucgauugcgccaacgcgucuaauguucaagcugugaaccacagcgccaccaaaggagugacacugcuucugccugaacccgaguggaccuauccuagacucuccugucccggcagcacguuccagaaggcccugcuuauuucuccucaucgguuuggggaaaccaaaggaaauuccgcuccgcugaucauucgcgagcccuucaucgccugcggcccuaacgaauguaagcacuuugcucucacacauuacgccgcgcagcccgggggauauuacaauggcaccagaggcgaccggaacaaacugcgccaccugaucagcgucaagcucgggaagauuccuacaguggaaaauucuaucuuccauauggccgcuugguccggaagcgccugccacgauggcaaagaguggaccuauauugggguugacggacccgauaacaaugcucugcuuaagaucaaauacggcgaggccuacacggacacauaucacucuuacgcgaacaagauucugagaacccaggaguccgccuguaauugcaucgggggaaacuguuaucucaugauuacagauggcagcgcuuccggcgugucugaaugccgguuucugaaaauccgcgaggggagaaucauuaaggagaucuucccgaagggacgggucaaacauaccgaagaguguaccugcggcuuugccagcaauaagacaauugaaugugcuugccgcgacaacuccuacacggccaaaagaccuuucgugaaacuuaauguugagaccgauacagccgaaauccggcugaugugcaccgacacauaucucgauacgccccgcccugacgaugggagcauuaccggacccugugagucuaacggcgacaagggguccggaggcaucaagggcggguuugugcaccaaagaauggcuagcaaaaucggacggugguacucucgcacaaugagcaagaccgagagaaugggcauggggcuguaugucaaguacgacggagaucccugggcggacuccgaugcccuggcuuucucuggcgugauggugagcaugaaagaaccugggugguacuccuuuggcuucgagauuaaggacaaaaagugcgaugucccguguaucggaauugaaaugguucaugacggcgggaaagagaccuggcacagcgccgccacagcuaucuauugccucaugggaucuggccagcugcuuugggauaccgugacagggguggacauggcccuguga

SEQ ID NO: 222093 - RNA, 1401 nt, Artificial Sequence; identical to SEQ ID NO: 222080
  derived and/or modified CDS sequence (opt5) from neuraminidase__InfluenzaB__AHL92226

SEQ ID NO: 222094 - RNA, 1401 nt, Artificial Sequence; identical to SEQ ID NO: 220860
  derived and/or modified CDS sequence (opt5) from neuraminidase__InfluenzaB__AHL92237

SEQ ID NO: 222095 - RNA, 1401 nt, Artificial Sequence; identical to SEQ ID NO: 222080
  derived and/or modified CDS sequence (opt5) from neuraminidase__InfluenzaB__AHL92248

SEQ ID NO: 222096 - RNA, 1401 nt, Artificial Sequence
  derived and/or modified CDS sequence (opt5) from neuraminidase__InfluenzaB__AHL92259
augcugcccagcaccauccagacacucacgcuguuccuuaccuccggcggggugcugcucucucuguacgucagcgccucccuuucuuaucugcucuacagcgacauucugcugaaguuuuccccuacagagaucaccgcuucuacaaugccgcucgauugcgccaacgcgagcaauguucaagcugugaacagauccgccaccaaaggagugacacugcuucugcccgaaccugaguggaccuauccccggcucagcuguccuggcucuacguuccagaaggcccugcuuauuagcccccaccgcuuuggggaaaccaaaggaaauuccgcuccucugaucauuagagagccguucaucgccugcggccccaacgaauguaagcauuuugcucucacacacuacgccgcgcagccugggggauauuacaauggcacccggggcgaccgcaacaaacugagacaucugaucucugucaagcucgggaagauucccacaguggaaaauuccaucuuccacauggccgcuuggagcggaucugccugccaugauggcaaagaguggaccuauauugggguugacggaccugauaacgacgcucugcuuaagaucaaauacggcgaggccuacacggauacauaucacuccuacgcgaauaagauucugcggacccaggagagcgccuguaacugcaucgggggaaauuguuaucucaugauuacagacggcuccgcuucuggcgugagcgaaugccgcuuucugaaaaucagagaggggcggaucauuaaggagaucuuccccaccggacgcgucaagcacaccgaagaguguacaugcggcuuugccuccaacaaaacgauugaaugugcuugcagagauaauagcuacaccgccaagcggccguucgugaaacuuaacguugagacagacaccgccgaaauccgccugaugugcacagauaccuaucucgacacgccuagacccgaugacgggucuauuacaggaccuugugaguccaauggcgacaaggggagcggaggcaucaaaggcggguuugugcaucaacggaugaccucuaagaucggacgcugguacagcagaaccauguccaaaacagagcggaugggcauggggcuguaugucaaguacgauggagaccccugggcugauucugacgcgcuggccuucagcggcgugaugguguccaugaaggaacccgggugguacagcuuuggcuucgagauuaaagauaagaaaugcgacgucccuuguaucggaauugaaaugguucacgauggcgggaaggagaccuggcauucugcugccacagccaucuauugccucaugggauccggccagcugcuuugggacacggugaccgggguggauauggcucuguga

SEQ ID NO: 222097 - RNA, 1401 nt, Artificial Sequence; identical to SEQ ID NO: 222080
  derived and/or modified CDS sequence (opt5) from neuraminidase__InfluenzaB__AHL92270

SEQ ID NO: 222098 - RNA, 1401 nt, Artificial Sequence
  derived and/or modified CDS sequence (opt5) from neuraminidase__InfluenzaB__AHL92281
augcugcccagcaccauccagacacucacgcuguuccuuaccuccggcggggugcugcucucucuguacgucagcgccucccuuucuuaucugcucuacagcgacauucugcugaaguuuuccccuacagagaucaccgcuccgacaaugccccucgauugcgccaacgcgucuaauguucaagcugccaaccacagcgccaccaaaggagugacacugcuucugccugaacccgaguggaccuauccuagacucuccugucccggcagcacguuccagaaggcucugcuuauuucuccucaucgguuuggggaaaccaaaggaaauuccgccccgcugaucauucgcgagcccuucaucgcuugcggcccuaacgaauguaagcacuuugcccucacacauuacgcggcccagcccgggggauauuacaauggcaccagaggcgaccggaacaaacugcgccaccugaucagcgugaagcucgggaagauuccuacagucgaaaauucuaucuuccauauggcugccugguccggaagcgcuugccacgauggcaaagaguggaccuauauugggguggacggacccgauaacaaugcccugcuuaagaucaaauacggcgaggcguacacggacacauaucacucuuacgccaacaagauucugagaacccaggaguccgcuuguaauugcaucgggggaaacuguuaucucaugauuacagauggcagcgccuccggcguuucugaaugccgguuucugaaaauccgcgaggggagaaucauuaaggagaucuucccgaccggacgggugaagcauaccgaagaguguacaugcggcuuugcuagcaauaaaacgauugaaugugccugccgcgacaacuccuacaccgccaagagaccuuucgucaaacuuaauguggagacagauaccgcugaaauccggcugaugugcacagacaccuaucucgauacgccccgcccugacgaugggagcauuacaggacccugugagucuaacggcgacaagggguccggaggcaucaaaggcggguuuguucaccaaagaauggcgagcaagaucggacggugguacucucgcaccaugagcaaaaccgagagaaugggcauggggcuguaugugaaguacgacggagaucccugggccgacuccgaugcucuggccuucucuggcgucauggugagcaugaaggaaccugggugguacuccuuuggcuucgagauuaaagacaagaaaugcgaugugccguguaucggaauugaaaugguccaugacggcgggaaggagacauggcacagcgccgcuaccgccaucuauugccucaugggaucuggccagcugcuuugggauacaguuacggggguggacauggcgcuguga

SEQ ID NO: 222099 - RNA, 1401 nt, Artificial Sequence
  derived and/or modified CDS sequence (opt5) from neuraminidase__InfluenzaB__AHL92303
augcugcccagcaccauccagacacucacgcuguuccuuaccuccggcggggugcugcucucucuguacgucagcgccucccuuucuuaucugcucuacagcgacauucugcugaaguuuuccccuacagagaucaccgcuccgacaaugccccucgauugcgccaacgcgucuaauguucacgcugugaacagaagcgccaccaaaggagugacauuccugcuuccugaacccgaguggaccuauccucggcuguccugucccggcagcacguuucaaaaggcccuccugauuucuccucaucgcuucggggaaaccaaaggaaauuccgcuccgcuuaucauuagagagcccuuuaucgccugcggcccuaacgaauguaagcacuucgcucugacacauuacgccgcgcagcccgggggauauuacaauggcacccggggcgaccgcaacaaacucagacaccugaucagcgucaagcuggggaagauuccuacaguggaaaauucuaucuuucauauggccgcuugguccggaagcgccugccacgauggcaaagaguggaccuauauugggguugacggacccgauaacaaugcucuccugaagaucaaauacggcgaggccuacacggacacauaucacucuuacgcgaacaauauucuucggacccaggaguccgccuguaacugcaucgggggaaauuguuaucugaugauuacagauggcagcgcuuccggcgugucugaaugccgcuuccucaagaucagagaggggcggaucauuaaagagaucuuuccgaccggacgcgucaagcauaccgaagaguguacaugcggcuucgccagcaacaagacgauugaaugugcuugcagagacaauuccuacaccgccaaacggccuuuugugaagcugaacguugagacagauaccgccgaaauccgccuuaugugcacagacaccuaucuggauacgcccagaccugacgaugggagcauuacaggacccugugagucuaacggcaauaaaggguccggaggcaucaagggcggguucgugcaccagcggauggcuagcaaaaucggacgcugguacucuagaaccaugagcaagaccgagcggaugggcauggggcucuaugucaaauacgacggagaccccugggcggauuccgacgcccuggcuuuuucuggcgugauggugagcaugaaggaaccugggugguacuccuucggcuucgagauuaaggauaaaaagugcgacgucccguguaucggaauugaaaugguucaugauggcgggaaagagacauggcacagcgccgccaccgcuaucuauugccugaugggaucuggccaacuccugugggacacagugacggggguggauauggcccuuuga

SEQ ID NO: 222100 - RNA, 1401 nt, Artificial Sequence
  derived and/or modified CDS sequence (opt5) from neuraminidase__InfluenzaB__AHL92314
augcugcccagcaccauccagacacucacgcuguuccuuaccuccggcggggugcugcucucucuguacgucagcgccucccuuucuuaucugcucuacagcgacauucugcugaaguuuucccaaacaaaaaucaccgcuccuauuaugccgcucgauugcgccaacgcgucuaauguucaggcugugaacagaagcgccgccaagggagugacacugcuucugcccgagccugaauggaccuauccccggcucuccuguccuggcagcacauuccagaaagcucugcuuaucucuccccaccgcuuuggggagaccaagggaaauuccgccccucugauuaucagagaaccguucaucgcuugcggccccacggaguguaaacauuuugcccucacccacuacgcggcccagccugggggauauuacaacggcacacgggaagaccgcaauaagcugagacaucugauuagcgucaagcucggcaaaauccccaccguggagaacucuauuuuccacauggcugccugguccgggagcgcuugccaugauggaaaggaguggacauauguuggcguggacgggccugauucuaaugcccugcuuaaaaucaaguacggagaagcguacaccgacacguaucacuccuacgccaaaaacauucugcggacacaagagagcgcuuguaauugcaucggcggggauuguuaucucaugauuaccgacggacccgccuccggcaucucugaaugccgcuuucugaagaucagagagggccggauuaucaaggagauuuucccgacagggcgcgucaaacacaccgaagaguguaccugcggauuugcuagcaacaagacaaucgaaugugccugcagagauaauuccuacacggccaaacggccuuucgugaaacuuaacguugagaccgacacagcugaaauucgccugaugugcaccgagacauaucucgauacccccagaccuaaugacggcagcaucacggggcccugugagucugauggagacaagggcuccgggggaaucaagggcggcuuugugcaucagcggauggcgagcaaaauugggcgcugguacucuagaacaaugagcaagaccaagcggaugggaaugggccuguaugucaaauacgacggggaucccuggaccgacuccgaagcccuggcucucucuggagugauggugagcauggaugagccuggcugguacuccuucggguuugaaaucaaggacaaaaagugcgaugucccguguauuggcaucgagaugguucacgacggaggcaaaacaaccuggcauagcgccgccacagcuauuuauugccugauggggucuggacagcuucugugggauacggugaccggcguggacauggcccucuga

SEQ ID NO: 222101 - RNA, 1401 nt, Artificial Sequence
  derived and/or modified CDS sequence (opt5) from neuraminidase__InfluenzaB__AHL92325
augcugcccagcaccauccagacacucacgcuguuccuuaccuccggcggggugcugcucucucuguacgucagcgccucccuuucuuaucugcucuacagcgacauucugcugaaguuuucccaaacagagaucaccgcuccuauuaugccgcucgauugcgccaacgcgucuaauguucaggcugugaacagaagcgccgccaaaggagugacacugcuucugcccgaaccugaguggaccuauccccggcucuccuguccuggcagcacauuccagaaggcucugcuuaucucuccccaccgcuuuggggaaaccaaaggaaauuccgccccucugauuaucagagagccguucaucgcuugcggccccacggaauguaagcauuuugcccucacccacuacgcggcccagccugggggauauuacaacggcacacgggaggaccgcaauaaacugagacaucugauuagcgucaagcucggcaagauccccaccguggagaacucuauuuuccacauggcugccugguccgggagcgcuugccaugauggaaaagaauggacauauaucggcguugacgggccugauucuaaugcccugcuuaagauuaaauacggagaggcguacaccgacacguaucacuccuacgccaagaacauccugcggacacaagaaagcgcuuguaauugcauuggcggggauuguuaucucaugaucaccgacggacccgccuccggcaucucugagugccgcuuucugaaaauuagagagggccggaucauuaaggaaaucuucccgacagggcgcgugaagcacaccgaggaauguaccugcggauuugcuagcaacaaaacaauugagugugccugcagagauaauuccuacacggccaagcggccuuucgucaaacuuaacguggaaaccgacacagcugagauccgccugaugugcaccgagacauaucucgauacccccagaccuaaugacggcagcaucacggggcccugugaaucugauggagacaagggcuccgggggaauuaaaggcggcuuuguucaucagcggauggcgagcaagaucgggcgcugguacucuagaacaaugagcaaaaccaagcggaugggaaugggccuguaugugaaguacgacggggaucccuggaccgacuccgaggcccuggcucucucuggagucauggugagcaugggcgaaccugggugguacuccuucggcuuugagauuaaagauaagaaaugcgacgugccguguaucggaauugaaaugguccacgauggcgggaagacaaccuggcauagcgccgccacagcuaucuauugccugaugggaucuggccagcuucugugggacacgguuaccgggguggauauggcccucuga

SEQ ID NO: 222102 - RNA, 1401 nt, Artificial Sequence; identical to SEQ ID NO: 220860
  derived and/or modified CDS sequence (opt5) from neuraminidase__InfluenzaB__AHL92336

SEQ ID NO: 222103 - RNA, 1401 nt, Artificial Sequence
  derived and/or modified CDS sequence (opt5) from neuraminidase__InfluenzaB__AHL92358
augcugcccagcaccauccagacacucacgcuguuccuuaccuccggcggggugcugcucucucuguacgucagcgccucccuuucuuaucugcucuacagcgacauucugcugaaguuuucccaaacagagaucaccgcuccuauuaugccgcucgauugcgccaacgcgucuaauguucaggcugugaacagaagcgccgccaaaggagugacacugcuucugcccgaaccugaguggaccuauccccggcucuccuguccuggcagcacauuccagaaggcucugcuuaucucuccccaccgcuuuggggaaaccaaaggaaauuccgccccucugauuaucagagagccguucaucgcuugcggccccaaggaauguaaacauuuugcccucacgcacuacgcggcccagccugggggauauuacaacggcacccgggaggaccgcaauaagcugagacaucugauuagcgucaagcucggcaaaauccccacaguggagaacucuauuuuccacauggcugccugguccgggagcgcuugccaugauggaaaggaauggaccuauguuggcguggacgggccugauucuaaugcccugcuuaaaaucaaguacggagaggcguacacagacaccuaucacuccuacgccaaaaacauucugcggacgcaagaaagcgcuuguaauugcaucggcggggauuguuaucucaugauuacagacggacccgccuccggcaucucugagugccgcuuucugaagaucagagagggccggauuaucaaggaaauuuucccgaccgggcgcgucaaacacacagaggaauguaccugcggauuugcuagcaacaagaccaucgagugugccugcagagauaauuccuacacagccaaacggccuuucgugaaacuuaacguugaaacggacaccgcugagauucgccugaugugcacagagaccuaucucgauacacccagaccuaaugacggcagcaucaccgggcccugugaaucugauggagacaagggcuccgggggaaucaagggcggcuuugugcaucagcggauggcgagcaaaauugggcgcugguacucuagaacgaugagcaagacaaagcggaugggaaugggccuguaugucaaauacgacggggaucccuggaccgacuccgaggcccuggcucucucuggagugauggugagcauggaggaaccuggcugguacuccuucggguuugaaaucaaggauaaaaagugcgacgucccguguauuggcaucgagaugguucacgauggaggcaaaaccacauggcauagcgccgccaccgcuauuuauugccugauggggucuggacagcuucugugggacacagugacgggcguggauauggcccucuga

SEQ ID NO: 222104 - RNA, 1401 nt, Artificial Sequence; identical to SEQ ID NO: 222103
  derived and/or modified CDS sequence (opt5) from neuraminidase__InfluenzaB__AHL92369

SEQ ID NO: 222105 - RNA, 1401 nt, Artificial Sequence
  derived and/or modified CDS sequence (opt5) from neuraminidase__InfluenzaB__AHL92380
augcugcccagcaccauccagacacucacgcuguuccuuaccuccggcggggugcugcucucucuguacgucagcgccucccuuucuuaucugcucuacagcgacauucugcugaaguuuuccagaacagagaucaccgcuccuauuaugccgcucgauugcgccaacgcgucuaauguucaagcugugaaccggagcgccacaaaaggagugaagcugcuucugcccgaaccugaguggaccuauccccgccucuccuguccuggcagcacauuccagaaagcccugcuuaucucuccccacagauuuggggaaaccaagggaaauuccgcuccucugauuauccgggagccguucaucgccugcggccccaaagaauguaagcauuuugcucucacgcacuacgccgcgcagccugggggauauuacaacggcacccgcgaggacagaaauaagcugcggcaucugauuagcgucaaacucggcaagauccccacaguggagaacucuauuuuccacauggccgcuugguccgggagcgccugccaugauggacgcgaauggaccuauaucggcguugacgggccugauucuaaugcucugcuuaaaauuaaguacggagaggccuacacagacaccuaucacuccuacgcgaaaaacauccugagaacgcaggaaagcgccuguaauugcauuggcggggauuguuaucucaugaucacagacggacccgcuuccggcaucucugagugccgguuucugaagauucgcgagggcagaaucauuaaggaaaucuucccgaccgggcgggugaaacacacagaggaauguaccugcggauuugccagcaacaagaccauugagugugcuugccgcgauaauuccuacacagccaaaagaccuuucgucaaacuuaacguggaaacggacaccgccgagauccggcugaugugcacagagaccuaucucgauacaccccgcccuaaugacggcagcaucaccgggcccugugaaucuaacggagauaagggcuccgggggaauuaagggcggcuuuguucaucaaagaauggcuagcaaaaucgggcggugguacucuagaacgaugagcaagacaaagcgcaugggaaugggccuguaugugaaauacgacggggaccccuggaccgauuccgaggcgcuggcccucucuggagucauggugagcauggaggaaccuggcugguacuccuucggguuugaaauuaaggacaaaaagugcgaugugccguguaucggcauugagaugguccacgacggaggcaaaaccacauggcauagcgcugccaccgccaucuauugccugauggggucuggacagcuucugugggauacaguuacgggcgugaauaugacccucuga

SEQ ID NO: 222106 - RNA, 1401 nt, Artificial Sequence
  derived and/or modified CDS sequence (opt5) from neuraminidase__InfluenzaB__AHL92391
augcugcccagcaccauccagacacucacgcuguuccuuaccuccggcggggugcugcucucucuguacgucagcgccucccuuucuuaucugcucuacagcgacauucugcugaaguuuuccagaacagagaucaccgcuccuauuaugccgcucgauugcgccaacgcgucuaauguucaagcugugaaccggagcgccacaaaaggagugacccugcuucugcccgaaccugaguggacauauccccgccucuccuguccuggcagcaccuuccagaaggcccugcuuaucucuccccacagauuuggggaaacgaaaggaaauuccgcuccucugauuauccgggagccguucaucgccugcggccccaaggaauguaaacauuuugcucucacccacuacgccgcgcagccugggggauauuacaacggcacacgcgaggacagaagcaagcugcggcaucugauuucugucaagcucggcaaaauccccaccguggaaaauuccauuuuccacauggccgcuuggagcgggucugccugccaugauggacgcgaauggacauauaucggcguugacgggccugauuccaacgcucugcuuaagauuaaauacggagaggccuacaccgacacguaucacagcuacgcgaagaauauccugagaacacaggaauccgccuguaacugcauuggcggggauuguuaucucaugaucaccgacggacccgcuucuggcaucagcgagugccgguuucugaaaauucgcgagggcagaaucauuaaggaaaucuucccgacagggcgggugaagcacaccgaggaauguaccugcggauuugccuccaauaaaacaauugagugugcuugccgcgauaacagcuacacggccaagagaccuuucgucaaacuuaauguggaaaccgacacagccgagauccggcugaugugcaccgagacauaucucgauacgccccgcccuaacgacggcucuaucaccgggcccugugaauccaauggagauaagggcagcgggggaauuaaaggcggcuuuguucaucaaagaauggcuucuaagaucgggcggugguacagcagaacaauguccaaaaccaagcgcaugggaaugggccuguaugugaaguacgacggggaccccuggaccgauucugaggcgcuggcccucagcggagucaugguguccauggaggagccuggcugguacagcuucggguuugaaauuaaagacaagaaaugcgaugugccguguaucggcauugagaugguccacgacggaggcaagacaaccuggcauucugcugccacagccaucuauugccugaugggguccggacagcuucugugggauacgguuaccggcgugaacaugacacucuga

SEQ ID NO: 222107 - RNA, 1401 nt, Artificial Sequence; identical to SEQ ID NO: 220889
  derived and/or modified CDS sequence (opt5) from neuraminidase__InfluenzaB__AHL92402

SEQ ID NO: 222108 - RNA, 1401 nt, Artificial Sequence; identical to SEQ ID NO: 220889
  derived and/or modified CDS sequence (opt5) from neuraminidase__InfluenzaB__AHL92413

SEQ ID NO: 222109 - RNA, 1401 nt, Artificial Sequence; identical to SEQ ID NO: 220889
  derived and/or modified CDS sequence (opt5) from neuraminidase__InfluenzaB__AHL92424

SEQ ID NO: 222110 - RNA, 1401 nt, Artificial Sequence
  derived and/or modified CDS sequence (opt5) from neuraminidase__InfluenzaB__AHL92435
augcugcccagcaccauccagacacucacgcuguuccuuaccuccggcggggugcugcucucucuguacgucagcgccucccuuucuuaucugcucuacagcgacauucugcugaaguuuucccaaacagagaucaccgcuccuauuaugccgcucgauugcgccaacgcgucuaauguucaggcugugaacagaagcgccgccaaaggagugacacugcuucugcccgaaccugaguggaccuauccccggcucuccuguccuggcagcacauuccagaaggcucugcuuaucucuccccaccgcuuuggggaaaccaaaggaaauuccgccccucugauuaucagagagccguucaucgcuugcggccccacggaauguaagcauuuugcccucacccacuacgcggcccagccugggggauauuacaacggcacacgggaggaccgcaauaaacugagacaucugauuagcgucaagcucggcaagauccccaccguggagaacucuauuuuccacauggcugccugguccgggagcgcuugccaugauggaaaagaauggacauauaucggcguugacgggccugauucuaaugcccugcuuaagauuaaauacggagaggcguacaccgacacguaucacuccuacgccaagaacauccugcggacacaagaaagcgcuuguaauugcauuggcggggauuguuaucucaugaucaccgacggacccgccuccggcaucucugagugccgcuuucugaaaauuagagagggccggaucauuaaggaaaucuucccgacagggcgcgugaagcacaccgaggaauguaccugcggauuugcuagcaacaaaacaauugagugugccugcagagauaauuccuacacggccaagcggccuuucgucaaacuuaacguggaaaccgacacagcugagauccgccugaugugcaccgagacauaucucgauacccccagaccuaaugacggcagcaucacggggcccugugaaucugauggagacaagggcuccgggggaauuaaaggcggcuuuguucaucagcggauggcgagcaagaucgggcgcugguacucuagaacaaugagcaaaaccaagcggaugggaaugggccuguaugugaaguacgacggggaucccuggaccgacuccgaggcccuggcucucucuggagucaugauuagcauggaggaaccuggcugguacuccuucggguuugaaaucaaagauaagaaaugcgacgugccguguauuggcaucgagauggugcacgauggaggcaagacaaccuggcauagcgccgccacagcuaucuauugccugauggggucuggacagcuucugugggacacggucaccggcguugauauggcccucuga

SEQ ID NO: 222111 - RNA, 1401 nt, Artificial Sequence; identical to SEQ ID NO: 220889
  derived and/or modified CDS sequence (opt5) from neuraminidase__InfluenzaB__AHL92446

SEQ ID NO: 222112 - RNA, 1401 nt, Artificial Sequence; identical to SEQ ID NO: 220889
  derived and/or modified CDS sequence (opt5) from neuraminidase__InfluenzaB__AHL92457

SEQ ID NO: 222113 - RNA, 1401 nt, Artificial Sequence; identical to SEQ ID NO: 220889
  derived and/or modified CDS sequence (opt5) from neuraminidase__InfluenzaB__AHL92468

SEQ ID NO: 222114 - RNA, 1401 nt, Artificial Sequence; identical to SEQ ID NO: 220889
  derived and/or modified CDS sequence (opt5) from neuraminidase__InfluenzaB__AHL92479

SEQ ID NO: 222115 - RNA, 1401 nt, Artificial Sequence; identical to SEQ ID NO: 220860
  derived and/or modified CDS sequence (opt5) from neuraminidase__InfluenzaB__AHL92490

SEQ ID NO: 222116 - RNA, 1401 nt, Artificial Sequence; identical to SEQ ID NO: 220889
  derived and/or modified CDS sequence (opt5) from neuraminidase__InfluenzaB__AHL92501

SEQ ID NO: 222117 - RNA, 1401 nt, Artificial Sequence
  derived and/or modified CDS sequence (opt5) from neuraminidase__InfluenzaB__AHL92512
augcugcccagcaccauccagacacucacgcuguuccuuaccuccggcggggugcugcucucucuguacgucagcgccucccuuucuuaucugcucuacagcgacauucugcugaaguuuuccagaacagagaucaccgcuccuauuaugccgcucgauugcgccaacgcgucuaauguucaagcugugaaccggagcgccacaaaaggagugacccugcuucugcccgaaccugaguggacauauccccgccucuccuguccuggcagcaccuuccagaaggcccugcuuaucucuccccacagauuuggggaaacgaaaggaaauuccgcuccucugauuauccgggagccguucaucgccugcggccccaaggaauguaaacauuuugcucucacccacuacgccgcgcagccugggggauauuacaacggcacacgcgaggacagaaauaagcugcggcaucugauuagcgucaagcucggcaaaauccccaccguggagaacucuauuuuccacaugguugccugguccgggagcgcuugccaugauggacgcgaauggacauauaucggcguggacgggccugauucuaaugcccugcuuaagauuaaauacggagaggcuuacaccgacacguaucacuccuacgccaagaacauccugagaacacaggaaagcgcguguaauugcauuggcggggauuguuaucucaugaucaccgacggacccgccuccggcaucucugagugccgguuucugaaaauucgcgagggcagaaucauuaaggaaaucuucccgacagggcgggucaagcacaccgaggaauguaccugcggauuugcuagcaacaaaacaauugagugugccugccgcgauaauuccuacacggcuaagagaccuuucgugaaacuuaacguugaaaccgacacagccgagauccggcugaugugcaccgagacauaucucgauacgccccgcccuaaugacggcagcaucaccgggcccugugaaucuaacggagauaagggcuccgggggaauuaaaggcggcuuugugcaucaaagaauggccagcaagaucgggcggugguacucuagaacaaugagcaaaaccaagcgcaugggaaugggccuguaugucaaguacgacggggaccccuggaccgauuccgaggcucuggcgcucucuggagugauggugagcauggaggaaccuggcugguacuccuucggguuugaaauuaaagacaagaaaugcgaugucccguguaucggcauugagaugguucacgacggaggcaagacaaccuggcauagcgccgcuacagccaucuauugccugauggggucuggacagcuucugugggauacggugaccggcgugaauaugacacucuga

SEQ ID NO: 222118 - RNA, 1401 nt, Artificial Sequence; identical to SEQ ID NO: 220889
  derived and/or modified CDS sequence (opt5) from neuraminidase__InfluenzaB__AHL92523

SEQ ID NO: 222119 - RNA, 1401 nt, Artificial Sequence; identical to SEQ ID NO: 220889
  derived and/or modified CDS sequence (opt5) from neuraminidase__InfluenzaB__AHL92534

SEQ ID NO: 222120 - RNA, 1401 nt, Artificial Sequence; identical to SEQ ID NO: 220860
  derived and/or modified CDS sequence (opt5) from neuraminidase__InfluenzaB__AHL92545

SEQ ID NO: 222121 - RNA, 1401 nt, Artificial Sequence; identical to SEQ ID NO: 220889
  derived and/or modified CDS sequence (opt5) from neuraminidase__InfluenzaB__AHL92556

SEQ ID NO: 222122 - RNA, 1401 nt, Artificial Sequence; identical to SEQ ID NO: 220889
  derived and/or modified CDS sequence (opt5) from neuraminidase__InfluenzaB__AHL92567

SEQ ID NO: 222123 - RNA, 1401 nt, Artificial Sequence; identical to SEQ ID NO: 220889
  derived and/or modified CDS sequence (opt5) from neuraminidase__InfluenzaB__AHL92578

SEQ ID NO: 222124 - RNA, 1401 nt, Artificial Sequence; identical to SEQ ID NO: 220860
  derived and/or modified CDS sequence (opt5) from neuraminidase__InfluenzaB__AHL92589

SEQ ID NO: 222125 - RNA, 1401 nt, Artificial Sequence; identical to SEQ ID NO: 220889
  derived and/or modified CDS sequence (opt5) from neuraminidase__InfluenzaB__AHL92600

SEQ ID NO: 222126 - RNA, 1401 nt, Artificial Sequence; identical to SEQ ID NO: 221916
  derived and/or modified CDS sequence (opt5) from neuraminidase__InfluenzaB__AHL92611

SEQ ID NO: 222127 - RNA, 1401 nt, Artificial Sequence
  derived and/or modified CDS sequence (opt5) from neuraminidase__InfluenzaB__AHL92622
augcugcccagcaccauccagacacucacgcuguuccuuaccuccggcggggugcugcucucucuguacgucagcgccucccuuucuuaucugcucuacagcgacauucugcugaaguuuuccagaacagagaucaccgcuccuauuaugccgcucgauugcgccaacgcgucuaauguucaagcugugaaccggagcgccacaaaaggagugaccuuccugcuucccgaaccugaguggacauauccccgccuguccuguccuggcagcaccuuucagaaggcccuccugaucucuccccacagauucggggaaacgaaaggaaauuccgcuccucuuauuauccgggagccguuuaucgccugcggccccaaggaauguaaacauuucgcucugacccacuacgccgcgcagccugggggauauuacaacggcacacgcgaggacagaaauaagcuccggcaucugauuagcgucaagcugggcaaaauccccaccguggagaacucuauuuuucacauggccgcuugguccgggagcgccugccaugauggacgcgaauggacauauaucggcguugacgggccugauucuaaugcucuccugaagauuaaauacggagaggccuacaccgacacguaucacuccuacgcgaagaacauccuuagaacacaggaaagcgccuguaauugcauuggcggggauuguuaucugaugaucaccgacggacccgcuuccggcaucucugagugccgguuccucaaaauucgcgagggcagaaucauuaaggaaaucuuuccgacagggcgggugaagcacaccgaggaauguaccugcggauucgccagcaacaaaacaauugagugugcuugccgcgauaauuccuacacggccaagagaccuuuugucaaacugaacguggaaaccgacacagccgagauccggcuuaugugcaccgagacauaucuggauacgccccgcccuaaugacggcagcaucaccgggcccugugaaucuaacggagauaagggcuccgggggaauuaaaggcggcuucguucaucaaagaauggcuagcaagaucgggcggugguacucuagaacaaugagcaaaaccaagcgcaugggaaugggccucuaugugaaguacgacggggaccccuggaccgauuccgaggcgcuggcccugucuggagucauggugagcauggaggaaccuggcugguacuccuuuggguucgaaauuaaagacaagaaaugcgaugugccguguaucggcauugagaugguccacgacggaggcaagacaaccuggcauagcgcugccacagccaucuauugccucauggggucuggacagcugcuuugggauacgguuaccggcgugaauaugacacuguga

SEQ ID NO: 222128 - RNA, 1401 nt, Artificial Sequence
  derived and/or modified CDS sequence (opt5) from neuraminidase__InfluenzaB__AHL92633
augcugcccagcaccauccagacacucacgcuguuccuuaccuccggcggggugcugcucucucuguacgucagcgccucccuuucuuaucugcucuacagcgacauucugcugaaguuuuccagaacagagaucaccgcuccuauuaugccgcucgauugcgccaacgcgucuaauguucaagcugugaaccggagcgccacaaaaggagugaccuuccugcuucccgaaccugaguggacauauccccgccuguccuguccuggcagcaccuuucagaaggcccuccugaucucuccccacagauucggggaaacgaaaggaaauuccgcuccucuuauuauccgggagccguuuaucgccugcggccccaaggaauguaaacauuucgcucugacccacuacgccgcgcagccugggggauauuacaacggcacacgcgaggacagaaauaagcuccggcaucugauuagcgucaagcugggcaaaauccccauuguggagaacucuaucuuucacauggccgcuugguccgggagcgccugccaugauggacgcgaauggaccuauauuggcguugacgggccugauucuaaugcucuccugaagaucaaauacggagaggccuacacagacaccuaucacuccuacgcgaagaacauucuuagaacgcaggaaagcgccuguaauugcaucggcggggauuguuaucugaugaucacagacggacccgcuuccggcauuucugagugccgguuccucaaaauccgcgagggcagaauuaucaaggaaauuuuuccgaccgggcgggugaagcacacagaggaauguaccugcggauucgccagcaacaaaaccaucgagugugcuugccgcgauaauuccuacacagccaagagaccuuuugucaaacugaacguggaaacggacaccgccgagauccggcuuaugugcacagagaccuaucuggauacaccccgcccuaaugacggcagcauuaccgggcccugugaaucuaacggagauaagggcuccgggggaaucaaaggcggcuucguucaucaaagaauggcuagcaagauugggcggugguacucuagaacgaugagcaaaacaaagcgcaugggaaugggccucuaugugaaguacgacggggaccccuggaccgauuccgaggcgcuggcccugucuggagucauggugagcauggaggaaccuggcugguacuccuuuggguucgaaaucaaagacaagaaaugcgaugugccguguauuggcaucgagaugguccacgacggaggcaagaccacauggcauagcgcugccaccgccaucuauugccucauggggucuggacagcugcuuugggauacaguuacgggcgugaauaugacccuguga

SEQ ID NO: 222129 - RNA, 1401 nt, Artificial Sequence; identical to SEQ ID NO: 220860
  derived and/or modified CDS sequence (opt5) from neuraminidase__InfluenzaB__AHL92644

SEQ ID NO: 222130 - RNA, 1401 nt, Artificial Sequence; identical to SEQ ID NO: 220860
  derived and/or modified CDS sequence (opt5) from neuraminidase__InfluenzaB__AHL92655

SEQ ID NO: 222131 - RNA, 1401 nt, Artificial Sequence; identical to SEQ ID NO: 220889
  derived and/or modified CDS sequence (opt5) from neuraminidase__InfluenzaB__AHL92666

SEQ ID NO: 222132 - RNA, 1401 nt, Artificial Sequence; identical to SEQ ID NO: 220889
  derived and/or modified CDS sequence (opt5) from neuraminidase__InfluenzaB__AHL92677

SEQ ID NO: 222133 - RNA, 1401 nt, Artificial Sequence; identical to SEQ ID NO: 220860
  derived and/or modified CDS sequence (opt5) from neuraminidase__InfluenzaB__AHL92688

SEQ ID NO: 222134 - RNA, 1401 nt, Artificial Sequence; identical to SEQ ID NO: 220889
  derived and/or modified CDS sequence (opt5) from neuraminidase__InfluenzaB__AHL92699

SEQ ID NO: 222135 - RNA, 1401 nt, Artificial Sequence; identical to SEQ ID NO: 220889
  derived and/or modified CDS sequence (opt5) from neuraminidase__InfluenzaB__AHL92710

SEQ ID NO: 222136 - RNA, 1401 nt, Artificial Sequence; identical to SEQ ID NO: 220889
  derived and/or modified CDS sequence (opt5) from neuraminidase__InfluenzaB__AHL92721

SEQ ID NO: 222137 - RNA, 1401 nt, Artificial Sequence; identical to SEQ ID NO: 220889
  derived and/or modified CDS sequence (opt5) from neuraminidase__InfluenzaB__AHL92732

SEQ ID NO: 222138 - RNA, 1401 nt, Artificial Sequence; identical to SEQ ID NO: 220889
  derived and/or modified CDS sequence (opt5) from neuraminidase__InfluenzaB__AHL92743

SEQ ID NO: 222139 - RNA, 1401 nt, Artificial Sequence; identical to SEQ ID NO: 220889
  derived and/or modified CDS sequence (opt5) from neuraminidase__InfluenzaB__AHL92754

SEQ ID NO: 222140 - RNA, 1401 nt, Artificial Sequence; identical to SEQ ID NO: 220889
  derived and/or modified CDS sequence (opt5) from neuraminidase__InfluenzaB__AHL92765

SEQ ID NO: 222141 - RNA, 1401 nt, Artificial Sequence; identical to SEQ ID NO: 220889
  derived and/or modified CDS sequence (opt5) from neuraminidase__InfluenzaB__AHL92776

SEQ ID NO: 222142 - RNA, 1401 nt, Artificial Sequence; identical to SEQ ID NO: 220889
  derived and/or modified CDS sequence (opt5) from neuraminidase__InfluenzaB__AHL92787

SEQ ID NO: 222143 - RNA, 1401 nt, Artificial Sequence; identical to SEQ ID NO: 220889
  derived and/or modified CDS sequence (opt5) from neuraminidase__InfluenzaB__AHL92798

SEQ ID NO: 222144 - RNA, 1401 nt, Artificial Sequence
  derived and/or modified CDS sequence (opt5) from neuraminidase__InfluenzaB__AHL92809
augcugcccagcaccauccagacacucacgcuguuccuuaccuccggcggggugcugcucucucuguacgucagcgccucccuuucuuaucugcucuacagcgacauucugcugaaguuuuccagaacagagaucaccgcuccuauuaugccgcucgauugcgccaacgcgucuaauguucaagcugugaaccggagcgccaucaaaggagugacacugcuucugcccgaaccugaguggaccuauccccgccucuccuguccuggcagcacauuccagaaggcccugcuuauuucuccccacagauuuggggaaaccaaaggaaauuccgcuccucugaucauccgggagccguucauugccugcggccccaaggaauguaaacauuuugcucucacgcacuacgccgcgcagccugggggauauuacaacggcacccgcgaggacagaaauaagcugcggcaucugaucagcgucaagcucggcaaaauucccacaguggagaacucuaucuuccacauggccgcuugguccgggagcgccugccaugauggacgcgaauggaccuauauuggcguugacgggccugauucuaaugcucugcuuaagaucaaauacggagaggccuacacagacaccuaucacuccuacgcgaagaacauucugagaacgcaggaaagcgccuguaauugcaucggcggggauuguuaucucaugaucacagacggacccgcuuccggcauuucugagugccgguuucugaaaauccgcgagggcagaauuaucaaggaaauuuucccgaccgggcgggugaagcacacagaggaauguaccugcggauuugccagcaacaaaaccaucgagugugcuugccgcgauaauuccuacacagccaagagaccuuucgucaaacuuaacguggaaacggacaccgccgagauccggcugaugugcacagagaccuaucucgauacaccccgcccuaaugacggcagcauuaccgggcccugugaaucuaacggagauaagggcuccgggggaaucaaaggcggcuuuguucaucaaagaauggcuagcaagauugggcggugguacucuagaacgaugagcaaaacaaagcgcaugggaaugggccuguaugugaaguacgacggggaccccuggaccgauuccgaggcgcuggcccucucuggagucauggugagcauggaggaaccuggcugguacuccuucggguuugaaaucaaagacaagaaaugcgaugugccguguauuggcaucgagaugguccacgacggaggcaagaccacauggcauagcgcugccaccgccaucuauugccugauggggucuggacagcuucugugggauacaguuacgggcgugaauaugacccucuga

SEQ ID NO: 222145 - RNA, 1401 nt, Artificial Sequence
  derived and/or modified CDS sequence (opt5) from neuraminidase__InfluenzaB__AHL92820
augcugcccagcaccauccagacacucacgcuguuccuuaccuccggcggggugcugcucucucuguacgucagcgccucccuuucuuaucugcucuacagcgacauucugcugaaguuuuccagaacagagaucaccgcuccuauuaugccgcucgauugcgccaacgcgucuaauguucaagcugugaaccggagcgccacaaaaggagugacccugcuucugcccgaaccugaguggacauauccccgccucuccuguccuggcagcaccuuccagaaggcccugcuuaucucuccccacagauuuggggaaacgaaaggaaauuccgcuccucugauuauccgggagccguucaucgccugcggccccaaggaauguaaacauuuugcucucacccacuacgccgcgcagccugggggauauuacaacggcacacgcgaggacagaaauaagcugcggcaucugauuagcgucaagcucggcaaaauccccaccguggagaacucuauuuuccacauggccgcuugguccgggagcgccugccaugauggacgcgaauggacauauaucggcguugacgggccugauucuaaugcucugcuuaagauuaaauacggagaggccuacaccgacacguaucacuccuacgcgaagaacauccugagaacacaggaaagcgccuguaauugcauuggcggggauuguuaucucaugaucaccgacggacccgcuuccggcaucucugagugccgguuucugaaaauucgcgagggcagaaucauuaaggaaaucuucccgacagggcgggugaagcacaccgaggaauguaccugcggauuugccagcaacaaaacaauugagugugcuugccgcgauaauuccuacacggccaagagaccuuucgucaaacuuaacguggaaaccgacacagccgagauccggcugaugugcaccgagacauaucucgauacgccccgcccuaaugacggcagcaucaccgggcccugugaaucuaacggagauaagggcuccgggggaauuaaaggcggcuuuguucaucaaagaauggcuagcaagaucgggcggugguacucuagaacaaugagcaaaaccaagcgcaugggaaugggccuguaugugaaguacgacggggaccccuggaccgauuccgaggcgcuggcccucucuggagucauggugagcauggaggaaccuggcugguacuccuucggguuugaaauuaaagacaagaaaugcgaugugccguguaucggcauugagaugguccacgacggaggcaagaaaacauggcauagcgcugccaccgccaucuauugccugauggggucuggacagcuucugugggauacaguuacgggcgugaauaugacccucuga

SEQ ID NO: 222146 - RNA, 1401 nt, Artificial Sequence
  derived and/or modified CDS sequence (opt5) from neuraminidase__InfluenzaB__AHL92842
augcugcccagcaccauccagacacucacgcuguuccuuaccuccggcggggugcugcucucucuguacgucagcgccucccuuucuuaucugcucuacagcgacauucugcugaaguuuuccagaacagagaucaccgcuccuauuaugccgcucgauugcgccaacgcgucuaauguucaagcugugaaccggagcacaaccaaaggagugacacugcuucugcccgaaccugaguggaccuauccccgccucuccuguccuggcagcacguuccagaaggcccugcuuaucucuccccacagauuuggggaaaccaaaggaaauuccgccccucugauuauccgggagccguucaucgcuugcggccccaaggaauguaaacauuuugcccucacacacuacgcugcccagccugggggauauuacaacggcacccgcgaggacagaaauaagcugcggcaucugauuagcgucaagcucggcaaaauccccacaguggagaacucuauuuuccacauggcggccugguccgggagcgcuugccaugauggacgcgaauggaccuauaucggcguugacgggccugauucuaaugcccugcuuaagauuaaauacggagaggcuuacacggacacauaucacuccuacgccaagaacauccugagaacccaggaaagcgcguguaauugcauuggcggggauuguuaucucaugaucacagacggacccgccuccggcaucucugagugccgguuucugaaaauucgcgagggcagaaucauuaaggaaaucuucccgaccgggcgggugaagcacaccgaggaauguacaugcggauuugcuagcaacaaaacgauugagugugccugccgcgauaauuccuacaccgcuaagagaccuuucgucaaacuuaacguggaaacagacaccgccgagauccggcugaugugcacagagaccuaucucgauacgccccgcccuaaugacggcagcaucacagggcccugugaaucuaacggagauaagggcuccgggggaauuaaaggcggcuuuguucaucaaagaauggccagcaagaucgggcggugguacucuagaaccaugagcaaaaccaagcgcaugggaaugggccuguaugugaaguacgacggggaccccuggacagauuccgaggcucuggcgcucucuggagucauggugagcauggaggaaccuggcugguacuccuucggguuugaaauuaaagacaagaaaugcgaugugccguguaucggcauugagaugguccacgacggaggcaagaccacauggcauagcgccgcuacggccaucuauugccugauggggucuggacagcuucugugggauaccguuacaggcgugaauaugacccucuga

SEQ ID NO: 222147 - RNA, 1401 nt, Artificial Sequence; identical to SEQ ID NO: 220889
  derived and/or modified CDS sequence (opt5) from neuraminidase__InfluenzaB__AHL92853

SEQ ID NO: 222148 - RNA, 1401 nt, Artificial Sequence; identical to SEQ ID NO: 220889
  derived and/or modified CDS sequence (opt5) from neuraminidase__InfluenzaB__AHL92864

SEQ ID NO: 222149 - RNA, 1401 nt, Artificial Sequence; identical to SEQ ID NO: 220742
  derived and/or modified CDS sequence (opt5) from neuraminidase__InfluenzaB__AHL92875

SEQ ID NO: 222150 - RNA, 1401 nt, Artificial Sequence; identical to SEQ ID NO: 220699
  derived and/or modified CDS sequence (opt5) from neuraminidase__InfluenzaB__AHL92886

SEQ ID NO: 222151 - RNA, 1401 nt, Artificial Sequence
  derived and/or modified CDS sequence (opt5) from neuraminidase__InfluenzaB__AHL92897
augcugcccagcaccauccagacacucacgcuguuccuuaccuccggcggggugcugcucucucuguacgucagcgccucccuuucuuaucugcucuacagcgacauucugcugaaguuuuccccuacagagaucaccgcuccgacaauuccccucgauugcgccaacgcgucuaauguucaagcugugaacagaagcgccaccaaaggagugacacugcuucugccugaacccgaguggaccuauccucggcucuccugucccggcagcacguuccagaaggcccugcuuaucucuccucaccgcuuuggggaaaccaaaggaaauuccgcuccgcugauuaucagagagcccuucaucgccugcggcccuaacgaauguaagcauuuugcucucacacacuacgccgcgcagcccgggggauauuacaauggcacccggggcgaccgcaacaaacugagacaucugauuagcgucaagcucgggaagaucccuacaguggaaaauucuauuuuccacauggccgcuugguccggaagcgccugccaugauggcaaagaguggaccuauaucgggguugacggacccgauaacaaugcucugcuuaagauuaaauacggcgaggccuacacggacacauaucacucuuacgcgaacaauauccugcggacccaggaguccgccuguaacugcauugggggaaauuguuaucucaugaucacagauggcagcgcuuccggcgugucugaaugccgcuuucugaagaucagagaggggcggauuaucaaagagauuuucccgaccggacgcgucaagcacaccgaagaguguacaugcggcuuugccagcaacaagacgaucgaaugugcuugcagagacaauuccuacaccgccaaacggccuuucgugaaacuuaacguugagacagauaccgccgaaauucgccugaugugcacagacaccuaucucgauacgcccagaccugacgaugggagcaucacaggacccugugagucuaacggcgacaagggguccggaggcaucaagggcggguuugugcaucaacggauggcuagcaaaauuggacgcugguacucuagaaccaugagcaagaccgagcggaugggcauggggcuguaugucaaauacgacggagaucccugggcggacuccgaugcccuggcuuucucuggcgugauggugagcaugaaggaaccugggugguacuccuuuggcuucgagaucaaggacaaaaagugcgaugucccguguauuggaaucgaaaugguucacgacggcgggaaagagacauggcauagcgccgccaccgcuauuuauugccucaugggaucuggccagcugcuuugggauacagugacggggguggacauggcccuguga

SEQ ID NO: 222152 - RNA, 1401 nt, Artificial Sequence
  derived and/or modified CDS sequence (opt5) from neuraminidase__InfluenzaB__AHL92908
augcugcccagcaccauccagacacucacgcuguuccuuacccugggcggggugcuccugucccuuuacgucucugccagccuguccuaucuccuguacucugacauucugcucaaguuuagccaaacagagaucaccgcuccuauuaugccgcuggauugcgccaacgcguccaauguucaggcugugaacagaucugccacaaaaggagugacccuucugcuccccgaaccugaguggacauauccccggcugagcuguccuggcuccaccuuccagaaggcccuucugaucagcccccaccgcuuuggggaaacgaaaggaaauucugcuccucucauuaucagagagccguucaucgccugcggccccaaggaauguaaacauuuugcucugacccacuacgccgcgcagccugggggauauuacaacggcacacgggaggaccgcaauaagcugagacaucucauuuccgucaagcugggcaaaauccccaccguggagaacagcauuuuccacauggccgcuuggucuggguccgccugccaugauggaaaggaauggacauauaucggcguugacgggccugauagcaaugcccuucugaaaauuaaguacggagaggcuuacaccgacacguaucacucuuacgcgaaaaacauccuccggacacaagaauccgccuguaauugcauuggcggggauuguuaucugaugaucaccgacggacccgcuagcggcaucuccgagugccgcuuucuuaagauuagagagggccggaucauuaaggaaaucuucccgacagggcgcgugaaacacaccgaggaauguaccugcggauuugccucuaacaagacaauugagugugcuugcagagauaauagcuacacggccaaacggccuuucgucaagcugaacguggaaaccgacacagccgagauccgccucaugugcaccgagacauaucuggauacccccagaccuaaugacggcuccaucacggggcccugugaaagcaacggagauaaaggcucugggggaauuaagggcggcuuuguucaucagcggauggcuuccaaaaucgggcgcugguacagcagaacaaugucuaagaccaagcggaugggaaugggccuguaugugaaauacgacggggaccccuggaccgauagcgaggcgcucgcccuguccggagucauggugucuauggaggaaccuggcugguacagcuucggguuugaaauuaaggacaaaaagugcgaugugccguguaucggcauugagaugguccacgacggaggcaaaacaaccuggcauuccgcugccacagccguuuauugccuuauggggagcggacagcugcucugggauacgaucaccggcguggacauggcucuguga

SEQ ID NO: 222153 - RNA, 1401 nt, Artificial Sequence
  derived and/or modified CDS sequence (opt5) from neuraminidase__InfluenzaB__AHL92919
augcugcccagcaccauccagacacucacgcuguuccuuaccuccggcggggugcugcucucucuguacgucagcgccucccuuucuuaucugcucuacagcgacauucugcugaaguuuuccccuacagagaucaccgcuccgacaaugccccucgauugcgccaacgcgucuaauguucaagcugugaacagaagcgccaccaaaggagugacacugcuucugccugaacccgaguggaccuauccucggcucuccugucccggcagcacguuccagaaggcccugcuuauuucuccucaccgcuuuggggaaaccaaaggaaauuccgcuccgcugaucauuagagagcccuucaucgccugcggcccuaacgaauguaagcauuuugcucucacacacuacgccgcgcagcccgggggauauuacaauggcacccggggcgaccgcaacaaacugagacaucugaucagcgucaagcucgggaagauuccuacaguggaaaauucuaucuuccacauggccgcuugguccggaagcgccugccaugauggcaaagaguggaccuauauugggaucgacggacccgauaacaaugcucugcuuaagauuaaauacggcgaggccuacacggacacauaucacucuuacgcgaacaauauccugcggacccaggaguccgccuguaacugcauugggggaaauuguuaucucaugaucacagauggcagcgcuuccggcguuucugaaugccgcuuucugaagaucagagaggggcggauuaucaaagagauuuucccgaccggacgcgugaagcacaccgaagaguguacaugcggcuuugccagcaacaagacgaucgaaugugcuugcagagacaauuccuacaccgccaaacggccuuucgucaaacuuaacguggagacagauaccgccgaaauucgccugaugugcacagacaccuaucucgauacgcccagaccugacgaugggagcaucacaggacccugugagucuaacggcgacaagggguccggaggcaucaagggcggguuuguucaucaacggauggcuagcaaaauuggacgcugguacucuagaaccaugagcaagaccgagcggaugggcauggggcuguaugugaaauacgacggagaucccugggcggacuccgaugcccuggcuuucucuggcgucauggugagcaugaaggaaccugggugguacuccuuuggcuucgagaucaaggacaaaaagugcgaugugccguguauuggaaucgaaaugguccacgacggcgggaaagagacauggcauagcgccgccaccgcuauuuauugccucaugggaucuggccagcugcuuugggauacaguuacggggguggacauggcccuguga

SEQ ID NO: 222154 - RNA, 1401 nt, Artificial Sequence
  derived and/or modified CDS sequence (opt5) from neuraminidase__InfluenzaB__AHL92930
augcugcccagcaccauccagacacucacgcuguuccuuaccuccggcggggugcugcucucucuguacgucagcgccucccuuucuuaucugcucuacagcgacauucugcugaaguuuuccccuacagagaucaccgcuccgacaaugccccucgauugcgccaacgcgucuaauguucaagcugugaacagaagcgccaccaaaggagugacacugcuucugccugaacccgaguggaccuauccucggcucuccugucccggcagcacguuccagaaggcccugcuuauuucuccucaccgcuuuggggaaaccaaaggaaauuccgcuccgcugaucauuagagagcccuucaucgccugcggcccuaacgaauguaagcauuuugcucucacacacuacgccgcgcagcccgggggauauuacaauggcacccggggcgaccgcaacaaacugagacaucugaucagcgucaagcucgggaagauuccuacaguggaaaauucuaucuuccacauggccgcuugguccggaagcgccugccaugauggcaaagaguggaccuauauugggguugacggacccgauaacgacgcucugcuuaagaucaaauacggcgaggccuacacggauacauaucacucuuacgcgaauaacauucugcggacccaggaguccgccuguaauugcaucgggggaaacuguuaucucaugauuacagacggcagcgcuuccggcgugucugaaugccgcuuucugaagaucagagaggggcggaucauuaaagagaucuucccgaccggacgcgucaagcacaccgaagaguguacaugcggcuuugccagcaauaagacgauugaaugugcuugcagagauaacuccuacaccgccaaacggccuuucgugaaacuugacguugagacagauaccgccgaaauccgccugaugugcacagacaccuaucucgauacgcccagaccugacgacgggagcauuacaggacccugugagucuaauggcgauaagggguccggaggcaucaagggcggguuugugcaucaacggauggcuagcaaaaucggacgcugguacucuagaaccaugagcaagaccgagcggaugggcauggggcuguaugucaaauacgacggagaucccugggcggacuccgaugcccuggcuuucucuggcgugauggugagcaugaaggaaccugggugguacuccuuuggcuucgagauuaaggacaaaaagugcgaugucccguguaucggaauugaaaugguucacgacggcgggaaagagacauggcauagcgccgccaccgcuaucuauugccucaugggaucuggccagcugcuuugggauacagugacggggguggacauggcccuguga

SEQ ID NO: 222155 - RNA, 1401 nt, Artificial Sequence; identical to SEQ ID NO: 220699
  derived and/or modified CDS sequence (opt5) from neuraminidase__InfluenzaB__AHL92941

SEQ ID NO: 222156 - RNA, 1401 nt, Artificial Sequence; identical to SEQ ID NO: 220707
  derived and/or modified CDS sequence (opt5) from neuraminidase__InfluenzaB__AHL92952

SEQ ID NO: 222157 - RNA, 1401 nt, Artificial Sequence; identical to SEQ ID NO: 220707
  derived and/or modified CDS sequence (opt5) from neuraminidase__InfluenzaB__AHL92963

SEQ ID NO: 222158 - RNA, 1401 nt, Artificial Sequence
  derived and/or modified CDS sequence (opt5) from neuraminidase__InfluenzaB__AHL92974
augcugcccagcaccauccagacacucacgcuguuccuuaccuccggcggggugcugcucucucuguacgucagcgccucccuuucuuaucugcucuacagcgacauucugcugaaguuuuccccuacagagaucaccgcuccgacaaugccccucgauugcgccaacgcgucuaauguucacgcugugaacagaagcgccaccaaaggagugacacugcuucugccugaacccgaguggaccuauccucggcucuccugucccggcagcacguuccaaaaggcccugcuuauuucuccucaucgcuuuggggaaaccaaaggaaauuccgcuccgcugaucauuagagagcccuucaucgccugcggcccuaacgaauguaagcacuuugcucucacacauuacgccgcgcagcccgggggauauuacaauggcacccggggcgaccgcaacaaacugagacaccugaucagcgucaagcucgggaagauuccuacaguggaaaauucuaucuuccauauggccgcuugguccggaagcgccugccacgauggcaaagaguggaccuauauugggguugacggacccgauaacaaugcucugcuuaagaucaaauacggcgaggccuacacggacacauaucacucuuacgcgaacaauauucugcggacccaggaguccgccuguaacugcaucgggggaaauuguuaucucaugauuacagauggcagcgcuuccggcgugucugaaugccgcuuucugaagaucagagaggggcggaucauuaaagagaucuucccgaccggacgcgucaagcauaccgaagaguguacaugcggcuuugccagcaacaagacgauugaaugugcuugcagagacaauuccuacaccgccaaacggccuuucgugaaacuuaacguugagacagauaccgccgaaauccgccugaugugcacagacaccuaucucgauacgcccagaccugacgaugggagcauuacaggacccugugagucuaacggcgacaagggguccggaggcaucaagggcggguuugugcaccagcggauggcuagcaaaaucggacgcugguacucuagaaccaugagcaagaccgagcggaugggcauggggcuguaugucaaauacaauggagaccccugggcggauuccgacgcccuggcuuucucuggcgugauggugagcaugaaggaaccugggugguacuccuuuggcuucgagauuaaggauaaaaagugcgacgucccguguaucggaauugaaaugguucaugauggcgggaaagagacauggcacagcgccgccaccgcuaucuauugccucaugggaucuggccaacugcuuugggacacagugacggggguggauauggcccuguga

SEQ ID NO: 222159 - RNA, 1401 nt, Artificial Sequence; identical to SEQ ID NO: 220707
  derived and/or modified CDS sequence (opt5) from neuraminidase__InfluenzaB__AHL92985

SEQ ID NO: 222160 - RNA, 1401 nt, Artificial Sequence; identical to SEQ ID NO: 220707
  derived and/or modified CDS sequence (opt5) from neuraminidase__InfluenzaB__AHL92996

SEQ ID NO: 222161 - RNA, 1401 nt, Artificial Sequence; identical to SEQ ID NO: 222080
  derived and/or modified CDS sequence (opt5) from neuraminidase__InfluenzaB__AHL93008

SEQ ID NO: 222162 - RNA, 1401 nt, Artificial Sequence; identical to SEQ ID NO: 222089
  derived and/or modified CDS sequence (opt5) from neuraminidase__InfluenzaB__AHL93019

SEQ ID NO: 222163 - RNA, 1401 nt, Artificial Sequence; identical to SEQ ID NO: 222089
  derived and/or modified CDS sequence (opt5) from neuraminidase__InfluenzaB__AHL93030

SEQ ID NO: 222164 - RNA, 1401 nt, Artificial Sequence; identical to SEQ ID NO: 222103
  derived and/or modified CDS sequence (opt5) from neuraminidase__InfluenzaB__AHL93041

SEQ ID NO: 222165 - RNA, 1401 nt, Artificial Sequence; identical to SEQ ID NO: 222103
  derived and/or modified CDS sequence (opt5) from neuraminidase__InfluenzaB__AHL93052

SEQ ID NO: 222166 - RNA, 1401 nt, Artificial Sequence; identical to SEQ ID NO: 220889
  derived and/or modified CDS sequence (opt5) from neuraminidase__InfluenzaB__AHL93063

SEQ ID NO: 222167 - RNA, 1401 nt, Artificial Sequence; identical to SEQ ID NO: 220889
  derived and/or modified CDS sequence (opt5) from neuraminidase__InfluenzaB__AHL93074

SEQ ID NO: 222168 - RNA, 1401 nt, Artificial Sequence; identical to SEQ ID NO: 220889
  derived and/or modified CDS sequence (opt5) from neuraminidase__InfluenzaB__AHL93085

SEQ ID NO: 222169 - RNA, 1401 nt, Artificial Sequence; identical to SEQ ID NO: 222146
  derived and/or modified CDS sequence (opt5) from neuraminidase__InfluenzaB__AHL93096

SEQ ID NO: 222170 - RNA, 1401 nt, Artificial Sequence; identical to SEQ ID NO: 220889
  derived and/or modified CDS sequence (opt5) from neuraminidase__InfluenzaB__AHL93107

SEQ ID NO: 222171 - RNA, 1401 nt, Artificial Sequence; identical to SEQ ID NO: 220889
  derived and/or modified CDS sequence (opt5) from neuraminidase__InfluenzaB__AHL93118

SEQ ID NO: 222172 - RNA, 1401 nt, Artificial Sequence; identical to SEQ ID NO: 220860
  derived and/or modified CDS sequence (opt5) from neuraminidase__InfluenzaB__AHL93129

SEQ ID NO: 222173 - RNA, 1401 nt, Artificial Sequence; identical to SEQ ID NO: 220889
  derived and/or modified CDS sequence (opt5) from neuraminidase__InfluenzaB__AHL93140

SEQ ID NO: 222174 - RNA, 1401 nt, Artificial Sequence; identical to SEQ ID NO: 220860
  derived and/or modified CDS sequence (opt5) from neuraminidase__InfluenzaB__AHL93151

SEQ ID NO: 222175 - RNA, 1401 nt, Artificial Sequence; identical to SEQ ID NO: 220889
  derived and/or modified CDS sequence (opt5) from neuraminidase__InfluenzaB__AHL93162

SEQ ID NO: 222176 - RNA, 1401 nt, Artificial Sequence; identical to SEQ ID NO: 220889
  derived and/or modified CDS sequence (opt5) from neuraminidase__InfluenzaB__AHL93173

SEQ ID NO: 222177 - RNA, 1401 nt, Artificial Sequence; identical to SEQ ID NO: 220860
  derived and/or modified CDS sequence (opt5) from neuraminidase__InfluenzaB__AHL93184

SEQ ID NO: 222178 - RNA, 1401 nt, Artificial Sequence; identical to SEQ ID NO: 220889
  derived and/or modified CDS sequence (opt5) from neuraminidase__InfluenzaB__AHL93195

SEQ ID NO: 222179 - RNA, 1401 nt, Artificial Sequence; identical to SEQ ID NO: 220889
  derived and/or modified CDS sequence (opt5) from neuraminidase__InfluenzaB__AHL93206

SEQ ID NO: 222180 - RNA, 1401 nt, Artificial Sequence; identical to SEQ ID NO: 221033
  derived and/or modified CDS sequence (opt5) from neuraminidase__InfluenzaB__AHL93217

SEQ ID NO: 222181 - RNA, 1401 nt, Artificial Sequence; identical to SEQ ID NO: 221033
  derived and/or modified CDS sequence (opt5) from neuraminidase__InfluenzaB__AHL93228

SEQ ID NO: 222182 - RNA, 1401 nt, Artificial Sequence
  derived and/or modified CDS sequence (opt5) from neuraminidase__InfluenzaB__AHL93239
augcugcccagcaccauccagacacucacgcuguuccuuaccuccggcggggugcugcucucucuguacgucagcgccucccuuucuuaucugcucuacagcgacauucugcugaaguuuuccccuacagagaucaccgcuccgacaaugccccucgauugcgccaacgcgucuaauguucaagcugugaacagaagcgccaccaaaggagugacauuccugcuuccugaacccgaguggaccuauccucggcuguccugucccggcagcacguuucagaaggcccuccugauuucuccucaccgcuucggggaaaccaaaggaaauuccgcuccgcuuaucauuagagagcccuuuaucgccugcggcccuaacgaauguaagcauuucgcucugacacacuacgccgcgcagcccgggggauauuacaauggcacccggggcgaccgcaacaaacucagacaucugaucagcgucaagcuggggaagauuccuacaguggaaaauucuaucuuucacauggccgcuugguccggaagcgccugccaugauggcaaagaguggaccuauauugggguugacggacccgauaacaaugcucuccugaaggugaaauacggcgaggccuacacggacacauaucacucuuacgcgaacaagauccuucggacccaggaguccgccuguaauugcauugggggaaacuguuaucugaugaucacagauggcagcgcuuccggcgucucugaaugccgcuuccucaaaauuagagaggggcggaucaucaaggagauuuuuccgaccggacgcgugaagcacaccgaagaguguacaugcggcuucgccagcaauaaaacgaucgaaugugcuugcagagacaacuccuacaccgccaagcggccuuuuguuaaacugaauguggagacagauaccgccgaaauucgccuuaugugcacagacaccuaucuggauacgcccagaccugacgaugggagcaucacaggacccugugagucuaacggcgacaagggguccggaggcauuaaaggcggguucguccaucaacggauggagagcaagaucggacgcugguacucuagaaccaugagcaaaaccgaacggaugggcauggggcucuaugugaaguacgacggagaucccugggcugacuccgaugcgcuggccuuuucuggcgugauggucagcaugaaggagccugggugguacuccuucggcuucgaaaucaaagacaagaaaugcgauguuccguguauuggaaucgagauggugcacgacggcgggaaggaaacauggcauagcgcugccaccgccauuuauugccugaugggaucuggccagcuccugugggauacagugacgggggucgacauggcucuuuga

SEQ ID NO: 222183 - RNA, 1401 nt, Artificial Sequence
  derived and/or modified CDS sequence (opt5) from neuraminidase__InfluenzaB__AHL93250
augcugcccagcaccauccagaugcucacacuguuccuuacguccggcggggugcugcucucucuguacgucagcgccucccuuucuuaucugcucuacagcgacauucugcugaaguuuuccccuaccgagaucacagcuccgaccaugccccucgauugcgccaacgcgucuaauguucacgcugugaacagaagcgccacaaaaggagugaccuuccugcuuccugaacccgaguggacauauccucggcuguccugucccggcagcaccuuucaaaaggcccuccugauuucuccucaucgcuucggggaaacgaaaggaaauuccgcuccgcuuaucauuagagagcccuuuaucgccugcggcccuaacgaauguaagcacuucgcucugacccauuacgccgcgcagcccgggggauauuacaauggcacacggggcgaccgcaacaaacucagacaccugaucagcgucaagcuggggaagauuccuaccguggaaaauucuaucuuucauauggccgcuugguccggaagcgccugccacgauggcaaagaguggacauauauugggguugacggacccgauaacaaugcucuccugaagaucaaauacggcgaggccuacaccgacacguaucacucuuacgcgaacaauauucuucggacacaggaguccgccuguaacugcaucgggggaaauuguuaucugaugauuaccgauggcagcgcuuccggcgugucugaaugccgcuuccucaagaucagagaggggcggaucauuaaagagaucuuuccgacaggacgcgucaagcauaccgaagaguguaccugcggcuucgccagcaacaagacaauugaaugugcuugcagagacaauuccuacacggccaaacggccuuuugugaagcugaacguugagaccgauacagccgaaauccgccuuaugugcaccgacacauaucuggauacccccagaccugacgaugggagcauuacgggacccugugagucuaacggcgacaaaggguccggaggcaucaagggcggguucgugcaccagcggauggcuagcaaaaucggacgcugguacucuagaacaaugagcaagaccgagcggaugggcauggggcucuaugucaaauacgacggagaucccuggaccgacuccgaugcgcuggccuuuagaggcgugauggugucuaugaaggaaccugggugguacagcuucggcuucgagauuaaggacaaaaagugcgaugucccguguaucggaauugaaaugguucaugacggcgggaaagagacauggcacuccgcugccaccgccaucuauugccugaugggaagcggccaacuccugugggauacagugacggggguggacauggcucuuuga

SEQ ID NO: 222184 - RNA, 1401 nt, Artificial Sequence; identical to SEQ ID NO: 221033
  derived and/or modified CDS sequence (opt5) from neuraminidase__InfluenzaB__AHL93261

SEQ ID NO: 222185 - RNA, 1401 nt, Artificial Sequence; identical to SEQ ID NO: 221033
  derived and/or modified CDS sequence (opt5) from neuraminidase__InfluenzaB__AHL93272

SEQ ID NO: 222186 - RNA, 1401 nt, Artificial Sequence; identical to SEQ ID NO: 221033
  derived and/or modified CDS sequence (opt5) from neuraminidase__InfluenzaB__AHL93283

SEQ ID NO: 222187 - RNA, 1401 nt, Artificial Sequence; identical to SEQ ID NO: 221033
  derived and/or modified CDS sequence (opt5) from neuraminidase__InfluenzaB__AHL93294

SEQ ID NO: 222188 - RNA, 1401 nt, Artificial Sequence
  derived and/or modified CDS sequence (opt5) from neuraminidase__InfluenzaB__AHL93305
augcugcccagcaccauccagacacucacgcuguuccuuaccuccggcggggugcugcucucucuguacgucagcgccucccuuucuuaucugcucuacagcgacauucugcugaaguuuuccccuacagagaucaccgcuccgacaaugccccucgauugcgccaacgcgucuaauguucaagcugugaacagaagcgccaccaaaggagugacacugcuucugccugaacccgaguggaccuauccucggcucuccugucccggcagcacguuccagaaggcccugcuuauuucuccucaccgcuuuggggaaaccaaaggaaauuccgcuccgcugaucauuagagagcccuucgucgccugcggcccuaacgaauguaagcauuuugcucucacacacuacgccgcgcagcccgggggauauuacaauggcacccggggcgaccgcaacaaacugagacaucugaucagcgugaagcucgggaagaucccuacaguugaaaauucuauuuuccacauggccgcuugguccggaagcgccugccaugauggcaaagaguggaccuauaucgggguggacggacccgauaacaaugcucugcuuaaggucaaauacggcgaggccuacacggacacauaucacucuuacgcgaacaagauucugcggacccaggaguccgccuguaauugcaucgggggaaacuguuaucucaugauuacagauggcagcgcuuccggcgugucugaaugccgcuuucugaaaaucagagaggggcggauuaucaaggagaucuucccgaccggacgcguuaagcacaccgaagaguguacaugcggcuuugccagcaauaaaacgauugaaugugcuugcagagacaacuccuacaccgccaagcggccuuucgugaaacuuaaugucgagacagauaccgccgaaauccgccugaugugcacagacaccuaucucgauacgcccagaccuaacgacgggagcauuacaggacccugugagucuaacggcgauaagggguccggaggcaucaaaggcggguuugugcaucaacggauggagagcaagauuggacgcugguacucuagaaccaugagcaaaaccgaacggaugggcauggggcuguaugugaaguacgacggagaccccugggcugauuccgacgcgcuggccuucucuggcgucaugguuagcaugaaggagccugggugguacuccuuuggcuucgaaaucaaagauaagaaaugcgacgugccguguaucggaauugagauggugcacgauggcgggaaggaaacauggcauagcgcugccaccgccaucuauugccucaugggaucuggccagcugcuuugggacacagucacggggguggauauggcucuguga

SEQ ID NO: 222189 - RNA, 1401 nt, Artificial Sequence; identical to SEQ ID NO: 221033
  derived and/or modified CDS sequence (opt5) from neuraminidase__InfluenzaB__AHL93316

SEQ ID NO: 222190 - RNA, 1401 nt, Artificial Sequence
  derived and/or modified CDS sequence (opt5) from neuraminidase__InfluenzaB__AHL93338
augcugcccagcaccauccagacacucacgcuguuccuuaccuccggcggggugcugcucucucuguacgucagcgccucccuuucuuaucugcucuacagcgacauucugcugaaguuuuccccuacagagaucaccgcuccgacaaugccccucgauugcgccaacgcgucuaauguucaagcugugaacagaagcgccaccaaaggagugacacugcuucugccugaacccgaguggaccuauccucggcucuccugucccggcagcacguuccagaaggcccugcuuauuucuccucaccgcuuuggggaaaccaaaggaaauuccgcuccgcugaucauuagagagcccuucaucgccugcggcccuaacgaauguaagcauuuugcucucacacacuacgccgcgcagcccgggggauauuacaauggcacccggggcgaccgcaacaaacugagacaucugaucagcgucaagcucgggaagauuccuacaguggaaaauucuaucuuccacauggccgcuugguccggaagcgccugccaugauggcaaagaguggaccuauauugggguugacggacccgauaacaaugcucugcuuaaggugaaauacggcgaggccuacacggacacauaucacucuuacgcgaacaagauccugcggacccaggaguccgccuguaauugcauugggggaaacuguuaucucaugaucacagauggcagcgcuuccggcgucucugaaugccgcuuucugaaaauuagagaggggcggaucaucaaggagauuuucccgaccggacgcgugaagcacaccgaagaguguacaugcggcuuugccagcaauaaaacgaucgaaugugcuugcagagacaacuccuacaccgccaagcggccuuucguuaaacuuaauguggagacagaugccgcugaaauucgccugaugugcaccgacacauaucucgauacccccagaccuaacgacgggagcaucacgggacccugugagucuaacggcgauaagggguccggaggcauuaaaggcggguuuguccaucaacggauggagagcaagaucggacgcugguacucuagaacaaugagcaaaaccgaacggaugggcauggggcuguaugugaaguacgacggagaccccugggcggauuccgacgcccuggcuuucucuggcgugauggucagcaugaaggagccugggugguacuccuuuggcuucgaaaucaaagauaagaaaugcgacguuccguguauuggaaucgagauggugcacgauggcgggaaggaaaccuggcauagcgccgccacagcuauuuauugccucaugggaucuggccagcugcuuugggacaccgugacaggggucgauauggcccuguga

SEQ ID NO: 222191 - RNA, 1401 nt, Artificial Sequence
  derived and/or modified CDS sequence (opt5) from neuraminidase__InfluenzaB__AHL93349
augcugcccagcaccauccagacacucacgcuguuccuuaccuccggcggggugcugcucucucuguacgucagcgccucccuuucuuaucugcucuacagcgacauucugcugaaguuuuccccuacagagaucaccgcuccgacaaugccccucgauugcgccaacgcgucuaauguucaagcugugaacagaagcgccaccaaaggagugacacugcuucugccugaacccgaguggaccuauccucggcucuccugucagggcagcacguuccagaaggcccugcuuauuucuccccaccgcuuuggggaaaccaaaggaaauuccgcuccucugaucauuagagagccguucaucgccugcggccccaacgaauguaagcauuuugcucucacacacuacgccgcgcagccugggggauauuacaauggcacccggggcgaccgcaacaaacugagacaucugaucagcgucaagcucgggaagauucccacaguggaaaauucuaucuuccacauggccgcuugguccggaagcgccugccaugauggcaaagaguggaccuauauugggguugacggaccugauaacaaugcucugcuuaaggugaaauacggcgaggccuacacggacacauaucacucuuacgcgaacaagauccugcggacccaagaguccgccuguaauugcauugggggaaacuguuaucucaugaucacagauggcagcgcuuccggcgucucugaaugccgcuuucugaaaauuagagaggggcggaucaucaaggagauuuuccccaccggacgcgugaagcacaccgaagaguguacaugcggcuuugccagcaauaaaacgaucgaaugugcuugcagagacaacuccuacaccgccaagcggccguucguuaaacuuaauguggagacagauaccgccgaaauucgccugaugugcacagacaccuaucucgauacgccuagacccaacgacgggagcaucacaggaccuugugagucuaacggcgauaagggguccggaggcauuaaaggcggguuuguccaucagcggauggagagcaagaucggacgcugguacucuagaaccaugagcaaaaccgaacggaugggcauggagcuguaugugaaguacgacggggaccccugggcugauuccgacgcgcuggccuucucuggagugauggucagcaugaaggaacccggcugguacuccuuuggguucgagaucaaagauaagaaaugcgacguuccuuguauuggcaucgaaauggugcacgauggaggcaaggagacauggcauagcgcugccaccgccauuuauugccucauggggucuggacagcugcuuugggacacagugacgggcgucaauauggcucuguga

SEQ ID NO: 222192 - RNA, 1401 nt, Artificial Sequence; identical to SEQ ID NO: 221033
  derived and/or modified CDS sequence (opt5) from neuraminidase__InfluenzaB__AHL93371

SEQ ID NO: 222193 - RNA, 1401 nt, Artificial Sequence
  derived and/or modified CDS sequence (opt5) from neuraminidase__InfluenzaB__AHL93382
augcugcccagcaccauccagacacucacgcuguuccuuaccuccggcggggugcugcucucucuguacgucagcgccucccuuucuuaucugcucuacagcgacauucugcugaaguuuuccccuacagagaucaccgcuccgacaaugccccucgauugcgccaacgcgucuaauguucaagcugugaacagaagcgccaccaaaggagugacacugcuucugccugaacccgaguggaccuauccucggcucuccugucccggcagcacguuccagaaggcccugcuuauuucuccucaccgcuuuggggaaaccaaaggaaauuccgcuccgcugaucauuagagagcccuucaucgccugcggcccuaacgaauguaagcauuuugcucucacacacuacgccgcgcagcccgggggauauuacaauggcacccggggcgaccgcaacaaacugagacaucugaucagcgucaagcucgggaagauuccuacaguggaaaauucuaucuuccacauggccgcuugguccggaagcgccugccaugauggcaaagaguggaccuauauugggguugacggacccgauaacaaugcucugcuuaaggugaaauacggcgaggccuacacggacacauaucacucuuacgcgaacaagauccugcggacccaggaguccgccuguaauugcauugggggaaacuguuaucucaugaucacagauggcagcgcuuccggcgucucugaaugccgcuuucugaaaauuagagaggggcggaucaucaaggagauuuucccgaccggacgcgugaagcacaccgaagaguguacaugcggcuuugccagcaauaaaacgaucgaaugugcuugcagagacaacuccuacaccgccaagcggccuuucguuaaacuuaauguggagacagauaccgccgaaauucgccugaugugcacagacaccuaucucgauacgcccagaccuaacgacgggagcaucacaggacccugugagucuaacggcgauaagggguccggaggcauuaaaggcggguuuguccaucaacggauggagagcaagaucggacgcugguacucuagaaccaugagcaaaaccgaacggaugggcauggagcuguaugugaaguacgacggggaccccugggcugauuccgacgcgcuggccuucucuggagugauggucagcaugaaggaaccuggcugguacuccuuuggguucgagaucaaagauaagaaaugcgacguuccguguauuggcaucgaaauggugcacgauggaggcaaggagacauggcauagcgcugccaccgccauuuauugccucauggggucuggacagcugcuuugggacacagugacgggcgucaauauggcucuguga

SEQ ID NO: 222194 - RNA, 1401 nt, Artificial Sequence; identical to SEQ ID NO: 221033
  derived and/or modified CDS sequence (opt5) from neuraminidase__InfluenzaB__AHL93393

SEQ ID NO: 222195 - RNA, 1401 nt, Artificial Sequence; identical to SEQ ID NO: 221033
  derived and/or modified CDS sequence (opt5) from neuraminidase__InfluenzaB__AHL93404

SEQ ID NO: 222196 - RNA, 1401 nt, Artificial Sequence; identical to SEQ ID NO: 221033
  derived and/or modified CDS sequence (opt5) from neuraminidase__InfluenzaB__AHL93415

SEQ ID NO: 222197 - RNA, 1401 nt, Artificial Sequence; identical to SEQ ID NO: 221033
  derived and/or modified CDS sequence (opt5) from neuraminidase__InfluenzaB__AHL93426

SEQ ID NO: 222198 - RNA, 1401 nt, Artificial Sequence; identical to SEQ ID NO: 221033
  derived and/or modified CDS sequence (opt5) from neuraminidase__InfluenzaB__AHL93437

SEQ ID NO: 222199 - RNA, 1401 nt, Artificial Sequence; identical to SEQ ID NO: 222193
  derived and/or modified CDS sequence (opt5) from neuraminidase__InfluenzaB__AHL93448

SEQ ID NO: 222200 - RNA, 1404 nt, Artificial Sequence
  derived and/or modified CDS sequence (opt5) from neuraminidase__InfluenzaB__AHL93459
augcugcccagcaccauccagacacucacgcuguuccuuaccuccggcggggugcugcucucucuguacgucagcgccucccuuucuuaucugcucuacagcgacauucugcugaaguuuuccccuacagagaucaccgcuccgacaaugccccucgauugcgccaacgcgucuaauguucaagcugugaacagaagcgccaccaaaggagugacacugcuucugcucccugaacccgaguggaccuauccucggcuguccugucccggcagcacguuccagaaggcccuucugauuucuccucaccgcuuuggggaaaccaaaggaaauuccgcuccgcucaucauuagagagcccuucaucgccugcggcccuaacgaauguaagcauuuugcucugacacacuacgccgcgcagcccgggggauauuacaauggcacccggggcgaccgcaacaaacugagacaucucaucagcgucaagcuggggaagauuccuacaguggaaaauucuaucuuccacauggccgcuugguccggaagcgccugccaugauggcaaagaguggaccuauauugggguugacggacccgauaacaaugcccuucugaaggugaaauacggcgaggcuuacacggacacauaucacucuuacgcgaacaagauccuccggacccaggaguccgccuguaauugcauugggggaaacuguuaucugaugaucacagauggcagcgcuuccggcgucucugaaugccgcuuucuuaaaauuagagaggggcggaucaucaaggagauuuucccgaccggacgcgugaagcacaccgaagaguguacaugcggcuuugccagcaauaaaacgaucgaaugugcuugcagagacaacuccuacaccgccaagcggccuuucguuaaacugaauguggagacagauaccgccgaaauucgccucaugugcacagacaccuaucuggauacgcccagaccuaacgacgggagcaucacaggacccugugagucuaacggcgauaagggguccggaggcauuaaaggcggguuuguccaucaacggauggagagcaagaucggacgcugguacucuagaaccaugagcaaaaccgaacggaugggcauggggcuguaugugaaguacgacggagaccccugggcugauuccgacgcgcucgccuucucuggcgugauggucagcaugaaggagccugggugguacuccuuuggcuucgaaaucaaagauaagaaaugcgacguuccguguauuggaaucgagauggugcacgauggcgggaaggaaacauggcauagcgcugccaccgccauuuauugccugaugggaucuggccagcuucugugggacacagugacgggggucgauauggcucucuga

SEQ ID NO: 222201 - RNA, 1401 nt, Artificial Sequence
  derived and/or modified CDS sequence (opt5) from neuraminidase__InfluenzaB__AHL93470
augcugcccagcaccauccagacacucacgcuguuccuuaccuccggcggggugcugcucucucuguacgucagcgccucccuuucuuaucugcucuacagcgacauucugcugaaguuuuccccuacagagaucaccgcuccgacaaugccccucgauugcgccaacgcgucuaauguucaagcugugaacagaagcgccaccaaaggagugacacugcuucugccugaacccgaguggaccuauccucggcucuccugucccggcagcacguuccagaaggcccugcuuauuucuccucaccgcuuuggggaaaccaaaggaaauuccgcuccgcugaucauuagagagcccuucaucgccugcggcccuaacgaauguaagcauuuugcucucacacacuacgccgcgcagcccgggggauauuacaauggcacccggggcgaccgcaacaaacugagacaucugaucagcgucaagcucgggaagauuccuacaguggaaaauucuaucuuccacauggccgcuugguccggaagcgccugccaugauggcaaagaguggaccuauauugggguugacggacccgauaacaaugcucugcuuaaggugaaauacggcgaggccuacacggacacauaucacucuuacgcgaacaagauccugcggacccaggaguccgccuguaauugcauugggggaaacuguuaucucaugaucacagauggcagcgcuuccggcgucucugaaugccgcuuucugaaaauuagagaggggcggaucaucaaggagauuuucccgaccggacgcgugaagcacaccgaagaguguacaugcggcuuugccagcaauaaaacgaucgaaugugcuugcagagacaacuccuacaccgccaagcggccuuucguuaaacuuaauguggagacagauaccgccgaaauucgccugaugugcacagacaccuaucucgauacgcccagaccuaacgacgggagcaucacaggacccugugagucuaacggcgauaagggguccggaggcauuaaaggcggguuuguccaucaacggauggagagcaagaucggacgcugguacucuagaaccaugagcaaaaccgaacggaugggcauggggcuguaugugaaguacgacggagaccccugggcugauuccgacgcgcugacauucucuggcgugauggucagcaugaaggagccugggugguacuccuuuggcuucgaaaucaaagauaagaaaugcgacguuccguguauuggaaucgagauggugcacgauggcgggaaggaaaccuggcauagcgccgcuacagccauuuauugccucaugggaucuggccagcugcuuugggacacggugaccggggucgauauggcccuguga

SEQ ID NO: 222202 - RNA, 1401 nt, Artificial Sequence; identical to SEQ ID NO: 220970
  derived and/or modified CDS sequence (opt5) from neuraminidase__InfluenzaB__AHL93481

SEQ ID NO: 222203 - RNA, 1401 nt, Artificial Sequence; identical to SEQ ID NO: 221028
  derived and/or modified CDS sequence (opt5) from neuraminidase__InfluenzaB__AHL93492

SEQ ID NO: 222204 - RNA, 1401 nt, Artificial Sequence; identical to SEQ ID NO: 220889
  derived and/or modified CDS sequence (opt5) from neuraminidase__InfluenzaB__AHL93503

SEQ ID NO: 222205 - RNA, 1401 nt, Artificial Sequence
  derived and/or modified CDS sequence (opt5) from neuraminidase__InfluenzaB__AHL93514
augcugcccagcaccauccagacacucacgcuguuccuuaccuccggcggggugcugcucucucuguacgucagcgccucccuuucuuaucugcucuacagcgacauucugcugaaguuuuccccuacagagaucaccgcuccgacaaugccccucgauugcgccaacgcgucuaauguucaagcugugaacagaagcgccaccaaaggagugacacugcuucugccugaacccgaguggaccuauccucggcucuccugucccggcagcacguuccagaaggcccugcuuauuucuccucaccgcuuuggggaaaccaaaggaaauuccgcuccgcugaucauuagagagcccuucaucgccugcggcccuaacgaauguaagcauuuugcucucacacacuacgccgcgcagcccgggggauauuacaauggcacccggggcgaccgcaacaaacugagacaucugaucagcauuaagcucgggaagaucccuacagucgaaaauucuauuuuccacauggccgcuugguccggaagcgccugccaugauggcaaagaguggaccuauaucgggguggacggacccgauaacaaugcucugcuuaagguuaaauacggcgaggccuacacggacacauaucacucuuacgcgaacaagauucugcggacccaggaguccgccuguaauugcaucgggggaaacuguuaucucaugauuacagauggcagcgcuuccggcgugucugaaugccgcuuucugaaaaucagagaggggcggaucauuaaggagaucuucccgaccggacgcgucaagcacaccgaagaguguacaugcggcuuugccagcaauaaaacgauugaaugugcuugcagagacaacuccuacaccgccaagcggccuuucgugaaacuuaauguugagacagauaccgccgaaauccgccugaugugcacagacaccuaucucgauacgcccagaccugacgaugggagcauuacaggaucuugugaguccaacggcgacaaggggagcggaggcaucaaaggcggguuugugcaucaacggauggagucuaagaucggacgcugguacagcagaaccauguccaaaaccgaacggaugggcauggggcuguaugucaaguacgacggagaucccugggcugacucugaugcgcugacauucagcggcgugaugguguccaugaaggagcccgggugguacagcuuuggcuucgaaauuaaagacaagaaaugcgaugucccuuguaucggaauugagaugguucacgacggcgggaaggaaaccuggcauucugccgcuacagccaucuauugccucaugggauccggccagcugcuuugggauacggugaccgggguggacauggcccuguga

SEQ ID NO: 222206 - RNA, 1401 nt, Artificial Sequence; identical to SEQ ID NO: 220889
  derived and/or modified CDS sequence (opt5) from neuraminidase__InfluenzaB__AHL93525

SEQ ID NO: 222207 - RNA, 1401 nt, Artificial Sequence; identical to SEQ ID NO: 221028
  derived and/or modified CDS sequence (opt5) from neuraminidase__InfluenzaB__AHL93536

SEQ ID NO: 222208 - RNA, 1401 nt, Artificial Sequence
  derived and/or modified CDS sequence (opt5) from neuraminidase__InfluenzaB__AHL93558
augcugcccagcaccauccagacacucacgcuguuccuuaccuccggcggggugcugcucucucuguacgucagcgccucccuuucuuaucugcucuacagcgacauucugcugaaguuuuccccuacagagaucaccgcuccggccaugccccucgauugcgcgaacgcuucuaauguucaagccgugaacagaagcgccacaaaaggagugacccugcuucugccugaacccgaguggacauauccucggcucuccugucccggcagcaccuuccagaaggcucugcuuauuucuccucaccgcuuuggggaaacgaaaggaaauuccgccccgcugaucauuagagagcccuucaucgcuugcggcccuaacgaauguaagcauuuugcccucacccacuacgcggcccagcccgggggauauuacaauggcacacggggcgaccgcaacaaacugagacaucugaucagcgucaagcucgggaagauuccuaccguggaaaauucuaucuuccacauggcugccugguccggaagcgcuugccaugauggcaaagaguggacauauauugggguugacggacccgauaacaaugcccugcuuaaggugaaauacggcgaggcguacaccgacacguaucacucuuacgccaacaagauccugcggacacaggaguccgcuuguaauugcauugggggaaacuguuaucucaugaucaccgauggcagcgccuccggcgucucugaaugccgcuuucugaaaauuagagaggggcggaucaucaaggagauuuucccgacaggacgcgugaagcacaccgaagaguguaccugcggcuuugcuagcaauaaaacaaucgaaugugccugcagagacaacuccuacacggccaagcggccuuucguuaaacuuaauguggagaccgauacagcugaaauucgccugaugugcaccgacacauaucucgauacccccagaccuaacgacgggagcaucacgggacccugugagucugauggcgacaagggguccggaggcauuaaaggcggguuuauccaucaacggauggagagcaagaucggacgcugguacucuagaacaaugagcaaaaccgaacggaugggcauggggcuguaugucaaguacgacggagaucccugggcggacuccgaugcccuggcuuucucuggcgugauggugagcaugaaggagccugggugguacuccuuuggcuucgaaauuaaagacaagaaaugcgaugucccguguaucggaauugagaugguucacgacggcgggaaggaaaccuggcauagcgccgccacagcuaucuauugccucaugggaucuggccagcugcuuugggauaccgugacagggguggacauggcccuguga

SEQ ID NO: 222209 - RNA, 1401 nt, Artificial Sequence
  derived and/or modified CDS sequence (opt5) from neuraminidase__InfluenzaB__AHL93569
augcugcccagcaccauccagacacucacgcuguuccuuaccuccggcggggugcugcucucucuguacgucagcgccucccuuucuuaucugcucuacagcgacauucugcugaaguuuuccccuacagagaucaccgcuccgacaaugccccucgauugcgccaacgcgucuaauguucaagcugugaacagaagcgccaccaaaggagugacacugcuucugccugaacccgaguggaccuauccucggcucuccugucccggcagcacguuccagaaggcccugcuuauuucuccucaccgcuuuggggaaaccaaaggaaauuccgcuccgcugaucauuagagagcccuucaucgccugcggcccuaacgaauguaagcauuuugcucucacacacuacgccgcgcagcccgggggauauuacaauggcacccggggcgaccgcaacaaacugagacaucugaucagcgucaagcucgggaagauuccuacaguggaaaauucuaucuuccacauggccgcuugguccggaagcgccugccaugauggcaaagaguggaccuauauugggguugacggacccgauaacaaugcucugcuuaaggugaaauacggcgaggccuacacggacacauaucacucuuacgcgaacaagauccugcggacccaggaguccgccuguaauugcauugggggaaacuguuaucucaugaucacagauggcagcgcuuccggcgucucugaaugccgcuuucugaaaauuagagaggggcggaucaucaaggagauuuucccgaccggacgcgugaagcacaccgaagaguguacaugcggcuuugccagcaauaaaacgaucgaaugugcuugcagagacaacuccuacaccgccaagcggccuuucguuaaacuuaauguggagacagauaccgccgaaauucgccugaugugcacagacaccuaucucgauacgcccagaccuaacgacgggagcaucacaggacccugugagucugauggcgacaagggguccggaggcauuaaaggcggguuuguccaucaacggauggagagcaagaucggacgcugguacucuagaaccaugagcaaaaccgaacggaugggcauggggcuguaugugaaguacgacggagaucccugggcugacuccgaugcgcugacauucucuggcgugauggucagcaugaaggagccugggugguacuccuuuggcuucgaaaucaaagacaagaaaugcgauguuccguguauuggaaucgagauggugcacgacggcgggaaggaaaccuggcauagcgccgcuacagccauuuauugccucaugggaucuggccagcugcuuugggauacggugaccggggucgacauggcccuguga

SEQ ID NO: 222210 - RNA, 1401 nt, Artificial Sequence; identical to SEQ ID NO: 221028
  derived and/or modified CDS sequence (opt5) from neuraminidase__InfluenzaB__AHL93580

SEQ ID NO: 222211 - RNA, 1401 nt, Artificial Sequence; identical to SEQ ID NO: 221028
  derived and/or modified CDS sequence (opt5) from neuraminidase__InfluenzaB__AHL93591

SEQ ID NO: 222212 - RNA, 1401 nt, Artificial Sequence
  derived and/or modified CDS sequence (opt5) from neuraminidase__InfluenzaB__AHL93613
augcugcccagcaccauccagacacucacgcuguuccuuaccuccggcggggugcugcucucucuguacgucagcgccucccuuucuuaucugcucuacagcgacauucugcugaaguuuuccccuacagagaucaccgcuccgacaaugccccucgauugcgccaacgcgucuaauguucaagcugugaacagaagcgccaccaaaggagugacacugcuucugccugaacccgaguggaccuauccucggcucuccugucccggcagcacguuccagaaggcccugcuuauuucuccucaccgcuuuggggaaaccaaaggaaauuccgcuccgcugaucauuagagagcccuucaucgccugcggcccuaacgaauguaagcauuuugcucucacacacuacgccgcgcagcccgggggauauuacaauggcacccggggcgaccgcaacaaacugagacaucugaucagcgucaagcucgggaagauuccuacaguggaaaauucuaucuuccacauggccgcuugguccggaagcgccugccaugauggcaaagaguggaccuauauugggguugacggacccgauaacaaugcucugcuuaaggugaaauacggcgaggccuacacggacacauaucacucuuacgcgaacaagauccugcggacccaggaguccgccuguaauugcauugggggaaacuguuaucucauggucacagauggcagcgcuuccggcgugucugaaugccgcuuucugaaaaucagagaggggcggauuaucaaggagaucuucccgaccggacgcguuaagcacaccgaagaguguacaugcggcuuugccagcaauaaaacgauugaaugugcuugcagagacaacuccuacaccgccaagcggccuuucgugaaacuuaaugucgagacagauaccgccgaaauccgccugaugugcacagacaccuaucucgauacgcccagaccugacgaugggagcauuacaggacccugugagucuaacggcgacaagggguccggaggcaucaaaggcggguuugugcaucaacggauggagagcaagauuggacgcugguacucuagaaccaugagcaaaaccgaacggaugggcauggggcuguaugugaaguacgacggagaucccugggcugacuccgaugcgcuggucuucucuggcguuauggugagcaugaaggagccugggugguacuccuuuggcuucgaaaucaaagacaagaaaugcgaugugccguguaucggaauugagaugguccacgacggcgggaaggaaacauggcauagcgccgcuaccgccaucuauugccucaugggaucuggccagcugcuuugggauacagugacggggguugacauggcccuguga

SEQ ID NO: 222213 - RNA, 1401 nt, Artificial Sequence; identical to SEQ ID NO: 221028
  derived and/or modified CDS sequence (opt5) from neuraminidase__InfluenzaB__AHL93624

SEQ ID NO: 222214 - RNA, 1401 nt, Artificial Sequence; identical to SEQ ID NO: 222212
  derived and/or modified CDS sequence (opt5) from neuraminidase__InfluenzaB__AHL93635

SEQ ID NO: 222215 - RNA, 1401 nt, Artificial Sequence; identical to SEQ ID NO: 222212
  derived and/or modified CDS sequence (opt5) from neuraminidase__InfluenzaB__AHL93646

SEQ ID NO: 222216 - RNA, 1401 nt, Artificial Sequence; identical to SEQ ID NO: 220889
  derived and/or modified CDS sequence (opt5) from neuraminidase__InfluenzaB__AHL93657

SEQ ID NO: 222217 - RNA, 1401 nt, Artificial Sequence; identical to SEQ ID NO: 221028
  derived and/or modified CDS sequence (opt5) from neuraminidase__InfluenzaB__AHL93668

SEQ ID NO: 222218 - RNA, 1401 nt, Artificial Sequence
  derived and/or modified CDS sequence (opt5) from neuraminidase__InfluenzaB__AHL93679
augcugcccagcaccauccagacacucacgcuguuccuuaccuccggcggggugcugcucucucuguacgucagcgcccuucuguccuaucuccuguacucugacauucugcucaaguuuagcccuacagagaucaccgcuccgacaaugucccuggauugcgccaacgcgucuaauguucaagcugugaacagaagcgccaccaaaggagugacauuccuucugcccgaaccugaguggaccuauccccggcucuccuguccuggcagcacguuucagaaggcccugcuuauuucuccccaccgcuucggggaaaccaaaggaaauuccgcuccucugaucauuagagagccguuuaucgccugcggccccaacgaauguaagcauuucgcucucacacacuacgccgcgcagccugggggauauuacaauggcacccggggcgaccgcaacaaacugagacaucugaucagcgucaagcucgggaagauucccacaguggaaaauucuaucuuucacauggccgcuugguccggaagcgccugccaugauggcaaagaguggaccuauauugggguugacggaccugauaacgacgcucugcuuaaggugaaauacggcgaggccuacacggauacauaucacucuuacgcgaauaagauccugcggacccaggaguccgccuguaacugcauugggggaaauuguuaucucaugaucacagacggcagcgcuuccggcgucucugaaugccgcuuccugaaaauuagagaggggcggaucaucaaggagauucuucccaccggacgcgugaagcacaccgaagaguguacaugcggcuuugccagcaacaaaacgaucgaaugugcuugcagagauaauuccuacaccgccaagcggccguucguuaaacugaacguggagacagacaccgccgaaauucgccucaugugcacagauaccuaucuggacacgccuagacccgaugacgggagcaucacaggaccuugugagucuaauggcgacaagggguccggaggcauuaaaggcggguuuguccaucaacggauggagagcaagaucggacgcugguacucuagaaccaugagcaaaaccgaacggaugggcauggggcuguaugugaaguacgauggagaccccugggcugauuccgacgcgcucgccuucucuggcgugauggucagcaugaaggagcccgggugguacuccuuuggcuucgaaaucaaagauaagaaaugcgacguuccuuguauuggaaucgagauggugcacgauggcgggaaggaaacauggcauagcgcugccaccgccauuuauugccugaugggaucuggccagcuucugugggacacagugacgggggucgauauggcucucuga

SEQ ID NO: 222219 - RNA, 1401 nt, Artificial Sequence; identical to SEQ ID NO: 222212
  derived and/or modified CDS sequence (opt5) from neuraminidase__InfluenzaB__AHL93690

SEQ ID NO: 222220 - RNA, 1401 nt, Artificial Sequence; identical to SEQ ID NO: 222212
  derived and/or modified CDS sequence (opt5) from neuraminidase__InfluenzaB__AHL93701

SEQ ID NO: 222221 - RNA, 1401 nt, Artificial Sequence; identical to SEQ ID NO: 222212
  derived and/or modified CDS sequence (opt5) from neuraminidase__InfluenzaB__AHL93712

SEQ ID NO: 222222 - RNA, 1401 nt, Artificial Sequence
  derived and/or modified CDS sequence (opt5) from neuraminidase__InfluenzaB__AHL93723
augcugcccagcaccauccagaugcucacacuguuccuuacguccggcggggugcugcucucucuguacgucagcgccucccuuucuuaucugcucuacagcgacauucugcugaaguuuuccccuaccgagaucacagcuccgaccaugccccucgauugcgccaacgcgucuaauguucacgcugugaacagaagcgccacaaaaggagugaccuuccugcuuccugaacccgaguggacauauccucggcuguccugucccggcagcaccuuucaaaaggcccuccugauuucuccucaucgcuucggggaaacgaaaggaaauuccgcuccgcuuaucauuagagagcccuuuaucgccugcggcccuaacgaauguaagcacuucgcucugacccauuacgccgcgcagcccgggggauauuacaauggcacacggggcgaccgcaacaaacucagacaccugaucagcgucaagcuggggaagauuccuaccguggaaaauucuaucuuucauauggccgcuugguccggaagcgccugccacgauggcaaagaguggacauauauugggguugacggacccgauaacaaugcucuccugaagaucaaauacggcgaggccuacaccgacacguaucacucuuacgcgaacaauauucuucggacacaggaguccgccuguaacugcaucgggggaaauuguuaucugaugauuaccgauggcagcgcuuccggcgugucugaaugccgcuuccucaagaucagagaggggcggaucauuaaagagaucuuuccgacaggacgcgucaagcauaccgaagaguguaccugcggcuucgccagcaacaagacaauugaaugugcuugcagagacaauuccuacacggccaaacggccuuuugugaagcugaacguugagaccgauacagccgaaauccgccuuaugugcaccgacacauaucuggauacccccagaccugacgaugggagcacgacaggacccugugagucuaacggcgacaaaggguccggaggcauuaagggcggguucgugcaccagcggauggcuagcaaaaucggacgcugguacucuagaaccaugagcaagaccgagcggaaaggcauggggcucuaugucaaguacgacggagaucccuggacagacuccgaugcgcuggccuuuagaggcgugauggugucuaugaaggaaccugggugguacagcuucggcuucgagaucaaagacaagaaaugcgaugucccguguauuggaaucgaaaugguucaugacggcgggaaggagaccuggcacuccgcugccacagccauuuauugccugaugggaagcggccaacuccugugggauacggugaccgggguggacauggcucuuuga

SEQ ID NO: 222223 - RNA, 1401 nt, Artificial Sequence; identical to SEQ ID NO: 221028
  derived and/or modified CDS sequence (opt5) from neuraminidase__InfluenzaB__AHL93734

SEQ ID NO: 222224 - RNA, 1401 nt, Artificial Sequence
  derived and/or modified CDS sequence (opt5) from neuraminidase__InfluenzaB__AHL93745
augcugcccagcaccauccagaugcucacacuguuccuuacguccggcggggugcugcucucucuguacgucagcgccucccuuucuuaucugcucuacagcgacauucugcugaaguuuuccccuaccgagaucacagcuccgaccaugccccucgauugcgccaacgcgucuaauguucacgcugugaacagaagcgccacaaaaggagugaccuuccugcuuccugaacccgaguggacauauccucggcuguccugucccggcagcaccuuucaaaaggcccuccugauuucuccucaucgcuucggggaaacgaaaggaaauuccgcuccgcuuaucauuagagagcccuuuaucgccugcggcccuaacgaauguaagcacuucgcucugacccauuacgccgcgcagcccgggggauauuacaauggcacacggggcgaccgcaacaaacucagacaccugaucagcgucaagcuggggaagauuccuaccguggaaaauucuaucuuucauauggccgcuugguccggaagcgccugccacgauggcaaagaguggacauauauugggguugacggacccgauaacaaugcucuccugaagaucaaauacggcgaggccuacaccgacacguaucacucuuacgcgaacaaugugcuucggacacaggaguccgccuguaacugcauugggggaaauuguuaucugaugaucaccgauggcagcgcuuccggcgucucugaaugccgcuuccucaagauuagagaggggcggaucaucaaagagauuuuuccgacaggacgcgugaagcauaccgaagaguguaccugcggcuucgccagcaacaagacaaucgaaugugcuugcagagacaauuccuacacggccaaacggccuuuuguuaagcugaacguggagaccgauacagccgaaauucgccuuaugugcaccgacacauaucuggauacccccagaccugacgaugggagcaucacgggacccugugagucuaacggcgacaaaggguccggaggcauuaagggcggguucguccaccagcggauggcuagcaaaaucggacgcugguacucuagaacaaugagcaagaccgagcggaaaggcauggggcucuaugugaaguacgacggagaucccuggaccgacuccgaugcgcuggccuuuagaggcgugauggucucuaugaaggaaccugggugguacagcuucggcuucgagaucaaagacaagaaaugcgauguuccguguauuggaaucgaaauggugcaugacggcgggaaggagacauggcacuccgcugccaccgccauuuauugccugaugggaagcggccaacuccugugggauacagugacgggggucgacauggcucuuuga

SEQ ID NO: 222225 - RNA, 1401 nt, Artificial Sequence; identical to SEQ ID NO: 221191
  derived and/or modified CDS sequence (opt5) from neuraminidase__InfluenzaB__AHL93756

SEQ ID NO: 222226 - RNA, 1401 nt, Artificial Sequence; identical to SEQ ID NO: 222212
  derived and/or modified CDS sequence (opt5) from neuraminidase__InfluenzaB__AHL93767

SEQ ID NO: 222227 - RNA, 1401 nt, Artificial Sequence
  derived and/or modified CDS sequence (opt5) from neuraminidase__InfluenzaB__AHL93778
augcugcccagcaccauccagacacucauucuguuccuuacguccggcggggugcugcucucucuguacgucagcgcccuucuguccuaucuccuguacucugacauccugcucaaguuuagcccuaccgagauuacagcuccgaccaugucccuggauugcgccaacgcgucuaauguucaagcugugaacagaagcgccacaaaaggagugaccuuccuucugcccgaaccugaguggacauauccccggcucuccuguccuggcagcaucuuucagaaggcccugcuuauuucuccccaccgcuucggggaaaccaaaggaaauuccgcuccucugaucaucagagagccguuuauugccugcggccccaacgaauguaagcauuucgcucucacgcacuacgccgcgcagccugggggauauuacaauggcacccggggcgaccgcaacaaacugagacaucugaucagcgucaagcucgggaagauucccacaguggaaaauucuaucuuucacauggccgcuugguccggaagcgccugccaugauggcaaagaguggaccuauauugggguugacggaccugauaacgacgcucugcuuaaggugaaauacggcgaggccuacacagauaccuaucacucuuacgcgaauaagauccugcggacgcaggaguccgccuguaacugcauugggggaaauuguuaucucaugaucacagacggcagcgcuuccggcgucucugaaugccgcuuccugaaaaucagagaggggcggauuaucaaggagauuuuucccaccggacgcgugaagcacacagaagaguguaccugcggcuucgccagcaacaaaaccaucgaaugugcuugcagagauaauuccuacacagccaagcggccguuuguuaaacuuaacguggagacggacaccgccgaaauucgccugaugugcacagauaccuaucucgacacaccuagacccgaugacgggagcaucaccggaccuugugagucuaauggcgacaagggguccggaggcaucaaaggcggguucguccaucaacggauggagagcaagauuggacgcugguacucuagaacgaugagcaaaacagaacggaugggcauggggcuguaugugaaguacgauggagaccccugggcugauuccgacgcgcuggccuuuucuggcgugauggucagcaugaaggagcccgggugguacuccuucggcuucgaaaucaaagauaagaaaugcgacguuccuuguauuggaaucgagauggugcacgauggcgggaaggaaaccuggcauagcgcugccaccgccauuuauugccucaugggaucuggccagcugcuuugggacacagugaccggggucgauauggcucuguga

SEQ ID NO: 222228 - RNA, 1401 nt, Artificial Sequence
  derived and/or modified CDS sequence (opt5) from neuraminidase__InfluenzaB__AHL93789
augcugcccagcaccauccagacacucacgcuguuccuuaccuccggcggggugcugcucucucuguacgucagcgccucccuuucuuaucugcucuacagcgacauucugcugaaguuuuccccuacaggaaucaccgcuccgacaaugccccucgauugcgccaacgcgucuaauguucaagcugugaacagaagcgccaccaaaggcgugacacugcuucugccugagcccgaauggaccuauccucggcucuccugucccgggagcacguuccagaaggcccugcuuauuucuccucaccgcuuuggagagaccaaaggcaauuccgcuccgcugaucauuagagaacccuucaucgccugcgggccuaacgaguguaagcauuuugcucucacacacuacgccgcgcagcccggaggcuauuacaauggcacccgcggggaccggaacaaacugagacaucugaucagcgucaagcucggaaagauuccuacaguggaaaauucuaucuuccacauggccgcuugguccggcagcgccugccaugaugggaaagaguggaccuauauuggaguugacggccccgauaacaaugcucugcuuaaggugaaauacggggaggccuacacggacacauaucacucuuacgcgaacaagauccugcggacccaggaauccgccuguaauugcauuggaggcaacuguuaucucauggucacagauggcagcgcuuccggggugucugagugccgcuuucugaaaaucagagaaggacggauuaucaaggagaucuucccgaccggccgcguuaagcacaccgaggaauguacaugcggguuugccagcaauaaaacgauugagugugcuugcagagacaacuccuacaccgccaagcggccuuucgugaaacuuaaugucgaaacagauaccgccgagauccgccugaugugcacagacaccuaucucgauacgcccagaccugacgauggaagcauuacaggccccugugaaucuaacggggacaagggauccggcggcaucaaagggggauuugugcaucaacggauggagagcaagauuggccgcugguacucuagaaccaugagcaaaaccgagcggauggggaugggacuguaugugaaguacgacggcgaucccugggcugacuccgaugcgcuggucuucucugggguuauggugagcaugaaggaaccuggcugguacuccuuuggauucgagaucaaagacaagaaaugcgaugugccguguaucggcauugaaaugguccacgacgggggaaaggagacauggcauagcgccgcuaccgccaucuauugccucaugggcucugggcagcugcuuugggauacagugacgggaguugacauggcccuguga

SEQ ID NO: 222229 - RNA, 1401 nt, Artificial Sequence; identical to SEQ ID NO: 221028
  derived and/or modified CDS sequence (opt5) from neuraminidase__InfluenzaB__AHL93800

SEQ ID NO: 222230 - RNA, 1401 nt, Artificial Sequence; identical to SEQ ID NO: 221028
  derived and/or modified CDS sequence (opt5) from neuraminidase__InfluenzaB__AHL93811

SEQ ID NO: 222231 - RNA, 1401 nt, Artificial Sequence; identical to SEQ ID NO: 221564
  derived and/or modified CDS sequence (opt5) from neuraminidase__InfluenzaB__AHL93822

SEQ ID NO: 222232 - RNA, 1401 nt, Artificial Sequence; identical to SEQ ID NO: 221028
  derived and/or modified CDS sequence (opt5) from neuraminidase__InfluenzaB__AHL93833

SEQ ID NO: 222233 - RNA, 1401 nt, Artificial Sequence
  derived and/or modified CDS sequence (opt5) from neuraminidase__InfluenzaB__AHL93844
augcugcccagcaccauccagacacucacgcuguuccuuaccuccggcggggugcugcucucucuguacgucagcgccucccuuucuuaucugcucuacagcggcauucugcugaaguuuuccccuacagagaucaccgcuccgacaaugccccucgacugcgccaacgcgucuaauguucaagcugugaacagaagcgccaccaaagaagugacacugcuucugccugagcccgaauggaccuauccucggcucuccugucccggaagcacguuccagaaggcccugcuuauuucuccucaccgcuuuggggagaccaaaggaaauuccgcuccgcugaucauuagagaacccuucaucgccugcggcccuaacgaguguaagcauuuugcucucacacacuacgccgcgcagcccgggggauauuacaauggcacccggggcgaucgcaacaaacugagacaucugaucagcgucaagcucgggaagauuccuacaguggaaaauucuaucuuccacauggccgcuugguccggaagcgccugccaugacggcaaagaguggaccuauauugggguugauggacccgacgauaacgcucugcuuaaggugaaauacggcgaggccuacacggacacauaucacucuuacgcgcacaagauccugcggacccaggaauccgccuguaauugcauugggggaaacuguuaucucaugaucacagauggcagcgcuuccggcgucucugagugccgcuuucugaaaauuagagaggggcggaucaucaaggaaauuuucccgaccggacgcgugaagcauaccgaggaauguacaugcggcuuugccagcaauaaaacgaucgagugugcuugcagagacaacuccuacaccgccaagcggccuuucguuaaacuuaauguggaaacagauaccgccgagauucgccugaugugcacagacaccuaucucgauacgcccagaccuaacgacgggagcaucacaggacccugugagucuaauggcgauaagggguccggaggcauuaaaggcggguuuguccaccaacggauggaaagcaagaucggacgcugguacucuagaaccaugagcaaaaccgagcggaugggcauggggcuguaugugaaguacgacggagaccccugggcugauuccgacgcgcuggccuucucuggcgugauggucagcaugaaggaaccugggugguacuccuuuggcuucgagaucaaagauaagaaaugcgacguuccguguauuggaaucgaaauggugcaugauggcgggaaggagacauggcacagcgcugccaccgccauuuauugccucaugggaucuggccagcugcuuugggacacagugacgggggucgauauggcucuguga

SEQ ID NO: 222234 - RNA, 1401 nt, Artificial Sequence; identical to SEQ ID NO: 221028
  derived and/or modified CDS sequence (opt5) from neuraminidase__InfluenzaB__AHL93855

SEQ ID NO: 222235 - RNA, 1401 nt, Artificial Sequence; identical to SEQ ID NO: 221028
  derived and/or modified CDS sequence (opt5) from neuraminidase__InfluenzaB__AHL93866

SEQ ID NO: 222236 - RNA, 1401 nt, Artificial Sequence; identical to SEQ ID NO: 221028
  derived and/or modified CDS sequence (opt5) from neuraminidase__InfluenzaB__AHL93877

SEQ ID NO: 222237 - RNA, 1401 nt, Artificial Sequence; identical to SEQ ID NO: 221028
  derived and/or modified CDS sequence (opt5) from neuraminidase__InfluenzaB__AHL93888

SEQ ID NO: 222238 - RNA, 1401 nt, Artificial Sequence
  derived and/or modified CDS sequence (opt5) from neuraminidase__InfluenzaB__AHL93899
augcugcccagcaccauccagaugcucacacuguuccuuacguccggcggggugcugcucucucuguacgucagcgccucccuuucuuaucugcucuacagcgacauucugcugaaguuuuccccuaccgagaucacagcuccgaccaugccccucgauugcgccaacgcgucuaauguucacgcugugaacagaagcgccacaaaaggagugaccuuccugcuuccugaacccgaguggacauauccucggcuguccugucccggcagcaccuuucaaaaggcccuccugauuucuccucaucgcuucggggaaacgaaaggaaauuccgcuccgcuuaucauuagagagcccuuuaucgccugcgaaccuaacgaguguaagcacuucgcucugacccauuacgccgcgcagcccggcggguauuacaauggaacacggggcgaccgcaacaaacucagacaccugaucagcgucaagcugggcaagauuccuaccguggaaaauucuaucuuucauauggccgcuugguccgggagcgccugccacgauggaaaagaguggacauauauuggcguugacgggcccgauaacaaugcucuccugaagaucaaauacggagaggccuacaccgacacguaucacucuuacgcgaacaauauucuucggacacaggaauccgccuguaacugcaucggcgggaauuguuaucugaugauuaccgauggaagcgcuuccggcgugucugagugccgcuuccucaagaucagagagggccggaucauuaaagaaaucuuuccgacagggcgcgucaagcauaccgaggaauguaccugcggauucgccagcaacaagacaauugagugugcuugcagagacaauuccuacacggccaaacggccuuuugugaagcugaacguugaaaccgauacagccgagauccgccuuaugugcaccgacacauaucuggauacccccagaccugacgauggcagcacgacagggcccugugagucuaacggagacaaaggcuccgggggaauuaagggcggcuucgugcaccagcggauggcuagcaaaaucgggcgcugguacucuagaaccaugagcaagaccgaacggaaaggaaugggccucuaugucaaguacgacggggaucccuggacagacuccgaugcgcuggccuuuagaggagugauggugucuaugaaggagccuggcugguacagcuucggguucgaaaucaaagacaagaaaugcgaugucccguguauuggcaucgagaugguucaugacggaggcaaggaaaccuggcacuccgcugccacagccauuuauugccugauggggagcggacaacuccugugggauacggugaccggcguggacauggcucuuuga

SEQ ID NO: 222239 - RNA, 1401 nt, Artificial Sequence
  derived and/or modified CDS sequence (opt5) from neuraminidase__InfluenzaB__AHL93910
augcugcccagcaccauccagaugcucacacuguuccuuacguccggcggggugcugcucucucuguacgucagcgccucccuuucuuaucugcucuacagcgacauucugcugaaguuuuccccuaccgagaucacagcuccgaccaugccccucgauugcgccaacgcgucuaauguucacgcugugaacagaagcgccacaaaaggagugaccuuccugcuuccugaacccgaguggacauauccucggcuguccugucccggcagcaccuuucaaaaggcccuccugauuucuccucaucgcuucggggaaacgaaaggaaauuccgcuccgcuuaucauuagagagcccuuuaucgccugcggcccuaacgaauguaagcacuucgcucugacccauuacgccgcgcagcccgggggauauuacaauggcacacggggcgaccgcaacaaacucagacaccugaucagcgucaagcuggggaagauuccuaccguggaaaauucuaucuuucauauggccgcuugguccggaagcgccugccacgauggcaaagaguggacauauauugggguugacggacccgauaacaaugcucuccugaagaucaaauacggcgaggccuacaccgacacguaucacucuuacgcgaacaauauucuucggacacaggaguccgccuguaacugcaucgggggaaauuguuaucugaugauuaccgauggcagcgcuuccggcgugucugaaugccgcuuccucaagaucagagaggggcggaucauuaaagagaucuuuccgacaggacgcgucaagcauaccgaagaguguaccugcggcuucgccagcaacaagacaauugaauguacgugcagagacaauuccuacaccgcuaaacggccuuuugugaagcugaacguugagacagauaccgccgaaauccgccuuaugugcacagacaccuaucuggauacgcccagaccugacgaugggggaauuacaggccccugugagagcaacggggacaaaggaucuggcggcaucaaagggggauucgugcaccagcggauggccuccaagaucggccgcugguacagcagaaccaugucuaagaccgagcggaaagggaugggacucuaugucaaguacgacggcgaucccuggacagacagcgaugcucuggcguuuagaggggugaugguguccaugaaggaaccuggcugguacucuuucggauucgagauuaaagacaagaaaugcgaugucccguguaucggcauugaaaugguucaugacgggggaaaggagaccuggcacagcgccgcuacagccaucuauugccugaugggcuccgggcaacuccugugggauacggugaccggaguggacauggcccuuuga

SEQ ID NO: 222240 - RNA, 1401 nt, Artificial Sequence; identical to SEQ ID NO: 221028
  derived and/or modified CDS sequence (opt5) from neuraminidase__InfluenzaB__AHL93921

SEQ ID NO: 222241 - RNA, 1401 nt, Artificial Sequence
  derived and/or modified CDS sequence (opt5) from neuraminidase__InfluenzaB__AHL93932
augcugcccagcaccauccagacacucacgcuguuccuuaccuccggcggggugcugcucucucuguacgucagcgccucccuuucuuaucugcucuacagcgacauucugcugaaguuuuccccuacagagaucaccgcuccgacaaugccccucgauugcgccaacgcgucuaauguucaagcugugaacagaagcgccaccaaaggagugacacugcuucugccugaacccgaguggaccuauccucggcucuccugucccggcagcacguuccagaaggcccugcuuauuucuccucaccgcuuuggggaaaccaaaggaaauuccgcuccgcugaucauuagagagcccuucaucgccugcggcccuaacgaauguaagcauuuugcucucacacacuacgccgcgcagcccgggggauauuacaauggcacccggggcgaccgcaacaaacugagacaucugaucagcgucaagcucgggaagauuccuacaguggaaaauucuaucuuccacauggccgcuugguccggaagcgccugccaugauggcaaagaguggaccuauauugggguugacggacccgauaacaaugcucugcuuaaggugaaauacggcgaggccuacacggacacauaucacucuuacgcgaacaagauccugcggacccaggaguccgccuguaauugcauugggggaaacuguuaucucauggucacagauggcagcgcuuccggcgugucugaaugccgcuuucugaaaaucagagaggggcggauuaucaaggagaucuucccgaccggacgcguuaagcacaccgaagaguguacaugcggcuuugccagcaauaaaacgauugaaugugcuugcagagacaacuccuacaccgccaagcggccuuucgugaaacuuaaugucgagacagauaccgccgaaauccgccugaugugcacagacaccuaucucgauacgcccagaccugacgaugggagcauuacaggacccugugagucuaacggcgacaagggguccggaggcaucaaaggcggguuugugcaucaacggauggagagcaagauuggacgcugguacucuagaaccaugagcaaaaccgaacggaugggcauggagcuguaugugaaguacgacggggaucccugggcugacuccgaugcgcuggccuucucuggagucaugguuagcaugaaggaaccuggcugguacuccuuuggguucgagaucaaagacaagaaaugcgaugugccguguaucggcauugaaauggugcacgacggaggcaaggagacauggcauagcgcugccaccgccaucuauugccucauggggucuggacagcugcuuugggauacagucacgggcguggacauggcucuguga

SEQ ID NO: 222242 - RNA, 1401 nt, Artificial Sequence; identical to SEQ ID NO: 221191
  derived and/or modified CDS sequence (opt5) from neuraminidase__InfluenzaB__AHL93943

SEQ ID NO: 222243 - RNA, 1401 nt, Artificial Sequence; identical to SEQ ID NO: 221028
  derived and/or modified CDS sequence (opt5) from neuraminidase__InfluenzaB__AHL93954

SEQ ID NO: 222244 - RNA, 1401 nt, Artificial Sequence
  derived and/or modified CDS sequence (opt5) from neuraminidase__InfluenzaB__AHL93965
augcugcccagcaccauccagacacucacgcuguuccuuaccuccggcggggugcugcucucucuguacgucagcgccucccuuucuuaucugcucuacagcgacauucugcugaaguuuuccccuacagagaucaccgcuccggccaugccccucgauugcgcgaacgcuucuaauguucaagccgugaacuguagcgccacaaaaggagugacccugcuucugccugaacccgaguggacauauccuagacucuccugccccggcagcaccuuccagaaggcucugcuuauuucuccucaccgguuuggggaaacgaaaggaaauuccgccccgcugaucauucgcgagcccuucaucgcuuguggcccuaacgaaugcaagcauuuugcccucacccacuacgcggcccagcccgggggauauuacaauggcacaagaggcgaccggaacaaacugcgccaucugaucagcgucaagcucgggaagauuccuaccguggaaaauucuaucuuccacauggcugccugguccggaagcgcuugucaugauggcaaagaguggacauauauugggguugacggacccgauaacaaugcccugcuuaaggugaaauacggcgaggcguacaccgacacguaucacucuuacgccaacaagauccugagaacacaggaguccgcuugcaauuguauugggggaaacugcuaucucaugaucaccgauggcagcgccuccggcgucucugaaugucgguuucugaaaauucgcgaggggagaaucaucaaggagauuuucccgacaggacgggugaagcacaccgaagagugcaccuguggcuuugcuagcaauaaaacaaucgaaugcgccugccgcgacaacuccuacacggccaagagaccuuucguuaaacuuaauguggagaccgauacagcugaaauucggcugauguguaccgacacauaucucgauacgccccgcccuaacgacgggagcaucaccggacccugcgagucugauggcgacaaggggaacggaggcauuaaaggcggguuuguccaucaaagaauggaguccaagaucggacggugguacagccgcacaaugucuaaaaccgaaagaaugggcauggggcuguaugugaaguacgacggagaucccugggcggacagcgaugcccuggcuuucuccggcgugauggucucuaugaaggagccugggugguacagcuuuggcuucgaaaucaaagacaagaaaugugauguuccgugcauuggaaucgagauggugcacgacggcgggaaggaaaccuggcauuccgccgccacagcuauuuauugucucaugggaagcggccagcugcuuugggauaccgugacaggggucgacauggcccuguga

SEQ ID NO: 222245 - RNA, 1401 nt, Artificial Sequence; identical to SEQ ID NO: 220947
  derived and/or modified CDS sequence (opt5) from neuraminidase__InfluenzaB__AHL93976

SEQ ID NO: 222246 - RNA, 1401 nt, Artificial Sequence; identical to SEQ ID NO: 222218
  derived and/or modified CDS sequence (opt5) from neuraminidase__InfluenzaB__AHL93987

SEQ ID NO: 222247 - RNA, 1401 nt, Artificial Sequence
  derived and/or modified CDS sequence (opt5) from neuraminidase__InfluenzaB__AHL93998
augcugcccagcaccauccagacacucacgcuguuccuuaccuccggcggggugcugcucucucuguacgucagcgccucccuuucuuaucugcucuacagcgacauucugcugaaguuuucccaaacagagaucaccgcuccuauuaugccgcucgauugcgccaacgcgucuaauguucaggcugugaacagaagcgccgccaaaggagugacacugcuucugcccgaaccugaguggaccuauccccggcucuccuguccuggcagcacauuccagaaggcucugcuuaucucuccccaccgcuuuggggaaauuaaaggaaauuccgccccucugaucaucagagagccguucauugcuugcggccccaccgaauguaagcauuuugcccucacgcacuacgcggcccagccugggggauauuacaacggcacccgggaggaccgcaauaaacugagacaucugaucagcgucaagcucggcaagauucccacaguggagaacucuaucuuccacauggcugccugguccgggagcgcuugccaugauggaaaagaauggaccuauauuggcguugacgggccugauucuaaugcccugcuuaagaucaaauacggagaggcguacacagacaccuaucacuccuacgccaagaacauucugcggacgcaagaaagcgcuuguaauugcaucggcggggauuguuaucucaugaucacagacggacccgccuccggcgugucugagugccgcuuucugaaaauuagagagggccggaucauuaaggaaaucuucccgaccgggcgcgucaagcacacagaggaauguaccugcggauuugcuagcaacaaaaccauugagugugccugcagagauaaucgguacacagccaagcgcccuuucgugaaacuuaacguugaaacggacaccgcugagaucagacugaugugcacagagaccuaucucgauacaccccggccuaaugacggcuccaucaccgggcccugugaaagcgauggagacaagggcucugggggaauuaaaggcggcuuugugcaucagcgcauggcguccaagaucgggagaugguacagccggacgaugucuaaaacaaagagaaugggaaugggccuguaugucaaguacgacggggaucccuggaccgacagcgaggcccuggcucucuccggagugauggugucuauggaggaaccuggcugguacagcuucggguuugaaauuaaagauaagaaaugcgacgucccguguaucggcauugagaugguucacgauggaggcaagaccacauggcauuccgccgccaccgcuaucuauugccugauggggagcggacagcuucugugggacacagugacgggcguggauauggcccucuga

SEQ ID NO: 222248 - RNA, 1401 nt, Artificial Sequence
  derived and/or modified CDS sequence (opt5) from neuraminidase__InfluenzaB__AHL94009
augcugcccagcaccauccagaugcucacacuguuccuuacguccggcggggugcugcucucucuguacgucagcgccucccuuucuuaucugcucuacagcgacauucugcugaaguuuuccccuaccgagaucacagcuccgaccaugccccucgauugcgccaacgcgucuaauguucacgcugugaacagaagcgccacaaaaggagugaccuuccugcuuccugaacccaaguggacauauccucggcuguccugucccggcagcaccuuucaaaaagcccuccugauuucuccucaucgcuucggggagacgaagggaaauuccgcuccgcuuaucauuagagaacccuuuaucgccugcggcccuaacgagugucggcacuucgcucugacccauuacgccgcgcagcccgggggauauuacaauggcacacgcggcgacagaaacaaacuccggcaccugaucagcgucaagcuggggaagauuccuaccguggaaaauucuaucuuucauauggccgcuugguccggaagcgccugccacgauggcaaagaguggacauauauugggguugacggacccgauaacaaugcucuccugaagaucaaauacggcgaggccuacaccgacacguaucacucuuacgcgaacaauauucuucgcacacaggaauccgccuguaacugcaucgggggaaauuguuaucugaugauuaccgauggcagcgcuuccggcgugucugagugcagauuccucaagauccgggaagggcgcaucauuaaagagaucuuuccgacaggaagagucaagcauaccgaggaauguaccugcggcuucgccagcaacaagacaauugagugugcuugccgggacaauuccuacacggccaaacgcccuuuugugaagcugaacguugaaaccgauacagccgagaucagacuuaugugcaccgacacauaucuggauacgccccggccugacgaugggagcauuaccggacccugugaaucuaacggcgacaaaggguccggaggcaucaagggcggguucgugcaccagcgcauggcuagcaaaaucggaagaugguacucucggacaaugagcaagaccgagagaaaaggcauggggcucuaugucaaguacgacggagaucccuggaccgacuccgaugcgcuggccuuucgcggcgugauggugucuaugaaggagccugggugguacagcuucggcuucgaaauuaaagacaagaaaugcgaugucccguguaucggaauugagaugguucaugacggcgggaaggaaacauggcacuccgcugccaccgccaucuauugccugaugggaagcggccaacuccugugggauacagugacggggguggacauggcucuuuga

SEQ ID NO: 222249 - RNA, 1401 nt, Artificial Sequence; identical to SEQ ID NO: 221028
  derived and/or modified CDS sequence (opt5) from neuraminidase__InfluenzaB__AHL94020

SEQ ID NO: 222250 - RNA, 1401 nt, Artificial Sequence; identical to SEQ ID NO: 221028
  derived and/or modified CDS sequence (opt5) from neuraminidase__InfluenzaB__AHL94031

SEQ ID NO: 222251 - RNA, 1401 nt, Artificial Sequence; identical to SEQ ID NO: 221191
  derived and/or modified CDS sequence (opt5) from neuraminidase__InfluenzaB__AHL94042

SEQ ID NO: 222252 - RNA, 1401 nt, Artificial Sequence
  derived and/or modified CDS sequence (opt5) from neuraminidase__InfluenzaB__AHL94053
augcugcccagcaccauccagacacucacgcuguuccuuaccuccggcggggugcugcucucucuguaccuuagcgcccugcucuccuaucugcuguacucugacauucuccugaaguuuagcccuacagagaucaccgcuccgacaaugucccuugauugcgccaacgcgucuaauguccaagcuguuaacagaagcgccaccaaaggagugacauuccugcuccccgaaccugaguggaccuauccccggcuguccuguccuggcagcacguuucagcgcgcccuucugauuucuccccacagauucggggaaaccaagggaaauuccgcuccucucaucauucgggagccguuuaucgccugcggccccaacgaauguaaacauuucgcucugacacacuacgccgcgcagccugggggauauuacaauggcacccgcggcgacagaaacaagcugcggcaucucaucagcgugaaacuggggaagauucccacagucgaaaauucuaucuuucacauggccgcuugguccggaagcgccugccaugauggcaaggaguggaccuauauugggguggacggaccugauaacgacgcccuucugaaaguuaaguacggcgaggcuuacacggauacauaucacucuuacgcgaauaaaauccuccgcacccaggaguccgccuguaacugcauugggggaaauuguuaucugaugaucacagacggcagcgcuuccggcgugucugaaugcagauuccuuaagauucgggaggggcgcaucaucaaagagauuuuucccaccggaagagucaagcacaccgaagaguguacaugcggcuucgccagcaacaagacgaucgaaugugcuugccgggauaauuccuacaccgccaaacgcccguuugugaagcugaacguugagacagacaccgccgaaauuagacucaugugcacagauaccuaucuggacacgccucggcccgaugacgggagcaucacaggaccuugugagucuaauggcgacaaaggguccggaggcauuaagggcggguucgugcaucaacgcauggagagcaaaaucggaagaugguacucucggaccaugagcaagaccgaaagaaugggcauggggcuguaugucaaauacgauggagaccccugggcugauuccgacgcgcucgccuuuucuggcgugauggugagcaugaaggagcccgggugguacuccuucggcuucgaaaucaaggauaaaaagugcgacgucccuuguauuggaaucgagaugguucacgauggcgggaaagaaacauggcauagcgcugccaccgccauuuauugccugaugggaucuggccagcuucugugggacacagugacggggguggauauggcucucuga

SEQ ID NO: 222253 - RNA, 1401 nt, Artificial Sequence; identical to SEQ ID NO: 221028
  derived and/or modified CDS sequence (opt5) from neuraminidase__InfluenzaB__AHL94064

SEQ ID NO: 222254 - RNA, 1401 nt, Artificial Sequence; identical to SEQ ID NO: 221028
  derived and/or modified CDS sequence (opt5) from neuraminidase__InfluenzaB__AHL94075

SEQ ID NO: 222255 - RNA, 1401 nt, Artificial Sequence
  derived and/or modified CDS sequence (opt5) from neuraminidase__InfluenzaB__AHL94086
augcugcccagcaccauccagacacucacgcuguuccuuaccuccggcggggugcugcucucucuguacgucagcgccucccuuucuuaucugcucuacagcgacauucugcugaaguuuuccagaacagagaucaccgcuccuauuaugccgcucgauugcgccaacgcgucuaauguucaagcugugaaccggagcgccacaaaaggagugaccuuccugcuucccgaaccugaguggacauauccccgccuguccuguccuggcagcaccuuucagaaggcccuccugaucucuccccacagauucggggaaacgaaaggaaauuccgcuccucuuauuauccgggagccguuugucgccugcggccccaaggaauguaaacauuucgcucugacccacuacgccgcgcagccugggggauauuacaacggcacacgcgaggacagaaauaagcuccggcaucugaucagcgugaagcugggcaaaauucccaccguugagaacucuaucuuucacauggccgcuugguccgggagcgccugccaugauggacgcgaauggacauauauuggcguggacgggccugauucuaaugcucuccugaagaucaaauacggagaggccuacaccgacacguaucacuccuacgcgaagaacauucuuagaacacaggaaagcgccuguaauugcaucggcggggauuguuaucugaugauuaccgacggacccgcuuccggcaucucugagugccgguuccucaaaauccgcgagggcagaauuaucaaggaaauuuuuccgacagggcgggucaagcacaccgaggaauguaccugcggauucgccagcaacaaaacaaucgagugugcuugccgcgauaauuccuacacggccaagagaccuuuugugaaacugaacguugaaaccgacacagccgagauucggcuuaugugcaccgagacauaucuggauacgccccgcccuaaugacggcagcaucaccgggcccugugaaucuaacggagauaagggcuccgggggaaucaaaggcggcuucgugcaucaaagaauggcuagcaagauugggcggugguacucuagaacaaugagcaaaaccaagcgcaugggaaugggccucuaugucaaguacgacggggaccccuggaccgauuccgaggcgcuggcccugucuggagugauggugagcauggaggaaccuggcugguacuccuuuggguucgaaaucaaagacaagaaaugcgaugucccguguauuggcaucgagaugguucacgacggaggcaagacaaccuggcauagcgcugccacagccauuuauugccucauggggucuggacagcugcuuugggauacggugaccggcgugaauaugacacuguga

SEQ ID NO: 222256 - RNA, 1401 nt, Artificial Sequence; identical to SEQ ID NO: 221191
  derived and/or modified CDS sequence (opt5) from neuraminidase__InfluenzaB__AHL94095

SEQ ID NO: 222257 - RNA, 1401 nt, Artificial Sequence; identical to SEQ ID NO: 221028
  derived and/or modified CDS sequence (opt5) from neuraminidase__InfluenzaB__AHL94106

SEQ ID NO: 222258 - RNA, 1401 nt, Artificial Sequence
  derived and/or modified CDS sequence (opt5) from neuraminidase__InfluenzaB__AHL94117
augcugcccagcaccauccagaugcucacacuguuccuuacguccggcggggugcugcucucucuguacgucagcgccucccuuucuuaucugcucuacagcgacauucugcugaaguuuuccccuaccgagaucacagcuccgaccaugccccucgauugcgccaacgcgucuaauguucacgcugugaacagaagcgccacaaaaggagugaccuuccugcuuccugaacccgaguggacauauccucggcuguccugucccggcagcaccuuucaaaaggcccuccugauuucuccucaucgcuucggggaaacgaaaggaaauuccgcuccgcuuaucauuagagagcccuuuaucgccugcggcccuaacgaauguaagcacuucgcucugacccauuacgccgcgcagcccgggggauauuacaauggcacacggggcgaccgcaacaaacucagacaccugaucagcgucaagcuggggaagauuccuaccguggaaaauucuaucuuucauauggccgcuugguccggaagcgccugccacgauggcaaagaguggacauauauugggguugacggacccgauaacaaugcucuccugaagaucaaauacggcgaggccuacaccgacacguaucacucuuacgcgaacaauauucuucggacacaggaguccgccuguaacugcaucgggggaaauuguuaucugaugauuaccgauggcagcgcuuccggcgugucugaaugccgcuuccucaagaucagagaggggcggaucauuaaagagaucuuuccgacaggacgcgucaagcauaccgaagaguguaccugcggcuucgccagcaacaagacaauugaaugugcuugcagagacaauuccuacacggccaaacggccuuuugugaagcugaacguugagaccgauacagccgaaauccgccuuaugugcaccgacacauaucuggauacccccagaccugacgaugggagcauuacgggacccugugagucuaacggcgacaaaggguccggaggcaucaagggcggguucgugcaccagcggauggcuagcaaaaucggacgcugguacucuagaacaaugagcaagaccgagcggaaaggcauggggcuccaugucaaguaugacggagaucccuggaccgacuccgaugcgcuggccuuuagaggcgugauggugucuaugaaggaaccugggugguacagcuucggcuucgagauuaaagacaagaaaugcgaugucccguguaucggaauugaaaugguucacgacggcgggaaggagacauggcacuccgcugccaccgccaucuacugccugaugggaagcggccaacuccugugggauacagugacgggggugaauauggcucuuuga

SEQ ID NO: 222259 - RNA, 1401 nt, Artificial Sequence; identical to SEQ ID NO: 221028
  derived and/or modified CDS sequence (opt5) from neuraminidase__InfluenzaB__AHL94128

SEQ ID NO: 222260 - RNA, 1401 nt, Artificial Sequence
  derived and/or modified CDS sequence (opt5) from neuraminidase__InfluenzaB__AHL94139
augcugcccagcaccauccagacacucacgcuguuccuuaccuccggcggggugcugcucucucuguacgucagcgcccuucuguccuaucuccuguacucugacauucugcucaaguuuagcccuacagagaucaccgcuccgacaaugucccuggauugcgccaacgcgucuaauguucaagcugugaacagaagcgccaccaaaggagugacauuccuucugcccgaaccugaguggaccuauccccggcucuccuguccuggcagcacguuucagcgcgcccugcuuauuucuccccacagauucggggaaaccaagggaaauuccgcuccucugaucauucgggagccguuuaucgccugcggccccaacgaauguaaacauuucgcucucacacacuacgccgcgcagccugggggauauuacaauggcacccgcggcgacagaaacaagcugcggcaucugaucagcgucaaacucgggaagauucccacaguggaaaauucuaucuuucacauggccgcuugguccggaagcgccugccaugauggcaaggaguggaccuauauugggguugacggaccugauaacgacgcucugcuuaaagugaaguacggcgaggccuacacggauacauaucacucuuacgcgaauaaaauccugcgcacccaggaguccgccuguaacugcauugggggaaauuguuaucucaugaucacagacggcagcgcuuccggcgucucugaaugcagauuccugaagauucgggaggggcgcaucaucaaagagauuuuucccaccggaagagugaagcacaccgaagaguguacaugcggcuucgccagcaacaagacgaucgaaugugcuugccgggauaauuccuacaccgccaaacgcccguuuguuaaacuuaacguggagacagacaccgccgaaauuaagcugaugugcacagauaccuaucucgacacgccuagacccgaugacgggagcaucacaggaccuugugagucuaauggcgacaagggguccggaggcauuaaaggcggguucguccaucaacggauggagagcaagaucggacgcugguacucuagaaccaugagcaaaaccgaacggaugggcauggggcuguaugugaaguacgauggagaccccugggcugauuccgacgcgcuggccuuuucuggcgugauggucagcaugaaggagcccgggugguacuccuucggcuucgaaaucaaagauaagaaaugcgacguuccuuguauuggaaucgagauggugcacgauggcgggaaggaaacauggcauagcgcugccaccgccauuuauugccucaugggaucuggccagcugcuuugggacacagugacgggggucgauauggcucuguga

SEQ ID NO: 222261 - RNA, 1401 nt, Artificial Sequence; identical to SEQ ID NO: 222218
  derived and/or modified CDS sequence (opt5) from neuraminidase__InfluenzaB__AHL94150

SEQ ID NO: 222262 - RNA, 1401 nt, Artificial Sequence
  derived and/or modified CDS sequence (opt5) from neuraminidase__InfluenzaB__AHL94161
augcugcccagcaccauccagaugcucacacuguuccuuacguccggcggggugcugcucucucuguacgucagcgccucccuuucuuaucugcucuacagcgacauucugcugaaguuuuccccuaccgagaucacagcuccgaccaugccccucgauugcgccaacgcgucuaauguucacgcugugaacagaagcgccacaaaaggagugaccuuccugcuuccugaacccgaguggacauauccucggcuguccugucccggcagcaccuuucaaaaggcccuccugauuucuccucaucgcuucggggaaacgaaaggaaauuccgcuccgcuuaucauuagagagcccuuuaucgccugcggcccuaacgaauguaagcacuucgcucugacccauuacgccgcgcagcccgggggauauuacaauggcacacggggcgaccgcaacaaacucagacaccugaucagcgucaagcuggggaagauuccuaccguggaaaauucuaucuuucauauggccgcuugguccggaagcgccugccacgauggcaaagaguggacauauauugggguugacggacccgauaacaaugcucuccugaagaucaaauacggcgaggccuacaccgacacguaucacucuuacgcgaacaauauucuucggacacaggaguccgccuguaacugcaucgggggaaauuguuaucugaugauuaccgauggcagcgcuuccggcgugucugaaugccgcuuccucaagaucagagaggggcggaucauuaaagagaucuuuccgacaggacgcgucaagcauaccgaagaguguaccugcggcuucgccagcaacaagacaauugaaugugcuugcagagacaauuccuacacggccaaacggccuuuugugaagcugaacguugagaccgauacagccaaaauccgccuuaugugcaccgacacauaucuggauacccccagaccugacgaugggagcauuacgggacccugugaaucuaacggcgacaagggguccggaggcaucaaaggcggguucgugcaccagcggauggcuagcaagaucggacgcugguacucuagaacaaugagcaaaaccgagcggaagggcauggggcucuaugucaaguacgacggagaucccuggaccgacuccgaugcgcuggccuuuagaggcgugauggugucuaugaaagagccugggugguacagcuucggcuucgaaauuaaggacaaaaagugcgaugucccguguaucggaauugagaugguucaugacggcgggaaagaaacauggcacuccgcugccaccgccaucuauugccugaugggaagcggccaacuccugugggauacagugacggggguggacauggcucuuuga

SEQ ID NO: 222263 - RNA, 1401 nt, Artificial Sequence; identical to SEQ ID NO: 222218
  derived and/or modified CDS sequence (opt5) from neuraminidase__InfluenzaB__AHL94183

SEQ ID NO: 222264 - RNA, 1404 nt, Artificial Sequence
  derived and/or modified CDS sequence (opt5) from neuraminidase__InfluenzaB__AHL94194
augcugcccagcaccauccagacacucacgcuguuccuuaccuccggcggggugcugcucucucuguacgucagcgcccuucuguccuaucuccuguacucugacauucugcucaaguuuagcccuacagagaucaccgcuccgacaaugucccuggauugcgccaacgcgucuaauguucaagcugugaacagaagcgccaccaaaggagugacauuccuucugcuccccgaaccugaguggaccuauccccggcuguccuguccuggcagcacguuucagcgcgcccuucugauuucuccccacagauucggggaaaccaagggaaauuccgcuccucucaucauucgggagccguuuaucgccugcggccccaacgaauguaaacauuucgcucugacacacuacgccgcgcagccugggggauauuacaauggcacccgcggcgacagaaacaagcugcggcaucucaucagcgucaaacuggggaagauucccacaguggaaaauucuaucuuucacauggccgcuugguccggaagcgccugccaugauggcaaggaguggaccuauauugggguugacggaccugauaacgacgcccuucugaaagugaaguacggcgaggcuuacacggauacauaucacucuuacgcgaauaaaauccuccgcacccaggaguccgccuguaacugcauugggggaaauuguuaucugaugaucacagacggcagcgcuuccggcgucucugaaugcagauuccuuaagauucgggaggggcgcaucaucaaagagauuuuucccaccggaagagugaagcacaccgaagaguguacaugcggcuucgccagcaacaagacgaucgaaugugcuugccgggauaauuccuacaccgccaaacgcccguuuguuaagcugaacguggagacagacaccgccgaaauuagacucaugugcacagauaccuaucuggacacgccucggcccgaugacgggagcaucacaggaccuugugagucuaauggcgacaaaggguccggaggcauuaagggcggguucguccaucaacgcauggagagcaaaaucggaagaugguacucucggaccaugagcaagaccgaaagaaugggcauggggcuguaugugaaauacgauggagaccccugggcugauuccgacgcgcucgccuuuucuggcgugauggucagcaugaaggagcccgggugguacuccuucggcuucgaaaucaaggauaaaaagugcgacguuccuuguauuggaaucgagauggugcacgauggcgggaaagaaacauggcauagcgcugccaccgccauuuauugccugaugggaucuggccagcuucugugggacacagugacgggggucgauauggcucucuga

SEQ ID NO: 222265 - RNA, 1401 nt, Artificial Sequence; identical to SEQ ID NO: 221028
  derived and/or modified CDS sequence (opt5) from neuraminidase__InfluenzaB__AHL94205

SEQ ID NO: 222266 - RNA, 1401 nt, Artificial Sequence; identical to SEQ ID NO: 221191
  derived and/or modified CDS sequence (opt5) from neuraminidase__InfluenzaB__AHL94214

SEQ ID NO: 222267 - RNA, 1401 nt, Artificial Sequence
  derived and/or modified CDS sequence (opt5) from neuraminidase__InfluenzaB__AHL94224
augcugcccagcaccauccagaugcucacacuguuccuuacguccggcggggugcugcucucucuguacgucagcgccucccuuucuuaucugcucuacagcgacauucugcugaaguuuuccccuaccgagaucacagcuccgaccaugccccucgauugcgccaacgcgucuaauguucacgcugugaacagaagcgccacaaaaggagugaccuuccugcuuccugaacccgaguggacauauccucggcuguccugucccggcagcaccuuucaaaaggcccuccugauuucuccucaucgcuucggggaaacgaaaggaaauuccgcuccgcuuaucauuagagagcccuuuaucgccugcggcccuaacgaauguaagcacuucgcucugacccauuacgccgcgcagcccgggggauauuacaauggcacacggggcgaccgcaacaaacucagacaccugaucagcgucaagcuggggaagauuccuaccguggaaaauucuaucuuucauauggccgcuugguccggaagcgccugccacgauggcaaagaguggacauauauugggguugacggacccgauaacaaugcucuccugaagaucaaauacggcgaggccuacaccgacacguaucacucuuacgcgaacaauauucuucggacacaggaguccgccuguaacugcaucgggggaaauuguuaucugaugauuaccgauggcagcgcuuccggcgugucugaaugccgcuuccucaagaucagagaggggcggaucauuaaagagaucuuuccgacaggacgcgucaagcauaccgaagaguguaccugcggcuucgccagcaacaagacaauugaaugugcuugcagagacaauuccuacacggccaaacggccuuuugugaagcugaacguugagaccgauacagccgaaauccgccuuaugugcaccgacacauaucuggauacccccagaccugacgaugggagcauuacgggacccugugagucuaacggcgacaaaggguccggaggcaucaagggcggguucgugcaccagcggauggcuagcaaaaucggacgcugguacucuagaacaaugagcaagaccgagcggaaaggcauggggcucuaugucaaguacgacggagaucccuggauugacuccgaugcgcuggccuuuagaggcgugauggugucuaugaaggaaccugggugguacagcuucggcuucgagaucaaagacaagaaaugcgaugucccguguauuggaaucgaaaugguucaugacggcgggaaggagaccuggcacuccgcugccacagccauuuauugccugaugggaagcggccaacuccugugggauaccgugacagggguggacauggcucuuuga

SEQ ID NO: 222268 - RNA, 1401 nt, Artificial Sequence; identical to SEQ ID NO: 221028
  derived and/or modified CDS sequence (opt5) from neuraminidase__InfluenzaB__AHL94235

SEQ ID NO: 222269 - RNA, 1401 nt, Artificial Sequence; identical to SEQ ID NO: 221191
  derived and/or modified CDS sequence (opt5) from neuraminidase__InfluenzaB__AHL94246

SEQ ID NO: 222270 - RNA, 1401 nt, Artificial Sequence; identical to SEQ ID NO: 221191
  derived and/or modified CDS sequence (opt5) from neuraminidase__InfluenzaB__AHL94257

SEQ ID NO: 222271 - RNA, 1401 nt, Artificial Sequence; identical to SEQ ID NO: 220889
  derived and/or modified CDS sequence (opt5) from neuraminidase__InfluenzaB__AHL94267

SEQ ID NO: 222272 - RNA, 1401 nt, Artificial Sequence; identical to SEQ ID NO: 220889
  derived and/or modified CDS sequence (opt5) from neuraminidase__InfluenzaB__AHL94278

SEQ ID NO: 222273 - RNA, 1401 nt, Artificial Sequence; identical to SEQ ID NO: 220889
  derived and/or modified CDS sequence (opt5) from neuraminidase__InfluenzaB__AHL94299

SEQ ID NO: 222274 - RNA, 1401 nt, Artificial Sequence
  derived and/or modified CDS sequence (opt5) from neuraminidase__InfluenzaB__AHL94310
augcugcccagcaccauccagacacucacgcuguuccuuaccuccggcggggugcugcucucucuguacgucagcgccucccuuucuuaucugcucuacagcgacauucugcugaaguuuuccagaacagagaucaccgcuccuauuaugccgcucgauugcgccaacgcgucuaauguucaagcugugaaccggagcgccacaaaaggagugacaccccugcuuccugaacccgaguggaccuauccucgccuguccugucccggcagcaccuuccagaaggcccuccugaucucuccucacagauuuggggaaacgaaaggaaauuccgcuccgcuuauuauccgggagcccuucaucgccugcggcccuaaggaauguaaacauuuugcucugacccacuacgccgcgcagcccgggggauauuacaacggcacacgcgaggacagaaauaagcuccggcaucugauuagcgucaagcugggcaaaaucccuaccguggagaacucuauuuuccacauggccgcuugguccgggagcgccugccaugauggacgcgaauggacauauaucggcguugacgggcccgauucuaaugcucuccugaagauuaaauacggagaggccuacaccgacacguaucacuccuacgcgaagaacauccuuagaacacaggaaagcgccuguaauugcauuggcggggauuguuaucugaugaucaccgacggauccgcuucuggcaucagcgagugccgguuucucaaaauucgcgagggcagaaucauuaaggaaaucuucccgacagggcgggugaagcacaccgaggaauguaccugcggauuugccuccaacaaaacaauugagugugcuugccgcgauaauagcuacacggccaagagaccuuucgucaaacugaacguggaaaccgacacagccgagauccggcuuaugugcaccgagacauaucuggauacgccccgcccuaaugacggcucuaucgcugggcccugugaauccaacggagaugagggcagcgggggaauuaagggcggcuuuguucaucaaagaauggcgucuaaaaucgggcggugguacagcagaaccauguccaagacaaaacgcaugggaaugggccucuaugugaaguacgacggggaccccuggaccgauucugaagcccuggcucugagcggagucaugguguccauggaggaaccuggcugguacagcuucggguuugagauuaaggacaaaaagugcgaugugccguguaucggcauugagaugguccacgacggaggcaaaaccacauggcauucugccgccaccgcuaucuauugccucaugggguccggacagcugcuuugggauacaguuacgggcgugaauaugacccuguga

SEQ ID NO: 222275 - RNA, 1401 nt, Artificial Sequence; identical to SEQ ID NO: 222274
  derived and/or modified CDS sequence (opt5) from neuraminidase__InfluenzaB__AHL94321

SEQ ID NO: 222276 - RNA, 1401 nt, Artificial Sequence
  derived and/or modified CDS sequence (opt5) from neuraminidase__InfluenzaB__AHL94332
augcugcccagcaccauccagacacucacgcuguuccuuaccuccggcggggugcugcucucucuguacgucagcgccucccuuucuuaucugcucuacagcgacauucugcugaaguuuuccagaacagagaucaccgcuccuauuaugccgcucgauugcgccaacgcgucuaauguucaagcugugaaccggagcgccacaaaaggagugacaccccugcuuccugaacccgaguggaccuauccucgccuguccugucccggcagcaccuuccagaaggcccuccugaucucuccucacagauuuggggaaacgaaaggaaauuccgcuccgcuuauuauccgggagcccuucaucgccugcggcccuaaggaauguaaacauuuugcucugacccacuacgccgcgcagcccgggggauauuacaacggcacacgcgaggacagaaauaagcuccggcaucugauuagcgucaagcugggcaaaaucccuaccguggagaacucuauuuuccacauggccgcuugguccgggagcgccugccaugauggacgcgaauggacauauaucggcguugacgggcccgauucuaaugcucuccugaagauuaaauacggagaggccuacaccgacacguaucacuccuacgcgaagaacauccuuagaacacaggaaagcgccuguaauugcauuggcggggauuguuaucugaugaucaccgacggaccggcuuccggcaucucugagugccgguuucucaaaauucgcgagggcagaaucauuaaggaaaucuucccuacagggcgggugaagcacaccgaggaauguaccugcggauuugccagcaacaaaacaauugagugugcuugccgcgauaauuccuacacggccaagagacccuucgucaaacugaacguggaaaccgacacagccgagauccggcuuaugugcaccgagacauaucuggauaccccucgccccaaugacggcagcaucacggggcccugugaaucuaacggagaugagggcuccgggggaauuaagggcggcuuuguucaucaaagaauggcuagcaaaaucgggcggugguacucuagaacaaugagcaagaccaaacgcaugggaaugggccucuaugugaaguacgacggggacccuuggaccgauuccgaagcgcuggcccugucuggagucauggugagcauggaggaaccgggcugguacuccuucggguuugagauuaaggacaaaaagugcgaugugcccuguaucggcauugagaugguccacgacggaggcaaaacaaccuggcauagcgcugccacagccaucuauugccucauggggucuggacagcugcuuugggauacgguuaccggcgugaauaugacacuguga

SEQ ID NO: 222277 - RNA, 1401 nt, Artificial Sequence; identical to SEQ ID NO: 220889
  derived and/or modified CDS sequence (opt5) from neuraminidase__InfluenzaB__AHL94343

SEQ ID NO: 222278 - RNA, 1401 nt, Artificial Sequence
  derived and/or modified CDS sequence (opt5) from neuraminidase__InfluenzaB__AHL94354
augcugcccagcaccauccagacacucacgcuguuccuuaccuccggcggggugcugcucucucuguacgucagcgccucccuuucuuaucugcucuacagcgacauucugcugaaguuuuccccuacagagaucaccgcuccgacaaugccccucgauugcgccaacgcgucuaauguucaagcugugaacagaagcgccaccaaaggagugacacugcuucugccugaacccgaguggaccuauccucggcucuccugucccggcagcacguuccagaaggcccugcuuauuucuccucaccgcuuuggggaaaccaaaggaaauuccgcuccgcugaucauuagagagcccuucaucgccugcggcccuaacgaauguaagcauuuugcucucacacacuacgccgcgcagcccgggggauauuacaauggcacccggggcgaccgcaacaaacugagacaucugaucagcgucaagcucgggaagauuccuacaguggaaaauucuaucuuccacauggccgcuugguccggaagcgccugccaugauggcaaagaguggaccuauauugggguugacggacccgauaacaaugcucugcuuaaggugaaauacggcgaggccuacacggacacauaucacucuuacgcgaacaagauccugcggacccaggaguccgccuguaauugcauugggggaaacuguuaucucaugaucacagauggcagcgcuuccggcgucucugaaugccgcuuucugaaaauuagagaggggcggaucaucaaggagauuuucccgaccggacgcgugaagcacaccgaagaguguacaugcggcuuugccagcaauaaaacgaucgaaugugcuugcagagacaaccgguacaccgccaagcgcccuuucguuaaacuuaauguggagacagauaccgccgaaauuagacugaugugcacagacaccuaucucgauacgccccggccuaacgacggguccaucacaggacccugugagagcgauggcgacaaggggucuggaggcauuaaaggcggguuuguccaucaacgcaugaaguccaaaaucggaagaugguacagccggaccaugucuaagaccgagagaaugggcauggggcuguaugugaaguacgacggagaucccugggcugacagcgaugcgcuggccuucuccggcgugauggucucuaugaaagaaccugggugguacagcuuuggcuucgagaucaaggacaaaaagugcgauguuccguguauuggaaucgaaauggugcacgacggcgggaaagagacauggcauuccgcugccaccgccauuuauugccucaugggaagcggccagcugcuuugggauacagugacgggggucgacauggcucuguga

SEQ ID NO: 222279 - RNA, 1401 nt, Artificial Sequence; identical to SEQ ID NO: 222278
  derived and/or modified CDS sequence (opt5) from neuraminidase__InfluenzaB__AHL94365

SEQ ID NO: 222280 - RNA, 1401 nt, Artificial Sequence
  derived and/or modified CDS sequence (opt5) from neuraminidase__InfluenzaB__AHL94387
augcugcccagcaccauccagacacucacgcuguuccuuaccuccggcggggugcugcucucucuguacgucagcgccucccuuucuuaucugcucuacagcgacauucugcugaaguuuuccccuacagagaucaccgcuccgacaaugccccucgauugcgccaacgcgucuaccguucaagcugugaauagaagcgccacaaaaggagugacccugcuucugccugaacccgaguggacguauccucggcucuccugucccggcagcaccuuccagaaggcccugcuuauuucuccucaccgcuuuggggaaacaaaaggaaacuccgcuccgcugaucauuagagagcccuucaucgccugcggcccuaaugaauguaagcauuuugcucucacccacuacgccgcgcagcccgggggauauuacaacggcacacggggcgaccgcaauaaacugagacaucugaucagcgucaagcucgggaagauuccuaccguggagaacucuaucuuccacauggccgcuugguccggaagcgccugccaugauggcaaagaguggacguaucuggggguugacggacccgauaauaacgcucugcuuaaggugaaauacggcgaagccuacacagacaccuaucacucuuacgcgaauaagauucuccggacacaggaguccgccuguaacugcaucgggggaaauuguuaucugaugauuaccgauggcagcgcuuccggcgucucugaaugccgcuuucuuaaaaucagagaggggcggauuaucaaggagaucuucccgaccggacgcgugaagcacacagaagaguguacgugcggcuuugccagcaacaaaaccauugaaugugcuugcagagacaaucgguacacagccaagcgcccuuucguuaaacugaacguggagaccgauacagccgaaaucagacucaugugcaccgacacguaucuggauacaccccggccuaaugacggguccauuaccggacccugugagagcgauggcgacaaggggucuggaggcaucaaaggcggguuuguccaucaacgcaugaaguccaaaauuggaagaugguacagccggaccaugucuaagacagagagaaugggcauggggcuguaugugaaguacgacggagaucccugggcugacagcgaugcgcucgccuucuccggcgugauggucucuaugaaagaaccugggugguacagcuuuggcuucgagaucaaggacaaaaagugcgauguuccguguaucggaauugaaauggugcacgacggcgggaaagagaucuggcauuccgcugccaccgccauuuauugccugaugggaagcggccagcuucugugggauacagugacgggggucgacauggcucucuga

SEQ ID NO: 222281 - RNA, 1404 nt, Artificial Sequence
  derived and/or modified CDS sequence (opt5) from neuraminidase__InfluenzaB__AHL94398
augcugcccagcaccauccagacacucacgcuguuccuuaccuccggcggggugcugcucucucuguacgucagcgccucccuuucuuaucugcucuacagcgacauucugcugaaguuuuccccuacagagaucaccgcuccgacaaugccccucgauugcgccaacgcgucuaauguucaagcugugaacagaagcgccaccaaaggagugacacugcuucugcucccugaacccgaguggaccuauccucggcuguccugucccggcagcacguuccagaaggcccuucugauuucuccucaccgcuuuggggaaaccaaaggaaauuccgcuccgcucaucauuagagagcccuucaucgccugcggcccuaacgaauguaagcauuuugcucugacacacuacgccgcgcagcccgggggauauuacaauggcacccggggcgaccgcaacaaacugagacaucucaucagcgucaagcuggggaagauuccuacaguggaaaauucuaucuuccacauggccgcuugguccggaagcgccugccaugauggcaaagaguggaccuauauugggguugacggacccgauaacaaugcccuucugaaggugaaauacggcgaggcuuacacggacacauaucacucuuacgcgaacaagauccuccggacccaggaguccgccuguaauugcauugggggaaacuguuaucugaugaucacagauggcagcgcuuccggcgucucugaaugccgcuuucuuaaaauuagagaggggcggaucaucaaggagauuuucccgaccggacgcgugaagcacaccgaagaguguacaugcggcuuugccagcaauaaaacgaucgaaugugcuugcagagacaaccgguacaccgccaagcgcccuuucguuaaacugaauguggagacagauaccgccgaaauuagacucaugugcacagacaccuaucuggauacgccccggccuaacgacggguccaucacaggacccugugagagcgauggcgacaaggggucuggaggcauuaaaggcggguuuguccaucaacgcaugaaguccaaaaucggaagaugguacagccggaccaugucuaagaccgagagaaugggcauggggcuguaugugaaguacgacggagaucccugggcugacagcgaugcgcucgccuucuccggcgugauggucucuaugaaagaaccugggugguacagcuuuggcuucgagaucaaggacaaaaagugcgauguuccguguauuggaaucgaaauggugcacgacggcgggaaagagacauggcauuccgcugccaccgccauuuauugccugaugggaagcggccagcuucugugggauacagugacgggggucgacauggcucucuga

SEQ ID NO: 222282 - RNA, 1401 nt, Artificial Sequence; identical to SEQ ID NO: 222278
  derived and/or modified CDS sequence (opt5) from neuraminidase__InfluenzaB__AHL94409

SEQ ID NO: 222283 - RNA, 1401 nt, Artificial Sequence
  derived and/or modified CDS sequence (opt5) from neuraminidase__InfluenzaB__AHL94431
augcugcccagcaccauccagacacucacgcuguuccuuaccuccggcggggugcugcucucucuguacgucagcgccucccuuucuuaucugcucuacagcgacauucugcugaaguuuucccaaacagagaucaccgcuccuauuaugccgcucgauugcgccaacgcgucuaauguucaggcugugaaccacagcgccgccaaaggagugacacugauccuucccgaaccugaguggaccuaucccagacuguccuguccuggcagcacauuccagaaggcucuccugauuucuccccaucgguuuggggaaaucaaaggaaauuccgccccucuuaucauucgcgagccguucaucgcuugcggccccaccgaauguaagcacuuugcccugacgcauuacgcggcccagccugggggauauuacaacggcaccagagaggaccggaauaaacuccgccaccugauuagcgucaagcugggcaagauccccacaguggagaacucuauuuuccauauggcugccugguccgggagcgcuugccacgauggaaaagaauggaccuauaucggcguugacgggccugauucuaaugcccuccugaagauuaaauacggagaggcguacacagacaccuaucacuccuacgccaagaacauccuuagaacgcaagaaagcgcuuguaauugcaucggcggggauuguuaucugaugauuacagacggacccgccuccggcgugucugagugccgguuucucaaaauccgcgagggcagaauuaucaaggaaauuuucccgaccgggcgggucaagcauacagaggaauguaccugcggauuugcuagcaacaaaaccaucgagugugccugccgcgauaauagauacacagccaagcggccuuucgugaaacugaacguugaaacggacaccgcugagauccgccuuaugugcacagagaccuaucuggauacacccagaccuaaugacggcuccauuaccgggcccugugaaagcgauggagacaagggcucugggggaaucaaaggcggcuuugugcaccagcggauggcguccaagauugggcgcugguacagcagaacgaugucuaaaacaaagcggaugggaaugggccucuaugucaaguacgacggggaucccuggaccgacagcgaggcccuggcucuguccggagugaugaucucuauggaggaaccuggcugguacagcuucggguuugaaauuaaagauaagaaaugcgacgugccguguaucggcaucgagaugguccaugauggaggcaagaccacauggcacuccgccgccaccgcuauuuauugccucauggggagcggacagcugcuuugggacacaguuacgggcguggauauggcccuguga

SEQ ID NO: 222284 - RNA, 1401 nt, Artificial Sequence
  derived and/or modified CDS sequence (opt5) from neuraminidase__InfluenzaB__AHL94442
augcugcccagcaccauccagacacucacgcuguuccuuaccuccggcggggugcugcucucucuguacaugagcgccucccuuucuuaucugcucuacagcgacauucugcugaaguuuuccagaacagagaucaccgcuccuauuaugccgcucgauugcgccaacgcgucuaauguccaagcuguuaaccggagcgccacaaaaggagugacaccccugcuuccugaacccgaguggaccuauccucgccuguccugucccggcagcaccuuccagaaggcccuccugaucucuccucacagauuuggggaaacgaaaggaaauuccgcuccgcuuauuauccgggagcccuucaucgccugcggcccuaaggaauguaaacauuuugcucugacccacuacgccgcgcagcccgggggauauuacaacggcacacgcgaggacagaaauaagcuccggcaucugauuagcgugaagcugggcaaaaucccuaccgucgagaacucuauuuuccacauggccgcuugguccgggagcgccugccaugauggacgcgaauggacauauaucggcguggacgggcccgauucuaaugcucuccugaagauuaaauacggagaggccuacaccgacacguaucacuccuacgcgaagaacauccuuagaacacaggaaagcgccuguaauugcauuggcggggauuguuaucugaugaucaccgacggauccgcuucuggcaucagcgagugccgguuucucaaaauucgcgagggcagaaucauuaaggaaaucuucccgacagggcggguuaagcacaccgaggaauguaccugcggauuugccuccaacaaaacaauugagugugcuugccgcgauaauagcuacacggccaagagaccuuucgugaaacugaacgucgaaaccgacacagccgagauccggcuuaugugcaccgagacauaucuggauacgccccgcccuaaugacggcucuaucgcugggcccugugaauccaacggagaugagggcagcgggggaauuaagggcggcuuugugcaucaaagaauggcgucuaaaaucgggcggugguacagcagaaccauguccaagacaaaacgcaugggaaugggccucuauguuaaguacgacggggaccccuggaccgauucugaagcccuggcucugagcggagugauggucuccauggaggaaccuggcugguacagcuucggguuugagauuaaggacaaaaagugcgaugugccguguaucggcauugagauggugcacgacggaggcaaaaccacauggcauucugccgccaccgcuaucuauugccucaugggguccggacagcugcuuugggauacagucacgggcguuaauaugacccuguga

SEQ ID NO: 222285 - RNA, 1401 nt, Artificial Sequence; identical to SEQ ID NO: 222274
  derived and/or modified CDS sequence (opt5) from neuraminidase__InfluenzaB__AHL94464

SEQ ID NO: 222286 - RNA, 1401 nt, Artificial Sequence; identical to SEQ ID NO: 220889
  derived and/or modified CDS sequence (opt5) from neuraminidase__InfluenzaB__AHL94475

SEQ ID NO: 222287 - RNA, 1401 nt, Artificial Sequence; identical to SEQ ID NO: 222278
  derived and/or modified CDS sequence (opt5) from neuraminidase__InfluenzaB__AHL94486

SEQ ID NO: 222288 - RNA, 1401 nt, Artificial Sequence; identical to SEQ ID NO: 220889
  derived and/or modified CDS sequence (opt5) from neuraminidase__InfluenzaB__AHL94497

SEQ ID NO: 222289 - RNA, 1401 nt, Artificial Sequence; identical to SEQ ID NO: 222274
  derived and/or modified CDS sequence (opt5) from neuraminidase__InfluenzaB__AHL94508

SEQ ID NO: 222290 - RNA, 1401 nt, Artificial Sequence
  derived and/or modified CDS sequence (opt5) from neuraminidase__InfluenzaB__AHL94519
augcugcccagcaccauccagacacucacgcuguuccuuaccuccggcggggugcugcucucucuguacgucagcgccucccuuucuuaucugcucuacagcgacauucugcugaaguuuuccccuacagagaucaccgcuccgacaaugccccucgauugcgccaacgcgucuaauguucaagcugugaacagaagcgccaccaaaggagugacacugcuucugccugaacccgaguggaccuauccucggcucuccugucccggcagcacguuccagaaggcccugcuuauuucuccucaccgcuuuggggaaaccaaaggaaauuccgcuccgcugaucauuagagagcccuucaucgccugcggcccuaacgaauguaagcauuuugcucucacacacuacgccgcgcagcccgggggauauuacaauggcacccggggcgaccgcaacaaacugagacaucugaucagcgucaagcucgggaagauuccuacaguggaaaauucuaucuuccacauggccgcuugguccggaagcgccugccaugauggcaaagaguggaccuauauugggguugacggacccgauaacaaugcucugcuuaaggugaaauacggcgaggccuacacggacacauaucacucuuacgcgaacaagauccugcggacccaggaguccgccuguaauugcauugggggaaacuguuaucucaugaucacagauggcagcgcuuccggcgucucugaaugccgcuuucugaaaauuagagaggggcggaucaucaaggagauuuucccgaccggacgcgugaagcacaccgaagaguguacaugcggcuuugccagcaauaaaacgaucgaaugugcuugcagagacaacuccuacaccgccaagcggccuuucguuaaacuuaauguggagacagauaccgccgaaauucgccugaugugcacagacaccuaucucgauacgcccagaccuaacgacgggagcaucacaggacccugugagucugauggcgacaagggguccggaggcauuaaaggcggguuuguccaucaacggauggagagcaagaucggacgcugguacucuagaaccaugagcaaaaccgaacggaugggcauggggcuguaugugaaguacgacggagaucccuggacagacuccgaugcucuggcguucucuggcgugauggucagcaugaaggagccugggugguacuccuuuggcuucgaaaucaaagacaagaaaugcgauguuccguguauuggaaucgagauggugcacgacggcgggaaggaaaccuggcauagcgccgcuacagccauuuauugccucaugggaucuggccagcugcuuugggauacggugaccggggucgacauggcccuguga

SEQ ID NO: 222291 - RNA, 1401 nt, Artificial Sequence; identical to SEQ ID NO: 222274
  derived and/or modified CDS sequence (opt5) from neuraminidase__InfluenzaB__AHL94530

SEQ ID NO: 222292 - RNA, 1401 nt, Artificial Sequence; identical to SEQ ID NO: 222278
  derived and/or modified CDS sequence (opt5) from neuraminidase__InfluenzaB__AHL94541

SEQ ID NO: 222293 - RNA, 1401 nt, Artificial Sequence
  derived and/or modified CDS sequence (opt5) from neuraminidase__InfluenzaB__AHL94563
augcugcccagcaccauccagacacucacgcuguuccuuacccugggcggggugcuccugucccuuuacgucucugccagccuguccuaucuccuguacucugacauucugcucaaguuuagcagaacagagaucaccgcuccuauuaugccgcuggauugcgccaacgcguccaauguucaagcugugaaccggucugccacaaaaggagugacccuucugcuccccgaaccugaguggacauauccccgccugagcuguccuggcuccaccuuccagaaggcccuucugaucagcccccacagauuuggggaaacgaaaggaaauucugcuccucucauuauccgggagccguucaucgccugcggccccaaggaauguaaacauuuugcucugacccacuacgccgcgcagccugggggauauuacaacggcacacgcgaggacagaaauaagcugcggcaucucauuuccgucaagcugggcaaaauccccaccguggagaacagcauuuuccacauggccgcuuggucuggguccgccugccaugauggacgcgaauggacauauaucggcguugacgggccugauagcaaugcccuucugaagauuaaauacggagaggcuuacaccgacacguaucacucuuacgcgaagaacauccucagaacacaggaauccgccuguaauugcauuggcggggauuguuaucugaugaucaccgacggacccgcuagcggcaucuccgagugccgguuucuuaaaauucgcgagggcagaaucauuaaggaaaucuucccgacagggcgggugaagcacaccgaggaauguaccugcggauuugccucuaacaaaacaauugagugugcuugccgcgauaauagcuacacggccaagagaccuuucgucaaacugaacguggaaaccgacacagccgagauccggcucaugugcaccgagacauaucuggauacgccccgcccuaaugacggcuccaucaccgggcccugugaaagcaacggagauaagggcucugggggaauuaaaggcggcuuuguucaucaaagaauggcuuccaagaucgggcggugguacagcagaacaaugucuaaaaccaagcgcaugggaaugggccuguaugugaaguacgacggggaccccuggaccgauagcgaggcgcucgcccuguccggagucauggugucuauggaggaaccuggcugguacagcuucggguuugaaauuaaagacaagaaaugcgaugugccguguaucggcauugagaugguccacgacggaggcaagacaaccuggcauuccgcugccacagccaucuauugccuuauggggagcggacagcugcucugggauacgguuaccggcgugaauaugacacuguga

SEQ ID NO: 222294 - RNA, 1401 nt, Artificial Sequence; identical to SEQ ID NO: 222247
  derived and/or modified CDS sequence (opt5) from neuraminidase__InfluenzaB__AHL94574

SEQ ID NO: 222295 - RNA, 1401 nt, Artificial Sequence
  derived and/or modified CDS sequence (opt5) from neuraminidase__InfluenzaB__AHL94585
augcugcccagcaccauccagacacucacgcuguuccuuaccuccggcggggugcugcucucucuguacgucagcgccucccuuucuuaucugcucuacagcgacauucugcugaaguuuucccaaacagagaucaccgcuccuauuaugccgcucgauugcgccaacgcgucuaauguucaggcugugaacagaagcgccgccaaaggagugacacugcuucugcccgaaccugaguggaccuauccccggcucuccuguccuggcagcacauuccagaaggcucugcuuaucucuccccaccgcuuuggggaaauuaaaggaaauuccgccccucugaucaucagagagccguucauugcuugcggccccaccgaauguaagcauuuugcccucacgcacuacgcggcccagccugggggauauuacaacggcacccgggaggaccgcaauaaacugagacaucugaucagcgucaagcucggcaagauucccacaguggagaacucuaucuuccacauggcugccugguccgggagcgcuugccaugauggaaaagaauggaccuauauuggcguugacgggccugauucuaaugcccugcuuaagaucaaauacggagaggcguacacagacaccuaucacuccuacgccaagaacauucugcggacgcaagaaagcgcuuguaauugcaucggcggggauuguuaucucaugaucacagacggacccgccuccggcgugucugagugccgcuuucugaaaauuagagagggccggaucauuaaggaaaucuucccgaaggggcgcgucaaacacaccgaggaauguacaugcggauuugcuagcaacaagaccauugagugugccugcagagauaaucgguacaccgccaaacgcccuuucgugaaacuuaacguugaaacagacacggcugagaucagacugaugugcaccgagacauaucucgauacaccccggccuaaugacggcuccaucaccgggcccugugaaagcgauggagacaagggcucugggggaauuaagggcggcuuugugcaucagcgcauggcguccaaaaucgggagaugguacagccggaccaugucuaagacgaagagaaugggaaugggccuguaugucaaauacgacggggaucccuggacagacagcgaggcccuggcucucuccggagugauggugucuauggaggaaccuggcugguacagcuucggguuugaaauuaaggauaaaaagugcgacgucccguguaucggcauugagaugguucacgauggaggcaaaaccaccuggcauuccgccgccacagcuaucuauugccugauggggagcggacagcuucugugggacaccgugacaggcguggauauggcccucuga

SEQ ID NO: 222296 - RNA, 1401 nt, Artificial Sequence; identical to SEQ ID NO: 222247
  derived and/or modified CDS sequence (opt5) from neuraminidase__InfluenzaB__AHL94596

SEQ ID NO: 222297 - RNA, 1401 nt, Artificial Sequence
  derived and/or modified CDS sequence (opt5) from neuraminidase__InfluenzaB__AHL94607
augcugcccagcaccauccagacacucacgcuguuccuuaccuccggcggggugcugcucucucuguacgucagcgccucccuuucuuaucugcucuacagcgacauucugcugaaguuuuccccuacagagaucaccgcuccgacaaugccccucgauugcgccaacgcgucuaauguucaagcugugaacagaagcgccaccaaaggagugacacugcuucugccugaacccgaguggaccuauccucggcucuccugucccggcagcacguuccagaaggcccugcuuauuucuccucaccgcuuuggggaaaccaaaggaaauuccgcuccgcugaucauuagagagcccuucaucgccugcggcccuaacgaauguaagcauuuugcucucacacacuacgccgcgcagcccgggggauauuacaauggcacccggggcgaccgcaacaaacugagacaucugaucagcgucaagcucgggaagauuccuacaguggaaaauucuaucuuccacauggccgcuugguccggaagcgccugccaugauggcaaagaguggaccuauauugggguugacggacccgauaacaaugcucugcuuaaggugaaauacggcgaggccuacacggacacauaucacucuuacgcgaacaagauccugcggacccaggaguccgccuguaauugcauugggggaaacuguuaucucaugaucacagauggcagcgcuuccggcgucucugaaugccgcuuucugaaaauuagagaggggcggaucaucaaggagauuuucccgaccggacgcgugaagcacaccgaagaguguacaugcggcuuugccagcaauaaaacgaucgaaugugcuugcagagacaaccgguacaccgccaagcgcccuuucguuaaacuuaauguggagacagauaccgccgaaauuagacugaugugcacagacaccuaucucgauacgccccggccuaacgacggguccaucacaggacccugugagagcgauggcgacaaggggucuggaggcauuaaaggcggguuuguccaucaacgccugaaguccaaaaucggaagaugguacagccggaccaugucuaagaccgagagaaugggcauggggcuguaugugaaguacgacggagaucccugggcugacagcgaugcgcucacauucuccggcgugauggucucuaugaaagaaccugggugguacagcuuuggcuucgagaucaaggacaaaaagugcgauguuccguguauuggaaucgaaauggugcacgacggcgggaaagagaccuggcauuccgccgcuacagccauuuauugccugaugggaagcggccagcuucugugggauacggugaccggggucgacauggcccucuga

SEQ ID NO: 222298 - RNA, 1401 nt, Artificial Sequence; identical to SEQ ID NO: 222278
  derived and/or modified CDS sequence (opt5) from neuraminidase__InfluenzaB__AHL94618

SEQ ID NO: 222299 - RNA, 1401 nt, Artificial Sequence; identical to SEQ ID NO: 222274
  derived and/or modified CDS sequence (opt5) from neuraminidase__InfluenzaB__AHL94628

SEQ ID NO: 222300 - RNA, 1401 nt, Artificial Sequence; identical to SEQ ID NO: 222278
  derived and/or modified CDS sequence (opt5) from neuraminidase__InfluenzaB__AHL94639

SEQ ID NO: 222301 - RNA, 1401 nt, Artificial Sequence
  derived and/or modified CDS sequence (opt5) from neuraminidase__InfluenzaB__AHL94650
augcugcccagcaccauccagacacucacgcuguuccuuaccuccggcggggugcugcucucucuguacgucagcgccucccuuucuuaucugcucuacagcgacauucugcugaaguuuuccccuacagagaucaccgcuccgacaaugccccucgauugcgccaacgcgucuaauguucaagcugugaacagaagcgccaccaaaggagugacacugcuucugccugaacccgaguggaccuauccucggcucuccugucccggcagcacguuccagaaggcccugcuuauuucuccucaccgcuuuggggaaaccaaaggaaauuccgcuccgcugaucauuagagagcccuucaucgccugcggcccuaacgaauguaagcauuuugcucucacacacuacgccgcgcagcccgggggauauuacaauggcacccggggcgaccgcaacaaacugagacaucugaucagcgucaagcucgggaagauuccuacaguggaaaauucuaucuuccacauggccgcuugguccggaagcgccugccaugauggcaaagaguggaccuauauugggguugacggacccgauaacaaugcucugcuuaaggugaaauacggcgaggccuacacggacacauaucacucuuacgcgaacaagauccugcggacccaggaguccgccuguaauugcauugggggaaacuguuaucucaugaucacagauggcagcgcuuccggcgucucugaaugccgcuuucugaaaauuagagaggggcggaucauccgcgagauuuucccgaccggaagagugaagcacaccgaagaguguacaugcggcuuugccagcaauaagacgaucgaaugugcuugccgggacaaccgcuacaccgccaaaagaccuuucguuaaacuuaauguggagacagauaccgccgaaauucggcugaugugcacagacaccuaucucgauacgccccgcccuaacgacggguccaucacaggacccugugagagcgauggcgacaaggggucuggaggcauuaagggcggguuuguccaucaaagaaugaaauccaagaucggacggugguacagcagaaccaugucuaaaaccgagcgcaugggcauggggcuguaugugaaguacgacggagaucccugggcugacagcgaugcgcuggccuucuccggcgugauggucucuaugaaggaaccugggugguacagcuuuggcuucgagaucaaagacaagaaaugcgauguuccguguauuggaaucgaaauggugcacgacggcgggaaggagacauggcauuccgcugccaccgccauuuauugccucaugggaagcggccagcugcuuugggauacagugacgggggucgacauggcucuguga

SEQ ID NO: 222302 - RNA, 1401 nt, Artificial Sequence
  derived and/or modified CDS sequence (opt5) from neuraminidase__InfluenzaB__AHL94661
augcugcccagcaccauccagacacucacgcuguuccuuaccuccggcggggugcugcucucucuguacgucagcgccucccuuucuuaucugcucuacagcgacauucugcugaaguuuccuuccacagagaucaccgcuccgacaaugccccucgauugcgccaacgcgucuaauguucaagcugugaacagaagcgccaccaaaggagugacacugcuucugccugaacccgaguggaccuauccucggcucuccugucccggcagcacguuccagaaggcccugcuuauuucuccucaccgcuuuggggaaaccaaaggaaauuccgcuccgcugaucauuagagagcccuucaucgccugcggcccuaaggaauguaaacauuuugcucucacacacuacgccgcgcagcccgggggauauuacaacggcacccggggcgaccgcaauaagcugagacaucugaucagcgucaagcucgggaaaauuccuacaguggagaacucuaucuuccacauggccgcuugguccggaagcgccugccaugauggcaaggaguggaccuauauugggguugacggacccgauaauaacgcucugcuuaaaaucaaguacggcgaagccuacacggacacauaucacucuuacgcgaauaacauucugcggacccaggaguccgccuguaauugcaucgggggaaacuguuaucucaugauuacagauggcagcgcuuccggcgugucugaaugccgcuuucugaaaaucagagaggggcggaucauuaaggagaucuucccgaccggacgcauucaacacaccgaagaguguacaugcggcuuugccagcaauaagacgaucgaaugugcuugcagagacaacuccuacaccgccaaacggccuuucgucaaacuuaauguggagacagauaccgccgaaauucgccugaugugcacaaagaccuaucucgacacgcccagaccugaggaugggagcaucacaggacccugugagucuaacggcgggaagggauccggcggcaucaaagggggauuuguucaucagcggauggcuagcaagauuggccgcugguacucuagaaccaugagcaaaaccgaacggaaggggaugggacuguaugugaaguacaacggcgaccccugggcggauuccgacgcccuggucuucucuggggugauggugagcauggaggaaccuggcugguacuccuuuggauucgagaucaaagacaagaaaugcgaugucccguguauuggcaucgaaaugguucacgacgggggaaaggagacauggcauagcgcugccaccgccauuuauugccucaugggcucugggcagcugcuuugggauacagugacgggagugaauaugacccuguga

SEQ ID NO: 222303 - RNA, 1401 nt, Artificial Sequence
  derived and/or modified CDS sequence (opt5) from neuraminidase__InfluenzaB__AHL94672
augcugcccagcaccauccagacacucacgcuguuccuuaccuccggcggggugcugcucucucuguacgucagcgccucccuuucuuaucugcucuacagcgacauucugcugaaguuuuccagaacagagaucaccgcuccuauuaugccgcucgauugcgccaacgcgucuaauguucaagcugugaaccggagcgccacaaaaggagugacaccccugcuuccugaacccgaguggaccuauccucgccuguccugucccggcagcaccuuccagaaggcccuccugaucucuccucacagauuuggggaaacgaaaggaaauuccgcuccgcuuauuauccgggagcccuucaucgccugcggcccuaaggaauguaaacauuuugcucugacccacuacgccgcgcagcccgggggauauuacaacggcacacgcgaggacagaaauaagcuccggcaucugauuagcgucaagcugggcaaaaucccuaccguggagaacucuauuuuccacauggccgcuugguccgggagcgccugccaugauggacgcgaauggacauauaucggcguugacgggcccgauucuaaugcucuccugaagauuaaauacggagaggccuacaccgacacguaucacuccuacgcgaagaacauccuuagaacacaggaaagcgccuguaauugcauuggcggggauuguuaucugaugaucaccgacggauccgcuucuggcaucagcgagugccgguuucucaaaauucgcgagggcagaaucauuaaggaaaucuucccgacagggcgggugaagcacaccgaggaauguaccugcggauuugccuccaacaaaacaauugagugugcuugccgcgauaauagcuacacggccaagagaccuuucgucaaacugaacguggaaaccgacacagccgagauccggcuuaugugcaccgagacauaucuggauacgccccgcccuaaugacggcucuaucuccgggcccugugaaagcaacggagaugagggcucugggggaauuaagggcggcuuuguucaucaaagaauggcuagcaaaaucgggcggugguacuccagaaccaugucuaagacaaaacgcaugggaaugggccucuaugugaaguacgacggggaccccuggaccgauagcgaagcgcuggcccuguccggagucauggugagcauggaggaaccuggcugguacucuuucggguuugagauuaaggacaaaaagugcgaugugccguguaucggcauugagaugguccacgacggaggcaaaaccacauggcauuccgcugccaccgccaucuauugccucauggggagcggacagcugcuuugggauacaguuacgggcgugaauaugacccuguga

SEQ ID NO: 222304 - RNA, 1401 nt, Artificial Sequence
  derived and/or modified CDS sequence (opt5) from neuraminidase__InfluenzaB__AHL94683
augcugcccagcaccauccagacacucacgcuguuccuuaccuccggcggggugcugcucucucuguacgucagcgccucccuuucuuaucugcucuacagcgacauucugcugaaguuuuccagaacagagaucaccgcuccuauuaugccgcucgauugcgccaacgcgucuaauguucaagcugugaaccggagcgccacaaaaggagugacaccccugcuuccugaacccgaguggaccuauccucgccuguccugucccggcagcaccuuccagaaggcccuccugaucucuccucacagauuuggggaaacgaaaggaaauuccgcuccgcuuauuauccgggagcccuucaucgccugcggcccuaaggaauguaaacauuuugcucugacccacuacgccgcgcagcccgggggauauuacaacggcacacgcgaggacagaaauaagcuccggcaucugauuagcgucaagcugggcaaaaucccuaccguggagaacucuauuuuccacauggccgcuugguccgggagcgccugccaugauggacgcgaauggacauauaucggcguugacgggcccgauucuaaugcucuccugaagauuaaauacggagaggccuacaccgacacguaucacuccuacgcgaagaacauccuuagaacacaggaaagcgccuguaauugcauuggcggggauuguuaucugaugaucaccgacggauccgcuucuggcaucagcgagugccgguuucucaaaauucgcgagggcagaaucauuaaggaaaucuucccgacagggcgggugaagcacaccgaggaauguaccugcggauuugccuccaacaaaacaauugagugugcuugccgcgauaauagcuacacggccaagagaccuuucgucaaacugaacguggaaaccgacacagccgagauccggcuuaugugcaccgagacauaucuggauacgccccgcccuaaugacggcucuaucaccgggcccugugaauccaacggaggcgaggggagcggaggcauuaagggcggguuuguucaucaaagaauggcuucuaaaaucggacggugguacagcagaacaauguccaagaccaaacgcaugggcauggggcucuaugugaaguacgauggagaccccuggaccgacucugaagcgcuggcccugagcggcgucaugguguccauggaggaaccugggugguacagcuucggcuuugagauuaaggauaaaaagugcgacgugccguguaucggaauugagaugguccacgauggcgggaaaacaaccuggcauucugcugccacagccaucuauugccucaugggauccggccagcugcuuugggacacgguuaccggggugaauaugacacuguga

SEQ ID NO: 222305 - RNA, 1401 nt, Artificial Sequence
  derived and/or modified CDS sequence (opt5) from neuraminidase__InfluenzaB__AHL94694
augcugcccagcaccauccagacacucacgcuguuccuuaccuccggcggggugcugcucucucuguacgucagcgccucccuuucuuaucugcucuacagcgacauucugcugaaguuuuccccuacagagaucaccgcuccgacaaugccccucgauugcgccaacgcgucuaauguucaagcugugaacagaagcgccaccaaaggagugacacugcuucugccugaacccgaguggaccuauccucggcucuccugucccggcagcacguuccagaaggcccugcuuauuucuccucaccgcuuuggggaaaccaaaggaaauuccgcuccgcugaucauuagagagcccuucaucgccugcggcccuaacgaauguaagcauuuugcucucacacacuacgccgcgcagcccgggggauauuacaauggcacccggggcgaccgcaacaaacugagacaucugaucagcgucaagcucgggaagauuccuacaguggaaaauucuaucuuccacauggccgcuugguccggaagcgccugccaugauggcaaagaguggaccuauauugggguugacggacccgauaacaaugcucugcuuaaggugaaauacggcgaggccuacacggacacauaucacucuuacgcgaacaagauccugcggacccaggaguccgccuguaauugcauugggggaaacuguuaucucaugaucacagauggcagcgcuuccggcgucucugaaugccgcuuucugaaaauuagagaggggcggaucaucaaggagauuuucccgaccggacgcgugaagcacaccgaagaguguacaugcggcuuugccagcaauaaaacgaucgaaugugcuugcagagacaaccgguacaccgccaagcgcccuuucguuaaacuuaauguggagacagauaccgccgaaauuagacugaugugcacagacaccuaucucgauacgccccggccuaacgacggguccaucacaggacccugugagagcgauggcgacaaggggucuggaggcauuaaaggcggguuuguccaucaacgcaugaaguccaaaaucggaagaugguacagccggaccaugucuaagaccgagagaaugggcauggggcuguaugugaaguacgacggagaucccugggcugacagcgaugcgcugacauucuccggcgugauggucucuaugaaagaaccugggugguacagcuuuggcuucgagaucaaggacaaaaagugcgauguuccguguauuggaaucgaaauggugcacgacggcgggaaagagaccuggcauuccgccgcuacagccauuuauugccucaugggaagcggccagcugcuuugggauacggugaccggggucgacauggcccuguga

SEQ ID NO: 222306 - RNA, 1401 nt, Artificial Sequence; identical to SEQ ID NO: 222278
  derived and/or modified CDS sequence (opt5) from neuraminidase__InfluenzaB__AHL94705

SEQ ID NO: 222307 - RNA, 1401 nt, Artificial Sequence; identical to SEQ ID NO: 220889
  derived and/or modified CDS sequence (opt5) from neuraminidase__InfluenzaB__AHL94716

SEQ ID NO: 222308 - RNA, 1401 nt, Artificial Sequence
  derived and/or modified CDS sequence (opt5) from neuraminidase__InfluenzaB__AHL94727
augcugcccagcaccauccagacacucacgcuguuccuuaccuccggcggggugcugcucucucuguacgucagcgccucccuuucuuaucugcucuacagcgacauucugcugaaguuuccuuccacagagaucaccgcuccgacaaugccccucgauugcgccaacaccucuaauguucaagcggugaacagaagcgcuacaaaaggagugacccugcuucugccugaacccgaguggacguauccucggcucuccugucccggcagcaccuuccagaaggcccugcuuauuucuccucaccgcuuuggggaaacaaaaggaaauuccgccccgcugaucauuagagagcccuucaucgcuugcggcccuaaggaauguaaacauuuugcccucacccacuacgcugcccagcccgggggauauuacaacggcacacggggcgaccgcaauaagcugagacaucugaucagcgucaagcucgggaaaauuccuaccguggagaacucuaucuuccacauggcggccugguccggaagcgcuugccaugauggcaaggaguggacguauauugggguugacggacccgauaauaacgcccugcuuaaaaucaaguacggcgaggcuuacacagacaccuaucacucuuacgccaauaacauucugcggacacaggaauccgcguguaauugcaucgggggaaacuguuaucucaugauuaccgauggcagcgccuccggcgugucugaaugccgcuuucugaaaaucagagaggggcggaucauuaaggagaucuucccgaccggacgcauucaacacacagaagaguguacgugcggcuuugcuagcaauaagaccaucgaaugugccugcagagacaacuccuacacagcuaaacggccuuucgucaaacuuaauguggagaccgauacagccgaaauucgccugaugugcaccaagacguaucucgacacacccagaccugaggaugggagcaucaccggacccugugagucuaacggcgggaagggauccggcggcaucaaagggggauuuguucaucagcggauggccagcaagauuggccgcugguacucuagaaccaugagcaaaacagaacggaaggggaugggacuguaugugaaguacaacggcgaccccugggcugauuccgacgcgcuggucuucucuggggugauggugagcauggaggaaccuggcugguacuccuuuggauucgagaucaaagacaagaaaugcgaugucccguguauuggcaucgaaaugguucacgacgggggaaaggagaccuggcauagcgccgcuacagccauuuauugccucaugggcucugggcagcugcuuugggauacggugaccggagugaauaugacacuguga

SEQ ID NO: 222309 - RNA, 1401 nt, Artificial Sequence; identical to SEQ ID NO: 220889
  derived and/or modified CDS sequence (opt5) from neuraminidase__InfluenzaB__AHL94738

SEQ ID NO: 222310 - RNA, 1401 nt, Artificial Sequence
  derived and/or modified CDS sequence (opt5) from neuraminidase__InfluenzaB__AHL94749
augcugcccagcaccauccagacacucacgcuguuccuuaccuccggcggggugcugcucucucuguacgucagcgccucccuuucuuaucugcucuacagcgacauucugcugaaguuuuccccuacagagaucaccgcuccgacaaugccccucgauugcgccaacgcgucuaauguucaagcugugaacagaagcgccaccaaaggagugacacugcuucugccugaacccgaguggaccuauccucggcucuccugucccggcagcacguuccagaaggcccugcuuauuucuccucaccgcuuuggggaaaccaaaggaaauuccgcuccgcugaucauuagagagcccuucaucgccugcggcccuaacgaauguaagcauuuugcucucacacacuacgccgcgcagcccgggggauauuacaauggcacccggggcgaccgcaacaaacugagacaucugaucagcgucaagcucgggaagauuccuacaguggaaaauucuaucuuccacauggccgcuugguccggaagcgccugccaugauggcaaagaguggaccuauauugggguugacggacccgauaacaaugcucugcuuaaggugaaauacggcgaggccuacacggacacauaucacucuuacgcgaacaagauccugcggacccaggaguccgccuguaauugcauugggggaaacuguuaucucaugaucacagauggcagcgcuuccggcgucucugaaugccgcuuucugaaaauuagagaggggcggaucaucaaggagauuuucccgaccggacgcgugaagcacaccgaagaguguacaugcggcuuugccagcaauaaaacgaucgaaugugcuugcagagacaaccgguacaccgccaagcgcccuuucguuaaacuuaauguggagacagauaccgccgaaauuagacugaugugcacagacaccuaucucgauacgccccggccuaacgacggguccaucacaggacccugugagagcgauggcgacaaggggucuggaggcauuaaaggcggguuuguccaucaacgcaugaaguccaaaaucggaagaugguacagccggaccaugucuaagaccgagagaaugggcauggggcuguaugugaaguacgacggagaucccugggcugacagcgaugcgcuggccuucuccggcgugauggucucuaugaaagaaccugggugguacagcuuuggcuucgagaucaaggacaaaaagugcgauguuccguguauuggaguggaaauggugcacgacggcgggaaagagacauggcauuccgcugccaccgccaucuauugccucaugggaagcggccagcugcuuugggauacagucacggggguggacauggcucuguga

SEQ ID NO: 222311 - RNA, 1401 nt, Artificial Sequence
  derived and/or modified CDS sequence (opt5) from neuraminidase__InfluenzaB__AHL94760
augcugcccagcaccauccagacacucacgcuguuccuuaccuccggcggggugcugcucucucuguacgucagcgccucccuuucuuaucugcucuacagcgacauucugcugaaguuuucccaaacagagaucaccgcuccuauuaugccgcucgauugcgccaacgcgucuaauguucaggcugugaaccacagcgccgccaaaggagugacacugcuucugcccgaaccugaguggaccuaucccagacucuccuguccuggcagcacauuccagaaggcucugcuuaucucuccccaucgguuuggggaaauuaaaggaaauuccgccccucugaucauccgcgagccguucauugcuugcggccccaccgaauguaagcacuuugcccucacgcauuacgcggcccagccugggggauauuacaacggcaccagagaggaccggaauaaacugcgccaccugaucagcgucaagcucggcaagauucccacaguggagaacucuaucuuccauauggcugccugguccgggagcgcuugccacgauggaaaagaauggaccuauauuggcguugacgggccugauucuaaugcccugcuuaagaucaaauacggagaggcguacacagacaccuaucacuccuacgccaagaacauucugagaacgcaagaaagcgcuuguaauugcaucggcggggauuguuaucucaugaucacagacggacccgccuccggcgugucugagugccgguuucugaaaauucgcgagggcagaaucauuaaggaaaucuucccgaccgggcgggucaagcauacagaggaauguaccugcggauuugcuagcaacaaaaccauugagugugccugccgcgauaauagauacacagccaagcggccuuucgugaaacuuaacguugaaacggacaccgcugagauccgccugaugugcacagagaccuaucucgauacacccagaccuaaugacggcuccaucaccgggcccugugaaagcgauggagacaagggcucugggggaauuaaaggcggcuuugugcaccagcggauggcguccaagaucgggcgcugguacagcagaacgaugucuaaaacaaagcggaugggaaugggccuguaugucaaguacgacggggaucccuggaccgacagcgaggcccuggcucucuccggagugauggugucuauggaggaaccuggcugguacagcuucggguuugaaauuaaagauaagaaaugcgacaucccguguauuggcaucgagaugguccaugauggaggcaagaccacauggcacuccgccgccaccgcuaucuauugccugauggggagcggacagcuucugugggacacaguuacgggcguggauauggcccucuga

SEQ ID NO: 222312 - RNA, 1401 nt, Artificial Sequence; identical to SEQ ID NO: 222278
  derived and/or modified CDS sequence (opt5) from neuraminidase__InfluenzaB__AHL94770

SEQ ID NO: 222313 - RNA, 1401 nt, Artificial Sequence; identical to SEQ ID NO: 222276
  derived and/or modified CDS sequence (opt5) from neuraminidase__InfluenzaB__AHL94781

SEQ ID NO: 222314 - RNA, 1401 nt, Artificial Sequence; identical to SEQ ID NO: 222274
  derived and/or modified CDS sequence (opt5) from neuraminidase__InfluenzaB__AHL94791

SEQ ID NO: 222315 - RNA, 1401 nt, Artificial Sequence; identical to SEQ ID NO: 222305
  derived and/or modified CDS sequence (opt5) from neuraminidase__InfluenzaB__AHL94801

SEQ ID NO: 222316 - RNA, 1401 nt, Artificial Sequence; identical to SEQ ID NO: 222274
  derived and/or modified CDS sequence (opt5) from neuraminidase__InfluenzaB__AHL94812

SEQ ID NO: 222317 - RNA, 1401 nt, Artificial Sequence; identical to SEQ ID NO: 222274
  derived and/or modified CDS sequence (opt5) from neuraminidase__InfluenzaB__AHL94821

SEQ ID NO: 222318 - RNA, 1401 nt, Artificial Sequence; identical to SEQ ID NO: 222278
  derived and/or modified CDS sequence (opt5) from neuraminidase__InfluenzaB__AHL94831

SEQ ID NO: 222319 - RNA, 1401 nt, Artificial Sequence
  derived and/or modified CDS sequence (opt5) from neuraminidase__InfluenzaB__AHL94840
augcugcccagcaccauccagacacucacgcuguuccuuaccuccggcggggugcugcucucucuguacgucagcgccucccuuucuuaucugcucuacagcggcauucugcugaaguuuuccagaacagagaucaccgcuccuauuaugccgcucgacugcgccaacgcgucuaauguucaagcugugaaccggagcgccacaaaaggagugacccugcuucugcccgaaccugaguggacauauccccgccucuccuguccugggagcaccuuccagaaggcccugcuuaucucuccccacagauuuggagaaacgaaaggcaauuccgcuccucugauuauccgggagccguucaucgccugcgggcccaaggaauguaaacauuuugcucucacccacuacgccgcgcagccuggaggcuauuacaacggcacacgcgaggauagaaauaagcugcggcaucugauuagcgucaagcucgggaaaauccccaccguggagaacucuauuuuccacauggccgcuugguccggaagcgccugccaugacggccgcgaauggacauauaucgggguugauggaccugacucuaaugcucugcuuaagauuaaauacggcgaggccuacaccgauacguaucacuccuacgcgaagaacauccugagaacacaggaaagcgccuguaauugcauugggggagacuguuaucucaugaucaccgauggccccgcuuccggcaucucugagugccgguuucugaaaauucgcgaggggagaaucauuaaggaaaucuucccgacaggacgggugaagcacaccgaggaauguaccugcggcuuugccagcaacaaaacaauugagugugcuugccgcgacaauuccuacacggccaagagaccuuucgucaaacuuaacguggaaaccgauacagccgagauccggcugaugugcaccgagacauaucucgacacgccccgcccuaaugaugggagcaucaccggacccugugaaucuaacggcgacaagggguccggaggcauuaaaggcggguuuguucaucaaagaauggcuagcaagaucggacggugguacucuagaacaaugagcaaaaccaagcgcaugggcauggggcuguaugugaaguacgauggagaccccuggaccgacuccgaggcgcuggcccucucuggcgucauggugagcauggaggaaccugggugguacuccuucggcuuugaaauuaaagauaagaaaugcgacgugccguguaucggaauugagaugguccacgauggcgggaagacaaccuggcauagcgcugccacagccaucuauugccugaugggaucuggccagcuucugugggacacgguuaccggggugaauaugacacucuga

SEQ ID NO: 222320 - RNA, 1401 nt, Artificial Sequence
  derived and/or modified CDS sequence (opt5) from neuraminidase__InfluenzaB__AHL94851
augcugcccagcaccauccagacacucacgcuguuccuuaccuccggcggggugcugcucucucuguacgucagcgccucccuuucuuaucugcucuacagcgacauucugcugaaguuuucccaaacagagaucaccgcuccuauuaugccgcucgauugcacaaacgccucuaauguucaggcggugaacagaagcgcugccaaaggagugacccugcuucugcccgaaccugaguggacauauccccggcucuccuguccuggcagcaccuuccagaaggcccugcuuaucucuccccaccgcuuuggggaaauuaaaggaaauuccgcuccucugaucaucagagagccguucauugccugcggccccacggaauguaagcauuuugcucucacccacuacgccgcgcagccugggggauauuacaacggcacacgggaggaccgcaauaaacugagacaucugaucagcgucaagcucggcaagauucccaccguggagaacucuaucuuccacauggccgcuugguccgggagcgccugccaugauggaaaagaauggacauauauuggcguugacgggccugauucuaaugcucugcuuaagaucaaauacggagaggccuacaccgacacguaucacuccuacgcgaagaacauucugcggacacaagaaagcgccuguaauugcaucggcggggauuguuaucucaugaucaccgacggacccgcuuccggcgugucugagugccgcuuucugaaaauuagagagggccggaucauuaaggaaaucuucccgacagggcgcgucaagcacaccgaggaauguaccugcggauuugccagcaacaaaacaauugagugugcuugcagagauaaucgguacacggccaagcgcccuuucgugaaacuuaacguugaaaccgacacagccgagaucagacugaugugcaccgagacauaucucgauacgccccggccuaaugacggcuccaucaccgggcccugugaaagcgauggagacaagggcucugggggaauuaaaggcggcuuugugcaucagcgcaugacauccaagaucgggagaugguacagccggaccaugucuaaaaccaagagaaugggaaugggccuguaugucaaguacgacggggaucccuggacagacagcgaggcucuggcgcucuccggagugauggugucuauggaggaaccuggcugguacagcuucggguuugaaauuaaagauaagaaaugcgacgucccguguaucggcauugagaugguucacgauggaggcaagaccacauggcauuccgccgcuacggccaucuauugccugauggggagcggacagcuucugugggacaccgugacaggcguggauauggcccucuga

SEQ ID NO: 222321 - RNA, 1401 nt, Artificial Sequence; identical to SEQ ID NO: 220707
  derived and/or modified CDS sequence (opt5) from neuraminidase__InfluenzaB__AHL94862

SEQ ID NO: 222322 - RNA, 1401 nt, Artificial Sequence; identical to SEQ ID NO: 220889
  derived and/or modified CDS sequence (opt5) from neuraminidase__InfluenzaB__AHL94873

SEQ ID NO: 222323 - RNA, 1401 nt, Artificial Sequence; identical to SEQ ID NO: 222193
  derived and/or modified CDS sequence (opt5) from neuraminidase__InfluenzaB__AHL94884

SEQ ID NO: 222324 - RNA, 1401 nt, Artificial Sequence; identical to SEQ ID NO: 221033
  derived and/or modified CDS sequence (opt5) from neuraminidase__InfluenzaB__AHL94893

SEQ ID NO: 222325 - RNA, 1401 nt, Artificial Sequence; identical to SEQ ID NO: 221033
  derived and/or modified CDS sequence (opt5) from neuraminidase__InfluenzaB__AHL94904

SEQ ID NO: 222326 - RNA, 1401 nt, Artificial Sequence
  derived and/or modified CDS sequence (opt5) from neuraminidase__InfluenzaB__AHL94915
augcugcccagcaccauccagacacucacgcuguuccuuaccuccggcggggugcugcucucucuguacgucagcgccucccuuucuuaucugcucuacagcgacauucugcugaaguuuuccccuacagagaucaccgcuccgacaaugccccucgauugcgccaacgcgucuaauguucaaguggugaacagaagcgcuaccaaaggagucacacugcuucugccugaacccgaguggaccuauccucggcucuccugucccggcagcacguuccagaaggcccugcuuauuucuccucaccgcuuuggggaaaccaaaggaaauuccgccccgcugaucauuagagagcccuucaucgcuugcggcccuaacgaauguaagcauuuugcccucacacacuacgcugcccagcccgggggauauuacaauggcacccggggcgaccgcaacaaacugagacaucugaucagcgugaagcucgggaagauuccuacaguugaaaauucuaucuuccacauggcggccugguccggaagcgcuugccaugauggcaaagaguggaccuauauugggguggacggacccgauaacaaugcccugcuuaaggucaaauacggcgaggcuuacacggacacauaucacucuuacgccaacaagauccugcggacccaggaguccgcguguaauugcauugggggaaacuguuaucucaugaucacagauggcagcgccuccggcgugucugaaugccgcuuucugaaaauuagagaggggcggaucaucaaggagauuuucccgaccggacgcguuaagcacaccgaagaguguacaugcggcuuugcuagcaauaaaacgaucgaaugugccugcagagacaacuccuacaccgcuaagcggccuuucgugaaacuuaaugucgagacagauaccgccgaaauucgccugaugugcacagacaccuaucucgauacgcccagaccugacgaugggagcaucacaggacccugugagucuaacggcgacaagggguccggaggcauuaaaggcggguuugugcaucaacggauggagagcaagaucggacgcugguacucuagaaccaugagcaaaaccgaacggaugggcauggggcuguaugugaaguacgacggagaucccugggccgacuccgaugcucuggcguucucuggcgucaugguuagcaugaaggagccugggugguacuccuuuggcuucgaaaucaaagacaagaaaugcgaugugccguguauuggaaucgagauggugcacgacggcgggaaggaaacauggcauagcgccgcuaccgccauuuauugccucaugggaucuggccagcugcuuugggauacagucacggggguggacauggcccuguga

SEQ ID NO: 222327 - RNA, 1401 nt, Artificial Sequence; identical to SEQ ID NO: 222193
  derived and/or modified CDS sequence (opt5) from neuraminidase__InfluenzaB__AHL94926

SEQ ID NO: 222328 - RNA, 1401 nt, Artificial Sequence
  derived and/or modified CDS sequence (opt5) from neuraminidase__InfluenzaB__AHL94937
augcugcccagcaccauccagacacucacgcuguuccuuaccuccggcggggugcugcucucucuguacgucagcgccucccuuucuuaucugcucuacagcgacauucugcugaaguuuuccccuacagagaucaccgcuccgacacucccccuggauugcgccaacgcgucuaauguucaagcugugaacagaagcgccaccaaaggagugacacuucugcucccugaacccgaguggaccuauccucggcuguccugucccggcagcacguuccagaaggcccuucugauuucuccucaccgcuuuggggaaaccaaaggaaauuccgcuccgcucaucauuagagagcccuucaucgccugcggcccuaacgaauguaagcauuuugcucugacacacuacgccgcgcagcccgggggauauuacaauggcacccggggcgaccgcaacaaacugagacaucucaucagcgucaagcuggggaagauuccuacaguggaaaauucuaucuuccacauggccgcuugguccggaagcgccugccaugauggcaaagaguggaccuauauugggguugacggacccgauaacaaugcccuucugaaggugaaauacggcgaggcuuacacggacacauaucacucuuacgcgaacaagauccuccggacccaggaguccgccuguaauugcauugggggaaacuguuaucugaugaucacagauggcagcgcuuccggcgucucugaaugccgcuuucuuaaaauuagagaggggcggaucaucaaggagauuuucccgaccggacgcgugaagcacaccgaagaguguacaugcggcuuugccagcaauaaaacgaucgaaugugcuugcagagacaacuccuacaccgccaagcggccuuucguuaaacugaauguggagacagauaccgccgaaauucgccucaugugcacagacaccuaucuggauacgcccagaccuaacgacgggagcaucacaggacccugugagucuaacggcgauaagggguccggaggcauuaaaggcggguuuguccaucaacggauggagagcaagaucggacgcugguacucuagaaccaugagcaaaaccgaacggaugggcauggggcuguaugugaaguacgacggagaccccugggcugauuccgacgcgcucgccuucucuggcgugauggucagcaugaaggagccugggugguacuccuuuggcuucgaaaucaaagauaagaaaugcgacguuccguguauuggaaucgagauggugcacgauggcgggaaggaaacauggcauagcgcugccaccgccauuuauugccugaugggaucuggccagcuucugugggacacagugacgggggucgauauggcucucuga

SEQ ID NO: 222329 - RNA, 1401 nt, Artificial Sequence; identical to SEQ ID NO: 222212
  derived and/or modified CDS sequence (opt5) from neuraminidase__InfluenzaB__AHL94948

SEQ ID NO: 222330 - RNA, 1401 nt, Artificial Sequence; identical to SEQ ID NO: 221028
  derived and/or modified CDS sequence (opt5) from neuraminidase__InfluenzaB__AHL94959

SEQ ID NO: 222331 - RNA, 1401 nt, Artificial Sequence; identical to SEQ ID NO: 221028
  derived and/or modified CDS sequence (opt5) from neuraminidase__InfluenzaB__AHL94969

SEQ ID NO: 222332 - RNA, 1401 nt, Artificial Sequence; identical to SEQ ID NO: 221028
  derived and/or modified CDS sequence (opt5) from neuraminidase__InfluenzaB__AHL94978

SEQ ID NO: 222333 - RNA, 1401 nt, Artificial Sequence
  derived and/or modified CDS sequence (opt5) from neuraminidase__InfluenzaB__AHM00990
augcugcccagcaccauccagacacucacgcuguuccuuaccuccggcggggugcugcucucucuguacgucagcgccucccuuucuuaucugcucuacagcgacauucugcugaaguuuucccaaacagagaucaccgcuccuauuaugccgcucgauugcacaaacgccucuaauguucaggcggugaaccacagcgcugccaaaggagugacccugcuucugcccgaaccugaguggacauaucccagacucuccuguccuggcagcaccuuccagaaggcccugcuuaucucuccccaucgguuuggggaaauuaaaggaaauuccgcuccucugaucauccgcgagccguucauugccugcggccccacggaauguaagcacuuugcucucacccauuacgccgcgcagccugggggauauuacaacggcacaagagaggaccggaauaaacugcgccaccugaucagcgucaagcucggcaagauucccaccguggagaacucuaucuuccauauggccgcuugguccgggagcgccugccacgauggaaaagaauggacauauauuggcguugacgggccugauucuaaugcucugcuuaagaucaaauacggagaggccuacaccgacacguaucacuccuacgcgaagaacauucugagaacacaagaaagcgccuguaauugcaucggcggggauuguuaucucaugaucaccgacggacccgcuuccggcgugucugagugccgguuucugaaaauucgcgagggcagaaucauuaaggaaaucuucccgacagggcgggucaagcauaccgaggaauguaccugcggauuugccagcaacaaaacaauugagugugcuugccgcgauaauagauacacggccaagcggccuuucgugaaacuuaacguugaaaccgacacagccgagauccgccugaugugcaccgagacauaucucgauacccccagaccuaaugacggcuccaucacggggcccugugaaagcgauggagacaagggcucugggggaauuaaaggcggcuuugugcaccagcggauggcuuccaagaucgggcgcugguacagcagaacaaugucuaaaaccaagcggaugggaaugggccuguaugucaaguacgacggggaucccuggaccgacagcgaggcgcuggcccucuccggagugauggugucuauggaggaaccuggcugguacagcuucggguuugaaauuaaagauaagaaaugcgacgucccguguaucggcauugagaugguucaugauggaggcaagacaaccuggcacuccgcugccacagccaucuauugccugauggggagcggacagcuucugugggacacggugaccggcguggauauggcucucuga

SEQ ID NO: 222334 - RNA, 1401 nt, Artificial Sequence; identical to SEQ ID NO: 222278
  derived and/or modified CDS sequence (opt5) from neuraminidase__InfluenzaB__AHM01001

SEQ ID NO: 222335 - RNA, 1401 nt, Artificial Sequence
  derived and/or modified CDS sequence (opt5) from neuraminidase__InfluenzaB__AHM01012
augcugcccagcaccauccagacacucacgcuguuccuuaccuccggcggggugcugcucucucuguacgucagcgccucccuuucuuaucugcucuacagcgacauucugcugaaguuuuccccuacagagaucaccgcuccgacaaugccccucgauugcgccaacgcgucuaauguucaagcugugaacagaagcgccaccaaaggagugacacugcuucugccugaacccgaguggaccuauccucggcucuccugucccggcagcacguuccagaaggcccugcuuauuucuccucaccgcuuuggggaaaccaaaggaaauuccgcuccgcugaucauuagagagcccuucaucgccugcggcccuaacgaauguaagcauuuugcucucacacacuacgccgcgcagcccgggggauauuacaauggcacccggggcgaccgcaacaaacugagacaucugaucagcgucaagcucgggaagauuccuacaguggaaaauucuaucuuccacauggccgcuugguccggaagcgccugccaugauggcaaagaguggaccuauauugggguugacggacccgauaacaaugcucugcuuaaggugaaauacggcgaggccuacacggacacauaucacucuuacgcgaacaagauccugcggacccaggaguccgccuguaauugcauugggggaaacuguuaucucaugaucacagauggcagcgcuuccggcgucucugaaugccgcuuucugaaaauuagagaggggcggaucaucaaggagauuuucccgaccggacgcgugaagcacaccgaagaguguacaugcggcuuugccagcaauaaaacgaucgaaugugcuugcagagacaaccgguacaccgccaagcgcccuuucguuaaacuuaauguggagacagauaccgccgaaauuagacugaugugcacagacaccuaucucgauacgccccggccuaacgacggguccaucacaggacccugugagagcgauggcgacaaggggucuggaggcauuaaaggcggguuuguccaucaacgcaugaaguccaaaaucggaagaugguacagccggaccaugucuaagaccgagagaaugggcauggggcuguaugugaaguacgacggagaucccuggacagacagcgaugcucuggcguucuccggcgugauggucucuaugaaagaaccugggugguacagcuuuggcuucgagaucaaggacaaaaagugcgauguuccguguauuggaaucgaaauggugcacgacggcgggaaagagaccuggcauuccgccgcuacagccauuuauugccucaugggaagcggccagcugcuuugggauacggugaccggggucgacauggcccuguga

SEQ ID NO: 222336 - RNA, 1401 nt, Artificial Sequence; identical to SEQ ID NO: 222278
  derived and/or modified CDS sequence (opt5) from neuraminidase__InfluenzaB__AHM01023

SEQ ID NO: 222337 - RNA, 1401 nt, Artificial Sequence; identical to SEQ ID NO: 222278
  derived and/or modified CDS sequence (opt5) from neuraminidase__InfluenzaB__AHM01034

SEQ ID NO: 222338 - RNA, 1401 nt, Artificial Sequence
  derived and/or modified CDS sequence (opt5) from neuraminidase__InfluenzaB__AHM01045
augcugcccagcaccauccagacacucacgcuguuccuuaccuccggcggggugcugcucucucuguacgucagcgccucccuuucuuaucugcucuacagcgacauucugcugaaguuuuccccuacagagaucaccgcuccgacaaugccccucgauugcgccaacgcgucuaauguucaagcugugaacagaagcgccaccaaaggagugacacugcuucugccugaacccggcuggaccuauccucggcucuccugucccgggagcacguuccagaaggcccugcuuauuucuccucaccgcuuuggagagaccaaaggcaauuccgcuccgcugaucauuagagaacccuucaucgccugcgggccuaacgaguguaagcauuuugcucucacacacuacgccgcgcagcccggaggcuauuacaauggcacccgcggggaccggaacaaacugagacaucugaucagcgucaagcucggaaagauuccuacaguggaaaauucuaucuuccacauggccgcuugguccggcagcgccugccaugaugggaaagaguggaccuauauuggaguugacggccccgauaacaaugcucugcuuaaggugaaauacggggaggccuacacggacacauaucacucuuacgcgaacaagauccugcggacccaggaauccgccuguaauugcauuggaggcaacuguuaucucaugaucacagauggcagcgcuuccggggucucugagugccgcuuucugaaaauuagagaaggacggaucaucaaggagauuuucccgaccggccgcgugaagcacaccgaggaauguacaugcggguuugccagcaauaaaacgaucgagugugcuugcagagacaaccgguacaccgccaagcgcccuuucguuaaacuuaauguggaaacagauaccgccgagauuagacugaugugcacagacaccuaucucgauacgccccggccuaacgacggauccaucacaggccccugugaaagcgauggggacaagggaucuggcggcauuaaagggggauuuguccaucaacgcaugaaguccaaaaucggcagaugguacagccggaccaugucuaagaccgagagaauggggaugggacuguaugugaaguacgacggcgaucccugggcugacagcgaugcgcuggccuucuccggggugauggucucuaugaaagagccuggcugguacagcuuuggauucgaaaucaaggacaaaaagugcgauguuccguguauuggcaucgagauggugcacgacgggggaaaagaaacauggcauuccgcugccaccgccauuuauugccucaugggcagcgggcagcugcuuugggauacaguggcuggagucgacauggcccuguga

SEQ ID NO: 222339 - RNA, 1401 nt, Artificial Sequence
  derived and/or modified CDS sequence (opt5) from neuraminidase__InfluenzaB__AHM01056
augcugcccagcaccacacagacgcucacccuguuccuuacauccggcggggugcugcucucucuguacgucagcgccucccuuucuuaucugcucuacagcgacauccugcugaaguuuuccccuaccgagauuacagcuccgaccaugccccucgauugcgccaacgcgucuaauguucaagcugugaacagaagcgccacaaaaggagugacccugcuucugccugaacccgaguggacguauccucggcucuccugucccggcagcaccuuccagaaggcccugcuuaucucuccucaccgcuuuggggaaacaaaaggaaauuccgcuccgcugauuaucagagagcccuucauugccugcggcccuaacgaauguaagcauuuugcucucacccacuacgccgcgcagcccgggggauauuacaauggcacacggggcgaccgcaacaaacugagacaucugaucagcgucaagcucgggaagaucccuaccguggaaaauucuauuuuccacauggccgcuugguccggaagcgccugccaugauggcaaagaguggacguauaucgggguugacggacccgauaacaaugcucugcuuaaggugaaauacggcgaggccuacacagacaccuaucacucuuacgcgaacaagauucugcggacacaggaguccgccuguaauugcaucgggggaaacuguuaucucaugauuaccgauggcagcgcuuccggcgucucugaaugccgcuuucugaaaaucagagaggggcggauuaucaaggagaucuucccgaccggacgcgugaagcacacagaagaguguacgugcggcuuugccagcaauaaaaccauugaaugugcuugcagagacaaccgguacacagccaagcgcccuuucguuaaacuuaauguggagaccgauacagccgaaaucagacugaugugcaccgacacguaucucgauacaccccggccuaacgacggguccauuaccggacccugugagagcgauggcgacaaggggucuggaggcaucaaaggcggguuuguccaucaacgcaugaaguccaaaauuggaagaugguacagccggaccaugucuaagacagagagaaugggcauggggcuguaugugaaguacgacggagaucccugggcugacagcgaugcgcugguguucuccggcgucaugguuucuaugaaagaaccugggugguacagcuuuggcuucgagaucaaggacaaaaagugcgaugugccguguaucggaauugaaauggugcacgacggcgggaaagagaccuggcauuccgccgcuacagccaucuauugccucaugggaagcggccagcugcuuugggauacggucaccgggguggacauggcccuguga

SEQ ID NO: 222340 - RNA, 1401 nt, Artificial Sequence; identical to SEQ ID NO: 222278
  derived and/or modified CDS sequence (opt5) from neuraminidase__InfluenzaB__AHM01067

SEQ ID NO: 222341 - RNA, 1401 nt, Artificial Sequence; identical to SEQ ID NO: 222247
  derived and/or modified CDS sequence (opt5) from neuraminidase__InfluenzaB__AHM01078

SEQ ID NO: 222342 - RNA, 1401 nt, Artificial Sequence
  derived and/or modified CDS sequence (opt5) from neuraminidase__InfluenzaB__AHM01089
augcugcccagcaccauccagacacucacgcuguuccuuaccuccggcggggugcugcucucucuguacgucagcgccucccuuucuuaucugcucuacagcgacauucugcugaaguuuuccccuacagagaucaccgcuccgacaaugccccucgauugcgccaacgcgucuaauguucaagcugugaacagaagcgccgccaaaggagugacccugcuucugccugaacccgaguggacauauccucggcucuccugucccggcagcaccuuccagaaggcucugcuuauuucuccucaccgcuuuggggaaacgaaaggaaauuccgccccgcugaucauuagagagcccuucaucgcuugcggcccuaacgaauguaagcauuuugcccucacccacuacgcggcccagcccgggggauauuacaauggcacacggggcgaccgcaacaaacugagacaucugaucagcgucaagcucgggaagauuccuaccguggaaaauucuaucuuccacauggcugccugguccggaagcgcuugccaugauggcaaagaguggacauauauugggguugacggacccgauaacaaugcccugcuuaaggugaaauacggcgaggcguacaccgacacguaucacucuuacgccaacaagauccugcggacacaggaguccgcuuguaauugcauugggggaaacuguuaucucaugaucaccgauggcagcgccuccggcgucucugaaugccgcuuucugaaaauuagagaggggcggaucaucaaggagauuuucccgacaggacgcgugaagcacaccgaagaguguaccugcggcuuugcuagcaauaaaacaaucgaaugugccugcagagacaaccgguacacggccaagcgcccuuucguuaaacuuaauguggagaccgauacagcugaaauuagacugaugugcaccgacacauaucucgauacgccccggccuaacgacggguccaucaccggacccugugagagcgauggcgacaaggggucuggaggcauuaaaggcggguuuguccaucaacgcaugaaguccaaaaucggaagaugguacagccggacaaugucuaagaccgagagaaugggcauggggcuguaugugaaguacgacggagaucccugggcggacagcgaugcccuggcuuucuccggcgugauggucucuaugaaagaaccugggugguacagcuuuggcuucgagaucaaggacaaaaagugcgauguuccguguauuggaaucgaaauggugcacgacggcgggaaagagaccuggcauuccgccgccacagcuauuuauugccucaugggaagcggccagcugcuuugggauaccgugacaggggucgacauggcccuguga

SEQ ID NO: 222343 - RNA, 1401 nt, Artificial Sequence; identical to SEQ ID NO: 222247
  derived and/or modified CDS sequence (opt5) from neuraminidase__InfluenzaB__AHM01100

SEQ ID NO: 222344 - RNA, 1401 nt, Artificial Sequence; identical to SEQ ID NO: 222278
  derived and/or modified CDS sequence (opt5) from neuraminidase__InfluenzaB__AHM01111

SEQ ID NO: 222345 - RNA, 1401 nt, Artificial Sequence
  derived and/or modified CDS sequence (opt5) from neuraminidase__InfluenzaB__AHM01122
augcugcccagcaccauccagacacucacgcuguuccuuaccuccggcggggugcugcucucucuguacgucagcgccucccuuucuuaucugcucuacagcgacauucugcugaaguuuuccccuacagagaucaccgcuccgacaaugccccucgauugcgccaacgcgucuaauguucaagcugugaacagaagcgccaccaaaggagugaagcugcuucugccugaacccgaguggacauauccucggcucuccugucccggcagcaccuuccagaaagcccugcuuauuucuccucaccgcuuuggggaaacgaagggaaauuccgcuccgcugaucauuagagagcccuucaucgccugcggcccuaacgaauguaaacauuuugcucucacccacuacgccgcgcagcccgggggauauuacaauggcacacggggcgaccgcaacaagcugagacaucugaucagcgucaagcucgggaaaauuccuaccguggaaaauucuaucuuccacauggccgcuugguccggaagcgccugccaugauggcaaggaguggacauauauugggguugacggacccgauaacaaugcucugcuuaaagugaaguacggcgaggccuacaccgacacguaucacucuuacgcgaacaaaauccugcggacacaggaguccgccuguaauugcauugggggaaacuguuaucucaugaucaccgauggcagcgcuuccggcgucucugaaugccgcuuucugaagauuagagaggggcggaucaucaaggagauuuucccgacaggacgcgugaaacacaccgaagaguguaccugcggcuuugccagcaauaagacaaucgaaugugcuugcagagacaaccgguacacggccaaacgcccuuucguuaaacuuaauguggagaccgauacagccgaaauuagacugaugugcaccgacacauaucucgauacgccccggccuaacgacggguccaucaccggacccugugagagcgauggcgacaaggggucuggaggcauuaagggcggguuuguccaucaacgcaugaaauccaagaucggaagaugguacagccggacaaugucuaagaccgagagaaugggcauggggcuguaugugaaauacgacggagaucccugggcugacagcgaugcgcuggccuucuccggcgugauggucucuaugaaggaaccugggugguacagcuuuggcuucgagaucaaagacaagaaaugcgauguuccguguauuggaaucgaaauggugcacgacggcgggaaggagaccuggcauuccgcugccacagccauuuauugccucaugggaagcggccagcugcuuugggauaccgugacaggggucgacauggcucuguga

SEQ ID NO: 222346 - RNA, 1401 nt, Artificial Sequence; identical to SEQ ID NO: 222278
  derived and/or modified CDS sequence (opt5) from neuraminidase__InfluenzaB__AHM01133

SEQ ID NO: 222347 - RNA, 1401 nt, Artificial Sequence
  derived and/or modified CDS sequence (opt5) from neuraminidase__InfluenzaB__AHM01144
augcugcccagcaccauccagacacucacgcuguuccuuaccuccggcggggugcugcucucucuguacgucagcgccucccuuucuuaucugcucuacagcgacauucugcugaaguuuuccccuacagagaucaccgcuccgacaaugccccucgauugcgccaacgcgucuaauguucaagcugugaacagaagcgccgccaaaggagugacccugcuucugccugaacccgaguggacauauccucggcucuccugucccggcagcaccuuccagaaggcucugcuuauuucuccucaccgcuuuggggaaacgaaaggaaauuccgccccgcugaucauuagagagcccuucaucgcuugcggcccuaacgaauguaagcauuuugcccucacccacuacgcggcccagcccgggggauauuacaauggcacacggggcgaccgcaacaaacugagacaucugaucagcgucaagcucgggaagauuccuaccguggaaaauucuaucuuccacauggcugccugguccggaagcgcuugccaugauggcaaagaguggacauauauugggguugacggacccgauaacaaugcccugcuuaaggugaaauacggcgaggcguacaccgacacguaucacucuuacgccaacaagauccugcggacacaggaguccgcuuguaauugcauugggggaaacuguuaucucaugaucaccgauggcagcgccuccggcauuucugaaugccgcuuucugaaaaucagagaggggcggaucauuaaggagaucuucccgacaggacgcgucaagcacaccgaagaguguaccugcggcuuugcuagcaauaaaacaauugaaugugccugcagagacaaccgguacacggccaagcgcccuuucgugaaacuuaauguugagaccgauacagcugaaaucagacugaugugcaccgacacauaucucgauacgccccggccuaacgacggguccauuaccggacccugugagagcgauggcgacaaggggucuggaggcaucaaaggcggguuugugcaucaacgcaugaaguccaaaaucggaagaugguacagccggacaaugucuaagaccgagagaaugggcauggggcuguaugucaaguacgacggagaucccugggcggacagcgaugcccuggcuuucuccggcgugauggugucuaugaaagaaccugggugguacagcuuuggcuucgagauuaaggacaaaaagugcgaugucccguguaucggaauugaaaugguucacgacggcgggaaagagaccuggcauuccgccgccacagcuaucuauugccucaugggaagcggccagcugcuuugggauaccgugacagggguggacauggcccuguga

SEQ ID NO: 222348 - RNA, 1401 nt, Artificial Sequence; identical to SEQ ID NO: 222278
  derived and/or modified CDS sequence (opt5) from neuraminidase__InfluenzaB__AHM01166

SEQ ID NO: 222349 - RNA, 1401 nt, Artificial Sequence
  derived and/or modified CDS sequence (opt5) from neuraminidase__InfluenzaB__AHM01188
augcugcccagcaccauccagacacucacgcuguuccuuaccuccggcggggugcugcucucucuguacgucagcgccucccuuucuuaucugcucuacagcgacauucugcugaaguuuuccccuacagagaucaccgcuccgacaaugccccucgauugcgccaacgcgucuaauguucaagcugugaaccacagcgccaccaaaggagugacacugcuucugccugaacccgaguggaccuauccuagacucuccugucccggcagcacguuccagaaggcccugcuuauuucuccucaucgguuuggggaaaccaaaggaaauuccgcuccgcugaucauucgcgagcccuucaucgccugcggcccuaacgaauguaagcacuuugcucucacacauuacgccgcgcagcccgggggauauuacaauggcaccagaggcgaccggaacaaacugcgccaccugaucagcgucaagcucgggaagauuccuacaguggaaaauucuaucuuccauauggccgcuugguccggaagcgccugccacgauggcaaagaguggaccuauauugggguugacggacccgauaacaaugcucugcuuaaggugaaauacggcgaggccuacacggacacauaucacucuuacgcgaacaagauccugagaacccaggaguccgccuguaauugcauugggggaaacuguuaucucaugaucacagauggcagcgcuuccggcgucucugaaugccgguuucugaaaauucgcgaggggagaaucaucaaggagauuuucccgaccggacgggugaagcauaccgaagaguguacaugcggcuuugccagcaauaaaacgaucgaaugugcuugccgcgacaacagauacaccgccaagcggccuuucguuaaacuuaauguggagacagauaccgccgaaauucgccugaugugcacagacaccuaucucgauacgcccagaccuaacgacggguccaucacaggacccugugagagcgauggcgacaaggggucuggaggcauuaaaggcggguuuguccaccaacggaugaaguccaaaaucggacgcugguacagcagaaccaugucuaagaccgagcggaugggcauggggcuguaugugaaguacgacggagaucccugggcugacagcgaugcgcugguguucuccggcgucaugguuucuaugaaagaaccugggugguacagcuuuggcuucgagaucaaggacaaaaagugcgaugugccguguauuggaaucgaaauggugcaugacggcgggaaagagacauggcacuccgccgcuaccgccauuuauugccucaugggaagcggccagcugcuuugggauacagucacggggguggacauggcccuguga

SEQ ID NO: 222350 - RNA, 1401 nt, Artificial Sequence; identical to SEQ ID NO: 222342
  derived and/or modified CDS sequence (opt5) from neuraminidase__InfluenzaB__AHM01199

SEQ ID NO: 222351 - RNA, 1401 nt, Artificial Sequence
  derived and/or modified CDS sequence (opt5) from neuraminidase__InfluenzaB__AHM01210
augcugcccagcaccauccagacacucacgcuguuccuuaccuccggcggggugcugcucucucuguacgucagcgccucccuuucuuaucugcucuacagcgacauucugcugaaguuuuccccuacagagaucaccgcuccgacaaugccccucgauugcgccaacgcgucuaauguucaagcugugaacagaagcgccaccaaaggagugacacugcuucugccugaacccggcuggaccuauccucggcucuccugucccgggagcacguuccagaaggcccugcuuauuucuccucaccgcuuuggagaggcuaaaggcaauuccgccccgcugaucauuagagaacccuucaucgcuugcgggccuaacgaguguaagcauuuugcccucacccacuacgcggcccagcccggaggcuauuacaauggcacacgcggggaccggaacaaacugagacaucugaucagcgucaagcucggaaagauuccuaccguggaaaauucuaucuuccacauggcugccugguccggcagcgcuugccaugaugggaaagaguggacauauauuggaguugacggccccgauaacaaugcccugcuuaaggugaaauacggggaggcguacaccgacacguaucacucuuacgccaacaagauccugcggacacaggaauccgcuuguaauugcauuggaggcaacuguuaucucaugaucaccgauggcagcgccuccggggucucugagugccgcuuucugaaaauuagagaaggacggaucaucaaggagauuuucccgacaggccgcgugaagcacaccgaggaauguaccugcggguuugcuagcaauaaaacaaucgagugugccugcagagacaaccgguacacggccaagcgcccuuucguuaaacuuaauguggaaaccgauacagcugagauuagacugaugugcaccgacacauaucucgauacgccccggccuaacgacggauccaucaccggccccugugaaagcgauggggacaagggaucuggcggcauuaaagggggauuuguccaucaacgcaugaaguccaaaaucggcagaugguacagccggacaaugucuaagaccgagagaauggggaugggacuguaugugaaguacgacggcgaucccugggcggacagcgaugcccuggcuuucuccggggugauggucucuaugaaagagccuggcugguacagcuuuggauucgaaaucaaggacaaaaagugcgauguuccguguauuggcaucgagauggugcacgacgggggaaaagaaaccuggcauuccgccgccacagcuauuuauugccucaugggcagcgggcagcugcuuugggauaccguggccggagucgacauggcgcuguga

SEQ ID NO: 222352 - RNA, 1401 nt, Artificial Sequence
  derived and/or modified CDS sequence (opt5) from neuraminidase__InfluenzaB__AHM01221
augcugcccagcaccauccagacacucacgcuguuccuuaccuccggcggggugcugcucucucuguacgucagcgccucccuuucuuaucugcucuacagcgacauucugcugaaguuuuccccuacagagaucaccgcuccgacaaugccccucgauugcgccaacgcgucuaauuuccaagcuguuaacagaagcgccaccaaaggagugacauuucugcuuccugaacccgaguggaccuauccucggcuguccugucccggcagcacguuccagaaggcccuccugauuucuccucaccgcuuuggggaaaccaaaggaaauuccgcuccgcuuaucauuagagagcccuucaucgccugcggcccuaacgaauguaagcauuuugcucugacacacuacgccgcgcagcccgggggauauuacaauggcacccggggcgaccgcaacaaacucagacaucugaucagcgugaagcuggggaagauuccuacagucgaaaauucuaucuuccacauggccgcuugguccggaagcgccugccaugauggcaaagaguggaccuauauugggguggacggacccgauaacaaugcucuccugaagguuaaauacggcgaggccuacacggacacauaucacucuuacgcgaacaagauccuucggacccaggaguccgccuguaauugcauugggggaaacuguuaucugaugaucacagauggcagcgcuuccggcgugucugaaugccgcuuucucaaaauuagagaggggcggaucaucaaggagauuuucccgaccggacgcgucaagcacaccgaagaguguacaugcggcuuugccagcaauaaaacgaucgaaugugcuugcagagacaaccgguacaccgccaagcgcccuuucgugaaacugaauguugagacagauaccgccgaaauuagacuuaugugcacagacaccuaucuggauacgccccggccuaacgacggguccaucacaggacccugugagagcgauggcgacaaggggucuggaggcauuaaaggcggguuugugcaucaacgcaugaaguccaaaaucggaagaugguacagccggaccaugucuaagaccgagagaaugggcauggggcucuaugucaaguacgacggagaucccugggcugacagcgaugcgcuggccuucuccggcgugauggugucuaugaaagaaccugggugguacagcuucggcuuugagaucaaggacaaaaagugcgaugucccguguauuggaaucgaaaugguucacgacggcgggaaagagacauggcauuccgcugccaccgccauuuauugccugaugggaagcggccagcuccugugggauacagugacggggguggacauggcucuuuga

SEQ ID NO: 222353 - RNA, 1401 nt, Artificial Sequence; identical to SEQ ID NO: 222247
  derived and/or modified CDS sequence (opt5) from neuraminidase__InfluenzaB__AHM01232

SEQ ID NO: 222354 - RNA, 1401 nt, Artificial Sequence; identical to SEQ ID NO: 222278
  derived and/or modified CDS sequence (opt5) from neuraminidase__InfluenzaB__AHM01243

SEQ ID NO: 222355 - RNA, 1401 nt, Artificial Sequence
  derived and/or modified CDS sequence (opt5) from neuraminidase__InfluenzaB__AHM01254
augcugcccagcaccauccagacacucacgcuguuccuuaccuccggcggggugcugcucucucuguacgucagcgccucccuuucuuaucugcucuacagcgacauucugcugaaguuuuccccuacagagaucaccgcuccgacaaugccccucgauugcgccaacgcgucuaauguucaagcugugaacagaagcgccaccaaaggagugacacugcuucugccugaacccgaguggaccuauccucggcucuccugucccggcagcacguuccagaaggcccugcuuauuucuccucaccgcuuuggggaaaccaaaggaaauuccgcuccgcugaucauuagagagcccuucaucgccugcggcccuaacgaauguaagcauuuugcucucacacacuacgccgcgcagcccgggggauauuacaauggcacccggggcgaccgcaacaaacugagacaucugaucagcgucaagcucgggaagauuccuacaguggaaaauucuaucuuccacauggccgcuugguccggaagcgccugccaugauggcaaagaguggaccuauauugggguugacggacccgauaacaaugcucugcuuaaggugaaauacggcgaggccuacacggacacauaucacucuuacgcgaacaagauccugcggacccaggaguccgccuguaauugcauugggggaaacuguuaucucaugaucacagauggcagcgcuuccggcgucucugaaugccgcuuucugaaaauuagagaggggcggaucaucaaggagauuuucccgaccggacgcgugaagcacaccgaagaguguacaugcggcuuugccagcaauaaaacgaucgaaugugcuugcagagacaaccgguacaccgccaagcgcccuuucguuaaacuuaauguggagacagauaccgccgaaauuagacugaugugcacagacaccuaucucgauacgccccggccuaacgacggguccaucacaggacccugugagagcgauggcgacaaggggucuggaggcauuaaaggcggguuuguccaucaacgcaugaaguccaaaaucggaagaugguacagccggaccaugucuaagaccgagagaaugggcauggggcuguaugugaaguacgacggagaucccugggcugacagcgaugcgcugguguucuccggcgucaugguuucuaugaaagaaccugggugguacagcuuuggcuucgagaucaaggacaaaaagugcgaugugccguguauuggaaucgaaauggugcacgacggcgggaaagagacauggcauuccgccgcuaccgccauuuauugccucaugggaagcggccagcugcuuugggauacagucacggggguggacauggcccuguga

SEQ ID NO: 222356 - RNA, 1401 nt, Artificial Sequence
  derived and/or modified CDS sequence (opt5) from neuraminidase__InfluenzaB__AHM01265
augcugcccagcaccauccagacacucacgcuguuccuuaccuccggcggggugcugcucucucuguacgucagcgccucccuuucuuaucugcucuacagcgacauucugcugaaguuuuccccuacagagaucaccgcuccgacaaugccccucgauugcgccaacgcgucuaauguucaagcugugaacagaagcgccaccaaaggagugacacugcuucugccugaacccgaguggaccuauccucggcucuccugucccggcagcacguuccagaaggcccugcuuauuucuccucaccgcuuuggggaaaccaaaggaaauuccgcuccgcugaucauuagagagcccuucaucgccugcggcccuaacgaauguaagcauuuugcucucacacacuacgccgcgcagcccgggggauauuacaauggcacccggggcgaccgcaacaaacugagacaucugaucagcgucaagcucgggaagauuccuacaguggaaaauucuaucuuccacauggccgcuugguccggaagcgccugccaugauggcaaagaguggaccuauauugggguugacggacccgauaacaaugcucugcuuaaggugaaauacggcgaggccuacacggacacauaucacucuuacgcgaacaagauccugcggacccaggaguccgccuguaauugcauugggggaaacuguuaucucaugaucacagauggcagcgcuuccggcgucucugaaugccgcuuucugaaaauuagagaggggcggaucaucaaggagauuuucccgaccggacgcgugaagcacaccgaagaguguacaugcggcuuugccagcaauaaaacgaucgaaugugcuugcagagacaaccgguacaccgccaagcgcccuuucguuaaacuuaauguggagacagauaccgccgaaauuagacugaugugcacagacaccuaucucgauacgccccggccuaacgacggguccaucacaggacccugugagagcgauggcgacgaggggucuggaggcauuaagggcggguuuguccaucaacgcaugaaauccaagaucggaagaugguacagccggaccaugucuaaaaccgaaagaaugggcauggggcuguaugugaaguacgacggagaucccugggcugacagcgaugcgcuggccuucuccggcgugauggucucuaugaaggagccugggugguacagcuuuggcuucgaaaucaaagacaagaaaugcgauguuccguguauuggaaucgagauggugcacgacggcgggaaggaaacauggcauuccgcugccaccgccauuuauugccucaugggaagcggccgccugcuuugggauacagugacgggggucgacauggcucuguga

SEQ ID NO: 222357 - RNA, 1401 nt, Artificial Sequence
  derived and/or modified CDS sequence (opt5) from neuraminidase__InfluenzaB__AHM01276
augcugcccagcaccauccagacacucacgcuguuccuuaccuccggcggggugcugcucucucuguacgucagcgccucccuuucuuaucugcucuacagcgacauucugcugaaguuuucccaaacagagaucaccgcuccuauuaugccgcucgauugcacaaacgccucuaauguucaggcggugaacagaagcgcugccaaaggagugacccugcuucugcccgaaccugaguggacauauccccggcucuccuguccuggcagcaccuuccagaaggcccugcuuaucucuccccaccgcuuuggggaaauuaaaggaaauuccgcuccucugaucaucagagagccguucauugccugcggccccacggaauguaagcauuuugcucucacccacuacgccgcgcagccugggggauauuacaacggcacacgggaggaccgcaauaaacugagacaucugaucagcgucaagcucggcaagauucccaccguggagaacucuaucuuccacauggccgcuugguccgggagcgccugccaugauggaaaagaauggacauauauuggcguugacgggccugauucuaaugcucugcuuaagaucaaauacggagaggccuacaccgacacguaucacuccuacgcgaagaacauucugcggacacaagaaagcgccuguaauugcaucggcggggauuguuaucucaugaucaccgacggacccgcuuccggcgugucugagugccgcuuucugaaaauuagagagggccggaucauuaaggaaaucuucccgacagggcgcgucaagcacaccgaggaauguaccugcggauuugccagcaacaaaacaauugagugugcuugcagagauaaucgguacacggccaagcgcccuuucgugaaacuuaacguugaaaccgacacagccgagaucagacugaugugcaccgagacauaucucgauacgccccggccuaaugacggcuccaucaccgggcccugugaaagcgauggagacaagggcucugggggaauuaaaggcggcuuugugcaucagcgcauggcuuccaagaucgggagaugguacagccggacaaugucuaaaaccaagagaaugggaaugggccuguaugucaaguacgacggggaucccuggaccgacagcgaggcgcuggcccucuccggagugauggugucuauggaggaaccuggcugguacagcuucggguuugaaauuaaagauaagaaaugcgacgucccguguaucggcauugagaugguucacgauggaggcaagacaaccuggcauuccgcugccacagccaucuauugccugauggggagcggacagcuucugugggacacggugaccggcguggauauggcucucuga

SEQ ID NO: 222358 - RNA, 1401 nt, Artificial Sequence; identical to SEQ ID NO: 222342
  derived and/or modified CDS sequence (opt5) from neuraminidase__InfluenzaB__AHM01287

SEQ ID NO: 222359 - RNA, 1401 nt, Artificial Sequence; identical to SEQ ID NO: 222342
  derived and/or modified CDS sequence (opt5) from neuraminidase__InfluenzaB__AHM01298

SEQ ID NO: 222360 - RNA, 1401 nt, Artificial Sequence; identical to SEQ ID NO: 222357
  derived and/or modified CDS sequence (opt5) from neuraminidase__InfluenzaB__AHM01309

SEQ ID NO: 222361 - RNA, 1401 nt, Artificial Sequence; identical to SEQ ID NO: 222278
  derived and/or modified CDS sequence (opt5) from neuraminidase__InfluenzaB__AHM01320

SEQ ID NO: 222362 - RNA, 1401 nt, Artificial Sequence; identical to SEQ ID NO: 222342
  derived and/or modified CDS sequence (opt5) from neuraminidase__InfluenzaB__AHM01331

SEQ ID NO: 222363 - RNA, 1401 nt, Artificial Sequence; identical to SEQ ID NO: 222278
  derived and/or modified CDS sequence (opt5) from neuraminidase__InfluenzaB__AHM01342

SEQ ID NO: 222364 - RNA, 1401 nt, Artificial Sequence
  derived and/or modified CDS sequence (opt5) from neuraminidase__InfluenzaB__AHM01353
augcugcccagcaccauccagacacucacgcuguuccuuaccuccggcggggugcugcucucucuguacgucagcgccucccuuucuuaucugcucuacagcgacauucugcugaaguuuuccccuacagagaucaccgcuccgacaaugccccucgauugcgccaacgcgucuaauguucaagcugugaacagaagcgccaccaaaggagugacacugcuucugccugaacccggcuggaccuauccucggcucuccugucccgggagcacguuccagaaggcccugcuuauuucuccucaccgcuuuggagagaccaaaggcaauuccgcuccgcugaucauuagagaacccuucaucgccugcgggccuaacgaguguaagcauuuugcucucacacacuacgccgcgcagcccggaggcuauuacaauggcacccgcggggaccggaacaaacugagacaucugaucagcgucaagcucggaaagauuccuacaguggaaaauucuaucuuccacauggccgcuugguccggcagcgccugccaugaugggaaagaguggaccuauauuggaguugacggccccgauaacaaugcucugcuuaaggugaaauacggggaggccuacacggacacauaucacucuuacgcgaacaagauccugcggacccaggaauccgccuguaauugcauuggaggcaacuguuaucucaugaucacagauggcagcgcuuccggggucucugagugccgcuuucugaaaauuagagaaggacggaucaucaaggagauuuucccgaccggccgcgugaagcacaccgaggaauguacaugcggguuugccagcaauaaaacgaucgagugugcuugcagagacaaccgguacaccgccaagcgcccuuucguuaaacuuaauguggaaacagauaccgccgagauuagacugaugugcacagacaccuaucucgauacgccccggccuaacgacggauccaucacaggccccugugaaagcgauggggacaagggaucuggcggcauuaaagggggauuuguccaucaacgcaugaaguccaaaaucggcagaugguacagccggaccaugucuaagaccgagagaauggggaugggacuguaugugaaguacgacggcgaucccugggcugacagcgaugcgcuggccuucuccggggugauggucucuaugaaagagccuggcugguacagcuuuggauucgaaaucaaggacaaaaagugcgauguuccguguauuggcaucgagauggugcacgacgggggaaaagaaacauggcauuccgcugccaccgccauuuauugccucaugggcagcgggcagcugcuuugggauacagugacgggagucgacauggcucuguga

SEQ ID NO: 222365 - RNA, 1401 nt, Artificial Sequence
  derived and/or modified CDS sequence (opt5) from neuraminidase__InfluenzaB__AHM01364
augcugcccagcaccauccagacacucacgcuguuccuuaccuccggcggggugcugcucucucuguacgucagcgccucccuuucuuaucugcucuacagcgacauucugcugaaguuuuccccuacagagaucaccgcuccgacaaugccccucgauugcgccaacgcgucuaauguucaagcugugaacagaagcgccaccaaaggagugacacugcuucugccugaacccgaguggaccuauccucggcucuccugucccggcagcacguuccagaaggcccugcuuauuucuccucaccgcuuuggggaaaccaaaggaaauuccgcuccgcugaucauuagagagcccuucaucgccugcggcccuaacgaauguaagcauuuugcucucacacacuacgccgcgcagcccgggggauauuacaauggcacccggggcgaccgcaacaaacugagacaucugaucagcgucaagcucgggaagauuccuacaguggaaaauucuaucuuccacauggccgcuugguccggaagcgccugccaugauggcaaagaguggaccuauauugggguugacggacccgauaacaaugcucugcuuaaggugaaauacggcgaggccuacacggacacauaucacucuuacgcgaacaagauccugcggacccaggaguccgccuguaauugcauugggggaaacuguuaucucaugaucacagauggcagcgcuuccggcgucucugaaugccgcuuucugaaaauuagagaggggcggaucaucaaggagauuuucccgaccggacgcgugaagcacaccgaagaguguacaugcggcuuugccagcaauaaaacgaucgaaugugcuugcagagacaaccgguacaccgccaagcgcccuuucguuaaacuuaauguggagacagauaccgccgaaauuagacugaugugcacagacaccuaucucgauacgccccggccuaacgacggguccaucacaggacccugugagagcgauggcgacgaggggucuggaggcauuaagggcggguuuguccaucaacgcaugaaauccaagaucggaagaugguacagccggaccaugucuaaaaccgaaagaaugggcauggggcuguaugugaaguacgacggagaucccugggcugacagcgaugcgcuggccuucuccggcgugauggucucuaugaaggagccugggugguacagcuuuggcuucgaaaucaaagacaagaaaugcgauguuccguguauuggaaucgagauggugcacgacggcgggaaggaaacauggcauuccgcugccaccgccauuuauugccucaugggaagcggccagcugcuuugggauacagugacgggggucgacauggcucuguga

SEQ ID NO: 222366 - RNA, 1401 nt, Artificial Sequence; identical to SEQ ID NO: 222357
  derived and/or modified CDS sequence (opt5) from neuraminidase__InfluenzaB__AHM01375

SEQ ID NO: 222367 - RNA, 1401 nt, Artificial Sequence; identical to SEQ ID NO: 222357
  derived and/or modified CDS sequence (opt5) from neuraminidase__InfluenzaB__AHM01386

SEQ ID NO: 222368 - RNA, 1401 nt, Artificial Sequence; identical to SEQ ID NO: 222278
  derived and/or modified CDS sequence (opt5) from neuraminidase__InfluenzaB__AHM01397

SEQ ID NO: 222369 - RNA, 1401 nt, Artificial Sequence; identical to SEQ ID NO: 222278
  derived and/or modified CDS sequence (opt5) from neuraminidase__InfluenzaB__AHM01408

SEQ ID NO: 222370 - RNA, 1401 nt, Artificial Sequence; identical to SEQ ID NO: 222278
  derived and/or modified CDS sequence (opt5) from neuraminidase__InfluenzaB__AHM01419

SEQ ID NO: 222371 - RNA, 1401 nt, Artificial Sequence
  derived and/or modified CDS sequence (opt5) from neuraminidase__InfluenzaB__AHM01430
augcugcccagcaccauccagacacucacgcuguuccuuaccuccggcggggugcugcucucucuguacgucagcgccucccuuucuuaucugcucuacagcgacauucugcugaaguuuuccccuacagagaucaccgcuccgacaaugccccucgauugcgccaacgcgucuaauguucaagcugugaacagaagcgccaccaaaggagugacacugcuucugccugaacccgaguggaccuauccucggcucuccugucccggcagcacguuccagaaggcccugcuuauuucuccucaccgcuuuggggaaaccaaaggaaauuccgcuccgcugaucauuagagagcccuucaucgccugcggcccuaacgaauguaagcauuuugcucucacacacuacgccgcgcagcccgggggauauuacaauggcacccggggcgaccgcaacaaacugagacaucugaucagcgucaagcucgggaagauuccuacaguggaaaauucuaucuuccacauggccgcuugguccggaagcgccugccaugauggcaaagaguggaccuauauugggguugacggacccgauaacaaugcucugcuuaaggugaaauacggcgaggccuacacggacacauaucacucuuacgcgaacaagauccugcggacccaggaguccgccuguaauugcauugggggaaacuguuaucucaugaucacagauggcagcgcuuccggcgucucugaaugccgcuuucugaaaauuagagaggggcggaucaucaaggagauuuucccgaccggacgcgugaagcacaccgaagaguguacaugcggcuuugccagcaauaaaacgaucgaaugugcuugcagagacaaccgguacaccgccaagcgcccuuucguuaaacuuaauguggagacagauaccgccgaaauuagacugaugugcacagacaccuaucucgauacgccccggccuaacgacggguccaucacaggacccugugagagcgauggcgacgaggggucuggaggcauuaagggcggguuuguccaucaacgcaugaaauccaagaucggaagaugguacagccggaccaugucuaaaaccgaaagaaugggcauggggcuguaugugaaguacgacggagaucccugggcugacagcgaugcgcuggccuucuccggcgugauggucucuaugaaggagccugggugguacagcuuuggcuucgaaaucaaagacaagaaaugcgauguuccguguauuggaaucgagauggugcacgacggcgggaaggaaacauggcauuccgcugccaccgccauuuauugccucaugggaagcggccgccugcuuugggauacagcuacggggguggacauggcccuguga

SEQ ID NO: 222372 - RNA, 1401 nt, Artificial Sequence
  derived and/or modified CDS sequence (opt5) from neuraminidase__InfluenzaB__AHM01441
augcugcccagcaccauccagacacucacgcuguuccuuaccuccggcggggugcugcucucucuguacgucagcgccucccuuucuuaucugcucuacagcgacauucugcugaaguuuucccaaacagagaucaccgcuccuacaaugccgcucgauugcgccaacgcgucuaauguucaggcugugaacagaagcgccgccaaaggagugacccugcuucugcccgaaccugaguggacauauccccggcucuccuguccuggcagcaccuuccagaaggcucugcuuauuucuccccaccgcuuuggggaaaucaaaggaaauuccgccccucugauuaucagagagccguucaucgcuugcggccccacggaauguaagcauuuugcccucacccacuacgcggcccagccugggggauauuacaacggcacacgggaggaccgcaauaaacugagacaucugauuagcgucaagcucggcaagauccccaccguggagaacucuauuuuccacauggcugccugguccgggagcgcuugccaugauggaaaagaauggacauauaucggcguugacgggccugauucuaaugcccugcuuaagauuaaauacggagaggcguacaccgacacguaucacuccuacgccaagaacauccugcggacacaagaaagcgcuuguaauugcauuggcggggauuguuaucucaugaucaccgacggacccgccuccggcgugucugagugccgcuuucugaaaaucagagagggccggauuaucaaggaaauuuucccgacagggcgcgucaagcacaccgaggaauguaccugcggauuugcuagcaacaaaacaaucgagugugccugcagagauaaucgguacacggccaagcgcccuuucgugaaacuuaacguugaaaccgacacagcugagauuagacugaugugcaccgagacauaucucgauacgccccggccuaaugacggcuccaucaccgggcccugugaaagcgauggagacaagggcucugggggaaucaaaggcggcuuugugcaucagcgcauggcguccaagauugggagaugguacagccggacaaugucuaaaaccaagagaaugggaaugggccuguaugucaaguacgacggggaucccuggaccgacagcgaggcccuggcucucuccggagugauggugucuauggaggaaccuggcugguacagcuucggguuugaaaucaaagauaagaaaugcgacgucccguguauuggcaucgagaugguucacgauggaggcaagacaaccuggcauuccgccgccacagcuauuuauugccugauggggagcggacagcuucugugggacacggugaccggcguggauauggcccucuga

SEQ ID NO: 222373 - RNA, 1401 nt, Artificial Sequence; identical to SEQ ID NO: 222278
  derived and/or modified CDS sequence (opt5) from neuraminidase__InfluenzaB__AHM01463

SEQ ID NO: 222374 - RNA, 1401 nt, Artificial Sequence
  derived and/or modified CDS sequence (opt5) from neuraminidase__InfluenzaB__AHM01474
augcugcccagcaccauccagacacucacgcuguuccuuaccuccggcggggugcugcucucucuguacgucagcgccucccuuucuuaucugcucuacagcgacauucugcugaaguuuucccaaacagagaucaccgcuccuauuaugccgcucgauugcaucaacgccucuaauguucaggcggugaacagaagcgcugccaaaggagugacacugcuucugcccgaaccugaguggaccuauccccggcucuccuguccuggcagcacauuccagaaggcccugcuuauuucuccccaccgcuuuggggaaaucaaaggaaauuccgcuccucugaucauuagagagccguucaucgccugcggccccaccgaauguaagcauuuugcucucacgcacuacgccgcgcagccugggggauauuacaacggcacccgggaggaccgcaauaaacugagacaucugauuagcgucaagcucggcaagauccccacaguggagaacucuauuuuccacauggccgcuugguccgggagcgccugccaugauggaaaagaauggaccuauaucggcguugacgggccugauucuaaugcucugcuuaagauuaaauacggagaggccuacacagacaccuaucacuccuacgcgaagaacauccugcggacgcaagaaagcgccuguaauugcaucggcggggauuguuaucucaugauuacagacggacccgcuuccggcgugucugagugccgcuuucugaaaaucagagagggccggauuaucaaggaaauuuucccgaccgggcgcgucaagcacacagaggaauguaccugcggauuugccagcaacaaaaccaucgagugugcuugcagagauaaucgguacacagccaagcgcccuuucgugaaacuuaacguugaaacggacaccgccgagaucagacugaugugcacagagaccuaucucgauacaccccggccuaaugacggcuccauuaccgggcccugugaaagcgauggagacaagggcucugggggaaucaaaggcggcuuugugcaucagcgcauggcuuccaagauugggagaugguacagccggacgaugucuaaaacaaagagaaugggaaugggccuguaugucaaguacgacggggaucccuggaccgacagcgaggcgcuggcccucuccggagugauggugucuauggaggaaccuggcugguacagcuucggguuugaaaucaaagauaagaaaugcgacgucccguguauuggcaucgagaugguucacgauggaggcaagaccacauggcauuccgcugccaccgccaucuauugccugauggggagcggacagcuucugugggacacagugacgggcguggauauggcucucuga

SEQ ID NO: 222375 - RNA, 1401 nt, Artificial Sequence
  derived and/or modified CDS sequence (opt5) from neuraminidase__InfluenzaB__AHM01485
augcugcccagcaccauccagacacucacgcuguuccuuaccuccggcggggugcugcucucucuguacgucagcgccucccuuucuuaucugcucuacagcgacauucugcugaaguuuuccccuacagagaucaccgcuccgauuaugccccucgauugcacaaacgccucuaauguucaagcggugaacagaagcgcugccaaaggagugacccugcuucugccugaacccgaguggacauauccucggcucuccugucccggcagcaccuuccagaaggcccugcuuaucucuccucaccgcuuuggggaaauuaaaggaaauuccgcuccgcugaucaucagagagcccuucauugccugcggcccuacggaauguaagcauuuugcucucacccacuacgccgcgcagcccgggggauauuacaacggcacacgggaggaccgcaauaaacugagacaucugaucagcgucaagcucggcaagauuccuaccguggagaacucuaucuuccacauggccgcuugguccgggagcgccugccaugauggaaaagaauggacauauauuggcguugacgggcccgauucuaaugcucugcuuaagaucaaauacggagaggccuacaccgacacguaucacuccuacgcgaagaacauucugcggacacaggaaagcgccuguaauugcaucggcggggauuguuaucucaugaucaccgacggaccggcuuccggcgugucugagugccgcuuucugaaaauuagagagggccggaucauuaaggaaaucuucccuacagggcgcgucaagcacaccgaggaauguaccugcggauuugccagcaacaaaacaauugagugugcuugcagagauaaucgguacacggccaagcgccccuucgugaaacuuaacguugaaaccgacacagccgagaucagacugaugugcaccgagacauaucucgauaccccucggcccaaugacggcuccaucacggggcccugugaaagcgauggagacaagggcucugggggaauuaaaggcggcuuugugcaucaacgcauggcuuccaagaucgggagaugguacagccggacaaugucuaaaaccaagagaaugggaaugggccuguaugucaaguacgacggggauccuuggaccgacagcgaggcgcuggcccucuccggagugauggugucuauggaggaaccgggcugguacagcuucggguuugaaauuaaagauaagaaaugcgacguccccuguaucggcauugagaugguucacgauggaggcaagacaaccuggcauuccgcugccacagccaucuauugccugauggggagcggacagcuucugugggacacggugaccggcguggauauggcucucuga

SEQ ID NO: 222376 - RNA, 1401 nt, Artificial Sequence; identical to SEQ ID NO: 222357
  derived and/or modified CDS sequence (opt5) from neuraminidase__InfluenzaB__AHM01496

SEQ ID NO: 222377 - RNA, 1401 nt, Artificial Sequence
  derived and/or modified CDS sequence (opt5) from neuraminidase__InfluenzaB__AHM01507
augcugcccagcaccauccagacacucacgcuguuccuuaccuccggcggggugcugcucucucuguacgucagcgccucccuuucuuaucugcucuacagcgacauucugcugaaguuuucccaaacagagaucaccgcuccuauuaugccgcucgauugcgccaacgcgucuaauguucaggcugugaacagaagcgccgccaaaggagugacacugcuucugcccgaaccugaguggaccuauccccggcucuccuguccuggcagcacauuccagaaggcucugcuuaucucuccccaccgcuuuggggaaauuaaaggaaauuccgccccucugaucgucagagagccguucaucgcuugcggccccaccgaauguaagcauuuugcccucacgcacuacgcggcccagccugggggauauuacaacggcacccgggaggaccgcaauaaacugagacaucugauuagcgugaagcucggcaagauccccacaguugagaacucuauuuuccacauggcugccugguccgggagcgcuugccaugauggaaaagaauggaccuauaucggcguggacgggccugauucuaaugcccugcuuaagauuaaauacggagaggcguacacagacaccuaucacuccuacgccaagaacauccugcggacgcaagaaagcgcuuguaauugcauuggcggggauuguuaucucaugaucacagacggacccgccuccggcgucucugagugccgcuuucugaaaaucagagagggccggauuaucaaggaaauuuucccgaccgggcgcgugaagcacacagaggaauguaccugcggauuugcuagcaacaaaaccaucgagugugccugcagagauaaucgguacacagccaagcgcccuuucguuaaacuuaacguggaaacggacaccgcugagauuagacugaugugcacagagaccuaucucgauacaccccggccuaaugacggcuccaucaccgggcccugugaaagcgauggagacaagggcucugggggaaucaaaggcggcuuuguccaucagcgcauggcguccaagauugggagaugguacagccggacgaugucuaaaacaaagagaaugggaaugggccuguaugugaaguacgacggggaucccuggaccgacagcgaggcccuggcucucuccggagugauggucucuaucgaggaaccuggcugguacagcuucggguuugaaauuaaagauaagaaaugcgacguuccguguaucggcauugagauggugcacgauggaggcaagaccacauggcauuccgccgccaccgcuaucuauugccugauggggagcggacagcuucugugggacacagugacgggcgucgauauggcccucuga

SEQ ID NO: 222378 - RNA, 1401 nt, Artificial Sequence; identical to SEQ ID NO: 222357
  derived and/or modified CDS sequence (opt5) from neuraminidase__InfluenzaB__AHM01518

SEQ ID NO: 222379 - RNA, 1401 nt, Artificial Sequence
  derived and/or modified CDS sequence (opt5) from neuraminidase__InfluenzaB__AHM01529
augcugcccagcaccauccagacacucacgcuguuccuuaccuccggcggggugcugcucucucuguacgucagcgccucccuuucuuaucugcucuacagcgacauucugcugaaguuuucccaaacagagaucaccgcuccuauuaugccgcucgauugcacaaacgccucuaauguucaggcggugaacagaagcgcugccaaaggagugacccugcuucugcccgaaccugaguggacauauccccggcucuccuguccuggcagcaccuuccagaaggcccugcuuaucucuccccaccgcuuuggggaaauuaaaggaaauuccgcuccucugaucaucagagagccguucauugccugcggccccacggaauguaagcauuuugcucucacccacuacgccgcgcagccugggggauauuacaacggcacacgggaggaccgcaauaaacugagacaucugaucagcgucaagcucggcaagauucccaccguggagaacucuaucuuccacauggccgcuugguccgggagcgccugccaugauggaaaagaauggacauauauuggcguugacgggccugauucuaaugcucugcuuaagaucaaauacggagaggccuacaccgacacguaucacuccuacgcgaagaacauucugcggacacaagaaagcgccuguaauugcaucggcggggauuguuaucucaugaucaccgacggacccgcuuccggcgugucugagugccgcuuucugaaaauuagagagggccggaucauuaaggaaauccuuccgacagggcgcgucaagcacaccgaggaauguaccugcggauucgccagcaacaaaacaauugagugugcuugcagagauaaucgguacacggccaagcgcccuuuugugaaacugaacguugaaaccgacacagccgagaucagacucaugugcaccgagacauaucuggauacgccccggccuaaugacggcuccaucaccgggcccugugaaagcgauggagacaagggcucugggggaauuaaaggcggcuucgugcaucagcgcauggcuuccaagaucgggagaugguacagccggacaaugucuaaaaccaagagaaugggaaugggccuguaugucaaguacgacggggaucccuggaccgacagcgaggcgcucgcccuguccggagugauggugucuauggaggaaccuggcugguacagcuuuggguucgaaauuaaagauaagaaaugcgacgucccguguaucggcauugagaugguucacgauggaggcaagacaaccuggcauuccgcugccacagccaucuauugccuuauggggagcggacagcugcucugggacacggugaccggcguggauauggcucuguga

SEQ ID NO: 222380 - RNA, 1401 nt, Artificial Sequence; identical to SEQ ID NO: 222247
  derived and/or modified CDS sequence (opt5) from neuraminidase__InfluenzaB__AHM01540

SEQ ID NO: 222381 - RNA, 1401 nt, Artificial Sequence; identical to SEQ ID NO: 222357
  derived and/or modified CDS sequence (opt5) from neuraminidase__InfluenzaB__AHM01551

SEQ ID NO: 222382 - RNA, 1401 nt, Artificial Sequence; identical to SEQ ID NO: 222357
  derived and/or modified CDS sequence (opt5) from neuraminidase__InfluenzaB__AHM01562

SEQ ID NO: 222383 - RNA, 1401 nt, Artificial Sequence; identical to SEQ ID NO: 220864
  derived and/or modified CDS sequence (opt5) from neuraminidase__InfluenzaB__AHZ13597

SEQ ID NO: 222384 - RNA, 1404 nt, Artificial Sequence
  derived and/or modified CDS sequence (opt5) from neuraminidase__InfluenzaB__AHZ36701
augcugcccagcaccauccagaugcucacacuguuccuuacguccggcggggugcugcucucucuguacgucagcgccucccuuucuuaucugcucuacagcgacauucugcugaaguuuuccccuaccgagaucacagcuccgaccaugccccucgauugcgccaacgcgucuaauguucacgcugugaacagaagcgccacaaaaggagugaccuuccugcuucugccugaacccgaguggacauauccucggcucuccugucccggcagcaccuuucaaaaggcccugcuuauuucuccucaucgcuucggggaaacgaaaggaaauuccgcuccgcugaucauuagagagcccuuuaucgccugcggcccuaacgaauguaagcacuucgcucucacccauuacgccgcgcagcccgggggauauuacaauggcacacggggcgaccgcaacaaacugagacaccugaucagcgucaagcucgggaagauuccuaccguggaaaauucuaucuuucauauggccgcuugguccggaagcgccugccacgauggcaaagaguggacauauauugggguugacggacccgauaacaaugcucugcuuaagaucaaauacggcgaggccuacaccgacacguaucacucuuacgcgaacaauauucugcggacacaggaguccgccuguaacugcaucgggggaaauuguuaucucaugauuaccgauggcagcgcuuccggcgugucugaaugccgcuuccugaagaucagaaaagggcggaucauuaaggagaucuuuccgacaggacgcgucaagcauaccgaggaauguaccugcggcuucgccagcaacaaaacaauugagugugcuugcagagacaauuccuacacggccaagcggccuuuugugaaacuuaacguugaaaccgauacagccgagauccgccugaugugcaccgacacauaucucgauacccccagaccugacgaugggagcauuacgggacccugugaaucuaacggcgacaagggguccggaggcaucaaaggcggguucgugcaccagcggauggcuagcaagaucggacgcugguacucuagaacaaugagcaaaaccgagcggaugggcauggggcuguaugucaaguacgacggagaucccuggaccgacuccgaugcgcuggccuuuagaggcgugauggugucuaugaaggagccugggugguacagcuucggcuucgaaauuaaagacaagaaaugcgaugucccguguaucggaauugagaugguucaugacggcgggaaggaaacauggcacuccgcugccaccgccaucuauugccucaugggaagcggccaacugcuuugggauacagugacggggguggacauggcucuguga

SEQ ID NO: 222385 - RNA, 1404 nt, Artificial Sequence
  derived and/or modified CDS sequence (opt5) from neuraminidase__InfluenzaB__AHZ36756
augcugcccagcaccauccagaugcucacacuguuccuuacguccggcggggugcugcucucucuguacgucagcgccucccuuucuuaucugcucuacagcgacauucugcugaaguuuuccccuaccgagaucacagcuccgaccaugccccucgauugcgccaacgcgucuaauguucacgcugugaacagaagcgccacaaaaggagugaccuuccugcuucugccugaacccgaguggacauauccucggcucuccugucccggcagcaccuuucaaaaggcccugcuuauuucuccucaucgcuucggggaaacgaaaggaaauuccgcuccgcugaucauuagagagcccuuuaucgccugcggcccuaacgaauguaagcacuucgcucucacccauuacgccgcgcagcccgggggauauuacaauggcacacggggcgaccgcaacaaacugagacaccugaucagcgucaagcucgggaagauuccuaccguggaaaauucuaucuuucauauggccgcuugguccggaagcgccugccacgauggcaaagaguggacauauauugggguugacggacccgauaacaaugcucugcuuaagaucaaauacggcgaggccuacaccgacacguaucacucuuacgcgaacaauauucugcggacacaggaguccgccuguaacugcaucgggggaaauuguuaucucaugauuaccgauggcagcgcuuccggcgugucugaaugccgcuuccugaagaucagagaggggcggaucauuaaagagaucuuuccgacaggacgcgucaagcauaccgaagaguguaccugcggcuucgccagcaacaagacaauugaaugugcuugcagagacaauuccuacacggccaaacggccuuuugugaaacuuaacguugagaccgauacagccgaaauccgccugaugugcaccgacacauaucucgauacccccagaccugacgaugggagcauuacgggacccugugagucuaacggcgacaagggguccggaggcaucaagggcggguucgugcaccagcggauggcuagcaaaaucggacgcugguacucuagaacaaugagcaagaccgagcggaugggcauggggcuguaugucaaauacgacggagaucccuggaccgacuccgaugcgcuggccuuuagaggcgugauggugucuaugaaggaaccugggugguacagcuucggcuucgagauuaaggacaaaaagugcgaugucccguguaucggaauugaaaugguucaugacggcgggaaagagacauggcacuccgcugccaccgccaucuauugccucaugggaagcggccaacugcuuugggauacagugacggggguggacauggcucuguga

SEQ ID NO: 222386 - RNA, 1401 nt, Artificial Sequence
  derived and/or modified CDS sequence (opt5) from neuraminidase__InfluenzaB__AHZ36767
augcugcccagcaccauccagacacucacgcuguuccuuaccuccggcggggugcugcucucucuguacgucagcgccucccuuucuuaucugcucuacagcgacauucugcugaaguuuuccccuacagagaucaccgcuccgacaagaccccucgauugcgccaacgcgucuaauguucaagcugugaaccggagcgccaccaaaggagugacacugcuucugccugaacccgaguggaccuauccucgccucuccugucccggcagcacguuccagaaggcccugcuuauuucuccucacagauuuggggaaaccaaaggaaauuccgcuccgcugaucauucgggagcccuucaucgccugcggcccuaacgaauguaagcauuuugcucucacacacuacgccgcgcagcccgggggauauuacaauggcacccgcggcgacagaaacaaacugcggcaucugaucagcgucaagcucgggaagauuccuacaguggaaaauucuaucuuccacauggccgcuugguccggaagcgccugccaugauggcaaagaguggaccuauauugggguugacggacccgauaacaaugcucugcuuaaggugaaauacggcgaggccuacacggacacauaucacucuuacgcgaacaagauccugcgcacccaggaguccgccuguaauugcauugggggaaacuguuaucucaugaucacagauggcagcgcuuccggcgucucugaaugcagauuucugaaaauucgggaggggcgcaucaucaaggagauuuucccgaccggaagagugaagcacaccgaagaguguacaugcggcuuugccagcaauaaaacgaucgaaugugcuugccgggacaaccgcuacaccgccaagagaccuuucguuaaacuuaauguggagacagauaccgccgaaauucggcugaugugcacagacaccuaucucgauacgccccgcccuaacgacggguccaucacaggacccugugagagcgauggcgacaaggggucuggaggcauuaaaggcggguuuguccaucaaagaaugaaguccaaaaucggacggugguacagcagaaccaugucuaagaccgagcgcaugggcauggggcuguaugugaaguacgacggagaucccugggcugacagcgaugcgcuggccuucuccggcgugauggucucuaugaaagaaccugggugguacagcuuuggcuucgagaucaaggacaaaaagugcgauguuccguguauuggaaucgaaauggugcacgacggcgggaaagagacauggcauuccgcugccaccgccauuuauugccucaugggaagcggccagcugcuuugggauacagugacgggggucgacauggcucuguga

SEQ ID NO: 222387 - RNA, 1401 nt, Artificial Sequence
  derived and/or modified CDS sequence (opt5) from neuraminidase__InfluenzaB__AHZ36778
augcugcccagcaccauccagacacucacgcuguuccuuaccuccggcggggugcugcucucucuguacgucagcgccucccuuucuuaucugcucuacagcgacauucugcugaaguuuccuuccacagagaucaccgcuccgacaaugccccucgauugcgccaacgcgucuaauguucaagcugugaacagaagcgccaccaaaggagugacacugcuucugccugaacccgaguggaccuauccucggcucuccugucccggcagcacguuccagaaggcccugcuuauuucuccucaccgcuuuggggaaaccaaaggaaauuccgcuccgcugaucauuagagagcccuucaucgccugcggcccuaaggaauguaaacauuuugcucucacacacuacgccgcgcagcccgggggauauuacaacggcacccggggcgaccgcaauaagcugagacaucugaucagcgucaagcucgggaaaauuccuacaguggagaacucuaucuuccacauggccgcuugguccggaagcgccugccaugauggcaaggaguggaccuauauugggguugacggacccgauaauaacgcucugcuuaaaaucaaguacggcgaagccuacacggacacauaucacucuuacgcgaauaacauucugcggacccaggaguccgccuguaauugcaucgggggaaacuguuaucucaugauuacagauggcagcgcuuccggcgugucugaaugccgcuuucugaaaaucagagaggggcggaucauuaaggagaucuucccgaccggacgcauucaacacaccgaagaguguacaugcggcuuugccagcaauaagacgaucgaaugugcuugcagagacaacuccuacaccgccaaacggccuuucgucaaacuuaauguggagacagauaccgccgaaauucgccugaugugcacaaagaccuaucucgacacgcccagaccugaggaugggagcaucacaggacccugugagucuaacggcgggaagggauccggcggcaucaaagggggauuuguucaucagcggauggcuagcaagauuggccgcugguacucuagaaccaugagcaaaaccgaacggaaggggaugggacuguaugugaaguacaacggcgaccccugggcggauuccgacgcccuggucuucucuggggugaugaucagcauggaggaaccuggcugguacuccuuuggauucgagauuaaagacaagaaaugcgaugugccguguaucggcauugaaaugguccacgacgggggaaaggagacauggcauagcgcugccaccgccaucuauugccucaugggcucugggcagcugcuuugggauacaguuacgggagugaauaugacccuguga

SEQ ID NO: 222388 - RNA, 1401 nt, Artificial Sequence
  derived and/or modified CDS sequence (opt5) from neuraminidase__InfluenzaB__AHZ36789
augcugcccagcaccauccagacacucacgcuguuccuuaccuccggcggggugcugcucucucuguacgucagcgccucccuuucuuaucugcucuacagcgacauucugcugaaguuuuccccuacagagaucaccgcucaaacaaugccgcucgauugcgccaacgcgucuaauguucaggcugugaacagaagcgccaccaaaggagugacacugcuucccccugaacccgaguggaccuauccucggcuguccugucccggcagcacguuccagaaggcccuccugauuucuccucaccgcuuuggggaaaccaaaggaaauuccgcuccgcuuaucauuagagagcccuucaucgccugcggcccuaacgaauguaagcauuuugcucugacacacuacgccgcgcagcccgggggauauuacaauggcacccggggcgaccgcaacaaacucagacaucugaucagcgucaagcuggggaagauuccuacaguggaaaauucuaucuuccacauggccgcuugguccggaagcgccugccaugauggcaaagaguggaccuauauugggguugacggacccgauaacaaugcucuccugaaggugaaauacggcgaggccuacacggacacauaucacucuuacgcgaacaagauccuucggacccaagaguccgccuguaauugcauugggggaaacuguuaucugaugaucacagauggcagcgcuuccggcgucucugaaugccgcuuucucaaaauuagagaggggcggaucaucaaggagauuuucccgaccggacgcgugaagcacaccgaagaguguacaugcggcuuugccagcaauaaaacgaucgaaugugcuugcagagacaaccgguacaccgccaagcgcccuuucguuaaacugaauguggagacagauaccgccgaaauuagacuuaugugcacagacaccuaucuggauacgccccggccuaacgacggguccaucacaggacccugugagagcgauggcgacaaggggucuggaggcauuaaaggcggguuuguccaucagcgcaugaaguccaaaaucggaagaugguacagccggaccaugucuaagaccgagagaaugggcauggggcucuaugugaaguacgacggagaucccugggcugacagcgaugcgcuggccuucuccggcgugauggucucuaugaaagaaccugggugguacagcuuuggcuucgagaugaaggacaaaaagugcgauguuccguguaucggaauugaaauggugcacgacggcgggaaagagacauggcauuccgcugccaccgccaucuauugccugaugggaagcggccagcuccugugggauacagugacgggggucgacauggcucuuuga

SEQ ID NO: 222389 - RNA, 1401 nt, Artificial Sequence; identical to SEQ ID NO: 222388
  derived and/or modified CDS sequence (opt5) from neuraminidase__InfluenzaB__AHZ36800

SEQ ID NO: 222390 - RNA, 1401 nt, Artificial Sequence
  derived and/or modified CDS sequence (opt5) from neuraminidase__InfluenzaB__AHZ36811
augcugcccagcaccauccagacacucacgcuguuccuuaccuccggcggggugcugcucucucuguacgucagcgccucccuuucuuaucugcucuacagcgacauucugcugaaguuuucccaaacagagaucaccgcuccuauuaugccgcucgauugcacaaacgccucuaauguucaggcggugaacagaagcgcugccaaaggagugacccugcuucugcccgaaccugaguggacauauccccggcucuccuguccuggcagcaccuuccagaaggcccugcuuaucucuccccaccgcuuuggggaaauuaaaggaaauuccgcuccucugaucaucagagagccguucauugccugcggccccacggaauguaagcauuuugcucucacccacuacgccgcgcagccugggggauauuacaacggcacacgggaggaccgcaauaaacugagacaucugaucagcgucaagcucggcaagauucccaccguggagaacucuaucuuccacauggccgcuugguccgggagcgccugccaugauggaaaagaauggacauauauuggcguugacgggccugauucuaaugcucugcuuaagaucaaauacggagaggccuacaccgacacguaucacuccuacgcgaagaacauucugcggacacaagaaagcgccuguaauugcaucggcggggauuguuaucucaugaucaccgacggacccgcuuccggcgugucugagugccgcuuucugaaaauuagagagggccggaucauucgcgaaaucuucccgacagggagagucaagcacaccgaggaauguaccugcggauuugccagcaacaagacaauugagugugcuugccgggauaaucgcuacacggccaaaagaccuuucgugaaacuuaacguugaaaccgacacagccgagauccggcugaugugcaccgagacauaucucgauacgccccgcccuaaugacggcuccaucaccgggcccugugaaagcgauggagacaagggcucugggggaauuaagggcggcuuugugcaucagagaauggcuuccaaaaucgggcggugguacagcagaacaaugucuaagaccaaacgcaugggaaugggccuguaugucaaguacgacggggaucccuggaccgacagcgaggcgcuggcccucuccggagugauggugucuauggaggaaccuggcugguacagcuucggguuugaaauuaaggauaaaaagugcgacgucccguguaucggcauugagaugguucacgauggaggcaaaacaaccuggcauuccgcugccacagccaucuauugccugauggggagcggacagcuucugugggacacggugaccggcguggauauggcucucuga

SEQ ID NO: 222391 - RNA, 1404 nt, Artificial Sequence; identical to SEQ ID NO: 222385
  derived and/or modified CDS sequence (opt5) from neuraminidase__InfluenzaB__AHZ36822

SEQ ID NO: 222392 - RNA, 1401 nt, Artificial Sequence
  derived and/or modified CDS sequence (opt5) from neuraminidase__InfluenzaB__AHZ36833
augcugcccagcaccauccagacacucacgcuguuccuuaccuccggcggggugcugcucucucuguacgucagcgccucccuuucuuaucugcucuacagcgacauucugcugaaguuuuccccuacagagaucaccgcuccgacaagaccccucgauugcgccaacgcgucuaauguucaagcugugaaccggagcgccaccaaaggagugacacugcuucugccugaacccgaguggaccuauccucgccucuccugucccggcagcacguuccagaaggcccugcuuauuucuccucacagauuuggggaaaccaaaggaaauuccgcuccgcugaucauucgggagcccuucaucgccugcggcccuaacgaauguaagcauuuugcucucacacacuacgccgcgcagcccgggggauauuacaauggcacccgcggcgacagaaacaaacugcggcaucugaucagcgucaagcucgggaagauuccuacaguggaaaauucuaucuuccacauggccgcuugguccggaagcgccugccaugauggcaaagaguggaccuauauugggguugacggacccgauaacaaugcucugcuuaaggugaaauacggcgaggccuacacggacacauaucacucuuacgcgaacaagauccugcgcacccaggaguccgccuguaauugcauugggggaaacuguuaucucaugaucacagauggcagcgcuuccggcgucucugaaugcagauuucugaaagugcgggaggggcgcauuaucaaggagaucuucccgaccggaagaguuaagcacaccgaagaguguacaugcggcuuugccagcaauaaaacgauugaaugugcuugccgggacaaccgcuacaccgccaagagaccuuucgugaaacuuaaugucgagacagauaccgccgaaauccggcugaugugcacagacaccuaucucgauacgccccgcccuaacgacggguccauuacaggacccugugagagcgauggcgacaaggggucuggaggcaucaaaggcggguuugugcaucaaagaaugaaguccaaaauuggacggugguacagcagaaccaugucuaagaccgagcgcaugggcauggggcuguaugugaaguacgacggagaucccugggcugacagcgaugcgcuggccuucuccggcgucaugguuucuaugaaagaaccugggugguacagcuuuggcuucgagaucaaggacaaaaagugcgaugugccguguaucggaauugaaauggugcacgacggcgggaaagagacauggcauuccgcugccaccgccaucuauugccucaugggaagcggccagcugcuuugggauacagucacggggguggacauggcucuguga

SEQ ID NO: 222393 - RNA, 1401 nt, Artificial Sequence
  derived and/or modified CDS sequence (opt5) from neuraminidase__InfluenzaB__AHZ36844
augcugcccagcaccauccagacacucacgcuguuccuuaccuccggcggggugcugcucucucuguacgucagcgccucccuuucuuaucugcucuacagcgacauucugcugaaguuuuccccuacagagaucaccgcuccgacaagaccccucgauugcgccaacgcgucuaauguucaagcugugaaccggagcgccaccaaagaagugacacugcuucugccugagcccgaauggaccuauccucgccucuccugucccggaagcacguuccagaaggcccugcuuauuucuccucacagauuuggcgagaccaaaggaaauuccgcuccgcugaucauucgggaacccuucaucgccugcgggccuaacgaguguaagcauuuugcucucacacacuacgccgcgcagcccggcggguauuacaauggaacccgcggcgacagaaacaaacugcggcaucugaucagcgucaagcucggcaagauuccuacaguggaaaauucuaucuuccacauggccgcuugguccgggagcgccugccaugauggaaaagaguggaccuauauuggcguugacgggcccgauaacaaugcucugcuuaaggugaaauacggagaggccuacacggacacauaucacucuuacgcgaacaagauccugcgcacccaggaauccgccuguaauugcauuggcgggaacuguuaucucaugaucacagauggaagcgcuuccggcgucucugagugcagauuucugaaaauucgggagggccgcaucaucaaggaaauuuucccgaccgggagagugaagcacaccgaggaauguacaugcggauuugccagcaauaaaacgaucgagugugcuugccgggacaaccgcuacaccgccaagagaccuuucguuaaacuuaauguggaaacagauaccgccgagauucggcugaugugcacagacaccuaucucgauacgccccgcccuaacgacggcuccaucacagggcccugugagagcgauggagacaagggcucugggggaauuaaaggcggcuuuguccaucaaagaaugaaguccaaaaucgggcggugguacagcagaaccaugucuaagaccgaacgcaugggaaugggccuguaugugaaguacgacggggaucccugggcugacagcgaugcgcuggccuucuccggagugauggucucuaugaaagagccuggcugguacagcuuuggguucgaaaucaaggacaaaaagugcgauguuccguguauuggcaucgagauggugcacgacggaggcaaagaaacauggcauuccgcugccaccgccauuuauugccucauggggagcggacagcugcuuugggauacagugacgggcgucgacauggcucuguga

SEQ ID NO: 222394 - RNA, 1401 nt, Artificial Sequence
  derived and/or modified CDS sequence (opt5) from neuraminidase__InfluenzaB__AHZ36855
augcugcccagcaccauccagacacucacgcuguuccuuaccuccggcggggugcugcucucucuguacgucagcgccucccuuucuuaucugcucuacagcgacauucugcugaaguuuuccccuacagagaucaccguucaaacaaugccgcucgauugcgcuaacgccucuaaugugcaggcggugaacagaagcgcuaccaaaggagucacacugcuucccccugaacccgaguggaccuauccucggcuguccugucccggcagcacguuccagaaggcccuccugauuucuccucaccgcuuuggggaaaccaaaggaaauuccgccccgcuuaucauuagagagcccuucaucgcuugcggcccuaacgaauguaagcauuuugcccugacacacuacgcugcccagcccgggggauauuacaauggcacccggggcgaccgcaacaaacucagacaucugaucagcgugaagcuggggaagauuccuacaguugaaaauucuaucuuccacauggcggccugguccggaagcgcuugccaugauggcaaagaguggaccuauauugggguggacggacccgauaacaaugcccuccugaaggucaaauacggcgaggcuuacacggacacauaucacucuuacgccaacaagauccuucggacccaagaguccgcguguaauugcauugggggaaacuguuaucugaugaucacagauggcagcgccuccggcgugucugaaugccgcuuucucaaaauuagagaggggcggaucaucaaggagauuuucccgaccggacgcguuaagcacaccgaagaguguacaugcggcuuugcuagcaauaaaacgaucgaaugugccugcagagacaaccgguacaccgcuaagcgcccuuucgugaaacugaaugucgagacagauaccgccgaaauuagacuuaugugcacagacaccuaucuggauacgccccggccuaacgacggguccaucacaggacccugugagagcgauggcgacaaggggucuggaggcauuaaaggcggguuugugcaucagcgcaugaaguccaaaaucggaagaugguacagccggaccaugucuaagaccgagagaaugggcauggggcucuaugugaaguacgacggagaucccugggccgacagcgaugcucuggcguucuccggcgucaugguuucuaugaaagaaccugggugguacagcuuuggcuucgagaugaaggacaaaaagugcgaugugccguguaucggaauugaaauggugcacgacggcgggaaagagacauggcauuccgccgcuaccgccaucuauugccugaugggaagcggccagcuccugugggauacagucacggggguggacauggcccuuuga

SEQ ID NO: 222395 - RNA, 1404 nt, Artificial Sequence; identical to SEQ ID NO: 222385
  derived and/or modified CDS sequence (opt5) from neuraminidase__InfluenzaB__AHZ36866

SEQ ID NO: 222396 - RNA, 1401 nt, Artificial Sequence
  derived and/or modified CDS sequence (opt5) from neuraminidase__InfluenzaB__AHZ36877
augcugcccagcaccauccagacacucacgcuguuccuuaccuccggcggggugcugcucucucuguacgucagcgccucccuuucuuaucugcucuacagcgacauucugcugaaguuuuccccuccggagaucacagcucccaccaugccucucgauugcgccaacgcgucuaauguucaagcugugaacagaagcgccacaaaaggagugacccugcuucugcccgaaccugaguggacauauccccggcucuccuguccuggcagcaccuuccagaaggcccugcuuauuucuccgcaccgcuuuggggaaacgaaaggaaauuccgcuccccugaucauuagagagccuuucaucgccugcggccccaacgaauguaagcauuuugcucucacccacuacgccgcgcagccugggggauauuacaauggcacacggggcgaccgcaacaaacugagacaucugaucagcgucaagcucgggaagauucccaccguggaaaauucuaucuuccacauggccgcuugguccggaagcgccugccaugauggcaaagaguggacauauauugggguugacggaccggauaacaaugcucugcuuaaggugaaauacggcgaggccuacaccgacacguaucacucuuacgcgaacaagauccugcggacacaggaguccgccuguaauugcauugggggaaacuguuaucucaugaucaccgauggcagcgcuuccggcgucucugaaugccgcuuucugaaaauuagagaggggcggaucaucaaggagauuuucccuacaggacgcgugaagcacaccgaagaguguaccugcggcuuugccagcaauaaaacaaucgaaugugcuugcagagacaaccgguacacggccaagcgccccuucguuaaacuuaauguggagaccgauacagccgaaauuagacugaugugcaccgacacauaucucgauaccccucggcccaacgacggguccaucacgggacccugugagagcgauggcgacaaggggucuggaggcauuaaaggcggguuuguccaucaacgcaugaaguccaaaaucggaagaugguacagccggacaaugucuaagaccgagagaaugggcauggggcuguaugugaaguacgacggagauccuugggcugacagcgaugcgcuggccuucuccggcgugauggucucuaugaaagaaccggggugguacagcuuuggcuucgagaucaaggacaaaaagugcgauguucccuguauuggaaucgaaauggugcacgacggcgggaaagagaccuggcauuccgcugccacagccauuuauugccucaugggaagcggccagcugcuuugggauaccgugacaggggucgacauggcucuguga

SEQ ID NO: 222397 - RNA, 1404 nt, Artificial Sequence; identical to SEQ ID NO: 222385
  derived and/or modified CDS sequence (opt5) from neuraminidase__InfluenzaB__AHZ36888

SEQ ID NO: 222398 - RNA, 1404 nt, Artificial Sequence; identical to SEQ ID NO: 222385
  derived and/or modified CDS sequence (opt5) from neuraminidase__InfluenzaB__AHZ36899

SEQ ID NO: 222399 - RNA, 1404 nt, Artificial Sequence; identical to SEQ ID NO: 222385
  derived and/or modified CDS sequence (opt5) from neuraminidase__InfluenzaB__AHZ36910

SEQ ID NO: 222400 - RNA, 1401 nt, Artificial Sequence; identical to SEQ ID NO: 222387
  derived and/or modified CDS sequence (opt5) from neuraminidase__InfluenzaB__AHZ36921

SEQ ID NO: 222401 - RNA, 1401 nt, Artificial Sequence
  derived and/or modified CDS sequence (opt5) from neuraminidase__InfluenzaB__AHZ36932
augcugcccagcaccauccagacacucacgcuguuccuuaccuccggcggggugcugcucucucuguacgucagcgccucccuuucuuaucugcucuacagcgacauucugcugaaguuuuccccuacagagaucaccgcucaaacaaugccgcucgauugcgccaacgcgucuaauguucaggcugugaacagaagcgccaccaaaggagugacacugcuucccccugaacccgaguggaccuauccucggcuguccugucccggcagcacguuccagaaggcccuccugauuucuccucaccgcuuuggggaaaccaaaggaaauuccgcuccgcuuaucauuagagagcccuucaucgccugcggcccuaacgaauguaagcauuuugcucugacacacuacgccgcgcagcccgggggauauuacaauggcacccggggcgaccgcaacaaacucagacaucugaucagcgucaagcuggggaagauuccuacaguggaaaauucuaucuuccacauggccgcuugguccggaagcgccugccaugauggcaaagaguggaccuauauugggguugacggacccgauaacaaugcucuccugaaggugaaauacggcgaggccuacacggacacauaucacucuuacgcgaacaagauccuucggacccaagaguccgccuguaauugcauugggggaaacuguuaucugaugaucacagauggcagcgcuuccggcgucucugaaugccgcuuucucaaaauuagagaggggcggaucaucaaggagauuuucccgaccggacgcgugaagcacaccgaagaguguacaugcggcuuugccagcaauaaaacgauggaaugugcuugcagagacaaccgguacaccgccaagcgcccuuucguuaaacugaauguggagacagauaccgccgaaaucagacuuaugugcacagacaccuaucuggauacgccccggccuaacgacggguccauuacaggacccugugagagcgauggcgacaaggggucuggaggcaucaaaggcggguuuguccaucagcgcaugaaguccaaaauuggaagaugguacagccggaccaugucuaagaccgagagaaugggcauggggcucuaugugaaguacgacggagaucccugggcugacagcgaugcgcuggccuucuccggcgugauggucucuaugaaagaaccugggugguacagcuuuggcuucgagaugaaggacaaaaagugcgauguuccguguaucggaaucgaaauggugcacgacggcgggaaagagacauggcauuccgcugccaccgccauuuauugccugaugggaagcggccagcuccugugggauacagugacgggggucgacauggcucuuuga

SEQ ID NO: 222402 - RNA, 1401 nt, Artificial Sequence
  derived and/or modified CDS sequence (opt5) from neuraminidase__InfluenzaB__AHZ36943
augcugcccagcaccauccagacacucacgcuguuccuuaccuccggcggggugcugcucucucuguacgucagcgccucccuuucuuaucugcucuacagcgacauucugcugaaguuuuccccuacagagaucaccgcuccgacaaugccccucgauugcgccaacgcgucuaauguucaagcugugaacagaagcgccaccaaaggagugacacugcuuccucccgaaccugaguggaccuauccccggcuguccuguccuggcagcacguuccagaaggcccuccugauuucuccgcaccgcuuuggggaaaccaaaggaaauuccgcuccccuuaucauuagagagccuuucaucgccugcggccccaacgaauguaagcauuuugcucugacacacuacgccgcgcagccugggggauauuacaauggcacccggggcgaccgcaacaaacucagacaucugaucagcgucaagcuggggaagauucccacaguggaaaauucuaucuuccacauggccgcuugguccggaagcgccugccaugauggcaaagaguggaccuauauugggguugacggaccggauaacaaugcucuccugaaggugaaauacggcgaggccuacacggacacauaucacucuuacgcgaacaagauccuucggacccaggaguccgccuguaauugcauugggggaaacuguuaucugaugaucacagauggcagcgcuuccggcgucucugaaugccgcuuucucaaaauuagagaggggcggaucaucaaggagauuuucccuaccggacgcgugaagcacaccgaagaguguacaugcggcuuugccagcaauaaaacgaucgaaugugcuugcagagacaaccgguacaccgccaagcgccccuucguuaaacugaauguggagacagauaccgccgaaauuagacuuaugugcacagacaccuaucuggauacgccucggcccaacgacggguccaucacaggacccugugagagcgauggcgacaaggggucuggaggcauuaaaggcggguuuguccaucaacgcaugaaguccaaaaucggaagaugguacagccggaccaugucuaagaccgagagaaugggcauggggcucuaugugaaguacgacggagauccuugggcugacagcgaugcgcuggccuucuccggcgugauggucucuaugaaagaaccggggugguacagcuuuggcuucgagaugaaggaccgcaaaugcgauguucccuguaucggaauugaaauggugcacgacggcgggaaggagacauggcauuccgcugccaccgccaucuauugccugaugggaagcggccagcuccugugggauacagugacgggggucgacauggcucuuuga

SEQ ID NO: 222403 - RNA, 1404 nt, Artificial Sequence; identical to SEQ ID NO: 222385
  derived and/or modified CDS sequence (opt5) from neuraminidase__InfluenzaB__AHZ36954

SEQ ID NO: 222404 - RNA, 1401 nt, Artificial Sequence
  derived and/or modified CDS sequence (opt5) from neuraminidase__InfluenzaB__AHZ36965
augcugcccagcaccauccagacacucacgcuguuccuuaccuccggcggggugcugcucucucuguacgucagcgccucccuuucuuaucugcucuacagcgacauucugcugaaguuuuccccuccggagaucaacgcucccacaaugccucucgauugcgccaaugcgucuaacguucaagcugugaauagaagcgccaccaaaggagugacacugcuucugcccgaaccugaguggaccuauccccggcucuccuguccuggcagcacauuccagaaggcccugcuuauuucuccgcaccgcuuuggggaaaccaaaggaaacuccgcuccccugaucauuagagagccuuucaucgccugcggccccaaugaauguaagcauuuugcucucacgcacuacgccgcgcagccugggggauauuacaacggcacccggggcgaccgcaauaaacugagacaucugaucagcgucaagcucgggaagauucccacaguggagaacucuaucuuccacauggccgcuugguccggaagcgccugccaugauggcaaagaguggaccuauauugggguugacggaccggauaauaacgcucugcuuaaggugaaauacggcgaagccuacacagacaccuaucacucuuacgcgaauaagauccugcggacgcaggaguccgccuguaacugcauugggggaaauuguuaucucaugaucacagauggcagcgcuuccggcgucucugaaugccgcuuucugaaaauuagagaggggcggaucaucaaggagauuuucccuaccggacgcgugaagcacacagaagaguguaccugcggcuuugccagcaacaaaaccaucgaaugugcuugcagagacaaucgguacacagccaagcgccccuucguuaaacuuaacguggagacggauaccgccgaaauuagacugaugugcacagacaccuaucucgauacaccucggcccaacgacggguccaucaccggacccugugagagcgauggcgacaaggggucuggaggcauuaaaggcggguuuguccaucaacgcaugaaguccaaaaucggaagaugguacagccggacgaugucuaagacagagagaaugggcauggggcuguaugugaaguacgacggagauccuugggcugacagcgaugcgcuggccuucuccggcgugauggucucuaugaaagaaccggggugguacagcuuuggcuucgagaucaaggacaaaaagugcgauguucccuguauuggaaucgaaauggugcacgacggcgggaaagagaccuggcauuccgcugccaccgccauuuauugccucaugggaagcggccagcugcuuugggauacagugaccggggucgacauggcucuguga

SEQ ID NO: 222405 - RNA, 1404 nt, Artificial Sequence; identical to SEQ ID NO: 222385
  derived and/or modified CDS sequence (opt5) from neuraminidase__InfluenzaB__AHZ36976

SEQ ID NO: 222406 - RNA, 1404 nt, Artificial Sequence; identical to SEQ ID NO: 222385
  derived and/or modified CDS sequence (opt5) from neuraminidase__InfluenzaB__AHZ36987

SEQ ID NO: 222407 - RNA, 1401 nt, Artificial Sequence; identical to SEQ ID NO: 222388
  derived and/or modified CDS sequence (opt5) from neuraminidase__InfluenzaB__AHZ36998

SEQ ID NO: 222408 - RNA, 1401 nt, Artificial Sequence
  derived and/or modified CDS sequence (opt5) from neuraminidase__InfluenzaB__AHZ37009
augcugcccagcaccauccagacacucacgcuguuccuuacccugggcggggugcuccugucccuuuacgucucugccagccuguccuaucuccuguacucugacauucugcucaaguuuagcccuacagagaucaccgcuccgacaaugccccugggaugcgccaacgcguccaauguucaagcugugaacagaucugccaccaaaggcgugacacuucugcucccugaacccgaguggaccuauccucggcugagcugucccggguccacguuccagaaggcccuucugauuagcccucaccgcuuuggagaaaccaaaggcaauucugcuccgcucaucauuagagagcccuucaucgccugcgggccuaacgaauguaagcauuuugcucugacacacuacgccgcgcagcccggaggcuauuacaauggcacccgcggggaucggaacaaacugagacaucucaucuccgucaagcugggaaagauuccuacaguggagaauagcaucuuccacauggccgcuuggucuggcuccgccugccaugacgggaaagaguggaccuauauuggaguugauggccccgacaacaaugcucugcuuaaggugaaauacggggaagccuacacggauacauaucacagcuacgcgaacaagauccuccggacccaggagucugccuguaauugcauuggaggcaacuguuaucugaugaucacagacggcuccgcuagcggggucuccgaaugccgcuuucuuaaaauuagagagggacggaucaucaaggagauuuucccgaccggccgcgugaagcacaccgaagaguguacaugcggguuugccucuaauaaaacgaucgaaugugcuugcagagauaaccgguacaccgccaagcgcccuuucguuaaacugaauguggaggccgacacagcugaaauuagacucaugugcaccgauacauaucuggacacgccccggccuaacgauggaagcaucaccggccccugugaguccgacggggauaagggaagcggcggcauuaaagggggauuuguccaucaacgcaugaagucuaaaaucggcagaugguacucccggacaaugagcaagaccgagagaauggggaugggacuguaugugaaguacgacggcgaccccugggcggauucugacgcccucgcuuucagcggggugauggucuccaugaaagaaccuggcugguacucuuuuggauucgagaucaaggauaaaaagugcgacguuccguguauuggcaucgaaauggugcacgaugggggaaaagagaccuggcauagcgccgccacagcuauuuauugccugaugggcuccgggcagcuucugugggacaccgugacaggagucgauauggcccucuga

SEQ ID NO: 222409 - RNA, 1401 nt, Artificial Sequence; identical to SEQ ID NO: 222386
  derived and/or modified CDS sequence (opt5) from neuraminidase__InfluenzaB__AHZ37020

SEQ ID NO: 222410 - RNA, 1401 nt, Artificial Sequence; identical to SEQ ID NO: 222388
  derived and/or modified CDS sequence (opt5) from neuraminidase__InfluenzaB__AHZ37031

SEQ ID NO: 222411 - RNA, 1401 nt, Artificial Sequence; identical to SEQ ID NO: 222386
  derived and/or modified CDS sequence (opt5) from neuraminidase__InfluenzaB__AHZ37042

SEQ ID NO: 222412 - RNA, 1401 nt, Artificial Sequence; identical to SEQ ID NO: 222388
  derived and/or modified CDS sequence (opt5) from neuraminidase__InfluenzaB__AHZ37064

SEQ ID NO: 222413 - RNA, 1401 nt, Artificial Sequence; identical to SEQ ID NO: 222386
  derived and/or modified CDS sequence (opt5) from neuraminidase__InfluenzaB__AHZ37075

SEQ ID NO: 222414 - RNA, 1401 nt, Artificial Sequence; identical to SEQ ID NO: 222386
  derived and/or modified CDS sequence (opt5) from neuraminidase__InfluenzaB__AHZ37086

SEQ ID NO: 222415 - RNA, 1401 nt, Artificial Sequence
  derived and/or modified CDS sequence (opt5) from neuraminidase__InfluenzaB__AHZ37097
augcugcccagcaccauccagacacucacgcuguuccuuaccuccggcggggugcugcucucucuguacgucagcgccucccuuucuuaucugcucuacagcgacauucugcugaaguuuuccccuacagagaucaccgcuccgacaaugccccucgauugcgccaacgcgucuaauguucaagcugugaacagaagcgccaccaaaggagugacacugcuuccucccgaaccugaguggaccuauccccggcuguccuguccuggcagcacguuccagaaggcccuccugauuucuccgcaccgcuuuggggaaaccaaaggaaauuccgcuccccuuaucauuagagagccuuucaucgccugcggccccaacgaauguaagcauuuugcucugacacacuacgccgcgcagccugggggauauuacaauggcacccggggcgaccgcaacaaacucagacaucugaucagcgucaagcuggggaagauucccacaguggaaaauucuaucuuccacauggccgcuugguccggaagcgccugccaugauggcaaagaguggaccuauauugggguugacggaccggauaacaaugcucuccugaaggugaaauacggcgaggccuacacggacacauaucacucuuacgcgaacaagauccuucggacccaggaguccgccuguaauugcauugggggaaacuguuaucugaugaucacagauggcagcgcuuccggcgucucugaaugccgcuuucucaaaauuagagaggggcggaucaucaaggagauuuucccuaccggacgcgugaagcacaccgaagaguguacaugcggcuuugccagcaauaaaacgaucgaaugugcuugcagagacaaccgguacaccgccaagcgccccuucguuaaacugaauguggagacagauaccgccgaaauuagacuuaugugcacagacaccuaucuggauacgccucggcccaacgacggguccaucacaggacccugugagagcgauggcgacaaggggucuggaggcauuaaaggcggguuuguccaucaacgcaugaaguccaaaaucggaagaugguacagccggaccaugucuaagaccgagagaaugggcauggggcucuaugugaaguacgacggagauccuugggcugacagcgaugcgcuggccuucuccggcgugauggucucuaugaaagaaccggggugguacagcuuuggcuucgagaugaaggacaaaaagugcgauguucccuguaucggaauugaaauggugcacgacggcgggaaagagacauggcauuccgcugccaccgccaucuauugccugaugggaagcggccagcuccugugggauacagugacgggggucgacauggcucuuuga

SEQ ID NO: 222416 - RNA, 1401 nt, Artificial Sequence; identical to SEQ ID NO: 222386
  derived and/or modified CDS sequence (opt5) from neuraminidase__InfluenzaB__AHZ37108

SEQ ID NO: 222417 - RNA, 1401 nt, Artificial Sequence
  derived and/or modified CDS sequence (opt5) from neuraminidase__InfluenzaB__AHZ41774
augcugcccagcaccauccagaugcucacacuguuccuuacguccggcggggugcugcucucucuguacgucagcgccucccuuucuuaucugcucuacagcgacauucugcugaaguuuuccccuaccgagaucacagcuccgaccaugccccucgauugcgccaacgcgucuaauguucacgcugugaacagaagcgccacaaaaggagugaccuuccugcuuccugaacccgaguggacauauccucggcuguccugucccggcagcaccuuucaaaaggcccuccugauuucuccucaucgcuucggggaaacgaaaggaaauuccgcuccgcuuaucauuagagagcccuuuaucgccugcggcagcaacgaaugucggcacuucgcucugacccauuacgccgcgcagccugggggauauuacaauggcacacgcggcgacagaaacaagcuccggcaccugaucucugucaaacuggggaagauucccaccguggaaaauuccaucuuucauauggccgcuuggagcggaucugccugccacgauggcaaggaguggacauauauugggguugacggaccugauaacaaugcucuccugaaaaucaaguacggcgaggccuacaccgacacguaucacuccuacgcgaacaauauucuucgcacacaggagagcgccuguaacugcaucgggggaaauuguuaucugaugauuaccgauggcuccgcuucuggcgugagcgaaugcagauuccucaaaauccgggaggggcgcaucauuaaggagaucuuucccacaggaagagucaaacauaccgaagaguguaccugcggcuucgccuccaacaagacaauugaaugugcuugccgggacaauagcuacacggccaagcgcccguuugugaaacugaacguugagaccgauacagccgaaaucagacuuaugugcaccgacacauaucuggauaccccucggcccgacgaugggucuauuacgggaccuugugaguccaacggcgacaaggggagcggaggcaucaaaggcggguucgugcaccagcgcauggcuucuaagaucggaagaugguacagccggacaauguccaaaaccgagagaaagggcauggggcucuaugucaaauacgacggagaucccuggaccgacaaugaugcgcuggccuuucgcggcgugauggugucuaugaaggaacccgggugguacagcuucggcuucgagauuaaggacaaaaagugcgaugucccuuguaucggaauugaaaugguucaugacggcgggaaagagacauggcacuccgcugccaccgccaucuauugccugaugggaagcggccaacuccugugggauacagugacggggguggacauggcucuuuga

SEQ ID NO: 222418 - RNA, 1401 nt, Artificial Sequence; identical to SEQ ID NO: 221028
  derived and/or modified CDS sequence (opt5) from neuraminidase__InfluenzaB__AHZ41785

SEQ ID NO: 222419 - RNA, 1401 nt, Artificial Sequence; identical to SEQ ID NO: 221028
  derived and/or modified CDS sequence (opt5) from neuraminidase__InfluenzaB__AHZ41796

SEQ ID NO: 222420 - RNA, 1401 nt, Artificial Sequence
  derived and/or modified CDS sequence (opt5) from neuraminidase__InfluenzaB__AHZ41807
augcugcccagcaccauccagaugcucacacuguuccuuacguccggcggggugcugcucucucuguacgucagcgccucccuuucuuaucugcucuacagcgacauucugcugaaguuuuccccuaccgagaucacagcuccgaccaugccccucgauugcgccaacgcgucuaauguucacgcugugaacagaagcgccacaaaaggagugaccuuccugcuuccugaacccgaguggacauauccucggcuguccugucccggcagcaccuuucaaaaggcccuccugauuucuccucaucgcuucggggaaacgaaaggaaauuccgcuccgcuuaucauuagagagcccuuuaucgccugcggcccuaacgaauguaagcacuucgcucugacccauuacgccgcgcagcccgggggauauuacaauggcacacggggcgaccgcaacaaacucagacaccugaucagcgucaagcuggggaagauuccuaccguggaaaauucuaucuuucauauggccgcuugguccggaagcgccugccacgauggcaaagaguggacauauauugggguugacggacccgauaacaaugcucuccugaagaucaaauacggcgaggccuacaccgacacguaucacucuuacgcgaacaauauucuucggacacaggaguccgccuguaacugcaucgaagggaauuguuaucugaugauuaccgauggaagcgcuuccggcgugucugagugccgcuuccucaagaucagagagggccggaucauuaaagaaaucuuuccgacagggcgcgucaagcauaccgaggaauguaccugcggauucgccagcaacaagacaauugagugugcuugcagagacaauuccuacacggccaaacggccuuuugugaagcugaacguugaaaccgauacagccgagauccgccuuaugugcaccgacacauaucuggauacccccagaccugacgauggcagcauuacggggcccugugagucuaacggagacaaaggcuccgggggaaucaagggcggcuucgugcaccagcggauggcuagcaaaaucgggcgcugguacucuagaacaaugagcaagaccgaacggaaaggaaugggccucuaugucaaguacgacggggaucccuggaccgacuccgaugcgcuggccuuuagaggagugauggugucuaugaaggagccuggcugguacagcuucggguucgaaauuaaagacaagaaaugcgaugucccguguaucggcauugagaugguucaugacggaggcaaggaaacauggcacuccgcugccaccgccaucuauugccugauggggagcggacaacuccugugggauacagugacgggcguggacauggcucuuuga

SEQ ID NO: 222421 - RNA, 1401 nt, Artificial Sequence
  derived and/or modified CDS sequence (opt5) from neuraminidase__InfluenzaB__AHZ41818
augcugcccagcaccauccagacacucacgcuguuccuuaccuccggcggggugcugcucucucuguacgucagcgccucccuuucuuaucugcucuacagcgacauucugcugaaguuuuccccuacagagaucaccgcuccgacaaugccccucgauugcgccaacgcgucuaauguucaagcugugaacagaagcgccaccaaaggagugacacugcuucugccugaacccgaguggaccuauccucggcucuccugucccggcagcacguuccagaaggcccugcuuauuucuccucaccgcuuuggggaaaccaaaggaaauuccgcuccgcugaucauuagagagcccuucaucgccugcggcccuaacgaauguaagcauuuugcucucacacacuacgccgcgcagcccgggggauauuacaauggcacccggggcgaccgcaacaaacugagacaucugaucagcgucaagcucgggaagauuccuacaguggaaaauucuaucuuccacauggccgcuugguccggaagcgccugccaugauggcaaagaguggaccuauauugggguugacggacccgauaacaaugcucugcuuaaggugaaauacggcgaggccuacacggacacauaucacucuuacgcgaacaagauccugcggacccaggaguccgccuguaauugcauugggggaaacuguuaucucauggucacagauggcagcgcuuccggcgugucugaaugccgcuuucugaaaaucagagaggggcggauuaucaaggagaucuucccgaccggacgcguuaagcacaccgaagaguguacaugcggcuuugccagcaauaaaacgauugaaugugcuugcagagacaacuccuacaccgccaagcggccuuucgugaaacuuaaugucgagacagauaccgccgaaauccgccugaugugcacagacaccuaucucgauacgcccagaccugacgaugggagcauuacaggacccugugagucuaacggcgacaagggguccggaggcaucaaaggcggguuugugcaucaacggauggagagcaagauuggacgcugguacucuagaaccaugagcaaaaccgaacggaugggcauggggcuguaugugaaguacgacggagaucccugggcugacuccgaugcgcuggucuucucuggcguuauggugagcaugaaggagccugggugguacuccuuuggcuucgaaaucaaagacaagaaaugcgaugugccguguaucggaauugagaugguccacgacggcgggaaggaaacauggcauagcgccgcuaccgccaucuauugccucaugggaucuggccagcugcuuugggauacagugacggggguuaacauggcccuguga

SEQ ID NO: 222422 - RNA, 1401 nt, Artificial Sequence; identical to SEQ ID NO: 221028
  derived and/or modified CDS sequence (opt5) from neuraminidase__InfluenzaB__AHZ41829

SEQ ID NO: 222423 - RNA, 1401 nt, Artificial Sequence
  derived and/or modified CDS sequence (opt5) from neuraminidase__InfluenzaB__AHZ41840
augcugcccagcaccauccagaugcucacacuguuccuuacguccggcggggugcugcucucucuguacgucagcgccucccuuucuuaucugcucuacagcgacauucugcugaaguuuuccccuaccgagaucacagcuccgaccaugccccucgauugcgccaacgcgucuaauguucacgcugugaacagaagcgccacaaaaggagugaccuuccugcuuccugaacccgaguggacauauccucggcuguccugucccggcagcaccuuucaaaaggcccuccugauuucuccucaucgcuucggggaaacgaaaggaaauuccgcuccgcuuaucauuagagagcccuuuaucgccugcggcccuaacgaaugucggcacuucgcucugacccauuacgccgcgcagcccgggggauauuacaauggcacacgcggcgacagaaacaagcuccggcaccugaucagcgucaaacuggggaagauuccuaccguggaaaauucuaucuuucauauggccgcuugguccggaagcgccugccacgauggcaaggaguggacauauauugggguugacggacccgauaacaaugcucuccugaaaaucaaguacggcgaggccuacaccgacacguaucacucuuacgcgaacaauauucuucgcacacaggaguccgccuguaacugcaucgggggaaauuguuaucugaugauuaccgauggcagcgcuuccggcgugucugaaugcagauuccucaaaauccgggaggggcgcaucauuaaggagaucuuuccgacaggaagagucaaacauaccgaagaguguaccugcggcuucgccagcaacaagacaauugaaugugcuugccgggacaauuccuacacggccaagcgcccuuuugugaaacugaacguugagaccgauacagccgaaaucagacuuaugugcaccgacacauaucuggauacgccccggccugacgaugggagcauuaccggacccugugagucuaacggcgacaagggguccggaggcaucaaaggcggguucgugcaccagcgcauggcuagcaagaucggaagaugguacucucggacaaugagcaaaaccgagagaaagggcauggggcucuaugucaaauacgacggagaucccuggaccgacuccgaugcgcuggccuuucgcggcgugauggugucuaugaaggaaccugggugguacagcuucggcuucgagauuaaggacaaaaagugcgaugucccguguaucggaauugaaaugguucaugacggcgggaaagagacauggcacuccgcugccaccgccaucuauugccugaugggaagcggccaacuccugugggauacagugacggggguggacauggcucuuuga

SEQ ID NO: 222424 - RNA, 1401 nt, Artificial Sequence; identical to SEQ ID NO: 221028
  derived and/or modified CDS sequence (opt5) from neuraminidase__InfluenzaB__AHZ41851

SEQ ID NO: 222425 - RNA, 1401 nt, Artificial Sequence; identical to SEQ ID NO: 222274
  derived and/or modified CDS sequence (opt5) from neuraminidase__InfluenzaB__AHZ41862

SEQ ID NO: 222426 - RNA, 1401 nt, Artificial Sequence
  derived and/or modified CDS sequence (opt5) from neuraminidase__InfluenzaB__AHZ41873
augcugcccagcaccauccagacacucacgcuguuccuuaccuccggcggggugcugcucucucuguacgucagcgccucccuuucuuaucugcucuacagcgacauucugcugaaguuuuccccuacagagaucaccgcuccgacaaugccccucgauugcgccaacgcgucuaaugcucaagccguuaacagaagcgccaccaaaggagugacacugcuucugccugaacccgaguggaccuauccucggcucuccugucccggcagcacguuccagaaggcucugcuuauuucuccucaccgcuuuggggaaaccaaaggaaauuccgccccgcugaucauuagagagcccuucaucgcuugcggcccuaacgaauguaagcauuuugcccucacacacuacgcggcccagcccgggggauauuacaauggcacccggggcgaccgcaacaaacugagacaucugaucagcgugaagcucgggaagauuccuacagucgaaaauucuaucuuccacauggcugccugguccggaagcgcuugccaugauggcaaagaguggaccuauauugggguggacggacccgauaacaaugcccugcuuaagguuaaauacggcgaggcguacacggacacauaucacucuuacgccaacaagauccugcggacccaggaguccgcuuguaauugcauugggggaaacuguuaucucaugaucacagauggcagcgccuccggcgugucugaaugccgcuuucugaaaauuagagaggggcggaucaucaaggagauuuucccgaccggacgcgucaagcacaccgaagaguguacaugcggcuuugcuagcaauaaaacgaucgaaugugccugcagagacaaccgguacaccgccaagcgcccuuucgugaaacuuaauguugagacagauaccgcugaaauuagacugaugugcacagacaccuaucucgauacgccccggccuaacgacggguccaucacaggacccugugagagcgauggcgacaaggggucuggaggcauuaaaggcggguuugugcaucaacgcaugaaguccaaaaucggaagaugguacagccggaccaugucuaagaccgagagaaugggcauggggcuguaugucaaguacgacggagaucccugggcggacagcgaugcccugacauucuccggcgugauggugucuaugaaagaaccugggugguacagcuuuggcuucgagaucaaggacaaaaagugcgaugucccguguauuggaaucgaaaugguucacgacggcgggaaagagaccuggcauuccgcugccacagccauuuauugccucaugggaagcggccagcugcuuugggauacggugaccgggguggacauggcucuguga

SEQ ID NO: 222427 - RNA, 1401 nt, Artificial Sequence; identical to SEQ ID NO: 220864
  derived and/or modified CDS sequence (opt5) from neuraminidase__InfluenzaB__AIL94981

SEQ ID NO: 222428 - RNA, 1401 nt, Artificial Sequence; identical to SEQ ID NO: 220864
  derived and/or modified CDS sequence (opt5) from neuraminidase__InfluenzaB__AIL94992

SEQ ID NO: 222429 - RNA, 1401 nt, Artificial Sequence; identical to SEQ ID NO: 220889
  derived and/or modified CDS sequence (opt5) from neuraminidase__InfluenzaB__AIL95003

SEQ ID NO: 222430 - RNA, 1401 nt, Artificial Sequence
  derived and/or modified CDS sequence (opt5) from neuraminidase__InfluenzaB__AIL95014
augcugcccagcaccauccagacacucacgcuguuccuuaccuccggcggggugcugcucucucuguacgucagcgccucccuuucuuaucugcucuacagcgacauucugcugaaguuuucccaaacagagaucaccgcuccuauuaugccgcucgauugcgccaacgcgucuaauguucaggcugugaacagaagcgccgccaaaggagugacacugcuucugcccgaaccugaguggaccuauccccggcucuccuguccuggcagcacauuccagaaggcucugcuuaucucuccccaccgcuuuggggaaaccaaaggaaauuccgccccucugauuaucagagagccguucaucgcuugcggccccacggaauguaagcauuuugcccucacccacuacgcggcccagccugggggauauuacaacggcacacgggaggaccgcaauaaacugagacaucugauuagcgucaagcucggcaagauccccaccguggagaacucuauuuuccacauggcugccugguccgggagcgcuugccaugauggaaaagaauggacauauaucggcguugacgggccugauucuaaugcccugcuuaagauuaaauacggagaggcguacaccgacacguaucacuccuacgccaagaacauccugcggacacaagaaagcgcuuguaauugcauuggcggggauuguuaucucaugaucaccgacggacccgccuccggcgugucugagugccgcuuucugaaaaucagagagggccggauuaucaaggaaauuuucccgacagggcgcgucaagcacaccgaggaauguaccugcggauuugcuagcaacaaaacaaucgagugugccugcagagauaauuccuacacggccaagcggccuuucgugaaacuuaacguugaaaccgacacagcugagauucgccugaugugcaccgagacauaucucgauacccccagaccuaaugacggcagcaucacggggcccugugaaucugauggagacaagggcuccgggggaaucaaaggcggcuuugugcaucagcggauggcgagcaagauugggcgcugguacucuagaacaaugagcaaaaccaagcggaugggaaugggccuguaugucaaguacgacggggaucccuggaccgacuccgaggcccuggcucucucuggagugauggugagcauggaggaaccuggcugguacuccuucggguuugaaaucaaagauaagaaaugcgacgucccguguauuggcaucgagaugguucacgauggaggcaagacaaccuggcauagcgccgccacagcuauuuauugccugauggggucuggacagcuucugugggacacggugaccggcguggauaugacacucuga

SEQ ID NO: 222431 - RNA, 1401 nt, Artificial Sequence; identical to SEQ ID NO: 220889
  derived and/or modified CDS sequence (opt5) from neuraminidase__InfluenzaB__AIL95025

SEQ ID NO: 222432 - RNA, 1401 nt, Artificial Sequence
  derived and/or modified CDS sequence (opt5) from neuraminidase__InfluenzaB__AIL95036
augcugagcuccaccauccagacacucacgcuguuccuuaccucuggcggggugcugcucagccuguacgucuccgccucucuuagcuaucugcucuacuccgacauucugcugaaguuuucucccaaagagaucacagcuccuaccaugccgcucgauugcgccaacgcgagcaauguucaagcugugaaccacuccgccacaaagggagugacccugcuucugcccgaaccugaguggacauaucccagacucagcuguccuggcucuaccuuccagaaagcccugcuuauuagcccccaucgguuuggggaaacgaagggaaauuccgcuccucugaucauucgcgagccguucaucgccugcggccccaacgaauguaaacacuuugcucucacccauuacgccgcgcagccugggggauauuacaauggcacaagaggcgaccggaacaagcugcgccaccugaucucugucaagcucgggaaaauucccaccguggaaaauuccaucuuccauauggccgcuuggagcggaucugccugccacgauggcaaggaguggacauauauugggguugacggaccugauaacaaugcucugcuuaaagugaaguacggcgaggccuacaccgacacguaucacuccuacgcgaacaaaauccugagaacacaggagagcgccuguaauugcauugggggaaacuguuaucucaugaucaccgauggcuccgcuucuggcgucagcgaaugccgguuucugaagauucgcgaggggagaaucaucaaggagauuuuccccacaggacgggugaaacauaccgaagaguguaccugcggcuuugccuccaauaagacaaucgaaugugcuugccgcgacaacagcuacacggccaaaagaccguucguuaaacuuaauguggagaccgauacagccgaaauucggcugaugugcaccgacacauaucucgauaccccucgccccgacgaugggucuaucacgggaccuugugaguccaacggcgacaaggggagcggaggcauuaagggcggguuuguccaccaaagaauggagucuaaaaucggacggugguacagccgcacaauguccaagaccgaaagaaugggcauggggcuguaugugaaguacgacggagaucccugggcugacucugaugcgcuggccuucagcggcgugauggucuccaugaaagagcccgggugguacagcuuuggcuucgaaaucaaggacaaaaagugcgauguuccuuguauuggaaucgagauggugcaugacggcgggaaagaaaccuggcacucugcugccacagccauuuauugccucaugggauccggccagcugcuuugggauaccgugacaggggucgacauggcucuguga

SEQ ID NO: 222433 - RNA, 1401 nt, Artificial Sequence; identical to SEQ ID NO: 220889
  derived and/or modified CDS sequence (opt5) from neuraminidase__InfluenzaB__AIL95047

SEQ ID NO: 222434 - RNA, 1401 nt, Artificial Sequence; identical to SEQ ID NO: 220998
  derived and/or modified CDS sequence (opt5) from neuraminidase__InfluenzaB__AIL95058

SEQ ID NO: 222435 - RNA, 1401 nt, Artificial Sequence; identical to SEQ ID NO: 220947
  derived and/or modified CDS sequence (opt5) from neuraminidase__InfluenzaB__AIL95069

SEQ ID NO: 222436 - RNA, 1401 nt, Artificial Sequence
  derived and/or modified CDS sequence (opt5) from neuraminidase__InfluenzaB__AIL95080
augcugcccagcaccauccagacacucacgcuguuccuuaccuccggcggggugcugcucucucuguacgucagcgccucccuuucuuaucugcucuacagcgacauucugcugaaguuuuccccuaaagagaucacagcuccgaccaugccccucgauugcgccaacgcgucuaauguucaagcugugaaccacagcgccacaaagggagugacccugcuucugccugaacccgaguggacauauccuagacucuccugucccggcagcaccuuccagaaagcccugcuuauuucuccucaucgguuuggggaaacgaagggaaauuccgcuccgcugaucauucgcgagcccuucaucgccugcggcccuaacgaauguaaacacuuugcucucacccauuacgccgcgcagcccgggggauauuacaauggcacaagaggcgaccggaacaagcugcgccaccugaucagcgucaagcucgggaaaauuccuaccguggaaaauucuaucuuccauauggccgcuugguccggaagcgccugcaacgauggcaaggaguggacauauauugggguugacggacccgauaauaacgcucugcuuaaagugaaguacggcgaggccuacaccgacacguaucacucuuacgcgaauaaaauccugagaacacaggaguccgccuguaacugcauugggggaaauuguuaucucaugaucaccgauggcagcgcuuccggcgucucugaaugccgguuucugaagauucgcgaggggagaaucaucaaggagauuuucccgacaggacgggugaaacacaccgaagaguguaccugcggcuuugccagcaacaagacaaucgaaugugcuugccgcgacaauuccuacacggccaaaagaccuuucguuaaacuuaacguggagaccgauacagccgaaauucggcugaugugcaccgacacauaucucgauacgccccgcccugacgaugggagcaucaccggacccugugagucuaacggcgacaagggguccggaggcauuaagggcggguuuguccaucaaagaauggagagcaaaaucggacggugguacucucgcacaaugagcaagaccgaaagaaugggcauggggcuguaugugaaguacgacggagaucccugggcugacuccgaugcgcuggccuucucuggcgugauggucagcaugaaagagccugggugguacuccuuuggcuucgaaaucaaggacaaaaagugcgauguuccguguauuggaaucgagauggugcacgacggcgggaaagaaaccuggcauagcgcugccacagccauuuauugccucaugggaucuggccagcugcuuugggauaccgugacaggggucgacauggcucuguga

SEQ ID NO: 222437 - RNA, 1401 nt, Artificial Sequence; identical to SEQ ID NO: 220947
  derived and/or modified CDS sequence (opt5) from neuraminidase__InfluenzaB__AIL95091

SEQ ID NO: 222438 - RNA, 1401 nt, Artificial Sequence; identical to SEQ ID NO: 220889
  derived and/or modified CDS sequence (opt5) from neuraminidase__InfluenzaB__AIL95102

SEQ ID NO: 222439 - RNA, 1401 nt, Artificial Sequence
  derived and/or modified CDS sequence (opt5) from neuraminidase__InfluenzaB__AIL95113
augcugcccagcaccauccagacacucacgcuguuccuuaccuccggcggggugcugcucucucuguacgucagcgccucccuuucuuaucugcucuacagcgacauucugcugaaguuuuccccuacaggaaucaccgcuccgacaaugccccucgauugcgccaacgcgucuaauguucaagcugugaacagaagcgccaccaaaggcgugacacugcuuccucccgagccugaauggaccuauccccggcuguccuguccugggagcacguuccagaaggcccuccugauuucuccgcaccgcuuuggagagaccaaaggcaauuccgcuccccuuaucauuagagaaccuuucaucgccugcgggcccaacgaguguaagcauuuugcucugacacacuacgccgcgcagccuggaggcuauuacaauggcacccgcggggaccggaacaaacucagacaucugaucagcgucaagcugggaaagauucccacaguggaaaauucuaucuuccacauggccgcuugguccggcagcgccugccaugaugggaaagaguggaccuauauuggaguugacggcccggauaacaaugcucuccugaaggugaaauacggggaggccuacacggacacauaucacucuuacgcgaacaagauccuucggacccaggaauccgccuguaauugcauuggaggcaacuguuaucugaugaucacagauggcagcgcuuccggggucucugagugccgcuuucucaaaauuagagaaggacggaucaucaaggagauuuucccuaccggccgcgugaagcacaccgaggaauguacaugcggguuugccagcaauaaaacgaucgagugugcuugcagagacaaccgguacaccgccaagcgccccuucguuaaacugaauguggaaacagauaccgccgagauuagacuuaugugcacagacaccuaucuggauacgccucggcccaacgacggauccaucacaggccccugugaaagcgauggggacaagggaucuggcggcauuaaagggggauuuguccaucaacgcaugaaguccaaaaucggcagaugguacagccggaccaugucuaagaccgagagaauggggaugggacucuaugugaaguacgacggcgauccuugggcugacagcgaugcgcuggccuucuccggggugauggucucuaugaaagagccgggcugguacagcuuuggauucgaaaugaaggacaaaaagugcgauguucccuguaucggcauugagauggugcacgacgggggaaaagaaacauggcauuccgcugccaccgccaucuauugccugaugggcagcgggcagcuccugugggauacagugacgggagucgacauggcucuuuga

SEQ ID NO: 222440 - RNA, 1401 nt, Artificial Sequence; identical to SEQ ID NO: 222386
  derived and/or modified CDS sequence (opt5) from neuraminidase__InfluenzaB__AIL95124

SEQ ID NO: 222441 - RNA, 1401 nt, Artificial Sequence
  derived and/or modified CDS sequence (opt5) from neuraminidase__InfluenzaB__AKA54777
augcugcccagcaccauccagacacucacgcuguuccuuaccuccggcggggugcugcucucucuguacgucagcgccucccuuucuuaucugcucuacagcgacauucugcugaaguuuuccagaacagagguuaccgcuccuaucaugccgcucgauugcgccaacgcgucuaaugugcaagcugugaaccggagcgccacaaaaggagucacaccccugcuuccugaacccgaguggaccuauccucgccuguccugucccggcagcaccuuccagaaggcccuccugauuucuccucacagauuuggggaaacgaaaggaaauuccgcuccgcuuaucauucgggagcccuucaucgccugcggcccuaaggaauguaaacauuuugcucugacccacuacgccgcgcagcccgggggauauuacaacggcacacgcgaggacagaaauaagcuccggcaucugaucagcgugaagcugggcaaaauuccuaccguugagaacucuaucuuccacauggccgcuugguccgggagcgccugccaugauggacgcgaauggacauauauuggcguggacgggcccgauucuaaugcucuccugaagaucaaauacggagaggccuacaccgacacguaucacuccuacgcgaagaacauucuuagaacacaggaaagcgccuguaauugcaucggcggggauuguuaucugaugauuaccgacggaccggcuuccggcaucucugagugccgguuucucaaaauccgcgagggcagaauuaucaaggaaauuuucccuacagggcgggucaagcacaccgaggaauguaccugcggauuugccagcaacaaaacaaucgagugugcuugccgcgauaauuccuacacggccaagagacccuucgugaaacugaacguugaaaccgacacagccgagauucggcuuaugugcaccaagacauaucuggauaccccucgccccaaugacggcagcaucacggggcccugugagucugauggagacgaaggcuccgggggaaucaaaggcggcuuugugcaucaaagaauggcuagcaagacagggcggugguacucuagaaccaugagcaaaaccaagcgcaugggaaugggccucuaugucaaguacgacggggauccuuggacagacuccgaggcgcuggcccugucuggagugauggugagcauggaggaaccgggcugguacuccuucggguuugaaauuaaagauaagaaaugcgacguccccuguaucggcauugagaugguucacgauggaggcaagaccacauggcauagcgcugccacggccaucuauugccucauggggucuggacagcugcuuugggacaccgugacaggcgugaacaugacccuguga

SEQ ID NO: 222442 - RNA, 1401 nt, Artificial Sequence
  derived and/or modified CDS sequence (opt5) from neuraminidase__InfluenzaB__AKA54781
augcugcccagcaccauccagacacucacgcuguuccuuaccuccggcggggugcugcucucucuguacgucagcgccucccuuucuuaucugcucuaccuggacauucugcucaaguuuccuagcacagagaucaccgcuccgacaaugccccuggauugcgccaacgcguccaauguucaagcugugaacagaucugccaccaaaggagugacauuccuucugccugaacccgaguggaccuauccucggcucagcugucccggcuccacguuucagaaggcccugcuuauuagcccucaccgcuucggggaaaccaaaggaaauucugcuccgcugaucauuagagagcccuuuaucgccugcggcccuaaggaauguaaacauuucgcucucacacacuacgccgcgcagcccgggggauauuacaacggcacccggggcgaccgcaauaagcugagacaucugaucuccgucaagcucgggaaaauuccuacaguggagaacagcaucuuucacauggccgcuuggucuggauccgccugccaugauggcaaggaguggaccuauauugggguugacggacccgauaauaacgcucugcuuaaaaucaaguacggcgaagccuacacggacacauaucacagcuacgcgaauaacauucugcggacccaggagucugccuguaauugcaucgggggaaacuguuaucucaugauuacagauggcuccgcuagcggcguguccgaaugccgcuuccugaaaaucagagaggggcggaucaugaaggagauuuuuccgaccggacgcacccaacacacagaagaguguacgugcggcuucgccucuaauaagaccaucgaaugugucugcagagacaacagcuacacagcuaaacggccuuuugugaaacuuaauguugagaccgauacagccgaaauucgccugaugugcaccaagacguaucucgacacacccagaccugaugacggguccaucaccggacccugugagagcaacggcgggaagggaucuggcggcauuaaagggggauucgugcaucagcggauggccuccaagaucggccgcugguacagcagaaccaugucuaaaacagagcggaaggggaugggacuguaugucaaguacaacggcgaucccugggcugacagcgacgcgcugaccuuuuccggggugauggugucuauggaggaaccuggcugguacagcuucggauucgaaaucaaagauaagaaaugcgacgucccguguauuggcaucgagaugguucacgaugggggaaaggaaacauggcauuccgccgcuacggccauuuauugccucaugggcagcgggcagcugcuuugggacaccgugacaggagugaauaugacccuguga

SEQ ID NO: 222443 - RNA, 1401 nt, Artificial Sequence
  derived and/or modified CDS sequence (opt5) from neuraminidase__InfluenzaB__AKA54783
augcugcccagcaccauccagacacucacgcuguuccuuaccuccggcggggugcugcucucucuguacgucagcgccucccuuucuuaucugcucuacagcgacauucugcugaaguuuuccagaacagagguuaccgcuccuaucaugccgcucgauugcgccaacgcgucuaaugugcaagcugugaaccggagcgccacaaaaggagucacaccccuguucccugaacccgaguggaccuauccucgccuuuccugucccggcagcaccuuucagaaggcccugcucauuucuccucacagauucggggaaacgaaaggaaauuccgcuccgcugaucauucgggagcccuuuaucgccugcggcccuaaggaauguaaacauuucgcucuuacccacuacgccgcgcagcccgggggauauuacaacggcacacgcgaggacagaaauaagcugcggcaucucaucagcgugaagcugggcaaaauuccuaccguugagaacucuaucuuucacauggccgcuugguccgggagcgccugccaugauggacgcgaauggacauauauuggcguggacgggcccgauucuaaugcucugcucaagaucaaauacggagaggccuacaccgacacguaucacuccuacgcgaagaacauucugagaacacaggaaagcgccuguaauugcaucggcggggauuguuaucuuaugauuaccgacggaccggcuuccggcaucucugagugccgguuccugaaaauccgcgagggcagaauuaucaaggaaauuuuuccuacagggcgggucaagcacaccgaggaauguaccugcggauucgccagcaacaaaacaaucgagugugcuugccgcgauaauuccuacacggccaagagacccuuugugaaacucaacguugaaaccgacacagccgagauucggcugaugugcaccaagacauaucuugauaccccucgccccaaugacggcagcaucacggggcccugugagucugauggagacgaaggcuccgggggaaucaaaggcggcuucgugcaucaaagaauggcuagcaagauugggcggugguacucuagaacaaugagcaaaaccaagcgcaugggaaugggccuguaugucaaguacgacggggauccuuggaccgacuccgaggcgcucgcccugucuggagugauggugagcauggaggaaccgggcugguacuccuuuggguucgaaaucaaagauaagaaaugcgacguccccuguauuggcaucgagaugguucacgauggaggcaagacaaccuggcauagcgcugccacagccauuuauugccugauggggucuggacagcuccugugggacacggugaccggcgugaacaugacacuuuga

SEQ ID NO: 222444 - RNA, 1401 nt, Artificial Sequence
  derived and/or modified CDS sequence (opt5) from neuraminidase__InfluenzaB__AKA54785
augcugcccagcaccauccagacacucacgcuguuccuuaccuccggcggggugcugcucucucuguacgucagcgccucccuuucuuaucugcucuacagcgacauucugcugaaguuuuccagaacagagguuaccgcuccuaucaugccgcucgauugcgccaacgcgucuaaugugcaagcugugaaccggagcgccacaaaaggagucacaccccugcuuccugaacccgaguggaccuauccucgccuguccugucccggcagcaccuuccagaaggcccuccugauuucuccucacagauuuggggaaacgaaaggaaauuccgcuccgcuuaucauucgggagcccuucaucgccugcggcccuaaggaauguaaacauuuugcucugacccacuacgccgcgcagcccgggggauauuacaacggcacacgcgaggacagaaauaagcuccggcaucugaucagcgugaagcugggcaaaauuccuaccguugagaacucuaucuuccacauggccgcuugguccgggagcgccugccaugauggacgcgaauggacauauauuggcguggacgggcccgauucuaaugcucuccugaagaucaaauacggagaggccuacaccgacacguaucacuccuacgcgaagaacauucuuagaacacaggaaagcgccuguaauugcaucggcggggauuguuaucugaugauuaccgacggaccggcuuccggcaucucugagugccgguuucucaaaauccgcgagggcagaauuaucaaggaaauuuucccuacagggcgggucaagcacaccgaggaauguaccugcggauuugccagcaacaaaacaaucgagugugcuugccgcgauaauuccuacacggccaagagacccuucgugaaacugaacguugaaaccgacacagccgagauucggcuuaugugcaccaagacauaucuggauaccccucgccccaaugacggcagcaucacggggcccugugagucugauggaaacgaaggcuccgggggaaucaaaggcggcuuugugcaucaaagaauggcuagcaagauugggcggugguacucuagaacaaugagcaaaaccaagcgcaugggaaugggccucuaugucaaguacgacggggacccuuggaccgauuccgaggcgcuggcccugucuggagugauggugagcauggaggaaccgggcugguacuccuucggguuugaaaucaaagacaagaaaugcgauguccccuguauuggcaucgagaugguucacgacggaggcaagacaaccuggcauagcgcugccacagccauuuauugccucauggggucuggacagcugcuuugggauacggugaccggcgugaauaugacacuguga

SEQ ID NO: 222445 - RNA, 1401 nt, Artificial Sequence
  derived and/or modified CDS sequence (opt5) from neuraminidase__InfluenzaB__AKA54787
augcugcccagcaccauccagacacucacgcuguuccuuaccuccggcggggugcugcucucucuguacgucagcgccucccuuucuuaucugcucuacagcgacauucugcugaaguuuucccaaacagagaucaccgcuccuauuaugccgcucgauugcgccaacgcgucuaauguucaggcugugaaccacagcgccgccaaaggagugacacugcuucugcccgaaccugaguggaccuaucccagacucuccuguccuggcagcacauuccagaaggcucugcuuaucucuccccaucgguuuggggaaauuaaaggaaauuccgccccucugaucauccgcgagccguucauugcuugcggccccaccgaauguaagcacuuugcccucacgcauuacgcggcccagccugggggauauuacaacggcaccagagaggaccggaauaaacugcgccaccugaucagcgucaagcucggcaagauucccacaguggagaacucuaucuuccauauggcugccugguccgggagcgcuugccacgauggaaaagaauggaccuauauuggcguugacgggccugauucuaaugcccugcuuaagaucaaauacggagaggcguacacagacaccuaucacuccuacgccaagaacauucugagaacgcaagaaagcgcuuguaauugcaucggcggggauuguuaucucaugaucacagacggacccgccuccggcgugucugagugccgguuucugaaaauucgcgagggcagaaucauuaaggaaaucuucccgaccgggcgggucaagcauacagaggaauguaccugcggauuugcuagcaacaaaaccauugagugugccugccgcgauaauagauacacagccaagcggccuuucgugaaacuuaacguugaaacggacaccgcugagauccgccugaugugcacagagaccuaucucgauacacccagaccuaaugacggcuccaucaccgggcccugugaaagcgauggagacaagggcucugggggaauuaaaggcggcuuugugcaccagcggauggcguccaagaucgggcgcugguacagcagaacgaugucuaaaacaaagcggaugggaaugggccuguaugucaaguacgacggggaucccuggaccgacagcgaggcccuggcucucuccggagugauggugucuauggaggaaccuggcugguacagcuucggguuugaaauuaaagauaagaaaugcgacgucccguguaucggcauugagaugguucaugauggaggcaagaccacauggcacuccgccgccaccgcuaucuauugccugauggggagcggacagcuucugugggacacagugacgggcguggauauggcccucuga

SEQ ID NO: 222446 - RNA, 1401 nt, Artificial Sequence
  derived and/or modified CDS sequence (opt5) from neuraminidase__InfluenzaB__AKA54789
augcugcccagcaccauccagacacucacgcuguuccuuaccuccggcggggugcugcucucucuguacgucagcgccucccuuucuuaucugcucuacagcgacauucugcugaaguuuuccagaacagagguuaccgcuccuaucaugccgcucgauugcgccaacgcgucuaaugugcaagcugugaaccggagcgccacaaaaggagucacaccccugcuuccugaacccgaguggaccuauccucgccuguccugucccggcagcaccuuccagaaggcccuccugauuucuccucacagauuuggggaaacgaaaggaaauuccgcuccgcuuaucauucgggagcccuucaucgccugcggcccuaaggaauguaaacauuuugcucugacccacuacgccgcgcagcccgggggauauuacaacggcacacgcgaggacagaaauaagcuccggcaucugaucagcgugaagcugggcaaaauuccuaccguugagaacucuaucuuccacauggccgcuugguccgggagcgccugccaugauggacgcgaauggacauauauuggcguggacgggcccgauucuaaugcucuccugaagaucaaauacggagaggccuacaccgacacguaucacuccuacgcgaagaacauucuuagaacacaggaaagcgccuguaauugcaucggcggggauuguuaucugaugauuaccgacggaccggcuuccggcaucucugagugccgguuucucaaaauccgcgagggcagaauuaucaaggaaauuuucccuacagggcgggucaagcacaccgaggaauguaccugcggauuugccagcaacaaaacaaucgagugugcuugccgcgauaauuccuacacggccaagagacccuucgugaaacugaacguugaaaccgacacagccgagauucggcuuaugugcaccaagacauaucuggauaccccucgccccaaugacggcagcaucacggggcccugugagucugauggagacgaaggcuccgggggaaucaaaggcggcuuugugcaucaaagaauggcuagcaagauugggcggugguacucuagaacaaugagcaaaaccaagcgcaugggaaugggccucuaugucaaguacgacggggauccuuggaccgacuccgaggcgcuggcccugucuggagugauggugagcauggaggaaccgggcugguacuccuucggguuugaaaucaaagauaagaaaugcgacguccccuguauuggcaucgagaugguucacgauggaggcaagacaaccuggcauagcgcugccacagccauuuauugccucauggggucuggacagcugcuuugggacacggugaccggcgugaacaugacacuguga

SEQ ID NO: 222447 - RNA, 1401 nt, Artificial Sequence
  derived and/or modified CDS sequence (opt5) from neuraminidase__InfluenzaB__AKA54791
augcugcccagcaccauccagacacucacgcuguuccuuaccuccggcggggugcugcucucucuguacgucagcgccucccuuucuuaucugcucuacagcgacauucugcugaaguuuuccagaacagagguuaccgcuccuaucaugccgcucgauugcgccaacgcgucuaaugcucaagccgugaaccggagcgccacaaaaggagugacaccccugcuuccugaacccgaguggaccuauccucgccuguccugucccggcagcaccuuccagaaggcucuccugauuucuccucacagauuuggggaaacgaaaggaaauuccgccccgcuuaucauucgggagcccuucaucgcuugcggcccuaaggaauguaaacauuuugcccugacccacuacgcggcccagcccgggggauauuacaacggcacacgcgaggacagaaauaagcuccggcaucugaucagcgucaagcugggcaaaauuccuaccguggagaacucuaucuuccacauggcugccugguccgggagcgcuugccaugauggacgcgaauggacauauauuggcguugacgggcccgauucuaaugcccuccugaagaucaaauacggagaggcguacaccgacacguaucacuccuacgccaagaacauucuuagaacacaggaaagcgcuuguaauugcaucggcggggauuguuaucugaugauuaccgacggaccggccuccggcaucucugagugccgguuucucaaaauccgcgagggcagaauuaucaaggaaauuuucccuacagggcgggugaagcacaccgaggaauguaccugcggauuugcuagcaacaaaacaaucgagugugccugccgcgauaauuccuacacggccaagagacccuucgucaaacugaacguggaaaccgacacagcugagauucggcuuaugugcaccaagacauaucuggauaccccucgccccaaugacggcagcaucacggggcccugugagucugauggagacgaaggcuccgggggaaucaaaggcggcuuuguucaucaaagaauggcgagcaagauugggcggugguacucuagaacaaugagcaaaaccaagcgcaugggaaugggccucuaugugaaguacgacggggauccuuggaccgacuccgaggcccuggcucugucuggagucauggugagcauggaggaaccgggcugguacuccuucggguuugaaaucaaagauaagaaaugcgacgugcccuguauuggcaucgagaugguccacgauggaggcaagacaaccuggcauagcgccgccacagcuauuuauugccucauggggucuggacagcugcuuugggacacgguuaccggcgugaacaucacacuguga

SEQ ID NO: 222448 - RNA, 1401 nt, Artificial Sequence; identical to SEQ ID NO: 222445
  derived and/or modified CDS sequence (opt5) from neuraminidase__InfluenzaB__AKA54793

SEQ ID NO: 222449 - RNA, 1401 nt, Artificial Sequence; identical to SEQ ID NO: 222445
  derived and/or modified CDS sequence (opt5) from neuraminidase__InfluenzaB__AKA54795

SEQ ID NO: 222450 - RNA, 1401 nt, Artificial Sequence; identical to SEQ ID NO: 222446
  derived and/or modified CDS sequence (opt5) from neuraminidase__InfluenzaB__AKA54797

SEQ ID NO: 222451 - RNA, 1401 nt, Artificial Sequence
  derived and/or modified CDS sequence (opt5) from neuraminidase__InfluenzaB__AKA54799
augcugcccagcaccauccagacacucacgcuguuccuuaccuccggcggggugcugcucucucuguacgucagcgccucccuuucuuaucugcucuacagcgacauucugcugaaguuuucccaaacagagaucaccgcuccuauuaugccgcucgauugcgccaacgcgucuaauguucaggcugugaaccacagcgccgccaaaggagugacacugcuucugcccgaaccugaguggaccuaucccagacucuccuguccuggcagcacauuccagaaggcucugcuuaucucuccccaucgguuuggggaaauuaaaggaaauuccgccccucugaucauccgcgagccguucauugcuugcggccccaccgaauguaagcacuuugcccucacgcauuacgcggcccagccugggggauauuacaacggcaccagagaggaccggaauaaacugcgccaccugaucagcgucaagcucggcaagauucccacaguggagaacucuaucuuccauauggcugccugguccgggagcgcuugccacgauggaaaagaauggaccuauauuggcguugacgggccugauucuaaugcccugcuuaagaucaaauacggagaggcguacacagacaccuaucacuccuacgaaaagaacauucugagaacgcaagagagcgccuguaauugcaucggcggggauuguuaucucaugaucacagacggacccgcuuccggcgugucugagugccgguuucugaaaauucgcgaaggcagaaucauuaaggagaucuucccgaccgggcgggucaagcauacagaagaguguaccugcggauuugccagcaacaaaaccauugaaugugcuugccgcgauaauagauacacagccaagcggccuuucgugaaacuuaacguugagacggacaccgccgagauccgccugaugugcacagaaaccuaucucgauacacccagaccuaaugacggcuccaucaccgggcccugugagagcgauggagacaagggcucugggggaauuaaaggcggcuuugugcaccagcggauggcuuccaagaucgggcgcugguacagcagaacgaugucuaaaacaaagcggaugggaaugggccuguaugucaaguacgacggggaucccuggaccgacagcgaagcgcuggcccucuccggagugauggugucuauggaggaaccuggcugguacagcuucggguuugagauuaaagauaagaaaugcgacgucccguguaucggcauugagaugguucaugauggaggcaagaccacauggcacuccgcugccaccgccaucuauugccugauggggagcggacagcuucugugggacacagugacgggcguggauauggcucucuga

SEQ ID NO: 222452 - RNA, 1401 nt, Artificial Sequence; identical to SEQ ID NO: 222446
  derived and/or modified CDS sequence (opt5) from neuraminidase__InfluenzaB__AKA54801

SEQ ID NO: 222453 - RNA, 1401 nt, Artificial Sequence
  derived and/or modified CDS sequence (opt5) from neuraminidase__InfluenzaB__AKA54803
augcugcccagcaccauccagacacucacgcuguuccuuaccuccggcggggugcugcucucucuguacgucagcgccucccuuucuuaucugcucuacagcgacauucugcugaaguuuuccagaacagagguuaccgcuccuaucaugccgcucgauugcgccaacgcgucuaaugugcaagcugugaaccggagcgccacaaauggagucacaccccugcuuccugaacccgaguggaccuauccucgccuguccugucccggcagcaccuuccagaaagcccuccugauuucuccucacagauuuggggaaacgaagggaaacuccgcuccgcuuaucauucgggagcccuucaucgccugcggcccuaaagaauguaagcauuuugcucugacccacuacgccgcgcagcccgggggauauuacaauggcacacgcgaggacagaaacaaacuccggcaucugaucagcgugaagcugggcaagauuccuaccguugaaaauucuaucuuccacauggccgcuugguccgggagcgccugccaugauggacgcgaauggacauauauuggcguggacgggcccgauucuaacgcucuccugaaaaucaaguacggagaggccuacaccgacacguaucacuccuacgcgaaaaauauucuuagaacacaggaaagcgccuguaacugcaucggcggggauuguuaucugaugauuaccgacggaccggcuuccggcaucucugagugccgguuucucaagauccgcgagggcagaauuaucaaagaaauuuucccuacagggcgggucaagcacaccgaggaauguaccugcggauuugccagcaauaagacaaucgagugugcuugccgcgauaacuccuacacggccaaaagacccuucgugaagcugaauguugaaaccgacacagccgagauucggcuuaugugcaccaaaacauaucuggauaccccucgccccaacgacggcagcaucacggggcccugugagucugauggagacgaaggcuccgggggaaucaagggcggcuuugugcaucaaagaauggcuagcaaaauugggcggugguacucuagaacaaugagcaagaccaaacgcaugggaaugggccucuaugucaaguacgacggggauccuuggaccgacuccgaggcgcuggcccugucuggagugauggugagcauggaggagccgggcugguacuccuucggguuugaaaucaaggauaaaaagugcgacguccccuguauuggcaucgagaugguucacgauggaggcaaaacaaccuggcauagcgcugccacagccauuuauugccucauggggucuggacagcugcuuugggacacggugaccggcgugaauaugacacuguga

SEQ ID NO: 222454 - RNA, 1401 nt, Artificial Sequence; identical to SEQ ID NO: 222446
  derived and/or modified CDS sequence (opt5) from neuraminidase__InfluenzaB__AKA54805

SEQ ID NO: 222455 - RNA, 1401 nt, Artificial Sequence
  derived and/or modified CDS sequence (opt5) from neuraminidase__InfluenzaB__AKA54807
augcugcccagcaccauccagacacucacgcuguuccuuaccuccggcggggugcugcucucucuguacgucagcgccucccuuucuuaucugcucuacagcgacauucugcugaaguuuuccagaacagagguuaccgcuccuaucaugccgcucgauugcgccaacgcgucuaaugugcaagcugugaaccggagcgccacaaaaggagucacaccccugcuuccugaacccgaguggaccuauccucgccuguccugucccggcagcaccuuccagaaggcccuccugauuucuccucacagauuuggggaaacgaaaggaaauuccgcuccgcuuaucauucgggagcccuucaucgccugcggcccuaaggaauguaaacauuuugcucugacccacuacgccgcgcagcccgggggauauuacaacggcacacgcgaggacagaaauaagcuccggcaucugaucagcgugaagcugggcaaaauuccuaccguugagaacucuaucuuccacauggccgcuugguccgggagcgccugccaugauggacgcgaauggacauauauuggcguggacgggcccgauucuaaugcucuccugaagaucaaauacggagaggccuacaccgacacguaucacuccuacgcgaagaacauucuuagaacacaggaaagcgccuguaauugcaucggcggggauuguuaucugaugauuaccgacggaccggcuuccggcaucucugagugccgguuucucaaaauccgcgagggcagaauuaucaaggaaauuuucccuacagggcgggucaagcacaccgaggaauguaccugcggauuugccagcaacaaaacaaucgagugugcuugccgcgauaauuccuacacggccaagagacccuucgugaaacugaacguugaaaccgacacagccgagauucggcuuaugugcaccaagacauaucuggauaccccucgccccaaugacggcagcaucacggggcccugugagucugauggagacgaaggcuccgggggaaucaaaggcggcuuugugcaucaaagaauggcuagcaagauugggcggugguacucuagaacaaugagcaaaaccaagcgcaugggaaugggccucuaugucaaguacgacggggauccuuggaccgacuccgaggcgcuggcccugucuggagugauggugagcauggaggaaccgggcugguacuccuucggguuugaaaucaaagauaagaaaugcgacguccccuguauuggcaucgagaugguucacgauggaggcaagacaaccuggcauagcgcugccacagccauuuauugccucauggggucuggacagcugcuuugggacacggugaccggcgugaacaucacacuguga

SEQ ID NO: 222456 - RNA, 1401 nt, Artificial Sequence
  derived and/or modified CDS sequence (opt5) from neuraminidase__InfluenzaB__AKA54809
augcugcccagcaccauccagacacucacgcuguuccuuaccuccggcggggugcugcucucucuguacgucagcgccucccuuucuuaucugcucuacagcgacauucugcugaaguuuuccagaacagagguuaccgcuccuaucaugccgcucgauugcgccaacgcgucuaaugugcaagcugugaaccggagcgccacaaaaggagucacaccccugcuuccugaacccgaguggaccuauccucgccuguccugucccggcagcaccuuccagaaggcccuccugauuucuccucacagauuuggggaaacgaaaggaaauuccgcuccgcuuaucauucgggagcccuucaucgccugcggcccuaaggaauguaaacauuuugcucugacccacuacgccgcgcagcccgggggauauuacaacggcacacgcgaggacagaaauaagcuccggcaucugaucagcgugaagcugggcaaaauuccuaccguugagaacucuaucuuccacauggccgcuugguccgggagcgccugccaugauggacgcgaauggacauauauuggcguggacgggcccgauucuaaugcucuccugaagaucaaauacggagaggccuacaccgacacguaucacuccuacgcgaagaacauucuuagaacacaggaaagcgccuguaauugcaucggcggggauuguuaucugaugauuaccgacggaccggcuuccggcaucucugagugccgguuucucaaaauccgcgagggcagaauuaucaaggaaauuuucccuacagggcgggucaagcacaccgaggaauguaccugcggauuugccagcaacaaaacaaucgagugugcuugccgcgauaauuccuacacggccaagagacccuucgugaaacugaacguugaaaccgacacagccgagauucggcuuaugugcaccaagacauaucuggauaccccucgccccaaugacggcagcaucacggggcccugugagucugauggagacgaaggcuccgggggaaucaaaggcggcuuugugcaucaaagaauggcuuucaagauugggcggugguacagcagaacaaugucuaaaaccaagcgcaugggaaugggccucuaugucaaguacgacggggauccuuggaccgacagcgaggcgcuggcccuguccggagugauggugucuauggaggaaccgggcugguacagcuuuggguucgaaaucaaagauaagaaaugcgacguccccuguauuggcaucgagaugguucacgauggaggcaagacaaccuggcauuccgcugccacagccauuuauugccucauggggagcggacagcugcuuugggacacggugaccggcgugaacaugacacuguga

SEQ ID NO: 222457 - RNA, 1401 nt, Artificial Sequence; identical to SEQ ID NO: 222446
  derived and/or modified CDS sequence (opt5) from neuraminidase__InfluenzaB__AKA54811

SEQ ID NO: 222458 - RNA, 1401 nt, Artificial Sequence
  derived and/or modified CDS sequence (opt5) from neuraminidase__InfluenzaB__AKA54813
augcugcccagcaccauccagacacucacgcuguuccuuaccuccggcggggugcugcucucucuguacgucagcgccucccuuucuuaucugcucuacagcgacauucugcugaaguuuuccagaacagagguuaccgcuccuaucaugccgcucgauugcgccaacgcgucuaaugugcaagcugugaaccggagcgccacaaaaggagucacaccccugcuuccugaacccgaguggaccuauccucgccuguccugucccggcagcaccuuccagaaggcccuccugauuucuccucacagauuuggggaaacgaaaggaaauuccgcuccgcuuaucauucgggagcccuucaucgccugcggcccuaaggaauguaaacauuuugcucugacccacuacgccgcgcagcccgggggauauuacaacggcacacgcgaggacagaaauaagcuccggcaucugaucagcgugaagcugggcaaaauuccuaccguugagaacucuaucuuccacauggccgcuugguccgggagcgccugccaugauggacgcgaauggacauauauuggcguggacgggcccgauucuaaugcucuccugaagaucaaauacggagaggccuacaccgacacguaucacuccuacgcgaagaacauucuuagaacacaggaaagcgccuguaauugcaucggcggggauuguuaucugaugauuaccgacggaccggcuuccggcaucucugagugccgguuucucaaaauccgcgagggcagaauuaucaaggaaauuuucccuacagggcgggucaagcacaccgaggaauguaccugcggauuugccagcaacaaaacaaucgagugugcuugccgcgauaauuccuacacggccaagagacccuucgugaaacugaacguugaaaccgacacagccgagauucggcuuaugugcaccaagacauaucuggauaccccucgccccaaugacggcagcaucacggggcccugugagucugauggagacgaaggcuccgggggaaucaaaggcggcuuugugcaucaaagaauggcuagcaagauugggcggugguacucuagaacaaugagcaaaaccaagcgcaugggaaugggccucuaugucaaguacgacggggauccuuggaccgacuccgaggcgcuggcccugucuggagugauggugagcaucgaggaaccgggcugguacuccuucggguuugaaauuaaagauaagaaaugcgacguccccuguaucggcauugagaugguucacgauggaggcaagacaaccuggcauagcgcugccacagccaucuauugccucauggggucuggacagcugcuuugggacacggugaccggcgugaacaugacacuguga

SEQ ID NO: 222459 - RNA, 1401 nt, Artificial Sequence; identical to SEQ ID NO: 222446
  derived and/or modified CDS sequence (opt5) from neuraminidase__InfluenzaB__AKA54815

SEQ ID NO: 222460 - RNA, 1401 nt, Artificial Sequence
  derived and/or modified CDS sequence (opt5) from neuraminidase__InfluenzaB__AKA54817
augcugcccagcaccauccagacacucacgcuguuccuuaccuccggcggggugcugcucucucuguacgucagcgccucccuuucuuaucugcucuacagcgacauucugcugaaguuuuccagaacagagguuaccgcuccuaucaugccgcucgauugcgccaacgcgucuaaugugcaagcugugaaccggagcgccacaaaaggagucacaccccugcuuccugaacccgaguggaccuauccucgccuguccugucccggcagcaccuuccagaaggcccuccugauuucuccucacagauuuggggaaacgaaaggaaauuccgcuccgcuuaucauucgggagcccuucaucgccugcggcccuaaggaauguaaacauuuugcucugacccacuacgccgcgcagcccgggggauauuacaacggcacacgcgaggacagaaauaagcuccggcaucugaucagcgugaagcugggcaaaauuccuaccguugagaacucuaucuuccacauggccgcuugguccgggagcgccugccaugauggacgcgaauggacauauauuggcguggacgggcccgauucuaaugcucuccugaagaucaaauacggagaggccuacaccgacacguaucacuccuacgcgaagaacauucuuagaacacaggaaagcgccuguaauugcaucggcggggauuguuaucugaugauuaccgacggaccggcuuccggcaucucugagugccgguuucucaaaauccgcgagggcagaauuaucaaggaaauuuucccuacagggcgggucaagcacaccgaggaauguaccugcggauuugccagcaacaaaacaaucgagugugcuugccgcgauaauuccuacacggccaagagacccuucgugaaacugaacguugaaaccgacacagccgagauucggcuuaugugcaccaagacauaucuggauaccccucgccccaaugacggcagcaucacggggcccugugagucugauggagacgaaggcuccgggggaaucaaaggcggcuuugugcaucaaagaauggcuagcaagauugggcggugguacucuagaacaaugagcaaaaccaagcgcaugggaaugggccucuaugucaaguacgacggggauccuuggaccgacuccgaggcgcuggcccugucuggagugauggugagcauggaggaaccgggcugguacuccuucggguuugaaaucaaagauaagaaaugcgacguccccuguauuggcguugagauggugcacgauggaggcaagacaaccuggcauagcgcugccacagccaucuauugccucauggggucuggacagcugcuuugggacacggugaccggcgucaacaugacacuguga

SEQ ID NO: 222461 - RNA, 1401 nt, Artificial Sequence; identical to SEQ ID NO: 222446
  derived and/or modified CDS sequence (opt5) from neuraminidase__InfluenzaB__AKA54819

SEQ ID NO: 222462 - RNA, 1401 nt, Artificial Sequence; identical to SEQ ID NO: 222446
  derived and/or modified CDS sequence (opt5) from neuraminidase__InfluenzaB__AKA54821

SEQ ID NO: 222463 - RNA, 1401 nt, Artificial Sequence; identical to SEQ ID NO: 222446
  derived and/or modified CDS sequence (opt5) from neuraminidase__InfluenzaB__AKA54823

SEQ ID NO: 222464 - RNA, 1401 nt, Artificial Sequence; identical to SEQ ID NO: 222446
  derived and/or modified CDS sequence (opt5) from neuraminidase__InfluenzaB__AKA54825

SEQ ID NO: 222465 - RNA, 1401 nt, Artificial Sequence; identical to SEQ ID NO: 222446
  derived and/or modified CDS sequence (opt5) from neuraminidase__InfluenzaB__AKA54827

SEQ ID NO: 222466 - RNA, 1401 nt, Artificial Sequence
  derived and/or modified CDS sequence (opt5) from neuraminidase__InfluenzaB__AKA54829
augcugcccagcaccauccagacacucacgcuguuccuuaccuccggcggggugcugcucucucuguacgucagcgccucccuuucuuaucugcucuacagcgacauucugcugaagcucuccagaacagagguuaccgcuccuaucaugccgcuggauugcgccaacgcgucuaaugugcaagcugugaaccggagcgccacaaaaggagucacaccccuucugccugaacccgaguggaccuauccucgccucuccugucccggcagcaccuuucagaagacgcugcuuauuucuccucacagauucggggaaaccaaaggaaauuccgccccgcugaucauucgggagcccuuuaucgcuugcggcccuaaggaauguaaacauuucgcccucacacacuacgcugcccagcccgggggauauuacaacggcacccgcgaggacagaaauaagcugcggcaucugaucagcgugaagcucggcaaaauuccuacaguugagaacucuaucuuucacauggcggccugguccgggagcgcuugccaugauggacgcgaauggaccuauauuggcguggacgggcccgauucuaaugcccugcuuaagaucaaauacggagaggcuuacacggacacauaucacuccuacgccaagaacauucugagaacccaggaaagcgcguguaauugcaucggcggggauuguuaucucaugauuacagacggaccggccuccggcaucucugagugccgguuccugaaaauccgcgagggcagaauuaucaaggaaauuuuuccuaccgggcgggucaagcacaccgaggaauguacaugcggauucgcuagcaacaaaacgaucgagugugccugccgcgauaauuccuacaccgcuaagagacccuuugugaaacuuaacguugaaacagacaccgccgagauucggcugaugugcacaaagaccuaucucgauacgccucgccccaaugacggcagcaucacagggcccugugagucugauggagacgaaggcuccgggggaaucaaaggcggcuucgugcaucaaagaauggccagcaagauugggcggugguacucuagaaccaugagcaaaaccaagcgcaugggaaugggccuguaugucaaguacgacggggauccuuggacagacuccgaggcucuggcgcucucuggagugauggugagcauggaggaaccgggcugguacuccuuuggguucgaaaucaaagauaagaaaugcgacguccccuguauuggcaucgagaugguucacgauggaggcaagaccacauggcauagcgccgcuacggccauuuauugccugauggggucuggacagcuucugugggacaccgugacaggcgugaacaugacccucuga

SEQ ID NO: 222467 - RNA, 1401 nt, Artificial Sequence
  derived and/or modified CDS sequence (opt5) from neuraminidase__InfluenzaB__AKA54831
augcugcccagcaccauccagacacucacgcuguuccuuaccuccggcggggugcugcucucucuguacgucagcgccucccuuucuuaucugcucuacagcgacauucugcugaaguuuuccagaacagagguuaccgcuccuaucaugccgcucgauugcgccaacgcgucuaaugugcaagcugugaaccggagcgccacaaaaggagucacaccccugcuuccugaacccgaguggaccuauccucgccuguccugucccggcagcaccuuccagaaggcccuccugauuucuccucacagauuuggggaaacgaaaggaaauuccgcuccgcuuaucauucgggagcccuucaucgccugcggcccuaaggaauguaaacauuuugcucugacccacuacgccgcgcagcccgggggauauuacaacggcacacgcgaggacagaaauaagcuccggcaucugaucagcgugaagcugggcaaaauuccuaccguugagaacucuaucuuccacauggccgcuugguccgggagcgccugccaugauggacgcgaauggacauauauuggcguggacgggcaggauucuaaugcucuccugaagaucaaauacggagaggccuacaccgacacguaucacuccuacgcgaagaacauucuuagaacacaagaaagcgccuguaauugcaucggcggggauuguuaucugaugauuaccgacggacccgcuuccggcaucucugagugccgguuucucaaaauccgcgagggcagaauuaucaaggaaauuuucccgacagggcgggucaagcacaccgaggaauguaccugcggauuugccagcaacaaaacaaucgagugugcuugccgcgauaauuccuacacggccaagagaccuuucgugaaacugaacguugaaaccgacacagccgagauucggcuuaugugcaccaagacauaucuggauacgccccgcccuaaugacggcagcaucaccgggcccugugagucugauggagacgaaggcuccgggggaaucaaaggcggcuuugugcaucagagaauggcuagcaagauugggcggugguacucuagaacaaugagcaaaaccaagcgcaugggaaugggccucuaugucaaguacgacggggaucccuggaccgacuccgaggcgcuggcccugucuggagugauggugagcauggaggaaccuggcugguacuccuucggguuugaaaucaaagauaagaaaugcgacgucccguguauuggcaucgagaugguucacgauggaggcaagacaaccuggcauagcgcugccacagccauuuauugccucauggggucuggacagcugcuuugggacacggugaccggcgugaacaugacacuguga

SEQ ID NO: 222468 - RNA, 1401 nt, Artificial Sequence; identical to SEQ ID NO: 222446
  derived and/or modified CDS sequence (opt5) from neuraminidase__InfluenzaB__AKA54833

SEQ ID NO: 222469 - RNA, 1401 nt, Artificial Sequence
  derived and/or modified CDS sequence (opt5) from neuraminidase__InfluenzaB__AKA54837
augcugcccagcaccauccagacacucacgcuguuccuuaccuccggcggggugcugcucucucuguacgucagcgccucccuuucuuaucugcucuacagcgacauucugcugaaguuuuccccuacagagaucaccgcuccgacaaugccccucgauugcgccaacgcgucuaauguucaagcugugaacagaagcgccaccaaaggagugacacugcuucugccugaacccgaguggaccuauccucggcucuccugucccggcagcacguuccagaaggcccugcuuauuucuccucaccgcuuuggggaaaccaauggaaacuccgcuccgcugaucgucagagagcccuucauugccugcggcccuaaugaauguaaacauuuugcucucacacacuacgccgcgcagcccgggggauauuacaacggcacccggggcgaccgcaauaagcugagacaucugaucagcgugaaacucgggaagaucccuacaguugagaacucuauuuuccacauggccgcuugguccggaagcgccugccaugauggcaaggaguggaccuauaucgggguggacggacccgauaauaacgcucugcuuaaagucaaguacggcgaagccuacacggacacauaucacucuuacgcgaauaaaauucugcggacccaggaguccgccuguaacugcaucgggggaaauuguuaucucaugauuacagauggcagcgcuuccggcgugucugaaugccgcuuucugaagaucagagaggggcggauuaucaaagagaucuucccgaccggacgcguuaagcacaccgaagaguguacaugcggcuuugccagcaacaagacgauugaaugugcuugcagagacaaucgguacaccgccaaacgcccuuucgugaaacuuaacgucgagacagauaccgccgaaaucagacugaugugcacagacaccuaucucgauacgccccggccuaacgacggguccauuacaggacccugugagagcgauggcaaugaggggucuggaggcaucaagggcggguuugugcaucaacgcaugaaguccaaaauuggaagaugguacagccggaccaugucuaagaccgaaagaaugggcauggggcuguaugugaaauacgacggagaccccugggcugauagcgacgcgcuggccuucuccggcgucaugguuucuaugaaggagccugggugguacagcuuuggcuucgaaaucaaggauaaaaagugcgacgugccguguaucggaauugagauggugcacgauggcgggaaagaaacauggcauuccgcugccaccgccaucuauugccucaugggaagcggccagcugcuuugggacacagucacggggguggauauggcucuguga

SEQ ID NO: 222470 - RNA, 1401 nt, Artificial Sequence
  derived and/or modified CDS sequence (opt5) from neuraminidase__InfluenzaB__AKA54839
augcugcccagcaccauccagacacucacgcuguuccuuaccuccggcggggugcugcucucucuguacgucagcgccucccuuucuuaucugcucuacagcgacauucugcugaaguuuuccccuacagagaucaccgcuccgacaaugccccucgauugcgccaacgcgucuaauguucaagcugugaacagaagcgccaccaaagaagugacacugcuucugccugagcccgaauggaccuauccucggcucuccugucccggaagcacguuccagaaggcccugcuuauuucuccucaccgcuuuggcgagaccaaaggaaauuccgcuccgcugaucauuagagaacccuucaucgccugcgggccuaacgaguguaagcauuuugcucucacacacuacgccgcgcagcccggcggguauuacaauggaacccggggcgaccgcaacaaacugagacaucugaucagcgucaagcucggcaagauuccuacaguggaaaauucuaucuuccacauggccgcuugguccgggagcgccugccaugauggaaaagaguggaccuauauuggcguugacgggcccgauaacaaugcucugcuuaaggugaaauacggagaggccuacacggacacauaucacucuuacgcgaacaagauccugcggacccaggaauccgccuguaauugcauuggcgggaacuguuaucucaugaucacagauggaagcgcuuccggcgucucugagugccgcuuucugaaaauuagagagggccggaucaucaaggaaauuuucccgaccgggcgcgugaagcacaccgaggaauguacaugcggauuugccagcaauaaaacgaucgagugugcuugcagagacaaccgguacaccgccaagcgcccuuucguuaaacuuaauguggaaacagauaccgccgagauuagacugaugugcacagacaccuaucucgauacgccccggccuaacgacggcuccaucacagggcccugugagagcgauggagacaagggcucugggggaauuaaaggcggcuuuguccaucaacgcaugaaguccaaaaucgggagaugguacagccggaccaugucuaagaccgaaagaaugggaaugggccuguaugugaaguacgacggggaucccugggcugacagcgaugcgcuggccuucuccggagugauggucucuaugaaagagccuggcugguacagcuuuggguucgaaaucaaggacaaaaagugcgauguuccguguauuggcaucgagauggugcacgacggaggcaaagaaacauggcauuccgcugccaccgccauuuauugccucauggggagcggacagcugcuuugggauacagugacgggcgucgacauggcucuguga

SEQ ID NO: 222471 - RNA, 1401 nt, Artificial Sequence
  derived and/or modified CDS sequence (opt5) from neuraminidase__InfluenzaB__AKA54841
augcugcccagcaccauccagacacucacgcuguuccuuaccuccggcggggugcugcucucucuguacgucagcgccucccuuucuuaucugcucuacagcgacauucugcugaaguuuuccccuacagagaucaccgcuccgacaaugccccucgauugcgccaacgcgucuaauguucaagcugugaacagaagcgccaccaaaggagugacacugcuucugccugaacccgaguggaccuauccucggcucuccugucccggcagcacguuccagaaggcccugcuuauuucuccucaccgcuuuggggaaaccaaaggaaauuccgcuccgcugaucauuagagagcccuucaucgccugcggcccuaacgaauguaagcauuuugcucucacacacuacgccgcgcagcccgggggauauuacaauggcacccggggcgaccgcaacaaacugagacaucugaucagcgucaagcucgggaagauuccuacaguggaaaauucuaucuuccacauggccgcuugguccggaagcgccugccaugauggcaaagaguggaccuauauugggguugacggacccgauaacaaugcucugcuuaaggugaaauacggcgaggccuacacggacacauaucacucuuacgcgaacaagauccugcggacccaggaguccgccuguaauugcauugggggaaacuguuaucucaugaucacagauggcagcgcuuccggcgucucugaaugccgcuuucugaaaauuagagaggggcggaucaucaaggagauuuucccgaccggacgcgugaagcacaccgaagaguguacaugcggcuuugccagcaauaaaacgaucgaaugugcuugcagagacaaccgguacaccgccaagcgcccuuucguuaaacuuaauguggagacagauaccgccgaaauuagacugaugugcacagacaccuaucucgauacgccccggccuaacgacggguccaucacaggacccugugagagcgauggcgacgaggggucuggaggcauuaagggcggguuuguccaucaacgcaugaaauccaagaucggaagaugguacagccggaccaugucuaaaaccgaaagaaugggcauggggcuguaugugaaguacgacggagaucccugggcugacagcgaugcgcuggccuucuccggcgugauggucucuguuaaggagccugggugguacagcuuuggcuucgaaaucaaagacaagaaaugcgaugugccguguauuggaaucgagauggugcacgacggcgggaaggaaacauggcauuccgcugccaccgccauuuauugccucaugggaagcggccagcugcuuugggauacagucacggggguggacaucgcucuguga

SEQ ID NO: 222472 - RNA, 1401 nt, Artificial Sequence
  derived and/or modified CDS sequence (opt5) from neuraminidase__InfluenzaB__AKA54843
augcugcccagcaccauccagacacucacgcuguuccuuaccuccggcggggugcugcucucucuguacgucagcgccucccuuucuuaucugcucuacagcgacauucugcugaaguuuuccccuacagagaucaccgcuccgacaaugccccucgauugcgccaacgcgucuaauguucaagcugugaacagaagcgccaccaaaggagugacacugcuucugccugaacccgaguggaccuauccucggcucuccugucccggcagcacguuccagaaggcccugcuuauuucuccucaccgcuuuggggaaaccaaaggaaauuccgcuccgcugaucauuagagagcccuucaucgccugcggcccuaacgaauguaagcauuuugcucucacacacuacgccgcgcagcccgggggauauuacaauggcacccggggcgaccgcaacaaacugagacaucugaucagcgucaagcucgggaagauuccuacaguggaaaauucuaucuuccacauggccgcuugguccggaagcgccugccaugauggcaaagaguggaccuauauugggguugacggacccgauaacaaugcucugcuuaaggugaaauacggcgaggccuacacggacacauaucacucuuacgcgaacaagauccugcggacccaggaguccgccuguaauugcauugggggaaacuguuaucucaugaucacagauggcagcgcuuccggcgucucugaaugccgcuuucugaaaauuagagaggggcggaucaucaaggagauuuucccgaccggacgcgugaagcacaccgaagaguguacaugcggcuuugccagcaauaaaacgaucgaaugugcuugcagagacaaccgguacaccgccaagcgcccuuucguuaaacuuaauguggagacagauaccgccgaaauuagacugaugugcacagacaccuaucucgauacgccccggccuaacgacggguccaucacaggacccugugagagcgauggcgacgaggggucuggaggcauuaagggcggguuuguccaucaacgcaugaaauccaagaucggaagaugguacagccggaccaugucuaaaaccgaaagaaugggcauggggcuguaugugaaguacgacggagaucccugggcugacagcgaugcgcuggccuucuccggcgugauggucucuguuaaggagccugggugguacagcuuuggcuucgaaaucaaagacaagaaaugcgaugugccguguauuggaaucgagauggugcacgacggcgggaaggaaacauggcauuccgcugccaccgccauuuauugccucaugggaagcggccagcugcuuugggauacagucacggggguggacauggcucuguga

SEQ ID NO: 222473 - RNA, 1401 nt, Artificial Sequence
  derived and/or modified CDS sequence (opt5) from neuraminidase__InfluenzaB__AKA54845
augcugcccagcaccauccagacacucacgcuguuccuuaccuccggcggggugcugcucucucuguacgucagcgccucccuuucuuaucugcucuacagcgacauucugcugaaguuuuccccuacagagaucaccgcuccgacaaugccccucgauugcgccaacgcgucuaauguucaagcugugaacagaagcgccaccaaaggagugacacugcuucugccugaacccgaguggaccuauccucggcucuccugucccggcagcacguuccagaaggcccugcuuauuucuccucaccgcuuuggggaaaccaauggaaacuccgcuccgcugaucauuagagagcccuucaucgccugcggcccuaaugaauguaaacauuuugcucucacacacuacgccgcgcagcccgggggauauuacaacggcacccggggcgaccgcaauaagcugagacaucugaucagcgucaaacucgggaagauuccuacaguggagaacucuaucuuccacauggccgcuugguccggaagcgccugccaugauggcaaggaguggaccuauauugggguugacggacccgauaauaacgcucugcuuaaagugaaguacggcgaagccuacacggacacauaucacucuuacgcgaauaaaauccugcggacccaggaguccgccuguaacugcauugggggaaauuguuaucucaugaucacagauggcagcgcuuccggcgucucugaaugccgcuuucugaagauuagagaggggcggaucaucaaagagauuuucccgaccggacgcgugaagcacaccgaagaguguacaugcggcuuugccagcaacaagacgaucgaaugugcuugcagagacaaucgguacaccgccaaacgcccuuucguuaaacuuaacguggagacagauaccgccgaaauuagacugaugugcacagacaccuaucucgauacgccccggccuaacgacggguccaucacaggacccugugagagcgauggcgacgaggggucuggaggcauuaagggcggguuuguccaucaacgcaugaaguccaaaaucggaagaugguacagccggaccaugucuaagaccgaaagaaugggcauggggcuguaugugaaauacgacggagaucccugggcugacagcgaugcgcuggccuucuccggcgugauggucucuaugaaggagccugggugguacagcuuuggcuucgaaaucaaggacaaaaagugcgauguuccguguauuggaaucgagauggugcacgacggcgggaaagaaacauggcauuccgcugccaccgccauuuauugccucaugggaagcggccagcugcuuugggauacagugacgggggucgacauggcucuguga

SEQ ID NO: 222474 - RNA, 1401 nt, Artificial Sequence; identical to SEQ ID NO: 222278
  derived and/or modified CDS sequence (opt5) from neuraminidase__InfluenzaB__AKA54847

SEQ ID NO: 222475 - RNA, 1401 nt, Artificial Sequence
  derived and/or modified CDS sequence (opt5) from neuraminidase__InfluenzaB__AKA54849
augcugcccagcaccauccagacacucacgcuguuccuuaccuccggcggggugcugcucucucuguacgucagcgccucccuuucuuaucugcucuacagcgacauucugcugaaguuuuccucuacagagaucaccgcuccuacaaugccgcucgauugcgccaacgcgagcaauguucaagcugugaacagauccgccaccaaaggagugacacugcuucugcccgaaccugaguggaccuauccccggcucagcuguccuggcucuacguuccagaaggcccugcuuauuagcccccaccgcuuuggggaaaccaauggaaacuccgcuccucugaucauuagagagccguucaucgccugcggccccaaugaauguaaacauuuugcucucacacacuacgccgcgcagccugggggauauuacaacggcacccggggcgaccgcaauaagcugagacaucugaucucugucaaacucgggaagauucccacaguggagaacuccaucuuccacauggccgcuuggagcggaucugccugccaugauggcaaggaguggaccuauauugggguugacggaccugauaauaacgcucugcuuaaagugaaguacggcgaagccuacacggacacauaucacuccuacgcgaauaaaauccugcggacccaggagagcgccuguaacugcauugggggaaauuguuaucucaugaucacagauggcuccgcuucuggcgucagcgaaugccgcuuucugaagauuagagaggggcggaucaucaaagagauuuuccccaccggacgcgugaagcacaccgaagaguguacaugcggcuuugccuccaacaagacgaucgaaugugcuugcagagacaaucgguacaccgccaaacgcccguucguuaagcugaacguggagacagauaccgccgaaauuagacuuaugugcacagacaccuaucucgauacgccucggcccaacgacgggagcaucacaggaccuugugagucugauggcgacgaagggggaggcggcauuaaagggggauuuguccaucaacgcaugaaguccaaaaucggcagaugguacagccggaccaugucuaagaccgagagaauggggaugggacuguaugugaaauacgacggcgaucccugggcugacagcgaugcgcuggccuucuccggggugauggucucuaugaaggagcccggcugguacagcuuuggauucgaaaucaaggacaaaaagugcgauguuccuuguauuggcaucgagauggugcacgacgggggaaaagaaacauggcauuccgcugccaccgccauuuauugccucaugggcagcgggcagcugcuuugggauacagugacgggagucgacauggcucuguga

SEQ ID NO: 222476 - RNA, 1401 nt, Artificial Sequence
  derived and/or modified CDS sequence (opt5) from neuraminidase__InfluenzaB__AKA54851
augcugcccagcaccauccagacacucacgcuguuccuuaccuccggcggggugcugcucucucuguacgucagcgccucccuuucuuaucugcucuacagcgacauucugcugaaguuuuccccuacagagaucaccgcuccgacaaugccccucgauugcgccaacgcgucuaauguucaagcugugaacagaagcgccaccaaaggagugacacugcuucugccugaacccgaguggaccuauccucggcucuccugucccggcagcacguuccagaaggcccugcuuauuucuccucaccgcuuuggggaaaccaaaggaaauuccgcuccgcugaucauuagagagcccuucaucgccugcggcccuaacgaauguaagcauuuugcucucacacacuacgccgcgcagcccgggggauauuacaauggcacccggggcgaccgcaacaaacugagacaucugaucagcgucaagcucgggaagauuccuacaguggaaaauucuaucuuccacauggccgcuugguccggaagcgccugccaugauggcaaagaguggaccuauauugggguugacggacccgauaacaaugcucugcuuaaggugaaauacggcgaggccuacaucgacacguaucacucuuacgcgaacaagauucugcggacacaggaguccgccuguaauugcaucgggggaaacuguuaucucaugauuaccgauggcagcgcuuccggcgucucugaaugccgcuuucugaaaaucagagaggggcggaucauuaaggagaucuucccgacaggacgcgugaagcacaccgaagaguguaccugcggcuuugccagcaauaaaacaauugaaugugcuugcagagacaaccgguacacggccaagcgcccuuucguuaaacuuaauguggagaccgauacagccgaaaucagacugaugugcaccgacacauaucucgauacgccccggccuaacgacggguccauuaccggacccugugagagcgauggcgacaaggggucuggaggcaucaaaggcggguuuguccaucaacgcaugaaguccaaaaucggaagaugguacagccggacaaugucuaagaccgagagaaugggcauggggcuguaugugaaguacgacggagaucccugggcugacagcgaugcgcuggccuucuccggcgugauggucucuaugaaagaaccugggugguacagcuuuggcuucgagauuaaggacaaaaagugcgauguuccguguaucggaauugaaauggugcacgacggcgggaaagagaccuggcauuccgcugccacagccaucuauugccucaugggaagcggccagcugcuuugggauaccgugacaggggucgacauggcucuguga

SEQ ID NO: 222477 - RNA, 1401 nt, Artificial Sequence
  derived and/or modified CDS sequence (opt5) from neuraminidase__InfluenzaB__AKA54853
augcugcccagcaccauccagacacucacgcuguuccuuaccuccggcggggugcugcucucucuguacgucagcgccucccuuucuuaucugcucuacagcgacauucugcugaaguuuuccccuacagagaucaccgcuccgacaaugccccucgauugcgccaacgcgucuaauguucaagcugugaacagaagcgccaccaaaggagugacacugcuucugccugaacccgaguggaccuauccucggcucuccugucccggcagcacguuccagaaggcccugcuuauuucuccucaccgcuuuggggaaaccaaaggaaauuccgcuccgcugaucauuagagagcccuucaucgccugcggcccuaacgaauguaagcauuuugcucucacacacuacgccgcgcagcccgggggauauuacaauggcacccggggcgaccgcaacaaacugagacaucugaucagcgucaagcucgggaagauuccuacaguggaaaauucuaucuuccacauggccgcuugguccggaagcgccugccaugauggcaaagaguggaccuauauugggguugacggacccgauaacaaugcucugcuuaaggugaaauacggcgaggccuacacggacacauaucacucuuacgcgaacaagauccugcggacccaggaguccgccuguaauugcauugggggaaacuguuaucucaugaucacagauggcagcgcuuccggcgucucugaaugccgcuuucugaaaauuagagaggggcggaucaucaaggagauuuucccgaccggacgcgugaagcacaccgaagaguguacaugcggcuuugccagcaauaaaacgaucgaaugugcuugcagagacaaccgguacaccgccaagcgcccuuucguuaaacuuaauguggagacagauaccgccgaaauuagacugaugugcacagacaccuaucucgauacgccccggccuaacgacggguccaucacaggacccugugagagcgauggcgacgaggggucuggaggcgucaagggcggguuugugcaucaacgcaugaaauccaagauuggaagaugguacagccggaccaugucuaaaaccgaaagaaugggcauggggcuguaugugaaguacgacggagaucccugggcugacagcgaugcgcuggccuucuccggcgucaugguuucugugaaggagccugggugguacagcuuuggcuucgaaaucaaagacaagaaaugcgaugugccguguaucggaauugagaugguccacgacggcgggaaggaaacauggcauuccgcugccaccgccaucuauugccucaugggaagcggccagcugcuuugggauacagugacggggguugacauggcucuguga

SEQ ID NO: 222478 - RNA, 1401 nt, Artificial Sequence
  derived and/or modified CDS sequence (opt5) from neuraminidase__InfluenzaB__AKA54855
augcugcccagcaccauccagacacucacgcuguuccuuaccuccggcggggugcugcucucucuguacgucagcgccucccuuucuuaucugcucuacagcgacauucugcugaaguuuuccccuacagagaucaccgcuccgacaaugccccucgauugcgccaacgcgucuaauguucaagcugugaacagaagcgccaccaaaggagugacacugcuucugccugaacccgaguggaccuauccucggcucuccugucccggcagcacguuccagaaggcccugcuuauuucuccucaccgcuuuggggaaaccaaaggaaauuccgcuccgcugaucauuagagagcccuucaucgccugcggcccuaacgaauguaagcauuuugcucucacacacuacgccgcgcagcccgggggauauuacaauggcacccggggcgaccgcaacaaacugagacaucugaucagcgucaagcucgggaagauuccuacaguggaaaauucuaucuuccacauggccgcuugguccggaagcgccugccaugauggcaaagaguggaccuauauugggguugacggacccgauaacaaugcucugcuuaaggugaaauacggcgaggccuacacggacacauaucacucuuacgcgaacaagauccugcggacccaggaguccgccuguaauugcauugggggaaacuguuaucucaugaucacagauggcagcgcuuccggcgucucugaaugccgcuuucugaaaauuagagaggggcggaucaucaaggagauuuucccgaccggacgcgugaagcacaccgaagaguguacaugcggcuuugccagcaauaaaacgaucgaaugugcuugcagagacaaccgguacaccgccaagcgcccuuucguuaaacuugauguggagacagacaccgccgaaauuagacugaugugcacagauaccuaucucgacacgccccggccuaaugauggguccaucacaggacccugugagagcgacggcgacaaggggucuggaggcauuaaaggcggguuuguccaucaacgcaugaaguccaaaaucggaagaugguacagccggaccaugucuaagaccgagagaaugggcauggggcuguaugugaaguacgauggagaccccugggcugauagcgacgcgcuggccuucuccggcgugauggucucuaugaaagaaccugggugguacagcuuuggcuucgagaucaaggauaaaaagugcgacguuccguguauuggaaucgaaauggugcacgauggcgggaaagagacauggcauuccgcugccaccgccauuuauugccucaugggaagcggccagcugcuuugggacacagugacgggggucgauauggcucuguga

SEQ ID NO: 222479 - RNA, 1401 nt, Artificial Sequence
  derived and/or modified CDS sequence (opt5) from neuraminidase__InfluenzaB__AKT07927
augcccccuagcaccauccagacacugacccucuuccugacguccggcggggugcuucugucucucuacgucagcgccucccugucuuaucuucuguacagcgacauucuccugaaguuuuccccgacagagaucaccgcucccacaaugccucuggauugcgccaacgcgucuaauguucaagcugugaacagaagcgccaccaaaggagugacacuccugcuucccgaaccugaguggaccuauccccggcuguccuguccuggcagcacguuccagaaggcccuccugauuucuccgcaccgcuuuggggaaaccagaggaaauuccgcuccccuuaucauucgggagccuuucaucgccugcggccccaacgaauguaaacauuuugcucugacacacuacgccgcgcagccugggggauauuacaauggcacccgcggcgacagaaacaagcuccggcaucugaucagcgucaaacuggggaagauucccacaguggaaaauucuaucuuccacauggccgcuugguccggaagcgccugccaugauggcaaggaguggaccuauauugggguugacggaccggauaacaaugcucuccugaaagugaaguacggcgaggccuacacggacacauaucacucuuacgcgaacaaaauccuucgcacccaggaguccgccuguaauugcauugggggaaacuguuaucugaugaucacagauggcagcgcuuccggcgucucugaaugcagauuucucaagauucgggaggggcgcaucaucaaagagauuuucccuaccggaagagugaagcacaccgaagaguguacaugcggcuuugccagcaauaagacgaucgaaugugcuugccgggacaacuccuacaccgccaaacgccccuucguuaagcugaauguggagacagauaccgccgaaauuagacuuaugugcacagacaccuaucuggauacgccucggcccaacgacgggagcaucacaggacccugugagucugauggcgacaaaggguccggaggcauuaagggcggguuuguccaucaacgcauggagagcaaaaucggaagaugguacucucggaccaugagcaagaccgaaagaaugggcauggggcucuaugugaaauacgacggagauccuuggacagacuccgaugcucuggcguucggcggggugauggucucuaugaaggagccgggcugguacagcuuuggauucgaaaucaaggacaaaaagugcgauguucccuguauuggcaucgagauggugcacgacgggggaaaagaaaccuggcauuccgccgcuacagccauuuauugccugaugggcagcgggcagcuccugugggauacggugaccggagucgacauggcccuuuga

SEQ ID NO: 222480 - RNA, 1401 nt, Artificial Sequence; identical to SEQ ID NO: 221191
  derived and/or modified CDS sequence (opt5) from neuraminidase__InfluenzaB__AKT07931

SEQ ID NO: 222481 - RNA, 1401 nt, Artificial Sequence
  derived and/or modified CDS sequence (opt5) from neuraminidase__InfluenzaB__AKT07933
augcugcccagcaccauccagacacucacgcuguuccuuaccuccggcggggugcugcucucucuguacgucagcgccucccuuucuuaucugcucuacagcgacauucugcugaaguuuuccccuacagagaucaccgcuccggccaugccccucgauugcgcgaacgcuucuaauguucaagccgugaacagaagcgccacaaaaggagugaccuuccugcuuccugaacccgaguggacauauccucggcuguccugucccggcagcaccuuucagaaggcucuccugauuucuccucaccgcuucggggaaacgaaaggaaauuccgccccgcuuaucauuagagagcccuuuaucgcuugcggcccuaacgaauguaagcauuucgcccugacccacuacgcggcccagcccgggggauauuacaauggcacacggggcgaccgcaacaaacucagacaucugaucagcgucaagcuggggaagauuccuaccguggaaaauucuaucuuucacauggcugccugguccggaagcgcuugccaugauggcaaagaguggacauauauugggguugacggacccgauaacaaugcccuccugaaggugaaauacggcgaggcguacaccgacacguaucacucuuacgccaacaagauccuucggacacaggaguccgcuuguaauugcauugggggaaacuguuaucugaugaucaccgauggcagcgccuccggcgucucugaaugccgcuuccucaaaauuagagaggggcggaucaucaaggagauuuuuccgacaggacgcgugaagcacaccgaagaguguaccugcggcuucgcuagcaauaaaacaaucgaaugugccugcagagacaacuccuacacggccaagcggccuuuuguuaaacugaauguggagaccgauacagcugaaauucgccuuaugugcaccgacacauaucuggauacccccagaccuaacgacgggagcaucacgggacccugugagucugauggcgacaagggguccggaggcauuaaaggcggguucguccaucaacggauggagagcaagaucggacgcugguacucuagaacaaugagcaaaaccgaacggaugggcauggggcucuaugugaaguacgacggagaucccugggcggacuccgaugcccuggcuuuuucuggcgugauggucagcaugaaggagccugggugguacuccuucggcuucgaaaucaaagacaagaaaugcgauguuccguguauuggaaucgagauggugcacgacggcgggaaggaaaccuggcauagcgccgccacagcuauuuauugccugaugggaucuggccagcuccugugggauaccgugacaggggucgacauggcccuuuga

SEQ ID NO: 222482 - RNA, 1401 nt, Artificial Sequence; identical to SEQ ID NO: 221191
  derived and/or modified CDS sequence (opt5) from neuraminidase__InfluenzaB__AKT07935

SEQ ID NO: 222483 - RNA, 1401 nt, Artificial Sequence; identical to SEQ ID NO: 221191
  derived and/or modified CDS sequence (opt5) from neuraminidase__InfluenzaB__AKT07937

SEQ ID NO: 222484 - RNA, 1401 nt, Artificial Sequence; identical to SEQ ID NO: 221033
  derived and/or modified CDS sequence (opt5) from neuraminidase__InfluenzaB__AKT07939

SEQ ID NO: 222485 - RNA, 1401 nt, Artificial Sequence; identical to SEQ ID NO: 221191
  derived and/or modified CDS sequence (opt5) from neuraminidase__InfluenzaB__AKT07941

SEQ ID NO: 222486 - RNA, 1401 nt, Artificial Sequence; identical to SEQ ID NO: 221191
  derived and/or modified CDS sequence (opt5) from neuraminidase__InfluenzaB__AKT07945

SEQ ID NO: 222487 - RNA, 1401 nt, Artificial Sequence
  derived and/or modified CDS sequence (opt5) from neuraminidase__InfluenzaB__AKT07947
augcugcccagcaccauccagacacucacgcuguuccuuaccuccggcggggugcugcucucucuguacgucagcgccucccuuucuuaucugcucuacagcgacauucugcugaaguuuuccccuacagagaucaccgcuccggccaugccccucgauugcgcgaacgcuucuaauguucaagccgugaacagaagcgccacaaaaggagugacccugcuucugccugaacccgaguggacauauccucggcucuccugucccggcagcaccuuccagaaggcucugcuuauuucuccucaccgcuuuggggaaacgaaaggaaauuccgccccgcugaucauuagagagcccuucaucgcuugcggcccuaacgaauguaagcauuuugcccucacccacuacgcggcccagcccgggggauauuacaauggcacacggggcgaccgcaacaaacugagacaucugaucagcgucaagcucgggaagauuccuaccguggaaaauucuaucuuccacauggcugccugguccggaagcgcuugccaugauggcaaagaguggacauauauugggguugacggacccgauaacaaugcccugcuuaaggugaaauacggcgaggcguacaccgacacguaucacucuuacgccaacaagauccugcggacacaggaguccgcuuguaauugcauugggggaaacuguuaucucaugaucaccgauggcagcgccuccggcgucucugaaugccgcuuucugaaaauuagagaggggcggaucaucaaggagauuuucccgacaggacgcgugaagcacaccgaagaguguaccugcggcuuugcuagcaauaaaacaaucgaaugugccugcagagacaacuccuacacggccaagcggccuuucguuaaacuuaauguggagaccgauacagcugaaauucgccugaugugcaccgacacauaucucgauacccccagaccuaacgacgggagcaucacgggacccugugagucugauggcgacaagggguccggaggcauuaaaggcggguuuguccaucaacggauggagagcaagaucggacgcugguacucuagaacaaugagcaaaaccgaacggaugggcauggggcuguaugugaaguacgacggagaucccugggcggacuccgaugcccuggcuuucucuggcgugauggucagcaugaaggagccugggugguacuccuuuggcuucgaaaucaaagacaagaaaugcgauguuccguguauuggaguggacauggugcacgauugcggcaaggagaccuggcauagcgccgccacagcuaucuauugucucauggggucuggacagcugcuuugggacaccgucacaggcguggauauggcccuguga

SEQ ID NO: 222488 - RNA, 1401 nt, Artificial Sequence; identical to SEQ ID NO: 222446
  derived and/or modified CDS sequence (opt5) from neuraminidase__InfluenzaB__AKU40585

SEQ ID NO: 222489 - RNA, 1401 nt, Artificial Sequence; identical to SEQ ID NO: 222446
  derived and/or modified CDS sequence (opt5) from neuraminidase__InfluenzaB__AKU40596

SEQ ID NO: 222490 - RNA, 1401 nt, Artificial Sequence
  derived and/or modified CDS sequence (opt5) from neuraminidase__InfluenzaB__AKU40607
augcugcccagcaccauccagacacucacgcuguuccuuaccuccggcggggugcugcucucucuguacgucagcgccucccuuucuuaucugcucuacagcgacauucugcugaaguuuuccagaacagagguuaccgcuccuaucacaccgcucgauugcgccaacgcgucuaaugcucaagccgugaaccggagcgccaccaaaggagugacaccccugcuuccugaacccgaguggaccuauccucgccuguccugucccggcagcacguuccagaaggcucuccugauuucuccucacagauuuggggaaaccaaaggaaauuccgccccgcuuaucauucgggagcccuucaucgcuugcggcccuaaggaauguaaacauuuugcccugacacacuacgcggcccagcccgggggauauuacaacggcacccgcgaggacagaaauaagcuccggcaucugaucagcgucaagcugggcaaaauuccuacaguggagaacucuaucuuccacauggcugccugguccgggagcgcuugccaugauggacgcgaauggaccuauauuggcguugacgggcccgauucuaaugcccuccugaagaucaaauacggagaggcguacacggacacauaucacuccuacgccaagaacauucuuagaacccaggaaagcgcuuguaauugcaucggcggggauuguuaucugaugauuacagacggaccggccuccggcaucucugagugccgguuucucaaaauccgcgagggcagaauuaucaaggaaauuuucccuaccgggcgggugaagcacaccgaggaauguacaugcggauuugcuagcaacaaaacgaucgagugugccugccgcgauaauuccuacaccgccaagagacccuucgucaaacugaacguggaaacagacaccgcugagauucggcuuaugugcacaaagaccuaucuggauacgccucgccccaaugacggcagcaucacagggcccugugagucugauggagacgaaggcuccgggggaaucaaaggcggcuuuguucaucaaagaauggcgagcaagauugggcggugguacucuagaaccaugagcaaaaccaagcgcaugggaaugggccucuaugugaaguacgacggggauccuuggacagacuccgaggcccuggcucugucuggagucauggugagcauggaggaaccgggcugguacuccuucggguuugaaaucaaagauaagaaaugcgacgugcccuguauuggcaucgagaugguccacgauggaggcaagaccacauggcauagcgccgccacggcuauuuauugccucauggggucuggacagcugcuuugggacaccguuacaggcgugaacaugacccuguga

SEQ ID NO: 222491 - RNA, 1401 nt, Artificial Sequence
  derived and/or modified CDS sequence (opt5) from neuraminidase__InfluenzaB__AKU40618
augcugcccagcaccauccagacacucacgcuguuccuuaccuccggcggggugcugcucucucuguacgucagcgccucccuuucuuaucugcucuacagcgacauucugcugaaguuuuccagaacagagguuaccgcuccuaucaugccgcucgauugcgccaacgcgucuaaugugcaagcugugaaccggagcgccacaaaaggagucacaccccugcuuccugaacccgaguggaccuauccucgccuguccugucccggcagcaccuuccagaaggcccuccugauuucuccucacagauuuggggaaacgaaaggaaauuccgcuccgcuuaucauucgggagcccuucaucgccugcggcccuaaggaauguaaacauuuugcucugacccacuacgccgcgcagcccgggggauauuacaacggcacacgcgaggacagaaauaagcuccggcaucugaucagcgugaagcugggcaaaauuccuaccguugagaacucuaucuuccacauggccgcuugguccgggagcgccugccaugauggacgcgaauggacauauauuggcguggacgggcccgauucuaaugcucuccugaagaucaaauacggagaggccuacaccgacacguaucacuccuacgcgaagaacauucuuagaacacaggaaagcgccuguaauugcaucggcggggauuguuaucugaugauuaccgacggaccggcuuccggcaucucugagugccgguuucucaaaauccgcgagggcagaauuaucaaggaaauuuucccuacagggcgggucaagcacaccgaggaauguaccugcggauuugccagcaacaaaacaaucgagugugcuugccgcgauaauuccuacacggccaagagacccuucgugaaacugaacguugaaaccgacacagccgagauucggcuuaugugcaccaagacauaucuggauaccccucgccccaaugacggcagcaucacggggcccugugagucugauggagacgaaggcuccgggggaaucaaaggcggcuuugugcaucaaagaauggcuagcaagauugggcggugguacucuagaacaaugagcaaaaccaagcgcaugggaaugggccucuaugucaaguacgacggggauccuuggaccgacuccgaggcgcuggcccugucuggagugauggugagcauggaggaaccgggcugguacuccuucggguuugaaaucaaagauaacaagugcgacguccccuguauuggcaucgagaugguucacgauggaggcaaaacaaccuggcauagcgcugccacagccauuuauugccucauggggucuggacagcugcuuugggacacggugaccggcgugaauaugacacuguga

SEQ ID NO: 222492 - RNA, 1401 nt, Artificial Sequence
  derived and/or modified CDS sequence (opt5) from neuraminidase__InfluenzaB__AKU40640
augcugcccagcaccauccagacacucacgcuguuccuuaccuccggcggggugcugcucucucuguacgucagcgccucccuuucuuaucugcucuacagcgacauucugcugaaguuuuccagaacagagaucgcugccccuauuaugccgcucgauugcgcgaacgcuucuaauguucaagccgugaaccggagcgccaccaaaggaguggcucugcuucugcccgaaccugaguggacauauccccgccucuccuguccuggcagcaccuuccagaaggcccugcuuaucucuccccacagauuuggggaaacaaaaggaaauuccgcuccucugauuauccgggagccguucaucgccugcggccccaaggaauguaaacauuuugcgcucacccacuacgccgcucagccugggggauauuacaacggcacgcgcgaggacagaaauaagcugcggcaucugauuagcgucaagcucggcaaaauccccaccguggagaacucuauuuuccacauggccgcuugguccgggagcgccugccaugauggacgcgaauggacauauaucggcguugacgggccugauaauaacgcgcugcuuaagauuaaauacggagaggccuacaccgacacauaucacucuuacgcuaagaauauccugagaacccaggaauccgccuguaacugcauuggcggggauuguuaucucaugaucacggacggacccgcuagcggcaucuccgagugccgguuucugaaaauucgcgagggcagaaucauuaaggaaaucuucccgacagggcgggugaagcacaccgaggaauguacaugcggauuugccucuaauaaaaccauugagugugccugccgcgauaacagcuacaccgcuaagagaccuuucgucaaacuuaauguggaaacagacacggcggagauccggcugaugugcaccgagacauaucucgauacaccccgcccuaacgacggcuccaucaccgggcccugugaaagcaauggagauaagggcucugggggaauuaaaggcggcuuuguucaucaaagaauggccuccaagaucgggcggugguacagcagaaccaugucuaaaacgaagcgcaugggaaugggccuguaugugaaguacgacggggaccccuggacagauagcgaggcucuggcccucuccggagucauggugucuauggaggaaccuggcugguacagcuucggguuugaaauuaaagacaagaaaugcgaugugccguguaucggcauugagaugguccacgacggaggcaagaccaccuggcauuccgccgcuacagccaucuauugccugauggggagcggacagcuucugugggauaccguuacaggcgugaacaugacgcucuga

SEQ ID NO: 222493 - RNA, 1401 nt, Artificial Sequence; identical to SEQ ID NO: 222446
  derived and/or modified CDS sequence (opt5) from neuraminidase__InfluenzaB__AKU40662

SEQ ID NO: 222494 - RNA, 1401 nt, Artificial Sequence
  derived and/or modified CDS sequence (opt5) from neuraminidase__InfluenzaB__AKU40673
augcugcccagcaccauccagacacucacgcuguuccuuaccuccggcggggugcugcucucucuguacgucagcgccucccuuucuuaucugcucuacagcgacauucugcugaaguuuuccagaacagagguuaccgcuccuaucaugccgcucgauugcgccaacgcgucuaaugugcaagcugugaaccggagcgccacaaaaggagucacaccccugcuuccugaauccgaguggaccuauccccgccugagcuguccuggcucuaccuuccagaaggcccuccugauuagcccccacagauuuggggaaacgaaaggaaauuccgcuccucuuaucauucgggagccguucaucgccugcggccccaaggaauguaaacauuuugcucugacccacuacgccgcgcagccugggggauauuacaacggcacacgcgaggacagaaauaagcuccggcaucugaucucugugaagcugggcaaaauucccaccguugagaacuccaucuuccacauggccgcuuggagcgggucugccugccaugauggacgcgaauggacauauauuggcguggacgggccugauuccaaugcucuccugaagaucaaauacggagaggccuacaccgacacguaucacagcuacgcgaagaacauucuuagaacacaggaauccgccuguaauugcaucggcggggauuguuaucugaugauuaccgacggacccgcuucuggcaucagcgagugccgguuucucaaaauccgcgagggcagaauuaucaaggaaauuuucccgacagggcgggucaagcacaccgaggaauguaccugcggauuugccuccaacaaaacaaucgagugugcuugccgcgauaauagcuacacggccaagagaccuuucgugaaacugaacguugaaaccgacacagccgagauucggcuuaugugcaccaagacauaucuggauacgccccgcccuaaugacggcucuaucaccgggcccugugaguccgauggagacgaaggcagcgggggaaucaaaggcggcuuugugcaucaaagaauggcuucuaagauugggcggugguacagcagaacaauguccaaaaccaagcgcaugggaaugggccucuaugucaaguacgacggggaucccuggaccgacucugaggcgcuggcccugagcggagugaugguguccauggaggaaccuggcugguacagcuucggguuugaaaucaaagauaagaaaugcgacgucccguguauuggcaucgagaugguucacgauggaggcaagacaaccuggcauucugcugccacagccauuuauugccucaugggguccggacagcugcuuugggacacggugaccggcgugaacaugacacuguga

SEQ ID NO: 222495 - RNA, 1401 nt, Artificial Sequence; identical to SEQ ID NO: 222446
  derived and/or modified CDS sequence (opt5) from neuraminidase__InfluenzaB__AKU40684

SEQ ID NO: 222496 - RNA, 1401 nt, Artificial Sequence; identical to SEQ ID NO: 222446
  derived and/or modified CDS sequence (opt5) from neuraminidase__InfluenzaB__AKU40695

SEQ ID NO: 222497 - RNA, 1401 nt, Artificial Sequence; identical to SEQ ID NO: 222446
  derived and/or modified CDS sequence (opt5) from neuraminidase__InfluenzaB__AKU40706

SEQ ID NO: 222498 - RNA, 1401 nt, Artificial Sequence; identical to SEQ ID NO: 222446
  derived and/or modified CDS sequence (opt5) from neuraminidase__InfluenzaB__AKU40717

SEQ ID NO: 222499 - RNA, 1401 nt, Artificial Sequence
  derived and/or modified CDS sequence (opt5) from neuraminidase__InfluenzaB__AKU40728
augcugcccagcaccauccagacacucacgcuguuccuuaccuccggcggggugcugcucucucuguacgucagcgccucccuuucuuaucugcucuacagcgacauucugcugaaguuuuccagaacagagguuaccgcuccuaucaugccgcucgauugcgccaacgcgucuaaugcucaagccgugaaccggagcgccacaaaaggagugacaccccugcuuccugaacccgaguggaccuauccucgccuguccugucccggcagcaccuuccagaaggcucuccugauuucuccucacagauuuggggaaacgaaaggaaauuccgccccgcuuaucauucgggagcccuucaucgcuugcggcccuaaggaauguaaacauuuugcccugacccacuacgcggcccagcccgggggauauuacaacggcacacgcgaggacagaaauaagcuccggcaucugaucagcgucaagcugggcaaaauuccuaccguggagaacucuaucuuccacauggcugccugguccgggagcgcuugccaugauggacgcgaauggacauauauuggcguugacgggcccgauucuaaugcccuccugaagaucaaauacggagaggcguacaccgacacguaucacuccuacgccaagaacauucuuagaacacaggaaagcgcuuguaauugcaucggcggggauuguuaucugaugauuaccgacggaccggccuccggcaucucugagugccgguuucucaaaauccgcgagggcagaauuaucaaggaaauuuucccuacagggcgggugaagcacaccgaggaauguaccugcggauuugcuagcaacaaaacaaucgagugugccugccgcgauaauuccuacacggccaagagacccuucgucaaacugaacguggaaaccgacacagcugagauucggcuuaugugcaccaagacauaucuggauaccccucgccccaaugacggcagcaucacggggcccugugagucugauggagacgaaggcuccgggggaaucaaaggcggcuuuguucaucaaagaauggcgagcaagauugggcggugguacucuagaacaaugagcaaaaccaagcgcaugggaaugggccucuaugugaaguacgacggggauccuuggaccgacuccgaggcccuggcucugucuggagucauggugagcauggaggaaccgggcugguacuccuucggguuugaaaucaaagauaagaaaugcgacgugcccuguauuggcaucgagaugguccacgauggaggcaagacaaccuggcauagcgccgccacagcuauuuauugccucauggggucuggacagcugcuuugggacacgguuaccggcgugaacaugacacuguga

SEQ ID NO: 222500 - RNA, 1401 nt, Artificial Sequence
  derived and/or modified CDS sequence (opt5) from neuraminidase__InfluenzaB__AKU40739
augcugcccagcaccauccagacacucacgcuguuccuuaccuccggcggggugcugcucucucuguacgucagcgccucccuuucuuaucugcucuacagcgacauucugcugaaguuuuccagaacagagguuaccgcuccuaucaugccgcucgauugcgccaacgcgucuaaugugcaagcugugaaccggagcgccacaaaaggagucacaccccugcuuccugaacccgaguggaccuauccucgccuguccugucccggcagcaccuuccagaaggcccuccugauuucuccucacagauuuggggaaacgaaaggaaauuccgcuccgcuuaucauucgggagcccuucaucgccugcggcccuaaggaauguaaacauuuugcucugacccacuacgccgcgcagcccgggggauauuacaacggcacacgcgaggacagaaauaagcuccggcaucugaucagcgugaagcugggcaaaauuccuaccguugagaacucuaucuuccacauggccgcuugguccgggagcgccugccaugauggacgcgaauggacauauauuggcguggacgggcccgauucuaaugcucuccugaagaucaaauacggagagaccuacacggacacauaucacuccuacgccaagaacauucuuagaacccaggaaagcgcguguaauugcaucggcggggauuguuaucugaugauuacagacggaccggccuccggcaucucugagugccgguuucucaaaauccgcgagggcagaauuaucaaggaaauuuucccuaccgggcgggucaagcacaccgaggaauguacaugcggauuugcuagcaacaaaacgaucgagugugccugccgcgauaauuccuacaccgcuaagagacccuucgugaaacugaacguugaaacagacaccgccgagauucggcuuaugugcacaaagaccuaucuggauacgccucgccccaaugacggcagcaucacagggcccugugagucugauggagacgaaggcuccgggggaaucaaaggcggcuuugugcaucaaagaauggccagcaagauugggcggugguacucuagaaccaugagcaaaaccaagcgcaugggaaugggccucuaugucaaguacgacggggauccuuggacagacuccgaggcucuggcgcugucuggagugauggugagcauggaggaaccgggcugguacuccuucggguuugaaaucaaagauaagaaaugcgacguccccuguauuggcaucgagaugguucacgauggaggcaagaccacauggcauagcgccgcuacggccauuuauugccucauggggucuggacagcugcuuugggacaccgugacaggcgugaacaugacccuguga

SEQ ID NO: 222501 - RNA, 1401 nt, Artificial Sequence
  derived and/or modified CDS sequence (opt5) from neuraminidase__InfluenzaB__AKU40750
augcugcccagcaccauccagacacucacgcuguuccuuaccuccggcggggugcugcucucucuguacgucagcgccucccuuucuuaucugcucuacagcgacauucugcugaaguuuuccagaacagagguuaccgcuccuaucaugccgcucgauugcgccaacgcgucuaaugugcaagcugugaaccggagcgccacaaaaggagucauuccccugcuuccugaacccgaguggaccuauccucgccuguccugucccggcagcacauuccagaaggcccuccugaucucuccucacagauuuggggaaaccaaaggaaauuccgcuccgcuuauuauccgggagcccuucaucgccugcggcccuaaggaauguaaacauuuugcucugacgcacuacgccgcgcagcccgggggauauuacaacggcacccgcgaggacagaaauaagcuccggcaucugauuagcgugaagcugggcaaaaucccuacaguugagaacucuauuuuccacauggccgcuugguccgggagcgccugccaugauggacgcgaauggaccuauaucggcguggacgggcccgauucuaaugcucuccugaagauuaaauacggagaggccuacacagacaccuaucacuccuacgcgaagaacauccuuagaacgcaggaaagcgccuguaauugcauuggcggggauuguuaucugaugaucacagacggaccggcuuccggcaucucugagugccgguuucucaaaauucgcgagggcagaaucauuaaggaaaucuucccuaccgggcgggucaagcacacagaggaauguaccugcggauuugccagcaacaaaaccauugagugugcuugccgcgauaauuccuacacagccaagagacccuucgugaaacugaacguugaaacggacaccgccgagauccggcuuaugugcacaaagaccuaucuggauacaccucgccccaaugacggcagcaucaccgggcccugugagucugauggagacgaaggcuccgggggaauuaaaggcggcuuugugcaucaaagaauggcuagcaagaucgggcggugguacucuagaacgaugagcaaaacaaagcgcaugggaaugggccucuaugucaaguacgacggggauccuuggaccgacuccgaggcgcuggcccugucuggagugauggugagcauggaggaaccgggcugguacuccuucggguuugaaauuaaagauaagaaaugcgacguccccuguaucggcauugagaugguucacgauggaggcaagaccacauggcauagcgcugccaccgccaucuauugccucauggggucuggacagcugcuuugggacacagugacgggcgugaacaugacccuguga

SEQ ID NO: 222502 - RNA, 1401 nt, Artificial Sequence; identical to SEQ ID NO: 222446
  derived and/or modified CDS sequence (opt5) from neuraminidase__InfluenzaB__AKU40761

SEQ ID NO: 222503 - RNA, 1401 nt, Artificial Sequence; identical to SEQ ID NO: 222446
  derived and/or modified CDS sequence (opt5) from neuraminidase__InfluenzaB__AKU40772

SEQ ID NO: 222504 - RNA, 1401 nt, Artificial Sequence; identical to SEQ ID NO: 222446
  derived and/or modified CDS sequence (opt5) from neuraminidase__InfluenzaB__AKU40783

SEQ ID NO: 222505 - RNA, 1401 nt, Artificial Sequence
  derived and/or modified CDS sequence (opt5) from neuraminidase__InfluenzaB__AKU40794
augcugcccagcaccauccagacacucacgcuguuccuuaccuccggcggggugcugcucucucuguacgucagcgccucccuuucuuaucugcucuacagcgacauucugcugaaguuuuccagaacagagguuaccgcuccuaucaugccgcucgauugcgccaacacaucuaaugugcaagcggugaaccggagcgcuaccaaaggagucacaccccugcuuccugaacccgaguggaccuauccucgccuguccugucccggcagcacguuccagaaggcccuccugauuucuccucacagauuuggggaaaccaaaggaaaguccgccccgcuuaucauucgggagcccuucaucgcuugcggcccuaaagaauguaagcauuuugcccugacacacuacgcugcccagcccgggggauauuacaauggcacccgcgaggacagaaacaagcuccggcaucugaucagcgugaaacugggcaagauuccuacaguugaaaauucuaucuuccacauggcggccugguccgggagcgcuugccaugauggacgcgaauggaccuauauuggcguggacgggcccgauucuaacgcccuccugaaaaucaaguacggagaggcuuacacggacacauaucacuccuacgccaaaaauauucuuagaacccaggaaagcgcguguaacugcaucggcggggauuguuaucugaugauuacagacggaccggccuccggcaucucugagugccgguuucucaagauccgcgagggcagaauuaucaaggaaauuuucccuaccgggcgggucaaacacaccgaggaauguacaugcggauuugcuagcaauaagacgaucgagugugccugccgcgauaacuccuacaccgcuaaaagacccuucgugaagcugaauguugaaacagacaccgccgagauucggcuuaugugcacaaaaaccuaucuggauacgccucgccccaacgacggcagcaucacagggcccugugagucugauggagacgaaggcuccgggggaaucaagggcggcuuugugcaucaaagaauggccagcaaaauugggcggugguacucuagaaccaugagcaagaccaagcgcaugggaaugggccucuaugucaaauacgacggggauccuuggacagacuccgaggcucuggcgcugucuggagugauggugagcauggaggagccgggcugguacuccuucggguuugaaaucaaggauaaaaagugcgacguccccuguauuggcaucgagaugguucacgauggaggcaaaaccacauggcauagcgccgcuacggccauuuauugccucauggggucuggacagcugcuuugggacaccgugacaggcgugaauaugacccuguga

SEQ ID NO: 222506 - RNA, 1401 nt, Artificial Sequence; identical to SEQ ID NO: 222446
  derived and/or modified CDS sequence (opt5) from neuraminidase__InfluenzaB__AKU40805

SEQ ID NO: 222507 - RNA, 1401 nt, Artificial Sequence; identical to SEQ ID NO: 222446
  derived and/or modified CDS sequence (opt5) from neuraminidase__InfluenzaB__AKU40816

SEQ ID NO: 222508 - RNA, 1401 nt, Artificial Sequence; identical to SEQ ID NO: 222446
  derived and/or modified CDS sequence (opt5) from neuraminidase__InfluenzaB__AKU40827

SEQ ID NO: 222509 - RNA, 1401 nt, Artificial Sequence; identical to SEQ ID NO: 222446
  derived and/or modified CDS sequence (opt5) from neuraminidase__InfluenzaB__AKU40838

SEQ ID NO: 222510 - RNA, 1401 nt, Artificial Sequence; identical to SEQ ID NO: 222446
  derived and/or modified CDS sequence (opt5) from neuraminidase__InfluenzaB__AKU40849

SEQ ID NO: 222511 - RNA, 1401 nt, Artificial Sequence; identical to SEQ ID NO: 222446
  derived and/or modified CDS sequence (opt5) from neuraminidase__InfluenzaB__AKU40860

SEQ ID NO: 222512 - RNA, 1401 nt, Artificial Sequence
  derived and/or modified CDS sequence (opt5) from neuraminidase__InfluenzaB__AKU40871
augcugcccagcaccauccagacacucacgcuguuccuuaccuccggcggggugcugcucucucuguacgucagcgccucccuuucuuaucugcucuacagcgacauucugcugaaguuuuccagaacagagguuaccgcuccuaucaugccgcucgauugcgccaacgcgucuaaugugcaagcugugaaccggagcgccacaaaaggagucgcuccccugcuuccugaacccgaguggaccuauccucgccuguccugucccggcagcacauuccagaaggcccuccugauuucuccucacagauuuggggaaaccaaaggaaauuccgccccgcuuaucauucgggagcccuucaucgcuugcggcccuaaggaauguaaacauuuugcccugacgcacuacgcggcccagcccgggggauauuacaacggcacccgcgaggacagaaauaagcuccggcaucugaucagcgugaagcugggcaaaauuccuacaguugagaacucuaucuuccacauggcugccugguccgggagcgcuugccaugauggacgcgaauggaccuauauuggcguggacgggcccgauucuaaugcccuccugaagaucaaauacggagaggcguacacagacaccuaucacuccuacgccaagaacauucuuagaacgcaggaaagcgcuuguaauugcaucggcggggauuguuaucugaugauuacagacggaccggccuccggcaucucugagugccgguuucucaaaauccgcgagggcagaauuaucaaggaaauuuucccuaccgggcgggucaagcacacagaggaauguaccugcggauuugcuagcaacaaaaccaucgagugugccugccgcgauaauuccuacacagccaagagacccuucgugaaacugaacguugaaacggacaccgcugagauucggcuuaugugcacaaagaccuaucuggauacaccucgccccaaugacggcagcaucaccgggcccugugagucugauggagacgaaggcuccgggggaaucaaaggcggcuuugugcaucaaagaauggcgagcaagauugggcggugguacucuagaacgaugagcaaaacaaagcgcaugggaaugggccucuaugucaaguacgacggggauccuuggaccgacuccgaggcccugacccugucuggagugauggugagcauggaggaaccgggcugguacuccuucggguuugaaaucaaagauaagaaaugcgacguccccuguauuggcaucgagaugguucacgauggaggcaagacaaccuggcauagcgcugccacagccauuuauugccucauggggucuggacagcugcuuugggacacggugaccggcgugaacaugacacuguga

SEQ ID NO: 222513 - RNA, 1401 nt, Artificial Sequence; identical to SEQ ID NO: 222446
  derived and/or modified CDS sequence (opt5) from neuraminidase__InfluenzaB__AKU40882

SEQ ID NO: 222514 - RNA, 1401 nt, Artificial Sequence
  derived and/or modified CDS sequence (opt5) from neuraminidase__InfluenzaB__AKU40893
augcugcccagcaccauccagacacucacgcuguuccuuaccuccggcggggugcugcucucucuguacgucagcgccucccuuucuuaucugcucuacagcgacauucugcugaaguuuuccccuacagagaucaccgcuccgacaaugccccucgauugcgccaacgcgucuaauguucaagcugugaacagaagcgccaccaaaggagugacacugcuucugccugaacccgaguggaccuauccucggcucuccugucccggcagcacguuccagaaggcccugcuuauuucuccucaccgcuuuggggaaaccaaaggaaauuccgcuccgcugaucauuagagagcccuucaucgccugcggcccuaacgaauguaagcauuuugcucucacacacuacgccgcgcagcccgggggauauuacaauggcacccggggcgaccgcaacaaacugagacaucugaucagcgucaagcucgggaagauuccuacaguggaaaauucuaucuuccacauggccgcuugguccggaagcgccugccaugauggcaaagaguggaccuauauugggguugacggacccgauaacaaugcucugcuuaaggugaaauacggcgaggccuacacggacacauaucacucuuacgcgaacaagauccugcggacccaggaguccgccuguaauugcauugggggaaacuguuaucucaugaucacagauggcagcgcuuccggcgucucugaaugccgcuuucugaaaauuagagaggggcggaucaucaaggagauuuucccgaccggacgcgugaagcacaccgaagaguguacaugcggcuuugccagcaauaaaacgaucgaaugugcuugcagagacaaccgguacaccgccaagcgcccuuucguuaaacuuaauguggagacagauaccgccgaaauuagacugaugugcacagacaccuaucucgauacgccccggccuaacgacggguccaucacaggacccugugagagcgauggcgacaaggggucuggaggcauuaaaggcggguuuguccaucaacgcaugaaguccaaaaucggaagaugguacagccggaccaugucuaagaccgagagaaugggcauggggcuguaugugaaguacgacggagaucccugggcugacagcggcgcgcuggccuucuccggggugauggucucuaugaaagaaccuggcugguacagcuuuggauucgagaucaaggauaaaaagugcgacguuccguguauuggcaucgaaauggugcacgaugggggaaaagagacauggcauuccgcugccaccgccauuuauugccucaugggcagcgggcagcugcuuugggacacagugacgggagucgauauggcucuguga

SEQ ID NO: 222515 - RNA, 1401 nt, Artificial Sequence; identical to SEQ ID NO: 222446
  derived and/or modified CDS sequence (opt5) from neuraminidase__InfluenzaB__AKU40904

SEQ ID NO: 222516 - RNA, 1401 nt, Artificial Sequence
  derived and/or modified CDS sequence (opt5) from neuraminidase__InfluenzaB__AKU40915
augcugcccagcaccauccagacacucacgcuguuccuuaccuccggcggggugcugcucucucuguacgucagcgccucccuuucuuaucugcucuacagcgacauucugcugaaguuuuccagaacagagguuaccgcuccuaucaugccgcucgauugcgccaacgcgucuaaugugcaagcugugaaccggagcgccacaaaaggagucacaccccugcuuccugaacccgaguggaccuauccucgccuguccugucccggcagcaccuuccagaaggcccuccugauuucuccucacagauuuggggaaacgaaaggaaauuccgcuccgcuuaucauucgggagcccuucaucgccugcggcccuaaggaauguaaacauuuugcucugacccacuacgccgcgcagcccgggggauauuacaacggcacacgcgaggacagaaauaagcuccggcaucugaucagcgugaagcugggcaaaauuccuaccguugagaacucuaucuuccacauggccgcuugguccgggagcgccugccaugauggacgcgaauggacauauauuggcguggacgggcccgauucuaaugcucuccugaagaucaaauacggagaggccuacaccgacacguaucacuccuacgcgaagaacauucuuagaacacaggaaagcgccuguaauugcaucggcggggauuguuaucugaugauuaccgacggaccggcuuccggcaucucugagugccgguuucucaaaauccgcgagggcagaauuaucaaggaaauuuucccuacagggcgggucaagcacaccgaggaauguaccugcggauuugccagcaacaaaacaaucgagugugcuugccgcgauaauuccuacacggccaagagacccuucgugaaacugaacguugaaaccgacacagccgagauucggcuuaugugcaccaagacauaucuggauaccccucgccccaaugacggcagcaucacggggcccugugagucugauggagacgaaggcuccgggggaaucaaaggcggcuuugugcaucaaagaauggcuagcaagauugggcggugguacucuagaacaaugagcaaaaccaagcgcaugggaaugggccucuaugucaaguacgacggggauccuuggaccgacuccgaggcgcuggcccugucuggagugauggugccgauggaggaacccggcugguacagcuucggguuugaaaucaaagauaagaaaugcgacgucccuuguauuggcaucgagaugguucacgauggaggcaagacaaccuggcauuccgcugccacagccauuuauugccucauggggagcggacagcugcuuugggacacggugaccggcgugaacaugacacuguga

SEQ ID NO: 222517 - RNA, 1401 nt, Artificial Sequence; identical to SEQ ID NO: 222446
  derived and/or modified CDS sequence (opt5) from neuraminidase__InfluenzaB__AKU40926

SEQ ID NO: 222518 - RNA, 1401 nt, Artificial Sequence; identical to SEQ ID NO: 222500
  derived and/or modified CDS sequence (opt5) from neuraminidase__InfluenzaB__AKU40937

SEQ ID NO: 222519 - RNA, 1401 nt, Artificial Sequence; identical to SEQ ID NO: 222446
  derived and/or modified CDS sequence (opt5) from neuraminidase__InfluenzaB__AKU40948

SEQ ID NO: 222520 - RNA, 1401 nt, Artificial Sequence; identical to SEQ ID NO: 222446
  derived and/or modified CDS sequence (opt5) from neuraminidase__InfluenzaB__AKU40959

SEQ ID NO: 222521 - RNA, 1401 nt, Artificial Sequence; identical to SEQ ID NO: 222446
  derived and/or modified CDS sequence (opt5) from neuraminidase__InfluenzaB__AKU40970

SEQ ID NO: 222522 - RNA, 1401 nt, Artificial Sequence; identical to SEQ ID NO: 222446
  derived and/or modified CDS sequence (opt5) from neuraminidase__InfluenzaB__AKU40981

SEQ ID NO: 222523 - RNA, 1401 nt, Artificial Sequence; identical to SEQ ID NO: 222446
  derived and/or modified CDS sequence (opt5) from neuraminidase__InfluenzaB__AKU40991

SEQ ID NO: 222524 - RNA, 1401 nt, Artificial Sequence; identical to SEQ ID NO: 222446
  derived and/or modified CDS sequence (opt5) from neuraminidase__InfluenzaB__AKU41002

SEQ ID NO: 222525 - RNA, 1401 nt, Artificial Sequence; identical to SEQ ID NO: 222446
  derived and/or modified CDS sequence (opt5) from neuraminidase__InfluenzaB__AKU41013

SEQ ID NO: 222526 - RNA, 1401 nt, Artificial Sequence; identical to SEQ ID NO: 222446
  derived and/or modified CDS sequence (opt5) from neuraminidase__InfluenzaB__AKU41024

SEQ ID NO: 222527 - RNA, 1401 nt, Artificial Sequence; identical to SEQ ID NO: 221033
  derived and/or modified CDS sequence (opt5) from neuraminidase__InfluenzaB__EPI173278

SEQ ID NO: 222528 - RNA, 1401 nt, Artificial Sequence; identical to SEQ ID NO: 221033
  derived and/or modified CDS sequence (opt5) from neuraminidase__InfluenzaB__EPI498049

SEQ ID NO: 222529 - RNA, 1401 nt, Artificial Sequence; identical to SEQ ID NO: 221033
  derived and/or modified CDS sequence (opt5) from neuraminidase__InfluenzaB__AFH57913

SEQ ID NO: 222530 - RNA, 1401 nt, Artificial Sequence; identical to SEQ ID NO: 221033
  derived and/or modified CDS sequence (opt5) from neuraminidase__InfluenzaB__EPI827074

SEQ ID NO: 222531 - RNA, 1401 nt, Artificial Sequence; identical to SEQ ID NO: 221033
  derived and/or modified CDS sequence (opt5) from neuraminidase__InfluenzaB__EPI244698

SEQ ID NO: 222532 - RNA, 1401 nt, Artificial Sequence; identical to SEQ ID NO: 221033
  derived and/or modified CDS sequence (opt5) from neuraminidase__InfluenzaB__EPI244701

SEQ ID NO: 222533 - RNA, 1401 nt, Artificial Sequence; identical to SEQ ID NO: 222446
  derived and/or modified CDS sequence (opt5) from neuraminidase__InfluenzaB__EPI540672

SEQ ID NO: 222534 - RNA, 1401 nt, Artificial Sequence; identical to SEQ ID NO: 222446
  derived and/or modified CDS sequence (opt5) from neuraminidase__InfluenzaB__EPI829465

SEQ ID NO: 222535 - RNA, 1401 nt, Artificial Sequence
  derived and/or modified CDS sequence (opt5) from neuraminidase__InfluenzaB__EPI684428
augcugcccagcaccauccagacacucacgcuguuccuuaccuccggcggggugcugcucucucuguacgucagcgccucccuuucuuaucugcucuacagcgacauucugcugaaguuuuccagaacagagguuaccgcuccuacaaugccgcucgauugcgccaacgcgucuaaugugcaagcugugaaccggagcaccacaaaaggagucacgccccuguucccugaacccgaguggaccuauccucgccuuuccugucccggcagcaccuuucagaaggcccugcucaucucuccucacagauucggggaaacaaaaggaaauuccgccccgcugauuauccgggagcccuuuauugcuugcggcccuaaggaauguaaacauuucgcccuuacccacuacgcugcccagcccgggggauauuacaacggcacacgcgaggacagaaauaagcugcggcaucucaucagcgugaagcugggcaaaaucccuaccguugagaacucuauuuuucacauggcggccugguccgggagcgcuugccaugauggacgcgaauggacguauaucggcguggacgggcccgauucuaaugcccugcucaagauuaaauacggagaggcuuacacagacaccuaucacuccuacgccaagaacauccugagaacacaggaaagcgcguguaauugcauuggcggggauuguuaucuuaugaucaccgacggaccggccuccggcgucucugagugccgguuccugaaaauucgcgagggcagaaucaucaaggaaauuuuuccuaccgggcgggugaagcacacagaggaauguacgugcggauucgcuagcaacaaaaccaucgagugugccugccgcgauaauagauacacagcuaagcggcccuuuguuaaacucaacguggaaaccgacacagccgagauucgccugaugugcaccaagacguaucuugauacaccuagacccaaugacggcuccaucaccgggcccugugagagcgauggagacgaaggcucugggggaauuaaaggcggcuucguccaucaacggauggccuccaagaucgggagaugguacagccgcaccaugucuaaaacaaagcggaugggaaugggccuguaugugaaguacgacggggauccuuggaccgacagcgaggcucucgcgcuguccggagugauggucucuauggaggaaccgggcugguacagcuuuggguucgaaaucaaagauaagaaaugcgacguucccuguauuggcaucgagauggugcacgauggaggcaagacaacguggcauuccgccgcuaccgccauuuauugccugauggggagcggacagcuccugugggacacagugaccggcgucaacaugacacuuuga

SEQ ID NO: 222536 - RNA, 1401 nt, Artificial Sequence; identical to SEQ ID NO: 221055
  derived and/or modified CDS sequence (opt5) from neuraminidase__InfluenzaB__AFH58451

SEQ ID NO: 222537 - RNA, 1401 nt, Artificial Sequence; identical to SEQ ID NO: 221033
  derived and/or modified CDS sequence (opt5) from neuraminidase__InfluenzaB__EPI173280

SEQ ID NO: 222538 - RNA, 1401 nt, Artificial Sequence; identical to SEQ ID NO: 221033
  derived and/or modified CDS sequence (opt5) from neuraminidase__InfluenzaB__EPI186302

SEQ ID NO: 222539 - RNA, 1401 nt, Artificial Sequence
  derived and/or modified CDS sequence (opt5) from neuraminidase__InfluenzaB__EPI636339
augcugcccagcaccauccagacacucacgcuguuccuuaccuccggcggggugcugcucucucuguacgucagcgccucccuuucuuaucugcucuacagcgacauucugcugaaguuuuccccuacagagaucaccgcuccgacaaugccccucgauugcgccaacgcgucuaauguucaagcugugaacagaagcgccaccaaaggagugacacugcuucugccugaacccgaguggaccuauccucggcucuccugucccggcagcacguuccagaaggcccugcuuauuucuccucaccgcuuuggggaaaccaaaggaaauuccgcuccgcugaucauuagagagcccuucgucgccugcggcccuaacgaauguaagcauuuugcucucacacacuacgccgcgcagcccgggggauauuacaauggcacccggggcgaccgcaacaaacugagacaucugaucagcgugaagcucgggaagaucccuacaguugaaaauucuauuuuccacauggccgcuugguccggaagcgccugccaugauggcaaagaguggaccuauaucgggguggacggacccgauaacaaugcucugcuuaaggucaaauacggcgaggccuacacggacacauaucacucuuacgcgaacaauauucugcggacccaggaguccgccuguaacugcaucgggggaaauuguuaucucaugauuacagauggcagcgcuuccggcgugucugaaugccgcuuucugaagaucagagaggggcggauuaucaaagagaucuucccgaccggacgcguuaagcacaccgaagaguguacaugcggcuuugccagcaacaagacgauugaaugugcuugcagagacaaucgguacaccgccaaacgcccuuucgugaaacuuaacgucgagacagauaccgccgaaaucagacugaugugcacagacaccuaucucgauacgccccggccuaacgacggguccauuacaggacccugugagagcgauggcgacaaggggucuggaggcaucaagggcggguuugugcaucaacgcaugaaauccaagauuggaagaugguacagccggaccaugucuaaaaccgagagaaugggcauggggcuguaugugaaguacggaggcgaccccugggcugauagcgacgcgcuggccuucuccggggucaugguuucuaugaaggaaccuggcugguacagcuuuggauucgagaucaaagauaagaaaugcgacgugccguguaucggcauugaaauggugcacgaugggggaaaggagacauggcauuccgcugccaccgccaucuauugccucaugggcagcgggcagcugcuuugggacacagucacgggaguggauauggcucuguga

SEQ ID NO: 222540 - RNA, 1401 nt, Artificial Sequence; identical to SEQ ID NO: 222539
  derived and/or modified CDS sequence (opt5) from neuraminidase__InfluenzaB__EPI645996

SEQ ID NO: 222541 - RNA, 1401 nt, Artificial Sequence
  derived and/or modified CDS sequence (opt5) from neuraminidase__InfluenzaB__EPI539770
augcugcccagcaccauccagacacucacgcuguuccuuaccuccggcggggugcugcucucucuguacgucagcgccucccuuucuuaucugcucuacagcgacauucugcugaaguuuuccagaacagagguuaccgcuccuaucaugccgcucgauugcgccaacgcgucuaaugcucaagccgugaaccggagcgccacaaaaggagugacaccccugcuuccugaacccgaguggaccuauccucgccuguccugucccggcagcaccuuccagaaggcucuccugauuucuccucacagauuuggggaaacgaaaggaaauuccgccccgcuuaucauucgggagcccuucaucgcuugcggcccuaaggaauguaaacauuuugcccugacccacuacgcggcccagcccgggggauauuacaacggcacacgcgaggacagaaauaagcuccggcaucugaucagcgucaagcugggcaaaauuccuaccguggagaacucuaucuuccacauggcugccugguccgggagcgcuugccaugauggacgcgaauggacauauauuggcguugacgggcccgauucuaaugcccuccugaagaucaaauacggagaggcguacaccgacacguaucacuccuacgccaagaacauucuuagaacacaggaaagcgcuuguaauugcaucggcggggauuguuaucugaugauuaccgacggaccggccuccggcaucucugagugccgguuucucaaaauccgcgagggcagaauuaucaaggaaauuuucccuacagggcgggugaagcacaccgaggaauguaccugcggauuugcuagcaacaaaacaaucgagugugccugccgcgauaauuccuacacggccaagagacccuucgucaaacugaacguggaaaccgacacagcugagauucggcuuaugugcaccaagacauaucuggauaccccucgccccaaugacggcagcaucacggggcccugugagucugauggagacgaaggcuccgggggaaucaaaggcggcuuuguucaucaaagaauggcgagcaagauugggcggugguacucuagaacaaugagcaaaaccaagcgcaugggaaugggccucuaugugaaguacgacggggauccuuggaccgacuccgaggcccuggcucugucuggagucauggugagcauggaggaaccgggcugguacuccuucggguuugaaaucaaagauaagaaaugcgacgugcccuguauuggcaucgagaugguccacgauggaggcaagacaaccuggcauagcgccgccacaacgauuuauugccucauggggucuggacagcugcuuugggacaccguuacaggcgugaacaucacccuguga

SEQ ID NO: 222542 - RNA, 1401 nt, Artificial Sequence; identical to SEQ ID NO: 222541
  derived and/or modified CDS sequence (opt5) from neuraminidase__InfluenzaB__EPI551248

SEQ ID NO: 222543 - RNA, 1401 nt, Artificial Sequence; identical to SEQ ID NO: 222541
  derived and/or modified CDS sequence (opt5) from neuraminidase__InfluenzaB__EPI544258

SEQ ID NO: 222544 - RNA, 1401 nt, Artificial Sequence; identical to SEQ ID NO: 222446
  derived and/or modified CDS sequence (opt5) from neuraminidase__InfluenzaB__EPI592698

SEQ ID NO: 222545 - RNA, 1401 nt, Artificial Sequence; identical to SEQ ID NO: 222446
  derived and/or modified CDS sequence (opt5) from neuraminidase__InfluenzaB__EPI592706

SEQ ID NO: 222546 - RNA, 1401 nt, Artificial Sequence
  derived and/or modified CDS sequence (opt5) from neuraminidase__InfluenzaB__EPI693093
augcugcccagcaccauccagacacucacgcuguuccuuaccuccggcggggugcugcucucucuguacgucagcgccucccuuucuuaucugcucuacagcgacauucugcugaaguuuuccagaacagagguuaccgcuccuaucaugccgcucgauugcgccaacgcgucuaaugugcaagcugugaaccggagcgccacaaaaggagucacaccccugcuuccugaacccgaguggaccuauccucgccuguccugucccggcagcaccuuccagaaggcccuccugauuucuccucacagauuuggggaaacgaaaggaaauuccgcuccgcuuaucauucgggagcccuucaucgccugcggcccuaaggaauguaaacauuuugcucugacccacuacgccgcgcagcccgggggauauuacaacggcacacgcgaggacagaaauaagcuccggcaucugaucagcgugaagcugggcaaaauuccuaccguugagaacucuaucuuccacauggccgcuugguccgggagcgccugccaugauggacgcgaauggacauauauuggcguggacgggcccgauucuaaugcucuccugaagaucaaauacggagaggccuacaccgacacguaucacuccuacgcgaagaacauucuuagaacacaggaaagcgccuguaauugcaucggcggggauuguuaucugaugauuaccgacggaccggcuuccggcaucucugagugccgguuucucaaaauccgcgagggcagaauuaucaaggaaauuuucccuacagggcgggucaagcacaccgaggaauguaccugcggauuugccagcaacaaaacaaucgagugugcuugccgcgauaauuccuacacggccaagagacccuucgugaaacugaacguugaaaccgacacagccgagauucggcuuaugugcaccaagacauaucuggauaccccucgccccaaugacggcagcaucacggggcccugugagucugauggagacgaaggcuccgggggaaucaaaggcggcuuugugcaucaaagaauggagagcaagauugggcggugguacucuagaacaaugagcaaaaccaagcgcaugggaaugggccucuaugucaaguacgacggggauccuuggaccgacuccgaagcucuggcgcugucuggagugauggugagcauggaggaaccgggcugguacuccuucggguuugagaucaaagauaagaaaugcgacguccccuguauuggcaucgagaugguucacgauggaggcaagacaaccuggcauagcgccgcuacagccauuuauugccucauggggucuggacagcugcuuugggacacggugaccggcgugaacaugacacuguga

SEQ ID NO: 222547 - RNA, 1401 nt, Artificial Sequence
  derived and/or modified CDS sequence (opt5) from neuraminidase__InfluenzaB__EPI678795
augcugcccagcaccauccagacacucacgcuguuccuuaccuccggcggggugcugcucucucuguacgucagcgccucccuuucuuaucugcucuacagcgacauucugcugaaguuuuccccuacagagaucaccgcuccgacaaugccccucgauugcgccaacgcgucuaauguucaagcugugaacagaagcgccaccaaaggagugacauuccugcuuccugaacccgaguggaccuauccucggcuguccugucccggcagcacguuucagaaggcccuccugauuucuccucaccgcuucggggaaaccaaaggaaauuccgcuccgcuuaucauuagagagcccuuugucgccugcggcccuaacgaauguaagcauuucgcucugacacacuacgccgcgcagcccgggggauauuacaauggcacccggggcgaccgcaacaaacucagacaucugaucagcgugaagcuggggaagaucccuacaguugaaaauucuauuuuucacauggccgcuugguccggaagcgccugccaugauggcaaagaguggaccuauaucgggguggacggacccgauaacaaugcucuccugaaggucaaauacggcgaggccuacacggacacauaucacucuuacgcgaacaauauucuucggacccaggaguccgccuguaacugcaucgggggaaauuguuaucugaugauuacagauggcagcgcuuccggcgugucugaaugccgcuuccucaagaucagagaggggcggauuaucaaagagaucuuuccgaccggacgcguuaagcacaccgaagaguguacaugcggcuucgccagcaacaagacgauugaaugugcuugcagagacaaucgguacaccgccaaacgcccuuuugugaagcugaacgucgagacagauaccgccgaaaucagacuuaugugcacagacaccuaucuggauacgccccggccuaacgacggguccauuacaggacccugugagagcgauggcgacaaagggucuggaggcaucaagggcggguucgugcaucaacgcaugaaauccaagauuggaagaugguacagccggaccaugucuaaaaccgagagaaugggcauggggcucuaugugaaguacggaggcaaucccugggcugacagcgaugcgcugacauuuuccggggucaugguuucuaugaaggaaccuggcugguacagcuucggauucgagaucaaagacaagaaaugcgaugugccguguaucggcauugaaauggugcacgacgggggaaaggagaccuggcauuccgccgcuacagccaucuauugccugaugggcagcgggcagcuccugugggauacggucaccggaguggacauggcccuuuga

SEQ ID NO: 222548 - RNA, 1401 nt, Artificial Sequence; identical to SEQ ID NO: 222547
  derived and/or modified CDS sequence (opt5) from neuraminidase__InfluenzaB__EPI721063

SEQ ID NO: 222549 - RNA, 1401 nt, Artificial Sequence; identical to SEQ ID NO: 220967
  derived and/or modified CDS sequence (opt5) from neuraminidase__InfluenzaB__EPI328903

SEQ ID NO: 222550 - RNA, 1401 nt, Artificial Sequence
  derived and/or modified CDS sequence (opt5) from neuraminidase__InfluenzaB__EPI543192
augcugcccagcaccauccagacacucacgcuguuccuuaccuccggcggggugcugcucucucuguacgucagcgccucccuuucuuaucugcucuaccuggacauucugcucaaguuuccuagcacagagaucaccgcuccgacaaugccccuggauugcgccaacgcguccaauguucaagcugugaacagaucugccaccaaaggagugacacuucugcucccugaacccgaguggaccuauccucggcugagcugucccggcuccacguuccagaaggcccuucugauuagcccucaccgcuuuggggaaaccaaaggaaauucugcuccgcucaucauuagagagcccuucaucgccugcggcccuaaggaauguaaacauuuugcucugacacacuacgccgcgcagcccgggggauauuacaacggcacccggggcgaccgcaauaagcugagacaucucaucuccgucaagcuggggaaaauuccuacaguggagaacagcaucuuccacauggccgcuuggucuggauccgccugccaugauggcaaggaguggaccuauauugggguugacggacccgauaauaacgcucugcuuaaaaucaaguacggcgaagccuacacggacacauaucacagcuacgcgaauaacauucuccggacccaggagucugccuguaauugcaucgggggaaacuguuaucugaugauuacagauggcuccgcuagcggcguguccgaaugccgcuuucuuaaaaucagagaggggcggaucaugaaggagauuuucccgaccggacgcacccaacacacagaagaguguacgugcggcuuugccucuaauaagaccaucgaaugugcuugcagagacaacagcuacacagccaaacggccuuucgucaagcugaauguggagaccgauacagccgaaauucgccucaugugcaccaaaacguaucuggacacacccagaccugaugacggguccaucaccggacccugugagagcaacggcgggaagggaucuggcggcauuaaagggggauuuguucaucagcggauggcuuccaagaucggccgcugguacagcagaaccaugucuaaaacagagcggaaggggaugggacuguauaucaaguacaacggcgaucccugggcggacagcgacgcccucaccuucuccggggugauggucucuauggaggaaccuggcugguacagcuuuggauucgaaauuaaagauaagaaaugcgacgugccguguaucggcauugagauggugcacgaugggggaaaggaaacauggcauuccgcugccacggccaucuauugccugaugggcagcgggcagcuucugugggacaccgucacaggaguuaauaugacccucuga

SEQ ID NO: 222551 - RNA, 1401 nt, Artificial Sequence; identical to SEQ ID NO: 222550
  derived and/or modified CDS sequence (opt5) from neuraminidase__InfluenzaB__EPI500360

SEQ ID NO: 222552 - RNA, 1401 nt, Artificial Sequence
  derived and/or modified CDS sequence (opt5) from neuraminidase__InfluenzaB__EPI543186
augcugcccagcaccauccagacacucacgcuguuccuuaccuccggcggggugcugcucucucuguacgucagcgccucccuuucuuaucugcucuacagcgacauucugcugaaguuuuccagaacagagguuaccgcuccuaucaugccgcucgauugcgccaacgcgucuaaugugcaagcugugaaccggagcgccacaaaaggagucacaccccugcuuccugaacccgaguggaccuauccucgccuguccugucccggcagcaccuuccagaaggcccuccugauuucuccucacagauuuggggaaacgaaaggaaauuccgcuccgcuuaucauucgggagcccuucaucgccugcggcccuaaggaauguaaacauuuugcucugacccacuacgccgcgcagcccgggggauauuacaacggcacacgcgaggacagaaauaagcuccggcaucugaucagcgugaagcugggcaaaauuccuaccguugagaacucuaucuuccacauggccgcuugguccgggagcgccugccaugauggacgcgaauggacauauauuggcguggacgggcccgauucuaaugcucuccugaagaucaaauacggagaggccuacaccgacacguaucacuccuacgcgaagaacauucuuagaacacaggaaagcgccuguaauugcaucggcggggauuguuaucugaugauuaccgacggaccggcuuccggcaucucugagugccgguuucucaaaauccgcgagggcagaauuaucaaggaaauuuucccuacagggcgggucaagcacaccgaggaauguaccugcggauuugccagcaacaaaacaaucgagugugcuugccgcgauaauuccuacacggccaagagacccuucgugaaacugaacguugaaaccgacacagccgagauucggcuuaugugcaccaagacauaucuggauaccccucgccccaaugacggcagcaucacggggcccugugagucugauggagacgaaggcuccgggggaaucaaaggcggcuuugugcaucaaagaauggcuagcaagauugggcggugguacucuagaacaaugagcaaaaccaagcgcaugggaaugggccucuaugucaaguacgacggggauccuuggaccgacuccgaggcgcuggcccugucuggagugauggugagcauggaggaaccgggcugguacuccuucggguuugaaaucaaagauaagaaaugcgacguccccuguauuggcaucgagaugguucacgauggaggcaagacaaccuggcauagcgcugccacagugauuuauugccucauggggucuggacagcugcuuugggacacggugaccggcgucaacaugacacuguga

SEQ ID NO: 222553 - RNA, 1401 nt, Artificial Sequence; identical to SEQ ID NO: 222552
  derived and/or modified CDS sequence (opt5) from neuraminidase__InfluenzaB__EPI536448

SEQ ID NO: 222554 - RNA, 1401 nt, Artificial Sequence
  derived and/or modified CDS sequence (opt5) from neuraminidase__InfluenzaB__NP_056663
augcugcccagcaccgugcagacacucacgcugcuucugaccuccggcgggguccuccugucucuuuacguuagcgccucccugucuuaucuccuguacagcgacgugcugcucaaguucuccucuacaaaaaccacagcuccuaccaugagccuggagugcacaaacgccuccaaugcgcaaaccgugaaccacagcgcuacgaaggaaaugaccuuuccgcccccugagcccgaauggacauauccuagacuuucuugucagggauccaccuuccagaaagcccugcucaucagcccccaucgguuuggcgagauuaagggaaauucugccccucugaucauucgcgaaccguucgucgcuugcgggcccaaagaguguagacacuuugcccuuacacauuacgcugcccagccuggcggguauuacaacggaacccggaaggaucgcaauaagcugagacaccucguguccguuaaacugggcaagauccccacgguggagaacagcauuuuccauauggcggccuggucuggcuccgcuugccacgacgggcgggaauggacauauaucggagucgauggcccugacaaugaugcccuggugaaaaucaaguacggggaggcuuacaccgacacauaucacagcuacgcccauaacauucuccgcacccaagaauccgcguguaauugcaucggaggcgauuguuaucugaugauuaccgacgggucugccagcggaaucuccaaaugcagauuucuuaagauucgggagggccgcaucauuaaggagauccugcccacaggcagaguugaacacacggaggaauguaccugcggguucgcuagcaacaaaacaaucgagugugccugccgggauaauucuuacaccgcuaagcgcccguuugugaaacucaacgucgaaacagacaccgccgagauuagacugaugugcacgaagacauaucuugauaccccucggcccgacgauggauccaucgccggcccuugugagagcaauggggacaaauggcugggaggcauuaaagggggauucgugcaucagcgcauggcuucuaagaucggcagaugguacagccggaccauguccaagacaaacagaaugggcauggaacucuaugugaaguacgacggggaucccuggaccgacucugaugcgcugacacugagcggagucaugguuuccauugaggaacccggcugguacagcuuuggguucgagaucaaagacaagaaaugcgaugugccuuguaucggaauugaaauggugcacgacggcgggaaggauacguggcacucugccgcuaccgccaucuauugccucaugggcuccggacagcugcuuugggacacagucaccggcguggauauggcccuguga

SEQ ID NO: 222555 - RNA, 1401 nt, Artificial Sequence
  derived and/or modified CDS sequence (opt5) from neuraminidase__InfluenzaB__ABG85180
augcugcccagcaccgugcagacacucacgcugcuucugaccuccggcgggguccuccugucucuuuacguuagcgccucccugucuuaucuccuguacagcgacgugcugcucaaguucuccucuacaaaaaccacagcuccuaccaugagccuggagugcacaaacgccuccaaugcgcaaaccgugaacuauagcgcuacgaaggaaaugaccuuuccgcccccugagcccgaauggacauacccuagacuuucuugucagggauccaccuuccagaaagcccugcucaucagcccccaccgguuuggcgagauuaagggaaauucugccccucugaucauucgcgaaccguucgucgcuugcgggcccaaagaguguagacauuuugcccuuacacacuaugcugcccagccuggcggguacuaucauggaacccggaaggaucgcaacaagcugagacaccucguguccguuaaacugggcaagauccccacgguggagaauagcauuuuccauauggcggccuggucuggcuccgcuugccacgacgggcgggaauggacauacaucggagucgauggcccugacaacgaugcccuggugaaaaucaaguacggggaggcuuauaccgacacauaccacagcuaugcccauaauauucuccgcacccaagaauccgcguguaacugcaucggaggcgauuguuaccugaugauuaccgacgggucugccagcggaaucuccaaaugcagauuucuuaagauucgggagggccgcaucauuaaggagauccugcccacaggcagaguugaacacacggaggaauguaccugcggguucgcuagcaauaaaacaaucgagugugccugccgggauaacucuuauaccgcuaagcgcccguuugugaaacucaaugucgaaacagacaccgccgagauuagacugaugugcacgaagacauaccuugauaccccucggcccgacgauggauccaucgccggcccuugugagagcaacggggacaaaggacugggcgggauuaagggaggcuucgugcaucagcgcauggcuuuuaaaaucggcagaugguauucucggaccaugagcaagacaaauagaauggggauggaacucuacgugaaguacgacggagaucccuggaccgacuccgaugcgcugacacugucuggcgucaugguuagcauugaggaacccgggugguauuccuucggauuugagaucaaagacaagaaaugcgaugugccuuguaucggcauugaaauggugcacgacgggggcgaggauacguggcacagcgccgcuaccgccaucuacugccucaugggaucuggccagcugcuuugggacacagucaccgggauugauauggcccuguga

SEQ ID NO: 222556 - RNA, 1401 nt, Artificial Sequence; identical to SEQ ID NO: 222445
  derived and/or modified CDS sequence (opt5) from neuraminidase__InfluenzaB__EPI376345

SEQ ID NO: 222557 - RNA, 1401 nt, Artificial Sequence; identical to SEQ ID NO: 222445
  derived and/or modified CDS sequence (opt5) from neuraminidase__InfluenzaB__EPI368424

SEQ ID NO: 222558 - RNA, 1401 nt, Artificial Sequence
  derived and/or modified CDS sequence (opt5) from neuraminidase__InfluenzaB__EPI331150
augcugcccagcaccauccagacacucacgcuguuccuuaccuccggcggggugcugcucucucuguacgucagcgccucccuuucuuaucugcucuacagcgacauucugcugaaguuuuccccuacagagaucaccgcuccgacaaugccccucgauugcgccaacgcgucuaauguucaagcuaugaacagaagcgccaccaaaggagugacacugcuucugccugaacccgaguggaccuauccucggcucuccugucccggcagcacguuccagaaggcccugcuuauuucuccucaccgcuuuggggaaaccaaaggaaauuccgcuccgcugaucauuagagagcccuucaucgccugcggcccuaacgaauguaagcauuuugcucucacacacuacgccgcgcagcccgggggauauuacaauggcacccggggcgaccgcaacaaacugagacaucugaucagcgugaagcucgggaagauuccuacagucgaaaauucuaucuuccacauggccgcuugguccggaagcgccugccaugauggcaaagaguggaccuauauugggguggacggacccgauaacaaugcucugcuuaagguuaaauacggcgaggccuacacggacacauaucacucuuacgcgaacaagauccugcggacccaggaguccgccuguaauugcauugggggaaacuguuaucucaugaucacagauggcagcgcuuccggcgugucugaaugccgcuuucugaaaauuagagaggggcggaucaucaaggagauuuucccgaccggacgcgucaagcacaccgaagaguguacaugcggcuuugccagcaauaaaacgaucgaaugugcuugcagagacaacuccuacaccgccaagcggccuuucgugaaacuuaauguugagacagauaccgccgaaauucgccugaugugcacagacaccuaucucgauacgcccagaccuaacgacgggagcaucacaggacccugugagucugauggcgacaagggguccggaggcauuaaaggcggguuugugcaucaacggauggagagcaagaucggacgcugguacucuagaaccaugagcaaaaccgaacggaugggcauggggcuguaugucaaguacgacggagaucccugggcugacuccgaugcgcuggccuucucuggcgugauggugagcaugaaggagccugggugguacuccuuuggcuucgaaaucaaagacaagaaaugcgaugucccguguauuggaaucgagaugguucacgacggcgggaaggaaacauggcauagcgcugccaccgccauuuauugccucaugggaucuggccagcugcuuugggauacagugacggggguggacauggcucuguga

SEQ ID NO: 222559 - RNA, 1401 nt, Artificial Sequence; identical to SEQ ID NO: 222558
  derived and/or modified CDS sequence (opt5) from neuraminidase__InfluenzaB__EPI358089

SEQ ID NO: 222560 - RNA, 1401 nt, Artificial Sequence; identical to SEQ ID NO: 220704
  derived and/or modified CDS sequence (opt5) from neuraminidase__InfluenzaB__ABL76698

SEQ ID NO: 222561 - RNA, 1401 nt, Artificial Sequence
  derived and/or modified CDS sequence (opt5) from neuraminidase__InfluenzaB__AAD42328
augcugcccagcaccauccagacacucacgcuguuccuuaccuccggcggggugcugcucucucuguacgucagcgccucccuuucuuaucugcucuacagcgacauucugcugaaguuuuccccuacagagaucaccgcuccgacaaugccccucgauugcgccaacgcgucuaauguucaagcugugaacagaagcgccaccaaaggaaugacacugcuucugccugaacccgaguggaccuauccucggcucuccugucccggcagcacguuccagaaggcccugcuuauuucuccucaccgcuuuggggaaaccagaggaaauuccgcuccgcugacaauccgggagcccuucauugccugcggcccuaaagaauguaagcauuuugcucucacccacuacgccgcgcagcccgggggauauuacaacggcacacgcgaggacagaaauaaacugcggcaucugaucagcgugaagcucggcaagaucccuaccgucgagaacucuauuuuccacauggccgcuugguccgggagcgccugccaugauggacgcgaauggacguauaucggcguggacgggcccgauucuaaugcucugauuaaaaucaaguacggagaggccuacacagacaccuaucacuccuacgcgaacaauauucuuagaacacaggaaagcgccuguaacugcaucggcggggauuguuaucugaugauuaccgacggauccgcuucuggcaucagcaaaugccgguuucucaagauccgcgagggcagaauuaucaaagagauuuucccgaccgggcggguugaacacacagaggaauguacgugcggauuugccuccaauaagaccaucgagugugcuugccgcgauaacagcuacacagccaagagaccuuucgugaaacugaaugucgaaaccgacacagccgagauucggcuuaugugcaccgagacguaucuggauacaccccgcccugacgauggcucuaucaccgggcccugugaauccaacggagacaagggcagagggggaaucaaaggcggcuuugugcaucaacggauggcuagcaagauugggagaugguacucucgcaccaugagcaaaacaaagcggaugggaauggagcucuauguuaaauacgacggcgaucccuggaucgacuccgaugcgcuggccccuucuggggugauggucagcauggaggaaccgggaugguacuccuucggcuuugaaauuaaggacaagaaaugcgaugugcccuguaucgggauugagauggugcacgacggcggaaagaaaaccuggcauagcgcugccacagccaucuauugccugaugggcucugggcagcuccugugggauacggucaccggaguugacagauccguguga

SEQ ID NO: 222562 - RNA, 1401 nt, Artificial Sequence; identical to SEQ ID NO: 222247
  derived and/or modified CDS sequence (opt5) from neuraminidase__InfluenzaB__EPI541349

SEQ ID NO: 222563 - RNA, 1401 nt, Artificial Sequence; identical to SEQ ID NO: 222446
  derived and/or modified CDS sequence (opt5) from neuraminidase__InfluenzaB__EPI541759

SEQ ID NO: 222564 - RNA, 1401 nt, Artificial Sequence; identical to SEQ ID NO: 222539
  derived and/or modified CDS sequence (opt5) from neuraminidase__InfluenzaB__EPI826201

SEQ ID NO: 222565 - RNA, 1401 nt, Artificial Sequence; identical to SEQ ID NO: 222278
  derived and/or modified CDS sequence (opt5) from neuraminidase__InfluenzaB__EPI477398

SEQ ID NO: 222566 - RNA, 1401 nt, Artificial Sequence; identical to SEQ ID NO: 222278
  derived and/or modified CDS sequence (opt5) from neuraminidase__InfluenzaB__EPI492570

SEQ ID NO: 222567 - RNA, 1401 nt, Artificial Sequence; identical to SEQ ID NO: 222278
  derived and/or modified CDS sequence (opt5) from neuraminidase__InfluenzaB__EPI498339

SEQ ID NO: 222568 - RNA, 1401 nt, Artificial Sequence; identical to SEQ ID NO: 222499
  derived and/or modified CDS sequence (opt5) from neuraminidase__InfluenzaB__EPI538118

SEQ ID NO: 222569 - RNA, 1401 nt, Artificial Sequence; identical to SEQ ID NO: 222499
  derived and/or modified CDS sequence (opt5) from neuraminidase__InfluenzaB__EPI538124

SEQ ID NO: 222570 - RNA, 1401 nt, Artificial Sequence; identical to SEQ ID NO: 222499
  derived and/or modified CDS sequence (opt5) from neuraminidase__InfluenzaB__EPI556421

SEQ ID NO: 222571 - RNA, 1401 nt, Artificial Sequence; identical to SEQ ID NO: 222499
  derived and/or modified CDS sequence (opt5) from neuraminidase__InfluenzaB__EPI614609

SEQ ID NO: 222572 - RNA, 1401 nt, Artificial Sequence; identical to SEQ ID NO: 220743
  derived and/or modified CDS sequence (opt5) from neuraminidase__InfluenzaB__BAB32609

SEQ ID NO: 222573 - RNA, 1401 nt, Artificial Sequence; identical to SEQ ID NO: 220889
  derived and/or modified CDS sequence (opt5) from neuraminidase__InfluenzaB__EPI271544

SEQ ID NO: 222574 - RNA, 1401 nt, Artificial Sequence; identical to SEQ ID NO: 220889
  derived and/or modified CDS sequence (opt5) from neuraminidase__InfluenzaB__AFH57957

SEQ ID NO: 222575 - RNA, 1401 nt, Artificial Sequence; identical to SEQ ID NO: 220889
  derived and/or modified CDS sequence (opt5) from neuraminidase__InfluenzaB__EPI294881

SEQ ID NO: 222576 - RNA, 1401 nt, Artificial Sequence; identical to SEQ ID NO: 220744
  derived and/or modified CDS sequence (opt5) from neuraminidase__InfluenzaB__ABL77259

SEQ ID NO: 222577 - RNA, 1575 nt, Artificial Sequence
  derived and/or modified CDS sequence (opt5) from glycoprotein__RABV__AB009663.2
auggugccccaggcccugcuccuggucccuauccuuggcuucagccugugcuuugggaaguucccgauuuacaccauccccgacacacucggaccuuggucccccauugauauccaccaucugucuuguccuaacaaucuuguuguggaggacgaaggcugcacgaaccugagcggguuuuccuauauggagcucaaagugggauacaccucugcuauuaaggucaauggcuucacauguaccggggugguuacagaagccgagaccuauacaaacuuugugggauacgucaccacgaccuucaaaagaaagcacuuucggcccacaccugaugcgugccgcgcugccuauaauuggaaaauggccggcgacccgagauacgaagagagccugcauucccccuauccugauuaccacuggcugcggaccgugaagacaaccaaggagucucucguuaucaucagccccuccguggcugaccuggauccuuacgacaacagccuucauucucgcgucuuccccuccggcaaauguagcgggauuacgagaucuuccguguauugcagcacaaaucacgauuacaccguguggaugccggaaauccugcggcucggaacaucuugugacauuuuuaccaacucccgcggcaagagagucagcaaaggguccaccacaugcggauucaucgaugagcggggccuguauaagucucuuaaaggggccuguaagcugaagcucugcggaguucugggccugcgccucauggacggcacgugggugagcaugcaaaccuccaaugaaacaaaaugguguccucccaaccagcuggugaaucuucacgaucugagaagcgacgagcucgagcaucuggucauugaggaacuugugaagaaacgggaagagugccuggacgcucucgaaucuaucauuaccacaaaguccguuagcuuucgcagacugucucaucugcggaaacucgugccuggguucggaaaggccuacaccaucuuuaacaaaacgcugauggaggcggaggcccacuauaagagcguccgcacauggaaugaaaucauucccuccaagggcugccuuagaguugggggacggugucacccccacgugaacggcguguucuucaaugggaucauucugggaccugauggccauguccucaucccggagaugcagucuagccugcuucagcaacacauugaacugcucgaguccagcgugaucccccugaugcauccucuggcugaccccuuuaccgucuucaaagauggcgacgaaaccgaggauuuuaucgaggugcaccucccugacguucaugaacaggugucuggggucgaucugggacuucccaacuggggcaaguacgugcugcucuccgccgggacacugauugcucugguucuuaucauuuuccucaugaccugcuguagaaaaguggaccgcccggagagcacacagcggucucugagaggaacgggccgcaacgucuccgugaccagccaguccgggaaguuuaucaauucuugggaaagcuauaaauccggcggagagacaggccuguga

SEQ ID NO: 222578 - RNA, 1575 nt, Artificial Sequence
  derived and/or modified CDS sequence (opt5) from glycoprotein__RABV__AB044824.1
auggugccccaggcccugcuccuggucccuauccuuggcuucagcuccugcuuugggaaguucccgauuuacaccauccccgacacacugggaccuuggucucccauugauauccaccaucucagcuguccuaacaaucugguuguggaggacgaaggcugcacgaaccuuuccggguuuucuuauauggagcugaaagugggauacauuagcgcuaucaaggucaauggcuucaccuguacaggggugguuaccgaagccgagacauauaccaacuuugugggauacgucacaaccacguucaaaagaaagcacuuucggcccaccccugaugcgugccgcgcugccuauaauuggaaaauggccggcgacccgagauacgaagagucccuccauucucccuauccugauuaccacuggcugcggacagugaagaccacaaaggagagccugguuaucauuucccccagcguggcugaccucgauccuuacgacaacucucugcauucccgcgucuuccccagcggcaaauguucugggaucaccguguccagcguguauugcucuacgaaucacgauuacacagucuggaugccggaaucccuuagacugggaaccagcugugacauuuuuacaaacucccggggcaagcgcgccucuaaagggagcaagaccugcggauucguugaugagagaggccucuauaaaucccugaagggggcuuguaaacuuaagcugugcggagugcucggccugcggcugauggacggcaccuggguggccaugcaaacaagcaaugaaacgaagugguguccucccgaucagcucgucaaccugcacgaccuucgcucugacgagaucgagcaucuggugauugaggaacucguuaaaaagagagaagagugccuggaugcgcuugaauccaucauuaccacaaaaagcgugucuuuucggcgccugagcuaccucagaaagcuggucccuggguucggaaaagccuauaccaucuuuaauaagacacugauggaggcugaggcccacuacaaguccgugcggaccuggaacgaaaucauucccucuaaaggcugccuccgcguugggggaagaugucauccccacgugaauggcgucuucuucaacgggaucauucugggaccugacggccacgugcuuaucccggagaugcagagcucccugcuccagcaacauauugaacugcuugagagcucugucaucccccugaugcacccucucgcugaucccuuuacgguguucaaggacggcgaugaaacagaggacuuuaucgagguucaucugccugaugugcacgaacaggucuccgggguggaccugggacuccccaauuggggcgaguauguucugcuuagcgccgggacccugauugcgcucaugcugaucauuuuccugaugaccugcugucggaaaguggauagaccggaaucuacacagcgcucccuucggggaaccggcagaaacgucagcgugacaucccagucugggaaguuuaucccuagcugggaguccuacaaaucuggcggagaaacgggccucuga

SEQ ID NO: 222579 - RNA, 1575 nt, Artificial Sequence
  derived and/or modified CDS sequence (opt5) from glycoprotein__RABV__AB052666.1
augaucccccaggcccuucucuucgugccucugcuugucuuuagccugugcuucggcaaguuuccgauuuacaccauccccgacaaacucgggccuuggucccccauugauauccaccaucugucuuguccuaacaaucuuguuguggaggacgaaggaugcacaaaccugagcggcuucuccuauauggagcucaaggugggguacauuucugcuaucaaagucaauggauuuacguguaccggcgugguuacagaagccgagaccuauacaaacuucgugggguacgucaccacaaccuuuaagagaaaacacuuccggcccacgccugaugcgugccgcgcugccuauaauuggaagauggccggagacccgagauacgaagagagccugcauaaccccuauccugauuaccacuggcugcggaccgugaagacaaccaaagagucccucguuaucauuucucccagcguguccgaccuggauccuuacgacaagagccuucauucucgcgucuuucccuccggcaaauguagcggcaucacagugucuuccaccuauugcccgacgaaucacgauuacacaauuuggaugccugaaaaccccagacuggggaccagcugugacaucuucacaaauucucggggaaagcgcgcuuccaaaggcagcaagaccugcggguuuguggaugagagaggacucuauaagucccugaaaggcgccuguaagcugaaacugugcgggguccucggacugcggcugauggacggcaccugggcugccauucaaacaucugaugaaguuaagugguguccucccgaccagcucgugaacauccacgacuuccgcagcgaugagauugagcaucugguggucgaggaacuugugaaaaagagagaagagugccuggacgcgcucgaauccaucaugacgaccaaaagcguuucuuuucggcgccugucccaccuuagaaagcuggugcccggcuucgggaaggccuacacaaucuucaauaaaacccucauggaggcugaugcccauuauaagagcguccggacauggaacgagauuaucccuucuaaaggaugccugcgcgugggcgggagaugucacccgcacguuaauggaguguuuuucaacggcauuauccuggggcccgacggacauguccucauuccugaaaugcagagcucccugcuucagcaacacauggagcugcucgaaucuagcgugaucccccugaugcauccucuugcugaucccuccaccgucuuuaaggacggcgaugaggccgaagacuucguggagguucaucugccggaugugcacaaacaggucagcggcguggaccucgggcugccuucuuggggaaaguacguucugauguccgugggcgcgaugaucgcccucaugcugaugauuuuucuuaugacgugcugucggaaggcuaauggggccgagagcauccagcacagacugggagaaacaggccgcaaagucucugugaccucccagagcgggcgggugauuuccucuugggagagcuauaaguccggcggagaaaccaaacucuga

SEQ ID NO: 222580 - RNA, 1575 nt, Artificial Sequence
  derived and/or modified CDS sequence (opt5) from glycoprotein__RABV__AB085828.1
auggugccccagguccuccuguucgccccucugcuuguuagcccgcugugcuuuggcaaguuccccaucuacaccauuccugacaaacucgggcccugguccccuaucgaucugcaccaucuuucuugucccaacaaucuggugguggaggacgaaggaugcacaaaccucagcggcuuuuccuauauggagcugaaggucggguacauuucugcuaucaaagugaauggauucacguguaccggcguugugacagaagccgagaccuauacaaacuuugucggguacgugaccacaaccuucaagagaaaacacuuucggccuacgccggaugcgugccgcgcugccuauaauuggaagauggccggagaccccagauacgaagagagccugcauaacccuuaucccgauuaccacuggcuccggaccguuaagacaaccaaagagucccuggugauuaucucuccuagcgucacagaccuugaucccuacgacaagucccugcauagccgcguguucccgggcggcaauuguucugggaucaccguguccagcacguauugcucuacaaaccacgauuacaccauuuggaugccugaaaaucucagacugggaacauccugugacaucuuuacccacagccggggcaaacgcgcuucuaagggggauaaaaccugcggauucgucgacgagagaggccuuuauaagucccugaagggggccuguaaacucaagcugugcggaguucugggccuccggcugauggauggcacauggguggcuaugcaaacgagcgacgaaaccaaauggugucccccugggcagcuugugaaccugcaugacuuucgcuccgaugagauugagcaccucgucgaagaggaacuggugaagaaaagagaggaaugccuugacgcccuggagucuaucaugacaaccaagagcguuuccuuccggcgccucagccaucugagaaaacuggugcccggauuuggcaaggcguacacaauuuucaauaagacccucauggaggccgaugcucacuauaaaucuguccagacguggaacgaaaucauucccuccaaggggugccugcgggugggagagcgcugucacccucauguuaauggcguguucuuuaacgggaucauccuuggaagcgacggccacguccugauuccggaaaugcagucuagccuccugcaacagcauauggagcuucuggaauccucugugaucccccucaugcacccucuggccgaucccagcacagucuucaaagacggcgaugagguggaggacuuuguugaagugcaucugccugauguccacaaacagguguccgggguugaccucggacugcccaaguggggcaaguacgugcuuaugauugcuggggcccugaucgcgcucaugcugauuaucuuccugaugaccugcuguagacgggucaauagaccggagagcacccagucuaaccuuggaggcacagggcgcaacguguccgugccuagccaaucuggcaagguuaucuccagcugggaauccuauaaaucuggaggcgagacccggcucuga

SEQ ID NO: 222581 - RNA, 1575 nt, Artificial Sequence
  derived and/or modified CDS sequence (opt5) from glycoprotein__RABV__AB110656.1
auggugccccaggcccuucucuucgucccucugcuugcuuuuagcuucugcuuuggcaaguucccgaucuacaccauucccgacaaacuggggccuuggucccccaucgauauucaccaucucucuuguccuaacaaucugguuguggaggacgaaggaugcacaaaccuuagcggcuuuuccuauauggagcugaaggugggguacaucucugccauuaaagucaauggauucacguguaccggcgugguuacagaagcggagaccuauacaaacuuugugggguacgucaccacaaccuucaagagaaaacacuuucggcccacgccugaugcuugccgcagcgccuauaauuggaagauggccggagacccgagauacgaagagucccuccauaaccccuauccugauuaccacuggcugcggaccgugaagacaaccaaagagucucugguuaucaucagccccuccguggcugaccucgauccuuacgacaagagccugcauucucgcgucuuccccaauggcaaauguuccggcauuacagugagcucuaccuauugcuccacgaaccacgauuacacaaucuggcuuccggaaaauccuagacuggggaccagcugugacauuuuuacaaacucucggggaaagcgcgccuccaaaggcgggaagaccugcggauucguggaugagagaggccucuauaagagccugaaaggggcuuguaagcugaaacugugcggaguccucggccugcggcugauggacggcaccuggguugccaugcucacauccgaugaaacgaaguggugucccccugaccaacuggugaaucuucacgacuuucgcucugaugagaucgagcaucugguggucgaggaacucgugaaaaagagagaagagugccuggacgcgcuugaaagcauuaugaccacaaaauccguuagcuuccggcgccugucucaccucagaaagcuggugcccggguucggaaaggccuacaccaucuuuaacaaaacacugauggaggcugaugcccauuauaaguccauucggaccuggaaugagaucauccccagcaaaggcugccuccgcgucgggggaagaugucacccucacgugaacggcguuuucuuuaaugggauuauccugggaccggacggccaugugcuuauucccgaaaugcagucuagccugcuccagcagcacauggagcugcuugaauccucugucaucccucugaugcauccccucgcugauccuagcacgguguucaaggacggcgaugaggccgaagacuuugucgaggugcaucugcccgauguucacaaacaaguguccggggucgaccugggacucccgaacuggggcaaguacgugcugaugagcgcggggguucuuauugcccugaugcucacaaucuuccugaugaccugcugucggagagugaaccgcccugauucuacccagcggucccugggaaugacaggcagaaaggucagcgugaccucucaguccgggaaagugaucagcuccugggagucuuauaagagcggcggagaaacacgccuuuga

SEQ ID NO: 222582 - RNA, 1575 nt, Artificial Sequence
  derived and/or modified CDS sequence (opt5) from glycoprotein__RABV__AB110657.1
auggugccccaggcccuucucuucgucccucugcuugcuuuuagcuucugcuuuggcaaguucccgaucuacaccauucccgacaaacuggggccuuggucccccaucgauauucaccaucucucuuguccuaacaaucugguuguggaggacgaaggaugcacaaaccuuagcggcuuuuccuauauggagcugaaggugggguacaucucugccauuaaagucaauggauucacguguaccggcgugguuacagaagcggagaccuauacaaacuuugugggguacgucaccacaaccuucaagagaaaacacuuucggcccacgccugaugcuugccgcagcgccuauaauuggaagauggccggagacccgagauacgaagagucccuccauaaccccuauccugauuaccacuggcugcggaccgugaagacaaccaaagagucucugguuaucaucagccccuccguggcugaccucgauccuuacgacaagagccugcauucucgcgucuuccccaauggcaaauguuccggcauuacagugagcucuaccuauugcuccacgaaccacgauuacacaaucuggcuuccggaaaauccuagacuggggaccagcugugacauuuuuacaaacucucggggaaagcgcgccuccaaaggcgggaagaccugcggauucguggaugagagaggccucuauaagagccugaaaggggcuuguaagcugaaacugugcggaguccucggccugcggcugauggacggcaccuggguugccaugcaaacauccgaugaaacgaaguggugucccccugaccagcucgugaaucugcacgacuuucgcucugaugagaucgagcaucuuguggucgaggaacuggugaaaaagagagaagagugccucgacgcgcuggaaagcauuaugaccacaaaauccguuagcuuccggcgccuuucucaccugagaaagcucgugcccggguucggaaaggccuacaccaucuuuaacaaaacacugauggaggcugaugcccauuauaaguccauucggaccuggaaugagaucauccccagcaaaggcugccugcgcgucgggggaagaugucacccucacgugaacggcguuuucuuuaaugggauuauccucggaccggacggccaugugcugauucccgaaaugcagucuagccuucugcagcaacacauggagcuccuggaauccucugucaucccucuuaugcauccccuggcugauccuagcacgguguucaaggacggcgaugaggccgaagacuuugucgaggugcaccuccccgauguucauaaacagguguccggggucgaccugggacugccgaacuggggcaaguacgugcucaugagcgcggggguucugauugcccuuaugcugacaaucuuccucaugaccugcugucggagagugaaccgcccugauucuacccagcggucccugggaaugacaggcagaaaggucagcgugaccucucaguccgggaaagugaucagcuccugggagucuuauaagagcggcggagaaacacgccuguga

SEQ ID NO: 222583 - RNA, 1575 nt, Artificial Sequence
  derived and/or modified CDS sequence (opt5) from glycoprotein__RABV__AB110658.1
auggugccccaggcccuucucuucgucccucugcuugcuuuuagcuucugcuuuggcaaguucccgaucuacaccauucccgacaaacuggggccuuggucccccaucgauauucaccaucucucuuguccuaacaaucugguuguggaggacgaaggaugcacaaaccuuagcggcuuuuccuauauggagcugaaggugggguacaucucugccauuaaagucaauggauucacguguaccggcgugguuacagaagcggagaccuauacaaacuuugugggguacgucaccacaaccuucaagagaaaacacuuucggcccacgccugaugcuugccgcagcgccuauaauuggaagauggccggagacccgagauacgaagagucccuccauaaccccuauccugauuaccacuggcugcggaccgugaagacaaccaaagagucucugguuaucaucagccccuccguggcugaccucgauccuuacgacaagagccugcauucucgcgucuuccccaauggcaaauguuccggcauuacagugagcucuaccuauugcuccacgaaccacgauuacacaaucuggcuuccggaaaauccuagacuggggaccagcugugacauuuuuacaaacucucggggaaagcgcgccuccaaaggcagcaagaccugcggguucguggaugagagaggacucuauaagucccugaaaggcgcuuguaagcugaaacugugcgggguccucggacugcggcugauggacggcaccuggguugccaugcaaacaucugaugaaacgaagugguguagccccgaccagcucgugaaucugcacgacuuucgcuccgaugagaucgagcaucuuguggucgaggaacuggugaaaaagagagaagagugccucgacgcgcuggaaagcauuaugaccacaaaaucuguuuccuuccggcgccuuagccaccugagaaagcucgugccuggcuucgggaaggccuacaccaucuuuaacaaaacacugauggaggcugaugcccauuauaagucuauucggaccuggaaugagaucauccccagcaaaggaugccugcgcgucggcgggagaugucacccccacgugaacggaguuuucuuuaauggcauuauccucgggccugacggacaugugcugauuccggaaaugcaguccucucuucugcagcaacacauggagcuccuggaaagcuccgucaucccccuuaugcauccucuggcugaucccagcacgguguucaaggacggcgaugaggccgaagacuuugucgaggugcaccucccugauguucauaaacaggugucuggcgucgaccuggggcugcccaacuggggaaaguacgugcucauguccgcgggcguucugauugcccuuaugcugacaaucuuccucaugaccugcugucggagagugaaccgcccggauagcacccagcggucucuggggaugacaggaagaaaggucuccgugaccagccaguccggcaaagugaucucuagcugggaguccuauaagucugggggcgaaacacgccuguga

SEQ ID NO: 222584 - RNA, 1575 nt, Artificial Sequence
  derived and/or modified CDS sequence (opt5) from glycoprotein__RABV__AB110659.1
auggugccccaggcccuucucuucgucccucugcuugcuuuuagcuucugcuuuggcaaguucccgaucuacaccauucccgacaaacuggggccuuggucccccaucgauauucaccaucucucuuguccuaacaaucugguuguggaggacgaaggaugcacaaaccuuagcggcuuuuccuauauggagcugaaggugggguacaucucugccauuaaagucaauggauucacguguaccggcgugguuacagaagcggagaccuauacaaacuuugugggguacgucaccacaaccuucaagagaaaacacuuucggcccacgccugaugcuugccgcagcgccuauaauuggaagauggccggagacccgagauacgaagagucccuccauaaccccuauccugauuaccacuggcugcggaccgugaagacaaccaaagagucucugguuaucaucagccccuccguggcugaccucgauccuuacgacaagagccugcauucucgcgucuuccccaauggcaaauguuccggcauuacagugagcucuaccuauugcuccacgaaccacgauuacacaaucuggcuuccggaaaauccuagacuggggaccagcugugacauuuuuacaaacucucggggaaagcgcgccuccaaaggcagcaagaccugcggguucguggaugagagaggacucuauaagucccugaaaggcgcuuguaagcugaaacugugcgggguccucggacugcggcugauggacggcaccuggguugccaugcaaacaucugaugaaacgaaguggugucccccugaccagcucgugaaucugcacgacuuucgcagcgaugagaucgagcaucuuguggucgaggaacuggugaaaaagagagaagagugccucgacgcgcuggaauccauuaugaccacaaaaagcguuucuuuccggcgccuuucccaccugagaaagcucgugcccggcuucgggaaggccuacaccaucuuuaacaaaacacugauggaggcugaugcccauuauaagagcauucggaccuggaaugagaucauccccucuaaaggaugccugcgcgucggcgggagaugucacccucacgugaacggaguuuucuuuuacggcauuauccucgggccggacggacaugugcugauucccgaaaugcagagcucccuucugcagcaacacauggagcuccuggaaucuagcgucaucccucuuaugcauccccuggcugauccuuccacgguguucaaggacggcgaugaggccgaagacuuugucgaggugcaccuccccgauguucauaaacaggugagcggcgucgaccuggggcugccgaauuggggaaaguaugugcucaugucugcgggcguucugauugcccuuaugcugacaaucuuccucaugaccugcugucggagagugaaccgcccugauuccacccagcggagccuggggaugacaggaagaaaggucucugugaccucccagagcggcaaagugaucuccucuugggagagcuacaaguccgggggcgaaacacgccuguga

SEQ ID NO: 222585 - RNA, 1575 nt, Artificial Sequence
  derived and/or modified CDS sequence (opt5) from glycoprotein__RABV__AB110660.1
auggugccccaggcccuucucuucgucccucugcuugcuuuuagcuucugcuuuggcaaguucccgaucuacaccauucccgacaaacuggggccuuggucccccaucgauauucaccaucucucuuguccuaacaaucugguuguggaggacgaaggaugcgccaaccuuagcggcuuuuccuauauggagcugaaggugggguacaucucugcgauuaaagucaauggauucacauguacgggcgugguuaccgaagcugagacauauaccaacuuugugggguacgucacaaccacauucaagagaaaacacuuucggcccaccccugaugccugccgcagcgccuauaauuggaagauggcuggagacccgagauacgaagagucccuccauaaccccuauccugauuaccacuggcugcggacggugaagaccacaaaagagucucugguuaucaucagccccuccguggccgaccucgauccuuacgacaagagccugcauucucgcgucuuccccaauggcaaauguuccggcauuaccgugagcucuacauauugcuccaccaaccacgauuacacgaucuggcuuccggaaaauccuagacuggggacaagcugugacauuuuuaccaacucucggggaaagcgcgcuuccaaaggcgggaagacaugcggauucguggaugagagaggccucuauaagagccugaaaggggccuguaagcugaaacugugcggaguccucggccugcggcugauggacggcaccuggguugcgaugcaaaccuccgaugaaacaaaguggugucccccugaccagcucgugaaucugcacgacuuucgcucugaugagaucgagcaucuuguggucgaggaacuggugaaaaagagagaagagugccucgacgcccuggaaagcauuaugacgaccaaauccguuagcuuccgggggcuuucucaucugcgcaagcucgugcccggauucggcaaggcuuacacaaucuuuaacaaaacccugauggaggccgaugcucacuauaaguccauuagaacauggaaugagaucauccccagcaaagggugccugaccgucggaggccggugucacccucacgugaacgggguuuucuuuaauggaauuauccucggcccggacggccaugugcugauucccgaaaugcagucuagccuucugcagcaacacauggagcuccuggaauccucugucaucccucuuaugcauccccuggccgauccuagcacgguguucaaggacggggaugaggcggaagacuuugucgaggugcaccuccccgauguucauaaacagguguccggagucgaccugggccugccgaacugggggaaguacgugcucaugagcgccggaguucugauugcucuuaugcugacaaucuuccucaugaccugcugucgcagagugaacggcccugauucuacccagcggucccuggggaugacaggcagaaaggucagcgugaccucucaguccggaaaagugaucagcuccugggagucuuauaagagcggcggggaaacacgccuguga

SEQ ID NO: 222586 - RNA, 1575 nt, Artificial Sequence
  derived and/or modified CDS sequence (opt5) from glycoprotein__RABV__AB110661.1
auggugccccaggcccuucucuucgucccucugcuugcuuuuagcuucugcuuuggcaaguucccgaucuacaccauucccgacaaacuggggccuuggucccccaucgauauucaccaucucucuuguccuaacaaucugguuguggaggacgaaggaugcacaaaccuuagcggcuuuuccuauauggagcugaaggugggguacaucucugccauuaaagucaauggauucacguguaccggcgugguuacagaagcggagaccuauacaaacuuugugggguacgucaccacaaccuucaagagaaaacacuuucggcccacgccugaugcuugccgcagcgccuauaauuggaagauggccggagacccgagauacgaagagucccuccauaaccccuauccugauuaccacuggcugcggaccgugaagacaaccaaagagucucugguuaucaucagccccuccguggcugaccucgauccuuacgacaagagccugcauucucgcgucuuccccaauggcaaauguuccggcauuacagugagcucuaccuauugcuccacgaaccacgauuacacaaucuggcuuccggaaaauccuagacuggggaccagcugugacauuuuuacaaacucucggggaaagcgcgccuccaaaggcgggaagaccugcggauucguggaugagagaggccucuauaagagccugaaaggggcuuguaagcugaaacugugcggaguccucggccugacccugauggacggcacauggguugccaugcaaacguccgaugaaaccaaguggugucccccugaccagcucgugaaucugcacgacuuucggucugaugagaucgagcaucuuguggucgaggaacuggugaaaaagcgcgaagagugccucgacgcgcuggaaagcauuaugacaaccaaauccguuagcuucagacggcuuucucaucugcgcaagcucgugcccggguucggaaaggccuacacaaucuuuaacaaaacccugauggaggcugaugcccacuauaaguccauuagaacguggaaugagaucauccccagcaaaggcugccugcgggucgggggacgcugucacccucacgugaacggcguuuucuuucaugggauuauccucggaccggacggccacgugcugauucccgaaaugcagucuagccuucugcagcaacauauggagcuccuggaauccucugucaucccucuuaugcacccccuggcugauccuagcacaguguucaaggacggcgaugaggccgaagacuuugucgaggugcaucuccccgauguucacaaacagguguccggggucgaccugggacugccgaauuggggcaaguacgugcucaugagcgcggggguucugauugcccuuaugcugaccaucuuccucaugaccugcuguagacgggugaacagaccugauucuacacagcgcucccugggaaugaccggccggaaggucagcgugacaucucaguccgggaaagugaucagcuccugggagucuuauaagagcggcggagaaacgagacuguga

SEQ ID NO: 222587 - RNA, 1575 nt, Artificial Sequence
  derived and/or modified CDS sequence (opt5) from glycoprotein__RABV__AB110662.1
augauccugcaggcccuccuguucgugccccuucugauuagcucccucugccugggcaaguuuccuaucuacaccauuccggacaaacuugggcccuggucuccuaucgauauucaccaucugagcugucccaacaaucucgucguugaggacgaaggaugcacaaaccuguccggcuucucuuauauggagcugaaggugggguacaucagcgcuaucaaagugaauggauuuacguguaccggcgucgugacagaagccgagaccuauacaaacuucguuggguacgugaccacaaccuuuaagagaaaacacuuccggccuauucccgaugcgugccgcgcugccuauaauuggaagauggccggagacccuagauacgaagagucccuccaaaacccguaucccgauuaccauuggcugcggacggucaagaccacaaaagagucucuuaucauuaucagcccuuccguggcugaccuggaucccuacgacaagagccuccacucucgcguuuuuccuggcggcaaaugucuggggauuaccguguccagcacauauugcucuaccaaucaugauuacacgaucuggaugcccgaagaaccgagacuuggaacauccugugacauuuucaccagcucuaagggcaaaaaggccuccaaagggggaaagacaugcggcuuugucgaugaacgggggcuguauaagagccucaaaggagcuuguaagcugaaacugugcggcgugcucggccugcgccuuauggacgggaccuggguguccaucccuaccucugaugacacaaaguggugucccccugaccagcuggucaaccuccacgauuuccacagcgacgagaucgagcaucugguuguggaggagcuugugaaaaagagagaagagugccuggaugcccucgaauccauuaugacgaccaagagcgucucuuuucggcgccuguccuaccugagaaaacucgugcccggauucggcaaggcguauacaaucuuuaauaaaacccugauggaggccgacgcucacuacaagagcguucggacauggaacgagauuauccccucuaaagggugccuuaaggugcgcgaaagaugucauccuccggucgauggaguguucuucaauggcauuauccuggggcccgacggaaacguucucaucccugagaugcagagcucccugcuucagcaacacauggaacugcucgagucuagcgugauuccccugaugcacccucuggccgaucccuccaccgucuuuaaggaaggcgacgaggcugaggauuucguggaaguccaucucccggacgugcacaaacagaucagcggcguugaucuggggcuuccuucuuggggaaaguaucugcucaugauugccggcgggcuggcgacgcuggugcuuaucauuugcuccauggccuguugccggcgcacaaaaagaaccgagagccggagacgcggaucucgggaauccgagaagaaagucaccgcuacaccccagaccagaaaggugguuagcuccugggaacucuacaagucugagggcgacgcccgccuguga

SEQ ID NO: 222588 - RNA, 1575 nt, Artificial Sequence
  derived and/or modified CDS sequence (opt5) from glycoprotein__RABV__AB110663.1
augauccugcaggcccuccuguucgugccccuucugauuagcucccucugccugggcaaguuuccuaucuacaccauuccggacaaacuugggcccuggucuccuaucgauauucaccaucugagcugucccaacaaucucgucguugaggacgaaggaugcacaaaccuguccggcuucucuuauauggagcugaaggugggguacaucagcgcuaucaaagugaauggauuuacguguaccggcgucgugacagaagccgagaccuauacaaacuucguuggguacgugaccacaaccuuuaagagaaaacacuuccggccuauucccgaugcgugccgcgcugccuauaauuggaagauggccggagacccuagauacgaagagucccuccaaaacccguaucccgauuaccauuggcugcggacggucaagaccacaaaagagucucuuaucauuaucagcccuuccguggcugaccuggaucccuacgacaagagccuccacucucgcguuuuuccuggcggcaaaugucuggggauuaccguguccagcacauauugcucuaccaaucaugauuacacgaucuggaugcccgaagaaccgagacuuggaacauccugugacauuuucaccagcucuaagggcaaaaaggccuccaaagggggaaagacaugcggcuuugucgaugaacgggggcuguauaagagccucaaaggagcuuguaagcugaaacugugcggcgugcucggccugcgccuuauggacgggaccuggguguccauccagaccucugaugacacaaagugguguccucccgaccagcuggucaaccuccacgauuuccacagcgacgagaucgagcaucugguuguggaggagcuugugaaaaagagagaagagugccuggaugcccucgaauccauuaugacgaccaagagcgucucuuuucggcgccuguccuaccugagaaaacucgugccuggauucggcaaggcguauacaaucuuuaauaaaacccugauggaggccgacgcucacuacaagagcguucggacauggaacgagauuauccccucuaaagggugccuuaaggugcgcgaaagaugucaucccccugucgauggaguguucuucaauggcauuauccuggggccggacggaaacguucucauccccgagaugcagagcucccugcuucaacagcacauggaacugcucgagucuagcgugauuccucugaugcacccccuggccgauccuuccaccgucuuuaaggaaggcgacgaggcugaggauuucguggaaguccaucuccccgacgugcacaaacagaucagcggcguugaucuggggcuuccgucuuggggaaaguaucugcucaugauugccggcgggcuggcggcccuggugcuuaucauuugcuccauggcuuguugccggcgcacgaaaagaacagagagccggagacgcggaucuggcgaauccgagaagaaagucaccgccaccccucagacacggaaggugguuagcuccugggaacucuacaagucugagggggacgcuagacuguga

SEQ ID NO: 222589 - RNA, 1575 nt, Artificial Sequence
  derived and/or modified CDS sequence (opt5) from glycoprotein__RABV__AB110664.1
augauccugcaggcccuccuguucgugccccuucugauuagcucccucugccugggcaaguuuccuaucuacaccauuccggacaaacuugggcccuggucuccuaucgauauucaccaucugagcugucccaacaaucucgucguugaggacgaaggaugcacaaaccuguccggcuucucuuauauggagcugaaggugggguacaucagcgcuaucaaagugaauggauuuacguguaccggcgucgugacagaagccgagaccuauacaaacuucguuggguacgugaccacaaccuuuaagagaaaacacuuccggccuauucccgaugcgugccgcgcugccuauaauuggaagauggccggagacccuagauacgaagagucccuccaaaacccguaucccgauuaccauuggcugcggacggucaagaccacaaaagagucucuuaucauuaucagcccuuccguggcugaccuggaucccuacgacaagagccuccacucucgcguuuuuccuggcggcaaaugucuggggauuaccguguccagcacauauugcucuaccaaucaugauuacacgaucuggaugcccgaagaaccgagacuuggaacauccugugacauuuucaccagcucuaagggcaaaaaggccuccaaagggggacggacaugcggcuuugucgaugaacgcgggcuguauaagagccucaagggagcuuguaaacugaagcugugcggcgugcucggccugagacuuauggacgggaccuggguguccauccagaccucugaugacacaaaaugguguccucccgaccagcuggucaaccuccacgauuuccacagcgacgagaucgagcaucugguuguggaggagcuugugaagaaacgggaagagugccuggaugcccucgaauccauuaugacgaccaagagcgucucuuuucgcagacuguccuaccugcggaagcucgugccuggauucggcaaagcguauacaaucuuuaauaagacccugauggaggccgacgcucacuacaaaagcguucgcacauggaacgagauuauccccucuaaguggugccuuaaagugagagaacggugucaucccccugucgaugggguguucuucaauggaauuauccugggcccggacgggaacguucucauccccgagaugcagagcucccugcuucaacagcacauggaacugcucgagucuagcgugauuccucugaugcacccccuggccgauccuuccaccgucuuuaaggaaggagacgaggcugaggauuucguggaaguccaucuccccgacgugcacaagcagaucagcggcguugaucugggccuuccgucuugggggaaauaucugcucaugauugccggaggccuggcgacgcuggugcuuaucauuugcuccauggccuguugccgcagaacaaagcggaccgagagcagacgccgggggucuggagaauccgagaaaaaggucaccgcuacaccucagaccagaaaagugguuagcuccugggaacucuacaagucugagggcgacgcccgccuguga

SEQ ID NO: 222590 - RNA, 1575 nt, Artificial Sequence
  derived and/or modified CDS sequence (opt5) from glycoprotein__RABV__AB110665.1
augauccugcaggcccuccuguucgugccccuucugauuagcucccucugccugggcaaguuuccuaucuacaccauuccggacaaacuugggcccuggucuccuaucgauauucaccaucugagcugucccaacaaucucgucguugaggacgaaggaugcacaaaccuguccggcuucucuuauauggagcugaaggugggguacaucagcgcuaucaaaguguccggauuuacguguaccggcgucgugacagaagccgagaccuauacaaauuucguuggguacgugaccacaaccuuuaagagaaaacacuuccggccuauucccgaugcgugccgcgcugccuauaacuggaagauggccggagacccuagauacgaagagucucuccauaauccguaucccgauuaccacuggcugcggacggucaagaccacaaaagagagccuuaucauuaucuccccuagcguggcugaccuggaucccuacgacaagucucuccauucccgcguuuuuccuggcggcaaaugucuggggauuaccgugagcucuacauauugcuccaccaaccacgauuacacgaucuggaugcccgaagaaccgagacuuggaacaagcugugacauuuucaccucuuccaagggcaaaaaggccagcaaagggggaaagacaugcggcuuugucgaugaacgggggcuguauaagucccucaaaggagcuuguaagcugaaacugugcggcgugcucggccugcgccuuauggacgggaccugggugucuauccaaaccagcgauaauacaaagugguguccucccgaccagcuggucaaccuccacgacuuccauuccgaugagaucgagcaccugguuguggaggagcuugugaaaaagagagaagagugccuggacgcccucgaaagcauuaugacgaccaagucugucuccuuucggcgccugagcuaccugagaaaacucgugccuggauucggcaaggcguauacaaucuuuaauaaaacccugauggaggccgaugcucauuacaagucuguucggacauggaacgagauuauccccagcaaagggugccuuaaggugcgcgaaagaugucaucccccugucgacggaguguucuucaauggcauuauccuggggccggauggaaacguucucauccccgagaugcaguccucucugcuucagcaacacauggaacugcucgagagcuccgugauuccucugaugcacccccuggccgacccuagcaccgucuuuaaggaaggcgaugaggcugaggacuucguggaaguccaccuccccgaugugcauaaacagaucucuggcguugaccuggggcuuccguccuggggaaaguaucugcucaugauugccggcgggcuggcgacgcuggugcuuaucauuugcagcauggccuguugccggcgcacaaaaagaaccgagucucggagacgcggauccggcgaaagcgagaagaaagucaccgugacaccucagaccgggaagguuguguccucuugggaacucuacaagagcgagggcgaugcucggcuguga

SEQ ID NO: 222591 - RNA, 1575 nt, Artificial Sequence
  derived and/or modified CDS sequence (opt5) from glycoprotein__RABV__AB110666.1
augauccugcaggcccuccuguucgugcccuuucuuauuagcucccugugccucggcaaguucccuaucuacaccauuccggacaaacuggggcccuggucuccuaucgauauucaccaucuuagcugucccaacaaucuggucguugaggacgaaggaugcacaaaccucuccggcuuuucuuauauggagcugaaggugggguacaucagcgcuaucaaagugaauggauucacguguaccggcgucgugacagaagccgagaccuauacaaacuuuguuggguacgugaccacaaccuucaagagaaaacacuuucggccuauucccgaugcgugccgcgcugccuauaauuggaagauggccggagacccuagauacgaagagucccugcaaaacccguaucccgauuaccauuggcuccggacggucaagaccacaaaagagucucugaucauuaucagcccuuccguggcugaccuugaucccuacgacaagagccugcacucucgcguuuucccuggcggcaaaugucucgggauuaccguguccagcacauauugcucuaccaaucaugauuacacgaucuggaugcccgaagaaccgagacugggaacauccugugacauuuuuaccagcucuaagggcaaaaaggccuccaaagggggaaagacaugcggcuucgucgaugaacgggggcuuuauaagagccugaaaggagcuuguaagcucaaacugugcggcgugcugggccuccgccugauggacgggaccuggguguccaucccuaccucugaugacacaaaguggugucccccugaccagcuugucaaccugcacgauuuucacagcgacgagaucgagcaucucguuguggaggagcuggugaaaaagagagaagagugccuugaugcccuggaauccauuaugacgaccaagagcgucucuuuccggcgccucuccuaccugagaaaacuggugcccggauuuggcaaggcguauacaaucuucaauaaaacccucauggaggccgacgcucacuacaagagcguucggacauggaacgagauuauccccucuaaagggugccugaaggugcgcgaaagaugucauccuccggucgauggaguguucuuuaauggcauuauccuugggcccgacggaaacguucugaucccugagaugcagagcucccuccugcagcaacacauggaacuucuggagucuagcgugauuccccucaugcacccucuggccgaucccuccaccgucuucaaggaaggcgacgaggcugaggauuuuguggaaguccaucugccggacgugcacaaacagaucagcggcguugaucucgggcugccuucuuggggaaaguaucuucugaugauugccggcgggcucgcgacgcuggugcugaucauuugcuccauggccuguugccggcgcacaaaaagaaccgagagccggagacgcggaucuggcgaauccggggagaaggucaccacaacaccccagacccggaaagugguuagcuccugggaacuuuacaagucugagggcgacgcuagacucuga

SEQ ID NO: 222592 - RNA, 1575 nt, Artificial Sequence
  derived and/or modified CDS sequence (opt5) from glycoprotein__RABV__AB110667.1
augauccugcaggcccuccuguucgugccccuucugauuagcuccucuugccucggcaaguuuccuaucuacaccauuccggacaaacuggggcccuggagcccuaucgauauucaccaucuuuccugucccaacaaucuggucguugaggacgaaggaugcacaaaccucucuggcuucagcuauauggagcugaaggugggguacaucuccgcuaucaaagugaauggauuuacguguaccggcgucgugacagaagccgagaccuauacaaacuucguuggguacgugaccacaaccuuuaagagaaaacacuuccauccuauucccgaugcgugccgggcugccuauaauuggaagauggccggagacccucgcuacgaagagucucugcaaaacccguaucccgauuaccacuggcucagaacggucaagaccacaaaagagagccugaucauuaucuccccuagcguggcugaccuugaucccuacgacaagucucugcauucccggguuuuuccuggcggcaaaugucucgggauuaccgugagcucuacauauugcuccaccaaucacgauuacacgaucuggaugcccgaagaaccgcgccugggaacaagcugugacauuuucaccucuuccaagggcaaaaaggccagcaaagggggaaagacaugcggcuuugucgaugaaagagggcuuuauaagucccugaaaggagcuuguaagcucaaacugugcggcgugcugggccuccggcugauggacgggaccugggugucuauccagaccagcgaugacacaaagugguguccucccgaccagcuugucaaccugcacgauuuccauuccgacgagaucgagcaccucguuguggaggagcuggugaaaaagcgcgaagagugccuugaugcccuggaaagcauuaugacgaccaagucugucuccuuuagacggcucagcuaccugcgcaaacuggugccuggauucggcaaggcguauacaaucuuuaauaaaacccucauggaggccgacgcucauuacaagucuguuagaacauggaacgagauuauccccagcaaagggugccugaaggugcgggaacgcugucaucccccugucgauggaguguucuucaauggcauuauccuugggccggacggaaacguucugauccccgagaugcaguccucucuccugcaacagcacauggaacuucuggagagcuccgugauuccucucaugcacccccuggccgauccuagcaccgucuuuaaggaaggcgacgaggcugaggauuucguggaaguccaucugcccgacgugcacaaacagaucucuggcguugaucucgggcugccguccuggggaaaguaucuucugaugauugccggcgggcucgcgacgcuggugcugaucauuugcagcauggccuguugcagacggacaaaacgcaccgagucuagacggagaggauccggcgaaagcgggaagaaagcuaccgccacaccucagacccgcaaggucguguccucuugggagcuuuacaagagcgaaggcgacgcucggcucuga

SEQ ID NO: 222593 - RNA, 1575 nt, Artificial Sequence
  derived and/or modified CDS sequence (opt5) from glycoprotein__RABV__AB110668.1
augauccugcaggcccuccuguucgugccccuucugauuagcucccucugccugggcaaguuuccuaucuacaccauuccggacaaacuugggcccuggucuccuaucgauauucaccaucugagcugucccaacaaucucgucguugaggacgaaggaugcacaaaccuguccggcuucucuuauauggagcugaaggugggguacaucagcgcuaucaaagugaauggauuuacguguaccggcgucgugacagaagccgagaccuauacaaacuucguuggguacgugaccacaaccuuuaagagaaaacacuuccggccuauucccgaugcgugccgcgcugccuauaauuggaagauggccggagacccuagauacgaagagucccuccaaaacccguaucccgauuaccauuggcugcggacggucaagaccacaaaagagucucuuaucauuaucagcccuuccguggcugaccuggaucccuacgacaagagccuccacucucgcguuuuuccuggcggcaaaugucuggggauuaccguguccagcacauauugcucuaccaaucaugauuacacgaucuggaugcccgaagaaccgagacuuggaacauccugugacauuuucaccagcucuaagggcaaaaaggccuccaaagggggaaagacaugcggcuuugucgaugaacgggggcuguauaagagccucaaaggagcuuguaagcugaaacugugcggcgugcucggccugcgccuuauggacgggaccuggguguccauccagaccucugaugacacaaagugguguccucccgaccagcuggucaaccuccacgauuuccacagcgacgagaucgagcaucugguuguggaggagcuugugaaaaagagagaagagugccuggaugcccucgaauccauuaugacgaccaagagcgucucuuuucggcgccuguccuaccugagaaaacucgugccuggauucggcaaggcguauacaaucuuuaauaaaacccugauggaggccgacgcucacuacaagagcguucggacauggaacgagauuauccccucuaaagggugccuuaaggugcgcgaaagaugucaucccccugucgauggaguguucuucaauggcauuauccuggggccggacggaaacguucucauccccgagaugcagagcucccugcuucaacagcacauggaacugcucgagucuagcgugauuccucugaugcacccccuggccgauccuuccaccgucuuuaaggaaggcgacgaggcugaggauuucguggaaguccaucuccccgacgugcacaaacagaucagcggcguugaucuggggcuuccgucuuggggaaaguaucugcucaugauugccggcgggcuggcggcccuggugcuuaucauuugcuccauggcuuguugccggcgcacgaaaagaacaggaagccggagacgcggcucuggggaguccgaaaagaaagucaccgccaccccucagacacggaaggugguuagcuccugggagcucuacaagucugaaggcgacgcuagacuguga

SEQ ID NO: 222594 - RNA, 1575 nt, Artificial Sequence
  derived and/or modified CDS sequence (opt5) from glycoprotein__RABV__AB110669.1
augauccugcaggcccuccuguucgugccccuucugauuagcucccucugccugggcaaguuuccuaucuacaccauuccggacaaacuugggcccuggucuccuaucgauauucaccaucugagcugucccaacaaucucgucguugaggacgaaggaugcaccaaccuguccggcuucucuuauauggagcugaaggugggguacaucagcgcuaucaaagugaauggauuuacguguaccggcgucgugacagaagccgagaccuauacaaacuucguuggguacgugaccacaaccuuuaagagaaaacacuuccggccuauucccgaugcgugccgcgcugccuauaauuggaagauggccggagacccuagauacgaagagucccuccaaaacccguaucccgauuaccauuggcugcggacggucaagaccacaaaagagucucuuaucauuaucagcccuuccguggcugaccuggaucccuacgacaagagccuccacucucgcguuuuuccuggcggcaaaugucuggggauuaccguguccagcacauauugcucuaccaaucaugauuacacgaucuggaugcccgaagaaccgagacuuggaacauccugugacauuuucaccagcucuaagggcaaaaaggccuccaaagggggaaagacaugcggcuuugucgaugaacgggggcuguauaagagccucaaaggagcuuguaagcugaaacugugcggcgugcucggccugcgccuuauggacgggaccuggguguccauccagcacccugaugacaccaaguggugucccccugaccagcuggucaaccuccccgauuuccccucugacgagaucgagcaccugguucuugaggagcuggugaaaaagagagaagagugccucgaugcccuggaaagcauuaugacaacgaaguccgugagcuuucggcgccugucuuaccucagaaaacuggucccuggauucggcaaggcguauaccaucuuuaauaaaacacuuauggaggccgacgcucauuacaaguccgugcggaccuggaacgagauuaucccgagcaaagggugccugaagguucgcgaaagaugucaucccccuguggaugaggucuucuucaauggaauuauccucggccccgacgggaacgugcugaucccugaaaugcagucuagccuucugcaacagcacauggagcuccuggaauccucuguuauuccccugaugcacccgcucgccgauccuagcacaguguuuaaggagggagacgaggcugaagauuucgucgaggugcaucugcccgacguccacaaacagaucuccggcguggaucuuggccugccuagcugggggaaguaucuccugaugauugccggaggccuggcggcccuuguucucaucauuugcucuauggcuuguugccggcgcaccaaaagaacggaaucccggagacgcgggagcggagagucugaaaagaaagugacagccacaccccagaaucggaaggucguguccagcugggagcuguacaaguccgagggcgacgcuagacuguga

SEQ ID NO: 222595 - RNA, 1575 nt, Artificial Sequence
  derived and/or modified CDS sequence (opt5) from glycoprotein__RABV__AB128149.1
auggugccccaggcccugcuccuggucccuauccuuggcuucagcuccugcuuugggaaguucccgauuuacaccauccccgacacacugggaccuuggucucccauugauauccaccaucucagcuguccuaacaaucugguuguggaggacgaaggcugcacgaaccuuuccggguuuucuuauauggagcugaaagugggaagaauuagcgcuaucaaggucaauggcuucaccuguacaggggugguuaccgaagccgagacauacaccaacuuugugggauaugucacaaccacguucaaacggaagcacuuucgccccaccccugaugcgugcagagcugccuacaauuggaaaauggccggcgacccgcgguaugaagagucccuccauucucccuacccugauuaucacuggcugcgcacagugaagaccacaaaggagagccugguuaucauuucccccagcguggcugaccucgauccuuacgacaacucucugcauuccagagucuuccccagcggcaaauguucugggaucaccguguccagcguguacugcucuacgaaucacgauuauacagucuggaugccggaaauucuucggcugggaaccuccugugacaucuuuacaaacagccgcggcaagagagccuccaaagggucuaagaccugcggauucguugaugagcggggccucuacaaaagccugaagggggcuuguaaacuuaagcugugcggagugcucggccugcgccugauggacggcaccuggguggccaugcaaacauccaaugaaacgaagugguguccucccgaucagcucgucaaccugcacgaccuuagaagcgacgagauugagcaucuggugaucgaggaacucguuaaaaagcgggaagagugccuggaugcgcuugaaucuauuaucaccacaaaauccgugagcuuucgcagacugucuuaucuccggaagcuggucccuggguucggaaaagccuacaccaucuuuaauaagacacugauggaggcugaggcccacuauaagagcgugcgcaccuggaacgaaauuauccccuccaaaggcugccucagaguugggggacggugucauccccacgugaauggcgucuucuucaacgggauuauccugggaccugacggccacgugcuuauuccggagaugcagucuagccugcuccagcaacauaucgaacugcuugaguccagcgucaucccccugaugcacccucucgcugaucccuuuacgguguucaaggacggcgaugaaacagaggacuuuauugagguucaucugccugaugugcacgaacaggucucugggguggaccugggacuccccaauuggggcgaguacguucugcuuuccgccgggacccugaucgcgcucaugcugauuaucuuccugaugaccugcuguagaaaaguggaucgcccggaaagcacacagcggucucuuagaggaaccggccgcaacgucuccgugacaagccaguccgggaaguuuauuccuucuugggagagcuauaaauccggcggagaaacgggccucuga

SEQ ID NO: 222596 - RNA, 1575 nt, Artificial Sequence
  derived and/or modified CDS sequence (opt5) from glycoprotein__RABV__AB285215.1
auggugccccaggcccuucucuucgcuccucugcuugucuuuagccugugcuucggcaaguuuccgaucuacaccauucccgacaaacucgggccuuggucccccaucgauauucaccaucugucuuguccuaacaaucuuguuguggaggacgaaggaugcacaaaccugagcggcuucuccuauauggagcucaaggugggguacaucucugccauuaaagucaauggauuuacguguaccggcgugguuacagaagcggagaccuauacaaacuucgugggguacgucaccacaaccuuuaagagaaaacacuuccggcccaucccugaugcuugccgcgccgccuauaauuggaagauggcuggagacccgagauacgaagagagccugcauaaccccuauccugauuaccacuggcugcggacggugaagaccacaaaagagucccucguuaucauuucucccagcguggccgaccuggauccuuacgacaagucccuucauagccgcgucuuucccucuggcaaauguuccggcaucaccgugagcucuacauauugcuccaccaaucacgauuacacgauuuggaugccggaaaacccuagacuggggacaagcugugacaucuucaccaauucucggggaaagcgcgcuuccaaaggcgggaagacaugcggauuuguggaugagagaggccucuauaagagccugaaaggggccuguaagcugaaacugugcggaguccucggccugcggcugauggacggcaccuggguugcgaugcaaaccuccgaugaaacaaaguggugucccccugaccagcucgugaacaugcacgacuuccgcucugaugagauugagcaucugguggucgaggaacuugugaaaaagagagaagagugccuggacgcccucgaaagcaucaugacgaccaaauccguuagcuuucggcgccugucucaccuuagaaagcuggugcccggguucggaaaggcuuacacaauuuucaauaaaacccucauggaggccgaugcucauuauaaguccguccggacauggaacgagaucauccccagcaaaggcugccugcgcguugggggaagaugucacccucacgugaauggcguguuuuucaacgggauuauccugggaccggacggccauguccucauucccgaaaugcagucuagccugcuucagcaacacauggagcugcucgaauccucugugaucccucugaugcauccccuugccgauccuagcaccgucuuuaaggacggcgaugaggcggaagacuucguggagguucaucugcccgaugugcacaaacaggucuccgggguggaccucggacugccgaauuggggcaaguacguucugcucagcgccgggacgcugauugcucuuaugcugaucaucuuucucaugacaugcugucggagagugaaccgcccugagucuacccagcggucccugggaggcaccgggagaaaggucagcgugacaucucaguccggcaaagugauuagcuccugggaaucuuauaagagcggaggcgagacccgccuguga

SEQ ID NO: 222597 - RNA, 1575 nt, Artificial Sequence
  derived and/or modified CDS sequence (opt5) from glycoprotein__RABV__AB362483.1
auggugccccaggcccuucucuucgucccucugcuuguuuuuagccugugcuucggcaaguuuccgaucuacaccauucccgacaaacucgggccuuggucccccaucgauauucaccaucugucuuguccuaacaaucuugugguggaggacgaaggaugcacaaaccugagcggcuucuccuauauggagcucaaggucggguacaucucugcuauuaaagugaauggauuuacguguaccggcguugugacagaagccgagaccuauacaaacuucgucggguacgugaccacaaccuuuaagagaaaacacuuccggcccacgccugaugcgugccgcgcugccuauaauuggaagauggccggagacccgagauacgaagagagccugcauaaccccuauccugauuaccacuggcugcggaccguuaagacaaccaaagagucccucgugaucaucucucccagcgucgcugaccuggauccuuacgacaagucccuucauagccgcguguuucccucuggcaaauguuccggcauuacagugagcucuaccuauugcuccacgaaucacgauuacacaaucuggaugccggaaaacccuagacuggggaccagcugugacauuuucacaaauucucggggaaagcgcgccuccaaaggcagcaagaccugcggguuugucgaugagagaggacucuauaagucccugaaaggcgcuuguaagcugaaacugugcgggguucucggacugcggcugguggacggcaccuggaucgccaugcaaacaucugaugaaauuaaguggugucccccugaccagcucgugaaccugcacgacuuccgcagcgaugagaucgagcaucuugucguggaggaacugguuaaaaagagagaagagugccucgacgcgcuggaauccauugugacgaccaaaagcgucucuuuucggcgccuuucccaccugagaaagcucgugcccggcuucgggaaggccuacacaaucuucaauaaaacccugauggaggcugaugcccauuauaagagcauccggacauggaacgagauuauccccucuaaaggaugccugcgcguuggcgggagaugucacccucacgugaauggagucuuuuucaacggcauuauccucgggccggacggacaugugcugauucccgaaaugcagagcucccuucugcagcaacacauggagcuccuggaaucuagcgucgugccucuuaugcauccccuggcugauccuuccaccguuuuuaaggacggcgaugaggccgaagacuucaucgaggugcaccuccccgauguccauaaacaggugagcggcguugaccuggggcugccggauuggggaaaguacgugcucaugucugcgggcguccugaucgcccuuaugcugauuaucucccucaugacgugcuguagaggggugcaccggccuaauagcauucagcaccgccugggaggcacagggcggaaggugucuguuaccucccagagcggcaaagucaucuccucuugggagagcuauaaguccggaggcgaaaccagacuguga

SEQ ID NO: 222598 - RNA, 1575 nt, Artificial Sequence
  derived and/or modified CDS sequence (opt5) from glycoprotein__RABV__AB458799.1
auggugccccagguccugcuguucguuccucugcuuguguuuagcuccugcuucggcaaguuuccgaucuacaccauucccgacaaacuggggccuuggucucccaucgauauucaccaucucagcuguccuaacaaucugguggucgaggacgaaggaugcacaaaccuuuccggcuucucuuauauggagcugaaggugggguacaucagcgccauuaaaguuaauggauuuacguguaccggcguggucacagaagcugagaccuauacaaacuucgugggguacguuaccacaaccuuuaagagaaaacacuuccggcccaugccugaugccugccgcgcggcuuauaauuggaagauggccggagacccgagauacgaagagucccuccauaaccccuauccugauuaccacuggcugcggacggugaagaccacaaaagagucucuggucaucaucagccccuccguggccgaccucgauccuuacgacaagagccugcauucucgcguguuucccggcggcaaauguuccgggauuaccgucagcucuacaugcuguuccaccaaucacgauuauacgaucuggaugccggaaaacccuagacuuggaacaagcugcgacauuuucaccaauucucggggcaagcgcgcuuccaaagggggaaagacauguggcuuuguugaugagagagggcuguacaagagccucaaaggagccugcaagcugaaacuuuguggcgugcugggccuccggcugauggacgggaccuggguggcuauccaaaccuccgaugaaauuaaguggugcucucccgaccagcuggucaaccuccacgacuuccauagcgaugagaucgagcaccuggugguugaggaacuugugaaaaagcgcgaagagugccuggacgcccucgaaacaauuaugacgaccaaauccgucagcuuuagacggcugucucaucuucgcaagcuggugccuggauucggcaaggcguauacaaucuucaauaaaacccucauggaggccgaugcucacuacaaguccaucagaacauggaacgagauuauccccagcaaagggugucugcggguuggaggccgcugccacccccaugugaauggggucuuuuucaacggaauuauccugggcccugacggccacgugcucauuccggaaaugcagucuagccugcuucaucagcacauggagcugcucgaauccucugucaucccccugaugcauccucuugccgaucccagcaccguguuuaaggacggggaugaggcugaagacuucguugaggugcaccucccugauguccacaaacaaaucuccggaguggaccucggccugcccaauugggggaaguauguucugauuagcgccggagcgcucacggcccugaugcuuaugaucuuucugaugacauguugcagaaaggcuaaccgggccgagucuauucagcauaacccgggcgaaaccgggagaaaaguguccgucaccagccacaauggccgcgugaucucuuccugggagagcuacaaguccggaggcgaaacaaaacucuga

SEQ ID NO: 222599 - RNA, 1575 nt, Artificial Sequence
  derived and/or modified CDS sequence (opt5) from glycoprotein__RABV__AB458800.1
auggugccccaggcccuccuguucgucccucugcuugcuaucccgcugugcuuuggcaaguuccccauuuacaccaucccugacaaacucgggcccuggagcccuauugauauccaccaucuguccugucccaacaaucuuguuguggaggacgaaggaugcacaaaccugucuggcuuuagcuauauggagcucaaggugggguacauuuccgccaucaaagucaauggauucacguguaccggcgugguuacagaagcggagaccuauacaaacuuugugggguacgucaccacaaccuucaagagaaaacacuuucggccuacgccggaugcuugccgcucugccuauaauuggaagauggccggagaccccagauacgaagagagccugcauaacccuuaucccgauuaccacuggcugcggaccgugaagacaaccaaagaguccuucguuaucauuucuccuagcguggcugaccucgaucccuacgacaagucccugcauagccgcgucuuuccgagaggcaaauguucuggcaucacaguguccagcaccuauugcucuacgaaucacgauuacacaauuuggaugccugaaaacccccggcuugggaccuccugugacaucuucacaaauagccgcggaaagagagccucuaaaggcuccaagaccugcggguuuguggaugagcggggacuguauaagagccucaaaggcgcuuguaagcugaaacuuugcgggguccugggacuccgccugauggacggcaccuggguugccauucaaacauccgaugaaacgaagugguguccucccgaccagcuggugaaccuccacgacuuccauucugaugagaucgagcaccugguggucgaggaacuugugaaaaagagagaagagugccuggacgcgcucgaaagcauuaugaccacaaaauccguuagcuuucggcgccugucucaucuuagaaagcuggugcccggcuucgggaaggccuacaccaucuucaauaaaacacucauggaggcugaugcccacuauaaguccguccggaccuggaacgagaucauuccuagcaaaggaugccugcgcgugggcgggagaugucacccgcauguuaauggaguguuuuucaacggcaucauucuggggcccgacggacacguccucaucccugaaaugcagucuagccugcuucagcaacauauggagcugcucgaauccucugugauuccccugaugcacccucuugcugaucccagcacggucuuuaaggacggcgaugaggccgaagacuucguggagguucaucugccggaugugcacaaacaggucuccggcguggaccucgggcugccuagcuggggaaaguacguucugaugucugcgggcauccucacagcccugaugcuuaugaucuuucugaugaccugcugucggagaaccaaucgcgcugaguccauucagcacagccucggggaaacaggacggaaggugucugucaccucccagagcggcagagugaucuccucuugggagagcuauaaauccgggggcgaaacaaagcuguga

SEQ ID NO: 222600 - RNA, 1575 nt, Artificial Sequence; identical to SEQ ID NO: 222599
  derived and/or modified CDS sequence (opt5) from glycoprotein__RABV__AB458801.1

SEQ ID NO: 222601 - RNA, 1575 nt, Artificial Sequence; identical to SEQ ID NO: 222599
  derived and/or modified CDS sequence (opt5) from glycoprotein__RABV__AB458802.1

SEQ ID NO: 222602 - RNA, 1575 nt, Artificial Sequence; identical to SEQ ID NO: 222598
  derived and/or modified CDS sequence (opt5) from glycoprotein__RABV__AB458803.1

SEQ ID NO: 222603 - RNA, 1575 nt, Artificial Sequence
  derived and/or modified CDS sequence (opt5) from glycoprotein__RABV__AB458804.1
augaucccccaggugcugcuguucgucccucugcuuguuuuuagcuccugcuucggcaaguuuccgauuuacaccauccccgacaaacuggggccuuggucucccauugauauccaccaucucagcuguccuaacaaucuggugguggaggacgaaggaugcacaaaccuuuccggcuucucuuauauggagcugaaggucggguacauuagcgccaucaaagugaauggauuuacguguaccggcguugugacagaagcugagaccuauacaaacuucgucggguacgugaccacaaccuuuaagagaaaacacuuccggcccaugccugaugccugccgcgcggcuuauaauuggaagauggccggagacccgagauacgaagagucccuccauaaccccuauccugauuaccacuggcugcggacgguuaagaccacaaaagagucucuggugaucauuagccccuccgucgccgaccucgauccuuacgacaagagccugcauucucgcguguuucccggcggcaaauguuccgggaucaccgugagcucuacaugcuguuccaccaaucacgauuauacgauuuggaugccggaaaacccuagacuuggaacaagcugcgacaucuucaccaauucucggggcaagcgcgcuuccaaagggggaaagacauguggcuuugucgaugagagagggcuguacaagagccucaaaggagccugcaagcugaaacuuuguggcguucugggccuccggcugauggacgggaccuggguggcuauucaaaccuccgaugaaaucaaguggugcucucccgaccagcuggugaaccuccacgacuuccauagcgaugagauugagcaccuggucguggaggaacuuguuaaaaagcgcgaagagugccuggacgcccucgaaacaaucaugacgaccaaauccgugagcuuuagacggcugucucaucuucgcaagcuggucccuggauucggcaaggcguauacaaucuucaauaaaacccucauggaggccgaugcucacuacaaguccauuagaacauggaacgagaucauucccagcaaagggugucugcgggugggaggccgcugccacccccauguuaaugggguguuuuucaacggaaucauucugggcccugacggccacguccucaucccggaaaugcagucuagccugcuucaucagcacauggagcugcucgaauccucugugaucccccugaugcauccucuugccgaucccagcaccgucuuuaaggacggggaugaggcugaagacuucguggagguucaccucccugaugugcacaaacaaauuuccggagucgaccucggccugcccaauugggggaaguaugugcugacgagcgccggagcgcucacagcccugaugcuuaugaucuuucugaugaccuguugcagaaagaccaaccgggcugagucuauucagagauccccgggcgaaacagagcgcaaaguuagcgugaccucucauaacgggcgggucaucuccagcugggaauccuacaagucuggcggagagacaaaacucuga

SEQ ID NO: 222604 - RNA, 1575 nt, Artificial Sequence
  derived and/or modified CDS sequence (opt5) from glycoprotein__RABV__AB458805.1
auggugccccagguccugcuguucguuccucugcuuguguuuagcuccugcuucggcaaguuuccgaucuacaccauucccgacaaacuggggccuuggucucccaucgauauucaccaucucagcuguccuaacaaucugguggucgaggacgaaggaugcacaaaccuuuccggcuucucuuauauggagcugaaggugggguacaucagcgccauuaaaguuaauggauuuacguguaccggcguggucacagaagcugagaccuauacaaacuucgugggguacguuaccacaaccuuuaagagaaaacacuuccggcccacgccugaugccugccgcgcggcuuauaauuggaagauggccggagacccgagauacgaagagucccuccauaaccccuauccugauuaccacuggcugcggaccgugaagacaaccaaagagucucuggucaucaucagccccuccguggccgaccucgauccuuacgacaagagccugcauucucgcguguuucccggcggcaaauguuccgggauuacagucagcucuaccugcuguuccacgaaucacgauuauacaaucuggaugccggaaaacccuagacuuggaaccagcugcgacauuuucacaaauucucggggcaagcgcgcuuccaaagggggaaagaccuguggcuuuguugaugagagagggcuguacaagagccucaaaggagccugcaagcugaaacuuuguggcgugcugggccuccggcugauggacgggaccuggguggcuauccaaacauccgaugaaauuaaguggugcucucccgaccagcuggucaaccuccacgacuuccauagcgaugagaucgagcaccuggugguugaggaacuugugaaaaagcgcgaagagugccuggacgcccucgaaacgauuaugaccacaaaauccgucagcuuuagacggcugucucaucuucgcaagcuggugccuggauucggcaaggcguauaccaucuucaauaaaacacucauggaggccgaugcucacuacaaguccaucagaaccuggaacgagauuauccccagcaaagggugucugcggguuggaggccgcugccacccccaugugaauggggucuuuuucaacggaauuauccugggcccugacggccacgugcucauuccggaaaugcagucuagccugcuucaucagcacauggagcugcucgaauccucugucaucccccugaugcauccucuugccgaucccagcacgguguuuaaggacggggaugaggcugaagacuucguugaggugcaccucccugauguccacaaacaaaucuccggaguggaccucggccugcccaauugggggaaguauguucugauuagcgccggagcgcucacagcccugaugcuuaugaucuuucugaugaccuucuguagaaaggcuaaccgggccgagucuauucagcauaacccgggcgaaaccgggagaaaaguguccgucacaagccacaauggccgcgugaucucuuccugggagagcuacaaguccggaggcgaaaccaaacucuga

SEQ ID NO: 222605 - RNA, 1575 nt, Artificial Sequence; identical to SEQ ID NO: 222599
  derived and/or modified CDS sequence (opt5) from glycoprotein__RABV__AB458806.1

SEQ ID NO: 222606 - RNA, 1575 nt, Artificial Sequence
  derived and/or modified CDS sequence (opt5) from glycoprotein__RABV__AB496676.1
augauccugcaggcccuccuguucgugccccuucugauuagcucccucugccugggcaaguuuccuaucuacaccauuccggacaaacuugggcccuggucuccuaucgauauucaccaucugagcugucccaacaaucucgucguugaggacgaaggaugcacaaaccuguccggcuucucuuauauggagcugaaggugggguacaucagcgcuaucaaagugaauggauuuacguguaccggcgucgugacagaagccgagaccuauacaaacuucguuggguacgugaccacaaccuuuaagagaaaacacuuccggccuguccccgaugcgugccgcgcugccuauaauuggaagauggccggagacccuagauacgaagagucccuccaaaacccguaucccgauuaccauuggcugcggacggugaagaccacaaaagagucucuuauuaucauuagcccuuccguugcugaccuggaucccuacgacaagagccuccacucucgcguguuuccuggcggcaaaugucuggggaucaccgucuccagcacauauugcucuaccaaucaugauuacacgauuuggaugcccgaagaaccgagacuuggaacauccugugacaucuucaccagcucuaagggcaaaaaggccuccaaagggggaaagacaugcggcuuuguggaugaacgggggcuguauaagagccucaaaggagcuuguaagcugaaacugugcggcgugcucggccugcgccuuauggacgggaccugggucuccauucagaccucugaugacacaaagugguguccucccgaccagcugguuaaccuccacgauuuccacagcgacgagaucgagcaucuggugguggaggagcuugucaaaaagagagaagagugccuggaugcccucgaauccaucaugacgaccaagagcgugucuuuucggcgccuguccuaccugagaaaacucguuccuggauucggcaaggcguauacaauuuuuaauaaaacccugauggaggccgacgcucacuacaagagcgugcggacauggaacgagaucauucccucuaaagggugccuuaagguccgcgaaagaugucaucccccuguggauggaguuuucuucaauggcaucauucuggggccggacggaaacgugcucauccccgagaugcagagcucccugcuucaacagcacauggaacugcucgagucuagcgucaucccucugaugcacccccuggccgauccuuccaccguguuuaaggaaggcgacgaggcugaggauuucgucgaagugcaucuccccgacguucacaaacagauuagcggcguggaucuggggcuuccgucuuggggaaaguaucugcucaugaucgccggcgggcuggcggcccugguccuuauuaucugcuccauggcuuguugccggcgcacgaaaagaacagagagccggagacgcggaucuggcgaauccgagaagaaaguggccgcuaccccucagacccggaagguuauuagcuccugggaacucuacaagucugagggggacgccagacuguga

SEQ ID NO: 222607 - RNA, 1575 nt, Artificial Sequence
  derived and/or modified CDS sequence (opt5) from glycoprotein__RABV__AB496677.1
augauccugcaggcccuccuguucgugccccuucugauuagcucccucugccugggcaaguuuccuaucuacaccauuccggacaaacuugggcccuggucuccuaucgauauucaccaucugagcugucccaacaaucucgucguugaggacgaaggaugcacaaaccuguccggcuucucuuauauggagcugaaggugggguacaucagcgcuaucaaagugaauggauuuacguguaccggcgucgugacagaagccgagaccuauacaaacuucguuggguacgugaccacaaccuuuaagagaaaacacuuccggccuguccccgaugcgugccgcgcugccuauaauuggaagauuacgggagacccuagauacgaagagucccuccaaaacccguaucccgauuaccauuggcugcggaccgugaagacaaccaaagagucucuuaucauuaucagcccuuccguugccgaccuggaucccuacgacaagagccuccacucucgcguguuuccuggcggcaaaugucuggggauuacagucuccagcaccuauugcucuacgaaucaugauuacacaaucuggaugcccgaagaaccgagacuuggaaccuccugugacauuuucacaagcucuaagggcaaaaaggcuuccaaagggggaaagaccugcggcuuuguggaugaacgggggcuguauaagagccucaaaggagccuguaagcugaaacugugcggcgugcucggccugcgccuuauggacgggaccugggucuccauccagacaucugaugacacgaagugguguccucccgaccagcugguuaaccuccacgauuuccacagcgacgagaucgagcaucuggugguggaggagcuugucaaaaagagagaagagugccuggaugcucucgaauccauuaugaccacaaagagcgugucuuuucggcgccuguccuaccugagaaaacucguuccuggauucggcaaggccuauaccaucuuuaauaaaacacugauggaggcggacgcccacuacaagagcgugcggaccuggaacgagauuauccccucuaaagggugccuuaagguccgcgaaagaugucaucccccuguggauggaguuuucuucaauggcauuauccuggggccggacggaaacgugcucauccccgagaugcagagcucccugcuucaacagcacauggaacugcucgagucuagcgucauuccucugaugcacccccuggcugauccuuccacgguguuuaaggaaggcgacgaggccgaggauuucgucgaagugcaucuccccgacguucacaaacagaucagcggcguggaucuggggcuuccgucuuggggaaaguaucugcucaugauugcuggcgggcuggccgcgcugguccuuaucauuugcuccauggccuguugccggcgcacaaaaagaaccgagagccggagacgcggaucuggcgaauccgagaagaaagugaccgcuacaccucagacccggaagguugugagcuccugggaacucuacaagucugagggggacgccagacuguga

SEQ ID NO: 222608 - RNA, 1575 nt, Artificial Sequence
  derived and/or modified CDS sequence (opt5) from glycoprotein__RABV__AB496678.1
augauccugcaggcccuccuguucgugccccuucugauuagcucccucugccugggcaaguuuccuaucuacaccauuccggacaaacuugggcccuggucuccuaucgauauucaccaucugagcugucccaacaaucucgucguugaggacgaaggaugcacaaaccuguccggcuucucuuauauggagcugaaggugggguacaucagcgcuaucaaagugaauggauuuacguguaccggcgucgugacagaagccgagaccuauacaaacuucguuggguacgugaccacaaccuuuaagagaaaacacuuccggccuaugcccgaugcgugccgcgcugccuauaauuggaagaugacgggagacccuagauacgaagagucccuccaaaacccguaucccgauuaccauuggcugcggaccgucaagacaaccaaagagucucuuauuaucauuagcccuuccguggccgaccuggaucccuacgacaagagccuccacucucgcguuuuuccuggcggcaaaugucuggggaucacaguguccagcaccuauugcucuacgaaucaugauuacacaauuuggaugcccgaagaaccgagacuuggaaccuccugugacaucuucacaagcucuaagggcaaaaaggcuuccaaagggggaaagaccugcggcuuugucgaugaacgggggcuguauaagagccucaaaggagccuguaagcugaaacugugcggcgugcucggccugcgccuuauggacgggaccuggguguccauucagacaucugaugacacgaagugguguccucccgaccagcuggucaaccuccacgauuuccacagcgacgagaucgagcaucugguuguggaggagcuugugaaaaagagagaagagugccuggaugcucucgaauccaucaugaccacaaagagcgucucuuuucggcgccuguccuaccugagaaaacucgugccuggauucggcaaggccuauaccauuuuuaauaaaacacugauggaggcggacgcccacuacaagagcguucggaccuggaacgagaucauucccucuaaagggugccuuaaggugcgcgaaagaugucaucccccugucgauggaguguucuucaauggcaucauucuggggccggacggaaacguucucauccccgagaugcagagcucccugcuucaacagcacauggaacugcucgagucuagcgugaucccucugaugcacccccuggcugauccuuccacggucuuuaaggaaggcgacgaggccgaggauuucguggaaguccaucuccccgacgugcacaaacagauuagcggcguugaucuggggcuuccgucuuggggaaaguaucugcucaugaucgcuggcgggcuggccgcgcuggugcuuauuaucugcuccauggccuguugccggcgcacaaaaagaaccgagagccggagacgcggaucuggcgaauccgagaagaaagucaccgcuacaccucagacccggaaggugguuagcuccugggaacucuacaagucugagggggacgccagacuguga

SEQ ID NO: 222609 - RNA, 1575 nt, Artificial Sequence
  derived and/or modified CDS sequence (opt5) from glycoprotein__RABV__AB496679.1
augauccugcaggcccuccuguucgugccccuucugauuagcucccucugccugggcaaguuuccuaucuacaccauuccggacaaacuugggcccuggucuccuaucgauauucaccaucugagcugucccaacaaucucgucguugaggacgaaggaugcacaaaccuguccggcuucucuuauauggagcugaaggugggguacaucagcgcuaucaaagugaauggauuuacguguaccggcgucgugacagaagccgagaccuauacaaacuucguuggguacgugaccacaaccuuuaagagaaaacacuuccggccuauucccgaugcgugccgcgcugccuauaauuggaagauggccggagacccuagauacgaagagucccuccaaaacccguaucccgauuaccauuggcugcggacggucaagaccacaaaagagucucuuaucauuaucagcccuuccguggcugaccuggaucccuacgacaagagccuccacucucgcguuuuuccuggcggcaaaugucuggggauuaccguguccagcacauauugcucuaccaaucaugauuacacgaucuggaugcccgaagaaccgagacuuggaacauccugugacauuuucaccagcucuaagggcaaaaaggccuccaaagggggaaagacaugcggcuuugucgaugaacgggggcuguauaagagccucaaaggagcuuguaagcugaaacugugcggcgugcucggccugcgccuuauggacgggaccuggguguccauccagaccucugaugacacaaagugguguccucccgaccagcuggucaaccuccacgauuuccacagcgacgagaucgagcaucugguuguggaggagcuugugaaaaagagagaagagugccuggaugcccucgaauccauuaugacgaccaagagcgucucuuuucggcgccuguccuaccugagaaaacucgugccuggauucggcaaggcguauacaaucuuuaauaaaacccugauggaggccgacgcucacuacaagagcguucggacauggaacgagauuauccccucuaaagggugccuuaaggugcgcgaaagaugucaucccccugucgauggaguguucuucaauggcauuauccuggggccggacggaaacguucucauccccgagaugcagagcucccugcuucaacagcacauggaacugcucgagucuagcgugauuccucugaugcacccccuggccgauccuuccaccgucuuuaaggaaggcgacgaggcugaggauuucguggaaguccaucuccccgacgugcacaaacagaucagcggcguugaucuggggcuuccgucuuggggaaaguaucugcucaugauugccggcgggcuggcggcccuggugcuuaucauuugcuccauggcuuguugccggcgcacgaaacagacagagagcagacggagaggaucuggcgaauccgagaagaaagucaccgccaccccucaaacaaagaaggugguuagcuccugggaacucuacaaaucugagggggacgcucgccuguga

SEQ ID NO: 222610 - RNA, 1575 nt, Artificial Sequence
  derived and/or modified CDS sequence (opt5) from glycoprotein__RABV__AB496680.1
augauccugcccgcccuccuguucgugccucuucugauuagcucccucugccugggcaaguuuccgaucuacaccauucccgacaaacuugggccuuggucucccaucgauauucaccaucugagcuguccuaacaaucucgucguugaggacgaaggaugcacaaaccuguccggcuucucuuauauggagcugaaggugggguacaucagcgcuaucaaagugaauggauuuacguguaccggcgucgugacagaagccgagaccuauacaaacuucguuggguacgugaccacaaccuuuaagagaaaacacuuccggcccauuccugaugcgugccgcgcugccuauaauuggaagauggccggagacccgagauacgaagagucccuccagaaccccuauccugauuaccauuggcugcggacggucaagaccacaaaagagucucuuaucauuaucagccccuccguggcugaccuggauccuuacgacaagagccuccacucucgcguuuuucccggcggcaaaugucuggggauuaccguguccagcacauauugcucuaccaaucaugauuacacgaucuggaugccggaagaaccuagacuuggaacauccugugacauuuucaccagcucuaagggcaaaaaggccuccaaagggggaaagacaugcggcuuugucgaugaacgggggcuguauaagagccucaaaggagcuuguaagcugaaacugugcggcgugcucggccugcgccuuauggacgggaccuggguguccauccaaaccucugaugacacaaaguggugucccccugaccagcuggucaaccuccacgauuuccacagcgacgagaucgagcaucugguuguggaggagcuugugaaaaagagagaagagugccuggaugcccucgaauccauuaugacgaccaagagcgucucuuuucggcgccuguccuaccugagaaaacucgugcccggauucggcaaggcguauacaaucuuuaauaaaacccugauggaggccgacgcucacuacaagagcguucggacauggaacgagauuauccccucuaaagggugccuuaaggugcgcgaaagaugucauccuccggucgauggaguguucuucaauggcauuauccuggggcccgacggaaacguucucaucccugagaugcagagcucccugcuucagcaacacauggaacugcucgagucuagcgugauuccccugaugcacccucuggccgaucccuccaccgucuuuaaggaaggcgacgaggcugaggauuucguggaaguccaucucccggacgugcacaaacagaucagcggcguugaucuggggcuuccuucuuggggaaaguaucugcucaugauugccggcgggcuggcgacgcuggugcuuaucauuugcuccauggccuguugccggcgcacaaaaagaaccgagagccggagacgcggaucuggcgaauccgagaagaaagucaccgcuacaccccagacccggaaggugguuagcuccugggaacucuacaagucugagggggacgccagacuguga

SEQ ID NO: 222611 - RNA, 1575 nt, Artificial Sequence
  derived and/or modified CDS sequence (opt5) from glycoprotein__RABV__AB496681.1
augauccugcaggcccuccuguucgugccccuucugauuagcucccucugccugggcaaguuuccuaucuacaccauuccggacaaacuugggcccuggucuccuaucgauauucaccaucugagcugucccaacaaucucgucguugaggacgaaggaugcacaaaccuguccggcuucucuuauauggagcugaaggugggguacaucagcgcuaucaaagugaauggauuuacguguaccggcgucgugacagaagccgagaccuauacaaacuucguuggguacgugaccacaaccuuuaagagaaaacacuuccggccuauucccgaugcgugccgcgcugccuauaauuggaagauggccggagacccuagauacgaagagucccuccaaaacccguaucccgaguaccauuggcugcggacggucaagaccacaaaagaaucucuuaucauuaucagcccuuccguggcugaucuggaccccuacgauaagagccuccacucucgcguuuuuccuggcggcaaaugucuggggauuaccguguccagcacauauugcucuaccaaucaugacuacacgaucuggaugcccgaggaaccgagacuuggaacauccugugauauuuucaccagcucuaagggcaaaaaggccuccaaagggggaaagacaugcggcuuugucgacgagcgggggcuguauaagagccucaaaggagcuuguaagcugaaacugugcggcgugcucggccugcgccuuauggaugggaccuggguguccauccagaccucugacgauacaaagugguguccucccgaccagcuggucaaccuccacgacuuccacagcgaugagaucgaacaucugguuguggaggaacuugugaaaaagagagaggaaugccuggacgcccucgaguccauuaugacgaccaagagcgucucuuuucggcgccuguccuaccugagaaaacucgugccuggauucggcaaggcguauacaaucuuuaauaaaacccugauggaggccgaugcucacuacaagagcguucggacauggaacgaaauuauccccucuaaagggugccuuaaggugcgcgagagaugucaucccccugucgacggaguguucuucaauggcauuauccuggggccggauggaaacguucucauccccgaaaugcagagcucccugcuucaacagcacauggagcugcucgaaucuagcgugauuccucugaugcacccccuggccgacccuuccaccgucuuuaaggagggcgaugaggcugaagacuucguggagguccaucuccccgaugugcacaaacagaucagcggcguugaccuggggcuuccgucuuggggaaaguaucugcucaugauugccggcgggcuggcgacgcuggugcuuaucauuugcuccauggccuguugccggcgcacaaaaagaaccgaaagccggagacgcggaucuggcgaguccgaaaagaaugucaccgcuacaccucagacccggaaagugguuagcuccugggagcucuacaagucugagggggaugccagacuguga

SEQ ID NO: 222612 - RNA, 1575 nt, Artificial Sequence
  derived and/or modified CDS sequence (opt5) from glycoprotein__RABV__AB496682.1
augauccugcaggcccuccuguucgugccccuucugauuagcuccucuugccucggcaaguuuccuaucuacaccauuccggacaaacuggggcccuggagcccuaucgauauucaccaucuuuccugucccaacaaucuggucguugaggacgaaggaugcacaaaccucucuggcuucagcuauauggagcugaaggugggguacaucuccgcuaucaaagugaauggauuuacguguaccggcgucgugacagaagccgagaccuauacaaacuucguuggguacgugaccacaaccuuuaagagaaaacacuuccggccuauucccgaugcgugccgcgcugccuauaauuggaagauggccggagacccuagauacgaagagucucugcaaaacccguaucccgauuaccauuggcuccggacggucaagaccacaaaagagagccugaucauuaucuccccuagcguggcugaccuugaucccuacgacaagucucugcacucccgcguuuuuccuggcggcaaaugucucgggauuaccgugagcucuacauauugcuccaccaaucaugauuacacgaucuggaugcccgaagaaccgagacugggaacaagcugugacauuuucaccucuuccaagggcaaaaaggccagcaaagggggaaagacaugcggcuuugucgaugaacgggggcuuuauaagucccugaaaggagcuuguaagcucaaacugugcggcgugcugggccuccgccugauggacgggaccugggugucuauccagaccagcgaugacacaaagugguguccucccgaccagcuugucaaccugcacgauuuccacuccgacgagaucgagcaucucguuguggaggagcuggugaaaaagagagaagagugccuugaugcccuggaaagcauuaugacgaccaagucugucuccuuucggcgccucagcuaccugagaaaacuggugccuggauucggcaaggcguauacaaucuuuaauaaaacccucauggaggccgacgcucacuacaagucuguucggacauggaacgagauuauccccagcaaagggugccugaaggugcgcgaaagaugucaucccccugucgauggaguguucuucaauggcauuauccuugggccggacggaaacguucugauccccgagaugcaguccucucuccugcaacagcacauggaacuucuggagagcuccgugauuccucucaugcacccccuggccgauccuagcaccgucuuuaaggaaggcgacgaggcugaggauuucguggaaguccaucugcccgacgugcacaaacagaucucuggcguugaucucgggcugccguccuggggaaaguaucuucugaugauugccggcgggcucgcgacgcuggugcugaucauuugcagcgucgccuguugccggcgcacaaaaagaaccgagucucggagacgcggauccggcgaaagcgggaagaaagugaccacaaccccucagacacggaagguuguguccucuugggagcuuuacaagagcgaaggcgacgcuagacucuga

SEQ ID NO: 222613 - RNA, 1575 nt, Artificial Sequence
  derived and/or modified CDS sequence (opt5) from glycoprotein__RABV__AB496683.1
augauccugcaggcccuccuguucgugccccuucugauuagcucccucugccugggcaaguuuccuaucuacaccauuccggacaaacuugggcccuggucuccuaucgauauucaccaucugagcugucccaacaaucucgucguugaggacgaaggaugcacaaaccuguccggcuucucuuauauggagcugaaggugggguacaucagcgcuaucaaagugaauggauuuacguguaccggcgucgugacagaagccgagaccuauacaaacuucguuggguacgugaccacaaccuuuaagagaaaacacuuccggccuguccccgaugcgugccgcgcugccuauaauuggaagauggccggagacccuagauacgaagagucccuccaaaacccguaucccgauuaccauuggcugcggacggugaagaccacaaaagagucucuuauuaucauuagcccuuccguugcugaccuggaucccuacgacaagagccuccacucucgcguguuuccuggcggcaaaugucuggggaucaccgucuccagcacauauugcucuaccaaucaugauuacacgauuuggaugcccgaagaaccgagacuuggaacauccugugacaucuucaccagcucuaagggcaaaaaggccuccaaagggggaaagacaugcggcuuuguggaugaacgggggcuguauaagagccucaaaggagcuuguaagcugaaacugugcggcgugcucggccugcgccuuauggacgggaccugggucuccauucagaccucugaugacacaaagugguguccucccgaccagcugguuaaccuccacgauuuccacagcgacgagaucgagcaucuggugguggaggagcuugucaaaaagagagaagagugccuggaugcccucgaauccaucaugacgaccaagagcgugucuuuucggcgccuguccuaccugagaaaacucguuccuggauucggcaaggcguauacaauuuuuaauaaaacccugauggaggccgacgcucacuacaagagcgugcggacauggaacgagaucauucccucuaaagggugccuuaagguccgcgaaagaugucaucccccuguggauggaguuuucuucaauggcaucauucuggggccggacggaaacgugcucauccccgagaugcagagcucccugcuucaacagcacauggaacugcucgagucuagcgucaucccucugaugcacccccuggccgauccuuccaccguguuuaaggaaggcgacgaggcugaggauuucgucgaagugcaucuccccgacguucacaaacagauuagcggcguggaucuggggcuuccgucuuggggaaaguaucugcucaugaucgccggcgggcuggcggcccugguccuuauuaucugcuccauggcuuguugccggcgcacgaaaagaacagagagccggagacgcggaucuggcgaauccgagaagaaagugaccgccaccccucagacacggaagguugugagcuccugggaacucuacaagucugagggggacgcuagacuguga

SEQ ID NO: 222614 - RNA, 1575 nt, Artificial Sequence
  derived and/or modified CDS sequence (opt5) from glycoprotein__RABV__AB496684.1
augauccugcaggcccuccuguucgugccccuucugauuagcucccucugccugggcaaguuuccuaucuacaccauuccggacaaacuugggcccuggucuccuaucgauauucaccaucugagcugucccaacaaucucgucguugaggacgaaggaugcacaaaccuguccggcuucucuuauauggagcugaaggugggguacaucagcgcuaucaaagugaauggauuuacguguaccggcgucgugacagaagccgagaccuauacaaacuucguuggguacgugaccacaaccuuuaagagaaaacacuuccggccuauucccgaugcgugccgcgcugccuauaauuggaagauggccggagacccuagauacgaagagucccuccaaaacccguaucccgauuaccauuggcugcggacggucaagaccacaaaagagucucuuaucauuaucagcccuuccguggcugaccuggaucccuacgacaagagccuccacucucgcguuuuuccuggcggcaaaugucuggggauuaccguguccagcacauauugcucuaccaaucaugauuacacgaucuggaugcccgaagaaccgagacuuggaacauccugugacauuuucaccagcucuaagggcaaaaaggccuccaaagggggaaagacaugcggcuuugucgaugaacgggggcuguauaagagccucaaaggagcuuguaagcugaaacugugcggcgugcucggccugcgccuuauggacgggaccuggguguccauccagaccucugaugacacaaagugguguccucccgaccagcuggucaaccuccacgauuuccacagcgacgagaucgagcaucugguuguggaggagcuugugaaaaagagagaagagugccuggaugcccucgaauccauuaugacgaccaagagcgucucuuuucggcgccuguccuaccugagaaaacucgugccuggauucggcaaggcguauacaaucuuuaauaaaacccugauggaggccgacgcucacuacaagagcguucggacauggaacgagauuauccccucuaaagggugccuuaaggugcgcgaaagaugucaucccccugucgauggaguguucuucaauggcauuauccuggggccggacggaaacguucucauccccgagaugcagagcucccugcuucaacagcacauggaacugcucgagucuagcgugauuccucugaugcacccccuggccgauccuuccaccgucuuuaaggaaggcgacgaggcugaggauuucguggaaguccaucuccccgacgugcacaaacagaucagcggcguugaucuggggcuuccgucuuggggaaaguaucugcucaugauugccggcgggcuggcggcccuggugcuuaucauuugcuccauggcuuguugccggcgcacgaaaagaacagagagccggagacgcggaucuggcgaauccgagaagaaagucaccgccgcuccucagacccggaaggugguuagcuccugggaacucuacaagucugagggggacgccagacuguga

SEQ ID NO: 222615 - RNA, 1575 nt, Artificial Sequence
  derived and/or modified CDS sequence (opt5) from glycoprotein__RABV__AB496685.1
augauccugcaggcccuccuguucgugccccuucugauuagcucccucugccugggcaaguuuccuaucuacaccauuccggacaaacuugggcccuggucuccuaucgauauucaccaucugagcugucccaacaaucucgucguugaggacgaaggaugcacaaaccuguccggcuucucuuauauggagcugaaggugggguacaucagcgcuaucaaagugaauggauuuacguguaccggcgucgugacagaagccgagaccuauacaaacuucguuggguacgugaccacaaccuuuaagagaaaacacuuccggccuauucccgaugcgugccgcgcugccuauaauuggaagauggccggagacccuagauacgaagagucccuccaaaacccguaucccgauuaccauuggcugcggacggucaagaccacaaaagagucucuuaucauuaucagcccuuccguggcugaccuggaucccuacgacaagagccuccacucucgcguuuuuccuggcggcaaaugucuggggauuaccguguccagcacauauugcucuaccaaucaugauuacacgaucuggaugcccgaggaaccgagacuugaaacauccugugacauuuucaccagcucuaagggcaaaaaggccuccaagggagggaaaacaugcggauuugucgaugagcggggccuguauaagagccucaaaggggcuuguaagcugaaacugugcggagugcucggccugcgccuuauggacggcaccuggguguccauccagaccucugaugacacaaagugguguccucccgaccagcuggucaaccuccacgauuuccacagcgacgagaucgaacaucugguuguggaggaacuugugaaaaagagagaggaaugccuggaugcccucgaguccauuaugacgaccaagagcgucucuuuucggcgccuguccuaccugagaaaacucgugccuggguucggaaaggcguauacaaucuuuaauaaaacccugauggaggccgacgcucacuacaagagcguucggacauggaacgaaauuauccccucuaaaggcugccuuaaggugcgcgagagaugucaucccccugucgaugggguguucuucaauggaauuauccugggcccggacgggaacguucucauccccgaaaugcagagcucccugcuucaacagcacauggagcugcucgaaucuagcgugauuccucugaugcacccccuggccgauccuuccaccgucuuuaaggagggagacgaggcugaagauuucguggagguccaucuccccgacgugcacaaacagaucagcggcguugaucugggccuuccgucuugggggaaguaucugcucaugauugccggaggccuggcgacgcuggugcuuaucauuugcuccauggccuguugccggcgcgcuaaaagaacagaaagccggagacgcgggucucgggaguccgaaaagaaagucaccgccgcuccucagaccagaaaggugguuagcuccugggagcucuacaagucugagggagacgcccgccuguga

SEQ ID NO: 222616 - RNA, 1575 nt, Artificial Sequence; identical to SEQ ID NO: 222588
  derived and/or modified CDS sequence (opt5) from glycoprotein__RABV__AB496686.1

SEQ ID NO: 222617 - RNA, 1575 nt, Artificial Sequence
  derived and/or modified CDS sequence (opt5) from glycoprotein__RABV__AB496687.1
augauccugcaggcccuccuguucgugccccuucugauuagcucccucugccugggcaaguuuccuaucuacaccauuccggacaaacuugggcccuggucuccuaucgauauucaccaucugagcugucccaacaaucucgucguugaggacgaaggaugcacaaaccuguccggcuucucuuauauggagcugaaggugggguacaucagcgcuaucaaagugaauggauuuacguguaccggcgucgugacagaagccgagaccuauacaaacuucguuggguacgugaccacaaccuuuaagagaaaacacuuccggccuguccccgaugcgugccgcgcugccuauaauuggaagauggccggagacccuagauacgaagagucccuccaaaacccguaucccgauuaccauuggcugcggacggugaagaccacaaaagagucucuuauuaucauuagcccuuccguugcugaccuggaucccuacgacaagagccuccacucucgcguguuuccuggcggcaaaugucuggggaucaccgucuccagcacauauugcucuaccaaucaugauuacacgauuuggaugcccgaagaaccgagacuuggaacauccugugacaucuucaccagcucuaagggcaaaaaggccuccaaagggggaaagacaugcggcuuuguggaugaacgggggcuguauaagagccucaaaggagcuuguaagcugaaacugugcggcgugcucggccugcgccuuauggacgggaccugggucuccauucagaccucugaugacacaaagugguguccucccgaccagcugguuaaccuccacgauuuccacagcgacgagaucgagcaucuggugguggaggagcuugucaaaaagagagaagagugccuggaugcccucgaauccaucaugacgaccaagagcgugucuuuucggcgccuguccuaccugagaaaacucguuccuggauucggcaaggcguauacaauuuuuaauaaaacccugauggaggccgacgcucacuacaagagcgugcggacauggaacgagaucauucccucuaaagggugccuuaagguccgcgaaagaugucaucccccuguggauggaguuuucuucaauggcaucauucuggggccggacggaaacgugcucauccccgagaugcagagcucccugcuucaacagcacauggaacugcucgagucuagcgucaucccucugaugcacccccuggccgauccuuccaccguguuuaaggaaggcgacgaggcugaggauuucgucgaagugcaucuccccgacguucacaaacagauuagcggcguggaucuggggcuuccgucuuggggaaaguaucugcucaugaucgccggcgggcuggcggcccugguccuuauuaucugcuccauggcuuguugccggcgcacgaaaagaacagagagccggagacgcggaucuggcgaauccgagaagaaagugaccgccaccccucagacacggaagguuauuagcuccugggaacucuacaagucugagggggacgcuagacuguga

SEQ ID NO: 222618 - RNA, 1575 nt, Artificial Sequence
  derived and/or modified CDS sequence (opt5) from glycoprotein__RABV__AB496689.1
augauccugcaggcccucagauucgugccccugcuuauuagcucccugugccucggcaaguuuccuaucuacaccauuccggacaaacuggggcccuggucuccuaucgauauucaccaucuuagcugucccaacaaucuggucguugaggacgaaggaugcacaaaccucuccggcuucucuuauauggagcugaaggugggguacaucagcgcuaucaaagugaauggauuuacguguaccggcgucgugacagaagccgagaccuauacaaacuucguuggguacgugaccacaaccuuuaagcggaaacacuuccgcccuauucccgaugcgugcagagcugccuauaauuggaagauggccggagacccucgguacgaagagucccugcaaaacccguaucccgauuaccauuggcuccgcacggucaagaccacaaaagagucucugaucauuaucagcccuuccguggcugaccuugaucccuacgacaagagccugcacucuagaguuuuuccuggcggcaaaugucucgggauuaccguguccagcacauauugcucuaccaaucaugauuacacgaucuggaugcccgaagaaccgcggcugggaacauccugugacauuuucaccagcucuaagggcaaaaaggccuccaaagggggaaagacaugcggcuuugucgaugaacgcgggcuuuauaagagccugaaaggagcuuguaagcucaaacugugcggcgugcugggccucagacugauggacgggaccuggguguccauccagaccucugaugacacaaagugguguccucccgaccagcuugucaaccugcacgauuuccacagcgacgagaucgagcaucucguuguggaggagcuggugaaaaagcgggaagagugccuugaugcccuggaauccauuaugacgaccaagagcgucucuuuucgcagacucuccuaccugcggaaacuggugccuggauucggcaaggcguauacaaucuuuaauaaaacccucauggaggccgacgcucacuacaagagcguucgcacauggaacgagauuauccccucuaaagggugccugaaggugagagaacggugucaucccccugucgauggaguguucuucaauggcauuauccuugggccggacggaaacguucugauccccgagaugcagagcucccuccugcaacagcacauggaacuucuggagucuagcgugauuccucucaugcacccccuggccgauccuuccaccgucuuuaaggaaggcgacgaggcugaggauuucguggaaguccaucugcccgacgugcacaaacagaucagcggcguugaucucgggcugccgucuuggggaaaguaucuucugaugauugccggcgggcucgcggcccuggugcugaucauuugcuccauggcuuguugccgcagaacgaaacggacagagagcagacgccggggaucuggcgaauccgagaagaaagucaccgccaccccucagacaagaaaggugguuagcuccugggaacuuuacaagucugagggggacgcucgccucuga

SEQ ID NO: 222619 - RNA, 1575 nt, Artificial Sequence
  derived and/or modified CDS sequence (opt5) from glycoprotein__RABV__AB496690.1
augauccugcaggcccuccuguucgugccccuucugauuagcucccucugccugggcaaguuuccuaucuacaccauuccggacaaacuugggcccuggucuccuaucgauauucaccaucugagcugucccaacaaucucgucguugaggacgaaggaugcacaaaccuguccggcuucucuuauauggagcugaaggugggguacaucagcgcuaucaaagugaauggauuuacguguaccggcgucgugacagaagccgagaccuauacaaacuucguuggguacgugaccacaaccuuuaagagaaaacacuuccggccuauucccgaugcgugccgcgcugccuauaauuggaagauggccggagacccuagauacgaagagucccuccaaaacccguaucccgauuaccauuggcugcggacggucaagaccacaaaagagucucuuaucauuaucagcccuuccguggcugaccuggaucccuacgacaagagccuccacucucgcguuuuuccuggcggcaaaugucuggggauuaccguguccagcacauauugcucuaccaaucaugauuacacgaucuggaugcccgaagaaccgagacuuggaacauccugugacauuuucaccagcucuaagggcaaaaaggccuccaaagggggaaagacaugcggcuuugucgaugaacgggggcuguauaagagccucaaaggagcuuguaagcugaaacugugcggcgugcucggccugcgccuuauggacgggaccuggguguccauccagaccucugaugacacaaagugguguccucccgaccagcuggucaaccuccacgauuuccacagcgacgagaucgagcaucugguuguggaggagcuugugaaaaagagagaagagugccuggaugcccucgaauccauuaugacgaccaagagcgucucuuuucggcgccuguccuaccugagaaaacucgugccuggauucggcaaggcguauacaaucuuuaauaaaacccugauggaggccgacgcucacuacaagagcguucggacauggaacgagauuauccccucuaaagggugccuuaaggugcgcgaaagaugucaucccccugucgauggaguguucuucaauggcauuauccuggggccggacggaaacguucucauccccgagaugcagagcucccugcuucaacagcacauggaacugcucgagucuagcgugauuccucugaugcacccccuggccgauccuuccaccgucuuuaaggaaggcgacgaggcugaggauuucguggaaguccaucuccccgacgugcacaaacagaucagcggcguugaucuggggcuuccgucuuggggaaaguaucugcucaugauugccggcgggcuggcggcccuggugcuuaucauuugcuccauggcuuguugccggcgcacgaaaagaacagagagccggagacgcggaucuggcgaauccgagaagaaagucaccgccaccccucagacacggaaggugaucagcuccugggaacucuacaagucugagggggacgcuagacuguga

SEQ ID NO: 222620 - RNA, 1575 nt, Artificial Sequence
  derived and/or modified CDS sequence (opt5) from glycoprotein__RABV__AB496691.1
augauccugcaggcccuccuguucgugccccuucugauuagcucccucugccugggcaaguuuccuaucuacaccauuccggacaaacuugggcccuggucuccuaucgauauucaccaucugagcugucccaacaaucucgucguugaggacgaaggaugcacaaaccuguccggcuucucuuauauggagcugaaggugggguacaucagcgcuaucaaagugaauggauuuacguguaccggcgucgugacagaagccgagaccuauacaaacuucguuggguacgugaccacaaccuuuaagagaaaacacuuccggccuauucccgaugcgugccgcgcugccuauaauuggaagauggccggagacccuagauacgaagagucccuccaaaacccguaucccgauuaccauuggcugcggacggucaagaccacaaaagagucucuuaucauuaucagcccuuccguggcugaccuggaucccuacgacaagagccuccacucucgcguuuuuccuggcggcaaaugucuggggauuaccguguccagcacauauugcucuaccaaucaugauuacacgaucuggaugcccgaagaaccgagacuuggaacauccugugacauuuucaucagcucuaagggcaaaaaggccuccaaagggggaaagaccugcggcuuugucgaugaacgggggcuguauaagagccucaaaggagcuuguaagcugaaacugugcggcgugcucggccugcgccuuauggacgggacauggguguccauccagaccucugaugacaccaagugguguccucccgaccagcuggucaaccuccacgauuuccacagcgacgagauugagcaucugguuguggaggagcuugugaaaaagagagaagagugccuggaugcccucgaauccaucaugacaaccaagagcgucucuuuucggcgccuguccuaccugagaaaacucgugccuggauucggcaaggcguauacgauuuuuaauaaaacacugauggaggccgacgcucacuacaagagcguucggaccuggaacgagaucauucccucuaaagggugccuuaaggugcgcgaaagaugucaucccccugucgauggaguguucuucaauggcaucauccuggggccggacggaaacguucucauucccgagaugcagagcucccugcuucaacagcacauggaacugcucgagucuagcgugaucccucugaugcacccccuggccgauccuuccacagucuuuaaggaaggcgacgaggcugaggauuucguggaaguccaucuccccgacgugcacaaacagauuagcggcguugaucuggggcuuccgucuuggggaaaguaucugcucaugaucgccggcgggcuggcgacccuggugcuuauuaucugcuccauggccuguugccggcgcacgaaaagaacagagagccggagacgcggaucucgggaauccgagaagaaagucaccgcugccccucagaccagaaaggugguuagcuccugggaacucuacaagucugagggcgacgcucgccuguga

SEQ ID NO: 222621 - RNA, 1575 nt, Artificial Sequence; identical to SEQ ID NO: 222614
  derived and/or modified CDS sequence (opt5) from glycoprotein__RABV__AB496692.1

SEQ ID NO: 222622 - RNA, 1575 nt, Artificial Sequence; identical to SEQ ID NO: 222588
  derived and/or modified CDS sequence (opt5) from glycoprotein__RABV__AB496694.1

SEQ ID NO: 222623 - RNA, 1575 nt, Artificial Sequence; identical to SEQ ID NO: 222588
  derived and/or modified CDS sequence (opt5) from glycoprotein__RABV__AB496695.1

SEQ ID NO: 222624 - RNA, 1575 nt, Artificial Sequence; identical to SEQ ID NO: 222618
  derived and/or modified CDS sequence (opt5) from glycoprotein__RABV__AB496696.1

SEQ ID NO: 222625 - RNA, 1575 nt, Artificial Sequence
  derived and/or modified CDS sequence (opt5) from glycoprotein__RABV__AB496697.1
augauccugcaggcccucagauucgugccccugcuuauuagcucccugugccucggcaaguuuccuaucuacaccauuccggacaaacuggggcccuggucuccuaucgauauucaccaucuuagcugucccaacaaucuggucguugaggacgaaggaugcacaaaccucuccggcuucucuuauauggagcugaaggugggguacaucagcgcuaucaaagugaauggauuuacguguaccggcgucgugacagaagccgagaccuauacaaacuucguuggguacgugaccacaaccuuuaagcggaaacacuuccgcccuauucccgaugcgugcagagcugccuauaauuggaagauggccggagacccucgguacgaagagucccugcaaaacccguaucccgauuaccauuggcuccgcacggucaagaccacaaaagagucucugaucauuaucagcccuuccguggcugaccuugaucccuacgacaagagccugcacucuagaguuuuuccuggcggcaaaugucucgggauuaccguguccagcacauauugcucuaccaaucaugauuacacgaucuggaugcccgaagaaccgcggcugggaacauccugugacauuuucaccagcucuaagggcaaaaaggccuccaaagggggaaagacaugcggcuuugucgaugaacgcgggcuuuauaagagccugaaaggagcuuguaagcucaaacugugcggcgugcugggccucagacugauggacgggaccuggguguccauccagaccucugaugacacaaagugguguccucccgaccagcuugucaaccugcacgauuuccacagcgacgagaucgagcaucucguuguggaggagcuggugaaaaagcgggaagagugccuugaugcccuggaauccauuaugacgaccaagagcgucucuuuucgcagacucuccuaccugcggaaacuggugccuggauucggcaaggcguauacaaucuuuaauaaaacccucauggaggccgacgcucacuacaagagcguucgcacauggaacgagauuauccccucuaaagggugccugaaggugagagaacggugucaucccccugucgauggaguguucuucaauggcauuauccuugggccggacggaaacguucugauccccgagaugcagagcucccuccugcaacagcacauggaacuucuggagucuagcgugauuccucucaugcacccccuggccgauccuuccaccgucuuuaaggaaggcgacgaggcugaggauuucguggaaguccaucugcccgacgugcacaaacagaucagcggcguugaucucgggcugccgucuuggggaaaguaucuucugaugauugccggcgggcucgcggcccuggugcugaucauuugcuccauggcuuguugccgcagaacgaaacggacagagagcagacgccggggaucuggcgaauccgagaagaaagucaccgugaccccucagacaagaaagguugugagcuccugggaacuuuacaagucugagggggacgcccgccucuga

SEQ ID NO: 222626 - RNA, 1575 nt, Artificial Sequence
  derived and/or modified CDS sequence (opt5) from glycoprotein__RABV__AB496698.1
augauccugcaggccauucucuucgugccccugcuuaucagcucccugugccucggcaaguuuccuauuuacaccaucccggacaaacuggggcccuggucuccuauugauauccaccaucuuagcugucccaacaaucuggucguugaggacgaaggaugcacaaaccucuccggcuucucuuauauggagcugaaggugggguacaucagcgcuauuaaagugaauggauuuacguguaccggcgucgugacagaagccguuaccuauacaaacuucgugggguacgucaccacaaccuuuaagagaaaacacuuccggccugugcccgaugcgugccgcacggcuuauaauuggaagauggccggagacccuagauacgaggaaucccugcaaaacccguaucccgauuaccauuggcuccggaccguuaagacaaccaaagagucucugaucauuaucagcccuuccguggccgaccuugaucccuacgacaagagccugcacucucgcgucuuuccuggcggcaaaugucucgggauuacaguguccagcaccuauugcucuacgaaucaugauuacacaaucuggaugcccgaggaaccgagacugggaaccuccugugacauuuucacaagcucuaagggcaaaaaggcuuccaaagggggaaagaccugcggcuuuguggaugagcgggggcuuuauaagagccugaaaggagccuguaagcucaaacugugcggcguccugggccuccgccugauggacgggaccuggguuuccauccagacaucugaugacacgaagugguguccucccgaccagcuugugaaccugcacgauuuccacagcgacgaaaucgagcaucucguggucgaggaacuggugaaaaagagagaggaaugccuugaugcucuggaguccauuaugaccacaaagagcguuucuuuucggcgccucuccuaccugagaaaacuggugccuggauucggcaaggccuauaccaucuuuaauaaaacacucauggaagcggacgcccacuacaagagcguccggaccuggaacgagauuauccccucuaaagggugccugaaggugcgcgagagaugucaucccccuguugauggaguguucuucaauggcauuauccuugggccggacggaaacguccugauccccgaaaugcagagcucccuccugcaacagcacauggagcuucuggaaucuagcgugauuccucucaugcacccccuggcugauccuuccacggucuuuaaggagggcgacgaagccgaggauuucguggagguucaucugcccgacgugcacaaacagaucagcggcgucgaucucgggcugccgucuuggggaaaguaucuucugaugauugcuggcgggcucgccacacuggugcugaucauuugcuccauggcguguugccggcgcaccaaaagaaccgaaagccggagacgcggaucuggcgaguccgggaagaaaguuacagccaccccucagacacggaagguggucagcuccugggaacuuuacaagucugagggcgacgcuagacucuga

SEQ ID NO: 222627 - RNA, 1575 nt, Artificial Sequence
  derived and/or modified CDS sequence (opt5) from glycoprotein__RABV__AB496699.1
augauccugcaggccauucucuucgugccccugcuuaucagcucccugugccucggcaaguuuccuauuuacaccaucccggacaaacuggggcccuggucuccuauugauauccaccaucuuagcugucccaacaaucuggucguugaggacgaaggaugcacaaaccucuccggcuucucuuauauggagcugaaggugggguacaucagcgcuauuaaagugaauggauuuacguguaccggcgucgugacagaagccgagaccuauacaaacuucguuggguacgugaccacaaccuuuaagagaaaacacuuccggccuguccccgaugcgugccgcacggcuuauaauuggaagauggccggagacccuagauacgaagagucccugcaaaacccguaucccgauuaccauuggcuccggaccgugaagacaaccaaagagucucugaucauuaucagcccuuccguugccgaccuugaucccuacgacaagagccugcacucucgcguguuuccuggcggcaaaugucucgggauuacagucuccagcaccuauugcucuacgaaucaugauuacacaaucuggaugcccgaagaaccgagacugggaaccuccugugacauuuucacaagcucuaagggcaaaaaggcuuccaaagggggaaagaccugcggcuuuguggaugaacgggggcuuuauaagagccugaaaggagccuguaagcucaaacugugcggcgugcugggccuccgccugauggacgggaccugggucuccauccagacaucugaugacacgaagugguguccucccgaccagcuuguuaaccugcacgauuuccacagcgacgagaucgagcaucucgugguggaggagcuggucaaaaagagagaagagugccuugaugcucuggaauccauuaugaccacaaagagcgugucuuuucggcgccucuccuaccugagaaaacugguuccuggauucggcaaggccuauaccaucuuuaauaaaacacucauggaggcggacgcccacuacaagagcgugcggaccuggaacgagauuauccccucuaaagggugccugaagguccgcgaaagaugucaucccccuguggauggaguuuucuucaauggcauuauccuugggccggacggaaacgugcugauccccgagaugcagagcucccuccugcaacagcacauggaacuucuggagucuagcgucauuccucucaugcacccccuggcugauccuuccacgguguuuaaggaaggcgacgaggccgaggauuucgucgaagugcaucugcccgacguucacaaacagaucagcggcguggaucucgggcugccgucuuggggacgguaucuucugaugauugcuggcgggcucgccacacugguccugaucauuugcuccauggcguguugccgcagaaccaagcggaccgagagcagacgccggggaucuggcgaauccgggaaaaaggugacagccaccccucagacaagaaaaguugugagcuccugggagcuuuacaagucugaaggcgacgcucgccucuga

SEQ ID NO: 222628 - RNA, 1575 nt, Artificial Sequence
  derived and/or modified CDS sequence (opt5) from glycoprotein__RABV__AB496701.1
augauccugcaggccauucucuucgugccccugcuuaucagcucccugugccucggcaaguuuccuauuuacaccaucccggacaaacuggggcccuggucuccuauugauauccaccaucuuagcugucccaacaaucuggucguugaggacgaaggaugcacaaaccucuccggcuucucuuauauggagcugaaggugggguacaucagcgcuauuaaagugaauggauuuacguguaccggcgucgugacagaagccgagaccuauacaaacuucguuggguacgugaccacaaccuuuaagagaaaacacuuccggccuguccccgaugcgugccgcacggcuuauaauuggaagauggccggagacccuagauacgaagagucccugcaaaacccguaucccgauuaccauuggcuccggaccgugcgcacaaccaaggagucucugaucauuaucagcccuuccguugccgaccuugaucccuacgacaaaagccugcacucuagaguguuuccuggcggcaagugucucgggauuacagucuccagcaccuauugcucuacgaaucaugauuacacaaucuggaugcccgaagaaccgcggcugggaaccuccugugacauuuucacaagcucuaaaggcaagaaggcuuccaaagggggaaagaccugcggcuuuguggaugaacgcgggcuuuauaaaagccugaagggagccuguaaacucaagcugugcggcgugcugggccucagacugauggacgggaccugggucuccauccagacaucugaugacacgaaaugguguccucccgaccagcuuguuaaccugcacgauuuccacagcgacgagaucgagcaucucgugguggaggagcuggucaagaaacgggaagagugccuugaugcucuggaauccauuaugaccacaaagagcgugucuuuucgcagacucuccuaccugcggaagcugguuccuggauucggcaaagccuauaccaucuuuaauaagacacucauggaggcggacgcccacuacaaaagcgugcgcaccuggaacgagauuauccccucuaaggggugccugaaagucagagaacggugucaucccccuguggauggaguuuucuucaauggcauuauccuugggccggacggaaacgugcugauccccgagaugcagagcucccuccugcaacagcacauggaacuucuggagucuagcgucauuccucucaugcacccccuggcugauccuuccacgguguuuaaggaaggcgacgaggccgaggauuucgucgaagugcaucugcccgacguucacaagcagaucagcggcguggaucucgggcugccgucuuggggaaaauaucuucugaugauugcuggcgggcucgccacacugguccugaucauuugcuccauggcguguugccgcagaaccaagcggaccgagagcagacgccggggaucuggcgaauccgggaaaaaggugacagccaccccucagacaagaaaaguugugagcuccugggagcuuuacaagucugaaggcgacgcucgccucuga

SEQ ID NO: 222629 - RNA, 1575 nt, Artificial Sequence
  derived and/or modified CDS sequence (opt5) from glycoprotein__RABV__AB496703.1
augauccugcaggccauucucuucgugccccugcuuaucagcucccugugccucggcaaguuuccuauuuacaccaucccggacaaacuggggcccuggucuccuauugauauccaccaucuuagcugucccaacaaucuggucguugaggacgaaggaugcacaaaccucuccggcuucucuuauauggagcugaaggugggguacaucagcgcuauuaaagugaauggauuuacguguaccggcgucgugacagaagccgagaccuauacaaacuucguuggguacgugaccacaaccuuuaagagaaaacacuuccggccuguccccgaugcgugccgcacggcuuauaauuggaagauggccggagacccuagauacgaagagucccugcaaaacccguaucccgauuaccauuggcuccggaccgugaagacaaccaaagagucucugaucauuaucagcccuuccguugccgaccuugaucccuacgacaagagccugcacucucgcguguuuccuggcggcaaaugucucgggauuacagucuccagcaccuauugcucuacgaaucaugauuacacaaucuggaugcccgaagaaccgagacugggaaccuccugugacauuuucacaagcucuaagggcaaaaaggcuuccaaagggggacggaccugcggcuuuguggaugaacgcgggcuuuauaagagccugaagggagccuguaaacucaagcugugcggcgugcugggccucagacugauggacgggaccugggucuccauccagacaucugaugacacgaaaugguguccucccgaccagcuuguuaaccugcacgauuuccacagcgacgagaucgagcaucucgugguggaggagcuggucaagaaacgggaagagugccuugaugcucuggaauccauuaugaccacaaagagcgugucuuuucgcagacucuccuaccugcggaagcugguuccuggauucggcaaagccuauaccaucuuuaauaagacacucauggaggcggacgcccacuacaaaagcgugcgcaccuggaacgagauuauccccucuaaggggugccugaaagucagagaacggugucaucccccuguggauggaguuuucuucaauggcauuauccuugggccggacggaaacgugcugauccccgagaugcagagcucccuccugcaacagcacauggaacuucuggagucuagcgucauuccucucaugcacccccuggcugauccuuccacgguguuuaaggaaggcgacgaggccgaggauuucgucgaagugcaucugcccgacguucacaagcagaucagcggcguggaucucgggcugccgucuuggggacgcuaucuucugaugauugcuggcgggcucgccacacugguccugaucauuugcuccauggcguguugcagacggaccaaaagaaccgagagccgccggagaggaucuggcgaauccgggaagaaagugacagccaccccucagacacgcaagguugugagcuccugggagcuuuacaaaucugaaggcgacgcucggcucuga

SEQ ID NO: 222630 - RNA, 1575 nt, Artificial Sequence; identical to SEQ ID NO: 222626
  derived and/or modified CDS sequence (opt5) from glycoprotein__RABV__AB496705.1

SEQ ID NO: 222631 - RNA, 1575 nt, Artificial Sequence
  derived and/or modified CDS sequence (opt5) from glycoprotein__RABV__AB517659.1
auggugccccaggcccugcuccuggucccucuucuggcuguuagcuucugcuuuggcaaguucccgaucuacaccauucccgacaaacucgggccuuggucccccaucgauauucaccaucugucuuguccuaacaaucuugugguggaggacgaaggaugcacaaaccugagcggcuuuuccuauauggagcucaaggucggguacaucucugccauuaaagugaauggauucacguguaccggcguugugacagaagcggagaccuauacaaacuuugucggguacgugaccacaaccuucaagagaaaacacuuucggcccacgccugaugcuugccgcagcgccuauaauuggaagauggccggagacccgagauacgaagagucccugcauaaccccuauccugauuaccacuggcugcggaccguuaagacaaccaaagagucucucgugaucaucagccccuccgucgcugaccuggauccuuacgacaagagccuucauucucgcguguuccccuccggcaaauguagcggcauuacagugucuuccaccuauugcagcacgaaucacgauuacacaaucuggcugccggaaaacccuagacucgggaccucuugugacauuuuuacaaauucccggggaaagcgcgccagcaaaggcuccaagaccugcggguucgucgaugagagaggacuguauaagucucuuaaaggcgcuuguaagcugaaacucugcgggguucugggacugcggcucauggacggcaccuggguggccaugcaaacaagcgaugaaacgaaguggugucccccugaccagcuggugaaccuucacgacuuucgcuccgaugagaucgagcaucuggucguggaggaacucguuaaaaagagagaagagugccuggacgcgcuugaaagcauuaugaccacaaaaucuguguccuuccggcgccugagccaccucagaaagcugguccccggcuuugggaaggccuacaccaucuucaauaaaacacugauggaggcugaugcccauuauaagucugugcggaccuggaacgagauuauccccagcaaaggaugccuccgcguuggcgggagaugucacccucacgugaauggagucuucuuuaacggcaucauucuggggccggacggacaugugcuuauccccgaaaugcaguccucucugcuccagcaacacauggagcugcuugaaagcuccgucauuccucugaugcauccccucgcugauccuagcacgguguucaaggacggcgaugaggccgaagacuuuguugaggugcaucugcccgauguccacaaacaggugucuggcguugaccuggggcucccgaauuggggaaaguacgugcugauguccgcgggcguccuuaucgcccugaugcucauuaucuuccugaugacaugcugucggagagugaaccgcccugauagcacccagcggucuuuugggagaaccggacgcaagguguccguuacaagccaguccggcaaagucaucucuagcugggaguccuauaagucugggggcgaaacccggcuguga

SEQ ID NO: 222632 - RNA, 1575 nt, Artificial Sequence
  derived and/or modified CDS sequence (opt5) from glycoprotein__RABV__AB517660.1
auggugccccagacccugcuguucgucccucugcuuguuuuuagccugugcuucggcaaguuuccgaucuacacaauucccgacaaacucgggccuuggucccccaucgauauucaccaucugucuuguccuaacaaucuugugguggaggacgaaggaugcacgaaccugagcggcuucuccuauauggagcucaaggucggguacaucucugccauuaaagugaauggauuuaccuguacaggcguugugaccgaagcugagacauauaccaacuucgucggguacgugacaaccacguuuaagagaaaacacuuccggcccaccccugaugccugccgcgcggcuuauaauuggaagauggccggagacccgagauacgaagagagccugcauaaccccuauccugauuaccacuggcugcggacaguuaagaccacaaaagagucccucgugaucaucucucccagcgucgccgaccuggauccuuacgacaagucccuucauagccgcguguuucccucuggcaaaugucugggcauuaccguguccagcacguauugcucuacaaaucacgauuacaccgucuggagaccggaaaacccucggcucgggacauccugugacaucuucaccaauagccgcggaaagagagcuucuaaaggcuccaagaccugcggguuuguugaugagcggggaugguauaagagcuggaaaggcgccuguaagcugaaacuuugcggggugcugggacuccgccugauugacggcacauggaucgcuaugcaaacguccgaagagaccaaguggugucccccugaucagcuggugaaccuccacgacuucagaucugacgagauugaacaucuggucguggaggaacuuguuaaaaagcgggaggaaugccuggaugcccucgagagcaucaugacaaccaaauccgugagcuuucgcagacugucucaccuucggaagcugguccccggcuucgggaaggcguacacaauuuucaauaaaacccucauggaggccgacgcucauuauaaguccauccgcacguggaacgaaaucauucccagcaaaggaugccugagagugggcgggaagugucacccucacguuaauggaguguuuuucaacggcaucauucuggggccggauggacauguccucauccccgagaugcagucuagccugcuucagcaacacauggaacugcucgaguccucugugauuccucugaugcauccccuugccgacccuuacacagucuuuaaagauggcgacgaagcugaggauuucguggagguucaccuccccgacgugcauaagcucgucagcggcguggaucuggggcugccgaauuggggaaaguaucuccugauguccguuggcgugcuuaucgcccugaugcucaucauuuuucugaugaccugcuguagagggguccaccggccugacagcgcgcagcagaaacugggaggcaccgggcgccgggugucuaucacaucccagggcggaagagugauuagcucuugggaauccuacaagagcggcggggauacccgccuuuga

SEQ ID NO: 222633 - RNA, 1575 nt, Artificial Sequence; identical to SEQ ID NO: 222582
  derived and/or modified CDS sequence (opt5) from glycoprotein__RABV__AB518487.1

SEQ ID NO: 222634 - RNA, 1575 nt, Artificial Sequence; identical to SEQ ID NO: 222582
  derived and/or modified CDS sequence (opt5) from glycoprotein__RABV__AB518488.1

SEQ ID NO: 222635 - RNA, 1575 nt, Artificial Sequence
  derived and/or modified CDS sequence (opt5) from glycoprotein__RABV__AB518489.1
auggugccccaggcccuucucuucgucccucugcuugcuuuuagcuucugcuuuggcaaguucccgaucuacaccauucccgacaaacuggggccuuggucccccaucgauauucaccaucucucuuguccuaacaaucugguuguggaggacgaaggaugcacaaaccuuagcggcuuuuccuauauggagcugaaggugggguacaucucugccauuaaagucaauggauucacguguaccggcgugguuacagaagcggagaccuauacaaacuuugugggguacgucaccacaaccuucaagagaaaacacuuucggcccacgccugaugcuugccgcagcgccuauaauuggaagauggccggagacccgagauacgaagagucccuccauaaccccuauccugauuaccacuggcugcggaccgugaagacaaccaaagagucucugguuaucaucagccccuccguggcugaccucgauccuuacgacaagagccugcauucucgcgucuuccccaauggcaaauguuccggcauuacagugagcucuaccuauugcuccacgaaccacgauuacacaaucuggcuuccggaaaauccuagacuggggaccagcugugacauuuuuacaaacucucggggaaagcgcgccuccaaaggcagcaagaccugcggguucguggaugagagaggacucuauaagucccugaaaggcgcuuguaagcugaaacugugcgggguccucggacugcggcugauggacggcaccuggguugccaugcaaacaucugaugaaacgaaguggugucccccugaccagcucgugaaucugcacgacuuucgcagcgaugagaucgagcaucuuguggucgaggaacuggugaaaaagagagaagagugccucgacgcgcuggaauccauuaugaccacaaaaagcguuucuuuccggcgccuuucccaccugagaaagcucgugcccggcuucgggaaggccuacaccaucuuuaacaaaacacugauggaggcugaugcccauuauaagagcauucggaccuggaaugagaucauccccucuaaaggaugccugcgcgucggcgggagaugucacccucacgugaacggaguuuucuuuaauggcauuauccucgggccggacggacaugugcugauucccgaaaugcagagcucccuucugcagcaacacauggagcuccuggaaucuagcgucaucccucuuaugcauccccuggcugauccuuccacgguguucaaggacggcgaugaggccgaagacuuugucgaggugcaccuccccgauguucauaaacaggugagcggcgucgaccuggggcugccgaacuggggaaaguacgugcucaugucugcgggcguucugauugcccuuaugcugacaaucuuccucaugaccugcugucggagagugaaccgcccugauuccacccagcggagccuggggaugacaggaagaaaggucucugugaccucccagagcggcaaagugaucuccucuugggagagcuauaaguccgggggcgaaacacgccuguga

SEQ ID NO: 222636 - RNA, 1575 nt, Artificial Sequence
  derived and/or modified CDS sequence (opt5) from glycoprotein__RABV__AB518490.1
auggugccccaggcccuucucuucgucccucugcuugcuuuuagcuucugcuuuggcaaguucccgaucuacaccauucccgacaaacuggggccuuggucccccaucgauauucaccaucucucuuguccuaacaaucugguuguggaggacgaaggaugcacaaaccuuagcggcuuuuccuauauggagcugaaggugggguacaucucugccauuaaagucaauggauucacguguaccggcgugguuacagaagcggagaccuauacaaacuuugugggguacgucaccacaaccuucaagagaaaacacuuucggcccacgccugaugcuugccgcagcgccuauaauuggaagauggccggagacccgagauacgaagagucccuccauaaccccuauccugauuaccacuggcugcggaccgugaagacaaccaaagagucucugguuaucaucagccccuccguggcugaccucgauccuuacgacaagagccugcauucucgcgucuuccccaauggcaaauguuccggcauuacagugagcucuaccuauugcuccacgaaccacgauuacacaaucuggcuuccggaaaauccuagacuggggaccagcugugacauuuuuacaaacucucggggaaagcgcgccuccaaaggcgggaagaccugcggauucguggaugagagaggccucuauaagagccugaaaggggcuuguaagcugaaacugugcggaguccucggccugcggcugauggacggcaccuggguugccaugcaaacauccgaugaagcgaaguggugucccccugaccagcucgugaaucugcacgacuuucgcucugaugagaucgagcaucuuguggucgaggaacuggugaaaaagagagaagagugccucgacgcccuggaaagcauuaugacgaccaaauccguuagcuuccggcgccuuucucaccugagaaagcucgugcccggguucggaaaggcuuacacaaucuuuaacaaaacccugauggaggccgaugcucauuauaaguccauucggacauggaaugagaucauccccagcaaaggcugccugcgcgucgggggaagaugucacccucacgugaacggcguuuucuuuaaugggauuauccucggaccggacggccaugugcugauucccgaaaugcagucuagccuucugcagcaacacauggagcuccuggaauccucugucaucccucuuaugcauccccuggccgauccuagcaccguguucaaggacggcgaugaggcggaagacuuugucgaggugcaccuccccgauguucauaaacagguguccggggucgaccugggacugccgaacuggggcaaguacgugcucaugagcgccgggguucugauugcucuuaugcugacgaucuuccucaugacaugcugucggagagugaaccgcccugauucuacccagcggucccugggaaugaccggcagaaaggucagcgugacaucucaguccgggaaagugaucagcuccugggagucuuauaagagcggcggagaaacccgccuguga

SEQ ID NO: 222637 - RNA, 1575 nt, Artificial Sequence
  derived and/or modified CDS sequence (opt5) from glycoprotein__RABV__AB518492.1
auggugccccaggcccuucucuucgucccucugcuugcuguuagcuuuugcuucggcaaguuuccgaucuacaccauucccgacaaacuggggccuuggucccccaucgauauucaccaucucucuuguccuaacaaucuggugguggaggacgaaggaugcacaaaccuuagcggcuucuccuauauggagcugaaggucggguacaucucugccauuaaagugaauggauuuacguguaccggcguugugacagaagcggagaccuauacaaacuucgucggguacgugaccacaaccuuuaagagaaaacacuuccggcccacgccugaugcuugccgcagcgccuauaauuggaagauggccggagacccgagauacgaagagucccuccauaaccccuauccugauuaccacuggcugcggaccguuaagacaaccaaagagucucuggugaucaucagccccuccgucgcugaccucgauccuuacgacaagagccugcauucucgcguguuucccuccggcaaauguagcggcauuacagugucuuccaccuauugcagcacgaaucacgauuacacaaucuggcuuccggaaaacccuagacuggggaccucuugugacauuuucacaaauucccggggaaagcgcgccagcaaaggcuccaagaccugcggguuugucgaugagagaggacucuauaagucucugaaaggcgcuuguaagcugaaacugugcgggguucucggacugcggcugauggacggcaccuggguggccaugcaaacaagcgaugaaacgaaguggugucccccugaccagcucgugaaccugcacgacuuccgcuccgaugagaucgagcaucuugucguggaggaacugguuaaaaagagagaagagugccucgacgcgcuggaaagcauuaugaccacaaaaucuguguccuuucggcgccuuagccaccugagaaagcucguccccggcuucgggaaggccuacaccaucuucaauaaaacacugauggaggcugaugcccauuauaagucugugcggaccuggaacgagauuauccccagcaaaggaugccugcgcguuggcgggagaugucacccucacgugaauggagucuuuuucaacggcaucauucucgggccggacggacaugugcugauccccgaaaugcaguccucucuucugcagcaacacauggagcuccuggaaagcuccgucauuccucuuaugcauccccuggcugauccuagcacgguguuuaaggacggcgaugaggccgaagacuucguugaggugcaccuccccgauguccauaaacaggugucuggcguugaccuggggcugccgaauuggggaaaguacgugcucauguccgcgggcguccugacagcccuuaugcugaucauuuuucucaugaccugcugucggagagugaaccgcccugauagcacccagcggucucuggggagaacaggacgcaagguguccguuaccagccaguccggcaaagucaucucuagcugggaguccuauaagucugggggcgaaacacggcuguga

SEQ ID NO: 222638 - RNA, 1575 nt, Artificial Sequence
  derived and/or modified CDS sequence (opt5) from glycoprotein__RABV__AB518493.1
auggugccccaggcccugcuguucgucccucugcuuguuuuuagccugugcuccggcaaguucccgcucuacaccauccccgacaaacuggggccuuggucucccauugauauccaccaucuuagcuguccuaacaaucuggugguggaggacgaaggaugcacaaaccucuccggcuuuucuuauauggagcugaaggucggguacauuagcgcuaucaaagugaauggauucacguguaccggcguugugacagaagccgagaccuauacaaacuuugucggguacgugaccacaaccuucaagagaaaacacuuucggcccacgccugaugcgugccgcgcugccuauaauuggaagauggccggagacccgagauacgaagagucccugcauaaccccuauccugauuaccacuggcuccggaccguuaagacaaccaaagagucucugguggucauuagccccuccguggcugaccuugauccuuacgacaagagccugcauucucgcguguuccccuccggcaaauguagcggcaucacagucucuuccaccuauugcagcacgaaucacgauuacacaaucuggaugccggaaaacccuagacucgggaccucuugugacauuuuuacaaauucccggggaaagcgcgccagcaaaggcuccaagaccugcggguucguugaugagagaggacuguauaagucucuuaaaggcgcuuguaagcugaaacucugcggggugcugggacugcggcucauggacggcaccuggguggccaugcagaucagcgaugaaacaaaguggugucccccugaccagcuggucaaccuucacgacuuucgcuccgaugagauugagcaucuggugguugaggaacucgugaaaaagagagaagagugccuggacgcgcuugaaagcaucaugacgaccaaaucugucuccuuccggcgccugagccaccucagaaagcuggugcccggcuuugggaaggccuacacaauuuucaauaaaacccugauggaggcugaugcccauuauaagucuauccggacauggaacgagauuauccccagcaaaggaugccuccgcguuggcgggagaugucacccucacguguccggagucuucuuuaauggcaucauucuggggccggacggacaugugcuuauccccgaaaugcagucuagccugcuccagcaacacauggagcugcuugaauccagcgucauuccucugaugcauccccucgcugauccuucuaccguguucaaggacggcgaugaggccgaagacuuuguugaggugcaccuccccgauguccauaaacagguguccggcguugaccuggggcucccgaacuggggaaaguacgugcugaugagcgcgggcgcccuuaucgcucugaugcucauuaucuuccugaugacgugcugucggagagucaaucgccuggauucuacacagcaccggcuugggggaaccggcagaaagguguccgugaccccucaagggggcaaaguuaucagcuccugggagucuuauaagagcggaggcgaaacacgccucuga

SEQ ID NO: 222639 - RNA, 1575 nt, Artificial Sequence
  derived and/or modified CDS sequence (opt5) from glycoprotein__RABV__AB518494.1
auggugccccaggcccugcuguucgucccucugcuuguuuuuagccugugcuucggcaaguuuccgcucuacaccauccccgacaaacuggggccuuggucccccauugauauccaccaucuuucuuguccuaacaaucuggugguggaggacgaaggaugcacaaaccucagcggcuucuccuauauggagcugaaggucggguacauuucugcuaucaaagugaauggauuuacguguaccggcguugugacagaagccgagaccuauacaaacuucgucggguacgugaccacaaccuuuaagagaaaacacuuccggcccacgccugaugcgugccgcgcugccuauaauuggaagauggccggagacccgagauacgaagagagccugcauaaccccuauccugauuaccacuggcuccggaccguuaagacaaccaaagagucccugguggucauuucucccagcguggcugaccuugauccuuacgacaagucccugcauagccgcguguuucccucuggcaaauguuccggcaucacagucagcucuaccuauugcuccacgaaucacgauuacacaaucuggaugccggaaaacccuagacucgggaccagcugugacauuuucacaaauucucggggaaagcgcgccuccaaaggcagcaagaccugcggguuuguugaugagagaggacuguauaagucccuuaaaggcgcuuguaagcugaaacucugcggggugcugggacugcggcucauggacggcaccuggguggccaugcagaucucugaugaaacaaaguggugucccccugaccagcuggucaaccuucacgacuuccgcagcgaugagauugagcaucuggugguugaggaacucgugaaaaagagagaagagugccuggacgcgcuugaauccaucaugacgaccaaaagcgucucuuuucggcgccugucccaccucagaaagcuggugcccggcuucgggaaggccuacacaauuuucaauaaaacccugauggaggcugaugcccauuauaagagcauccggacauggaacgagauuauccccucuaaaggaugccuccgcguuggcgggagaugucacccucacgugagcggagucuuuuucaauggcaucauucuggggccggacggacaugugcuuauccccgaaaugcaguccucucugcuccagcaacacauggagcugcuugaaagcuccgucauuccucugaugcauccccucgcugauccuagcaccguguuuaaggacggcgaugaggccgaagacuucguugaggugcaucugcccgauguccacaaacaggugucuggcguugaccuggggcucccgaacuggggaaaguacgugcugauguccgcgggcgcccuuaucgcucugauggucauuaucuuucucaugacgugcugucggagagugaaucgccuggauagcacacagcaccggcucgggggaaccggcagaaaggugucuguuaccccucaagggggcaaagucaucuccagcugggaguccuauaagucuggaggcgaaacacgccuuuga

SEQ ID NO: 222640 - RNA, 1575 nt, Artificial Sequence; identical to SEQ ID NO: 222638
  derived and/or modified CDS sequence (opt5) from glycoprotein__RABV__AB518495.1

SEQ ID NO: 222641 - RNA, 1575 nt, Artificial Sequence
  derived and/or modified CDS sequence (opt5) from glycoprotein__RABV__AB519641.1
augauccugcaggcccuccuguucgugccccuucugauuagcucccucugccugggcaaguuuccuaucuacaccauuccggacaaacuugggcccuggucuccuaucgauauucaccaucugagcugucccaacaaucucgucguugaggacgaaggaugcacaaaccuguccggcuucucuuauauggagcugaaggugggguacaucagcgcuaucaaagugaauggauuuacguguaccggcgucgugacagaagccgagaccuauacaaacuucguuggguacgugaccacaaccuuuaagagaaaacacuuccggccuguccccgaugcgugccgcgcugccuauaauuggaagauggccggagacccuagauacgaagagucccuccaaaacccguaucccgauuaccauuggcugcggacggugaagaccacaaaagagucucuuauuaucauuagcccuuccguugcugaccuggaucccuacgacaagagccuccacucucgcguguuuccuggcggcaaaugucuggggaucaccgucuccagcacauauugcucuaccaaucaugauuacacgauuuggaugcccgaagaaccgagacuuggaacauccugugacaucuucaccagcucuaagggcaaaaaggccuccaaagggggaaagacaugcggcuuuguggaugaacgggggcuguauaagagccucaaaggagcuuguaagcugaaacugugcggcgugcucggccugcgccuuauggacgggaccugggucuccauucagaccucugaugacacaaagugguguccucccgaccagcugguuaaccuccacgauuuccacagcgacgagaucgagcaucuggugguggaggagcuugucaaaaagagagaagagugccuggaugcccucgaauccaucaugacgaccaagagcauuucuuuucggcgccuguccuaccugagaaaacucgugccuggauucggcaaggcguauacaaucuuuaauaaaacccugauggaggccgacgcucacuacaagagcguucggacauggaacgagauuauccccucuaaagggugccuuaaggugcgcgaaagaugucaucccccugucgauggaguguucuucaauggcauuauccuggggccggacggaaacguucucauccccgagaugcagagcucccugcuucaacagcacauggaacugcucgagucuagcgugauuccucugaugcacccccuggccgauccuuccaccgucuuuaaggaaggcgacgaggcugaggauuucguggaaguccaucuccccgacgugcacaaacagaucagcggcguugaucuggggcuuccgucuuggggaaaguaucugcucaugauugccggcgggcuggcggcccuggugcuuaucauuugcuccauggcuuguugccggcgcacgaaaagaacagagagccggagacgcggaucuggcgaauccgagaagaaagucaccgccaccccucagacacggaaggugaucagcuccugggaacucuacaagucugagggggacgcuagacuguga

SEQ ID NO: 222642 - RNA, 1575 nt, Artificial Sequence
  derived and/or modified CDS sequence (opt5) from glycoprotein__RABV__AB519642.1
augauccugcaggcccuccuguucgugccccuucugauuagcucccucugccugggcaaguuuccuaucuacaccauuccggacaaacuugggcccuggucuccuaucgauauucaccaucugagcugucccaacaaucucgucguugaggacgaaggaugcacaaaccuguccggcuucucuuauauggagcugaaggugggguacaucagcgcuaucaaagugaauggauuuacguguaccggcgucgugacagaagccgagaccuauacaaacuucguuggguacgugaccacaaccuuuaagagaaaacacuuccggccuauucccgaugcgugccgcgcugccuauaauuggaagauggccggagacccuagauacgaagagucccuccaaaacccguaucccgauuaccauuggcugcggacggucaagaccacaaaagagucucuuaucauuaucagcccuuccguggcugaccuggaucccuacgacaagagccuccacucucgcguuuuuccuggcggcaaaugucuggggauuaccguguccagcacauauugcucuaccaaucaugauuacacgaucuggaugcccgaagaaccgagacuuggaacauccugugacauuuucaccagcucuaagggcaaaaaggccuccaaagggggaaagacaugcggcuuugucgaugaacgggggcuguauaagagccucaaaggagcuuguaagcugaaacugugcggcgugcucggccugcgccuuauggacgggaccuggguguccauccagaccucugaugacacaaagugguguccucccgaccagcuggucaaccuccacgauuuccacagcgacgagaucgagcaucugguuguggaggagcuugugaaaaagagagaagagugccuggaugcccucgaauccauuaugacgaccaagagcgucucuuuucggcgccuguccuaccugagaaaacucgugccuggauucggcaaggcguauacaaucuuuaauaaaacccugauggaggccgacgcucacuacaagagcguucggacauggaacgagauuauccccucuaaagggugccuuaaggugcgcgaaagaugucaucccccugucgauggaguguucuucaauggcauuauccuggggccggacggaaacguucucauccccgagaugcagagcucccugcuucaacagcacauggaacugcucgagucuagcgugauuccucugaugcacccccuggccgauccuuccaccgucuuuaaggaaggcgacgaggcugaggauuucguggaaguccaucuccccgacgugcacaaacagaucagcggcguugaucuggggcuuccgucuuggggaaaguaucugcucaugauugccggcgggcuggcgacgcuggugcuuaucauuugcuccauggccuguugccggcgcacaaaaagaaccgagagccggagacgcgacucucaggaauccgagaagaaagucaccgugacaccucaaacccggaagguugugagcuccugggaacucuacaagucugagggagacgcuagccuguga

SEQ ID NO: 222643 - RNA, 1575 nt, Artificial Sequence
  derived and/or modified CDS sequence (opt5) from glycoprotein__RABV__AB563791.1
augaucccccaggcccuucucuucgugccucugcuugucuuuagccugugcuucggcaaguuuccgauuuacaccauccccgacaaacucgggccuuggucccccauugauauccaccaucugucuuguccuaacaaucuuguuguggaggacgaaggaugcacaaaccugagcggcuucuccuauauggagcucaaggugggguacauuucugcuaucaaagucaauggauuuacguguaccggcgugguuacagaagccgagaccuauacaaacuucgugggguacgucaccacaaccuuuaagagaaaacacuuccggcccacgccugaugcgugccgcgcugccuauaauuggaagauggccggagacccgagauacgaagagagccugcauaaccccuauccugauuaccacuggcugcggaccgugaagacaaccaaagagucccucguuaucauuucucccagcguggcugaccuggauccuuacgacaagucccuucauagccgcgucuuucccucuggcaaauguuccggcaucacagugagcucuaccuauugcuccacgaaucacgauuacacaauuuggaugccggaaaacccuagacuggggaccagcugugacaucuucacaaauucucggggaaagcgcgccuccaaaggcagcaagaccugcggguuuguggaugagagaggacucuauaagucccugaaaggcgcuuguaagcugaaacugugcgggguccucggacugcggcugauggacggcaccugggccgcgauucaaacaucugaugaaacgaaguggugucccccugaccagcucguuaaccugcacgacuuccgcagcgaugagaucgagcaucuugugguggaggaacuggucaaaaagagagaagagugccucgacgcccuggaauccauuaugaccacaaaaagcgugucuuuucggcgccuuucccaccugagaaagcucguucccggcuucgggaaggcuuacaccaucuucaauaaaacacugauggaggccgaugcucauuauaagagcgugcggaccuggaacgagaucauucccucuaaaggaugccugcgcgucggcgggagaugucacccucacgugaauggaguguuuuucaacggcaucauucucgggccggacggacauguucugauccccgaaaugcagagcucccuucugcagcaacacauggagcuccuggaaucuagcgucauuccucuuaugcauccccuggccgauccuuccacgguguuuaaggacgaugacgaggcggaagauuucgucgaggugcaccuccccgacguucauaaacaggugagcggcgucgaucugggccugccgucuugggggaaguacgugcucauguccgccggaguucugacagcucuuaugcugaugaucuuucucaugaccugcugucggagagccaaucgcguggagagcgcucagcacucucugggcgaacgggggagaaaggucuccgugaccagccaguccggacgcgugaucucuagcugggaguccuauaaaucuggcggggaaacaaagcuguga

SEQ ID NO: 222644 - RNA, 1575 nt, Artificial Sequence
  derived and/or modified CDS sequence (opt5) from glycoprotein__RABV__AB563794.1
augaucccccaggcccuucucuucgugccucugcuugucuuuagccugugcuucggcaaguuuccgauuuacaccauccccgacaaacucgggccuuggucccccauugauauccaccaucugucuuguccuaacaaucuuguuguggaggacgaaggaugcacaaaccugagcggcuucuccuauauggagcucaaggugggguacauuucugcuaucaaagucaauggauuuacguguaccggcgugguuacagaagccgagaccuauacaaacuucgugggguacgucaccacaaccuuuaagagaaaacacuuccggcccacgccugaugcgugccgcgcugccuauaauuggaagauggccggagacccgagauacgaagagagccugcauaaccccuauccugauuaccacuggcugcggaccgugaagacaaccaaagagucccucguuaucauuucucccagcguggcugaccuggauccuuacgacaagucccuucauagccgcgucuuucccucuggcaaauguuccggcaucacagugagcucuaccuauugcuccacgaaucacgauuacacaauuuggaugccggaaaacccuagacuggggaccagcugugacaucuucacaaauucucggggaaagcgcgccuccaaaggcagcaagaccugcggguuuguggaugagagaggacucuauaagucccugaaaggcgcuuguaagcugaaacugugcgggguccucggacugcggcugauggacggcaccugggccgcgauucaaacaucugaugaaacgaaguggugucccccugaccagcucguuaaccugcacgacuuccgcagcgaugagaucgagcaucuugugguggaggaacuggucaaaaagagagaagagugccucgacgcccuggaauccauuaugaccacaaaaagcgugucuuuucggcgccuuucccaccugagaaagcucguucccggcuucgggaaggcuuacaccaucuucaauaaaacacugauggaggccgaugcucauuauaagagcgugcggaccuggaacgagaucauucccucuaaaggaugccugcgcgucggcgggagaugucacccucacgugaauggaguguuuuucaacggcaucauucucgggccggacggacauguucugauccccgaaaugcagagcucccuucugcagcaacacauggagcuccuggaaucuagcgucauuccucuuaugcauccccuggccgauccuuccacgguguuuaaggacgaugacgaggcggaagauuucgucgaggugcaccuccccgacguucauaaacaggugagcggcgucgaucugggccugccgucuugggggaaguacgugcucauguccgccggaguucugacagcucuuaugcugaugaucuuucucaugaccugcugucggagagccaaucgcgcugagagcgcccagcacucucugggcgaacgggggagaaagguguccgucaccagccaguccggacgcgugaucucuagcugggaguccuauaaaucuggcggggaaacaaagcuguga

SEQ ID NO: 222645 - RNA, 1575 nt, Artificial Sequence
  derived and/or modified CDS sequence (opt5) from glycoprotein__RABV__AB563797.1
augaucccccaggcccuucucuucgugccucugcuugucuuuagccugugcuucggcaaguuuccgauuuacaccauccccgacaaacucgggccuuggucccccauugauauccaccaucugucuuguccuaacaaucuuguuguggaggacgaaggaugcacaaaccugagcggcuucuccuauauggagcucaaggugggguacauuucugcuaucaaagucaauggauuuacguguaccggcgugguuacagaagccgagaccuauacaaacuucgugggguacgucaccacaaccuuuaagagaaaacacuuccggcccacgccugaugcgugccgcgcugccuauaauuggaagauggccggagacccgagauacgaagagagccugcauaaccccuauccugauuaccacuggcugcggaccgugaagacaaccaaagagucccucguuaucauuucucccagcguggcugaccuggauccuuacgacaagucccuucauagccgcgucuuucccucuggcaaauguuccggcaucacagugagcucuaccuauugcuccacgaaucacgauuacacaauuuggaugccggaaaacccuagacuggggaccagcugugacaucuucacaaauucucggggaaagcgcgccuccaaaggcagcaagaccugcggguuuguggaugagagaggacucuauaagucccugaaaggcgcuuguaagcugaaacugugcgggguccucggacugcggcugauggacggcaccugggccgcgauucaaacaucugaugaaacgaaguggugucccccugaccagcucguuaaccugcacgacuuccgcagcgaugagaucgagcaucuugugguggaggaacuggucaaaaagagagaagagugccucgacgcccuggaauccauuaugaccacaaaaagcgugucuuuucggcgccuuucccaccugagaaagcucguucccggcuucgggaaggcuuacaccaucuucaauaaaacacugauggaggccgaugcucauuauaagagcauccggaccuggaacgagauuauccccucuaaaggaugccugcgcgugggcgggagaugucacccucacgucaauggaguguuuuucaacggcauuauccucgggccggacggacauguucugauucccgaaaugcagagcucccuucugcagcaacacauggagcuccuggaaucuagcgugaucccucuuaugcauccccuggccgauccuuccacggucuuuaaggacgaugacgagacagaagauuucguggagguccaccuccccgacgugcauaaacagguuagcggcguggaucugggccugccgucuugggggaaguacguccucauguccgcgggagugcugaccgcccuuaugcugaugaucuuucucaugaccugcugucggagagcuaaucgcguugagagcgcccagcacucucugggcgaacgggggagaaagguguccgucacaagccaguccggacgcgugauuucuagcugggaguccuauaaaucuggcggggaaaccaagcuguga

SEQ ID NO: 222646 - RNA, 1575 nt, Artificial Sequence
  derived and/or modified CDS sequence (opt5) from glycoprotein__RABV__AB563798.1
augaucccccaggcccuucucuucgugccucugcuugucuuuagccugugcuucggcaaguuuccgauuuacaccauccccgacaaacucgggccuuggucccccauugauauccaccaucugucuuguccuaacaaucuuguuguggaggacgaaggaugcacaaaccugagcggcuucuccuauauggagcucaaggugggguacauuucugcuaucaaagucaauggauuuacguguaccggcgugguuacagaagccgagaccuauacaaacuucgugggguacgucaccacaaccuuuaagagaaaacacuuccggcccacgccugaugcgugccgcgcugccuauaauuggaagauggccggagacccgagauacgaagagagccugcauaaccccuauccugauuaccacuggcugcggaccgugaagacaaccaaagagucccucguuaucauuucucccagcguggcugaccuggauccuuacgacaagucccuucauagccgcgucuuucccucuggcaaauguuccggcaucacagugagcucuaccuauugcuccacgaaucacgauuacacaauuuggaugccggaaaacccuagacuggggaccagcugugacaucuucacaaauucucggggaaagcgcgccuccaaaggcagcaagaccugcggguuuguggaugagagaggacucuauaagucccugaaaggcgcuuguaagcugaaacugugcgggguccucggacugcggcugauggacggcaccugggccgcgauucaaacaucugaugaaacgaaguggugucccccugaccagcucguuaaccugcacgacuuccgcagcgaugagaucgagcaucuugugguggaggaacuggucaaaaagagagaagagugccucgacgcccuggaauccauuaugaccacaaaaagcgugucuuuucggcgccuuucccaccugagaaagcucguucccggcuucgggaaggcuuacaccaucuucaauaaaacacugauggaggccgaugcucauuauaagagcgugcggaccuggaacgagaucauucccucuaaaggaugccugcgcgucggcgggagaugucacccucacgugaauggaguguuuuucaacggcaucauucucgggccggacggacauguucugauccccgaaaugcagagcucccuucugcagcaacacauggagcuccuggaaucuagcgucauuccucuuaugcauccccuggccgauccuuccacgguguuuaaggacgaugacgaggcggaagauuucgucgaggugcaccuccccgacguucauaaacaggugagcggcgucgaucugggccugccgucuugggggaaguacgugcucauguccgccggaguucugacagcucuuaugcugaugaucuuucucaugaccugcugucggagagccaaucgcgcugagagcgcccagcacucucugggcgaagggggacggaagguguccgucaccagccaguccggcagagugaucucuagcugggaguccuauaaaucugggggcgaaacaaagcuguga

SEQ ID NO: 222647 - RNA, 1575 nt, Artificial Sequence
  derived and/or modified CDS sequence (opt5) from glycoprotein__RABV__AB563800.1
augaucccccaggcccuucucuucgugccucugcuugucuuuagccugugcuucggcaaguuuccgauuuacaccauccccgacaaacucgggccuuggucccccauugauauccaccaucugucuuguccuaacaaucuuguuguggaggacgaaggaugcacaaaccugagcggcuucuccuauauggagcucaaggugggguacauuucugcuaucaaagucaauggauuuacguguaccggcgugguuacagaagccgagaccuauacaaacuucgugggguacgucaccacaaccuuuaagagaaaacacuuccggcccacgccugaugcgugccgcgcugccuauaauuggaagauggccggagacccgagauacgaagagagccugcauaaccccuauccugauuaccacuggcugcggaccgugaagacaaccaaagagucccucguuaucauuucucccagcguggcugaccuggauccuuacgacaagucccuucauagccgcgucuuucccucuggcaaauguuccggcaucacagugagcucuaccuauugcuccacgaaucacgauuacacaauuuggaugccggaaaacccuagacuggggaccagcugugacaucuucacaaauucucggggaaagcgcgccuccaaaggcagcaagaccugcggguuuguggaugagagaggacucuauaagucccugaaaggcgcuuguaagcugaaacugugcgggguccucggacugcggcugauggacggcaccugggccgcgauucaaacaucugaugaaacgaaguggugucccccugaccagcucguuaaccugcacgacuuccgcagcgaugagaucgagcaucuugugguggaggaacuggucaaaaagagagaagagugccucgacgcccuggaauccauuaugaccacaaaaagcgugucuuuucggcgccuuucccaccugagaaagcucguucccggcuucgggaaggcuuacaccaucuucaauaaaacacugauggaggccgaugcucauuauaagagcgugcggaccuggaacgagaucauucccucuaaaggaugccugcgcgucggcgggagaugucacccucacgugaauggaguguuuuucaacggcaucauucucgggccggacggacauguucugauccccgaaaugcagagcucccuucugcagcaacacauggagcuccuggaaucuagcgucauuccucuuaugcauccccuggccgauccuuccacgguguuuaaggacgaugacgaggcggaagauuucgucgaggugcaccuccccgacguucauaaacaggugagcggcgucgaucugggccugccgucuugggggaaguacgugcucauguccgccggaguucugacagcucuuaugcugaugaucuuucucaugaccugcugucggagagccaaucgcgcugagagcgcccagcacucucugggcgaacgggggagaaagguguccgucaccagccaguccggacgcgugaucucuagcugggaguccuauaaaaacggcggggaaacaaagcuguga

SEQ ID NO: 222648 - RNA, 1575 nt, Artificial Sequence
  derived and/or modified CDS sequence (opt5) from glycoprotein__RABV__AB563803.1
augaucccccaggcccuucucuucgugccucugcuugucuuuagccugugcuucggcaaguuuccgauuuacaccauccccgacaaacucgggccuuggucccccauugauauccaccaucugucuuguccuaacaaucuuguuguggaggacgaaggaugcacaaaccugagcggcuucuccuauauggagcucaaggugggguacauuucugcuaucaaagucaauggauuuacguguaccggcgugguuacagaagccgagaccuauacaaacuucgugggguacgucaccacaaccuuuaagagaaaacacuuccggcccacgccugaugcgugccgcgcugccuauaauuggaagauggccggagacccgagauacgaagagagccugcauaaccccuauccugauuaccacuggcugcggaccgugaagacaaccaaagagucccucguuaucauuucucccagcguggcugaccuggauccuuacgacaagucccuucauagccgcgucuuucccucuggcaaauguuccggcaucacagugagcucuaccuauugcuccacgaaucacgauuacacaauuuggaugccggaaaacccuagacuggggaccagcugugacaucuucacaaauucucggggaaagcgcgccuccaaaggcagcaagaccugcggguuuguggaugagagaggacucuauaagucccugaaaggcgcuuguaagcugaaacugugcgggguccucggacugcggcugauggacggcaccugggccgcgauucaaacaucugaugaaacgaaguggugucccccugaccagcucguuaaccugcacgacuuccgcagcgaugagaucgagcaucuugugguggaggaacuggucaaaaagagagaagagugccucgacgcccuggaauccauuaugaccacaaaaagcgugucuuuucggcgccuuucccaccugagaaagcucguucccggcuucgggaaggcuuacaccaucuucaauaaaacacugauggaggccgaugcucauuauaagagcgugcggaccuggaacgagaucauucccucuaaaggaugccugcgcgucggcgggagaugucacccucacgugaauggaguguuuuucaacggcaucauucucgggccggacggacauguucugauccccgaaaugcagagcucccuucugcagcaacacauggagcuccuggaaucuagcgucauuccucuuaugcauccccuggccgauccuuccacgguguuuaaggacgaugacgaggcggaagauuucgucgaggugcaccuccccgacguucauaaacaggugagcggcgucgaucugggccugccgucuugggggaaguacgugcucauguccgccggaguucugacagcucuuaugcugaugaucuuucucaugaccugcugucggagagccaaucgcgcugagagcggccagcacucucugggggaacggggaagaaagguguccgucaccagccaguccggccgcgugaucucuagcugggaguccuauaaaucugggggcgaaacaaagcuguga

SEQ ID NO: 222649 - RNA, 1575 nt, Artificial Sequence; identical to SEQ ID NO: 222644
  derived and/or modified CDS sequence (opt5) from glycoprotein__RABV__AB563806.1

SEQ ID NO: 222650 - RNA, 1575 nt, Artificial Sequence
  derived and/or modified CDS sequence (opt5) from glycoprotein__RABV__AB563807.1
augaucccccaggcccugauguucgcuccucuccugguguuuagccuuugcuucggcaaguuuccgauuuacaccauccccgacaaacuggggccuuggucccccauugauauccaccaucucucuuguccuaacaaucuggucguugaggacgaaggaugcacaaaccuuagcggcuucuccuauauggagcugaaggugggguacauuucugccaucaaagugaauggauuuacguguaccggcgucgugacagaagcggagaccuauacaaacuucguuggguacgugaccacaaccuuuaagagaaaacacuuccggcccacgccugaugcuugccgcgccgccuauaauuggaagauggcuggagacccgagauacgaagagagccuccauaaccccuauccugauuaccacuggcugcggaccgucaagacaaccaaagagucccuggugaucauuucucccagcguugccgaccucgauccuuacgacaagucccugcauagccgcguguuucccucuggcaaauguuccggcaucacagucagcucuaccuauugcuccacgaaucacgauuacacaauuuggaugccggaaaacccuagacuugggaccagcugugacaucuucacaaauucucggggaaagcgcgcuuccaaaggcagcaagaccugcggguuuguggaugagagaggacuguauaagucccucaaaggcgccuguaagcugaaacuuugcggggugcugggacuccggcugauggacggcaccugggcggccauucaaacaucugaugaaacgaaguggugucccccugaccagcuggucaaccuccacgacuuccgcagcgaugagaucgagcaucugguuguggaggaacuugugaaaaagagagaagagugccuggacgcucucgaauccauuaugaccacaaaaagcgucucuuuucggcgccugucccaccuuagaaagcuggugcccggcuucgggaaggccuacaccaucuucaauaaaacacucauggaggcugaugcccauuauaagagcguucggaccuggaacgagaucauucccucuaaaggaugccugcgcgugggcgggagaugucacccucacgucaauggaguguuuuucaacggcaucauucuggggccggacggacauguucucauccccgaaaugcagagcucccugcuucagcaacacauggagcugcucgaaucuagcgugauuccucugaugcauccccuugcggauccuuccacggucuuuaaggacgauggcgaggccgaagacuucguggagguccaucugcccgaugugcacaaacagguuagcggcguggaccucgggcugccgucuuggggaaaguacguccugauguccgcuggcgugcucacagcccugaugcuuaugaucuuucugaugaccugcugucggagagcuaaucgcgccgagagcgcccagcacucucucggggaacggggaagaaagguuuccgugaccagccaguccggccgcgucaucucuagcugggaguccuauaaaucugggggcgaaacacggcuguga

SEQ ID NO: 222651 - RNA, 1575 nt, Artificial Sequence
  derived and/or modified CDS sequence (opt5) from glycoprotein__RABV__AB563809.1
augaucccccaggcccugcucuuugugccucugcuugucuuuagccugugcuucggcaaguuuccgauuuacaccauccccgacaaacucgggccuuggucccccauugauauccaccaucugucuuguccuaacaaucuuguuguggaggacgaaggaugcacaaaccugagcggcuucuccuaucucgagcugaaggugggguacauuucugcuaucaaagucaauggauuuacguguaccggcgugguuacagaagccgagaccuauacaaacuucgugggguacgucaccacaaccuuuaagagaaaacacuuccggcccacgccugaugcgugccgcgcugccuauaauuggaagauggccggagacccgagauacgaagagagccugcauaaccccuauccugauuaccacuggcuccggaccgugaagacaaccaaagagucccugguuaucauuucucccagcguggcugaccuugauccuuacgacaagucccugcauagccgcgucuuucccucuggcaaauguuccggcaucacagugagcucuaccuauugcuccacgaaucacgauuacacaauuuggaugccggaaaacccuagacucgggaccagcugugacaucuucacaaauucucggggaaagcgcgccuccaaaggcagcaagaccugcggguuuguggaugagagaggacuguauaagucccuuaaaggcgcuuguaagcugaaacucugcgggguccugggacugcggcucauggacggcaccugggccgcgauucaaacaucugaugaaacgaaguggugucccccugaccagcugguuaaccuucacgacuuccgcagcgaugagaucgagcaucuggugguggaggaacucgucaaaaagagagaagagugccuggacgcccuugaauccauuaugaccacaaaaagcgugucuuuucggcgccugucccaccucagaaagcugguucccggcuucgggaaggcuuacaccaucuucaauaaaacacugauggaggccgaugcucauuauaagagcgugcggaccuggaacgagaucauucccucuaaaggaugccuccgcgucggcgggagaugucacccucacgugaauggaguuuucuucaacggcaucauucuggggccggacggacaugugcuuauccccgaaaugcagagcucccugcuccagcaacacauggagcugcuugaaucuagcgucauuccucugaugcauccccucgccgauccuuccacgguguuuaaggacgaugacgaggcggaagauuucgucgaggugcaccuucccgacguucauaaacaggugagcggcgucgaucugggccucccgucuugggggaaguacgugcugauguccgccggaguucuuacagcucugaugcucaugaucuuucugaugaccugcugucggagagccaaucgcgcugagagcgcccagcacucucugggcgaagggggacggaagguguccgucaccagccaguccggcagagugaucucuagcugggaguccuauaaaucugggggcgaaacaaagcuguga

SEQ ID NO: 222652 - RNA, 1575 nt, Artificial Sequence
  derived and/or modified CDS sequence (opt5) from glycoprotein__RABV__AB563812.1
augaucccccaggcccugcuguucgugccucugcuugucuuuagccugugcuucggcaaguuuccgauuuacaccauccccgacaaacucgggccuuggucccccauugauauccaccaucugucuuguccuaacaaucuuguuguggaggacgaaggaugcacaaaccugagcggcuucuccuauauggagcucaaggugggguacauuucugcuaucaaagucaauggauuuacguguaccggcgugguuacagaagccgagaccuauacaaacuucgugggguacgucaccacaaccuuuaagagaaaacacgugcggcccacgccugaugcgugccgcgcugccuauaauuggaagauggccggagacccgagauacgaagagagccugcauaaccccuauccugauuaccacuggguucggaccgugaagacaaccaaagagucccuggucaucauuucucccagcguggcugaccucgauccuuacgacaagucccugcauagccgcguguuccccucuggcaaauguuccggcaucacagucagcucuaccuauugcuccacgaaucacgauuacacaauuuggaugccggaaaacccuagacuugggaccagcugugacaucuuuacaaauucucggggaaagcgcgccuccaaaggcagcaagaccugcggguucguugaugagagaggacuguauaagucccucaaaggcgcuuguaagcugaaacuuugcggggugcugggacuccggcugauggacggcaccugggccgcgauucaaacaucugaugaaacgaaguggugucccccugaccagcuggugaaccuccacgacuuucgcagcgaugagaucgagcaucuggucguggaggaacuuguuaaaaagagagaagagugccuggacgcccucgaauccauuaugaccacaaaaagcgugucuuuccggcgccugucccaccuuagaaagcugguccccggcuuugggaaggcuuacaccaucuucaauaaaacacucauggaggccgaugcucauuauaagagcgugcggaccuggaacgagaucauucccucuaaaggaugccugcgcguuggcgggagaugucacccucacgugaauggagucuucuuuaacggcaucauucuggggccggacggacaugugcucauccccgaaaugcagagcucccugcuucagcaacacauggagcugcucgaaucuagcgucauuccucugaugcauccccuugccgauccuuccacgguguucaaggacgaugacgaggcggaagauuuuguugaggugcaccuccccgacguccauaaacaggugagcggcguugaucucggccugccgucuugggggaaguacgugcugauguccgccggaguccucacagcucugaugcuuaugaucuuccugaugaccugcugucggagaaccaaucgcgccgagagcgcucagcacucucuccgggaaagaggccgcaagguguccgugacaagccaguccgggcggguuaucucuagcugggaguccuauaaaucuggaggcgaaaccaagcuguga

SEQ ID NO: 222653 - RNA, 1575 nt, Artificial Sequence
  derived and/or modified CDS sequence (opt5) from glycoprotein__RABV__AB563813.1
augaucccccaggcccuucucuucgugccucugcuugucuuuagccugugcuucggcaaguuuccgauuuacaccauccccgacaaacucgggccuuggucccccauugauauccaccaucugucuuguccuaacaaucuuguuguggaggacgaaggaugcacaaaccugagcggcuucuccuauauggagcucaaggugggguacauuucugcuaucaaagucaauggauuuacguguaccggcgugguuacagaagccgagaccuauacaaacuucgugggguacgucaccacaaccuuuaagagaaaacacuuccggcccacgccugaugcgugccgcgcugccuauaauuggaagauggccggagacccgagauacgaagagagccugcauaaccccuauccugauuaccacuggcugcggaccgugaagacaaccaaagagucccucguuaucauuucucccagcguggcugaccuggauccuuacgacaagucccuucauagccgcgucuuucccucuggcaaauguuccggcaucacagugagcucuaccuauugcuccacgaaucacgauuacacaauuuggaugccggaaaacccuagacugggggccagcugugacaucuucaccaauucucggggaaagcgcgcuuccaaaggcagcaagacaugcggguuuguggaugagagaggacucuauaagucccugaaaggcgccuguaagcugaaacugugcgggguccucggacugcggcugauggacggcaccugggcggccauucaaaccucugaugaaacaaaguggugucccccugaccagcucguuaaccugcacgacuuccgcagcgaugagaucgagcaucuugugguggaggaacuggucaaaaagagagaagagugccucgacgcucuggaauccauuaugacgaccaaaagcgugucuuuucggcgccuuucccaccugagaaagcucguucccggcuucgggaaggccuacacaaucuucaauaaaacccugauggaggcugaugcccauuauaagagcgugcggacauggaacgagaucauucccucuaaaggaugccugcgcgucggcgggagaugucacccucacgugaauggaguguuuuucaacggcaucauucucgggccggacggacauguucugauccccgaaaugcagagcucccuucugcagcaacacauggagcuccuggaaucuagcgucauuccucuuaugcauccccuggcggauccuuccaccguguuuaaggacgaugacgaggccgaagauuucgucgaggugcaccuccccgacguucauaaacaggugagcggcgucgaucugggccugccgucuugggggaaguacgugcucauguccgcuggaguucugacggcccuuaugcugaugaucuuucucaugacaugcugucggagagcuaaucgcguggagagcgaacagcacucucugggccagcgggggagaaaggucuccgugaccagccaauccggacgcgugaucucuagcugggaguccuauaaaucuggcggggaaaccaagcuguga

SEQ ID NO: 222654 - RNA, 1575 nt, Artificial Sequence; identical to SEQ ID NO: 222643
  derived and/or modified CDS sequence (opt5) from glycoprotein__RABV__AB563816.1

SEQ ID NO: 222655 - RNA, 1575 nt, Artificial Sequence
  derived and/or modified CDS sequence (opt5) from glycoprotein__RABV__AB563817.1
augaucccccaggcccuucucuucgugccucugcuugucuuuagccugugcuucggcaaguuuccgauuuacaccauccccgacaaacucgggccuuggucccccauugauauccaccaucugucuuguccuaacaaucuuguuguggaggacgaaggaugcacaaaccugagcggcuucuccuauauggagcucaaggugggguacauuucugcuaucaaagucaauggauuuacguguaccggcgugguuacagaagccgagaccuauacaaacuucgugggguacgucaccacaaccuuuaagagaaaacacuuccggcccacgccugaugcgugccgcgcugccuauaauuggaagauggccggagacccgagauacgaagagagccugcauaaccccuauccugauuaccacuggcugcggaccgugaagacaaccaaagagucccucguuaucauuucucccagcguggcugaccuggauccuuacgacaagucccuucauagccgcgucuuucccucuggcaaauguuccggcaucacagugagcucuaccuauugcuccacgaaucacgauuacacaauuuggaugccggaaaacccuagacuggggaccagcugugacaucuucacaaauucucggggaaagcgcgccuccaaaggcagcaagaccugcggguuuguggaugagagaggacucuauaagucccugaaaggcgcuuguaagcugaaacugugcgggguccucggacugcggcugauggacggcaccugggccgcgauucaaacaucugaugaaacgaaguggugucccccugaccagcucguuaaccugcacgacuuccgcagcgaugagaucgagcaucuugugguggaggaacuggucaaaaagagagaagagugccucgacgcccuggaauccauuaugaccacaaaaagcgugucuuuucggcgccuuucccaccugagaaagcucguucccggcuucgggaaggcuuacaccaucuucaauaaaacacugauggaggccgaugcucauuauaagagcgugcggaccuggaacgagaucauucccucuaaaggaugccugcgcgucggcgggagaugucacccucacgugaauggaguguuuuucaacggcaucauucucgggccggacggacauguucugauccccgaaaugcagagcucccuucugcagcaacacauggagcuccuggaaucuagcgucauuccucuuaugcauccccuggccgauccuuccacgguguuuaaggacgaugacgaggcggaagauuucgucgaggugcaccuccccgacguucauaaacaggugagcggcgucgaucugggccugccgucuugggggaaguacgugcucauguccgccggagcucugacagcccuuaugcugaugaucuuucucaugaccugcugucggagagcuaaucgcgccgagagcgcccagcacucucugggcgaacgggggagaaagguuuccgugaccagccaguccggacgcgucaucucuagcugggaguccuauaaaucuggcggggaaacaaagcuguga

SEQ ID NO: 222656 - RNA, 1575 nt, Artificial Sequence; identical to SEQ ID NO: 222643
  derived and/or modified CDS sequence (opt5) from glycoprotein__RABV__AB563819.1

SEQ ID NO: 222657 - RNA, 1575 nt, Artificial Sequence
  derived and/or modified CDS sequence (opt5) from glycoprotein__RABV__AB563820.1
augaucccccaggcccuucucuucgugccucugcuugucuuuagccugugcuucggcaaguuuccgauuuacaccauccccgacaaacucgggccuuggucccccauugauauccaccaucugucuuguccuaacaaucuuguuguggaggacgaaggaugcacaaaccugagcggcuucuccuauauggagcucaaggugggguacauuucugcuaucaaagucaauggauuuacguguaccggcgugguuacagaagccgagaccuauacaaacuucgugggguacgucaccacaaccuuuaagagaaaacacuuccggcccaugccugaugcgugccgcgcugccuauaauuggaagauggccggagacccgagauacgaagagagccugcauaaccccuauccugauuaccacuggcugcggacggugaagaccacaaaagagucccucguuaucauuucucccagcguggcugaccuggauccuuacgacaagucccuucauagccgcgucuuucccucuggcaaauguuccggcaucaccgugagcucuacauauugcuccaccaaucacgauuacacgauuuggaugccggaaaacccuagacuggggacaagcugugacaucuucauuaauucucggggaaagcgcgccuccaaaggcagcaagaccugcggguuuguggaugagagaggacucuauaagucccugaaaggcgcuuguaagcugaaacugugcgggguccucggacugcggcugauggacggcacaugggccgcgauccaaaccucugaugaaaccaaguggugucccccugaccagcucguuaaccugcacgacuuccgcagcgaugagauugagcaucuugugguggaggaacuggucaaaaagagagaagagugccucgacgcccuggaauccaucaugacaacgaaaagcgugucuuuucggcgccuuucccaccugagaaagcucguucccggcuucgggaaggcuuacaccaucuucaauaaaacacugauggaggccgaugcucauuauaagagcgugcggaccuggaacgagauuauccccucuaaaggaugccugcgcgucggcgggagaugucacccucacgugaauggaguguuuuucaacggcauuauccucgggccggacggacauguucugauucccgaaaugcagagcucccuucugcagcaacacauggagcuccuggaaucuagcgucaucccucuuaugcauccccuggccgauccuuccacaguguuuaaggacgaugacgaggcggaagauuucgucgaggugcaccuccccgacguucauaaacaggugagcggcgucgaucugggccugccgucuugggggaaguacgugcucauguccgccggaguucugaccgcucuuaugcugaugaucuuucucaugacgugcugucggagaagcaaucgcgccaagucugagcagcacucccugggcgaacgggggagaaaagugagcgucacaucccagucuggacgcgugauuagcuccugggagucuuauaagcggggcggggaaaccaaacuguga

SEQ ID NO: 222658 - RNA, 1575 nt, Artificial Sequence
  derived and/or modified CDS sequence (opt5) from glycoprotein__RABV__AB563821.1
augaucccccaggcccugcucuuugugccucugcuugucuuuagccugugcuucggcaaguuuccgauuuacaccauccccgacaaacucgggccuuggucccccauugauauccaccaucugucuuguccuaacaaucuuguuguggaggacgaaggaugcacaaaccugagcggccucuccuauauggagcugaaggugggguacauuucugcuaucaaagucaauggauucacguguaccggcgugguuacagaagccgagaccuauacaaacuuugugggguacgucaccacaaccuucaagagaaaacacuuucggcccacgccugaugcgugccgcgcugccuauaauuggaagauggccggagacccgagauacgaagagagccugcauaaccccuauccugauuaccacuggcuccggaccgugaagacaaccaaagagucccugguuaucauuucucccagcguggcugaccuugauccuuacgacaagucccugcauagccgcgucuuccccucuggcaaauguuccggcaucacagugagcucuaccuauugcuuuacgaaucacgauuacacaauuuggaugccggaaaacccuagacucgggaccuccugugacaucuucacaaauagccggggaaagcgcgccucuaaaggcuccaagaccugcggguuuguggaugagagaggacuguauaagagccuuaaaggcgcuuguaagcugaaacucugcgggguccugggacugcggcucauggacggcaccugggccgcgauucaaacauccgaugaaacgaaguggugucccccugaccagcugguuaaccuucacgacuuccgcucugaugagaucgagcaucuggugguggaggaacucgucaaaaagagagaagagugccuggacgcccuugaaagcauuaugaccacaaaauccgugagcuuucggcgccugucucaccucagaaagcugguucccggcuucgggaaggcuuacaccaucuucaauaaaacacugauggaggccgaugcucauuauaaguccgugcggaccugggacgagaucauucccagcaaaggaugccuccgcgucggcgggagaugucacccucacgugaacggaguuuucuucaauggcaucauucuggggccggauggacaugugcuuauccccgaaaugcagucuagccugcuccagcaacacauggagcugcuugaauccucugucauuccucugaugcauccccucgccgacccuagcacgguguuuaaggaugacgaugaggcggaagacuucgucgaggugcaccuucccgauguucauaaacagguguccggcgucgaccugggccucccgagcugggggaaguacgugcugaugucugccggaguucuuacagcucugaugcucaugaucuuucugaugaccugcugucggagagccaaccgcgcugaguccgcccagcacagccugggcgaacgggggagaaaggugucugucaccucccagagcggacgcgugaucuccucuugggagagcuauaaauccggcggggaaacaaagcuguga

SEQ ID NO: 222659 - RNA, 1575 nt, Artificial Sequence; identical to SEQ ID NO: 222643
  derived and/or modified CDS sequence (opt5) from glycoprotein__RABV__AB563822.1

SEQ ID NO: 222660 - RNA, 1575 nt, Artificial Sequence
  derived and/or modified CDS sequence (opt5) from glycoprotein__RABV__AB563823.1
augaucccccaggcccugcuccuggugccucuucuggucuucagccucugcuuuggcaaguucccgauuuacaccauccccgacaaacuggggccuuggucccccauugauauccaccaucuuucuuguccuaacaaucugguuguggaggacgaaggaugcacaaaccucagcggcuuuuccuauauggagcugaaggugggguacauuucugcuaucaaagucaauggauucacguguaccggcgugguuacagaagccgagaccuauacaaacuuugugggguacgucaccacaaccuucaagagaaaacacuuucggcccacgccugaugcgugccgcgcugccuauaauuggaagauggccggagacccgagauacgaagagagccugcauaaccccuauccugauuaccacuggcuccggaccgugaagacaaccaaagagucccugguuaucauuucucccagcguggcugaccuugauccuuacgacaagucccugcauagccgcgucuuccccucuggcaaauguuccggcaucacagugagcucuaccuauugcuccacgaaucacgauuacacaauuuggaugccggaaaacccuagacucgggaccagcugugacaucuuuacaaauucucggggaaagcgcgccuccaaaggcagcaagaccugcggguucguggaugagagaggacuguauaagucccuuaaaggcgcuuguaagcugaaacucugcgggguccugggacugcggcucauggacggcaccugggccgcgauucaaacaucugaugaaacgaaguggugucccccugaccagcugguuaaccuucacgacuuucgcagcgaugagaucgagcaucuggugguggaggaacucgucaaaaagagagaagagugccuggacgcccuugaauccauuaugaccacaaaaagcgugucuuuccggcgccugucccaccucagaaagcugguucccggcuuugggaaggcuuacaccaucuucaauaaaacacugauggaggccgaugcucauuauaagagcgugcggaccuggaacgagaucauucccucuaaaggaugccuccgcgucggcgggagaugucacccucacgugaauggaguuuucuuuaacggcaucauucuggggccggacggacaugugcuuauccccgaaaugcagagcucccugcuccagcaacacauggagcugcuugaaucuagcgucauuccucugaugcauccccucgccgauccuuccacgguguucaaggacgaugacgaggcggaagauuuugucgaggugcaccuucccgacguucauaaacaggugagcggcgucgaucugggccucccgucuugggggaaguacgugcugauguccgccggaguucuuacagcucugaugcucaugaucuuccugaugaccugcugucggagagccaaucgcguggagagcgcucagcacucucugggcgaacgggggagaaaggucuccgugaccagccaguccggacgcgugaucucuagcugggaguccuauaaaucuggcggggaaacaaagcuguga

SEQ ID NO: 222661 - RNA, 1575 nt, Artificial Sequence; identical to SEQ ID NO: 222643
  derived and/or modified CDS sequence (opt5) from glycoprotein__RABV__AB563824.1

SEQ ID NO: 222662 - RNA, 1575 nt, Artificial Sequence
  derived and/or modified CDS sequence (opt5) from glycoprotein__RABV__AB563826.1
augaucccccaggcccuucucuucgugccucugcuugucuuuagccugugcuucggcaaguuuccgauuuacaccauccccgacaaacucgggccuuggucccccauugauauccaccaucugucuuguccuaacaaucuuguuguggaggacgaaggaugcacaaaccugagcggcuucuccuauauggagcucaaggugggguacauuucugcuaucaaagucaauggauuuacguguaccggcgugguuacagaagccgagaccuauacaaacuucgugggguacgucaccacaaccuuuaagagaaaacacuuccggcccacgccugaugcgugccgcgcugccuauaauuggaagauggccggagacccgagauacgaagagagccugcauaaccccuauccugauuaccacuggcugcggaccgugaagacaaccaaagagucccucguuaucauuucucccagcguggcugaccuggauccuuacgacaagucccuucauagccgcgucuuucccucuggcaaauguuccggcaucacagugagcucuaccuauugcuccacgaaucacgauuacacaauuuggaugccggaaaacccuagacuggggaccagcugugacaucuucacaaauucucggggaaagcgcgccuccaaaggcagcaagaccugcggguuuguggaugagagaggacucuauaagucccugaaaggcgcuuguaagcugaaacugugcgggguccucggacugcggcugauggacggcaccugggccgcgauucaaacaucugaugaaacgaaguggugucccccugaccagcucguuaaccugcacgacuuccgcagcgaugagaucgagcaucuugugguggaggaacuggucaaaaagagagaagagugccucgacgcccuggaauccauuaugaccacaaaaagcgugucuuuucggcgccuuucccaccugagaaagcucguucccggcuucgggaaggcuuacaccaucuucaauaaaacacugauggaggccgaugcucauuauaagagcgugcggaccuggaacgagaucauucccucuaaaggaugccugcgcgucggcgggagaugucacccucacgugaauggaguguuuuucaacggcaucauucucgggccggacggacauguucugauccccgaaaugcagagcucccuucugcagcaacacauggagcuccuggaaucuagcgucauuccucuuaugcauccccuggccgauccuuccagcguguuuaaggacgaugacgaggcggaagauuucgucgaggugcaccuccccgacguucauaaacaggugucuggcgucgaucugggccugccguccugggggaaguacgugcucaugagcgccggaguucugacggcucuuaugcugaugaucuuucucaugacaugcugucggagagccaaucgcguggagucugcucagcacucccugggcgaacgggggagaaaggucagcgugaccucccagucuggacgcgugaucagcuccugggagucuuauaaaagcggcggggaaaccaagcuguga

SEQ ID NO: 222663 - RNA, 1575 nt, Artificial Sequence
  derived and/or modified CDS sequence (opt5) from glycoprotein__RABV__AB563827.1
augaucccccaggcccuucucuucgugccucugcuugucuuuagccugugcuucggcaaguuuccgauuuacaccauccccgacaaacucgggccuuggucccccauugauauccaccaucugucuuguccuaacaaucuuguuguggaggacgaaggaugcacaaaccugagcggcuucuccuauauggagcucaaggugggguacauuucugcuaucaaagucaauggauuuacguguaccggcgugguuacagaagccgagaccuauacaaacuucgugggguacgucaccacaaccuuuaagagaaaacacuuccggcccacgccugaugcgugccgcgcugccuauaauuggaagauggccggagacccgagauacgaagagagccugcauaaccccuauccugauuaccacuggcugcggaccgugaagacaaccaaagagucccucguuaucauuucucccagcguggcugaccuggauccuuacgacaagucccuucauagccgcgucuuucccucuggcaaauguuccggcaucacagugagcucuaccuauugcuccacgaaucacgauuacacaauuuggaugccggaaaacccuagacuggggaccagcugugacaucuucacaaauucucggggaaagcgcgccuccaaaggcagcaagaccugcggguuuguggaugagagaggacucuauaagucccugaaaggcgcuuguaagcugaaacugugcgggguccucggacugcggcugauggacggcaccuggguugccauucaaacaucugaugaaacgaaguggugucccccugaccagcucgugaaccugcacgacuuccgcagcgaugagaucgagcaucuuguggucgaggaacuggugaaaaagagagaagagugccucgacgcgcuggaauccauuaugaccacaaaaagcguuucuuuucggcgccuuucccaccugagaaagcucgugcccggcuucgggaaggccuacaccaucuucaauaaaacacugauggaggcugaugcccauuauaagagcguccggaccuggaacgagaucauucccucuaaaggaugccugcgcgugggcgggagaugucacccucacguuaauggaguguuuuucaacggcaucauucucgggccggacggacauguccugauccccgaaaugcagagcucccuucugcagcaacacauggagcuccuggaaucuagcgugauuccucuuaugcauccccuggcugauccuuccacggucuuuaaggacgaugacgaggccgaagauuucguggagguucaccuccccgacgugcauaaacaggucagcggcguggaucugggccugccgucuugggggaaguacguucucauguccgcgggagugcugacagcccuuaugcugaugaucuuucucaugaccugcugucggagagcuaaucgcgucgagagcgcccagcacucucugggcgaacgggggagaaagguguccgugaccagccaguccggacgcguuaucucuagcugggaguccuauaaaucuggcggggaaacaaagcuguga

SEQ ID NO: 222664 - RNA, 1575 nt, Artificial Sequence
  derived and/or modified CDS sequence (opt5) from glycoprotein__RABV__AB563830.1
augaucccccaggcccugcuccuggugccucuucuggucuucagccucugcuuuggcaaguucccgauuuacaccauccccgacaaacuggggccuuggucccccauugauauccaccaucuuucuuguccuaacaaucugguuguggaggacgaaggaugcacaaaccucagcggcuuuuccuauauggagcugaaggugggguacauuucugcuaucaaagucaauggauucacguguaccggcgugguuacagaagccgagaccuauacaaacuuugugggguacgucaccacaaccuucaagagaaaacacuuucggcccacgccugaugcgugccgcgcugccuauaauuggaagauggccggagacccgagauacgaagagagccugcauaaccccuauccugauuaccacuggcuccggaccgugaagacaaccaaagagucccugguuaucauuucucccagcguggcugaccuugauccuuacgacaagucccugcauagccgcgucuuccccucuggcaaauguuccggcaucacagugagcucuaccuauugcuccacgaaucacgauuacacaauuuggaugccggaaaacccuagacucgggaccagcugugacaucuuuacaaauucucggggaaagcgcgccuccaaaggcagcaagaccugcggguucguggaugagagaggacuguauaagucccuuaaaggcgcuuguaagcugaaacucugcgggguccugggacugcggcucauggacggcaccugggccgcgauucaaacaucugaugaaacgaaguggugucccccugaccagcugguuaaccuucacgacuuucgcagcgaugagaucgagcaucuggugguggaggaacucgucaaaaagagagaagagugccuggacgcccuugaauccauuaugaccacaaaaagcgugucuuuccggcgccugucccaccucagaaagcugguucccggcuuugggaaggcuuacaccaucuucaauaaaacacugauggaggccgaugcucauuauaagagcgugcggaccuggaacgagaucauucccucuaaaggaugccuccgcgucggcgggagaugucacccucacgugaauggaguuuucuuuaacggcaucauucuggggccggacggacaugugcuuauccccgaaaugcagagcucccugcuccagcaacacauggagcugcuugaaucuagcgucauuccucugaugcauccccucgccgauccuuccacgguguucaaggacgaugacgaggcggaagauuuugucgaggugcaccuucccgacguucauaaacaggugagcggcgucgaucugggccucccgucuugggggaaguacgugcugauguccgccggaauccuuacagcucugaugcucaugaucuuccugaugaccugcugucggagagccaaucgcguugagagcgcucagcacucucugggcgaacgggggagaaagguguccgucaccagccaguccggacgcgugauuucuagcugggaguccuauaaaucuggcggggaaacaaagcuguga

SEQ ID NO: 222665 - RNA, 1575 nt, Artificial Sequence; identical to SEQ ID NO: 222660
  derived and/or modified CDS sequence (opt5) from glycoprotein__RABV__AB563836.1

SEQ ID NO: 222666 - RNA, 1575 nt, Artificial Sequence
  derived and/or modified CDS sequence (opt5) from glycoprotein__RABV__AB563837.1
augaucccccaggcccuucucuucgugccucugcuugucuuuagccugugcuucggcaaguuuccgauuuacaccauccccgacaaacucgggccuuggucccccauugauauccaccaucugucuuguccuaacaaucuuguuguggaggacgaaggaugcacaaaccugagcggcuucuccuauauggagcucaaggugggguacauuucugcuaucaaagucaauggauuuacguguaccggcgugguuacagaagccgagaccuauacaaacuucgugggguacgucaccacaaccuuuaagagaaaacacuuccggcccacgccugaugcgugccgcgcugccuauaauuggaagauggccggagacccgagauacgaagagagccugcauaaccccuauccugauuaccacuggcugcggaccgugaagacaaccaaagagucccucguuaucauuucucccagcguggcugaccuggauccuuacgacaagucccuucauagccgcgucuuucccucuggcaaauguuccggcaucacaguguucagcaccuauugcucuacgaaucacgauuacacaauuuggaugccggaaaacccuagacuggggaccuccugugacaucuuuacaaauagccggggaaagcgcgccucuaaaggcuccaagaccugcggguucguggaugagagaggacucuauaagagccugaaaggcgcuuguaagcugaaacugugcgggguccucggacugcggcugauggacggcaccugggccgcgauucaaacauccgaugaaacgaaguggugucccccugaccagcucguuaaccugcacgacuuucgcucugaugagaucgagcaucuugugguggaggaacuggucaaaaagagagaagagugccucgacgcccuggaaagcauuaugaccacaaaauccgugagcuuccggcgccuuucucaccugagaaagcucguucccggcuucgggaaggcuuacaccaucuuuaauaaaacacugauggaggccgaugcucauuauaaguccgugcggaccuggaacgagaucauucccagcaaaggaugccugcgcgucggcgggagaugucacccucacgugaauggaguuuucuuuaacggcaucauucucgggccggacggacaugugcugauccccgaaaugcagucuagccuucugcagcaacacauggagcuccuggaauccucugucauuccucuuaugcauccccuggccgauccuagcacgguguucaaggacgaugacgaggcggaagauuuugucgaggugcaccuccccgacguucauaaacagguguccggcgucgaucugggccugccgagcugggggaaguacgugcucaugucugccggaguucugacagcucuuaugcugaugaucuuccucaugaccugcugucggagagccaaucgcguggaguccgcucagcacagccugggcgaacgggggagaaaggucucugugaccucccagagcggacgcgugaucuccucuugggagagcuauaaauccggcggggaaacaaagcuguga

SEQ ID NO: 222667 - RNA, 1575 nt, Artificial Sequence
  derived and/or modified CDS sequence (opt5) from glycoprotein__RABV__AB563838.1
augaucccccaggcccuucucuucgugccucugcuugucuuuagccugugcuucggcaaguuuccgauuuacaccauccccgacaaacucgggccuuggucccccauugauauccaccaucugucuuguccuaacaaucuuguuguggaggacgaaggaugcacaaaccugagcggcuucuccuauauggagcucaaggugggguacauuucugcuaucaaagucaauggauuuacguguaccggcgugguuacagaagccgagaccuauacaaacuucgugggguacgucaccacaaccuuuaagagaaaacacuuccggcccacgccugaugcgugccgcgcugccuauaauuggaagauggccggagacccgagauacgaagagagccugcauaaccccuauccugauuaccacuggcugcggaccgugaagacaaccaaagagucccucguuaucauuucucccagcguggcugaccuggauccuuacgacaagucccuucauagccgcgucuuucccucuggcaaauguuccggcaucacagugagcucuaccuauugcuccacgaaucacgauuacacaauuuggaugccggaaaacccuagacuggggaccagcugugacaucuucacaaauucucggggaaagcgcgccuccaaaggcagcaagaccugcggguuuguggaugagagaggacucuauaagucccugaaaggcgcuuguaagcugaaacugugcgggguccucggacugcggcugauggacggcaccugggccgcgauucaaacaucugaugaaacgaaguggugucccccugaccagcucguuaaccugcacgacuuccgcagcgaugagaucgagcaucuugugguggaggaacuggucaaaaagagagaagagugccucgacgcccuggaauccauuaugaccacaaaaagcgugucuuuucggcgccuuucccaccugagaaagcucguucccggcuucgggaaggcuuacaccaucuucaauaaaacacugauggaggccgaugcucauuauaagagcgugcggaccuggaacgagaucauucccucuaaaggaugccugcgcgucggcgggagaugucacccucacgugaauggaguguuuuucaacggcaucauucucgggccggacggacauguucugauccccgaaaugcagagcucccuucugcagcaacacauggagcuccuggaaucuagcgucauuccucuuaugcauccccuggccgauccuuccacgguguuuaaggacgaugacgaggcggaagauuucgucgaggugcaccuccccgacguucauaaacaggugagcggcgucgaucugggccugccgucuugggggaaguacgugcucauguccgccggaguucugacagcucuuaugcugaugaucuuucucaugaccugcugucggagaaccaaucgcgccgagagcgcucagcacucucugggcgaacgggggagaaagguguccgucacaagccaguccggacgcgugaucucuagcugggaguccuauaaaucuggcggggaaaccaagcuguga

SEQ ID NO: 222668 - RNA, 1575 nt, Artificial Sequence
  derived and/or modified CDS sequence (opt5) from glycoprotein__RABV__AB563839.1
augaucccccaggcccuucucuucgugccucugcuugucuuuagccugugcuucggcaaguuuccgauuuacaccauccccgacaaacucgggccuuggucccccauugauauccaccaucugucuuguccuaacaaucuuguuguggaggacgaaggaugcacaaaccugagcggcuucuccuauauggagcucaaggugggguacauuucugcuaucaaagucaauggauuuacguguaccggcgugguuacagaagccgagaccuauacaaacuucgugggguacgucaccacaaccuuuaagagaaaacacuuccggcccacgccugaugcgugccgcgcugccuauaauuggaagauggccggagacccgagauacgaagagagccugcauaaccccuauccugauuaccacuggcugcggaccgugaagacaaccaaagagucccucguuaucauuucucccagcguggcugaccuggauccuuacgacaagucccuucauagccgcgucuuucccucuggcaaauguuccggcaucacagugagcucuaccuauugcuccacgaaucacgauuacacaauuuggaugccggaaaacccuagacuggggaccagcugugacaucuucacaaauucucggggaaagcgcgccuccaaaggcagcaagaccugcggguuuguggaugagagaggacucuauaagucccugaaaggcgcuuguaagcugaaacugugcgggguccucggacugcggcugauggacggcaccugggccgcgauucaaacaucugaugaaacgaaguggugucccccugaccagcucguuaaccugcacgacuuccgcagcgaugagaucgagcaucuugugguggaggaacuggucaaaaagagagaagagugccucgacgcccuggaauccauuaugaccacaaaaagcgugucuuuucggcgccuuucccaccugagaaagcucguucccggcuucgggaaggcuuacaccaucuucaauaaaacacugauggaggccgaugcucauuauaagagcgugcggaccuggaacgagaucauucccucuaaaggaugccugcgcgucggcgggagaugucacccucacgugaauggaguguuuuucaacggcaucauucucgggccggacggacauguucugauccccgaaaugcagagcucccuucugcagcaacacauggagcuccuggaaucuagcgucauuccucuuaugcauccccuggccgauccuuccacgguguuuaaggacgaugacgaggcggaagauuucgucgaggugcaccuccccgacguucauaaacaggugagcggcgucgaucugggccugccgucuugggggaaguacgugcucaugugcgccggaguucugacagcucuuaugcugaugaucuuucucaugaccuguugccggagagccaaucgcgcugaguccgcccagcacagccugggcgaacgggggagaaaggugucugucaccucccagagcggacgcgugaucuccucuugggagagcuauaaauccggcggggaaacaaagcuguga

SEQ ID NO: 222669 - RNA, 1575 nt, Artificial Sequence
  derived and/or modified CDS sequence (opt5) from glycoprotein__RABV__AB563841.1
augaucccccaggcccugcucuuugugccucugcuugucuuuagccugugcuucggcaaguuuccgauuuacaccauccccgacaaacucgggccuuggucccccauugauauccaccaucugucuuguccuaacaaucuuguuguggaggacgaaggaugcacaaaccugagcggcuucuccuauauggagcucaaggugggguacauuucugcuaucaaagucaauggauuuacguguaccggcgugguuacagaagccgagaccuauacaaacuucgugggguacgucaccacaaccuuuaagagaaaacacuuccggcccacgccugaugcgugccgcgcugccuauaauuggaagauggccggagacccgagauacgaagagagccugcauaaccccuauccugauuaccacuggcugcggaccgugaagacaaccaaagagucccucguuaucauuucucccagcguggcugaccuggauccuuacgacaagucccuucauagccgcgucuuucccucuggcagauguuccggcaucacagugagcucuaccuauugcuccacgaaucacgauuacacaauuuggaugccggaaaacccucggcuggggaccagcugugacaucuucacaaauucucgcggaaaaagagccuccaagggcagcaaaaccugcggguuuguggaugagcggggacucuauaagucccugaagggcgcuuguaaacuuaagcugugcgggguccucggacugcgccugauggacggcaccugggccgcgauucaaacaucugaugaaacgaaauggugucccccugaccagcucguuaaccugcacgacuucagaagcgaugagaucgagcaucuugugguggaggaacuggucaagaaacgggaagagugccucgacgcccuggaauccauuaugaccacaaagagcgugucuuuucgcagacuuucccaucugcggaaacucguucccggcuucgggaaggcuuacaccaucuucaauaagacacugauggaggccgaugcucacuauaaaagcgugcgcaccuggaacgagaucauucccucuaagggaugccugagagucggcgggcggugucacccucacgugaauggaguuuucuucaacggcaucauucucgggccggacggacaugugcugauccccgaaaugcagagcucccuucugcagcaacacauggagcuccuggaaucuagcgucauuccucuuaugcauccccuggccgauccuuccacgguguuuaaagacgaugacgaggcggaagauuucgucgaggugcaccuccccgacguucauaaacaggugagcggcgucgaucugggccugccgucuugggggaaguacgugcucauguccgccggaguucugacagcucuuaugcugaugaucuuucucacaaccugcuguagacgcgccgaccgggcugagagcgcccagcacucucugggcgaaagagggcgcaagguguccgucaccagccaguccggacgggugaucucuagcugggaguccuauaagucuggcggggaaaccaaacuguga

SEQ ID NO: 222670 - RNA, 1575 nt, Artificial Sequence
  derived and/or modified CDS sequence (opt5) from glycoprotein__RABV__AB563842.1
augaucccccaggcccuucucuucgugccucugcuugucuuuagccugugcuucggcaaguuuccgauuuacaccauccccgacaaacucgggccuuggucccccauugauauccaccaucugucuuguccuaacaaucuuguuguggaggacgaaggaugcacaaaccugagcggcuucuccuauauggagcucaaggugggguacauuucugcuaucaaagucaauggauuuacguguaccggcgugguuacagaagccgagaccuauacaaacuucgugggguacgucaccacaaccuuuaagagaaaacacuuccggcccacgccugaugcgugccgcgcugccuauaauuggaagauggccggagacccgagauacgaagagagccugcauaaccccuauccugauuaccacuggcugcggaccgugaagacaaccaaagagucccucguuaucauuucucccagcguggcugaccuggauccuuacgacaagucccuucauagccgcgucuuucccucuggcaaauguuccggcaucacagugagcucuaccuauugcuccacgaaucacgauuacacaauuuggaugccggaaaacccuagacuggggaccagcugugacaucuucacaaauucucggggaaagcgcgccuccaaaggcagcaagaccugcggguuuguggaugagagaggacucuauaagucccugaaaggcgcuuguaagcugaaacugugcgggguccucggacugcggcugauggacggcaccugggccgcgauucaaacaucugaugaaacgaaguggugucccccugaccagcucguuaaccugcacgacuuccgcagcgaugagaucgagcaucuugugguggaggaacuggucaaaaagagagaagagugccucgacgcccuggaauccauuaugaccacaaaaagcgugucuuuucggcgccuuucccaccugagaaagcucguucccggcuucgggaaggcuuacaccaucuucaauaaaacacugauggaggccgaugcucauuauaagagcgugcggaccuggaacgagaucauucccucuaaaggaugccugcgcgucggcgggagaugucacccucacgugaauggaguguuuuucaacggcaucauucucgggccggacggacauguucugauccccgaaaugcagagcucccuucugcagcaacacauggagcuccuggaaucuagcgucauuccucuuaugcauccccuggccgauccuuccacgguguuuaaggacgaugacgaggcggaagauuucgucgaggugcaccuccccgacguucauaaacaggugagcggcgucgaucugggccugccgucuugggggaaguacgugcucauguccgccggaguucugacagcucuuaugcugaugaucuuucucaugaccugcugucggagagccaaucgcgcugagagcgcccagcacucucugcgggaaagaggccgcaagguguccgucaccagccaguccgggcgggugaucucuagcugggaguccuauaaaucuggaggcgaaacaaagcuguga

SEQ ID NO: 222671 - RNA, 1575 nt, Artificial Sequence
  derived and/or modified CDS sequence (opt5) from glycoprotein__RABV__AB563843.1
augaucccccaggcccuucucuucgugccucugcuugucuuuagccugugcuucggcaaguuuccgauuuacaccauccccgacaaacucgggccuuggucccccauugauauccaccaucugucuuguccuaacaaucuuguuguggaggacgaaggaugcacaaaccugagcggcuucuccuauauggagcucaaggugggguacauuucugcuaucaaagucaauggauuuacguguaccggcgugguuacagaagccgagaccuauacaaacuucgugggguacgucaccacaaccuuuaagagaaaacacuuccggcccacgccugaugcgugccgcgcugccuauaauuggaagauggccggagacccgagauacgaagagagccugcauaaccccuauccugauuaccacuggcugcggaccgugaagacaaccaaagagucccucguuaucauuucucccagcguggcugaccuggauccuuacgacaagucccuucauagccgcgucuuucccucuggcaaauguuccggcaucacagugagcucuaccuauugcuccacgaaucacgauuacacaauuuggaugccggaaaacccuagacuggggaccagcugugacaucuucacaaauucucggggaaagcgcgccuccaaaggcagcaagaccugcggguuuguggaugagagaggacucuauaagucccugaaaggcgcuuguaagcugaaacugugcgggguccucggacugcggcugauggacggcaccugggccgcgauucaaacaucugaugaaacgaaguggugucccccugaccagcucguuaaccugcacgacuuccgcagcgaugagaucgagcaucuugugguggaggaacuggucaaaaagagagaagagugccucgacgcccuggaauccauuaugaccacaaaaagcgugucuuuucggcgccuuucccaccugagaaagcucguucccggcuucgggaaggcuuacaccaucuucaauaaaacacugauggaggccgaugcucauuauaagagcgugcggaccuggaacgagaucauucccucuaaaggaugccugcgcgucggcgggagaugucacccucacgugaauggaguguuuuucaacggcaucauucucgggccggacggacauguucugauccccgaaaugcagagcucccuucugcagcaacacauggagcuccuggaaucuagcgucauuccucuuaugcauccccuggccgauccuuccacgguguuuaaggacgaugacgaggcggaagauuucgucgaggugcaccuccccgacguucauaaacaggugagcggcgucgaucugggccugccgucuugggggaaguacgugcucauguccgccggaguucugacagcucuuaugcugaugaucuuucucacaaccugcugucggagagccgaccgcgcugagagcgcccagcacucucugggcgaacgggggagaaagguguccgucaccagccaguccggacgcgugaucucuagcugggaguccuauaaaucuggcggggaaaccaagcuguga

SEQ ID NO: 222672 - RNA, 1575 nt, Artificial Sequence; identical to SEQ ID NO: 222644
  derived and/or modified CDS sequence (opt5) from glycoprotein__RABV__AB563844.1

SEQ ID NO: 222673 - RNA, 1575 nt, Artificial Sequence
  derived and/or modified CDS sequence (opt5) from glycoprotein__RABV__AB563845.1
augaacccccaggcccugauguucgugccucuccuggucuuuagccuuugcuucggcaaguuuccgaucuacaccauucccgacaaacuggggccuuggucccccaucgauauucaccaucucucuuguccuaauaaccugguuguggaggacgaaggaugcacaaaucuuagcggcuucuccuauauggagcugaaggugggguacaucucugcuauuaaagucaacggauuuacguguaccggcgugguuacagaagccgagaccuauacaaauuucgugggguacgucaccacaaccuuuaagagaaaacacuuccggcccacgccugaugcgugccgcgcugccuauaacuggaagauggccggagacccgagauacgaagagagccuccauaaucccuauccugauuaccacuggcugcggaccgugaagacaaccaaagagucccugguuaucaucucucccagcguggcugaccucgauccuuacgacaagucccugcauagccgcgucuuucccucuggcaaauguuccggcauuacagugagcucuaccuauugcuccacgaaccacgauuacacaaucuggaugccggaaaauccuagacuugggaccagcugugacauuuucacaaacucucggggaaagcgcgccuccaaaggcagcaagaccugcggguuuguggaugagagaggacuguauaagucccucaaaggcgcuuguaagcugaaacuuugcgggguccugggacuccggcugauggacggcaccugggccgcgauccaaacaucugaugaaacgaaguggugucccccugaccagcugguuaaucuccacgacuuccgcagcgaugagauugagcaucuggugguggaggaacuugucaaaaagagagaagagugccuggacgcccucgaauccaucaugaccacaaaaagcgugucuuuucggcgccugucccaccuuagaaagcugguucccggcuucgggaaggcuuacaccauuuucaacaaaacacucauggaggccgaugcucauuauaagagcgugcggaccuggaaugagaucauccccucuaaaggaugccugcgcgucggcgggagaugucacccucacgugaacggaguguuuuucaauggcauuauccuggggccggacggacauguucucauucccgaaaugcagagcucccugcuucagcaacacauggagcugcucgaaucuagcgucaucccucugaugcauccccuugccgauccuuccacgguguuuaaggacgaugacgaggcggaagauuucgucgaggugcaucugcccgacguucacaaacaggugagcggcgucgaucucggccugccgucuugggggaaguacgugcugauguccgccggaguucucacagcucugaugcuuaugauuuuucugaugaccugcugucggagagccaaccgcgcugagagcgcccagcacucucucggcgaacgggggagaaagguguccgucaccagccaguccggacgcgugaucucuagcugggaguccuauaaaucuggcggggaaacaaagcuguga

SEQ ID NO: 222674 - RNA, 1575 nt, Artificial Sequence
  derived and/or modified CDS sequence (opt5) from glycoprotein__RABV__AB563846.1
augaucccccaggcccuucucuucgugccucugcuugucuuuagccugugcuucggcaaguuuccgauuuacaccauccccgacaaacucgggccuuggucccccauugauauccaccaucugucuuguccuaacaaucuuguuguggaggacgaaggaugcacaaaccugagcggcuucuccuauauggagcucaaggugggguacauuucugcuaucaaagucaauggauuuacguguaccggcgugguuacagaagccgagaccuauacaaacuucgugggguacgucaccacaaccuuuaagagaaaacacuuccggcccacgccugaugcgugccgcgcugccuauaauuggaagauggccggagacccgagauacgaagagagccugcauaaccccuauccugauuaccacuggcugcggaccgugaagacaaccaaagagucccucguuaucauuucucccagcguggcugaccuggauccuuacgacaagucccuucauagccgcgucuuucccucuggcaaauguuccggcaucacagugagcucuaccuauugcuccacgaaucacgauuacacaauuuggaugccggaaaacccuagacuggggaccagcugugacaucuucacaaauucucggggaaagcgcgccuccaaaggcagcaagaccugcggguuuguggaugagagaggacucuauaagucccugaaaggcgcuuguaagcugaaacugugcgggguccucggacugcggcugauggacggcaccugggccgcgauucaaacaucugaugaaacgaaguggugucccccugaccagcucguuaaccugcacgacuuccgcagcgaugagaucgagcaucuugugguggaggaacuggucaaaaagagagaagagugccucgacgcccuggaauccauuaugaccacaaaaagcgugucuuuucggcgccuuucccaccugagaaagcucguucccggcuucgggaaggcuuacaccaucuucaauaaaacacugauggaggccgaugcucauuauaagagcgugcggaccuggaacgagaucauucccucuaaaggaugccugcgcgucggcgggagaugucacccucacgugaauggaguguuuuucaacggcaucauucucgggccggacggacauguucugauccccgaaaugcagagcucccuucugcagcaacacauggagcuccuggaaucuagcgucauuccucuuaugcauccccuggccgauccuuccacgguguuuaaggacgaugacgaggcggaagauuucgucgaggugcaccuccccgacguucauaaacaggugagcggcgucgaucugggccugccgucuugggggaaguacgugcucauguccgccggaguucugacagcucuuaugcugaugaucuuucucacaaccugcugucggagagccaaucgcgcugagagcgcccagcacucucugggcgaacgggggagaaagguguccgucaccagccaguccggacgcgugaucucuagcugggaguccuauaaaucuggcggggaaaccaagcuguga

SEQ ID NO: 222675 - RNA, 1575 nt, Artificial Sequence; identical to SEQ ID NO: 222674
  derived and/or modified CDS sequence (opt5) from glycoprotein__RABV__AB563847.1

SEQ ID NO: 222676 - RNA, 1575 nt, Artificial Sequence
  derived and/or modified CDS sequence (opt5) from glycoprotein__RABV__AB563848.1
augaucccccaggcccuucucuucgugccucugcuugucuuuagccugugcuucggcaaguuuccgauuuacaccauccccgacaaacucgggccuuggucccccauugauauccaccaucugucuuguccuaacaaucuuguuguggaggacgaaggaugcacaaaccugagcggcuucuccuauauggagcucaaggugggguacauuucugcuaucaaagucaauggauuuacguguaccggcgugguuacagaagccgagaccuauacaaacuucgugggguacgucaccacaaccuuuaagagaaaacacuuccggcccacgccugaugcgugccgcgcugccuauaauuggaagauggccggagacccgagauacgaagagagccugcauaaccccuauccugauuaccacuggcugcggaccgugaagacaaccaaagagucccucguuaucauuucucccagcguggcugaccuggauccuuacgacaagucccuucauagccgcgucuuucccucuggcaaauguuccggcaucacagugagcucuaccuauugcuccacgaaucacgauuacacaauuuggaugccggaaaacccuagacuggggaccagcugugacaucuucacaaauucucggggaaagcgcgccuccaaaggcagcaagaccugcggguuuguggaugagagaggacucuauaagucccugaaaggcgcuuguaagcugaaacugugcgggguccucggacugcggcugauggacggcaccugggccgcgauucaaacaucugaugaaacgaaguggugucccccugaccagcucguuaaccugcacgacuuccgcagcgaugagaucgagcaucuugugguggaggaacuggucaaaaagagagaagagugccucgacgcccuggaauccauuaugaccacaaaaagcgugucuuuucggcgccuuucccaccugagaaagcucguucccggcuucgggaaggcuuacaccaucuucaauaaaacacugauggaggccgaugcucauuauaagagcgugcggaccuggaacgagaucauucccucuaaaggaugccugcgcgucggcgggagaugucacccucacgugaauggaguguuuuucaacggcaucauucucgggccggacggacauguucugauccccgaaaugcagagcucccuucugcagcaacacauggagcuccuggaaucuagcgucauuccucuuaugcauccccuggccgauccuuccacgguguuuaaggacgaugacgaggcggaagauuucgucgaggugcaccuccccgacguucauaaacaggugagcggcgucgaucugggccugccgucuugggggaaguacgugcucauguccgccggaguucugacagcucuuaugcugaccaucuuucucaugaccugcugucggagagccaaucgcgcugagagcgcccagcacucucugggcgaacgggggagaaagguguccgucacaagccaguccggacgcgugaucucuagcugggaguccuauaaaucuggcggggaaaccaagcuguga

SEQ ID NO: 222677 - RNA, 1575 nt, Artificial Sequence
  derived and/or modified CDS sequence (opt5) from glycoprotein__RABV__AB563849.1
augaucccccaggcccuucucuucgugccucugcuugucuuuagccugugcuucggcaaguuuccgauuuacaccauccccgacaaacucgggccuuggucccccauugauauccaccaucugucuuguccuaacaaucuuguuguggaggacgaaggaugcacaaaccugagcggcuucuccuauauggagcucaaggugggguacauuucugcuaucaaagucaauggauuuacguguaccggcgugguuacagaagccgagaccuauacaaacuucgugggguacgucaccacaaccuuuaagagaaaacacuuccggcccacgccugaugcgugccgcgcugccuauaauuggaagauggccggagacccgagauacgaagagagccugcauaaccccuauccugauuaccacuggcugcggaccgugaagacaaccaaagagucccucguuaucauuucucccagcguggcugaccuggauccuuacgacaagucccuucauagccgcgucuuucccucuggcaaauguuccggcaucacagugagcucuaccuauugcuccacgaaucacgauuacacaauuuggaugccggaaaacccuagacuggggaccagcugugacaucuucacaaauucucggggaaagcgcgccuccaaaggcagcaagaccugcggguuuguggaugagagaggacucuauaagucccugaaaggcgcuuguaagcugaaacugugcgggguccucggacugcggcugauggacggcaccugggccgcgauucaaacaucugaugaaacgaaguggugucccccugaccagcucguuaaccugcacgacuuccgcagcgaugagaucgagcaucuugugguggaggaacuggucaaaaagagagaagagugccucgacgcccuggaauccauuaugaccacaaaaagcgugucuuuucggcgccuuucccaccugagaaagcucguucccggcuucgggaaggcuuacaccaucuucaauaaaacacugauggaggccgaugcucauuauaagagcgugcggaccuggaacgagaucauucccucuaaaggaugccugcgcgucggcgggagaugucacccucacgugaauggaguguuuuucaacggcaucauucucgggccggacggacauguucugauccccgaaaugcagagcucccuucugcagcaacacauggagcuccuggaaucuagcgucauuccucuuaugcauccccuggccgauccuuccacgguguuuaaggacgaugacgaggcggaagauuucgucgaggugcaccuccccgacguucauaaacaggugagcggcgucgaucugggccugccgucuugggggaaguacgugcucauguccgccggaguucugacagcucuuaugcugaugaucuuucucacaaccugcuaucggagagccaaucgcgcugagagcgcccagcacucucugggcgaaaaggggcggaaaguguccgucaccagccaguccggaagagugaucucuagcugggaguccuacaagucuggcggggaaaccaaacuguga

SEQ ID NO: 222678 - RNA, 1575 nt, Artificial Sequence; identical to SEQ ID NO: 222671
  derived and/or modified CDS sequence (opt5) from glycoprotein__RABV__AB563850.1

SEQ ID NO: 222679 - RNA, 1575 nt, Artificial Sequence; identical to SEQ ID NO: 222676
  derived and/or modified CDS sequence (opt5) from glycoprotein__RABV__AB563851.1

SEQ ID NO: 222680 - RNA, 1575 nt, Artificial Sequence
  derived and/or modified CDS sequence (opt5) from glycoprotein__RABV__AB563852.1
augaacccccaggcccugauguucgugccucuccuggucuuuagccuuugcuucggcaaguuuccgaucuacaccauucccgacaaacuggggccuuggucccccaucgauauucaccaucucucuuguccuaauaaccugguuguggaggacgaaggaugcacaaaucuuagcggcuucuccuauauggagcugaaggugggguacaucucugcuauuaaagucaacggauuuacguguaccggcgugguuacagaagccgagaccuauacaaauuucgugggguacgucaccacaaccuuuaagagaaaacacuuccggcccacgccugaugcgugccgcgcugccuauaacuggaagauggccggagacccgagauacgaagagagccuccauaaucccuauccugauuaccacuggcugcggaccgugaagacaaccaaagagucccugguuaucaucucucccagcguggcugaccucgauccuuacgacaagucccugcauagccgcgucuuucccucuggcaaauguuccggcauuacagugagcucuaccuauugcuccacgaaccacgauuacacaaucuggaugccggaaaauccuagacuugggaccagcugugacacauucaccaacucucggggaaagcgcgccuccaaaggcagcaagaccugcggguuuguggaugagagaggacuguauaagucccucaaaggcgcuuguaagcugaaacuuugcgggguccugggacuccggcugauggacggcacaugggccgcgauucaaacgucugaugaaaccaaguggugucccccugaccagcugguuaaucuccacgacuuccgcagcgaugagaucgagcaucuggugguggaggaacuugucaaaaagagagaagagugccuggacgcccucgaauccauuaugacaaccaaaagcgugucuuuucggcgccugucccaccuuagaaagcugguucccggcuucgggaaggcuuacacaaucuucaacaaaacccucauggaggccgaugcucauuauaagagcgugcggacguggaaugagauuauccccucuaaaggaugccugcgcgucggcgggagaugucacccucacgugaacggaguguuuuucaauggcaucauucuggggccggacggacauguucucauccccgaaaugcagagcucccugcuucagcaacacauggagcugcucgaaucuagcgucauuccucugaugcauccccuugccgauccuuccacaguguuuaaggacgaugacgaggcggaagauuucgucgaggugcaucugcccgacguucacaaacaggugagcggcgucgaucucggccugccgucuugggggaaguacgugcugauguccgccggaguucucaccgcucugaugcuuaugaucuuucugaugaccugcugucggagagccaaccgcgcugagagcgcccagcacucucucggcgaacgggggagaaagguguccgucacaagccaguccggacgcgugauuucuagcugggaguccuauaaaucuggcggggaaaccaagcuguga

SEQ ID NO: 222681 - RNA, 1575 nt, Artificial Sequence
  derived and/or modified CDS sequence (opt5) from glycoprotein__RABV__AB563854.1
augaucccccaggcccugauguucgugccucuccuggucuuuagccuuugcuucggcaaguuuccgauuuacaccauccccgacaaacuggggccuuggucccccauugauauccaccaucucucuuguccuaacaaucugguuguggaggacgaaggaugcacaaaccuuagcggcuucuccuauauggagcugaaggugggguacauuucugcuaucaaagucaauggauuuacguguaccggcgugguuacagaagccgagaccuauacaaacuucgugggguacgucaccacaaccuuuaagagaaaacacuuccggcccacgccugaugcgugccgcgcugccuauaauuggaagauggccggagacccgagauacgaagagagccuccauaaccccuauccugauuaccacuggcugcggaccgugaagacaaccaaagagucccugguuaucauuucucccagcguggcugaccucgauccuuacgacaagucccugcauagccgcgucuuucccucuggcaaauguuccggcaucacagugagcucuaccuauugcuccacgaaucacgauuacacaauuuggaugccggaaaacccuagacuugggaccagcugugacaucuucacaaauucucggggaaagcgcgccuccaaaggcagcaagaccugcggguuuguggaugagagaggacuguauaagucccucaaaggcgcuuguaagcugaaacuuugcgggguccugggacuccggcugauggacggcaccugggccgcgauucaaacaucugaugaaacgaaguggugucccccugaccagcugguuaaccuccacgacuuccgcagcgaugagaucgagcaucuggugguggaggaacuugucaaaaagagagaagagugccuggacgcccucgaauccauuaugaccacaaaaagcgugucuuuucggcgccugucccaccuuagaaagcugguucccggcuucgggaaggcuuacaccaucuucaauaaaacacucauggaggccgaugcucauuauaagagcgugcggaccuggaacgagaucauucccucuaaaggaugccugcgcgucggcgggagaugucacccucacgugaauggaguguuuuucaacggcaucauucuggggccggacggacauguucucauccccgaaaugcagagcucccugcuucagcaacacauggagcugcucgaaucuagcgucauuccucugaugcauccccuugccgauccuuccacgguguuuaaggacgaugacgaggcggaagauuucgucgaggugcaucugcccgacguucacaaacaggugagcggcgucgaucucggccugccgucuugggggaaguacgugcugauguccgccggaguucucacagcucugaugcuuaugaucuuucugaugaccugcugucggagagccaaucgcgcugagagcgcccagcacucucucggcgaacgggggagaaagguguccgucaccagccaguccggacgcgugaucucuagcugggaguccuauaaaucuggcggggaaacaaagcuguga

SEQ ID NO: 222682 - RNA, 1575 nt, Artificial Sequence; identical to SEQ ID NO: 222673
  derived and/or modified CDS sequence (opt5) from glycoprotein__RABV__AB563855.1

SEQ ID NO: 222683 - RNA, 1575 nt, Artificial Sequence; identical to SEQ ID NO: 222673
  derived and/or modified CDS sequence (opt5) from glycoprotein__RABV__AB563856.1

SEQ ID NO: 222684 - RNA, 1575 nt, Artificial Sequence
  derived and/or modified CDS sequence (opt5) from glycoprotein__RABV__AB563857.1
augaacccccaggcccugauguucgugccucuccuggucuuuagccuuugcuucggcaaguuuccgaucuacaccauucccgacaaacuggggccuuggucccccaucgauauucaccaucucucuuguccuaauaaccugguuguggaggacgaaggaugcacaaaucuuagcggcuucuccuauauggagcugaaggugggguacaucucugcuauuaaagucaacggauuuacguguaccggcgugguuacagaagccgagaccuauacaaauuucgugggguacgucaccacaaccuuuaagagaaaacacuuccggcccacgccugaugcgugccgcgcugccuauaacuggaagauggccggagacccgagauacgaagagagccuccauaaucccuauccugauuaccacuggcugcggaccgugaagacaaccaaagagucccugguuaucaucucucccagcguggcugaccucgauccuuacgacaagucccugcauagccgcgucuuucccucuggcaaauguuccggcauuacagugagcucuaccuauugcuccacgaaccacgauuacacaaucuggaugccggaaaauccuagacuugggaccagcugugacauucugacaaacucucggggaaagcgcgccuccaaaggcagcaagaccugcggguucguggaugagagaggacucuauaagucccugaaaggcgcuuguaaacuuaagcugugcgggguccucggacugcggcugauggacggcaccugggccgcgauccaaacaucugaugaaacgaaguggugucccccugaccagcucguuaaucugcacgacuuucgcagcgaugagauugagcaucuugugguggaggaacuggucaaaaagagagaagagugccucgacgcccuggaauccaucaugaccacaaaaagcgugucuuuccggcgccuuucccaccugagaaagcucguucccggcuuugggaaggcuuacaccauuuucaacaaaacacugauggaggccgaugcucauuauaagagcgugcggaccuggaaugagaucauccccucuaaaggaugccugcgcgucggcgggagaugucacccucacgugaacggaguuuucuuuaauggcauuauccucgggccggacggacaugugcugauucccgaaaugcagagcucccuucugcagcaacacauggagcuccuggaaucuagcgucaucccucuuaugcauccccuggccgauccuuccacgguguucaaggacgaugacgaggcggaagauuuugucgaggugcaccuccccgacguucauaaacaggugagcggcgucgaucugggccugccgucuugggggaaguacgugcucauguccgccggaguucugacagcucuuaugcugaugauuuuccucaugaccugcugucggagagccaaccgcgcugagagcgcccagcacucucugggcgaacgggggagaaagguguccgucaccagccaguccggacgcgugaucucuagcugggaguccuauaaaucuggcggggaaacaaagcuguga

SEQ ID NO: 222685 - RNA, 1575 nt, Artificial Sequence; identical to SEQ ID NO: 222644
  derived and/or modified CDS sequence (opt5) from glycoprotein__RABV__AB563860.2

SEQ ID NO: 222686 - RNA, 1575 nt, Artificial Sequence; identical to SEQ ID NO: 222644
  derived and/or modified CDS sequence (opt5) from glycoprotein__RABV__AB563861.1

SEQ ID NO: 222687 - RNA, 1575 nt, Artificial Sequence
  derived and/or modified CDS sequence (opt5) from glycoprotein__RABV__AB563862.1
augaucccccaggcccuucucuucgugccucugcuugucuuuagccugugcuucggcaaguuuccgauuuacaccauccccgacaaacucgggccuuggucccccauugauauccaccaucugucuuguccuaacaaucuuguuguggaggacgaaggaugcacaaaccugagcggcuucuccuauauggagcucaaggugggguacauuucugcuaucaaagucaauggauuuacguguaccggcgugguuacagaagccgagaccuauacaaacuucgugggguacgucaccacaaccuuuaagagaaaacacuuccggcccacgccugaugcgugccgcgcugccuauaauuggaagaugagcggagacccgagauacgaagagucccugcauaaccccuauccugauuaccacuggcugcggaccgugaagacaaccaaagagucucucguuaucauuagccccuccguggccgaccuggauccuuacgacaagagccuucauucucgcgucuuucccuccggcaaauguagcggcaucacagugucuuccaccuauugcagcacgaaucacgauuacacaauuuggaugccggaaaacccuagacuggggaccucuugugacaucuucacaaauucccggggaaagcgcgcuagcaaaggcuccaagaccugcggguuuguggaugagagaggacucuauaagucucugaaaggcgccuguaagcugaaacugugcgggguccucggacugcggcugauggacggcaccugggcugccauucaaacaagcgaugaaacgaaguggugucccccugaccagcucguuaaccugcacgacuuccgcuccgaugagaucgagcaucuugugguggaggaacuggucaaaaagagagaagagugccucgacgcgcuggaaagcauuaugaccacaaaaucuguguccuuucggcgccuuagccaccugagaaagcucguucccggcuucgggaaggccuacaccaucuucaauaaaacacugauggaggcugaugcccauuauaagucugugcggaccuggaacgagaucauucccagcaaaggaugccugcgcgucggcgggagaugucacccucacgugaauggaguguuuuucaacggcaucauucucgggccggacggacauguucugauccccgaaaugcaguccucucuucugcagcaacacauggagcuccuggaaagcuccgucauuccucuuaugcauccccuggcugauccuagcacgguguuuaaggacgaugacgaggccgaagauuucgucgaggugcaccuccccgacguucauaaacaggugucuggcgucgaucugggccugccguccugggggaaguacgugcucaugagcgcgggaguucugacagcccuuaugcugaugaucuuucucaugaccugcugucggagagcuaaucgcaccgagucugcccagcacucccugggcgaacgggggagaaaggugagcgucacaucccagucuggacgcgugaucagcuccugggagucuuauaaaagcggcggggaaaccaagcuguga

SEQ ID NO: 222688 - RNA, 1575 nt, Artificial Sequence
  derived and/or modified CDS sequence (opt5) from glycoprotein__RABV__AB563863.1
augaucccccaggcccuucucuucgugccucugcuugucuuuagccugugcuucggcaaguuuccgauuuacaccauccccgacaaacucgggccuuggucccccauugauauccaccaucugucuuguccuaacaaucuuguuguggaggacgaaggaugcacaaaccugagcggcuucuccuauauggagcucaaggugggguacauuucugcuaucaaagucaauggauuuacguguaccggcgugguuacagaagccgagaccuauacaaacuucgugggguacgucaccacaaccuuuaagagaaaacacuuccggcccacgccugaugcgugccgcgcugccuauaauuggaagauggccggagacccgagauacgaagagagccugcauaaccccuauccugauuaccacuggcugcggaccgugaagacaaccaaagagucccucguuaucauuucucccagcguggcugaccuggauccuuacgacaagucccuucauagccgcgucuuucccucuggcaaauguuccggcaucacagugagcucuaccuauugcuccacgaaucacgauuacacaauuuggaugccggaaaacccuagacuggggaccagcugugacaucuucacaaauucucggggaaagcgcgccuccaaaggcagcaagaccugcggguuuguggaugagagaggacucuauaagucccugaaaggcgcuuguaagcugaaacugugcgggguccucggacugcggcugauggacggcaccugggccgcgauucaaacaucugaugaaacgaaguggugucccccugaccagcucguuaaccugcacgacuuccgcagcgaugagaucgagcaucuugugguggaggaacuggucaaaaagagagaagagugccucgacgcccuggaauccauuaugaccacaaaaagcgugucuuuucggcgccuuucccaccugagaaagcucguucccggcuucgggaaggcuuacaccaucuucaauaaaacacugauggaggccgaugcucauuauaagagcgugcggaccuggaacgagaucauucccucuaaaggaugccugcgcgucggcgggagaugucacccucacgugaauggaguguuuuucaacggcaucauucucgggccggacggacauguucugauccccgaaaugcagagcucccuucugcagcaacacauggagcuccuggaaucuagcgucauuccucuuaugcauccccuggccgauccuuccacgguguuuaaggacgaugacgaggcggaagauuucgucgaggugcaccuccccgacguucauaaacaggugagcggcgucgaucugggccugccgucuugggggaaguacgugcucauguccgccggaguucugacagcucuuaugcugaugaucuuucucaugaccugcugucggagagccaaucgcgcugagagcgcccagcacucucugggcgaaaaggggcggaaaguguccgucaccagccaguccggaagagugaucucuagcugggaguccuauaagucuggcggggaaacaaaacuguga

SEQ ID NO: 222689 - RNA, 1575 nt, Artificial Sequence
  derived and/or modified CDS sequence (opt5) from glycoprotein__RABV__AB563864.1
augaucccccaggcccuucucuucgugccucugcuugucuuuagccugugcuucggcaaguuuccgauuuacaccauccccgacaaacucgggccuuggucccccauugauauccaccaucugucuuguccuaacaaucuuguuguggaggacgaaggaugcacaaaccugagcggcuucuccuauauggagcucaaggugggguacauuucugcuaucaaagucaauggauuuacguguaccggcgugguuacagaagccgagaccuauacaaacuucgugggguacgucaccacaaccuuuaagagaaaacacuuccggcccacgccugaugcgugccgcgcugccuauaauuggaagauggccggagacccgagauacgaagagagccugcauaaccccuauccugauuaccacuggcugcggaccgugaagacaaccaaagagucccucguuaucauuucucccagcguggcugaccuggauccuuacgacaagucccuucauagccgcgucuuucccucuggcaaauguuccggcaucacagugagcucuaccuauugcuccacgaaucacgauuacacaauuuggaugccggaaaacccuagacuggggaccagcugugacaucuucacaaauucucggggaaagcgcgccuccaaaggcagcaagaccugcggguuuguggaugagagaggacucuauaagucccugaaaggcgcuuguaagcugaaacugugcgggguccucggacugcggcugauugacggcaccugggccgcgauccaaacaucugaugaaacgaaguggugucccccugaccagcucguuaaccugcacgacuuccgcagcgaugagauugagcaucuugugguggaggaacuggucaaaaagagagaagagugccucgacgcccuggaauccaucaugaccacaaaaagcgugucuuuucggcgccuuucccaccugagaaagcucguucccggcuucgggaaggcuuacaccaucuucaauaaaacacugauggaggccgaugcucauuauaagagcgugcggaccuggaacgagauuauccccucuaaaggaugccugcgcgucggcgggagaugucacccucacgugaauggaguguuuuucaacggcauuauccucgggccggacggacauguucugauucccgaaaugcagagcucccuucugcagcaacacauggagcuccuggaaucuagcgucaucccucuuaugcauccccuggccgauccuuccacgguguuuaaggacgaugacgaggcggaagauuucgucgaggugcaccuccccgacguucauaaacaggugagcggcgucgaucugggccugccgucuugggggaaguacgugcucauguccgccggaguucugacagcucuuaugcugaugaucuuucucacaaccugcugucggagagccaaucgcgcugagagcgcccagcacucucugggcgaacgggggagaaagguguccgccaccagccaguccggacgcgucauuucuagcugggaguccuauaaaucuggcggggaaaccaagcuguga

SEQ ID NO: 222690 - RNA, 1575 nt, Artificial Sequence
  derived and/or modified CDS sequence (opt5) from glycoprotein__RABV__AB563865.1
augaucccccaggcccuucucuucgugccucugcuugucuuuagccugugcuucggcaaguuuccgauuuacaccauccccgacaaacucgggccuuggucccccauugauauccaccaucugucuuguccuaacaaucuuguuguggaggacgaaggaugcacaaaccugagcggcuucuccuauauggagcucaaggugggguacauuucugcuaucaaagucagcggauuuacguguaccggcgugguuacagaagccgagaccuauacaaauuucgugggguacgucaccacaaccuuuaagagaaaacacuuccggcccacgccugaugcgugccgcgcugccuauaacuggaagauggccggagacccgagauacgaagagucccugcauaaucccuauccugauuaccacuggcugcggaccgugaagacaaccaaagagucucucguuaucauuagccccuccguggcugaccuggauccuuacgacaagagccuucauucucgcgucuuucccuccggcaaauguagcggcaucacagugucuuccaccuauugcagcacgaaccacgauuacacaauuuggaugccggaaaauccuagacuggggaccucuugugacaucuucacaaacucccggggaaagcgcgccagcaaaggcuccaagaccugcggguuuguggaugagagaggacucuauaagucucugaaaggcgcuuguaagcugaaacugugcgggguccucggacugcggcugauggacggcaccugggccgcgauucaaacaagcgaugaaacgaaguggugucccccugaccagcucguuaaucugcacgacuuccgcuccgaugagaucgagcaucuugugguggaggaacuggucaaaaagagagaagagugccucgacgcccuggaaagcauuaugaccacaaaaucuguguccuuucggcgccuuagccaccugagaaagcucguucccggcuucgggaaggcuuacaccaucuucaacaaaacacugauggaggccgaugcucauuauaagucugugcggaccuggaaugagaucauucccagcaaaggaugccugcgcgucggcgggagaugucacccucacgugaacggaguguuuuucaauggcaucauucucgggccggacggacauguucugauccccgaaaugcaguccucucuucugcagcaacacauggagcuccuggaaagcuccgucauuccucuuaugcauccccuggccgauccuagcacgguguuuaaggacgaugacgaggcggaagauuucgucgaggugcaccuccccgacguucauaaacaggugucuggcgucgaucugggccugccguccugggggaaguacgugcucaugagcgccggagcucugacagcccuuaugcugaugaucuuucucaugaccugcugucggagagcuaaccgcgccgagucugcccagcacucccugggcgaagggggacggaagguuagcgugaccucccagucuggcagagucaucagcuccugggagucuuauaaaagcgggggcgaaacaaagcuguga

SEQ ID NO: 222691 - RNA, 1575 nt, Artificial Sequence
  derived and/or modified CDS sequence (opt5) from glycoprotein__RABV__AB563867.1
augaucccccaggcccuucucuucgugccucugcuugucuuuagccugugcuucggcaaguuuccgauuuacaccauccccgacaaacucgggccuuggucccccauugauauccaccaucugucuuguccuaacaaucuuguuguggaggacgaaggaugcacaaaccugagcggcuucuccuauauggagcucaaggugggguacauuucugcuaucaaagucagcggauuuacguguaccggcgugguuacagaagccgagaccuauacaaauuucgugggguacgucaccacaaccuuuaagagaaaacacuuccggcccacgccugaugcgugccgcgcugccuauaacuggaagauggccggagacccgagauacgaagagucccugcauaaucccuauccugauuaccacuggcugcggaccgugaagacaaccaaagagucucucguuaucauuagccccuccguggcugaccuggauccuuacgacaagagccuucauucucgcgucuuucccuccggcaaauguagcggcaucacagugucuuccaccuauugcagcacgaaccacgauuacacaauuuggaugccggaaaauccuagacuggggaccucuugugacaucuucacaaacucccggggaaagcgcgccagcaaaggcuccaagaccugcggguuuguggaugagagaggacucuauaagucucugaaaggcgcuuguaagcugaaacugugcgggguccucggacugcggcugauggacggcaccugggccgcgauucaaacaagcgaugaaacgaaguggugucccccugaccagcucguuaaucugcacgacuuccgcuccgaugagaucgagcaucuugugguggaggaacuggucaaaaagagagaagagugccucgacgcccuggaaagcauuaugaccacaaaaucuguguccuuucggcgccuuagccaccugagaaagcucguucccggcuucgggaaggcuuacaccaucuucaacaaaacacugauggaggccgaugcucauuauaagucugugcggaccuggaaugagaucauucccagcaaaggaugccugcgcgucggcgggagaugucacccucacgugaacggaguguuuuucaauggcaucauucucgggccggacggacauguucugauccccgaaaugcaguccucucuucugcagcaacacauggagcuccuggaaagcuccgucauuccucuuaugcauccccuggccgauccuagcacgguguuuaaggacgaugacgaggcggaagauuucgucgaggugcaccuccccgacguucauaaacaggugucuggcgucgaucugggccugccguccugggggaaguacgugcucaugagcgccggagcucugacagcccuuaugcugaugaucuuucucaugaccugcugucggaaggcuaacagagccgagucugcccagcacucccugggcgaagggggacgcaaaguuagcgugaccucccagucuggccgggucaucagcuccugggagucuuauaagagcgggggcgaaacaaaacuguga

SEQ ID NO: 222692 - RNA, 1575 nt, Artificial Sequence
  derived and/or modified CDS sequence (opt5) from glycoprotein__RABV__AB563870.1
augaucccccaggcccuucucuucgugccucugcuugucuuuagccugugcuucggcaaguuuccgauuuacaccauccccgacaaacucgggccuuggucccccauugauauccaccaucugucuuguccuaacaaucuuguuguggaggacgaaggaugcacaaaccugagcggcuucuccuauauggagcucaaggugggguacauuucugcuaucaaagucaauggauuuacguguaccggcgugguuacagaagccgagaccuauacaaacuucgugggguacgucaccacaaccuuuaagagaaaacacuuccggcccacgccugaugcgugccgcgcugccuauaauuggaagauggccggagacccgagauacgaagagagccugcauaaccccuauccugauuaccacuggcugcggaccgugaagacaaccaaagagucccucguuaucauuucucccagcguggcugaccuggauccuuacgacaagucccuucauagccgcgucuuucccucuggcaaauguuccggcaucacagugagcucuaccuauugcuccacgaaucacgauuacacaauuuggaugccggaaaacccuagacuggggaccagcugugacaucuucacaaauucucggggaaagcgcgccuccaaaggcagcaagaccugcggguuuguggaugagagaggacucuauaagucccugaaaggcgcuuguaagcugaaacugugcgggguccucggacugcggcugauggacggcaccugggccgcgauucaaacaucugaugaaacgaaguggugucccccugaccagcucguuaaccugcacgacuuccgcagcgaugagaucgagcaucuugugguggaggaacuggucaaaaagagagaagagugccucgacgcccuggaauccauuaugaccacaaaaagcgugucuuuucggcgccuuucccaccugagaaagcucguucccggcuucgggaaggcuuacaccaucuucaauaaaacacugauggaggccgaugcucauuauaagagcgugcggaccuggaacgagaucauucccucuaaaggaugccugcgcgucggcgggagaugucacccucacgugaauggaguguuuuucaacggcaucauucucgggccggacggacauguucugauccccgaaaugcagagcucccuucugcagcaacacauggagcuccuggaaucuagcgucauuccucuuaugcauccccuggccgauccuuccacgguguuuaaggacgaugacgaggcggaagauuucgucgaggugcaccuccccgacguucauaaacaggugagcggcgucgaucugggccugccgucuugggggaaguacgugcucauguccgccggaguucugacagcucuuaugcugaccaucuuucucauuaccugcugucggagagccaaucgcgcugagagcgcccagcacucucugggcgaacgggggagaaagguguccgucacaagccaguccggacgcgugaucucuagcugggaguccuauaaaucuggcggggaaaccaagcuguga

SEQ ID NO: 222693 - RNA, 1575 nt, Artificial Sequence; identical to SEQ ID NO: 222673
  derived and/or modified CDS sequence (opt5) from glycoprotein__RABV__AB563871.1

SEQ ID NO: 222694 - RNA, 1575 nt, Artificial Sequence; identical to SEQ ID NO: 222673
  derived and/or modified CDS sequence (opt5) from glycoprotein__RABV__AB563873.1

SEQ ID NO: 222695 - RNA, 1575 nt, Artificial Sequence
  derived and/or modified CDS sequence (opt5) from glycoprotein__RABV__AB563874.1
augaacccccaggcccugauguucgugccucuccuggucuuuagccuuugcuucggcaaguuuccgaucuacaccauucccgacaaacuggggccuuggucccccaucgauauucaccaucucucuuguccuaauaaccugguuguggaggacgaaggaugcacaaaucuuagcggcuucuccuauauggagcugaaggugggguacaucucugcuauuaaagucaacggauuuacguguaccggcgugguuacagaagccgagaccuauacaaauuucgugggguacgucaccacaaccuuuaagagaaaacacuuccggcccacgccugaugcgugccgcgcugccuauaacuggaagauggccggagacccgagauacgaagagagccuccauaaucccuauccugauuaccacuggcugcggaccgugaagacaaccaaagagucccugguuaucaucucucccagcguggcugaccucgauccuuacgacaagucccugcauagccgcgucuuucccucuggcaaauguuccggcauuacagugagcucuaccuauugcuccacgaaccacgauuacacaaucuggaugccggaaaauccuagacuugggaccagcugugacauuuucacaaacucucggggaaagcgcgccuccaaaggcagcaagaccugcggguuuguggaugagagaggacuguauaagucccucaaaggcgcuuguaagcugaaacuuugcgggguccugggacuccggcugauggacggcaccugggccgcgauccaaacaucugaugaaacgaaguggugucccccugaccagcugguuaaucuccacgacuuccgcagcgaugagauugagcaucuggugguggaggaacuugucaaaaagagagaagagugccuggacgcccucgaauccaucaugaccacaaaaagcgugucuuuucggcgccugucccaccuuagaaagcugguucccggcuucgggaaggcuuacaccauuuucaacaaaacacucauggaggccgaugcucauuauaagagcgugcggaccuggaaugagaucauccccucuaaaggaugccugcgcgucggcgggagaugucacccucacgugaacggaguguuuuucaauggcauuauccuggggccggacggacauguucucauucccgaaaugcagagcucccugcuucagcaacacauggagcugcucgaaucuagcgucaucccucugaugcauccccuugccgauccuuccacgguguuuaaggacgaugacgaggcggaagauuucgucgaggugcaucugcccgacguucacaaacaggugagcggcgucgaucucggccugucuuccugggggaaguacgugcugaugagcgccggaguucucacagcucugaugcuuaugauuuuucugaugaccugcugucggagagccaaccgcgcugagucugcccagcacucccucggcgaacgggggagaaaggugagcgucaccucccagucuggacgcgugaucagcuccugggagucuuauaaaagcggcggggaaacaaagcuguga

SEQ ID NO: 222696 - RNA, 1575 nt, Artificial Sequence
  derived and/or modified CDS sequence (opt5) from glycoprotein__RABV__AB563875.1
augaacccccaggcccugauguucgugccucuccuggucuuuagccuuugcuucggcaaguuuccgaucuacaccauucccgacaaacuggggccuuggucccccaucgauauucaccaucucucuuguccuaauaaccugguuguggaggacgaaggaugcacaaaucuuagcggcuucuccuauauggagcugaaggugggguacaucucugcuauuaaagucaacggauuuacguguaccggcgugguuacagaagccgagaccuauacaaauuucgugggguacgucaccacaaccuuuaagagaaaacacuuccggcccacgccugaugcgugccgcgcugccuauaacuggaagauggccggagacccgagauacgaagagagccuccauaaucccuauccugauuaccacuggcugcggaccgugaagacaaccaaagagucccugguuaucaucucucccagcguggcugaccucgauccuuacgacaagucccugcauagccgcgucuuucccucuggcaaauguuccggcauuacagugagcucuaccuauugcuccacgaaccacgauuacacaaucuggaugccggaaaauccuagacuugggaccagcugugacauuuucacaaacucucggggaaagcgcgccuccaaaggcagcaagaccugcggguuuguggaugagagaggacuguauaagucccucaaaggcgcuuguaagcugaaacuuugcgggguccugggacuccggcugauggacggcaccugggccgcgauccaaacaucugaugaaacgaaguggugucccccugaccagcugguuaaucuccacgacuuccgcagcgaugagauugagcaucuggugguggaggaacuugucaaaaagagagaagagugccuggacgcccucgaauccaucaugaccacaaaaagcgugucuuuucggcgccugucccaccuuagaaagcugguucccggcuucgggaaggcuuacaccauuuucaacaaaacacucauggaggccgaugcucauuauaagagcgugcggaccuggaaugagaucauccccucuaaaggaugccugcgcgucggcgggagaugucacccucacgugaacggaguguuuuucaauggcauuauccuggggccggacggacauguucucauucccgaaaugcagagcucccugcuucagcaacacauggagcugcucgaaucuagcgucaucccucugaugcauccccuugccgauccuuccacgguguuuaaggacgaugacgaggcggaagauuucgucgaggugcaucugcccgacguucacaaacaggugagcggcgucgaucucggccugccgucuugggggaaguacgugcugauguccgccggaguucucacagcucugaugcuuaugauuuuucugaugaccugcugucggagagccaaccgcgcugagagcgcccagcacucucucggcgaacggagacgcaagguguccgucaccagccaguccgggcgggugaucucuagcugggaguccuauaaaucuggaggcgaaacaaagcuguga

SEQ ID NO: 222697 - RNA, 1575 nt, Artificial Sequence
  derived and/or modified CDS sequence (opt5) from glycoprotein__RABV__AB563878.1
augaucccccaggcccuucucuucgugccucugcuugucuuuagccugugcuucggcaaguuuccgauuuacaccauccccgacaaacucgggccuuggucccccauugauauccaccaucugucuuguccuaacaaucuuguuguggaggacgaaggaugcacaaaccugagcggcuucuccuauauggagcucaaggugggguacauuucugcuaucaaagucaauggauuuacguguaccggcgugguuacagaagccgagaccuauacaaacuucgugggguacgucaccacaaccuuuaagagaaaacacuuccggcccacgccugaugcgugccgcgcugccuauaauuggaagauggccggagacccgagauacgaagagagccugcauaaccccuauccugauuaccacuggcugcggaccgugaagacaaccaaagagucccucguuaucauuucucccagcguggcugaccuggauccuuacgacaagucccuucauagccgcgucuuucccucuggcaaauguuccggcaucacagugagcucuaccuauugcuccacgaaucacgauuacacaauuuggaugccggaaaacccuagacuggggaccagcugugacaucuucacaaauucucggggaaagcgcgccuccaaaggcagcaagaccugcggguuuguggaugagagaggacucuauaagucccugaaaggcgcuuguaagcugaaacugugcgggguccucggacugcggcugauggacggcaccugggccgcgauucaaacaucugaugaaacgaaguggugucccccugaccagcucguuaaccugcacgacuuccgcagcgaugagaucgagcaucuugugguggaggaacuggucaaaaagagagaagagugccucgacgcccuggaauccauuaugaccacaaaaagcgugucuuuucggcgccuuucccaccugagaaagcucguucccggcuucgggaaggcuuacaccaucuucaauaaaacacugauggaggccgaugcucauuauaagagcgugcggaccuggaacgagaucauucccucuaaaggaugccugcgcgucggcgggagaugucacccucacgugaauggaguguuuuucaacggcaucauucucgggccggacggacauguucugauccccgaaaugcagagcucccuucugcagcaacacauggagcuccuggaaucuagcgucauuccucuuaugcauccccuggccgauccuuccacgguguuuaaggacgaugacgaggcggaagauuucgucgaggugcaccuccccgacguucauaaacaggugagcggcgucgaucugggccugccgucuugggggaaguacgugcucauguccgccggaguucugacagcucuuaugcugaugaucuuucucacaaccugcugucggagagccaaucgcgcugagagcgcccagcacucucugggcgaaaaggggcggaaaguguccgucaccagccaguccggaagagugaucucuagcugggaguccuauaagucuggcggggaaaccaaacuguga

SEQ ID NO: 222698 - RNA, 1575 nt, Artificial Sequence; identical to SEQ ID NO: 222644
  derived and/or modified CDS sequence (opt5) from glycoprotein__RABV__AB563879.1

SEQ ID NO: 222699 - RNA, 1575 nt, Artificial Sequence
  derived and/or modified CDS sequence (opt5) from glycoprotein__RABV__AB563881.1
augaucccccaggcccugcucuuugugccucugcuugucuuuagccugugcuucggcaaguuuccgauuuacaccauccccgacaaacucgggccuuggucccccauugauauccaccaucugucuuguccuaacaaucuuguuguggaggacgaaggaugcacaaaccugagcggcuucuccuaucucgagcugaaggugggguacauuucugcuaucaaagucaauggauuuacguguaccggcgugguuacagaagccgagaccuauacaaacuucgugggguacgucaccacaaccuuuaagagaaaacacuuccggcccacgccugaugcgugccgcgcugccuauaauuggaagauggccggagacccgagauacgaagagagccugcauaaccccuauccugauuaccacuggcuccggaccgugaagacaaccaaagagucccugguuaucauuucucccagcguggcugaccuugauccuuacgacaagucccugcauagccgcgucuuucccucuggcaaauguuccggcaucacagugagcucuaccuauugcuccacgaaucacgauuacacaauuuggaugccggaaaacccuagacucgggaccagcugugacaucuucacaaauucucggggaaagcgcgccuccaaaggcagcaagaccugcggguuuguggaugagagaggacuguauaagucccuuaaaggcgcuuguaagcugaaacucugcgggguccugggacugcggcucauggacggcaccugggccgcgauucaaacaucugaugaaacgaaguggugucccccugaccagcugguuaaccuucacgacuuccgcagcgaugagaucgagcaucuggugguggaggaacucgucaaaaagagagaagagugccuggacgcccuugaauccauuaugaccacaaaaagcgugucuuuucggcgccugucccaccucagaaagcugguucccggcuucgggaaggcuuacaccaucuucaauaaaacacugauggaggccgaugcucauuauaagagcgugcggaccuggaacgagaucauucccucuaaaggaugccuccgcgucggcgggagaugucacccucacgugaauggaguuuucuucaacggcaucauucuggggccggacggacaugugcuuauccccgaaaugcagagcucccugcuccagcaacacauggagcugcuugaaucuagcgucauuccucugaugcauccccucgccgauccuuccacgguguuuaaggacgaugacgaggcggaagauuucgucgaggugcaccuucccgacguucauaaacaggugagcggcgucgaucugggccucccgucuugggggaaguacgugcugauguccgccggaguucuuacagcucugaugcucaugaucuuucugaugaccugcugucggagagccaaucgcgcugacagcgcccagcacucucugggcgagggggaacggaagguguccgucaccagccaguccggaagagugaucucuagcugggaguccuauaaaucuggcggggaaacaaagcuguga

SEQ ID NO: 222700 - RNA, 1575 nt, Artificial Sequence
  derived and/or modified CDS sequence (opt5) from glycoprotein__RABV__AB563883.1
augaucccccaggcccugcuguucgugccuuuucuggucuucagccuuugcuuuggcaaguucccgauuuacaccauccccgacaaacuggggccuuggucccccauugauauccaccaucucucuuguccuaacaaucugguuguggaggacgaaggaugcacaaaccuuagcggcuuuuccuauauggagcugaaggugggguacauuucugcuaucaaagucaauggauucacguguaccggcgugguuacagaagccgagaccuauacaaacuuugugggguacgucaccacaaccuucaagagaaaacacuuucggcccacgccugaugcgugccgcgcugccuauaauuggaagauggccggagacccgagauacgaagagagccuccauaaccccuauccugauuaccacuggcugcggaccgugaagacaaccaaagagucccugguuaucauuucucccagcguggcugaccucgauccuuacgacaagucccugcauagccgcgucuuccccucuggcaaauguuccggcaucacagugagcucuaccuauugcuccacgaaucacgauuacacaauuuggaugccggaaaacccuagacuugggaccagcugugacaucuuuacaaauucucggggaaagcgcgccuccaaaggcagcaagaccugcggguucguggaugagagaggacuguauaagucccucaaaggcgcuuguaagcugaaacuuugcgggguccugggacuccggcugauggacggcaccugggccgcgauucaaacaucugaugaaacgaaguggugucccccugaccagcugguuaaccuccacgacuuucgcagcgaugagaucgagcaucuggugguggaggaacuugucaaaaagagagaagagugccuggacgcccucgaauccauuaugaccacaaaaagcgugucuuuccggcgccugucccaccuuagaaagcugguucccggcuucgggaaggcuuacaccaucuuuaauaaaacacucauggaggccgaugcucauuauaagagcgugcggaccuggaacgagaucauucccucuaaaggaugccugcgcgucggcgggagaugucacccucacgugaauggaguuuucuuuaacggcaucauucuggggccggacggacaugugcucauccccgaaaugcagagcucccugcuucagcaacacauggagcugcucgaaucuagcgucauuccucugaugcauccccuugccgauccuuccacgguguucaaggacgaugacgaggcggaagauuuugucgaggugcaccuccccgacguucauaaacaggugagcggcgucgaucucggccugccgucuugggggaaguacgugcugauguccgccggaguucucacagcucugaugcuuaccaucuuccugaugaccugcugucggagagccaaucgcgcugagagcgcccagcacucucucggcgaacgggggagaaagguguccgucacaagccaguccggacgcgugaucucuagcugggaguccuauaaaucuggcggggaaaccaagcuguga

SEQ ID NO: 222701 - RNA, 1575 nt, Artificial Sequence
  derived and/or modified CDS sequence (opt5) from glycoprotein__RABV__AB563884.1
augaucccccaggcccugcucuuugugccucugcuugucuuuagccugugcuucggcaaguuuccgauuuacaccauccccgacaaacucgggccuuggucccccauugauauccaccaucugucuuguccuaacaaucuuguuguggaggacgaaggaugcacaaaccugagcggcuucuccuauauggagcucaaggugggguacauuucugcuaucaaagucaauggauuuacguguaccggcgugguuacagaagccgagaccuauacaaacuucgugggguacgucaccacaaccuuuaagagaaaacacuuccggcccacgccugaugcgugccgcgcugccuauaauuggaagauggccggagacccgagauacgaagagagccugcauaaccccuauccugauuaccacuggcugcggaccgugaagacaaccaaagagucccucguuaucauuucucccagcguggcugaccuggauccuuacgacaagucccuucauagccgcgucuuucccucuggcaaauguuccggcaucacagugagcucuaccuauugcuccacgaaucacgauuacacaauuuggaugccggaaaacccuagacuggggaccagcugugacaucuucacaaauucucggggaaagcgcgccuccaaaggcagcaagaccugcggguuuguggaugagagaggacucuauaagucccugaaaggcgcuuguaagcugcggcugugcgggguccucggacugcgccugauggacggcaccugggccgcgauucaaacaucugaugaaacgaaauggugucccccugaccagcucguuaaccugcacgacuucagaagcgaugagaucgagcaucuugugguggaggaacuggucaagaaacgggaagagugccucgacgcccuggaauccauuaugaccacaaagagcgugucuuuucgcagacuuucccaccuucggaaacucguucccggcuucgggaaggcuuacaccaucuucaauaagacacugauggaggccgaugcucauuauaaaagcgugcgcaccuggaacgagaucauucccucuaagggaugccugagagucggcgggcggugucacccucacgugaauggaguuuucuucaacggcaucauucucgggccggacggacaugugcugauccccgaaaugcagagcucccuucugcagcaacacauggagcuccuggaaucuagcgucauuccucuuaugcauccccuggccgauccuuccacgguguuuaaagacgaugacgaggcggaagauuucgucgaggugcaccuccccgacguucauaaacaggugagcggcgucgaucugggccugccgucuugggggaaguacgugcucauguccgccggaguucugacagcucuuaugcugaugaucuuucucaugaccugcuguagacgcgccaaucgggcugagagcgcccagcacucucugggcgaaagagggcgcaagguguccgucaccagccaguccggacgggugaucucuagcugggaguccuauaagucuggcggggaaacaaaacuguga

SEQ ID NO: 222702 - RNA, 1575 nt, Artificial Sequence
  derived and/or modified CDS sequence (opt5) from glycoprotein__RABV__AB563886.1
augaucccccaggcccuucucuucgugccucugcuugucuuuagccugugcuucggcaaguuuccgauuuacaccauccccgacaaacucgggccuuggucccccauugauauccaccaucugucuuguccuaacaaucuuguuguggaggacgaaggaugcacaaaccugagcggcuucuccuauauggagcucaaggugggguacauuucugcuaucaaagucaauggauuuacguguaccggcgugguuacagaagccgagaccuauacaaacuucgugggguacgucaccacaaccuuuaagagaaaacacuuccggcccacgccugaugcgugccgcgcugccuauaauuggaagauggccggagacccgagauacgaagagagccugcauaaccccuauccugauuaccacuggcugcggaccgugaagacaaccaaagagucccucguuaucauuucucccagcguggcugaccuggauccuuacgacaagucccuucauagccgcgucuuucccucuggcaaauguuccggcaucacagugagcucuaccuauugcuccacgaaucacgauuacacaauuuggaugccggaaaacccuagacuggggaccagcugugacaucuucacaaauucucggggaaagcgcgccuccaaaggcagcaagaccugcggguuuguggaugagagaggacucuauaagucccugaaaggcgcuuguaagcugaaacugugcgggguccucggacugcggcugauggacggcaccugggccgcgauucaaacaucugaugaaacgaaguggugucccccugaccagcucguuaaccugcacgacuuccgcagcgaugagaucgagcaucuugugguggaggaacuggucaaaaagagagaagagugccucgacgcccuggaauccauuaucaccacaaaaagcgugucuuuucggcgccuuucccaccugagaaagcucguucccggcuucgggaaggcuuacaccaucuucaauaaaacacugauggaggccgaugcucauuauaagagcgugcggaccuggaacgagauuauccccucuaaaggaugccugcgcgucggcgggagaugucacccucacgugaauggaguguuuuucaacggcauuauccucgggccggacggacauguucugauucccgaaaugcagagcucccuucugcagcaacacauggagcuccuggaaucuagcgucaucccucuuaugcauccccuggccgauccuuccacgguguuuaaggacgaugacgaggcggaagauuucgucgaggugcaccuccccgacguucauaaacaggugagcggcgucgaucugggccugccgucuugggggaaguacgugcucauguccgccggaguucugacagcucuuaugcugaugaucuuucucaugaccugcugucggagagccaaucgcguggagagcgcucagcacucucugggcgaacgggggagaaaggucuccgugaccagccaguccggacgcgugauuucuagcugggaguccuauaaaucuggcggggaaacaaagcuguga

SEQ ID NO: 222703 - RNA, 1575 nt, Artificial Sequence; identical to SEQ ID NO: 222644
  derived and/or modified CDS sequence (opt5) from glycoprotein__RABV__AB563887.1

SEQ ID NO: 222704 - RNA, 1575 nt, Artificial Sequence; identical to SEQ ID NO: 222644
  derived and/or modified CDS sequence (opt5) from glycoprotein__RABV__AB563888.1

SEQ ID NO: 222705 - RNA, 1575 nt, Artificial Sequence
  derived and/or modified CDS sequence (opt5) from glycoprotein__RABV__AB563889.1
augaucccccaggcccugcucuuugugccuauucuggucuuuagccuuugcuucggcaaguuuccgaucuacaccauucccgacaaacuggggccuuggucccccaucgauauucaccaucucucuuguccuaacaaucugguuguggaggacgaaggaugcacaaaccuuagcggcuucuccuauauggagcugaaggugggguacaucucugcuaucaaagucaauggauuuacguguaccggcgugguuacagaagccgagaccuauacaaacuucgugggguacgucaccacaaccuuuaagagaaaacacuuccggcccacgccugaugcgugccgcgcugccuauaauuggaagauggccggagacccgagauacgaagagagccuccauaaccccuauccugauuaccacuggcugcggaccgugaagacaaccaaagagucccugguuauuaucucucccagcguggcugaccucgauccuuacgacaagucccugcauagccgcgucuuucccucuggcaaauguuccggcauuacagugagcucuaccuauugcuccacgaaucacgauuacacaaucuggaugccggaaaacccuagacuugggaccagcugugacauuuucacaaauucucggggaaagcgcgccuccaaaggcagcaagaccugcggguuuguggaugagagaggacuguauaagucccucaaaggcgcuuguaagcugaaacuuugcgggguccugggacuccggcugauggacggcaccugggccgcgauccaaacaucugaugaaacgaaguggugucccccugaccagcugguuaaccuccacgacuuccgcagcgaugagauugagcaucuggugguggaggaacuugucaaaaagagagaagagugccuggacgcccucgaauccaucaugaccacaaaaagcgugucuuuucggcgccugucccaccuuagaaagcugguucccggcuucgggaaggcuuacaccaucuucaauaaaacacucauggaggccgaugcucauuauaagagcgugcggaccuggaacgagauuauccccucuaaaggaugccugcgcgucggcgggagaugucacccucacgugaauggaguuuucuucaacggcauuauccuggggccggacggacaugugcucauucccgaaaugcagagcucccugcuucagcaacacauggagcugcucgaaucuagcgucaucccucugaugcauccccuugccgauccuuccacgguguuuaaggacgaugacgaggcggaagauuucgucgaggugcaucugcccgacguucacaaacaggugagcggcgucgaucucggccugccgucuugggggaaguacgugcugauguccgccggaguucucacagcucugaugcuuaugaucuuucugaugaccugcugucggagagccaaucgcguggagagcgcucagcacucucucggcgaacgggggagaaaggucuccgugaccagccaguccggacgcgugauuucuagcugggaguccuauaaaucuggcggggaaacaaagcuguga

SEQ ID NO: 222706 - RNA, 1575 nt, Artificial Sequence
  derived and/or modified CDS sequence (opt5) from glycoprotein__RABV__AB563890.1
augaucccccaggcccuucucuucgugccucugcuugucuuuagccugugcuucggcaaguuuccgauuuacaccauccccgacaaacucgggccuuggucccccauugauauccaccaucugucuuguccuaacaaucuuguuguggaggacgaaggaugcacaaaccugagcggcuucuccuauauggagcucaaggugggguacauuucugcuaucaaagucaauggauuuacguguaccggcgugguuacagaagccgagaccuauacaaacuucgugggguacgucaccacaaccuuuaagagaaaacacuuccggcccaugccugaugcgugccgcgcugccuauaauuggaagauggccggagacccgagauacgaagagagccugcauaaccccuauccugauuaccacuggcugcggacggugaagaccacaaaagagucccucguuaucauuucucccagcguggcugaccuggauccuuacgacaagucccuucauagccgcgucuuucccucuggcaaauguuccggcaucaccgugagcucuacauauugcuccaccaaucacgauuacacgauuuggaugccggaaaacccuagacuggggacaagcugugacaucuucaccaauucucggggaaagcgcgccuccaaaggcagcaagacaugcggguuuguggaugagagaggacucuauaagucccugaaaggcgcuuguaagcugaaacugugcgggguccucggacugcggcugauggacggcaccugggccgcgauucaaaccucugaugaaacaaaguggugucccccugaccagcucguuaaccugcacgacuuccgcagcgaugagaucgagcaucuugugguggaggaacuggucaaaaagagagaagagugccucgacgcccuggaauccauuaugacgaccaaaagcgugucuuuucggcgccuuucccaccugagaaagcucguucccggcuucgggaaggcuuacacaaucuucaauaaaacccugauggaggccgaugcucauuauaagagcgugcggacauggaacgagaucauucccucuaaaggaugccugcgcgucggcgggagaugucacccucacgugaauggaguguuuuucaacggcaucauucucgggccggacggacauguucugauccccgaaaugcagagcucccuucugcagcaacacauggagcuccuggaaucuagcgucauuccucuuaugcauccccuggccgauccuuccaccguguuuaaggacgaugacgaggcggaagauuucgucgaggugcaccuccccgacguucauaaacaggugagcggcgucgaucugggccugccgucuugggggaaguacgugcucauguccgccggaguucugacggugcuuaugcugaugaucuuuuucaugacaugcugucggagagcuaaucgcgucgagagcgcccagcacucucucggcgaacgggggagaaagguguccgugaccagccaguccggacgcguuaucucuagcugggaguccuauaaaucuggcggggaaaccaagcuguga

SEQ ID NO: 222707 - RNA, 1575 nt, Artificial Sequence
  derived and/or modified CDS sequence (opt5) from glycoprotein__RABV__AB563891.1
augaucccccaggcccuucucuucgugccucugcuugucuuuagccugugcuucggcaaguuuccgauuuacaccauccccgacaaacucgggccuuggucccccauugauauccaccaucugucuuguccuaacaaucuuguuguggaggacgaaggaugcacaaaccugagcggcuucuccuauauggagcucaaggugggguacauuucugcuaucaaagucaauggauuuacguguaccggcgugguuacagaagccgagaccuauacaaacuucgugggguacgucaccacaaccuuuaagagaaaacacuuccggcccaugccugaugcgugccgcgcugccuauaauuggaagauggccggagacccgagauacgaagagagccugcauaaccccuauccugauuaccacuggcugcggacggugaagaccacaaaagagucccucguuaucauuucucccagcguggcugaccuggauccuuacgacaagucccuucauagccgcgucuuucccucuggcaaauguuccggcaucaccgugagcucuacauauugcuccaccaaucacgauuacacgauuuggaugccggaaaacccuagacuggggacaagcugugacaucuucaccaauucucggggaaagcgcgccuccaaaggcagcaagacaugcggguuuguggaugagagaggacucuauaagucccugaaaggcgcuuguaagcugaaacugugcgggguccucggacugcggcugauggacggcaccugggccgcgauucaaaccucugaugaaacaaaguggugucccccugaccagcucguuaaccugcacgacuuccgcagcgaugagaucgagcaucuugugguggaggaacuggucaaaaagagagaagagugccucgacgcccuggaauccauuaugacgaccaaaagcgugucuuuucggcgccuuucccaccugagaaagcucguucccggcuucgggaaggcuuacacaaucuucaauaaaacccugauggaggccgaugcucauuauaagagcgugcggacauggaacgagaucauucccucuaaaggaugccugcgcgucggcgggagaugucacccucacgugaauggaguguuuuucaacggcaucauucucgggccggacggacggguucugauccccgaaaugcagagcucccuucugcagcaacauauggagcuccuggaaucuagcgucauuccucuuaugcacccccuggccgauccuuccaccguguuuaaggacgaugacgaggcggaagauuucgucgaggugcaucuccccgacguucacaaacaggugagcggcgucgaucugggccugccgucuugggggaaguacgugcucauguccgccggaguucugacggugcuuaugcugaugaucuuuuucaugacaugcuguagacgcgcuaaucgggucgagagcgcccagcauucucucggcgaaagagggcgcaagguguccgugaccagccaguccggacggguuaucucuagcugggaguccuauaaaucuggcggggaaaccaagcuguga

SEQ ID NO: 222708 - RNA, 1575 nt, Artificial Sequence
  derived and/or modified CDS sequence (opt5) from glycoprotein__RABV__AB563892.1
augaucccccaggcccuucucuucgugccucugcuugucuuuagccugugcuucggcaaguuuccgauuuacaccauccccgacaaacucgggccuuggucccccauugauauccaccaucugucuuguccuaacaaucuuguuguggaggacgaaggaugcacaaaccugagcggcuucuccuauauggagcucaaggugggguacauuucugcuaucaaagucaauggauuuacguguaccggcgugguuacagaagccgagaccuauacaaacuucgugggguacgucaccacaaccuuuaagagaaaacacuuccggcccacgccugaugcgugccgcgcugccuauaauuggaagauggccggagacccgagauacgaagagagccugcauaaccccuauccugauuaccacuggcugcggaccgugaagacaaccaaagagucccucguuaucauuucucccagcguggcugaccuggauccuuacgacaagucccuucauagccgcgucuuucccucuggcaaauguuccggcaucacagugagcucuaccuauugcuccacgaaucacgauuacacaauuuggaugccggaaaacccuagacuggggaccagcugugacaucuucacaaauucucggggaaagcgcgccuccaaaggcagcaagaccugcggguuuguggaugagagaggacucuauaagucccugaaaggcgcuuguaagcugaaacugugcgggguccucggacugcggcugauggacggcaccugggccgcgauucaaacaucugaugaaacgaaguggugucccccugaccagcucguuaaccugcacgacuuccgcagcgaugagaucgagcaucuugugguggaggaacuggucaaaaagagagaagagugccucgacgcccuggaauccauuaugaccacaaaaagcgugucuuuucggcgccuuucccaccugagaaagcucguucccggcuucgggaaggcuuacaccaucuucaauaaaacacugauggaggccgaugcucauuauaagagcgugcggaccuggaacgagaucauucccucuaaaggaugccugcgcgucggcgggagaugucacccucacgugaauggaguguuuuucaacggcaucauucucgggccggacggacauguucugauccccgaaaugcagagcucccuucugcagcaacacauggagcuccuggaaucuagcgucauuccucuuaugcauccccuggccgauccuuccacgguguuuaaggacgaugacgaggcggaagauuucgucgaggugcaccuccccgacguucauaaacaggugagcggcgucgaucugggccugccgucuugggggaaguacgugcucauguccgccggaguucugacagugcuuaugcugaugaucuuuuucaugaccugcugucggagagcuaaucgcgucgagagcgcccagcacucucucggcgaacgggggagaaagguguccgugaccagccaguccggacgcguuaucucuagcugggaguccuauaaaucuggcggggaaacaaagcuguga

SEQ ID NO: 222709 - RNA, 1575 nt, Artificial Sequence; identical to SEQ ID NO: 222706
  derived and/or modified CDS sequence (opt5) from glycoprotein__RABV__AB563893.1

SEQ ID NO: 222710 - RNA, 1575 nt, Artificial Sequence; identical to SEQ ID NO: 222706
  derived and/or modified CDS sequence (opt5) from glycoprotein__RABV__AB563894.1

SEQ ID NO: 222711 - RNA, 1575 nt, Artificial Sequence
  derived and/or modified CDS sequence (opt5) from glycoprotein__RABV__AB563900.1
augaucccccaggcccugauguucgugccucuccuggucuuuagccuuugcuucggcaaguuuccgauuuacaccauccccgacaaacuggggccuuggucccccauugauauccaccaucucucuuguccuaacaaucugguuguggaggacgaaggaugcacaaaccuuagcggcuucuccuauauggagcugaaggugggguacauuucugcuaucaaagucaauggauuuacguguaccggcgugguuacagaagccgagaccuauacaaacuucgugggguacgucaccacaaccuuuaagagaaaacacuuccggcccaugccugaugcgugccgcgcugccuauaauuggaagauggccggagacccgagauacgaagagagccuccauaaccccuauccugauuaccacuggcugcggacggugaagaccacaaaagagucccugguuaucauuucucccagcguggcugaccucgauccuuacgacaagucccugcauagccgcgucuuucccucuggcaaauguuccggcaugaccgugagcucuacauauugcuccaccaaucacgauuacacgaucuggaugccggaaaacccuagacuugggacaagcugugacauuuucaccaauucucggggaaagcgcgccuccaaaggcagcaagacaugcggguuuguggaugagagaggacuguauaagucccucaaaggcgcuuguaagcugaaacuuugcgggguccugggacuccggcugauggacggcaccugggccgcgauccaaaccucugaugaaacaaaguggugucccccugaccagcugguuaaccuccacgacuuccgcagcgaugagauugagcaucuggugguggaggaacuugucaaaaagagagaagagugccuggacgcccucgaauccaucaugacgaccaaaagcgugucuuuucggcgccugucccaccuuagaaagcugguucccggcuucgggaaggcuuacacaauuuucaauaaaacccucauggaggccgaugcucauuauaagagcgugcggacauggaacgagaucauccccucuaaaggaugccugcgcgucggcgggagaugucacccucacgugaauggaguguuuuucaacggcauuauccuggggccggacggacauguucucauucccgaaaugcagagcucccugcuucagcaacacauggagcugcucgaaucuagcgucaucccucugaugcauccccuugccgauccuuccaccguguuuaagggcgacgaugaggcggaagacuucgucgaggugcaucugcccgauguucacaaacaggugagcggcgucgaccucgggcugccgucuuggggaaaguacgugcugauguccgccggcguucucacggcucugaugcuuaugauuuuucugaugacaugcuguaagcgggccaauagagcugagagcgcccaccacucucucggggaacgcggacggaaaguguccgucaccagccaguccggcagagugaucucuagcugggaguccuauaagucugggggcgaaaccaaacuguga

SEQ ID NO: 222712 - RNA, 1575 nt, Artificial Sequence
  derived and/or modified CDS sequence (opt5) from glycoprotein__RABV__AB563901.1
augaucccccaggcccuucucuucgugccucugcuugucuuuagccugugcuucggcaaguuuccgauuuacaccauccccgacaaacucgggccuuggucccccauugauauccaccaucugucuuguccuaacaaucuuguuguggaggacgaaggaugcacaaaccugagcggcuucuccuauauggagcucaaggugggguacauuucugcuaucaaagucaauggauuuacguguaccggcgugguuacagaagccgagaccuauacaaacuucgugggguacgucaccacaaccuuuaagagaaaacacuuccggcccacgccugaugcgugccgcgcugccuauaauuggaagauggccggagacccgagauacgaagagagccugcauaaccccuauccugauuaccacuggcugcggaccgugaagacaaccaaagagucccucguuaucauuucucccagcguggcugaccuggauccuuacgacaagucccuucauagccgcgucuuucccucuggcaaauguuccggcaucacagugagcucuaccuauugcuccacgaaucacgauuacacaauuuggaugccggaaaacccuagacuggggaccagcugugacaucuucacaaauucucggggaaagcgcgccuccaaaggcagcaagaccugcggguuuguggaugagagaggacucuauaagucccugaaaggcgcuuguaagcugaaacugugcgggguccucggacugcggcugauggacggcaccugggccgcgauucaaacaucugaugaaacgaaguggugucccccugaccagcucguuaaccugcacgacuuccgcagcgaugagaucgagcaucuugugguggaggaacuggucaaaaagagagaagagugccucgacgcccuggaauccauuaugaccacaaaaagcgugucuuuucggcgccuuucccaccugagaaagcucguucccggcuucgggaaggcuuacaccaucuucaauaaaacacugauggaggccgaugcucauuauaagagcgugcggaccuggaacgagaucauucccucuaaaggaugccugcgcgucggcgggagaugucacccucacgugaauggaguguuuuucaacggcaucauucucgggccggacggacauguucugauccccgaaaugcagagcucccuucugcagcaacacauggagcuccuggaaucuagcgucauuccucuuaugcauccccuggccgauccuuccacgguguuuaaggacgaugacgaggcggaagauuucgucgaggugcaccuccccgacguucauaaacaggugagcggcgucgaucugggccugccgucuugggggaaguacgugcucauguccgccggaguucugacagcucuuaugcugaccaucuuucucaugaccugcugucggagagccaaucgcgcugagagcgcccagcacucucugggcgaacgggggagaaagguguccgucacaccucagagcggacgcgugaucuccucuugggagagcuauaaauccggcggggaaaccaagcuguga

SEQ ID NO: 222713 - RNA, 1575 nt, Artificial Sequence; identical to SEQ ID NO: 222644
  derived and/or modified CDS sequence (opt5) from glycoprotein__RABV__AB563904.1

SEQ ID NO: 222714 - RNA, 1575 nt, Artificial Sequence; identical to SEQ ID NO: 222688
  derived and/or modified CDS sequence (opt5) from glycoprotein__RABV__AB563907.1

SEQ ID NO: 222715 - RNA, 1575 nt, Artificial Sequence; identical to SEQ ID NO: 222706
  derived and/or modified CDS sequence (opt5) from glycoprotein__RABV__AB563911.1

SEQ ID NO: 222716 - RNA, 1575 nt, Artificial Sequence
  derived and/or modified CDS sequence (opt5) from glycoprotein__RABV__AB563912.1
augaucccccaggcccuucucuucgugccucugcuugucuuuagccugugcuucggcaaguuuccgauuuacaccauccccgacaaacucgggccuuggucccccauugauauccaccaucugucuuguccuaacaaucuuguuguggaggacgaaggaugcacaaaccugagcggcuucuccuauauggagcucaaggugggguacauuucugcuaucaaagucaauggauuuacguguaccggcgugguuacagaagccgagaccuauacaaacuucgugggguacgucaccacaaccuuuaagagaaaacacuuccggcccaugccugaugcgugccgcgcugccuauaauuggaagauggccggagacccgagauacgaagagagccugcauaaccccuauccugauuaccacuggcugcggacggugaagaccacaaaagagucccucguuaucauuucucccagcguggcugaccuggauccuuacgacaagucccuucauagccgcgucuuucccucuggcaaauguuccggcaucaccgugagcucuacauauugcuccaccaaucacgauuacacgauuuggaugccggaaaacccuagacuggggacaagcugugacaucuucaccaauucucggggaaagcgcgccuccaaaggcagcaagacaugcggguuuguggaugagagaggacucuauaagucccugaaaggcgcuuguaagcugaaacugugcgggguccucggacugcggcugauggacggcaccugggccgcgauucaaaccucugaugaaacaaaguggugucccccugaccagcucguuaaccugcacgacuuccgcagcgaugagaucgagcaucuugugguggaggaacuggucaaaaagagagaagagugccucgacgcccuggaauccauuaugacgaccaaaagcgugucuuuucggcgccuuucccaccugagaaagcucguucccggcuucgggaaggcuuacacaaucuucaauaaaacccugauggaggccgaugcucauuauaagagcgugcggacauggaacgagaucauucccucuaaaggaugccugcgcgucggcgggagaugucacccucacgugaauggaguguuuuucaacggcaucauucucgggccggacggacauguucugauccccgaaaugcagagcucccuucugcagcaacacauggagcuccuggaaucuagcgucauuccucuuaugcauccccuggccgauccuuccaccguguuuaaggacgaugacgaggcggaagauuucgucgaggugcaccuccccgacguucauaaacaggugagcggcgucgaucugggccugccgucuugggggaaguacgugcucauguccacgggaguucugacagugcuuaugcugaugaucuuuuucaugaugugcugucggagagccaaucgcgucgagagcgcucagcacucucucggcgaacgggggagaaagguguccgugaccagccaguccggacgcguuaucucuagcugggaguccuauaaaucuggcggggaaaccaagcuguga

SEQ ID NO: 222717 - RNA, 1575 nt, Artificial Sequence; identical to SEQ ID NO: 222706
  derived and/or modified CDS sequence (opt5) from glycoprotein__RABV__AB563913.1

SEQ ID NO: 222718 - RNA, 1575 nt, Artificial Sequence
  derived and/or modified CDS sequence (opt5) from glycoprotein__RABV__AB563914.1
augaucccccaggcccuucucuucgugccucugcuugucuuuagccugugcuucggcaaguuuccgauuuacaccauccccgacaaacucgggccuuggucccccauugauauccaccaucugucuuguccuaacaaucuuguuguggaggacgaaggaugcacaaaccugagcggcuucuccuauauggagcucaaggugggguacauuucugcuaucaaagucaauggauuuacguguaccggcgugguuacagaagccgagaccuauacaaacuucgugggguacgucaccacaaccuuuaagagaaaacacuuccggcccaugccugaugcgugccgcgcugccuauaauuggaagauggccggagacccgagauacgaagagagccugcauaaccccuauccugauuaccacuggcugcggacggugaagaccacaaaagagucccucguuaucauuucucccagcguggcugaccuggauccuuacgacaagucccuucauagccgcgucuuucccucuggcaaauguuccggcaucaccgugagcucuacauauugcuccaccaaucacgauuacacgauuuggaugccggaaaacccuagacuggggacaagcugugacaucuucaccaauucucggggaaagcgcgccuccaaaggcagcaagacaugcggguuuguggaugagagaggacucuauaagucccugaaaggcgcuuguaagcugaaacugugcgggguccucggacugcggcugauggacggcaccugggccgcgauucaaaccucugaugaaacaaaguggugucccccugaccagcucguuaaccugcacgacuuccgcagcgaugagaucgagcaucuugugguggaggaacuggucaaaaagagagaagagugccucgacgcccuggaauccauuaugacgaccaaaagcgugucuuuucggcgccuuucccaccugagaaagcucguucccggcuucgggaaggcuuacacaaucuucaauaaaacccugauggaggccgaugcucauuauaagagcgugcggacauggaacgagaucauucccucuaaaggaugccugcgcgucggcgggagaugucacccucacgugaauggaguguuuuucaacggcaucauucucgggccggacggacauguucugauccccgaaaugcagagcuaccuucugcagcaacacauggagcuccuggaauccucugucauuccucuuaugcauccccuggccgauccuagcaccguguuuaaggacgaugacgaggcggaagauuucgucgaggugcaccuccccgacguucauaaacagguguccggcgucgaucugggccugccgagcugggggaaguaugugcucaugucugccggaguucugacggugcuuaugcugaugaucuuuuucaugacaugcugucggagagcuaaucgcgucgaguccgcccagcacagccucggcgaacgggggagaaaggugucugugaccucccagagcggacgcguuaucuccucuugggagagcuacaaauccggcggggaaacccggcuguga

SEQ ID NO: 222719 - RNA, 1575 nt, Artificial Sequence; identical to SEQ ID NO: 222706
  derived and/or modified CDS sequence (opt5) from glycoprotein__RABV__AB563915.1

SEQ ID NO: 222720 - RNA, 1575 nt, Artificial Sequence; identical to SEQ ID NO: 222673
  derived and/or modified CDS sequence (opt5) from glycoprotein__RABV__AB563921.1

SEQ ID NO: 222721 - RNA, 1575 nt, Artificial Sequence
  derived and/or modified CDS sequence (opt5) from glycoprotein__RABV__AB563922.1
augaacccccaggcccugauguucgugccucuccuggucuuuagccuuugcuucggcaaguuuccgaucuacaccauucccgacaaacuggggccuuggucccccaucgauauucaccaucucucuuguccuaauaaccugguuguggaggacgaaggaugcacaaaucuuagcggcuucuccuauauggagcugaaggugggguacaucucugcuauuaaagucaacggauuuacguguaccggcgugguuacagaagccgagaccuauacaaauuucgugggguacgucaccacaaccuuuaagagaaaacacuuccggcccacgccugaugcgugccgcgcuagcuauaacuggaagauggccggagacccgagauacgaagagucccuccauaaucccuauccugauuaccacuggcugcggaccgugaagacaaccaaagagucucugguuaucaucagccccuccguggccgaccucgauccuuacgacaagagccugcauucucgcgucuuucccuccggcaaauguagcggcauuacagugucuuccaccuauugcagcacgaaccacgauuacacaaucuggaugccggaaaauccuagacuugggaccucuugugacauuuucacaaacucccggggaaagcgcgcuagcaaaggcuccaagaccugcggguuuguggaugagagaggacuguauaagucucucaaaggcgccuguaagcugaaacuuugcgggguccugggacuccggcugauggacggcaccugggcugccauccaaacaagcgaugaaacgaaguggugucccccugaccagcugguuaaucuccacgacuuccgcuccgaugagauugagcaucuggugguggaggaacuugucaaaaagagagaagagugccuggacgcgcucgaaagcaucaugaccacaaaaucuguguccuuucggcgccugagccaccuuagaaagcugguucccggcuucgggaaggccuacaccauuuucaacaaaacacucauggaggcugaugcccauuauaagucugugcggaccuggaaugagaucauccccagcaaaggaugccugcgcgucggcgggagaugucacccucacgugaacggaguguuuuucaauggcauuauccuggggccggacggacauguucucauucccgaaaugcaguccucucugcuucagcaacacauggagcugcucgaaagcuccgucaucccucugaugcauccccuugcugauccuagcacgguguuuaaggacgaugacgaggccgaagauuucgucgaggugcaucugcccgacguucacaaacaggugucuggcgucgaucucggccugccguccugggggaaguacgugcugaugagcgcgggaguucucacagcccugaugcuuaugauuuuucugaugaccugcugucggagagcuaaccgcgccgagucugcucagcacucccucggcgaacgggggagaaaggugagcgucaccucccagucuggacgcgugaucagcuccugggagucuuauaaaagcggcggggaaacaaagcuguga

SEQ ID NO: 222722 - RNA, 1575 nt, Artificial Sequence
  derived and/or modified CDS sequence (opt5) from glycoprotein__RABV__AB563923.1
augaucccccaggcccugauguucgugccucuccuggucuuuagccuuugcuucggcaaguuuccgauuuacaccauccccgacaaacuggggccuuggucccccauugauauccaccaucucucuuguccuaacaaucugguuguggaggacgaaggaugcacaaaccuuagcggcuucuccuauauggagcugaaggugggguacauuucugcuaucaaagucaauggauuuacguguaccggcgugguuacagaagccgagaccuauacaaacuucgugggguacgucaccacaaccuuuaagagaaaacacuuccggcccacgccugaugcgugccgcgcugccuauaauuggaagauggccggagacccgagauacgaagagagccuccauaaccccuauccugauuaccacuggcugcggaccgugaagacaaccaaagagucccugguuaucauuucucccagcguggcugaccucgauccuuacgacaagucccugcauagccgcgucuuucccucuggcaaauguuccggcaucacagugagcucuaccuauugcuccacgaaucacgauuacacaauuuggaugccggaaaacccuagacuugggaccagcugugacaucuucacaaauucucggggaaagcgcgccuccaaaggcagcaagaccugcggguuuguggaugagagaggacuguauaagucccucaaaggcgcuuguaagcugaaacuuugcgggguccugggacuccggcugauggacggcaccugggccgcgauucaaacaucugaugaaacgaaguggugucccccugaccagcugguuaaccuccacgacuuccgcagcgaugagaucgagcaucuggugguggaggaacuugucagaaaacgggaagagugccuggacgcccucgaauccauuaugaccacaaagagcgugucuuuucgcagacugucccaccuucggaaacugguucccggcuucgggaaggcuuacaccaucuucaauaagacacucauggaggccgaugcucauuauaaaagcgugcgcaccuggaacgagaucauucccucuaagggaugccugagagucggcgggcggugucacccucacgugaauggaguguuuuucaacggcaucauucuggggccggacggacaugugcucauccccgaaaugcagagcucccugcuucagcaacacauggagcugcucgaaucuagcgucauuccucugaugcauccccuugccgauccuuccacgguguuuaaagacgaugacgaggcggaagauuucgucgaggugcaucugcccgacguucacaagcagguuagcggcgucgaucucggccugccgucuugggggaaauacgugcugauguccgccggaguucucacagcucugaugcuuaugaucuuucugaugaccugcuguagacgcgccaaucgggcugagagcgcccagcacucucucggcgaaagagggcgcaagguguccgucaccagccaguccggacgggugaucucuagcugggaguccuauaagucuggcggggaaacaaaacuguga

SEQ ID NO: 222723 - RNA, 1575 nt, Artificial Sequence
  derived and/or modified CDS sequence (opt5) from glycoprotein__RABV__AB563926.1
augaucccccaggcccuucucuucgugccucugcuugucuuuagccugugcuucggcaaguuuccgauuuacaccauccccgacaaacucgggccuuggucccccauugauauccaccaucugucuuguccuaacaaucuuguuguggaggacgaaggaugcacaaaccugagcggcuucuccuauauggagcucaaggugggguacauuucugcuaucaaagucaauggauuuacguguaccggcgugguuacagaagccgagaccuauacaaacuucgugggguacgucaccacaaccuuuaagagaaaacacuuccggcccacgccugaugcgugccgcgcugccuauaauuggaagauggccggagacccgagauacgaagagagccugcauaaccccuauccugauuaccacuggcugcggaccgugaagacaaccaaagagucccucguuaucauuucucccagcguggcugaccuggauccuuacgacaagucccuucauagccgcgucuuucccucuggcaaauguuccggcaucacagugagcucuaccuauugcuccacgaaucacgauuacacaauuuggaugccggaaaacccuagacuggggaccagcugugacaucuucacaaauucucggggaaagcgcgccuccaaaggcagcaagaccugcggguuuguggaugagagaggacucuauaagucccugaaaggcgcuuguaagcugaaacugugcgggguccucggacugcggcugauggacggcaccugggccgcgauucaaacaucugaugaaacgaaguggugucccccugaccagcucguuaaccugcacgacuuccgcagcgaugagaucgagcaucuugugguggaggaacuggucaaaaagagagaagagugccucgacgcccuggaauccauuaugaccacaaaaagcgugucuuuucggcgccuuucccaccugagaaagcucguucccggcuucgggaaggcuuacaccaucuucaauaaaacacugauggaggccgaugcucauuauaagagcgugcggaccuggaacgagaucauucccucuaaaggaugccugcgcgucggcgggagaugucacccucacgugaauggaguguuuuucaacggcaucauucucgggccggacggacauguucugauccccgaaaugcagagcucccuucugcagcaacacauggagcuccuggaaucuagcgucauuccucuuaugcauccccuggccgauccuuccacgguguuuaaggacgaugacgaggcggaagauuucgucgaggugcaccuccccgacguucauaaacaggugagcggcgucgaucugggccugccgucuugggggaaguacgugcucauguccgccggaguucugacagcucuuaugcugaugaucuuucucaugaccugcugucggagagccaaucgcgcugagagcgcccagcacucucugggcgaaggggagcggaagguguccgucaccagccaguccggaagagugaucucuagcugggaauccuauaaaucuggcggggagacaaagcuguga

SEQ ID NO: 222724 - RNA, 1575 nt, Artificial Sequence; identical to SEQ ID NO: 222674
  derived and/or modified CDS sequence (opt5) from glycoprotein__RABV__AB563927.1

SEQ ID NO: 222725 - RNA, 1575 nt, Artificial Sequence; identical to SEQ ID NO: 222670
  derived and/or modified CDS sequence (opt5) from glycoprotein__RABV__AB563928.1

SEQ ID NO: 222726 - RNA, 1575 nt, Artificial Sequence
  derived and/or modified CDS sequence (opt5) from glycoprotein__RABV__AB563929.1
augaucccccaggcccuucucuucgugccucugcuugucuuuagccugugcuucggcaaguuuccgauuuacaccauccccgacaaacucgggccuuggucccccauugauauccaccaucugucuuguccuaacaaucuuguuguggaggacgaaggaugcacaaaccugagcggcuucuccuauauggagcucaaggugggguacauuucugcuaucaaagucaauggauuuacguguaccggcgugguuacagaagccgagaccuauacaaacuucgugggguacgucaccacaaccuuuaagagaaaacacuuccggcccacgccugaugcgugccgcgcugccuauaauuggaagauggccggagacccgagauacgaagagagccugcauaaccccuauccugauuaccacuggcugcggaccgugaagacaaccaaagagucccucguuaucauuucucccagcguggcugaccuggauccuuacgacaagucccuucauagccgcgucuuucccucuggcaaauguuccggcaucacagugagcucuaccuauugcuccacgaaucacgauuacacaauuuggaugccggaaaacccuagacuggggaccagcugugacaucuucacaaauucucggggaaagcgcgccuccaaaggcagcaagaccugcggguuuguggaugagagaggacucuauaagucccugaaaggcgcuuguaagcugaaacugugcgggguccucggacugcggcugauugacggcaccugggccgcgauccaaacaucugaugaaacgaaguggugucccccugaccagcucguuaaccugcacgacuuccgcagcgaugagauugagcaucuugugguggaggaacuggucaaaaagagagaagagugccucgacgcccuggaauccaucaugaccacaaaaagcgugucuuuucggcgccuuucccaccugagaaagcucguucccggcuucgggaaggcuuacaccaucuucaauaaaacacugauggaggccgaugcucauuauaagagcgugcggaccuggaacgagauuauccccucuaaaggaugccugcgcgucggcgggagaugucacccucacgugaauggaguguuuuucaacggcauuauccucgggccggacggacauguucugauucccgaaaugcagagcucccuucugcagcaacacauggagcuccuggaaucuagcgucaucccucuuaugcauccccuggccgauccuuccacgguguuuaaggacgaugacgaggcggaagauuucgucgaggugcaccuccccgacguucauaaacaggugagcggcgucgaucugggccugccgucuugggggaaguacgugcucauguccgccggaguucugacagcucuuaugcugaugaucuuucucacaaccugcugucggagagccaaucgcgcugagagcgcccagcacucucugggcgaacgggggagaaagguguccgucaccagccaguccggacgcgugauuucuagcugggaguccuauaaaucuggcggggaaaccaagcuguga

SEQ ID NO: 222727 - RNA, 1575 nt, Artificial Sequence; identical to SEQ ID NO: 222676
  derived and/or modified CDS sequence (opt5) from glycoprotein__RABV__AB563930.1

SEQ ID NO: 222728 - RNA, 1575 nt, Artificial Sequence; identical to SEQ ID NO: 222670
  derived and/or modified CDS sequence (opt5) from glycoprotein__RABV__AB563931.1

SEQ ID NO: 222729 - RNA, 1575 nt, Artificial Sequence; identical to SEQ ID NO: 222705
  derived and/or modified CDS sequence (opt5) from glycoprotein__RABV__AB563933.2

SEQ ID NO: 222730 - RNA, 1575 nt, Artificial Sequence; identical to SEQ ID NO: 222644
  derived and/or modified CDS sequence (opt5) from glycoprotein__RABV__AB563934.1

SEQ ID NO: 222731 - RNA, 1575 nt, Artificial Sequence; identical to SEQ ID NO: 222676
  derived and/or modified CDS sequence (opt5) from glycoprotein__RABV__AB563937.1

SEQ ID NO: 222732 - RNA, 1575 nt, Artificial Sequence
  derived and/or modified CDS sequence (opt5) from glycoprotein__RABV__AB563938.1
augaucccccaggcccuucucuucgugccucugcuugucuuuagccugugcuucggcaaguuuccgauuuacaccauccccgacaaacucgggccuuggucccccauugauauccaccaucugucuuguccuaacaaucuuguuguggaggacgaaggaugcacaaaccugagcggcuucuccuauauggagcucaaggugggguacauuucugcuaucaaagucaauggauuuacguguaccggcgugguuacagaagccgagaccuauacaaacuucgugggguacgucaccacaaccuuuaagagaaaacacuuccggcccacgccugaugcgugccgcgcugccuauaauuggaagauggccggagacccgagauacgaagagagccugcauaaccccuauccugauuaccacuggcugcggaccgugaagacaaccaaagagucccucguuaucauuucucccagcguggcugaccuggauccuuacgacaagucccuucauagccgcgucuuucccucuggcaaauguuccggcaucacagugagcucuaccuauugcuccacgaaucacgauuacacaauuuggaugccggaaaacccuagacuggggaccagcugugacaucuucacaaauucucggggaaagcgcgccuccaaaggcagcaagaccugcggguuuguggaugagagaggacucuauaagucccugaaaggcgcuuguaagcugaaacugugcgggguccucggacugcggcugauggacggcaccugggccgcgauucaaacaucugaugaaacgaaguggugucccccugaccagcucguuaaccugcacgacuuccgcagcgaugagaucgagcaucuugugguggaggaacuggucaaaaagagagaagagugccucgacgcccuggaauccauuaugaccacaaaaagcgugucuuuucggcgccuuucccaccugagaaagcucguucccggcuucgggaaggcuuacaccaucuucaauaaaacacugauggaggccgaugcucauuauaagagcgugcggaccuggaacgagaucauucccucuaaaggaugccugcgcgucggcgggagaugucacccucacgugaauggaguguuuuucaacggcaucauucucgggccggacggacauguucugauccccgaaaugcagagcucccuucugcagcaacacauggagcuccuggaaucuagcgucauuccucuuaugcauccccuggccgauccuuccacgguguuuaaggacgaugacgaggcggaagauuucgucgaggugcaccuccccgacguucauaaacaggugagcggcgucgaucugggccugccgucuugggggaaguacgugcucauguccgccggaguucugacagcucuuaugcugaugaucuuucucaugaccugcuguauccgggccaauagagcugagagcgcccagcacucucugggcgaacgcgggcggaagguguccgucaccagccaguccggaagagugauuucuagcugggaguccuauaaaucuggcggggaaacaaagcuguga

SEQ ID NO: 222733 - RNA, 1575 nt, Artificial Sequence; identical to SEQ ID NO: 222676
  derived and/or modified CDS sequence (opt5) from glycoprotein__RABV__AB563939.1

SEQ ID NO: 222734 - RNA, 1575 nt, Artificial Sequence
  derived and/or modified CDS sequence (opt5) from glycoprotein__RABV__AB563942.1
augaucccccaggcccuucucuucgugccucugcuugucuuuagccugugcuucggcaaguuuccgauuuacaccauccccgacaaacucgggccuuggucccccauugauauccaccaucugucuuguccuaacaaucuuguuguggaggacgaaggaugcacaaaccugagcggcuucuccuauauggagcucaaggugggguacauuucugcuaucaaagucaauggauuuacguguaccggcgugguuacagaagccgagaccuauacaaacuucgugggguacgucaccacaaccuuuaagagaaaacacuuccggcccacgccugaugcgugccgcgcugccuauaauuggaagauggccggagacccgagauacgaagagagccugcauaaccccuauccugauuaccacuggcugcggaccgugaagacaaccaaagagucccucguuaucauuucucccagcguggcugaccuggauccuuacgacaagucccuucauagccgcgucuuucccucuggcaaauguuccggcaucacagugagcucuaccuauugcuccacgaaucacgauuacacaauuuggaugccggaaaacccuagacuggggaccagcugugacaucuucacaaauucucggggaaagcgcgccuccaaaggcagcaagaccugcggguuuguggaugagagaggacucuauaagucccugaaaggcgcuuguaagcugaaacugugcgggguccucggacugcggcugauggacggcaccugggccgcgauucaaacaucugaugaaacgaaguggugucccccugaccagcucguuaaccugcacgacuuccgcagcgaugagaucgagcaucuugugguggaggaacuggucaaaaagagagaagagugccucgacgcccuggaauccauuaugaccacaaaaagcgugucuuuucggcgccuuucccaccugagaaagcucguucccggcuucgggaaggcuuacaccaucuucaauaaaacacugauggaggccgaugcucauuauaagagcgugcggaccuggaacgagaucauucccucuaaaggaugccugcgcgucggcgggagaugucacccucacgugaauggaguguuuuucaacggcaucauucucgggccggacggacauguucugauccccgaaaugcagagcucccuucugcagcaacacauggagcuccuggaaucuagcauuaucccucuuaugcauccccuggccgauccuuccacggucuuuaaggacgaugacgaggcggaagauuucguggagguccaccuccccgacgugcauaaacagguuagcggcguggaucugggccugccgucuugggggaaguacguccucauguccgccggagugcugacagcucuuaugcugaugaucuuucucaugaccugcugucggagaaccaaucgcgccgagagcgcucagcacucucugggcgaacgggggagaaagguuuccgugacaagccaguccggacgcgucauuucuagcugggaguccuauaaaucuggcggggaaaccaagcuguga

SEQ ID NO: 222735 - RNA, 1575 nt, Artificial Sequence
  derived and/or modified CDS sequence (opt5) from glycoprotein__RABV__AB563945.1
augaucccccaggcccuucucuucgugccucugcuugucuuuagccugugcuucggcaaguuuccgauuuacaccauccccgacaaacucgggccuuggucccccauugauauccaccaucugucuuguccuaacaaucuuguuguggaggacgaaggaugcacaaaccugagcggcuucuccuauauggagcucaaggugggguacauuucugcuaucaaagucaauggauuuacguguaccggcgugguuacagaagccgagaccuauacaaacuucgugggguacgucaccacaaccuuuaagagaaaacacuuccggcccacgccugaugcgugccgcgcugccuauaauuggaagauggccggagacccgagauacgaagagagccugcauaaccccuauccugauuaccacuggcugcggaccgugaagacaaccaaagagucccucguuaucauuucucccagcguggcugaccuggauccuuacgacaagucccuucauagccgcgucuuucccucuggcaaauguuccggcaucacagugagcucuaccuauugcuccacgaaucacgauuacacaauuuggaugccggaaaacccuagacuggggaccagcugugacaucuucacaaauucucggggaaagcgcgccuccaaaggcagcaagaccugcggguuuguggaugagagaggacucuauaagucccugaaaggcgcuuguaagcugaaacugugcgggguccucggacugcggcugauggacggcaccugggccgcgauucaaacaucugaugaaacgaaguggugucccccugaccagcucguuaaccugcacgacuuccgcagcgaugagaucgagcaucuugugguggaggaacuggucaaaaagagagaagagugccucgacgcccuggaauccauuaugaccacaaaaagcgugucuuuucggcgccuuucccaccugagaaagcucguucccggcuucgggaaggcuuacaccaucuucaauaaaacacugauggaggccgaugcucauuauaagagcgugcggaccuggaacgagaucauucccucuaaaggaugccugcgcgucggcgggagaugucacccucacgugaauggaguguuuuucaacggcaucauucucgggccggacggacauguucugauccccgaaaugcagagcucccuucugcagcaacacauggagcuccuggaaucuagcgucauuccucuuaugcauccccuggccgauccuuccacgguguuuaaggacgaugacgaggcggaagauuucgucgaggugcaccuccccgacguucauaaacaggugagcggcgucgaucugggccugccgucuugggggaaguacgugcucauguccgccggaguucugacagcucuuaugcugaugaucuuucucaugaccugcugucggggcaccaauagagccgagagcgcucagcacucucugggggaacgcggacggaagguguccgucacaagccagaacggcagagugaucuccucuugggagagcuauaaauccgggggcgaaaccaagcuguga

SEQ ID NO: 222736 - RNA, 1575 nt, Artificial Sequence
  derived and/or modified CDS sequence (opt5) from glycoprotein__RABV__AB563946.2
augaucccccaggcccuucucuucgugccucugcuuauuagcucccugugcuuuggcaaguucccgaucuacaccauucccgacaaacucgggccuuggucucccaucgauauucaccaucugagcuguccuaacaaucuugucguugaggacgaaggaugcacaaaccuguccggcuuuucuuauauggagcucaaggugggguacaucagcgcuaucaaagugaauggauucacguguaccggcgucgugacagaagccgagaccuauacaaacuuuguuggguacgugaccacaaccuucaagagaaaacacuuucggcccacgccugaugcgugccgcgcugccuauaauuggaagauggccggagacccgagauacgaagagucccugcauaaccccuauccugauuaccacuggcugcggaccgucaagacaaccaaagagucucucgugauuaucagccccuccguugcugaccuggauccuuacgacaagagccuucauucucgcguguuccccuccggcaaauguagcggcauuacagucucuuccaccuauugcagcacgaaucacgauuacacaaucuggaugccggaaaacccuagacuggggaccucuugugacauuuuuacaaauucccggggaaagcgcgccagcaaaggcuccaagaccugcggguucguggaugagagaggacucuauaagucucugaaaggcgcuuguaagcugaaacugugcggggugcucggacugcggcugauggacggcaccugggccgcgauccaaacaagcgaugaaacgaaguggugucccccugaccagcucgucaaccugcacgacuuucgcuccgaugagauugagcaucuuguuguggaggaacuggugaaaaagagagaagagugccucgacgcccuggaaagcaucaugaccacaaaaucugucuccuuccggcgccuuagccaccugagaaagcucgugcccggcuuugggaaggcuuacaccaucuucaauaaaacacugauggaggccgaugcucauuauaagucuguucggaccuggaacgagauuauccccagcaaaggaugccugcgcgugggcgggagaugucacccucacgucaauggaguguucuuuaacggcauuauccucgggccggacggacauguucugauucccgaaaugcaguccucucuucugcagcaacacauggagcuccuggaaagcuccgugaucccucuuaugcauccccuggccgauccuagcacggucuucaaggacgaugacgaggcggaagauuuuguggagguccaccuccccgacgugcauaaacagguuucuggcguggaucugggccugccguccugggggaaguacguccucaugagcgccggagugcugacagcucuuaugcugaugaucuuccucaugaccugcugucggagagccaaucgcgcugagucugcccagcacucccugggcgaacgggggagaaagguuagcgugaccucccagucuggacgcgucauuagcuccugggagucuuauaaaagcggcggggaaacaaagcuguga

SEQ ID NO: 222737 - RNA, 1575 nt, Artificial Sequence; identical to SEQ ID NO: 222711
  derived and/or modified CDS sequence (opt5) from glycoprotein__RABV__AB563947.1

SEQ ID NO: 222738 - RNA, 1575 nt, Artificial Sequence
  derived and/or modified CDS sequence (opt5) from glycoprotein__RABV__AB563948.1
augaucccccaggcccugauguucgugccucuccuggucuuuagccuuugcuucggcaaguuuccgauuuacaccauccccgacaaacuggggccuuggucccccauugauauccaccaucucucuuguccuaacaaucugguuguggaggacgaaggaugcacaaaccuuagcggcuucuccuauauggagcugaaggugggguacauuucugcuaucaaagucaauggauuuacguguaccggcgugguuacagaagccgagaccuauacaaacuucgugggguacgucaccacaaccuuuaagagaaaacacuuccggcccaugccugaugcgugccgcgcugccuauaauuggaagauggccggagacccgagauacgaagagagccuccauaaccccuauccugauuaccacuggcugcggacggugaagaccacaaaagagucccugguuaucauuucucccagcguggcugaccucgauccuuacgacaagucccugcauagccgcgucuuucccggcggcaaauguucugggaugaccguguccagcacauauugcucuaccaaucacgauuacacgaucuggaugccggaaaacccuagacuuggaacauccugugacauuuucaccaauagccggggcaagcgcgccucuaaaggguccaagacaugcggauuuguggaugagagaggccuguauaagagccucaaaggggcuuguaagcugaaacuuugcggaguccugggccuccggcugauggacggcaccugggccgcgauccaaaccuccgaugaaacaaaguggugucccccugaccagcugguuaaccuccacgacuuccgcucugaugagauugagcaucuggugguggaggaacuugucaaaaagagagaagagugccuggacgcccucgaaagcaucaugacgaccaaauccgugagcuuucggcgccugucucaccuuagaaagcugguucccggguucggaaaggcuuacacaauuuucaauaaaacccucauggaggccgaugcucauuauaaguccgugcggacauggaacgagaucauccccagcaaaggcugccugcgcgucgggggaagaugucacccucacgugaauggcguguuuuucaacgggauuauccugggaccggacggccauguucucauucccgaaaugcagucuagccugcuucagcaacacauggagcugcucgaauccucugucaucccucugaugcauccccuugccgauccuagcaccguguuuaagggcgacgaugaggcggaagacuucgucgaggugcaucugcccgauguucacaaacagguguccggggucgaccucggacugccgagcuggggcaaguacgugcugaugucugccgggguucucacggcucugaugcuuaugauuuuucugaugacaugcuguaagcgggccaauagagcugaguccgcccaccacagccucggagaacgcggccggaaagugucugucaccucccagagcgggagagugaucuccucuugggagagcuauaaguccggcggagaaaccaaacuguga

SEQ ID NO: 222739 - RNA, 1575 nt, Artificial Sequence
  derived and/or modified CDS sequence (opt5) from glycoprotein__RABV__AB563949.1
augaucccccaggcccugauguucgugccucuccuggucuuuagccuuugcuucggcaaguuuccgauuuacaccauccccgacaaacuggggccuuggucccccauugauauccaccaucucucuuguccuaacaaucugguuguggaggacgaaggaugcacaaaccuuagcggcuucuccuauauggagcugaaggugggguacauuucugcuaucaaagucaauggauuuacguguaccggcgugguuacagaagccgagaccuauacaaacuucgugggguacgucaccacaaccuuuaagagaaaacacuuccggcccaugccugaugcgugccgcgcugccuauaauuggaagauggccggagacccgagauacgaagagagccuccauaaccccuauccugauuaccacuggcugcggacggugaagaccacaaaagagucccugguuaucauuucucccagcguggcugaccucgauccuuacgacaagucccugcauagccgcgucuuucccucuggcaaauguuccggcaugaccgugagcucuacauauugcuccaccaaucacgauuacacgaucuggaugccggaaaacccuagacuugggacaagcugugacauuuucaccaauucucggggaaagcgcgccuccaaaggcagcaagacaugcggguuuguggaugagagaggacuguauaagucccucaaaggcgcuuguaagcugaaacuuugcgggguccugggacuccggcugauggacggcaccugggccgcgauccaaaccucugaugaaacaaaguggugucccccugaccagcugguuaaccuccacgacuuccgcagcgaugagauugagcaucuggugguggaggaacuugucaaaaagagagaagagugccuggacgcccucgaauccaucaugacgaccaaaagcgugucuuuucggcgccugucccaccuuagaaagcugguucccggcuucgggaaggcuuacacaauuuucaauaaaacccucauggaggccgaugcucauuauaagagcgugcggacauggaacgagaucauccccucuaaaggaugccugcgcgucggcgggagaugucacccucacgugaauggaguguuuuucaacggcauuauccuggggccggacggacauguucucauucccgaaaugcagagcucccugcuucagcaacacauggagcugcucgaaucuagcgucaucccucugaugcauccccuugccgauccuuccaccguguuuaagggcgacgaugaggcggaagacuucgucgaggugcaucugcccgauguucacaaacaggugagcggcgucgaccucgggcugccgucuuggggaaaguacgugcugauguccgccggcguucucacggcucugaugcuuaugauuuuucugaugacaugcuguaagcgggccaauagagcugagagcgcccaccacaaccucggggaacgcggacggaaagugucugucaccucccagagcggcagagugaucuccucuugggagagcuauaaguccgggggcgaaaccaaacuguga

SEQ ID NO: 222740 - RNA, 1575 nt, Artificial Sequence
  derived and/or modified CDS sequence (opt5) from glycoprotein__RABV__AB563950.1
augaucccccaggcccugauguucgugccucuccuggucuuuagccuuugcuucggcaaguuuccgauuuacaccauccccgacaaacuggggccuuggucccccauugauauccaccaucucucuuguccuaacaaucugguuguggaggacgaaggaugcacaaaccuuagcggcuucuccuauauggagcugaaggugggguacauuucugcuaucaaagucaauggauuuacguguaccggcgugguuacagaagccgagaccuauacaaacuucgugggguacgucaccacaaccuuuaagagaaaacacuuccggcccaugccugaugcgugccgcgcugccuauaauuggaagauggccggagacccgagauacgaagagagccuccauaaccccuauccugauuaccacuggcugcggacggugaagaccacaaaagagucccugguuaucauuucucccagcguggcugaccucgauccuuacgacaagucccugcauagccgcgucuuucccucuggcaaauguuccggcaucaccgugagcucuacauauugcuccaccaaucacgauuacacgauuuggaugccggaaaacccuagacuugggacaagcugugacaucuucaccaauucucggggaaagcgcgccuccaaaggcagcaagacaugcggguuuguggaugagagaggacuguauaagucccucaaaggcgcuuguaagcugaaacuuugcgggguccugggacuccggcugauggacggcaccugggccgcgauucaaaccucugaugaaacaaaguggugucccccugaccagcugguuaaccuccacgacuuccgcagcgaugagaucgagcaucuggugguggaggaacuugucaaaaagagagaagagugccuggacgcccucgaauccauuaugacgaccaaaagcgugucuuuucggcgccugucccaccuuagaaagcugguucccggcuucgggaaggcuuacacaaucuucaauaaaacccucauggaggccgaugcucauuauaagagcgugcggacauggaacgagaucauucccucuaaaggaugccugcgcgucggcgggagaugucacccucacgugaauggaguguuuuucaacggcaucauucuggggccggacggacauguucucauccccgaaaugcagagcucccugcuucagcaacacauggagcugcucgaaucuagcgucauuccucugaugcauccccuugccgauccuuccaccguguuuaagggcgacgaugaggcggaagacuucgucgaggugcaucugcccgauguucacaaacaggugagcggcgucgaccucgggcugccgucuuggggaaaguacgugcugauguccgccggcguucucacggcucugaugcuuaugaucuuucugaugacaugcuguaagcgggccaauagagcugagagcgcccaccacucucucggggaacgcggacggaaaguguccgucaccagccaguccggcagagugaucucuagcugggaguccuauaagucugggggcgaaaccaaacuguga

SEQ ID NO: 222741 - RNA, 1575 nt, Artificial Sequence
  derived and/or modified CDS sequence (opt5) from glycoprotein__RABV__AB563951.1
augaucccccaggcccuucucuucgugccucugcuugucuuuagccugugcuucggcaaguuuccgauuuacaccauccccgacaaacucgggccuuggucccccauugauauccaccaucugucuuguccuaacaaucuuguuguggaggacgaaggaugcacaaaccugagcggcuucuccuauauggagcucaaggugggguacauuucugcuaucaaagucaauggauuuacguguaccggcgugguuacagaagccgagaccuauacaaacuucgugggguacgucaccacaaccuuuaagagaaaacacuuccggcccacgccugaugcgugccgcgcugccuauaauuggaagauggccggagacccgagauacgaagagagccugcauaaccccuauccugauuaccacuggcugcggaccgugaagacaaccaaagagucccucguuaucauuucucccagcguggcugaccuggauccuuacgacaagucccuucauagccgcgucuuucccucuggcaaauguuccggcaucacagugagcucuaccuauugcuccacgaaucacgauuacacaauuuggaugccggaaaacccuagacuggggaccagcugugacaucuucacaaauucucggggaaagcgcgccuccaaaggcagcaagaccugcggguuuguggaugagagaggacucuauaagucccugaaaggcgcuuguaagcugaaacugugcgggguccucggacugcggcugauggacggcaccugggccgcgauucaaacaucugaugaaacgaaguggugucccccugaccagcucguuaaccugcacgacuuccgcagcgaugagaucgagcaucuugugguggaggaacuggucaaaaagagagaagagugccucgacgcccuggaauccauuaugaccacaaaaagcgugucuuuucggcgccuuucccaccugagaaagcucguucccggcuucgggaaggcuuacaccaucuucaauaaaacacugauggaggccgaugcucauuauaagagcgugcggaccuggaacgagaucauucccacgaaaggaugccugcgcgucggcgggagaugucacccucacgugaauggaguguuuuucaacggcaucauucucgggccggacggacauguucugauccccgaaaugcagucuagccuucugcagcaacacauggagcuccuggaauccucugucauuccucuuaugcauccccuggccgauccuagcacaguguuuaaggacgaugacgaggcggaagauuucgucgaggugcaccuccccgacguucauaaacagguguccggcgucgaucugggccugccgagcugggggaaguacgugcucaugucugccggaguucugaccgcucuuaugcugaugaucuuucucaccacaugcugucggagagccgaccgcgcugaguccgcccagcacagccugggcgaacgggggagaaaggugucugucaccucccagagcggacgcgugaucuccucuugggagagcuauaaauccggcggggaaacaaagcuguga

SEQ ID NO: 222742 - RNA, 1575 nt, Artificial Sequence; identical to SEQ ID NO: 222667
  derived and/or modified CDS sequence (opt5) from glycoprotein__RABV__AB563952.2

SEQ ID NO: 222743 - RNA, 1575 nt, Artificial Sequence; identical to SEQ ID NO: 222667
  derived and/or modified CDS sequence (opt5) from glycoprotein__RABV__AB563953.2

SEQ ID NO: 222744 - RNA, 1575 nt, Artificial Sequence; identical to SEQ ID NO: 222644
  derived and/or modified CDS sequence (opt5) from glycoprotein__RABV__AB563954.1

SEQ ID NO: 222745 - RNA, 1575 nt, Artificial Sequence
  derived and/or modified CDS sequence (opt5) from glycoprotein__RABV__AB563955.1
augaucccccaggcccugcuguucgugccucugcuugucuuuagccugugcuucggcaaguuuccgauuuacaccauccccgacaaacucgggccuuggucccccauugauauccaccaucugucuuguccuaacaaucuuguuguggaggacgaaggaugcacaaaccugagcggcuucuccuauauggagcucaaggugggguacauuucugcuaucaaagucaauggauuuacguguaccggcgugguuacagaagccgagaccuauacaaacuucgugggguacgucaccacaaccuuuaagagaaaacacuuccggcccacgccugaugcgugccgcgcugccuauaauuggaagauggccggagacccgagauacgaagagagccugcauaaccccuauccugauuaccacuggcugcggaccgugaagacaaccaaagagucccucguuaucauuucucccagcguggcugaccuggauccuuacgacaagagcccccauucccgcgucccgccuucuggcaaauguuccggcaucacagugagcucuaccuauugcuccacgaaucacgauuacacaauuuggaugcccgaaaacccuagacuugggaccagcugugacaucuuuacaaauucucggggaaagcgcgccuccaaaggcagcaagaccugcggguucguggaugagagaggacuguauaagucccucaaaggcgcuuguaagcugaaacuuugcgggguccugggacuccggcugauggacggcaccugggccgcgauucaaacaucugaugaaacgaagugguguccucccgaccagcugguuaaccuccacgacuuucgcagcgaugagaucgagcaucuggugguggaggaacuugucaaaaagagagaagagugccuggacgcccucgaauccauuaugaccacaaaaagcgugucuuuccggcgccugucccaccuuagaaagcugguucccggcuuugggaaggcuuacaccaucuucaauaaaacacucauggaggccgaugcucauuauaagagcgugcggaccuggaacgagaucauuccgucuaaaggaugccugcgcgucggcgggagaugucacccccacgugaauggaguuuucuuuaacggcaucauucuggggccugacggacaugugcucauccccgaaaugcagagcucccugcuucagcaacacauggagcugcucgaaucuagcgucauuccucugaugcauccccuugccgauccguccacgguguucaaggacgaugacgaggcggaagauuuugucgaggugcaccucccugacguucauaaacaggugagcggcgucgaucucggccugcccucuugggggaaguacgugcugauguccgccggaguucucacagcucugaugcuuaugaucuuccugacaaccugcugucggagagccaaucgcgcugagagcgcccagcacucucucggcgaacgggggagaaagguguccgucaccagccaguccggacgcgugaucucuagcugggaguccuauaaaucuggcggggaaaccaagcuguga

SEQ ID NO: 222746 - RNA, 1575 nt, Artificial Sequence
  derived and/or modified CDS sequence (opt5) from glycoprotein__RABV__AB563956.1
augaucccccaggcccugcuguucgugccucugcuugucuuuagccugugcuucggcaaguuuccgauuuacaccauccccgacaaacucgggccuuggucccccauugauauccaccaucugucuuguccuaacaaucuuguuguggaggacgaaggaugcacaaaccugagcggcuucuccuauauggagcucaaggugggguacauuucugcuaucaaagucaauggauuuacguguaccggcgugguuacagaagccgagaccuauacaaacuucgugggguacgucaccacaaccuuuaagagaaaacacuuccggcccacgccugaugcgugccgcgcugccuaugacuggaagauggccggagauccgagauacgaagagagccugcauaaucccuauccugacuaccacuggcugcggaccgugaagacaaccaaagagucccccguuaucauuucuccuagcguggcugaucucgaccccuacgauaagucccugcauagccgcgucccgccuucuggcaaauguuccggcaucacagugagcucuaccuauugcuccacgaaccacgacuacacaauuuggaugcccgaaaauccuagacuugggaccagcugugauaucuuuacaaacucucggggaaagcgcgccuccaaaggcagcaagaccugcggguucguggacgagagaggacuguauaagucccucaaaggcgcuuguaagcugaaacuuugcgggguccugggacuccggcugauggauggcaccugggccgcgauucaaacaucugacgaaacgaagugguguccucccgaccagcugguuaaucuccacgauuuucgcagcgacgagaucgagcaucuggugguggaggaacuugucaaaaagagagaagagugccuggaugcccucgaauccauuaugaccacaaaaagcgugucuuuccggcgccugucccaccuuagaaagcugguucccggcuuugggaaggcuuacaccaucuucaacaaaacacucauggaggccgacgcucauuauaagagcgugcggaccuggaaugagaucauuccgucuaaaggaugccugcgcgucggcgggagaugucacccccacgugaacggaguuuucuuuaauggcaucauucuggggccugauggacaugugcucauccccgaaaugcagagcucccugcuucagcaacacauggagcugcucgaaucuagcgucauuccucugaugcauccccuugccgacccguccacgguguucaaggaugacgaugaggcggaagacuuugucgaggugcaccucccugauguucauaaacaggugagcggcgucgaccucggccugcccucuugggggaaguacgugcugauguccgccggaauccucacagcucugaugcuuaugaucuuccugacaaccugcugucggagagccgaccgcgcugagagcgcccagcacucucucggcgaacgggggagaaagguuuccgugaccagccaguccggacgcgucauuucuagcugggaguccuauaaaucuggcggggaaaccaagcuguga

SEQ ID NO: 222747 - RNA, 1575 nt, Artificial Sequence
  derived and/or modified CDS sequence (opt5) from glycoprotein__RABV__AB563957.1
augaucccccaggcccugcuguucgugccucugauggucuuuagccuuugcuucggcaaguuuccgauuuacaccauccccgacaaacuggggccuuggucccccauugauauccaccaucucucuuguccuaacaaucugguuguggaggacgaaggaugcacaaaccuuagcggcuucuccuauauggagcugaaggugggguacauuucugcuaucaaagucaauggauuuacguguaccggcgugguuacagaagccgagaccuauacaaacuucgugggguacgucaccacaaccuuuaagagaaaacacuuccggcccacgccugaugcgugccgcgcugccuauaauuggaagauggccggagacccgagauacgaagagagccuccauaaccccuauccugauuaccacuggcugcggaccgugaagacaaccaaagagucccugguuaucauuucucccagcguggcugaccucgauccuuacgacaagucccugcauagccgcgccuuucccucuggcaaauguuccggcaucacagucagcucuaccuauugcuccacgaaucacgauuacacaauuuggaugccggaaaacccuagacuugggaccagcugugacaucuucacaaauucucggggaaagcgcgcuuccaaaggcagcaagaccugcggguuuguggaugagagaggacuguauaagucccucaaaggcgccuguaagcugaaacuuugcggggugcugggacuccggcugauggacggcaccugggcggccauucaaacaucugaugaaacgaaguggugucccccugaccagcuggucaaccuccacgacuuccgcagcgaugagaucgagcaucugguuguggaggaacuugugaaaaagagagaagagugccuggacgcucucgaauccauuaugaccacaaaaagcgucucuuuucggcgccugucccaccuuagaaagcuggugcccggcuucgggaaggccuacaccaucuucaauaaaacacucauggaggcugaugcccauuauaagagcguucggaccuggaacgagaucauucccucuaaaggaugccugcgcgugggcgggagaugucacccucacgucaauggaguguuuuucaacggcaucauucuggggccggacggacauguucucauccccgaaaugcagagcucccugcuucagcaacacauggagcugcucgaaucuagcgugauuccucugaugcauccccuugcggauccuuccacggucuuuaaggacgaugacgaggccgaagauuucguggagguccaccuccccgacgugcauaaacagguuagcggcguggaucucggccugccgucuugggggaaguacguccugauguccgcuggagugcucacagcccugaugcuuaugaucuuucugaugaccugcugucggagaaccaaucgcgcugagagcgcccagcacucucucggcgaacgggggagaaagguuuccgugacaagccaguccggacgcgucaucucuagcugggaguccuauaaaucuggcggggaaaccaagcuguga

SEQ ID NO: 222748 - RNA, 1575 nt, Artificial Sequence; identical to SEQ ID NO: 222711
  derived and/or modified CDS sequence (opt5) from glycoprotein__RABV__AB563958.1

SEQ ID NO: 222749 - RNA, 1575 nt, Artificial Sequence
  derived and/or modified CDS sequence (opt5) from glycoprotein__RABV__AB563959.1
augaucccccaggcccugauguucgugccucuccuggucuuuagccuuugcuucggcaaguuuccgauuuacaccauccccgacaaacuggggccuuggucccccauugauauccaccaucucucuuguccuaacaaucugguuguggaggacgaaggaugcacaaaccuuagcggcuucuccuauauggagcugaaggugggguacauuucugcuaucaaagucaauggauuuacguguaccggcgugguuacagaagccgagaccuauacaaacuucgugggguacgucaccacaaccuuuaagagaaaacacuuccggcccaugccugaugcgugccgcgcugccuauaauuggaagauggccggagacccgagauacgaagagagccuccauaaccccuauccugauuaccacuggcugcggacggugaagaccacaaaagagucccugguuaucauuucucccagcguggcugaccucgauccuuacgacaagucccugcauagccgcgucuuucccucuggcaaauguuccggcaccacagugagcucuaccuauugcuccacgaaucacgauuacacaaucuggaugccggaaaacccuagacuugggaccagcugugacauuuucacaaauucucggggaaagcgcgccuccaaaggcagcaagaccugcggguuuguggaugagagaggacuguauaagucccucaaaggcgcuuguaagcugaaacuuugcgggguccugggacuccggcugauggacggcaccugggccgcgauccaaacaucugaugaaacgaaguggugucccccugaccagcugguuaaccuccacgacuuccgcagcgaugagauugagcaucuggugguggaggaacuugucaaaaagagagaagagugccuggacgcccucgaauccaucaugaccacaaaaagcgugucuuuucggcgccugucccaccuuagaaagcugguucccggcuucgggaaggcuuacaccauuuucaauaaaacacucauggaggccgaugcucauuauaagagcgugcggaccuggaacgagaucauccccucuaaaggaugccugcgcgucggcgggagaugucacccucacgugaauggaguguuuuucaacggcauuauccuggggccggacggacauguucucauucccgaaaugcagagcucccugcuucagcaacacauggagcugcucgaaucuagcgucaucccucugaugcauccccuugccgauccuuccacgguguuuaagggcgacgaugaggcggaagacuucgucgaggugcaucugcccgauguucacaaacaggugagcggcgucgaccucgggcugccgucuuggggaaaguacgugcugauguccgccggcguucucacagcucugaugcuuaugauuuuucugaugaccugcuguaagcgggccaauagagcugagagcgcccaccacucucucggggaacgcggacggaaaguguccgucaccagccaguccggcagagugaucucuagcugggaguccuauaagucugggggcgaaacaaaacuguga

SEQ ID NO: 222750 - RNA, 1575 nt, Artificial Sequence
  derived and/or modified CDS sequence (opt5) from glycoprotein__RABV__AB563960.1
augaucccccaggcccugcuguucgugccuuuucuggucuucagccuuugcuuuggcaaguucccgauuuacaccauccccgacaaacuggggccuuggucccccauugauauccaccaucucucuuguccuaacaaucugguuguggaggacgaaggaugcacaaaccuuagcggcuuuuccuauauggagcugaaggugggguacauuucugcuaucaaagucaauggauucacguguaccggcgugguuacagaagccgagaccuauacaaacuuugugggguacgucaccacaaccuucaagagaaaacacuuucggcccaugccugaugcgugccgcgcugccuauaauuggaagauggccggagacccgagauacgaagagagccuccauaaccccuauccugauuaccacuggcugcggacggugaagaccacaaaagagucccugguuaucauuucucccagcguggcugaccucgauccuuacgacaagucccugcauagccgcgucuuccccucuggcaaauguuccggcaucaccgugagcucuacauauugcuccaccaaucacgauuacacgauuuggaugccggaaaacccuagacuugggacaagcugugacaucuuuaccaauucucggggaaagcgcgccuccaaaggcagcaagacaugcggguucguggaugagagaggacuguauaagucccucaaaggcgcuuguaagcugaaacuuugcgggguccugggacuccggcugauggacggcaccugggccgcgauucaaaccucugaugaaacaaaguggugucccccugaccagcugguuaaccuccacgacuuucgcagcgaugagaucgagcaucuggugguggaggaacuugucaaaaagagagaagagugccuggacgcccucgaauccauuaugacgaccaaaagcgugucuuuccggcgccugucccaccuuagaaagcugguucccggcuucgggaaggcuuacacaaucuuuaauaaaacccucauggaggccgaugcucauuauaagagcgugcggacauggaacgagaucauucccucuaaaggaugccugcgcgucggcgggagaugucacccucacgugaauggaguuuucuuuaacggcaucauucuggggccggacggacaugugcucauccccgaaaugcagagcucccugcuucagcaacacauggagcugcucgaaucuagcgucauuccucugaugcauccccuugccgauccuuccaccguguucaaggacgaugacgaggcggaagauuuugucgaggugcaccuccccgacguucauaaacaggugagcggcgucgaucucggccugccgucuugggggaaguacgugcugauguccgccggaguucucacggugcugaugcuuaugaucuucuuuaugacaugcugucggagagcuaaucgcgucgagagcgcccagcacucucugggcgaacgggggagaaagguguccgugaccagccaguccggacgcguuaucucuagcugggaguccuauaaaucuggcggggaaaccaagcucuga

SEQ ID NO: 222751 - RNA, 1575 nt, Artificial Sequence; identical to SEQ ID NO: 222706
  derived and/or modified CDS sequence (opt5) from glycoprotein__RABV__AB563961.1

SEQ ID NO: 222752 - RNA, 1575 nt, Artificial Sequence; identical to SEQ ID NO: 222706
  derived and/or modified CDS sequence (opt5) from glycoprotein__RABV__AB563962.1

SEQ ID NO: 222753 - RNA, 1575 nt, Artificial Sequence
  derived and/or modified CDS sequence (opt5) from glycoprotein__RABV__AB563963.1
augaucccccaggcccuucucuucgugccucugcuugucuuuagccugugcuucggcaaguuuccgauuuacaccauccccgacaaacucgggccuuggucccccauugauauccaccaucugucuuguccuaacaaucuuguuguggaggacgaaggaugcacaaaccugagcggcuucuccuauauggagcucaaggugggguacauuucugcuaucaaagucaauggauuuacguguaccggcgugguuacagaagccgagaccuauacaaacuucgugggguacgucaccacaaccuuuaagagaaaacacuuccggcccacgccugaugcgugccgcgcugccuauaauuggaagauggccggagacccgagauacgaagagagccugcauaaccccuauccugauuaccacuggcugcggaccgugaagacaaccaaagagucccucguuaucauuucucccagcguggcugaccuggauccuuacgacaagucccuucauagccgcgucuuucccucuggcaaauguuccggcaucacagugagcucuaccuauugcuccacgaaucacgauuacacaauuuggaugccggaaaacccuagacuggggaccagcugugacaucuucacaaauucucggggaaagcgcgccuccaaaggcagcaagaccugcggguuuguggaugagagaggacucuauaagucccugaaaggcgcuuguaagcugaaacugugcgggguccucggacugcggcugauggacggcaccugggccgcgauucaaacaucugaugaaacgaaguggugucccccugaccagcucguuaaccugcacgacuuccgcagcgaugagaucgagcaucuugugguggaggaacuggucaaaaagagagaagagugccucgacgcccuggaauccauuaugaccacaaaaagcgugucuuuucggcgccuuucccaccugagaaagcucguucccggcuucgggaaggcuuacaccaucuucaauaaaacacugauggaggccgaugcucauuauaagagcgugcggaccuggaacgagaucauucccucuaaaggaugccugcgcgucggcgggagaugucacccucacgugaauggaguguuuuucaacggcaucauucucgggccggacggacauguucugauccccgaaaugcagagcucccuucugcagcaacacauggagcuccuggaaucuagcgucauuccucuuaugcauccccuggccgauccuuccacgaucuuuaaggacgaugacgaggcggaagauuucguggagguccaccuccccgacgugcauaaacagguuagcggcguggaucugggccugccgucuugggggaaguacguccucauguccgccggagugcugacaguucuuaugcugaugaucuuuuucaugaccugcugucggagagcuaaucgcguggagagcgcccagcacucucucggcgaacgggggagaaaggucuccgugaccagccaguccggacgcgugauuucuagcugggaguccuauaaaucuggcggggaaacaaagcuguga

SEQ ID NO: 222754 - RNA, 1575 nt, Artificial Sequence; identical to SEQ ID NO: 222706
  derived and/or modified CDS sequence (opt5) from glycoprotein__RABV__AB563964.1

SEQ ID NO: 222755 - RNA, 1575 nt, Artificial Sequence; identical to SEQ ID NO: 222706
  derived and/or modified CDS sequence (opt5) from glycoprotein__RABV__AB563966.1

SEQ ID NO: 222756 - RNA, 1575 nt, Artificial Sequence; identical to SEQ ID NO: 222643
  derived and/or modified CDS sequence (opt5) from glycoprotein__RABV__AB563969.1

SEQ ID NO: 222757 - RNA, 1575 nt, Artificial Sequence
  derived and/or modified CDS sequence (opt5) from glycoprotein__RABV__AB563970.2
augaacccccaggcccugauguucgugccucuccuggucuuuagccuuugcuucggcaaguuuccgaucuacaccauucccgacaaacuggggccuuggucccccaucgauauucaccaucucucuuguccuaauaaccugguuguggaggacgaaggaugcacaaaucuuagcggcuucuccuauauggagcugaaggugggguacaucucugcuauuaaagucaacggauuuacguguaccggcgugguuacagaagccgagaccuauacaaauuucgugggguacgucaccacaaccuuuaagagaaaacacuuccggcccacgccugaugcgugccgcgcugccuauaacuggaagauggccggagacccgagauacgaagagagccuccauaaucccuauccugauuaccacuggcugcggaccgugaagacaaccaaagagucccugguuaucaucucucccagcguggcugaccucgauccuuacgacaagucccugcauagccgcgucuuucccucuggcaaauguuccggcauuacagugagcucuaccuauugcuccacgaaccacgauuacacaaucuggaugccggaaaauccuagacuugggaccagcugugacauuuucacaaacucucggggaaagcgcgccuccaaaggcagcaugaccugcggguuuguggaugagagaggacuguauaagucccucaagggcgcuuguaaacugaaacuuugcgggguccugggacuccggcugauggacggcaccugggccgcgauccaaacaucugaugaaacgaaguggugucccccugaccagcugguuaaucuccacgacuuccauagcgaugagauugagcaccuggugguggaggaacuugucaagaaacgcgaagagugccuggacgcccucgaauccaucaugaccacaaagagcgugucuuuuagacggcugucccaucuucgcaaacugguucccggcuucgggaaggcuuacaccauuuucaacaagacacucauggaggccgaugcucacuauaaaagcgugagaaccuggaaugagaucauccccucuaagggaugccugcgggucggcgggcgcugucacccucaugugaacggaguguuuuucaauggcauuauccuggggccggacggacacgugcucauucccgaaaugcagagcucccugcuucagcaacauauggagcugcucgaaucuagcgucaucccucugaugcacccccuugccgauccuuccacgguguuuaaagacgaugacgaggcggaagauuucgucgaggugcaucugcccgacguucacaagcagguuagcggcgucgaucucggccugccgucuugggggaaauacgugcugauguccgccggaguucucacagcucugaugcuuaugauuuuucugaugaccugcuguagacgggccaacagagcugagagcgcccagcacucucucggcgaacgcgggcggaagguguccgucaccagccaguccggaagagugaucucuagcugggaguccuauaagucuggcggggaaacaaaacuguga

SEQ ID NO: 222758 - RNA, 1575 nt, Artificial Sequence
  derived and/or modified CDS sequence (opt5) from glycoprotein__RABV__AB563971.1
augaacccccaggcccugauguucgugccucuccuggucuuuagccuuugcuucggcaaguuuccgaucuacaccauucccgacaaacuggggccuuggucccccaucgauauucaccaucucucuuguccuaauaaccugguuguggaggacgaaggaugcacaaaucuuagcggcuucuccuauauggagcugaaggugggguacaucucugcuauuaaagucaacggauuuacguguaccggcgugguuacagaagccgagaccuauacaaauuucgugggguacgucaccacaaccuuuaagagaaaacacuuccggcccacgccugaugcgugccgcgcugccuauaacuggaagauggccggagacccgagauacgaagagagccuccauaaucccuauccugauuaccacuggcugcggaccgugaagacaaccaaagagucccugguuaucaucucucccagcguggcugaccucgauccuuacgacaagucccugcauagccgcgucuuucccucuggcaaauguuccggcauuacaguguucagcaccuauugcucuacgaaccacgauuacacaaucuggaugccggaaaauccuagacuugggaccuccugugacauuuuuacaaacagccggggaaagcgcgccucuaaaggcuccaagaccugcggguucguggaugagagaggacuguauaagagccucaaaggcgcuuguaagcugaaacuuugcgggguccugggacuccggcugauggacggcaccugggccgcgauccaaacauccgaugaaacgaaguggugucccccugaccagcugguuaaucuccacgacuuucgcucugaugagauugagcaucuggugguggaggaacuugucaaaaagagagaagagugccuggacgcccucgaaagcaucaugaccacaaaauccgugagcuuccggcgccugucucaccuuagaaagcugguucccggcuucgggaaggcuuacaccauuuuuaacaaaacacucauggaggccgaugcucauuauaaguccgugcggaccuggaaugagaucauccccagcaaaggaugccugcgcgucggcgggagaugucacccucacgugaacggaguuuucuuuaauggcauuauccuggggccggacggacaugugcucauucccgaaaugcagucuagccugcuucagcaacacauggagcugcucgaauccucugucaucccucugaugcauccccuugccgauccuagcacgguguucaaggacgaugacgaggcggaagauuuugucgaggugcaucugcccgacguucacaaacagguguccggcgucgaucucggccugccgagcugggggaaguacgugcugaugucugccggaguucucacagcucugaugcuuaugauuuuccugaugaccugcugucggagagccaaccgcgcugaguccgcccagcacagccucggcgaacgggggagaaaggugucugucaccucccagagcggacgcgugaucuccucuugggagagcuauaaauccggcggggaaacaaagcuguga

SEQ ID NO: 222759 - RNA, 1575 nt, Artificial Sequence
  derived and/or modified CDS sequence (opt5) from glycoprotein__RABV__AB563973.2
augaucccccaggcccuucucuucgugccucugcuugucagcucccugugcuuuggcaaguucccgauuuacaccauccccgacaaacucgggccuuggucucccauugauauccaccaucugagcuguccuaacaaucuuguuguggaggacgaaggaugcacaaaccuguccggcuuuucuuauauggagcucaaggugggguacauuagcgcuaucaaagucaauggauucacguguaccggcgugguuacagaagccgagaccuauacaaacuuugugggguacgucaccacaaccuucaagagaaaacacuuucggcccacgccugaugcgugccgcgcugccuauaauuggaagauggccggagacccgagauacgaagagucccugcauaaccccuauccugauuaccacuggcugcggaccgugaagacaaccaaagagucucucguuaucauuagccccuccguggcugaccuggauccuuacgacaagagccuucauucucgcgucuuccccuccggcaaauguagcggcaucacagugucuuccaccuauugcagcacgaaucacgauuacacaauuuggaugccggaaaacccuagacuggggaccucuugugacaucuuuacaaauucccggggaaagcgcgccagcaaaggcuccaagaccugcggguucguggaugagagaggacucuauaagucucugaaaggcgcuuguaagcugaaacugugcgggguccucggacugcggcugauggacggcaccugggccgcgauucaaacaagcgaugaaacgaaguggugucccccugaccagcucguuaaccugcacgacuuucgcuccgaugagaucgagcaucuugugguggaggaacuggucaaaaagagagaagagugccucgacgcccuggaaagcauuaugaccacaaaaucuguguccuuccggcgccuuagccaccugagaaagcucguucccggcuuugggaaggcuuacaccaucuucaauaaaacacugauggaggccgaugcucauuauaagucugugcggaccuggaacgagaucauucccagcaaaggaugccugcgcgucggcgggagaugucacccucacgugaauggaguuuucuuuaacggcaucauucucgggccggacggacaugugcugauccccgaaaugcaguccucucuucugcagcaacacauggagcuccuggaaagcuccgucauuccucuuaugcauccccuggccgauccuagcacgguguucaaggacgaugacgaggcggaagauuuugucgaggugcaccuccccgacguucauaaacaggugucuggcgucgaucugggccugccguccugggggaaguacgugcucacaagcgccucuguucugaccgcucuuaugcugaugaucuuccucaugaccugcugucggagagccaaucgcgcugaguccgcccagcacagccugggagaacggggcagaaagguguccgucacaucucagagcgggcgcgugaucuccucuugggagagcuauaaauccggaggcgaaaccaagcuguga

SEQ ID NO: 222760 - RNA, 1575 nt, Artificial Sequence
  derived and/or modified CDS sequence (opt5) from glycoprotein__RABV__AB563974.1
augaucccccaggcccuucucuucgugccucugcuugucagcucccugugcuuuggcaaguucccgauuuacaccauccccgacaaacucgggccuuggucucccauugauauccaccaucugagcuguccuaacaaucuuguuguggaggacgaaggaugcacaaaccuguccggcuuuucuuauauggagcucaaggugggguacauuagcgcuaucaaagucaauggauucacguguaccggcgugguuacagaagccgagaccuauacaaacuuugugggguacgucaccacaaccuucaagagaaaacacuuucggcccacgccugaugcgugccgcgcugccuauaauuggaagauggccggagacccgagauacgaagagucccugcauaaccccuauccugauuaccacuggcugcggaccgugaagacaaccaaagagucucucguuaucauuagccccuccguggcugaccuggauccuuacgacaagagccuucauucucgcgucuuccccuccggcaaauguagcggcaucacagugucuuccaccuauugcagcacgaaucacgauuacacaauuuggaugccggaaaacccuagacuggggaccucuugugacaucuuuacaaauucccggggaaagcgcgccagcaaaggcuccaagaccugcggguucguggaugagagaggacucuauaagucucugaaaggcgcuuguaagcugaaacugugcgggguccucggacugcggcugauggacggcaccugggccgcgauucaaacaagcgaugaaacgaaguggugucccccugaccagcucguuaaccugcacgacuuucgcuccgaugagaucgagcaucuugugguggaggaacuggucaaaaagagagaagagugccucgacgcccuggaaagcauuaugaccacaaaaucuguguccuuccggcgccuuagccaccugagaaagcucguucccggcuuugggaaggcuuacaccaucuucaauaaaacacugauggaggccgaugcucauuauaagucugugcggaccuggaacgagaucauucccagcaaaggaugccugcgcgucggcgggagaugucacccucacgugaauggaguuuucuuuaacggcaucauucucgggccggacggacaugugcugauccccgaaaugcaguccucucuucugcagcaacacauggagcuccuggaaagcuccgucauuccucuuaugcauccccuggccgauccuagcacgguguucaaggacgaugacgaggcggaagauuuugucgaggugcaccuccccgacguucauaaacaggugucuggcgucgaucugggccugccguccugggggaaguacgugcucacaagcgccggaguucugaccgcucuuaugcugaugaucuuccucaugaccugcugucggagagccaaucgcgcugagucugcccagcacucccugggcgaacgggggagaaaggugagcgucacaucccagucuggacgcgugaucagcuccugggagucuuauaaaagcggcggggaaaccaagcuguga

SEQ ID NO: 222761 - RNA, 1575 nt, Artificial Sequence; identical to SEQ ID NO: 222760
  derived and/or modified CDS sequence (opt5) from glycoprotein__RABV__AB563975.2

SEQ ID NO: 222762 - RNA, 1575 nt, Artificial Sequence
  derived and/or modified CDS sequence (opt5) from glycoprotein__RABV__AB563976.1
augaucccccaggcccuucucuucgugccucugcuugucuuuagccugugcuucggcaaguuuccgauuuacaccauccccgacaaacucgggccuuggucccccauugauauccaccaucugucuuguccuaacaaucuuguuguggaggacgaaggaugcacaaaccugagcggcuucuccuauauggagcucaaggugggguacauuucugcuaucaaagucaauggauuuacguguaccggcgugguuacagaagccgagaccuauacaaacuucgugggguacgucaccacaaccuuuaagagaaaacacuuccggcccacgccugaugcgugccgcgcugccuauaauuggaagauggccggagacccgagauacgaagagagccugcauaaccccuauccugauuaccacuggcugcggaccgugaagacaaccaaagagucccucguuaucauuucucccagcguggcugaccuggauccuuacgacaagucccuucauagccgcgucuuucccucuggcaaauguuccggcaucacagugagcucuaccuauugcuccacgaaucacgauuacacaauuuggaugccggaaaacccuagacuggggaccagcugugacaucuucacaaauucucggggaaagcgcgccuccaaaggcagcaagaccugcggguuuguggaugagagaggacucuauaagucccugaaaggcgcuuguaagcugaaacugugcgggguccucggacugcggcugauggacggcaccugggccgcgauucaaacaucugaugaaacgaaguggugucccccugaccagcucguuaaccugcacgacuuccgcagcgaugagaucgagcaucuugugguggaggaacuggucaaaaagagagaagagugccucgacgcccuggaauccauuaugaccacaaaaagcgugucuuuucggcgccuuucccaccugagaaagcucguucccggcuucgggaaggcuuacaccaucuucaauaaaacacugauggaggccgaugcucauuauaagagcgugcggaccuggaacgagaucauucccucuaaaggaugccugcgcgucggcgggagaugucacccucacgugaauggaguguuuuucaacggcaucauucucgggccggacggacauguucugauccccgaaaugcagagcucccuucugcagcaacacauggagcuccuggaaucuagcgucauuccucuuaugcauccccuggccgauccuuccacgguguuuaaggacgaugacgaggcggaagauuucgucgaggugcaccuccccgacguucauaaacaggugagcggcgucgaucugggccugccgucuugggggaaguacgugcucauguccgccggaguucugacagcucuuaugcugaugaucuuucucaugaccugcugucggggcaccaauagagccgagagcgcucagcacucucugggggaacgcggacggaagguguccgucacaagccaguccggcagagugaucucuagcugggaguccuauaaaucugggggcgaaaccaagcuguga

SEQ ID NO: 222763 - RNA, 1575 nt, Artificial Sequence
  derived and/or modified CDS sequence (opt5) from glycoprotein__RABV__AB563977.1
augaucccccaggcccuucucuucgugccucugcuugucuuuagccugugcuucggcaaguuuccgauuuacaccauccccgacaaacucgggccuuggucccccauugauauccaccaucugucuuguccuaacaaucuuguuguggaggacgaaggaugcacaaaccugagcggcuucuccuauauggagcucaaggugggguacauuucugcuaucaaagucaauggauuuacguguaccggcgugguuacagaagccgagaccuauacaaacuucgugggguacgucaccacaaccuuuaagagaaaacacuuccggcccacgccugaugcgugccgcgcugccuauaauuggaagauggccggagacccgagauacgaagagagccugcauaaccccuauccugauuaccacuggcugcggaccgugaagacaaccaaagagucccucguuaucauuucucccagcguggcugaccuggauccuuacgacaagucccuucauagccgcgucuuucccucuggcaaauguuccggcaucacagugagcucuaccuauugcuccacgaaucacgauuacacaauuuggaugccggaaaacccuagacuggggaccagcugugacaucuucacaaauucucggggaaagcgcgccuccaaaggcagcaagaccugcggguuuguggaugagagaggacucuauaagucccugaaaggcgcuuguaagcugaaacugugcgggguccucggacugcggcugauggacggcaccugggccgcgauucaaacaucugaugaaacgaaguggugucccccugaccagcucguuaaccugcacgacuuccgcagcgaugagaucgagcaucuugugguggaggaacuggucaaaaagagagaagagugccucgacgcccuggaauccauuaugaccacaaaaagcgugucuuuucggcgccuuucccaccugagaaagcucguucccggcuucgggaaggcuuacaccaucuucaauaaaacacugauggaggccgaugcucauuauaagagcgugcggaccuggaacgagaucauucccucuaaaggaugccugcgcgucggcgggagaugucacccucacgugaauggaguguuuuucaacggcaucauucucgggccggacggacauguucugauccccgaaaugcagagcucccuucugcagcaacacauggagcuccuggaaucuagcgucauuccucuuaugcauccccuggccgauccuuccacgguguuuaaggacgaugacgaggcggaagauuucgucgaggugcaccuccccgacguucauaaacaggugagcggcgucgaucugggccugccgucuugggggcgguacgugcucauguccgccggaguucugacagcucuuaugcugaugaucuuucucacaaccugcuguagacgcgccaaucgggcugagagcgcccagcacucucugggcgaaagagggcgcaagguguccgucaccagccaguccggacgggugaucucuagcugggaguccuauaagucuggcggggaaaccaaacuguga

SEQ ID NO: 222764 - RNA, 1575 nt, Artificial Sequence; identical to SEQ ID NO: 222723
  derived and/or modified CDS sequence (opt5) from glycoprotein__RABV__AB563979.1

SEQ ID NO: 222765 - RNA, 1575 nt, Artificial Sequence
  derived and/or modified CDS sequence (opt5) from glycoprotein__RABV__AB563981.1
augaucccccaggcccugcucuuugugccucugauggucuuuagccuuugcuucggcaaguuuccgauuuacaccauccccgacaaacuggggccuuggucccccauugauauccaccaucucucuuguccuaacaaucugguuguggaggacgaaggaugcacaaaccuuagcggcuucuccuauauggagcugaaggugggguacauuucugcuaucaaagucaauggauuuacguguaccggcgugguuacagaagccgagaccuauacaaacuucgugggguacgucaccacaaccuuuaagagaaaacacuuccggcccacgccugaugcgugccgcgcugccuauaauuggaagauggccggagacccgagauacgaagagagccuccauaaccccuauccugauuaccacuggcugcggaccgugaagacaaccaaagagucccugguuaucauuucucccagcguggcugaccucgauccuuacgacaagucccugcauagccgcgucuuucccucuggcaaauguuccggcaucacagugagcucuaccuauugcuccacgaaucacgauuacacaauuuggaugccggaaaacccuagacuugggaccagcugugacaucuucacaaauucucggggaaagcgcgccuccaaaggcagcaagaccugcggguuuguggaugagagaggacuguauaagucccucaaaggcgcuuguaagcugaaacuuugcgggguccugggacuccggcugauggacggcaccugggccgcgauucaaacaucugaugaaacgaaguggugucccccugaccagcugguuaaccuccacgacuuccgcagcgaugagaucgagcaucuggugguggaggaacuugucaaaaagagagaagagugccuggacgcccucgaauccauuaugaccacaaaaagcgugucuuuucggcgccugucccaccuuagaaagcugguucccggcuucgggaaggcuuacaccaucuucaauaaaacacucauggaggccgaugcucauuauaagagcgugcggaccuggaacgagaucauucccucuaaaggaugccugcgcgucggcgggagaugucacccucacgugaauggaguuuucuucaacggcaucauucuggggccggacggacaugugcucauccccgaaaugcagagcucccugcuucagcaacacauggagcugcucgaaucuagcgucauuccucugaugcauccccuugccgauccuuccacgguguuuaaggacgaugacgaggcggaagauuucgucgaggugcaucugcccgacguucacaaacaggugagcggcgucgaucucggccugccgucuugggggaaguacgugcugauguccgccggaguucucacagcucugaugcuuaugaucuuucugaugaccugcugucggagaaccaaucgcgccgagagcgcucagcacucucucggcgaacgggggagaaagguguccgucacaagccaguccggacgcaucauuucuagcugggaguccuauaaaucuggcggggaaaccaagcuguga

SEQ ID NO: 222766 - RNA, 1575 nt, Artificial Sequence
  derived and/or modified CDS sequence (opt5) from glycoprotein__RABV__AB563983.1
augaucccccaggcccuucucuucgugccucugcuugucuuuagccugugcuucggcaaguuuccgauuuacaccauccccgacaaacucgggccuuggucccccauugauauccaccaucugucuuguccuaacaaucuuguuguggaggacgaaggaugcacaaaccugagcggcuucuccuauauggagcucaaggugggguacauuucugcuaucaaagucaauggauuuacguguaccggcgugguuacagaagccgagaccuauacaaacuucgugggguacgucaccacaaccuuuaagagaaaacacuuccggcccacgccugaugcgugccgcgcugccuauaauuggaagauggccggagacccgagauacgaagagagccugcauaaccccuauccugauuaccacuggcugcggaccgugaagacaaccaaagagucccucguuaucauuucucccagcguggcugaccuggauccuuacgacaagucccuucauagccgcgucuuucccucuggcaaauguuccggcaucacagugagcucuaccuauugcuccacgaaucacgauuacacaauuuggaugccggaaaacccuagacuggggaccagcugugacaucuucacaaauucucggggaaagcgcgccuccaaaggcagcaagaccugcggguuuguggaugagagaggacucuauaagucccugaaaggcgcuuguaagcugaaacugugcgggguccucggacugcggcugauggacggcaccugggccgcgauucaaacaucugaugaaacgaaguggugucccccugaccagcucguuaaccugcacgacuuccgcagcgaugagauggagcaucuugugguggaggaacuggucaaaaagagagaagagugccucgacgcccuggaauccaucaugaccacaaaaagcgugucuuuucggcgccuuucccaccugagaaagcucguucccggcuucgggaaggcuuacaccauuuucaauaaaacacugauggaggccgaugcucauuauaagagcgugcggaccuggaacgagaucauccccacgaaaggaugccugcgcgucggcgggagaugucacccucacgugaauggaguguuuuucaacggcauuauccucgggccggacggacauguucugauucccgaaaugcagucuagccuucugcagcaacacauggagcuccuggaauccucugucaucccucuuaugcauccccuggccgauccuagcacaguguuuaaggacgaugacgaggcggaagauuucgucgaggugcaccuccccgacguucauaaacagguguccggcgucgaucugggccugccgagcugggggaaguacgugcucaugucugccggaguucugaccgcucuuaugcugaugauuuuucucaccacaugcugucggagagccgaccgcgcugaguccgcccagcacagccugggcgaacgggggagaaaggugucugucaccucccagagcggacgcgugaucuccucuugggagagcuauaaauccggcggggaaacaaagcuguga

SEQ ID NO: 222767 - RNA, 1575 nt, Artificial Sequence; identical to SEQ ID NO: 222674
  derived and/or modified CDS sequence (opt5) from glycoprotein__RABV__AB563985.1

SEQ ID NO: 222768 - RNA, 1575 nt, Artificial Sequence
  derived and/or modified CDS sequence (opt5) from glycoprotein__RABV__AB563986.1
augaucccccaggcccuucucuucgugccucugcuugucuuuagccugugcuucggcaaguuuccgauuuacaccauccccgacaaacucgggccuuggucccccauugauauccaccaucugucuuguccuaacaaucuuguuguggaggacgaaggaugcacaaaccugagcggcuucuccuauauggagcucaaggugggguacauuucugcuaucaaagucaauggauuuacguguaccggcgugguuacagaagccgagaccuauacaaacuucgugggguacgucaccacaaccuuuaagagaaaacacuuccggcccacgccugaugcgugccgcgcugccuauaauuggaagauggccggagacccgagauacgaagagagccugcauaaccccuauccugauuaccacuggcugcggaccgugaagacaaccaaagagucccucguuaucauuucucccagcgugccugaccuggaucccuacgacaagucccuucauagccgcgucuuuccgucuggcaaauguuccggcaucacagugagcucuaccuauugcuccacgaaucacgauuacacaauuuggaugccugaaaaccccagacuggggaccagcugugacaucuucacaaauucucggggaaagcgcgcuuccaaaggcagcaagaccugcggguuuguggaugagagaggacucuauaagucccugaaaggcgccuguaagcugaaacugugcgggguccucggacugcggcugauggacggcaccugggcugccauucaaacaucugaugaaacgaagugguguccucccgaccagcucguuaaccugcacgacuuccgcagcgaugagaucgagcaucuugugguggaggaacuggucaaaaagagagaagagugccucgacgcgcuggaauccauuaugaccacaaaaagcgugucuuuucggcgccuuucccaccugagaaagcucguucccggcuucgggaaggccuacaccaucuucaauaaaacacugauggaggcugaugcccauuauaagagcgugcggaccuggaacgagaucauuccuucuaaaggaugccugcgcgucggcgggagaugucacccgcacgugaauggaguguuuuucaacggcaucauucucgggcccgacggacauguucugaucccugaaaugcagagcucccuucugcagcaacacauggagcuccuggaaucuagcgucauuccccuuaugcauccucuggcugaucccuccacgguguuuaaggacgaugacgaggccgaagauuucgucgaggugcaccucccggacguucauaaacaggugagcggcgucgaucugggccugccuucuugggggaaguacgugcucauguccgcgggaguucugacagcccuuaugcugaugaucuuucucaugaccugcugucggagaaccaaucgcgcugagagcgcccagcacucucugggcgaacgggggagaaagguguccgucacaagccaguccggacgcgugaucucuagcugggaguccuauaaaucuggcggggaaaccaagcuguga

SEQ ID NO: 222769 - RNA, 1575 nt, Artificial Sequence
  derived and/or modified CDS sequence (opt5) from glycoprotein__RABV__AB563987.1
augaucccccaggcccuucucuucgugccucugcuugucuuuagccugugcuucggcaaguuuccgauuuacaccauccccgacaaacucgggccuuggucccccauugauauccaccaucugucuuguccuaacaaucuuguuguggaggacgaaggaugcacaaaccugagcggcuucuccuauauggagcucaaggugggguacauuucugcuaucaaagucaauggauuuacguguaccggcgugguuacagaagccgagaccuauacaaacuucgugggguacgucaccacaaccuuuaagagaaaacacuuccggcccacgccugaugcgugccgcgcugccuauaauuggaagauggccggagacccgagauacgaagagagccugcauaaccccuauccugauuaccacuggcugcggaccgugaagacaaccaaagagucccucguuaucauuucucccagcguggcugaccuggauccuuacgacaagucccuucauagccgcgucuuucccucuggcaaauguuccggcaucacagugagcucuaccuauugcuccacgaaucacgauuacacaauuuggaugccggaaaacccuagacuggggaccagcugugacaucuucacaaauucucggggaaagcgcgccuccaaaggcagcaagaccugcggguuuguggaugagagaggacucuauaagucccugaaaggcgcuuguaagcugaaacugugcgggguccucggacugcggcugauggacggcaccugggccgcgauucaaacaucugaugaaacgaaguggugucccccugaccagcucguuaaccugcacgacuuccgcagcgaugagaucgagcaucuugugguggaggaacuggucaaaaagagagaagagugccucgacgcccuggaauccauuaugaccacaaaaagcgugucuuuucggcgccuuucccaccugagaaagcucguucccggcuucgggaaggcuuacaccaucuucaauaaaacacugauggaggccgaugcucauuauaagagcgugcggaccuggaacgagaucauucccucuaaaggaugccugcgcgucggcgggagaugucacccucacgugaauggaguguuuuucaacggcaucauucucgggccggacggacauguucugauccccgaaaugcagagcucccuucugcagcaacacauggagcuccuggaaucuagcgucauuccucuuaugcauccccuggccgauccuuccacgguguuuaaggacgaugacgaggcggaagauuucgucgaggugcaccuccccgacguucauaaacaggugagcggcgucgaucugggccugccgucuugggggaaguacgugcucauguccgccggaguucugacagcucuuaugcugaugaucuuucucacaaccugcugucggagagccaauaaggcugagagcgcccagcacucucugggcgaacgcgggcggaaaguguccgucaccagccaguccggaagagugaucucuagcugggaguccuauaagucuggcggggaaaccaaacuguga

SEQ ID NO: 222770 - RNA, 1575 nt, Artificial Sequence; identical to SEQ ID NO: 222760
  derived and/or modified CDS sequence (opt5) from glycoprotein__RABV__AB563988.1

SEQ ID NO: 222771 - RNA, 1575 nt, Artificial Sequence
  derived and/or modified CDS sequence (opt5) from glycoprotein__RABV__AB563989.1
augaucccccaggcccugcucuuugugccucugcuugucuuuagccugugcuucggcaaguuuccgauuuacaccauccccgacaaacucgggccuuggucccccauugauauccaccaucugucuuguccuaacaaucuuguuguggaggacgaaggaugcacaaaccugagcggcuucuccuauauggagcucaaggugggguacauuucugcuaucaaagucaauggauuuacguguaccggcgugguuacagaagccgagaccuauacaaacuucgugggguacgucaccacaaccuuuaagagaaaacacuuccggcccacgccugaugcgugccgcgcugccuauaauuggaagauggccggagacccgagauacgaagagagccugcauaaccccuauccugauuaccacuggcugcggaccgugaagacaaccaaagagucccucguuaucauuucucccagcguggcugaccuggauccuuacgacaagucccuucauagccgcgucuuucccucuggcaaauguuccggcaucacagugagcucuaccuauugcuccacgaaucacgauuacacaauuuggaugccggaaaacccuagacuggggaccagcugugacaucuucacaaauucucggggaaagcgcgccuccaaaggcagcaagaccugcggguuuguggaugagagaggacucuauaagucccugaaaggcgcuuguaagcugaaacugugcgggguccucggacugcggcugauggacggcaccugggccgcgauucaaacaucugaugaaacgaaguggugucccccugaccagcucguuaaccugcacgacuuccgcagcgaugagaucgagcaucuugugguggaggaacuggucaaaaagagagaagagugcauugacgcccucgaauccaucaugaccacaaaaagcgugucuuuucggcgccugucccaccuuagaaagcugguucccggcuucgggaaggcuuacaccaucuucaauaaaacacucauggaggccgaugcucauuauaagagcgugcggaccuggaacgagauuauccccucuaaaggaugccugcgcgucggcgggagaugucacccucacgugaauggaguuuucuucaacggcauuauccuggggccggacggacaugugcucauucccgaaaugcagagcucccugcuucagcaacacauggagcugcucgaaucuagcgucaucccucugaugcauccccuugccgauccuuccacgguguuuaaggacgaugacgaggcggaagauuucgucgaggugcaccuucccgacguucauaaacaggugagcggcgucgaucucggccugccgucuugggggaaguacgugcugauguccgccggaguucucacagcucugaugcuuaugaucuuucugaugaccugcugucggagaaccaaucgcgccgagagcgcucagcacucucucggcgaacgggggagaaagguguccgucacaagccaguccggacgcgugauuucuagcugggaguccuauaaaucuggcggggaaaccaagcuguga

SEQ ID NO: 222772 - RNA, 1575 nt, Artificial Sequence
  derived and/or modified CDS sequence (opt5) from glycoprotein__RABV__AB563990.1
augaucccccaggcccuucucuucgugccucugcuugucuuuagccugugcuucggcaaguuuccgauuuacaccauccccgacaaacucgggccuuggucccccauugauauccaccaucugucuuguccuaacaaucuuguuguggaggacgaaggaugcacaaaccugagcggcuucuccuauauggagcucaaggugggguacauuucugcuaucaaagucaauggauuuacguguaccggcgugguuacagaagccgagaccuauacaaacuucgugggguacgucaccacaaccuuuaagagaaaacacuuccggcccacgccugaugcgugccgcgcugccuauaauuggaagauggccggagacccgagauacgaagagagccugcauaaccccuauccugauuaccacuggcugcggaccgugaagacaaccaaagagucccucguuaucauuucucccagcguggcugaccuggauccuuacgacaagucccuucauagccgcgucuuucccucuggcaaauguuccggcaucacagugagcucuaccuauugcuccacgaaucacgauuacacaauuuggaugccggaaaacccuagacuggggaccagcugugacaucuucacaaauucucggggaaagcgcgccuccaaaggcagcaagaccugcggguuuguggaugagagaggacucuauaagucccugaaaggcgcuuguaagcugaaacugugcgggauucucggacugcggcugauggacggcaccugggccgcgauccaaacaucugaugaaacgaaguggugucccccugaccagcucgucaaccugcacgacuuccgcagcgaugagauugagcaucuuguuguggaggaacuggugaaaaagagagaagagugccucgacgcccuggaauccaucaugaccacaaaaagcgucucuuuucggcgccuuucccaccugagaaagcucgugcccggcuucgggaaggcuuacaccaucuucaauaaaacacugauggaggccgaugcucauuauaagagcguucggaccuggaacgagauuauccccucuaaaggaugccugcgcgugggcgggagaugucacccucacgucaauggaguguuuuucaacggcauuauccucgggccggacggacauguucugauucccgaaaugcagagcucccuucugcagcaacacauggagcuccuggaaucuagcgugaucccucuuaugcauccccuggccgauccuuccacggucuuuaaggacgaugacgaggcggaagauuucguggagguccaccuccccgacgugcauaaacagguuagcggcguggaucugggccugccgucuugggggaaguacguccucauguccgccggagugcugacagcucuuaugcugaugaucuuucucaugaccugcugucggagagccaaucgcgcugagagcgcccagcacucucugggcgaacgggggagaaagguuuccgugaccagccaguccggacgcgucauuucuagcugggaguccuauaaaucuggcggggaaacaaagcuguga

SEQ ID NO: 222773 - RNA, 1575 nt, Artificial Sequence
  derived and/or modified CDS sequence (opt5) from glycoprotein__RABV__AB563991.1
augaucccccaggcccugcucuuugugccucugcuugucuuuagccugugcuucggcaaguuuccgauuuacaccauccccgacaaacucgggccuuggucccccauugauauccaccaucugucuuguccuaacaaucuuguuguggaggacgaaggaugcacaaaccugagcggcuucuccuauauggagcucaaggugggguacauuucugcuaucaaagucaauggauuuacguguaccggcgugguuacagaagccgagaccuauacaaacuucgugggguacgucaccacaaccuuuaagagaaaacacuuccggcccacgccugaugcgugccgcgcugccuauaauuggaagauggccggagacccgagauacgaagagagccugcauaaccccuauccugauuaccacuggcugcggaccgugaagacaaccaaagagucccucguuaucauuucucccagcguggcugaccuggauccuuacgacaagucccuucauagccgcgucuuucccucuggcaaauguuccggcaucacagugagcucuaccuauugcuccacgaaucacgauuacacaauuuggaugccggaaaacccuagacuggggaccagcugugacaucuucacaaauucucggggaaagcgcgccuccaaaggcagcaagaccugcggguuuguggaugagagaggacucuauaagucccugaaaggcgcuuguaagcugaaacugugcgggguccucggacugcggcugauggacggcaccugggccgcgauucaaacaucugaugaaacgaaguggugucccccugaccagcucguuaaccugcacgacuuccgcagcgaugagaucgagcaucuugugguggaggaacuggucagaaaacgggaagagugccucgacgcccuggaauccauuaugaccacaaagagcgugucuuuucgcagacuuucccaccuucggaaacucguucccggcuucgggaaggcuuacaccaucuucaauaagacacugauggaggccgaugcucauuauaaaagcgugcgcaccuggaacgagaucauucccucuaagggaugccugagagucggcgggcggugucacccucacgugaauggaguuuucuucaacggcaucauucucgggccggacggacaugugcugauccccgaaaugcagagcucccuucugcagcaacacauggagcuccuggaaucuagcgucauuccucuuaugcauccccuggccgauccuuccacgguguuuaaagacgaugacgaggcggaagauuucgucgaggugcaccuccccgacguucauaaacaggugagcggcgucgaucugggccugccgucuugggggaaguacgugcucauguccgccggaguucugacagcucuuaugcugaugaucuuucucaugaccugcuguagacgcaccaaucgggccgagagcgcucagcacucucugggcgaaagagggcgcaagguguccgucacaagccaguccggacgggugaucucuagcugggaguccuauaagucuggcggggaaaccaaacuguga

SEQ ID NO: 222774 - RNA, 1575 nt, Artificial Sequence; identical to SEQ ID NO: 222760
  derived and/or modified CDS sequence (opt5) from glycoprotein__RABV__AB563992.1

SEQ ID NO: 222775 - RNA, 1575 nt, Artificial Sequence; identical to SEQ ID NO: 222760
  derived and/or modified CDS sequence (opt5) from glycoprotein__RABV__AB563993.1

SEQ ID NO: 222776 - RNA, 1575 nt, Artificial Sequence; identical to SEQ ID NO: 222643
  derived and/or modified CDS sequence (opt5) from glycoprotein__RABV__AB563994.1

SEQ ID NO: 222777 - RNA, 1575 nt, Artificial Sequence; identical to SEQ ID NO: 222644
  derived and/or modified CDS sequence (opt5) from glycoprotein__RABV__AB563996.1

SEQ ID NO: 222778 - RNA, 1575 nt, Artificial Sequence
  derived and/or modified CDS sequence (opt5) from glycoprotein__RABV__AB563997.1
augaucccccaggcccugcucuuugugccuauucuggucuuuagccuuugcuucggcaaguuuccgaucuacaccauucccgacaaacuggggccuuggucccccaucgauauucaccaucucucuuguccuaacaaucugguuguggaggacgaaggaugcacaaaccuuagcggcuucuccuauauggagcugaaggugggguacaucucugcuaucaaagucaauggauuuacguguaccggcgugguuacagaagccgagaccuauacaaacuucgugggguacgucaccacaaccuuuaagagaaaacacuuccggcccacgccugaugcgugccgcgcugccuauaauuggaagauggccggagacccgagauacgaagagagccuccauaaccccuauccugauuaccacuggcugcggaccgugaagacaaccaaagagucccugguuauuaucucucccagcguggcugaccucgauccuuacgacaagucccugcauagccgcgucuuucccucuggcaaauguuccggcauuacagugagcucuaccuauugcuccacgaaucacgauuacacaaucuggaugccggaaaacccuagacuugggaccagcugugacauuuucacaaauucucggggaaagcgcgccuccaaaggcagcaagaccugcggguuuguggaugagagaggacuguauaagucccucaaaggcgcuuguaagcugaaacuuugcgggguccugggacuccggcugauggacggcaccugggccgcgauccaaacaucugaugaaacgaaguggugucccccugaccagcugguuaaccuccacgacuuccgcagcgaugagauugagcaucuggugguggaggaacuugucaaaaagagagaagagugccuggacgcccucgaauccaucaugaccacaaaaagcgugucuuuucggcgccugucccaccuuagaaagcugguucccggcuucgggaaggcuuacaccaucuucaauaaaacacucauggaggccgaugcucauuauaagagcgugcggaccuggaacgagauuauccccucuaaaggaugccugcgcgucggcgggagaugucacccucacgugaauggaguuuucuucaacggcauuauccuggggccggacggacaugugcucauucccgaaaugcagagcucccugcuucagcaacacauggagcugcucgaaucuagcgucaucccucugaugcauccccuugccgauccuuccacgguguuuaaggacgaugacgaggcggaagauuucgucgaggugcaucugcccgacguucacaaacaggugagcggcgucgaucucggccugccgucuugggggaaguacgugcugauguccgccggaguucucacagcucugaugcuuaugaucuuucugaugaccugcugucggagagccagccgcguggagucugcucagcacucccucggcgaacgggggagaaaggucagcgugaccucccagucuggacgcgugauuagcuccugggagucuuauaaaagcggcggggaaacaaagcuguga

SEQ ID NO: 222779 - RNA, 1575 nt, Artificial Sequence
  derived and/or modified CDS sequence (opt5) from glycoprotein__RABV__AB563998.1
augaucccccaggcccugcucuuugugccucugcuugucuuuagccugugcuucggcaaguuuccgauuuacaccauccccgacaaacucgggccuuggucccccauugauauccaccaucugucuuguccuaacaaucuuguuguggaggacgaaggaugcacaaaccugagcggcuucuccuauauggagcucaaggugggguacauuucugcuaucaaagucaauggauuuacguguaccggcgugguuacagaagccgagaccuauacaaacuucgugggguacgucaccacaaccuuuaagagaaaacacuuccggcccacgccugaugcgugccgcgcugccuauaauuggaagauggccggagacccgagauacgaagagagccugcauaagcccuauccugauuaccacuggcugcggaccgugaaaacaaccaaggagucccucguuaucauuucucccagcguggcugaccuggauccuuacgacaaaucccuucauagccgcgucuuucccaacggcaaguguucuggcaucacaguguccagcaccuauugcucuacgaaucacgauuacacaauuuggaugccggaaaacccuagacuggggaccuccugugacaucuucacaaauagccggggaaaacgcgccucuaagggcuccaagaccugcggguuuguggaugagagaggacucuauaaaagccugaagggcgcuuguaaacuuaagcugugcgggguccucggacugcggcugauggacggcaccugggccgcgauucaaacauccgaugaaacgaaauggugucccccugaccagcucguuaaccugcacgacuuccgcucugaugagaucgagcaucuugugguggaggaacuggucaagaaaagagaagagugccucgacgcccuggaaagcauuaugaccacaaaguccgugagcuuucggcgccuuucucaccugagaaagcucguucccggcuucgggaaggcuuacaccaucuucaauaagacacugauggaggccgaugcucauuauaaauccgugcggaccuggaacgagaucauucccagcaagggaugccugcgcgucggcgggagaugucacccucacgugaauggaguuuucuucaacggcaucauucucgggccggacggacaugugcugauccccgaaaugcagucuagccuucugcagcaacacauggagcuccuggaauccucugucauuccucuuaugcauccccuggccgauccuagcacgguguuuaaagacgaugacgaggcggaagauuucgucgaggugcaccuccccgacguucauaaacagguguccggcgucgaucugggccugccgagcugggggaaguacgugcucaugucugccggaguucugacagcucuuaugcugaugaucuuucucaugaccugcugucggagagccaaucgcgcugaguccgcccagcacagccugggcgaacgggggagaaaagugucugucaccucccagagcggacgcgugaucuccucuugggagagcuauaaguccggcggggaaacaaaacuguga

SEQ ID NO: 222780 - RNA, 1575 nt, Artificial Sequence
  derived and/or modified CDS sequence (opt5) from glycoprotein__RABV__AB563999.1
augaucccccaggcccuucucuucgugccucugcuugucagcucccugugcuuuggcaaguucccgauuuacaccauccccgacaaacucgggccuuggucucccauugauauccaccaucugagcuguccuaacaaucuuguuguggaggacgaaggaugcacaaaccuguccggcuuuucuuauauggagcucaaggugggguacauuagcgcuaucaaagucaauggauucacguguaccggcgugguuacagaagccgagaccuauacaaacuuugugggguacgucaccacaaccuucaagagaaaacacuuucggcccacgccugaugcgugccgcgcugccuauaauuggaagauggccggagacccgagauacgaagagucccugcauaaccccuauccugauuaccacuggcugcggaccgugaagacaaccaaagagucucucguuaucauuagccccuccguggcugaccuggauccuuacgacaagagccuucauucucgcgucuuccccuccggcaaauguagcggcaucacagugucuuccaccuauugcagcacgaaucacgauuacacaauuuggaugccggaaaacccuagacuggggaccucuugugacaucuuuacaaauucccggggaaagcgcgccagcaaaggcuccaagaccugcggguucguggaugagagaggacucuauaagucucugaaaggcgcuuguaagcugaaacugugcgggguccucggacugcggcugauggacggcaccugggccgcgauucaaacaagcgaugaaacgaaguggugucccccugaccagcucguuaaccugcacgacuuucgcuccgaugagaucgagcaucuugugguggaggaacuggucaaaaagagagaagagugccucgacgcccuggaaagcauuaugaccacaaaaucuguguccuuccggcgccuuagccaccugagaaagcucguucccggcuuugggaaggcuuacaccaucuucaauaaaacacugauggaggccgaugcucauuauaagucugugcggaccuggaacgagaucauucccagcaaaggaugccugcgcgucggcgggagaugucacccucacgugaauggaguuuucuuuaacggcaucauucucgggccggacggacaugugcugauccccgaaaugcaguccucucuucugcagcaacacauggagcuccuggaaagcuccgucauuccucuuaugcauccccuggccgauccuagcacgguguucaaggacgaugacgaggcggaagauuuugucgaggugcaccuccccgacguucauaaacaggugucuggcgucgaucugggccugccguccugggggaaguacgugcucacaagcgccggaguucugaccgcucuuaugcugaugaucuuccucaugaccugcugucggagagccaaucgcgcugagucugcccagcacucccugggcgaacgggggagaaaggugagcgucacaucccagucucgccgggugaucagcuccugggagucuuauaaaagcggaggcgaaaccaagcuguga

SEQ ID NO: 222781 - RNA, 1575 nt, Artificial Sequence
  derived and/or modified CDS sequence (opt5) from glycoprotein__RABV__AB564001.1
augaucccccaggcccugauguucgugccucuccuggucuuuagccuuugcuucggcaaguuuccgauuuacaccauccccgacaaacuggggccuuggucccccauugauauccaccaucucucuuguccuaacaaucugguuguggaggacgaaggaugcacaaaccuuagcggcuucuccuauauggagcugaaggugggguacauuucugcuaucaaagucaauggauuuacguguaccggcgugguuacagaagccgagaccuauacaaacuucgugggguacgucaccacaaccuuuaagagaaaacacuuccggcccaugccugaugcgugccgcgcugccuauaauuggaagauggccggagacccgagauacgaagagagccuccauaaccccuauccugauuaccacuggcugcggacggugaagaccacaaaagagucccugguuaucauuucucccagcguggcugaccucgauccuuacgacaagucccugcauagccgcgucuuucccucuggcaaauguuccggcaugaccgugagcucuacauauugcuccaccaaucacgauuacacgaucuggaugccggaaaacccuagacuugggacaagcugugacauuuucaccaauucucggggaaagcgcgccuccaaaggcagcaagacaugcggguuuguggaugagagaggacuguauaagucccucaaaggcgcuuguaagcugaaacuuugcgggguccugggacuccggcugauggacggcaccugggccgcgauccaaaccucugaugaaacaaaguggugucccccugaccagcugguuaaccuccacgacuuccgccuggaugagauugagcaucuugugguggaggaacuggucaaaaagagagaagagugccucgacgcccuggaaagcaucaugacgaccaaauccgugagcuuucggcgccuuucucaccugagaaagcucguucccggcuucgggaaggcuuacacaauuuucaauaaaacccugauggaggccgaugcucauuauaaguccgugcggacauggaacgagaucauccccagcaaaggaugccugcgcgucggcgggagaugucacccucacgugaauggaguguuuuucaacggcauuauccucgggccggacggacauguucugauucccgaaaugcagucuagccuucugcagcaacacauggagcuccuggaauccucugucaucccucuuaugcauccccuggccgauccuagcaccguguuuaagggcgacgaugaggcggaagacuucgucgaggugcaccuccccgauguucauaaacagguguccggcgucgaccuggggcugccgagcuggggaaaguacgugcucaugucugccggcguucugacggcucuuaugcugaugauuuuucucaugacaugcuguaagcgggccaauagagcugaguccgcccaccacagccugggggaacgcggacggaaagugucugucaccucccagagcggcagagugaucuccucuugggagagcuauaaguccgggggcgaaaccaaacuguga

SEQ ID NO: 222782 - RNA, 1575 nt, Artificial Sequence
  derived and/or modified CDS sequence (opt5) from glycoprotein__RABV__AB564002.1
augauccccagagcccugauguucgugccucuccuggucuuuagccuuugcuucggcaaguuuccgauuuacaccauccccgacaaacuggggccuuggucccccauugauauccaccaucucucuuguccuaacaaucugguuguggaggacgaaggaugcacaaaccuuagcggcuucuccuauauggagcugaaggugggguacauuucugcuaucaaagucaauggauuuacguguaccggcgugguuacagaagccgagaccuauacaaacuucgugggguacgucaccacaaccuuuaagcggaaacacuuccgccccaugccugaugcgugcagagcugccuauaauuggaagauggccggagacccgcgguacgaagagagccuccauaaccccuauccugauuaccacuggcugcgcacggugaagaccacaaaagagucccugguuaucauuucucccagcguggcugaccucgauccuuacgacaagucccugcauagcagagucuuucccucuggcaaauguuccggcaugaccgugagcucuacauauugcuccaccaaucacgauuacacgaucuggaugccggaaaacccucggcuugggacaagcugugacauuuucaccaauucucgcggaaagagagccuccaaaggcagcaagacaugcggguuuguggaugagcggggacuguauaagucccucaaaggcgcuuguaagcugaaacuuugcgggguccugggacuccgccugauggacggcaccugggccgcgauccagaccucugaugaaacaaaguggugucccccugaccaacugguuaaccuccacgacuucagaagcgaugagauugagcaucuggugguggaggaacuugucaaaaagcgggaagagugccuggacgcccucgaauccaucaugacgaccaaaagcgugucuuuucgcagacugucccaccuucggaagcugguucccggcuucgggaaggcuuacacaauuuucaauaaaacccucauggaggccgaugcucauuauaagagcgugcgcacauggaacgagaucauccccucuaaaggaugccugagagucggcgggcggugucacccucacgugaauggaguguuuuucaacggcauuauccuggggccggacggacauguucucauucccgaaaugcagagcucccugcuucagcagcacauggagcugcucgaaucuagcgucaucccucugaugcauccccuugccgauccuuccaccguguuuaagggcgacgaugaggcggaagacuucgucgaggugcaucugcccgauguucacaaacaagugagcggcgucgaccucgggcugccgucuuggggaaaguacgugcugauguccgccggcguucucacggcucugaugcuuaugauuuuucugaugacaugcuguaagagagccaaucgcgcugagagcgcccaccacaaccucggggaacggggaagaaaagugucugucaccucccagagcggccgcgugaucuccucuugggagagcuauaaguccgggggcgaaaccaaacuguga

SEQ ID NO: 222783 - RNA, 1575 nt, Artificial Sequence
  derived and/or modified CDS sequence (opt5) from glycoprotein__RABV__AB564004.1
augaucccccaggcccugauguucgugccucuccuggucuuuagccuuugccugggcaaguucccgauuuacaccauccccgacaaacucgggccuuggucccccauugauauccaccaucugucuuguccuaacaaucuuguuguggaggacgaaggaugcacaaaccugagcggcuuuuccuauauggagcucaaggugggguacauuucugcuaucaaagucaauggauucacguguaccggcgugguuacagaagccgagaccuauacaaacuuugugggguacgucaccacaaccuucaagagaaaacacuuucggcccaugccugaugcgugccgcgcugccuauaauuggaagauggccggagacccgagauacgaagagagccugcauaaccccuauccugauuaccacuggcugcggacggugaagaccacaaaagagucccucguuaucauuucucccagcguggcugaccuggauccuuacgacaagucccuucauagccgcgucuuccccggcggcaaauguucugggaugaccguguccagcacauauugcucuaccaaucacgauuacacgaucuggaugccggaaaacccuagacugggaacauccugugacauuuuuaccaauagccggggcaagcgcgccucuaaaggguccaagacaugcggauucguggaugagagaggccucuauaagagccugaaaggggcuuguaaacuuaagcugugcggaguccucggccugcggcugauggacggcaccugggccgcgauccaaaccuccgaugaaacaaaguggugucccccugaccagcucguuaaccugcacgacuuucgcucugaugagauugagcaucuugugguggaggaacuggucaaaaagagagaagagugccucgacgcccuggaaagcaucaugacgaccaaauccgugagcuuccggcgccuuucucaccugagaaagcucguucccggguuuggaaaggcuuacacaauuuucaauaaaacccugauggaggccgaugcucauuauaaguccgugcggacauggaacgagaucauccccagcaaaggcugccugcgcgucgggggaagaugucacccucacgugaauggcguuuucuuuaacgggauuauccucggaccggacggccaugugcugauucccgaaaugcagucuagccuucugcagcaacacauggagcuccuggaauccucugucaucccucuuaugcauccccuggccgauccuagcaccguguucaagggcgacgaugaggcggaagacuuugucgaggugcaccuccccgauguucauaaacagguguccggggucgaccugggacugccgagcuggggcaaguacgugcucaugucugccgggguucugacggcucuuaugcugaugauuuuccucaugacaugcuguaagcgggccaauagagcugaguccgcccaccacagccugggagaacgcggccggaaagugucugucaccucccagagcgggagagugaucuccucuugggagagcuauaaguccggcggagaaaccaaacuguga

SEQ ID NO: 222784 - RNA, 1575 nt, Artificial Sequence; identical to SEQ ID NO: 222711
  derived and/or modified CDS sequence (opt5) from glycoprotein__RABV__AB564005.1

SEQ ID NO: 222785 - RNA, 1575 nt, Artificial Sequence; identical to SEQ ID NO: 222711
  derived and/or modified CDS sequence (opt5) from glycoprotein__RABV__AB564006.1

SEQ ID NO: 222786 - RNA, 1575 nt, Artificial Sequence
  derived and/or modified CDS sequence (opt5) from glycoprotein__RABV__AB564007.1
augaucccccaggcccugauguucgugccucuccuggucuuuagccuuugcuucggcaaguuuccgauuuacaccauccccgacaaacuggggccuuggucccccauugauauccaccaucucucuuguccuaacaaucugguuguggaggacgaaggaugcacaaaccuuagcggcuucuccuauauggagcugaaggugggguacauuucugcuaucaaagucaauggauuuacguguaccggcgugguuacagaagccgagaccuauacaaacuucgugggguacgucaccacaaccuuuaagagaaaacacuuccggcccaugccugaugcgugccgcgcugccuauaauuggaagauggccggagacccgagauacgaagagagccuccauaaccccuauccugauuaccacuggcugcggacggugaagaccacaaaagagucccugguuaucauuucucccagcguggcugaccucgauccuuacgacaagucccugcauagccgcgucuuucccggcggcaaauguucugggaugaccguguccagcacauauugcucuaccaaucacgauuacacgaucuggaugccggaaaacccuagacuuggaacauccugugacauuuucaccaauagccggggcaagcgcgccucuaaaggguccaagacaugcggauuuguggaugagagaggccuguauaagagccucaaaggggcuuguaagcugaaacuuugcggaguccugggccuccggcugauggacggcaccugggccgcgauccaaaccuccgaugaaacaaaguggugucccccugaccagcugguuaaccuccacgacuuccgcucugaugagauugagcaucuggugguggaggaacuugucaaaaagagagaagagugccuggacgcccucgaaagcaucaugacgaccaaauccgugagcuuucggcgccugucucaccuuagaaagcugguucccggguucggaaaggcuuacacaauuuucaauaaaacccucauggaggccgaugcucauuauaaguccgugcggacauggaacgagaucauccccagcaaaggcugccugcgcgucgggggaagaugucacccucacgugaauggcguguuuuucaacgggauuauccugggaccggacggccauguucucauucccgaaaugcagucuagccugcuucagcaacacauggagcugcucgaauccucugucaucccucugaugcauccccuugccgauccuagcaccguguuuaagggcgacgaugaggcggaagacuucgucgaggugcaucugcccgauguucacaaacagguguccggggucgaccucggacugccgagcuggggcaaguacgugcugaugucugccgggguucucacggcucugaugcuuaugauuuuucugaugacaugcuguaagcgggccaauagagcuaaauccgcccaccacagccucggagagcgcggccggaaggugucugucaccucccagagcgggagagugaucuccucuugggaaagcuauaaauccggcggagagaccaagcuguga

SEQ ID NO: 222787 - RNA, 1575 nt, Artificial Sequence; identical to SEQ ID NO: 222673
  derived and/or modified CDS sequence (opt5) from glycoprotein__RABV__AB564008.1

SEQ ID NO: 222788 - RNA, 1575 nt, Artificial Sequence
  derived and/or modified CDS sequence (opt5) from glycoprotein__RABV__AB564009.1
augaacccccaggcccugauguucgugccucuccuggucuuuagccuuugcuucggcaaguuuccgaucuacaccauucccgacaaacuggggccuuggucccccaucgauauucaccaucucucuuguccuaauaaccugguuguggaggacgaaggaugcacaaaucuuagcggcuucuccuauauggagcugaaggugggguacaucucugcuauuaaagucaacggauuuacguguaccggcgugguuacagaagccgagaccuauacaaauuucgugggguacgucaccacaaccuuuaagagaaaacacuuccggcccacgccugaugcgugccgcgcugccuauaacuggaagauggccggagacccgagauacgaagagagccuccauaaucccuauccugauuaccacuggcugcggaccgugaagacaaccaaagagucccugguuaucaucucucccagcguggcugaccucgauccuuacgacaagucccugcauagccgcgucuuucccucuggcaaauguuccggcauuacagugagcucuaccuauugcuccacgaaccacgauuacacaaucuggaugccggaaaauccuagacuugggaccagcugugacauuuucacaaacucucggggaaagcgcgccuccaaaggcagcaagaccugcggguuuguggaugagagaggacuguauaagucccucaaaggcgcuuguaagcugaaacuuugcgggguccugggacuccggcugauggacggcaccugggccgcgauccaaacaucugaugaaacgaaguggugucccccugaccagcugguuaaucuccacgacuuccgcagcgaugagauugagcaucuggugguggaggaacuugucaaaaagagagaagagugccuggacgcccucgaauccaucaugaccacaaaaagcgugucuuuucggcgccugucccaccuuagaaagcugguucccggcuucgggaaggcuuacaccauuuucaacaaaacacucauggaggccgaugcucauuauaagagcgugcggaccuggaaugagaucauccccucuaaaggaugccugcgcgucggcgggagaugucacccucacgugaacggaguguuuuucaauggcauuauccuggggccggacggacauguucucauucccgaaaugcagagcucccugcuucagcaacacgucgagcugcucgaaucuagcgugaucccucugaugcauccccuugccgauccuuccacggucuuuaaggacgaugacgaggcggaagauuucguggagguucaucugcccgacgugcacaaacaggucagcggcguggaucucggccugccgucuugggggaaguacguucugauguccgccggagugcucacagcucugaugcuuaugauuuuucugaugaccugcugucggagagccaaccgcgcugagagcgcccagcacucucucggcgaacgggggagaaaggucuccaucaccagccaguccggacgcgugaucucuagcugggaguccuauaaaucuggcggggaaacaaagcuguga

SEQ ID NO: 222789 - RNA, 1575 nt, Artificial Sequence; identical to SEQ ID NO: 222673
  derived and/or modified CDS sequence (opt5) from glycoprotein__RABV__AB564010.1

SEQ ID NO: 222790 - RNA, 1575 nt, Artificial Sequence; identical to SEQ ID NO: 222673
  derived and/or modified CDS sequence (opt5) from glycoprotein__RABV__AB564011.1

SEQ ID NO: 222791 - RNA, 1575 nt, Artificial Sequence
  derived and/or modified CDS sequence (opt5) from glycoprotein__RABV__AB564012.1
augaacccccaggcccugauguucgugccucuccuggucuuuagccuuugcuucggcaaguuuccgaucuacaccauucccgacaaacuggggccuuggucccccaucgauauucaccaucucucuuguccuaauaaccugguuguggaggacgaaggaugcacaaaucuuagcggcuucuccuauauggagcugaaggugggguacaucucugcuauuaaagucaacggauuuacguguaccggcgugguuacagaagccgagaccuauacaaauuucgugggguacgucaccacaaccuuuaagagaaaacacuuccggcccacgccugaugcgugccgcgcugccuauaacuggaagauggccggagacccgagauacgaagagagccuccauaaucccuauccugauuaccacuggcugcggaccgugaagacaaccaaagagucccugguuaucaucucucccagcguggcugaccucgauccuuacgacaagucccugcauagccgcgucuuucccucuggcaaauguuccggcauuacagugagcucuaccuauugcuccacgaaccacgauuacacaaucuggaugccggaaaauccuagacuugggaccagcugugacauuuucacaaacucucggggaaagcgcgccuccaaaggcagcaagaccugcggguuuguggaugagagaggacuguauaagucccucaaaggcgcuuguaagcugaaacuuugcgggguccugggacuccggcugauggacggcaccugggccgcgauccaaacaucugaugaaacgaaguggugucccccugaccagcugguuaaucuccacgacuuccauagcgaugagauugagcaccuggugguggaggaacuugucaaaaagcgcgaagagugccuggacgcccucgaauccaucaugaccacaaaaagcgugucuuuuagacggcugucccaucuucgcaagcugguucccggcuucgggaaggcuuacaccauuuucaacaaaacacucauggaggccgaugcucacuauaagagcgugagaaccuggaaugagaucauccccucuaaaggaugccugcgggucggcgggcgcugucacccucaugugaacggaguguuuuucaauggcauuauccuggggccggacggacacguucucauucccgaaaugcagagcucccugcuucagcaacauauggagcugcucgaaucuagcgucaucccucugaugcacccccuugccgauccuuccacgguguuuaaggacgaugacgaggcggaagauuucgucgaggugcaucugcccgacguucacaaacaggugagcggcgucgaucucggccugccgucuugggggaaguacgugcugauguccgccggaguucucacagcucugaugcuuaugauuuuucugaugaccugcuguagacgggccaacagagcugagagcgcccagcacucucucggcgaacgcgggcggaagguguccgucaccagccaguccggaagagugaucucuagcugggaguccuauaaaucuggcggggaaacaaagcuguga

SEQ ID NO: 222792 - RNA, 1575 nt, Artificial Sequence
  derived and/or modified CDS sequence (opt5) from glycoprotein__RABV__AB564015.1
augaacccccaggcccugauguucgugccucuccuggucuuuagccuuugcuucggcaaguuuccgaucuacaccauucccgacaaacuggggccuuggucccccaucgauauucaccaucucucuuguccuaauaaccugguuguggaggacgaaggaugcacaaaucuuagcggcuucuccuauauggagcugaaggugggguacaucucugcuauuaaagucaacggauuuacguguaccggcgugguuacagaagccgagaccuauacaaauuucgugggguacgucaccacaaccuuuaagagaaaacacuuccggcccacgccugaugcgugccgcgcugccuauaacuggaagauggccggagacccgagauacgaagagagccuccauaaucccuauccugauuaccacuggcugcggaccgugaagacaaccaaagagucccugguuaucaucucucccagcguggcugaccucgauccuuacgacaagucccugcauagccgcgucuuucccucuggcaaauguuccggcauuacagugagcucuaccuauugcuccacgaaccacgauuacacaaucuggaugccggaaaauccuagacuugggaccagcugugacauuuucacaaacucucggggaaagcgcgccuccaaaggcagcaagaccugcggguuuguggaugagagaggacuguauaagucccucaaaggcgcuuguaagcugaaacuuugcgggguccugggacuccggcugauggacggcaccugggccgcgauccaaacaucugaugaaacgaaguggugucccccugaccagcugguuaaucuccacgacuuccgcagcgaugagauugagcaucuggugguggaggaacuugucaaaaagagagaagagugccuggacgcccucgaauccaucaugaccacaaaaagcgugucuuuucggcgccugucccaccuuagaaagcugguucccggcuucgggaaggcuuacaccauuuucaacaaaacacucauggaggccgaugcucauuauaagagcgugcggaccuggaaugagaucauccccucuaaaggaugccugcgcgucggcgggagaugucacccucacgugaacggaguguuuuucaauggcauuauccuggggccggacggacauguucucauucccgaacggcagagcucccugcuucagcaacacauggagcugcucgaaucuagcgucaucccucugaugcauccccuugccgauccuuccacgguguuuaaggacgaugacgaggcggaagauuucgucgaggugcaucugcccgacguucacaaacaggugagcggcgucgaucucggccugccgucuugggggaaguacgugcugauguccgccggaguucucacagcucugaugcuuaugauuuuucugaugaccugcuguagacgcgccaaccgggcugagagcgcccagcacucucucggcgaaagagggcgcaagguguccgucaccagccaguccggacgggugaucucuagcugggaguccuauaaaucuggcggggaaacaaagcuguga

SEQ ID NO: 222793 - RNA, 1575 nt, Artificial Sequence
  derived and/or modified CDS sequence (opt5) from glycoprotein__RABV__AB564016.1
augaacccccaggcccugauguucgugccucuccugggcuuuagccuuugcuucgggaaguuuccgaucuacaccauucccgacaaacugggaccuuggucccccaucgauauucaccaucucucuuguccuaauaaccuggucguugaggacgaaggcugcacaaaucuuagcggguucuccuauauggagcugaaggugggauacaucucugcuauuaaagugaacggcuuuacguguaccggggucgugacagaagccgagaccuauacaaauuucguuggauacgugaccacaaccuuuaagagaaaacacuuccggcccacgccugaugcgugccgcgcugccuauaacuggaagauggccggcgacccgagauacgaagagagccuccauaaucccuauccugauuaccacuggcugcggaccgucaagacaaccaaagagucccuggugaucaucucucccagcguugcugaccucgauccuuacgacaagucccugcauagccgcguguuucccucuggcaaauguuccgggauuacagucagcucuaccuauugcuccacgaaccacgauuacacaaucuggaugccggaaaauccuagacuuggaaccagcugugacauuuucacaaacucucggggcaagcgcgccuccaaagggagcaagaccugcggauuuguggaugagagaggccuguauaagucccucaaaggggcuuguaagcugaaacuuugcggagugcugggccuccggcugauggacggcaccugggccgcgauccaaacaucugaugaaacgaaguggugucccccugaccagcuggucaaucuccacgacuuccgcagcgaugagauugagcaucugguuguggaggaacuugugaaaaagagagaagagugccuggacgcccucgaauccaucaugaccacaaaaagcgucucuuuucggcgccugucccaccuuagaaagcuggugcccggguucggaaaggcuuacaccauuuucaacaaaacacucauggaggccgaugcucauuauaagagcguucggaccuggaaugagaucauccccucuaaaggcugccugcgcgucgggggaagaugucacccucacgugaacggcguguuuuucaaugggauuauccugggaccggacggccauguucucauucccgaaaugcagagcucccugcuucagcaacacauggagcugcucgaaucuagcgugaucccucugaugcauccccuugccgauccuuccacggucuuuaaggacgaugacgaggcggaagauuucguggagguccaucugcccgacgugcacaaacagguuagcggcguggaucucgggcugccgucuuggggaaaguacguccugauguccgccggcgugcucacagcucugaugcuuaugauuuuucugaugaccugcugucggagagccaaccgcgcugagagcgcccagcacucucucggggaacggggaagaaagguuuccgugaccagccaguccggccgcgucaucucuagcugggaguccuauaaaucugggggcgaaacaaagcuguga

SEQ ID NO: 222794 - RNA, 1575 nt, Artificial Sequence
  derived and/or modified CDS sequence (opt5) from glycoprotein__RABV__AB564017.1
augaacccccaggcccugauguucgugccucuccuggucuuuagccuuugcuucggcaaguuuccgaucuacaccauucccgacaaacuggggccuuggucccccaucgauauucaccaucucucuuguccuaauaaccugguuguggaggacgaaggaugcacaaaucuuagcggcuucuccuauauggagcugaaggugggguacaucucugcuauuaaagucaacggauuuacguguaccggcgugguuacagaagccgagaccuauacaaauuucgugggguacgucaccacaaccuuuaagagaaaacacuuccggcccacgccugaugcgugccgcgcugccuauaacuggaagauggccggagacccgagauacgaagagagccuccauaaucccuauccugauuaccacuggcugcggaccgugaagacaaccaaagagucccugguuaucaucucucccagcguggcugaccucgauccuuacgacaagucccugcauagccgcgucuuucccucuggcaaauguuccggcauuacagugagcucuaccuauugcuccacgaaccacgauuacacaaucuggaugccggaaaauccuagacuugggaccagcugugacauuuucacaaacucucggggaaagcgcgccuccgagggcagcaaaaccugcggguuuguggaugaaagaggacuguauaagucccucaagggcgcuuguaaacugaagcugugcgggguccugggacuccggcugauggacggcaccugggccgcgauccaaacaucugaugagacgaaauggugucccccugaccagcugguuaaucuccacgacuuccgcagcgaugagauugaacaucuggugguggaggaacuugucaagaaaagagaggaaugccuggacgcccucgaguccaucaugaccacaaagagcgugucuuuucggcgccugucccaccuuagaaaacugguucccggcuucgggaaggcuuacaccauuuucaacaagacacucauggaggccgaugcucauuauaaaagcgugcggaccuggaaugaaaucauccccucuaagggaugccugcgcgucggcgggagaugucacccucacgugaacggaguguuuuucaauggcauuauccuggggccggacggacaugugcucauucccgagaugcagagcucccugcuucagcaacacauggaacugcucgagucuagcgucaucccucugaugcauccccuugccgauccuuccacgguguuuaaagacgaugacgaagcggaggauuucgucgaggugcaccuucccgacguucauaagcagguuagcggcgucgaucucggccugccgucuugggggaaauacgugcugauguccgccggaguucucacagcucugaugcuuaugauuuuucugaugaccugcugucggagagccaaccgcgcugaaagcgcccagcacucucucggcgagcgggggagaaagguguccgucaccagccaguccggacgcgugaucucuagcugggaauccuauaagucuggcggggagacaaaacuguga

SEQ ID NO: 222795 - RNA, 1575 nt, Artificial Sequence
  derived and/or modified CDS sequence (opt5) from glycoprotein__RABV__AB569299.1
auggugccccaggcccugcuguucgucccucugcuuguuuuuagccugugcuucggcaaguuuccgaucuacaccauucccgacaaacucgggccuuggucccccaucgauauucaccaucugucuuguccuaacaaucuugugguggaggacgaaggaugcacaaaccugagcggcuucuccuauauggagcucaaggucggguacaucucugcuauuaaagugaauggauuuacguguaccggcguugugacagaagccgagaccuauacaaacuucgucggguacgugaccacaaccuuuagacggaagcacuuccgccccacgccugaugcgugcagagcugccuauaauuggaaaauggccggagacccgcgguacgaagagagccugcauaaccccuauccugauuaccacuggcugcgcaccguuaagacaaccaaggagucccucgugaucaucucucccagcgucgcugaccuggauccuuacgacaaaucccuucauagcagaguguuucccggcggcaaguguucugggauuacaguguccagcaccuauugcucuacgaaucacgauuacacaaucuggaugccggaaaacccucggcugggaaccuccugugacauuuucgucaauagccgcggcaaaagagccucuaaagggggaaagacaugcggcuuuguugaugagcgggggcucuauaagucccugaagggagcuuguaaacuuaagcugugcggcgugcccggccuccgccugauggacgggaccuggguggccauccaaaccagcgaugaaacaaaaugguguccucccgaccagcuggucaaccuccacgacuucagauccgaugagauugagcaucuggugguugaggaacuugugaagaaacgggaagagugccuggacgcgcucgaaucuaucaugacgaccaagagcgucuccuuucgcagacugagccaccuucggaaacuggugcccggauucggcaaggccuacacaauuuucaauaagacccucauggaggcugaugcccauuauaaaucuguucgcacauggaacgagaucaucccuuccaaggggugccugagagugggaggccggugucacccgcacgucaaugggguguuuuucaacggaauuauccugggccccgacggccauguccucauuccugaaaugcagagcucucugcuucagcaacacauggagcugcucgaaagcuccgugaucccccugaugcauccucuugcugaucccucuaccguuuuuaaagacggggaugaggccgaagacuucguggagguccaccucccggaugugcauaagcucauuagcggaguugaccugggccugccuuccugggggaaauacgugcucaugagcgcgggaauccugaucacgcuuaugcugaugauuuuucucaugacaugcuguagacgcgucaaucaggccggcucuaagcagcacgggcuggagggcgcuggacggaagguguccgugaccagccagaacggcagaguuaucucuuccugggaaagcuauaaaaacgggggagagacccgccuguga

SEQ ID NO: 222796 - RNA, 1575 nt, Artificial Sequence
  derived and/or modified CDS sequence (opt5) from glycoprotein__RABV__AB608731.1
augaucccccaggcccuccuguucgugccucugcuuauuccgagccugugcaucggcgaguuucccauuuacaccaucccugacaagcucgggcccuggacaccuauugauauccaccaucuguccugucccaacaaucuugucgcugaaaacgacggaugcacgucucugagcggcuucuccuauauggagcucaaaguuggguacaucucugccauuaaggugaauggauuuaccuguacaggcguggucaccgaagcggagacauauaccaacuucgugggguacguuacaaccacguuuaaaagaaagcacuuccggccuaugccggaugcuugccgcgccgcccaugacuggaaaauggcuggagaucccagauaugaagacagccugcaaaauccuuaccccgauuaucacuggcugcggaccgugaagacaaccaaggagucccucgucaucauuucuccuagcguggccgaccuggaucccuacgacaaaucccuucauagccgcguuuuuccgucuggcaagugucugggcaucacaguguccagcaccuacugcucuacgaaccacgauuauacaauuuggaugccugucgagcccagacucgggaccuccugugacaucuucacaaauagccggggcaaaaaggcuucuaaaggagggcgcgugugcggauuuguggaugaaagaggccuguacaagucccuuaagggggccuguaaacugaagcucugcggagucccuggcauucggcugauggacggcaccuggguuagcauccagaccuccgaggacaucaaaugguguccucccgaucgccuggugaaccuccacgacuuccauucugaugaacuggagcaccuuguggucgaggaacugauuaagagacgggagaauugccucgacgcgcuggaaagcaucgugacaacgaaauccguuagcuuucgcagacuuucucaucugcggaagcucgugcccggguucggaaaagccuauaccauuuuuaacaagacacugauggaggcugaugcccacuacaaguccgucaaaaccuggaaugaagugaucccgagcaagggcugccuggagguugggggaaaaugucaucccccugugaacggcgucuucuucaaugggauuauccucggacccgacggcaacgugcugaucccugagaugcagucuagccuucugcagcaacacauggaacuccuggaguccucugucauuccccuuaugcacccgcuggcugauccuagcacaguguuuaaggaaggcgacgaggccgaagauuucguugaggugcaucuccccgacguccacaaacagguguccgauguugaccuggggcugccuagcuggggaaaguaucuccugaugucugcgggcgcccuugcuauccugauucucgccaucgugcugauuaucugcugucgcagagucaauaagaccggguccacgcagcggggacauagagagagccgcggcaaaaugucuguggcuccccagaacgggaagaucauuuccagcugggaacuguacaaauccgagucugaaacaggccuuuga

SEQ ID NO: 222797 - RNA, 1575 nt, Artificial Sequence
  derived and/or modified CDS sequence (opt5) from glycoprotein__RABV__AB635373.1
auggugccccaggcccuccuguucgucccucugcuuguuuuuagccugugcuucggcaaguuuccgaucuacaccauucccgacaaacucgggccuuggucccccaucgauauucaccaucugucuuguccuaacaaucuugugguggaggacgaaggaugcacaaaccugagcggcuucuccuauauggagcucaaggucggguacaucucugcuauuaaagugaauggauuuacguguaccggcguugugacagaagccgagaccuauacaaacuucgucggguacgugaccacaaccuuuagacggaagcacuuccgccccacgccugaugcgugcagagcugccuauaauuggaaaauggccggagacccgcgguacgaagagagccugcauaaccccuauccugauuaccacuggcugcgcaccguuaagacaaccaaggagucccucgugaucaucucucccagcgucgcugaccuggauccuuacgacaaaucccuucauagcagaguguuucccggcggcaaguguucugggauuacaguguccagcaccuauugcucuacgaaucacgauuacacaaucuggaugccggaaaacccucggcugggaaccuccugugacauuuucaucaauagccgcggcaaaagagccucuaaagggggaaagacaugcggcuuugucgaugagcgggggcucuauaagucccugaagggagcuuguaaacuuaagcugugcggcguucccggccuccgccugauggacgggaccuggguggccauucaaaccagcgaugaaacaaaaugguguccucccgaccagcuggugaaccuccacgacuuccauuccgaugagaucgagcaccuggucguggaggaacuuguuaagaaaagagaagagugccuggacgcgcucgaaucuauuaugacgaccaagagcguguccuuucggcgccugagccaucuuagaaaacugguccccggauucggcaaggccuacacaaucuucaauaagacccucauggaggcugaugcccacuauaaaucugugcggacauggaacgagaucauuccuuccaaggggugccugcgcguuggaggcagaugucacccgcaugugaauggggucuuuuucaacggaaucauucugggccccgacggccacgugcucaucccugaaaugcagagcucucugcuucagcaacauauggagcugcucgaaagcuccgucauuccccugaugcacccucuugcugaucccucuaccguguuuaaagacggggaugaggccgaagacuucguugaggugcaucugccggauguccacaagcucaucagcggaguggaccugggccugccuuccugggggaaauacguucucaugagcgcgggaauccugacgacacuuaugcugaugauuuuucucaugaucugcugucggagagugaaucagaccggcucuaagcagcacgggcugggcggagccggccgcaaggucuccgugaccagccagaacgggcgggugauuucuuccugggagagcuauaaauccggaggcgaaacaagacuguga

SEQ ID NO: 222798 - RNA, 1575 nt, Artificial Sequence
  derived and/or modified CDS sequence (opt5) from glycoprotein__RABV__AB645847.1
auggugccccaggcccugcucgucguuccucugcuuggcuucagccugugcuuugggaaguucccgaucuacaccauucccgacaaacucggaccuuggucccccaucgauauucaccaucugucuuguccuaacaaucuugugguggaggacgaaggcugcacaaaccugagcggguuuuccuauauggagcucaaggucggauacaucucugcuauuaaagugaauggcuucacguguaccgggguugugacagaagccgagaccuauacaaacuuugucggauacgugaccacaaccuucaagagaaaacacuuucggcccacgccugaugaaugccgcgcggcuuauaauuggaagauggccggcgacccgagauacgaggagagccugcauaaccccuauccugauuaccacuggcugcggaccguuaagacaaccaaagaaucccucgugaucaucucucccagcgucgccgaccuggauccuuacgacaagucccuucauagccgcguguuccccucuggcaaauguuccgggauuacagugagcucuaccuauugcuccacgaaucacgauuacacaaucuggaugccggagaacccuagacugggaaccagcugugacauuuuuacaaauucucggggcaagcgcgcuuccaaagggagcaagaccugcggauucgucgaugaaagaggccucuauaagucccugaaaggggccuguaagcugaaacugugcggaguucucggccugaagcugauggacggcaccuggguggcuaugcaaacaucugaugagacgaaauggugucccccugaccagcucgugaaccugcacgacuuucggagcgaugagaucgaacaucuugucguggaggaccugguuaagaaacgcgaagagugccucgaugcccuggaauccauuaugaccacaaagagcgugucuuucagacggcuuucccaccuucgcaagcucguccccggguuuggaaaagcguacaccaucuucaauaagacacugauggaggccgacgcucauuauaaaagcgugagaaccuggaacgagguuauucccucuaagggcugccugaaagucgggggacggugucacccucacgugaauggcguguucuuuaacggggucauccucggaccggauggccaugugcugauccccgaaaugcagagcucccuucugcgccagcacauggagcuccuggaaucuagcguuauuccucuuaugcauccccuggccgacccuuccacgguguucaaggauggcgacgaggcugaagauuuugucgaggugcaccuccccgacguucauaagcaagugagcggggucgaucugggacugccgaauuggggcaaauacgugucucucuccgccggggcgcugaucgcccuuaugcugaugauuuuccucaugacaugcuguagaaaggugaaccggccugagcccacccagagaagccuggaaggaaaaggccgcaagguuucugucaccucccagagcgggaaagugaucuccucuugggagagcuauaaguccggcggagaaacaucucuguga

SEQ ID NO: 222799 - RNA, 1575 nt, Artificial Sequence
  derived and/or modified CDS sequence (opt5) from glycoprotein__RABV__AB683584.1
augaucccccaggcccuucucuucgugccucugcuugucuuuagccugugcuucggcaaguuuccgauuuacaccauccccgacaaacucgggccuuggucccccauugauauccaccaucugucuuguccuaacaaucuuguuguggaggacgaaggaugcacaaaccugagcggcuucuccuauauggagcucaaggugggguacauuucugcuaucaaagucaauggauuuacguguaccggcgugguuacagaagccgagaccuauacaaacuucgugggguacgucaccacaaccuuuaagagaaaacacuuccggcccacgccugaugcgugccgcgcugccuauaauuggaagauggccggagacccgagauacgaagagagccugcauaaccccuauccugauuaccacuggcugcggaccgugaagacaaccaaagagucccucguuaucauuucucccagcguggcugaccuggauccuuacgacaagucccuucauagccgcgucuuucccucuggcaaauguuccggcaucacagugagcucuaccuauugcuccacgaaucacgauuacacaauuuggaugccggaaaacccuagacuggggaccagcugugacaucuucacaaauucucggggaaagcgcgccuccaaaggcagcaagaccugcggguuuguggaugagagaggacucuauaagucccugaaaggcgcuuguaagcugaaacugugcgggguccucggacugcggcugauggacggcaccugggccgcgauucaaacaucugaugaaacgaaguggugucccccugaccagcucguuaaccugcacgacuuccgcagcgaugagaucgagcaucuugugguggaggaacuggucaaaaagagagaagagugccucgacgcccuggaauccauuaugaccacaaaaagcgugucuuuucggcgccuuucccaccugagaaagcucguucccggcuucgggaaggcuuacaccaucuucaauaaaacacugauggaggccgaugcucauuauaagagcgugcggaccuggaacgagaucauucccucuaaaggaugccugcgcgucggcgggagaugucacccucacgugaauggaguguuuuucaacggcaucauucucgggccggacggacauguucugauccccgaaaugcagagcucccuucugcagcaacacauggagcuccuggaaucuagcgucauuccucuuaugcauccccuggccgauccuuccacgguguuuaaggacgaugacgaggcggaagaguucgucgaggugcaccuccccgauguucauaaacaggugagcggcgucgaccugggccugccgucuugggggaaguacgugcucauguccgccggaguucugacagcucuuaugcugaugaucuuucucaugaccugcugucggagagccaaucgcguggaaagcgcucagcacucucugggcgagcgggggagaaaggucuccgugaccagccaguccggacgcgugaucucuagcugggaauccuauaaaucuggcggggagacaaagcuguga

SEQ ID NO: 222800 - RNA, 1575 nt, Artificial Sequence; identical to SEQ ID NO: 222697
  derived and/or modified CDS sequence (opt5) from glycoprotein__RABV__AB683585.1

SEQ ID NO: 222801 - RNA, 1575 nt, Artificial Sequence
  derived and/or modified CDS sequence (opt5) from glycoprotein__RABV__AB683586.1
augaucccccaggcccuucucuucgugccucugcuugucuuuagccugugcuucggcaaguuuccgauuuacaccauccccgacaaacucgggccuuggucccccauugauauccaccaucugucuuguccuaacaaucuuguuguggaggacgaaggaugcacaaaccugagcggcuucuccuauauggagcucaaggugggguacauuucugcuaucaaagucaauggauuuacguguaccggcgugguuacagaagccgagaccuauacaaacuucgugggguacgucaccacaaccuuuaagagaaaacacuuccggcccacgccugaugcgugccgcgcugccuauaauuggaagauggccggagacccgagauacgaagagagccugcauaaccccuauccugauuaccacuggcugcggaccgugaagacaaccaaagagucccucguuaucauuucucccagcguggcugaccuggauccuuacgacaagucccuucauagccgcgucuuucccucuggcaaauguuccggcaucacagugagcucuaccuauugcuccacgaaucacgauuacacaauuuggaugccggaaaacccuagacuggggaccagcugugacaucuucacaaauucucggggaaagcgcgccuccaaaggcagcaagaccugcggguuuguggaugagagaggacucuauaagucccugaaaggcgcuuguaagcugaaacugugcgggguccucggacugcggcugauggacggcaccugggccgcgauucaaacaucugaugaaacgaaguggugucccccugaccagcucguuaaccugcacgacuuccgcagcgaugagaucgagcaucuugugguggaggaacuggucaaaaagagagaagagugccucgacgcccuggaauccauuaugaccacaaaaagcgugucuuuucggcgccuuucccaccugagaaagcucguucccggcuucgggaaggcuuacaccauccugaauaaaacacugauggaggccgaugcucauuauaagagcgugcggaccuggaacgagaucauucccucuaaaggaugccuccgcgucggcgggagaugucacccucacgugaauggaguuuucuuuaacggcaucauucuggggccggacggacaugugcuuauccccgaaaugcagagcucccugcuccagcaacacauggagcugcuugaaucuagcgucauuccucugaugcauccccucgccgauccuuccacgguguucaaggacgaugacgaggcggaagauuuugucgaggugcaccuucccgacguucauaaacaggugagcggcgucgaucugggccucccgucuugggggaaguacgugcugauguccgccggaguucuuacagcucugaugcucaugaucuuccugaugaccugcugucggagagccaaucgcgcugagagcgcccagcacucucugggcgaaggggagcggaagguguccgucaccagccaguccggaagagugaucucuagcugggaauccuauaaaucuggcggggagacaaagcuguga

SEQ ID NO: 222802 - RNA, 1575 nt, Artificial Sequence
  derived and/or modified CDS sequence (opt5) from glycoprotein__RABV__AB683587.1
augaucccccaggcccuucucuucgugccucugcuugucuuuagccugugcuucggcaaguuuccgauuuacaccauccccgacaaacucgggccuuggucccccauugauauccaccaucugucuuguccuaacaaucuuguuguggaggacgaaggaugcacaaaccugagcggcuucuccuauauggagcucaaggugggguacauuucugcuaucaaagucaauggauuuacguguaccggcgugguuacagaagccgagaccuauacaaacuucgugggguacgucaccacaaccuuuaagagaaaacacuuccggcccacgccugaugcgugccgcgcugccuauaauuggaagauggccggagacccgagauacgaagagagccugcauaaccccuauccugauuaccacuggcugcggaccgugaagacaaccaaagagucccucguuaucauuucucccagcguggcugaccuggauccuuacgacaagucccuucauagccgcgucuuucccucuggcaaauguuccggcaucacagugagcucuaccuauugcuccacgaaucacgauuacacaauuuggaugccggaaaacccuagacuggggaccagcugugacaucuucacaaauucucggggaaagcgcgccuccaaaggcagcaagaccugcggguuuguggaugagagaggacucuauaagucccugaaaggcgcuuguaagcugaaacugugcgggguccucggacugcggcugauggacggcaccugggccgcgauucaaacaucugaugaaacgaaguggugucccagcgaccagcucguuaaccugcacgacuuccgcuccgaugagaucgagcaucuugugguggaggaacuggucaaaaagagagaagagugccucgacgcccuggaaagcauuaugaccacaaaaucuguguccuuucggcgccuuagccaccugagaaagcucguuccuggcuucgggaaggcuuacaccaucuucaauaaaacacugauggaggccgaugcucauuauaagucugugcggaccuggaacgagaucauucccagcaaaggaugccugcgcgucggcgggagaugucacccccacgugaauggaguguuuuucaacggcaucauucucgggccugacggacauguucugaucccggaaaugcaguccucucuucugcagcaacacauggagcuccuggaaagcuccgucauuccccuuaugcauccucuggccgaucccagcacgguguuuaaggacgaugacgaggcggaagauuucgucgaggugcaccucccugacguucauaaacaggugucuggcgucgaucugggccugcccuccugggggaaguacgugcucaugagcgccggaguucugacagcucuuaugcugaugaucuuucucaugaccugcugucggagagccaaucgcgcugagucugcccagcacucccugggcgaacgggggagaaaggugagcgucaccucccagucuggacgcgugaucagcuccugggagucuuauaaaagcggcggggaaacaaagcuguga

SEQ ID NO: 222803 - RNA, 1575 nt, Artificial Sequence
  derived and/or modified CDS sequence (opt5) from glycoprotein__RABV__AB683589.1
augaacccccaggcccugauguucgugccucuccuggucuuuagccuuugcuucggcaaguuuccgaucuacaccauucccgacaaacuggggccuuggucccccaucgauauucaccaucucucuuguccuaauaaccugguuguggaggacgaaggaugcacaaaucuuagcggcuucuccuauauggagcugaaggugggguacaucucugcuauuaaagucaacggauuuacguguaccggcgugguuacagaagccgagaccuauacaaauuucgugggguacgucaccacaaccuuuaagagaaaacacuuccggcccaugccugaugcgugccgcgcugccuauaacuggaagauggccggagacccgagauacgaagagagccuccauaaucccuauccugauuaccacuggcugcggacggugaagaccacaaaagagucccugguuaucaucucucccagcguggcugaccucgauccuuacgacaagucccugcauagccgcgucuuucccucuggcaaauguuccggcauuaccgugagcucuacauauugcuccaccaaccacgauuacacgaucuggaugccggaaaauccuagacuugggacaagcugugacauuuucaccaacucucggggaaagcgcgccuccaaaggcagcaagacaugcggguuuguggaugagagaggacuguauaagucccucaaaggcgcuuguaagcugaaacuuugcgggguccugggacuccggcugauggacggcaccugggccgcgauccaaaccucugaugaaacaaaguggugucccccugaccagcugguuaaucuccacgacuuccgcagcgaugagauugagcaucuggugguggaggaacuugucaaaaagagagaagagugccuggacgcccucgaauccaucaugacgaccaaaagcgugucuuuucggcgccugucccaccuuagaaagcugguucccggcuucgggaaggcuuacacaauuuucaacaaaacccucauggaggccgaugcucauuauaagagcgugcggacauggaaugagaucauccccucuaaaggaugccugcgcgucggcgggagaugucacccucacgugaacggaguguuuuucaauggcauuauccuggggccggacggacauguucucauucccgaaaugcagagcucccugcuucagcaacacauggagcugcucgaaucuagcgucaucccucugaugcauccccuugccgauccuuccaccguguuuaaggacgaugacgaggcggaagauuucgucgaggugcaucugcccgacguucacaaacaggugagcggcgucgaucucggccugccgucuugggggaaguacgugcugauguccgccggaguucucacggcucugaugcuuaugauuuuucugaugacaugcugucggagagccaaccgcgcugagagcgcccagcacucucucggcgaacgggggagaaagguguccgucaccagccaguccggacgcgugaucucuagcugggaguccuauaaaucuggcggggaaaccaagcuguga

SEQ ID NO: 222804 - RNA, 1575 nt, Artificial Sequence; identical to SEQ ID NO: 222673
  derived and/or modified CDS sequence (opt5) from glycoprotein__RABV__AB683591.1

SEQ ID NO: 222805 - RNA, 1575 nt, Artificial Sequence
  derived and/or modified CDS sequence (opt5) from glycoprotein__RABV__AB699208.1
auggugccccagguccugcuguucguuccucugcuuguguuuagcaugugcuucggcaaguuuccgaucuacaccauucccgacaaacuggggccuuggucccccaucgauauucaccaucucucuuguccuaacaaucugguggucgaggacgaaggaugcacaaaccuuagcggcuucuccuauauggagcugaaggugggguacaucucugccauuaaaguuaauggauuuacguguaccggcguggucacagaagcugagaccuauacaaacuucgugggguacguuaccacaaccuuuaagagaaaacacuuccggcccacgccugaugccugccgcgcggcuuauaauuggaagauggccggagacccgagauacgaagagagccuccauaaccccuauccugauuaccacuggcugcggaccgugaagacaaccaaagagucccuggucaucaucucucccagcguggccgaccucgauccuuacaauaagucccugcauagccgcguguuucccucuggcaaauguuccggcauuacaaucagcucuaccuauugcgcuacgaaccacgacuacacaauuuggaugccggaaaauccuagacuugggaccuccugugauaucuucacaaacagccggggaaagcgcgccucuaaaggcgggaagaccugcggauuugucgacgagagaggccuguauaagucccucaaaggggcuuguaagcugaaacuuugcggaguucugggccuccggcugauggauggcaccuggguggccaugcaaacaagcgacgaaacgaaguggugucccccugaucagcuggugaaucuccacgacuuccgcuccgacgagauugagcaucuggucguggaggaacuuguuaaaaagagagaagagugccuggaugcgcucgaaucuaucaugaccacaaaaagcguguccuuucggcgccugagccaccuuagaaagcugguccccggguucggaaaggccuacaccauuuucaacaaaacacucauggaggcugacgcccauuauaagucuauccggaccuggaaugagaucauucccuccaaaggcugccugcgcguugggggaagaugucacccucacgugaacggcguguuuuucaaugggaucauucugggaccggauggccauguccucauccccgaaaugcagagcucucugcuucagcaacacauggagcugcucgaaagcuccgugauuccucugaugcauccccuugcugacccuucuacggucuuuaaggauggcgacgaggccgaagauuucguggagguucaccuccccgacgugcauaaacagaucagcggggucgaucucggacugccguccuggggcaaguacgugcugguuagcgcgggggugcucgucgugcugaugcuuacaaucuuuauuaugaccugcuguggacgggugagacgcccuaagucuacccagcacucccugggcggggccggccggaaaguuagcgucacaucucaguccggaaaggugaucagcuccugggagucuuauaaaaacggcggggaaaccagacucuga

SEQ ID NO: 222806 - RNA, 1575 nt, Artificial Sequence
  derived and/or modified CDS sequence (opt5) from glycoprotein__RABV__AB699209.1
auggugccccagguccugagcuucguuccucuccugguguuuucuaccugcuucggcaaguuuccgaucuacacaauucccgacaaacuugggccuuggucccccaucgauauucaccaucugagcuguccuaacaaucucguggucgaggacgaaggaugcacgaaccuguccggcuucucuuauauggagcuuaaggugggguacaucagcgccauuaaaguuaauggauuuaccuguacaggcguggucaccgaagcugagacauauaccaacuucgugggguacguuacaaccacguuuaagagaaaacacuuccggcccaccccugaugccugccgcgcggcuuauaauuggaagauggccggagacccgagauacgaagagucccugcauaaccccuauccugauuaccacuggcuccggacagugaagaccacaaaagagucucuggucaucaucagccccaauguggccgaccuggauccuuacaacaagucccuccauagccgcguguuucccucuggcaaauguuccggcauuaccaucagcucuacguauugcuccacaaaucacgacuacaccauuuggaugccggaaaacccuagacuggggacaagcugugauaucuucaccaauucucggggaaagcgcgcuuccaaaggcgggaagaccugcggauuugucgacgagagaggccuuuauaagagccugaaaggggccuguaagcucaaacugugcggaguucuuggccugcggcucauggauggcacauggguggcuaugcaaacguccgacgaaaccaaguggugucccccugaucagcuggugaaccugcacgacuuccgcucugacgagauugagcaucucgucguggaggaacugguuaaaaagagagaagagugccuugaugcccuggaaagcaucaugacaaccaaauccgugagcuuucggcgccucucucaccugagaaaacuuguccccggguucggaaaggcguacacaauuuucaauaagacccugauggaggccgacgcucauuauaaguccgugcggacguggaacgagaucauccccagcaaaggcugccuccgcguugggggaagaugucacccucacgugaauggcgucuuuuucaacgggauuauccugggaccggauggccaugugcugauucccgaaaugcagucuagccuccugcagcaacacauggagcuucuggaauccucugucaucccucucaugcauccccuggccgacccuagcacaguguuuaaggauggcgacgaggcugaagauuucguugaggugcaccuucccgacguccauaaacagauuuccgggguggaucugggacucccgagcuggggcaaguacguucuggugucugccgggguccugguggugcucaugcugaccaucuuuaucaugaccugcuguggaaagguucggagaccuaaauccacacagcacagccuuggcgggaccggccgcaaggucucugugacaucccagagcggaaaagugauuuccucuugggagagcuauaaguccggcggggaaacgcggcuguga

SEQ ID NO: 222807 - RNA, 1575 nt, Artificial Sequence
  derived and/or modified CDS sequence (opt5) from glycoprotein__RABV__AB699210.1
auggugccccagguccugagcuucguuccucuccugguguuuucuaccugcuucggcaaguuuccgaucuacacaauucccgacaaacuugggccuuggucccccaucgauauucaccaucugagcuguccuaacaaucucguggucgaggacgaaggaugcacgaaccuguccggcuucucuuauauggagcuuaaggugggguacaucagcgccauuaaaguuaauggauuuaccuguacaggcguggucaccgaagcugagacauauaccaacuucgugggguacguuacaaccacguuuaagagaaaacacuuccggcccaccccugaugccugccgcgcggcuuauaauuggaagauggccggagacccgagauacgaagagucccugcauaaccccuauccugauuaccacuggcuccggacagugaagaccacaaaagagucucuggucaucaucagccccuccguggccgaccuggauccuuacaauaagagccuccauucucgcguguuucccuccggcaaauguagcggcauuaccaucucuuccacguauugcagcacaaaccacgacuacaccauuuggaugccggaaaauccuagacuggggacaucuugugauaucuucaccaacucccggggaaagcgcgcuagcaaaggcgggaagaccugcggauuugucgacgagagaggccuuuauaagucccugaaaggggccuguaagcucaaacugugcggaguucuuggccugcggcucauggauggcacauggguggcuaugcaaacgucugacgaaaccaaguggugucccccugaucagcuggugaaucugcacgacuuccgcagcgacgagauugagcaucucgucguggaggaacugguuaaaaagagagaagagugccuugaugcccuggaauccaucaugacaaccaaaagcgugucuuuucggcgccucucccaccugagaaaacuuguccccggguucggaaaggcguacacaauuuucaacaagacccugauggaggccgacgcucauuauaagagcgugcggacguggaaugagaucauccccucuaaaggcugccuccgcguugggggaagaugucacccucacgugaacggcgucuuuuucaaugggauuauccugggaccggauggccaugugcugauucccgaaaugcagagcucccuccugcagcaacacauggagcuucuggaaucuagcgucaucccucucaugcauccccuggccgacccuuccacaguguuuaaggauggcgacgaggcugaagauuucguugaggugcaccuucccgacguccauaaacagauuagcgggguggaucugggacucccgucuuggggcaaguacguucugguguccgccgggguccugguggugcucaugcugaccaucuuuaucaugaccugcuguggacggguuagacgcccuaagagcacacagcacucucuuggcgggaccggccggaaagucuccgugacaagccaguccggaaaggugauuucuagcugggaguccuauaaaucuggcggggaaacgagacuguga

SEQ ID NO: 222808 - RNA, 1575 nt, Artificial Sequence
  derived and/or modified CDS sequence (opt5) from glycoprotein__RABV__AB699212.1
auggugccccagguccugagcuucguuccucuccugguguuuucuaccugcuucggcaaguuuccgaucuacacaauucccgacaaacuugggccuuggucccccaucgauauucaccaucugagcuguccuaacaaucucguggucgaggacgaaggaugcacgaaccuguccggcuucucuuauauggagcuuaaggugggguacaucagcgccauuaaaguuaauggauuuaccuguacaggcguggucaccgaagcugagacauauaccaacuucgugggguacguuacaaccacguuuaagagaaaacacuuccggcccaccccugaugccugccgcgcggcuuauaauuggaagauggccggagacccgagauacgaagagucccugcauaaccccuauccugauuaccacuggcuccggacagugaagaccacaaaagagucucuggucaucaucagccccuccguggccgaccuggauccuuacgacaagagccuccauucucgcguguuucccuccggcaaauguagcggcauuaccaucucuuccacgugcuguagcacaaaucacgauuauaccauuuggaugccggaaaacccuagacuggggacaucuugcgacaucuucaccaauucccggggaaagcgcgcuagcaaaggcgggaagaccuguggauuugucgaugagagaggccuuuacaagucccugaaaggggccugcaagcucaaacuguguggaguucuuggccugcggcucauggacggcacauggguggcuaugcaaacgucugaugaaaccaaguggugucccccugaccagcuggugaaccugcacgacuuccgcagcgaugagauugagcaucucgucguggaggaacugguuaaaaagagagaagagugccuugacgcccuggaauccaucaugacaaccaaaagcgugucuuuucggcgccucucccaccugagaaaacuuguccccggguucggaaaggcguauacaauuuucaauaagacccugauggaggccgaugcucauuacaagagcgugcggacguggaacgagaucauccccucuaaaggcugccuccgcguugggggaagaugccacccucacgugaauggcgucuuuuucaacgggauuauccugggaccggacggccaugugcugauucccgaaaugcagagcucccuccugcagcaacacauggagcuucuggaaucuagcgucaucccucucaugcauccccuggccgauccuuccacaguguuuaaggacggcgaugaggcugaagacuucguugaggugcaccuucccgauguccauaaacagauuagcgggguggaccugggacucccgucuuggggcaaguauguucugguguccgccgggguccugguggugcucaugcugaccaucuuuaucaugaccuguugcggacggguuagacgcccuaagagcacacagcacucucuuggcgggaccggccggaaagucuccgugacaagccaguccggaaaggugauuucuagcugggaguccuacaaaucuggcggggaaacgagacuguga

SEQ ID NO: 222809 - RNA, 1575 nt, Artificial Sequence; identical to SEQ ID NO: 222807
  derived and/or modified CDS sequence (opt5) from glycoprotein__RABV__AB699213.1

SEQ ID NO: 222810 - RNA, 1575 nt, Artificial Sequence
  derived and/or modified CDS sequence (opt5) from glycoprotein__RABV__AB733961.1
augaucccccaggcccuucucuucgugccucugcuugucagcucccugugcuuuggcaaguucccgauuuacaccauccccgacaaacucgggccuuggucucccauugauauccaccaucugagcuguccuaacaaucuuguuguggaggacgaaggaugcacaaaccuguccggcuuuucuuauauggagcucaaggugggguacauuagcgcuaucaaagucaauggauucacguguaccggcgugguuacagaagccgagaccuauacaaacuuugugggguacgucaccacaaccuucaagagaaaacacuuucggcccacgcuggaugcgugccgcgcugccuauaauuggaagauggccggagacccuagauacgaagagucccugcauaacccguaucccgauuaccacuggcuccggaccgugaagacaaccaaagagucucugguuaucauuagcccuuccguggcugaccuugaucccuacgacaagagccugcauucucgcgucuucccuuccggcaaauguagcggcaucacagugucuuccaccuauugcagcacgaaucacgauuacacaauuuggaugcccgaaaacccgagacucgggaccucuugugacaucuuuacaaauucccggggaaagcgcgccagcaaaggcuccaagaccugcggguucguggaugagagaggacuguauaagucucuuaaaggcgcuuguaagcugaaacucugcgggguccugggacugcggcucauggacggcaccugggccgcgauucaaacaagcgaugaaacgaagugguguccucccgaccagcugguuaaccuucacgacuuucgcuccgaugagaucgagcaucuggugguggaggaacucgucaaaaagagagaagagugccuggacgcccuugaaagcauuaugaccacaaaaucuguguccuuccggcgccugagccaccucagaaagcugguuccuggcuuugggaaggcuuacaccaucuucaauaaaacacugauggaggccgaugcucauuauaagucugugcggaccuggaacgagaucauucccagcaaaggaugccuccgcgucggcgggagaugucacccccacgugaauggaguuuucuuuaacggcaucauucuggggccugacggacaugugcuuaucccggaaaugcaguccucucugcuccagcaacacauggagcugcuugaaagcuccgucauuccccugaugcauccucucgccgaucccagcacgguguucaaggacgaugacgaggcggaagauuuugucgaggugcaucugccugacguucacaaacaggugucuggcgucgaucugggccuccccuccugggggaaguacgugcugacaagcgccggaguucuuaccgcucugaugcucaugaucuuccugaugaccugcugucggagagccaaucgcgcugagucugcccagcacucccugggcgaacgggggagaaaggugagcgucacaucccagucuggacgcgugaucagcuccugggagucuuauaaaagcggcggggaaaccaagcuguga

SEQ ID NO: 222811 - RNA, 1575 nt, Artificial Sequence
  derived and/or modified CDS sequence (opt5) from glycoprotein__RABV__AB733962.1
augaucccccaggcccuucucuucgugccucugcuugucuuuagccugugccucggcaaguucccgauuuacaccauccccgacaaacuggggccuuggucccccauugauauccaccaucuuucuuguccuaacaaucugguuguggaggacgaaggaugcacaaaccucagcggcuuuuccuauauggagcugaaggugggguacauuucugcuaucaaagucaauggauucacguguaccggcgugguuacagaagccgagaccuauacaaacuuugugggguacgucaccacaaccuucaagagaaaacacuuucggcccacgccugaugcgugccgcgcugccuauaauuggaagauggccggagacccgagauacgaagagagccugcauaaccccuauccugauuaccacuggcuccggaccgugaagacaaccaaagagucccugguuaucauuucucccagcguggcugaccuugauccuuacgacaagucccugcauagccgcgucuuccccucuggcaaauguuccggcaucacagugagcucuaccuauugcuccacgaaucacgauuacacaauuuggaugccggaaaacccuagacucgggaccagcugugacaucuuuacaaauucucggggaaagcgcgccuccaaaggcagcaagaccugcggguucguggaugagagaggacuguauaagucccuuaaaggcgcuuguaagcugaaacucugcgggguccugggacugcggcucauggacggcaccugggccgcgauucaaacaucugaugaaaucaaguggugucccccugaccagcugguuaaccuucacgacuuucgcagcgaugagauugagcaucuggugguggaggaacucgucaaaaagagagaagagugccuggacgcccuugaauccaucaugacgaccaaaagcgugucuuuccggcgccugucccaccucagaaagcugguucccggcuuugggaaggcuuacacaaucuucaauaaaacccugauggaggccgaugcucauuauaagagcgugcggacauggaacgagauuauccccucuaaaggaugccuccgcgucggcgggagaugucacccucacgugaauggaguuuucuuuaacggcauuauccuggggccggacggacaugugcuuauucccgaaaugcagagcucccugcuccagcaacacauggagcugcuugaaucuagcgucaucccucugaugcauccccucgccgauccuuccaccguguucaaggacgaugacgaggcggaagauuuugucgaggugcaucugcccgacguucacaaacaggugagcggcgucgaucugggccucccgucuugggggaaguacgugcugauguccgccggaguucuuacggcucugaugcucaugaucuuccugacaaccugcugucggagagccaaucgcgcugagagcgcccagcacucucugggcgaacgggggagaaagguguccgucaccagccaguccggacgcgugauuucuagcugggaguccuauaaaucuggcggggaaacaaagcuguga

SEQ ID NO: 222812 - RNA, 1575 nt, Artificial Sequence; identical to SEQ ID NO: 222643
  derived and/or modified CDS sequence (opt5) from glycoprotein__RABV__AB733963.1

SEQ ID NO: 222813 - RNA, 1575 nt, Artificial Sequence
  derived and/or modified CDS sequence (opt5) from glycoprotein__RABV__AB733964.1
augaucccccaggcccuucucuucgugccucugcuugucuuuagccugugccucggcaaguucccgauuuacaccauccccgacaaacuggggccuuggucccccauugauauccaccaucuuucuuguccuaacaaucugguuguggaggacgaaggaugcacaaaccucagcggcuuuuccuauauggagcugaaggugggguacauuucugcuaucaaagucaauggauucacguguaccggcgugguuacagaagccgagaccuauacaaacuuugugggguacgucaccacaaccuucaagagaaaacacuuucggcccacgccugaugcgugccgcgcugccuauaauuggaagauggccggagacccgagauacgaagagagccugcauaaccccuauccugauuaccacuggcuccggaccgugaagacaaccaaagagucccugguuaucauuucucccagcguggcugaccuugauccuuacgacaagucccugcauagccgcgucuuccccucuggcaaauguuccggcaucacagugagcucuaccuauugcuccacgaaucacgauuacacaauuuggaugccggaaaacccuagacucgggaccagcugugacaucuuuacaaauucucggggaaagcgcgccuccaaaggcagcaagaccugcggguucguggaugagagaggacuguauaagucccuuaaaggcgcuuguaagcugaaacucugcgggguccugggacugcggcucauggacggcaccugggccgcgauucaaacaucugaugaaacgaaguggugucccccugaccagcugguuaaccuucacgacuuucauagcgaugagaucgagcaccuggugguggaggaacucgucaaaaagcgcgaagagugccuggacgcccuugaauccauuaugaccacaaaaagcgugucuuucagacggcugucccaucuccgcaagcugguucccggcuuugggaaggcuuacaccaucuucaauaaaacacugauggaggccgaugcucacuauaagagcgugagaaccuggaacgagaucauucccacgaaaggaugccuccgggucggcgggcgcugucacccucaugugaauggaguuuucuuuaacggcaucauucuggggccggacggacacgugcuuauccccgaaaugcagucuagccugcuccagcaacauauggagcugcuugaauccucugucauuccucugaugcacccccucgccgauccuagcacaguguucaaggacgaugacgaggcggaagauuuugucgaggugcaucugcccgacguucacaaacagguguccggcgucgaucugggccucccgagcugggggaaguacgugcugaugucugccggaguucuuaccgcucugaugcucaugaucuuccugaccacaugcuguagacgggccgacagagcugaguccgcccagcacagccugggcgaacgcgggcggaaggugucugucaccucccagagcggaagagugaucuccucuugggagagcuauaaauccggcggggaaacaaagcuguga

SEQ ID NO: 222814 - RNA, 1575 nt, Artificial Sequence; identical to SEQ ID NO: 222674
  derived and/or modified CDS sequence (opt5) from glycoprotein__RABV__AB733965.1

SEQ ID NO: 222815 - RNA, 1575 nt, Artificial Sequence
  derived and/or modified CDS sequence (opt5) from glycoprotein__RABV__AB733966.1
augaucccccaggcccuucucuucgugccucugcuugucuuuagccugugcuucggcaaguuuccgauuuacaccauccccgacaaacucgggccuuggucccccauugauauccaccaucugucuuguccuaacaaucuuguuguggaggacgaaggaugcacaaaccugagcggcuucuccuauauggagcucaaggugggguacauuucugcuaucaaagucaauggauuuacguguaccggcgugguuacagaagccgagaccuauacaaacuucgugggguacgucaccacaaccuuuaagagaaaacacuuccggcccacgccugaugcgugccgcgcugccuauaauuggaagauggccggagacccgagauacgaagagagccugcauaaccccuauccugauuaccacuggcugcggaccgugaagacaaccaaagagucccucguuaucauuucucccagcguggcugaccuggauccuuacgacaagucccuucauagccgcgucuuucccucuggcaaauguuccggcaucacagugagcucuaccuauugcuccacgaaucacgauuacacaauuuggaugccggaaaacccuagacuggggaccagcugugacaucuucacaaauucucggggaaagcgcgccuccaaaggcagcaagaccugcggguuuguggaugagagaggacucuauaagucccugaaaggcgcuuguaagcugaaacugugcgggguccucggacugcggcugauggacggcaccugggccgcgauucaaacaucugaugaaacgaaguggugucccccugaccagcucguuaaccugcacgacuuccauagcgaugagaucgagcaccuugugguggaggaacuggucaaaaagcgcgaagagugccucgacgcccuggaauccauuaugaccacaaaaagcgugucuuuuagacggcuuucccaucugcgcaagcucguucccggcuucgggaaggcuuacaccaucuucaauaaaacacugauggaggccgaugcucacuauaagagcgugagaaccuggaacgagaucauucccucuaaaggaugccugcgggucggcgggcgcugucacccucaugugaauggaguguuuuucaacggcaucauucucgggccggacggacacguucugauccccgaaaugcagagcucccuucugcagcaacauauggagcuccuggaaucuagcgucauuccucuuaugcacccccuggccgauccuuccacgguguuuaaggacgaugacgaggcggaagauuucgucgaggugcaucuccccgacguucacaaacaggugagcggcgucgaucugggccugccgucuugggggaaguacgugcucauguccgccggaguucugacagcucuuaugcugaugaucuuucucacaaccugcuguagacgggccaauagagcugagagcgcccagcacucucugggcgaacgcgggcggaagguguccgucaccagccaguccggaagagugaucucuagcugggaguccuauaaaucuggcggggaaaccaagcuguga

SEQ ID NO: 222816 - RNA, 1575 nt, Artificial Sequence; identical to SEQ ID NO: 222772
  derived and/or modified CDS sequence (opt5) from glycoprotein__RABV__AB733967.1

SEQ ID NO: 222817 - RNA, 1575 nt, Artificial Sequence
  derived and/or modified CDS sequence (opt5) from glycoprotein__RABV__AB733968.1
augaucccccaggcccuucucuucgugccucugcuugucuuuagccugugcuucggcaaguuuccgauuuacaccauccccgacaaacucgggccuuggucccccauugauauccaccaucugucuuguccuaacaaucuuguuguggaggacgaaggaugcacaaaccugagcggcuucuccuauauggagcucaaggugggguacauuucugcuaucaaagucaauggauuuacguguaccggcgugguuacagaagccgagaccuauacaaacuucgugggguacgucaccacaaccuuuaagagaaaacacuuccggcccacgccugaugcgugccgcgcugccuauaauuggaagauggccggagacccgagauacgaagagagccugcauaaccccuauccugauuaccacuggcugcggaccgugaagacaaccaaagagucccucguuaucauuucucccagcguggcugaccuggauccuuacgacaagucccuucauagccgcgucuuucccucuggcaaauguuccggcaucacagugagcucuaccuauugcccgacgaaucacgauuacacaauuuggaugccugaaaaccccagacuggggaccuccugugacaucuucacaaauagccggggaaagcgcgccucuaaaggcuccaagaccugcggguuuguggaugagagaggacucuauaagagccugaaaggcgcuuguaagcugaaacugugcgggguccucggacugcggcugauggacggcaccugggccgcgauucaaacauccgaugaaacgaagugguguccucccgaccagcucguuaaccugcacgacuuccgcucugaugagaucgagcaucuugugguggaggaacuggucaaaaagagagaagagugccucgacgcccuggaaagcauuaugaccacaaaauccgugagcuuucggcgccuuucucaccugagaaagcucguucccggcuucgggaaggcuuacaccaucuucaauaaaacacugauggaggccgaugcucauuauaaguccgugcggaccuggaacgagaucauuccuagcaaaggaugccugcgcgucggcgggagaugucacccgcacgugaauggaguguuuuucaacggcaucauucucgggcccgacggacauguucugaucccugaaaugcagucuagccuucugcagcaacacauggagcuccuggaauccucugucauuccccuuaugcauccucuggccgaucccagcacgguguuuaaggacgaugacgaggcggaagauuucgucgaggugcaccucccggacguucauaaacagguguccggcgucgaucugggccugccuagcugggggaaguacgugcucaugucugccggaguucugacagcucuuaugcugaugaucuuucucacaaccugcugucggagagccgaccgcgcugaguccgcccagcacagccugggcgaacgggggagaaaggugucugucaccucccagagcggacgcgugaucuccucuugggagagcuauaaauccggcggggaaaccaagcuguga

SEQ ID NO: 222818 - RNA, 1575 nt, Artificial Sequence; identical to SEQ ID NO: 222671
  derived and/or modified CDS sequence (opt5) from glycoprotein__RABV__AB733969.1

SEQ ID NO: 222819 - RNA, 1575 nt, Artificial Sequence; identical to SEQ ID NO: 222760
  derived and/or modified CDS sequence (opt5) from glycoprotein__RABV__AB733970.1

SEQ ID NO: 222820 - RNA, 1575 nt, Artificial Sequence
  derived and/or modified CDS sequence (opt5) from glycoprotein__RABV__AB733971.1
augaucccccaggcccuucucuucgugccucugcuugucagcucccugugcuuuggcaaguucccgauuuacaccauccccgacaaacucgggccuuggucucccauugauauccaccaucugagcuguccuaacaaucuuguuguggaggacgaaggaugcacaaaccuguccggcuuuucuuauauggagcucaaggugggguacauuagcgcuaucaaagucaauggauucacguguaccggcgugguuacagaagccgagaccuauacaaacuuugugggguacgucaccacaaccuucaagagaaaacacuuucggcccacgccugaugcgugccgcgcugccuauaauuggaagauggccggagacccgagauacgaagagucccugcauaaccccuauccugauuaccacuggcugcggaccgugaagacaaccaaagagucucucguuaucauuagccccuccguggcugaccuggauccuuacgacaagagccuucauucucgcgucuuccccuccggcaaauguagcggcaucacagugucuuccaccuauugcagcacgaaucacgauuacacaauuuggaugccggaaaacccuagacuggggaccucuugugacaucuuuacaaauucccggggaaagcgcgccagcaaaggcuccaagaccugcggguucgugaacgagagaggacucuauaagucucugaaaggcgcuuguaagcugaaacugugcgggguccucggacugaagcugauggauggcaccugggccgcgauucaaacaagcaaugaaacgaaauggugucccccugaccagcucguuaaccugcacgauuuucgguccgacgagaucgagcaucuugugguggaggaacuggucaagaaacgcgaagagugccucgacgcccuggaaagcauuaugaccacaaagucuguguccuucagacggcuuagccaucugcgcaagcucguucccggcuuugggaaggcuuacaccaucuucaauaagacacugauggaggccgaugcucacuauaaaucugugagaaccuggaacgagaucauucccagcaagggaugccugcgggucggcgggcgcugucacccucacgugaauggaguuuucuuuaacggcaucauucucgggccggacggacaugugcugauccccgaaaugcaguccucucuucugcagcaacacauggagcuccuggaaagcuccgucauuccucuuaugcauccccuggccgauccuagcacgguguucaaagacgaugacgaggcggaagauuuugucgaggugcaccuccccgacguucauaaacaggugucuggcgucgaucugggccugccguccugggggaaguacgugcucacaagcgccggaguucugaccgcucuuaugcugaugaucuuccucaugaccugcuguagacgggccaacagagcugagucugcccagcacucccugggcgaacgcgggcggaaagugagcgucacaucccagucuggaagagugaucagcuccugggagucuuauaagagcggcggggaaaccaaacuguga

SEQ ID NO: 222821 - RNA, 1575 nt, Artificial Sequence
  derived and/or modified CDS sequence (opt5) from glycoprotein__RABV__AB733972.1
augaucccccaggcccuucucuucgugccucugcuugucuuuagccugugcuucggcaaguuuccgauuuacaccauccccgacaaacucgggccuuggucccccauugauauccaccaucugucuuguccuaacaaucuuguuguggaggacgaaggaugcacaaaccugagcggcuucuccuauauggagcucaaggugggguacauuucugcuaucaaagucaauggauuuacguguaccggcgugguuacagaagccgagaccuauacaaacuucgugggguacgucaccacaaccuuuaagagaaaacacuuccggcccacgccugaugcgugccgcgcugccuauaauuggaagauggccggagacccgagauacgaagagagccugcauaaccccuauccugauuaccacuggcugcggaccgugaagacaaccaaagagucccucguuaucauuucucccagcguggcugaccuggauccuuacgacaagucccuucauagccgcgucuuucccucuggcaaauguuccggcaucacagugagcucuaccuauugcuccacgaaucacgauuacacaauuuggaugccggaaaacccuagacuggggaccagcugugacaucuucacaaauucucggggaaagcgcgccuccaaaggcagcaagaccugcggguuuguggaugagagaggacucuauaagucccugaaaggcgcuuguaagcugaaacugugcgggguccucggacugcggcugauggacggcaccugggccgcgauucaaacaucugaugaaacgaaguggugucccccugaccagcucguuaaccugcacgacuuccgcagcgaugagaucgagcaucuugugguggaggaacuggucaaaaagagagaagagugccucgacgcccuggaauccauuaugaccacaaaaagcgugucuuuucggcgccuuucccaccugagaaagcucguucccggcuucgggaaggcuuacaccaucuucaauaaaacacugauggaggccgaugcucauuauaagagcgugcggaccuggaacgagaucauucccucuaaaggaugccugcgcgucggcgggagaugucacccucacgugaauggaguguuuuucaacggcaucauucucgggccggacggacauguucugauccccgaaaugcagagcucccuucugcagcaacacauggagcuccuggaaucuagcgucauuccucuuaugcauccccuggccgauccuuccacgguguuuaagaaugacgaugaggcggaagacuucgucgaggugcaccuccccgauguucauaaacaggugagcggcgucgaccugggccugccgucuugggggaaguacgugcucauguccgccggaguucugacagcucuuaugcugaugaucuuucucaugaccugcugucggagaaccaaccgcgccgagagcgcucagcacucucugggcgaacgggggagaaagguguccgucacaagccaguccggacgcgugaucucuagcugggaguccuauaaaucuggcggggaaaccaagcuguga

SEQ ID NO: 222822 - RNA, 1575 nt, Artificial Sequence; identical to SEQ ID NO: 222817
  derived and/or modified CDS sequence (opt5) from glycoprotein__RABV__AB733973.1

SEQ ID NO: 222823 - RNA, 1575 nt, Artificial Sequence
  derived and/or modified CDS sequence (opt5) from glycoprotein__RABV__AB733974.1
augaucccccaggcccugcucuuugugccucugcuugucuuuagccugugcuucggcaaguuuccgauuuacaccauccccgacaaacucgggccuuggucccccauugauauccaccaucugucuuguccuaacaaucuuguuguggaggacgaaggaugcacaaaccugagcggcuucuccuauauggagcucaaggugggguacauuucugcuaucaaagucaauggauuuacguguaccggcgugguuacagaagccgagaccuauacaaacuucgugggguacgucaccacaaccuuuaagagaaaacacuuccggcccacgccugaugcgugccgcgcugccuauaauuggaagauggccggagacccgagauacgaagagagccugcauaaccccuauccugauuaccacuggcugcggaccgugaagacaaccaaagagucccucguuaucauuucucccagcguggcugaccuggauccuuacgacaagucccuucauagccgcgucuuucccucuggcaaauguuccggcaucacagugagcucuaccuauugcuccacgaaucacgauuacacaauuuggaugccggaaaacccuagacuggggaccagcugugacaucuucacaaauucucggggaaagcgcgccuccaaaggcagcaagaccugcggguuuguggaugagagaggacucuauaagucccugaaaggcgcuuguaagcugaaacugugcgggguccucggacugaagcugauggacggcaccugggccgcgauucaaacaucuaacgaaacgaaauggugucccccugaucagcucguuaaucugcacgacuuccggagcgacgagaucgagcaucuugugguggaggaacuggucaagaaacgcgaagagugccucgaugcccuggaauccauuaugaccacaaagagcgugucuuuuagacggcuuucccaccuucgcaagcucguucccggcuucgggaaggcuuacaccaucuucaacaagacacugauggaggccgacgcucauuauaaaagcgugagaaccuggaaugagaucauucccucuaagggaugccugcgggucggcgggcgcugucacccucacgugaacggaguuuucuucaauggcaucauucucgggccggauggacaugugcugauccccgaaaugcagagcucccuucugcagcaacacauggagcuccuggaaucuagcgucauuccucuuaugcauccccuggccgacccuuccacgguguuuaaagaugacgaugaggcggaagacuucgucgaggugcaccuccccgauguucauaaacaggugagcggcgucgaccugggccugccgucuugggggaaguacgugcucauguccgccggaguucugacagcucuuaugcugaugaucuuucucaugaccugcuguagacgggccaacagagcugagagcgcccagcacucucugggcgaacgcgggcggaaaguguccgucaccagccaguccggaagagugaucucuagcugggaguccuauaagucuggcggggaaacaaaacuguga

SEQ ID NO: 222824 - RNA, 1575 nt, Artificial Sequence; identical to SEQ ID NO: 222823
  derived and/or modified CDS sequence (opt5) from glycoprotein__RABV__AB733975.1

SEQ ID NO: 222825 - RNA, 1575 nt, Artificial Sequence; identical to SEQ ID NO: 222644
  derived and/or modified CDS sequence (opt5) from glycoprotein__RABV__AB733976.1

SEQ ID NO: 222826 - RNA, 1575 nt, Artificial Sequence; identical to SEQ ID NO: 222705
  derived and/or modified CDS sequence (opt5) from glycoprotein__RABV__AB733977.1

SEQ ID NO: 222827 - RNA, 1575 nt, Artificial Sequence
  derived and/or modified CDS sequence (opt5) from glycoprotein__RABV__AB733979.1
augaucccccaggcccuucucuucgugccucugcuugucuuuagccugugcuucggcaaguuuccgauuuacaccauccccgacaagcucgggccuuggucccccauugauauccaccaucugucuuguccuaacaaucuuguuguggaggacgaaggaugcacaaaccugagcggcuucuccuauauggagcucaaggugggguacauuucugcuaucaaagucaauggauuuacguguaccggcgugguuacagaagccgagaccuauacaaacuucgugggguacgucaccacaaccuuuaagagaaaacacuuccggcccacgccugaugcgugccgcgcugccuauaauuggaagauggccggagacccgagauacgaagagagccugcauaaccccuauccugauuaccacuggcugcggaccgugaagacaaccaaagagucccucguuaucauuucucccagcguggcugaccuggauccuuacgacaagucccuucauagccgcgucuuucccucuggcaaauguuccggcaucacagugagcucuaccuauugcuccacgaaucacgauuacacaauuuggaugccggaaaacccuagacuggggaccagcugugacaucuucacaaauucucggggaaagcgcgccuccaaaggcagcaagaccugcggguuuguggaugagagaggacucuauaagucccugaaaggcgcuuguaagcugaaacugugcgggguccucggacugcggcugauggacggcaccugggccgcgauucaaacaucugaugaaacgaaguggugucccccugaccagcucguuaaccugcacgacuuccgcagcgaugagaucgagcaucuugugguggaggaacuggucaaaaagagagaagagugccucgacgcccuggaauccauuaugaccacaaaaagcgugucuuuucggcgccuuucccaccugagaaagcucguucccggcuucgggaaggcuuacaccaucuucaauaaaacacugauggaggccgaugcucauuauaagagcgugcggaccuggaacgagaucauucccucuaaaggaugccugcgcgucggcgggagaugucacccucacgugaauggaguguuuuucaacggcaucauucucgggccggacggacauguucugauccccgaaaugcagagcucccuucugcagcaacacauggagcuccuggaaucuagcgucauuccucuuaugcauccccuggccgauccuuccacgguguuuaaggacgaugacgaggcggaagauuucgucgaggugcaccuccccgacguucauaaacaggugagcggcgucgaucugggccugccgucuugggggaaguacgugcucauguccgccggaguucugacagcucuuaugcugaugauccuccugaugaccugcugucggagagccaaucgcguggagagcgcucagcacucucugggcgaacgggggagaaaggucuccgugaccagccaguccggacgcgugaucucuagcugggaguccuauaaaucuggcggggaaacaaaacuuuga

SEQ ID NO: 222828 - RNA, 1575 nt, Artificial Sequence
  derived and/or modified CDS sequence (opt5) from glycoprotein__RABV__AB781935.1
auggugccccaggcccugcuguucgucccucugcuuguuuuuccgcugugcuucggcaaguuucccaucuacaccauuccugacaaacucgggcccuggagcccuaucgauauucaccaucuguccugucccaacaaucuugugguggaggacgaaggaugcacaaaccugucuggcuucagcuauauggagcucaaggucggguacauccuggcuauuaaaaugaauggauuuacguguaccggcgugguuacagaagccgagaccuauacaaacuucgugggguacgucaccacaaccuuuaagagaaaacacuuccggccuacgccggaugcgugccgcgcugccuauaauuggaagauggccggagaccccagauacgaagagucccugcaaaacccuuaucccgauuaccgguggcuccgcaccgugaagacaaccaaagagucucugguuaucaucagcccuuccguggcugaccuugaucccuacgacagaucucugcauagccgggucuuuccguccggcaaguguagcggcguggccgugucuuccacauauugcagcaccaaucacgauuacacgauuuggaugccugaaaacccccgccucgggaugucuugugacaucuucacaaauuccagaggaaaacgggcuagcaagggcucugagaccugcggguuugucgaugaacgcggacuguauaaaucccuuaagggcgccuguaagcugaaacucugcgggguucugggacugagacucauggacggcacauggguggcgaugcagaccagcaacgagaccaagugguguccucccgaucagcuggugaaucuucaugacuuccacuccgacgagauugaacaccuggucguggaggaacucguucggaaacgcgaggaaugccuggaugcccuugagucuaucaugacaaccaagagcguguccuuuagacggcugagccaucuccgcaaacugguccccggcuucgggaaggcuuacacgauuuucaacaaaacacugauggaggccgacgcucacuauaagucugugagaaccuggaaugaaaucauuccuuccaagggaugccuccggguuggcgggagaugucauccgcacgugaacggagucuuuuucaauggcaucauccuggggcccgauggaaacgugcuuauuccugagaugcagagcucucugcuccaacagcacauggaacugcuugagagcuccgucaucccccuggugcauccucucgccgaccccucuacaauuuuuaaagauggcgacgaagcggaggauuucguugaggugcaccucccggacguccauaaccaggugagcggcguugaucuggggcucccuaauuggggaaaguacgugcugcuuuccgccggcgcucugaccgcccucaugcugaucauuuuucugaugacgugcugucgccgggucaacagaagcgaacccacacagcacaaucuucgcgggaccggacgggaggugucugugaccccucaauccggcaaaaucaucagcucuugggaaucccauaagagcgggggcgagacaagacucuga

SEQ ID NO: 222829 - RNA, 1575 nt, Artificial Sequence
  derived and/or modified CDS sequence (opt5) from glycoprotein__RABV__AB817099.1
auggugccccaggcccugcuguucgucccucugcuuguuuuuagccugugcuucggcaaguuuccgaucuacaccauucccgacaaacucgggccuuggucccccaucgauauucaccaucugucuuguccuaacaaucuugugguggaggacgaaggaugcacaaaccugagcggcuucuccuauauggagcucaaggucggguacaucucugcuauuaaagugaauggauuuacguguaccggcguugugacagaagccgagaccuauacaaacuucgucggguacgugaccacaaccuuuagacggaagcacuuccgccccacgccugaugcgugcagagcugccuauaauuggaaaauggccggagacccgcgguacgaagagagccugcauaaccccuauccugauuaccacuggcugcgcaccguuaagacaaccaaggagucccucgugaucaucucucccagcgucgcugaccuggauccuuacgacaaaucccuucauagcagaguguuucccggcggcaaguguucugggauuacaguguccagcaccuauugcucuacgaaucacgauuacacaaucuggaugccggaaaacccucggcugggaaccuccugugacauuuucgucaauagccgcggcaaaagagccucuaaagggggaaagacaugcggcuuuguugaugagcgggggcucuauaagucccugaagggagcuuguaaacuuaagcugugcggcgugcccggccuccgccugauggacgggaccuggguggccauccaaaccagcgaugaaacaaaaugguguccucccgaccagcuggucaaccuccacgacuucagauccgaugagauugagcaucuggugguugaggaacuugugaagaaacgggaagagugccuggacgcgcucgaaucuaucaugacgaccaagagcgucuccuuucgcagacugagccaccuucggaaacuggugcccggauucggcaaggccuacacaauuuucaauaagacccucauggaggcugaugcccauuauaaaucuguucgcacauggaacgagaucaucccuuccaaggggugccugagagugggaggccggugucacccgcacgucaaugggguguuuuucaacggaauuauccugggccccgacggccauguccucauuccugaaaugcagagcucucugcuucagcaacacauggagcugcucgaaagcuccgugaucccccugaugcauccucuugcugaucccucuaccguuuuuaaagacggggaugaggccgaagacuucguggagguccaccucccggaugugcauaagcucauuagcggaguugaccugggccugccuuccugggggaaauacgugcucaugagcgcgggaauccugacgacacuuaugcugaugaucuuucucaugaccugcuguagacgcgucaaucaggccggcucuaagcagcacgggcuggagggcgcuggacggaagguguccgugaccagccagaacggcagaguuauuucuuccugggaaagcuauaaauccgggggagagacacgccuguga

SEQ ID NO: 222830 - RNA, 1575 nt, Artificial Sequence
  derived and/or modified CDS sequence (opt5) from glycoprotein__RABV__AB817100.1
auggugccccaggcccugcuguucgucccucugcuuguuuuuagccugugcuucggcaaguuuccgaucuacaccauucccgacaaacucgggccuuggucccccaucgauauucaccaucugucuuguccuaacaaucuugugguggaggacgaaggaugcacaaaccugagcggcuucuccuauauggagcucaaggucggguacaucucugcuauuaaagugaauggauuuacguguaccggcguugugacagaagccgagaccuauacaaacuucgucggguacgugaccacaaccuuuagacggaagcacuuccgccccacgccugaugcgugcagagcugccuauaauuggaaaauggccggagacccgcgguacgaagagagccugcauaaccccuauccugauuaccacuggcugcgcaccguuaagacaaccaaggagucccucgugaucaucucucccagcgucgcugaccuggauccuuacgacaaaucccuucauagcagaguguuucccggcggcaaguguucugggauuacaguguccagcaccuauugcucuacgaaucacgauuacacaaucuggaugccggaaaacccucggcugggaaccuccugugacauuuucgucaauagccgcggcaaaagagccucuaaagggggaaagacaugcggcuuuguugaugagcgggggcucuauaagucccugaagggagcuuguaaacuuaagcugugcggcgugcccggccuccgccugauggacgggaccuggguggccauccaaaccagcgaugaaacaaaaugguguccucccgaccagcuggucaaccuccacgacuucagauccgaugagauugagcaucuggugguugaggaacuugugaagaaacgggaagagugccuggacgcgcucgaaucuaucaugacgaccaagagcgucuccuuucgcagacugagccaccuucggaaacuggugcccggauucggcaaggccuacacaauuuucaauaagacccucauggaggcugaugcccauuauaaaucuguucgcacauggaacgagaucaucccuuccaaggggugccugagagugggaggccggugucacccgcacgucaaugggguguuuuucaacggaauuauccugggccccgacggccauguccucauuccugaaaugcagagcucucugcuucagcaacacauggagcugcucgaaagcuccgugaucccccugaugcauccucuugcugaucccucuaccguuuuuaaagacggggaugaggccgaagacuucguggagguccaccucccggaugugcauaagcucauuagcggaguugaccugggccugccuuccugggggaaauacgugcucaugagcgcgggaauccugaucacgcuuaugcugaugauuuuucucaugacaugcuguagacgcgucaaucaggccggcucuaagcagcacgggcuggagggcgcuggacggaagguguccgugaccagccagaacggcagaguuaucucuuccugggaaagcuauaaauccgggggagagacccgccuguga

SEQ ID NO: 222831 - RNA, 1575 nt, Artificial Sequence
  derived and/or modified CDS sequence (opt5) from glycoprotein__RABV__AB817101.1
auggugccccaggcccugcuguucgucccucugcuuguuuuuagccugugcuucggcaaguuuccgaucuacaccauucccgacaaacucgggccuuggucccccaucgauauucaccaucugucuuguccuaacaaucuugugguggaggacgaaggaugcacaaaccugagcggcuucuccuauauggagcucaaggucggguacaucucugcuauuaaagugaauggauuuacguguaccggcguugugacagaagccgagaccuauacaaacuucgucggguacgugaccacaaccuuuagacggaagcacuuccgccccacgccugaugcgugcagagcugccuauaauuggaaaauggccggagacccgcgguacgaagagagccugcauaaccccuauccugauuaccacuggcugcgcaccguuaagacaaccaaggagucccucgugaucaucucucccagcgucgcugaccuggauccuuacgacaaaucccuucauagcagaguguuucccggcggcaaguguucugggauuacaguguccagcaccuauugcucuacgaaucacgauuacacaaucuggaugccggaaaacccucggcugggaaccuccugugacauuuucgucaauagccgcggcaaaagagccucuaaagggggaaagacaugcggcuuuguugaugagcgggggcucuauaagucccugaagggagcuuguaaacuuaagcugugcggcgugcccggccuccgccugauggacgggaccuggguggccauccaaaccagcgaugaaacaaaaugguguccucccgaccagcuggucaaccuccacgacuucagauccgaugagauugagcaucuggugguugaggaacuugugaagaaacgggaagagugccuggacgcgcucgaaucuaucaugacgaccaagagcgucuccuuucgcagacugagccaccuucggaaacuggugcccggauucggcaaggccuacacaauuuucaauaagacccucauggaggcugaugcccauuauaaaucuguucgcacauggaacgagaucaucccuuccaaggggugccugagagugggaggccggugucacccgcacgucaaugggguguuuuucaacggaauuauccugggccccgacggccauguccucauuccugaaaugcagagcucucugcuucagcaacacauggagcugcucgaaagcuccgugaucccccugaugcauccucuugcugaucccucuaccguuuuuaaagacggggaugaggccgaagacuucguggagguccaccucccggaugugcauaagcucauuagcggaguugaccugggccugccuuccugggggaaauacgugcucaugagcgcgggaauccugacgacacuuaugcugaugaucuuucucaugaccugcuguagacgcgucaaucaggccggcucuaagcagcacgggcuggagggccccggacggaagguguccgugaccagccagaacggcagaguuauuucuuccugggaaagcuauaaauccgggggagagacacgccuguga

SEQ ID NO: 222832 - RNA, 1575 nt, Artificial Sequence
  derived and/or modified CDS sequence (opt5) from glycoprotein__RABV__AB817102.1
auggugccccagacccuucucuucgucccucugcuuguuuuuagccugugcuucggcaaguuuccgaucuacacaauucccgacaaacucgggccuuggucccccaucgauauucaccaucugucuuguccuaacaaucuugugguggaggacgaaggaugcacgaaccugagcggcuucuccuauauggagcucaaggucggguacaucucugccauuaaagugaauggauuuaccuguacaggcguugugaccgaagcugagacauauaccaacuucgucggguacgugacaaccacguuuagacggaagcacuuccgccccaccccugaugccugcagagcggcuuauaauuggaaaauggccggagacccgcgguacgaagagagccugcauaaccccuauccugauuaccacuggcugcgcacaguuaagaccacaaaggagucccucgugaucaucucucccagcgucgccgaccuggauccuuacgacaaaucccuucauagcagaguguuucccggcggcaaguguucugggauuaccguguccagcacguauugcucuacaaaucacgauuacaccaucuggaugccggaaaacccucggcugggaacauccugugacauuuucgucaauagccgcggcaaaagagcuucucgcgggggaaagaccugcggcuuuguugaugagcgggggcucuauaaaucccugaagggagccuguaagcugaaacugugcggcgugcccggccucagacugauggacgggaccuggguggcuauccaaacaagcgaugaaacgaagugguguccucccgaccagcuggucaaccuccacgacuuccgguccgaugagauugagcaucuggugguugaggaacuugugaaaaagcgcgaagagugccuggacgcccucgaaucuaucaugaccacaaaaagcgucuccuuuagacggcugagccaccuucgcaagcuggugcccggauucggcaaagcguacaccauuuucaauaagacacucauggaggccgaugcucauuauaagucuguuagaaccuggaacgagaucaucccuuccaaagggugccugcgggugggaggcagaugucacccgcacgucaaugggguguuuuucaacggaauuauccugggccccgacggccauguccucauuccugaaaugcagagcucucugcuucagcaacacauggagcugcucgaaagcuccgugaucccccugaugcauccucuugccgaucccucuacgguuuuuaaggacggggaugaggcugaagacuucguggagguccaucugccggaugugcacaaacucauuagcggaguugaccugggccugccuuccugggggaaguacgugcucaugagcgucggaauccugacaacccuuaugcugaugaucuuucucaugaccugcugucgccgggugaaucaggugggccccaaacagcacgggcuggagggcgccggaagaaagguuucugucacaucccagaacggccgcgugauuagcucuugggaauccuauaagagcgggggagagacccggcuguga

SEQ ID NO: 222833 - RNA, 1575 nt, Artificial Sequence
  derived and/or modified CDS sequence (opt5) from glycoprotein__RABV__AB817103.1
auggugccccaggcccugcuguucgucccucugcuuguuuuuagccugugcuucggcaaguuuccgaucuacaccauucccgacaaacucgggccuuggucccccaucgauauucaccaucugucuuguccuaacaaucuugugguggaggacgaaggaugcacaaaccugagcggcuucuccuauauggagcucaaggucggguacaucucugcuauuaaagugaauggauuuacguguaccggcguugugacagaagccgagaccuauacaaacuucgucggguacgugaccacaaccuuuagacggaagcacuuccgccccacgccugaugcgugcagagcugccuauaauuggaaaauggccggagacccgcgguacgaagagagccugcauaaccccuauccugauuaccacuggcugcgcaccguuaagacaaccaaggagucccucgugaucaucucucccagcgucgcugaccuggauccuuacgacaaaucccuucauagcagaguguuucccggcggcaaguguucugggauuacaguguccagcaccuauugcucuacgaaucacgauuacacaaucuggaugccggaaaacccucggcugggaaccuccugugacauuuucgucaauagccgcggcaaaagagccucuaaagggggaaagacaugcggcuuuguugaugagcgggggcucuauaagucccugaagggagcuuguaaacuuaagcugugcggcgugcccggccuccgccugauggacgggaccuggguggccauccaaaccagcgaugaaacaaaaugguguccucccgaccagcuggucaaccuccacgacuucagauccgaugagauugagcaucuggugguugaggaacuugugaagaaacgggaagagugccuggacgcgcucgaaucuaucaugacgaccaagagcgucuccuuucgcagacugagccaccuucggaaacuggugcccggauucggcaaggccuacacaauuuucaauaagacccucauggaggcugaugcccauuauaaaucuguucgcacauggaacgagaucaucccuuccaaggggugccugagagugggaggccggugucacccgcacgucaaugggguguuuuucaacggaauuauccugggccccgacggccauguccucauuccugaaaugcagagcucucugcuucagcaacacauggagcugcucgaaagcuccgugaucccccugaugcauccucuugcugaucccucuaccguuuuuaaagacggggaugaggccgaagacuucguggagguccaccucccggaugugcauaagcucauuagcggaguugaccugggccugccuuccugggggaaauacgugcucaugagcgcgggaauccugacgacacuuaugcugaugaucuuucucaugaccugcuguagacgcgucaaucaggccggcucuaagcagcacgggcuggagggcgcuggacggaagguguccgugaccagccagaacggcagaauuaucucuuccugggaaagcuauaaauccgggggagagacacgccuguga

SEQ ID NO: 222834 - RNA, 1575 nt, Artificial Sequence; identical to SEQ ID NO: 222830
  derived and/or modified CDS sequence (opt5) from glycoprotein__RABV__AB817104.1

SEQ ID NO: 222835 - RNA, 1575 nt, Artificial Sequence
  derived and/or modified CDS sequence (opt5) from glycoprotein__RABV__AB817105.1
auggugccccaggcccugcuguucgucccucugcuuguuuuuagccugugcuucggcaaguuuccgaucuacaccauucccgacaaacucgggccuuggucccccaucgauauucaccaucugucuuguccuaacaaucuugugguggaggacgaaggaugcacaaaccugagcggcuucuccuauauggagcucaaggucggguacaucucugcuauuaaagugaauggauuuacguguaccggcguugugacagaagccgagaccuauacaaacuucgucggguacgugaccacaaccuuuagacggaagcacuuccgccccacgccugaugcgugcagagcugccuauaauuggaaaauggccggagacccgcgguacgaagagagccugcauaaccccuauccugauuaccacuggcugcgcaccguuaagacaaccaaggagucccucgugaucaucucucccagcgucgcugaccuggauccuuacgacaaaucccuucauagcagaguguuucccggcggcaaguguucugggauuacaguguccagcaccuauugcucuacgaaucacgauuacacaaucuggaugccggaaaacccucggcugggaaccuccugugacauuuucgucaauagccgcggcaaaagagccucuaaagggggaaagacaugcggcuuuguugaugagcgggggcucuauaagucccugaagggagcuuguaaacuuaagcugugcggcgugcccggccuccgccugauggacgggaccuggguggccauccaaaccagcgaugaaacaaaaugguguccucccgaccagcuggucaaccuccacgacuucagauccgaugagauugagcaucuggugguugaggaacuugugaagaaacgggaagagugccuggacgcgcucgaaucuaucaugacgaccaagagcgucuccuuucgcagacugagccaccuucggaaacuggugcccggauucggcaaggccuacacaauuuucaauaagacccucauggaggcugaugcccauuauaaaucuguucgcacauggaacgagaucaucccuuccaaggggugccugagagugggaggccggugucacccgcacgucaaugggguguuuuucaacggaauuauccugggccccgacggccauguccucauuccugaaaugcagagcucucugcuucagcaacacauggagcugcucgaaagcuccgugaucccccugaugcauccucuugcugaucccucuaccguuuuuaaagacggggaugaggccgaagacuucguggagguccaccucccggaugugcauaagcucauuagcggaguugaccugggccugccuuccugggggaaauacgugcucaugagcgcgggaauccugacgacacuuaugcugaugaucuuucucaugaccugcuguagacgcgucaaucaggccggcucuaagcagcacgggcuggagggcgcuggacggaagguguccgugaccagccagacaggcagaauuaucucuuccugggaaagcuauaaauccgggggagagacccgccuguga

SEQ ID NO: 222836 - RNA, 1575 nt, Artificial Sequence; identical to SEQ ID NO: 222829
  derived and/or modified CDS sequence (opt5) from glycoprotein__RABV__AB817106.1

SEQ ID NO: 222837 - RNA, 1575 nt, Artificial Sequence; identical to SEQ ID NO: 222830
  derived and/or modified CDS sequence (opt5) from glycoprotein__RABV__AB817107.1

SEQ ID NO: 222838 - RNA, 1575 nt, Artificial Sequence; identical to SEQ ID NO: 222830
  derived and/or modified CDS sequence (opt5) from glycoprotein__RABV__AB817108.1

SEQ ID NO: 222839 - RNA, 1575 nt, Artificial Sequence; identical to SEQ ID NO: 222830
  derived and/or modified CDS sequence (opt5) from glycoprotein__RABV__AB817109.1

SEQ ID NO: 222840 - RNA, 1575 nt, Artificial Sequence
  derived and/or modified CDS sequence (opt5) from glycoprotein__RABV__AB817110.1
auggugccccaggcccugcuguucgucccucugcuuguuuuuagccugugcuucggcaaguuuccgaucuacaccauucccgacaaacucgggccuuggucccccaucgauauucaccaucugucuuguccuaacaaucuugugguggaggacgaaggaugcacaaaccugagcggcuucuccuauauggagcucaaggucggguacaucucugcuauuaaagugaauggauuuacguguaccggcguugugacagaagccgagaccuauacaaacuucgucggguacgugaccacaaccuuuagacggaagcacuuccgccccacgccugaugcgugcagagcugccuauaauuggaaaauggccggagacccgcgguacgaagagagccugcauaaccccuauccugauuaccacuggcugcgcaccguuaagacaaccaaggagucccucgugaucaucucucccagcgucgcugaccuggauccuuacgacaaaucccuucauagcagaguguuucccggcggcaaguguucugggauuacaguguccagcaccuauugcucuacgaaucacgauuacacaaucuggaugccggaaaacccucggcugggaaccuccugugacauuuucgucaauagccgcggcaaaagagccucuaaagggggaaagacaugcggcuuuguugaugagcgggggcucuauaagucccugaagggagcuuguaaacuuaagcugugcggcgugcccggccuccgccugauggacgggaccuggguggccauccaaaccagcgaugaaacaaaaugguguccucccgaccagcuggucaaccuccacgacuucagauccgaugagauugagcaucuggugguugaggaacuugugaagaaacgggaagagugccuggacgcgcucgaaucuaucaugacgaccaagagcgucuccuuucgcagacugagccaccuucggaaacuggugcccggauucggcaaggccuacacaauuuucaauaagacccucauggaggcugaugcccauuauaaaucuguucgcacauggaacgagaucaucccuuccaaggggugccugagagugggaggccggugucacccgcacgucaaugggguguuuuucaacggaauuauccugggccccgacggccauguccucauuccugaaaugcagagcucucugcuucagcaacacauggagcugcucgaaagcuccgugaucccccugaugcauccucuugcugaucccucuaccguuuuuaaagacggggaugaggccgaagacuucguggagguccaccucccggaugugcauaagcucauuagcggaguugaccugggccugccuuccugggggaaauacgugcucaucagcgcgggaauccugauuacgcuuaugcugaugaucuuucucaugacaugcuguagacgcgucaaucaggccggcucuaagcagcacgggcuggagggcgcuggacggaagguguccgugaccagccagaacggcagaguuauuucuuccugggaaagcuauaaaaacgggggagagacccgccuguga

SEQ ID NO: 222841 - RNA, 1575 nt, Artificial Sequence
  derived and/or modified CDS sequence (opt5) from glycoprotein__RABV__AB817111.1
auggugccccaggcccugcuguucgucccucugcuuguuuuuagccugugcuucggcaaguuuccgaucuacaccauucccgacaaacucgggccuuggucccccaucgauauucaccaucugucuuguccuaacaaucuugugguggaggacgaaggaugcacaaaccugagcggcuucuccuauauggagcucaaggucggguacaucucugcuauuaaagugaauggauuuacguguaccggcguugugacagaagccgagaccuauacaaacuucgucggguacgugaccacaaccuuuagacggaagcacuuccgccccacgccugaugcgugcagagcugccuauaauuggaaaauggccggagacccgcgguacgaagagagccugcauaaccccuauccugauuaccacuggcugcgcaccguuaagacaaccaaggagucccucgugaucaucucucccagcgucgcugaccuggauccuuacgacaaaucccuucauagcagaguguuucccggcggcaaguguucugggauuacaguguccagcaccuauugcucuacgaaucacgauuacacaaucuggaugccggaaaacccucggcugggaaccuccugugacauuuucgucaauagccgcggcaaaagagccucuaaagggggaaagacaugcggcuuuguugaugagcgggggcucuauaagucccugaagggagcuuguaaacuuaagcugugcggcgugcccggccuccgccugauggacgggaccuggguggccauccaaaccagcgaugaaacaaaaugguguccucccgaccagcuggucaaccuccacgacuucagauccgaugagauugagcaucuggugguugaggaacuugugaagaaacgggaagagugccuggacgcgcucgaaucuaucaugacgaccaagagcgucuccuuucgcagacugagccaccuucggaaacuggugcccggauucggcaaggccuacacaauuuucaauaagacccucauggaggcugaugcccauuauaaaucuguucgcacauggaacgagaucaucccuuccaaggggugccugagagugggaggccggugucacccgcacgucaaugggguguuuuucaacggaauuauccugggccccgacggccauguccucauuccugaaaugcagagcucucugcuucagcaacacauggagcugcucgaaagcuccgugaucccccugaugcauccucuugcugaucccucuaccguuuuuaaagacggggaugaggccgaagacuucguggagguccaccucccggaugugcauaagcucauuagcggaguugaccugggccugccuuccugggggaaauacgugcucaugagcgcgggaauccugaucacgcuuaugcugaugauuuuucucaugacaugcuguagacgcgucaaucaggccggcucucggcagcacgagcuggaaggggcuggcagaaagguguccgugaccagccagaacggacgcguuaucucuuccugggagagcuauaaguccggcggggaaacccggcuguga

SEQ ID NO: 222842 - RNA, 1575 nt, Artificial Sequence; identical to SEQ ID NO: 222840
  derived and/or modified CDS sequence (opt5) from glycoprotein__RABV__AB817112.1

SEQ ID NO: 222843 - RNA, 1575 nt, Artificial Sequence
  derived and/or modified CDS sequence (opt5) from glycoprotein__RABV__AB817113.1
auggugccccaggcccugcuguucgucccucugcuuguuuuuagccugugcuucggcaaguuuccgaucuacaccauucccgacaaacucgggccuuggucccccaucgaugugcaccaucugucuuguccuaacaaucuuguggucgaggacgaaggaugcacaaaccugagcggcuucuccuauauggagcucaaggugggguacauuucugcuaucaaaguuaauggauuuacguguaccggcguggucacagaagccgagaccuauacaaaccuggugggguacguuaccacaaccuucagacggaagcacuuucgccccacgccugaugcgugcagagcuagcuauaauuggaaaauggccggagacccgcgguacgaagagucccugcauaaccccuauccugauuaccacuggcuccgcaccgugaagacaaccaaggagucucuggucauuaucagccccuccguggccgaccuugauccuuacgacaaaagccugcauucuagaguguuccccggcggcaaguguuccgggaucacagucagcucuaccuauugcuccacgaaucacgauuacacaauuuggaugccggaaaacccucggcucggaaccagcugugacaucuuuguuaauucucgcggcaaaagagcuuccaagggaggaaaaacaugcggcuucguggaugagcgggggcuguauaagagccuuaagggagccuguaaacugaagcucugcggcgugcccggccugcgccugauggacgggaccugggucgcuauucaaaccuccgaugaaacaaaaugguguccucccgaccagcucgugaaccugcacgacuuuagaucugaugagaucgagcaucuuguuguggaggaacuggucaagaaacgggaagagugccucgacgcccuggaaagcauuaugacgaccaaguccgugagcuuccgcagacuuucucaccuccggaaacucguucccggauuuggcaaggcguacacaaucuucaauaagacccugauggaggccgaugcucauuauaaauccgugcgcacauggaacgagauuaucccuagcaaggggugccugagagucggaggccggugucacccgcacgugaauggggucuucuuuaacggaaucauucucggccccgacggccaugugcugaucccugaaaugcagucuagccuucugcagcaacacauggagcuccuggaauccucuguuauuccccuuaugcauccucuggccgaucccagcaccguguucaaagacggggaugaggcugaagacuuugucgaggugcaccucccggauguucauaagcugaucuccggaguggaccugggccucccuagcugggggaaauacguccugaugucugccgggauucuuacgacacugaugcucaugaucuuccugaugaccugcuguagacgcgugaaucaggcgggcuccaagcagcacgggcuggagggcgccggacggaaggugagcguuaccucucagaacggcagagucaucuccagcugggaauccuauaaaucugggggagagacacgccuuuga

SEQ ID NO: 222844 - RNA, 1575 nt, Artificial Sequence
  derived and/or modified CDS sequence (opt5) from glycoprotein__RABV__AB817114.1
auggugccccaggcccugcuguucgucccucugcuuguuuuuagccugugcuucggcaaguuuccgaucuacaccauucccgacaaacucgggccuuggucccccaucgauauucaccaucugucuuguccuaacaaucuugugguggaggacgaaggaugcacaaaccugagcggcuucuccuauauggagcucaaggucggguacaucucugcuauuaaagugaauggauuuacguguaccggcguugugacagaagccgagaccuauacaaacuucgucggguacgugaccacaaccuuuagacggaagcacuuccgccccacgccugaugcgugcagagcugccuauaauuggaaaauggccggagacccgcgguacgaagagagccugcauaaccccuauccugauuaccacuggcugcgcaccguuaagacaaccaaggagucccucgugaucaucucucccagcgucgcugaccuggauccuuacgacaaaucccuucauagcagaguguuucccggcggcaaguguucugggauuacaguguccagcaccuauugcucuacgaaucacgauuacacaaucuggaugccggaaaacccucggcugggaaccuccugugacauuuucgucaauagccgcggcaaaagagccucuaaagggggaaagacaugcggcuuuguugaugagcgggggcucuauaagucccugaagggagcuuguaaacuuaagcugugcggcgugcccggccuccgccugauggacgggaccuggguggccauccaaaccagcgaugaaacaaaaugguguccucccgaccagcuggucaaccuccacgacuucagauccgaugagauugagcaucuggugguugaggaacuugugaagaaacgggaagagugccuggacgcgcucgaaucuaucaugacgaccaagagcgucuccuuucgcagacugagccaccuucggaaacuggugcccggauucggcaaggccuacacaauuuucaauaagacccucauggaggcugaugcccauuauaaaucuguucgcacauggaacgagaucaucccuuccaaggggugccugagagugggaggccggugucacccgcacgucaaugggguguuuuucaacggaauuauccugggccccgacggccauguccucauuccugaaaugcagagcucucugcuucagcaacacauggagcugcucgaaagcuccgugaucccccugaugcauccucuugcugaucccucuaccguuuuuaaagacggggaugaggccgaagacuucguggagguccaccucccggaugugcauaagcucauuagcggaguugaccugggccugccuuccugggggaaauacgugcucaugagcgcgggaauccugacgacacuuaugcugaugaucuuucucaugaccugcuguagacgcgucaaucaggccggcucuaagcagcacgggcuggagcgggcuggcagaaagguguccgugaccagccagaacggacgcguuauuucuuccugggaaagcuauaaauccggcggggagacacggcuguga

SEQ ID NO: 222845 - RNA, 1575 nt, Artificial Sequence
  derived and/or modified CDS sequence (opt5) from glycoprotein__RABV__AB817115.1
auggugccccaggcccugcuguucgucccucugcuuguuuuuagccugugcuucggcaaguuuccgaucuacaccauucccgacaaacucgggccuuggucccccaucgauauucaccaucugucuuguccuaacaaucuugugguggaggacgaaggaugcacaaaccugagcggcuucuccuauauggagcucaaggucggguacaucucugcuauuaaagugaauggauuuacguguaccggcguugugacagaagccgagaccuauacaaacuucgucggguacgugaccacaaccuuuagacggaagcacuuccgccccacgccugaugcgugcagagcugccuauaauuggaaaauggccggagacccgcgguacgaagagagccugcauaaccccuauccugauuaccacuggcugcgcaccguuaagacaaccaaggagucccucgugaucaucucucccagcgucgcugaccuggauccuuacgacaaaucccuucauagcagaguguuucccggcggcaaguguucugggauuacaguguccagcaccuauugcucuacgaaucacgauuacacaaucuggaugccggaaaacccucggcugggaaccuccugugacauuuucgucaauagccgcggcaaaagagccucuaaagggggaaagacaugcggcuuuguugaugagcgggggcucuauaagucccugaagggagcuuguaaacuuaagcugugcggcgugcccggccuccgccugauggacgggaccuggguggccauccaaaccagcgaugaaacaaaaugguguccucccgaccagcuggucaaccuccacgacuucagauccgaugagauugagcaucuggugguugaggaacuugugaagaaacgggaagagugccuggacgcgcucgaaucuaucaugacgaccaagagcgucuccuuucgcagacugagccaccuucggaaacuggugcccggauucggcaaggccuacacaauuuucaauaagacccucauggaggcugaugcccauuauaaaucuguucgcacauggaacgagaucaucccuuccaaggggugccugagagugggaggccggugucacccgcacgucaaugggguguuuuucaacggaauuauccugggccccgacggccauguccucauuccugaaaugcagagcucucugcuucagcaacacauggagcugcucgaaagcuccgugaucccccugaugcauccucuugcugaucccucuaccguuuuuaaagacggggaugaggccgaagacuucguggagguccaccucccggaugugcauaagcucauuagcggaguugaccugggccugccuggguggggaaaauacgugcucauguccgcgggcauccugacgacacuuaugcugaugaucuuucucaugaccugcuguagacgcgucaaucaggccgggagcaagcagcacggccuggagggagcuggccggaaggugucugugaccucccagaacgggagaguuauuagcucuugggaauccuauaaaagcggaggcgagacacgccuguga

SEQ ID NO: 222846 - RNA, 1575 nt, Artificial Sequence; identical to SEQ ID NO: 222830
  derived and/or modified CDS sequence (opt5) from glycoprotein__RABV__AB817116.1

SEQ ID NO: 222847 - RNA, 1575 nt, Artificial Sequence; identical to SEQ ID NO: 222835
  derived and/or modified CDS sequence (opt5) from glycoprotein__RABV__AB817117.1

SEQ ID NO: 222848 - RNA, 1575 nt, Artificial Sequence; identical to SEQ ID NO: 222830
  derived and/or modified CDS sequence (opt5) from glycoprotein__RABV__AB817118.1

SEQ ID NO: 222849 - RNA, 1575 nt, Artificial Sequence; identical to SEQ ID NO: 222829
  derived and/or modified CDS sequence (opt5) from glycoprotein__RABV__AB817119.1

SEQ ID NO: 222850 - RNA, 1575 nt, Artificial Sequence; identical to SEQ ID NO: 222830
  derived and/or modified CDS sequence (opt5) from glycoprotein__RABV__AB817120.1

SEQ ID NO: 222851 - RNA, 1575 nt, Artificial Sequence; identical to SEQ ID NO: 222830
  derived and/or modified CDS sequence (opt5) from glycoprotein__RABV__AB817121.1

SEQ ID NO: 222852 - RNA, 1575 nt, Artificial Sequence; identical to SEQ ID NO: 222833
  derived and/or modified CDS sequence (opt5) from glycoprotein__RABV__AB817122.1

SEQ ID NO: 222853 - RNA, 1575 nt, Artificial Sequence
  derived and/or modified CDS sequence (opt5) from glycoprotein__RABV__AB817123.1
auggugccccaggcccugcuguucgucccucugcuuguuuuuagccugugcuucggcaaguuuccgaucuacaccauucccgacaaacucgggccuuggucccccaucgauauucaccaucugucuuguccuaacaaucuugugguggaggacgaaggaugcacaaaccugagcggcuucuccuauauggagcucaaggucggguacaucucugcuauuaaagugaauggauuuacguguaccggcguugugacagaagccgagaccuauacaaacuucgucggguacgugaccacaaccuuuagacggaagcacuuccgccccacgccugaugcgugcagagcugccuauaauuggaaaauggccggagacccgcgguacgaagagagccugcauaaccccuauccugauuaccacuggcugcgcaccguuaagacaaccaaggagucccucgugaucaucucucccagcgucgcugaccuggauccuuacgacaaaucccuucauagcagaguguuucccggcggcaaguguucugggauuacaguguccagcaccuauugcucuacgaaucacgauuacacaaucuggaugccggaaaacccucggcugggaaccuccugugacauuuucgucaauagccgcggcaaaagagccucuaaagggggaaagacaugcggcuuuguugaugagcgggggcucuauaagucccugaagggagcuuguaaacuuaagcugugcggcgugcccggccuccgccugauggacgggaccuggguggccauccaaaccagcgaugaaacaaaaugguguccucccgaccagcuggucaaccuccacgacuucagauccgaugagauugagcaucuggugguugaggaacuugugaagaaacgggaagagugccuggacgcgcucgaaucuaucaugacgaccaagagcgucuccuuucgcagacugagccaccuucggaaacuggugcccggauucggcaaggccuacacaauuuucaauaagacccucauggaggcugaugcccauuauaaaucuguucgcacauggaacgagaucaucccuuccaaggggugccugagagugggaggccggugucacccgcacgucaaugggguguuuuucaacggaauuauccugggccccgacggccauguccucauuccugaaaugcagagcucucugcuucagcaacacauggagcugcucgaaagcuccgugaucccccugaugcauccucuugcugaucccucuaccguuuuuaaagacggggaugaggccgaagaguucguggagguccaccucccggacgugcauaagcucauuagcggaguugaucugggccugccuuccugggggaaauacgugcucaugagcgcgggaauccugaucacgcuuaugcugaugauuuuucucaugacaugcuguagacgcgucaaucaggccggcucuaagcagcacgggcuggaaggcgcuggacggaagguguccgugaccagccagaacggcagaguuaucucuuccugggagagcuauaaauccgggggagaaacccgccuguga

SEQ ID NO: 222854 - RNA, 1575 nt, Artificial Sequence; identical to SEQ ID NO: 222830
  derived and/or modified CDS sequence (opt5) from glycoprotein__RABV__AB817124.1

SEQ ID NO: 222855 - RNA, 1575 nt, Artificial Sequence; identical to SEQ ID NO: 222833
  derived and/or modified CDS sequence (opt5) from glycoprotein__RABV__AB817125.1

SEQ ID NO: 222856 - RNA, 1575 nt, Artificial Sequence
  derived and/or modified CDS sequence (opt5) from glycoprotein__RABV__AB817128.1
auggugccccaggcccugcuguucgucccucugcuugcuuuuagccugugcuucggcaaguuuccgaucuacaccauucccgacaaacucgggccuuggucccccaucgauauucaccaucugucuuguccuaacaaucuuguuguggaggacgaaggaugcacaaaccugagcggcuucuccuauauggagcucaaggugggguacaucucugccauuaaagucaauggauuuacguguaccggcgugguuacagaagcggagaccuauacaaacuucgugggguacgucaccacaaccuuuagacggaagcacuuccgccccacgccugaugcuugcagagccgccuauaauuggaaaauggcuggagacccgcgguacgaagagagccugcauaaccccuauccugauuaccacuggcugcgcaccgugaagacaaccaaggagucccucguuaucaucucucccagcguggccgaccuggauccuuacgacaaaucccuucauagcagagucuuucccggcggcaaguguucugggauuacaguguccagcaccuauugcucuacgaaucacgauuacacaaucuggaugccggaaaacccucggcugggaaccuccugugacauuuucgugaauagccgcggcaaaagagcuucuaaagggggaaagacaugcggcuuugucgaugagcgggggcucuauaagucccugaagggagccuguaaacuuaagcugugcggcguucccggccuccgccugauggacgggaccuggguggcgauccaaaccagcgaugaaacaaaaugguguccucccgaccagcuggugaaccuccacgacuucagauccgaugagauugagcaucuggucguggaggaacuuguuaagaaacgggaagagugccuggacgcccucgaaucuaucaugacgaccaagagcguguccuuucgcagacugagccaccuucggaaacugguccccggauucggcaaggcuuacacaauuuucaauaagacccucauggaggccgaugcucauuauaaaucugugcgcacauggaacgagaucaucccuuccaaggggugccugagaguuggaggccggugucacccgcacgugaauggggucuuuuucaacggaauuauccugggccccgacggccaugugcucauuccugaaaugcagagcucucugcuucagcaacacauggagcugcucgaaagcuccgucaucccccugaugcauccucuugccgaucccucuaccguguuuaaagacggggaugaggcggaagacuucguugaggugcaccucccggauguccauaagcucauuagcggaguggaccugggccugccuuccugggggaaauacguucucaugagcgccggaauccugaucacgcuuaugcugaugauuuuucucaugacaugcuguagacgcgugaaucaggcuggcucuaagcagcacgggcuggagggcgccggacggaaggucuccgugagcucucagaacggcagagugaucuccagcugggaauccuauaaaucugggggagagacccgccuguga

SEQ ID NO: 222857 - RNA, 1575 nt, Artificial Sequence
  derived and/or modified CDS sequence (opt5) from glycoprotein__RABV__AB817129.1
auggugccccaggcccugcuguucgucccucugcuuguuuuuagccugugcuucggcaaguuuccgaucuacaccauucccgacaaacucgggccuuggucccccaucgauauucaccaucugucuuguccuaacaaucuugugguggaggacgaaggaugcacaaaccugagcggcuucuccuauauggagcucaaggucggguacaucucugcuauuaaagugaauggauuuacguguaccggcguugugacagaagccgagaccuauacaaacuucgucggguacgugaccacaaccuuuagacggaagcacuuccgccccacgccugaugcgugcagagcugccuauaauuggaaaauggccggagacccgcgguacgaagagagccugcauaaccccuauccugauuaccacuggcugcgcaccguuaagacaaccaaggagucccucgugaucaucucucccagcgucgcugaccuggauccuuacgacaaaucccuucauagcagaguguuucccggcggcaaguguucugggauuacaguguccagcaccuauugcucuacgaaucacgauuacacaaucuggaugccggaaaacccucggcugggaaccuccugugacauuuucgucaauagccgcggcaaaagagccucuaaagggggaaagacaugcggcuuuguugaugagcgggggcucuauaagucccugaagggagcuuguaaacuuaagcugugcggcgugcccggccuccgccugauggacgggaccuggguggccauccaaaccagcgaugaaacaaaaugguguccucccgaccagcuggucaaccuccacgacuucagauccgaugagauugagcaucuggugguugaggaacuugugaagaaacgggaagagugccuggacgcgcucgaaucuaucaugacgaccaagagcgucuccuuucgcagacugagccaccuucggaaacuggugcccggauucggcaaggccuacacaauuuucaauaagacccucauggaggcugaugcccauuauaaaucuguucgcacauggaacgagaucaucccuuccaaggggugccugagagugggaggccggugucacccgcacgucaaugggguguuuuucaacggaauuauccugggccccgacggccauguccucauuccugaaaugcagagcucucugcuucagcaacacauggagcugcucgaaagcuccgugaucccccugaugcauccucuugcugaucccucuaccguuuuuaaagacggggaugaggccgaagacuucguggagguccaccucccggaugugcauaagcucauuagcggaguugaccugggccugccuuccugggggaaauacgugcucaugagcgcgggaauccugaucacgcuuaugcugaugauuuuucucaugacaugcuguagacgcgucaaucaggccggcucuaagcagcacgggcuggagggcgcuggacggaagguguccgugagcucucagaacggcagaguuaucuccagcugggaauccuauaaaucugggggagagacccgccuguga

SEQ ID NO: 222858 - RNA, 1575 nt, Artificial Sequence; identical to SEQ ID NO: 222830
  derived and/or modified CDS sequence (opt5) from glycoprotein__RABV__AB817130.1

SEQ ID NO: 222859 - RNA, 1575 nt, Artificial Sequence; identical to SEQ ID NO: 222830
  derived and/or modified CDS sequence (opt5) from glycoprotein__RABV__AB817131.1

SEQ ID NO: 222860 - RNA, 1575 nt, Artificial Sequence; identical to SEQ ID NO: 222830
  derived and/or modified CDS sequence (opt5) from glycoprotein__RABV__AB817132.1

SEQ ID NO: 222861 - RNA, 1575 nt, Artificial Sequence
  derived and/or modified CDS sequence (opt5) from glycoprotein__RABV__AB817133.1
auggugccccaggcccugcuguucgucccucugcuuguuuuuagccugugcuucggcaaguuuccgaucuacaccauucccgacaaacucgggccuuggucccccaucgauauucaccaucugucuuguccuaacaaucuugugguggaggacgaaggaugcacaaaccugagcggcuucuccuauauggagcucaaggucggguacaucucugcuauuaaagugaauggauuuacguguaccggcguugugacagaagccgagaccuauacaaacuucgucggguacgugaccacaaccuuuagacggaagcacuuccgccccacgccugaugcgugcagagcugccuauaauuggaaaauggccggagacccgcgguacgaagagagccugcauaaccccuauccugauuaccacuggcugcgcaccguuaagacaaccaaggagucccucgugaucaucucucccagcgucgcugaccuggauccuuacgacaaaucccuucauagcagaguguuucccggcggcaaguguucugggauuacaguguccagcaccuauugcucuacgaaucacgauuacacaaucuggaugccggaaaacccucggcugggaaccuccugugacauuuucgucaauagccgcggcaaaagagccucuaaagggggaaagacaugcggcuuuguugaugagcgggggcucuauaagucccugaagggagcuuguaaacuuaagcugugcggcgugcccggccuccgccugauggacgggaccuggguggccauccaaaccagcgaugaaacaaaaugguguccucccgaccagcuggucaaccuccacgacuucagauccgaugagauugagcaucuggugguugaggaacuugugaagaaacgggaagagugccuggacgcgcucgaaucuaucaugacgaccaagagcgucuccuuucgcagacugagccaccuucggaaacuggugcccggauucggcaaggccuacacaauuuucaauaagacccucauggaggcugaugcccauuauaaaucuguucgcacauggaacgagaucaucccuuccaaggggugccugagagugggaggccggugucacccgcacgucaaugggguguuuuucaacggaauuauccugggccccgacggccauguccucauuccugaaaugcagagcucucugcuucagcaacacauggagcugcucgaaagcuccgugaucccccugaugcauccucuugcugaucccucuaccguuuuuaaagacggggaugaggccgaagacuucguggagguccaccucccggaugugcauaagcucauuagcggaguugaccugggccugccuuccugggggaaauacgcgcucaugagcgccggagugcugacgacacuuaugcugaugaucuuucucaugaccugcuguagacgcgucaaucaggcuggcucuaagcagcacgggcuggagggcgccggacggaagguguccgugaccagccagaacggcagaguuaucucuuccugggaaagcuauaaauccgggggagagacacgccuguga

SEQ ID NO: 222862 - RNA, 1575 nt, Artificial Sequence
  derived and/or modified CDS sequence (opt5) from glycoprotein__RABV__AB817134.1
auggugccccaggcccugcuguucgucccucugcuuguuuuuagccugugcuucggcaaguuuccgaucuacaccauucccgacaaacucgggccuuggucccccaucgauauucaccaucugucuuguccuaacaaucuugugguggaggacgaaggaugcacaaaccugagcggcuucuccuauauggagcucaaggucggguacaucucugcuauuaaagugaauggauuuacguguaccggcguugugacagaagccgagaccuauacaaacuucgucggguacgugaccacaaccuuuagacggaagcacuuccgccccacgccugaugcgugcagagcugccuauaauuggaaaauggccggagacccgcgguacgaagagagccugcauaaccccuauccugauuaccacuggcugcgcaccguuaagacaaccaaggagucccucgugaucaucucucccagcgucgcugaccuggauccuuacgacaaaucccuucauagcagaguguuucccggcggcaaguguucugggauuacaguguccagcaccuauugcucuacgaaucacgauuacacaaucuggaugccggaaaacccucggcugggaaccuccugugacauuuucgucaauagccgcggcaaaagagccucuaaagggggaaagacaugcggcuuuguugaugagcgggggcucuauaagucccugaagggagcuuguaaacuuaagcugugcggcgugcccggccuccgccugauggacgggaccuggguggccauccaaaccagcgaugaaacaaaaugguguacgccugaccagcuggucaaccuccacgacuucagauccgaugagauugagcaucuggugguugaggaacuugugaagaaacgggaagagugccuggacgcgcucgaaucuaucaugaccacaaagagcgucuccuuucgcagacugagccaccuucggaaacuggugcccggauucggcaaggccuacaccauuuucaauaagacacucauggaggcugaugcccauuauaaaucuguucgcaccuggaacgagaucauccccuccaaggggugccugagagugggaggccggugucacccucacgucaaugggguguuuuucaacggaauuauccugggcccggacggccauguccucauucccgaaaugcagagcucucugcuucagcaacacauggagcugcucgaaagcuccgugaucccucugaugcauccccuugcugauccuucuacgguuuuuaaagacggggaugaggccgaagacuucguggagguccaccuccccgaugugcauaagcucauuagcggaguugaccugggccugccguccugggggaaauacgugcucaugagcgcgggaauccugaucacacuuaugcugaugauuuuucucaugaccugcuguagacgcgucaaucaggccggcucuaagcagcacgggcuggagggcgcuggacggaagguguccgugaccagccagaacggcagaguuaucucuuccugggaaagcuauaaauccgggggagagacacgccuguga

SEQ ID NO: 222863 - RNA, 1575 nt, Artificial Sequence
  derived and/or modified CDS sequence (opt5) from glycoprotein__RABV__AB817135.1
auggugccccaggcccugcuguucgucccucugcuuguuuuuagccugugcuucggcaaguuuccgaucuacaccauucccgacaaacucgggccuuggucccccaucgauauucaccaucugucuuguccuaacaaucuugugguggaggacgaaggaugcacaaaccugagcggcuucuccuauauggagcucaaggucggguacaucucugcuauuaaagugaauggauuuacguguaccggcguugugacagaagccgagaccuauacaaacuucgucggguacgugaccacaaccuuuagacggaagcacuuccgccccacgccugaugcgugcagagcugccuauaauuggaaaauggccggagacccgcgguacgaagagagccugcauaaccccuauccugauuaccacuggcugcgcaccguuaagacaaccaaggagucccucgugaucaucucucccagcgucgcugaccuggauccuuacgacaaaucccuucauagcagaguguuucccggcggcaaguguucugggauuacaguguccagcaccuauugcucuacgaaucacgauuacacaaucuggaugccggaaaacccucggcugggaaccuccugugacauuuucgucaauagccgcggcaaaagagccucuaaagggggaaagacaugcggcuuuguugaugagcgggggcucuauaagucccugaagggagcuuguaaacuuaagcugugcggcgugcccggccuccgccugauggacgggaccuggguggccauccaaaccagcgaugaaacaaaaugguguccucccgaccagcuggucaaccuccacgacuucagauccgaugagauugagcaucuggugguugaggaacuugugaagaaacgggaagagugccuggacgcgcucgaaucuaucaugacgacccgcagcgucuccuuuagacggcugagccaccuucgcaagcuggugcccggauucggcaaagccuacacaauuuucaauaagacccucauggaggcugaugcccauuauaagucuguuagaacauggaacgagaucaucccuuccaaagggugccugcgggugggaggcagaugucacccgcacgucaaugggguguuuuucaacggaauuauccugggccccgacggccauguccucauuccugaaaugcagagcucucugcuucagcaacacauggagcugcucgaaagcuccgugaucccccugaugcauccucuugcugaucccucuaccguuuuuaaggacggggaugaggccgaagacuucguggagguccaccucccggaugugcauaaacucauuagcggaguugaccugggccugccuuccugggggaaguacgugcucaugagcgcgggaauccugaucacgcuuaugcugaugauuuuucucaugacaugcugucgccgggucaaucaggccggcucuaaacagcacgggcuggagggcgcuggaagaaagguguccgugaccagccagaacggccgcguuaucucuuccugggaaagcuauaaguccgggggagagacccggcuguga

SEQ ID NO: 222864 - RNA, 1575 nt, Artificial Sequence; identical to SEQ ID NO: 222829
  derived and/or modified CDS sequence (opt5) from glycoprotein__RABV__AB817136.1

SEQ ID NO: 222865 - RNA, 1575 nt, Artificial Sequence; identical to SEQ ID NO: 222829
  derived and/or modified CDS sequence (opt5) from glycoprotein__RABV__AB817137.1

SEQ ID NO: 222866 - RNA, 1575 nt, Artificial Sequence
  derived and/or modified CDS sequence (opt5) from glycoprotein__RABV__AB817138.1
auggugccccaggcccugcuguucgucccucugcuuguuuuuagccugugcuucggcaaguuuccgaucuacaccauucccgacaaacucgggccuuggucccccaucgauauucaccaucugucuuguccuaacaaucuugugguggaggacgaaggaugcacaaaccugagcggcuucuccuauauggagcucaaggucggguacaucucugcuauuaaagugaauggauuuacguguaccggcguugugacagaagccgagaccuauacaaacuucgucggguacgugaccacaaccuuuagacggaagcacuuccgccccacgccugaugcgugcagagcugccuauaauuggaaaauggccggagacccgcgguacgaagagagccugcauaaccccuauccugauuaccacuggcugcgcaccguuaagacaaccaaggagucccucgugaucaucucucccagcgucgcugaccuggauccuuacgacaaaucccuucauagcagaguguuucccggcggcaaguguucugggauuacaguguccagcaccuauugcucuacgaaucacgauuacacaaucuggaugccggaaaaccaacggcugggaaccuccugugacauuuucgucaauagccgcggcaaaagagccucuaaagggggaaagacaugcggcuuuguugaugagcgggggcucuauaagucccugaagggagcuuguaaacuuaagcugugcggcgugccuggccuccgccugauggacgggaccuggguggccauccagaccagcgaugaaacaaaauggugucccccugaccagcuggucaaccuccacgacuucagauccgaugagauugagcaucuggugguugaggaacuugugaagaaacgggaagagugccuggacgcgcucgaaucuaucaugacgaccaagagcgucuccuuucgcagacugagccaccuucggaaacuggugcccggauucggcaaggccuacacaauuuucaauaagacccucauggaggcugaugcccauuauaaaucuguucgcacauggaacgagaucauccccuccaaggggugccugagagugggaggccggugucacccucacgucaaugggguguuuuucaacggaauuauccugggcccggacggccauauucucauccccgaaaugcagagcucucugcuucaacagcacauggagcugcucgaaagcuccgucauuccucugaugcauccccuugcugauccuucuaccguguuuaaagacggggaugaggccgaagacuucguugaggugcaccuccccgauguccauaagcucaucagcggaguggaccugggccugccguccugggggaaauacguucucaugagcgcgggaauccugacgacacuuaugcugaugauuuuucucaugaccugcuguagacgcgugaaucgggucggcucuaagcagcacgggcuggagggcgccggaagaaagguguccgugaccagccagaacggccgcguuaucucuuccugggaaagcuauaaauccgggggagagacacggcuguga

SEQ ID NO: 222867 - RNA, 1575 nt, Artificial Sequence; identical to SEQ ID NO: 222795
  derived and/or modified CDS sequence (opt5) from glycoprotein__RABV__AB817140.1

SEQ ID NO: 222868 - RNA, 1575 nt, Artificial Sequence; identical to SEQ ID NO: 222840
  derived and/or modified CDS sequence (opt5) from glycoprotein__RABV__AB817141.1

SEQ ID NO: 222869 - RNA, 1575 nt, Artificial Sequence
  derived and/or modified CDS sequence (opt5) from glycoprotein__RABV__AB817142.1
auggugccccagguccugcuguucguuccucugcuuguguuuagccugugcuucggcaaguuuccgaucuacaccauucccgacaaacucgggccuuggucccccaucgauauucaccaucugucuuguccuaacaaucuuguggucgaggacgaaggaugcacaaaccugagcggcuucuccuauauggagcucaaggugggguacaucucugccauuaaaguuaauggauuuacguguaccggcguggucacagaagcugagaccuauacaaacuucgugggguacguuaccacaaccuuuagacggaagcacuuccgccccacgccugaugccugcagagcggcuuauaauuggaaaauggccggagacccgcgguacgaagagagccugcauaaccccuauccugauuaccacuggcugcgcaccgugaagacaaccaaggagucccucgucaucaucucucccagcguggccgaccuggauccuuacgacaaaucccuucauagcagaguguuucccggcggcaaguguucugggauuacagucuccagcaccuauugcucuacgaaucacgauuacacaaucuggaugccggaaaacccucggcugggaaccuccugugacauuuucguuaauagccgcggcaaaagagcuucuaaagggggaaagacaugcggcuuuguggaugagcgggggcucuauaagucccugaagggagccuguaaacuuaagcugugcggcgugcccggccuccgccugauggacgggaccugggucgcuauccaaaccagcgaugaaacaaaaugguguccucccgaccagcuggugaaccuccacgacuucagauccgaugagauugagcaucugguuguggaggaacuugucaagaaacgggaagagugccuggacgcccucgaaucuaucaugacgaccaagagcguguccuuucgcagacugagccaccuucggaaacugguucccggauucggcaaggcguacacaauuuucaauaagacccucauggaggccgaugcucauuauaaaucugugcgcacauggaacgagaucaucccuuccaaggggugccugagagucggaggccggugucacccgcacgugaauggggucuuuuucaacggaauuauccugggccccgacggccaugugcucauuccugaaaugcagagcucucugcuucagcaacacauggagcugcucgaaagcuccguuaucccccugaugcauccucuugccgaucccucuaccguguuuaaagacggggaugaggcugaagacuucgucgaggugcaccucccggauguucauaagcucauuagcggaguggaccugggccugccuuccugggggaaauacguccucaugagcgccggaauccugacgacacuuaugcugaugaucuuucucaugaccugcuguagacgcgugaaucaggcgggcucuaagcagcacgggcuggagggcgccggacggaagguguccguuaccagccagaacggcagagucauuucuuccugggaaagcuauaaauccgggggagagacacgccuguga

SEQ ID NO: 222870 - RNA, 1575 nt, Artificial Sequence
  derived and/or modified CDS sequence (opt5) from glycoprotein__RABV__AB817143.1
auggugccccaggcccugcuguucgucccucugcuuguuuuuagccugugcuucggcaaguuuccgaucuacaccauucccgacaaacucgggccuuggucccccaucgauauucaccaucugucuuguccuaacaaucuugugguggaggacgaaggaugcacaaaccugagcggcuucuccuauauggagcucaaggucggguacaucucugcuauuaaagugaauggauuuacguguaccggcguugugacagaagccgagaccuauacaaacuucgucggguacgugaccacaaccuuuagacggaagcacuuccgccccacgccugaugcgugcagagcugccuauaauuggaaaauggccggagacccgcgguacgaagagagccugcauaaccccuauccugauuaccacuggcugcgcaccguuaagacaaccaaggagucccucgugaucaucucucccagcgucgcugaccuggauccuuacgacaaaucccuucauagcagaguguuucccggcggcaaguguucugggauuacaguguccagcaccuauugcucuacgaaucacgauuacacaaucuggaugccggaaaacccucggcugggaaccuccugugacauuuucgucaauagccgcggcaaaagagccucuaaagggggaaagacaugcggcuuuguugaugagcgggggcucuauaagucccugaagggagcuuguaaacuuaagcugugcggcgugcccggccuccgccugauggacgggaccuggguggccauccaaaccagcgaugaaacaaaaugguguccucccgaccagcuggucaaccuccacgacuucagauccgaugagauugagcaucuggugguugaggaacuugugaagaaacgggaagagugccuggacgcgcucgaaucuaucaugacgaccaagagcgucuccuuucgcagacugagccaccuucggaaacuggugcccggauucggcaaggccuacacaauuuucaauaagacccucauggaggcugaugcccauuauaaaucuguucgcacauggaacgagaucaucccuuccaaggggugccugagagugggaggccggugucacccgcacgucaaugggguguuuuucaacggaauuauccugggccccgacggccauguccucauuccugaaaugcagagcucucugcuucagcaacacauggagcugcucgaaagcuccgugaucccccugaugcauccucuugcugaucccucuaccguuuuuaaagacggggaugaggccgaagacuucguggagguccaccucccggaugugcauaagcucauuagcggaguugaccugggccugccuuccugggggaaauacgugcucaugagcgcgggaauccugaucacgcuuaugcugaugauuuuucucaugacaugcuguagacgcgucaaucaggccggcucuaagcagcacgggcuggagggcaccggacggaagguguccgugaccagccagaacggcagaguuaucucuuccugggaaagcuauaaauccgggggagagacacgccuguga

SEQ ID NO: 222871 - RNA, 1575 nt, Artificial Sequence; identical to SEQ ID NO: 222830
  derived and/or modified CDS sequence (opt5) from glycoprotein__RABV__AB817144.1

SEQ ID NO: 222872 - RNA, 1575 nt, Artificial Sequence; identical to SEQ ID NO: 222833
  derived and/or modified CDS sequence (opt5) from glycoprotein__RABV__AB817146.1

SEQ ID NO: 222873 - RNA, 1575 nt, Artificial Sequence
  derived and/or modified CDS sequence (opt5) from glycoprotein__RABV__AB838709.1
augaucccccaggcccuucucuucgugccucugcuugucuuuagccugugcuucggcaaguuuccgauuuacaccauccccgacaaacucgggccuuggucccccauugauauccaccaucugucuuguccuaacaaucuuguuguggaggacgaaggaugcacaaaccugagcggcuucuccuauauggagcucaaggugggguacauuucugcuaucaaagucaauggauuuacguguaccggcgugguuacagaagccgagaccuauacaaacuucgugggguacgucaccacaaccuuuaagagaaaacacuuccggcccacgccugaugcgugccgcgcugccuauaauuggaagauggccggagacccgagauacgaagagagccugcauaaccccuauccugauuaccacuggcugcggaccgugaagacaaccaaagagucccucguuaucauuugucccucuguggcugaccuggauccuuacgacaagagccuucauucccgcgucuuucccagcggcaaaugcucuggcaucacaguguccagcaccuauuguucuacgaaucacgauuacacaauuuggaugccggaaaacccuagacuggggaccuccugcgacaucuucacaaauagccggggaaagcgcgccucuaaaggcuccaagaccuguggguuuguggaugagagaggacucuauaagagccugaaaggcgcuugcaagcugaaacugugugggguccucggacugcggcugauggacggcaccugggccgcgauucaaacauccgaugaaacgaaguggugucccccugaccagcucguuaaccugcacgacuuccgcucugaugagaucgagcaucuugugguggaggaacuggucaaaaagagagaagagugccucgacgcccuggaaagcauuaugaccacaaaauccgugagcuuucggcgccuuucucaccugagaaagcucguucccggcuucgggaaggcuuacaccaucuucaauaaaacacugauggaggccgaugcucauuauaaguccgugcggaccuggaacgagaucauucccagcaaaggaugccugcgcgucggcgggagaugccacccucacgugaauggaguguuuuucaacggcaucauucucgggccggacggacauguucugauccccgaaaugcagucuagccuucugcagcaacacauggagcuccuggaauccucugucauuccucuuaugcauccccuggccgauccuagcacgguguuuaaggacgaugacgaggcggaagauuucgucgaggugcaccuccccgacguucauaaacagguguccggcgucgaucugggccugccgagcugggggaaguacgugcucaugucugccggaguucugacagcucuuaugcugaugaucuuucucaccaccuguugccggagagccaaucgcgcugaguccgcccagcacagccugggcgaacgggggagaaaggugucugucacaucccagagcggacgcgugaucuccucuugggagagcuauaaauccggcggggaaaccaagcuguga

SEQ ID NO: 222874 - RNA, 1575 nt, Artificial Sequence; identical to SEQ ID NO: 222706
  derived and/or modified CDS sequence (opt5) from glycoprotein__RABV__AB838710.1

SEQ ID NO: 222875 - RNA, 1575 nt, Artificial Sequence
  derived and/or modified CDS sequence (opt5) from glycoprotein__RABV__AB905545.1
augaucccccaggcccuccuguucgugccucugcuuauuagcuccucuugccugggcaaguuuccgaucuacaccauucccgacaaacucgggccuuggagccccaucgauauucaccaucuguccuguccuaacaaucuugucguugaggacgaaggaugcacaaaccugucuggcuucagcuauauggagcucaaggugggguacaucuccgcuaucaaagugaauggauuuacguguaccggcgucgugacagaagccgagaccuauacaaacuucguuggguacgugaccacaaccuuuaagagaaaacacuuccggcccauuccugaugcgugccgcgcugccuauaauuggaagauggccggagacccgagauacgaagagucucugcaaaaccccuauccugauuaccauuggcugcggacggucaagaccacaaaagagagccucaucauuaucucccccagcguggcugaccuggauccuuacgacaagucucuucacucccgcguuuuucccggcggcaaaugucuggggauuaccgugagcucuacauauugcuccaccaaucaugauuacacgaucuggaugccggaagaaccuagacucggaacaagcugugacauuuucaccucuuccaagggcaaaaaggccagcaaagggggaaagacaugcggcuuugucgaugaacgggggcuguauaagucccuuaaaggagcuuguaagcugaaacucugcggcgugcugggccugcgccucauggacgggaccugggugucuauccagaccagcgaugacacaaaguggugucccccugaccagcuggucaaccuucacgauuuccacuccgacgagaucgagcaucugguuguggaggagcucgugaaaaagagagaagagugccuggaugcccuugaaagcauuaugacgaccaagucugucuccuuucggcgccugagcuaccucagaaaacuggugcccggauucggcaaggcguauacaaucuuuaauaaaacccugauggaggccgacgcucacuacaagucuguucggacauggaacgagauuauccccagcaaagggugccucaaggugcgcgaaagaugucauccuccggucgauggaguguucuucaauggcauuauccuggggcccgacggaaacguucuuaucccugagaugcaguccucucugcuccaacagcacauggaacugcuugagagcuccgugauuccccugaugcacccucucgccgaucccagcaccgucuuuaaggaaggcgacgaggcugaggauuucguggaaguccaucugccggacgugcacaaacagaucucuggcguugaucuggggcucccuuccuggggaaaguaucugcuuaugauugccggcgggcuggcgacgcucgugcugaucauuugcagcauggccuguugccggcgcacaaaaagaaccgagucucggagacgcggauccggcgaaagcgggaagaaagucaccgcuacaccccagaccaagaaggugguuuccucuugggagcuguacaaaagcgaaggcgacgcccggcuuuga

SEQ ID NO: 222876 - RNA, 1575 nt, Artificial Sequence
  derived and/or modified CDS sequence (opt5) from glycoprotein__RABV__AB981663.1
augaucccccaggcccugcucuuugugccucugcuugucuuuagccugugcuucggcaaguuuccgauuuacaccauccccgacaaacucgggccuuggucccccauugauauccaccaucugucuuguccuaacaaucuuguuguggaggacgaaggaugcacaaaccugagcggcuucuccuauauggagcucaaggugggguacauuucugcuaucaaagucaauggauuuacguguaccggcgugguuacagaagccgagaccuauacaaacuucgugggguacgucaccacaaccuuuaagagaaaacacuuccggcccacgccugaugcgugccgcgcugccuauaauuggaagauggccggagacccgagauacgaagagagccugcauaaccccuauccugauuaccacuggcugcggaccgugaagacaaccaaagagucccucguuaucauuucucccagcguguccgaccuggauccuuacgacaagagccuucauucucgcgucuuucccuccggcaaauguagcggcaucacagugucuuccaccuauugcccgacgaaucacgauuacacaauuuggaugccugaaaaccccagacuggggaccagcugugacaucuucacaaauucucggggaaagcgcgcuuccaaaggcagcaagaccugcggguuuguggaugagagaggacucuauaagucccugaaaggcgccuguaagcugaaacugugcgggguccucggacugcggcugauggacggcaccugggcugccauucaaacaucugaugaagcgaagugguguccucccgaccagcucguuaacauccacgacuuccgcagcgaugagauugagcaucuggugguggaggaacuugucaaaaagagagaagagugccuggacgcccucgaauccaucaugacgaccaaaagcgugucuuuucggcgccugucccaccuuagaaagcugguucccggcuucgggaaggcuuacacaaucuucaauaaaacccucauggaggccgaugcucauuauaagagcgugcggacauggaacgagauuaucccuucuaaaggaugccugcgcgucggcgggagaugucacccgcacgugaauggaguuuucuucaacggcauuauccuggggcccgacggacaugugcucauuccugaaaugcagagcucccugcuucagcaacacauggagcugcucgaaucuagcgucaucccccugaugcauccucuugccgaucccuccaccguguuuaaggacggcgaugaggcggaagacuucgucgaggugcaccuuccggauguucauaaacaggugagcggcgucgaccucgggcugccuucuuggggaaaguacgugcugauguccguuggcgccaugaucgcucucaugcugacgauuuuucuuacaaccugcugucggaagaccaauggggccggaagcauccagcacagacccggcgagacagggcgcaaagugucugucaccucccagagcggccgggugauuuccucuugggaaagcuauaaguccggaggcgagacaaaacuguga

SEQ ID NO: 222877 - RNA, 1575 nt, Artificial Sequence
  derived and/or modified CDS sequence (opt5) from glycoprotein__RABV__AB981664.1
augaucccccaggcccuucucuucgugccucugcuugucuuuagccugugcuucggcaaguuuccgauuuacaccauccccgacaaacucgggccuuggucccccauugauauccaccaucugucuuguccuaacaaucuuguuguggaggacgaaggaugcacaaaccugagcggcuucuccuauauggagcucaaggugggguacauuucugcuaucaaagucaauggauuuacguguaccggcgugguuacagaagccgagaccuauacaaacuucgugggguacgucaccacaaccuuuaagagaaaacacuuccggcccacgccugaugcgugccgcgcugccuauaauuggaagauggccggagacccgagauacgaagagagccugcauaaccccuauccugauuaccacuggcugcggaccgugaagacaaccaaagagucccucguuaucauuucucccagcguguccgaccuggauccuuacgacaagagccuucauucucgcgucuuucccuccggcaaauguagcggcaucacagugucuuccaccuauugcccgacgaaucacgauuacacaauuuggaugccugaaaaccccagacuggggaccagcugugacaucuucacaaauucucggggaaagcgcgcuuccaaaggcagcaagaccugcggguuuguggaugagagaggacucuauaagucccugaaaggcgccuguaagcugaaacugugcgggguccucggacugcggcugauggacggcaccugggcugccauucaaacaucugaugaaguuaagugguguccucccgaccagcucgugaacauccacgacuuccgcagcgaugagauugagcaucugguggucgaggaacuugugaaaaagagagaagagugccuggacgcgcucgaauccaucaugacgagcaaaucuguuuccuuucggcgccugagccaccuuagaaagcuggugcccggcuucgggaaggccuacaccaucuucaauaaaacacucauggaggcugaugcccauuauaagucuguccggaccuggaacgagauuaucccuagcaaaggaugccugcgcgugggcgggagaugucacccgcacguuaauggaguguuuuucaacggcauuauccuggggcccgacggacauguccucauuccugaaaugcaguccucucugcuucagcaacacauggagcugcucgaaagcuccgugaucccccugaugcauccucuugcugaucccagcacagucuuuaaggacggcgaugaggccgaagacuucguggagguucaucugccggaugugcacaaacaggucucuggcguggaccucgggcugccuuccuggggaaaguacguucugaugagcgugggcgcgaugaucgcccucaugcugaugauuuuucuuaugaccugcugucggaaggcuaauggggccgagucuauccagcacagacugggagaaacgggccgcaaagucuccgugacaagccaguccgggcgggugauuucuagcugggaguccuauaagucuggcggagaaaccaaacucuga

SEQ ID NO: 222878 - RNA, 1575 nt, Artificial Sequence
  derived and/or modified CDS sequence (opt5) from glycoprotein__RABV__AF344305.1
auggugccccaggcccugcucgucguuccucugcuuggcuucagccugugcuuugggaaguucccgaucuacaccauucccgacaaacucggaccuuggucccccaucgauauucaccaucugucuuguccuaacaaucuugugguggaggacgaaggcugcacaaaccugagcggguuuuccuauauggagcucaaggucggauacaucucugcuauuaaagugaauggcuucacguguaccgggguugugacagaagccgagaccuauacaaacuuugucggauacgugaccacaaccuucaagagaaaacacuuucggcccacgccugaugaaugccgcgcggcucauaauuggaagauggccggcgacccgagauaugaggagagccugcacaaccccuacccugauuaucauuggcugcggaccguuaagacaaccaaagaaucccucgugaucaucucucccagcgucgccgaccuggauccuuacgacaagucccuucacagccgcguguuccccucuggcaaauguuccgggauuacagugagcucuaccuacugcuccacgaaucacgauuauacaaucuggaugccggagaacccuagacugggaaccagcugugacauuuuuacaaauucucggggcaagcgcgcuuccaaagggagcaagaccugcggauucgucgaugaaagaggccucuacaagucccugaaaggggccuguaaacuuaaacugugcggaguucucggccugaagcugauggacggcaccuggguggcuaugcaaacaucugaugagacgaaauggugucccccugaccagcucgugaaccugcaugaccuucggagcgaugagaucgaacaccuggucguggaggaacucguuaagaaacgcgaggaaugccuggacgcccuugaguccauuaugaccacaaagagcgugucuuuuagacggcugucccaucuccgcaagcugguccccggguucggaaaagcguauaccaucuuuaauaagacacugauggaggccgaugcucacuacaaaagcgugagaaccuggaacgaaauuauccccucuaagggcugccucaaaguugggggacggugucacccucaugugaauggcgucuucuucaacggggugauccugggaccggacggccacguccuuauucccgagaugcagagcucccugcuccagcaacauauggaacugcuugagucuagcgugaucccucugaugcacccccucgccgauccuuccacgguuuuuaaggacggcgaugaagcugaggacuucguggagguccaucugcccgaugugcacaagcagguuagcgggguggaccugggacucccgaauuggggcaaauauauuucucuguccgccggggcgcuuaucgcccugaugcucauuauccugcugaugacaugcugucgcaaggucaacagaccugaacccacccagcggagccuugagggaaagaagagaaaagugucugugaccucccagagcggcaagguuaucuccucuugggaaagcuacaaguccgggggcgagacacgccucuga

SEQ ID NO: 222879 - RNA, 1575 nt, Artificial Sequence
  derived and/or modified CDS sequence (opt5) from glycoprotein__RABV__AF344307.1
auggugccccaggcccugcucgucguuccucugcuuggcuucagccugugcuuugggaaguucccgaucuacaccauucccgacaaacucggaccuuggucccccaucgauauucaccaucugucuuguccuaacaaucuugugguggaggacgaaggcugcacaaaccugagcggguuuuccuauauggagcucaaggucggauacaucucugcuauuaaagugaauggcuucacguguaccgggguugugacagaagccgagaccuauacaaacuuugucggauacgugaccacaaccuucaagagaaaacacuuucggcccacgccugaugaaugccgcgcggcuuauaauuggaagauggccggcgacccgagauacgaggagagccugcauaaccccuauccugauuaccacuggcugcggaccguuaagacaaccaaagaaucccucgugaucaucucucccagcgucgccgaccuggauccuuacgacaagucccuucauagccgcguguuccccucuggcaaauguuccgggauuacagugagcucuaccuauugcuccacgaaucacgauuacacaaucuggaugccggagaacccuagacugggaaccagcugugacauuuuuacaaauucucggggcaagcgcgcuuccaaagggagcaagaccugcggauucgucgaugaaagaggccucuauaagucccugaaaggggccuguaagcugaaacugugcggaguucucggccugaagcugauggacggcaccuggguggcuaugcaaacaucugaugagacgaaauggugucccccugaccagcucgugaaccugcacgaccuucggagcgaugagaucgaacaucuggucguggaggaacucguuaagaaacgcgaggaaugccuggacgcccuugaguccauuaugaccacaaagagcgugucuuuuagacggcugucccaccuccgcaagcugguccccggguucggaaaagcguacaccaucuuuaauaagacacugauggaggccgaugcucauuauaaaagcgugagaaccuggaacgaaauuauccccucuaagggcugccucaaaguugaggggcggugucacccucacgugaauggagucuucuucaacggcgugauccuggggccggacggacauguccuuauucccgaaaugcagagcucccugcuccagcaacacauggagcugcuugaaucuagcgugaucccucugaugcauccccucgccgauccuuccacgguuuuuaaggacggcgaugaggcugaggacuucguggaaguccaccuucccgaugugcauaagcagguuagcggcguggaccuggggcucccgaauuggggaaaauacauuucucuguccgccggcgcgcuuaucgcccugaugcucauuauccugcugaugacaugcugucgcaaggucaacagaccugagcccacccagcggagccuugaagggaaaaagagaaaagugucugugaccucccagagcggaaagguuaucuccucuugggagagcuauaaguccggcggggaaacacgccucuga

SEQ ID NO: 222880 - RNA, 1575 nt, Artificial Sequence
  derived and/or modified CDS sequence (opt5) from glycoprotein__RABV__AF499686.2
auggugccccaggcccugcuguucgucccucugcuuguuuuuccgcugugcuucggcaaguuucccaucuacaccauuccugacaaacucgggcccuggagcccuaucgauauucaccaucuguccugucccaacaaucuugugguggaggacgaagagugcacaaaccugucuggauucagcuauauggaacucaaggucggcuacauccuggcuauuaaagugaauggguuuacguguaccggaguugugacagaggccgaaaccuauacaaacuucgucggcuacgugaccacaaccuuuaagagaaaacacuuccggccuacgccggaugcgugccgcgcugccuauaauuggaagauggccggggaccccagauacgaggagucccugcauaacccuuaucccgauuaccgguggcuccgcaccguuaagacaaccaaagaaucucuggugaucaucagcccuuccgucgcugaccuugaucccuacgacagaucucugcacagccggguguuuccguccggaaaguguagcggcguggccgucucuuccacauauugcagcaccaaucaugauuacacgauuuggaugccugagaacccccgccucggcaugucuugugacaucuucacaaauuccagagggaaacgggcuagcaagggaucugaaaccugcggcuuuguugaugagcgcgggcuguauaaaucccuuaagggagccuguaagcugaaacucugcggcgugcuggggcugagacucauggacggaacaugggugagcaugcaaaccuccaacgagaccaagugguguccucccgauaaacuggucaaucuucacgacuuccggucugacgaaauugagcaccuggugguugaggaacucgugcgcaagagagaagagugccuggaugcgcuugagagcaucauggccacaaaauccgucagcuuucggcgccugucucaucucagaaagcuggugcccggcuucggcaaggcuuacacgauuuucaacaaaacccugauggaagccgacgcucacuauaaguccguuagcacauggaaugaggugcucccuucuaaagggugccugcgggucggaggcagaugucauccgcacgugaacggggucuuuuucaauggaaucauucuuggccccgaugggaacgugcugaucccugaaaugcagagcucccuccugcagcagcacauggagcuucuggaaucuagcguuaucccccucgugcauccucuggccgaccccuccaccgucuuuaaggauggagacgaggcggaggauuucguggaaguucaccucccggacgugcauaaccaagucagcggcguggaucucggccugccuaauugggggaaauacgugcuucugucugccggagcucucacagcccugaugcugauuaucuuucuuaugaccugcugucgccggguuaacagauccgagcccacgcagcacaaucuccgcggcacagggcgggaagucagcgugaccccucagucuggaaagauuaucuccagcugggagucccauaaaucuggcggggaaaccagacuguga

SEQ ID NO: 222881 - RNA, 1575 nt, Artificial Sequence
  derived and/or modified CDS sequence (opt5) from glycoprotein__RABV__AJ871962.1
auggugccccaggcccuucucuucgucccucugcuuggcuuuagccugugcuucgggaaguuuccgaucuacaccauucccgacgagcucggaccuuggucccccaucgauauucaccaccugucuuguccuaacaaucuuguuguggaagacgagggcugcacaaaccugagcgaauuuuccuauauggagcucaaagugggguacaucucugcuauuaaggucaauggauuuacguguaccggcgugguuacagaagccgagaccuauacaaacuucgugggguacgucaccacaaccuuuaaaagaaagcacuuccggcccacgccugaugcgugccgcgcugccuauaauuggaaaauggccggagacccgagauacgaggaaagccugcauaaccccuauccugauuaccacuggcugcggaccgugcgcacaaccaaggagucccucaucaucauuucucccagcguuacagaccuggauccuuacgacaagucccuucauagcagaguguuucccggcggcaaauguucugggaucaccgucuccagcacguauugcucuacaaaucacgauuacaccauuuggaugccggaaaacccucggccccgcacaccuugugacaucuucaccaauuccagaggaaagcgggcuagcaaaggcaacaagaccugcggguuuguggaugagcgcggacuguauaaaucucucaagggcgccuguagacugaagcugugcggggugcugggacuccggcugauggacggcacaugggucgcuaugcaaacguccgaugagaccaaaugguguccucccgaccagcugguuaaucuccacgacuuccgcagcgaugaaauugagcaucuggugguggaggaacuugucaagaaaagagaagagugccuggacgcccucgaguccaucaugacaaccaagucugugagcuuucggcgccugucccaccuuagaaaacugguucccggcuucgggaaggcguacacaauuuucaacaaaacccucauggaagccgaugcucauuauaagagcgugcggacguggaaugagaucaucccgucuaagggaugccugaaagucggcgggagaugucacccccacgugaacggaguuuucuucaauggcauuauccuggggccugacggacaugugcucauucccgaaaugcaguccagccugcuucagcaacacauggagcugcucaagucuagcgucaucccucugaugcauccccuugccgauccguccacaguguuuaaagaaggcgacgaggcugaggauuucgucgaagugcaucugccugacguuuacaagcagauuucuggcguggaucucgggcugcccaacuggggaaaauauguccugaugaccgccggcgcgaugaucgggcucgugcugaucuuuagccuuaugaccuggugccgccgggccaacagaccugaguccaagcagcgcagcuucggaggcacagggcggaauguuucugugaccucccagagcggcaaggucauucccucuugggaauccuacaaaagcggaggccaaacaagacuguga

SEQ ID NO: 222882 - RNA, 1575 nt, Artificial Sequence
  derived and/or modified CDS sequence (opt5) from glycoprotein__RABV__AY683208.1
auggugccccaggcccuccuguucgucccuuuucugggcuucagccuuugcuuugggaaguucccgaucuacaccauucccgacaaacugggaccuuggucccccaucgauauucaccaucucucuuguccuaacaaucugguuguggaggacgaaggcugcacaaaccuuagcggguuuuccuaucuggagcucaaggugggacacaucucugcuauuaaagucaauggcuucacguguaccggggugguuacagaagccgagaccuacacaaacuuugugggauaugucaccacaaccuucaagagaaaacauuuucggcccacgccugaugcgugccgcgcugccuacaauuggaagaccgccggcgacccgagauaugaagagagccugcaaaaccccuacccugauuaucaguggcugcggacagugcgcaccacaaaggagucccucguuaucaucucucccagcgcugccgaccuggauccuuacgacaaaucccuucacagcagaguguuccccucuggcaaguguuccgggauuaccgucagcucuguguacugcuccacgaaucaugauuauacaaucuggaugccggaaaacccucggcagggaaugagcugugacauuuuuaccaauucucgcggcaaaagagcuuccaaggagcggaaaacaugcggguucguggaugaacgcggacuguacaagagccucagaggcuccuguaagcugaaacuuugcgggguccugggacuccggcugauggacggcaccuggguugccaugcagaccucuaacgagacaaagugguguagccccgaucaacuggugaaucuccacgacuuucacuccgacgagaucgaacaucugguggucgaggaacuugugaaaaagcgcgaggaaugccuggaugcgcucgagagcauuaugacgaccaaaucuguuuccuucagacggcugagccaccuucgcaagcuggugccuggcuucgggaaagccuauacaaucauuaacaagacccucauggaggcugaagcccauuacaagucugucagaacauggaaugagaucgugcccagcaaaggaugccugcggguugaaggcagaugucacccccacgugaacggggucuuuuucaauggaaucauucugggcccugacgggcaugugcucaucccggagaugcaguccucucugcuucagcagcacauggaacugcucgagagcuccgucauuccccugaugcauccucuugcugaucccagcaccguguuuaaggagggagacgaagccgaggauuucguugaagugcacuuuccugacguccauaaaaaggugucugagguugaucugggccuccccaacuggggcgaauaugugcugcuguccgcggggacgcucaucgcccugaugcuuauuaucuuccugaugaucugccgccggagagucaaccgcccggagagcacacaacggucucucagaggaaccgagaugaaaguguccgugaccccucagagcggcaaguuuaaguccucuugggaaagcuacaaauccggggacgaggcucgccuguga

SEQ ID NO: 222883 - RNA, 1575 nt, Artificial Sequence
  derived and/or modified CDS sequence (opt5) from glycoprotein__RABV__AY705373.1
augaucccccaggcccuccuguucgugccucugcuuauuccgagccugugccucggcaaguuucccaucuacaccauuccugacaaacuggggcccugguccccuaucgauauucaccaucuuucuugucccaacaaucuggucguugaggacgaaggaugcacaagccucuccggcuucucuuauauggagcugaaggugggguacaucagcgcuaugaaagugaacggauuuacguguaccggcgucgugacagaagccgagaccuauacaaauuucguuggguacgugaccacaaccuuuaagagaaaacacuuccggccuaugccggaugcgugccgcgcugcccaugacuggaagaucgccggagaucccagauaugaagacucccugcaaaacccuuaccccgauuaucacuggcuccggacggucaagaccacaaaagagucucuggugauuaucagcccuuccguugcugaccuugaucccuacgacaagagccugcauucucgcguguuuccguccggcaaaugucucggcauuaccgucagcucuacauacugcccuaccaaucacgauuauacgaucuggaugcccguggaggccagacuggggacauccugugacauuuucaccaacagccggggaaagaaagccucuaagggcgggcgcacaugcggauuuguggaugaaagaggccuuuacaagucccugaaaggggccuguaagcucaaacugugcggagucccuggccugcggcucaugaauggcaccuggguuagcauccagaccuccgacgacauuaagugguguccucccgaucagcuggugaaccuucacgacuuccauucugaugagaucgaacaccugguggucgaggagcucaucaaaaagcgcgaagggugccuggacgcgcuugagagcauuaugacaacgaaauccgugagcuuuagacggcugucucaucuccgcaagcugguucccggauucggcaaggccuauaccaucuuuaauaacacacugauggaagcugaugcccacuacaaauccgugagaaccuggaaugaggucauuccgagcaaggggugccucaaagugggaggccggugucaucccccuguuaacgggguguucuucaauggaaucauucugggccccgacggcaacguccuuaucccugaaaugcagucuagccugcuccaacagcacauggagcugcuugaguccucugugaucccccugaugcacccgcucgcugauccuagcacagucuuuaaggacggggaugaagccgaggacuucguggaaguucaucugcccgaugugcacaaacaggucuccgacguggaccugggacucccuagcuggggcaaguaucugcuuaugucugcgggggcccuggcuacccucauucuggccaucuuucugauuacgugcugucgcagagcuaaucggacaaaguccacccagagaggacaucgcgagagcggcgggaaaguuucuguggcuccccaaaacggcaagaucauuuccagcugggaacuuuacaaauccgagucugagaccggaauguga

SEQ ID NO: 222884 - RNA, 1575 nt, Artificial Sequence
  derived and/or modified CDS sequence (opt5) from glycoprotein__RABV__AY956319.1
auggugccccaggcccugcuguucgucccucugcuuguugugagcaugugcuuuggcaaguucccgaucuacaccgugcccgacaaacuggggccuuggucccccauugauauccaccaucucucuuguccuaacaaucuggucguggaggacgaaggaugcacaaaccuuagcggcuuuuccuauauggagcugaagguuggguacauuucugcuaucaaagugaauggauucacguguaccggcgucgugacagaagccgagaccuauacaaacuuuguuggguacgugaccacaaccuucaagagaaaacacuuucggcccacgccugaugcgugccgcgcugccuauaauuggaagauggccggagacccgagauacgaagagagccuccauaaccccuauccugauuaccacuggcugcggaccgucaagacaaccaaagagucccuggugauuaucucucccagcguggcugaccucgauccuuacgacaagucccugcauagccgcgucuuccccucuggcaaauguuccggcaucacaauuagcucuaccuauugcuccacgaaucacgauuacacaaucuggaugccggaaaacccuagacuugggaccagcugugacauuuuuacaaauucucggggaaagcgcgccuccaaaggcgggaagaccugcggauucguugaugagagaggccuguauaagagccucaaaggggcuuguaagcugaaacuuugcggagugcugggccuccggcugauggacggcaccuggguggccaugcaaacauccgaugaaacgaaguggugucccccugaccagcuggucaaccuccacgacuuucgcucugaugagaucgagcaucuggugguugaggaacuugugaaaaagagagaagagugccuggacgcgcucgaaagcauuaugaccacaaaauccgucagcuuccggcgccugucucaccuuagaaagcuggugcccggguuuggaaaggccuacaccaucuucaauaaaacacucauggaggcugaugcccauuauaaguccguucggaccuggaacgagauuauccccagcaaaggcugccugcgcgucgggggaagaugucacccucacgugaauggcguguucuuuaacgggaucauucugggaccggacggccauguccucauccccgaaaugcagucuagccugcuucagcaacacauggagcugcucgaauccucugugauuccucugaugcauccccuugcugauccuagcacgguuuucaaggacggcgaugaggccgaagacuuuguggagguccaccuccccgaugugcauaaacagguuuccgggguggaccucggacugccgagcuggggcaaguacguccuggugucugcgggggugcucguuguccugaugcuuacaaucuucauuaugaccugcugucggagagugcaccgcccuaaguccacccagcacggacugggcgggacaggccggaaagugagcgucaccucucaguccggaaaggugaucagcuccugggagucuuauaaaagcggcggggaaacaagacucuga

SEQ ID NO: 222885 - RNA, 1575 nt, Artificial Sequence
  derived and/or modified CDS sequence (opt5) from glycoprotein__RABV__DQ074978.1
auggugccccaggcccuucucuucgucccucugcuuguuuuuccgcugugcuucggcaaguuucccaucuacaccauuccugacaaacucgggcccuggagcccuaucgauauucaccaucuguccugucccaacaaucuugugguggaggacgaaggaugcacaaaccugucuggcuucagcuauauggagcucaaggucggguacaucuccgcuauuaaaaugaauggauuuacguguaccggcgugguuacagaagccgagaccuauacaaacuucgugggguacgucaccacaaccuuuaagagaaaacacuuccggccuacgccggaugcgugccgcgcugccuauaauuggaagauggccggagaccccagauacgaagagucucugcauaacccuuaucccgauuaccacuggcugcggaccgugaagacaaccaaagagagccucguuaucaucuccccuucuguggcugaccuggaucccuacgacauuagccuucauucccgcgucuuuccgggcggcaauuguagcgggguggccgugucuuccacauauugcagcaccaaccacgauuacacgaucuggaugccugaaaaucccagacugggaaugucuugugacauuuucacaaacucccggggcaagcgcgagagcaaagggucugaaaccugcggauuugucgaugagagaggccucuauaagucccugaaaggggcuuguaagcugaagcugugcggaguucucggccugcggcugauggacggcacauggguggccaugcaaaccagcaaugagaccaaaugguguccucccgggcagcucgugaaccugcacgauuuccgcuccgacgaaaucgagcaucuugucguggaggaacugguuagaaagcgggaagagugccucgacgcgcuggagucuauuaugacaacgaaaagcguguccuuucgcagacuuagccaucugcggaagcucguccccggauucggcaaagccuacaccaucuucaauaagacacugauggaagcugaugcccacuauaaaucugugcgcaccuggaacgagauuaucccuuccaaggggugccugagaguuggaggccggugucacccgcacgugaauggggucuuuuucaacggaaucauucucggccccgacggcaacgugcugaucccugaaaugcagagcucucuucugcagcaacauauggagcuccuggucagcuccgugauuccccuuaugcacccucuggcugaucccucuacaguuuuuaagaauggggacgaagccgaggauuucguggagguccaucucccggacgugcacgaaagaaucagcggaguugaucugggccugccuaacugggggaaauacgugcuccuguccgcgggagcccuuaccgcucugaugcucauuaucuuucugaugacgugcuggcgccgggucaauagaagcgagcccacacagcauaaccugcgcggcaccgggcgggaagugucugugaccccucaguccggcaagaucauuagcucuugggagucccacaaaagcggaggcgaaacaagacuuuga

SEQ ID NO: 222886 - RNA, 1575 nt, Artificial Sequence
  derived and/or modified CDS sequence (opt5) from glycoprotein__RABV__DQ076093.1
auggugccccaggcccuucucuucgucccucugcuuguuuuuagcaugugcuucggcaaguuuccgaucuacaccauucccgacaaacuggggccuuggucccccaucgauauucaccaucucucuuguccuaacaaucuggugguggaggacgaaggaugcacaaaccuuagcggcuucuccuauauggagcugaaggucggguacaucucugcuauuaaagugaauggauuuacguguaccggcguugugacagaagccgagaccuauacaaacuucgucggguacgugaccacaaccuuuaagagaaaacacuuccggcccacgccugaugcgugccgcgcugccuauaauuggaagauggccggagacccgagauacgaagagagccuccauaaccccuauccugauuaccacuggcugcggaccguuaagacaaccaaagagucccuggugaucaucucucccagcgucgcugaccucgauccuuacgacaagucccugcauagccgcguguuucccaauggcaaauguucuggcauuacaaucuccagcaccuauugcccgacgaaccacgauuacacaauuuggcuuccugaaaaucccagacuggggaccucuugugacaucuucacaaacucccggggaaagcgcgccagcaaaggcucuaagaccugcggguuuguggaugagagaggacucuauaagucccugaaaggcgcuuguaagcugaaacugugcgggguccucggacugcggcugauggacggcaccuggguugccaugcaagcgagcgaugaaacaaagugguguccucccgaccagcucgugaaucugcacgacuuccgcuccgaugagauugagcaucuuguggucgaggaacuggugaaaaagagagaagagugccucgacgcccuggaaucuaucaugacgaccaaaagcguuuccuuucggcgccuuagccaccugagaaagcucgugcccggcuucgggaaggcuuacacaauuuucaacaaaacccugauggaggccgaugcucauuauaagucuguccggacauggaaugagaucaucccuuccaaaggaugccugcgcgugggcgggagaugucacccgcacguuaacggaguguuuuucaauggcauuauccucgggcccgacggacauguccugauuccugaaaugcagagcucucuucugcagcaacacauggagcuccuggaaagcuccgugaucccccuuaugcauccucuggccgaucccucuaccgucuuuaaggacggcgaugaggcggaaaacuucguggagguucaccucccggacgugcauaaacagauuagcggcgucgaucuggggcugccuaacuggggaaaguacgugcucguuuccgccggcgugcugaucgcucuuaugcugaucauuuuucucaugacgugcugugggcgggucaauagacccaagagcacacagcacaaccugggaggcaccgggcgcaaagugucugugaccccucaguccggcaagguuaucagcucuugggaguccuauaaaagcggaggcgggacacggcuguga

SEQ ID NO: 222887 - RNA, 1575 nt, Artificial Sequence
  derived and/or modified CDS sequence (opt5) from glycoprotein__RABV__DQ076096.1
auggugccccaggcccuucucuucgucccucugcuuguuuuuagcaugugcuucggcaaguuuccgaucuacaccauucccgacaaacuggggccuuggucccccaucgauauucaccaucucucuuguccuaacaaucuggugguggaggacgaaggaugcacaaaccuuagcggcuucuccuauauggagcugaaggucggguacaucucugcuauuaaagugaauggauuuacguguaccggcguugugacagaagccgagaccuauacaaacuucgucggguacgugaccacaaccuuuaagagaaaacacuuccggcccacgccugaugcgugccgcgcugccuauaauuggaagauggccggagacccgagauacgaagagagccuccauaaccccuauccugauuaccacuggcugcggaccguuaagacaaccaaagagucccuggugaucaucucucccagcgucgcugaccucgauccuuacgacaagucccugcauagccgcguguuucccaauggcaaauguucuggcauuacaaucuccagcaccuauugcccgacgaaccacgauuacacaauuuggcuuccugaaaaucccagacuggggaccucuugugacaucuucacaaacucccggggaaagcgcgccagcaaaggcucuaagaccugcggguuuguggaugagagaggacucuauaagucccugaaaggcgcuuguaagcugaaacugugcgggguccucggacugcggcugauggacggcaccuggguugccaugcaagcgagcgaugaaacaaagugguguccucccgaccagcucgugaaucugcacgacuuccgcuccgaugagauugagcaucuuguggucgaggaacuggugaaaaagagagaagagugccucgacgcccuggaaucuaucaugacgaccaaaagcguuuccuuucggcgccuuagccaccugagaaagcucgugcccggcuucgggaaggcuuacacaauuuucaacaaaacccugauggaggccgaugcucauuauaagucuguccggacauggaaugagaucaucccuuccaaaggaugccugcgcgugggcgggagaugucacccgcacguuaacggaguguuuuucaauggcauuauccucgggcccgacggacauguccugauuccugaaaugcagagcucucuucugcagcaacacauggagcuccuggaaagcuccgugaucccccuuaugcauccucuggccgaucccucuaccgucuuuaaggacggcgaugaggcggaaaacuucguggagguucaccucccggacgugcauaaacagauuagcggcgucgaucuggggcugccuaacuggggaaaguacgugcucguuuccgccggcgugcugaucgcucuuaugcugacgaucuuucucaugacaugcugugggcgggucaauagacccaagagcacccagcacaaccugggaggcaccgggcgcaaagugucugugacaccucaguccggcaagguuauuagcucuugggaguccuauaaaagcggaggcgggacccggcuguga

SEQ ID NO: 222888 - RNA, 1575 nt, Artificial Sequence
  derived and/or modified CDS sequence (opt5) from glycoprotein__RABV__DQ076097.1
auggugccccaggcccuucucuucgucccucugcuuguuuuuagcaugugcuucggcaaguuuccgaucuacaccauucccgacaaacuggggccuuggucccccaucgauauucaccaucucucuuguccuaacaaucuggugguggaggacgauggaugcacaaaccuuagcggcuucuccuauauggaacugaaggucggguacaucucugcuauuaaagugaauggauuuacguguaccggcguugugacagaggccgaaaccuauacaaacuucgucggguacgugaccacaaccuuuaagagaaaacacuuccggcccacgccugacgcgugccgcgcugccuauaauuggaagauggccggagauccgagauacgaggaaagccuccauacccccuauccugacuaccacuggcugcggacaguuaagaccacaaaagagucccuggugaucaucucucccagcgucgcugaucucgacccuuacgauaagucccugcauagccgcguguuucccaacggcaaauguucuggcauuaccaucuccagcacguauugcccgacaaaucacgacuacaccauuuggcuuccugagaaccccagacuggggacaucuugugauaucuucaccaauucccggggaaagcgcgccagcaaaggcucuaagaccugcggguuuguggacgaaagaggacucuauaagucccugaaaggcgcuuguaagcugaaacugugcgggguccucggacugcggcugauggauggcacauggguugccaugcaagcgagcgacgagacgaagugguguccucccgaccagcucgugaaccugcacgauuuccgcuccgacgaaauugagcaucuuguggucgaggaacuggugaaaaagagagaggaaugccucgaugcccuggagucuaucaugaccacaaaaagcguuuccuuucggcgccuuagccaccugagaaagcucgugcccggcuucgggaaggcuuacaccauuuucaauaaaacacugauggaagccgacgcucauuauaagucuguccggaccuggaacgagaucaucccuuccaaaggaugccugcgcgugggcgggagaugucacccgcacguuaauggaguguuuuucaacggcauuauccucgggcccgauggacauguccugauuccugagaugcagagcucucuucugcagcaacacauggaacuccuggagagcuccgugaucccccuuaugcauccucuggccgaccccucuacggucuuuaaggauggcgacgaagcggagaauuucguggaaguucaccucccggaugugcauaaacagauuagcggcgucgaccuggggcugccuaacuggggaaaguacgugcucguuuccgccggcgugcugaucgcucuuaugcugaucauuuuucucaugacaugcugugggcgggucaacagacccaagagcacccagcacaaucugggaggcaccgggcgcaaagugucugugacaccucaguccggcaagguuaucagcucuugggaguccuauaaaagcggaggcgggacccggcuguga

SEQ ID NO: 222889 - RNA, 1575 nt, Artificial Sequence; identical to SEQ ID NO: 222886
  derived and/or modified CDS sequence (opt5) from glycoprotein__RABV__DQ076098.1

SEQ ID NO: 222890 - RNA, 1575 nt, Artificial Sequence
  derived and/or modified CDS sequence (opt5) from glycoprotein__RABV__DQ076099.1
auggugccccaggcccuucucuucaucccucugcuugucuuuccgaugugcuucggcaaguuucccauuuacaccaucccugacaaacuggggcccuggagcccuauugauauccaccaucucuccugucccaacaaucugguuguggaggacgaagagugcacaaaccuuucuggauucagcuauauggaacugaaggugggcuacauuuccgcuaucaaagucaauggguuuacguguaccggagugguuacagaggccgaaaccuauacaaacuucgugggcuacgucaccacaaccuuuaagagaaaacacuuccggccuacgccggaugcgugccgcgcugccuauaauuggaagauggccggggaccccagauacgaggagucucuccauaacccuuaucccgauuaccacuggcugcggaccgugaagacaaccaaagaaagccugguuaucauuuccccuucuguggcugaccucgaucccuacgacaagagccugcauucccgcgucuuuccgaauggaaaauguagcggcaucacaauuucuuccaccuauugcccuacgaaccacgauuacacaaucuggcuucccgagaauccuagacugggcaccagcugugacauuuucgccaacucucgggggaagcgcgcuuccaaaggaagcaagacaugcggcuuuguggaugaaagagggcucuauaagucucugaaaggagccuguaagcugaaacugugcggcgugcucgggcugcggcugauggacggaaccugggucgcgaugcaaaccuccgaugagacaaagugguguccucccgaccagcucguuaaucugcacgacuuccgcagcgaugagaucgaacaucuugugguggaggaacuggucaaaaagagagaggaaugccucgacgcccuggaguccauuaugacgaccaaaucugugagcuuucggcgccuuucccaccugagaaagcucguucccggcuucggcaaggcuuacacaaucuucaacaaaacccugauggaggccgaugcucauuauaagagcgugcggacauggaaugaaaucauuccgucuaaagggugccugcgcgucggaggcagaugucacccccacgugaacgggguguuuuucaauggaaucauucucggccaugacgggcacguucugaucccugagaugcaguccagccuucugcagcaacauauggaacuccuggagucuagcgucauuccccuuaugcacccucuggccgaucccuccaccguguuuaaggacggagaugaagcggaggacuucgucgaggugcaucucccggauguucacaaacagaucucuggcguggaccugggccugccuaacugggggaaguacguccucgugagcgccggaguucugaucgcucuuaugcugauuaucuuucucaugacgugcuguggccgggugaacagacccaaguccacacagcacaaucugggggaaaccggacgcaaagucagcgugaccucucaguccggcaaggugauuagcucuugggaguccuauaaaagcgggggcggaacacggcuguga

SEQ ID NO: 222891 - RNA, 1575 nt, Artificial Sequence
  derived and/or modified CDS sequence (opt5) from glycoprotein__RABV__DQ076100.1
auggugccccaggcccuucucuucgucccucugcuuguuuuuagcaugugcuucggcaaguuuccgaucuacaccauucccgacaaacuggggccuuggucccccaucgauauucaccaucucucuuguccuaacaaucuggugguggaggacgaaggaugcacaaaccuuagcggcuucuccuauauggagcugaaggucggguacaucucugcuauuaaagugaauggauuuacguguaccggcguugugacagaagccgagaccuauacaaacuucgucggguacgugaccacaaccuuuaagagaaaacacuuccggcccacgccugaugcgugccgcgcugccuauaauuggaagauggccggagacccgagauacgaagagagccuccauaaccccuauccugauuaccacuggcugcggaccguuaagacaaccaaagagucccuggugaucaucucucccagcgucgcugaccucgauccuuacgacaagucccugcauagccgcguguuucccaauggcaaauguucuggcauuacaaucuccagcaccuauugcccgacgaaccacgauuacacaauuuggcuuccugaaaaucccagacuggggaccucuugugacaucuucacaaacucccggggaaagcgcgccagcaaaggcucuaagaccugcggguuuguggaugagagaggacucuauaagucccugaaaggcgcuuguaagcugaaacugugcgggguccucggacugcggcugauggacggcaccuggguugccaugcaaacaagcgaugaaacgaagugguguccucccgaccagcucgugaaucugcacgacuuccgcuccgaugagauugagcaucuuguggucgaggaacuggugaaaaagagagaagagugccucgacgcgcuggaaucuaucaugaccacaaaaagcguuuccuuucggcgccuuagccaccugagaaagcucgugcccggcuucgggaaggccuacaccauuuucaacaaaacacugauggaggcugaugcccauuauaagucuguccggaccuggaaugagaucaucccuuccaaaggaugccugcgcgugggcgggagaugucacccgcacguuaacggaguguuuuucaauggcauuauccucgggcccgacggacauguccugauuccugaaaugcagagcucucuucugcagcaacacauggagcuccuggaaagcuccgugaucccccuuaugcauccucuggcugaucccucuacggucuuuaaggacggcgaugaggccgaagacuucguggagguucaccucccggaugugcauaaacagauuagcggcgucgaccuggggcugccuaacuggggaaaguacgugcucguuuccgcgggcgugcugaucgcccuuaugcugaucauuuuucucaugacaugcugugggcgggucaacagacccaagagcacccagcacaaucugggaggcaccgggcgcaaagugucugugacaucccagagcggcaagguuaucucuuccugggagagcuauaaauccggaggcgaaacccggcuguga

SEQ ID NO: 222892 - RNA, 1575 nt, Artificial Sequence
  derived and/or modified CDS sequence (opt5) from glycoprotein__RABV__DQ076102.1
auggugccccaggcccuucucuucgucccucugcuuguuuuuagcaugugcuucggcaaguuuccgaucuacaccauucccgacaaacuggggccuuggucccccaucgggauucaccaucucucuuguagcaacaaucuggugguggaggaugaaggcugcacaaaccuuuccggguucucuuauauggagcugaaggucggauacaucagcgcuauuaaagugaauggcuuuacguguaccgggguugugacagaagccgagaccuauacaaacuucgucggauacgugaccacaaccuuuaagagaaaacacuuccggccuacgcccgacgcgugccgcgcugccuauaauuggaagauggccggcgauccuagauacgaagagucccuccauaacccguaucccgacuaccacuggcugcggaccguuaagacaaccaaagagucucuggugaucaucagcccuuccgucgcugaucucgaccccuacgauaagagccugcauucucgcguguuuccuaauggcaaauguuccgggauuacaaucagcucuaccuauugccccacgaaccacgacuacacaauuuggcuuccggaaaauccuagacugggaaccuccugugauaucuucacaaacagccggggcaagcgcgccucuaaaggguccaagaccugcggauuuguggacgagagaggccucuauaagagccugaaaggggcuuguaagcugaaacugugcggaguccucggccugcggcugauggauggcaccuggguugccaugcaaacauccgacgaaacgaaguggugucccccugaucagcucgugaaucugcacgacuuccgcucugacgagauugagcaucuuguggucgaggaacuggugaaaaagagagaagagugccucgaugcgcuggaaagcaucaugaccacaaaauccguuagcuuucggcgccuuucucaccugagaaagcucgugcccggguucggaaaggccuacaccauuuucaacaaaacacugauggaggcugacgcccauuauaaguccguccggaccuggaaugagaucauccccagcaaaggcugccugcgcgugggaggaagaugucacccucacguuaacggcguguuuuucaaugggauuauccucggaccggauggccauguccugauucccgaaaugcagucuagccuucugcagcaacacauggagcuccuggaauccucugugaucccucuuaugcauccccuggcugacccuagcacggucuuuaaggauggcgacgaggccgaagauuucguggagguucaccuccccgacgugcauaaacagauuuccggggucgaucugggacugccgaacuggggcaaguacgugcucguuagcgcgggggugcugaucgcccuuaugcugaucauuuuucucaugacaugcuguggacgggucaacagaccuaagucuacccagcacaaucugggcgggaccggccgcaaaguguccgugacaagccagucuggaaagguuaucuccagcugggaguccuauaaaucuggcggggaaacccggcuguga

SEQ ID NO: 222893 - RNA, 1575 nt, Artificial Sequence
  derived and/or modified CDS sequence (opt5) from glycoprotein__RABV__DQ076103.1
auggugccccaggcccuucucuucgucccucugcuuguuuuuagcaugugcuucggcaaguuuccgaucuacaccauucccgacaaacuggggccuuggucccccaucgauauucaccaucucucuuguccuaacaaucuggugguggaggacgaaggaugcacaaaccuuagcggcuucuccuauauggagcugaaggucggguacaucucugcuauuaaagugaauggauuuacguguaccggcguugugacagaagccgagaccuauacaaacagcgucggguacgugaccacaaccuucaagagaaaacacuuucggcccacgccugaugcgugccgcgcugccuauaauuggaagauggccggagacccgagauacgaagagucccuccauaaccccuauccugauuaccacuggcugcggaccguuaagacaaccaaagagucucuggugaucaucagccccuccgucgcugaccucgauccuuacgacaagagccugcauucucgcguguuccccaauggcaaauguuccggcauuacaaucagcucuaccuauugcccgacgaaccacgauuacacaauuuggcuuccugaaaaucccagacuggggaccuccugugacaucuuuacaaacagccggggaaagcgcgccucuaaaggcuccaagaccugcggguucguggaugagagaggacucuauaagagccugaaaggcgcuuguaagcugaaacugugcgggguccucggacugcggcugauggacggcaccuggguugccaugcaaacauccgaugaaacgaagugguguccucccgaccagcucgugaaucugcacgacuuucgcucugaugagauugagcaucuuguggucgaggaacuggugaaaaagagagaagagugccucgacgcgcuggaaagcaucaugaccacaaaauccguuagcuuccggcgccuuucucaccugagaaagcucgugcccggcuuugggaaggccuacaccauuuucaacaaaacacugauggaggcugaugcccauuauaaguccguccggaccuggaaugagaucaucccuagcaaaggaugccugcgcgugggcgggagaugucacccgcacguuaacggaguguucuuuaauggcauuauccucgggcccgacggacauguccugauuccugaaaugcagucuagccuucugcagcaacacauggagcuccuggaauccucugugaucccccuuaugcauccucuggcugaucccagcacggucuucaaggacggcgaugaggccgaagacuuuguggagguucaccucccggaugugcauaaacagauuuccggcgucgaccuggggcugccuaacuggggaaaguacgugcucguuagcgcgggcgugcugaucgcccuuaugcugaucauuuuccucaugacaugcugugggcgggucaacagacccaagucuacccagcacaaucugggaggcaccgggcgcaaaguguccgugacaagccagucuggcaagguuaucuccagcugggaguccuauaaaucuggaggcgaaacccggcuguga

SEQ ID NO: 222894 - RNA, 1575 nt, Artificial Sequence
  derived and/or modified CDS sequence (opt5) from glycoprotein__RABV__DQ076104.1
auggugccccaggcccuucucuucgucccucugcuuguuuuuagcaugugcuucggcaaguuuccgaucuacaccauucccgacaaacuggggccuuggucccccaucgauauucaccaucucucuuguccuaacaaucuggugguggaggacgaaggaugcacaaaccuuagcggcuucuccuauauggagcugaaggucggguacaucucugcuauuaaagugaauggauuuacguguaccggcguugugacagaagccgagaccuauacaaacuucgucggguacgugaccacaaccuuuaagagaaaacacuuccggcccacgccugaugcgugccgcaccgcuuauaauuggaagauggccggagacccgagauacgaagagagccuccauaaccccuauccugauuaccacuggcugcggacaguuaagaccacaaaagagucccuggugaucaucucucccagcgucgccgaccucgauccuuacgacaagucccugcauagccgcguguuucccaauggcaaauguucuggcauuaccaucuccagcacguauugcccgacaaaccacgauuacaccauuuggcuuccugaaaaucccagacuggggacaucuugugacaucuucaccaacucccggggaaagcgcgcuagcaaaggcucuaagaccugcggguuuguggaugagagaggacucuauaagucccugaaaggcgccuguaagcugaaacugugcgggguccucggacugcggcugauggacggcacauggguugcuaugcaaacgagcgaugaaaccaagugguguccucccgaccagcucgugaaucugcacgacuuccgcuccgaugagauugagcaucuuguggucgaggaacuggugaaaaagagagaagagugccucgacgcccuggaaucuaucaugacaaccaaaagcguuuccuuucggcgccuuagccaccugagaaagcucgugcccggcuucgggaaggcguacacaauuuucaacaaaacccugauggaggccgaugcucauuauaagucuguccggacguggaaugagaucaucccuuccaaaggaugccugcgcgugggcgggagaugucacccgcacguuaacggaguguuuuucaauggcauuauccucgggcccgacggacauguccugauuccugaaaugcagagcucucuucugcagcaacacauggagcuccuggaaagcuccgugaucccccuuaugcauccucuggccgaucccucuacagucuuuaaggacggcgaugaggcugaagacuucguggagguucaccucccggaugugcauaaacagauuagcggcgucgaccuggggcugccuaacuggggaaaguacgugcucguuuccgccggcgugcugaucgcgcuuaugcugaucauuuuucucaugaccugcugugggcgggucaacagacccaagagcacccagcacaaucugggaggcacagggcgcaaagugucugugaccucccagagcggcaagguuaucucuuccugggagagcuauaaauccggaggcgaaacacggcuguga

SEQ ID NO: 222895 - RNA, 1575 nt, Artificial Sequence
  derived and/or modified CDS sequence (opt5) from glycoprotein__RABV__DQ076105.1
auggugccccaggcccugcuguucgucccucugcuuguuuuuagcaugugcuucggcagauuuccgaucuacaccauucccgacaagcuggggccuuggucccccaucgauauucaccaucucucuuguccuaacaaucuggugguggaggacgaaggaugcacaaaccuuagcggcuucuccuauauggagcugaaagucggguacaucucugcuauuaaggugaauggauuuacguguaccggcguugugacagaagccgagaccuauacaaacuucgucggguacgugaccacaaccuuuaaacggaagcacuuccgccccacgccugaugcgugcagagcugccuauaauuggaaaauggccggagacccgcgguacgaagagagccuccauaaccccuauccugauuaccacuggcugcgcaccguuaagacaaccaaggagucccuggugaucaucucucccagcgucgcugaccucgauccuuacgacaaaucccugcauagcagaguguuucccaauggcaaguguucuggcauuacaaucuccagcaccuauugcccgacgaaccacgauuacacaauuuggcuuccugaaaauccccggcuggggaccucuugugacaucuucacaaacucccgcggaaaaagagccagcaagggcucuaaaaccugcggguuuguggaugagcggggacucuauaagucccugaagggcgcuuguaaacuuaagcugugcgggguccucggacugcgccugauggacggcaccuggguugccaugcaaacaagcgaugaaacgaaaugguguccucccgaccagcucgugaaucugcacgacuucagauccgaugagauugagcaucuuguggucgaggaacuggugaagaaacgggaagagugccucgacgcgcuggaaucuaucaugaccacaaagagcguuuccuuucgcagacuuagccaccuccggaaacucgugcccggcuucgggaaggccuacaccauuuucaacaagacacugauggaggcugaugcccauuauaaaucuguccgcaccuggaaugagaucaucccuuccaagggaugccugagagugggcgggcggugucacccgcacguuaacggaguguuuuucaauggcauuauccucgggcccgacggacauguccugauuccugaaaugcagagcucucuucugcagcaacacauggagcuccuggaaagcuccgugaucccccuuaugcauccucuggcugaucccucuacggucuuuaaagacggcgaugaggccgaagacuucguggagguucaccucccggaugugcauaagcagauuagcggcgucgaccuggggcugccuaacuggggaaaauacgugcucguuuccgcgggcgugcugaucgcccuuaugcugaugaucuuucucaugacaugcugugggagagucaaccgccccaagagcacccagcacaaucugggaggcaccgggcggaaggugucugugacaucccagagcggcaaaguuauuucuuccugggagagcuauaaguccggaggcgaaaccagacuguga

SEQ ID NO: 222896 - RNA, 1575 nt, Artificial Sequence
  derived and/or modified CDS sequence (opt5) from glycoprotein__RABV__DQ849044.1
augaucccccaggugcuucucuucgucccucugcuuguuuuuagcuccugcuucggcaaguuuccgauuuacaccauccccgacaaacuggggccuuggucucccauugauauccaccaucucagcuguccuaacaaucuggugguggaggacgaaggaugcacaaaccuuuccggcuucucuuauauggagcugaaggucggguacauuagcgccaucaaagugaauggauuuacguguaccggcguugugacagaagcugagaccuauacaaacuucgucggguacgugaccacaaccuuuaagagaaaacacuuccggcccacgccugaugccugccgcgcggcuuauaauuggaagauggccggagacccgagauacgaagagucccuccauaaccccuauccugauuaccacuggcugcggaccguuaagacaucuaaagagagccuggugaucauuucccccagcgucgccgaccucgauccuuacgacaagucucugcauucccgcguguuucccggcggcaaauguagcgggaucaccgugucuuccacaugcuguagcaccaaucacgauuauacgauuuggaugccggaaaacccuagacuuggaacaucuugcgacaucuucaccaauucccggggcaagcgcgcuagcaaagggggaaagacauguggcuuugucgaugagagagggcuguacaaguccauuaaaggagccugcaagcucaaacuguguggcguucuuggccugcggcucauggacgggaccuggguggcuauccaaaccucugaugaaauuaaguggugcagccccgaccagcuggugaaccugcacgacuuccauuccgaugagaucgagcaccucgucguggaggaacugguuaaaaagcgcgaagagugccuugacgcccuggaaacaaucaugacgaccaaaagcgugucuuuuagacggcucucccaucugcgcaagcuggucccuggauucggcaaggcguauacaauuuucaauaaaacccugauggaggccgaugcucacuacaagagcaucagaacauggaacgagauuauccccucuaaagggugucuccgggugggaggccgcugccacccccauguuaaugggguguuuuucaacggaauuauccugggcccugacggccacguccugaucccggaaaugcagagcucccuccugcaucagcacauggagcuucuggaaucuagcgugauuccccucaugcauccucuggccgaucccuccaccgucuuuaaggacggggaugaggcugaagacuucguggagguucaccuuccugaugugcacaaacaaaucagcggagucgaccugggccuccccaauugggggaaguaugugcugguuucugccggagcgcugacggcccucaugcugaugauuuuucuuaugacauguugcagaaagaccaaccgggcugaguccauccagcauagcccgggcgaaaccgggagaaaagugucugucacaucccacaacggccgcgugauuagcuccugggagucuuacaagagcggaggcgaaaccaaacuguga

SEQ ID NO: 222897 - RNA, 1575 nt, Artificial Sequence
  derived and/or modified CDS sequence (opt5) from glycoprotein__RABV__DQ849045.1
augaucccccaggugcugcuguucgucccucugcuuguuuuuagcuccugcuucggcaaguuuccgauuuacaccauccccgacaaacuggggccuuggucucccauugauauccaccaucucagcuguccuaacaaucuggugguggaggacgaaggaugcacaaaccuuuccggcuucucuuauauggagcugaaggucggguacauuagcgccaucaaagugaauggauuuacguguaccggcguugugacagaagcugagaccuauacaaacuucgucggguacgugaccacaaccuuuaagagaaaacacuuccggcccacgccugaugccugccgcgcggcuuauaauuggaagauggccggagacccgagauacgaagagucccuccauaaccccuauccugauuaccacuggcugcggaccguuaagacaucuaaagagagccuggugaucauuucccccagcgucgccgaccucgauccuuacgacaagucucugcauucccgcguguuucccggcggcaaauguagcgggaucaccgugucuuccacaugcuguuucaccaaucacgauuauacgauuuggaugccggaaaacccuagacuuggaacaagcugcgacaucuuuaccaauucucggggcaagcgcgcuuccaaagggggaaagacauguggcuucgucgaugagagagggcuguacaagagccucaaaggagccugcaagcugaaacuuuguggcguucugggccuccggcugauggacgggaccuggguggcuauucaaaccuccgaugaaaucaaguggugcucucccgaccagcuggugaaccuccacgacuuucauagcgaugagauugagcaccuggucguggaggaacuuguuaaaaagcgcgaagagugccuggacgcccucgaaacaaucaugacgaccaaauccgugagcuucagacggcugucucaucuucgcaagcuggucccuggauucggcaaggcguauacaaucuuuaauaaaacccucauggaggccgaugcucacuacaaguccauuagaacauggaacgagaucauucccagcaaagggugucugcgggugggaggccgcugccacccccauguuaaugggguguucuuuaacggaaucauucugggcccugacggccacguccucaucccggaaaugcagucuagccugcuucaucagcacauggagcugcucgaauccucugugaucccccugaugcauccucuugccgaucccagcaccgucuucaaggacggggaugaggcugaagacuuuguggagguucaccucccugaugugcacaaacaaauuuccggagucgaccucggccugcccaauugggggaaguaugugcugguuagcgccggagcgcucacggcccugaugcuuaugaucuuccugaugacauguugcagaaagaccaaccgggcugagucuauucagcauuccccgggcgaaaccgggagaaaagugagcgucacaucucacaacggccgcgugaucuccagcugggaguccuacaagucuggaggcgaaaccaaacucuga

SEQ ID NO: 222898 - RNA, 1575 nt, Artificial Sequence
  derived and/or modified CDS sequence (opt5) from glycoprotein__RABV__DQ849046.1
augaucccccaggugcugcuguucgucccucugcuuguuuuuagcuccugcuucggcaaguuuccgauuuacaccauccccgacaaacuggggccuuggucucccauugauauccaccaucucagcuguccuaacaaucuggugguggaggacgaaggaugcacaaaccuuuccggcuucucuuauauggagcugaaggucggguacauuagcgccaucaaagugaauggauuuacguguaccggcguugugacagaagcugagaccuauacaaacuucgucggguacgugaccacaaccuuuaagagaaaacacuuccggcccacgccugaugccugccgcgcggcuuauaauuggaagauggccggagacccgagauacgaagagucccuccauaaccccuauccugauuaccacuggcugcggaccguuaagacaucuaaagagagccuggugaucauuucccccagcgucgccgaccucgauccuuacgacaagucucugcauucccgcguguuucccggcggcaaauguagcgggaucaccgugucuuccacaugcuguuucaccaaucacgaauauacgauuuggaugccggagaacccuagacuuggaacaagcugcgauaucuuuaccaauucucggggcaagcgcgcuuccaaagggggaaagacauguggcuucgucgacgaaagagggcuguacaagagccucaaaggagccugcaagcugaaacuuuguggcguucugggccuccggcugauggaugggaccuggguggcuauucaaaccuccgacgagaucaaguggugcucucccgaucagcuggugaaccuccacgacuuucauagcgacgagauugaacaccuggucguggaggaacuuguuaaaaagcgcgaggaaugccuggaugcccucgagacaaucaugacgaccaaauccgugagcuucagacggcugucucaucuucgcaagcuggucccuggauucggcaaggcguauacaaucuuuaauaaaacccucauggaggccgacgcucacuacaaguccauuagaacauggaacgaaaucauucccagcaaagggugucugcgggugggaggccgcugccacccccauguuaaugggguguucuuuaacggaaucauucugggcccugauggccacguccucaucccggagaugcagucuagccugcuucaucagcacauggaacugcucgaguccucugugaucccccugaugcauccucuugccgaccccagcaccgucuucaaggauggggacgaagcugaggauuuuguggagguucaccucccugacgugcacaaacaaauuuccggagucgaucucggccugcccaauugggggaaguaugugcugguuagcgccggagcgcucacggcccugaugcuuaugaucuuccugaugacauguugcagaaagaccaaccgggcugaaucuauucagcauuccccgggcgagaccgggagaaaagugagcgucacaucucacaacggccgcgugaucuccagcugggaauccuacaagucuggaggcgagaccaaacucuga

SEQ ID NO: 222899 - RNA, 1575 nt, Artificial Sequence
  derived and/or modified CDS sequence (opt5) from glycoprotein__RABV__DQ849047.1
augaucccccaggugcugcuguucgucccucugcuuguuuuuagcuccugcuucggcaaguuuccgauuuacaccauccccgacaaacuggggccuuggucucccauugauauccaccaucucagcuguccuaacaaucuggugguggaggacgaaggaugcacaaaccuuuccggcuucucuuauauggagcugaaggucggguacauuagcgccaucaaagugaauggauuuacguguaccggcguugugacagaagcugagaccuauacaaacuucgucggguacgugaccacaaccuuuaagagaaaacacuuccggcccacgccugaugccugccgcgcggcuuauaauuggaagauggccggagacccgagauacgaagagucccuccauaaccccuauccugauuaccacuggcugcggaccguuaagacaucuaaagagagccuggugaucauuucccccagcgucgccgaccucgauccuuacgacaagucucugcauucccgcguguuucccggcggcaaauguagcgggaucaccgugucuuccacaugcuguagcaccaaucacgauuauacgauuuggaugccggaaaacccuagacuuggaacaucuugcgacaucuucaccaauucccggggcaagcgcgcuagcaaagggggaaagacauguggcuuugucgaugagagagggcuguacaagucccucaaaggagccugcaagcugaaacuuuguggcguucugggccuccggcugauggacgggaccuggguggcuauucaaaccucugaugaaaucaaguggugcagccccgaccagcuggugaaccuccacgacuuccauuccgaugagauugagcaccuggucguggaggaacuuguuaaaaagcgcgaagagugccuggacgcccucgaaacaaucaugacgaccaaaagcgugucuuuuagacggcugucccaucuucgcaagcuggucccuggauucggcaaggcguauacaaucuucaauaaaacccucauggaggccgaugcucacuacaagagcauuagaacauggaacgagaucauucccucuaaagggugucugcgggugggaggccgcugccacccccauguuaaugggguguuuuucaacggaaucauucugggcccugacggccacguccucaucccggaaaugcagagcucccugcuucaucagcacauggagcugcucgaaucuagcgugaucccccugaugcauccucuugccgaucccuccaccgucuuuaaggacggggaugaggcugaagacuucguggagguucaccucccugaugugcacaaacaaauuagcggagucgaccucggccugcccaauugggggaaguaugugcugguuucugccggagcgcucacggcccugaugcuuaugaucuuucugaugacauguugcagaaagaccaaccgggcugaguccauucagcauagcccgggcgaaaccgggagaaaagugucugucacaucccacaacggccgcgugaucagcuccugggagucuuacaagagcggaggcgaaaccaaacucuga

SEQ ID NO: 222900 - RNA, 1575 nt, Artificial Sequence; identical to SEQ ID NO: 222899
  derived and/or modified CDS sequence (opt5) from glycoprotein__RABV__DQ849048.1

SEQ ID NO: 222901 - RNA, 1575 nt, Artificial Sequence
  derived and/or modified CDS sequence (opt5) from glycoprotein__RABV__DQ849049.1
augaucccccaggugcuucucuucgucccucugcuuguuuuucugagcugcuucggcaaguuuccgauuuacaccauccccgacaaacucgggccuuggucccccauugauauccaccaucugucuuguccuaacaaucuugugguggaggacgaaggaugcacaaaccugagcggcuucuccuauauggagcucaaggucggguacauuucugccaucaaagugaauggauuuacguguaccggcguugugacagaagcugagaccuauacaaacuucgucggguacgugaccacaaccuuuaagagaaaacacuuccggcccacgccugaugccugccgcgcggcuuauaauuggaagauggccggagacccgagauacgaagagagccugcauaaccccuauccugauuaccacuggcugcggaccguuaagacauccaaagagucucucgugaucauuagccccuccgucgccgaccuggauccuuacgacaagagccuucauucucgcguguuucccggcggcaaauguuccgggaucaccgugagcucuacaugcuguuccaccaaucacgauuauacgauuuggaugccggaaaacccuagacugggaacaagcugcgacaucuucaccaauucucggggcaagcgcgcuuccaaagggggaaagacauguggcuuugucgaugagagagggcucuacaagagccugaaaggagccugcaagcugaaacuguguggcguucucggccugcggcugauggacgggaccuggguggcuauucaaaccuccgaugaaaucaaguggugcucucccgaccagcucgugaaccugcacgacuuccauagcgaugagauugagcaccuugucguggaggaacugguuaaaaagcgcgaagagugccucgacgcccuggaaacaaucaugacgaccaaauccgugagcuuuagacggcuuucucaucugcgcaagcucgucccuggauucggcaaggcguauacaaucuucaauaaaacccugauggaggccgaugcucacuacaaguccauuagaacauggaacgagaucauucccagcaaagggugucugcgggugggaggccgcugccacccccauguuaaugggguguuuuucaacggaaucauucucggcccugacggccacguccugaucccggaaaugcagucuagccuucugcaucagcacauggagcuccuggaauccucugugaucccccuuaugcauccucuggccgaucccagcaccgucuuuaaggacggggaugaggcugaagacuucguggagguucaccucccugaugugcacaaacaaauuuccggagucgaccugggccugcccaauugggggaaguaugugcucguuagcgccggagcgcugacggcccuuaugcugaugaucuuucucaugacauguugcagaaagaccaaccgggcugagucuauucagcauuccccgggcgaaaucgggagaaaagugagcgucaccucucacaacggccgcgugauuuccagcugggaguccuacaagucuggaggcgaaacaaaacuguga

SEQ ID NO: 222902 - RNA, 1575 nt, Artificial Sequence; identical to SEQ ID NO: 222899
  derived and/or modified CDS sequence (opt5) from glycoprotein__RABV__DQ849050.1

SEQ ID NO: 222903 - RNA, 1575 nt, Artificial Sequence; identical to SEQ ID NO: 222899
  derived and/or modified CDS sequence (opt5) from glycoprotein__RABV__DQ849051.1

SEQ ID NO: 222904 - RNA, 1575 nt, Artificial Sequence
  derived and/or modified CDS sequence (opt5) from glycoprotein__RABV__DQ849052.1
augaucccccaggugcugcuguucgucccucugcuuguuuuuagcuccugcuucggcaaguuuccgauuuacaccauccccgacaaacuggggccuuggucucccauugauauccaccaucucagcuguccuaacaaucuggugguggaggacgaaggaugcacaaaccuuuccggcuucucuuauauggagcugaaggucggguacauuagcgccaucaaagugaauggauuuacguguaccggcguugugacagaagcugagaccuaucccaacuucgucggguacgugacaaccacauuuaagagaaaacacuuccggccuaccccggaugccugccgcgcggcuuauaauuggaagauggccggagaccccagauacgaagagucccuccauaacccuuaucccgauuaccacuggcugcggacgguuaagaccucuaaagagagccuggugaucauuuccccuagcgucgccgaccucgaucccuacgacaagucucugcauucccgcguguuuccgggcggcaaauguagcgggaucacagugucuuccacaugcuguuucaccaaucacgauuauaccauuuggaugccugaaaaccccagacuuggaacgagcugcgacaucuuuacaaauucucggggcaagcgcgcuuccaaagggggaaagaccuguggcuucgucgaugagagagggcuguacaagagccucaaaggagccugcaagcugaaacuuuguggcguucugggccuccggcugauggacgggacauggguggcuauucaaaccuccgaugaaaucaaguggugcucuccugaccagcuggugaaccuccacgacuuucauagcgaugagauugagcaccuggucguggaggaacuuguuaaaaagcgcgaagagugccuggacgcccucgaaaccaucaugacaacgaaauccgugagcuucagacggcugucucaucuucgcaagcugguccccggauucggcaaggcguauaccaucuuuaauaaaacacucauggaggccgaugcucacuacaaguccauuagaaccuggaacgagaucauucccagcaaagggugucugcgggugggaggccgcugccacccucauguuaaugggguguucuuuaacggaaucauucugggcccggacggccacguccucauccccgaaaugcagucuagccugcuucaucagcacauggagcugcucgaauccucugugaucccucugaugcauccccuugccgauccuagcacagucuucaaggacggggaugaggcugaagacuuuguggagguucaccuccccgaugugcacaaacaaauuuccggagucgaccucggccugccgaauugggggaaguaugugcugguuagcgccggagcgcucaccgcccugaugcuuaugaucuuccugaugacguguugcagaaagacaaaccgggcugagucuauucagcauuccccuggcgaaaccgggagaaaagugagcgucaccucucacaacggccgcgugaucuccagcugggaguccuacaagucuggaggcgaaacaaaacucuga

SEQ ID NO: 222905 - RNA, 1575 nt, Artificial Sequence
  derived and/or modified CDS sequence (opt5) from glycoprotein__RABV__DQ849053.1
augaucccccaggugcugcuguucgucccucugcuuguuuuuagcuccugcuucggcaaguuuccgauuuacaccauccccgacaaacuggggccuuggucucccauugauauccaccaucucagcuguccuaacaaucuggugguggaggacgaaggaugcacaaaccuuuccggcuucucuuauauggagcugaaggucggguacauuagcgccaucaaagugaauggauuuacguguaccggcguugugacagaagcugagaccuauacaaacuucgucggguacgugaccacaaccuuuaagagaaaacacuuccggcccacgccugaugccugccgcgcggcuuauaauuggaagauggccggagacccgagauacgaagagucccuccauaaccccuauccugauuaccacuggcugcggaccguuaagacaucuaaagagagccuggugaucauuucccccagcgucgccgaccucgauccuuacgacaagucucugcauucccgcguguuucccggcggcaaauguagcgggaucaccgugucuuccacaugcuguagcaccaaucacgauuauacgauuuggaugccggaaaacccuagacuuggaacaucuugcgacaucuucaccaauucccggggcaagcgcgcuagcaaagggggaaagacauguggcuuugucgaugagagagggcuguacaagucccucaaaggagccugcaagcugaaacuuuguggcguucugggccuccggcugauggacgggaccuggguggcuauucaaaccucugaugaaauccgcuggugcagccccgaccagcuggugaaccuccacgacuuccauuccgaugagauugagcaccuggucguggaggaacuuguuaagaaaagagaagagugccuggacgcccucgaaacaaucaugacgaccaagagcgugucuuuucggcgccugucccaucuuagaaaacuggucccuggauucggcaaggcguauacaaucuucaauaagacccucauggaggccgaugcucacuacaaaagcauucggacauggaacgagaucauucccucuaaggggugucugcgcgugggaggcagaugccacccccauguuaaugggguguuuuucaacggaaucauucugggcccugacggccacguccucaucccggaaaugcagagcucccugcuucaucagcacauggagcugcucgaaucuagcgugaucccccugaugcauccucuugccgaucccuccaccgucuuuaaagacggggaugaggcugaagacuucguggagguucaccucccugaugugcacaagcaaauuagcggagucgaccucggccugcccaauugggggaaauaugugcugguuucugccggagcgcucacggcccugaugcuuaugaucuuucugaugacauguugccggaagaccaacagagcugaguccauucagcauagcccgggcgaaaccgggcgcaaggugucugucacaucccacaacggccgggugaucagcuccugggagucuuacaaaagcggaggcgaaaccaagcucuga

SEQ ID NO: 222906 - RNA, 1575 nt, Artificial Sequence
  derived and/or modified CDS sequence (opt5) from glycoprotein__RABV__DQ849054.1
augaucccccaggugcugcuguucgucccucugcuuguuuuuagcuccugcuucggcaaguuuccgauuuaccccaucccugacaaacuggggcccuggucuccuauugauauccaccaucucagcugucccaacaaucuggugguggaggacgaaggaugcaccaaccuuuccggcuucucuuauauggagcugaaggucggguacauuagcgccaucaaagugaauggauuuacauguacgggcguugugaccgaagcugagacauauccuaacuucgucggguacgugaccacaaccuuuaagagaaaacacuuccggccgacacccgaugccugccgcgcggcuuauaauuggaagauggccggagacccuagauacgaagagucccuccauaaccccuauccugauuaccacuggcugcggaccguuaagacgucuaaagagagccuggugaucauuucccccagcgucgccgaccucgauccguacgacaagucucugcauucccgcguguuuccuggcggcaaauguagcgggaucaccgugucuuccacaugcuguuucaccaaucacgauuauacaauuuggaugcccgaaaacccuagacuuggaaccagcugcgacaucuuuacaaauucucggggcaagcgcgcuuccaaagggggaaagacguguggcuucgucgaugagagagggcuguacaagagccucaaaggagccugcaagcugaaacuuuguggcguucugggccuccggcugauggacgggaccuggguggcuauucaaacauccgaugaaaucaaguggugcucucccgaccagcuggugaaccuccacgacuuucauagcgaugagauugagcaccuggucguggaggaacuuguuaaaaagcgcgaagagugccuggacgcccucgaaaccaucaugaccacaaaauccgugagcuucagacggcugucucaucuucgcaagcugguccccggauucggcaaggcguauacgaucuuuaauaaaacccucauggaggccgaugcucacuacaaguccauuagaacauggaacgagaucauuccuagcaaagggugucugcgggugggaggccgcugccacccgcauguuaaugggguguucuuuaacggaaucauucugggccccgacggccacguccucaucccugaaaugcagucuagccugcuucaucagcacauggagcugcucgaauccucugugaucccccugaugcauccucuugccgaucccagcaccgucuucaaggacggggaugaggcugaagacuuuguggagguucaccucccggaugugcacaaacaaauuuccggagucgaccucggccugccuaauugggggaaguaugugcugguuagcgccggagcgcucacagcccugaugcuuaugaucuuccugaugaccuguugcagaaagacgaaccgggcugagucuauucagcauucccccggcgaaacagggagaaaagugagcgucaccucucacaacggccgcgugaucuccagcugggaguccuacaagucuggaggcgaaaccaaacucuga

SEQ ID NO: 222907 - RNA, 1575 nt, Artificial Sequence
  derived and/or modified CDS sequence (opt5) from glycoprotein__RABV__DQ849055.1
augaucccccaggugcugcuguucgucccucugcuuguuuuuagcuccugcuucggcaaguuuccgauuuacaccauccccgacaaacuggggccuuggucucccauugauauccaccaucucagcuguccuaacaaucuggugguggaggacgaaggaugcacaaaccuuuccggcuucucuuauauggagcugaaggucggguacauuagcgccaucaaagugaauggauuuacguguaccggcguugugacagaagcugagaccuauacaaacuucgucggguacgugaccacaaccuuuaagagaaaacacuuccggcccacgccugaugccugccgcgcggcuuauaauuggaagauggccggagacccgagauacgaagagucccuccauaaccccuauccugauuaccacuggcugcggaccguuaagacaucuaaagagagccuggugaucauuucccccagcgucgccgaccucgauccuuacgacaagucucugcauucccgcguguuucccggcggcaaauguagcgggaucaccgugucuuccacaugcuguuucaccaaucacgauuauacgauuuggaugccggaaaacccuagacuuggaacaagcugcgacaucuuuaccaauucucggggcaagcgcgcuuccaaagggggaaagacauguggcuucgucgaugagagagggcuguacaagagccucaaaggagccugcaagcugaaacuuuguggcguucugggccuccggcugauggacgggaccuggguggcuauucaaaccuccgaugaaaucaaguggugcucucccgaccagcuggugaaccuccacgacuuucauagcgaugagauugagcaccuggucguggaggaacuuguuaaaaagcgcgaagagugccuggacgcccucgaaacaaucaugacgaccaaauccgugagcuucagacggcugucucaucuucgcaagcuggucccuggauucggcaaggcguauacaaucuuuaauaaaacccucauggaggccgaugcucacuacaaguccauuagaacauggaacgagaucauucccagcaaagggugucugcgggugggaggccgcugccacccccauguuaaugggguguucuuuaacggaaucauucugggcccugacggccacguccucaucccggaaaugcagucuagccugcuucaucagcacauggagcugcucgaauccgccgugaucccccugaugcauccucuugcugaucccucuaccgucuucaaggacggggaugaggccgaagacuuuguggagguucaccucccugaugugcacaaacaaauuagcggagucgaccucggccugcccaauugggggaaguaugugcugguuuccgcgggagcccucacggcucugaugcuuaugaucuuccugaugacauguugcagaaagaccaaccgggccgagagcauucagcauucuccgggcgaaaccgggagaaaaguguccgucacaagccacaacggccgcgugaucucuuccugggagagcuacaaguccggaggcgaaaccaaacucuga

SEQ ID NO: 222908 - RNA, 1575 nt, Artificial Sequence
  derived and/or modified CDS sequence (opt5) from glycoprotein__RABV__DQ849056.1
augaucccccaggugcugcuguucgucccucugcuuguuuuuagcuccugcuucggcaaguuuccgauuuacaccauccccgacaaacuggggccuuggucucccauugauauccaccaucucagcuguccuaacaaucuggugguggaggacgaaggaugcacaaaccuuuccggcuucucuuauauggagcugaaggucggguacauuagcgccaucaaagugaauggauuuacguguaccggcguugugacagaagcugagaccuauacaaacuucgucggguacgugaccacaaccuuuaagagaaaacacuuccggcccacgccugaugccugccgcgcggcuuauaauuggaagauggccggagacccgagauacgaagagucccuccauaaccccuauccugauuaccacuggcugcggaccguuaagacaucuaaagagagccuggugaucauuucccccagcgucgccgaccucgauccuuacgacaagucucugcauucccgcguguuucccggcggcaaauguagcgggaucaccgugucuuccacauggugcagcaccaaucacgauuauacgauuuggaugccggaaaacccuagacuuggaacaucuugugacaucuucaccaauucccggggcaagcgcgcuagcaaagggggaaagacaugcggcuuugucgaugagagagggcuguacaagucccucaaaggagccuguaagcugaaacuuugcggcguucugggccuccggcugauggacgggaccuggguggcuauucaaaccucugaugaaaucaagugguguagccccgaccagcuggugaaccuccacgacuuccauuccgaugagauugagcaccuggucguggaggaacuuguuaaaaagcgcgaagagugccuggacgcccucgaaacaaucaugacgaccaaaagcgugucuuuuagacggcugucccaucuucgcaagcuggucccuggauucggcaaggcguauacaaucuucaauaaaacccucauggaggccgaugcucacuacaagagcauuagaacauggaacgagaucauucccucuaaagggugccugcgggugggaggccgcugucacccccauguuaaugggguguuuuucaacggaaucauucugggcccugacggccacguccucaucccggaaaugcagagcucccugcuucaucagcacauggagcugcucgaaucuagcgugaucccccugaugcauccucuugccgaucccuccaccgucuuuaaggacggggaugaggcugaagacuucguggagguucaccucccugaugugcacaaacaaauuagcggagucgaccucggccugcccaauugggggaaguaugugcugguuucugccggagcgcucacggcccugaugcuuaugaucuuucugaugacaugcuguagaaagaccaaccgggcugaguccauucagcauagcccgggcgaaaccgggagaaaagugucugucacaucccacaacggccgcgugaucagcuccugggagucuuacaagagcggaggcgaaaccaaacucuga

SEQ ID NO: 222909 - RNA, 1575 nt, Artificial Sequence
  derived and/or modified CDS sequence (opt5) from glycoprotein__RABV__DQ849057.1
augaucccccaggugcugcuguucgucccucugcuuguuuuuagcuccugcuucggcaaguuuccgauuuacaccauccccgacaaacuggggccuuggucucccauugauauccaccaucucagcuguccuaacaaucuggugguggaggacgaaggaugcacaaaccuuuccggcuucucuuauauggagcugaaggucggguacauuagcgccaucaaagugaauggauuuacguguaccggcguugugacagaagcugagaccuauacaaacuucgucggguacgugaccacaaccuuuaagagaaaacacuuccggcccacgccugaugccugccgcgcggcuuauaauuggaagauggccggagacccgagauacgaagagucccuccauaaccccuauccugauuaccacuggcugcggaccguuaagacaucuaaagagagccuggugaucauuucccccagcgucgccgaccucgauccuuacgacaagucucugcauucccgcguguuucccggcggcaaauguagcgggaucaccgugucuuccacaugcuguagcaccaaucacgauuauacgauuuggaugccggaaaacccuagacuuggaacaucuugcgacaucuucaccaauucccggggcaagcgcgcuagcaaagggggaaagacauguggcuuugucgaugagagagggcuguacaagucccucaaaggagccugcaagcugaaacuuuguggcguucugggccuccggcugauggacgggaccuggguggcuauucaaaccucugaugaaaucaaguggugcagccccgaccagcuggugaaccuccacgacuuccauuccgaugagauugagcaccuggucguggaggaacuuguuaaaaagcgcgaagagugccuggacgcccucgaaacaaucaugacgaccaaaagcgugucuuuuagacggcugucccaucuucgcaagcuggucccuggauucggcaaggcguauacaaucuucaauaaaacccucauggaggccgaugcucacuacaagagcauuagaacauggaacgagaucauucccucuaaagggugucugcgggugggaggccgcugccacccccauguuaaugggguguuuuucaacggaaucauucugggcccugacggccacguccucaucccggaaaugcagagcucccugcuucaucagcacauggagcugcucgaaucuagcgugaucccccugaugcauccucuugccgaucccuccaccauuuuuaaggacggggaugaggcugaagacuucgucgaggugcaccucccugauguucacaaacaaaucagcggaguggaccucggccugcccaauugggggaaguauguccuggugucugccggagcgcucacggcccugaugcuuaugauuuuucugaugacauguugcagaaagaccaaccgggcugaguccauccagcauagcccgggcgaaaccgggagaaaaguuucugugacaucccacaacggccgcgucauuagcuccugggagucuuacaagagcggaggcgaaaccaaacucuga

SEQ ID NO: 222910 - RNA, 1575 nt, Artificial Sequence
  derived and/or modified CDS sequence (opt5) from glycoprotein__RABV__DQ849058.1
augaucccccaggugcuucucuucgucccucugcuuguuuuuagcuccugcuucggcaaguuuccgauuuacaccauccccgacaaacuggggccuuggucucccauugauauccaccaucucagcuguccuaacaaucuggugguggaggacgaaggaugcacaaaccuuuccggcuucucuuauauggagcugaaggucggguacauuagcgccaucaaagugaauggauuuacguguaccggcguugugacagaagcugagaccuauacaaacuucgucggguacgugaccacaaccuuuaagagaaaacacuuccggcccacgccugaugccugccgcgcggcuuauaauuggaagauggccggagacccgagauacgaagagucccuccauaaccccuauccugauuaccacuggguucggaccgugaagacaucuaaagagagccuggucaucauuucccccagcguggccgaccuggauccuuacgacaagucucuccauucccgcguguuucccggcggcaaauguagcgggaucaccgucucuuccacaugcuguagcaccaaucacgauuauacgauuuggaugccggaaaacccuagacugggaacaucuugcgacaucuucaccaauucccggggcaagcgcgcuagcaaagggggaaagacauguggcuuuguugaugagagagggcuuuacaagucccugaaaggagccugcaagcucaaacuguguggcgugcuuggccugcggcucauggacgggaccuggguggcuauucaaaccucugaugaaaucaaguggugcagccccgaccagcuggucaaccugcacgacuuccauuccgaugagauugagcaccucgugguugaggaacuggugaaaaagcgcgaagagugccuugacgcccuggaaacaaucaugacgaccaaaagcgucucuuuuagacggcucucccaucugcgcaagcuggugccuggauucggcaaggcguauacaaucuucaauaaaacccugauggaggccgaugcucacuacaagagcauuagaacauggaacgagaucauucccucuaaagggugucuccggguuggaggccgcugccacccccaugugaauggggucuuuuucaacggaaucauucugggcccugacggccacgugcugaucccggaaaugcagagcucccuccugcaucagcacauggagcuucuggaaucuagcgucaucccccucaugcauccucuggccgaucccuccaccguguuuaaggacggggaugaggcugaagacuucguugaggugcaccuuccugauguccacaaacaaauuagcggaguggaccugggccuccccaauugggggaaguauguucuggugucugccggagcgcugacggcccucaugcugaugaucuuucuuaugacauguugcagaaagaccaaccgggcugaguccauucagcauagcccgggcgaaaccgggagaaaagucucugugacaucccacaacggccgcgugaucagcuccugggagucuuacaagagcggaggcgaaaccaaacuguga

SEQ ID NO: 222911 - RNA, 1575 nt, Artificial Sequence
  derived and/or modified CDS sequence (opt5) from glycoprotein__RABV__DQ849059.1
augaucccccaggugcugcuguucgucccucugcuuguuuuuagcuccugcuucggcaaguuuccgauuuacaccauccccgacaaacuggggccuuggucucccauugauauccaccaucucagcuguccuaacaaucuggugguggaggacgaaggaugcacaaaccuuuccggcuucucuuauauggagcugaaggucggguacauuagcgccaucaaagugaauggauuuacguguaccggcguugugacagaagcugagaccuauacaaacuucgucggguacgugaccacaaccuuuaagagaaaacacuuccggcccaugccugaugccugccgcgcggcuuauaauuggaagauggccggagacccgagauacgaagagucccuccauaaccccuauccugauuaccacuggcugcggacgguuaagaccacaaaagagucucuggugaucauuagccccuccgucgccgaccucgauccuuacgacaagagccugcauucucgcguguuucccggcggcaaauguuccgggaucaccgugagcucuacaugcuguuccaccaaucacgauuauacgauuuggaugccggaaaacccuagacuuggaacaagcugcgacaucuucaccaauucucggggcaagcgcgcuuccaaagggggaaagacauguggcuuugucgaugagagagggcuguacaagagccucaaaggagccugcaagcugaaacuuuguggcguucugggccuccggcugauggacgggaccuggguggcuauucaaaccuccgaugaaaucaaguggugcucucccgaccagcuggugaaccuccacgacuuccauagcgaugagauugagcaccuggucguggaggaacuuguuaaaaagcgcgaagagugccuggacgcccucgaaacaaucaugacgaccaaauccgugagcuuuagacggcugucucaucuucgcaagcuggucccuggauucggcaaggcguauacaaucuucaauaaaacccucauggaggccgaugcucacuacaaguccauuagaacauggaacgagaucauucccagcaaagggugucugcgggugggaggccgcugccacccccauguuaaugggguguuuuucaacggaaucauucugggcccugacggccacguccucaucccggaaaugcagucuagccugcuucaucagcacauggagcugcucgaauccucugugaucccccugaugcauccucuugccgaucccagcaccgucuuuaaggacggggaugaggcugaagacuucguggagguucaccucccugaugugcacaaacaaauuuccggagucgaccucggccugcccaauugggggaaguaugugcugaucagcgccggagcgcucacggcccugaugucuaugauuuuucuuaugacauguugcagaaagaccaaccgggcugaguccauccagcauagcccgggcgaaaccgggagaaaaguuucugugacaucccacaacggccgcgucauuagcuccugggagucuuacaagagcggaggcgaaaccaaacuguga

SEQ ID NO: 222912 - RNA, 1575 nt, Artificial Sequence; identical to SEQ ID NO: 222911
  derived and/or modified CDS sequence (opt5) from glycoprotein__RABV__DQ849060.1

SEQ ID NO: 222913 - RNA, 1575 nt, Artificial Sequence
  derived and/or modified CDS sequence (opt5) from glycoprotein__RABV__DQ849061.1
augaucccccaggugcugcuguucgucccucugcuuguuuuuagcuccugcuucggcaaguuuccgauuuacaccauccccgacaaacuggggccuuggucucccauugauauccaccaucucagcuguccuaacaaucuggugguggaggacgaaggaugcacaaaccuuuccggcuucucuuauauggagcugaaggucggguacauuagcgccaucaaagugaauggauuuacguguaccggcguugugacagaagcugagaccuauacaaacuucgucggguacgugaccacaaccuuuaagagaaaacacuuccggcccaugccugaugccugccgcgcggcuuauaauuggaagauggccggagacccgagauacgaagagucccuccauaaccccuauccugauuaccacuggcugcggacgguuaagaccacaaaagagucucuggugaucauuagccccuccgucgccgaccucgauccuuacgacaagagccugcauucucgcguguuucccggcggcaaauguuccgggaucaccgugagcucuacaugcuguuccaccaaucacgauuauacgauuuggaugccggaaaacccuagacuuggaacaagcugcgacaucuucaccaauucucggggcaagcgcgcuuccaaagggggaaagacauguggcuuugucgaugagagagggcuguacaagagccucaaaggagccugcaagcugaaacuuuguggcguucugggccuccggcugauggacgggaccuggguggcuauucaaaccuccgaugaaaucaaguggugcucucccgaccagcuggugaaccuccacgacuuccauagcgaugagauugagcaccuggucguggaggaacuuguuaaaaagcgcgaagagugccuggacgcccucgaaacaaucaugacgaccaaauccgugagcuuuagacggcugucucaucuucgcaagcuggucccuggauucggcaaggcguauacaaucuucaauaaaacccucauggaggccgaugcucacuacaaguccauuagaacauggaacgagaucauucccagcaaagggugucugcgggugggaggccgcugccacccccauguuaaugggguguuuuucaacggaaucauucugggcccugacggccacguccucaucccggaaaugcagucuagccugcuucaucagcacauggagcugcucgaauccucugugaucccccugaugcauccucuugccgaucccagcaccgucuuuaaggacggggaugaggcugaagacuucguggagguucaccucccugaugugcacaaacaaauuuccggagucgaccucggccugcccaauugggggaaguaugugcugaucagcguuggagcccucacggcgcugaugcuuaugauuuuucugaugacauguugcagaaagaccaaccgggccgagucuacccagcauuccccgggcgaaacagggagaaaagugagcgucaccucucacaacggccgcgugaucuccagcugggaguccuacaagucuggaggcgaaacaaaacucuga

SEQ ID NO: 222914 - RNA, 1575 nt, Artificial Sequence
  derived and/or modified CDS sequence (opt5) from glycoprotein__RABV__DQ849062.1
augaucccccaggugcugcuguucgucccucugcuuguuuuuagcuccugcuucggcaaguuuccgauuuacaccauccccgacaaacuggggccuuggucucccauugauauccaccaucucagcuguccuaacaaucuggugguggaggacgaaggaugcacaaaccuuuccggcuucucuuauauggagcugaaggucggguacauuagcgccaucaaagugaauggauuuacguguaccggcguugugacagaagcugagaccuauacaaacuucgucggguacgugaccacaaccuuuaagagaaaacacuuccggcccaugccugaugccugccgcgcggcuuauaauuggaagauggccggagacccgagauacgaagagucccuccauaaccccuauccuggcuaccacuggcugcggacgguuaagaccacaaaagagucucuggugaucauuagccccuccgucgccgaucucgacccuuacgauaagagccugcauucucgcguguuucccggcgggaaauguuccggaaucaccgugagcucuacaugcuguuccaccaaucacgacuauacgauuuggaugccggaaaacccuagacuuggcacaagcugcgauaucuucaccaauucucgggggaagcgcgcuuccaaaggaggcaagacauguggguuugucgacgagagaggacuguacaagagccucaaaggcgccugcaagcugaaacuuuguggcguucuggggcuccggcugauggauggaaccuggguggcuauucaaaccuccgacgaaaucaaguggugcucucccgaucagcuggugaaccuccacgacuuccauagcgacgagauugagcaccuggucguggaggaacuuguuaaaaagcgcgaagagugccuggaugcccucgaaacaaucaugacgaccaaauccgugagcuuuagacggcugucucaucuucgcaagcuggucccuggcuucgggaaggcguauacaaucuucaauaaaacccucauggaggccgacgcucacuacaaguccauuagaacauggaacgagaucauucccagcaaaggaugucugcgggugggcgggcgcugccacccccauguuaauggaguguuuuucaacggcaucauucugggcccugaugggcacguccucaucccggaaaugcagucuagccugcuucaucagcacauggagcugcucgaauccucugugaucccccugaugcauccucuugccgaccccagcaccgucuuuaaggauggagacgaggcugaagauuucguggagguucaccucccugacgugcacaaacaaauuuccggcgucgaucucgggcugcccaauuggggaaaguaugugcugaucagcgccggcgcgcucacggcccugaugcuuaugauuuuucugaugacauguugcagaaagaccaaccgggcugagucuauccagcauuccccgggggaaaccggcagaaaaguuagcgugacaucucacaacggacgcgucauuuccagcugggaguccuacaagucuggcggggaaaccaaacucuga

SEQ ID NO: 222915 - RNA, 1575 nt, Artificial Sequence
  derived and/or modified CDS sequence (opt5) from glycoprotein__RABV__DQ849063.1
augaucccccaggugcugcuguucgucccucugcuuguuuuuagcuccugcuucggcaaguuuccgauuuacaccauccccgacaaacuggggccuuggucucccauugauauccaccaucucagcuguccuaacaaucuggugguggaggacgaaggaugcacaaaccuuuccggcuucucuuauauggagcugaaggucggguacauuagcgccaucaaagugaauggauuuacguguaccggcguugugacagaagcugagaccuauacaaacuucgucggguacgugaccacaaccuuuaagagaaaacacuuccggcccaugccugaugccugccgcgcggcuuauaauuggaagauggccggagacccgagauacgaagagucccuccauaaccccuauccugauuaccacuggcugcggacgguuaagaccacaaaagagucucuggugaucauuagccccuccgucgccgaccucgauccuuacgacaagagccugcauucucgcguguuucccggcggcaaauguuccgggaucaccgugagcucuacaugcuguuccaccaaucacgauuauacgauuuggaugccggaaaacccuagacuuggaacaagcugcgacaucuucaccaauucucggggcaagcgcgcuuccaaagggggaaagacauguggcuuugucgaugagagagggcuguacaagagccucaaaggagccugcaagcugaaacuuuguggcguucugggccuccggcugauggacgggaccuggguggcuauucaaaccuccgaugaaaucaaguggugcucucccgaccagcuggugaaccuccacgacuuccauagcgaugagauugagcaccuggucguggaggaacuuguuaaaaagcgcgaagagugccuggacgcccucgaaacaaucaugacgaccaaauccgugagcuuuagacggcugucucaucuucgcaagcuggucccuggauucggcaaggcguauacaaucuucaauaaaacccucauggaggccgaugcucacuacaaguccauuagaacauggaacgagaucauucccagcaaagggugucugcgggugggaggccgcugccacccccauguuaaugggguguuuuucaacggaaucauucugggcccugacggccacguccucaucccggaaaugcagucuagccugcuucaucagcacauggagcugcucgaauccucugugaucccccugaugcauccucuugccgaucccagcaccgucuuuaaggacggggaugaggcugaagacuucguggagguucaccucccugaugugcacaaacaaauuuccggagucgaccucggccugcccaauugggggaaguaugugcugaucagcgccggagcgcucacggcccugaugcuuaugauuuuucugaugacauguugcagaaagaccaaccgggcugagucuauccagcauuccccgggcgaaaccgggagaaaaguuagcgugacaucucacaacggccgcgucauuuccagcugggaguccuacaagucuggaggcgaaaccaaacucuga

SEQ ID NO: 222916 - RNA, 1575 nt, Artificial Sequence
  derived and/or modified CDS sequence (opt5) from glycoprotein__RABV__DQ849064.1
augauccuucaggugcuccuguucgcuccccuucuggucuuuagcuccugcuucggcaaguuuccuauuuacaccaucccggacaaacucgggcccuggucuccuauugauauccaccaucugagcugucccaacaaucuuguuguggaggacgaaggaugcacaaaccuguccggcuucucuuauauggagcucaaggugggguacauuagcgccaucaaagucaauggauuuacguguaccggcgugguuacagaagccgagaccuauacaaacuucgugggguacgucaccacaaccuuuaagagaaaacacuuccggccuaugcccgaugcgugccgcgcugccuauaauuggaagauggccggagacccuagauacgaagagucccugcauaacccguaucccgauuaccacuggcugcggacggugaagaccacaaaagagucucucguuaucauuagcccuuccguggcugaccuggaucccuacgacaagagccuucauucucgcgucuuuccuggcggcaaauguuccgggaucaccgugagcucuacaugcuguuccaccaaucacgauuauacgauuuggaugcccgaaaacccgagacugggaacaagcugcgacaucuucaccaauucucggggcaagcgcgccuccaaagggggaaagacauguggcuuuguggaugagagagggcucuacaagagccugaaaggagcuugcaagcugaaacuguguggcguccucggccugcggcugauggacgggaccuggguugccauucaaaccuccgaugaaaucaaguggugcccucccgaccagcucgugaaccugcacgacuuccauucugaugagauugagcaccuuguggucgaggaacuggugaaaaagcgcgaagagugccucgacgcgcuggaaacaaucaugacgaccaaaagcguuuccuuuagacggcuuagccaucugcgcaagcucgugccuggauucggcaaggccuauacaaucuucaauaaaacccugauggaggcugaugcccacuacaagucuauuagaacauggaacgagaucauucccuccaaagggugucugcgggucggaggccgcugccacccccaugugaaugggguguuuuucaacggaaucauucucggcccugacggccacguucugaucccggaaaugcagagcucucuucugcaucagcacauggagcuccuggaaagcuccgucaucccccuuaugcauccucuggcugaucccucuaccguguuuaaggacggggaugaggccgaagacuucgucgaggugcaccucccugauguucacaaacaaauuagcggaguggaccugggccugcccaauugggggaaguauguccucaucuccgcgggagcccugacggcucuuaugcugaugauuuuucucaugacauguugcagaaagaacaaccgggccgagagcauccagcauucuccgggcgaaaccgggagaaaaguguccguuaccagccacaauggccgcgugauuucuuccugggagagcuacaaguccggaggcgaaacaaaacuguga

SEQ ID NO: 222917 - RNA, 1575 nt, Artificial Sequence
  derived and/or modified CDS sequence (opt5) from glycoprotein__RABV__DQ849065.1
augaucccccaggugcugcuguucgucccucugcuuguuuuuagcuccugcuucggcaaguuuccgauuuacaccauccccgacaaacuggggccuuggucucccauugauauccaccaucucagcuguccuaacaaucuggugguggaggacgaaggaugcacaaaccuuuccggcuucucuuauauggagcugaaggucggguacauuagcgccaucaaagugaauggauuuacguguaccggcguugugacagaagcugagaccuauacaaacuucgucggguacgugaccacaaccuuuaagagaaaacacuuccggcccaugccugaugccugccgcgcggcuuauaauuggaagauggccggagacccgagauacgaagagucccuccauaaccccuauccugauuaccacuggcugcggacgguuaagaccacaaaagagucucuggugaucauuagccccuccgucgccgaccucgauccuuacgacaagagccugcauucucgcguguuucccggcggcaaauguuccgggaucaccgugagcucuacaugcuguuccaccaaucacgauuauacgauuuggaugccggaaaacccuagacuuggaacaagcugcgacaucuucaccaauucucggggcaagcgcgcuuccaaagggggaaagacauguggcuuugucgaugagagagggcuguacaagagccucaaaggagccugcaagcugaaacuuuguggcguucugggccuccggcugauggacgggaccuggguggcuauucaaaccuccgaugaaaucaaguggugcucucccgaccagcuggugaaccuccacgacuuccauagcgaugagauugagcaccuggucguggaggaacuuguuaaaaagcgcgaagagugccuggacgcccucgaaacaaucaugacgaccaaauccgugagcuuuagacggcugucucaucuucgcaagcuggucccuggauucggcaaggcguauacaaucuucaauaaaacccucauggaggccgaugcucacuacaaguccauuagaacauggaacgagaucauucccagcaaagggugucugcgggugggaggccgcugccacccccauguuaaugggguguuuuucaacggaaucauucugggcccugacggccacguccucaucccggaaaugcagucuagccugcuucaucagcacauggagcugcucgaauccucugugaucccccugaugcauccucuugccgaucccagcaccgucuuuaaggacggggaugaggcugaagacuucguggagguucaccucccugaugugcacaaacaaauuuccggagucgaccucggccugcccaauugggggaaguaugugcugaucagcgccggagcgcucacggcccugaugcuuacaauuuuucugaugaccuguugcagaaagaccaaccgggcugagucuauccagcauuccccgggcgaaacagggagaaaaguuagcgugaccucucacaacggccgcgucauuuccagcugggaguccuacaagucuggaagcgaaacaaaacucuga

SEQ ID NO: 222918 - RNA, 1575 nt, Artificial Sequence
  derived and/or modified CDS sequence (opt5) from glycoprotein__RABV__DQ849066.1
augaucccccaggugcugcuguucgucccucugcuuguuuuuagcuccugcuucggcaaguuuccgauuuacaccauccccgacaaacuggggccuuggucucccauugauauccaccaucucagcuguccuaacaaucuggugguggaggacgaaggaugcacaaaccuuuccggcuucucuuauauggagcugaaggucggguacauuagcgccaucaaagugaauggauuuacguguaccggcguugugacagaagcugagaccuauacaaacuucgucggguacgugaccacaaccuuuaagagaaaacacuuccggcccaugccugaugccugccgcgcggcuuauaauuggaagauggccggagacccgagauacgaagagucccuccauaaccccuauccugauuaccacuggcugcggacgguuaagaccacaaaagagucucuggugaucauuagccccuccgucgccgaccucgauccuuacgacaagagccugcauucucgcguguuucccggcggcaaauguuccgggaucaccgugagcucuacaugcuguuccaccaaucacgauuauacgauuuggaugccggaaaacccuagacuuggaacaagcugcgacaucuucaccaauucucggggcaagcgcgcuuccaaagggggaaagacauguggcuuugucgaugagagagggcuguacaagagccucaaaggagccugcaagcugaaacuuuguggcguucugggccuccggcugauggacgggaccuggguggcuauucaaaccuccgaugaaaucaaguggugcucucccgaccagcuggugaaccuccacgacuuccauagcgaugagauugagcaccuggucguggaggaacuuguuaaaaagcgcgaagagugccuggacgcccucgaaacaaucaugacgaccaaauccgugagcuuuagacggcugucucaucuucgcaagcuggucccuggauucggcaaggcguauacaaucuucaauaaaacccucauggaggccgaugcucacuacaaguccauuagaacauggaacgagaucauucccagcaaagggugucugcgggugggaggccgcugccacccccauguuaaugggguguuuuucaacggaaucauucugggcccugacggccacguccucaucccggaaaugcagucuagccugcuucaucagcacauggagcugcucgaauccucugugaucccccugaugcauccucuugccgaucccagcaccgucuuuaaggacggggaugaggcugaagacuucguggagguucaccucccugaugugcacaaacaaauuuccggagucgaccucggccugcccaauugggggaaguaugugcugaucagcgccggagcgcucacggcccugaugcuuacaauuuuucugaugaccuguugcagaaagaccaaccgggcuggcucuauccagcauuccccgggggagacaggcagaaaaguuagcgugaccucucacaacggacgcgucauuuccagcugggaauccuacaagucuggcagcgagacaaaacucuga

SEQ ID NO: 222919 - RNA, 1575 nt, Artificial Sequence; identical to SEQ ID NO: 222918
  derived and/or modified CDS sequence (opt5) from glycoprotein__RABV__DQ849067.1

SEQ ID NO: 222920 - RNA, 1575 nt, Artificial Sequence; identical to SEQ ID NO: 222917
  derived and/or modified CDS sequence (opt5) from glycoprotein__RABV__DQ849068.1

SEQ ID NO: 222921 - RNA, 1575 nt, Artificial Sequence
  derived and/or modified CDS sequence (opt5) from glycoprotein__RABV__DQ849069.2
augaucccccaggcccuucucuucgugccucugcuugucuuuagcuucugcuuuggcaaguucccgauuuacaccauccccgacaaacuggggccuuggucccccauugauauccaccaucucucuuguccuaacaaucugguuguggaggacgaaggaugcacaaaccuuagcggcuuuuccuauauggagcugaaggugggguacauuucugcuaucaaagucaauggauucacguguaccggcgugguuacagaagccgagaccuauacaaacuuugugggguacgucaccacaaccuucaagagaaaacacuuucggcccacgccugaugcgugccgcgcugccuauaauuggaagauggccggagacccgagauacgaagagagccuccauaaccccuauccugauuaccacuggcugcggaccgugaagacaaccaaagagucccugguuaucauuucucccagcguguccgaccucgauccuuacgacaagagccugcauucucgcgucuuccccuccggcaaauguagcagaaucacagugucuuccaccuauugcccgacgaaucacgauuacacaauuuggaugccugaaaacccccggcuuggcaccagcugugacaucuuuacaaauucucgcgggaagagagcuuccaaaggaagcaagaccugcggcuucguggaugagcgggggcuguauaagucccucaaaggagccuguaagcugaaacuuugcggcguccuggggcucacccugauggacggaacauggguugcuauucaaacgucugaugaagccaagugguguccucccgaccagcuggugaacauccacgacuuucgcagcgaugagauugagcaucucguggucgaggaacuggugaaaaagagagaagagugccuugacgcgcuggaauccaucaugaccacaaaaagcguuucuuuccggcgccucucccaccugagaaagcuggugcccggcuucggcaaggccuacaccaucuuuaauaaaacacugauggaggcugaugcccauuauaagagcguccggaccuggaacgagauuaucccuucuaaagggugccuccgcgugggaggcagaugucacccgcacguuaaugggguguucuuuaacggaauuauccugggccccgacgggcauguccugauuccugaaaugcagagcucccuccugcagcaacacauggagcuucuggaaucuagcgugaucccccucaugcauccucuggcugaucccuccacggucuucaaggaggacgaugaagccgaggacuuuguggagguucaccuuccggaugugcauaaacaggucagcggaguggaccugggccucccuucuuggggcaaguacguucugauguccgugggggcgaugaucgcccugaugcucaugauuuuccugaugacaugcugucggagagcuaauggagccgaaagcauccagcacucucuuggcgagaccgggcgcaaggucuccgugaccagccaguccggacgggugauuucuagcugggaauccuauaaaucuggcggggagacaaagcuguga

SEQ ID NO: 222922 - RNA, 1575 nt, Artificial Sequence
  derived and/or modified CDS sequence (opt5) from glycoprotein__RABV__DQ849070.1
augaucccccaggugcugcuguucgucccucugcuuguuuuuagcuccugcuucggcaaguuuccgauuuacaccauccccgacaaacuggggccuuggucucccauugauauccaccaucucagcuguccuaacaaucuggugguggaggacgaaggaugcacaaaccuuuccggcuucucuuauauggagcugaaggucggguacauuagcgccaucaaagugaauggauuuacguguaccggcguugugacagaagcugagaccuauacaaacuucgucggguacgugaccacaaccuuuaagagaaaacacuuccggcccaugccugaugccugccgcgcggcuuauaauuggaagauggccggagacccgagauacgaagagucccuccauaaccccuauccugauuaccacuggcugcggacgguuaagaccacaaaagagucucuggugaucauuagccccuccgucgccgaccucgauccuuacgacaagagccugcauucucgcguguuucccggcggcaaauguuccgggaucaccgugagcucuacaugcuguuccaccaaucacgauuauacgauuuggaugccggaaaacccuagacuuggaacaagcugcgacaucuucaccaauucucggggcaagcgcgcuuccaaagggggaaagacauguggcuuugucgaugagagagggcuguacaagagccucaaaggagccugcaagcugaaacuuuguggcguucugggccuccggcugauggacgggaccuggguggcuauucaaaccuccgaugaaaucaaguggugcucucccgaccagcuggugaaccuccacgacuuccauagcgaugagauugagcaccuggucguggaggaacuuguuaaaaagcgcgaagagugccuggacgcccucgaaacaaucaugacgaccaaauccgugagcuuuagacggcugucucaucuucgcaagcuggucccuggauucggcaaggcguauacaaucuucaauaaaacccucauggaggccgaugcucacuacaaguccauuagaacauggaacgagaucauucccagcaaagggugucugcgggugggaggccgcugccacccccauguuaaugggguguuuuucaacggaaucauucugggcccugacggccacguccucaucccggaaaugcagucuagccugcuucaucagcacauggagcugcucgaauccucugugaucccccugaugcauccucuugccgaucccagcaccgucuuuaaggacggggaugaggcugaagacuucguggauguucaccucccugacgugcacaaacaaauuuccggagucgaucucggccugcccaauugggggaaguaugugcugaucagcgccggagcgcucacggcccugaugcuuaugauuuuucugaugacauguugcagaaaggcuaaccgggccgagucuauccagcauaacccgggcgagaccgggagaaaaguuuccgugaccagccacaauggccgcgucauuucuuccugggaaagcuacaaguccggaggcgagacaaaacucuga

SEQ ID NO: 222923 - RNA, 1575 nt, Artificial Sequence; identical to SEQ ID NO: 222599
  derived and/or modified CDS sequence (opt5) from glycoprotein__RABV__DQ849071.1

SEQ ID NO: 222924 - RNA, 1575 nt, Artificial Sequence
  derived and/or modified CDS sequence (opt5) from glycoprotein__RABV__DQ849072.1
augaucccccaggcccuucucuucgugccucugcuugucuuuagccugugcuucggcaaguuuccgauuuacaccauccccgacaaacucgggccuuggucccccauugauauccaccaucugucuuguccuaacaaucuuguuguggaggacgaaggaugcacaaaccugagcggcuucuccuauauggagcucaaggugggguacauuucugcuaucaaagucaauggauuuacguguaccggcgugguuacagaagccgagaccuauacaaacuucgugggguacgucaccacaaccuuuaagagaaaacacuuccggcccacgccugaugcgugccgcgcugccuauaauuggaagauggccggagacccgagauacgaagagagccugcauaaccccuauccugauuaccacuggcugcggaccgugaagacaaccaaagagucccucguuaucauuucucccagcguggcugaccuggauccuuacgacaagucccuucauagccgcgucuuucccucuggcaaauguuccggcaucacagugagcucuaccuauugcuccacgaaucacgauuacacaauuuggaugccggaaaacccuagacuggggaccagcugugacaucuucgucaauucucggggaaagcgcgccuccaaaggcagcaagacaugcggguuuguggaugagagaggacucuauaagucccugaaaggcgcuuguaagcugaaacugugcgggguucucggacugcggcugauggacggcaccuggguggccauucaaaccucugaugaaacaaaguggugucccccugaccagcucgugaaccugcacgacuuccgcagcgaugagaucgagcaucuugucguggaggaacugguuaaaaagagagaagagugccucgacgcgcuggaauccauuaugacgaccaaaagcgugucuuuucggcgccuuucccaccugagaaagcucguccccggcuucgggaaggccuacacaaucuucaauaaaacccugauggaggcugaugcccauuauaagagcgugcggacauggaacgagaucauucccucuaaaggaugccugcgcguuggcgggagaugucacccucacgugaauggagucuuuuucaacggcaucauucucgggccggacggacaugugcugauccccgaaaugcagagcucccuucugcagcaacacauggagcuccuggaaucuagcgucauuccucuuaugcauccccuggcugauccuuccaccaucuuuaaggacggcgaugaggccgaagacuucguggagguucaccuccccgaugugcauaaacaggucagcggcguggaccuggggcugccgaauuggggaaaguacguucucaugucugcgggcgcccugacggcucuuaugcugaugaucuuucucaugacaugcugucggaagaccgauagaaccggguccacacaccacagcccuggagagaccggccgcaaagugucugucacaucccagaacgggcgggugauugccagcugggaauccuauaagucuggcggagagacgaaacuguga

SEQ ID NO: 222925 - RNA, 1575 nt, Artificial Sequence
  derived and/or modified CDS sequence (opt5) from glycoprotein__RABV__DQ849073.1
augaucccccaggugcuucucuucgucccucugcuuguuuuuagcuccugccugggcaaguucccgauuuacaccauccccgacaaacucgggccuuggucucccauugauauccaccaucugagcuguccuaacaaucuugugguggaggacgaaggaugcacaaaccuguccggcuuuucuuauauggagcucaaggucggguacauuagcgccaucaaagugaauggauucacguguaccggcguugugacagaagcugagaccuauacaaacuuugucggguacgugaccacaaccuucaagagaaaacacuuucggcccaugccugaugccugccgcgcggcuuauaauuggaagauggccggagacccgagauacgaagagucccugcauaaccccuauccugauuaccacuggcugcggacgguuaagaccucuaaagagagccucgugaucauuucccccagcgucgccgaccuggauccuuacgacaagucucuucauucccgcguguuccccggcggcaaauguagcgggaucacagugucuuccacaugcuguagcaccaaucacgauuauaccauuuggaugccggaaaacccuagacugggaacgucuugcgacaucuuuacaaauucccggggcaagcgcgcuagcaaagggggaaagaccuguggcuucgucgaugagagagggcucuacaagucccugaaaggagccugcaagcugaaacuguguggcguucucggccugcggcugauggacgggacauggguggcuauucaaaccucugaugaaaucaaguggugcagccccgaccagcucgugaaccugcacgacuuucauuccgaugagauugagcaccuugucguggaggaacugguuaaaaagcgcgaagagugccucgacgcccuggaaaccaucaugacaacgaaaagcgugucuuucagacggcuuucccaucugcgcaagcucgucccuggauuuggcaaggcguauaccaucuucaauaaaacacugauggaggccgaugcucacuacaagagcauuagaaccuggaacgagaucauucccucuaaagggugucugcgggugggaggccgcugccacccccauguuaaugggguguucuuuaacggaaucauucucggcccugacggccacguccugaucccggaaaugcagagcucccuucugcaucagcacauggagcuccuggaaucuagcgugaucccccuuaugcauccucuggccgaucccuccacagucuucaaggacggggaugaggcugaagacuuuguggagguucaccucccugaugugcacaaacaaauuagcggagucgaccugggccugcccaauugggggaaguaugugcucaucucugccggagcgcugaccgccuccaugcuuaugauuuuccugaugacguguugcagaaagacaaaccgggcugagagcauccagcauucuccgggcgaaaccgggagaaaaguuuccgugaccagccacaacggccgcgucauuuccucuugggagagcuacaaguccggaggcgaaacaaaacucuga

SEQ ID NO: 222926 - RNA, 1575 nt, Artificial Sequence
  derived and/or modified CDS sequence (opt5) from glycoprotein__RABV__DQ875050.1
auggugccccagguccugcuguucguucugcuucugggcuuuagccucugcuucgggaaguuuccuaucuacaccauuccggacgagcugggacccugguccccuaucgauauucaccaccuuucuugucccaacaaucuggugguggaagacgagggcugcacaaaccucagcgaguucuccuauauggagcugaaagucggguacaucucugccauuaaggugaauggauuuacguguaccggcguugugacagaagcugagaccuauacaaacuucgucggguacgugaccacaaccuuuaaaagaaagcacuuccggccuacgcccgaugccugccgcgcggcuuauaauuggaaaauggccggagacccuagauacgaggaaagccugcauaacccguaucccgauuaccacuggcuccggaccguucgcacaaccaaggagucccugaucaucauuucuccuagcgugacagaccuugaucccuacgacaagucccugcauagcagagucuuuccuggccggaaauguucuggcaucaccguguccagcacguauugcucuacaaaucacgauuacaccauuuggaugcccgaaaacccgcgcccuagaacacccugugacaucuucaccaauucccgggggaagcgcgccagcaacggaaauaaaaccugcggcuuuguggaugagagagggcucuauaagucucugaaaggagcuugucggcuuaagcugugcggcguccucgggcugcgccugauggacggaacauggguugccaugcaaacguccggcgagaccaagugguguccucccgaucagcucgugaaccugcacgacuucagaagcgacgaaauugagcaucuuguggucgaagaacuggugaaaaagcgggaagagugccucgaugcucuggaguccaucaugacaaccaaaucuguuagcuuucgcagacuuucccaccuccggaagcucgugcccggcuucgggaaagccuacacaauuuucaauaagacccugauggaagcggacgcccauuauaaaagcgucagaacguggaacgagaucaucccuucuaagggaugccugaaggugggcgggcgcugucacccgcacguuaauggaguguuuuucaacggccucauucuggggcccgaugaccauguccuuaucccugaaaugcaguccagccugcuccagcaacacauggagcugcuugaaucuagcgugauuccccugaugcauccucucgcugaucccuccacagucuuuaaagagggagacgaggccgaagauuucguggagguucaucugccggacguguacaagcagaucucuggcgucgaucugggccucccuaacugggggaaauaugugcugaugaccgcuggagccaugauuggccuuguucugaucuuuagccucaugaccuggugccggagagcgaaucgccccgaauccaagcagcggagcuucgggggaacaggcgggaacgugucugucaccucccagagcggcaaagugaucccuucuugggaguccuacaagagcggaggcgaaauuagacuguga

SEQ ID NO: 222927 - RNA, 1575 nt, Artificial Sequence
  derived and/or modified CDS sequence (opt5) from glycoprotein__RABV__DQ875051.1
auggugccccaggcccugcuccuggucccucuucugggcuucagccucugcuuugggaaguucccgaucuacaccauucccacaaaacugggaccuuggucccccaucgacauucaccaucuuucuuguccuaacaaucugguuguggaggaugaaggcugcacgaaccucagcggguuuuccuauauggagcugaaggugggaagaaucucugcuauuaaagucaauggcuucaccuguacaggggugguuaccgaagccgagacauacaccaacuuugugggauaugucacaaccacguucaagcggaaacacuuucgccccaugccuggcugcauguacagcagagugcaacuggaagacggccgguccccgcagaucgaggagucucuccauaaucccuauccugauuaccacuggcugcgcaccguuagaacaaccaaggaaagccuuaucauuaucucccccagcgugacagaccuggauccuuaugacaagucucuccauucccgggucuuccccgggcgcaaauguagcggaauuaccgugucuuccacguacugcagcacaaaccacgauuacaccguguggaugccggagauccugagacuuggcacaucuugugacauuuuuaccaauucccgggggaagcgcgcgagcaaaggauccaagaccugcggcuucgucgaugaaagagggcuguauaaaucucucaagggagcuuguaagcugaaacugugcggcguuccuggccuccggcugauggacgggacauggguggccaugcagacgagcaacgagaccaaguggugucccccuggacagcuugugaaucugcacgaucuccauuccgacgagaucgaacaccuggucguggaggaacuuguuaaaaagcgcgaggaaugccuggaugcccucgagagcauuacaaccacaaaaucuguguccuuuagacggcugagccaucugcgcaagcucguccccggcuucgggaaggcuuacaccaucuuuaacaaaacgcugauggaggccgaagcucacuauaagucugugagaacauggaaugagaucauucccagcaaaggaugccuucggguuggcgggggaugucacccucaugugaacggcgucuucuucaauggcaucauucuggggccggacggacacgugcucauccccgaaaugcaauccucucugcuucagcagcauauugagcugcucgaaagcuccgucaucccucugaugcacccccuggccgacccuuuuaccguguucaaggauggcgacgagaucgaggauuuuguugaagugcaucuccccgacguccacgaacaggugagcgggguugaucugggacuuccgaacuggggcgaguacgugcugcucucugcggggacccugauugcccugaugcuuaucauuuuccucaucacaugcuguaaaagagucgaccgcccugaguccacccaacggagccugagaggcacaggacgcaaugugucugugacgucccagagcggcaaguuuauucccucccgggaaucuuauaaaagcgggggagagaccggccuguga

SEQ ID NO: 222928 - RNA, 1575 nt, Artificial Sequence
  derived and/or modified CDS sequence (opt5) from glycoprotein__RABV__E02022.1
auggugccccaggcccugcuccuggucccuauccuuggcuucagcuccugcuuugggaaguucccgauuuacaccauccccgacacacugggaccuuggucucccauugauauccaccaucucagcuguccuaacaaucugguuguggaggacgaaggcugcacgaaccuuuccggguuuucuuauauggagcugaaagugggacacauuagcgcuaucaaggucaauggcuucaccuguacaggggugguuaccgaagccgagacauacaccaacuuugugggauaugucacaaccacguucaaaagaaagcauuuucggcccaccccugaugcgugccgcgcugccuacaauuggaaaauggccggcgacccgagauaugaagagucccuccacucucccuacccugauuaucauuggcugcggacagugaagaccacaaaggagagccugguuaucauuucccccagcguggucgaccucgauccuuacgacaacucucugcacucccgcguguuccccagcggcaaauguucugggaucaccguguccagcgucuacugcucuacgaaucacgauuauacaguuuggaugccggaaucccuuagacugggaaccagcugugacauuuuuacaaacucccggggcaagcgcgugucuaaagggagcaagaccugcggauucguggaugagagaggccucuacaaaucccugaagggggcuuguaaacuuaagcugugcggaguccggggccuccgccugauggacggcaccuggguggccaugcaaacaagcaaugaaacgaagugguguccucccgaucagcugguuaaccuccaugaccugagaucugacgagaucgagcaccuugugauugaggaacuggucaaaaagcgggaagagugccucgaugcucuggaauccaucauuaccacaaaaagcgugucuuuucgcagacuuagcuaucugcggaagcucguuccuggguucggaaaagccuacaccaucuuuaauaagacacugauggaggcggaggcccauuauaaguccgugcgcaccuggaacgaaaucauucccucuaaaggcugccugagagucgggggacggugucacccccacgugaauggcgucuucuucaacgggaucauucucggaccugacggccaugugcugaucccggagaugcagagcucccuucugcagcaacacauugaacuccuggagagcucuguuaucccccuuaugcauccucuggcugaucccuuuacgguguucaaggacggcgaugaaacagaggacuuuaucgagguccaccucccugaugugcaugaacagguuuccgggguggaccugggacugcccaauuggggcgaguacguccuccugagcgccgggacccuuauugcucugaugcucaucauuuuccugaugaccugcuguagaaaaguggaucgcccggaaucuacacagcggucccugagaggaaccggccgcaacgugagcguuacaucccagucugggaaguuuaucccuagcugggaguccuauaaaucuggcggagaaacgggccuuuga

SEQ ID NO: 222929 - RNA, 1575 nt, Artificial Sequence
  derived and/or modified CDS sequence (opt5) from glycoprotein__RABV__EF206707.1
auggugccccaggcccugcuguucgucccucugcuuguuuuuccgcugugcuucggcaaguuucccaucuacaccauuccugacaaacucgggcccuggagcccuaucgauauucaccaucuguccugucccaacaaucuugugguggaggacgaaggaugcacaaaccugucuggcuucagcuauauggagcucaaggucggguacauccuggcuauuaaaaugaauggauuuacguguaccggcgugguuacagaagccgagaccuauacaaacuucgugggguacgucaccacaaccuuuaagagaaaacacuuccggccuacgccggaugcgugccgcgcugccuauaauuggaagauggccggagaccccagauacgaagagucccugcauaacccuuaucccgauuaccgguggcuccgcaccgugaagacaaccaaagagucucugguuaucaucagcccuuccguggcugaccuugaucccuacgacagaucucugcacagccgggucuuuccguccggcaaguguagcggcguggccgugucuuccacauauugcagcaccaaucaugauuacacgauuuggaugccugaaaacccccgccucgggaugucuugugacaucuucacaaauuccagaggaaaacgggcuagcaagggcucugagaccugcggguuugucgaugaacgcggacuguauaaaucccuuaagggcgccuguaagcugaaacucugcgggguucugggacugagacucauggacggcacauggguggcgaugcaaaccagcaacgagaccaagugguguccucccgaucagcuggugaaucuucacgacuuccgguccgacgagauugaacaccuggucguggaggaacucguucgcaaaagagaggaaugccuggaugcccuugagucuaucaugacaaccaagagcguguccuuucggcgccugagccaucucagaaaacugguccccggcuucgggaaggcuuacacgauuuucaacaaaacacugauggaggccgacgcucacuauaagucugugcggaccuggaaugaaauccucccuuccaagggaugccugagaguuggcgggcgcugucauccgcacgugaacggagucuuuuucaauggcauuauccuugggcccgauggaaacgugcugaucccugagaugcagagcucucuccugcagcaacacauggaacuucuggagagcuccgucauuccccucgugcauccucuggccgaccccucuacaguuuuuaaagauggcgacgaagcggaggauuucguggagguccaccucccggacgugcauaaccagguuagcggcguggaucucgggcugccuaauuggggaaaguacguccuucuguccgccggcgcucucaccgcccugaugcugaucauuuuucuuaugacgugcugucggagagugaaccgcagcgaacccacacagcacaaucuccgggggaccggaagagaggugucuguuaccccucaguccggcaaaaucauuagcucuugggaaucccauaagagcgggggcgagacacgccuguga

SEQ ID NO: 222930 - RNA, 1575 nt, Artificial Sequence
  derived and/or modified CDS sequence (opt5) from glycoprotein__RABV__EF206709.1
auggugccccaggcccugcuguucgucccucugcuuguuuuuccgcugugcuucggcaaguuucccaucuacaccauuccugacaaacucgggcccuggagcccuaucgauauucaccaucuguccugucccaacaaucuugugguggaggacgaaggaugcacaaaccugucuggcuucagcuauauggagcucaaggucggguacauccuggcuauuaaagugaauggauuuacguguaccggcguugugacagaagccgagaccuauacaaacuucgucggguacgugaccacaaccuuuaagagaaaacacuuccggccuacgccggaugcgugccgcgcugccuauaauuggaagauggccggagaccccagauacgaagagucccugcauaacccuuaucccgauuaccgguggcuccgcaccguuaagacaaccaaagagucucuggugaucaucagcccuuccgucgcugaccuugaucccuacgacagaucucugcacagccggguguuuccguccggcaaguguagcggcguggccgucucuuccacauauugcagcaccaaucaugauuacacgauuuggaugccugaaaacccccgccucgggaugucuugugacaucuucacaaauuccagaggaaaacgggcuagcaagggcucugagaccugcggguuuguugaugaacgcggacuguauaaaucccuuaagggcgccuguaagcugaaacucugcggggugcugggacugagacucauggacggcacaugggugagcaugcaaaccuccaacgagaccaagugguguccucccgauaaacuggucaaucuucacgacuuccggucugacgagauugaacaccuggugguugaggaacucgugcgcaagagagaggaaugccuggaugcgcuugagagcaucaugacaacgaaauccgucagcuuucggcgccugucucaucucagaaagcuggugcccggcuucgggaaagccuacaccauuuucaacaagacacugauggaggcugacgcccacuauaaguccguucggaccuggaaugaaauccucccuagcaaaggaugccugagagugggcgggcgcugucauccgcacgucaacggaguguuuuucaauggcauuauccuugggcccgauggaaacguccugaucccugagaugcagucuagccuccugcagcagcacauggaacuucuggaguccucugugauuccccucguucauccucuggcugaccccagcacaguguuuaaggauggcgacgaagccgaggauuucgucgaggugcaccucccggacguucauaaccaaguguccggcgucgaucucgggcugccuaauuggggaaaauacgugcuucugagcgcgggcgcccucaccgcucugaugcugaucauuuuucuuaugacgugcugucggagagugaaccgcucugaacccacacagcacaaucuccgggggaccggaagagagguuuccgucaccccucagagcggcaagaucauuucuuccugggaaagccauaaauccgggggcgagacacgccuguga

SEQ ID NO: 222931 - RNA, 1575 nt, Artificial Sequence
  derived and/or modified CDS sequence (opt5) from glycoprotein__RABV__EF206715.1
auggugccccaggcccugcuguucgucccucugcuuguuuuuccgcugugcuucggcaaguuucccaucuacaccauuccugacaaacucgggcccuggagcccuaucgauauucaccaucuguccugucccaacaaucuugugguggaggacgaaggaugcaccaaccugucuggcuucagcuauauggagcucaaggucggguacauccuggcuauuaaagugaauggauuuacguguaccggcguugugacagaagccgagaccuauacaaacuucgucggguacgugaccacaaccuuuaagagaaaacacuuccggccuacgccggaugcgugccgcgcugccuauaauuggaagauggccggagaccccagauacgaagagucccugcauaacccuuaucccgauuaccgguggcuccgcaccguuaagacaaccaaagagucucuggugaucaucagcccuuccgucgcugaccuugaucccuacgacagaucucugcacagccggguguuuccguccggcaaguguagcggcguggccgucucuuccacauauugcagcaccaaucaugauuacacgauuuggaugccugaaaacccccgccucgggaugucuugugacaucuucacaaauuccagaggaaaacgggcuagcaagggcucugagaccugcggguuuguugaugaacgcggacuguauaaaucccuuaagggcgccuguaagcugaaacucugcggggugcugggacugagacucauggacggcacaugggugagcaugcaaccuuccaacgagaccaagugguguccucccgauaaacuggucaaucuucacgacuuccggucugacgagauugaacaccuggugguugaggaacucgugcgcaagagagaggaaugccuggaugcgcuugagagcaucaugaccacaaaauccgucagcuuucggcgccugucucaucucagaaagcuggugcccggcuucgggaaagccuacacgauuuucaacaagacccugauggaggcugacgcccacuauaaguccguucggacauggaaugaaauccucccgagcaaaggaugccugagagugggcgggcgcugucauccccacgucaacggaguguuuuucaauggcauuauccuugggccugauggaaacguccugauccccgagaugcagucuagccuccugcagcagcacauggaacuucuggaguccucugugauuccucucguucauccccuggcugacccgagcaccguguuuaaggauggcgacgaagccgaggauuucgucgaggugcaccucccugacguucauaaccaaguguccggcgucgaucucgggcugcccaauuggggaaaauacgugcuucugagcgcgggcgcccucacagcucugaugcugaucauuuuucuuaugaccugcugucggagagugaaccgcucugaaccuacgcagcacaaucuccgggggacaggaagagagguuuccgucacaccccagagcggcaagaucauuucuuccugggaaagccauaaauccgggggcgagacccgccuguga

SEQ ID NO: 222932 - RNA, 1575 nt, Artificial Sequence
  derived and/or modified CDS sequence (opt5) from glycoprotein__RABV__EF206716.1
auggugccccaggcccugcuguucgucccucugcuuguuuuuccgcugugcuucggcaaguuucccaucuacaccauuccugacaaacucgggcccuggagcccuaucgauauucaccaucuguccugucccaacaaucuugugguggaggacgaaggaugcacaaaccugucuggcuucagcuauauggagcucaaggucggguacauccuggcuauuaaagugaauggauuuacguguaccggcguugugacagaagccgagaccuauacaaacuucgucggguacgugaccacaaccuuuaagagaaaacacuuccggccuacgccggaugcgugccgcgcugccuauaauuggaagauggccggagaccccagauacgaagagucccugcauaacccuuaucccgauuaccgguggcuccgcaccguuaagacaaccaaagagucucuggugaucaucagcccuuccgucgcugaccuugaucccuacgacagaucucugcacagccggguguuuccguccggcaaguguagcggcguggccgucucuuccacauauugcagcaccaaucaugauuacacgauuuggaugccugaaaacccccgccucgggaugucuugugacaucuucacaaauuccagaggaaaacgggcuagcaagggcucugagaccugcggguuuguugaugaacgcggacuguauaaaucccuuaagggcgccuguaagcugaaacucugcggggugcugggacugagacucauggacggcacaugggugagcaugcaaaccuccaacgagaccaagugguguccucccgauaaacuggucaaucuucacgacuuccggucugacgagauugaacaccuggugguugaggaacucgugcgcaagagagaggaaugccuggaugcgcuugagagcaucaugacaacgaaauccgucagcuuucggcgccugucucaucucagaaagcuggugcccggcuucgggaaagccuacaccauuuucaacaagacacugauggaggcugacgcccacuauaaguccguuggaaccuggaaugaaauccucccuagcaaaggcugccugcgggucgggggaagaugucauccgcacgugaacggcguguuuuucaaugggauuauccuuggacccgauggcaacguccugaucccugagaugcagucuagccuccugcagcagcacauggaacuucuggaguccucugugauuccccucguucauccucuggcugaccccagcacaguguuuaaggauggcgacgaagccgaggauuucgucgaggugcaccucccggacguucauaaccaaguguccggggucgaucucggacugccuaauuggggcaaauacgugcuucugagcgcgggggcccucaccgcucugaugcugaucauuuuucuuaugacgugcugucgccgggugaacagaucugaacccacacagcacaaucuccgcggaaccggccgggagguuuccgucaccccucagagcgggaagaucauuucuuccugggaaagccauaaauccggcggagagacaagacuguga

SEQ ID NO: 222933 - RNA, 1575 nt, Artificial Sequence
  derived and/or modified CDS sequence (opt5) from glycoprotein__RABV__EF206717.1
auggugccccaggcccuucucuucgucccucugcuuguuuuuccgcugugcuucggcaaguuucccaucuacaccauuccugacaaacucgggcccuggagcccuaucgauauucaccaucuguccugucccaacaaucuugugguggaggacgaaggaugcacaaaccugucuggcuucagcuauauggagcucaaggucggguacaucuccgcuauuaaaaugaauggauuuacguguaccggcgugguuacagaagccgagaccuauacaaacuucgugggguacgucaccacaaccuuuaagagaaaacacuuccggccuacgccggaugcgugccgcgcugccuauaauuggaagauggccggagaccccagauacgaagagucucugcauaacccuuaucccgauuaccgguggcugcgcaccgugaagacaaccaaagagagccucguuaucaucuccccuucuguggcugaccuggaucccuacgacagaagccuucacucccgggucuuuccgagcggcaaguguucuggcguggccguguccagcacauauugcucuaccaaucaugauuacacgauuuggaugccugaaaacccccgccuggggauguccugugacaucuucacaaauagcagaggaaaacgggcuucuaagggcuccgagaccugcggguuugucgaugaacgcggacucuauaaaagccugaagggcgccuguaagcugaaacugugcgggguucucggacugagacugauggacggcacauggguggcgaugcaaaccuccaacgagaccaagugguguccucccgaucagcucgugaaucugcacgacuuccggucugacgagauugaacaccuugucguggaggaacugguucgcaaaagagaggaaugccucgaugcccuggagagcaucaugacaacgaaguccgugagcuuucggcgccuuucucaucugagaaaacucguccccggcuucgggaaggcuuacaccauuuucaacaaaacacugauggaggccgacgcucacuauaaguccgugcggaccuggaaugaaauccugccuagcaagggaugccucagaguuggcgggcgcugucauccgcacgugaacggagucuuuuucaauggcauuauccuggggcccgauggaaacgugcuuaucccugagaugcagucuagccugcuccagcaacacauggaacugcuugaguccucugucauuccccugaugcauccucucgccgaccccagcacaguguuuaaagauggcgacgaagcggaggauuucguugaggugcaucugccggacguccacaaacagguguccggcguugaucuggggcucccuaacuggggaaaguacgugcugcuuagcgccggcgcucugaccgcccucaugcugaucauuuuucugaugacgugcugucggagagucaaucgcucugaacccacacagcacaaccuucgggggaccggaagagagguguccgugaccccucagagcggcaagaucauuucuuccugggaaagcuauaaauccgggggcgagacacgccucuga

SEQ ID NO: 222934 - RNA, 1575 nt, Artificial Sequence
  derived and/or modified CDS sequence (opt5) from glycoprotein__RABV__EF206719.1
auggugccccaggcccugcuguucgucccucugcuuguuuuuccgcugugcuucggcaaguuucccaucuacaccauuccugacaaacucgggcccuggagcccuaucgauauucaccaucuguccugucccaacaaucuugugguggaggacgaaggaugcacaaaccugucuggcuucagcuauauggagcucaaggucggguacauccuggcuauuaaagugaauggauuuacguguaccggcguugugacagaagccgagaccuauacaaacuucgucggguacgugaccacaaccuuuaagagaaaacacuuccggccuacgccggaugcgugccgcgcugccuauaauuggaagauggccggagaccccagauacgaagagucccugcauaacccuuaucccgauuaccgguggcuccgcaccguuaagacaaccaaagagucucuggugaucaucagcccuuccgucgcugaccuugaucccuacgacagaucucugcacagccggguguuuccguccggcaaguguagcggcguggccgucucuuccacauauugcagcaccaaucaugauuacacgauuuggaugccugaaaacccccgccucgggaugucuugugacaucuucacaaauuccagaggaaaacgggcuagcaagggcucugagaccugcggguuuguugaugaacgcggacuguauaaaucccuuaagggcgccuguaagcugaaacucugcggggugcugggacugagacucauggacggcacaugggugagcaugcaaaccuccaacgagaccaagugguguccucccgauaaacuggucaaucuucacgacuuccggucugacgagauugaacaccuggugguugaggaacucgugcgcaagagagaggaaugccuggaugcgcuugagagcaucaugacaacgaaauccgucagcuuucggcgccugucucaucucagaaagcuggugcccggcuucgggaaagccuacaccauuuucaacaagacacugauggaggcugacgcccacuauaaguccguugaaaccuggaaugagauccucccuagcaaaggaugccugcgggugggcgggagaugucauccgcacgucaacggaguguuuuucaauggcauuauccuugggcccgauggaaacguccugaucccugaaaugcagucuagccuccugcagcagcacauggagcuucuggaauccucugugauuccccucguucauccucuggcugaccccagcacaguguuuaaggauggcgacgaggccgaggauuucgucgaagugcaccucccggacguucauaaccaaguguccggcgucgaucucgggcugccuaauuggggaaaauacgugcuucugagcgcgggcgcccucaccgcucugaugcugaucauuuuucuuaugacgugcugucgccgggugaacagaucugagcccacacagcacaaucuccgcgggaccggacgggaaguuuccgucaccccucagagcggcaagaucauuucuuccugggagagccauaaauccgggggcgaaacaauccuguga

SEQ ID NO: 222935 - RNA, 1575 nt, Artificial Sequence; identical to SEQ ID NO: 222930
  derived and/or modified CDS sequence (opt5) from glycoprotein__RABV__EF206720.1

SEQ ID NO: 222936 - RNA, 1575 nt, Artificial Sequence
  derived and/or modified CDS sequence (opt5) from glycoprotein__RABV__EF437215.1
auggugccccagguccugcuguucguuccucugcuuguguuuagcaugugcuucggcaaguuuccgaucuacaccauucccgacaaacuggggccuuggucccccaucgauauucaccaucucucuuguccuaacaaucugguggucgaggacgaaggaugcacaaaccuuagcggcuucuccuauauggagcugaaggugggguacaucucugccauuaaaguuaauggauuuacguguaccggcguggucacagaagcugagaccuauacaaacuucgugggguacguuaccacaaccuuuaagagaaaacacuuccggcccacgccugaugccugccgcgcggcuuauaauuggaagauggccggagacccgagauacgaagagagccuccauaaccccuauccugauuaccacuggcugcggaccgugaagacaaccaaagagucccuggucaucaucucucccagcguggccgaccucgauccuuacgacaagucccugcauagccgcguguuucccucuggcaaauguuccggcauuacaaucagcucuaccuauugcuccacgaaucacgauuacacaauuuggaugccggaaaacccuagacuugggaccagcugugacaucuucacaaauucucggggaaagcgcgcuuccaaaggcgggaagaccugcggauuugucgaugagagaggccuguauaagagccucaaaggggccuguaagcugaaacuuugcggaguucugggccuccggcugauggacggcaccuggguggcuaugcaaacauccgaugaaacgaaguggugucccccugaccagcuggugaaccuccacgacuuccgcucugaugagauugagcaucuggucguggaggaacuuguuaaaaagagagaagagugccuggacgcccucgaaagcaucauggcgaccaaauccgugagcuuucggcgccugucucaccuuagaaagcugguccccggguucggaaaggccuacacaauuuucaauaaaacccucauggaggcugaugcccauuauaaguccgugcggacauggaacgagaucauccccagcaaaggcugccugcgcguugggggaagaugucacccucacgugaauggcgucuuuuucaacgggauuauccugggaccggacggccaugugcucauucccgaaaugcagucuagccugcuucagcaacacauggagcugcucgaauccucugucaucccucugaugcauccccuugcugauccuagcaccguguuuaaggacggcgaugaggccgaagacuucguugaggugcaucugcccgauguccacaaacagauuuccgggguggaccucggacugccgagcuggggcaaguacguucuggugucugcggggguccucguggugcugaugcuuacgaucuuuaucaugacaugcuguggacggguucacagaccuaaguccacccagcacggccucgggggcaccggacgcaaagucagcgugacaucucaguccggcaaggugauuagcuccugggagucuuauaaaagcgggggagaaacccggcucuga

SEQ ID NO: 222937 - RNA, 1575 nt, Artificial Sequence
  derived and/or modified CDS sequence (opt5) from glycoprotein__RABV__EF556198.1
augacaccccaggugcugcuguucgucccucugcuuguuuuuagcuccugcuucggcaaguuuccgaucuacaccauucccgacaaacuggggccuuggucucccaucgauauucaccaucucagcuguccuaacaaucuggugguggaggacgaaggaugcacgaaccuuuccggcuucucuuauauggagcugaaggucggguacaucagcgccauuaaagugaauggauuuaccuguacaggcguugugaccgaagcugagacauauaccaacuucgucggguacgugacaaccacguuuaagagaaaacacuuccggcccaugccugaugccugccgcgcggcuuauaauuggaagauggccggagacccgagauacgaagagucccuccauaaccccuauccugauuaccacuggcugcggaccguuaagacaaccaaagagucucuggugaucaucagccccuccgucgccgaccucgauccuuacgacaagagccugcauucucgcguguuucccggcggcaaauguuccgggauuacagugagcucugcuugcuguuccaccaaucacgauuauacgaucuggaugccggaaaacccuagacuuggaacaagcugcgacauuuucaccaauucucggggcaagcgcgccuccaaagggggaaagacauguggcuuugucgaugagagagggcuguacaagagccucaaaggagcuugcaagcugaaacuuuguggcguucugggccuccggcugauggacgggaccuggguggccauccaaaccuccgaugaaauuaaguggugcucucccgaccagcuggugaaccuccacgacuuccauagcgaugagaucgagcaccuggucguggaggaacuuguuaaaaagcgcgaagagugccuggacgcgcucgaaacaauuaugacgaccaaauccgugagcuuuagacggcugucucaucuucgcaagcuggucccuggauccggcaaggccuauacaaucuucaauaaaacccucauggaggcugaugcccacuacaagagcaucagaacauggaacgagauuauccccucuaaagggugucugcgggugggaggccgcugccacccccauguuaaugggguguucuuuaacggaauuauccugggcccugacggccacguccucauuccggaaaugcagagcucccugcuucaucagcacauggagcugcucgaaucuagcgugaucccccugaugcauccucuugcugaucccuccaccgucuucaaggacggggaugaggccgaagacuuuguggagguucaccucccugaugugcacaaacaaaucagcggagucgaccucggccugcccaauugggggaaguaugugcugauuucugcgggagcccucacggcucugaugcuuacaaucuuccugaugaccuguugcagaaagaccaaccgggccgaguccauucagcauagcccgggcgaaacagggagaaaaguuucugugaccucccacaacggccgcgucaucagcuccugggagucuuacaagagcggauccgaaacaaaacucuga

SEQ ID NO: 222938 - RNA, 1575 nt, Artificial Sequence
  derived and/or modified CDS sequence (opt5) from glycoprotein__RABV__EF564174.1
augaucccccaggcccuccuguucgugccucugcuugucuuuccgcugugcuucggcaaguuucccauuuacaccaucccugacaaacucgggcccuggagcccuauugauauccacaaccuguccugucccaauaaccuuguuguggaggacgaaggaugcacaaaucugucuggcuucagcuauauggagcucaaggugggguacauuuccgcuaucaaagucaacggauuuacguguaccggcgugguuacagaagccgagaccuauacaaauuucgugggguacgucaccacaaccuuuaagagaaaacauuuccggccuacgccggaugcgugccgcucugcuuauaacuggaagauggccggagaccccagauacgaagagagccugcacaauccuuaucccgauuaccauuggcugcggaccgugaagacaaccaaagaguccguugugaucauuucuccuagcgucgccgaccucgaucccuacgacaagucccugcacagccgcguguuuccgagaggcaaauguucuggcaucacaguguccagcgcuuauugcucuaccaaccaugauuacacgauuuggaugccugaaaauccccggcuugggacauccugugacaucuucaccaacagccgcggaaagagagccucuaaaggcuccaagacaugcggguuugucgaugagcggggacuguauaagagccucaaaggcgcuuguaagcugaaacuuugcgggguucugggacuccgccugauggacggcaccuggguggccauucaaaccuccaaugaaacaaagugguguccucccgaucagcuggugaaccuccacgacuuccacucugacgagaucgagcaucuggucguggaagaacuuguugagaaaagagaggaaugccuggaugcgcucgagagcauuaugacgaccaaucccguguccuuucggcgccugagcccucuuagaaagcuggucccgggcuucgggaaagccuacacaaucuucaacaagacccucauggaggcugacgcccacuauaagucugugcagacaugggaugaaaucauucccuccaaaggaugccugcggguuggcgcucgcugucauccucacgugaauggggucuuuuucaacggaaucauucugggccccgacgggcacgugcucaucccugagaugcagagcucucugcuucaacagcauauggaacugcucgagagcuccgucauuccccugaugcacccgcuugccgauccuucuaccguguuuaaggacggagaugaaguugaggacuucguggagguccaucugcccgaugugcacaaacagguuagcggcguggaccucggccugccuaacugggggaaggauguccugaugggagcgggcgugcucacggcccugaugcuuaugaucuuucugaugacaugcuguagacggaccaauagagcugaauccauccagcauagccucggggagaccggacgcaaagugucuguuacaucccaaagcggccgggucauuucuuccugggaaagcuacaaguccgggggcgagaccaagcuguga

SEQ ID NO: 222939 - RNA, 1581 nt, Artificial Sequence
  derived and/or modified CDS sequence (opt5) from glycoprotein__RABV__EF614261.1
augcccagccaggccguguuccugguccucaccacaguguuuucccaaugcguuggcaaguucccuaucuacacgauuccggacaaacuggggcccuggucuccuaucgauauucaccaucuuagcugucccaacaaucugguggucgaggacgauggaugcaccacacucuccggcuuuaccuauauggaacugaaggugggguacaucacaaccauuaaaguugacggauucacauguaccggcaucgugacggaggcugaaaccuauacaaacuuugucggguacgugaccacaaccuucaagagaaaacacuuucggccuggacccucugccugccgcgaugcguauaauuggaaggcugccggcgacccuagauacgaggaaagccuucauaacccguaucccgauucccacuggcugcggacgguuacaaccacaaaggagucucuccugaucauuagcccuuccguggucgacauggaugccuacgacaaaagccugcucucuaagaucuuccccaauggcaaauguccugggguguccauugcuagccccuuuugcucuaccaaccaugauuacaccaucuggaugccggagaauacaaagacgggaauguccugugacauuuucaccacaagcaaaggcaagcgcgccaccaaggaugggaaacugugcggauuuguggacgaaagaggccuuuauaagucucugaaaggguccuguaagcucaaacugugcggagucagcggccuucggcugauggacggcuccuggguuucuauccagaaccacgaggaagcuaagugguguccucccgaucagcucgugaaugugcacgacuuccauagcgaugagauugagcaccugaucgucgaggaacuggugaaaaagcgcgaagagugccucgacgcccuggaauccaucaugacaaccaagagcauuucuuuuagacggcuuucccaucugcgcaaacucguuccuggguucggaaaggcguacacgaucauuaacaaaacacugauggaggccgaugcucacuauaagagcaucagagaguggucugaaauuauccccagcaaaggcugccuuguggccgggggacgguguuaccaccaucacaauggcgucuucuuuaacgggaucauucugucccccgacggacaugugcucaucccugagaugcagucugcucugcugcaacagcacauugaacuccuggagagcuccguuaucccgcuuaugcauccccuggccgauccuagcaccguguucaagggcgacgauggcgcggaagacuuugucgaggugcaccuccccgauguccagaagcagauuucugggaucgaccugggacuuccugaguggaaacgcuauuuccugaucggcguggccgcucucacccuguuugcccugacaauuuucguuguggucugcuguagacgggugcgcagacgggaaagagcuaagcccaauccgguugagcucauccgcaaaguguccgucaccagccaaucugggaaggugauuccuuccugggaaagcuacaaaguggaggccgaaggacagucccaggccuga

SEQ ID NO: 222940 - RNA, 1575 nt, Artificial Sequence; identical to SEQ ID NO: 222915
  derived and/or modified CDS sequence (opt5) from glycoprotein__RABV__EF643518.1

SEQ ID NO: 222941 - RNA, 1575 nt, Artificial Sequence
  derived and/or modified CDS sequence (opt5) from glycoprotein__RABV__EU008924.1
augaucccccaggcccugcucuuugugccucugcuugucuuuagcuccugcuucggcaaguuuccgauuuacaccauccccgacaaacuggggccuuggucucccauugauauccaccaucucagcuguccuaacaaucugguuguggaggacgaaggaugcacaaaccuuuccggcuucucuuauauggagcugaaggugggguacauuagcgcuaucaaagucaauggauuuacguguaccggcgugguuacagaagccgagaccuauacaaacuucgugggguacgucaccacaaccuuuaagagaaaacacuuccggcccaugccuggagcgugccgcgcugccuauaauuggaagauggccggcgauccgagauacgaagagucccuccauaaccccuauccugacuaccacuggcugcggacggugaagaccacaaaagagucucugguuaucauuagccccuccguggcugaucucgacccuuacgauaagagccugcauucucgcgucuuucccuccggcaaauguagcgggaucaccgugucuuccacaugcuguagcaccaaucacgacuauacgauuuggaugccggaaaacccuagacuuggaacaucuugcgauaucuucaccaauucccggggcaagcgcgccagcaaagggggaaagacauguggcuuuguggacgagagagggcuguacaagucccucaaaggagcuugcaagcugaaacuuuguggcguccugggccuccggcugauggaugggaccuggguugccauucaaaccucugacgaaaucaaguggugcagccccgaucagcuggugaaccuccacgacuuccauuccgacgagauugagcaccugguggucgaggaacuugugaaaaagcgcgaagagugccuggaugcgcucgaaacaaucaugacgaccaaaagcguuucuuuuagacggcugucccaucuucgcaagcuggugccuggauucggcaaggccuauacaaucuucaauaaaacccucauggaggcugacgcccacuacaagagcauuagaacauggaacgagaucauucccucuaaagggugucugcgggucggaggccgcugccacccccaugugaaugggguuuucuucaacggaaucauucugggcccugauggccacgugcucaucccggaaaugcagagcucccugcuucaucagcacauggagcugcucgaaucuagcgucaucccccugaugcauccucuugcugaccccuccaccguguuuaaggauggggacgaggccgaagauuucgucgaggugcaucugccugacguucacaaacaaauuagcggaguggaucucggccugcccaauugggggaaguauguccugaucucugugggagcgcucacggcccugauguccaugauuuuucuuaugacauguugcagaaagaccaaccgggcugagagcauccagcacucuccgggcgaaaccgggagaaaaguuuccgugacaagccacaacggccgcgucauuuccucuugggagagcuacaaguccggaggcgaaaccaaacuguga

SEQ ID NO: 222942 - RNA, 1575 nt, Artificial Sequence
  derived and/or modified CDS sequence (opt5) from glycoprotein__RABV__EU008925.1
augaucccccaggcccuucucuucgugccucugcuugucuuuagccugugcuucggcaaguuuccgauuuacaccauccccgacaaacucgggccuuggucccccauugauauccaccaucugucuuguccuaacaaucuuguuguggaggacgaaggaugcacaaaccugagcggcuucuccuauauggagcucaaggugggguacauuucugcuaucaaagucaauggauuuacguguaccggcgugguuacagaagccgagaccuauacaaacuucgugggguacgucaccacaaccuuuaagagaaaacacuuccggcccaugccuggagcgugccgcgcugccuauaauuggaagauggccggcgauccgagauacgaagagagccugcauaaccccuauccugacuaccacuggcugcggacggugaagaccacaaaagagucccucguuaucauuucucccagcguggcugaucuggacccuuacgauaagucccuucauagccgcgucuuucccggcgggaaauguucuggaaucaccguguccagcacaugcuguucuaccaaucacgacuauacgauuuggaugccggaaaacccuagacugggcacauccugcgauaucuucaccaauagccgggggaagcgcgccucuaaaggaggcaagacauguggguuuguggacgagagaggacucuacaagucccugaaaggcgcuugcaagcugaaacuguguggcguccucgggcugcggcugauggauggaaccuggguugccauucaaaccagcgacgaaaucaaguggugcucccccgaucagcucgugaaccugcacgacuuccauucugacgagauugagcaccuuguggucgaggaacuggugaaaaagcgcgaagagugccucgaugcgcuggaaacaaucaugacgaccaaaagcguuuccuuuagacggcuuagccaucugcgcaagcucgugccuggcuucgggaaggccuauacaaucuucaauaaaacccugauggaggcugacgcccacuacaagucuauuagaacauggaacgagaucauucccuccaaaggaugucugcgggucggcgggcgcugccacccccaugugaauggaguguuuuucaacggcaucauucucggcccugaugggcacguucugaucccggaaaugcagagcucucuucugcaucagcacauggagcuccuggaaagcuccgucaucccccuuaugcauccucuggcugaccccucuaccguguuuaaggauggagacgaggccgaagauuucgucgaggugcaccucccugacguucacaaacaaauuagcggcguggaucuggggcugcccaauuggggaaaguauguccucaucuccgcgggcgcccugacggcucuuaugagcaugauuuuucugaugacauguugcagaaagaccaaccgggccgggucuauccagcauuccccgggcgagaccggaagaaaagugagcguuacaucucacaacggccgcgugauuuccagcugggaauccuacaagucugggggagagaccaaacucuga

SEQ ID NO: 222943 - RNA, 1575 nt, Artificial Sequence
  derived and/or modified CDS sequence (opt5) from glycoprotein__RABV__EU008926.1
augaucccccaggcccugcucuuugugccucugcuugucuuuagcuccugcuucggcaaguuuccgauuuacaccauccccgacaaacuggggccuuggucucccauugauauccaccaucucagcuguccuaacaaucugguuguggaggacgaaggaugcacaaaccuuuccggcuucucuuauauggagcugaaggugggguacauuagcgcuaucaaagucaauggauuuacguguaccggcgugguuacagaagccgagaccuauacaaacuucgugggguacgucaccacaaccuuuaagagaaaacacuuccggcccaugccuggagcgugccgcgcugccuauaauuggaagauggccggcgauccgagauacgaagagucccuccauaaccccuauccugacuaccacuggcugcggacggugaagaccacaaaagagucucugguuaucauuagccccuccguggcugaucucgacccuuacgauaagagccugcauucucgcgucuuucccggcgggaaauguuccggaaucaccgugagcucuacaugcuguuccaccaaucacgacuauacgauuuggaugccggaaaacccuagacuuggcacaagcugcgauaucuucaccaauucucgggggaagcgcgccuccaaaggaggcaagacauguggguuuguggacgagagaggacuguacaagagccucaaaggcgcuugcaagcugaaacuuuguggcguccuggggcuccggcugauggauggaaccuggguugccauucaaaccuccgacgaaaucaaguggugcucucccgaucagcuggugaaccuccacgacuuccauagcgacgagauugagcaccugguggucgaggaacuugugaaaaagcgcgaagagugccuggaugcgcucgaaacaaucaugacgaccaaauccguuagcuuuagacggcugucucaucuucgcaagcuggugccuggcuucgggaaggccuauacaaucuucaauaaaacccucauggaggcugacgcccacuacaaguccauuagaacauggaacgagaucauucccagcaaaggaugucugcgggucggcgggcgcugccacccccaugugaauggaguuuucuucaacggcaucauucugggcccugaugggcacgugcucaucccggaaaugcagucuagccugcuucagcaacauauggagcugcucgaauccucugucaucccccugaugcacccucuugcugaccccagcaccguguuuaaggauggagacgaggccgaagauuucgucgaggugcaucugccugacguucacaaacagauuuccggcguggaucucgggcugcccaauuggggaaaguauguccugaugagcgcgggcgcccucacggcucugaugucuaugaucuuucuuaugacauguugcagaaagaccaaccgggccgaguccauucagcacagcccgggggaaaccggcagaaaagugucuguuacaucccauaacggacgcgugaucagcuccugggagucuuacaagagcggcggggaaaccaaacuguga

SEQ ID NO: 222944 - RNA, 1575 nt, Artificial Sequence
  derived and/or modified CDS sequence (opt5) from glycoprotein__RABV__EU008927.1
augaucccccaggcccuucucuucgugccucugcuugucuuucugagcugcuucggcaaguuuccgauuuacaccauccccgacaaacucgggccuuggucccccauugauauccaccaucugucuuguccuaacaaucuuguuguggaggacgaaggaugcacaaaccugagcggcuucuccuauauggagcucaaggugggguacauuucugcuaucaaagucaauggauuuacguguaccggcgugguuacagaagccgagaccuauacaaacuucgugggguacgucaccacaaccuuuaagagaaaacacuuccggcccaugccugaugcgugccgcgcugccuauaauuggaagauggccggagacccgagauacgaagagagccugcauaaccccuauccugauuaccacuggcugcggacggugaagaccacaaaagagucccucguuaucauuucucccagcguggcugaccuggauccuuacgacaagucccuucauagccgcgucuuucccggcggcaaauguucugggaucaccguguccagcacaugcuguucuaccaaucacgauuauacgauuuggaugccggaaaacccuagacugggaacauccugcgacaucuucaccaauagccggggcaagcgcgccucuaaaggguccaagacauguggauuuguggaugagagaggccucuacaagagccugaaaggggcuugcaagcugaaacuguguggaguccucggccugcggcugauggacggcaccuggguugccauucaaaccuccgaugaaaucaaguggugcucucccgaccagcucgugaaccugcacgacuuccauagcgaugagauugagcaccuuguggucgaggaacuggugaaaaagcgcgaagagugccucgacgcgcuggaaacaaucaugacgaccaaauccguuagcuuuagacggcuuucucaucugcgcaagcucgugccuggguucggaaaggccuauacaaucuucaauaaaacccugauggaggcugaugcccacuacaaguccauuagaacauggaacgagaucauucccagcaaaggcugucugcgggucgggggacgcugccacccccaugugaauggcguguuuuucaacgggaucauucucggaccugacggccacguucugaucccggaaaugcagucuagccuucugcaucagcacauggagcuccuggaauccucugucaucccccuuaugcauccucuggcugaucccagcaccguguuuaaggacggcgaugaggccgaagacuucgucgaggugcaccucccugauguucacaaacaaauuuccgggguggaccugggacugcccaauuggggcaaguauguccucaucagcgcgggggcccugacggcucuuaugucuaugauuuuucugaugacauguugcagaaagaccaaccgggccgaguccauccagcauagcccgggagaaaccggcagaaaagugucuguuacaucccacaacgggcgcgugauuagcuccugggagucuuacaagagcggcggagaaaccaaacucuga

SEQ ID NO: 222945 - RNA, 1575 nt, Artificial Sequence
  derived and/or modified CDS sequence (opt5) from glycoprotein__RABV__EU008928.1
augaucccccaggugcugcuguucgucccucugcuuguuuuuagcuccugcuucggcaaguuuccgauuuacaccauccccgacaaacuggggccuuggucucccauugauauccaccaucucagcuguccuaacaaucuggugguggaggacgaaggaugcacaaaccuuuccggcuucucuuauauggagcugaaggucggguacauuagcgccaucaaagugaauggauuuacguguaccggcguugugacagaagcugagaccuauacaaacuucgucggguacgugaccacaaccuuuaagagaaaacacuuccggcccaugccugaugccugccgcgcggcuuauaauuggaagauggccggagacccgagauacgaagagucccuccauaaccccuauccugauuaccacuggcugcggacgguuaagaccacaaaagagucucuggugaucauuagccccuccgucgccgaccucgauccuuacgacaagagccugcauucucgcguguuucccuccggcaaauguagcggcaucaccgugucuuccacaugcuguagcaccaaucacgauuauacgauuuggaugccggaaaacccuagacuugggacaucuugcgacaucuucaccaauucccggggaaagcgcgcuagcaaaggcgggaagacauguggauuugucgaugagagaggccuguacaagucccucaaaggggccugcaagcugaaacuuuguggaguucugggccuccggcugauggacggcaccuggguggcuauucaaaccucugaugaaaucaaguggugucccccugaccagcuggugaaccuccacgacuuccauagcgaugagauugagcaccuggucguggaggaacuuguuaaaaagcgcgaagagugccuggacgcccucgaauccaucaugacaacgaaaagcgugucuuuuagacggcugucccaucuucgcaagcugguccccggguucggaaaggcguauaccaucuucaauaaaacacucauggaggccgaugcucacuacaagagcauuagaaccuggaacgagaucauucccucuaaaggcugccugcggguugggggacgcugccacccucaugugaauggcguguuuuucaacgggaucauucugggaccggacggccacguccucauccccgaaaugcagagcucccugcuucaucagcacauggagcugcucgaaucuagcgugaucccucugaugcauccccuugccgauccuuccacagucuuuaaggacggcgaugaggcugaagacuucguggagguucaccuccccgaugugcacaaacaaauuagcggggucgaccucggacugccgaauuggggcaaguaugugcugaucucugccggggcgcucaccgcccugauguccaugauuuuucuuaugacguguugcagaaagacaagccgggcugagucuacccagcauuccccuggagaaaccggcagaaaaguuagcgugacaucccacaacgggcgcgucaucucuagcugggaguccuacaagucuggcggagaaaccaaacuguga

SEQ ID NO: 222946 - RNA, 1575 nt, Artificial Sequence
  derived and/or modified CDS sequence (opt5) from glycoprotein__RABV__EU086128.1
auggugccccagguccuucucuucguuccucugcuuguguuuagcaugugcuucggcaaguuuccgaucuacaccauucccgacaaacuggggccuuggucccccaucgauauucaccaucucucuuguccuaacaaucugguggucgaggacgaaggaugcacaaaccuuagcggcuucuccuauauggagcugaaggugggguacaucucugccauuaaaguuaauggauuuacguguaccggcguggucacagaagcugagaccuauacaaacuucgugggguacguuaccacaaccuuuaagagaaaacacuuccggcccacgccugaugccugccgcgcggcuuauaauuggaagauggccggagacccgagauacgaagagagccuccauaaccccuauccugauuaccacuggcugcggaccgugaagacaaccaaagagucccuggucaucaucucucccagcguggccgaccucgauccuuacgacaagucccugcauagccgcguguuucccucuggcaaaugucuuggcauuacaaucuccagcaccuauugcucuacgaaucacgauuacacaauuuggaugccggaaaacccuagacuggggaccuccugugacaucuucacaaauagccggggaaagcgcgcuucuaaaggcuccaagaccugcggguuugucgaugagagaggacucuauaagagccugaaaggcgccuguaagcugaaacugugcgggguucucggacugcggcugauggacggcaccuggguggcuaugcaaacauccgaugaaacgaaguggugucccccugaccagcucgugaaccugcacgacuuccgcucuaaugagauugagcaucuugucguggaggaacugguuaaaaagagagaagagugccucgaugcccuggaaagcaucaugaccacaaaauccgugagcuuucggcgccuuucucaccugagaaagcucguccccggcuucgggaaggcguacaccauuuucaacaaaacacugauggaggccgacgcucauuauaaguccgugcggaccuggaaugagaucauccccagcaaaggaugccugcgcguuggcgggagaugucacccucacgugaacggagucuuuuucaauggcauuauccucgggccggauggacaugugcugauucccgaaaugcagucuagccuucugcagcaacacauggaccuccuggaguccucugucaucccucuuaugcauccccuggccgauccuagcacgguguuuaaggacggcgaugaagcugaggacuucguugaagugcaccuccccgauguccauaaacagauuuccggcguggaccuggggcugccgagcuggggaaaguacguucucgugucugccggcguccugguggugcuuaugcugacaaucuuuaucaugaccugcugugggcggguucacagaccuaaguccacccagcacagccucggaggcacagggcgcaaagucucugugaccucccagagcggcaaggugauuuccucuugggagagcuauaaacggggaggcgagacaagacuguga

SEQ ID NO: 222947 - RNA, 1575 nt, Artificial Sequence
  derived and/or modified CDS sequence (opt5) from glycoprotein__RABV__EU086129.1
augaucccccaggcccuucucuucgugccuuuucuggcuuucagccuuugcuuuggcaaguucccgauuuacaccauccccgacaaacuggggccuuggucccccauugauauccaccaucucucuuguccuaacaaucuggucguugaggacgaaggaugcacaaaccuuagcggcuuuuccuauauggagcugaaggugggguacauuucugccaucaaagugaauggauucacguguaccggcgucgugacagaagcggagaccuauacaaacuuuaucggguacguuaccacaaccuucagacggaagcacuuucgccccacgccugaugcuugcagagccgccuauaauuggaaaauggcuggagacccgcgguacgaagagagccuccauaaccccuauccugauuaccacuggcugcgcaccgugaagacaaccaaggagucccuggucauuaucucucccagcguguccgaccucgauccuuacgacaaaagccugcauucuagaguuuuccccuccggcaaguguagcggcauuacagugucuuccaccuauugcccgacgaaucacgauuacacaaucuggaugccugaaaacccccggcuugggaccagcugugacauuuuuacaaauucucgcggaaaaagagccuccaagggcagcaaaaccugcggguucgucgaugagcggggacuguauaagucccucaagggcgcuuguaaacugaagcugugcggggugcugggacuccgccugauggacggcaccugggccgcgauccaaacaucugaugaagccaaaugguguccucccgaccagcuggugaacauucacgacuuuagaagcgaugagaucgagcaucucgucguugaggaacuggugaagaaacgggaagagugccuugacgcucuggaauccaucaugacgaccaagagcgugucuuuccgcagacucucccaucugcggaaacuuguccccggcuucgggaaggccuacacaauuuuuaauaagacccugauggaggcugaugcccacuauaaaagcgugcgcacauggaacgagaucauuccuucuaagggaugccucagaguuggcgggcggugucacccgcacgugaauggagucuucuuuaacggcaucauucuggggcccgacggacaugugcugaucccugaaaugcagagcucccuccugcagcaacacauggagcuucuggaaucuagcguuaucccccucaugcauccucuggcggaucccuccaccguguucaaagacggcgaugaggccgaagacuuugucgaggugcaccuuccggauguccauaaacaggugagcggcguugaccuggggcucccuucuuggggaaaguacgugcugauguccgucggcgcucugauugugcucaugcugaugaucuuccuuacgacaugcuguagaaaggccaauggggcugagagcauucgccaccggcugggagaaaccggcagaaagguuucugugaccucccagaacgggcgcgucaucagcuccugggagucuuauaaaagcggcggagaaacaaagcucuga

SEQ ID NO: 222948 - RNA, 1575 nt, Artificial Sequence
  derived and/or modified CDS sequence (opt5) from glycoprotein__RABV__EU086130.1
augaucccccaggcccuucucuucgugccucugcuugucuuuagccugugcuacggcaaguucccgauuuauaccauccccgacaaacucgggccuuggucccccauugauauccaccaucugucuuguccuaacaaucuuguuguggaggacgaaggaugcacaaaccugagcggcuuuuccuacauggagcucaaggugggguauauuucugcuaucaaagucaauggauucacguguaccggcgugguuacagaagccgagaccuacacaaacuuugugggguaugucaccacaaccuucaagagaaaacacuuucggcccacgccugaugcgugccgcgcugccuacaauuggaagauggccggagacccgagauaugaagagagccugcauaaccccuacccugauuaccacuggcugcggaccgugaagacaaccaaagagucccucguuaucauuucucccagcguguccgaccuggauccuuaugacaagagccuucauucucgcgucuuccccuccggcaaauguagcggcaucacagugucuuccaccuacugcccgacgaaucacgauuauacaauuuggaugccugaaaaccccagacuggggaccagcugugacaucuuuacaaauucucggggaaagcgcgcuuccaaaggcagcaagaccugcggguucguggaugagagaggacucuacaagucccugaaaggcgccuguaagcugaaacugugcgggguccucggacugcggcugauggacggcaccugggcugccauucaaacaucugaugaagcgaagugguguccucccgaccagcucguuaacauccacgacuuucgcagcgaugagauugagcaucuggugguggaggaacuugucaaaaagagagaagagugccuggacgcccucgaauccaucaugacgaccaaaagcgugucuuuccggcgccugucccaccuuagaaagcugguucccggcuuugggaaggcuuauacaaucuucaauaaaacccucauggaggccgaugcucauuacaagagcgugcggacauggaacgagauuaucccuucuaaaggaugccugcgcgucggcgggagaugucacccgcacgugaauggaguuuucuuuaacggcauuauccuggggcccgacggacaugugcucauuccugaaaugcagagcucccugcuucagcaacacauggagcugcucgaaucuagcgucaucccccugaugcauccucuugccgaucccuccaccguguucaaggacggcgaugaggcggaagacuuugucgaggugcaucugccggauguucacaaacaggugagcggcgucgaccucgggcugccuucuuggggaaaguaugugcugauguccguuggcgccaugaucgcucucaugcuggugauuuuccuuacgacaugcugucggaaggucaauggggccgagaccauccagcacagacugggagaaaccggccgcaaagugagcgugacaucucaguccgggcggguuauuagcuccugggagucuuacaagagcggcggagaaaccaaacucuga

SEQ ID NO: 222949 - RNA, 1575 nt, Artificial Sequence
  derived and/or modified CDS sequence (opt5) from glycoprotein__RABV__EU086131.1
augaucccccaggcccuccuguucgugccucugcuugucuuuagccugugccucggcaaguucccgauuuacaccauccccgacaaacuggggccuuggucccccauugauauccaccaucuuucuuguccuaacaaucugguuguggaggacgaaggaugcacaaaccucagcggcuuuuccuauauggagcugaaggugggguacauuucugcuaucaaagucaauggauucacguguaccggcgugguuacagaagccgagaccuauacaaacuuugugggguacgucaccacaaccuucaagagaaaacacuuucggcccacgccugaugcgugccgcgcugccuauaauuggaagauggccggagacccgagauacgaagagagccugcauaaccccuauccugauuaccacuggcuccggaccgugaagacaaccaaagagucccugguuaucauuucucccagcguguccgaccuugauccuuacgacaagagccugcauucucgcgucuuccccggcggcaaauguuccgggaucacagugagcucuaccuauugcccgacgaaucacgauuacacaauuuggaugccugaaaaccccagacucggaaccuccugugacaucuuuacaaauagccggggcaagcgcgcuucuaaaggguccaagaccugcggauucguggaugagagaggccuguauaagagccuuaaaggggccuguaagcugaaacucugcggaguccugggccugcggcucauggacggcaccugggcugccauucaaacauccgaugaagcgaagugguguccucccgaccagcugguuaacauccacgacuuucgcucugaugagauugagcaucuugugguggaggaacuggucaaaaagagagaagagugccucgacgcccuggaaagcaucaugacgaccaaauccgugagcuuccggcgccuuucucaccugagaaagcucguucccggguuuggaaaggcuuacacaaucuucaauaaaacccugauggaggccgaugcucauuauaaguccgugcggacauggaacgagauuaucccuagcaaaggcugccugcgcgucgggggaagaugucacccgcacgugaauggcguuuucuuuaacgggauuauccucggacccgacggccaugugcugauuccugaaaugcagucuagccuucugcagcaacacauggagcuccuggaauccucugucaucccccuuaugcauccucuggccgaucccagcaccguguucaaggacggcgaugaggcggaagacuuugucgaggugcaccucccggauguucauaaacagguguccggggucgaccugggacugccuagcuggggcaaguacgugcucaugucuguuggggccaugaucgcucugaugcuuaugauuuuccugacgacaugcugucggaaggccaauggagcugagaccauccagcacagacucggcgaaaccgggcgcaaaguguccgucacaagccagucuggccgggugauuuccagcugggaguccuauaagucuggaggcgaaaccaaacuguga

SEQ ID NO: 222950 - RNA, 1575 nt, Artificial Sequence
  derived and/or modified CDS sequence (opt5) from glycoprotein__RABV__EU086132.1
augaucccccaggcccugcucuuugugccucugcuugucuuuagccugugcuucggcaaguuuccgauuuacaccauccccgacaaacucgggccuuggucccccauugauauccaccaucugucuuguccuaacaaucuuguuguggaggacgaaggaugcacaaaccugagcggcuucuccuauauggagcucaaggugggguacauuucugcuaucaaagucaauggauuuacguguaccggcgugguuacagaagccgagaccuauacaaacuucgugggguacgucaccacaaccuuuaagagaaaacacuuccggcccacgccugaugcgugccgcgcugccuauaauuggaagauggccggagacccgagauacgaagagagccugcauaaccccuauccugauuaccacuggcugcggaccgugaagacaaccaaagagucccucguuaucauuucucccagcguguccgaccuggauccuuacgacaagagccuucauucucgcgucuuucccuccggcaaauguagcggcaucacagugucuuccaccuauugcccgacgaaucacgauuacacaauuuggaugccugaaaaccccagacuggggaccagcugugacaucuucacaaauucucggggaaagcgcgcuuccaaaggcagcaagaccugcggguuuguggaugagagaggacucuauaagucccugaaaggcgccuguaagcugaaacugugcgggguccucggacugcggcugauggacggcaccugggcugccauucaaacaucugaugaagcgaagugguguccucccgaccagcucguuaacauccacgacuuccgcagcgaugagauugagcaucuggugguggaggaacuugucaaaaagagagaagagugccuggacgcccucgaauccaucaugacgaccaaaagcgugucuuuucggcgccugucccaccuuagaaagcugguucccggcuucgggaaggcuuacacaaucuucaauaaaacccucauggaggccgaugcucauuauaagagcgugcggacauggaacgagauuaucccuucuaaaggaugccugcgcgucggcgggagaugucacccgcacgugaauggaguuuucuucaacggcauuauccuggggcccgacggacaugugcucauuccugaaaugcagagcucccugcuucagcaacacauggagcugcucgaaucuagcgucaucccccugaugcauccucuugccgaucccuccaccguguuuaaggacggcgaugaggcggaagacuucgucgaggugcaccuuccggauguucauaaacaggugagcggcgucgaccucgggcugccuucuuggggaaaguacgugcugauguccguuggcgccaugaucgcucucaugcugaugauucuucugacgacaugcugucggaaggugaauggggccgagaccauccagcacagacucggagaaaccggccgcaaagucagcgugacaucucaguccgggcgggugauuagcuccugggagucuuauaagagcggcggagaaaccaaacuguga

SEQ ID NO: 222951 - RNA, 1575 nt, Artificial Sequence
  derived and/or modified CDS sequence (opt5) from glycoprotein__RABV__EU086133.1
augaucccccaggcccugcucuuugugccucugcuugucuuuagccugugcuucggcaaguuuccgauuuacaccauccccgacaaacucgggccuuggucccccauugauauccaccaucugucuuguccuaacaaucuuguuguggaggacgaaggaugcacaaaccugagcggcuucuccuauauggagcucaaggugggguacauuucugcuaucaaagucaauggauuuacguguaccggcgugguuacagaagccgagaccuauacaaacuucgugggguacgucaccacaaccuuuaagagaaaacacuuccggcccacgccugaugcgugccgcgcugccuauaauuggaagauggccggagacccgagauacgaagagagccugcauaaccccuauccugauuaccacuggcugcggaccgugaagacaaccaaagagucccucguuaucauuucucccagcguguccgaccuggauccuuacgacaagagccuucauucucgcgucuuucccuccggcaaauguagcggcaucacagugucuuccaccuauugcccgacgaaucacgauuacacaauuuggaugccugaaaaccccagacuggggaccagcugugacaucuucacaaauucucggggaaagcgcgcuuccaaaggcagcaagaccugcggguuuguggaugagagaggacucuauaagucccugaaaggcgccuguaagcugaaacugugcgggguccucggacugcggcugauggacggcaccugggcugccauucaaacaucugaugaagcgaagugguguccucccgaccagcucguuaacauccacgacuuccgcagcgaugagauugagcaucuggugguggaggaacuugucaaaaagagagaagagugccuggacgcccucgaauccaucaugacgaccaaaagcgugucuuuucggcgccugucccaccuuagaaagcugguucccggcuucgggaaggcuuacacaaucuucaauaaaacccucauggaggccgaugcucauuauaagagcgugcggacauggaacgagauuaucccuucuaaaggaugccugcgcgucggcgggagaugucacccgcacgugaauggaguuuucuucaacggcauuauccuggggcccgacggacaugugcucauuccugaaaugcagagcucccugcuucagcaacacauggagcugcucgaaucuagcgucaucccccugaugcauccucuugccgaucccuccaccguguuuaaggacggcgaugaggcggaagacuucgucgaggugcaccuuccggauguucauaaacaggugagcggcgucgaccucgggcugccuucuuggggaaaguacgugcugauguccguuggcgccaugaucgcucucaugcugaugauuuuucuuacgacaugcugucggaaggugaauggggccgagaccauccagagacgccugggagaaaccggccggaaagucagcgugacaucucaguccgggagagugauuagcuccugggagucuuauaagagcggcggagaaaccaaacucuga

SEQ ID NO: 222952 - RNA, 1575 nt, Artificial Sequence
  derived and/or modified CDS sequence (opt5) from glycoprotein__RABV__EU086134.1
augaucccccaggcccugcucuuugugccucugcuugucuuuagccugugcuucggcaaguuuccgauuuacaccauccccgacaaacucgggccuuggucccccauugauauccaccaucugucuuguccuaacaaucuuguuguggaggacgaaggaugcacaaaccugagcggcuucuccuauauggagcucaaggugggguacauuucugcuaucaaagucaauggauuuacguguaccggcgugguuacagaagccgagaccuauacaaacuucgugggguacgucaccacaaccuuuaagagaaaacacuuccggcccacgccugaugcgugccgcgcugccuauaauuggaagauggccggagacccgagauacgaagagagccugcauaaccccuauccugauuaccacuggcugcggaccgugaagacaaccaaagagucccucguuaucauuucucccagcguguccgaccuggauccuuacgacaagagccuucauucucgcgucuuucccuccggcaaauguagcggcaucacagugucuuccaccuauugcccgacgaaucacgauuacacaauuuggaugccugaaaaccccagacuggggaccagcugugacaucuucacaaauucucggggaaagcgcgcuuccaaaggcagcaagaccugcggguuuguggaugagagaggacucuauaagucccugaaaggcgccuguaagcugaaacugugcgggguccucggacugcggcugauggacggcaccugggcugccauucaaacaucugaugaagcgaagugguguccucccgaccagcucguuaacauccacgacuuccgcagcgaugagauugagcaucuggugguggaggaacuugucaaaaagagagaagagugccuggacgcccucgaauccaucaugacgaccaaaagcgugucuuuucggcgccugucccaccuuagaaagcugguucccggcuucgggaaggcuuacacaaucuucaauaaaacccucauggaggccgaugcucauuauaagagcgugcggacauggaacgagauuaucccuucuaaaggaugccugcgcgucggcgggagaugucacccgcacgugaauggaguuuucuucaacggcauuauccuggggcccgacggacaugugcucauuccugaaaugcagagcucccugcuucagcaacacauggagcugcucgaaucuagcgucaucccccugaugcauccucuugccgaucccuccaccguguuuaaggacggcgaugaggcggaagacuucgucgaggugcaccuuccggauguucauaaacaggugagcggcgucgaccucgggcugccuucuuggggaaaguacgugcugauguccguuggcgccaugaucgcucucaugcugaugauuuuucuuacgacaugcugucggaaggugaauagagccgagaccauccagcgccggcugggggaaaccggaagaaaagucagcgugacaucucagaccggccgcgugauuuccagcugggaguccuauaagucugggggcgaaacaaaacucuga

SEQ ID NO: 222953 - RNA, 1575 nt, Artificial Sequence
  derived and/or modified CDS sequence (opt5) from glycoprotein__RABV__EU086135.1
augaucccccaggugcugcuguucgucccucugcuuguuuuuagcuccugcuucggcaaguuuccgauuuacaccauccccgacaaacuggggccuuggucucccauugauauccaccaucucagcuguccuaacaaucuggugguggaggacgaaggauccacaaaccuuucuggcuuccccuauauggagcugaaggucggguacauuagcgccaucaaagugaauggauuuacgugcaccggcguugugacagaagcugagccuuauaccaacuucgucggguacgugacaaccacauuuaagagaaaacacuuccggccgaugcccgaugccugucgcgcggcuuauaauuggaagauggccggagacccuagauacgaagagucccuccauaaccccuauccugauuaccacuggcugcggaccguuaagacgaccaaagagucucuggugaucauuagccccuccgucgccgaccucgauccguacgacaagagccugcauucucgcguguuuccuggcggcaaaugcuccgggaucacagugagcucuaccuguugcuccacaaaucacgauuauaccauuuggaugcccgaaaacccuagacuuggaacgagcugugacaucuucacaaauucucggggcaagcgcgcuuccaaagggggaaagaccugcggcugugucgaugagagagggcuguacaagagccucaaacgggccugcaagcugaaacuuuguggaguucugggccuccgccugauggacggcacauggguggcuauucaaaccuccgaugaaaucaaguggugcucucccgaccagcuggugaaccuccacgacuuucauagcgaugagauugagcaccuggucguggaggaacuuguuaaaaagagagaagagugccuggacgcccucgaaaccaucaugacaacgaaauccgugagcuuccggcgccugucucaucuuagaaagcugguccccggguuuggaaaggcguauaccaucuucaauaaaacacucauggaggccgaugcucacuacaaguccauucggaccuggaacgagaucauuccuagcaaaggcugucugcgcguugggggaagaugccacccgcaugugaauggcguguucuuuaacgggaucauucugggacccgacggccacguccucaucccugaaaugcagucuagccugcuucaucagcacauggagcugcucgaauccucugugaucccccugaugcauccucuugccgaucccagcacagucuucaaggacggcgaugaggcugaagacuuuguggagguucaccucccggaugugcacaaacaaauuuccggggucgaccucggacugccuaauuggggcaaguaugugcugaucagcgccggggcgcucaccgcccugaugcuuacgauuuuccugaugacauguugccggaagaccaacagagcugagucuauccagcauucccccggagaaaccggccgcaaaguuagcgugacaucucacaacgggcgggucauuuccagcugggaguccuacaagucuggcagcgaaaccaaacucuga

SEQ ID NO: 222954 - RNA, 1575 nt, Artificial Sequence
  derived and/or modified CDS sequence (opt5) from glycoprotein__RABV__EU086136.1
augaucccccaggugcuccuguucgucccucugcuuguuuuuagcuccugcuucggcaaguuuccgauuuacaccauccccgacaaacuggggccuuggucucccauugauauccaccaucucagcuguccuaacaaucuggugguggaggacgaaggaugcacaaaccuuuccggcuucucuuauauggagcugaaggucggguacauuagcgccaucaaagugaauggauuuacguguaccggcguugugacagaagcugagaccuauacaaacuucgucggguacgugaccacaaccuuuaagagaaaacacuuccggcccaugccugaugccugccgcgcggcuuauaauuggaagauggccggagacccgagauacgaagagucccuccauaaccccuauccugauuaccacuggcugcggacgguuaagaccacaaaagagucucuggugaucauuagccccuccgucgccgaccucgauccuuacgacaagagccugcauucucgcguguuucccggcggcaaauguuccgggaucaccgugagcucuacaugcuguuccaccaaucacgauuauacgauuuggaugccggaaaacccuagacuuggaacaagcugcgacaucuucaccaauucucggggcaagcgcgcuuccaaagggggaaagacauguggcuuugucgaugagagaggguucguuaagagccugaaaggagccugcaagcucaaacuguguggcgugcuuggccugcggcucauggacgggaccuggguggcuauucaaaccuccgaugaaaucaaguggugcucucccgaccagcuggucaaccugcacgacuuucauagcgaugagauugagcaccucgugguugaggaacuggugaaaaagcgcgaagagugccuugacgcccuggaaacauucaugacgaccaaauccgucagcuucagacggcucucucugcuucgcaagcuggugccuggauuuggcaaggcguucacaaucuuuaauaaaacccucauggaggccgaugcucauuucaaguccauccugacauggaacgagauuuuucccuacaaaugguguuucagacugggggaaauccuccacccccacguuaaucggguguuuuucaacggaauuauccugggcccugacgggcauguccuuauuccggagaugcagagcucucugcuccaccagcauauggaacugcuugagagcuccgugaucccccugaugcacccucucgccgaucccucuaccgucuuuaaggacggagaugaagcugaggacuucguggauguucaucugccugacgugcacaaacaaaucagcggcgucgaucugggccuccccaauugggggaaguaugugcugauuuccgccggagcgcuuacggcccugaugcucaugaucuuucugaugacaugcugucgcaaggcuaacagagccgagagcauucagcacaacccgggcgaaaccgggcggaaaguuucugugaccucccauaauggaagagucaucagcucuugggaguccuacaagagcggcggggaaacaaaacuguga

SEQ ID NO: 222955 - RNA, 1575 nt, Artificial Sequence
  derived and/or modified CDS sequence (opt5) from glycoprotein__RABV__EU086137.1
augaucccccaggugcuccuguucgucccucugcuuguuuuuagcuccugcuucggcaaguuuccgauuuacaccauccccgacaaacuggggccuuggucucccauugauauccaccaucucagcuguccuaacaaucuggugguggaggacgaaggaugcacaaaccuuuccggcuucucuuauauggagcugaaggucggguacauuagcgccaucaaagugaauggauuuacguguaccggcguugugacagaagcugagaccuauacaaacuucgucggguacgugaccacaaccuuuaagagaaaacacuuccggcccaugccugaugccugccgcgcggcuuauaauuggaagauggccggagacccgagauacgaagagucccuccauaaccccuauccugauuaccacuggcugcggacgguuaagaccacaaaagagucucuggugaucauuagccccuccgucgccgaccucgauccuuacgacaagagccugcauucucgcguguuucccggcggcaaauguuccgggaucaccgugagcucuacaugcuguuccaccaaucacgauuauacgauuuggaugccggaaaacccuagacuuggaacaagcugcgacaucuucaccaauucucggggcaagcgcgcuuccaaagggggaaagacauguggcuuugucgaugagagagggcuguacaagagccucaaaggagccugcaagcugaaacuuuguggcguucugggccuccggcugauggacgggaccuggguggcuauucaaaccuccgaugaaaucaaguggugcucucccgaccagcuggugaaccuccacgacuuccauagcgaugagauugagcaccuguuugucgaggaacuugugaaaaagcgcgaagagugccuggacgcccucgaaacaaucaugacgaccaaauccguuagcuucaagagacugucucaucuuacaaaucuggugccuggauucggcaaggcguauaccaucuuuaacaaaacacucauggaggccgaugcucacuacaaguccauucccaccuggaaugagaucauucccagcaaagggugucugaaguucggaggccggugccacccuccggucaacgggguguuuuucaauggaaucauucugggccccgacggccauguucucaucccugaaaugcagucuagccugcuucaccagcauauggagcugcucgaauccucugugaucccccugaugcacccucuugccgaucccagcacggucuuuaaagacggggaugaggcugaagacuucguggauguccaucugccggacgugcacaagcaaauuuccggaguugaucucggccugccuaacugggggaaguaugugcugaucagcgccggagcgcucacagcccugaugcuuaugauuuuucugaugaccuguugccgcaaagcuaacagagccgagucuauccagcacaaucccggcgagaccgggcggaaggucuccgugacaagccauaacggccgcguuauuucuuccugggaaagcuacaaauccggaggcgagaccaagcucuga

SEQ ID NO: 222956 - RNA, 1575 nt, Artificial Sequence
  derived and/or modified CDS sequence (opt5) from glycoprotein__RABV__EU086138.1
augaucccccaggugcuccuguucgucccucugcuuguuuuuagcuccugcuucggcaaguuuccgauuuacaccauccccgacaaacuggggccuuggucucccauugauauccaccaucucagcuguccuaacaaucuggugguggaggacgaaggaugcacaaaccuuuccggcuucucuuauauggagcugaaggucggguacauuagcgccaucaaagugaauggauuuacguguaccggcguugugacagaagcugagaccuauacaaacuucgucggguacgugaccacaaccuuuaagagaaaacacuuccggcccaugccugaugccugccgcgcggcuuauaauuggaagauggccggagacccgagauacgaagagucccuccauaaccccuauccugauuaccacuggcugcggacgguuaagaccacaaaagagucucuggugaucauuagccccuccgucgccgaccucgauccuuacgacaagagccugcauucucgcguguuucccggcggcaaauguuccgggaucaccgugagcucuacauggugcuccaccaaucacgauuauacgauuuggaugccggaaaacccuagacuuggaacaagcugugacaucuucaccaauucucggggcaagcgcgcuuccaaagggggaaagacaugcggcuuugucgaugagagagggcuguacaagagccucaaaggagccuguaagcugaaacuuugcggcguucugggccuccggcugauggacgggaccuggguggcuauucaaaccuccgaugaaaucaagugguguucucccgaccagcuggugaaccuccacgacuuccauagcgaugagauugagcaccuggucguggaggaacuuguuaaaaagcgcgaagagugccuggacgcccucgaaacaaucaugacgaccaaauccgugagcuuuagacggcugucucaucuucgcaagcuggucccuggauucggcaaggcguauacaaucuucaauaaaacccucauggaggccgaugcucacuacaaguccauuagaacauggaacgagaucauucccagcaaagggugccugcgggugggaggccgcugucacccccugguuaauggggugucuuuuaacggaaucauucucggcccugacggccauguccugaucccggaaaugcagagcucccuucugcaccagcauauggagcuccuggaaucuagcgugaucccccuuaugcacccucuggccgaucccuccaccgucuucaaggacggggaugaggcugaagacuuuguggagguucaucucccugaugugcacaaacaaauuagcggagucgaccugggccugcccaauugggggaaguaugugcucaucucugccggagcgcugacggcccuuaugcugacaauuuuccucaugaugugcuguagaaagaccaaccgggcugaguccauccagcacagcccgggcgaaauugggagaaaaguuucugugaccucccauaacggccgcgucaucagcuccugggagucuuacaagagcggauccgaaacaaaacuguga

SEQ ID NO: 222957 - RNA, 1575 nt, Artificial Sequence
  derived and/or modified CDS sequence (opt5) from glycoprotein__RABV__EU086139.1
augaucccccaggugcuucucuucgucccucugcuuguuuuuagcuccugcuucggcaaguuuccgauuuacaccauccccgacaaacuggggccuuggucucccauugauauccaccaucucagcuguccuaacaaucuggugguggaggacgaaggaugcacaaaccuuuccggcuucucuuauauggagcugaaggucggguacauuagcgccaucaaagugaauggauuuacguguaccggcguugugacagaagcugagaccuauacaaacuucgucggguacgugaccacaaccuuuaagagaaaacacuuccggcccaugccugaugccugccgcgcggcuuauaauuggaagauggccggagacccgagauacgaagagucccuccauaaccccuauccugauuaccacuggcugcggacgguuaagaccacaaaagagucucuggugaucauuagccccuccgucgccgaccucgauccuuacgacaauagccugcauucucgcguguuucccggcggcaaguguuccgggaucaccgugagcucuacaugcuguuccaccaaccacgauuauacgauuuggaugccggaaaauccuagacuuggaacaagcugcgacaucuucaccaacucucggggcaaacgcgcuuccaaagggggaaagacauguggcuuugucgaugagagagggcuguacaagagccucaagggagccugcaaacugaagcuguguggcguucugggccuccggcugauggacgggaccuggguggcuauucaaaccuccgaugaaaucaaauggugcucucccgaccagcuggugaaucuccacgacuuccauagcgaugagauugagcaccuggucguggaggaacuuguuaagaaacgcgaagagugccuggacgcccucgaaacaaucaugacgaccaaguccgugagcuuuagacggcugucucaucuucgcaaacuggucccuggauucggcaaggcguauacaaucuucaacaagacccucauggaggccgaugcucacuacaaauccauuagaacauggaaugagaucauucccagcaaggggugucugcgggugggaggccgcugccacccccauguuaacgggguguuuuucaauggaaucauucugggcccugacggccacguccucaucccggaaaugcagucuagccugcuucaucagcacauggagcugcucgaauccucugugaucccccugaugcauccucuugccgaucccagcaccgucuuuaaagacggggaugaggcugaagacuucguggagguucaucugccugaugugcacaagcaaauuuccggagucgaccucggccugcccaacugggggaaauaugugcugaucagcgccggagcgcucacggcccugaugcuuacaauuuuucugaugaccuguugcagaaagaccaaccgggcugagucuauccagcacuccccgggcgaaauugggagaaagguuagcgugacaucucacaauggccgcgucaucuccagcugggaguccuacaaaucuggaagcgaaaccaagcucuga

SEQ ID NO: 222958 - RNA, 1575 nt, Artificial Sequence
  derived and/or modified CDS sequence (opt5) from glycoprotein__RABV__EU086140.1
augaucccccaggugcuccuguucgucccucugcuuguuuuuagcuccugcuucggcaaguuuccgauuuacaccauccccgacaaacuggggccuuggucucccauugauauccaccaucucagcuguccuaacaaucuggugguggaggacgaaggaugcacaaaccuuuccggcuucucuuauauggagcugaaggucggguacauuagcgccaucaaagugaauggauuuacguguaccggcguugugacagaagcugagaccuauacaaacuucgucggguacgugaccacaaccuuuaagagaaaacacuuccggcccaugccugaugccugccgcgcggcuuauaauuggaagauggccggagacccgagauacgaagagucccuccauaaccccuauccugauuaccacuggcugcggacgguuaagaccucuaaagagagccuggugaucauuucccccagcgucgccgaccucgauccuuacgacaagucucugcauucccgcguguuucccggcggcaaauguagcgggaucacagugucuuccacaugcuguagcaccaaucacgauuauaccauuuggaugccggaaaacccuagacuuggaacgucuugcgacaucuucacaaauucccggggcaagcgcgcuagcaaagggggaaagaccuguggcuuugucgaugagagagggcuguacaagucccucaaaggagccugcaagcugaaacuuuguggcguucugggccuccggcugauggacgggacauggguggcuauucaaaccucugaugaaaucaaguggugcagccccgaccagcuggugaaccuccacgacuuccauuccgaugagauugagcaccuggucguggaggaacuuguuaaaaagcgcgaagagugccuggacgcccucgaaaccaucaugacaacgaccagcgugucuuuuagacggcugucccaucuucgcaaacuggucccuggauucggcagagcguucagcaucuuuaauaagacacucguggaggccgaugcucuguuccagucuuuucggaccuggaacgagauuauccccagcaaggggugucugcgcguuggaggcagaugccacccccacgugaauggggucuucuuuaacggaauuauccucggcccugacggccaugugcugauuccggaaaugcaguccucucuucugcaccaacauauggagcuccuggaaagcuccgucaucccccuuaugcacccucuggccgaucccagcacaguguucaaagacggggaugaggcugaagacuuuguugaggugcaucucccugauguccacaagcagaucucuggaguggaccugggccugcccaauugggggaaauauguucucauuuccgccggagcgcugaccgcccuuaugcugaugaucuuccucaugacguguugccggaagacaaacagagcugagagcauucagcacucuccgggcgaaaccgggcgcaaaguguccgucaccagccauaacggccgggugaucuccucuugggagagcuacaaguccggaggcgaaacaaagcuguga

SEQ ID NO: 222959 - RNA, 1575 nt, Artificial Sequence
  derived and/or modified CDS sequence (opt5) from glycoprotein__RABV__EU086141.1
augaucccccaggugcugcuguucgucccucugcuuguuuuuagcuccugccugggcaaguucccgauuuacaccauccccgacaaacucgggccuuggucucccauugauauccaccaucugagcuguccuaacaaucuugugguggaggacgaaggaugcacaaaccuguccggcuuuucuuauauggagcucaaggucggguacauuagcgccaucaaagugaauggauucacguguaccggcguugugacagaagcugagaccuauacaaacuuugucggguacgugaccacaaccuucaagagaaaacacuuucggcccaugcuggaugccugccgcgcggcuuauaauuggaagauggccggagacccuagauacgaagagucccugcauaacccguaucccgauuaccacuggcuccggacgguuaagaccucuaaagagagccuggugaucauuuccccuagcgucgccgaccuugaucccuacgacaagucucugcauucccgcguguucccuggcggcaaauguagcgggaucacagugucuuccacaugcuguagcaccaaucacgauuauaccauuuggaugcccgaaaacccgagacucggaacgucuugcgacaucuuuacaaauucccggggcaagcgcgcuagcaaagggggaaagaccuguggcuucgucgaugagagagggcuguacaagucccuuaaaggagccugcaagcugaaacucuguggcguucugggccugcggcucauggacgggacauggguggcuauucaaaccucugaugaaaucaaguggugcagcccugaccagcuggugaaccuucacgacuuucauuccgaugagauugagcaccuggucguggaggaacucguuaaaaagcgcgaagagugccuggacgcccuugaaaccaucaugacaacgaaaagcgugucuuucagacggcugucccaucuccgcaagcugguccccggauuuggcaaggcguauaccaucuucaauaaaacacugauggaggccgaugcucacuacaagagcauuagaaccuggaacgagaucauuccuucuaaagggugucuccgggugggaggccgcugccacccccauguuaaugaaguguucuuuaacgggaucauucugggacccgacggccacguccuuaucccugagaugcagagcucccugcuccaucagcacauggaacugcuugagucuagcgugaucccgcugaugcauccccucacagauccuuccaccgucuucaaggacggcgaugaagccgaggacuuuguggagguucaccuccccgaugugcacaaacaaauuagcgggggagaccugggccucccuaauugggggaaguauguccugaucucugcuggagcccuuacggcguccaugcugaugauuuuccucaugacauguugcagaaagaccaaccgggccgaaagcauccagcauucucccggcgagaccggggaagagguguccggcacaagccagaccggaagaguuauuuccucuugggaaagcuacaaauccggcggggagacaaagcuguga

SEQ ID NO: 222960 - RNA, 1575 nt, Artificial Sequence
  derived and/or modified CDS sequence (opt5) from glycoprotein__RABV__EU086142.1
augaucccccaggugcuucucuucgucccucugcuuguuuuuagcuccugccugggcaaguucccgauuuacaccauccccgacaaacucgggccuuggucucccauugauauccaccaucugagcuguccuaacaaucuugugguggaggacgaaggaugcacaaaccuguccggcuuuucuuauauggagcucaaggucggguacauuagcgccaucaaagugaauggauucacguguaccggcguugugacagaagcugagaccuauacaaacuuugucggguacgugaccacaaccuucaagagaaaacacuuucggcccaugcuggaugccugccgcgcggcuuauaauuggaagauggccggagacccuagauacgaagagucccugcauaacccguaucccgauuaccacugguuccggacgguuaagaccucuaaagagagccucgugaucauuuccccuagcgucgccgaccuggaucccuacgacaagucucuucauucccgcguguuuccuggcggcaaauguagcgggaucacagugucuuccacaugcuguagcaccaaucacgauuauaccauuuggaugcccgaaaacccgagacugggaacgucuugcgacaucuucacaaauucccggggcaagcgcgcuagcaaagggggaaagaccuguggcuuugucgaugagagagggcucuacaagucccugaaaggagccugcaagcugaaacuguguggcguucucggccugcggcugauggacgggacauggguggcuauucaaaccucugaugaaaucaaguggugcagcccugaccagcucgugaaccugcacgacuuccauuccgaugagauugagcaccuugucguggaggaacugguuaaaaagcgcgaagagugccucgacgcccuggaaaccaucaugacaacgaaaagcgugucuuuuagacggcuuucccaucugcgcaagcucguccccggauucggcaaggcguauaccaucuucaauaaaacacugauggaggccgaugcucacuacaagagcauuagaaccuggaacgagaucauuccuucuaaagggugucugcgggugggaggccgcugccacccccauguuaaugggguguuuuucaacggaaucauucucggccccgacggccacguccugaucccugaaaugcagagcugucuucugcaucagcacauggagcuccuggaauccucuuuuaucccgcuuaugcugccccucgccgauccuagcacaguguucaaggacggggaugaggcugaagacuuugucgaggugcaucugcccgauguucacaaacaaauuuccggaggcgaccuggggcucccuaauuggggaaaguaugugcugaucagcgccggcgcgcuuaccgccucuaugcugaugauuuuccucaugacgugcuguagaaagacaaaccgggcugaguccauccagcacagccccggggaaaccggcagaaaagucucugugaccucccauaacggacgcguuauuagcuccugggagucuuacaagagcggcggggaaacaaaacuguga

SEQ ID NO: 222961 - RNA, 1575 nt, Artificial Sequence
  derived and/or modified CDS sequence (opt5) from glycoprotein__RABV__EU086143.1
augaucccccaggugcugcuguucgucccucugcuuguuuuuagcuccugcuucggcaaguuuccgauuuacaccauccccgacaaacuggggccuuggucucccauugauauccaccaucucagcuguccuaacaaucuggugguggaggacgaaggaugcacaaaccuuuccggcuucucuuauauggagcugaaggucggguacauuagcgccaucaaagugaauggauuuacguguaccggcguugugacagaagcugagaccuauacaaacuucgucggguacgugaccacaaccuuuaagagaaaacacuuccggcccaugccugaugccugccgcgcggcuuauaauuggaagauggccggagacccgagauacgaagagucccuccauaaccccuauccugauuaccacuggcugcggacgguuaagaccucuaaagagagccuggugaucauuucccccagcgucgccgaccucgauccuuacgacaagucucugcauucccgcguguuucccggcggcaaauguagcgggaucacagugucuuccacaugcuguagcaccaaucacgauuauaccauuuggaugccggaaaacccuagacuuggaacgucuugcgacaucuucacaaauucccggggcaagcgcgcuagcaaagggggaaagaccuguggcuuugucgaugagagagggcuguacaagucccucaaaggagccugcaagcugaaacuuuguggcguucugggccuccggcugauggacgggacauggguggcuauucaaaccucugaugaaaucaaguggugcagccccgaccagcuggugaaccuccacgacuuccauuccgaugagauugagcaccuggucguggaggaacuuguuaaaaagcgcgaagagugccuggacgcccucgaaaccaucaugacaacgaaaagcgugucuuuuagacggcugucccaucuucgcaagcuggucccuggauucggcaaggcguauaccaucuucaauaaaacacucauggaggccgaugcucacuacaagagcauuagaaccuggaacgagaucauucccucuaaagggugucugcgggugggaggccgcugccacccccauguuaaugggguguuuuucaacggaaucauucugggcccugacggccacguccucaucccggaaaugcagagcucccugcuucaucagcacauggagcugcucgaaucuagcgugaucccccugaugcauccucuugccgaucccuccacagucuuuaaggacggggaugaggcugaagacuucguggagguucaccucccugaugugcacaaacaaauuagcggagucgaccucggccugcccaauugggggaaguaugugcugaucucugccggagcgcucaccgcccugaugcuuaugauuuuucugaugacguguugcagacggcucaacagagcugaguccauccagcauagcccgggcgaaacagggcgcaagguuucugugaccucccacagcggccgggucauuuccucuugggagagcuacaaauccggaggcgaaaccaagcuguga

SEQ ID NO: 222962 - RNA, 1575 nt, Artificial Sequence; identical to SEQ ID NO: 222599
  derived and/or modified CDS sequence (opt5) from glycoprotein__RABV__EU086144.1

SEQ ID NO: 222963 - RNA, 1575 nt, Artificial Sequence
  derived and/or modified CDS sequence (opt5) from glycoprotein__RABV__EU086145.1
augaucccccaggcccuucucuucgugccucugcuugucuuuagccugugcuucggcaaguuuccgauuuacaccauccccgacaaacucgggccuuggucccccauugauauccaccaucugucuuguccuaacaaucuuguuguggaggacgaaggaugcacaaaccugagcggcuucuccuauauggagcucaaggugggguacauuucugcuaucaaagucaauggauuuacguguaccggcgugguuacagaagccgagaccuauacaaacuucgugggguacgucaccacaaccuuuaagagaaaacacuuccggcccacgccugaugcgugccgcgcugccuauaauuggaagauggccggagacccgagauacgaagagagccugcauaaccccuauccugauuaccacuggcugcggaccgugaagacaaccaaagagucccucguuaucauuucucccagcguggcugaccuggauccuuacgacaagucccuucauagccgcgucuuucccucuggcaaauguuccggcaucacagugagcucuaccuauugcuccacgaaucacgauuacacaauuuggaugccggaaaacccuagacuggggaccagcugugacaucuucgucaauucucggggaaagcgcgccuccaaaggcagcaagacaugcggguuuguggaugagagaggacucuauaagucccugaaaggcgcuuguaagcugaaacugugcgggguucucggacugcggcugauggacggcaccuggguggccauucaaaccucugaugaaacaaaguggugucccccugaccagcucgugaaccugcacgacuuccgcagcgaugagaucgagcaucuugucguggaggaacugguuaaaaagagagaagagugccucgacgcgcuggaauccauuaugacgaccaaaagcgugucuuuucggcgccuuucccaccugagaaagcucguccccggcuucgggaaggccuacacaaucuucaauaaaacccugauggaggcugaugcccauuauaagagcgugcggacauggaacgagaucauucccucuaaaggaugccugcgcguuggcgggagaugucacccucacgugaauggagucuuuuucaacggcaucauucucgggccggacggacaugugcugauccccgaaaugcagagcucccuucugcagcaacacauggagcuccuggaaucuagcgucauuccucuuaugcauccccuggcugauccuuccaccaucuuuaaggacggcuacgaggccgaagauuucguggagguucaccuccccgacgugcauaaacaggucagcggcguggaucuggggcugccgaauuggggaaaguauguucucaugucugcgggcgcccugacggcucuuaugcugaugaucuuucucaugacaugcugucggaagaccgacagaaccggguccacacaccacagcccuggagagaccggccgcaaagugucugucacaucccagaacgggcgggugauugccagcugggaauccuacaagucuggcggagagacgaaacuguga

SEQ ID NO: 222964 - RNA, 1575 nt, Artificial Sequence; identical to SEQ ID NO: 222915
  derived and/or modified CDS sequence (opt5) from glycoprotein__RABV__EU086146.1

SEQ ID NO: 222965 - RNA, 1575 nt, Artificial Sequence; identical to SEQ ID NO: 222917
  derived and/or modified CDS sequence (opt5) from glycoprotein__RABV__EU086147.1

SEQ ID NO: 222966 - RNA, 1575 nt, Artificial Sequence
  derived and/or modified CDS sequence (opt5) from glycoprotein__RABV__EU086148.1
augaucccccaggugcugcuguucgucccucugcuuguuuuuagcuccugcuucggcaaguuuccgauuuacaccauccccgacaaacuggggccuuggucucccauugauauccaccaucucagcuguccuaacaaucuggugguggaggacgaaggaugcacaaaccuuuccggcuucucuuauauggagcugaaggucggguacauuagcgccaucaaagugaauggauuuacguguaccggcguugugacagaagcugagaccuauacaaacuucgucggguacgugaccacaaccuuuaagagaaaacacuuccggcccaugccugaugccugccgcgcggcuuauaauuggaagauggccggagacccgagauacgaagagucccuccauaaccccuauccugauuaccacuggcugcggacgguuaagaccacaaaagagucucuggugaucauuagccccuccgucgccgaccucgauccuuacgacaagagccugcauucucgcguguuucccggcggcaaauguuccgggaucaccgugagcucuacaugcuguuccaccaaucacgauuauacgauuuggaugccggaaaacccuagacuuggaacaagcugcgacaucuucaccaauucucggggcaagcgcgcuuccaaagggggaaagacauguggcuuugucgaugagagagggcuguacaagagccucaaaggagccugcaagcugaaacuuuguggcguucugggccuccggcugauggacgggaccuggguggcuauucaaaccuccgaugaaaucaaguggugcucucccgaccagcuggugaaccuccacgacuuccauagcgaugagauugagcaccuggucguggaggaacuuguuaaaaagcgcgaagagugccuggacgcccucgaaacaaucaugacgaccaaauccgugagcuuuagacggcugucucaucuucgcaagcuggucccuggauucggcaaggcguauacaaucuucaauaaaacccucauggaggccgaugcucacuacaaguccauuagaacauggaacgagaucauucccagcaaagggugucugcgggugggaggccgcugccacccccauguuaaugggguguuuuucaacggaaucauucugggcccugacggccacguccucaucccggaaaugcagucuugucugcuucaucagcacauggagcugcucgaaagcuccgugaucccccugaugcauccucuugccgaucccucuaccgucuuuaaggacggggaugaggcugaagacuucguggagguucaccucccugaugugcacaaacaaauuagcggagucgaccucggccugcccaauugggggaaguaugugcugaucuccgccggagcgcucacggcccugaugagcaugauuuuucuuaugacaugcuguagaaagaccaaccgggcugagucuauccagcauuccccgggcgaaaccgggagaaaaguuagcgugacaucucacaacggccgcgucauuuccagcugggaguccuacaagucuggaggcgaaaccaaacuguga

SEQ ID NO: 222967 - RNA, 1575 nt, Artificial Sequence
  derived and/or modified CDS sequence (opt5) from glycoprotein__RABV__EU086149.1
augaucccccaggugcugcuguucgucccucugcuuguuagcuccucuugcuuuggcaaguucccgauuuacaccauccccgacaaacuggggccuuggagccccauugauauccaccaucucuccuguccuaacaaucuggugguggaggacgaaggaugcacaaaccuuucuggcuuuagcuauauggagcugaaggucggguacauuuccgccaucaaagugaauggauucacguguaccggcguugugacagaagcugagaccuauacaaacuuugucggguacgugaccacaaccuucaagagaaaacacuuucggcccaugccugaugccugccgcgcggcuuauaauuggaagauggccggagacccgagauacgaagagucucuccauaaccccuauccugauuaccacuggcugcggacgguuaagaccacaaaagagagccuggugaucauuucccccagcgucgccgaccucgauccuuacgacaagucucugcauucccgcguguuccccggcggcaaauguagcgggaucaccgugucuuccacaugcuguagcaccaaucacgauuauacgauuuggaugccggaaaacccuagacuuggaacaucuugcgacaucuuuaccaauucccggggcaagcgcgcuagcaaagggggaaagacauguggcuucgucgaugagagagggcuguacaagucccucaaaggagccugcaagcugaaacuuuguggcguucugggccuccggcugauggacgggaccuggguggcuauucaaaccucugaugaaaucaaguggugcagccccgaccagcuggugaaccuccacgacuuucauuccgaugagauugagcaccuggucguggaggaacuuguuaaaaagcgcgaagagugccuggacgcccucgaaacaaucaugacgaccaaaagcgugucuuucagacggcugucccaucuucgcaagcuggucccuggauuuggcaaggcguauacaaucuucaauaaaacccucauggaggccgaugcucacuacaagagcauuagaacauggaacgagaucauucccucuaaagggugucugcgggugggaggccgcugccacccccauguuaaugggguguucuuuaacggaaucauucugggcccugacggccacguccucaucccggaaaugcagagcucccugcuucaucagcacauggagcugcucgaaucuagcgugaucccccugaugcauccucuugccgaucccuccaccgucuucaaggacggggaugaggcugaagacuuuguggagguucaccucccugaugugcacaaacaaauuagcggagucgaccucggccugcccaauugggggaaguaugugcugaucucugccggagcgcucacggcccugauguccaugauuuuccuuaugacauguugcagaaagaccaaccgggcugagagcauccagcauucuccgggcgaaaccgggagaaaaguuuccgugacaagccacaacggccgcgucauuuccucuugggagagcuacaaguccggaggcgaaaccaaacuguga

SEQ ID NO: 222968 - RNA, 1575 nt, Artificial Sequence
  derived and/or modified CDS sequence (opt5) from glycoprotein__RABV__EU086150.1
augauccuccaggugcugcuguucgucccccuucaaguuuuuagcuccugcuucggcgaguuuccuauuuacaccaucccggacaagcuggggcccuggucuccuauugauauccaccaucucagcugucccaacaaucugguggugaaagacgaaggaugcacaaaccuuuccggcuucucuuauauggagcugaaggucggguacauuagcgccaucaaagugaauggauuuacguguaccggcguugugacagaagcugagaccuauacaaacuucgucggguacgugaccacaaccuuuaagagaaaacacuuccggccuaugcccgaugccugccgcgcggcuuauaauuggaagauggccggagacccuagauacgaagagucccuccauaacccguaucccgauuaccacuggcugcggacgguuaagaccacaaaagagucucuggugaucauuagcccuuccgucgccgaccucgaucccuacgacaagagccugcauucucgcguguuuccuggcggcaaauguuccgggaucaccgugagcucuacaugcuguuccaccaaucacgauuauacgauuuggaugcccgaaaacccgagacuuggaacaagcugcgacaucuucaccaauucucggggcaagcgcgcuuccaaagggggaaagacauguggcuuugucgaugagagagggcuguacaagagccucaaaggagccugcaagcugaaacuuuguggcguucugggccuccggcugauggacgggaccuggguggcuauucagaccuccgaugaaaucaaguggugcccucccgaccagcuggugaaccuccacgacuuccauucugaugagauugagcaccuggucguggaggaacuuguuaaaaagcgcgaagagugccuggacgcccucgaaacaaucaugacgaccaaaagcguguccuuuagacggcugagccaucuucgcaagcuggucccuggauucggcaaggcguauacaaucuucaauaaaacccucauggaggccgaugcucacuacaagucuauuagaacauggaacgagaucauucccuccaaagggugucugcgggugggaggccgcugccacccccauguuaaugggguguuuuucaacggaaucauucugggcccugacggccacguccucaucccggaaaugcagagcucucugcuucaucaacacauggagcugcucgaaagcuccgugaucccccugaugcauccucuugccgaucccucuaccgucuuuaaggacggggaugaggcugaagacuucguggagguucaucugccugaugugcacaaacagauuagcggagucgaccucggccugcccaauugggggaaguaugugcugguuuccgccggagcgcucacggcccugaugcuuaugaucuuucugaugacauguugcagaaagaccaaccgggcugagagcauucagcacucuccgggcgaaaccgggagaaaaguguccgucacaagccacaacggccgcgugaucucuuccugggagagcuacaaguccggaggcgaaaccaaacucuga

SEQ ID NO: 222969 - RNA, 1575 nt, Artificial Sequence
  derived and/or modified CDS sequence (opt5) from glycoprotein__RABV__EU086151.1
augaucccccaggcccugcucuuugugccucugcuugucuuuagccugugcuucggcaaguuuccgauuuacaccauccccgacaaacucgggccuuggucccccauugauauccaccaucugucuuguccuaacaaucuuguuguggaggacgaaggaugcacaaaccugagcggcuucuccuauauggagcucaaggugggguacauuucugcuaucaaagucaauggauuuacguguaccggcgugguuacagaagccgagaccuauacaaacuucgugggguacgucaccacaaccuuuaagagaaaacacuuccggcccacgccugaugcgugccgcgcugccuauaauuggaagauggccggagacccgagauacgaagagagccugcauaaccccuauccugauuaccacuggcugcggaccgugaagacaaccaaagagucccucguuaucauuucucccagcguggcugaccuggauccuuacgacaagucccuucauagccgcgucuuucccaauggcaaauguucuggcaucacaguguccagcaccuauugcucuacgaaccacgauuacacaauuuggaugccggaaaauccuagacuggggaccuccugugacaucuucacaaacagccggggaaagcgcgccucuaaaggcuccaagaccugcggguuuguggaugagagaggacucuauaagagccugaaaggcgcuuguaagcugaaacugugcgggguccucggacugcggcugauggacggcaccuggguugcccuccaaacauccgaugaaacgaagugguguucucccgaccagcuggugaaucuucacgacuuccauagcgaugagauugagcaccugguggucgaggaacucgugaaaaagcgcgaagagugccuggacgcgcuugaauccaucaugaccacaaaaagcguuucuuuuagacggcugucccaucuccgcaagcuggugccuggcuucgggaaggccuacaccauuuucaacaaaacacugauggaggcugaugcccacuauaagagcaucagaaccuggaaugagaucauucccucuaaaggaugccuccgggucggcgggaagugucacccccaugugaacggaguuuucuucaauggcaucauucuggggccugacggacacgugcuuaucccggaaaugcagagcucccugcuccaucagcacauggagcugcuugaaucuagcgucauuccccugaugcauccucucgcugaucccuccacgguguuuaaagacggcgaugaggccgaagacuucgucgaggugcaccuuccugauguucacaagcaaaucagcggcguggaccuggggcuccccaacuggggaaaguacguccugaugucugcgggcgcccuuacagugcugaugcucaccaucuuucugguuaccugcugucgcaaaacaaacagagcugaguccauucagcauagcucuggggaaaccggacggaagguguccgucacaagccagaauggcagagugaucuccucuugggagagcuauaaauccgggggcgaaacgaagcuguga

SEQ ID NO: 222970 - RNA, 1575 nt, Artificial Sequence
  derived and/or modified CDS sequence (opt5) from glycoprotein__RABV__EU086152.1
augaucccccaggcccugcucuuugugccucugcuugucuuuagccugugcuucggcaaguuuccgauuuacaccauccccgacaaacucgggccuuggucccccauugauauccaccaucugucuuguccuaacaaucuuguuguggaggacgaaggaugcacaaaccugagcggcuucuccuauauggagcucaaggugggguacauuucugcuaucaaagucaauggauuuacguguaccggcgugguuacagaagccgagaccuauacaaacuucgugggguacgucaccacaaccuuuaagagaaaacacuuccggcccacgccugaugcgugccgcgcugccuauaauuggaagauggccggagacccgagauacgaagagagccugcauaaccccuauccugauuaccacuggcugcggaccgugaagacaaccaaagagucccucguuaucauuucucccagcguguccgaccuggauccuuacgacaagagccuucauucucgcgucuuucccuccggcaaauguagcggcaucacagugucuuccaccuauugcccgacgaaucacgauuacacaauuuggaugccugaaaaccccagacuggggaccagcugugacaucuucacaaauucucggggaaagcgcgcuuccaaaggcagcaagaccugcggguuuguggaugagagaggacucuauaagucccugaaaggcgccuguaagcugaaacugugcgggguccucggacugcggcugauggacggcaccugggcugccauucaaacaucugaugaagcgaagugguguccucccgaccagcucguuaacauccacgacuuccgcagcgaugagauugagcaucuggugguggaggaacuugucaaaaagagagaagagugccuggacgcccucgaauccaucaugacgaccaaaagcgugucuuuucggcgccugucccaccuuagaaagcugguucccggcuucgggaaggcuuacacaaucuucaauaaaacccucauggaggccgaugcucauuauaagagcgugcggacauggaacgagauuaucccuucuaaaggaugccugcgcgucggcgggagaugucacccgcacgugaauggaguuuucuucaacggcauuauccuggggcccgacggacaugugcucauuccugaaaugcagagcucccugcuucagcaacacauggagcugcucgaaucuagcgucaucccccugaugcauccucuugccgaucccuccaccguguuuaaggacggcgaugaggcggaagacuucgucgaggugcaccuuccggauguucauaaacaggugagcggcgucgaccucgggcugccuucuuggggaaaguacgugcugauguccguuggcgccaugaucgcucucaugcugaugauuuuucuuaugacgugcuguagaaagagcaauggggccgagucuauccagcaccggcugggagaaacaggccgcaaaguguccgucaccagccaguccgggcgggugauuucuagcugggaguccuauaagucuggcggagaaaccaaacucuga

SEQ ID NO: 222971 - RNA, 1575 nt, Artificial Sequence
  derived and/or modified CDS sequence (opt5) from glycoprotein__RABV__EU086153.1
auggugccccagguccugugguucguuccucuccugguguuuagcaugugcuucggcaaguuuccgaucuacaccauucccgacaaacuugggccuuggucccccaucgauauucaccaucugucuuguccuaacaaucucguggucgaggacgaaggaugcacaaaccugagcggcuucuccuauauggagcuuaaggugggguacaucucugccauuaaaguuaauggauuuacguguaccggcguggucacagaagcugagaccuauacaaacuucgugggguacguuaccacaaccuuuaagagaaaacacuuccggcccacgccugaugccugccgcgcggcuuauaauuggaagauggccggagacccgagauacgaagagagccugcauaaccccuauccugauuaccacuggcuccggaccgugaagacaaccaaagagucccuggucaucaucucucccagcguggccgaccuggauccuuacgacaagucccuccauagccgcguguuucccucuggcaaauguuccggcauuacaaucagcucuaccuauugcuccacgaaucacgauuacacaauuuggaugccggaaaacccuagacuggggaccagcugugacaucuucacaaauucucggggaaagcgcgcuuccaaaggcagcaagaccugcggguuugucgaugagagaggacuuuauaagucccugaaaggcgccuguaagcucaaacugugcgggguucuuggacugcggcucauggacggcaccuggguggcuaugcaaacaucugaugaaacgaaguggugucccccugaccagcuggugaaccugcacgacuuccgcagcgaugagauugagcaucucgucguggaggaacugguuaaaaagagagaagagugccuugacgcccuggaauccaucaugaccacaaaaagcgugucuuuucggcgccucucccaccugagaaaacuuguccccggcuucgggaaggcguacaccauuuucaauaagacacugauggaggccgaugcucauuauaagagcgugcggaccuggaacgagaucauccccucuaaaggaugccuccgcguuggcgggagaugucacccucacgugaauggagucuuuuucaacggcauuauccuggggccggacggacaugugcugauucccgaaaugcagagcucccuccugcagcaacacauggagcuucuggaaucuagcgucaucccucucaugcauccccuggccgauccuuccacgguguuuaaggacggcgaugaggcugaagacuucguugaggugcaccuucccgauguccauaaacagauuagcggcguggaccuggggcucccgaauuggggaaaguacguucuggugucugccggcguccugguggugcucaugcuggcgaucuuuaucaugacaugcugugggcggguuaacagaccuaaguccacccagcacagccuugagggaaccggccgcaaagucucugugacaucccagagcgggaaggugauuuccucuugggaaagcuauaaauccggcggagagacccggcuguga

SEQ ID NO: 222972 - RNA, 1575 nt, Artificial Sequence
  derived and/or modified CDS sequence (opt5) from glycoprotein__RABV__EU086154.1
auggugccccagguccugugguucguuccucuccugguguuuagcaugugcuucggcaaguuuccgaucuacaccauucccgacaaacuugggccuuggucccccaucgauauucaccaucugucuuguccuaacaaucucguggucgaggacgaaggaugcacaaaccugagcggcuucuccuauauggagcuuaaggugggguacaucucugccauuaaaguuaauggauuuacguguaccggcguggucacagaagcugagaccuauacaaacuucgugggguacguuaccacaaccuuuaagagaaaacacuuccggcccacgccugaugccugccgcgcggcuuauaauuggaagauggccggagacccgagauacgaagagagccugcauaaccccuauccugauuaccacuggcuccggaccgugaagacaaccaaagagucccuggucaucaucucucccagcguggccgaccuggauccuuacgacaagucccuccauagccgcguguuucccucuggcaaauguuccggcauuacaaucagcucuaccuauugcuccacgaaucacgauuacacaauuuggaugccggaaaacccuagacuggggaccagcugugacaucuucacaaauucucggggaaagcgcgcuuccaaaggcagcaagaccugcggguuugucgaugagagaggacuuuauaagucccugaaaggcgccuguaagcucaaacugugcgggguucuuggacugcggcucauggacggcaccuggguggcuaugcaaacaucugaugaaacgaaguggugucccccugaccagcuggugaaccugcacgacuuccgcagcgaugagauugagcaucucgucguggaggaacugguuaaaaagagagaagagugccuugacgcccuggaauccaucaugaccacaaaaagcgugucuuuucggcgccucucccaccugagaaaacuuguccccggcuucgggaaggcguacaccauuuucaauaagacacugauggaggccgaugcucauuauaagagcgugcggaccuggaacgagaucauccccucuaaaggaugccuccgcguuggcgggagaugucacccucacgugaauggagucuuuuucaacggcauuauccuggggccggacggacaugugcugauucccgaaaugcagagcucccuccugcagcaacacauggagcuucuggaaucuagcgucaucccucucaugcauccccuguccgauccuagcacgguguuuaaggacggcgaugaggccgaagacuucguugaggugcaccuucccgauguccauaaacagauuucuggcguggaccuggggcucccgaauuggggaaaguacguucugguguccgcuggcguccugguggugcucaugcuggccaucuuuaucaugacaugcugugggcggguuaacagaccuaagagcacccagcacucucuugagggaaccggccgcaaagucuccgugacaagccaguccgggaaggugauuucuagcugggaauccuauaaaucuggcggagagacccggcuguga

SEQ ID NO: 222973 - RNA, 1575 nt, Artificial Sequence; identical to SEQ ID NO: 222705
  derived and/or modified CDS sequence (opt5) from glycoprotein__RABV__EU086155.1

SEQ ID NO: 222974 - RNA, 1575 nt, Artificial Sequence
  derived and/or modified CDS sequence (opt5) from glycoprotein__RABV__EU086156.1
auggugccccagguccugcuguucguuccucugcuuguguuuagccugugcuucggcaaguuuccgaucuacaccauucccgacaaacucgggccuuggucccccaucgauauucaccaucugucuuguccuaacaaucuuguggucgaggacgaaggaugcacaaaccugagcggcuucuccuauauggagcucaaggugggguacaucucugccauuaaaguuaauggauuuacguguaccggcguggucacagaagcugagaccuauacaaacuucgugggguacguuaccacaaccuuuaagagaaaacacuuccggcccacgccugaugccugccgcgcggcuuauaauuggaagcuggccggagacccgagauacgaagagagccugcauaaccccuauccugauuaccacuggcuccggaccgugaagacaaccaaagagucccuggucaucaucucucccagcguggccgaccuugauccuuacgacaagucccugcauagccgcguguuuucuggcggcaaauguuccgggauuacagucagcucuaccuauugcuccacgaaucacgauuacacaaucuggaugcccgaaaacccgagacucggaaccagcugugacauuuucguuaauucucggggcaagcgcgcuuccaaagggggaaagacaugcggcuuuguggaugagagagggcuguauaagagccuuaaaggagccuguaagcugaaacucugcggcgugccuggccugcggcugauggacgggaccugggcugccauccaaaccuccgaugaaacaaaguggugucccccugaccagcucgucaaccugcacgacuuccgcucugaugagauugagcaucuugugguugaggaacuggugaaaaagagagaagagugccucgacgcgcuggaaagcaucaugacgaccaaauccgucagcuuucggcgccuuucucaccugagaaagcucgugcccggauucggcaaggccuacacaauuuucaauaaaacccugauggaggcugaugcccauuaugaguccguucggacauggaacgaaaucauccccagcaaggggugccugcgcgugggaggcagaugucacccucacgucaaugggguguuuuucaacggaauuauccucggcccggacggccauguccugauucccgagaugcagucuagccuucugcagcaacacauggaacuccuggaguccucugugaucccucuuaugcauccccuggcugauccuagcaccguucucaaagacggggaugaagccgaggacuuuguggagguccaccuccccgaugugcauaagcugauuuccggaguugaccucggccugccgagcugggggaaauacgugcuuaugucugcgggaguccugacggcccucaugcugaugaucuuccugaugacaugcugucggagaggcaaucaggcuggguccaagcagcacggccuugaaggaaccggccgcaaggugagcgugaccucucagaacgggaaaguuaucuccagcugggaguccuauaagucuggaggcgaaacacggcucuga

SEQ ID NO: 222975 - RNA, 1575 nt, Artificial Sequence
  derived and/or modified CDS sequence (opt5) from glycoprotein__RABV__EU086157.1
augaucccccaggcccugcucuuugugccucugcuugucuuuagccugugcuucggcaaguuuccgauuuacaccauccccgacaaacucgggccuuggucccccauugauauccaccaucugucuuguccuaacaaucuuguuguggaggacgaaggaugcacaaaccugagcggcuucuccuauauggagcucaaggugggguacauuucugcuaucaaagucaauggauuuacguguaccggcgugguuacagaagccgagaccuauacaaacuucgugggguacgucaccacaaccuuuaagagaaaacacuuccggcccacgccugaugcgugccgcgcugccuauaauuggaagauggccggagacccgagauacgaagagagccugcauaaccccuauccugauuaccacuggcugcggaccgugaagacaaccaaagagucccucguuaucauuucucccagcguguccgaccuggauccuuacgacaagagccuucauucucgcgucuuucccuccggcaaauguagcggcaucacagugucuuccaccuauugcccgacgaaucacgauuacacaauuuggaugccugaaaaccccagacuggggaccagcugugacaucuucacaaauucucggggaaagcgcgcuuccaaaggcagcaagaacugcggguuuguggaugagagaggacucuaucggucccugaagggcgccuguaaacuuaagcugugcgggguccucggacugcgccugauggacggcaccugggcugccauucaaaccucugaugaagcgaaaugguguccucccgaccagcucguuaauauccacgacuucagaagcgaugagauugagcaucuggugguggaggaacuugucaagaaacgggaagagugccuggacgcccucgaauccaucaugacaaccaagagcgugucuuuucgcagacugucccaccuucggaaacugguucccggcuucgggaaggcuuacacgaucuucaacaagacacucauggaggccgaugcucauuauaaaagcgugcgcaccuggaaugagauuaucccuucuaagggaugccugagagucggcgggcggugucacccgcacgugaacggaguuuucuucaauggcauuauccuggggcccgacggacaugugcucauuccugaaaugcagagcucccugcuucagcaacacauggagcugcucgaaucuagcgucaucccccugaugcauccucuugccgaucccuccacaguguuuaaagacggcgaugaggcggaagacuucgucgaggugcaucugccggauguucacaaacaggugagcggcgucgaccucgggcugccuucuuggggaaaguacgugcugauguccguuggcgcccucaucgcucugaugcuuaugauuuuucugaugaccugcuguagaaaggccaacgggguggagagcaugcagcaccgccucggagaaacgggccggaaggucucugugacaucccagagcgggagagugaucuccucuugggagagcuauaaauccggcggagaaaccaagcuguga

SEQ ID NO: 222976 - RNA, 1575 nt, Artificial Sequence
  derived and/or modified CDS sequence (opt5) from glycoprotein__RABV__EU086158.1
augaucccccaggcccugcucuuugugccucugcuugucuuuagccugugcuucggcaaguuuccgauuuacaccauccccgacaaacucgggccuuggucccccauugauauccaccaucugucuuguccuaacaaucuuguuguggaggacgaaggaugcacaaaccugagcggcuucuccuauauggagcucaaggugggguacauuucugcuaucaaagucaauggauuuacguguaccggcgugguuacagaagccgagaccuauacaaacuucgugggguacgucaccacaaccuuuaagagaaaacacuuccggcccacgccugaugcgugccgcgcugccuauaauuggaagauggccggagacccgagauacgaagagagccugcauaaccccuauccugauuaccacuggcugcggaccgugaagacaaccaaagagucccucguuaucauuucucccagcguguccgaccuggauccuuacgacaagagccuucauucucgcgucuuucccuccggcaaauguagcggcaucacagugucuuccaccuauugcccgacgaaucacgauuacacaauuuggaugccugaaaaccccagacuggggaccagcugugacaucuucacaaauucucggggaaagcgcgcuuccaaaggcagcaagaccugcggguuuguggaugagagaggacucuaucggucccugaagggcgccuguaaacuuaagcugugcgggguccucggacugcgccugauggacggcaccugggcugccauucaaacaucugaugaagcgaaaugguguccucccgaccagcucguuaacauccacgacuucagaagcgaugagauugagcaucuggugguggaggaacuugucaagaaacgggaagagugccuggacgcccucgaauccaucaugacgaccaagagcgugucuuuucgcagacugucccaccuucggaaacugguucccggcuucgggaaggcuuacacaaucuucaauaagacccucauggaggccgaugcucauuauaaaagcgugcgcacauggaacgagauuaucccuucuaagggaugccugagagucggcgggcggugucacccgcacgugaauggaguuuucuucaacggcauuauccuggggcccgacggacaugugcucauuccugaaaugcagagcucccugcuuagacagcacauggagcugcucgaaucuagcgucaucccccugaugcauccucuugccgaucccuccaccguguuuaaagacggcgaugaggcggaagacuucgucgaggugcaucugccggauguucacaaucaaaucagcggcguggaccucgggcugccuucuuggggaaaguacguccugauguccgugggcgccaugauugcucucaugcugguuaucuuucuuacgacaugcugucgcaaagccaacggggcugagaccauucagcaccggcugggagaaaccggcagaaaggugagcgucacaucucaguccgggcgcgugaugagcuccugggagucuuauaagagcggcggagaaaccaaacucuga

SEQ ID NO: 222977 - RNA, 1575 nt, Artificial Sequence
  derived and/or modified CDS sequence (opt5) from glycoprotein__RABV__EU086159.1
augaucccccaggcccuucucuucgugccucugcuugucuuuagccugugcuucggcaaguuuccgauuuacaccauccccgacaaacucgggccuuggucccccauugauauccaccaucugucuuguccuaacaaucuuguuguggaggacgaaggaugcacaaaccugagcggcuucuccuauauggagcucaaggugggguacauuucugcuaucaaagucaauggauuuacguguaccggcgugguuacagaagccgagaccuauacaaacuucgugggguacgucaccacaaccuuuaagagaaaacacuuccggcccacgccugaugcgugccgcgcugccuauaauuggaagauggccggagacccgagauacgaagagagccugcauaaccccuauccugauuaccacuggcugcggaccgugaagacaaccaaagagucccucguuaucauuucucccagcguguccgaccuggauccuuacgacaagagccuucauucucgcgucuuucccuccggcaaauguagcggcaucacagugucuuccaccuauugcccgacgaaucacgauuacacaauuuggaugccugaaaaccccagacuggggaccagcugugacaucuucacaaauucucggggaaagcgcgcuuccaaaggcagcaagaccugcggguuuguggaugagagaggacucuauaagucccugaaaggcgccuguaagcugaaacugugcgggguccucggacugcggcugauggacggcaccugggcugccauucaaacaucugaugaagcgaagugguguccucccgaccagcucguuaacauccacgacuuccgcagcgaugagauugagcaucuggugguggaggaacuugucaaaaagagagaagagugccuggacgcccucgaauccaucaugacgaccaaaagcgugucuuuucggcgccugucccaccuuagaaagcugguucccggcuucgggaaggcuuacacaaucuucaauaaaacccucauggaggccgaugcucauuauaagagcgugcggacauggaacgagauuaucccuucuaaaggaugccugcgcgucggcgggagaugucacccgcacgugaauggaguguuuuucaacggcauuauccuggggcccgacggacauguucucauuccugaaaugcagagcucccugcuucagcaacacauggagcugcucgaaucuagcgucaucccccugaugcuuccucuggccgaucccuccaccguguuuaaggacggcgaugaggcggaagacuucgucgaggugcaucucccggauguucacaaacaggugagcggcgucgaccuggggcugccuucuuggggaaaguacgugcucauguccguuggcgccaugaucgcucugaugcuuaugauuuuucugacgacaugcugucggaaggccaauggggcuagaaccaugcagcaugccagcggagagaccggccgcaaagugucugucacauuccccuccgggcgggugaucagcuccugggaaucuuauaagagcggcggagagaccaaacucuga

SEQ ID NO: 222978 - RNA, 1575 nt, Artificial Sequence
  derived and/or modified CDS sequence (opt5) from glycoprotein__RABV__EU086160.1
augaucccccaggcccugcucuuugugccucugcuugucuuuagccugugcuucggcaaguuuccgauuuacaccauccccgacaaacucgggccuuggucccccauugauauccaccaucugucuuguccuaacaaucuuguuguggaggacgaaggaugcacaaaccugagcggcuucuccuauauggagcucaaggugggguacauuucugcuaucaaagucaauggauuuacguguaccggcgugguuacagaagccgagaccuauacaaacuucgugggguacgucaccacaaccuuuaagagaaaacacuuccggcccacgccugaugcgugccgcgcugccuauaauuggaagauggccggagacccgagauacgaagagagccugcauaaccccuauccugauuaccacuggcugcggaccgugaagacaaccaaagagucccucguuaucauuucucccagcguguccgaccuggauccuuacgacaagagccuucauucucgcgucuuucccuccggcaaauguagcggcaucacagugucuuccaccuauugcccgacgaaucacgauuacacaauuuggaugccugaaaaccccagacuggggaccagcugugacaucuucacaaauucucggggaaagcgcgcuuccaaaggcagcaagaccugcggguuuguggaugagagaggacucuauaagucccugaaaggcgccuguaagcugaaacugugcgggguccucggacugcggcugauggacggcaccugggcugccauucaaacaucugaugaagcgaagugguguccucccgaccagcucguuaacauccacgacuuccgcagcgaugagauugagcaucuggugguggaggaacuugucaaaaagagagaagagugccuggacgcccucgaauccaucaugacgaccaaaagcgugucuuuucggcgccugucccaccuuagaaagcugguucccggcuucgggaaggcuuacacaaucuucaauaaaacccucauggaggccgaugcucauuauaagagcgugcggacauggaacgagauuaucccuucuaaaggaugccugcgcgucggcgggagaugucacccgcacgugaauggaguuuucuucaacggcauuauccuggggcccgacggacaugugcucauuccugaaaugcagagcucccugcuucagcaacacauggagcugcucgaaucuagcgucaucccccugaugcauccucuugccgaucccuccaccguguuuaaggacggcgaugaggcggaagacuucgucgaggugcaccuuccggauguucauaaacaggugagcggcgucgaccucgggcugccuucuuggggaaaguacgugcugauguccguuggcgccaugaucgcucucaugcugaugauuuuucuuacgacaugcugucggaaggccaauggggcugagaccauccagcacagacugggagaaaccggccgcaaagugagcgucacaucucaguccgggcgggugauuagcuccugggagucuuauaagagcggcggagaaaccaaacucuga

SEQ ID NO: 222979 - RNA, 1575 nt, Artificial Sequence
  derived and/or modified CDS sequence (opt5) from glycoprotein__RABV__EU126641.1
auggugccccagguccuccuguucguucugcuucugggcuuuagccucugcuucgggaaguuuccuaucuacaccauuccggacaaacugggacccugguccccuaucgauauucaccaucuuagaugucccaacaaucuggugguggaggacgaaggcugcacaaaccucucuggguucagcuauauggagcugaaggucggauacaucuccgccauuaaagugaauggcuuuacguguaccgggguugugacagaagcugagaccuauacaaacuucgucggauacgugaccacaaccuuuaagcggaaacacuuccgcccuacgcccgaugccugcagagcggcuuauaauuggaagauggccggcgacccucgguacgaagagucucugcaaaacccguaucccgauuaccauuggcuccgcaccguuagaacaaccaaggagagccugaucaucauuuccccuucugugacagaccuugaucccuacgacaaaagccugcacucccgggucuuuccuggcgggaaguguagcggaaucaccgugucuuccacguauugcagcacaaaucaugauuacaccauuuggaugcccgaagacccgcgcccuggcacacccugugauaucuucaccaacucuagagggaaacgggccuccaauggaaacaagaccugcggcuuuguggacgagcgcgggcucuauaaaagccugaagggagcuuguagacuuaagcugugcggcguccucggccugcggcugauggaugggacauggguugccaugcagacgucugacgaaaccaaaugguguuccccugaccagcucgugaaucugcacgauuuccgcagcaacgagauugagcaccuuguggucgaagaccuggugaagaaaagagaggaaugccucgauacacuggaguccaucaugaccacaaagucuguuagcuuucggcgccuuucccaucugagaaaacucgugcccggauucggcaaggcuuacaccauuuucaauaaaacgcugauggaagccgacguccacuauaagagcgugcggacauggaacgagaucauccccucuaaggggugccugaaaguuggaggcagaugucauccucacgugaauggggucuuuuucaacggaauuauccucggcccggaugaccgcgugcugauucccgagaugcaguccagccuucugcggcaacacauggaacuccuggagucuagcgucaucccucuuaugcauccccuggcggauccuuccaccguguuuaaggaaggcgacgaggccgaagauuucguugaggugcaccuccccgacgucuacaaaaagauuucugggguggaucugggacugccgaacuggggcaaauauguucucaugaccgcuggggccaugaucggacuggugcuuaucuuuagccugaugacauggugcagacgcgcuaaucggccugaguccaagcagcgcagcuucggcgggaccggcggaaacgucucugugacaucccagagcggcaaggugauucccucuugggaauccuacaaaagcgggggagagaucagacucuga

SEQ ID NO: 222980 - RNA, 1575 nt, Artificial Sequence
  derived and/or modified CDS sequence (opt5) from glycoprotein__RABV__EU182346.1
auggugccccaggcccugcuguucgucccucugcuuguuuuuccgcugugcuucggcaaguuucccaucuacaccauuccugacaaacucgggcccuggagcccuaucgauauucaccaucuguccugucccaacaaucuugugguggaggacgaaggaugcacaaaccugucuggcuucagcuauauggagcucaaggucggguacauccuggcuauuaaaaugaauggauuuacguguaccggcgugguuacagaagccgagaccuauacaaacuucgugggguacgucaccacaaccuuuaagagaaaacacuuccggccuacgccggaugcgugccgcgcugccuauaauuggaagauggccggagaccccagauacgaagagucccugcauaacccuuaucccgauuaccgguggcuccgcaccgugaagacaaccaaagagucucugguuaucaucagcccuuccguggcugaccuugaucccuacgacagaucucugcacagccgggucuuuccguccggcaaguguagcggcguggccgugucuuccacauauugcagcaccaaucaugauuacacgauuuggaugccugaaaacccccgccucgggaugucuugugacaucuucacaaauuccagaggaaaacgggcuagcaagggcucugagaccugcggguuugucgaugaacgcggacuguauaaaucccuuaagggcgccuguaagcugaaacucugcgggguucugggacugagacucauggacggcacauggguggcgaugcaaaccagcaacgagaccaagugguguccucccgaucagcuggugaaucuucacgacuuccgguccgacgagauugaacaccuggucguggaggaacucguucgcaaaagagaggaaugccuggaugcccuugagucuaucaugacaaccaagagcguguccuuucggcgccugagccaucucagaaaacugguccccggcuucgggaaggcuuacacgauuuucaacaaaacacugauggaggccgacgcucacuauaagucugugcggaccuggaaugaaauccucccuuccaagggaugccugagaguuggcgggcgcugucauccgcacgugaacggagucuuuuucaauggcauuauccuugggcccgauggaaacgugcugaucccugagaugcagagcucucuccugcagcaacacauggaacuucuggagagcuccgucauuccccucgugcauccucuggccgaccccucuacaguuuuuaaagauggcgacgaagcggaggauuucguggagguccaccucccggacgugcauaaccagguuagcggcguggaucucgggcugccuaauuggggaaaguacguccuucuguccgccggcgcucucaccgcccugaugcugaucauuuuucuuaugacgugcugucggagagugaaccgcagcgaacccacacagcacaaucuccgggggaccggaagagaggugucuguuaccccucaguccggccgcaucauuagcucuugggaaucccauaaaagcgggggcgagacacggcuguga

SEQ ID NO: 222981 - RNA, 1575 nt, Artificial Sequence
  derived and/or modified CDS sequence (opt5) from glycoprotein__RABV__EU182347.1
auggugccccaggcccugcuguucgucccucugcuuguuuuuccgcugugcuucggcaaguuucccaucuacaccauuccugacaaacucgggcccuggagcccuaucgauauucaccaucuguccugucccaacaaucuugugguggaggacgaaggaugcacaaaccugucuggcuucagcuauauggagcucaaggucggguacaaucuggcuaucaaaaugaacggauuuacguguaccggcgugguuacagaagccgagaccuauacaaauuucgugggguacgucaccacaaccuuuaagagaaaacacuuccggccuacgccggaugcgugccgcgcugccuauaacuggaagauggccggagaccccagauacgaagagucccugcauaauccuuaucccgauuaccgguggcuccgcaccgugaagacaaccaaagagucucugguuauuaucagcccuuccguggcugaccuugaucccuacgacagaucucugcacagccgggucuuuccguccggcaaguguagcggcguggccgugucuuccacauauugcagcaccaaccaugauuacacgaucuggaugccugaaaauccccgccucgggaugucuugugacauuuucacaaacuccagaggaaaacgggcuagcaagggcucugagaccugcggguuugucgaugaacgcggacuguauaaaucccuuaagggcgccuguaagcugaaacucugcgggguucugggacugagacucauggacggcacauggguggcgaugcaaaccagcaaugagaccaagugguguccucccgaucagcuggugaaccuucacgacuuccgguccgacgagaucgaacaccuggucguggaggaacucguucgcaaaagagaggaaugccuggaugcccuugagucuauuaugacaaccaagagcguguccuuucggcgccugagccaucucagaaaacugguccccggcuucgggaaggcuuacacgaucuucaauaaaacacugauggaggccgacgcucacuauaagucugugcggaccuggaacgaaauucucccuuccaagggaugccugagaguuggcgggcgcugucauccgcacgugaauggagucuuuuucaacggcaucauucuugggcccgauggaaacgugcugaucccugagaugcagagcucucuccugcagcaacacauggaacuucuggagagcuccgucaucccccucgugcauccucuggccgaccccucuacaguuuuuaaagauggcgacgaagcggaggauuucguggagguccaccucccggacgugcauaaucagguuagcggcguggaucucgggcugccuaacuggggaaaguacguccuucuguccgccggcgcucucaccgcccugaugcugauuaucuuucuuaugacgugcugucggagagugaaucgcagcgaacccacacagcacaacauucgggggaccggaagagaggugucuguuaccccucaguccggcaaaaucauuagcucuugggaaucccauaagagcgggggcgagacacgccucuga

SEQ ID NO: 222982 - RNA, 1575 nt, Artificial Sequence
  derived and/or modified CDS sequence (opt5) from glycoprotein__RABV__EU253477.1
augacaccccaggcccugcucuuugugccucugcuugucuuuagcuccugcuucggcaaguuuccgaucuacaccauucccgacaaacuggggccuuggucucccacggauauccaccaucucagcuguccuaacaaucugguuguggaggacgaaggaugcaccaaccuuuccggcuucucuuauauggagcugaaggugggguacauuagcgcuaucaaagucaauggauuuacauguaccggcgugguuacagaagccgagaccuauacaaacuucgugggguacgucaccacgaccuuuaagagaaaacacuuccggcccaugccugaugcgugccgcgcugccuauaauuggaagauggccggagacccgagauacgaagagucccuccauaaccccuauccugauuaccacuggcugcggacagugaagaccacaaaagagucucugguuauuaucagccccuccguggcugaccucgauccuuacgacaagagccugcauucucgcgucuuucccggcggcaaauguuccgggaucaccgugagcucuacgugcuguuccacaaaucacgauuauaccauuuggaugccggaaaacccuagacuuggaacaagcugcgacaucuucaccaauucucggggcaagcgcgccuccaaagggggaaagaccuguggcuuuguggaugagagagggcuguacaagagccucaaaggagcuugcaagcugaaacuuuguggcguccugggccuccggcugauggacgggacauggguugccauucaaacguccgaugaaaucaaguggugcucucccgaccagcuggugaaccuccacgacuuccauagcgaugagauugagcaccugguggucgaggaacuugugaaaaagcgcgaagagugccuggacgcgcucgaaaccaucaugacaaccaaauccguuagcuuuagacggcugucucaucuucgcaagcuggugccuggauucagaaaggccuauacaauuuucaauaaaacccucauggaggcugaugcccacuacaaguccauccggacguggaacgagaucauucccagcaaaggcugucugcgcgucgggggaagaugccacccccaugugaauggcguuuucuucaacgggaucauucugggaccugacggccacgugcucaucccggaaaugcagucuagccugcuucaucagcacauggagcugcucgaauccucugucauuccccugaugcauccucuugcugaucccagcacaguguuuaaggacggcgaugaggccgaagacuucgucgaggugcaucugccugauguucacaaacaaaucuccgggguggaccucggacugcccaauuggggcaaguauguccugaucagcgcgggggcccucaccgcucugaugcuuaccauuuuucugaugacauguugccggaagaccaacagagccgagucuauccagcacuccccgggagaaacaggccgcaaagugagcguuacgucucacaacgggcgggugauuuccagcugggaguccuacaagucuggcggagaaaccaaacucuga

SEQ ID NO: 222983 - RNA, 1575 nt, Artificial Sequence
  derived and/or modified CDS sequence (opt5) from glycoprotein__RABV__EU267742.1
augaucccccaggugcugcuccuggucccucuucugguuuucagcuccugcuuuggcaaguucccgauuuacaccauccccgacaaacucgggccuuggucucccauugauauccaccaucugagcuguccuaacaaucuugugguggaggacgaaggaugcacaaaccuguccggcuuuucuuauauggagcucaaggucggguacauuagcgccaucaaagugaauggauucacguguaccggcguugugacagaagcugagaccuauacaaacuuugucggguacgugaccacaaccuucaagagaaaacacuuucggcccacgccugaugccugccgcgcggcuuauaauuggaagauggccggagacccgagauacgaagagucccugcauaaccccuauccugauuaccacugguuccggaccguuaagacaucuaaagagagccuggugaucauuucccccagcgucgccgaccucgauccuuacgacaagucucugcauucccgcguguuucccggcggcaaauguagcgggaucaccgugucuuccacaugcuguagcaccaaucacgauuauacgauuuggaugccggaaaacccuagacuuggaacaucuugcgacaucuucaccaauucccggggcaagcgcgcuagcaaagggggaaagacauguggcuuugucgaugagagagggcuguacaagucccucaaaggagccugcaagcugaaacuuuguggcguucugggccuccggcugauggacgggaccuggguggcuauucaaaccucugaugaaaucaaguggugcagccccgaccagcuggugaaccuccacgacuuccauuccgaugagauugagcaccuggucguggaggaacuuguuaaaaagcgcgaagagugccuggacgcccucgaaacaaucaugacgaccaaaagcgugucuuuuagacggcugucccaucuucgcaagcuggucccuggauucggcaaggcguauacaaucuucaauaaaacccucauggaggccgaugcucacuacaagagcauuagaacauggaacgagaucauucccucuaaagggugucugcgggugggaggccgcugccacccccauguuaaugggguguuuuauaacggaaucauucugggcccugacggccacguccucaucccggaaaugcagagcucccugcuucaucagcacauggagcugcucgaaucuagcgugaucccccugaugcauccucuugccgaucccuccaccgucuucaaggacggggaugaggcugaagacuuuguggagguucaucugccugaugugcacaaacaaauuagcggagucgaccucggccugcccaauugggggaaguacgugcugguuucugccggagcgcucacggcccugaugcuuaugaucuuccugaugacauguugcagaaagaccaaccgggcugaguccauucagcacagcccgggcgaaaccgggagaaaagugucugucacaucccacaacggccgcgugaucagcuccugggagucuuauaagagcggaggcgaaaccaaacucuga

SEQ ID NO: 222984 - RNA, 1575 nt, Artificial Sequence
  derived and/or modified CDS sequence (opt5) from glycoprotein__RABV__EU267743.1
augaucccccaggugcugcucuuugucccucugcuuguuuuuagcuccugcuucggcaaguuuccgauuuacaccacaucugacaaacuggggcccuggagcccuaucgauaugcaccaucucuccugucccaacaaucuggugguggaggacgaaggaugcacgaaccuuucuggcuucagcuauauggagcugaaggucggguacauuuccgccaucaaagugaauggauuuaccuguacaggcguugugaccgaagcugagacauauaccaacuucgucggguacgugacaaccacguuuaagagaaaacacuuccggccuaugcccgaugccugccgcgcggcuuauaauuggaagauggccggagacccuagauacgaagagucucuccauaacccguaucccgauuaccacuggcugcggaccguuaagacaaccaaagagagccuggugauuaucuccccuagcgucgccgaccucgaucccuacgacaagucucugcauucccgcguguuuccuggcggcaaauguagcgggaucacagugucuuccacgugcuguagcaccaaucacgauuauacaauuuggaugcccgaaaacccgagacuuggaaccucuugcgacaucuucacaaauucccggggcaagcgcgcuagcaaagggggaaagaccuguggcuuugucgaugagagagggcuguacaagucccucaaaggagccugcaagcugaaacuuuguggcguucugggccuccggcugauggacgggaccuggguggcuauucaaacaucugaugaaaucaaguggugcagcccugaccagcuggugaaccuccacgacuuccauuccgaugagauugagcaccuggucguggaggaacuugccaaagaacgcgaggaaugccuggacgcgcucgaggccaucaugacgaccaagagcguuucuuuuagacggcugucccaucuucgcaaacuggugcccggauucggcaaggcuuauacaauuuucaauaagacccucauggaggccgaugcucacuacaaaagcaucagaacauggaacgaaaucauuccuucuaaggggugucugcgggucggaggccgcugccacccccaugugaaugggguuuucuucaacggaaucauucugggccccgacggccacgugcucaucccugagaugcagagcucccugcuucaucagcacauggaacugcucgagucuagcgucauuccgcugaugcauccccuugccgauccuuccaccguguuuaaagacggggaugaagcggaggacuucgucgaggaucaucugcccgacgugcacaagcaaaucagcggaguugaucucggccugccuaauugggggaaauaugugcugaucucugccggagcucucacggcccugauguccaugauuuuucuuaugacauguugcagaaagaccaaccgggcugaaagcauccagcacucucccggcgagaccgggagaaaggucuccgugacaagccacaacggccgcguuauuuccucuugggaaagcuacaaauccggaggcgagaccaagcuguga

SEQ ID NO: 222985 - RNA, 1575 nt, Artificial Sequence
  derived and/or modified CDS sequence (opt5) from glycoprotein__RABV__EU267744.1
auggugccccagguccuucucuucguuccucugcuuguguuuagcuccugcuucggcaaguuuccgaucuacaccauucccgacaaacuggggccuuggucucccaucgauauucaccaucucagcuguccuaacaaucugguggucgaggacgaaggaugcacaaaccuuuccggcuucucuuauauggagcugaaggugggguacaucagcgccauuaaaguuaauggauuuacguguaccggcguggucacagaagcugagaccuauacaaacuucgugggguacguuaccacaaccuuuaagagaaaacacuuccggcccaugccugaugccugccgcgcggcuuauaauuggaagauggccggagacccgagauacgaagagucccuccauaaccccuauccugauuaccacuggcugcggacggugaagaccacaaaagagucucuggucaucaucagccccuccguggccgaccucgauccuuacgacaagagccugcauucucgcguguuucccggcggcaaauguuccgggauuaccgucagcucuacaugcuguuccaccaaucacgauuauacgaucuggaugccggaaaacccuagacuuggaacaagcugcgacauuuucaccaauucucggggcaagcgcgcuuccaaagggggaaagacauguggcuuuguugaugagagagggcuguacaagagccucaaaggagccugcaagcugaaacuuuguggcgugcccggccugcggcucauggacgggaccuggguggcuauccaaaccuccgaugaaauuaaguggugcucuccugaccagcuggucaaccugcacgacuuccauagcgaugagaucgagcaccucgugguugaggaacuggugaaaaagcgcgaagagugccuugacgcccuggaaacaauuauggcgacgaaauccgucagcuuuagacggcucucucaucugcgcaagcuggugcccggauucggcaaggccuauaccaucuucaauaaaacacugauggaggcugaugcccacuacaaguccaucagaaccuggaacgagauuauccccagcaaagggugucuccggguuggaggccgcugccacccucaugugucuggggucuuuuucaauggaauuauccugggcccggacggccacgugcugauucccgaaaugcagagcucccuccugcaucagcacauggagcuucuggaaucuagcgucaucccucucaugcauccccuggcugauccuuccacaguguuuaaggacggggaugaggccgaagacuucguugaggugcaccuucccgauguccacaaacaaaucagcggaguggaccugggccucccgaacugggagaaguauguucugauuucugcgggggcccugaccgcucucaugcugaugaucuuucuuaugacguguugcagaaaggccaaucgggcugaauccauucagcauaacccuggagagacaggcagaaaagugagcgucaccucucacaacgggcgcgugaucuccagcugggaauccuacaagucuggcggagaggccaaacuguga

SEQ ID NO: 222986 - RNA, 1575 nt, Artificial Sequence
  derived and/or modified CDS sequence (opt5) from glycoprotein__RABV__EU267745.1
auggugccccaggcccugcuguucgucccucugcuuguuuuuccgcugugcuucggcaaguuucccaucuacaccauuccugacaaacucgggcccuggagcccuaucgauauucaccaucugagaugucccaacaaucuugugguggaggacgaaggaugcacaaaccuguccggcuucucuuauauggagcucaaggucggguacauccuggcuauuaaaaugaauggauuuacguguaccggcgugguuacagaagccgagaccuauacaaacuucgugggguacgucaccacaaccuuuaagcggaaacacuuccgcccuacgccggaugcgugcagagcugccuauaauuggaagauggccggagacccccgguacgaagagagccugcauaacccuuaucccgauuaccgcuggcucagaaccgugaagacaaccaaagagucccugguuaucaucucuccuagcguggcugaccuugaucccuacgaccggucccugcacucucgcgucuuuccgagcggcaaguguuccggcguggccgugagcucuacauauugcuccaccaaucaugauuacacgauuuggaugccugaaaaccccagacucgggaugagcugugacaucuucacaaauucucggggaaaacgcgcuuccaagggcagcgagaccugcggguuugucgaugaaagaggacuguauaaaucucuuaagggcgccuguaagcugaaacucugcgggguucugggacugcggcucauggacggcacauggguggcgaugcaaaccuccaacgagaccaagugguguccucccgaucagcuggugaaucuucacgacuuccgcagcgacgagauugaacaccuggucguggaggaacucguuagaaaacgggaggaaugccuggaugugcuugaguccaucaugacaacgaagucugucagcuuucgcagacugucccaucuccggaaacuggugcccggcuucgggaaggccuacaccauuuucaacaaaacacugauggaggcugacgcccacuauaagagcguuagaaccuggaaugaaauccucccuucuaagggaugccugcgcgugggcgggcggugucauccgcacgucuccggaguguuuuucaacggcauuauccuugggcccgauggaaauguccugaucccugagaugcagagcucucuccugcagcaacacauggaacuucuggagagcuccgugauuccccucguucauccucuggcugaccccucuacaguguuuaaagauggcgacgaagccgaggauuucgucgaggugcaccucccggacguucauaaccaggugagcggcgucgaucucgggcugccuaacuggggaaaguacgugcuucuguccgcgggcgcccucaccgcucugaugcugaucauuuuucuuaugacgugcuguagacgcgugaaucggagcgaacccacacagcacaaccucagagggaccggacgcgagguuucugucaccccucaguccggcaaaaucauuagcucuugggaaucccauaagagcgggggcgagacacggcuguga

SEQ ID NO: 222987 - RNA, 1575 nt, Artificial Sequence
  derived and/or modified CDS sequence (opt5) from glycoprotein__RABV__EU267746.1
auggugccccaggcccuccuguucgucccucugcuugcuaucccgcugugcuuuggcaaguuccccauuuacaccaucccugacaaacucgggcccuggagcccuauugauauccaccaucuguccugucccaacaaucuuguuguggaggacgaaggaugcacaaaccugucuggcuuuagcuauauggagcucaaggugggguacauuuccgccaucaaagucaauggauucacguguaccggcgugguuacagaagcggagaccuauacaaacuuugugggguacgucaccacaaccuucaagagaaaacacuuucggccuacgccggaugcuugccgcucugccuauaauuggaagauggccggagaccccagauacgaagagagccugcauaacccuuaucccgauuaccacuggcugcggaccgugaagacaaccaaagaguccuucguuaucauuucuccuagcguggcugaccucgaucccuacgacaagucccugcauagccgcgucuuuccgagaggcaaauguucuggcaucacaguguccagcaccuauugcucuacgaaucacgauuacacaauuuggaugccugaaaacccccggcuugggaccuccugugacaucuucacaaauagccgcggaaagagagccucuaaaggcuccaagaccugcggguuuguggaugagcggggacuguauaagagccucaaaggcgcuuguaagcugaaacuuugcgggguccugggacuccgccugauggacggcaccuggguugccauucaaacauccguggaaacgaagugguguccucccgaucagcuggugaaccuccacgacuuccauucugacgagaucgagcaccuggucguggaggaacuuguuaaaaagagagaagagugccuggaugcgcucgaaagcauuaugaccacaaaauccgugagcuuucggcgccugucucaucuuagaaagcugguccccggcuucgggaaggccuacaccaucuucaauaaaacacucauggaggcugacgcccacuauaaguccgugcggaccuggaacgagaucauuccuagcaaaggaugccugcgcguuggcgggagaugucacccgcaugugaauggagucuuuuucaacggcaucauucuggggcccgauggacacgugcucaucccugaaaugcagucuagccugcuucagcaacauauggagcugcucgaauccucugucauuccccugaugcacccucuugcugaccccagcacgguguuuaaggauggcgacgaggccgaagauuucguugaggugcaucugccggacguccacaaacagguguccggcguugaucucgggcugccuagcuggggaaaguacgugcugaugucugcgggcauccucacagcccugaugcuuaugaucuuucugaugaccugcugucggagaaccaaucgcgcugaguccauucagcacagccucggggaaacaggacggaaggucucugugaccucccagagcggcagagugaucuccucuugggagagcuauaaauccgggggcgaaacaaagcuguga

SEQ ID NO: 222988 - RNA, 1575 nt, Artificial Sequence
  derived and/or modified CDS sequence (opt5) from glycoprotein__RABV__EU267747.1
auggugccccaggcccuucucuucgucccucugcuugcuaucccgcugugcuuuggcaaguuccccauuuacaccaucccugacaaacucgggcccuggagcccuauugauauccaccaucuguccugucccaacaaucuuguuguggaggacgaaggaugcacaaaccugccuggcuuuucuuauauggagcucaaggugggguacauuagcgccaucaaagucaauggauucacguguaccggcgugguuacagaagcggagaccuauacaaacuuugugggguacgucaccacaaccuucaagagaaaacacuuucggccgacgcccgaugcuugccgcuccgccuauaauuggaagauggccggagacccuagauacgaagagucuccccauaacccuuaucccgauuaccacuggcugcggaccgugaagacaaccaaagagagcuucguuaucauuuccccgucuguggcugaccuggauccuuacgacaagagccuccauucccgcgucuuucccagaggcaaauguagcggcaucacagugucuuccaccuauugcagcacgaaucacgauuacacaauuuggaugccugaaaacccccggcuggggaccucuugugacaucuucacaaauucccgcggaaagagagccagcaaaggcucuaagaccugcggguuuguggaugagcggggacuuuauaagucccugaaaggcgcuuguaagcucaaacugugcgggguccuuggacugcgccucauggacggcaccuggguugugauucaaacaagcgaugaaacgaaguggugucccccugaccagcuggugaaccugcacgacuuccauuccgaugagaucgagcaccucgucguggaggaacugguuaaaaagagagaagagugccuugacgcccuggaaucuauuaugaccacaaaaagcguguccuuucggcgccucagccaucugagaaagcuggucccgggcuucgggaaggcguacaccaucuucaauaaaacacugauggaggccgaugcucacuauaagucugugcggaccuggaacgagaucauucccuccaaaggaugccuccgcguuggcgggagaugucacccucaugugaauggagucuuuuucaacggcaucauucuggggcccgacggacacgugcugaucccugaaaugcagagcucucuccugcagcaacauauggagcuucuggaaagcuccgucauuccccucaugcacccgcuggccgauccuucuacgguguuuaaggacggcgaugaggcugaagacuucguugaggugcggcuucccgauguccauaaacaggugagcggcguugaccuggggcucccuuccuggggaaaguacgugcugaugagcgccggcauccugacagcgcucaugcugaugaucuuucuuaugaccugcuguagacgcaccaauggggccgagucuauucagcacucccugggagaaacaggccggaaggucagcgugaccucucaguccgggagagugaucagcuccugggagucuuauaaaagcggcggagaaacaaagcucuga

SEQ ID NO: 222989 - RNA, 1575 nt, Artificial Sequence
  derived and/or modified CDS sequence (opt5) from glycoprotein__RABV__EU267748.1
augaucccccaggugcuucucuucuuuccucugcuugucuucagcuccugcuuuggcaaguucccgauuuacaccauccccgacaaacuggggccuuggucucccauugauauccaccaucucagcuguccuaacaaucugguuguggaggacgaaggaugcacaaaccuuuccggcuuuucuuauauggagcugaaggugggguacauuagcgccaucaaagucaauggauucacguguaccggcgugguuacagaagcugagaccuauacaaacuuugugggguacgucaccacaaccuucaagagaaaacacuuucggcccaugccugaugccugccgcgcggcuuauaauuggaagauggccggagacccgagauacgaagagucccuccauaaccccuauccugauuaccacuggcugcggacggugaagaccacaaaagagucucugguuaucauuagccccuccguggccgaccucgauccuuacgaccgcagccugcauucuagagucuuccccggcggcaaguguuccgggaucaccgugagcucuacaugcuguuccaccaaucacgauuauacgauuuggaugccggaaaacccucggcuucgcacaagcugcgacaucuuuaccaauucuagaggaaaacgggcucccaagggcgggaaaacauguggauucguggaugagcgcggccuguacaagucccucaagggggccugcaaacugaagcuguguggaguccugggccucagacugauggacggcaccuggguugcuauucaaaccagcgaugaaaucaaauggugcuccccugaccagcuggugaaccuccacgacuuucauucugaugagauugagcaccugguggucgaggaacuugugaagaaacgggaagagugccuggacgcccucgaaacaaucaugacgaccaagagcguuuccuuccgcagacugagccaucuucggaaacuggugcccggguucggaaaggcguauacaaucuuuaauaagacccucauggaggccgaugcucacuacaaaucuauucgcacauggaacgagaucauucccuccaagggcugucugagagucgggggacggugccacccucaugugaauggcguuuucuuuaacgggaucauucugggaccggacggccacgugcucauccccgaaaugcagagcucucugcuucaucagcacauggagcugcucgaaagcuccgucaucccucugaugcauccccuugccgauccuucuaccguguucaaagacggcgaugaggcugaagacuuugucgaggugcaucugcccgauguucacaagcaaauuagcgggguggaccucggacugccgaauuggggcaaauauguccugaucuccgccggggcgcucacggcccugaugagcaugauuuuccuuaugacauguugcagaaagaccaaccgcgcugagucuauccagcacuccccuggagaaaccggccggaaggugagcguuacaucucacaacgggagagugauuuccagcugggaguccuacaaaucuggcggagaaaccaagcuguga

SEQ ID NO: 222990 - RNA, 1575 nt, Artificial Sequence
  derived and/or modified CDS sequence (opt5) from glycoprotein__RABV__EU267749.1
auggugccccagguccugcuguucguuccucugcuuguguuuagcuccugcuucggcaaguuuccgaucuacaccauucccgacaaacuggggccuuggucucccaucgauauucaccaucucagcuguccuaacaaucugguggucgaggacgaaggaugcacaaaccuuuccggcuucucuuauauggagcugaaggugggguacaucagcgccauuaaaguuaauggauuuacguguaccggcguggucacagaagcugagaccuauacaaacuucgugggguacguuaccacaaccuuuaagagaaaacacuuccggcccaugccugaugccugccgcgcggcuuauaauuggaagauggccggagacccgagauacgaagagucccuccauaaccccuauccugauuaccacuggcugcggacggugaagaccacaaaagagucucuggucaucaucagccccuccguggccgaccucgauccuuacgacaagagccugcauucucgcguguuucccggcggcaaauguuccgggauuaccgucagcucuacaugcuguuccaccaaucacgauuauacgaucuggaugccggaaaacccuagacuuggaacaagcugcgacauuuucaccaauucucggggcaagcgcgcuuccaaagggggaaagacauguggcuuuguugaugagagagggcuguacaagagccucaaaggagccugcaagcugaaacuuuguggcgugcugggccuccggcugauggacgggaccuggguggcuauccaaaccuccgaugaaauuaaguggugcucucccgaccagcuggucaaccuccacgacuuccauagcgaugagaucgagcaccuggugguugaggaacuugugaaaaagcgcgaagagugccuggacgcccucgaaacaauuaugacgaccaaauccgucagcuuuagacggcugucucaucuucgcaagcuggugccuggauucggcaaggcguauacaaucuucaauaaaacccucaugggggccgaugcucacuacaaguccaucagaacauggaacgagauuauccccagcaaaggaugucugcggguuggcgggcgcugccacccccaugugaauggagucuuuuucaacggcauuauccugggcccugacgggcacgcccucauuccggagaugcagucuagccugcuucaucagcacauggaacugcucgaguccucugugaucccccugaugcauccucuugcugaucccagcaccgucuuuaaggacggagaugaagccgaggacuucguggaaguucaccucccugaugugcacaaacaaaucuccggcgucgaccucgggcugcccaauuggggaaaguaugugcugauuagcgcgggcgcccucacggcucugaugcuuaugaucuuucugaugacauguugcagaaaggccgaucgggcugagucuauucagcauaacccgggggagaccggcagaaaaguuuccgugaccagccgcaacggacgggucaucucuuccugggaaagcuacaaguccggcggggagacaaaacucuga

SEQ ID NO: 222991 - RNA, 1575 nt, Artificial Sequence
  derived and/or modified CDS sequence (opt5) from glycoprotein__RABV__EU267750.1
auggugccccagguccugcuguucguuccucugcuuguguuuagcuccugcuucggcaaguuuccgaucuacaccauucccgacaaacuggggccuuggucucccaucgauauucaccaucucagcuguccuaacaaucugguggucgaggacgaaggaugcacaaaccuuuccggcuucucuuauauggagcugaaggugggguacaucagcgccauuaaaguuaauggauauacguguaccggcguggucacagaagcugagaccuacacaaacuuugugggguauguuaccacaaccuucaagagaaaacacuuucggcccaugccugaugccugccgcgcggcuuacaauuggaagauggccggagacccgagauaugaagagucccuccauaaccccuacccugauuaccacuggcugcggacggugaagaccacaaaagagucucuggucaucaucagccccuccguggccgaccucgauccuuaugacaagagccugcauucucgcguguuccccggcggcaaauguuccgggauuaccgucagcucuacaugcuguuccaccaaucacgauuacacgaucuggaugccggaaaacccuagacuuggaacaagcugcgacauuuuuaccaauucucggggcaagcgcgcuuccaaagggggaaagacauguggcuucguugaugagagagggcuguauaagagccucaaaggagccugcaagcugaaacuuuguggcgugcugggccuccggcugauggacgggaccuggguggcuauccaaaccuccgaugaaauuaaguggugcucucccgaccagcuggucaaccuccacgacuuucauagcgaugagaucgagcaccuggugguugaggaacuugugaaaaagggagaagagugccuggacgcccucgaaacaauuaugacgaccaaauccgucagcuuccgcagacugucucaucuucggaagcuggugccuggcuuugggaaggcguacacaaucuucaauaaaacccucauggaggccgaugcucacuauaaguccauccgcacauggaacgagauuauccccagcaaaggaugucugagaguuggcgggcggugccacccccaugugaauggagucuucuuuaacggcauuauccugggcccugacgggcacgugcucauuccggaaaugcagucuagccugcuucaucagcacauggagcugcucgaauccucugucaucccccugaugcauccucuugccgaucccagcaccguguucaaggacggagaugaggcugaagacuuuguugaggugcaccucccugauguccacaaacaaaucuccggcguggaccucgggcugcccaauuggggacgcuacguucugauuagcgccggcgcgcucacggcccugaugcuuaugaucuuccugaugacauguugcagaaaggcuaaccgggccgagucuauucagcauaacccggaagagaccgggagaaagguguccgucaccagccacaauggccgcgugaucucuuccugggaaagcuauaaauccggaggcgagacaaagcucuga

SEQ ID NO: 222992 - RNA, 1575 nt, Artificial Sequence
  derived and/or modified CDS sequence (opt5) from glycoprotein__RABV__EU267751.1
auggugccccagguccugcuguucguuccucugcuuguguuuagcuccugcuucggcaaguuuccgaucuacaccauucccgacaaacuggggccuuggucucccaucgauauucaccaucucggauguccuaacaaucugguggucgaggacgaaggcugcacaaaccuuagcggguucuccuauauggagcugaaggugggauacaucucugccauuaaaguuaauggcuuuacguguaccgggguggucacagaagcugagaccuauacaaacuucgugggauacguuaccacaaccuuuaagagaaaacacuuccggcccaugccugaugccugccgcgcggcuuauaauuggaagauggccggcgacccgagauacgaagagagccuccauaaccccuauccugauuaccacuggcugcggacggugaagaccacaaaagagucccuggucaucaucucucccagcguggccgaccucgauccuuacgacaagucccugcauagccgcguguuucccggcgggaaauguucuggaauuaccgucuccagcacaugcuguucuaccaaucacgauuauacgaucuggaugccggaaaacccuagacuuggcacauccugcgacauuuucaccaauagccgggggaagcgcgcuucuaaaggaggcaagacauguggguuuguugaugagagaggacuguacaagucccucaaaggcgccugcaagcugaaacuuuguggcgugcuggggcuccggcugauggaccgcaccuggguggcuauccaaaccagcgaugaaauuaaguggugcucccccgaccagcuggucaaccuccacgacuuccauucugaugagaucgagcaccuggugguugaggaacuugugaaaaagagagaagagugccuggacgcccucgaaacaauuaugacgaccaaaagcgucuccuuucggcgccugagccaucuuagaaagcuggugccuggauucggcaaggcguauacaaucuucaauaaaacccucauggaggccgaugcucacuacaagucuauccggacauggaacgagauuauccccuccaaagggugucugcgcguuggaggcagaugccacccccaugugaauggggucuuuuucaacggaauuauccugggcccugacggccacgugcucauuccggaaaugcagagcucucugcuucaucagcacauggagcugcucgaaagcuccgucaucccccugaugcauccucuugccgaucccucuaccguguuuaaggacggggaugaggcugaagacuucguugaggugcaccucccugauguccacaaacaaaucagcggaguggaccucggccugcccaauugggggaaguauguucugauuuccgccggagcgcucacggcccugaugcuuaugauccugcucaugacauguugccggaaggcuaacagagccgagagcauucagcauaacccgggcgaaaccgggcgcaaagugucugucaccucccacaauggccgggugaucagcucuugggaguccuacaagagcggaggcgaaacaaaacuguga

SEQ ID NO: 222993 - RNA, 1575 nt, Artificial Sequence
  derived and/or modified CDS sequence (opt5) from glycoprotein__RABV__EU267752.1
augaucccccaggugcuucucuucgucccucugcuuguuuuuagcuccugcuucggcaaguuuccgauuuacaccauccccgacaaacuggggccuuggucucccauuuucauccacccucuccugagacccaacaaucuugugguggaggaugaaggauguacaaaccugagcggcuuuuccuauauggagcucaaggucggguacauuucugccaucaaagugaauggauucacgugcaccggcguugugacagaagcugagaccuauacaaacuuugucggguacgugaccacaaccuucaagcggaaacauuuucgcccuaugccggacgccuguagagcggcuuauaauuggaagauggccggagauccccgguacgaagagagccugcacaacccuuaucccgacuaccauuggcugcgcacgguuaagaccacaaaagagucccucgugaucauuucuccuagcgucgccgaucuggaccccuacgauaagucccuucacagcagaguguucccgggcggcaaaugcucugggaucaccguguccagcacauguugcucuaccaaucaugacuauacgauuuggaugccugaaaacccccggcugggaacauccugugauaucuuuaccaauagccgcggcaagagagcuucuaaagggggaaagacaugcggcuucgucgacgagcgggggcucuacaagucccugaaaggagccuguaagcugaaacugugcggcguucucggccugcgccugauggaugggaccuggguggcuauucaaaccagcgacgaaaucaagugguguuccccugaucagcucgugaaccugcacgacuuucacucugacgagauugagcaucuugucguggaggaacugguuaaaaagagagaagagugccucgaugcccuggaaacaaucaugacgaccaaaagcguguccuuccggcgccuuagccaccugagaaagcucguccccggauucggcaaggcguauacaaucuuuaauaaaacccugauggaggccgacgcucauuacaagucuauucggacauggaacgagaucauucccuccaaagggugccugcgcgugggaggcagaugucacccucacguuaaugggguguucuuuaacggaaucauucucggcccggauggccauguccugauccccgaaaugcagagcucucuucugcaccagcauauggagcuccuggaaagcuccgugaucccucuuaugcacccccuggccgacccuucuaccgucuucaaggauggggacgaggcugaagauuuuguggagguucaucuccccgacgugcacaaacaaauuagcggagucgaucugggccugccgaauugggggaaguaugugcucaucuccgccggagcgcugacggcccuuaugcugacaauuuuccucaugaccugcugucggaagaccaacagagcuggcagcauccagcacucuccuggggagacaggccgcaaaguuuccgugaccagccauaacggacgggucauuucuuccugggaaagcuacaaguccggcucugagacaaaacuguga

SEQ ID NO: 222994 - RNA, 1575 nt, Artificial Sequence
  derived and/or modified CDS sequence (opt5) from glycoprotein__RABV__EU267753.1
augaucccccaggugcuccuguucgucccucugcuuguuuuuagcuccugcuucggcaaguuuccgauuuacaccauccccgacaaacuggggccuuggucucccauugauauccaccaucucagcuguccuaacaaucuggugguggaggacgaaggaugcacaaaccuuuccggcuucucuuauauggagcugaaggucggguacauuagcgccaucaaagugaauggauuuacguguaccggcguugugacagaagcugagaccuauacaaacuucgucggguacgugaccacaaccuuuaagagaaaacacuuccggcccacgccugaugccugccgcgcggcuuauaauuggaagauggccggagacccgagauacgaagagucccuccauaaccccuauccugauuaccacuggcugcggaccguuaagacaucuaaagagagccuggugaucauuucccccagcgucgccgaccucgauccuuacgacaagucucugcauucccgcguguuucccggcggcaaauguagcgggaucaccgugucuuccacaugcuguagcaccaaucacgauuauacgauuuggaugccggaaaacccuagacuuggaacaucuugcgacaucuucaccaauucccggggcaagcgcgcuagcaaagggggaaagacauguggcuuugucgaugagagagggcuguacaagucccucaaaggagccugcaagcugaaacuuuguggcguucugggccuccggcugauggacgggaccuggguggcuauucaaaccucugaugaaaucaaguggugcagccccgaccagcuggugaaccuccacgacuuccauuccgaugagauugagcaccuggucguggaggaacuuguuaaaaagcgcgaagagugccuggacgcccucgaaacaaucaugacgaccaaaagcgugucuuuuagacggcugucccaucuucgcaagcuggucccuggauucggcaaggcguauacaaucuucaauaaaacccucauggaggccgaugcucacuacaagagcauuagaacauggaacgagaucauucccucuaaaggguguuuucgggugggaggccgcugccacccccauguuaaugggguguucuuuagcggaaucauucugggcccugacggccacguccugaucccggaaaugcaguccucucuccugcaucagcacauggagcuucuggaaagcuccgugaucccccucaugcauccucuggccgaucccagcaccgucuucaaggacggggaugaggcugaagacuuuguggagguucaccuuccugaugugcacaaacaaauuucuggagucgaccugggccuccccaacugggggaaguaugugcugguuggagccggcgcgcugacggcccucaugcugaugaucuuccuuaugacauguugcagaaagaccaaucgggcugaguccauucagcauagcccgggggaaaccggcagaaaagugucugucacaucccacaacggacgcgugaucagcuccugggagucuuacaagagcggcggggaaaccaaacuguga

SEQ ID NO: 222995 - RNA, 1575 nt, Artificial Sequence
  derived and/or modified CDS sequence (opt5) from glycoprotein__RABV__EU267754.1
augaucccccaggugcuucucuucgucccucugcuuguuuuuagcuccugcuucggcaaguuuccgauuuacaccauccccgacagacuggggccuuggucucccauugauauccaccaucucagcuguccuaacaauauggugguggaggacgaaggaugcacaaaccuguccggcuucucuuauauggagcuuaaagucggguacauuagcgccaucaaggugaauggauuuacguguaccggcguugugacagaagcugagaccuauacaaacuucgucggguacgugaccacaaccuuuaaacggaagcacuuccgccccaugccugaugccugcagagcggcuuauaauuggaaaauggccggagacccgcgguacgaagagucccugcauaaccccuauccugauuaccacuggcuccgcacgguuaagaccacaaaggagucucuggugaucauuagccccuccgucgccgaccuggauccuuacgacaaaagccuccauucuagaguguuucccggcggcaaguguuccgggaucaccgugagcucuacaugcuguuccaccaaucacgauuauacgauuuggaugccggaaaacccucggcugggaacaagcugcgacaucuucaccaauucucgcggcaaaagagcuuccaaagggggaaagacauguggcuuugucgaugagcgggggcuuuacaagagccugaagggagccugcaaacuccgccuguguggcguucuuggccugagacucauggacgggaccuggguggcuauucaaaccuccgaugaaaucaaguggugcucucccgaccagcuggugaaccugcacgacuuccauagcgaugagauugagcaccucgucgccgaggaacuggugaaaaagcgggaagagugccuugacgcgcuggaaacaaucaugacgaccaaauccguuagcuuucgcagacucucucaucugcggaagcuggugccuggauucggcaaagccuauacaaucuucaauaagacccugauggaggcugaugcccacuacaaguccauucgcacauggaacgagaucauucccagcaaagggugucucagagucggaggccggugccacccccaugugaaugggguguuuuucaacggaaucauucugggcccugacggccacguucugaucccggaaaugcagucuagccuccugcaucagcacauggagcuucuggaauccucugucaucccccucaugcauccucuggcugaucccagcaccguguuuaaggacggggaugaggccgaagacuucgucgaggugcaccuuccugauguucacaaacaaauuuccggaguggaccugggccuccccaauugggggaaguauguccugaucagcgcgggagcccugacggcucucaugcugacaauuuuucuuaugaccuguugcagaaaaaccucucgcgccgaguccauccagcauagcccgggcgaaacagggcggaaggugucuguuaccucccacaacggcagagugauuagcuccugggagucuuacaagagcggaggcgaaacaaaacuguga

SEQ ID NO: 222996 - RNA, 1575 nt, Artificial Sequence
  derived and/or modified CDS sequence (opt5) from glycoprotein__RABV__EU267755.1
augaucccccaggugcuccuguucgucccucugcuuguuuuuagcuccugcuucggcaaguuuccgauuuacaccauccccgacaaacuggggccuuggucucccauugauauccaccaucucagcuguccuaacaaucuggugguggaggacgaaggaugcacaaaccuuuccggcuucucuuauauggagcugaaggucggguacauuagcgccaucaaagugaauggauuuacguguaccggcguugugacagaagcugagaccuauacaaacuucgucggguacgugaccacaaccuuuaagagaaaacacuuccggcccacgccugaugccugccgcgcggcuuauaauuggaagauggccggagacccgagauacgaagagucccuccauucucccuauccugauuaccacuggccccggaccguuaagacaagcaaagagucccuggugaucauuagcccuggcgucgccgaccuggaucccuacgacaagucucuccauucccgcguguuuccgggcgggaaauguagcggaaucaccgugucuuccacaugcuguagcaccaaccacgauuauacgauuuggaugccugaaaaucccagacugggcacaucuugcgacaucuucaccaacucccgggggaagcgcgcuagcaaaggaggcaagacauguggguuugucgaugagagaggacuuuacaagucccugaaaggcgccugcaagcucaaacuguguggcguucuugggcugcggcucauggacggaaccuggguggcuauucaaaccucugaugaaaucgaguggugcagcccugaccagcuggugaaucugcacgacuuccauuccgaugagauugaacaccucgucguggaggaauuuguuaagaaacgcgaggaaugccuggacgcccuugagacaaucaugacgaccaagagcgugucuuucagacggcugucccaucuccgcaaacugguccccggcuucgggaaggcguauacaaucuuuaacaagacccuuauggaggccgaugcucacuacaaaagcauuagaacauggaaugaaaucauucccucuaagggaugucugcgggugggcgggcgcugccacccucauguuuauggaguguucuuuaacggcaucauucucggcccggacgggcacguccugauccccgagaugcagagcucccugcucagacagcauauggaacugcuugagucuagcgugaucccucugaugcacccccucgccgauccuuccaccgucuucaaagacggagaugaagcugaggacuuuguggagguucaucugcccgaugugcacaagcaaauuagcggcgucgacccggggcuuccuaauuggggaaaauacgugcugguuucugccggcgcgcucacggcccugaugcugaugaucuuccucacaaccuguugccggaagaccaacagagcugaauccauucagcacagccccggggagacaggccgcaaggugucugucaccucccauaauggacgggugaucagcuccugggaaucuuauaaaagcggcggggagacaaagcuguga

SEQ ID NO: 222997 - RNA, 1575 nt, Artificial Sequence
  derived and/or modified CDS sequence (opt5) from glycoprotein__RABV__EU267756.1
augaucccccaggugcugcucuuugucccucugcuuguuuuuagccugugcuucggcaaguuuccgauuuacaccauccccgacaaacucgggccuuggucccccauugauauccugcaccuuucuuguccuaacaaucuggugguggaggacgaaggaugcacagaucucagcggcuucuccuauauggagcugaaggucggguacauuucugccaucaaagugaacggauuuacguguaccggcguugugacagaagcugagaccuauacaaauuucgucggguacgugaccacaaccuuuaagagaaaacauuuccggcccacgccugacgccugccgcgcggcuuauaacuggaagauggccggagauccgagauacgaagagagccugcacaaucccuauccugacuaccauuggcuccggaccguuaagacauccaaagagucucuggugaucauuagccccuccgaugccgaccuugauccuuacgacaagagccugcacucucgcgucuuucccggcggcaaauguuccgggaucaccgugagcucuacaugcuguuccaccaaccaugauuauacgauuuggaugccggaaaauccuagacucggaacaagcugcgacaucuucaccaacucucggggcaagcgcgcuuccaaagggggaaagacauguggcuuuguggaugagagagggcuguacaagagccuuaaaggagccugcaagcugaaacucuguggcguccugggccugcggcucauggacgggaccuggguugcuauucaaaccuccgacgaaaucaaguggugcucucccgaucagcuggugaaucuucacgacuuccacagcgaugagauugagcaucugguggucgaggaacucgugaaaaagcgcgaagagugccuggacgcccuugaaacaaucaugacgaccaaauccguuagcuuuagacggcugucucaccuccgcaagcuggugccuggauucggcaaggcguauacaaucuucaacaaaacccugauggaggccgaugcucauuacaaguccauuagaacauggaaugagaucauucccagcaaagggugucuccgggucggaggccgcugccacccccacgugaacgggguuuucuucaauggaaucauucugggcccugacggccaugugcuuaucccggaaaugcagucuagccugcuccaccagcauauggagcugcuugaauccucugucaucccccugaugcacccucucgccgaucccagcaccguguuuaaggacggggaugaggcugaagacuucgucgaggugcaucugccugauguucacaaacaaauuuccggaguggaccugggccuccccaacugggggaaguauguccuggugagcgccggagcgcuuacggcccugaugcucaugaucuuucugaugacauguugcagaaagaccaaucgggcugagucuauucagcacuccccgggcgaaaccgggagaaaaguuagcgugacaucucauaacggccgcgucaucuccagcugggaguccuacaagucuggaggcgaaaccaaacuguga

SEQ ID NO: 222998 - RNA, 1575 nt, Artificial Sequence
  derived and/or modified CDS sequence (opt5) from glycoprotein__RABV__EU267757.1
augaucccccaggugcuucucuucgucccucugcuuguuuuuagcuccugccugggcaaguucccgauuuacaccauccccgacaaacucgggccuuggucucccauugauauccaccaucugagcuguccuaacaaucuugugguggaggacgaaggaugcacaaaccuguccggcuuuucuuauauggagcucaaggucggguacauuagcgccaucaaagugaauggauucacguguaccggcguugugacagaagcugagaccuauacaaacuuugucggguacgugaccacaaccuucaagagaaaacacuuucggcccacgccugaugccugccgcgcggcuuauaauuggaagauggccggagacccgagauacgaagagucccugcauaaccccuauccugauuaccacuggcugcggaccguuaagacaucuaaagagagccucgugaucauuucccccagcgucgccgaccuggauccuuacgacaagucucuucauucccgcguguuccccggcggcaaauguagcgggaucaccgugucuuccacaugcuguagcaccaaucacgauuauacgauuuggaugccggaaaacccuagacugggaacaucuugcgacaucuuuaccaauucccggggcaagcgcgcuagcaaagggggaaagacauguggcuucgucgaugagagagggcucuacaagucccugaaaggagccugcaagcugaaacuguguggcguucucggccugcggcugauggacgggaccuggguggcuauucaaaccucugaugaaaucaaguggugcagccccgaccagcucgugaaccugcacgacuuucauuccgaugagauugagcaccuugucguggaggaacugguugaaaaacgcgaggaaugccucgacgcccugggaacaaucaugacgaccaagagcgugucuuucggcagacuuucccaucugcggaaacucgucccuggguuuggaaaggcguauacaaucuucaauaagacccugauggaggccgaugcucacuacaaaagcauucgcacauggaacgagaucauucccucuaagggcugucugagaguugggggacggugccacccccaugugaauggcguguucuuuaacggcaucauucucgggccugaccgccacguccugaucccggaaaugcagagcucccuucugcaucagcacauggagcuccuggaaucuagcgugaucccccuuaugcauccucuggccgaucccuccaccgucuucaaagacggagaugaggcugaagacuuuguggagguucaccucccugaugugcacaagcaaauuagcggcgucgaccuggggcugcccaauuggggaaaauaugugcucguuucugccggcgcgcugacggcccuuaugcugaugaucuuccucaugacauguugcagaaagaccaaccgggcugaguccauucagcauagcccgggggaaaccggcagaaaggugucugucacaucccacaacggacgcgugaucagcuccugggagucuuacaaaagcggcggggaaaccaagcuguga

SEQ ID NO: 222999 - RNA, 1575 nt, Artificial Sequence
  derived and/or modified CDS sequence (opt5) from glycoprotein__RABV__EU267758.1
augaucccccaggugcuucucuucgucccucugcuuguuuuuagcuccugcuucggcaaguuuccgauuuacaccauccccgacaaacuggggccuuggauucccaucgauauucaccaucucucuuguccuaacaaucuggugguggaggacgaaggaugcacaaaccuuagcggcuucuccuauauggagcugaaggucggguacaucucugccaucaaagugaauggauuuacguguaccggcguugugacagaagcugagaccuauacaaacuucgucggguacgugaccacaaccuuuaagagaaaacacuuccggcccaugccugauguuugccgcgccgcguauaauuggaagauggcuggagacccgagauacgaagagagccuccauaaccccuauccugauuaccacuggcugcggacggugaagaccacaaaagagucccuggucauuaucucucccagcguggccgaccucgauccuuacgacaagucccugcauagccgcguguuucccggcggcaaauguucugggauuaccgucuccagcacaugcuguucuaccaaucacgauuauacgaucuggaugccggaaaacccuagacuuggaacauccugcgacauuuucaccaauagccggggcaagcgcgccucuaaagggggaaagacauguggcuuuguugaugagagagggcuguacaagucccucaaaggagcuugccggcugaagcuguguggcgugcugggccuccgccugauggacgggaccuggguggccauccaaaccagcgaugaaauuaaauggugcucccccgaccagcuggucaaccuccacgacuuccauucugaugagaucgagcaccuggugguugaggaacuugugaagaaaagaggagaaugccuggacgcucucgagacaaucaugacgaccaagagcgucuccuuucggcgccugagccaucuuagaaaacuggugccucgguucggcaaggccuauacaauuuucaauaagacccucauggaagcggaugcccacuacaaaucuauccgcacauggaacgagauuauccccuccaaggggugucugagaguuggaggccggugcagaccccacgugaauggggucuuuuucaacggaauuauccugggcccugacggccaugugcucaucccggagaugcagagcucucugcuucaccagcauauggaacugcucgagagcuccgucauuccccugaugcacccucuugcugaucccucuaccguguuuaaagacggggaugaagccgaggacuucguugaaguguaucugccugauguccauaagcaaaucagcggaguggaccucggccugcccaauugggggaaauacguucugauuuccgcuggagcccucacggcgcugaugagcaugaucuuucuuaugacauguugccgcaagaccaaccgggccgagucuauucagcacuccccgggcgagaccgggagaaaggugagcgucacaucucacaacggccgcgauaucuucuccugggaaagcuauaaauccggaggcgagaccaagcuguga

SEQ ID NO: 223000 - RNA, 1575 nt, Artificial Sequence
  derived and/or modified CDS sequence (opt5) from glycoprotein__RABV__EU267759.1
augaucccccaggugcuucucuucgucccucugcuuguuuuuagcuccugcuucggcaaguuuccgauuuacaccauccccgacaaacuggggccuuggucucccauugauauccaccaucucagcuguccuaacaaucuggugguggaggacgaaggaugcacaaaccuuuccggcuucucuuauauggagcugaaggucggguacauuagcgccaucaaagugaauggauuuacguguaccggcguugugacagaagcugagaccuauacaaacuucgucggguacgugaccacaaccuuuaagagaaaacacuuccggcccacgccugaugccugccgcgcggcuuauaauuggaagauggccggagacccgagauacgaagagucccuccauaaccccuauccugauuaccacuggcugcggaccguugagacaucuaaggaaagccuggugaucauuucccccagcgucgccgaccucgauccuuacgacaaaucucugcauucccgcguguuucccggcggcaaguguagcgggaucaccgugucuuccacaugcuguagcaccaaucacgauuauacgauuuggaugccggagaacccuagacuuggaacaucuugcgacaucuucaccaauucccggggcaaacgcgcuagcaaagggggaaagacauguggcuuugucgaugaaagagggcuguacaagucccucaagggagccugcaaacugaagcuguguggcguucugggccuccggcugauggacgggaccuggguggcuauucaaaccucugaugagaucaaauggugcagccccgaccagcuggugaaccuccacggauuccauuccgacgagauugaacaccuggucguggaggaacuuguuaagaaacgcgaggaaugccuggaugcccucgagacaaucaugacgaccaagagcgugucuuuuagacggcugucccaucuucgcaaacuggucccuggcuucgggaaggcguauacaaucuucaauaagacccucauggaggccgacgcucacuacaaaagcauuagaacauggaacgaaaucauucccucuaagggaugucugcgggugggcgggcgcugccacccccauguuaauggaguguuuuucaacggcaucauucugggcccugaugggcacguccucaucccggagaugcagagcucccugcuucaucagcacauggaacugcucgagucuagcgugaucccccugaugcauccucuugccgaccccuccaccgucuuuaaagauggagacgaagcugaggauuucguggagguucaucugccugacgugcacaagcaaauuagcggcgucgaucucgggcugcccaauuggggaaaauaugugcugguuucugccggcgcgcucacggcccugaugcuuaugaucuuucugaugacauguugcagaaagaccaaccgggcugaauccauucagcacagcccgggggagaccggcagaaaggugucugucacaucccacaacggacgcgugaucagcuccugggaaucuuacaaaagcggcggggagaccaagcucuga

SEQ ID NO: 223001 - RNA, 1575 nt, Artificial Sequence
  derived and/or modified CDS sequence (opt5) from glycoprotein__RABV__EU267760.1
augaucccccaggugcugcuguucgucccucugcuuguuuuuagcuccugcuucggcaaguuuccgauuuacaccauccccgacaaacuggggccuuggucucccauugauauccaccaucucagcuguccuaacaaucuggugguggaggacgaaggaugcacaaaccuuuccggcuucucuuauauggagcugaaggucggguacauuagcgccaucaaagugaauggauuuacguguaccggcguugugacagucgcugaaaccuauacaaacuucgugggguacguuaccacaaccuuuaagagaaaacacuuccggcccaugccugaugccugccgcgcggcuuauaauuggaagauggccggagacccgagauacgaggaaucccuccauaacucuuaucccgauuaccacuggcugcggacggugaagaccccuaaagagagccuggucaucauuucccccagcguggccgaccucgauccuuacgacaagucucugcauucccgcguguuucccggcggcaaauguagcgggaucacagucucuuccacaugcuguagcaccaaucacgauuauaccauuuggaugccggagaacccuagacuuggaacgucuugcgacaucuucacaaauucccggggcaagcgcgcuagcaaagggggaaagaccuguggcuuuguugaugaaagagggcuguacaagucccucaaaggagccugcaagcugaaacuuuguggcgugcugggccuccggcugauggacgggacauggguggcuauucaaaccucugaugagaucaaguggugcagccccgaccagcuggucaaccuccacgacuuccauuccgaugaaauugagcaccuggugguugaggaacuugugaaaaagcgcgaggaaugccuggacgcccucgagaccaucaugacaacgaaaagcgucucuuuuagacggcugucccaucuucgcaagcuggugccuggauucggcaaggcguauaccaucuucaauaaaacacucauggaagccgaugcucacuacaagagcauuagaaccuggaacgagaucauucccucuaaagggugucugcggguuggaggccgcugccacccccaugugaauggggucuuuuucaacggaaucauucugggcccugacggccacgugcucaucccggagaugcagagcucccugcuucaucagcacauggaacugcucgagucuagcgucaucccccugaugcauccucuugccgaucccuccacaguguuuaaggacggggaugaagcugaggacuucguugaagugcaccucccugauguccacaaacaaauuagcggaguggaccucggccugcccaauugggggaaguauguucugaucucugccggagcgcucaccgcccugaugcuuaugauuuuucugaugacguguugcagaaagacaaaccgggcugaguccauccagcauagcccgggcgagaccgggagaaaagugucugucaccucccacaacggccgcgugauuagcuccugggaaccuuacaagucuggaggcgagacaaaacucuga

SEQ ID NO: 223002 - RNA, 1575 nt, Artificial Sequence; identical to SEQ ID NO: 222915
  derived and/or modified CDS sequence (opt5) from glycoprotein__RABV__EU267761.1

SEQ ID NO: 223003 - RNA, 1575 nt, Artificial Sequence; identical to SEQ ID NO: 222911
  derived and/or modified CDS sequence (opt5) from glycoprotein__RABV__EU267762.1

SEQ ID NO: 223004 - RNA, 1575 nt, Artificial Sequence
  derived and/or modified CDS sequence (opt5) from glycoprotein__RABV__EU267763.1
augaucccccaggugcuucucuucgucccucugcuuguuuuuagcuccugcuucggcaaguuuccgauuuacaccauccccgacaaacuggggccuuggucucccauugauauccaccaucucagcuguccuaacaaucuggugguggaggacgaaggaugcacaaaccuuuccggcuucucuuauauggagcugaaggucggguacauuagcgccaucaaagugaauggauuuacguguaccggcguugugacagaagcugagaccuauacaaacuucgucggguacgugaccacaacccucaagagaaaacacuuucggcccaugccugaugccugccgcgcggcuuauaauuggaagaucgccggagacccgagauacgaagagucccugcauaaccccuauccugauuaccaccggcugcgcacgguuaagaccacaaaagagucucucgugauuaucagccccuccgucgccgaccuggauccuuacgacaagagccuucauucuagaguguuccccggcggcaaauguuccgggauuaccgugagcucuacaugcuguuccaccaaucacgauuauacgaucuggaugccggaaaacccucggcugggaacaagcugcgacauuuuuaccaauucucgcggcaagagagcuuccaaagggggaaagacauguggcuucgucgaugagcgggggcucuacaagagccugaaaggagccugcaagcugaaacuguguggcguucucggccugcgccugauggacgggaccuggguggcuauccaaaccuccgaugaaauuaaguggugcucucccgaccagcucgugaaccugcacgacuuucauagcgaugagaucgagcaccuugucguggaggaacugguuaaaaugagagaagagugccucgacgcccuggaaacaaucaugacgaccaaguccgugagcuuccggcgccuuucucaucugagaaaacucgucccuggauuuggcaaggcguauacaauuuucaauaagacccugauggaggccgaugcucacuacaaauccauccggacauggaacgagauuauccccagcaaggggugucugcgcgugggaggcagaugccacccccauguuaaugggguguucuuuaacggaauuauccucggcccugacggccacguccugaucccggaaaugcagucuagccuucugcaucagcacauggagcuccuggaauccucugugauuccccuuaugcauccucuggccgaucccagcaccgucuucaaagacggggaugaggcugaagacuuuguggagguucaccucccugaugugcacaagcaaaucuccggagucgaccugggccugcccaauugggggaaauaugugcucauuagcgccggagcgcugacggcccuuaugucuaugaucuuccugaugacauguugccggaagaccaacagagcugaguccauucagcauagcccgggcgaaaccgggcgcaagguuucugugacaucccacaacggccgggucaucagcuccugggagucuuacaaaagcggaggcgaaaccaagcucuga

SEQ ID NO: 223005 - RNA, 1575 nt, Artificial Sequence
  derived and/or modified CDS sequence (opt5) from glycoprotein__RABV__EU267764.1
augaucccccaggugcugcuguucgucccucugcuuguuagcuccucuugcuuuggcaaguucccgauuuacaccauccccgacaaacuggggccuuggagccccauugauauccaccaucucuccuguccuaacaaucuggugguggaggacgaaggaugcacaucucuuagcggcuuuuccuauauggagcugaaggucggguacauuucugccaucaaagugaacggauucacguguaccggcguugugacagaagcugagaccuauacaaauuuugucggguacgugaccacaaccuucaagagaaaacacuuucggcccaugccugaugccugccgcgcggcuuauaacuggaagauggccggagacccgagauacgaagagagccuccauaaucccuauccugauuaccacuggcugcggacgguuaagaccacaaaagagucccuggugaucauuagccccucugucgccgaccucgauccuuacgacaagucccugcauagccgcguguuccccggcggcaaauguucugggaucaccguguccagcacaugcuguucuaccaaccacgauuauacgauuuggaugccggaaaauccuagacuuggaacauccugcgacgucuuuaccaacagccggggcaagcgcgcuuccaaagggggaaagacauguggcuucguugaugagagagggcuguacaagucucucaaaggagccugcaagcugaaacuuuguggcgugcugggccuccggcugauggacgggaccuggguggcuauccaaaccagcgauggaauuaaguggugcucccccgaccagcuggucaaucuccacgacuuucauagcgaugaaaucgagcaccuggugguugaggaacuugugaaaaagcgcgaggaaugccuggacgcccucgagacaauuaugacgaccaaaucugucuccuucagacggcugagccaucuucgcaagcuggugccuggcuuugggaaggcguauacaaucuucaacaaaacccucauggaagccgaugcucacuacaagucuaucagaacauggaaugagauuauccccagcaaaggaugucugcggguuggcgggcgcugccacccccaugugaacggagucuucuuuaauggcauuauccugggcccugacgggcacgugcucauuccggagaugcaguccucucugcuucaucagcacauggaacugcucgagagcuccgucaucccccugaugcauccucuugccgaucccagcaccguguucaaggacggagaugaagcugaggacuuuguugaagugcaccucccugauguccacaaacaaaucucuggcguggaccucgggcugcccaacuggggaaaguauguucugauuuccgccggcgcgcucacggcccugaugagcaugaucuuccuuaugacauguugcagaaagaccaaucgggcugagucuauucagcauuccccgggggagaccggcagaaaagugagcgucacaucccacaacggacgcgugaucucuagcugggaauccuacaagucuggcggggagaccaaacuguga

SEQ ID NO: 223006 - RNA, 1575 nt, Artificial Sequence
  derived and/or modified CDS sequence (opt5) from glycoprotein__RABV__EU267765.1
augaucccccaggugcugcuguucgucccucugcuuguuuuuagcuccugcuucuggaaguuuccgauuuacaccauccccgacaaacugggcccuuggucucccauugauauccaccaucucagcuguccuuccaaccuggugguggaggacgaagggugcacaaaucuuuucggauuuucuuauauggagcugaaggucggcuacauuagcgccaucaaagugaacggguucacguguaccggaguugugacagaagcugagaccuauacaaauuuugucggcuacgugaccacaaccuucaagagaaaacacuuucggcccaugccugaugccugccgcgcggcuuauaacuggaagauggccggggacccgagauacgaagagucccuccauaaucccuauccugauuaccacuggcugcggacgguuaagaccacaaaagagucucuggugaucauuagccccuccgucgccgaccucgauccuuacgacaagagccugcauucucgcguguuccccggaggcaaauguuccggcaucaccgugagcucuacaugcuguuccaccaaccacgauuauacgauuuggaugccggaaaauccuagacuugggacaagcugcgacaucuuuaccaacucucggggaaagcgcgcuuccaaaggcgggaagacauguggauucgucgaugagagaggccuguacaagagccucaaaggggccugcaagcugaaacuuuguggaguucugggccuccggcugauggacggcaccuggguggcuauucaaaccuccgaugaaaucaaguggugcucucccgaccagcuggugaaucuccacgacuuucauagcgaugagauugagcaccuggucguggaggaacuuguuaaaaagcgcgaagagugccuggacgcccucgaaacaaucaugacgaccaaauccgugagcuucagacggcugucucaucuucgcaagcuggucccuggguucggaaaggcguauacaaucuuuaacaaaacccucauggaggccgaugcucacuacaaguccauuagaacauggaaugagaucauucccagcaaaggcugucugcggguugggggacgcugccacccccaugugaacggcguguucuuuaaugggaucauucugggaccugacggccacguccucaucccggaaaugcagucuagccugcuucaucagcacauggagcugcucgaauccucugugaucccccugaugcauccucuugccgaucccagcaccgucuucaaggacggcgaugaggcugaagacuuuguggagguucaccucccugaugugcacaaacaaauuuccggggucgaccucggacugcccaacuggggcaaguaugugcugaucagcgccggggcgcucacggcccugaugucuaugauuuuccuuaugacauguugcagaaagaccauccgggcugaguccauucagcauagcccgggagaaaccggcagaaaaguuucugugacaucccacaaugggcgcgucaucagcuccugggagucuuacaagagcggcggagaaaccaaacuguga

SEQ ID NO: 223007 - RNA, 1575 nt, Artificial Sequence
  derived and/or modified CDS sequence (opt5) from glycoprotein__RABV__EU267766.1
augaucccccaggugcugcuguucgucccucugcuuguuuuuagcuccugcuucggcaaguuuccgauuuacaccauccccgacaaacuggggccuuggucucccauugauauccaccaucucagcuguccuaacaaucuggugguggaggacgauggaugcacaaaccuuuccggccugucuuauauggaacucaaggucggguacauuagcgccaucaaagugaauggauucacguguaccggcguugugacagaggcugaaaccuauacaaacuuugucggguacgugaccacaaccuucaagagaaaacacuuucggcccaugccugacgccugccgcgcggcuuauaauuggaagaucgccggagauccgagauacgaggaaucccugcauaaccccuauccugacuaccacuggcugcggacgguuaagaccacaaaagagucucccgugauuaucagcccuuccgucgccgaucucgaccccuacgauaagagccugcauucucgcguguucccgggcggcaaauguuccgggauuaccgugagcucuacaugcuguuccaccaaucacgacuauacgaucuggaugccugagaaccccagacuuggaacaagcugcgauauuuuuaccaauucucggggcaagcgcgcuuccaaagggggaaagacauguggcuucgucgacgaaagagggcuguacaagagccucaaaggagccugcaagcugaaacuuuguggcguucugggccucaagcugauggaugggaccuggguggcuauccaaaccuccgacgagauuaaauggugcucuccugaccagcuggugaaccuccacgauuuucauagcgacgaaaucgagcaccuggucguggaggaacuuguuaagaaacgggaggaaugccuggaugcccucgagacaaucaugacgaccaaguccgugagcuuccgcagacugucucaucuucggaagcugguccccggauuuggcaaagcguauacaauuuucaauaagacccucauggaagccgacgcucacuacaaauccauccgcacauggaacgagauuauccccagcaaggggugucugagagugggaggccggugccacccucauguuaaugggguguucuuuaacggaauuauccugggcccggauggccacguccucauccccgagaugcagucuagccugcuucaucagcacauggaacugcucgaguccucugugauuccucugaugcauccccuugccgacccuagcaccgucuucaaagauggggacgaagcugaggauuuuguggaaguucaccuccccgacgugcacaagcaaaucuccggagucgaucucggccugccgaauugggggaaguaugugcugauuagcgccggagcgcucacggcccugaugucuaugaucuuccuuaugacauguugccgcaaaaccaacagagcugaguccauucagcauagcccuggcgagaccgggcggaagguuucugugacaucccacaacggcagagucaucagcuccugggaaucuuacaaaagcggaggcgagaccaagcuguga

SEQ ID NO: 223008 - RNA, 1575 nt, Artificial Sequence
  derived and/or modified CDS sequence (opt5) from glycoprotein__RABV__EU267767.1
augacaccccaggugcuucucuucgucccucugcuuguuuuuagcuccugcuucggcagauuuccgaucuacaccauucccgacaagcuggggccuuggucucccaucgauauucaccaucucagcuguccuaacaaucuggugguggaggacgaaggaugcacgaaccuuuccggcuucucuuguauggagcugaaagucggguauaucagcgccauuaaggugaauggauuuaccugcacaggcguugugaccgaagcugagacauacaccaacuucgucggguaugugacaaccacguuuaaacggaagcacuuccgccccaugccugaugccuguagagcggcuuacaauuggaaaauggccggagacccgcgguaugaagagucccuccauaaccccuacccugauuaucacuggcugcgcaccguuaagacaaccaaggagucucuggugaucaucagccccuccgucgccgaccucgauccuuacgacaaaagccugcauucuagaguguuucccggcggcaagugcuccgggauuacagugagcucuacccgguguuccacgaaucacgauuacacaaucuggaugccggaaaacccucgccuuggaaccagcugcgacauuuucacaaauucuagaggcaaacgggcuuccaaagggggaaagaccuguggcuuugucgaugagcgcgggcuguauaagagccucaagggagccugcaaacugaagcuguguggcguucuggaacucagacugauggacggcaccugggcugccauccaaacauccgaugagauuaaauggugcucucccgaccagcuggugaaccuccacgacuuccauagcgaugagaucgaccaccugguggucgaggaacuugugaagaaacgggaagagugccuggaugcgcucgaaacgauuaugaccacaaaguccguuagcuuucgcagacugucucaucuucggaaacuggugccuggguucggaaaggccuacaccaucuucaauaagacacucauggaggcugacgcccacuauaaauccauccgcaccuggaacgagauuauccccagcaagggcugucugagagucgggggacggugccacccccaugugaauggcguguuuuucaacgggauuauccugggaccugauggccacguucucauuccggaaaugcagucuagccugcuucaucagcacauggagcugcucgaauccucugucaucccccugaugcauccucuugcuggccccagcacgguguuuaaagacggggaugaggccgaagacuucgucgaggugcaucugccugauguucacaagcaaaucuccggaguggaccucggccugcccaauugggggaaauacguccugauuagcgcgggagcccucacagcucugaugucuaugaucuuucuuaugaccuguugcagaaagaccaaccgcgccgaguccauucagcacagcccgggcgaaacagggcggaaggugucuguuaccucccacaacggcagagugaucagcuccugggagucuuauaaaagcggaggcgaaacaaagcuguga

SEQ ID NO: 223009 - RNA, 1575 nt, Artificial Sequence
  derived and/or modified CDS sequence (opt5) from glycoprotein__RABV__EU267768.1
augaucccccaggugcuccuguucgucccucugcuuguuuuuagcuccugcuucggcaaguuuccgauuuacaccauccccgacaaacuggggccuuggucucccauugauauccaccaucucagcuguccuaacaaucuggugguggaggacgaaggaugcacaaaccuuuccggcuucucuuauauggagcugaaggucggguacauuagcgccaucaaaguguccggauuuacguguaccggcguugugacagaagcugagaccuauacaaauuucgucggguacgugaccacaaccuuuaagagaaaacacuuccggcccaugccugaugccugccgcgcggcuuauaacuggaagauggccggagacccgagauacgaagagucucuccauaaucccuauccugauuaccacuggcugcggacgguuaagaccacaaaagagagccuggugaucauuucccccagcgucgccgaccucgauccuuacgacaagucucugcauucccgcguguuucccggcggcaaauguagcgggaucaccgugucuuccacaugcuguagcaccaaccacgauuauacgauuuggaugccggaaaauccuagacuuggaacaucuugcgacaucuucaccaacucccggggcaagcgcgcuagcaaagggggaaagacauguggcuuugucgaugagagagggcuguacaagucccucaaaggagccugcaagcugaaacuuuguggcguucugggccuccggcugauggacgggaccuggguggcuauucaaaccucugaugaaaucaaguggugcagccccgaccagcuggugaaucuccacgacuuccauuccgaugagauugagcaccuggucguggaggaacuuguuaaaaagcgcgaagagugccuggacgcccucgaaacagugaugacgaccaaaagcgucucuuuuagacggcugucccaucuucgcaagcuggugccuggauucggcaaggcguauacaaucuucaacaaaacccucauggaggccgaugcucacuacaagagcaucagaacauggaaugagauuauccccucuaaagggugucugcggguuggaggccgcugccacccccaugugaacggggucuuuuucgacggaauuauccugggcccugauggcagagugcucauuccggaaaugcagagcucccugcuucaccagcauauggagcugcucgaaucuagcgucaucccccugaugcacccucuugccgaccccuccaccguguuuaaggauggggacgaggcugaagauuucguugaggugcaucugccugacguccacaaacucaucagcggaguggaucugggccugcccaauugggggaaguauguucucauuucugccggagcgcugacggcccuuauguccaugaucuuucugaugacauguugccggaagaccaacagagcugagagcauucaacacucuccgggcgaaaccgggcgcaaaguguccgucacaagccauaauggccgggugaucuccucuugggagagcuacaaguccggaggcgaaaccaaacucuga

SEQ ID NO: 223010 - RNA, 1575 nt, Artificial Sequence
  derived and/or modified CDS sequence (opt5) from glycoprotein__RABV__EU267769.1
augaucccccaggugcuucucuucgucccucugcuuguuuuuagcuccugcuucggcaaguuuccgauuuacaccauccccgacaaacuggggccuuggucucccauugauauccaccaucucagcuguccuaacaauauggugguggaggacgaaggaugcacaaaccuguccggcuucucuuauauggagcuuaaggucggguacauuagcgccaucaaagugaauggauuuacguguaccggcguugugacagaagcugagaccuauacaaacuucgucggguacgugaccacaaccuuuaagagaaaacacuuccggcccaugccugaugccugccgcgcggcuuauaauuggaagauggccggagacccgagauacgaagagucccugcauaaccccuauccugauuaccacuggcuccggacgguuaagaccacaaaagagucucuggugaucauuagccccuccgucgccgaccuggauccuuacgacaagagccuccauucucgcguguuucccggcggcaaauguuccgggaucaccgcuagcucuacaugcuguuccaccaaucacgauuauacgauuuggaugccggaaaacccuagacugggaacaagcugcgacaucuucaccaauucucggggcaagcgcgccuccaaagggggaaagacauguggcuuugucgggggaagaggccuuuacaagagccugaaaggcgcuugcaagcucaaacuguguggggugcuuggacugcggcucauggauggcaccuggguugccauucaaaccuccgacgggaucaaguggugcucucccgaucagcuggugaaccugcacgacuuccauagcgacgagauugaacaccucguggucgaggagcuggugaaaaagcgcgaagagugccuugaugcgcugguuacaaucaugacgaccaaauccgugagcuuuagacggcucucucaucugcgcaagcuggucccuggauucggcaaggccuauacaaucuucaauaaaacccugauggaagcugacgcccacuacaaguccauuagaacauggaacgagaucauucccagcaaagggugucuccgggugggaggccgcugccacccccauguuaauggcguguuuuucaacgggaucauucugggaccugauggccacguccugaucccggaaaugcagucuagccuccugcaucagcacauggagcuucuggaguccucugugaucccccucaugcauccucuggcugaccccagcaccgucuuuaaggauggggacgaagccgaggauuucguggaaguucaccuuccugacgugcacaaacaaauuuccggagucgaucugggccuccccaauugggggaaguaugugcugaucagcgcgggcgcccugacggcucucaugcugacaauuuuucuuaugaccuguugcagaaagaccucucgggccgaguccauccagcauagcccgggagaaacaggcagaaaaguuucugugaccucccacaacgggcgcgucauuagcuccugggagucuuacaagagcggaggcgagacaaaacuguga

SEQ ID NO: 223011 - RNA, 1575 nt, Artificial Sequence
  derived and/or modified CDS sequence (opt5) from glycoprotein__RABV__EU267770.1
augaucccccaggugcuucucuucgucccucugcuuguuuuuagcuccugcuucggcaaguuuccgauuuacaccauccccgacaaacuggggccuuggucucccauugauauccaccaucucagcuguccuaacaauauggugguggaggacgaaggaugcacaaaccuguccggcuucucuuauauggagcuuaaggucggguacauuagcgccaucaaagugaauggauuuacguguaccggcguugugacagaagcugagaccuauacaaacuucgucggguacgugaccacaaccuuuaagagaaaacacuuccggcccaugccugaugccugccgcgcggcuuauaauuggaagauggccggagacccgagauacgaagagucccugcauaaccccuauccugauuaccacuggcuccggacgguuaagaccacaaaagagucucuggugaucauuagccccuccgucgccgaccuggauccuuacgacaagagccuccauucucgcguguuucccggcggcaaauguuccgggaucaccgugagcucuacaugcuguuccaccaaucacgauuauacgauuuggaugccggaaaacccuagacugggaacaagcugcgacaucuucaccaauucucggggcaagcgcgcuuccaaagggggaaagacauguggcuuugucgaugagagagggcuuuacaagagccugaaaggagccugcaagcucaaacuguguggcguucuuggccugcggcucauggacgggaccuggguggcuauucaaaccuccgaugaaaucaaguggugcucucccgaccagcuggugaaccugcacgacuuccauagcgaugagauugagcaccucgucguggaggaacugguuaaaaagcgcgaagagugccuugacgcccuggaaacaaucaugacgaccaaauccgugagcuuuagacggcucaaucaucugcgcaagcuggucccuggauucggcaaggcguauacaaucuucaacaaaacccugauggaggccgaugcucacuacaagucuauuagaacauggaaugagaucauucccuccaaagggugucuccgggugggaggccgcugccacccccauguuaacgggguguuuuucaauggaaucauucugggcccugacggccacguccugaucccggaaaugcagagcucucuccugcaucagcacauggagcuucuggaaagcuccgugaucccccucaugcauccucuggccgaucccucuaccgucuuuaaggacggggaugaggcugaagacuucguggagguucaccuuccugaugugcacaaacaaauuagcggagucgaccugggccuccccaacugggggaaguaugugcugaucuccgccggagcgcugacggcccucaugcugacaauuuuucuuaugaccuguugcagaaagaccagccgggcugagucuauccagcauuccccgggcgaaacagggagaaaaguuagcgugaccucucacaacggccgcgucauuuccagcugggaguccuacaagucuggaggcgaaacaaaacuguga

SEQ ID NO: 223012 - RNA, 1575 nt, Artificial Sequence
  derived and/or modified CDS sequence (opt5) from glycoprotein__RABV__EU267771.1
augaucccccaggugcuucucuucgucccucugcuuguuuuuagcuccugcuucggcaaguuuccgauuuacaccauccccgacaaacuggggccuuggucucccauugauauccaccaucucagcuguccuaacaauauggugguggaggacgaaggaugcacaaaccuguccggcuucucuuauauggagcuuaaggucggguacauuagcgccaucaaaguguccggauuuacguguaccggcguugugacagaagcugagaccuauacaaauuucgucggguacgugaccacaaccuuuaagagaaaacacuuccggcccaugccugaugccugccgcgcggcuuauaacuggaagauggccggagacccgagauacgaagagucucugcauaauccccacccugauuaucauuggcuccggacgguuaagaccacaaaagagagccuggugaucauuucccccagcgucgccgaccuggauccuuacgacaagucucuccacucccgcguguuucccggcggcaaauguagcgggaucaccgugucuuccacaugcuguagcaccaaccacgauuacacgauuuggaugccggaaaauccuagacugggaacaucuugcgacaucuucaccaacucccggggcaagcgcgcuagcaaagggggaaagacauguggcuuugucgaugagagagggcuuuauaagucccugaaaggagccugcaagcucaaacuguguggcguucuuggccugcggcucauggacgggaccuggguggcuauucaaaccucugaugaaaucaaguggugcagccccgaccagcuggugaaucugcaugacuuccacuccgauggaauugagcaucucgucguggaggaacugguuaaaaagcgcgaggaaugccuugacgcccuggagacaaucaugacgaccaaaagcgugucuuuuagacggcucucccaucugcgcaagcuggucccuggcuucgggaaggcguacacaaucuucaacaaaacccugauggaagccgaugcucacuauaagagcauuagaacauggaaugagaucauucccucuaaaggaugucuccgggugggcgggcgcugccacccccacguuaacggaguguuuuucaauggcaucauucugggcccugacgggcauguccugaucccggagaugcagagcucccuccugcaccagcauauggaacuucuggagucuagcgugaucccccucaugcacccucuggccgaucccuccaccgucuuuaaggacggagaugaagcugaggacuucguggaaguucaccuuccugaugugcauaaacaaauuagcggcgucgaccuggggcuccccaacuggggaaaguacgugcugaucucugccggcgcgcugacggcccucaugcugacaauuuuucuuaugaccuguugcagaaagaccucccgggcugagagcauccagcacucuccgggggagacaggcagaaaaguuuccgugaccagccauuccggacgcgucauuucuagcugggaauccuauaagucuggcggggagacaaaacuguga

SEQ ID NO: 223013 - RNA, 1575 nt, Artificial Sequence
  derived and/or modified CDS sequence (opt5) from glycoprotein__RABV__EU267772.1
auggugccccaggcccuccuguucgucccucugcuuguuuuuccgcugugcuucggcaaguuucccaucuacaccauuccugacaaacucgggcccuggagcccuaucgauauucaccaucuguccugucccaacaaucuugugguggaggacgaaggaugcacaaaccugucuggcuucagcuauauggagcucaaggucggguacauccuggcuauuaaaaugaauggauuuacguguaccggcgugguuacagaagccgagaccuauacaaacuucgugggguacgucaccacaaccuuuaagagaaaacacuuccggccuacgccggaugcgugccgcgcugccuauaauuggaagauggccggagaccccagauacgaagagucccugcauaacccuuaucccgauuaccgguggcuccgcaccgugaagacaaccaaagagucucugguuaucaucagcccuuccguggcugaccuugaucccuacgacagaucucugcacagccgggucuuuccguccggcaaguguagcggcguggccgugucuuccacauauugcagcaccaaucaugauuacacgauuuggaugccugaaaacccccgccucgggaugucuugugacaucuucacaaauuccagaggaaaacgggcuagcaagggcucugagaccugcggguuugucgaugaacgcggacuguauaaaucccuuaagggcgccuguaagcugaaacucugcgggguucugggacugagacucauggacggcacauggguggcgaugcaaaccagcaacgagaccaagugguguccucccgaucagcuggugaaucuuuacgacuuccgguccgacgagauugaacaccuggucguggaggaacucguucgcaaaagagaggaaugccuggaugcccuugagucuaucaugacaaccaagagcguguccuuucggcgccugagccaccucagaaaacugguccccggcuucgggaaggcuuauacgauuuucaacaaaacacugauggaggccgacgcucauuacaagucugugcggaccuggaaugaaauccucccuuccaagggaugccugagaguuggcgggcgcugucacccgcaugugaacggagucuuuuucaauggcauuauccuugggcccgauggaaacgugcugaucccugagaugcagagcucucuccugcagcaacacauggaacuucuggagagcuccgucauuccccucgugcacccucuggccgaccccucuacaguuuuuaaagauggcgacgaagcggaggauuucguggagguccaucugccggacgugcacaaccagguuagcggcguggaucucgggcugccuaauuggggaaaguauguccuucuguccgccggcgcucucaccgcccugaugcugaucauuuuucuuaugacgugcugucggagagugaaccgcagcgaacccacacagcauaaucuccgggggaccggaagagaggugucuguuaccccucaguccggcaaaaucauuagcucuugggaaucccacaagagcgggggcgagacacgccuguga

SEQ ID NO: 223014 - RNA, 1575 nt, Artificial Sequence
  derived and/or modified CDS sequence (opt5) from glycoprotein__RABV__EU267773.1
augaucccccaggugcugcuguucgucccucugcuuguuuuuagcuccugcuucggcaaguuuccgauuuacaccauccccgacaaacuggggccuuggucucccauugauauccaccaucucagcuguccuaacaaucuggugguggaggacgaaggaugcacaaaccuuuccggcuucucuuauauggagcugaaggucggguacauuagcgccaucaaagugaauggauuuacguguaccggcguugugacagaagcugagaccuauacaaacuucgucggguacgugaccacaaccuuuaagagaaaacacuuccggcccaugccugaugccugccgcgcggcuuauaauuggaagauggccggagacccgagauacgaagagucccuccauaaccccuauccugauuaccacuggcugcggacgguuaagaccacaaaagagucucuggugaucauuagccccuccgucgccgaccucgauccuuacgacaagagccugcauucucgcguguuucccggcggcaaauguuccgggaucgcugugagcucuaccugcuguuccacaaaucacgauuauaccauuuggaugccggaaaacccuagacuuggaacgagcugcgacaucuucacaaauucucggggcaagcgcgccuccaaagggggaaagaccuguggcuuugucgaugagagagggcuguacaagagccucaaaggagcuugcaagcugaaacuuuguggcguucugggccuccggcugauggacgggacauggguggccauucaaaccuccgaugaaaucaaguggugcucucccgugcagcuggucaaccuccacgacuuccauagcgacgagauugagcaccuggugguugaggaacuugugaaaaagcgcgaagagugccuggauguccucgaaaccaucaugacaacgaaauccgugagcuuuagacggcugucucaucuucgcaagcugguuccuggauucggcaaggcguauaccaucuucaauaaaacacucauggaggccgacgcucacuacaaguccauuagaaccuggaacaaaaucauucccagcaaggggugucugcgggugggaggccgcugccacccccaugucaaugggguguuuuucaacggaaucauucugggcccugauggccacguccucaucccggagaugcagucuagccugcuucaucagcacauggaacugcucgaguccucugugaucccccugaugcauccucuugccgaccccagcacaguuuuuaaagauggggacgaagcugaggauuucguggaaguccaccucccugacgugcacaagcaaauuuccggaguugaucucggccugcccaauugggggaaguaugugcugaucagcgccggagcgcucaccgcccugaugcuuacgauuuuucugaugacauguugcagaaaaaccaaccgggcugagucuauccagcauuccccgggcgagaccgggagaaaggucagcgugacaucucacaacggccgcgugauuuccagcugggaauccuacaaaucuggaagcgagaccaagcucuga

SEQ ID NO: 223015 - RNA, 1575 nt, Artificial Sequence
  derived and/or modified CDS sequence (opt5) from glycoprotein__RABV__EU267774.1
augaucccccaggugcugcuguucgucccucugcuuguuuuuagcuccugcuucggcaaguuuccgauuuacaccauccccgacaaacuggggccuuggucucccacagauauucaccaucucagcuguccuaacaaucuggugguggaggacgaaggaugcacgaaccuuuccggcuucucuuauauggagcugaaggucggguacaucagcgccauuaaagugaauggauuuaccuguacaggcguugugaccgaagcugagacauauaccaacuucgucggguacgugacaaccacguuuaagagaaaacacuuccggcccaugccugaugccugccgcgcggcuuauaauuggaagauggccggagacccgagauacgaagagucccuccauaaccccuauccugauuaccacuggcugcggaccguuaagacaaccaaagagucucuggugaucaucagccccuccgucgccgaccucgauccuuacgacaagagccugcauucucgcguguuucccggcggcaaauguuccgggauuacagugagcucuaccugcuguuccacgaaucacgauuauacaaucuggaugccggaaaacccuagacuuggaaccagcugcgacauuuucacaaauucucggggcaagcgcgcuuccaaagggggaaagaccuguggcuuugucgaugagagagggcuguacaagagccucaaaggagccugcaagcugaaacuuuguggcguucugggccuccggcugauggacgggaccuggguggcuauccaaacauccgaugaaauuaaguggugcucucccgaccagcuggugaaccuccacgacuuccauagcgaugagaucgagcaccuggucguggaggaacuuguuaaaaagcgcgaagagugccuggacgcccucgaaacgauuaugaccacaagauccgugagcuuucggcgccugucucaucuuagaaaacuggucccuggauucggcaaggcguauaccaucuucaauaagacacucauggaggccgaugcucacuacaaauccauccggaccuggaacgagauuauccccagcaaggggugucugcgcgugggaggcagaugccacccccauguuaaugggguguuuuucaacggaauuauccugggcccugacggccacguccucauuccggaaaugcagucuagccugcuucaucagcacauggagcugcucgaauccucugugaucccccugaugcauccucuugccgaucccagcacggucuuuaaagacgggggagaggcugaagauuucguggagguucaccucccugacgugcacaagcaaaucuccggcgucgaucucgggcugcccaauuggggaaaauaugugcugauuagcgccggcgcgcucacagcccugaugucuaugaucuuucuuaugaccuguugccggaagaccaacagagcugaguccauucagcauagcccgggggaaacaggccgcaagguuucugugaccucccacaacggacgggucaucagcuccugggagucuuacaaaagcggcggggaaacaaagcuguga

SEQ ID NO: 223016 - RNA, 1575 nt, Artificial Sequence
  derived and/or modified CDS sequence (opt5) from glycoprotein__RABV__EU267775.1
augaucccccaggugcuccuguucgucccucugcuuguuuuuagcuccugcuucagaaaguuuccgauuuacaccauccccgacaaacugggcccuuggucucccauugauauccaccaucucagcugucugaacaaucuugugguggaggacgaagggugcacaaaccuguccggauucucuuauauggagcucaaggucggcuacauuagcgccaucaaagugaauggguuuacguguaccggaguugugacagaagcugagaccuauacaaacuucgucggcuacgugaccacaaccuuuaagcggaaacacuuccgcccuaugcccgaugccugcagagcggcuuauaauuggaagauggccggggacccucgguacgaagagucccugcauaacccguaucccgauuaccacuggcugcgcacgguuaagaccacaaaagagucucucgugaucauuagcccuuccgucgccgaccuggaucccuacgacaagagccuucauucuagaguguuuccuuccggaaaauguagcggcaucaccgugucuuccacaugcuguagcaccaaucacgauuauacgauuuggaugcccgaaaacccgcggcugggcacaucuugcgacaucuucaccaauucccgcgggaagagagcuagcaaaggaggcaagacauguggguuugucgaugagcggggacucuacaagucccugcgcggcgccugcaaacuuaagcugugugggguucucggacugagacugauggacggcaccuggguggcuauucaaaccucugaugaaaucaaauggugcagcccugaccagcucgugaaccugcacgacuuccauuccgaugagauugagcaccuugucguggaggaacugguuaagaaacgggaagagugccucgacgcccuggaaacaaucaugacgaccaagagcgugucuuuucgcagacuuucccaucugcggaaacucguccccggcuucgggaaggcguauacaaucuucaauaagacccugauggaggccgaugcucaccacaaaagcauucgcacauggaacgagaucauuccuucuaagggaugucugagagugggcgggcggugccauccccacguuaauggaguguuuagcaacggcaucauucucgggcccgacggacauguccugaucccugaaaugcaguccucucuucugcaccagcauauggagcuccuggaaagcuccgugaucccgcuuaugcacccccuggccgauccuagcaccgucuucaaagacucugaugaggcugaagacuuuguggagguucaccuccccgaugugcauaagcaaauuuccggcgucgaccugggccugccuaauugggggaaauacgugcucaucagcgccggagcgcugacggcccuuaugcugaugauuuuccucaugacauguugcagaaagaccaaccgcgcugagucuauccagcacucccccggcgaaaccgggcggaagguuagcgugacaucccauaacggaagagucauuucuagcugggaguccuauaaaucuggcagcgaaaccaagcuguga

SEQ ID NO: 223017 - RNA, 1575 nt, Artificial Sequence
  derived and/or modified CDS sequence (opt5) from glycoprotein__RABV__EU267776.1
augaucccccaggugcuucucuucgucccucugcuuguuuuuagcuccugcuucggcaaguuuccgauuuacaccauccccgacaaacuggggccuuggucucccauugauauccaccaucucagcuguccuaacaaucuggugguggaggacgaaggaugcacaaaccuuuccggcuucucuuauauggagcugaaggucggguacauuagcgccaucaaagugaauggauuuacguguaccggcguugugacagaagcugagaccuauacaaacuucgucggguacgugaccacaaccuuuaagagaaaacacuuccggcccaugccugaugccugccgcgcggcuuauaauuggaagauggccggagacccgagauacgaagagucccuccauaaccccuauccugauuaccacuggcugcggacgguuaagaccacaaaagagucucuggugaucauuagccccuccgucgccgaccucgauccuuacgacaagagccugcauucucgcguguuucccuccggcaaauguagcggcaucaccgugucuuccacaugcuguagcaccaaucacgauuauacgauuuggaugccggaaaacccuagacuugggacaucuugcgacaucuucaccaauucccggggaaagcgcgcuagcaaaggcgggaagacauguggauuugucgaugagagaggccuguacaagucccuccgcggggccugcaaacugaagcuguguggaguucugggccuccggcugauggacggcaccuggguggcuauucaaaccucugaugaaaucaaauggugcagccccgaccagcuggugaaccuccacgacuuccauuccgaugagauugagcaccuggucguggaggaacuuguuaagaaaagagaagagugccuggacgcccucgaaacaaucaugacgaccaagagcgugucuuuucggcgccugucccaucuuagaaaacuggucccuggguucggaaaggcguauacaaucuucaauaagacccucauggaggccgaugcucacuacaaaagcauucggacauggaacgagaucauucccucuaagggcugucugcgcguugggggaagaugccacccccaugugaauggcguguuuuucaacgggaucauucugggaccugacggccacguccucaucccggaaaugcagagcucccugcuucaucagcacauggagcugcucgaaucuagcgugaucccccugaugcauccucuugccgaucccuccaccgucuuuaaagacggcgaugaggcugaagacuucguggagguucaucugccugaugugcacaagcaaauuagcggggucgaccucggacugcccaauuggggcaaauaugugcugaucucugccggggcgcucacggcccugaugcuuaugauuuuucugaugacaugucggagaaagaccaaccgcgcugaguccauccagcacagcccgggagaaaccggccggaagguuucugugacaucccacaacgggagagucauuagcuccugggagucuuacaaaagcggcuccgaaaccaagcucuga

SEQ ID NO: 223018 - RNA, 1575 nt, Artificial Sequence
  derived and/or modified CDS sequence (opt5) from glycoprotein__RABV__EU275240.1
augaucccccaggcccugcucuuugugccucugcuugucuuuagcuccugcuucggcaaguuuccgauuuacaccauccccgacaaacuggggccuuggucucccauugauauccaccaucucagcuguccuaacaaucugguuguggaggacgaaggaugcacaaaccuuuccggcuucucuuauauggagcugaaggugggguacauuagcgcuaucaaagucaauggauuuacguguaccggcgugguuacagaagccgagaccuauacaaacuucgugggguacgucaccacaaccuuuaagagaaaacacuuccggcccaugccugaugcgugccgcgcugccuauaauuggaagauggccggagacccgagauacgaagagucccuccauaaccccuauccugauuaccacuggcugcggacggugaagaccacaaaagagucucugguuaucauuagccccuccguggcugaccucgauccuuacgacaagagccugcauucucgcgucuuucccgauggcaaauguuccggcaucaccgugagcucuacaugcuguuccaccaaucacgacuauacgauuuggaugccggaaaacccuagacuugggacaagcugcgauaucuucaccaauucucggggaaagcgcgccuccaaaggcgggaagacauguggauuuguggacgagagaggccuguacaagagccucaaaggggcuugcaagcugaaacuuuguggaguccugggccuccggcugauggauggcaccuggguugccauucaaaccuccgacgaaaucaaguggugcucucccgaccagcuggugaaccuccacgauuuccauagcgacgagauugagcaccugguggucgaggaacuugugaaaaagcgcgaagagugccuggaugcgcucgaaacaaucaugacgaccaaauccguuagcuuuagacggcugucucaucuucgcaagcuggugccuggguucggaaaggccuauacaaucuucaauaaaacccucauggaggcugacgcccacuacaaguccauuagaacauggaacgagaucauucccagcaaaggcugucugcgggucgggggacgcugccacccccaugugaauggcguuuucuucaacgggaucauucugggaccugauggccacgugcucaucccggaaaugcagucuagccugcuucaucagcacauggagcugcucgaauccucugucaucccccugaugcauccucuugcugaccccagcaccguguuuaaggauggcgacgaggccgaagauuucgucgaggugcaucugccugacguucacaaacaaauuuccgggguggaucucggacugcccaauuggggcaaguauguccugaucagcgcgggggcccucacggcucugaugcuuaugauuuuucugaugacauguugcagaaaggccaaccgggcugagucuauccagcacaacccgggagaaaccggcagaaaaguguccguuaccagccacaaugggcgcgugauuucuuccugggagagcuacaaguccggcucugaaacaaaacucuga

SEQ ID NO: 223019 - RNA, 1575 nt, Artificial Sequence
  derived and/or modified CDS sequence (opt5) from glycoprotein__RABV__EU275241.1
augaucccccaggcccugcucuuugugccucugcuugucuuuagcuccagauucggcaaguuuccgauuuacaccauccccgacaaacuggggccuuggucucccauugauauccaccaucucagcugcccuaacuaucugguuguggaggacgaaggauguacaaaucuuuccggcuucucuuacauggagcugaaggugggguauauuagcgcuaucaaagucaacggauuuacgugcaccggcgugguuacagaagccgagaccuacacaaauuucgugggguaugucaccacaaccuuuaagcggaaacacuuccgccccacgccugaugcguguagagcugccuacaacuggaagauggccggagacccgcgguaugaagagucccuccauaaucccuacccugauuaccacuggcugcgcaccgugaagacaucuaaagagagccugguuaucauuucccccagcguggcugaccucgauccuuaugacaagccccugcauucuagagucuuuccgggcggcaaaugcuccgggaucaccgugagcucuacauguugcuccaccaaccacgauuacacgauuuggaugccugaaaauccccggcuucgcacaagcugugacaucuucaccaacucuagaggaaagcgggccuccaaaggcgggaagacaugcggauuuguggaugagcgcggccuguauaagagccucaaaggggcuuguaagcugaaacuuugcggaguccugggccucagacugauggacggcaccuggguugccauucaaaccuccgaugaaaucaagugguguucuccugaccagcuggugaaucuccacgacuuccauagcgaugagauugagcaccugguggucgaggaacuugugaaaaagcgggaagagugccuggacgcgcucgaaacaaucaugacgaccaaauccguuagcuuucgcagacugucucaucuucggaagcuggugcccggguucggaaaggccuacacaaucuucaacaaaacccucauggaggcugaugcccacuauaaguccauucgcacauggaaugagaucauucccagcaaaggcugccugagagucgggggacggugucacccucaugugaacggcguuuucuucaaugggaucauucugggaccggacggccacgugcucauccccgaaaugcagucuagccugcuucaucagcacauggagcugcucgaauccucugucaucccucugaugcauccccuugcugauccuagcaccguguuuaaggacggcgaugaggccgaagacuucgucgaggugcaucugcccgauguucacaaacaaauuuccgggguggaccucggacugccgaacuggggcaaguacguccuggugagcgcgggggcccucacggcucugaugcuuaugaucuuucugaugacaugcuguagaaagaccaaucgcgccgagucuauucagcacuccccuggagaaaccggccggaaaguuagcgugacaucucacaacgggagagucaucuccagcugggaguccuauaagucuggcagcgaaaccaaacucuga

SEQ ID NO: 223020 - RNA, 1575 nt, Artificial Sequence
  derived and/or modified CDS sequence (opt5) from glycoprotein__RABV__EU275242.1
augacaccccaggcccuucucuucgugccucugcuugucuuuagccugugcuucggcaaguuuccgaucuacaccauucccgacaaacucgggccuuggucccccaucgauauucaccaucugucuuguccuaacaaucuuguuguggaggacgaaggaugcacgaaccugcccggcuucagcuauauggagcucaaggugggguacaucuccgcuauuaaagucaauggauuuaccuguacaggcgugguuaccgaagccgagacauauaccaacuucgugggguacgucacaaccacguuuaagagaaaacacuuccggccuaccccggaugcgugccgcgcugccuauaauuggaagauggccggagaccccagauacgaagagucucugcauaacccuuaucccgauuaccacuggcugcggacagugaagaccacaaaagagagccucguuaucaucuccccuucugugagcgaccugggccccuacgauaagucccuucauagccgcgucuuuccgucuggcaaauguuccgggauuaccgugagcucuacguauugcccuacaaaucacgacuacaccaucuggaugcccgaaaacccuagacugggaacauccugugauauuuucaccaauagccggggcaagcgcgcuucuaaaggguccaagaccugcggauuuguggacgagagaggccucuauaagagccugaaaggggccuguaagcugaaacugugcggaguccucggccugcggcugauggauggcacaugggcugccauccaaacguccgacgaagcgaagugguguccucccgaucagcucguuaacauucacgacuuccgcucugacgagaucgagcaucuggugguggaggaacuugucaaaaagagagaagagugccuggaugcccucgaaagcauuaugaccacaaaauccgugagcuuucggcgccugucucaccuuagaaagcugguucccggguucggaaaggcuuacaccaucuucaauaaaacacucauggaggccgacgcucauuauaaguccgugcggaccuggaacgagaucauuccgagcaaaggcugccugcgcgucgggggaagaugucacccccacgccaauggcguguuuuucaacgggaucauucugggaccugauggccauguucucauccccgaaaugcagucuagccugcuucagcaacacauggagcugcucgaauccucugugauuccucugaugcauccccuugcggacccgagcacggucuuuaaggauggcgacgaggccgaagauuucguggagguccaucugccugacgugcacaaacagguuuccgggguggaucucggacugcccagcuggggcaaguacguccugaugucugugggggcucucaucgcccugaugcuuaugaucuuucuggcuacaugcugucggaaggccaauggagccgaguccauucagcacagacucggcgaaaccgggcgcaaaguuagcgugaccucucagaacggccgggucaucuccagcugggaguccuauaagucuggaggcgaaacaaaacuguga

SEQ ID NO: 223021 - RNA, 1575 nt, Artificial Sequence
  derived and/or modified CDS sequence (opt5) from glycoprotein__RABV__EU293111.1
augaucccccaggcccuccuguuccugccucuucugguguuuagccucugcuccggcaaguucccgauuuacaccauccccgacaaacuggggccuuggucucccauugauauccaccaucuuagcuguccuaacaaucuggucguugaggacgaaggaugcacaaaccucuccggcuuuucuuauauggagcugaaggugggguacauuagcgcuaucaaagugaauggauucacguguaccggcgucgugacagaagccgagaccuauacaaacuuuguuggguacgugaccacaaccuucaagagaaaacacuuucggcccacgccugaugcgugccgcgcugccuauaauuggaagauggccggagacccgagauacgaagagucccugcauaaccccuauccugauuaccacuggcuccggaccgucaagacaaccaaagagucucuggugaucauuagccccuccguuagcgaccuugauccuuacgacaagucucugcauucccgcguguuccccagcggcaaauguucuggcaucacagucuccagcaccuauugcccgacgucucacgauuacacaauuuggaugccugaaaaucccagacucgggaccuccugugacaucuuuauuaacagccggggaaagcgcgcuuccaaaggcucuaagacaugcggguucguggaugagagaggacuguauaagagccuuaaaggcgccuguaagcugaaacucugcggggugcugggacugcggcucauggacggcaccugggucgcuauccaaaccuccgaugaagccaagugguguccucccgaccagcugguuaauauucacgacuuucauagcgaugagaucgagcaccuugugguggaggaacuggucaaaaagcgcgaagagugccucgacgcgcuggaaucuaucaugacaacgaaauccgugagcuucagacggcuuucucaucugcgcaagcucguucccggcuuugggaaggccuacaccauuuucaacaaaacacugauggaggcugaugcccacuauaagagcgugagaaccuggaaugagaucauuccuuccaaaggaugccugcgggucggcgggcgcugucacccgcaugugaacggaguuuucuuuaauggcaucauucucgggcccgacggacacgugcugaucccugaaaugcagucuagccuucugcagcaacauauggagcuccuggaauccagcgucaucccccuuaugcacccucuggcugaucccucuacaguguucaaggacggcgaugaggccgaagacuuugucgaggugcaucucccggauguucacaaacagguguccggcgucgaccuggggcugccuaacuggggaaaguacgugcucguuagcgugggcgcgcugauugcccuuaugcugaugaucuuccucaugaccugcuguagaaaggcuaauggggucgagucuaugcagcaccggcugggagaaacgggcagaaaaguguccgugacaagccaguccgggcgcguuauuucuagcugggaguccuauaagucuggcggagaaaccaaacuguga

SEQ ID NO: 223022 - RNA, 1575 nt, Artificial Sequence
  derived and/or modified CDS sequence (opt5) from glycoprotein__RABV__EU293115.1
auggugccccaggcccuccuguucgucccucugcuuguuuuuagccugugcuucggcaaguuuccgaucuacaccauucccgacaaacucgggccuuggucccccaucgauauucaccaucugucuuguccuaacaaucuugugguggaggacgaaggaugcacaaaccugagcggcuucuccuauauggagcucaaggucggguacaucucuagcauuaaagugaauggauuuacguguaccggcguugugacagaagcugagaccuauacaaacuucgucggguacgugaccacaaccuuuaagagaaaacacuuccggcccacgccugaugccugccgcgcggcuuauaauuggaagauggccggagacccgagauacgaagagucccugcauaaccccuauccugauuaccacuggcugcggaccguuaagacaaccaaagagucucucgugaucaucagccccuccgucgccgaccuggauccuuacgacaagagccuucauucucgcguguuucccggcggcaaauguuccgggauuacagugagcucuaccuauugcuccacgaaucacgauuacacaaucuggcugccggaaaacccuagacucggaaccagcugugacauuuucacaaauucucggggcaagcgcgcuuccaaagggagcaagaccugcggauuugucgaugagagaggccuguauaagucccuuaaaggggccuguaagcugaaacucugcggaguucugggccugcggcucauggacggcaccuggguggcuaugcaaacaucugaugaaacgaaguggugucccccugaccagcuggugaaccuucacgacuuccgcagcgaugagaucgagcaucuggucguggaggaacucguuaaaaagagagaagagugccuggacgcccuugaauccauuaugaccacaaaaagcgugucuuuucggcgccugucccaccucagaaagcugguccccggguucggaaaggcguacaccaucuucaauaaaacacugauggaggccgaugcucauuauaagagcgugcggaccuggaacgagauuauccccucuaaaggcugccuccgcguugggggaagaugucaccaccaugugaauggcgucuuuuucaacgggaucauucugggaccugacggccacgugcuuaucccggaaaugcagagcucccugcuccagcaacauauggagcugcuugaaucuagcgucauuccccugaugcacccucucgccgaucccuccacgguguuuaaggacggcgaugaggcugaagacuucguugaggugcaucugccugauguccacaaacaggugagcgggguugaccugggacuccccaauuggggcaaguacgugcugcuuucugccggggcgcuggucgcccucaugcugaucauuuuucugaugacaugcugucggagagugaaccgcccggaguccacccggcgcagcuucggaggcaccgaaagaaaggugucuaucacaccucaguccgggaaaguuaucagcuccugggagucuuauaagagcggcuccgaaacccggcuuuga

SEQ ID NO: 223023 - RNA, 1575 nt, Artificial Sequence
  derived and/or modified CDS sequence (opt5) from glycoprotein__RABV__EU293116.1
augauccugcaggcccuccuguucgugccccuucugauuagcucccucugcuuuggcaaguucccuaucuacaccauuccggacaaacuggggcccuggucuccuaucgauauucaccaucuuagcugucccaacaaucuggucguugaggacgaaggaugcacaucccucucuggcuuuagcuauauggagcugaaggugggguacaucuccgcuaucaaagugaacggauucacguguaccggcgucgugacagaagccgagaccuauacaaauuuuguuggguacgugaccacaaccuucaagagaaaacacuuucggccuacgcccgaugcgugccgcgcugccuauaacuggaaggucgccggagacccuagauacgaagagucucugcaaaauccguaucccgauuaccauuggcuccggaccgugaagacaaccaaagagagccugauuaucauuuccccuagcguugcugaccuugaucccuacgacaagucucugcacucccgcguguucccuagcggcaaaugucucggcaucacaauuucuuccaccuauugcagcacgaaccaugauuacacaaucuggaugcccgaagaggccagacuggggaccucuugugacauuuuuacaaauuccaaggggaaaaaggcuagcaagggcgggcggaccugcggauucgucgaugaacgcggccuuuauaaaucccugaagggggccuguaaacucaagcugugcggagugccgggccugagacucauggacggcaccugggugacaauccagacgucugaugagaccaaaugguguccucccgaccagcuggucaaccuucacgacuuucacagcgaugagaucgaacaucugguuguggaggaacucgugaagaaacgggaggaaugccuggacgcgcuugaguccauuaugacaaccaagagcgucucuuuccgcagacugucccaccuccggaagcuggugccuggguuuggaaaagccuacacaaucuucaauaagacccugauggaggcugaugcccauuauaaaagcguucgcacguggaacgaaauuauccccucuaagggcugccucaaagugggaggaagaugucacccccacgucgacggcguguucuuuaaugggauuauccugggaccugauggcaacguucuuaucccggagaugcagagcucccugcuccaacagcauauggaacugcuugagucuagcgugauuccccugaugcacccucucgcugaccccuccacagucuucaaggauggcgacgaagccgaggauuuuguggagguccaucugccugacgugcacaagcagaucagcgggguugaucugggacuccccaauuggggcaaauaccugcuuaugauugcgggggcccuggcuggacucauccugauuaucuuccugauggccugcugucggcgcgcuaagagaaccgaaucucggagacgcggcuccggggagagcgaacggaaagugccggucccuccccagaacggcaaggugaucucuuccugggagcuuuauaaaagcgaaggagagaccggccucuga

SEQ ID NO: 223024 - RNA, 1575 nt, Artificial Sequence
  derived and/or modified CDS sequence (opt5) from glycoprotein__RABV__EU293121.1
augaucccccaggcccugcucuuugugccucugcuugucuuuagccugugcuucggcaaguuuccgauuuacaccauccccgacaaacucgggccuuggucccccauugauauccaccaucugucuuguccuaacaaucuuguuguggaggacgaaggaugcacaaaccugagcggcuucuccuauauggagcucaaggugggguacauuucugcuaucaaagucaauggauuuacguguaccggcgugguuacagaagccgagaccuauacaaacuucgugggguacgucaccacaaccuuuaagagaaaacacuuccggcccacgccugaugcgugccgcgcugccuauaauuggaagauggccggagacccgagauacgaagagagccugcauaaccccuauccugauuaccacuggcugcggaccgugaagacaaccaaagagucccucguuaucauuucucccagcguguccgaccuggauccuuacgacaagagccuucauucucgcgucuuucccuccggcaaauguagcggcaucacagugucuuccaccuauugcccgacgaaucacgauuacacaauuuggaugccugaaaaccccagacuggggaccagcugugacaucuucacaaauucucggggaaagcgcgcuuccaaaggcagcaagaccugcggguuuguggaugagagaggacucuaucggucccugaagggcgccuguaaacuuaagcugugcgggguccucggacugcgccugauggacggcaccugggcugccauucaaacaucugaugaagcgaaaugguguccucccgaccagcucguuaacauccacgacuucagaagcgaugagauugagcaucuggugguggaggaacuugucaagaaacgggaagagugccuggacgcccucgaauccaucaugacgaccaagagcgugucuuuucgcagacugucccaccuucggaaacugguucccggcuucgggaaggcuuacacaaucuucaauaagacccucauggaggccgaugcucauuauaaaagcgugcgcacauggaacgagauuaucccuucuaagggaugccugagagucggcgggcggugucacccgcacgugaauggaguuuucuucaacggcauuauccuggggcccgacggacaugugcucauuccugaaaugcagagcucccugcuuagacagcacauggagcugcucgaaucuagcgucaucccccugaugcauccucuugccgaucccuccaccguguuuaaagacggcgaugaggcggaagacuucgucgaggugcaucugccggauguucacgagcaaaucagcggcguggaccucgggcugccuucuuggggaaaguacguccugauguccgugggcgccaugauugcucucaugcugguuaucuuucuuacgacaugcugucgcaaagccaauggggcugaaaccauucagcaccggcugggagagaccggcagaaaggugagcgucacaucucaguccgggcgcgugaucagcuccugggaaucuuauaagagcggcggagagaccaaacucuga

SEQ ID NO: 223025 - RNA, 1575 nt, Artificial Sequence
  derived and/or modified CDS sequence (opt5) from glycoprotein__RABV__EU352767.1
auggugccccagguccuucucuucguuccucugcuuggcuuuagccugugcuucgggaaguuuccgaucuacaccauucccgacgagcucggaccuuggucccccaucgauauucaccaucugucuuguccuaacaaucuugugguggaagacgagggcugcacaaaccugagcgaguucuccuauauggagcucaaagucggguacaucucugccauuaaggugaauggauuuacguguaccggcguugugacagaagcugagaccuauacaaacuucgucggguacgugaccacaaccuuuaaaagaaagcacuuccggcccacgccugaugccugccgcgcggcuuauaauuggaaaauggccggagacccgagauacgaggaaagccugcauaaccccuauccugauuaccacuggcugcggaccguucgcacaaccaaggagucccucaucaucauuucucccagcgugacagaccuggauccuuacgacaagucccuucauagcagagucuuucccggcggcaaauguucugggaucaccguguccagcacguauugcucuacaaaucacgauuacaccauuuggaugccggaagacccucggccccgcacaccuuguaacaucuucaccaauuccagaggaaagcgggccagcaaaggcaacaagaccugcggguuuguggaugagcgcggacuguauaaaucucucaagggcgcuuguagacugaagcugugcgggguccugggacuccggcugauggacggcacauggguugccaugcaaacguccgaugagaccaaaugguguccucccgaccagcuggugaaucuccacgacuuccauagcgaugaaauugagcaccugguggucgaagaacuugugaagaaacgcgaagagugccuggacgcucucgaguccaucaugacaaccaagucuguuagcuuuagacggcugucccaucuucgcaaacuggugcccggcuucgggaaggccuacacaauuuucaacaaaacccucauggaagcggaugcccacuauaagagcgucagaacguggaaugagaucaucccgucuaagggaugccugaaagugggcgggcggugucacccccauguuaacggaguguuuuucaauggcauuauccuggggccugacggacacguccucauucccgaaaugcaguccagccugcuucagcaacauauggagcugcucaagucuagcgugaucccucugaugcacccccuugcugauccguccacagucuuuaaagaaggcgacgaggccgaggauuucguggaaguucaucugccugacguguacaagagaauuucuggcgucgaucucgggcugcccaacuggggaaaauaugugcugaugaccgcuggcgccaugaucgggcucguucugaucuuuagccuuaugaccuggugccgccgggcgaacagaccugaguccaagcagcgcagcuucggaggcacagggcggaaugugucugucaccucccagagcggcaaggugauucccucuugggaauccuacaaaagcggaggcgagaucagacuguga

SEQ ID NO: 223026 - RNA, 1575 nt, Artificial Sequence
  derived and/or modified CDS sequence (opt5) from glycoprotein__RABV__EU549783.1
augaucccccaggugcugcuguucgucccucugcuuguuuuuagcuccugcuucggcaaguuuccgauuuacaccauccccgacaaacuggggccuuggucucccauugauauccaccaucucagcuguccuaacaaucuggugguggaggacgaaggaugcacaaaccuuuccggcuucucuuauauggagcugaaggucggguacagcuccgccauuaaagugaauggauuuacguguaccggcguugugacagaagcugagaccuauacaaacuucgucggguacgugaccacaaccuuuaagagaaaacacuuccggcccaugccugaugccugccgcgcggcuuauaauuggaagauggccggagacccgagauacgaagagucucuccauaaccccuauccugauuaccacuggcugcggacgguuaagaccacaaaagagagccuggugaucaucucccccagcgucaccgaccucgauccuuacgacaagucucugcauucccgcguguuucccggcggcaaauguagcgggauuacagugucuuccacgugcuguagcaccaaucacgauuauacaaucuggaugccggaaaacccuagacuuggaaccucuugcgacauuuucacaaauucccggggcaagcgcgccagcaaagggggaaagaccuguggcuuugucgaugagagagggcuguacaagucccucaaaggagcuugcaagcugaaacuuuguggcguucugggccuccggcugauggacgggaccuggguggccauccaaacaucugaugaaauuaaguggugcagccccgaccagcuggugaaccuccacgacuuccauuccgaugagaucgagcaccuggucguggaggaacuuguuaaaaagcgcgaagagugccuggacgcucucgaaacgauuaugaccacaaaaagcgugucuuuuagacggcugucccaucuucgcaagcuggucccuggauucggcaaggccuauaccaucuucaauaaaacacucauggaggcggaugcccacuacaagagcaucagaaccuggaacgagauuauccccucuaaagggugucugcgggugggaggccgcugccacccccauguuaaugggguguuuuucaacggaauuauccugggcccugacggccacguccucauuccggaaaugcagagcucccugcuucaucagcacauggagcugcucgaaucuagcgugaucccccugaugcauccucuugcugaucccuccacggucuuuaaggacggggaugaggccgaagacuucguggagguucaccucccugaugugcacaaacaaaucagcggagucgaccucggccugcccaauugggggaaguaugugcugauuucugcuggagcccucacagcgcugaugcuuaccaucuuucugaugaccuguugcagaaagacaaaccgggccggcuccauucagcauagcccugggggcaccggaagaaaaguuucugugacaccgcacaacggccgcgucaucuguuccugggagagcuacaaguccgggucugaaacgaaacucuga

SEQ ID NO: 223027 - RNA, 1575 nt, Artificial Sequence
  derived and/or modified CDS sequence (opt5) from glycoprotein__RABV__EU643590.1
auggugccccaggcccuccuguucgucccucugcuugcuguuccgcugugcuuuggcaaguuccccaucuacaccauuccugacaaacucgggcccuggagcccuaucgauauucaccaucuguccugucccaacaaucuugugguggaggacgaaggaugcacaaaccugucuggcuuuagcuauauggagcucaaggucggguacaucuccgccauuaaagugaauggauucacguguaccggcguugugacagaagcggagaccuauacaaacuuugucggguacgugaccacaaccuucaagagaaaacacuuucggccuacgccggaugcuugccgcucugccuauaauuggaagauggccggagaccccagauacgaagagagccugcauaacccuuaucccgauuaccacuggcugcggaccguuaagacaaccaaagaguccuucgugaucaucucuccuagcgucgcugaccucgaucccuacgacaagucccugcauagccgcguguuuccgagaggcaaauguucuggcauuacaguguccagcaccuauugcucuacgaaucacgauuacacaaucuggaugccugaaaacccccggcuugggaccuccugugacauuuucacaaauagccgcggaaagagagccucuaaaggcuccaagaccugcggguuugucgaugagcggggacuguauaagagccucaaaggcgcuuguaagcugaaacuuugcgggguucugggacuccgccugauggacggcaccuggguggccauccaaacauccgaugaaacgaagugguguccucccgaccagcuggugaaccuccacgacuuccauucugaugagauugagcaccuggucguggaggaacuuguuaaaaagagagaagagugccuggacgcgcucgaaagcaucaugaccacaaaauccgugagcuuucggcgccugucucaucuuagaaagcugguccccggcuucgggaaggccuacaccauuuucaauaaaacacucauggaggcugaugcccacuauaaguccgugcggaccuggaacgagaucaucccuagcaaaggaugccugcgcguuggcgggagaugucacccgcaugugaauggagucuuuuucaacggcauuauccuggggcccgacggacacgugcucauuccugaaaugcagucuagccugcuucagcaacauauggagcugcucgaauccucugucaucccccugaugcacccucuugcugaucccagcacgguguuuaaggacggcgaugaggccgaagacuucguugaggugcaucugccggauguccacaaacagguguccggcguugaccucgggcugccuagcuggggaaaguacgugcugaugucugcgggcauucucacagcccugaugcuuaccaucuuucugaugaccugcugucggagaacaaaucgcgcugaguccauccagcacagccucggggaaaccggacggaaggucucugugacaucccagagcggcagagugauuuccucuugggagagcuauaaauccgggggcgaaacgaagcuguga

SEQ ID NO: 223028 - RNA, 1575 nt, Artificial Sequence
  derived and/or modified CDS sequence (opt5) from glycoprotein__RABV__EU700029.1
augaucccccaggugcugcuguucgucccucugcuuguuuuuagcuccugcuucggcaaguuuccgauuuacaccauccccgacaaacuggggccuuggucucccauugauauccaccaucucagcuguccuaacaaucuggugguggaggacgaaggaugcacaaaccuuuccggcuucucuuauauggagcugaaggucggguacauuagcgccaucaaagugaauggauuuacguguaccggcguugugacagaagcugagaccuauacaaacuucgucggguacgugaccacaaccuuuaagagaaaacacuuccggcccaugccugaugccugccgcgcggcuuauaauuggaagauggccggagacccgagauacgaagagucccuccauaaccccuauccugauuaccacuggcugcggacgguuaagaccacaaaagagucucuggugaucauuagccccuccgucgccgaccucgauccuuacgacaagagccugcauucucgcguguuucccggcggcaaauguuccgggaucaccgugagcucuacaugcuguuccaccaaucacgauuauacgauuuggaugccggaaaacccuagacuuggaacaagcugcgacaucuucaccaauucucggggcaagcgcgcuuccaaagggggaaagacauguggcuuugucgaugagagagggcuguacaagagccucaaaggagccugcaagcugaaacuuuguggcguucugggccuccggcugauggacgggaccuggguggcuauucaaaccuccgaugaaaucaaguggugucccccugaccagcuggugaaccuccacgacuuccauucugaugagauugagcaccuggucguggaggaacuuguuaaaaagcgcgaagagugccuggacgcccucgaaacaaucaugacgaccaaaagcguguccuuuagacggcugagccaucuucgcaagcugguccccggauucggcaaggcguauacaaucuucaauaaaacccucauggaggccgaugcucacuacaagucuauuagaacauggaacgagaucauucccuccaaagggugccugcgggugggaggccgcugccacccucauguuaaugggguguuuuucaacggaaucauucugggcccggacggccacguccucauccccgaaaugcagagcucucugcuucaucagcacauggagcugcucgaaagcuccgugaucccucugaugcauccccuugccgauccuucuaccgucuuuaaggacggggaugaggcugaagacuucguggagguucaccuccccgaugugcacaaacaaauuagcggagucgaccucggccugccgaauugggggaaguaugugcugaucuccgccggagcgcucacggcccugaugcuuacaauuuuucugaugaccuguugcagaaagaccaaccgggcuggcagcauccagcauucuccuggggagacaggcagaaaaguuuccgugaccagccacaacggacgcgucauuucuuccugggaaagcuacaaguccggcucugagacaaaacucuga

SEQ ID NO: 223029 - RNA, 1575 nt, Artificial Sequence
  derived and/or modified CDS sequence (opt5) from glycoprotein__RABV__EU700030.1
auggugccccuggcccuccugcuugucccucugcucguuuucagcuccugcuuuggcaaguucccgaucuacaccauucccgacaaacuggggccuuggucucccaucgauauucaccaucuuagcuguccuaacaaucuggugguggaggacgaaggaugcacaaaccucuccggcuuuucuuauauggagcugaaggucggguacaucagcgcuauuaaagugaauggauucacguguaccggcguugugacagaagccgagaccuauacaaacuuugucggguacgugaccacaaccuucaagagaaaacacuuucggcccaugccugaugcgugccgcgcugccuauaauuggaagauggccggagacccgagauacgaagagucccugcauaaccccuauccugauuaccacuggcuccggacgguuaagaccacaaaagagucucuggugaucaucagccccuccgucgcugaccuugauccuuacgacaagagccugcauucucgcguguuccccggcggcaaauguuccgggauuaccgugagcucuacaugcuguuccaccaaucacgauuauacgaucuggaugccggaaaacccuagacucggaacaagcugcgacauuuuuaccaauucucggggcaagcgcgccuccaaagggggaaagacauguggcuucgucgaugagagagggcuguacaagagccuuaaaggagcuugcaagcugaaacucuguggcguucugggccugcggcucauggacgggaccuggguggccauccagaccuccgaugaaauuaaguggugcucucccgaccaacuggugaaccuucacgacuuucauagcgaugagaucgagcaccuggucguggaggaacucguuaaaaagcgcgaagagugccuggacgcgcuugaaacaauuaugacgaccaaauccgugagcuucagacggcugucucaucuccgcaagcuggucccuggauuuggcaaggccuauacaaucuucaauaaaacccugauggaggcugaugcccacuacaaguccaucagaacauggaacgagauuauccccagcaaagggugucuccgggugggaggccgcugccacccccauguuaaugggguguucuuuaacggaauuauccugggcccugacggccacguccuuauuccggaaaugcagucuagccugcuccaucagcacauggagcugcuugaauccucugugaucccccugaugcauccucucgcugaucccagcaccgucuucaaggacggggaugaggccgaagacuuuguggagguucaucugccugaugugcacaaacagaucuccggagucgaccugggccuccccaauugggggaaguaugugcugauuagcgcgggagcccuuacggcucugaugcucacaaucuuccugaugaccuguugcagaaagaccaaccgggccgagucuauucaacacuccccgggcgaaaucgggagaaaaguuagcgugacaucucacaacggccgcgucauuuccagcugggaguccuacaagucuggaagcgaaaccaaacuguga

SEQ ID NO: 223030 - RNA, 1575 nt, Artificial Sequence
  derived and/or modified CDS sequence (opt5) from glycoprotein__RABV__EU827276.1
auggugccccugacccuccuggucgccccucuucugguucucagccugugcuccggcaaguucccgaucuacacaauucccgacaaacuugggccuuggucucccaucgauauucaccaucugagcuguccuaacaaucucgugguggaggacgaaggaugcacgaaccuguccggcuuuucuuauauggagcugaaggucggguacaucagcgcuauuaaagugaauggauucaccuguacaggcguugugaccgaagccgagacauauaccaacuuugucggguacgugacaaccacguucagacggaagcacuuucgccccaccccugaugcgugcagaacagcuuauaauuggaaaauggccggagacccgcgguacgaagagucccuccauaaccccuauccugauuaccacuggcugcgcaccguuaagacaaccaaggagucucuugugaucaucagccccuccgucgccgaccuggauccuuacgacagaagccuccauucucggguguuccccaauggcaaauguuccggcauuacggugagcucuacauauugcccgaccaaccacgauuacacaaucuggaugccugaaaauccccgccuggggaccuccugugacauuuuugucaacagcagaggaaagcgggcuucuaaaggcuccaagaccugcggguucguugaugagcgcggacuuuauaaaagccugaagggcgccuguaagcucaaacugugcggggugcugggacucagacugauggacggcacauggguggcuaugcggacguccgaugaaaccaagugguguccucccgaccagcuugucaauauccacgacuuucauucugaugagauugagcaccuggugguugaggaacucgugaaaaagcgcgaagagugccuggacgcccuugaaagcaucaugacaaccaaauccgucagcuucagacggcugucucaucuccgcaagcuggugcccggcuuugggaaagcguacacaauuuucaacaagacccugauggaggccgaugcucacuauaaguccguuagaacgugggacgagaucaucccuagcaaaggaugccuccgggugggcgggagaugucacccgcauguccacggaguguuuuucaauggcauuauccuggggcccgauggacauguccuuauuccugaaaugcaaucuagccugcuccagcagcacauggagcugcuugaauccucugugaucccccugaugcauccucucgccgaccccagcacaguuuucaaggaugacgaugaggcugaagacuuuguggagguccaucugccggaugugcacaaacagauuuccggcguugaccugggccucccuaacugggggaaguacgugcugaugagcgccggagcgcuuaucgcccugaugcuccugaucuuccugaugaccugcugucgcaaaauuaagcggcccgagucuacccaacacuccccuagaggcacagggcgcaaggucagcgugaccucucagaauggaaaagugaucuccagcugggaauccuauaagucuggcggggagacacggcuuuga

SEQ ID NO: 223031 - RNA, 1575 nt, Artificial Sequence
  derived and/or modified CDS sequence (opt5) from glycoprotein__RABV__EU827277.1
auggugccccugacccuccuggucguuccucuucuggugcucagccugugcuccggcaaguucccgaucuacacaauucccgacaaacuugggccuuggucucccaucgauauucaccaucugagcuguccuaacaaucucguggucgaggacgaaggaugcacgaaccuguccggcuuuucuuauauggagcugaaggugggguacaucagcgccauuaaaguuaauggauucaccuguacaggcguggucaccgaagcugagacauauaccaacuuugugggguacguuacaaccacguucagacggaagcacuuucgccccaccccugaugccugcagaacagcguauaauuggaaaauggcuggagacccgcgguacgaagagucccuccauaaccccuauccugauuaccacuggcugcgcaccgugaagacaaccaaggagucucuuaucaucauuagccccuccgucgccgaccuggauccuuacgacagaagccuccauucucggguguuccccaauggcaaauguuccggcaucacggugagcucuacauauugcccgaccaaccacgauuacacaauuuggaugccugaaaauccccgccuggggaccuccugugacaucuuugucaacagcagaggaaagcgggccucuaaaggcuccaagaccagcggguucguugaugagcgcggacuuuauaaaucccugaagggcgcuugcaagcucaaacuguguggggugcugggacucagacugauggacggcacauggguggccaugcggacgucugaugaaaccaaguggugcccucccguccagcuugugaauauucacgacuuucauagcgacgagaucgagcaccugguuguggaggaacucgucaaaaagcgcgaagagugucuggaugcucuugaauccauuaugacaaccaaaagcgugucuuucagacggcugucccaucuccgcaagcugguucccggcuuugggaaagccuacacaaucuucaacaagacccugauggaggcggacgcccacuauaagagcgugagaacgugggaugagaucauuccuucuaaaggaugccuccgggucggcgggagaugccacccgcaugugcacggagucuuuuucaauggcaucauucuggggcccgacggacaugugcuuaucccugaaaugcaaagcucccugcuccagcagcacauggagcugcuugaaucuagcguuauuccccugaugcauccucucgcugaucccuccacaguguucaaggacggcgaugaggccgaagacuuugucgaggugcaucugccggauguucacaaacagaucagcggcguggaccuggggcucccuaacuggggaaaguacguccugaugucugcuggcgcccuuaucgcgcugaugcucauuaucuuccugaugaccuguugccgcaaaauuaagcggcccgaguccacccaacacagcccugggggaacaggcagaaaggugucugugaccucccagaaugggaaaguuaucagcuccugggaaucuuauaagagcggcggagagacacgccuguga

SEQ ID NO: 223032 - RNA, 1575 nt, Artificial Sequence; identical to SEQ ID NO: 222930
  derived and/or modified CDS sequence (opt5) from glycoprotein__RABV__EU877067.1

SEQ ID NO: 223033 - RNA, 1575 nt, Artificial Sequence
  derived and/or modified CDS sequence (opt5) from glycoprotein__RABV__FJ418876.1
augaucccccaggcccugcuguucgugccucugcuugucuuuagccugugcuucggcaaguuuccgauuuacaccauccccgacaaacucgggccuuggucccccauugauauccaccaucugucuuguccuaacaaucuuguuguggaggacgaaggaugcacaaaccugagcggcuucuccuauauggagcucaaggugggguacauuucugcuaucaaagucaauggauuuacguguaccggcgugguuacagaagccgagaccuauacaaacuucgugggguacgucaccacaaccuuuaagagaaaacacuuccggcccacgccugaugcgugccgcgcugccuauaauuggaagauggccggagacccgagauacgaagagagccugcauaaccccuauccugauuaccacuggcugcggaccgugaagacaaccaaagagucccucguuaucauuucucccagcguggcugaccuggauccuuacgacaagucccuucauagccgcgucuuucccucuggcaaauguuccggcaucacagugagcucuaccuauugcuccacgaaucacgauuacacaauuuggaugccggaaaacccuagacuggggaccagcugugacaucuucgucaauucucggggaaagcgcgccuccaaaggcagcaagacaugcggguuuguggaugagagaggacucuauaagucccugaaaggcgcuuguaagauuaaacuuugcgggguucugggacuccggcugauggacggcaccuggguggccauccaaaccucugaugaaacaaaguggugucccccugaccagcuggugaaccuccacgacuuccgcagcgaugagauugagcaucuggucguggaggaacuuguuaaaaagagagaagagugccuggacgcgcucgaauccaucaugacgaccaaaagcgugucuuuucggcgccugucccaccuuagaaagcugguccccggcuucgggaaggccuacacaaucuucaauaaaacccucauggaggcugaugcccauuauaagagcgugcggacauggaacgagauuauccccucuaaaggaugccugcgcguuggcgggagaugucacccucacgugaauggagucuuuuucaacggcauuauccuggggccggacggacaugugcucauucccgaaaugcagagcucccugcuucagcaacacauggagcugcucgaaucuagcgucaucccucugaugcauccccuugcugauccuuccaccaucuuuaaggacggcgaugaggccgaagacuucguggagguucaccuccccgaugugcauaaacaggucagcggcguggaccucgggcugccgaauuggggaaaguacguucugaugucugcgggcgcccucauugcucugaugcuuaugaucuuucugaugacgugcugucggaagacagauagaaccggguccacccaccacagcccuggagagacaggccgcaaagugucugucaccucccagaacgggcgggugauugccagcugggaauccuauaagucuggcggagagacaagacucuga

SEQ ID NO: 223034 - RNA, 1575 nt, Artificial Sequence
  derived and/or modified CDS sequence (opt5) from glycoprotein__RABV__FJ418877.1
auggugccccaggcccuucucuucgucccucugcuugcuaucccgcugugcuuuggcaaguuccccauuuacaccaucccugacaaacucgggcccuggagcccuauugauauccaccaucuguccugucccaacaaucuuguuguggaggacgaaggaugcacaaaccugucuggcuuuagcuauauggagcucaaggugggguacauuuccgccaucaaagucaauggauucacguguaccggcgugguuacagaagcggagaccuauacaaacuuugugggguacgucaccacaaccuucaagagaaaacacuuucggccuacgccggaugcuugccgcucugccuauaauuggaagauggccggagaccccagauacgaagagagccugcauaacccuuaucccgauuaccacuggcugcggaccgugaagacaaccaaagaguccuucguuaucauuucuccuagcguggcugaccucgaucccuacgacaagucccugcauagccgcgucuuuccgagaggcaaauguucuggcaucacaguguccagcaccuauugcucuacgaaucacgauuacacaauuuggaugccugaaaacccccggcuugggaccuccugugacaucuucacaaauagccgcggaaagagagccucuaaaggcuccaagaccugcggguuuguggaugagcggggacuguauaagagccucaaaggcgcuuguaagaugaaacugugcgggguccuuggacugcgccucauggacggcaccuggguugccauucaaacauccgaugaaacgaagugguguccucccgaccagcuggugaaccugcacgacuuccauucugaugagaucgagcaccucguggucgaggaacuggugaaaaagagagaagagugccuugacgcgcuggaaagcauuaugaccacaaaauccguuagcuuucggcgccucucucaucugagaaagcuggugcccggcuucgggaaggccuacaccaucuucaauaaaacacugauggaggcugaugcccacuauaaguccguccggaccuggaacgagaucauuccuagcaaaggaugccuccgcgugggcgggagaugucacccgcauguuaauggaguguuuuucaacggcaucauucuggggcccgacggacacguccugaucccugaaaugcagucuagccuccugcagcaacauauggagcuucuggaauccucugugauuccccucaugcacccucuggcugaucccagcacggucuuuaaggacggcgaugaggccgaagacuucguggagguucaucuuccggaugugcacaaacaggucuccggcguggaccuggggcucccuagcuggggaaaguacguucugaugucugcgggcauccugacagcccucaugcugaugaucuuucuuaugaccugcugucggagaaccaaucgcgcugaguccauucagcacagccugggggaaacaggacggaaggugucugucaccucccagagcggcagagugaucuccucuugggagagcuauaaauccgggggcgaaacaaagcucuga

SEQ ID NO: 223035 - RNA, 1575 nt, Artificial Sequence
  derived and/or modified CDS sequence (opt5) from glycoprotein__RABV__FJ418878.1
augaucccccaggugcuucucuucgucccucugcuuguuuuuagcuccugcuucggcaaguuuccgauuuacaccauccccgacaaacuggggccuuggucucccauugauauccaccaucucagcuguccuaacaaucuggugguggaggacgaaggaugcacaaaccuuuccggcuucucuuauauggagcugaaggucggguacauuagcgccaucaaagugaauggauuuacguguaccggcguugugacagaagcugagaccuauacaaacuucgucggguacgugaccacaaccuuuaagagaaaacacuuccggcccaugccugaugccugccgcgcggcuuauaauuggaagauggccggagacccgagauacgaagagucccuccauaaccccuauccugauuaccacuggcugcggacgguuaagaccacaaaagagucucuggugaucauuagccccuccgucgccgaccucgauccuuacgacaagagccugcauucucgcguguuucccggcggcaaauguuccgggaucaccgugagcucuacaugcuguuccaccaaucacgauuauacgauuuggaugccggaaaacccuagacuuggaacaagcugcgacaucuucaccaauucucggggcaagcgcgcuuccaaagggggaaagacauguggcuuugucgaugagagagggcuguacaagagccucaaaggagccugcaagaugaaacuguguggcguucuuggccugcggcucauggacgggaccuggguggcuauucaaaccuccgaugaaaucaaguggugcucucccgaccagcuggugaaccugcacgacuuccauagcgaugagauugagcaccucgucguggaggaacugguuaaaaagcgcgaagagugccuugacgcccuggaaacaaucaugacgaccaaauccgugagcuuuagacggcucucucaucugcgcaagcuggucccuggauucggcaaggcguauacaaucuucaauaaaacccugauggaggccgaugcucacuacaaguccauuagaacauggaacgagaucauucccagcaaagggugucuccgggugggaggccgcugccacccccauguuaaugggguguuuuucaacggaaucauucugggcccugacggccacguccugaucccggaaaugcagucuagccuccugcaucagcacauggagcuucuggaauccucugugaucccccucaugcauccucuggccgaucccagcaccgucuuuaaggacggggaugaggcugaagacuucguggauguucaccuuccugacgugcacaaacaaauuuccggagucgaucugggccuccccaauugggggaaguaugugcugaucagcgccggagcgcugacggcccucaugcugaugauuuuucuuaugacauguugcagaaaggcuaaccgggccgagucuauccagcauaacccgggcgagaccgggagaaaaguuuccgugaccagccacaauggccgcgucauuucuuccugggaaagcuacaaguccggaggcgagacaaaacuguga

SEQ ID NO: 223036 - RNA, 1575 nt, Artificial Sequence
  derived and/or modified CDS sequence (opt5) from glycoprotein__RABV__FJ418879.1
augaucccccaggugcuccuguucgucccucugcuuguuuuuagcuccugccugggcaaguucccgauuuacaccauccccgacaaacucgggccuuggucucccauugauauccaccaucugagcuguccuaacaaucuugugguggaggacgaaggaugcacaaaccuguccggcuuuucuuauauggagcucaaggucggguacauuagcgccaucaaagugaauggauucacguguaccggcguugugacagaagcugagaccuauacaaacuuugucggguacgugaccacaaccuucaagagaaaacacuuucggcccaugcuggaugccugccgcgcggcuuauaauuggaagauggccggagacccuagauacgaagagucccugcauaacccguaucccgauuaccacuggcuccggacgguuaagaccucuaaagagagccuggugaucauuuccccuagcgucgccgaccuugaucccuacgacaagucucugcauucccgcguguucccuggcggcaaauguagcgggaucacagugucuuccacaugcuguagcaccaaucacgauuauaccauuuggaugcccgaaaacccgagacucggaacgucuugcgacaucuuuacaaauucccggggcaagcgcgcuagcaaagggggaaagaccuguggcuucgucgaugagagagggcuguacaagucccuuaaaggagccugcaagguuaaacuguguggcgugcucggccugcggcugauggacgggacauggguggcuauucaaaccucugaugaaaucaaguggugcagcccugaccagcucgucaaccugcacgacuuucauuccgaugagauugagcaccuugugguugaggaacuggugaaaaagcgcgaagagugccucgacgcccuggaaaccaucaugacaacgaaaagcgucucuuucagacggcuuucccaucugcgcaagcucgugcccggauuuggcaaggcguauaccaucuucaauaaaacacugauggaggccgaugcucacuacaagagcauuagaaccuggaacgagaucauuccuucuaaagggugucugcggguuggaggccgcugccacccccaugugaauggggucuucuuuaacggaaucauucucggccccgacggccacgugcugaucccugaaaugcagagcucccuucugcaucagcacauggagcuccuggaaucuagcgucaucccgcuuaugcauccccuggccgauccuuccacaguguucaaggacggggaugaggcugaagacuuuguugaggugcaccuccccgauguccacaaacaaauuagcggaguggaccugggccugccuaauugggggaaguauguucucaucucugccggagcgcugaccgccuccaugcuuaugauuuuccugaugacguguugcagaaagacaaaccgggcugagagcauccagcauucucccggcgaaaccgggagaaaaguguccgucaccagccacaacggccgcgugauuuccucuugggagagcuacaaguccggaggcgaaacaaaacucuga

SEQ ID NO: 223037 - RNA, 1575 nt, Artificial Sequence; identical to SEQ ID NO: 223034
  derived and/or modified CDS sequence (opt5) from glycoprotein__RABV__FJ418880.1

SEQ ID NO: 223038 - RNA, 1575 nt, Artificial Sequence
  derived and/or modified CDS sequence (opt5) from glycoprotein__RABV__FJ418881.1
augaucccccaggugcuucucuucgucccucugcuuguuuuuagcuccugcuucggcaaguuuccgauuuacaccauccccgacaaacuggggccuuggucucccauugauauccaccaucucagcuguccuaacaaucuggugguggaggacgaaggaugcacaaaccuuuccggcuucucuuauauggagcugaaggucggguacauuagcgccaucaaagugaauggauuuacguguaccggcguugugacagaagcugagaccuauacaaacuucgucggguacgugaccacaaccuuuaagagaaaacacuuccggcccaugccugaugccugccgcgcggcuuauaauuggaagauggccggagacccgagauacgaagagucccuccauaaccccuauccugauuaccacuggcugcggacgguuaagaccucuaaagagagccuggugaucauuucccccagcgucgccgaccucgauccuuacgacaagucucugcauucccgcguguuucccggcggcaaauguagcgggaucacagugucuuccacgugcuguagcacaaaucacgauuauaccauuuggaugccggaaaacccuagacccggaacgucuugcgacaucuucacaaauucccggggcaagcgcgcuagcaaagggggaaagaccuguggcuuugucgaugagagagggcuuuacaagucccugaaaggagccugcaagguuaugcucuguggcgugcugggccuucggcugauggacgggacauggguggcuauucaaaccucugaugaaaucaaauggugcagcccugaccagcucgucaaccugcacgacuuccauuccgaugagauugagcaccuggugguugaggaacucgugaagaaacgcgaagagugccuggacgcccuugaaaccaucaugacaaccaagagcgucucuuuuagacggcugucccaucuccgcaaacuggugcccggauucggcaaggcguauaccaucuucaauaagacacuuauggaggccgaugcucacuacaaaagcauuagaaccuggaacgagaucauucccucuaaggggugucugcggguuggaggccgcugccacccucaugugaauggggucuuuuucaacggaaucauucucggcccggacggccacgugcugauccccgaaaugcagagcucccugcuccaucagcacauggagcugcuugaaucuagcgucaucccucugaugcauccccucgccgauccuuccacaguguuuaaagacggggaugaggcugaagacuucguugaggugcaucugcccgauguccacaagcaaauuagcggaguggaccuuggccugccgaauugggggaaauauguucucaucucugccggagcgcugaccgcccugaugcucaugauuuuucugaugacguguugcagaaagacaaaccgggcugaguccauccagcacagcccuggcgaaaccgggagaaaggugucugucaccucccacaacggccgcgugauuagcuccugggagucuuacaaaagcggaggcgaaacaaagcuguga

SEQ ID NO: 223039 - RNA, 1575 nt, Artificial Sequence
  derived and/or modified CDS sequence (opt5) from glycoprotein__RABV__FJ418883.1
augaucccccaggugcuucucuucgucccucugcuuguuuuuagcuccugcuucggcaaguuuccgauuuacaccauccccgacaaacuggggccuuggucucccauugauauccaccaucucagcuguccuaacaaucuggugguggaggacgaaggaugcacaaaccuuuccggcuucucuuauauggagcugaaggucggguacauuagcgccaucaaagugaauggauuuacguguaccggcguugugacagaagcugagaccuauacaaacuucgucggguacgugaccacaaccuuuaagagaaaacacuuccggcccaugccugaugccugccgcgcggcuuauaauuggaagauggccggagacccgagauacgaagagucccuccauaaccccuauccugauuaccacuggcugcggacgguuaagaccacaaaagagucucuggugaucauuagccccuccgucgccgaccucgauccuuacgacaagagccugcauucucgcguguuucccggcggcaaauguuccgggaucaccgugagcucuacaugcuguuccaccaaucacgauuauacgauuuggaugccggaaaacccuagacuuggaacaagcugcgacaucuucaccaauucucggggcaagcgcgcuuccaaagggggaaagacauguggcuuugucgaugagagagggcuguacaagagccucaaaggagccugcaagaugaaacuguguggcguucuuggccugcggcucauggacgggaccuggguggcuauucaaaccuccgaugaaaucaaguggugcucucccgaccagcuggugaaccugcacgacuuccauagcgaugagauugagcaccucgucguggaggaacugguuaaaaagcgcgaagagugccuugacgcccuggaaacaaucaugacgaccaaauccgugagcuuuagacggcucucucaucugcgcaagcuggucccuggauucggcaaggcguauacaaucuucaauaaaacccugauggaggccgaugcucacuacaaguccauuagaacauggaacgagaucauucccagcaaagggugucuccgggugggaggccgcugccacccccauguuaaugggguguuuuucaacggaaucauucugggcccugacggccacguccugaucccggaaaugcagucuagccuccugcaucagcacauggagcuucuggaauccucugugaucccccucaugcauccucuggccgaucccagcaccgucuuuaaggacggggaugaggcugaagacuucguggagguucaccuuccugaugugcacaaacaaauuuccggagucgaccugggccuccccaauugggggaaguaugugcugaucagcgccggagcgcugacggcccucaugcugaagauuuuucuuaugacauguugcagaaaaaccaaccgggcugagucuauccagcauuccccgggcgaaauugggagaaagguuagcgugaccucucacaacggccgcgucaucuccagcugggaguccuacaaaucuggaagcgaaacaaagcuguga

SEQ ID NO: 223040 - RNA, 1575 nt, Artificial Sequence
  derived and/or modified CDS sequence (opt5) from glycoprotein__RABV__FJ418884.1
augaucccccaggugcuucucuucgucccucugcuuguuuuuagcuccugcuucggcaaguuuccgauuuacaccauccccgacaaacuggggccuuggucucccauugauauccaccaucucagcuguccuaacaaucuggugguggaggacgaaggaugcacaaaccuuuccggcuucucuuauauggagcugaaggucggguacauuagcgccaucaaagugaauggauuuacguguaccggcguugugacagaagcugagaccuauacaaacuucgucggguacgugaccacaaccuuuaagagaaaacacuuccggcccaugccugaugccugccgcgcggcuuauaauuggaagauggccggagacccgagauacgaagagucccuccauaaccccuauccugauuaccacuggcugcggacgguuaagaccacaaaagagucucuggugaucauuagccccuccgucgccgaccucgauccuuacgacaagagccugcauucucgcguguuucccggcggcaaauguuccgggaucaccgugagcucuacaugcuguuccaccaaucacgauuauacgauuuggaugccggaaaacccuagacuuggaacaagcugcgacaucuucaccaauucucggggcaagcgcgcuuccaaagggggaaagacauguggcuuugucgaugagagagggcuguacaagagccucaaaggagccugcaagaugaaacuguguggcguucuuggccugcggcucauggacgggaccuggguggcuauucaaaccuccgaugaaaucaaguggugcucucccgaccagcuggugaaccugcacgacuuccauagcgaugagauugagcaccucgucguggaggaacugguuaaaaagcgcgaagagugccuugacgcccuggaaacaaucaugacgaccaaauccgugagcuuuagacggcucucucaucugcgcaagcuggucccuggauucggcaaggcguauacaaucuucaauaaaacccugauggaggccgaugcucacuacaaguccauuagaacauggaacgagaucauucccagcaaagggugucuccgggugggaggccgcugccacccccauguuaaugggguguuuuucaacggaaucauucugggcccugacggccacguccugaucccggaaaugcagucuagccuccugcaucagcacauggagcuucuggaauccucugugaucccccucaugcauccucuggccgaucccagcaccgucuuuaaggacggggaugaggcugaagacuucguggagguucaccuuccugaugugcacaaacaaauuuccggagucgaccugggccuccccaauugggggaaguaugugcugaucagcgccggagcgcugacggcccucaugcugacaauuuuucuuaugauguguugcagaaagaccaaccgggcugagucuauccagcauuccccgggcgaaauugggagaaaaguuagcgugaccucucacaacggccgcgucaucuccagcugggaguccuacaagucuggaagcgaaacaaaacuguga

SEQ ID NO: 223041 - RNA, 1575 nt, Artificial Sequence
  derived and/or modified CDS sequence (opt5) from glycoprotein__RABV__FJ418885.1
auggugccccagguccuucucuucguuccucugcuuguguuuagcuccugcuucggcaaguuuccgaucuacaccauucccgacaaacuggggccuuggucucccaucgauauucaccaucucagcuguccuaacaaucugguggucgaggacgaaggaugcacaaaccuuuccggcuucucuuauauggagcugaaggugggguacaucagcgccauuaaaguuaauggauuuacguguaccggcguggucacagaagcugagaccuauacaaacuucgugggguacguuaccacaaccuuuaagagaaaacacuuccggcccaugccugaugccugccgcgcggcuuauaauuggaagauggccggagacccgagauacgaagagucccuccauaaccccuauccugauuaccacuggcugcggacggugaagaccacaaaagagucucuggucaucaucagccccuccguggccgaccucgauccuuacgacaagagccugcauucucgcguguuucccggcggcaaauguuccgggauuaccgucagcucuacaugcuguuccaccaaucacgauuauacgaucuggaugccggaaaacccuagacuuggaacaagcugcgacauuuucaccaauucucggggcaagcgcgcuuccaaagggggaaagacauguggcuuuguugaugagagagggcuguacaagagccucaaaggagccugcaagaugaaacuguguggcgugcuuggccugcggcucauggacgggaccuggguggcuauccaaaccuccgaugaaauuaaguggugcucucccgaccagcuggucaaccugcacgacuuccauagcgaugagaucgagcaccucgugguugaggaacuggugaaaaagcgcgaagagugccuugacgcccuggaaacaauuaugacgaccaaauccgucagcuuuagacggcucucucaucugcgcaagcuggugccuggauucggcaaggcguauacaaucuucaauaaaacccugauggaggccgaugcucacuacaaguccaucagaacauggaacgagauuauccccagcaaagggugucuccggguuggaggccgcugccacccccaugugaauggggucuuuuucaacggaauuauccugggcccugacggccacgugcugauuccggaaaugcagucuagccuccugcaucagcacauggagcuucuggaauccucugucaucccccucaugcauccucuggccgaucccagcaccguguuuaaggacggggaugaggcugaagacuucguugaggugcaccuuccugauguccacaaacaaaucuccggaguggaccugggccuccccaauugggggaaguauguucugauuagcgccggagcgcugacggcccucaugcugaugaucuuucuuaugacauguugcagaaaggcuaaccgggccgagucuauucagcauaacccgggcgaaaccgggagaaaaguguccgucaccagccacaauggccgcgugaucucuuccugggagagcuacaaguccggaggcgaaacaaaacuguga

SEQ ID NO: 223042 - RNA, 1575 nt, Artificial Sequence
  derived and/or modified CDS sequence (opt5) from glycoprotein__RABV__FJ418886.1
augaucccccaggugcuucucuucgucccucugcuuguuuuuagcuccugcuucggcaaguuuccgauuuacaccauccccgacaaacuggggccuuggucucccauugauauccaccaucucagcuguccuaacaaucuggugguggaggacgaaggaugcacaaaccuuuccggcuucucuuauauggagcugaaggucggguacauuagcgccaucaaagugaauggauuuacguguaccggcguugugacagaagcugagaccuauacaaacuucgucggguacgugaccacaaccuuuaagagaaaacacuuccggcccaugccugaugccugccgcgcggcuuauaauuggaagauggccggagacccgagauacgaagagucccuccauaaccccuauccugauuaccacuggcugcggacgguuaagaccacaaaagagucucuggugaucauuagccccuccgucgccgaccucgauccuuacgacaagagccugcauucucgcguguuucccggcggcaaauguuccgggaucaccgugagcucuacaugcuguuccaccaaucacgauuauacgauuuggaugccggaaaacccuagacuuggaacaagcugcgacaucuucaccaauucucggggcaagcgcgcuuccaaagggggaaagacauguggcuuugucgaugagagagggcuguacaagagccucaaaggagccugcaagaugaaacuguguggcguucuuggccugcggcucauggacgggaccuggguggcuauucaaaccuccgaugaaaucaaguggugcucucccgaccagcuggugaaccugcacgacuuccauagcgaugagauugagcaccucgucguggaggaacugguuaaaaagcgcgaagagugccuugacgcccuggaaacaaucaugacgaccaaauccgugagcuuuagacggcucucucaucugcgcaagcuggucccuggauucggcaaggcguauacaaucuucaauaaaacccugauggaggccgaugcucacuacaaguccauuagaacauggaacgagaucauucccagcaaagggugucuccgggugggaggccgcugccacccccauguuaaugggguguuuuucaacggaaucauucugggcccugacggccacguccugaucccggaaaugcagucuagccuccugcaucagcacauggagcuucuggaauccucugugaucccccucaugcauccucuggccgaucccagcaccgucuuuaaggacggggaugaggcugaagacuucguggagguucaccuuccugaugugcacaaacaaauuuccggagucgaccugggccuccccaauugggggaaguaugugcugaucagcgccggagcgcugacggcccucaugcugcagauuuuucuuaugacauguugcagaaagaccauccgggcugagucuauucagcauuccccgggcgaaaccgggagaaaaguuagcgugacauuccacaacggccgcgucaucucuuccugggagagcuacaaguccggaucugaaaccaaacuguga

SEQ ID NO: 223043 - RNA, 1575 nt, Artificial Sequence
  derived and/or modified CDS sequence (opt5) from glycoprotein__RABV__FJ418887.1
auggugccccagguccuucucuucguuccucugcuuguguuuagcuccugcuucggcaaguuuccgaucuacaccauucccgacaaacuggggccuuggucucccaucgauauucaccaucucagcuguccuaacaaucugguggucgaggacgaaggaugcacaaaccuuuccggcuucucuuauauggagcugaaggugggguacaucagcgccauuaaaguuaauggauuuacguguaccggcguggucacagaagcugagaccuauacaaacuucgugggguacguuaccacaaccuuuaagagaaaacacuuccggcccaugccugaugccugccgcgcggcuuauaauuggaagauggccggagacccgagauacgaagagucccuccauaaccccuauccugauuaccacuggcugcggacggugaagaccacaaaagagucucuggucaucaucagccccuccguggccgaccucgauccuuacgacaagagccugcauucucgcguguuucccggcggcaaauguuccgggauuaccgucagcucuacaugcuguuccaccaaucacgauuauacgaucuggaugccggaaaacccuagacuuggaacaagcugcgacauuuucaccaauucucggggcaagcgcgcuuccaaagggggaaagacauguggcuuuguugaugagagagggcuguacaagagccucaaaggagccugcaagaugaaacuguguggcgugcuuggccugcggcucauggacgggaccuggguggcuauccaaaccuccgaugaaauuaaguggugcucucccgaccagcuggucaaccugcacgacuuccauagcgaugagaucgagcaccucgugguugaggaacuggugaaaaagcgcgaagagugccuugacgcccuggaaacaauuaugacgaccaaauccgucagcuuuagacggcucucucaucugcgcaagcuggugccuggauucggcaaggcguauacaaucuucaauaaaacccugauggaggccgaugcucacuacaaguccaucagaacauggaacgagauuauccccagcaaagggugucuccggguuggaggccgcugccacccccaugugaauggggucuuuuucaacggaauuauccugggcccugacggccacgugcugauuccggaaaugcagucuagccuccugcaucagcacauggagcuucuggaauccucugucaucccccucaugcauccucuggccgaucccagcaccguguuuaaggacggggaugaggcugaagacuucguugaggugcaccuuccugauguccacaaacaaaucuccggaguggaccugggccuccccaauugggggaaguauguucugauuagcgccggagcgcugacggcccucaugcugaugaucuuucuuaugacauguugcagacgggcuaacagagccgagucuauucagcauaacccgggcgaaaccgggcgcaagguguccgucaccagccacaauggccgggugaucucuuccugggagagcuacaaauccggaggcgaaacaaagcuguga

SEQ ID NO: 223044 - RNA, 1575 nt, Artificial Sequence
  derived and/or modified CDS sequence (opt5) from glycoprotein__RABV__FJ465384.1
auggugagccagucccuccuguucgucccccugcuuggcuuuucucugugcuucgggaaguuuccuaucuacaccauuccggacaaacucggacccuggagcccuaucgauauucaccaucuguccugucccaacaaucuuguuguggaggacgaaggcugcacaaaccugucuggguucagcuauauggagcucaaggugggauacaucuccgccauuaaagucaauggcuuuacguguaccggggugguuacagaagcugagaccuauacaaacuucgugggauacgucaccacaaccuuuagacggaagcacuuccgcccuacgcccgaugccugcagagcggcuuaucauuggaaaauggccggcgacccucgguacgaagagucucugcacaauccguaucccgauuaccauuggcugcgcaccgugaagacaaccaaggagagccucguuaucaucuccccuagcguggccgaccuggaucccuacgacaaaucucuucacuccagagucuuuccuaacggcaaguguagcgggcugacagugucuuccaccuauugcagcacgaaucacgauuacacaauguggaugcccgaaaacccgcggcucggaaccucuugugacauuuucacaaauucccgcggcaaaagagcuagccgggggaacaagaccugcggauuuguggaugagcgcggccuguauaaaucccuuaagggggccuguaagcugaaacucugcggaguccugggccugagacucaucgacggcaccuggguugcuaugcaaacaucugaugaaacgaagugguguccucccgaccagcuggugaaucuucaugacuuccggagcgaugagauugagcaccugguggucgaggaacucgugaaaaagcgcgaagagugccuggacgcccuugaauccaucaugaccacaaaaagcguuucuuuuagacggcugucccaucuccgcaagcuggugccuggguucggaaaagcguacaccauuuucaacaagacacugauggaggccgaugcucacuauaagagcaucagaaccugggacgagauuguccccucuaaaggcugccuccggguugggggaaagugucacccccauaucaauggcguguuuuucaacgggaucauucugggaagcgauggccacgugcuuaucccugaaaugcaguccucucugcuccagcaacauauugagcugcuugaaagcuccgucgugccgcugaugcacccccucgccgacccuagcacggucuuuaaagauggcaaugaggcugaagacuucguggagguucaucugcccgaugugcacaagcaggucucugagaucgaccuggggcucccuaacuggggaaaauacauucugguguccgccggcgcgcuuaucgcccugaugcucacaauccugcugauuaccugcuguagacgcguucaccggcccgaaccgaagcagcauagacuucgcgggaccgagcggaagguggcugucacaagccagucuggaaaagccaucuccagcugggaauccuauaagaacggcggggagaccagaauguga

SEQ ID NO: 223045 - RNA, 1575 nt, Artificial Sequence
  derived and/or modified CDS sequence (opt5) from glycoprotein__RABV__FJ465385.1
auguucccccaggcccugcucuuugugccucugcuuggccugagccucugcuccgggagauucccgaucuacaccauucccgacaagcugggaccuuggucucccaucgauauucaccaucuuagcuguccuaacaaucuggucguugaggacgaaggcugcacaaaccucuccggguuuucuuauauggagcugaaagugggauacaucagcuccauuaaggugucuggcuucacguguaccggggucgugacagaagcugagaccuauacaaauuuuguuggauacgugaccacaaccuuccggcgcaaacacuuuagacccacgccugaugccugccgggcggcucauaacuggaagauggccggcgacccgcgcuaugaagagagccugcacaaucccuacccugauuaucauuggcucagaaccgucaaaacaaccaaggagucccuggugaucaucagccccucuguugccgaccuugauccuuacgacaagucccugcacagccggguguuccccaacggcaaauguucugggcucacagucuuuuccaccuacugcagcacgaaucacgaauauacaguguggaugccggagaacccucgccugggaaccucuugugauauuuucacaaauuccagaggcaagcgggcuagcaaagggaacaagaccugcggauuuguggacgaacgcggccuuuacaaaucccugaagggggccuguaagcucaaacugugcggaguccugggccucagacugauggauggcaccuggguugcuaugcaaacaucugacgagacgaaguggugucccccugaucagcuugugaaucugcaugacuuccggagcgacgagaucgaacaccucguggucgaggaacuggugaaaaagcgcgaggaaugccuugaugcccuggaguccauuaugaccacaaaaagcguuucuuuuagacggcucucccaucugcgcaagcuggugcccggguucggaaaagcguauaccaucuucaacaagacacucauggaggccgacgcucacuacaagagcgucagaaccuggaaugaaauuauccccucuaaaggcugccugcggguugggggaagaugucacccucaugugaacggcguguuuuucaaugggauuauccuuggaagcgauggccacguccugaucccggagaugcaguccucucuccugcagcaacauguggaacuucuggagagcuccgucauuccccucaugcacccucuggccgaccccagcacgguguuuaagggcggggaugaagcugaggacuucguugaggugcaucugccugauguccacaaacaggugucuggaguugaccucggccugcccaacugggggaaguauauccuuguguccgccggagcgcugauugcccucauccugauuaucuuucugaugacaugcugucgccgguucagacgcccgaaaccugcucagcacaaccuuggcgggaccggccggaaggucagcgugaccucucaguccggaaaggugguuagcuccugggaaucuuacaaaaauggcggggagacaagacucuga

SEQ ID NO: 223046 - RNA, 1575 nt, Artificial Sequence
  derived and/or modified CDS sequence (opt5) from glycoprotein__RABV__FJ465386.1
auguucagcagaucccugcucuuugugucucugcuuggcuucccccugugcuuugggaaguucccuaucuacaccauuccggacaaacucggacccuggagcccuaucgauauucaccaucuguccugucccaacaaucuugucguugaggacgaaggcugcacaaaccugucuggguuuagcuauauggagcucaaggugggauacaucuccgccauuaaagugaauggcuucacguguaccggggucgugacagaagcugagaccuauacaaacuuuguuggauacgugaccacaaccuuccggcgcaagcaccugagaccuacgcccgaugccugccggucugcguauaauuggaaaauggcuggcgacccucgcuacgaagagagccugcauaacccguaucccgauuaccacuggcucagaaccgucaagacaaccaaggagucccuggugaucaucagcccuucuguugccgaccuugaucccuacgacaaaucccugcauagccggguguuuccuaauggcaaguguucugggcucacagucuccagcaccuauugcucuacgaaccacgauuacacaauuuggaugcccgaaaauccgcgccugggaaccuccugugacaucuucacaaacagcaaaggcaagagagccucccgggggaauaaaaccugcggauuuguggaugagcgcggccuuuauaagucucugaagggggcuuguaaacucaagcugugcggagugcugggccucagacugauugacggcaccugggucgccaugcacacaagcgaugaaacgaaaugguguccucccgaccagcuuguuaaccugcaugacuuccgguccgaugagaucgagcaccucgugguggaggaacuggucaagaaacgcgaagagugccuugacgcucuggaaagcauuaugaccacaaagucuguguccuuuagacggcucagccaucugcgcaaacugguuccuggguucggaaaggccuacaccaucuucaauaagacacucauggaggcggaugcccacuauaaaucuauuagaaccugggacgagaucgugcccagcaagggcugccugcgggucgggggaagaugucacccccaugugaacggcguguuuuucaaugggaucauucuuggauccgauggccacgugcugaucccugaaaugcaaucuagccuccugcagcagcaugucgagcuucuggaauccagcguggucccgcucaugcacccccuggcugacccuucuacgguguuuaaagauggcaacgaggccgaagacuucguugaggugcaucugcccgauguccacaagcagguuuccgggguugaccucggacugccugauuggggcaaauacauucuugugagcgcuggggcccugaucgcgcucaugcugauuaucuuucugaugacaugcugucgccgggucuauagacgcgagucuaagcaacacucccuucggggaaccgaaagaaaggugagcgugaccucccagaacggcaaagccaucucuagcugggaguccuacaagaaugggucugaaacacgcauguga

SEQ ID NO: 223047 - RNA, 1575 nt, Artificial Sequence
  derived and/or modified CDS sequence (opt5) from glycoprotein__RABV__FJ465387.1
auguucagcagaucccugcucuuugugucucugcuuggcuucccccugugcuuugggaaguucccuaucuacaccauuccggacaaacucggacccuggagcccuaucgauauucaccaucuguccugucccaacaaucuugucguugaggacgaaggcugcacaaaccugucuggguuuagcuauauggagcucaaggugggauacaucuccgccauuaaagugaauggcuucacguguaccggggucgugacagaagcugagaccuauacaaacuuuguuggauacgugaccacaaccuuccggcgcaagcaccugagaccuacgcccgaugccugccggucugcguauaauuggaaaauggcuggcgacccucgcuacgaagagagccugcauaacccguaucccgauuaccacuggcucagaaccgucaagacaaccaaggagucccuggugaucaucagcccuucuguugccgaccuugaucccuacgacaaaucccugcauagccggguguuuccuaauggcaaguguucugggcucacagucuccagcaccuauugcucuacgaaccacgauuacacaauuuggaugcccgaaaauccgcgccugggaaccuccugugacaucuucacaaacagcaaaggcaagagagccucccgggggaauaaaaccugcggauuuguggaugagcgcggccuuuauaagucucugaagggggcuuguaaacucaagcugugcggagugcugggccucagacugauugacggcaccugggucgccaugcacacaagcgaugaaacgaaaugguguccucccgaccagcuuguuaaccugcaugacuuccgguccgaugagaucgagcaccucgugguggaggaacuggucaagaaacgcgaagagugccuugacgcucuggaaagcauuaugaccacaaagucuguguccuuuagacggcucagccaucugcgcaaacugguuccuggguucggaaaggccuacaccaucuucaauaagacacucauggaggcggaugcccacuauaaaucuauuagaaccugggacgagaucauccccagcaagggcugccugcgggucgggggaagaugucacccccaugugaacggcguguuuuucaaugggauuauccuuggauccgauggccacguucugauuccugaaaugcaaucuagccuccugcagcagcauguggagcuucuggaauccagcgucgugccgcucaugcacccccuggcugacccuucuacggucuuuaaagauggcaacgaggccgaagacuucguggagguucaucugcccgaugugcacaagcaggucuccgggguggaccucggacugccugauuggggcaaauacauccuuguuagcgcuggggcccugauugcgcucaugcugaucaucuuucugaugacaugcugucgccgggugcacagacgcgagucuaagcaacauucccuucggggaaccgaaagaaaggucagcgugaccucccagaacggcaaagccauuucuagcugggaguccuauaagaaugggucugaaacacgcauguga

SEQ ID NO: 223048 - RNA, 1575 nt, Artificial Sequence
  derived and/or modified CDS sequence (opt5) from glycoprotein__RABV__FJ465388.1
auguucagccagucccugcucuuugugccccugcuuggcuucucucugugcuuugggaaguucccuaucuacaccauuccggacaaacucggacccuggagcccuaucgauauucaccaucuguccugucccaacaaucuugucguugaggacgaaggcugcacaaaccugucuggguuuagcuauauggagcucaaggugggauacaucuccgccauuagagugucuggcuucacguguaccggggucgugacagaagcugagaccuauacaaauuuuguuggauacgugaccacaaccuucaaacggaagcacuuucgcccuacgcccgaugccugcagagcggcuuaucauuggaaaauggccggcgacccucgguacgaagagagccugcacaacccguaucccgauuaccauuggcugcgcaccgucaagacaaccaaggagucccucgugaucaucagcccuucuguugccgaccuggaucccuacgacaaaucccuucacagcagaguguucccuaauggcaaguguucugggcugacagucuccagcaccuauugccucacgaaccacgauuacacaauuuggaugcccgaaaauccgcggcugggaaccucuugugacaucuuuacaaacucccgcggcaaaagagcuagccgggggaauaagaccugcggauucguggaugagcgcggccuuuauaaaucccugaagggggccuguaagcucaaacugugcggagugcugggccucagacugauugacggcaccugggucgcuaugcaaacaucugaugaaacgaagugguguccucccgaccagcuuguuaaccugcaugacuuucggagcgaugagaucgagcaccucgugguggaggaacuggucaaaaagcgcgaagagugccuugacgcccuggaauccauuaugaccacaaaaagcgugucuuucagacggcucucccaucugcgcaagcugguuccuggguucggaaaagcguacaccaucuuuaauaagacacucauggaggccgaugcucacuauaagagcauuagaaccugggacgagaucgugcccucuaaaggcugccugcgggucgggggaagaugucacccccaugugaacggcguuuucuuuaaugggaucauucuuggaagcgauggccacgugcugaucccugaaaugcaguccucucuccugcagcaacaugucgagcuucuggaaagcuccguggucccgcucaugcacccccuggccgacccuagcacgguguucaaggauggcaacgaggcugaagacuuuguugaggugcaucugcccgauguccacaaacaggugucugggguugaccucggacugccuaauuggggcaaguacauucuuguguccgccggggcgcugaucgcccucaugcugacaauuuuccugaugaccugcugucgccgggucagacgccccgagccgaaacagcaccggcuuagaggaaccgaaaagaagguggcugugacaccucagagcggcaaagccaucucuuccugggagagcuauaagaacggggaugaaacccgcauguga

SEQ ID NO: 223049 - RNA, 1575 nt, Artificial Sequence
  derived and/or modified CDS sequence (opt5) from glycoprotein__RABV__FJ465389.1
augcugagccagucccuccugcuugugucucugcucggcuucccccugugcuuugggaaguucccuaucuacaccauuccggacaaacuuggacccuggagcccuaucgauauucaccaucuguccugucccaacaaucucgucguugaggacgaaggcugcacaucucugagcggguuuuccuauauggagcugaaggugggauacaucucugccauuaaagugaacggcuucacguguaccggggucgugacagaagcugagaccuauacaaauuuuguuggauacgugaccacaaccuucagacggaagcaccuccgcccuacgcccgaugccugcagaagcgcguauaacuggaaaauggcuggcgacccucgguacgaagagucccugcauaauccguaucccgauuaccacuggcuucgcaccgucaagacaaccaaggagagccuggugaucaucucuccuuccguugccgaccucgaucccuacgacaaaagccugcauucuagaguguuuccuaacggcaaguguuccgggcuuacagucagcucuaccuauugcuccacgaaucacgauuacacaauuuggaugcccgaaaacccgcggcugggaaccagcugugacaucuucacaaauucccgcggcaaaagagccucucgggggaacaagaccugcggauuuguggaugagcgcggccucuauaaaagccugaagggggcuuguaagcugaaacucugcggagugcugggccuuagacugauugacggcaccugggucgccaugcacacauccgaugaaacgaagugguguccucccgaccaacucguuaaucugcaugacuuccggagcgaugagaucgagcaccuugugguggaggaacuggucaaaaagcgcgaagagugccucgacgcucuggaaucuauuaugaccacaaaauccgugagcuuuagacggcugucucaucuccgcaagcugguuccuggguucggaaaagccuacaccaucuuuaacaagacacuuauggaggcggaugcccacuauaagagcauuagaaccugggacgagaucgugcccuccaaaggcugccugcgggucgggggaagaugucacccccaugugaauggcguuuucuucaacgggaucauucucggaucugauggccacgugcugaucccugaaaugcagagcucccuucugcagcagcaugucgagcuccuggaaagcucuguggucccgcugaugcacccccucgcugacccuuccacgguguuuaaggauggcaaugaggccgaagacuucguugaggugcaucugcccgauguccacaaacaagugagcgggguugaccuuggacugccugauuggggcaaguacauucucgugucugcuggggcccugaucgcgcugaugcuuauuaucuuucucaugacaugcugucgccggguccacagacgcgaguccaaacagcauagccugcggggaaccgaaagaaagguguccgugaucucucagaacggcaagaccauuagcuccugggagucuuauaaaaacgggagcgacacacgcauguga

SEQ ID NO: 223050 - RNA, 1575 nt, Artificial Sequence
  derived and/or modified CDS sequence (opt5) from glycoprotein__RABV__FJ465390.1
auguucagccagacccugcucuuugugccccugcuuggccugucccucugcuucgggaaguuuccuaucuacacaauuccggacaaacugggacccuggucuccuaucgauauucaccaucuuagcugucccaacaaucuggucguugaggacgaaggcugcacgaaccucuccggguucucuuauauggagcugaaggugggauacaucagcgccauuaaagugaauggcuuuaccuguacaggggucgugaccgaagcugagacauauaccaacuucguuggauacgugacaaccacguuuagacggaagcacuuccgcccuacccccgaugccugcagagcggcuuauaauuggaaaauggccggcgacccucgguacgaagagucccugcauaacccguaucccgauuaccacuggcuccgcacagucaagaccacaaaggagucucuggugaucaucagcccuuccguugccgaccuugaucccuacgacaaaagccugcauucuagaguguuucucaauggcaaguguuccgggcugaccgucagcucuacguauugcuccacaaaccacgauuacaccauuuggaugccugaagacccccggcuuggaacaagcugugauaucuucauuaauucucgcggcaaaagagcuuccaaggggagcaaaaccugcggauuuguggacgagcggggccuguauaagucccucaagggggccuguaaacugaagcugugcggagugcucggccugcgccuuaucgauggcaccugggucgcuaugcaaacaucugaggaaccgaaaugguguccucccgaccagcugguuaaccuccacaauuucagaagcgacgagauugaacaucuggugguggaggaacuugucaagaaacgggaggaaugccuggaugcccucgaguccaucauuacgaccaagagcgugucuuuucgcagacugucccaucugcggaaacucguuccuggguucggaaaggcguacacaaucuucaacaagacccugauggaggccgacgcucacuauaaaagcauccgcacaugggaugaaauuauccccucuaagggcugccuuagagucgggggacggugucacccccacgugaauggcguguuuuucaacgggauuauccugggaagcgacggccauguucucauuccugagaugcaguccucucugcuucagcaacacguggaacugcucgagagcuccgucaucccgcugaugcauccccuggccgauccuagcaccguguuuaaaggcggggacgaagcugaggauuucgucgagauccaccuccccgacgugcauaagcagauuucuggaguugaucugggccuuccuaauugggggaaauacauccuggugggagccggcgcgcucauugcccugaugcugaucauuuuucuuaucacgugcuguagaggguuccaccgccccaaguccacacagcacagccucggcggaaccggccggaaggucucugugaccccgcaguccgggaaaguuaucagcuccugggaaucuuauaagaaaggaagcgagacaagacuguga

SEQ ID NO: 223051 - RNA, 1575 nt, Artificial Sequence
  derived and/or modified CDS sequence (opt5) from glycoprotein__RABV__FJ465391.1
augcccagccagucccugcucuuugugucucugcuuggcuuuagccugugcuucgggaaguuuccuaucuacaccauuccggacaaacucggacccugguccccuaucgauauucaccaucugucuugucccaacaaucuugucguugaggacgaaggcugcacaaaccugagcggguucuccuauauggagcucaaggugggauacaucucugccauuaaagugaauggcuuuacguguaccggggucgugacagaagcugagaccuauacaaacuucguuggauacgugaccacaaccuuuagacggaagcacuuccgcccuacgcccgaugccugcagaagcgcguauaauuggaaaauggcuggcgacccucgguacgaagagucccugcauaacccguaucccgauuaccacuggcugcgcaccgucaagacaaccaaggagagccucgugaucaucucuccuuccguugccgaccuggaucccuacgacaaaagccuucauucuagaguguuuccuaauggcaaguguuccgggcugacagucagcucuaccuauugcuccacgaaccacgauuacacaauuuggaugcccgaaaauccgcggcucggaaccagcugugacaucuucacaaacucccgcggcaaaagagccucucgggggaauaagaccugcggauuuguggaugagcgcggccuguauaaaagccuuaagggggcuuguaagcugaaacucugcggagugcugggccugagacucauugacggcaccugggucgccaugcacacauccgaugaaacgaagugguguccucccgaccaacugguuaaccuucaugacuuccggagcgaugagaucgagcaccuggugguggaggaacucgucaaaaagcgcgaagagugccuggacgcucuugaaucuauuaugaccacaaaauccgugagcuuuagacggcugucucaucuccgcaagcugguuccuggguucggaaaagccuacaccaucuucaauaagacacugauggaggcggaugcccacuauaagagcauuagaaccugggacgagaucgugcccuccaaaggcugccuccgggucgggggaagaugucacccccaugugaacggcguuuucuucaaugggaucauucugggaucugauggccacgugcuuaucccugaaaugcagagcucccugcuccagcagcaugucgagcugcuugaaagcucuguggucccgcugaugcacccccucgcugacccuuccacgguguuuaaggauggcaacgaggccgaagacuucguugaggugcaucugcccgauguccacaaacaagugagcgggguugaccugggacucccugauuggggccgcuacauucuggugucugcuggggcccuuaucacacugaugcucauuaucuuucugaugaccugcugucggagaguccaccgccgggaguccaagcagcauagccugagaggaaccgaacgcaaaguguccgugacaucucagagcggcaaggcgaucuccucuugggagagcuauaagaacggguccgaaacccggauguga

SEQ ID NO: 223052 - RNA, 1575 nt, Artificial Sequence
  derived and/or modified CDS sequence (opt5) from glycoprotein__RABV__FJ465392.1
auguucccccagacccugcucuuugugccucugcuuggccugagccucugcuucgggaaguuuccgaucuacacaauucccgacaaacugggaccuuggucccccaucgauauucaccaucuuucuuguccuaacaaucuggucguugaggacgaaggcugcacgaaccucagcggguucuccuauauggagcugaaggugggauacaucucugccauuaaagugaauggcuuuaccuguacaggggucgugaccgaagcugagacauauaccaacuucguuggauacgugacaaccacguuuagacggaagcacuuccgccccaccccugaugccugcagagcggcuuauaauuggaaaauggccggcgacccgcgguacgaagagagccugcauaaccccuauccugauuaccacuggcuccgcacagucaagaccacaaaggagucccuggugaucaucucucccagcguugccgaccuugauccuuacgacaaaucccugcauagcagaguguuucucaauggcaaguguucugggcugaccgucuccagcacguauugcucuacaaaccacgauuacaccauuuggaugcccgaaaauccgcggcuuggaacauccugugacaucuucauuaacagccgcggcaaaagagcuucuaaggggaauaaaaccugcggauuuguggaugagcggggccuguauaagucccucaagggggccuguaaacugaagcugugcggagugcucggccugcgccuuaucgacggcaccugggucgcuaugcaaacaagcgaggaaccuaaauggugucccccugaucagcugguuaaccuccacaauuucagauccgacgagauugaacaucuggugguggaggaacuugucaagaaacgggaggaaugccuggacgcccucgagucuaucaugacgaccaagagcguguccuuucgcagacugagccaucugcggaaacucguucccggguucggaaaggcguacacaauuuucaacaagacccugauggaggccgaugcucacuauaaaucuauccgcacaugggacgaaaucauucccuccaagggcugccuuagagucgggggacggugucacccucacgugaauggcguguuuuucaacgggaucauucugggaagcgauggccauguucucaucccggagaugcagucuagccugcuucagcaacacguggaacugcucgaguccucugucauuccccugaugcauccucuggccgaccccagcaccguguuuaaagauggcgacgaagcugaggauuucgucgagauccaccucccugacgugcauaagcagaucuccgggguugaucugggacuucccaacuggggcaaauacauucuggugagcgccggggcgcucaucacgcugaugcugacaauuuuucuuauuaccugcuguagaggauuccgccggccgaagucuacccagcacucccucggcgggacaggcaugaaggucagcgugaccccucagucuggaaaaguuaucuccagcugggaauccuauaagaaaggcggggagacaagacuguga

SEQ ID NO: 223053 - RNA, 1575 nt, Artificial Sequence
  derived and/or modified CDS sequence (opt5) from glycoprotein__RABV__FJ465393.1
auguucagccagucccugcucuuugugccccugcuuggcuucucucugugcagcgggaaguuuccuaucuacaccauuccggacaaacucggacccugguccccuaucgauauucaccaucugucuugucccaacaaucuugucguugaggacgaaggcugcacaaaccugagcggguucuccuauauggagcucaaggugggauacaucucugccauuagagugagcggcuuuacguguaccggggucgugacagaagcugagaccuauacaaauuucguuggauacgugaccacaaccuuuaaacggaagcacuuccgcccuacgcccgaugccugcagagcggcuuaucauuggaaaauggccggcgacccucgguacgaagagucccugcacaacccguaucccgauuaccauuggcugcgcaccgucaagacaaccaaggagagccucaucaucauuucuccuuccguggccgaccuggaucccuacgacaaaagccuucacucuagaguuuuuccuaauggcaaguguuccgggcugacagugagcucuaccuauugcuccacgaaccacgauuacacaaucuggaugcccgaaaauccgcggcucggaaccagcugugacauuuucacaaacucccgcggcaaaagagcuucucgggggaauaagaccugcggauuugucgaugagcgcggccuguauaaaagccuuaagggggccuguaagcugaaacucugcggagugcugggccugagacucaucgacggcaccuggguggcuaugcaaacauccgaugaaacgaagugguguccucccgaccagcuggucaaccuucaugacuuccggagcgaugagauugagcaccugguuguggaggaacucgugaaaaagcgcgaagagugccuggacgcccuugaaucuaucaugaccacaaaauccgucagcuuuagacggcugucucaucuccgcaagcuggugccuggguucggaaaagcguacaccauuuucaauaagacacugauggaggccgaugcucacuauaagagcaucagaaccugggacgagaucguucccuccaaaggcugccuccgggucgggggaagaugucacccccaugugaacggcguguuuuucaaugggauuauccugggaucugauggccacguucuuauuccugaaaugcagagcucccugcuccagcaacauguggagcugcuugaaagcucugucgugccgcugaugcacccccucgccgacccuuccacggucuuuaaggauggcaacgaggcugaagacuucguggagguucaucugcccgaugugcacaaacaggucagcgggguggaccugggacucccuaauuggggccgcuacauccugguuggggccggagcgcuuauugcccugaugcucacaaucuuucugcugaccugcugucggagagugcaccagcccgagccgaagcagcaucgccuucgggaagcugagagaaaagucgccgugaccucucaauccggcaaggcuaucagcuccugggaaucuuauaagaacgggggcgagacacgcauguga

SEQ ID NO: 223054 - RNA, 1575 nt, Artificial Sequence
  derived and/or modified CDS sequence (opt5) from glycoprotein__RABV__FJ465394.1
auguucagcagaucccugcucuuugugucucugcuuggcuucccccugugcuuugggaaguucccuaucuacaccauuccggacaaacucggacccuggagcccuaucgauauucaccaucuguccugucccaacaaucuugucguugaggacgaaggcugcacaaaccugucuggguuuagcuauauggagcucaaggugggauacaucuccgccauuaaagugaauggcuucacguguaccggggucgugacagaagcugagaccuauacaaacuuuguuggauacgugaccacaaccuuccggcgcaagcaccugagaccuacgcccgaugccugccggucugcguauaauuggaaaauggcuggcgacccucgcuacgaagagagccugcauaacccguaucccgauuaccacuggcucagaaccgucaagacaaccaaggagucccuggugaucaucagcccuucuguugccgaccuugaucccuacgacaaaucccugcauagccggguguuuccuaauggcaaguguucugggcucacagucuccagcaccuauugcucuacgaaccacgauuacacaauuuggaugcccgaaaauccgcgccugggaaccuccugugacaucuucacaaacagcaaaggcaagagagccucccgggggaauaaaaccugcggauuuguggaugagcgcggccuuuauaagucucugaagggggcuuguaaacucaagcugugcggagugcugggccucagacugauugacggcaccugggucgccaugcacacaagcgaugaaacgaaaugguguccucccgaccagcuuguuaaccugcaugacuuccgguccgaugagaucgagcaccucgugguggaggaacuggucaagaaacgcgaagagugccuugacgcucuggaaagcauuaugaccacaaagucuguguccuuuagacggcucagccaucugcgcaaacugguuccuggguucggaaaggccuacaccaucuucaauaagacacucauggaggcggaugcccacuauaaaucuauuagaaccugggacgagaucgugcccagcaagggcugccugcgggucgggggaagaugucacccccaugugaacggcguguuuuucaaugggaucauucuuggauccgauggccacgugcugaucccugaaaugcaaucuagccuccugcagcagcaugucgagcuucuggaauccagcguggucccgcucaugcacccccuggcugacccuucuacgguguuuaaagauggcaacgaggccgaagacuucguugaggugcaucugcccgauguccacaagcagguuuccgggguugaccucggacugccugauuggggcaaauacauucuugugagcgcuggggcccugaucgcgcucaugcugauuaucuuucugaugacaugcugucgccggguccacagacgcgagucuaagcaacauucccuucggggaaccgaaagaaaggugagcgugaccucccagaacggcaaagccaucucuagcugggaguccuauaagaaugggucugaaacacgcauguga

SEQ ID NO: 223055 - RNA, 1575 nt, Artificial Sequence
  derived and/or modified CDS sequence (opt5) from glycoprotein__RABV__FJ465395.1
augagcucccagucucuccuguucgugagccugcuuggcuuuucccugugcuucgggaaguuucccaucuacaccauuccugacaaacucggaccguggucucccaucgauauucaccaucugagcuguccuaacaaucuugucguugaggacgaaggcugcacaaaccuguccggguucucuuauauggagcucaaggugggauacaucagcgccauuaaagugaauggcuuuacguguaccggggucgugacagaagcugagaccuauacaaacuucguuggauacgugaccacaaccuuuagacggaagcacuuccgccccacgccugaugccugcagauccgcguauaauuggaaaauggcuggcgacccccgguacgaagagagccugcauaacccuuauccggauuaccacuggcugcgcaccgucaagacaaccaaggagucucucgugaucaucucccccagcguugccgaccuggauccuuacgacaaaucucuucauuccagaguguuucccaauggcaaguguagcgggcugacagucuucucuaccuauugcuccacgaaccacgauuacacaauuuggaugccugaaaauccccggcucggaaccagcugugacaucuuuacaaacucccgcggcaaaagagccucucgggggaauaagaccugcggauucguggaugagcgcggccuguauaaaagccuuaagggggcuuguaagcugaaacucugcggagugcugggccugagacucauugacggcaccugggucuccaugcacacaagcgaugaaacgaagugguguccgccugaccaacugguuaaccuucaugacuuucggucugaugagaucgagcaccuggugguggaggaacucgucaaaaagcgcgaagagugccuggacgcccuugaauccauuaugaccacaaaaagcgugucuuucagacggcugagccaucuccgcaagcugguucccggguucggaaaggcuuacaccaucuuuaauaaaacacugauggaggccgaugcgcacuauaaguccauuagaaccugggacgagaucgugccuucuaaaggcugccuccgggucgggggaagaugucacccccaugugaacggcguuuucuuuaaugggaucauucugggaagcgauggccacgugcuuauccccgaaaugcaguccagccugcuccagcagcaugucgagcugcuugaaucuuccguggucccucugaugcacccgcucgccgaccccagcacgguguucaaggauggcaacgaggcugaagacuuuguugaggugcaucugccugauguccacaaacaagugucugggguugaccugggacuccccgauuggggccgcuaccugcuuguguccgccggggcucugauuacacucaugcugaucauuuuccugaugaccugcugucggagaguccaccgccgggagagcaagcagcauucccuuagaggaaccgaacgcaaagugucugugacaagccaguccggcaaggccaucucuagcugggaguccuauaagaacgggagcgaaacccggauguga

SEQ ID NO: 223056 - RNA, 1575 nt, Artificial Sequence
  derived and/or modified CDS sequence (opt5) from glycoprotein__RABV__FJ465396.1
augcugagccagucccuccugcuugugucucugcucggcuucccccugugcuuugggaaguucccuaucuacaccauuccggacaaacuuggacccuggagcccuaucgauauucaccaucuguccugucccaacaaucucgucguugaggacgaaggcugcacaaaccugucuggguuuagcuauauggagcugaaggugggauacaucuccgccauuaaagugaauggcuucacguguaccggggucgugacagaagcugagaccuauacaaacuuuguuggauacgugaccacaaccuucagacggaagcaccuccgcccuacgcccgaugccugcagaucugcguauaauuggaaaauggcuggcgacccucgguacgaagagagccugcauaacccguaucccgauuaccacuggcuucgcaccgucaagacaaccaaggagucccuggugaucaucagcccuucuguugccgaccucgaucccuacgacaaaucccugcauagcagaguguuuccuaauggcaaguguucugggcuuacagucuccagcaccuauugcucuacgaaccacgauuacacaauuuggaugcccgaaaauccgcggcugggaaccuccugugacaucuucacaaacagccgcggcaaaagagccucccgggggaauaagaccugcggauuuguggaugagcgcggccucuauaaaucucugaagggggcuuguaagcugaaacucugcggagugcugggccuuagacugauugacggcaccugggucgccaugcacacaagcgaugaaacgaagugguguccucccgaccaacucguuaaccugcaugacuuccgguccgaugagaucgagcaccuugugguggaggaacuggucaaaaagcgcgaagagugccucgacgcucuggaaagcauuaugaccacaaaaucuguguccuuuagacggcugagccaucuccgcaagcugguuccuggguucggaaaagccuacaccaucuuuaauaagacacuuauggaggcggaugcccacuauaagucuauuagaaccugggacgagaucgugcccagcaaaggcugccugcgggucgggggaagaugucacccccaugugaacggcguuuucuucaaugggaucauucucggauccgauggccacgugcugaucccugaaaugcagucuagccuucugcagcagcaugucgagcuccuggaauccagcguggucccgcugaugcacccccucgcugacccuucuacgguguuuaaggauggcaacgaggccgaagacuucguugaggugcaucugcccgauguccacaaacaaguguccgggguugaccuuggacugccugauuggggcaaguacauucucgugagcgcuggggcccugaucgcgcugaugcuuauuaucuuucucaugacaugcugucgccggguccacagacgcgagucuaaacagcauucccugcggggaaccgaaagaaaggugagcgugaucucccagaacggcaaggccauuucuagcugggaguccuauaaaaaugggucugacacccgcauguga

SEQ ID NO: 223057 - RNA, 1575 nt, Artificial Sequence
  derived and/or modified CDS sequence (opt5) from glycoprotein__RABV__FJ465397.1
auggugagccagucccuccuguucgucccccugcuuggcuuuucucugugcuucgggaaguuuccuaucuacaccauuccggacaaacucggacccuggagcccuaucgauauucaccaucuguccugucccaacaaucuuguuguggaggacgaaggcugcacaaaccugucuggguucagcuauauggagcucaaggugggauacaucuccgccauuaaagucaauggcuuuacguguaccggggugguuacagaagcugagaccuauacaaacuucgugggauacgucaccacaaccuuuagacggaagcacuuccgcccuauccccgaugccugcagagcggcuuaucauuggaaaauggccggcgacccucgguacgaagagucucugcacaauccguaucccgauuaccauuggcugcgcacggugaagaccacaaaggagagccucguuaucauuuccccuagcguggccgaccuggaucccuacgacaaaucucuucacuccagagucuuuccuaacggcaaguguagcgggcugaccgugucuuccacauauugcagcaccaaucacgauuacacgaucuggaugcccgaaaacccgcggcucggaacaucuugugacauuuucaccaauucccgcggcaaaagagcuagccgggggaacaagacaugcggauuuguggaugagcgcggccuguauaaaucccuuaagggggccuguaagcugaaacucugcggaguccugggccugagacucaucgacggcaccuggguugcuaugcaaaccucugaugaaacaaagugguguccucccgaccagcuggugaaucuucaugacuuccggagcgaugagauugagcaccugguggucgaggaacucgugaaaaagcgcgaagagugccuggacgcccuugaauccaucaugacgaccaaaagcguuucuuuuagacggcugucccaucuccgcaagcuggugccuggguucggaaaagcguacacaauuuucaacaagacccugauggaggccgaugcucacuauaagagcaucagaacaugggacgagaucguccccucuaaaggcugccuccggguugggggaagaugucacccccauauuaauggcguguuuuucaacgggaucauucugggaagcgauggccacgugcuuaucccugaaaugcaguccucucugcuccagcaacauauggagcugcuugaaagcuccgucgugccgcugaugcacccccucgccgacccuagcaccgucuuuaaggauggcaaugaggcugaagacuucguggagguucaucugcccgaugugcacaaacaggucucugagauugaccuggggcucccuaacuggggaaaguacauccugguguccgccggcgcgcuuaucgcccugaugcucacgauucugcugaucacaugcugucgcaaaguucaccggcccaagccgaagcagcauagacuucgcgggaccgaacggaaaguggcugucaccagccagucuggaaaggccauuuccagcugggaguccuauaaaaacggcggggaaacaagaauguga

SEQ ID NO: 223058 - RNA, 1575 nt, Artificial Sequence
  derived and/or modified CDS sequence (opt5) from glycoprotein__RABV__FJ465398.1
augagcucccagucucugcucuuugugagccugcuuggcuuuucccugugcuucgggaaguuucccaucuacaccauuccugacaaacucggaccguggucucccaucgauauucaccaucugagcuguccuaacaaucuugucguugaggacgaaggcugcacaaaccuguccggguucucuuauauggagcucaaggugggauacaucagcgccauuaaagugaauggcuuuacguguaccggggucgugacagaagcugagaccuauacaaacuucguuggauacgugaccacaaccuuuagacggaagcacuuccgccccacgccugaugccugcagauccgcguauaauuggaaaauggcuggcgacccccgguacgaagagagccugcauaacccuuauccggauuaccacuggcugcgcaccgucaagacaaccaaggagucucucgugaucaucucccccagcguugccgaccuggauccuuacgacaaaucucuucauuccagaguguuucccaauggcaaguguagcgggcugacagucucuuccaccuauugcagcacgaaccacgauuacacaauuuggaugccugaaaauccccggcucggaaccuccugugacaucuucacaaacucucgcggcaaaagagccagccgggggaauaagaccugcggauuuguggaugagcgcggccuguauaaaucccuuaagggggcuuguaagcugaaacucugcggagugcugggccugagacucauugacggcaccugggucgccaugcacacaagcgaugaaacgaagugguguccgccugaccaacugguuaaccuucaugacuuccggucugaugagaucgagcaccuggugguggaggaacucgucaaaaagcgcgaagagugccuggacgcucuugaauccauuaugaccacaaaaagcgugucuuuuagacggcugagccaucuccgcaagcugguucccggguucggaaaagccuacaccaucuucaauaagacacugauggaggcggaugcccacuauaaguccauuagaaccugggacgagaucgugccuucuaaaggcugccuccgggucgggggaagaugucacccccaugugaacggcguuuucuucaaugggaucauucugggaagcgauggccacgugcuuauccccgaaaugcaguccagccugcuccagcagcaugucgagcugcuugaaucuuccguggucccucugaugcacccgcucgcugaccccagcacgguguuuaaggauggcaacgaggccgaagacuucguugaggugcaucugccugauguccacaaacaagugucugggguugaccugggacuccccgauuggggccgcuacauucugguguccgcuggggcccuuaucacacugaugcucauuaucuuucugaugaccugcugucggagaguccaucugcgcgagagcaagcggcacucccuuagaggaaccgaacgcaaagugucugugacaagccaguccggcaaggcgaucucuagcugggaguccuauaagaacgggagcgaaacccggauguga

SEQ ID NO: 223059 - RNA, 1575 nt, Artificial Sequence
  derived and/or modified CDS sequence (opt5) from glycoprotein__RABV__FJ465399.1
augagcucccagucucuucucuucgugagccugcuuggcuuuucccugugcuucgggaaguuucccaucuacaccauuccugacaaacucggaccguggucucccaucgauauucaccaucugagcuguccuaacaaucuugucguugaggacgaaggcugcacaaaccuguccggguucucuuauauggagcucaaggugggauacaucagcgccauuaaagugaauggcuuuacguguaccggggucgugacagaagcugagaccuauacaaacuucguuggauacgugaccacaaccuuuagacggaagcacuuccgccccacgccugaugccugcagauccgcguauaauuggaaaauggcuggcgacccccgguacgaagagagccugcauaacccuuauccggauuaccacuggcugcgcaccgucaagacaaccaaggagucucucgugaucaucucccccagcguugccgaccuggauccuuacgacaaaucucuucauuccagaguguuucccaauggcaaguguagcgggcugacagucuucucuaccuauugcuccacgaaccacgauuacacaauuuggaugccugaaaauccccggcucggaaccagcugugacaucuuuacaaacucccgcggcaaaagagccucucgggggaauaagaccugcggauucguggaugagcgcggcugguauaaaagccugaagggggcuuguaagcugaaacugugcggagugcucggccugagacugauugacggcaccugggucgccaugcacacauccgaugaaacgaagugguguccgccugaccaacucguuaaccugcaugacuuucggagcgaugagaucgagcaccuugugguggaggaacuggucaaaaagcgcgaagagugccucgacgcucuggaaucuauuaugaccacaaaauccgugagcuucagacggcuuucucaucugcgcaagcucguucccggguucggaaaagccuacaccaucuuuaauaagacacugauggaggcggaugcccacuauaagagcauuagaaccugggacgagaucgugccuuccaaaggcugccugcgggucgggggaagaugucacccccaugugaacggcguuuucuuuaaugggaucauucucggaucugauggccacgugcugauccccgaaaugcagagcucccuucugcagcagcaugucgagcuccuggaaagcucuguggucccucuuaugcacccgcuggcugaccccuccgccguguucaaggauggcaacgaggcugaagacuuuguugaggugcaucucccugauguccacaaacaagugagcgggguugaccugggacugcccgauuggggccgcuacauucucgugucugccggggcgcugaucacgcuuaugcugauuaucuuccucaugacaugcugucggagaguccaccgccgggaguccaagcagcauagccugagaggaaccgaacgcaaaguguccgugaccucucagagcggcaaggccaucuccucuugggagagcuauaagaacggguccgaaacacggauguga

SEQ ID NO: 223060 - RNA, 1575 nt, Artificial Sequence
  derived and/or modified CDS sequence (opt5) from glycoprotein__RABV__FJ465400.1
auguucccccagacccugcucuuugugccucugcuuggccugagccucugcuucgggaaguuuccgaucuacacaauucccgacaaacugggaccuuggucccccaucgauauucaccaucuuucuuguccuaacaaucuggucguugaggacgaaggcugcacgaaccucagcggguucuccuauauggagcugaaggugggauacaucucugccauuaaagugaauggcuuuaccuguacaggggucgugaccgaagcugagacauauaccaacuucguuggauacgugacaaccacguuuagacggaagcacuuccgccccaccccugaugccugcagagcggcuuauaauuggaaaauggccggcgacccgcgguacgaagagagccugcauaaccccuauccugauuaccacuggcuccgcacagucaagaccacaaaggagucccuggugaucaucucucccagcguugccgaccuugauccuuacgacaaaucccugcauagcagaguguuucucaauggcaaguguucugggcugaccgucuccagcacguauugcucuacaaaccacgauuacuccauuuggaugcccgaaaauccgcggcuuggaaccagcugugacaucuucgugaacucucgcggcaaaagagcuuccaaggggaauaaaacaugcggauuuguggaugagcggggccuguauaagagccucaagggggccuguaaacugaagcugugcggaguccucggccugcgccuuauugacggcaccuggguugcuaugcaaaccuccgaggaaccuaaauggugucccccugaucagcuggugaaccuccacaauuucagaucugacgagaucgaacaucugguggucgaggaacuugugaagaaacgggaggaaugccuggacgcccucgagagcauuaugacaacgaaguccguuagcuuucgcagacugucucaucugcggaaacucgugcccggguucggaaaggcguacaccaucuucaacaagacacugauggaggccgaugcucacuauaaauccauucgcaccugggacgaaaucauccccagcaagggcugccuuagagucgggggacggugucacccucacgugaauggcguguuuuucaacgggauuauccugggaucugauggccauguucucauuccggagaugcagagcucccugcuucagcaacacgucgaacugcucgagucuagcgugaucccccugaugcauccucuggccgaccccuccacagcuuuuaaagauggcgacgaagccgaggauuucgucgagauucaccucccugacgugcauaagcagaucagcgggguugaucugggacuucccaacuggggcaaauacauccuggugucugcgggggcccucauugcucugaugcugaccaucuuucuuauuacgugcuguagaggauuccaccagccgaaguccacacagcacagccucggcgggaccgaacgcaaggucucugugaccccucuguccggcaaaguuaucagcuccugggagucuuauaagaaaggaggcgaaacacggcuguga

SEQ ID NO: 223061 - RNA, 1575 nt, Artificial Sequence
  derived and/or modified CDS sequence (opt5) from glycoprotein__RABV__FJ465401.1
augagcucccagucucuccuguucgccagccugcuuggcuuuucccugugcuucgggaaguuucccaucuacaccauuccugacaaacucggaccguggucucccaucgauauucaccaucugagcuguccuaacaaucuuguggucgaggacgaaggcugcacaaaccuguccggguucucuuauauggagcucaagguuggauacaucagcgcuauuaaagugaauggcuuuacguguaccgggguggucacagaagccgagaccuauacaaacuucgugggauacguuaccacaaccuuuagacggaagcacuuccgccccacgccugaugcgugcagauccgcuuauaauuggaaaauggccggcgacccccgguacgaagagagccugcauaacccuuauccggauuaccacuggcugcgcaccgugaagacaaccaaggagucucucgucaucaucucccccagcguggccgaccuggauccuuacgacaaaucucuucauuccagaguuuuucccaauggcaaguguagcgggcugacagugucuuccaccuauugcagcacgaaccacgauuacacaauuuggaugccugaaaauccccggcucggaaccuccugugacaucuucacaaacucucgcggcaaaagagcuagccgggggaauaagaccugcggauuugucgaugagcgcggccuguauaaaucccuuaagggggccuguaagcugaaacucugcggagugcugggccugagacucauugacggcaccuggguggcuaugcacacaagcgaugaaacgaagugguguccgccugaccaacuggucaaccuucaugacuuccggucugaugagaucgagcaccugguuguggaggaacucgugaaaaagcgcgaagagugccuggacgcccuugaauccauuaugaccacaaaaagcgucucuuuuagacggcugagccaucuccgcaagcuggugcccggguucggaaaagcguacaccaucuucaauaagacacugauggaggccgaugcucacuauaaguccauuagaaccugggacgagaucguuccuucuaaaggcugccuccgggucgggggaagaugucacccccaugugaacggcguguuuuucaaugggaucauucugggaagcgauggccacguucuuauccccgaaaugcaguccagccugcuccagcagcauguggagcugcuugaaucuuccgucgugccucugaugcacccgcucgccgaccccagcacggucuuuaaggauggcaacgaggcugaagacuucguggagguucaucugccugaugugcacaaacaagucucugggguggaccugggacuccccgauuggggccgcuaccugcuuguuuccgccggggcgcugauuacacucaugcugaucauuuuucugaugaccugcugucggagagugcaccgccgggagagcaagcagcauucccuuagaggaaccgaacgcaaagucucugugacaagccaguccggcaaggccaucucuagcugggaguccuauaagaacgggagcgaaacccggauguga

SEQ ID NO: 223062 - RNA, 1575 nt, Artificial Sequence
  derived and/or modified CDS sequence (opt5) from glycoprotein__RABV__FJ465402.1
auguucccccaggcccugcucuuugugccucugcuuggcuucagccugugcuuugggaaguucccgaucuacaccauucccgacaaacucggaccuuggucccccaucgauauucaccaucugucuuguccuaacaaucuugucguugaggacgaaggcugcacaaaccugagcggguuuuccuauauggagcucaaggugggauacaucucugcuauuaaagugaauggcuucacguguaccggggucgugacagaagccgagaccuauacaaacuuuguuggauacgugaccacaaccuucagacggaagcacuuucgccccacgagcgaugcgugcagagcugccuauaauuggaaaauggccggcgacccucgguacgaagagucccugcauaacccguaucccgauuaccacuggcugcgcaccgucaagacaaccaaggagucucucgugaucaucagcccuuccguugcugaccuggaucccuacgacaaaagccuucauucuagaguguucccuaauggccgguguuccgggcugacagucagcucuaccuauugcuccacgaaccacgauuacacaauuuggaugcccgaaaauccgcgccucggaaccagcugugacaucuuuacaaacucuagaggcaagcgggccuccaaagggaauagaaccugcggauucguggaugagcgcggccuguauaagagccuuaaaggggcuuguaagcugaagcucugcggagugcugggccugcggcucauggacggcaccugggucgccaugcaaacauccgaagagacgaaaugguguccucccgaucagcugguuaaccuucacgacuuucgcucugacgagauugaacaucuggugguggaggaacucgucaagaaaagagaggaaugccuggaugcgcuugagagcaucaugaccacaaaguccgugagcuuccggcgccugucucaccucagaaaacugguuccuggguucggaaaggccuacaccauuuuuaauaaaacacugauggaggcugacgcccauuauaaguccauccggaccuggaacgaaauuauccccagcaagggcugccucagagucgggggacgcugucacccccacgugaauggcguguucuuuaacgggaucauucugggaucugauggccauguucuuaucccugagaugcagagcucccugcuccagcaacacguggaacugcuugagucuagcgucgugccgcugaugcauccccucgcugacccuuccacggucuucaaagauggcggggaagccgaggacuuuguggagguucaucugcccgaugugcacaagcaggucagcggaguggaccugggccucccuucuugggggaaauacauucugguuggauccggcgcgcuuaucgcccuggugcucauuaucuuccugaugacaugcugucggagagucagccgccccgaaucuacccagcacucccugcgggggaccggcaugaaggugagcaucacaucccagucuggaaaagcuauuccgagcugggaguccuauaagucuaagaacgaaaccaaaauguga

SEQ ID NO: 223063 - RNA, 1575 nt, Artificial Sequence
  derived and/or modified CDS sequence (opt5) from glycoprotein__RABV__FJ465403.1
auguucccccagacccugcucuuugugccucugcuuggccugagccucugcuucgggaaguuuccgaucuacacaauucccgacaaacugggaccuuggucccccaucgauauucaccaucuuucuuguccuaacaaucuggucguugaggacgaaggcugcacgaaccucagcggguucuccuauauggagcugaaggugggauacaucucugccauuaaagugaauggcuuuaccuguacaggggucgugaccgaagcugagacauauaccaacuucguuggauacgugacaaccacguuuagacggaagcacuuccgccccaccccugaugccugcagagcggcuuauaauuggaaagucgccggcgacccgcgguacgaagagagccugcauaaccccuauccugauuaccacuggcuccgcacagugaagaccacaaaggagucccugguuaucaucucucccagcguggccgaccuugauccuuacgacaaaucccugcauagcagagucuuucucaauggcaaguguucugggcugaccguguccagcacguauugcucuacaaaccacgauuacaccauuuggaugcccgaaaauccgcggcuuggaacauccugugacauccugagcaacucucgcggcaaaagagcuuccaaggggaauaaaaccugcggauucguggaugagcggggccucuauaagagccugaagggggccuguaaacugaagcucugcggaguccugggccuucgccugauugacggcaccuggguugcuaugcaaacauccgaggaaccuaaauggugucccccugaucagcucgugaaccugcacaauuuuagaucugacgagaucgaacaucuuguggucgaggaacuggugaagaaacgggaggaaugccucgacgcccuggagagcauuaugacgaccaaguccguuagcuuccgcagacugucucaccuccggaaacuggugcccggguuuggaaaggcguacacaaucuucaacaagacccuuauggaggccgaugcucauuauaaauccauucgcacaugggacgaaaucauccccagcaagggcugccugagagucgggggacggugucacccucacgugaauggcguuuucuuuaacgggauuauccucggaucugauggccaugugcugauuccggagaugcagagcucccuucugcagcaacacgucgaacuccuggagucuagcgugaucccccugaugcauccucucgccgaccccuccaccgucuucaaagauggcgacgaagcugaggauuuuguggagauucaucugccugacguucacaagcagaucagcgggguggaucuuggacugcccaacuggggcaaauacauccucaugucugccggggcgcugauuacgcugaugcuuacaaucuuccucauuaccugcuguagaggauuucgccggccgaaguccacccagcacagccugggcgggacaggcaugaaggucucugugaccccucaguccggaaaaguuaucagcuccugggaaucuuauaagaaaggcggggagacaagacuguga

SEQ ID NO: 223064 - RNA, 1575 nt, Artificial Sequence
  derived and/or modified CDS sequence (opt5) from glycoprotein__RABV__FJ465404.1
auguucccccaggcccugcucuuugugccucugcuuggcuucagccugugcuuugggaaguucccgaucuacaccauucccgacaaacucggaccuuggucccccaucgauauucaccaucugucuuguccuaacaaucuugucguugaggacgaaggcugcacaaaccugagcggguuuuccuauauggagcucaaggugggauacaucucugcuauuaaagugaauggcuucacguguaccggggucgugacagaagccgagaccuauacaaacuuuguuggauacgugaccacaaccuucagacggaagcacuuucgccccacgagcgaugcgugcagagcugccuauaauuggaaaauggccggcgacccucgguacgaagagucccugcauaacccguaucccgauuaccacuggcugcgcaccgucaagacaaccaaggagucucucgugaucaucagcccuuccguugcugaccuggaucccuacgacaaaagccuucauucuagaguguucccuaauggccgguguuccgggcugacagucagcucuaccuuuugcuccacgaaccacgauuauacaauuuggaugcccgaaaauccgcgccucggaaccagcugugacaucuucacaaacucuagaggcaagcgggccuccaaagggaauagaaccugcggauuuguggaugagcgcggccuguacaagagccuuaaaggggcuuguaagcugaagcucugcggagugcugggccugcggcucauggacggcaccugggucgccaugcaaacauccgaagagacgaaaugguguccucccgaucagcugguuaaccuucacgacuuccgcucugacgagauugaacaucuggugguggaggaacucgucaagaaaagagaggaaugccuggaugcgcuugagagcaucaugaccacaaaguccgugagcuuccggcgccugucucaccucagaaaacugguuccuggguuuggaaaggccuauaccauuuucaauaaaacacugauggaggcugacgcccauuacaaguccauccggaccuggaacgaaauuauccccagcaagggcugccucagagucgggggacgcugucacccccacgugaauggcguguuuuucaacgggaucauucugggaucugauggccauguucuuaucccugagaugcagagcucccugcuccagcaacacguggaacugcuugagucuagcgucgugccgcugaugcauccccucgcugacccuuccacggucuuuaaaaacggcggggaagccgaggauuucguggagguucaucugcccgacgugcacaagcaggucagcggaguggaucugggccucccuucuugggggaaauauauucugguuuccagcggagcgcuuaucgcccuggugcucgucauuuuucugaugacaugcugucggaaggugaauagacccgaaucuacccagcacucccugcgcggcaccgggaugaaagugagcaucacaucccagucuggcaaggcuaucccgagcugggaguccuacaagucugaaaacgagaccaaaauguga

SEQ ID NO: 223065 - RNA, 1575 nt, Artificial Sequence
  derived and/or modified CDS sequence (opt5) from glycoprotein__RABV__FJ465405.1
auguucagccagucccugcuccuggugucucuucugggcuuuccccucagcuucgggaaguuuccuaucuacaccauuccggacaaacugggacccugguccccuaucgauauucaccaucuuucuugccccaacaaucuggucguugaggacgaaggcuguacaaaccucagcggguucuccuauauggagcugaaggugggauacaucucugccauuaaagugaauggcuuuacgugcaccggggucgugacagaagcugagaccuauacaaacuucguuggauacgugaccacaaccuuuagacggaagcaucugcgcccuacgcccgaugccuguagaagcgcguauaauuggaaagucgcuggcgacccucgguacgaagagucccuccacaacccguaucccgauuaccacuggcugcgcaccgugaagacaaccaaggagagccuuguuaucaucucuccuuccguggccgaccuggaucccuacgacaaaagccuccauucuagagucuucccuaauggcaagugcuccgggcugacagugagcucuaccuauuguuccacgaaccacgauuacacaauuuggaugcccgaaaauccgcggcuuggaaccagcugcgacaucuuuacaaacucccgcggcaaaagagccucuaaggggaauaaaaccuguggauucguggaugagcggggccuguauaagagccucaagggggcuugcaaacugaagcuguguggaguccucggccugcgccuuauugacggcaccuggguugccaugcacacauccgaugaaacgaaauggugcccucccgaccaacuggugaaccuccaugacuuuagaagcgaugagaucgagcaccugguggucgaggaacuugugaagaaacgggaagagugucuggacgcucucgaaucuauuaugaccacaaaguccguuagcuuccgcagacugucucaucugcggaaacucgugccuggguuuggaaaggccuacaccaucuucaauaagacacugauggaggcggaugcccacuauaaaagcauucgcaccugggacgagaucauccccuccaagggcugccuuagagucgggggacggugccacccccaugugaacggcguuuucuuuaaugggauuauccugggaucugauggccacgugcucauuccugaaaugcagagcucccugcuucagcagcauaucgagcugcucgaaagcucugucgugccgcugaugcacccccuggcugacccuuccacggucuucaaagauggcgacgaggccgaagauuuuguggagguucaucuccccgacgugcacaagcaagucagcgggguggaucugggacuuccugacuggggcaaauacauucugguuucugcuggggcccucaucgcgcugaugcugaucauuuuccuuaugacauguugcagacgcgugcaccggagagaguccaagcagcauagcuuucgcggaaccgaacggaaggucuccgugaccucucagaacggcaaagccaucagcuccugggagucuuauaagaacgggagcgacacaagaauguga

SEQ ID NO: 223066 - RNA, 1575 nt, Artificial Sequence
  derived and/or modified CDS sequence (opt5) from glycoprotein__RABV__FJ465406.1
auguucagccagucccugcuccuggugucucuucugggcuuuccccucugcuucgggaaguuuccuaucuacaccauuccggacaaacugggacccuggagcccuaucgauauucaccaucuuuccugucccaacaaucuggucguugaggacgaaggcugcacaaaccucucuggguucagcuauauggagcugaaggugggauacaucuccgccauuaaagugaauggcuuuacguguaccggggucgugacagaagcugagaccuauacaaacuucguuggauacgugaccacaaccuuuagacggaagcaucugcgcccuacgcccgaugccugcagaucugcguauaauuggaaaauggcuggcgacccucgguacgaagagagccuccacaacccguaucccgauuaccacuggcugcgcaccgucaagacaaccaaggagucccuugugaucaucagcccuucuguugccgaccuggaucccuacgacaaaucccuccauagcagaguguucccuaauggcaaguguucugggcugacagucuccagcaccuauugcucuacgaaccacgauuacacaauuuggaugcccgaaaauccgcggcuuggaaccuccugugacaucuuuacaaacagccgcggcaaaagagccucccgggggaauaagaccugcggauucguggaugagcgcggccuguauaaaucucucaagggggcuuguaagcugaaacugugcggagugcucggccugagacuuauugacggcaccugggucgccaugcacacaagcgaugaaacgaagugguguccucccgaccaacugguuaaccuccaugacuuucgguccgaugagaucgagcaccuggugguggaggaacuugucaaaaagcgcgaagagugccuggacgcucucgaaagcauuaugaccacaaaaucuguguccuucagacggcugagccaucugcgcaagcucguuccuggguuuggaaaagccuacaccaucuucaauaagacacugauggaggcggaugcccacuauaagucuauuagaaccugggacgagaucgugcccagcaaaggcugccuucgggucgggggaagaugucacccccaugugaacggcguuuucuuuaaugggaucauucugggauccgauggccacgugcucaucccugaaaugcagucuagccugcuucagcagcaugucgagcugcucgaauccagcguggucccgcugaugcacccccuggcugacccuucuacgguguucaaggagggcaacgaagccgaggauuuuguugaggugcaucuccccgacguccacaaacaaguguccgggguugaucugggacuuccugacuggggcaaguacauucuggugagcgcuggggcccucaucgcgcugaugcugauuauccuucucaugacaugcugucgccggguccacagacgcgaaucuaaacagcauucccugcggggaaccgagagaaaggugagcgugaccucccagaacggcaaggccaucucuagcugggaauccuauaaaaaucgcucugauacacggauguga

SEQ ID NO: 223067 - RNA, 1575 nt, Artificial Sequence
  derived and/or modified CDS sequence (opt5) from glycoprotein__RABV__FJ465407.1
auguucccccaggcccugcucuuugugccucugcuuggcuucagccugugcuuugggaaguucccgaucuacaccauucccgacaaacucggaccuuggucccccaucgauauucaccaucugucuuguccuaacaaucuugucguugaggacgaaggcugcacaaaccugagcggguuuuccuauauggagcucaaggugggauacaucucugcuauuaaagugaauggcuucacguguaccggggucgugacagaagccgagaccuauacaaacuuuguuggauacgugaccacaaccuucagacggaagcacuuucgccccacgagcgaugcgugcagagcugccuauaauuggaaaauggccggcgacccucgguacgaagagucccugcauaacccguaucccgauuaccacuggcugcgcaccgucaagacaaccaaggagucucucgugaucaucagcccuuccguugcugaccuggaucccuacgacaaaagccuucauucuagaguguucccuaauggccgguguuccgggcugacagucagcucuaccuuuugcuccacgaaccacgauuauacaauuuggaugcccgaaaauccgcgccucggaaccagcugugacaucuucacaaacucuagaggcaagcgggccuccaaagggaauagaaccugcggauuuguggaugagcgcggccuguacaagagccuuaaaggggcuuguaagcugaagcucugcggagugcugggccugcggcucauggacggcaccugggucgccaugcaaacauccgaagagacgaaaugguguccucccgaucagcugguuaaccuucacgacuuccgcucugacgagauugaacaucuggugguggaggaacucgucaagaaaagagaggaaugccuggaugcgcuugagagcaucaugaccacaaaguccgugagcuuccggcgccugucucaccucagaaaacugguuccuggguuuggaaaggccuauaccauuuucaauaaaacacugauggaggcugacgcccauuacaaguccauccggaccuggaacgaaauuauccccagcaagggcugccucagagucgggggacgcugucacccccacgugaauggcguguuuuucaacgggaucauucugggaucugauggccauguucuuaucccugagaugcagagcucccugcuccagcaacacguggaacugcuugagucuagcgucgugccgcugaugcauccccucgcugacccuuccacggucuuuaaagauggcggggaagccgaggacuucguggagguucaucugcccgaugugcacaagcaggucagcggaguggaccugggccucccuucuugggggaaauauauucugguuggauccggcgcgcuuaucgcccuggugcucgucauuuuucugaugacaugcugucggaaggugaacagacccgaaagcacccagcacucucugcgcgggaccggcaugaaaguguccaucacaagccaguccggaaaggcuaucccgucuugggagagcuacaaguccgaaaaugagaccaaaauguga

SEQ ID NO: 223068 - RNA, 1575 nt, Artificial Sequence
  derived and/or modified CDS sequence (opt5) from glycoprotein__RABV__FJ465409.1
auguucccccagacccugcucuuugugccucugcuuggccugagccucugcuucgggaaguuuccgaucuacacaauucccgacaaacugggaccuuggucccccaucgauauucaccaucuuucuuguccuaacaaucuggucguugaggacgaaggcugcacgaaccucagcggguucuccuauauggagcugaaggugggauacaucucugccauuaaagugaauggcuuuaccuguacaggggucgugaccgaagcugagacauauaccaacuucguuggauacgugacaaccacguuuagacggaagcacuuccgccccaccccugaugccugcagagcggcuuauaauuggaaaauggccggcgacccgcgguacgaagagagccugcauaaccccuauccugauuaccacuggcuccgcacagucaagaccacaaaggagucccuggugaucaucucucccagcguugccgaccuugauccuuacgacaaaucccugcauagcagaguguuucucaauggcaaguguucugggcugaccgucuccagcacguauugcucuacaaaccacgauuacuccauuuggaugcccgaaaauccgcggcuuggaaccagcugugacaucuucgugacaucucgcggcaaaagagcuuccaaggggagcaaaaccugcggauuuguggaugagcggggccuguauaagucccucaagggggccuguaaacugaagcugugcggaguccucggccugcgccuuauugacggcaccuggguugcuaugcaaacaucugaggaaccuaaauggugucccccugaucagcuggugaaccuccacaauuucagaagcgacgagaucgaacaucugguggucgaggaacuugugaagaaacgggaggaaugccuggacgcccucgaguccauuaugacgaccaagagcguuucuuuucgcagacugucccaucugcggaaacucgugcccggguucggaaaggcguacacaaucuucaacaagacccugauggaggccgaugcucacuauaaaagcauucgcacaugggacgaaaucauccccucuaagggcugccuuagagucgggggacggugucacccucacgugaauggcguguuuuucaacgggauuauccugggaagcgauggccauguucucauuccggagaugcaguccucucugcuucagcaacacgucgaacugcucgagagcuccgugaucccccugaugcauccucuggccgaccccagcaccgcuuuuaaagauggcgacgaagccgaggauuucgucgagauucaccucccugacgugcauaagcagaucucugggguugaucugggacuucccaauuggggcaaauacauccugguguccgcgggggcccucauugcucugaugcugacgaucuuucuuauuacaugcuguagaggauuccaccagccuaagagcacccagcacucucucggcgggaccggccgcaaggucuccgugacaccgcugagcggaaaaguuaucuccucuugggaaagcuauaagaaaggcggggagacccggcuguga

SEQ ID NO: 223069 - RNA, 1575 nt, Artificial Sequence
  derived and/or modified CDS sequence (opt5) from glycoprotein__RABV__FJ602447.1
augaucccccagguguuccuguuugucccucuccugguuuucagcuccugcuuuggcaaguucccgauuuacaccauccccgacaaacuugggccuuggucucccauugauauccaccaucugagcuguccuaacaaucucgugguggaggacgaaggaugcacaaaccuguccggcuuuucuuauauggagcuuaaggucggguacauuagcgccaucaaagugaauggauucacguguaccggcguugugacagaagcugagaccuauacaaacuuugucggguacgugaccacaaccuucaagagaaaacacuuucggcccaugccugaugccugccgcgcggcuuauaauuggaagauggccggagacccgagauacgaagagucccugcauaaccccuauccugauuaccacuggcuccggacgguuaagaccacaaaagagucucuggugaucauuagccccuccgucgccgaccuggauccuuacgacaagagccuccauucucgcguguuccccggcggcaaauguuccgggaucaccgugagcucuacaugcuguuccaccaaucacgauuauacgauuuggaugccggaaaacccuagacugggaacaagcugcgacaucuuuaccaauucucggggcaagcgcgcuuccaaagggggaaagacauguggcuucgucgaugagagagggcuuuacaagagccugaaaggagccugcaagcucaaacuguguggcguucuuggccugcggcucauggacgggaccuggguggcuauucaaaccuccgaugaaaucaaguggugcucucccgaccagcuggugaaccugcacgacuuucauagcgaugagauugagcaccucgucguggaggaacugguuaaaaagcgcgaagagugccuugacgcccuggaaacaaucaugacgaccaaauccgugagcuucagacggcucucucaucugcgcaaacuugucccuggauucggcaaggcguauacaaucuuuaauaagacccugauggaggccgaugcucacuacaaguccauuagaacauggaacgagaucauucccagcaaagggugucuccgggugggaggccgcugccacccccauguuaaugggguguucuuuaacggaaucauucugggcccugacggccacguccugaucccggaaaugcagucuagccuccugcaucagcacauggagcuucuggaauccucugugaucccccucaugcauccucuggccgaucccagcaccgucuucaaggacggggaugaggcugaagacuuuguggagguucaccuuccugaugugcacaaacaaauuuccggagucgaccugggccuccccaauugggggaaguaugugcugaucagcgccggagcgcugacggcccucaugcugacaauuuuccuuaugaccuguugcagaaagaccaaccgggcugagucuauccagcauuccccgggcgaaacagggagaaaaguuagcgugaccucucacaacggccgcgucauuuccagcugggaguccuacaagucuggaagcgaaacaaaacuguga

SEQ ID NO: 223070 - RNA, 1575 nt, Artificial Sequence; identical to SEQ ID NO: 222917
  derived and/or modified CDS sequence (opt5) from glycoprotein__RABV__FJ602448.1

SEQ ID NO: 223071 - RNA, 1575 nt, Artificial Sequence
  derived and/or modified CDS sequence (opt5) from glycoprotein__RABV__FJ602449.1
augaucccccaggugcugcuguucgucccucugcuuguuuuuagcuccugcuucggcaaguuuccgauuuacaccauccccgacaaacuggggccuuggucucccauugauauccaccaucucagcuguccuaacaaucuggugguggaggacgaaggaugcacaaaccuuuccggcuucucuuauauggagcugaaggucggguacauuagcgccaucaaagugaauggauuuacguguaccggcguugugacagaagcugagaccuauacaaacuucgucggguacgugaccacaaccuuuaagagaaaacacuuccggcccaugccugaugccugccgcgcggcuuauaauuggaagauggccggagacccgagauacgaagagucccuccauaaccccuauccugauuaccacuggcugcggacgguuaagaccacaaaagagucucuggugaucauuagccccuccgucgccgaccucgauccuuacgacaagagccugcauucucgcguguuucccggcggcaaauguuccgggaucaccgugagcucuacaugcuguuccaccaaucacgauuauacgauuuggaugccggaaaacccuagacuuggaacaagcugcgacaucuucaccaauucucggggcaagcgcgcuuccaaagggggaaagacauguggcuuugucgaugagagagggcuguacaagagccucaaaggagccugcaagcugaaacuuuguggcguucugggccuccggcugauggacgggaccuggguggcuauucaaaccuccgaugaaaucaaguggugcucucccgaccagcuggugaaccuccacgacuuccauagcgaugagauugagcaccuggucguggaggaacuuguuaaaaagcgcgaagagugccuggacgcccucgaaacaaucaugacgaccaaauccgugagcuuuagacggcugucucaucuucgcaagcuggucccuggauucggcaaggcguauacaaucuucaauaaaacccucauggaggccgaugcucacuacaaguccauuagaacauggaacgagaucauucccagcaaagggugucugcgggugggaggccgcugccacccccauguuaaugggguguuuuucaacggaaucauucugggcccugacggccacguccucaucccggaaaugcagucuagccugcuucaucagcacauggagcugcucgaauccucugugaucccccugaugcauccucuugccgaucccagcaccgucuuuaaggacggggaugacgcugaggauuucguggaaguucaccucccugacgugcacaaacaaauuuccggagucgaucucggccugcccaauugggggaaguaugugaugaucagcgccggagcgcugacggcccucaugcugaugauuuuucuuaugacauguugcagaaagaccaaccgggcugagucuauccagcauuccccgggcgagaccgggagaaaaguuagcgugacaucucacaacggccgcgucauuuccagcugggaauccuacaagucuggaggcgagaccaaacuguga

SEQ ID NO: 223072 - RNA, 1575 nt, Artificial Sequence
  derived and/or modified CDS sequence (opt5) from glycoprotein__RABV__FJ602450.1
augaucccccaggugcuucucuucgucccucugcuuauuuuuagcuccugccugggcaaguucccgaucuacaccauucccgacaaacucgggccuuggucucccaucgauauucaccaucugagcuguccuaacaaucuuguuguggaggacgaaggaugcacaaaccuguccggcuuuucuuauauggagcucaaggugggguacaucagcgccaucaaagucaauggauucacguguaccggcgugguuacagaagcugagaccuauacaaacuuugugggguacgucaccacaaccuucaagagaaaacacuuucggcccaugccugaugccugccgcgcggcuuauaauuggaagauggccggagacccgagauacgaagagucccugcauaaccccuauccugauuaccacuggcugcggacggugaagaccucuaaagagagccucguuauuaucucccccagcguggccgaccuggauccuuacgacaagucucuucauucccgcgucuuccccggcggcaaauguagcgggauuacagugucuuccacaugcuguagcaccaaucacgauuauaccaucuggaugccggaaaacccuagacugggaacgucuugcgacauuuuuacaaauucccggggcaagcgcgcuagcaaagggggaaagaccuguggcuucguggaugagagagggcucuacaagucccugaaaggagccugcaagcugaaacuguguggcguccucggccugcggcugauggacgggacauggguugcuauccaaaccucugaugaaauuaaguggugcagccccgaccagcucgugaaccugcacgacuuucauuccgaugagaucgagcaccuuguggucgaggaacuggugaaaaagcgcgaagagugccucgacgcccuggaaaccaucaugacaacgaaaagcguuucuuucagacggcuuucccaucugcgcaagcucgugccuggauuuggcaaggcguauaccauuuucaauaaaacacugauggaggccgaugcucacuacaagagcaucagaaccuggaacgagauuauccccucuaaagggugucugcgggucggaggccgcugccacccccaugugaaugggguuuucuuuaacggaauuauccucggcccugacggccacgugcugaucccggaaaugcagagcucccuucugcaucagcacauggagcuccuggaaucuagcgucauuccccuuaugcauccucuggccgaucccuccacaguguucaaggacggggaugaggcugaagacuuugucgaggugcaccucccugauguucacaaacaaaucagcggaguggaccugggccugcccaauugggggaaguauguccucauuucugccggagcgcugaccgccuccaugcuuaugaucuuccugaugacguguugcagaaagacaaaccgggcugagagcauucagcauucuccgggcgaaaccgggagaaaaguguccguuaccagccacaacggccgcgugaucuccucuugggagagcuacaaguccggaggcgaaacaaaacucuga

SEQ ID NO: 223073 - RNA, 1575 nt, Artificial Sequence; identical to SEQ ID NO: 222915
  derived and/or modified CDS sequence (opt5) from glycoprotein__RABV__FJ602451.1

SEQ ID NO: 223074 - RNA, 1575 nt, Artificial Sequence; identical to SEQ ID NO: 222599
  derived and/or modified CDS sequence (opt5) from glycoprotein__RABV__FJ602452.1

SEQ ID NO: 223075 - RNA, 1575 nt, Artificial Sequence; identical to SEQ ID NO: 222899
  derived and/or modified CDS sequence (opt5) from glycoprotein__RABV__FJ602453.1

SEQ ID NO: 223076 - RNA, 1575 nt, Artificial Sequence; identical to SEQ ID NO: 222915
  derived and/or modified CDS sequence (opt5) from glycoprotein__RABV__FJ602454.1

SEQ ID NO: 223077 - RNA, 1575 nt, Artificial Sequence; identical to SEQ ID NO: 222915
  derived and/or modified CDS sequence (opt5) from glycoprotein__RABV__FJ602455.1

SEQ ID NO: 223078 - RNA, 1575 nt, Artificial Sequence; identical to SEQ ID NO: 222915
  derived and/or modified CDS sequence (opt5) from glycoprotein__RABV__FJ602456.1

SEQ ID NO: 223079 - RNA, 1575 nt, Artificial Sequence; identical to SEQ ID NO: 222917
  derived and/or modified CDS sequence (opt5) from glycoprotein__RABV__FJ602457.1

SEQ ID NO: 223080 - RNA, 1575 nt, Artificial Sequence; identical to SEQ ID NO: 222917
  derived and/or modified CDS sequence (opt5) from glycoprotein__RABV__FJ602458.1

SEQ ID NO: 223081 - RNA, 1575 nt, Artificial Sequence
  derived and/or modified CDS sequence (opt5) from glycoprotein__RABV__FJ602459.1
augaucccccaggugcugcuguucgucccucugcuuguuuuuagcuccugccugggcaaguucccgauuuacaccauccccgacaaacucgggccuuggucucccauugauauccaccaucugagcuguccuaacaaucuugugguggaggacgaaggaugcacaaaccuguccggcuuuucuuauauggagcucaaggucggguacauuagcgccaucaaagugaauggauucacguguaccggcguugugacagaagcugagaccuauacaaacuuugucggguacgugaccacaaccuucaagagaaaacacuuucggcccaugcuggaugccugccgcgcggcuuauaauuggaagauggccggagacccuagauacgaagagucccugcauaacccguaucccgauuaccacuggcuccggacgguuaagaccucuaaagagagccuggugaucauuuccccuagcgucgccgaccuugaucccuacgacaagucucugcauucccgcguguucccuggcggcaaauguagcgggaucacagugucuuccacaugcuguagcaccaaucacgauuauaccauuuggaugcccgaaaacccgagacucggaacgucuugcgacaucuuuacaaauucccggggcaagcgcgcuagcaaagggggaaagaccuguggcuucgucgaugagagagggcuguacaagucccuuaaaggagccugcaagcugaaacucuguggcguucugggccugcggcucauggacgggacauggguggcuauucaaaccucugaugaaaucaaguggugcagcccugaccagcuggugaaccuucacgacuuucauuccgaugagauugagcaccuggucguggaggaacucguuaaaaagcgcgaagagugccuggacgcccuugaaaccaucaugacaacgaaaagcgugucuuucagacggcugucccaucuccgcaagcugguccccggauuuggcaaggcguauaccaucuucaauaaaacacugauggaggccgaugcucacuacaagagcauuagaaccuggaacgagaucauuccuucuaaagggugucuccgggugggaggccgcugccacccccauguuaaugggguguucuuuaacggaaucauucugggccccgacggccacguccuuaucccugaaaugcagagcucccugcuccaucagcacauggagcugcuugaaucuagcgugaucccgcugaugcauccccucgccgauccuuccacagucuucaaggacggggaugaggcugaagacuuuguggagguucaccuccccgaugugcacaaacaaauuagcggagucgaccugggccucccuaauugggggaaguaugugcugaucucugccggagcgcuuaccgccuccaugcugaugauuuuccucaugacguguugcagaaagacaaaccgggcugagagcauccagcauucucccggcgaaaccgggagaaaaguuuccgugaccagccacaacggccgcgucauuuccucuugggagagcuacaaguccggaggcgaaacaaaacuguga

SEQ ID NO: 223082 - RNA, 1575 nt, Artificial Sequence
  derived and/or modified CDS sequence (opt5) from glycoprotein__RABV__FJ712193.1
augaucccccaggugcugcuguucgucccucugcuuguuuuuagcuccugcuucggcaaguuuccgauuuacaccauccccgacaaacuggggccuuggucucccauugauauccaccaucucagcuguccuaacaaucuggugguggaggacgaaggaugcacaaaccuuuccggcuucucuuauauggagcugaaggucggguacauuagcgccaucaaagugaauggauuuacguguaccggcguugugacagaagcugagaccuauacaaacuucgucggguacgugaccacaaccuuuaagagaaaacacuuccggcccaugccugaugccugccgcgcggcuuauaauuggaagauggccggagacccgagauacgaagagucccuccauaaccccuauccugauuaccacuggcugcggacgguuaagaccacaaaagagucucuggugaucauuagccccuccgucgccgaccucgauccuuacgacaagagccugcauucucgcguguuucccggcggcaaauguuccgggaucaccgugagcucuacaugcuguuccaccaaucacgauuauacgauuuggaugccggaaaacccuagacuuggaacaagcugcgacaucuucaccaauucucggggcaagcgcgcuuccaaagggggaaagacauguggcuuugucgaugagagagggcuguacaagagccucaaaggagccugcaagcugaaacuuuguggcguucugggccuccggcugauggacgggaccuggguggcuauucaaaccuccgaugaaaucaaguggugcucucccgaccagcuggugaaccuccacgacuuccauagcgaugagauugagcaccuggucguggaggaacuuguuaaaaagcgcgaagagugccuggacgcccucgaaacaaucaugacgaccaaauccgugagcuuuagacggcugucucaucuucgcaagcuggucccuggauucggcaaggcguauacaaucuucaauaaaacccucauggaggccgaugcucacuacaaguccauuagaacauggaacgagaucauucccagcaaagggugucugcgggugggaggccgcugccacccccauguuaaugggguguuuuucaacggaaucauucugggcccugacggccacguccucaucccggaaaugcagucuagccugcuucaucagcacauggagcugcucgaauccucugugaucccccugaugcauccucuugccgaucccagcaccgucuuuaaggacggggaugaggcugaagacuucguggagguucaccucccugaugugcacaaacaaauuuccggaaucgaccucggccugcccaauugggggaaguauguccugauuagcgccggagcgcucacggcccugaugcuuacaaucuuucugaugaccuguugcagaaagaccaaccgggcugagucuauucagcauuccccgggcgaaacagggagaaaagugagcguuaccucucacaacggccgcgugaucuccagcugggaguccuacaagucuggaagcgaaacaaaacucuga

SEQ ID NO: 223083 - RNA, 1575 nt, Artificial Sequence; identical to SEQ ID NO: 222917
  derived and/or modified CDS sequence (opt5) from glycoprotein__RABV__FJ712194.1

SEQ ID NO: 223084 - RNA, 1575 nt, Artificial Sequence
  derived and/or modified CDS sequence (opt5) from glycoprotein__RABV__FJ712195.1
augaucccccaggcccuccuguucgugccucugcuugucguuccgcugugcuuuggcaaguuccccauuuacaccaucccugacaaacucgggcccuggagcccuauugauauccaccaucuguccugucccaacaaucuugugguggaggacgaaggaugcacaaaccugucuggcuuuagcuauauggagcucaaggucggguacauuuccgcuaucaaagugaauggauucacguguaccggcguugugacagaagccgagaccuauacaaacuuugucggguacgugaccacaaccuucaagagaaaacacuuucggccuacgccggaugcgugccgcucugcuuauaauuggaagauggccggagaccccagauacgaagagagccugcauaacccuuaucccgauuaccacuggcugcggaccguuaagacaaccaaagaguccuucgugaucauuucuccuagcgucgccgaccucgaucccuacgacaagucccugcauagccgcguguuuccgagaggcaaauguucuggcaucacaguguccagcaccuauugcucuacgaaucacgauuacacaauuuggaugccugaaaacccccggcuugggaccuccugugacaucuucacaaauagccgcggaaagagagcuuuuaaaggcucuaagaccugcggguucgucgaugagcggggacuguauaagucccucaaaggcgccuguaagcugaaacuuugcgggguucugggacuccgccugauggacggcaccuggguggcuauucaaacaagcgaugaaacgaagugguguccucccgaccagcuggugaaccuccacgacuuucauuccgaugagaucgagcaccuggucguggaggaacuuguuaaaaagagagaagagugccuggacgcccucgaaucuauuaugaccacaaaaagcguguccuuccggcgccugagccaucuuagaaagcugguccccggcuucgggaaggcguacaccaucuuuaauaaaacacucauggaggccgaugcucacuauaagucugugcggaccuggaacgagaucauuccuuccaaaggaugccugcgcguuggcgggagaugucacccgcaugugaauggagucuucuuuaacggcaucauucuggggcccgacggacacgugcucaucccugaaaugcagagcucucugcuucagcaacauauggagcugcucgaaagcuccgucauuccccugaugcacccucuugccgaucccucuacgguguucaagaauggcgacgaggcugaagauuuuguugaggugcaucugccggacguccacaaacaggugagcggcguugaucucgggcugccuuccuggggaaaguacgugcugaugagcgccggcauccucacagcgcugaugcuuaugaucuuccugaugaccugcugucggagaaccaaccgccccgagucuauucagcacucccucggggaaacaggacggaaggucagcgugaccucucaguccggcagagugaucagcuccugggagucuuauaaaagcgggggcgaaacaaagcuguga

SEQ ID NO: 223085 - RNA, 1575 nt, Artificial Sequence
  derived and/or modified CDS sequence (opt5) from glycoprotein__RABV__FJ712196.1
augaucccccaggcccuccuguucgugccucugcuugucguuccgcugugcuuuggcaaguuccccauuuacaccaucccugacaaacucgggcccuggagcccuauugauauccaccaucuguccugucccaacaaucuugugguggaggacgaaggaugcacaaaccugucuggcuuuagcuauauggagcucaaggucggguacauuuccgcuaucaaagugaauggauucacguguaccggcguugugacagaagccgagaccuauacaaacuuugucggguacgugaccacaaccuucaagagaaaacacuuucggccuacgccggaugcgugccgcucugcuuauaauuggaagauggccggagaccccagauacgaagagagccugcauaacccuuaucccgauuaccacuggcugcggaccguuaagacaaccaaagaguccuucgugaucauuucuccuagcgucgccgaccucgaucccuacgacaagucccugcauagccgcguguuuccgagaggcaaauguucuggcaucacaguguccagcaccuauugcucuacgaaucacgauuacacaauuuggaugccugaaaacccccggcuugggaccuccugugacaucuucacaaauagccgcggaaagagagcuuuuaaaggcucuaagaccugcggguucgucgaugagcggggacuguauaagucccucaaaggcgccuguaagcugaaacuuugcgggguucugggacuccgccugauggacggcaccuggguggcuauucaaacaagcagagaaacgaaguggcggccucccgaucagcuggugaaccuccacgacuuucauuccgacgagaucgagcaccuggucguggaggaacuuguuaaaaagcgcgaagagugucuggaugcccucgaaucuauuaugaccacaaaaagcguguccuucagacggcugagccaucuucgcaagcugguccccggcuucgggaaggcguacaccaucuuuaauaaaacacucauggaggccgacgcucacuauaagucugugagaaccuggaacgagaucauuccuuccaaaggaugccugcggguuggcgggagaugccacccgcaugugaauggagucuucuuuaacggcaucauucuggggcccgauggacacgugcucaucccugaaaugcagagcucucugcuucagcaacauauggagcugcucgaaagcuccgucauuccccugaugcacccucuugccgaccccucuacgguguucaagaauggcgaugaggcugaagacuuuguugaggugcaucugccggauguccacaaacaggugagcggcguugaccucgggcugccuuccuggggaaaguacgugcugaugagcgccggcauccucacagcgcugaugcuuaugaucuuccugaugaccuguugccgccggaccaacagacccgagucuauucagcacucccucggggaaacaggacgcaaggucagcgugaccucucaguccggccgggugaucagcuccugggagucuuauaaaagcgggggcgaaacaaagcuguga

SEQ ID NO: 223086 - RNA, 1575 nt, Artificial Sequence
  derived and/or modified CDS sequence (opt5) from glycoprotein__RABV__FJ719749.1
augaucccccaggcccuucucuucgugccucugcuugucguuccgcugugcuuuggcaaguuccccauuuacaccaucccugacaaacucgggcccuggagcuccauugauauccaccaucugucuuguccuaacaaucuugugguggaggacgaaggaugcacaaaccugagcggcuuuuccuauauggagcucaaggucggguacauuucugcuaucaaagugaauggauucacguguaccggcguugugacagaagccgagaccuauacaaacuuugucggguacgugaccacaaccuucaagagaaaacacuuucggcccacgccugaugcgugccgcagcgcuuauaauuggaagauggccggagacccgagauacgaagagucccugcauaaccccuauccugauuaccacuggcugcggaccguuaagacaaccaaagagucuuucgugaucauuagccccuccgucgccgaccucgauccuuacgacaagagccugcauucucgcguguuucccagaggcaaauguuccggcaucacagugagcucuaccuauugcccgacgaaucacgauuacacaauuuggaugccugaaaacccccggcuugggaccuccugugacaucuucacaaauagccgcggaaagagagcucugaaaggcucuaagaccugcggguuugucgaugagcggggacucuauaagucccugaaaggcgccuguaagcugaaacugugcgggguuccuggacuccgccugauggacggcaccuggguggcuauucaaacaagcgaugaaacgaagugguguccucccgaccagcuggugaaccuccacgacuuccauuccgaugagaucgagcaccuggucguggaggaacuuguuaaaaagagagaagagugccuggacgcccucgaaucuauuaugaccacaaaaagcguguccuuucggcgccugagccaucuuagaaagcugguccccggcuucgggaaggcguacaccaucuucaauaaaacacucauggaggccgaugcucacuauaagucugugcggaccuggaacgagaucauuccguccaaaggaugccugcgcguuggcgggagaugucacccccaugugaauggagucuuuuucaacggcaucauucuggggccugacggacacgugcucauccccgaaaugcagagcucucugcuucagcaacauauggagcugcucgaaagcuccgucauuccucugaugcacccccuugccgauccgucuacgguguuuaagaauggcgacgagguugaagauuucguggagguccaucugccugacgugcacaaacagguuagcggcguggauuuugggcuccccuccuggggaaaguacguccugaugagcgcuggcauccugacagcccucaugcuggugaucuuccuuaugaccugcugucggagaaccaaccgcucugaguccauucagcacagccugggggaaacaggacggaaggugucuguuaccucccagagcggcagagucaucuccucuugggagagcuauaaauccgggggcgaaacaaagcucuga

SEQ ID NO: 223087 - RNA, 1575 nt, Artificial Sequence
  derived and/or modified CDS sequence (opt5) from glycoprotein__RABV__FJ719752.1
augaucccccaggcccuccuguucgugccucugcuugucguuccgcugugcuuuggcaaguuccccauuuacaccaucccugacaaacucgggcccuggagcccuauugauauccaccaucuguccugucccaacaaucuugugguggaggacgaaggaugcacaaaccugucuggcuuuagcuauauggagcucaaggucggguacauuuccgcuaucaaagugaauggauucacguguaccggcguugugacagaagccgagaccuauacaaacuuugucggguacgugaccacaaccuucaagagaaaacacuuucggccuacgccggaugcgugccgcucugcuuauaauuggaagauggccggagaccccagauacgaagagagccugcauaacccuuaucccgauuaccacuggcugcggaccguuaagacaaccaaagaguccuucgugaucauuucuccuagcgucgccgaccucgaucccuacgacaagucccugcauagccgcguguuuccgagaggcaaauguucuggcaucacaguguccagcaccuauugcccuacgaaucacgauuacacaauuuggaugcccgaaaacccucggcuugggaccucuugugacaucuucacaaauucccgcggaaagagagcuuuuaaaggcagcaagaccugcggguucgucgaugagcggggacuguauaagucucucaaaggcgccuguaagcugaaacuuugcgggguucugggacuccgccugauggacggcaccuggguggcuauucaaacauccgaugaaacgaagugguguccucccgaccagcuggugaaccuccacgacuuucauagcgaugagaucgagcaccuggucguggaggaacuuguuaaaaagagagaagagugccuggacgcccucgaauccauuaugaccacaaaaucugugagcuuccggcgccugucccaucuuagaaagcugguccccggcuucgggaaggcguacaccaucuuuaauaaaacacucauggaggccgaugcucacuauaagagcgugcggaccuggaacgagaucauuccgucuaaaggaugccugcgcguuggcgggagaugucacccccaugugaauggagucuucuuuaacggcaucauucuggggccugacggacacgugcucauccccgaaaugcaguccagccugcuucagcaacauauggagcugcucgaaucuagcgucauuccucugaugcacccccuugccgauccguccacgguguucaagaauggcgacgaggcugaagauuuuguugaggugcaucugccugacguccacaaacaggugucuggcguugaucucgggcugcccagcuggggaaaguacgugcugauguccgccggcauccucacagcgcugaugcuuaugaucuuccugaugaccugcugucggagaaccaaccgcccugagagcauucagcacucucucggggaaacaggacggaaggucuccgugaccagccagucuggcagagugaucuccagcugggaguccuauaaaucugggggcgaaacaaagcuguga

SEQ ID NO: 223088 - RNA, 1575 nt, Artificial Sequence; identical to SEQ ID NO: 223084
  derived and/or modified CDS sequence (opt5) from glycoprotein__RABV__FJ719756.1

SEQ ID NO: 223089 - RNA, 1575 nt, Artificial Sequence
  derived and/or modified CDS sequence (opt5) from glycoprotein__RABV__FJ825129.1
augaucccccaggugcugcuguucgucccucugcuuguuuuuagcuccugcuucggcaaguuuccgauuuacaccauccccgacaaacuggggccuuggucucccauugauauccaccaucucagcuguccuaacaaucuggugguggaggacgaaggaugcacaaaccuuuccggcuucucuuauauggagcugaaggucggguacauuagcgccaucaaagugaauggauuuacguguaccggcguugugacagaagcugagaccuauacaaacuucgucggguacgugaccacaaccuuuaagagaaaacacuuccggcccaugccugaugccugccgcgcggcuuauaauuggaagauggccggagacccgagauacgaagagucccuccauaaccccuauccugauuaccacuggcugcggacgguuaagaccacaaaagagucucuggugaucauuagccccuccgucgccgaccucgauccuuacgacaagagccugcauucucgcguguuucccggcggcaaauguuccagaaucaccgugagcucuacaugcuguuccaccaaucacgauuauacgauuuggaugccggaaaacccucggcuucgcacaagcugcgacaucuucaccaauucuagagggaagcgggcuuccaaacgcggaaagacauguggcuuugucgaugagagagggcuguacaagagccucaaaggagccugcaagcugaaacuuuguggcguucuggggcuccggcugauggacggaaccuggguggcuauucaaaccuccgaugaaaucaaguggugcucucccgaccagcuggugaaccuccacgacuuccauagcgaugagauugagcaccuggucguggaggaacuuguuaaaaagcgcgaagagugccuggacgcccucgaaacaaucaugacgaccaaauccgugagcuuuagacggcugucucaucuucgcaagcuggucccuggcuucggcaaggcguauacaaucuucaauaaaacccucauggaggccgaugcucacuacaaguccauuagaacauggaacgagaucauucccagcaaagggugucugcgggugggaggcagaugccacccccauguuaaugggguguuuuucaacggaaucauucugggcccugacgggcacguccucaucccggaaaugcagucuagccugcuucaucagcacauggagcugcucgaauccucugugaucccccugaugcauccucuugccgaucccagcaccgucuuuaaggacggagaugaggcugaagacuucguggagguucaccucccugaugugcacaaacaaauuuccggcaucgaccucggccugcccaauugggggaaguauguccugauuagcgccggagcgcucacggcccugaugcuuacaaucuuucugaugaccuguugccgcaagaccaaccgggcugagucuauucagcauuccccgggcgaaacagggagaaaagugagcguuaccucucacaacggacgcgugaucuccagcugggaguccuacaagucuggcagcgaaacaaaacucuga

SEQ ID NO: 223090 - RNA, 1575 nt, Artificial Sequence; identical to SEQ ID NO: 222917
  derived and/or modified CDS sequence (opt5) from glycoprotein__RABV__FJ825130.1

SEQ ID NO: 223091 - RNA, 1575 nt, Artificial Sequence
  derived and/or modified CDS sequence (opt5) from glycoprotein__RABV__FJ825131.1
augaucccccaggugcugcuguucgucccucugcuuguuuuuagcuccugcuucggcaaguuuccgauuuacaccauccccgacaaacuggggccuuggucucccauugauauccaccaucucagcuguccuaacaaucuggugguggaggacgaaggaugcacaaaccuuuccggcuucucuuauauggagcugaaggucggguacauuagcgccaucaaagugaauggauuuacguguaccggcguugugacagaagcugagaccuauacaaacuucgucggguacgugaccacaaccuuuaagagaaaacacuuccggcccaugccugaugccugccgcgcggcuuauaauuggaagauggccggagacccgagauacgaagagucccuccauaaccccuauccugauuaccacuggcugcggacgguuaagaccacaaaagagucucuggugaucauuagccccuccgucgccgaccucgauccuuacgacaagagccugcauucucgcguguuucccggcggcaaauguuccgggaucaccgugagcucuacaugcuguuccaccaaucacgauuauacgauuuggaugccggaaaacccuagacuuggaacaagcugcgacaucuucaccaauucucggggcaagcgcgcuuccaaagggggaaagacauguggcuuuguccacgagagagggcuguacaagagccucaaaggagccugcaagcugaaacuuuguggcguucugggccuccggcugauggaugggaccuggguggcuauucaaaccuccgacgaaaucaaguggugcucucccgaucagcuggugaaccuccaugacuuccacagcgacgagauugagcaucuggucguggaggaacuuguuaaaaagcgcgaagagugccuggaugcccucgaaacaaucaugacgaccaaauccgugagcuuuagacggcugucucaccuucgcaagcuggucccuggauucggcaaggcguauacaaucuucaauaaaacccucauggaggccgacgcucacuacaaguccauuagaacauggaacgagaucauucccagcaaagggugucugcgggugggaggccgcugccauccccacguuaaugggguguuuuucaacggaaucauucugggcccugauggccauguccucaucccggaaaugcagucuagccugcuucaccagcauauggagcugcucgaauccucugugaucccccugaugcacccucuugccgaccccagcaccgucuuuaaggauggggacgaggcugaagauuucguggagguucaccucccugacgugcauaaacaaauuuccggagucgaucucggccugcccaauugggggaaguaugugcugaucagcgccggagcgcucacggcccugaugcuuacaauuuuucugaugaccuguugcagaaagaccaaccgggcugagucuauccagcacuccccgggcgaaacagggagaaaaguuagcgugaccucucauaacggccgcgucauuuccagcugggaguccuacaagucuggaagcgaaacaaaacucuga

SEQ ID NO: 223092 - RNA, 1575 nt, Artificial Sequence
  derived and/or modified CDS sequence (opt5) from glycoprotein__RABV__FJ825132.1
augaucccccaggugcuucucuucgucccucugcuuguuuuuagcuccugcuucggcaaguuuccgauuuacaccauccccgacaaacuggggccuuggucucccauugauauccaccaucucagcuguccuaacaaucuggugguggaggacgaaggaugcacaaaccuuuccggcuucucuuauauggagcugaaggucggguacauuagcgccaucaaagugaauggauuuacguguaccggcguugugacagaagcugagaccuauacaaacuucgucggguacgugaccacaaccuuuaagagaaaacacuuccggcccaugccugaugccugccgcgcggcuuauaauuggaagauggccggagacccgagauacgaagagucccuccauaaccccuauccugauuaccacuggcugcggacgguuaagaccacaaaagagucucuggugaucauuagccccuccgucgccgaccucgauccuuacgacaagagccugcauucucgcguguuucccggcggcaaauguuccgggaucaccgugagcucuacaugcuguuccaccaaucacgauuauacgauuuggaugccggaaaacccuagacuuggaacaagcugcgacaucuucaccaauucucggggcaagcgcgcuuccaaagggggaaagacauguggcuuugucgaugagagagggcuguacaagagccuccggggagccugcaaacugaagcuguguggcguucugggccuccgccugauggacgggaccuggguggcuauucaaaccuccgaugaaaucaaauggugcucucccgaccagcuggugaaccuccacgacuuccauagcgaugagauugagcaccuggucguggaggaacuuguuaagaaaagagaagagugccuggacgcccucgaaacaaucaugacgaccaaguccgugagcuuucggcgccugucucaucuuagaaaacuggucccuggauucggcaaggcguauacaaucuucaauaagacccucauggaggccgaugcucacuacaaauccauucggacauggaacgagaucauucccagcaaggggugucugcgcgugggaggcagaugccacccccauguuaaugggguguuuuucaacggaaucauucugggcccugacggccacguccucaucccggaaaugcagucuagccugcuucaucagcacauggagcugcucgaauccucugugaucccccugaugcauccucuugccgaucccagcaccgucuuuaaagacggggaugaggcugaagacuucguggagguucaucugccugaugugcacaagcaaauuuccggagucgaccucggccugcccaauugggggaaauaugugcugaucagcgccggagcgcucacggcccugaugcuuaugauuuuucugaugacauguugccggaagaccaacagagcugagucuauccagcacuccccgggcgaaaccggguggaagguuagcgugacaucucacaacggccgcgucauuuccagcugggaguccuacaaaucuggaagcgaaaccaagcucuga

SEQ ID NO: 223093 - RNA, 1575 nt, Artificial Sequence
  derived and/or modified CDS sequence (opt5) from glycoprotein__RABV__FJ825133.1
augaucccccaggugcuucucuucgucccucugcuuguuuuuagcuccugcuucggcaaguuuccgauuuacaccauccccgacaaacuggggccuuggucucccauugauauccaccaucucagcuguccuaacaaucuggugguggaggacgaaggaugcacaaaccuuuccggcuucucuuauauggagcugaaggucggguacauuagcgccaucaaagugaauggauuuacguguaccggcguugugacagaagcugagaccuauacaaacuucgucggguacgugaccacaaccuuuaagagaaaacacuuccggcccaugccugaugccugccgcgcggcuuauaauuggaagauggccggagacccgagauacgaagagucccuccauaaccccuauccugauuaccacuggcugcggacgguuaagaccacaaaagagucucuggugaucauuagccccuccgucgccgaccucgauccuuacgacaagagccugcauucucgcguguuucccggcggcaaauguuccagaaucaccgugagcucuacaugcuguuccaccaaucacgauuauacgauuuggaugccggaaaacccucggcuugggacaagcugcgacaucuucaccaauucucgcggaaagagagcuuccaaaggcgggaagacauguggauuugucgaugagcggggccuguacaagagccuccgcggggccugcaaacugaagcuguguggaguucugggccucagacugauggacggcaccuggguggcuauucaaaccuccgaugaaaucaaauggugcucucccgaccagcuggugaaccuccacgacuuccauagcgaugagauugagcaccuggucguggaggaacuuguuaagaaacgggaagagugccuggacgcccucgaaacaaucaugacgaccaaguccgugagcuuucgcagacugucucaucuucggaaacuggucccuggguucggaaaggcguauacaaucuucaauaagacccucauggaggccgaugcucacuacaaauccauucgcacauggaacgagaucauucccagcaagggcugucugagaguugggggacggugccacccccaugugaauggcguguuuuucaacgggaucauucugggaccugacggccacguccucaucccggaaaugcagucuagccugcuucaucagcacauggagcugcucgaauccucugugaucccccugaugcauccucuugccgaucccagcaccgucuuuaaagacggcgaugaggcugaagacuucguggagguucaucugccugaugugcacaagcaaauuuccggggucgaccucggacugcccaauuggggcaaauaugugcugaucagcgccggggcgcucacggcccugaugcuuaugauuuuucugaugacauguugcagaaagaccaaccgcgcugagucuauccagcacuccccgggagaaaccggccggaagguuagcgugacaucucacaacgggagagucauuuccagcugggaguccuacaaaucuggcagcgaaaccaagcucuga

SEQ ID NO: 223094 - RNA, 1575 nt, Artificial Sequence; identical to SEQ ID NO: 223084
  derived and/or modified CDS sequence (opt5) from glycoprotein__RABV__FJ825134.1

SEQ ID NO: 223095 - RNA, 1575 nt, Artificial Sequence
  derived and/or modified CDS sequence (opt5) from glycoprotein__RABV__FJ866832.1
augaucccccaggugcugcuguucgucccucugcuuguuuuuagcuccugcuucggcaaguuuccgauuuacaccauccccgacaaacuggggccuuggucucccauugauauccaccaucucagcuguccuaacaaucuggugguggaggacgaaggaugcacaaaccuuuccggcuucucuuauauggagcugaaggucggguacauuagcgccaucaaagugaauggauuuacguguaccggcguugugacagaagcugagaccuauacaaacuucgucggguacgugaccacaaccuuuaagagaaaacacuuccggcccaugccugaugccugccgcgcggcuuauaauuggaagauggccggagacccgagauacgaagagucccuccauaaccccuauccugauuaccacuggcugcggacgguuaagaccacaaaagagucucuggugaucauuagccccuccgucgccgaccucgauccuuacgacaagagccugcauucucgcguguuucccggcggcaaauguuccgggaucaccgugagcucuacaugcuguuccaccaaucacgauuauacgauuuggaugccggaaaacccuagacuuggaacaagcugcgacaucuucgcuaauucucggggcaagcgcgccuccaaagggggaaagaccuguggcuuugucgaugagagagggcuguacaagagccucaaaggagcuugcaagcugaaacuuuguggcguucugggccuccggcugauggacgggacauggguggccauucaaaccuccgaugaaaucaaguggugcucucccgaccagcuggugaaccuccacgacuuccauagcgaugagauugagcaccuggucguggaggaacuuguuaaaaagcgcgaagagugccuggacgcgcucgaaaccaucaugacaacgaaauccgugagcuuuagacggcugucucaucuucgcaagcuggucccuggauucggcaaggccuauaccaucuucaauaaaacacucauggaggcugaugcccacuacaaguccauuagaaccuggaacgagaucauucccagcaaagggugucugcgggugggaggccgcugccacccccauguuaaugggguguuuuucaacggaaucauucugggcccugacggccacguccucaucccggaaaugcagucuagccugcuucaucagcacauggagcugcucgaauccucugugaucccccugaugcauccucuugcugaucccagcacagucuuuaaggacggggaugaggccgaagacuucguggagguucaccucccugaugugcacaaacaaauuuccggagucgaccucggccugcccaauugggggaaguaugugcugaucagcgcgggagcccucaccgcucugaugcuuacgauuuuucugaugacauguugcagaaagaccaaccgggccgagucuauccagcauuccccgggcgaaaccgggagaaaaguuagcgugacaucucacaacggccgcgucauuuccagcugggaguccuacaagucuggaagcgaaaccaaacucuga

SEQ ID NO: 223096 - RNA, 1575 nt, Artificial Sequence
  derived and/or modified CDS sequence (opt5) from glycoprotein__RABV__FJ866834.1
augaucccccaggugcugcuguucgucccucugcuuguuuuuagcuccugcuucggcaaguuuccgauuuacaccauccccgacaaacuggggccuuggucucccauugauauccaccaucucagcuguccuaacaaucuggugguggaggacgaaggaugcacaaaccuuuccggcuucucuuauauggagcugaaggucggguacauuagcgccaucaaagugaauggauuuacguguaccggcguugugacagaagcugagaccuauacaaacuucgucggguacguggccaccacauuuaagagaaaacacuuccggcccaugccugaugcgugccgcgcugccuauaauuggaagauggccggagacccgagauacgaagagucccuccauaaccccuauccugauuaccacuggcugcggaccguuaagacgaccaaagagucucuggugaucauuagccccuccgucgcugaccucgauccuuacgacaagagccugcauucucgcguguuucccggcggcaaauguuccgggaucacagugagcucuaccugcuguuccacaaaucacgauuauaccauuuggaugccggaaaacccuagacuuggaacgagcugcgacaucuucacaaauucucggggcaagcgcgccuccaaagggggaaagaccuguggcuuugucgaugagagagggcuguacaagagccucaaaggagcuugcaagcugaaacuuuguggcguucugggccuccggcugauggacgggacauggguggccauucaaaccuccgaugaaaucaaguggugcucucccgaccagcuggugaaccuccacgacuuccauagcgaugagauugagcaccuggucguggaggaacuuguuaaaaagcgcgaagagugccuggacgcgcucgaaaccaucaugacaacgaaauccgugagcuuuagacggcugucucaucuucgcaagcuggucccuggauucggcaaggccuguaccaucuucaauaaaacacucauggaggcugaugcccacuauaaguccauuagaaccuggaacgagaucauucccagcaaagggugccugcgggugggaggccgcugucacccccauguuaaugggguguuuuucaacggaaucauucugggcccugacggccacguccucaucccggaaaugcagucuagccugcuucaucagcacauggagcugcucgaauccucugugaucccccugaugcauccucuugcugaucccagcacagucuuuaaggacggggaugaggccgaagacuucguggagguucaccucccugaugugcacaaacaaauuuccggagucgaccucggccugcccaauugggggaaguacgugcugaucagcgcgggagcccucaccgcucugaugcuuacgauuuuucugaugacaugcuguagaaagaccaaccgggccgagucuauccagcauuccccgggcgaaaccgggagaaaaguuagcgugacaucucacaacggccgcgucauuuccagcugggaguccuauaagucuggaagcgaaaccaaacucuga

SEQ ID NO: 223097 - RNA, 1575 nt, Artificial Sequence
  derived and/or modified CDS sequence (opt5) from glycoprotein__RABV__FJ866835.1
augaucccccaggugcugcuguucgucccucugcuuguuuuuagcuccugcuucggcaaguuuccgauuuacaccauccccgacaaacuggggccuuggucucccauugauauccaccaucucagcuguccuaacaaucuggugguggaggacgaaggaugcacaaaccuuuccggcuucucuuauauggagcugaaggucggguacauuagcgccaucaaagugaauggauuuacguguaccggcguugugacagaagcugagaccuauacaaacuucgucggguacgugaccacaaccuuuaagagaaaacacuuccggcccaugccugaugccugccgcgcggcuuauaauuggaagauggccggagacccgagauacgaagagucccuccauaaccccuauccugauuaccacuggcugcggacgguuaagaccacaaaagagucucuggugaucauuagccccuccgucgccgaccucgauccuuacgacaagagccugcauucucgcguguuucccggcggcaaauguuccgggaucaccgugagcucuacaugcuguuccaccaaucacgauuauacgauuuggaugccggaaaacccuagacuuggaacaagcugcgacaucuucaccaauucucggggcaagggggcuuccaaaggaggcaagacauguggguuugucgaugagcgcggacuguacaagagccucaaaggcgccugcaagcugaaacuuuguggcguucuggggcucagacugauggacggaaccuggguggcuauucaaaccuccgccgaaaucaaguggugcucucccgaucagcuggugaaccuccacgacuuccauagcgacgagauugagcaccuggucguggaggaacuuguuaaaaagcgggaagagugccuggaugcgcucgaaacaaucaugacgaccaaauccgugagcuuucgcagacugucucaucuucggaagcuggucccuggcuucgggaaggccuauacaaucuucaauaaaacccucauggaggcugacgcccacuacaaguccauucgcacauggaacgagaucauucccagcaaaggaugucugagagugggcgggcggugccacccccauguuaauggaguguuuuucaacggcaucauucugggcccugaugggcacguccucaucccggaaaugcagucuagccugcuucaucagcacauggagcugcucgaauccucugugaucccccugaugcauccucuugcugaccccagcaccgucuuuaaggauggagacgaggccgaagauuucguggagguucaccucccugacgugcacaaacaaauuuccggcgucgaucucgggcugcccaauuggggaaaguaugugcugaucagcgcgggcgcccucacggcucugaugcuuacaauuuuucugaugaccuguugccgcaagaccaacagagccgagucuauccagcauuccccgggggaaacaggccggaaaguuagcgugaccucucacaacggaagagucauuuccagcugggaguccuacaagucuggcagcgaaacaaaacucuga

SEQ ID NO: 223098 - RNA, 1575 nt, Artificial Sequence
  derived and/or modified CDS sequence (opt5) from glycoprotein__RABV__FJ959397.1
augaucccccaggcccuccuguucgugccucugcuugucuuuccgcugugcuucggcaaguuucccauuuacaccaucccugacaaacucgggcccuggagcccuauugauauccaccaucuguccugucccaacaaucuuguuguggaggacgaaggaugcacaaaccugucuggcuucagcuauauggagcucaaggugggguacauuuccgcuaucaaagucaauggauuuacguguaccggcgugguuacagaagccgagaccuauacaaacuucgugggguacgucaccacaaccuuuaagagaaaacacuuccggccuacgccggaugcgugccgcucugcuuauaauuggaagauggccggagaccccagauacgaagagagccugcauaacccuuaucccgauuaccacuggcugcggaccgugaagacaaccaaagaguccguugugaucauuucuccuagcgucgccgaccucgaucccuacgacaagucccugcauagccgcguguuuccgagaggcaaauguucuggcaucacaguguccagcgcuuauugcucuaccaaucacgauuacacgauuuggaugccugaaaacccccggcuugggacauccugugacaucuucaccaauagccgcggaaagagagccucuaaaggcuccaagacaugcggguuugucgaugagcggggacuguauaagagccucaaaggcgcuuguaagcugaaacuuugcgggguucugggacuccgccugauggacggcaccuggguggccauucaaaccuccaacgaaacaaagugguguccucccgaucagcuggugaaucuccacgacuuccauucugacgagaucgagcaccuggucguggaggaacuuguuaaaaagagagaagagugccuggaugcgcucgaaagcauuaugacgaccaaauccgugagcuuucggcgccugucucaucuuagaaagcugguccccggcuucgggaaggccuacacaaucuucaacaaaacccucauggaggcugacgcccacuauaaguccgugcggacauggaaugagaucauuccuagcaaaggaugccugcgcguuggcgggagaugucacccgcaugugaacggagucuuuuucaauggcaucauucuggggcccgauggacacgugcucaucccugaaaugcagucuagccugcuucagcaacauauggagcugcucgaauccucugucauuccccugaugcacccucuugcugaccccagcaccguguuuaaggauggcgacgagguugaagauuucguggagguccaucugccggacgugcacaaacagguuuccggcguggaucucgggcugccuaacuggggaaaggacguccugaugggcgccggggugcucacggcgcugaugcuuaugaucuuucugaugacaugcugucggagaaccaaccgcgccgagagcauccagcacucucucggagaaaccggccggaagguguccguuacaagccagucugggagagucauuuccagcugggaguccuacaaaucuggcggagaaaccaagcuguga

SEQ ID NO: 223099 - RNA, 1575 nt, Artificial Sequence
  derived and/or modified CDS sequence (opt5) from glycoprotein__RABV__FJ979833.1
auggugccccaggcccuucucuucgucccucugcuuggcuuuagccugugcuucgggaaguuuccgaucuacaccauucccgacgagcucggaccuuggucccccaucgauauucaccaucugucuuguccuaacaaucuuguuguggaagacgagggcugcacaaaccugagcgaguucuccuauauggagcucaaagugggguacaucucugcuauuaaggucaauggauuuacguguaccggcgugguuacagaagccgaggcguauaccaacuucgugggguacgucacaaccacauuuaaaagaaagcacuuccggcccaccccugaugcuugccgcgccgccuauaauuggaaaauggcuggagacccgagauacgaggaaagccugcauaaccccuauccugauuaccacuggcugcggacggugcgcaccacaaaggagucccucaucaucauuucucccagcguuaccgaccuggauccuuacgacaagucccuucauagcagaguguuucccggcggcaaauguucugggaucacagucuccagcaccuauugcucuacgaaucacgauuacacaauuuggaugccggaagacccucggccccgcaccccuugugauaucuucacaaacuccagaggaaagcgggccagcaaaggcaauaagaccugcggguuuguggacgagcgcggacuguauaaaucucucaagggcgcuuguagacugaagcugugcggggugcugggacuccggcugauggauggcaccugggucgccaugcaaacauccgacgagacgaaaugguguccucccgaccagcugguuaaccuccacgauuuccagagcgacgaaauugagcaucuggugguggaagaacuugucaagaaacgcgaaggcugccuggaugcgcucgaguccaucaugaccacaaagucugugagcuuuagacgguucucccaucugcgcaaacuuguucccggguucggaaaggccuacaccauuuuuaauaaaacacugauggaggcugacgcccacuauaagagcgugagaaccuggaacgaaaucaucccgucuaagggcugccucaaagucgggggacggugucacccccacgugaauggcguuuucuuuaacgggauuauccugggaccugauggccaugugcugauucccgagaugcaguccagccuccugcaacagcacauggaacuucugaagucuagcgucaucccucucaugcauccccuggcugacccguccacgguguucaaagagggcgaugaagccgaggacuuugucgaggugcaccuuccugauguuuacaagagaauuucugggguggaccugggacuccccaauuggggcaaauauguccugaugacagcgggggccaugaucggacuggugcucaucuucagccugaugaccuggugccgccgggcuaacagaccugaauccaagcagcgcagcuuuggcgggaccggccggaacguuucugugacaucccagagcggaaaggucauucccucuugggaguccuacaaaagcggcggggaaaccggacuuuga

SEQ ID NO: 223100 - RNA, 1575 nt, Artificial Sequence
  derived and/or modified CDS sequence (opt5) from glycoprotein__RABV__GQ303557.1
augaucccccaggcccuucucuucgugccucugcuugucuuuagcuccugcuucggcaaguuuccgauuuacaccauccccgacaaacuggggccuuggucucccauugauauccaccaucucagcuguccuaacaaucugguuguggaggacgaaggaugcacaaaccuuuccggcuucucuuauauggagcugaaggugggguacauuagcgcuaucaaagucaauggauuuacguguaccggcgugguuacagaagccgagaccuauacaaacuucgugggguacgucaccacaaccuuuaagagaaaacacuuccggcccacgccugaugcgugccgcgcugccuauaauuggaagauggccggagacccgagauacgaagagucccuccauaaccccuauccugauuaccacuggcugcggaccgugaagacaaccaaagagucucugguuaucauuagccccuccgugagcgaccucgauccuuacgacaagucucugcauucccgcgucuuucccagcggcaaauguucuggcaucacaguguccagcaccuauugcccgacgaaucacgauuacacaauuuggaugccugaaaaccccagacuugggaccucuugugacaucuucacaaauucccggggaaagcgcgcuagcaaaggcgggaagaccugcggauuuguggaugagagaggccuguauaagucccucaaaggggccuguaagcugaaacuuugcggaguccugggccuccggcugauggacggcaccuggguugcuauucaaacaucugaugaagccaagugguguccucccgaccagcuggugaacauccacgacuuccgcagcgaugagauugagcaucucguggucgaggaacuggugaaaaagagagaagagugccuugacgcgcuggaauccaucaugacgaccaaaagcguuucuuuucggcgccucucccaccugagaaagcuggugcccggguucggaaaggccuacacaaucuucaauaaaacccugauggaggcugaugcccauuauaagagcguccggacauggaacgagauuaucccuucuaaaggcugccuccgcguugggggaagaugucacccgcacgugaauggcguguuuuucaacgggauuauccugggacccgacggccauguccugauuccugaaaugcagagcucccuccugcagcaacacauggagcuucuggaaucuagcgugaucccccucaugcauccucuggcugaucccuccaccgucuuuaaggacggcgaugaggccgaagacuucguggagguucaccuuccggaugugcauaaacaggucagcgggguggaccugggacucccuucuuggggcaaguacguucugauguccgugggggcgaugaucgcccugaugcucaugauuuuucugaugacgugcugucggaaggcuaauggagccgagacaauccagcacagacuuggcgaaaccgggcgcaaagucagcgugaccucucaguccggccgggugauuagcuccugggagucuuauaagagcggaggcgaaacaaaacuguga

SEQ ID NO: 223101 - RNA, 1575 nt, Artificial Sequence; identical to SEQ ID NO: 222929
  derived and/or modified CDS sequence (opt5) from glycoprotein__RABV__GQ406342.1

SEQ ID NO: 223102 - RNA, 1575 nt, Artificial Sequence
  derived and/or modified CDS sequence (opt5) from glycoprotein__RABV__GQ412744.1
auggugccccaggcccugcuccuggucccucuucugggcuucagccucugcuuugggaaguucccgaucuacaccauucccgacacacugggaccuuggucccccaucgauauucaccaccuuucuuguccuaacaaucugguuguggaggacgaaggcugcacgaaccucagcggguuuuccuauauggagcugaaagugggacacaucucugcuauuaaggucaauggcuucaccuguacaggggugguuaccgaagccgagacauacaccaacuuugugggauaugucacaaccacguucaaaagaaagcauuuucggcccaccccugaugcgugccgcgcugccuacaauuggaaaauggccggcgacccgagauaugaagagagccugcacucccccuacccugauuaucauuggcuccggacagugaagaccacaaaggagucucugguuaucaucagccccuccguggcuaaccuugacccuuacgauaauagccugcacucucgcgucuuccccuccggcaaauguagcgggauuaccgugccgucuguguacugcuccacgaaccacgacuauacagucuggaugccugaaauccucagacugggaaccagcugugauauuuuuacaaauucucggggcaagcgcgccuccaaagggagcaagaccugcggauucguugacgagagaggccuuuacaaaucccugaagggggcuuguaagcucaaacugugcggagugcccggccugcggcucauggauggcaccuggguggccaugcaaacaucuaacgaaacgaagugguguccucccgggcagcuggucaaucuucaugaccugcacagcgaugagaucgagcaucucgugguugaggaacuggugaaaaagcgcgaagagugccuugacgcgcuggaauccauuaucaccacaaaaagcgucucuuuuagacggcucucccaucugcgcaagcuggugcccggauucggcaaagccuauaccauuuuuaacaagacacucauggaggcugaggcccacuacaagagcguuagaaccuggaaugaaaucaucccuucuaaagggugccugcgggugggaggccgcugucacccgcacgucaacgggguguucuucaauggaauuauccuuggccccgacggccauguccugauuccugagaugcagagcucccuccugcagcaacacaucgaacuucuggagucuagcgugauuccccucaugcauccucuggcugaucccuuuacgguuuucaaggacggggaugaaaucgaggacuuuguggagguccaucugccggaugugcacgaacagguuuccggaguggaccucggccugccuaacuggggagaguauguccuucugagcgccgggacacucaucgcgcugaugcugauuaucuuccuuauuaccugcuguaaaagaguggaucggcccgaaucuacccagagaucccuccgcggcacagggcggaacgugagcguuaccucucaguccggcaaguuuaucccuagcugggaguccuacaaaucuggaggcgaaacagggcuguga

SEQ ID NO: 223103 - RNA, 1575 nt, Artificial Sequence
  derived and/or modified CDS sequence (opt5) from glycoprotein__RABV__GQ472535.1
auggugccccaggcccugcuguucgucccucugcuugcuguuccgcugugcuuuggcaaguuccccaucuacaccauuccugacaaacucgggcccuggagcccuaucgauauucaccaucuguccugucccaacaaucuugugguggaggacgaaggaugcacaaaccugucuggcuuuagcuauauggagcucaaggucggguacaucuccgccauuaaagugaauggauucacguguaccggcguugugacagaagcggagaccuauacaaacuuugucggguacgugaccacaaccuucaagagaaaacacuuucggccuacgccggaugcuugccgcucuaccuauaauuggaagauggccggagaccccagacaugaagagagccugcacaacccuuaccccgauuaucauuggcugcggacaguuaagaccacaaaagaguccuucgugaucaucucuccuagcgucgccgaccucgaucccuacgacaagucccugcacagccgcguguuuccgagaggcaaauguucuggcauuaccguguccagcacguacugcucuacaaaucacgauuauaccaucuggaugccugaaaacccccggcuugggacauccugugacauuuucaccaauagccgcggaaagagagcuucuaaaggcuccaagaccugcggguuugucgaugagcggggacuguacaagagccucaaaggcgccuguaagcugaaacuuugcgggguucugggacuccgccugauggacggcacauggguggcuauccaaacguccgaugaaaccaagugguguccucccgaccagcuggugaaccuccaugacuuccacucugaugagauugagcaucuggucguggaggaacuuguuaaaaagagagaagagugccuggacgcccucgaaagcaucaugacaaccaaauccgugagcuuucggcgccugucucaccuuagaaagcugguccccggcuucgggaaggcguauacaauuuucaauaaaacccucauggaggccgaugcucacuacaaguccgugcggacguggaacgagaucaucccuagcaaaggaugccugcgcguuggcgggagaugucauccgcacgugaauggagucuuuuucaacggcauuauccuggggcccgacggacaugugcucauuccugaaaugcagucuagccugcuucagcaacacauggagcugcucgaauccucugucaucccccugaugcauccucuugccgaucccagcacaguguuuaaggacggcgaugaggcugaagacuucguugaggugcaccucccggauguccacaaacagguguccggcguugaccucgggcugccuagcuggggaaaguaugcccugaugucugcgggcauucucaccgcccugaugcuuaugaucuuucugaugaccugcugucggagaacaaaucgcgcugaguccauccagcauagccucggggaaaccggacggaaggugucugucacaucccagaacggcagagugauuagcuccugggagucuuacaaaagcgggggcgaaacgaagcuguga

SEQ ID NO: 223104 - RNA, 1575 nt, Artificial Sequence
  derived and/or modified CDS sequence (opt5) from glycoprotein__RABV__GQ472536.1
auggugccccaggcccuucucuucgucccucugcuugcuaucccgcugugcuuuggcaaguuccccauuuacaccaucccugacaaacucgggcccuggagcccuauugauauccaccaucuguccugucccaacaaucuuguuguggaggacgaaggaugcacaaaccugucuggcuuuagcuauauggagcucaaggugggguacauuuccgccaucaaagucaauggauucacguguaccggcgugguuacagaagcggagaccuauacaaacuuugugggguacgucaccacaaccuucaagagaaaacacuuucggccuacgccggaugcuugccgcucugccuauaauuggaagauggccggagaccccagauacgaagagagccugcauaacccuuaucccgauuaccacuggcugcggaccgugaagacaaccaaagaguccuucguuaucauuucuccuagcguggcugaccucgaucccuacgacaagucccugcuuagccgcgucuuuccgagaggcaaauguucuggcaucacaguguccagcaccuauugcucuacgaaucaugauuacacaauuuggaugccugaaaacccccggcuggggaccuccugugacaucuucacaaauagccgcggaaagagagccucuaaaggcuccaagaccugcggguuuguggaugagcggggacucuauaagagccugaaaggcgcuuguaagcugaaacugugcgggguccucggacugcgccugauggacggcaccuggguugccauucaaacauccgaugaaacgaagugguguccucccgaccagcucgugaaccugcacgacuuccacucugaugagaucgagcaucuuguggucgaggaacuggugaaaaagagagaagagugccucgacgcgcuggaaagcauuaugaccacaaaauccguuagcuuucggcgccuuucucaccugagaaagcucgugcccggcuucgggaaggccuacaccaucuucaauaaaacacugauggaggcugaugcccauuauaaguccguccggaccuggaacgagaucauuccuagcaaaggaugccugcgcgugggcgggagaugucacccgcacguuaauggaguguuuuucaacggcaucauucucgggcccgacggacauguccugaucccugaaaugcagucuagccuucugcagcaacacauggagcuccuggaauccucugugauuccccuuaugcauccucuggcugaucccagcacggucuuuaaggacggcgaugaggccgaagacuucguggagguucaccucccggaugugcauaaacaggucuccggcguggaccuggggcugccuagcuggggaaaguacguucucaugucugcgggcauccugacagcccuuaugcugaugaucuuucucaugaccugcugucggagaaccaaucgcgcugaguccauucagcacagccugggggaaacaggacggaaggugucugucaccucccagagcggcagagugaucuccucuugggagagcuauaaauccgggggcgaaacaaagcuguga

SEQ ID NO: 223105 - RNA, 1575 nt, Artificial Sequence; identical to SEQ ID NO: 222599
  derived and/or modified CDS sequence (opt5) from glycoprotein__RABV__GQ472537.1

SEQ ID NO: 223106 - RNA, 1575 nt, Artificial Sequence
  derived and/or modified CDS sequence (opt5) from glycoprotein__RABV__GQ472539.1
augaucccccaggugcuccuguucgucccucugcuuguuuuuagcuccugcuucggcaaguuuccgauuuacaccauccccgacaaacuggggccuuggucucccauugauauccaccaucucagcuguccuaacaaucuggugguggaggacgaaggaugcacaaaccuuuccggcuucucuuauauggagcugaaggucggguacauuagcgccaucaaagugaauggauuuacguguaccggcguugugacagaagcugagaccuauacaaacuucgucggguacgugaccacaaccuuuaagagaaaacacuuccggcccaugccugaugccugccgcgcggcuuauaauuggaagauggccggagacccgagauacgaagagucccuccauaaccccuauccugauuaccacuggcugcggacgguuaagaccacaaaagagucucuggugaucauuagccccuccgucgccgaccucgauccuuacgacaagagccugcauucucgcguguuucccggcggcaaauguuccgggaucaccgugagcucuacaugcuguuccaccaaucacgauuauacgauuuggaugccggaaaacccuagacuuggaacaagcugcgacaucuucaccaauucucggggcaagcgcgcuuccaaagggggaaagacauguggcuuugucgaugagagagggcuguacaagagccucaaaggagccugcaagcugaaacuuuguggcguucugggccuccggcugauggacgggaccuggguggcuauucaaaccuccgaugaaaucaaguggugcucucccgaccagcuggugaaccuccacgacuuccauagcgaugagauugagcaccuggucguggaggaacuuguuaaaaagcgcgaagagugccuggacgcccucgaaacaaucaugacgaccaaauccgugagcuuuagacggcugucucaucuucgcaagcuggucccuggauucggcaaggcguauacaaucuucaauaaaacccucauggaggccgaugcucacuacaaguccauuagaacauggaacgagaucauucccagcaaagggugucugcgggugggaggccgcugccacccccauguuaaugggguguuuuucaacggaaucauucugggccucgacggccacguccugaucccugaaaugcagucuagccuucugcaucagcacauggagcuccuggaauccucugugaucccgcuuaugcauccccuggccgauccuagcaccgucuuuaaggacggggaugaggcugaagacuucguggagguucaccuccccgaugugcacaaacaaauuuccggagucgaccugggccugccuaauugggggaaguaugugcucacgagcgccggagcgcugacagcccuuaugcugaugaucuuucucaugaccuguugcagaaagaccaaccgggcugagucuauucagagaucccccggcgaaacagagcgcaaaguuagcgugaccucucauaacgggcgggucaucuccagcugggaauccuacaagucuggcggagagacaaaacuguga

SEQ ID NO: 223107 - RNA, 1575 nt, Artificial Sequence
  derived and/or modified CDS sequence (opt5) from glycoprotein__RABV__GQ472540.1
auggugccccaggcccuccuguucgucccucugcuugcuguuccgcugugcuuuggcaaguuccccaucuacaccauuccugacaaacucgggcccuggagcccuaucgauauucaccaucuguccugucccaacaaucuugugguggaggacgaaggaugcacaaaccugucuggcuuuagcuauauggagcucaaggucggguacaucuccgccauuaaagugaauggauucacguguaccggcguugugacagaagcggagaccuauacaaacuuugucggguacgugaccacaaccuucaagagaaaacacuuucggccuacgccggaugcuugccgcucugccuauaauuggaagauggccggagaccccagauacgaagagagccugcauaacccuuaucccgauuaccacuggcugcggaccguuaagacaaccaaagaguccuucgugaucaucucuccuagcgucgcugaccucgaucccuacgacaagucccugcauagccgcguguuuccgagaggcaaauguucuggcauuacaguguccagcaccuauugcucuacgaaucacgauuacacaaucuggaugccugaaaacccccggcuugggaccuccugugacauuuucacaaauagccgcggaaagagagccucuaaaggcuccaagaccugcggguuugucgaugagggaggccuguauaagagccucaaaggggcuuguaagcugaaacuuugcggaguucugggccuccggcugauggacggcaccuggguggccauccaaacauccgaugaaacgaagugguguccucccgaccagcuggugaaccuccacgacuuccauucugaugagauugagcaccuggucguggaggaacuuguuaaaaagcgcgaagagugccuggacgcgcucgaaagcaucaugaccacaaaauccgugagcuuuagacggcugucucaucuucgcaagcugguccccggguucggaaaggccuacaccauuuucaauaaaacacucauggaggcugaugcccacuauaaguccgugagaaccuggaacgagaucaucccuagcaaaggcugccugcggguugggggacgcugucacccgcaugugaauggcgucuuuuucaacgggauuauccugggacccgacggccacgugcucauuccugaaaugcagucuagccugcuucagcaacauauggagcugcucgaauccucugucaucccccugaugcacccucuugcugaucccagcacgguguuuaaggacggcgaugaggccgaagacuucguugaggugcaucugccggauguccacaaacagguguccgggguugaccucggacugccuagcuggggcaaguacgugcugaugucugcggggauucucacagcccugaugcuuaccaucuuucugaugaccugcuguagacggacaaauagagcugaguccauccagcacagccucggagaaaccggccgcaaggucucugugacaucccagagcgggcgggugauuuccucuugggagagcuauaaauccggcggagaaacgaagcuguga

SEQ ID NO: 223108 - RNA, 1575 nt, Artificial Sequence
  derived and/or modified CDS sequence (opt5) from glycoprotein__RABV__GQ472541.1
auggugccccaggcccuccuguucgucccucugcuugcuaucccgcugugcuuuggcaaguuccccauuuacaccaucccugacaaacucgggcccuggagcccuauugauauccaccaucuguccugucccaacaaucuuguuguggaggacgaaggaugcacaaaccugucuggcuuuagcuauauggagcucaaggugggguacauuuccgccaucaaagucaauggauucacguguaccggcgugguuacagaagcggagaccuauacaaacuuugugggguacgucaccacaaccuucaagagaaaacacuuucggccuacgccggaugcuugccgcucugccuauaauuggaagauggccggagaccccagauacgaagagagccugcauaacccuuaucccgauuaccacuggcugcggaccgugaagacaaccaaagaguccuucguuaucauuucuccuagcguggcugaccucgaucccuacgacaagucccugcauagccgcgucuuuccgagaggcaaauguucuggcaucacaguguccagcaccuauugcucuacgaaucacgauuacacaauuuggaugccugaaaacccccggcuugggaccuccugugacaucuucacaaauagccgcggaaagagagccucuaaaggcuccaagaccugcggguuuguggaugagcggggacuguauaagagccucaaaggcgcuuguaagcugaaacuuugcgggguccugggacuccgccugauggacggcaccuggguugccauucaaacauccgaugaaacgaagugguguccucccgaccagcuggugaaccuccacgacuuccauucugaugagaucgagcaccugguggucgaggaacuugugaaaaagagagaagagugccuggacgcgcucgaaagcauuaugaccacaaaauccguuagcuuucggcgccugucucaucuuagaaagcuggugcccggcuucgggaaggccuacaccaucuucaauaaaacacucauggaggcugaugcccacuauaaguccguccggaccuggaacgagaucauuccuagcaaaggaugccugcgcgugggcgggagaugucacccgcauguuaauggaguguuuuucaacggcaucauucuggggcccgacggacacguccucaucccugaaaugcagucuagccugcuucagcaacauauggagcugcucgaauccucugugauuccccugaugcacccucuugcugaucccagcacggucuuuaaggacggcgaugaggccgaagacuucgaugaggugcaucugccggacguucacaaacagguguccggcgucgaucucgggcugccuagcuggggaaaguacgugcugaugucugcgggcauccucacagcccugaugcuuaugaucuuucugaugaccugcugucggagaaccaaucgcgcugaguccauucagcacagccucggggaaacaggacggaagguuucugugaccucccagagcggcagagucaucuccucuugggagagcuauaaauccgggggcgaaacaaagcuguga

SEQ ID NO: 223109 - RNA, 1575 nt, Artificial Sequence
  derived and/or modified CDS sequence (opt5) from glycoprotein__RABV__GQ472542.1
augaucccccaggugcugcuguucgucccucugcuuguuuuuagcuccugcuucggcaaguuuccgauuuacaccauccccgacaaacuggggccuuggucucccauugauauccaccaucucagcuguccuaacaaucuggugguggaggacgaaggaugcacaaaccuuuccggcuucucuuauauggagcugaaggucggguacauuagcgccaucaaagugaauggauuuacguguaccggcguugugacagaagcugagaccuauacaaacuucgucggguacgugaccacaaccuuuaagagaaaacacuuccggcccaugccugaugccugccgcgcggcuuauaauuggaagauggccggagacccgagauacgaagagucccuccauaaccccuauccugauuaccacuggcugcggacgguuaagaccacaaaagagucucuggugaucauuagccccuccgucgccgaccucgauccuuacgacaagagccugcauucucgcguguuucccggcggcaaauguuccgggaucaccgugagcucuacaugcuguuccaccaaucacgauuauacgauuuggaugccggaaaacccuagacuuggaacaagcugcgacaucuucaccaauucucggggcaagcgcgcuuccaaagggggaaagacauguggcuuugucgaugagagagggcuguacaagagccucaaaggagccugcaagcugaaacuuuguggcguucugggccuccggcugauggacgggaccuggguggcuauucaaaccuccgaugaaaucaaguggugcucucccgaccagcuggugaaccuccacgacuuccauagcgaugagauugagcaccuggucguggaggaacuuguuaaaaagggagaagagugccuggacgcccucgaaacaaucaugacgaccaaauccgugagcuuucgcagacugucucaucuucggaagcuggucccuggcuucgggaaggcguauacaaucuucaauaaaacccucauggaggccgaugcucacuacaaguccauucgcacauggaacgagaucauucccagcaaaggaugucugagagugggcgggcggugccacccccauguuaauggaguguuuuucaacggcaucauucugggcccugacgggcacguccucaucccggaaaugcagucuagccugcuucaucagcacauggagcugcucgaauccucugugaucccccugaugcauccucuugccgaucccagcaccgucuuuaaggacggagaugaggcugaagacuucguggagguucaccucccugaugugcacaaacaaauuuccggcgucgaccucgggcugcccaauuggggaaaguaugugcugaucagcgccggcgcgcucacggccucuaugcugaugauuuuucuuaugacauguugccgcaaggcuaacagagccgaguccauccagcauaacccgggggaaaccggccggaaaguuagcgugaccucucacaauggaagagucauuuccagcugggaguccuacaagucuggcggggaaacaaaacuguga

SEQ ID NO: 223110 - RNA, 1575 nt, Artificial Sequence; identical to SEQ ID NO: 222599
  derived and/or modified CDS sequence (opt5) from glycoprotein__RABV__GQ472543.1

SEQ ID NO: 223111 - RNA, 1575 nt, Artificial Sequence
  derived and/or modified CDS sequence (opt5) from glycoprotein__RABV__GQ472544.1
augaucccccaggugcugcuguucgucccucugcuuguuuuuagcuccugcuucggcaaguuuccgauuuacaccauccccgacaaacuggggccuuggucucccauugauauccaccaucucagcuguccuaacaaucuggugguggaggacgaaggaugcacaaaccuuuccggcuucucuuauauggagcugaaggucggguacauuagcgccaucaaagugaauggauuuacguguaccggcguugugacagaagcugagaccuauacaaacuucgucggguacgugaccacaaccuuuaagagaaaacacuuccggcccaugccugaugccugccgcgcggcuuauaauuggaagauggccggagacccgagauacgaagagucccuccauaaccccuauccugauuaccacuggcugcggacgguuaagaccacaaaagagucucuggugaucauuagccccuccgucgccgaccucgauccuuacgacaagagccugcauucucgcguguuucccggcggcaaauguuccgggaucaccgugagcucuacaugcuguuccaccaaucacgauuauacgauuuggaugccggaaaacccuagacuuggaacaagcugcgacaucuucaccaauucucggggcaagcgcgcuuccaaagggggaaagacauguggcuuugucgaugagagagggcuguacaagagccucaaaggagccugcaagcugaaacuuuguggcguucugggccuccggcugauggacgggaccuggguggcuauucaaaccuccgaugaaaucaaguggugcucucccgaccagcuggugaaccuccacgacuuccauagcgaugagauugagcaccuggucguggaggaacuuguuaaaaagcgcgaagagugccuggacgcccucgaaacaaucaugacgaccaaauccgugagcuuuagacggcugucucaucuucgcaagcuggucccuggauucggcaaggcguauacaaucuucaauaaaacccucauggaggccgaugcucacuacaaguccauuagaacauggaacgagaucauucccagcaaagggugucugcgggugggaggccgcugccacccccauguuaaugggguguuuuucaacggaaucauucugggcccugacggccacguccucaucccggaaaugcagucuagccugcuucaucagcacauggagcugcucggguccucugugaucccccugaugcauccucuugccgaucccagcaccgucuuuaaggacggagaugaagcugaggacuucguggaaguucaccucccugaugugcacaaacaaauuuccggcgucgaccucgggcugcccaauuggggaaaguaugugcugaucagcgccggcgcgcucacggccucuaugcugaugauuuuucuuaugacauguugcagaaaggcuaaccgggccgaguccauccagcauaacccgggggagaccggcagaaaaguuagcgugaccucucacaauggacgcgucauuuccagcugggaauccuacaagucuggcggggagacaaaacuguga

SEQ ID NO: 223112 - RNA, 1575 nt, Artificial Sequence
  derived and/or modified CDS sequence (opt5) from glycoprotein__RABV__GQ472545.1
auggugccccagguccuucucuucguuccucugcuuguguuuagcuccugcuucggcaaguuuccgaucuacaccauucccgacaaacuggggccuuggucucccaucgauauucaccaucucagcuguccuaacaaucugguggucgaggacgaaggaugcacaaaccuuuccggcuucucuuauauggagcugaaggugggguacaucagcgccauuaaaguuaauggauuuacguguaccggcguggucacagaagcugagaccuauacaaacuucgugggguacguuaccacaaccuuuaagagaaaacacuuccggcccaugccugaugccugccgcgcggcuuauaauuggaagauggccggagacccgagauacgaagagucccuccauaaccccuauccugauuaccacuggcugcggacggugaagaccacaaaagagucucuggucaucaucagccccuccguggccgaccucgauccuuacgacaagagccugcauucucgcguguuucccggcggcaaauguuccgggauuaccgucagcucuacaugcuguuccaccaaucacgauuauacgaucuggaugccggaaaacccuagacuuggaacaagcugcgacauuuucaccaauucucggggcaagcgcgcuuccaaagggggaaagacauguggcuuuguugaugagagagggcuguacaagagccucaaaggagccugcaagcugaaacuuuguggcgugcugggccuccggcugauggacgggaccuggguggcuauccaaaccuccgaugaaauuaaguggugcucucccgaccagcuggucaaccuccacgacuuccauagcgaugagaucgagcacuuugugguugaggaacuggugaaaaagcgcgaagagugccuugacgcccuggaaacaauuaugacgaccaaauccgucagcuucagacggcucucucaucugcgcaagcuggugccuggauucggcaaggcguauacaaucuuuaauaaaacccugauggaggccgaugcucacuacaaguccaucagaacauggaacgagauuauccccagcaaagggugucuccggguuggaggccgcugccacccccaugugaauggggucuucuuuaacggaauuauccugggcccugacggccacgugcugauuccggaaaugcagucuagccuccugcaucagcacauggagcuucuggaauccucugucaucccccucaugcauccucuggccgaucccagcaccguguucaaggacggggaugaggcugaagacuuuguugaggugcaccuuccugauguccacaaacaaaucuccggaguggaccugggccuccccaauugggggaaguauguucugauuagcgccggagcgcugacggcccucaugcugaugaucuuccuuaugacauguugcagaaaggcuaaccgggccgagucuauucagcauaacccgggcgaaaccgggagaaaaguguccgucaccagccacaauggccgcgugaucucuuccugggagagcuacaaguccggaggcgaaacaaaacuguga

SEQ ID NO: 223113 - RNA, 1575 nt, Artificial Sequence; identical to SEQ ID NO: 222599
  derived and/or modified CDS sequence (opt5) from glycoprotein__RABV__GQ472546.1

SEQ ID NO: 223114 - RNA, 1575 nt, Artificial Sequence
  derived and/or modified CDS sequence (opt5) from glycoprotein__RABV__GQ472547.1
auggugccccaggcccuccuguucgucccucugcuugcuaucccgcugugcuuuggcaaguuccccauuuacaccaucccugacaaacucgggcccuggagcccuauugauauccaccaucuguccugucccaacaaucuuguuguggaggacgaaggaugcacaaaccugucuggcuuuagcuauauggagcucaaggugggguacauuuccgccaucaaagucaauggauucacguguaccggcgugguuacagaagcggagaccuauacaaacuuugugggguacgucaccacaaccuucaagagaaaacacuuucggccuacgccggaugcuugccgcucugccuauaauuggaagauggccggagaccccagauacgaagagagccugcauaacccuuaucccgauuaccacuggcugcggaccgugaagacaaccaaagaguccuucguuaucauuucuccuagcguggcugaccucgaucccuacgacaagucccugcauagccgcgucuuuccgagaggcaaauguucuggcaucacaguguccagcaccuauugcucuacgaaucacgauuacacaauuuggaugccugaaaacccccggcuugggaccuccugugacaucuucacaaauagccgcggaaagagagccucuaaaggcuccaagaccugcggguuuguggaugagcggggacuguauaagagccucaaaggcgcuuguaagcugaaacuuugcgggguccugggacuccgccugauggacggcaccuggguugccauucaaacauccgaugaaacgaagugguguccucccgaccagcuggugaaccuccacgacuuccauucugaugagaucgagcaccugguggucgaggaacuugugaaaaagagagaagagugccuggacgcgcucgaaagcauuaugaccacaaaauccguuagcuuucggcgccugucucaucuuagaaagcuggugcccggcuucgggaaggccuacaccaucuucaauaaaacacucauggaggcugaugcccacuauaaguccguccggaccuggaacgagaucauuccuagcaaaggaugccugcgcgugggcgggagaugucacccgcauguuaauggaguguuuuucaacggcaucauucuggggcccgacggacacguccucaucccugaaaugcagucuagccugcuucagcaacauauggagcugcucgaauccucugugauuccccugaugcacccucuugcugaucccagcacggucuuuaaggacggcgaugaggccgaagacuucguggagguucaucugccggaugugcacaaacaggucuccggcguggaccucgggcugccuagcuggggaaaguacguucugaugucugcgggcauccucacagcccugaugcuuaugaucuuucugaugaccugcugucggagaaccaaucgcgcugaguccauucagcacagccucggggaaacaggacggaaggugucugucaccucccagagcggcagagugaucuccucuugggagagcuauaaauccgaaggggagacaaagcuguga

SEQ ID NO: 223115 - RNA, 1575 nt, Artificial Sequence
  derived and/or modified CDS sequence (opt5) from glycoprotein__RABV__GQ472548.1
augaucccccaggugcugcuguucgucccucugcuuguuuuuagcuccugcuucggcaaguuuccgauuuacaccauccccgacaaacuggggccuuggucucccauugauauccaccaucucagcuguccuaacaaucuggugguggaggacgaaggaugcacaaaccuuuccggcuucucuuauauggagcugaaggucggguacauuagcgccaucaaagugaauggauuuacguguaccggcguugugacagaagcugagaccuauacaaacuucgucggguacgugaccacaaccuuuaagagaaaacacuuccggcccaugccugaugccugccgcgcggcuuauaauuggaagauggccggagacccgagauacgaagagucccuccauaaccccuauccugauuaccacuggcugcggacgguuaagaccacaaaagagucucuggugaucauuagccccuccgucgccgaccucgauccuuacgacaagagccugcauucucgcguguuucccggcggcaaauguuccgggaucaccgugagcucuacaugcuguuccaccaaucacgauuauacgauuuggaugccggaaaacccuagacuuggaacaagcugcgacaucuucaccaauucucggggcaagcgcgcuuccaaagggggaaagacauguggcuuugucgaugagagagggcuguacaagagccucaaaggagccugcaagcugaaacuuuguggcguucugggccuccggcugauggacgggaccuggguggcuauucaaaccuccgaugaaaucaaguggugcucucccgaccagcuggugaaccuccacgacuuccauagcgaugagauugagcaccuggucguggaggaacuuguuaaaaagcgcgaagagugccuggacgcccucgaaacaaucaugacgaccaaauccgugagcuuuagacggcugucucaucuucgcaagcuggucccuggauucggcaaggcguauacaaucuucaauaaaacccucauggaggccgaugcucacuacaaguccauuagaacauggaacgagaucauucccagcaaagggugucugcgggugggaggccgcugccacccccauguuaaugggguguuuuucaacggaaucauucugggcccugacggccacguccucaucccggaaaugcagucuagccugcuucaucagcacauggagcugcucgaauccucugugaucccccugaugcauccucuugccgaucccagcaccgucuuuaaggacggggaugaggcugaagacuucguggagguucaccucccugaugugcacaaacaaauuuccggagucgaccucggccugcccaauugggggaaguaugugcugacgagcgccggagcgcucacagcccugaugcuuaugaucuuucugaugaccuguugcagagagaccaaccgggcugaaucuauucagagauccccgggcgagacagaacgcaagguuagcgugaccucucauaacgggcgggucaucuccagcugggaguccuacaaaucuggcggagaaacaaagcucuga

SEQ ID NO: 223116 - RNA, 1575 nt, Artificial Sequence
  derived and/or modified CDS sequence (opt5) from glycoprotein__RABV__GQ472549.1
auggugccccaggcccuucucuucgucccucugcuugcuguuccgcugugccucggcaaguuucccaucuacaccauuccugacaaacuggggcccuggagcccuaucgauauucaccaucuuuccugucccaacaaucuggugguggaggacgaaggaugcacaaaccucucuggcuucagcuauauggagcugaaggucggguacaucuccgccauuaaagugaauggauuuacguguaccggcguugugacagaagcggagaccuauacaaacuucgucggguacgugaccacaaccuuuaagagaaaacacuuccggccuacgccggaugcuugccgcucugccuauaauuggaagauggccggagaccccagauacgaagagagccugcauaacccuuaucccgauuaccacuggcuccggaccguuaagacaaccaaagaguccuuugugaucaucucuccuagcgucgcugaccuggaucccuacgacaagucccuucauagccgcguguucccgagaggcaaauguucuggcauuacaguguccagcaccuauugcucuacgaaucacgauuacacaaucuggaugccugaaaacccccggcuggggaccuccugugacauuuuuacaaauagccgcggaaagagagccucuaaaggcuccaagaccugcggguucgucgaugagcggggacucuauaagagccugaaaggcgcuuguaagcugaaacugugcgggguucucggacugcgccugauggacggcaccuggguggccauccaaacauccgaugaaacgaagugguguccucccgaccagcucgugaaccugcacgacuuucauucugaugagauugagcaccuugucguggaggaacugguuaaaaagagagaagagugccucgacgcgcuggaaagcaucaugaccacaaaauccgugagcuuccggcgccuuucucaucugagaaagcucguccccggcuuugggaaggccuacaccauuuucaauaaaacacugauggaggcugaugcccacuauaaguccgugcggaccuggaacgagaucaucccuagcaaaggaugccugcgcguuggcgggagaugucacccgcaugugaauggagucuucuuuaacggcauuauccucgggcccgacggacacgugcugauuccugaaaugcagucuagccuucugcagcaacauauggagcuccuggaauccucugucaucccccuuaugcacccucuggcugaucccagcacgguguucaaggacggcgaugaggccgaagacuuuguugaggugcaucucccggauguccacaaacacguguccggcguugaccuggggcugccuagcuggggaaaguacgugcucgucucugcgggcauucugacagcccuuaugcugaccaucuuccucaugaccugcugucggagaacaaaucgcgcugaguccauccagcauagccugggggaaaccggacggaaggugucugugacaucccagagcggcagaguuauuuccucuugggagagcuauaaauccgggggcgaaacgaagcuguga

SEQ ID NO: 223117 - RNA, 1575 nt, Artificial Sequence
  derived and/or modified CDS sequence (opt5) from glycoprotein__RABV__GQ472550.1
auggugccccaggcccuccuguucgucccucugcuugcuaucccgcugugcuuuggcaaguuccccauuuacaccaucccugacaaacucgggcccuggagcccuauugauauccaccaucuguccugucccaacaaucuuguuguggaggacgaaggaugcacaaaccugucuggcuuuagcuauauggagcucaaggugggguacauuuccgccaucaaagucaauggauucacguguaccggcgugguuacagaagcggagaccuauacaaacuuugugggguacgucaccacaaccuucaagagaaaacacuuucggccuacgccggaugcuugccgcucugccuauaauuggaagauggccggagaccccagauacgaagagagccugcauaacccuuaucccgauuaccacuggcugcggaccgugaagacaaccaaagaguccuucguuaucauuucuccuagcguggcugaccucgaucccuacgacaagucccugcauagccgcgucuuuccgagaggcaaauguucuggcaucacaguguccagcaccuauugcucuacgaaucacgauuacacaauuuggaugccugaaaacccccggcuugggaccuccugugacaucuucacaaauagccgcggaaagagagccucuaaaggcuccaagaccugcggguuuguggaugagcggggacuguauaagagccucaaaggcgcuuguaagcugaaacuuugcgggguccugggacuccgccugauggacggcaccuggguugccauucaaacauccgaugaaacgaagugguguccucccgaccagcuggugaaccuccacgacuuccauucugaugagaucgagcaccugguggucgaggaacuugugaaaaagagaggcgaaugccuggacgcgcucgagagcauuaugaccacaaaauccguuagcuuucggcgccugucucaucuuagaaagcuggugcccggguucggaaaggccuacaccaucuucaauaaaacacucauggaagcugaugcccacuauaaguccguccggaccuggaacgagaucauuccuagcaaaggcugccugcgcguugggggaagaugucacccgcaugugaauggcguguuuuucaacgggaucauucugggacccgacggccacguccucaucccugagaugcagucuagccugcuucagcaacauauggaacugcucgaguccucugugauuccccugaugcacccucuugcugaucccagcacggucuuuaaggacggcgaugaagccgaggacuucguggaaguucaucugccggaugugcacaaacaggucuccgggguggaccucggacugccuagcuggggcaaguacguucugaugucugcggggauccucacagcccugaugcuuaugaucuuucugaugaccugcugucggagaaccaaucgcgcugaguccauucagcacagccucggagagacaggccggaaggugucugucaccucccagagcgggagagugaucuccucuugggaaagcuauaaauccggcggagagacaaagcuguga

SEQ ID NO: 223118 - RNA, 1575 nt, Artificial Sequence
  derived and/or modified CDS sequence (opt5) from glycoprotein__RABV__GQ472551.1
auggugccccagguccugcuguucguuccucugcuuguguuuagcuccugcuucggcaaguuuccgaucuacaccauucccgacaaacuggggccuuggucucccaucgauauucaccaucucagcuguccuaacaaucugguggucgaggacgaaggaugcacaaaccuuuccggcuucucuuauauggagcugaaggugggguacaucagcgccauuaaaguuaauggauuuacguguaccggcguggucacagaagcugagaccuauacaaacuucgugggguacguuaccacaaccuuuaagagaaaacacuuccggcccaugccugaugccugccgcgcggcuuauaauuggaagauggccggagacccgagauacgaagagucccuccauaaccccuauccugauuaccacuggcugcggacggugaagaccacaaaagagucucuggucaucaucagccccuccguggccgaccucgauccuuacgacaagagccugcauucucgcguguuucccggcggcaaauguuccgggauuaccgucagcucuacaugcuguuccaccaaucacgauuauacgaucuggaugccggaaaacccuagacuuggaacaagcugcgacauuuucaccaauucucggggcaagcgcgcuuccaaagggggaaagacauguggcuuuguugaugagagagggcuguacaagagccucaaaggagccugcaagcugaaacuuuguggcgugcugggccuccggcugauggacgggaccuggguggcuauccaaaccuccgaugaaauuaaguggugcucucccgaccagcuggucaaccuccacgacuuccauagcgaugagaucgagcaccuggugguugaggaacuugugaaaaagcgcgaagagugccuggacgcccucgaaacaauuaugacgaccaaauccgucagcuuuagacggcugucucaucuucgcaagcuggugccuggauucggcaaggcguauacaaucuucaauaaaacccucauggaggccgaugcucacuacaaguccaucagaacauggaacgagauuauccccagcaaagggugucugcggguuggaggccgcugccacccccaugugaauggggucuuuuucaacggaauuauccugggcccugacggccacgugcucauuccggaaaugcagucuagccugcuucaucagcacauggagcugcucgaauccucugucaucccccugaugcauccucuugccgaucccagcaccguguuuaaggacggggaugaggcugaagacuucguugaggugcaccucccugauguccacaaacaaaucuccggaguggaccucggccugcccaauugggggaaguauguucugauuagcgccggagcgcucacggcccugaugcuuaugaucuuucugaugacauguugcagaaaggcuaaccgggccgagucuaugcagcauaacccgggcgaaaccgggagaaaaguguccgucaccagccacaauggccgcgugauuucuuccugggagagcuacaaguccggaggcgaaacaaaacucuga

SEQ ID NO: 223119 - RNA, 1575 nt, Artificial Sequence
  derived and/or modified CDS sequence (opt5) from glycoprotein__RABV__GQ472552.1
augaucccccaggcccugcucuuugugccucugcuugucuuuagccugugcuucggcaaguuuccgauuuacaccauccccgacaaacucgggccuuggucccccauugauauccaccaucugucuuguccuaacaaucuuguuguggaggacgaaggaugcacaaaccugagcggcuucuccuauauggagcucaaggugggguacauuucugcuaucaaagucaauggauuuacguguaccggcgugguuacagaagccgagaccuauacaaacuucgugggguacgucaccacaaccuuuaagagaaaacacuuccggcccacgccugaugcgugccgcgcugccuauaauuggaagauggccggagacccgagauacgaagagagccugcauaaccccuauccugauuaccacuggcugcggaccgugaagacaaccaaagagucccucguuaucauuucucccagcguguccgaccuggauccuuacgacaagagccuucauucucgcgucuuucccuccggcaaauguagcggcaucacagugucuuccaccuauugcccgacgaaucacgauuacacaauuuggaugccugaaaaccccagacuggggaccagcugugacaucuucacaaauucucggggaaagcgcgcuuccaaaggcagcaagaccugcggguuuguggaugagagaggacucuauaagucccugaaaggcgccuguaagcugaaacugugcgggguccucggacugcggcugauggacggcaccugggcugccauucaagcgucugaugaagccaagugguguccucccgaccagcucguuaacauccacgacuuccgcagcgaugagauugagcaucuggugguggaggaacuugucaaaaagagagaagagugccuggacgcucucgaauccaucaugacaacgaaaagcgugucuuuucggcgccugucccaccuuagaaagcugguucccggcuucgggaaggccuacaccaucuucaauaaaacacucauggaggcugaugcccauuauaagagcgugcggaccuggaacgagauuaucccuucuaaaggaugccugcgcgucggcgggagaugucacccgcacgugaauggaguuuucuucaacggcauuauccuggggcccgacggacaugugcucauuccugaaaugcagagcucccugcuucagcaacacauggagcugcucgaaucuagcgucaucccccugaugcauccucuugcggaucccuccacaguguuuaaggacggcgaugaggccgaagacuucgucgaggugcaccuuccggauguucauaaacaggugagcggcgucgaccucgggcugccuucuuggggaaaguacgugcugauguccguuggcgcuaugaucgcccucaugcugaugauuuuucuuaccacgugcugucggaaggcuaauggggccgagagcauccagcacagacugggagaaacaggccgcaaagugucugucaccucccagagcgggcgggugauuuccucuugggagagcuauaaguccggcggagaaaccaaacucuga

SEQ ID NO: 223120 - RNA, 1575 nt, Artificial Sequence; identical to SEQ ID NO: 223115
  derived and/or modified CDS sequence (opt5) from glycoprotein__RABV__GQ472553.1

SEQ ID NO: 223121 - RNA, 1575 nt, Artificial Sequence; identical to SEQ ID NO: 222599
  derived and/or modified CDS sequence (opt5) from glycoprotein__RABV__GQ472554.1

SEQ ID NO: 223122 - RNA, 1575 nt, Artificial Sequence
  derived and/or modified CDS sequence (opt5) from glycoprotein__RABV__GQ472555.1
auggugccccagguccuucucuucguuccucugcuuguguuuagcuccugcuucggcaaguuuccgaucuacaccauucccgacaaacuggggccuuggucucccaucgauauucaccaucucagcuguccuaacaaucugguggucgaggacgaaggaugcacaaaccuuuccggcuucucuuauauggagcugaaggugggguacaucagcgccauuaaaguuaauggauuuacguguaccggcguggucacagaagcugagaccuauacaaacuucgugggguacguuaccacaaccuuuaagagaaaacacuuccggcccaugccugaugccugccgcgcggcuuauaauuggaagauggccggagacccgagauacgaagagucccuccauaaccccuauccugauuaccacuggcugcggacggugaagaccacaaaagagucucuggucaucaucagccccuccguggccgaccucgauccuuacgacaagagccugcauucucgcguguuucccggcggcaaauguuccgggauuaccgucagcucuacaugcuguuccaccaaucacgauuauacgcuuuggaugccggaaaacccuagacugggaacaagcugcgacaucuucaccaauucucggggcaagcgcgcuuccaaagggggaaagacauguggcuuuguugaugagagagggcucuacaagagccugaaaggagccugcaagcugaaacuguguggcgugcucggccugcggcugauggacgggaccuggguggcuauucaaaccuccgaugaaaucaaguggugucccccugaccagcucgucaaccugcacgacuuccauucugaugagauugagcaccuugugguugaggaacuggugaaaaagcgcgaagagugccucgacgcccuggaaacaaucaugacgaccaaaagcgucuccuuuagacggcuuagccaucugcgcaagcucgugcccggauucggcaaggcguauacaauuuucaauaaaacccugauggaggccgaugcucacuacaagucuaucagaacauggaacgagaucauucccuccaaagggugccugcggguuggaggccgcugccacccucaugugaauggggucuuuuucaacggaaucauucucggcccggacggccacgugcugauccccgaaaugcagagcucucuucugcaucagcacauggagcuccuggaaagcuccgucauuccucuuaugcauccccuggccgauccuucuaccguguuuaaggacggggaugaggcugaagacuucguugaggugcaccuccccgaugagcacaaacaaaucagcggagucgaccugggccugccgaauuggagaaaguaugugcucaucuccgccggggcgcugacggcccuuaugcugaugauuuuucucaugacauguugccggaaggcuaacagagccgaaagcauccagcauaacccuggagagaccggccgcaaaguuucugugaccucccccaaugggcgggucauuagcucuugggaauccuacaagagcggcggagagacaaaacuguga

SEQ ID NO: 223123 - RNA, 1575 nt, Artificial Sequence
  derived and/or modified CDS sequence (opt5) from glycoprotein__RABV__GQ472556.1
auggugccccagguccuucucuucguuccucugcuuguguuuagcuccugcuucggcaaguuuccgaucuacaccauucccgacaaacuggggccuuggucucccaucgauauucaccaucucagcuguccuaacaaucugguggucgaggacgaaggaugcacaaaccuuuccggcuucucuuauauggagcugaaggugggguacaucagcgccauuaaaguuaauggauuuacguguaccggcguggucacagaagcugagaccuauacaaacuucgugggguacguuaccacaaccuuuaagagaaaacacuuccggcccaugccugaugccugccgcacggcguauaauuggaagauggcuggagacccgagauacgaagagucccuccauaaccccuauccugauuaccacuggcugcggaccgugaagacaaccaaagagucucuggucaucaucagccccuccguggccgaccucgauccuuacgacaagagccugcauucucgcguguuucccggcggcaaauguuccgggauuacagucagcucuaccugcuguuccacgaaucacgauuauacaaucuggaugccggaaaacccuagacuuggaaccagcugcgacauuuucacaaauucucggggcaagcgcgccuccaaagggggaaagaccuguggcuuuguugaugagagagggagcuacaagucccugaaaggagcuugcaagcucaaacuguguggcgugcuuggccugcggcucauggacgggaccuggguggccauccaaacaucugaugaaauuaaguggugcagccccgaccagcuggucaaccugcacgacuuccauuccgaugagaucgagcaccucgugguugaggaacuggugaaaaagcgcgaagagugccuugacgcucuggaaacgauuaugaccacaaaaagcgucucuuuuagacggcucucccaucugcgcaagcuggugccuggauucggcaaggccuauaccaucuucaauaaaacacugauggaggcggaugcccacuacaagagcaucagaaccuggaacgagauuauccccucuaaagggugucuccggguuggaggccgcugccacccccaugugaauggggucuuuuucaacggaauuauccugggcccugacggccacgugcugauuccggaaaugcagagcucccuccugcaucagcacauggagcuucuggaaucuagcgucaucccccucaugcauccucuggcugaucccuccacgguguuuaaggacggggaugaggccgaagacuucguugaggugcaccuuccugauguccacaaacaaaucagcggaguggaccugggccuccccaauugggggaagcauguucugauuucugcuggagcccugacagcgcucaugcugaugaucuuucuuaugaccuguugcagaaaggccaaccgggcugaguccauucagcacaacccgggcgaaaccgggagaaaagugagcgucacaucucauaauggccgcgugaucuccagcugggaguccuauaagucuggaggcgaaaccaaacuguga

SEQ ID NO: 223124 - RNA, 1575 nt, Artificial Sequence; identical to SEQ ID NO: 222599
  derived and/or modified CDS sequence (opt5) from glycoprotein__RABV__GQ472557.1

SEQ ID NO: 223125 - RNA, 1575 nt, Artificial Sequence
  derived and/or modified CDS sequence (opt5) from glycoprotein__RABV__GQ472558.1
auggcuccccaggcccuucucuucgugccucugcuugccgucccgcugugccucggcaaguuucccaucuacaccauuccugacaaacuggggcccuggagcccuaucgauauucaccaucuuuccugucccaacaaucugguuguggaggacgaaggaugcacaaaccucucuggcuucagcuauauggagcugaaggugggguacaucuccgcgauuaaagucaauggauuuacguguaccggcgugguuacagaagcugagaccuauacaaacuucgugggguacgucaccacaaccuuuaagagaaaacacuuccggccuacgccggaugccugccgcucugccuauaauuggaagauggcuggagaccccagauacgaagagagccugcauaacccuuaucccgauuaccacuggcuccggaccgugaagacaaccaaagaguccuuuguuaucaucucuccuagcguggccgaccuggaucccuacgacaagucccuucauagccgcgucuucccgagaggcaaauguucuggcauuacaguguccagcaccuauugcucuacgaaucacgauuacacaaucuggaugccugaaaacccccggcuggggaccuccugugacauuuuuacaaauagccgcggaaagagagcuucuaaaggcuccaagaccugcggguucguggaugagcggggacucuauaagagccugaaaggcgccuguaagcugaaacugugcgggguccucggacugcgccugauggacggcaccuggguugcgauccaaacauccgaugaaacgaagugguguccucccgaccagcucgugaaccugcacgacuuucauucugaugagauugagcaccuuguggucgaggaacuggugaaaaagagagaagagugccucgacgcccuggaaagcaucaugaccacaaaauccguuagcuuccggcgccuuucucaucugagaaagcucgugcccggcuuugggaaggcuuacaccauuuucaauaaaacacugauggaggccgaugcucacuauaaguccguccggaccuggaacgagaucaucccuagcaaaggaugccugcgcgugggcgggagaugucacccgcauguuaauggaguguucuuuaacggcauuauccucgggcccgacggacacguccugauuccugaaaugcagucuagccuucugcagcaacauauggagcuccuggaauccucugugaucccccuuaugcacccucuggccgaucccagcacggucuucaaggacggcgaugaggcggaagacuuuguggagguucaucucccggaugugcacaaacaggucuccggcguggaccuggggcugccuagcuggggaaaguacguucucaugucugccggcauucugacagcucuuaugcugaccaucuuccucaugaccugcugucggagaacaaaucgcgccgaguccauccagcacagccugggggaaaccggacggaaggugucugucacaucccagagcggcagagugauuuccucuugggagagcuauaaauccgggggcgaaacgaagcuguga

SEQ ID NO: 223126 - RNA, 1575 nt, Artificial Sequence
  derived and/or modified CDS sequence (opt5) from glycoprotein__RABV__GQ472559.1
auggccagccaggcucugcuuuucgugccccugcuugccaucccucugugcuuuggcaaguucccgauuuacaccauccccgacaaacucgggccuuggucccccauugauauccaccaucugucuuguccuaacaaucuugucguugaggacgaaggaugcacaaaccugagcggcuuuuccuauauggagcucaaggugggguacauuucugcgaucaaagugaauggauucacguguaccggcgucgugacagaagcugagaccuauacaaacuuuguuggguacgugaccacaaccuucaagagaaaacacuuucggcccacgccugaugccugccgcagcgccuauaauuggaagauggcuggagacccgagauacgaagagucccugcauaaccccuauccugauuaccacuggcugcggaccgucaagacaaccaaagagucucucgugaucauuagccccuccguugccgaccuggauccuuacgacaagagccuucauucucgcguguuccccagaggcaaauguuccggcaucacagucagcucuaccuauugcuccacgaaucacgauuacacaauuuggaugccggaaaacccucggcuggggaccagcugugacaucuuuacaaauucucgcggaaagagagcuuccaaaggcagcaagaccugcggguucguggaugagcggggacucuauaagucccugaaaggcgccuguaagcucaaacugugcggggugcucggacugcgccugauggacggcaccugggucgcgauucaaacaucugaugaaacgaaguggugucccccugaccagcucguuaaccugcacgacuuucauagcgaugagaucgagcaccuugugguggaggaacuggucaaaaagagagaagagugccucgacgcccuggaauccauuaugaccacaaaaagcgugucuuuccggcgccuuucccaucugagaaagcucguucccggcuuugggaaggcuuacaccaucuucaauaaaacacugauggaggccgaugcucacuauaagagcgugcggaccuggaacgagaucauucccucuaaaggaugccugcgcgucggcgggagaugucacccucaugugaauggaguuuucuuuaacggcaucauucucgggccggacggacacgugcugauccccgaaaugcagagcucccuucugcagcaacauauggagcuccuggaaucuagcgucauuccucuuaugcacccccuggccgauccuuccacgguguucaaggacggcgaugaggcggaagacuuugucgaggugcaucuccccgauguucacaaacaggugagcggcgucgaccuggggcugccgucuuggggaaaguacgugcucauguccgccggcauccugacagcucuuaugcugaugaucuuccucaugaccugcugucggagaaccaaucgcgccgagagcauucagcacucucugggggaaacaggacggaagguuuccgugaccagccaguccggcagagucaucucuagcugggaguccuauaaaucugggggcgaaacaaagcuguga

SEQ ID NO: 223127 - RNA, 1575 nt, Artificial Sequence
  derived and/or modified CDS sequence (opt5) from glycoprotein__RABV__GQ472560.1
auggugccccagguccugcuguucguuccucugcuuguguuuagcuccugcuucggcaaguuuccgaucuacaccauucccgacaaacuggggccuuggucucccaucgauauucaccaucucagcuguccuaacaaucugguggucgaggacgaaggaugcacaaaccuuuccggcuucucuuauauggagcugaaggugggguacaucagcgccauuaaaguuaauggauuuacguguaccggcguggucacagaagcugagaccuauacaaacuucgugggguacguuaccacaaccuuuaagagaaaacacuuccggcccacgccugaugccugccgcgcggcuuauaauuggaagauggccggagacccgagauacgaagagucccuccauaaccccuauccugauuaccacuggcugcggaccgugaagacaaccaaagagucucuggucaucaucagccccuccguggccgaccucgauccuuacgacaagagccugcauucuggcguguuucccggcgggaaauguuccggaauuacagucagcucuaccugcuguuccacgaaucacgauuauacaaucuggaugccggaaaacccucgccuuggcaccagcugcgacauuuucacaaauucuagagggaagcgggcuuccaaaggaggcaagaccuguggguuuguugaugagcgcggacuguacaagagccucaaaggcgccugcaagcugaaacuuuguggcgugcuggggcucagacugauggacggaaccuggguggcuauccaaacauccgaugaaauuaaguggugcucucccgaccagcuggucaaccuccacgacuuccauagcgaugagaucgagcaccuggugguugaggaacuugugaaaaagcggaaagaaugccuggacgcccucgagacgauuaugaccacaaaguccgucagcuuucgcagacugucucaucuucggaagcuggugccuggcuucgggaaagcguauaccaucuucaauaagacacucauggaagccgaugcucacuacaaauccauccgcaccuggaacgagauuauccccagcaagggaugucugagaguuggcgggcggugccacccccaugugaauggagucuuuuucaacggcauuauccugggcccugacgggcacgugcucauuccggagaugcagucuagccugcuucaucagcacauggaacugcucgaguccucugucaucccccugaugcauccucuugccgaucccagcacgguguuuaaagacggagaugaagcugaggacuucguugaagugcaccucccugauguccacaagcaaaucuccggcguggaccucgggcugcccaauuggggaaaguauguucugauuagcgccggcgcgcucacagcccugaugcuuaugaucuuucugaugaccuucugucgcaaagcuaacagagccgagucuauucagcauaacccgggggagaccggccggaagguguccgucacaagccacaauggaagagugaucucuuccugggaaagcuacaaauccggcggggagaccaagcucuga

SEQ ID NO: 223128 - RNA, 1575 nt, Artificial Sequence; identical to SEQ ID NO: 222899
  derived and/or modified CDS sequence (opt5) from glycoprotein__RABV__GQ857450.1

SEQ ID NO: 223129 - RNA, 1575 nt, Artificial Sequence
  derived and/or modified CDS sequence (opt5) from glycoprotein__RABV__GQ857451.1
augaucccccaggugcugcuguucgucccucugcuuguuuuuagcuccugcuucggcaaguuuccgauuuacaccauccccgacaaacuggggccuuggucucccauugauauccaccaucucagcuguccuaacaaucuggugguggaggacgaaggaugcacaaaccuuuccggcuucucuuauauggagcugaaggucggguacauuagcgccaucaaagugaauggauuuacguguaccggcguugugacagaagcugagaccuauacaaacuucgucggguacgugaccacaaccuuuaagagaaaacacuuccggcccacgccugaugccugccgcgcggcuuauaauuggaagauggccggagacccgagauacgaagagucccuccauaaccccuauccugauuaccacuggcugcggaccguuaagacaucuaaagagagccuggugaucauuucccccagcgucgccgaccucgauccuuacgacaagucucugcauucccgcguguuucccggcggcaaauguagcgggaucaccgugucuuccacaugcuguagcaccaaucacgauuauacgauuuggaugccggaaaacccuagacuucggacaucuugcgacaucuucaccaauucccgcggaaagagagcuagcaaaggcgggaagacauguggauuugucgaugagcggggccuguacaagucccucaaaggggccugcaagcugaaacuuuguggaguucugggccuccgccugauggacggcaccuggguggcuauucaaaccucugaugaaaucaaguggugcagccccgaccagcuggugaaccuccacgacuuccauuccgaugagauugagcaccuggucguggaggaacuuguuaaaaagagagaagagugccuggacgcccucgaaacaaucaugacgaccaaaagcgugucuuuucggcgccugucccaucuuagaaagcuggucccuggguucggaaaggcguauacaaucuucaauaaaacccucauggaggccgaugcucacuacaagagcauucggacauggaacgagaucauucccucuaaaggcugucugcgcguugggggaagaugccacccccaugugaauggcguguuuuucaacgggaucauucugggaccugacggccacguccucaucccggaaaugcagagcucccugcuucaucagcacauggagcugcucgaaucuagcgugaucccccugaugcauccucuugccgaucccuccaccgucuuuaaggacggcgaugaggcugaagacuucguggagguucaccucccugaugugcacaaacaaauuagcggggucgaccucggacugcccaauuggggcaaguaugugcugguuucugccggggcgcucacggcccugaugcuuaugaucuuucugaugacauguugccggaagaccaacagagcugaguccauucagcauagcccgggagaaaccggccgcaaagugucugucacaucccacaacgggcgggugaucagcuccugggagucuuacaagagcagaggcgaaaccaaacucuga

SEQ ID NO: 223130 - RNA, 1575 nt, Artificial Sequence; identical to SEQ ID NO: 222899
  derived and/or modified CDS sequence (opt5) from glycoprotein__RABV__GQ857452.1

SEQ ID NO: 223131 - RNA, 1575 nt, Artificial Sequence
  derived and/or modified CDS sequence (opt5) from glycoprotein__RABV__GQ857453.1
augaucccccaggugcugcuguucgucccucugcuuguuuuuagcuccugcuucggcaaguuuccgauuuacaccauccccgacaaacuggggccuuggucucccauugauauccaccaucucagcuguccuaacaaucuggugguggaggacgaaggaugcacaaaccuuuccggcuucucuuauauggagcugaaggucggguacauuagcgccaucaaagugaauggauuuacguguaccggcguugugacagaagcugagaccuauacaaacuucgucggguacgugaccacaaccuuuaagagaaaacacuuccggcccacgccugaugccugccgcgcggcuuauaauuggaagauggccggagacccgagauacgaagagucccuccauaaccccuauccugauuaccacuggcugcggaccguuaagacaucuaaagagagccuggugaucauuucccccagcgucgccgaccucgauccuuacgacaagucucugcauucccgcguguuucccggcggcaaauguagcgggaucaccgugucuuccacaugcuguagcaccaaucacgauuauacgauuuggaugccggaaaacccuagacuuggaacaucuugcgacaucuucaccaauucccggggcaagcgcgcuagcaaagggggaaagacauguggcuuugucgaugagagagggcuguacaagucccucaaaggagccugcaagcugaaacuuuguggcguucugggccuccggcugauggacgggaccuggguggcuauucaaaccucugaugaaaucaaguggugcagccccgaccagcuggugaaccuccacgacuuccauuccgaugagauugagcaccuggucguggaggaacuuguuaaaaagcgcgaagagugccuggacgcccucgaaacaaucaugacgaccaaaagcgugucuuuuagacggcugucccaucuucgcaagcuggucccuggauucggcaaggcguauacaaucuucaauaaaacccucauggaggccgaugcucacuacaagagcauuagaacauggaacgagaucauucccucuaaagggugucugcgggugggaggccgcugccacccccauguuaaugggguguuuuucaacggaaucauucugggcccugacggccacguccucaucccggaaaugcagagcucccugcuucaucagcacauggagcugcucgaaucuagcgugaucccccugaugcauccucuugccgaucccuccaccgucuuuaaggacggggaugaggcugaagacuucguggagguucaccucccugaugugcacaaacaaauuagcggagucgaccucggccugcccaauugggggaaguaugugcugguuucugccggagcgcucacggcccugaugcuuaugaucuuucugaugacauguugcagaaagaccaaccggguggaguccauucagcauagcccgggcgaaaccgggagaaaagucucugugacaucccacaacggccgcgugaucagcuccugggagucuuacaagagcggaggcgaaaccaaacucuga

SEQ ID NO: 223132 - RNA, 1575 nt, Artificial Sequence; identical to SEQ ID NO: 222899
  derived and/or modified CDS sequence (opt5) from glycoprotein__RABV__GQ857454.1

SEQ ID NO: 223133 - RNA, 1575 nt, Artificial Sequence
  derived and/or modified CDS sequence (opt5) from glycoprotein__RABV__GQ857455.1
augaucccccaggugcugcuguucgucccucugcuuguuuuuagcuccugcuucggcaaguuuccgauuuacaccauccccgacaaacuggggccuuggucucccauugauauccaccaucucagcuguccuaacaaucuggugguggaggacgaaggaugcacaaaccuuuccggcuucucuuauauggagcugaaggucggguacauuagcgccaucaaagugaauggauuuacguguaccggcguugugacagaagcugagaccuauacaaacuucgucggguacgugaccacaaccuuuaagagaaaacacuuccggcccacgccugaugccugccgcgcggcuuauaauuggaagauggccggagacccgagauacgaagagucccuccauaaccccuauccugauuaccacuggcugcggaccguuaagacaucuaaagagagccuggugaucauuucccccagcgucgccgaccucgauccuuacgacaagucucugcauucccgcguguuucccggcggcaaauguagcgggaucaccgugucuuccacaugcuguagcaccaaucacgauuauacgauuuggaugccggaaaacccuagacuuggaacaucuugcgacaucuucaccaauucccggggcaagcgcgcuagcaaagggggaaagacauguggcuuugucgaugagagagggcuguacaagucccucaaaggagccugcaagcugaaacuuuguggcguucugggccuccggcugauggacgggaccuggguggcuauucaaaccucugaugaaaucaaguggugcagccccgaccagcuggugaaccuccacgacuuccauuccgaugagauugagcaccuggucguggaggaacuuguuaaaaagcgcgaagagugccuggacgcccucgaaacaaucaugacgaccaaaagcgugucuuuuagacggcugucccaucuucgcaagcuggucccuggauucggcaaggcguauacaaucuucaauaaaacccucauggaggccgaugcucacuacaagagcauuagaacauggaacgagaucauucccucuaaagggugucugcgggugggaggccgcugccacccccauguuaaugggguguuuuucaacggaaucauucugggcccugacggccacguccucaucccggaaaugcagagcucccugcuucaucagcacauggagcugcucgaaucuagcgugaucccccugaugcauccucuugccgaucccuccaccgucuuuaaggacggggaugaggcugaagacuucguggagguucaccucccugaugugcacaaacaaauuagcggagucgaccucggccugcccaauugggggaaguaugugcugguuucugccggagcgcucacggcccuggugcuuaugaucuuucugaugacauguugcagaaagaccaaccgggcugaguccauucagcauagcccgggcgaaaccgggagaaaagucucugugacaucccacaacggccgcgugaucagcuccugggagucuuacaagagcggaggcgaaaccaaacucuga

SEQ ID NO: 223134 - RNA, 1575 nt, Artificial Sequence; identical to SEQ ID NO: 222899
  derived and/or modified CDS sequence (opt5) from glycoprotein__RABV__GQ857459.1

SEQ ID NO: 223135 - RNA, 1575 nt, Artificial Sequence; identical to SEQ ID NO: 222899
  derived and/or modified CDS sequence (opt5) from glycoprotein__RABV__GQ857460.1

SEQ ID NO: 223136 - RNA, 1575 nt, Artificial Sequence
  derived and/or modified CDS sequence (opt5) from glycoprotein__RABV__GQ857461.1
augaucccccaggugcugcuguucgucccucugcuuguuuuuagcuccugcuucggcaaguuuccgauuuacaccauccccgacaaacuggggccuuggucucccauugauauccaccaucucagcuguccuaacaaucuggugguggaggacgaaggaugcacaaaccuuuccggcuucucuuauauggagcugaaggucggguacauuagcgccaucaaagugaauggauuuacguguaccggcguugugacagaagcugagaccuauacaaacuucgucggguacgugaccacaaccuuuaagagaaaacacuuccggcccacgccugaugccugccgcgcggcuuauaauuggaagauggccggagacccgagauacgaagagucccuccauaaccccuauccugauuaccacuggcugcggaccguuaagacaucuaaagagagccuggugaucauuucccccagcgucgccgaccucgauccuuacgacaagucucugcauucccgcguguuucccggcggcaaauguagcgggaucaccgugucuuccacaugcuguagcaccaaucacgauuauacgauuuggaugccggaaaacccuagacuuggaacaucuugcgacaucuucaccaauucccggggcaagcgcgcuagcaaagggggaaagacauguggcuuugucgaugagagagggcuguacaagucccucaaaggagccugcaagcugaaacuuuguggcguucugggccuccggcugauggacgggaccuggguggcuauucaaaccucugaugaaaucaaguggugcagccccgaccagcuggugaaccuccacgacuuccauuccgaugagauugagcaccuggucguggaggaacuuguuaaaaagcgcgaagagugccuggacgcccucgaagcgaucaugacaacgaaaagcgugucuuuuagacggcugucccaucuucgcaagcuggucccuggauucggcaaggccuauaccaucuucaauaaaacacucauggaggcugaugcccacuacaagagcauuagaaccuggaacgagaucauucccucuaaagggugucugcgggugggaggccgcugccacccccauguuaaugggguguuuuucaacggaaucauucugggcccugacggccacguccucaucccggaaaugcagagcucccugcuucaucagcacauggagcugcucgaaucuagcgugaucccccugaugcauccucuugcugaucccuccacagucuuuaaggacggggaugaggccgaagacuucguggagguucaccucccugaugugcacaaacaaauuagcggagucgaccucggccugcccaauugggggaaguaugugcugguuucugcgggagcccucaccgcucugaugcuuaugaucuuucugaugacguguugcagaaagacaaaccgggccgaguccauucagcauagcccgggcgaaaccgggagaaaagugucugucaccucccacaacggccgcgugaucagcuccugggagucuuacaagagcggaggcgaaacaaaacucuga

SEQ ID NO: 223137 - RNA, 1575 nt, Artificial Sequence; identical to SEQ ID NO: 222899
  derived and/or modified CDS sequence (opt5) from glycoprotein__RABV__GQ857463.1

SEQ ID NO: 223138 - RNA, 1575 nt, Artificial Sequence; identical to SEQ ID NO: 222899
  derived and/or modified CDS sequence (opt5) from glycoprotein__RABV__GQ857464.1

SEQ ID NO: 223139 - RNA, 1575 nt, Artificial Sequence
  derived and/or modified CDS sequence (opt5) from glycoprotein__RABV__GQ857465.1
augaucccccaggugcuucucuucgucccucugcuuguuuuuagcuccugcuucggcaaguuuccgauuuacaccauccccgacaaacuggggccuuggucucccauugauauccaccaucucagcuguccuaacaaucuggugguggaggacgaaggaugcacaaaccuuuccggcuucucuuauauggagcugaaggucggguacauuagcgccaucaaagugaauggauuuacguguaccggcguugugacagaagcugagaccuauacaaacuucgucggguacgugaccacaaccuuuaagagaaaacacuuccggcccaugccugaugccugccgcgcggcuuauaauuggaagauggccggagacccgagauacgaagagucccuccauaaccccuauccugauuaccacuggcugcggacgguuaagaccacaaaagagucucuggugaucauuagccccuccgucgccgaccucgauccuuacgacaagagccugcauucucgcguguuucccggcggcaaauguuccgggaucaccgugagcucuacaugcuguuccaccaaucacgauuauacgauuuggaugccggaaaacccuagacuuggaacaagcugcgacaucuucaccaauucucggggcaagcgcgcuuccaaagggggaaagacauguggcuuugucgaugagagagggcuguacaagagccuccggggagccugcaaacugaagcuguguggcguucugggccuccgccugauggacgggaccuggguggcuauucaaaccuccgaugaaaucaaauggugcucucccgaccagcuggugaaccuccacgacuuccauagcgaugagauugagcaccuggucguggaggaacuuguuaagaaaagagaagagugccuggacgcccucgaaacaaucaugacgaccaaguccgugagcuuucggcgccugucucaucuuagaaaacuggucccuggauucggcaaggcguauacaaucuucaauaagacccucauggaggccgaugcucacuacaaauccauucggacauggaacgagaucauucccagcaaggggugucugcgcgugggaggcagaugccacccccauguuaaugggguguuuuucaacggaaucauucugggcccugacggccacguccucaucccggaaaugcagucuagccugcuucaucagcacauggagcugcucgaauccucugugaucccccugaugcauccucuugccgaucccagcaccgucuuuaaagacggggaugaggcugaagacuucguggagguucaucugccugaugugcacaagcaaauuuccggagucgaccucggccugcccaauugggggaaauaugugcugaucagcgccggagcgcucacggcccugaugcuuacaauuuuucugaugaccuguugccggaagaccaacagagcugagucuauccagcacuccccgggcgaaacagggcgcaagguuagcgugaccucucacaacggccgggucauuuccagcugggaguccuacaaaucuggaagcgaaacaaagcucuga

SEQ ID NO: 223140 - RNA, 1575 nt, Artificial Sequence
  derived and/or modified CDS sequence (opt5) from glycoprotein__RABV__GQ857466.1
augaucccccaggugcuucucuucgucccucugcuuguuuuuagcuccugcuucggcaaguuuccgauuuacaccauccccgacaaacuggggccuuggucucccauugauauccaccaucucagcuguccuaacaaucuggugguggaggacgaaggaugcacaaaccuuuccggcuucucuuauauggagcugaaggucggguacauuagcgccaucaaagugaauggauuuacguguaccggcguugugacagaagcugagaccuauacaaacuucgucggguacgugaccacaaccuuuaagagaaaacacuuccggcccaugccugaugccugccgcgcggcuuauaauuggaagauggccggagacccgagauacgaagagucccuccauaaccccuauccugauuaccacuggcugcggacgguuaagaccacaaaagagucucuggugaucauuagccccuccgucgccgaccucgauccuuacgacaagagccugcauucucgcguguuucccggcggcaaauguuccgggaucaccgugagcucuacaugcuguuccaccaaucacgauuauacgauuuggaugccggaaaacccuagacuuggaacaagcugcgacaucuucaccaauucucggggcaagcgcgcuuccaacgggggaaaaacauguggcuuugucgaugagagagggcuguacaagagccucaagggagccugcaaacugaagcuguguggcguucugggccuccggcugauggacgggaccuggguggcuauucaaaccuccgaugaaaucaaauggugcucucccgaccagcuggugaaucuccacgacuuccauagcgaugagauugagcaccuggucguggaggaacuuguuaagaaacgcgaagagugccuggacgcccucgaaacaaucaugacgaccaaguccgugagcuuuagacggcugucucaucuucgcaaacuggucccuggauucggcaaggcguauacaaucuucaacaagacccucauggaggccgaugcucacuacaaauccauuagaacauggaaugagaucauucccagcaaggggugucugcgggugggaggccgcugccacccccauguuaacgggguguuuuucaauggaaucauucugggcccugacggccacguccucaucccggaaaugcagucuagccugcuucaucagcacauggagcugcucgaauccucugugaucccccugaugcauccucuugccgaucccagcaccgucuuuaaagacggggaugaggcugaagacuucguggagguucaucugccugaugugcacaagcaaauuuccggaaucgaccucggccugcccaacugggggaaauauguccugauuagcgccggagcgcucacggcccugaugcuuacaaucuuucugaugaccuguugcagaaagaccaaccgggcugagucuauucagcacuccccgggcgaaacagggagaaaggugagcguuaccucucacaauggccgcgugaucuccagcugggaguccuacaaaucuggaagcgaaacaaagcucuga

SEQ ID NO: 223141 - RNA, 1575 nt, Artificial Sequence
  derived and/or modified CDS sequence (opt5) from glycoprotein__RABV__GQ857467.1
augaucccccaggugcugcuguucgucccucugcuuguuuuuagcuccugcuucggcaaguuuccgauuuacaccauccccgacaaacuggggccuuggucucccauugauauccaccaucucagcuguccuaacaaucuggugguggaggacgaaggaugcacaaaccuuuccggcuucucuuauauggagcugaaggucggguacauuagcgccaucaaagugaauggauuuacguguaccggcguugugacagaagcugagaccuauacaaacuucgucggguacgugaccacaaccuuuaagagaaaacacuuccggcccaugccugaugccugccgcgcggcuuauaauuggaagauggccggagacccgagauacgaagagucccuccauaaccccuauccugauuaccacuggcugcggacgguuaagaccacaaaagagucucuggugaucauuagccccuccgucgccgaccucgauccuuacgacaagagccugcauucucgcguguuucccggcggcaaauguuccgggaucaccgugagcucuacaugcuguuccaccaaucacgauuauacgauuuggaugccggaaaacccuagacuuggaacaagcugcgacaucuucaccaauucucggggcaagcgcgcuuccaaaugggggaagacauguggauuugucgaugagagaggccuguacaagagccucaaaggggccugcaagcugaaacuuuguggaguucugggccuccggcugauggacggcaccuggguggcuauucaaaccuccgaugaaaucaaguggugcucucccgaccagcuggugaaccuccacgacuuccauagcgaugagauugagcaccuggucguggaggaacuuguuaaaaagcgcgaagagugccuggacgcccucgaaacaaucaugacgaccaaauccgugagcuuuagacggcugucucaucuucgcaagcuggucccuggguucggaaaggcguauacaaucuucaauaaaacccucauggaggccgaugcucacuacaaguccauuagaacauggaacgagaucauucccagcaaaggcugucugcggguugggggacgcugccacccccaugugaauggcguguuuuucaacgggaucauucugggaccugacggccacguccucaucccggaaaugcagucuagccugcuucaucagcacauggagcugcucgaauccucugugaucccccugaugcauccucuugccgaucccagcaccgucuuuaaggacggcgaugaggcugaagacuucguggagguucaccucccugaugugcacaaacaaauuuccggggucgaccucggacugcccaauuggggcaaguaugugcugaucagcgccggggcgcucacggcccugaugcuuacaauuuuucugaugaccuguugcagaaagaccaaccgggcugagucuauccagcauuccccgggagaaacaggcagaaaaguuagcgugaccucucacaacgggcgcgucauuuccagcugggaguccuacaagucuggcagcgaaacaaaacucuga

SEQ ID NO: 223142 - RNA, 1575 nt, Artificial Sequence
  derived and/or modified CDS sequence (opt5) from glycoprotein__RABV__GQ857470.1
augaucccccaggugcuucucuucgucccucugcuuguuuuuagcuccugcuucggcaaguuuccgauuuacaccauccccgacaaacuggggccuuggucucccauugauauccaccaucucagcuguccuaacaaucuggugguggaggacgaaggaugcacaaaccuuuccggcuucucuuauauggagcugaaggucggguacauuagcgccaucaaagugaauggauuuacguguaccggcguugugacagaagcugagaccuauacaaacuucgucggguacgugaccacaaccuuuaagagaaaacacuuccggcccaugccugaugccugccgcgcggcuuauaauuggaagauggccggagacccgagauacgaagagucccuccauaaccccuauccugauuaccacuggcugcggacgguuaagaccacaaaagagucucuggugaucauuagccccuccgucgccgaccucgauccuuacgacaagagccugcauucucgcguguuucccggcggcaaauguuccgggaucaccgugagcucuacaugcuguuccaccaaucacgauuauacgauuuggaugccggaaaacccuagacuuggaacaagcugcgacaucuucaccaauucucggggcaagcgcgcuuccaaagggggaaagacauguggcuuugucgaugagagagggcuguacaagagccucaaaggagccugcaagaugaaacuguguggcguucuuggccugcggcucauggacgggaccuggguggcuauucaaaccuccgaugaaaucaaguggugcucucccgaccagcuggugaaccugcacgacuuccauagcgaugagauugagcaccucgucguggaggaacugguuaaaaagcgcgaagagugccuugacgcccuggaaacaaucaugacgaccaaauccgugagcuuuagacggcucucucaucugcgcaagcuggucccuggauucggcaaggcguauacaaucuucaauaaaacccugauggaggccgaugcucacuacaaguccauuagaacauggaacgagaucauucccagcaaagggugucuccgggugggaggccgcugccacccccauguuaaugggguguuuuucaacggaaucauucugggcccugacggccacguccugaucccggaaaugcagucuagccuccugcaucagcacauggagcuucuggaauccucugugaucccccucaugcauccucuggccgaucccagcaccgucuuuaaggacggggaugaggcugaagacuucguggagguucaccuuccugaugugcacaaacaaauuuccggagucgaccugggccuccccaauugggggaaguaugugcugaucagcgccggagcgcugacggcccucaugcugacaauuuuucuuaugaccuguugcagaaagaccaacaaagcugagucuauccagcauuccccgggcgaaacagggcggaagguuagcgugaccucucacaacggcagagucauuuccagcugggaguccuacaaaucuggaagcgaaacaaagcuguga

SEQ ID NO: 223143 - RNA, 1575 nt, Artificial Sequence
  derived and/or modified CDS sequence (opt5) from glycoprotein__RABV__GQ857471.1
augaucccccaggugcugcuguucgucccucugcuuguuuuuagcuccugcuucggcaaguuuccgauuuacaccauccccgacaaacuggggccuuggucucccauugauauccaccaucucagcuguccuaacaaucuggugguggaggacgaaggaugcacaaaccuuuccggcuucucuuauauggagcugaaggucggguacauuagcgccaucaaagugaauggauuuacguguaccggcguugugacagaagcugagaccuauacaaacuucgucggguacgugaccacaaccuuuaagagaaaacacuuccggcccaugccugaugccugccgcgcggcuuauaauuggaagauggccggagacccgagauacgaagagucccuccauaaccccuauccugauuaccacuggcugcggacgguuaagaccucuaaagagagccuggugaucauuucccccagcgucgccgaccucgauccuuacgacaagucucugcauucccgcguguuucccggcggcaaauguagcgggaucacagugucuuccacaugcuguagcaccaaucacgauuauaccauuuggaugccggaaaacccuagacuuggaacgucuugcgacaucuucacaaauucccggggcaagcgcgcuagcaaagggggaaagaccuguggcuuugucgaugagagagggcuguacaagucccucaaaggagccugcaagcugaaacuuuguggcguucugggccuccggcugauggacgggacauggguggcuauucaaaccucugaugaaaucaaguggugcagccccgaccagcuggugaaccuccacgacuuccauuccgaugagauugagcaccuggucguggaggaacuuguuaaaaagcgcgaagagugccuggacgcccucgaaaccaucaugacaacgaaaagcgugucuuuuagacggcugucccaucuucgcaagcuggucccuggauucggcaaggcguauaccaucuucaauaaaacacucauggaggccgaugcucacuacaagagcauuagaaccuggaacgagaucauucccucuaaagggugucugcgggugggaggccgcugccacccccauguuaaugggguguuuuucaacggaaucauucugggcccugacggccacguccucaucccggaaaugcagagcucccugcuucaucagcacauggagcugcucgaaucuagcgugaucccccugaugcauccucuugccgaucccuccacagucuuuaaggacggggaugaggcugaagacuucguggagguucaccucccugaugugcacaaacaaauuagcggagucgaccucggccugcccaauugggggaaguaugugcugaucucugccggagcgcucaccgcccugaugcuuaugauuuuucugaugacguguugcagaaagacaaaccgggcugaguccauccagcauagcccgggcgaaaccgggagaaaaguuucugugaccucccacagcggccgcgucauuuccucuugggagagcuacaaguccggaggcgaaacaaaacucuga

SEQ ID NO: 223144 - RNA, 1575 nt, Artificial Sequence
  derived and/or modified CDS sequence (opt5) from glycoprotein__RABV__GQ857472.1
augaucccccaggugcuucucuucgucccucugcuuguuuuuagcuccugcuucggcaaguuuccgauuuacaccauccccgacaaacuggggccuuggucucccauugauauccaccaucucagcuguccuaacaaucuggugguggaggacgaaggaugcacaaaccuuuccggcuucucuuauauggagcugaaggucggguacauuagcgccaucaaagugaauggauuuacguguaccggcguugugacagaagcugagaccuauacaaacuucgucggguacgugaccacaaccuuuaagagaaaacacuuccggcccaugccugaugccugccgcgcggcuuauaauuggaagauggccggagacccgagauacgaagagucccuccauaaccccuauccugauuaccacuggcugcggacgguuaagaccucuaaagagagccuggugaucauuucccccagcgucgccgaccucgauccuuacgacaagucucugcauucccgcguguuucccggcggcaaauguagcgggaucacagugucuuccacaugcuguagcaccaaucacgauuauaccauuuggaugccggaaaacccuagacuuggaacgucuugcgacaucuucacaaauucccggggcaagcgcgcuagcaaagggggaaagaccuguggcuuugucgaugagagagggcuguacaagucccucaaaggagccugcaagaugaaacuguguggcguucuuggccugcggcucauggacgggacauggguggcuauucaaaccucugaugaaaucaaguggugcagccccgaccagcuggugaaccugcacgacuuccauuccgaugagauugagcaccucgucguggaggaacugguuaaaaagcgcgaagagugccuugacgcccuggaaaccaucaugacaacgaaaagcgugucuuuuagacggcucucccaucugcgcaagcuggucccuggauucggcaaggcguauaccaucuucaauaaaacacugauggaggccgaugcucacuacaagagcauuagaaccuggaacgagaucauucccucuaaagggugucuccgggugggaggccgcugccacccccauguuaaugggguguuuuucaacggaaucauucugggcccugacggccacguccugaucccggaaaugcagagcucccuccugcaucagcacauggagcuucuggaaucuagcgugaucccccucaugcauccucuggccgaucccuccacagucuuuaaggacggggaugaggcugaagacuucguggagguucaccuuccugaugugcacaaacaaauuagcggagucgaccugggccuccccaauugggggaaguaugugcugaucucugccggagcgcugaccgcccucaugcugaugauuuuucuuaugacguguugcagaaagacaaaccgggcugaguccauccagcauagcccgggcgaaaccgggagaaaaguuucugugaccucccacaacggccgcgucauuagcuccugggagucuuacaagagcggaggcgaaacaaaacuguga

SEQ ID NO: 223145 - RNA, 1575 nt, Artificial Sequence
  derived and/or modified CDS sequence (opt5) from glycoprotein__RABV__GQ918139.1
auggugccccagguccuccuguucguucugcuucugggcuuuagccucugcuucgggaaguuuccuaucuacaccauuccggacgagcugggacccugguccccuaucgauauucaccaucuuucuugucccaacaaucuggugguggaagacgagggcugcacaaaccucagcgaguucuccuauauggagcugaaagucggguacaucucugccauuaaggugaauggauuuacguguaccggcguugugacagaagcugagaccuauacaaacuucgucggguacgugaccacaaccuuuaaaagaaagcacuuccggccuacgcccgaugccugccgcgcggcuuauaauuggaaaauggccggagacccuagauacgaggaaagccugcauaacccguaucccgauuaccacuggcuccggaccguucgcacaaccaaggagucccugaucaucauuucuccuagcgugacagaccuugaucccuacgacaagucccugcauagcagagucuuuccuggcggcaaauguucugggaucaccguguccagcacguauugcucuacaaaucacgauuacaccauuuggaugcccgaaaacccgcggccucgcacacccugugacaucuucaccaauuccagaggaaagcgggccagcaacggcaauaaaaccugcggguuuguggaugagcgcggacucuauaagucucugaaaggcgcuuguagacuuaagcugugcgggguccucggacugcggcugauggacggcacauggguugccaugcaaacguccgaugagaccaagugguguccucccgaccagcucgugaaccugcacgacuuccgcagcgaugaaauugagcaucuuguggucgaagaacuggugaaaaagagagaagagugccucgacgcucuggaguccaucaugacaaccaaaucuguuagcuuucggcgccuuucccaccugagaaagcucgugcccggcuucgggaaagccuacacaauuuucaauaagacccugauggaagcggaugcccauuauaaaagcguccggacguggaacgagaucaucccuucuaagggaugccugaaggugggcgggagaugucacccgcacguuaauggaguguuuuucaacggcauuauccucgggcccgacgaucauguccugauuccugaaaugcaguccagccuucugcagcaacacauggagcuccugaaaucuagcgugaucccccuuaugcauccucuggcugaccccuccacagucuuuaaggaaggagaugaggccgaggacuucguggaaguucaccucccggauguguacaaacagauuucuggcgucgaccugggccugccuaacugggggaaguaugugcucaugaccgcuggagccaugaucggccugguucuuaucuuuagccugaugaccuggugccgccgggcgaauagacccgaguccaaacagcgcagcuucgggggaacaggcgggaacgugucugucaccucccagagcggcaaggugauuccuucuugggaauccuaccggagcggaggcgagaucagacucuga

SEQ ID NO: 223146 - RNA, 1575 nt, Artificial Sequence
  derived and/or modified CDS sequence (opt5) from glycoprotein__RABV__GU186379.1
auggugccccaggcccuucucuucgucccucugcuugcuguuccgcugugcuuuggcaaguuccccaucuacaccauuccugacaaacucgggcccuggagcccuaucgauauucaccaucuguccugucccaacaaucuugugguggaggacgaaggaugcacaaaccugucuggcuuuagcuauauggagcucaaggucggguacaucuccgccauuaaagugaauggauucacguguaccggcguugugacagaagcggagaccuauacaaacuuugucggguacgugaccacaaccuucaagagaaaacacuuucggccuacgccggaugcuugccgcucugccuauaauuggaagauggccggaggccccagauacgaagagagccugcauaacccuuaucccgacuaccacuggcugcggaccguuaagacaaccaaagaguccuucgugaucaucucuccuagcauggcugaucucgaccccuacgauaagucccugcauagccgcgucuuuccgagaggcaaauguucugggauuacaguguccagcaccuauugcucuacgaaucacgacuacacaaucuggaugcuugaaaacccucggcugggaaccuccugugauauuuucacaaauagccgcggcaagagagccucuaaaggguccaagaccugcggauuuguggacgagcggggccucuauaagagccugaaaggggcuuguaagcugaaacugugcggaguccucggccugcgccugauggauggcaccuggguugccauccaaacauccgacgaaacgaaguggugucccccugaucagcucgugaaccugcacgacuuccauucugacgagauugagcaccuuguggucgaggaacuggugaaaaagagagaagagugccucggggcgcuggaaagcaucaugaccacaaaauccguuagcuuucggcgccuuucucaucugagaaagcucgugcccggauucggcaaggccuacaccauuuucaauaaaacacugauggaggcugaugcccacuauaaguccguccggaccuggaacgagaucauccccagcaaagggugccugcgcgugggaggcagaugucacccucauguuaaugggguguuuuucaacggaauuauccucggcccggacggccacguccugauucccgaaaugcagucuagccuucugcagcaacauauggagcuccuggaauccucugugaucccucuuaugcacccccuggcugauccuagcacggucuuuaaggacggggaugaggccgaagacuucguggagguucaucuccccgaugugcacaaacaggucuccggaguggaccugggccugccgagcugggggaaguacguucucaugucugcgggcauucugacagcccuuaugcugaugaucuuucucaugaccugcugucggagaaccaaucgcgcugaguccauccagcacagccugggagaaacagggcggaaggugucugucaccucccagaacggcagagugauuagcuccugggagucuuauaaaagcggaggcgaaacaaagcuguga

SEQ ID NO: 223147 - RNA, 1575 nt, Artificial Sequence
  derived and/or modified CDS sequence (opt5) from glycoprotein__RABV__GU186380.1
auggugccccaggcccuccuguucgucccucugcuugcuguuccgcugugcuuuggcaaguuccccaucuacaccauuccugacaaacucgggcccuggagcccuaucgauauucaccaucuguccugucccaacaaucuugugguggaggacgaaggaugcacaaaccugucuggcuuuagcuauauggagcucaaggucggguacaucuccgccauuaaagugaauggauucacguguaccggcguugugacagaagcggagaccuauacaaacuuugucggguacgugaccacaaccuucaagagaaaacacuuucggccuacgccggaugcuugccgcucugccuauaauuggaagauggccggagaccccagauacgaagagagccugcauaacccuuaucccgauuaccacuggcugcggaccguuaagacaaccaaagaguccuucgugaucaucucuccuagcgucgcugaccucgaucccuacgacgaaucccugcauagccgcguguuuccgagaggcaaguguucuggcauuacaguguccagcaccuauugcucuacgaaucacgauuacacaaucuggaugccugagaacccccggcuugggaccuccugugacauuuucacaaauagccgcggaaaaagagccucuaagggcuccaaaaccugcggguuugucgaugaacggggacuguauaagagccucaagggcgcuuguaaacugaaacuuugcgggguucugggacuccgccugauggacggcaccuggguggccauccaaacauccgaugagacgaaaugguguccucccgaccagcuggcgaaccuccacgacuuccauucugaugagauugaacaccugguggucgaggaacuugugagaaagcgggaggaaugccuggacgcccucgagagcaucaugaccacaaaauccguuagcuuucgcagacugucucaucuucggaagcuggugcccggcuucgggaaggcuuacaccauuuucaauaagacacucauggaggccgaugcucacuauaaguccguccgcaccuggaacgaaaucaucccuagcaaaggaugccugagagugggcgggcggugucacccgcauguuaauggaguguuuuucaacggcauuauccuggggcccgacggacacguccucauuccugagaugcagucuagccugcuucagcaacauauggaacugcucgaguccucugugaucccccugaugcacccucuugccgaucccagcacggucuuuaaggacggcgaugaagcggaggacuucguggagguucaucugccggaugugcacaaacaggucuccggcguggaccucgggcugccuagcuggggaagauacguucugaugucugccggcauucucacagcucugaugcuuaugaucuuucugaugaccugcugucgccggaccaauagagccaaguccauccagcacagccucggggaaacaggacgcaaagugucugucaccucccagaacggccgggugauuagcuccugggagucuuauaagagcgggggcgaaacaaagcuguga

SEQ ID NO: 223148 - RNA, 1575 nt, Artificial Sequence; identical to SEQ ID NO: 222911
  derived and/or modified CDS sequence (opt5) from glycoprotein__RABV__GU186381.1

SEQ ID NO: 223149 - RNA, 1575 nt, Artificial Sequence
  derived and/or modified CDS sequence (opt5) from glycoprotein__RABV__GU186382.1
augaucccccaggugcugcuguucgucccucugcuuguuuuuagcuccugcuucggcaaguuuccgauuuacaccauccccgacaaacuggggccuuggucucccauugauauccaccaucucagcuguccuaacaaucuggugguggaggacgaaggaugcacaaaccuuuccggcuucucuuauauggagcugaaggucggguacauuagcgccaucaaagugaauggauuuacguguaccggcguugugacagaagcugagaccuauacaaacuucgucggguacgugaccacaaccuuuaagagaaaacacuuccggcccaugccugaugccugccgcgcggcuuauaauuggaagauggccggagacccgagauacgaagagucccuccauaaccccuauccugauuaccacuggcugcggacgguuaagaccacaaaagagucucuggugaucauuagccccuccgucgccgaccucgauccuuacgacaagagccugcauucucgcguguuucccggcggcaaauguuccgggaucaccgugagcucuacaugcuguuccaccaaucacgauuauacgauuuggaugccggaaaacccuagacuuggaacaagcugcgacaucucuaccaauucccggggcaagcgcgcuagcaaagggggaaagacauguggcuucgucgaugagagagggcuguacaagucccucaaaggagccugcaagcugaaacuuuguggcguucugggccuccggcugauggacgggaccuggguggcuauucaaaccucugaugaaaucaaguggugcagccccgaccagcuggugaaccuccacgacuuucauuccgaugagauugagcaccuggucguggaggaacuuguuaaaaagcgcgaagagugccuggacgcccucgaaacaaucaugacgaccaaaagcgugucuuucagacggcugucccaucuucgcaagcuggucccuggauuuggcaaggcguauacaaucuucaauaaaacccucauggaggccgaugcucacuacaagagcauuagaacauggaacgagaucauucccucuaaagggugucugcgggugggaggccgcugccacccccauguuaaugggguguucuuuaacggaaucauucugggcccugacggccacguccucaucccggaaaugcagagcucccugcuucaucagcacauggagcugcucgaaucuagcgugaucccccugaugcauccucuugccgaucccuccaccgucuucaaggacggggaugaggcugaagacuuuguggagguucaccucccugaugugcacaaacaaauuagcggagucgaccucgggcccccgaauuggggcaaguaugugcugaucucugccggagcgcugacggcccucauguccaugauuuuccugaugacauguugcagaaagaccaaccgggcugagagcauccagcauucuccuggcgaaaccgggagaaaaguuuccgugacaagccacaacggccgcgucauuuccucuugggagagcuacaaguccggaggcgaaaccaaacuuuga

SEQ ID NO: 223150 - RNA, 1575 nt, Artificial Sequence
  derived and/or modified CDS sequence (opt5) from glycoprotein__RABV__GU186383.1
augaucccccaggugcugcuguucgucccucugcuuguuuuuagcuccugcuucggcaaguuuccgauuuacaccauccccgacaaacuggggccuuggucucccauugauauccaccaucucagcuguccuaacaaucuggugguggaggacgaaggaugcacaaaccuuuccggcuucucuuauauggagcugaaggucggguacauuagcgccaucaaagugaauggauuuacguguaccggcguugugacagaagcugagaccuauacaaacuucgucggguacgugaccacaaccuuuaagagaaaacacuuccggcccaugccugaugccugccgcgcggcuuauaauuggaagauggccggagacccgagauacgaagagucccuccauaaccccuauccugauuaccacuggcugcggacgguuaagaccacaaaagagucucuggugaucauuagccccuccgucgccgaccucgauccuuacgacaagagccugcauucucgcguguuucccggcggcaaauguuccgggaucaccgugagcucuacaugcuguuccaccaaucacgauuauacgauuuggaugccggaaaacccuagacuuggaacaagcugcgacaucuucaccaauucucggggcaagcgcgcuuccaaagggggaaagacauguggcuuugucgaugagagagggcuguacaagagccucaaaggagccugcaagcugaaacuuuguggcguucugggccuccggcugauggacgggaccuggguggcuauucaaaccuccgaugaaaucaaguggugcucucccgaccagcuggugaaccuccacgacuuccauagcgaugagauugagcaccuggucguggaggaacuuguuaaaaagcgcgaagagugccuggacgcccucgaaacaaucaugacgaccaaauccgugagcuuuagacggcugucucaucuucgcgagcuggucccuggauucggcaaggcguauacaaucuucaauaagacccucauggaggccgaugcucacuacaaauccauuagaacauggaacgaaaucauucccagcaaggggugucugcgggugggaggccgcugccacccccauguuaaugggguguuuuucaacggaaucauucugggcccugacggccacguccucaucccggagaugcagucuagccugcuucaucagcacauggaacugcucgaguccucugugaucccccugaugcauccucuugccgaucccagcaccgucuuuaaagacggggaugaagcugaggacuucguggagguucaccucccugaugugcacaagcaaauuuccggagucgaccucggccugcccaauugggggaaauaugugcugaucagcgccggagcgcucacggcccugauuucuaugaucuuucuuaugacauguugcagaaagaccaaccgggcugaauccauucagcauagcccgggcgagaccgggagaaagguuucugugacaucccacaacggccgcgucaucagcuccugggaaucuuacaaaagcggaggcgagaccaagcuguga

SEQ ID NO: 223151 - RNA, 1575 nt, Artificial Sequence
  derived and/or modified CDS sequence (opt5) from glycoprotein__RABV__GU186384.1
augaucccccaggugcugcuguucgucccucugcuuguuuuuagcuccugcuucggcaaguuuccgauuuacaccauccccgacaaacuggggccuuggucucccauugauauccaccaucucagcuguccuaacaaucuggugguggaggacgaaggaugcacaaaccuuuccggcuucucuuauauggagcugaaggucggguacauuagcgccaucaaagugaauggauuuacguguaccggcguugugacagaagcugagaccuauacaaacuucgucggguacgugaccacaaccuuuaagagaaaacacuuccggcccaugccugaugccugccgcgcggcuuauaauuggaagauggccggagacccgagauacgaagagucccuccauaaccccuauccugauuaccacuggcugcggacgguuaagaccacaaaagagucucuggugaucauuagccccuccgucgccgaccucgauccuuacgacaagagccugcauucucgcguguuucccggcggcaaauguuccgggaucaccgugagcucuacaugcuguuccaccaaucacgauuauacgauuuggaugccggaaaacccuagacuuggaacaagcugcgacaucuucaccaauucucggggcaagcgcgcuuccaaagggggaaagacauguggcuuugucgaugagagagggcuguacaagagccucaaaggagccugcaagcugaaacuuuguggcguucugggccuccggcugauggacgggaccuggguggcuauucaaaccuccgaugaaaucaaguggugcucucccgaccagcuggugaaccuccacgacuuccauagcgaugagauugagcaccuggucguggaggaacuuguuaaaaagcgcgaagagugccuggacgcccucgaaacaaucaugacgaccaaauccgugagcuuuagacggcugucucaucuucgcaagcuggucccuggauucggcaaggcguauacaaucuucaauaaaacccucauggaggccgaugcucacuacaaguccauuagaacauggaacgagaucauucccagcaaagggugucugcgggugggaggccgcugccacccccauguuaaugggguguuuuucaacggaaucauucugggcccugacggccacguccucaucccggaaaugcagucuagccugcuucaucagcacauggagcugcucgaauccucugugaucccccugaugcauccucuugccgaucccagcaccgucuuuaaggacggggaugaggcugaagacuucguggauguucaccucccugacgugcacaaacaaauuuccggagucgaucucggccugcccaauugggggaaguaugugcugaucagcgccggagcgcucacggcccugaugcuuaugauuuuucugaugacauguugcagaaaggcuaaccgggccgagucuauccagcauaacccgggcgggaccggcagaaaaguuuccgugaccagccacaauggacgcgucauuucuuccugggagagcuacaaguccggcggggaaacaaaacucuga

SEQ ID NO: 223152 - RNA, 1575 nt, Artificial Sequence
  derived and/or modified CDS sequence (opt5) from glycoprotein__RABV__GU186385.1
augaucccccaggugcuucucuucgucccucugcuuguuuuuagcuccugcuucggcaaguuuccgauuuacaccauccccgacaaacuggggccuuggucucccauugauauccaccaucucagcuguccuaacaauauggugguggaggacgaaggaugcacaaaccuguccggcuucucuuauauggagcuuaaggucggguacauuagcgccaucaaagugaauggauuuacguguaccggcguugugacagaagcugagaccuauacaaacuucgucggguacgugaccacaaccuuuaagagaaaacacuuccggcccaugccugaugccugccgcgcggcuuauaauuggaagauggccggagacccgagauacgaagagucccugcauaaccccuauccugauuaccacuggcuccggacgguuaagaccacaaaagagucucuggugaucauuagccccuccgucgccgaccuggauccuuacgacaagagccuccauucucgcguguuucccggcggcaaauguuccgggaucaccgugagcucuacaugcuguuccaccaaucacgauuauacgauuuggaugccggaaaacccuagacugggaacaagcugcgacaucuucaccaauucucggggcaagcgcgcuuccaaagggggaaagacauguggcuuugucgaugagagagggcuuuacaagagccugaaaggagccugcaagcucaaacuguguggcguucuuggccugcggcucauggacgggaccuggguggcuauucaaaccuccgaugaaaucaaguggugcucucccgaccagcuggugaaccugcacgacuuccauagcgaugagauugagcaccucgucguggaggaacugguuaaaaagcgcgaagagugccuugacgcccuggaaacaaucaugacgaccaaauccgugagcuuuagacggcucucucaucugcgcaagcuggucccuggauucggcaaggcguauacaaucuucaauaaaacccugauggaggccgaugcucacuacaaguccauuagaacauggaacgagaucauucccagcaaagggugucuccgggugggaggccgcugccacccccauguuaaugggguguuuuucaacggaaucauucugggcccugacggccacguccugaucccggaaaugcagucuagccuccugcaucagcacauggagcuucuggaauccucugugaucccccucaugcauccucuggccgaucccagcaccgucuuuaaggacggggaugaggcugaagacuucguggagguucaccuuccugaugugcacaaacaaauuuccggagucgaccugggccuccccaauugggggaaguaugugcugaucagcgccggagcgcugacggcccucaugcugacaauuuuucuuaugaccuguugcagaaagaccucucgggcugaguccauccagcauagcccgggcgaaacagggagaaaaguuucugugaccucccacaacggccgcgucauuagcuccugggagucuuacaagagcggaggcgaaacaaaacuguga

SEQ ID NO: 223153 - RNA, 1575 nt, Artificial Sequence
  derived and/or modified CDS sequence (opt5) from glycoprotein__RABV__GU186386.1
auggugccccaggcccuccuguucgucccucugcuugcuguuccgcugugcuuuggcaaguuccccaucuacaccauuccugacaaacucgggcccuggagcccuaucgauauucaccaucuguccugucccaacaaucuugugguggaggacgaaggaugcacaaaccugucuggcuuuagcuauauggagcucaaggucggguacaucuccgccauuaaagugaauggauucacguguaccggcguugugacagaagcggagaccuauacaaacuuugucggguacgugaccacaaccuucaagagaaaacacuuucggccuacgccggaugcuugccgcucugccuauaauuggaagauggccggagaccccagauacgaagagagccugcauaacccuuaucccgauuaccacuggcugcggaccguuaagacaaccaaagaguccuucgugaucaucucuccuagcgucgcugaccucgaucccuacgacaagucccugcauagccgcguguuuccgagaggcaaauguucuggcauuacaguguccagcaccuauugcucuacgaaucacgauuacacaaucuggaugccugaaaacccccggcuugggaccuccugugacauuuucacaaauagccgcggaaagagagccucuaaaggcuccaagaccugcggguuugucgaugagcggggacuguauaagagccucaaaggcgcuuguaagcugaaacuuugcgggguucugggacuccgccugauggacggcaccuggguggccauccaaacauccgaugaaacgaagugguguccucccgaccagcuggugaaccuccacgacuuccauucugaugagauugagcaccuggucguggaggaacuuguuaaaaagagagaagagugccuggacgcgcucgaaagcaucaugaccacaaaauccgugagcuuucggcgccugucucaucuuagaaagcugguccccggcuucgggaaggccuacaccauuuucaauaaaacacucauggaggcugaugcccacuauaaguccgugcggaccuggaacgagaucaucccuagcaaaggaugccugcgcguuggcgggagaugucacccgcaugugaauggagucuuuuucaacggcauuauccuggggcccgacggacacgugcucauuccugaaaugcagucuagccugcuucagcaacauauggagcugcucgaauccucugucaucccccugaugcacccucuugcugaucccagcacgguguuuaaggacggcgaugaggccgaagacuucguugaggugcaucugccggauguccacaaacagguguccggcguugaccucgggcugccuagcuggggaaaguacgugcugaugucugcgggcauucucacagcccugaugcuuaugaucuuucugacaaccugcugucggagaaccaaucgcgcugaguccauccagcacagccucggggaaaccggacggaaggucucugugacaucccagaacggcagagugauuagcuccugggagucuuauaaaagcgggggcgaaacgaagcuguga

SEQ ID NO: 223154 - RNA, 1575 nt, Artificial Sequence
  derived and/or modified CDS sequence (opt5) from glycoprotein__RABV__GU186387.1
augaucccccaggcccuucucuucgugccucugcuugucuuuagccugugcuucggcaaguuuccgguuuacgcuauucccgacaaacucgggccuuggucccccaucgauauucaccaucugucuuguccuaacaaucuugugguggaggacgaaggaugcaccaaccugagcggcuucuccuauauggagcucaaggucggguacaucucugccauuaaagugaauggauuuacauguacgggcguugugaccgaagcggagacauauaccaacuucaucggguacgucacaaccacauuuaagagaaaacacuuccggcccaccccugaugcuugccgcgccgccuauaauuggaagauggcuggagacccgagauacgaagagagccugcauaaccccuauccugauuaccacuggcugcggacggugaagaccacaaaagagucccucguugugaucucucccagcgucgccgaccuggauccuuacgacaagucccuucauagccgcguguuucccucuggcaaauguuccggcauuaccgugagcucuacaugcuguuccaccaaucacgauuauacgaucuggaugccggaaaacccuagacuggggacaagcugcgacauuuucgucaauucucggggaaagcgcgcuuccaaaggcagcaagaccuguggguuuguugaugagagaggacucuacaagucccugaaaggcgccugcaagcugaaacuguguggggugcucggacugcggcugauggacggcacauggguggcgauccaaaccucugaugaaaccaaguggugucccccugaccagcucgucaaccugcacgacuuccgcagcgaugagauugagcaucuugugguugaggaacuggugaaaaagagagaagagugccucgacgcccuggaauccaucaugacaacgaaaagcgucucuuuucggcgccuuucccaccugagaaagcucgugcccggcuucgggaaggcuuauaccauuuucaauaaaacacugauggaggccgaugcucauuacaagagcguucggaccuggaacgagaucauccccucuaaaggaugccugcgcgugggcgggagaugccacccucacgucaauggaguguuuuucaacggcauuauccucgggccggacggacauguccugauucccgaaaugcagagcucccuucugcagcaacacauggagcuccuggaaucuagcgugaucccucuuaugcauccccuggccgauccuuccacaauuuuuaagaauggcgacgaggcggaagauuucguugaggugcaccuccccgacguccauaaacaggugagcggcguugaucuggggcugccgaacuggggaaaguaugugcucaugucugccggcgcucugaucgcccuuaugcugaugaucuuucucaugaccuguugccggaagacggacagaacaggguccacccaccacagcccuggagagaccggccgcaaagucucugugacaucccagaacgggcgggugauugcuagcugggaauccuacaagucuggcggagagaccaaacuguga

SEQ ID NO: 223155 - RNA, 1575 nt, Artificial Sequence; identical to SEQ ID NO: 222911
  derived and/or modified CDS sequence (opt5) from glycoprotein__RABV__GU186388.1

SEQ ID NO: 223156 - RNA, 1575 nt, Artificial Sequence
  derived and/or modified CDS sequence (opt5) from glycoprotein__RABV__GU186389.1
augaucccccaggugcuucucuucgucccucugcuuguuuuuagcuccugcuucggcaaguuuccgauuuacaccauccccgacaaacuggggccuuggucucccauugauauccaccaucucagcuguccuaacaaucuggugguggaggacgaaggaugcacaaaccuuuccggcuucucuuauauggagcugaaggucggguacauuagcgccaucaaagugaauggauuuacguguaccggcguugugacagaagcugagaccuauacaaacuucgucggguacgugaccacaaccuuuaagagaaaacacuuccggcccaugccugaugccugccgcgcggcuuauaauuggaagauggccggagacccgagauacgaagagucccuccauaaccccuauccugauuaccacuggcugcggacgguuaagaccacaaaagagucucuggugaucauuagccccuccgucgccgaccucgauccuuacgacaagagccugcauucucgcguguuucccggcggcaaauguuccgggaucaccgugagcucuacaugcuguuccaccaaucacgauuauacgauuuggaugccggaaaacccuagacuuggaacaagcugcgacaucuucaccaauucucggggcaagcgcgcuuccaaagggggaaagacauguggcuuugucgaugagagagggcuguacaagagccuccggggagccugcaaacugaagcuguguggcguucugggccuccgccugauggacgggaccuggguggcuauucaaaccuccgaugaaaucaaauggugcucucccgaccagcuggugaaccuccacgacuuccauagcgaugagauugagcaccuggucguggaggaacuuguuaagaaaagagaagagugccuggacgcccucgaaacaaucaugacgaccaaguccgugagcuuucggcgccugucucaucuuagaaaacuggucccuggauucggcaaggcguauacaaucuucaauaagacccucauggaggccgaugcucacuacaaauccauucggacauggaacgagaucauucccagcaaggggugucugcgcgugggaggcagaugccacccccauguuaaugggguguuuuucaacggaaucauucugggcccugacggccacguccucaucccggaaaugcagucuagccugcuucaucagcacauggagcugcucgaauccucugugaucccccugaugcauccucuugccgaucccagcaccgucuuuaaagacggggaugaggcugaagacuucguggagguucaucugccugaugugcacaagcaaauuuccggagucgaccucggccugcccaauugggggaaauaugugcugaucagcgccggagcgcucacggcccugaugcuuaugauuuuucugaugacauguugccggaagaccaacagagcugagucuauccagcacuccccgggcgaaaccgggcgcaagguuagcgugacaucucacaacggccgggucauuuccagcugggaguccuacaaaucuggaagcgaaaccaagcucuga

SEQ ID NO: 223157 - RNA, 1575 nt, Artificial Sequence; identical to SEQ ID NO: 222899
  derived and/or modified CDS sequence (opt5) from glycoprotein__RABV__GU186390.1

SEQ ID NO: 223158 - RNA, 1575 nt, Artificial Sequence
  derived and/or modified CDS sequence (opt5) from glycoprotein__RABV__GU186392.1
augaucccccaggugcugcuguucgucccucugcuuguuuuuagcuccugcuucggcaaguuuccgauuuacaccauccccgacaaacuggggccuuggucucccauugauauccaccaucucagcuguccuaacaaucuggugguggaggacgaaggaugcacaaaccuuuccggcuucucuuauauggagcugaaggucggguacauuagcgccaucaaagugaauggauuuacguguaccggcguugugacagaagcugagaccuauacaaacuucgucggguacgugaccacaaccuuuaagagaaaacacuuccggcccacgccugaugccugccgcgcggcuuauaauuggaagauggccggagacccgagauacgaagagucccuccauaaccccuauccugauuaccacuggcugcggaccguuaagacaucuaaagagagccuggugaucauuucccccagcgucgccgaccucgauccuuacgacaagucucugcauucccgcguguuucccggcggcaaauguagcgggaucaccgugucuuccacaugcuguagcaccaaucacgauuauacgauuuggaugccggaaaacccuagacuuggaacaucuugcgacaucuucaccaauucccggggcaagcgcgcuagcaaagggggaaagacauguggcuuugucgaugagagagggcuguacaagucccucaaaggagccugcaagcugaaacuuuguggcguucugggccuccggcugauggacgggaccuggguggcuauucaaaccucugaugaaaucaaguggugcagccccgaccagcuggugaaccuccacgacuuccauuccgaugagauugagcaccuggucguggaggaacuuguuaaaaagcgcgaagagugccuggacgcccucgaaacaaucaugacgaccaaaagcgugucuuuuagacggcugucccaucuucgcaagcuggucccuggauucggcaaggcguauacaaucuucaauaaaacccucauggaggccgaugcucacuacaagagcauuagaacauggaacgagaucauucccucuaaagggugucugcgggugggaggccgcugccacccccauguuaaugggguguuuuucaacggaaucauucugggcccugacggccacguccucaucccggaaaugcagagcucccugcuucaucagcacauggagcugcucgaaucuagcgugaucccccugaugcauccucuugccgaucccuccaccgucuuuaaggacggggaugaggcugaagacuucguggagguucaccucccugaugugcacaaacaaauuagcgaggucgaccucggacugcccaauuggggcaaguaugugcugguuucugccggggcgcucacggcccugaugcuuaugaucuuucugaugacauguugcagaaagaccaaccgggcugaauccauucagcauagcccgggagagaccggcagaaaagugucugucacaucccacaacgggcgcgugaucagcuccugggaaucuuacaagagcggcggagagaccaaacucuga

SEQ ID NO: 223159 - RNA, 1575 nt, Artificial Sequence
  derived and/or modified CDS sequence (opt5) from glycoprotein__RABV__GU186396.1
augaucccccaggcccuccuguucgugccucugcuugucuuuagccugugcuucggcaaguuuccgauuuacaccauccccgacaaacucgggccuuggucccccauugauauccaccaucugucuuguccuaacaaucuuguuguggaggacgaaggaugcacaaaccugagcggcuucuccuauauggagcucaaggugggguacauuucugcuaucaaagucaauggauuuacguguaccggcgugguuacagaagccgagaccuauacaaacuucgugggguacgucaccacaaccuuuaagagaaaacacuuccggcccacgccugaugcgugccgcgcugccuauaauuggaagauggccggagacccgagauacgaagagagccugaacaaucccuauccugauuaccauuggcugcggaccgugaagacaaccaaagagucccucguugugaucucucccagcgucgcugaccuggauccuuacgacgaaucccuucacagccgcguguuucccucuggcaaguguuccggcauuacagugagcucuaccugcuguuccacgaaccaugauuauacaaucuggaugccggagaauccuagacuggggaccagcugcgacauuuucgucaacucucggggaaaacgcgccuccaagggcagcaaaacauguggguuuguugaugaaagaggacucuacaagucccugaagggcgcuugcaaacuuaagcuguguggggugcucggacugcggcugauggacggcaccuggguggccauccaaaccucugaugagacaaaauggugucccccugaccagcucgucaaucugcacgacuuccgcagcgaugagauugaacaccuugugguugaggaacuggugaagaaaagagaggaaugccucgacgcgcuggaguccaucaugacgaccaagagcgucucuuuucggcgccuuucccaucugagaaaacucgugcccggcuucgggaaggccuauacaauuuucaacaagacccugauggaggcugaugcccacuacaaaagcguucggacauggaaugaaaucauccccucuaagggaugccugcgcgugggcgggagaugccauccucacgucaacggaguguuuuucaauggcauuauccucgggccggacggacacguccugauucccgagaugcagagcucccuucugcagcaacauauggaacuccuggagucuagcgugaucccucuuaugcacccccuggcugauccuuccaccauuuuuaaagacggcgaugaagccgaggacuucguugaggugcaucuccccgauguccacaaacaggugagcggcguugaccuggggcugccgaacuggggaaaguaugugcucaugucugcgggcgcccugaucgcucuuaugcugaugaucuuuuccaugacguguugccggaagacagauagaauugggagcacccaucacggaccuggcgaaaccgggcgcaaggucucugugacaucccagaacggccgggugaucgccagcugggaguccuacaaaucuggaggcgaaaccaagcucuga

SEQ ID NO: 223160 - RNA, 1575 nt, Artificial Sequence
  derived and/or modified CDS sequence (opt5) from glycoprotein__RABV__GU186397.1
augaucccccaggcccuucucuucgugccucugcuugucuuuagccugugcuucggcaaguuuccgauuuacaccauccccgacaaacucgggccuuggucccccauugauauccaccaucugucuuguccuaacaaucuuguuguggaggacgaaggaugcacaaaccugagcggcuucuccuauauggagcucaaggugggguacauuucugcuaucaaagccaauggauuuacguguaccggcgucgugacagaagcggagaccuauacaaacuucguuggguacgugaccacaaccuuuaagagaaaacacuuccggcccacgccugaugcuugccgcgccgcccauaauuggaagauggcuggagaaccgagauaugaggagagccugcacaaccccuacccugacuaucauuggcugcggaccgucaagacaaccaaagaaucccucgugaucauuucucccagcguugccgaucuggacccuuacgauaagucccuucacagccgcguguuucccucuggcaaauguuccggcaucacagucagcucuaccuacugcuccacgaaucacgacuauacaauuagaaugccggagaacccucggcuggggaccagcugugauaucuucgucaauucucgcggaaagagagcuuccaaaggcagcaagacaugcggguuuguggacgaacggggacucuacaagucccugaaaggcgccuguaagcugaaacugugcggggugcucggacugcgccugauggauggcaccuggguugcgauucaaaccucugacgagacaaaguggugucccccugaucagcucgugaaccugcaugacuucagaagcgacgagaucgaacaccuuguggucgaggaacuggugaaaaagcgggaggaaugccucgaugcccuggaguccauuaugacgaccaaaagcguuucuuuucgcagacuuucccaucugcggaagcucgugcccggcuucgggaaggcuuauacaaucuucaauaaaacccugauggaggccgacgcucacuacaagagcguccgcacauggaacgaaaucauucccucuaaaggaugccugagagugggcgggcggugucacccucauguuaauggaguguuuuucaacggcaucauucucgggccggauggacacguccugauccccgagaugcagagcucccuucugcagcaacauauggaacuccuggagucuagcgugauuccucuuaugcacccccuggccgacccuuccaccaucuuuaaggauggcgacgaagcggaggauuucgucgaggugcaucuccccgacguucacagacaggugagcggcgucgaucuggggcugccgaauuggggaaaauaugugcucaugucugccggcgcucugguugcccuuaugcugaugaucuuucucaugacgugcugugugaagacagaccgcaccggguccacccaccauagcccuggagaaacaggccggaaggucucugugaccucccagaacgggagagugauugcuagcugggaguccuacaaaucuggcggagaaacaaagcuguga

SEQ ID NO: 223161 - RNA, 1575 nt, Artificial Sequence; identical to SEQ ID NO: 222599
  derived and/or modified CDS sequence (opt5) from glycoprotein__RABV__GU186398.1

SEQ ID NO: 223162 - RNA, 1575 nt, Artificial Sequence
  derived and/or modified CDS sequence (opt5) from glycoprotein__RABV__GU186400.1
auggugccccaggcccuucucuucgucccucugcuugcuguuccgcugugcuuuggcaaguuccccaucuacaccauuccugacaaacucgggcccuggagcccuaucgauauucaccaucuguccugucccaacaaucuugugguggaggacgaaggaugcacaaaccugucuggcuuuagcuauauggagcucaaggucggguacaucuccgccauuaaagugaauggauucacguguaccggcguugugacagaagcggagaccuauacaaacuuugucggguacgugaccacaaccuucaagagaaaacacuuucggccuacgucugaugcuugccgcagcgccuauaauuggaagauggccggagacccgagauacgaagagucccugcauaaccccuauccugauuaccacuggcugcggaccguuaagacaaccaaagagucuuucgugaucaucagccccuccgucgcugaccucgauccuuacgacaagagcccccauucucgcguguuuccgagaggcaaauguuccggcauuacagugagcucuaccuauugcuccacgaaucacgauuacacaaucuggaugccugaaaacccccggcuggggaccagcugugacauuuucacaaauucucgcggaaagagagccuccaaaggcagcaagaccugcggguuugucgaugagcggggacuuuauaagucccugaaaggcgcuuguaagcucaaacugugcgggguucuuggacugcgccucauggacggcaccuggguggccauccaaacaucugaugaaacgaagugguguccucccgaccagcuggugaaccugcacgacuuccauagcgaugagauugagcaccucgucguggaggaacugguuaaaaagagagaagagugccuugacgcgcuggaauccaucaugaccacaaaaagcgugucuuuucggcgccucucccaucugagaaagcugguccccggcuucgggaaggccuacaccauuuucaauaaaacacugauggaggcugaugcccacuauaagagcgugcggaccuggaacgagaucaucccuucuaaaggaugccuccgcguuggcgggagaugucacccgcaugugaauggagucuuuuucaacggcauuauccuggggcccgacggacacgugcugauuccugaaaugcagagcucccuccugcagcaacauauggagcuucuggaaucuagcgucaucccccucaugcacccucuggcugaucccuccacgguguuuaaggacggcgaugaggccgaagacuucguugaggugcaucuuccggauguccacaaacaggugagcggcguugaccuggggcucccuucuuggggaaaguacgugcugauguccgcgggcauucugacagcccucaugcugaccaucuuucuuaugaccugcugucggagaacaaaucgcgcuaagagcauccagcacucucugggggagaccggacggaaagucuccgugacaagccaguccggcagagugauuucuagcugggaauccuauaagucugggggcgagacgaaacucuga

SEQ ID NO: 223163 - RNA, 1575 nt, Artificial Sequence
  derived and/or modified CDS sequence (opt5) from glycoprotein__RABV__GU186401.1
auggugccccaggcccuccuguucgucccucugcuugcuguuccgcugugcuuuggcaaguuccccaucuacaccauuccugacaaacucgggcccuggagcccuaucgauauucaccaucuguccugucccaacaaucuugugguggaggacgaaggaugcacaaaccugucuggcuuuagcuauauggagcucaaggucggguacacguccgccaucaaagugaauggauucaccuguacaggcguugugaccgaagcggagacauauaccaacuuugucggguacgugacaaccacguucaagagaaaacacuuucggccuaccucugaugcuugccgcagcgccuauaauuggaagauggccggagacccgagauacgaagagucccugcauaaccccuauccugauuaccacuggcugcggacaguuaagaccacaaaagagucuuucgugauuaucagccccuccgucgcugaccucgauccuuacgacaagagccugcauucucgcguguuucccagaggcaaauguuccggcaucaccgugagcucuacguauugcuccacaaaucacgauuacaccauuuggaugccggaaaacccucggcuugggacaagcugugacaucuucaccaauucucgcggaaagagagccuccaaaggcagcaagaccugcggguuugucgaugagcggggacuguauaagucccucaaaggcgcuuguaagcugaaacuuugcgggguucugggacuccgccugauggacggcacauggguggccauucaaacgucugaugaaaccaaguggugucccccugaccagcuggugaaccuccacgacuuccauagcgaugagaucgagcaccuggucguggaggaacuuguuaaaaagagagaagagugccuggacgcgcucgaauccauuaugacaaccaaaagcgugucuuuucggcgccugucccaucuuagaaagcugguccccggcuucgggaaggccuacacaaucuucaauaaaacccucauggaggcugaugcccacuauaagagcgugcggacguggaacgagauuauccccucuaaaggaugccugcgcguuggcgggagaugucacccucaugugaauggagucuuuuucaacggcaucauucuggggccggacggacacgugcucauccccgaaaugcagagcucccugcuucagcaacauauggagcugcucgaaucuagcgucauuccucugaugcacccccuugcugauccuuccacaguguuuaaggacggcgaugaggccgaagacuucguugaggugcaucugcccgauguccacaaacaggugagcggcguugaccucgggcugccgucuuggggaaaguacgugcugauguccgcgggcauccucaccgcccugaugcuuaccauuuuucugaugacaugcugucggagaaccaaucgcgcuaagagcauccagcacucucucggggagacaggacggaaagucuccgugacgagccaguccggcagagugaucucuagcugggaauccuauaagucugggggcgagaccaaacuguga

SEQ ID NO: 223164 - RNA, 1575 nt, Artificial Sequence
  derived and/or modified CDS sequence (opt5) from glycoprotein__RABV__GU186402.1
auggcuccccaggcccuucucuucgugccucugcuugccgucccgcugugccucggcaaguuucccaucuacaccauuccugacaaacuggggcccuggagcccuaucgauauucaccaucuuuccugucccaacaaucugguuguggaggacgaaggaugcacaaaccucucuggcuucagcuauauggagcugaaggugggguacaucuccgcgauuaaagucaauggauuuacguguaccggcgugguuacagaagcugagaccuauacaaacuucgugggguacgucaccacaaccuuuaagagaaaacacuuccggccuacgccggaugccugccgcucugccuauaauuggaagauggcuggagaccccagauacgaagagagccugcauaacccuuaucccgauuaccacuggcuccggaccgugaagacaaccaaagaguccuuuguuaucaucucuccuagcguggccgaccuggaucccuacgacaagucccuucauagccgcgucuucccgagaggcaaauguucuggcauuacaguguccagcaccuauugcucuacgaaucacgauuacacaaucuggaugccugaaaacccccggcuggggaccuccugugacauuuuuacaaauagccgcggaaagagagcuucuaaaggcuccaagaccugcggguucguggaugagcggggacucuauaagagccugaaaggcgccuguaagcugaaacugugcgggguccucggacugcgccugauggacggcaccuggguugcgauccaaacauccgaugaaacgaagugguguccucccgaccagcucgugaaccugcacgacuuucauucugaugagauugagcaccuuguggucgaggaacuggugaaaaagagagaagagugccucgacgcccuggaaagcaucaugaccacaaaauccguuagcuuccggcgccuuucucaucugagaaagcucgugcccggcuuugggaaggcuuacaccauuuucaauaaaacacugauggaggccgaugcucacuauaaguccguccggaccuggaacgagaucaucccuagcaaaggaugccugcgcgugggcgggagaugucacccgcauguuaauggaguguucuuuaacggcauuauccucgggcccgacggacacguccugauuccugaaaugcagucuagccuucugcagcaacauauggagcuccuggaauccucugugaucccccuuaugcacccucuggccgaucccagcacggucuucaaggacggcgaugaggcggaagacuuuguggagguucaucucccggaugugcacaaacacgucuccggcguggaccuggggcugccuagcuggggaaaguacguucucgugucugccggcauucugacagcucuuaugcugaccaucuuccucaugaccugcugucggagaacaaaucgcgccgaguccauccagcauagccugggggaaaccggacggaaggucucugugacaucccagagcggcagagugauuuccucuugggagagcuauaaauccgggggcgaaacgaagcuguga

SEQ ID NO: 223165 - RNA, 1575 nt, Artificial Sequence
  derived and/or modified CDS sequence (opt5) from glycoprotein__RABV__GU186403.1
augaucccccaggugcugcuguucgucccucugcuuguuuuuagcuccugcuucggcaaguuuccgauuuacaccauccccgacaaacuggggccuuggucucccauugauauccaccaucucagcuguccuaacaaucuggugguggaggacgaaggaugcacaaaccuuuccggcuucucuuauauggagcugaaggucggguacauuagcgccaucaaagugaauggauuuacguguaccggcguugugacagaagcugagaccuauacaaacuucgucggguacgugaccacaaccuuuaagagaaaacacuuccggcccaugccugaugccugccgcgcggcuuauaauuggaagauggccggagacccgagauacgaagagucccuccauaaccccuauccugauuaccacuggcugcggacgguuaagaccacaaaagagucucugguggucaucagccccuccguggccgaccucgauccuuacgacaagagccugcauucucgcguguuucccggcggcaaauguuccgggauuaccgucagcucuacaugcuguuccaccaaucacgauuauacgaucuggaugccggaaaacccuagacuuggaacaagcugcgacauuuucaccaauucucggggcaagcgcgcuuccaaagggggaaagacauguggcuuuguugaugagagagggcuguacaagagccucaaaggagccugcaagcugaaacuuuguggcgugcugggccuccggcugauggacgggaccuggguggcuauccaaaccuccgaugaaauuaaguggugcucucccgaccagcuggucaaccuccacgacuuccauagcgaugagaucgagcaccuggugguugaggaacuugugaaaaagcgcgaagagugccuggacgcccucgaaacaauuaugacgaccaaauccgucagcuuuagacggcugucucaucuucgcaagcuggugccuggauucggcaaggcguauacaaucuucaauaaaacccucauggaggccgaugcucacuacaaguccaucagaacauggaacgagauuauccccagcaaagggugucugcggguuggaggccgcugccacccccaugugaauggggucuuuuucaacggaauuauccugggcccugacggccacgugcucauuccggaaaugcagucuagccugcuucaucagcacauggagcugcucgaauccucugucaucccccugaugcauccucuugccgaucccagcaccguguuuaaggacggggaugaggcugaagacuucguugaggugcaccucccugauguccacaaacaaaucuccggaguggaccucggccugcccaauugggggaaguauguucugauuagcgccggagcgcucacggcccugaugcuuacaaucuuucugaugaccuguugcagaaagaccaaccgggcuggcucuauucagcauuccccgggggagacaggcagaaaagugagcgucaccucucacaacggacgcgugaucuccagcugggaauccuacaagucuggcagcgagacaaaacucuga

SEQ ID NO: 223166 - RNA, 1575 nt, Artificial Sequence; identical to SEQ ID NO: 222917
  derived and/or modified CDS sequence (opt5) from glycoprotein__RABV__GU186404.1

SEQ ID NO: 223167 - RNA, 1575 nt, Artificial Sequence
  derived and/or modified CDS sequence (opt5) from glycoprotein__RABV__GU186406.1
augaucccccaggugcuucucuucgucccuccgcugguuuuuagcuccugcuucggcaaguuucccauuuacaccaucccugacaaacuugggcccuggucuccuauugauauccaccaucugagcugucccaacaaucucgugguggaggacgaaggaugcacaaaccuguccggcuucucuuauauggagcuuaaggucggguacauuagcgccaucaaagugaauggauuuacguguaccggcguugugacagaagcugagaccuauacaaacuucgucggguacgugaccacaaccuuuaagagaaaacacuuccggccuaugccggaugccugccgcgcggcuuauaauuggaagauggccggagaccccagauacgaagagucccugcauaacccuuaucccgauuaccacuggcuccggacgguuaagaccacaaaagagucucuggugaucauuagcccuuccgucgccgaccuggaucccuacgacaagagccuccauucucgcguguuuccgggcggcaaauguuccgggaucaccgugagcucuacaugcuguuccaccaaucacgauuauacgauuuggaugccugaaaaccccagacugggaacaagcugcgacaucuucaccaauucucggggcaagcgcgcuuccaaagggggaaagacauguggcuuugucgaugagagagggcuuuacaagagccugaaaggagccugcaagcucaaacuguguggcguucuuggccugcggcucauggacgggaccuggguggcuauucaaaccuccgaugaaaucaaguggugcucuccugaccagcuggugaaccugcacgacuuccauagcgaugagauugagcaccucgucguggaggaacugguuaaaaagcgcgaagagugccuugacgcccuggaaacaaucaugacgaccaaauccgugagcuuuagacggcucucucaucugcgcaagcugguccccggauucggcaaggcguauacaaucuucaauaaaacccugauggaggccgaugcucacuacaaguccauuagaacauggaacgagaucauucccagcaaagggugucuccgggugggaggccgcugccacccucauguuaaugggguguuuuucaacggaaucauucugggcccggacggccacguccugauccccgaaaugcagucuagccuccugcaucagcacauggagcuucuggaauccucugugaucccucucaugcauccccuggccgauccuagcaccgucuuuaaggacggggaugaggcugaagacuucguggagguucaccuucccgaugugcacaaacaaauuuccggagucgaccugggccucccgaauugggggaaguaugugcugaucagcgccggagcgcugacggcccucaugcugaugacauuucuuaugaccuguugcagaaagaccaaccgggcugagucuauucagcauuccccuggcgaaacagggagaaaaguuagcgugaccucucacaacggccgcgucaucuccagcugggaguccuacaagucuggaggcgaaacaaaacuguga

SEQ ID NO: 223168 - RNA, 1575 nt, Artificial Sequence
  derived and/or modified CDS sequence (opt5) from glycoprotein__RABV__GU186407.1
augaucccccaggugcugcuguucgucccucugcuuguuuuuagcuccugcuucggcaaguuuccgauuuacaccauccccgacaaacuggggccuuggucucccauugauauccaccaucucagcuguccuaacaaucuggugguggaggacgaaggaugcacaaaccuuuccggcuucucuuauauggagcugaaggucggguacauuagcgccaucaaagugaauggauuuacguguaccggcguugugacagaagcugagaccuauacaaacuucgucggguacgugaccacaaccuuuaagagaaaacacuuccggcccaugccugaugccugccgcgcggcuuauaauuggaagauggccggagacccgagauacgaagagucccuccauaaccccuauccugauuaccacuggcugcggacgguuaagaccacaaaagagucucuggugaucauuagccccuccgucgccgaccucgauccuuacgacaagagccugcauucucgcguguuucccggcggcaaauguuccgggaucaccgugagcucuacaugcuguuccaccaaucacgauuauacgauuuggaugccggaaaacccuagacuuggaacaagcugcgacaucuucaccaauucucggggcaagcgcgcuuccaaagggggaaagacauguggcuuugucgaugagagagggcuguacaagagccucaaaggagccugcaagcugaaacuuuguggcguucugggccuccggcugauggacgggaccuggguggcuauucaaaccuccgaugaaaucaaguggugcucucccgaccagcuggugaaccuccacgacuuccauagcgaugagauugagcaccuggucguggaggaacuuguuaaaaagcgcgaagagugccuggacgcccucgaaacaaucaugacgaccaaauccgugagcuuuagacggcugucucaucuucgcaagcuggucccuggauucggcaaggcguauacaaucuucaauaaaacccucauggaggccgaugcucacuacaaguccauuagaacauggaacgagaucauucccagcaaagggugucugcgggugggaggccgcugccacccccauguuaaugggguguuuuucaacggaaucauucugggcccugacggccacguccucaucccggaaaugcagucuagccugcuucaucagcacauggagcugcucgaauccucugugaucccccugaugcauccucuugccgaucccagcaccgucuuuaaggacggggaugaggcugaagacuucguggagguucaccucccugaugugcacaaacaaauuuccggagucgaccucggccugcccaauugggggaaguaugugcugaucagcgccggagcgcucacggcccugaugcuuaugacauuucugaugaccuguugcagaaagaccaaccgggcugagucuauucagcauuccccgggcgaaacagggagaaaaguuagcgugaccucucacaacggccgcgucaucuccagcugggaguccuacaagucuggaggcgaaacaaaacucuga

SEQ ID NO: 223169 - RNA, 1575 nt, Artificial Sequence; identical to SEQ ID NO: 223168
  derived and/or modified CDS sequence (opt5) from glycoprotein__RABV__GU186408.1

SEQ ID NO: 223170 - RNA, 1575 nt, Artificial Sequence
  derived and/or modified CDS sequence (opt5) from glycoprotein__RABV__GU186409.1
augaucccccaggugcugcucuuugucccucugcuuguuuuuagcuccugcuucggcaaguuuccgauuuacaccauccccgacaaacuggggccuuggucucccauugauauccaccaucucagcuguccuaacaaucuggugguggaggacgaaggaugcacaaaccuuuccggcuucucuuauauggagcugaaggucggguacauuagcgccaucaaagugaauggauuuacguguaccggcgcuguuacagaagccgagaccuauacaaacuucgugggguacgucaccacaaccuuuaagagaaaacacuuccggcccaugccugaugcgugccgcgcugccuauaauuggaagauggccggagacccgagauacgaagagucccuccauaaccccuauccugauuaccacuggcugcggacggugaagaccacaaaagagucucugguuaucauuagccccuccguggcugaccucgauccuuacgacaagagccugcauucucgcgucuuucccggcggcaaauguuccgggaucaccgugagcucuacaugcuguuccaccaaucacgauuauacgauuuggaugccggaaaacccuagacuuggaacaagcugcgacaucuucaccaauucucggggcaagcgcgccuccaaagggggaaagacauguggcuuuguggaugagagagggcuguacaagagccucaaaggagcuugcaagcugaaacuuuguggcguccugggccuccggcugauggacgggaccuggguugccauucaaaccuccgaugaaaucaaguggugucccccugaccagcuggugaaccuccacgacuuccauucugaugagauugagcaccugguggucgaggaacuugugaaaaagcgcgaagagugccuggacgcgcucgaaacaaucaugacgaccaaaagcguuuccuuuagacggcugagccaucuucgcaagcuggugcccggauucggcaaggccuauacaaucuucaauaaaacccucauggaggcugaugcccacuacaagucuauuagaacauggaacgagaucauucccuccaaagggugccugcgggucggaggccgcugccacccucaugugaaugggguuuucuucaacggaaucauucugggcccggacggccacgugcucauccccgaaaugcagagcucucugcuucaucagcacauggagcugcucgaaagcuccgucaucccucugaugcauccccuugcugauccuucuaccguguuuaaggacggggaugaggccgaagacuucgucgaggugcaucugcccgauguucacaaacaaauuagcggaguggaccucggccugccgaauugggggaaguauguccugaucuccgcgggagcccucacggcucugaugcuuacaauuuuucugaugaccuguugcagaaagaccaaccgggccggcagcauccagcacucuccuggggagacaggcagaaaaguguccguuaccagccacaacggacgcgugauuucuuccugggaaagcuacaaguccggcucugagacaaaacucuga

SEQ ID NO: 223171 - RNA, 1575 nt, Artificial Sequence
  derived and/or modified CDS sequence (opt5) from glycoprotein__RABV__GU186410.1
augaucccccaggugcugcuguucgucccucugcuuguuuuuagcuccggcuucgggaaguuuccgauuuacaccauccccgacaaacugggaccuuggucucccauugauauccaccaucucagcugcccuaacaaucuggugguggaggacgaaggcuguacaaaccuuuccggguucucuuauauggagcugaaggucggauacauuagcgccaucaaagugaauggcuuuacgugcaccgggguugugacagaagcugagaccuauacaaacuucgucggauacgugaccacaaccuuuaagagaaaacacuuccggcccaugccugaugccugucgcgcggcuuauaauuggaagauggccggcgacccgagauacgaagagucccuccauaaccccuauccugauuaccacuggcugcggacgguuaagaccacaaaagagucucuggugaucauuagccccuccgucgccgaccucgauccuuacgacaagagccugcauucucgcguguuucccggcgggaaaugcuccggaaucaccgugagcucuacauguugcuccaccaaucacgauuauacgauuuggaugccggaaaacccuagacuuggcacaagcugugacaucuucaccaauucucgggggaagcgcgcuuccaaaggaggcaagacaugcggguuugucgaugagagaggacuguacaagagccucaaaggcgccuguaagcugaaacuuugcggcguucuggggcuccggcugauggacggaaccuggguggcuauucaaaccuccgaugaaaucaagugguguucucccgaccagcuggugaaccuccacgacuuccauagcgaugagauugagcaccuggucguggaggaacuuguuaaaaagcgcgaagagugccuggacgcccucgaaacaaucaugacgaccaaauccgugagcuuuagacggcugucucaucuucgcaagcuggucccuggcuucgggaaggcguauacaaucuucaauaaaacccucauggaggccgaugcucacuacaaguccauuagaacauggaacgagaucauucccagcaaaggaugccugcgggugggcgggcgcugucacccccauguuaauggaguguuuuucaacggcaucauucugggcccugacgggcacguccucaucccggaaaugcagucuagccugcuucaucagcacauggagcugcucgaauccucugugaucccccugaugcauccucuugccgaucccagcaccgucuuuaaggacggagaugaggcugaagacuucguggagguucaccucccugaugugcacaaacaaauuuccggcgucgaccucgggcugcccaauuggggaaaguaugugcugaucagcgccggcgcgcucacggcccugaugcuuacaauuuuucugaugaccugcuguagaaagaccaaccgggcugggucuauccagcauuccccgggcgagacaggaagaaaaguuagcgugaccucucacaacggccgcgucauuuccagcugggaauccuacaagucugggagcgagacaaaacucuga

SEQ ID NO: 223172 - RNA, 1575 nt, Artificial Sequence; identical to SEQ ID NO: 222924
  derived and/or modified CDS sequence (opt5) from glycoprotein__RABV__GU345746.1

SEQ ID NO: 223173 - RNA, 1575 nt, Artificial Sequence
  derived and/or modified CDS sequence (opt5) from glycoprotein__RABV__GU345747.1
augaucccccaggcccuucucuucgugccucugcuugucuuuagccugugcuucggcaaguuuccgauuuacaccauccccgacaaacucgggccuuggucccccauugauauccaccaucugucuuguccuaacaaucuuguuguggaggacgaaggaugcacaaaccugagcggcuucuccuauauggagcucaaggugggguacauuucugcuaucaaagucaauggauuuacguguaccggcgugguuacagaagccgagaccuauacaaacuucgugggguacgucaccacaaccuuuaagagaaaacacuuccggcccacgccugaugcgugccgcgcugccuauaauuggaagauggccggagacccgagauacgaagagagccugcauaaccccuauccugauuaccacuggcugcggaccgugaagacaaccaaagagucccucguuaucauuucucccagcguggcugaccuggauccuuacgacaagucccuucauagccgcgucuuucccucuggcaaauguuccggcaucacagugagcucuaccuauugcuccacgaaucacgauuacacaauuuggaugccggaaaacccuagacuggggaccagcugugacaucuucgucaauucucggggaaagcgcgccuccaaaggcagcaagacaugcggguuuguggaugagagaggacucuauaagucccugaaaggcgcuuguaagcugaaacugugcgggguucucggacugcggcugauggacggcaccuggguggccauucaaaccucugaugaaacaaaguggugucccccugaccagcucgugaaccugcacgacuuccgcagcgaugagaucgagcaucuugucguggaggaacugguuaaaaagagagaagagugccucgacgcgcuggaauccauuaugacgaccaaaagcgugucuuuucggcgccuuucccaccugagaaagcucguccccggcuucgggaaggccuacacaaucuucaauaaaacccugauggaggcugaugcccauuauaagagcgugcggacauggaacgagaucauucccucuaaaggaugccugcgcguuggcgggagaugucacccucacgugaauggagucuuuuucaacggcaucauucucgggccggacggacaugugcugauccccgaaaugcagagcucccuucugcagcaacacauggagcuccuggaaucuagcgucauuccucuuaugcauccccuggcugauccuuccaccaucuuuaaggacggcgaugaggccgaagacuucguggagguucaccuccccgaugugcauaaacaggucagcggcguggaccuggggcugccgaauuggggaaaguacguucucaugucugcgggcgcccugaucgcucuuaugcugaugauuuuucucaugacgugcugucggaagacagauagaaccggguccacccaccacagcccuggagagacaggccgcaaagugucugucaccucccagaacgggcgggugaucgccagcugggaauccuauaagucuggcggagagacaagacuguga

SEQ ID NO: 223174 - RNA, 1575 nt, Artificial Sequence
  derived and/or modified CDS sequence (opt5) from glycoprotein__RABV__GU565703.1
auggugccccagguccugcuguucguuccucugcuuggcuuuagccugugcuucgggaaguuuccgaucuacaccauucccgacaaacucggaccuuggucccccaucgauauucaccaucugucuuguccuaacaaucuugugguggaggacgaaggcugcacaaaccugagcgaguucuccuauauggaacucaaggucggguacaucucugccauuaaagugaauggauuuacguguaccggcguugugacagaggcugaaaccuauacaaacuucgucggguacgugaccacaaccuuuaagagaaaacacuuccggcccacgccugaugccugccgcgcggcuuauaauuggaagauggccggagacccgagauacgaggagagccugcauaaccccuauccugauuaccacuggcugcggaccguuaagacaaccaaagaaucccucgugaucaucucucccagcgucacagaccuggauccuuacgacaagucccuucauagccgcguguuucccggcggcaauuguucugggauuaccguguccagcacguauugcucuacaaaccacgauuacaccaucuggaugccggagaaucugagacucggaacauccugugacauuuucaccaacagccggggcaaacgcgccucuaaagggggaaagaccugcggcuuugucgaugaaagagggcuguauaagucccuuaagggagcuuguaaacugaagcucugcggcguucugggccugcggcucauggacgggacauggguggccaugcaaacgagcgaugagaccaaaugguguccucccggacagcuggugaaucuucacgacuuccgcuccgacgagaucgaacaucuggucguggaggaacucguuaagaaaagagaggaaugccuggaugcucuugagucuauuaugacaaccaagagcguguccuuucggcgccugagccaccucagaaaacuggucccuggcuucgggaaggccuacacaaucuucaacaagacccugauggaggcggacgcccauuauaaaucugugcggacguggaaugaaauuauccccuccaagggaugccuccgcguuggcgggagaugucacccccacgugaacggagucuuuuucaauggcaucauucugggcagcgaugggcaugugcuuaucccugagaugcagucuagccugcuccagcaacacauggaacugcuugaguccucugucauuccgcugaugcauccccucgcugacccuagcacaguguuuaaagauggagacgaaguugaggauuucguggagguccaccuccccgacgugcaugaacagguuuccggcguggagcuggggcucccuaacuggggaaaguacguccugaugaucgccggcgcucuuauugcccugaugcucaucaucuuucugaugaccugcugucggagagugaaccgccccgaaagcacccagucuucccugggggagacaggccggaaugugagcguuaccucucaguccggaaaagucauuagcuccugggaaucuuauaagagcggcggggagacaagacuuuga

SEQ ID NO: 223175 - RNA, 1575 nt, Artificial Sequence
  derived and/or modified CDS sequence (opt5) from glycoprotein__RABV__GU565704.1
auggugccccagguccuccuguucgccccucugcuuguuuuuagccugugcuucggcaaguuuccgaucuacaccauucccgacaaacucgggccuuggucccccaucgaucugcaccaucuuucuuguccuaacaaucuggugguggaggacgaaggaugcacaaaccucagcggcuucuccuauauggagcugaaggucggguacauuucugcuaucaaagugaauggauuuacguguaccggcguugugacagaagccgagaccuauacaaacuucgucggguacgugaccacaaccuuuaagagaaaacacuuccggcccacgccugaugcgugccgcgcugccuauaauuggaagauggccggagacccgagauacgaagagagccugcauaaccccuauccugauuaccacuggcuccggaccguuaagacaaccaaagagucccuggugauuaucucucccagcgucacagaccuugauccuuacgacaagucccugcauagccgcguguuucccggcggcaauuguucugggaucaccguguccagcacguauugcucuacaaaccacgauuacaccauuuggaugccggaaaaucucagacugggaacauccugugacaucuucacccacagccggggcaaacgcgcuucuaagggggauaaaaccugcggauuugucgacgagagaggccuuuauaagucccugaagggggccuguaaacucaagcugugcggaguucugggccuccggcugauggauggcacauggguggcuaugcaaacgagcgacgaaaccaaaugguguccucccgggcagcuugugaaccugcaugacuuccgcuccgaugagauugagcaccucgucguggaggaacugguuaagaaaagagaagagugccuugacgcccuggaaucuaucaugacaaccaagagcguguccuuucggcgccucagccaucugagaaaacuggucccuggauucggcaaggcguacacaauuuucaauaagacccucauggaggccgaugcucacuauaaaucugugcagacguggaacgagaucauucccuccaaggggugccugcggguuggagaacgcugucacccccaugugaauggcgucuuuuucaacgggaucauccuuggaagcgacggccacgugcugauuccugagaugcagucuagccuccugcaacagcauauggaacuucuggaguccucugucaucccgcucaugcacccccuggccgauccuagcacaguguuuaaagacggcgaugaaguugaggacuucguggagguccaucugcccgaugugcacaagcagguuuccgggguggaccucggacugccuaaauggggcaaguacguccuuaugauugcuggggcccugaucgcgcucaugcugauuaucuuucugaugaccugcuguagacgggugaauagacccgaaagcacccagucuaaccuuggaggcacagggcgcaacguguccguuaccagccaaucuggcaaggucaucuccagcugggaguccuauaaaucuggaggcgaaacacggcucuga

SEQ ID NO: 223176 - RNA, 1575 nt, Artificial Sequence; identical to SEQ ID NO: 223156
  derived and/or modified CDS sequence (opt5) from glycoprotein__RABV__GU591789.1

SEQ ID NO: 223177 - RNA, 1575 nt, Artificial Sequence; identical to SEQ ID NO: 223156
  derived and/or modified CDS sequence (opt5) from glycoprotein__RABV__GU591791.1

SEQ ID NO: 223178 - RNA, 1575 nt, Artificial Sequence
  derived and/or modified CDS sequence (opt5) from glycoprotein__RABV__GU647092.1
augaucccccaggcccuucucuucgugccucugcuugucguuccgcugugcuuuggcaaguuccccauuuacaccaucccugacaaacucgggcccuggagcccuauugauauccaccaucuguccugucccaacaaucuugugauggaggacgaaggaugcacaaaccugucuggcuuuagcuauauggagcucaaggugggguacauuuccgcuaucaaagucaauggauucacguguaccggcgugguuacagaagccgagaccuauacaaacuuugugggguacgucaccacaaccuucaagagaaaacacuuucggccuacgccggaugcgugccgcucugcuuauaauuggaagauggccggagaccccagauacgaagagagccugcauaacccuuaucccgauuaccacuggcugcggaccgugaagacaaccaaagagccuuucguuaucauuucccccucuguggccgaccucgauccguacgacaagagccugcauucccgcgucuuuccuagaggcaaauguagcggcaucacagugucuuccaccuauugccccacgaaucacgauuacacaauuuggaugccugaaaacccccggagcgggaccucuugugacaucuucacaaauucccgcggaaagagagcuuuuaaaggcagcaagaccugcggguucguggaugagcggggacuuuauaagucucugaaaggcgccuguaagcucaaacugugcgggguccuuggacugcgccucauggacggcaccuggguugcuauucaaacauccgaugaaacgaaguggugucccccugaccagcuggugaaccugcacgacuuucauagcgaugagaucgagcaccucguggucgaggaacuggugaaaaagagagaagagugccuugacgcccuggaauccauuaugaccacaaaaucuguuagcuuccggcgccucucccaucugagaaagcuggugccgggcuucgggaaggcguacaccaucuuuaauaaaacacugauggaggccgaugcucacuauaagagcguccggaccuggaacgagaucauucccucuaaaggaugccuccgcgugggcgggagaugucacccucauguuaauggaguguucuuuaacggcaucauucuggggcccgacggacacguccugaucccugaaaugcaguccagccuccugcagcaacauauggagcuucuggaaucuagcgugauuccccucaugcacccgcuggccgauccuuccacggucuucaagaauggcgacgaggcugaagauuuuguggagguucaucuucccgacgugcacaaacaggucucuggcguggaucuggggcucccuagcuggggaaaguacguucugauguccgccggcauccugacagcgcucaugcugaugaucuuccuuaugaccugcugucggagaaccaaccgccccgagagcauucagcacucucugggggaaacaggacggaagguguccgucaccagccagucuggcagagugaucuccagcugggaguccuauaaaucugggggcgaaacaaagcucuga

SEQ ID NO: 223179 - RNA, 1575 nt, Artificial Sequence
  derived and/or modified CDS sequence (opt5) from glycoprotein__RABV__GU937024.1
auggugccccaggcccuucucuucgucccucugcuuguuuuuagcaugugcuucggcaaguuuccgaucuacaccauucccgacaaacuggggccuuggucccccaucgauauucaccaucucucuuguccuaacaaucuggugguggaggacgaaggaugcacaaaccuuagcggcuucuccuauauggagcugaaggucggguacaucucugcuauuaaagugaauggauuuacguguaccggcguugugacagaagccgagaccuauacaaacuucgucggguacgugaccacaaccuuuaagagaaaacacuuccggcccacgccugaugcgugccgcgcugccuauaauuggaagauggccggagacccgagauacgaagagagccuccauaaccccuauccugauuaccacuggcugcggaccguuaagacaaccaaagagucccuggugaucaucucucccagcgucgcugaccucgauccuuacgacaagucccugcauagccgcguguuucccaauggcaaauguucuggcauuacaaucuccagcaccuauugcccgacgaaccacgauuacacaauuuggcuuccugaaaaucccagacuggggaccucuugugacaucuucacaaacucccggggaaagcgcgccagcaaaggcucuaagaccugcggguuuguggaugagagaggacucuauaagucccugaaaggcgcuuguaagcugaaacugugcgggguccucggacugcggcugauggacggcaccuggguugccaugcaagcgagcgaugaaacaaagugguguccucccgaccagcucgugaaucugcacgacuuccgcuccgaugagauugagcaucuuguggucgaggaacuggugaaaaagagagaagagugccucgacgcccuggaaucuaucaugacgaccaaaagcguuuccuuucggcgccuuagccaccugagaaagcucgugcccggcuucgggaaggcuuacacaauuuucaacaaaacccugauggaggccgaugcucauuauaagucuguccggacauggaaugagaucaucccuuccaaaggaugccugcgcgugggcgggagaugucacccgcacguuaacggaguguuuuucaauggcauuauccucgggcccgacggacauguccugauuccugaaaugcagagcucucuucugcagcaacacauggagcuccuggaaagcuccgugaucccccuuaugcauccucuggccgaucccucuaccgucuuuaaggacggcgaugaggcggaaaacuucguggagguucaccucccggacgugcauaaacagauuagcggcgucgaucuggggcugccuaacuggggaaaguacgugcucguuuccgccggcgugcugaucgcucuuaugcugaucauuuuucucaugacgugcugugggcgggucaauagacccaagagcacacagcacaaccugggaggcaccgggcgcgaggugucugugaccccucaguccggcaaaguuaucagcucuugggaauccuauaagagcggaggcgagacacggcuguga

SEQ ID NO: 223180 - RNA, 1575 nt, Artificial Sequence
  derived and/or modified CDS sequence (opt5) from glycoprotein__RABV__GU937025.1
auggugccccaggcccugcuguucgucccucugcuuguuuuuagcaugugcuucggcaaguuuccgaucuacaccauucccgacaaacuggggccuuggucccccaucgauauucaccaucucucuuguccuaacaaucuggugguggaggacgaaggaugcacaaaccuuagcggcuucuccuauauggagcugaaggucggguacaucucugcuauuaaagugaauggauuuacguguaccggcguugugacagaagccgagaccuauacaaacuucgucggguacgugaccacaaccuuuaagagaaaacacuuccggcccacgccugaugcgugccgcgcugccuauaauuggaagauggccggagacccgagauacgaagagagccuccauaaccccuauccugauuaccacuggcugcggaccguuaagacaaccaaagagucccuggugaucaucucucccagcgucgcugaccucgauccuuacgacaagucccugcauagccgcguguuucccaauggcaaauguucuggcauuacaaucuccagcaccuauugcccgacgaaccacuacuauacaauuuggcuuccugaaaaucccagacaagagaccucuugugauaucuucacaaacucccgggggaagcgcgccagcaaaggaucuaagaccugcggcuuuguggacgaaagagggcuguacaagucccucaaaggagcuuguaagcugaaacuuugcggcguccuggggcuccggcugauggauggaaccuggguugccaugcaggcgagcgacgagacaaagugguguccucccgaucagcuggugaaucuccacgacuuccgcuccgacgagauugaacaucugguggucgaggaacuugugaaaaagagagaggaaugccuggaugcccucgagucuaucaugacgaccaaaagcguuggcuuucggcgccugucccaccuuagaaagcuggugcccggcuuccggaaggcuuauacaauuuucaacaaaacccucauggaggccgacgcucauuacaagagcguccgcacauggaaugaaaucaucccuucuaaagggugccugagagugggaggccggugucacccgcacguuaacgggguguuuuucaauggaauuauccugggccccgaugggcauguccucauuccugagaugcaguccagccugcuucaacagcacaugggacugcucgaaucuagcgugaucccccugaugcauccucuugccgaccccuccaccgucuuuaaggauggcgacgaggcggaaaacuucguggagguucaccucccggaugugcauaaacagauuucuggcgucgaccucgggcugccuaacuggggaaaguaugugcugguuagcgccggcgugcucaucgcucugaugcuuaucauuuuucugaugacgugcugugggagagucaaucgccccaaguccacacagcacaaccucggaggcaccgggcgggaggugagcgugaccccucaaucuggcaaaguuaucuccagcugggaaucuuacaaguccggaggcgagacaagacuguga

SEQ ID NO: 223181 - RNA, 1575 nt, Artificial Sequence
  derived and/or modified CDS sequence (opt5) from glycoprotein__RABV__GU937026.1
auggugccccaggcccuucucuucgucccucugcuuguuuuuagcaugugcuucggcaaguuuccgaucuacaccauucccgacaaacuggggccuuggucccccaucgauauucaccaucucucuuguccuaacaaucuggugguggaggacgaaggaugcacaaaccuuagcggcuucuccuauauggagcugaaggucggguacaucucugcuauuaaagugaauggauuuacguguaccggcguugugacagaagccgagaccuauacaaacuucgucggguacgugaccacaaccuuuaagagaaaacacuuccggcccacgccugaugcgugccgcgcugccuauaauuggaagauggccggagacccgagauacgaagagagccuccauaaccccuauccugauuaccacuggcugcggaccguuaagacaaccaaagagucccuggugaucaucucucccagcgucgcugaccucgauccuuacgacaagucccugcauagccgcguguuucccaauggcaaauguucuggcauuacaaucuccagcaccuauugcccgacgaaccacgauuacacaauuuggcuuccugaaaaucccagacuggggaccucuugugacaucuucacaaacucccggggaaagcgcgccagcaaaggcucuaagaccugcggguuuguggaugagagaggacucuauaagucccugaaaggcgcuuguaagcugaaacugugcgggguccucggacugcggcugauggacggcaccuggguugccaugcaagcgagcgaugaaacaaagugguguccucccgaccagcucgugaaucugcacgacuuccgcuccgaugagauugagcaucuuguggucgaggaacuggugaaaaagagagaagagugccucgacgcccuggaaucuaucaugacgaccaaaagcguuuccuuucggcgccuuagccaccugagaaagcucgugcccggcuucgggaaggcuuacacaauuuucaacaaaacccugauggaggccgaugcucauuauaagucuguccggacauggaaugagaucaucccuuccaaaggaugccugcgcgugggcgggagaugucacccgcacguuaacggaguguuuuucaauggcauuauccucgggcccgacggacauguccugauuccugaaaugcagagcucucuucugcagcaacacauggagcuccuggaaagcuccguggucccccuuaugcauccucuggccgaucccucuaccgugcucaaggacggcgaugaggcggaaaacuuuguugaggugcaucugccggacguccacaaacagaucagcggcguggaucuggggcucccuaacuggggaaaguacguucugguguccgccggcguccuuauugcucugaugcucaucaucuuccugaugacgugcugugggcgggugaauagacccaagagcacacagcacaaccugggaggcaccgggcgcaaagugucuguuaccccucaguccggcaaggucauuagcucuugggaguccuauaaaagcggaggcgaaacacggcuuuga

SEQ ID NO: 223182 - RNA, 1575 nt, Artificial Sequence
  derived and/or modified CDS sequence (opt5) from glycoprotein__RABV__GU937027.1
auggugccccaggcccuucucuucgucccucugcuuguuuuuagcaugugcuucggcaaguuuccgaucuacaccauucccgacaaacuggggccuuggucccccaucgauauucaccaucucucuuguccuaacaaucuggugguggaggacgaaggaugcacaaaccuuagcggcuucuccuauauggagcugaaggucggguacaucucugcuauuaaagugaauggauuuacguguaccggcguugugacagaagccgagaccuauacaaacuucgucggguacgugaccacaaccuuuaagagaaaacacuuccggcccacgccugaugcgugccgcgcugccuauaauuggaagauggccggagacccgagauacgaagagagccuccauaaccccuauccugauuaccacuggcugcggaccguuaagacaaccaaagagucccuggugaucaucucucccagcgucgcugaccucgauccuuacgacaagucccugcauagccgcguguuucccaauggcaaauguucuggcauuacaaucuccagcaccuauugcccgacgaaccacuacuauacaauuuggcuuccugaaaaucccagacuggggaccucuugugauaucuucacaaacucccggggaaagcgcgccagcaaaggcucuaagaccugcggguuuguggacgagagaggacucuacaagucccugaaaggcgcuuguaagcugaaacugugcgggguccucggacugcggcugauggauggcaccuggguugccaugcaagcgagcgacgaaacaaagugguguccucccgaucagcucgugaaucugcacgacuuccgcuccgacgagauugagcaucuuguggucgaggaacuggugaaaaagagagaagagugccucgaugcccuggaaucuaucaugacgaccaaaagcguuuccuuucggcgccuuagccaccugagaaagcucgugcccggcuucgggaaggcuuauacaauuuucaacaaaacccugauggaggccgacgcucauuacaagucuguccggacauggaaugagaucaucccuuccaaaggaugccugcgcgugggcgggagaugucacccgcacguuaacggaguguuuuucaauggcauuauccucgggcccgauggacggguccugauuccugaaaugcagagcucucuucugcagcaacauauggagcuccuggaaagcuccgugaucccccuuaugcacccucuggccgaccccucuaccgucuuuaaggauggcgacgaggcggaaaacuucguggagguucaucucccggaugugcacaaacagauuagcggcgucgaccuggggcugccuaacuggggaaaguaugugcucguuuccgccggcgugcugaucgcucuuaugcugaucauuuuucucaugacgugcugugggagagucaaucgccccaagagcacacagcauaaccugggaggcaccgggcgggaggugucugugaccccucaguccggcaaaguuaucagcucuugggaauccuacaagagcggaggcgagacaagacuguga

SEQ ID NO: 223183 - RNA, 1575 nt, Artificial Sequence
  derived and/or modified CDS sequence (opt5) from glycoprotein__RABV__GU937028.1
auggugccccaggcccugcuguucgucccucugcuuguuuuuagcaugugcuucggcaaguuuccgaucuacaccauucccgacaaacuggggccuuggucccccaucgauauucaccaucucucuuguccuaacaaucuggugguggaggacgaaggaugcacaaaccuuagcggcuucuccuauauggagcugaaggucggguacaucucugcuauuaaagugaauggauuuacguguaccggcguugugacagaagccgagaccuauacaaaccucgucggguacgugaccacaaccuucaagagaaaacacuuucggcccacgccugaugcgugccgcgcugccuauaauuggaagauggccggagacccgagauacgaagagagccugcauaaccccuauccugauuaccacuggcugcggaccguuaagacaaccaaagagucccucgugaucaucucucccagcgucgcugaccuggauccuuacgacaagucccuucauagccgcguguuccccaauggcaaauguucuggcauuacaaucuccagcaccuauugcccgacgaaccacgauuacacaauuuggcugccugaaaaucccagacucgggaccucuugugacaucuuuacaaacucccggggaaagcgcgccagcaaaggcucuaagaccugcggguucguggaugagagaggacuguauaagucccuuaaaggcgcuuguaagcugaaacucugcgggguccugggacugcggcucauggacggcaccuggguugccaugcaagcgagcgaugaaacaaagugguguccucccgaccagcuggugaaucuucacgacuuucgcuccgaugagauugagcaucugguggucgaggaacucgugaaaaagagagaagagugccuggacgcccuugaaucuaucaugacgaccaaaagcguuuccuuccggcgccugagccaccucagaaagcuggugcccggcuuugggaaggcuuacacaauuuucaacaaaacccugauggaggccgaugcucauuauaagucuguccggacauggaaugagaucaucccuuccaaaggaugccuccgcgugggcgggagaugucacccgcacguuaacggaguguucuuuaauggcauuauccuggggcccgacggacauguccuuauuccugaaaugcagagcucucugcuccagcaacacauggagcugcuugaaagcuccgugaucccccugaugcauccucucgccgaucccucuaccgucuucaaggacggcgaugaggcggaaaacuuuguggagguucaccucccggacgugcauaaacagauuagcggcgucgaucuggggcucccuaacuggggaaaguacgugcugguuuccgccggcgugcuuaucgcucugaugcucaucauuuuccugaugacgugcugugggcgggucaauagacccaagagcacacagcacaaccugggaggcaccgggcgcgaggugucugugaccccucaguccggcaaaguuaucagcucucgggaauccuauaagagcggaggcgagacaagacuuuga

SEQ ID NO: 223184 - RNA, 1575 nt, Artificial Sequence
  derived and/or modified CDS sequence (opt5) from glycoprotein__RABV__GU937029.1
auggugccccaggcccugcuguucgucccucugcuuguuuuuagcaugugcuucggcaaguuuccgaucuacaccauucccgacaaacuggggccuuggucccccaucgauauucaccaucucucuuguccuaacaaucuggugguggaggacgaaggaugcacaaaccuuagcggcuucuccuauauggagcugaaggucggguacaucucugcuauuaaagugaauggauuuacguguaccggcguugugacagaagccgagaccuauacaaaccucgucggguacgugaccacaaccuucaagagaaaacacuuucggcccacgccugaugcgugccgcgcugccuauaauuggaagauggccggagacccgagauacgaagagagccugcauaaccccuauccugauuaccacuggcugcggaccguuaagacaaccaaagagucccucgugaucaucucucccagcgucgcugaccuggauccuuacgacaagucccuucauagccgcguguuccccaauggcaaauguucuggcauuacaaucuccagcaccuauugcccgacgaaccacgauuacacaauuuggcugccugaaaaucccagacucgggaccucuugugacaucuuuacaaacucccggggaaagcgcgccagcaaaggcucuaagaccugcggguucguggaugagagaggacuguauaagucccuuaaaggcgcuuguaagcugaaacucugcgggguccugggacugcggcucauggacggcaccuggguugccaugcaagcgagcgaugaaacaaagugguguccucccgaccagcuggugaaucuucacgacuuucgcuccgaugagauugagcaucugguggucgaggaacucgugaaaaagagagaagagugccuggacgcccuugaaucuaucaugacgaccaaaagcguuuccuuccggcgccugagccaccucagaaagcuggugcccggcuuugggaaggcuuacacaauuuucaacaaaacccugauggaggccgaugcucauuauaagucuguccggacaugggacgagaucaucccuuccaaaggaugccuccgcgugggcgggagaugucacccgcacguuaauggaguguucuuuaacggcauuauccuggggcccgauggacauguccuuauuccugaaaugcagagcucucugcuccagcaacacauggagcugcuugaaagcuccgugaucccccugaugcauccucucgccgaccccucuaccgucuucaaggauggcgacgaggcggaaaauuuuguggagguucaccucccggaugugcauaaacagauuagcggcgucgaccuggggcucccuaacuggggaaaguacgugcugguuuccgccggcgugcuuaucgcucugaugcucaucauucugcugaugacgugcugugggcgggucaacagacccaagagcacacagcacaaucuuggaggcaccgggcgcgaggugucugugaccccucaguccggcaaaguuaucagcucuugggaauccuauaagagcggaggcgagacacggcucuga

SEQ ID NO: 223185 - RNA, 1575 nt, Artificial Sequence
  derived and/or modified CDS sequence (opt5) from glycoprotein__RABV__GU937030.1
auggugccccaggcccuucucuucgucccucugcuuguuuuuagcaugugcuucggcaaguuuccgaucuacaccauucccgacaaacuggggccuuggucccccaucgauauucaccaucucucuuguccuaacaaucuggugguggaggacgaaggaugcacaaaccuuagcggcuucuccuauauggagcugaaggucggguacaucucugcuauuaaagugaauggauuuacguguaccggcguugugacagaagccgagaccuauacaaacuucgucggguacgugaccacaaccuuuaagagaaaacacuuccggcccacgccugaugcgugccgcgcugccuauaauuggaagauggccggagacccgagauacgaagagagccuccauaaccccuauccugauuaccacuggcugcggaccguuaagacaaccaaagagucccuggugaucaucucucccagcgucgcugaccucgauccuuacgacaagucccugcauagccgcguguuucccaauggcaaauguucuggcauuacaaucuccagcaccuauugcccgacgaaccacgauuacacaauuuggcuuccugaaaaucccagacuggggaccucuugugacaucuucacaaacucccggggaaagcgcgccagcaaaggcucuaagaccugcggguuuguggaugagagaggacucuauaagucccugaaaggcgcuuguaagcugaaacugugcgggguccucggacugcggcugauggacggcaccuggguugccaugcaagcgagcgaugaaacaaagugguguccucccgaccagcucgugaaucugcacgacuuccgcuccgaugagauugagcaucuuguggucgaggaacuggugaaaaagagagaagagugccucgacgcccuggaaucuaucaugacgaccaaaagcguuuccuuucggcgccuuagccaccugagaaagcccgugccuggcuucgggaaggcuuacacaauuuucaacaaaacccucauggaggccgaugcucauuauaagucuguccggacauggaaugagaucaucccguccaaaggaugccugcgcgugggcgggagaugucacccccacguuaacggaguguuuuucaauggcauuauccuggggccugacggacauguccucauucccgaaaugcagagcucucugcuucagcaacacauggagcugcucgaaagcuccgugaucccucugaugcauccccuugccgauccgucuaccgucuuuaaggacggcgaugaggcggaaaacuucguggagguucaucugccugacgugcacaaacagauuagcggcgucgaucucgggcugcccaacuggggagaguacgugcugguuuccgccggcgugcucaucgcucugaugcuuaucauuuuucugaugacgugcugugggcgggucaauagaccuaagagcacacagcacaaccucggaggcaccgggcgcgaagugucugugacaccccaguccggcaagguuaucagcucuugggaguccuauaaaagcggaggcgaaacccggcuguga

SEQ ID NO: 223186 - RNA, 1575 nt, Artificial Sequence
  derived and/or modified CDS sequence (opt5) from glycoprotein__RABV__GU937031.1
auggugccccaggcccugcuguucgucccucugcuuguuuuuagcaugugcuucggcaaguuuccgaucuacaccauucccgacaaacuggggccuuggucccccaucgauauucaccaucucucuuguccuaacaaucuggugguggaggacgaaggaugcacaaaccuuagcggcuucuccuauauggagcugaaggucggguacaucucugcuauuaaagugaauggauuuacguguaccggcguugugacagaagccgagaccuauacaaacuucgucggguacgugaccacaaccuuuaagagaaaacacuuccggcccacgccugaugcgugccgcgcugccuauaauuggaagauggccggagacccgagauacgaagagagccuccauaaccccuauccugauuaccacuggcugcggaccguuaagacaaccaaagagucccuggugaucaucucucccagcgucgcugaccucgauccuuacgacaagucccugcauagccgcguguuucccaauggcagauguucuggcauuacaaucuccagcaccuauugcccgacgaaccacgauuacacaauuuggcuuccugaaaauccccggcuggggaccucuugugacaucuucacaaacucccgcggaaaaagagccagcaagggcucuaaaaccugcggguuuguggaugagcggggacucuauaagucccugaagggcgcuuguaaacuuaagcugugcgggguccucggacugcgccugauggacggcaccuggguugccaugcaagcgagcgaugaaacaaaaugguguccucccgaccagcucgugaaucugcacgacuucagauccgaugagauugagcaucuuguggucgaggaacuggugaagaaacgggaagagugccucgacgcccuggaaucuaucaugacgaccaagagcguuuccuuucgcagacuuagccaccuccggaaacucgugcccggcuucgggaaggcuuacacaauuuucaacaagacccugauggaggccgaugcucauuauaaaucuguccgcacauggaaugagaucaucccuuccaagggaugccugagagugggcgggcggugucacccgcacguuaacggaguguuuuucaauggcauuauccucgggcccgacggacauguccugauuccugaaaugcagagcucucuucugcagcaacacauggagcuccuggaaagcuccgugaucccccuuaugcauccucuggccgaucccucuaccgucuuuaaagacggcgaugaggcggaaaacuucguggagguucaccucccggacgugcauaagcagauuagcggcgucgaucuggggcugccuaacuggggaaaauacgugcucguuuccgccggcgugcugaucgcucuuaugcugaucauuuuucucaugacgugcugugggagagucaaucgccccaagagcacacagcacaaccugggaggcaccgggcgggaggugucugugaccccucaguccggcaagguuaucagcucuugggaauccuauaaaagcggaggcgagacaagacuguga

SEQ ID NO: 223187 - RNA, 1575 nt, Artificial Sequence
  derived and/or modified CDS sequence (opt5) from glycoprotein__RABV__GU937032.1
auggugccccaggcccugcucuuugucccucugcuugcuuuuagcaugugcuucggcaaguuuccgaucuacaccauucccgacaaacuggggccuuggucccccaucgauauucaccaucucucuuguccuaacaaucugguuguggaggacgaaggaugcacaaaccuuagcggcuucuccuauauggagcugaaggugggguacaucucugccauuaaagucaauggauuuacguguaccggcgugguuacagaagcggagaccuauacaaacuucgugggguacgucaccacaaccuuuaagagaaaacacuuccggcccacgccugaugcuugccgcgccgccuauaauuggaagauggcuggagacccgagauacgaagagagccuccauaaccccuauccugauuaccacuggcugcggaccgugaagacaaccaaagagucccugguuaucaucucucccagcguggccgaccucgauccuuacgacaagucccugcauagccgcgucuuucccaauggcaaauguucuggcauuacaaucuccagcaccuauugcccgacgaaccacgauuacacaauuuggcuuccugaaaaucccagacuggggaccucuugugacaucuucacaaacucccggggaaagcgcgcuagcaaaggcucuaagaccugcggguuuguggaugagagaggacucuauaagucccugaaaggcgccuguaagcugaaacugugcggggugcucggacugcggcugauggacgaaaccugggucgcgaugcaagccagcgaugagacaaagugguguccucccgaccagcucguuaaucugcacgacuuccgcuccgaugagauugaacaucuugugguggaggaacuggucaaaaagagagaggaaugccucgacgcucuggagucuaucaugacgaccaaaagcguguccuuucggcgccuuagccaccugagaaagcucguucccggcuucggcaaggccuacacaauuuucaacaaaacccugauggaggcugaugcccauuauaagucugugcggacauggaaugaaaucaucccuuccaaagggugccugcgcgucggaggcagaugucacccgcacgugaacgggguuuucuucaauggaauuauccucggccccgacgggcaugugcugauuccugagaugcagagcucucuucugcagcaacacauggaacuccuggagagcuccgucaucccccuuaugcauccucuggcggaucccucuaccguguuuaaggacggagaugaagccgagaacuucgucgaggugcaccucccggacguucauaaacagauuagcggcguggaucugggccugccuaacugggggaaguacguccucguguccgcuggaguucugaucgcccuuaugcugaucauuuuucucaugacgugcuguggccgggugaauagacccaagagcacacagcacaaccuugggggaaccggccgcgaagucucugugaccccucaguccgggaaagugaucagcucuugggaguccuauaagagcggcggagaaacacggcuguga

SEQ ID NO: 223188 - RNA, 1575 nt, Artificial Sequence
  derived and/or modified CDS sequence (opt5) from glycoprotein__RABV__GU937033.1
auggugccccaggcccuucucuucgucccucugcuuguuuuuagcaugugcuucggcaaguuuccgaucuacaccauucccgacaaacuggggccuuggucccccaucgauauucaccaucucucuuguccuaacaaucuggugguggaggacgaaggaugcacaaaccuuagcggcuucuccuauauggagcugaaggucggguacaucucugcuauuaaagugaauggauuuacguguaccggcguugugacagaagccgagaccuauacaaacuucgucggguacgugaccacaaccuuuaagagaaaacacuuccggcccacgccugaugcgugccgcgcugccuauaauuggaagauggccggagacccgagauacgaagagagccuccauaaccccuauccugauuaccacuggcugcggaccguuaagacaaccaaagagucccuggugaucaucucucccagcgucgcugaccucgauccuuacgacaagucccugcauagccgcguguuucccaauggcaaauguucuggcauuacaaucuccagcaccuauugcccgacgaaccacgauuacacaauuuggcuuccugaaaaucccagacuggggaccucuugugacaucuucacaaacucccggggaaagcgcgccagcaaaggcucuaagaccugcggguuuguggaugagagaggacucuauaagucccugaaaggcgcuuguaagcugaaacugugcgggguccucggacugcggcugauggacggcaccuggguugccaugcaagcgagcgaugaaacaaagugguguccucccgaccagcucgugaaucugcacgacuuccgcuccgaugagauugagcaucuuguggucgaggaacuggugaaaaagagagaagagugccucgacgcccuggaaucuaucaugacgaccaaaagcguuuccuuucggcgccuuagccaccugagaaagcucgugcccggcuucgggaaggcuuacacaauuuucaacaaaacccugauggaggccgaugcucaucacaagucuguccggacauggaaugagaucaucccuuccaaaggaugccugcgcgugggcgggagaugucacccgcauguuaacggaguguuuuucaauggcauuauccucgggcccgacggacacguccugauuccugaaaugcagagcucucuucugcagcaacauauggagcuccuggaaagcuccguggucccccuuaugcacccucuggccgaucccucuaccgugcucaaggacggcgaugaggcggaaaacuuuguugaggugcaucugccggacguccacaaacagaucagcggcguggaucuggggcucccuaacuggggaaaguauguucugguguccgccggcguccuuauugcucugaugcucaucaucuuccugaugacgugcugugggcgggugaauagacccaagagcacacagcacaaccugggaggcaccgggcgcaaagugucuguuaccccucaguccggcaaggucauuagcucuugggaguccuacaaaagcggaggcgaaacacggcuuuga

SEQ ID NO: 223189 - RNA, 1575 nt, Artificial Sequence
  derived and/or modified CDS sequence (opt5) from glycoprotein__RABV__GU937034.1
auggugccccaggcccuucucuucgucccucugcuuguuuuuagcaugugcuucggcaaguuuccgaucuacaccauucccgacaaacuggggccuuggucccccaucgauauucaccaucucucuuguccuaacaaucuggugguggaggacgaaggaugcacaaaccuuagcggcuucuccuauauggagcugaaggucggguacaucucugcuauuaaagugaauggauuuacguguaccggcguugugacagaagccgagaccuauacaaacuucgucggguacgugaccacaaccuuuaagagaaaacacuuccggcccacgccugauguuugccgcgcggcuuauaauuggaagauggccggagacccgagauacgaagagagccuccauaaccccuauccugauuaccacuggcugcggaccgugaagacaaccaaagagucccuggucaucaucucucccagcguggccgaccucgauccuuacgacaagucccugcauagccgcguguuucccaauggcaaauguucuggcauuacaaucuccagcaccuauugcccgacgaaccacgauuacacaauuuggcuuccugaaaaucccagacuggggaccccuugugacaucuucacaaacucucggggaaagcgcgcuuccaaaggcagcaagaccugcggguuugucgaugagagaggacucuauaagucucugaaaggcgccuguaagcugaaacugugcgggguucucggacugcggcugauggacggcaccuggguggcuaugcaagccuccgaugaaacaaagugguguccucccgaccagcucgugaaucugcacgacuuccgcagcgaugagauugagcaucuugucguggaggaacugguuaaaaagagagaagagugccucgacgcgcuggaauccaucaugacgaccaaaucugugagcuuucggcgccuuucccaccugagaaagcucguccccggcuucgggaaggccuacacaauuuucaacaaaacccugauggaggcugaugcccauuauaagagcgugcggacauggaaugagaucaucccgucuaaaggaugccugcgcguuggcgggagaugucacccccacgugaacggagucuuuuucaauggcauuauccucgggccugacggacaugugcugauucccgaaaugcaguccagccuucugcagcaacacauggagcuccuggaaucuagcgucaucccucuuaugcauccccuggcugauccguccaccguguuuaaggacggcgaugaggccgaaaacuucguugaggugcaccucccugacguccauaaacagauuucuggcguggaucuggggcugcccaacuggggaaaguacguucucgugagcgcgggcguccugaucgcccuuaugcugaucauuuuucucaugacgugcugugggcgggugaaucagccuaaguccacacagcacaaccugggaggcaccgggagagaggugagcguuacaccccaaucuggcaaagucaucuccagcugggaaucuuauaaguccggaggcgagacccgccuguga

SEQ ID NO: 223190 - RNA, 1575 nt, Artificial Sequence
  derived and/or modified CDS sequence (opt5) from glycoprotein__RABV__HE801606.1
auggugccccagguccuccuguucguuccucugcuuguguuuagcaugugcuucggcaaguuuccgaucuacaccauucccgacaaacuggggccuuggucccccaucgauauucaccaucucucuuguccuaacaaucugguggucgaggacgaaggaugcacaaaccuuagcggcuucuccuauauggagcugaaggugggguacaucucugccauuaaaguuaauggauuuacguguaccggcguggucacagaagcugagaccuauacaaacuucgugggguacguuaccacaaccuuuaagagaaaacacuuccggcccacgccugaugccugccgcgcggcuuauaauuggaagcucgccggagacccgagauacgaagagagccugcauaaccccuauccugauuaccacuggcugcggaccgugaagacaaccaaagagucccucgucaucaucucucccagcguggccgaccuggauccuuacgacaagucccuucauagccgcguguuucccucuggcaaaugucugggcauuacaaucuccagcaccuauugcucuacgaaucacgauuacacaauuuggaugccggaaaacccuagacucgggaccuccugugacaucuucacaaauagccggggaaagcgcgcuucuaaaggcuccaagaccugcggguuugucgaugagagaggacuguauaagagccuuaaaggcgccuguaagcugaaacucugcgggguucugggacugcggcucauggacggcaccuggguggcuaugcaaacauccgaugaaacgaaguggugucccccugaccagcuggugaaccuucacgacuuccgcucugaugagauugagcaucuggucguggaggaacucguuaaaaagagagaagagugccuggacgcccuugaaagcaucaugaccacaaaauccgugagcuuucggcgcuucucucaccugagaaagcucguccccggcuucgggaaggcguaccccauuuuuaauaaaacccugauggaggccgaugcucauuauaaguccgugcggacauggaacgagaucaucccuagcaaaggaugccugcgcguuggcgggagaugucacccgcacgugaauggagucuucuuuaacggcauuauccucgggcccgacggacaugugcugauuccugaaaugcagucuagccuucugcagcaacacauggagcuccuggaauccucugucaucccccuuaugcauccucuggccgaucccagcaccguguucaaggacggcgaugaggcugaagacuuuguugaggugcaccucccggauguccauaaacagauuuccggcguggaccuggggcugccuagcuggggaaaguacguucucgugucugccggcguccugguggugcuuaugcugacgaucuucacaaugaccugcugugggcggguucacagacccaaguccacccagcacagccucggaggcacagggcgcaaagucucugugaccucccagagcggcaaggugaucuccucuugggagagcuauaaauccggaggcgaaacacggcuguga

SEQ ID NO: 223191 - RNA, 1575 nt, Artificial Sequence
  derived and/or modified CDS sequence (opt5) from glycoprotein__RABV__HE801607.1
auggugccccagguccacauguucguuccucugcucguguacgccaugugcuuuggcaaguucccgaucuauaccauucccgacaaacuggggccuuggagccccaucgauauucaucaccuuuccuguccuaacaaucugguggucgaggacgaaggaugcacaaaccucucuggcuuuagcuacauggagcugaaggugggguauaucuccgcuauuaaaguuucuggauucacguguaccggcguggucacagaagccgagaccuacacaaauuuugugggguauguuaccacaaccuucaagagaaaacauuuucggcccacgccugaugcgugccgcgcugccuacaacuggaaacuugccggagacccgagauaugaagagagccugcacaaucccuacccugauuaccauuggcuccggaccgugaagacaaccaaagagucccuggucaucaucucucccagcguggcugaccuggauccuuaugacaagucccuccacagccgcguguuccccucuggcaaaugucugggcauuacaaucuccagcaccuacugcucuacgaaccacgauuauacaauuuggaugccggaaaauccuagacuugggaccuccugugacaucuuuacaaacagccggggaaagcgcgccucuaaaggcuccaagaccugcggguucgucgaugagagaggacuguacaagagccucaaaggcgcuuguaagcugaaacuuugcgggguucugggacuccggcugauggacggcaccuggguggccaugcaaacauccgaugaaacgaaguggugucccccugaccagcuggugaaucuccaugacuuucgcucugaugagauugagcaccuggucguggaggaacuuguuaaaaagagagaagagugccuggacgcgcucgaaagcaucaugaccacaaaauccgugagcuuccggcgccugucucaucuuagaaagcugguccccggcuuugggaaggccuauaccauuuucaacaaaacacucauggaggcugaugcccacuacaaguccgugcggaccuggaaugagaucauccccagcaaaggaugccugcgcguuggcgggagaugucacccucaugugaacggagucuucuuuaauggcauuauccuggggccggacggacacgugcucauucccgaaaugcagucuagccugcuucagcaacauauggagcugcucgaauccucugucaucccucugaugcacccccuugcugauccuagcacgguguucaaggacggcgaugaggccgaagacuuuguugaggugcaucugcccgauguccacaaacagauuuccggcguggaccucgggcugccgagcuggggaaaguauguucuggugucugcgggcguccucguggugcugaugcuugccaucuucaucaugacaugcugugggcggguucacagaccuaaguccacccagcauagccugggaggcaccgggcgcaaggcuucugucacaucccagagcggcaaggugauuuccucuugggagagcuacaaauccggaggcgaaacccggcucuga

SEQ ID NO: 223192 - RNA, 1575 nt, Artificial Sequence
  derived and/or modified CDS sequence (opt5) from glycoprotein__RABV__HE801608.1
auggugccccagguccugcuguucguuccucugcuuguguuuagcaugugcuucggcaaguuuccgaucuacaccauucccgacaaacuggggccuuggucccccaucgauauucaccaucucucuuguccuaacaaucugguggucgaggacgaaggaugcacaaaccuuagcggcuucuccuauauggagcugaaggugggguacaucucugccauuaaaguuaauggauuuacguguaccggcguggucacagaagcugagaccuauacaaacuucgugggguacguuaccacaaccuuuaagagaaaacacuuccggcccacgccugaugccugccgcaccgcguauaauuggaagcucgcuggagacccgagauacgaagagagccugcauaaccccuauccugauuaccacuggcugcggacagugaagaccacaaaagagucccucgucaucaucucucccagcguggccgaccuggauccuuacgacaagucccuucauagccgcguguuucccucuggcaaaugucugggcauuaccaucuccagcacguauugcucuacaaaucacgauuacaccauuuggaugccggaaaacccuagacucgggacauccugugacaucuucaccaauagccggggaaagcgcgccucuaaaggcuccaagaccugcggguuugucgaugagagaggacuguauaagagccuuaaaggcgcuuguaagcugaaacucugcgggguucugggacugcggcucauggacggcacauggguggccaugcaaacguccgaugaaaccaaguggugucccccugaccagcuggugaaccuucacgacuuccgcucugaugagauugagcaucuggucguggaggaacucguuaaaaagagagaagagugccuggacgcucuugaaagcaucaugacaaccaaauccgugagcuuucggcgccugucucaccucagaaagcugguccccggcuucgggaaggccuacacaauuuucaauaaaacccugauggaggcggaugcccauuauaaguccgugcggacguggaacgagaucauccccagcaaaggaugccuccgcguuggcgggagaugucacccucacgugaauggagucuuuuucaacggcauuauccuggggccggacggacaugugcuuauucccgaaaugcagucuagccugcuccagcaacacauggagcugcuugaauccucugucaucccucugaugcauccccucgcugauccuagcacaguguuuaaggacggcgaugaggccgaagacuucguugaggugcaccuccccgauguccauaaacagauuuccggcguggaccuggggcucccgagcuggggaaaguacguucuggugucugcuggcguccuuguggugcugaugcucaccaucuuuaucaugaccugcugugggcggguucacagaccuaaguccacacagcacagccugggaggcaccgggcgcaaagucucugugacaucccagagcggcaaggugauuuccucuugggagagcuauaaauccggaggcgaaacgcggcuguga

SEQ ID NO: 223193 - RNA, 1575 nt, Artificial Sequence
  derived and/or modified CDS sequence (opt5) from glycoprotein__RABV__HE801609.1
auggugccccagguccugcuguucguuccucugcuuguguuuagcaugugcuucggcaaguuuccgaucuacaccauucccgacaaacuggggccuuggucccccaucgauauucaccaucucucuuguccuaacaaucugguggucgaggacgaaggaugcacaaaccuuagcggcuucuccuauauggagcugaaggugggguacaucucugccauuaaaguuaauggacucacguguaccggcguggucacagaagcugagaccuauacaaacuuugugggguacguuaccacaaccuucaagagaaaacacuuucggcccacgccugaugccugccgcgcggcuuauaauuggaagcuggccggagacccgagauacgaagagagccugcauaaccccuauccugauuaccacuggcuccggaccgugaagacaaccaaagagucccuggucaucaucucucccagcguggccgaccuugauccuuacgacaagucccugcauagccgcguguuccccucuggcaaaugucucggcauuacaaucuccagcaccuauugcucuacgaaucacgauuacacaauuuggaugccggaaaacccuagacuggggaccuccugugacaucuuuacaaauagccggggaaagcgcgcuucuaaaggcuccaagaccugcggguucgucgaugagagaggacuuuauaagagccugaaaggcgccuguaagcucaaacugugcgggguucugggaccccggcucauggacggcaccuggguggcuaugcaaacauccgaugaaacgaagugguguccucccgaccagcuggugaaccuucacgacuuucgcucugaugagauugagcaucuggucguggaggaacucguuaaaaagagagaagagugccuggacgcccuugaaagcaucaugaccacaaaaucccugagcuuccggcgccucucucaccugagaaagcuggugcccggcuuugggaaggcguacaccauuuucaauaaaacacucauggaggccgaugcucauuauaaguccguccggaccuggaacgagaucaucccuagcaaaggaugccugcgcgugggcgggagaugucacccgcacguuaauggaguguucuuuaacggcauuauccuugggcccgacggacauguccugauuccugaaaugcagucuagccuccugcagcaacacauggagcuucuggaauccucugugaucccccucaugcauccucuggccgaucccagcacggucuucaaggacggcgaugaggcugaagacuuuguggagguucaccucccggaugugcauaaacagauuuccggcgucgaccucgggcugccuagcuggggaaaguacgugcuuguuucugccggcgugcuggucgugcucaugcugacaaucuucaucaugaccugcugugggcgggugcacagacccaaguccacccagcacagccugggaggcauugggcgcaaaguuucugucacaucccagagcggcaaggugaucuccucuugggagagcuauaaauccggaggcgaaacccggcuuuga

SEQ ID NO: 223194 - RNA, 1575 nt, Artificial Sequence
  derived and/or modified CDS sequence (opt5) from glycoprotein__RABV__HE801610.1
auggugccccagguccuccuguucguuccucugcuuguguuuagcaugugcuucggcaaguuuccgaucuacaccauucccgacaaacuggggccuuggucccccaucgauauucaccaucucucuuguccuaacaaucugguggucgaggacgaaggaugcacaaaccuuagcggcuucuccuauauggagcugaaggugggguacaucucugccauuaaaguuaauggauuuacguguaccggcguggucacagaagcugagaccuauacaaacuucgugggguacguuaccacaaccuuuaagagaaaacacuuccggcccacgccugaugccugccgcgcggcuuauaauuggaagcucgccggagacccgagauacgaagagagccugcugaaccccuauccugauuaccauuggcuccggaccgugaagacaaccaaagagucccuggucaucaucucucccagcguggccgaccuugauccuuacgacaagucccugcacagcaaaguguuucccucuggcaagugucucggcauuacaaucuccagcaccuauugcucuacgaaucaugauuacacaauuuggaugccggaaaacccucgccuggggaccuccugugacaucuucacaaauagcagaggaaaacgggcuucuaagggcuccaagaccugcggguuugucgaugagcgcggacuuuauaaaagccugaagggcgccuguaaacucaagcugugcgggguucugggacucagacugauggacggcaccuggguggcuaugcaaacauccgaugaaacgaaauggugucccccugaccagcuugugaaccugcacgacuuccggucugaugagauugagcaccucgucguggaggaacugguuaagaaacgcgaagagugccuugacgcccuggaaagcaucaugaccacaaaguccgugagcuuuagacggcucucucaucugcgcaagcugguccccggcuucgggaaagcguacaccauuuucaauaagacacucauggaggccgaugcucacuauaaauccgugagaaccuggaacgagaucauccccagcaagggaugccugcggguuggcgggcgcugucauccucacgugaauggagucuuuuucaacggcauuauccuugggccggacggacacgugcugauucccgaaaugcagucuagccuccugcagcaacauauggagcuucuggaauccucugucaucccucucaugcacccccuggccgauccuagcacgguguuuaaagacggcgaugaggcugaagacuucguugaggugcaucugcccgauguccacaagcagauuuccggcguggaccucgggcugccgagcuggggaaaguacguucuugugucugccggcguccugguggugcucaugcuggcgaucuuuaucaugacaugcugugggagaguucaucagccuaaauccacccagcacagccugggaggcaccgggcggaaggucucugugacaucccaaagcggcaaagugauuuccucuugggagagcuauaaguccggaggcgaaaccagacuuuga

SEQ ID NO: 223195 - RNA, 1575 nt, Artificial Sequence
  derived and/or modified CDS sequence (opt5) from glycoprotein__RABV__HE801611.1
auggugccccagguccugcuguucguuccucugcuuguguuuagcaugugcuucggcaaguuuccgaucuacaccauucccgacaaacuggggccuuggucccccaucgauauucaccaucucucuuguccuaacaaucugguggucgaggacgaaggaugcacaaaccuuagcggcuucuccuauauggagcugaaggugggguacaucucugccauuaaaguuaauggauuuacguguaccggcguggucacagaagcugagaccuauacaaacuucgugggguacguuaccacaaccuuuaagagaaaacacuuccggcccacgccugaugccugccgcgcggcuuauaauuggaagcucgccggagacccgagauacgaagagagccugcauaaccccuauccugauuaccacuggcugcggaccgugaagacaaccaaagagucccucgucaucaucucucccagcguggccgaccuggauccuuacgacaagucccuucauagccgcguguuucccucuggcaaaugucugggcauuacaaucuccagcaccuauugcucuacgaaucacgauuacacaauuuggaugccggaaaacccuagacucgggaccuccugugacaucuucacaaauagccggggaaagcgcgcuucuaaaggcuccaagaccugcggguuugucgaugagagaggacuguauaagagccuuaaaggcgccuguaagcugaaacucugcgggguucugggacugcggcucauggacggcaccuggguggcuaugcaaacauccgaugaaacgaaguggugucccccugaccagcuggugaaccuucacgacuuccgcucugaugagauugagcaucuggucguggaggaacucguuaaaaagagagaagagugccuggacgcccuugaaagcaucaugaccacaaaauccgugagcuuucggcgccugucucaccucagaaagcugguccccggcuucgggaaggcguacaccauuuucaauaaaacacugauggaggccgaugcucauuauaaguccauccggaccuggaacgagaucauucccagcaaaggaugccuccgcgugggcgggagaugucacccucacguuaauggaguguuuuucaacggcaucauucuggggccggacggacauguccuuauccccgaaaugcagucuagccugcuccagcaacacauggagcugcuugaauccucugugauuccucugaugcauccccucgccgauccuagcacggucuuuaaggacggcgaugaggcugaagacuucguggagguucaccuccccgaugugcauaaacagaucuccggcgucgaccuggggcucccgagcuggggaaaguacgugcugguuucugccggcgugcuugucgugcugaugcucacaaucuuuauuaugaccugcugugggcgggugcacagaccuaaguccaugcagcacagccugggaggcaccgggcgcaaaguuucugucacaucccagagcggcaaggugaucuccucuugggagagcuauaaauccggaggcgaaacccggcuguga

SEQ ID NO: 223196 - RNA, 1575 nt, Artificial Sequence
  derived and/or modified CDS sequence (opt5) from glycoprotein__RABV__HE801612.1
auggugccccagguccugcuguucguuccucugcuuguguuuagcaugugcuucggcaaguuuccgaucuacaccauucccgacaaacuggggccuuggucccccaucgauauucaccaucucucuuguccuaacaaucugguggucgaggacgaaggaugcacaaaccuuagcggcuucuccuauauggagcugaaggugggguacaucucugccauuaaaguuaauggauuuacguguaccggcguggucacagaagcugagaccuauacaaacuucgugggguacguuaccacaaccuuuaagagaaaacacuuccggcccacgccugaugccugccgcgcggcuuauaauuggaagcucgccggagacccgagauacgaagagagccugcauaaccccuauccugauuaccacuggcugcggaccgugaagacaaccaaagagucccucgucaucaucucucccagcguggccgaccuggauccuuacgacaagucccuucauagccgcguguuucccucuggcaaaugucugggcauuacaaucuccagcaccuauugcucuacgaaucacgauuacacaauuuggaugccggaaaacccuagacucgggaccuccugugacaucuucacaaauagccggggaaagcgcgcuucuaaaggcuccaagaccugcggguuugucgaugagagaggacuguauaagagccuuaaaggcgccuguaagcugaaacucugcgggguucugggacugcggcucauggacggcaccuggguggcuaugcaaacauccgaugaaacgaaguggugucccccugaccagcuggugaaccuucacgacuuccgcucugaugagauugagcaucuggucguggaggaacucguuaaaaagagagaagagugccuggacgcccuugaaagcaucaugaccacaaaauccgugagcuuucggcgccugucucaccucagaaagcugguccccggcuucgggaaggcguacaccauuuucaauaaaacacugauggaggccgaugcucauuauaaguccgugcggaccuggaacgagaucauccccagcaaaggaugccuccgcguuggcgggagaugucacccucacgugaauggagucuuuuucaacggcauuauccuggggccggacggacaugugcuuauucccgaaaugcagucuagccugcuccagcaacacauggagcugcuugaauccucugucaucccucugaugcauccccucgccgauccuagcacgguguuuaaggacggcgaugaggcugaagacuucguugaggugcaccuccccgauguccauaaacagauuuccggcguggaccuggggcucccgagcuggggaaaguacguucuggugucugccggcguccuuguggugcugaugcucacaaucuuuaucaugaccugcugugggcggguucacagaccuaaguccacccagcacagccugggaggcacagggcgcaaagucucugugaccucccagagcggcaaggugauuuccucuugggagagcuauaaauccggaggcgaaacacggcuguga

SEQ ID NO: 223197 - RNA, 1575 nt, Artificial Sequence
  derived and/or modified CDS sequence (opt5) from glycoprotein__RABV__HE801613.1
auggugccccagguccugcuguucguuccucugcuuguguuuagcaugugcuucggcaaguuuccgaucuacaccauucccgacaaacuggggccuuggucccccaucgauauucaccaucucucuuguccuaacaaucugguggucgaggacgaaggaugcacaaaccuuagcggcuucuccuauauggagcugaaggugggguacaucucugccauuaaaguuaauggauuuacguguaccggcguggucacagaagcugagaccuauacaaacuucgugggguacguuaccacaaccuuuaagagaaaacacuuccggcccacgccugaugccugccgcgcggcuuauaauuggaagcucgccggagacccgagauacgaagagagccugcauaaccccuauccugauuaccacuggcugcggaccgugaagacaaccaaagagucccucgucaucaucucucccagcguggccgaccuggauccuuacgacaagucccuucauagcaaaguguuucccucuggcaagugucugggcauuacaaucuccagcaccuauugcucuacgaaucacgauuacacaauuuggaugccggaaaacccucgccucgggaccuccugugacaucuucacaaauagcagaggaaaacgggcuucuaagggcuccaagaccugcggguuugucgaugagcgcggacuguauaaaagccuuaagggcgccuguaaacugaagcucugcgggguucugggacugagacucauggacggcaccuggguggcuaugcaaacauccgaugaaacgaaauggugucccccugaccagcuggugaaccuucacgacuuccggucugaugagauugagcaucuggucguggaggaacucguuaagaaacgcgaagagugccuggacgcccuugaaagcaucaugaccacaaaguccgugagcuuuagacggcugucucaccuccgcaagcugguccccggcuucgggaaagcguacaccauuuucaauaagacacugauggaggccgaugcucauuauaaauccgugagaaccuggaacgagaucauccccagcaagggaugccuccggguuggcgggcgcugucacccucacgugaauggagucuuuuucaacggcauuauccuggggccggacggacaugugcuuauucccgaaaugcagucuagccugcuccagcaacacauggagcugcuugaauccucugucaucccucugaugcauccccucgccgauccuagcacgguguuuaaagacggcgaugaggcugaagacuucguugaggugcaccuccccgauguccauaagcagauuuccggcguggaccuggggcucccgagcuggggaaaguacguucuggugucugccggcguccuuguggugcugaugcucgcgaucuuuaucaugacaugcugugggagaguucaccagccuaaauccacccagcacagccugggaggcaccgggcggaaggucucugugacaucccaaagcggcaaagugauuuccucuugggagagcuauaaguccggaggcgaaaccagacuguga

SEQ ID NO: 223198 - RNA, 1575 nt, Artificial Sequence
  derived and/or modified CDS sequence (opt5) from glycoprotein__RABV__HE801614.1
auggugccccagguccuucucuucguuccucugcuuguguuuagcaugugcuucggcaaguuuccgaucuacaccauucccgacaaacuggggccuuggucccccaucgauauucaccaucucucuuguccuaacaaucugguggucgaggacgaaggaugcacaaaccuuagcggcuucuccuauauggagcugaaggugggguacaucucugccauuaaaguuaauggauuuacguguaccggcguggucacagaagcugagaccuauacaaacuucgugggguacguuaccacaaccuuuaagagaaaacacuuccggcccacgccugaugccugccgcgcggcuuauaauuggaagauggccggagacccgagauacgaagagagccuccauaaccccuauccugauuaccacuggcugcggaccgugaagacaaccaaagagucccuggucaucaucucucccagcguggccgaccucgauccuuacgacaagucccugcauagccgcguguuucccucuggcaaaugucuuggcauuacaaucuccagcaccuauugcucuacgaaucacgauuacacaauuuggaugccggaaaacccuagacuggggaccuccugugacaucuucacaaauagccggggaaagcgcgcuucuaaaggcuccaagaccugcggguuugucgaugagagaggacucuauaagagccugaaaggcgccuguaagcugaaacugugcgggguucucggacugcggcugauggacggcaccuggguggcuaugcaaacauccgaugaaacgaaguggugucccccugaccagcucgugaaccugcacgacuuccgcucugaugagauugagcaucuugucguggaggaacugguuaaaaagagagaagagugccucgacgcccuggaaagcaucaugaccacaaaauccgugagcuuucggcgccuuucucaccugagaaagcucguccccggcuucgggaaggcguacaccauuuucaauaaaacacugauggaggccgaugcucauuauaaguccgugcggaccuggaacgagaucauccccagcaaaggaugccugcgcguuggcgggagaugucacccucacgugaauggagucuuuuucaacggcauuauccucgggccggacggacaugugcugauucccgaaaugcagucuagccuucugcagcaacacauggagcuccuggaauccucugucaucccucuuaugcauccccuggccgauccuagcacgguguuuaaggacggcgaugaggcugaagacuucguugaggugcaccuccccgauguccauaaacagauuuccggcguggaccuggggcugccgagcuggggaaaguacguucucgugucugccggcguccugguggugcuuaugcugacaaucuuuaucaugaccugcugugggcggguuagacgcccuaaguccacccagcacagccucggaggcacagggcggaaagucucugugaccucccagagcggcaaggugauuuccucuugggagagcuauaaauccggaggcgaaacaagacuguga

SEQ ID NO: 223199 - RNA, 1575 nt, Artificial Sequence
  derived and/or modified CDS sequence (opt5) from glycoprotein__RABV__HE801615.1
auggugccccagguccuccuguucguuccucugcuuguguuuagcaugugcuucggcaaguuuccgaucuacaccauucccgacaaacuggggccuuggucccccaucgauauucaccaucucucuuguccuaacaaucugguggucgaggacgaaggaugcacaaaccuuagcggcuucuccuauauggagcugaaggugggguacaucucugccauuaaaguuaauggauuuacguguaccggcguggucacagaagcugagaccuauacaaacuucgugggguacguuaccacaaccuuuaagagaaaacacuuccggcccacgccugaugccugccgcaccgcguauaauuggaagcucgcuggagacccgagauacgaagagagccugcauaaccccuauccugauuaccacuggcugcggacagugaagaccacaaaagagucccucgucaucaucucucccagcguggccgaccuggauccuuacgacaagucccuucauagccgcguguuucccucuggcaaaugucugggcauuaccaucuccagcacguauugcucuacaaaucacgauuacaccauuuggaugccggaaaacccuagacucgggacauccugugacaucuucaccaauagccggggaaagcgcgccucuaaaggcuccaagaccugcggguuugucgaugagagaggacuguauaagagccuuaaaggcgcuuguaagcugaaacucugcgggguucugggacugcggcucauggacggcacauggguggccaugcaaacguccgaugaaaccaaguggugucccccugaccagcuggugaaccuucacgacuuccgcucugaugagauugagcaucuggucguggaggaacucguuaaaaagagagaagagugccuggacgcucuugaaagcaucaugacaaccaaauccgugagcuuucggcgccugucucaccucagaaagcugguccccggcuucgggaaggccuacacaauuuucaauaaaacccugauggaggcggaugcccauuauaaguccgugcggacguggaacgagaucauccccagcaaaggaugccuccgcguuggcgggagaugucaccaccaugugaauggagucuuuuucaacggcauuauccuggggccugacggacacgugcuuauuccggaaaugcagucuagccugcuccagcaacauauggagcugcuugaauccucugucaucccccugaugcacccucucgcugaucccagcacaguguuuaaggacggcgaugaggccgaagacuucguugaggugcaucugccugauguccacaaacagauuuccggcguggaccuggggcuccccagcuggggaaaguacguucuggugucugcuggcguccuuguggugcugaugcucaccaucuuuaucaugaccugcugugggcggguucacagaccgaaguccacacagcauagccugggaggcaccgggcgcaaagucucugugacaucccagagcggcaaggugauuuccucuugggagagcuauaaauccggaggcgaaacgcggcuguga

SEQ ID NO: 223200 - RNA, 1575 nt, Artificial Sequence
  derived and/or modified CDS sequence (opt5) from glycoprotein__RABV__HE801616.1
auggugccccagguccuucucuucguuccucugcuuguguuuagcaugugcuucggcaaguuuccgaucuacaccauucccgacaaacuggggccuuggucccccaucgauauucaccaucucucuuguccuaacaaucugguggucgaggacgaaggaugcacaaaccuuagcggcuucuccuauauggagcugaaggugggguacaucucugccauuaaaguuaauggauuuacguguaccggcguggucacagaagcugagaccuauacaaacuucgugggguacguuaccacaaccuuuaagagaaaacacuuccggcccacgccugaugccugccgcgcggcuuauaauuggaagauggccggagacccgagauacgaagagagccuccauaaccccuauccugauuaccacuggcugcggaccgugaagacaaccaaagagucccuggucaucaucucucccagcguggccgaccucgauccuuacgacaagucccugcauagccgcguguuucccucuggcaaaugucuuggcauuacaaucuccagcaccuauugcucuacgaaucacgauuacacaauuuggaugccggaaaacccuagacuggggaccuccugugacaucuucacaaauagccggggaaagcgcgcuucuaaaggcuccaagaccugcggguuugucgaugagagaggacucuauaagagccugaaaggcgccuguaagcugaaacugugcgggguucucggacugcggcugauggacggcaccuggguggcuaugcaaacauccgaugaaacgaaguggugucccccugaccagcucgugaaccugcacgacuuccgcucugaugagauugagcaucuugucguggaggaacugguuaaaaagagagaagagugccucgacgcccuggaacccaucaugaccacaaaaagcguguccuuucggcgccuuagccaccugagaaagcucguccccggcuucgggaaggcguacaccauuuucaauaaaacacugauggaggccgaugcucauuauaagucugugcggaccuggaacgagaucaucccuuccaaaggaugccugcgcguuggcgggagaugucacccgcacgugaauggagucuuuuucaacggcauuauccucgggcccgacggacaugugcugauuccugaaaugcagagcucucuucugcagcaacacauggagcuccuggaaagcuccgucaucccccuuaugcauccucuggccgaucccucuacgguguuuaaggacggcgaugaggcugaagacuucguugaggugcaccucccggauguccauaaacagauuagcggcguggaccuggggcugccuuccuggggaaaguacguucucgugagcgccggcguccugguggugcuuaugcugacaaucuuuaucaugaccugcugugggcggguuagacgccccaagucuacccagcacucccucggaggcacagggcggaaagucagcgugaccucucaguccggcaaggugauuagcuccugggagucuuauaaaagcggaggcgaaacaagacuguga

SEQ ID NO: 223201 - RNA, 1575 nt, Artificial Sequence
  derived and/or modified CDS sequence (opt5) from glycoprotein__RABV__HE801617.1
auggugccccagguccuucucuucguuccucugcuuguguuuagcaugugcuucggcaaguuuccgaucuacaccauucccgacaaacuggggccuuggucccccaucgauauucaccaucucucuuguccuaacaaucugguggucgaggacgaaggaugcacaaaccuuagcggcuucuccuauauggagcugaaggugggguacaucucugccauuaaaguuaauggauuuacguguaccggcguggucacagaagcugagaccuauacaaacuucgugggguacguuaccacaaccuuuaagagaaaacacuuccggcccacgccugaugccugccgcgcggcuuauaauuggaagauggccggagacccgagauacgaagagagccuccauaaccccuauccugauuaccacuggcugcggaccgugaagacaaccaaagagucccuggucaucaucucucccagcguggccgaccucgauccuuacgacaagucccugcauagccgcguguuucccucuggcaaaugucuuggcauuacaaucuccagcaccuauugcucuacgaaucacgauuacacaauuuggaugccggaaaacccuagacuggggaccuccugugacaucuucgcuaauagccggggaaagcgcgccucuaaaggcuccaagacaugcggguuugucgaugagagaggacucuauaagagccugaaaggcgcuuguaagcugaaacugugcgggguucucggacugcggcugauggacggcaccuggguggccaugcaaaccuccgaugaaacaaaguggugucccccugaccagcucgugaaccugcacgacuuccgcucugaugagauugagcaucuugucguggaggaacugguuaaaaagagagaagagugccucgacgcgcuggaaagcaucaugacgaccaaauccgugagcuuucggcgccuuucucaccugagaaagcucguccccggcuucgggaaggccuacacaauuuucaauaaaacccugauggaggcugaugcccauuauaaguccgugcggacauggaacgagaucauccccagcaaaggaugccugcgcguuggcgggagaugucacccucacgugaauggagucuuuuucaacggcauuauccucgggccggacggacaugugcugauucccgaaaugcagucuagccuucugcagcaacacauggagcuccuggaauccucugucaucccucuuaugcauccccuggcugauccuagcaccguguuuaaggacggcgaugaggccgaagacuucguugaggugcaccuccccgauguccauaaacagauuuccggcguggaccuggggcugccgagcuggggaaaguacguucucgugucugcgggcguccugguggugcuuaugcugacgaucuuuaucauuacaugcugugggcggguucacagaccuaaguccauccagcacagccucggaggcaccgggcgcaaagucucugugaccucccagagcggcaaggugauuuccucuugggagagcuauaaauccggaggcgaaacacggcuguga

SEQ ID NO: 223202 - RNA, 1575 nt, Artificial Sequence
  derived and/or modified CDS sequence (opt5) from glycoprotein__RABV__HE802675.1
auggugccccagguccugcuguucguuccucugcuuguguuuagcaugugcuucggcaaguuuccgaucuacaccauucccgacaaacuggggccuuggucccccaucgauauucaccaucucucuuguccuaacaaucugguggucgaggacgaaggaugcacaaaccuuagcggcuucuccuauauggagcugaaggugggguacaucucugccauuaaaguuaauggauuuacguguaccggcguggucacagaagcugagaccuauacaaacuucgugggguacguuaccacaaccuuuaagagaaaacacuuccggcccacgccugaugccugccgcgcggcuuauaauuggaagauggccggagacccgagauacgaagagagccuccauaaccccuauccugauuaccacuggcugcggaccgugaagacaaccaaagagucccuggucaucaucucucccagcguggccgaccucgauccuuacgacaagucccugcauagccgcguguuucccucuggcaaauguuccggcauuacaaucagcucuaccuauugcuccacgaaucacgauuacacaauuuggaugccggaaaacccuagacuugggaccagcugugacaucuucacaaauucucggggaaagcgcgcuuccaaaggcgggaagaccugcggauuugucgaugagagaggccuguauaagagccucaaaggggccuguaagcugaaacuuugcggaguucugggccuccggcugauggacggcaccuggguggcuaugcaaacauccgaugaaacgaaguggugucccccugaccagcuggugaaccuccacgacuuccgcucugaugagauugagcaucuggucguggaggaacuuguuaaaaagagagaagagugccuggacgcccucgaaagcaucaugaccacaaaauccgugagcuuucggcgccugucucaccuuagaaagcugguccccggguucggaaaggcguacaccauuuucaauaaaacacucauggaggccgaugcucauuauaaguccgugcggaccuggaacgagaucauccccagcaaaggcugccugcgcguugggggaagaugucacccucacgugaagggcgucuuuuucaaugggauuauccugggaccggacggccaugugcucauucccgaaaugcagucuagccugcuucagcaacacauggagcugcucgaauccucugucaucccucugaugcauccccuugccgauccuagcacgguguuuaaagacggcgaugaggcugaagacuucguugaggugcaucugcccgauguccacaagcagauuuccgggguggaccucggacugccgagcuggggcaaguacguucuggugucugccgggguccucguggugcugaugcuuacaaucuuuaucauuaccugcuguggacggauccacagaccuaaauccacccagcacggccucgggggcacaggacgcaagguuagcgucaccucucaguccggcaaagugauuagcuccugggagucuuauaagagcgggggagaaacacggcucuga

SEQ ID NO: 223203 - RNA, 1575 nt, Artificial Sequence
  derived and/or modified CDS sequence (opt5) from glycoprotein__RABV__HM535790.1
auggugccccagguccuccuguucguucugcuucugggcuuuagccucugcuucgggaaguuuccuaucuacaccauuccggacgagcugggacccugguccccuaucgauauucaccaucuuucuugucccaacaaucuggugguggaagacgagggcugcacaaaccucagcgaguucuccuauauggagcugaaagucggguacaucucugccauuaaggugaauggauuuacguguaccggcguugugacagaagcugagaccuauacaaacuucgucggguacgugaccacaaccuuuaaaagaaagcacuuccggccuacgcccgaugccugccgcgcggcuuauaauuggaaaauggccggagacccuagauacgaggaaagccugcauaacccguaucccgauuaccacuggcuccggaccguucgcacaaccaaggagucccugaucaucauuucuccuagcgugacagaccuugaucccuacgacaagucccugcauagcagagucuuuccuggcggcaaauguucugggaucaccguguccagcacguauugcucuacaaaucacgauuacaccauuuggaugcccgaaaacccgcggccucgcacacccugugacaucuucaccaauuccagaggaaagcgggccagcaacggcaauaaaaccugcggguuuguggaugagcgcggacucuauaagucucugaaaggcgcuuguagacuuaagcugugcgggguccucggacugcggcugauggacggcacauggguugccaugcaaacguccgaugagaccaagugguguccucccgaccagcucgugaaccugcacgacuuccgcagcgaugaaauugagcaucuuguggucgaagaacuggugaaaaagagagaagagugccucgacgcucuggaguccaucaugacaaccaaaucuguuagcuuucggcgccuuucccaccugagaaagcucgugcccggcuucgggaaagccuacacaauuuucaauaagacccugauggaagcggaugcccauuauaaaagcguccggacguggaacgagaucaucccuucuaagggaugccugaaggugggcgggagaugucacccgcacguuaauggaguguuuuucaacggcauuauccucgggcccgacgaucauguccugauuccugaaaugcaguccagccuucugcagcaacacauggagcuccuggaaucuagcgugaucccccuuaugcauccucuggcugaccccuccacagucuuuaaagagggagaugaggccgaagacuucguggagguucaccucccggauguguacaagcagauuucuggcgucgaccugggccugccuaacugggggaaauaugugcucaugaccgcuggagccaugaucggccugguucuuaucuuuagccugaugaccuggugccgccgggcgaauagacccgaauccaagcagcgcagcuucgggggaacaggcgggaacgugucugucaccucccagagcggcaaagugauuccuucuugggaguccuacaagagcggaggcgaaauccggcucuga

SEQ ID NO: 223204 - RNA, 1575 nt, Artificial Sequence; identical to SEQ ID NO: 223100
  derived and/or modified CDS sequence (opt5) from glycoprotein__RABV__HQ166186.1

SEQ ID NO: 223205 - RNA, 1575 nt, Artificial Sequence
  derived and/or modified CDS sequence (opt5) from glycoprotein__RABV__HQ232301.1
augaucccccaggcccuucucuucgugccuuuucuggucuucccgcuuugcuuuggcaaguuccccauuuacaccaucccugacaaacuggggcccuggagcccuauugauauccaccaucucuccugucccaacaaucugguuguggaggacgaaggaugcacaaaccuuucuggcuuuagcuauauggagcugaaggugggguacauuuccgcuaucaaagucaauggauucacguguaccggcgugguuacagaagccgagaccuauacaaacuuugugggguacgucaccacaaccuucaagagaaaacacuuucggccuacgccggaugcgugccgcgcugccuauaauuggaagauggccggagaccccagauacgaagagucucuccauaacccuuaucccgauuaccacuggcugcggaccgugaagacaaccaaagagagccugguuaucauuuccccuucugugagcgaccucgaucccuacgacaagucccugcauagccgcgucuucccgucuggcaaauguuccggcaucacagugagcucuaccuauugcccuacgucccacgauuacacaauuuggaugcccgaaaauccuagacuugggaccagcugugacaucuuuauuaacucucggggaaagcgcgcuuccaaaggcagcaagacaugcggguucguggaugagagaggacuguauaagucccucaaaggcgccuguaagcugaaacuuugcgggguccugggacuccggcugauggacggcaccugggcugccauccaaaccucugaugaagcgaagugguguccucccgaccagcugguuaauauucacgacuuucauagcgaugagaucgagcaccucgugguggaggaacuggucaaaaagcgcgaagagugccuugacgcccuggaauccaucaugacaacgaaaagcgugucuuucagacggcucucccaucugcgcaagcugguucccggcuucgggaaggcuuacaccauuuuuaacaaaacacugauggaggccgaugcucacuauaagagcgugagaaccuggaaugagaucauuccgucuaaaggaugccuccgggucggcgggcgcugucacccccaugugaacggaguuuucuuuaauggcaucauucuggggccugacggacacgugcugauccccgaaaugcagagcucccuccugcagcaacauauggagcuucuggaaucuagcgucaucccucucaugcacccccuggccgauccguccacaguguucaaggacggcgaugaggcggaagacuuugucgaggugcaucuuccugauguucacaaacaggugagcggcgucgaccuggggcuccccucuuggggaaaguacgugcugauguccguuggcgcccugauugcucucaugcugaugaucuuccuuaugaccugcuguagaaaggccaacgggguggagagcaugcagcaccggcugggagaaacgggcagaaaagucucugugacaucccagagcgggcgcgugauuuccucuugggagagcuauaaguccggcggagaaaccaaacucuga

SEQ ID NO: 223206 - RNA, 1575 nt, Artificial Sequence
  derived and/or modified CDS sequence (opt5) from glycoprotein__RABV__HQ266618.1
auggugccccaggcccuccuguucgucccucugcuuguuuuuagccugugcuucggcaaguuuccgaucuacaccauucccgacaaacucgggccuuggucccccaucgauauucaccaucugucuuguccuaacaaucuugugguggaggacgaaggaugcacaaaccugagcggcuucuccuauauggagcucaaggucggguacaucucugcuauuaaagugaauggauuuacguguaccggcguugugacagaagccgagaccuauacaaacuucgucggguacgugaccacaaccuuuaagagaaaacacuuccggccccugccugaugcgugccgcgcugccuauaauuggaagauggccggagacccgagauacgaagagagccugcauaaccccuauccugauuaccacuggcuccggacgguuaagaccacaaaagagucccuggugaucaucucucccagcgucgcugaccuugauccuuacgacaagucccugcauagccgcguguuucccucuggcaaauguuccggcauuaccgugagcucuacauucugcuccaccaaucacgauuauacgaucuggaugccggaaaacccuagacucgggacaagcugugacauuuuugccaauucucggggaaagcgcgcuuccaaaggcgggaagaccugcggauucgucgaugagagaggccuguacaagagccuuaaaggggccuguaagcugaaacucugcggaguucugggccugcggcucauggacggcacauggguggcgaugcaaaccuccgaugaaaccaaguggugucccccugaccagcuggugaacaugcacgacuuucgcucugaugagaucgagcaucuugucguggaggaacugguuaaaaagagagaagagugccucgacgcccuggaaagcauuaugacaacgaaauccgugagcuuccggcgccuuucucaccugagaaagcucguccccggguucggaaaggcuuauaccaucuuuaauaaaacacugauggaggccgaugcucauuacaaguccgugcggaccuggaacgagauuauccccagcaaaggcugccugcgcguugggggaagaugucacccucacgugaauggcgucuucuuuaacgggaucauucucggaccggacggccaugugcugauccccgaaaugcagucuagccuucugcagcaacacauggagcuccuggaauccucugucauuccucuuaugcauccccuggccgauccuagcacaguguucaaggacggcgaugaggcggaagacuuuguugaggugcaccuccccgauguccauaaacagguguccgggguugaccugggacugccgaauuggggcaaguaugugcuccugagcgccgggacccuuaucgcucugaugcucauuaucuuccugaugacgugcuguaagcgggucaaccagccugagucuacaaaaagaucccugggaggcaccgggcgcaaggugagcgugaccucucaguccggcaaaguuaucagcuccugggaaucuuacaagagcggaggcgagacacggcuuuga

SEQ ID NO: 223207 - RNA, 1575 nt, Artificial Sequence
  derived and/or modified CDS sequence (opt5) from glycoprotein__RABV__HQ266620.1
auggugccccaggcccugcuguuccugccucuucuggucuuuccgcucugcuucggcagauuucccaucuacaccauuccugacaagcuggggcccuggagcccuaucgauauucaccaucuuuccugucccaacaaucugguuguggaggacgaaggaugcacaaaccucucuggcuucagcuauauggagcugaaagugggguacaucuccgcuauuaaggucaauggauuuacguguaccggcgugguuacagaagccgagaccuauacaaacuucgugggguacgucaccacaaccuuuaaacggaagcacuuccgcccuaucccggaugcgugcagagcugccuauaauuggaaaauggccggagacccccgguacgaagagucucugcauaacccuuaucccgauuaccacuggcuccgcacggugaagaccacaaaggagagccugguuaucauuuccccuucuguggcugaccuugaucccuacgacaaaagccugcauuccagagucuuuccgagcggcaaguguucuggcaucaccguguccagcacauucugcucuaccaaucacgauuauacgauuuggaugccugaaaacccccggcucgggacauccugugacaucuuugccaauagccgcggaaaaagagcuucuaagggcgggaaaaccugcggauucguggaugagcggggccuguacaagucccuuaagggggccuguaaacugaagcucugcggaguccugggccugcgccucauggacggcacauggguugcgaugcaaaccagcgaugaaaccaaaugguguccucccgaccagcuggugaacauucacgacuuuagauccgaugagaucgagcaucuuguggucgaggaacuggugaagaaacgggaagagugccucgacgcccuggaaucuauuaugacaaccaagagcguuuccuuccgcagacuuagccaccuccggaaacucgugcccggguucggaaaggcuuauacgaucuuuaauaagacacugauggaggccgaugcucauuacaaaucuguccgcaccuggaacgagaucauuccuuccaagggcugccugagaguugggggacggugucacccgcacgugaauggcguguucuuuaacgggaucauucucggacccgacggccauguccugaucccugaaaugcagagcucucuucugcagcaacacauggagcuccuggaaagcuccgugauuccccuuaugcauccucuggccgaucccucuacagucuucaaagacggcgaugaggcggaagacuuuguggagguucaccucccggaugugcauaagcaggucagcgggguggaccugggacugccuaauuggggcaaauauauccuccuguccgccgggacccuuaucgcucugaugcucauuaucuuccugaugacgugcuguagacgcguuaaccggcccgagagcacagaaagaucucugggaggcaccgggcgcaagguguccgucaccagccagucuggcaaggugauuuccagcugggaguccuacaaaucuggaggcgaaacacggcuuuga

SEQ ID NO: 223208 - RNA, 1575 nt, Artificial Sequence
  derived and/or modified CDS sequence (opt5) from glycoprotein__RABV__HQ266621.1
auggugccccaggcccuucucuucgucccucugcuuggcuuuagccugugcuucgggaaguuuccgaucuacaccauucccgacaaacucggaccuuggucccccaucgauauucaccaucugucuuguccuaacaaucuuguuguggaggacgaaggcugcacaaaccugagcggguucuccuauauggagcucaaggugggauacaucucugcuauuaaagucaauggcuuuacguguaccggggugguuacagaagccgagaccuauacaaacuucgugggauacgucaccacaaccuuuaagagaaaacacuuccggcccaucccugaugcgugccgcgcugccuauaauuggaagguggccggcgacccgagauacgaagagagccugcauaaccccuauccugauuaccacuggcugcggacgguuaagaccacaaaagagucccucgugaucauuucucccagcgucgcugaccuggauccuuacgacaagucccuucauagccgcguguuucccucuggcaaauguuccgggaucaccgugagcucuacauauugcuccaccaaucacgauuacacgauuuggaugccggaaaacccuagacugggaacaagcugugacaucuucgccaauucucggggcaagcgcgcuuccaaagggggaaagaccugcggcuuugucgaugagagagggcucuauaagagccugaaaggagccuguaagcugaaacugugcggcguucucggccugcggcugauggacgggacauggguggcgaugcaaaccuccgaugaaaccaaguggugucccccugaccagcucgugaacaugcacgacuuccgcucugaugagauugagcaucuggucguggaggaacuuguuaaaaagagagaagagugccuggacgcccucgaaagcaucaugacaacgaaauccgugagcuuucggcgccugucucaccuuagaaagcugguccccggauucggcaaggcuuacaccauuuucaauaaaacacucauggaggccgaugcucauuauaaguccgugcggaccuggaacgagaucauccccagcaaagggugccugcgcguuggaggcagaugucacccucacgugaauggggucuuuuucaacggaauuauccugggcccggacggccaugugcucauucccgaaaugcagucuagccugcuucagcaacacauggagcugcucgaauccucugucaucccucugaugcauccccuugccgauccuagcacaguguuuaaggacggggaugaggcggaagacuucguugaggugcaucugcccgauguccacaaacagguguccggaguugaccucggccugccgaauugggggaaguacgugcugcucagcgccggaacccugauugcucuuaugcugaucaucuuucucaugacgugcugucggagagucaaccgcccugagucuacacagcggucccugggcgggaccggcagaaaggugagcgugaccucucaguccggaaaaguuauuagcuccugggaaucuuauaagagcggcggggagacacgccuguga

SEQ ID NO: 223209 - RNA, 1575 nt, Artificial Sequence
  derived and/or modified CDS sequence (opt5) from glycoprotein__RABV__HQ266622.1
auggugccccaggcccugcucuuuaucccucugcuuggcuuuagccugugcuucgggaaguuuccgauuuacaccauccccgacaaacucggaccuuggucccccauugauauccaccaucugucuuguccuaacaaucuugucguugaggacgaaggcugcacaaaccugagcggguucuccuauauggagcucaaggugggauacauuucugcuaucagagugacgggcuuuaccuguacaggggucgugaccgaagccgagacauauaccaauuucguuggauacgugacaaccacguuuaaacggaagcacuuccgccccaccccugaugcgugcagagcugccuauaacuggaaaauggccggcgacccgcgguacgaagagagccugcauaaucccuauccugauuaccacuggcugcgcacagucaagaccacaaaggagucccucgugaucauuucucccagcguugcugaccuggauccuuacgacaaaucccuucauagcagaguguuucccucuggcaaguguuccgggaucaccgucagcucuacguauugcuccacaaaccacgauuacaccauuuggaugccggaaaauccucggcugggaacaagcugugacaucuucgccaacucucgcggcaaaagagcuuccaaagggggaaagaccugcggcuuuguggaugagcgggggcucuauaagagccugaagggagccuguaaacuuaagcugugcggcgugcucggccugcgccugauggacgggaccugggucgcgaugcaaacauccgaugaaacgaaauggugucccccugaccagcucguuaauaugcacgacuucagaucugaugagauugagcaucuggugguggaggaacuugucaagaaacgggaagagugccuggacgcccucgaaagcaucaugaccacaaaguccgugagcuuucgcagacugucucaccuucggaaacugguucccggauucggcaaggcuuacaccauuuucaacaagacacucauggaggccgaugcucauuauaaauccgugcgcaccuggaaugagaucauccccagcaaggggugccugagagucggaggccggugucacccucacgugaacgggguuuucuucaauggaauuauccugggcccggacggccaugugcucauucccgaaaugcagucuagccugcuucagcaacacauggagcugcucgaauccucugucaucccucugaugcauccccuugccgauccuagcgcgguguuuaaagacggggaugaggccgaagacuucgucgaggugcaucugcccgauguucacaaacagguguccggagucgaccucggccugccgaacugggggaaguacgugcugcucagcgcuggaacgcugguugcccuuaugcugauuaucuuucucaugacaugcuguagacgcgugaaucggccugagucuacccagugcucccugggcgggaccggcagaaagggaagcgucacaucucaguccggcaaggugaucagcuccugggaaucuuauaaaagcgggggagagacccgccuguga

SEQ ID NO: 223210 - RNA, 1575 nt, Artificial Sequence; identical to SEQ ID NO: 223098
  derived and/or modified CDS sequence (opt5) from glycoprotein__RABV__HQ317918.1

SEQ ID NO: 223211 - RNA, 1575 nt, Artificial Sequence
  derived and/or modified CDS sequence (opt5) from glycoprotein__RABV__JN234411.1
auggugccccaggcccugcuccuggucccucuucugggcuucagccucugcuuugggaaguucccgaucuacaccauucccgacacacugggaccuuggucccccaucgauauucaccaucuuucuuguccuaacaaucugguuguggaggacgaaggcugcacgaaccucagcggguuuuccuauauggagcugaaagugggacacaucucugcuauuaaggucaauggcuucaccuguacaggggugguuaccgaagccgagacauacaccaacuuugugggauaugucacaaccacguucaaaagaaagcauuuucggcccaccccugaugcgugccgcgcugccuacaauuggaaaauggccggcgacccgagauaugaagagagccugcacucccccuacccugauuaucauuggcuccggacagugaagaccacaaaggagucucugguuaucaucagccccuccguggcuaaccuugacccuuacgauaauagccugcacucucgcgucuuccccuccggcaaauguagcgggauuaccgugccgucuguguacugcuccacgaaccacgacuauacagucuggaugccugaaauccucagacugggaaccagcugugauauuuuuacaaauucucggggcaagcgcgccuccaaagggagcaagaccugcggauucguugacgagagaggccuuuacaaaucccugaagggggcuuguaagcucaaacugugcggagugcccggccugcggcucauggauggcaccuggguggccaugcaaacaucuaacgaaacgaagugguguccucccgggcagcuggucaaucuucaugaccugcacagcgaugagaucgagcaucucgugguugaggaacuggugaaaaagcgcgaagagugccuugacgcgcuggaauccgucauuaccacaaaaagcgugucuuuuagacggcucucccaucugcgcaagcugguucccggauucggcaaagccuauaccaucuuuaacaagacacucauggaggcugaggcccacuacaagagcgugagaaccuggaaugaaauuaucccuucuaaagggugccugcgggucggaggccgcuguuauccgcacgugaacggggucuucuucaauggaaucauucuuggccccgacggccacgugcugaucccugagaugcagagcucccuccugcagcaacauauugaacuucuggagucuagcguuaucccccucaugcacccucuggcugaucccuuuacgguguucaaggacggggaugaaauugaggacuuugucgaggugcaucugccggauguucacgaacagguguccggagucgaccucggccugccuaacuggggagaguacgugcuucugagcgccgggacacucaucgcgcugaugcugaucauuuuccuuauuaccugcuguaaaagaguggaucggcccgaaucuacccagagaucccuccgcggcacagggcggaacguuagcgucaccucucaguccggcaaguuuaucccuagcugggaguccuauaaaucuggaggcgaaacagggcuguga

SEQ ID NO: 223212 - RNA, 1575 nt, Artificial Sequence
  derived and/or modified CDS sequence (opt5) from glycoprotein__RABV__JN234412.1
auggugccccaggcccugcuccuggucccucuucugggcuucagccucugcuuugggaaguucccgaucuacaccauucccgacacacugggaccuuggucccccaucgauauucaccaucuuucuuguccuaacaaucugguuguggaggacgaaggcugcacgaaccucagcggguuuuccuauauggagcugaaagugggacacaucucugcuauuaaggucaauggcuucaccuguacaggggugguuaccgaagccgagacauacaccaacuuugugggauaugucacaaccacguucaaaagaaagcauuuucggcccaccccugaugcgugccgcgcugccuacaauuggaaaauggccggcgacccgagauaugaagagagccugcacucccccuacccugauuaucauuggcuccggacagugaagaccacaaaggagucucugguuaucaucagccccuccguggcuaaccuugacccuuacgauaauagccugcacucucgcgucuuccccuccggcaaauguagcgggauuaccgugccgucuguguacugcuccacgaaccacgacuauacagucuggaugccugaaauccucagacugggaaccagcugugauauuuuuacaaauucucggggcaagcgcgccuccaaagggagcaagaccugcggauucguugacgagagaggccuuuacaaaucccugaagggggcuuguaagcucaaacugugcggagugcccggccugcggcucauggauggcaccuggguggccaugcaaacaucuaacgaaacgaagugguguccucccgggcagcuggucaaucuucaugaccugcacagcgaugagaucgagcaucucgugguugaggaacuggugaaaaagcgcgaagagugccuugacgcgcuggaauccauuaucaccacaaaaagcgucucuuuuagacggcucucccaucugcgcaagcuggugcccggauucggcaaagccuauaccauuuuuaacaagacacucauggaggcugaggcccacuacaagagcguuagaaccuggaaugaaaucaucccuucuaaagggugccugcgggugggaggccgcuguuauccgcacgucaacgggguguucuucaauggaauuauccuuggccccgacggccacguccugauuccugagaugcagagcucccuccugcagcaacauaucgaacuucuggagucuagcgugauuccccucaugcacccucuggcugaucccuuuacgguuuucaaggacggggaugaaaucgaggacuuuguggagguccaucugccggaugugcacgaacagguuuccggaguggaccucggccugccuaacuggggagaguacguccuucugagcgccgggacacucaucgcgcugaugcugauuaucuuccuuauuaccugcuguaaaagaguggaucggcccgaaucuacccagagaucccuccgcggcacagggcggaacgugagcguuaccucucaguccggcaaguuuaucccuagcugggaguccuauaaaucuggaggcgaaacagggcuguga

SEQ ID NO: 223213 - RNA, 1575 nt, Artificial Sequence; identical to SEQ ID NO: 223102
  derived and/or modified CDS sequence (opt5) from glycoprotein__RABV__JN234413.1

SEQ ID NO: 223214 - RNA, 1575 nt, Artificial Sequence
  derived and/or modified CDS sequence (opt5) from glycoprotein__RABV__JN234420.1
augaucccccaggcccuccuguucgugccucugcuugucuuuccgcugugcuucggcaaguuucccauuuacaccaucccugacaaacucgggcccuggagcccuauugauauccaccaucuguccugucccaacaaucuuguuguggaggacgaaggaugcacaaaccugucuggcuucagcuauauggagcucaaggugggguacauuuccgcuaucaaagucaauggauuuacguguaccggcgugguuacagaagccgagaccuauacaaacuucgugggguacgucaccacaaccuuuaagagaaaacacuuccggccuacgccggaugcgugccgcucugcuuauaauuggaagauggccggagaccccagauacgaagagagccugcauaacccuuaucccgauuaccacuggcugcggaccgugaagacaaccaaagaguccguugugaucauuucuccuagcgucgccgaccucgaucccuacgacaagucccugcauagccgcguguuuccgagaggcaaauguucuggcaucacaguguccagcgcuuauugcucuaccaaucacgauuacacgauuuggaugccugaaaacccccggcuugggacauccugugacaucuucaccaauagccgcggaaagagagccucuaaaggcuccaagacaugcggguuugucgaugagcggggacuguauaagagccucaaaggcgcuuguaagcugaaacuuugcgggguucugggacuccgccugauggacggcaccuggguggccauucaaaccuccaacgaaacaaagugguguccucccgaucagcuggugaaucuccacgacuuccauucugacgagaucgagcaccuggucguggaggaacuuguuaaaaagagagaagagugccuggaugcgcucgaaagcauuaugacgaccaaauccgugagcuuucggcgccugucucaucuuagaaagcugguccccggcuucgggaaggccuacacaaucuucaacaaaacccucauggaggcugacgcccacuauaaguccgugcggacauggaaugagaucauuccuagcaaaggaugccugcgcguuggcgggagaugucacccgcaugugaacggagucuuuuucaauggcaucauucuggggcccgauggacacgugcucaucccugaaaugcagucuagccugcuucagcaacauauggagcugcucaaguccucugucauuccccugaugcacccucuugcugaccccagcaccguguuuaaagauggcgacgaaguugaggauuucguggaaguccaucugccggacgugcacaagcagguuuccggcguggaucucgggcugccuaacuggggaaaggacguccugaugggcgccggggugcucacggcgcugaugcuuaugaucuuucugaugacaugcugucggagaaccaaccgcgccgagagcauccagcacucucucggagagaccggccggaaaguguccguuacaagccagucugggagagucauuuccagcugggaauccuacaagucuggcggagagaccaaacuguga

SEQ ID NO: 223215 - RNA, 1575 nt, Artificial Sequence; identical to SEQ ID NO: 223214
  derived and/or modified CDS sequence (opt5) from glycoprotein__RABV__JN234423.1

SEQ ID NO: 223216 - RNA, 1575 nt, Artificial Sequence
  derived and/or modified CDS sequence (opt5) from glycoprotein__RABV__JN234424.1
auggugccccaggcccuucucuucgucccucugcuuguuuuuccgcugugcuucggcaaguuucccaucuacaccauuccugacaaacucgggcccuggagcccuaucgauauucaccaucuguccugucccaacaaucuugugguggaggacgaaggaugcacaaaccugucuggcuucagcuauauggagcucaaggucggguacaucuccgcuauuaaaacgaauggauuuaccuguacaggcgugguuaccgaagccgagacauauaccaacuucgugggguacgucacaaccacguuuaagagaaaacacuuccggccuaccccggaugcgugccgcgcugccuauaauuggaagauggccggagaccccagauacgaagagucucugcauaacccuuaucccgauuaccacuggcugcggacagugaagaccacaaaagagagccucguuaucaucuccccuucuguggcugaccuggaucccuacgaccgcagccuucauuccagagucuuuccgggcggcaauuguagcgggguggccgugucuuccaccuauugcagcacgaaccacgauuacacaauuuggaugccugaaaauccccggcugggaaugucuugugacaucuucaccaacucccgcggcaagagagcuagcaaagggucugagacaugcggauuugucgaugaacggggccucuauaagucccugaaaggggccuguaagcugaagcugugcggaguucucggccugcgccugauggacggcaccuggguggcgaugcaaaccagcaaugagacaaaaugguguccucccgggcagcucgugaaccugcacgauuucagauccgacgagauugaacaucuugucguggaggaacugguuaagaaacgggaggaaugccucgacgcccuggagucuaucaugacgaccaagagcguguccuuucgcagacuuagccaucugcggaaacucguccccggauucggcaaggcuuacacaauuuucaauaaaacccugauggaggccgaugcucacuauaagucugugcgcacauggaacgaaaucauuccuuccaaggggugccugagaguuggaggccggugucacccgcacgugaauggggucuuuuucaacggaaucauccucggccccgacggcaacgugcugauuccugagaugcagagcucucuucugcagcaacauauggaacuccuggucagcuccgugaucccccuuaugcacccuauggccgaucccucuaccguuuuuaaaaauggggacgaggcggaagauuucguggagguccaucugccggacgugcacgagagaauuagcggaguugaucucggccugccuaacugggggaaguacgugcugcucuccgccggagcucugacggcccuuaugcugaucauuuuucucaugacaugcuggcgccgggucaauagaagcgaacccacccagcauaaccugcgcggcaccgggcgggaggugucugugacaccucaguccggcaaaaucaucagcucuugggaauccuauaagagcggaggcgagaccgggcuguga

SEQ ID NO: 223217 - RNA, 1575 nt, Artificial Sequence; identical to SEQ ID NO: 223100
  derived and/or modified CDS sequence (opt5) from glycoprotein__RABV__JN786877.1

SEQ ID NO: 223218 - RNA, 1575 nt, Artificial Sequence
  derived and/or modified CDS sequence (opt5) from glycoprotein__RABV__JN786878.1
augaucccccaggcccuucucuucgugccucugcuugucuuuagcuccugcuucggcaaguuuccgauuuacaccauccccgacaaacuggggccuuggucucccauugauauccaccaucucagauguccuaacaaucugguuguggaggacgaaggaugcacaaaccuuagcggcuucuccuauauggagcugaaggugggguacauuucugcuaucaaagucaauggauuuacguguaccggcgugguuacagaagccgagaccuauacaaacuucgugggguacgucaccacaaccuuuaagcggaaacacuuccgccccacgccugaugcgugcagagcugccuauaauuggaagauggccggagacccgcgguacgaagagagccuccauaaccccuauccugauuaccacuggcugcgcaccgugaagacaaccaaagagucccugguuaucauuucucccagcguguccgaccucgauccuuacgacaagagccugcauucuagagucuuucccuccggcaaauguagcggcaucacagugucuuccaccuauugcccgacgaaucacgauuacacaauuuggaugccugaaaacccccggcuugggaccagcugugacaucuucacaaauucucgcggaaagagagcuuccaaaggcgggaagaccugcggauuuguggaugagcggggccuguauaagagccucaaaggggccuguaagcugaaacuuugcggaguccugggccuccgccugauggacggcaccuggguugcuauucaaacauccgaugaagccaagugguguccucccgaccagcuggugaacauccacgacuucagaucugaugagauugagcaucucguggucgaggaacuggugaaaaagcgggaagagugccuugacgcgcuggaaagcaucaugacgaccaaauccguuagcuuucgcagacucucucaucugcggaagcuggugcccggguucggaaaggccuacacaaucuucaauaaaacccugauggaggcugaugcccacuauaaguccguccgcacauggaacgagauuaucccuagcaaaggcugccucagaguugggggacggugucacccgcacgugaauggcguguuuuucaacgggauuauccugggacccgacggccauguccugauuccugaaaugcagucuagccuccugcagcaacacauggagcuucuggaauccucugugaucccccucaugcauccucuggcugaucccagcaccgucuuuaaggacggcgaugaggccgaagacuucguggagguucaccuuccggaugugccuaaacaggucuccgggguggaccugggacuccccagcuggggcaaguacguucugaugucugugggggcgaugaucgcccugaugcucaugauuuuucugaugacgugcuguagaaaggcuaauggagccgagacaauccagcaucgccuuggcgaaaccgggcggaaagucuccgugaccagccagucuggcagagugauuuccagcugggaguccuauaagucuggaggcgaaacaaaacuguga

SEQ ID NO: 223219 - RNA, 1575 nt, Artificial Sequence; identical to SEQ ID NO: 222917
  derived and/or modified CDS sequence (opt5) from glycoprotein__RABV__JN936687.1

SEQ ID NO: 223220 - RNA, 1575 nt, Artificial Sequence
  derived and/or modified CDS sequence (opt5) from glycoprotein__RABV__JN936688.1
auggugccccagguccuccuguucguuccucugcuugccgugccgcugugcuuuggcaaguuccccaucuacaccauuccugacaaacucgggcccuggagcccuaucgauauucaccaucuguccugucccaacaaucuuguggucgaggacgaaggaugcacaaaccugucuggcuuuagcuauauggagcucaaggugggguacaucuccgcuauuaaaguuaauggauucacguguaccggcguggucacagaagccgagaccuauacaaacuuugugggguacguuaccacaaccuucaagagaaaacacuuucggccuacgccggaugcgugccgcucugcuuauaauuggaagauggccggagaccccagauacgaagagagccugcauaacccuuaucccgauuaccacuggcugcggaccgugaagacaaccaaagaguccuucgucaucaucucuccuagcguggccgaccucgaucccuacgacaagucccugcauagccgcguguuuccgagaggcaaauguucuggcauuacagucuccagcaccuauugcucuacgaaucacgauuacacaaucuggaugccugaaaacccccggcuugggaccuccugugacauuuucacaaauagccgcggaaagagagcuucuaaaggcuccaagaccugcggguuuguugaugagcggggacuguauaagagccucaaaggcgccuguaagcugaaacuuugcggggugcugggacuccgccugauggacggcaccuggguggcuauccaaacauccgaugaaacgaagugguguccucccgaccagcuggucaaccuccacgacuuccauucugaugagauugagcaccuggugguugaggaacuugugaaaaagagagaagagugccuggacgcccucgaaagcaucaugaccacaaaauccgucagcuuucggcgccugucucaucuuagaaagcuggugcccggcuucgggaaggcguacaccauuuucaauaaaacacucauggaggccgaugcucacuauaaguccguucggaccuggaacgagaucaucccuagcaaaggaugccugcgcgugggcgggagaugucacccgcaugucaauggaguguuuuucaacggcauuauccuggggcccgacggacacguccucauuccugaaaugcagucuagccugcuucagcaacauauggagcugcucgaauccucugugaucccccugaugcacccucuugccgaucccagcacgguuuuuaaggacggcgaugaggcugaagacuucguggagguccaucugccggaugugcacaaacagguuuccggcguggaccucgggcugccuagcuggggaaaguacguccugaugucugccggcauucucacagcgcugaugcuuaugaucuuucugaugaccugcugucggagaaccaaucgcgccgaguccauccagcacagccucggggaaacaggacggaaggugucugugaccucccagaacggcagaguuauuagcuccugggagucuuauaaaagcgggggcgaaacaaagcuguga

SEQ ID NO: 223221 - RNA, 1575 nt, Artificial Sequence
  derived and/or modified CDS sequence (opt5) from glycoprotein__RABV__JN936689.1
auggugccccagguccuccuguucguuccucugcuugccgugccgcugugcuuuggcaaguuccccaucuacaccauuccugacaaacucgggcccuggagcccuaucgauauucaccaucuguccugucccaacaaucuuguggucgaggacgaaggaugcacaaaccugucuggcuuuagcuauauggagcucaaggugggguacaucuccgcuauuaaaguuaauggauucacguguaccggcguggucacagaagccgagaccuauacaaacuuugugggguacguuaccacaaccuucaagagaaaacacuuucggccuacgccggaugcgugccgcucugcuuauaauuggaagauggccggagaccccagauacgaagagagccugcauaacccuuaucccgauuaccacuggcugcggaccgugaagacaaccaaagaguccuucgucaucaucucuccuagcguggccgaccucgaucccuacgacaagucccugcauagccgcguguuuccgagaggcaaauguucuggcauuacagucuccagcaccuauugcucuacgaaucacgauuacacaaucuggaugccugaaaacccccggcuugggaccuccugugacauuuucacaaauagccgcggaaagagagcuucuaaaggcuccaagaccugcggguuuguugaugagcggggacuguauaagagccucaaaggcgccuguaagcugaaacuuugcggggugcugggacuccgccugauggacggcaccuggguggcuauccaaacauccgaugaaacgaagugguguccucccgaccagcuggucaaccuccacgacuuccauucugaugagauugagcaccuggugguugaggaacuugugaaaaagagagaagagugccuggacgcccucgaaagcaucaugaccacaaaauccgucagcuuucggcgccugucucaucuuagaaagcuggugcccggcuucgggaaggcguacaccauuuucaauaaaacacucauggaggccgaugcucacuauaaguccguucggaccuggaacgagaucaucccuagcaaaggaugccugcgcgugggcgggagaugucacccgcaugucaauggaguguuuuucaacggcauuauccuggggcccgacggacacguccucauuccugaaaugcagucuagccugcuucagcaacauauggagcugcucgaauccucugugaucccccugaugcacccucuugccgaucccagcacgguuuuuaaggacggcgaugaggcugaagacuucguggagguccaucugccggaugugcacaaacagguuuccggcguggaccucgggcugccuagcuggggaaaguacguccugaugucugccggcauucucacagcgcugaugcuuaccaucuuucugaugaccugcugucggagaacaaaucgcgccgaguccauccagcacagccucggggaaaccggacggaaggugucugugacaucccagagcggcagaguuauuuccucuugggagagcuauaaauccgggggcgaaacgaagcuguga

SEQ ID NO: 223222 - RNA, 1575 nt, Artificial Sequence
  derived and/or modified CDS sequence (opt5) from glycoprotein__RABV__JN936690.1
auggugccccaggccguccuguucguuccucuccuggcugugccgcuuugcuuuggcaaguuccccaucuacaccauuccugacaaacuggggcccuggagcccuaucgauauucaccaucucuccugucccaacaaucugguggucgaggacgaaggaugcacaaaccuuucuggcuuuagcuauauggagcugaaggugggguacaucuccgccauuaaaguuaauggauucacguguaccggcguggucacagaagcggagaccuauacaaacuuugugggguacguuaccacaaccuucaagagaaaacacuuucggccuacgccggaugcuugccgcucugccuauaauuggaagauggccggagaccccagauacgaagagagccuccauaacccuuaucccgauuaccacuggcugcggaccgugaagacaaccaaagaguccuucgucaucaucucuccuagcguggcugaccuggaucccuacgacaagucccuccauagccgcguguuuccgagaggcaaauguucuggcauuacagucuccagcaccuauugcucuacgaaucacgauuacacaaucuggaugccugaaaacccccggcuggggaccuccugugacauuuucacaaauagccgcggaaagagagccucuaaaggcuccaagaccugcggguuuguugaugagcggggacuuuauaagagccugaaaggcgcuuguaagcucaaacugugcggggugcuuggacugcgccucauggacggcaccuggguggccauccaaacauccgaugaaacgaagugguguccucccgaccagcuggucaaccugcacgacuuccauucugaugagauugagcaccucgugguugaggaacuggugaaaaagagagaagagugccuugacgcgcuggaaagcaucaugaccacaaaauccgucagcuuucggcgccucucucaucugagaaaacuugugcccggcuucgggaaggccuacaccauuuucaauaagacacugauggaggcugaugcccacuauaaguccguucggaccuggaacgagaucaucccuagcaaaggaugccuccgcgugggcgggagaugucacccgcaugucaauggaguguuuuucaacggcauuauccuggggcccgacggacacguccugauuccugaaaugcagucuagccuccugcagcaacauauggagcuucuggaauccucugugaucccccucaugcacccucuggcugaucccagcacgguuuuuaaggacggcgaugaggccgaagacuucguggagguccaucuuccggaugugcacaaacagguuuccggcguggaccuggggcucccuagcuggggaaaguacguccugaugucugcgggcauucugacagcccucaugcugaugaucuuucuuaugaccugcugucggagaaccaaucgcgcugaguccauccagcacagccugggggaaacaggacggaaggugucugugaccucccagaacggcagaguuauuagcuccugggagucuuauaaaagcgggggcgaaacaaagcucuga

SEQ ID NO: 223223 - RNA, 1575 nt, Artificial Sequence
  derived and/or modified CDS sequence (opt5) from glycoprotein__RABV__JN936691.1
augaucccccaggugcuucucuucgucccucugcuuguuuuuagcuccugcuucggcaaguuuccgauuuacaccauccccgacaaacuggggccuuggucucccauugauauccaccaucucagcuguccuaacaauauggugguggaggacgaaggaugcacaaaccuguccggcuucucuuauauggagcuuaaggucggguacauuagcgccaucaaagugaauggauuuacguguaccggcguugugacagaagcugagaccuauacaaacuucgucggguacgugaccacaaccuuuaagagaaaacacuuccggcccaugccugaugccugccgcgcggcuuauaauuggaagauggccggagacccgagauacgaagagucccugcauaaccccuauccugauuaccacuggcuccggacgguuaagaccacaaaagagucucuggugaucauuagccccuccgucgccgaccuggauccuuacgacaagagccuccauucucgcguguuucccggcggcaaauguuccgggaucaccgugagcucuacaugcuguuccaccaaucacgauuauacgauuuggaugccggaaaacccuagacugggaacaagcugcgacaucuucaccaauucucggggcaagcgcgcuuccaaagggggaaagacauguggcuuugucgaugagagagggcuuuacaagagccugaaaggagccugcaagcucaaacuguguggcguucuuggccugcggcucauggacgggaccuggguggcuauucaaaccuccgaugaaaucaaguggugcucucccgaccagcuggugaaccugcacgacuuccauagcgaugagauugagcaccucgucguggaggaacugguuaaaaagcgcgaagagugccuugacgcccuggaaacaaucaugacgaccaaauccgugagcuuuagacggcucucucaucugcgcaagcuggucccuggauucggcaaggcguauacaaucuucaauaaaacccugauggaggccgaugcucacuacaaguccauuagaacauggaacgagaucauucccagcaaagggugucuccgggugggaggccgcugccacccccauguuaaugggguguuuuucaacggaaucauucugggcccugacggccacguccugaucccggaaaugcagucuagccuccugcaucagcacauggagcuucuggaauccucugugaucccccucaugcauccucuggccgaucccagcaccgucuuuaaggacggggaugaggcugaagacuucguggagguucaccuuccugaugugcacaaacaaauuuccggagucgaccugggccuccccaauugggggaaguaugugcugaucagcgccggagcgcugacggcccucaugcugacaauuuuucuuaugaccuguugcagaaagaccaaccgggcugagucuauccagcauuccccgggcgaaacagggagaaaaguuagcgugaccucucacaacggccgcgucauuuccagcugggaguccuacaagucuggaggcgaaacaaaacuguga

SEQ ID NO: 223224 - RNA, 1575 nt, Artificial Sequence; identical to SEQ ID NO: 222917
  derived and/or modified CDS sequence (opt5) from glycoprotein__RABV__JN936692.1

SEQ ID NO: 223225 - RNA, 1575 nt, Artificial Sequence
  derived and/or modified CDS sequence (opt5) from glycoprotein__RABV__JN936693.1
auggugccccaggccuuccuguuugucccucuccuggcuaucccgcuuugcuucggcaaguuucccauuuacaccaucccugacaaacuggggcccuggagcccuauugauauccaccaucucuccugucccaacaaucugguuguggaggacgaaggaugcacaaaccuuucuggcuucagcuauauggagcugaaggugggguacauuuccgccaucaaagucaauggauuuacguguaccggcgugguuacagaagcggagaccuauacaaacuucgugggguacgucaccacaaccuuuaagagaaaacacuuccggccuacgccggaugcuugccgcucugccuauaauuggaagauggccggagaccccagauacgaagagagccuccauaacccuuaucccgauuaccacuggcugcggaccgugaagacaaccaaagaguccuuuguuaucauuucuccuagcguggcugaccuggaucccuacgacaagucccuccauagccgcgucuucccgagaggcaaauguucuggcaucacaguguccagcaccuauugcucuacgaaucacgauuacacaauuuggaugccugaaaacccccggcuggggaccuccugugacaucuuuacaaauagccgcggaaagagagccucuaaaggcuccaagaccugcggguucguggaugagcggggacuuuauaagagccugaaaggcgcuuguaagcucaaacugugcgggguccuuggacugcgccucauggacggcaccuggguugccauucaaacauccgaugaaacgaagugguguccucccgaccagcuggugaaccugcacgacuuucauucugaugagaucgagcaccucguggucgaggaacuggugaaaaagagagaagagugccuugacacccuggaaagcauuaugacaaccaaauccguuagcuuccggcgccucucucaucugagaaaacuugugcccggcuucgggaaggcguacacaaucuuuaauaagacccugauggaggccgaugcucacuauaaguccguccggacguggaacgagaucauuccuagcaaaggaugccuccgcgugggcgggagaugucacccgcauguuaauggaguguucuuuaacggcaucauucuggggcccgacggacacguccugaucccugaaaugcagucuagccuccugcagcaacauauggagcuucuggaauccucugugauuccccucaugcacccucuggccgaucccagcacagucuucaaggacggcgaugaggcugaagacuuuguggagguucaucuuccggaugugcacaaacaggucuccggcguggaccuggggcucccuagcuggggaaaguacguucugaugucugccggcauccugaccgcgcucaugcugaugaucuuccuuaugaccugcugucggagaacaaaucgcgccgaguccauucagcacagccugggggaaaccggacggaaggugucugucacaucccagagcggcagagugaucuccucuugggagagcuauaaauccgggggcgaaacgaagcucuga

SEQ ID NO: 223226 - RNA, 1575 nt, Artificial Sequence
  derived and/or modified CDS sequence (opt5) from glycoprotein__RABV__JN936694.1
auggugccccaggcccugcuguucgucccucugcuuguuuuuagcuccugcuucggcaaguuuccgaucuacaccauucccgacaaacuggggccuuggucucccaucgauauucaccaucucagcuguccuaacaauuucgugguggaggacgaaggaugcacaaaccuguccggcuuuucuuauauggagcuuaaggucggguacaucagcgcuauuaaagugaauggauucacguguaccggcguugugacagaagccgagaccuauacaaacuuugucggguacgugaccacaaccuucaagagaaaacacuuucggcccaugccugaugcgugccgcgcugccuauaauuggaagauggccggagacccgagauacgaagagucccugcauaaccccuauccugauuaccacuggcuccggacgguuaagaccacaaaagagucucuggugaucaucagccccuccgucgcugaccuggauccuuacgacaagagccuccauucucgcguguuccccggcggcaaauguuccgggauuaccgugagcucuacaugcuguuccaccaaucacgauuauacgaucuggaugccggaaaacccuagacugggaacaagcugcgacauuuuuaccaauucucggggcaagcgcgccuccaaagggggaaagacauguggcuucgucgaugagagagggcuuuacaagagccugaaaggagcuugcaagcucaaacuguguggcguucuuggccugcggcucauggacgggaccuggguggccauccaaaccuccgaugaaauuaaguggugcucucccgaccagcuggugaaccugcacgacuuucauagcgaugagaucgagcacuucgucguggaggaacucguuaaaaagcgcgaagagugccuggacgcgcuugaaacaauuaugacgaccaaauccgugagcuucagacggcugucucaucuccgcaagcuggucccuggauuuggcaaggccuauacaaucuucaauaaaacccuuauggaggcugaugcccacuacaaguccaucagaacauggaacgagauuauccccagcaaagggugucugcgggugggaggccgcugccacccccauguuaaugggguguuuuucaacggaauuauccucggcccugacggccacguccugauuccggaaaugcagucuagccugcuccaucagcacauggagcugcuugaauccucugugaucccccugaugcauccucucgcugaucccagcaccgucuuuaaggacggggaugaggccgaagacuucguggagguucaccucccugaugugcacaaacaaaucuccggagucgaccuuggccugcccaauugggggaaguaugugcucauuagcgcgggagcccugacggcucugaugcucaugaucuuucugaugacauguugcagaaaggccaaccgggcugagucuauucagcauaacccgggcgaaaccgggagaaaaguuuccgugaccagccacaauggccgcgucaucucuuccugggagagcuacaaguccggaggcgaaacaaaacuuuga

SEQ ID NO: 223227 - RNA, 1575 nt, Artificial Sequence
  derived and/or modified CDS sequence (opt5) from glycoprotein__RABV__JN936695.1
auggugccccaggccuuccuguuugucccucuccuggcuaucccgcuuugcuucggcaaguuucccauuuacaccaucccugacaaacuggggcccuggagcccuauugauauccaccaucucuccugucccaacaaucugguuguggaggacgaaggaugcacaaaccuuucuggcuucagcuauauggagcugaaggugggguacauuuccgccaucaaagucaauggauuuacguguaccggcgugguuacagaagcggagaccuauacaaacuucgugggguacgucaccacaaccuuuaagagaaaacacuuccggccuacgccggaugcuugccgcucugccuauaauuggaagauggccggagaccccagauacgaagagagccuccauaacccuuaucccgauuaccacuggcugcggaccgugaagacaaccaaagaguccuuuguuaucauuucuccuagcguggcugaccuggaucccuacgacaagucccuccauagccgcgucuucccgagaggcaaauguucuggcaucacaguguccagcaccuauugcucuacgaaucacgauuacacaauuuggaugccugaaaacccccggcuggggaccuccugugacaucuuuacaaauagccgcggaaagagagccucuaaaggcuccaagaccugcggguucguggaugagcggggacuuuauaagagccugaaaggcgcuuguaagcucaaacugugcgggguccuuggacugcgccucauggacggcaccuggguugccauucaaacauccgaugaaacgaagugguguccucccgaccagcuggugaaccugcacgacuuucauucugaugagaucgagcaccucguggucgaggaacuggugaaaaagagagaagagugccuugacgcgcuggaaagcauuaugaccacaaaauccguuagcuuccggcgccucucucaucugagaaaacuugugcccggcuucgggaaggccuacaccaucuuuaauaagacacugauggaggcugaugcccacuauaaguccguccggaccuggaacgagaucauuccuagcaaaggaugccuccgcgugggcgggagaugucacccgcauguuaauggaguguucuuuaacggcaucauucuggggcccgacggacacguccugaucccugaaaugcagucuagccuccugcagcaacauauggagcuucuggaauccucugugauuccccucaugcacccucuggcugaucccagcacggucuucaaggacggcgaugaggccgaagacuuuguggagguucaucuuccggaugugcacaaacaggucuccggcguggaccuggggcucccuagcuggggaaaguacguucugaugucugcgggcauccugacagcccucaugcugaugaucuuccuuaugaccugcugucggagagcuaaucgcgccgaguccauucagcacagccugggggaaaccggacggaaggugucugucacaucccagagcggcagagugaucuccucuugggagagcuauaaauccgggggcgaaaccaagcucuga

SEQ ID NO: 223228 - RNA, 1575 nt, Artificial Sequence
  derived and/or modified CDS sequence (opt5) from glycoprotein__RABV__JN936696.1
augauccuccaggugcugcuguucguccccuuucuuguuuucagcuccugcuuuggcaaguucccuauuuacaccaucccggacaaacuggggcccuggucuccuauugauauccaccaucucagcugucccaacaaucuggugguggaggacgaaggaugcacaaaccuuuccggcuuuucuuauauggagcugaaggucggguacauuagcgccaucaaagugaauggauucacguguaccggcguugugacagaagcugagaccuauacaaacuuugucggguacgugaccacaaccuucaagagaaaacacuuucggccuaugcccgaugccugccgcgcggcuuauaauuggaagauggccggagacccuagauacgaagagucccuccauaacccguaucccgauuaccacuggcugcggacgguuaagaccacaaaagagucucuggugaucauuagcccuuccgucgccgaccucgaucccuacgacaagagccugcauucucgcguguucccuggcggcaaauguuccgggaucaccgugagcucuacaugcuguuccaccaaucacgauuauacgauuuggaugcccgaaaacccgagacuuggaacaagcugcgacaucuuuaccaauucucggggcaagcgcgcuuccaaagggggaaagacauguggcuucgucgaugagagagggcuguacaagagccucaaaggagccugcaagcugaaacuuuguggcguucugggccuccggcugauggacgggaccuggguggcuauucaaaccuccgaugaaaucaaguggugcccucccgaccagcuggugaaccuccacgacuuucauucugaugagauugagcaccuggucguggaggaacuuguuaaaaagcgcgaagagugccuggacgcccucgaaacaaucaugacgaccaaaagcguguccuucagacggcugagccaucuucgcaagcuggucccuggauucggcaaggcguauacaaucuuuaauaaaacccucauggaggccgaugcucacuacaagucuauuagaacauggaacgagaucauucccuccaaagggugucugcgggugggaggccgcugccacccccauguuaaugggguguucuuuaacggaaucauucugggcccugacggccacguccucaucccggaaaugcagagcucucugcuucaucagcacauggagcugcucgaaagcuccgugaucccccugaugcauccucuugccgaucccucuaccgucuucaaggacggggaugaggcugaagacuuuguggagguucaucugccugaugugcacaaacaaauuagcggagucgaccucggccugcccaauugggggaaguaugugcugaucuccgccggagcgcucacggcccugaugcuuaugauuuuccugaugacauguugcagaaagaacaaccgggcugagagcauccagcacucuccgggcgaaaccgggagaaaaguuuccgugaccagccacaauggccgcgucauuucuuccugggagagcuacaaguccggaggcgaaacaaaacucuga

SEQ ID NO: 223229 - RNA, 1575 nt, Artificial Sequence
  derived and/or modified CDS sequence (opt5) from glycoprotein__RABV__JN936697.1
auggugccccaggccuuccuguuugucccucuccuggcuaucccgcuuugcuucggcaaguuucccauuuacaccaucccugacaaacuggggcccuggagcccuauugauauccaccaucucuccugucccaacaaucugguuguggaggacgaaggaugcacaaaccuuucuggcuucagcuauauggagcugaaggugggguacauuuccgccaucaaagucaauggauuuacguguaccggcgugguuacagaagcggagaccuauacaaacuucgugggguacgucaccacaaccuuuaagagaaaacacuuccggccuacgccggaugcuugccgcucugccuauaauuggaagauggccggagaccccagauacgaagagagccuccauaacccuuaucccgauuaccacuggcugcggaccgugaagacaaccaaagaguccuuuguuaucauuucuccuagcguggcugaccuggaucccuacgacaagucccuccauagccgcgucuucccgagaggcaaauguucuggcaucacaguguccagcaccuauugcucuacgaaucacgauuacacaauuuggaugccugaaaacccccggcuggggaccuccugugacaucuuuacaaauagccgcggaaagagagccucuaaaggcuccaagaccugcggguucguggaugagcggggacuuuauaagagccugaaaggcgcuuguaagcucaaacugugcgggguccuuggacugcgccucauggacggcaccuggguugccauucaaacauccgaugaaacgaagugguguccucccgaccagcuggugaaccugcacgacuuucauucugaugagaucgagcaccucguggucgaggaacuggugaaaaagagagaagagugccuugacgcgcuggaaagcauuaugaccacaaaauccguuagcuuccggcgccucucucaucugagaaaacuugugcccggcuucgggaaggccuacaccaucuuuaauaagacacugauggaggcugaugcccacuauaaguccguccggaccuggaacgagaucauuccuagcaaaggaugccuccgcgugggcgggagaugucacccgcauguuaauggaguguucuuuaacggcaucauucuggggcccgacggacacguccugaucccugaaaugcagucuagccuccugcagcaacauauggagcuucuggaauccucugugauuccccucaugcacccucuggcugaucccagcacggucuucaaggacggcgaugaggccgaagacuuuguggagguucaucuuccggaugugcacaaacaggucuccggcguggaccuggggcucccuagcuggggaaaguacguucugaugucugcgggcauccugacagcccucaugcugaugaucuuccuuaugaccugcugucggagaaccaaucgcgcugaguccauucagcacagccugggggaaacaggacggaaggugucugucaccucccagagcggcagagugaucuccucuugggagagcuauaaauccgggggcgaaacaaagcucuga

SEQ ID NO: 223230 - RNA, 1575 nt, Artificial Sequence; identical to SEQ ID NO: 222899
  derived and/or modified CDS sequence (opt5) from glycoprotein__RABV__JN936698.1

SEQ ID NO: 223231 - RNA, 1575 nt, Artificial Sequence
  derived and/or modified CDS sequence (opt5) from glycoprotein__RABV__JN936699.1
auggugccccagguccuucucuucguuccuuuucugguguucagcuccugcuuuggcaaguucccgaucuacaccauucccgacaaacuugggccuuggucucccaucgauauucaccaucugagcuguccuaacaaucucguggucgaggacgaaggaugcacaaaccuguccggcuuuucuuauauggagcuuaaggugggguacaucagcgccauuaaaguuaauggauucacguguaccggcguggucacagaagcugagaccuauacaaacuuugugggguacguuaccacaaccuucaagagaaaacacuuucggcccaugccugaugccugccgcgcggcuuauaauuggaagauggccggagacccgagauacgaagagucccugcauaaccccuauccugauuaccacuggcuccggacggugaagaccacaaaagagucucuggucaucaucagccccuccguggccgaccuggauccuuacgacaagagccuccauucucgcguguuccccggcggcaaauguuccgggauuaccgucagcucuacaugcuguuccaccaaucacgauuauacgaucuggaugccggaaaacccuagacugggaacaagcugcgacauuuuuaccaauucucggggcaagcgcgcuuccaaagggggaaagacauguggcuucguugaugagagagggcuuuacaagagccugaaaggagccugcaagcucaaacuguguggcgugcuuggccugcggcucauggacgggaccuggguggcuauccaaaccuccgaugaaauuaaguggugcucucccgaccagcuggucaaccugcacgacuuucauagcgaugagaucgagcaccucgugguugaggaacuggugaaaaagcgcgaagagugccuugacgcccuggaaacaauuaugacgaccaaauccgucagcuucagacggcucucucaucugcgcaagcuggugccuggauucggcaaggcguauacaaucuuuaauaaaacccugauggaggccgaugcucacuacaaguccaucagaacauggaacgagauuauccccagcaaagggugucuccggguuggaggccgcugccacccccaugugaauggggucuucuuuaacggaauuauccugggcccugacggccacgugcugauuccggaaaugcagucuagccuccugcaucagcacauggagcuucuggaauccucugucaucccccucaugcauccucuggccgaucccagcaccguguucaaggacggggaugaggcugaagacuuuguugaggugcaccuuccugauguccacaaacaaaucuccggaguggaccugggccuccccaauugggggaaguauguucugauuagcgccggagcgcugacggcccucaugcugaugaucuuccuuaugacauguugcagaaaggcuaaccgggccgagucuauucagcauaacccgggcgaaaccgggagaaaaguguccgucaccagccacaauggccgcgugaucucuuccugggagagcuacaaguccggaggcgaaacaaaacuguga

SEQ ID NO: 223232 - RNA, 1575 nt, Artificial Sequence; identical to SEQ ID NO: 222598
  derived and/or modified CDS sequence (opt5) from glycoprotein__RABV__JN936700.1

SEQ ID NO: 223233 - RNA, 1575 nt, Artificial Sequence; identical to SEQ ID NO: 223231
  derived and/or modified CDS sequence (opt5) from glycoprotein__RABV__JN936701.1

SEQ ID NO: 223234 - RNA, 1575 nt, Artificial Sequence; identical to SEQ ID NO: 222598
  derived and/or modified CDS sequence (opt5) from glycoprotein__RABV__JN936702.1

SEQ ID NO: 223235 - RNA, 1575 nt, Artificial Sequence; identical to SEQ ID NO: 222598
  derived and/or modified CDS sequence (opt5) from glycoprotein__RABV__JN936703.1

SEQ ID NO: 223236 - RNA, 1575 nt, Artificial Sequence
  derived and/or modified CDS sequence (opt5) from glycoprotein__RABV__JN936704.1
auggugccccagguccugcuguucguuccucugcuugccuuuagcuccugcuucggcaaguuuccgaucuacaccauucccgacaaacuggggccuuggucucccaucgauauucaccaucucagcuguccuaacaaucuggugguggaggacgaaggaugcacaaaccuuuccggcuucucuuauauggagcugaaggucggguacaucagcgcuauuaaagugaauggauuuacguguaccggcguugugacagaagccgagaccuauacaaacuucgucggguacgugaccacaaccuuuaagagaaaacacuuccggcccaugccugaugcgugccgcgcugccuauaauuggaagauggccggagacccgagauacgaagagucccuccauaaccccuauccugauuaccacuggcugcggacgguuaagaccacaaaagagucucuggugaucaucagccccuccgucgcugaccucgauccuuacgacaagagccugcauucucgcguguuucccggcggcaaauguuccgggauuaccgugagcucuacaugcuguuccaccaaucacgauuauacgaucuggaugccggaaaacccuagacuuggaacaagcugcgacauuuucaccaauucucggggcaagcgcgccuccaaagggggaaagacauguggcuuugucgaugagagagggcuguacaagagccucaaaggagcuugcaagcugaaacuuuguggcguucugggccuccggcugauggacgggaccuggguggccauccaaaccuccgaugaaauuaaguggugcucucccgaccagcuggugaaccuccacgacuuccauagcgaugagaucgagcaccuggucguggaggaacuuguuaaaaagcgcgaagagugccuggacgcgcucgaaacaauuaugacgaccaaauccgugagcuuuagacggcugucucaucuucgcaagcuggucccuggauucggcaaggccuauacaaucuucaauaaaacccucauggaggcugaugcccacuacaaguccaucagaacauggaacgagauuauccccagcaaagggugucugcgggugggaggccgcugccacccccauguuaaugggguguuuuucaacggaauuauccugggcccugacggccacguccucauuccggaaaugcagucuagccugcuucaucagcacauggagcugcucgaauccucugugaucccccugaugcauccucuugcugaucccagcaccgucuuuaaggacggggaugaggccgaagacuucguggagguucaccucccugaugugcacaaacaaaucuccggagucgaccucggccugcccaauugggggagauaugugcugauuagcgcgggagcccucacggcucugaugcuuaugaucuuucugaugacauguugccggaaggccaacagagcugagcucauucagcauaacccgggcgaaaccgggcgcaagguuucugugaccucccacaauggccgggucaucagcucuugggaguccuacaaaagcggaggcgaaacaaagcuguga

SEQ ID NO: 223237 - RNA, 1575 nt, Artificial Sequence
  derived and/or modified CDS sequence (opt5) from glycoprotein__RABV__JN936705.1
augaucccccaggugcuucucuucgucccucugcuuguuuuuagcuccugcuucggcaaguuuccgauuuacaccauccccgacaaacuggggccuuggucucccauugauauccaccaucucagcuguccuaacaauauggugguggaggacgaaggaugcacaaaccuguccggcuucucuuauauggagcuuaaggucggguacauuagcgccaucaaagugaauggauuuacguguaccggcguugugacagaagcugagaccuauacaaacuucgucggguacgugaccacaaccuuuaagagaaaacacuuccggcccaugccugaugccugccgcgcggcuuauaauuggaagauggccggagacccgagauacgaagagucccugcauaaccccuauccugauuaccacuggcuccggacgguuaagaccacaaaagagucucuggugaucauuagccccuccgucgccgaccuggauccuuacgacaagagccuccauucucgcguguuucccggcggcaaauguuccgggaucaccgugagcucuacaugcuguuccaccaaucacgauuauacgauuuggaugccggaaaacccuagacugggaacaagcugcgacaucuucaccaauucucggggcaagcgcgcuuccaaagggggaaagacauguggcuuugucgaugagagagggcuuuacaagagccugaaaggagccugcaagcucaaacuguguggcguucuuggccugcggcucauggacgggaccuggguggcuauucaaaccuccgaugaaaucaaguggugcucucccgaccagcuggugaaccugcacgacuuccauagcgaugagauugagcaccucgucguggaggaacugguuaaaaagcgcgaagagugccuugacgcccuggaaacaaucaugacgaccaaauccgugagcuuuagacggcucucucaucugcgcaagcuggucccuggauucggcaaggcguauacaaucuucaauaaaacccugauggaggccgaugcucacuacaaguccauuagaacauggaacgagaucauucccagcaaagggugucuccgggugggaggccgcugccacccccauguuaaugggguguuuuucaacggaaucauucugggcccugacggccacguccugaucccggaaaugcagucuagccuccugcaucagcacauggagcuucuggaauccucugugaucccccucaugcauccucuggccgaucccagcaccgucuuuaaggacggggaugaggcugaagacuucguggagguucaccuuccugaugugcacaaacaaauuuccggagucgaccugggccuccccaauugggggaaguaugugcugaucagcgccugugcgcugacggcccucaugcugacaauuuuucuuaugaccugcuguagaaagaccucucgggcugaguccauccagcauagcccgggagaaacaggcagaaaaguuucugugaccucccacaacgggcgcgucauuagcuccugggagucuuacaagagcggcggagaaacaaaacuguga

SEQ ID NO: 223238 - RNA, 1575 nt, Artificial Sequence
  derived and/or modified CDS sequence (opt5) from glycoprotein__RABV__JN936706.1
augaucccccaggugcuucucuucgucccuuuucugguuuucagcuccugcuuuggcaaguucccgauuuacaccauccccgacaaacuugggccuuggucucccauugauauccaccaucugagcuguccuaacaaucucgugguggaggacgaaggaugcacaaaccuguccggcuuuucuuauauggagcuuaaggucggguacauuagcgccaucaaagugaauggauucacguguaccggcguugugacagaagcugagaccuauacaaacuuugucggguacgugaccacaaccuucaagagaaaacacuuucggcccaugccugaugccugccgcgcggcuuauaauuggaagauggccggagacccgagauacgaagagucccugcauaaccccuauccugauuaccacuggcuccggacgguuaagaccacaaaagagucucuggugaucauuagccccuccgucgccgaccuggauccuuacgacaagagccuccauucucgcguguuccccggcggcaaauguuccgggaucaccgugagcucuacaugcuguuccaccaaucacgauuauacgauuuggaugccggaaaacccuagacugggaacaagcugcgacaucuuuaccaauucucggggcaagcgcgcuuccaaagggggaaagacauguggcuucgucgaugagagagggcuuuacaagagccugaaaggagccugcaagcucaaacuguguggcguucuuggccugcggcucauggacgggaccuggguggcuauucaaaccuccgaugaaaucaaguggugcucucccgaccagcuggugaaccugcacgacuuucauagcgaugagauugagcaccucgucguggaggaacugguuaaaaagcgcgaagagugccuugacgcccuggaaacaaucaugacgaccaaauccgugagcuucagacggcucucucaucugcgcaagcuggucccuggauucggcaaggcguauacaaucuuuaauaaaacccugauggaggccgaugcucacuacaaguccauuagaacauggaacgagaucauucccagcaaagggugucuccgggugggaggccgcugccacccccauguuaaugggguguucuuuaacggaaucauucugggcccugacggccacguccugaucccggaaaugcagucuagccuccugcaucagcacauggagcuucuggaauccucugugaucccccucaugcauccucuggccgaucccagcaccgucuucaaggacggggaugaggcugaagacuuuguggagguucaccuuccugaugugcacaaacaaauuuccggagucgaccugggccuccccaauugggggaaguaugugcugaucagcgccggagcgcugacggcccucaugcugaugacauuccuuaugaccuguugcagaaagaccaaccgggcugagucuauucagcauuccccgggcgaaacagggagaaaaguuagcgugaccucucacaacggccgcgucaucuccagcugggaguccuacaagucuggaggcgaaacaaaacuguga

SEQ ID NO: 223239 - RNA, 1575 nt, Artificial Sequence
  derived and/or modified CDS sequence (opt5) from glycoprotein__RABV__JN936707.1
auggugccccaggccuuccuguuugucccucuccuggcuguuccgcuuugcuucggcaaguuucccaucuacaccauuccugacaaacuggggcccuggagcccuaucgauauucaccaucucuccugucccaacaaucuggugguggaggacgaaggaugcacaaaccuuucuggcuucagcuauauggagcugaaggucggguacaucuccgccauuaaagugaauggauuuacguguaccggcguugugacagaagcggagaccuauacaaacuucgucggguacgugaccacaaccuuuaagagaaaacacuuccggccuacgccggaugcuugccgcucugccuauaauuggaagauggccggagaccccagauacgaagagagccuccauaacccuuaucccgauuaccacuggcugcggaccguuaagacaaccaaagaguccuuugugaucaucucuccuagcgucgcugaccuggaucccuacgacaagucccuccauagccgcguguucccgagaggcaaauguucuggcauuacaguguccagcaccuauugcucuacgaaucacgauuacacaaucuggaugccugaaaacccccggcuggggaccuccugugacauuuuuacaaauagccgcggaaagagagccucuaaaggcuccaagaccugcggguucgucgaugagcggggacuuuauaagagccugaaaggcgcuuguaagcucaaacugugcgggguucuuggacugcgccucauggacggcaccuggguggccauccaaacauccgaugaaacgaagugguguccucccgaccagcuggugaaccugcacgacuuucauucugaugagauugagcaccucgucguggaggaacugguuaaaaagagagaagagugccuugacgcgcuggaaagcaucaugaccacaaaauccgugagcuuccggcgccucucucaucugagaaaacuuguccccggcuucgggaaggccuacaccauuuuuaauaagacacugauggaggcugaugcccacuauaaguccgugcggaccuggaacgagaucaucccuagcaaaggaugccuccgcguuggcgggagaugucacccgcaugugaauggagucuucuuuaacggcauuauccuggggcccgacggacacgugcugauuccugaaaugcagucuagccuccugcagcaacauauggagcuucuggaauccucugucaucccccucaugcacccucuggcugaucccagcacgguguucaaggacggcgaugaggccgaagacuuuguugaggugcaucuuccggauguccacaaacagguguccggcguugaccuggggcucccuagcuggggaaaguacgugcugaugucugcgggcauucugacagcccucaugcugaccaucuuccuuaugaccugcugucggagaacaaaucgcgcugaguccauccagcacagccugggggaaaccggacggaaggucucugugacaucccagagcggcagagugauuuccucuugggagagcuauaaauccgggggcgaaacgaagcucuga

SEQ ID NO: 223240 - RNA, 1575 nt, Artificial Sequence; identical to SEQ ID NO: 222899
  derived and/or modified CDS sequence (opt5) from glycoprotein__RABV__JN936708.1

SEQ ID NO: 223241 - RNA, 1575 nt, Artificial Sequence
  derived and/or modified CDS sequence (opt5) from glycoprotein__RABV__JN936709.1
augaucccccaggugcugcuguucgucccuuuucugguuuucagccuuugcuuuggcaaguucccgauuuacaccauccccgacaaacuggggccuuggucccccauugauauccaccaucucucuuguccuaacaaucuggugguggaggacgaaggaugcacaaaccuuagcggcuuuuccuauauggagcugaaggucggguacauuucugccaucaaagugaauggauucacguguaccggcguugugacagaagcugagaccuauacaaacuuugucggguacgugaccacaaccuucaagagaaaacacuuucggcccaugccugaugccugccgcgcggcuuauaauuggaagauggccggagacccgagauacgaagagagccuccauaaccccuauccugauuaccacuggcugcggacgguuaagaccacaaaagagucccuggugaucauuucucccagcgucgccgaccucgauccuuacgacaagucccugcauagccgcguguuccccggcggcaaauguucugggaucaccguguccagcacaugcuguucuaccaaucacgauuauacgauuuggaugccggaaaacccuagacuuggaacauccugcgacaucuuuaccaauagccggggcaagcgcgcuucuaaagggggaaagacauguggcuucgucgaugagagagggcuguacaagucccucaaaggagccugcaagcugaaacuuuguggcguucugggccuccggcugauggacgggaccuggguggcuauucaaaccagcgaugaaaucaaguggugcucccccgaccagcuggugaaccuccacgacuuucauucugaugagauugagcaccuggucguggaggaacuuguuaaaaagcgcgaagagugccuggacgcccucgaaacaaucaugacgaccaaaagcguguccuucagacggcugagccaucuucgcaagcuggucccuggauucggcaaggcguauacaaucuuuaauaaaacccucauggaggccgaugcucacuacaagucuauuagaacauggaacgagaucauucccuccaaagggugucugcgggugggaggccgcugccacccccauguuaaugggguguucuuuaacggaaucauucugggcccugacggccacguccucaucccggaaaugcagagcucucugcuucaucagcacauggagcugcucgaaagcuccgugaucccccugaugcauccucuugccgaucccucuaccgucuucaaggacggggaugaggcugaagacuuuguggagguucaccucccugaugugcacaaacaaauuagcggagucgaccucggccugcccaauugggggaaguaugugcugaucuccgccggagcgcucacggcccugaugcuuaugauuuuccugaugacauguugcagaaagaccaaccgggcugagagcauccagcauucuccgggcgaaaccgggagaaaaguuuccgugacaagccacaacggccgcgucauuucuuccugggagagcuacaaguccggaggcgaaaccaaacucuga

SEQ ID NO: 223242 - RNA, 1575 nt, Artificial Sequence; identical to SEQ ID NO: 222899
  derived and/or modified CDS sequence (opt5) from glycoprotein__RABV__JN936710.1

SEQ ID NO: 223243 - RNA, 1575 nt, Artificial Sequence; identical to SEQ ID NO: 223222
  derived and/or modified CDS sequence (opt5) from glycoprotein__RABV__JN936711.1

SEQ ID NO: 223244 - RNA, 1575 nt, Artificial Sequence
  derived and/or modified CDS sequence (opt5) from glycoprotein__RABV__JN936712.1
augaucccccaggugcuucucuucgucccucugcuuguuuuuagccugugcuucggcaaguuuccgauuuacaccauccccgacaaacucgggccuuggucccccauugauauccaccaucugucuuguccuaacaaucuugugguggaggacgaaggaugcacaaaccugagcggcuucuccuauauggagcucaaggucggguacauuucugccaucaaagugaauggauuuacguguaccggcguugugacagaagcugagaccuauacaaacuucgucggguacgugaccacaaccuuuaagagaaaacacuuccggcccaugccugaugccugccgcgcggcuuauaauuggaagauggccggagacccgagauacgaagagagccugcauaaccccuauccugauuaccacuggcugcggacgguuaagaccacaaaagagucccucgugaucauuucucccagcgucgccgaccuggauccuuacgacaagucccuucauagccgcguguuucccggcggcaaauguucugggaucaccguguccagcacaugcuguucuaccaaucacgauuauacgauuuggaugccggaaaacccuagacugggaacauccugcgacaucuucaccaauagccggggcaagcgcgcuucuaaagggggaaagacauguggcuuugucgaugagagagggcucuacaagucccugaaaggagccugcaagcugaaacuguguggcguucucggccugcggcugauggacgggaccuggguggcuauucaaaccagcgaugaaaucaaguggugcucccccgaccagcucgugaaccugcacgacuuccauucugaugagauugagcaccuugucguggaggaacugguuaaaaagcgcgaagagugccucgacgcccuggaaacaaucaugacgaccaaaagcguguccuuuagacggcuuagccaucugcgcaagcucgucccuggauucggcaaggcguauacaaucuucaauaaaacccugauggaggccgaugcucacuacaagucuauuagaacauggaacgagaucauucccuccaaagggugucugcgggugggaggccgcugccacccccauguuaaugggguguuuuucaacggaaucauucucggcccugacggccacguccugaucccggaaaugcagagcucucuucugcaucagcacauggagcuccuggaaagcuccgugaucccccuuaugcauccucuggccgaucccucuaccgucuuuaaggacggggaugaggcugaagacuucguggagguucaccucccugaugugcacaaacaaauuagcggagucgaccugggccugcccaauugggggaaguaugugcucaucuccgccggagcgcugacggcccuuaugcugaugauuuuucucaugacauguugcagaaagaccaaccgggcugagagcauccagcauucuccgggcgaaaccgggagaaaaguuuccgugacaagccacaacggccgcgucauuucuuccugggagagcuacaaguccggaggcgaaaccaaacuguga

SEQ ID NO: 223245 - RNA, 1575 nt, Artificial Sequence
  derived and/or modified CDS sequence (opt5) from glycoprotein__RABV__JN936713.1
auggugccccaggccguccuguucguuccucuccuggcugugccgcuuugcuuuggcaaguuccccaucuacaccauuccugacaaacuggggcccuggagcccuaucgauauucaccaucucuccugucccaacaaucugguggucgaggacgaaggaugcacaaaccuuucuggcuuuagcuauauggagcugaaggugggguacaucuccgccauuaaaguuaauggauucacguguaccggcguggucacagaagcggagaccuauacaaacuuugugggguacguuaccacaaccuucaagagaaaacacuuucggccuacgccggaugcuugccgcucugccuauaauuggaagauggccggagaccccagauacgaagagagccuccauaacccuuaucccgauuaccacuggcugcggaccgugcgcacaaccaaggaguccuucgucaucaucucuccuagcguggcugaccuggaucccuacgacaaaucccuccauagcagaguguuuccgcggggcaaguguucuggcauuacagucuccagcaccuauugcucuacgaaucacgauuacacaaucuggaugccugaaaacccccgccuggggaccuccugugacauuuucacaaauagcagaggaaaacgggccucuaagggcuccaaaaccugcggguuuguugaugagcgcggacuuuauaagagccugaagggcgcuuguaaacucaagcugugcggggugcuuggacugagacucauggacggcaccuggguggccauccaaacauccgaugaaacgaaaugguguccucccgaccagcuggucaaccugcacgacuuccauucugaugagauugagcaccucgugguugaggaacuggugaagaaacgggaagagugccuugacgcgcuggaaagcaucaugaccacaaaguccgucagcuuucgcagacucucucaucugcggaaacuugugcccggcuucgggaaggccuacaccauuuucaauaagacacugauggaggcugaugcccacuauaaauccguucgcaccuggaacgagaucaucccuagcaagggaugccucagagugggcgggcggugucacccgcaugucaauggaguguuuuucaacggcauuauccuggggcccgacggacacguccugauuccugaaaugcagucuagccuccugcagcaacauauggagcuucuggaauccucugugaucccccucaugcacccucuggcugaucccagcacgguuuuuaaagacggcgaugaggccgaagacuucguggagguccaucuuccggaugugcacaagcagguuuccggcguggaccuggggcucccuagcuggggaaaauacguccugaugucugcgggcauucugacagcccucaugcugaugaucuuucuuaugaccugcuguagacgcaccaaucgggcugaguccauccagcacagccugggggaaacaggaagaaaggugucugugaccucccagaacggccgcguuauuagcuccugggagucuuauaagagcgggggcgaaacaaaacucuga

SEQ ID NO: 223246 - RNA, 1575 nt, Artificial Sequence; identical to SEQ ID NO: 222911
  derived and/or modified CDS sequence (opt5) from glycoprotein__RABV__JN936714.1

SEQ ID NO: 223247 - RNA, 1575 nt, Artificial Sequence
  derived and/or modified CDS sequence (opt5) from glycoprotein__RABV__JN936715.1
auggugccccaggcccuccuguucgucccucugcuugcuguuccgcugugcuuuggcaaguuccccaucuacaccauuccugacaaacucgggcccuggagcccuaucgauauucaccaucuguccugucccaacaaucuugugguggaggacgaaggaugcacaaaccugucuggcuuuagcuauauggagcucaaggucggguacaucuccgccauuaaagugaauggauucacguguaccggcguugugacagaagcggagaccuauacaaacuuugucggguacgugaccacaaccuucaagagaaaacacuuucggccuacgccggaugcuugccgcucugccuauaauuggaagauggccggagaccccagauacgaagagagccugcauaacccuuaucccgauuaccacuggcugcggaccguuaagacaaccaaagaguccuucgugaucaucucuccuagcgucgcugaccucgaucccuacgacaagucccugcauagccgcguguuuccgagaggcaaauguucuggcauuacaguguccagcaccuauugcucuacgaaucacgauuacacaaucuggaugccugaaaacccccggcuugggaccuccugugacauuuucacaaauagccgcggaaagagagccucuaaaggcuccaagaccugcggguuugucgaugagcggggacuguauaagagccucaaaggcgcuuguaagcugaaacuuugcgggguucugggacuccgccugauggacggcaccuggguggccauccaaacauccgaugaaacgaagugguguccucccgaccagcuggugaaccuccacgacuuccauucugaugagauugagcaccuggucguggaggaacuuguuaaaaagagagaagagugccuggacgcgcucgaaagcaucaugaccacaaaauccgugagcuuucggcgccugucucaucuuagaaagcugguccccggcuucgggaaggccuacaccauuuucaauaaaacacucauggaggcugaugcccacuauaaguccgugcggaccuggaacgagaucaucccuagcaaaggaugccugcgcguuggcgggagaugucacccgcaugugaauggagucuuuuucaacggcauuauccuggggcccgacggacacgugcucauuccugaaaugcagucuagccugcuucagcaacauauggagcugcucgaauccucugucaucccccugaugcacccucuugcugaucccagcacgguguuuaaggacggcgaugaggccgaagacuucguugaggugcaucugccggauguccacaaacagguguccggcguugaccucgggcugccuagcuggggaaaguacgugcugaugucugcgggcauucucacagcccugaugcuuaugaucuuucugaugaccugcugucggagaaccaaucgcgcugaguccauccagcacagccucggggaaacaggacggaaggucucugugaccucccagaacggcagagugauuagcuccugggagucuuauaaaagcgggggcgaaacaaagcuguga

SEQ ID NO: 223248 - RNA, 1575 nt, Artificial Sequence
  derived and/or modified CDS sequence (opt5) from glycoprotein__RABV__JN936716.1
augaucccccaggugcugcuccuggucccucuucugguuuucagcuccugcuuuggcaaguucccgauuuacaccauccccgacaaacucgggccuuggucucccauugauauccaccaucugagcuguccuaacaaucuugugguggaggacgaaggaugcacaaaccuguccggcuuuucuuauauggagcucaaggucggguacauuagcgccaucaaagugaauggauucacguguaccggcguugugacagaagcugagaccuauacaaacuuugucggguacgugaccacaaccuucaagagaaaacacuuucggcccaugccugaugccugccgcgcggcuuauaauuggaagauggccggagacccgagauacgaagagucccugcauaaccccuauccugauuaccacuggcugcggacgguuaagaccacaaaagagucucucgugaucauuagccccuccgucgccgaccuggauccuuacgacaagagccuucauucucgcguguuccccggcggcaaauguuccgggaucaccgugagcucuacaugcuguuccaccaaucacgauuauacgauuuggaugccggaaaacccuagacugggaacaagcugcgacaucuuuaccaauucucggggcaagcgcgcuuccaaagggggaaagacauguggcuucgucgaugagagagggcucuacaagagccugaaaggagccugcaaacuuaagcuguguggcguucucggccugcggcugauggacgggaccuggguggcuauucaaaccuccgaugaaaucaaguggugcucucccgaccagcucgugaaccugcacgacuuucauagcgaugagauugagcaccuugucguggaggaacugguuaaaaagcgcgaagagugccucgacgcccuggaaacaaucaugacgaccaaauccgugagcuucagacggcuuucucaucugcgcaagcucgucccuggauuuggcaaggcguauacaaucuucaauaaaacccugauggaggccgaugcucacuacaaguccauuagaacauggaacgagaucauucccagcaaagggugucugcgggugggaggccgcugccacccccauguuaaugggguguucuuuaacggaaucauucucggcccugacggccacguccugaucccggaaaugcagucuagccuucugcaucagcacauggagcuccuggaauccucugugaucccccuuaugcauccucuggccgaucccagcaccgucuucaaggacggggaugaggcugaagacuuuguggagguucaccucccugaugugcacaaacaaauuuccggagucgaccugggccugcccaauugggggaaguaugugcucaucagcgccggagcgcugacggcccuuaugucuaugauuuuccugaugacauguugcagaaagaccaaccgggcugaguccauccagcauagcccgggcgaaaccgggagaaaaguuucugugacaucccacaacggccgcgucauuagcuccugggagucuuacaagagcggaggcgaaaccaaacucuga

SEQ ID NO: 223249 - RNA, 1575 nt, Artificial Sequence
  derived and/or modified CDS sequence (opt5) from glycoprotein__RABV__JN936717.1
augaucccccaggcccugcuccuggugccucuucuggucuucagcuccugcuuuggcaaguucccgauuuacaccauccccgacaaacucgggccuuggucucccauugauauccaccaucugagcuguccuaacaaucuuguuguggaggacgaaggaugcacaaaccuguccggcuuuucuuauauggagcucaaggugggguacauuagcgcuaucaaagucaauggauucacguguaccggcgugguuacagaagccgagaccuauacaaacuuugugggguacgucaccacaaccuucaagagaaaacacuuucggcccaugccugaugcgugccgcgcugccuauaauuggaagauggccggagacccgagauacgaagagucccugcauaaccccuauccugauuaccacuggcugcggacggugaagaccacaaaagagucucucguuaucauuagccccuccguggcugaccuggauccuuacgacaagagccuucauucucgcgucuuccccggcggcaaauguuccgggaucaccgugagcucuacaugcuguuccaccaaucacgauuauacgauuuggaugccggaaaacccuagacugggaacaagcugcgacaucuuuaccaauucucggggcaagcgcgccuccaaagggggaaagacauguggcuucguggaugagagagggcucuacaagagccugaaaggagcuugcaaacuuaagcuguguggcguccucggccugcggcugauggacgggaccuggguugccauucaaaccuccgaugaaaucaaguggugcucucccgaccagcucgugaaccugcacgacuuucauagcgaugagauugagcaccuuguggucgaggaacuggugaaaaagcgcgaagagugccucgacgcgcuggaaacaaucaugacgaccaaauccguuagcuucagacggcuuucucaucugcgcaagcucgugccuggauuuggcaaggccuauacaaucuucaauaaaacccugauggaggcugaugcccacuacaaguccauuagaacauggaacgagaucauucccagcaaagggugucugcgggucggaggccgcugccacccccaugugaaugggguuuucuuuaacggaaucauucucggcccugacggccacgugcugaucccggaaaugcagucuagccuucugcaucagcacauggagcuccuggaauccucugucaucccccuuaugcauccucuggcugaucccagcaccguguucaaggacggggaugaggccgaagacuuugucgaggugcaccucccugauguucacaaacaaauuuccggaguggaccugggccugcccaauugggggaaguauguccucaucagcgcgggagcccugacggcucuuaugucuaugauuuuccugaugacauguugcagaaagaccaaccgggccgaguccauccagcauagcccgggcgaaaccgggagaaaagugucuguuacaucccacaacggccgcgugauuagcuccugggagucuuacaagagcggaggcgaaaccaaacucuga

SEQ ID NO: 223250 - RNA, 1575 nt, Artificial Sequence
  derived and/or modified CDS sequence (opt5) from glycoprotein__RABV__JN936718.1
augaucccccaggugcugcuccuggucccucuucugguuuucagcuccugcuuuggcaaguucccgauuuacaccauccccgacaaacucgggccuuggucucccauugauauccaccaucugagcuguccuaacaaucuugugguggaggacgaaggaugcacaaaccuguccggcuuuucuuauauggagcucaaggucggguacauuagcgccaucaaagugaauggauucacguguaccggcguugugacagaagcugagaccuauacaaacuuugucggguacgugaccacaaccuucaagagaaaacacuuucggcccaugccugaugccugccgcgcggcuuauaauuggaagauggccggagacccgagauacgaagagucccugcauaaccccuauccugauuaccacuggcugcggacgguuaagaccacaaaagagucucucgugaucauuagccccuccgucgccgaccuggauccuuacgacaagagccuucauucucgcguguuccccggcggcaaauguuccgggaucaccgugagcucuacaugcuguuccaccaaucacgauuauacgauuuggaugccggaaaacccuagacugggaacaagcugcgacaucuuuaccaauucucggggcaagcgcgcuuccaaagggggacaaacauguggcuucgucgaugagagagggcucuacaagagccugaagggagccugcaaacuuaagcuguguggcguucucggccugcggcugauggacgggaccuggguggcuauucagaccuccgaugaaaucaaauggugcucucccgaccagcucgugaaccugcacgacuuucauagcgaugagauugagcaccuugucguggaggaacugguuaagaaacgcgaagagugccucgacgcccuggaaacaaucaugacgaccaaguccgugagcuucagacggcuuucucaucugcgcaaacucgucccuggauuuggcaaggcguauacaaucuucaauaagacccugauggaggccgaugcucacuacaaauccauuagaacauggaacgagaucauucccagcaaggggugucugcgggugggaggccgcugccacccccauguuaaugggguguucuuuaacggaaucauucucggcccugacggccacguccugaucccggaaaugcagucuagccuucugcaucaacacauggagcuccuggaauccucugugaucccccuuaugcauccucuggccgaucccagcaccgucuucaaagacggggaugaggcugaagacuuuguggagguucaccucccugaugugcacaagcagauuuccggagucgaccugggccugcccaauugggggaaauaugugcucaucagcgccggagcgcugacggcccuuaugucuaugauuuuccugaugacauguugcagaaagaccaaccgggcugaguccauccagcauagcccgggcgaaaccgggagaaagguuucugugacaucccacaacggccgcgucauuagcuccugggagucuuacaaaagcggaggcgaaaccaagcucuga

SEQ ID NO: 223251 - RNA, 1575 nt, Artificial Sequence
  derived and/or modified CDS sequence (opt5) from glycoprotein__RABV__JN936719.1
augaucccccaggcccugcucuuugugccucugcuugcugucccgcugugcuuuggcaaguuccccauuuacaccaucccugacaaacucgggcccuggagcccuauugauauccaccaucuguccugucccaacaaucuuguuguggaggacgaaggaugcacaaaccugucuggcuuuagcuauauggagcucaaggugggguacauuuccgccaucaaagucaauggauucacguguaccggcgugguuacagaagcggagaccuauacaaacuuugugggguacgucaccacaaccuucaagagaaaacacuuucggccuacgccggaugcuugccgcucugccuauaauuggaagauggccggagaccccagauacgaagagagccugcauaacccuuaucccgauuaccacuggcugcggaccgugaagacaaccaaagaguccuucguuaucauuucuccuagcguggcugaccucgaucccuacgacaagucccugcauagccgcgucuuuccgagaggcaaauguucuggcaucacaguguccagcaccuauugcucuacgaaucacgauuacacaauuuggaugccugaaaacccccggcuugggaccuccugugacaucuucacaaauagccgcggaaagagagccucuaaaggcuccaagaccugcggguuuguggaugagcggggacuguauaagagccucaaaggcgcuuguaagcugaaacuuugcgggguccugggacuccgccugauggacggcaccuggguugccauucaaacauccgaugaaacgaagugguguccucccgaccagcuggugaaccuccacgacuuccauucugaugagaucgagcaccugguggucgaggaacuugugaaaaagagagaagagugccuggacgcgcucgaaagcauuaugaccacaaaauccguuagcuuucggcgccugucucaucuuagaaagcuggugcccggcuucgggaaggccuacaccaucuucaauaaaacacucauggaggcugaugcccacuauaaguccauccggaccuggaacgagauuaucccuagcaaaggaugccugcgcgucggcgggagaugucacccgcaugugaauggaguuuucuucaacggcauuauccuggggcccgacggacacgugcucauuccugaaaugcagucuagccugcuucaucagcacauggagcugcucgaauccucugucaucccccugaugcauccucuugcugaucccagcacgguguuuaaggacggcgaugaggccgaagacuucgucgaggugcaucugccggauguucacaaacaaaucuccggcguggaccucgggcugccuagcuggggaaaguacguccugaugucugcgggcgcccucacagcucugaugcuuaugauuuuucugaugaccugcugucggagaaccaaucgcgccgaguccauccagcacagccucggggaaacaggacggaaggugucuguuaccucccagaacggcagagugauuagcuccugggagucuuauaaaagcgggggcgaaacaaagcuguga

SEQ ID NO: 223252 - RNA, 1575 nt, Artificial Sequence
  derived and/or modified CDS sequence (opt5) from glycoprotein__RABV__JN936720.1
augaucccccaggcccuccuguucgugccucugcuugucuuuccgcugugcuucggcaaguuucccauuuacaccaucccugacaaacucgggcccuggagcccuauugauauccaccaucuguccugucccaacaaucuuguuguggaggacgaaggaugcacaaaccugucuggcuucagcuauauggagcucaaggugggguacauuuccgcuaucaaagucaauggauuuacguguaccggcgugguuacagaagccgagaccuauacaaacuucgugggguacgucaccacaaccuuuaagagaaaacacuuccggccuacgccggaugcgugccgcucugcuuauaauuggaagauggccggagaccccagauacgaagagagccugcauaacccuuaucccgauuaccacuggcugcggaccgugaagacaaccaaagaguccguugugaucauuucuccuagcgucgccgaccucgaucccuacgacaagucccugcauagccgcguguuuccgagaggcaaauguucuggcaucacaguguccagcgcuuauugcucuaccaaucacgauuacacgauuuggaugccugaaaacccccggcuugggacauccugugacaucuucaccaauagccgcggaaagagagccucuaaaggcuccaagacaugcggguuugucgaugagcggggacuguauaagagccucaaaggcgcuuguaagcugaaacuuugcgggguucugggacuccgccugauggacggcaccuggguggccauucaaaccuccaacgaaacaaagugguguccucccgaucagcuggugaaucuccacgacuuccauucugacgagaucgagcaccuggucguggaggaacuuguugaaaagagagaggaaugccuggaugcgcucgagagcauuaugacgaccaaguccgugagcuuucggcgccugucucaucuuagaaaacugguccccggcuucgggaaggccuacacaaucuucaacaagacccucauggaggcugacgcccacuauaaauccgugcggacauggaaugaaaucauuccuagcaagggaugccugcgcguuggcgggagaugucacccgcaugugaacggagucuuuuucaauggcaucauucuggggcccgauggacacgugcucaucccugagaugcagucuagccugcuucagcaacauauggaacugcucgaguccucugucauuccccugaugcacccucuugcugaccccagcaccguguuuaaagauggcgacgaagccgaggauuucguugaggugcaucugccggacguccacaaacagguguccggcguugaucucgggcugccuagcuggggaaaauacgugcugaugucugcgggcauccucacggcccugaugcuuaugaucuuucugaugacaugcugucggagaaccaaccgcgcugaauccauucagcacagccucggggagaccggacggaaggucucugugacaucccagaacggcagagugaucagcuccugggaaucuuauaagagcgggggcgagaccaaacuguga

SEQ ID NO: 223253 - RNA, 1575 nt, Artificial Sequence
  derived and/or modified CDS sequence (opt5) from glycoprotein__RABV__JN936721.1
augaucccccaggcccugcuguucgugccucugcuugucuuuccgcugugcuucggcaaguuucccauuuacaccaucccugacaaacucgggcccuggagcccuauugauauccaccaucuguccugucccaacaaucuuguuguggaggacgaaggaugcacaaaccugucuggcuucagcuauauggagcucaaggugggguacauuuccgcuaucaaagucaauggauuuacguguaccggcgugguuacagaagccgagaccuauacaaacuucgugggguacgucaccacaaccuuuaagagaaaacacuuccggccuacgccggaugcgugccgcucugcuuauaauuggaagauggccggagaccccagauacgaagagagccugcauaacccuuaucccgauuaccacuggcugcggaccgugaagacaaccaaagaguccguugugaucauuucuccuagcgucgccgaccucgaucccuacgacaagucccugcauagccgcguguuuccgagaggcaaauguucuggcaucacaguguccagcgcuuauugcucuaccaaucacgauuacacgauuuggaugccugaaaacccccggcuugggacauccugugacaucuucaccaauagccgcggaaagagagccucuaaaggcuccaagacaugcggguuugucgaugagcggggacuguauaagagccucaaaggcgcuuguaagcugaaacuuugcgggguucugggacuccgccugauggacggcaccuggguggccauucaaaccuccaacgaaacaaagugguguccucccgaucagcuggugaaucuccacgacuuccauucugacgagaucgagcaccuggucguggaagaacuuguugagaaaagagaggaaugccuggaugcgcucgagacgauuaugaccacaaagagcguguccuuucggcgccugagccaucuuagaaaacugguccccggcuucgggaaggccuacaccaucuucaacaagacacucauggaggcugacgcccacuauaaaucuauccggaccuggaaugaaauuaucccuuccaagggaugccugcgcgugggcgggagaugucacccgcauguuaacggaguguuuuucaauggcauuauccuggggcccgauggacacguccucauuccugagaugcagagcucucugcuucaucagcacauggaacugcucgagagcuccgugaucccccugaugcauccucuugcugaccccucuacggucuuuaaagauggcgacgaagccgaggauuucguggagguucaccucccggacgugcacaagcaaaucagcggcgucgaucucgggcugccuaacuggggaaaauacgugcugauuuccgcgggcgcccucacagcucugaugagcaugaucuuucuuaugaccugcugucggaagaccaacagagccgaaucuauucagcauucccccggggagacaggacgcaagguuagcgugaccucucacaauggccgggucaucuccagcugggaauccuauaaaucugggggcgagacaaagcuguga

SEQ ID NO: 223254 - RNA, 1575 nt, Artificial Sequence
  derived and/or modified CDS sequence (opt5) from glycoprotein__RABV__JN936722.1
augaucccccaggcccugcuguucgugccucugcuugucuuuccgcugugcuucggcaaguuucccauuuacaccaucccugacaaacucgggcccuggagcccuauugauauccaccaucuguccugucccaacaaucuuguuguggaggacgaaggaugcacaaaccugucuggcuucagcuauauggagcucaaggugggguacauuuccgcuaucaaagucaauggauuuacguguaccggcgugguuacagaagccgagaccuauacaaacuucgugggguacgucaccacaaccuuuaagagaaaacacuuccggccuacgccggaugcgugccgcucugcuuauaauuggaagauggccggagaccccagauacgaagagagccugcauaacccuuaucccgauuaccacuggcugcggaccgugaagacaaccaaagaguccguugugaucauuucuccuagcgucgccgaccucgaucccuacgacaagucccugcauagccgcguguuuccgagaggcaaauguucuggcaucacaguguccagcgcuuauugcucuaccaaucacgauuacacgauuuggaugccugaaaacccccggcuugggacauccugugacaucuucaccaauagccgcggaaagagagccucuaaaggcuccaagacaugcggguuugucgaugagcggggacuguauaagagccucaaaggcgcuuguaagcugaaacuuugcgggguucugggacuccgccugauggacggcaccuggguggccauucaaaccuccaacgaaacaaagugguguccucccgaucagcuggugaaucuccacgacuuccauucugacgagaucgagcaccuggucguggaagaacuuguugagaaaagagaggaaugccuggaugcgcucgagagcauuaugacgaccaaguccgugagcuuucggcgccugucucaucuuagaaaacugguccccggcuucgggaaggccuacacaaucuucaacaagacccucauggaggcugacgcccacuauaaauccauccggacauggaaugaaauuaucccuagcaagggaugccugcgcgugggcgggagaugucacccgcauguuaacggaguguuuuucaauggcauuauccuggggcccgauggacacguccucauuccugagaugcagucuagccugcuucaucagcacauggaacugcucgaguccucugugaucccccugaugcauccucuugcugaccccagcaccgucuuuaaagauggcgacgaagccgaggauuucguggagguucaccucccggacgugcacaagcaaaucuccggcgucgaucucgggcugccuaacuggggaaaauacgugcugauuagcgcgggcgcccucacggcucugaugucuaugaucuuucuuaugacaugcugucggaagaccaacagagccgaauccauucagcauagccccggggagaccggacgcaagguuucugugacaucccacaauggccgggucaucagcuccugggaaucuuauaaaagcgggggcgagaccaagcuguga

SEQ ID NO: 223255 - RNA, 1575 nt, Artificial Sequence
  derived and/or modified CDS sequence (opt5) from glycoprotein__RABV__JN936723.1
augaucccccaggcccugcuccuggugccucuucuggcuuucccgcucugcuuuggcaaguuccccauuuacaccaucccugacaaacuggggcccuggagcccuauugauauccaccaucuuuccugucccaacaaucuggucguugaggacgaaggaugcacaaaccucucuggcuuuagcuauauggagcugaaggugggguacauuuccgccaucaaagugaauggauucacguguaccggcgucgugacagaagcggagaccuauacaaacuuuguuggguacgugaccacaaccuucaagagaaaacacuuucggccuacgccggaugcuugccgcucugccuauaauuggaagauggccggagaccccagauacgaagagagccugcauaacccuuaucccgauuaccacuggcuccggaccgucaagacaaccaaagagucccuggugaucauuucuccuagcguugcugaccuugaucccuacgacaagucccugcauagccgcguguucccgagaggcaaauguucuggcaucacagucuccucuaccugcuguagcacgaaucacgauuauacaauuuggaugccugaaaacccccggcucgggaccuccugcgacaucuuuacaaauagccgcggaaagagagccucuaaaggcuccaagaccuguggguucguggaugagcggggacuguacaagagccuuaaaggcgcuugcaagcugaaacucuguggggugcugggacugcgccucauggacggcaccugggucgccauucaaacauccgaugaaaucaaguggugcccucccgaccagcugguuaaccuucacgacuuucauucugaugagauugagcaccuggugguggaggaacucgucaaaaagagagaagagugccuggacgcgcuugaaacgaucaugaccacaaaaagcguguccuuccggcgccugagccaucucagaaagcugguucccggcuuugggaaggccuauaccaucuucaauaaaacacugauggaggcugaugcccacuacaagucuauucggaccuggaacgagaucauuccuuccaaaggaugucuccgcgugggcgggagaugccacccgcaugucaauggaguguucuuuaacggcaucauucuggggcccgacggacacguucuuaucccugaaaugcagagcucucugcuccaucagcacauggagcugcuugaaagcuccgugaucccccugaugcauccucucgcugaucccucuacggucuucaaggacggcgaugaggccgaagacuuuguggagguccaucugccggaugugcacaaacaaauuagcggcguugaccuggggcucccuaauuggggaaaguaugugcugaucuccgcgggcgcccuuacagcucugaugagcaugauuuuccucaugaccuguugccggaagaccaacagagccgagucuauccagcacucccccggggaaacaggacgcaaagucagcgugaccucucacaacggccggguuauuuccagcugggaguccuacaagucugggggcgaaacaaaacuguga

SEQ ID NO: 223256 - RNA, 1575 nt, Artificial Sequence
  derived and/or modified CDS sequence (opt5) from glycoprotein__RABV__JN936724.1
augaucccccaggcccugcuguucgugccucugcuugucuuuccgcugugcuucggcaaguuucccauuuacaccaucccugacaaacucgggcccuggagcccuauugauauccaccaucuguccugucccaacaaucuuguuguggaggacgaaggaugcacaaaccugucuggcuucagcuauauggagcucaaggugggguacauuuccgcuaucaaagucaauggauuuacguguaccggcgugguuacagaagccgagaccuauacaaacuucgugggguacgucaccacaaccuuuaagagaaaacacuuccggccuacgccggaugcgugccgcucugcuuauaauuggaagauggccggagaccccagauacgaagagagccugcauaacccuuaucccgauuaccacuggcugcggaccgugaagacaaccaaagaguccguugugaucauuucuccuagcgucgccgaccucgaucccuacgacaagucccugcauagccgcguguuuccgagaggcaaauguucuggcaucacaguguccagcgcuuauugcucuaccaaucacgauuacacgauuuggaugccugaaaacccccggcuugggacauccugugacaucuucaccaauagccgcggaaagagagccucuaaaggcuccaagacaugcggguuugucgaugagcggggacuguauaagagccucaaaggcgcuuguaagcugaaacuuugcgggguucugggacuccgccugauggacggcaccuggguggccauucaaaccuccaacgaaacaaagugguguccucccgaucagcuggugaaucuccacgacuuccauucugacgagaucgagcaccuggucguggaagaacuuguugagaaaagagaggaaugccuggaugcgcucgagacgauuaugaccacaaagagcguguccuuucggcgccugagccaucuuagaaaacugguccccggcuucgggaaggccuacaccaucuucaacaagacacucauggaggcugacgcccacuauaaaucuauccggaccuggaaugaaauuaucccuuccaagggaugccugcgcgugggcgggagaugucacccgcauguuaacggaguguuuuucaauggcauuauccuggggcccgauggacacguccucauuccugagaugcagagcucucugcuucaucagcacauggaacugcucgagagcuccgugaucccccugaugcauccucuugcugaccccucuacggucuuuaaagauggcgacgaagccgaggauuucguggagguucaccucccggacgugcacaagcaaaucagcggcgucgaucucgggcugccuaacuggggaaaauacgugcugauuuccgcgggcgcccucacagcucugaugcuuaccaucuuucugaugaccugcugucggaagacaagcagagccgaaucuauucagcauucccccggggagaccggacgcaagguuagcgugacaucucacaacggccgggucaucuccagcugggaauccuauaaaucugggggcgagacgaagcucuga

SEQ ID NO: 223257 - RNA, 1575 nt, Artificial Sequence; identical to SEQ ID NO: 222918
  derived and/or modified CDS sequence (opt5) from glycoprotein__RABV__JN936725.1

SEQ ID NO: 223258 - RNA, 1575 nt, Artificial Sequence; identical to SEQ ID NO: 223139
  derived and/or modified CDS sequence (opt5) from glycoprotein__RABV__JN936726.1

SEQ ID NO: 223259 - RNA, 1575 nt, Artificial Sequence; identical to SEQ ID NO: 222918
  derived and/or modified CDS sequence (opt5) from glycoprotein__RABV__JN936727.1

SEQ ID NO: 223260 - RNA, 1575 nt, Artificial Sequence; identical to SEQ ID NO: 222918
  derived and/or modified CDS sequence (opt5) from glycoprotein__RABV__JN936728.1

SEQ ID NO: 223261 - RNA, 1575 nt, Artificial Sequence; identical to SEQ ID NO: 222918
  derived and/or modified CDS sequence (opt5) from glycoprotein__RABV__JN936729.1

SEQ ID NO: 223262 - RNA, 1575 nt, Artificial Sequence; identical to SEQ ID NO: 222917
  derived and/or modified CDS sequence (opt5) from glycoprotein__RABV__JN936731.1

SEQ ID NO: 223263 - RNA, 1575 nt, Artificial Sequence; identical to SEQ ID NO: 222917
  derived and/or modified CDS sequence (opt5) from glycoprotein__RABV__JN936732.1

SEQ ID NO: 223264 - RNA, 1575 nt, Artificial Sequence
  derived and/or modified CDS sequence (opt5) from glycoprotein__RABV__JN936733.1
augaucccccaggugcugcuguucgucccucugcuuguuuuuagcuccugcuucggcaaguuuccgauuuacaccauccccgacaaacuggggccuuggucucccauugauauccaccaucucagcuguccuaacaaucuggugguggaggacgaaggaugcacaaaccuuuccggcuucucuuauauggagcugaaggucggguacauuagcgccaucaaagugaauggauuuacguguaccggcguugugacagaagcugagaccuauacaaacuucgucggguacgugaccacaaccuuuaagagaaaacacuuccggcccaugccugaugccugccgcgcggcuuauaauuggaagauggccggagacccgagauacgaagagucccuccauaaccccuauccugauuaccacuggcugcggacgguuaagaccacaaaagagucucuggugaucauuagccccuccgucgccgaccucgauccuuacgacaagagccugcauucucgcguguuucccggcggcaaauguuccgggaucaccgugagcucuacaugcuguuccaccaaucacgauuauacgauuuggaugccggaaaacccuagacuuggaacaagcugcgacaucuucaccaauucucggggcaagcgcgcuuccaaagggggaaagacauguggcuuugucgaugagagagggcuguacaagagccucaaaggagccugcaagcugaaacuuuguggcguucugggccuccggcugauggacgggaccuggguggcuauucaaaccuccgaugaaaucaaguggugcucucccgaccagcuggugaaccuccacgacuuccauagcgaugagauugagcaccuggucguggaggaacuuguuaaaaagcgcgaagagugccuggacgcccucgaaacaaucaugacgaccaaauccgugagcuuuagacggcugucucaucuucgcaagcuggucccuggauucggcaaggcguauacaaucuucaauaaaacccucauggaggccgaugcucacuacaaguccauuagaacauggaacgagaucauucccagcaaagggugucugcgggugggaggccgcugccacccccauguuaaugggguguuuuucaacggaaucauucugggcccugacggccacguccucaucccggaaaugcagucuagccugcuucaucagcacauggagcugcucgaauccucugugaucccccugaugcauccucuugccgaucccagcaccgucuuuaaggacggggaugaggcugaagacuucguggagguucaccucccugaugugcacaaacaaauuuccggagucgaccucggccugcccaauugggggaaguaugugcugaucagcgccggagcgcucacggcccugaugcuuacaauuuuucugaugaccuguugcagaaagaccaaccgggcugagucuauccaucacuccccgggcgaaacagggagaaaaguuagcgugaccucucauaacggccgcgucauuuccagcugggaguccuacaagucuggaagcgaaacaaaacucuga

SEQ ID NO: 223265 - RNA, 1575 nt, Artificial Sequence; identical to SEQ ID NO: 223264
  derived and/or modified CDS sequence (opt5) from glycoprotein__RABV__JN936734.1

SEQ ID NO: 223266 - RNA, 1575 nt, Artificial Sequence; identical to SEQ ID NO: 222918
  derived and/or modified CDS sequence (opt5) from glycoprotein__RABV__JN936735.1

SEQ ID NO: 223267 - RNA, 1575 nt, Artificial Sequence; identical to SEQ ID NO: 222918
  derived and/or modified CDS sequence (opt5) from glycoprotein__RABV__JN936736.1

SEQ ID NO: 223268 - RNA, 1575 nt, Artificial Sequence
  derived and/or modified CDS sequence (opt5) from glycoprotein__RABV__JN936737.1
augaucccccaggugcuccuguucgucccucugcuuguuuuuagcuccugcuucggcaaguuuccgauuuacaccauccccgacaaacuggggccuuggucucccauugauauccaccaucucagcuguccuaacaaucuggugguggaggacgaaggaugcacaaaccuuuccggcuucucuuauauggagcugaaggucggguacauuagcgccaucaaagugaauggauuuacguguaccggcguugugacagaagcugagaccuauacaaacuucgucggguacgugaccacaaccuuuaagagaaaacacuuccggcccaugccugaugccugccgcgcggcuuauaauuggaagauggccggagacccgagauacgaagagucccuccauaaccccuauccugauuaccacuggcugcggacgguuaagaccacaaaagagucucuggugaucauuagccccuccgucgccgaccucgauccuuacgacaagagccugcauucucgcguguuucccggcggcaaauguuccgggaucaccgugagcucuacaugcuguuccaccaaucacgauuauacgauuuggaugccggaaaacccuagacuuggaacaagcugcgacaucuucaccaauucucggggcaagcgcgcuuccaaagggggaaagacauguggcuuugucgaugagagagggcuguacaagagccucaaaggagccugcaagcugaaacuuuguggcguucugggccuccggcugauggacgggaccuggguggcucugcaaaccuccgaugaaauuaaguggugcucucccgaccagcucgugaaccugcacgacuuccauagcgaugagaucgagcaccuugucguggaggaacugguuaaaaagcgcgaagagugccucgacgcccuggaaacaauuaugacgaccaaauccgugagcuuuagacggcuuucucaucugcgcaagcucgucccuggauucggcaaggcguauacaaucuucaauaaaacccugauggaggccgaugcucacuacaaguccaucagaacauggaacgagauuauccccagcaaagggugucugcgggugggaggccgcugccacccccauguuaaugggguguuuuucaacggaauuauccucggcccugacggccacguccugauuccggaaaugcagucuagccuucugcaucagcacauggagcuccuggaauccucugugaucccccuuaugcauccucuggccgaucccagcaccgucuuuaaggacggggaugaggcugaagacuucguggagguucaccucccugaugugcacaaacaaaucuccggagucgaccugggccugcccaauugggggaaguaugugcucauuagcgccggagcgcugacggcccuuaugcugacaaucuuucucaugaccuguugcagaaagaccaaccgggcuggcucuauucagcauuccccgggggagacaggcagaaaaguuagcgugaccucucacaacggacgcgucaucuccagcugggaauccuacaagucuggcagcgagacaaaacuguga

SEQ ID NO: 223269 - RNA, 1575 nt, Artificial Sequence; identical to SEQ ID NO: 222917
  derived and/or modified CDS sequence (opt5) from glycoprotein__RABV__JN936738.1

SEQ ID NO: 223270 - RNA, 1575 nt, Artificial Sequence; identical to SEQ ID NO: 222917
  derived and/or modified CDS sequence (opt5) from glycoprotein__RABV__JN936739.1

SEQ ID NO: 223271 - RNA, 1575 nt, Artificial Sequence; identical to SEQ ID NO: 222917
  derived and/or modified CDS sequence (opt5) from glycoprotein__RABV__JN936740.1

SEQ ID NO: 223272 - RNA, 1575 nt, Artificial Sequence; identical to SEQ ID NO: 222917
  derived and/or modified CDS sequence (opt5) from glycoprotein__RABV__JN936741.1

SEQ ID NO: 223273 - RNA, 1575 nt, Artificial Sequence; identical to SEQ ID NO: 222917
  derived and/or modified CDS sequence (opt5) from glycoprotein__RABV__JN936742.1

SEQ ID NO: 223274 - RNA, 1575 nt, Artificial Sequence; identical to SEQ ID NO: 222917
  derived and/or modified CDS sequence (opt5) from glycoprotein__RABV__JN936743.1

SEQ ID NO: 223275 - RNA, 1575 nt, Artificial Sequence
  derived and/or modified CDS sequence (opt5) from glycoprotein__RABV__JN936744.1
augauccuucaggugcuccuguucgucccccuucugguuuuuagcuccugcuucggcaaguuuccuauuuacaccaucccggacaaacucgggcccuggucuccuauugauauccaccaucugagcugucccaacaaucuugugguggaggacgaaggaugcacaaaccuguccggcuucucuuauauggagcucaaggucggguacauuagcgccaucaaagugaauggauuuacguguaccggcguugugacagaagcugagaccuauacaaacuucgucggguacgugaccacaaccuuuaagagaaaacacuuccggccuaugcccgaugccugccgcgcggcuuauaauuggaagauggccggagacccuagauacgaagagucccugcauaacccguaucccgauuaccacuggcugcggacgguuaagaccacaaaagagucucucgugaucauuagcccuuccgucgccgaccuggaucccuacgacaagagccuucauucucgcguguuuccuggcggcaaauguuccgggaucaccgugagcucuacaugcuguuccaccaaucacgauuauacgauuuggaugcccgaaaacccgagacugggaacaagcugcgacaucuucaccaauucucggggcaagcgcgcuuccaaagggggaaagacauguggcuuugucgaugagagagggcucuacaagagccugaaaggagccugcaagcugaaacuguguggcguucucggccugcggcugauggacgggaccuggguggcuauucaaaccuccgaugaaaucaaguggugcccucccgaccagcucgugaaccugcacgacuuccauucugaugagauugagcaccuugucguggaggaacugguuaaaaagcgcgaagagugccucgacgcccuggaaacaaucaugacgaccaaaagcguguccuuuagacggcuuagccaucugcgcaagcucgucccuggauucggcaaggcguauacaaucuucaauaaaacccugauggaggccgaugcucacuacaagucuauuagaacauggaacgagaucauucccuccaaagggugucugcgggugggaggccgcugccacccccauguuaaugggguguuuuucaacggaaucauucucggcccugacggccacguccugaucccggaaaugcagagcucucuucugcaucagcacauggagcuccuggaaagcuccgugaucccccuuaugcauccucuggccgaucccucuaccgucuuuaaggacggggaugaggcugaagacuucguggagguucaccucccugaugugcacaaacaaauuagcggagucgaccugggccugcccaauugggggaaguaugugcucaucuccgccggagcgcugacggcccuuaugcugaugauuuuucucaugacauguugcagaaagaacaaccgggcugagagcauccagcauucuccgggcgaaaccgggagaaaaguuuccgugaccagccacaauggccgcgucauuucuuccugggagagcuacaaguccggaggcgaaacaaaacuguga

SEQ ID NO: 223276 - RNA, 1575 nt, Artificial Sequence; identical to SEQ ID NO: 223156
  derived and/or modified CDS sequence (opt5) from glycoprotein__RABV__JN936745.1

SEQ ID NO: 223277 - RNA, 1575 nt, Artificial Sequence
  derived and/or modified CDS sequence (opt5) from glycoprotein__RABV__JN936746.1
augaucccccaggugcugcuguucgucccucugcuuguuuuuagcuccugcuucggcaaguuuccgauuuacaccauccccgacaaacuggggccuuggucucccauugauauccaccaucucagcuguccuaacaaucuggugguggaggacgaaggaugcacaaaccuuuccggcuucucuuauauggagcugaaggucggguacauuagcgccaucaaagugaauggauuuacguguaccggcguugugacagaagcugagaccuauacaaacuucgucggguacgugaccacaaccuuuaagagaaaacacuuccggcccaugccugaugccugccgcgcggcuuauaauuggaagauggccggagacccgagauacgaagagucccuccauaaccccuauccugauuaccacuggcugcggacgguuaagaccacaaaagagucucuggugaucauuagccccuccgucgccgaccucgauccuuacgacaagagccugcauucucgcguguuucccggcggcaaauguuccgggaucaccgugagcucuacaugcuguuccaccaaucacgauuauacgauuuggaugccggaaaacccuagacuuggaacaagcugcgacaucuucaccaauucucggggcaagcgcgcuuccaaagggggaaagacauguggcuuugucgaugagagagggcuguacaagagccucaaaggagccugcaagcugaaacuuuguggcguucugggccuccggcugauggacgggaccuggguggcuauucaaaccuccgaugaaaucaaguggugcucucccgaccagcuggugaaccuccacgacuuccauagcgaugagauugagcaccuggucguggaggaacuuguuaaaaagcgcgaagagugccuggacgcccucgaaacaaucaugacgaccaaauccgugagcuuuagacggcugucucaucuucgcaagcuggucccuggauucggcaaggcguauacaaucuucaauaaaacccucauggaggccgaugcucacuacaaguccauuagaacauggaacgagaucauucccagcaaagggugucugcgggugggaggccgcugccacccccauguuaaugggguguuuuucaacggaaucauucugggcccugacggccacguccucaucccggaaaugcagucuagccugcuucaucagcacauggagcugcucgaauccucugugaucccccugaugcauccucuugccgaucccagcaccgucuuuaaggacggggaugaggcugaagacuucguggagguucaccucccugaugugcacaaacaaauuuccggagucgaccucggccugcccaauugggggaaguaugugcugaucagcgccggagcgcucacggcccugaugcuuaugauuuuucugaugacauguugcagaaacaccaaccgggcugagucuauccagcauuccccgggcgaaaccgggagaaagguuagcgugacaucucacaauggccgcgucauuuccagcugggaguccuacaaaucuggaggcgaaaccaagcucuga

SEQ ID NO: 223278 - RNA, 1575 nt, Artificial Sequence
  derived and/or modified CDS sequence (opt5) from glycoprotein__RABV__JN936747.1
augauccuucaggugcuccuguucgucccccuucugguuuuuagcuccugcuucggcaaguuuccuauuuacaccaucccggacaaacucgggcccuggucuccuauugauauccaccaucugagcugucccaacaaucuugugguggaggacgaaggaugcacaaaccuguccggcuucucuuauauggagcucaaggucggguacauuagcgccaucaaagugaauggauuuacguguaccggcguugugacagaagcugagaccuauacaaacuucgucggguacgugaccacaaccuuuaagagaaaacacuuccggccuaugcccgaugccugccgcgcggcuuauaauuggaagauggccggagacccuagauacgaagagucccugcauaacccguaucccgauuaccacuggcugcggacgguuaagaccacaaaagagucucucgugaucauuagcccuuccgucgccgaccuggaucccuacgacaagagccuucauucucgcguguuuccuggcggcaaauguuccgggaucaccgugagcucuacaugcuguuccaccaaucacgauuauacgauuuggaugcccgaaaacccgagacugggaacaagcugcgacaucuucaccaauucucggggcaagcgcgcuuccaaagggggaaagacauguggcuuugucgaugagagagggcucuacaagagccugaaaggagccugcaagcugaaacuguguggcguucucggccugcggcugauggacgggaccuggguggcuauucaaaccuccgaugaaaucaaguggugcccucccgaccagcucgugaaccugcacgacuuccauucugaugagauugagcaccuugucguggaggaacugguuaaaaagcgcgaagagugccucgacgcccuggaaacaaucaugacgaccaaaagcguguccuuuagacggcuuagccaucugcgcaagcucgucccuggauucggcaaggcguauacaaucuucaauaaaacccugauggaggccgaugcucacuacaagucuauuagaacauggaacgagaucauucccuccaaagggugucugcgggugggaggccgcugccacccccauguuaaugggguguuuuucaacggaaucauucucggcccugacggccacguccugaucccggaaaugcagagcucucuucugcaucagcacauggagcuccuggaaagcuccgugaucccccuuaugcauccucuggccgaucccucuaccgucuuuaaggacggggaugaggcugaagacuucguggagguucaccucccugaugugcacaaacaaauuagcggagucgaccugggccugcccaauugggggaaguaugugcucaucuccgccggagcgcugacggcccuuaugcugaugauuuuucucaugacauguugcagaaagaacaaccgggcugagagcauccagcauucuccgggcgaaaccgggagaaaaguuuccgugaccagccacaauggccgcgucacaucuuccugggagagcuacaaguccggaggcgaaaccaaacuguga

SEQ ID NO: 223279 - RNA, 1575 nt, Artificial Sequence; identical to SEQ ID NO: 223156
  derived and/or modified CDS sequence (opt5) from glycoprotein__RABV__JN936748.1

SEQ ID NO: 223280 - RNA, 1575 nt, Artificial Sequence; identical to SEQ ID NO: 223156
  derived and/or modified CDS sequence (opt5) from glycoprotein__RABV__JN936749.1

SEQ ID NO: 223281 - RNA, 1575 nt, Artificial Sequence; identical to SEQ ID NO: 223156
  derived and/or modified CDS sequence (opt5) from glycoprotein__RABV__JN936750.1

SEQ ID NO: 223282 - RNA, 1575 nt, Artificial Sequence; identical to SEQ ID NO: 223156
  derived and/or modified CDS sequence (opt5) from glycoprotein__RABV__JN936751.1

SEQ ID NO: 223283 - RNA, 1575 nt, Artificial Sequence
  derived and/or modified CDS sequence (opt5) from glycoprotein__RABV__JN936753.1
augaucccccaggugcuccuguucgucccucugcuuguuuuuagcuccugcuucggcaaguuuccgauuuacaccauccccgacaaacuggggccuuggucucccauugauauccaccaucucagcuguccuaacaaucuggugguggaggacgaaggaugcacaaaccuuuccggcuucucuuauauggagcugaaggucggguacauuagcgccaucaaagugaauggauuuacguguaccggcguugugacagaagcugagaccuauacaaacuucgucggguacgugaccacaaccuuuaagagaaaacacuuccggcccacgccugaugccugccgcgcggcuuauaauuggaagauggccggagacccgagauacgaagagucccucaacaaucccuauccugauuaccauuggcugcggaccguuaagacaucuaaagagagccuggugaucauuucccccagcgucgccgaccucgauccuuacgacaagucucugcacucccgcguguuucccggcggcaaauguagcgggaucaccgugucuuccacaugcuguagcaccaaccaugauuauacgauuuggaugccggaaaauccuagacuuggaacaucuugcgacaucuucaccaacucccggggcaagcgcgcuagcaaagggggaaagacauguggcuuugucgaugagagagggcuguacaagucccucaaaggagccugcaagcugaaacuuuguggcguucugggccuccggcugauggacgggaccuggguggcuauucaaaccucugaugaaaucaaguggugcagccccgaccagcuggugaaucuccacgacuuccacuccgaugagauugagcaucuggucguggaggaacuuguuaaaaagcgcgaagagugccuggacgcccucgaaacaaucaugacgaccaaaagcgugucuuuuagacggcugucccaccuucgcaagcuggucccuggauucggcaaggcguauacaaucuucaacaaaacccucauggaggccgaugcucauuacaagagcauuagaacauggaaugagaucauucccucuaaagggugucugcgggugggaggccgcugccacccccacguuaacgggguguuuuucaauggaaucauucugggcccugacggccauguccucaucccggaaaugcagagcucccugcuucaccagcauauggagcugcucgaaucuagcgugaucccccugaugcacccucuugccgaucccuccaccgucuuuaaggacggggaugaggcugaagacuucguggagguucaucugccugaugugcacaaacaaauuagcggagucgaccucggccugcccaacugggggaaguaugugcugguuucugccggagcgcucacggcccugaugcuuaugaucuuucugaugacauguugcagaaagaccaaccgggcugaguccauucagcacagcccgggcgaaaccgggagaaaagugucugucacaucccauaauggccgcgugaucagcuccugggagucuuacaagagcggaggcgaaaccaaacucuga

SEQ ID NO: 223284 - RNA, 1575 nt, Artificial Sequence; identical to SEQ ID NO: 222899
  derived and/or modified CDS sequence (opt5) from glycoprotein__RABV__JN936754.1

SEQ ID NO: 223285 - RNA, 1575 nt, Artificial Sequence
  derived and/or modified CDS sequence (opt5) from glycoprotein__RABV__JN936755.1
augaucccccaggugcugcuguucgucccucugcuuguuagcuccucuugcuuuggcaaguucccgauuuacaccauccccgacaaacuggggccuuggagccccauugauauccaccaucucuccuguccuaacaaucuggugguggaggacgaaggaugcacaaaccuuucuggcuuuagcuauauggagcugaaggucggguacauuuccgccaucaaagugaauggauucacguguaccggcguugugacagaagcugagaccuauacaaacuuugucggguacgugaccacaaccuucaagagaaaacacuuucggcccacgccugaugccugccgcgcggcuuauaauuggaagauggccggagacccgagauacgaagagucucuccauaaccccuauccugauuaccacuggcugcggaccguuaagacaagcaaagagucccuggugaucauuagccccucugucgccgaccucgauccuuacgacaagucccugcauagccgcguguuccccggcggcaaauguucugggaucaccguguccagcacaugcuguucuaccaaucacgauuauacgauuuggaugccggaaaacccuagacuuggaacauccugcgacaucuuuaccaauagccggggcaagcgcgcuuccaaagggggaaagacauguggcuucgucgaugagagagggcuguacaagucucucaaaggagccugcaagcugaaacuuuguggcguucugggccuccggcugauggacgggaccuggguggcuauucaaaccagcgaugaaaucaaguggugcucccccgaccagcuggugaaccuccacgacuuucauagcgaugagauugagcaccuggucguggaggaacuuguuaaaaagcgcgaagagugccuggacgcccucgaaacaaucaugacgaccaaaucuguguccuucagacggcugagccaucuucgcaagcuggucccuggauuuggcaaggcguauacaaucuucaauaaaacccucauggaggccgaugcucacuacaagucuauuagaacauggaacgagaucauucccagcaaagggugucugcgggugggaggccgcugccacccccauguuaaugggguguucuuuaacggaaucauucugggcccugacggccacguccucaucccggaaaugcaguccucucugcuucaucagcacauggagcugcucgaaagcuccgugaucccccugaugcauccucuugccgaucccagcaccgucuucaaggacggggaugaggcugaagacuuuguggagguucaccucccugaugugcacaaacaaauuucuggagucgaccucggccugcccaauugggggaaguaugugcugguuuccgccggagcgcucacggcccugaugcuuaugaucuuccugaugacauguugcagaaagaccaaccgggcugagagcauucagcauucuccgggcgaaaccgggagaaaaguguccgucacaagccacaacggccgcgugaucuccucuugggagagcuacaaguccggaggcgaaaccaaacucuga

SEQ ID NO: 223286 - RNA, 1575 nt, Artificial Sequence; identical to SEQ ID NO: 223156
  derived and/or modified CDS sequence (opt5) from glycoprotein__RABV__JN936756.1

SEQ ID NO: 223287 - RNA, 1575 nt, Artificial Sequence
  derived and/or modified CDS sequence (opt5) from glycoprotein__RABV__JN936757.1
augaucccccaggugcugcuguucgucccucugcuuguuuuuagcuccugcuucggcaaguuuccgauuuacaccauccccgacaaacuggggccuuggucucccauugauauccaccaucucagcuguccuaacaaucuggugguggaggacgaaggaugcacaaaccuuuccggcuucucuuauauggagcugaaggucggguacauuagcgccaucaaagugaauggauuuacguguaccggcguugugacagaagcugagaccuauacaaacuucgucggguacgugaccacaaccuuuaagagaaaacacuuccggcccacgccugaugccugccgcgcggcuuauaauuggaagauggccggagacccgagauacgaagagucccuccauaaccccuauccugauuaccacuggcugcggaccguuaagacaucuaaagagagccuggugaucauuucccccagcgucgccgaccucgauccuuacgacaagucucugcauucccgcguguuucccggcggcaaauguagcgggaucaccgugucuuccacaugcuguagcaccaaucacgauuauacgauuuggaugccggaaaacccuagacuuggaacaucuugcgacaucuucaccaauucccggggcaagcgcgcuagcaaagggggaaagacauguggcuuugucgaugagagagggcuguacaagucccucaaaggagccugcaagcugaaacuuuguggcguucugggccuccggcugauggacgggaccuggguggcuauucaaaccucugaugaaaucaaguggugcagccccgaccagcuggugaaccuccacgacuuccauuccgaugagauugagcaccuggucguggaggaacuuguuaaaaagcgcgaagagugccuggacgcccucgaaacaaucaugacgaccaaaagcgugucuuuuagacggcugucccaucuucgcaagcuggucccuggauucggcaaggcguauacaaucuucaauaaaacccucauggaggccgaugcucacuacaagagcauuagaacauggaacgagaucauucccucuaaagggugucugcgggugggaggccgcugccacccccauguuaaugggguguuuuucaacggaaucauucugggcccugacggccacguccucaucccggaaaugcagagcucccugcuucaucagcacauggagcugcucgaaucuagcgugaucccccugaugcauccucuugccgaucccuccaccgucuuuaaggacggggaugaggcugaagacuucguggagguucaccucccugaugugcacaaacaaauuagcggagucgaccucggccugcccaauugggggaaguaugugcugguuucugccggagcgcucacggcccugaugcuuaugaucuuucugaugacauguugcagaaagaccgaucgggcugaguccauucagcauagcccgggcgaaaccagacgcaaagugucugucacaucccacaacgggcgggugaucagcuccugggagucuuacaagagcggcggagaaaccaaacucuga

SEQ ID NO: 223288 - RNA, 1575 nt, Artificial Sequence
  derived and/or modified CDS sequence (opt5) from glycoprotein__RABV__JN936758.1
augaucccccaggugcugcuguucgucccucugcuuguuuuuagcuccugcuucggcaaguuuccgauuuacaccauccccgacaaacuggggccuuggucucccauugauauccaccaucucagcuguccuaacaaucuggugguggaggacgaaggaugcacaaaccuuuccggcuucucuuauauggagcugaaggucggguacauuagcgccaucaaagugaauggauuuacguguaccggcguugugacagaagcugagaccuauacaaacuucgucggguacgugaccacaaccuuuaagagaaaacacuuccggcccaugccugaugccugccgcgcggcuuauaauuggaagauggccggagacccgagauacgaagagucccuccauaaccccuauccugauuaccacuggcugcggacgguuaagaccacaaaagagucucuggugaucauuagccccuccgucgccgaccucgauccuuacgacaagagccugcauucucgcguguuucccggcggcaaauguuccgggaucaccgugagcucuacaugcuguuccaccaaucacgauuauacgauuuggaugccggaaaacccuagacuuggaacaagcugcgacaucuucaccaauucucggggcaagcgcgcuuccaaagggggaaagacauguggcuuugucgaugagagagggcuguacaagagccucaaaggagccugcaagcugaaacuuuguggcguucugggccuccggcugauggacgggaccuggguggcuauucaaaccuccgaugaaaucaaguggugcucucccgaccagcuggugaaccuccacgacuuccauagcgaugagauugagcaccuggucguggaggaacuuguuaaaaagcgcgaagagugccuggacgcccucgaaacaaucaugacgaccaaauccgugagcuuuagacggcugucucaucuucgcaagcuggucccuggauucggcaaggcguauacaaucuucaauaaaacccucauggaggccgaugcucacuacaaguccauuagaacauggaacgagaucauucccagcaaagggugucugcgggugggaggccgcugccacccccauguuaaugggguguuuuucaacggaaucauucugggcccugacggccacguccucaucccggaaaugcagucuagccugcuucaucagcacauggagcugcucgaauccucugugaucccccugaugcauccucuugccgaucccagcaccgucuuuaaggacggggaugaggcugaagacuucguggagguucaccucccugaugugcacaaacaaauuuccggagucgaccucggccugcccaauugggggaaguaugugcugaucggagccggcgcgcucacggcccugaugcuuacaauuuuucugaugaccuguugcagaaagaccaaccgggcugagagcauccagcauucuccgggggaaacaggcagaaaaguuuccgugaccagccacaacggacgcgucauuucuuccugggagagcuacaaguccggcucugaaacaaaacucuga

SEQ ID NO: 223289 - RNA, 1575 nt, Artificial Sequence
  derived and/or modified CDS sequence (opt5) from glycoprotein__RABV__JN936759.1
augaucccccaggugcuucucuucgucccucugcuuguuuuuagcuccugcuucggcaaguuuccgauuuacaccauccccgacaaacuggggccuuggucucccauugauauccaccaucucagcuguccuaacaaucuggugguggaggacgaaggaugcacaaaccuuuccggcuucucuuauauggagcugaaggucggguacauuagcgccaucaaagugaauggauuuacguguaccggcguugugacagaagcugagaccuauacaaacuucgucggguacgugaccacaaccuuuaagagaaaacacuuccggcccaugccugaugccugccgcgcggcuuauaauuggaagauggccggagacccgagauacgaagagucccuccauaaccccuauccugauuaccacuggcugcggacgguuaagaccacaaaagagucucuggugaucauuagccccuccgucgccgaccucgauccuuacgacaagagccugcauucucgcguguuucccggcggcaaauguuccgggaucaccgugagcucuacaugcuguuccaccaaucacgauuauacgauuuggaugccggaaaacccuagacuuggaacaagcugcgacaucuucaccaauucucggggcaagcgcgcuuccaaagggggaaagacauguggcuuugucgaugagagagggcuguacaagagccuccggggagccugcaaacugaagcuguguggcguucugggccuccgccugauggacgggaccuggguggcuauucaaaccuccgaugaaaucaaauggugcucucccgaccagcuggugaaccuccacgacuuccauagcgaugagauugagcaccuggucguggaggaacuuguuaagaaaagagaagagugccuggacgcccucgaaacaaucaugacgaccaaguccgugagcuuucggcgccugucucaucuuagaaaacuggucccuggauucggcaaggcguauacaaucuucaauaagacccucauggaggccgaugcucacuacaaauccauucggacauggaacgagaucauucccagcaaggggugucugcgcgugggaggcagaugccacccccauguuaaugggguguuuuucaacggaaucauucugggcccugacggccacguccucaucccggaaaugcagucuagccugcuucaucagcacaucgagcugcucgaauccucugugauuccccugaugcauccucuugccgaucccagcaccgucuuuaaagacggggaugaggcugaagacuucguggagguucaucugccugaugugcacaagcaaaucuccggagucgaccucggccugcccaauugggggaaauaugugcugauuagcgccggagcgcucacggcccugaugcuuacaaucuuucugaugaccuguugccggaagaccaacagagcugagucuauucagcacuccccgggcgaaacagggcgcaagguuagcgugaccucucacaacggccgggucaucuccagcugggaguccuacaaaucuggaagcgaaacaaagcucuga

SEQ ID NO: 223290 - RNA, 1575 nt, Artificial Sequence
  derived and/or modified CDS sequence (opt5) from glycoprotein__RABV__JN936760.1
augaucccccaggugcuucucuucgucccucugcuuguuuuuagccugugcuucggcaaguuuccgauuuacaccauccccgacaaacucgggccuuggucccccauugauauccaccaucugucuuguccuaacaaucuugugguggaggacgaaggaugcacaaaccugagcggcuucuccuauauggagcucaaggucggguacauuucugccaucaaagugaauggauuuacguguaccggcguugugacagaagcugagaccuauacaaacuucgucggguacgugaccacaaccuuuaagagaaaacacuuccggcccaugccugaugccugccgcgcggcuuauaauuggaagauggccggagacccgagauacgaagagagccugcauaaccccuauccugauuaccacuggcugcggacgguuaagaccacaaaagagucccucgugaucauuucucccagcgucgccgaccuggauccuuacgacaagucccuucauagccgcguguuucccggcggcaaauguucugggaucaccguguccagcacaugcuguucuaccaaucacgauuauacggucuggaugccggaaaacccuagacugggaacauccugcgacauuuucaccaauagccggggcaagcgcgcuucuaaagggggaaagacauguggcuuuguugaugagagagggcucuacaagucccugaaaggagccugcaagcugaaacuguguggcgugcucggccugcggcugauggacgggaccuggguggcuauccaaaccagcgaugaaauuaaguggugcucccccgaccagcucgucaaccugcacgacuuccauucugaugagaucgagcaccuugugguugaggaacuggugaaaaagcgcgaagagugccucgacgcccuggaaacaauuaugacgaccaaaagcgucuccuuuagacggcuuagccaucugcgcaagcucgugccuggauucggcaaggcguauacaaucuucaauaaaacccugauggaggccgaugcucacuacaagucuaucagaacauggaacgagauuauccccuccaaagggugucugcggguuggaggccgcugccacccccaugugaauggggucuuuuucaacggaauuauccucggcccugacggccacgugcugauuccggaaaugcagagcucucuucugcaucagcacauggagcuccuggaaagcuccgucaucccccuuaugcauccucuggccgaucccucuaccguguuuaaggacggggaugaggcugaagacuucguugaggugcaccucccugauguccacaaacaaaucagcggaguggaccugggccugcccaauugggggaaguauguucucauuuccgccggagcgcugacggcccuuaugcugacaaucuuucucaugaccuguugcagaaagaccaaccgggcugagagcauucagcauucuccgggcgaaacagggagaaaaguguccgucaccagccacaacggccgcgugaucucuuccugggagagcuacaaguccggaucugaaacaaaacuguga

SEQ ID NO: 223291 - RNA, 1575 nt, Artificial Sequence
  derived and/or modified CDS sequence (opt5) from glycoprotein__RABV__JN936761.1
augaucccccaggugcugcuguucgucccucugcuuguuuuuagcuccugcuucggcaaguuuccgauuuacaccauccccgacaaacuggggccuuggucucccauugauauccaccaucucagcuguccuaacaaucuggugguggaggacgaaggaugcacaaaccuuuccggcuucucuuauauggagcugaaggucggguacauuagcgccaucaaagugaauggauuuacguguaccggcguugugacagaagcugagaccuauacaaacuucgucggguacgugaccacaaccuuuaagagaaaacacuuccggcccaugccugaugccugccgcgcggcuuauaauuggaagauggccggagacccgagauacgaagagucccuccauaaccccuauccugauuaccacuggcugcggacgguuaagaccacaaaagagucucuggugaucauuagccccuccgucgccgaccucgauccuuacgacaagagccugcauucucgcguguuucccggcggcaaauguuccgggaucaccgugagcucuacaugcuguuccaccaaucacgauuauacgauuuggaugccggaaaacccuagacuuggaacaagcugcgacaucuucaccaauucucggggcaagcgcgcuuccaaagggggaaagacauguggcuuugucgaugagagagggcuguacaagagccucaaaggagccugcaagcugaaacuuuguggcguucugggccuccggcugauggacgggaccuggguggcuauucaaaccuccgaugaaaucaaguggugcucucccgaccagcuggugaaccuccacgacuuccauagcgaugagauugagcaccuggucguggaggaacuuguuaaaaagcgcgaagagugccuggacgcccucgaaacaaucaugacgaccaaauccgugagcuuuagacggcugucucaucuucgcaagcuggucccuggauucggcaaggcguauacaaucuucaauaaaacccucauggaggccgaugcucacuacaaguccauuagaacauggaacgagaucauucccagcaaagggugucugcgggugggaggccgcugccacccccauguuaaugggguguuuuucaacggaaucauucugggcccugacggccacguccucaucccggaaaugcagucuagccugcuucaucagcacauggagcugcucgaauccucugugaucccccugaugcauccucuugccgaucccagcaccgucuuuaaggacggggaugaggcugaagacuucguggagguucaccucccugaugugcacaaacaaauuuccggagucgaccucggccugcccaauugggggaaguaugugcugaucagcgccggagcgcucacggcccugaugcuuaugauuuuucugaugacauguugcagaaagaccaaccgggcugagucuauccagcauuccccgggcgaaaccgggagaaaaguuagcgugacaucucacaacggccgcgucauuuccagcugggaguccuacaagucuggaagcgaaaccaaacucuga

SEQ ID NO: 223292 - RNA, 1575 nt, Artificial Sequence; identical to SEQ ID NO: 223156
  derived and/or modified CDS sequence (opt5) from glycoprotein__RABV__JN936762.1

SEQ ID NO: 223293 - RNA, 1575 nt, Artificial Sequence; identical to SEQ ID NO: 222899
  derived and/or modified CDS sequence (opt5) from glycoprotein__RABV__JN936763.1

SEQ ID NO: 223294 - RNA, 1575 nt, Artificial Sequence
  derived and/or modified CDS sequence (opt5) from glycoprotein__RABV__JN936764.1
augaucccccaggugcuucucuucgucccuuuucugguuuucagcuccugcuuuggcaaguucccgauuuacaccauccccgacaaacuugggccuuggucucccauugauauccaccaucugagcuguccuaacaaucucgugguggaggacgaaggaugcacaaaccuguccggcuuuucuuauauggagcuuaaggucggguacauuagcgccaucaaagugaauggauucacguguaccggcguugugacagaagcugagaccuauacaaacuuugucggguacgugaccacaaccuucaagagaaaacacuuucggcccaugccugaugccugccgcgcggcuuauaauuggaagauggccggagacccgagauacgaagagucccugcauaaccccuauccugauuaccacuggcuccggacgguuaagaccacaaaagagucucuggugaucauuagccccuccgucgccgaccuggauccuuacgacaagagccuccauucucgcguguuccccggcggcaaauguuccgggaucaccgugagcucuacaugcuguuccaccaaucacgauuauacgauuuggaugccggaaaacccuagacugggaacaagcugcgacaucuuuaccaauucucggggcaagcgcgcuuccaaagggggaaagacauguggcuucgucgaugagagagggcuuuacaagagccugaaaggagccugcaagcucaaacuguguggcguucuuggccugcggcucauggacgggaccuggguggcuauucaaaccuccgaugaaaucaaguggugcucucccgaccagcuggugaaccugcacgacuuucauagcgaugagauugagcaccucgucguggaggaacugguuaaaaagcgcgaagagugccuugacgcccuggaaacaaucaugacgaccaaauccgugagcuucagacggcucucucaucugcgcaagcuggucccuggauucggcaaggcguauacaaucuuuaauaaaacccugauggaggccgaugcucacuacaaguccauuagaacauggaacgagaucauucccagcaaagggugucuccgggugggaggccgcugccacccccauguuaaugggguguucuuuaacggaaucauucugggcccugacggccacguccugaucccggaaaugcagucuagccuccugcaucagcacauggagcuucuggaauccucugugaucccccucaugcauccucuggccgaucccagcaccgucuucaaggacggggaugaggcugaagacuuuguggagguucaccuuccugaugugcacaaacaaauuuccggagucgaccugggccuccccaauugggggaaguaugugcugaucagcgccggagcgcugacggcccucaugcugacaauuuuccuuaugaccuguugcagaaagaccaaccgggcugagucuauccagcauuccccgggcgaaacagggagaaaaguuagcgugaccucucacaacggccgcgucauuuccagcugggaguccuacaagucuggaagcgaaacaaaacuguga

SEQ ID NO: 223295 - RNA, 1575 nt, Artificial Sequence; identical to SEQ ID NO: 222917
  derived and/or modified CDS sequence (opt5) from glycoprotein__RABV__JN936765.1

SEQ ID NO: 223296 - RNA, 1575 nt, Artificial Sequence; identical to SEQ ID NO: 222917
  derived and/or modified CDS sequence (opt5) from glycoprotein__RABV__JN936766.1

SEQ ID NO: 223297 - RNA, 1575 nt, Artificial Sequence; identical to SEQ ID NO: 222917
  derived and/or modified CDS sequence (opt5) from glycoprotein__RABV__JN936767.1

SEQ ID NO: 223298 - RNA, 1575 nt, Artificial Sequence; identical to SEQ ID NO: 223139
  derived and/or modified CDS sequence (opt5) from glycoprotein__RABV__JN936768.1

SEQ ID NO: 223299 - RNA, 1575 nt, Artificial Sequence; identical to SEQ ID NO: 222918
  derived and/or modified CDS sequence (opt5) from glycoprotein__RABV__JN936769.1

SEQ ID NO: 223300 - RNA, 1575 nt, Artificial Sequence
  derived and/or modified CDS sequence (opt5) from glycoprotein__RABV__JN936770.1
augaucccccaggugcugcuguucgucccucugcuuguuuuuagcuccugcuucggcaaguuuccgauuuacaccauccccgacaaacuggggccuuggucucccauugauauccaccaucucagcuguccuaacaaucuggugguggaggacgaaggaugcacaaaccuuuccggcuucucuuauauggagcugaaggucggguacauuagcgccaucaaagugaauggauuuacguguaccggcguugugacagaagcugagaccuauacaaacuucgucggguacgugaccacaaccuuuaagagaaaacacuuccggcccaugccugaugccugccgcuccgcguauaauuggaagauggcuggagacccgagauacgaagagucucuccauaaccccuauccugauuaccacuggcugcggacgguuaagaccacaaaagagagccuggugaucauuucccccagcgucgccgaccucgauccuuacgacaagucucugcauucccgcguguuucccggcggcaaauguagcgggaucaccgugucuuccacaugcuguagcaccaaucacgauuauacgauuuggaugccggaaaacccuagacuuggaacaucuugcgacaucuucaccaauucccggggcaagcgcgccagcaaagggggaaagacauguggcuuugucgaugagagagggcuguacaagucccucaaaggagcuugcaagcugaaacuuuguggcguucugggccuccggcugauggacgggaccuggguggccauucaaaccucugaugaaaucaaguggugcagccccgaccagcuggugaaccuccacgacuuccauuccgaugagauugagcaccuggucguggaggaacuuguuaaaaagcgcgaagagugccuggacgcucucgaaacaaucaugacgaccaaaagcgugucuuuuagacggcugucccaucuucgcaagcuggucccuggauucggcaaggccuauacaaucuucaauaaaacccucauggaggcggaugcccacuacaagagcauuagaacauggaacgagaucauucccucuaaagggugucugcgggugggaggccgcugccacccccauguuaaugggguguuuuucaacggaaucauucugggcccugacggccacguccucaucccggaaaugcagagcucccugcuucaucagcacauggagcugcucgaaucuagcgugaucccccugaugcauccucuugcugaucccuccaccgucuuuaaggacggggaugaggccgaagacuucguggagguucaccucccugaugugcacaaacaaauuagcggagucgaccucggccugcccaauugggggaaguaugugcugaucucugcuggagcccucacggcgcugaugcuuacaauuuuucugaugaccuguugcagaaagaccaaccgggccgaguccauccagcauagcccgggcgaaacagggagaaaaguuucugugaccucccacaacggccgcgucauuagcuccugggagucuuacaagagcggauccgaaacaaaacucuga

SEQ ID NO: 223301 - RNA, 1575 nt, Artificial Sequence; identical to SEQ ID NO: 222899
  derived and/or modified CDS sequence (opt5) from glycoprotein__RABV__JN936771.1

SEQ ID NO: 223302 - RNA, 1575 nt, Artificial Sequence; identical to SEQ ID NO: 223264
  derived and/or modified CDS sequence (opt5) from glycoprotein__RABV__JN936772.1

SEQ ID NO: 223303 - RNA, 1575 nt, Artificial Sequence
  derived and/or modified CDS sequence (opt5) from glycoprotein__RABV__JN936773.1
augaucccccaggugcugcucuuugucccucugcuuguuuuuagcuccugcuucggcaaguuuccgauuuacaccauccccgacaaacuggggccuuggucucccauugauauccaccaucucagcuguccuaacaaucugauuguggaggacgaaggaugcacaaaccuuuccggcuucucuuauauggagcugaaggugggguacaucagcgccaucaaagucaauggauuuacguguaccggcgugguuacagaagcugagaccuauacaaacuucgugggguacgucaccacaaccuuuaagagaaaacacuuccggcccaugccugaugccugccgcgcggcuuauaauuggaagauggccggagacccgagauacgaagagucccuccauaaccccuauccugauuaccacuggcugcggacggugaagaccacaaaagagucucugguuauuaucagccccuccguggccgaccucgauccuuacgacaagagccugcauucucgcgucuuucccggcggcaaauguuccgggauuaccgugagcucuacaugcuguuccaccaaucacgauuauacgaucuggaugccggaaaacccuagacuuggaacaagcugcgacauuuucaccaauucucggggcaagcgcgcuuccaaagggggaaagacauguggcuuuguggaugagagagggcuguacaagagccucaaaggagccugcaagcugaaacuuuguggcguccugggccuccggcugauggacgggaccuggguugcuauccaaaccuccgaugaaauuaaguggugcucucccgaccagcuggugaaccuccacgacuuccauagcgaugagaucgagcaccugguggucgaggaacuugugaaaaagcgcgaagagugccuggacgcccucgaaacaaucaugacgaccaaauccguuagcuuuagacggcugucucaucuucgcaagcuggugccuggauucggcaaggcguauacaauuuucaauaaaacccucauggaggccgaugcucacuacaaguccaucagaacauggaacgagauuauccccagcaaagggugucugcgggucggaggccgcugccacccccaugugaaugggguuuucuucaacggaauuauccugggcccugacggccacgugcucaucccggaaaugcagucuagccugcuucaucagcacauggagcugcucgaauccucugucauuccccugaugcauccucuugccgaucccagcaccguguuuaaggacggggaugaggcugaagacuucgucgaggugcaucugccugauguucacaaacaaaucuccggaguggaccucggccugcccaauugggggaaguauguccugauuagcgccggagcgcucacggcccugaugcuuacaaucuuucugaugaccuguugcagaaagaccaaccgggcuggcucuauucagcacuccccgggggagacaggcagaaaagugagcguuaccucucacaacggacgcgugaucuccagcugggaauccuacaagucuggcagcgagacaaaacucuga

SEQ ID NO: 223304 - RNA, 1575 nt, Artificial Sequence; identical to SEQ ID NO: 222917
  derived and/or modified CDS sequence (opt5) from glycoprotein__RABV__JN936774.1

SEQ ID NO: 223305 - RNA, 1575 nt, Artificial Sequence; identical to SEQ ID NO: 222918
  derived and/or modified CDS sequence (opt5) from glycoprotein__RABV__JN936775.1

SEQ ID NO: 223306 - RNA, 1575 nt, Artificial Sequence; identical to SEQ ID NO: 222899
  derived and/or modified CDS sequence (opt5) from glycoprotein__RABV__JN936776.1

SEQ ID NO: 223307 - RNA, 1575 nt, Artificial Sequence; identical to SEQ ID NO: 222918
  derived and/or modified CDS sequence (opt5) from glycoprotein__RABV__JN936777.1

SEQ ID NO: 223308 - RNA, 1575 nt, Artificial Sequence; identical to SEQ ID NO: 222918
  derived and/or modified CDS sequence (opt5) from glycoprotein__RABV__JN936778.1

SEQ ID NO: 223309 - RNA, 1575 nt, Artificial Sequence; identical to SEQ ID NO: 223139
  derived and/or modified CDS sequence (opt5) from glycoprotein__RABV__JN936779.1

SEQ ID NO: 223310 - RNA, 1575 nt, Artificial Sequence
  derived and/or modified CDS sequence (opt5) from glycoprotein__RABV__JN936780.1
augaucccccaggugcuccuguucgucccucugcuuguuuuuagcuccugcuucggcaaguuuccgauuuacaccauccccgacaaacuggggccuuggucucccauugauauccaccaucucagcuguccuaacaaucuggugguggaggacgaaggaugcacaaaccuuuccggcuucucuuauauggagcugaaggucggguacauuagcgccaucaaagugaauggauuuacguguaccggcguugugacagaagcugagaccuauacaaacuucgucggguacgugaccacaaccuuuaagagaaaacacuuccggcccaugccugaugccugccgcgcggcuuauaauuggaagauggccggagacccgagauacgaagagucccuccauaaccccuauccugauuaccacuggcugcggacgguuaagaccacaaaagagucucuggugaucauuagccccuccgucgccgaccucgauccuuacgacaagagccugcauucucgcguguuucccggcggcaaauguuccgggaucaccgugagcucuacaugcuguuccaccaaucacgauuauacgauuuggaugccggaaaacccuagacuuggaacaagcugcgacaucuucaccaauucucggggcaagcgcgcuuccaaagggggaaagacauguggcuuugucgaugagagagggcuguacaagagccucaaaggagccugcaagcugaaacuuuguggcguucugggccuccggcugauggacgggaccuggguggcuauucaaaccuccgaugaaaucaaguggugcucucccgaccagcuggugaaccuccacgacuuccauagcgaugagauugagcaccuggucguggaggaacuuguuaaaaagcgcgaagagugccuggacgcccucgaaacaaucaugacgaccaaauccgugagcuuuagacggcugucucaucuucgcaagcuggucccuggauucggcaaggcguauacaaucuucaauaaaacccucauggaggccgaugcucacuacaaguccauuagaacauggaacgagaucauucccagcaaagggugucugcgggugggaggccgcugccacccccauguuaaugggguguuuuucaacggaaucauucugggcccugacggccacguccucaucccggaaaugcagucuagccugcuucaucagcacauggagcugcucgaauccucugugaucccccugaugcauccucuugccgauccccugaccgucuuuaaggacggggaugaggcugaagacuucguggagguucaccucccugaugugcacaaacaaauuagcggagucgaccugggccugcccaauugggggaaguaugugcucaucuccgccggagcgcugacggcccuuaugcugacaauuuuucucaugaccuguugcagaaagaccaaccgggcugagagcauccagcauucuccgggcgaaacagggagaaaaguuuccgugaccagccacaacggccgcgucauuucuuccugggagagcuacaaguccggaucugaaacaaaacuguga

SEQ ID NO: 223311 - RNA, 1575 nt, Artificial Sequence; identical to SEQ ID NO: 222917
  derived and/or modified CDS sequence (opt5) from glycoprotein__RABV__JN936781.1

SEQ ID NO: 223312 - RNA, 1575 nt, Artificial Sequence; identical to SEQ ID NO: 222917
  derived and/or modified CDS sequence (opt5) from glycoprotein__RABV__JN936782.1

SEQ ID NO: 223313 - RNA, 1575 nt, Artificial Sequence
  derived and/or modified CDS sequence (opt5) from glycoprotein__RABV__JN936783.1
augaucccccaggugcugcuguucgucccucugcuuguuuuuagcuccugcuucggcaaguuuccgauuuacaccauccccgacaaacuggggccuuggucucccauugauauccaccaucucagcuguccuaacaaucuggugguggaggacgaaggaugcacaaaccuuuccggcuucucuuauauggagcugaaggucggguacauuagcgccaucaaagugaauggauuuacguguaccggcguugugacagaagcugagaccuauacaaacuucgucggguacgugaccacaaccuuuaagagaaaacacuuccggcccaugccugaugccugccgcgcggcuuauaauuggaagauggccggagacccgagauacgaagagucccuccauaaccccuauccugauuaccacuggcugcggacgguuaagaccacaaaagagucucuggugaucauuagccccuccgucgccgaccucgauccuuacgacaagagccugcauucucgcguguuucccggcggcaaauguuccgggaucaccgugagcucuacaugcuguuccaccaaucacgauuauacgauuuggaugccggaaaacccuagacuuggaacaagcugcgacaucuucaccaauucucggggcaagcgcgcuuccaaagggggaaagacauguggcuuugucgaugagagagggcuguacaagagccucaaaggagccugcaagcugaaacuuuguggcguucugggccuccggcugauggacgggaccuggguggcuauucaaaccuccgaugaaaucaaguggugcucucccgaccagcuggugaaccuccacgacuuccauagcgaugagauugagcaccuggucguggaggaacuuguuaaaaagcgcgaagagugccuggacgcccucgaaacaaucaugacgaccaaauccgugagcuuuagacggcugucucaucuucgcaagcuggucccuggauucggcaaggcguauacaaucuucaauaaaacccucauggaggccgaugcucacuacaaguccauuagaacauggaacgagaucauucccagcaaagggugucugcgggugggaggccgcugccacccccauguuaaugggguguuuuucaacggaaucauucugggcccugacggccacguccucaucccggaaaugcagucuagccugcuucaucagcacaucgagcugcucgaauccucugugauuccccugaugcauccucuugccgaucccagcaccgucuuuaaggacggggaugaggcugaagacuucguggagguucaccucccugaugugcacaaacaaaucuccggagucgaccucggccugcccaauugggggaaguaugugcugauuagcgccggagcgcucacggcccugaugcuuacaaucuuucugaugaccuguugcagaaagaccaaccgggcugagucuauucagcauuccccgggcgaaacagggagaaaaguuagcgugaccucucacaacggccgcgucaucuccagcugggaguccuacaagucuggaagcgaaacaaaacucuga

SEQ ID NO: 223314 - RNA, 1575 nt, Artificial Sequence
  derived and/or modified CDS sequence (opt5) from glycoprotein__RABV__JN936784.1
augaucccccaggugcugcuguucgucccucugcuuguuuuuagcuccugcuucggcaaguuuccgauuuacaccauccccgacaaacuggggccuuggucucccauugauauccaccaucucagcuguccuaacaaucuggugguggaggacgaaggaugcacaaaccuuuccggcuucucuuauauggagcugaaggucggguacauuagcgccaucaaagugaauggauuuacguguaccggcguugugacagaagcugagaccuauacaaacuucgucggguacgugaccacaaccuuuaagagaaaacacuuccggcccaugccugaugccugccgcgcggcuuauaauuggaagauggccggagacccgagauacgaagagucccuccauaaccccuauccugauuaccacuggcugcggacgguuaagaccacaaaagagucucuggugaucauuagccccuccgucgccgaccucgauccuuacgacaagagccugcauucucgcguguuucccggcggcaaauguuccgggaucaccgugagcucuacaugcuguuccaccaaucacgauuauacgauuuggaugccggaaaacccuagacuuggaacaagcugcgacaucuucaccaauucucggggcaagcgcgcuuccaaagggggaaagacauguggcuuugucgaugagagagggcuguacaagagccucaaaggagccugcaagcugaaacuuuguggcguucugggccuccggcugauggacgggaccugcguggcuauucaaaccuccgaugaaaucaaguggugcucucccgaccagcuggugaaccuccacgacuuccauagcgaugagauugagcaccuggucguggaggaacuuguuaaaaagcgcgaagagugucuggacgcccucgaaacaaucaugacgaccaaauccgugagcuuuagacggcugucucaucuucgcaagcuggucccuggauucggcaaggcguauacaaucuucaauaaaacccucauggaggccgaugcucacuacaaguccauuagaacauggaacgagaucauucccagcaaagggugccugcgggugggaggccgcugucacccccauguuaaugggguguuuuucaacggaaucauucugggcccugacggccacguccucaucccggaaaugcagucuagccugcuucaucagcacaucgagcugcucgaauccucugugauuccccugaugcauccucuugccgaucccagcaccgucuuuaaggacggggaugaggcugaagacuucguggagguucaccucccugaugugcacaaacaaaucuccggagucgaccucggccugcccaauugggggaaguaugugcugauuagcgccggagcgcucacggcccugaugcuuacaaucuuucugaugaccugcuguagaaagaccaaccgggcugagucuauucagcauuccccgggcgaaacagggagaaaaguuagcgugaccucucacaacggccgcgucaucuccagcugggaguccuacaagucuggaagcgaaacaaaacucuga

SEQ ID NO: 223315 - RNA, 1575 nt, Artificial Sequence; identical to SEQ ID NO: 223156
  derived and/or modified CDS sequence (opt5) from glycoprotein__RABV__JN936786.1

SEQ ID NO: 223316 - RNA, 1575 nt, Artificial Sequence
  derived and/or modified CDS sequence (opt5) from glycoprotein__RABV__JN936788.1
augaucccccaggcccuccuguucgugccucugcuugucguuagccugugcuuuggcaaguucccgauuuacaccauccccgacaaacucgggccuuggucccccauugauauccaccaucugucuuguccuaacaaucuugugguggaggacgaaggaugcacaaaccugagcggcuuuuccuauauggagcucaaggucggguacauuucugcuaucaaagugaauggauucacguguaccggcguugugacagaagccgagaccuauacaaacuuugucggguacgugaccacaaccuucaagagaaaacacuuucggcccacgccugaugcgugccgcagcgcuuauaauuggaagauggccggagacccgagauacgaagagucccugcauaaccccuauccugauuaccacuggcugcggaccguuaagacaaccaaagagucuuucgugaucauuagccccuccgucgccgaccucgauccuuacgacaagagccugcauucucgcguguuucccagaggcaaauguuccggcaucacagugagcucuaccuauugcuccacgaaucacgauuacacaauuuggaugccggaaaacccucggcuugggaccagcugugacaucuucacaaauucucgcggaaagagagcuuuuaaaggcuccaagaccugcggguucgucgaugagcggggacuguauaagagccucaaaggcgccuguaagcugaaacuuugcgggguucugggacuccgccugauggacggcaccuggguggcuauucaaacauccgaugaaacgaaguggugucccccugaccagcuggugaaccuccacgacuuucauucugaugagaucgagcaccuggucguggaggaacuuguuaaaaagagagaagagugccuggacgcccucgaaagcauuaugaccacaaaauccgugagcuuccggcgccugucucaucuuagaaagcugguccccggcuucgggaaggcguacaccaucuuuaauaaaacacucauggaggccgaugcucacuauaaguccgugcggaccuggaacgagaucauucccagcaaaggaugccugcgcguuggcgggagaugucacccucaugugaauggagucuucuuuaacggcaucauucuggggccggacggacacgugcucauccccgaaaugcagucuagccugcuucagcaacauauggagcugcucgaauccucugucauuccucugaugcacccccuugccgauccuagcacgguguucaagaauggcgacgaggcugaagauuuuguugaggugcaucugcccgacguccacaaacagguguccggcguugaucucgggcugccgagcuggggaaaguacgugcugaugucugccggcguccucacagcgcugaugcuuaugaucuuccugaugaccugcugucggagaaccaaccgcccugaguccauccagcacagccucggggaaacaggacggaaggugucugugaccucccagaacggcagaguuauuagcuccugggagucuuauaaaagcgggggcgaaacaaagcuguga

SEQ ID NO: 223317 - RNA, 1575 nt, Artificial Sequence; identical to SEQ ID NO: 223294
  derived and/or modified CDS sequence (opt5) from glycoprotein__RABV__JN936790.1

SEQ ID NO: 223318 - RNA, 1575 nt, Artificial Sequence; identical to SEQ ID NO: 223156
  derived and/or modified CDS sequence (opt5) from glycoprotein__RABV__JN936791.1

SEQ ID NO: 223319 - RNA, 1575 nt, Artificial Sequence; identical to SEQ ID NO: 222917
  derived and/or modified CDS sequence (opt5) from glycoprotein__RABV__JN936793.1

SEQ ID NO: 223320 - RNA, 1575 nt, Artificial Sequence
  derived and/or modified CDS sequence (opt5) from glycoprotein__RABV__JQ595307.1
augaucccccaggcccuccuguucgugccucugcuuauuccgagccugugccucggcgaguuucccaucuacaccauuccugacaagcuggggcccuggacaccuaucgauauucaccaucuuuccugucccaacaaucuggucgcugaaaacgacggaugcacgucucucagcggcuucuccuauauggagcugaaaguuggguacaucucugccaucaaggugaauggauuuaccuguacaggcguggucaccgaagcggagacauauaccaacuucgugggguacguuacaaccacguuuaaaagaaagcacuuccggccuaugccggaugcuugccgcgccgcccaugacuggaaaauggcuggagaucccagauaugaagacagccugcaaaauccuuaccccgauuaucacuggcuccggaccgugaagacaaccaaggagucccuggucauuaucucuccuagcguggccgaccuugaucccuacgacaaaucccugcauagccgcguuuuuccgucuggcaagugucucggcauuacaguguccagcaccuacugcucuacgaaccacgauuauacaaucuggaugccugucgagcccagacuggggaccuccugugacauuuucacaaauagccggggaaaacgcgcuucuaagggcgggagagugugcggauuuguggaugaacggggccuuuacaaaucccugaagggggccuguaagcucaaacugugcggagucccuggcauccgccugauggacggcaccuggguuagcauucagaccuccgaggacaucaagugguguccucccgauagacucgugaaccugcacgacuuccauucugaugaacuugagcaccugguggucgaggaacucaucaaacggcgcgagaauugccuggacgcgcuugaaagcauuaugacaacgaaguccgugagcuuuagacggcugucucaucuccgcaaacugguucccggguucggaaaggccuauaccaucuuuaacaaaacacugauggaggcugaugcccacuacaaguccgugaagaccuggaaugaagucauuccgagcaaaggcugccucgagguugggggaaagugucaucccccugugaacggcguguucuucaaugggaucauucugggacccgacggcaacguccuuaucccugagaugcagucuagccugcuccagcaacacauggaacugcuugaguccucugugaucccccugaugcacccgcucgcugauccuagcacagucuuuaaagaaggcgacgaggccgaagauuucguggagguucaucugcccgacgugcacaagcaggucuccgauguggaccuggggcucccuagcuggggaaaauaucugcuuaugucugcgggcgcccuggcuauucucauccuggccauuguucugaucauuugcuguagacgggugaauaagaccggguccacgcagagaggacaucgcgagagccggggcaagaugucugucgcuccccagaacgggaaaaucaucuccagcugggaacuuuacaaguccgagucugaaacaggccucuga

SEQ ID NO: 223321 - RNA, 1575 nt, Artificial Sequence
  derived and/or modified CDS sequence (opt5) from glycoprotein__RABV__JQ595308.1
augaucccccaggcccugcuguucgugccucugcuuauuccgagccugugccucggcgaguuucccaucuacaccauuccugacaagcuggggcccugguccccuaucgauauucaccaucuuucuugucccaacaaucuggucgcugaaaacgacggaugcacaagccucuccggcuucucuuauauggagcugaaaguuggguacaucagcgccaucaaggugaauggauuuacguguaccggcguggucacagaagcggagaccuauacaaacuucgugggguacguuaccacaaccuuuaaaagaaagcacuuccggccuacgccggaugcuugccgcgccgcccaugacuggaaaauggcuggagaucccagauaugaagccucccugcaaaauccuuaccccgacuaucacuggcuccggaccgugaagacaaccaaggagucucuggucauuaucagcccuuccguggcugaucuugaccccuacgauaaaagccugcauucucgcguuuuuccguccggcaagugucucggcauuacagugagcucuaccuacugcuccacgaaccacgacuauacaaucuggaugccugucgagcccagacuggggaccagcugugauauuuucacaaauucucggggaaaacgcgccuccaagggcgggagagugugcggauuuguggacgaacggggccuuuacaaaagccugaagggggcgugucgccucaagcugugcggagucccuggcaucagacugcucgauggcaccuggguuuccauucagaccucugaggacaucaaaugguguccucccgaccggcuggugaaccuucacgauuuccauagcgacgaaaucgagcaccugguggucgccgagcucauuaagcgcagagaaaauugccuggaugcucuugaguccaucaugacaacgaaaagcgugucuuuucggcgccugucccaucucagaaagcugguucccggguucggaaaagccuauaccauuuuuaacaagacacugauggaagcugacgcccacuacaaaagcgugaagaccuggaaugaggucaucccgucuaagggcugccucgaaguugggggacggugucacccccaugugaacggcguguucuucaaugggauuauccugggaccugauggcaacguccuuauccccgagaugcagagcucccugcuccagcaacacauggagcugcuugaaucuagcgugauuccucugaugcauccccucgcggacccguccacagucuuuaaagagggcgaugaagccgaggacuucguggaaguucaccucccugaugugcauaagcaggucagcgacguggaucuggggcuccccucuuggggaaaauaucugcuuaucuccgcuggcgcccuggcuauucucauccuggccauuguucugaucaucugcuguagacgcgugaauaagaccgggagcacgcagcggggacacagagagucuggcgggaaaauguccgucgugccucagaacggcaagauuaucagcuccugggagcuuuacaagucugaaagcgagacaggacucuga

SEQ ID NO: 223322 - RNA, 1575 nt, Artificial Sequence
  derived and/or modified CDS sequence (opt5) from glycoprotein__RABV__JQ595309.1
augaucccccaggcccugcuguucgugccucugcuuauuccgagccugugccucggcgaguuucccaucuacaccauuccugacaagcuggggcccugguccccuaucgauauucaccaucuuucuugucccaacaaucuggucgcugaaaacgacggaugcacaagccucuccggcuucucuuauauggagcugaaaguuggguacaucagcgccaucaaggugaauggauuuacguguaccggcguggucacagaagcggagaccuauacaaacuucgugggguacguuaccacaaccuuuaaaagaaagcacuuccggccuacgccggaugcuugccgcgccgcccaugacuggaaaauggcuggagaucccagauaugaagccucccugcaaaauccuuaccccgacuaucacuggcuccggaccgugaagacaaccaaggagucucuggucauuaucagcccuuccguggcugaucuugaccccuacgauaaaagccugcauucucgcguuuuuccguccggcaagugucucggcauuacagugagcucuaccuacugcuccacgaaccacgacuauacaaucuggaugccugucgagcccagacuggggaccagcugugauauuuucacaaauucucggggaaaacgcgccuccaagggcgggagagugugcggauuuguggacgaacggggccuuuacaaaagccugaagggggcgugucgccucaagcugugcggagucccuggcaucagacugcucgauggcaccuggguuuccauucagaccucugaggacaucaaaugguguccucccgaccggcuggugaaccuucacgauuuccauagcgacgaaaucgagcaccugguggucgccgagcucauuaagcgcagagaaaauugccuggaugcucuugaguccaucaugacaacgaaaagcgugucuuuucggcgccugucccaucucagaaagcugguucccggguucggaaaagccuauaccauuuuuaacaagacacugauggaagcugacgcccacuacaaaagcgugaagaccuggaaugaggucaucccgucuaagggcugccucgaaguugggggacggugucacccccaugugaacggcguguucuucaaugggauuauccugggaccugauggcaacguccuuauccccgagaugcagagcucccugcuccagcaacacauggagcugcuugaaucuagcgugauuccucugaugcauccccucgcggacccguccacagucuuuaaagagggcgaugaagccgaggacuucguggaaguucaccucccugaugugcauaagcaggucagcgacguggaucuggggcuccccucuuggggaaaauaucugcuuaucuccgcuggcgcccuggcuauucucauccuggccauuguucugaucaucugcuguagacgcgugaagaaaaccgggagcacgcagcggggacacagagagucuggcgggaagauguccgucgugccucagaauggcaagauuaucagcuccugggagcuuuacaaaucugaaagcgagacaggacucuga

SEQ ID NO: 223323 - RNA, 1575 nt, Artificial Sequence
  derived and/or modified CDS sequence (opt5) from glycoprotein__RABV__JQ595310.1
augaucccccaggcccuccuguucgugccucugcuuauuccgcugcucugcagaggcgaguuucccaucuacaccauuccugacaagcuggggcccuggagcccuaucgauauucaccaucuuuccugucccaacaaucuggucgcugaaaacgacggaugcacaucucucagcggcuucuccuauauggagcugaaaguuggguacaucucugccaucaaggugaauggauuuacguguaccggcguggucacagaagcggagaccuauacaaacuucgugggguacguuaccacaaccuuuaaacggaagcacuuccgcccuacgccggaugcuugcagagccgcccaugacuggaaaauggcuggagauccccgguaugaagacagccugcaaaauccuuaccccgauuaucacuggcuccgcaccgugaagacaaccaaggagucccuggucauuaucucuccuagcguggccgaccuugaucccuacgacaaaucccugcauagcagaguuuuuccgucuggcaagugucucggcauuacaguguccagcaccuacugcucuacgaaccacgauuauacaaucuggaugccugucgagccccggcuggggaccuccugugacauuuucacaaauagccgcggaaaaagagcuucuaagggcgggcgggugugcggauuuguggaugaacgcggccuuuacaaaucccugaagggggccuguaagcucaaacugugcggagucccuggcaucagacugcucgacggcaccuggguuagcauucagaccuccgaggacaucaagugguguccucccgaucggcuggugaaccuucacgacuuccauucugaugaaaucgagcaccugguggucgaggaacucauuaaacgcagagagaauugccuggacgcgcuugaaagcaucaugacaacgaaguccgugagcuuucggcgccugucucaucucagaaaacugguucccggguucggaaaggccuauaccauuuuuaacaauacacugauggaggcugaugcccacuacaaauccgugaagaccuggaacgaagucaucccgagcaagggcugccucgagguugggggacggugucaucccccugugaauggcguguucuucaacgggauuauccugggacccgacggcaauguccuuaucccugagaugcagucuagccugcuccagcaacacauggaacugcuugaguccucugugauuccccugaugcacccgcucgcugauccuagcacagucuuuaaagaaggcgacgaggccgaagauuucguggagguucaucugcccgacgugcacaagcaggucuccgauguggaccuggggcucccuagcuggggaaaauaucugcuuaugucugcgggcgcccuggcuauccucauucuggccaucguucugauuaucugcuguagacgcgugaacaagacccgguccagccagagagggcaucgcgagucuggaggcaaaauguccgucgcuccccagaacgggaagaucauuagcuccugggaacuuuacaagucugagagcgaaacgggccucuga

SEQ ID NO: 223324 - RNA, 1575 nt, Artificial Sequence
  derived and/or modified CDS sequence (opt5) from glycoprotein__RABV__JQ595312.1
augaucccccaggcccugcuguucgugccucugcuuauuccgagccugugccucggcgaguuucccuucuacaccaucccugacaagcuggggcccugguccccuaugcacauucaucaccuuucuugucccaacaaucuggucgcugaagaugacggaugcacaagccucuccggcuuuucuuauauggagcugaaaguuggguacaucagcgccauuaaggugaacggauucacguguaccggcguggucacagaagcggagaccuauacaaauuuugugggguacguuaccacaaccuucaaaagaaagcauuuucggccuaugccggaugcuugccgcgccgcccacgacuggaaaauggcuggagaucccagauaugaagacucccugcaaaacccuuaccccgauucucauuggcuccggacggugaagaccacaaaggagagccuggucaucaucuccccuagcguggccgaccuugaucccuaugacaaaucucugcacucccgcguuuucccgagcggcaagugucucggcauuaccgugucuuccacauacugcagcaccaaucacgauuacacgaucuggaugccugucgagcccagacuggggacaucuugugacauuuuuaccaacucccggggaaaacgcgcuagcaagggcgggagagugugcggauucguggaugaacggggccuuuauaaaucccugaagggggccuguaagcucaaacugugcggagucccuggcauccgccugauggacggcacauggguuucuauucagaccagcgaggacaucaagugguguccucccgauagacucgugaaucugcaugacuuucacuccgaugaaauugagcaucuuguggucgaggaacugaucaaacggcgcgagaacugccucgacgcgcuggaaagcaucaugaccacaaagucuguguccuucagacggcuuagccaccuccgcaaacucguucccggguuuggaaaggccuacacgauuuucaauaaaacccugauggaggcugaugcccacuauaagucugugaagaacuggaaugaagucaucccgagcaaaggcugccuggagguugggggaagaugucaucccccugugaacggcguguucuuuaaugggauuauccucggacccgacggcaacguccugauuccugagaugcaguccucucuucugcagcaacacauggaacuccuggagagcuccgugaucccccuuaugcauccgcuggcugauccuagcacagucuucaaggaaggcgacgaggccgaagauuuuguggagguucaccuccccgacgugcauaaacaggucucugauguggaccuggggcugccuuccuggggaaaguaccuccugaugagcgcgggcgcccuugcuauccugcuccuggccauuguuucuaucauuugcugucggagaguguccaaaacccgcagcacacagcgggggcacagagaguccggaggccgcaugucugucgcuccccagaaugggaagaucauuagcuccugggaacuguauaagucugagagcgaaaccggccuuuga

SEQ ID NO: 223325 - RNA, 1575 nt, Artificial Sequence
  derived and/or modified CDS sequence (opt5) from glycoprotein__RABV__JQ595313.1
augaucccccaggcccuccuguucgugccucugcuuauuccgagccugggccucgggaaguuucccaucuacaccauuccugacaaacugggacccugguccccuaucgauauucaccaucuuucuugccccaacaaucuggucguugaggacgaaggcuguacaagccucuccggguucucuuauauggagcugaaggugggauacaucagcuccaucaaagugaacggcuuuacgugcaccggggucgugacagaagcugagaccuauacaaauuucguuggauacgugaccacaaccuuuaagagaaaacacuuccggccuaugccggaugccugucgcgcggcucaugacuggaagauugccggcgaucccagauaugaagacucucugcaaaacccuuaccccgauuaucacuggcuccggacggucaagaccacaaaagagagccuggugaucauuuccccuagcguugccgagcuugaccccuacgauaagucucugcauucccgcguguuuccgagcggcaaaugccucgggaucaccgucucuuccacauacuguagcaccaaucacgacuauacgauuuggaugccuguggaagcuagacugggaacaucuugcgauaucuucaccaacucccggggcaagaaagccagcaaagggggacgcacauguggcuuuguggacgagagagggcuuuacaagucccugaagggagcuugcaagcucaaacuguguggcguccccggccugcggcucauggaugggaccuggguuucuauucagaccagcgacgacaucaaguggugcccucccgaucagcuggugaaucuucacgacuuccauuccgaugaaaucgagcaccugguggucgaggaacucauuaaaaagcgcgagggaugucuggacgcccuugaaagcaucaugacaacgaaaucuguguccuuuagacggcugagccaucuccgcaagcugguucccggcuucgggaaggcguauaccauuuuuaacaauacacugauggaggccgaugcucacuacaaaucugugagaaccuggaacgaagucaucccuagcaagggaugccucaaagugggcgggcggugccacccgcccguuaauggaguguucuucaacggcauuauccugggcccugacgggaauguccuuauccccgagaugcaguccucucugcuccaacagcauauggagcugcuugaaagcuccgugauuccucugaugcacccccucgccgauccgagcacagucuuuaaggacggagaugaggcugaagacuucguggagguucaucugccugaugugcacaaacaggucucugacguggaccugggccuccccuccugggggaaguaucugcuuaugagcgccggagcgcuggccacccucauccuggcuauuuuucugaucacguguugccgcagagccaaccggacagaaucuacccagagaggccaucgcgaguccgggggcaagguuagcguggcuccucaaaauggaaaaauuaucuccucuugggagcuuuacaagagcgaauccgagaccggcauguga

SEQ ID NO: 223326 - RNA, 1575 nt, Artificial Sequence
  derived and/or modified CDS sequence (opt5) from glycoprotein__RABV__JQ595315.1
augaucccccaggcccuccuguucgugccucugcuuauuccgagccugugccucggcaaguuucccaucuacaccauuccugacaaacuggggcccugguccccuaucgauauucaccaucuuucuugucccaacaaucuggucgcugaggacgaaggaugcacaagccucuccggcuucucuuauauggagcugaagguuggguacaucagcgccaucaaagugaacggauuuacguguaccggcguggucacagaagcggagaccuauacaaauuucgugggguacguuaccacaaccuuuaagagaaaacacuuccggccuaugccggaugcuugccgcgccgcccaugacuggaagauggcuggagaucccagauaugaagacucccugcaaaacccuuaccccgauuaucacuggcuccggacggugaagaccacaaaagagucucuggucauuaucagcccuuccguggccgaccuugaucccuacgacaagagccugcauucucgcguuuuuccguccggcaaaugucucggcauuaccgugagcucuacauacugcuccaccaaucacgauuauacgaucuggaugccugucgaggcuagacuggggacaagcugugacauuuucaccaacucuaagggaaagaaggccuccaagggcgggcggacaugcggauuuguggaugaacgcggccuuuacaaaagccugaagggggcguguaaacucaagcugugcggagugcccggccugagacucauggacggcaccugggucuccauccagaccucugacgauauuaaaugguguccucccgaccagcugguuaaucuucacgauuuccauagcgacgagaucgaacaccuggugguggaggagcucaucaagaaacgggaagggugccuggaugcccuugaguccauuaugacaacgaaaagcgucucuuuucgcagacugucccaucuccggaagcuggugcccggauucggcaaggcuuauaccaucuuuaacaauacacugauggaagccgacgcucacuacaagagcguucgcaccuggaacgaggugauuccuucuaaagggugccucaaggucggaggcagaugucacccgcccgugaaugggguuuucuucaacggaaucauucugggcccugauggcaaugugcuuauccccgaaaugcagagcucccugcuccaacagcauauggagcugcuugagucuagcgucaucccucugaugcacccccucgccgacccguccacaguguuuaaagauggggacgaagcggaggauuucgucgaagugcaucugccugacguucacaaacaggugagcgagauugaccugggacuccccucuuggggcaaguaucugcuuauguccgccgggguccuggcuacccucauccuggccauuuuucugaucacgugcugucggcgcgcuaacagaacagaaagcacccagcggggaagacgcgagucuggcgggaaaguguccguugccccucaaaaugugaagauuaucagcuccugggagcuuuacaaaucugaaagcgagaccggccucuga

SEQ ID NO: 223327 - RNA, 1575 nt, Artificial Sequence
  derived and/or modified CDS sequence (opt5) from glycoprotein__RABV__JQ595316.1
augaucccccaggcccuccuguucgugccucugcuuauuccgagccugugccucggcaacuuucccaucuacaccauuccugacaagcuggggcccugguccccuaucgauauucaccaucuuucuugucccaauaaccuggucgcugaggacgaaggaugcacaagccucuccggcuucucuuauauggagcugaaaguuggguacaucagcgccaucaaggugaauggauuuacguguaccggcguggucacagaagcggagaccuauacaaacuucgugggguacguuaccacaaccuuuaaaagaaagcacuuccggccuaugccggaugcuugccgcgccgcccaugacuggaaaauggcuggagaucccagauaugaagacucccugcaaaauccuuaccccgauuaucacuggcuccggacggugaagaccacaaaggagucucuggucauuaucagcccuuccguggccgaccuugaucccuacgacaaaagccugcauucucgcguuuuuccguccggcaagugucucggcauuaccgugagcucuacauacugcuccaccaaccacgauuauacgaucuggaugccugucgaggcuagacuggggacaagcugugacauuuucaccaauucuaaaggaaagaaagccuccaagggcgggcggacaugcggauuuguggaugaacgcggccuuuacaagagccugaaaggggcguguaagcucaaacugugcggagugcccggccugagacucauggacggcaccugggucuccauccagaccucugacgauauuaagugguguccucccgaccagcugguuaaccuucacgauuuccauagcgacgagaucgaacaccuggugguggaggagcucaucaaaaagcgggaagggugccuggaugcccuugaguccauuaugacaacgaaaagcgucucuuuucgcagacugucccaucuccggaagcuggugcccggauucggcaaggcuuauaccaucuuuaauaacacacugauggaagccgacgcucacuacaaaagcguucgcaccuggaaugaggugauuccuucuaaggggugccucaaagucggaggcagaugucacccgcccgugaacgggguuuucuucaauggaaucauucugggcccugauggcaacgugcuuauccccgaaaugcagagcucccugcuccaacagcauauggagcugcuugagucuagcgucaucccucugaugcacccccucgccgacccguccacaguguuuaaggauggggacgaagcggaggauuucgucgaagugcaucugccugacguucacaaacaggugagcgagauugaccugggacuccccucuuggggcaaguaucugcuuauguccgccgggguccuggcuacccucauccuggccauuuuucugaucacgugcugucggcgcgcuaauagaacagaaagcacccagcggggaagacgcgagucuggcgggaagguguccguugccccucaaaacggcaaaauuaucagcuccugggagcuuuacaagucugaaagcgagaccggacucuga

SEQ ID NO: 223328 - RNA, 1575 nt, Artificial Sequence
  derived and/or modified CDS sequence (opt5) from glycoprotein__RABV__JQ595317.1
augaucccccaggcccugcuguucgugccucugcuuauuagcucccugugcuuuggcaaguucccgaucuacaccauucccgacaaacucgggccuuggucucccaucgauauucaccaucuguguugcccuaacaaucuugucgcugaggaagagggauguacaagccuguccggcuuuucuuauauggaacucaagguuggguacaucagcgccaucaaagugaacggauucacgugcaccggcguggucacagaggcggaaaccuauacaaauuuugugggguacguuaccacaaccuucaagagaaaacacuuucggcccaugccugacgcuugucgcgccgccuaugauuggaagauggcuggagacccgagauacgaggauucccugcaaaaccccuauccugacuaccauuggcugcggacggugaagaccacaaaagagucucucauuaucauuagccccuccgucgccgaucuggacccuuacgauaagagccuucacucucgcguguuccccggcggcaaaugccuggggaucaccauuuccagcacauauuguucuaccaaucaugacuacacgaucuggaugccggaagaggcuagacucggaacauccugcaacauuuuuaccaauagccggggcaagaaagccucuaaagggggacgcacauguggcuucguugaugaaagagggcuguauaagucccuuaagggagcgugcaagcugaaacucuguggcgugccuggccugcggcugauggacgggaccugggucagcauccagaccuccaacgagacaaaguggugucccccugaucagcucgugaaucugcacgacuuucacucugacgagaucgaacaucuuguggucgaggaacugguuaaaaagcgcgaggaaugccucgaugcccuggagagcauuaugacgaccaaauccgugagcuucagacggcuuucucaccuccgcaagcucgugcccggauuuggcaaggcuuacacaaucuucaacaaaacccugauggaggccgacgcucauuauaaguccgucagaacauggaaugaaauuauccccagcaaagggugccugaaggugggaggccggugccacccucacguugaugggguguucuuuaacggaauuauccucggcccggacggccauguccugauccccgagaugcagucuagccuucugcaacagcacauggaacuccuggaguccucugugauuccucuuauccauccccuggccgauccuagcaccguuuucaaagacggggaugaagcggacgauuuuguggagguccaccuccccgacgugcauaagcaggucuccggaguggaucugggccugccgggguggggaaaguaccuccugaugagcgccggcgcucuugccacgcugauucucacaaucuuccugauuaaauguugccgcgggguuaauagaaccgagucugugcagcggucccugagagacagcggcggaaaggucucugugccuccccaaaacggcaaaguuaucuccagcugggaacuuuauaaguccgggggagagaccggccucuga

SEQ ID NO: 223329 - RNA, 1575 nt, Artificial Sequence
  derived and/or modified CDS sequence (opt5) from glycoprotein__RABV__JQ595319.1
augaucccccaggcccugcucagcgugccucugcuuauuuccucucugugccucggcaaguucccgaucuacaccauucccgacaaacuggggccuuggagccccaucgauauucaccaucuuuccuguccuaacaaucuggucguugaggacgaaggaugcacaucucucagcggcuuuuccuauauggagcugaaggugggguacaucucugcuaucaaagugaacggauucacguguaccggcgucgugacagaagccgagaccuauacaaauuuuguuggguacgugaccacaaccuucaagagaaaacacuuucggcccaugccugaugcgugccgcgcugcccaugaauggaagauggccggagacccgagauaugaggauagccugcaaaaccccuacccugacuaucacuggcuccggacggucaagaccacaaaagagucccugauuaucauuagccccucuguggcugaucuugacccuuacgauaagucccugcauagccgcguuuuccccggcggcaauugucucgggaucaccauuucuuccacauacugcagcaccaaccacgacuauacgaucuggaugccggaagaggccagacugggaacaucuugugauauuuuuaccaauucccggggcaaacgcgcuagcaaagggggaaagaucugcggcuucguggacgaaagagggcuuuacaagucccugaagggagccuguaaacucaagcugugcggcgucccuggccugcggcucauggaugggacaugggugucuauccagaccagcgacgagaccaaauggugucccccugaccagcuggugaacguccacgauuuucauuccgacgagauugaacaccuuaucguugaggaacuggugaagaaacgcgaggaaugccucgaugcgcuggagagcauuaugacaacgaagucuguguccuucagacggcuuagccaucugcgcaaacucguccccggauuuggcaaggccuauaccaucuucaauaacacacugauggaggcugacgcccacuacaagucugugagaaccuggaaugaaauuauccccagcaaagggugccugaagguuggaggcaugugucacccucaugucgggggaguguuuuucaacggcaucauucucggcccggaugggacagugcugauccccgagaugcaguccucucuucugcaacagcacauggaacuccuggagagcuccguuauuccucuuaugcauccccuggcugacccuagcaccguguucaaagaaggagaugaggccgaggacuuugucgaaauccaccuccccgaugugcauaagcagauuucuggcgucgaccuggggcugccguccuggggaaaauaucuccugaucagcgcgggcgcccuugcuacgcugauccucacaauuuuccugauuaccugcugucggaaggugaaucgcaccgagucuauccagagagggcacggcgaauccgagcggaagguuagcguguccccucaaaacggaagagucaucucuagcugggaacuguacaaauccggcggggagacaaaucuuuga

SEQ ID NO: 223330 - RNA, 1575 nt, Artificial Sequence
  derived and/or modified CDS sequence (opt5) from glycoprotein__RABV__JQ595320.1
augaucuuccaggcccugcucuuugugccccugcuuauuagcucccugugccucggcaaguucccuaucuacaccauuccggacaaacuggggcccuggucuccuaucgauauucaccaucuuagcugucccaacaaucuggucguugaggacgaaggaugcacaucccucucuggcuuuagcuauauggagcugaaggugggguacaucuccgcuaucaaagugaacggauucacguguaccggcgucgugacagaagccgagaccuauacaaauuuuguuggguacgugaccacaaccuucaagagaaaacacuuucggccuauucccgaugcgugccgcgcugccuauaacuggaagaucgccggagacccuagauacgaagagucucugcaaaauccguaucccgauuaccauuggcuccggacggucaagaccacaaaagagagccugauuaucauuuccccuagcguggcugaccuugaucccuacgacaagucucugcacucccgccucuucccuggcggcaaaugucuggggaucaccauuagcucuacauauugcuccaccaaccaugauuacacgaucuggaugcccgaggaaccgagacuuggaacaagcugugacaucuuuaccaauucuaagggcaaaaaggccuccaaagggggaaagguuugcggcuucguggaugaacgggggcuguauaagagccucaaaggagcuuguaagcugaaacugugcggcgucuccggccuccgccugauggacgggacaugggugaccauucagaccucugaugagacaaagugguguccucccgaccagcuugugaaccugcacgacuuucacagcgaugagaucgaacaucucgucguugaggaacuggugaaaaagagagaggaaugccuugacgcccuggaguccauuaugacgaccaagagcgugucuuuccggcgccucuccuaccugagaaaacuggucccuggauuuggcaaggcguauacaaucuucaauaaaacccucauggaggccgaugcucacuacaagagcgugcggacauggaacgaaauuauccccucuaaagggugccugaagguuagcgaccgcugucauccccacguggauggagucuucuuuaauggcaucauucuugggccugacggaaacgugcugaucccggagaugcaguccucucuccugcaacagcacauggaacuucuggagagcuccguuauuccccucaugcauccucuggccgaucccagcaccguguucaaggacggcgaugaagcugaggacuuugucgaggugcaucugccugauguccacaaacagaucucuggcguggaccucgggcugcccuccuggggaaaguaucuucugaugauugccggcgggcucgcgacgcugguucugaucaucuuccuuauggccugcuguagacggacaaaacgcaccgaaagcagaccgcggggaucuggcgaguccggggaaaaggugcucgcuaccccucagcccaaaaaggucgugagcuccugggagcuguacaagagagaaggcgacgcccgccuguga

SEQ ID NO: 223331 - RNA, 1575 nt, Artificial Sequence
  derived and/or modified CDS sequence (opt5) from glycoprotein__RABV__JQ595321.1
augaucuuccaggcccugcucuuugugccccugcuuauuagcucccugugccucggcaaguucccuaucuacaccauuccggacaaacuggggcccuggucuccuaucgauauucaccaucuuagcugucccaacaaucuggucguugaggacgaaggaugcacaucccucucuggcuuuagcuauauggagcugaaggugggguacaucuccgcuaucaaagugaacggauucacguguaccggcgucgugacagaagccgagaccuauacaaauuuuguuggguacgugaccacaaccuucaagagaaaacacuuucggccuauucccgaugcgugccgcgcugccuauaacuggaagaucgccggagacccuagauacgaagagucucugcaaaauccguaucccgauuaccauuggcuccggacggucaagaccacaaaagagagccugauuaucauuuccccuagcguggcugaccuugaucccuacgacaagucucugcacucccgccucuucccuggcggcaaaugucuggggaucaccauuagcucuacauauugcuccaccaaccaugauuacacgaucuggaugcccgaggaaccgagacuuggaacaagcugugacaucuuuaccaauucuaagggcaaaaaggccuccaaagggggaaagguuugcggcuucguggaugaacgggggcuguauaagagccucaaaggagcuuguaagcugaaacugugcggcgucuccggccuccgccugauggacgggacaugggugaccauucagaccucugaugagacaaagugguguccucccgaccagcuugugaaccugcacgacuuucacagcgaugagaucgaacaucucgucguugaggaacuggugaaaaagagagaggaaugccuugacgcccuggaguccauuaugacgaccaagagcgugucuuuccggcgccucuccuaccugagaaaacuggucccuggauuuggcaaggcguauacaaucuucaauaaaacccucauggaggccgaugcucacuacaagagcgugcggacauggaacgaaauuauccccucuaaagggugccugaagguuagcgaccgcugucauccccacguggauggagucuucuuuaauggcaucauucuugggccugacggaaacgugcugaucccggagaugcaguccucucuccugcaacagcacauggaacuucuggagagcuccguuauuccccucaugcauccucuggccgaucccagcaccguguucaaggacggcgaugaagcugaggacuuugucgaggugcaucugccugauguccacaaacagaucucuggcguggaccucgggcugcccuccuggggaaaguaucuucugaugauugccggcgggcucgcgacgcugguucugaucaucuuccuuauggccugcuguagacggacaaaacgcaccgaaagcagacggagagcucucggagagucuggcgaaaaggugcuggccaccccgcagccuaaaaaggucguguccagcugggagcuguacaagcgcgaaggggacgcucggcucuga

SEQ ID NO: 223332 - RNA, 1575 nt, Artificial Sequence
  derived and/or modified CDS sequence (opt5) from glycoprotein__RABV__JQ595322.1
augaucccccaggcccugcucagcgugccucugcuuauuuccucucugugcuucggcaaguuuccgaucuacaccauucccgagaaacucgggccuuggagccccaucgacauucaccaucuguccuguccuaacaaucuugucguugaagaugagggaugcaacucucugagcggcuucuccuauauggaacucaaggugggguacaucucugcuaucaaagugaauggauuuacauguacgggcgucgugaccgaggccgaaacauauaccaacuucguuggguacgugacaaccacauuuaagagaaaacacuuccggcccaugccugacgcgugccgcgcugccuauaauuggaagaccgccggagauccgagauacgaggagagccugcauaaccccuauccugacuaccacuggcugcggacggucaagaccacaaaagaaucccucauuaucauuagccccucuguggcugaucuggacccuuacgauaagucccuucauagccgcaucuuucccggcggcaaaugucuggggauuaccaucucuuccacauauugcagcaccaaucacgacuacacgauuuggaugccggaggaagccagacucggaacaucuugugauaucuucaccaacuccaagggcaaacgggcuagcaaagggggacgcacaugcggcuuuguugacgagagagggcuguauaagucccuuaagggagccuguaagcugaaacucugcggcgugccuggccugcggcugauggaugggaccugggucgcgauccaaacccccaaugagacaaagugguguucuccugaccagcucgugaacgugcacgauuuccgcagcgacgaaauugagcaucuggucguugaggaacuuaucagaaaacgggaagagugccuggacgcccucgaguccauuaugacgaccaagagcgugucuuuucgcagacuguccaaucuucggaaacuggugcccggauucggcaaggcuuacacaaucuuuaacaagacccucauggaagccgaugcucacuauaaaagcguccgcacauggaaugagauuauccccucuagagggugccugaaggugggaggccggugucauccucacguuaacgggguguucuucaauggaaucauucugggcccggacggccacauccucauucccgaaaugcagagcucccugcuucagcaacauauggagcugcucgaaucuagcgucaucccucugauucacccccuugccgauccuuccaccguguuuaaagacggggaugaggcggaggacuucguugaagugcaucugcccgauguccaccaacaggugagcggagucgaccucggccugccggauugggggaaguacgugcugaugucugccggagcucucgccacgguuaugcugacaaucuuucuuauuaccugcuguagacgcgugaaacggaccgaguccauccaucagggccugggggaaagcggcagaaaggucucugugacaccucagaacggaaagguuauguccagcugggaguauuacaaauccgaaggcgggacccgccucuga

SEQ ID NO: 223333 - RNA, 1575 nt, Artificial Sequence
  derived and/or modified CDS sequence (opt5) from glycoprotein__RABV__JQ595323.1
augaucagccaggccgugcuguacgucccccuccugauuccuucccuuugcaucggcgaguucccgauuuauaccauccccgacaagauugggccuuggucucccaucgauauccaccaucugagcuguccuaacaaucucguuguggaagacgagggaugcacaucccugucuggcuuuagcuacauggaacuuaaagugggguauauuuccgcuaucaaggucaacggauucacguguaccggcgugguuacagaggccgaaaccuacacaaauuuugugggguaugucaccacaaccuucaaaagaaagcacuuucggcccaugccugaugcgugccgcgcugccuacaacuggaaaauggccggagacccgagauaugaggagucucugcaaaaucccuacccugauuacaacuggcuccggacggugaagaccacaaaggaaagccugauuaucauuucccccagcguugcugaccuggauccuuaugacaaaucucuccauucccgcguguuccccaauggcaagugucugggcgucaccaucagcucuacauacugcuccaccaaccacgauuauacgauuuggaugccggaggaagccagacuugggacaagcugugacaucuuuaccaauucuaaaggaaagcgggcuuccaaaggcgggcgcacaugcggauucguggaugagagaggccuguacaagagccuccgcggggccuguaagcugaaacuuugcggagugccuggccugcggcucauggacggcaccugggucuccauccagaccucugaugacacaaaguggugucccccugaccagcugguuaacgugcaugauuuucacagcgacgagauugaacaccugguggucgaggaacucgugaaaaagagagaggaaugccuggaugcgcuugaguccaucaugacgaccaaaagcguuucuuuccggcgccugucccaucucagaaagcuggugcccggguuuggaaaagccuauacaauuuucaauaagacccuuauggaggcugacgcccacuacaagagcauccagacauggaacgaaauuauccccucuaaaggcugccugaaggucgggggaaugugucauccucacguggauggcguguuuuucaaugggaucauucucggaccggacggcaacguucugauccccgagaugcaaagcucccugcuccagcagcacauggaacugcuugagucuagcgucauuccucugaugcauccccucgcugauccuuccaccguguucaaagacggcgaugaagccgaggacuuugucgaggugcaucugcccgauauccacaagcagguuagcgggauugaccuuggacugccggacuggggcaaauaucuccugaugucugcgggggcccuggcuauccuccugcuuacgaucuuccugaugacaugcugucggcgcgugaauagaaccaaguccgcccaacgggauccuggagaacucggcagaaaggucagcgcuacaccccagaaccgcaaagugauuucuuccugggagcuguacaagagcgggggcgacacccggcuguga

SEQ ID NO: 223334 - RNA, 1575 nt, Artificial Sequence
  derived and/or modified CDS sequence (opt5) from glycoprotein__RABV__JQ595324.1
augaucccccaggcccugcucagcgugccucugcuuaucuccucucugugcuucggcaaguuuccgaucuacaccauucccgagaaacucgggccuuggagccccaucgacauucaccaucuguccuguccuaacaaucuugucguugaagaugagggaugcaacucucugagcggcuucuccuauauggaacucaaggugggguacaucucugcuaucaaagugaauggauuuacauguacgggcgucgugaccgaggccgaaacauauaccaacuucguuggguacgugacaaccacauuuaagagaaaacacuuccggcccaugccugacgcgugccgcgcugccuauaauuggaagaccgccggagauccgagauacgaggagagccugcauaaccccuauccugacuaccacuggcugcggacggucaagaccacaaaagaaucccucauuaucauuagccccucuguggcugaucuggacccuuacgauaagucccuucauagccgcaucuuucccggcggcaaaugucuggggauuaccaucucuuccacauauugcagcaccaaucacgacuacacgauuuggaugccggaggaagccagacucggaacaucuugugauaucuucaccaacuccaagggcaaacgggcuagcaaagggggacgcacaugcggcuuuguugacgagagagggcuguauaagucccuuaagggagccuguaagcugaaacucugcggcgugccuggccugcggcugauggaugggaccugggucgcgauccaaacccccaaugagacaaagugguguucuccugaccagcucgugaacgugcacgauuuccgcagcgacgaaauugagcaucuggucguugaggaacuuaucagaaaacgggaagagugccuggacgcccucgaguccauuaugacgaccaagagcgugucuuuucgcagacuguccaaucuucggaaacuggugcccggauucggcaaggcuuacacaaucuuuaacaagacccucauggaagccgaugcucacuauaaaagcguccgcacauggaaugagauuauccccucuagagggugccugaaggugggaggccggugucauccucacguuaacgggguguucuucaauggaaucauucugggcccggacggccacauccucauucccgaaaugcagagcucccugcuucagcaacauauggagcugcucgaaucuagcgucaucccucugauucacccccuugccgauccuuccaccguguuuaaagacggggaugaggcggaggacuucguugaagugcaucugcccgauguccaccaacaggugagcggagucgaccucggccugccggauugggggaaguacgugcugaugucugccggagcucucgccacgguuaugcugacaaucuuucuuauuaccugcuguagacgcgugaaacggaccgaguccguccaucagggccugggggaaagcggcagaaaggugucuguugcuccucagaacggaaaggugauguccagcugggaguauuacaaauccggcgggggaacacgccucuga

SEQ ID NO: 223335 - RNA, 1575 nt, Artificial Sequence
  derived and/or modified CDS sequence (opt5) from glycoprotein__RABV__JQ595325.1
augaucccccaggcccugcucagcgugccucugcuuauuuccucucugugcuucggcaaguuuccgaucuacaccauucccgagaaacucgggccuuggagccccaucgacauucaccaucuguccuguccuaacaaucuugucguugaagaugagggaugcaacucucugagcggcuucuccuauauggaacucaaggugggguacaucucugcuaucaaagugaauggauuuacauguacgggcgucgugaccgaggccgaaacauauaccaacuucguuggguacgugacaaccacauuuaagagaaaacacuuccggcccauggcggacgcuugccgcgccgccuauaauuggaagaccgcuggagauccuagauacgaggagagccugcauaacccguaucccgacuaccacuggcugcggacggucaagaccacaaaagaaucccucauuaucauuagcccuucuguggccgaucuggaccccuacgauaagucccuucauagccgcaucuuuccuggcggcaaaugucuggggauuaccaucucuuccacauauugcagcaccaaucacgacuacacgauuuggaugcccgaggaagcuagacucggaacaucuugugauaucuucaccaacuccaagggcaaacgggccagcaaagggggacgcacaugcggcuuuguugacgagagagggcuguauaagucccuuaagggagcguguaagcugaaacucugcggcgugccgggccugcggcugauggaugggaccugggucgccauccaaaccccuaaugagacaaagugguguucucccgaccagcucgugaacgugcacgauuuccgcagcgacgaaauugagcaucuggucguugaggaacuuaucagaaaacgggaagagugccuggacgcucucgaguccauuaugacgaccaagagcgugucuuuucgcagacuguccaaucuucggaaacuggugccuggauucggcaaggccuacacaaucuuuaacaagacccucauggaagcugaugcccacuauaaaagcguccgcacauggaaugagauuauccccucuagagggugccugaaggugggaggccggugucauccccacguuaacgggguguucuucaauggaaucauucugggcccugacggccacauccucauuccggaaaugcagagcucccugcuucagcaacauauggagcugcucgaaucuagcgucaucccccugauucacccucuugcggaucccuccaccguguuuaaagacggggaugaggccgaggacuucguugaagugcaucugccugauguccaccaacaggugagcggagucgaccucggccugcccgauugggggaaguacgugcugaugucugcuggagcccucgcuacgguuaugcugacaaucuuucuuauuaccugcuguagacgcgugaaaaagaccgaguccauccaucagggcccgggggaaagcggccggaaggucucugugacaccucagaacggaaaaguuauguccagcugggaguauuacaaguccggcgggggaaccagacuguga

SEQ ID NO: 223336 - RNA, 1575 nt, Artificial Sequence
  derived and/or modified CDS sequence (opt5) from glycoprotein__RABV__JQ595326.1
augaucccccaggcccuccuguucgugccucugcuuuuuccgagccugugccucggcaaguuccccauuuacaccaucccugagaaacuggggcccugguccccuauugacauccaccaucuuucuugucccaacaaucuggucguugaagaugagggaugcgacagccucuccggcuuuucuuauauugaacugaaggugggguacaucagcgcuaucaaagugaacggauucacauguacgggcgucgugaccgaggccgaaacauauaccaauuuuguuggguacgugacaaccacauucaagagaaaacacuuucggccuaugccggaugcgugccgcgcugccuauaacuggaagaccgccggagaccccagauacgaggagucccugcauaauccuuaucccgauuaccacuggcuccggacggucaagaccacaaaagaaucucugauuaucauuagcccuuccguggcugaccuugaucccuacgacaagagccugcauucucgcguuuucccgggcggcaaaugucucgggaucaccguguccagcacauauugcucuaccaaccacgauuacacgauuuggaugccugaggaagccagacugggaacauccugugacaucuuuaccaauagcaagggcaaacgggcuucuaaagggggacgcacaugcggcuucgucgaugagagagggcuuuauaagucccugaagggagccuguaagcucaaacugugcggcgugcccggccugcggcucauggacgggaccuggguggcgauucaaaccccuggagagacaaagugguguagccccgaucagcuggucaaccuucacgacuuucgcuccgacgaaaucgagcaucugguuguggaggaacucaucaaaaagagagaagagugccuggaugcccuugagucuauuaugacgaccaaaagcguguccuuccggcgccugagcaaucucagaaagcugguccccggcuuugggaaggcuuacacaaucuucaacaaaacccugauggaagccgacgcucacuauaagucugugcggacaugggaugagauuaucccuuccaaaggaugccuccgcguuggcgggagaugucauccgcacgugaauggagucuucuuuaacggcauuauccugggccccgacgggcacgugcuuaucccugaaaugcagagcucucugcuccagcaacauauggagcugcuugaaagcuccguuauuccccugauccacccucucgccgaucccucuaccguguucaaggacggagaugaggcggaggacuuugucgaagugcaucugccggauguccacaaacaggugagcggcguugaccuggggcucccuaauuggggaaaguacgugcugauguccgccggcguccuugcuacggugauucugacaaucuuccuccugaccugcugucggagaguuaaccgcaccaagcccaaacagcagagccuggaggaaucugggcggaagguguccgucacaccucaaaauggcaaagugaugagcucuugggaguauuacaaguccgaaggaagaaccagccuuuga

SEQ ID NO: 223337 - RNA, 1575 nt, Artificial Sequence
  derived and/or modified CDS sequence (opt5) from glycoprotein__RABV__JQ595327.1
augauccugcaggcccuccuguucgugccccuucugauuagcucccucugcuuuggcgacuucccuaucuacaccauuccggagaagcuggggcccuggucuccuaucgauauucaccaucuuagcugucccaacaaucuggucguugaagacgagggaugcuccucucucagcggcuuuuccuauauggaacugaaagugggguacaucucugcuaucaaggugaacggauucacauguacgggcgucgugaccgaggccgaaacauauaccaauuuuguuggguacgugacaaccacauucaaaagaaagcacuuucggccuaugcccgaugcgugccgcgcugccuauaacuggaaaaccgccggagacccuagauacgaggagagccugcaaaauccguaucccgauuaccauuggcuccggacggucaagaccacaaaggaaucccuggugauuaucagcccuucuguugcugaccuugaucccuacgacaaaucccugcacagccgcguguucucugauggcaagugucucggcauuaccaucuccagcacauauugcucuaccaaccaugacuacacgauuuggaugccugaggaagccagacuggggacauccugugauaucuuuaccacaagccggggaaaacgcgcuuccaagggcgggaaaaccugcggauucgucgacgagagaggccuuuauaagucucugaagggggccuguaaacucaagcugugcggagugagcggccugcggcucauggauggcaccuggguguccauucaggcgcccgacgaggccaaaugguguagcacagaccagcuggucaauauccacgauauccgcucugacgaaauugagcaccuuguuguggaggaacuggugaagaaaagagaagagugccucgaugcucuggaguccaucaugacgaccaagagcgucucuuuucggcgccuuagccaucugagaaaacucgugccgggguucggaaaggccuacacaauuuuuaacaagacccugauggaagcugacgcccacuauaaauccguucggacauggucugaggugaucccuagcaagggcugccuguccgucgggggacgcugucauccccacgaaaauggcguguucuucaacgggauuauccucggaccugauggcagcguucugauccccgagaugcagucuucccuucugcaacagcacauggaacuccuggagagcucugugauuccccuuaugcauccucuggcgaauccguccaccgucuuuaaagacggcgaugaggccgaagacuucguggagguccaccuccccgaugugcaggaacagaucagcgggguugaccugggacugccuaacuggggcaaguacgugaugauguccgcuggggcccucgcuauucugaugcuuacgaucuuucugaugacaugcuguagacgggccaauagaacccgcucuacccaacgggaucucggaggccuggagagaaaagucagcgugcccccuaaggacgggcgcguuauguccucuugggaaagcuauaaguccggcggagagacaagccuguga

SEQ ID NO: 223338 - RNA, 1575 nt, Artificial Sequence
  derived and/or modified CDS sequence (opt5) from glycoprotein__RABV__JQ595328.1
augaucacccaggcccuccuguucgugccccugcuuauuagcucccugugccucggccaauuuccuaucuacacaauuccggacaagcuggggcccuggucuccuaucgauauucaccaucuuagcugucccaacaaucuggucguugaggacgaaggaugcaacucccucucuggcuucagcuauauggagcugaaagugggguacaucuccucuaucaaggugaauggauuuacguguaccggcgucgugacagaagcugagaccuauacaaacuucguuggguacgugaccacaaccuuuaaaagaaagcacuuccggccuaugcccgaugccugccgcgcggcuuauagcuggaaaauggccggagacccuagauacgaagagucccugcauacgccguaucccgauuaccacuggcuccggaccgucaagacaaccaaggagagccuggugauuaucucuccuuccguugccgaccuugaucccuacgacaaaagccugcauucucgcguguuuuccggcggcaagugucucgggauuacaaucagcucuaccuauugcuccacgaaucacgauuacacaauuuggaugccugaagaggcuagacugggaaccagcugugacaucuucacaaacuccaaaggcaagcgggccucuaaagggggaagaaccugcggcuuugucgaugaacgcgggcuuuauaagagccugaagggagcuuguaaacucaagcugugcggcgugcccggccugcggcucauggacgggaccuggguguccauucagacaagcgaugagacgaaaugguguccgccugaccagcuggucaauauccacgacuuccgcucugaugagaucgaacaucuuguuguggaggaacuggugaagaaaagagaggaaugccucgacgcccuggaguccauuaugaccacaaagagcgucucuuuucggcgccuuagccaccugagaaaacucgugcccggauucggcaaggcguacaccaucuuuaacaagacacugauggaggccgaugcucauuauaaauccguucggaccuggaaugaaauuaucccuucuaaggggugccugagcgugggaggccgcugucacccccacgucaacgggguguucuucaauggaauuauccucggccccgacggcuccguucugaucccugagaugcagagcucucuucugcaacagcauauggaacuccuggaguccagcgugauuccgcuuaugcacccccuggccaacccuucuacggucuuuaaagauggggacgaagcugaggauuucguggagguccaucuccccgacgugcaggaacagguuuccggaguggaucugggccugccuaauugggggaaguacguccucaugagcgccggagugcuggcgauccuuauucugacaaucuuucucaugauuugcuguagacgggccaacagaaccaaauccauccaacagggccccggggagucuggccgcaagguuagcgugccgccucagaauggaaaggucaucuccucuugggagagcuucaaauccggcggggaaacccggcuguga

SEQ ID NO: 223339 - RNA, 1575 nt, Artificial Sequence
  derived and/or modified CDS sequence (opt5) from glycoprotein__RABV__JQ647510.1
augaucccccaggugcugcuguucgucccucugcuuguuuuuagcuccugcuucggcaaguuuccgauuuacaccauccccgacaaacuggggccuuggucucccauugauauccaccaucucagcuguccuaacaaucuggugguggaggacgaaggaugcacaaaccuuuccggcuucucuuauauggagcugaaggucggguacauuagcgccaucaaagugaauggauuuacguguaccggcguugugacagaagcugagaccuauacaaacuucgucggguacgugaccacaaccuuuaagagaaaacacuuccggcccaugccugaugccugccgcacggcguauaauuggaagauggcuggagacccgagauacgaagagucccuccauaaccccuauccugauuaccacuggcugcggaccguuaagacaaccaaagagucucuggugaucauuagccccuccgucgccgaccucgauccuuacgacaagagccugcauucucgcguguuucccggcggcaaauguuccgggaucacagugagcucuaccagaugcuccacgaaucacgauuauacaauuuggaugccggaaaacccucggcuuggaaccagcugugacaucuucacaaauucucgcggcaagagagccuccaaagggggaaagaccugcggcuuugucgaugagcgggggcuguacaagagccucaaaggagcuuguaagcugaaacuuugcggcguucugggccuccgccugauggacgggaccuggguggccauucaaacauccgaugaaaucaagugguguucucccgaccagcuggugaaccuccacgacuuccauagcgaugagauugagcaccuggucguggaggaacuuguuaaaaagagagaagagugccuggacgcucucgaaacgaucaugaccacaaaauccgugagcuuucggcgccugucucaucuuagaaagcuggucccuggauucggcaaggccuauaccaucuucaauaaaacacucauggaggcggaugcccacuacaaguccauucggaccuggaacgagaucauucccagcaaagggugccugcgcgugggaggcagaugucacccccauguuaaugggguguuuuucaacggaaucauucugggcccugacggccacguccucaucccggaaaugcagucuagccugcuucaucagcacauggagcugcucgaauccucugugaucccccugaugcauccucuugcugaucccagcacggucuuuaaggacggggaugaggccgaagacuucguggagguucaccucccugaugugcacaaacaaauuuccggagucgaccucggccugcccaauugggggaaguaugugcugaucagcgcuggaucucucacagcccugaugcuuaugauuuuucugaugaccugcugucggaagaccaacagagcggaguccauccagcauagcccgggcgaaacagggcgcaaaguuucugugaccucccacaacggccgggucauuagcuccugggagucuuacaagagcggaggcgaaacaaaacucuga

SEQ ID NO: 223340 - RNA, 1575 nt, Artificial Sequence
  derived and/or modified CDS sequence (opt5) from glycoprotein__RABV__JQ685892.1
augaucccccaggcccugcucuacgugccucugcuuauuagcucccugugcuucggcggguuuccgaucuauaccauucccgacaagcucggaccuuggucucccaucgauauucaccaucugagcuguccuaacaaucuugucguugaggacgaaggcugcacaucccugucuggguucagcuacauggagcucaaagugggauauaucuccgcuaucaaggugaacggcuuuacguguaccggggucgugacagaagccgagaccuacacaaauuucguuggauaugugaccacaaccuuuaaaagaaagcacuuccggcccaugccugaugcgugccgcgcugccuacaacuggaaaauggccggcgacccgagauaugaagagucucugcaaaaucccuacccugauuacagcuggcugcggacggucaagaccacaaaggagucccucauuaucauuagccccucuguggcugaccuggauccuuaugacaaaucccuucauagccgcguuuuucccggcgggaagugucugggaaucaccauuucuuccacauacugcagcaccaaccacgauuauacgaucuggaugccggaagaggccagacucggcacaucuugugacauuuucaccaauucccgggggaaacgcgcuagcaagggaggcaaaacaugcggguuuguggaugaaagaggacuguacaagucccuuaagggcgccuguaaacugaagcucugcggcgucccugggcugcggcugauggacggaaccugggugaccauccagacaucugaugagacgaaauggugucccagcgaccagcucgugaaccugcaugacuuccacuccgaugagaucgaacaccuugucguugaggaacuggugaagaaacgcgaggaaugccucgacgcgcuggagagcauuaugaccacaaagucuguguccuuuagacggcuuagccaucugcgcaaacucgucccuggcuucgggaaggccuauaccaucuuuaauaagacacugauggaggcugaugcccacuacaaaucuauuagaaccuggaacgaaaucauucccagcaagggaugccugaaagugggcgggcggugucauccccacguugacggaguguucuucaauggcaucauccucggcccugaugggaacguccugauuccggagaugcaguccucucuucugcaacagcacguggaacuccuggagagcuccguuaucccccuuaugcauccucuggcugaccccagcacgguguuuaaggauggagacgaagccgaggauuucgucgaggugcaccucccugacauucauaaacaggucucuggcguggaucuggggcugcccaauuggggaaaguaucuccugauguccgcgggcgcccuugcuacacugaugcucaucauuuuucugauggccugcugucgcagagcuaaccggaccgaaagcauccagagagacccgggggagucuggccgcaagguuuccaucccuagccaagacggaaaagugauuuccucuugggaacuguacaagagcggcggggagacccggcuuuga

SEQ ID NO: 223341 - RNA, 1575 nt, Artificial Sequence
  derived and/or modified CDS sequence (opt5) from glycoprotein__RABV__JQ685893.1
augaucccccaggcccugcucuacgugccucugcuuauuccgagccugugcuucggcggguuucccaucuauaccauuccugacaagcucggacccugguccccuaucgauauucaccaucugucuugucccaacaaucuugucguugaggacgaaggcugcacaagccuguccggguucucuuacauggagcucaaagugggauauaucagcgcuaucaaggugaacggcuuuacguguaccggggucgugacagaagccgagaccuacacaaauuucguuggauaugugaccacaaccuuuaaaagaaagcacuuccggccuaugccggaugcgugccgcgcugccuacaacuggaaagucgccggcgaccccagauaugaagagucccugcaaaauccuuaccccgauuacucuuggcugcggacggugaagaccacaaaggagagccucauuaucauuuccccuagcguugcugaccuggaucccuaugacaaaucucuucauucccgcguguuuccgggcgggaagugucugggaaucaccauuagcucuacauacugcuccaccaaccacgauuauacgaucuggaugccugaagaggccagacucggcacaagcugugacauuuucaccaauucucgggggaaacgcgcuuccaagggaggcaaaacaugcggguuugucgaugaaagaggacuguacaagagccuuaagggcgccuguaaacugaagcucugcggcgugcccgggcugcggcugauggacggaaccugggugaccauccagacauccgaugagacgaaaugguguccuucugaccagcucgucaaccugcaugacuuccacagcgaugagaucgaacaccuuguuguggaggaacuggugaagaaacgcgaggaaugccucgacgcgcuggaguccauuaugaccacaaagagcgucucuuuuagacggcuuucccaucugcgcaaacucgugcccggcuucgggaaggccuauaccaucuuuaauaagacacugauggaggcugaugcccacuacaaaagcauuagaaccuggaacgaaaucauucccucuaagggaugccugaaaguuggcgggcggugucauccucacguggacggagucuucuucaauggcaucauccucggcccggaugggaacgugcugauucccgagaugcagagcucccuucugcaacagcacguugaacuccuggagucuagcgugaucccucuuaugcauccccuggcugacccuuccacggucuuuaaggauggagacgaagccgaggauuucguggagguccaccuccccgacauucauaaacaggugagcggcguugaucuggggcugccgaauuggggaaaguaucuccugaugucugcgggcgcccuugcuacacugaugcucaccaucuuucugaugaccugcugucgcagagccaaccggacagaauccauucagagagacccuggggagagcggcaagaaagugucuaucaccucccaagacggaaaggucaucagcuccugggaacuguacaaaucuggcggggagacacgccuuuga

SEQ ID NO: 223342 - RNA, 1575 nt, Artificial Sequence
  derived and/or modified CDS sequence (opt5) from glycoprotein__RABV__JQ685894.1
auguucccccaggcccugcucuuugugagccugcuuaucuccucucugugcuucggcaaguuuccuauuuacaccaucccggacaaacucgggcccuggagcccuauugauauccaccaucuguccugucccaacaaucuugucguugaggacgaaggaugcacaaaccugucuggcuucagcuauauggagcucaaggugggguacauuuccgcuaucaaagugaauggauuuacguguaccggcgucgugacagaagccgagaccuauacaaacuucaucggguacguuaccacaguguuuaagagaaaacacucucggccuacccccgaugcgugccgcgcugccuauaauuggaagauggccggagacccuagauacgaagagagccugcauaacccguaucccgauuaccacuggcugcggacggucaagaccacaaaagagucccucgugauuaucagcccuucuguugcugaccuggaucccuacgacaagucccuucauagccgcguguucccuucuggcaaauguuccggcauuaccgucagcucuacauauugccugaccaaucacgaauacacgaucuggaugcccgagaaccucagacuggggacauccugugauauuuuuaccaauagccggggaaagcgcgccuccagaggcucuaaaacaugcggguucguggacgaacggggacuuuauaagagccugaagggcgcuuguaaacucaagcugugcggggugcugggacuccgccugauggauggcaccugggucgccaugcaaaccuccgacgagacaaaaugguguccgccugaucagcuuguuaaccugcacgacuuuagaagcgacgagaucgaacaucucgugguggaggaacuggucaagaaacgggaggaaugccuugaugcgauugagucuaucaugacgaccaaguccgugagcuuccgcagacugucucaccuccggaaacugguucccggcuuugggaaggccuacacaaucuucaauaagacccugauggaggcugacgcccauuauaaaagcgugcgcacauggaacgaaauuaucccuuccaagggaugccucagagucggcgggcggugucacccccacgugaaaggaguuuucuuuaauggcauuauccuggggcccgauggacaugugcuuauuccugagaugcagucuagccugcuccagcaacacauggaacugcuugaguccagcaucaucccgcugaugcauccccucgcugacccuucugccgucuucaaggauggcgacgaagcggaggauuuuguggagguccaucugcccgacgugcacaaacagguuuccggcguggaucuggggcucccuaacuggggaaaguacauucuggucagcgccggcgcucuuaucgcccugaugcucauuaucuuccugaugaccugcuuuagaggguucaaucugcccaagucuacgcagcacucccuuggagaaacagagcgcaaaaugagcgugaccccgcaguccggcaagauuaucucuagcugggaauccuauaaaucugggggcgagacccggcucuga

SEQ ID NO: 223343 - RNA, 1575 nt, Artificial Sequence
  derived and/or modified CDS sequence (opt5) from glycoprotein__RABV__JQ685896.1
augaucccccaggcccugcucuacgugccucugcuuauuagcucccugugcuucggcggguuuccgaucuauaccauucccgacaagcucggaccuuggucucccaucgauauucaccaucugagcuguccuaacaaucuugucguugaggacgaaggcugcacaucccugucuggguucagcuacauggagcucaaagugggauauaucuccgcuaucaaggugaacggcuuuacguguaccggggucgugacagaagccgagaccuacacaaauuucguuggauaugugaccacaaccuuuaaaagaaagcacuuccggcccaugccugaugcgugccgcgcugccuacaacuggaaaauggccggcgacccgagauaugaagagucucugcaaaaucccuacccugauuacagcuggcugcggacggucaagaccacaaaggagucccucauuaucauuagccccucuguggcugaccuggauccuuaugacaaaucccuucauagccgcguuuuucccggcgggaagugucugggaaucaccauuucuuccacauacugcagcaccaaccacgauuauacgaucuggaugccggaagaggccagacucggcacaucuugugacauuuucaccaauucccgggggaaacgcgcuagcaagggaggcaaaacaugcggguuuguggaugaaagaggacuguacaagucccuuaagggcgccuguaaacugaagcucugcggcgucccugggcugcggcugauggacggaaccugggugaccauccagacaucugaugagacgaaauggugucccagcgaccagcucgugaaccugcaugacuuccacuccgaugagaucgaacaccuuguccuggaggaacucguuaagaaacgcgaggaaugccuggacgcgcuugagagcauuaugaccacaaagucuguguccuuuagacggcugagccaucuccgcaaacuggugccuggcuucgggaaggccuauaccaucuuuaauaagacacugauggaggcugaugcccacuacaaaucuauuagaaccuggaacgaaaucauucccagcaagggaugccucaaagucggcgggcggugucauccccacguggacggaguuuucuucaauggcaucauccugggcccugaugggaacgugcuuauuccggagaugcaguccucucugcuccaacagcacgucgaacugcuugagagcuccgugaucccccugaugcauccucucgcugaccccagcacgguuuuuaaggauggagacgaagccgaggauuucguggagguccaucugccugacauucacaaacaggugucuggcgucgaucuggggcuccccaauuggggaaaguaucugcuuauguccgcgggcgcccuggcuacacucaugcugaucauuuuucugauggccugcugucgcagagcuaacccgaccgaaagcauccagcgggacccuggggagucuggcagaaagguguccauccccagccaagacggaaaaguuauuuccucuugggaacuuuacaagagcggcggggagacccgccucuga

SEQ ID NO: 223344 - RNA, 1575 nt, Artificial Sequence
  derived and/or modified CDS sequence (opt5) from glycoprotein__RABV__JQ685897.1
augaucccccaggcccugcucuacgugccucugcuuauuagcucccugugcuucggcggguuuccgaucuauaccauucccgacaagcucggaccuuggucucccaucgauauucaccaucugagcuguccuaacaaucuugucguugaggacgaaggcugcacaucccugucuggguucagcuacauggagcucaaagugggauauaucuccgcuaucaaggugaacggcuuuacguguaccggggucgugacagaagccgagaccuacacaaauuucguuggauaugugaccacaaccuuuaaaagaaagcacuuccggcccaugccugaugcgugccgcgcugccuacaacuggaaagucgccggcgacccgagauaugaagagucucugcaaaaucccuacccugauuacagcuggcugcggacggugaagaccacaaaggagucccucauuaucauuagccccucuguugcugaccuggauccuuaugacaaaucccuucauagccgcguguuucccggcgggaagugucugggaaucaccauuucuuccacauacugcagcaccaaccacgauuauacgaucuggaugccggaagaggccagacucggcacaucuugugacauuuucaccaauucccgggggaaacgcgcuagcaagggaggcaaaacaugcggguuugucgaugaaagaggacuguacaagucccuuaagggcgccuguaaacugaagcucugcggcgugccugggcugcggcugauggacggaaccugggugaccauccagacaucugaugagacgaaauggugucccagcgaccagcucgucaaccugcaugacuuccacuccgaugagaucgaacaccuuguuguggaggaacuggugaagaaacgcgaggaaugccucgacgcgcuggagagcauuaugaccacaaagucugucuccuuuagacggcuuagccaucugcgcaaacucgugccuggcuucgggaaggccuauaccaucuuuaauaagacacugauggaggcugaugcccacuacaaaucuauuagaaccuggaacgaaaucauucccagcaagggaugccugaaaguuggcgggcggugucauccccacguggacggagucuucuucaauggcaucauccucggcccugaugggaacgugcugauuccggagaugcaguccucucuucugcaacagcacguugaacuccuggagagcuccgugaucccccuuaugcauccucuggcugaccccagcacggucuuuaaggauggagacgaagccgaggauuucguggagguccaccucccugacauucauaaacaggugucuggcguugaucuggggcugcccaauuggggaaaguaucuccugaucuccgcgggcgcccuugcuacacugaugcucaccauuuuucugaugaccugcugucgcagagccaaccggacagaaagcauccagagagacccgggggagccuggcaagaaagugucuaucaccucccaagacggaaaggucauuagcuccugggaacuguacaaaucuggcggggagacacgccuuuga

SEQ ID NO: 223345 - RNA, 1575 nt, Artificial Sequence; identical to SEQ ID NO: 223340
  derived and/or modified CDS sequence (opt5) from glycoprotein__RABV__JQ685898.1

SEQ ID NO: 223346 - RNA, 1575 nt, Artificial Sequence
  derived and/or modified CDS sequence (opt5) from glycoprotein__RABV__JQ685899.1
auggugccccaggcccuucuguucgucccucugcuuguuuuuccgagcugccugggcaaguuccccaucuacaccauuccugacaaacucgggcccugguccccuaucgauauucaccaucugucuugucccaacaaucuugugguggaggacgaaggaugcaacaaucugagcggcuuuuccuauauggagcucaaggucggguacaucucugcuauuaaagugaacggauucacauguacgggcguugugaccgaagccgagacauauaccaauuuugucggguacgugacaaccacauucaagagaaaacacuuucggccuaccccggaugcgugccgcgcugccuauaacuggaagauggccggagaccccagauacgaagagagccugcauacgccuuaucccgauuaccacuggcugcggaccguuaagacaaccaaagagucccucgugaucaucucuccuagcgucgcugaccuggaucccuacgacaagucccuucauagccgcguguucccgucuggcaaauguuccggcaugacagugagcucuaccugcuguuccacgaaucacgauuauacaauuuggaugccugaaaaccccagacuggggaccagcugcgacaucuuuacaaauucucggggaaagcgcgccuccaaaggcagcaagaccuguggguucgucgaugagagaggacucuacaagucccugaaaggcgcuugcaagcugaaacugugugggguucucggacugcggcugauggacggcaccuggguggccaugcaaauuucugaugaaacaaaguggugcccucccgaccagcucgugaaccugcacgacuuucgcagcgaugagaucgagcaucuugucguggaggaacugguuaaaaagagagaagagugccucgacgcgcuggaauccauuaugacgaccaaaagcgugucuuuccggcgccuuucccaccugagaaagcucguccccggcuuugggaaggccuauacaaucuucaaucggacccugauggaggcugaugcccauuacaaaagcgugcgcacauggaacgagguuauuccuucuaagggaugucugagagugggcgggcggugccacccgcacgucaauggaguguucuuuaacggcaucauccucgggcccgacggacauguccugauuccugaaaugcagagcucccuucugcagcaacacauggagcuccuggaaucuagcgugaucccccuuaugcauccucuggcuaaucccuccaccguuuucaaagagggcgaugaagccgaggacuuuguggagguccaccucccggaugugcauaagcagguuagcggcguggaccuggggcugccuaacuggggaaaauauguccucaugucugcgggcgcccugauugcucuuaugcugaucauuuuccucaugacguguugcagacgcgugucccggcccgaaagcaugcagagaucucucgggggaacaggccgcaagguguccgccgcuagccaguccgggaagguuaucucuagcugggaguccuacaaaucuggcggagaaacccggcuguga

SEQ ID NO: 223347 - RNA, 1575 nt, Artificial Sequence
  derived and/or modified CDS sequence (opt5) from glycoprotein__RABV__JQ685900.1
augaucccccaggcccuccuguucgugccucugcuuauuccgagccugugccucggcgaguuucccaucuacaccauuccugacaagcuggggcccuggaucccuauugauauccaccaucuuuccugucccaacaaucuggucgcugaaaacgacggaugcaauucucucagcggcuucuccuauauggagcugaaaguuggguacaucucugccauuaaggugaacggauuuacauguacgggcguggucaccgaagcggagacauauaccaauuucgugggguacguuacaaccacauuuaaaagaaagcacuuccggccuaugccggaugcuugccgcgccgcccaugacuggaaaauggcuggagaucccagauaugaagacagccugcaaaacccuuaccccgauuaucacuggcuccggaccgugaagacgaccaaggagucccuggucaucauuucuccuagcguggccgaccuugaucccuacgacaaaucccugcauagccgcguuuuuccgucuggcaagugucucggcaucacaguguccagcaccuacugcucuacaaaucacgauuauaccauuuggaugccugucgagcccagacuggggacguccugugacaucuucacaaacagccggggaaaacgcgcuucuaagggcgggaaagugugcggauuuguggaugaaagaggccuuuacaagucccugaagggggccuguaaacucaagcugugcggagucccuggcauucggcugauggacggcaccuggguuagcauccagacauccgaggacaucaaaugguguccucccgaucgccucgugaaucugcacgacuuccauucugaugaaauugagcaccuuguggucgaggaacugaucaagagacgggagaacugccucgacgcgcuggaaagcauuaugaccaccaaauccgugagcuuucgcagacuuucucaucugcggaagcucguucccggguucggaaaagccuauacaaucuuuaauaagacgcugauggaggcugaugcccacuacaaguccgugaaaaccuggaacgaagucauuccgagcaagggcugccuggagguugggggacgcugucaucccccugugaauggcguguucuucaacgggaucauccucggacccgacggcaauguccugauuccugagaugcagucuagccuucugcagcaacacauggaacuccuggaguccucugugaucccccuuaugcacccgcuggcugauccuagcacagucuuuaaagaaggcgacgaggccgaagauuucguggagguucaucuccccgacgugcacaagcaggucuccgauguggaccuggggcugccuagcuggggaaaauaucuccugaugucugcgggcgcccuugcuauucugauccucgccauuguucugaucaucugcuguagacgggugaacaagaccggguccacacagagaggacaucgcgagagcggcgggaagaugucugucgcuccccagaacggcaaaauuaucuccagcugggaacuguacaaguccgagucugaaaccggacuuuga

SEQ ID NO: 223348 - RNA, 1575 nt, Artificial Sequence
  derived and/or modified CDS sequence (opt5) from glycoprotein__RABV__JQ685901.1
auggugcccuggguccuucucuucguuccuuuucugaucagcucccuuugcuucggcaaguuuccgauuuacaccauccccgacaagcuggggccuuggucucccauugauauccaccaucucagcuguccuaacaaucuggugguggaggacgaaggaugcaacucccuuucuggcuucagcuauauggagcugaaggucggguacauuuccgccaucaaagugaauggauuuacauguacgggcguugugaccgaagcugagacauauaccaacuucgucggguacgugacaaccacauuuaagagaaaacacuuccggcccaugccugaugccugccgcucugcguauaauuggaagauggcuggagacccgagauacgaagagagccuccauaaccccuauccugauuaccacuggcugcggaccguuaagacgaccaaagagucccugaucauuaucagccccucuguggccgaccucgauccuuacgacaagucccugcauagccgcauuuuucccggcggcaaauguacagggcuuaccgucucuuccacauauugcagcaccaaucacgauuacacgaucuggaugccggaaaaggccggacugggcacaucuugugacauuuucaccaacuccaaagggaagagagcuagcaagggaggcaaaacaugcggguuuguggaugagcggggacucuauaagucccugaaaggcgccuguaagcugaaacugugcggcgugucugggcuccgccugauggacggaaccugggucgcuauccagacccuggaugaaacaaagugguguagcccugaccaacucguuaaucugcacgacuuccauuccgaugagcuugagcaccuggugguggaggaacucgucagaaaacgggaagagugccuggacgcccuugaaagcauuaugacgaccaagucuguguccuuucgcagacugagccaucuccggaagcugguucccggcuucgggaaagcguacacaaucuucaacaagacccugauggaggccgaugcucacuauaaaucugugcgcacauggagcgagaucauuccuuccaagggaugccucagagucggcgggcggugucacccccaugugaauggaguguuuuucaacggcaucauucugggccccgacgggcacguucuuaucccugaaaugcagucuagccugcuccagcagcaugucgagcugcuugaauccagcgugauuccgcugaugcacccccucgccgauccuucugcugucuuuaaagacggagaugaggccgaagacuucguggagguucaucugcccgaugugcacaagcaaaucuccggcgucgaccuggggcucccuagcuggggaaaguacaugcugaugaucgcgggcgcccuuaugacccugaugcucuuuauuuuccugaugacgugcugucgcagagugaaucggacagagucuaucagacaggggccccgcgaacuggaguccaaaguuagcgugaccccgcagaaccggaaggucauuuccucuugggaaagcuauaaauccggcggagagaccaaacuuuga

SEQ ID NO: 223349 - RNA, 1575 nt, Artificial Sequence
  derived and/or modified CDS sequence (opt5) from glycoprotein__RABV__JQ685902.1
augaucccccaggcccugcuguucgugccucugcuuauuccgagccugugccucggcgaguuucccaucuacaccauuccugacaagcuggggcccugguccccuaucgauauucaccaucuuucuugucccaacaaucuggucgcugaaaacgacggaugcacaagccucuccggcuucucuuauauggagcugaaaguuggguacaucagcgccaucaaggugaauggauuuacguguaccggcguggucacagaagcggagaccuauacaaacuucgugggguacguuaccacaaccuuuaaaagaaagcacuuccggccuacgccggaugcuugccgcgccgcccaugacuggaaaauggcuggagaucccagauaugaagccucccugcaaaauccuuaccccgacuaucacuggcuccggaccgugaagacaaccaaggagucucuggucauuaucagcccuuccguggcugaucuugaccccuacgauaaaagccugcauucucgcguuuuuccguccggcaagugucucggcauuacagugagcucuaccuacugcuccacgaaccacgacuauacaaucuggaugccugucgagcccagacuggggaccagcugugauauuuucacaaauucucggggaaaacgcgccuccaagggcgggagagugugcggauuuguggacgaacggggccuuuacaaaagccugaagggggcgugucgccucaagcugugcggagucccuggcaucagacugcucgauggcaccuggguuuccauucagaccucugaggacaucaaaugguguccucccgaccggcuggugaaccuucacgauuuccauagcgacgaaaucgagcaccugguggucgccgagcucauuaagcgcagagaaaauugccuggaugcucuugaguccaucaugacaacgaaaagcgugaccuuucggcgccugacacaucucagaaagcugguucccggguucggaaaagccuauaccauuuuuaacaagacacugauggaagcugacgcccacuacaaaucugugaagaccuggaaugaggucaucccguccaagggcugccucgaaguugggggacggugucacccccaugugaacggcguguucuucaaugggauuauccugggaccugauggcaacguccuuauccccgagaugcagagcucucugcuccagcaacacauggagcugcuugaaagcuccgugauuccucugaugcauccccucgcggacccgucuacggucuuuaaagagggcgaugaagccgaggacuucguggaaguucaccucccugaugugcauaagcaggucagcgacguggaucuggggcuccccuccuggggaaaauaucugcuuaucagcgcuggcgcccuggcuauucucauccuggccauuguucugaucaucugcuguagacgcgugaauaagacagggucuacccagcggggacacagagaguccggcgggaaaaugagcgucgugccucagaacggcaagauuaucucuuccugggagcuuuacaagagcgaauccgagaccggacucuga

SEQ ID NO: 223350 - RNA, 1575 nt, Artificial Sequence
  derived and/or modified CDS sequence (opt5) from glycoprotein__RABV__JQ685903.1
augauccugcaggcccuccuguucgugccccuucugauuagcucccucugcuuuggcggguucccuaucuacaccauuccggacaagcugggacccuggucuccuaucgauauucaccaucuuagcugucccaacaaucuggucguugaggacgaaggcugcacaucccucucuggguuuagcuauauggagcugaaagugggauacaucuccgcuaucaaggugaacggcuucacguguaccggggucgugacagaagccgagaccuauacaaauuuuguuggauacgugaccacaaccuucaaaagaaagcacuuucggccuaugcccgauucuugccgcgcggcuuauaacuggaaaacggccggcgacccuagauacgaagagagccugcaaaauccguaucccgauuaccauuggcuccggaccgucaagacaaccaaggagucccugauuaucauuagcccuucuguggccgaccuugaucccuacgacaaaucccugcacagccgcguuuucccuggcgggaagugucucggaaucacagugucuuccaccuauugcagcacgaaccaugauuacacaauuuggaugcccgaagaggcuagacugggcaccucuugugacaucuuuacaaauucccgggggaaacgcgccagcaagggaggcagaaccugcggguucgucgaugaacggggacuuuauaaaucccugaagggcgcuuguaagcucaaacugugcggcgugcuggggcuccgccugauggacggaaccugggugacaauucacacgucuaacgagaccaagugguguccgagcgaucagcuugucaaucugcacgacuuucauuccgacgagaucgaacaccucguuguggaggaacuggugaaaaagagagaggaaugccuugaugcccuggagagcaucaugacaaccaaaucugucuccuuccggcgccucagccaucugagaaagcuggugccuggcuuugggaaagcguacacaauuuucaacaagacccucauggaggccgacgcucacuauaagucuauccggacguggaaugaaauuauccccagcaaaggaugccugaagguuggcgggcgcugucacccucauguggauggagucuucuuuaacggcauuauccuuggccccgacgggaaugugcugauccccgagaugcaguccucucuccugcagcaacacguugaacuucuggagagcuccgugauuccucucaugcauccgcuggccgaucccagcacagucuucaaagacggagaugaagcugaggacuuuguggagguccaucugccugaugugcacaagcagguuucuggcguggaccucgggcugcccaacuggggaaaauaccuucugauguccgccggcguccucgcgacccugaugcugaccaucuuccuuauuacaugcuguagacggguggauagaaccgaaagcauccagcgcgggccuggcgagcucggacgggaaaugucuguuacaucccagaauggcaaggugauuagcuccugggagcuguauaagucugggggagaaacgagacuguga

SEQ ID NO: 223351 - RNA, 1575 nt, Artificial Sequence
  derived and/or modified CDS sequence (opt5) from glycoprotein__RABV__JQ685905.1
augaucuuccaggcccugcucuuugugccccugcuuauuagcucccugugccucggcaaguucccuaucuacaccauuccggacaaacuggggcccuggucuccuaucgauauucaccaucuuagcugucccaacaaucuggucguugaggacgaaggaugcacaucccucucuggcuuuagcuauauggagcugaaggugggguacaucuccgcuaucaaagugaacggauucacguguaccggcgucgugacagaagccgagaccuauacaaauuuuguuggguacgugaccacaaccuucaagagaaaacacuuucggccuauucccgaugcgugccgcgcugccuauaacuggaagaucgccggagacccuagauacgaagagucucugcaaaauccguaucccgauuaccauuggcuccggacggucaagaccacaaaagagagccugauuaucauuuccccuagcguggcugaccuugaucccuacgacaagucucugcacucccgccucuucccuggcggcaaaugucuggggaucaccauuagcucuacauauugcuccaccaaccaugauuacacgaucuggaugcccgaggaaccgagacuuggaacaagcugugacaucuuuaccaauucuaagggcaaaaaggccuccaaagggggaaagguuugcggcuucguggaugaacgggggcuguauaagagccucaaaggagcuuguaagcugaaacugugcggcgucuccggccuccgccugauggacgggacaugggugaccauucagaccucugaugagacaaagugguguccucccgaccagcuugugaaccugcacgacuuucacagcgaugagaucgaacaucucgucguugaggaacuggugaaaaagagagaggaaugccuugacgcccuggaguccauuaugacgaccaagagcgugucuuuccggcgccucuccuaccugagaaaacuggucccuggauuuggcaaggcguauacaaucuucaauaaaacccucauggaggccgaugcucacuacaagagcgugcggacauggaacgaaauuauccccucuaaagggugccugaagguuagcgaccgcugucauccccacguggauggagucuucuuuaauggcaucauucuugggccugacggaaacgugcugaucccggagaugcaguccucucuccugcaacagcacauggaacuucuggagagcuccguuauuccccucaugcauccucuggccgaucccagcaccguguucaaggacggcgaugaagcugaggacuuugucgaggugcaucugccugauguccacaaacagaucucuggcguggaccucgggcugcccuccuggggaaaguaucuucugaugauugccggcgggcucgcgacgcugguucugaucaucuuccuuauggccugcuguagacggacaaaacgcaccgaaagcagacggagaggaucuggcgaguccggggaaaaggugcucgcuaccccgcagccuaaaaaggucgugagcuccugggagcuguacaagcgcgaaggcgacgcccggcuguga

SEQ ID NO: 223352 - RNA, 1575 nt, Artificial Sequence
  derived and/or modified CDS sequence (opt5) from glycoprotein__RABV__JQ685906.1
augaucccccaggcccugcucuacgugccucugcuuauuccgagccugugcuucggcggguuucccaucuauaccauuccugacaagcucggacccugguccccuaucgauauucaccaucugucuugucccaacaaucuugucguugaggacgaaggcugcacaagccuguccggguucucuuacauggagcucaaagugggauauaucagcgcuaucaaggugaacggcuuuacguguaccggggucgugacagaagccgagaccuacacaaauuucguuggauaugugaccacaaccuuuaaaagaaagcacuuccggccuaugccggaugcgugccgcgcugccuacaacuggaaagucgccggcgaccccagauaugaagagucccugcaaaauccuuaccccgauuacucuuggcugcggacggugaagaccacaaaggagagccucauuaucauuuccccuagcguugcugaccuggaucccuaugacaaaucucuucauucccgcguguuuccgggcgggaagugucugggaaucaccauuagcucuacauacugcuccaccaaccacgauuauacgaucuggaugccugaagaggccagacucggcacaagcugugacauuuucaccaauucucgggggaaacgcgcuuccaagggaggcaaaacaugcggguuugucgaugaaagaggacuguacaagagccuuaagggcgccuguaaacugaagcucugcggcgugcccgggcugcggcugauggacggaaccugggugaccauccagacauccgaugagacgaaaugguguccuucugaccagcucgucaaccugcaugacuuccacagcgaugagaucgaacaccuuguuguggaggaacuggugaagaaacgcgaggaaugccucgacgcgcuggaguccauuaugaccacaaagagcgucucuuuuagacggcuuucccaucugcgcaaacucgugcccggcuucgggaaggccuauaccaucuuuaauaagacacugauggaggcugaugcccacuacaaaagcauuagaaccuggaacgaaaucauucccucuaagggaugccugaaaguuggcgggcggugucauccucacguggacggagucuucuucaauggcaucauccucggcccggaugggaacgugcugauucccgagaugcagagcucccuucugcaacagcacguugaacuccuggagucuagcgugaucccucuuaugcauccccuggcugacccuuccacggucuuuaaggauggagacgaagccgaggauuucguggagguccaccuccccgacauucauaaacaggugagcggcguugaucuggggcugccgaauuggggaaaguaucuccugaugucugcgggcgcccuugcuacacugaugcucaccaucuuucugaugaccugcugucgcagagccaaccggacagaauccauucagagagacccuggggagagcggcaagaaagugucuaccacaucccaagacggaaaggucaucagcuccugggaacuguacaaaucuggcggggagacgcgccuuuga

SEQ ID NO: 223353 - RNA, 1575 nt, Artificial Sequence
  derived and/or modified CDS sequence (opt5) from glycoprotein__RABV__JQ685907.1
augaucccccaggcccugcucuacgugccucugcuuauuagcucccugugcuucggcggguuuccgaucuauaccauucccgacaagcucggaccuuggucucccaucgauauucaccaucugagcuguccuaacaaucuugucguugaggacgaaggcugcacaucccugucuggguucagcuacauggagcucaaagugggauauaucuccgcuaucaaggugaacggcuuuacguguaccggggucgugacagaagccgagaccuacacaaauuucguuggauaugugaccacaaccuuuaaaagaaagcacuuccggcccaugccugaugcgugccgcgcugccuacaacuggaaaauugccggcgacccgagauaugaagagucucugcaaaaucccuacccugauuacagcuggcugcggacggucaagaccacaaaggagucccucaucauuaucagccccucuguggcugaccuggauccuuaugacaaaucccuucauagccgcguuuuucccggcgggaagugucugggaauuaccaucucuuccacauacugcagcaccaaccacgauuauacgauuuggaugccggaagaggccagacucggcacaucuugugacaucuucaccaauucccgggggaaacgcgcuagcaagggaggcaaaacaugcggguuuguggaugaaagaggacuguacaagucccuuaagggcgccuguaaacugaagcucugcggcgucccugggcugcggcugauggacggaaccugggugaccauccagacaucugaugagacgaaauggugucccagcgaccagcucgugaaccugcaugacuuccacuccgaugagauugaacaccuugucguugaggaacuggugaagaaacgcgaggaaugccucgacgcgcuggagagcaucaugaccacaaagucuguguccuuuagacggcuuagccaucugcgcaaacucgucccuggcuucgggaaggccuauaccauuuuuaauaagacacugauggaggcugaugcccacuacaaaucuaucagaaccuggaacgaaauuauccccagcaagggaugccugaaagugggcgggcggugucauccccacguugacggaguguucuucaauggcaucauucucggcccugaugggaacguccugaucccggagaugcaguccucucuucugcaacagcacguggaacuccuggagagcuccguuauuccccuuaugcauccucuggcugaccccagcacgguguuuaaggauggagacgaagccgaggauuucgucgaggugcaccucccugacauccauaaacaggucucuggcguggaucuggggcugcccaauuggggaaaguaucuccugauguccgcgggcgcccuugcuacacugaugcucauuaucuuucugauggccugcugucgcagagcuaaccggaccgaaagcauccagagagacccgggggagucuggccgcaagguuuccauuccuagccaagacggaaaagugaucuccucuugggaacuguacaagagcggcggggagacccggcuuuga

SEQ ID NO: 223354 - RNA, 1575 nt, Artificial Sequence
  derived and/or modified CDS sequence (opt5) from glycoprotein__RABV__JQ685909.1
augaucccccaggcccugcucuacgugccucugcuuauuagcucccugugcuucggcggguuuccgaucuauaccauucccgacaagcucggaccuuggucucccaucgauauucaccaucugagcuguccuaacaaucuugucguugaggacgaaggcugcacaucccugucuggguucagcuacauggagcucaaagugggauauaucuccgcuaucaaggugaacggcuuuacguguaccggggucgugacagaagccgagaccuacacaaauuucguuggauaugugaccacaaccuuuaaaagaaagcacuuccggcccaugccugaugcgugccgcgcugccuacaacuggaaaauggccggcgacccgagauaugaagagucucugcaaaaucccuacccugauuacagcuggcugcggacggucaagaccacaaaggagucccucauuaucauuagccccucuguggcugaccuggauccuuaugacaaaucccuucauagccgcguuuuucccggcgggaagugucugggaaucaccauuucuuccacauacugcagcaccaaccacgauuauacgaucuggaugccggaagaggccagacucggcacaucuugugacauuuucaccaauucccgggggaaacgcgcuagcaagggaggcaaaacaugcggguuuguggaugaaagaggacuguacaagucccuuaagggcgccuguaaacugaagcucugcggcgucccugggcugcggcugauggacggaaccugggugaccauccagacaucugaugagacgaaauggugucccagcgaccagcucgugaaccugcaugacuuccacuccgaugagaucgaacaccuugucguugaggaacuggugaagaaacgcgaggaaugccucgacgcgcuggagagcauuaugaccacaaagucuguguccuuuagacggcuuagccaucugcgcaaacucgucccuggcuucgggaaggccuauaccaucuuuaauaagacacugauggaggcugaugcccacuacaaaucuauuagaaccuggaacgaaaucauucccagcaagggaugccugaaagugggcgggcggugucauccccacguugacggaguguucuucaauggcaucauccucggcccugaugggaacguccugauuccggagaugcaguccucucuucugcaacagcacguggaacuccuggagagcuccguuaucccccuuaugcauccucuggcugaccccagcacgguguuuaaggauggagacgaagccgaggauuucgucgaggugcaccucccugacauucauaaacaggucucuggcguggaucuggggcugcccaauuggggaaaguaucuccugauguccgcgggcgcccuugcuacacugaugcucaccaucuuucugaugaccugcugucgcagagccaaccggacagaaagcauucagagagacccgggggagucuggccgcaagguuuccaucaccagcccugacggaaaagugaucuccucuugggaacuguacaagagcggcggggagacaggacuuuga

SEQ ID NO: 223355 - RNA, 1575 nt, Artificial Sequence
  derived and/or modified CDS sequence (opt5) from glycoprotein__RABV__JQ685910.1
augaucccccaggccuuccuguuugugccucuccugauuccgagccuuugccugggcgaguuccccaucuacaccauuccugacaagcucgggcccugguccccuaucgauauucaccaucugucuugucccaacaaucuugucgccgaaaacgacggaugcacaagccuguccggcuuuucuuauauggagcucaaaguuggguacaucagcgccaucaaggugaauggauucacguguaccggcgugaugacagaagcggagaccuauacaaacuuugucggguacgugaccacaaccuucaaaagaaagcacuuucggccuaugccggaugcuugccgcgccgcccaugacuggaaaauugcuggagaucccagauaugaagacucccugcaaaauccuuaccccgauuaucacuggcugcggacgguuaagaccacaaaggagucucucgugaucauuagcccuuccgucgccgaccuggaucccuacgacaaaagccuucauucucgcguguucccguccggcaagugucugggcaucaccguuagcucuacauacugcuccaccaaccacgauuauacgauuuggaugccuguggagcccagacucgggacaagcugugacaucuuuaccaauucucggggaaaacgcgcuuccaagggcgggagagucugcggauucguggaugaacggggccuguacaaaagccuuaagggggccuguaagcugaaacucugcggagugccuggcauucgccugauggacggcacaugggucuccauccagaccucugaggaaaucaagugguguccucccgacagacugguuaaccuccacgauuuucauagcgacgagauugagcaccuggugguggaggaacuuaucaaacggcgcgaaaauugccuggaugcgcucgaguccauuaugaccacaaagagcgucucuuucagacggcugucccaucuucgcaaacuggugcccggguuuggaaaggccuauacgaucuucaacaaaacccucauggaagcugacgcccacuacaagagcguuaagacauggaaugaggugauuccgucuaaaggcugccuggaggucgggggaagaugucaucccccugugaacggcguuuucuuuaaugggaucauccugggacccgauggcaacgugcucauuccugaaaugcagagcucccugcuucagcaacacauggagcugcucgaaucuagcgucaucccccugaugcacccgcuugcugacccuuccaccguguucaaggagggcgaugaagccgaggacuuugucgaggugcaucugcccgauguucacaaacaggugagcgacgucgaucucgggcugccuucuuggggaaaguaucugcucauguccgcgggcgcccuggcuauucuuauccuggugauuguucucaucaucugcugucggagagugaauaaaacagggagcacccagcgcggacaucgggaaucuggcgggaagauguccgucgcuccccagaacggcaagauuaucagcuccugggagcuguacaaaucugaaagcgagacgggacuguga

SEQ ID NO: 223356 - RNA, 1575 nt, Artificial Sequence
  derived and/or modified CDS sequence (opt5) from glycoprotein__RABV__JQ685911.1
augaucccccaggcccugcucuacgugccucugcuuauuccgagccugugcuucggcggguuucccaucuauaccauuccugacaagcucggacccugguccccuaucgauauucaccaucugucuugucccaacaaucuugucguugaggacgaaggcugcacaagccuguccggguucucuuacauggagcucaaagugggauauaucagcgcuaucaaggugaacggcuuuacguguaccggggucgugacagaagccgagaccuacacaaauuucguuggauaugugaccacaaccuuuaaaagaaagcacuuccggccuaugccggaugcgugccgcgcugccuacaacuggaaagucgccggcgaccccagauaugaagagucccugcaaaauccuuaccccgauuacucuuggcugcggacggugaagaccacaaaggagagccucauuaucauuuccccuagcguugcugaccuggaucccuaugacaaaucucuucauucccgcguguuuccgggcgggaagugucugggaaucaccauuagcucuacauacugcuccaccaaccacgauuauacgaucuggaugccugaagaggccagacucggcacaagcugugacauuuucaccaauucucgggggaaacgcgcuuccaagggaggcaaaacaugcggguuugucgaugaaagaggacuguacaagagccuuaagggcgccuguaaacugaagcucugcggcgugcccgggcugcggcugauggacggaaccugggugaccauccagacauccgaugagacgaaaugguguccuucugaccagcucgucaaccugcaugacuuccacagcgaugagaucgaacaccuuguuguggaggaacuggugaagaaacgcgaggaaugccucgacgcgcuggaguccauuaugaccacaaagagcgucucuuuuagacggcuuucccaucugcgcaaacucgugcccggcuucgggaaggccuauaccaucuuuaauaagacacugauggaggcugaugcccacuacaaaagcauuagaaccuggaacgaaaucauucccucuaagggaugccugaaaguuggcgggcggugucauccucacguggacggagucuucuucaauggcaucauccucggcccggaugggaacgugcugauucccgagaugcagagcucccuucugcaacagcacguugaacuccuggagucuagcgugaucccucuuaugcauccccuggcugacccuuccacggucuuuaaggauggagacgaagccgaggauuucguggagguccaccuccccgacauucauaaacaggugagcggcguugaucuggggcugccgaauuggggaaaguaucuccugaugucugcgggcgcccuugcuacacugaugcucaccaucuuucugaugaccugcugucgcagauccaaccggacagaaagcauucagagagacccuggggagucuggcaagaaaguguccaucaccagccaagacggaaaggucaucuccucuugggaacuguacaaaagcggcggggagacacgccuuuga

SEQ ID NO: 223357 - RNA, 1575 nt, Artificial Sequence; identical to SEQ ID NO: 223340
  derived and/or modified CDS sequence (opt5) from glycoprotein__RABV__JQ685912.1

SEQ ID NO: 223358 - RNA, 1575 nt, Artificial Sequence; identical to SEQ ID NO: 223340
  derived and/or modified CDS sequence (opt5) from glycoprotein__RABV__JQ685913.1

SEQ ID NO: 223359 - RNA, 1575 nt, Artificial Sequence
  derived and/or modified CDS sequence (opt5) from glycoprotein__RABV__JQ685914.1
augaucccccaggcccugcuguucgugccucugcuuauuagcucccugugcuuuggcggguucccgaucuacaccauucccgacaagcucggaccuuggucucccaucgauauucaccaucugagcuguccuaacaaucuugucguugaggacgaaggcugcacaucccugucuggguuuagcuauauggagcucaaagugggauacaucuccgcuaucaaggugaacggcuucacguguaccggggucgugacagaagccgagaccuauacaaauuuuguuggauacgugaccacaaccuucaaaagaaagcacuuucggcccaugccugauucuugccgcgcggcuuauaacuggaaaacggccggcgacccgagauacgaagagagccugcaaaaucccuauccugauuaccauuggcugcggaccgucaagacaaccaaggagucccucauuaucauuagccccucuguggccgaccuggauccuuacgacaaaucccuucacagccgcguuuuccccggcgggaagugucugggaaucacagugucuuccaccuauugcagcacgaaccaugauuacacaauuuggaugccggaagaggcuagacucggcaccucuugugacaucuuugccaauucccgggggaaacgcgcuagcaagggaggcagaacaugcggguucgucgaugaacggggacuguauaaaucccuuaagggcgccuguaagcugaaacucugcggcgugcuggggcugcgccucauggacggaaccugggcgaccauucacacaucuaacgagacgaagugguguccuagcgaucagcuggugaaucuucacgacuuucauuccgacgagaucgaacaccuggucguugaggaacucgugaaaaagagagaggaaugccuggaugcccuugagagcaucaugaccacaaaaucuguguccuuccggcgccugagccaucucagaaagcugguccccggcuuugggaaggcuuacaccauuuucaacaagacacugauggaggccgacgcucacuauaagucuauccggaccuggaaugaaauuaucccuagcaaaggaugccucaaggugggcgggcgcugucacccccauguugauggaguguucuuuaacggcauuauccugggccccgacgggaauguccuuaucccugagaugcaguccucucugcuccagcaacacguggaacugcuugagagcuccguuauuccgcugaugcauccccucgccgauccuagcacgguguucaaagacggagaugaagcggaggacuuugucgaggugcaccuccccgauguccauaaacaggugucuggcguugaccuggggcucccuaacuggggaaaauaccugcuuauguccgccggcgcucuggccacacucaugcugaccaucuuccugauuaccugcuguagacggguggauaagacagaaagcauccagagagggcccggcgagcuuggacgcgaagucucugugaccucccagaauggcaagguuauuagcuccugggagcucuauaaaucugggggagaaacacggcuguga

SEQ ID NO: 223360 - RNA, 1575 nt, Artificial Sequence
  derived and/or modified CDS sequence (opt5) from glycoprotein__RABV__JQ685915.1
augauccugcaggcccuccugcuucugccccuccugauuagcuccuggugccuuggcaaguucccuaucuacaccauuccggacaaacuggggcccuggucuccuaucgauauucaccaucucagcugucccaacaaucugguggucgaggacgaaggaugcacaucccugucuggcuuuagcuauauggagcucaagguuggguacaucuccgcuaucaaagugaacggauucacguguaccggcguggucacagaagccgagaccuauacaaauuuugugggguacguuaccacaaccuucaagagaaaacacuuucggccuaugcccgaugcgugccgcgcugcccaugaauggaagauggccggagacccuagauaugaggauucucugcaaaacccguaccccgacuaucacuggcuucggacggugaagaccacaaaagagagccugauuaucauuuccccuagcgucgcugaucucgaccccuacgauaagucucugcauucccgcguguucccuggcggcaauugucuugggguuaccaucagcucuacauacugcuccaccaaccacgacuauacgauuuggaugcccgaagaggccagacugggaacaagcugugauaucuuuaccaauucuaaaggcaagaaggcuuccaaagggggaaaggugugcggcuucgucgacgaacgggggcucuacaaaagccugaagggagccuguaaacugaagcucugcggcgugccgggccugcgccuuauggaugggacauggguguccauucagaccucugacgagaccaaaugguguccucccgaccagcuggucaacauccacgauuuucauagcgacgagaucgaacaccucauuguugaggaacuggugaagaaaagagaggaaugccuugaugcgcuggaguccaucaugacaaccaagagcgugucuuuccggcgccucucccaucugagaaagcuggucccuggauuuggcaaagccuauacgauuuucaauaagacacucauggaggcugacgcccacuacaaaagcgugcggaccuggaacgaaguuauccccucuaaggggugccugaaagugggaggccgcugucacccccaugucgggggaguguuuuucaauggcauuauccuuggcccugaugggacaguucugaucccggagaugcagagcucccuccugcaacagcacauggaacuucuggagucuagcgugauuccccucaugcauccucuggcugaccccuccaaggucuucaaggaaggagaugaggccgaggacuuuguggaaguccaucugccugaugugcacaaacagguuagcggcguggaccucgggcugcccucuuggggaaaguaucuucugauguccgucggcgcgcucgccacccugauccugauuaucuuccuuauuacgugcuguagaaaagugaagcggacagagagcauccagcgcgggcacggcgaaucuggaagaaaaguuuccgcuagcccgcaaaacggcaaggugaucuccucuugggagcucuacaagagcgaaggggagaccaaucuguga

SEQ ID NO: 223361 - RNA, 1575 nt, Artificial Sequence
  derived and/or modified CDS sequence (opt5) from glycoprotein__RABV__JQ685916.1
augaucccccaggcccugcucagccugcuucugcucauuuccucucugugccuuggcaaguucccuaucuacaccauuccggacaaacuggggcccuggagcccuaucgauauucaccaucucuccugucccaacaaucugguggucgaggacgaaggaugcacaucucugagcggcuuuuccuauauggagcucaagguuggguacaucucugcuaucaaagugaacggauucacguguaccggcguggucacagaagccgagaccuauacaaauuuugugggguacguuaccacaaccuucaagagaaaacacuuucggccuaugcccgaugcgugccgcgcugcccaugaauggaagauggccggagacccuagauaugaggauagccugcaaaacccguaccccgacuaucacuggcuucggacggugaagaccacaaaagagucccugauuaucauuagcccuucugucgcugaucucgaccccuacgauaagucccugcauagccgcguguucccuggcggcaauugucuugggaucaccauuucuuccacauacugcagcaccaaccacgacuauacgaucuggaugcccgaagaggccagacugggaacaucuugugauauuuuuaccaauuccaaaggcaagcgggcuagcaaagggggaaagaucugcggcuucguugacgaacgcgggcucuacaagucccugaaaggagccuguaagcugaaacucugcggcgugccgggccugagacuuauggaugggacaugggucucuauccagaccagcgacgagaccaagugguguccucccgaccagcuggugaacgugcacgauuuucauuccgacgagauugaacaccucaucgucgaggaacugguuaaaaagcgggaggaaugccuugaugcgcuggagagcauuaugacaacgaaaucuguguccuuccgcagacucagccaucugcggaagcuggugccuggauuuggcaaggccuauaccaucuucaauaaaacacucauggaggcugacgcccacuacaagucuguccgcaccuggaacgaaauuauccccagcaaagggugccugaaggugggaggcaugugucacccccauguugggggaguguuuuucaauggcaucauucuuggcccugaugggacaguccugaucccggagaugcaguccucucuccugcaacagcacauggaacuucuggagagcuccgugauuccccucaugcauccucuggcugaccccagcaccguuuucaaagaaggagaugaggccgaggacuuuguggaaauccaucugccugauguccacaagcagauuucuggcguggaccucgggcugcccuccuggggaaaguaucuucugaucagcgcgggcgcccucgcuacgcugauccugacaauuuuccuuauuaccugcuguagaaaagucaaccggaccgagucuauccagcgcgggcacggcgaauccgagagaaaggugagcguuuccccgcaaaauggacgggugaucucuagcugggaacucuacaaauccggcggggagacaaaccuguga

SEQ ID NO: 223362 - RNA, 1575 nt, Artificial Sequence
  derived and/or modified CDS sequence (opt5) from glycoprotein__RABV__JQ685917.1
augaucccccaggcccugcucuacgugccucugcuuauuagcucccugugcuucggcggguuuccgaucuauaccauucccgacaagcucggaccuuggucucccaucgauauucaccaucugagcuguccuaacaaucuugucguugaggacgaaggcugcacaucccugucuggguucagcuacauggagcucaaagugggauauaucuccgcuaucaaggugaacggcuuuacguguaccggggucgugacagaagccgagaccuacacaaauuucguuggauaugugaccacaaccuuuaaaagaaagcacuuccggcccgucccugaugcgugccgcgcugccuacaacuggaaaguggccggcgacccgagauaugaagagucucugcaaaaucccuacccugauuacagcuggcugcggacgguuaagaccacaaaggagucccucauuaucauuagccccucuguggcugaccuggauccuuaugacaaaucccuucauagccgcgucuuucccggcgggaagugucugggaaucaccauuucuuccacauacugcagcaccaaccacgauuauacgaucuggaugccggaagaggccagacucggcacaucuugugacauuuucaccaauucccgggggaaacgcgcuagcaagggaggcaaaacaugcggguuuguggaugaaagaggacuguacaagucccuuaagggcgccuguaaacugaagcucugcggcgugccugggcugcggcugauggacggaaccugggucaccauccagacaucugaugagacgaaauggugucccagcgaccagcucguuaaccugcaugacuuccacuccgaugagaucgaacaccuugugguggaggaacuggucaagaaacgcgaggaaugccucgacgcgcuggagagcauuaugaccacaaagucuguguccuuuagacggcuuagccaucugcgcaaacucguuccuggcuucgggaaggccuauaccaucuuuaauaagacacugauggaggcugaugcccacuacaaaucuauuagaaccuggaacgaaaucauucccagcaagggaugccugaaagugggcgggcggugucauccccacgucgacggaguguucuucaauggcaucauccucggcccugaugggaacguucugauuccggagaugcaguccucucuucugcaacagcacguggaacuccuggagagcuccgucaucccccuuaugcauccucuggcugaccccagcacgguguuuaaggauggagacgaagccgaggauuucgucgaggugcaccucccugacauucauaaacagguuucuggcguggaucuggggcugcccgacuggggaaaguaucuccugauguccgcgggcgcccuugcuacacugaugcucaccaucuuucugaugauuugcugucgcagagccaaucggaccgaaagcauccagagagacccgggggagucuggcaagaaagucuccaucacaagccaagauggaaaggugauuuccucuugggaacuguacaaaagcggcggggagacccgccuuuga

SEQ ID NO: 223363 - RNA, 1575 nt, Artificial Sequence
  derived and/or modified CDS sequence (opt5) from glycoprotein__RABV__JQ685918.1
augaucccccagagccuccuguuccugccucuucugauuuccucucucugcuuuggcgaguucccgaucuacaccauucccgaaaagcuggggccuuggagccccaucgacauucaccaucuuuccuguccuaacaaucugguggucgaggaugaaggaugcaacucucucagcggcuuuuccuauauggagcugaaaguuggguacaucucuagcaucaaggugaauggauucacauguacgggcguggucaccgaagccgagacauauaccaacuuugugggguacguuacaaccacauucaaaagaaagcacuuucggcccaugccugacgcuugccgcgccgcguauuccuggaaaauggcuggagauccgagauacgaggaaagccugcauaaucccuauccugacuaccacuggcuccggaccgugaagacgaccaaggagucucuggucauuaucucccccagcguggccgaucuugacccuuacgauaaaucucugcauucccgcguuuucagcggcggcaagugucucgggauuacaaucucuuccaccuauugcagcacaaaccacgacuacaccauuuggaugcccgaagaggccagacugggaacguccugugauaucuuuacaaauucuaaaggcaagcgggcuagcaaagggggacgcacgugcggcuucguggacgagagagggcuuuauaagucccugaagggagccuguaaacucaagcugugcggcgucccgggccugcggcucauggaugggacaugggugagcauucaaaccucuaacgaaaccaaaugguguccucccgaccagcuggugaauauccacgauuuucgcuccgacgagaucgaacaucuugucguugaggaacuggugaagaaaagagaggagugccucgacgcucuggaaagcauuaugacaacgaagucugugagcuuccggcgccuuucccaccugagaaaacucgucccuggauuuggcaaggccuacaccaucuucaacaagacacugauggaggcggaugcccauuauaaaucugugcggaccuggaaugaaguuauucccagcaaggggugccuguccgugggaggccgcuguuacccccacgucagcgggguguucuuuaacggaaucauucucggcccugacggcucuguucugaucccggagaugcaguccagccuucugcagcaacacauggaacuccuggagucuuccgugaucccccuuaugcauccucuggcuaaucccagcacagucuucaaagauggggacgaggccgaagauuuuguggagguccaccucccugacgugaaggaacagguuuccggaguggaucugggccugcccaacugggggaaauauguccucaugucugcuggagcccuggcgauucuuaugcuggccaucuuccucaugaccugcuguagacgggcuaauagaaccaagagcauucagcagggcccgcgcgaguccgggcggaaggugucuguuccuccccaaaacggcaaagugaucagcuccugggagagcuuuaagucuggaggcgaaacaagacuguga

SEQ ID NO: 223364 - RNA, 1575 nt, Artificial Sequence
  derived and/or modified CDS sequence (opt5) from glycoprotein__RABV__JQ685920.1
augaucccccaggcccuccucuucgugccuuuucuguucccgagccuuugccugggcaaguuucccauuuacaccaucccugagaaacucgggcccugguccccuauugacauccaccaucugucuugucccaacaaucuugucguugaagaugagggaugcgacagccuguccggcuucucuuauauggaacucaaggugggguacauuagcgcuaucaaagugaacggauuuacauguacgggcgucgugaccgaggccgaaacauauaccaauuucguuggguacgugacaaccacauuuaagagaaaacacuuccggccuaugccggaugcgugccgcgcugccuauaacuggaagaccgccggagaccccagauacgaggagucccugcauaauccuuaucccgauuaccacuggcugcggacggucaagaccacaaaagaaucucucgugaucauuagcccuuccguugcugaccuggaucccuacgacaagagccuucauucucgcguguuuccgggcggcaaaugucuggggaucaccauuuccagcacauauugcucuaccaaccacgauuacacgaucuggaugccugaggaagccagacucggaacauccugugacauuuucaccaauagcaagggcaaacgggcuucuaaagggggacgcacaugcggcuuugucgaugagagagggcuguauaagucccuuaagggagccuguaagcugaaacucugcggcgugcccggccugcggcugauggacgggaccuggguggcgauccaaaccccuggagagacaaagugguguagccccgaucagcucgucaaccugcacgacuuccgcuccgacgaaauugagcaucuuguuguggaggaacugaucaaaaagagagaagagugccucgaugcccuggagucuaucaugacgaccaaaagcguguccuuucggcgccuuagcaaucugagaaagcucguccccggcuucgggaaggcuuacacaauuuucaacaaaacccugauggaagccgacgcucacuauaagucugugcggacaugggaugagaucauuccuuccaaaggaugccugcgcguuggcgggagaugucauccgcacgugaauggagucuuuuucaacggcaucauucucggccccgacgggcacgugcugaucccugaaaugcagagcucucuucugcagcaacauauggagcuccuggaaagcuccguuaucccccuuauucacccucuggccgaucccucuaccguguuuaaggacggagaugaggcggaggacuucgucgaagugcaucucccggauguccacaaacaggugagcggcguugaccuggggcugccuaauuggggaaaguacgugcucauguccgccggcguccuggcuacggugauccuuacaauuuuucugcugaccugcugucggagaguuaaccgcaccaagcccaaacagcagagccugggggagucuggccggaagguguccgucacaccucaaaauggaaaagugaugagcucuugggaauauuacaaguccgagggcagaaccagccuguga

SEQ ID NO: 223365 - RNA, 1575 nt, Artificial Sequence
  derived and/or modified CDS sequence (opt5) from glycoprotein__RABV__JQ685921.1
augauccugcaggcccuccuguucgugcccauucuuaucagcuccuuuugcuucggcgacuuuccuauuuacaccaucccggagaagcuggggcccuggucuccuauugauauccaccaucucagcugucccaacaaucuggucguugaagacgagggaugcuccucucuuagcggcuucuccuauauggaacugaaagugggguacaucucugcuauuaaggugaacggauuuacauguacgggcgucgugaccgaggccgaaacauauaccaauuucguuggguacgugacaaccacauuuaaaagaaagcacuuccggccuaugcccgaugcgugccgcgcugccuauaacuggaaaaccgccggagacccuagauacgaggagagccuccaaaauccguaucccgauuaccauuggcugcggacggucaagaccacaaaggaaucccuggugaucauuagcccuucuguugcugaccucgaucccuacgacaaaucccugcacagccgcguguuuucugauggcaagugucuuggcaucaccauuuccagcacauauugcucuaccaaccaugacuacacgaucuggaugccugaggaagccagacuggggacauccugugauauuuucaccacaagccggggaaaacgcgcuuccaagggcgggaaaaccugcggauuugucgacgagagaggccucuauaagucucugaagggggccuguaaacuuaagcugugcggagugagcggccuccggcugauggauggcaccuggguguccauccaggcgcccgacgaggccaaaugguguagcacagaccagcuggucaauauccacgauauucgcucugacgaaaucgagcaccucguuguggaggaacuggugaagaaaagagaagagugccuugaugcucuggaguccauuaugacgaccaagagcgucucuuuccggcgccucagccaucugagaaaacuugugccgggguuuggaaaggccuacacaaucuucaacaagacccugauggaagcugacgcccacuauaaauccguucggacauggucugaggugauuccuagcaagggcugccucuccgucgggggacgcugucauccccacgaaaauggcguguucuuuaacgggaucauccugggaccugauggcagcguucugauucccgagaugcagucuucccuccugcaacagcacauggaacuucuggagagcucugugaucccccucaugcauccucuggcgaauccguccaccgucuucaaagacggcgaugaggccgaagacuuuguggagguccaccuucccgaugugcaggaacagauuagcgggguugaccugggacucccuaacuggggcaaguacgugaugauguccgcuggggcccuggcuauccugaugcucacgauuuuccugaugacaugcuguagacgggccaauagaacccgcucuacccaacgggaucuuggaggccuggagagaaaagucagcgugcccccuaaggacgggcgcguuauguccucuugggaaagcuauaaguccggcggagagacaagccucuga

SEQ ID NO: 223366 - RNA, 1575 nt, Artificial Sequence
  derived and/or modified CDS sequence (opt5) from glycoprotein__RABV__JQ685922.1
augaucccccaggcccuccuguucgugccucugcuuauuccgagccugugccucggcaaguuucccaucuacaccauuccugacaaacuggggcccugguccccuaucgauauucaccaucuuucuugucccaacaaucuggucguugaggacgaaggaugcacaagccucuccggcuucucuuauauggagcugaaggugggguacaucagcgcuaucaaagugaacggauuuacguguaccggcgucgugacagaagccgagaccuauacaaauuucguuggguacgugaccacaaccuuuaagagaaaacacuuccggccuaugccggaugcgugccgcgcugcccaugacuggaagauugccggagaucccagauaugaagacucccugcaaaacccuuaccccgauuaucacuggcuccggacggucaagaccacaaaagagucucuggugaucauuagcccuuccguugcugagcuugaccccuacgauaagagccugcauucucgcguguuuccguccggcaaaugucucggcaucaccgucagcucuacauacugcuccaccaaucacgacuauacgauuuggaugccuguggaagccagacuggggacaagcugugauaucuucaccaacucucggggaaagaaggcuuccaaaggcgggcgcacaugcggauuuguggacgagagaggccuuuacaagagccugaaaggggccuguaagcucaaacugugcggaguccccggccugcggcucauggauggcaccuggguuuccauucagaccucugacgacaucaagugguguccucccgaucagcuggugaaucuucacgacuuccauagcgaugaaaucgagcaccugguggucgaggaacucauuaaaaagcgcgaggggugccuggacgcgcuugaauccaucaugacaacgaaaagcgugucuuuuagacggcugucccaucuccgcaagcugguucccggauucggcaaggccuauaccauuuuuaacaauacacugauggaggcugaugcccacuacaaaagcgugagaaccuggaacgaagucaucccuucuaaggggugccucaaagugggaggccggugucacccgcccguuaaugggguguucuucaacggaauuauccugggcccugacggcaauguccuuauccccgagaugcagagcucccugcuccaacagcauauggagcugcuugaaucuagcgugauuccucugaugcacccccucgcugauccguccacagucuuuaaggacggggaugaggccgaagacuucguggagguucaucugccugaugugcacaaacaggucagcgacguggaccugggacuccccucuuggggcaaguaucugcuuauguccgcgggggcccuggcuacccucauccuggccauuuuucugaucacgugcugucgcagagcuaaccggacagaaagcacccagagaggacaucgcgagucuggcgggaagguuuccguggccccucaaaauggcaaaauuaucagcuccugggagcuuuacaagucugaaagcgagaccggaauguga

SEQ ID NO: 223367 - RNA, 1575 nt, Artificial Sequence; identical to SEQ ID NO: 223341
  derived and/or modified CDS sequence (opt5) from glycoprotein__RABV__JQ685923.1

SEQ ID NO: 223368 - RNA, 1575 nt, Artificial Sequence
  derived and/or modified CDS sequence (opt5) from glycoprotein__RABV__JQ685925.1
augaucccccaggcccugcucagcgugccucugcuuaucuccucucugugcuucggcaaguuuccgaucuacaccauucccgagaaacucgggccuuggagccccaucgacauucaccaucuguccuguccuaacaaucuugucguugaagaugagggaugcaacucucugagcggcuucuccuauauggaacucaaggugggguacaucucugcuaucaaagugaauggauuuacauguacgggcgucgugaccgaggccgaaacauauaccaacuucguuggguacgugacaaccacauuuaagagaaaacacuuccggcccaugccugacgcgugccgcgcugccuauaauuggaagaccgccggagauccgagauacgaggagagccugcauaaccccuauccugacuaccacuggcugcggacggucaagaccacaaaagaaucccucauuaucauuagccccucuguggcugaucuggacccuuacgauaagucccuucauagccgcaucuuucccggcggcaaaugucuggggauuaccaucucuuccacauauugcagcaccaaucacgacuacacgauuuggaugccggaggaagccagacucggaacaucuugugauaucuucaccaacuccaagggcaaacgggcuagcaaagggggacgcacaugcggcuuuguugacgagagagggcuguauaagucccuuaagggagccuguaagcugaaacucugcggcgugccuggccugcggcugauggaugggaccugggucgcgauccaaacccccaaugagacaaagugguguucuccugaccagcucgugaacgugcacgauuuccgcagcgacgaaauugagcaucuggucguugaggaacuuaucagaaaacgggaagagugccuggacgcccucgaguccauuaugacgaccaagagcgugucuuuucgcagacuguccaaucuucggaaacuggugcccggauucggcaaggcuuacacaaucuuuaacaagacccucauggaagccgaugcucacuauaaaagcguccgcacauggaaugagauuauccccucuagagggugccugaaggugggaggccggugucauccucacguuaacgggguguucuucaauggaaucauucugggcccggacggccacauccucauucccgaaaugcagagcucccugcuucagcaacauauggagcugcucgaaucuagcgucaucccucugauucacccccuugccgauccuuccaccguguuuaaagacggggaugaggcggaggacuucguugaagugcaucugcccgauguccaccaacaggugagcggagucgaccucggccugccggauugggggaaguacgugcugaugucugccggagcucucgccacgguuaugcugacaaucuuucuuauuaccugcuguagacgcgugaaacggaccgaguccguccagcagggccugggggaaagcggcagaaaggugucuguugcuccucagaacggaaaggugauguccagcugggaguauuacaaauccggcgggggaacacgccucuga

SEQ ID NO: 223369 - RNA, 1575 nt, Artificial Sequence
  derived and/or modified CDS sequence (opt5) from glycoprotein__RABV__JQ685926.1
augaucccccaggcccugcucuacgugccucugcuuauuccgagccugugccucggcggguuccccaucuauaccauuccugacaagcugggacccugguccccuaucgauauucaccaucuuucuugucccaacaaucuggucguugaggacgaaggcugcacaagccucuccggguuuucuuacauggagcugaaagugggauauaucagcgcuaucaaggugaacggcuucacguguaccggggucgugacagaagccgagaccuacacaaauuuuguuggauaugugaccacaaccuucaaaagaaagcacuuucggccuaugccggaugcgugccgcgcugccuacaacuggaaagucgccggcgaccccagauaugaagagucccugcaaaauccuuaccccgauuacucuuggcuccggacggugaugaccacaaaggagagccugauuaucauuuccccuagcguugcugaccuugaucccuaugacaagucucugcauucccgcguguucccgggcgggaaaugucucggaaucaccauuuuuagcacauacugcucuaccaaccacgauuauacgaucuggaugccugaagaggccagacugggcacauccugugacauuuucaccaauagccgggggaagcgcgcuucuaaaggaggcaagacaugcggguuugucgaugaaagaggacuuuacaaaucccugaagggcgccuguaagcucaaacugugcggcgugcccgggcugcggcucauggacggaaccugggugaccauccagacaagcgaugagacgaagugguguccuuccgaccagcuggucaaccuucaugacuuccacucugaugagaucgaacaccugguuguggaggaacucgugaaaaagcgcgaggaaugccuggacgcgcuugagagcauuaugaccacaaaauccgucagcuuuagacggcugucucaucuccgcaagcuggugcccggcuucgggaaagccuauaccaucuuuaauaagacacugauggaggcugaugcccacuacaaguccauuagaaccuggaacgaaaucauucccagcaaaggaugccucaagguuggcgggcggugucauccucacguggacggagucuucuucaauggcaucauccugggcccggaugggaacgugcuuauucccgagaugcagucuagccugcuccaacagcacguugaacugcuugaguccucugugaucccucugaugcauccccucgcugacccuagcacggucuuuaaagauggagacgaagccgaggauuucguggagguccaucugcccgacauucacaaacagguguccggcguugaucuggggcucccgaauuggggaaaguaucugcuuaugagcgcgggcgcccuggcuacacucaugcugaccaucuuucugaugaccugcugucgcagagccaaccggacagaaucuauucagagagacccuggggaguccggcaagaaggugagcgucaccucucaagacggaaaagugaucuccagcugggaacuuuacaaguccggcggggagacacgccucuga

SEQ ID NO: 223370 - RNA, 1575 nt, Artificial Sequence; identical to SEQ ID NO: 223340
  derived and/or modified CDS sequence (opt5) from glycoprotein__RABV__JQ685928.1

SEQ ID NO: 223371 - RNA, 1575 nt, Artificial Sequence
  derived and/or modified CDS sequence (opt5) from glycoprotein__RABV__JQ685929.1
auggugccccaggcccuccuguucgucccucugcuuaucccgcccguuugccugggcaaguuuccuauuuacaccauccccgacaaacucgggccuuggagccccauugauauccaccaucuguccuguccuaacaaucuugugguggaggacgaaggaugcucuaaccugagcggcuucuccuauauggagcucaaggucggguacauuucugcuaucaaaguggauggauuuacauguacgggcguugugaccgaagccgagacauauaccaauuucaucggguacgucacaaccacauuuaagagaaaacacuuccggccgaugcccgacgcgugccgcagcgcuuauaacuggaagauugccggagauccuagauacgaagagucccugcauacccccuauccugacuaccacuggcugcggacggugaagaccacaaaagagucucucguuaucauuagccccuccguggccgaucuggacccguacgauaagagccuucauucuauggucuuuccuaauggcaaauguuccggcaucaccguguauagcacauacugcucuaccaaccacgacuauacgauuuggaugcccgaaaaggcugggcugggaacauccugugauaucuucaccaauagccgcggcaaaagagccucuaagggagggcggacaugcggcuuuguggacgagcgcgggcucuacaagucccugagaggagcuuguaaacuuaagcugugcggcgucccuggccuccggcugauggaugggaccugggccaccauucaaacacccgaagagacgaaaugguguagccccgaccagcugguuaaccuccacgacuuccauuccgaugagaucgaacaccuggugguggaggaccuugucaagaaacgcgaagagugccuggauacccucgaaucuaucaugacaaccaagagcguguccuuuagacggcugagccaucuucgcaaacugguuccuggauucggcaaggcguauacaauuuuuaauaagacccucauggaggccgacgcucacuacaaaucugugagaacguggaacgagaucauuccguccaaggggugccugcgggucggaggccgcugucacccccaugugaaugggguuuucuucaacggagugaucaugggcccugauggccacguccugauucccgaaaugcagagcucucuccugcagcaacauauggagcuucuggaaagcuccgugaucccucucauccacccccuggccgacccgucuacagucuuuaaagauaaugacgaggcugaagauuucguggagguucaucuuccugacgugcacaagcaggucagcgggauugaucugggacuccccuccuggggcagauaucuggugaugaucgccggggcgcugaugacccucacccugguuauuuuucuuaugaucugcugucggagagugaacaaagccggaagcauucagcaggacccugagaagucugaaaagcgccgguccgucacaccccaaaauggcaaagugaucagcucuugggaguccuacaagagcggguccgaaaccagacuguga

SEQ ID NO: 223372 - RNA, 1575 nt, Artificial Sequence
  derived and/or modified CDS sequence (opt5) from glycoprotein__RABV__JQ685931.1
augaucccccaggcccuccuguucgugccucugcuuauuagcucccugugcuuuggcggguucccgaucuacaccauucccgacaagcucggaccuuggucucccaucgauauucaccaucugagcuguccuaacaaucuugucguugaggacgaaggcugcacaucccugucuggguuuagcuauauggagcucaaagugggauacaucuccgcuaucaaggugaacggcuucacguguaccggggucgugacagaagccgagaccuauacaaauuuuguuggauacgugaccacaaccuucaaaagaaagcacuuucggcccaugccugaugcgugccgcgcugccuauaacuggaaaacggccggcgacccgagauacgaagagucucugcaaaaucccuauccugauuaccauuggcugcggaccgucaagacaaccaaggagagccucauuaucauuucccccagcguggcugaccuggauccuuacgacaaaucucuucacucccgcguuuuccccggcgggaagugucugggaaucacagugagcucuaccuauugcuccacgaaccaugauuacacaauuuggaugccggaagaggccagacucggcaccagcugugacaucuuuacaaauucucgggggaaacgcgcuuccaagggaggcagaaccugcggguucgucgaugaacggggacuguauaaaagccuuaagggcgccuguaagcugaaacucugcggcgugcuggggcugcgccucauggacggaaccugggugacaauucagacguccaacgagaccaagugguguccuucugaucagcuggucaaucuucacgacuuucacagcgacgagaucgaacaucugguuguggaggaacucgugaaaaagagagaggaaugccuggaugcgcuugaguccaucaugacaaccaaaagcgucucuuuccggcgccugucccaccucagaaagcuggugcccggcuuugggaaagccuacacaauuuucaacaagacccugauggaggcugacgcccauuauaagagcauccggacguggaaugaaauuaucccuucuaaaggaugccucaagguuggcgggcgcugucacccccacguggauggagucuucuuuaacggcauuauccugggccccgacgggaaugugcuuaucccugagaugcagagcucccugcuccaacagcauguugaacugcuugagucuagcgugauuccgcugaugcacccccucgcugauccuuccacagucuucaaagacggagaugaagccgaggacuuuguggagguccaucugcccgaugugcacaagcagguuagcggcguggaccuggggcucccuaacuggggaaaauaccugcuuaugucugcgggcgcccuggcuacccucaugcugaccaucuuccugauuacaugcuguagacgggucgauagaaccgaauccauccagcgcgggcccggcgagcuuggacgggaagugagcguuacaucucaaaauggcaaggugauuuccagcugggagcucuauaaguccgggggagaaacgagacuguga

SEQ ID NO: 223373 - RNA, 1575 nt, Artificial Sequence; identical to SEQ ID NO: 223341
  derived and/or modified CDS sequence (opt5) from glycoprotein__RABV__JQ685932.1

SEQ ID NO: 223374 - RNA, 1575 nt, Artificial Sequence
  derived and/or modified CDS sequence (opt5) from glycoprotein__RABV__JQ685933.1
augaucccccaggcccugcucuacgugccucugcuuauuccgagccugugcuucggcggguuucccaucuauaccauuccugacaagcucggacccugguccccuaucgauauucaccaucugucuugucccaacaaucuugucguugaggacgaaggcugcacaagccuguccggguucucuuacauggagcucaaagugggauauaucagcgcuaucaaggugaacggcuuuacguguaccggggucgugacagaagccgagaccuacacaaauuucguuggauaugugaccacaaccuuuaaaagaaagcacuuccggccuaugccggaugcgugccgcgcugccuacaacuggaaaauggccggcgaccccagauaugaagagucccugcaaaauccuuaccccgauuacucuuggcugcggacggucaagaccacaaaggagagccucauuaucauuuccccuagcguggcugaccuggaucccuaugacaaaucucuucauucccgcguuuuuccgggcgggaagugucugggaaucaccauuagcucuacauacugcuccaccaaccacgauuauacgaucuggaugccugaagaggccagacucggcacaagcugugacauuuucaccaauucucgggggaaacgcgcuuccaagggaggcaaaacaugcggguuuguggaugaaagaggacuguacaagagccuuaagggcgccuguaaacugaagcucugcggcguccccgggcugcggcugauggacggaaccugggugaccauccagacauccgaugagacgaaaugguguccuucugaccagcucgugaaccugcaugacuuccacagcgaugagaucgaacaccuugucguugaggaacuggugaagaaacgcgaggaaugccucgacgcgcuggaguccauuaugaccacaaagagcgugucuuuuagacggcuuucccaucugcgcaaacucguccccggcuucgggaaggccuauaccaucuuuaauaagacacugauggaggcugaugcccacuacaaaagcauuagaaccuggaacgaaaucauucccucuaagggaugccugaaagugggcgggcggugucauccucacguugacggaguguucuucaauggcaucauccucggcccggaugggaacguccugauucccgagaugcagagcucccuucugcaacagcacguggaacuccuggagucuagcguuaucccucuuaugcauccccuggcugacccuuccacgguguuuaaggauggagacgaagccgaggauuucgucgaggugcaccuccccgacauucauaaacaggucagcggcguggaucuggggcugccgaauuggggaaaguaucuccugaugucugcgggcgcccuugcuacacugaugcucaucauucugcugaugaccugcugucgcagagccaaccggaccgaauccauccagagagacccuggggagagcggccgcaagguuucuaucacaucccccgacggaaaagugauuagcuccugggaacuuuacaagucuggcggggagacccggcucuga

SEQ ID NO: 223375 - RNA, 1575 nt, Artificial Sequence
  derived and/or modified CDS sequence (opt5) from glycoprotein__RABV__JQ685934.1
augaucccccaggcccugcucuacgugccucugcuuauuagcucccugugcuucggcggguuuccgaucuauaccauucccgacaagcucggaccuuggucucccaucgauauucaccaucugagcuguccuaacaaucuugucguugaggacgaaggcugcacaucccugucuggguucagcuacauggagcucaaagugggauauaucuccgcuaucaaggugaacggcuuuacguguaccggggucgugacagaagccgagaccuacacaaauuucguuggauaugugaccacaaccuuuaaaagaaagcacuuccggcccaugccugaugcgugccgcgcugccuacaacuggaaaauggccggcgacccgagauaugaagagucucugcaaaaucccuacccugauuacagcuggcugcggacggucaagaccacaaaggagucccucauuaucauuagccccucuguggcugaccuggauccuuaugacaaaucccuucauagccgcguuuuucccggcgggaagugucugggaaucaccauuucuuccacauacugcagcaccaaccacgauuauacgaucuggaugccggaagaggccagacucggcacaucuugugacauuuucaccaauucccgggggaaacgcgcuagcaagggaggcaaaacaugcggguuuguggaugaaagaggacuguacaagucccuuaagggcgccuguaaacugaagcucugcggcgucccugggcugcggcugauggacggaaccugggugaccauccagacaucugaugagacgaaauggugucccagcgaccagcucgugaaccugcaugacuuccacuccgaugagaucgaacaccuugucguugaggaacuggugaagaaacgcgaggaaugccucgacgcgcuggagagcauuaugaccacaaagucuguguccuuuaaaagacuuagccaucugcggaagcucgucccuggcuucgggaaggccuauaccaucuuuaauaaaacacugauggaggcugaugcccacuacaagucuauucgcaccuggaacgaaaucauucccagcaaaggaugccugaaggugggcgggagaugucauccccacguugacggaguguucuucaauggcaucauccucggcccugaugggaacguccugauuccggagaugcaguccucucuucugcaacagcacguggaacuccuggagagcuccguuaucccccuuaugcauccucuggcugaccccagcacgguguuuaaagauggagacgaagccgaggauuucgucgaggugcaccucccugacauucauaagcaggucucuggcguggaucuggggcugcccaauuggggaaaguaucuccugauguccgcgggcgcccuugcuacacugaugcucaucauuuuucugauggccugcugucggcgcgcuaacagaaccgaaagcauccagcgggacccgggggagucuggcagaaaaguuuccaucccuagccaagacggaaaggugauuuccucuugggaacuguacaaaagcggcggggagacccgccuuuga

SEQ ID NO: 223376 - RNA, 1575 nt, Artificial Sequence
  derived and/or modified CDS sequence (opt5) from glycoprotein__RABV__JQ685936.1
augauccugcaggcccuccuguucgugccccuucugauuagcccucucugccugggcaaguuuccgaucuacaccauucccgacaaacuugggccuuggucccccaucgauauucaccaucugucuuguccuaacaaucucgucguugaggacgaaggaugcaccaaccugagcggcuucuccuauauggagcugaaggugggguacaucucugcuaucaaagugaauggauuuacguguaccggcgucgugacagaagccgagaccuauacaaacuucguuggguacgugaccacaaccuuuaagagaaaacacuuccggcccauuccugaugcgugccgcgcugccuauaauuggaagauggccggagacccgagauacgaagagagccuccaaaaccccuauccugaguaccauuggcugcggacggucaagaccacaaaagaaucccuuaucauuaucucucccagcguggcugaucuggacccuuacgauaagucccuccacagccgcguuuuucccggcggcaaaugucuggggauuaccgugucuuccacauauugcagcaccaaucaugacuacacgaucuggaugccggaggaaccuagacuuggaacaucuugugauauuuucaccuccagcaagggcaaaaaggccucuaaagggggaaagacaugcggcuuugucgacgagcgggggcuguauaagucccucaaaggagcuuguaagcugaaacugugcggcgugcucggccugcgccuuauggaugggaccugggugagcauccagaccuccgacgauacaaaguggugucccccugaccagcuggucaaccuccacgacuuccacucugaugagaucgaacaucugguuguggaggaacuugugaaaaagagagaggaaugccuggacgcccucgagagcauuaugacgaccaaguccgucagcuuucggcgccugucuuaccugagaaaacucgugcccggauucggcaaggcguauacaaucuuuaauaaaacccugauggaggccgaugcucacuacaaguccguucggacauggaacgaaauuauccccagcaaagggugccuuaaggugcgcgagagaugucauccuccggucgacggaguguucuucaauggcauuauccuggggcccgauggaaacguucucaucccugaaaugcagucuagccugcuucaacagcacauggagcugcucgaauccucugugauuccccugaugcacccucuggccgaccccagcaccgucuuuaaggagggcgaugaggcugaagacuucguggagguccaucucccggaugugcacaaacagaucuccggcguugaccuggggcuuccuagcuggggaaaguaucugcucaugauugccggcgggcuggugacgcugguccuuaucauuugcucuaucgcguguugccggcgcgccaaaagaacagaaucccggagacgcggaagcggcgagucugggaagaaagugaaugcuacaccccagacccggaagguuguguccagcugggaacucuacaagagagagggcgaugcccgccuguga

SEQ ID NO: 223377 - RNA, 1575 nt, Artificial Sequence
  derived and/or modified CDS sequence (opt5) from glycoprotein__RABV__JQ685938.1
auggugcugcaggcccuccuguucgcucccuuucuuaucagcucccugugccucggcaaguucccuauuuacaccaucccggacaaacuggggcccuggucuccuauugauauccaccaucuuagcugucccaacaaucuggucguugaggacgaaggaugcaacucccucucuggcauuagcuauauggagcugaaggugggguacaucuccgccaucaaagugaauggauuuacauguacgggcgucgugaccgaagcggagacauauaccaacuucguuggguacgugacaaccacauuuaagagaaaacacuuccauccuaugcccgaugcuugccggucugccuauaauuggaagcuggccggagacccucgcuacgaagagagccuccaaaacccguaucccgauuaccacuggcugagaaccgucaagacgaccaaagagucccuuauuaucauuagcccuucuguggcugaccuggaucccuacgacaagucccuccauagccggaucuuuccuucuggcaaauguuccggcaugacaauuagcucuaccuauugcuccacaaaucacgaauacaccaucuggaugcccgagaaggccgggcugggaacgagcugugauauuuucacaaccuccaaaggcaagcgcgcuucuaaagggggaaagacaugcggcuuuguugacgaaagagggcuuuauaagagccugaaaggagccuguaagcucaaacugugcggcguguccggccugcggcucauggaugggaccugggucgcgauccagaccagcgaggagacaaagugguguccgccugaccagcuggugaaccuucacgaucugcauucugacgaaaucgagcaccucguggucgaggaacugguuaaaaagcgcgaagagugccuugacgcccuggaguccauuaugacgaccaagagcgugucuuucagacggcucagccaucugcgcaaacuggugcccggauuuggcaaggcuuacacaaucuucaauaaaacccucauggaagccgaugcucacuauaaguccauuagaacauggaacgagaucauuccuucuaaagggugccugcgggucggaggcaagugucacccccaugugaaugggguguuuuucaacggaaucauccuuggccccgacggccacguucugauuccugaaaugcagagcucccuccugcaacagcauauggagcuucuggaaagcucugucaucccgcucaugcacccccuggccgaucuguccaccguguucaaggacggggaugaggcggaggacuuuguugaagugcaucucccugauguccacaaacagauuagcggaguggaccugggccuucccucuugggggaaguacguccugauguccgccggagcucucgccauccugaugcuggugauuagccuuaugaaaugcuucuggggcguuaaucgcacgaagccuauccagcaagggcccagagaguccgaacggaaagugucuaucgcuccgcagagccgcaaggucauuuccucuugggagagcuauaaguccggcggagaaacagagcucuga

SEQ ID NO: 223378 - RNA, 1575 nt, Artificial Sequence
  derived and/or modified CDS sequence (opt5) from glycoprotein__RABV__JQ685940.1
augaucccccaggcccugcucuacgugccucugcuuauuccgagccugugcuucggcggguuucccaucuauaccauuccugacaagcucggacccugguccccuaucgauauucaccaucugucuugucccaacaaucuugucguugaggacgaaggcugcacaagccuguccggguucucuuacauggagcucaaagugggauauaucagcgcuaucaaggugaacggcuuuacguguaccggggucgugacagaagccgagaccuacacaaauuucguuggauaugugaccacaaccuuuaaaagaaagcacuuccggccuaugccggaugcgugccgcgcugccuacaacuggaaagucgccggcgaccccagauaugaagagucccugcaaaauccuuaccccgauuacucuuggcugcggacggugaagaccacaaaggagagccucauuaucauuuccccuagcguugcugaccuggaucccuaugacaaaucucuucauucccgcguguuuccgggcgggaagugucugggaaucaccauuagcucuacauacugcuccaccaaccacgauuauacgaucuggaugccugaagaggccagacucggcacaagcugugacauuuucaccaauucucgggggaaacgcgcuuccaagggaggcaaaacaugcggguuugucgaugaaagaggacuguacaagagccuuaagggcgccuguaaacugaagcucugcggcgugcccgggcugcggcugauggacggaaccugggugaccauccagacauccgaugagacgaaaugguguccuucugaccagcucgucaaccugcaugacuuccacagcgaugagaucgaacaccuuguuguggaggaacuggugaagaaacgcgaggaaugccucgacgcgcuggaguccauuaugaccacaaagagcgucucuuuuagacggcuuucccaucugcgcaaacucgugcccggcuucgggaaggccuauaccaucuuuaauaagacacugauggaggcugaugcccacuacaaaagcauuagaaccuggaacgaaaucauucccucuaagggaugccugaaaguuggcgggcggugucauccucacguggacggagucuucuucaauggcaucauccucggcccggaugggaacgugcugauucccgagaugcagagcucccuucugcaacagcacguugaacuccuggagucuagcgugaucccucuuaugcauccccuggcugacccuuccacggucuuuaaggauggagacgaagccgaggauuucguggagguccaccuccccgacauucauaaacaggugagcggcguugaucuggggcugccgaauuggggaaaguaucuccugaugucugcgggcgcccuugcuacacugaugcucaccaucuuucugauuaccugcugucgcagauccaaccggacagaaagcauccagagagacccuggggagucuggcaagaaaguguccaucaccagccaagacggaaaggucauuuccucuugggaacuguacaaaagcggcggggagacacgccuuuga

SEQ ID NO: 223379 - RNA, 1575 nt, Artificial Sequence; identical to SEQ ID NO: 223340
  derived and/or modified CDS sequence (opt5) from glycoprotein__RABV__JQ685941.1

SEQ ID NO: 223380 - RNA, 1575 nt, Artificial Sequence
  derived and/or modified CDS sequence (opt5) from glycoprotein__RABV__JQ685942.1
augaucccccaggcccugcuccuggugccucuucugauuagcucccucugcuucggcggguuuccgaucuacaccauucccgacaagcugggaccuuggucucccaucgauauucaccaucuuagcuguccuaacaaucuggucguugaggacgaaggcugcacaucccucucuggguucagcuauauggagcugaaagugggauacaucuccgcuaucaaggugaacggcuuuacguguaccggggucgugacagaagccgagaccuauacaaauuucguuggauacgugaccacaaccuuuaaaagaaagcacuuccggcccacgccugaugcgugccgcgcugccuauaacuggaaaauggccggcgacccgagauacgaagagucucugcaaaaucccuauccugauuaccauuggcuccggaccgucaagacaaccaaggagagccugauuaucauuucccccagcguggcugaccuugauccuuacgacaaaucucugcacucccgcguuuuucccggcgggaagugucucggaaucacagugagcucuaccuauugcuccacgaaccaugauuacacaauuuggaugccggaagaggccagacugggcaccagcugugacaucuucacaaauucucgggggaaacgcgcuuccaagggaggcaaaaccugcggguuugucgaugaaagaggacuuuauaagagccugaagggcgccuguaaacucaagcugugcggcgugccugggcugcggcucauggacggaaccugggugacaauucagacguccgaugagaccaaauggugucccucugaccagcuggucaaccuucacgacuuccacagcgaugagaucgaacaucugguuguggaggaacucgugaagaaacgcgaggaaugccuggacgcgcuugaguccaucaugacaaccaagagcgucucuuuuagacggcugucccaccuccgcaaacuggugccuggcuucgggaaggccuacacaauuuuuaauaagacccugauggaggcugaugcccauuauaaaagcaucagaacguggaacgaaauuauccccucuaagggaugccucaaaguuggcgggcggugucacccccacguggacggagucuucuucaauggcauuauccugggcccugaugggaacgugcuuaucccggagaugcagagcucccugcuccaacagcauguugaacugcuugagucuagcgugauuccccugaugcacccucucgcugaccccuccacagucuuuaaggauggagacgaagccgaggauuucguggagguccaucugccugacauccacaaacaggugagcggcguugaucuggggcuccccaauuggggaaaguaccugcuuaugucugcgggcgcccuggcuacccucauucugaccaucuuucuggugacaugcugucgcagagucgaccggaccagauccauucagcgcgggagcggcgaaucuggacggaagguguccguuacaagccaaaacggcaaagugaucuccucuugggagcuuuauaagagcgggggagaaacgagacucuga

SEQ ID NO: 223381 - RNA, 1575 nt, Artificial Sequence
  derived and/or modified CDS sequence (opt5) from glycoprotein__RABV__JQ685943.1
auggugcugcaggcccuccuguucgucccccuucugguuuuuccuagcugcuucggcaaguuuccgaucuacaccauucccgacaaacucgggccuuggucccccaucgauauucaccaucugucuuguccuaacaaucuugugguggaggacgaaggaugcaacaaucugagcggcuucuccuauauggagcucaaggucggguacaucucugcuauuaaagugaacggauuuacauguacgggcguugugaccgaagccgagacauauaccaauuucgucggguacgugacaaccacauuuaagagaaaacacuuccggcccaccccugaugcgugccgcgcugccuauaacuggaagauggccggagacccgagauacgaagagagccugcauaaucccuauccugauuaccacuggcugcggacgguuaagaccacaaaagagucccucgugaucaucucucccagcgucgcugaccuggauccuuacgacaagucccuucauagccgcguguuucccucuggcaaauguuccggcaugaccgugagcucuacaugcuguuccaccaaccacgauuauacgauuuggaugccggaaaauccuagacuggggacaagcugcgacaucuucaccaacucucggggaaagcgcgccuccaaaggcagcaagacauguggguuugucgaugagagaggacucuacaagucccugaaaggcgcuugcaagcugaaacugugugggguucucggacugcggcugauggacggcaccuggguggccaugcaaaccucugaugaaauuaaguggugucccccugaccagcucgugaaucugcacgacuuccgcagcgaugagaucgagcaucuugucguggaggaacugguuaaaaagagagaagagugccucgacgcgcuggaauccauuaugacaacgaaaagcgugucuuuucggcgccuuucccaccugagaaagcucguccccggcuucgggaaggccuauaccaucuucaaccggacacugauggaggcugaugcccauuacaaaagcgugcgcaccuggaaugagguuauucccucuaagggaugccugagagugggcgggcggugccacccucacgucaacggaguguuuuucaauggcaucauccucgggccggacggacauguccugauucccgaaaugcagagcucccuucugcagcaacacauggagcuccuggaaucuagcgugaucccucuuaugcauccccuggcuaacccuuccacaguuuuuaaagagggcgaugaagccgaggacuucguggagguccaccuccccgaugugcauaagcagguuagcggcguggaccuggggcugccgaacuggggaaaauauguccucaugucugcgggcgcccugauugcucuuaugcugaucauuuuucucaugaccuguugcagacgcgugaaucggccugaauccacgcagagaauccuugggggaacaggcaagaaggugagcgccgcuucucaguccgggaaaguuaucagcuccugggagucuuacaagagcggcggagaaacccaacuguga

SEQ ID NO: 223382 - RNA, 1575 nt, Artificial Sequence
  derived and/or modified CDS sequence (opt5) from glycoprotein__RABV__JQ685944.1
auggugccccaggcccugcucgucguuccucugcuuggcuucagccugugcuuugggaaguucccgaucuacaccauucccgacaaacucggaccuuggucccccaucgauauucaccaucugucuuguccuaacaaucuugugguggaggacgaaggcugcacaaaccugagcggguuuuccuauauggagcucaaggucggauacaucucugcuauuaaagugaauggcuucacguguaccgggguugugacagaagccgagaccuauacaaacuuugucggauacgugaccacaaccuucaagagaaaacacuuucaucccacgccugaugaaugccgggcggcuuauaauuggaagauggccggcgacccgcgcuacgaggagagccugcacaaccccuauccugauuaccauuggcugagaaccguuaagacaaccaaagaaucccucgugaucaucucucccagcgucgccgaccuggauccuuacgacaagucccuucacagccggguguuccccucuggcaaauguuccgggauuacagugagcucuaccuauugcuccacgaaucacgauuacacaaucuggaugccggagaacccucgccugggaaccagcugugacauuuuuacaaauucuagaggcaagcgggcuuccaaagggagcaagaccugcggauucgucgaugaacgcggccucuauaagucccugaaaggggccuguaaacuuaagcugugcggaguucccggccucaagcugaucgacggcaccuggauugcuaugcaaacaucugaugagacgaaaugguguccucccgaccagcuggugaaccuccaugacuuuagaagcgaugagaucgaacaccugguggucgaggaccuugugaagaaacgggaagagugccuggaugcccucgaauccauuaugaccacaaagagcguuucuuuccgcagacugucccaucuucggaagcuggugcccggguuuggaaaagcguacaccaucuucaauaagacacucauggaggccgacgcucacuauaaaagcguccgcaccuggaacgagaucauuccuucuaagggcugccugaaaguugggggaagaugucacccgcaugugaauggcguguucuuuaacggggucauccugggacccgauggccacgugcucauuccugaaaugcagagcucccugcuucagcaacauauggagcugcucgaaucuagcgucaucccccugaugcacccucuugccgaccccuccacgguguucaaggauggcgacgaggcugaagauuuuguugagauucaucugccgaaugugcacaagcaggucagcgggguggaccucggacugccuaacuggggcaaauacguuucucuguccgccggggcgcucacagcccugaugcuuaucaucuuccugauggcuugcugucggaaggugaaccgccccgagccuacccagagaagccucgaaggaaaaggccggaaggucucuauuaccucccagagcgggaaagugaucuccucuugggagagcuauaaguccggcggagaaacaagacuguga

SEQ ID NO: 223383 - RNA, 1575 nt, Artificial Sequence; identical to SEQ ID NO: 223344
  derived and/or modified CDS sequence (opt5) from glycoprotein__RABV__JQ685945.1

SEQ ID NO: 223384 - RNA, 1575 nt, Artificial Sequence
  derived and/or modified CDS sequence (opt5) from glycoprotein__RABV__JQ685946.1
augaucccccaggcccugcucuacgugccucugcuuauuccgagccugugcuucggcggguuucccaucuauaccauuccugacaagcucggacccugguccccuaucgauauucaccaucugucuugucccaacaaucuugucguugaggacgaaggcugcacaagccuguccggguucucuuacauggagcucaaagugggauauaucagcgcuaucaaggugaacggcuuuacguguaccggggucgugacagaagccgagaccuacacaaauuucguuggauaugugaccacaaccuuuaaaagaaagcacuuccggccuaugccggaugcgugccgcgcugccuacaacuggaaaauggccggcgaccccagauaugaagagucccugcaaaauccuuaccccgauuacucuuggcugcggacggucaagaccacaaaggagagccucauuaucauuuccccuagcguggcugaccuggaucccuaugacaaaucucuucauucccgcguuuuuccgggcgggaagugucugggaaucaccauuagcucuacauacugcuccaccaaccacgauuauacgaucuggaugccugaagaggccagacucggcacaagcugugacauuuucaccaauucucgggggaaacgcgcuuccaagggaggcaaaacaugcggguuuguggaugaaagaggacuguacaagagccuuaagggcgccuguaaacugaagcucugcggcguccccgggcugcggcugauggacggaaccugggugaccauccagacauccgaugagacgaaaugguguccuucugaccagcucgugaaccugcaugacuuccacagcgaugagaucgaacaccuugucguugaggaacuggugaagaaacgcgaggaaugccucgacgcgcuggaguccauuaugaccacaaagagcgugucuuuuagacggcuuucccaucugcgcaaacucguccccggcuucgggaaggccuauaccaucuuuaauaagacacugauggaggcugaugcccacuacaaaagcauuagaaccuggaacgaaaucauucccucuaagggaugccugaaagugggcgggcggugucauccucacguugacggaguguucuucaauggcaucauccucggcccggaugggaacguccugauucccgagaugcagagcucccuucugcaacagcacguggaacuccuggagucuagcguuaucccucuuaugcauccccuggcugacccuuccacgguguuuaaggauggagacgaagccgaggauuucgucgaggugcaccuccccgacguccauaaacaggugagcggcguugaucuggggcugccgaauuggggaaaguaucuccugaugucugcgggcgcccuugcuacacugaugcucaccauuuuucugaugaccuacugccgcagagccaaccgggcugaauccauccagagagacccuggggagagcggccgcaaggugucuauuacaucccaagacggaaaagucaucagcuccugggaacuguacaagucuggcggggaggcccggcuuuga

SEQ ID NO: 223385 - RNA, 1575 nt, Artificial Sequence
  derived and/or modified CDS sequence (opt5) from glycoprotein__RABV__JQ685947.1
augaucccccaggcccuccuguucgugagccugcuuauuccuucccugugccucggcgaguuuccgaucuacaccauucccgacaagcuggggccuuggacacccaucgauauucaccaucuuucuuguccuaacaaucuggucgcugaaaacgacggaugcacgagccucuccggcuucucuuauauggagcugaaaguuggguacaucagcgccaucaaggugaauggauuuaccuguacaggcguggucaccgaagcggagacauauaccaacuucgugggguacguuacaaccacguuuaaaagaaagcacuuccggcccaugccugaugcuugccgcgccgcccaugacuggaaaauggcuggagauccgagauaugaagacucccugcaaaaucccuacccugauuaucacuggcuccggaccgugaagacaaccaaggagucucuggucauuaucagccccuccguggccgaccuugauccuuacgacaaaagccugcauucucgcguuuuucccuccggcaagugucucggcauuacagugagcucuaccuacugcuccacgaaccacgauuauacaaucuggaugccggucgagccuagacuggggaccagcugugacauuuucacaaauucucggggaaaacgcgcuuccaagggcgggagagugugcggauuuguggaugaacggggccuuuacaaaagccugaagggggccuguaagcucaaacugugcggaguccccggcauccgccugauggacggcaccuggguuuccauucagaccucugaggacaucaagugguguccucccgauagacucgugaaccugcacgacuuccauagcgaugaacuugagcaccugguggucgaggaacucaucaaacggcgcgagaauugccuggacgcgcuugaauccauuaugacaaccaagagcgugucuuuuagacggcugucccaucuccgcaaacugguucccggguucggaaaggccuauacgaucuuuaacaaaacacugauggaggcugaugcccacuacaagagcgugaagaccuggaaugaagucauuccuucuaaaggcugccucgagguugggggaaagugucacccgcccgugaacggcguguucuucaaugggaucauucugggaccugacggcaacguccuuauccccgagaugcagagcucccugcuccagcaacauauggaacugcuugagucuagcgugaucccucugaugcacccccucgcugauccguccacagucuuuaaagaaggcgacgaggccgaagauuucguggagguucaucugccugacgugcacaagcaggucagcgauguggaccuggggcuccccucuuggggaaaauaucugcuuauguccgcgggcgcccuggcuauucucauccuggccauuguucugaucauuugcuguagacgggugaauaagaccagaagcacgcagcgcgggcagcgggagucuagaggaaagauguccgucgcuccucaaaacggcaaaaucaucagcuccugggaacuuuacaagcgcgagucugaaacagggcucuga

SEQ ID NO: 223386 - RNA, 1575 nt, Artificial Sequence; identical to SEQ ID NO: 223384
  derived and/or modified CDS sequence (opt5) from glycoprotein__RABV__JQ685951.1

SEQ ID NO: 223387 - RNA, 1575 nt, Artificial Sequence
  derived and/or modified CDS sequence (opt5) from glycoprotein__RABV__JQ685952.1
augaucccccaggccauucugagcgugccucuccugaucuccucucuuugcuucggcaaguuuccgauuuacaccauccccgagaaacuggggccuuggagccccauugacauccaccaucucuccuguccuaacaaucuggucguugaagaugagggaugcacaacgcuuucuggcuucagcuauaucgaacugaaggugggguacauuuccgcuaucaaagugaacggauuuaccuguacaggcgucgugaccgaggccgaaacauauaccaauuucguuggguacgugacaaccacguuuaagagaaaacacuuccggcccaugccugacgcgugccgcgcugccuauaacuggaagauggccggagauccgagauacgaggagucucuccauaaucccuauccugacuaccacuggcugcggaccgucaagacaaccaaagaaagccuggugauuaucucccccagcguugcugaucucgacccuuacgauaagucucugcauucccgcguguuucccggcggcaaaugucuugggauuacaaucagcucuaccuauugcuccacgaaccacgacuacacaauuuggaugccggaggaagccagacugggaaccagcugugauaucuucaucaauucucggggcaagcgcgcuuccaaagggggaagaacaugcggcuuugucgacgagcgggggcucuauaagagccugaagggagccuguaaacuuaagcugugcggcgugccuggccuccgccugauggaugggaccuggguguccauucccgcgucugacgagaccaaaugguguagcccugaucaacuggucaacguucacgacuuccauuccgacgaaaucgagcaccucgugguggaggagcuggucaagagacgggaagagugccuugaugcccuggagagcauugugacaacgaaaucuaucuccuuucgcagacucagccaucugcggaaacuuguucccggauucggcaaggcuuacaccauuuuuaauaagacacugauggaagccgacgcucacuauaagucugugcgcaccuggaacgagaucauccccagcaaagggugccucuccgucggaggcagaugucacccucaugugaaugggguuuucuucaacggaauuauccugggcccggauggcaaugugcugauucccgaaaugcagucuagccuccugcagcagcacauggagcuucuggaauccagcgucaucccucucaugcauccccuggccgacccuucuacaguguuuaaggauggggacgaggcggaggauuucgucgaagugcaccuucccgacguucaagaacagguguccggagucgaucugggccucccgaacugggggaaauacgugcugaugagcgccggagcucuggccauucucauccugaccaucuuucuuauuacgugcugucggagagcugacaagacaaaaucuauccagcagggccucgggggcuccggacgcaagguuagcguguccccucaaaauggcaaggucauuucuagcugggaauccuauaaaaacgggggagagacccggcuguga

SEQ ID NO: 223388 - RNA, 1575 nt, Artificial Sequence
  derived and/or modified CDS sequence (opt5) from glycoprotein__RABV__JQ685953.1
augaucuuccaggcccugcccuuugugccucuccugauuagcucccuuugccugggcaaguucccgaucuacaccauucccgacaaacucgggccuuggucucccaucgauauucaccaucugagcuguccuaacaaucuugucguugaggacgaaggaugcaccucccugucuggcuuuagcuauauggagcucaaggugggguacaucuccgcuaucaaagugaacggauucacguguaccggcgucgugacagaagccgagaccuauacaaauuuuguuggguacgugaccacaaccuucaagagaaaacacuuucggcccauuccugaugcgugccgcgcugccuauaacuggaagauggccggagacccgagauacgaagagucucugcaaaaucccuauccugaguaccauuggcugcggacggucaagaccacaaaagaaagccucaucauuaucucccccagcguggcugaucuggacccuuacaacaagucucuucacucccgcguuuuccccggcggcaaaugucuggggauuaccaucagcucuacauauugcuccaccaaucaugauuacacgauuuggaugccggaggaaccuagacucggaacaagcugugacaucuuuaccucuuccaagggcaaaaaggccagcaaagggggaaagacaugcggcuucguggaugagcgggggcuguauaagucccuuaaaggagcuuguaagcugaaacucugcggcguccugggccugcgccucauggacgggaccugggugucuauccagaccagcgaugacacaaaguggugucccccugaucagcuggugaaccuucacgacuuucacuccgacgagauugaacaucuggucguugaggaacucgugaaaaagagagaggaaugccuggaugcccuugagagcaucaugacgaccaagucuguguccuuccggcgccugagcuaccucagaaaacugguccccggauuuggcaaggcguauacaauuuucaauaaaacccugauggaggccgacgcucacuacaagucugugcggacauggaacgaaaucauucccagcaaagggugccucaagguucgcgagagaugucauccuccgguggauggagucuucuuuaauggcaucauccuggggcccgacggaaacgugcuuauuccugaaaugcaguccucucugcuccaacagcacauggagcugcuugaaagcuccguuaucccccugaugcacccucucgccgaucccagcaccguguucaaggacggcgaugaggcugaggacuuugucgaagugcaucugccggauguccacaaacagauuucuggcguggaccuggggcucccuuccuggggaaaguaucugcuuaugaucgccggcgggcuggcgacgcucgcccugauuaucuucagcauggcuugcugucggcgcgccaaaagaacagagcccggacggagaggcucuggggaauccggcaagcgcguuccugcuacaccccagacccggaaaguggucagcuccugggagcuguacaagucugaaggagaugccagacuuuga

SEQ ID NO: 223389 - RNA, 1575 nt, Artificial Sequence
  derived and/or modified CDS sequence (opt5) from glycoprotein__RABV__JQ685954.1
auggugccccaggcccuucucuucgucccucugcuuaucccgagcguuugccugggcaaguuucccauuuacaccaucccugacaaacucgggcccugguccccuauugauauccaccaucugucuugucccaacaaucuugugguggaggacgaaggaugcagcaaccuguccggcuucucuuauauggagcucaaggucggguacauuagcgcuaucaaaguggauggauuuacauguacgggcguugugaccgaagccgagacauauaccaauuucaucggguacgucacaaccacauuuaagagaaaacacuuccggccuaugccggacgcgugccgcuccgcuuauaacuggaagauugccggagaucccagauacgaagagucucugcauaccccuuaucccgacuaccacuggcugcggacggugaagaccacaaaagagagccucguuaucauuuccccuagcguggccgaucuggaccccuacgauaagucucuucauuccauggucuuuccgaauggcaaauguagcggcaucaccguguauucuacauacugcuccaccaaccacgacuauacgauuuggaugccugaaaaggcugggcugggaacaagcugugauaucuucaccaauucuaaaggcaagcgcgccuccaaagggggaagaacaugcggcuuuguggacgagcgggggcucuacaagagccugcgcggagcuuguaagcugaaacugugcggcguccccggccucagacugauggaugggaccugggccaccauucaaacaccugaagagacgaagugguguucccccgaccagcugguuaaccuccacgacuuccauucugaugagaucgaacaccuggugguggaggaccuugucaaaaagcgggaagagugccuggauacccucgaaagcaucaugacaaccaaauccgugagcuuucgcagacugucucaucuucggaagcugguucccggauucggcaaggcguauacaauuuuuaauaaaacccucauggaggccgacgcucacuacaaguccgugcgcacguggaacgagaucauuccuagcaaagggugccugagagucggaggccggugucacccgcaugugaaugggguuuucuucaacggagugaucaugggccccgauggccacguccugauuccugaaaugcagucuagccuccugcagcaacauauggagcuucuggaauccucugugaucccccucauccacccucuggccgaccccagcacagucuuuaaggauaaugacgaggcugaagauuucguggagguucaucuuccggacgugcacaaacaggucuccgggauugaucugggacucccuagcuggggccgcuaucugcugaugaucgccggggcgcucaugacccugacccuugugauuuuucugaugaucugcuguagacggguuaacaaggccggaucuauucagcaggaccccgagaaguccgaaagacgccggagcgugacaccucaaaauggcaaagucaucucuuccugggagagcuacaaguccgggucugaaaccagacucuga

SEQ ID NO: 223390 - RNA, 1575 nt, Artificial Sequence
  derived and/or modified CDS sequence (opt5) from glycoprotein__RABV__JQ685955.1
augaucagccaggccuuccuguacgugccccuccugauuuccucucuuugcuuuggcaaguucccuaucuauaccauuccggacaaaaucgggcccuggagcccuauugauauccaccaucuguccugucccaacaaucucgucguugaggacgaaggaugcacaucucugagcggcuuuuccuacauggagcuuaaggugggguauaucucugcuauuaaagugaacggauucacguguaccggcgucgugacagaagccgagaccuacacaaauuuuguuggguaugugaccacaaccuucaagagaaaacacuuucggccuaugcccgaugcgugccgcagcgcuuacaacuggaagacggccggagacccuagauaugaagagucccugcaaaauccguaccccgauuacagcuggcuccggaccgucaagacaaccaaagagucucuggugaucauuuccccuagcguugccgaccuggaucccuaugacaagucucuccauucccgcguguucccuaacggcaaaugucugggcaucacaauuagcucuaccuacugcuccacgaaucacgauuauacaaucuggaugcccgaagaggcuagacuugggaccagcugugacauuuuuacaaacuccaagggaaaacgggccucuaagggcgggcggaccugcggauucgucgaugaaagaggccuguacaagagccuccgcggggcuuguaaacugaagcugugcggagugccgggccugcgccucauggacggcaccuggguguccauccagacaagcgaugagacgaaaugguguccucccgaccagcuggucaauguucaugacuuucacucugaugagaucgaacaccuggugguggaggaacucgucaagaaaagagaggaaugccuggacgcccuugaguccauuaugaccacaaagagcgugucuuuccggcgccugagccaucucagaaaacugguuccuggguuuggaaaggcguauaccaucuucaacaagacacuuauggaggccgaugcucacuacaaauccgugcagaccuggaaugaaauuauccccucuaagggcugccugaaagucgggggaaugugucauccccacguggacggcguuuucuuuaacgggauuauccucggaccugauggcaaugugcugaucccggagaugcaaagcucccugcuccagcagcacauggaacugcuugagagcucugucauuccccugaugcauccucucgccgaccccuccacgguguucaaggauggcgacgaagcugaggauuuugucgaggugcaccuuccugacauccauaaacagguuagcgggauugaucuuggacugcccgacuggggcaaguaucuccugaugucugccggggcgcuggccauccuccugcuuacaauuuuccugaugaccugcugucggcgcgugaacagaaccgaauccgcucaacgggacccgggagagcucggcagaaaggucagcgccacaccucagaaucgcaaagugaucuccucuugggaacuguacaagagcgggggcgauacccggcuguga

SEQ ID NO: 223391 - RNA, 1575 nt, Artificial Sequence
  derived and/or modified CDS sequence (opt5) from glycoprotein__RABV__JQ685956.1
augaucccccaggcccugcucuacgugccucugcuuauuagcucccugugcuucggcggguuuccgaucuauaccauucccgacaagcucggaccuuggucucccaucgauauucaccaucugagcuguccuaacaaucuugucguugaggacgaaggcugcacaucccugucuggguucagcuacauggagcucaaagugggauauaucuccgcuaucaaggugaacggcuuuacguguaccggggucgugacagaagccgagaccuacacaaauuucguuggauaugugaccacaaccuuuaaaagaaagcacuuccggcccaugccugaugcgugccgcgcugccuacaacuggaaagucgccggcgacccgagauaugaagagucucugcaaaaucccuacccugauuacagcuggcugcggacggugaagaccacaaaggagucccucauuaucauuagccccucuguugcugaccuggauccuuaugacaaaucccuucauagccgcguguuucccggcgggaagugucugggaaucaccauuucuuccacauacugcagcaccaaccacgauuauacgaucuggaugccggaagaggccagacucggcacaucuugugacauuuucaccaauucccgggggaaacgcgcuagcaagggaggcaaaacaugcggguuugucgaugaaagaggacuguacaagucccuuaagggcgccuguaaacugaagcucugcggcgugccugggcugcggcugauggacggaaccugggugaccauccagacaucugaugagacgaaauggugucccagcgaccagcucgucaaccugcaugacuuccacuccgaugagaucgaacaccuuguuguggaggaacuggugaagaaacgcgaggaaugccucgacgcgcuggagagcauuaugaccacaaagucugucuccuuuagacggcuuagccaucugcgcaaacucgugccuggcuucgggaaggccuauaccaucuuuaauaagacacugauggaggcugaugcccacuacaaaucuauuagaaccuggaacgaaaucauucccagcaagggaugccugaaaguuggcgggcggugucauccccacguggacggagucuucuucaauggcaucauccucggcccugaugggaacgugcugauuccggagaugcaguccucucuucugcaacagcacguugaacuccuggagagcuccgugaucccccuuaugcauccucuggcugaccccagcacggucuuuaaggauggagacgaagccgaggauuucguggagguccaccucccugacauucauaaacaggugucuggcguugaucuggggcugcccaauuggggaaaguaucuccugauguccgcgggcgcccuugcuacacugaugcucaccaucuuucugaugaccugcugucgcagagccaaccggacagaaagcauucagagagacccgggggagucuggcaagaaaguguccaucaccagccaagacggaaaggucaucuccucuugggaacuguacaaaagcggcggggagacacgccuuuga

SEQ ID NO: 223392 - RNA, 1575 nt, Artificial Sequence
  derived and/or modified CDS sequence (opt5) from glycoprotein__RABV__JQ685957.1
augaucagccaggcccugcuguucgugccccugcuuauuuccucucugugccucggcgaguuuccuaucuacaccauuccggaaaagcuggggcccuggagcccuaucgacauucaccaucuuuccugucccaacaaucuggucguugaggaugaaggaugcaacucucucagcggcuucuccuauauggagcugaaagugggguacaucucuagcaucaaggugaauggauuuacauguacgggcgucgugaccgaagcugagacauauaccaacuucguuggguacgugacaaccacauuuaaaagaaagcacuuccggccuaugcccgacgccugccgcgcggcuuauaauuggaaaauguccggagauccuagauacgaggaaagccugcauaacccguaucccgacuaccacuggcuccggaccgucaagacgaccaaggagucucuggugauuaucuccccuagcguugccgaucuugaccccuacgauaaaucucugcauucccgcguguuuagcggcggcaagugucucgggauuacaaucucuuccaccuauugcagcacaaaucacgacuacaccauuuggaugccugaagaggccagacugggaacguccugugauaucuucacaaacucuaaaggcaagaaagcuagcaaagggggacggaccugcggcuuugucgacgagcgcgggcuuuauaagucccugaagggagccuguaagcucaaacugugcggcgugcccggccugagacucauggaugggacaugggugagcauucaaaccucugacgaaaccaagugguguccgccugaucagcuggucaauauccacgacuuccgguccgacgagaucgaacaucuuguuguggaggaacuggugaaaaagcgcgaggagugccucgaugcucuggaaagcauuaugacaacgaaaucugucagcuuuagacggcuuucccaccuccgcaagcucgugcccggauucggcaaggccuacaccaucuuuaacaaaacacugauggaggcggacgcccauuauaagucuguuagaaccuggaaugaaauuaucccuagcaaagggugccuguccgugggaggccggugucacccccacgucgaugggguguucuucaacggaauuauccucggccccgacggcagcguucugaucccugagaugcagucuucccuucugcagcaacauauggaacuccuggagagcucugugauuccgcuuaugcacccccuggcuaauccuuccacagucuuuaaggauggggacgaggccgaagauuucguggagguccaucuccccgacauccaggaacaggugagcggaguugaucugggccugccuaacugggggaaauacgugcucauguccgcuggagcccuggcgauucuucugcucaccaucuuucugaugacgugcuguauucgcacaaauagaaccaagucuauccagcaaggccccggggagagcggccggaaggucuccgugccgccucagaacggaagaguuaucucuagcugggaauccuucaaaagcggcggggagaccggacuguga

SEQ ID NO: 223393 - RNA, 1575 nt, Artificial Sequence; identical to SEQ ID NO: 223356
  derived and/or modified CDS sequence (opt5) from glycoprotein__RABV__JQ685959.1

SEQ ID NO: 223394 - RNA, 1575 nt, Artificial Sequence
  derived and/or modified CDS sequence (opt5) from glycoprotein__RABV__JQ685960.1
augaucccccaggcccugcucuacgugccucugcuuauuagcucccugugcuucggcggguuuccgaucuauaccauucccgacaagcucggaccuuggucucccaucgauauucaccaucugagcuguccuaacaaucuugucguugaggacgaaggcugcacaucccugucuggguucagcuacauggagcucaaagugggauauaucuccgcuaucaaggugaacggcuuuacguguaccggggucgugacagaagccgagaccuacacaaauuucguuggauaugugaccacaaccuuuaaaagaaagcacuuccggcccaugccugaugcgugccgcgcugccuacaacuggaaagucgccggcgacccgagauaugaagagucucugcaaaaucccuacccugauuacagcuggcugcggacggugaagaccacaaaggagucccucauuaucauuagccccucuguugcugaccuggauccuuaugacaaaucccuucauagccgcguguuucccggcgggaagugucugggaaucaccauuucuuccacauacugcagcaccaaccacgauuauacgaucuggaugccggaagaggccagacucggcacaucuugugacauuuucaccaauucccgggggaaacgcgcuagcaagggaggcaaaacaugcggguuugucgaugaaagaggacuguacaagucccuuaagggcgccuguaaacugaagcucugcggcgugccugggcugcggcugauggacggaaccugggugaccauccagacaucugaugagacgaaauggugucccagcgaccagcucgucaaccugcaugacuuccacuccgaugagaucgaacaccuuguuguggaggaacuggugaagaaacgcgaggaaugccucgacgcgcuggagagcauuaugaccacaaagucugucuccuuuagacggcuuagccaucugcgcaaacucgugccuggcuucgggaaggccuauaccaucuuuaauaagacacugauggaggcugaugcccacuacaaaucuauuagaaccuggaacgaaaucauucccagcaagggaugccugaaaguuggcgggcggugucauccccacguggacggagucuucuucaauggcaucauccucggcccugaugggaacgugcugauuccggagaugcaguccucucuucugcaacagcacguugaacuccuggagagcuccgugaucccccuuaugcauccucuggcugaccccagcacggucuuuaaggauggagacgaagccgaggauuucguggagguccaccucccugacauucauaaacaggugucuggcguugaucuggggcugcccaauuggggaaaguaucuccugauguccgcgggcgcccuugcuacacugaugcucaccaucuuucugaugaccugcugucgcagagccaaccggacagaaagcauucagagagacccgggggagucuggcaagaaaguguccaucaccagccaagacggaaaggucaucuccucuugggaacuguacaaacgcggcggggagacacggcuuuga

SEQ ID NO: 223395 - RNA, 1575 nt, Artificial Sequence
  derived and/or modified CDS sequence (opt5) from glycoprotein__RABV__JQ685961.1
augaucccccaggcccugcucuacgugccucugcuuauuagcccgcugugcuucggcggguuucccaucuauaccauuccugacaagcucggacccugguccccuaucgauauucaccaucugucuugucccaacaaucuugucguugaggacgaaggcugcacaagccuguccggguucucuuacauggagcucaaagugggauauaucagcgcuaucaaggugaacggcuuuacguguaccggggucgugacagaagccgagaccuacacaaauuucguuggauaugugaccacaaccuuuaaaagaaagcacuuccggccuaugccggaugcgugccgcgcugccuacaacuggaaagucgccggcgaccccagauaugaagagucccugcaaaauccuuaccccgauuacucuuggcugcggacggugaagaccacaaaggagagccucauuaucauuuccccuagcguugcugaccuggaucccuaugacaaaucucuucauucccgcguguuuccgggcgggaagugucugggaaucaccauuagcucuacauacugcuccaccaaccacgauuauacgaucuggaugccugaagaggccagacucggcacaagcugugacauuuucaccaauucucgggggaaacgcgcuuccaagggaggcaaaacaugcggguuugucgaugaaagaggacuguacaagagccuuaagggcgccuguaaacugaagcucugcggcgugcccgggcugcggcugauggacggaaccugggugaccauccagacauccgaugagacgaaaugguguccuucugaccagcucgucaaccugcaugacuuccacagcgaugagaucgaacaccuuguuguggaggaacuggugaagaaacgcgaggaaugccucgacgcgcuggaguccauuaugaccacaaagagcgucucuuuuagacggcuuucccaucugcgcaaacucgugcccggcuucgggaaggccuauaccaucuuuaauaagacacugauggaggcugaugcccacuacaaaagcauuagaaccuggaacgaaaucauucccucuaagggaugccugaaaguuggcgggcggugucauccucacguggacggagucuucuucaauggcaucauccucggcccggaugggaacgugcugauucccgagaugcagagcucccuucugcaacagcacguugaacuccuggagucuagcgugaucccucuuaugcauccccuggcugacccuuccacggucuuuaaggauggagacgaagccgaggauuucguggagguccaccuccccgacauucauaaacaggugagcggcguugaucuggggcugccgaauuggggaaaguaucuccugaucucugcgggcgcccuugcuacacugaugcucaccauuuuucugaugaccugcugucgcagagccaaccggacagaauccauccagagagacccuggggagcccggcaagaaagugagcaucaccucucaagacggaaaggucauuuccagcugggaacuguacaaauccggcggggagacacgccuuuga

SEQ ID NO: 223396 - RNA, 1575 nt, Artificial Sequence
  derived and/or modified CDS sequence (opt5) from glycoprotein__RABV__JQ685962.1
augaucccccaggcccugcucuacgugccucugcuuauuccgagccugugcuucggcggguuucccaucuauaccauuccugacaagcucggacccugguccccuaucgauauucaccaucugucuugucccaacaaucuugucguugaggacgaaggcugcacaagccuguccggguucucuuacauggagcucaaagugggauauaucagcgcuaucaaggugaacggcuuuacguguaccggggucgugacagaagccgagaccuacacaaauuucguuggauaugugaccacaaccuuuaaaagaaagcacuuccggccuaugccggaugcgugccgcgcugccuacaacuggaaagucgccggcgaccccagauaugaagagucccugcaaaauccuuaccccgauuacucuuggcugcggacggugaagaccacaaaggagagccucauuaucauuuccccuagcguugcugaccuggaucccuaugacaaaucucuucauucccgcguguuuccgggcgggaagugucugggaaucaccauuagcucuacauacugcuccaccaaccacgauuauacgaucuggaugccugaagaggccagacucggcacaagcugugacauuuucaccaauucucgggggaaacgcgcuuccaagggaggcaaaacaugcggguuugucgaugaaagaggacuguacaagagccuuaagggcgccuguaaacugaagcucugcggcgugcccgggcugcggcugauggacggaaccugggugaccauccagacauccgaugagacgaaaugguguccuucugaccagcucgucaaccugcaugacuuccacagcgaugagaucgaacaccuuguuguggaggaacuggugaagaaacgcgaggaaugccucgacgcgcuggaguccauuaugaccacaaagagcgucucuuuuagacggcuuucccaucugcgcaaacucgugcccggcuucgggaaggccuauaccaucuuuaauaagacacugauggaggcugaugcccacuacaaaagcauuagaaccuggaacgaaaucauucccucuaagggaugccugaaaguucggggccgcugucauccucacguggacggggucuucuucaauggaaucauccucggcccggauggcaacgugcugauucccgagaugcagagcucccuucugcaacagcacguugaacuccuggagucuagcgugaucccucuuaugcauccccuggcugacccuuccacggucuuuaaggauggggacgaagccgaggauuucguggagguccaccuccccgacauucauaaacaggugagcggaguugaucugggccugccgaauugggggaaguaucuccugaugucugcgggagcccuugcuacacugaugcucaccaucuuucugaugaccugcuguagacgguccaacagaacagaaagcauucagcgcgacccuggcgagucugggaagaaaguguccaucaccagccaagacggcaaggucaucuccucuugggaacuguacaaaagcggaggcgagacacggcuuuga

SEQ ID NO: 223397 - RNA, 1575 nt, Artificial Sequence
  derived and/or modified CDS sequence (opt5) from glycoprotein__RABV__JQ685963.1
augauccugcaggcccuccuguucgugccccuucugauuagcucccucugccugggcaaguuuccuaucuacaccauuccggacaaacuugggcccuggucuccuaucgauauucaccaucugagcugucccaacaaucucgucguugaggacgaaggaugcacaucccugucuggcuucagcuauauggagcugaaggugggguacaucuccucuaucaaagugaacggauuuacguguaccggcgucgugacagaagcugagaccuauacaaauuucguuggguacgugaccacaaccuuuaagagaaaacacuuccggccuauucccgaugccugccgcgcggcuuauaacuggaagauggccggagacccuagauacgaagagagccuccaaaauccguaucccgauuaccauuggcugcggacggucaagaccacaaaagagucccuuaucauuaucagcccuucuguggccgaccuggaucccuacgacaagucccuccacagccgcguuuuuccuggcggcaaaugucuggggauuaccaucucuuccacauauugcagcaccaaccaugauuacacgguguggaugcccgaagaaccgagacuuggaacauucugugacauuuuuaccaauucuaagggcaaaaaggcuuccaaagggggaaaggucugcggcuucguggaugaacgggggcuguauaagagccucaaaggagccuguaagcugaaacugugcggcgugccuggccuccgccugauggacgggacaugggucaccauccagaccuccgaggagguuaaguggugucccgcugaucagcuugugaaccugcacgacuuucacucugacgaaaucgagcaucucguggucgaggagcuggugaaaaagagagaagagugccuugaugcccuggagagcauuaugacaacgaaguccguuagcuuccggcgccucucuuaccugagaaaacuggugccuggauuuggcaaggcguauaccaucuucaauaaaacacucauggaagccgacgcucacuacaaguccguccggaccuggaacgagauuauccccagcaaagggugccugaaggugaaggaacgcugucauccccacguugauggaguguucuuuaauggcauuauccuugggccugacggaaacguccugaucccggagaugcagucuagccuccugcaacagcacauggaacuucuggaguccucugugauuccccucaugcauccucuggccgaucccagcacagucuucaaagacggcgaugaggcugaagacuuuguggagguucaucugccugaugugcacaagcagaucuccggcgucgaccucgggcugcccagcuggggaaaauaucuucugaugauugccggcgggcucgcggcccuggugcugaucauuuuccuuaugguuugcuguagacggaccaagcgcacggaaucuagacggagaggauccggcgagagcgggaaaaaggugucugucacaccgcagacccgcaaggugguguccagcugggaacucuacaaauccgagggcgaugcucggcuguga

SEQ ID NO: 223398 - RNA, 1575 nt, Artificial Sequence
  derived and/or modified CDS sequence (opt5) from glycoprotein__RABV__JQ685964.1
augaucccccaggcccugcucuacgugccucugcuuauuagcucccugugcuucggcggguuuccgaucuauaccauucccgacaagcucggaccuuggucucccaucgauauucaccaucugagcuguccuaacaaucuugucguugaggacgaaggcugcacaucccugucuggguucagcuacauggagcucaaagugggauauaucuccgcuaucaaggugaacggcuuuacguguaccggggucgugacagaagccgagaccuacacaaauuucguuggauaugugaccacaaccuuuaaaagaaagcacuuccggcccaugccugaugcgugccgcgcugccuacaacuggaaaauggccggcgacccgagauaugaagagucucugcaaaaucccuacccugauuacagcuggcugcggacggucaagaccacaaaggagucccucauuaucauuagccccucuguggcugaccuggauccuuaugacaaaucccuucauagccgcguuuuucccggcgggaagugucugggaaucaccauuucuuccacauacugcagcaccaaccacgauuauacgaucuggaugccggaagaggccagacucggcacaucuugugacauuuucaccaauucccgggggaaacgcgcuagcaagggaggcaaaacaugcggguuuguggaugaaagaggacuguacaagucccuuaagggcgccuguaaacugaagcucugcggcgucccugggcugcggcugauggacggaaccugggugaccauccagacaucugaugagacgaaauggugucccagcgaccagcucgugaaccugcaugacuuccacuccgaugagaucgaacaccuugucguugaggaacuggugaagaaacgcgaggaaugccucgacgcgcuggagagcauuaugaccacaaagucuguguccuuuagacggcuuagccaucugcgcaaacucgucccuggcuucgggaaggccuauaccaucuuuaauaagacacugauggaggcugaugcccacuacaaaucuauuagaaccuggaacgaaaucauucccagcaagggaugccugaaagugggcgggcggugucauccccacguugacggaguguucuucaauggcaucauccucggcccugaugggaacguccugauuccggagaugcaguccucucuucugcaacagcacguggaacuccuggagagcuccguuaucccccuuaugcauccucuggcugaccccagcacgguguuuaaggauggagacgaagccgaggauuucgucgaggugcaccucccugacauucauaaacaggucucuggcguggaucuggggcugcccaauuggggaaaguaucuccugauguccgcgggcgcccuugcuacacugaugcucaucauuuuucugauggccugcugucgcagagcuaaccggaccgaaagcauccagagagacccgggggagucuggcaagaaaguuuccaucccuagccaagacggaaaggugauuuccucuugggaacuguacaaaagcggcggggagacccgccuuuga

SEQ ID NO: 223399 - RNA, 1575 nt, Artificial Sequence
  derived and/or modified CDS sequence (opt5) from glycoprotein__RABV__JQ685965.1
augaucccccaggccauucugagcgugccucuccugaucuccucucuuugcuucggcaaguuuccgauuuacaccauccccgagaaacuggggccuuggagccccauugacauccaccaucucuccuguccuaacaaucuggucguugaagaugagggaugcacaacgcuuucuggcuucagcuauaucgaacugaaggugggguacauuuccgcuaucaaagugaacggauuuaccuguacaggcgucgugaccgaggccgaaacauauaccaauuucguuggguacgugacaaccacguuuaagagaaaacacuuccggcccaugccugacgcgugccgcgcugccuauaacuggaagauggccggagauccgagauacgaggagucucuccauaaucccuauccugacuaccacuggcugcggaccgucaagacaaccaaagaaagccuggugauuaucucccccagcguugcugaucucgacccuuacgauaagucucugcauucccgcguguuucccggcggcaaaugucuugggauuacaaucagcucuaccuauugcuccacgaaccacgacuacacaauuuggaugccggaggaagccagacugggaaccagcugugauaucuucacaaauucucggggcaagcgcgcuuccaaagggggaagaaccugcggcuuugucgacgagcgggggcucuauaagagccugaagggagccuguaaacuuaagcugugcggcgugccuggccuccgccugauggaugggaccuggguguccauccaagcgucugacgagacaaaaugguguagccccgaucagcuggucaacguucacgacuuccauuccgacgaaauugagcaccucgugguggaggagcuggucaagagacgggaagagugccuugaugcccuggagagcaucgugacgaccaaaucuauuuccuuucgcagacucagccaucugcggaaacuuguuccuggauucggcaaggcuuacacaaucuuuaauaagacccugauggaagccgacgcucacuauaagucugugcgcacauggaacgagauuauccccagcaaagggugccucuccgucggaggcagaugucacccccaugugaaugggguuuucuucaacggaaucauucugggcccugauggcaaugugcugaucccggaaaugcagucuagccuccugcagcaacacauggagcuucuggaauccagcgucauuccccucaugcauccucuggccgaccccucuaccguguuuaaggauggggacgaggcggaggauuucgucgaagugcaccuuccugacguucaggaacagguguccggagucgaucugggccuccccaacugggggaaauacgugcugaugagcgccggagcucuggccauccucauucugacgaucuuucuuaucacaugcugucggagagcuaauaagaccaaaucuauucagcaaggccucgggggcuccggacgcaagguuagcguguccccgcagaacggcaaggucaucucuagcugggaauccuauaaaucugggggagagacccggcuguga

SEQ ID NO: 223400 - RNA, 1575 nt, Artificial Sequence
  derived and/or modified CDS sequence (opt5) from glycoprotein__RABV__JQ685967.1
auggugccccaggcccugcucgucguuccucugcuuggcuucagccugugcuuugggaaguucccgaucuacaccauucccgacaaacucggaccuuggucccccaucgauauucaccaucugucuuguccuaacaaucuugugguggaggacgaaggcugcacaaaccugagcggguuuuccuauauggagcucaaggucggauacaucucugcuauuaaagugaauggcuucacguguaccgggguugugacagaagccgagaccuauacaaacuuugucggauacgugaccacaaccuucaagagaaaacacuuucggcccacgccugaugaaugccgcgcggcuuauaauuggaagauggccggcgacccgagauacgaggagagccugcauaaccccuauccugauuaccacuggcugcggaccguuaagacaaccaaagaaucccucgugaucaucucucccagcgucgccgaccuggauccuuacgacaagucccuucauagccgcguguuccccucuggcaaauguuccgggauuacagugagcucuaccuauugcuccacgaaucacgauuacacaaucuggaugcuggagaacccgagacucggaaccagcugugacauuuuuacaaauucucggggcaagcgcgcuuccaaagggagcaagaccugcggauucgucgaugaaagaggccuguauaagucccuuaaaggggccuguaagcugaaacucugcggaguucugggccugaagcucauggacggcaccuggguggcuaugcaaacaucugaugagacgaaaugguguccucccgaccagcuggugaaccuucacgaccugcggagcgaugagaucgaacaucucgucguggaggaacugguuaagaaacgcgaggaaugccuugacgcccuggaguccauuaugaccacaaagagcgugucuuuuagacggcucucccaucugcgcaagcuggucccuggguucggaaaagcguacaccaucuuuaauaagacacucauggaggccgaugcucacuauaaaagcgugagaaccuggaacgaaauuauccccucuaagggcugccugaaaguugggggacggugucacccccacgugaauggcgucuucuucaacggggugauccuuggaccugacggccauguccugauuccggagaugcagagcucccuccugcagcaacacauggaacuucuggagucuagcgugaucccccucaugcauccucuggccgaucccuccacgguuuuuaaggacggcgaugaagcugaggacuucguggagguccaucugccugaugugcacaagcagguuagcgggguggaccucggacugcccaauuggggcaaauacgucucucuuuccgccggggcgcugauugcccucaugcugaucauucugcuuaucacaugcugucgcaaggugaacagaccggaaccuacccagcggagccucgagggaaaagaaagaaaggugucuguuaccucccagagcggcaaagucaucuccucuugggagagcuauaaguccgggggcgaaacacgccuguga

SEQ ID NO: 223401 - RNA, 1575 nt, Artificial Sequence
  derived and/or modified CDS sequence (opt5) from glycoprotein__RABV__JQ685968.1
auggugcugcaggcccuccuguucgcucccuuucuuaucagcucccugugccucggcaaguucccuauuuacaccaucccggacaaacuggggcccuggucuccuauugauauccaccaucuuagcugucccaacaaucuggucguugaggacgaaggaugcaacucccucucuggcauuagcuauauggagcugaaggugggguacaucuccgccaucaaagugaauggauuuacauguacgggcgucgugaccgaagcggagacauauaccaacuucguuggguacgugacaaccacauuuaagagaaaacacuuccauccuaugcccgaugcuugccggucugccuauaauuggaagcuggccggagacccucgcuacgaagagagccuccacaacccguaucccgauuaccauuggcugagaaccgucaagacgaccaaagagucccuuauuaucauuagcccuucuguggcugaccuggaucccuacgacaagucccuccacagccggaucuuuccucgcggcaaauguucuggcaugacaauuuccagcaccuauugcucuacaaaucacgaauacaccaucuggaugcccgagaaggccgggcugggaacguccugugauauuuucacaaccagcaaaggcaagagagcuuccaaagggggaaaaacaugcggcuuuguugacgaacgggggcuuuauaagucucugaaaggagccuguaagcucaaacugugcggcgugagcggccugcgccucauggaugggaccugggucgcgauccaaaccuccgaggagacaaagugguguccgccugaccagcuggugaaccuucaugaucugcacagcgacgaaaucgagcaucucguggucgaggaacugguuaaaaagagagaagagugccuuaaugcccugaagucuauuaugacgaccaaauccgugagcuuccggcgccucucucaccugagaaagcuggugcccggauuuggcaaggcuuacacaaucuucaacaagacccucauggaggccgacgcucacuauaaaagcauucggacauggaaugaaaucauuccuuccaaggggugccugcgcgucggaggcaagugucauccccacguggaugggguguuuuucaacggaaucauccuuggccccgacggccauguucugauuccugagaugcagucuagccuccugcagcaacacauggaacuucuggaguccagcgucaucccgcucaugcauccccuggccgaucugucuaccguguucaaagacggggaugaagcggaggacuuuguugaggugcaccucccugauguccacaagcagauuuccggaguggaccugggccuucccagcugggggaaauacguccugaugucugccggagcucucgccauccugaugcuggugauuucccuuaugaagugcuucuggggcguuaauagaacgaaaccuauccagcaggggccccgggaaagcgagcgcaagguguccaucgcuccgcaaucuagaaaggucauuagcuccugggaaucuuauaaaaacggcggagagacagaacucuga

SEQ ID NO: 223402 - RNA, 1575 nt, Artificial Sequence
  derived and/or modified CDS sequence (opt5) from glycoprotein__RABV__JQ685970.1
auggugagccaggcccugcuguucgucucuccccugauccuuucccugugcagcggcgaguuuccuauuuacaccaucccggacaagcucgggcccugguccccuauugauauccaccaucugucuugucccaacaaucuuguuguggaagacgagggaugcacaaaccugagcggcuucuccuauauggaacucaaagugggguacauuucugcuaucaaggucaauggauuuacguguaccggcgugguuacagaggccgaaaccuauacaaacuucgugggguacgucaccacaaccuuuaaaagaaagcacuuccggccuacgcccgaugcgugccgcgcugccuauaauuggaaaauggccggagacccuagauacgaggagagccugcauaacccguaucccgauuaccacuggcugcggaccgugaagacaaccaaggaaucccucguuaucauuagcccuucuguggcugaccuggaucccuacgacaaaucccuucauagccgcgucuuuccuucuggcaaguguuccggcaucacagugagcucuaccuauugccugacgaaucacgauuacacaauuuggaugcccgagaaccucagacuggggaccuccugugacaucuucacaaauagccggggaaaacgcgccuccagaggcucuaagaccugcggguuuguggaugaacggggacuuuauaaaagccugaagggcgcuuguaagcucaaacugugcgggguccugggacuccgccugauggacggcaccuggguugccaugcaaacauccgaugagacgaagugguguccgagcgaccagcuugugaaccugcacgacuucagaucugaugagauugaacaucucguggucgaggaacuggugaaaaagcgggaggaaugccuugacgcgaucgaguccauuaugaccacaaaaagcguuucuuuucgcagacugagccaccuccggaagcuggugccuggcuucgggaaagccuacaccaucuuuaauaagacacugauggaggcugaugcccauuauaaguccguccgcaccuggaacgaaaucauucccucuaaaggaugccucagagugggcgggcggugucacccucacguuaauggaguguucuucaacggcaucauucuggggcccgacggacauguccuuauccccgagaugcagagcucccugcuccagcaacacguggaacugcuugagagcucugucauuccucugaugcauccgcucgcugaucccuccacgguguuuaaggacggcgaagaggccgaggauuucguugaagugcaccucccugacguccauaaacaggugagcggcguugaucuggggcuccccaauuggggaaaguacgcgcuggugucugccggcgcucuuacagcccugaugcucaucgcuuuucugaugaccugcuguagaggggucaaccugccuaaauccacccagcgcagccccggaggcacacggagaaagguguccguggccucucagagcgggaagguuaucgccuccugggaggcuuauaaaucuggcugcgaaaccaagauguga

SEQ ID NO: 223403 - RNA, 1575 nt, Artificial Sequence
  derived and/or modified CDS sequence (opt5) from glycoprotein__RABV__JQ685971.1
augaucccccaggcccugcuguucgugccucugcuuauuagcucccugugcuuuggcaaguucccgaucuacaccauucccgagaaacucgggccuuggucucccaucgacauucaccaucugagcuguccuaacaaucuugucgcugaagaugagggaugcaacucccugucuggcuuuagcuauauggaacucaagguuggguacaucuccgccaucaaagugaauggauucacauguacgggcguggucaccgaggcggaaacauauaccaacuuugugggguacguuacaaccacauucaagagaaaacacuuucggcccaccccugacgcuugccgcgccgccuauaauuggaagauggcuggagauccgagauacgaggagucucugcauaaccccuauccugacuaccacuggcugcggacggugaagaccacaaaagaaagccucgucauuaucucccccagcguggccgaucuggacccuuacgauaagucucuucauucccgcguuuuccccgacggcaaaugucugggcauuaccaucagcucuacauauugcuccaccaaucacgauuacacgauuuggaugccggaggaagcuagacucgggacaagcugugacaucuuuaccacaucuaagggaaaacgggccuccaagggcgauaagauuugcggguucguggacgagcgcggacuguauaaaagccuuaagggcgcguguaaacugaagcucugcgggguccugggacugagacucauggauggcaccuggguguccauccaaaccccuggcgagacaaaaugguguucucccgaccagcuggugaaccuucacgacuuucauagcgaugaaaucgagcaccuggucgccgaggaacucguuaagaaacgggaagagugccuggacgcucuugaguccauuaugacgaccaagagcgugucuuuccgcagacugucccaucuccggaagcuggugccuggguuuggaaaagccuacacaaucuucaauaagacccugauggaagcugaugcccacuauaaaagcguccgcacauggaacgaggugauucccucuaagggcugccucagcguugggggaagaugucacccccaugugaauggcgucuucuuuaacgggaucauucugggaccugacggcuccgugcuuaucccggaaaugcagucuagccugcuccagcaacacauggagcugcuugaauccagcguuaucccccugaugcauccucucgcggaucccucuaccguguucaaagacggcgaugaggccgagaauuuugucgaagugcaccucccugacguccauaaacagguguccgggguugaucugggacuccccaacuggggcaaguaccugcuuaugauugcuggggcccuggcuacgcucaugcugacaaucuuccugaugaccugcugucggcgcaccaagagagccgagagcauucaguauggacuuggcgaaucugggcggaagguguccgucacaccgcagagcggcaaagugaucuccucuugggagagcuacaaguccggaggcgaaaccagacucuga

SEQ ID NO: 223404 - RNA, 1575 nt, Artificial Sequence; identical to SEQ ID NO: 223340
  derived and/or modified CDS sequence (opt5) from glycoprotein__RABV__JQ685974.1

SEQ ID NO: 223405 - RNA, 1575 nt, Artificial Sequence
  derived and/or modified CDS sequence (opt5) from glycoprotein__RABV__JQ685975.1
auggugccccaggcccuccuguucgucccucugcuuguuuuuagccugugcuucggcaaguuuccgaucuacaccauucccgacaaacucgggccuuggucccccaucgauauucaccaucugucuuguccuaacaaucuugugguggaggacgaaggaugcacaaaccugagcggcuucuccuauauggagcucaaggucggguacaucucugcuauuaaagugaauggauuuacguguaccggcguugugacagaagccgagaccuauacaaacuucgucggguacgugaccacaaccuuuaagagaaaacacuuccggcccaucccugaugcgugccgcgcugccuauaauuggaagauggccggagacccgagauacgaagagagccugcauaaccccuauccugauuaccacuggcugcggacgguuaagaccacaaaagagucccucgugaucauuucucccagcgucgcugaccuggauccuuacgacaagucccuucauagccgcguguuucccggcggcaaauguucugggaugaccguguucuccacauauugcagcaccaaucacgauuacacgaucuggaugccggaaaacccuagacugggaacaucuugugacauuuuugccaauucccggggcaagcgcgcuagcagagggucuaaaaccugcggauucgucgaugagcggggccucuauaagucccugaagggggccuguaaacuuaagcugugcggaguucucggccugcgccugguggacggcacauggguggcgaugcaaaccagcgaugacaccaaauggugucccccugaccagcucgucaaccugcacgauuuuagauccgacgaaaucgaguaccuugugguugaggaacuggugaagaaacgggaggaaugccucgaugcccuggagucuauuaugacaaccaagagcgucuccuuccgcagacuuagccaucugcggaaacucgugcccggguucggaaaggcuuauacgaucuuuaauaagacacugauggaagccgacgcucacuacaaaucuguucgcaccuggaacgagauuauccccuccaagggcugccugagagucgggggacggugucauccucacgugaauggcguguucuuuaacgggaucauucucggaccggauggccacguccugauccccgagaugcagagcucucuucugcagcaacauauggaacuccuggagagcuccgugauuccucuuaugcacccccuggccgacccuucuacaguuuucaaagaaggcgaugaggcggaagacuuuguggagguccaucuccccgaugugcacaagcagguuagcgagguggaccuggggcugccgaauuggggaaaauauauccucaugauugccggcgcucugaucgcccuuaugcugaucauuuuccucaugaccugcugugggagagucaaccgcuccgaaagcaagcagcggucucugggaggcacggggagaaagguguccgugacaagccagucuggcaaaguuaucuccagcugggaguccuacaagucuggaggcgaaacccgccuguga

SEQ ID NO: 223406 - RNA, 1575 nt, Artificial Sequence
  derived and/or modified CDS sequence (opt5) from glycoprotein__RABV__JQ685978.1
augaucagccaggcccuccuguucgugccccugcuuauuuccucucugugcuuuggcgaguucccuaucuacaccauuccggaaaagcucgggcccuggagcccuaucgacauucaccaucuguccugucccaacaaucuugucguugaggaugaaggaugcaacucucugagcggcuuuuccuauauggagcucaaagugggguacaucucuagcaucaaggugaauggauucacauguacgggcgucgugaccgaagcugagacauauaccaacuuuguuggguacgugacaaccacauucaaaagaaagcacuuucggccuaugcccgacgccugccgcgcggcuuauaauuggaaaauguccggagauccuagauacgaggaaagccugcauaacccguaucccgacuaccacuggcugcggaccgucaagacgaccaaggagucucucgugauuaucuccccuagcguugccgaucuggaccccuacgauaaaucucuucauucccgcguguucagcggcggcaagugucuggggauuacaaucucuuccaccuauugcagcacaaaucacgacuacaccauuuggaugccugaagaggccagacucggaacguccugugauaucuuuacaaacucuaaaggcaagaaagcuagcaaagggggacggaccugcggcuucgucgacgagcgcgggcuguauaagucccuuaagggagccuguaagcugaaacucugcggcgugcccggccugagacugauggaugggacaugggugagcauucaaaccucugacgaaaccaagugguguccgccugaucagcucgucaauauccacgacuuucgguccgacgagaucgaacaucugguuguggaggaacuugugaaaaagcgcgaggagugccuggaugcucucgaaagcauuaugacaacgaaaucugucagcuucagacggcugucccaccuucgcaagcuggugcccggauuuggcaaggccuacaccaucuucaacaaaacacucauggaggcggacgcccauuauaagucuguuagaaccuggaaugaaauuaucccuagcaaagggugccuguccgugggaggccggugucacccccacgucgaugggguguucuuuaacggaauuauccugggccccgacggcagcguucucaucccugagaugcagucuucccugcuucagcaacauauggaacugcucgagagcucugugauuccgcugaugcacccccuugcuaauccuuccacagucuucaaggauggggacgaggccgaagauuuuguggagguccaucugcccgacgugcaggaacagguuagcggaguggaucucggccugccuaacugggggaaauacguccugauguccgcuggagcccucgcgauccugcuucugaccauuuuccucaugacgugcugucgcagagccaaucggacaaagucuaucagacagggccccggggagagcggccgcaagguguccguuccgccucaaaacggacgggugauuucuagcugggaauccuuuaaaagcggcgacgagaccgggcuguga

SEQ ID NO: 223407 - RNA, 1575 nt, Artificial Sequence; identical to SEQ ID NO: 223406
  derived and/or modified CDS sequence (opt5) from glycoprotein__RABV__JQ685979.1

SEQ ID NO: 223408 - RNA, 1575 nt, Artificial Sequence
  derived and/or modified CDS sequence (opt5) from glycoprotein__RABV__JQ685980.1
auggugccccaggcccugcuguucgucccucugcuugcuuuuccgaugugcuucggcaaguuucccaucuacaccauuccugacaaacuggggcccuggagcccuaucgauauucaccaucucuccugucccaacaaucugguuguggaggacgaaggaugcacaaaccuuucuggcuucagcuauauggagcugaaggugggguacaucuccgccauuaaagucaauggauuuacguguaccggcgugguuacagaagcggagaccuauacaaacuucgugggguacgucaccacaaccuuuagacggaagcacuuccgcccuacgccggaugcuugcagagccgccuauaauuggaaaauggcuggagacccccgguacgaagagucucuccauaacccuuaucccgauuaccacuggcugcgcaccgugaagacaaccaaggagagccugaucaucauuuccccuucuguugccgaccucgaucccuacgacaaaagccugcauuccagaguguuuccgagcggcaagugucuuggcaucacaauuucuuccaccuauugcagcacgaaucacgauuacacaaucuggaugccugaaaaccugcggcucgggaccucuugugacauuuucacaaauucccgcggaaaaagagcuagcaagggcucucggaccugcggguuugucgaugagcgcggacuguauaaaucccuuaagggcgccuguaagcugaaacucugcggggugcugggacugagacucauggacggcaccuggguggcgaugcaaacaagcgaugaaacgaaguggugucccccugaccagcuggucaaccuucacgacuuccgguccgaugagaucgagcaucugguuguggaggaacucgugaaaaagcgcgaagagugccuggacgcccuugaaucuauuaugaccacaaaaagcgucuccuuuagacggcugagccaccuccgcaagcuggugcccggcuucgggaaggcuuacaccaucuucaauaaaacacugauggaggccgaugcucauuauaagucuguuagaaccuggaacgagaucauucccuccaaaggaugccuccgggugggcgggagaugucacccucacgucaauggaguguuuuucaacggcaucauucuggggccggacggacauguucuuauccccgaaaugcagagcucucugcuccagcaacacauggagcugcuugaaagcuccgugauuccucugaugcauccccucgccgauccuucuacggucuuuaaggacggcgaugaggcggaagacuucguggagguccaccuccccgaugugcauaaacagaucagcggcguugaccuggggcucccgaauuggggaaaguacgugcugaucauugccggcguccuuaucgcuaugauucugacaaucuuucucaugaccugcugugggcgcggaaaccggccuaaauccacccagcacagccugggcgggauuggcagaaaggugucugccacaucccagagcggaaagguuaucucuuccugggagagcuauaaaaacggcggggaaacccgccuguga

SEQ ID NO: 223409 - RNA, 1575 nt, Artificial Sequence
  derived and/or modified CDS sequence (opt5) from glycoprotein__RABV__JQ685981.1
auggugccccagguccugcuguucguuccucugcuuguguuuagcaugugcuucggcaaguuuccgaucuacaccauucccgacaaacuggggccuuggucccccaucgauauucaccaucucucuuguccuaacaaucugguggucgaggacgaaggaugcacaaaccuuagcggcuucuccuauauggagcugaaggugggguacaucucugccauuaaaguuaauggauuuacguguaccggcguggucacagaagcugagaccuauacaaacuucgugggguacguuaccacaaccuuuaagagaaaacacuuccggcccacgccugaugccugccgcgcggcuuauaauuggaagauggccggagacccgagauacgaagagagccuccauaaccccuauccugauuaccacuggcugcggaccgugaagacaaccaaagagucccuggucaucaucucucccagcguggccgaccucgauccuuacgacaagucccugcauagccgcguguuucccucuggcaaauguuccggcauuacaaucagcucuaccuauugcuccacgaaucacgauuacacaauuuggaugccggaaaacccuagacuugggaccagcugugacaucuucacaaauucucggggaaagcgcgcuuccaaaggcgggaagaccugcggauuugucgaugagagaggccuguauaagagccucaaaggggccuguaagcugaaacuuugcggaguucugggccuccggcugauggacggcaccuggguggcuaugcaaacauccgaugaaacgaaguggugucccccugaccagcuggugaaccuccacgacuuccgcucugaugagauugagcaucuggucguggaggaacuuguuaaaaagagagaagagugccuggacgcccucgaaagcaucaugaccacaaaauccgugagcuuucggcgccugucucaccuuagaaagcugguccccggguucggaaaggcguacaccauuuucaauaaaacacucauggaggccgaugcucauuauaaguccgugcggaccuggaacgagaucauccccagcaaaggcugccugcgcguugggggaagaugucacccucacgugaagggcgucuuuuucaaugggauuauccugggaccggacggccaugugcucauucccgaaaugcagucuagccugcuucagcaacacauggagcugcucgaauccucugucaucccucugaugcauccccuugccgauccuagcacgguguuuaaagacggcgaugaggcugaagacuucguugaggugcaucugcccgauguccacaagcagauuuccgggguggaccucggacugccgagcuggggccgguacguucuggugucugccgggguccucguggugcugaugcuuacaaucuuuaucauuaccugcuguggaagaguucaccgcccuaaguccacccagcacggccucgggggcacaggacggaaagucagcgugaccucucaguccggcaaggugaucagcuccugggagucuuauaaaagcgggggagaaacaagacucuga

SEQ ID NO: 223410 - RNA, 1575 nt, Artificial Sequence
  derived and/or modified CDS sequence (opt5) from glycoprotein__RABV__JQ685982.1
auggugccccaggcccugcuguucgucccucugcuugcuuuuccgaugugcuucggcaaguuucccaucuacaccauuccugacaaacuggggcccuggagcccuaucgauauucaccaucucuccugucccaacaaucugguuguggaggacgaaggaugcacaaaccuuucuggcuucagcuauauggagcugaaggugggguacaucuccgccauuaaagucaauggauuuacguguaccggcgugguuacagaagcggagaccuauacaaacuucgugggguacgucaccacaaccuuuaagagaaaacacuuccggccuacgccggaugcuugccgcgccgccuauaauuggaagauggcuggagaccccagauacgaagagucucuccauaacccuuaucccgauuaccacuggcugcggaccgugaagacaaccaaagagagccugaucaucauuuccccuucuguugccgaccucgaucccuacgacaagagccugcauucccgcguguuuccgagcggcaaaugucuuggcaucacaauuucuuccaccuauugcagcacgaaucacgauuacacaaucuggaugccugaaaaccugagacucgggaccucuugugacauuuucacaaauucccggggaaagcgcgcuagcaaaggcucuaagaccugcggguuugucgaugagagaggacuguauaagucccuuaaaggcgccuguaagcugaaacucugcggggugcugggacugcggcucauggacggcaccuggguggcgaugcaaacaagcgaugaaacgaaguggugucccccugaccagcuggucaaccuucacgacuuccgcuccgaugagaucgagcaucugguuguggaggaacucgugaaaaagagagaagagugccuggacgcccuugaaucuauuaugaccacaaaaagcgucuccuuucggcgccugagccaccucagaaagcuggugcccggcuucgggaaggcuuacaccaucuucaauaaaacacugauggaggccgaugcucauuauaagucuguucggaccuggaacgagaucauucccuccaaaggaugccuccgcgugggcgggagaugucacccucacgucaauggaguguuuuucaacggcaucauucuggggccggacggacauguucuuauccccgaaaugcagagcucucugcuccagcaacacauggagcugcuugaaagcuccgugauuccucugaugcauccccucgccgauccuucuacggucuuuaaggacggcgaugaggcggaagacuucguggagguccaccuccccgaugugcauaaacagaucagcggcguugaccuggggcucccgaauuggggaaaguacgugcugaucauugccggcguccuuaucgcuaugauucugacaaucuuucucaugaccugcugugggcggggaaacagaccuaaguccacccagcacagccugggcgggauuggccgcaaagugucugccacaucccagagcggaaagguuaucucuuccugggagagcuauaaauccggcggggaaacccggcuguga

SEQ ID NO: 223411 - RNA, 1575 nt, Artificial Sequence
  derived and/or modified CDS sequence (opt5) from glycoprotein__RABV__JQ685983.1
auggugccccaggcccuucucuucgucccucugcuuguuuuuccgaugugcuucggcaaguuucccaucuacaccauuccugacaaacuggggcccuggagcccuaucgauauucaccaucucuccugucccaacaaucuggugguggaggacgaaggaugcacaaaccuuucuggcuucagcuauauggagcugaaggucggguacaucuccgcuauuaaagugaauggauuuacguguaccggcguugugacagaagccgagaccuauacaaacuucgucggguacgugaccacaaccuuuaagagaaaacacuuccggccuacgccggaugcgugccgcgcugccuauaauuggaagauggccggagaccccagauacgaagagucucuccauaacccuuaucccgauuaccacuggcugcggaccguuaagacaaccaaagagagccuggugaucaucuccccuucugucgcugaccucgaucccuacgacaagagccugcauucccgcguguuuccggauggcaaauguagcggcauuacaaucucuuccaccuauugcccuacgaaucacgacuacacaauuuggcuucccgaaaacccuagacuggggaccagcugugauaucuucacaaauucucggggaaagcgcgccuccaaaggcagcaagaccugcggguuuguggacgagagaggacucuauaagucucugaaaggcgcuuguaagcugaaacugugcgggguccucggacugcggcugauggauggcaccuggguugccaugcaaacauccgacgaaacgaagugguguccucccgaccagcucgugaaccugcacgauuuccgcagcgacgagauugagcaucuuguggucgaggaacuggugaaaaagagagaagagugccucgaugcgcuggaauccaucaugaccacaaaaucuguuagcuuucggcgccuuucccaccugagaaagcucgugcccggcuucgggaaggccuacaccauuuucaauaaaacacugauggaggcugacgcccauuauaagagcguccggaccuggaacgagaucaucccgucuaaaggaugccugcgcgugggcgggagaugucacccccacguuaauggaguguuuuucaacggcauuauccucgggccugauggacauguccugauucccgaaaugcaguccagccuucugcagcaacacauggagcuccuggaaucuagcgugaucccucuuaugcauccccuggcugacccguccacggucuuuaaggauggcgacgaggccgaagauuucguggagguucaccucccugacgugcauaaacagauuucuggcgucgaucuggggcugcccaauuggggaaaguacgugcucguuagcgcgggcgugcugaucgcccuuaugcugaucauuuuucucaugacaugcugugggcggauccacagaccuaaguccacccagugcgaccugggaggcaccgggcgcaaagucagcgugacaucucaguccggcaaggugauuagcucuugggaguccuauaaaagcggaggcgaaacccggcuguga

SEQ ID NO: 223412 - RNA, 1575 nt, Artificial Sequence
  derived and/or modified CDS sequence (opt5) from glycoprotein__RABV__JQ685984.1
auggugccccagguccuucucuucguuccucugcuuguguuuagccugugcuucggcaaguuuccgaucuacaccauucccgacaaacucgggccuuggucccccaucgauauucaccaucugucuuguccuaacaaucuuguggucgaggacgaaggaugcacaaaccugagcggcuucuccuauauggagcucaaggugggguacaucucugccauuaaaguuaauggauuuacguguaccggcguggucacagaagcugagaccuauacaaacuucgugggguacguuaccacaaccuuuaagagaaaacacuuccggcccacgccugaugccugccgcgcggcuuauaauuggaagauggccggagacccgagauacgaagagagccugcauaaccccuauccugauuaccacuggcugcggaccgugaagacaaccaaagagucccucgucaucaucucucccagcgugacagaccuggauccuuacgacaagucccuucauagccgcguguuucccggcggcaaauguucugggauuaccgucuccagcacguauugcucuacaaaucacgauuacaccaucuggaugccggaaaacccuagacugggaacauccugugacauuuucaccaauagccggggcaagcgcgccucuaaaggguccaagaccugcggauuuguugaugagagaggccucuauaagagccugaaaggggcuuguaagcugaaacugugcggagugcucggccugcggcugauggacggcacauggguggccaugcaaacguccgaugaaaccaaguggugucccccugaccagcucgucaaccugcacgacuuccgcucugaugagaucgagcaucuugugguugaggaacuggugaaaaagagagaagagugccucgacgcucuggaaagcauuaugacaaccaaauccgucagcuuucggcgccuuucucaccugagaaagcucgugcccggguucggaaaggccuacacaaucuucaauaaaacccugauggaggcggaugcccauuauaaguccguucggacguggaacgagauuauccccagcaaaggcugccugcgcgucgggggaagaugucacccucacgugaauggcguguuuuucaacgggaucauucucggaccggacggccauguccugauccccgaaaugcagucuagccuucugcagcaacacauggagcuccuggaauccucugugauuccucuuaugcauccccuggcugauccuagcacaguuuuuaaggacggcgaugaggccgaagacuucguggagguccaccuccccgaugugcauaaacagguuuccgggguggaccugggacugccgaauuggggcaaguacguccucaugaucgcuggggcccugauugcgcuuaugcugaucaucuuucucaugaccugcugucggagagugaaccgcccugagagcacccagcggucucugggaggcacagggagaaagguguccauuaccagccagucuggcaaaguuaucuccagcugggaauccuauaagucuggaggcgagacacgccuguga

SEQ ID NO: 223413 - RNA, 1575 nt, Artificial Sequence
  derived and/or modified CDS sequence (opt5) from glycoprotein__RABV__JQ685985.1
auggugccccaggcccugcuguucgucccuauccugguuuuuagccuuugcuucggcaaguuuccgauuuacaccauccccgacaaacuggggccuuggucccccauugauauccaccaucucucuuguccuaacaaucuggugguggaggacgaaggaugcacaaaccuuagcggcuucuccuauauggagcugaaggucggguacauuucugcuaucaaagugaauggauuuacguguaccggcguugugacagaagccgagaccuauacaaacuucgucggguacgugaccacaaccuuuagacggaagcacuuccgccccacgccugaugcgugcagagcugccuauaauuggaaaauggccggagacccgcgguacgaagagagccuccauaaccccuauccugauuaccacuggcugcgcaccguuagaacaaccaaggagucccuggugaucauuucucccagcgucgcugaccucgauccuuacgacaagucccugcauagccggguguuucccucuggcaaauguuccggcaucacagugagcucuaccuauugcuccacgaaucacgauuacacaauuuggaugccggaaaacccucgccuugggaccagcugugacaucuucauuaauucuagaggaaagcgggccuccaaaggcagcaagacaugcggguuugucgaugagcgcggacuguauaaaucccucaagggcgcuuguaagcugaaacuuugcgggguucugggacucagacugauggacggcaccuggguggccaugcaaaccucugaagagacaaaguggugucccccugaucagcuggugaaccuccacgacuuccggagcgacgagaucgaacaucuggucguggaggaacuuguuaaaaagcgcgaggaaugccuggaugcgcucgaguccauuaugacgaccaaaagcgugucuuuuagacggcugucccaccuucgcaagcugguccccggcuucgggaaagccuacacaaucuucaauaagacccucauggaggcugacgcccauuauaagagcgugagaacauggaacgaaaucauucccucuaaaggaugccugcggguuggcgggagaugucacccucacgugaauggagucuuuuucaacggcaucauucuggggccggauggacaugugcucauccccgagaugcagagcucccugcuucagcaacacauggaacugcucgagucuagcgucauuccucugaugcauccccuugcugacccuuccaccguguuuaaggaaggcgaugaggccgaggacuucguugaagugcaccuccccgauguccauaaacaggugagcggcguugaccucgggcugccgaauuggggaaaguacgugcugaugucugcgggcguccucaucucccgcaugcugcuuaucuuucugaugacgugcugucggagagugaaccgcccugagagcacacagcggucucccgggggagccggcagaaaaguguccguuaccagccaguccgggaaggucauuucuagcugggaauccuauaagucuggcggagagacccgccucuga

SEQ ID NO: 223414 - RNA, 1575 nt, Artificial Sequence
  derived and/or modified CDS sequence (opt5) from glycoprotein__RABV__JQ685986.1
auggugcugcagguccuccuguucgcccccuuucuuaucagcucccugugccucggcaaguucccuauuuacaccaucccggacaaacuggggcccuggucuccuauugauauccaccaucuuagcugucccaacaaucugguuguggaggacgaaggaugcaacucccucucuggcuuuagcuauauggagcugaaggugggguacauuuccgcuaucaaagucaauggauucacauguacgggcgugguuaccgaagccgagacauauaccaacuuugugggguacgucacaaccacauucaagagaaaacacuuucggccugugcccgaugcgugccgcucugcuuauaauuggaagcuggccggagacccuagauacgaagagagccuccauaacccguaucccgaguaccacuggcugcggaccguuaagacgaccaaagaaucccuuaucgugauuagcccuucugucgccgaucuggaccccuacgauaagucccuccauagccgcaucuucccuucuggcaaauguuccggcaugacagugagcucuaccuauugcuccacaaaucacgaguacaccauuuggaugcccgaaaaggcuagccuggggacguccugugacaucuuuacaaccucuaaaggaaagagagccagcaagggcgggcggacaugcggauucguggaugagcgcggccuuuauaaaucccugaagggggcuuguaaacucaagcugugcggagucagcggccugagacucauggacggcaccuggguugccauucaaaccucugaugaggcgaaaugguguuccccggaccagcuggugaaccuucacgaucugcauagcgacgaaaucgagcaccucguggucgaggaacuggugcggaagcgcgaagagugccuugacgcccuggagucuauuaugacaacgaaaagcguuuccuuuagacggcucucucaucugcgcaagcuggugccuggguucggaaaggcuuacaccaucuuuaauaaaacacucauggaagccgaugcucacuauaagagcgucagaaccuggaacgagaucauucccuccaaaggcugccugcggguugggggaaagugucacccucaugugaauggcguguucuucaacgggaucauucuuggacccgacggccacguccugauccccgaaaugcagagcucucuccugcagcaacauauugagcuucuggaauccagcgugaucccucucaugcacccgcuggccgaucugucuacagucuuuaaagacggcgaugaggcggaggacuucguggaaguucaucuccccgaugugcacaagcagaucuccggggucgaccugggacuuccuagcuggggcaaguacgugcugauguccgccggggcucucgccacccugguucuggugauuucucuuaugaaaugcugucgcugggucaauaagacgaaaagcauccagcagggacccagagaguccgaacggaaggugucugugacaccucaaaacggcaaaguuauuagcuccugggagagcuauaagaucgggggcgaaaccggacucuga

SEQ ID NO: 223415 - RNA, 1575 nt, Artificial Sequence
  derived and/or modified CDS sequence (opt5) from glycoprotein__RABV__JQ685987.1
auggcuccccaggcccuguggguggucccucuccugggcuucagccuuugcuuugggaaguucccgaucuacaccauucccgacaaacugggaccuuggucccccaucgauauucaccaucucucuuguccuaacaaucugguuguggaggacgaaggcugcacaaaccuuagcggguuuuccuauauggagcugaaggugggauacaucucugccauuaaagucaauggcuucacguguaccggggugguuacagaagcggagaccuauacaaacuuugugggauacgucaccacaaccuucaagagaaaacacuuucggcccacgccugaugcuugccgcaccgccuauaauuggaagauggccggcgacccgagauacgaagagagccuccauaaccccuauccugauuaccacuggcugcggacagugaagaccacaaaagagucccugguuaucaucucucccagcguggcugaccucgauccuuacgacaagucccugcauagccgcgucuuccccucuggcaaauguuccgggauuaccgugagcucuacguauugccuuacaaaucacgauuacaccaucuggaugccggaaaacccuagacugggaacauccugugacauuuuuaccaauagccggggcaagcgcgccucuaaaggguccaagaccugcggauucguggaugagagaggccucuauaagagccugaaaggggcuuguaagcugaaacugugcggaguccucggccugaagcugauggacggcacauggguugccaugcaaacguccgaugaaaccaaauggugucccucugaccagcucgugaaccugcacgacuuucggagcgaugagaucgagcaucuuguggucgaggaacuggugaagaaacgcgaagagugccucgacgcgcuggaauccauuaugacaaccaagagcguuucuuucagacggcuuucccaccuucgcaagcucgugccuggguuuggaaaagccuacacaaucuucaauaagacccugauggaggcugaugcccauuauaaaagcgucagaacguggaacgagauuauccccucuaagggcugccugcggguugggggacgcugucacccccacgugaauggcguguucuuuaacgggaucauucucggaccugacggccauauccugauuccggaaaugcagagcucccuucugcagcaacacauggagcuccuggaaucuagcgucaucccccuuaugcauccucuggcugaucccuccacaguguucaaagacggcgaugaggccgaagacuuugucgaggugcaccucccugauguucauaaacaggugagcggggucgaccugggacugcccaauuggggcagauacgugucucucggggcgggagcccugauugcucuuaugcugaucaucuuccucaugaccugcugucggagaguuaaccgcccggagccuacccagcggucccuggaaggcaaggggagaaaggugagcgucacaucucaguccggcaaggugauuagcuccugggagucuuauaaaagcggaggcgaaacccgccuguga

SEQ ID NO: 223416 - RNA, 1575 nt, Artificial Sequence
  derived and/or modified CDS sequence (opt5) from glycoprotein__RABV__JQ685988.1
auggugccccaggcccugcuccuggucccucuucuggcuuucccgaugugcuuuggcaaguuccccaucuacaccauuccugacaaacucgggcccuggagcccuaucgauauucaccaucuguccugucccaacaaucuuguuguggaggacgaaggaugcacaaaccugucuggcuuuagcuauauggagcucaaggugggguacaucuccgccauuaaagucaauggauucacguguaccggcgugguuacagaagcggagaccuauacaaacuuugugggguacgucaccacaaccuucaagagaaaacacuuucggccuacgccggaugcuugccgcgccgccuauaauuggaagauggcuggagaccccagauacgaagagucucugcauaacccuuaucccgauuaccacuggcugcggaccgugaagacaaccaaagagagccucaucaucauuuccccuucuguugccgaccuggaucccuacgacaagagccuucauucccgcguguucccgagcggcaaaugucugggcaucacaauuucuuccaccuauugcagcacgaaucacgauuacacaaucuggaugccugaaaaccucagacuggggaccucuugugacauuuuuacaaauucccggggaaagcgcgcuagcaaaggcucuaagaccugcggguucgucgaugagagaggacuuuauaagucccugaaaggcgccuguaagcucaaacugugcggggugcugggacuccggcugauggacggcaccuggguggcgaugcaaacaagcaacgaaacgaaguggugucccccugaucagcuugucaaucugcacgacuuucgcuccgacgagaucgagcaucucguuguggaggaacuggugaaaaagagagaagagugccuugaugcccuggaaucuauuaugaccacaaaaagcgucuccuuccggcgccucagccaccugagaaagcuggugcccggcuuugggaaggcuuacaccaucuucaacaaaacacucauggaggccgacgcucauuauaagucuguucggaccuggaaugagaucauucccuccaaaggaugccugcgcgugggcgggagaugucacccucacgucaacggaguguucuuuaauggcaucauucuugggccggauggacauguucugauccccgaaaugcagagcucucuccugcagcaacacauggagcuucuggaaagcuccgugauuccucucaugcauccccuggccgacccuucuacggucuucaaggauggcgacgaggcggaagauuuuguggagguccaucugcccgacgugcacaaacagaucagcggcguugaucucgggcugccgaacuggggaaaguacgugcuuaucauugccggcguccugaucgcuaugauucucacaaucuuccugaugaccugcugugggcggggaaacagaccuaaguccacccagcacagccugggcgggauuggccgcaaagugucugccacaucccagagcggaaagguuaucucuuccugggagagcuauaaauccggcucugaaacccggcuuuga

SEQ ID NO: 223417 - RNA, 1575 nt, Artificial Sequence
  derived and/or modified CDS sequence (opt5) from glycoprotein__RABV__JQ685989.1
auggugccccaggcccugcuguucgucccuauccugguuuuuagccuuugcuucggcaaguuuccgauuuacaccauccccgacaaacuggggccuuggucccccauugauauccaccaucucucuuguccuaacaaucuggugguggaggacgaaggaugcacaaaccuuagcggcuucuccuauauggagcugaaggucggguacauuucugcuaucaaagugaauggauuuacguguaccggcguugugacagaagccgagaccuauacaaacuucgucggguacgugaccacaaccuuuagacggaagcacuuccgccccacgccugaugcgugcagagcugccuauaauuggaaaauggccggagacccgcgguacgaagagagccuccauaaccccuauccugauuaccacuggcugcgcaccguuagaacaaccaaggagucccuggugaucauuucucccagcgucgcugaccucgauccuuacgacaagucccugcauagccggguguuucccucuggcaaauguuccggcaucacagugagcucuaccuauugcuccacgaaucacgauuacacaauuuggaugccggaaaacccucgccuugggaccagcugugacaucuucauuaauucuagaggaaagcgggccuccaaaggcagcaagacaugcggguuugucgaugagcgcggacuguauaaaucccucaagggcgcuuguaagcugaaacuuugcgggguucugggacucagacugauggacggcaccuggguggccaugcaaaccucugaagagacaaaguggugucccccugaucagcuggugaaccuccacgacuuccggagcgacgagaucgaacaucuggucguggaggaacuuguuaaaaagcgcgaggaaugccuggaugcgcucgaguccauuaugacgaccaaaagcgugucuuuuagacggcugucccaccuucgcaagcugguccccggcuucgggaaagccuacacaaucuucaauaagacccucauggaggcugacgcccauuauaagagcgugagaacauggaacgaaaucauucccucuaaaggaugccugcggguuggcgggagaugucacccucacgugaauggagucuuuuucaacggcaucauucuggggccggauggacaugugcucauccccgagaugcagagcucccugcuucagcaacacauggaacugcucgagucuagcgucauuccucugaugcauccccuugcugacccuuccaccguguuuaaggaaggcgaugaggccgaggacuucguugaagugcaccuccccgauguccauaaacaggugagcggcguugaccucgggcugccgaauuggggaaaguacgugcugaugucugcgggcguccucaucucccugaugcuucugaucuuucucaugacgugcugucgccgggugaacagaccugagagcacacagcgcucucccgggggagccggccggaaaguguccguuaccagccaguccgggaaggucauuucuagcugggaauccuauaagucuggcggagagaccagacuguga

SEQ ID NO: 223418 - RNA, 1575 nt, Artificial Sequence; identical to SEQ ID NO: 223416
  derived and/or modified CDS sequence (opt5) from glycoprotein__RABV__JQ685990.1

SEQ ID NO: 223419 - RNA, 1575 nt, Artificial Sequence
  derived and/or modified CDS sequence (opt5) from glycoprotein__RABV__JQ685991.1
auggugcugcaggcccuccuguucgcucccuuucuuaucagcuccuucugccugggcaaguuuccuauuuacaccaucccggacaaacucgggcccuggucuccuauugauauccaccaucugagcugucccaacaaucuugucauugaggacgaaggaugcaacucccugucuggcuucagcuauauggagcucaagguuggguacaucuccgccaucaaagugaauggauuuacauguacgggcguggucaccgaagcggagacauauaccaacuucgugggguacguuacaaccacauuuaagagaaaacacuuccggccuaugcccgaugcuugccgcucugccuauaauuggaagcuggccggagacccuagauacgaagagagccugcauaacccguaucccgaguaccacuggcuccggaccgugaagacgaccaaagaaucccugauugucaucagcccuucuguggcugaucuugaccccuacgauaagucccugcauagccgcauuuuuccuucuggcaaauguuccggcaugacaguuagcucuaccuauugcuccacaaaucacgaguacaccaucuggaugcccgaaaagguggggcucggaacgagcugugacauuuucaucacauccaaaggcaagagagccucuaaagggggacggaccugcggcuuugucgaugagcgcgggcuguauaagagccuuaagggagcuuguaaacugaagcucugcggcguguccggccugagacugauggacgggacauggguggccauucaaaccagcgaugagaccaaaugguguucuccggaccagcucgucaaccugcacgaucuucauuccgacgaaaucgagcaccugguuguggaggaacucgugcggaagcgcgaagagugccuggacgcgcuugagagcaucaugacaacgaaaucugucagcuucagacggcugucccaucuccgcaagcuggugccuggauuuggcaaggccuacaccauuuucaauaaaacacugauggaagcugaugcccacuauaagucuguuagaaccuggaacgagaucauucccagcaaagggugccuccgggugggaggcaagugucacccucaugucaaugggguguucuuuaacggaaucauucugggccccgacggccacguucuuauccccgaaaugcaguccagccugcuccagcaacauaucgagcugcuugaaucuuccgugauuccucugaugcacccgcucgcugaucugagcacagucuucaaagacggggaugaggccgaggacuuuguggaaguccaucugcccgaugugcacaagcagaucucuggaguugaccucggccugccuuccugggggaaguacgugcuuauuagcgcgggagcccuggcuacccucauccuggucauuucccugaugaaaugcugucgcugggugaauagaacgaagucuauccagcagggcccccgggagagcgaaagaaaaguuuccguggccccucaaucugggaaggucaucagcuccugggagagcuauaaaauuggcggagaaacaggccuuuga

SEQ ID NO: 223420 - RNA, 1575 nt, Artificial Sequence
  derived and/or modified CDS sequence (opt5) from glycoprotein__RABV__JQ685992.1
auggugccccaggcccugcuguucgucccucugcuuguuuuuagccugugcuucggcaaguuuccgaucuacaccauucccgacaaacucgggccuuggucccccaucgauauucaccaucugucuuguccuaacaaucuugugguggaggacgaaggaugcacaaaccugagcggcuucuccuauauggagcucaaggucggguacaucucugcuauuaaagugaauggauuuacguguaccggcguugugacagaagccgagaccuauacaaacuucgucggguacgugaccacaaccuuuagacggaagcacuuccgccccacgccugaugcgugcagagcugccuauaauuggaaaauggccggagacccgcgguacgaagagagccugcauaaccccuauccugauuaccacuggcugcgcaccguuaagacaaccaaggagucccucgugaucaucucucccagcgucgcugaccuggauccuuacgacaaaucccuucauagcagaguguuucccggcggcaaguguucugggauuacaguguccagcaccuauugcucuacgaaucacgauuacacaaucuggaugccggaaaacccucggcugggaaccuccugugacauuuucgucaauagccgcggcaaaagagccucuaaagggggaaagacaugcggcuuuguugaugagcgggggcucuauaagucccugaagggagcuuguaaacuuaagcugugcggcgugcccggccuccgccugauggacgggaccuggguggccauccaaaccagcgaugaaacaaaaugguguccucccgaccagcuggucaaccuccacgacuucagauccgaugagauugagcaucuggugguugaggaacuugugaagaaacgggaagagugccuggacgcgcucgaaucuaucaugacgaccaagagcgucuccuuucgcagacugagccaccuucggaaacuggugcccggauucggcaaggccuacacaauuuucaauaagacccucauggaggcugaugcccauuauaaaucuguucgcacauggaacgagaucaucccuuccaaggggugccugagagugggaggccggugucacccgcacgucaaugggguguuuuucaacggaauuauccugggccccgacggccauguccucauuccugaaaugcagagcucucugcuucagcaacacauggagcugcucgaaagcuccgugaucccccugaugcauccucuugcugaucccucuaccguuuuuaaagacggggaugaggccgaagacuucguggagguccaccucccggaugugcauaagcucauuagcggaguugaccugggccugccuuccugggggaaauacgugcucaugagcgcgggaauccugacgacacuuaugcugaugaucuuucucaugaccugcuguagacgcgucaaucaggugggcucuaagcagcacgggcuggagggcgccggacggaagguguccguuaccagccagaacggcagagucauuucuuccugggaaagcuauaaauccgggggagagacacgccuguga

SEQ ID NO: 223421 - RNA, 1575 nt, Artificial Sequence
  derived and/or modified CDS sequence (opt5) from glycoprotein__RABV__JQ685993.1
auggugcugcaggcccuccuguucgcucccuuucuuaucagcucccugugccucggcaaguucccuauuuacaccaucccggacaaacuggggcccuggucuccuauugauauccaccaucuuagcugucccaacaaucuggucguugaggacgaaggaugcaacucccucucuggcuuuagcuauauggagcugaaggugggguacauuuccgccaucaaagugaauggauucacauguacgggcgucgugaccgaagcggagacauauaccaacuuuguuggguacgugacaaccacauucaagagaaaacacuuucggccuaugcccgaugcuugccgcucugccuauaauuggaagcuggccggagacccuagauacgaagagagccuccauaacccguaucccgauuaccacuggcugcggaccgucaagacgaccaaagagucccuuaucgugauuagcccuucuguugcugaccuggaucccuacgacaagucccuccauagccgcaucuucccuggcggcaaauguucugggaugacaguguccagcaccuauugcucuacaaaucacgaauacaccauuuggaugcccgagaaggccggacugggcacguccugugauaucuuuacaaccagcaaagggaagagagcuacaaagggaggcaaaaccugcggguucgucgacgaacggggacuuuauaagucccugaaaggcgccuguaagcucaaacugugcggcgugucugggcugcgccucauggauggaaccuggguggcgauucaaacaagcgacgagacgaagugguguuccccggaucagcuggucaaccuucacgaccugcauagcgacgagaucgaacaccucguuguggaggaacuggugagaaaacgggaggaaugccuugaugcccuggagucuauuaugaccacaaaguccgucagcuuucgcagacucucucaucugcggaagcuggugccuggcuucgggaaggcuuacaccaucuuuaauaaaacacucauggaggccgacgcucacuauaaaagcguucgcaccuggaacgaaaucauucccuccaagggaugccugagagugggcgggaaaugucacccucaugucaauggaguguucuucaacggcaucauucuuggccccgaugggcacguucugauccccgagaugcagucuagccuccugcagcaacauauggaacuucuggaguccagcgugauuccucucaugcacccgcuggccgaccccucuacggucuuuaaggaugacgaugaagcggaggacuucguggagguccaucugccugaugugcacaagcagguuuccggaguggaccucggccugcccagcugggggcgguacguccuuaugucugccggagcucuggccacacucauggugguuaucucccugaugaaaugcuguaagggcgugaaucgcaccaaaagcaucaagcagggguccagagaaucugagcggaaagucagcauuaccccucaguccggcaaggugaucucuagcugggaauccuauaagagcggaggcgagacagggcuguga

SEQ ID NO: 223422 - RNA, 1575 nt, Artificial Sequence
  derived and/or modified CDS sequence (opt5) from glycoprotein__RABV__JQ685994.1
auggugcccugggcccuucucuucgucccuuuucugaucagcucccuuugcuucggcaaguuuccgauuuacaccauccccgacaaacuggggccuuggucucccauugauauccaccaucucagcuguccuaacaaucugguuguggaggacgaaggaugcaacucccuuucuggcuucagcuauauggagcugaaggugggguacauuuccgcuaucaaagucaauggauuuacauguacgggcgugguuaccgaagccgagacauauaccaacuucgugggguacgucacaaccacauuuaagagaaaacacuuccggcccaugccugaugcgugccgcucugcuuauaauuggaagauggccggagacccgagauacgaagagagccuccauaaccccuauccugauuaccacuggcugcggaccgugaagacgaccaaagagucccugaucauuaucagccccucuguugccgaccucgauccuuacgaccgcucccugcauagcagaauuuuucccggcggcaaguguacagggcuuaccgugucuuccacauauugcagcaccaaucacgauuacacgaucuggaugccggaaaaagcuggacugggcacaucuugugacauuuucaccaacuccaaggggaaacgggccagcaagggaggcaagacaugcggguuugucgaugagcgcggacucuauaaaucccugaagggcgcuuguaaacuuaagcugugcggcgugucugggcucagacugauggacggaaccuggguggccauccagacccuggaugaaacaaaaugguguagcccugaccaacucgucaaucugcacgacuuccauuccgaugagcuugagcaccugguuguggaggaacucgugcggaagcgcgaagagugccuggacgcgcuugaaagcauuaugacgaccaaaucugucuccuuuagacggcugagccaucuccgcaagcuggugcccggcuucgggaaggccuacacaaucuucaacaaaacccugauggaggcugaugcccacuauaagucuguuagaacauggagcgagaucauuccuuccaaaggaugccuccgggugggcgggcgcugucacccccaugucaauggaguguuuuucaacggcaucauucugggccccgacgggcacguucuuaucccugaaaugcagucuagccugcuccagcagcauguggagcugcuugaauccagcgucauuccgcugaugcacccccucgcugauccuucugccguguuuaaggacggagaugaggcggaagacuucgucgaggugcaucugcccgauguucacaaacaaaucuccggcguggaccuggggcucccuagcuggggaaaguacaugcugaugaucgccggcgcucuuaccacgcugaugcucuuuauuuuccugaugacaugcuguaagagagucaauaaaaaggagucuauccggcagucccccagagaacuggagagcaaaguguccguuaccccgcagaaccgcaaggugauuucuagcugggaauccuauaaaucugggggcgagaccaagcuguga

SEQ ID NO: 223423 - RNA, 1575 nt, Artificial Sequence
  derived and/or modified CDS sequence (opt5) from glycoprotein__RABV__JQ685995.1
auggugccccagguccugcuguucguuccucugcuuguguuuagccugugcuucggcaaguuuccgcucuacaccauccccgacaaacuggggccuuggucccccauugauauccaccaucuuucuuguccuaacaaucugguggucgaggacgaaggaugcacaaaccucagcggcuucuccuauauggagcugaaggugggguacauuucugccaucaaaguuagcggauuuacguguaccggcguggucacagaagcugagaccuauacaaauuucgugggguacguuaccacaaccuuuaagagacggcacuuccgccccacgccugaugccugcagagcggcuuauaacuggaaaauggccggagacccgcgguacgaagagucccugcauaaucccuauccugauuaccacuggcuccgcaccgugaagacaaccaaggagucucuggucauuaucagccccuccgugacagaccuugauccuuacgacaaaagccugcauucuagaguguuucccggcggcaaguguuccgggaucaccgucagcucuacguauugcuccacaaaccacgauuacaccauuuggaugccggaaagcccucggcucggaacaucuugugacaucuucaccaauucccgcggcaaaagagccagcaagggguccaaaaccugcggauuuguugaugagcggggccuguauaagucucuuaagggggcuuguaaacugaagcucugcggagugcugggccugcgccucauggacggcacauggguggccaugcaaacgagcgaugaaaccaaauggugucugcccgaccagcuugucaaccugcacgacuucagauccgaugagauugagcaucucgugguugaggaacuggugcggaagcgcgaagagugccuugacgcucuggaaagcaucaugacaaccaaaucugucuccuuuagacggcucagccaccuccgcaagcuggugccuggguucggaaaagccuacacaauuuucaauaagacccucauggaggcggaugcccauuauaagucuaucagaacguggaacgagauuguucccagcaaaggcugccugcgggucgggggaagaugucacccccacgugaauggcguguuuuucaacgggaucauccuuggaccugacggccagguccugauuccggaaaugcaguccucucuccugcaacagcauauggagcuucuggaaagcuccgugaucccccucaugcacccucuggcugaucccagcacaguuuuuaaggagggcgacgaagccgaggauuucguggagguccaucugccugacgugcacaaacagguuucugggguggaucucggacugcccaauuggggcaaguacguccuuaugauugcuggggcccugaucgcgcucaugcugauuaucuuucugaugaccugcugucgccgggugaacagauccgaaagcacccagcaucgccuucggggaacaggcagaaaagugucuguuaccucccaaacagggaaggucaucagcuccugggagucuuauaagagcggcggagaaacgcgccucuga

SEQ ID NO: 223424 - RNA, 1575 nt, Artificial Sequence
  derived and/or modified CDS sequence (opt5) from glycoprotein__RABV__JQ685996.1
augaucccccaggcccugcucagcgugccucugcuuauuuccucucugugcuucggcaaguuuccgaucuacaccauucccgagaaacucgggccuuggagccccaucgacauucaccaucuguccuguccuaacaaucuugucguugaagaugagggaugcaacucucugagcggcuucuccuauauggaacucaaggugggguacaucucugcuaucaaagugaauggauuuacauguacgggcgucgugaccgaggccgaaacauauaccaacuucguuggguacgugacaaccacauuuaagagaaaacacuuccggcccaugccugacgcgugccgcgcugccuauaauuggaagaccgccggagauccgagauacgaggagagccugcauaaccccuauccugacuaccacuggcugcggacggucaagaccacaaaagaaucccucauuaucauuagccccucuguggcugaucuggacccuuacgauaagucccuucauagccgcaucuuucccggcggcaaaugucuggggauuaccaucucuuccacauauugcagcaccaaucacgacuacacgauuuggaugccggaggaagccagacucggaacaucuugugauaucuucaccaacuccaagggcaaacgggcuagcaaagggggacgcacaugcggcuuuguugacgagagagggcuguauaagucccuuaagggagccuguaagcugaaacucugcggcgugcugggccugcggcucauggaugggaccugggucgcgauccaaaccccuaaugagacaaagugguguucucccgaccagcuggugaacgugcacgauuuccgcagcgacgaaauugagcaucuugucguugaggaacugaucagaaaacgggaagagugccucgacgcccuggaguccauuaugacgaccaagagcgugucuuuucgcagacuuuccaaucugcggaaacucgugccuggauucggcaaggcuuacacaaucuuuaacaagacccugauggaagccgaugcucacuauaaaagcguccgcacauggaaugagauuauccccucuagagggugccugaaggugggaggccggugucauccccacguuaacgggguguucuucaauggaaucauucucggcccugacggccacauccugauuccggaaaugcagagcucccuucugcagcaacauauggagcuccuggaaucuagcgucaucccccuuauucacccucuggccgaucccuccaccguguuuaaagacggggaugaggcggaggacuucguugaagugcaucucccugauguccaccaacaggugagcggagucgaccugggccugcccgauugggggaaguacgugcucaugucugccggagcucuggccacgguuaugcuuacaaucuuucugauuaccugcuguagacgcgugaaacggaccgaguccauccagcagggccucggggaaagcggcagaaaggucucugugacaccgcagaacggaaagguuauguccagcugggaguauuacaaauccggcgggggaacccgccuguga

SEQ ID NO: 223425 - RNA, 1575 nt, Artificial Sequence
  derived and/or modified CDS sequence (opt5) from glycoprotein__RABV__JQ685997.1
augaucagccagacccuccuguucgugccccugcuuauuuccucugucugcuuuggcgaguucccuaucuacacaauuccggaaaagcuggggcccuggagcccuaucgacauucaccaucucuccugucccaacaaucugguuguggaggaugaaggaugcaacucucuuagcggcuuuuccuauauggagcugaaagugggguacaucucuagcaucaaggucaauggauucacguguaccggcgugguuacagaagccgagaccuauacaaacuuugugggguacgucaccacaaccuucaaaagaaagcacuuucggccuaugcccgacgcuugccgcgccgcguauaauuggaaaauguccggagauccuagauacgaggaaagccuccauaacccguaucccgacuaccacuggcugcggacggugaagaccacaaaggagucucugguuauuaucuccccuagcgugggcgaucucgaccccuacgauaaaucucugcauucccgcgucuucagcggcgggaagugucuuggaauuaccaucucuuccacauauugcagcaccaaucacgacuacacgcuguggaugccugaagaggcuagacucggcacauccugugauauuuuuaccaacucuaaagggaagcgggccagcaaaggaggccgcacaugcggguucguggacgagagaggacuguauaagucccuuaagggcgccuguaaacugaagcucugcggcgugcccgggcugcggcugauggauggaaccugggucagcauccaaaccucugacgaaacaaaaugguguccgccugaucagcucguuaauauucacgacuuucgcuccgacgagaucgaacaucuggugguggaggaacuugucaagaaaagagaggagugccuggaugcucucgaaagcaucaugacgaccaagucugugagcuuccggcgccugucccaccuuagaaaacugguucccggcuuugggaaggccuacacaauuuucaacaagacccucauggaggcugacgcccauuauaaaucugugcggacauggaaugaagucaucccuagcaagggaugccuguccgugggcgggcgcugucacccccacguugauggaguguucuuuaacggcauuauccugggccccgacgggagcguccucauuccugagaugcagucuucccugcuucagcaacauauggaacugcucgagagcucugugaucccgcugaugcacccccuugcgaauccuuccaccgucuucaaagauggagacgaggccgaagauuuuguggagguucaucugcccgacgugcaggaacaggucagcggcguggaucucgggcugccuaacuggggaaaguacguucugauguccgcuggcgcccucgcuauccugcuucugacgauuuuccucaugacaugcuguagacgggccaauagaaccaaaucuauccgccaggggcccgaggaaagcggccggaagguguccgucccgccucaaucuggaaaggugauuagcuccugggagagcuuuaaaucuggcggggagaccagacuguga

SEQ ID NO: 223426 - RNA, 1575 nt, Artificial Sequence
  derived and/or modified CDS sequence (opt5) from glycoprotein__RABV__JQ685998.1
augaucccccaggcccuccuguuccugccucuucugauuagcucccucugcucuggcaaguuuccgaucuacaccauucccgagaaacuggggccuuggagccccaucgacauucaccaucuuuccuguccuaacaaucugguggucgaagaugagggaugcaacucucucagcggcuucuccuauauggaacugaagguuggguacaucucugcuaucaaagugaauggauuuacauguacgggcguggucaccgaggccgaaacauauaccaacuucgugggguacguuacaaccacauuuaagagaaaacacuuccggcccaugccugacgcgugccgcgcugccuauaauuggaagauggccggagauccgagauacgaggagagccugcauaaccccuauccugacuaccacuggcuccggaccgugaagacgaccaaagaaucccuggucauuaucagccccucuguggcugaucuugacccuuacgauaagucccugcauagccgcguuuuucccggcggcaaaugucucgggauuacaaucucuuccaccuauugcagcacaaaucacgacuacaccauuuggaugccggaggaagccagacugggaacgucuugugauaucuucacaaacuccaagggcaaacgggcuagcaaagggggaagaaccugcggcuuuguggacgagcgcgggcuuuauaagucccugaagggagccuguaagcucaaacugugcggcgucccuggccugcggcucauggaugggacaugggugucuauucaaaccagcgaggaaaccaagugguguuccagcgaccagcuggugaauauccacgauuuccgcucugacgagaucgaacaucuugucguugaggaacuggugaaaaagagagaggagugccucgacgcgcuggaauccauuaugacaacgaaaagcgugucuuuucggcgccuuagccaccugagaaagcucguccccggauucggcaaggccuacaccaucuuuaacaauacacugauggaggcugaugcccauuauaaauccgugaagaccuggaacgaaauuaucccuucuaaagggugccugagcguuggaggccggugucaccccaaugugaacggggucuucuucaauggaauuauccucggccccgacggcuccgugcugaucccugagaugcagagcucucuucugcagcaacacauggaacuccuggaguccagcguuauuccgcuuaugcauccccuggcuaacccuucuacaguguuuaaggauggggacgaggccgaagaguucgucgaagugcaccuccccgaugucaaagaacagguguccggaguugaccugggccugccuaacugggggcgcuacgugcucaugagcgcgggagcccuggcuauccuuguccugaccauuuuucucaugacgugcuguagacgggccaauagaacaaaguccauccagcagggccugggggagucugugcgcaagguuagcgugccccugcaaaacggcaaagucauuuccucuugggagagcuauaaguccggaggcgagacccggcuuuga

SEQ ID NO: 223427 - RNA, 1575 nt, Artificial Sequence
  derived and/or modified CDS sequence (opt5) from glycoprotein__RABV__JQ685999.1
augaucccccaggcccuccuguucgugccucugcuuauuccgagccugugccucggcgaguuucccaucuacaccauuccugacaagcuggggcccuggacaccuaucgauauucaccaucuuuccugucccaacaaucuggucgcugaaaacgacggaugcacgucucucagcggcuucuccuauauggagcugaaaguuggguacaucucugccaucaaggugaauggauuuaccuguacaggcguggucaccgaagcggagacauauaccaacuucgugggguacguuacaaccacguuuaaaagaaagcacuuccggccuaugccggaugcuugccgcgccgcccaugacuggaaaauggcuggagaucccagauaugaagacagccugcaaaauccuuaccccgauuaucacuggcuccggaccgugaagacaaccaaggagucccuggucauuaucucuccuagcguggccgaccuugaucccuacgacaaaucccugcauagccgcguuuuuccgucuggcaagugucucggcauuacaguguccagcaccuacugcucuacgaaccacgauuauacaaucuggaugccugucgagcccagacuggggaccuccugugacauuuucacaaauagccggggaaaacgcgcuucuaagggcgggagagugugcggauuuguggaugaacggggccuuuacaaaucccugaagggggccuguaagcucaaacugugcggagucccuggcauccgccugauggacggcaccuggguuagcauucagaccuccgaggacaucaagugguguccucccgauagacucgugaaccugcacgacuuccauucugaugaacuugagcaccugguggucgaggaacucaucaaacggcgcgagaauugccuggacgcgcuugaaagcauuaugacaacgaaguccgugagcuuuagacggcugucucaucuccgcaaacugguucccggguucggaaaggccuauaccaucuuuaacaaaacacugauggaggcugaugcccacuacaaguccgugaagaccuggaaugaagucauuccgagcaaaggcugccucgagguugggggaagaugucaucccccugugaacggcguguucuucaaugggaucauucugggacccgacggcaacguccuuaucccugagaugcagucuagccugcuccagcaacacauggaacugcuugaguccucugugaucccccugaugcacccgcucgcugauccuagcacagucuuuaaggaaggcgacgaggccgaagauuucguggagguucaucugcccgacgugcacaaacaggucuccgauguggaccuggggcucccuagcuggggaaaguaucugcuuaugucugcgggcgcccuggcuauucucauccuggccauuguucugaucauuugcugucggagagugaauaaaaccggguccacgcagcgcggacaucgggagagcagaggcaagaugucugucgcuccccagaacgggaagaucaucuccagcugggaacuuuacaaacgcgaguccgaaacaggccucuga

SEQ ID NO: 223428 - RNA, 1575 nt, Artificial Sequence
  derived and/or modified CDS sequence (opt5) from glycoprotein__RABV__JQ686000.1
augaucccccaggcccuccuguucgugccucugcuuauuccgagccugugccucggcaaguuucccaucuacaccauuccugacaaacuggggcccugguccccuaucgauauucaccaucuuucuugucccaacaaucuggucguugaggacgaaggaugcacaagccucuccggcuucucuuauauggagcugaaggugggguacaucagcgcuaucaaagugaacggauuuacguguaccggcgucgugacagaagccgagaccuauacaaauuucguuggguacgugaccacaaccuuuaagagaaaacacuuccggccuaugccggaugcgugccgcgcugcccaugacuggaagauugccggagaucccagauaugaagacucccugcaaaacccuuaccccgauuaucacuggcuccggacggucaagaccacaaaagagucucuggugaucauuagcccuuccguugcugagcuugaccccuacgauaagagccugcauucucgcguguuuccguccggcaaaugucucggcaucaccgucagcucuacauacugcuccaccaaucacgacuauacgauuuggaugccuguggaagccagacuggggacaagcugugauaucuucaccaacucucggggaaagaaggcuuccaaaggcgggcgcacaugcggauuuguggacgagagaggccuuuacaagagccugaaaggggccuguaagcucaaacugugcggaguccccggccugcggcucauggauggcaccuggguuuccauucagaccucugacgacaucaagugguguccucccgaucagcuggugaaucuucacgacuuccauagcgaugaaaucgagcaccugguggucgaggaacucauuaaaaagcgcgaggggugccuggacgcgcuugaauccaucaugacaacgaaaagcgugucuuuuagacggcugucccaucuccgcaagcugguucccggauucggcaaggccuauaccauuuuuaacaauacacugauggaggcugaugcccacuacaaaagcgugagaaccuggaacgaagucaucccuucuaaggggugccucaaagugggaggccggugucacccgcccguuaaugggguguucuucaacggaauuauccugggcccugacggcaauguccuuauccccgagaugcagagcucccugcuccaacagcauauggagcugcuugaaucuagcgugauuccucugaugcacccccucgcugauccguccacagucuuuaaggacggggaugaggccgaagacuucguggagguucaucugccugaugugcacaaacaggucagcgacguggaccugggacuccccucuuggggcaaguaucugcuuauguccgcgggggcccuggcuacccucagccuggccaucuuucugauuacgugcugucgcagagcuaaccggacagaaucuacccagagaggacaucgcgaguccggcgggaagguuagcguggccccucaaaauggcaaaaucauuuccucuugggagcuuuacaagagcgaauccgagaccggaauguga

SEQ ID NO: 223429 - RNA, 1575 nt, Artificial Sequence
  derived and/or modified CDS sequence (opt5) from glycoprotein__RABV__JQ686001.1
augaucccccaggcccuccuguucgugccucugcuuauuccgagccugugccucggcaaguuucccaucuacaccauuccugacaaacuggggcccugguccccuaucgauauucaccaucuuucuugucccaacaaucuggucgcugaggacgaaggaugcacaagccucuccggcuucucuuauauggagcugaagguuggguacaucagcgccaucaaagugaacggauuuacguguaccggcguggucacagaagcggagaccuauacaaauuucgugggguacguuaccacaaccuuuaagagaaaacacuuccggccuaugccggaugcuugccgcgccgcccaugacuggaagauggcuggagaucccagauaugaagacucccugcaaaacccuuaccccgauuaucacuggcuccggacggugaagaccacaaaagagucucuggucauuaucagcccuuccguggccgaccuugaucccuacgacaagagccugcauucucgcguuuuuccguccggcaaaugucucggcauuaccgugagcucuacauacugcuccaccaaucacgauuauacgaucuggaugccugucgaggcuagacuggggacaagcugugacauuuucaccaacucuaagggaaagaaggccuccaagggcgggcggacaugcggauuuguggaugaacgcggccuuuacaaaagccugaagggggcguguaaacucaagcugugcggagugcccggccugagacucauggacggcaccugggucuccauccagaccucugacgauauuaaaugguguccucccgaccagcugguuaaucuucacgauuuccauagcgacgagaucgaacaccuggugguggaggagcucaucaagaaacgggaagggugccuggaugcccuugaguccauuaugacaacgaaaagcgucucuuuucgcagacugucccaucuccggaagcuggugcccggauucggcaaggcuuauaccaucuuuaacaauacacugauggaagccgacgcucacuacaagagcguucgcaccuggaacgaggugauuccuucuaaagggugccucaaggucggaggcagaugucacccgcccgugaaugggguuuucuucaacggaaucauucugggcccugauggcaaugugcuuauccccgaaaugcagagcucccugcuccaacagcauauggagcugcuugagucuagcgucaucccucugaugcacccccucgccgacccguccacaguguuuaaagauggggacgaagcggaggauuucgucgaagugcaucugccugacguucacaaacaggugagcgagauugaccugggacuccccucuuggggcaaguaucugcuuauguccgccgggguccuggcuacccucauccuggccauuuuucugaucacgugcugucggcgcgcuaacagaacagaaagcacccagcggggaagacgcgagucuggcgggaaaguguccguugccccucaaaauggcaagauuaucagcuccugggagcuuuacaaaucugaaagcgagaccggacucuga

SEQ ID NO: 223430 - RNA, 1575 nt, Artificial Sequence
  derived and/or modified CDS sequence (opt5) from glycoprotein__RABV__JQ686002.1
augaucccccaggcccuccuguuccugccuuuucuuuucccgagccugugccucggcaaguuucccauuuacaccaucccugagaaacuggggcccugguccccuauugacauccaccaucuuucuugucccaacaaucugguggucgaagaugagggaugcgacagccucuccggcuucucuuauauggaacugaagguuggguacauuagcgcuaucaaagugaacggauuuacauguacgggcguggucaccgaggccgaaacauauaccaauuucgugggguacguuacaaccacauuuaagagaaaacacuuccggccuaugccggaugcgugccgcgcugccuauaacuggaagaccgccggagaccccagauacgaggagucccugcauaauccuuaucccgauuaccacuggcuccggacggugaagaccacaaaagaaucucugaucauuaucagcccuuccgucgcugaccuugaucccuacgacaagagccugcauucucgcguguuuccgggcggcaaaugucucgggauuaccguuuccagcacauauugcucuaccaaccacgauuacacgaucuggaugccugaggaagccagacugggaacauccugugacauuuucaccaauagcaagggcaaacgggcuucuaaagggggacgcacaugcggcuuuguggaugagagagggcuuuauaagucccugaagggagccuguaagcucaaacugugcggcguccccggccugcggcucauggacgggaccuggguggcgauccaaaccccuggagagacaaagugguguagccccgaucagcuggugaaccuucacgacuuccgcuccgacgaaauugagcaucuggucguugaggaacucaucaaaaagagagaagagugccuggaugcccuugagucuaucaugacgaccaaaagcguguccuuucggcgccugagcaaucucagaaagcuggugcccggcuucgggaaggcuuacacaauuuucaacaaaacccugauggaagccgacgcucacuauaagucuguccggacaugggaugagaucauuccuuccaaaggaugccuccgcgugggcgggagaugucauccgcacguuaauggaguguuuuucaacggcaucauucugggccccgacgggcacguccuuaucccugaaaugcagagcucucugcuccagcaacauauggagcugcuugaaagcuccgugaucccccugauucacccucucgccgaucccucuaccguuuuuaaggacggagaugaggcggaggacuucguggaaguccaucugccggaugugcacaaacaggucagcggcguggaccuggggcucccuaauuggggaaaguacguucugaugggcgccggggugcuugcuacggucauccugacaauucuccugcugaccugcugucggagagugaaccgcaccaagcccaaacagcagucccuugaggaaagcggccggaagguuucugugacaccucaaaauggaaaagucauguccagcugggaguauuacaagucugaaggcagaaccucccucuga

SEQ ID NO: 223431 - RNA, 1575 nt, Artificial Sequence; identical to SEQ ID NO: 223366
  derived and/or modified CDS sequence (opt5) from glycoprotein__RABV__JQ686003.1

SEQ ID NO: 223432 - RNA, 1575 nt, Artificial Sequence
  derived and/or modified CDS sequence (opt5) from glycoprotein__RABV__JQ686004.1
augaucccccaggcccuccuguucgugccucugcuuauuccgagccugugccucggcaaguuucccaucuacaccauuccugacaaacuggggcccugguccccuaucgauauucaccaucuuucuugucccaacaaucuggucgcugaggacgaaggaugcacaagccucuccggcuucucuuauauggagcugaagguuggguacaucagcgccaucaaagugaacggauuuacguguaccggcguggucacagaagcggagaccuauacaaauuucgugggguacguuaccacaaccuuuaagagaaaacacuuccggccuaugccggaugcuugccgcgccgcccaugacuggaagauggcuggagaucccagauaugaagacucccugcaaaacccuuaccccgauuaucacuggcuccggacggugaagaccacaaaagagucucuggucauuaucagcccuuccguggccgaccuugaucccuacgacaagagccugcauucucgcguuuuuccguccggcaaaugucucggcauuaccgugagcucuacauacugcuccaccaaucacgauuauacgaucuggaugccugucgaggcuagacuggggacaagcugugacauuuucaccaacucuaagggaaagaaggccuccaagggcgggcggacaugcggauuuguggaugaacgcggccuuuacaaaagccugaagggggcguguaaacucaagcugugcggagugcccggccugagacucauggacggcaccugggccuccauccagaccucugacgauauuaaaugguguccucccgaccagcuggucaaucuucacgauuuccauagcgacgagaucgaacaccugguuguggaggagcucaucaagaaacgggaagggugccuggaugcucuugaguccauuaugacaacgaaaagcgugucuuuucgcagacugucccaucuccggaagcugguccccggauucggcaaagccuauaccaucuuuaacaauacacugauggaagcugacgcccacuacaagagcgugcgcaccuggaacgagguuauuccuucuaaagggugccucaaggugggaggcagaugucacccgcccgucaaugggguguucuucaacggaaucauucugggcccugauggcaauguucuuauccccgaaaugcagagcucccugcuccaacagcauauggagcugcuugagucuagcgugaucccucugaugcacccccucgcggacccguccacagucuuuaaagauggggacgaagccgaggauuucguggaaguccaucugccugacgugcacaagcagguuagcgagauugaccugggacuccccucuuggggcaaguaucugcuuauguccgcuggggugcuggccacccucauccuggcuauuuuucugaucacgugcugucggcgcgccaacagaacagaaagcacccagcggggaagacgcgagucuggcgggaaagucuccguggccccucaaaauggcaagauuaucagcuccugggagcuuuacaaaucugaacgggagaccggacucuga

SEQ ID NO: 223433 - RNA, 1575 nt, Artificial Sequence
  derived and/or modified CDS sequence (opt5) from glycoprotein__RABV__JQ686005.1
augaucccccaggcccugcucagccugcuucugcucauuuccucucugugccuuggcaaguucccuaucuacaccauuccggacaaacuggggcccuggagcccuaucgauauucaccaucucuccugucccaacaaucugguggucgaggacgaaggaugcacaucucugagcggcuuuuccuauauggagcucaagguuggguacaucucugcuaucaaagugaacggauucacguguaccggcguggucacagaagccgagaccuauacaaauuuugugggguacguuaccacaaccuucaagagaaaacacuuucggccuaugcccgaugcgugccgcgcugcccaugaauggaagauggccggagacccuagauaugaggauagccugcaaaacccguaccccgacuaucacuggcuucggacggugaagaccacaaaagagucccugauuaucauuagcccuucugucgcugaucucgaccccuacgauaagucccugcauagccgcguguucccuggcggcaauugucuugggaucaccauuucuuccacauacugcagcaccaaccacgacuauacgaucuggaugcccgaagaggccagacugggaacaucuugugauauuuuuaccaauucccggggcaaacgcgcuagcaaagggggaaagaucugcggcuucguugacgaaagagggcucuacaagucccugaagggagccuguaaacugaagcucugcggcgugccgggccugcggcuuauggaugggacaugggucucuauccagaccagcgacgagaccaaaugguguccucccgaccagcuggugaacgugcacgauuuucauuccgacgagauugaacaccucaucgucgaggaacugguuaagaaacgcgaggaaugccuugaugcgcuggagagcauuaugacaacgaagucuguguccuucagacggcucagccaucugcgcaaacuggugccuggauuuggcaaggccuauaccaucuucaauaagacacucauggaggcugacgcccacuacaaaucugucagaaccuggaacgaaauuauccccagcaaggggugccugaaagugggaggcaugugucacccccauguugggggaguguuuuucaauggcaucauucuuggcccugaugggacaguccugaucccggagaugcaguccucucuccugcaacagcacauggaacuucuggagagcuccgugauuccccucaugcauccucuggcugaccccagcaccguuuucaaggaaggagaugaggccgaggacuuuguggaaauccaucugccugauguccacaaacagauuucuggcguggaccucgggcugcccuccuggggaaaguaucuucugaucagcgcgggcgcccucgcuacgcugauccugacaauuuuccuuauuaccugcugucggaaggucaaccgcaccgagucugugcagagagggcaccgggaauccgagagaaaaguuccggugagcccucaaaauggccgcgucaucuccucuugggaacucuacaagagcggaggcgagacaaaccuguga

SEQ ID NO: 223434 - RNA, 1575 nt, Artificial Sequence
  derived and/or modified CDS sequence (opt5) from glycoprotein__RABV__JQ686006.1
augaucccccaggcccugcuguucgugccucugcuuauuagcucccugugcuuuggcaaguucccgaucuacaccauucccgagaaacucgggccuuggucucccaucgacauucaccaucugagcuguccuaacaaucuugucgcugaagaugagggaugcaacucccugucuggcuuuagcuauauggaacucaagguuggguacaucuccgccaucaaagugaauggauucacauguacgggcguggucaccgaggcggaaacauauaccaacuuugugggguacguuacaaccacauucaagagaaaacacuuucggcccaccccugacgcuugccgcgccgccuauaauuggaagauggcuggagauccgagauacgaggagucucugcauaaccccuauccugacuaccacuggcugcggacggugaagaccacaaaagaaagccucgucauuaucucccccagcguggccgaucuggacccuuacgauaagucucuucauucccgcguuuuccccgacggcaaaugucugggcauuaccaucagcucuacauauugcuccaccaaucacgauuacacgauuuggaugccggaggaagcuagacucgggacaagcugugacaucuuuaccacaucuaagggaaaacgggccuccaagggcgauaagauuugcggguucguggacgagcgcggacuguauaaaagccuuaagggcgcguguaaacugaagcucugcgggguccugggacugagacucauggauggcaccuggguguccauccaaaccccuggcgagacaaaaugguguucucccgaccagcuggugaaccuucacgacuuucauagcgaugaaaucgagcaccuggucgccgaggaacucguuaagaaacgggaagagugccuggacgcucuugaguccauuaugacgaccaagagcgugucuuuccgcagacugucccaucuccggaagcuggugccuggguuuggaaaagccuacacaaucuucaauaagacccugauggaagcugaugcccacuauaaaagcguccgcacauggaacgaggugauucccucuaagggcugccucagcguugggggaagaugucacccccaugugaauggcgucuucuuuaacgggaucauucugggaccugacggcuccgugcuuaucccggaaaugcagucuagccugcuccagcaacacauggagcugcuugaauccagcguuaucccccugaugcauccucucgcggaucccucuaccguguucaaagacggcgaugaggccgagaauuuugucgaagugcaccucccugacguccauaaacagguguccgggguugaucugggacuccccaacuggggcaaguaccugcuuaugauugcuggggcccuggcuacgcucaugcugacaaucuuccugaugaccugcugucggcgcaccaagagagccgagagcauucagcacggacuuggcgaaucugggcggaagguguccgucacaccgcagagcggcaaagugaucuccucuugggagagcuauaaguccggaggcgaaaccagacucuga

SEQ ID NO: 223435 - RNA, 1575 nt, Artificial Sequence
  derived and/or modified CDS sequence (opt5) from glycoprotein__RABV__JQ686007.1
augauccccagagcccugcuguucgugccucugcuuauuccgagccugugccucggcgaguuucccaucuacaccauuccugacaagcuggggcccugguccccuaucgauauucaccaucuuucuugucccaacaaucuggucgcugaaaacgacggaugcacaagccucuccggcuucucuuauauggagcugaaaguuggguacaucagcgccaucaaggugaauggauuuacguguaccggcguggucacagaagcggagaccuauacaaacuucgugggguacguuaccacaaccuuuaaacggaagcacuuccgcccuacgccggaugcuugcagagccgcccaugacuggaaaauggcuggagauccccgguaugaagccucccugcagaauccuuaccccgacuaucacuggcuccgcaccgugaagacaaccaaggagucucuggucauuaucagcccuuccguggcugaucuugaccccuacgauaaaagccugcauucuagaguuuuuccguccggcaagugucucggcauuacagugagcucuaccuacugcuccacgaaccacgacuauacaaucuggaugccugucgagccccggcuggggaccagcugugauauuuucacaaauucucgcggaaaaagagccuccaagggcgggcgggugugcggauuuguggacgaacgcggccuuuacaaaagccugaagggggcguguagacucaagcugugcggagucccuggcauccggcugcucgauggcaccuggguuuccauucaaaccucugaggacaucaaaugguguccucccgaccgccuggugaaccuucacgauuuccauagcgacgaaaucgagcaccugguggucgccgagcucauuaagagacgggaaaauugccuggaugcucuugaguccaucaugacaacgaaaagcgugucuuuucgcagacugucccaucuccggaagcugguucccggguucggaaaagccuauaccauuuuuaacaagacacugauggaagcugacgcccacuacaaaagcgugaagaccuggaaugaggucaucccgucuaagggcugccucgaaguugggggaagaugucacccccaugugaacggcguguucuucaaugggauuauccugggaccugauggcaacguccuuauccccgagaugcagagcucccugcuccagcagcacauggagcugcuugaaucuagcgugauuccucugaugcauccccucgcggacccguccacagucuuuaaagagggcgaugaagccgaggacuucguggaaguucaccucccugaugugcauaagcaagucagcgacguggaucuggggcuccccucuuggggaaaauaucugcuuaucuccgcuggcgcccuggcuauucucauccuggccauuguucugaucaucugcugucgccgggugaauaagaccagaagcacgcagcgcgggcaccgggagucuggaggcaaaauguccgucgugccucagaacgggaagauuaucagcuccugggagcuuuacaagucugaaagcgagacaggccucuga

SEQ ID NO: 223436 - RNA, 1575 nt, Artificial Sequence
  derived and/or modified CDS sequence (opt5) from glycoprotein__RABV__JQ686008.1
augaucagccaggccuuccuguuugugcccuuccucauuuccucucugugcuuuggcaaguucccuaucuacaccauuccggacaaaaucgggcccuggagcccuauugauauccaccaucuuuccugucccaacaaucuggucguugaggacgaaggaugcacaucucucagcggcuuuuccuauauggagcugaaggugggguacaucucugcuauuaaagugaacggauucacguguaccggcgucgugacagaagccgagaccuauacaaauuuuguuggguacgugaccacaaccuucaagagaaaacacuuucggccuaugcccgaugcgugccgcgcugccuauaacuggaagauggccggagacccuagauacgaagagagccuucaaaauccguaucccgauuacaacuggcugcggacggucaagaccacaaaagagucccucaucauuaucagcccuucuguggcugaccuggaucccuacgacaagucccugcauagccgcguuuucccuaauggcaaaugucucggcauuaccgugucuuccacauauugcagcaccaaccacgauuacacgaucuggaugcccgaagaggccagacuggggacaucuugugacauuuuuaccaauuccaagggaaaacgggcuagcaagggcgggaagacaugcggauucgucgaugaacgcggccuuuauaaaucccugagaggggccuguaagcucaaacugugcggagugccgggccuucggcugauggacggcaccugggugucuauccagaccagcgaugagacaaagugguguccucccgaccagcucgucaacguucaugacuuucacuccgaugagaucgaacaccuggugguggaggaacugguccgcaaaagagaggaaugccucgacgcgcuggagagcauuaugacgaccaagucuguguccuuccggcgccuuagccaucugagaaaacucguuccuggguucggaaaggccuacacaaucuuuaauaagacccugauggaggcugaugcccacuauaaaucuauucagacauggaacgaaaucauucccagcaagggcugccuuaaagucgggggaaugugucauccccaccuggacggcguguucuuuaaugggaucauccucggaccugauggcaacgugcugauuccggagaugcaauccucucugcuccagcagcacauggaacugcuugagagcuccguuaucccccugaugcauccucucgcugaccccagcaccguguucaaggauggcgacgaagccgaggauuuugucgaggugcaucugccugacauucacaaacaggucucugggaucgaucuuggacugcccgacuggggcaaguaccuccugauguccgcgggggcccuggcuauucuccugcuuacgaucuuccugaugacaugcugucggcgcgugaauagaaccgaaagcgcccaacgggacccgggagagucuggcagaaagguuuccgugaccccucagaacgggaaagucaucagcuccugggaacucuauaagucuggcggagauacacgccuguga

SEQ ID NO: 223437 - RNA, 1575 nt, Artificial Sequence
  derived and/or modified CDS sequence (opt5) from glycoprotein__RABV__JQ686009.1
augaucccccaggcccuccuguucgugccucugcuuauuccgagccugugccucggcaaguuucccaucuacaccauuccugacaaacuggggcccugguccccuaucgauauucaccaucuuucuugucccaacaaucuggucguugaggacgaaggaugcacaagccucuccggcuucucuuauauggagcugaaggugggguacaucagcgcuaucaaagugaacggauuuacguguaccggcgucgugacagaagccgagaccuauacaaauuucguuggguacgugaccacaaccuuuaagagaaaacacuuccggccuaugccggaugcgugccgcgcugcccaugacuggaagauugccggagaucccagauaugaagacucccugcaaaacccuuaccccgauuaucacuggcuccggacggucaagaccacaaaagagucucuggugaucauuagcccuuccguugcugaccuugaucccuacgacaagagccugcauucucgcguguuuccguccggcaaaugucucggcaucaccgucagcucuacauacugcuccaccaaucacgauuauacgauuuggaugccuguggaggccagacuggggacaagcugugacaucuucaccaacucucggggaaagaaggcuuccaaaggcgggcgcacaugcggauuuguggaugaaagaggccuuuacaagagccugaaaggggccuguaagcucaaacugugcggaguccccggccugcggcucauggacggcaccuggguuuccauucagaccucugacgauaucaagugguguccucccgaccagcuggugaaucuucacgauuuccauagcgacgagaucgaacaccugguggucgaggagcucauuaaaaagcgcgaagggugccuggaugcgcuugaguccaucaugacaacgaaaagcgugucuuuuagacggcugucccaucuccgcaagcugguucccggauucggcaaggccuauaccauuuuuaacaauacacugauggaagcugacgcccacuacaaaagcgugagaaccuggaacgaggucaucccuucuaaggggugccucaaagugggaggccggugucacccgcccguuaaugggguguucuucaacggaauuauccugggcccugauggcaauguccuuauccccgaaaugcagagcucccugcuccaacagcauauggagcugcuugagucuagcgugauuccucugaugcacccccucgcugacccguccacagucuuuaaggauggggacgaagccgaggauuucguggaaguucaucugccugacgugcacaaacaggucagcgacguggaucugggacuccccucuuggggcaaguaucugcuuauguccgcgggggcccuggcuacccucauccuggccauuuuucugaucacgugcugucgcagagcuaaccggacagagagcacccagagaggacaucgcgaaucuggcgggaagguuuccguggccccucaaaauggcaaaauuaucagcuccugggagcuuuacaagucugagagcgaaaccggaauguga

SEQ ID NO: 223438 - RNA, 1575 nt, Artificial Sequence; identical to SEQ ID NO: 223406
  derived and/or modified CDS sequence (opt5) from glycoprotein__RABV__JQ686011.1

SEQ ID NO: 223439 - RNA, 1575 nt, Artificial Sequence
  derived and/or modified CDS sequence (opt5) from glycoprotein__RABV__JQ699230.1
auggugccccagguccuccuguucguuccucugcuuguguuuagcuccugcuucggcaaguuuccgaucuacaccauucccgacaaacuggggccuuggucucccaucgauauuagacaccucagcuguccuaacaaucugguggucgaggacgaaggaugcacaaaccuuuccggcuucucuuauauggagcugaaggugggguacaucagcgccauuaaaguuaauggauuuacguguaccggcguggucacagaagcugagaccuauacaaacuucgugggguacguuaccacaaccuuuaagcggaaacauuuccgccccaugccugaugccugcagagcggcuuauaauuggaagauggccggagacccgcgguacgaagagucccuccacaaccccuauccugauuaccauuggcugcgcacggugaagaccacaaaagagucucuggucaucaucagccccuccguggccgaccucgauccuuacgacaagagccugcacucuagaguguuucccggcggcaaauguuccgggauuaccgucagcucuacaugcuguuccaccaaucaugauuauacgaucuggaugccggaaaacccucggcuuggaacaagcugcgacauuuucaccaauucucgcggcaagagagcuuccaaagggggaaagacauguggcuuuguugaugagcgggggcuguacaagagccucaaaggagccugcaagcugaaacuuuguggcgugcugggccuccgccugauggacgggaccuggguggcuauccaaaccuccgaugaaauuaaguggugcucucccgaccagcuggucaaccuccacgacuuccacagcgaugagaucgagcaucuggugguugaggaacuugugaaaaagagagaagagugccuggacgcccucgaaacaauuaugacgaccaaauccgucagcuuucggcgccugucucaccuuagaaagcuggugccuggauucggcaaggcguauacaaucuucaauaaaacccucauggaggccgaugcucauuacaaguccauccggacauggaacgagauuauccccagcaaagggugucugcgcguuggaggcagaugccacccccacgugaauggggucuuuuucaacggaauuauccugggcccugacggccaugugcucauuccggaaaugcagucuagccugcuucaccagcauauggagcugcucgaauccucugucaucccccugaugcacccucuugccgaucccagcaccguguuuaaggacggggaugaggcugaagacuucguugaggugcaucugccugauguccacaaacaaaucuccggaguggaccucggccugcccaauugggggaaguauguucugauuagcgccggagcgcucacggcccugaugcuuaugaucuuucugaugacauguugccggaaggcuaacagagccgagucuauucagcacaacccgggcgaaaccgggcgcaaaguguccgucaccagccauaauggccgggugaucucuuccugggagagcuacaaguccggaggcgaaacaaaacucuga

SEQ ID NO: 223440 - RNA, 1575 nt, Artificial Sequence
  derived and/or modified CDS sequence (opt5) from glycoprotein__RABV__JQ699231.1
auggugccccagguccugcuguucguuccucugcuuguguuuagcuccugcuucggcaaguuuccgaucuacaccauucccgacaaacuggggccuuggucucccaucgauauucaccaucucagcuguccuaacaaucugguggucgaggacgaaggaugcacaaaccuuuccggcuucucuuauauggagcugaaggugggguacaucagcgccauuaaaguuaauggauuuacguguaccggcguggucacagaagcugagaccuauacaaacuucgugggguacguuaccacaaccuuuaagagaaaacacuuccggcccaugccugaugccugccgcgcggcuuauaauuggaagauggccggagacccgagauacgaagagucccuccauaaccccuauccugauuaccacuggcugcggacggugaagaccacaaaagagucucuggucaucaucagccccuccguggccgaccucgauccuuacgacaagagccugcauucucgcguguuucccggcggcaaauguuccgggauuaccgucagcucuacaugcuguuccaccaaucacgauuauacgaucuggaugccggaaaacccuagacuuggaacaagcugcgacauuuucaccaauucucggggcaagcgcgcuuccaaagggggaaagacauguggcuuuguugaugagagagggcuguacaagagccucaaaggagccugcaagcugaaacuuuguggcgugcugggccuccggcugauggacgggaccuggguggcuauccaaaccuccgaugaaauuaaguggugcucucccgaccagcuggucaaccuccacgacuuccauagcgaugagaucgagcaccuggugguugaggaacuugugaaaaagcgcgaagagugccuggacgcccucgaaacaauuaugacgaccaaauccgucagcuuuagacggcugucucaucuucgcaagcuggugccuggauucggcaaggcguauacaaucuucaauaaaacccucauggaggccgaugcucacuacaaguccaucagaacauggaacgagauuauccccagcaaagggugucugcggguuggaggccgcugccacccccaugugaauggggucuuuuucaacggaauuauccugggcccugacggccacgugcucauuccggaaaugcagucuagccugcuucaucagcacauggagcugcucgaauccucugucaucccccugaugcauccucuugccgaucccagcaccguguuuaaggacggggaugaggcugaagacuucguugaggugcaccucccugauguccacaaacucaucuccggaguggaccugggccugcccaauugggggaaguauguucucauuagcgccggagcgcugacggcccuuaugcugaugaucuuucucaugacauguugcagaaaggcuaaccgggccgagucuauucaacauaacccgggcgaaaccgggagaaaaguguccgucaccagccacaauggccgcgugaucucuuccugggagagcuacaaguccggaggcgaaacaaaacuguga

SEQ ID NO: 223441 - RNA, 1575 nt, Artificial Sequence; identical to SEQ ID NO: 222918
  derived and/or modified CDS sequence (opt5) from glycoprotein__RABV__JQ699255.1

SEQ ID NO: 223442 - RNA, 1575 nt, Artificial Sequence; identical to SEQ ID NO: 222918
  derived and/or modified CDS sequence (opt5) from glycoprotein__RABV__JQ699257.1

SEQ ID NO: 223443 - RNA, 1575 nt, Artificial Sequence
  derived and/or modified CDS sequence (opt5) from glycoprotein__RABV__JQ699258.1
augaucccccaggugcugcuguucgucacccugcuuguuuuuagcuccugcuucggcaaguuuccuauuuacacaaucccggacaaacuggggcccuggucuccuauugauauccaccaucucagcugucccaacaaucuggugguggaggacgaaggaugcacgaaccuuuccggcuucucuuauauggagcugaaggucggguacauuagcgccaucaaagugaauggauuuaccuguacaggcguugugaccgaagcugagacauauaccaacuucgucggguacgugacaaccacguuuaagagaaaacacuuccggccuaugcccgaugccugccgcgcggcuuauaauuggaagauggccggagacccuagauacgaagagucccuccauaacccguaucccgauuaccacuggcugcggaccguuaagacaaccaaagagucucuggugaucauuagcccuuccgucgccgaccucgaucccuacgacaagagccugcauucucgcguguuuccuggcggcaaauguuccgggaucacagugagcucuaccugcuguuccacgaaucacgauuauacaauuuggaugcccgaaagcccgagacuuggaaccucuugcgacaucuucacaaacucccggggcaagcgcgcuagcaaagggggaaagaccuguggcuuugucgaugagagagggcuguacaagucccucaaaggagccugcaagcugaaacuuuguggcguucugggccuccggcugauggacgggaccuggguggcuauucaaacaucugaugaaaucaaguggugcccucccgaccagcuggugaaucuccacgacuuccauagcgaugagauugagcaccuggucguggaggaacuuguuaaaaagcgcgaagagugccuggacgcccucgaaacgaucaugaccacaaaauccgugagcuuuagacggcugucucaucuucgcaagcuggucccuggauucggcaaggcguauaccaucuucaacaaaacacucauggaggccgaugcucacuacaaguccauuagaaccuggaaugagaucauucccagcaaagggugucugcgggugggaggccgcugccacccccauguuaacgggguguuuuucaauggaaucauucugggcccugacggccacguccucaucccggaaaugcagucuagccugcuucaucagcacauggagcugcucgaauccucugugaucccccugaugcauccucuugccgaucccagcacggucuuuaaggacggggaugaggcugaagacuucguggagguucaccucccugaugugcacaaacaaauuuccggagucgaccucggccugcccaacugggggaaguaugugcugaucagcgccggagcgcucacagcccugaugcuuaccauuuuucugaugaccuguugcagaaagacaaauggcgcugggucuauccagcauuccccgggcgagaccggacggaaaguuagcgugacaucucacaacggcagagucauuuccagcugggaauccuacaagucugggagcgagacgaaacucuga

SEQ ID NO: 223444 - RNA, 1575 nt, Artificial Sequence
  derived and/or modified CDS sequence (opt5) from glycoprotein__RABV__JQ699259.1
augaucccccaggcccugcucuuugugccucugcuugucuuuagcuccugcuucggcaaguuuccgauuuacaccauccccgacaaacuggggccuuggucucccauugauauccaccaucucagcuguccuaacaaucugguuguggaggacgaaggaugcacaaaccuuuccggcuucucuuauauggagcugaaggugggguacauuagcgcuaucaaagucaauggauuuacguguaccggcgugguuacagaagccgagaccuauacaaacuucgugggguacgucaccacaaccuuuaagagaaaacacuuccggcccaugccugaugcgugccgcuccgcuuauaauuggaagauggccggagacccgagauacgaagagucucuccauaaccccuauccugauuaccacuggcugcggacggugaagaccacaaaagagagccugguuaucauuucccccagcguggccgaccucgauccuuacgacaagucucugcauucccgcgucuuucccagaggcaaauguagcggcaucaccgugucuuccacaugcuguagcaccaaucacgauuauacgauuuggaugccggaaaacccucggcuugggacaucuugcgacaucuucaccaauucccgcggaaagagagcuagcaaaggcuccaagacauguggguuuguggaugagcggggacuguacaagucucucaaaggcgccugcaagcugaaacuuugugggguccugggacuccgccugauggacggcaccuggguugcuauucaaaccagcaacgaaaucaaguggugucccccugaucagcuggugaaucuccacgacuuccauuccgacgagauugagcaccugguggucgaggaacuugugaaaaagagagaagagugccuggaugcccucgaaacaaucaugacgaccaaaagcguuucuuuucggcgccugucccaucuuagaaagcuggugcccggcuucgggaaggcguauacaaucuucaacaaaacccucauggaggccgacgcucacuacaagagcauucggacauggaaugagaucauucccucuaaaggaugccugcgcgucggcgggagaugccacccucaugugaacggaguuuucuucaauggcaucauucuggggccggauggacacgugcucauccccgaaaugcagagcucccugcuucaucagcacauggagcugcucgaaucuagcgucaucccucugaugcauccccuugccgacccuuccaccguguuuaaggauggcgacgaggcugaagauuucgucgaggugcaucugcccgacguucacaaacaaauuagcggcguggaucucgggcugccgaacuggggaaaguauguccugaucucugccggcgcgcucacggcccugaugcuuacaauuuuucugaucaccuguugccggaagaccaacagagcuggguccauucagcacagcccuggagagacaggccgcaaagugucuguuaccucccacaaugggcgggugaucagcuccugggaaucuuacaagagcggcuccgagacaaaacucuga

SEQ ID NO: 223445 - RNA, 1575 nt, Artificial Sequence
  derived and/or modified CDS sequence (opt5) from glycoprotein__RABV__JQ699260.1
auggugccccaggccuuccuguuugucccuuuccucgcuguuccgcugugcuuuggcaaguuccccaucuacaccauuccugacaaacuugggcccuggagcccuaucgauauucaccaucuguccugucccaacaaucucgugguggaggacgaaggaugcacaaaccugucuggcuuuagcuauauggagcuuaaggucggguacaucuccgccauuaaagugacgggauucaccuguacaggcguugugaccgaagcggagacauauaccaauuuugucggguacgugacaaccacguucaagagaaaacacuuucggccuaccccggaugcuugccgcucugccuauaacuggaagaucgccggagaccccagauacgaagagagccugcauaauccuuaucccgauuaccacuggcuccggacaguuaagaccacaaaagaguccuucgugaucauuucuccuagcgucgcugaccuggaucccuacgacaagucccugcauagccgcguguuuccgagaggcaaauguucuggcaucaccguguccagcacguauugcucuacaaaccacgauuacaccauuuggaugccugaaaauccccggcucgggacauccugugacaucuucaccaacagccgcggaaagagagccucuaaaggcuccaagaccugcggguuugucgaugagcggggacuguauaagagccuuaaaggcgcuuguaagcugaaacucugcgggguucugggacuucgccugauggacggcacauggguggccauucaaacguccgaugaaaccaagugguguccucccgaccagcucgugaaucugcacgacuuccauucugaugagaucgagcaccuggucguggaggaacucguuaaaaagagagaagagugccuggacgcgcuugaaagcauuaugacaaccaaauccgugagcuuccggcgccugucucaucucagaaagcugguccccggcuuugggaaggccuacacaaucuucaacaaaacccuuauggaggcugaugcccacuauaaguccgugcggacguggaaugagaucauuccuagcaaaggaugccugcgcguuggcgggagaugucacccgcaugugaacggagucuuuuucaauggcaucauucucgggcccgacggacacgugcugaucccugaaaugcagucuagccugcuccagcaacauauggagcugcuugaauccucugucauuccccugaugcacccucucgcugaucccagcacaguguuuaaggacggcgaugaggccgaagacuucguugaggugcaucugccggauguccacaaacagguguccggcguugaccuugggcugccuagcuggggaaaguacgugcucaugucugcgggcauccugaccgcccugaugcucaugaucuuucugaugaccugcugucggagaacaaaccgcgcugaguccauucagcacagccuuggggaaaccggacggaaggucucugugacaucccagaauggcagagugaucagcuccugggagucuuauaaaagcgggggcgaaacgaagcuguga

SEQ ID NO: 223446 - RNA, 1575 nt, Artificial Sequence
  derived and/or modified CDS sequence (opt5) from glycoprotein__RABV__JQ699262.1
auggugccccaggcccuccuguucgucccucugcuugcuguuccgcugugcuuuggcaaguuccccaucuacaccauuccugacaaacucgggcccuggagcccuaucgauauucaccaucuguccugucccaacaaucuugugguggaggacgaaggaugcacaaaccugucuggcuuuagcuauauggagcucaaggucggguacaucuccgccauuaaagugacgggauucaccuguacaggcguugugaccgaagcggagacauauaccaauuuugucggguacgugacaaccacguucaagagaaaacacuuucggccuaccccggaugcuugccgcucugccuauaacuggaagaucgccggagaccccagauacgaagagagccugcauaauccuuaucccgauuaccacuggcugcggacaguuaagaccacaaaagaguccuucgugaucauuucuccuagcgucgcugaccucgaucccuacgacaagucccugcauagccgcguguuuccgagaggcaaauguucuggcaucaccguguccagcacguauugcucuacaaaccacgauuacaccauuuggaugccugaaaauccccggcuugggacauccugugacaucuucaccaacagccgcggaaagagagccucuaaaggcuccaagaccugcggguuugucgaugagcggggacuguauaagagccucaaaggcgcuuguaagcugaaacuuugcgggguucugggacuccgccugauggacggcacauggguggccauucaaacguccgaugaaaccaagugguguccucccgaccagcuggugaaucuccacgacuuccauucugaugagaucgagcaccuggucguggaggaacuuguuaaaaagagagaagagugccuggacgcgcucgaaagcauuaugacaaccaaauccgugagcuuucggcgccugucucaucuuagaaagcugguccccggcuucgggaaggccuacacaaucuucaacaaaacccucauggaggcugaugcccacuauaaguccgugcggacguggaaugagaucauuccuagcaaaggaugccugcgcguuggcgggagaugucacccgcaugugaacggagucuuuuucaauggcaucauucuggggcccgacggacacgugcucaucccugaaaugcagucuagccugcuucagcaacauauggagcugcucgaauccucugucauuccccugaugcacccucuugcugaucccagcacaguguuuaaggacggcgaugaggccgaagacuucguugaggugcaucugccggauguccacaaacagguguccggcguugaccucgggcugccuagcuggggaaaguacgugcugaugucugcgggcauccucaccgcccugaugcuuaugaucuuucugaugaccugcugucggagaacaaaccgcgcugaguccauucagcacagccucggggaaaccggacggaaggucucugugacaucccagaauggcagagugaucagcuccugggagucuuauaaaagcgggggcgaaacgaagcuguga

SEQ ID NO: 223447 - RNA, 1575 nt, Artificial Sequence
  derived and/or modified CDS sequence (opt5) from glycoprotein__RABV__JQ699264.1
auggugccccaggcccuccuguucgucccucugcuugcuguuccgcugugcuuuggcaaguuccccaucuacaccauuccugacaaacucgggcccuggagcccuaucgauauucaccaucuguccugucccaacaaucuugugguggaggacgaaggaugcacaaaccugucuggcuuuagcuauauggagcucaaggucggguacaucuccgccauuaaagugaauggauucacguguaccggcguugugacagaagcggagaccuauacaaacuuugucggguacgugaccacaaccuucaagagaaaacacuuucggccuacgccggaugcuugccgcucugccuauaauuggaagauggccggagaccccagauacgaagagagccugcauaacccuuaucccgauuaccacuggcugcggaccguuaagacaaccaaagaguccuucgugaucaucucuccuagcgucgcugaccucgaucccuacgacaagucccugcauagccgcguguuuccgagaggcaaauguucuggcauuacaguguccagcaccuauugcucuacgaaucacgauuacacaaucuggaugccugaaaacccccggcuugggaccuccugugacauuuucacaaauagccgcggaaagagagccucuaaaggcuccaagaccugcggguuugucgaugagcggggacuguauaagagccucaaaggcgcuuguaagcugaaacuuugcgggguucugggacuccgccugauggacggcaccuggguggccauccaaacauccgaugaaacgaagugguguccucccgaccagcuggugaaccuccacgacuuccauucugaugagauugagcaccuggucguggaggaacuuguuaaaaagagagaagagugccuggacgcgcucgaaagcaucaugaccacaaaauccgugagcuuucggcgccugucucaucuuagaaagcugguccccggcuucgggaaggccuacaccauuuucaauaaaacacucauggaggcugaugcccacuauaaguccauccggaccuggaacgagaucauuccuagcaaaggaugccugcgcgugggcgggagaugucacccgcauguuaauggaguguuuuucaacggcaucauucuggggcccgacggacacguccucaucccugaaaugcagucuagccugcuucagcaacauauggagcugcucgaauccucugugauuccccugaugcacccucuugcugaucccagcacggucuuuaaggacggcgaugaggccgaagacuucguggagguucaucugccggaugugcacaaacaggucuccggcguggaccucgggcugccuagcuggggaaaguacguucugaugucugcgggcauccucacagcccugaugcuuaugaucuuucugaugaccugcugucggagaaccaaucgcgcugaguccauucagcacagccucggggaaacaggacggaaggugucugucaccucccagaacggcagagugaucagcuccugggagucuuauaaaagcgggggcgaaacaaagcuguga

SEQ ID NO: 223448 - RNA, 1575 nt, Artificial Sequence; identical to SEQ ID NO: 223125
  derived and/or modified CDS sequence (opt5) from glycoprotein__RABV__JQ699267.1

SEQ ID NO: 223449 - RNA, 1575 nt, Artificial Sequence; identical to SEQ ID NO: 222599
  derived and/or modified CDS sequence (opt5) from glycoprotein__RABV__JQ699272.1

SEQ ID NO: 223450 - RNA, 1575 nt, Artificial Sequence
  derived and/or modified CDS sequence (opt5) from glycoprotein__RABV__JQ730682.1
augaucccccagacccugcucuuugugccucugcuugucuuuagccugugcuucggcaaguuuccgauuuacacaauccccgacaaacucgggccuuggucccccauugauauccaccaucugucuuguccuaacaaucuuguuguggaggacgaaggaugcacgaaccugagcggcuucuccuauauggagcucaaggugggguacauuucugccaucaaagucaauggauuuaccuguacaggcgugguuaccgaagcugagacauauaccaacuucgugggguacgucacaaccacguuuaagagaaaacacuuccggcccaccccugaugccugccgcgcggcuuauaauuggaagauggccggagacccgagauacgaagagagccugcauaaccccuauccugauuaccacuggcugcggacagugaagaccacaaaagagucccucguuaucauuucucccagcguguccgaccuggauccuuacgacaagagccuucauucucgcgucuuucccuccggcaaauguagcggcaucaccgugucuuccacguauugcccgacaaaucacgauuacaccauuuggaugccugaaaaccccagacuggggacaagcugugacaucuucaccaauucucggggaaagcgcgccuccaaaggcagcaagaccugcggguuuguggaugagagaggacucuauaagucccugaaaggcgcuuguaagcugaaacugugcgggguccucggacugcggcugauggacggcacaugggccgcuauucaaacgucugaugaagccaagugguguccucccgaccagcucguuaacauccacgacuuccgcagcgaugagauugagcaucuggugguggaggaacuugucaaaaagagagaagagugccuggacgcgcucgaauccaucaugaccacaaaaagcgugucuuuucggcgccugucccaccuuagaaagcugguucccggcuucgggaaggccuacaccaucuucaauaaaacacucauggaggcugaugcccauuauaagagcgugcggaccuggaacgagauuaucccuucuaaaggaugccugcgcgucggcgggagaugucacccgcacgugaauggaguuuucuucaacggcauuauccuggggcccgacggacaugugcucauuccugaaaugcagagcucccugcuucagcaacacauggagcugcucgaaucuagcgucaucccccugaugcauccucuugcugaucccuccacgguguuuaaggacggcgaugaggccgaagacuucgucgaggugcaccuuccggauguucauaaacaggugagcggcgucgaccucgggcugccuucuuggggaaaguacgugcugauguccguuggcacacucaucgcgcugaugcuuaugauucugcucacaaccugcugucggaaggccaauggggcugagagcauccagcacagacugggagaaaccggccgcaaagugucugucaccucccagaacgggcgggugauuagcuccugggagucuuauaagagcggcggagaaacaaaacuguga

SEQ ID NO: 223451 - RNA, 1575 nt, Artificial Sequence
  derived and/or modified CDS sequence (opt5) from glycoprotein__RABV__JQ824889.1
augaucccccacgcccugcucagcgugccucugcuuaucuccucucugugcuucggcaaguuuccgaucuacaccauucccgagaaacucgggccuuggagccccaucgacauucaucaccuguccuguccuaacaaucuugucguugaagaugagggaugcaacucucugagcggcuucuccuauauggaacucaaggugggguacaucucugcuaucaaagugaauggauuuacauguacgggcgucgugaccgaggccgaaacauauaccaacuucguuggguacgugacaaccacauuuaagagaaaacauuuccggcccaugccugacgcgugccgcgcugccuauaauuggaagaccgccggagauccgagauacgaggagagccugcacaaccccuauccugacuaccauuggcugcggacggucaagaccacaaaagaaucccucauuaucauuagccccucuguggcugaucuggacccuuacgauaagucccuucacagccgcaucuuucccggcggcaaaugucuggggauuaccaucucuuccacauauugcagcaccaaucacgacuacacgauuuggaugccggaggaagccagacucggaacaucuugugauaucuucaccaacuccaagggcaaacgggcuagcaaagggggacgcacaugcggcuuuguugacgagagagggcuguauaagucccuuaagggagccuguaagcugaaacucugcggcgugccuggccugcggcugauggaugggaccugggucgcgauccagacccccaaugagacaaagugguguucuccugaccaacucgugaacgugcaugauuuccgcagcgacgaaauugagcaccuggucguugaggaacuuaucagaaaacgggaagagugccuggacgcccucgaguccauuaugacgaccaagagcgugucuuuucgcagacuguccaaucuucggaaacuggugcccggauucggcaaggcuuacacaaucuuuaacaagacccucauggaagccgaugcucauuauaaaagcguccgcacauggaaugagauuauccccucuagagggugccugaaggugggaggccggugucacccucacguuaacgggguguucuucaauggaaucauucugggcccggacggccauauccucauucccgaaaugcagagcucccugcuucagcagcacauggagcugcucgaaucuagcgucaucccucugauucauccccuugccgauccuuccaccguguuuaaagacggggaugaggcggaggacuucguugaagugcaucugcccgauguccaccaacaggugagcggagucgaccucggccugccggauugggggaaguacgugcugaugucugccggagcucucgccacgguuaugcugacaaucuuucuuauuaccugcuguagacgcgugaaacggaccgaguccguccagcagggccugggggaaagcggcagaaaggugucuguugcuccucaaaacggaaaggugauguccagcugggaguauuacaaauccggcgggggaacacgccucuga

SEQ ID NO: 223452 - RNA, 1575 nt, Artificial Sequence
  derived and/or modified CDS sequence (opt5) from glycoprotein__RABV__JQ944704.1
auggacccccaggcccugcuccuggugccucuucugggcuucagccucugcuuugggaaguucccgaucuacaccauucccgauaaacugggaccuuggauccccauugacauccaccaucuuuccuguccuaacaaucuggucguugaggaugaaggcugcacaaaccucucuggguuuagcuauauggagcugaaggugggauacauuuccucuaucaaagugaauggcuucacguguaccggggucgugacagaagcugagaccuauacaaacuuuguuggauacgugaccacaaccuucagacggaagcacuuucgccccacgccugacgccugcagagcggcuuauaauuggaaaauggccggcgauccgcgguacgaagagagccugcauaaccccuauccugacuaccacuggcuccgcaccgucaagacaaccaaggagucccuggugaucauuucucccagcguugccgaucuugacccuuacgauaaaucccugcauagcagaguguuccccucuggcaaguguuccgggaucacagucagcucuaccuauugcuccacgaaucacgacuacacaauuuggaugccggaaaaccuccggcugggaaccagcugugauaucuuuacaaauucucgcggcaaaagagcuuccaaggggagcaaaaccugcggauucguggacgagcggggccuuuauaagucccugaagggggccuguaaacucaagcugugcggagugcugggccuccgccugauggauggcaccugggucgcuaugcaaacaucugacgaaacgaaaugguguccucccgaccagcuuguuaaccugcacgauuuuagaagcgacgagauugagcaucucgugguggaggaacuggucaagaaacgggaagagugccuugaugcccuggaauccaucaugaccacaaagagcgugucuuuccgcagacucucccaucugcggaaacugguuccuggguuuggaaaggcguacaccauuuucaauaagacacucauggaggccgacgcucacuauaaaagcgugcgcaccuggaacgaggucauccccucuagaggcugccugcggguugggggaagaugucacccccacgugaauggcguguucuuuaacgggaucauucuuggaccugauggccauguccugaucccggaaaugcagagcucccuccugcagcaacacauugagcuucuggaaucuagcgugaucccccucaugcauccucuggccgaccccuccacggucuucaaggauggcgacgaggcugaagauuuuguggagguucaucugccugacgugcacaaacaggucagcgggguggaucucggacugcccaauuggggcaaguacguucuucugucugccggggcgcucauugcccugaugcugaucaucuuccuuauuacaugcugucgccgggugaacagaccggaguccacccagcgcagccuccggggagcuggcagaaaagucucuaucaccucccagagcgggaaggugauuuccucuugggaaagcuauaaguccggcggagagacacgccuguga

SEQ ID NO: 223453 - RNA, 1575 nt, Artificial Sequence
  derived and/or modified CDS sequence (opt5) from glycoprotein__RABV__JQ944705.1
auggugccccaggucuuccuguuuguuccucuccugguguucccgcuuugcagcggcaaguuucccaucuacaccauuccugacaaacuggggcccugguccccuaucgauauucaccaucucucuugucccaacaaucugguggucgaggacgaaggaugcacaaaccuuagcggcuucuccuauauggagcugaaggugggguacaucucugccauuaaaguuaauggauuuacguguaccggcguggucacagaagcugagaccuauacaaacuucgugggguacguuaccacaaccuuuagacggaagcacuuccgcccuacgccggaugccugcagagcggcuuauaauuggaaaauggccggagacccccgguacgaagagagccuccauaacccuuaucccgauuaccacuggcugcgcaccgugaagacaaccaaggagucccuggucaucaucucuccuagcguggccgaccucgaucccuacgacaaaucccugcauagcagaguguuuccgucuggcaagugucuuggcauuacagucuccagcacccacugcucuacgaaucacgauuauacaaucuggaugccugaaaacccccggccugggaccuccugugacauuuucacaaauagccgcggaaaaagagcuucuaagggcuccaaaaccugcggguuuguugaugagcggggacuguacaagagccucaagggcgccuguaaacugaagcugugcggggugcugggacuccgccugauggacggcaccuggguggcuaugcaaacauccgaugaaacgaaaugguguccucccgaccagcuggucaaccuccaugacuucagaucugaugagaucgagcaccuggugguugaggaacuugugaagaaacgggaagagugccuggacgcccucgaaagcauuaugaccacaaaguccgucagcuuucgcagacugucucaucuucggaaacuggugcccggcuucgggaaggcguauaccaucuucaauaagacacucauggaggccgaugcucacuacaaauccguucgcaccuggaacgagauuaucccgagcaagggaugccugagagugggcgggcggugucacccccaugucaauggaguguuuuucaacggcaucauucuggggccugacggacacguccucauccccgaaaugcagucuagccugcuucagcaacauauggagcugcucgaauccucugugauuccucugaugcacccccuugccgauccgagcacgguuuuuaaagacggcgaugaggcugaagacuucguggagguccaucugccugaugugcacaagcagguuuccggcguggaccucgggcugcccaauuggggaaaauauguccugcucagcgccggcgcgcugaucgcccuuaugcugaugauuuuucucaugacaugcuguagaaaggugaaccgcccugagucuacccagcggucccuugggggaaccggcagaaaggugagcaucacaucucaguccgggaaaguuaucagcuccugggaaucuuacaagagcggcggagagacccgccuguga

SEQ ID NO: 223454 - RNA, 1575 nt, Artificial Sequence
  derived and/or modified CDS sequence (opt5) from glycoprotein__RABV__JQ944706.1
auggcuccccaggcccuucucuucgugccucugcuugucuuuccgcugugcuucggcaaguuucccaucuacaccauuccugacaaacucgggcccuggagcccuaucgauauucaccaucuguccugucccaacaaucuuguuguggaggacgaaggaugcacaaaccugucuggcuucagcuauauggagcucaaggugggguacaucuccgccauuaaagucaauggauuuacguguaccggcgugguuacagaagcggagaccuauacaaacuucgugggguacgucaccacaaccuuuaagagaaaacacuuccggccuaucccggaugcuugccgcgccgccuauaauuggaagauggcuggagaccccagauacgaagagucucugcauaacccuuaucccgauuaccacuggcugcggacggugaagaccacaaaagagagccucguuaucauuuccccuucuguggccgaccuggaucccuacgacaagagccuucauucccgcgucuuuccgagcggcaaauguucuggcaucaccguguccagcacauauugcucuaccaaucacgauuacacgauuuggaugccugaaaaccccagacuggggacauccugugacaucuucgcuaauagccggggaaagcgcgccucuaaaggcuccaagaccugcggguuuguggaugagagaggacucuauaagagccugaaaggcgcguguaagcugaaacugugcgggguccucggacugcggcugauggacggcacauggguugccaugcaaaccuccgaugaaaccaagugguguccucccgaccagcucgugaaccugcacgacuuccgcucugaugagauugagcaucuuguggucgaggaacuggugaaaaagagagaagagugccucgacgcucuggaaagcaucaugacaacgaaauccguuagcuuucggcgccuuucucaccugagaaagcucgugcccggcuucgggaaggccuacaccauuuucaauaaaacacugauggaggcugaugcccauuauaaguccguccggaccuggaacgagaucaucccuagcaaaggaugccugcgcgugggcgggagaugucacccgcacguuaauggaguguuuuucaacggcauuauccucgggcccgacggacauguccugauuccugaaaugcagucuagccuucugcagcaacacauggagcuccuggaauccucugugaucccccuuaugcauccucuggcggaucccagcacagucuuuaaggacggcgaugaggccgaagacuucguggagguucaccucccggaugugcauaaacaggucuccggcguggaccuggggcugccuaauuggggaaaguacguucuccugagcgcuggcgcccuuauugcucugaugcucaucaucuuucugaugaccugcugucggagagugaaccgccccgagucuacgcagcggugccuugggggaacaggcagaaaggucuccgugaccagccagucugggaaagugauuuccagcugggaauccuauaagucuggcggagagacccgccuguga

SEQ ID NO: 223455 - RNA, 1575 nt, Artificial Sequence
  derived and/or modified CDS sequence (opt5) from glycoprotein__RABV__JQ944707.1
augaucccccaggcccugcuguucgugccucugcuugcuuuuccgaugugcuucggcaaguuucccauuuacaccaucccugacaaacuggggcccuggagcccuauugauauccaccaucucuccugucccaacaaucuggucguugaggacgaaggaugcacaaaccuuucuggcuucagcuauauggagcugaaggugggguacauuuccgccaucaaagugaauggauuuacguguaccggcgucaucacagaagcggagaccuauacaaacuucgugggguacguuaccacaaccuuuaagagaaaacacuuccggccuacgccggaugcuugccgcgccgccuauaauuggaagauggcuggagaccccagauacgaagagucucuccauaacccuuaucccgauuaccacuggcugcggaccgugaagacaaccaaagagagccugauuaucauuuccccuucugucgccgaccucgaucccuacgacaagagccugcauucccgcguguuuccgagcggcaaaugucuuggcaucacaauuucuuccaccuauugcagcacgaaucacgauuacacaaucuggaugccugaaaaccugagacucgggaccucuugugacauuuucacaaauucccggggaaagcgcgcuagcaaaggcucuaagaccugcggguuuguugaugagagaggacuguauaagucccuuaaaggcgccuguaagcugaaacucugcggggugcugggacugcggcucauggacggcaccugggucgcgaugcaaacaagcgaugaaacgaaguggugucccccugaccagcuggugaaccuucacgacuuccgcuccgaugagaucgagcaucugguggucgaggaacucguuaaaaagagagaagagugccuggacgcccuugaaucuaucaugaccacaaaaagcguguccuuucggcgccugagccaccucagaaagcuggugcccggcuucgggaaggcuuacaccauuuucaauaaaacacugauggaggccgaugcucauuauaagucuguccggaccuggaacgagaucauucccuccaaaggaugccuccgcgugggcgggagaugucacccucacguuaauggaguguuuuucaacggcaucauucuggggccggacggacauguccuuauccccgaaaugcagagcucucugcuccagcaacacauggagcugcuugaaagcuccgugaucccucugaugcauccccucgccgauccuucuacgguuuuuaaggacggcgaugaggcggaagacuucguggagguccaccuccccgaugugcauaaacagauuagcggcgucgaccuggggcucccgaauuggggaaaguacgugcugaucauugccggcguucuuaucgcuaugauucugacaaucuuucucaugaccugcugugggcggggaaacagaccuaaguccacccagcacagccugggcgggaucggccgcaaagugucugccacaucccagagcggaaaggucauuucuuccugggagagcuauaaauccggcggggaaacccggcuguga

SEQ ID NO: 223456 - RNA, 1575 nt, Artificial Sequence
  derived and/or modified CDS sequence (opt5) from glycoprotein__RABV__JQ944708.1
auggugccccaggcccuccuguucgucccucugcuuguuuuuccgcugugcuucggcaaguuucccaucuacaccauuccugacaaacucgggcccuggagcccuaucgauauucaccaucuguccugucccaacaaucuugugguggaggacgaaggaugcacaaaccugucuggcuucagcuauauggagcucaaggucggguacaucuccgcuauuaaagugaauggauuuacguguaccggcguugugacagaagccgagaccuauacaaacuucgucggguacgugaccacaaccuuuaagagaaaacacuuccggccuacgccggaugcgugccgcgcugccuauaauuggaagaccgccggagaccccagauacgaagagucucugcauaacccuuaucccgauuaccacuggcugcggacaguuaagaccacaaaagagagccucgugaucaucuccccuucugucgcugaccuggaucccuacgacaagagccuucauucccgcguguuuccgagcggcaaauguucuggcauuaccguguccagcacguauugcucuacaaaucacgauuacaccaucuggaugccugaaaaccugagacucgggacauccugugacauuuucaucaauagccggggaaagcgcgccucuaaaggcucccaaaccugcggguuuauugaugagagaggacuguauaagagccuuaagggcgcuuguaaacugaagcucugcgggguccugggacugcggcucauggacggcaccuggguugccaugcagacaucccacgaaacgaaauggugucccccugaucagcuggugaaccuucaugacuuccgcucugacgagaucgagcaccugguggucgaggaacucgugaagaaaagagaagagugccuggaugcgcuugaaagcauuaugaccacaaaguccguuagcuuucggcgccugucucaucucagaaaacuggugcccggcuucgggaaggccuacaccaucuucaauaagacacugauggaggcugacgcccacuauaaauccguccggaccuggaacgagaucauucccagcaagggaugccuccgcgugggcgggagaugucacccucauguuaauggaguguuuuucaacggcaucauucuggggccggaaggacacguccuuauccccgagaugcagucuagccugcuccaacagcauauggaacugcuugaguccucugugauuccucugaugcacccccucgcugauccuagcacggucuuuaaagaaggcgacgaggccgagaauuucguggaaguucaucugcccgaugugcacaagcaggucuccggcguggaccuggggcucccgaacuggggaaaauacguucugcuuagcucuggcgcgcugaucgcccucaugcugaucauuuuucugcuuacaugcugucggagagugaaccgcccugaguccacccagcacagccucgggggaaagcggagaaaggucucuaucaccucccaaagcggcaaagugauuuccucuugggaaagcuauaaguccgggggcgagacacgccuguga

SEQ ID NO: 223457 - RNA, 1575 nt, Artificial Sequence
  derived and/or modified CDS sequence (opt5) from glycoprotein__RABV__JQ944709.1
auggugccccagguccuucucuucguuccucugcuuggcuuuagccugugcuucgggaaguuuccgaucuacaccauucccgacgagcucggaccuuggucccccaucgauauucaccaccugucuuguccuaacaaucuugugguggaagacgagggcugcacaaaccugagcgaguucuccuauauggagcucaaagucggguacaucucugccauuaaggugaauggauuuacguguaccggcguugugacagaagcugagaccuauacaaacuucgucggguacgugaccacaaccuuuaaaagaaagcacuuccggcccacgccugaugccugccgcgcggcuuauaauuggaaaauggccggagacccgagauacgaggaaagccugcauaaccccuauccugauuaccacuggcugcaaaccguucggacaaccaaggagucccucaucaucauuucucccagcgugacagaccuggauccuuacgacaagucccuucauagccgcgucuuucccggcggcaaauguucugggaucaccguguccagcacguauugcucuacaaaucacgauuacaccauuuggaugccggaaaacccuagaccccggacaccuugugacaucuucaccaauucccgcggaaagagagccagcaaaggcaacaagaccugcggguuuguggaugagcggggacuguauaaaucucucaagggcgcuugucgccugaagcugugcgggguccugggacucagacugauggacggcacauggguugccaugcagacguccgaugagaccaaaugguguccucccgaccagcuggugaaucuccacgacuuccggagcgaugaaauugagcaucugguggucgaagaacuugugaagaaacgcgaagagugccuggacgcucucgaguccaucaugacaaccaagucuguuagcuuuagacggcugucccaccuucgcaaacuggugcccggcuucgggaaggccuacacaauuuucaacaaaacccucauggaagcggaugcccauuauaagagcgucagaacguggaaugagaucaucccgucuaagggaugccugaaagugggcgggcggugucacccccacguuaacggaguguuuuucaauggcauuauccuggggccugacggacauguccucauucccgaaaugcaguccagccugcuucaacagcacauggagcugcucgaaucuagcgugaucccucugaugcauccccuugcugauccguccacagucuuuaaggagggcgacgaggccgaagauuucguggagguucaucugccugacguguacaaacagauuucuggcgucgaucucgggcugcccaacuggggaaaguaugugcugaugaccgcuggcgccaugaucgggcucguucugaucuuuagccuuaugaccuggugcagacgcgcgaaccggccugaauccaaacagcgcagcuucggaggcacagggagaaaugugucugucaccucccaaagcggcaaggugauucccucuugggaguccuacaagagcggaggcgaaauccggcuguga

SEQ ID NO: 223458 - RNA, 1575 nt, Artificial Sequence
  derived and/or modified CDS sequence (opt5) from glycoprotein__RABV__JQ950447.1
augaucccccaggccuuccuguuugugccucuccuggucguuccgcuuugcuucggcaaguuucccauuuacaccaucccugacaaacuggggcccuggagcccuauugauauccaccaucucuccugucccaacaaucuggugguggaggacgaaggaugcacaaaccuuucuggcuucagcuauauggagcugaaggucggguacauuuccgcuaucaaagugaauggauuuacguguaccggcguugugacagaagccgagaccuauacaaacuucgucggguacgugaccacaaccuuuaagagaaaacacuuccggccuacgccggaugcgugccgcucugcuuauaauuggaagauggccggagaccccagauacgaagagagccuccauaacccuuaucccgauuaccacuggcugcggaccguuaagacaaccaaagaguccuuugugaucauuucuccuagcgucgccgaccuggaucccuacgacaagucccuccauagccgcguguucccgagaggcaaauguucuggcaucacaguguccagcaccuauugcccuacgaaucacgauuacacaauuuggaugcccgaaaacccucggcuggggaccucuugugacaucuuuacaaauucccgcggaaagagagcuuucaaaggcagcaagaccugcggguuugucgaugagcggggacuuuauaagucucugaaaggcgccuguaagcucaaacugugcgggguucuuggacugcgccucauggacggcaccuggguggcuauucaaacauccgaugaaacgaagugguguccucccgaccagcuggugaaccugcacgacuuccauagcgaugagaucgagcaccucgucguggaggaacugguuaaaaagagagaagagugccuugacgcccuggaauccauuaugaccacaaaaucugugagcuuccggcgccucucccaucugagaaaacuuguccccggcuuugggaaggcguacaccaucuucaauaagacacugauggaggccgaugcucacuauaagagcgugcggaccuggaacgagaucauuccgucuaaaggaugccuccgcguuggcgggagaugucacccccaugugaauggagucuuuuucaacggcaucauucuggggccugacggacacgugcugauccccgaaaugcaguccagccuccugcagcaacauauggagcuucuggaaucuagcgucauuccucucaugcacccccuggccgauccguccacgguguuuaagaauggcgacgaggcugaagauuucguugaggugcaucuuccugacguccacaaacaggugucuggcguugaucuggggcuccccagcuggggaaaguacgugcugauguccgccggcauccugacagcgcucaugcugaugaucuuucuuaugaccugcugucggagaaccaaccgcagcgagucuauucagcacucccugggggaaacaggacggaaggucagcgugaccucucaguccggcagagugaucagcuccugggagucuuauaaaagcgggggcgaaacaaagcucuga

SEQ ID NO: 223459 - RNA, 1575 nt, Artificial Sequence
  derived and/or modified CDS sequence (opt5) from glycoprotein__RABV__JQ950449.1
augaucccccaggccuuccuguuugugccucuccuggucguuccgcuuugcuucggcaaguuucccauuuacaccaucccugacaaacuggggcccuggagcccuauugauauccaccaucucuccugucccaacaaucuggugguggaggacgaaggaugcacaaaccuuucuggcuucagcuauauggagcugaaggucggguacauuuccgcuaucaaagugaauggauuuacguguaccggcguugugacagaagccgagaccuauacaaacuucgucggguacgugaccacaaccuuuaagagaaaacacuuccggccuacgccggaugcgugccgcucugcuuauaauuggaagauggccggagaccccagauacgaagagagccuccauaacccuuaucccgauuaccacuggcugcggaccguuaagacaaccaaagaguccuuugugaucauuucuccuagcgucgccgaccuggaucccuacgacaagucccuccauagccgcguguucccgagaggcaaauguucuggcaugacaguguccagcaccuauugcccuacgaaucacgauuacacaaucuggaugcccgaaaacccucggcuggggaccucuugugacauuuuuacaaauucccgcggaaagagagcuuucaaaggcagcaagaccugcggguuugucgaugagcggggacuuuauaagucucugaaaggcgccuguaagcucaaacugugcgggguucuuggacugcgccucauggacggcaccuggguggcuauccaaacauccgaugaaacgaagugguguccucccgaccagcuggugaaccugcacgacuuccauagcgaugagauugagcaccucgucguggaggaacugguuaaaaagagagaagagugccuugacgcccuggaauccaucaugaccacaaaaucugugagcuuccggcgccucucccaucugagaaaacuuguccccggcuuugggaaggcguacaccauuuucaauaagacacugauggaggccgaugcucacuauaagagcgugcggaccuggaacgagaucaucccgucuaaaggaugccuccgcguuggcgggagaugucacccccaugugaauggagucuuuuucaacggcauuauccuggggccugacggacacgugcugauucccgaaaugcaguccagccuccugcagcaacauauggagcuucuggaaucuagcgucaucccucucaugcacccccuggccgauccguccacgguguuuaagaauggcgacgaggcugaagauuucguugaggugcaucuuccugacguccacaaacaggugucuggcguugaucuggggcuccccagcuggggaaaguacgugcugauguccgccggcauucugacagcgcucaugcugaugaucuuucuuaugaccugcugucggagaaccaaccgcagcgagucuauccagcacucccugggggaaacaggacggaaggucagcgugaccucucaguccggcagagugauuagcuccugggagucuuauaaaagcgggggcgaaacaaagcucuga

SEQ ID NO: 223460 - RNA, 1575 nt, Artificial Sequence
  derived and/or modified CDS sequence (opt5) from glycoprotein__RABV__JX088694.1
auggugccccaggcccuccuguucgucccucugcuugcuguuccgcugugcuuuggcaaguuccccaucuacaccauuccugacaaacucgggcccuggagcccuaucgauauucaccaucuguccugucccaacaaucuugugguggaggacgaaggaugcacaaaccugucuggcuuuagcuauauggagcucaaggucggguacaucuccgccauuaaagugaauggauucacguguaccggcguugugacagaagcggagaccuauacaaacuuugucggguacgugaccacagcuuucaagagaaaacacuuucggccuaccccggaugccugccgcucugccuauaauuggaagauggcuggagaccccagauacgaagagagccugcauaacccuuaucccgauuaccacuggcugcggacgguuaagaccacaaaagaguccuucgugaucaucucuccuagcgucgccgaccucgaucccuacgacaagucccugcauagccgcguguuuccgagaggcaaauguucuggcauuaccguguccagcacauauugcucuaccaaucacgauuacacgaucuggaugccugaaaacccccggcuugggacauccugugacauuuucaccaauagccgcggaaagagagcuucuaaaggcuccaagacaugcggguuugucgaugagcggggacuguauaagagccucaaaggcgccuguaagcugaaacuuugcgggguucugggacuccgccugauggacggcaccuggguggcgauccaaaccuccgaugaaacaaagugguguccucccgaccagcuggugaaccuccacgacuuccauucugaugagauugagcaccuggucguggaggaacuuguuaaaaagagagaagagugccuggacgcccucgaaagcaucaugacgaccaaauccgugagcuuucggcgccugucucaucuuagaaagcugguccccggcuucgggaaggcuuacacaauuuucaauaaaacccucauggaggccgaugcucacuauaaguccgugcggacauggaacgagaucaucccuagcaaaggaugccugcgcguuggcgggagaugucacccgcaugugaauggagucuuuuucaacggcauuauccuggggcccgacggacacgugcucauuccugaaaugcagucuagccugcuucagcaacauauggagcugcucgaauccucugucaucccccugaugcacccucuugccgaucccagcaccguguuuaaggacggcgaugaggcggaagacuucguugaggugcaucugccggauguccacaaacagguguccggcguugaccucgggcugccuagcuggggaaaguacgugcugaugucugccggcauucucacggcucugaugcuuaugaucuuucugaugacaugcugucggagaaccaaucgcgccgaguccauccagcacagccucggggaaaccggacggaaggucucugugacaucccagaacggcagagugauuagcuccugggagucuuauaaaagcgggggcgaaaccaagcuguga

SEQ ID NO: 223461 - RNA, 1575 nt, Artificial Sequence
  derived and/or modified CDS sequence (opt5) from glycoprotein__RABV__JX473838.1
auggugccccaggcccugcuguucaucccucugcuugucuuuccgcugugccucggcaaguuccccauuuacaccaucccugacaaacuggggcccuggagcccuauugauauccaccaucuuuccugucccaacaaucugguuguggaggacgaaggaugcacaaaccucucuggcuuuagcuauauggagcugaaggugggguacauuuccgcuaucaaagucaauggauucacguguaccggcgugguuacagaagccgagaccuauacaaacuuugugggguacgucaccacaaccuucaagagaaaacacuuucggccuaucccggaugcgugccgcgcugccuauaauuggaagauggccggagaccccagauacgaagagucucugcauaacccuuaucccgauuaccacuggcuccggacggugaagaccacaaaagagagccugguuauuaucuccccuucuguggcugaccuugaucccuacgacaagagccugcauucccgcauuuucccgagcggcaaauguucuggcaucaccgucuccagcacauauugcucuaccaaucacgauuacacgauuuggaugccugaaaaccccagacucgggacauccugugacaucuuugccaauagccggggaaagcgcgcuucuaaaggcgggaagaccugcggacugguggaugagagaggccuuuauaagucccugaaaggggccuguaagcucaaacugugcggagugcugggccuccggcugauggacggcacaugggucgcgaugcaaaccagcgaugaaaccaagugguguccucccgaccagcuuguuaacaugcacgacuuccgcuccgaugagauugagcaucuggugguggaggaacucgucaaaaagagagaagagugccuggacgcccuugaaucuaucaugacaacgaaaagcguguccuuucggcgccugagccaccucagaaagcugguucccggguucggaaaggcuuacaccaucuuuaauaaaacacugauggaggccgaugcucauuauaagucugugcggaccuggaacgagauuaucccuuccaaaggcugccuccgcgucgggggaagaugucacccgcacgugaauggcguuuucuucaacgggauuauccugggacccgacggccaugugcuuauuccugaaaugcagagcucucugcuccagcaacacauggagcugcuugaaagcuccgucaucccccugaugcauccucucgccgaucccucuacaguguuuaaggacggcgaugaggcggaagacuucgucgaggugcaccucccggauguucauaaacaggugagcggggucgaccugggacucccuaauuggggcaaguacgugcugcuuuccgccgggacccugaucgcucucaugcugauuaucuuucugaugacgugcugucggagaguuaaccgccccgagagcacacagcggucucuuggaggcgccgggagacgcguguccgucaccagccagucuggcaaggugauuuccagcugggaauccuauaaaucuggaggcgagacccggcucuga

SEQ ID NO: 223462 - RNA, 1575 nt, Artificial Sequence; identical to SEQ ID NO: 223461
  derived and/or modified CDS sequence (opt5) from glycoprotein__RABV__JX473839.1

SEQ ID NO: 223463 - RNA, 1575 nt, Artificial Sequence
  derived and/or modified CDS sequence (opt5) from glycoprotein__RABV__JX473840.1
auggugcccagagcccugcuguucaucccucugcuugucuuuagccugugcuucggcaaguuuccgauuuacaccauccccgacaaacucgggccuuggaaccccauugauauccaccaucuguccuguccuaauaaccuuguuguggaggacgaaggaugcacaaaucugucuggcuucagcuauauggagcucaaggugggguacauuuccgcuaucaaagucaacggauuuacguguaccggcgugguuacagaagccgagaccuauacaaauuucgugggguacgucaccacaaccuuuaagcggaaacacuuccgccccaucccugauacgugcagagcggcuuauaacuggaagauggccggagacccgcgguacgaagagucucugcauaaucccuauccugauuaccacuggcugcgcaccgugaagacaaccaaagagagccucguuauuaucucccccucuguggccgaccuggauccuuacgacaagagccuucauuccagaauuuuucccagcggcaaauguucuggcaucacagucuccagcaccuauugcucuacgucccacgauuacacaauuuggaugccggaaaacccucggcuggggaccagcugugacaucuucgcuaauucucgcggaaagagagccuccaaaggcgggaagacaugcggacucguggaugagcggggccuguauaagagccuuaaaggggcuuguaagcugaaacucugcggagugcugggccugcgccucauggacggcaccugggucgccaugcagaccuccgaugaaacaaaguggugucccccugaccaacugguuaacaugcacgacuuuagaucugaugagauugagcaucuugugguggaggaacuggucaaaaagcgggaagagugccucgacgcgcuggaaagcaucaugacgaccaaauccgugagcuuccgcagacuuucucaccuccggaagcucguucccggguuuggaaaggccuacacaaucuucaauaaaacccugauggaggcugaugcccauuauaaguccgugcgcacauggaacgagauuauccccagcaaaggcugccugagagucgggggacggugucacccucacgugaauggcguuuucuuuaacgggauuauccucggaccggacggccaugugcugauucccgaaaugcagucuagccuucugcagcagcacauggagcuccuggaauccucugucaucccucuuaugcauccccuggcugauccuagcaccguguucaaggacggcgaugaggccgaagacuuugucgaggugcaccuccccgauguucauaaacaaguguccggggucgaccugggacugccgaauuggggcaaguacgugcuccugagcgcggggacgcuuaucgcccugaugcucaugauuuuccugaugacaugcuguagacgcguuaaccggccugagucuacccagagaucccugggaggcgcugggcgccgggugagcgucaccucucaguccggcaaggugaucagcuccugggaaucuuauaaaagcggaggcgagacaagacuuuga

SEQ ID NO: 223464 - RNA, 1575 nt, Artificial Sequence
  derived and/or modified CDS sequence (opt5) from glycoprotein__RABV__JX473841.1
auggugccccaggcccuccuguucaucccucugcuugucuuuagccugugcuucggcaaguuuccgauuuacaccauccccgacaaacucgggccuuggaaccccauugauauccaccaucuguccuguccuaauaaccuuguuguggaggacgaaggaugcacaaaucugucuggcuucagcuauauggagcucaaggugggguacauuuccgcuaucaaagucaacggauuuacguguaccggcgugguuacagaagccgagaccuauacaaauuucgugggguacgucaccacaaccuuuaagagaaaacacuuccggcccaucccugauacgugccgcgcggcuuauaacuggaagauggccggagacccgagauacgaagagucucugcauaaucccuauccugauuaccacuggcugcggaccgugaagacaaccaaagagagccucguuauuaucucccccucuguggccgaccuggauccuuacgacaagagccuucauucccgcauuuuucccagcggcaaauguucuggcaucacagucuccagcaccuauugcucuacgucccacgauuacacaauuuggaugccggaaaacccuagacuggggaccagcugugacaucuucgcuaauucucggggaaagcgcgccuccaaaggcgggaagacaugcggacucguggaugagagaggccuguauaagagccuuaaaggggcuuguaagcugaaacucugcggagugcugggccugcggcucauggacggcaccugggucgccaugcaaaccuccgaugaaacaaaguggugucccccugaccagcugguuaacaugcacgacuuucgcucugaugagauugagcaucuugugguggaggaacuggucaaaaagagagaagagugccucgacgcgcuggaaagcaucaugacgaccaaauccgugagcuuccggcgccuuucucaccugagaaagcucguucccggguuuggaaaggccuacacaaucuucaauaaaacccugauggaggcugaugcccauuauaaguccgugcggacauggaacgagauuauccccagcaaaggcugccugcgcgucgggggaagaugucacccucacgugaauggcguuuucuuuaacgggauuauccucggaccggacggccaugugcugauucccgaaaugcagucuagccuucugcagcaacacauggagcuccuggaauccucugucaucccucuuaugcauccccuggcugauccuagcaccguguucaaggacggcgaugaggccgaagacuuugucgaggugcaccuccccgauguucauaaacagguguccggggucgaccugggacugccgaauuggggcaaguacgugcuccugagcgcggggacgcuuaucgcccugaugcucaugauuuuccugaugacaugcugucggagaguuaaccgcccugagucuacccagcggucccugggaggcgcugggagacgcgugagcgucaccucucaguccggcaaggugaucagcuccugggaaucuuauaaaagcggaggcgagacacggcuuuga

SEQ ID NO: 223465 - RNA, 1575 nt, Artificial Sequence
  derived and/or modified CDS sequence (opt5) from glycoprotein__RABV__JX871837.1
augaucccccaggcccuccuguucgugccucugcuuauuccgagccugugccucggcaaguuucccaucuacaccauuccugacaaacuggggcccugguccccuaucgauauucaccaucuuucuugucccaacaaucuggucguugaggacgaaggaugcacaagccucuccggcuucucuuauauggagcugaaggugggguacaucagcgcuaucaaagugaacggauuuacguguaccggcgucgugacagaagccgagaccuauacaaauuucguuggguacgugaccacaaccuuuaagagaaaacacuuccggccuaugccggaugcgugccgcgcugcccaugacuggaagauugccggagaucccagauaugaagacucccugcaaaacccuuaccccgauuaucacuggcuccggacggucaagaccacaaaagagucucuggugaucauuagcccuuccguugcugagcuugaccccuacgauaagagccugcauucucgcguguuuccguccggcaaaugucucggcaucaccgucagcucuacauacugcuccaccaaucacgacuauacgauuuggaugccuguggaagccagacuggggacaagcugugauaucuucaccaacucucggggaaagaaggcuuccaaaggcgggcgcacaugcggauuuguggacgagagaggccuuuacaagagccugaaaggggccuguaagcucaaacugugcggaguccccggccugcggcucauggauggcaccuggguuuccauucagaccucugacgacaucaagugguguccucccgaucagcuggugaaucuucacgacuuccauagcgaugaaaucgagcaccugguggucgaggaacucauuaaaaagcgcgaggggugccuggacgcgcuugaauccaucaugacaacgaaaagcgugucuuuuagacggcugucccaucuccgcaagcugguucccggauucggcaaggccuauaccauuuuuaacaauacacugauggaggcugaugcccacuacaaaagcgugagaaccuggaacgaagucaucccuucuaaggggugccucaaagugggaggccggugucacccgcccguuaaugggguguucuucaacggaauuauccugggcccugacggcaauguccuuauccccgagaugcagagcucccugcuccaacagcauauggagcugcuugaaucuagcgugauuccucugaugcacccccucgcugauccguccacagucuuuaaggacggggaugaggccgaagacuucguggagguucaucugccugaugugcacaaacaggucagcgacguggaccugggacuccccucuuggggcaaguaucugcuuauguccgcggggguucuggccacccucauccuggcuauuuuucugaucacgugcugucgcagagccaaccggacagaaagcacccagagaggacaucgcgagucuggcgggaagguguccgucgcuccucaaaauggcaaaauuaucagcuccugggagcuuuacaagucugaaagcgagaccggaauguga

SEQ ID NO: 223466 - RNA, 1575 nt, Artificial Sequence; identical to SEQ ID NO: 223321
  derived and/or modified CDS sequence (opt5) from glycoprotein__RABV__JX871838.1

SEQ ID NO: 223467 - RNA, 1575 nt, Artificial Sequence; identical to SEQ ID NO: 223321
  derived and/or modified CDS sequence (opt5) from glycoprotein__RABV__JX871839.1

SEQ ID NO: 223468 - RNA, 1575 nt, Artificial Sequence
  derived and/or modified CDS sequence (opt5) from glycoprotein__RABV__JX871840.1
augaucagccagacccuccuguucgugccccugcuuauuuccucucugugcuuuggcgaguucccuaucuacacaauuccggaaaagcucgggcccuggagcccuaucgacauucaccaucuguccugucccaacaaucuugucguugaggaugaaggaugcaacucucugagcggcuuuuccuauauggagcucaaagugggguacaucucuagcaucaaggugaauggauucacguguaccggcgucgugacagaagccgagaccuauacaaacuuuguuggguacgugaccacaaccuucaaaagaaagcacuuucggccuaugcccgacgcuugccgcgccgcguauaauuggaaaauguccggagauccuagauacgaggaaagccugcauaacccguaucccgacuaccacuggcugcggacggucaagaccacaaaggagucucucgugauuaucuccccuagcguugcugaucuggaccccuacgauaaaucucuucauucccgcguguucagcggcggcaagugucuggggauuaccaucucuuccacauauugcagcaccaaucacgacuacacgcucuggaugccugaagaggccagacugggaacauccugugauauuuuuaucaacucuaaaggcaagcgggccagcaaagggggaagaaccugcggcuucgucgacgagcgcgggcuuuauaagucccugaagggagcuuguaaacucaagcugugcggcgugcccggccugcggcucauggaugggacaugggugagcauucaaaccucugacgaaaccaaaugguguccgccugaucagcuggucaauauccacgacuuucgcuccgacgagaucgaacaucuuguuguggaggaacuggugaagaaaagagaggagugccucgaugcccuggacagcauuaugacaacgaagucugucagcuuccggcgccuuucccaccugagaaaacucgugcccggauuuggcaaggcuuacaccaucuucaacaagacacugauggaagccgaugcgcauuauaaaucuguucggaccuggaaugaggugauuccuagcaaggggugccuguccgucggaggccgcugucacccccacguggacgggguuuucuuuaacggaaucauucucggccccgauggcagcgugcugaucccugaaaugcagucuucccuucugcagcaacauauggagcuccuggaaagcucugucaucccgcuuaugcacccccuggccaauccuuccacaguguucaaagacggggaugaggcugaggacuuugucgaagugcaucuccccgauguucaggaacaggugagcggagucgaccugggccugccuaacugggggaaguacaugcucauguccgccggagcucuggccauucuucugcucaccaucuuccugaugacgugcuguagacgggcgaauagaacaaaaucuauucgccagggccccgaagagagccggagaaagguguccguuccgccucaaucugggaaggugaucagcuccugggagagcuuuaaaucuggcggagagaccggccuguga

SEQ ID NO: 223469 - RNA, 1575 nt, Artificial Sequence
  derived and/or modified CDS sequence (opt5) from glycoprotein__RABV__JX871841.1
augaucccccaggcccugcuguucgugccucugcuuauuccgagccugugccucggcgaguuucccaucuacaccauuccugacaagcuggggcccugguccccuaucgauauucaccaucuuucuugucccaacaaucuggucgcugaaaacgacggaugcacaagccucuccggcuucucuuauauggagcugaaaguuggguacaucagcgccaucaaggugaauggauuuacguguaccggcguggucacagaagcggagaccuauacaaacuucgugggguacguuaccacaaccuuuaaaagaaagcacuuccggccuacgccggaugcuugccgcgccgcccaugacuggaaaauggcuggagaucccagauaugaagccucccugcaaaauccuuaccccgacuaucacuggcuccggaccgugaagacaaccaaggagucucuggucauuaucagcccuuccguggcugaucuugaccccuacgauaaaagccugcauucucgcguuuuuccguccggcaagugucucggcauuacagugagcucuaccuacugcuccacgaaccacgacuauacaaucuggaugccugucgagcccagacuggggaccagcugugauauuuucacaaauucucggggaaaacgcgccuccaagggcgggagagugugcggauuuguggacgaacggggccuuuacaaaagccugaagggggcgugucgccucaagcugugcggagucccuggcaucagacugcucgauggcaccuggguuuccauucagaccucugaggacaucaaaugguguccucccgaccggcuggugaaccuucacgauuuccauagcgacgaaaucgagcaccugguggucgccgagcucauuaagcgcagagaaaauugccuggaugcucuugaguccaucaugacaacgaaaagcgugucuuuucggcgccugucccaucucagaaagcugguucccggguucggaaaagccuauaccauuuuuaacaagacacugauggaagcugacgcccacuacaaaagcgugaagaccuggaaugaggucaucccgucuaagggcugccucgaaguugggggacggugucacccccaugugaacggcguguucuucaaugggauuauccugggaccugauggcaacguccuuauccccgagaugcagagcucccugcuccagcaacacauggagcugcuugaaucuagcgugauuccucugaugcauccccucgcggacccguccacagucuuuaaagagggcgaugaagccgaggacuucguggaaguucaccucccugaugugcauaagcaggucagcgacguggaucuggggcuccccucuuggggaaaauaucugcuuaucuccgcuggcgcccuggcuauucucauccuggccauuguucugaucaucugcuguagaaaggugaauaaaaccgggagcacgcagcgcggacaccgggagucuggcgggaagauguccgucgugccucagaacggcaagauuaucagcuccugggagcuuuacaaaucugaaagcgagacaggacucuga

SEQ ID NO: 223470 - RNA, 1575 nt, Artificial Sequence
  derived and/or modified CDS sequence (opt5) from glycoprotein__RABV__JX871842.1
augaucccccaggcccuccuguucgugccuuuucuguucccgagccuuugccugggcaaguuucccauuuacaccaucccugagaaacucgggcccugguccccuauugacauccaccaucugucuugucccaacaaucuugucguugaagaugagggaugcgacagccuguccggcuucucuuauauggaacucaaggugggguacauuagcgcuaucaaagugaacggauuuacauguacgggcgucgugaccgaggccgaaacauauaccaauuucguuggguacgugacaaccacauuuaagagaaaacacuuccggccuaugccggaugcgugccgcgcugccuauaacuggaagaccgccggagaccccagauacgaggagucccugcauaauccuuaucccgauuaccacuggcugcggacggucaagaccacaaaagaaucucucaucauuaucagcccuuccguggcugaccuggaucccuacgacaagagccuucauucucgcguuuuuccgggcggcaaaugucuggggauuaccguguccagcacauauugcucuaccaaccacgauuacacgaucuggaugccugaggaagccagacucggaacauccugugacauuuucaccaauagcaagggcaaacgggcuucuaaagggggacgcacaugcggcuuugucgaugagagagggcuguauaagucccuuaagggagccuguaagcugaaacucugcggcgugcccggccugcggcugauggacgggaccuggguggcgauccaaaccccuggagagacaaagugguguagccccgaucagcucgucaaccugcacgacuuccgcuccgacgaaauugagcaucuuguuguggaggaacugaucaaaaagagagaagagugccucgaugcccuggacucuaucaugacgaccaaaagccuuuccuuuggccggcugagcaaucuccgcaagcuggugcccggguucggaaaggcuuacacaauuuucaacaaaacccugauggaggccgaugcucacuauaagucuuuuagaacaugggacgaaaucauuccuuccaaaggcugccuccgggucgggggacgcugucauccgcacgugaauggcguuuucuuuaacggcaucauucuggggcccgauggacacgugcuuaucccugagaugcagagcucucugcuccagcaacauauggaacugcuugagagcuccgucaucccccugauucacccucucgccgaccccucuaccguguucaaggauggcgacgaagcggaggauuuuguugaggugcaucugccggacguccacaaacaggugagcggggucgaucugggacucccuaauuggggcaaguacgugcugaugggggccggcguucuugcuacggugauccugacaauuuuccuccugaccugcuguagacgggucaacagaaccaagcccaaacagcagucccuggaagagagcggacgcaaggugucuguuacaccucaaaauggcaaagugauguccagcugggaauauuacaagucugaggggcggaccucccuuuga

SEQ ID NO: 223471 - RNA, 1575 nt, Artificial Sequence
  derived and/or modified CDS sequence (opt5) from glycoprotein__RABV__JX871844.1
augaucccccaggcccuccuguucgugccucugcuuauuccgagccugugccucggcaaguuucccaucuacaccauuccugacaaacuggggcccugguccccuaucgauauucaccaucuuucuugucccaacaaucuggucguugaggacgaaggaugcacaagccucuccggcuucucuuauauggagcugaaggugggguacaucagcgcuaucaaagugaacggauuuacguguaccggcgucgugacagaagccgagaccuauacaaauuucguuggguacgugaccacaaccuuuaagagaaaacacuuccggccuaugccggaugcgugccgcgcugcccaugacuggaagauugccggagaucccagauaugaagacucccugcaaaacccuuaccccgauuaucacuggcuccggacggucaagaccacaaaagagucucuggugaucauuagcccuuccguugcugaccuugaucccuacgacaagagccugcauucucgcguguuuccguccggcaaaugucucggcaucaccgucagcucuacauacugcuccaccaaucacgauuauacgauuuggaugccuguggaggccagacuggggacaagcugugacaucuucaccaacucucggggaaagaaggcuuccaaaggcgggcgcacaugcggauuuguggaugaaagaggccuuuacaagagccugaaaggggccuguaagcucaaacugugcggaguccccggccugcggcucauggacggcaccuggguuuccauucagaccucugacgauaucaagugguguccucccgaccagcuggugaaucuucacgauuuccauagcgacgagaucgaacaccugguggucgaggagcucauuaaaaagcgcgaagggugccuggaugcgcuugaguccaucaugacaacgaaaagcgugucuuuuagacggcugucccaucuccgcaagcugguucccggauucggcaaggccuauaccauuuuuaacaauacacugauggaagcugacgcccacuacaaaagcgugagaaccuggaacgaggucaucccuucuaaggggugccucaaagugggaggccggugucacccgcccguuaaugggguguucuucaacggaauuauccugggcccugauggcaauguccuuauccccgaaaugcagagcucccugcuccaacagcauauggagcugcuugagucuagcgugauuccucugaugcaccccuccgcugacccgagcacagucuuuaaggauggggacgaagccgaggauuucguggaaguucaucucccugacgugcacaaacaggucucugacguggaucugggacugcccuccuggggcaaguaucuccugaugagcgcgggggcccuugcuacccugauccucgccauuuuucugaucacgugcugucgcagagcuaaccggacagagucuacccagagaggacaucgcgaauccggcgggaagguuagcguggccccucaaaauggcaaaauuaucuccucuugggagcuguacaagagcgaguccgaaaccggaauguga

SEQ ID NO: 223472 - RNA, 1575 nt, Artificial Sequence; identical to SEQ ID NO: 223351
  derived and/or modified CDS sequence (opt5) from glycoprotein__RABV__JX871846.1

SEQ ID NO: 223473 - RNA, 1575 nt, Artificial Sequence
  derived and/or modified CDS sequence (opt5) from glycoprotein__RABV__JX871847.1
augaucccccaggcccuccuguucgugccucugcuuauuccgagccugugccucggcgaguuucccaucuacaccauuccugacaagcuggggcccuggacaccuaucgauauucaccaucuuuccugucccaacaaucuggucgcugaaaacgacggaugcacgucucucagcggcuucuccuauauggagcugaaaguuggguacaucucugccaucaaggugaauggauuuaccuguacaggcguggucaccgaagcggagacauauaccaacuuccugggguacgugacaaccacguuuaaaagaaagcacuuccggccuaugccggaugcuugccgcgccgcccaugacuggaaaauggcuggagaucccagauaugaagacagccuccaaaauccuuaccccgauuaucacuggcugcggaccguuaagacaaccaaggagucccuugugauuaucucuccuagcgucgccgaccuggaucccuacgacaaaucccuccauagccgcguguuuccgucuggcaagugucugggcauuacaguuuccagcaccuacugcucuacgaaccacgauuauacaaucuggaugccuguggagcccagacuugggaccuccugugacauuuucacaaauagccggggaaaacgcgcuucuaagggcgggagagucugcggauuuguggaugaacggggccuguacaaaucccucaagggggccuguaagcugaaacugugcggagugccuggcauccgccucauggacggcaccugggucagcauucagaccuccgaggacaucaagugguguccucccgauagacugguuaaccuucacgacuuccauucugaugaacuggagcaccucgugguggaggaacugaucaaacggcgcgagaauugccuugacgcgcuggaaagcauuaugacaacgaaguccgucagcuuuagacggcucucucaucugcgcaaacuggugcccggguucggaaaggccuauaccaucuuuaacaaaacacucauggaggcugaugcccacuacaaguccguuaagaccuggaaugaagugauuccgagcaaaggcugccuggaggucgggggaaagugucaucccccugugaacggcguuuucuucaaugggaucauucuuggacccgacggcaacgugcugaucccugagaugcagucuagccuccugcagcaacacauggaacuucuggaguccucugucaucccccucaugcacccgcuggcugauccuagcacaguguuuaaagaaggcgacgaggccgaagauuucgucgaggugcaucugcccgacguucacaaacagguguccgaugucgaccucgggcugccuagcuggggaaaguaucuucugaugucugcgggcgcccucgcuauucugauccuggccauugugcuuaucauuugcugugggagaguuaauaagaccggauccacgcagcggggccauagagagagccgcgggaagaugucuguggcuccccagaacggcaaaaucaucuccagcugggaacucuacaaguccgagucugaaacaggacuguga

SEQ ID NO: 223474 - RNA, 1575 nt, Artificial Sequence
  derived and/or modified CDS sequence (opt5) from glycoprotein__RABV__JX871848.1
augaucccccaggcccugcuguucgugccucugcuuauuagcucccugugccucggcgaguuuccgaucuacaccauucccgaaaagcuggggccuuggucucccaucgacauucaccaucuuagcuguccuaacaaucuggucguugaggaugaaggaugcaacucccucucuggcuucagcuauauggagcugaaagugggguacaucuccucuaucaaggugaauggauuuacauguacgggcgucgugaccgaagcugagacauauaccaacuucguuggguacgugacaaccacauuuaaaagaaagcacuuccggcccaugccugacgccugccgcgcggcuuauaauuggaaaaugagcggagauccgagauacgaggaaucccugcauaaccccuauccugacuaccacuggcuccggaccgucaagacgaccaaggagagccuggugauuaucucucccuccguugccgaucuugacccuuacgauaaaagccugcauucucgcguguuuuccggcggcaagugucucgggauuacagucagcucuaccuauugcuccacaaaucacgacuacaccaucuggaugcccgaagaggccagacugggaacgagcugugauauuuucacaaacuccaaaggcaagcgggcuucuaaagggggaaagaccugcggcuuuguggacgagcgcgggcuuuauaagagccugaaaggagccuguaagcucaaacugugcggcgugccgggccugagacucauggaugggacaugggucuccauccaaaccagcgacgaaaccaagugguguccucccgaucagcugguuaauauucacgacuuccggucugacgagaucgaacaucuugugguggaggaacuggucaaaaagcgcgaggagugccucgaugcucuggaauccaucaugacaacgaaaagcgugucuuuuagacggcuuagccaccuccgcaagcucguuccuggauucggcaaggccuacaccauuuuuaacaaaacacugauggaggcggacgcccauuauaaguccgugagaaccuggaaugaagucauccccucuaaagggugccugagcgugggaggccggugucacccccacguugaugggguguucuucaacggaauuauccucggcccugacggcuccguccugauuccggagaugcagagcucucuucugcagcaacauauggaacuccuggaguccagcgugaucccccuuaugcacccucuggcuaaucccucuacagucuuuaaggauggggacgaggccgaagauuucguggagguucaucucccugacgugcaggaacaggucuccggaguggaucugggccugcccaacugggggaaauacguucucaugagcgcuggagcccuggcggugcuucugcucaccaucuuucugaugacgugccgcagacgggccaauagaacaaacuccauucagcaaggcccgggggagucuggccgcaagaucagcgucccuccccagaacggaaaggugauuuccucuugggagagcuucaaauccggcggggaaaccggacuguga

SEQ ID NO: 223475 - RNA, 1575 nt, Artificial Sequence
  derived and/or modified CDS sequence (opt5) from glycoprotein__RABV__JX871849.1
augaucccccaggcccugcucagcgugccucugcuuauuuccucucugugcuucggcaaguuuccgaucuacaccauucccgagaaacucgggccuuggagccccaucgacauucaccaucuguccuguccuaacaaucuugucguugaagaugagggaugcaacucucugagcggcuucuccuauauggaacucaaggugggguacaucucugcuaucaaagugaauggauuuacauguacgggcgucgugaccgaggccgaaacauauaccaacuucguuggguacgugacaaccacauuuaagagaaaacacuuccggcccaugagcgacgcgugccgcgcugccuauaauuggaagaccgccggagauccuagauacgaggagucccugcauaacccguaucccgacuaccacuggcugcggacggucaagaccacaaaagaaagccucauuaucauuucuccuuccguggcugaucuggaccccuacgauaagagccuucauucucgcaucuuuccuggcggcaaaugucuggggauuaccaucuccagcacauauugcucuaccaaucacgacuacacgauuuggaugcccgaggaagccagacucggaacauccugugauaucuucaccaacagcaagggcaaacgggcuuccaaagggggacgcacaugcggcuuuguugacgagagagggcuguauaagucucuuaagggagccuguaagcugaaacucugcggcgugccgggccugcggcugauggaugggaccugggucgcgauccaaaccccuaaugagacaaagugguguagccccgaccagcucgugaacgugcacgauuuccgcuccgacgaaauugagcaucuggucguugaggaacuuaucagaaaacgggaagagugccuggacgcccucgagagcauuaugacgaccaagucuguguccuuucgcagacugagcaaucuucggaaacuggugccuggauucggcaaggcuuacacaaucuuuaacaagacccucauggaagccgaugcucacuauaaaucuguccgcacauggaaugagauuauccccagcagagggugccugaaggugggaggccggugucauccccacguuaacgggguguucuucaauggaaucauucugggcccugacggccacauccucauuccggaaaugcaguccucucugcuucagcaacauauggagcugcucgaaagcuccgucaucccccugauucacccucuugccgaucccagcaccguguuuaaagacggggaugaggcggaggacuucguugaagugcaucugccugauguccaccaacaggugucuggagucgaccucggccugcccgauugggggaaguacgugcugauguccgccggagcucucgccacgguuaugcugacaaucuuucuuauuaccugcuguagacgcgugaaacggaccgagagcauccagcagggccugggggaaucuggcagaaaggucuccgugacaccgcagaacggaaagguuaugagcuccugggaguauuacaaaucuggcgggggaacccgccucuga

SEQ ID NO: 223476 - RNA, 1575 nt, Artificial Sequence
  derived and/or modified CDS sequence (opt5) from glycoprotein__RABV__JX871853.1
augaucagccaggcccuccuguucgugccccugcuuauuccuucccugugccucggcaaguuuccgaucuacaccauucccgacaaacuggggccuuggucucccaucgauauucaccaucuuagcuguccuaacaaucuggucguugaggacgaaggaugcacaucccucucuggcuucagcuauauggagcugaaggugggguacaucuccgccaucaaagugaacggauuuacguguaccggcgucgugacagaagccgagaccuauacaaauuucguuggguacgugaccacaaccuuuaagagaaaacacuuccggcccaugccugaugcgugccgcgcugcccaugacuggaagauugccggagauccgagauaugaagacucucugcaaacgcccuacccugauuaucacuggcuccggaccgucaagacaaccaaagagagccuggugaucauuucccccagcguugcugaccuugauccuuacgacaagucucugcauucccgcguguuucccagcggcaaaugucucggcaucacagucucuuccaccuacugcagcacgaaccacgauuauacaauuuggaugccgguggaggccagacuggggaccucuugugacaucuucacaaauucccggggaaagaaagcuagcaagggcgggagaaccugcggauuuguggaugaacgcggccuuuacaagucccugaaaggggccuguaagcucaaacugugcggagucccuggccugcggcucauggacggcaccuggguuucuauucagacaagcgacgauaucaaguggugucccccugaccagcuggugaaccuucacgauuuccauuccgacgagaucgaacaccugguggucgaggagcucauuaaaaagcgcgaagggugccuggaugcgcuugagagcaucaugacgaccaaaucuguguccuuuagacggcugagccaucuccgcaagcugguucccggauucggcaaggccuauacaauuuuuaauaacacccugauggaagcugacgcccacuacaaaucugugagaacauggaaugaggucauccccagcaaggggugccucaaagugggaggccggugucacccuccgguuaacgggguguucuucaauggaauuauccugggccccgauggcaacguccuuaucccugaaaugcaguccucucugcuccaacagcauauggagcugcuugagagcuccgugauuccccugaugcacccucucgcugaccccagcaccgucuuuaaggauggggacgaagccgaggauuucguggaaguucaucugccggacgugcacaaacaggucucugacguggaucugggacucccuuccuggggcaaguaucugcuuaugagcgcgggggcccuggcuacgcucauccuggccauuuuucugaucacaugcugucgcagagcuaaucggaccgagucuacccagagaggacaucgcgaauccggcgggaagguuagcguggcuccccaaaacggcaaaauuaucuccucuugggagcuuuacaagagcgaguccgaaacaggaauguga

SEQ ID NO: 223477 - RNA, 1575 nt, Artificial Sequence
  derived and/or modified CDS sequence (opt5) from glycoprotein__RABV__JX871854.1
augaucccccaggcccuccucuucgugccuuuucuguucccgagccuuugccugggcaaguuucccauuuacaccaucccugagaaacucgggcccugguccccuauugacauccaccaucugucuugucccaacaaucuugucguugaagaugagggaugcgacagccuguccggcuucucuuauauggaacucaaggugggguacauuagcgcuaucaaagugaacggauuuacauguacgggcgucgugaccgaggccgaaacauauaccaauuucguuggguacgugacaaccacauuuaagagaaaacacuuccggccuaugccggaugcgugccgcgcugccuauaacuggaagaccgccggagaccccagauacgaggagucccugcauaauccuuaucccgauuaccacuggcugcggacggucaagaccacaaaagaaucucucaucauuaucagcccuuccguggcugaccuggaucccuacgacaagagccuucauucucgcguuuuuccgggcggcaaaugucuggggauuaccaucuccagcacauauugcucuaccaaccacgauuacacgauuuggaugccugaggaagccagacucggaacauccugugacaucuucaccaauagcaagggcaaacgggcuucuaaagggggacgcacaugcggcuuuguggaugagagagggcuguauaagucccuuaagggagccuguaagcugaaacucugcggcguccccggccugcggcugauggacgggaccuggguggcgauucaaaccccuggagagacaaagugguguagccccgaucagcucgugaaccugcacgacuuccgcuccgacgaaaucgagcaucuugucguugaggagcugaucaaaaagagagaagagugccucgaugcccuggagucuauuaugacgaccaaaagcguguccuuucggcgccuuagcaaucugagaaagcucgugcccggcuucgggaaggcuuacacaaucuucaacaaaacccugauggaagccgacgcucacuauaagucuauucggacaugggaugagaucauuccuuccaaaggaugccugcgcgucggcgggagaugucauccgcacgugaauggaguguuuuucaacggcaucauccucggccccgacgggcacguucugauuccugaaaugcagagcucucuucugcagcaacauauggagcuccuggaaagcuccgucaucccccuuauucacccucuggccgaucccucuaccguguuuaaggacggagaugaggcggaggacuucguugaagugcaucucccggauguccacgaacaggugagcggcgucgaccuggggcugccuaauuggggaaaauacgugcucaucuccgccggcguucuggcuacggugauucuuacaaucuuucugcugaccugcugucggagagucaaccgcaccaagcccaagcagcagagccugggggaaucuggccggaaaguguccguuacaccucaaaauggaaaggugaugagcucuugggaguauuacaaauccgaaggcagaaccagccuguga

SEQ ID NO: 223478 - RNA, 1575 nt, Artificial Sequence; identical to SEQ ID NO: 223321
  derived and/or modified CDS sequence (opt5) from glycoprotein__RABV__JX871855.1

SEQ ID NO: 223479 - RNA, 1575 nt, Artificial Sequence
  derived and/or modified CDS sequence (opt5) from glycoprotein__RABV__JX871856.1
augaucccccaggcccuccucuucgugccuuuucuguucccgagccuuugccugggcaaguuucccauuuacaccaucccugagaaacucgggcccugguccccuauugacauccaccaucugucuugucccaacaaucuugucguugaagaugagggaugcgacagccuguccggcuucucuuauauggaacucaaggugggguacauuagcgcuaucaaagugaacggauuuacauguacgggcgucgugaccgaggccgaaacauauaccaauuucguuggguacgugacaaccacauuuaagagaaaacacuuccggccuaugccggaugcgugccgcgcugccuauaacuggaagaccgccggagaccccagauacgaggagucccugcauaauccuuaucccgauuaccacuggcugcggacggucaagaccacaaaagaaucucucaucauuaucagcccuuccguggcugaccuggaucccuacgacaagagccuucauucucgcguuuuuccgggcggcaaaugucuggggauuaccguguccagcacauauugcucuaccaaccacgauuacacgaucuggaugccugaggaagccagacucggaacauccugugacauuuucaccaauagcaagggcaaacgggcuucuaaagggggacgcacaugcggcuuugucgaugagagagggcuguauaagucccuuaagggagccuguaagcugaaacucugcggcgugcccggccugcggcugauggacgggaccuggguggcgauccaaaccccuggagagacaaagugguguagccccgaucagcucgucaaccugcacgacuuccgcuccgacgaaauugagcaucuuguuguggaggaacugaucaaaaagagagaagagugccucgaugcccuggagucuaucaugacgaccaaaagcguguccuuucggcgccuuagcaaucugagaaagcucguccccggcuucgggaaggcuuacacaauuuucaacaaaacccugauggaagccgacgcucacuauaagucugugcggacaugggaugagaucauuccuuccaaaggaugccugcgcguuggcgggagaugucauccgcacgugaauggagucuuuuucaacggcaucauucucggccccgacgggcacgugcugaucccugaaaugcagagcucucuucugcagcaacauauggagcuccuggaaagcuccguuaucccccuuauucacccucuggccgaucccucuaccguguuuaaggacggagaugaggcggaggacuucgucgaagugcaucucccggauguccacaaacaggugagcggcguugaccuggggcugccuaauuggggaaaguacgugcucauguccgccggcguccuggcuacggugauccuuacaauuuuucugcugaccugcugucggagaguuaaccgcaccaagcccaaacagcagagccugggggagucuggccggaagguguccgucacaccucaaaauggaaaagugaugagcucuugggaauauuacaaguccgagggcagaaccagccuguga

SEQ ID NO: 223480 - RNA, 1575 nt, Artificial Sequence; identical to SEQ ID NO: 223321
  derived and/or modified CDS sequence (opt5) from glycoprotein__RABV__JX871857.1

SEQ ID NO: 223481 - RNA, 1575 nt, Artificial Sequence
  derived and/or modified CDS sequence (opt5) from glycoprotein__RABV__JX871858.1
augaucccccaggcccuccuguucgugccucugcuuauuccgagccugugccucggcaaguuucccaucuacaccauuccugacaaacuggggcccugguccccuaucgauauucaccaucuuucuugucccaacaaucuggucguugaggacgaaggaugcacaagccucuccggcuucucuuauauggagcugaaggugggguacaucagcgcuaucaaagugaacggauuuacguguaccggcgucgugacagaagccgagaccuauacaaauuucguuggguacgugaccacaaccuuuaagagaaaacacuuccggccuaugccggaugcgugccgcgcugcccaugacuggaagauugccggagaucccagauaugaagacucccugcaaaacccuuaccccgauuaucacuggcuccggacggucaagaccacaaaagagucucuggugaucauuagcccuuccguugcugagcuugaccccuacgauaagagccugcauucucgcguguuuccgggcggcaaaugucucgggaucaccgucuccagcacauacugcucuaccaaucacgacuauacgauuuggaugccuguggaagccagacugggaacauccugugauaucuucaccaacagccggggcaagaaggcuucuaaagggggacgcacaugcggcuuuguggacgagagagggcuuuacaagucccugaaaggagccuguaagcucaaacugugcggcguccccggccugcggcucauggaugggaccuggguuagcauucagaccuccgacgacaucaagugguguccucccgaucagcuggugaaucuucacgacuuccauucugaugaaaucgagcaccugguggucgaggaacucauuaaaaagcgcgagggaugccuggacgcgcuugaaagcaucaugacaacgaaauccgugagcuuuagacggcugucucaucuccgcaagcugguucccggcuucgggaaggccuauaccauuuuuaacaauacacugauggaggcugaugcccacuacaaauccgugagaaccuggaacgaagucaucccuagcaagggaugccucaaagugggcgggcggugucacccgcccguuaauggaguguucuucaacggcauuauccugggcccugacgggaauguccuuauccccgagaugcagucuagccugcuccaacagcauauggagcugcuugaauccucugugauuccucugaugcacccccucgcugauccgagcacagucuuuaaggacggagaugaggccgaagacuucguggagguucaucugccugaugugcacaaacaggucuccgacguggaccugggccuccccagcugggggaaguaucugcuuaugucugcgggagcccuggcuacccucauccuggccauuuuucugaucacgugcugucgcagagcuaaccggacagaauccacccagagaggccaucgcgagagcgggggcaagguuucuguggccccucaaaauggaaaaauuaucuccagcugggagcuuuacaaguccgaaucugagaccggcauguga

SEQ ID NO: 223482 - RNA, 1575 nt, Artificial Sequence
  derived and/or modified CDS sequence (opt5) from glycoprotein__RABV__JX871859.1
augaucccccaggcccugcucagcgugccucugcuuauuuccucucugugcuucggcaaguuuccgaucuacaccauucccgagaaacucgggccuuggagccccaucgacauucaccaucuguccuguccuaacaaucuugucguugaagaugagggaugcaacucucugagcggcuucuccuauauggaacucaaggugggguacaucucugcuaucaaagugaauggauuuacauguacgggcgucgugaccgaggccgaaacauauaccaacuucguuggguacgugacaaccacauuuaagagaaaacacuuccggcccaugccugacgcgugccgcgcugccuauaauuggaagaccgccggagauccgagauacgaggagagccugcauaaccccuauccugacuaccacuggcugcggacggucaagaccacaaaagaaucccucauuaucauuagccccucuguggcugaucuggacccuuacgauaagucccuucauagccgcaucuuucccggcggcaaaugucuggggauuaccaucucuuccacauauugcagcaccaaucacgacuacacgauuuggaugccggaggaagccagacucggaacaucuugugauaucuucaccaacuccaagggcaaacgggcuagcaaagggggacgcacaugcggcuuuguugacgagagagggcuguauaagucccuuaagggagccuguaagcugaaacucugcggcgugccuggccugcggcugauggaugggaccugggucgcgauccaaacccccaaugagacaaagugguguucuccugaccagcucgugaacgugcacgauuuccgcagcgacgaaauugagcaucuggucguugaggaacuuaucagaaaacgggaagagugccuggacgcccucgaguccauuaugacgaccaagagcgugucuuuucgcagacuguccaaucuucggaaacuggugcccggauucggcaaggcuuacacaaucuuuaacaagacccucauggaagccgaugcucacuauaaaagcguccgcacauggaaugagauuauccccucuagagggugccugaaggugggaggccggugucauccucacguuaacgggguguucuucaauggaaucauucugggcccggacggccacauccucauucccgaaaugcagagcucccugcuucagcaacauauggagcugcucgaaucuagcgucaucccucugauucacccccuugccgauccuuccaccguguuuaaagacggggaugaggcggaggacuucguugaagugcaucugcccgauguccaccaacaggugagcggagucgaccucggccugccggauugggggaaguacgugcugaugucugccggagcucucgccacgguuaugcugacaaucuuucuuauuaccugcuguagacgcgugaaacggaccgaguccauccagcagggccugggggaaagcggcagaaaggucucugugacaccucagaacggaaagguuauguccagcugggaguauuacaaauccggcgggggaacccgccucuga

SEQ ID NO: 223483 - RNA, 1575 nt, Artificial Sequence; identical to SEQ ID NO: 223429
  derived and/or modified CDS sequence (opt5) from glycoprotein__RABV__JX871860.1

SEQ ID NO: 223484 - RNA, 1575 nt, Artificial Sequence; identical to SEQ ID NO: 223344
  derived and/or modified CDS sequence (opt5) from glycoprotein__RABV__JX871862.1

SEQ ID NO: 223485 - RNA, 1575 nt, Artificial Sequence
  derived and/or modified CDS sequence (opt5) from glycoprotein__RABV__JX871863.1
augaucccccaggcccugcuguucgugccucugcuuauuagcucccugugcuuuggcaaguucccgaucuacaccauucccgagaaacucgggccuuggucucccaucgacauucaccaucugagcuguccuaacaaucuugucgcugaagaugagggaugcaacucccugucuggcuuuagcuauauggaacucaagguuggguacaucuccgccaucaaagugaauggauucacauguacgggcguggucaccgaggcggaaacauauaccaacuuugugggguacguuacaaccacauucaagagaaaacacuuucggcccaccccugacgcuugccgcgccgccuauaauuggaagauggcuggagauccgagauacgaggagucucugcauaaccccuauccugacuaccacuggcugcggacggugaagaccacaaaagaaagccucgucauuaucucccccagcguggccgaucuggacccuuacgauaagucucuucauucccgcguuuuccccgacggcaaaugucugggcauuaccaucagcucuacauauugcuccaccaaucacgauuacacgauuuggaugccggaggaagcuagacucgggacaagcugugacaucuuuaccacaucuaagggaaaacgggccuccaagggcgauaagauuugcggguucguggacgagcgcggacuguauaaaagccuuaagggcgcguguaaacugaagcucugcgggguccugggacugagacucauggauggcaccuggguguccauccaaaccccuggcgagacaaaaugguguucucccgaccagcuggugaaccuucacgacuuucauagcgaugaaaucgagcaccuggucgccgaggaacucguuaagaaacgggaagagugccuggacgcucuugaguccauuaugacgaccaagagcgugucuuuccgcagacugucccaucuccggaagcuggugccuggguuuggaaaagccuacacaaucuucaauaagacccugauggaagcugaugcccacuauaaaagcguccgcacauggaacgaggugauucccucuaagggcugccucagcguugggggaagaugucacccccaugugaauggcgucuucuuuaacgggaucauucugggaccugacggcuccgugcuuaucccggaaaugcagucuagccugcuccagcaacacauggagcugcuugaauccagcguuaucccccugaugcauccucucgcggaucccucuaccguguucaaagacgaugacgaggccgagaauuuugucgaagugcaccucccugauguccauaaacagguguccggcguugaccuggggcuccccaacuggggaaaguaccugcuuaugauugcuggcgcccuggcuacgcucaugcugacaaucuuccugaugaccugcugucggcgcaccaagagaacagagagcauucagcaggggcuuggagaaucuggccggaagguguccgucaccccgcaaagcgggaaagugaucuccucuugggagagcuauaaguccggcggagaaacaagacucuga

SEQ ID NO: 223486 - RNA, 1575 nt, Artificial Sequence
  derived and/or modified CDS sequence (opt5) from glycoprotein__RABV__JX871864.1
augaucccccaggcccugcuguucgugccucugcuuauuccgagccugugccucggcgaguuucccaucuacaccauuccugacaagcuggggcccugguccccuaucgauauucaccaucuuucuugucccaacaaucuggucgcugaaaacgacggaugcacaagccucuccggcuucucuuauauggagcugaaaguuggguacaucagcgccaucaaggugaauggauuuacguguaccggcguggucacagaagcggagaccuauacaaacuucgugggguacguuaccacaaccuuuaaaagaaagcacuuccggccuacgccggaugcuugccgcgccgcccaugacuggaaaauggcuggagaucccagauaugaagccucccugcaaaauccuuaccccgacuaucacuggcuccggaccgugaagacaaccaaggagucucuggucauuaucagcccuuccguggcugaucuugaccccuacgauaaaagccugcauucucgcguuuuuccguccggcaagugucucggcauuacagugagcucuaccuacugcuccacgaaccacgacuauacaaucuggaugccugucgagcccagacuggggaccagcugugauauuuucacaaauucucggggaaaacgcgccuccaagggcgggagagugugcggauuuguggacgaacggggccuuuacaaaagccugaagggggcgugucgccucaagcugugcggagucccuggcaucagacugcucgauggcaccuggguuuccauucagaccucugaggacaucaaaugguguccucccgaccggcuggugaaccuucacgauuuccauagcgacgaaaucgagcaccugguggucgccgagcucauuaagcgcagagaaaauugccuggaugcucuugaguccaucaugacaacgaaaagcgugucuuuucggcgccugucccaucucagaaagcugguucccggguucggaaaagccuauaccauuuuuaacaagacacugauggaagcugacgcccacuacaaacucgugaagaccuggaaugaguucaucccgagcaagggcugccuggaagucgggggacggugucacccccaugugaacggcguuuucuuuaaugggauuauccuuggaccugauggcaacgugcugauccccgagaugcagucuagccuccugcagcaacacauggagcuucuggaauccucugucauuccucucaugcauccccuggcggacccgagcacaguguucaaagagggcgaugaagccgaggacuuugucgaagugcaccucccugauguucauaaacagguguccgacgucgaucucgggcugcccagcuggggaaaguaucuucugaucucugcuggcgcccucgcuauucugauccuggccauugugcuuaucaucugcuguagacgcguuaauaagaccggguccacgcagcggggacacagagagagcggcgggaaaaugucuguggucccucagaacggcaagauuaucuccagcugggagcucuacaaguccgaaucugagacaggacuguga

SEQ ID NO: 223487 - RNA, 1575 nt, Artificial Sequence
  derived and/or modified CDS sequence (opt5) from glycoprotein__RABV__JX871865.1
augaucccccaggcccugcucagcgugccucugcuuauuuccucucugugcuucggcaaguuuccgaucuacaccauucccgagaaacucgggccuuggagccccaucgacauucaccaucuguccuguccuaacaaucuugucguugaagaugagggaugcaacucucugagcggcuucuccuauauggaacucaaggugggguacaucucugcuaucaaagugaauggauuuacauguacgggcgucgugaccgaggccgaaacauauaccaacuucguuggguacgugacaaccacauuuaagagaaaacacuuccggcccauggcggacgcuugccgcgccgccuauaauuggaagaccgcuggagauccuagauacgaggagagccugcauaacccguaucccgacuaccacuggcugcggacggucaagaccacaaaagaaucccucauuaucauuagcccuucuguggccgaucuggaccccuacgauaagucccuucauagccgcaucuuuccuggcggcaaaugucuggggauuaccaucucuuccacauauugcagcaccaaucacgacuacacgauuuggaugcccgaggaagcuagacucggaacaucuugugauaucuucaccaacuccaagggcaaacgggccagcaaagggggacgcacaugcggcuuuguugacgagagagggcuguauaagucccuuaagggagcguguaagcugaaacucugcggcgugccgggccugcggcugauggaugggaccugggucgccauccaaaccccuaaugagacaaagugguguucucccgaccagcucgugaacgugcacgauuuccgcagcgacgaaauugagcaucuggucguugaggaacuuaucagaaaacgggaagagugccuggacgcucucgaguccauuaugacgaccaagagcgugucuuuucgcagacuguccaaucuucggaaacuggugccuggauucggcaaggccuacacaaucuuuaacaagacccucauggaagcugaugcccacuauaaaagcguccgcacauggaaugagauuauccccucuagagggugccugaaggugggaggccggugucauccccacguuaacgggguguucuucaauggaaucauucugggcccugacggccacauccucauuccggaaaugcagagcucccugcuucagcaacauauggagcugcucgaaucuagcgucaucccccugauucacccucuugcggaucccuccaccguguuuaaagacggggaugaggccgaggacuucguugaagugcaucugccugauguccaccaacaggugagcggagucgaccucggccugcccgauugggggaaguacgugcugaugucugcuggagcccucgcuacgguuaugcugacaaucuuucuuauuaccugcuguagacgcgugaaacggaccgaguccauccagcagggcccgggggaaagcggcagaaaggucucugugacaccucagaacggaaagguuauguccagcugggaguauuacaaauccggcgggggaacccgccuguga

SEQ ID NO: 223488 - RNA, 1575 nt, Artificial Sequence
  derived and/or modified CDS sequence (opt5) from glycoprotein__RABV__JX871866.1
augaucccccaggccauucuguucgugccucuccugaucccgagccuuugccugggcgaguuucccauuuacaccaucccugacaagcucgggcccugguccccuauugauauccaccaucugucuugucccaacaaucuugucgcugaaaacgacggaugcacaagccuguccggcuucucuuauauggagcucaaaguuggguacaucagcgccauuaaggugaauggauuuacguguaccggcguggucacagaagcggagaccuauacaaacuucgugggguacguuaccacaaccuuuaaaagaaagcacuuccggccuacgccggaugcuugccgcgccgcccaugacuggaaaauggcuggagaucccagauaugaagccucccugcaaaauccuuaccccgacuaucacuggcugcggaccgugaagacaaccaaggagucucucgucaucauuagcccuuccguggcugaucuggaccccuacgauaaaagccuucauucucgcguuuuuccguccggcaagugucugggcaucacagugagcucuaccuacugcuccacgaaccacgacuauacaauuuggaugccugucgagcccagacucgggaccagcugugauaucuucacaaauucucggggaaaacgcgccuccaagggcgggagagugugcggauuuguggacgaacggggccuguacaaaagccuuaagggggcgugucgccugaagcucugcggagucccuggcauuagacugcuggauggcaccuggguuuccauccagaccucugaggacaucaaaugguguccucccgaccggcucgugaaccugcacgauuuccauagcgacgaaauugagcaccuuguggucgccgagcugaucaagcgcagagaaaauugccucgaugcucuggaguccauuaugacaacgaaaagcgugucuuuucggcgccuuucccaucugagaaagcucguucccggguucggaaaagccuauaccaucuuuaacaagacacugauggaagcugacgcccacuacaaaagcgugaagaccuggaaugaggucauuccgucuaagggcugccuggaaguugggggacggugucacccccaugugaacggcguguucuucaaugggaucauccucggaccugauggcaacguccugauucccgagaugcagagcucccuucugcagcaacacauggagcuccuggaaucuagcgugaucccucuuaugcauccccuggcggacccguccacagucuuuaaagagggcgaugaagccgaggacuucguggaaguucaccucccugaugugcauaagcaggucagcgacguggaucuggggcugcccucuuggggaaaauaucuccugauuuccgcuggcgcccuugcuauccugauucucgccaucguucugaucauuugcuguagacgcgugaauaagaccgggagcacgcagcggggacacagagagucuggcgggaaaauguccgucgugccucagaacggcaagaucauuagcuccugggagcuguacaagucugaaagcgagacaggacuuuga

SEQ ID NO: 223489 - RNA, 1575 nt, Artificial Sequence; identical to SEQ ID NO: 223321
  derived and/or modified CDS sequence (opt5) from glycoprotein__RABV__JX871867.1

SEQ ID NO: 223490 - RNA, 1575 nt, Artificial Sequence
  derived and/or modified CDS sequence (opt5) from glycoprotein__RABV__JX871868.1
augaucccccaggccuuccuguuugugccucuccugauuccgagccuuugccugggcaaguuccccaucuacaccauuccugacaaacucgggcccugguccccuaucgauauucaccaucugucuugucccaacaaucuugucguugaggacgaaggaugcacaagccuguccggcuuuucuuauauggagcucaaggugggguacaucagcgcuaucaaagugaacggauucacguguaccggcgucgugacagaagccgagaccuauacaaauuuuguuggguacgugaccacaaccuucaagagaaaacacuuucggccuaugccggaugcgugccgcgcugcccaugacuggaagauugccggagaucccagauaugaagacucccugcaaaacccuuaccccgauuaucacuggcugcggacggucaagaccacaaaagagucucucgugaucauuagcccuuccguugcugaccuggaucccuacgacaagagccuucauucucgcguguucccguccggcaaaugucugggcaucaccgucagcucuacauacugcccuaccaaucacgauuauacgauuuggaugcccguggaggccagacucgggacauccugugacaucuuuaccaacagccggggaaagaaagccucuaagggcgggcgcacaugcggauucguggaugaaagaggccuguacaagucccuuaaaggggccuguaagcugaaacucugcggagucccuggccugcggcugauggacggcaccuggguuagcauucagaccuccgacgaugugaagugguguccucccgaccagcucgugaaucugcacgauuuucauucugacgagaucgaacaccuugucguggaggagcugaucaaaaagcgcgaagggugccucgaugcgcuggagagcauuaugacaacgaaauccguuagcuucagacggcuuucucaucugcgcaagcucgugcccggauuuggcaaggccuauaccaucuucaacaauacacugauggaagcugacgcccacuacaaauccgucagaaccuggaacgaggugauuccgagcaaggggugccugaaaguuggaggccggugucaucccccugugaauggggucuucuuuaacggaaucauucucggccccgauggcaaugugcugaucccugaaaugcagucuagccuucugcaacagcacauggagcuccuggaguccucugucaucccccuuaugcacccgcuggcugacccuagcacaguguucaaggauggggacgaagccgaggauuuuguugaagugcaucuccccgacguccacaaacagguguccgacguugaucugggacugccuagcuggggcaaguaucuccugaugucugcgggggcccuugcuacccugauucucgccaucuuccugauuacgugcugucgcagagcuaaccggacaaaguccacccagagaggacaucgcgagagcggcgggaaagugucugucgcuccccaaaauggcaagaucauuuccagcugggaacuguacaaauccgagucugagaccggaauguga

SEQ ID NO: 223491 - RNA, 1575 nt, Artificial Sequence; identical to SEQ ID NO: 223482
  derived and/or modified CDS sequence (opt5) from glycoprotein__RABV__JX871869.1

SEQ ID NO: 223492 - RNA, 1575 nt, Artificial Sequence
  derived and/or modified CDS sequence (opt5) from glycoprotein__RABV__JX871870.1
augaucuuccaggcccugcucuuugugccccugcuuauuagcucccugugccucggcaaguucccuaucuacaccauuccggacaaacuggggcccuggucuccuaucgauauucaccaucuuagcugucccaacaaucuggucguugaggacgaaggaugcacaucccucucuggcuuuagcuauauggagcugaaggugggguacaucuccgcuaucaaagugaacggauucacguguaccggcgucgugacagaagccgagaccuauacaaauuuuguuggguacgugaccacaaccuucaagagaaaacacuuucggccuauucccgaugcgugccgcgcugccuauaacuggaagaucgccggagacccuagauacgaagagucucugcaaaauccguaucccgauuaccauuggcuccggacggucaagaccacaaaagagagccugauuaucauuuccccuagcguggcugaccuugaucccuacgacaagucucugcacucccgccucuucccuggcggcaaaugucuggggaucaccauuagcucuacauauugcuccaccaaccaugauuacacgaucuggaugcccgaggaaccgagacuuggaacaagcugugacaucuuuaccaauucuaagggcaaaaaggccuccaaagggggaaagguuugcggcuucguggaugaacgggggcuguauaagagccucaaaggagcuuguaagcugaaacugugcggcgucuccggccuccgccugauggacgggacaugggugaccauucagaccucugaugagaucaagugguguccucccgaccagcuugugaaccugcacgacuuucacagcgaugagauugaacaucucgucguugaggaacuggugaaaaagagagaggaaugccuugacgcccuggaguccaucaugacaaccaagagcgugucuuuccggcgccucuccuaccugagaaaacuggucccuggauuuggcaaggcguauacgauuuucaauaaaacacucauggaggccgaugcucacuacaagagcgugcggaccuggaacgaaaucauccccucuaaagggugccugaagguuagcgaccgcugucauccccacguggauggagucuucuuuaauggcauuauccuugggccugacggaaacgugcugauuccggagaugcaguccucucuccugcaacagcacauggaacuucuggagagcuccguuaucccccucaugcauccucuggccgaucccagcacaguguucaaggacggcgaugaagcugaggacuuugucgaggugcaucugccugauguccacaaacagauuucuggcguggaccucgggcugcccuccuggggaaaguaucuucugaugaucgccggcgggcucgcgacccugguucugaucauuuuccuuauggccugcuguagacggacgaaacgcacagaaagcagacggagaggaucuggcgaguccggggaaaaggugcucgcuaccccgcagccuaaaaaggucgugagcuccugggagcuguacaagcgcgaaggcgacgcccggcuguga

SEQ ID NO: 223493 - RNA, 1575 nt, Artificial Sequence
  derived and/or modified CDS sequence (opt5) from glycoprotein__RABV__JX871871.1
augaucccccaggcccugcuguucgugccucugcuuauuccgagccugugccucggcgaguuucccaucuacaccauuccugacaagcuggggcccugguccccuaucgauauucaccaucuuucuugucccaacaaucuggucgcugaaaacgacggaugcacaagccucuccggcuucucuuauauggagcugaaaguuggguacaucagcgccaucaaggugaauggauuuacguguaccggcguggucacagaagcggagaccuauacaaacuucgugggguacguuaccacaaccuuuaaaagaaagcacuuccggccuacgccggaugcuugccgcgccgcccaugacuggaaaauggcuggagaucccagauaugaagccucccugcaaaauccuuaccccgacuaucacuggcuccggaccgugaagacaaccaaggagucucuggucauuaucagcccuuccguggcugaucuugaccccuacgauaaaagccugcauucucgcguuuuuccguccggcaagugucucggcauuacagugagcucuaccuacugcuccacgaaccacgacuauacaaucuggaugccugucgagcccagacuggggaccagcugugauauuuucacaaauucucggggaaaacgcgccuccaagggcgggagagugugcggauuuguggacgaacggggccuuuacaaaagccugaagggggcgugucgccucaagcugugcggagucccuggcaucagacugcucgauggcaccuggguuuccauucagaccucugaggacaucaaaugguguccucccgaccggcuggugaaccuucacgauuuccauagcgacgaaaucgagcaccugguggucgccgagcucauuaagcgcagagaaaauugccuggaugcucuugaguccaucaugacaacgaaaagcgugucuuuucggcgccugucccaucucagaaagcugguucccggguucggaaaagccuauaccauuuuuaacaagacacugauggaagcugacgcccacuacaaaagcgugaagaccuggaaugaggucaucccgucuaagggcugccucgaaguugggggacggugucacccccaugugaacggcguguucuucaaugggauuauccugggaccugauggcaacguccuuauccccgagaugcagagcucccugcuccagcaacacauggagcugcuugaaucuagcgugauuccucugaugcauccccucgcggacccguccacagucuuuaaagagggcgaugaagccgaggacuucguggaaguucaccucccugaugugcauaagcaggucagcgacguggaucuggggcuccccucuuggggaaaauaucugcuuaucuccgcuggcgcccuggcuauucucauccuggccauuguucugaucaucugcuguagacgcgugaauaagacccggagcacgcagagagggcaccgcgagucuggaggcaaaauguccgucgugccucagaacgggaagauuaucagcuccugggagcuuuacaagucugaaagcgagacaggccucuga

SEQ ID NO: 223494 - RNA, 1575 nt, Artificial Sequence; identical to SEQ ID NO: 223321
  derived and/or modified CDS sequence (opt5) from glycoprotein__RABV__JX871872.1

SEQ ID NO: 223495 - RNA, 1575 nt, Artificial Sequence; identical to SEQ ID NO: 223493
  derived and/or modified CDS sequence (opt5) from glycoprotein__RABV__JX871873.1

SEQ ID NO: 223496 - RNA, 1575 nt, Artificial Sequence
  derived and/or modified CDS sequence (opt5) from glycoprotein__RABV__JX871874.1
augauccugcaggcccuccuguucgugcccuuucuuuucccuagccugugccucggcaaguuuccgauuuacaccauccccgagaaacuggggccuuggucccccauugacauccaccaucuuucuuguccuaacaaucuggucguugaagaugagggaugcgacagccucuccggcuucucuuauauggaacugaaggugggguacauuagcgcuaucaaagugaacggauuuacauguacgggcgucgugaccgaggccgaaacauauaccaauuucguuggguacgugacaaccacauuuaagagaaaacacuuccggcccaugccugaugcgugccgcgcugccuauaacuggaagaccgccggagacccgagauacgaggagucccugcauaaucccuauccugauuaccacuggcuccggacggucaagaccacaaaagaaucucugaucauuaucagccccuccguggcugaccuugauccuuacgacaagagccugcauucucgcguuuuucccggcggcaaaugucucgggauuaccguguccagcacauauugcucuaccaaccacgauuacacgaucuggaugccggaggaagccagacugggaacauccugugacauuuucaccaauagcaagggcaaacgggcuucuaaagggggacgcacaugcggcuuugucgaugagagagggcuuuauaagucccugaagggagccuguaagcucaaacugugcggcgugccuggccugcggcucauggacgggaccuggguggcgauccaaacccccggagagacaaagugguguagcccugaucagcuggucaaccuucacgacuuccgcuccgacgaaauugagcaucugguuguggaggaacucaucaaaaagagagaagagugccuggaugcccuugagucuaucaugacgaccaaaagcguguccuuucggcgccugagcaaucucagaaagcugguccccggcuucgggaaggcuuacacaauuuucaacaaaacccugauggaagccgacgcucacuauaagucugugcggacaugggaugagaucauucccuccaaaggaugccuccgcguuggcgggagaugucauccucacgugaauggagucuuuuucaacggcaucauucugggcccggacgggcacgugcuuauccccgaaaugcagagcucucugcuccagcaacauauggagcugcuugaaagcuccguuaucccucugauucacccccucgccgauccuucuaccguguuuaaggacggagaugaggcggaggacuucgucgaagugcaucugcccgauguccacaaacaggugagcggcguugaccuggggcucccgaauuggggaaaguacgugcugaugggcgccgggguccuugcuacggugauccugacaauuuuucuccugaccugcugucggagaguuaaccgcaccaagccuaaucagcagucccugggcgagagcggacggaaagugucugucacaccccaaaacggcaaggugauguccagcugggaauauuacaaaucugaggggagaaccucccuuuga

SEQ ID NO: 223497 - RNA, 1575 nt, Artificial Sequence
  derived and/or modified CDS sequence (opt5) from glycoprotein__RABV__JX871875.1
augaucccccaggcccugcucuacgugccucugcuuauuccgagccugugcuucggcggguuucccaucuauaccauuccugacaagcucggacccugguccccuaucgauauucaccaucugucuugucccaacaaucuugucguugaggacgaaggcugcacaagccuguccggguucucuuacauggagcucaaagugggauauaucagcgcuaucaaggugaacggcuuuacguguaccggggucgugacagaagccgagaccuacacaaauuucguuggauaugugaccacaaccuuuaaaagaaagcacuuccggccuaugccggaugcgugccgcgcugccuacaacuggaaaauggccggcgaccccagauaugaagagucccugcaaaauccuuaccccgauuacucuuggcugcggacggucaagaccacaaaggagagccucauuaucauuuccccuagcguggcugaccuggaucccuaugacaaaucucuucauucccgcguuuuuccgggcgggaagugucugggaaucaccauuagcucuacauacugcuccaccaaccacgauuauacgaucuggaugccugaagaggccagacucggcacaagcugugacauuuucaccaauucucgggggaaacgcgcuuccaagggaggcaaaacaugcggguuuauggaugaaagaggacuguacaagagccuuaagggcgccuguaaacugaagcucugcggcgugcccgggcugcggcugauggacggaaccugggucaccauccagacauccgaugagacgaaaugguguccuucugaccagcucgugaaccugcaugacuuccacagcgaugagaucgaacaccuuguggucgaggaacugguuaagaaacgcgaggaaugccucgacgcgcuggaguccauuaugaccacaaagagcgugucuuuuagacggcuuucccaucugcgcaaacucgugcccggcuucgggaaggccuauaccaucuuuaauaagacacugauggaggcugaugcccacuacaaaagcauuagaaccuggaacgaaaucauucccucuaagggaugccugaaagucggcgggcggugucauccucacguggacggaguuuucuucaauggcaucauccucggcccggaugggaacgugcugauucccgagaugcagagcucccuucugcaacagcacgucgaacuccuggagucuagcgugaucccucuuaugcauccccuggcugacccuuccacgguuuuuaaggauggagacgaagccgaggauuucguggagguccaccuccccgacauucauaaacaggugagcggcgucgaucuggggcugccgaauuggggaaaguaucuccugaugucugcgggcgcccuugcuacacugaugcucaucauucugcugaugaccugcugucgcagagccaaccggaccgaauccauccagagagacccuggggagagcggccgcaaggugucuaucacaucccccgacggaaaaguuauuagcuccugggaacuuuacaagucuggcggggagacccggcucuga

SEQ ID NO: 223498 - RNA, 1575 nt, Artificial Sequence; identical to SEQ ID NO: 223340
  derived and/or modified CDS sequence (opt5) from glycoprotein__RABV__JX871876.1

SEQ ID NO: 223499 - RNA, 1575 nt, Artificial Sequence; identical to SEQ ID NO: 223492
  derived and/or modified CDS sequence (opt5) from glycoprotein__RABV__JX871877.1

SEQ ID NO: 223500 - RNA, 1575 nt, Artificial Sequence; identical to SEQ ID NO: 223321
  derived and/or modified CDS sequence (opt5) from glycoprotein__RABV__JX871879.1

SEQ ID NO: 223501 - RNA, 1575 nt, Artificial Sequence
  derived and/or modified CDS sequence (opt5) from glycoprotein__RABV__JX871880.1
augaucccccaggcccuccucuucgugccuuuucuguucccgagccuuugccugggcaaguuucccauuuacaccaucccugagaaacucgggcccugguccccuauugacauccaccaucugucuugucccaacaaucuugucguugaagaugagggaugcgacagccuguccggcuucucuuauauggaacucaaggugggguacauuagcgcuaucaaagugaacggauuuacauguacgggcgucgugaccgaggccgaaacauauaccaauuucguuggguacgugacaaccacauuuaagagaaaacacuuccggccuaugccggaugcgugccgcgcugccuauaacuggaagaccgccggagaccccagauacgaggagucccugcauaauccuuaucccgauuaccacuggcugcggacggucaagaccacaaaagaaucucucaucauuaucagcccuuccguggcugaccuggaucccuacgacaagagccuucauucucgcguuuuuccgggcggcaaaugucuggggauuaccaucuccagcacauauugcucuaccaaccacgauuacacgauuuggaugccugaggaagccagacucggaacauccugugacaucuucaccaauagcaagggcaaacgggcuucuaaagggggacgcacaugcggcuuuguggaugagagagggcuguauaagucccuuaagggagccuguaagcugaaacucugcggcguccccggccugcggcugauggacgggaccuggguggcgauucaaaccccuggagagacaaagugguguagccccgaucagcucgugaaccugcacgacuuccgcuccgacgaaaucgagcaucuugucguugaggaacugaucaaaaagagagaagagugccucgaugcccuggagucuauuaugacgaccaaaagcguguccuuucggcgccuuagcaaucugagaaagcucgugcccggcuucgggaaggcuuacacaaucuucaacaaaacccugauggaagccgacgcucacuauaagucuauucggacaugggaugagaucauuccuuccaaaggaugccugcgcgucggcgggagaugucauccgcacgugaauggaguguuuuucaacggcaucauccucggccccgacgggcacguucugauuccugaaaugcagagcucucuucugcagcaacauauggagcuccuggaaagcuccgucaucccccuuauucacccucuggccgaucccucuaccguguuuaaggacggagaugaggcggaggacuucguugaagugcaucucccggauguccacgagcagaucagcggcguggaccuggggcugccuaauuggggaaaauacguccucauguccgccggcgugcuggcuacgguuauucuuacaaucuuucugcugaccugcugucggagagugaaccgcaccaagcccaagcagcagagccugggggaaucuggccggaaagucuccgugacaccucaaaauggaaagguuaugagcucuugggaguauuacaaauccgaaggcagaaccagccuguga

SEQ ID NO: 223502 - RNA, 1575 nt, Artificial Sequence
  derived and/or modified CDS sequence (opt5) from glycoprotein__RABV__JX871881.1
augaucccccaggcccugcucagcgugccucugcuuauuuccucucugugcuucggcaaguuuccgaucuacaccauucccgagaaacucgggccuuggagccccaucgacauucaccaucuguccuguccuaacaaucuugucguugaagaugagggaugcaacucucugagcggcuucuccuauauggaacucaaggugggguacaucucugcuaucaaagugaauggauuuacauguacgggcgucgugaccgaggccgaaacauauaccaacuucguuggguacgugacaaccacauuuaagagaaaacacuuccggcccaugccugacgcgugccgcgcugccuauaauuggaagaccgccggagauccgagauacgaggagagccugcauaaccccuauccugacuaccacuggcugcggacggucaagaccacaaaagaaucccucauuaucauuagccccucuguggcugaucuggacccuuacgauaagucccuucauagccgcaucuuucccggcggcaaaugucuggggauuaccaucucuuccacauauugcagcaccaaucacgacuacacgauuuggaugccggaggaagccagacucggaacaucuugugauaucuucaccaacuccaagggcaaacgggcuagcaaagggggacgcacaugcggcuuuguugacgagagagggcuguauaagucccuuaagggagccuguaagcugaaacucugcggcgugccuggccugcggcugauggaugggaccugggucgcgauccaaacccccaaugagacaaagugguguucuccugaccagcucgugaacgugcacgauuuccgcagcgacgaaauugagcaucuggucguugaggaacuuaucagaaaacgggaagagugccuggacgcccucgaguccauuaugacgaccaagagcgugucuuuucgcagacuguccaaucuucggaaacuggugcccggauucggcaaggcuuacacaaucuuuaacaagacccucauggaagccgaugcucacuauaaaagcguccgcacauggaaugagauuauccccucuagagggugccugaaggugggaggccggugucauccucacguuaacgggguguucuucaauggaaucauucugggcccggacggccacauccucauucccgaaaugcagagcucccugcuucagcaacauauggagcugcucgaaucuagcgucaucccucugauucacccccuugccgauccuuccaccguguuuaaagacggggaugaggcggaggacuucguugaagugcaucugcccgauguccaccaacaggugagcggagucgaccucggccugccggauugggggaaguacgugcugaugucugccggagcucucgccacgguuaugcugacaaucuuucuuauuaccugcuguagacgcgugaaacggaccgaguccauccagcaggaccugggcgaaagcgggagaaaggucucugugacaccucagaacggcaagguuauguccagcugggaguauuacaaauccggaggcgggacccgccucuga

SEQ ID NO: 223503 - RNA, 1575 nt, Artificial Sequence
  derived and/or modified CDS sequence (opt5) from glycoprotein__RABV__JX944575.1
auggugccccaggcccuucucuucgucccucugcuuguuuuuccgcugugcuucggcaaguuucccaucuacaccauuccugacaaacucgggcccuggagcccuaucgauauucaccaucuguccugucccaacaaucuugugguggaggacgaaggaugcacaaaccugucuggcuucagcuauauggagcucaaggucggguacaucuccgcuauuaaaaugaauggauuuacguguaccggcgugguuacagaagccgagaccuauacaaacuucgugggguacgucaccacaaccuuuaagagaaaacacuuccggccuacgccggaugcgugccgcgcugccuauaauuggaagauggccggagaccccagauacgaagagucucugcauaacccuuaucccgauuaccacuggcugcggaccgugaagacaaccaaagagagccucguuaucaucuccccuucuguggcugaccuggaucccuacgaccgcagccuucauuccagagucuuuccgggcggcaauuguagcgggguggccgugucuuccacauauugcagcaccaaccacgauuacacgauuuggaugccugaaaauccccggcugggaaugucuugugacaucuucacaaacucccgcggcaagagagcuagcaaagggucugagaccugcggauuugucgaugaacggggccucuauaagucccugaaaggggccuguaagcugaagcugugcggaguucucggccugcgccugauggacggcacauggguggcgaugcaaaccagcaaugagaccaaaugguguccucccgggcagcucgugaaccugcacgauuucagauccgacgagauugaacaucuugucguggaggaacugguuaagaaacgggaggaaugccucgacgcccuggagucuaucaugacaaccaagagcguguccuuucgcagacuuagccaucugcggaaacucguccccggauucggcaaggcuuacacgauuuucaauaaaacacugauggaggccgaugcucacuauaagucugugcgcaccuggaacgaaaucauuccuuccaaggggugccugagaguuggaggccggugucacccgcacgugaauggggucuuuuucaacggaaucauccucggccccgacggcaacgugcugauuccugagaugcagagcucucuucugcagcaacauauggaacuccuggucagcuccgugaucccccuuaugcacccucuggccgaucccucuacaguuuuuaaaaauggggacgaggcggaagauuucguggagguccaucucccggacgugcacgagagaauuagcggaguugaucugggccugccuaacugggggaaguacgugcuccuguccgccggagcucuuaccgcccugaugcucaucauuuuucugaugacgugcuggcgccgggucaauagaagcgaacccacacagcauaaccugcgcggcaccgggcgggaggugucugugaccccucaguccggcaaaaucaucagcucuugggaauccuauaagagcggaggcgagacagggcuuuga

SEQ ID NO: 223504 - RNA, 1575 nt, Artificial Sequence
  derived and/or modified CDS sequence (opt5) from glycoprotein__RABV__JX944576.1
auggugcaccagguccuccuguucguuccccugcuuguguuuagccugugcuucggcaaguuuccuaucuacaccauuccggacaaacucgggcccugguccccuaucgauauucaucaccugucuugucccaacaaucuuguggucgaggacgaaggaugcacaaaccugagcggcuucuccuauauggagcucaaggugggguacaucucugccauuaaaguuaauggauuuacguguaccggcguggucacagaagcugagaccuauacaaacuucgugggguacguuaccacaaccuuuagacggaagcauuuccgcccuacgcccgaugccugcagagcggcuuauaauuggaaacuggccggagacccucgguacgaagagagccugcacaacccguaucccgauuaccauuggcuccgcaccgugaagacaaccaaggagucccuggucaucaucucuccuagcguggccgaccuugaucccuacgacaaaucccugcacagcagaguguuuccuggcggcaaguguucugggauuacagucuccagcaccuauugcucuacgaaucacgauuacacaaucuggaugcccgaaaacccgcggcucggaaccuccugugacauuuucguuaauagccgcggcaaaagagcuucuaaagggggaaagacaugcggcuuuguggaugagcgggggcuguauaagucccuuaagggagccuguaaacugaagcucugcggcgugccuggccugcgccugauggacgggaccugggcugccauccaaaccagcgaugaaacaaaauggugucccccugaccagcucgucaaccugcaugacuacagauccgaugagauugagcaccuugugguugaggaacuggugaagaaacgggaagagugccucgacgcgcuggaaucuaucaugacgaccaagagcgucuccuuccgcagacuuagccaucugcggaaacucgugcccggauuuggcaaggccuauacaauuuucaauaagacccugauggaggcugaugcccacuacaaaucuguucgcacauggaacgagaucauccccuccaaggggugccugagagugggaggccggugucacccucaugucaaugggguguucuuuaacggaauuauccucggcccggacggccacguccugauucccgaaaugcagagcucucuucugcagcaacauauggagcuccuggaaagcuccgugaucccucuuaugcacccccuggcugauccuucuaccguuuucaaagacggggaugaggccgaagacuuuguggagguccaucuccccgaugugcacaagcugauuagcggaguugaccugggccucccguccugggggaaauaugugcugaugagcgcgugcguccuuacggcccugaugcucaugaucuuccugaugacauguugcagacgcggaaaucaggcuggcucuaagcagcacgggcuggagggcaccggacggaagguguccgugaccagccagaacggcaaaguuaucucuuccugggaaagcuacaaguccgggggagagacaagacuuuga

SEQ ID NO: 223505 - RNA, 1575 nt, Artificial Sequence; identical to SEQ ID NO: 222971
  derived and/or modified CDS sequence (opt5) from glycoprotein__RABV__JX944577.1

SEQ ID NO: 223506 - RNA, 1575 nt, Artificial Sequence
  derived and/or modified CDS sequence (opt5) from glycoprotein__RABV__JX944578.1
auggugccccagguccugcuguucguuccucugcuuguguuuagccugugcuucggcaaguuuccgaucuacaccauucccgacaaacucgggccuuggucccccaucgauauucaccaucugucuuguccuaacaaucuuguggucgaggacgaaggaugcacaaaccugagcggcuucuccuauauggagcucaaggugggguacaucucugccauuaaaguuaauggauuuacguguaccggcguggucacagaagcugagaccuauacaaacuucgugggguacguuaccacaaccuuuagacggaagcacuuccgccccacgccugaugccugcagagcggcuuauaauuggaaacuggccggagacccgcgguacgaagagagccugcauaaccccuauccugauuaccacuggcuccgcaccgugaagacaaccaaggagucccuggucaucaucucucccagcguggccgaccuugauccuuacgacaaaucccugcauagcagaguguuucccggcggcaaguguucugggauuacaaucuccagcaccuauugcucuacgaaucacgauuacacaauuuggaugccggaaaacccucggcucggaaccuccugugacaucuucgucaauagccgcggcaaaagagcuucuaaagggggaaagacaugcggcuuuguugaugagcgggggcuguauaagucccuuaagggagccuguaaacugaagcucugcggcgugcccggccugcgccugauggacgggaccugggcugccauucaaaccagcgaugaaacaaaaugguguccucccgaccagcucgugaaccugcacgacuucagauccgaugagaucgagcaucuugucguggaggaacugguuaagaaacgggaagagugccucgacgcgcuggaaucuauuaugacgaccaagagcguguccuuucgcagacuuagccaccuccggaaacucguccccggauucggcaaggccuacacaaucuucaauaagacccugauggaggcugaugcccauuauaaaucugugcgcacauggaacgagaucauuccuuccaaggggugccugagaguuggaggccggugucacccgcacgugaauggggucuuuuucaacggaaucauucucggccccgacggccaugugcugaucccugaaaugcagagcucucuucugcagcaacacauggagcuccuggaaagcuccgucauuccccuuaugcauccucuggcugaucccucuaccguguuuaaagacggggaugaggccgaagacuucguugaggugcaccucccggauguccauaagcugaucagcggaguggaccugggccucccuuccugggggaaauacguucugaugagcgcgggagugcuuacggcccugaugcucaugaucuuucugaugacaugcuguagacgcggcaaucaggcugggucuaagcagcacggccuggagggaaccggccggaaggucuccgugaccagccagaacgggaaagugauuucuuccugggaaagcuauaaguccggaggcgagacaagacuuuga

SEQ ID NO: 223507 - RNA, 1575 nt, Artificial Sequence; identical to SEQ ID NO: 222971
  derived and/or modified CDS sequence (opt5) from glycoprotein__RABV__JX944579.1

SEQ ID NO: 223508 - RNA, 1575 nt, Artificial Sequence; identical to SEQ ID NO: 222971
  derived and/or modified CDS sequence (opt5) from glycoprotein__RABV__JX944580.1

SEQ ID NO: 223509 - RNA, 1575 nt, Artificial Sequence; identical to SEQ ID NO: 222971
  derived and/or modified CDS sequence (opt5) from glycoprotein__RABV__JX944581.1

SEQ ID NO: 223510 - RNA, 1575 nt, Artificial Sequence
  derived and/or modified CDS sequence (opt5) from glycoprotein__RABV__JX944582.1
auggugccccagguccugugguucguuccucuccugguguuuagcaugugcuucggcaaguuuccgaucuacaccauucccgacaaacuugggccuuggucccccaucgauauucaccaucugucuuguccuaacaaucucguggucgaggacgaaggaugcacaaaccugagcggcuucuccuauauggagcuuaaggugggguacaucucugccauuaaaguuaauggauuuacguguaccggcguggucacagaagcugagaccuauacaaaccuggugggguacguuaccacaaccuucaagagaaaacacuuucggcccacgccugaugccugccgcgcggcuuauaauuggaagauggccggagacccgagauacgaagagagccuccauaaccccuauccugauuaccacuggcugcggaccgugaagacaaccaaagagucccuggucaucaucucucccagcguggccgaccucgauccuuacgacaagucccugcauagccgcguguuccccucuggcaaauguuccggcauuacaaucagcucuaccuauugcuccacgaaucacgauuacacaauuuggaugccggaaaacccuagacuugggaccagcugugacaucuuuacaaauucucggggaaagcgcgcuuccaaaggcagcaagaccugcggguucgucgaugagagaggacuguauaagucccucaaaggcgccuguaagcugaaacuuugcgggguucugggacuccggcugauggacggcaccuggguggcuaugcaaacaucugaugaaacgaaguggugucccccugaccagcuggugaaccuccacgacuuucgcagcgaugagauugagcaucuggucguggaggaacuuguuaaaaagagagaagagugccuggacgcccucgaauccaucaugaccacaaaaagcgugucuuuccggcgccugucccaccuuagaaagcugguccccggcuuugggaaggcguacaccauuuucaauaaaacacucauggaggccgaugcucauuauaagagcgugcggaccuggaacgagaucauccccucuaaaggaugccugcgcguuggcgggagaugucacccucacgugaauggagucuucuuuaacggcauuauccuggggccggacggacaugugcucauucccgaaaugcagagcucccugcuucagcaacacauggagcugcucgaaucuagcgucaucccucugaugcauccccuugccgauccuuccacgguguucaaggacggcgaugaggcugaagacuuuguugaggugcaucugcccgauguccacaaacagauuagcggcguggaccucgggcugccgaauuggggaaaguacguucuggugucugccggcguccucguggugcugaugcuugcgauccugaucaugacaugcugugggcggguuaacagaccuaaguccacccagcacagccucgagggaaccggccgcaaagucucugugacaucccagagcgggaaggugauuuccucuugggaaagcuauaaauccggcggagagacccggcuguga

SEQ ID NO: 223511 - RNA, 1575 nt, Artificial Sequence
  derived and/or modified CDS sequence (opt5) from glycoprotein__RABV__JX944583.1
augaucccccaggugcugugguucgucccucuccugguuuuuagcaugugcuucggcaaguuuccgauuuacaccauccccgacaaacuugggccuuggucccccauugauauccaccaucugucuuguccuaacaaucucgugguggaggacgaaggaugcacaaaccugagcggcuucuccuauauggagcuuaaggucggguacauuucugccaucaaagugaauggauuuacguguaccggcguugugacagaagcugagaccuauacaaacuucgucggguacgugaccacaaccuuuaagagaaaacacuuccggcccacgccugaugccugccgcgcggcuuauaauuggaagauggccggagacccgagauacgaagagagccugcauaaccccuauccugauuaccacuggcuccggaccguuaagacaaccaaagagucccuggugaucauuucucccagcgucgccgaccuggauccuuacgacaagucccuccauagccgcguguuucccucuggcaaauguuccggcaucacaauuagcucuaccuauugcuccacgaaucacgauuacacaaucuggaugccggaaaacccuagacuggggaccagcugugacauuuucacaaauucucggggaaagcgcgcuuccaaaggcagcaagaccugcggguuuguggaugagagaggacuuuauaagucccugaaaggcgccuguaagcucaaacugugcgggguccuuggacugcggcucauggacggcaccuggguugcuaugcaaacaucugaugaaacgaaguggugucccccugaccagcuggugaaccugcacgacuuccgcagcgaugagaucgagcaucucguggucgaggaacuggugaaaaagagagaagagugccuugacgcccuggaauccauuaugaccacaaaaagcguuucuuuucggcgccucucccaccugagaaaacuugugcccggcuucgggaaggcguacaccaucuucaauaagacacugauggaggccgaugcucauuauaagagcguccggaccuggaacgagaucauucccucuaaaggaugccuccgcgugggcgggagaugucacccucacguuaauggaguguuuuucaacggcaucauucuggggccggacggacauguccugauccccgaaaugcagagcucccuccugcagcaacacauggagcuucuggaaucuagcgugauuccucucaugcauccccuggccgauccuuccacggucuuuaaggacggcgaugaggcugaagacuucguggagguucaccuucccgaugugcauaaacagaucagcggcgucgaccuggggcucccgaauuggggaaaguacgugcugguuucugccggcgugcuggucgugcucaugcuggcgaucuuuauuaugacaugcugugggcgggugaacagaccuaaguccacccagcacagccuugagggaaccggccgcaaaguuucugucacaucccagagcgggaaggugaucuccucuugggaaagcuauaaauccggcggagagacccggcuguga

SEQ ID NO: 223512 - RNA, 1575 nt, Artificial Sequence; identical to SEQ ID NO: 222971
  derived and/or modified CDS sequence (opt5) from glycoprotein__RABV__JX944584.1

SEQ ID NO: 223513 - RNA, 1575 nt, Artificial Sequence
  derived and/or modified CDS sequence (opt5) from glycoprotein__RABV__JX944586.1
auggugccccagguccugcuguucguuccucugcuuguguuuagcaugugcuucggcaaguuuccgaucuacaccauucccgacaaacuggggccuuggucccccaucgauauucaccaucucucuuguccuaacaaucugguggucgaggacgaaggaugcacaaaccuuagcggcuucuccuauauggagcugaaggugggguacaucucugccauuaaaguuaauggauuuacguguaccggcguggucacagaagcugagaccuauacaaacuucgugggguacguuaccacaaccuuuaagagaaaacacuuccggcccacgccugaugccugccgcgcggcuuauaauuggaagauggccggagacccgagauacgaagagagccuccauaaccccuauccugauuaccacuggcugcggaccgugaagacaaccaaagagucccuggucaucaucucucccagcguggccgaccucgauccuuacgacaagucccugcauagccgcguguuucccucuggcaaauguuccggcauuacaaucagcucuaccuauugcuccacgaaucacgauuacacaauuuggaugccggaaaacccuagacuugggaccagcugugacaucuucacaaauucucggggaaagcgcgcuuccaaaggcgggaagaccugcggauuugucgaugagagaggccuguauaagagccucaaaggggccuguaagcugaaacuuugcggaguucugggccuccggcugauggacggcaccuggguggcuaugcaaacauccgaugaaacgaaguggugucccccugaccagcuggugaaccuccacgacuuccgcucugaugagauugagcaucuggucguggaggaacuuguuaaaaagagagaagagugccuggacgcccucgaaagcaucaugaccacaaaauccgugagcuuucggcgccugucucaccuuagaaagcugguccccggguucggaaaggcguacaccauuuucaauaaaacacucauggaggccgaugcucauuauaaguccauccggaccuggaacgagaucauucccagcaaaggcugccugcgcguugggggaagaugucacccucacgugaauggcguguuuuucaacgggaucauucugggaccggacggccauguccucauccccgaaaugcagucuagccugcuucagcaacacauggagcugcucgaauccucugugauuccucugaugcauccccuugccgauccuagcacggucuuuaaggacggcgaugaggcugaagacuucguggagguucaccuccccgaugugcauaaacagaucuccggggucgaccucggacugccgagcuggggcaaguacgugcugguuucugccggggugcucgucgugcugaugcuuacaaucuuuauuaugaccugcuguggacgggugagacgcccuaaguccacccagcacagccugggcgagacagggcggaaaguuucugucaccucccagagcggcaaggugaucuccucuugggaaagcuauaaauccggaggcgagacaagacucuga

SEQ ID NO: 223514 - RNA, 1575 nt, Artificial Sequence; identical to SEQ ID NO: 222971
  derived and/or modified CDS sequence (opt5) from glycoprotein__RABV__JX944587.1

SEQ ID NO: 223515 - RNA, 1575 nt, Artificial Sequence
  derived and/or modified CDS sequence (opt5) from glycoprotein__RABV__JX944588.1
auggugccccagguccugcuguucguuccucugcuuguguuuagccugugcuucggcaaguuuccgaucuacaccauucccgacaaacucgggccuuggucccccaucgauauucaccaucugucuuguccuaacaaucuuguggucgaggacgaaggaugcacaaaccugagcggcuucuccuauauggagcucaaggugggguacaucucugccauuaaaguuaauggauuuacguguaccggcguggucacagaagcugagaccuauacaaacuucgugggguacguuaccacaaccuuuagacggaagcacuuccgccccacgccugaugccugcagagcggcuuauaauuggaaacuggccggagacccgcgguacgaagagagccugcauaaccccuauccugauuaccacuggcuccgcaccgugaagacaaccaaggagucccuggucaucaucucucccagcguggccgaccuugauccuuacgacaaaucccugcauagcagaguguuucccggcggcaaguguucugggauuacaaucuccagcaccuauugcucuacgaaucacgauuacacaauuuggaugccggaaaacccucggcucggaaccuccugugacaucuucgucaauagccgcggcaaaagagcuucuaaagggggaaagacaugcggcuuuguugaugagcgggggcuguauaagucccuuaagggagccuguaaacugaagcucugcggcgugcccggccugcgccugauggacgggaccugggcugccauucaaaccagcgaugaaacaaaaugguguccucccaaccagcucgugaaucugcacgacuucagauccgacgagaucgagcaucuugucguggaggaacugguuaagaaacgggaagagugccucgaugcgcuggaaucuauuaugacgaccaagagcguguccuuucgcagacuuagccaccuccggaaacucguccccggauucggcaaggccuacacaaucuucaacaagacccugauggaggcugacgcccauuauaaaucugugcgcacauggaaugagaucauuccuuccaaggggugccugagaguuggaggccggugucacccgcacgugaacggggucuuuuucaauggaaucauucucggccccgauggccaugugcugaucccugaaaugcagagcucucuucugcagcaacacauggagcuccuggaaagcuccgucauuccccuuaugcauccucuggcugaccccucuaccguguuuaaagauggggacgaggccgaagauuucguugaggugcaccucccggacguccauaagcugaucagcggaguggaucugggccucccuuccugggggaaauacguucugaugagcgcgggagugcuuacggcccugaugcucaugaucuuucugaugacaugcuguagacgcggcaaccaggcugggucuaagcagcacggccuggagggaaccggccggaaggucuccgugaccagccagaacgggaaagugauuucuuccugggaaagcuauaaguccggaggcgagacaagacuuuga

SEQ ID NO: 223516 - RNA, 1575 nt, Artificial Sequence
  derived and/or modified CDS sequence (opt5) from glycoprotein__RABV__JX944593.1
auggugccccagguccugcuguucguuccucugcuugccuuuagcaugugcuucggcaaguuuccgaucuacaccauucccgacaaacuggggccuuggucccccaucgauauucaccaucucucuuguccuaacaaucuggugguggaggacgaaggaugcacaaaccuuagcggcuucuccuauauggagcugaaggucggguacaucucugcuauuaaagugaauggauuuacguguaccggcguugugacagaagccgagaccuauacaaacuucgucggguacgugaccacaaccuuuaagagaaaacacuuccggcccacgccugaugcgugccgcgcugccuauaauuggaagauggccggagacccgagauacgaagagagccuccauaaccccuauccugauuaccacuggcugcggaccguuaagacaaccaaagagucccuggugaucaucucucccagcgucgcugaccucgauccuuacgacaagucccugcauagccgcguguuucccucuggcaaauguuccggcauuacaaucagcucuaccuauugcuccacgaaucacgauuacacaauuuggaugccggaaaacccuagacuugggaccagcugugacaucuucacaaauucucggggaaagcgcgccuccaaaggcgggaagaccugcggauuuguggaugagagaggccuguauaagagccucaaaggggcuuguaagcugaaacuuugcggaguccugggccuccggcugauggacggcaccuggguugccaugcaaacauccgaugaaacgaaguggugucccccugaccagcuggugaaccuccacgacuuccgcucugaugagauugagcaucugguggucgaggaacuugugaaaaagagagaagagugccuggacgcgcucgaaagcaucaugaccacaaaauccguuagcuuucggcgccugucucaccuuagaaagcuggugcccggguucggaaaggccuacaccauuuucaauaaaacacucauggaggcugaugcccauuauaaguccguccggaccuggaacgagaucauccccagcaaaggcugccugcgcguugggggaagaugucacccucacgugaagggcguguuuuucaaugggauuauccugggaccggacggccauguccucauucccgaaaugcagucuagccugcuucagcaacacauggagcugcucgaauccucugugaucccucugaugcauccccuugcugauccuagcacggucuuuaaagacggcgaugaggccgaagacuucguggagguucaucugcccgaugugcacaagcagauuuccggggucgaccucggacugccgagcuggggcaaguacgugcugguuucugcgggggugcucgucgugcugaugcuuacaaucuuuaucauuaccugcuguggacgggugcacagaccuaaauccacccagcacggccucgggggcacaggacgcaagguuagcgucaccucucaguccggcaaagugaucagcuccugggagucuuauaagagcgggggagaaacacggcucuga

SEQ ID NO: 223517 - RNA, 1575 nt, Artificial Sequence
  derived and/or modified CDS sequence (opt5) from glycoprotein__RABV__JX987718.1
auggugccccagguccuucucuucguuccucugcuuguguuuagcaugugcuucggcaaguuuccgaucuacaccauucccgacaaacuggggccuuggucccccaucgauauucaccaucucucuuguccuaacaaucugguggucgaggacgaaggaugcacaaaccuuagcggcuucuccuauauggagcugaaggugggguacaucucugccauuaaaguuaauggauuuacguguaccggcguggucacagaagcugagaccuauacaaacuucgugggguacguuaccacaaccuuuaagagaaaacacuuccggcccacgccugaugccugccgcgcggcuuauaauuggaagauggccggagacccgagauacgaagagagccuccauaaccccuauccugauuaccacuggcugcggaccgugaagacaaccaaagagucccuggucaucaucucucccagcguggccgaccucgauccuuacgacaagucccugcauagccgcguguuucccucuggcaaaugucuuggcauuacaaucuccagcaccuauugcucuacgaaucacgauuacacaauuuggaugccggaaaacccuagacuggggaccuccugugacaucuucacaaauagccggggaaagcgcgcuucuaaaggcuccaagaccugcggguuugucgaugagagaggacucuauaagagccugaaaggcgccuguaagcugaaacugugcgggguucucggacugcggcugauggacggcaccuggguggcuaugcaaacauccgaugaaacgaaguggugucccccugaccagcucgugaaccugcacgacuuccgcucugaugagauugagcaucuugucguggaggaacugguuaaaaagagagaagagugccucgacgcccuggaaagcaucaugaccacaaaauccgugagcuuucggcgccuuucucaccugagaaagcucguccccggcuucgggaaggcguacaccauuuucaauaaaacacugauggaggccgaugcucauuauaaguccgugcggaccuggaacgagaucauccccagcaaaggaugccugcgcguuggcgggagaugucacccucacgugaauggagucuuuuucaacggcauuauccucgggccggacggacaugugcugauucccgaaaugcagucuagccuucugcagcaacacauggagcuccuggaauccucugucaucccucuuaugcauccccuggccgauccuagcacgguguuuaaggagggcgacgaagcugaggauuucguugaggugcaccuccccgacguccauaaacagauuuccggcguggaucuggggcugccgagcuggggaaaguacguucucgugucugccggcguccugguggugcuuaugcugacaaucuuuaucaugaccugcugugggcggguucacagaccuaaguccacccagcacagccucggaggcacagggcgcaaagucucugugaccucccagagcggcaaggugauuuccucuugggaaagcuauaaauccggaggcgagacacggcuguga

SEQ ID NO: 223518 - RNA, 1575 nt, Artificial Sequence
  derived and/or modified CDS sequence (opt5) from glycoprotein__RABV__JX987719.1
auggugccccagguccugcuguucguuccucugcuuguguuuagcaugugcuucggcaaguuuccgaucuacaccauucccgacaaacuggggccuuggucccccaucgauauucaccaucucucuuguccuaacaaucugguggucgaggacgaaggaugcacaaaccuuagcggcuucuccuauauggagcugaaggugggguacaucucugccauuaaaguuaauggauuuacguguaccggcguggucacagaagcugagaccuauacaaacuucgugggguacguuaccacaaccuuuaagagaaaacacuuccggcccacgccugaugccugccgcgcggcuuauaauuggaagcucgccggagacccgagauacgaagagagccugcauaaccccuauccugauuaccacuggcugcggaccgugaagacaaccaaagagucccucgucaucaucucucccagcguggccgaccuggauccuuacgacaagucccuucauagccgcguguuucccucuggcaaaugucugggcauuacaaucuccagcaccuauugcucuacgaaucacgauuacacaauuuggaugccggaaaacccuagacucgggaccuccugugacaucuucacaaauagccggggaaagcgcgcuucuaaaggcuccaagaccugcggguuugucgaugagagaggacuguauaagagccuuaaaggcgccuguaagcugaaacucugcgggguucugggacugcggcucauggacggcaccuggguggcuaugcaaacauccgaugaaacgaaguggugucccccugaccagcuggugaaccuucacgacuuccgcucugaugagauugagcaucuggucguggaggaacucguuaaaaagagagaagagugccuggacgcccuugaaagcaucaugaccacaaaauccgugagcuuucggcgccugucucaccucagaaagcugguccccggcuucgggaaggcguacaccauuuucaauaaaacacugauggaggccgaugcucauuauaaguccauccggaccuggaacgagaucauucccagcaaaggaugccuccgcgugggcgggagaugucacccucacguuaauggaguguuuuucaacggcaucauucuggggccggacggacauguccuuauccccgaaaugcagucuagccugcuccagcaacacauggagcugcuugaauccucugugauuccucugaugcauccccucgccgauccuagcacggucuuuaaggacggcgaugaggcugaagacuucguggagguucaccuccccgaugugcauaaacagaucuccggcgucgaccuggggcucccgagcuggggaaaguacgugcugguuucugccggcgugcuugucgugcugaugcucacaaucuuuauuaugaccugcugugggcgggugagacgcccuaaguccacccagcacagccugggaggcacagggcggaaaguuucugucaccucccagagcggcaaggugaucuccucuugggagagcuauaaauccggaggcgaaacaagacuguga

SEQ ID NO: 223519 - RNA, 1575 nt, Artificial Sequence; identical to SEQ ID NO: 223517
  derived and/or modified CDS sequence (opt5) from glycoprotein__RABV__JX987720.1

SEQ ID NO: 223520 - RNA, 1575 nt, Artificial Sequence
  derived and/or modified CDS sequence (opt5) from glycoprotein__RABV__JX987721.1
auggugccccagguccugcuguucguuccucugcuuguguuuagccugugcuucggcaaguuuccgaucuacaccauucccgacaaacucgggccuuggucccccaucgauauucaccaucugucuuguccuaacaaucuuguggucgaggacgaaggaugcacaaaccugagcggcuucuccuauauggagcucaaggugggguacaucucugccauuaaaguuaauggauuuacguguaccggcguggucacagaagcugagaccuauacaaacuucgugggguacguuaccacaaccuuuagacggcgccacuucagacccacgccugauaccugccgggccgcguauaauuggaagcuggcuggagacccgcgcuacgaagagagccugcauaaccccuauccugauuaccacuggcucagaacagugaaaaccacaaaggagucccuggucaucaucucucccagcguggccgaccuugauccuuacgacaagucccugcauagccggguguuucccggcggcaaauguucugggauuaccgucuccagcacguauugcucuacaaaucacgauuacaccaucuggaugccggaaaacccucgccucggaacauccugugacauuuucguuaauagcagaggcaagcgggccucuaaagggggaaagaccugcggcuuuguggaugagcgcgggcuguauaaaucccuuaagggagcuuguaagcugaaacucugcggcgugcccggccugagacugauggacgggaccugggccgcuauccaaacaagcgaugaaacgaagugguguccucccgaccagcucgucaaccugcacgacuuccgguccgaugagauugagcaucuugugguugaggaacuggugaaaaagcgcgaagagugccucgacgcccuggaaucuaucaugaccacaaaaagcgucuccuuuagacggcuuagccaccuccgcaagcucgugcccggauucggcaaagcguacaccauuuucaauaagacacugauggaggccgaugcucauuauaagucuguuagaaccuggaacgagaucaucccuuccaaagggugccugcgggugggaggcagaugucacccgcacgucaaugggguguuuuucaacggaauuauccucggccccgacggccauguccugauuccugaaaugcagagcucucuucugcagcaacacauggagcuccuggaaagcuccgugaucccccuuaugcauccucuggccgaucccucuacgguuuuuaaggacgggggagaggcugaagauuucguggagguccaccucccggacgugcauaaacugauuagcggcguugaucuggggcucccuuccuggggaaaguacgugcugaugagcgccggcguccuuacagcgcugaugcucaugaucuuucugaugaccugcugucgccgggggaaucaggccggcucuaaacagcacggacuggagggcaccgggagaaagguguccgugacaagccagaacggaaagguuaucucuuccugggaaagcuauaaauccggcggggagacccgccuuuga

SEQ ID NO: 223521 - RNA, 1575 nt, Artificial Sequence; identical to SEQ ID NO: 223517
  derived and/or modified CDS sequence (opt5) from glycoprotein__RABV__JX987723.1

SEQ ID NO: 223522 - RNA, 1575 nt, Artificial Sequence
  derived and/or modified CDS sequence (opt5) from glycoprotein__RABV__JX987724.1
auggugccccagguccugcuguucguuccucugcuuguguuuagccugugcuucggcaaguuuccgaucuacaccauucccgacaaacucgggccuuggucccccaucgauauucaccaucugucuuguccuaacaaucuuguggucgaggacgaaggaugcacaaaccugagcggcuucuccuauauggagcucaaggugggguacaucucugccauuaaaguuaauggauuuacguguaccggcguggucacagaagcugagaccuauacaaacuucgugggguacguuaccacaaccuuuagacggaagcacuuccgccccacgccugaugccugcagagcggcuuauaauuggaaacuggccggagacccgcgguacgaagagagccugcauaaccccuauccugauuaccacuggcuccgcaccgugaagacaaccaaggagucccuggucaucaucucucccagcguggccgaccuugauccuuacgacaaaucccugcauagcagaguguuucccggcggcaaguguucugggauuacagucuccagcaccuauugcucuacgaaucacgauuacacaaucuggaugccggaaaacccucggcucggaaccuccugugacauuuucguuaauagccgcggcaaaagagcuucuaaagggggaaagacaugcggcuuuguggaugagcgggggcuguauaagucccuuaagggagccuguaaacugaagcucugcggcgugcccggccugcgccugauggacgggaccugggcugccauccaaaccagcgaugaaacaaaaugguguccucccgaccagcucgucaaccugcacgacuucagauccgaugagauugagcaucuugugguugaggaacuggugaagaaacgggaagagugccucgacgcgcuggaaucuaucaugacgaccaagagcgucuccuuucgcagacuuagccaccuccggaaacucgugcccggauucggcaaggccuacacaauuuucaauaagacccugauggaggcugaugcccauuauaaaucuguucgcacauggaacgagaucaucccuuccaaggggugccugagagugggaggccggugucacccgcacgucaaugggguguuuuucaacggaauuauccucggccccgacggccauguccugauuccugaaaugcagagcucucuucugcagcaacacauggagcuccuggaaagcuccgugaucccccuuaugcauccucuggcugaucccucuaccguuuuuaaagacggggaugaggccgaagacuucguggagguccaccucccggaugugcauaagcugauuagcggaguugaccugggccucccuuccugggggaaauacgugcugaugagcgcgggaguccuuacggcccugaugcucaugaucuuucugaugacaugcuguagacgcggcaaucaggcugggucuaagcagcacggccuggagcggaccggaagaaagguguccgugaccagccagaacggcaaaguuaucucuuccugggaaagcuauaaguccgggggagagacacgccuuuga

SEQ ID NO: 223523 - RNA, 1575 nt, Artificial Sequence
  derived and/or modified CDS sequence (opt5) from glycoprotein__RABV__JX987725.1
auggugccccagguccugugguucguuccucuccugguguuuagcaugugcuucggcaaguuuccgaucuacaccauucccgacaaacuugggccuuggucccccaucgaucugcaccaucucucuuguccuaacaaucugguggucgaggacgaaggaugcacaaaccuuagcggcuucuccuauauggagcugaaggugggguacauuucugccaucaaaguuaauggauuuacguguaccggcguggucacagaagcugagaccuauacaaacuucgugggguacguuaccacaaccuuuaagagaaaacacuuccggcccacgccugaugccugccgcgcggcuuauaauuggaagauggccggagacccgagauacgaagagagccuccauaaccccuauccugauuaccacuggcugcggaccgugaagacaaccaaagagucccuggucauuaucucucccagcguggccgaccucgauccuuacgacaagucccugcauagccgcguguuucccucuggcaaauguuccggcaucacaauuagcucuaccuauugcuccacgaaucacgauuacacaaucuggaugccggaaaacccuagacuugggaccagcugugacauuuucacaaauucucggggaaagcgcgcuuccaaaggcagcaagaccugcggguuugucgaugagagaggacuguauaagucccucaaaggcgccuguaagcugaaacuuugcgggguucugggacuccggcugauggacggcaccuggguggcuaugcaaacaucugaugaaacgaaguggugucccccugaccagcuggugaaccuccacgacuuccgcagcgaugagaucgagcaucuggucguggaggaacuuguuaaaaagagagaagagugccuggacgcccucgaauccauuaugaccacaaaaagcgugucuuuucggcgccugucccaccuuagaaagcugguccccggcuucgggaaggcguacaccaucuucaauaaaacacucauggaggccgaugcucauuauaagagcgugcggaccuggaacgagauuauccccucuaaaggaugccugcgcguuggcgggagaugucacccucacgugaauggagucuuuuucaacggcaucauucuggggccggacggacaugugcucauccccgaaaugcagagcucccugcuucagcaacacauggagcugcucgaaucuagcgucauuccucugaugcauccccuugccgauccuuccacgguguuuaaggacggcgaugaggcugaagacuucguugaggugcaucugcccgauguccacaaacagaucagcggcguggaccucgggcugccgaauuggggaaaguacguucuggugucugccggcguccucguggugcugaugcuugcgauuuuuaucaugacaugcugugggcggguuaacagaccuaaguccacccagcacagccuggagggaaccggccgcaaagucucugugacaucccagagcgggaaggugaucuccucuugggaaagcuauaaauccggcggagagacccggcucuga

SEQ ID NO: 223524 - RNA, 1575 nt, Artificial Sequence; identical to SEQ ID NO: 222971
  derived and/or modified CDS sequence (opt5) from glycoprotein__RABV__JX987727.1

SEQ ID NO: 223525 - RNA, 1575 nt, Artificial Sequence
  derived and/or modified CDS sequence (opt5) from glycoprotein__RABV__JX987728.1
auggugccccaggcccuucucuucgucccucugcuuguuuuuagccugugcuucggcaaguuuccgaucuacaccauucccgacaaacucgggccuuggucccccaucgauauucaccaucugucuuguccuaacaaucuugugguggaggacgaaggaugcacaaaccugagcggcuucuccuauauggagcucaaggucggguacaucucugcuauuaaagugaauggauuuacguguaccggcguugugacagaagccgagaccuauacaaacuucgucggguacgugaccacaaccuuuaagagaaaacacuuccggcccacgccugaugcgugccgcgcugccuauaauuggaagauggccggagacccgagauacgaagagagccugcauaaccccuauccugauuaccacuggcugcggaccguuaagacaaccaaagagucccucgugaucaucucucccagcgucgcugaccuggauccuuacgacaagucccuucauagccgcguguuucccucuggcaaauguuccggcauuacagugagcucuaccuauugcuccacgaaucacgauuacacaaucuggaugccggaaaacccuagacuggggaccagcugugacauuuucacaaauucucggggaaagcgcgccuccaaaggcagcaagaccugcggguuugucgaugagagaggacucuauaagucccugaaaggcgcuuguaagcugaaacugugcgggguucucggacugcggcugauggacggcaccuggguggccaugcaaacaucugaugaaacgaaguggugucccccugaccagcucgugaaccugcacgacuuccgcagcgaugagaucgagcaucuugucguggaggaacugguuaaaaagagagaagagugccucgacgcgcuggaauccauuaugaccacaaaaagcgugucuuuucggcgccuuucccaccugagaaagcucguccccggcuucgggaaggccuacaccaucuucaauaaaacacugauggaggcugaugcccauuauaagagcgugcggaccuggaacgagauuauccccucuaaaggaugccugcgcguuggcgggagaugucacccucacgugaauggagucuuuuucaacggcaucauucucgggccggacggacaugugcugauccccgaaaugcagagcucccuucugcagcaacacauggagcuccuggaaucuagcgucauuccucuuaugcauccccuggcugauccuuccacgguguuuaaggacggcgaugaggccgaagacuucguugaggugcaccuccccgauguccauaaacaggugagcggcguugaccuggggcugccgaauuggggaaaguacgugcuccugucugcgggcgcccuuaucgcucugaugcucaugauuuuucugaugacaugcugucggagagucaaccgcccugaguccacccagcccagccuugggggaaccggccggaaggugucuaucacaucccagagcgggaaagugaucuccucuugggaaagcuauaaguccggcggagagaccagacuguga

SEQ ID NO: 223526 - RNA, 1575 nt, Artificial Sequence
  derived and/or modified CDS sequence (opt5) from glycoprotein__RABV__JX987729.1
auggugccccagguccugcuguucguuccucugcuuguguuuccgcugugcagcggcaaguuccccaucuacaccauuccugacaaacucgggcccugguccccuaucgauauucaccaucugucuugucccaacaaucuuguggucgaggacgaaggaugcacaaaccugagcggcuuuuccuauauggagcucaaggugggguacaucucugccauuaaaguuaauggauucacguguaccggcguggucacagaagcugagaccuauacaaacuuugugggguacguuaccacaaccuucagacggaagcacuuucgcccuacgccggaugccugcagagcggcuuauaauuggaaaauggccggagacccccgguacgaagagagccugcauaacccuuaucccgauuaccacuggcugcgcaccgugaagacaaccaaggagucccucgucaucaucucuccuagcguggccgaccuggaucccuacgacaaaucccuucauagcagaguguucccgucuggcaaguguuccggcauuacagucagcucuaccuauugcuccacgaaucacgauuacacaaucuggaugccugaaaacccccggcuggggaccagcugugacauuuuuacaaauucucgcggaaaaagagcuuccaagggcagcaaaaccugcggguucguugaugagcggggacucuauaagucccugaagggcgccuguaaacuuaagcugugcggggugcucggacugcgccugauggacggcaccuggaucgcuaugcaaacaucugaugaaacgaaaugguguccucccgaccagcucgugaaccugcacgacuuuagaagcgaugagauugagcaucuugucguggaggaacugguuaagaaacgggaagagugccucgacgcccuggaauccaucaugaccacaaagagcgugucuuuccgcagacuuucccaucugcggaaacucguccccggcuuugggaaggcguacaccauuuucaauaagacacugauggaggccgaugcucacuauaaaagcgugcgcaccuggaacgagaucaucccuucuaagggaugccugagaguuggcgggcggugucacccgcacgugaauggagucuucuuuaacggcauuauccucgggcccgacggacaugugcugauuccugaaaugcagagcucccuucugcagcaacacauggagcuccuggaaucuagcgucaucccccuuaugcauccucuggccgaucccuccacgguguucaaagacggcgaugaggcugaagacuuuguugaggugcaccucccggauguccauaaacaggugagcggcguugaccuggggcugccuaauuggggaaaguacgugcuccugucugccggcgcgcuuauugcccugaugcucaugaucuuccugaugacaugcuguagaaaggucaaccgccccgaguccacccagcggagccucgggggaaccggcagaaaggugucuaucacaucccagagcgggaaagugauuuccucuugggaaagcuauaaguccggcggagagacccgccuuuga

SEQ ID NO: 223527 - RNA, 1575 nt, Artificial Sequence
  derived and/or modified CDS sequence (opt5) from glycoprotein__RABV__JX987730.1
auggugccccaggcccugcuguucgucccucugcuugcuuuuccgaugugcuucggcaaguuucccaucuacaccauuccugacaaacuggggcccuggagcccuaucgauauucaccaucucuccugucccaacaaucugguuguggaggacgaaggaugcacaaaccuuucuggcuucagcuauauggagcugaaggugggguacaucuccgccauuaaagucaauggauuuacguguaccggcgugguuacagaagcggagaccuauacaaacuucgugggguacgucaccacaaccuuuaagagaaaacacuuccggccuacgccggaugcuugccgcgccgccuauaauuggaagauggcuggagaccccagauacgaagagucucuccauaacccuuaucccgauuaccacuggcugcggaccgugaagacaaccaaagagagccugaucaucauuuccccuucuguugccgaccucgaucccuacgacaagagccugcauucccgcguguuuccgagcggcaaaugucuuggcaucacaauuucuuccaccuauugcagcacgaaucacgauuacacaaucuggaugccugaaaaccugagacucgggaccucuugugacauuuucacaaauucccggggaaagcgcgcuagcaaaggcucuaagaccugcggguuugucgaugagagaggacuguauaagucccuuaaaggcgccuguaagcugaaacucugcggggugcugggacugcggcucauggacggcaccuggguggcgaugcccacaagcgaugaaacgaagugguguccucccgaccaacuggucaaccuucacgacuuccgcuccgaugagaucgagcaucugguuguggaggaacucgugaaaaagagagaagagugccuggacgcccuugaaucuauuaugaccacaaaaagcgucuccuuucggcgccugagccaccucagaaagcuggugcccggcuucgggaaggcuuacaccaucuucaauaaaacacugauggaggccgaugcucauuauaagucuguucggaccuggaacgagaucauuccuuccaaaggaugccuccgcgugggcgggagaugucacccgcacgucaauggaguguuuuucaacggcaucauucuggggcccgacggacauguucuuaucccugaaaugcagagcucucugcuccagcagcacauggagcugcuugaaagcuccgugauuccccugaugcauccucucgccgaucccucuacggucuuuaaggacggcgaugaggcggaagacuucguggagguccaccucccggaugugcauaaacaaaucagcggcguugaccuggggcucccuaauuggggaaaguacgugcugaucauugccggcguccuuaucgcuaugauucugacaaucuuucucaugaccugcugugggcggggaaacagacccaaguccacccagcacagccugggcgggauuggccgcaaagugucuuccacaagccagucuggaaagguuaucuccagcugggaguccuauaaaucuggcggggaaacccggcuguga

SEQ ID NO: 223528 - RNA, 1575 nt, Artificial Sequence; identical to SEQ ID NO: 223527
  derived and/or modified CDS sequence (opt5) from glycoprotein__RABV__JX987731.1

SEQ ID NO: 223529 - RNA, 1575 nt, Artificial Sequence
  derived and/or modified CDS sequence (opt5) from glycoprotein__RABV__JX987732.1
auggugccccaggcccuucucuucgucccucugcuuguuuuuccgcugugcuucggcaaguuucccaucuacaccauuccugacaaacucgggcccuggagcccuaucgauauucaccaucuguccugucccaacaaucuugugguggaggacgaaggaugcacaaaccugucuggcuucagcuauauggagcucaaggucggguacaucuccgcuauuaaagugaauggauuuacguguaccggcguugugacagaagccgagaccuauacaaacuucgucggguacgugaccacaaccuuuaagagaaaacacuuccggccuacgccggaugcgugccgcgcugccuauaauuggaagauggccggagaccccagauacgaagagucucugcauaacccuuaucccgauuaccacuggcugcggaccguuaagacaaccaaagagagccucgugaucaucuccccuucugucgcugaccuggaucccuacgacaagagccuucauucccgcguguuuccgagcggcaaauguucuggcauuacaguguccagcaccuauugcucuacgaaucacgauuacacaaucuggaugccugaaaaccccagacuggggaccuccugugacauuuucacaaauagccggggaaagcgcgccucuaaaggcuccaagaccugcggguuugucgaugagagaggacucuauaagagccugaaaggcgcuuguaagcugaaacugugcgggguucucggacugcggcugauggacggcaccuggguggccaugcaaacauccgaugaaacgaagugguguccucccgaccagcucgugaaccugcacgacuuccgcucugaugagaucgagcaucuugucguggaggaacugguuaaaaagagagaagagugccucgacgcgcuggaaagcauuaugaccacaaaauccgugagcuuucggcgccuuucucaccugagaaagcucguccccggcuucgggaaggccuacaccaucuucaauaaaacacugauggaggcugaugcccauuauaaguccgugcggaccuggaacgagauuaucccuagcaaaggaugccugcgcguuggcgggagaugucacccgcacgugaauggagucuuuuucaacggcaucauucucgggcccgacggacaugugcugaucccugaaaugcagucuagccuucugcagcaacacauggagcuccuggaauccucugucauuccccuuaugcauccucuggcugaucccagcacgguguuuaaggacggcgaugaggccgaagacuucguugaggugcaccucccggauguccauaaacagguguccggcguugaccuggggcugccuaauuggggaaaguacgugcuccugagcgcgggcgcccuuaucgcucugaugcucauuaucuuucugaugacaugcugucggagagucaaccgccccgagucuacccagcggucccuugggggaaccggcagaaaggugagcgugacaucucaguccgggaaaguuaucagcuccugggaaucuuauaagagcggcggagagacccgccuguga

SEQ ID NO: 223530 - RNA, 1575 nt, Artificial Sequence
  derived and/or modified CDS sequence (opt5) from glycoprotein__RABV__JX987733.1
auggugccccaggcccugcuguucgucccucugcuugcuuuuccgaugugcuucggcaaguuucccaucuacaccauuccugacaaacuggggcccuggagcccuaucgauauucaccaucucuccugucccaacaaucugguuguggaggacgaaggaugcacaaaccuuucuggcuucagcuauauggagcugaaggugggguacaucuccgccauuaaagucaauggauuuacguguaccggcgugguuacagaagcggagaccuauacaaacuucgugggguacgucaccacaaccuuuaagagaaaacacuuccggccuacgccggaugcuugccgcgccgccuauaauuggaagauggcuggagaccccagauacgaagagucucuccauaacccuuaucccgauuaccacuggcugcggaccgugaagacaaccaaagagagccugaucaucauuuccccuucuguugccgaccucgaucccuacgacaagagccugcauucccgcguguuuccgagcggcaaaugucuuggcaucacaauuucuuccaccuauugcagcacgaaucacgauuacacaaucuggaugccugaaaaccugagacucgggaccucuugugacauuuucacaaauucccggggaaagcgcgcuagcaaaggcucuaagaccugcggguuugucgaugagagaggacuguauaagucccuuaaaggcgccuguaagcugaaacucugcggggugcugggacugcggcucauggacggcaccuggguggcgaugcaaacaagcgaugaaacgaaguggugucccccugaccagcuggucaaccuucacgacuuccgcuccgaugagaucgagcaucugguuguggaggaacucgugaaaaagagagaagagugccuggacgcccuugaaucuauuaugaccacaaaaagcgucuccuuucggcgccugagccaccucagaaagcuggugcccggcuucgggaaggcuuacaccaucuucaauaaaacacugauggaggccgaugcucauuauaagucuguucggaccuggaacgagaucauucccuccaaaggaugccuccgcgugggcgggagaugucacccucacgucaauggaguguuuuucaacggcaucauucuggggccggacggacauguucuuauccccgaaaugcagagcucucugcuccagcaacacauggagcugcuugaaagcuccgugauuccucugaugcauccccucgccgauccuucuacggucuuuaaggacggcgaugaggcggaagacuucguggagguccaccuccccgaugugcauaaacagaucagcggcguugaccuggggcucccgaauuggggaaaguacgugcugaucauugccggcguccuuaucgcuaugauucugacaaucuuucucaugaccugcugugggcggggaaacagaccugaguccacccagcacagccugggcgggauuggccgcaaggugucugccacaucccagagcggaaaaguuaucucuuccugggaaagcuauaaguccggcggggagacccggcuguga

SEQ ID NO: 223531 - RNA, 1575 nt, Artificial Sequence
  derived and/or modified CDS sequence (opt5) from glycoprotein__RABV__JX987734.1
auggugccccaggcccugagcuucgucccucuccugguuuuuccgcuuugcuucggcaaguuucccaucuacaccauuccugacaaacuggggcccugguccccuaucgauauucaccaucucucuugucccaacaaucuggugguggaggacgaaggaugcacaaaccuuagcggcuucuccuauauggagcugaaggucggguacaucucugcuauuaaagugaauggauuuacguguaccggcguugugacagaagccgagaccuauacaaacuucgucggguacgugaccacaaccuuuaagagaaaacacuuccggccuacgccggaugcgugccgcgcugccuauaauuggaagauggccggagaccccagauacgaagagagccuccauaacccuuaucccgauuaccacuggcugcggaccguuaagacaaccaaagagucccuggugaucaucucuccuagcgucgcugaccucgaucccuacgacaagucccugcauagccgcguguuuccgucuggcaaaugucuuggcauuacaguguccagcaccuauugcucuacgaaucacgauuacacaaucuggaugccugaaaaccccagacuggggaccuccugugacauuuucacaaauagccggggaaagcgcgccucuaaaggcuccaagaccugcggguuugucgaugagagaggacucuauaagagccugaaaggcgcuuguaagcugaaacugugcgggguucucggacugcggcugauggacggcaccuggguggccaugcagacauccgaugaaacgaagugguguccucccgaccagcucgugaacauccacgacuuccgcucugaugagauugagcaucuggucguggaggaacuuguuaaaaagagagaagagugccuggacgcgcucgaaagcaucaugaccacaaaauccgugagcuuucggcgccugucucaccuuagaaagcugguccccggcuucgggaaggccuacaccauuuucaauaaaacacucauggaggcugaugcccauuauaaguccgugcggaccuggaacgagaucaucccuagcaaaggaugccugcgcguuggcgggagaugucacccgcacgugaauggagucuuuuucaacggcauuauccuggggcccgacggacaugugcucauuccugaaaugcagucuagccugcuucagcaacacauggagcugcucgaauccucugucaucccccugaugcauccucuugcugaucccagcacgguguuuaaggacggcgaugaggccgaagacuucguugaggugcaucugccgaauguccacaaacagguguccggcguugaucucgggcugccuaacuggggaaaguacgugcugcucagcgcgggcgcccugauugcucuuaugcugaucaucuuucucaugacaugcugucggagagucaaccgcucugaguccacccagcggagccuugggggagccggcagaaaggugucuauuaccucccaagggggcaaagugaucagcuccugggaaucuuauaagagcggaggcgagacacgccuguga

SEQ ID NO: 223532 - RNA, 1575 nt, Artificial Sequence; identical to SEQ ID NO: 223410
  derived and/or modified CDS sequence (opt5) from glycoprotein__RABV__JX987749.1

SEQ ID NO: 223533 - RNA, 1575 nt, Artificial Sequence
  derived and/or modified CDS sequence (opt5) from glycoprotein__RABV__KC169986.1
augaucccccaggugcugcuguucgucccucugcuuguuuuuagcuccugcuucggcaaguuuccgauuuacaccauccccgacaaacuggggccuuggucucccauugauauccaccaucucagcuguccuaacaaucuggugguggaggacgaaggaugcacaaaccuuuccggcuucucuuauauggagcugaaggucggguacauuagcgccaucaaagugaauggauuuacguguaccggcguugugacagaagcugagaccuauacaaacuucgucggguacgugaccacaaccuuuaagagaaaacacuuccggcccaugccuggagccugccgcgcggcuuauaauuggaagauggccggcgauccgagauacgaagagucccuccauaaccccuauccugacuaccacuggcugcggacgguuaagaccacaaaagagucucuggugaucauuagccaauccgucgccgaucucgaccccuacgauaagagccugcauucucgcguguuuccuggcgggaaauguuccggaaucaccgugagcucuacaugcuguuccaccaaucacgacuauacgauuuggaugcccgaaaacccgagacuuggcacaagcugcgauaucuucaccaauucucgggggaagcgcgcuuccaaaggaggcaagacauguggguuugucgacgagagaggacuguacaagagccucaaaggcgccugcaagcugaaacuuuguggcguucuggggcuccggcugauggauggaaccuggguggcuauucagaccuccgacgaaaucaaguggugcucuccugaucagcuggugaaccuccacgacuuccauagcgacgagauugagcaccuggucguggaggaacuuguuaaaaagcgcgaagagugccuggaugcccucgaaacaaucaugacgaccaaauccgugagcuuuagacggcugucucaucuucgcaagcugguccccggcuucgggaaggcguauacaaucuucaauaaaacccucauggaggccgacgcucacuacaaguccauuagaacaugggaugagaucauuccuagcaaaggaugucugcgggugggcgggcgcugccacccccauguuaacggaguguuuuucaauggcaucauucugggccccgacgggcacguccucaucccugaaaugcagucuagccugcuucaucaacacauggagcugcucgaauccucugugaucccgcugaugcauccccuugccgauccuagcgcugucuuuaaggacggagaugaggccgaagacuucguggagguucaccuccccgaugugcacaaacagauuuccggcgucgaccucgggcugccuaacuggggaaaguaugugcugaucagcgcgggcgcccucaccgcuucuaugcugaugauuuuucuuaugacguguugcagaaaggccaaucgggcugaguccauccagcauaaccccggggaaacaggcagaaaaguuagcgugaccucucacaacggacgcgucauuuccagcugggaguccuacaagucuggcggggaaaccaaacuguga

SEQ ID NO: 223534 - RNA, 1575 nt, Artificial Sequence
  derived and/or modified CDS sequence (opt5) from glycoprotein__RABV__KC171643.1
auggugccccaggcccuucucuucgucccucugcuuguuuuuagcaugugcuucggcaaguuuccgaucuacaccauucccgacaaacuggggccuuggucccccaucgauauucaccaucucucuuguccuaacaaucuggugguggaggacgaaggaugcacaaaccuuagcggcuucuccuauauggagcugaaggucggguacaucucugcuauuaaagugaauggauuuacguguaccggcguugugacagaagccgagaccuauacaaacuucgucggguacgugaccacaaccuuuaagagaaaacacuuccggcccacgccugaugcgugccgcgcugccuauaauuggaagauggccggagacccgagauacgaagagagccuccauaaccccuauccugauuaccacuggcugcggaccguuaagacaaccaaagagucccuggugaucaucucucccagcgucgcugaccucgauccuuacgacaagucccugcauagccgcguguuucccaauggcaaauguucuggcauuacaaucuccagcaccuauugcccgacgaaccacgauuacacaauuuggcuuccugaaaaucccagacuggggaccucuugugacaucuucacaaacucccggggaaagcgcgccagcaaaggcucuaagaccugcggguuuguggaugagagaggacucuauaagucccugaaaggcgcuuguaagcugaaacugugcgggguccucggacugcggcugauggacggcaccuggguugccaugcaagcgagcgaugaaacaaagugguguccucccgaccagcucgugaaucugcacgacuuccgcuccgaugagauugagcaucuuguggucgaggaacuggugaaaaagagagaagagugccucgacgcccuggaaucuaucaugacgaccaaaagcguuuccuuucggcgccuuagccaccugagaaagcucgugcccggcuucgggaaggcuuacacaauuuucaacaaaacccugauggaggccgaugcucauuauaagucuguccggacauggaaugagaucaucccuuccaaaggaugccugcgcgugggcgggagaugucacccgcacguuaacggaguguuuuucaauggcauuauccucgggcccgacggacauguccugauuccugaaaugcagagcucucuucugcagcaacacauggagcuccuggaaagcuccguggucccccuuaugcauccucuggccgaucccucuaccgugcucaaggacggcgaugaggcggaaaacuuuguugaggugcaucugccggacguccacaaacagaucagcggcguggaucuggggcucccuaacuggggaaaguacguucugguguccgccggcguccuuauugcucugaugcucaucaucuuccugaugacgugcugugggcgggugaauagacccaagagcacacagcacaaccugggaggcaccgggcgcaaagugucuguuaccccucaguccggcaaggucauuagcucuugggaguccuauaaaagcggaggcgggacacggcuuuga

SEQ ID NO: 223535 - RNA, 1575 nt, Artificial Sequence; identical to SEQ ID NO: 222886
  derived and/or modified CDS sequence (opt5) from glycoprotein__RABV__KC171644.1

SEQ ID NO: 223536 - RNA, 1575 nt, Artificial Sequence; identical to SEQ ID NO: 222891
  derived and/or modified CDS sequence (opt5) from glycoprotein__RABV__KC171645.1

SEQ ID NO: 223537 - RNA, 1575 nt, Artificial Sequence
  derived and/or modified CDS sequence (opt5) from glycoprotein__RABV__KC252633.1
auggugccccugguccuccuguucguuccucuucugguguuuccgcucugcagcggcaaguuccccaucuacaccauuccugacaaacuggggcccugguccccuaucgauauucaccaucuuucuugucccaacaaucugguggucgaggacgaaggaugcgccaaccucagcggcuuuuccuauauggagcugaaggugggguacaucucugcuauuaaaguuaauggauucacauguacgggcguggucaccgaagccgagacauauaccaacuuugugggguacguuacaaccacauucagacggaagcacuuucgcccuaccccggaugcgugcagagcugccuauaauuggaaaauggccggagacccccgguacgaagagagccugcauaacccuuaucccgauuaccacuggcuccgcacggugaagaccacaaaggagucccuggucaucaucucuccuagcguggcugaccuugaucccuacgacaaaucccugcauagcagaguguucccgucuggcaaguguuccggcauuaccgucagcucuacauauugcuccaccaaucacgauuacacgaucuggaugccugaaaaccuccggcuggggacaagcugugacauuuuuaccaauucucgcggaaaaagagccuccaagggcagcaaaacaugcggguucguugaugagcggggacuuuauaagucccugaagggcgcuuguaaacucaagcugugcggggugcugggacuccgccugauggacggcaccuggguggccaugcagaccucuggcgaaacaaaauggugucccccugaucaacuugucaaccugcacgacuuuagaagcgacgagaucgagcaucucgugguugaggaacuggugaagaaacgggaagagugccuugaugcgcuggaauccauuaugacgaccaagagcgucucuuuccgcagacucucccaucugcggaaacuggugcccggguuuggaaaggccuacacaaucuucaauaagacccucauggaggcugacgcccacuauaaaagcguucgcacauggaacgagauuauccccucuaagggcugccugagagucgggggacggugucacccucacgugaauggcguguucuuuaacgggaucauucuuggaccggauggccauguccugauccccgaaaugcagagcucccuccugcagcagcacauggagcuucuggaaucuagcgugauuccucucaugcauccccuggcugacccuuccaccguuuucaaagauggcgacgaggccgaagauuuuguggagguccaucugcccgacgugcacaagcaaguuagcgggguggaucucggacugccgaauuggggcaaauacauccuucugucugcgggggcccucauugcucugaugcugaugaucuuccuuaugacgugcuguagaaaguuuaaccgcccugaguccacacagcggagccucggaggcaccgggagaaaggucucuaucaccucccagggcggaaaagugauuagcuccugggaaucuuauaagagcggcggggagacacgccuguga

SEQ ID NO: 223538 - RNA, 1575 nt, Artificial Sequence
  derived and/or modified CDS sequence (opt5) from glycoprotein__RABV__KC737850.1
auggugccccaggcccuucucuucgucccucugcuugcuguuagcuuuugcuucggcaaguuuccgaucuacaccauucccgacaaacuggggccuuggucccccaucgauauucaccaucucucuuguccuaacaaucuggugguggaggacgaaggaugcacaaaccuuagcggcuucuccuauauggagcugaaggucggguacaucucugccauuaaagugaauggauuuacguguaccggcguugugacagaagcggagaccuauacaaacuucgucggguacgugaccacaaccuuuaagagaaaacacuuccggcccacgccugaugcuugccgcagcgccuauaauuggaagauggccggagacccgagauacgaagagucccuccauaaccccuauccugauuaccacuggcugcggaccguuaagacaaccaaagagucucuggugaucaucagccccuccgucgcugaccucgauccuuacgacaagagccugcauucucgcguguuucccuccggcaaauguagcggcauuacagugucuuccaccuauugcagcacgaaucacgauuacacaaucuggcuuccggaaaacccuagacuggggaccucuugugacauuuucacaaauucccggggaaagcgcgccagcaaaggcuccaagaccugcggguuugucgaugagagaggacucuauaagucucugaaaggcgcuuguaagcugaaacugugcgggguucucggacugcggcugauggacggcaccuggguggccaugcaaacaagcgaugaaacgaaguggugucccccugaccagcucgugaaccugcacgacuuccgcuccgaugagaucgagcaucuugucguggaggaacugguuaaaaagagagaagagugccucgacgcgcuggaaagcauuaugaccacaaaaucuguguccuuucggcgccuuagccaccugagaaagcucguccccggcuucgggaaggccuacaccaucuucaauaaaacacugauggaggcugaugcccauuauaagucugugcggaccuggaacgagauuauccccagcaaaggaugccugcgcguuggcgggagaugucacccucacgugaauggagucuuuuucaacggcaucauucucgggccggacggacaugugcugauccccgaaaugcaguccucucuucugcagcaacacauggagcuccuggaaagcuccgucauuccucuuaugcauccccuggcugauccuagcacgguguuuaaggacggcgaugaggccgaagacuucguugaggugcaccuccccgauguccauaaacaggugucuggcguugaccuggggcugccgaauuggggaaaguacgugcucacauccgcgggcguccugaucgcccuuaugcugauuaucuuucucaugaccugcugucggagagugaaccgcagcgauucuacccagcggucccuggggagaacaggacgcaaggugagcguuaccucccagucuggcaaagucaucagcuccugggagucuuauaagagcgggggcgaaacacggcuguga

SEQ ID NO: 223539 - RNA, 1575 nt, Artificial Sequence
  derived and/or modified CDS sequence (opt5) from glycoprotein__RABV__KC762941.1
augauccugcagauucuccuguucgugccccuucuggucuuuagcuccugcuucggcaaguuuccuaucuacaccauuccggacaaacucgggcccuggucuccuaucgauauucaccaucugagcugucccaacaaucuuguuguggaggacgaaggaugcacaaaccuguccggcuucucuuauauggagcucaaggugggguacaucagcgccaucaaagucaauggauuuacguguaccggcgugguuacagaagcugagaccuauacaaacuucgugggguacgucaccacaaccuuuaagagaaaacacuuccauccuaugcccgaugccugccgggcggcuuauaauuggaagauggccggagacccucgcuacgaagagucccugcacaacccguaucccgauuaccauuggcugagaacggugaagaccacaaaagagucucucguuauuaucagcccuuccguggccgaccuggaucccuacgacaagagccuucacucucgggucuuuccuggcggcaaauguuccgggauuaccgugagcucuacaugcuguuccaccaaucacgauuauacgaucuggaugcccgaaaacccgcgccugggaacaagcugcgacauuuucaccaauucuagaggcaagcgggcuuccaaagggggaaagacauguggcuuuguggaugagcgcgggcucuacaagagccugaaaggagccugcaagaugaaacuuuguggcguccugggccucagacugauggacgggaccuggguugcuauccaaaccuccgaugaagugaaguggugcucuccugaccagcuggugaaccuccaugacuuccacagcgaugagauugagcaucuggucguggaggaacuuguuaaaaagcgggaagagugccuggacgcccucgaaacaaucaugacgaccaaauccgugagcuuucgcagacugucucaccuucggaagcugguccccggauucggcaaggcguauacaaucuucaauaaaacccucauggaggccgaugcucacuacaaguccauucagacauggaacgagaucauuccuagcaaagggugucugcgcgugggaggcagaugccauccccacguuaaugggguguuuuucaacggaaucauucugggccccgacggccauguccucaucccugaaaugcagucuagccugcuucaccaacauauggagcugcucgaauccucugugaucccgcugaugcacccccuugccgauccuagcaccgucuuuaaggacggggaugaggcugaagacuucguggagguucaucugcccgaggugcacaaacagauuuccggagucgaucucggccugccuaauugggggaaguaugugcugaucagcgccggagcgcucacggcccugaugcuuaugauuuuucugaugacauguugccggaagaccaaccgccccgaaucuauccagcacuccccgggcgagaccgaaagaaaaguuagcgugacaucucauaacgggcgggucauuuccagcugggaguccuacaagucuggcggagaaaccaaacucuga

SEQ ID NO: 223540 - RNA, 1575 nt, Artificial Sequence
  derived and/or modified CDS sequence (opt5) from glycoprotein__RABV__KC792172.1
auggugccccaggcccugcucuuugucccucugcuugcuuuuccgaugugcuucggcaaguuucccaucuacaccauuccugacaaacuggggcccuggagcccuaucgauauucaccaucucuccugucccaacaaucugguuguggaggacgaaggaugcacaaaccuuucuggcuucagcuauauggagcugaaggugggguacaucuccgccauuaaagucaauggauuuacguguaccggcgugguuacagaagcggagaccuauacaaacuucgugggguacgucaccacaaccuuuaagagaaaacacuuccggccuacgccggaugcuugccgcgccgccuauaauuggaagauggcuggagaccccagauacgaagagucucuccauaacccuuaucccgauuaccacuggcugcggaccgugaagacaaccaaagagagccugaucaucauuuccccuucuguugccgaccucgaucccuacgacaagagccugcauucccgcguguuuccgagcggcaaaugucuuggcaucacaauuucuuccaccuauugcagcacgaaucacgauuacacaaucuggaugccugaaaacgucagacuggggaccucuugugacauuuucacaaauucccggggaaagaaagcuagcaagggcucuaagaccugcggguuuguggaugagcgcggacucuauaaaucccugaagggcgccuguaaacuuaagcugugcggggugcucggacugagacugauggacggcaccugggucgcgaugcccacaagcgaugaaacgaaaugguguccucccgaccaacucguuaaccugcacgacuuccgguccgaugagaucgagcaucuugugguggaggaacugguccgcaagagagaagagugccucgacgcccuggaaucuauuaugaccacaaaaagcguguccuuucggcgccuuagccaccugagaaagcucguucccggcuucgggaaggcuuacaccaucuucaauaaaacacugauggaggccgaugcucauuauaagucugugcggaccuggaacgagaucauuccuuccaaaggaugccugcgcgucggcgggagaugucacccgcacgugaauggaguuuucuucaacggcaucauucucgggcccgacggacaugugcugaucccugaaaugcagagcucucuucugcagcagcacauggagcuccuggaaagcuccgucauuccccuuaugcauccucuggccgaucccucuacgguguuuaaggacggcgaugaggcggaagacuucgucgaggugcaccucccggauguucauaaacaaaucagcggcguggaccuggggcugccuaauuggggaaaguacguccucaucauugccggcgugcugaucgcuaugauucuuacaaucuuucugaugaccugcugugggcggggaaacagacccaaguccacccagcacagccucggcgggauuggccgcaaaguuucuuccacaagccagucuggaaaggugaucuccagcugggaguccuauaaaucuggcggggaaacccggcuguga

SEQ ID NO: 223541 - RNA, 1575 nt, Artificial Sequence
  derived and/or modified CDS sequence (opt5) from glycoprotein__RABV__KC792173.1
auggugccccaggcccugcuguucgucccucugcuugcuuuuccgaugugcuucggcaaguuucccaucuacaccauuccugacaaacuggggcccuggagcccuaucgauauucaccaucucuccugucccaacaaucugguuguggaggacgaaggaugcacaaaccuuucuggcuucagcuauauggagcugaaggugggguacaucuccgccauuaaagucaauggauuuacguguaccggcgugguuacagaagcggagaccuauacaaacuucgugggguacgucaccacaaccuuuaagagaaaacacuuccggccuacgccggaugcuugccgcgccgccuauaauuggaagauggcuggagaccccagauacgaagagucucuccauaacccuuaucccgauuaccacuggcugcggaccgugaagacaaccaaagagagccugaucaucauuuccccuucuguugccgaccucgaucccuacgacaagagccugcauucccgcguguuuccgagcggcaaaugucuuggcaucacaauuucuuccaccuauugcagcacgaaucacgauuacacaaucuggaugccugaaaaccugagacucgggaccucuugugacauuuucacaaauucccggggaaagcgcgcuagcaaaggcucuaagaccugcggguuugucgaugagagaggacuguauaagucccuuaaaggcagcuguaagcugaaacucugcggggugcugggacugcggcucauggacggcaccuggguggccaugcaaacauccgaugaaacgaaguggugucccccugaccagcuggucaaccuucacgacuuccgcucugaugagaucgagcaucugguuguggaggaacucgugaaaaagagagaagagugccuggacgcgcuugaaagcauuaugaccacaaaauccgucagcuuucggcgccugucucaccucagaaagcuggugcccggcuucgggaaggccuacaccaucuucaauaaaacacugauggaggcugaugcccauuauaaguccguucggaccuggaacgagaucauucccagcaaaggaugccuccgcgugggcgggagaugucacccucacgucaauggaguguuuuucaacggcaucauucuggggccggacggacauguucuuauccccgaaaugcagucuagccugcuccagcaacacauggagcugcuugaauccucugugauuccucugaugcauccccucgcugauccuagcacggucuuuaaggacggcgaugaggccgaagacuucguggagguccaccuccccgaugugcauaaacagaucuccggcguugaccuggggcucccgaauuggggaaaguacgugcugaucauugcgggcguccuuaucgccaugauucugacaauccuccugaugaccugcugugggcggggaaacagaccuaagagcacccagcacucucugggcgggauuggccgcaaaguguccgcuacaagccagucuggaaagguuaucuccagcugggaguccuauaaaucuggcggggaaacccggcuuuga

SEQ ID NO: 223542 - RNA, 1575 nt, Artificial Sequence
  derived and/or modified CDS sequence (opt5) from glycoprotein__RABV__KC792174.1
auggugccccaggcccugcuguucgucccucugcuugcuuuuccgaugugcuucggcaaguuucccaucuacaccauuccugacaaacuggggcccuggagcccuaucgauauucaccaucucuccugucccaacaaucugguuguggaggacgaaggaugcacaaaccuuucuggcuucagcuauauggagcugaaggugggguacaucuccgccauuaaagucaauggauuuacguguaccggcgugguuacagaagcggagaccuauacaaacuucgugggguacgucaccacaaccuuuaagagaaaacacuuccggccuacgccggaugcuugccgcgccgccuauaauuggaagauggcuggagaccccagauacgaagagucucuccauaacccuuaucccgauuaccacuggcugcggaccgugaagacaaccaaagagagccugaucaucauuuccccuucuguugccgaccucgaucccuacgacaagagccugcauucccgcguguuuccgagcggcaaaugucuuggcaucacaauuucuuccaccuauugcagcacgaaucacgauuacacaaucuggaugccugaaaaccugagacucgggaccucuugugacauuuucacaaauucccggggaaagcgcgcuagcaaaggcucuaagaccugcggguuugucgaugagagaggacuguauaagucccuuaaaggcagcuguaagcugaaacucugcggggugcugggacugcggcucauggacggcaccuggguggccaugcaaacauccgaugaaacgaaguggugucccccugaccagcuggucaaccuucacgacuuccgcucugaugagaucgagcaucugguuguggaggaacucgugagaaaacgggaagagugccuggacgcgcuugaaagcauuaugaccacaaaguccgucagcuuucgcagacugucucaccuccggaaacuggugcccggcuucgggaaggccuacaccaucuucaauaagacacugauggaggcugaugcccauuauaaauccguucgcaccuggaacgagaucauucccagcaagggaugccucagagugggcgggcggugucacccucacgucaauggaguguuuuucaacggcaucauucuggggccggacggacauguucuuauccccgaaaugcagucuagccugcuccagcaacacauggagcugcuugaauccucugugauuccucugaugcauccccucgcugauccuagcacggucuuuaaagacggcgaugaggccgaagacuucguggagguccaccuccccgaugugcauaagcagaucuccggcguugaccuggggcucccgaauuggggaaaauacgugcugaucauugcgggcguccuuaucgccaugauucugacaaucuuucucaugaccugcugugggagaggaaaccgcccuaagagcacccagcacucucugggcgggauuggccggaagguguccgcuacaagccagucuggaaaaguuaucuccagcugggaguccuauaagucuggcggggaaaccagacuguga

SEQ ID NO: 223543 - RNA, 1575 nt, Artificial Sequence
  derived and/or modified CDS sequence (opt5) from glycoprotein__RABV__KC792175.1
auggugccccaggcccugcuguucgucccucugcuugcuuuuccgaugugcuucggcaaguuucccaucuacaccauuccugacaaacuggggcccuggagcccuaucgauauucaccaucucuccugucccaacaaucugguuguggaggacgaaggaugcacaaaccuuucuggcuucagcuauauggagcugaaggugggguacaucuccgccauuaaagucaauggauuuacguguaccggcgugguuacagaagcggagaccuauacaaacuucgugggguacgucaccacaaccuuuaagagaaaacacuuccggccuacgccggaugcuugccgcgccgccuauaauuggaagauggcuggagaccccagauacgaagagucucuccauaacccuuaucccgauuaccacuggcugcggaccgugaagacaaccaaagagagccugaucaucauuuccccuucuguugccgaccucgaucccuacgacaagagccugcauucccgcguguuuccgagcggcaaaugucuuggcaucacaauuucuuccaccuauugcagcacgaaucacgauuacacaaucuggaugccugaaaaccugagacucgggaccucuugugacauuuucacaaauucccggggaaagcgcgcuagcaaaggcucuaagaccugcggguuugucgaugagagaggacuguauaagucccuuaaaggcagcuguaagcugaaacucugcggggugcugggacugcggcucauggacggcaccuggguggccaugcaaacauccgaugaaacgaaguggugucccccugaccagcuggucaaccuucacgacuuccgcucugaugagaucgagcaucugguuguggaggaacucgugaaaaagagagaagagugccuggacgcgcuugaaagcauuaugaccacaaaauccgucagcuuucggcgccugucucaccucagaaagcuggugcccggcuucgggaaggccuacaccaucuucaauaaaacacugauggaggcugaugcccauuauaaguccguucggaccuggaacgagaucauucccagcaaaggaugccuccgcgugggcgggagaugucacccucacgucaauggaguguuuuucaacggcaucauucuggggccggacggacauguucuuauccccgaaaugcagucuagccugcuccagcaacacauggagcugcuugaauccucugugauuccucugaugcauccccucgcugauccuagcacggucuuuaaggacggcgaugaggccgaagacuucguggagguccaccuccccgaugugcauaaacagaucuccggcguugaccuggggcucccgaauuggggaaaguacgugcugaucauugcgggcguccuuaucgccaugauucugacaaucuuucucaugaccugcugucggagagggaaccgcccuaagagcacccagcacucucugggaggcauugggcggaaaguguccgcuacaagccagucuggcaagguuaucuccagcugggaguccuauaaaucuggaggcgaaaccagacuguga

SEQ ID NO: 223544 - RNA, 1575 nt, Artificial Sequence
  derived and/or modified CDS sequence (opt5) from glycoprotein__RABV__KC792176.1
auggugccccaggcccugcucuuugucccucugcuugcuuuuccgaugugcuucggcaaguuucccaucuacaccauuccugacaaacuggggcccuggagcccuaucgauauucaccaucucuccugucccaacaaucugguuguggaggacgaaggaugcacaaaccuuucuggcuucagcuauauggagcugaaggugggguacaucuccgccauuaaagucaauggauuuacguguaccggcgugguuacagaagcggagaccuauacaaacuucgugggguacgucaccacaaccuuuaagagaaaacacuuccggccuacgccggaugcuugccgcgccgccuauaauuggaagauggcuggagaccccagauacgaagagucucuccauaacccuuaucccgauuaccacuggcugcggaccgugaagacaaccaaagagagccugaucaucauuuccccuucuguugccgaccucgaucccuacgacaagagccugcauuccaaaguguuuccgagcggcaagugucuuggcaucacaauuucuuccaccuauugcagcacgaaucacgauuacacaaucuggaugccugaaaacguccgccuggggaccucuugugacauuuucacaaauuccagaggaaaacgggcuagcaagggcucuaagaccugcggguuuguggaugagcgcggacucuauaaaucccugaagggcgccuguaaacuuaagcugugcggggugcucggacugagacugauggacggcaccugggucgcgaugcccacaagcgaugaaacgaaaugguguccucccgaccaacucguuaaccugcacgacuuccgguccgaugagaucgagcauauugugguggaggaacuuguccgcaagagagaagagugccuggacgcccucgaaucuaucaugaccacaaaaagcguguccuuucggcgccugagccaccuuagaaagcugguucccggcuucgggaaggcuuacaccaucuucaauaaaacacucauggaggccgaugcucauuauaagucugugcggaccuggaacgagauuaucccuuccaaaggaugccugcgcgucggcgggagaugucacccgcacgugaauggaguuuucuucaacggcauuauccuggggcccgacggacaugugcucauuccugaaaugcagagcucucugcuucagcagcacauggagcugcucgaaagcuccgucaucccccugaugcauccucuugccgaucccucuacgguguuuaaggacggcgaugaggcggaagacuucgucgaggugcaucugccggauguucacaaacaaaucagcggcguggaccucgggcugccuaauuggggaaaguacguccugauuaucgccggcgugcucauugcuaugauccugacaauuuuucuuaugaccugcugugggcggggaaacagacccaaguccacccagcacagccugggcgggaucggccgcaaaguuucuuccacaagccagucuggaaaggugaucuccagcugggaguccuauaaaucuggcggggaaacccggcucuga

SEQ ID NO: 223545 - RNA, 1575 nt, Artificial Sequence
  derived and/or modified CDS sequence (opt5) from glycoprotein__RABV__KC792177.1
auggugccccaggcccugcucuuugucccucugcuugcuuuuccgaugugcuucggcaaguuucccaucuacaccauuccugacaaacuggggcccuggagcccuaucgauauucaccaucucuccugucccaacaaucugguuguggaggacgaaggaugcacaaaccuuucuggcuucagcuauauggagcugaaggugggguacaucuccgccauuaaagucaauggauuuacguguaccggcgugguuacagaagcggagaccuauacaaacuucgugggguacgucaccacaaccuuuaagagaaaacacuuccggccuacgccggaugcuugccgcgccgccuauaauuggaagauggcuggagaccccagauacgaagagucucuccauaacccuuaucccgauuaccacuggcugcggaccgugaagacaaccaaagagagccugaucaucauuuccccuucuguugccgaccucgaucccuacgacaagagccugcauucccgcguguuuccgagcggcaaaugucuuggcaucacaauuucuuccaccuauugcagcacgaaucacgauuacacaaucuggaugccugaaaacgucagacuggggaccucuugugacauuuucacaaauucccggggaaagcgcgcuagcaaaggcucuaagaccugcggguuuguggaugagagaggacucuauaagucccugaaaggcgccuguaagcugaaacugugcggggugcucggacugcggcugauggacggcaccugggucgcgaugcccacaagcgaugaaacgaagugguguccucccgaccaacucguuaaccugcacgacuuccgcuccgaugagaucgagcaucuugugguggaggaacuggucagaaaacgggaagagugccucgacgcccuggaaucuauuaugaccacaaagagcguguccuuucgcagacuuagccaccuucggaaacucguucccggcuucgggaaggcuuacaccaucuucaauaagacacugauggaggccgaugcucauuauaaaucugugcgcaccuggaacgagaucauuccuuccaagggaugccugagagucggcgggcggugucacccgcacgugaauggaguuuucuucaacggcaucauucucgggcccgacggacaugugcugaucccugaaaugcagagcucucuucugcagcagcacauggagcuccuggaaagcuccgucauuccccuuaugcauccucuggccgaucccucuacgguguuuaaagacggcgaugaggcggaagacuucgucgaggugcaccucccggauguucauaagcaaaucagcggcguggaccuggggcugccuaauuggggaaaauacguccucaucauugccggcgugcugaucgcuaugauucuuacaaucuuucugaugaccugcugugggagaggaaaccagccccgcuccacccagcacagccucggcgggauuggccggaagguuucuuccacaagccagucuggaaaggugaucuccagcugggaguccuauaaaucuggcggggaaaccagacuguga

SEQ ID NO: 223546 - RNA, 1575 nt, Artificial Sequence
  derived and/or modified CDS sequence (opt5) from glycoprotein__RABV__KC792178.1
auggugccccaggcccugcucuuugucccucugcuugcuuuuccgaugugcuucggcaaguuucccaucuacaccauuccugacaaacuggggcccuggagcccuaucgauauucaccaucucuccugucccaacaaucugguuguggaggacgaaggaugcacaaaccuuucuggcuucagcuauauggagcugaaggugggguacaucuccgccauuaaagucaauggauuuacguguaccggcgugguuacagaagcggagaccuauacaaacuucgugggguacgucaccacaaccuuuaagagaaaacacuuccggccuacgccggaugcuugccgcgccgccuauaauuggaagauggcuggagaccccagauacgaagagucucuccauaacccuuaucccgauuaccacuggcugcggaccgugaagacaaccaaagagagccugaucaucauuuccccuucuguugccgaccucgaucccuacgacaagagccugcauucccgcguguuuccgagcggcaaaugucuuggcaucacaauuucuuccaccuauugcagcacgaaucacgauuacacaaucuggaugccugaaaacgucagacuggggaccucuugugacauuuucacaaauucccggggaaagcgcgcuagcaaaggcucuaagaccugcggguuuguggaugagagaggacucuauaagucccugaaaggcgccuguaagcugaaacugugcggggugcucggacugcggcugauggacggcaccugggucgcgaugcccacaagcgaugaaacgaagugguguccucccgaccaacucguuaaccugcacgacuuccgcuccgaugagaucgagcaucuugugguggaggaacuggucagaaaacgggaagagugccucgacgcccuggaaucuauuaugaccacaaagagcguguccuuucgcagacuuagccaccuucggaaacucguucccggcuucgggaaggcuuacaccaucuucaauaagacacugauggaggccgaugcucauuauaaaucugugcgcaccuggaacgagaucauuccuuccaagggaugccugagagucggcgggcggugucacccgcacgugaauggaguuuucuucaacggcaucauucucgggcccgacggacaugugcugaucccugaaaugcagagcucucuucugcagcagcacauggagcuccuggaaagcuccgucauuccccuuaugcauccucuggccgaucccucuacgguguuuaaagacggcgaugaggcggaagacuucgucgaggugcaccucccggauguucauaagcaaaucagcggcguggaccuggggcugccuaauuggggaaaauacguccucaucauugccggcgugcugaucgcuaugauucuuacaaucuuucugaugaccugcugugggagaggaaaccgccccaaguccacccagcacagccucggcgggauuggccggaagguuucuuccacaagccagucuggaaaagugaucuccagcugggaguccuauaagucuggcggggaaaccagacuguga

SEQ ID NO: 223547 - RNA, 1575 nt, Artificial Sequence
  derived and/or modified CDS sequence (opt5) from glycoprotein__RABV__KC792179.1
auggugccccaggcccugcuguucgucccucugcuugcuuuuccgaugugcuucggcaaguuucccaucuacaccauuccugacaaacuggggcccuggagcccuaucgauauucaccaucucuccugucccaacaaucugguuguggaggacgaaggaugcacaaaccuuucuggcuucagcuauauggagcugaaggugggguacaucuccgccauuaaagucaauggauuuacguguaccggcgugguuacagaagcggagaccuauacaaacuucgugggguacgucaccacaaccuuuagacggaagcacuuccgcccuacgccggaugcuugcagagccgccuauaauuggaaaaucgcuggagacccccgguacgaagagucucuccauaacccuuaucccgauuaccacuggcugcgcaccgugaagacaaccaaggagagccugaucauuaucuccccuucuguugccgaccucgaucccuacgacaaaagccugcauuccagaguguuuccgagcggcaagugucuuggcauuacaaucucuuccaccuauugcagcacgaaucacgauuacacaauuuggaugccugaaaaccugcggcucgggaccucuugugacaucuucacaaauucccgcggaaaaagagcuagcaagggcucucggaccugcggguuugucgaugagcgcggacuguauaaaucccuuaagggcgccuguaagcugaaacucugcggggugcugggacugagacucauggacggcaccuggguggcgaugcaaacaagcgaugaaacgaaguggugucccccugaccagcuggucaaccuucacgacuuccgguccgaugagauugagcaucugguuguggaggaacucgugaaaaagcgcgaagagugccuggacgcccuugaaucuaucaugaccacaaaaagcgucuccuuuagacggcugagccaccuccgcaagcuggugcccggcuucgggaaggcuuacaccaucuucaauaaaacacugauggaggccgaugcucauuauaagucuguuagaaccuggaacgagauuauccccuccaaaggaugccuccgggugggcgggagaugucacccucacgucaauggaguguuuuucaacggcauuauccuggggccggacggacauguucuuauucccgaaaugcagagcucucugcuccagcaacacauggagcugcuugaaagcuccgugaucccucugaugcauccccucgccgauccuucuacggucuuuaaggacggcgaugaggcggaagacuucguggagguccaccuccccgaugugcauaaacagaucagcggcguugaccuggggcucccgaauuggggaaaguacgugcugauuaucgccggcguccuuauugcuaugauccugacaauuuuucucaugaccugcugugggcgcggaaaccggccuaaauccacccagcacagccugggcgggaucggcagaaaggugucugccacaucccagagcggaaagguuaucucuuccugggagagcuauaaaaacggcggggaaacccgccuguga

SEQ ID NO: 223548 - RNA, 1575 nt, Artificial Sequence; identical to SEQ ID NO: 223544
  derived and/or modified CDS sequence (opt5) from glycoprotein__RABV__KC792180.1

SEQ ID NO: 223549 - RNA, 1575 nt, Artificial Sequence; identical to SEQ ID NO: 223546
  derived and/or modified CDS sequence (opt5) from glycoprotein__RABV__KC792181.1

SEQ ID NO: 223550 - RNA, 1575 nt, Artificial Sequence; identical to SEQ ID NO: 223547
  derived and/or modified CDS sequence (opt5) from glycoprotein__RABV__KC792182.1

SEQ ID NO: 223551 - RNA, 1575 nt, Artificial Sequence; identical to SEQ ID NO: 223546
  derived and/or modified CDS sequence (opt5) from glycoprotein__RABV__KC792183.1

SEQ ID NO: 223552 - RNA, 1575 nt, Artificial Sequence; identical to SEQ ID NO: 223541
  derived and/or modified CDS sequence (opt5) from glycoprotein__RABV__KC792184.1

SEQ ID NO: 223553 - RNA, 1575 nt, Artificial Sequence
  derived and/or modified CDS sequence (opt5) from glycoprotein__RABV__KC792185.1
auggugccccaggcccugcuguucgucccucugcuugcuuuuccgaugugcuucggcaaguuucccaucuacaccauuccugacaaacuggggcccuggagcccuaucgauauucaccaucucuccugucccaacaaucugguuguggaggacgaaggaugcacaaaccuuucuggcuucagcuauauggagcugaaggugggguacaucuccgccauuaaagucaauggauuuacguguaccggcgugguuacagaagcggagaccuauacaaacuucgugggguacgucaccacaaccuuuaagagaaaacacuuccggccuacgccggaugcuugccgcgccgccuauaauuggaagauggcuggagaccccagauacgaagagucucuccauaacccuuaucccgauuaccacuggcugcggaccgugaagacaaccaaagagagccugaucaucauuuccccuucuguugccgaccucgaucccuacgacaagagccugcauucccgcguguuuccgagcggcaaaugucuuggcaucacaauuucuuccaccuauugcagcacgaaucacgauuacacaaucuggaugccugaaaaccugagacucgggaccucuugugacauuuucacaaauucccggggaaagcgcgcuagcaaaggcucuaagaccugcggguuugucgaugagagaggacuguauaagucccuuaaaggcagcuguaagcugaaacucugcggggugcugggacugcggcucauggacggcaccuggguggccaugcaaacauccgaugaaacgaaguggugucccccugaccagcuggucaaccuucacgacuuccgcucugaugagaucgagcaucugguuguggaggaacucgugaaaaagagagaagagugccuggacgcgcuugaaagcauuaugaccacaaaauccgucagcuuucggcgccugucucaccucagaaagcuggugcccggcuucgggaaggccuacaccaucuucaauaaaacacugauggaggcugaugcccauuauaaguccguucggaccuggaacgagaucauucccagcaaaggaugccuccgcgugggcgggagaugucacccucacgucaauggaguguuuuucaacggcaucauucuggggccggacggacauguucuuauccccgaaaugcagucuagccugcuccagcaacacauggagcugcuugaauccucugugauuccucugaugcauccccucgcugauccuagcacggucuuuaaggacggcgaugaggccgaagacuucguggagguccaccuccccgaugugcauaaacagaucuccggcguugaccuggggcucccgaauuggggaaaguacgugcugaucauugcgggcguccuuaucgccaugauucugacaaucuuucucaugaccugcugugggcggggaaacagaccuaagagcacccagcacucucugggcgggauuggccgcaaaguguccgcuacaagccagucuggaaagguuaucuccagcugggaguccuauaaaucuggcggggaaacccggcuguga

SEQ ID NO: 223554 - RNA, 1575 nt, Artificial Sequence; identical to SEQ ID NO: 223546
  derived and/or modified CDS sequence (opt5) from glycoprotein__RABV__KC792186.1

SEQ ID NO: 223555 - RNA, 1575 nt, Artificial Sequence; identical to SEQ ID NO: 223547
  derived and/or modified CDS sequence (opt5) from glycoprotein__RABV__KC792187.1

SEQ ID NO: 223556 - RNA, 1575 nt, Artificial Sequence
  derived and/or modified CDS sequence (opt5) from glycoprotein__RABV__KC792188.1
auggugccccaggcccugcucuuugucccucugcuugcuuuuccgaugugcuucggcaaguuucccaucuacaccauuccugacaaacuggggcccuggagcccuaucgauauucaccaucucuccugucccaacaaucugguuguggaggacgaaggaugcacaaaccuuucuggcuucagcuauauggagcugaaggugggguacaucuccgccauuaaagucaauggauuuacguguaccggcgugguuacagaagcggagaccuauacaaacuucgugggguacgucaccacaaccuuuaagagaaaacacuuccggccuacgccggaugcuugccgcgccgccuauaauuggaagauggcuggagaccccagauacgaagagucucuccauaacccuuaucccgauuaccacuggcugcggaccgugaagacaaccaaagagagccugaucaucauuuccccuucuguugccgaccucgaucccuacgacaagagccugcauucccgcguguuuccgagcggcaaaugucuuggcaucacaauuucuuccaccuauugcagcacgaaucacgauuacacaaucuggaugccugaaaacgucagacuggggaccucuugugacauuuucacaaauucccggggaaagcgcgcuagcaaaggcucuaagaccugcggguuuguggaugagagaggacucuauaagucccugaaaggcgccuguaagcugaaacugugcggggugcucggacugcggcugauggacggcaccugggucgcgaugcccacaagcgaugaaacgaagugguguccucccgaccaacucguuaaccugcacgacuuccgcuccgaugagaucgagcaucuugugguggaggaacuggucagaaaacgggaagagugccucgacgcccuggaaucuauuaugaccacaaagagcguguccuuucgcagacuuagccaccuucggaaacucguucccggcuucgggaaggcuuacaccaucuucaauaagacacugauggaggccgaugcucauuauaaaucugugcgcaccugguccgagaucauuccuagcaagggaugccugagagucggcgggcggugucacccgcacgugaacggaguuuucuucaauggcaucauucucgggcccgacggacaugugcugaucccugaaaugcagucuagccuucugcagcagcacauggagcuccuggaauccucugucauuccccuuaugcauccucuggccgaucccagcacgguguuuaaagacggcgaugaggcggaagacuucgucgaggugcaccucccggauguucauaagcaaaucuccggcguggaccuggggcugccuaacuggggaaaauacguccucaucauugccggcgugcugaucgcuaugauucuuacaaucuuucugaugaccugcugugggagaggaaaucgccccaagagcacccagcacucucucggcgggauuggccggaagguuuccagcacaucucaguccggaaaagugaucagcuccugggagucuuauaagagcggcggggaaaccagacuguga

SEQ ID NO: 223557 - RNA, 1575 nt, Artificial Sequence
  derived and/or modified CDS sequence (opt5) from glycoprotein__RABV__KC977995.1
augaucccccaggugcuucucuucgucccucugcuuguuuuuagcuccugcuucggcaaguuuccgauuuacaccauccccgacaaacuggggccuuggucucccauugauauccaccaucucagcuguccuaacaaucuggugguggaggacgaaggaugcacaaaccuuuccggcuucucuuauauggagcugaaggucggguacauuagcgccaucaaagugaauggauuuacguguaccggcguugugacagaagcugagaccuauacaaacuucgucggguacgugaccacaaccuuuaagagaaaacacuuccggcccaugccugaugccugccgcgcggcuuauaauuggaagauggccggagacccgagauacgaagagucccuccauaaccccuauccugauuaccacuggcugcggacgguuaagaccacaaaagagucucuggugaucauuagccccuccgucgccgaccucgauccuuacgacaagagccugcauucucgcguguuucccggcggcaaauguuccgggaucaccgugagcucuacaugcuguuccaccaaucacgauuauacgauuuggaugccggaaaacccuagacuuggaacaagcugcgacaucuucaccaauucucggggcaagcgcgcuuccaaagggggaaagacauguggcuuugucgaugagagagggcuguacaagagccuccggggagccugcaaacugaagcuguguggcguucugggccuccgccugauggacgggaccuggguggcuauucaaaccuccgaugaaaucaaauggugcucucccgaccagcuggugaaccuccacgacuuccauagcgaugagauugagcaccuggucguggaggaacuuguuaagaaaagagaagagugccuggacgcccucgaaacaaucaugacgaccaaguccgugagcuuucggcgccugucucaucuuagaaaacuggucccuggauucggcaaggcguauacaaucuucaauaagacccucauggaggccgaugcucacuacaaauccauucggacauggaacgagaucauucccagcaaggggugucugcgcgugggaggcagaugccacccccauguuaaugggguguuuuucaacggaaucauucugggcccugacggccacguccucaucccggaaaugcagucuagccugcuucaucagcacauggagcugcucgaauccucugugaucccccugaugcauccucuugccgaucccagcaccgucuuuaaagacggggaugaggcugaagacuucguggagguucaucugccugaugugcacaagcaaauuuccggagucgaccucggccugcccaauugggggaaauaugugcugaucagcgccggagcgcucacggcccugaugcuuaugauuuuucugaugacauguugccggaagaccaacagagcugagucuauccagcacuccccgggcgaaaccgggcgcaagguuagcgugacaucucacaacggccgggucaccuccagcugggaguccuacaaaucuggaagcgaaacaaagcucuga

SEQ ID NO: 223558 - RNA, 1575 nt, Artificial Sequence
  derived and/or modified CDS sequence (opt5) from glycoprotein__RABV__KF154996.1
auggugccccagguccugcuguucguuccucugcuuguguuuagcaugugcuucggcaaguuuccgaucuacaccauucccgacaaacuggggccuuggucccccaucgauauucaccaucucucuuguccuaacaaucugguggucgaggacgaaggaugcacaaaccuuagcggcuucuccuauauggagcugaaggugggguacacgucugccaucaaaguuaauggauuuaccuguacaggcguggucaccgaagcugagacauauaccaacuucgugggguacguuacaaccacguuuaagagaaaacacuuccggcccaccccugaugccugccgcgcggcuuauaauuggaagauggccggagacccgagauacgaagagagccuccauaaccccuauccugauuaccacuggcugcggacagugaagaccacaaaagagucccuggucauuaucucucccagcguggccgaccucgauccuuacgacaagucccugcauagccgcguguuucccucuggcaaauguuccggcaucaccauuagcucuacguauugcuccacaaaucacgauuacaccaucuggaugccggaaaacccuagacuugggacaagcugugacauuuucaccaauucucggggaaagcgcgcuuccaaaggcgggaagaccugcggauuugucgaugagagaggccuguauaagagccucaaaggggccuguaagcugaaacuuugcggaguucugggccuccggcugauggacggcacauggguggcuaugcaaacguccgaugaaaccaaguggugucccccugaccagcuggugaaccuccacgacuuccgcucugaugagaucgagcaucuggucguggaggaacuuguuaaaaagagagaagagugccuggacgcccucgaaagcauuaugacaaccaaauccgugagcuuucggcgccugucucaccuuagaaagcugguccccggguucggaaaggcguacacaaucuucaauaaaacccucauggaggccgaugcucauuauaaguccgugcggacguggaacgagauuauccccagcaaaggcugccugcgcguugggggaagaugucacccucacgugaagggcgucuuuuucaaugggaucauucugggaccggacggccaugugcucauccccgaaaugcagucuagccugcuucagcaacacauggagcugcucgaauccucugucauuccucugaugcauccccuugccgauccuagcacaguguuuaaagacggcgaugaggcugaagacuucguugaggugcaccuccccgauguccauaagcagaucuccgggguggaccucggacugccgagcuggggccgguacguucuggugucugccgggguccucguggugcugaugcuuaccauucugaucauuaccugcuguggaagaguucaccgcccuaaguccacacagcacggccucgggggcaccggacggaaagucagcgugacaucucaguccggcaaggugaucagcuccugggagucuuauaaaagcgggggagaaacgagacuguga

SEQ ID NO: 223559 - RNA, 1575 nt, Artificial Sequence
  derived and/or modified CDS sequence (opt5) from glycoprotein__RABV__KF154997.1
auggugccccaggcccugcuccuggucccucuucugggcuucagccucugcuuugggaaguucccgaucuacaccauucccgacaaacugggaccuuggucccccaucgauauucaccaucuuucuuguccuaacaaucugguuguggaggacgaaggcugcacaaaccucagcggguuuuccuauauggagcugaaggugggauacaucucuagcauuaaagucaauggcuucacguguaccggggugguuacagaagcugagaccuauacaaacuuugugggauacgucaccacaaccuucagacggaagcacuuucgccccacgccugaugccugcagagcggcuuauaauuggaaaauggccggcgacccgcgguacgaagagucccugcauaaccccuauccugauuaccacuggcuccgcaccgugaagacaaccaaggagucucugguuaucaucagccccuccguggccgaccuugauccuuacgacaaaagccugcauucuagagucuuccccuccggcaaguguagcgggauuacagugucuuccaccuauugcagcacgaaucacgauuacacaaucuggaugccggaaaaccuccggcugggaaccucuugugacauuuuuacaaauucccgcggcaaaagagcuagcaagggguccaaaaccugcggauucguggaugagcggggccuuuauaagucucugaagggggccuguaaacucaagcugugcggaguccugggccuccgccugauggacggcaccuggguugcuaugcaaacaagcgaugaaacgaaaugguguccucccgaccagcuugugaaccugcacgacuuuagauccgaugagaucgagcaucucguggucgaggaacuggugaagaaacgggaagagugccuugacgcccuggaaagcauuaugaccacaaagucuguuuccuuccgcagacucagccaucugcggaaacuggugccuggguuuggaaaggcguacaccaucuucaauaagacacucauggaggccgaugcucacuauaaaucuguccgcaccuggaacgaggugauucccagcagaggcugccugcggguugggggaagaugucacccccacgugaauggcgucuucuuuaacgggaucauccuuggaccugacggccaugugcugauuccggaaaugcaguccucucuccugcagcaacacaucgagcuucuggaaagcuccgucauuccccucaugcauccucuggccgaucccagcacgguguucaaggacggcgaugaggcugaagacuuuguugaggugcaucugccugauguccacaaacaggugucugggguugaccucggacugcccaauuggggcaaguacgugcuucuguccgccggggcgcucaucgcccugaugcugauugucuuccuuaucacaugcugucgccgggugaacagaccggagagcacccagcgcucucuccggggagcuggcagaaaaguguccaucaccagccaguccgggaagguuauuucuagcugggaauccuauaagucuggcggagagacacgccuguga

SEQ ID NO: 223560 - RNA, 1575 nt, Artificial Sequence
  derived and/or modified CDS sequence (opt5) from glycoprotein__RABV__KF154998.1
auggugccccaggcccugcuguucgucccucugcuugcuuuuagccugugcuucggcaaguuuccgaucuacaccauucccgacaaacucgggccuuggucccccaucgauauucaccaucugucuuguccuaacaaucuuguuguggaggacgaaggaugcacaaaccugagcgaguucuccuauauggaacucaagaugggcuacaucucugccauuaaagugaauggguuuacguguaccggagucgugacagaggcggaaaccuauacaaacuucguuggcuacgugaccacaaccuuuaagagaaaacacuuccggcccacgccugaugcuugccgcgccgccuauaauuggaagauggcuggggacccgagauacgaggagagccugcauaaccccuauccugauuaccacuggcugcggaccgucaagacaaccaaagaaucccucaucaucauuucucccagcguggccgaccuggauccuuacgacaagucccuucauagccgcguuuuucccucuggaaaauguuccggcaucacagugagcucuaccuauugcuccacgaaucacgauuacacaauuuggaugccggagaacccuagacccggcaccagcugugacaucuucgcuucuucccgggggaagcgcgccagcaaaggaggcaagacaugcggguuugucgaugaaagaggacuguauaagucccucaaaggcgcguguaagcugaaacuuugcggggugcugggacuccggcugauggacggcaccuggguggccaugcaaaccucugaugagacaaagugguguccucccgaccagcuggucaaucuccacgacuuccgcagcgaugagauugaacaucugguuguggaggaacuugugaaaaagagagaggaaugccuggacgcucucgaguccaucaugacgaccaaaagcgucucuuuucggcgccugucccaccuuagaaagcuggugcccggcuucgggaaggccuacacaauuuucaacaaaacccucauggaggcugaugcccauuauaagagcguucagacauggaaugaaaucaucccuucuaaaggaugccugcgggugggcgagcgcugucacccgcacgucaacgggguguuuuucaauggaauuauccugggccccgacgggcauguucucauuccugaaaugcagagcucccugcuucaacagcacauggagcugcucgaaucuagcgugaucccccugaugcauccucuugcggaucccuccaccgucuuuaaggacggagaugaggccgaggacuucguggaaguccaccucccggaugugcauaaacagguuagcggcguggaccucggccugccuaacugggggaaguacguccuggugucugcuggagcccucauugcucugaugcuuaucaucuuucugauuacgugcuguagacggguuaauagacccgaguauacacagcgcucccucggcgggaccggacggaaggugagcgucaccucucaauccggcaaagugaucagcuccugggaaucuuacaagagcgggggcgagacaagacuguga

SEQ ID NO: 223561 - RNA, 1575 nt, Artificial Sequence; identical to SEQ ID NO: 222829
  derived and/or modified CDS sequence (opt5) from glycoprotein__RABV__KF154999.1

SEQ ID NO: 223562 - RNA, 1575 nt, Artificial Sequence
  derived and/or modified CDS sequence (opt5) from glycoprotein__RABV__KF155000.1
auggugccccaggcccuucucuucgucccucugcuuguuuuuagccugugcuucggcaaguuuccgaucuacaccauucccgacaaacucgggccuuggucccccaucgauauucaccaucugacauguccuaacaaucuugugguggaggacgaaggaugcacgaaccugucuggcuucagcuauauggagcucaaggucggguacaucuccgcuauuaaagugaauggauuuaccuguacaggcguugugaccgaagccgagacauauaccaacuucgucggguacgugacaaccacguuuaagagaaaacacuuccggcccaccccugaugcgugccgcgcugccuauaauuggaagauggccggagacccgagauacgaagagucucugcauaaccccuauccugauuaccacuggcugcggacaguuaagaccacaaaagagagccucgugaucaucucccccucugucgcuaaucuggacccuuacgauaagagccuucauucccgcguguuucccagcggcaaauguucuggcauuaccguguccagcacguauugcucuacaaaccacgacuacaccaucuggaugccggaaaauccuagacuggggacauccugugauauuuucaccaacagccggggaaagcgcgccucuaaaggcuccaagaccugcggguuugucgacgagagaggacucuauaagagccugaaaggcgcuuguaagcugaaacugugcgggguucucggacugcggcugauggauggcacauggguggccaugcaaacguccgacgaaaccaaguggugucccccugaucagcucgugaaucugcacgacuuccgcucugacgagaucgagcaucuugucguggaggaacugguuaaaaagagagaagagugccucgaugcgcuggaaagcauuaugacaaccaaauccgugagcuuucggcgccuuucucaccugagaaagcucguccccggcuucgggaaggccuacacaaucuucaacaaaacccugauggaggcugacgcccauuauaaguccgugcggacguggaaugagauuauccccagcaaaggaugccugcgcguuggcgggagaugucacccucacgugaacggagucuuuuucaauggcaucauucucgggccggauggacaugugcugauccccgaaaugcagucuagccuucugcagcaacacauggagcuccuggaauccucugucauuccucuuaugcauccccuggcugacccuagcacaguguuuaaggauggcgacgaggccgaagauuucguugaggugcaccuccccgacguccauaaacagguguccggcguugaucuggggcugccgaacuggggaaaguacgugcuccugagcgcgggcgcccuuaucgcucugaugcucauuaucuuucugaugaccugcugucggagagucaaccgcccugagucuacccagcggucccuugggggaacaggcagaaaggugagcgugaccucucaguccgggaaaguuaucagcuccugggaaucuuauaagagcggcggagagacacgccuguga

SEQ ID NO: 223563 - RNA, 1575 nt, Artificial Sequence
  derived and/or modified CDS sequence (opt5) from glycoprotein__RABV__KF155001.1
auggugccccaggcccuucucuucgucccucugcuuguuuuuagccugugcuucggcaaguuuccgaucuacaccauucccgacaaacucgggccuuggucccccaucgauauucaccaucugucuuguccuaacaaucuugugguggaggacgaaggaugcacaaaccugagcggcuucuccuauauggagcucaaggucggguacaucucugcuauuaaagugaauggauuuacguguaccggcguugugacagaagccgagaccuauacaaacuucgucggguacgugaccacaaccuuuaagagaaaacacuuccggcccacgccugaugcgugccgcgcugccuauaauuggaagauggccggagacccgagauacgaagagagccugcauaaccccuauccugauuaccacuggcugcggaccguuaagacaaccaaagagucccucgugaucaucucucccagcgucgcugaccuggauccuuacgacaagucccuucauagccgcguguuucccucuggcaaauguuccggcauuacagugagcucuaccuauugcuccacgaaucacgauuacacaaucuggaugccggaaaacccuagacuggggaccagcugugacauuuucacaaauucucggggaaagcgcgccuccaaaggcagcaagaccugcggguuugucgaugagagaggacucuauaagucccugaaaggcgcuuguaagcugaaacugugcgggguucucggacugcggcugauggacggcaccuggguggccaugcaaacaucugaugaaacgaaguggugucccccugaccagcucgugaaccugcacgacuuccgcagcgaugagaucgagcaucuugucguggaggaacugguuaaaaagagagaagagugccucgacgcgcuggaauccauuaugaccacaaaaagcgugucuuuucggcgccuuucccaccugagaaagcucguccccggcuucgggaaggccuacaccaucuucaauaaaacacugauggaggcugaugcccauuauaagagcgugcggaccuggaacgagauuauccccucuaaaggaugccugcgcguuggcgggagaugucacccucacgugaauggagucuuuuucaacggcaucauucucgggccggacggacaugugcugauccccgaaaugcagagcucccuucugcagcaacacauggagcuccuggaaucuagcgucauuccucuuaugcauccccuggcugauccuuccacgguguuuaaggacggcgaugaggccgaagacuucguugaggugcaccuccccgauguccauaaacaggugagcggcguugaccuggggcugccgaauuggggaaaguacgugcuccugucugcgggcacacuuaucgcccugaugcucauuaucuuucugaugaccugcugucggagagucaaccgcccuaaguccaugcagcggagccugggggagaccggaagaaaagugucugugacaucccagagcggcaagguuaucuccucuugggaaagcuauaaauccgggggcgagacccgccuuuga

SEQ ID NO: 223564 - RNA, 1575 nt, Artificial Sequence
  derived and/or modified CDS sequence (opt5) from glycoprotein__RABV__KF155002.1
auggugccccaggccagacuguucgucccucuccugguuuuuccgcuuugcuucggcaaguuucccaucuacaccauuccugacaaacuggggcccuggagcccuaucgauauucaccaucucuccugucccaacaaucuggugguggaggacgaaggaugcacaaaccuuucuggcuucagcuauauggagcugaaggucggguacaucuccgcuauuaaagugaauggauuuacguguaccggcguugugacagaagccgagaccuauacaaacuucgucggguacgugaccacaaccuuuaagcggaaacacuuccgcccuaucccggaugcgugcagagcugccuauaauuggaagauggccggagacccccgguacgaagagucucuccauaacccuuaucccgauuaccacuggcugcgcacgguuaagaccacaaaagagagccuggugaucauuuccccuucugucgcugaccucgaucccuacgacagaagccugcauucccggguguuuaccggcggcaaguguagcgggaucacagugucuuccaccuauugcagcacgaaucacgauuacacaauuuggaugccggaaaacccucgccuuggaaccucuuguaauaucuucgccaacuccaaaggcaagagagcuagcaaagggggaaagacaugcggcuuugucgacgagcgggggcuguauaagucucucaaaggagccuguaagcugaaacuuugcggcguucugggccuccgccugauggaugggaccuggguggcgaugcaaaccuccgacgaaacaaaguggugucccccugaucagcuggugaauaugcacgacuucagaagcgacgagauugagcaucucgucguggaggaacugguuaaaaagcgggaagagugccuugaugcccuggaauccaucaugacgaccaaaucugugagcuuucgcagacucucccaccuucggaagcugguccccggauucggcaaggcuuacacaauuuucaacaaaacccugauggaggccgacgcucauuauaagagcgugcgcacauggaaugagaucauccccucuaaagggugccucagaguuggaggccggugucacccucacgugaacggggucuuuuucaauggaauuauccugggcccggauggccaugugcugauucccgaaaugcaguccagccuccugcagcaacacauggagcuucuggaaucuagcgucaucccucucaugcauccccuggccgacccuuccaccguguuuaaggauggggacgaggcggaagauuucguugaggugcaccuucccgacguccauaaacaggugucuggaguugaucugggccucccgaacugggggaaguacgugcugcugagcgccggaacgcucauugcucugaugcuuaucaucuuucugaugacaugcuguagacgcgucucccggccugagagcacccagagaucucucggccgcaccgggcggaagguguccgugacaagccagucuggcaaaguuauuuccagcugggaauccuauaagucuggaggcgagaccagacuguga

SEQ ID NO: 223565 - RNA, 1575 nt, Artificial Sequence
  derived and/or modified CDS sequence (opt5) from glycoprotein__RABV__KF437644.1
auggugccccaggcccuucucuucgucccucugcuuguuuuuagcaugugcuucggcaaguuuccgaucuacaccauucccgacaaacuggggccuuggucccccaucgauauucaccaucucucuuguccuaacaaucuggugguggaggacgaaggaugcacaaaccuuagcggcuucuccuauauggagcugaaggucggguacaucucugcuauuaaagugaauggauuuacguguaccggcguugugacagaagccgagaccuauacaaacuucgucggguacgugaccacaaccuuuaagagaaaacacuuccggcccacgccugaugcgugccgcgcugccuauaauuggaagauggccggagacccgagauacgaagagagccuccauaaccccuauccugauuaccacuggcugcggaccguuaagacaaccaaagagucccuggugaucaucucucccagcgucgcugaccucgauccuuacgacaagucccugcauagccgcguguuucccaauggcaaauguucuggcauuacaaucuccagcaccuauugcccgacgaaccacgauuacacaauuuggcuuccugaaaaucccagacuggggaccucuugugacaucuucacaaacucccggggaaagcgcgccagcaaaggcucuaagaccugcggguuuguggaugagagaggacucuauaagucccugaaaggcgcuuguaagcugaaacugugcgggguccucggacugcggcugauggacggcaccuggguugccaugcaagcgagcgaugaaacaaagugguguccucccgaccagcucgugaaucugcacgacuuccgcuccgaugagauugagcaucuuguggucgaggaacuggugaaaaagagagaagagugccucgacgcccuggaaucuaucaugacgaccaaaagcguuuccuuucggcgccuuagccaccugagaaagcucgugcccggcuucgggaaggcuuacacaauuuucaacaaaacccugauggaggccgaugcucauuauaagucuguccggacauggaaugagaucaucccuuccaaaggaugccugcgcgugggcgggagaugucacccgcacguuaacggaguguuuuucaauggcauuauccucgggcccgacggacauguccugauuccugaaaugcagagcucucuucugcagcaacacauggagcuccuggaaagcuccgugaucccccuuaugcauccucuggccgaucccucuaccgucuuuaaggacggcgaugaggcggaaaacuucguggagguucaccucccggacgugcauaaacagauuagcggcgucgaucuggggcugccuaacuggggaaaguacgugcucguuuccgccggcgugcugaucgcucuuaugcugaucauuuuucucaugacgugcugugggcgggucaauagacccgagagcacacagcacaaccugggaggcaccgggcgcgaagugucugugaccccucaguccggcaagguuaucagcucuugggaguccuauaaaagcggaggcgggacacggcuguga

SEQ ID NO: 223566 - RNA, 1575 nt, Artificial Sequence; identical to SEQ ID NO: 223565
  derived and/or modified CDS sequence (opt5) from glycoprotein__RABV__KF437645.1

SEQ ID NO: 223567 - RNA, 1575 nt, Artificial Sequence; identical to SEQ ID NO: 223565
  derived and/or modified CDS sequence (opt5) from glycoprotein__RABV__KF437646.1

SEQ ID NO: 223568 - RNA, 1575 nt, Artificial Sequence
  derived and/or modified CDS sequence (opt5) from glycoprotein__RABV__KF437648.1
auggugccccaggcccugcuguucgucccucugcuuguuuuuagcaugugcuucggcaaguuuccgaucuacaccauucccgacaaacuggggccuuggucccccaucgauauucaccaucucucuuguccuaacaaucuggugguggaggacgaaggaugcacaaaccuuagcggcuucuccuauauggagcugaaggucggguacaucucugcuauuaaagugaauggauuuacguguaccggcguugugacagaagccgagaccuauacaaacuucgucggguacgugaccacaaccuuuaagagaaaacacuuccggcccacgccugaugcgugccgcgcugccuauaauuggaagauggccggagacccgagauacgaagagagccuccauaaccccuauccugauuaccacuggcugcggaccguuaagacaaccaaagagucccuggugaucaucucucccagcgucgcugaccucgauccuuacgacaagucccugcauagccgcgugcuucccaauggcaaauguucuggcacaaccacguccagcacauauugcccgaccaaccacgauuacacaauuuggcugccugaaaaucccagacucgggaccucuugugacaucuuuaccaacucccggggaaagcgcgccagcaaaggcgggaagacaugcggauucguggaugagagaggccuguauaagucucuuaaaggggcuuguaagcugaaacucugcggaguccugggccugcggcucauggacggcacguggguugccaugcaagcguccgaugaaaccaagugguguccucccgaccagcuggugaaucuucacgacuuucgcagcgaugagauugagcaucugguggucgaggaacucgugaaaaagagagaagagugccuggacgcccuugaauccaucaugacaaccaaaucuguuagcuuccggcgccugucccaccucagaaagcuggugcccggguuuggaaaggcuuacacaauuuucaacaaaacccugauggaggccgaugcucauuauaagagcguccggacguggaaugagaucauuccuucuaaaggcugccuccgcguugggggaagaugucacccgcacgugaacggcguguucuuuaaugggaucauccugggacccgacggccauguccuuauuccugaaaugcaguccagccugcuccagcaacacauggagcugcuugaaucuagcgugaucccccugaugcauccucucgccgaucccuccacagucuucaaggacggcgaugaggcggaaaacuuuguggagguucaccucccggacgugcauaaacagauuucuggggucgaucugggacucccuaacuggggcaaguacgugcugguuagcgccggggugcuuaucgcucugaugcucauuaucuuccugaugaccugcuguggacgggucaauagacccgaguccacccagcacaaccugggcgggacaggccgcgaagugagcgugaccccucagucuggaaagguuaucuccagcugggagucuuauaaauccggcggggaaacacggcuuuga

SEQ ID NO: 223569 - RNA, 1575 nt, Artificial Sequence
  derived and/or modified CDS sequence (opt5) from glycoprotein__RABV__KF437649.1
auggugccccaggcccuucucuucgucccucugcuuguuuuuagcaugugcuucggcaaguuuccgaucuacaccauucccgacaaacuggggccuuggucccccaucgauauucaccaucucucuuguccuaacaaucuggugguggaggacgaaggaugcacaaaccuuagcggcuucuccuauauggagcugaaggucggguacaucucugcuauuaaagugaauggauuuacguguaccggcguugugacagaagccgagaccuauacaaacuucgucggguacgugaccacaaccuuuaagagaaaacacuuccggcccacgccugaugcgugccgcgcugccuauaauuggaagauggccggagacccgagauacgaagagagccuccauaaccccuauccugauuaccacuggcugcggaccguuaagacaaccaaagagucccuggugaucaucucucccagcgucgcugaccucgauccuuacgacaagucccugcauagccgcguguuucccaauggcaaauguucuggcauuacaaucuccagcaccuauugcccgacgaaccacgauuacacaauuuggcuuccugaaaaucccagacuggggaccucuugugacaucuucacaaacucccggggaaagcgcgccagcaaaggcucuaagaccugcggguuuguggaugagagaggacucuauaagucccugaaaggcgcuuguaagcugaaacugugcgggguccucggacugcggcugauggacggcaccuggguugccaugcaagcgagcgaugaaacaaagugguguccucccgaccagcucgugaaucugcacgacuuccgcuccgaugagauugagcaucuuguggucgaggaacuggugaaaaagagagaagagugccucgacgcccuggaaucuaucaugacgaccaaaagcguuuccuuucggcgccuuagccaccugagaaagcucgugcccggcuucgggaaggcuuacacaauuuucaacaaaacccugauggaggccgaugcucauuauaagucuguccggacauggaaugagaucaucccuuccaaaggaugccugcgcgugggcgggagaugucacccgcacguuaacggaguguuuuucaauggcauuauccucgggcccgacggacauguccugauuccugaaaugcagagcucucuucugcagcaacacauggagcuccuggaaagcuccgugaucccccuuaugcauccucuggccgaucccucuaccgucuuuaaggacggcgaugaggcggaaaacuucguggagguucaccucccggacgugcauaaacagauuagcggcgucgaucuggggcugccuaacuggggaaaguacgugcucguuuccgccggcgugcugaucgcucuuaugcugaucauuuuucucaugacgugcugugggcgggucaauagacccgagagcacacagcacaaccugggaggcaccgggcgcgaagugucugugaccccucaguccggcaagguuaucagcucuugggaguccugcaaaagcggaggcgggacacggcuguga

SEQ ID NO: 223570 - RNA, 1575 nt, Artificial Sequence; identical to SEQ ID NO: 223565
  derived and/or modified CDS sequence (opt5) from glycoprotein__RABV__KF437650.1

SEQ ID NO: 223571 - RNA, 1575 nt, Artificial Sequence
  derived and/or modified CDS sequence (opt5) from glycoprotein__RABV__KF437652.1
auggugccccaggcccuccuguucgucccucugcuuguuuuuagcaugugcuucggcaaguuuccgaucuacaccauucccgacaaacuggggccuuggucccccaucgauauucaccaucucucuuguccuaacaaucuggugguggaggacgaaggaugcacaaaccuuagcggcuucuccuauauggagcugaaggucggguacaucucugcuauuaaagugaauggauuuacguguaccggcguugugacagaagccgagaccuauacaaacuucgucggguacgugaccacaaccuuuaagagaaaacacuuccggcccacgccugaugcgugccgcgcugccuauaauuggaagauggccggagacccgagauacgaagagagccuccauaaccccuauccugauuaccacuggcugcggaccguuaagacaaccaaagagucccuggugaucaucucucccagcgucgcugaccucgauccuuacgacaagucccugcauagccgcguguuucccaauggcaaauguucuggcauuacaaucuccagcaccuauugcccgacgaaccacgauuacacaauuuggcuuccugaaaaucccagacuggggaccucuugugacaucuucacaaacucccggggaaagcgcgccagcaaaggcucuaagaccugcggguuuguggaugagagaggacucuauaagucccugaaaggcgcuuguaaacuuaaacugugcgggguccucggacugcggcugauggacggcaccuggguugccaugcaagcgagcgaugaaacaaagugguguccucccgaccagcucgugaaucugcacgacuuccgcuccgaugagauugagcaucuuguggucgaggaacuggugaaaaagagagaaaaaugccucgacgcccuggagucuaucaugacgaccaagagcguuuccuuucggcgccuuagccaccugagaaagcucgugcccggcuucgggaaggcuuacacaauuuucaacaagacccugauggaagccgaugcucauuauaaaucuguccggacauggaaugagaucaucccuuccaagggaugccugcgcgugggcgggagaugucacccgcacguuaacggaguguuuuucaauggcauuauccucgggcccgacggacauguccugauuccugagaugcagagcucucuucugcagcaacacauggaacuccuggagagcuccgugaucccccuuaugcauccucuggccgaucccucuaccgucuuuaaagacggcgaugaagcggagaacuucguggaaguucaccucccggacgugcauaagcagauuagcggcgucgaucuggggcugccuaacuggggaaaguacgugcucguuuccgccggcgugcugaucgcucuuaugcugaucauuuuucucaugacgugcugugggcgggucaauagacccgagagcacacagcacaaccugggaggcaccgggcgcgaggugucugugaccccucaguccggcaaaguuaucagcucuugggaauccuauaagagcggaggcgggacacggcuguga

SEQ ID NO: 223572 - RNA, 1575 nt, Artificial Sequence
  derived and/or modified CDS sequence (opt5) from glycoprotein__RABV__KF437653.1
auggugccccaggcccuucucuucgucccucugcuuguuuuuagcaugugcuucggcaaguuuccgaucuacaccauucccgacaaacuggggccuuggucccccaucgauauucaccaucucucuuguccuaacaaucuggugguggaggacgaaggaugcacaaaccuuagcggcuucuccuauauggagcugaaggucggguacaucucugcuauuaaagugaauggauuuacguguaccggcguugugacagaagccgagaccuauacaaacuucgucggguacgugaccacaaccuuuaagggaaaacacuucagacccacgccugaugcgugccgggcugccuauaauuggaagauggccggcgacccgcgcuacgaagagagccuccauaaccccuauccugauuaccacuggcugagaaccguuaagacaaccaaagagucccuggugaucaucucucccagcgucgcugaccucgauccuuacgacaagucccugcauagccggguguuucccaauggcaaauguucugggauuacaaucuccagcaccuauugcccgacgaaccacgauuacacaauuuggcuuccugaaaauccccgccugggaaccucuugugacaucuucacaaacuccagaggcaagcgggccagcaaagggucuaagaccugcggauuuguggaugagcgcggccucuauaagucccugaaaggggcuuguaagcugaaacugugcggaguccucggccugagacugaccgacggcacauggguugccaugcaagcgagcgaugaaacgaagugguguccucccgaccagcucgugaaucugcacgacuuccgguccgaugagauugagcaucuuguggucgaggaacuggugaaaaagcgcgaagagugccucgacgcccuggaaucuaucaugaccacaaaaagcguuuccuuuagacggcuuagccaucugcgcaagcucgugcccggguucggaaaggcuuacaccauuuucaacaaaacacugauggaggccgaugcucacuauaagucugucagaaccuggaaugagaucaucccuuccaaaggcugccugcggguugggggacgcugucacccgcacgugaacggcguguuuuucaaugggauuauccucggacccgacggccauguccugauuccugaaaugcagagcucucuucugcagcaacacauggagcuccuggaaagcuccgugaucccccuuaugcauccucuggccgaucccucuacggucuuuaaggacggcgaugaggcggaaaacuucguggagguucaccucccggacgugcauaaacagauuagcggggucgaucugggacugccuaacuggggcaaguacgugcucguuuccgccggggugcugaucgcucuuaugcugaucauuuuucucaugacaugcuguggaagagucaaucggcccgagagcacccagcacaaccugggcgggaccggcagagaagugucugugacaccucaguccggaaagguuaucagcucuugggaguccuauaaaagcggcgggggaacccgccuguga

SEQ ID NO: 223573 - RNA, 1575 nt, Artificial Sequence
  derived and/or modified CDS sequence (opt5) from glycoprotein__RABV__KF437654.1
auggugccccaggcccuucucuucgucccucugcuuguuuuuagcaugugcuccggcaaguucccgaucuacaccauucccgacaaacuggggccuuggucucccaucgauauucaccaucucagcuguccuaacaaucuggugguggaggacgaaggaugcacaaaccuuuccggcuuuucuuauauggagcugaaggucggguacaucagcgcuauuaaagugaauggauucacguguaccggcguugugacagaagccgagaccuauacaaacuuugucggguacgugaccacaaccuucaagagaaaacacuuucggcccacgccugaugcgugccgcgcugccuauaauuggaagauggccggagacccgagauacgaagagucccuccauaaccccuauccugauuaccacuggcugcggaccguuaaggcuacaaaagagucucuggugaucaucagccccuccgucgccgaccucgauccuuacgacaagagccugcauucucgcguguuccccaauggcaaauguuccggcauuaccaucagcucuacaugcuguccgaccaaccacgauuauacgauuuggcuuccugaaaaucccagacuggggacauccugcgacaucuuuaccaacagccggggaaagcgcgcuucuaaaggcuccaagacauguggguucguggaugagagaggacucuacaagagccugaaaggcgccugcaagcugaaacugugugggguccucggacugcggcugauggacggcgcguggguugccaugcaggcuuccgaugaaaccaaguggugcccucccgaccaacucgugaaucugcacgacuuucgcucugaugagauugagcaucuuguggucgaggaacuggugaaaaagagagaagagugccucgacgcccuggaaagcaucaugaccacaaaauccguuagcuuccggcgccuuucucaccugagaaagcucgugcccggcuuugggaaggcuuauacgauuuucaacaaaacccugauggaggccgaugcgcauuacaaguccguccggacauggaaugagaucaucccuagcaaaggaugucugcgcgugggcgggagaugccacccgcacguuaacggaguguucuuuaauggcauuauccucgggcccgacggacauguccugauuccugaaaugcagucuagccuucugcagcaacacauggagcuccuggaauccucugugaucccccuuaugcauccucuggccgaucccagcaccgucuucaaggacggcgaugaggcugaaaacuuuguggagguucaccucccggacgugcauaaacagauuuccggcgucgaucuggggcugccuaacuggggaaaguaugugcucguuagcgccggcgugcugaucgcucuuaugcugaucauuuuccucaugacauguugcgggcgggucaauagacccgagucuacccagcacaaccugggaggcacggggcgcgaaguguccgugacaccucagagcggcaagguuaucucuuccugggagagcuacaaauccggaggcgggacccggcuguga

SEQ ID NO: 223574 - RNA, 1575 nt, Artificial Sequence
  derived and/or modified CDS sequence (opt5) from glycoprotein__RABV__KF484518.1
auggugcugcaggcccuccuguucgcucccuuucuuaucagcucccugugcuucggcaaguuuccuauuuacaccaucccggacaaacucgggcccuggucuccuauugauauccaccaucugagcugucccaacaaucuugucguugaggacgaaggaugcaacucccugucuggcuucagcuauauggagcucaaggugggguacauuuccgccaucaaagugaauggauuuaccuguacgggcgucgugaccgaagcggagacauauaccaacuucguuggguacgugacaaccacauuuaagagaaaacacuuccggccuaugcccgaugcuugccgcucugccuauaauuggaaggucgccggagacccuagauacgaagagagccugcauaacccguaucccgauuaccacuggcugcggaccgugaagacgaccaaagagucccucaucauuaucagcccuucuguugcugaccuggaucccuacgacaagucccuucauagccgcauuuuuccuggcggcaaauguucugggaugacaaucuccagcaccuauugcucuacaaaucacgauuacaccauuuggaugcccgaaaagacgggacugggcacauccugugacaucuucauuaccagcaaagggaagagagccuccaagggaggccggacaugcggguuuguggaugagcgcggacucuauaaaucucugaagggcgcuuguaaacuuaagcugugcggcgucagcgggcucagacugauggacggaaccugggccgcgauccaaaccuccgaugaaacaaaaugguguagcccggaccagcuggugaaccuccacgaccugcauucugaugagaucgagcaccuuguggucgaggaacugguucggcgcagagaagagugccucgacgcccuggaauccauuaugacgaccaagagcgugucuuuccggcgccuuagccaucugagaaaacucgugccuggcuuugggaaggcuuacacaaucuucaauaagacccugauggaggccgaugcucacuauaaauccguccggacauggaacgagauuauccccucuaagggaugccugcgcgugggcgggaaaugucacccucauguuaauggaguguucuuuaacggcauuauccucggccccgacgggcacguccugauccccgaaaugcagagcucccuucugcagcaacauauggagcuccuggaaagcucugugauuccucuuaugcacccgcuggccgaucucuccaccguuuucaaggacggagaugaggcggaagacuuuguggagguccaucugcccgaugugcacaaacacgucagcggcguggaccuggggcucccuucuuggggaaaguacaugcugauguccgccggcgcucuugccacgcugaugcucguuaucccccugaugaagugcuguagacgggugaauagaacaaaaagcauucagcaggggccucgcgaguccgaucggaaggucucugugacaccccagaacggcaaaguuaucagcuccugggaaucuuauaagagcggaggcgggaccggacuguga

SEQ ID NO: 223575 - RNA, 1575 nt, Artificial Sequence
  derived and/or modified CDS sequence (opt5) from glycoprotein__RABV__KF484519.1
auggugcugcaggcccuccuguucgcucccuuucuuaucagcucccugugccucggcaaguucccuauuuacaccaucccggacaaacuggggcccuggucuccuauugauauccaccaucuuagcugucccaacaaucuggucauugaggacgaaggaugcaacucccucucuggcuuuagcuauauggagcugaagguuggguacaucuccgccaucaaagugaauggauucacauguacgggcguggucaccgaagcggagacauauaccaacuuugugggguacguuacaaccacauucaagagaaaacacuuucggccuaugcccgaugcuugccgcucugccuauaauuggaagcuggccggagacccuagauacgaagagagccuccauaacccguaucccgaguaccacuggcugcggaccgugaagacgaccaaagaaucccuuauugucaucagcccuucuguggcugaucuggaccccuacgauaagucccuccauagccgcauuuucccuucuggcaaauguuccggcaugacaguuagcucuaccuauugcuccacaaaucacgaguacaccaucuggaugcccgaaaagguggggcugggaacgagcugugacauuuuuaucacauccaaaggcaagagagccucuaaagggggaaagaccugcggcuucgucgaugagcgggggcuuuauaagagccugaaaggagcuuguaagcucaaacugugcggcguguccggccugcgccucauggacgggacauggguggccauucaaaccagcgaugagaccaagugguguucuccggaccagcuggucaaccuucacgaucugcauuccgacgaaaucgagcaccucguuguggaggaacuggugagaaaacgggaagagugccuugacgcgcuggagagcaucaugacaacgaagucugucagcuuucgcagacucucccaucugcggaagcuggugccuggauucggcaaagccuacaccauuuuuaauaagacacucauggaagcugaugcccacuauaaaucuguucgcaccuggaacgagaucauucccagcaaggggugccugagagugggaggcaaaugucacccucaugucaaugggguguucuucaacggaaucauucuuggccccgacggccacguucugauccccgaaaugcaguccagccuccugcagcaacauaucgagcuucuggaaucuuccgugauuccucucaugcacccgcuggcugaucugagcacagucuuuaaggacggggaugaggccgaggacuucguggaaguccaucuccccgaugugcacaagcagaucucuggaguugaccugggccuuccuuccugggggaaauacgugcugaugagcgcgggagcccucgcuacccugauucuggucacgucccuuaugaagugcugucggugggugaaucgcacaaaaucuauccagcagggccccagagagagcgaacggaagguuuccgugaccccucaaucugggaaagucauuagcuccugggagagcuauaagaucggcggagaaaccggccucuga

SEQ ID NO: 223576 - RNA, 1575 nt, Artificial Sequence
  derived and/or modified CDS sequence (opt5) from glycoprotein__RABV__KF484520.1
auggugcugcaggcccuccuguucgcucccuuucuuaucagcucccugugccucggcaaguucccuauuuacaccaucccggacaaacuggggcccuggucuccuauugauauccaccaucuuagcugucccaacaaucuggucguugaggacgaaggaugcaacucccucucuggcauuagcuauauggagcugaaggugggguacaucuccgccaucaaagugaauggauuuacauguacgggcgucgugaccgaagcggagacauauaccaacuucguuggguacgugacaaccacauuuaagagaaaacacuuccauccuaugcccgaugcuugccggucugccuauaauuggaagcuggccggagacccucgcuacgaagagagccuccacaacccguaucccgauuaccauuggcugagaaccgucaagacgaccaaagagucccuuauuaucauuagcccuucuguggcugaccuggaucccuacgacaagucccuccacagccggaucuuuccuucuggcaaauguuccggcaugacaauuagcucuaccuauugcuccacaaaucacgaauacaccaucuggaugcccgagaaggccgggcugggaacgagcugugauauuuucacaaccuccaaaggcaagcgcgcuucuaaagggggaaagacaugcggcuuuguugacgaaagagggcuuuauaagagccugaaaggagccuguaagcucaaacugugcggcguguccggccugcggcucauggaugggaccugggucgcgauccaaaccagcgaggagacaaagugguguccgccugaccagcuggugaaccuucaugaucugcacucugacgaaaucgagcaucucguggucgaggaacugguuaaaaagcgcgaagagugccuugacgcccuggaguccauuaugacgaccaagagcgugucuuucagacggcucagccaucugcgcaaacuggugcccggauuuggcaaggcuuacacaaucuucaauaaaacccucauggaagccgaugcucacuauaaguccauuagaacauggaacgagaucauuccuucuaaagggugccugcgggucggaggcaagugucacccccacgugaaugggguguuuuucaacggaaucauccuuggccccgacggccauguucugauuccugaaaugcagagcucccuccugcagcaacacauggagcuucuggaaagcucugucaucccgcucaugcauccccuggccgaucuguccaccguguucaaggacggggaugaggcggaggacuuuguugaagugcaccucccugauguccacaaacagauuagcggaguggaccugggccuucccucuugggggaaguacguccugauguccgccggagcucucgccauccugaugcuggugauuagccuuaugaaaugcuucuggggcguuaaucgcacgaagccuauccagcaggggcccagagaguccgaacggaaagugucuaucgcuccgcaaagccgcaaggucauuuccucuugggagagcuauaaguccggcggagaaacagagcucuga

SEQ ID NO: 223577 - RNA, 1575 nt, Artificial Sequence
  derived and/or modified CDS sequence (opt5) from glycoprotein__RABV__KF484521.1
auggugcugcaggcccuccuguucgcucccuuucuuaucagcucccugugccucggcaaguucccuauuuacaccaucccggacaaacuggggcccuggucuccuauugauauccaccaucuuagcugucccaacaaucuggucguugaggacgaaggaugcaacucccucucuggcuuuagcuauauggagcugaaggugggguacauuuccgccaucaaagugaauggauucacauguacgggcgucgugaccgaagcggagacauauaccaacuuuguuggguacgugacaaccacauucaagagaaaacacuuucggccuaugcccgaugcuugccgcucugccuauaauuggaagcuggccggagacccuagauacgaagagagccuccauaacccguaucccgauuaccacuggcugcggaccgucaagacgaccaaagagucccuuaucgugauuagcccuucuguugcugaccuggaucccuacgacaagucccuccauagccgcaucuucccuggcggcaaauguucugggaugacaguguccagcaccuauugcucuacaaaucacgaauacaccauuuggaugcccgagaaggccggacugggcacguccugugauaucuuuacaaccagcaaagggaagagagcuacaaagggaggcaaaaccugcggguucgucgacgaacggggacuuuauaagucccugaaaggcgccuguaagcucaaacugugcggcgugucugggcugcgccucauggauggaaccuggguggcgauucaaacaagcgacgagacgaagugguguuccccggaucagcuggucaaccuucacgaccugcauagcgacgagaucgaacaccucguuguggaggaacuggugagaaaacgggaggaaugccuugaugcccuggagucuauuaugaccacaaaguccgucagcuuucgcagacucucucaucugcggaagcuggugccuggcuucgggaaggcuuacaccaucuuuaauaaaacacucauggaggccgacgcucacuauaaaagcguucgcaccuggaacgaaaucauucccuccaagggaugccugagagugggcgggaaaugucacccucaugucaauggaguguucuucaacggcaucauucuuggccccgaugggcacguucugauccccgagaugcagucuagccuccugcagcaacauauggaacuucuggaguccagcgugauuccucucaugcacccgcuggccgaccccucuacggucuuuaaggaugacgaugaagcggaggacuucguggagguccaucugccugaugugcacaagcagguuuccggaguggaccucggccugcccagcugggggcgguacguccuuaugucugccggagcucuggccacacucaugcuggugaucucccugaugaaaugcuguaagggcguuaaucgcaccaaaagcaucaagcagggguccagagaaucugagcggaaagugagcauuaccccucaguccggcaaggucaucucuagcugggaauccuauaagagcggaggcgagacagggcuuuga

SEQ ID NO: 223578 - RNA, 1575 nt, Artificial Sequence
  derived and/or modified CDS sequence (opt5) from glycoprotein__RABV__KF484522.1
auggugcugcaggcccuccuguucgcucccuuucuuaucagcucccugugccucggcaaguucccuauuuacaccaucccggacaaacuggggcccuggucuccuauugauauccaccaucuuagcugucccaacaaucuggucauugaggacgaaggaugcaacucccucucuggcuuuagcuauauggagcugaagguuggguacaucuccgccaucaaagugaauggauucacauguacgggcguggucaccgaagcggagacauauaccaacuuugugggguacguuacaaccacauucaagagaaaacacuuucggccuaugcccgaugcuugccgcucugccuauaauuggaagcuggccggagacccuagauacgaagagagccuccauaacccguaucccgaguaccacuggcugcggaccgugaagacgaccaaagaaucccuuauugucaucagcccuucuguggcugaucuggaccccuacgauaagucccuccauagccgcauuuucccuucuggcaaauguuccggcaugacaguuagcucuaccuauugcuccacaaaucacgaguacaccaucuggaugcccgaaaagguggggcugggaacgagcugugacauuuuuaucacauccaaaggcaagagagccucuaaagggggaaagaccugcggcuucgucgaugagcgggggcuuuauaagagccugaaaggagcuuguaagcucaaacugugcggcguguccggccugcgccucauggacgggacauggguggccauucaaaccagcgaugagaccaagugguguucuccggaccagcuggucaaccuucacgaucugcauuccgacgaaaucgagcaccucguuguggaggaacuggugagaaaacgggaagagugccuugacgcgcuggagagcaucaugacaacgaagucugucagcuuucgcagacucucccaucugcggaagcuggugccuggauucggcaaagccuacaccauuuuuaauaagacacucauggaagcugaugcccacuauaaaucuguucgcaccuggaacgagaucauucccagcaaggggugccugagagugggaggcaaaugucacccucaugucaaugggguguucuucaacggaaucauucuuggccccgacggccacguucugauccccgaaaugcaguccagccuccugcagcaacauaucgagcuucuggaaucuuccgugauuccucucaugcacccgcuggcugaucugagcacagucuuuaaggacggggaugaggccgaggacuucguggaaguccaucuccccgaugugcacaagcagaucucuggaguugaccugggccuuccuuccugggggaaauacgugcugaugagcgcgggagcccucgcuacccugauucuggucaucucccuuaugaagugcugucggugggugaaucgcacgaaaucuauucagcagggccccagagagagcgaacggaagguuuccgugacaccucaaucugggaaagucaucagcuccugggagagcuauaagaucggcggagaaaccggccucuga

SEQ ID NO: 223579 - RNA, 1575 nt, Artificial Sequence
  derived and/or modified CDS sequence (opt5) from glycoprotein__RABV__KF484523.1
augauccugcacgcccuccuguucgcucccuuucuuauuagcccucugugccucggcaaguucccgaucuacaccauucccgacaaacuggggccuuggucccccaucgauauucaucaccuuucuuguccuaacaaucugguggucgaggacgaaggaugcaacagccucuccggcuuuucuuauauggagcugaagguuggguacaucagcgccaucaaagugaauggauucacauguacgggcguggucaccgaagcggagacauauaccaacuuugugggguacguuacaaccacauucaagagaaaacauuuucggcccaugccugaugcuugccgcuccgccuauaauuggaagcuggccggagacccgagauacgaagagucucuccacaaccccuauccugaguaccauuggcugcggaccgugaagacgaccaaagaaagccuuauugucaucucccccagcguggcugaucuggacccuuacgauaagucucuccacucccgcauuuuccccagcggcaaauguucuggcaugacaguuuccagcaccuauugcucuacaaaucacgaguacaccaucuggaugccggaaaagguggggcugggaacguccugugacauuuuuacaaccagcaaaggcaagagagccuccaaagggggacggaucugcggcuucgucgaugagcgcgggcuuuauaagucucugaagggagcuuguaaacucaagcugugcggcgugagcggccugagacucauggacgggacaggauuugccauucagaccuccgaugagaccaaaugguguagcccugaccaacuggugaaccuucaugaucugcacucugacgaaaucgagcaucucgucguugaggaacuggugcggaagcgcgaagagugccuugacgcgcuggaguccaucaugacaacgaaaagcgugucuuucagacggcucagccaucugcgcaagcugguccccggcuuugggaaggccuacaccauuuucaauaaaacacucauggaagcugaugcccacuauaaguccgugagaaccuggaacgagaucauuccuucuaaaggaugccugcggguuggcgggaagugucacccccacgugaauggagucuucuuuaacggcaucauucuuggccccgacgggcaugugcugaucccugaaaugcagagcucccuccugcagcagcacauggagcuucuggaaagcucuguuaucccgcucaugcauccccuggcugaucuguccacaguguucaaagacgauggagaggccgaggacuuugucgaagugcaccucccugauguccacaagcaaauuagcggcguggaccuggggcuucccucuuggggaaaguacgcgcugauguccgccggcgcucucgccacccugauccugaugauuuuccuuaugaaaugcugucgcuggguuaauagaacggagagcauccagcaggggccucgggaauccgagagaaaggugucugucacaccccagaacggcaaagugauuagcuccugggaaucuuauaagaucggaggcgagaccgggcucuga

SEQ ID NO: 223580 - RNA, 1575 nt, Artificial Sequence
  derived and/or modified CDS sequence (opt5) from glycoprotein__RABV__KF484524.1
auggugcugcaggcccuccuguucgcucccuuucuuaucagcucccugugccucggcaaguucccuauuuacaccaucccggacaaacuggggcccuggucuccuauugauauccaccaucuuagcugucccaacaaucuggucauugaggacgaaggaugcaacucccucucuggcuuuagcuauauggagcugaagguuggguacaucuccgccaucaaagugaauggauucacauguacgggcguggucaccgaagcggagacauauaccaacuuugugggguacguuacaaccacauucaagagaaaacacuuucggccuaugcccgaugcuugccgcucugccuauaauuggaagcuggccggagacccuagauacgaagagagccuccauaacccguaucccgaguaccacuggcugcggaccgugaagacgaccaaagaaucccuuauugucaucagcccuucuguggcugaucuggaccccuacgauaagucccuccauagccgcauuuucccuucuggcaaauguuccggcaugacaguuagcucuaccuauugcuccacaaaucacgaguacaccaucuggaugcccgaaaagguggggcugggaacgagcugugacauuuuuaucacauccaaaggcaagagagccucuaaagggggaaagaccugcggcuucgucgaugagcgggggcuuuauaagagccugaaaggagcuuguaagcucaaacugugcggcguguccggccugcgccucauggacgggacauggguggccauucaaaccagcgaugagaccaagugguguucuccggaccagcuggucaaccuucacgaucugcauuccgacgaaaucgagcaccucguuguggaggaacuggugagaaaacgggaagagugccuugacgcgcuggagagcaucaugacaacgaagucugucagcuuucgcagacucucccaucugcggaagcuggugccuggauucggcaaagccuacaccauuuuuaauaagacacucauggaagcugaugcccacuauaaaucuguucgcaccuggaacgagaucauucccagcaaggggugccugagagugggaggcaaaugucacccucaugucaaugggguguucuucaacggaaucauucuuggccccgacggccacguucugauccccgaaaugcaguccagccuccugcagcaacauauggagcuucuggaaucuuccgugaucccucucaugcacccgcuggcugaucugagcacagucuuuaaggagggggacgaggccgaagauuucguggagguccaucuccccgacgugcacaagcagauuucuggaguugaucugggccuuccuuccugggggaaauacgugcugaugagcgcgggagcccucgcuacccugauccuggucauuucccuuaugaagugcugucggugggugaaucgcacgaaaucuauccagcagggccccagagaaagcgagcggaagguuuccgugacaccucaaucugggaaagucauuagcuccugggaacccuauaagaucggcggagagaccggccucuga

SEQ ID NO: 223581 - RNA, 1575 nt, Artificial Sequence
  derived and/or modified CDS sequence (opt5) from glycoprotein__RABV__KF484525.1
auggugcugcaggcccuccuguucgcucccuuucuuaucagcucccugugccucggcaaguucccuauuuacaccaucccggacaaacuggggcccuggucuccuauugauauccaccaucuuagcugucccaacaaucuggucguugaggacgaaggaugcaacucccucucuggcauuagcuauauggagcugaaggugggguacaucuccgccaucaaagugaauggauuuacauguacgggcgucgugaccgaagcggagacauauaccaacuucguuggguacgugacaaccacauuuaagagaaaacacuuccauccuaugcccgaugcuugccggucugccuauaauuggaagcuggccggagacccucgcuacgaagagagccuccacaacccguaucccgauuaccauuggcugagaaccgucaagacgaccaaagagucccuuauuaucauuagcccuucuguggcugaccuggaucccuacgacaagucccuccacagccggaucuuuccuucuggcaaauguuccggcaugacaauuagcucuaccuauugcuccacaaaucacgaauacaccaucuggaugcccgagaaggccgggcugggaacgagcugugauauuuucacaaccuccaaaggcaagcgcgcuucuaaagggggaaagacaugcggcuuuguugacgaaagagggcuuuauaagagccugaaaggagccuguaagcucaaacugugcggcguguccggccugcggcucauggaugggaccugggucgcgauccaaaccagcgaggagacaaagugguguccgccugaccagcuggugaaccuucaugaucugcacucugacgaaaucgagcaucucguggucgaggaacugguuaaaaagcgcgaagagugccuugacgcccuggaguccauuaugacgaccaagagcgugucuuucagacggcucagccaucugcgcaaacuggugcccggauuuggcaaggcuuacacaaucuucaauaaaacccucauggaagccgaugcucacuauaaguccauuagaacauggaacgagaucauuccuucuaaagggugccugcgggucggaggcaagugucacccccacguggacgggguguuuuucaauggaaucauccuuggccccgauggccauguucugauuccugaaaugcagagcucccuccugcagcaacacauggagcuucuggaaagcucugucaucccgcucaugcauccccuggccgaccuguccaccguguucaaggauggggacgaggcggaggauuuuguugaagugcaccucccugacguccacaaacagauuagcggaguggaucugggccuucccucuugggggaaguacguccugauguccgccggagcucucgccauccugaugcuggugauuagccuuaugaaaugcuucuggggcguuaaccgcacgaagccuauccagcaggggcccagagaguccgaacggaaagugucuaucgcuccgcaaagccgcaaggucauuuccucuugggagagcuauaagaauggcggagaaacagagcucuga

SEQ ID NO: 223582 - RNA, 1575 nt, Artificial Sequence
  derived and/or modified CDS sequence (opt5) from glycoprotein__RABV__KF484526.1
auggugcugcaggcccuccuguucgcucccuuucuuaucagcucccugugccucggcaaguucccuauuuacaccaucccggacaaacuggggcccuggucuccuauugauauccaccaucuuagcugucccaacaaucuggucguugaggacgaaggaugcaacucccucucuggcuuuagcuauauggagcugaaggugggguacauuuccgccaucaaagugaauggauucacauguacgggcgucgugaccgaagcggagacauauaccaacuuuguuggguacgugacaaccacauucaagagaaaacacuuucggccuaugcccgaugcuugccgcucugccuauaauuggaagcuggccggagacccuagauacgaagagagccuccauaacccguaucccgaguaccacuggcugcggaccgucaagacgaccaaagaaucccuuaucauuaucagcccuucuguggcugaucuggaccccuacgauaagucccuccauagccgcauuuucccuggcggcaaauguucugggaugacaguuuccagcaccuauugcucuacaaaucacgaguacaccaucuggaugcccgaaaaggugggacugggcacguccugugacauuuuuacaaccagcaaagggaagagagccuccaagggaggcaaaacaugcggguucgucgaugagcggggacuuuauaagucucugaaaggcgcuuguaagcucaaacugugcggcgugagcgggcugcgccucauggacggaaccuggguggccaugcaaaccuccgaugagacaaagugguguagcccggaccagcuggucaaccuucacgaucugcauucugacgaaaucgagcaccucguuguggaggaacuggugagaaaacgggaagagugccuugacgcgcuggaguccauuaugacgaccaagagcgucucuuuucgcagacucagccaucugcggaagcuggugccuggcuucgggaaagccuacacaaucuuuaauaagacccucauggaagcugaugcccacuauaaauccguucgcacauggaacgagaucauucccucuaagggaugccugagagugggcgggaaaugucacccucaugucaauggaguguucuucaacggcaucauucuuggccccgacgggcacguucugauccccgaaaugcagagcucccuccugcagcaacauauggagcuucuggaaagcucugugauuccucucaugcacccgcuggcugaucuguccgccgucuuuaaggagggagacgaggcggaagauuucguggagguccaucuccccgacgugcacaagcagaucagcgaaguugaucugggccuuccuucuugggggaaauacgugcugauguccgccggagcucucgccacccugauccuggucauuagccuuaugaagugcugucggugggugaaucgcacgaaauccauccagcagggccccagagagucugaacggaagguuagcgugacaccucaaaacgggaaagucauuuccucuugggagagcuauaagaucagaggcgagaccggacucuga

SEQ ID NO: 223583 - RNA, 1575 nt, Artificial Sequence
  derived and/or modified CDS sequence (opt5) from glycoprotein__RABV__KF484527.1
auggugcugcaggcccuccuguucgcucccuuucuuaucagcucccugugccucggcaaguucccuauuuacaccaucccggacaaacuggggcccuggucuccuauugauauccaccaucuuagcugucccaacaaucuggucguugaggacgaaggaugcaacucccucucuggcuuuagcuauauggagcugaaggugggguacauuuccgccaucaaagugaauggauucacauguacgggcgucgugaccgaagcggagacauauaccaacuuuguuggguacgugacaaccacauucaagagaaaacacuuucggccuaugcccgaugcuugccgcucugccuauaauuggaagcuggccggagacccuagauacgaagagagccuccauaacccguaucccgaguaccacuggcugcggaccgucaagacgaccaaagaaucccuuaucgugauuagcccuucuguugcugaucuggaccccuacgauaagucccuccauagccgcaucuucccuggcggcaaauguucugggaugacaguguccagcaccuauugcucuacaaaucacgaguacaccauuuggaugcccgaaaaggucggacugggcacguccugugacaucuuuacaaccagcaaagggaagagagccuccaagggaggccggacaugcggguucguggaugagcgcggacuuuauaaaucucugaagggcgcuuguaaacucaagcugugcggcgugagcgggcugagacucauggacggaaccugggucgccaugcaaaccuccgaugagacaaaaugguguagcccggaccagcugguuaaccuucacgaucugcauucugacgaaauugagcaccucgugguggaggaacugguccggaagcgcgaagagugccuugacgcgcuggaguccaucaugacgaccaaaagcgugucuuuuagacggcucagccaucugcgcaagcugguuccuggcuucgggaaggccuacacaauuuuuaauaaaacccucauggaagcugaugcccacuauaaguccgugagaacauggaacgagaucauccccucuaaaggaugccugcgggucggcgggaagugucacccucaugugaauggaguuuucuucaacggcauuauccuuggccccgacgggcacgugcugauucccgaaaugcagagcucccuccugcagcaacauauggagcuucuggaaagcucugucaucccucucaugcacccgcuggcugaucuguccaccguguuuaaagagggagacgaggccgaagauuucgucgaggugcaucuccccgacguucacaagcagauuagcggcguggaucuggggcuuccuucuuggggaaaguacguccugaugggcgcgggggcccucgcuacgcugauccuggugaucucccuuaugaaaugcugucgcuggguuaauagaacaaagagcauucagcagggcccccggggauccgaaagaaaagugucugucaccccucaaaacggcaaggugaucagcuccugggagucuuauaaaauugggggagaaaccggccucuga

SEQ ID NO: 223584 - RNA, 1575 nt, Artificial Sequence
  derived and/or modified CDS sequence (opt5) from glycoprotein__RABV__KF484528.1
auggugcugcaggcccuccuguucgcucccuuucuuaucagcucccugugccucggcaaguucccuauuuacaccaucccggacaaacuggggcccuggucuccuauugauauccaccaucuuagcugucccaacaaucuggucguugaggacgaaggaugcaacucccucucuggcuuuagcuauauggagcugaaggugggguacauuuccgccaucaaagugaauggauucacauguacgggcgucgugaccgaagcggagacauauaccaacuuuguuggguacgugacaaccacauucaagagaaaacacuuucggccuaugcccgaugcuugccgcucugccuauaauuggaagcuggccggagacccuagauacgaagagagccuccauaacccguaucccgaguaccacuggcugcggaccgucaagacgaccaaagaaucccuuaucauuaucagcccuucuguggcugaucuggaccccuacgauaagucccuccauagccgcauuuucccuggcggcaaauguucugggaugacaguuuccagcaccuauugcucuacaaaucacgaguacaccaucuggaugcccgaaaaggugggacugggcacguccugugacauuuuuacaaccagcaaagggaagagagccuccaagggaggcaaaacaugcggguucgucgaugagcggggacuuuauaagucucugaaaggcgcuuguaagcucaaacugugcggcgugagcgggcugcgccucauggacggaaccuggguggccaugcaaaccuccgaugagacaaagugguguagcccggaccagcuggucaaccuucacgaucugcauucugacgaaaucgagcaccucguuguggaggaacuggugagaaaacgggaagagugccuugacgcgcuggaguccauuaugacgaccaagagcgucucuuuucgcagacucagccaucugcggaagcuggugccuggcuucgggaaagccuacacaaucuuuaauaagacccucauggaagcugaugcccacuauaaauccguucgcacauggaacgagaucauucccucuaagggaugccugagagugggcgggaaaugucacccucaugucaauggaguguucuucaacggcaucauucuuggccccgacgggcacguucugauccccgaaaugcagagcucccuccugcagcaacauauggagcuucuggaaagcucugugauuccucucaugcacccgcuggcugaucuguccaccgucuuuaaggagggagacgaggccgaagauuucguggagguccaucuccccgacgugcacaagcagaucagcgaaguugaucugggccuuccuucuugggggaaauacgugcugauguccgcgggagcccucgcuacgcugauccuggucauuagccuuaugaagugcugucggugggugaaucgcacaaaauccauccagcagggccccagagagucugaacggaagguuagcgugaccccucaaaacgggaaagucauuuccucuugggagagcuauaagaucggcggagagaccggccucuga

SEQ ID NO: 223585 - RNA, 1575 nt, Artificial Sequence
  derived and/or modified CDS sequence (opt5) from glycoprotein__RABV__KF484529.1
auggugcugcaggcccuccuguucgcucccuuucuuaucagcucccugugccucggcaaguucccuauuuacaccaucccggacaaacuggggcccuggucuccuauugauauccaccaucuuagcugucccaacaaucuggucguugaggacgaaggaugcaacucccucucuggcuuuagcuauauggagcugaaggugggguacauuuccgccaucaaagugaauggauucacauguacgggcgucgugaccgaagcggagacauauaccaacuuuguuggguacgugacaaccacauucaagagaaaacacuuucggccuaugcccgaugcuugccgcucugccuauaauuggaagcuggccggagacccuagauacgaagagagccuccauaacccguaucccgaguaccacuggcugcggaccgucaagacgaccaaagaaucccuuaucgugauuagcccuucuguugcugaucuggaccccuacgauaagucccuccauagccgcaucuucccuggcggcaaauguucugggaugacaguguccagcaccuauugcucuacaaaucacgaguacaccauuuggaugcccgaaaaggucggacugggcacguccugugacaucuuuacaaccagcaaagggaagagagccuccaagggaggccggacaugcggguucguggaugagcgcggacuuuauaaaucucugaagggcgcuuguaaacucaagcugugcggcgugagcgggcugagacucauggacggaaccugggucgccaugcaaaccuccgaugagacaaaaugguguagcccggaccagcugguuaaccuucacgaucugcauucugacgaaauugagcaccucgugguggaggaacugguccggaagcgcgaagagugccuugacgcgcuggaguccaucaugacgaccaaaagcgugucuuuuagacggcucagccaucugcgcaagcugguuccuggcuucgggaaggccuacacaauuuuuaauaaaacccucauggaagcugaugcccacuauaaguccgugagaacauggaacgagaucauccccucuaaaggaugccugcgggucggcgggaagugucacccucaugugaauggaguuuucuucaacggcauuauccuuggccccgacgggcacgugcugauucccgaaaugcagagcucccuccugcagcaacauauggagcuucuggaaagcucugucaucccucucaugcacccgcuggcugaucuguccaccguguuuaaagaggacgaugaggccgaagacuucgucgaggugcaucuccccgauguucacaagcagauuagcggaguggaccugggccuuccuucuugggggaaguacguccugaugggagcgggcgcccucgcuacgcugacacuggugaucucccuuaucaaaugcugucgcuggguuaauagaaccaagagcauucagcaggggccccgggaauccgagagaaaagugucugucaccccucaaaacggcaaggugaucagcuccugggaaucuuauaaaauuggaggcgagacagggcucuga

SEQ ID NO: 223586 - RNA, 1575 nt, Artificial Sequence
  derived and/or modified CDS sequence (opt5) from glycoprotein__RABV__KF484530.1
auggugcugcaggcccuccuguucgcucccuuucuuaucagcucccugugcuucggcaaguuuccuauuuacaccaucccggacaaacucgggcccuggucuccuauugauguccaccaucugagcugucccaacaaucuuguuaucgaggacgaaggaugcaacucccugucuggcuucagcuauauggagcucaaggugggguacauuuccgccaucaaagugaauggauuuacauguacgggcgucgugaccgaagcggagacauauaccaacuucguuggguacgugacaaccacauuuaagagaaaacacuuccggccuaugcccgaugcuugccgcucugccuauaauuggaaggucgccggagacccuagauacgaagagagccugcauaacccguaucccgauuaccacuggcugcggaccgugaagacgaccaaagagucccucaucauuaucagcccuucuguugcugaccuggaucccuacgacaagucccuucauagccgcauuuuuccuggcggcaaauguucugggaugacaaucuccagcaccuauugcucuacaaaucacgauuacaccauuuggaugcccgaaaagacgggacugggcacauccugugacaucuucaccacaagcaaagggaagagagccuccaagggaggccggaccugcggguuuguggaugagcgcggacucuauaaaucucugaagggcgcuuguaaacuuaagcugugcggcgucagcgggcucagacugauggacggaaccugggccgcgauucaaacauccgaugaaacgaaaugguguagcccggaccagcuggugaaccuccacgaccugcauucugaugagaucgagcaccuuguggucgaggaacugguucggcgcagagaagagugccucgacgcccuggaauccaucaugaccacaaagagcgugucuuuccggcgccuuagccaucugagaaaacucgugccuggcuuugggaaggcuuacaccauuuucaauaagacacugauggaggccgaugcucacuauaaauccguccggaccuggaacgagaucauucccucuaagggaugccugcgcgugggcgggaaaugucacccucauguuaauggaguguucuuuaacggcaucauucucggccccgacgggcacguccugauccccgaaaugcagagcucccuucugcagcaacauauggagcuccuggaaagcucugugaucccucuuaugcacccgcuggccgaucucuccacgguuuucaaggacggagaugaggcggaagacuuuguggagguccaucugcccgaugugcacaaacaggucagcggcguggaccuggggcucccuucuuggggaaaguacaugcugauguccgccggcgcucuugccacacugaugcucguuauuccccugaugaagugcuguagacgggugaauagaaccaaaagcacccagcaggggccucgcgaguccgaucggaaggucucugugacaccccaaaacggcaaaguuaucagcuccugggaaucuuauaagagcggaggcgggaccggacuguga

SEQ ID NO: 223587 - RNA, 1575 nt, Artificial Sequence
  derived and/or modified CDS sequence (opt5) from glycoprotein__RABV__KF484531.1
auggugcugcaggcccuccuguucgcucccuuucuuaucagcucccugugccucggcaaguucccuauuuacaccaucccggacaaacuggggcccuggucuccuauugauauccaccaucuuagcugucccaacaaucuggucguugaggacgaaggaugcaacucccucucuggcuuuagcuauauggagcugaaggugggguacauuuccgccaucaaagugaauggauucacauguacgggcgucgugaccgaagcggagacauauaccaacuuuguuggguacgugacaaccacauucaagagaaaacacuuucggccuaugcccgaugcuugccgcucugccuauaauuggaagcuggccggagacccuagauacgaagagagccuccauaacccguaucccgaguaccacuggcugcggaccgucaagacgaccaaagaaucccuuaucgugauuagcccuucuguugcugaucuggaccccuacgauaagucccuccauagccgcaucuucccuggcggcaaauguucugggaugacaguguccagcaccuauugcucuacaaaucacgaguacaccauuuggaugcccgaaaaggucggacugggcacguccugugacaucuuuacaaccagcaaagggaagagagccuccaagggaggccggacaugcggguucguggaugagcgcggacuuuauaaaucucugaagggcgcuuguaaacucaagcugugcggcgugagcgggcugagacucauggacggaaccugggucgccaugcaaaccuccgaugagacaaaaugguguagcccggaccagcugguuaaccuucacgaucugcauucugacgaaauugagcaccucgugguggaggaacugguccggaagcgcgaagagugccuugacgcgcuggaguccaucaugacgaccaaaagcgugucuuuuagacggcucagccaucugcgcaagcugguuccuggcuucgggaaggccuacacaauuuuuaauaaaacccucauggaagcugaugcccacuauaaguccgugagaacauggaacgagaucauccccucuaaaggaugccugcgggucggcgggaagugucacccucaugugaauggaguuuucuucaacggcauuauccuuggccccgacgggcacgugcugauucccgaaaugcagagcucccuccugcagcaacauauggagcuucuggaaagcucugucaucccucucaugcacccgcuggcugaucuguccaccguguuuaaagaggacgaugaggccgaagacuucgucgaggugcaucuccccgauguucacaagcagauuagcggaguggaccugggccuuccuucuugggggaaguacguccugaugggagcgggcgcccucgcuacgcugauccuggugaucucccuuauuaaaugcugucgcuggguuaauagaacaaagagcauccagcaggggccccgggaauccgagagaaaagugucugccaccccucaaaacggcaaggucauuagcuccugggaaucuuauaaaaucggaggcgagaccgggcucuga

SEQ ID NO: 223588 - RNA, 1575 nt, Artificial Sequence
  derived and/or modified CDS sequence (opt5) from glycoprotein__RABV__KF484532.1
augauccugcacgcccuccuguucgcucccuuucuuauuagcucccugugccucggcaaguucccuaucuacaccauuccggacaaacuggggcccuggucuccuaucgauauucaucaccuuagcugucccaacaaucugguggucgaggacgaaggaugcaacucccucucuggcuuuagcuauauggagcugaagguuggguacaucuccgccaucaaagugaauggauucacauguacgggcguggucaccgaagcggagacauauaccaacuuugugggguacguuacaaccacauucaagagaaaacauuuucggccuaugcccgaugcuugccgcucugccuauaauuggaagcuggccggagacccuagauacgaagagagccuccacaacccguaucccgaguaccauuggcugcggaccgugaagacgaccaaagaaucccuuauugucaucagcccuucuguggcugaucuggaccccuacgauaagucccuccacagccgcauuuucccuucuggcaaauguuccggcaugacaguuagcucuaccuauugcuccacaaaucacgaguacaccaucuggaugcccgaaaagguggggcugggaacgagcugugacauuuuuacaaccuccaaaggcaagagagccucuaaagggggacggaucugcggcuucgucgaugagcgcgggcuuuauaagagccugaagggagcuuguaaacucaagcugugcggcguguccggccugagacucauggacgggacauggguggccauucagaccagcgaugagaccaaaugguguucuccggaccaacuggucaaccuucaugaucugcacuccgacgaaaucgagcaucucguuguggaggaacuggugcggaagcgcgaagagugccuugacgcgcuggagagcaucaugacaacgaaaucugucagcuuuagacggcucucccaucugcgcaagcuggugccuggauucggcaaggccuacaccauuuuuaauaaaacacucauggaagcugaugcccacuauaagucuguuagaaccuggaacgagaucauucccagcaaagggugccugcgggugggaggcaagugucacccucacgucaaugggguguucugcaacggaaucauucuuggccccgacggccauguucugauccccgaaaugcaguccagccuccugcagcagcacauggagcuucuggaaucuuccgugaucccucucaugcauccgcuggcugaucugagcacagucuucaaagacgauggggaggccgaggacuuuguggaaguccaccuccccgaugugcacaagcaaauuucuggaguugaccugggccuuccuuccugggggaaguacgcgcugaugagcgccggagcucucgccacccugauccugaugauuucccuuaugaaauguugccgcugggugaauagaacggagucuauccggcagggccccagagaaagcgagcgcaaggucuccgugacaccucagaacgggaaaguuauuucuagcugggaauccuauaagaucggcggagagaccggccucuga

SEQ ID NO: 223589 - RNA, 1575 nt, Artificial Sequence
  derived and/or modified CDS sequence (opt5) from glycoprotein__RABV__KF484533.1
auggugcugaaggcccuccuguucgcucccuuucuuaucagcucccugugccucggcaaauucccuauuuacaccaucccggacaagcuggggcccuggucuccuauugauauccaccaucuuagcugucccaacaaucuggucguugaggacgaaggaugcaacucccucucuggcuuuagcuauauggagcugaaagugggguacauuuccgccaucaaggugaauggauucacauguacgggcgucgugaccgaagcggagacauauaccaacuuuguuggguacgugacaaccacauucaaaagaaagcacuuucggccuaugcccgaugcuugccgcucugccuauaauuggaagcuggccggagacccuagauacgaagagagccuccauaacccguaucccgauuaccacuggcugcggaccguccgcacgaccaaagagucccuuaucgugauuagcccuucuguugcugaccuggaucccuacgacaagucccuccauagcagaaucuucccuggcggcaaauguucugggaugacaguguccagcaccuauugcucuacaaaucacgaauacaccauuuggaugcccgagaaggccggacugggcacguccugugauaucuuuacaaccagcaaagggaagcgggcuuccaagggaggccgcacaugcggguucgucgacgaaagaggacuuuauaaaucucugaagggcgccuguaaacucaagcugugcggcgugagcgggcugcggcucauggauggaaccuggguggcgauucagaccuccgacgagacaaaaugguguagcccggaucaacuggucaaccuucacgaccugcauucugacgagaucgaacaccucguuguggaggaacuggugcgcaagagagaggaaugccuugaugcccuggaguccauuaugacgaccaaaagcgucucuuuucggcgccucagccaucugagaaagcuggugccuggcuucgggaaggcuuacacaaucuuuaauaaaacccucauggaggccgacgcucacuauaaguccguucggacauggaacgaaaucauucccucuaaaggaugccugcgcgugggcgggaagugucacccucaugucagcggaguguucuucaauggcaucauucuuggccccgaugggcacguucugauccccgagaugcaguccagccuccugcagcagcauauggaacuucuggagucuuccgugauuccucucaugcacccgcuggccgaccccagcaccgucuuuaaagaugacgaugaagcggaggacuucguggagguccaucugccugaugugcacaagcaaguuucuggaguggaccucggccugcccuccugggggaaguacguccuuaugagcgccggagcucuggccacgcucaugcuggugaucucccugaugaaaugcuguagaggcuuuaaccggacaaagucuaucagacaggggagccgcgaauccgagcagaaaguuucugugaccccucagaauggcaaggucauuagcuccugggaaagcuauaaaucuggaggcgagaccgggcuuuga

SEQ ID NO: 223590 - RNA, 1575 nt, Artificial Sequence
  derived and/or modified CDS sequence (opt5) from glycoprotein__RABV__KF484534.1
auggugcugcaggcccuccuguucgcucccuuucuuaucagcucccugugccucggcaaguucccuauuuacaccaucccggacaaacuggggcccuggucuccuauugauauccaccaucuuagcugucccaacaaucuggucguugaggacgaaggaugcaacucccucucuggcauuagcuauauggagcugaaggugggguacaucuccgccaucaaagugaauggauuuacauguacgggcgucgugaccgaagcggagacauauaccaacuucguuggguacgugacaaccacauuuaagagaaaacacuuccggccuauggcugaugccugccgcucugccuauaauuggaagcugaccggagaccccagauacgaagagagccuccauaacccuuauccggauuaccacuggcugcggacggucaagaccacaaaagagucccuuauugugaucagccccucuguugcugaccuggauccuuacgacaagucccuccauagccgcauuuuucccucuggcaaauguuccggcaugaccaucagcucuacauauugcuccaccaaucacgaauacacgauuuggaugccugagaaggccgggcugggaacaagcugugauaucuucaccacauccaaaggcaagagagcuucuaaagggggaaagaccugcggcuuuguggacgaacgggggcuuuauaagagccugaaaggagccuguaagcucaaacugugcggcgucuccggccugcgccucauggaugggaccuggguggcgauucaaacaagcgacgagacgaagugguguucucccgaucagcuggugaaccuucacgaccugcauuccgacgagaucgaacaccucgucguugaggaacuggugaaaaagagagaggaaugccuugaugcccuggagagcaucaugaccacaaagucugugagcuuccggcgccucucccaucugagaaaacuggucccgggauuuggcaaggcuuacaccauuuucaauaaaacacucauggaggccgacgcucacuauaagucuauccggaccuggaacgaaauuaucccuagcaaagggugccugcgcgugggaggcaagugucacccccauguuaaugggguguuuuucaacggaauuauccuuggcccugauggccacguccugauccccgagaugcaguccagccuccugcagcaacauauggaacuucuggagucuuccgugauuccccucaugcacccucuggccgaccugagcacgguuuucaaggauggggacgaagcggaggauuuuguggagguccaucucccggacauccacaaacagauuucuggaguggaucugggccuucccuccugggggaaguacguccugaugagcgccggagcucucgccauccugaugcugguguucucccuuaugaaaugcuuuuggggcguuaauagaacaaagccuauucagcggucuccccgcgaaagcgagagaaaaguguccgucgcuccucagucugggaaggugaucagcuccugggaaagcuauaagucuggcggagagaccggccucuga

SEQ ID NO: 223591 - RNA, 1575 nt, Artificial Sequence
  derived and/or modified CDS sequence (opt5) from glycoprotein__RABV__KF484535.1
auggugcugcaggcccuccuguucgcucccuuucuuaucagcucccugugccucggcaaguucccuauuuacaccaucccggacaaacuggggcccuggucuccuauugauauccaccaucuuagcugucccaacaaucuggucguugaggacgaaggaugcaacucccucucuggcauuagcuauauggagcugaaggugggguacaucuccgccaucaaagugaauggauuuacauguacgggcgucgugaccgaagcggagacauauaccaacuucguuggguacgugacaaccacauuuaagagaaaacacuuccauccuaugcccgaugcuugccggucugccuauaauuggaagcuggccggagacccucgcuacgaagagagccuccacaacccguaucccgauuaccauuggcugagaaccgucaagacgaccaaagagucccuuauuaucauuagcccuucuguggcugaccuggaucccuacgacaagucccuccacagccggaucuuuccuucuggcaaauguuccggcaugacaauuagcucuaccuauugcuccacaaaucacgaauacaccaucuggaugcccgagaaggccgggcugggaacgagcugugauauuuucacaaccuccaaaggcaagcgcgcuucuaaagggggaaagacaugcggcuuuguugacgaaagagggcuuuauaagagccugaaaggagccuguaagcucaaacugugcggcguguccggccugcggcucauggaugggaccugggucgcgauccaaaccagcgacgagacaaagugguguccgccugaucagcuggugaaccuucaugaccugcacucugacgagaucgaacaucucguggucgaggaacugguuaaaaagcgcgaggaaugccuugaugcccuggaguccauuaugacgaccaagagcgugucuuucagacggcucagccaucugcgcaaacuggugcccggauuuggcaaggcuuacacaaucuucaauaaaacccucauggaggccgacgcucacuauaaguccauuagaacauggaacgaaaucauuccuucuaaagggugccugcgggucggaggcaagugucacccccacgugaaugggguguuuuucaacggaaucauccuuggccccgauggccauguucugauuccugagaugcagagcucccuccugcagcaacacauggaacuucuggagagcucugucaucccgcucaugcauccccuggccgaccuguccaccguguucaaggauggggacgaagcggaggauuuuguugaggugcaccucccugacguccacaaacagauuagcggaguggaucugggccuucccucuugggggaaguacguccugauguccgccggagcucucgccauccugaugcuggugauuagccuuaugaaaugcuucuggggcguuaaucgcacgaagccuauccagcaggggcccagagaauccgagcggaaagugucuaucgcuccgcaaagccgcaaggucauuuccucuugggaaagcuauaaguccggcggagagacagaacucuga

SEQ ID NO: 223592 - RNA, 1575 nt, Artificial Sequence
  derived and/or modified CDS sequence (opt5) from glycoprotein__RABV__KF484536.1
auggugcugcaggcccuccuguucgcucccuuucuuaucagcucccugugccucggcaaguucccuauuuacaccaucccggacaaacuggggcccuggucuccuauugauauccaccaucuuagcugucccaacaaucuggucguugaggacgaaggaugcaacucccucucuggcuuuagcuauauggagcugaaggugggguacauuuccgccaucagagugaauggauucaccuguacgggcgucgugaccgaagcggagacauauaccaacuuuguuggguacgugacaaccacauucaaacggaagcacuuucgcccuaugcccgaugcuugcagaucugccuauaauuggaaacuggccggagacccucgguacgaagagagccuccauaacccguaucccgauuaccacuggcugcgcaccgucaagacgaccaaggagucccuuaucgugauuagcccuucuguugcugaccuggaucccuacgacaaaucccuccauagcagaaucuucccuggcggcaaguguucugggauuacaguguccagcaccuauugcucuacaaaucacgaauacaccaucuggaugcccgagaaagccggacugggcacguccugugauauuuuuacaaccagcaaggggaaacgggcuuccaagggaggccgcacaugcggguucgucgacgaaagaggacuuuauaagucucugaaaggcgccuguaagcucaaacugugcggcgugagcgggcugcggcucauggauggaaccuggguggcgauccaaaccccggacgagacaaagugguguuccccugaucagcuggucaaccuucacgaccugcauagcgacgagauugaacaccucguugccgaggaacuggugcgcaaaagagaggaaugccuugaugcucuggagucuaucaugacgaccaaguccgugagcuuucggcgccucucucaucugagaaaacugguccccggcuucgggaaggccuacacaaucuuuaauaagacccucauggaggcugacgcccacuauaaaagcgugcggacauggaacgaaauuaucccuuccaagggaugccugcgcguuggcgggaaaugucacccccaugugaauggagucuucuucaacggcauuauccuuggccccgaugggcacgugcugauuccugagaugcagucuagccuccugcagcaacauauggaacuucuggaguccagccucaucccgcugaugcacccccuggcggaccucucuaccguuuuuaaggauggagacgaagccgaggauuucguggagguccaucugccugacgugcacaaacaggucuccggcguggaucuugggcugcccagcuggggaaaguacguucucaugucugcuggcgcccuggcuacgcugaugcuugugaucucccucauuaagugcuguagaggggucaaucggacaagaagcauccagcgcggcccucgggaauccgagagaaaagugucuguuacaccccagaacggaaaggugauuagcuccugggaaucuuauaaaagcggcggggagacccgccuguga

SEQ ID NO: 223593 - RNA, 1575 nt, Artificial Sequence
  derived and/or modified CDS sequence (opt5) from glycoprotein__RABV__KF484537.1
auggugcugcaggcccuccuguucgcucccuuucuuaucagcucccugugccucggcaaguucccuauuuacaccaucccggacaaacuggggcccuggucuccuauugauauccaccaucuuagcugucccaacaaucuggucguugaggacgaaggaugcaacucccucucuggcuuuagcuauauggagcugaaggugggguacauuuccgccaucagagugaauggauucaccuguacgggcgucgugaccgaagcggagacauauaccaacuuuguuggguacgugacaaccacauucaaacggaagcacuuucgcccuaugcccgaugcuugcagaucugccuauaauuggaaacuggccggagacccucgguacgaagagagccuccauaacccguaucccgauuaccacuggcugcgcaccgucaagacgaccaaggagucccuuaucgugauuagcccuucuguugcugaccuggaucccuacgacaaaucccuccauagcagaaucuucccuggcggcaaguguucugggauuacaguguccagcaccuauugcucuacaaaucacgaauacaccaucuggaugcccgagaaagccggacugggcacguccugugauauuuuuacaaccagcaaggggaaacgggcuuccaagggaggccgcacaugcggguucgucgacgaaagaggacuuuauaagucucugaaaggcgccuguaagcucaaacugugcggcgugagcgggcugcggcucauggauggaaccuggguggcgauccaaaccccggacgagacaaagugguguuccccugaucgccuggucaaccuucacgaccugcauagcgacgagauugaacaccucguugccgaggaacuggugagaaaacgggaggaaugccuugaugcucuggagucuaucaugacgaccaaguccgugagcuuucgcagacucucucaucugcggaaacugguccccggcuucgggaaggccuacacaaucuuuaauaagacccucauggaggcugacgcccacuauaaaagcgugcgcacauggaacgaaauuaucccuuccaagggaugccugagaguuggcgggaaaugucacccccaugugaauggagucuucuucaacggcauuauccuuggccccgaugggcacgugcugauuccugagaugcagucuagccuccugcagcagcauauggaacuucuggaguccagcguuaucccgcucaugcacccccuggcggaccugucuaccguguuuaaggauggagacgaagccgaggauuucgucgaggugcaucucccugacguccacaaacaaguguccggcguugaucuggggcuucccagcuggggaaaguacgugcugaugucugcuggcgcccucgcuacgcugaugcuggucaucucccuuauuaagugcuguagaggggugaaucggacacgcagcauccagcggggcccuagagaauccgagcgcaaaguuucugugacaccccagaacggaaaggucauuagcuccugggaaucuuauaaaagcggcggggagacccggcucuga

SEQ ID NO: 223594 - RNA, 1575 nt, Artificial Sequence
  derived and/or modified CDS sequence (opt5) from glycoprotein__RABV__KF484538.1
auggugcugcaggcccuccuguucgcucccuuucuuaucagcucccugugcuucggcaaguuuccuauuuacaccaucccggacaaacucgggcccuggucuccuauugauauccaccaucugagcugucccaacaaucuugucguugaggacgaaggaugcaacucccugucuggcuucagcuauauggagcucaaggugggguacauuuccgccaucaaagugaauggauuuacauguacgggcgucgugaccgaagcggagacauauaccaacuucguuggguacgugacaaccacauuuaagagaaaacacuuccggccuaugcccgaugcuugccgcucugccuauaauuggaagcuggccggagacccuagauacgaagagagccugcauaacccguaucccgaguaccacuggcuccggaccgucaagacgaccaaagaaucccugaucgugauuagcccuucuguugcugaucuugaccccuacgauaagucccugcauagccgcaucuuuccuaauggcaaauguucuggcaugacaguguccagcaccuauugcucuacaaaccacgaguacaccauuuggaugcccgaaaaggucgggcucggaacguccugugacaucuucacaaccagcaaaggcaagagagccuccaaagggggacggacaugcggcuuuguggaugagcgcgggcuguauaagucucuuaagggagcuuguaaacugaagcucugcggcgugagcggccugagacugauggacgggaccugggucgccauucaaaccuccgaugagacaaaaugguguagcccggaccagcucguuaaucugcacgaucuucauucugacgaaaucgagcaccuggugguggaggaacucguccggaagcgcgaagagugccuggacgcgcuugaguccauuaugacgaccaaaagcgugucuuucagacggcugagccaucuccgcaagcugguuccuggauuuggcaaggccuacacaaucuucaacaaaacccugauggaagcugaugcccacuauaaguccgugagaacauggaaugagaucauucccucuaaagggugccuccgggucggaggcaagugucacccucaugugaacgggguuuucuuuaauggaaucauucugggccccgacggccacgugcuuauccccgaaaugcagagcucccugcuccagcaacauauugagcugcuugaaagcucugucaucccucugaugcacccgcucgcugaucuguccaccguguucaaagacggggaugaggccgaggacuuugucgaagugcaucugcccgauguucacaagcagaucagcggaguggaccucggccugccuucuugggggaaguacguccuuauguccgcgggagcccuggcuacgcucauucuggugaucagccugaugaaaugcugucgcuggguuaacagaacaaaguccauucagcagggcccccgggagucugaaagaaaagugagcgucaccccucaaaaugggcgcgugaucuccucuugggagagcuauaagauuggcggagaaaccggccuuuga

SEQ ID NO: 223595 - RNA, 1575 nt, Artificial Sequence
  derived and/or modified CDS sequence (opt5) from glycoprotein__RABV__KF484539.1
auggugcugcaggcccuccuguucgcucccuuucuuaucagcucccugugccucggcaaguucccuauuuacaccaucccggacaaacuggggcccuggucuccuauugauauccaccaucuuagcugucccaacaaucuggucguugaggacgaaggaugcaacucccucucuggcuuuagcuauauggagcugaaggugggguacauuuccgccaucaaagugaauggauucacauguacgggcgucgugaccgaagcggagacauauaccaacuuuguuggguacgugacaaccacauucaagagaaaacacuuucggccuaugcccgaugcuugccgcucugccuauaauuggaagcuggccggagacccuagauacgaagagagccuccauaacccguaucccgauuaccacuggcugcggaccgucaagacgaccaaagagucccuuaucgugauuagcccuucuguugcugaccuggaucccuacgacaagucccuccauagccgcaucuucccuggcggcaaauguucugggaugacaguguccagcaccuauugcucuacaaaucacgaauacaccauuuggaugcccgagaaggccggacugggcacguccugugauaucuuuacaaccagcaaagggaagagagcuacaaagggaggcaaaaccugcggguucgucgacgaacggggacuuuauaagucccugaaaggcgccuguaagcucaaacugugcggcgugucugggcugcgccucauggauggaaccuggguggcgauucaaacaagcgacgagacgaagugguguuccccggaucagcuggucaaccuucacgaccugcauagcgacgagaucgaacaccucguuguggaggaacuggugagaaaacgggaggaaugccuugaugcccuggagucuauuaugaccacaaaguccgucagcuuucgcagacucucucaucugcggaagcuggugccuggcuucgggaaggcuuacaccaucuuuaauaaaacacucauggaggccgacgcucacuauaaaagcguucgcaccuggaacgaaaucauucccuccaagggaugccugagagugggcgggaaaugucacccucaugucaauggaguguucuucaacggcaucauucuuggccccgaugggcacguucugauccccgagaugcagucuagccuccugcagcaacauauggaacuucuggaguccagcgugauuccucucaugcacccgcuggccgaccccucuacggucuuuaaggaugacgaugaagcggaggacuucguggagguccaucugccugaugugcacaagcagguuuccggaguggaccucggccugcccagcugggggcgguacguccuuaugucugccggagcucuggccauccucaugcuggugaucucccugaugaaaugcuguacaggcguuaaucgcaccaagagcauuaaacagggguccagagaaucugagcggaaggugagcaucaccccucagaacggcaaagucauuuccucuugggaaagcuauaaguccggaggcgagacagggcuuuga

SEQ ID NO: 223596 - RNA, 1575 nt, Artificial Sequence
  derived and/or modified CDS sequence (opt5) from glycoprotein__RABV__KF484540.1
auggugcugcaggcccuccuguucgcucccuuucuuaucagcucccugugccucggcaaguucccuauuuacaccaucccggacaaacuggggcccuggucuccuauugauauccaccaucuuagcugucccaacaaucuggucguugaggacgaaggaugcaacucccucucuggcuuuagcuauauggagcugaaggugggguacauuuccgccaucagagugaauggauucacauguacgggcgucgugaccgaagcggagacauauaccaacuuuguuggguacgugacaaccacauucaaacggaagcacuuucgcccuaugcccgaugcuugcagaucugccuauaauuggaaacuggccggagacccucgguacgaagagagccuccauaacccguaucccgauuaccacuggcugcgcaccgucaagacgaccaaggagucccuuaucgugauuagcccuucuguugcugaccuggaucccuacgacaaaucccuccauagcagaaucuucccuggcggcaaguguucugggauuacaguguccagcaccuauugcucuacaaaucacgaauacaccaucuggaugcccgagaaagccggacugggcacguccugugauauuuuuacaaccagcaaggggaaacgggcuuccaagggaggccgcacaugcggguucgucgacgaaagaggacuuuauaagucucugaaaggcgccuguaagcucaaacugugcggcgugagcgggcugcggcucauggauggaaccuggguggcgauccaaaccccggacgagauuaagugguguuccccugaucagcuggucaaccuucacgaccugcauagcgacgagaucgaacaccucguugccgaggaacuggugcgcaaaagagaggaaugccuugaugcucuggagucuaucaugacaacgaaguccgugagcuuucggcgccucucucaucugagaaaacugguccccggcuucgggaaggccuacaccauuuuuaauaagacacucauggaggcugacgcccacuauaaaagcgugcggaccuggaacgaaaucauuccuuccaagggaugccugcgcguuggcgggaaaugucacccccaugugaauggagucuucuucaacggcaucauucuuggccccgaugggcacgugcugaucccugagaugcagucuagccuccugcagcaacauauggaacuucuggaguccagcguuaucccgcucaugcacccccuggcggaccugucuacaguguuuaaggauggagacgaagccgaggauuucauugagguccaucucccugacgugcacaaacaggucuccggcguggaucuggggcuucccagcuggggaaaguacguucugaugucugcuggcgcccucgcuacccugaugcuggugaucucccuuauuaagugcuguaaaggggucaauagaacaaagagcauccaguggggcccucgggaauccgagagaaaagugucuguuacgccccagaacggaaaggugauuagcuccugggaaucuuauaaaagcggcggggagacccgccucuga

SEQ ID NO: 223597 - RNA, 1575 nt, Artificial Sequence
  derived and/or modified CDS sequence (opt5) from glycoprotein__RABV__KF484541.1
augauccugaaggcccuccuguucgcucccuuucuuauuagcucccugugccucggcaaauucccuaucuacaccauuccggacaagcuggggcccuggucuccuaucgauauucaccaucuuagcugucccaacaaucugguggucgaggacgaaggaugcaacucccucucuggcuuuagcuauauggagcugaaaguuggguacaucuccgccaucaaggugaauggauucacauguacgggcguggucaccgaagcggagacauauaccaacuuugugggguacguuacaaccacauucaaaagaaagcacuuucggccuaugcccgaugcuugccgcucugccuauaauuggaagcuggccggagacccuagauacgaagagagccuccauaacccguaucccgauuaccacuggcugcggaccgugaaaacgaccaaggagucccuuauuaucauuagcccuucugucgcugaccuggaucccuacgacaaaucccuccauagccgcaucuucccuggcggcaaguguucugggaugacaguguccagcaccuauugccccacaaaucacgaauacaccauuuggaugccggagaaagccucucugggaacguccugugauaucuuuacaaccagcaagggcaagagagcuucccgcgggggacggacaugcggcuucguugacgaaagagggcuuuauaaaucucugaagggagccuguaaacucaagcugugcggcgugagcggccugcggcucauggaugggaccugggucgcgauucagaccuccgacgagacaaaaugguguagcccugaucaacuggugaaccuucacgaccugcauucugacgagaucgaacaccucguggucgaggaacugguucgcaagagagaggaaugccuugaugcccuggaguccaucaugacgaccaaaagcgugucuuuucggcgccucagccaucugagaaagcuggugcccggauucggcaaggcuuacacaauuuuuaauaaaacccucauggaggccgacgcucacuauaaguccguccggacauggaacgaaaucauuccuucuaaagggugccugcgcgugggaggcaagugucacccccauguuaaugggguguucuucaacggaaucauucuuggccccgauggccacguccugaucccugagaugcagagcucccuccugcagcagcauauggaacuucuggagagcucugugaucccgcucaugcacccccuggccgacccuuccaccguuuuuaaagaugacgaugaagcggaggacuucguggagguccaucugcccgaugugcacaagcaagucagcgggguggaccucggacugccuucuuggggcaaguacguucuuauguccgccgggacgcuggcuacacucaugcuggugauuagccugaugaaaugcuguagaggauuuaaucggaccaaguccaucagacaggauucuggcgaaagcgggcgcaaagucuccgugacaccccagaacggcaagguuauuucuagcugggaguccuauaaaagcggaggcgaaaccgggcuuuga

SEQ ID NO: 223598 - RNA, 1575 nt, Artificial Sequence
  derived and/or modified CDS sequence (opt5) from glycoprotein__RABV__KF484542.1
auggugcugcagguccuccuguucgcccuuuuucugaucagcucccucugccugggcaaguuccccauuuacaccaucccugacaaacuugggccguggucucccauugauauccaccaucugagcuguccuaacaaucucguuguggaggacgaaggaugcaacucccugucuggcuuuagcuauauggagcugaaggugggguacauuuccgcuaucaaagucaauggauucacauguacgggcgugguuaccgaagccgagacauauaccaacuuugugggguacgucacaaccacauucaagagaaaacacuuucggcccaugccugaugcgugccgcucugcuuauaauuggaagcucgccggagaccccagauacgaagagagccugcauaacccuuauccggaguaccacuggcuucggaccgugaagacgaccaaagaaucccugaucguuauuagccccucuguggccgaucucgacccuuacgauaagucccugcauagccgcaucuuccccucuggcaaauguuccggcaugacagucagcucuaccuauugcuccacaaaucacgaguacaccauuuggaugccugaaaaggugagccuugggacguccugugacaucuuuacaaccucuaaaggaaagagagcuagcaagggcgggcggacaugcggauucguggaugagcgcggccuguauaaaucccucaagggggccuguaaacugaagcugugcggagucagcggccucagacugauggacggcaccuggguugcuauucaaaccucugaugaggccaaaugguguucccccgaccagcuugugaaccugcacgaucuccauagcgacgaaaucgagcaccugguggucgaggaacuugugcggaagcgcgaagagugccuggacgcgcucgagucuauuaugacaacgaaaagcguuuccuuuagacggcugucucaucugcgcaagcucgugccgggguucggaaaggccuacaccaucuuuaauaaaacacugauggaagcugaugcccacuauaagagcgucagaaccuggaacgagaucauuccuuccaaaggcugccuucggguugggggaaagugucacccccaugugaauggcguguucuucaacgggaucauucugggaccugacggccacguccucauccccgaaaugcagagcucucugcuucagcaacauauugagcugcucgaauccagcgugaucccccugaugcacccucuggcugaucucucuacagucuuuaaagacggcgaugaggccgaggacuucguggaaguucaucugccggaugugcacaagcagaucuccggggucgaccuuggacugcccagcuggggcaaguacgugcucauguccgcgggggcccuggcuacccugguucuugugauuucucucaugaaaugcugucgcugggucaauagaacaaagagcauccagcagggaccucgggaguccgaaagacgcgugucugugacgccccaaaacggcaaaguuauuagcuccugggagagcuauaagaucgggggcgaaaccggacuguga

SEQ ID NO: 223599 - RNA, 1575 nt, Artificial Sequence
  derived and/or modified CDS sequence (opt5) from glycoprotein__RABV__KF484543.1
auggugcugcaggcccuccuguucgcucccuuucuuaucagcucccugugccucggcaaguucccuauuuacaccaucccggacaaacuggggcccuggucuccuauugauauccaccaucuuagcugucccaacaaucuggucguugaggacgaaggaugcaacucccucucuggcuuuagcuauauggagcugaaggugggguacauuuccgccaucaaagugaauggauucacauguacgggcgucgugaccgaagcggagacauauaccaacuuuguuggguacgugacaaccacauucaagagaaaacacuuucggccuaugcccgaugcuugccgcucugccuauaauuggaagcuggccggagacccuagauacgaagagagccuccauaacccguaucccgaguaccacuggcugcggaccgucaagacgaccaaagaaucccuuaucgugauuagcccuucuguugcugaucuggaccccuacgauaagucccuccauagccgcaucuucccuucuggcaaauguuccggcaugacagugagcucuaccuauugcuccacaaaucacgaguacaccauuuggaugcccgaaaaggucgggcugggaacgagcugugacaucuuuacaaccuccaaaggcaagagagccucuaaagggggacggacaugcggcuucguggaugagcgcgggcuuuauaagagccugaagggagcuuguaaacucaagcugugcggcguguccggccugagacucauggacgggaccugggucgccaugcaaaccagcgaugagacaaaaugguguucuccggaccagcugguuaaccuucacgaucugcauuccgacgaaauugagcaccucgugguggaggaacugguccggaagcgcgaagagugccuugacgcgcuggagagcaucaugacgaccaaaucugugagcuuuagacggcucucccaucugcgcaagcugguuccuggauucggcaaggccuacacaauuuuuaauaaaacccucauggaagcugaugcccacuauaagucugugagaacauggagcgagaucauccccuccaaagggugccugcgggucggaggcaagugucacccucaugugaacgggguuuucuucaauggaauuauccuuggccccgacggccacgugcugauucccgaaaugcagagcucucuccugcagcaacauauggagcuucuggaauccagcgucaucccucucaugcacccgcuggcugaucugucuaccguguuuaaagacggggaugaggccgaggacuucgucgaagugcaucuccccgauguucacaagcagauuuccggaguggaccugggccuuccuagcugggggaaguacguccugauguccgcgggagcccucgcuacgcugauccuggugaucucucuuaugaaaugcugucgcuggguuaacaagacaaaaagcauucagcagggccccagagaguccgaacggaaggugucugucaccccucaaaaugggaaagugaucagcuccugggagagcuauaagauuggcggagaaaccggccucuga

SEQ ID NO: 223600 - RNA, 1575 nt, Artificial Sequence
  derived and/or modified CDS sequence (opt5) from glycoprotein__RABV__KF484544.1
auggugcugcaggcccuccuguucgcucccuuucuuaucagcucccugugccucggcaaguucccuauuuacaccaucccggacaaacuggggcccuggucuccuauugauauccaccaucuuagcugucccaacaaucuggucguugaggacgaaggaugcaacucccucucuggcuuuagcuauauggagcugaaggugggguacauuuccgccaucaaagugaauggauucacauguacgggcgucgugaccgaagcggagacauauaccaacuuuguuggguacgugacaaccacauucaagagaaaacacuuucggccuaugcccgaugcuugccgcucugccuauaauuggaagcuggccggagacccuagauacgaagagagccuccauaacccguaucccgaguaccacuggcugcggaccgucaagacgaccaaagaaucccuuaucgugauuagcccuucuguugcugaucuggaccccuacgauaagucccuccauagccgcaucuucccuucuggcaaauguuccggcaugacagugagcucuaccuauugcuccacaaaucacgaguacaccauuuggaugcccgaaaaggucgggcugggaacgagcugugacaucuuuacaaccuccaaaggcaagaaggccucuaaagggggaagaacaugcggcuucguggaugagcgggggcuuuauaagagccugaaaggagcuuguaagcucaaacugugcggcguguccggccugcgccucauggacgggaccugggucgccaugcaaaccagcgaugagacaaagugguguucuccggaccagcugguuaaccuucacgaucugcauuccgacgaaauugagcaccucgugguggaggaacuggucagaaaacgggaagagugccuugacgcgcuggagagcaucaugacgaccaagucugugagcuuucgcagacucucccaucugcggaagcugguuccuggauucggcaaagccuacacaauuuuuaauaagacccucauggaagcugaugcccacuauaaaucugugcgcacauggaacgagaucauccccagcaaggggugccugagagucggaggcaaaugucacccucaugugaaugggguuuucuucaacggaauuauccuuggccccgacggccacgugcugauucccgaaaugcaguccuuucuccugcagcaacauauggagcuucuggaaagcucugucaucccucucaugcacccgcuggcugaucuguccaccguguucaaggacggggaugaggccgaggacuuugucgaagugcaucuccccgauguucacaagcagauuagcggaguggaccugggccuuccuucuugggggaaauacguccugauguccgcgggagcccucgcuacgcugauccuggugaucagccuuaugaagugcugucgguggguuaaucgcacaaaauccauucagcagggccccagagagucugaacggaaggugagcgucaccccucaaaacgggaaagugaucuccucuugggagagcuauaagauuggcggagaaaccggccucuga

SEQ ID NO: 223601 - RNA, 1575 nt, Artificial Sequence
  derived and/or modified CDS sequence (opt5) from glycoprotein__RABV__KF484545.1
auggugcugcaggcccuccuguucgcucccuuucuuaucagcucccugugccucggcaaguucccuauuuacaccaucccggacaaacuggggcccuggucuccuauugauauccaccaucuuagcugucccaacaaucuggucguugaggacgaaggaugcaacucccucucuggcuuuagcuauauggagcugaaggugggguacauuuccgccaucaaagugaauggauucacauguacgggcgucgugaccgaagcggagacauauaccaacuuuguuggguacgugacaaccacauucaagagaaaacacuuucggccuaugcccgaugcuugccgcucugccuauaauuggaagcuggccggagacccuagauacgaagagagccuccauaacccguaucccgaguaccacuggcugcggaccgucaagacgaccaaagaaucccuuaucgugauuagcccuucuguugcugaucuggaccccuacgauaagucccuccauagccgcaucuucccuucuggcaaauguuccggcaugacagugagcucuaccuauugcuccacaaaucacgaguacaccauuuggaugcccgaaaaggucgggcugggaacgagcugugacaucuuuacaaccuccaaaggcaagaaggccucuaaagggggaagaacaugcggcuucguggaugagcgggggcuuuauaagagccugaaaggagcuuguaagcucaaacugugcggcguguccggccugcgccucauggacgggaccugggucgccaugcaaaccagcgaugagacaaagugguguucuccggaccagcugguuaaccuucacgaucugcauuccgacgaaauugagcaccucgugguggaggaacuggucagaaaacgggaagagugccuugacgcgcuggagagcaucaugacgaccaagucugugagcuuucgcagacucucccaucugcggaagcugguuccuggauucggcaaagccuacacaauuuuuaauaagacccucauggaagcugaugcccacuauaaaucugugcgcacauggaacgagaucauccccagcaaggggugccugagagucggaggcaaaugucacccucaugugaaugggguuuucuucaacggaauuauccuuggccccgacggccacgugcugauucccgaaaugcaguccagccuccugcagcaacauauggagcuucuggaaucuuccgucaucccucucaugcacccgcuggcugaucugagcaccguguuuaaggacggggaugaggccgaggacuucgucgaagugcaucuccccgauguucacaagcagauuucuggaguggaccugggccuuccuuccugggggaaauacguccugaugagcgcgggagcccucgcuacgcugauccuggugaucucccuuaugaagugcugucgguggguuaaucgcacaaaaucuauucagcagggccccagagagagcgaacggaagguguccgucaccccucaaaacgggaaagugaucucuagcugggaguccuauaagauuggcggagaaaccggccucuga

SEQ ID NO: 223602 - RNA, 1575 nt, Artificial Sequence
  derived and/or modified CDS sequence (opt5) from glycoprotein__RABV__KF484546.1
auggugcugcaggcccuccuguucgcucccuuucuuaucagcucccugugccucggcaaguucccuauuuacaccaucccggacaaacuggggcccuggucuccuauugauauccaccaucuuagcugucccaacaaucuggucguugaggacgaaggaugcaacucccucucuggcuuuagcuauauggagcugaaggugggguacauuuccgccaucaaagugaauggauucacauguacgggcgucgugaccgaagcggagacauauaccaacuuuguuggguacgugacaaccacauucaagagaaaacacuuucggccuaugcccgaugcuugccgcucugccuauaauuggaagcuggccggagacccuagauacgaagagagccuccauaacccguaucccgaguaccacuggcugcggaccgucaagacgaccaaagaaucccuuaucgugauuagcccuucuguugcugaucuggaccccuacgauaagucccuccauagccgcaucuucccuucuggcaaauguuccggcaugacagugagcucuaccuauugcuccacaaaucacgaguacaccauuuggaugcccgaaaaggucgggcugggaacgagcugugacaucuuuacaaccuccaaaggcaagagagccucuaaagggggacggacaugcggcuucguggaugagcgcgggcuuuauaagagccugaagggagcuuguaaacucaagcugugcggcguguccggccugagacucauggacgggaccugggucgccaugcaaaccagcgaugagacaaaaugguguucuccggaccagcugguuaaccuucacgaucugcauuccgacgaaauugagcaccucgugguggaggaacugguccggaagcgcgaagagugccuugacgcgcuggagagcaucaugacgaccaaaucugugagcuuuagacggcucucccaucugcgcaagcugguuccuggauucggcaaggccuacacaauuuuuaauaaaacccucauggaagcugaugcccacuauaagucugugagaacauggaacgagaucauccccagcaaagggugccugcgggucggaggcaagugucacccucaugugaaugggguuuucuucaacggaauuauccuuggccccgacggccacgugcugauucccgaaaugcaguccagccuccugcagcaacauauggagcuucuggaaucuuccgucaucccucucaugcacccgcuggcugaucugagcaccguguuuaaagacggggaugaggccgaggacuucgucgaagugcaucuccccgauguucacaagcagauuucuggaguggaccugggccuuccuuccugggggaaguacguccugaugagcgcgggagcccucgcuacgcugauccuggugaucucccuuaugaaaugcugucgcuggguuaauagaacaaagucuauucagcagggcccccgggagagcgaaagaaaaguguccgucaccccucaaaacgggaaggugaucucuagcugggaguccuauaaaauuggcggagaaaccggccucuga

SEQ ID NO: 223603 - RNA, 1575 nt, Artificial Sequence
  derived and/or modified CDS sequence (opt5) from glycoprotein__RABV__KF484547.1
auggugcugcaggcccuccuguucgcucccuuucuuaucagcucccugugccucggcaaguucccuauuuacaccaucccggacaaacuggggcccuggucuccuauugauauccaccaucuuagcugucccaacaaucuggucguugaggacgaaggaugcaacucccucucuggcuuuagcuauauggagcugaaggugggguacauuuccgccaucaaagugaauggauucacauguacgggcgucgugaccgaagcggagacauauaccaacuuuguuggguacgugacaaccacauucaagagaaaacacuuucggccuaugcccgaugcuugccgcucugccuauaauuggaagcuggccggagacccuagauacgaagagagccuccauaacccguaucccgauuaccacuggcugcggaccgucaagacgaccaaagagucccuuaucgugauuagcccuucuguugcugaccuggaucccuacgacaagucccuccauagccgcaucuucccuucuggcaaauguuccggcaugacagugagcucuaccuauugcuccacaaaucacgaauacaccauuuggaugcccgagaaggccgggcugggaacgagcugugauaucuuuacaaccuccaaaggcaagagagcuucuaaagggggacggacaugcggcuucgucgacgaacgcgggcuuuauaagagccugaagggagccuguaaacucaagcugugcggcguguccggccugagacucauggaugggaccuggguggcgauucaaaccagcgacgagacaaaaugguguucuuccgaucagcuggucaaccuucacgaccugcauagcgacgagaucgaacaccucguuguggaggaacuggugcggaagcgcgaggaaugccuugaugcccuggagucuauuaugacgaccaaaagcgucuccuuuagacggcucucucaucugcgcaagcuggugccgggauucggcaaggcuuacacaaucuuuaauaaaacccucauggaggccgacgcucacuauaagagcguuagaacauggaacgaagugaucccuuccaaagggugccugcgggucggaggcaagugucacccccaugugaaugggguuuucuucaacggaauuauccuuggcccugauggccacgugcugauucccgagaugcagagcucucuccugcagcaacauauggaacuucuggaguccagcgucaucccccucaugcacccucuggccgacauuucuaccguguuuaaagauggggacgaagcggaggauuucgucgaggugcaucugccggacguucacaagcagaucuccggaguggaucucggccugcccagcugggggaaguacguccuuauguccgccggagcucuggccauccucaugcugaugauuucucugaugaaaugcugucgcggcgugaauagaacaaagagcauccagcaggggccucgggaauccgagagaaaaguuucugugacgccccaaaacggcaaggucauuagcuccugggaaagcuauaaaucuggaggcgagaccgggcuuuga

SEQ ID NO: 223604 - RNA, 1575 nt, Artificial Sequence
  derived and/or modified CDS sequence (opt5) from glycoprotein__RABV__KF484548.1
auggugcugcagguccuccuguucgcccuuuuucugaucagcucccucugccugggcaaguuccccauuuacaccaucccugacaaacuugggccguggucucccauugauauccaccaucugagcuguccuaacaaucucguuguggaggacgaaggaugcaacucccugucuggcuuuagcuauauggagcugaaggugggguacauuuccgcuaucaaagucaauggauucacauguacgggcgugguuaccgaagccgagacauauaccaacuuugugggguacgucacaaccacauucaagagaaaacacuuucggcccaugccugaugcgugccgcucugcuuauaauuggaagcucgccggagaccccagauacgaagagagccugcauaacccuuauccggaguaccacuggcuucggaccgugaagacgaccaaagaaucccugaucguuauuagccccucuguggccgaucucgacccuuacgauaagucccugcauagccgcaucuuccccucuggcaaauguuccggcaugacagucagcucuaccuauugcuccacaaaucacgaguacaccauuuggaugccugaaaaggugagccuugggacguccugugacaucuuuacaaccucuaaaggaaagagagcuagcaagggcgggcggacaugcggauucguggaugagcgcggccuguauaaaucccucaagggggccuguaaacugaagcugugcggagucagcggccucagacugauggacggcaccuggguugcuauucaaaccucugaugaggccaaaugguguucccccgaccagcuugugaaccugcacgaucuccauagcgacgaaaucgagcaccugguggucgaggaacuugugcggaagcgcgaagagugccuggacgcgcucgagucuauuaugacaacgaaaagcaucuccuuuagacggcugucucaucugcgcaagcucguuccgggguucggaaaggccuacaccaucuuuaauaaaacacugauggaagcugaugcccacuauaagagcgugagaaccuggaacgagauuaucccuuccaaaggcugccuucgggucgggggaaagugucacccccaugugaauggcguuuucuucaacgggauuauccugggaccugacggccacgugcucauucccgaaaugcagagcucucugcuucagcaacauaucgagcugcucgaauccagcgucaucccccugaugcacccucuggcugaucucucuacaguguuuaaagacggcgaugaggccgaggacuucgucgaagugcaucugccggauguucacaagcagauuuccgggguggaccuuggacugcccagcuggggcaaguacguccucauguccgcgggggcccuggcuacccuggugcuuguuaucucucucaugaaauggugccgcugggugaauaagacgaaaagcauucagcagggaccuagagaguccgaacggaaggucucugugacaccccaaaacggcaaagugaucagcuccugggagagcuauaagauugggggcgaaaccggacuguga

SEQ ID NO: 223605 - RNA, 1575 nt, Artificial Sequence
  derived and/or modified CDS sequence (opt5) from glycoprotein__RABV__KF484549.1
auggugcugcaggcccuccuguucgcucccuuucuuaucagcucccugugccucggcaaguucccuauuuacaccaucccggacaaacuggggcccuggucuccuauugauauccaccaucuuagcugucccaacaaucuggucguugaggacgaaggaugcaacucccucucuggcuuuagcuauauggagcugaaggugggguacauuuccgccaucaaagugaauggauucacauguacgggcgucgugaccgaagcggagacauauaccaacuuuguuggguacgugacaaccacauucaagagaaaacacuuucggccuaugcccgaugcuugccgcucugccuauaauuggaagcuggccggagacccuagauacgaagagagccuccauaacccguaucccgauuaccacuggcugcggaccgucaagacgaccaaagagucccuuaucgugauuagcccuucuguugcugaccuggaucccuacgacaagucccuccauagccgcaucuucccuggcggcaaauguucugggaugacaguguccagcaccuauugccccacaaaucacgaauacaccauuuggaugccggagaaggccggacugggcacgucuugugauaucuuuacaaccuccaaagggaagagagcuagcaagggaggccggacaugcggguucgucgacgaacgcggacuuuauaaaucccugaagggcgccuguaaacucaagcugugcggcgugucugggcugagacucauggauggaaccuggguggcgauucaaaccagcgacgagacaaaaugguguuccccugaucagcuggucaaccuucacgaccugcauagcgacgagaucgaacaccucguuguggaggaacuggugcggaagcgcgaggaaugccuugaugcccuggagucuauuaugacgaccaaauccgucagcuuuagacggcucucucaucugcgcaagcuggugcccggcuucgggaaggcuuacacaaucuuuaauaaaacccucauggaggccgacgcucacuauaagagcguuagaacauggaacgaaaucauuccuuccaaaggaugccugcgggugggcgggaagugucacccccaugucaauggaguguucuucaacggcaucauucuuggccccgaugggcacguucugaucccugagaugcagucuagccuccugcagcaacauguggaacuucuggaguccagcgucauuccgcucaugcacccccuggccgacccuucuaccguguuuaaagaugacgaugaagcggaggacuucgucgaggugcaucugcccgauguucaccgccagguguccggagucgaccucggccugccuagcugggggaaguacgugcuuaugucugccggagcucuggccacgcucaugcugguuaucucccugaugaagugcuguagaggcuuuaaucggacaaaaagcaccagacaggggucccgcgaaucugagcggaaggugagcgucacaccccagaacggcaaagugaucuccucuugggaaagcuauaaguccggaggcgagaccgggcuuuga

SEQ ID NO: 223606 - RNA, 1575 nt, Artificial Sequence
  derived and/or modified CDS sequence (opt5) from glycoprotein__RABV__KF484550.1
auggugcugcaggcccuccuguucgcucccuuucuuaucagcucccugugcuucggcaaguuuccuauuuacaccaucccggacaaacucgggcccuggucuccuauugauauccaccaucugagcugucccaacaaucuugucguugaggacgaaggaugcaacucccugucuggcuucagcuauauggagcucaaggugggguacauuuccgccaucaaagugaauggauuuacauguacgggcgucgugaccgaagcggagacauauaccaacuucguuggguacgugacaaccacauuuaagagaaaacacuuccggccuaugcccgaugcuugccgcucugccuauaauuggaaggucgccggagacccuagauacgaagagagccugcauaacccguaucccgauuaccacuggcugcggaccgugaagacgaccaaagagucccucaucauuaucagcccuucuguugcugaccuggaucccuacgacaagucccuucauagccgcauuuuuccuggcggcaaauguucugggaugacaaucuccagcaccuauugcucuacaaaucacgauuacaccauuuggaugcccgaaaagacgggacugggcacauccugugacaucuucaccacaagcaaagggaagagagccuccaagggaggccggaccugcggguuuguggaugagcgcggacucuauaaaucucugaagggcgcuuguaaacuuaagcugugcggcgucagcgggcucagacugauggacggaaccugggccgcgauucaaacauccgaugaaacgaaaugguguagcccggaccagcuggugaaccuccacgaccugcauucugaugagaucgagcaccuuguggucgaggaacugguucggcgcagagaagagugccucgacgcccuggaauccaucaugaccacaaagagcgugucuuuccggcgccuuagccaucugagaaaacucgugccuggcuuugggaaggcuuacaccauuuucaauaagacacugauggaggccgaugcucacuauaaauccguccggaccuggaacgagaucauucccucuaagggaugccugcgcgugggcgggaaaugucacccucauguuaauggaguguucuuuaacggcaucauucucggccccgacgggcacguccugauccccgaaaugcagagcucccuucugcagcaacauauggagcuccuggaaagcucugugaucccucuuaugcacccgcuggccgaucucuccacgguuuucaaggacggagaugaggcggaagacuuuguggagguccaucugcccgaugugcacaaacaggucagcggcguggaccuggggcucccuucuuggggaaaguacaugcugauguccgccggcgcucuugccacacugaugcucguugugccccugaugaagugcuguagacgggucaauagaaccaaaagcauucagcaggggccucgcgaguccgaucggaaggugucuguuacaccccaaagcggcaaagugaucuccucuugggaaagcuauaaguccggaggcgggaccggacuguga

SEQ ID NO: 223607 - RNA, 1575 nt, Artificial Sequence
  derived and/or modified CDS sequence (opt5) from glycoprotein__RABV__KF484551.1
auggugcugcaggcccuccuguucgcucccuuucuuaucagcucccugugccucggcaaguucccuauuuacaccaucccggacaaacuggggcccuggucuccuauugauauccaccaucuuagcugucccaacaaucuggucguugaggacgaaggaugcaacucccucucuggcuuuagcuauauggagcugaaggugggguacauuuccgccaucaaagugaauggauucacauguacgggcgucgugaccgaagcggagacauauaccaacuuuguuggguacgugacaaccacauucaagagaaaacacuuucggccuaugcccgaugcuugccgcucugccuauaauuggaagcuggccggagacccuagauacgaagagagccuccauaacccguaucccgaguaccacuggcugcggaccgucaagacgaccaaagaaucccuuaucgugauuagcccuucuguugcugaucuggaccccuacgauaagucccuccauagccgcaucuucccuucuggcaaauguuccggcaugacagugagcucuaccuauugcuccacaaaucacgaguacaccauuuggaugcccgaaaaggucgggcugggaacgagcugugacaucuuuacaaccuccaaaggcaagagagccucuaaagggggacggacaugcggcuucguggaugagcgcgggcuuuauaagagccugaagggagcuuguaaacucaagcugugcggcguguccggccugagacucauggacgggaccugggucgccaugcaaaccagcgaugagacaaaaugguguucuccggaccagcugguuaaccuucacgaucugcauuccgacgaaauugagcaccucgugguggaggaacugguccggaagcgcgaagagugccuugacgcgcuggagagcaucaugacgaccaaaucugugagcuuuagacggcucucccaucugcgcaagcugguuccuggauucggcaaggccuacacaauuuuuaauaaaacccucauggaagcugaugcccacuauaagucugugagaacauggaacgagaucauccccagcaaagggugccugcgggucggaggccgcugucacccucaugugaaugggguuuucuucaacggaauuauccuuggccccgacggccacgugcugauucccgaaaugcaguccagccuccugcagcaacauauggagcuucuggaaucuuccgucaucccucucaugcacccgcuggcugaucugagcaccguguuuaaggacggggaugaggccgaggacuucgucgaagugcaucuccccgauguucacaaacagauuucuggaguggaccugggccuuccuuccugggggaaguacguccugaugagcgcgggagcccucgcuacgcugauccuggugaucucccuuaugaagugcuguagauggguuaaucggacaaaaucuauucagcagggccccagagagagcgaacgcaagguguccgucaccccucaaaacgggaaagugaucucuagcugggaguccuauaagauuggcggagaaaccggccucuga

SEQ ID NO: 223608 - RNA, 1575 nt, Artificial Sequence
  derived and/or modified CDS sequence (opt5) from glycoprotein__RABV__KF484552.1
auggugcugcaggcccuccuguucgcucccuuucuuaucagcucccugugccucggcaaguucccuauuuacaccaucccggacaaacuggggcccuggucuccuauugauauccaccaucuuagcugucccaacaaucuggucguugaggacgaaggaugcaacaaucucuccggcuuuucuuauauggagcugaaggugggguacauuagcgccaucaaagugaacggauucacauguacgggcgucgugaccgaagcggagacauauaccaauuuuguuggguacgugacaaccacauucaagagaaaacacuuucggccuaugcccgaugcuugccgcuccgccuauaacuggaagcuggccggagacccuagauacgaagagucucuccauaauccguaucccgaguaccacuggcugcggaccgucaagacgaccaaagaaagccuuaucgugauuuccccuagcguugcugaucuggaccccuacgauaagucucuccauucccgcaucuucccuagcggcaaauguucuggcaugacaguguccagcaccuauugcucuacaaaccacgaguacaccauuuggaugcccgaaaaggccgggcugggaacguccugugacaucuuuacaaccagcaaaggcaagagagcuuccaaagggggacggacaugcggcuucgucgaugagcgcgggcuuuauaagucucugaagggagccuguaaacucaagcugugcggcgugagcggccugagacucauggacgggaccuggguggcgauucaaaccuccgaugagacaaaaugguguagcccggaccagcuggucaaucuucacgaucugcauucugacgaaaucgagcaccucguuguggaggaacuggugcggaagcgcgaagagugccuugacgcccuggaguccauuaugacgaccaaaagcgucucuuuuagacggcucagccaucugcgcaagcuggugccuggauucggcaaggcuuacacaaucuuuaacaaaacccucauggaagccgaugcucacuauaaguccguuagaacauggaaugagaucauucccucuaaagggugccugcgggugggaggcaagugucacccucaugucaacgggguguucuucaauggaaucauucuuggccccgacggccacguucugauccccgaaaugcagagcucccuccugcagcaacauauggagcuucuggaaagcucugugauuccucucaugcacccgcuggccgaucuguccaccgucuuuaaagacggggaugaggcggaggacuucguggaaguccaucuccccgaugugcacaagcagaucagcggaguugaccugggccuuccuucuugggggaaguacgugaugauguccgccggagcuuuugccacgcugauccucgucauuagccugaugaaaugcugucgcugggugaacagaacaaaguccauccagcagggcccccgggagucugaaagaaaaguuagcgugaccccucaaaaugggaaggucauuuccucuugggagagcuauaaaaucggcggagaaaccggccuguga

SEQ ID NO: 223609 - RNA, 1575 nt, Artificial Sequence
  derived and/or modified CDS sequence (opt5) from glycoprotein__RABV__KF484553.1
auggugcugcaggcccuccuguucgcucccuuucuuaucagcucccugugccucggcaaguucccuauuuacaccaucccggacaaacuggggcccuggucuccuauugauauccaccaucuuagcugucccaacaaucuggucguugaggacgaaggaugcaacucccucucuggcuuuagcuauauggagcugaaggugggguacauuuccgccaucaaagugaauggauucacauguacgggcgucgugaccgaagcggagacauauaccaacuuuguuggguacgugacaaccacauucaagagaaaacacuuucggccuaugcccgaugcuugccgcucugccuauaauuggaagcuggccggagacccuagauacgaagagagccuccauaacccguaucccgaguaccacuggcugcggaccgucaagacgaccaaagaaucccuuaucgugauuagcccuucuguugcugaucuggaccccuacgauaagucccuccauagccgcaucuucccuucuggcaaauguuccggcaugacagugagcucuaccuauugcuccacaaaucacgaguacaccauuuggaugcccgaaaaggucagccuggggacguccugugacaucuuuacaaccucuaaaggaaagagagccagcaagggcgggcggacaugcggauucguggaugagcgcggccuuuauaaaucccugaagggggcuuguaaacucaagcugugcggagugagcggccugagacucauggacggcaccugggucgccauucaaaccucugaugagacaaaaugguguuccccggaccagcugguuaaccuucacgaucugcauagcgacgaaaucgagcaccucgugguggaggaacugguccggaagcgcgaagagugccuugacgcgcuggagucuauuaugacgaccaaaagcguguccuuuagacggcucucucaucugcgcaagcugguuccuggguucggaaaggccuacacaaucuuuaauaaaacccucauggaagcugaugcccacuauaagagcgugagaacauggaacgagaucauucccuccaaaggcugccugcgggucgggggaaagugucacccucaugugaauggcguuuucuucaacgggaucauucuuggacccgacggccacgugcugauccccgaaaugcagagcucucuccugcagcaacauauugagcuucuggaauccagcgucaucccucucaugcacccgcuggcugaucugucuaccguguuuaaagacggcgaugaggccgaggacuucgucgaagugcaucuccccgauguucacaagcagaucuccgggguggaccugggacuuccuagcuggggcaaguacguccugauguccgcgggggcccucgcuacgcuggugcugguuauuucucuuaugaaaugcugucgcugggugaauagaacaaagagcauccagcagggaccccgggaguccgaaagaaaagucucugugaccccucaaaacggcaaggugauuagcuccugggagagcuauaaaaucgggggcgaaaccggacucuga

SEQ ID NO: 223610 - RNA, 1575 nt, Artificial Sequence
  derived and/or modified CDS sequence (opt5) from glycoprotein__RABV__KF484554.1
auggugcugcaggcccuccuguucgcucccuuucuuaucagcucccugugccucggcaaguucccuauuuacaccaucccggacaaacuggggcccuggucuccuauugauauccaccaucuuagcugucccaacaaucuggucguugaggacgaaggaugcaacaaucucuccggcuuuucuuauauggagcugaaggugggguacauuagcgccaucaaagugaacggauucacauguacgggcgucgugaccgaagcggagacauauaccaauuuuguuggguacgugacaaccacauucaagagaaaacacuuucggccuaugcccgaugcuugccgcuccgccuauaacuggaagcuggccggagacccuagauacgaagagucucuccauaauccguaucccgaguaccacuggcugcggaccgucaagacgaccaaagaaagccuuaucgugauuuccccuagcguugcugaucuggaccccuacgauaagucucuccauucccgcaucuucccuagcggcaaauguucuggcaugacaguguccagcaccuauugcucuacaaaccacgaguacaccauuuggaugcccgaaaaggccgggcugggaacguccugugacaucuuuacaaccagcaaaggcaagagagcuuccaaagggggacggacaugcggcuucgucgaugagcgcgggcuuuauaagucucugaagggagccuguaaacucaagcugugcggcgugagcggccugagacucauggacgggaccuggguggcgauucaaaccuccgaugagacaaaaugguguagcccggaccagcuggucaaucuucacgaucugcauucugacgaaaucgagcaccucguuguggaggaacuggugcggaagcgcgaagagugccuugacgcccuggaguccauuaugacgaccaaaagcgucucuuuuagacggcucagcuaccugcgcaagcuggugccuggauucggcaaggcuuauacaaucuuuaacaaaacccucauggaagccgaugcucauuacaaguccguuagaacauggaaugagaucauucccucuaaagggugccugcgggugggaggcaagugucacccucacgucaacgggguguucuucaauggaaucauucuuggccccgacggccauguucugauccccgaaaugcagagcucccuccugcagcaacacauggagcuucuggaaagcucugugauuccucucaugcauccgcuggccgaucuguccaccgucuuuaaagacggggaugaggcggaggacuucguggaaguccaccuccccgaugugcauaagcagaucagcggaguugaccugggccuuccuucuugggggaaguaugugaugauguccgccggagcucuggccacgcucauccuggucauuagccugaugaaaugcugucgcugggugaacagaacaaaguccauccagcagggcccccgggagucugaaagaaaaguuagcgugaccccucaaaaugggaaggucauuuccucuugggagagcuacaaaaucggcggagaaaccggccuuuga

SEQ ID NO: 223611 - RNA, 1575 nt, Artificial Sequence
  derived and/or modified CDS sequence (opt5) from glycoprotein__RABV__KF484555.1
auggugcugcaggcccuccuguucgcuccccuucugaucagcucccucugccugggcaaguuuccuauuuacaccaucccggagaaacuugggcccuggucuccuauugacauccaccaucugagcugucccaacaaucucgucguugaagaugagggaugcaacucccugucuggcuucagcuauauggaacugaaggugggguacauuuccgccaucaaagugaauggauuuacauguacgggcgucgugaccgaggcggaaacauauaccaacuucguuggguacgugacaaccacauuuaagagaaaacacuucucuccuaugcccgacgcuugccggagcgccuauaauuggaagcucgccggagauccucgcuacgaggagucccugcauaacccguaucccgacuaccacuggcuuagaaccgucaagacgaccaaagaaagccugaucgugauuucuccuuccguugcugaucucgaccccuacgauaagagccugcauucucggaucuuuccuggcggcaaauguuccgggaugacagugagcucuaccuauugcuccacaaaucacgaguacaccauuuggaugcccgaaaagccgggacuuggcacgagcugugacaucuucacaaccuccaaagggaagcgcgccucuaaggagggaagaacaugcggcuuugucgaugagcgggggcuguauaaaagccucaagggagcuuguaaacugaagcugugcggcguguccggccuccgccugauggacgggaccuggguggccauucaaaccagcgaugaaaucaaaugguguucuccugaccagcuugucaaccugcacgaucuccauuccgacgagauugaacaccugguuguggaggaacuugugagaaagcgggaggagugccuggacgcgcucgaaagcaucaugacaacgaaaucugucagcuuccgcagacugucccaucugcggaagcucgugcccggauuuggcaaggccuacaccaucuucaauaaaacacugauggaggcugaugcccacuauaagucuguucgcaccuggaacgaaauuaucccuagcaaagggugccuuagagugggaggcaagugucacccccaugucaaugggguguuuuucaacggaauuauccugggccccgacggccacguucucauuccugagaugcaguccagccugcuucagcaacauguggaacugcucgagucuuccgucaucccgcugaugcacccccuggcugauccuagcacaguguucaaagacgaugacgaggccgaagauuuugucgaggugcaucuccccgacguucagaaacaggugucuggggucgaucugggacuuccuuccuggggcaaguacgugcugaugagcgcgggggcccucgcuacccugguucuggugaucucccuuaugaagugcugucggggaauuaaucgcacgaagcucaucaaacagggcucuagagaaagcgagcggaaggucuccgugacaccccaaaacgggaaagugauuucuagcugggaauccuauaagagcggcggagagaccggccuguga

SEQ ID NO: 223612 - RNA, 1575 nt, Artificial Sequence
  derived and/or modified CDS sequence (opt5) from glycoprotein__RABV__KF484556.1
auggugcugcaggcccuccuguucgcucccuuucuuaucagcucccugugccucggcaaguucccuauuuacaccaucccggacaaacuggggcccuggucuccuauugauauccaccaucuuagcugucccaacaaucuggucguugaggacgaaggaugcaacaaucucuccggcuuuucuuauauggagcugaaggugggguacauuagcgccaucaaagugaacggauucacauguacgggcgucgugaccgaagcggagacauauaccaauuuuguuggguacgugacaaccacauucagacggaagcacuuucgcccuaugcccgaugcuugcagauccgccuauaacuggaaacuggccggagacccucgguacgaagagucucuccauaauccguaucccgaguaccacuggcugcgcaccgucaagacgaccaaggaaagccuuaucgugauuuccccuagcguugcugaucuggaccccuacgauaaaucucuccauuccagaaucuucccuagcggcaaguguucuggcaugacaguguccagcaccuauugcucuacaaaccacgaguacaccauuuggaugcccgaaaaagccgggcugggaacguccugugacaucuuuacaaccagcaagggcaaacgggcuuccaaagggggacgcacaugcggcuucgucgaugagagagggcuuuauaagucucugaagggagccuguaagcucaaacugugcggcgugagcggccugcggcucauggacgggaccuggguggcgauucaaaccuccgaugagacaaagugguguagcccggaccagcuggucaaucuucacgaucugcauucugacgaaaucgagcaccucguuguggaggaacuggugcgcaaaagagaagagugccuugacgcccuggaguccauuaugacgaccaagagcgucucuuuucggcgccucagccaucugagaaaacuggugccuggauucggcaaggcuuacacaaucuuuaacaagacccucauggaagccgaugcucacuauaaauccguucggacauggaaugagaucauucccucuaaggggugccugcgcgugggaggcaaaugucacccucaugucaacgggguguucuucaauggaaucauucuuggccccgacggccacguucugauccccgaaaugcagagcucccuccugcagcaacauauggagcuucuggaaagcucugugauuccucucaugcacccgcuggccgaucuguccaccgucuuuaaggacggggaugaggcggaggacuucguggaaguccaucuccccgaugugcacaaacagaucagcggaguugaccugggccuuccuucuugggggaaguacgugaugauguccgccggagcucuggccacgcucauccuggucauuagccugaugaagugcuguagaugggugaaccggacaaaauccauccagcagggccccagagagucugaacgcaagguuagcgugaccccucaaaaugggaaagucauuuccucuugggagagcuauaagaucggcggagaaaccggccuuuga

SEQ ID NO: 223613 - RNA, 1575 nt, Artificial Sequence
  derived and/or modified CDS sequence (opt5) from glycoprotein__RABV__KF484557.1
auggugcugcaggcccuccuguucgcucccuuucuuaucagcucccugugcuucggcaaguuuccuauuuacaccaucccggacaaacucgggcccuggucuccuauugauauccaccaucugagcugucccaacaaucuugucguugaggacgaaggaugcaacucccugucuggcuucagcuauauggagcucaaggugggguacauuuccgccaucaaagugaauggauuuaccuguacgggcgucgugaccgaagcggagacauauaccaacuucguuggguacgugacaaccacauuuaagagaaaacacuuccggccuaugcccgaugcuugccgcucugccuauaauuggaaggucgccggagacccuagauacgaagagagccugcauaacccguaucccgauuaccacuggcugcggaccgugaagacgaccaaagagucccucaucauuaucagcccuucuguugcugaccuggaucccuacgacaagucccuucauagccgcauuuuuccuggcggcaaauguucugggaugacaaucuccagcaccuauugcucuacaaaucacgauuacaccauuuggaugcccgaaaaggccggacugggcacguccugugacaucuucacaaccagcaaagggaagagagcuuccaagggaggccggacaugcggguuuguggaugagcgcggacucuauaaaucucugaagggcgccuguaaacuuaagcugugcggcgucagcgggcucagacugauggacggaaccugggcggccauucaaaccuccgaugaaacaaaaugguguagcccggaccagcuggugaaccuccacgaccugcauucugaugagaucgagcaccuuguggucgaggaacugguucggcgcagagaagagugccucgacgcucuggaauccaucaugacgaccaagagcgugucuuuccggcgccuuagccaucugagaaaacucgugccuggcuuugggaaggccuacacaauuuucaauaagacccugauggaggcugaugcccacuauaaauccguccggacauggaacgagaucauucccucuaagggaugccugcgcgugggcgggaaaugucacccucauguuaauggaguguucuuuaacggcaucauucucggccccgacgggcacguccugauccccgaaaugcagagcucccuucugcagcaacauauggagcuccuggaaagcucugugaucccucuuaugcacccgcuggcggaucucuccaccguuuucaaggacggagaugaggccgaagacuuuguggagguccaucugcccgaugugcacaaacaggucagcggcguggaccuggggcucccuucuuggggaaaguacaugcugauguccgcuggcgcccuugcuacgcugaugcucguuauuccccugaugagaugcugucggagagugaaucgcacaaagagcauccagcaggggccucgggaguccgauagaaaagucucugugacaccccaaaacggcaagguuauuagcuccugggaaucuuauaaaagcggaggcgagaccgggcuguga

SEQ ID NO: 223614 - RNA, 1575 nt, Artificial Sequence
  derived and/or modified CDS sequence (opt5) from glycoprotein__RABV__KF484558.1
augauccugcacgcccuccuguucgcucccuuucuuauuagcucccugugccucggcaaguucccuaucuacaccauuccggacaaacuggggcccuggucuccuaucgauauucaucaccuuagcugucccaacaaucuggugaucgaggacgaaggaugcaacucccucucuggcuuuagcuauauggagcugaaggucggguacaucuccgccauuaaaguuaauggauucacauguacgggcguggugaccgaagcggagacauauaccaacuuugucggguacgugacaaccacauucaagagaaaacauuuucggccuaugcccgaugcuugccgcucugccuauaauuggaagcuggccggagacccuagauacgaagagagccuccacaacccguaucccgaguaccauuggcugcggaccguuaagacgaccaaagaaucccuuguggucaucagcccuucuguggcugaucuggaccccuacgauaagucccuccacagccgcauuuucccuucuggcaaauguuccggcaugacaguuagcucuaccuauugcuccacaaaucacgaguacaccaucuggaugcccgaaaagguggggcugggaacgagcugugacauuuuuacaaccuccaaaggcaagagagccucuaaagggggacggacaugcggcuucgucgaugagcgcgggcuuuauaagagccugaagggagcuuguaaacucaagcugugcggcguguccggccugagacucauggacgggaccuggguggccauccagaccagcgaugagacaaaaugguguucuccggaccaacuggucaaccuucaugaucugcacuccgacgaaauugagcaucucguuguggaggaacuggugcggaagcgcgaagagugccuugacgcgcuggagagcaucaugacgaccaaaucugucagcuuuagacggcucucccaucugcgcaagcuggugccuggauucggcaaggccuacacaaucuuuaauaaaacccucauggaagcugaugcccacuauaagucuguuagaacauggaacgagauuauccccagcaaagggugccugcgggugggaggcaagugucacccucacgucaaugggguguucuucaacggaauuauccuuggccccgacggccauguucugauucccgaaaugcaguccagccuccugcagcagcacauggagcuucuggaaucuuccgugaucccucucaugcauccgcuggcugaucugagcaccgucuuuaaagacggggaugaggccgaggacuucguggaaguccaccuccccgaugugcacaagcaaaucucuggaguugaccugggccuuccuuccugggggaaguacgugcugaugagcgcgggagcccucgcuacgcugauucuggucaucucccuuaugaaaugcugucgcugggugaauagaacagagucuauucagcagggcccccgggaaagcgagagaaagguuuccgugaccccucagaacgggaaagucaucucuagcugggaauccuauaagauuggcggagagaccggccucuga

SEQ ID NO: 223615 - RNA, 1575 nt, Artificial Sequence
  derived and/or modified CDS sequence (opt5) from glycoprotein__RABV__KF484559.1
auggugcugcaggcccuccuguucgcucccuuucuuaucagcucccugugcuucggcaaguuuccuauuuacaccaucccggacaaacucgggcccuggucuccuauugauauccaccaucugagcugucccaacaaucuugucguugaggacgaaggaugcaacucccugucuggcuucagcuauauggagcucaaggugggguacauuuccgccaucaaagugaauggauuuaccuguacgggcgucgugaccgaagcggagacauauaccaacuucguuggguacgugacaaccacauuuaagagaaaacacuuccggccuaugcccgaugcuugccgcucugccuauaauuggaaggucgccggagacccuagauacgaagagagccugcauaacccguaucccgauuaccacuggcugcggaccgugaagacgaccaaagagucccucaucauuaucagcccuucuguugcugaccuggaucccuacgacaagucccuucauagccgcauuuuuccuggcggcaaauguucugggaugacaaucuccagcaccuauugcucuacaaaucacgauuacaccauuuggaugcccgaaaaggccggacugggcacguccugugacaucuucacaaccagcaaagggaagagagcuuccaagggaggccggacaugcggguuuguggaugagcgcggacucuauaaaucucugaagggcgccuguaaacuuaagcugugcggcgucagcgggcucagacugauggacggaaccugggcggccauucaaaccuccgaugaaacaaaaugguguagcccggaccagcuggugaaccuccacgaccugcauucugaugagaucgagcaccuuguggucgaggaacugguucggcgcagagaagagugccucgacgcucuggaauccaucaugacgaccaagagcgugucuuuccggcgccuuagccaucugagaaaacucgugccuggcuuugggaaggccuacacaauuuucaauaagacccugauggaggcugaugcccacuauaaauccguccggacauggaacgagaucauucccucuaagggaugccugcgcgugggcgggaaaugucacccucauguuaauggaguguucuuuaacggcaucauucucggccccgacgggcacguccugauccccgaaaugcagagcucccuucugcagcaacauauggagcuccuggaaagcucugugaucccucuuaugcacccgcuggcggaucucuccaccguuuucaaggacggagaugaggccgaagacuuuguggagguccaucugcccgaugugcacaaacaggucagcggcguggaccuggggcucccuucuuggggaaaguacaugcugauguccgcuggcgcccuugcuacgcugaugcucguuauuccccugaugaagugcuguagacgggugaauagaacaaaaagcauccagcaggggccucgcgaguccgaucggaaggucucugugacaccccaaaacggcaaaguuauuagcuccugggaaucuuauaagagcggaggcgagaccgggcuguga

SEQ ID NO: 223616 - RNA, 1575 nt, Artificial Sequence
  derived and/or modified CDS sequence (opt5) from glycoprotein__RABV__KF620487.1
augaucccccaggcccuucucuucgugccuuuucugggcuucccgcuuugccuggggaaguuucccauuuacaccaucccugacaaacucggacccuggagcccuauugauauccaccaucuguccugucccaacaauauggucguugaggacgaaggcugcacaaaccuuucuggguucagcuauauggagcugaaggugggauacauuuccgcuaucaaagugaauggcuuuacguguaccggggucgugacagaagccgagaccuauacaaacuucguuggauacgugaccacaaccuuuaagagaaaacacuuccggccugucccggaugcgugccgcgacgcucauaauuggaagauggccggcgaucccagauaugaagagucucuccacaacccuuaccccgacuaucauuggcugcggacggugaagaccacaaaagagagccugguuaucauuuccccuucuguggccgaucucgaccccuacgauaagagccugcacuccagcgucuuuccgggcgggaaauguucuggaaucaccguguccagcacauacugcucuaccaaucacgacuauacgauuuggaugccugaaaacccccgccuuggcacauccugugauaucuucaccuacagcaaggggaaaagagcuucuaaggaguccaagacaugcggauuuguggacgaacggggccuguauaaaagccucaagggggccuguaaacugaagcugugcggagucccuggccugcgccucauggauggcaccuggguugcuauucaaaccuccgacgaggugaaaugguguccucccgaccagcuggugaaucugcaugaucuccacucugacgagcuggaacaucuugucguggaggaacugguuaagaaaagagaggaaugccucgaugcccuggagagcaucaugacaacgaaguccgugagcuuccggcgccuuucucaccugagaaagcucguccccggguuuggaaaagcguacaccauuuucaacaagacacugauggaggccgacgcucacuauaaauccgugcggaccuggaaugaaaucaucccgagcaagggcugccugcgcguugggggaagaugucauccccacgugaacggcgucuucuuuaaugggauuauccucggaccugauggccaugugcugauucccgagaugcagucuagccuucugcagcaacacauggaacuccuggaguccucugucaucccucuuaugcauccccuggccgacccgagcgcuguguucaaaacaggcgaugaagccgaggacuuuguugaggugcaccucccugauguccacaaacagguguccgggguugaccugggacugcccagcuggggcaaguacgugcucaugucugcggggguccugauugugcuugugcugaugaucuuccucaugaccugcuguaagcggccuaaccgcgccgaacugauccaucacucccccagagagacggaacggaagguuagcgucacaucucagggaggcagagugauuuccagcugggaguccuauaaaaaugggggcgaaaccaagcuguga

SEQ ID NO: 223617 - RNA, 1575 nt, Artificial Sequence
  derived and/or modified CDS sequence (opt5) from glycoprotein__RABV__KF620488.1
augaucccccaggcccuucucuucgugccuuuucugggcuucccgcuuugccuggggaaguuucccauuuacaccaucccugacaaacucggacccuggagcccuauugauauccaccaucuguccugucccaacaauauggucguugaggacgaaggcugcacaaaccuuucuggguucagcuauauggagcugaaggugggauacauuuccgcuaucaaagugaauggcuuuacguguaccggggucgugacagaagccgagaccuauacaaacuucguuggauacgugaccacaaccuuuaagagaaaacacuuccggccuaugccggaugcgugccgcgacgcucauaauuggaagauggccggcgaucccagauaugaagagucucuccacaacccuuaccccgacuaucauuggcugcggacggucaagaccacaaaagagagccuggugaucauuuccccuucuguugccgaucucgaccccuacgauaagagccugcacuccagcguguuuccgggcgggaaauguucuggaaucaccgucuccagcacauacugcucuaccaaucacgacuauacgauuuggaugccugaaaacccccgccuuggcacauccugugauaucuucaccuacagcaaggggaaaagagcuucuaaggaguccaagacaugcggauuuguggacgaacggggccuguauaaaagccucaagggggccuguaaacugaagcugugcggagugcugggccuccgccugauggauggcaccugggucgcuauucaaaccuccgacgagguuaaaugguguccucccgaccagcuggugaaucuccaugauuucagaucugacgagcuggaacaccuuguggucgaggaacuggugaagaaacgggaggaaugccucgaugcccuggagagcaucaugacaacgaaguccguuagcuuucgcagacuuucucaucugcggaagcucgugcccggguucggaaaagcguacaccauuuucaacaagacacugauggaggccgacgcucacuauaaauccguccgcaccuggaaugaaaucaucccuagcaagggcugccugaaaguugggggaagaugucacccgcaugugaacggcguguuuuucaaugggauuauccucggacccgauggccacguccugauuccugagaugcagucuagccuucugcagcaacauauggaacuccuggaguccucugugaucccccuuaugcacccucuggccgaccccagcgcugucuuuaagacaggcgaugaagccgaggacuucguggagguucaucucccggaugugcacaagcaggucuccgggguggaccugggacugccuagcuggggcaaauacguucucaugucugcgggggugcugauuguccuugugcugaugaucuuucucaugaugugcuguaagaaacccaaccgggccgaaccuauccaccauagcccccgcgagaccgaaagaaagauguccgugacgucucagggaggccggguuauuuccagcugggaguccuauaaaaaugggggcgaaacaaagcuguga

SEQ ID NO: 223618 - RNA, 1575 nt, Artificial Sequence
  derived and/or modified CDS sequence (opt5) from glycoprotein__RABV__KF620489.1
augaucccccaggcccuucucuucgugccuuuucugggcuucccgcuuugccuggggaaguuucccauuuacaccaucccugacaaacucggacccuggagcccuauugauauccaccaucuguccugucccaacaauauggucguugaggacgaaggcugcacaaaccuuucuggguucagcuauauggagcugaaggugggauacauuuccgcuaucaaagugaauggcuuuacguguaccggggucgugacagaagccgagaccuauacaaacuucguuggauacgugaccacaaccuuuaagagaaaacacuuccggccugucccggaugcgugccgcgacgcucauaauuggaagaucgccggcgaucccagauaugaagagucucuccacaacccuuaccccgacuaucauuggcugcggacggugaagaccacaaaagagagccugguuauuaucuccccuucuguggccgaucucgaccccuacgauaagagccugcacuccagcgucuuuccgggcgggaaauguucuggaauuaccguguccagcacauacugcucuaccaaucacgacuauacgaucuggaugccugaaaacccccgccuuggcacauccugugauauuuucaccuacagcaaggggaaaagagcuucuaaggaguccaagacaugcggauuuguggacgaacggggccuguauaaaagccucaagggggccuguaaacugaagcugugcggagucccuggccugcgccucauggauggcaccuggguugcuauccaaaccuccgacgaggugaaaugguguccucccgaccagcuggugaaucugcaugaucuccacucugacgagcuggaacauagagucguggaggaacuuguuaagaaacgggaggaaugccuggaugcccucgagagcauuaugacaacgaaguccgugagcuuccgcagacugucucaccuucggaagcugguccccggguuuggaaaagcguacaccaucuucaacaagacacucauggaggccgacgcucacuauaaauccgugcgcaccuggaaugaaaucauuccgagcaagggcugccugagaguugggggacggugucauccccacgugaacggcgucuucuuuaaugggaucauucugggaccugauggccaugugcucauccccgagaugcagucuagccugcuucagcaacacauggaacugcucgaguccucugucauuccucugaugcauccccuugccgacccgagcgcuguguucaaaacaggcgaugaagccgaggacuuuguugaggugcaucugccugauguccacaaacagguguccgggguugaccucggacugcccagcuggggcaaguacgugcugaugucugcggggguccucaucgugcuggugcuuaugaucuuccugaugaccugcuguaagcgcccuaacagagccgaacccauucaccacuccccucgggagacggaaagaaagguuagcgucacaucucagggaggccgcgugaucuccagcugggaguccuauaaaaaugggggcgaaaccaagcucuga

SEQ ID NO: 223619 - RNA, 1575 nt, Artificial Sequence
  derived and/or modified CDS sequence (opt5) from glycoprotein__RABV__KF656698.1
augauccuccaggugcugcaauucgucccccugcuuauuagcccucugugccucggcaaguuuccgaucuacaccauucccgacaaacuggggccuuggucccccaucgauauucaccaucuuucuuguccuaacaaucugguuguggaggacgaaggaugcacaaaccucagcggcuucuccuauauggagcugaaggugggguacaucucugccaucaaagucaauggauuuacguguaccggcgugguuacagaagcugagaccuauacaaacuucgugggguacgucaccacaaccuuuaagagaaaacacuuccggcccauuccugaugccugccgcgcggcuuauaauuggaagauggccggagacccgagauacgaagagagccugcagaaccccuauccugaguaccauuggcuccggacggugaagaccacaaaagaaucccugaucauuaucucucccagcguugccgaucuugacccuuacgauaagucccugcacagccgcguguuucccggcggcucugcucucgggauuaccgucuccagcacauauuguucuaccaaucaugacuacacgaucuggaugccggaggaaccuagacugggaacauccugcgauauuuucaccagcucuaaaggcaagaaagccuccaaagggggaaagacauguggcuuuguggacgagcgggggcuuuauaagagccugaagggagcuugcaaacucaagcuguguggcgugcugggccuccgccugauggaugggaccugggucuccauccagaccucugacaacacaaaauggugcagccccgaucagcuuguuaaucugcacgacuuccacuccgacgagaucgaacaucucgugguggaggaacuggucaagaaaagagaggaaugucuugaugcccuggagagcauuaugacgaccaagucuguguccuuucggcgccucacauaccugagaaagcugguuccuggauucggcaaagcguauaccaucuuuaacaagacacucauggaggccgacgcucacuacaaaagcgugcggaccuggaaugaaauuauccccucuaaggggugccugaaaguccgcgagagaugccaucccccuguggauggaguuuucuucaacggcauuauccuugggccggacggaaaugugcugauccccgaaaugcaaagcucccuccugcagcagcacauggagcuucuggaaucuagcgucauuccucucaugcacccccuggccgauccuuccacgguguuuaaggagggcgacgaggcugaagauuucgucgaggugcaucugcccgacguucacaagcagaucagcggcguggaucucgggcugccgucuuggggaaaauaucuucugaugauugccggcgggcucgcgacacugguccugaucauuuguuccaucgccugcugucggcgcgcuaagagaaccgaaagccggagacgcggaucuggcgaguccgggaaaaaggccaccgcuacaccucggaccagaaaagugguuagcuccugggaacuuuacaagcgcgagggcgacgcccggcucuga

SEQ ID NO: 223620 - RNA, 1575 nt, Artificial Sequence
  derived and/or modified CDS sequence (opt5) from glycoprotein__RABV__KF656699.1
augauccuccaggugcugcaauucgucccccugcuuauuagcccucugugccucggcaaguuuccgaucuacaccauucccgacaaacuggggccuuggucccccaucgauauucaccaucuuucuuguccuaacaaucugguuguggaggacgaaggaugcacaaaccucagcggcuucuccuauauggagcugaaggugggguacaucucugccaucaaagucaauggauuuacguguaccggcgugguuacagaagcugagaccuauacaaacuucgugggguacgucaccacaaccuuuaagagaaaacacuuccggcccauuccugaugccugccgcgcggcuuauaauuggaagauggccggagacccgagauacgaagagagccugcagaaccccuauccugaguaccauuggcuccggacggugaagaccacaaaagaaucccugaucauuaucucucccagcguugccgaucuugacccuuacgauaagucccugcacagccgcguguuucccggcggcucugcucucgggauuaccgucuccagcacauauuguucuaccaaucaugacuacacgaucuggaugccggaggaaccuagacugggaacauccugcgauauuuucaccagcucuaaaggcaagaaagccuccaaagggggaaagacauguggcuuuguggacgagcgggggcuuuauaagagccugaagggagcuugcaaacucaagcuguguggcgugcugggccuccgccugauggaugggaccugggucuccauccagaccucugacaacacaaaauggugcagccccgaucagcuuguuaaucugcacgacuuccacuccgacgagaucgaacaucucgugguggaggaacuggucaagaaaagagaggaaugucuugaugcccuggagagcauuaugacgaccaagucuguguccuuucggcgccucagcuaccugagaaagcugguuccuggauucggcaaagcguauacaaucuuuaacaagacccucauggaggccgacgcucacuacaaaucugugcggacauggaaugaaauuauccccagcaaggggugccugaaaguccgcgagagaugccaucccccuguggauggaguuuucuucaacggcauuauccuugggccggacggaaaugugcugauccccgaaaugcaauccucucuccugcagcagcacauggagcuucuggaaagcuccgucauuccucucaugcacccccuggccgauccuagcaccguguuuaaggagggcgacgaggcugaagauuucgucgaggugcaucugcccgacguucacaagcagaucucuggcguggaucucgggcugccguccuggggaaaauaucuucugaugauugccggcgggcucgcgacgcugguccugaucauuuguagcaucgccugcugucggcgcgcuaagagaacagaaucucggagacgcggauccggcgagagcgggaaaaaggccaccgcuaccccucggacaagaaaagugguuuccucuugggaacuuuacaagcgcgagggcgacgcccggcucuga

SEQ ID NO: 223621 - RNA, 1575 nt, Artificial Sequence
  derived and/or modified CDS sequence (opt5) from glycoprotein__RABV__KF663531.1
augaucccccaggugcuucucuucgucccucugcuuguuuuuagcuccugcuucggcaaguuuccgauuuacaccauccccgacaaacuggggccuuggucucccauugauauccaccaucucagcuguccuaacaaucuggugguggaggacgaaggaugcacaaaccuuuccggcuucucuuauauggagcugaaggucggguacauuagcgccaucaaagugaauggauuuacguguaccggcguugugacagaagcugagaccuauacaaacuucgucggguacgugaccacaaccuuuaagagaaaacacuuccggcccaugccugaugccugccgcgcggcuuauaauuggaagguugccggagacccgagauacgaagagucccuccauaaccccuauccugauuaccacuggcugcggacggugaagaccacaaaagagucucuggucaucauuagccccuccguggccgaccucgauccuuacgacaagagccugcauucucgcguguuucccggcggcaaauguuccgggaucaccgucagcucuacaugcuguuccaccaaucacgauuauacgauuuggaugccggaaaacccuagacuuggaacaagcugcgacaucuucaccaauucucggggcaagcgcgcuuccaaagggggaaagacauguggcuuuguugaugagagagggcugugcaagagccucaaaggagccuguaagcugaaacuuugcggcgugcugggccuccggcugauggacgggaccuggguggcuauucaaaccuccgaugaaaucaaguggugucccccugaccagcuggucaaccuccacgacuuccauucugaugagauugagcacuuugugguugaggaacuggugaaaaagcgcgaagagugccuugacgcccuggaaacaaucaugacgaccaaaagcgucuccuucagacggcucagccaucugcgcaagcuggugcccggauucggcaaggcguacacaaucuuuaauaaaacccugauggaggccgaugcucacuauaagucuauuagaacauggaacgagaucauucccuccaaagggugccuccggguuggaggccgcugucacccucaugugaauggggucuucuuuaacggaaucauucugggcccggacggccacgugcugauccccgaaaugcagagcucucuccugcaucagcacauggagcuucuggaaagcuccgucaucccucucaugcauccccuggccgauccuucuaccguguucaaggacggggaugaggcugaagacuuuguugaggugcaccuucccgauguccacaaacaaauuagcggaguggaccugggccucccgaauugggggaaguacguucugaucuccgccggagcgcugacggcccucaugcugacaauuuuccuuaugaccugcuguagaaagaccaaccgggcuggcagcauccagcauucuccuggggagacaggcagaaaaguguccgucaccagccacaacggacgcgugauuucucugugggaauccuauaagagcggcuccgagacaaaacucuga

SEQ ID NO: 223622 - RNA, 1575 nt, Artificial Sequence
  derived and/or modified CDS sequence (opt5) from glycoprotein__RABV__KF663532.1
augaucccccaggugcugcuguucgucccucugcuugccuuuagcuccugcuucggcaaguuuccgauuuacaccauccccgacaaacuggggccuuggucucccauugauauccaccaucucagcuguccuaacaaucugguuguggaggacgaaggaugcacaaaccuuuccggcuucucuuauauggagcugaaggugggguacauuagcgcuaucaaagucaauggauuuacguguaccggcgugguuacagaagccgagaccuauacaaacuucgugggguacgucaccacaaccuuuaagagaaaacacuuccggcccaugccugaugcgugccgcgcugccuauaauuggaagguggccggagacccgagauacgaagagucccuccauaaccccuauccugauuaccacuggcugcggacgguuaagaccacaaaagagucucuggugaucauuagccccuccgucgcugaccucgauccuuacgacaagagccugcauucucgcguguuucccggcggcaaauguuccgggaucaccgugagcucuacaugcuguuccaccaaucacgauuauacgauuuggaugccggaaaacccuagacuuggaacaagcugcgacaucuucaccaauucucggggcaagcgcgccuccaaagggggaaagacauguggcuuugucgaugagagagggcuguacaagagccucaaaggagcuugcaagcugaaacuuuguggcguucugggccucgggcugauggacggaaccuggguggccauucaaaccuccgaugaaaucaaguggugucccccugaccagcuggugaaccuccacgacuuccauucugaugagauugagcaccuggucguggaggaacuuguuaaaaagcgggaagagugccuggacgcgcucgaaacaaucaugacgaccaaaagcguguccuuucgcagacugagccaucuucggaagcugguccccggcuucgggaaggccuauacaaucuucaauaaaacccucauggaggcugaugcccacuacaagucuauucgcacauggaacgagaucauucccuccaaaggaugccugagagugggcgggcggugccacccucauguuaauggaguguuuuucaacggcaucauucugggcccggacgggcacguccucauccccgaaaugcagagcucucugcuucaucagcacauggagcugcucgaaagcuccgugaucccucugaugcauccccuugcugauccuucuaccgucuuuaaggacggagaugaggccgaagacuucguggagguucaccuccccgaugugcacaaacaaauuagcggcgucgaccucgggcugccgaauuggggaaaguaugugcugaucuccgcgggcgcccucacggcucugaugcuuacaauuuuucugaugaccuguugccgcaagaccaacagagccgggagcauccagcauucuccuggcgagacaggacggaaaguuuccgugaccagccacaacggcagagucaugauucucugggaaucuuacaaguccgggagcgagacaaaacuguga

SEQ ID NO: 223623 - RNA, 1575 nt, Artificial Sequence
  derived and/or modified CDS sequence (opt5) from glycoprotein__RABV__KF663533.1
augaucccccaggugcuucucuucgucccucugcuugacuuuagcuccugcuucggcaaguuuccgauuuacaccauccccgauaaacuggggccuuggucucccauugacauccaccaucucagcuguccuaacaaucugguuguggaggaugaaggaugcacaaaccuuuccggcuucucuuauauggagcugaaggugggguacauuagcgccaucaaagucaauggauuuacguguaccggcgugguuacagaagcugagaccuauacaaacuucgugggguacgucaccacaaccuuuaagagaaaacacuuccggcccaugccugacgccugccgcgcggcuuauaauuggaagguggccggagauccgagauacgaagagucccuccauaaccccuauccugacuaccacuggcugcggacgguuaagaccacaaaagagucucuggugaucauuagccccuccgucgccgaucucgacccuuacgauaagagccugcauucucgcguguuucccggcggcaaauguuccgggaucaccgugagcucuacaugcuguuccaccaaucacgacuauacgauuuggaugccggaaaacccuagacuuggaacaagcugcgauaucuucaccaauucucggggcaagcgcgcuuccaaagggggaaagacauguggcuuugaggacgaaagagggcuguacaagagccucauuggagccugcaaacugaagcuguguggcguccugggccuccggcgcauggaugggaccuggguugcuauccaaaccuccgacaaaauuaagagaugucccccugaccagcuggugaaccugcacgauuuccauucugacgagaucgagcaccucguggucgaggaacuggugaaaaagcgggaagagugccuugaugcccuggaaacaaucaugacgaccaaaagcguuuccuuucgcagacucagccaucugcggaaacuugugcccggauucggcaaggcguauacaauuuucaauaagacccugauggaggccgacgcucacuacaagucuauccgcacauggaacgagauuauccccuccaaagggugccucagagucggaggccggugccacccucaugugaaugggguguuuuucaacggaauuauccugggcccggauggccacguucugauccccgaaaugcagagcucucuccugcaucagcacauggagcuucuggaaagcuccgucauuccucucaugcauccccuggccgacccuucuaccguguuuaaggauggggacgaggcugaagauuucgucgaggugcaccuucccgacguucacaaacaaaucagcggaguggaucugggccucccgaauugggggaaguauguccugauuuccgccggagcgcugacggcccucaugcugacaaucuuucuuaugaccuguugcagaaagaccaaccgcgcuggcagcauucagcauucuccuggggagacaggccggaaaguguccguuaccagccacaacggaagagugaucucucugugggaauccuacaagagcgaguccgaaacaaaacucuga

SEQ ID NO: 223624 - RNA, 1575 nt, Artificial Sequence
  derived and/or modified CDS sequence (opt5) from glycoprotein__RABV__KF663534.1
augaucccccaggugcuucucuucgucccucugcuuguuuuuagcuccugcuucggcaaguuuccgauuuacaccauccccgacaaacuggggccuuggucucccauugauauccaccaucucagcuguccuaacaaucuggugguggaggacgaaggaugcacaaaccuuuccggcuucucuuauauggagcugaaggucggguacauuagcgccaucaaagugaauggauuuacguguaccggcguugugacagaagcugagaccuauacaaacuucgucggguacgugaccacaaccuuuaagagaaaacacuuccggcccaugccugaugccugccgcgcggcuuauaauuggaagguugccggagacccgagauacgaagagucccuccauaaccccuauccugauuaccacuggcugcggacggugaagaccacaaaagagucucuggucaucauuagccccuccguggccgaccucgauccuuacgacaagagccugcauucucgcguguuucccggcggcaaauguuccgggaucaccgucagcucuacaugcuguuccaccaaucacgauuauacgauuuggaugccggaaaacccuagacuuggaacaagcugcgacaucuucaccaauucucggggcaagcgcgcuuccaaagggggaaagacauguggcuuuggggaugagagaggacuguacaagagccucaacggcgccugcaaacugaagcuguguggcguucuggggcuccggcgcauggacggaaccuggguggcuauucaaaccuccgaugaaaucaaauggugucccccugaccagcuggugaaucugcacgacuuccauucugaugagauugagcaccucgucguggaggaacugguuaagaaaagagaagagugccuugacgcccuggaaacaaucaugacgaccaagagcguguccuuucggcgccucagccaucugagaaaacuuguccccggcuucgggaaggcguauacaaucuucaacaagacccugauggaggccgaugcucacuacaaaucuauucggacauggaaugagaucauucccuccaagggaugccuccgcgugggcgggagaugccacccucauguuaacggaguguuuuucaauggcaucauucugggcccggacgggcacguccugauccccgaaaugcagagcucucuccugcaucagcacauggagcuucuggaaagcuccgugaucccucucaugcauccccuggccgauccuucuaccgucuuuaaagacggagaugaggcugaagacuucguggagguucaccuucccgaugugcacaagcaaauuagcggcgucgaccuggggcucccgaacuggggaaaauaugugaugaucuccgccggcgcgcugacggcccugaugcucacaauuuuucugaugaccuguugccggaagaccaacagagcugggagcauccagcauucuccuggcgagacaggacgcaagguuuccgugaccagccacaauggccgggucauuucucuuugggaauccuacaaaagcgaguccgaaacaaagcuguga

SEQ ID NO: 223625 - RNA, 1575 nt, Artificial Sequence
  derived and/or modified CDS sequence (opt5) from glycoprotein__RABV__KF663535.1
augaucccccaggugcugcuguucgucccucugcuuguuauuagcuccugcuuuggcaaguucccgaucuacaccauucccgacaaacuggggccuuggucucccaucgauauucaccaucucagcuguccuaacaaucuggugguggaggacgaaggaugcacaaaccuuuccggcuuuucuuauauggagcugaaggucggguacaucagcgccaucaaagugaauggauucacguguaccggcguugugacagaagcugagaccuauacaaacuuugucggguacgugaccacaaccuucaagagaaaacacuuucggcccaugccugaugccugccgcgcggcuuauaauuggaagguugccggagacccgagauacgaagagucccuccauaaccccuauccugauuaccacuggcugcggacggugaagaccacaaaagagucucuggucauuaucagccccuccguggccgaccucgauccuuacgacaagagccugcauucucgcguguuccccggcggcaaauguuccgggauuaccgucagcucuacaugcuguuccaccaaucacgauuauacgaucuggaugccggaaaacccuagacuuggaacaagcugcgacauuuuuaccaauucucggggcaagcgcgcuuccaaagggggaaagacauguggcuucguugaugagagagggcuguacaagagccucaaaggagccugcaagcugaaacuuuguggcgugcugggccuccggcugauggacgggaccuggguggcuauccaaaccuccgaugaaauuaaguggugucccccugaccagcuggucaaccuccacgacuuucauucugaugagaucgagcaccuggugguugaggaacuugugaaaaagcgcgaagagugccuggacgcccucgaaacaaucaugacgaccaaaagcgucuccuucagacggcugagccaucuucgcaagcuggugcccggauuuggcaaggcguauacaauuuucaauaaaacccucauggaggccgaugcucacuacaagucuaucagaacauggaacgagauuauccccuccaaagggugccugcggguuggaggccgcugccacccucaugugaauggggucuucuuuaacggaauuauccugggcccggacggccacgugcucauccccgaaaugcagagcucucugcuucaucagcacauggagcugcucgaaagcuccgucauuccucugaugcauccccuugccgauccuucuaccguguucaaggacggggaugaggcugaagacuuuguugaggugcaccuccccgauguccacaaacaaaucagcggaguggaccucggccugccgaauugggggaaguauguucugauuuccgccggagcgcucacggcccugaugcuuacaaucuuccugaugaccuguugcagaaagaccaaccgggcuggcagcauucagcauucuccuggggagacaggcagaaaaguguccgucaccagccacaacggacgcgugaucuuucucugggaaucuuacaaguccggcagcgagacaaaacuguga

SEQ ID NO: 223626 - RNA, 1575 nt, Artificial Sequence
  derived and/or modified CDS sequence (opt5) from glycoprotein__RABV__KF663536.1
augaucccccaggugcugcuguucgucccucugcuuguuuuuagcuccugcuucggcaaguuuccgauuuacaccauccccgacaaacuggggccuuggucucccauugauauccaccaucucagcuguccuaacaaucuggugguggaggacgaaggaugcacaaaccuuuccggcuucucuuauauggagcugaaggucggguacauuagcgccaucaaagugaauggauuuacguguaccggcguugugacagaagcugagaccuauacaaacuucgucggguacgugaccacaaccuuuaagagaaaacacuuccggcccaugccugaugccugccgcgcggcuuauaauuggaagguugccggagacccgagauacgaagagucccuccauaaccccuauccugauuaccacuggcugcggacggugaagaccacaaaagagucucuggucaucauuagccccuccguggccgaccucgauccuuacgacaagagccugcauucucgcguguuucccggcggcaaauguuccgggaucaccgucagcucuacaugcuguuccaccaaucacgauuauacgauuuggaugccggaaaacccuagacuuggaacaagcugcgacaucuucaccaauucucggggcaagcgcgcuuccaaagggggaaagacauguggcuuuguugaugagagagggcugugcaagagccucaaaggagccuguaagcugaaacuuugcggcgugcugggccuccggcugauggacgggaccuggguggcuauucaaaccuccgaugaaaucaaguggugucccccugaccagcuggucaaccuccacgacuuccauucugaugagauugagcaccuggugguugaggaacuugugaaaaagcgcgaagagugccuggacgcccucgaaacaaucaugacgaccaaaagcgucuccuuuagacggcugagccaucuucgcaagcuggugcccggauucggcaaggcguacacaaucuucaauaaaacccucauggaggccgaugcucacuauaagucuauuagaacauggaacgagaucauucccuccaaagggugccugcggguuggaggccgcugucacccucaugugaauggggucuuuuucaacggaaucauucugggcccggacggccacgugcucauccccgaaaugcagagcucucugcuucaucagcacauggagcugcucgaaagcuccgucaucccucugaugcauccccuugccgauccuucuaccguguuuaaggacggggaugaggcugaagacuucguugaggugcaccuccccgauguccacaaacaaauuagcggaguggaccucggccugccgaauugggggaaguacguucugaucuccgccggagcgcucacggcccugaugcuuacaauuuuucugaugaccugcuguagaaagaccaaccgggcuggcagcauccagcauucuccuggggagacaggcagaaaaguguccgucaccagccacaacggacgcgugauuucucucugggaauccuauaagagcggcuccgagacaaaacuguga

SEQ ID NO: 223627 - RNA, 1575 nt, Artificial Sequence
  derived and/or modified CDS sequence (opt5) from glycoprotein__RABV__KF663537.1
augaucccccaggugcuucucuucgucccucugcuugacuuuagcuccugcuucggcaaguuuccgauuuacaccauccccgauaaacuggggccuuggucucccauugacauccaccaucucagcuguccuaacaaucugguuguggaggaugaaggaugcacaaaccuuuccggcuucucuuauauggagcugaaggugggguacauuagcgccaucaaagucaauggauuuacguguaccggcgugguuacagaagcugagaccuauacaaacuucgugggguacgucaccacaaccuuuaagagaaaacacuuccggcccaugccugacgccugccgcgcggcuuauaauuggaagguggccggagauccgagauacgaagagucccuccauaaccccuauccugacuaccacuggcugcggacgguuaagaccacaaaagagucucuggugaucauuagccccuccgucgccgaucucgacccuuacgauaagagccugcauucucgcguguuucccggcggcaaauguuccgggaucaccgugagcucuacaugcuguuccaccaaucacgacuauacgauuuggaugccggaaaacccuagacuuggaacaagcugcgauaucuucaccaauucucggggcaagcgcgcuuccaaagggggaaagacauguggcuuugucgacgagagagggcuguacaagagccucaacggagccugcaaacugaagcuguguggcguucugggccuccggcgcauggaugggaccuggguggcuauucaaaccuccgacgaaaucaaauggugucccccugaccagcuggugaaucugcacgauuuccauucugacgagauugagcaccucgucguggaggaacugguuaagaaaagagaagagugccuugaugcccuggaaacaaucaugacgaccaagagcguguccuuucggcgccucagccaucugagaaaacuuguccccggauucggcaaggcguauacaaucuucaacaagacccugauggaggccgacgcucacuacaaaucuauucggacauggaaugagaucauucccuccaaggggugccuccgcgugggaggcagaugccacccucauguuaacgggguguuuuucaauggaaucauucugggcccggauggccacguccugauccccgaaaugcagagcucucuccugcaucagcacauggagcuucuggaaagcuccgugaucccucucaugcauccccuggccgacccuucuaccgucuuuaaagauggggacgaggcugaagauuucguggagguucaccuucccgacgugcacaagcaaauuagcggagucgaucugggccucccgaacugggggaaauaugugcugaucuccgccggagcgcugacggcccucaugcugacaauuuuucuuaugaccuguugccggaagaccaacagagcuggcagcauccagcauucuccuggggagacaggccgcaagguuuccgugaccagccacaauggacgggucauuucucugugggaauccuacaaaagcgaguccgaaacaaagcucuga

SEQ ID NO: 223628 - RNA, 1575 nt, Artificial Sequence
  derived and/or modified CDS sequence (opt5) from glycoprotein__RABV__KF663538.1
augaucccccaggugcugcuguucgucccucugcuuguuuuuagcuccugcuucggcaaguuuccgauuuacaccauccccgacaaacuggggccuuggucucccauugauauccaccaucucagcuguccuaacaaucuggugguggaggacgaaggaugcacaaaccuuuccggcuucucuuauauggagcugaaggucggguacauuagcgccaucaaagugaauggauuuacguguaccggcguugugacagaagcugagaccuauacaaacuucgucggguacgugaccacaaccuuuaagagaaaacacuuccggcccaugccugaugccugccgcgcggcuuauaauuggaagguugccggagacccgagauacgaagagucccuccauaaccccuauccugauuaccacuggcugcggacggugaagaccacaaaagagucucuggucaucauuagccccuccguggccgaccucgauccuuacgacaagagccugcauucucgcguguuucccggcggcaaauguuccgggaucaccgucagcucuacaugcuguuccaccaaucacgauuauacgauuuggaugccggaaaacccuagacuuggaacaagcugcgacaucuucaccaauucucggggcaagcgcgcuuccaaagggggaaagacauguggcuuuguugaugagagagggcuguacaagagccucaaaggagccugcaagcugaaacuuuguggcgugcugggccuccggcugauggacgggaccuggguggcuauucaaaccuccgaugaaaucauucgcugucccccugaccagcuggucaaccuccacgacuuccauucugaugagaucgagcaccuggugguugaggaacuugugaagaaaagagaagagugccuggacgcccucgaaacaaucaugacgaccaagagcgucuccuuucggcgccugagccaucuuagaaaacuggugcccggauucggcaaggcguauacaauuuucaauaagacccucauggaggccgaugcucacuacaaaucuauccggacauggaacgagauuauccccuccaaggggugccugcgcguuggaggcagaugccacccucaugugaauggggucuuuuucaacggaauuauccugggcccggacggccacgugcucauccccgaaaugcagagcucucugcuucaucagcacauggagcugcucgaaagcuccgucauuccucugaugcauccccuugccgauccuucuaccguguuuaaagacggggaugaggcugaagacuucguugaggugcaccuccccgauguccacaagcaaaucagcggaguggaccucggccugccgaauugggggaaauauguucugauuuccgccggagcgcucacggcccugaugcuuacaaucuuucugaugaccuguugccggaagaccaacagagcuggcagcauucagcauucuccuggggagacaggccgcaagguguccgucaccagccacaacggacgggugaucucucucugggaauccuacaaaagcgaguccgaaacaaagcuguga

SEQ ID NO: 223629 - RNA, 1575 nt, Artificial Sequence
  derived and/or modified CDS sequence (opt5) from glycoprotein__RABV__KF663539.1
augaucccccaggugcuucucuucgucccucugcuuguuuuuagcuccugcuucggcaaguuuccgauuuacaccauccccgacaaacuggggccuuggucucccauugauauccaccaucucagcuguccuaacaaucuggugguggaggacgaaggaugcacaaaccuuuccggcuucucuuauauggagcugaaggucggguacauuagcgccaucaaagugaauggauuuacguguaccggcguugugacagaagcugagaccuauacaaacuucgucggguacgugaccacaaccuuuaagagaaaacacuuccggcccaugccugaugccugccgcgcggcuuauaauuggaagauggccggagacccgagauacgaagagucccuccauaaccccuauccugauuaccacuggcugcggacgguuaagaccacaaaagagucucuggugaucauuagccccuccgucgccgaccucgauccuuacgacaagagccugcauucucgcguguuucccggcggcaaauguuccgggaucaccgugagcucuacaugcuguuccaccaaucacgauuauacgauuuggaugccggaaaacccuagacuuggaacaagcugcgacaucuucaccaauucucggggcaagcgcgcuuccaaagggggaaagacauguggcuuuggggaugagagaggacuguacaagagccuccggggcgccugcaaacugaagcuguguggcguccuggggcuccgccugauggacggaaccuggguugugauucaaaccuccgaugaaaucaaauggugcucucccgaccagcuggugaaccuccacgacuuccauagcgaugagauugagcaccuggucguggaggaacuuguuaagaaaagagaagagugccuggacgcucucgaaacaaucaugacgaccaaguccgugagcuuucggcgccugucucaucuuagaaaacuggucccuggcuucgggaaggccuauacaaucuucaauaagacccucauggaggcggaugcccacuacaaauccauucggacauggaacgagaucauucccagcaagggaugucugcgcgugggcgggagaugccacccccauguuaauggaguguuuuucaacggcaucauucugggcccugacgggcacguccucaucccggaaaugcagucuagccugcuucaucagcacauggagcugcucgaauccucugugaucccccugaugcauccucuugcugaucccagcaccgucuuuaaagacggagaugaggccgaagacuucguggagguucaucugccugaugugcacaagcaaauuuccggcgucgaccucgggcugcccaauuggggaaaauaugugcugaucagcgcuggcgcccucacggcgcugaugcuuaugauuuuucugaugacauguugccggaagaccaacagagccgagucuauccagcacuccccgggggaaaccggccgcaagguuagcgugacaucucacaacggacgggucauuuccagcugggaguccuacaaaucugaaagcgagaccaagcucuga

SEQ ID NO: 223630 - RNA, 1575 nt, Artificial Sequence
  derived and/or modified CDS sequence (opt5) from glycoprotein__RABV__KF663540.1
augaucccccaggugcuucucuucgucccucugcuuguuuuuagcuccugcuucggcaaguuuccgauuuacaccauccccgacaaacuggggccuuggucucccauugauauccaccaucucagcuguccuaacaaucuggugguggaggacgaaggaugcacaaaccuuuccggcuucucuuauauggagcugaaggucggguacauuagcgccaucaaagugaauggauuuacguguaccggcguugugacagaagcugagaccuauacaaacuucgucggguacgugaccacaaccuuuaagagaaaacacuuccggcccaugccugaugccugccgcgcggcuuauaauuggaagauggccggagacccgagauacgaagagucccuccauaaccccuauccugauuaccacuggcugcggacgguuaagaccacaaaagagucucuggugaucauuagccccuccgucgccgaccucgauccuuacgacaagagccugcauucucgcguguuucccggcggcaaauguuccgggaucaccgugagcucuacaugcuguuccaccaaucacgauuauacgauuuggaugccggaaaacccuagacuuggaacaagcugcgacaucuucaccaauucucggggcaagcgcgcuuccaaagggggaaagacauguggcuuugucgaugagagagggcuguacaagagccucaccggagccugcaaacugaagcuguguggcguucugggccucucccugauggacgggaccuggguggcuauucaaacaucugaugaaaucaaauggugcagccccgaccagcuggugaaccuccacgacuuccauuccgaugagauugagcaccuggucguggaggaacuuguuaagaaacgggaagagugccuggacgcccucgaaacgaucaugaccacaaagagcgugucuuuucgcagacugucccaucuucggaaacuggucccuggauucggcaaggcguauaccaucuucaauaagacacucauggaggccgaugcucacuacaaaagcauucgcaccuggaacgagaucauucccucuaaggggugucugagagugggaggccggugccacccccauguuaaugggguguuuuucaacggaaucauucugggcccugacggccacguccucaucccggaaaugcagagcucccugcuucaucagcacauggagcugcucgaaucuagcgugaucccccugaugcauccucuugccgaucccuccacggucuuuaaagacggggaugaggcugaagacuucguggagguucaucugccugaugugcacaagcaaauuagcggagucgaccucggccugcccaauugggggaaauaugugcugaucucugccggagcgcucacagcccugaugcuuaugauuuuucugaugaccuguugccgcaagaccaacagagcugaguccauccagcacagcccgggcgaaacagggcggaagguuucugugaccucccacaacggcagagucauuagcuccugggagucuuacaaaagcgaauccgagacaaagcucuga

SEQ ID NO: 223631 - RNA, 1575 nt, Artificial Sequence
  derived and/or modified CDS sequence (opt5) from glycoprotein__RABV__KF663541.1
augaucccccaggugcuucucuucgucccucugcuuguuuuuagcuccugcuucggcaaguuuccgauuuacaccauccccgacaaacuggggccuuggucucccauugauauccaccaucucagcuguccuaacaaucuggugguggaggacgaaggaugcacaaaccuuuccggcuucucuuauauggagcugaaggucggguacauuagcgccaucaaagugaauggauuuacguguaccggcguugugacagaagcugagaccuauacaaacuucgucggguacgugaccacaaccuuuaagagaaaacacuuccggcccaugccugaugccugccgcgcggcuuauaauuggaagauggccggagacccgagauacgaagagucccuccauaaccccuauccugauuaccacuggcugcggacgguuaagaccacaaaagagucucuggugaucauuagccccuccgucgccgaccucgauccuuacgacaagagccugcauucucgcguguuucccggcggcaaauguuccgggaucaccgugagcucuacaugcuguuccaccaaucacgauuauacgauuuggaugccggaaaacccuagacuuggaacaagcugcgacaucuucaccaauucucggggcaagcgcgcuuccaaagggggaaagacauguggcuuugucgaugagagagggcuguacaagagcuccaaaggagccugcaagcucaaacuguguggcguucuuggccugcggcucauggacgggaccuggguggcuauucaaaccucugaugaaaucaaguggugcagccccgaccagcuggugaaccugcacgacuuccauuccgaugagauugagcaccucgucguggaggaacugguuaaaaagcgcgaagagugccuugacgcccuggaaacaaucaugacgaccaaaagcgugucuuuuagacggcucucccaucugcgcaagcuggucccuggauucggcaaggcguauacaaucuucaauaaaacccugauggaggccgaugcucacuacaagagcauuagaacauggaacgagaucauucccucuaaagggugucuccgggugggaggccgcugccacccccauguuaaugggguguuuuucaacggaaucauucugggcccugacggccacguccugaucccggaaaugcagagcucccuccugcaucagcacauggagcuucuggaaucuagcgugaucccccucaugcauccucuggccgaucccuccaccgucuuuaaggacggggaugaggcugaagacuucguggagguucaccuuccugaugugcacaaacaaauuagcggagucgaccugggccuccccaauugggggaaguaugugcugaucucugccggagcgcugacggcccucaugcugaugauuuuucuuaugacauguugcagaaagaccaaccgggcugaguccauccagcauagcccgggcgaaaccgggagaaaaguuucugugacaucccacaacggccgcgucauuagcuccugggagucuuacaagagcggauccgaaaccaaacuguga

SEQ ID NO: 223632 - RNA, 1575 nt, Artificial Sequence
  derived and/or modified CDS sequence (opt5) from glycoprotein__RABV__KF663542.1
auguucccucccgugcugcucuuugucccgcugcuuguuuucagcuccugcuuuggcaaguuccccaucuacaccauuccugacaaacuggggcccuggucuccuaucgauauucaccaucucagcugucccaacaaucuggugguggaggacgaaggaugcacaaaccuuuccggcuuuucuuauauggagcugaaggucggguacaucagcgccauuaaagugaauggauucacguguaccggcguugugacagaagcugagaccuauacaaacuuugucggguacgugaccacaaccuucaagagaaaacacuuucggccuaugccggaugccugccgcgcggcuuauaauuggaagguugccggagaccccagauacgaagagucccuccauaacccuuaucccgauuaccacuggcugcggacggugaagaccacaaaagagucucuggucaucaucagcccuuccguggccgaccucgaucccuacgacaagagccugcauucucgcguguucccgggcggcaaauguuccgggauuaccgucagcucuacaugcuguuccaccaaucacgauuauacgaucuggaugccugaaaaccccagacuuggaacaagcugcgacauuuuuaccaauucucggggcaagcgcgcuuccaaagggggaaagacauguggcuucagagaugagcgggggcuguacaagagccucaaaggagccugcaagcugaaacuuuguggcguucugggccuccgccugauggacgggaccuggguggcuacccagacauccaacgaaaucaaguggugcccucccgaucaacuggugaaucuccacgacuuucauucugacgagauugagcaccuggucguggaggaacuuguuaaaaagagagaagagugccuggaugcccucgaaacgaucaugaccacaaaaagcguguccuuccggcgccugagccaucuuagaaagcugguccccggauucggcaaggcguauaccauuuuuaacaaaacacucauggaggccgacgcucacuacaagucuauccggaccuggaaugagaucauuccuuccaaagggugucugcgcgugggaggcagaugccacccgcauguuaacgggguguucuuuaauggaaucauucugggccccgauggccacguccucaucccugaaaugcagagcucucugcuucaucagcacauggagcugcucgaaagcuccgugauuccccugaugcauccucuugccgaccccucuacggucuucaaggauggggacgaggcugaagauuuuguggagguucaucugccggacgugcacaaacagaucagcggagucgaucucggccugccuaacugggggaaguaugugcugaucuccgccggagcgcucacagcccugaugcuuaccauuuuccugaugaccuguugccggaagacaaacagagcuggcagcauccaacacucucccggggagaccggccgcaaaguuuccgugacaagccacaauggacgggucauuuuucucugggaaucucauaucuccggcagcgagacgaagcuguga

SEQ ID NO: 223633 - RNA, 1575 nt, Artificial Sequence
  derived and/or modified CDS sequence (opt5) from glycoprotein__RABV__KF663543.1
auguucccccaggugcugcucuuugucccucugcuuguuuucagcuccugcuuuggcaaguucccgaucuacaccauucccgacaaacuggggccuuggucucccaucgauauucaccaucucagcuguccuaacaaucuggugguggaggacgaaggaugcacaaaccuuuccggcuuuucuuauauggagcugaaggucggguacaucagcgccauuaaagugaauggauucacguguaccggcguugugacagaagcugagaccuauacaaacuuugucggguacgugaccacaaccuucaagagaaaacacuuucggcccaugccugaugccugccgcgcggcuuauaauuggaagguugccggagacccgagauacgaagagucccuccauaaccccuauccugauuaccacuggcugcggacggugaagaccacaaaagagucucuggucaucaucagccccuccguggccgaccucgauccuuacgacaagagccugcauucucgcguguuccccggcggcaaauguuccgggauuaccgucagcucuacaugcuguuccaccaaucacgauuauacgaucuggaugccggaaaacccuagacuuggaacaagcugcgacauuuuuaccaauucucggggcaagcgcgcuuccaaagggggaaagacauguggcuucgaggaugaaagagggcuguacaagagccucaccggagccugcaaacugaagcuguguggcguucugggccuccggcugauggacgggaccuggguggcuauccaaacauccgaugagauuaaauggugucccccugaccagcuggugaaccuccacgacuuucauucugaugagaucgaacaccuggucguggaggaacuuguuaagaaacgcgaggaaugccuggacgcccucgagacgauuaugaccacaaagagcguguccuucagacggcugagccaucuucgcaaacugguccccggauucggcaaggcguauaccaucuuuaauaagacacucauggaggccgaugcucacuacaaaucuaucagaaccuggaacgaaauuauccccuccaaggggugccugcgggugggaggccgcugccacccucauguuaaugggguguucuuuaacggaauuauccugggcccggacggccacguccucauucccgagaugcagagcucucugcuucaucagcacauggaacugcucgagagcuccgugaucccucugaugcauccccuugccgauccuucuacggucuucaaagacggggaugaagcugaggacuuuguggagguucaccuucccgaugugcacaagcaaaucagcggagucgaccucggccugccgaauugggggaaauaugugcugauuuccgccggagcgcucacagcccugaugcuuaccaucuuccugaugaccuguugcagaaagacaaaccgggcuggcagcauucagcauucuccuggggaaaccggcagaaagguuuccgugacaagccacaacggacgcgucaucucucucugggaguccuacaaaagcggcuccgaaacgaagcuguga

SEQ ID NO: 223634 - RNA, 1575 nt, Artificial Sequence
  derived and/or modified CDS sequence (opt5) from glycoprotein__RABV__KF663544.1
auguucccccaggugcugcucuuugucccucugcuuguuuucagcuccugcuuuggcaaguucccgaucuacaccauucccgacaaacuggggccuuggucucccaucgauauucaccaucucagcuguccuaacaaucuggugguggaggacgaaggaugcacaaaccuuuccggcuuuucuuauauggagcugaaggucggguacaucagcgccauuaaagugaauggauucacguguaccggcguugugacagaagcugagaccuauacaaacuuugucggguacgugaccacaaccuucaagagaaaacacuuucggcccaugccugaugccugccgcgcggcuuauaauuggaagguugccggagacccgagauacgaagagucccuccauaaccccuauccugauuaccacuggcugcggacggugaagaccacaaaagagucucuggucaucaucagccccuccguggccgaccucgauccuuacgacaagagccugcauucucgcguguuccccggcggcaaauguuccgggauuaccgucagcucuacaugcuguuccaccaaucacgauuauacgaucuggaugccggaaaacccuagacuuggaacaagcugcgacauuuuuaccaauucucggggcaagcgcgcuuccaaagggggaaagacauguggcuucgaggaugaaagagggcuguacaagagccucaaaggagccugcaagcugaaacuuuguggcguucugggccuccggcgcauggacgggaccuggguggcuauccaaaccuccgaugagauuaaguggugucccccugaccagcuggugaaccugcacgacuuucauucugaugagaucgaacaccucgucguggaggaacugguuaaaaagagagaggaaugccuugacgcccuggagacaauuaugacgaccaaaagcguguccuuccggcgccucagccaucugagaaaacuuguccccggauucggcaaggcguauacaaucuuuaauaagacccugauggaggccgaugcucacuacaagucuauccggacauggaacgaaauuauccccuccaaagggugccuccgcgugggaggcagaugccacccucauguuaaugggguguucuuuaacggaauuauccugggcccggacggccacguccugauucccgagaugcagagcucucuccugcaucagcacauggaacuucuggagagcuccgugaucccucucaugcauccccuggccgauccuucuaccgucuucaaggacggggaugaagcugaggacuuuguggagguucaccuucccgaugugcacaaacaaaucagcggagucgaccugggccucccgaauugggggaaguaugugcugauuuccgccggagcgcugacggcccucaugcugacaaucuuccuuaugaccuguugccggaagaccaacagagcuggcagcauucagcauucuccuggggaaacaggccgcaaaguuuccgugaccagccacaacggacgggucaucucucugugggaguccuacaagagcggcuccgaaacaaaacucuga

SEQ ID NO: 223635 - RNA, 1575 nt, Artificial Sequence
  derived and/or modified CDS sequence (opt5) from glycoprotein__RABV__KF663545.1
auguucccccaggugcugcucuuugucccucugcuuguuuucagcuccugcuuuggcaaguucccgaucuacaccauucccgacaaacuggggccuuggucucccaucgauauucaccaucucagcuguccuaacaaucuggugguggaggacgaaggaugcacaaaccuuuccggcuuuucuuauauggagcugaaggucggguacaucagcgccauuaaagugaauggauucacguguaccggcguugugacagaagcugagaccuauacaaacuuugucggguacgugaccacaaccuucaagagaaaacacuuucggcccaugccugaugccugccgcgcggcuuauaauuggaagguugccggagacccgagauacgaagagucccuccauaaccccuauccugauuaccacuggcugcggacggugaagaccacaaaagagucucuggucaucaucagccccuccguggccgaccucgauccuuacgacaagagccugcauucucgcguguuccccggcggcaaauguuccgggauuaccgucagcucuacaugcuguuccaccaaucacgauuauacgaucuggaugccggaaaacccuagacuuggaacaagcugcgacauuuuuaccaauucucggggcaagcgcgcuuccaaagggggaaagacauguggcuucggggaugagagaggacuguacaagagccucaaaggcgccugcaagcugaaacuuuguggcguucuggggcuccggcugauggacggaaccuggguggcuauccaaaccuccgaugaaauuaaguggugucccccugaccagcuggugaaccuccacgacuuucauucugaugagaucgagcaccuggucguggaggaacuuguuaaaaagcgcgaagagugccuggacgcccucgaaacaauuaugacgaccaaaagcguguccuucagacggcugagccaucuucgcaagcugguccccggcuucgggaaggcguauacaaucuuuaauaaaacccucauggaggccgaugcucacuacaagucuaucagaacauggaacgagauuauccccuccaaaggaugccugcgggugggcgggcgcugccacccucauguuaauggaguguucuuuaacggcauuauccugggcccggacgggcacguccucauucccgaaaugcagagcucucugcuucaucagcacauggagcugcucgaaagcuccgugaucccucugaugcauccccuugccgauccuucuaccgucuucaaggacggagaugaggcugaagacuuuguggagguucaucugcccgaugugcacaaacaaaucagcggcgucgaccucgggcugccgaauuggggaaaguaugugcugauuuccgccggcgcgcucacggcccugaugcuuaugaucuuccugaugacauguugcagaaagaccaaccgggcugagagcauucagcacucuccuggggaaaccggcagaaaaguuuccgugacaagccacaacggacgcgucaucucuuccugggagagcuacaaguccggcucugaaaccaaacucuga

SEQ ID NO: 223636 - RNA, 1575 nt, Artificial Sequence
  derived and/or modified CDS sequence (opt5) from glycoprotein__RABV__KF663546.1
auguucccccaggugcugcucuuugucccucugcuuguuuucagcuccugcuuuggcaaguucccgaucuacaccauucccgacaaacuggggccuuggucucccaucgauauucaccaucucagcuguccuaacaaucuggugguggaggacgaaggaugcacaaaccuuuccggcuuuucuuauauggagcugaaggucggguacaucagcgccauuaaagugaauggauucacguguaccggcguugugacagaagcugagaccuauacaaacuuugucggguacgugaccacaaccuucaagagaaaacacuuucggcccaugccugaugccugccgcgcggcuuauaauuggaagguugccggagacccgagauacgaagagucccuccauaaccccuauccugauuaccacuggcugcggacggugaagaccacaaaagagucucuggucaucaucagccccuccguggccgaccucgauccuuacgacaagagccugcauucucgcguguuccccggcggcaaauguuccgggauuaccgucagcucuacaugcuguuccaccaaucacgauuauacgaucuggaugccggaaaacccuagacuuggaacaagcugcgacauuuuuaccaauucucggggcaagcgcgcuuccaaagggggaaagacauguggcuucguugaugagagagggcuguacaagagccucaaaggagccugcaagcugaaacuuuguggcgugcugggccuccggcugauggacgggaccuggguggcuauccaaaccuccgaugaaauuaaguggugucccccugaccagcuggucaaccuccacgacuuucauucugaugagaucgagcaccuggugguugaggaacuugugaaaaagcgcgaagagugccuggacgcccucgaaacaauuaugacgaccaaaagcgucuccuucagacggcugagccaucuucgcaagcuggugcccggauucggcaaggcguauacaaucuuuaauaaaacccucauggaggccgaugcucacuacaagucuaucagaacauggaacgagauuauccccuccaaagggugccugcggguuggaggccgcugccacccucaugugaauggggucuucuuuaacggaauuauccugggcccggacggccacgugcucauucccgaaaugcagagcucucugcuucaucagcacauggagcugcucgaaagcuccgucaucccucugaugcauccccuugccgauccuucuaccguguucaaggacggggaugaggcugaagacuuuguugaggugcaucugcccgauguccacaaacaaaucagcggaguggaccucggccugccgaauugggggaaguauguucugauuuccgccggagcgcucacggcccugaugcuuccuaucuuccugaugacauguugcagaaagaccaaccgggcuggcagcauucagcccucuccuggggagaccggcagaaaaguguccgucacaagccacaacggacgcgugaucucucucugggaauccuacaagagcggcuccgagaccaaacuguga

SEQ ID NO: 223637 - RNA, 1575 nt, Artificial Sequence
  derived and/or modified CDS sequence (opt5) from glycoprotein__RABV__KF709069.1
auggugccccaggcccuucucuucgucccucugcuuguuuuuagcaugugcuucggcaaguuuccgaucuacaccauucccgacaaacuggggccuuggucccccaucgauauucaccaucucucuuguccuaacaaucuggugguggaggacgaaggaugcacaaaccuuagcggcuucuccuauauggagcugaaggucggguacaucucugcuauuaaagugaauggauuuacguguaccggcguugugacagaagccgagaccuauacaaacuucgucggguacgugaccacaauguuuaagagaaaacacuuccggcccaccccugaugcgugccgcgcugccuauaauuggaagauggccggagacccgagauacgaagagagccuccauaaccccuauccugauuaccacuggcugcggacgguuaagaccacaaaagagucccuggugaucaucucucccagcgucgcugaccucgauccuuacgacaagucccugcauagccgcguguuucccaauggcaaauguucuggcauuaccaucuccagcacauauugcccgaccaaccacgauuacacgauuuggcuuccugaaaaucccagacuggggacaucuugugacaucuucaccaacucccggggaaagcgcgccagcaaaggcucuaagacaugcggguuuguggaugagagaggacucuauaagucccugaaaggcgcuuguaagcugaaacugugcgggguccucggacugcggcugauggacggcaccuggguugccaugcaagcgagcgaugaaaccaagugguguccucccgaccagcucgugaaucugcacgacuuccgcuccgaugagauugagcauuuuguggucgaggaacuugugaaaaagagagaagagugccuggacgcccucgaaucuaucaugacaacgaaaagcguuuccuuccggcgccugagccaccuuagaaagcuggugcccggcuucgggaaggcuuacaccauuuuuaacaaaacacucauggaggccgaugcucauuauaagucuguccggaccuggaaugagaucaucccuuccaaaggaugccugcgcgugggcgggagaugucacccgcacguuaacggaguguucuuuaauggcauuauccuggggcccgacggacauguccucauuccugaaaugcagagcucucugcuucagcaacacauggagcugcucgaaagcuccgugaucccccugaugcauccucuugccgaucccucuacagucuucaaggacggcgaugaggcggaaaacuuuguggagguucaucugccggacgugcacaaacagauuagcggcgucgaucucgggcugccuaacuggggaaaguacgugcugguuuccgccggcgugcucaucgcucugaugcuuaucauuuuccugaugaccugcugugggcgggucaauagacccaagagcacgcagcacaaccucggaggcacagggcgcgaggugucugugaccccucaguccggcaaaguuaucagcucuugggaauccuauaagagcggaggcgagacccggcuguga

SEQ ID NO: 223638 - RNA, 1575 nt, Artificial Sequence
  derived and/or modified CDS sequence (opt5) from glycoprotein__RABV__KF709070.1
auggugccccaggcccuucucuucgucccucugcuuguuuuuagcaugugcuucggcaaguuuccgaucuacaccauucccgacaaacuggggccuuggucccccaucgauauucaccaucucucuuguccuaacaaucuggugguggaggacgaaggaugcacaaaccuuagcggcuucuccuauauggagcugaaggucggguacaucucugcuauuaaagugaauggauuuacguguaccggcguugugacagaagccgagaccuauacaaacuucgucggguacgugaccacaauguuuaagagaaaacacuuccggcccaccccugaugcgugccgcgcugccuauaauuggaagauggccggagacccgagauacgaagagagccuccauaaccccuauccugauuaccacuggcugcggacgguuaagaccacaaaagagucccuggugaucaucucucccagcgucgcugaccucgauccuuacgacaagucccugcauagccgcguguuucccaauggcaaauguucuggcauuaccaucuccagcacauauugcccgaccaaccacgauuacacgauuuggcuuccugaaaaucccagacuggggacaucuugugacaucuucaccaacucccggggaaagcgcgccagcaaaggcucuaagacaugcggguuuguggaugagagaggacucuauaagucccugaaaggcgcuuguaagcugaaacugugcgggguccucggacugcggcugauggacggcaccuggguugccaugcaagcgagcgaugaaaccaagugguguccucccgaccagcucgugaaucugcacgacuuccgcuccgaugagauugagcaucuuguggucgaggaacuggugaaaaagagagaagagugccucgacgcccuggaaucuaucaugacaacgaaaagcguuuccuuucggcgccuuagccaccugagaaagcucgugcccggcuucgggaaggcuuacaccauuuucaacaaaacacugauggaggccgaugcucauuauaagucuguccggaccuggaaugagaucaucccuuccaaaggaugccugcgcgugggcgggagaugucacccgcacguuaacggaguguuuuucaauggcauuauccucgggcccgacggacauguccugauuccugaaaugcagagcucucuucugcagcaacacauggagcuccuggaaagcuccgugaucccccuuaugcauccucuggccgaucccucuacagucuuuaaggacggcgaugaggcggaaaacuucguggagguucaccucccggacgugcauaaacagauuagcggcgucgaucuggggcugccuaacuggggaaaguacgugcucguuuccgccggcgugcugaucgcucuuaugcugaucauuuuucucaugaccugcugugggcgggucaauagacccaagagcacgcagcacaaccugggaggcacagggcgcgaggugucugugaccccucaguccggcaaaguuaucagcucuugggaauccuauaagagcggaggcgagacccggcuguga

SEQ ID NO: 223639 - RNA, 1575 nt, Artificial Sequence; identical to SEQ ID NO: 223179
  derived and/or modified CDS sequence (opt5) from glycoprotein__RABV__KF709071.1

SEQ ID NO: 223640 - RNA, 1575 nt, Artificial Sequence; identical to SEQ ID NO: 223179
  derived and/or modified CDS sequence (opt5) from glycoprotein__RABV__KF709072.1

SEQ ID NO: 223641 - RNA, 1575 nt, Artificial Sequence
  derived and/or modified CDS sequence (opt5) from glycoprotein__RABV__KF709074.1
auggugccccaggcccuucucuucgucccucugcuuguuuuuccgaugugcuucggcaaguuucccaucuacaccauuccugacaaacuggggcccuggagcccuaucgauauucaccaucucuccugucccaacaaucuggugguggaggacgaaggaugcacaaaccuuucuggcuucagcuauauggagcugaaggucggguacaucuccgcuauuaaagugaauggauuuacguguaccggcguugugacagaagccgagaccuauacaaacuucgucggguacgugaccacaaccuuuaagagaaaacacuuccggccuacgccggaugcgugccgcgcugccuauaauuggaagauggccggagaccccagauacgaagagucucuccauaacccuuaucccgauuaccacuggcugcggaccguuaagacaaccaaagagagccuggugaucaucuccccuucugucgcugaccucgaucccuacgacaagagccugcauucccgcguguuuccgaauggcaaauguagcggcauuacaaucucuuccaccuauugcccuacgaaccacgauuacacaauuuggcuucccgaaaauccuagacuggggaccagcugugacaucuucacaaacucucggggaaagcgcgccuccaaaggcagcaagaccugcggguuuguggaugagagaggacucuauaagucucugaaaggcgcuuguaagcugaaacugugcgggguccucggacugcggcugauggacggcaccuggguugccaugcaagcguccgaugaaacaaagugguguccucccgaccagcucgugaaucugcacgacuuccgcagcgaugagauugagcaucuuguggucgaggaacuggugaaaaagagagaagagugccucgacgcccuggaauccaucaugacgaccaaaucuguuagcuuucggcgccuuucccaccugagaaagcucgugcccggcuucgggaaggcuuacacaauuuucaacaaaacccugauggaggccgaugcucauuauaagagcguccggacauggaaugagaucaucccgucuaaaggaugccugcgcgugggcgggagauguuacccccacguuaacggaguguuuuucaauggcauuauccucgggccugacggacacguccugauucccgaaaugcaguccagccuucugcagcaacauauggagcuccuggaaucuagcgugaucccucuuaugcacccccuggccgauccguccaccgucuuuaaggacggcgaugaggcggaaaacuucguggagguucaucucccugacgugcacaaacagauuucuggcgucgaucuggggcugcccaacuggggaaaguaugugcucguuagcgccggcgugcugaucgcucuuaugcugaucauuuuucucaugacgugcugugggcgggucaauagaccuaaguccacacagcauaaccugggaggcaccgggcgcgaggugagcgugacaccccagucuggcaaaguuaucuccagcugggaaucuuacaaguccggaggcgagacccggcuguga

SEQ ID NO: 223642 - RNA, 1575 nt, Artificial Sequence
  derived and/or modified CDS sequence (opt5) from glycoprotein__RABV__KF709075.1
auggugccccaggcccuucucuucgucccucugcuuguuuuuagcaugugcuucggcaaguuuccgaucuacaccauucccgacaaacuggggccuuggucccccaucgauauucaccaucucucuuguccuaacaaucuggugguggaggacgaaggaugcacaaaccuuagcggcuucuccuauauggagcugaaggucggguacaucucugcuauuaaagugaauggauuuacguguaccggcguugugacagaagccgagaccuauacaaacuucgucggguacgugaccacaaccuuuaagagaaaacacuuccggcccacgccugaugcgugccgcgcugccuauaauuggaagauggccggagacccgagauacgaagagagccuccauaaccccuauccugauuaccacuggcugcggaccguuaagacaaccaaagagucccuggugaucaucucucccagcgucgcugaccucgauccuuacgacaagucccugcauagccgcguguuucccaauggcaaauguucuggcauuacaaucuccagcaccuauugcccgacgaaccacgauuacacaauuuggcuuccugaaaaucccagacuggggaccucuugugacaucuucacaaacucccggggaaagcgcgccagcaaaggcucuaagaccugcggguuuguggaugagagaggacucuauaagucccugaaaggcgcuuguaagcugaaacugugcgggguccucggacugcggcugauggacggcaccuggguugccaugcaagcgagcgaugaaacaaagugguguccucccgaccagcucgugaaucugcacgacuuccgcuccgaugagauugagcaucuuguggucgaggaacuggugaaaaagagagaagagugccucgacgcccuggaaucuaucaugacgaccaaaagcguuuccuuucggcgccuuagccaccugagaaagcucgugcccggcuucgggaaggcuuacacaauuuucaacaaaacccugauggaggccgaugcucauuauaagucuguccggacauggaaugagaucaucccuuccaaaggaugccugcgcgugggcgggagaugucacccgcacguuaacggaguguuuuucaauggcauuauccucgggcccgacggacauguccugauuccugaaaugcagagcucucuucugcagcaacacauggagcuccuggaaagcuccgugaucccccuuaugcauccucuggccgaucccucuaccgucuuuaaggacggcgaugaggcggaaaacuucguggagguucaccucccggacgugcauaaacagauuagcggcgucgaucuggggcugccuaacuggggaaaguacgugcucguuuccgccggcgugcugaucgcucuuaugcugaucauuuuucucaugacgugcugugggcgggucaauagacccgagagcacacagcacaaccugggaggcaccgggcgcgaagugucugugaccccucaguccggcaagguuaucagcucuugggaguccuauaaaagcggaggcgaaacacggcuguga

SEQ ID NO: 223643 - RNA, 1575 nt, Artificial Sequence; identical to SEQ ID NO: 223642
  derived and/or modified CDS sequence (opt5) from glycoprotein__RABV__KF709076.1

SEQ ID NO: 223644 - RNA, 1575 nt, Artificial Sequence
  derived and/or modified CDS sequence (opt5) from glycoprotein__RABV__KF709077.1
auggugccccaggcccugcuguucgucccucugcuuguuuuuagcaugugcuucggcaaguuuccgaucuacaccauucccgacaaaccugggcccugguccccuaucgauauucaccaucugucuugucccaacaaucucgugguggaggacgaaggaugcacaaaccugagcggcuucuccuauauggagcuuaaggucggguacaucucugcuauuaaagugaauggauuuacguguaccggcguugugacagaagccgagaccuauacaaacuucgucggguacgugaccacaaccuuuaagagaaaacacuuccggccuacgccggaugcgugccgcgcugccuauaauuggaagauggccggagaccccagauacgaagagagccugcauaacccuuaucccgauuaccacuggcuccggaccguuaagacaaccaaagagucccuggugaucaucucuccuagcgucgcugaccuggaucccuacgacaagucccuccauagccgcguguuuccgaaugaaaaauguucuggcauuacaaucuccagcaccuauugcccuacgaaccacgauuacacaauuuggcugcccgagaauccuagacuuggcaccucuugugacaucuucacaaacucccgggggaagcgcgccagcaaaggaucuaagaccugcggcuuuguggaugaaagagggcuguauaagucccucaaaggagcuuguaagcugaaacuuugcggcguccuggggcuccggcugauggacggaaccuggguugccaugcaagcgagcgaugagacaaagugguguccucccgaccagcuggugaaucuccacgacuuccgcuccgaugagauugaacaucugguggucgaggaacuugugaaaaagagagaggaaugccuggacgcccucgagucuaucaugacgaccaaaagcguuuccuuucggcgccugagccaccuuagaaagcuggugcccggcuucggcaaggcuuacacaauuuucaacaaaacccucauggaggccgaugcucauuauaagucuguccggacauggaaugaaaucaucccguccaaagggugccugcgcgugggaggcagaugucacccccacguuaacgggguguuuuucaauggaauuauccugggcccugacgggcauguccucauucccgagaugcagagcucucugcuucagcaacacauggaacugcucgagagcuccgugaucccucugaugcauccccuugccgauccgucuaccgucuuuaaggacggagaugaagcggagaacuucguggagguucaccucccugacgugcauaaacagauuagcggcgucgaucucggccugcccaacugggggaaguacgugcugguuuccgccggagugcucaucgcucugaugcuuaucauuuuucugaugacgugcuguggccgggucaauagaccugaaagcacacagcacaaccucgggggaaccggccgcgaggugucugugacaccccaguccgggaagguuaucagcucuugggaauccuauaaaagcggcggagagacccggcuguga

SEQ ID NO: 223645 - RNA, 1575 nt, Artificial Sequence
  derived and/or modified CDS sequence (opt5) from glycoprotein__RABV__KF709078.1
auggugccccaggcccugcuguucgucccucugcuuguuuuuagcaugugcuucggcaaguuuccgaucuacaccauucccgacaaacuggggccuuggucccccaucgauauucaccaucucucuuguccuaacaaucuggugguggaggacgaaggaugcacaaaccuuagcggcuucuccuauauggagcugaaggucggguacaucucugcuauuaaagugaauggauuuacguguaccggcguugugacagaagccgagaccuauacaaacuucgucggguacgugaccacaaccuuuaagagaaaacacuuccggcccacgccugaugcgugccgcgcugccuauaauuggaagauggccggagacccgagauacgaagagagccuccauaaccccuauccugauuaccacuggcugcggaccguuaagacaaccaaagagucccuggugaucaucucucccagcgucgcugaccucgauccuuacgacaagucccugcauagccgcgugcuucccaauggcaaauguucuggcacaaccacguccagcacauauugcccgaccaaccacgauuacacaauuuggcugccugaaaaucccagacucgggaccucuugugacaucuuuaccaacucccggggaaagcgcgccagcaaaggcucuaagacaugcggguucguggaugagagaggacuguauaagucccuuaaaggcgcuuguaagcugaaacucugcgggguccugggacugcggcucauggacggcacguggguugccaugcaagcgagcgaugaaaccaagugguguccucccgaccagcuggugaaucuucacgacuuucgcuccgaugagauugagcaucugguggucgaggaacucgugaaaaagagagaagagugccuggacgcccuugaaucuaucaugacaaccaaaagcguuuccuuccggcgccugagccaccucagaaagcuggugcccggcuuugggaaggcuuacacaauuuucaacaaaacccugauggaggccgaugcucauuauaagucuguccggacguggaaugagaucauuccuuccaaaggaugccuccgcgugggcgggagaugucacccgcacguuaacggaguguucuuuaauggcaucauccuggggcccgacggacauguccuuauuccugaaaugcagagcucucugcuccagcaacacauggagcugcuugaaagcuccgugaucccccugaugcauccucucgccgaucccucuacagucuucaaggacggcgaugaggcggaaaacuuuguggagguucaccucccggacgugcauaaacagauuagcggcgucgaucuggggcucccuaacuggggaaaguacgugcugguuuccgccggcgugcuuaucgcucugaugcucauuaucuuccugaugaccugcugugggcgggucaauagacccgagagcacccagcacaaccugggaggcacagggcgcgaagugucugugaccccucaguccggcaagguuaucagcucuugggaguccuauaaaagcggaggcgaaacacggcuuuga

SEQ ID NO: 223646 - RNA, 1575 nt, Artificial Sequence
  derived and/or modified CDS sequence (opt5) from glycoprotein__RABV__KF709080.1
auggugccccaggcccuucucuucgucccucugcuuguuuuuagcaugugcuucggcaaguuuccgaucuacaccauucccgacaaacuggggccuuggucccccaucgauauucaccaucucucuuguccuaacaaucuggugguggaggacgaaggaugcacaaaccuuagcggcuucuccuauauggagcugaaggucggguacaucucugcuauuaaagugaauggauuuacguguaccggcguugugacagaagccgagaccuauacaaacuucgucggguacgugaccacaaccuuuaagagaaaacacuuccggcccacgccugaugcgugccgcgcugccuauaauuggaagauggccggagacccgagauacgaagagagccuccauaaccccuauccugauuaccacuggcugcggaccguuaagacaaccaaagagucccuggugaucaucucucccagcgucgcugaccucgauccuuacgacaagucccugcauagccgcguguuucccaauggcaaauguucuggcauuacaaucuccagcaccuauugcccgacgaaccacgauuacacaauuuggcuuccugaaaaucccagacuggggaccucuugugacaucuucacaaacucccggggaaagcgcgccagcaaaggcucuaagaccugcggguuuguggaugagagaggacucuauaagucccugaaaggcgcuuguaagcugaaacugugcgggguccucggacugcggcugauggacggcaccuggguugccaugcaagcgagcgaugaaacaaagugguguccucccgaccagcucgugaaucugcacgacuuccgcuccgaugagauugagcaucuugccguggaggaacuggucaaaaagagagaagagugccucgacgcucuggaaucuaucaugacgaccaaaagcguguccuuucggcgccuuagccaccugagaaagcucguucccggcuucgggaaggccuacacaauuuucaacaaaacccugauggaggcugaugcccauuauaagucugugcggacauggaaugagaucaucccuuccaaaggaugccugcgcgucggcgggagaugucacccgcacgugaacggaguguuuuucaauggcauuauccucgggcccgacggacauguucugauuccugaaaugcagagcucucuucugcagcaacacauggagcuccuggaaagcuccgucaucccccuuaugcauccucuggcggaucccucuaccguguuuaaggacggcgaugaggccgaaaacuucgucgaggugcaccucccggacguucauaaacagauuagcggcguggaucuggggcugccuaacuggggaaaguacguccucguguccgcuggcguucugaucgcccuuaugcugaucauuuuucucaugacgugcugugggcgggugaauagacccgagagcacacagcacaaccugggaggcaccgggcgcgaagucucugugaccccucaguccggcaaggugaucagcucuugggaguccuauaaaagcggaggcgaaacacggcuguga

SEQ ID NO: 223647 - RNA, 1575 nt, Artificial Sequence; identical to SEQ ID NO: 223458
  derived and/or modified CDS sequence (opt5) from glycoprotein__RABV__KF726852.1

SEQ ID NO: 223648 - RNA, 1575 nt, Artificial Sequence
  derived and/or modified CDS sequence (opt5) from glycoprotein__RABV__KF726853.1
augaucagccaggccuuccuguuugugccccuccuggcuuucuccccuugcuuuggcaaguucccgauuuacaccauccccgacaaacuugggccuuggucucccauugauauccaccaucugagcuguccuaacaaucucgucguugaggacgaaggaugcacaaaccuguccggcuuuucuuauauggagcuuaaggugggguacauuagcgccaucaaagugaauggauucacguguaccggcgucgugacagaagcggagaccuauacaaacuuuguuggguacgugaccacaaccuucaagagaaaacacuuucggcccaugccugaugcuugccgcacggccuauuccuggaagauggccggagacccgagauacgaagagucucugcauaaucccuauccugauuaccacuggcuccggaccgucaagacaaccaaagagagccuggugaucauuucccccagcguugcugaccuggauccuuacgacaagucucuccauucccgcguguuccccggcggcaaauguagcgggcugacagucucuuccacgugcuguagcaccaaccacgauuauacaaucuggaugccggaaaauccuagacuuggaaccucuugcgacauuuuuacaaacucccggggcaagcgcgccagcaaagggggaaagaccuguggcuucguggaugagagagggcuguacaagucccucaaaggagcuugcaagcugaaacuuuguggcgugucuggccugcggcucauggacgggaccugggucgccauccaaacaagcgaugaaauuaaguggugcucccccgaccagcugguuaaucugcacgaccuccauagcgaugagaucgagcaccuggugguggaggaacuugucaaaaagcgcgaagagugccuggacgcgcucgaaucuauuaugacgaccaaauccgugagcuuuagacggcugucucaucuucgcaagcugguuccuggauucggcaaggccuauacaaucuucaacaaaacccucauggaggcugaugcccacuacaagagcaucagaacauggaaugagauuauccccuccaaagggugucugcgggugggaggccgcugccacccccaugucaacgggguguuuuucaauggaauuauccugggcccugacggccacguucucauuccggaaaugcagucuagccugcuucaucagcacauggagcugcucgaauccagcgugaucccccugaugcauccucuugcugaucccucuaccgucuuuaaggacggggaugaggccgaagacuucguggagguccaucugccugaugcgcacaaacaaaucuccggaguggaccucggccugcccaacugggggaaguauguucugaugagcgccggagcucucacggcccugaugcuuaugauuuuucugaugacauguugcagaaagaccaaucgggcugagucuaugccgcacuccccuggcgaaaccgggagaaaagugagccucacaucccacaacggccgcgucaucucuagcugggaguccuacaagucuggaggcgaaaccaaacuguga

SEQ ID NO: 223649 - RNA, 1575 nt, Artificial Sequence
  derived and/or modified CDS sequence (opt5) from glycoprotein__RABV__KJ004416.1
augaucccccaggugcugcuguucgucccucugcuuguuuuuagcuccugcuucggcaaguuuccgauuuacaccauccccgacaaacuggggccuuggucucccauugauauccaccaucucagcuguccuaacaaucuggugguggaggacgaaggaugcacaaaccuuuccggcuucucuuauauggagcugaaggucggguacauuagcgccaucaaagugaauggauuuacguguaccggcguugugacagaagcugagaccuauacaaacuucgucggguacgugaccacaaccuuuaagagaaaacacuuccggcccaugccugaugccugccgcgcggcuuauaauuggaagauggccggagacccgagauacgaagagucccuccauaaccccuauccugauuaccacuggcugcggacgguuaagaccacaaaagagucucuggugaucauuagccccuccgucgccgaccucgauccuuacgacaagagccugcauucucgcguguuucccggcggcaaauguuccgggaucaccgugagcucuacaugcuguuccaccaaucacgauuauacgauuuggaugccggaaaacccuagacuuggaacaagcugcgacaucuucaccaauucucggggcaagcgcgcuuccaaagggggaaagacauguggcuuugucgaugagagagggcuguacaagagccucaaaggagccugcaagcugaaacuuuguggcguucugggccuccggcugauggacgggaccuggguggcuauucaaaccuccgaugaaacaaaguggugcucucccgaccagcuggugaaccuccacgacuuccauagcgaugagaucgagcaccuggucguggaggaacuuguuaaaaagcgcgaagagugccuggacgcccucgaaacgauuaugaccacaaaauccgugagcuuuagacggcugucucaucuucgcaagcuggucccuggauucggcaaggcguauaccaucuucaauaaaacacucauggaggccgaugcucacuacaaguccaucagaaccuggaacgagauuauccccagcaaagggugucugcgggugggaggccgcugccacccccauguuaaugggguguuuuucaacggaauuauccugggcccugacggccacguccucauuccggaaaugcagucuagccugcuucaucagcacauggagcugcucgaauccucugugaucccccugaugcauccucuugccgaucccagcacggucuuuaaggacggggaugaggcugaagacuucguggagguucaccucccugaugugcacaaacaaaucuccggagucgaccucggccugcccaauugggggaaguaugugcugauuagcgccggagcgcucacagcccugauguuuaccaucuuccuuaugaccuguugcagaaagacaaaccgggcuggcucuauucagcuguccccgggggagaccggcagaaaaguuagcgugacaucucauaacggacgcgucaucuccagcugggaauccuacaagucuggcagcgagacgaaacucuga

SEQ ID NO: 223650 - RNA, 1575 nt, Artificial Sequence
  derived and/or modified CDS sequence (opt5) from glycoprotein__RABV__KJ174608.1
augaucccccaggcccugcucagcgugccucugcuuauuuccucucugugcuucggcaaguuuccgaucuacaccauucccgagaaacucgggccuuggagccccaucgacauucaccaucuguccuguccuaacaaucuugucguugaagaugagggaugcaacucucugagcggcuucuccuauauggaacucaaggugggguacaucucugcuaucaaagugaauggauuuacauguacgggcgucgugaccgaggccgaaacauauaccaacuucguuggguacgugacaaccacauuuaagagaaaacacuuccggcccaugccugacgcgugccgcgcugccuauaauuggaagaccgccggagauccgagauacgaggagagccugcauaaccccuauccugacuaccacuggcugcggacggucaagaccacaaaagaaucccucauuaucauuagccccucuguggcugaucuggacccuuacgauaagucccuucauagccgcaucuuucccggcggcaaaugucuggggauuaccaucucuuccacauauugcagcaccaaucacgacuacacgauuuggaugccggaggaagccagacucggaacaucuugugauaucuucaccaacuccaagggcaaacgggcuagcaaagggggacgcacaugcggcuuuguugacgagagagggcuguauaagucccuuaagggagccuguaagcugaaacucugcggcgugccuggccugcggcugauggaugggaccugggucgcgauccaaacccccaaugagacaaagugguguucuccugaccagcucgugaacgugcacgauuuccgcagcgacgaaauugagcaucuggucguugaggaacuuaucagaaaacgggaagagugccuggacgcccucgaguccauuaugacgaccaagagcgugucuuuucgcagacuguccaaucuucggaaacuggugcccggauucggcaaggcuuacacaaucuuuaacaagacccucauggaagccgaugcucacuauaaaagcguccgcacauggaaugagauuauccccucuagagggugccugaaggugggaggccggugucauccucacguuaacgggguguucuucaauggaaucauucugggcccggacggccacauccucauucccgaaaugcagagcucccugcuucagcaacauauggagcugcucgaaucuagcgucaucccucugauucacccccuugccgauccuuccaccguguuuaaagacggggaugaggcggaggacuucguugaagugcaucugcccgauguccaccaacaggugagcggagucgaccucggccugccggauugggggaaguacgugcugaugucugccggagcucucgccacgguuaugcugacaaucuuucuuauuaccugcuguagacgcgugaaacggaccgaguccauccagcagagccugggcgaaucugggagaaaggucuccgugacaccucagaacggcaagguuaugagcuccugggaguauuacaaaucuggaggcgggacccgccucuga

SEQ ID NO: 223651 - RNA, 1575 nt, Artificial Sequence; identical to SEQ ID NO: 223487
  derived and/or modified CDS sequence (opt5) from glycoprotein__RABV__KJ174609.1

SEQ ID NO: 223652 - RNA, 1575 nt, Artificial Sequence
  derived and/or modified CDS sequence (opt5) from glycoprotein__RABV__KJ174615.1
augaucccccaggcccugcucagcgugccucugcuuauuuccucucugugcuucggcaaguuuccgaucuacaccauucccgagaaacucgggccuuggagccccaucgacauucaccaucuguccuguccuaacaaucuugucguugaagaugagggaugcaacucucugagcggcuucuccuauauggaacucaaggugggguacaucucugcuaucaaagugaauggauuuacauguacgggcgucgugaccgaggccgaaacauauaccaacuucguuggguacgugacaaccacauuuaagagaaaacacuuccggcccauggcggacgcuugccgcgccgccuauaauuggaagaccgcuggagauccuagauacgaggagagccugcauaacccguaucccgacuaccacuggcugcggacggucaagaccacaaaagaaucccucauuaucauuagcccuucuguggccgaucuggaccccuacgauaagucccuucauagccgcaucuuuccuggcggcaaaugucuggggauuaccaucucuuccacauauugcagcaccaaucacgacuacacgauuuggaugcccgaggaagcuagacucggaacaucuugugauaucuucaccaacuccaagggcaaacgggccagcaaagggggacgcacaugcggcuuuguugacgagagagggcuguauaagucccuuaagggagcguguaagcugaaacucugcggcgugccgggccugcggcugauggaugggaccugggucgccauccaaaccccuaaugagacaaagugguguucucccgaccagcucgugaacgugcacgauuuccgcagcgacgaaauugagcaucuggucguugaggaacuuaucagaaaacgggaagagugccuggacgcucucgaguccauuaugacgaccaagagcgugucuuuucgcagacuguccaaucuucggaaacuggugccuggauucggcaaggccuacacaaucuuuaacaagacccucauggaagcugaugcccacuauaaaagcguccgcacauggaaugagauuauccccucuagagggugccugaaggugggaggccggugucauccccacguuaacgggguguucuucaauggaaucauucugggcccugacggccacauccucauuccggaaaugcagagcucccugcuucagcaacauauggagcugcucgaaucuagcgucaucccccugauucacccucuugcggaucccuccaccguguuuaaagacggggaugaggccgaggacuucguugaagugcaucugccugauguccaccaacaggugagcggagucgaccucggccugcccgauugggggaaguacgugcugaugucugcuggagcccucgcuacgguuaugcugacaaucuuucuuauuaccugcuguagacgcgugaaacggaccgaguccauccagcagggcccgggggaaagcggcagaaagcugucugucacaccucagaacggaaaggugauguccagcugggaguauuacaaauccggcgggggaacccgccucuga

SEQ ID NO: 223653 - RNA, 1575 nt, Artificial Sequence
  derived and/or modified CDS sequence (opt5) from glycoprotein__RABV__KJ174616.1
augaucccccaggcccugcucagcgugccucugcuuaucuccucucugugcuucggcaaguuuccgaucuacaccauucccgagaaacucgggccuuggagccccaucgacauucaccaucuguccuguccuaacaaucuugucguugaagaugagggaugcaacucucugagcggcuucuccuauauggaacucaaggugggguacaucucugcuaucaaagugaauggauuuacauguacgggcgucgugaccgaggccgaaacauauaccaacuucguuggguacgugacaaccacauuuaagagaaaacacuuccggcccaugccugacgcgugccgcgcugccuauaauuggaagaccgccggagauccgagauacgaggagagccugcauaaccccuauccugacuaccacuggcugcggacggucaagaccacaaaagaaucccucauuaucauuagccccucuguggcugaucuggacccuuacgauaagucccuucauagccgcaucuuucccggcggcaaaugucuggggauuaccaucucuuccacauauugcagcaccaaucacgacuacacgauuuggaugccggaggaagccagacucggaacaucuugugauaucuucaccaacuccaagggcaaacgggcuagcaaagggggacgcacaugcggcuuuguugacgagagagggcuguauaagucccuuaagggagccuguaagcugaaacucugcggcgugccuggccugcggcugauggaugggaccugggucgcgauccaaacccccaaugagacaaagugguguucuccugaccagcucgugaacgugcacgauuuccgcagcgacgaaauugagcaucuggucguugaggaacuuaucagaaaacgggaagagugccuggacgcccucgaguccauuaugacgaccaagagcgugucuuuucgcagacuguccaaucuucggaaacuggugcccggauucggcaaggcuuacacaaucuuuaacaagacccucauggaagccgaugcucacuauaaaagcguccgcacauggaaugagauuauccccucuaaggggugccugaaagugggaggcagaugucauccucacguuaacgggguguucuucaauggaaucauucugggcccggacggccacauccucauucccgaaaugcagagcucccugcuucagcaacauauggagcugcucgaaucuagcgucaucccucugauucacccccuugccgauccuuccaccguguuuaaggacggggaugaggcggaggacuucguugaagugcaucugcccgauguccaccaacaggugagcggagucgaccucggccugccggauugggggaaauacgugcugaugucugccggagcucucgccacgguuaugcugacaaucuuucuuauuaccugcugucggagagugaagcgcaccgaguccguccagcagggccugggggaaagcggccggaaggugucuguugcuccucagaacggaaaagugauguccagcugggaguauuacaaguccggcgggggaacaagacucuga

SEQ ID NO: 223654 - RNA, 1575 nt, Artificial Sequence
  derived and/or modified CDS sequence (opt5) from glycoprotein__RABV__KJ174617.1
augaucccccaggcccugcucagcgugccucugcuuauuuccucucugugcuucggcaaguuuccgaucuacaccauucccgagaaacucgggccuuggagccccaucgacauucaccaucuguccuguccuaacaaucuugucguugaagaugagggaugcaacucucugagcggcuucuccuauauggaacucaaggugggguacaucucugcuaucaaagugaauggauuuacauguacgggcgucgugaccgaggccgaaacauauaccaacuucguuggguacgugacaaccacauuuaagagaaaacacuuccggcccaugccugacgcgugccgcgcugccuauaauuggaagaccgccggagauccgagauacgaggagagccugcauaaccccuauccugacuaccacuggcugcggacggucaagaccacaaaagaaucccucauuaucauuagccccucuguggcugaucuggacccuuacgauaagucccuucauagccgcaucuuucccggcggcaaaugucuggggauuaccaucucuuccacauauugcagcaccaaucacgacuacacgauuuggaugccggaggaagccagacucggaacaucuugugauaucuucaccaacuccaagggcaaacgggcuagcaaagggggacgcacaugcggcuuuguugacgagagagggcuguauaagucccuuaagggagccuguaagcugaaacucugcggcgugccuggccugcggcugauggaugggaccugggucgcgauccaaacccccaaugagacaaagugguguucuccugaccagcucgugaacgugcacgauuuccgcagcgacgaaauugagcaucuggucguugaggaacuuaucagaaaacgggaagagugccuggacgcccucgaguccauuaugacgaccaagagcgugucuuuucgcagacuguccaaucuucggaaacuggugcccggauucggcaaggcuuacacaaucuuuaacaagacccucauggaagccgaugcucacuauaaaagcguccgcacauggaaugagauuauccccucuagagggugccugaaggugggaggccggugucauccucacguuaacgggguguucuucaauggaaucauucugggcccggacggccacauccucauucccgaaaugcagagcucccugcuucagcaacauauggagcugcucgaaucuagcgucaucccucugauucacccccuugccgauccuuccaccguguuuaaagacggggaugaggcggaggacuucguugaagugcaucugcccgauguccaccaacaggugagcggagucgaccucggccugccggauugggggaaguacgugcugaugucugccggagcucucgccacgguuaugcugacaaucuuucuuauuaccugcuguagacgcgugaaacggaccgaguccauccagcagggccugggggaaagcggcagaaaggucucuguggcuccucagaacggaaagguuauguccagcugggaguauuacaaauccggcgggggaacacgccucuga

SEQ ID NO: 223655 - RNA, 1575 nt, Artificial Sequence
  derived and/or modified CDS sequence (opt5) from glycoprotein__RABV__KJ174618.1
augaucccccaggcccuccucuucgugccuuuucuguucccgagccuuugccugggcaaguuucccauuuacaccaucccugagaaacucgggcccugguccccuauugacauccaccaucugucuugucccaacaaucuugucguugaagaugagggaugcgacagccuguccggcuucucuuauauggaacucaaggugggguacauuagcgcuaucaaagugaacggauuuacauguacgggcgucgugaccgaggccgaaacauauaccaauuucguuggguacgugacaaccacauuuaagagaaaacacuuccggccuaugccggaugcgugccgcgcugccuauaacuggaagaccgccggagaccccagauacgaggagucccugcauaauccuuaucccgauuaccacuggcugcggacggucaagaccacaaaagaaucucucaucauuaucagcccuuccguggcugaccuggaucccuacgacaagagccuucauucucgcguuuuuccgggcggcaaaugucuggggauuaccaucuccagcacauauugcucuaccaaccacgauuacacgauuuggaugccugaggaagccagacucggaacauccugugacaucuucaccaauagcaagggcaaacgggcuucuaaagggggacgcacaugcggcuuuguggaugagagagggcuguauaagucccuuaagggagccuguaagcugaaacucugcggcguccccggccugcggcugauggacgggaccuggguggcgauucaaaccccuggagagacaaagugguguagccccgaucagcucgugaaccugcacgacuuccgcuccgacgaaaucgagcaucuugucguugaggagcugaucaaaaagagagaagagugccucgaugcccuggagucuauuaugacgaccaaaagcguguccuuucggcgccuuagcaaucugagaaagcucgugcccggcuucgggaaggcuuacacaaucuucaacaaaacccugauggaagccgacgcucacuauaagucuauucggacaugggaugagaucauuccuuccaaaggaugccugcgcgucggcgggagaugucauccgcacgugaauggaguguuuuucaacggcaucauccucggccccgacgggcacguucugauuccugaaaugcagagcucucuucugcagcaacauauggagcuccuggaaagcuccgucaucccccuuauucacccucuggccgaucccucuaccguguuuaaggacggagaugaggcggaggacuucguugaagugcaucucccggauguccacgaacaggugagcggcgucgaccuggggcugccuaauuggggaaaauacgugcucaucuccgccggcguucuggcuacggugauucuuacaaucuuucugcugaccugcugucggagagucaaccgcaccaagcccaagcagcagagccugggggauucuggccggaaaguguccguuacaccucaaaauggaaaggugaugagcucuugggaauauuacaaauccgagggcagaaccagccuguga

SEQ ID NO: 223656 - RNA, 1575 nt, Artificial Sequence
  derived and/or modified CDS sequence (opt5) from glycoprotein__RABV__KJ174619.1
augaucccccaggccuuccuguuugugccuuuccucuuuccgagccugugccuuggcaaguuccccauuuacaccaucccugagaaacuggggcccugguccccuauugacauccaccaucucucuugucccaacaaucuggucguugaagaugagggaugcgacagccuuuccggcuuuucuuauauggaacugaaggugggguacauuagcgcuaucaaagugaacggauucacauguacgggcgucgugaccgaggccgaaacauauaccaauuuuguuggguacgugacaaccacauucaagagaaaacacuuucggccuaugccggaugcgugccgcgcugccuauaacuggaagaccgccggagaccccagauacgaggagucccuccauaauccuuaucccgauuaccacuggcugcggacggucaagaccacaaaagaaucucugaucauuaucagcccuuccguggcugaccucgaucccuacgacaagagccugcauucucgcguuuucccgggcggcaaaugucuugggauuaccaucuccagcacauauugcucuaccaaccacgauuacacgauuuggaugccugaggaagccagacugggaacauccugugacaucuuuaccaauagcaagggcaaacgggcuucuaaagggggacgcacaugcggcuucguggaugagagagggcucuauaagucccugaagggagccuguaaacuuaagcugugcggcguccccggccuccggcugauggacgggaccuggguggcgauucaaaccccuggagagacaaagugguguagccccgaucagcuggugaaccuccacgacuuucgcuccgacgaaaucgagcaucuggucguugaggagcuuaucaaaaagagagaagagugccuggaugcccucgagucuauuaugacgaccaaaagcguguccuuccggcgccugagcaaucuuagaaagcuggugcccggcuucgggaaggcuuacacaaucuuuaacaaaacccucauggaagccgacgcucacuauaagucuauucggacaugggaugagaucauuccuuccaaaggaugccugcgcgucggcgggagaugucauccgcacgugaauggaguuuucuuuaacggcaucauccugggccccgacgggcacgugcucauuccugaaaugcagagcucucugcuucagcaacauauggagcugcucgaaagcuccgucaucccccugauucacccucuugccgaucccucuaccguguucaaggacggagaugaggcggaggacuuuguugaagugcaucugccggauguccacgaacaggugagcggcgucgaccucgggcugccuaauuggggaaaauacgugcugaucuccgccggcguucucgcuacggugauucugacaaucuuccuucugaccugcugucggagagucaaccgcaccaagcccaagcagcagagccucggggaaucuggccggaaaguguccguuacaccucaaaauggaaaggugaugagcucuugggaguauuacaaauccgaaggcagaaccagccuguga

SEQ ID NO: 223657 - RNA, 1575 nt, Artificial Sequence
  derived and/or modified CDS sequence (opt5) from glycoprotein__RABV__KJ174620.1
augaucccccaggcccuccucuucgugccuuuucuguucccgagccuuugccugggcaaguuucccauuuacaccaucccugagaaacucgggcccugguccccuauugacauccaccaucugucuugucccaacaaucuugucguugaagaugagggaugcgacagccuguccggcuucucuuauauggaacucaaggugggguacauuagcgcuaucaaagugaacggauuuacauguacgggcgucgugaccgaggccgaaacauauaccaauuucguuggguacgugacaaccacauuuaagagaaaacacuuccggccuaugccggaugcgugccgcgcugccuauaacuggaagaccgccggagaccccagauacgaggagucccugcauaauccuuaucccgauuaccacuggcugcggacggucaagaccacaaaagaaucucucaucauuaucagcccuuccguggcugaccuggaucccuacgacaagagccuucauucucgcguuuuuccgggcggcaaaugucuggggauuaccaucuccagcacauauugcucuaccaaccacgauuacacgauuuggaugccugaggaagccagacucggaacauccugugacaucuucaccaauagcaagggcaaacgggcuucuaaagggggaaagacaugcggcuuuguggaugagcgcgggcuguauaaaucccuuaagggagccuguaaacugaagcucugcggcguccccggccugagacugauggacgggaccuggguggcgauucaaaccccuggagagacaaaaugguguagccccgaucagcucgugaaccugcacgacuuccgguccgacgaaaucgagcaucuugucguugaggagcugaucaagaaacgcgaagagugccucgaugcccuggagucuauuaugacgaccaagagcguguccuuuagacggcuuagcaaucugcgcaagcucgugcccggcuucgggaaggcuuacacaaucuucaacaagacccugauggaagccgacgcucacuauaaaucuauuagaacaugggaugagaucauuccuuccaagggaugccugcgggucggcgggcgcugucauccgcacgugaauggaguguuuuucaacggcaucauccucggccccgacgggcacguucugauuccugaaaugcagagcucucuucugcagcaacauauggagcuccuggaaagcuccgucaucccccuuauucacccucuggccgaucccucuaccguguuuaaagacggagaugaggcggaggacuucguugaagugcaucucccggauguccacgaacaggugagcggcgucgaccuggggcugccuaauuggggaaaguacgugcucaucuccgccggcguucuggcuacggugauucuuacaaucuuucugcugaccugcuguagacgggucaacagaaccaagcccaaacagcagagccugggggaaucuggccgcaagguguccguuacaccucaaaauggaaaagugaugagcucuugggaguauuacaaguccgaaggccggaccagccuguga

SEQ ID NO: 223658 - RNA, 1575 nt, Artificial Sequence
  derived and/or modified CDS sequence (opt5) from glycoprotein__RABV__KJ174622.1
augaucccccaggcccuccucuucgugccuuuucuguucccgagccuuugccugggcaaguuucccauuuacaccaucccugagaaacucgggcccugguccccuauugacauccaccaucugucuugucccaacaaucuugucguugaagaugagggaugcgacagccuguccggcuucucuuauauggaacucaaggugggguacauuagcgcuaucaaagugaacggauuuacauguacgggcgucgugaccgaggccgaaacauauaccaauuucguuggguacgugacaaccacauuuaagagaaaacacuuccggccuaugccggaugcgugccgcgcugccuauaacuggaagaccgccggagaccccagauacgaggagucccugcauaauccuuaucccgauuaccacuggcugcggacggucaagaccacaaaagaaucucucaucauuaucagcccuuccguggcugaccuggaucccuacgacaagagccuucauucucgcguuuuuccgggcggcaaaugucuggggauuaccaucuccagcacauauugcucuaccaaccacgauuacacgauuuggaugccugaggaagccagacucggaacauccugugacaucuucaccaauagcaagggcaaacgggcuucuaaagggggacgcacaugcggcuuuguggaugagagagggcuguauaagucccuuaagggagccuguaagcugaaacucugcggcguccccggccugcggcugauggacgggaccuggguggcgauucaaaccccuggagagacaaagugguguagccccgaucagcucgugaaccugcacgacuuccgcuccgacgaaaucgagcaucuugucguugaggagcugaucaaaaagagagaagagugccucgaugcccuggagucuauuaugacgaccaaaagcguguccuuucggcgccuuagcaaucugagaaagcucgugcccggcuucgggaaggcuuacacaaucuucaacaaaacccugauggaagccgacgcucacuauaagucuauucggacaugggaugagaucauuccuuccaaaggaugccugcgcgucggcgggagaugucauccgcacgugaauggaguguuuuucaacggcaucauccucggccccgacgggcacguucugauuccugaaaugcagagcucucuucugcagcaacauauggagcuccuggaaagcuccgucaucccccuuauucacccucuggccgaucccucuaccguguuuaaggacggagaugaggcggaggacuucguugaagugcaucucccggauguccacgaacaggugagcggcgucgaccuggggcugccuaauuggggaaaauacgugcucaucuccgccggcguucuggcuacggugauucuuacagucuuucugcugaccugcugucggagagugaaccgcaccaagcccaagcagcagagccugggggaaucuggccggaaaguuuccgugacaccucaaaauggaaaggucaugagcucuugggaguauuacaaauccgaaggcagaaccagccuguga

SEQ ID NO: 223659 - RNA, 1575 nt, Artificial Sequence
  derived and/or modified CDS sequence (opt5) from glycoprotein__RABV__KJ174623.1
augaucccccaggcccuccucuucgugccuuuucuguucccgagccuuugccugggcaaguuucccauuuacaccaucccugagaaacucgggcccugguccccuauugacauccaccaucugucuugucccaacaaucuugucguugaagaugagggaugcgacagccuguccggcuucucuuauauggaacucaaggugggguacauuagcgcuaucaaagugaacggauuuacauguacgggcgucgugaccgaggccgaaacauauaccaauuucguuggguacgugacaaccacauuuaagagaaaacacuuccggccuaugccggaugcgugccgcgcugccuauaacuggaagaccgccggagaccccagauacgaggagucccugcauaauccuuaucccgauuaccacuggcugcggacggucaagaccacaaaagaaucucucaucauuaucagcccuuccguggcugaccuggaucccuacgacaagagccuucauucucgcguuuuuccgggcggcaaaugucuggggauuaccguguccagcacauauugcucuaccaaccacgauuacacgaucuggaugccugaggaagccagacucggaacauccugugacauuuucaccaauagcaagggcaaacgggcuucuaaagggggacgcacaugcggcuuugucgaugagagagggcuguauaagucccuuaagggagccuguaagcugaaacucugcggcgugcccggccugcggcugauggacgggaccuggguggcgauccaaaccccuggagagacaaagugguguagccccgaucagcucgucaaccugcacgacuuccgcuccgacgaaauugagcaucuuguuguggaggaacugaucaaaaagagagaagagugccucgaugcccuggagucuaucaugacgaccaaaagcguguccuuucggcgccuuagcaaucugagaaagcucguccccggcuucgggaaggcuuacacaauuuucaacaaaacccugauggaagccgacgcucacuauaagucugugcggacaugggaugagaucauuccuuccaaaggaugccugcgcguuggcgggagaugucauccgcacgugaauggagucuuuuucaacggcaucauucucggccccgacgggcacgugcugaucccugaaaugcagagcucucuucugcagcaacauauggagcuccuggaaagcuccguuaucccccuuauucacccucuggccgaucccucuaccguguuuaaggacggagaugaggcggaggacuucgucgaagugcaucucccggauguccacaaacaggugagcggcguugaccuggggcugccuaauuggggaaaguacgugcucaugggcgccgggguccuggcuacggugauccuuacaauuuuucugcugaccugcugucggagaguuaaccgcaccaagcccaaacagcagucccugggcgagagcggacggaaggugucugucacaccucaaaauggcaaagugauguccagcugggaauauuacaagucugaggggagaaccucccuguga

SEQ ID NO: 223660 - RNA, 1575 nt, Artificial Sequence; identical to SEQ ID NO: 223479
  derived and/or modified CDS sequence (opt5) from glycoprotein__RABV__KJ174624.1

SEQ ID NO: 223661 - RNA, 1575 nt, Artificial Sequence
  derived and/or modified CDS sequence (opt5) from glycoprotein__RABV__KJ174625.1
augaucccccaggcccuccucuucgugccuuuucuguucccgagccuuugccugggcaaguuucccauuuacaccaucccugagaaacucgggcccugguccccuauugacauccaccaucugucuugucccaacaaucuugucguugaagaugagggaugcgacagccuguccggcuucucuuauauggaacucaaggugggguacauuagcgcuaucaaagugaacggauuuacauguacgggcgucgugaccgaggccgaaacauauaccaauuucguuggguacgugacaaccacauuuaagagaaaacacuuccggccuaugccggaugcgugccgcgcugccuauaacuggaagaccgccggagaccccagauacgaggagucccugcauaauccuuaucccgauuaccacuggcugcggacggucaagaccacaaaagaaucucucaucauuaucagcccuuccguggcugaccuggaucccuacgacaagagccuucauucucgcguuuuuccgggcggcaaaugucuggggauuaccguguccagcacauauugcucuaccaaccacgauuacacgaucuggaugccugaggaagccagacucggaacauccugugacauuuucaccaauagcaagggcaaacgggcuucuaaagggggacgcacaugcggcuuugucgaugagagagggcuguauaagucccuuaagggagccuguaagcugaaacucugcggcgugcccggccugcggcugauggacgggaccuggguggcgauccaaaccccuggagagacaaagugguguagccccgaucagcucgucaaccugcacgacuuccgcuccgacgaaauugagcaucuuguuguggaggaacugaucaaaaagagagaagagugccucgaugcccuggagucuaucaugacgaccaaaagcguguccuuucggcgccuuagcaaucugagaaagcucguccccggcuucgggaaggcuuacacaauuuucaacaaaacccugauggaagccgacgcucacuauaagucugugcggacaugggaugagaucauuccuuccaaaggaugccugcgcguuggcgggagaugucauccgcacgugaauggagucuuuuucaacggcaucauucucggccccgacgggcacgugcugaucccugaaaugcagagcucucuucugcagcaacauauggagcuccuggaaagcuccguuaucccccuuauucacccucuggccgaucccucuaccguguuuaaggacggagaugaggcggaggacuucgucgaagugcaucucccggauguccacaaacaggugagcggcguugaccuggggcugccuaauuggggaaaguacgugcucaugggcgccgggguccuggcuacggugauccuuacaauuuuucugcugaccugcugucggagaguuaaccgcaccaagcccaaacagcagucccuggaggaaagcggccggaaggugucugucacaccucaaaauggaaaagugauguccagcugggaguauuacaagucugaaggcagaaccucccuguga

SEQ ID NO: 223662 - RNA, 1575 nt, Artificial Sequence; identical to SEQ ID NO: 223661
  derived and/or modified CDS sequence (opt5) from glycoprotein__RABV__KJ174626.1

SEQ ID NO: 223663 - RNA, 1575 nt, Artificial Sequence; identical to SEQ ID NO: 223493
  derived and/or modified CDS sequence (opt5) from glycoprotein__RABV__KJ174627.1

SEQ ID NO: 223664 - RNA, 1575 nt, Artificial Sequence; identical to SEQ ID NO: 223321
  derived and/or modified CDS sequence (opt5) from glycoprotein__RABV__KJ174628.1

SEQ ID NO: 223665 - RNA, 1575 nt, Artificial Sequence; identical to SEQ ID NO: 223493
  derived and/or modified CDS sequence (opt5) from glycoprotein__RABV__KJ174629.1

SEQ ID NO: 223666 - RNA, 1575 nt, Artificial Sequence; identical to SEQ ID NO: 223321
  derived and/or modified CDS sequence (opt5) from glycoprotein__RABV__KJ174630.1

SEQ ID NO: 223667 - RNA, 1575 nt, Artificial Sequence
  derived and/or modified CDS sequence (opt5) from glycoprotein__RABV__KJ174631.1
augaucccccaggcccugcuguucgugccucugcuuauuccgagccugugccucggcgaguuucccaucuacaccauuccugacaagcuggggcccugguccccuaucgauauucaccaucuuucuugucccaacaaucuggucgcugaaaacgacggaugcacaagccucuccggcuucucuuauauggagcugaaaguuggguacaucagcgccaucaaggugaauggauuuacguguaccggcguggucacagaagcggagaccuauacaaacuucgugggguacguuaccacaaccuuuaaaagaaagcacuuccggccuacgccggaugcuugccgcgccgcccaugacuggaaaauggcuggagaucccagauaugaagccucccugcaaaauccuuaccccgacuaucacuggcuccggaccgugaagacaaccaaggagucucuggucauuaucagcccuuccguggcugaucuugaccccuacgauaaaagccugcauucucgcguuuuuccguccggcaagugucucggcauuacagugagcucuaccuacugcuccacgaaccacgacuauacaaucuggaugccugucgagcccagacuggggaccagcugugauauuuucacaaauucucggggaaaacgcgccuccaagggcgggagagugugcggauuuguggacgaacggggccuuuacaaaagccugaagggggcgugucgccucaagcugugcggagucccuggcaucagacugcucgauggcaccuggguuuccauucagaccucugaggacaucaaaugguguccucccgaccggcuggugaaccuucacgauuuccauagcgacgaaaucgagcaccugguggucgccgagcucauuaagcgcagagaaaauugccuggaugcucuugaguccaucaugacaacgaaaagcgugucuuuucggcgccugucccaucucagaaagcugguucccggguucggaaaagccuauaccauuuuuaacaagacacugauggaagcugacgcccacuacaaaagcgugaagaccuggaaugaggucaucccgucuaagggcugccucgaaguugggggacggugucacccccaugugaacggcguguucuucaaugggauuauccugggaccugauggcaacguccuuauccccgagaugcagagcucccugcuccagcaacacauggagcugcuugaaucuagcgugauuccucugaugcauccccucgcggacccguccacagucuuuaaagagggcgaugaagccgaggacuucguggaaguucaccucccugaugugcauaagcaggucagcgacguggaucuggggcuccccucuuggggaaaauaucugcuuaucggcgcuggggcccuggcuauucucauccuggccauuguucugaucaucugcuguagacgcgugaauaagacccgguccacgcagagaggacaccgcgagagcggcgggaaaaugucugucgugccucagaacggcaagauuaucuccagcugggagcuuuacaaguccgaaucugagacaggacucuga

SEQ ID NO: 223668 - RNA, 1575 nt, Artificial Sequence
  derived and/or modified CDS sequence (opt5) from glycoprotein__RABV__KJ174632.1
augaucccccaggcccugcuguucgugccucugcuuauuccgagccugugccucggcgaguuucccaucuacaccauuccugacaagcuggggcccugguccccuaucgauauucaccaucuuucuugucccaacaaucuggucgcugaaaacgacggaugcacaagccucuccggcuucucuuauauggagcugaaaguuggguacaucagcgccaucaaggugaauggauuuacguguaccggcguggucacagaagcggagaccuauacaaacuucgugggguacguuaccacaaccuuuaaaagaaagcacuuccggccuacgccggaugcuugccgcgccgcccaugacuggaaaauggcuggagaucccagauaugaagccucccugcaaaauccuuaccccgacuaucacuggcuccggaccgugaagacaaccaaggagucucuggucauuaucagcccuuccguggcugaucuugaccccuacgauaaaagccugcauucucgcguuuuuccguccggcaagugucucggcauuacagugagcucuaccuacugcuccacgaaccacgacuauacaaucuggaugccugucgagcccagacuggggaccagcugugauauuuucacaaauucucggggaaaacgcgccuccaagggcgggagagugugcggauuuguggacgaacggggccuuuacaaaagccugaagggggcgugucgccucaagcugugcggagucccuggcaucagacugcucgauggcaccuggguuuccauucagaccucugaggacaucaaaugguguccucccgaccggcuggugaaccuucacgauuuccauagcgacgaaaucgagcaccugguggucgccgagcucauuaagcgcagagaaaauugccuggaugcucuugaguccaucaugacaacgaaaagcgugucuuuucggcgccugucccaucucagaaagcugguucccggguucggaaaagccuauaccauuuuuaacaagacacugauggaagcugacgcccacuacaaaagcgugaagaccuggaaugaggucaucccgucuaagggcugccucgaaguugggggacggugucacccccaugugaacggcguguucuucaaugggauuauccugggaccugauggcaacguccuuauccccgagaugcagagcucccugcuccagcaacacauggagcugcuugaaucuagcgugauuccucugaugcauccccucgcggacccguccacagucuuuaaagagggcgaugaagccgaggacuucguggaaguucaccucccugaugugcauaagcaggucagcgacguggaucuggggcuccccucuuggggaaaauaucugcuuaucuccgcuggcgcccuggcuauucucauccuggccauuguucugaucaucugcuguaagagagugaaaaagaccgggagcauucagcgcggacaccgggagucuggcgggaagauguccgucgugccucagaauggcaaaaucauuagcuccugggagcuuuacaagucugaaagcgagacgggacucuga

SEQ ID NO: 223669 - RNA, 1575 nt, Artificial Sequence
  derived and/or modified CDS sequence (opt5) from glycoprotein__RABV__KJ174633.1
augaucccccaggcccugcuguucgugccucugcuuauuccgagccugugccucggcgaguuucccaucuacaccauuccugacaagcuggggcccugguccccuaucgauauucaccaucuuucuugucccaacaaucuggucgcugaaaacgacggaugcacaagccucuccggcuucucuuauauggagcugaaaguuggguacaucagcgccaucaaggugaauggauuuacguguaccggcguggucacagaagcggagaccuauacaaacuucgugggguacguuaccacaaccuuuaaaagaaagcacuuccggccuacgccggaugcuugccgcgccgcccaugacuggaaaauggcuggagaucccagauaugaagccucccugcaaaauccuuaccccgacuaucacuggcuccggaccgugaagacaaccaaggagucucuggucauuaucagcccuuccguggcugaucuugaccccuacgauaaaagccugcauucucgcguuuuuccguccggcaagugucucggcauuacagugagcucuaccuacugcuccacgaaccacgacuauacaaucuggaugccugucgagcccagacuggggaccagcugugauauuuucacaaauucucggggaaaacgcgccuccaagggcgggagagugugcggauuuguggacgaacggggccuuuacaaaagccugaagggggcgugucgccucaagcugugcggagucccuggcaucagacugcucgauggcaccuggguuuccauucagaccucugaggacaucaaaugguguccucccgaccggcuggugaaccuucacgauuuccauagcgacgaaaucgagcaccugguggucgccgagcucauuaagcgcagagaaaauugccuggaugcucuugaguccaucaugacaacgaaaagcgugucuuuucggcgccugucccaucucagaaagcugguucccggguucggaaaagccuauaccauuuuuaacaagacacugauggaagcugacgcccacuacaaaagcgugaagaccuggaaugaggucaucccgucuaagggcugccucgaaguugggggacggugucacccccaugugaacggcguguucuucaaugggauuauccugggaccugauggcaacguccuuauccccgagaugcagccuagccugcuccagcaacacauggagcugcuugaauccucugugauuccccugaugcauccgcucgcggacccuagcacagucuuuaaagagggcgaugaagccgaggacuucguggaaguucaccuccccgaugugcauaagcaggucuccgacguggaucuggggcucccuagcuggggaaaauaucugcuuaucucugcuggcgcccuggcuauucucauccuggccauuguucugaugaucugcuguagacgcgugaauaagaccggguccacgcagcggggacacagagagagcggcgggaaaaugucugucgugccccagaacggcaagaucauuuccagcugggagcuuuacaaguccgaaucugagacaggacucuga

SEQ ID NO: 223670 - RNA, 1575 nt, Artificial Sequence
  derived and/or modified CDS sequence (opt5) from glycoprotein__RABV__KJ174634.1
augaucccccaggccauucuguucgugccucuccugaucccgagccuuugccugggcgaguuucccauuuacaccaucccugacaagcucgggcccugguccccuauugauauccaccaucugucuugucccaacaaucuugucgcugaaaacgacggaugcacaagccuguccggcuucucuuauauggagcucaaaguuggguacaucagcgccauuaaggugaauggauuuacguguaccggcguggucacagaagcggagaccuauacaaacuucgugggguacguuaccacaaccuuuaaaagaaagcacuuccggccuacgccggaugcuugccgcgccgcccaugacuggaaaauggcuggagaucccagauaugaagccucccugcaaaauccuuaccccgacuaucacuggcugcggaccgugaagacaaccaaggagucucucgucaucauuagcccuuccguggcugaucuggaccccuacgauaaauuucuucauagccgcguuuucccgucuggcaagugucugggcaucacaguguccagcaccuacugcucuacgaaccacgacuauacaauuuggaugccugucgagcccagacucgggaccuccugugauaucuuuacaaauagccggggaaaacgcgccucuaagggcgggagagugugcggauucguggacgaacggggccuguacaaaucccuuaagggggcgugucgccugaagcucugcggagucccuggcauuagacugcuggauggcaccuggguuagcauccagaccuccgaggacaucaaaugguguccucccgaccggcucgugaaccugcacgauuuucauucugacgaaauugagcaccuuguggucgccgagcugaucaagcgcagagaaaauugccucgaugcucuggagagcauuaugacaacgaaauccgugagcuuccggcgccuuucucaucugagaaagcucguucccggguuuggaaaagccuauaccaucuucaacaagacacugauggaagcugacgcccacuacaaauccgugaagaccuggaaugaggucauuccgagcaagggcugccuggaaguugggggacggugucacccccaugugaacggcguguucuuuaaugggaucauccucggaccugauggcaacguccugauucccgagaugcagucuagccuucugcagcaacacauggagcuccuggaauccucugugaucccucuuaugcauccccuggcggacccgagcacagucuucaaagagggcgaugaagccgaggaauuuguggagguucaccucccugacgugcauaagcaggucuccgauguggaccuggggcugcccagcuggggaaaauaucuccugauuucugcuggcgcccuugcuauccugauucucgccaucguucugaucauuugcuguagacgcgugaauaagaccggguccacgcagcggggacacagagagagcggcgggaaaaugucugucgugccucagaacggcaagaucauuuccagcugggaacuguacaaguccgagucugaaacaggacuuuga

SEQ ID NO: 223671 - RNA, 1575 nt, Artificial Sequence
  derived and/or modified CDS sequence (opt5) from glycoprotein__RABV__KJ174635.1
augaucccccaggcccugcuguucgugccucugcuuauuccgagccugugccucggcgaguuucccaucuacaccauuccugacaagcuggggcccugguccccuaucgauauucaccaucuuucuugucccaacaaucuggucgcugaaaacgacggaugcacaagccucuccggcuucucuuauauggagcugaaaguuggguacaucagcgccaucaaggugaauggauuuacguguaccggcguggucacagaagcggagaccuauacaaacuucgugggguacguuaccacaaccuuuaaaagaaagcacuuccggccuacgccggaugcuugccgcgccgcccaugacuggaaaauggcuggagaucccagauaugaagccucccugcaaaauccuuaccccgacuaucacuggcuccggaccgugaagacaaccaaggagucucuggucauuaucagcccuuccguggcugaucuugaccccuacgauaaaagccugcauucucgcguuuuuccguccggcaagugucucggcauuacagugagcucuaccuacugcuccacgaaccacgacuauacaaucuggaugccugucgagcccagacuggggaccagcugugauauuuucacaaauucucggggaaaacgcgccuccaagggcgggagagugugcggauuuguggacgaacggggccuuuacaaaagccugaagggggcgugucgccucaagcugugcggagucccuggcaucagacugcucgauggcaccuggguuuccauucagaccucugaggacaucaaaugguguccucccgaccggcuggugaaccuucacgauuuccauagcgacgaaaucgagcaccugguggucgccgagcucauuaagcgcagagaaaauugccuggaugcucuugaguccaucaugacaacgaaaagcgugucuuuucggcgccugucccaucucagaaagcugguucccggguucggaaaagccuauaccauuuuuaacaagacacugauggaagcugacgcccacuacaaaagcgugaagaccuggaaugaggucaucccgucuaagggcugccucgaaguugggggacggugucacccccaugugaacggcguguucuucaaugggauuauccugggaccugauggcaacguccuuauccccgagaugcagagcucccugcuccagcaacacauggagcugcuugaaucuagcgugauuccucugaugcauccccucgcggacccguccacagucuuuaaagagggcgaugaagccgaggacuucguggaaguucaccucccugaugugcauaagcaggucagcgacguggaucuggggcuccccucuuggggaaaauaucugcuuaucuccgcuggcgcccuggcuauucucauccuggccguugugcugauuaucugcuguagacgcgucaauaagacccggagcacgcagagagggcaccgcgagucuggaggcaaaauguccguggugccucagaacgggaagaucauuagcuccugggagcuuuacaagucugaaagcgagacaggccucuga

SEQ ID NO: 223672 - RNA, 1575 nt, Artificial Sequence
  derived and/or modified CDS sequence (opt5) from glycoprotein__RABV__KJ174636.1
augaucccccaggcccugcuguucgugccucugcuuauuccgagccugugccucggcgaguuucccaucuacaccauuccugacaagcuggggcccugguccccuaucgauauucaccaucuuucuugucccaacaaucuggucgcugaaaacgacggaugcacaagccucuccggcuucucuuauauggagcugaaaguuggguacaucagcgccaucaaggugaauggauuuacguguaccggcguggucacagaagcggagaccuauacaaacuucgugggguacguuaccacaaccuuuaaaagaaagcacuuccggccuacgccggaugcuugccgcgccgcccaugacuggaaaauggcuggagaucccagauaugaagccucccugcaaaauccuuaccccgacuaucacuggcuccggaccgugaagacaauuaaggagucucuggucaucauuagcccuuccguggcugaucuugaccccuacgauaaaagccugcauucucgcguuuuuccguccggcaagugucucggcaucaccgugagcucuacauacugcuccaccaaccacgacuauacgauuuggaugccugucgagcccagacuggggacaagcugugauaucuucaccaauucucggggaaaacgcgccuccaagggcgggagagugugcggauuuguggacgaacggggccuuuacaaaagccugaagggggcgugucgccucaagcugugcggagucccuggcauuagacugcucgauggcacauggguuuccauccagaccucugaggacaucaaaugguguccucccgaccggcuggugaaccuucacgauuuccauagcgacgaaauugagcaccugguggucgccgagcucaucaagcgcagagaaaauugccuggaugcucuugaguccauuaugaccacaaaaagcgugucuuuucggcgccugucccaucucagaaagcugguucccggguucggaaaagccuauacgaucuuuaacaagacccugauggaagcugacgcccacuacaaaagcgugaagacauggaaugaggucauuccgucuaagggcugccucgaaguugggggacggugucacccccaugugaacggcguguucuucaaugggaucauccugggaccugauggcaacguccuuauucccgagaugcagagcucccugcuccagcaacacauggagcugcuugaaucuagcgugaucccucugaugcauccccucgcggacccguccaccgucuuuaaagagggcgaugaagccgaggacuucguggaaguucaccucccugaugugcauaagcaggucagcgacguggaucuggggcuccccucuuggggaaaauaucugcuuauuuccgcuggcgcccugacaauccucauucuggcuaucguucugaucagaugcugucgccgggugaauaagaccagaagcacgcagcgcgggcaccgggagucuggaggcaaaauguccgucgugccucagaacgggaagauuaucagcuccugggagcuuuacaagucugaaagcgagacaggccucuga

SEQ ID NO: 223673 - RNA, 1575 nt, Artificial Sequence
  derived and/or modified CDS sequence (opt5) from glycoprotein__RABV__KJ174637.1
augaucccccaggcccugcuguucaugccucugcuuauuccgagccugugccucggcgaguuucccaucuacaccauuccugacaagcuggggcccugguccccuaucgauauucaccaucuuucuugucccaacaaucugguggcugaaaacgacggaugcacaagccucuccggcuucucuuauauggagcugaaagucggguacaucagcgccaucaagguuaauggauuuacguguaccggcguggugacagaagcggagaccuauacaaacuucgucggguacgugaccacaaccuuuaaaagaaagcacuuccggccuacgccggaugcuugccgcgccgcccaugacuggaaaauggcuggagaucccagauaugaagccucccugcaaaauccuuaccccgacuaucacuggcuccggaccguuaagacaaccaaggagucucuggugauuaucagcccuuccgucgcugaucuugaccccuacgauaaaagccugcauucucgcguguuuccguccggcaagugucucggcauuacaguuagcucuaccuacugcuccacgaaccacgacuauacaaucuggaugccuguggagcccagacuggggaccagcugugauauuuucacaaauucucggggaaaacgcgccuccaagggcgggagagucugcggauuuguggacgaacggggccuuuacaaaagccugaagggggcgugucgccucaagcugugcggagugccuggcaucagacugcucgauggcaccugggucuccauucagaccucugaggacaucaaaugguguccucccgaccggcugguuaaccuucacgauuuccauagcgacgaaaucgagcaccuggugguggccgagcucauuaagcgcagagaaaauugccuggaugcucuugaguccaucaugacaacgaaaagcgucucuuuucggcgccugucccaucucagaaagcuggugcccggguucggaaaagccuauaccauuuuuaacaagacacugauggaagcugacgcccacuacaaaagcguuaagaccuggaaugaggugaucccgucuaagggcugccucgaagucgggggacggugucacccccaugugaacggcguuuucuucaaugggauuauccugggaccugauggcaacgugcuuauccccgagaugcagagcucccugcuccagcaacacauggagcugcuugaaucuagcgucauuccucugaugcauccccucgcggacccguccacaguguuuaaagagggcgaugaagccgaggacuucgucgaagugcaccucccugauguucauaaacaggugagcgacgucgaucuggggcuccccucuuggggaaaguaucugcuuaucuccgcuggcgcccuggcuauucucauccuggccauugugcugaucaucugcuguagacgcguuaauaagaccgugagcacgcagcgggggcacagagagucuggaggcaaaauguccgucgugccucagaacgggaagauuaucagcuccugggagcuuuacaagucugaaagcgagacaggccucuga

SEQ ID NO: 223674 - RNA, 1575 nt, Artificial Sequence
  derived and/or modified CDS sequence (opt5) from glycoprotein__RABV__KJ174638.1
augaucccccaggcccuccuguucgugccucugcuuauuccgagccugugccucggcgaguuucccaucuacaccauuccugacaagcuggggcccugguccccuaucgauauucaccaucuuucuugucccaacaaucuggucgcugaaaacgacggaugcacaagccucuccggcuucucuuauauggagcugaaaguuggguacaucagcgccaucaaggugaauggauuuacguguaccggcguggucacagaagcggagaccuauacaaacuucgugggguacguuaccacaaccuuuaaaagaaagcacuuccggccuacgccggaugcuugccgcgccgcccaugacuggaaaauggcuggagaucccagauaugaagccuccgugcaaaauccuuaccccgacuaucacuggcugcggaccgucaagacaaccaaggagucucucgugauuaucagcccuuccguugcugaucuggaccccuacgauaaaagccuucauucucgcguguuuccguccggcaagugucugggcauuacagucagcucuaccuacugcuccacgaaccacgacuauacaaucuggaugccuguggagcccagacucgggaccagcugugauauuuucacaaauucucggggaaaacgcgccuccaagggcgggagagugugcggauuugucgacgaacggggccuguacaaaagccuuaagggggcgugucgccugaagcucugcggaguuccuggcaucagacugcuggauggcaccuggguguccauucagaccucugaggacaucaaaugguguccucccgaccggcucgugaaccugcacgauuuccauagcgacgaaaucgagcaccuugucguggccgagcugauuaagcgcagagaaaauugccucgaugcucuggaguccaucaugacaacgaaaagcguuucuuuucggcgccuuucccaucugagaaagcucgugcccggguucggaaaagccuauaccauuuuuaacaagacacugauggaagcugacgcccacuacaaaagcgucaagaccuggaaugaggugaucccgucuaagggcugccuggaaguugggggacggugucacccccaugugaacggcgucuucuucaaugggauuauccucggaccugauggcaacgugcugauccccgagaugcagagcucccuucugcagcaacacauggagcuccuggaaucuagcgucauuccucuuaugcauccccuggcggacccguccacaguguuuaaagagggcgaugaagccgaggacuucguugaagugcaccucccugauguccauaaacaggugagcgacguugaucuggggcugcccucuuggggaaaguaucuccugaucuccgcuggcgcccuugcuauucugauccucgccauugugcugaucaucugcuguagacgcgucaauaagaccgggagcacgcagcggggacacagagagucuggcgggaaaauguccguggugccucagaacggcaagauuaucagcuccugggagcuguacaagucugaaagcgagacaggacuuuga

SEQ ID NO: 223675 - RNA, 1575 nt, Artificial Sequence; identical to SEQ ID NO: 223493
  derived and/or modified CDS sequence (opt5) from glycoprotein__RABV__KJ174639.1

SEQ ID NO: 223676 - RNA, 1575 nt, Artificial Sequence
  derived and/or modified CDS sequence (opt5) from glycoprotein__RABV__KJ174640.1
augaucccccaggcccugcuguucgugccucugcuuauuccgagccugugccucggcgaguuucccaucuacaccauuccugacaagcuggggcccugguccccuaucgauauucaccaucuuucuugucccaacaaucuggucgcugaaaacgacggaugcacaagccucuccggcuucucuuauauggagcugaaaguuggguacaucagcgccaucaaggugaauggauuuacguguaccggcguggucacagaagcggagaccuauacaaacuucgugggguacguuaccacaaccuuuaaaagaaagcacuuccggccuacgccggaugcuugccgcgccgcccaugacuggaaaauggcuggagaucccagauaugaagccucccugcaaaauccuuaccccgacuaucacuggcuccggaccgugaagacaaccaaggagucucuggucauuaucagcccuuccguggcugaucuugaccccuacgauaaaagccugcauucucgcguuuuuccguccggcaagugucucggcauuacagugagcucuaccuacugcccuacgaaccacgacuauacaaucuggaugcccgucgagccuagacuggggaccuccugugauauuuucacaaauagccggggaaaacgcgccucuaagggcgggagagugugcggauuuguggacgaacggggccuuuacaaaucccugaagggggcgugucgccucaagcugugcggaguccccggcaucagacugcucgauggcaccuggguuagcauucagaccuccgaggacaucaaauggugucccccugaccggcuggugaaccuucacgauuuccauucugacgaaaucgagcaccugguggucgccgagcucauuaagcgcagagaaaauugccuggaugcucuugagagcaucaugacaacgaaauccgugagcuuucggcgccugucucaucucagaaagcugguuccgggguucggaaaagccuauaccauuuuuaacaagacacugauggaagcugacgcccacuacaaauccgugaagaccuggaaugaggucauccccagcaagggcugccucgaaguugggggacggugucacccucaugugaacggcguguucuucaaugggauuauccugggacccgauggcaacguccuuaucccugagaugcagucuagccugcuccagcaacacauggagcugcuugaauccucugugauuccccugaugcauccgcucgcggacccuagcacagucuuuaaagagggcgaugaagccgaggacuucguggaaguucaccuccccgaugugcauaagcaggucuuugggguggaccugggacucccuuccuggggcaaauaucugcuuaucagcgcuggggcccuggcuauucucauccuggccauuguucugaucaucugcuguagacgcgugaauaagaccgagucuacgccccggggacacagagaguccggcgggaaaaugagcgucgugccucagaacggcaagauuaucucuuccugggaacuuuacaagagcgaguccgaaacaggacucuga

SEQ ID NO: 223677 - RNA, 1575 nt, Artificial Sequence; identical to SEQ ID NO: 223320
  derived and/or modified CDS sequence (opt5) from glycoprotein__RABV__KJ174641.1

SEQ ID NO: 223678 - RNA, 1575 nt, Artificial Sequence
  derived and/or modified CDS sequence (opt5) from glycoprotein__RABV__KJ174642.1
auggugccccaggcccuccuguucgucccucugcuuaucccgagccugugccucggcgaguuucccauuuacaccaucccugacaagcuggggcccuggacaccuauugauauccaccaucuuuccugucccaacaaucugguugcugaaaacgacggaugcacgucucucagcggcuucuccuauauggagcugaaagugggguacauuucugccaucaaggugaauggauuuaccuguacaggcgucgugaccgaagcggagacauauaccaacuucguuggguacgugacaaccacguuuaaaagaaagcacuuccggccuaugccggaugcuugccgcgccgcccaugacuggaaaauggcuggagaucccagauaugaagacagccugcaaaauccuuaccccgauuaucacuggcuccggaccgucaagacaaccaaggagucccuggugaucauuucuccuagcguugccgaccuugaucccuacgacaaaucccugcauagccgcguguuuccgucuggcaagugucucggcaucacagucuccagcaccuacugcucuacgaaccacgauuauacaauuuggaugccuguggagcccagacuggggaccuccugugacaucuucacaaauagccggggaaaacgcgcuucuaagggcgggagagugugcggauuugucgaugaacggggccuuuacaaaucccugaagggggccuguaagcucaaacugugcggaguuccuggcauucgccugcucgacggcaccugggugagcauccagaccuccgaggacauuaagugguguccucccgauagacuggugaaccuucacgacuuccauucugaugaacuggagcaccucgucguggaggaacugaucaaacggcgcgagaauugccuugacgcgcuggaaagcaucaugacaacgaaguccguuagcuuuagacggcucucucaucugcgcaaacuggugcccggguucggaaaggccuauaccauuuuuaacaaaacacucauggaggcugaugcccacuacaaguccgucaagaccuggaaugaagugaucccgagcaaaggcugccuggagguugggggaaagugucaucccccugugaacggcgucuucuucaaugggauuauccuuggacccgacggcaacgugcugauuccugagaugcagucuagccuccugcagcaacacauggaacuucuggaguccucugucaucccccucaugcacccgcuggcugauccuagcacaguguuuaaagaaggcgacgaggccgaagauuucguugaggugcaucugcccgacguccacaaacagguguccgauguugaccucgggcugccuagcuggggaaaguaucuucugaugucugcgggcgcccucgcuauccugauucuggccaucgugcuuauuaucugcuguagacgggucaauaagaccggguccacgcagagaggacaucgcgagagccggggcaagaugucugugagcccccagaacgggaaaauuaucuccuccugggaacucuacaagagagagucugaaacaggccuguga

SEQ ID NO: 223679 - RNA, 1575 nt, Artificial Sequence
  derived and/or modified CDS sequence (opt5) from glycoprotein__RABV__KJ174643.1
augaucccccaggcccuccuguucgugccucugcuuauuccgagccugugccucggcgaguuucccaucuacaccauuccugacaagcuggggcccuggacaccuaucgauauucaccaucuuuccugucccaacaaucuggucgcugaaaacgacggaugcacgucucucagcggcuucuccuauauggagcugaaaguuggguacaucucugccaucaaggugaauggauuuaccuguacaggcguggucaccgaagcggagacauauaccaacuucgugggguacguuacaaccacguuuaaaagaaagcacuuccggccuaugccggaugcuugccgcgccgcccaugacuggaaaauggcuggagaucccagauaugaagacagccugcaaaauccuuaccccgauuaucacuggcuccggaccgugaagacaaccaaggagucccuggucauuaucucuccuagcguggccgaccuugaucccuacgacaaaucccugcauagccgcguuuuuccgucuggcaagugucucggcauuacaguguccagcaccuacugcucuacgaaccacgauuauacaaucuggaugccugucgagcccagacuggggaccuccugugacauuuucacaaauagccggggaaaacgcgcuucuaagggcgggagagugugcggauuuguggaugaacggggccuuuacaaaucccugaagggggccuguaagcucaaacugugcggagucccuggcauccgccugcucgacggcaccuggguuagcauucagaccuccgaggacaucaagugguguccucccgauagacuggugaaccuucacgacuuccauucugaugaacuggagcaccucguggucgaggaacugaucaaacggcgcgagaauugccuugacgcgcuggaaagcauuaugacaacgaaguccgugagcuuuagacggcucucucaucugcgcaaacugguucccggguucggaaaggccuauaccaucuuuaacaaaacacucauggaggcugaugcccacuacaaguccgugaagaccuggaaugaagucauuccgagcaaaggcugccuggagguugggggaaagugucaucccccugugaacggcguguucuucaaugggaucauucuuggacccgacggcaacguccugaucccugagaugcagucuagccuccugcagcaacacauggaacuucuggaguccucugugaucccccucaugcacccgcuggcugauccuagcacagucuuuaaagaaggcgacgaggccgaagauuucguggagguucaucugcccgacgugcacaagcaggucuccgauguggaccucgggcugccuagcuggggaaaauaucuucugaugucugcgggcgcccucgcuauucugauccuggccauuguucuuaucauuugcuguagacgggugaauaagaccggguccacgcagagaggacaucgcgagagccggggcaagaugucugucgcuccccagaacgggaaaaucaucuccagcugggaacucuacaagagagaguccgaaacaggccuguga

SEQ ID NO: 223680 - RNA, 1575 nt, Artificial Sequence; identical to SEQ ID NO: 223679
  derived and/or modified CDS sequence (opt5) from glycoprotein__RABV__KJ174644.1

SEQ ID NO: 223681 - RNA, 1575 nt, Artificial Sequence
  derived and/or modified CDS sequence (opt5) from glycoprotein__RABV__KJ174645.1
augaucccccaggcccugcucagccugcuucugcucauuuccucucugugccuuggcaaguucccuaucuacaccauuccggacaaacuggggcccuggagcccuaucgauauucaccaucucuccugucccaacaaucugguggucgaggacgaaggaugcacaucucugagcggcuuuuccuauauggagcucaagguuggguacaucucugcuaucaaagugaacggauucacguguaccggcguggucacagaagccgagaccuauacaaauuuugugggguacguuaccacaaccuucaagagaaaacacuuucggccuaugcccgaugcgugccgcgcugcccaugaauggaagauggccggagacccuagauaugaggauagccugcaaaacccguaccccgacuaucacuggcuucggacggugaagaccacaaaagagucccugauuaucauuagcccuucugucgcugaucucgaccccuacgauaagucccugcauagccgcguguucccuggcggcaauugucuugggaucaccauuucuuccacauacugcagcaccaaccacgacuauacgaucuggaugcccgaagaggccagacugggaacaucuugugauauuuuuaccuccagccggggcaaacgcgcuuccaaagggggaaagaucugcggcuucguugacgaaagagggcucuacaagucucugaagggagccuguaaacugaagcucugcggcgugccgggccugcggcuuauggaugggacaugggucagcauccagaccuccgacgagaccaaaugguguccucccgaccagcuggugaaugugcacgauuuucauagcgacgagauugaacaccucaucgucgaggaacugguuaagaaacgcgaggaaugccuugaugcgcuggagucuauuaugacaacgaaguccgugagcuucagacggcucucucaucugcgcaaacuggugccuggauuuggcaaggccuauaccaucuucaacaagacacucauggaggcugacgcccacuacaaaagcgucagaaccuggaaugaaauuauccccuccaaggggugccugaaagugggaggcaugugucacccccauguugggggaguguuuuucaacggcaucauucuuggcccugaugggacaguccugaucccggagaugcagucuagccuccugcaacagcacauggaacuucuggaguccagcgugauuccccucaugcauccucuggcugaccccucuaccguuuucaaggaaggagaugaggccgaggacuuuguggaaauccaucugccugauguccacaaacagauuuccggcguggaccucgggcugcccagcuggggaaaguaucuucugaucucugcgggcgcccucgcuacgcugauccugacaauuuuccuuauuaccugcugucggaaggucaaucgcaccgaguccauccagagagggcacggcgaaagcgagcggaaaguguccguuucuccgcaaaacggaagagugaucagcuccugggaacucuacaagucuggcggggagacaaaucuguga

SEQ ID NO: 223682 - RNA, 1575 nt, Artificial Sequence
  derived and/or modified CDS sequence (opt5) from glycoprotein__RABV__KJ174646.1
augaucccccaggcccuccuguucgugccucugcuuauuccgagccugugccucggcaaguuucccaucuacaccauuccugacaaacuggggcccugguccccuaucgauauucaccaucuuucuugucccaacaaucuggucgcugaggacgaaggaugcacaagccucuccggcuucucuuauauggagcugaagguuggguacaucagcgccaucaaagugaacggauuuacguguaccggcguggucacagaagcggagaccuauacaaauuucgugggguacguuaccacaaccuuuaagagaaaacacuuccggccuaugccggaugcuugccgcgccgcccaugacuggaagauggcuggagaucccagauaugaagacucccugcaaaacccuuaccccgauuaucacuggcuccggacggugaagaccacaaaagagucucuggucauuaucagcccuuccguggccgaccuugaucccuacgacaagagccugcauucucgcguuuuuccguccggcaaaugucucggcauuaccgugagcucuacauacugcuccaccaaucacgauuauacgaucuggaugccugucgaggcuagacuggggacaagcugugacauuuucaccaacucuaagggaaagaaggccuccaagggcgggcggacaugcggauuuguggaugaacgcggccuuuacaaaagccugaagggggcguguaaacucaagcugugcggagugcccggccugagacucauggacggcaccugggucuccauccagaccucugacgauauuaaaugguguccucccgaccagcugguuaaucuucacgauuuccauagcgacgagaucgaacaccuggugguggaggagcucaucaagaaacgggaagggugccuggaugcccuugaguccauuaugacaacgaaaagcgucucuuuucgcagacugucccaucuccggaagcuggugcccggauucggcaaggcuuauaccaucuuuaacaauacacugauggaagccgacgcucacuacaagagcguucgcaccuggaacgaggugauuccuucuaaagggugccucaaggucggaggcagaugucacccgcccgugaaugggguuuucuucaacggaaucauucugggcccugauggcaaugugcuuauccccgaaaugcagagcucccugcuccaacagcauauggagcugcuugagucuagcgucaucccucugaugcacccccucgccgacccguccacaguguuuaaagauggggacgaagcggaggauuucgucgaagugcaucugccugacguucacaaacaggugagcgagauugaccugggacuccccucuuggggcaaguaucugcuuauguccgccgggguccuggcuacccucauccuggccauuuuucugaucacgugcugucggcgcgcuaacagaacagaaagcacccagcggggaagacgcgagucuggcgggaaaguguccguugccccucaaaauggcaaggugauuagcuccugggagcuuuacaaaucugaaagcgagaccggacucuga

SEQ ID NO: 223683 - RNA, 1575 nt, Artificial Sequence
  derived and/or modified CDS sequence (opt5) from glycoprotein__RABV__KJ174647.1
augaucccccaggcccuccuguucgugccucugcuuauuccgagccugugccucggcaaguuucccaucuacaccauuccugacaaacuggggcccugguccccuaucgauauucaccaucuuucuugucccaacaaucuggucgcugaggacgaaggaugcacaagccucuccggcuucucuuauauggagcugaagguuggguacaucagcgccaucaaagugaacggauuuacguguaccggcguggucacagaagcggagaccuauacaaauuucgugggguacguuaccacaaccuuuaagagaaaacacuuccggccuaugccggaugcuugccgcgccgcccaugacuggaagauggcuggagaucccagauaugaagacucccugcaaaacccuuaccccgauuaucacuggcuccggacggugaagaccacaaaagagucucuggucauuaucagcccuuccguggccgaccuugaucccuacgacaagagccugcauucucgcguuuuuccguccggcaaaugucucggcauuaccgugagcucuacauacugcuccaccaaucacgauuauacgaucuggaugccugucgaggcuagacuggggacaagcugugacauuuucaccaacucuaagggaaagaaggccuccaagggcgggcggacaugcggauuuguggaugaacgcggccuuuacaaaagccugaagggggcguguaaacucaagcugugcggagugcccggccugagacucauggacggcaccugggucuccauccagaccucugacgauauuaaaugguguccucccgaccagcugguuaaucuucacgauuuccauagcgacgagaucgaacaccuggugguggaggagcucaucaagaaacgggaagggugccuggaugcccuugaguccauuaugacaacgaaaagcgucucuuuucgcagacugucccaucuccggaagcuggugcccggauucggcaaggcuuauaccaucuuuaacaauacacugauggaagccgacgcucacuacaagagcguucgcaccuggaacgaggugauuccuucuaaagggugccucaaggucggaggcagaugucacccgcccgugaaugggguuuucuucaacggaaucauucugggcccugauggcaaugugcuuauccccgaaaugcagagcucccugcuccaacagcauauggagcugcuugagucuagcgucaucccucugaugcacccccucgccgacccguccacaguguuuaaagauggggacgaagcggaggauuucgucgaagugcaucugccugacguucacaaacaggugagcgagauugaccugggacuccccucuuggggcaaguaucugcuuauguccgccgggguccuggcuacccucauccuggccauuuuucugaucacgugcugucggcgcacaaacagaaccgaaagcacccagcggggaagacgcgagucuggcgggaaaguguccguugcuccucaaaauggcaagauuaucagcuccugggagcuuuacaaaucugaaagcgagacaggacucuga

SEQ ID NO: 223684 - RNA, 1575 nt, Artificial Sequence; identical to SEQ ID NO: 223355
  derived and/or modified CDS sequence (opt5) from glycoprotein__RABV__KJ174648.1

SEQ ID NO: 223685 - RNA, 1575 nt, Artificial Sequence; identical to SEQ ID NO: 223355
  derived and/or modified CDS sequence (opt5) from glycoprotein__RABV__KJ174649.1

SEQ ID NO: 223686 - RNA, 1575 nt, Artificial Sequence
  derived and/or modified CDS sequence (opt5) from glycoprotein__RABV__KJ174650.1
augauccugcaggcccuccuguucgugccccuucugauuagcccucucugccugggcaaguuuccgaucuacaccauucccgacaaaaucgggccuuggucccccauugauauccaccaucuuucuuguccuaacaaucuggucguugaggacgaaggaugcacaacgcucagcggcuucuccuauauggagcugaaggugggguacaucucugcuauuaaagugaacggauuuaccuguacaggcgucgugaccgaagccgagacauauaccaauuucguuggguacgugacaaccacguuuaagagaaaacacuuccggcccaccccugaugcgugccgcgcugccuauaacuggaagaucgccggagacccgagauacgaagauagccugcaaaaucccuauccugacuaccauuggcuccggacagucaagaccacaaaagagucccugauuaucauuucucccagcguggcugaucuugacccuuacgauaagucccugcacagccgcguuuuucccucuggcaaaugucucggcaucaccauuuccagcacguauugcucuacaaaccaugacuacaccaucuggaugccggaggaagccagacuggggacauccugugauaucuucgcuaauagcaagggaaaacgggccucuaagggcgggaagaccugcggauuuguggacgagcgcggccuuuauaaaucccugagaggggcguguaagcucaaacugugcggagucccuggccugcggcucauggauggcaccugggugagcauucagacaacggacgaaaccaaguggugucccccugaccagcuggugaaccuucacgauuuccacuccgacgagaucgagcaucuggucguugaggaacucgugaaaaagcgcgaagagugccuggaugcccuugaaucuauuaugacaaccaaaagcguguccuuuagacggcugagccaccuccgcaagcugguccccggguucggaaaggcuuacacaaucuuuaauaaaacccugauggaggccgacgcucauuauaagucugugcagacguggaacgagauuauccccuccaaaggcugccucaagguugggggaagaugucacccucacguggauggcgucuucuucaaugggaucauucugggaccggacggcaacgugcuuauccccgaaaugcaaagcucucugcuccagcagcauauggagcugcuugaaagcuccguuauuccucugaugcacccccucgccgauccuucuacaguguuuaaagacggcgaugaggcggaagacuucgucgaggugcaucugcccgauguccacaaacaggugagcgggguugaccugggacucccggacuggggcaaguaccugcuuauguccgccggggcucuggccacccuccugcugaccaucuuucuuaugacaugcugucggaaggugaauaagaccgagagcacacaucgcgauccuggagaaucuggcagaaaagucuccguggcuccccggaacgggaagguuauuagcucuugggagcucuauaaauccggcggagaaacgagacuguga

SEQ ID NO: 223687 - RNA, 1575 nt, Artificial Sequence
  derived and/or modified CDS sequence (opt5) from glycoprotein__RABV__KJ174651.1
augauccugcaggcccuccuguucgugccccuucugauuagcccucucugccugggcaaguuuccgaucuacaccauucccgacaaaaucgggccuuggucccccauugauauccaccaucuuucuuguccuaacaaucuggucguugaggacgaaggaugcacaacgcucagcggcuucuccuauauggagcugaaggugggguacaucucugccauuaaagugaacggauuuaccuguacaggcgucgugaccgaagccgagacauauaccaauuucguuggguacgugacaaccacguuuaagagaaaacacuuccggcccaccccugaugcgugccgcgcugccuauaacuggaagaucgccggagacccgagauacgaagauagccugcaaaaucccuauccugacuaccauuggcuccggacagucaagaccacaaaagagucccugauuaucauuucucccagcguggcugaucuugacccuuacgauaagucccugcacagccgcguuuuucccucuggcaaaugucucggcaucaccauuuccagcacguauugcucuacaaaccaugacuacaccaucuggaugccggaggaagccagacuggggacauccugugauaucuucaccaauagcaagggaaaacgggcuucuaagggcgggaagaccugcggauuuguggacgagcgcggccuuuauaaaucccugagaggggccuguaagcucaaacugugcggagucccuggccugcggcucauggauggcacaugggugagcauucagacgaccgacgacacaaaguggugucccccugaucagcuggugaaccuucacgacuuccacuccgaugaaaucgagcaucuggucguugaggaacucgugaaaaagcgcgaggaaugccuggacgcgcuugagucuauuaugaccacaaaaagcguguccuuuagacggcugagccaccuccgcaagcugguccccggguucggaaaggccuacaccaucuuuaauaaaacgcugauggaagcugaugcccauuauaagucugugcagacauggaacgagauuauccccuccaaaggcugccucaagguugggggaagaugucacccucacguggacggcgucuucuucaaugggaucauucugggaccggauggcaacgugcuuauccccgagaugcaaagcucucugcuccagcagcauauggaacugcuugagagcuccguuauuccucugaugcacccccucgcugacccuucuaccguguuuaaagauggcgacgaagccgaggauuucgucgaaauccaucugcccgacgugcacaagcaggucagcgggguggaccugggacucccggauuggggcaaguaccugcuuauguccgcgggggcccuggcuacccuccugcugacaauuuuucuuaugaccugcugucggaaaguuaauaagacagagagcacgcaucgcgacccuggagagucuggcagaaaaguguccgucgcuccccggaacgggaaggugaucagcucuugggaacucuauaaauccggcggagagaccagacuguga

SEQ ID NO: 223688 - RNA, 1575 nt, Artificial Sequence
  derived and/or modified CDS sequence (opt5) from glycoprotein__RABV__KJ174653.1
augaucccccaggcccuccuguucgugccucugcuuauuagcucccugugcuuuggcgaguucccgaucuacaccauucccgaaaagcucgggccuuggucucccaucgacauucaccaucugagcuguccuaacaaucuugucguugaggaugaaggaugcaacucccugucuggcuuuagcuauauggagcucaaagugggguacaucuccucuaucaaggugaauggauucacauguacgggcgucgugaccgaagcugagacauauaccaacuuuguuggguacgugacaaccacauucaaaagaaagcacuuucggcccaugccugacgccugccgcgcggcuuauagcuggaaaauugccggagauccgagauacgaggaaucccugcauaaucccuauccugacuaccacuggcugcggaccgucaagacgaccaaggagagccucgugaucauuucucccuccguugccgaucuggacccuuacgauaaaagccuucauucucgcguguucuccggcggcaagugucuggggaucacaauuagcucuaccuauugcuccacaaaccacgacuacaccaucuggaugcccgaagaggcuagacucggaacgagcugugauauuuuuacaaauuccaaaggcaagcgggccucuaaagggggaaagaccugcggcuucgucgacgagcgcgggcuguauaagagccuuaaaggagcuuguaagcugaaacucugcggcgugccgggccugagacugauggaugggacauggguguccauccaaaccagcgacgaaaccaagugguguccucccgaucagcucgucaacauccacgacuuucggucugacgagauugaacaucugguuguggaggaacuugugaaaaagcgcgaggagugccuggaugcccucgaauccaucaugacaacgaaaagcgucucuuucagacggcugagccaccuucgcaagcuggugccuggauuuggcaaggcguacaccauuuucaauaaaacacucauggaggccgacgcucauuauaaguccguuagaaccuggaacgaaaucauucccucuaaagggugccugagcgugggaggccggugucacccccacgucaaugggguguucuuuaacggaaucaucaugggcccugauggcuccguucugauuccggagaugcagagcucucuccugcagcaacauauggaacuucuggaguccagcgugaucccccucaugcacccucuggccaaucccucuacagucuucaaggacggggaugaggcugaagacuuuauugaggugcaucuuccugauguccaggaacagguguccggaguugaccugggccuccccaacugggggaaauacgugcugaugagcgccggagcgcuggccauccucaugcugaccauuuuccuuaugacguuuugccgcagaacaaaucggaccaaguccauccagcaaggcccgggggagucuggcagaaaggucagcgugccuccccagaacggaaaaguuaucuccucuugggagagcuucaaguccggcggggaaaccggacuguga

SEQ ID NO: 223689 - RNA, 1575 nt, Artificial Sequence; identical to SEQ ID NO: 223363
  derived and/or modified CDS sequence (opt5) from glycoprotein__RABV__KJ174654.1

SEQ ID NO: 223690 - RNA, 1575 nt, Artificial Sequence; identical to SEQ ID NO: 223406
  derived and/or modified CDS sequence (opt5) from glycoprotein__RABV__KJ174655.1

SEQ ID NO: 223691 - RNA, 1575 nt, Artificial Sequence
  derived and/or modified CDS sequence (opt5) from glycoprotein__RABV__KJ174656.1
augaucccccagacccugcuguucgugccucugcuuauucugccgagcugccucggcaaguuucccaucuacacaauuccugacaaaaucgggcccugguccccuauugauauccaccaucugucuugucccaacaaucuugucguugaggacgaaggaugcacgagccuguccggcuucucuuauauggagcucaaggugggguacaucagcgccauuaaagugaacggauuuaccuguacaggcgucgugaccgaagcugagacauauaccaauuucguuggguacgugacaaccacguuuaagagaaaacacuuccggccuaccccggaugccugccgcgcggcuuauaacuggaagauggccggagaccccagauacgaagauucccugcaaaauccuuaucccgacuaccauuggcugcggacagucaagaccacaaaagagucucucaucauuaucagcccuuccguggccgaucuggaccccuacgauaagagccuucacucucgcguuuuuccguccggcaaaugucugggcauuaccgugagcucuacguauugcuccacaaaccaugacuacaccaucuggaugccugaggaagcuagacucgggacaagcugugauauuuucaccaauucuaagggaaaacgggccuccaagggcgggaagaccugcggauuugucgacgagcgcggccuguauaaaagccuuagaggggcuuguaagcugaaacucugcggagugcccggccugcggcugauggauggcacauggguguccauccagacgaccgacgaaacaaagugguguccuucugaccagcucgucaaccugcacgauuuccacagcgacgagaucgagcaucuuguuguggaggaacuggugaaaaagcgcgaagagugccucgaugcccuggaauccauuaugaccacaaaaagcgucucuuuuagacggcuuucccaccuccgcaagcucgugcccggguucggaaaggcguacaccaucuuuaauaaaacgcugauggaggccgacgcucauuauaagagcguucagacauggaacgagauuauccccucuaaaggcugccugaaggucgggggaagaugucacccucacguggauggcguguucuucaaugggauuauccucggaccggacggcaacguucugauccccgaaaugcaaagcucccuucugcagcagcauauggagcuccuggaaucuagcgugauuccucuuaugcacccccuggccgauccuuccaccgucuuuaaagacggcgaugaggcugaagacuucguggagguccaucuccccgaugugcacaagcagguuagcgggguggaccugggacugccggacuggggcaaguaccuccugaugucugccggggcgcuugccacccugcuccugacaaucuuucugaugaccugcugucggaaagucaauaagacagaguccacgcaacgcgauagcggagaaucuggcagaaaaguguccauugcuccucggaacgggaagguuaucagcuccugggagcuuuauaaaucuggcggagacaccagacucuga

SEQ ID NO: 223692 - RNA, 1575 nt, Artificial Sequence; identical to SEQ ID NO: 223691
  derived and/or modified CDS sequence (opt5) from glycoprotein__RABV__KJ174657.1

SEQ ID NO: 223693 - RNA, 1575 nt, Artificial Sequence
  derived and/or modified CDS sequence (opt5) from glycoprotein__RABV__KJ174658.1
augaucagccagacccuccuguucgugacacugcuuauuuccucucugugcuuuggcgaguuccccaucuacacgauuccugaaaagcucgggccguggagccccaucgacauucaccaucuguccuguccuaacaaucuugucguugaggaugaaggaugcaacucucugagcggcuuuuccuauauggagcucaaagugggguacaucucuagcaucaaggugaauggauucaccuguacaggcgucgugaccgaagccgagacauauaccaacuuuguuggguacgugacaaccacguucaaaagaaagcacuuucggcccaugccugacgcuugccgcgccgcguauaauuggaaaauguccggagaucccagauacgaggaaagccugcauaacccuuauccggacuaccacuggcugcggaccgucaagacaaccaaggagucucucgugauuaucucccccagcguugcugaucuggacccuuacgauaaaucucuucauucccgcguguucagcggcggcaagugucuggggauuacaaucucuuccaccuauugcagcacgaaucacgacuacacacucuggaugcccgaagaggccagacugggaaccuccugugauauuuuuacaaacucuaaaggcaagcgggccagcaaagggggaagaaccugcggcuucgucgacgagcgcgggcuuuauaagucccugaagggagcuuguaaacucaagcugugcggcgugccuggccugcggcucauggaugggaccugggugagcauccaaacaucugacgaaacgaaauggugucccccggaucagcuggucaauauucacgacuuucgcuccgacgagaucgaacaucuuguuguggaggaacuggugaagaaaagagaggagugccucgaugcccuggaaagcaucaugaccacaaagucugucagcuuccggcgccuuucccaccugagaaaacucgugccuggauuuggcaaggcuuacaccauuuucaacaagacacugauggaggccgacgcgcauuauaaaucuguucggaccuggaaugaagugauccccagcaaggggugccuguccgucggaggccgcugucacccucacguggaugggguuuucuuuaacggaauuauccucggccccgacggcagcgugcugauucccgagaugcagucuucccuucugcagcaacauauggaacuccuggagagcucugucaucccucuuaugcacccgcuggccaaucccuccacgguguucaaagauggggacgaggcugaagauuuugucgaggugcaucucccugacguucaggaacaggugagcggagucgaucugggccugcccaacugggggaaguacgugcucauguccgccggagcucuggccauccuucugcucacaauuuuccugaugaccugcuguagacgggcgaauagaaccaaaucuauccgccagggcccugaggaaagcgggcggagaguuuccgugcccccgcaaaacggcaaggucauuucuagcugggaguccuuuaagagcggaggcgagacagggcuguga

SEQ ID NO: 223694 - RNA, 1575 nt, Artificial Sequence
  derived and/or modified CDS sequence (opt5) from glycoprotein__RABV__KJ174659.1
augaucagccagacccugcuguucgugccccugcuuauuuccucucugugccucggcgaguuuccuaucuacacaauuccggaaaagcuggggcccuggagcccuaucgacauucaccaucuuuccugucccaacaaucuggucguugaggaugaaggaugcaacucucucagcggcuucuccuauauggagcugaaagugggguacaucucuagcaucaaggugaauggauuuacguguaccggcgucgugacagaagccgagaccuauacaaacuucguuggguacgugaccacaaccuuuaaaagaaagcacuuccggccuaugcccgacgcuugccgcgccgcguauaauuggaaaauguccggagauccuagauacgaggaaagccugcauaacccguaucccgacuaccacuggcuccggacggucaagaccacaaaggagucucuggugauuaucuccccuagcguugcugaucuugaccccuacgauaaaucucugcauucccgcguguuuagcggcggcaagugucucgggauuaccaucucuuccacauauugcagcaccaaucacgacuacacgcuguggaugccugaagaggccagacuuggaacauccugugauauuuucaccaacucuaaaggcaagcgggccagcaaagggggaaagacaugcggcuuugucgacgagcgcgggcuguauaagucccucaaaggagcuuguaagcugaaacugugcggcgugcccggccucagacugauggaugggaccugggugagcauccaaaccucugacgaaacaaagugguguccgccugaucagcuugucaauauucacgacuuccauuccgacgagaucgaacaccugguuguggaggaacucgugaaaaagcgggaggagugccuggaugcccuugaaagcaucaugacgaccaaaucugucagcuuucgcagacugucccaucuccggaagcuggugcccggauucggcaaggcuuacacaauuuuuaacaaaacccugauggaggccgacgcgcacuauaagucuguucgcacauggaaugaagugaucccuagcaaagggugccucuccgucggaggcagaugucacccccauguggaugggguuuucuucaacggaauuauccugggccccgacggcagcgugcuuauuccugagaugcagucuucccugcuccagcaacacauggaacugcuugagagcucugucaucccgcugaugcauccccucgccaauccuuccaccguguuuaaggauggggacgaggcugaagauuucgucgaggugcaccuccccgacguucaggaacaggugagcggagucgaucugggccucccuaacugggggaaauacgugcugauguccgccggagcucuugccauccugcuccugacgauuuuucugaugacaugcugucggcgcgcgaauagaaccaagucuauccggagaggccccgaggaaagcgggcgcaagguuuccgugccgccucagaacggcaaagucauuucuagcugggaguccuucaagagcggaggcgagacccggcuuuga

SEQ ID NO: 223695 - RNA, 1575 nt, Artificial Sequence
  derived and/or modified CDS sequence (opt5) from glycoprotein__RABV__KJ174660.1
augaucccccaggcccuccuguucgugccucugcuuauuagcucccugugccucggcaaguuuccgaucuacaccauucccgagaaacuggggccuuggucucccaucgacauucaccaucuuggauguccuaacaaucuggucguugaagaugagggcugcgacagccucuccggguucucuuauauggaacugaaggugggauacaucagcgcuaucaaagugaacggcuuuacauguacgggggucgugaccgaggccgaaacauauaccaauuucguuggauacgugacaaccacauuuaagagaaaacacuuccggcccaugccugaugcgugccgcgcugccuauaacuggaagaccgccggcgacccgagauacgaggagucccugcauaaucccuauccugauuaccacuggcuccggacggucaagaccacaaaagaaucucugauuaucauuagccccuccguggcugaccuugauccuuacgacaagagccugcauucucgcguuuuucccggcgggaaaugucucggaaucaccguguccagcacauauugcucuaccaaccacgauuacacgauuuggaugccggaggaaacaagacugggcaccuccugugacaucuucacaaauagccgggggaagcgcgccucuaaaggaggcaagaccugcggguuugucgaugagagaggacuuuauaagucccugaaaggcgcuuguaagcucaaacugugcggcgugccugggcugcggcucauggacggaaccugggugagcauucaaacacccgaugagacgaagugguguuccccugaccagcuggucaaccuucacgacuuccauucugaugaaaucgagcaccugguuguggaggagcucgugaaaaagcgcgaagagugccuggacgcccuugagagcaucaugaccacaaaauccgucagcuuuagacggcugucucaucuccgcaagcuggugcccggcuucgggaaggcguacaccauuuuuaauaaaacacugauggaagccgaugcucacuauaaguccguuagaaccugggacgagaucauucccagcaaaggaugccuccgggugggcgggcgcugucacccucaugucaacggaguguucuucaauggcaucauucugggcccggaugggcacguucuuauccccgaaaugcagucuagccugcuccagcaacauauggagcugcuugaauccucugugaucccucugaugcaccccgucgccaacccuagcacgguguuuaaggacggagaugaggcugaggacuucgucgaagugcaucuccccgauguucacgaacagguguccggcgucgaccuggggcugccgaauuggggaaaauacaugcucaugagcgccggcgcgcuggccacaauuauccuuaccauuuuucugaucgcuugcuguagacgggugaacagaaaggaaucucgccagcaggggcucggcgaguccggacggaagguuagcgugaccccucaaaauggcaaaguccugucuuccugggaaugguauaagagcgggggagagacaagacuguga

SEQ ID NO: 223696 - RNA, 1575 nt, Artificial Sequence
  derived and/or modified CDS sequence (opt5) from glycoprotein__RABV__KJ174661.1
augaucccccaggcccugcuccugcuuccucugaugauuagcucccucugccugggcaaguucccgaucuacaccauucccgacaaacuugggccuuggucucccaucgauauucaccaucugagcuguccuaacaaucucguggucgaggacgaaggaugcacaucccugucuggcuuuagcuauauggagcugaagguuggguacaucuccgcuaucaaagugaacggauucacguguaccggcguggucacagaagccgagaccuauacaaauuuugugggguacguuaccacaaccuucaagagaaaacacuuucggcccaugccugaugcgugccgcgcugccuauaacuggaagguggccggagacccgagauacgaagagucucuccaaaaucccuauccugauuaccauuggcugcggacggucaagaccacaaaagagagccuuauuaucauuucccccagcguggcugaccuggauccuuacgacaagucucuccgcuccagaaucuuccccggcggcaaaugucuggggauuaccguuagcucuacauauugcuccaccaaccacgauuacacgaucuggaugccggaagaggcccggcuuggaacaagcugugacauuuuuaccaauucuaagggcaaacgcgcuuccaaagggggaaagaucugcggcuucguggaugaaagagggcuguauaaaagccucaagggagccuguaaacugaagcugugcggcgucuccggccuccggcugauggacgggacauggguggcgauccagaccucugaggagaccaaaugguguccuagcgaucagcuugugaaccugcaugacuuucacuccgacgaaauugagcaccucgucguugaggaacuggugaagaaacgcgaagagugccuugaugcccuggagagcaucaugacaacgaagucuguguccuucagacggcucagccaucugcgcaagcugguccccggauuuggcaaggcuuacaccauuuucaauaagacacucauggaagccgacgcucacuauaacucugugagaaccuggaaugagaucauuccuagcaaagggugccugaagguuggaggccggugucauccccacguggauggggucuuuuucaacggaaucauccuuggccccgacggcaaugugcugauuccugaaaugcaguccucucuccugcaacagcacauggagcuucuggaaagcuccguuaucccgcucaugcauccccuggccgauccuagcacaguguucaaagagggggacgaggcggaaaacuuugucgaggugcaucugcccgauauucacaagcaggucucuggaaucgaccucggccugccuaauugggggaaguaccuucugauguccgccggagcucucgccgcucugauucugaccaucuuccuuaucacgugcugucgcagagugaacacaaccaaaagcauuaagcagggccccgaagagucucggagaaaaguuuccgugaccccgcaaagcgggcgcgucguguccucuugggaacucuauaagaaaggcggagagacaaagcuguga

SEQ ID NO: 223697 - RNA, 1575 nt, Artificial Sequence
  derived and/or modified CDS sequence (opt5) from glycoprotein__RABV__KJ174662.1
augaucccccaggcccugcuccugcuuccucugaugauuagcucccucugccugggcaaguucccgaucuacaccauucccgacaaacuugggccuuggucucccaucgauauucaccaucugagcuguccuaacaaucucguggucgaggacgaaggaugcacaucccugucuggcuuuagcuauauggagcugaagguuggguacaucuccgcuaucaaagugaacggauucacguguaccggcguggucacagaagccgagaccuauacaaauuuugugggguacguuaccacaaccuucaagagaaaacacuuucggcccaugccugaugcgugccgcgcugccuauaacuggaagguggccggagacccgagauacgaagagucucuccaaaaucccuauccugauuaccauuggcugcggacggucaagaccacaaaagagagccuuauuaucauuucccccagcguggcugaccuggauccuuacgacaagucucuccgcuccagaaucuuccccggcggcaaaugucuggggauuaccguuagcucuacauauugcuccaccaaccacgauuacacgaucuggaugccggaagaggcccggcuuggaacaagcugugacauuuuuaccaauucuaagggcaaacgcgcuuccaaagggggaaagaucugcggcuucguggaugaaagagggcuguauaaaagccucaagggagccuguaaacugaagcugugcggcgucuccggccuccggcugauggacgggacauggguggcgauccagaccucugaggagaccaaaugguguccuagcgaucagcuugugaaccugcaugacuuucacuccgacgaaauugagcaccucgucguugaggaacuggugaagaaacgcgaagagugccuugaugcccuggagagcaucaugacaacgaagucuguguccuucagacggcucagccaucugcgcaagcugguccccggauuuggcaaggcuuacaccauuuucaauaagacacucauggaagccgacgcucacuauaacucugugagaaccuggaaugagaucauuccuagcaaagggugccugaagguuggaggccggugucauccccacguggauggggucuuuuucaacggaaucauccuuggccccgacggcaaugugcugauuccugaaaugcaguccucucuccugcaacagcacauggagcuucuggaaagcuccguuaucccgcucaugcauccccuggccgauccuagcacaguguucaaagagggggacgaggcggaaaacuuugucgaggugcaucugcccgauauucacaagcaggucucuggaaucgaccucggccugccuaauugggggaaguaccuucugauguccgccggagcucucgccgcucugaugcugaccauuuuccuuaucacgugcugucgcagagugaacacaaccaaaagcaucaagcagggccccgaagagucucggagaaaaguuuccgugaccccgcaaagcgggcgcgucguguccucuugggaacucuauaagaaaggcggagagacacggcuguga

SEQ ID NO: 223698 - RNA, 1575 nt, Artificial Sequence
  derived and/or modified CDS sequence (opt5) from glycoprotein__RABV__KJ174663.1
augaucccccaggccauucugagcgugccucuccugaucuccucucuuugcuucggcaaguuuccgauuuacaccauccccgagaaacuggggccuuggagccccauugacauccaccaucucuccuguccuaacaaucuggucguugaagaugagggaugcacaacgcuuucuggcuucagcuauaucgaacugaaggugggguacauuuccgcuaucaaagugaacggauuuaccuguacaggcgucgugaccgaggccgaaacauauaccaauuucguuggguacgugacaaccacguuuaagagaaaacacuuccggcccaugccugacgcgugccgcgcugccuauaacuggaagauugccggagauccgagauacgaggagucucuccauaaucccuauccugacuaccacuggcugcggaccgucaagacaaccaaagaaagccuggugaucauuucccccagcguugcugaucucgacccuuacgauaagucucugcauucccgcguguuucccggcggcaaaugucuugggaucacaauuagcucuaccuauugcuccacgaaccacgacuacacaaucuggaugccggaggaagccagacugggaaccagcugugauaucuucacaaauucucggggcaagcgcgcuuccaaagggggaagaaccugcggcuuugucgacgagcgggggcucuauaagagccugaagggagccuguaaacuuaagcugugcggcgugccuggccuccgccugauggaugggaccuggguguccauucaagcgucugacgagacaaaaugguguagccccgaucagcuggucaacguucacgacuuccauuccgacgaaaucgagcaccucgugguggaggagcuggucaagagacgggaagagugccuugaugcccuggagagcauugugacgaccaaaucuaucuccuuucgcagacucagccaucugcggaaacuuguuccuggauucggcaaggcuuacacaauuuuuaauaagacccugauggaagccgacgcucacuauaagucugugcgcacauggaacgagaucauccccagcaaagggugccucuccgucggaggcagaugucacccccaugugaaugggguuuucuucaacggaauuauccugggcccugauggcaaugugcugauuccggaaaugcagucuagccuccugcagcaacacauggagcuucuggaauccagcgucaucccccucaugcauccucuggccgaccccucuaccguguuuaaggauggggacgaggcggaggauuucgucgaagugcaccuuccugacguucaggaacagguguccggagucgaucugggccuccccaacugggggaaauacgugcugaugagcgccggagcucuggccauucucauccugacgaucuuucuuauuacaugcugucggagagcuaauaagaccaaaucuacccagcaaggccucgggggcuccggacgcaagguuagcguguccccgcagaacggcaaggucaucucuagcugggaauccuauaaaaacgggggagagacacggcuguga

SEQ ID NO: 223699 - RNA, 1575 nt, Artificial Sequence
  derived and/or modified CDS sequence (opt5) from glycoprotein__RABV__KJ174664.1
augaucccccaggccauucugagcgugccucuccugaucuccucucuuugcuucggcaaguuuccgauuuacaccauccccgagaaacuggggccuuggagccccauugacauccaccaucucuccuguccuaacaaucuggucguugaagaugagggaugcacaacgcuuucuggcuucagcuauaucgaacugaaggugggguacauuuccgcuaucaaagugaacggauuuaccuguacaggcgucgugaccgaggccgaaacauauaccaauuucguuggguacgugacaaccacguuuaagagaaaacacuuccggcccaugccugacgcgugccgcgcugccuauaacuggaagauugccggagauccgagauacgaggagucucuccauaaucccuauccugacuaccacuggcugcggaccgucaagacaaccaaagaaagccuggugaucauuucccccagcguugcugaucucgacccuuacgauaagucucugcauucccgcguguuucccggcggcaaaugucuugggaucacaauuagcucuaccuauugcuccacgaaccacgacuacacaaucuggaugccggaggaagccagacugggaaccagcugugauaucuucacaaauucucggggcaagcgcgcuuccaaagggggaagaaccugcggcuuugucgacgagcgggggcucuauaagagccugaagggagccuguaaacuuaagcugugcggcgugccuggccuccgccugauggaugggaccuggguguccauucaagcgucugacgagacaaaaugguguagccccgaucagcuggucaacguucacgacuuccauuccgacgaaaucgagcaccucgugguggaggaacuggucaagagacgggaagagugccuugaugcccuggagagcauugugacgaccaaaucuguuuccuuucgcagacucagccaucugcggaaacuugugccuggauucggcaaggcuuacacaaucuuuaauaagacccugauggaagccgacgcucacuauaagucuguccgcacauggaacgagauuauccccagcaaagggugccucuccgugggaggcagaugucacccccauguuaaugggguguucuucaacggaaucauucugggcccugauggcaauguccugaucccggaaaugcagucuagccuccugcagcaacacauggagcuucuggaauccagcgugauuccccucaugcauccucuggccgaccccucuaccgucuuuaaggauggggacgaggcggaggauuucguggaaguucaccuuccugacgugcaggagcaggucuccggaguggaucugggccuccccaacugggggaaauacaugcugaugagcgccggagcucuggccauccucauucugacgaucuuucuuaucacaugcugucggagagcuaauaagaccaaaucuacccagcaaggccucgggggcuccggacgcaagguuagcguguccccgcagaacggcaaggucauuucuagcugggaauccuauaaaaacgggggagagacacggcuguga

SEQ ID NO: 223700 - RNA, 1575 nt, Artificial Sequence
  derived and/or modified CDS sequence (opt5) from glycoprotein__RABV__KJ174665.1
augaucccccaggccauucugagcgugccucuccugaucuccucucuuugcuucggcaaguuuccgauuuacaccauccccgagaaacuggggccuuggagccccauugacauccaccaucucuccuguccuaacaaucuggucguugaagaugagggaugcacaacgcuuucuggcuucagcuauaucgaacugaaggugggguacauuuccgcuaucaaagugaacggauuuaccuguacaggcgucgugaccgaggccgaaacauauaccaauuucguuggguacgugacaaccacguuuaagagaaaacacuuccggcccaugccugacgcgugccgcgcugccuauaacuggaagauugccggagauccgagauacgaggagucucuccauaaucccuauccugacuaccacuggcugcggaccgucaagacaaccaaagaaagccuggugaucauuucccccagcguugcugaucucgacccuuacgauaagucucugcauucccgcguguuucccggcggcaaaugucuugggaucacaauuagcucuaccuauugcuccacgaaccacgacuacacaaucuggaugccggaggaagccagacugggaaccagcugugauaucuucacaaauucucggggcaagcgcgcuuccaaagggggaagaaccugcggcuuugucgacgagcgggggcucuauaagagccugaagggagccuguaaacuuaagcugugcggcgugccuggccuccgccugauggaugggaccuggguguccauucaagcgucugacgagacaaaaugguguagccccgaucagcuggucaacguucacgacuuccauuccgacgaaaucgagcaccucgugguggaggagcuggucaagagacgggaagagugccuugaugcccuggagagcauugugacgaccaaaucuaucuccuuucgcagacucagccaucugcggaaacuuguuccuggauucggcaaggcuuacacaauuuuuaauaagacccugauggaagccgacgcucacuauaagucugugcgcacauggaacgagaucauccccagcaaagggugccucuccgucggaggcagaugucacccccaugugaaugggguuuucuucaacggaauuauccugggcccugauggcaaugugcugauuccggaaaugcagucuagccuccugcagcaacacauggagcuucuggaauccagcgucaucccccucaugcauccucuggccgaccccucuaccguguuuaaggauggggacgaggcggaggauuucgucgaagugcaccuuccugacguucaggaacagguguccggagucgaucugggccuccccaacugggggaaauacgugcugaugagcgccggagcucuggccauucucauccugacgaucuuucuuauuacaugcugucggagagcuaauaagaucaaaucuacccgccagggccucgggggcuccggacggaagguuagcguguccccgcaaaacggcaaggucauuucuagcugggaauccuauaaaaacgggggagagaccagacuguga

SEQ ID NO: 223701 - RNA, 1575 nt, Artificial Sequence
  derived and/or modified CDS sequence (opt5) from glycoprotein__RABV__KJ174666.1
augaucccccaggcccuccuguucgugccucugcuuauuccgagccugugccucggcaaguuucccaucuacaccauuccugacaaacuggggcccugguccccuaucgauauucaccaucuuucuugucccaacaaucuggucguugaggacgaaggaugcacaagccucuccggcuucucuuauauggagcugaaggugggguacaucagcgcuaucaaagugaacggauuuacguguaccggcgucgugacagaagccgagaccuauacaaauuucguuggguacgugaccacaaccuuuaagagaaaacacuuccggccuaugccggaugcgugccgcgcugcccaugacuggaagauugccggagaucccagauaugaagacucccugcaaaacccuuaccccgauuaucacuggcuccggacggucaagaccacaaaagagucucuggugaucauuagcccuuccguugcugagcuugaccccuacgauaagagccugcauucucgcguguuuccguccggcaaaugucucggcaucaccgucagcucuacauacugcuccaccaaucacgacuauacgauuuggaugccuguggaagccagacuggggacaagcugugauaucuucaccaacucucggggaaagaaggcuuccaaaggcgggcgcacaugcggauuuguggacgagagaggccuuuacaagagccugaaaggggccuguaagcucaaacugugcggaguccccggccugcggcucauggauggcaccuggguuuccauucagaccucugacgacaucaagugguguccucccgaucagcuggugaaucuucacgacuuccauagcgaugaaaucgagcaccugguggucgaggaacucauuaaaaagcgcgaggggugccuggacgcgcuugaauccaucaugacaacgaaaagcgugucuuuuagacggcugucccaucuccgcaagcugguucccggauucggcaaggccuauaccauuuuuaacaauacacugauggaggcugaugcccacuacaaaagcgugagaaccuggaacgaagucaucccuucuaaggggugccucaaagugggaggccggugucacccgcccguuaaugggguguucuucaacggaauuauccugggcccugacggcaagguccuuauccccgagaugcagagcucccugcuccaacagcauauggagcugcuugaaucuagcgugauuccucugaugcacccccucgcugauccguccacagucuuuaaagacggggaugaggccgaagacuucguggagguucaucugccugaugugcacaagcaggucagcgacguggaccugggacuccccucuuggggcaaguaucugcuuauguccgcgggggcccuggcuacccucauccuggccauuuuucugaucacgugcugucgcagagcuaaucggacagaaagcacccagagaggacaucgcgagucuggcgggaaaauguccguugccccucaaaacggcaagauuaucagcuccugggagcuuuacaaaucugaaagcgagaccggaauguga

SEQ ID NO: 223702 - RNA, 1575 nt, Artificial Sequence
  derived and/or modified CDS sequence (opt5) from glycoprotein__RABV__KJ174667.1
augaucuuccaggcccugcucuuugugccccugcuuauuagcucccugugccucggcaaguucccuaucuacaccauuccggacaaacuggggcccuggucuccuaucgauauucaccaucuuagcugucccaacaaucuggucguugaggacgaaggaugcacaucccucucuggcuuuagcuauauggagcugaaggugggguacaucuccgcuaucaaagugaacggauucacguguaccggcgucgugacagaagccgagaccuauacaaauuuuguuggguacgugaccacaaccuucaagagaaaacacuuucggccuauucccgaugcgugccgcgcugccuauaacuggaagaucgccggagacccuagauacgaagagucucugcaaaauccguaucccgauuaccauuggcuccggacggucaagaccacaaaagagagccugauuaucauuuccccuagcguggcugaccuugaucccuacgacaagucucugcacucccgccucuucccuggcggcaaaugucuggggaucaccauuagcucuacauauugcuccaccaaccaugauuacacgaucuggaugcccgaggaaccgagacuuggaacaagcugugacaucuuuaccaauucuaagggcaaaaaggccuccaaagggggaaagguuugcggcuucguggaugaacgggggcuguauaagagccucaaaggagcuuguaagcugaaacugugcggcgucuccggccuccgccugauggacgggacaugggugaccauucagaccucugaugagacaaagugguguccucccgaccagcuugugaaccugcacgacuuucacagcgaugagaucgaacaucucgucguugaggaacuggugaaaaagagagaggaaugccuugacgcccuggaguccauuaugacgaccaagagcgugucuuuccggcgccucuccuaccugagaaaacuggucccuggauuuggcaaggcguauacaaucuucaauaaaacccucauggaggccgaugcucacuacaagagcgugcggacauggaacgaaauuauccccucuaaagggugccugaagguuagcgaccgcugucauccccacguggauggagucuucuuuaauggcaucauucuugggccugacggaaacgugcugaucccggagaugcaguccucucuccugcaacagcacauggaacuucuggagagcuccguuauuccccucaugcauccucuggccgaucccagcaccguguucaaggacggcgaugaagcugaggacuuugucgaggugcaucugccugauguccacaaacagaucucuggcguggaccucgggcugcccuccuggggaaaguaucuucugaugauugccggcgggcucgcgacgcugguucugaucaucuuccuuauggccugcuguagacggacaaaacgcaccgaaccgagacggagaggaagcggcgagucuggggaaaaggugcucgcuaccccucagcccaaaaaggucguguccagcugggagcuguacaagcgcgaaggcgacgcccggcuguga

SEQ ID NO: 223703 - RNA, 1575 nt, Artificial Sequence
  derived and/or modified CDS sequence (opt5) from glycoprotein__RABV__KJ174668.1
augaucuuccaggcccugcucuuugugccccugcuuauuagcucccugugccucggcaaguucccuaucuacaccauuccggacaaaaucgggcccuggucuccuauugauauccaccaucugagcugucccaacaaucuugucguugaggacgaaggaugcacaucccugucuggcuuuagcuauauggagcucaaggugggguacaucuccgcuauuaaagugaacggauucacguguaccggcgucgugacagaagccgagaccuauacaaauuuuguuggguacgugaccacaaccuucaagagaaaacacuuucggccuauccccgaugcgugccgcgcugccuauaacuggaagauugccggagacccuagauacgaagagucucugcaaaauccguaucccgauuaccauuggcugcggacggucaagaccacaaaagagagccucaucauuaucuccccuagcguggcugaccuggaucccuacgacaagucucuucacucccgccuguucccuggcggcaaaugucucgggauuaccaucagcucuacauauugcuccaccaaccaugauuacacgaucuggaugcccgaggaaccgagacugggaacaagcugugacauuuuuaccaauucuaagggcaaaaaggccuccaaagggggaaagguuugcggcuucguggaugaacgggggcuuuauaagagccugaaaggagcuuguaagcucaaacugugcggcgucuccggccugcgccucauggacgggacaugggugaccauccagaccucugaugagacaaagugguguccucccgaccagcuggugaaccuucacgacuuucacagcgaugagauugaacaucuggucguugaggaacucgugaaaaagagagaggaaugccuggacgcccuugaguccaucaugacgaccaagagcgugucuuuccggcgccuguccuaccucagaaaacuggucccuggauuuggcaaggcguauacaauuuucaauaaaacccugauggaggccgaugcucacuacaagagcgugcggacauggaacgaaaucauccccucuaaagggugccucaagguuagcgaccgcugucauccccacguggauggagucuucuuuaauggcauuauccuggggccugacggaaacgugcuuauuccggagaugcaguccucucugcuccaacagcacauggaacugcuugagagcuccguuaucccccugaugcauccucucgccgaucccagcaccguguucaaggacggcgaugaagcugaggacuuugucgaggugcaucugccugauguccacaaacagauuucuggcguggaccuggggcuccccuccuggggaaaguaucugcuuaugaucgccggcgggcuggcgacgcucguucugaucauuuuccugauggccugcuguagacggacaaaacgcaccgaaagcagacggagaggaucuggcgaguccggggaaaaggugcuugcuaccccgcagccuaaaaaggucgugagcuccugggagcucuacaagcgcgaaggcgacgcccggcuguga

SEQ ID NO: 223704 - RNA, 1575 nt, Artificial Sequence
  derived and/or modified CDS sequence (opt5) from glycoprotein__RABV__KJ174669.1
augaucuuccaggcccugcucuuugugccccugcuuauuagcucccugugccucggcaaguucccuaucuacaccauuccggacaaaaucgggcccuggucuccuauugauauccaccaucugagcugucccaacaaucuugucguugaggacgaaggaugcacaucccugucuggcuuuagcuauauggagcucaaggugggguacaucuccgcuauuaaagugaacggauucacguguaccggcgucgugacagaagccgagaccuauacaaauuuuguuggguacgugaccacaaccuucaagagaaaacacuuucggccuauccccgaugcgugccgcgcugccuauaacuggaagauugccggagacccuagauacgaagagucucugcaaaauccguaucccgauuaccauuggcugcggacggucaagaccacaaaagagagccucaucauuaucuccccuagcguggcugaccuggaucccuacgacaagucucuucacucccgccuguucccuggcggcaaaugucucgggauuaccaucagcucuacauauugcuccaccaaccaugauuacacgaucuggaugcccgaggaaccgagacugggaacaagcugugacauuuuuaccaauucuaagggcaaaaaggccuccaaagggggaaagguuugcggcuucguggaugaacgggggcuuuauaagagccugaaaggagcuuguaagcucaaacugugcggcgucuccggccugcgccucauggacgggacaugggugaccauccagaccucugaugagacaaagugguguccucccgaccagcuggugaaccuucacgacuuucacagcgaugagauugaacaucuggucguugaggaacucgugaaaaagagagaggaaugccuggacgcccuugaguccaucaugacgaccaagagcgugucuuuccggcgccuguccuaccucagaaaacuggucccuggauuuggcaaggcguauacaauuuucaauaaaacccugauggaggccgaugcucacuacaagagcgugcggacauggaacgaaaucauccccucuaaagggugccucaagguuagcgaccgcugucauccccacguggauggagucuucuuuaauggcauuauccuggggccugacggaaacgugcuuauuccggagaugcaguccucucugcuccaacagcacauggaacugcuugagagcuccguuaucccccugaugcauccucucgccgaucccagcaccguguucaaggacggcgaugaagcugaggacuuugucgaggugcaucugccugauguccacaaacagauuucuggcguggaccuggggcuccccuccuggggaaaguaucugcuuaugaucgccggcgggcuggcgacgcucguucugaucauuuuccugauggccugcuguagacggacaaaacgcgcugaaagcagacggagaggaucuggcgaguccggggaaaaggugcuugccaccccgcagccuaaaaaggucgugagcuccugggagcucuacaagcgcgaaggcgacgcucggcuguga

SEQ ID NO: 223705 - RNA, 1575 nt, Artificial Sequence; identical to SEQ ID NO: 223703
  derived and/or modified CDS sequence (opt5) from glycoprotein__RABV__KJ174670.1

SEQ ID NO: 223706 - RNA, 1575 nt, Artificial Sequence; identical to SEQ ID NO: 223492
  derived and/or modified CDS sequence (opt5) from glycoprotein__RABV__KJ174671.1

SEQ ID NO: 223707 - RNA, 1575 nt, Artificial Sequence
  derived and/or modified CDS sequence (opt5) from glycoprotein__RABV__KJ174672.1
augaucuuccaggcccugcucuuugugccccugcuuauuagcucccugugccucggcaaguucccuaucuacaccauuccggacaaacuggggcccuggucuccuaucgauauucaccaucuuagcugucccaacaaucuggucguugaggacgaaggaugcacaucccucucuggcuuuagcuauauggagcugaaggugggguacaucuccgcuaucaaagugaacggauucacguguaccggcgucgugacagaagccgagaccuauacaaauuuuguuggguacgugaccacaaccuucaagagaaaacacuuucggccuauucccgaugcgugccgcgcugccuauaacuggaagacggccggagacccuagauacgaagagucucugcaaaauccguaucccgauuaccauuggcuccggaccgucaagacaaccaaagagagccugaucauuaucuccccuagcguggcugaccuugaucccuacgacaagucucugcacucccgccucuucccuggcggcaaaugucuggggauuacaaucagcucuaccuauugcuccacgaaccaugauuacacaauuuggaugcccgaggaaccgagacuuggaaccagcugugacaucuuuacaaauucuaagggcaaaaaggccuccaaagggggaaagguuugcggcuucguggaugaacgggggcuguauaagagccucaaaggagcuuguaagcugaaacugugcggcgucuccggccuccgccugauggacgggaccugggugaccauccagacaucugaugagacgaagugguguccucccgaccagcuugugaaccugcacgacuuucacagcgaugagauugaacaucucgucguugaggaacuggugaaaaagagagaggaaugccuugacgcccuggaguccaucaugaccacaaagagcgugucuuuccggcgccucuccuaccugagaaaacuggucccuggauuuggcaaggcguauaccauuuucaauaaaacacucauggaggccgaugcucacuacaagagcgugcggaccuggaacgaaaucauucccucuaaagggugccugaagguuagcgaccgcugucauccccacguggauggagucuucuuuaauggcaucauccuugggccugacggaaacgugcugauuccggagaugcaguccucucuccugcaacagcacauggaacuucuggagagcuccguuaucccccucaugcauccucuggccgaucccagcacgguguucaaggacggcgaugaagcugaggacuuugucgaggugcaucugccugauguccacaaacagauuucuggcguggaccucgggcugcccuccuggggaaaguaucuucugaugaucgccggcgggcucgcgacacugguucugauuaucuuccuuauggccugcuguagacggaccaaacgcaccgaaagcagacggagaggaucuggcgaguccggggaaaaggugcucgcuacaccgcagccuaaaaaggucgugagcuccugggagcuguacaagcgcgaaggcgacgcccggcuguga

SEQ ID NO: 223708 - RNA, 1575 nt, Artificial Sequence; identical to SEQ ID NO: 223702
  derived and/or modified CDS sequence (opt5) from glycoprotein__RABV__KJ174673.1

SEQ ID NO: 223709 - RNA, 1575 nt, Artificial Sequence
  derived and/or modified CDS sequence (opt5) from glycoprotein__RABV__KJ174674.1
augaucuuccaggcccugcucuuugugccccugcuuauuagcucccugugccucggcaaguucccuaucuacccgauucccgacaaacuggggccuuggucucccaucgauauucaccaucuuagcuguccuaacaaucuggucggagaggacgaaggcugcaucucccucucuggguuuagcuauauggagcugaagguuggauacaucuccgcuauuaaagugaacggcuucaccuguacagggguggucacggaagccgagaccuauacaaauuuugugggauacguuaccacaaccuucaagagaaaacacuuucggcccaucccugaugcgugccgcgcugccuauaacuggaagauugccggcgacccgagauacgaagagucucugcaaaaucccuauccugauuaccauuggcuccggacagugaagaccacgaaagagagccugaucauuaucucccccagcgucgcugaccuugauccuuacgacaagucucugcacucccgccucuuccccggcgggaaaugucugggaauuaccaucagcucuacauauugcuccaccaaccaugauuacacaaucuggaugccggaggaaccuagacuuggcaccagcugugacauuuuuacaaauucuaaggggaaaaaggccuccaagggaggcaaagugugcggguucguugaugaacggggacuguauaagagccucaaaggcgcuuguaagcugaaacugugcggcguguccgggcuccgccugauggacggaacgugggucaccauccagacaucugaugagaccaaguggugucccccugaccagcuugugaaccugcacgacuuucacagcgaugagauugaacaucucguggucgaggaacugguuaaaaagagagaggaaugccuugacgcccuggaguccaucaugaccacaaagagcgugucuuuccggcgccucuccuaccugagaaaacuggugcccggcuuugggaaggcguauacgauuuucaauaaaacccucauggaggccgaugcucacuacaagagcguccggacauggaacgaaaucauccccucuaaaggaugccugaaggugagcgaccgcugucauccucacguugauggcguguucuuuaaugggauuauccuuggaccggacggcaacguccugauucccgagaugcaguccucucuccugcaacagcacauggaacuucuggagagcuccgugaucccucucaugcauccccuggccgauccuagcaccguuuucaaggacggcgaugaagcugaggacuuuguggagguccaucugcccgaugugcacaaacagauuucuggggucgaccucggacugccguccuggggcaaguaucuucugaugaucgccgggggacucgcgacacuggugcugaucauuuuccuuauggccugcuguagacggaccaaacgcacggaaagcagacggagaggcucuggggaguccggcgaaaagguucucgcuacaccucagcccaaaaagguggucagcuccugggagcuguacaagcgcgaaggagacgcccggcuguga

SEQ ID NO: 223710 - RNA, 1575 nt, Artificial Sequence; identical to SEQ ID NO: 223384
  derived and/or modified CDS sequence (opt5) from glycoprotein__RABV__KJ174675.1

SEQ ID NO: 223711 - RNA, 1575 nt, Artificial Sequence
  derived and/or modified CDS sequence (opt5) from glycoprotein__RABV__KJ174676.1
augaucccccaggcccuccuguucgugccucugcuuauuagcucccugugcuuuggcagauucccgaucuacaccauucccgacaagcucgggccuuggucucccaucgauauucaccaucugagcuguccuaacaaucuugucguugaggacgaaggaugcacaucccugucuggcuuuagcuauauggagcucaaagugggguacaucuccgcuaucaaggugaacggauucacguguaccggcgucgugacagaagccgagaccuauacaaauuuuguuggguacgugaccacaaccuucaaacggaagcacuuucgccccaugccugaugcgugcagaacggcuuauaacuggaaaauugccggagacccgcgguacgaagagucucugcaaaaucccuauccugauuacaacuggcugcgcaccgucaagacaaccaaggagagccucaucgugauuucccccagcguugccgaccuggauccuuacgacaaaucucuucauuccagaguguuccccggcggcaagugucuggggaucacaauuagcucuaccuauugcuccacgaaucacgauuacacaaucuggaugccggaagaggcucggcucggaaccagcugugacauuuuuacaaacucucgcggcaaaagagccuccaaagggggaaagaccugcggcuucgucgaugaacgggggcuguauaagagccuuaagggagcuuguaaacugaagcucugcggcgugccuggccugcgccugauggacgggaccugggugacaauccagacguccgaugagaccaaauggugucccucugaccagcucgucaaucugcaugacuuucacagcgaugagaucgaacaccuuguuguggaggaacuggugaagaaaagagaggaaugccucgacgcccuggaguccauuaugacaaccaagagcgucucuuuccggcgccuuucccaucugagaaaacucgugccuggauuuggcaaggcguacacaaucuucaacaagacccugauggaggccgaugcucacuauaaaagcauucggacguggaaugaaguuauccccucuaaggggugccugaaagugggaggccgcugucauccccacgucgacgggguguucuuuaacggaauuauccucggcccugauggcaauguucugaucccggagaugcagagcucccuucugcaacagcacguggaacuccuggagucuagcgucauuccccuuaugcauccucuggccgaccccuccacaguguucaaggauggggacgaagcugaggauuuugucgaggugcacuucccugacauccauaaacagguuagcggaguggaucucggccugcccaacugggggaaguaccugcucaugucugccggagcgcuggccgcucuuaugcuggccauuuuucucaugaccugcuguagacgggucaauagaaccgaauccauccagcgcggcccgggggagagcggccggaaggugucuauuacaucccaaaacggaaaaguuaucagcuccugggaacuguauaagucuggcggggagaccggacuguga

SEQ ID NO: 223712 - RNA, 1575 nt, Artificial Sequence
  derived and/or modified CDS sequence (opt5) from glycoprotein__RABV__KJ174677.1
augaucccccaggcccugcuguucgugccucugcuuauuagcucccugugcuuuggcggguucccgaucuacaccauucccgacaagcucggaccuuggucucccaucgauauucaccaucugagcuguccuaacaaucuugucguugaggacgaaggcugcacaucccugucuggguuuagcuauauggagcucaaagugggauacaucuccgcuaucaaggugaacggcuucacguguaccggggucgugacagaagccgagaccuauacaaauuuuguuggauacgugaccacaaccuucaaaagaaagcacuuucggcccaugccugauucuugccgcgcggcuuauaacuggaaaacggccggcgacccgagauacgaagagagccugcaaaaucccuauccugauuaccauuggcugcggaccgucaagacaaccaaggagucccucauuaucauuagccccucuguggccgaccuggauccuuacgacaaaucccuucacagccgcguuuuccccggcgggaagugucugggaaucacagugucuuccaccuauugcagcacgaaccaugauuacacaauuuggaugccggaagaggcuagacucggcaccucuugugacaucuuuacaaauucccgggggaaacgcgccagcaagggaggcagaaccugcggguucgucgaugaacggggacuguauaaaucccuuaagggcgcuuguaagcugaaacucugcggcgugcuggggcugcgccucauggacggaaccugggugacaauucacacgucuaacgagaccaagugguguccuagcgaucagcuggucaaucuucacgacuuucauuccgacgagaucgaacaccugguuguggaggaacucgugaaaaagagagaggaaugccuggaugcccuugagagcaucaugacaaccaaaucugucuccuuccggcgccugagccaucucagaaagcuggugcccggcuuugggaaagcguacacaauuuucaacaagacccugauggaggccgacgcucacuauaagucuauccggacguggaaugaaauuaucccuagcaaaggaugccucaagguuggcgggcgcugucacccccauguggauggagucuucuuuaacggcauuauccugggccccgacgggaaugugcuuaucccugagaugcaguccucucugcuccagcaacacguugaacugcuugagagcuccgugauuccgcugaugcauccccucgccgauccuagcacagucuucaaagacggagaugaagcugaggacuuuguggagguccaccuccccgaugugcauaagcagguuucuggcguggaccuggggcucccuaacuggggaaaauaccugcuuauguccgccggcguccuggcgacccucaugcugaccaucuuccugauuacaugcuguagacggguggauagaaccgaaagcauccagcgcgggcccggcgagcuuggacgggaaguuucugugacaucccagaauggcaaggucgugagcuccugggagcucuauaagucugggggagaaacgagacuguga

SEQ ID NO: 223713 - RNA, 1575 nt, Artificial Sequence
  derived and/or modified CDS sequence (opt5) from glycoprotein__RABV__KJ174678.1
augaucccccaggcccuccuguucgugccucugcuuauuagcucccugugcuuuggcggguucccgaucuacaccauucccgacaagcucggaccuuggucucccaucgauauucaccaucugagcuguccuaacaaucuugucguugaggacgaaggcugcacaucccugucuggguuuagcuauauggagcucaaagugggauacaucuccgcuaucaaggugaacggcuucacguguaccggggucgugacagaagccgagaccuauacaaauuuuguuggauacgugaccacaaccuucaaaagaaagcacuuucggcccaugccugaugcgugccgcgcugccuauaacuggaaaacggccggcgacccgagauacgaagagucucugcaaaaucccuauccugauuaccauuggcugcggaccgucaagacaaccaaggagagccucauuaucauuucccccagcguggcugaccuggauccuuacgacaaaucucuucacucccgcguuuuccccggcgggaagugucugggaaucacagugagcucuaccuauugcuccacgaaccaugauuacacaauuuggaugccggacgaagccagacucggcaccagcugugauaucuuuacaaauucucgggggaaacgcgcuuccaagggaggcagaaccugcggguucgucgacgagcggggacuguauaaaagccuuaagggcgccuguaagcugaaacucugcggcgugcuggggcugcgccucauggauggaaccugggugacaauucagacguccaacgaaaccaagugguguccuucugaccagcuggucaaucuucacgacuuucacagcgaugagaucgagcaucugguuguggaggaacucgugaaaaagagagaagagugccuggacgcgcuugaauccaucaugacaaccaaaagcgucucuuuccggcgccugucccaccucagaaagcuggugcccggcuuugggaaagccuacacaauuuucaacaagacccugauggaggcugaugcccauuauaagagcauccggacguggaaugagauuaucccuucuaaaggaugccucaagguuggcgggcgcugucacccccacauggacggaguguucuuuaacggcauuauccugggccccgaugggaauguccuuaucccugaaaugcagagcucccugcuccaacagcauguggagcugcuugaaucuagcguuauuccgcugaugcacccccucgcugacccuuccacaguguucaaagauggagacgaggccgaagauuuugucgaggugcaucugcccgacguccacaaacaggugagcggcguugaucuggggcucccuaacuggggaaaguaccugcuuaugucugcgggcgcccuggcuacccucaugcugaugaucuuccugauuaccugcuguagacggguggacagaacagaguccauccagcgcgggcccggcgaacuuggacgggaggucagcgugaccucucaaaauggcaagguuauuuccagcugggaacucuauaaguccgggggagagacaagacuguga

SEQ ID NO: 223714 - RNA, 1575 nt, Artificial Sequence
  derived and/or modified CDS sequence (opt5) from glycoprotein__RABV__KJ174679.1
augaucccccaggcccuguucuuugugccucuccugauuagcucccuuugcgucggcggguucccgaucuacaccauucccgacaagcugggaccuuggucucccaucgauauucaccaucucagcuguccuaacaaucugguuguggaggacgaaggcugcacaucccuuucuggguuuagcuauauggagcugaaagugggauacaucuccgcuaucaaggucaacggcuucacguguaccggggugguuacagaagccgagaccuauacaaauuuugugggauacgucaccacaaccuucaaaagaaagcacuuucggcccaugccugauucuugccgcgcggcuuauaacuggaaaacggccggcgacccgagauacgaagagagccuccaaaaucccuauccugauuaccauuggcugcggaccgugaagacaaccaaggagucccugauuaucauuagccccucuguugccgaccucgauccuuacgacaaaucccugcacagccgcguguuccccggcgggaagugucuuggaaucacagucucuuccaccuauugcagcacgaaccaugauuacacaauuuggaugccggaagaggcuagacugggcaccucuugugacaucuuuacaaauucccgggggaaacgcgccagcaagggaggcagaaccugcggguucguggaugaacggggacucuauaaaucccugaagggcgcuuguaaacuuaagcugugcggcgugcucgggcugcgccugauggacggaaccugggucacaauucacacgucuaacgagaccaagugguguccuagcgaucagcucguuaaucugcacgacuuucauuccgacgagaucgaacaccuugugguggaggaacuggucaaaaagagagaggaaugccucgaugcccuggagagcaucaugacaaccaaaucuguguccuuccggcgccuuagccaucugagaaagcucguucccggcuuugggaaagcguacacaauuuucaacaagacccugauggaggccgacgcucacuauaagucuauccggacguggaaugaaauuaucccuagcaaaggaugccugaaggugggcgggcgcugucacccccaugucgauggaguguucuuuaacggcauuauccucggccccgacgggaauguucugaucccugagaugcaguccucucuucugcagcaacacguggaacuccuggagagcuccgucauuccgcuuaugcauccccuggccgauccuagcacaguguucaaagacggagaugaagcugaggacuuugucgaggugcaccuccccgauguucauaaacaggugucuggcgucgaccuggggcugccuaacuggggaaaguaccuccugauguccgccggcgugcuugcgacccugaugcucaccaucuuccugauuacaugcuguagacggguugauagaaccgaaagcauccagcgcgggcccggcgagcugggacgggaagugucugucacaucccagaauggcaaggugauuagcuccugggagcuuuauaagucugggggagaaacgagacucuga

SEQ ID NO: 223715 - RNA, 1575 nt, Artificial Sequence
  derived and/or modified CDS sequence (opt5) from glycoprotein__RABV__KJ174680.1
augaucccccaggcccuccuguucgugccucugcuuauuagcucccugugcuuuggcggguucccgaucuacaccauucccgacaagcucggaccuuggucucccaucgauauucaccaucugagcuguccuaacaaucuugucguugaggacgaaggcugcacaucccugucuggguuuagcuauauggagcucaaagugggauacaucuccgcuaucaaggugaacggcuucacguguaccggggucgugacagaagccgagaccuauacaaauuuuguuggauacgugaccacaaccuucaaaagaaagcacuuucggcccaugccugaugcgugccgcgcugccuauaacuggaaaacggccggcgacccgagauacgaagagucucugcaaaaucccuauccugauuaccauuggcugcggaccgucaagacaaccaaggagagccucauuaucauuucccccagcguggcugaccuggauccuuacgacaaaucucuucacucccgcguuuuccccggcgggaagugucugggaaucacagugagcucuaccuauugcuccacgaaccaugauuacacaauuuggaugccggaagaggccagacucggcaccagcugugacaucuuuacaaauucucgggggaaacgcgcuuccaagggaggcagaaccugcggguucgucgaugaacggggacuguauaaaagccuuaagggcgccuguaagcugaaacucugcggcgugcuggggcugcgccucauggacggaaccugggugacaauucagacguccaacgagaccaagugguguccuucugaucagcuggucaaucuucacgacuuucacagcgacgagaucgaacaucugguuguggaggaacucgugaaaaagagagaggaaugccuggaugcgcuugaguccaucaugacaaccaaaagcgucucuuuccggcgccugucccaccucagaaagcuggugcccggcuuugggaaagccuacacaauuuucaacaagacccugauggaggcugacgcccauuauaagagcauccggacguggaaugaaauuaucccuucuaaaggaugccucaagguuggcgggcgcugucacccccacguggauggagucuucuuuaacggcauuauccugggccccgacgggaaugugcuuaucccugagaugcagagcucccugcuccaacagcauguugaacugcuugagucuagcgugauuccgcugaugcacccccucgcugauccuuccacagucuucaaagacggagaugaagccgaggacuuuguggagguccaucugcccgaugugcacaagcagguuagcggcguggaccuggggcucccuaacuggggaaaauaccugcuuaugucugcgggcgcccuggcuacccucaugcugaugaucuuccugauuaccugcuguagacgggucgauagaacagaauccauccagcgcgggcccggcgagcuuggacgggaagugagcguuaccucucaaaauggcaaggugauuuccagcugggagcucuauaaguccgggggagaaacaagacuguga

SEQ ID NO: 223716 - RNA, 1575 nt, Artificial Sequence
  derived and/or modified CDS sequence (opt5) from glycoprotein__RABV__KJ174681.1
augaucccccaggcccugcuguucgugccucugcuuauuagcucccugugcuuuggcggguucccgaucuacaccauucccgacaagcucggaccuuggucucccaucgauauucaccaucugagcuguccuaacaaucuugucguugaggacgaaggcugcacaucccugucuggguuuagcuauauggagcucaaagugggauacaucuccgcuaucaaggugaacggcuucacguguaccggggucgugacagaagccgagaccuauacaaauuuuguuggauacgugaccacaaccuucaaaagaaagcacuuucggcccaugccugauucuugccgcgcggcuuauaacuggaaaacggccggcgacccgagauacgaagagagccugcaaaaucccuauccugauuaccauuggcugcggaccgucaagacaaccaaggagucccucauuaucauuagccccucuguggccgaccuggauccuuacgacaaaucccuucacagccgcguuuuccccggcgggaagugucugggaaucacagugucuuccaccuauugcagcacgaaccaugauuacacaauuuggaugccggaagaggcuagacucggcaccucuugugacaucuuuacaaauucccgggggaaacgcgccagcaagggaggcagaaccugcggguucgucgaugaacggggacuguauaaaucccuuaagggcgcuuguaagcugaaacucugcggcgugcuggggcugcgccucauggacggaaccugggugacaauucacacgucuaacgagaccaagugguguccuagcgaucagcuggucaaucuucacgacuuucauuccgacgagaucgaacaccugguuguggaggaacucgugaaaaagagagaggaaugccuggaugcccuugagagcaucaugacaaccaaaucugucuccuuccggcgccugagccaucucagaaagcuggugcccggcuuugggaaagcguacacaauuuucaacaagacccugauggaggccgacgcucacuauaagucuauccggacguggaaugaaauuaucccuagcaaaggaugccucaagguuggcgggcgcugucacccccauguggauggagucuucuuuaacggcauuauccugggccccgacgggaaugugcuuaucccugagaugcaguccucucugcuccagcaacacguugaacugcuugagagcuccgugauuccgcugaugcauccccucgccgauccuagcacagucuucaaagacggagaugaagcugaggacuuuguggagguccaccuccccgaugugcauaagcagguuucuggcguggaccuggggcucccuaacuggggaaaauaccugcuugucuccgccggcgugcuggcgacccucaugcugaccaucuuccugauuacaugcuguagacggguugauagaaccgaaagcauccagcgcgggcccggcgagcuuggacggaaggugucugucacaucccagaauggcaaggugauuagcuccugggaacucuauaaaucugggggagagacgagacuguga

SEQ ID NO: 223717 - RNA, 1575 nt, Artificial Sequence
  derived and/or modified CDS sequence (opt5) from glycoprotein__RABV__KJ174682.1
augaucgcccaggcucuccuguucgugccccugcuuauuagcccucugugcuuuggcaaguucccgaucuacaccauucccgacaaacucgggccuuggucccccaucgauauucaccaucugucuuguccuaacaaucuugucguugaggacgaagagugcacaagccuguccggauuuucuuauauggaacucaaggugggcuacaucagcgccaucaaagugaacggguucacguguaccggagucgugacagaggcggaaaccuauacaaauuuuguuggcuacgugaccacaaccuucaagagaaaacacuuucggcccacgccugaugcuugccgcgccgccuauaacuggaagauggcuggggacccgagauacgaggagucccugcauaaucccuauccugauuaccacuggcugcggaccgucaagacaaccaaagaaucucucauuaucauuagccccuccguggccgaccuggauccuuacgacaagagccuucauucucgcguuuuccccggaggcaaaugucugggcaucacaauuuccagcaccuauugcucuacgaaccacgauuacacaaucuggaugccggaggaagcuagacucgggaccuccugugacauuuuugccaauagccggggaaagcgcgcgucuaaaggcgggagaacaugcggauucguggaugagcggggccuguauaagucccuuaagggggccuguaaacugaagcucugcggagucccuggccugcgccugauggacggcaccugggugaccauccaaacaagcaacgagacgaaauggugucccccugauagacucgugaaucugcacgacuuucauuccgacgaaaucgagcaccuugucguugaggaacuggugaagaaacgggaagagugccucgaugcucuggagucuauuaugaccacaaagagcguguccuuccgcagacuuagcuaccugcggaaacucguccccggguuuggaaaggccuauaccaucuucaacaagacacugauggaagcugacgcccauuacaaaucugugcgcaccuggaaugagauuauccccuccaagggcugccugaaaguugggggaagaugucacccucacguggauggcgucuucuuuaacgggauuauccucggaccggacggcaaugugcugauccccgaaaugcagagcucucuucugcagcagcauauggagcuccuggaaagcuccguuauuccucuuaugcacccccuggcggauccuucuacgguguucaaggacggcgaugaggccgaggacuuugucgaagugcaucuccccgauauccacaaacaagucagcgggguggaccugggacugccggauuggggcaaguaucuccugauguccgcuggggcccuugcuacacugaugcucaccauuuuccugaugaccugcugucggagagccaaccgcacagagagcauccagcggggaccuggcgaaucugggagaaagguuuccgugacaccccagaauggcaaagucauuagcucuugggagcuguacaaguccggaggcgaaaccaaacuuuga

SEQ ID NO: 223718 - RNA, 1575 nt, Artificial Sequence
  derived and/or modified CDS sequence (opt5) from glycoprotein__RABV__KJ174683.1
augaucgcccaggcucuccuguucgugccccugcuuauuagcccucugugccucggcaaguuuccgaucuacaccauucccgacaaacuggggccuuggucccccaucgauauucaccaucuuucuuguccuaacaaucuggucguugaggacgaagagugcacaagccucuccggauucucuuauauggaacugaaggugggcuacaucagcgccaucaaagugaacggguuuacguguaccggagucgugacagaggcggaaaccuauacaaauuucguuggcuacgugaccacaaccuuuaagagaaaacacuuccggcccacgccugaugcuugccgcgccgccuauaacuggaagauggcuggggacccgagauacgaggagucccugcauaaucccuauccugauuaccacuggcuccggaccgucaagacaaccaaagaaucucugauuaucauuagccccuccguggccgaccuugauccuuacgacaagagccugcauucucgcguuuuucccggaggcaaaugucucggcaucacaauuuccagcaccuauugcucuacgaaccacgauuacacaaucuggaugccggaggaagcuagacuggggaccuccugugacauuuucgccaauagccggggaaagcgcgcgucuaaaggcgggagaacaugcggauuuguggaugagcggggccuuuauaagucccugaagggggccuguaaacucaagcugugcggagucccuggccugcgccucauggacggcaccugggugaccauccaaacaagcaacgagacgaaauggugucccccugauagacuggugaaucuucacgacuuccauuccgacgaaaucgagcaccuggucguugaggaacucgugaagaaacgggaagagugccuggaugcucuugagucuauuaugaccacaaagagcguguccuuucgcagacugagcuaccuccggaaacugguccccggguucggaaaggccuauaccaucuuuaacaagacacugauggaagcugacgcccauuacaaaucugugcgcaccuggaaugagauuauccccuccaagggcugccucaaaguugggggaagaugucacccucacguggauggcgucuucuucaacgggauuauccugggaccggacggcaaugugcuuauccccgaaaugcagagcucucugcuccagcagcauauggagcugcuugaaagcuccguuauuccucugaugcacccccucgcggauccuucuacgguguuuaaggacggcgaugaggccgaggacuucgucgaagugcaucugcccgauauccacaaacaagucagcgggguggaccugggacucccggauuggggcaaguaucugcuuauguccgcuggggcccuggcuacacucaugcugaccauuuuucugaugaccugcugucggagagccaaccgcacagagagcauccagcggggaccuggcgaaucugggagaaagguuuccgugacaccccagaauggcaaagucauuagcucuugggagcuuuacaaguccggaggcgaaaccaaacucuga

SEQ ID NO: 223719 - RNA, 1575 nt, Artificial Sequence
  derived and/or modified CDS sequence (opt5) from glycoprotein__RABV__KJ466147.1
augaucccccaggcccuucucuucgugccucugcuugucuuuccgcugugcuucggcaaguuucccauuuacaccaucccugacaaacucgggcccuggagcccuauugauauccaccaucuguccugucccaacaaucuuguuguggaggacgaaggaugcacaaaccugucuggcuucagcuauauggagcucaaggugggguacauuuccgcuaucaaagucaauggauuuacguguaccggcgugguuacagaagccgagaccuauacaaacuucgugggguacgucaccacaaccuuuaagagaaaacacuuccggccuacgccggaugcgugccgcucugcuuauaauuggaagauggccggagaccccagauacgaagagagccugcauaacccuuaucccgauuaccacuggcugcggaccgugaagacaaccaaagaguccguugugaucauuucuccuagcgucgccgaccucgaucccuacgacgaaucccugcauagccgcguguuuccgagaggcaaguguucuggcaucacaguguccagcgcuuauugcucuaccaaucacgauuacacgauuuggaugccugagaacccccggcuugggacauccugugacaucuucaccaauagccgcggaaaaagagccucuaagggcuccaaaacaugcggguuugucgaugaacggggacuguauaagagccucaagggcgcuuguaaacugaagcugugcgggguucugggacuccgccugauggacggcaccuggguggccauucaaaccuccaacgagacaaaaugguguccucccgaucagcuggugaaucuccacgacuuccauucugacgagaucgaacaccuggucguggaggaacuuguuaagaaaagagaggaaugccuggaugcgcucgagagcauuaugacgaccaaguccgugagcuuucggcgccugucucaucuuagaaaacugguccccggcuucgggaaggccuacacaaucuucaacaagacccucauggaggcugacgcccacuauaaauccgugcagacauggaaugaaaucauuccuagcaagggaugccugcggguuggcgggcgcugucacccgcaugugaacggagucuuuuucaauggcaucauucuggggcccgauggacacgugcucaucccugagaugcagucuagccugcuucaacagcauauggaacugcucaaauccucugucauuccccugaugcacccucuugcugaccccagcaccguguuuaaggauggcgacgagguugaagauuucguggagguccaucugcaggacgugcacaaacagguuuccggcguggaucucgggcugccgaacuggggaaaggacguccugaugggcgccggggugcucacggcgcugaugcuuaugaucuuucugaugacaugcuguagacggaccaacagagccgagagcauccaacacucucucggagaaaccggccgcaagguguccguuacaccucagagcgggcgggucauuucuuccugggagagcuacaaauccggcggagaaaccaagcuguga

SEQ ID NO: 223720 - RNA, 1575 nt, Artificial Sequence
  derived and/or modified CDS sequence (opt5) from glycoprotein__RABV__KJ476819.1
auggugccccaggcccugcuccuggucccucuucugguuuucagcaugugcuuuggcaaguucccgaucuacaccauucccgacaaacucgggccuuggucccccaucgauauucaccaucugucuuguccuaacaaucuugugguggaggacgaaggaugcacaaaccugagcggcuuuuccuauauggagcucaaggucgggcacaucucugcuauuaaagugaauggauucacguguaccggcguugugacagaagccgagaccuacacaaacuuugucggguaugugaccacaaccuucaagagaaaacauuuucggcccacgccugaugcgugccgcgcugccuacaauuggaagauggccggagacccgagauaugaagagagccugcacaaccccuacccugauuaucauuggcugcggaccguuaagacaaccaaagagucccucgugaucaucucucccagcgucgcugaccuggauccuuacgacaagucccuucacagccgcguguuccccaauggcaaauguucuggcauuacaaucuccagcaccuacugcccgacgaaccacgauuauacaauuuggcugccugaaaaucccagacucgggaccucuugugacaucuuuacaaacucccggggaaagcgcgccagcaaaggcucuaagaccugcggguucguggaugagagaggacuguacaagucccuuaaaggcgcuuguaagcugaaacucugcgggguccugggacugcggcucauggacggcaccuggguugccaugcaagcgagcgaugaaacaaagugguguccucccgaccagcuggugaaucuucaugacuuucgcuccgaugagauugagcaccugguggucgaggaacucgugaaaaagagagaagagugccuggacgcccuugaaucuaucaugacgaccaaaagcguuuccuuccggcgccugagccaucucagaaagcuggugcccggcuuugggaaggcuuauacaauuuucaacaaaacccugauggaggccgaugcucacuacaagucuguccggacauggaaugagaucaucccuuccaaaggaugccuccgcgugggcgggagaugucacccgcauguuaacggaguguucuuuaauggcauuauccuggggcccgacggacacguccuuauuccugaaaugcagagcucucugcuccagcaacauauggagcugcuugaaagcuccgugaucccccugaugcacccucucgccgaucccucuaccgucuucaaggacggcgaugaggcggaaaacuuuguggagguucaucugccggacgugcacaaacagauuagcggcgucgaucuggggcucccuaacuggggaaaguaugugcugguuuccgccggcgugcuuaucgcucugaugcucaucauuuuccugaugacgugcugugggcgggucaauagacccaagagcacacagcacaaccugggaggcaccgggcgcgaggugucugugaccccucaguccggcaaaguuaucagcucuugggaauccuacaagagcggaggcgagacacggcuuuga

SEQ ID NO: 223721 - RNA, 1575 nt, Artificial Sequence
  derived and/or modified CDS sequence (opt5) from glycoprotein__RABV__KJ476820.1
auggugccccaggcccuucucuucgucccucugcuuguuuuuagcaugugcuucggcaaguuuccgaucuacaccauucccgacaaacuggggccuuggucccccaucgauauucaccaucucucuuguccuaacaaucuggugguggaggacgaaggaugcacaaaccuuagcggcuucuccuauauggagcugaaggucggguacaucucugcuauuaaagugaauggauuuacguguaccggcguugugacagaagccgagaccuauacaaacuucgucggguacgugaccacaaccuuuaagagaaaacacuuccggcccacgccugaugcgugccgcaccgcuuauaauuggaagauggccggagacccgagauacgaagagagccuccauaaccccuauccugauuaccacuggcugcggacaguuaagaccacaaaagagucccuggugaucaucucucccagcgucgccgaccucgauccuuacgacaagucccugcauagccgcguguuucccaauggcaaauguucuggcauuaccaucuccagcacguauugcccgacaaaccacgauuacaccauuuggcuuccugaaaaucccagacuggggacaucuugugacaucuucaccaacucccggggaaagcgcgcuagcaaaggcucuaagaccugcggguuuguggaugagagaggacucuauaagucccugaaaggcgccuguaagcugaaacugugcgggguccucggacugcggcugauggacggcacauggguugcuaugcaagccagcgaugaaacgaagugguguccucccgaccagcucgugaaucugcacgacuuccgcuccgaugagauugagcaucuuguggucgaggaacuggugaaaaagagagaagagugccucgacgcgcuggaaucuaucaugaccacaaaaagcguuuccuuucggcgccuuagccaccugagaaagcucgugcccggcuucgggaaggccuacaccauuuucaacaaaacacugauggaggcugaugcccauuauaagucuguccggaccuggaaugagaucaucccuuccaaaggaugccugcgcgugggcgggagaugucacccgcacguuaacggaguguuuuucaauggcauuauccucgggcccgacggacauguccugauuccugaaaugcagagcucucuucugcagcaacacauggagcuccuggaaagcuccgugaucccccuuaugcauccucuggcugaucccucuacggucuuuaaggacggcgaugaggccgaaaacuucguggagguucaccucccggacgugcauaaacagauuagcggcgucgaucuggggcugccuaacuggggaaaguacgugcucguuuccgcgggcgugcugaucgcccuuaugcugaucauuuuucucaugacaugcugugggcgggucaauagacccaagagcacccagcacaaccugggaggcaccgggcgcgaggugucugugacaccucaguccggcaaaguuaucagcucuugggaauccuauaagagcggaggcgagacccggcuguga

SEQ ID NO: 223722 - RNA, 1575 nt, Artificial Sequence
  derived and/or modified CDS sequence (opt5) from glycoprotein__RABV__KJ564280.1
auggugccccaggcccugcuguucgucccucugcuuguuuuuagcuccugcuucggcaaguuuccgaucuacaccauucccgacaaacuggggccuuggucucccaucgauauucaccaucucagcuguccuaacaaucuggugguggaggacgaaggaugcacaaaccuuuccggcuucucuuauauggagcugaaggucggguacaucagcgcuauuaaagugaauggauuuacguguaccggcguugugacagaagccgagaccuauacaaacuucgucggguacgugaccacaaccuuuaagagaaaacacuuccggcccaugccugaugcgugccgcgcugccuauaauuggaagauggccggagacccgagauacgaagagucccuccauaaccccuauccugauuaccacuggcugcggacgguuaagaccacaaaagagucucuggugaucaucagccccuccgucgcugaccucgauccuuacgacaagagccugcauucucgcguguuucccggcggcaaauguuccgggauuaccgugagcucuacaugcuguuccaccaaucacgauuauacgaucuggaugccggaaaacccuagacuuggaacaagcugcgacauuuucaccaauucucggggcaagcgcgccuccaaagggggaaagacauguggcuuugucgaugagagagggcuguacaagagccucaaaggagcuugcaagcugaaacuuuguggcguucugggccuccggcugauggacgggaccuggguggccauccaaaccuccgaugaaauuaaguggugcucucccgaccagcuggugaaccuccacgacuuccauagcgaugagaucgagcaccuggucguggaggaacuuguuaaaaagcgcgaagagugccuggacgcgcucgaaacaauuaugacgaccaaauccgugagcuuuagacggcugucucaucuucgcaagcuggucccuggauucggcaaggccuauacaaucuucaauaaaacccucauggaggcugaugcccacuacaaguccaucagaacauggaacgagaccauucccagcaaagggugucugcgggugggaggccgcugccacccccauguuaaugggguguuuuucaacggaaucauucugggcccugacggccacguccucaucccggaaaugcagucuagccugcuucaucagcacauggagcugcucgaauccucugugauuccccugaugcauccucuugcugaucccagcacggucuuuaaggacggggaugaggccgaagacuucguggagguucaccucccugaugugcacaaacaaaucuccggagucgaccucggccugcccaauugggggaaguaugugcugaucagcgcgggagcccucacagcucugaugcuuaccauuuuucugaugaccuguugcagaaagacaaaccgggccggcucuauccagcauuccccgggggagaccggcagaaaaguuagcgugacaucucacaacggacgcgucauuuccagcugggaauccuacaagucuggcggggagacgggacucuga

SEQ ID NO: 223723 - RNA, 1575 nt, Artificial Sequence
  derived and/or modified CDS sequence (opt5) from glycoprotein__RABV__KM016899.1
auggugccccuggucccucucuucguuccgcugcuuguguuuccccugugcagcggcaaguucccuaucuacaccauucccgacaaacucgggccuuggucccccaucgauauucaccaucugucuuguccuaacaaucuuguggucgaggacgaaggaugcgccaaccugagcggcuuuuccuauauggagcucaaggugggguacaucucugcuauuaaaguuaauggauucacauguacgggcguggucaccgaagccgagacauauaccaacuuugugggguacguuacaaccacauucagacggaagcacuuucgcccgacccccgaugcgugcagagcugccuauaauuggaaaauggccggagacccucgguacgaagagagccugcauaaccccuauccugauuaccacuggcugcgcacggugaagaccacaaaggagucccucgucaucaucucucccagcguggcugaccuggauccguacgacaaaucccuucauagcagaguguucccuucuggcaaguguuccggcauuaccgucagcucuacauauugcuccaccaaucacgauuacacgaucuggaugcccgaaaaccugcggcucgggacaagcugugacauuuuuaccaauucucgcggaaaaagagccuccaagggcagcaaaacaugcggguucguugaugagcggggacuguauaagucccuuaagggcgcuuguaaacugaagcucugcggggugcugggacugcgccucauggacggcaccuggguggccaugcagaccucuggcgaaacaaaaugguguccucccgaucaacuggucaaccuucacgacuuuagaagcgacgagaucgagcaucuggugguugaggaacucgugaagaaacgggaagagugccuggaugcgcuugaauccauuaugacgaccaagagcgucucuuuccgcagacugucccaccuccggaaacuggugcccggguuuggaaaggccuacacaaucuucaauaagacccugauggaggcugacgcccauuauaaaagcguucgcacauggaacgagauuaucccuucuaagggcugccucagagucgggggacggugucacccgcacgugaauggcguguucuuuaacgggaucauucugggacccgauggccauguccuuaucccugaaaugcagagcucccugcuccagcagcacauggagcugcuugaaucuagcgugauuccccugaugcauccucucgcugaccccuccaccguuuucaaagauggcgacgaggccgaagauuuuguggagguccaucugccggacgugcacaagcaaguuagcgggguggaucugggacucccuaauuggggcaaauacauccugcuuucugcgggggcccugauugcucucaugcugaugaucuuccugaugacgugcuguagaaaguuuaaccgccccgaguccacacagcggagccuuggaggcaccgggagaaaggucucuaucaccucccagggcggaaaagugauuagcuccugggaaucuuauaagagcggcggggagacacgccucuga

SEQ ID NO: 223724 - RNA, 1575 nt, Artificial Sequence; identical to SEQ ID NO: 223028
  derived and/or modified CDS sequence (opt5) from glycoprotein__RABV__KM093868.1

SEQ ID NO: 223725 - RNA, 1575 nt, Artificial Sequence
  derived and/or modified CDS sequence (opt5) from glycoprotein__RABV__KM278992.1
auggugccccagguccuucucuucguuccucugcuuguguuuagcaugugcuucggcaaguuuccgaucuacaccauucccgacaaacuggggccuuggucccccaucgauauucaccaucucucuuguccuaacaaucugguggucgaggacgaaggaugcacaaaccuuagcggcuucuccuauauggagcugaaggugggguacaucucugccauuaaaguuaauggauuuacguguaccggcguggucacagaagcugagaccuauacaaacuucgugggguacguuaccacaaccuuuaagagaaaacacuuccggcccacgccugaugccugccgcgcggcuuauaauuggaagauggccggagacccgagauacgaagagagccuccauaaccccuauccugauuaccacuggcugcggaccgugaagacaaccaaagagucccuggucaucaucucucccagcgugacagaccucgauccuuacgacaagucccugcauagccgcguguuucccucuggcaaaugucuuggcauuaccaucuccagcacguauugcucuacaaaucacgauuacaccauuuggaugccggaaaacccuagacuggggacauccugugacaucuucaccaauagccggggaaagcgcgccucuaaaggcgggaagaccugcggauuugucgaugagagaggccucuauaagucccugaaaggggcuuguaagcugaaacugugcggaguucucggccugcggcugauggacggcacauggguggccaugcaagcuagcgaugaaacgaaguggugucccccugaccagcucgugaaccugcacgacuuccgcuccgaugagauugagcaucuugucguggaggaacugguuaaaaagagagaagagugccucgacgcccuggaaucuaucaugaccacaaaaagcguguccuuucggcgccuuagccaccugagaaagcucguccccggguucggaaaggcguacaccauuuucaauaaaacacugauggaggccgaugcucauuauaagucugugcggaccuggaacgagaucauccccuccaaaggcugccugcgcguugggggaagaugucacccucacgugaagggcgucuuuuucaaugggauuauccucggaccggacggccaugugcugauucccgaaaugcagagcucucuucugcagcaacacauggagcuccuggaaagcuccgucaucccucuuaugcauccccuggccgauccuucuacgguguuuaaagacggcgaugaggcugaagacuucguugaggugcaccuccccgauguccauaaacaggugagcgggguugaccugggacugccguccuggggcaaguacgugcucgucagcgccggggugcuggugguucuuaugcugacaauuuuuaucauuaccugcuguggacggguccacagaccuaagucuacccagcacucccucggcgggacaggccgcaaggugagcgugaccucucaguccggaaaagucaucagcuccugggagucuuauaagagcggcggggaaacacggcuguga

SEQ ID NO: 223726 - RNA, 1575 nt, Artificial Sequence; identical to SEQ ID NO: 223725
  derived and/or modified CDS sequence (opt5) from glycoprotein__RABV__KM278993.1

SEQ ID NO: 223727 - RNA, 1575 nt, Artificial Sequence
  derived and/or modified CDS sequence (opt5) from glycoprotein__RABV__KM408747.1
auggugccccagguccugcuguucguuccucugcuuguguuuagcaugugcuucggcaaguuuccgaucuacaccauucccgacaaacuggggccuuggucccccaucgauauucaccaucucucuuguccuaacaaucugguggucgaggacgaaggaugcacaaaccuuagcggcuucuccuauauggagcugaaggugggguacaucucugccauuaaaguuaauggauuuacguguaccggcguggucacagaagcugagaccuauacaaacuucgugggguacguuaccacaaccuuuaagagaaaacacuuccggcccacgccugaugccugccgcgcggcuuauaauuggaagauggccggagacccgagauacgaagagagccuccauaaccccuauccugauuaccacuggcugcggaccgugaagacaaccaaagagucccuggucaucaucucucccagcguggccgaccucgauccuuacgacaagucccugcauagccgcguguuucccucuggcaaauguuccggcauuacaaucagcucuaccuauugcuccacgaaucacgauuacacaauuuggaugccggaaaacccuagacuugggaccagcugugacaucuucacaaauucucggggaaagcgcgcuuccaaaggcgggaagaccugcggauuugucgaugagagaggccuguauaagagccucaaaggggccuguaagcugaaacuuugcggaguucugggccuccggcugauggacggcaccuggguggcuaugcaaacauccgaugaaacgaaguggugucccccugaccagcuggugaaccuccacgacuuccgcucugaugagauugagcaucuggucguggaggaacuuguuaaaaagagagaagagugccuggacgcccucgaaagcaucaugaccacaaaauccgugagcuuucggcgccugucucaccuuagaaagcugguccccggguucggaaaggcguacaccauuuucaauaaaacacucauggaggccgaugcucauuauaaguccgugcggaccuggaacgagaucauccccagcaaaggcugccugcgcguugggggaagaugucacccucacgugaagggcgucuuuuucaaugggauuauccugggaccggacggccaugugcucauucccgaaaugcagucuagccugcuucagcaacacauggagcugcucgaauccucugucaucccucugaugcauccccuugccgauccuagcacgguguuuaaagagggcgacgaagcugaggauuucguugaggugcaucugcccgacguccacaagcagauuuccgggguggaucucggacugccgagcuggggcaaguacguucuggugucugccgggguccucguggugcugaugcuuacaaucuuuaucauuaccugcuguggacggauccacagaccuaaauucacccagcacggccucgggggcacaggacgcaagguuuccgucaccagccagucuggcaaagugauuuccagcugggaauccuauaagucugggggagagacacggcucuga

SEQ ID NO: 223728 - RNA, 1575 nt, Artificial Sequence
  derived and/or modified CDS sequence (opt5) from glycoprotein__RABV__KM492745.1
auggugccccagguccugcuguucguuccucugcuuguguuuagcaugugcuucggcaaguuuccgaucuacaccauucccgacaaacuggggccuuggucccccaucgauauucaccaucucucuuguccuaacaaucugguggucgaggacgaaggaugcacaaaccuuagcggcuucuccuauauggagcugaaggugggguacaucucugccauuaaaguuaauggauuuacguguaccggcguggucacagaagcugagaccuauacaaacuucgugggguacguuaccacaaccuuuaagagaaaacacuuccggcccacgccugaugccugccgcgcggcuuauaauuggaagauggccggagacccgagauacgaagagagccuccauaaccccuauccugauuaccacuggcugcggaccgugaagacaaccaaagagucccuggucaucaucucucccagcguggccgaccucgauccuuacgacaagucccugcauagccgcguguuucccucuggcaaauguuccggcauuacaaucagcucuaccuauugcuccacgaaucacgauuacacaauuuggaugccggaaaacccuagacuugggaccagcugugacaucuucacaaauucucggggaaagcgcgcuuccaaaggcgggaagaccugcggauuugucgaugagagaggccuguauaagagccucaaaggggccuguaagcugaaacuuugcggaguucugggccuccggcugauggacggcaccuggguggcuaugcaaacauccgaugaaacgaaguggugucccccugaccagcuggugaaccuccacgacuuccgcucugaugagauugagcaucuggucguggaggaacuuguuaaaaagagagaagagugccuggacgcccucgaaagcaucaugaccacaaaauccgugagcuuucggcgccugucucaccuuagaaagcugguccccggguucggaaaggcguacaccauuuucaauaaaacacucauggaggccgaugcucauuauaaguccgugcggaccuggaacgagaucauccccagcaaaggcugccugcgcguugggggaagaugucacccucacgugaagggcgucuuuuucaaugggauuauccugggaccggacggccaugugcucauucccgaaaugcagucuagccugcuucagcaacacauggagcugcucgaauccucugucaucccucugaugcauccccuugccgauccuagcacgguguuuaaagacggcgaugaggcugaagacuucguugaggugcaucugcccgauguccacaagcagauuuccgggguggaccucggacugccgagcuggggcaaguacguucuggugucugccgggguccucguggugcugaugcuuacaaccuuuaucauuaccugcuguggacggaucagacgcccuaaauccacacagcacggccucgggggcaccggacggaagguuagcgucacaucucaguccggcaaagugaucagcuccugggagucuuauaagagcgggggagaaacgagacucuga

SEQ ID NO: 223729 - RNA, 1575 nt, Artificial Sequence; identical to SEQ ID NO: 223202
  derived and/or modified CDS sequence (opt5) from glycoprotein__RABV__KM492746.1

SEQ ID NO: 223730 - RNA, 1575 nt, Artificial Sequence
  derived and/or modified CDS sequence (opt5) from glycoprotein__RABV__KM492747.1
auggugccccagguccugcuguucguuccucugcuuguguuuagcaugugcuucggcaaguuuccgaucuacaccauucccgacaaacuggggccuuggucccccaucgauauucaccaucucucuuguccuaacaaucugguggucgaggacgaaggaugcacaaaccuuagcggcuucuccuauauggagcugaaggugggguacaucucugccauuaaaguuaauggauuuacguguaccggcguggucacagaagcugagaccuauacaaacuucgugggguacguuaccacaaccuuuaagagaaaacacuuccggcccacgccugaugccugccgcgcggcuuauaauuggaagauggccggagacccgagauacgaagagagccuccauaaccccuauccugauuaccacuggcugcggaccgugaagacaaccaaagagucccuggucaucaucucucccagcguggccgaccucgauccuuacgacaagucccugcauagccgcguguuucccucuggcaaauguuccggcauuacaaucagcucuaccuauugcuccacgaaucacgauuacacaauuuggaugccggaaaacccuagacuugggaccagcugugacaucuucacaaauucucggggaaagcgcgcuuccaaaggcgggaagaccugcggauuugucgaugagagaggccuguauaagagccucaaaggggccuguaagcugaaacuuugcggaguucugggccuccggcugauggacggcaccuggguggcuaugcaaacauccgaugaaacgaaguggugucccccugaccagcuggugaaccuccacgacuuccgcucugaugagauugagcaucuggucguggaggaacuuguuaaaaagagagaagagugccuggacgcccucgaaagcaucaugaccacaaaauccgugagcuuucggcgccugucucaccuuagaaagcugguccccggguucggaaaggcguacaccauuuucaauaaaacacucauggaggccgaugcucauuauaaguccgugcggaccuggaacgagaucauccccagcaaaggcugccugcgcguugggggaagaugucacccucacgugaauggcgucuuuuucaacgggauuauccugggaccggacggccaugugcucauucccgaaaugcagucuagccugcuucagcaacacauggagcugcucgaauccucugucaucccucugaugcauccccuugccgauccuagcacgguguuuaaggacggcgaugaggcugaagacuucguugaggugcaccuccccgauguccauaaacagauuuccgggguggaccucggacugccgagcuggggcaaguacguucuggugucugccgggguccucguggugcugaugcuuacaaucuuuaucaugaccugcuguggacggguuagacgcccuaaguccacccagcacggcuucgggggcacaggacggaaagucagcgugaccucucaguccggcaaggugauuagcuccugggagucuuauaaaagcgggggagaaacaagacuguga

SEQ ID NO: 223731 - RNA, 1575 nt, Artificial Sequence
  derived and/or modified CDS sequence (opt5) from glycoprotein__RABV__KM492748.1
auggugccccagguccugcuccugguuccucuucugguguucagcaugugcuuuggcaaguucccgaucuacaccauucccgacaaacucgggccuuggucccccaucgauauucaccaucugucuuguccuaacaaucuuguggucgaggacgaaggaugcacaaaccugagcggcuuuuccuauauggagcucaaggugggguacaucucugccauuaaaguuaauggauucacguguaccggcguggucacagaagcugagaccuauacaaacuuugugggguacguuaccacaaccuucaagagaaaacacuuucggcccacgccugaugccugccgcgcggcuuauaauuggaagauggccggagacccgagauacgaagagagccugcauaaccccuauccugauuaccacuggcugcggaccgugaagacaaccaaagagucccucgucaucaucucucccagcguggccgaccuggauccuuacgacaagucccuucauagccgcguguuccccucuggcaaauguuccggcauuacaaucagcucuaccuauugcuccacgaaucacgauuacacaauuuggaugccggaaaacccuagacuggggaccagcugugacaucuuuacaaauucucggggaaagcgcgcuuccaaaggcgggaagaccugcggauucgucgaugagagaggccucuauaagagccugaaaggggccuguaaacuuaagcugugcggaguucucggccugcggcugauggacggcaccuggguggcuaugcaaacauccgaugaaacgaaguggugucccccugaccagcucgugaaccugcacgacuuucgcucugaugagauugagcaucuugucguggaggaacugguuaaaaagagagaagagugccucgacgcccuggaaagcaucaugaccacaaaauccgugagcuuccggcgccuuucucaccugagaaagcucguccccggguuuggaaaggcguacaccauuuucaauaaaacacugauggaggccgaugcucauuauaaguccgugcggaccuggaacgagaucauccccagcaaaggcugccugcgcguugggggaagaugucacccucacgugaauggcgucuucuuuaacgggauuauccucggaccggacggccaugugcugauucccgaaaugcagucuagccuucugcagcaacacauggagcuccuggaauccucugucaucccucuuaugcauccccuggccgauccuagcacgguguucaaggacggcgaugaggcugaagacuuuguugaggugcaccuccccgauguccauaaacagauuuccgggguggaccugggacugccgagcuggggcaaguacguucucgugucugccgggguccugguggugcuuaugcugacaaucuucaugauuaccugcuguggacggauccacagaccuaaguccacccagcacggccucgggggcacaggacgcaaaguuagcgucaccucucaguccggcaaggugaucagcuccugggagucuuauaaaagcgggggagaaacacggcuguga

SEQ ID NO: 223732 - RNA, 1575 nt, Artificial Sequence
  derived and/or modified CDS sequence (opt5) from glycoprotein__RABV__KM492750.1
auggugccccagguccugcuguucguuccucugcuuguguuuagcgugugcuucggcaaguuuccgaucuacaccauucccgacaaacuggggccuuggucccccaucgauauucaccaucucaucuguccuaacaaucuggucguggaggacgaaggaugcacaaaccuuacgggcuucucuuauauggagcugaagguuggguacauuagcgccaucaaagugaauggauuuuccuguaccggcgucgugacagaggcuuauaccuaccccaacuucguuggguaugugacaucuaccuuuaagagaaaacacuuccggccuacaccggaugccugccgcgcggcuuacaauuggaagauggccggagaccccagauuugaagaaagccuccauuauccuuaccccgauuaccacuggcugcggaccgucaagacgaccaaagagucccuggugaucauuucuccuagcguggccgaccucgaucccuaugacaagucccugcauagccgcgucuucccgucuggcaaauguuccggcaucacaauuagcucuaccuacugcuccacaaaccacgauuauaccaucuggaugccugagaaucccagacuugggacgagcugugacauuuuuacaaacucucggggaaagcgcgcuuccaaaggcgggaagaccugcggauucguugaugaaagaggccuguacaagagccucaaaggggccuguaagcugaaacuuugcggagugcugggccuccggcugauggacggcacauggguggcuaugcaaaccuccgaugagaccaagugguguccucccgaccagcuggucaaucuccacgacuuucgcucugaugaaaucgagcaucuggugguugaggaacuugugaaaaagagagaggaaugccuggacgcccucgagagcauuaugacaacgaaauccgucagcuuccggcgccugucucaccuuagaaagcuggugcccggguucggaaaggcguauaccaucuuuaacaaaacacucauggaagccgaugcucauuacaaguccguucggaccuggaaugagaucauuccuagcaaaggcugccugcgcgucgggggaagaugucacccgcacgugaagggcguguucuuuaacgggaucauucugggacccgacggccauguccucaucccugagaugcagucuagccugcuucagcaacacauggaacugcucgaguccucugugauuccccugaugcauccucuugccgaucccagcacaguuuucaaagacggcgaugaagcugaggacuuuguggaaguccaucugccggaugugcacaagcagaucuccgggguugaccucggacugccuagcuggggcaaguaugugcuggucucugccggggugcucgugguucugaugcuuaccaucuucauuaucacgugcuguggacggauucacagacccaaauccacacagcacggccucgggggcaccggacgcaaggucagcgugaccucucaguccggcaaagugaucagcuccugggagucuuacaagagcgggggagagacacggcucuga

SEQ ID NO: 223733 - RNA, 1575 nt, Artificial Sequence
  derived and/or modified CDS sequence (opt5) from glycoprotein__RABV__KM492751.1
auggugccccagguccugcuguucguuccucugcuuguguuuagcaugugcuucggcaaguuuccgaucuacaccauucccgacaaacuggggccuuggucccccaucgauauucaccaucucucuuguccuaacaaucugguggucgaggacgaaggaugcacaaaccuuagcggcuucuccuauauggagcugaaggugggguacaucucugccauuaaaguuaauggauuuacguguaccggcguggucacagaagcugagaccuauacaaacuucgugggguacguuaccacaaccuuuaagagaaaacacuuccggcccacgccugaugccugccgcgcggcuuauaauuggaagauggccggagacccgagauacgaagagagccuccauaaccccuauccugauuaccacuggcugcggaccgugaagacaaccaaagagucccuggucaucaucucucccagcguggccgaccucgauccuuacgacaagucccugcauagccgcguguuucccucuggcaaauguuccggcauuacaaucagcucuaccuauugcuccacgaaucacgauuacacaauuuggaugccggaaaacccuagacuugggaccagcugugacaucuucacaaauucucggggaaagcgcgcuuccaaaggcgggaagaccugcggauuugucgaugagagaggccuguauaagagccucaaaggggccuguaagcugaaacuuugcggaguucugggccuccggcugauggacggcaccuggguggcuaugcaaacauccgaugaaacgaaguggugucccccugaccagcuggugaaccuccacgacuuccgcucugaugagauugagcaucuggucguggaggaacuuguuaaaaagagagaagagugccuggacgcccucgaaagcaucaugaccacaaaauccgugagcuuucggcgccugucucaccuuagaaagcugguccccggguucggaaaggcguacaccauuuucaauaaaacacucauggaggccgaugcucauuauaaguccgugcggaccuggaacgagaucauccccagcaaaggcugccugcgcguugggggaagaugucacccucacgugaagggcgucuuuuucaaugggauuauccugggaccggacggccaugugcucauucccgaaaugcagucuagccugcuucagcaacacauggagcugcucgaauccucugucaucccucugaugcauccccuugccgauccuagcacgguguuuaaagacggcgaugaggcugaagacuucguugaggugcaccuccccgauguccauaagcagauuuccgggguggaccucggacugccgagcuggggcaaguacguucuggugucugccgggguccucguggugcugaugcuuacaaucuuuaucauuaccugcugucggagaauccgccggccuagauccacccagcacggacugggcgggacaggccgcaaaguuagcgucaccucucaguccggaaaggugauuagcuccugggagucuuauaaaagcggcggggaaacacggcucuga

SEQ ID NO: 223734 - RNA, 1575 nt, Artificial Sequence
  derived and/or modified CDS sequence (opt5) from glycoprotein__RABV__KM492752.1
auggugccccagguccugcuguucguuccucugcuuguguuuagcaugugcuucggcaaguuuccgaucuacaccauucccgacaaacuggggccuuggucccccaucgauauucaccaucucucuuguccuaacaaucugguggucgaggacgaaggaugcacaaaccuuagcggcuucuccuauauggagcugaaggugggguacaucucugccauuaaaguuaauggauuuacguguaccggcguggucacagaagcugagaccuauacaaacuucgugggguacguuaccacaaccuuuaagagaaaacacuuccggcccacgccugaugccugccgcgcggcuuauaauuggaagauggccggagacccgagauacgaagagagccuccauaaccccuauccugauuaccacuggcugcggaccgugaagacaaccaaagagucccuggucaucaucucucccagcguggccgaccucgauccuuacgacaagucccugcauagccgcguguuucccucuggcaaauguuccggcauuacaaucagcucuaccuauugcuccacgaaucacgauuacacaauuuggaugccggaaaacccuagacuugggaccagcugugacaucuucacaaauucucggggaaagcgcgcuuccagaggcgggaaaaccugcggauuugucgaugagcggggccuguauaagagccucaagggggccuguaaacugaagcugugcggaguucugggccuccgccugauggacggcaccuggguggcuaugcaaacauccgaugaaacgaaauggugucccccugaccagcuggugaaccuccacgacuucagaucugaugagauugagcaucuggucguggaggaacuuguuaagaaacgggaagagugccuggacgcccucgaaagcaucaugaccacaaaguccgugagcuuucgcagacugucucaccuucggaaacugguccccggguucggaaaggcguacaccauuuucaauaagacacucauggaggccgaugcucauuauaaauccgugcgcaccuggaacgagaucauccccagcaagggcugccugagaguugggggacggugucacccucacgugaaaggcgucuuuuucaaugggauuauccugggaccggacggccaugugcucauucccgaaaugcagucuagccugcuucagcaacacauggagcugcucgaauccucugucaucccucugaugcauccccuugccgauccuagcacgguguuuaaggacggcgaugaggcugaagacuucguugaggugcaccuccccgauguccauaaacagauuuccgggguggaccucggacugccgaacuggggcaaguacguucuggugagcgccgggguccucguggugcugaugcuuacaaucuuuaucauuaccugcuguggaagaauccgccggccuagaucuacccagcacggccuugggggcacaggacgcaagguuuccgucaccagccagucuggcaaagugauuuccagcugggaguccuauaagucugggggagaaacacggcucuga

SEQ ID NO: 223735 - RNA, 1575 nt, Artificial Sequence
  derived and/or modified CDS sequence (opt5) from glycoprotein__RABV__KM492753.1
auggugccccagguccugcuguucguuccucugcuuguguuuagcaugugcuucggcaaguuuccgaucuacaccauucccgacaaacuggggccuuggucccccaucgauauucaccaucucucuuguccuaacaaucugguggucgaggacgaaggaugcacaaaccuuagcggcuucuccuauauggagcugaaggugggguacaucucugccauuaaaguuaauggauuuacguguaccggcguggucacagaagcugagaccuauacaaacuucgugggguacguuaccacaaccuuuaagagaaaacacuuccggcccacgccugaugccugccgcgcggcuuauaauuggaagauggccggagacccgagauacgaagagagccuccauaaccccuauccugauuaccacuggcugcggaccgugaagacaaccaaagagucccuggucaucaucucucccagcguggccgaccucgauccuuacgacaagucccugcauagccgcguguuucccucuggcaaauguuccggcauuacaaucagcucuaccuauugcuccacgaaucacgauuacacaauuuggaugccggaaaacccuagacuugggaccagcugugacaucuucacaaauucucggggaaagcgcgcuuccaaaggcgggaagaccugcggauuugucgaugagagaggccuguauaagagccucaaaggggccuguaagcugaaacuuugcggaguucugggccuccggcugauggacggcaccuggguggcuaugcaaacauccgaugaaacgaaguggugucccccugaccagcuggugaaccuccacgacuuccgcucugaugagauugagcaucuggucguggaggaacuuguuaaaaagagagaagagugccuggacgcccucgaaagcaucaugaccacaaaauccgugagcuuucggcgccugucucaccuuagaaagcugguccccggguucggaaaggcguacaccauuuucaauaaaacacucauggaggccgaugcucauuauaaguccgugcggaccuggaacgagaucauccccagcaaaggcugccugcgcguugggggaagaugucacccucacgugaauggcgucuuuuucaacgggauuauccugggaccggacggccaugugcucauucccgaaaugcagucuagccugcuucagcaacacauggagcugcucgaauccucugucaucccucugaugcauccccuugccgauccuagcacgguguuuaaggacggcgaugaggcugaagacuucguugaggugcaucugcccgauguccacaaacagauuuccgggguggaccucggacugccgagcuggggcaaguacguucuggugucugccgggguccucguggugcugaugcuuacaaucuuuaucaugaccugcuguggacggguucacagaccuaaguccacccagcacggccucgggggcacaggacgcaaagucagcgugaccucucaguccggcaaggugauuagcuccugggagucuuauaaaagcgggggagaaacacggcucuga

SEQ ID NO: 223736 - RNA, 1575 nt, Artificial Sequence
  derived and/or modified CDS sequence (opt5) from glycoprotein__RABV__KM492754.1
auggugccccagguccugcuguucguuccucugcuuguguuuagcaugugcuucggcaaguuuccgaucuacaccauucccgacaaacuggggccuuggucccccaucgauauucaccaucucucuuguccuaacaaucugguggucgaggacgaaggaugcacaaaccuuagcggcuucuccuauauggagcugaaggugggguacaucucugccauuaaaguuaauggauuuacguguaccggcguggucacagaagcugagaccuauacaaacuucgugggguacguuaccacaaccuuuaagagaaaacacuuccggcccacgccugaugccugccgcgcggcuuauaauuggaagauggccggagacccgagauacgaagagagccuccauaaccccuauccugauuaccacuggcugcggaccgugaagacaaccaaagagucccuggucaucaucucucccagcguggccgaccucgauccuuacgacaagucccugcauagccgcguguuucccucuggcaaauguuccggcauuacaaucagcucuaccuauugcuccacgaaucacgauuacacaauuuggaugccggaaaacccuagacuugggaccagcugugacaucuucacaaauucucggggaaagcgcgcuuccaaaggcgggaagaccugcggauuugucgaugagagaggccuguauaagagccucaaaggggccuguaagcugaaacuuugcggaguucugggccuccggcugauggacggcaccuggguggcuaugcaaacauccgaugaaacgaaguggugucccccugaccagcuggugaaccuccacgacuuccgcucugaugagauugagcaucuggucguggaggaacuuguuaaaaagagagaagagugccuggacgcccucgaaagcaucaugaccacaaaauccgugagcuuucggcgccugucucaccuuagaaagcugguccccggguucggaaaggcguacaccauuuucaauaaaacacucauggaggccgaugcucauuauaaguccgugcggaccuggaacgagaucauccccagcaaaggcugccugcgcguugggggaagaugucacccucacgugaauggcgucuuuuucaacgggauuauccugggaccggacggccaugugcucauucccgaaaugcagucuagccugcuucagcaacacauggagcugcucgaauccucugucaucccucugaugcauccccuugccgauccuagcacgguguuuaaggacggcgaugaggcugaagacuucguugaggugcaucugcccgauguccacaaacagauuuccgggguggaccucggacugccgagcuggggcaaguacguucuggugucugccgggguccucguggugcugaugcuuacaaucuuuaucaugaccugcuguggacggguucacagauccaagagcacccagcacggccucgggggcacaggacgcaaagucucugugaccucccagagcggcaaggugauuuccucuugggagagcuauaaauccgggggagaaacacggcucuga

SEQ ID NO: 223737 - RNA, 1575 nt, Artificial Sequence
  derived and/or modified CDS sequence (opt5) from glycoprotein__RABV__KM492755.1
auggugccccagguccugcuguucguuccucugcuuguguuuagcaugugcuucggcaaguuuccgaucuacaccauucccgacaaacuggggccuuggucccccaucgauauucaccaucucucuuguccuaacaaucugguggucgaggacgaaggaugcacaaaccuuagcggcuucuccuauauggagcugaaggugggguacaucucugccauuaaaguuaauggauuuacguguaccggcguggucacagaagcugagaccuauacaaacuucgugggguacguuaccacaaccuuuaagagaaaacacuuccggcccacgccugaugccugccgcgcggcuuauaauuggaagauggccggagacccgagauacgaagagagccuccauaaccccuauccugauuaccacuggcugcggaccgugaagacaaccaaagagucccuggucaucaucucucccagcguggccgaccucgauccuuacgacaagucccugcauagccgcguguuucccucuggcaaauguuccggcauuacaaucagcucuaccuauugcuccacgaaucacgauuacacaauuuggaugccggaaaacccuagacuugggaccagcugugacaucuucacaaauucucggggaaagcgcgcuuccaaaggcgggaagaccugcggauuugucgaugagagaggccuguauaagagccucaaaggggccuguaagcugaaacuuugcggaguucugggccuccggcugauggacggcaccuggguggcuaugcaaacauccgaugaaacgaaguggugucccccugaccagcuggugaaccuccacgacuuccgcucugaugagauugagcaucuggucguggaggaacuuguuaaaaagagagaagagugccuggacgcccucgaaagcaucaugaccacaaaauccgugagcuuucggcgccugucucaccuuagaaagcugguccccggguucggaaaggcguacaccauuuucaauaaaacacucauggaggccgaugcucauuauaaguccgugcggaccuggaacgagaucauccccagcaaaggcugccugcgcguugggggaagaugucacccucacgugaauggcgucuuuuucaacgggauuauccugggaccggacggccaugugcucauucccgaaaugcagucuagccugcuucagcaacacauggagcugcucgaauccucugucaucccucugaugcauccccuugccgauccuagcacgguguuuaaggacggcgaugaggcugaagacuucguugaggugcaucugcccgauguccacaaacagauuuccgggguggaccucggacugccgagcuggggcaaguacguucuggugucugccgggguccucguggugcugaugcuuacaaucuuuaucaugaccugcuguggacggguucacagaccuaaguccacccagcacggccucgggggcacagagcgcaaagucagcgugaccucucaguccggaaaggugauuagcuccugggaaucuuauaaaagcggcggggagacacggcucuga

SEQ ID NO: 223738 - RNA, 1575 nt, Artificial Sequence; identical to SEQ ID NO: 223737
  derived and/or modified CDS sequence (opt5) from glycoprotein__RABV__KM492758.1

SEQ ID NO: 223739 - RNA, 1575 nt, Artificial Sequence
  derived and/or modified CDS sequence (opt5) from glycoprotein__RABV__KM492759.1
auggugccccagguccugcuguucguuccucugcuuguguuuagcaugugcuucggcaaguuuccgaucuacaccauucccgacaaacuggggccuuggucccccaucgauauucaccaucucucuuguccuaacaaucugguggucgaggacgaaggaugcacaaaccuuagcggcuucuccuauauggagcugaaggugggguacaucucugccauuaaaguuaauggauuuacguguaccggcguggucacagaagcugagaccuauacaaacuucgugggguacguuaccacaaccuuuaagagaaaacacuuccggcccacgccugaugccugccgcgcggcuuauaauuggaagauggccggagacccgagauacgaagagagccuccauaaccccuauccugauuaccacuggcugcggaccgugaagacaaccaaagagucccuggucaucaucucucccagcguggccgaccucgauccuuacgacaagucccugcauagccgcguguuucccucuggcaaauguuccggcauuacaaucagcucuaccuauugcuccacgaaucacgauuacacaauuuggaugccggaaaacccuagacuugggaccagcugugacaucuucacaaauucucggggaaagcgcgcuuccaaaggcgggaagaccugcggauuugucgaugagagaggccuguauaagagccucaaaggggccuguaagcugaaacuuugcggaguucugggccuccggcugauggacggcaccuggguggcuaugcaaacauccgaugaaacgaaguggugucccccugaccagcuggugaaccuccacgacuuccgcucugaugagauugagcaucuggucguggaggaacuuguuaaaaagagagaagagugccuggacgcccucgaaagcaucaugaccacaaaauccgugagcuuucggcgccugucucaccuuagaaagcugguccccggguucggaaaggcguacaccauuuucaauaaaacacucauggaggccgaugcucauuauaaguccgugcggaccuggaacgagaucauccccagcaaaggcugccugcgcguugggggaagaugucacccucacgugaauggcgucuuuuucaacgggauuauccugggaccggacggccauauucucauccccgaaaugcagucuagccugcuucagcaacacauggagcugcucgaauccucugugauuccucugaugcauccccuugccgauccuagcacggucuuuaaggacggcgaugaggcugaagacuucguggagguucaucugcccgaugugcacaaacagaucuccggggucgaccucggacugccgagcuggggcaaguacgugcugguuucugccggggugcucgucgugcugaugcuuacaaucuuuauuaugaccugcuguggacgggugcacagaccuaaguccacccagcacggccucgggggcacagagcgcaaaguuagcgucaccucucaguccggaaaggugaucagcuccugggaaucuuauaaaagcggcggggagacacggcucuga

SEQ ID NO: 223740 - RNA, 1575 nt, Artificial Sequence
  derived and/or modified CDS sequence (opt5) from glycoprotein__RABV__KM492760.1
auggugccccagguccugcuguucguuccucugcuuguguuuagcaugugcuucggcaaguuuccgaucuacaccauucccgacaaacuggggccuuggucccccaucgauauucaccaucucucuuguccuaacaaucugguggucgaggacgaaggaugcacaaaccuuagcggcuucuccuauauggagcugaaggugggguacaucucugccauuaaaguuaauggauuuacguguaccggcguggucacagaagcugagaccuauacaaacuucgugggguacguuaccacaaccuuuaagagaaaacacuuccggcccacgccugaugccugccgcgcggcuuauaauuggaagauggccggagacccgagauacgaagagagccuccauaaccccuauccugauuaccacuggcugcggaccgugaagacaaccaaagagucccuggucaucaucucucccagcguggccgaccucgauccuuacgacaagucccugcauagccgcguguuucccucuggcaaauguuccggcauuacaaucagcucuaccuauugcuccacgaaucacgauuacacaauuuggaugccggaaaacccuagacuugggaccagcugugacaucuucacaaauucucggggaaagcgcgcuuccaaaggcgggaagaccugcggauuugucgaugagagaggccuguauaagagccucaaaggggccuguaagcugaaacuuugcggaguucugggccuccggcugauggacggcaccuggguggcuaugcaaacauccgaugaaacgaaguggugucccccugaccagcuggugaaccuccacgacuuccgcucugaugagauugagcaucuggucguggaggaacuuguuaaaaagagagaagagugccuggacgcccucgaaagcaucaugaccacaaaauccgugagcuuucggcgccugucucaccuuagaaagcugguccccggguucggaaaggcguacaccauuuucaauaaaacacucauggaggccgaugcucauuauaaguccgugcggaccuggaacgagaucauccccagcaaaggcugccugcgcguugggggaagaugucacccucacgugaauggcgucuuuuucaacgggauuauccugggaccggacggccaugugcucauucccgaaaugcagucuagccugcuucagcaacacauggagcugcucgaauccucugucaucccucugaugcauccccuugccgauccuagcacgguguuuaaggacggcgaugaggcugaagacuucguugaggugcaccuccccgauguccauaaacagauuuccgggguggaccucggacugccgagcuggggcaaguacguucuggugucugccgggguccucguggugcugaugcuuacaaucuuuaucaugaccugcuguggacggguucacagaccuaaguccacccagcacagccugggcgggacagagcgcaaagucucugugaccucccagagcggcaaggugauuuccucuugggaaagcuauaaauccggaggcgagacacggcucuga

SEQ ID NO: 223741 - RNA, 1575 nt, Artificial Sequence
  derived and/or modified CDS sequence (opt5) from glycoprotein__RABV__KM492761.1
auggugccccagguccuucucuucguuccucugcuuguguuuagcaugugcuucggcaaguuuccgaucuacaccauucccgacaaacuggggccuuggucccccaucgauauucaccaucucucuuguccuaacaaucugguggucgaggacgaaggaugcacaaaccuuagcggcuucuccuauauggagcugaaggugggguacaucucugccauuaaaguuaauggauuuacguguaccggcguggucacagaagcugagaccuauacaaacuucgugggguacguuaccacaaccuuuaagagaaaacacuuccggcccacgccugaugccugccgcgcggcuuauaauuggaagauggccggagacccgagauacgaagagagccuccauaaccccuauccugauuaccacuggcugcggaccgugaagacaaccaaagagucccuggucaucaucucucucagcguggccgaccuggaucccuacgacaagucccuucauagccgcguguuuccuucuggcaaauguuccggcauuacaaucagcucuaccuauugcuccacgaaucacgauuacacaauuuggaugcccgaaaacccgagacuggggaccagcugugacaucuucacaaauucucggggaaagcgcgcuuccaaaggcgggaagaccugcggauuugucgaugagagaggccucuauaagagccugaaaggggccuguaagcugaaacugugcggaguucucggccugcggcugauggacggcaccuggguggcuaugcaaacauccgaugaaacgaagugguguccucccgaccagcucgugaaccugcacgacuuccgcucugaugagauugagcaucuugucguggaggaacugguuaaaaagagagaagagugccucgacgcccuggaaagcaucaugaccacaaaauccgugagcuuucggcgccuuucucaccugagaaagcucgucccuggguucggaaaggcguacaccauuuucaauaaaacacugauggaggccgaugcucauuauaaguccgugcggaccuggaacgagaucauccccagcaaaggcugccugcgcguugggggaagaugucacccccacgugaauggcgucuuuuucaacgggauuauccucggaccugacggccaugugcugauuccggaaaugcagucuagccuucugcagcaacacauggagcuccuggaauccucugucaucccccuuaugcauccucuggccgaucccagcacgguguuuaaggacggcgaugaggcugaagacuucguugaggugcaccucccugauguccauaaacagauuuccgggguggaccugggacugcccagcuggggcaaguacguucucgugucugccgggguccugguggugcuuaugcugacaaucuuuaucaugaccugcuguggacggguucacagaccgaaguccacccagcacggccucgggggcacaggacgcaaagucagcgugaccucucaguccggcaaggugauuagcuccugggagucuuauaaaagcgggggagaaacacggcuguga

SEQ ID NO: 223742 - RNA, 1575 nt, Artificial Sequence
  derived and/or modified CDS sequence (opt5) from glycoprotein__RABV__KM492762.1
auggugccccagguccuucucuucguuccucugcuuguguuuagcaugugcuucggcaaguuuccgaucuacaccauucccgacaaacuggggccuuggucccucaucgauauucaccaucugucuugucccaacaaucuuguggucgaggacgaaggaugcacaaaccugagcggcuucuccuauauggagcucaaggugggguacaucucugccauuaaaguuaauggauuuacguguaccggcguggucacagaagcugagaccuauacaaacuucgugggguacguuaccacaaccuuuaagagaaaacacuuccggccuacgcccgaugccugccgcgcggcuuauaauuggaagauggccggagacccuagauacgaagagagccugcauaacccguaucccgauuaccacuggcugcggaccgugaagacaaccaaagagucccucgucaucaucucuccuagcguggccgaccuggaucccuacgacaagucccuucauagccgcguguuuccuucuggcaaauguuccggcauuacaaucagcucuaccuauugcuccacgaaucacgauuacacaauuuggaugcccgaaaacccgagacuggggaccagcugugacaucuucacaaauucucggggaaagcgcgcuuccaaaggcgggaagaccugcggauuugucgaugagagaggccucuauaagagccugaaaggggccuguaagcugaaacugugcggaguucucggccugcggcugauggacggcaccuggguggcuaugcaaacauccgaugaaacgaagugguguccucccgaccagcucgugaaccugcacgacuuccgcucugaugagauugagcaucuugucguggaggaacugguuaaaaagagagaagagugccucgacgcccuggaaagcaucaugaccacaaaauccgugagcuuucggcgccuuucucaccugagaaagcucgucccuggguucggaaaggcguacaccauuuucaauaaaacacugauggaggccgaugcucauuauaaguccgugcggaccuggaacgagaucauccccagcaaaggcugccugcgcguugggggaagaugucacccccacgugaauggcgucuuuuucaacgggauuauccucggaccugacggccaugugcugauuccggaaaugcagucuagccuucugcagcaacacauggagcuccuggaauccucugucaucccccuuaugcauccucuggccgaucccagcacgguguuuaaggacggcgaugaggcugaagacuucguugaggugcaccucccugauguccauaaacagauuuccgggguggaccugggacugcccagcuggggcaaguacguucucgugucugccgggguccugguggugcuuaugcugacaaucuuuaucaugaccugcuguggacggguucacagaccgaaguccacccagcacggccucgggggcacagagcgcaaagucagcgugaccucucaguccggaaaggugauuagcuccugggaaucuuauaaaagcggcggggagacacggcuguga

SEQ ID NO: 223743 - RNA, 1575 nt, Artificial Sequence; identical to SEQ ID NO: 223735
  derived and/or modified CDS sequence (opt5) from glycoprotein__RABV__KM492763.1

SEQ ID NO: 223744 - RNA, 1575 nt, Artificial Sequence; identical to SEQ ID NO: 223737
  derived and/or modified CDS sequence (opt5) from glycoprotein__RABV__KM492764.1

SEQ ID NO: 223745 - RNA, 1575 nt, Artificial Sequence
  derived and/or modified CDS sequence (opt5) from glycoprotein__RABV__KM492765.1
auggugccgcagguccuucucuucguuccucugcuuguguuuagcaugugcuucggcaaguuuccgaucuacaccauucccgacaaaguggggccuggaucccccaucgauauucaccaucugucuuguccuaacaaucucgucaucgaggacgaaggcugcacaaaccugagcggguucuccuauauggagcuuaaggugggauacauuucugccaucaaaguuagcggcuuuacguguaccgggguggaaacagaggcugaaaccuauacaaauuucgucggauacgugaccacaaccuuuaagagaaaacacuuccggcccacgccuaacgccugccgcgcggcuuauaauagaaagauggccggcgauccgcgguacgaggagucccugcauaaccgcugucccgaauaucacuggcucagaaccguuaagacaaccaaagagucucuggugaucauuagcccuuccgucgccgaccuggaucccuacgacaagagccuccauucucggguguuuccuuccggcaaaugcagcgggaucacaauuucuuccaccuacuguagcacgaaucacgauuauacaaucuggaugcccgaaaacccgcgccugggaaccucuugcgacauuuucacaaauuccagaggcaagcgggcuagcaaagggggaaagaccuguggcuuuguggaugagcgcgggcuuuacaagucccugaaaggagccugcaagcucaaacuguguggcguccuuggccugagacucauggacgggaccuggguugcuaugcaaacaucugaugagacgaaguggugcccucccgaccagcuggugaaccugcacgauuuccggagcgacgaaaucgagcaucucguggucgaggaacuggugaaaaagcgcgaagagugccuugacgcccuggaguccauuaugaccacaaaaagcguuucuuuuagacggcucucccaucugcgcaagcuggugccuggauucggcaaggcguauaccaucuucaauaaaacacugauggaagccgaugcucacuacaagagcgucagaaccuggaacgagaucauucccucuaaagggugucuccgggugggaggcagaugccacccccacguuaaugggguguuuuucaacggaaucauucugggcccugacggccauguccugaucccggaaaugcagagcucccuccugcagcaacacauggagcuucuggaaucuagcgugauuccccucaugcauccucuggccgaucccuccacggucuuuaaggacggggaugaggcugaggacuucguggaaguucaccuuccugaugugcauaaacagaucagcggagucgaccugggccuccccucuugggggaaguaugugcugguuuccgccggagugcuggucgugcucaugcugacaaucuuuauuaugaccuguugcggccgcgugcaccggcccaagagcacccagcacgggcuuggcggaacagagagaaaaguuucugucaccucccagagcggcaaggugaucuccucuugggaaagcuacaaauccgggggagagacacgccuguga

SEQ ID NO: 223746 - RNA, 1575 nt, Artificial Sequence
  derived and/or modified CDS sequence (opt5) from glycoprotein__RABV__KM594023.1
augaucccccagaacccucugcucggccugcuucuggugagcucccucugcuucgggaaguuuccgauuuacaccauccccgacaaacugggaccuuggucucccauugauauccaccaucuuagcuguccuaauaaccuggucguugaggacgaaggcugcacaucccucucuggguucagcuauauggagcugaaggugggauacauuuccgccaucaaagugaauggcuuuacguguaccggggucgugacagaagcugagaccuauacaaacuucguuggauacgugaccacaaccuuuaagagacggcacuuccgccccaugccugaugccugcagagcggcucauaauuggaaaaucgccggcgacccgcgguaugaagauucucugcaaaaccccuacccugacuaucacuggcuccgcacggucaagaccacaaaggagagccugauuaucauuucccccagcguggccgaucuugacccuuacgauaaaucucugcauuccagaguuuuucccggcgggaagugucucggagugaccaucagcucuacauacugcuccaccaaucacgacuauacgauuuggaugccggaggaagcuggccuggggacaagcugugauaucuucaccaacucucggggaaaacgcgccuccaagggcgggaaaacaugcggauuugucgacgagagaggccuuuacaagagccugaagggcuccuguaaacucaagcugugcggggugccuggacugcggcucauggauggcaccugggugucuauucagacccccgacgaaacaaaaugguguccucccgaccaggucguuaaucugcacgauuuccauagcgacgagaucgagcaccuugugguggaggaacugaucaagaaacgcgaagagugccucgaugcucuggaauccauuaugacgaccaagagcgucucuuuuagacggcuuucccaucugcgcaaacucgugcccggguucggaaaggccuauacaaucuacaacaagacccugauggaggcggacgcccacuauaaaagcguuagaacauggaaugagauuaucccuucuaagggcugccugcgggucgggggacgcugucacccggauguggacggcguguuuuucaacggcauuauccucgggcccgauggaaauguucugaucccugaaaugcagagcucccuucugcaacagcauauggagcuccuggaaucuagcgugauuccccuuaugcacccucuggcugaccccuccaccaucuucaaagauagcgacgaggccgaagauuuugucgaggugcaucucccggacguccacaagaaaauuucuggcguggaccuggggcugccuuccuggggaaaguaccuccugaugagcgcuggcgcccuugcggcccugaugcucacgacacugcugauuaccugcuguagaaagguuaaccgggcugagcccaaacagcaggggccuagagaaucuggccgcaccaucuccgugacaccccaaaauggacgggucaucagcuccugggagcuuuauaagucuggcagcgaaaccgggcucuga

SEQ ID NO: 223747 - RNA, 1575 nt, Artificial Sequence
  derived and/or modified CDS sequence (opt5) from glycoprotein__RABV__KM594024.1
augauccccagaaacccucugcucggccugcuucuggugagcucccucugcuucgggaaguuuccgauuuacaccauccccgacaaacugggaccuuggucucccauugauauccaccaucuuagcuguccuaauaaccuggucguugaggacgaaggcugcacaucccucucuggguucagcuauauggagcugaaggugggauacauuuccgccaucaaagugaauggcuuuacguguaccggggucgugacagaagcugagaccuauacaaacuucguuggauacgugaccacaaccuuuaagcggcgccacuucagacccaugccugaugccugccgggcggcucauaauuggaaaaucgccggcgacccgcgcuaugaagauucucugcagaaccccuacccugacuaucacuggcucagaacggucaagaccacaaaggagagccugauuaucauuucccccagcguggccgaucuugacccuuacgauaaaucucugcauucccggguuuuucccggcgggaagugucucggagugaccaucagcucuacauacugcuccaccaaucacgacuauacgauuuggaugccggaggaagcuggccuggggacaagcugugauaucuucaccaacucucgcggaaaaagagccuccaagggcgggaaaacaugcggauuugucgacgagcggggccuuuacaagagccugaagggcuccuguaaacucaagcugugcggggugccuggacugcgccucauugauggcaccugggugucuauccaaacccccgacgaaacaaaaugguguccucccgaccaggucguuaaucugcacgauuuccauagcgacgagaucgagcaccuugugguggaggaacugauuaagaaaagagaagagugccucgaugcucuggaauccaucaugacgaccaagagcgucucuuuucggcgccuuucccaucugagaaaacucgugcccggguucggaaaggccuauacaauucacaacaagacccugauggaggcggacgcccacuacaaaagcguucggacauggaaugagaucauuccuucuaagggcugccugcgcgucgggggaagaugucauccgaacguggauggcguguuuuucaauggcaucauccucgggcccgacggaaacguucugauuccugaaaugcagagcucccuucugcagcaacacauggagcuccuggaaucuagcgugaucccccuuaugcauccucuggcugaucccuccaccauuuucaaagacagcgaugaggccgaagacuuugucgaugugcaccucccggacguccauaagaaaaucucuggcguggaccuggggcugccuuccuggggaaaguaucuccugaugagcgcuggcgcccuugcggcccugaugcucacgacacugcugauuaccugcugucggaagguuaauagagcugagcccaaacagcaggggccucgcgagucuggccggaccaucuccgugacaccccagaacggaagagucaucagcuccugggaacuuuacaagucuggcagcgagaccgggcucuga

SEQ ID NO: 223748 - RNA, 1575 nt, Artificial Sequence
  derived and/or modified CDS sequence (opt5) from glycoprotein__RABV__KM594025.1
augaucccccuggaccuccugcuuggccugcuccuggccagcucccuuugcuucgggaaguuuccuauuuacaccaucccggauaaacugggacccuggucuccuauugacauccaccaucucagcugucccaacaaucugguggucgaggaugaaggcugcacaucccugucuggguucagcuauauggagcucaagguuggauacauuuccgcuaucaaagugaacggcuuuacguguaccgggguggucacagaagccgagaccuauacaaauuucgugggauacguuaccacaaccuuuaagagaaaacacuuccggccuaugcccgacgcgugccgcgcugcccaugaauggaagacggccggcgauccuagauaugaggacucucugcagaacccguaccccgauuaucacuggcuucggaccgugaagacaaccaaagagagccuggucaucauuuccccuagcguggcugaccucgaucccuacgacaagucucugcauucccgcguuuuuccuggcgggaaaugucuuggagugacaaucagcucuaccuacugcuccacgaaucacgauuauacaauuuggaugcccgaagaggccggccuggggaccagcugugacaucuucacaaacucuagaggaaagcgggcuuccaaaggcgggcgcauuugcggauuugucgaugaaagaggccucuacaagagccugaagggcgccuguaaacugaagcucugcggggugccgggacugcggcuuauggacggcaccuggguguccauccaagcgccugacgagaccaaauggugucccccugaucaggucguuaaucugcacgacuuccauucugaugagauugaacaccucgugguggaggaacugaucaagaaacgcgaggaaugccuugacgcccuggagagcaucaugacaacgaaguccgucagcuuuagacggcucucucaucugcgcaaacuggugcccggguucggaaaggcuuauaccauuuuuaacaagacacucauggaggccgaugcucacuacaaauccguuagaaccuggaaugaagugguccccagcaagggcugccugaaaguugggggacggugucacucugacguggauggcguguucuucaacggcaucauucuugggccugacggaaauguccugaucccggagaugcagagcucccuccugcagcaacauauggaacuucuggagucuagcgugauuccccucaugcacccucuggccgaucccuccacaaucuuuaaggacagcgaugaagcggaggacuucgucgacgugcaucugccugauguucacaaacaggugucuggcgucgaccucgggcugcccuccuggggaaaguaucuucugaugagcgccggcgcucucgccacccugaugucugcuaucuuucuggugacgugcuguaagaaaguuaagcgcgccgagccggcccaucacgggccuaaagaauccggcagaaagauuagcgugacaccccagaacggaaaagucaucuccucuugggagguguacaagagcggcaaugaaccugggcuuuga

SEQ ID NO: 223749 - RNA, 1575 nt, Artificial Sequence
  derived and/or modified CDS sequence (opt5) from glycoprotein__RABV__KM594026.1
augaucccccaggcccuucucuucgugccucugcuuauuagcuccucuugcuuuggcaaguucccggucuacaccauccccgagaaacuggggccuuggagccccauugacauccaccaucucuccuguccuaacaaucuggcuguugaagaugagggaugcaacucucuuagcggcuuuuccuauauggaacugaaggugggguacauuucugccaucaaagugaauggauucacauguacgggcgucgugaccgaggcggaaacauauaccaacuuuguuggguacgugacaaccacauucaagagaaaacacuuucggcccaugccugacgcuugccgcgccgccuauaauuggaagauggcuggagauccgagauacgaggagagccuccauaaccccuauccugacuaccacuggcugcggaccgucacgaccacaaaggaaucccugaucauuaucagccccucuguggccaaucucgauccuuacgacaaaucccugcauagccgcguuuuccccggcggcaaguguauggggauuaccgugucuuccacauuuugcagcaccaaccacgauuauacgaucuggaugccggagaaugcuagacuuggaacaucuugugacauuuucaccacauccaaaggcaagaaagccagcaaagggggaaagaucugcggcuuugucgaugaacgggggcuguacaagucccucaagggagcguguaaacugaagcugugcggcgugucuggccugcgccuccuggacgggaccugggugaccauucaaacaagcgaugagaucaaaugguguccucccgacaagcuggucaaccuccacgauuuccauuccgacgagaucgaacaccugguuguggaggaacuugugagaaaacgggaggaaugccuggacacgcucgagagcauuaugaccacaaagucugucuccuuucgcagacugagccaucuucggaagcuggugccuggauucggcaaagccuauaccaucuucaauaagacacucauggaggcugaugcccacuacaaaucuguuaacaccuggaaugaaauuauccccagcaaggggugccugacggugggaggccgcugucacccccaugucaacgggguguuuuucaauggaauuauccugggcccugacggccacguucucaucccggagaugcaguccucucugcuucagcagcauauggaacugcucgagagcuccgugauuccccugaugcacccucuugcugaucccagcacagucuuuaaagacggggaugaagccgaggacuucguggagguccaucugccugaugugcacaagcaaguuucuggaaucgaccucggccugcccaacugggggaaguaugugcugauuuccgcgggauuucucgucacccugcuucugaucauuuucuuuaugaucugcuguagacgggccaaccgcagagugagcacccagcagucucucggcgaauccgggaaaaagguuuucgugaucccgcagaauggcaaagucauuagcuccugggagucuuacaagaacggaacagaaacccggcuguga

SEQ ID NO: 223750 - RNA, 1575 nt, Artificial Sequence
  derived and/or modified CDS sequence (opt5) from glycoprotein__RABV__KM594027.1
augaucccccaggcccuucucuucgugccucugcuuauuagcuccucuugcuuuggcaaguucccggucuacaccauccccgagaaacuggggccuuggagccccauugacauccaccaucucuccuguccuaacaaucuggcuguugaagaugagggaugcaacucucuuagcggcuuuuccuauauggaacugaaggugggguacauuucugccaucaaagugaauggauucacauguacgggcgucgugaccgaggcggaaacauauaccaacuuuguuggguacgugacaaccacauucaagagaaaacacuuucggcccaugccugacgcuugccgcgccgccuauaauuggaagauggcuggagauccgagauacgaggagagccuccauaaccccuauccugacuaccacuggcugcggaccgucacgaccacaaaggaaucccugaucauuaucagccccucuguggccaaucucgauccuuacgacaaaucccugcauagccgcguuuuccccggcggcaaguguauggggauuaccgugucuuccacauuuugcagcaccaaccacgauuauacgaucuggaugccggagaaugcuagacuuggaacaucuugugacauuuucaccacauccaaaggcaagaaagccagcaaagggggaaagaucugcggcuuugucgaugaacgggggcuguacaagucccucaagggagcguguaaacugaagcugugcggcgugucuggccugcgccuccuggacgggaccugggugaccauucaaacaagcgaugagaucaaaugguguccucccgacaagcuggucaaccuccacgauuuccauuccgacgagaucgaacaccugguuguggaggaacuugugagaaaacgggaggaaugccuggacacgcucgagagcauuaugaccacaaagucugucuccuuucgcagacugagccaucuucggaagcuggugccuggauucggcaaagccuauaccaucuucaauaagacacucauggaggcugaugcccacuacaaaucuguuaacaccuggaaugaaauuauccccagcaaggggugccugacggugggaggccgcugucacccccaugucaacgggguguuuuucaauggaauuauccugggcccugacggccacguucucaucccggagaugcaguccucucugcuucagcagcauauggaacugcucgagagcuccgugauuccccugaugcacccucuugcugaucccagcacagucuuuaaagacggggaugaagccgaggacuucguggagguccaucugccugaugugcacaagcaaguuucuggaaucgaccucggccugcccaacugggggaaguaugugcugauuuccgcgggauuucucgucacccugcuucugaucauuuuccucaugaucugcuguagacgggccaaccgcagagugagcacccagcagucucugggcgaauccgggaaaaagguuuuugugaucccgcagaauggcaaagucauuagcuccugggagucuuacaagaacggagcugaaacacggcuguga

SEQ ID NO: 223751 - RNA, 1575 nt, Artificial Sequence
  derived and/or modified CDS sequence (opt5) from glycoprotein__RABV__KM594028.1
augaucccccaggcccuucucuucgugccucugcuuauuagcuccucuugcuuuggcaaguucccggucuacaccauccccgagaaacuggggccuuggagccccauugacauccaccaucucuccuguccuaacaaucuggcuguugaagaugagggaugcaacucucuuagcggcuuuuccuauauggaacugaaggugggguacauuucugccaucaaagugaauggauucacauguacgggcgucgugaccgaggcggaaacauauaccaacuuuguuggguacgugacaaccacauucaagagaaaacacuuucggcccaugccugacgcuugccgcgccgccuauaauuggaagauggcuggagauccgagauacgaggagagccuccauaaccccuauccugacuaccacuggcugcggaccgucacgaccacaaaggaaucccugaucauuaucagccccucuguggccaaucucgauccuuacgacaaaucccugcauagccgcguuuuccccggcggcaaguguauggggauuaccgugucuuccacauuuugcagcaccaaccacgauuauacgaucuggaugccggagaaugcuagacuuggaacaucuugugacauuuucaccacauccaaaggcaagaaagccagcaaagggggaaagaucugcggcuuugucgaugaacgggggcuguacaagucccucaagggagcguguaaacugaagcugugcggcgugucuggccugcgccuccuggacgggaccugggugaccauucaaacaagcgaugagaucaaaugguguccucccgacaagcuggucaaccuccacgauuuccauuccgacgagaucgaacaccugguuguggaggaacuugugagaaaacgggaggaaugccuggacacgcucgagagcauuaugaccacaaagucugucuccuuucgcagacugagccaucuucggaagcuggugccuggauucggcaaagccuauaccaucuucaauaagacacucauggaggcugaugcccacuacaaaucuguuaacaccuggaaugaaauuauccccagcaaggggugccugacggugggaggccgcugucacccccaugucaacgggguguuuuucaauggaauuauccugggcccugacggccacguucucaucccggagaugcaguccucucugcuucagcagcauauggaacugcucgagagcuccgugauuccccugaugcacccucuugcugaucccagcacagucuuuaaagaaggggacgaggccgaggauuucguggaaguccaucugccugacgugcacaagcaaguuucuggaaucgaucucggccugcccaacugggggaaguaugugcugauuuccgcgggauuucucgucacccugcuucugaucauuuuccucaugaucugcuguagacgggccaaccgcagagugagcacccagcagucucugggcgaguccgggaaaaagauguuuguuaucccgcagaauggcaaagugauuagcuccugggaaucuuacaagaacggagcugagacaggccuguga

SEQ ID NO: 223752 - RNA, 1575 nt, Artificial Sequence
  derived and/or modified CDS sequence (opt5) from glycoprotein__RABV__KM594029.1
augauccaccaggcccugcuccuggugccccuuaugauuagcucccaaugccugggcaaguucccuaucuacaccauuccggacaaacucgggcccuggucuccuaucgauauucaucaccugagcugucccaacaaucuuaucgucgaggacgaaggaugcacaucccugucuggccucagcuauauggagcugaagguuggguacaucuccgcuauuaaagugaacggauuuacguguaccggcguggucacagaagccgagaccuauacaaauuucgugggguacguuaccacaaccuuuaagagaaaacauuuccggccuaugcccgaugcgugccgcgcugccuauaacuggaagaucgccggagacccuagauacgaagagucucugcagaauccguaucccgauagccacuggcuccggacggugaagaccacaaaagagucccugauuaucauuagcccuucugucgcugaccuugaucccuacgacaagucccugcgcagcagaguguuuccuggcggcaaaugucucgggaucaccauuucuuccacauacugcagcaccaaccaugauuauacgaucuggaugcccgaagaggcccggcugggaacaucuugugacaucuucaccaauuccaagggcaaacgcgcuagcaaagggggaaagauuugcggcuuuguugaugaaagagggcuuuacaagucccugaagggagccuguaaacucaagcugugcggcgugucuggccugcggcucauggacgggacaugggucagcauccagauuccggaugagaucaaaugguguccuuccgaccagcuggugaaccuucacgacuuccacagcgaugagauugaacaucugguggucgaggaacucguuaagaaacgcgaggaaugccuggacgcgcuugagucuaucaugaccaccaaguccgugagcuuuagacggcugucucaccuccgcaagcuggugcccggauucggcaaagccuauacaaucuuuaauaagacgcugauggaggcugaugcccauuacaacagcgucagaaccuggaaugaaauuaucccuuccaaagggugccucaaggugggaggccggugucacccccacguugacgggguguucuuuaacggaauuaucaugggccccgauggcucuguccugauuccugagaugcaaagcucccuucugcagcagcauauggaacuccuggagagcucugugaucccgcuuaugcacccccuggcugacccuuccacaguuuucaaagaugacgaugaagccgagaauuucguggagguccaucuccccgacauccacaaacaggugagcgggauugaucugggacugccugacuggggcaaguaucuccugaugucuaccggggcgcuugccgcucugauccucacaauuuuucugauccugugcugucgcaaggucaacagaaaggaauccauucaacggagccuugaggaauccggaagaaaagugcccguuaccccgcagaauggcaaggugaucucuagcugggagcucuacaaaaacgggggcgaaacgaagcuguga

SEQ ID NO: 223753 - RNA, 1575 nt, Artificial Sequence
  derived and/or modified CDS sequence (opt5) from glycoprotein__RABV__KM594030.1
augaucccccaggcccuccuguucgugcugcuucugauuagcuccucuugcuuuggcaaguucccugucuacaccaucccggacaaacucgggcccuggagcccuauugauauccaccaucuguccugucccaacaaucuuauuguugaggacgaaggaugcaacaaucugucuggcuuuagcuauauggagcucaaggugggguacaucuccgcuaucaaagugaacggauucacauguacgggcgucgugaccgaagccgagacauauaccaauuuuguuggguacgugacaaccacauucaagagaaaacacuuucggccuacccccgaugcgugccgcgcugccuauaacuggaagauggccggagacccuagauacgaagagucucugcauaauccguaucccgauuaccacuggcugcggacggucaagaccacaaaagagagccucauuaucauuuccccuagcguggcugaccuggaucccuacgacaagucucuucauucccgcguuuucccuagcggcaaaugucugggcaucaccauuucuuccacauauugcagcaccaaccacgauuacacgaucuggaugcccgaaaaggccagacucgggacaucuugugacauuuuuaccaauuccaaaggaaagaaggcuagcaaaggcgggaaggugugcggauucgucgaugagcggggccuguauaaaucccuuaagggggccuguaaacugaagcucugcggagugccgggccugcgccugauggacggcacaugggugucuguccaaaccccugaugaagcgaaauggugucccccugaccagcucguuaaccugcacgacuuucauagcgaugagaucgagcaccuugugguggaggaacuggucaagaagagagaagagugccucgacacccuggaauccaucaugacaacgaaaagcgugucuuuccggcgccuuucccaucugagaaagcucguucccggguuuggaaaagccuacaccauuuucaauaagacacugauggaggcugaugcccacuauaaaagcgugcacaccuggaacgaggucauccccucuaagggcugccugaagguugggggacggugucauccucacgugaauggcguguuccucaacgggauuauccugggaccggacggcaauguccuuauucccgaaaugcagagcucccugcuccagcaacauauggagcugcuugaaucuagcgugaucccucugaugcacccccucuccgauccuagcacagucuuuaaagacggcgaugaggcugaagacuucguggagguucaucugcccgaugugcacaagcaggucucugggguggacuuuggacugccgaacuggggccgcuacguucucauguccgccggggugcuggcgauccuuauucugaccaucuuccucaugauuugcuguagacgggucaaccgcaaagauagcucuagauccagcccuggagagcugggccggaagguguccgugacgccccagaaugggaaaguuaucucuagcugggaauccuauaagucugagggcgaaacaagacuguga

SEQ ID NO: 223754 - RNA, 1575 nt, Artificial Sequence
  derived and/or modified CDS sequence (opt5) from glycoprotein__RABV__KM594031.1
augaucccccaggcccuccuguucgugcugcuucugauuagcuccucuugcuuuggcaaguucccugucuacaccaucccggacaaacucgggcccuggagcccuauugauauccaccaucuguccugucccaacaaucuuauuguugaggacgaaggaugcaacaaucugucuggcuuuagcuauauggagcucaaggugggguacaucuccgcuaucaaagugaacggauucacauguacgggcgucgugaccgaagccgagacauauaccaauuuuguuggguacgugacaaccacauucaagagaaaacacuuucggccuacccccgaugcgugccgcgcugccuauaacuggaagauggccggagacccuagauacgaagagucucugcauaauccguaucccgauuaccacuggcugcggacggucaagaccacaaaagagagccucauuaucauuuccccuagcguggcugaccuggaucccuacgacaagucucuucauucccgcguuuucccuagcggcaaaugucugggcaucaccauuucuuccacauauugcagcaccaaccacgauuacacgaucuggaugcccgaaaaggccagacucgggacaucuugugacauuuuuaccaauuccaaaggaaagaaggcuagcaaaggcgggaaggugugcggauucgucgaugagcggggccuguauaaaucccuuaagggggccuguaaacugaagcucugcggagugccgggccugcgccugauggacggcacaugggugucuguccaaaccccugaugaagcgaaauggugucccccugaccagcucguuaaccugcacgacuuucauagcgaugagaucgagcaccuugugguggaggaacuggucaagaagagagaagagugccucgacacccuggaauccaucaugacaacgaaaagcgugucuuuccggcgccuuucccaucugagaaagcucguucccggguuuggaaaagccuacaccauuuucaauaagacacugauggaggcugaugcccacuauaaaagcgugcacaccuggaacgaggucauccccucuaagggcugccugaagguugggggacggugucauccucacgugaauggcguguuccucaacgggauuauccugggaccggacggcaauguccuuauucccgaaaugcagagcucccugcuccagcaacauauggagcugcuugaaucuagcgugaucccucugaugcacccccucuccgauccuagcacagucuuuaaagacggcgaugaggcugaagacuucguggagguucaucugcccgaugugcacaagcaggucucugggguggacuuuggacugccgaacuggggccgcuacguucucauguccgccggggugcuggcgauccuuauucugaccaucuuccucaugauuugcuguagacgggucaaccgcaaagauagcucuagauccagccugggagagcugggccggaagguguccgugacgccucagaaugggaaaguuaucucuagcugggaauccuauaagucugagggcgaaacaagacuuuga

SEQ ID NO: 223755 - RNA, 1575 nt, Artificial Sequence
  derived and/or modified CDS sequence (opt5) from glycoprotein__RABV__KM594032.1
augaucccccaggcccugcuguucgugcugcuucugauuagcucccucugcucuggcaaguuuccuaucuacaccauuccggacaaacuggggcccuggagcccuaucgauauucaccaucuuuccugucccaacaaucugaucgucgaggacgaaggaugcucuagccucuccggcuucucuuauauggagcugaagguuggguacaucagcgcuauuaaagugaacggauuuacauguacgggcguggucaccgaagccgagacauauaccaauuucgugggguacguuacaaccacauuuaagagaaaacacuuccggccuaugcccgaugcgugccgcgcugccuauaacuggaagauggccggagacccuagauacgaagagucccugcauaauccguaucccgauuaccacuggcuccggaccgugaagacgaccaaagagagccugaucauuaucucuccuuccgucgcugaccuugaucccuacgacaagagccugcauucucgcguguuuccuggcggcaaaugucucgggauuacaaucuccagcaccuauugcucuacaaaccacgauuacaccauuuggaugcccgaagaaccgagacugcggacguccugugacaucuucacaaauagcaagggaaaacgcgccuccaagggcgggaagaugugcggauuuguugaugaaagaggccuuuauaaaucucugaagggggcuuguaaacucaagcugugcggagugccuggccugcggcucauggacggcaccugggucagcgugcaaacacccgaugagaccaaaugguguuccccugaccagcuggugaaccuucacgacuuccauagcgaugagaucgaacaccuggucguugaggaacucgugaagaaacgcgaggaaugccuggacacccuugagucuauuaugacaacgaaguccgugagcuuuagacggcugucucaucuccgcaagcugguccccggguucggaaaagccuacaccaucuuuaauaagacacugauggaggcggaugcccacuauaaaagcauucagaccuggaacgaagugauccccuccaagggcugccucaaaguugggggaagaugucacccucaugugaauggcgucuuccugaacgggauuauccuuggaccggacggcaaugugcugauccccgagaugcagucuagccuccugcaacagcacauggaacuucuggaguccagcguuauuccucucaugcauccccugucugauccuuccacaguguucaaggacggcgaugaagcugaggacuuugucgaggugcaccuccccgauguccauaaacaggugagcgggguugacuucggacucccgaacuggggccgguacgugcugaugucugccggggcucuugccauccugaugcucaccauuuuucugaugaucugcugucgcaaggucaagagaacggauuccagccaguccucucuggaggagcuucggagaaaagugagcguuacaccucaaaauggaaaggugauuuccucuugggaaagcuauaaauccgagggcgaaacccgccucuga

SEQ ID NO: 223756 - RNA, 1575 nt, Artificial Sequence
  derived and/or modified CDS sequence (opt5) from glycoprotein__RABV__KM594033.1
augaucccccaggcccugcuccuggugccucuugucauuagcucccugugccucggcaaguucccgaucuacaccauucccgacaaacuggggccuuggucucccaucgauauucaccaucuuagcuguccuaacaaucugguuguggaggacgaaggaugcacaucccucucuggcuuuagcuauauggagcugaaggugggguacaucuccgcuaucaaagucaacggauucacguguaccggcgugguuacagaagccgagaccuauacaaauuuugugggguacgucaccacaaccuucaagagaaaacacuuucggcccaugucugaugcgugccgcgcugccuauaacuggaagguggccggagacccuagauacgaagagagccugcaaaauccguaucccgauuaccauuggcuccggacgguuaagaccacaaaagagucccugauuaucauuagcccuucuguggcugaccuugaucccuacgacaagucccugcgcagcagaaucuucccuggcggcaaaugucucgggauuaccgucucuuccacauauugcagcaccaaccacgauuacacgaucuggaugcccgaagaggcccggcugggaacauauugugacauuuuuaccaauucuaagggcaaacgcgcuuccaaagggggaaagaucugcggcuucguggaugaaagagggcuuuacaagagccugaagggagccugucggcucaaacugugcggcguguccggccugcgccucauggacgggacaugggucgcgauccagaccucugaggagaccaagugguguccgagcgaucagcugguuaaccuucaugacuuucacuccgacgaaauugagcaccuggugguggaggaacucgucaaaaagagagaagagugccuggauacacuugagagcaucaugacgaccaaaucuguguccuuccggcgccugagccaucucagaaagcugguuccuggauuuggcaaggccuauacaauuuucaauaaaacccugauggaagcugacgcccacuacaacucugugcggacauggaaugagaucauucccagcaaggggugccucaaagucggaggccgcugucauccucacguggaugggguguuuuucaacggaaucauccugggccccgacggcaauguucuuauucccgaaaugcaguccucucugcuccaacagcacauggagcugcuugaaagcuccgucaucccucugaugcauccgcucgcugaucccagcaccguguucaaggagggggacgaggccgaaaacuuugucgaggugcaucugccugauauucacaaacagguuucuggaaucgaccugggccuccccaauugggggaaguaucugcuuauguccgcgggagcccuggcugcccucauucugacgaucuuccugaucacaugcuguagacgggugaacagaaccgaaagcauuaagcgcggcccugaggaaucucggagaaaagucuccgugacaccccagaacgggaagguuaucagcuccugggagcuuuacaaaaauggcggagagaccaagcucuga

SEQ ID NO: 223757 - RNA, 1575 nt, Artificial Sequence
  derived and/or modified CDS sequence (opt5) from glycoprotein__RABV__KM594034.1
augaucccccaggcccugcuccuggugccucuugucauuagcucccugugccucggcaaguucccgaucuacaccauucccgacaaacuggggccuuggucucccaucgauauucaccaucuuagcuguccuaacaaucugguuguggaggacgaaggaugcacaucccucucuggcuuuagcuauauggagcugaaggugggguacaucuccgcuaucaaagucaacggauucacguguaccggcgugguuacagaagccgagaccuauacaaauuuugugggguacgucaccacaaccuucaagagaaaacacuuucggcccaugucuggagcgugccgcgcugccuauaacuggaagguggccggcgauccuagauacgaagagagccugcaaaauccguaucccgacuaccauuggcuccggacgguuaagaccacaaaagagucccugauuaucauuagcccuucuguggcugaucuugaccccuacgauaagucccugcgcagcagaaucuucccuggcgggaaaugucucggaauuaccgucucuuccacauauugcagcaccaaccacgacuacacgaucuggaugcccgaagaggcccggcugggcacaucuugugauauuuuuaccaauuccaaggggaaacgcgcuagcaagggaggcaagaucugcggguucguggacgaaagaggacuuuauaaaucccugaagggcgccugucggcucaaacugugcggcgugucugggcugcgccucauggauggaacaugggucgcgauccagaccagcgaggagaccaagugguguccguccgaccagcugguuaaccuucaugauuuucacagcgacgaaauugagcaccuggugguggaggaacucgucaaaaagagagaagagugccuggacacacuugagucuaucaugacgaccaaauccgugagcuuccggcgccugucucaucucagaaagcugguuccuggcuuugggaaggccuacacaauuuucaauaaaacccugauggaagcugaugcccacuauaacagcgugcggacauggaaugagaucauucccuccaagggaugccuccgcgucggcgggagaugucauccucacguggacggaguguuuuucaacggcaucauccugggccccgaugggaauguucuuauucccgaaaugcagucuagccugcuccaacagcacauggagcugcuugaauccagcgucaucccucugaugcauccgcucgcugaccccucuaccguguucaaagagggagaugaggccgaaaacuuugucgaggugcaucugccugacauucacaagcagguuuccggcaucgaucuggggcuccccaauuggggaaaauaccugcuuaugagcgcgggcgcccuggcugcccucauucugacgaucuuccugaucacaugcugucggagagugaaccgcaccgaaucuauuaagcaggggccugaggaaucccggagaaaggucagcgugacaccccaaaacggcaaaguuaucuccucuugggagcuuuauaagaauggaggcgagaccaaacucuga

SEQ ID NO: 223758 - RNA, 1575 nt, Artificial Sequence
  derived and/or modified CDS sequence (opt5) from glycoprotein__RABV__KM594035.1
augaucccccaggcccugcuccuggugccucuugucauuagcucccugugccucggcaaguucccgaucuacaccauucccgacaaacuggggccuuggucucccaucgauauucaccaucuuagcuguccuaacaaucugguuguggaggacgaaggaugcacaucccucucuggcuuuagcuauauggagcugaaggugggguacaucuccgcuaucaaagucaacggauucacguguaccggcgugguuacagaagccgagaccuauacaaauuuugugggguacgucaccacaaccuucaagagaaaacacuuucggcccaugucugaugcgugccgcgcugccuauaacuggaagguggccggagacccuagauacgaagagagccugcaaaauccguaucccgauuaccauuggcuccggacgguuaagaccacaaaagagucccugauuaucauuagcccuucuguggcugaccuugaucccuacgacaagucccugcgcagcagaaucuucccuggcggcaaaugucucgggauuaccgucucuuccacauauugcagcaccaaccacgauuacacgaucuggaugcccgaagaggcccggcugggaacaucuugugacauuuuuaccaauuccaagggcaaacgcgcuagcaaagggggaaagaucugcggcuucguggaugaaagagggcuuuauaagucccugaagggagccugucggcucaaacugugcggcgugucuggccugcgccucauggacgggacaugggucgcgauccagaccagcgaggagaccaagugguguccguccgaucagcugguuaaccuucaugacuuucacagcgacgaaauugagcaccuggugguggaggaacucgucaaaaagagagaagagugccuggauacacuugagucuaucaugacgaccaaauccgugagcuuccggcgccugucucaucucagaaagcugguuccuggauuuggcaaggccuacacaauuuucaauaaaacccugauggaagcugacgcccacuauaacagcgugcggacauggaaugagaucauucccuccaaggggugccucaaagucggaggccgcugucauccucacguggaugggguguuuuucaacggaaucauccugggccccgacggcaauguucuuauucccgaaaugcagucuagccugcuccaacagcacauggagcugcuugaauccagcgucaucccucugaugcauccgcucgcugaucccucuaccguguucaaggagggggacgaggccgaaaacuuugucgaggugcaucugccugauauucacaaacagguuuccggaaucgaccugggccuccccaauugggggaaguaccugcuuaugagcgcgggagcccuggcugcccucauucugacgaucuuccugaucacaugcuguagacgggugaacagaaccgaaucuauuaagcgcggcccugaggaaucccggagaaaagucagcgugacaccccagaacgggaagguuaucuccucuugggagcuuuauaaaaauggcggagagaccaagcucuga

SEQ ID NO: 223759 - RNA, 1575 nt, Artificial Sequence
  derived and/or modified CDS sequence (opt5) from glycoprotein__RABV__KM594036.1
augaucccccaggcccugcuccuggugccucuugucauuagcucccugugccucggcaaguucccgaucuacaccauucccgacaaacuggggccuuggucucccaucgauauucaccaucuuagcuguccuaacaaucugguuguggaggacgaaggaugcacaucccucucuggcuuuagcuauauggagcugaaggugggguacaucuccgcuaucaaagucaacggauucacguguaccggcgugguuacagaagccgagaccuauacaaauuuugugggguacgucaccacaaccuucaagagaaaacacuuucggcccaugucugaugcgugccgcgcugccuauaacuggaagguggccggagacccuagauacgaagagagccugcaaaauccguaucccgauuaccauuggcuccggacgguuaagaccacaaaagagucccugauuaucauuagcccuucuguggcugaccuugaucccuacgacaagucccugcgcagcagaaucuucccuggcggcaaaugucucgggauuaccgucucuuccacauauugcagcaccaaccacgauuacacgaucuggaugcccgaagaggcccggcugggaacaucuugugacauuuuuaccaauuccaagggcaaacgcgcuagcaaagggggaaagaucugcggcuucguggaugaaagagggcuuuauaagucccugaagggagccugucggcucaaacugugcggcgugucuggccugcgccucauggacgggacaugggucgcgauccagaccagcgaggagaccaagugguguccguccgaucagcugguuaaccuucaugacuuucacagcgacgaaauugagcaccuggugguggaggaacucgucaaaaagagagaagagugccuggauacacuugagucuaucaugacgaccaaauccgugagcuuccggcgccugucucaucucagaaagcugguuccuggauuuggcaaggccuacacaauuuucaauaaaacccugauggaagcugacgcccacuauaacagcgugcggacauggaaugagaucauucccuccaaggggugccucaaagucggaggccgcugucauccucacguggaugggguguuuuucaacggaaucauccugggccccgacggcaauguucuuauucccgaaaugcagucuagccugcuccaacagcacauggagcugcuugaauccagcgucaucccucugaugcauccgcucgcugaucccucuaccguguucaaggagggggacgaggccgaaaacuuugucgaggugcaucugccugauauucacaaacagguuuccggaaucgaccugggccuccccaauugggggaaguaccugcuuaugagcgcgggagcccuggcugcccucauucugacgaucuuccugaucacaugcuguagacgggugaacagaaccgaaucuauuaagcagggcccugaggaaucccgccggaaagucagcgugacaccccaaaacgggaagguuaucuccucuugggagcuuuauaaaaauggcggagagaccaagcucuga

SEQ ID NO: 223760 - RNA, 1575 nt, Artificial Sequence
  derived and/or modified CDS sequence (opt5) from glycoprotein__RABV__KM594037.1
augauccugcaggcccuccuguucgugccccuucugauuagcucccucugcuuuggcaaguucccuaucuacaccauuccggacaaacuggggcccuggucuccuaucgauauucaccaucuuagcugucccaacaaucuggucguugaggacgaaggaugcacaucccucucuggcuuuagcuauauggagcugaaggugggguacaucuccgcuaucaaagugaacggauucacguguaccggcgucgugacagaagccgagaccuauacaaauuuuguuggguacgugaccacaaccuucaagagaaaacacuuucggccuacgcccgaugcgugccgcgcugccuauaacuggaaggucgccggagacccuagauacgaagagucucugcaaaauccguaucccgauuaccauuggcuccggaccgugaagacaaccaaagagagccugauuaucauuuccccuagcguugcugaccuugaucccuacgacaagucucugcacucccgcguguucccuagcggcaaaugucucggcaucacaauuucuuccaccuauugcagcacgaaccaugauuacacaaucuggaugcccgaagaggccagacuggggaccucuugugacauuuuuacauccagcaaggggaaaaaggcuuccaagggcgggaaaaccugcggauucgucgaugaacggggccuuuauaagucucugaaaggggccuguaagcucaaacugugcggagugccgggccugcgccucauggacggcaccugggugacaauccagacgagcgaugagaccaagugguguccucccgaccagcuggucaaucuucacgacuuucacuccgaugagaucgaacaucugguuguggaggaacucgugaaaaagagagaggaaugccuggacgcgcuugagagcauuaugacaaccaagucugucuccuuccggcgccugagccaccucagaaaacuggugccuggguuuggaaaggccuacacaaucuucaacaaaacccugauggaggcugaugcccauuauaagucuguucggacguggaaugaaauuauccccagcaaaggcugccucaaggugggaggacgcugucacccccacgucgacggcguguucuuuaacgggauuauccugggaccugauggcaauguucuuaucccggagaugcaguccucucugcuccaacagcauauggaacugcuugagagcuccgugauuccccugaugcacccucucgcugaccccagcacagucuucaaggauggcgacgaagccgaggauuuuguggagguccaucugccugacgugcacaaacagaucucugggguugaucugggacuccccuccuggggcaaguaccugcuuaugauugcgggggcccuggcuggacucauccugauuaucuuccugauggccugcuguagacgggcuaaacgcaccgaaagcagacggagaggcucuggggaguccgaacgcaaggugccggucccuccccagaacggcaaagugaucagcuccugggagcuuuauaagucugaaggagagaccggccucuga

SEQ ID NO: 223761 - RNA, 1575 nt, Artificial Sequence
  derived and/or modified CDS sequence (opt5) from glycoprotein__RABV__KM594038.1
augauccugcaggcccuccuguucgugccccuucugauuagcucccucugcuuuggcaaguucccuaucuacaccauuccggacaaacuggggcccuggucuccuaucgauauucaccaucuuagcugucccaacaaucuggucguugaggacgaaggaugcacaucccucucuggcuuuagcuauauggagcugaaggugggguacaucuccgcuaucaaagugaacggauucacguguaccggcgucgugacagaagccgagaccuauacaaauuuuguuggguacgugaccacaaccuucaagagaaaacacuuucggccuacgcccgaugcgugccgcgcugccuauaacuggaaggucgccggagacccuagauacgaagagucucugcaaaauccguaucccgauuaccauuggcuccggaccgugaagacaaccaaagagagccugauuaucauuuccccuagcguugcugaccuugaucccuacgacaagucucugcacucccgcguguucccuagcggcaaaugucucggcaucacaauuucuuccaccuauugcagcacgaaccaugauuacacaaucuggaugcccgaagaggccagacuggggaccucuugugacauuuuuacauccagcaaggggaaaaaggcuuccaagggcgggcggaccugcggauucgucgaugaacgcggccuuuauaaaucucugaagggggccuguaaacucaagcugugcggagugccgggccugagacucauggacggcaccugggugacaauccagacgagcgaugagaccaaaugguguccucccgaccagcuggucaaucuucacgacuuucacuccgaugagaucgaacaucugguuguggaggaacucgugaagaaacgggaggaaugccuggacgcgcuugagagcauuaugacaaccaagucugucuccuuccgcagacugagccaccuccggaagcuggugccuggguuuggaaaagccuacacaaucuucaacaagacccugauggaggcugaugcccauuauaaaucuguucgcacguggaaugaaauuauccccagcaagggcugccucaaagugggaggaagaugucacccccacgucgacggcguguucuuuaacgggauuauccugggaccugauggcaauguucuuaucccggagaugcaguccucucugcuccaacagcauauggaacugcuugagagcuccgugauuccccugaugcacccucucgcugaccccagcacagucuucaaggauggcgacgaagccgaggauuuuguggagguccaucugccugacgugcacaagcagaucucugggguugaucugggacuccccuccuggggcaaauaccugcuuaugauugcgggggcccuggcuggacucauccugauuaucuuccugauggccugcugucggcgcgcuaagagaaccgaaagccggagacgcggcucuggggaguccgaacggaaagugccggucccuccccagaacggcaaggugaucagcuccugggagcuuuauaaaucugaaggagagaccggccucuga

SEQ ID NO: 223762 - RNA, 1575 nt, Artificial Sequence; identical to SEQ ID NO: 222597
  derived and/or modified CDS sequence (opt5) from glycoprotein__RABV__KM594039.1

SEQ ID NO: 223763 - RNA, 1575 nt, Artificial Sequence; identical to SEQ ID NO: 222613
  derived and/or modified CDS sequence (opt5) from glycoprotein__RABV__KM594040.1

SEQ ID NO: 223764 - RNA, 1575 nt, Artificial Sequence
  derived and/or modified CDS sequence (opt5) from glycoprotein__RABV__KM594041.1
augauccugcaggcccuccuguucgugccccuucugauuagcucccucugccugggcaaguuuccuaucuacaccauuccggacaaacuugggcccuggucuccuaucgauauucaccaucugagcugucccaacaaucucgucguugaggacgaaggaugcacaaaccuguccggcuucucuuauauggagcugaaggugggguacaucagcgcuaucaaagugaauggauuuacguguaccggcgucgugacagaagccgagaccuauacaaacuucguuggguacgugaccacaaccuuuaagagaaaacacuuccggccuauucccgaugcgugccgcgcugccuauaauuggaagauggccggagacccuagauacgaagagucccuccaaaacccguaucccgauuaccauuggcugcggacggucaagaccacaaaagagucucuuaucauuaucagcccuuccguggcugaccuggaucccuacgacaagagccuccacucucgcguuuuuccuggcggcaaaugucuggggauuaccguguccagcacauauugcucuaccaaucaugauuacacgaucuggaugcccgaagaaccgagacuuggaacauccugugacauuuucaccagcucuaagggcaaaaaggccuccaaagggggaaagacaugcggcuuugucgaugaacgggggcuguauaagagccucaaaggagcuuguaagcugaaacugugcggcgugcucggccugcgccuuauggacgggaccuggguguccauccagaccucugaugacacaaagugguguccucccgaccagcuggucaaccuccacgauuuccacagcgacgagaucgagcaucugguuguggaggagcuugugaaaaagagagaagagugccuggaugcccucgaauccauuaugacgaccaagagcgucucuuuucggcgccuguccuaccugagaaaacucgugccuggauucggcaaggcguauacaaucuuuaauaaaacccugauggaggccgacgcucacuacaagagcguucggacauggaacgagauuauccccucuaaagggugccuuaaggugcgcgaaagaugucaucccccugucgauggaguguucuucaauggcauuauccuggggccggacggaaacguucucauccccgagaugcagagcucccugcuucaacagcacauggaacugcucgagucuagcgugauuccucugaugcacccccuggccgauccuuccaccgucuuuaaggaaggcgacgaggcugaggauuucguggaaguccaucuccccgacgugcacaaacagaucagcggcguugaucuggggcuuccgucuuggggaaaguaucugcucaugauugccggcgggcuggcgacgcuggugcuuaucauuugcuccauggccuguugccggcgcacaaaaagaaccgagagccggagacgcggaucucgggaauccgagaagaaagucaccgcugccccucagacaagaaaggugguuagcuccugggaacucuacaagucugagggcgacgcucgccuguga

SEQ ID NO: 223765 - RNA, 1575 nt, Artificial Sequence; identical to SEQ ID NO: 222613
  derived and/or modified CDS sequence (opt5) from glycoprotein__RABV__KM594042.1

SEQ ID NO: 223766 - RNA, 1575 nt, Artificial Sequence
  derived and/or modified CDS sequence (opt5) from glycoprotein__RABV__KM594043.1
augauccugcaggcccuccuguucgugccccuucugauuagcucccucugccugggcaaguuuccuaucuacaccauuccggacaaacuugggcccuggucuccuaucgauauucaccaucugagcugucccaacaaucucgucguugaggacgaaggaugcacaaaccuguccggcuucucuuauauggagcugaaggugggguacaucagcgcuaucaaagugaauggauuuacguguaccggcgucgugacagaagccgagaccuauacaaacuucguuggguacgugaccacaaccuuuaagagaaaacacuuccggccuauucccgaugcgugccgcgcugccuauaauuggaagauggccggagacccuagauacgaagagucccuccaaaacccguaucccgauuaccauuggcugcggacggucaagaccacaaaagagucucuuaucauuaucagcccuuccguggcugaccuggaucccuacgacaagagccuccacucucgcguuuuuccuggcggcaaaugucuggggaccacaguguccagcaccuauugcucuacgaaucaugauuacacaauuuggaugcccgaagaaccgagacuuggaaccuccugugacaucuucacaagcucuaagggcaaaaaggccuccaaagggggaaagaccugcggcuuugucgaugaacgggggcuguauaagagccucaaaggagcuuguaagcugaaacugugcggcgugcucggccugcgccuuauggacgggaccuggguguccauucagacaucugaugacacgaagugguguccucccgaccagcuggucaaccuccacgauuuccacagcgacgagaucgagcaucugguuguggaggagcuugugaaaaagagagaagagugccuggaugcccucgaauccaucaugaccacaaagagcgucucuuuucggcgccuguccuaccugagaaaacucgugccuggauucggcaaggcguauaccauuuuuaauaaaacacugauggaggccgacgcucacuacaagagcguucggaccuggaacgagaucauucccucuaaagggugccuuaaggugcgcgaaagaugucaucccccugucgauggaguguucuucaauggcaucauucuggggccggacggaaacguucucauccccgagaugcagagcucccugcuucaacagcacauggaacugcucgagucuagcgugaucccucugaugcacccccuggccgauccuuccacggucuuuaaggaaggcgacgaggcugaggauuucguggaaguccaucuccccgacgugcacaaacagauuagcggcguugaucuggggcuuccgucuuggggacgguaucugcucaugaucgccggcgggcuggcgacacuggugcuuauuaucugcuccauggccuguugccgcagaaccaagcggaccgagagcagacgccgggacucuagagaauccgagaaaaaggucacagugaccccucagacacgcaaaguugugagcuccugggaacucuacaagucugagggagacgcuagccuguga

SEQ ID NO: 223767 - RNA, 1575 nt, Artificial Sequence
  derived and/or modified CDS sequence (opt5) from glycoprotein__RABV__KP723638.1
auggugcugcagacccuccuguucguccccuuucuuguuuucagccugugcuuuggcaaguucccuaucuacacaauuccggacaaacucgggcccugguccccuaucgauauucaccaucugucuugucccaacaaucuugugguggaggacgaaggaugcacgaaccugagcggcuuuuccuauauggagcucaaggucggguacaucucugccauuaaagugaauggauucaccuguacaggcguugugaccgaagcugagacauauaccaacuuugucggguacgugacaaccacguucaagagaaaacacuuucggccuacccccgaugccugccgcgcggcuuauaauuggaagauggccggagacccuagauacgaagagagccugcauaacccguaucccgauuaccacuggcugcggacaguuaagaccacaaaagagucccucgugaucaucucuccuagcgucgccgaccuggaucccuacgacaagucccuucauagccgcguguucccuucuggcaaauguuccggcauuaccgugagcucuacguauugcuccacaaaucacgauuacaccaucuggaugcccgaaaacccgagacuggggacaagcugugacauuuuugcuaauucucggggaaagcgcgccuccaaaggcagcaagaccugcggguucgucgaugagagaggacucuauaagucccugaaaggcgcuuguaagcugaaacugugcgggguucucggacugcggcugauggacggcaccuggguggccaugcaaacaucugaagagacgaagugguguccucccgaucagcucgugaaccugcacgacuuucgcagcgacgagaucgaacaucuugucguggaggaacugguuaaaaagagagaggaaugccucgaugcgcuggaguccauuaugaccacaaaaagcgugucuuuccggcgccuuucccaccugagaaagcucgucccuggcuucgggaaggccuacaccaucuuuaauaaaacacugauggaggcugacgcccauuauaagagcgugcggaccuggaacgaaauuauccccucuaaaggaugccugcgcguuggcgggagaugucacccccacgugaauggagucuucuuuaacggcaucauucucgggccugauggacaugugcugaucccggagaugcagagcucccuucugcagcaacacauggaacuccuggagucuagcgucauuccccuuaugcauccucuggcugaccccuccacgguguucaaggauggcgacgaagccgaggauuuuguugaggugcaccucccugacguccauaaacaggugagcggcguugaucuggggcugcccaauuggggaaaguacgugcuccugucugcgggcacacuuaucguccugaugcucauuaucuuccugaugaccugcugucggagagugaaccgcccgaagccuacccagcggucccuugggggaacaggcagaaaagugagcguuaccucucaguccgggaaggucaucagcuccugggaaucuuauaaaagcggcuccgagacacgccuuuga

SEQ ID NO: 223768 - RNA, 1575 nt, Artificial Sequence
  derived and/or modified CDS sequence (opt5) from glycoprotein__RABV__KR105372.1
auggugccccagguccuucucuucguuccucugcuuggcuuuagccugugcuucgggaaguuuccgaucuacaccauucccgacgagcucggaccuuggucccccaucgauauucaccaucugucuuguccuaacaaucuugugguggaagacgagggcugcacaaaccugagcgaguucuccuauauggagcucaaagucggguacaucucugccauuaaggugaauggauuuacguguaccggcguugugacagaagcugagaccuauacaaacuucgucggguacgugaccacaaccuuuaaaagaaagcacuuccggcccacgccugaugccugccgcgcggcuuauaauuggaaaauggccggagacccgagauacgaggaaagccugcauaaccccuauccugauuaccacuggcugcggaccguucgcacaaccaaggagucccucaucaucauuucucccagcgugacagaccuggauccuuacgacaagucccuucauagcagagucuuucccggcggcaaauguucugggaucaccguguccagcacguauugcucuacaaaucacgauuacaccauuuggaugccggaagacccucggccccgcacaccuugugauaucuucaccaacuccagaggaaagcgggccagcaaaggcaauaagaccugcggguuuguggacgagcgcggacuguauaaaucucucaagggcgcuuguagacugaagcugugcgggguccugggacuccggcugauggauggcacauggguugccaugcaaacguccgacgagaccaaaugguguccucccgaccagcuggugaaccuccacgauuuccauagcgacgaaauugagcaccugguggucgaagaacuugugaagaaacgcgaagagugccuggaugcucucgaguccaucaugacaaccaagucuguuagcuuuagacggcugucccaucuucgcaaacuggugcccggcuucgggaaggccuacacaauuuucaauaaaacccucauggaagcggacgcccacuauaagagcgucagaacguggaacgagaucaucccgucuaagggaugccugaaagugggcgggcggugucacccccauguuaauggaguguuuuucaacggcauuauccuggggccugauggacacguccucauucccgaaaugcaguccagccugcuucagcaacauauggagcugcucaagucuagcgugaucccucugaugcacccccuugcugacccguccacagucuuuaaagaaggcgaugaggccgaggacuucguggaaguucaucugccugauguguacaagagaauuucuggcgucgaccucgggcugcccaauuggggaaaauaugugcugaugaccgcuggcgccaugaucgggcucguucugaucuuuagccuuaugaccuggugccgccgggcgaacagaccugaguccaagcagcgcagcuucggaggcacagggcggaacgugucugucaccucccagagcggcaaggugauucccucuugggaauccuacaaaagcggaggcgagacaagacuguga

SEQ ID NO: 223769 - RNA, 1575 nt, Artificial Sequence
  derived and/or modified CDS sequence (opt5) from glycoprotein__RABV__KR906734.1
auggugccccaggcccugcuguucgucccucugcuuguuuuuccgcugugcuucggcaaguuucccaucuacaccauuccugacaaacucgggcccuggagcccuaucgauauucaccaucuguccugucccaacaaucuugugguggaggacgaaggaugcacaaaccugucuggcuucagcuauauggagcucaaggucggguacaucuccgcuauuaaagugaauggauuuacguguaccggcguugugacagaagccgagaccuauacaaacuucgucggguacgugaccacaaccuuuaagagaaaacacuuccggccuaucccggaugcgugccgcgcugccuauaauuggaagauggccggagaccccagauacgaagagucucugcauaacccuuaucccgauuaccacuggcugcggacgguuaagaccacaaaagagagccucgugaucauuuccccuucugucgcugaccuggaucccuacgacaagagccuucauucccgcguguuuccgagcggcaaauguucuggcaucaccguguccagcacauauugcucuaccaaucacgauuacacgauuuggaugccugaaaaccccagacuggggacauccugugacaucuucaccaauagccggggaaagcgcgccucuaaaggcgggaagacaugcggauuugucgaugagagaggccucuauaagucccugcgcggggcuuguaaacuuaagcugugcggaguucucggccugcggcugauggacggcaccuggguggccaugcaaaccagcgaugaaacaaaaugguguccucccgaccagcucgugaacaugcacgacuucagauccgaugagauugagcaucuggucguggaggaacuuguuaagaaacgggaagagugccuggacgcgcucgaaucuaucaugacgaccaagagcguguccuuucgcagacugagccaccuucggaaacugguccccggguucggaaaggccuacacaauuuucaauaagacccucauggaggcugaugcccauuauaaaucugugcgcacauggaacgagaucaucccuuccaagggcugccugagaguugggggacggugucacccgcacgugaauggcgucuuuuucaacgggauuauccugggacccgacggccaugugcucauuccugaaaugcagagcucucugcuucagcaacacauggagcugcucgaaagcuccgucaucccccugaugcauccucuugcugaucccucuaccguguuuaaagagggcgacgaagccgaggauuucguugaggugcaccucccggacguccauaaacaggugagcgggguugaucucggacugccuaauuggggcaaguacgugcugcucuccgcggggacgcugauugcccuuaugcugaucaucuuucucaugacaugcuguagacgcgucaaccggcccgaaccuacccagagaagccugggaggcaccgggcgcaaggugucugugacaucccagagcggcaagguuauuucuuccugggagagcuauaaauccggaggcgaaacccggcuguga

SEQ ID NO: 223770 - RNA, 1575 nt, Artificial Sequence
  derived and/or modified CDS sequence (opt5) from glycoprotein__RABV__KR906735.1
auggugccccagacccuucucuucgucccucugcuuguuuuuagccugugcuucggcaaguuuccgaucuacacaauucccgacaaacucgggccuuggucccccaucgauauucaccaucugucuuguccuaacaaucuugugguggaggacgaaggaugcacgaaccugagcggcuucuccuauauggagcucaaggucggguacaucucugccauuaaagugaauggauuuaccuguacaggcguugugaccgaagcugagacauauaccaacuucgucggguacgugacaaccacguuuaagagaaaacacuuccggcccaucccugaugccugccgcgcggcuuauaauuggaagauggccggagacccgagauacgaagagagccugcauaaccccuauccugauuaccacuggcugcggaccguuaagacaaccaaagagucccucgugaucauuucucccagcgucgccgaccuggauccuuacgacaagucccuucauagccgcguguuucccucuggcaaauguuccggcaucacagugagcucuaccuauugcuccacgaaucacgauuacacaauuuggaugccggaaaacccuagacuggggaccagcuguaauaucuucacaaacucucggggaaagcgcgcuuccaaaggcgggaagaccugcggauuugucgacgagagaggccucuauaagagccugaaaggggccuguaagcugaaacugugcggaguucucggccugcggcugauggauggcaccuggguggcuaugcaaacauccgacgaaacgaaguggugucccccugaucagcucgugaauaugcacgacuuccgcucugacgagauugagcaucuggucguggaggaacuuguuaaaaagagagaagagugccuggaugcccucgaaagcaucaugaccacaaaauccgugagcuuucggcgccugucucaccuuagaaagcugguccccggguucggaaaggcguacaccauuuucaacaaaacacucauggaggccgacgcucauuauaaguccgugcggaccuggaaugagaucauccccagcaaaggcugccugcgcguugggggaagaugucacccucacgugaacggcgucuuuuucaaugggauuauccugggaccggauggccaugugcucauucccgaaaugcagucuagccugcuucagcaacacauggagcugcucgaauccucugucaucccucugaugcauccccuugccgacccuagcacgguguuuaaggauggcgacgaggcugaagauuucguugaggugcaucugcccgacguccacaaacagguguccgggguugaucucggacugccgaacuggggcaaguacgugcugcucagcgccgggacacugauugcgcuuaugcugaucaucuuucucaugaccugcugucggagagucaaccgcccugagucuacccagcggucccugggaggcacaagacgcaaggugagcgugaccucucaguccgggaaaguuauuagcuccugggaaucuuauaagagcggcggagagacacggcuguga

SEQ ID NO: 223771 - RNA, 1575 nt, Artificial Sequence; identical to SEQ ID NO: 223770
  derived and/or modified CDS sequence (opt5) from glycoprotein__RABV__KR906736.1

SEQ ID NO: 223772 - RNA, 1575 nt, Artificial Sequence
  derived and/or modified CDS sequence (opt5) from glycoprotein__RABV__KR906737.1
auggugccccaggcccugcuguucgucccucugcuuguuuuuccgcugugcuucggcaaguuucccaucuacaccauuccugacaaacucgggcccuggagcccuaucgauauucaccaucuguccugucccaacaaucuugugguggaggacgaaggaugcacaaaccugucuggcuucagcuauauggagcucaaggucggguacaucuccgcuauuaaagugaauggauuuacguguaccggcguugugacagaagccgagaccuauacaaacuucgucggguacgugaccacaaccuuuaagagaaaacacuuccggccuaucccggaugcgugccgcgcugccuauaauuggaagauggccggagaccccagauacgaagagucucugcauaacccuuaucccgauuaccacuggcugcggacgguuaagaccacaaaagagagccucgugaucauuuccccuucugucgcugaccuggaucccuacgacaagagccuucauucccgcguguuuaccagcggcaaauguucuggcaucacaguguccagcaccuauugcucuacgaaucacgauuacacaauuuggaugccggaaaacccuagacuggggaccuccuguaauaucuucgucaacagcaagggaaaacgggccucuaagggcgggaagacaugcggauuuguugacgagcgcggccucuauaaaucccugaagggggcuuguaaacuuaagcugugcggagugcucggccugagacugauggauggcaccuggguggccaugcaaaccagcgacgaaacaaaaugguguucccccgaucagcucgucaauaugcacgacuuccggucugacgagauugagcaucuggugguugaggaacuugugaagaaacgcgaagagugccuggaugcgcucgaaagcaucaugacgaccaaguccgucagcuuuagacggcugucucaccuucgcaagcuggugccuggguucggaaaagccuacacaauuuucaacaagacccucauggaggcugacgcccauuauaaauccguuagaacauggaaugagaucauccccagcaagggcugccugcgggucgggggacgcugucacccccacgugaacggcguguuuuucaaugggauuauccugggaccugauggccauguccucauuccggaaaugcagucuagccugcuucagcaacacauggagcugcucgaauccucugugaucccccugaugcauccucuugcugaccccagcaccguuuuuaaagauggcgacgaggccgaagauuucguggagguccaccucccugacgugcauaagcagguuuccgggguggaucucggacugcccaacuggggcaaguacguccugcucagcgcggggacgcugauugcccuuaugcugaucaucuuucucaugacaugcuguagacgggugaacagaccggagucuacccagcgcucccugggaggcaccgggcggaaagugagcguuacaucucaguccggcaaggucauuagcuccugggaaucuuauaaaagcggaggcgagaccagacuguga

SEQ ID NO: 223773 - RNA, 1575 nt, Artificial Sequence; identical to SEQ ID NO: 223772
  derived and/or modified CDS sequence (opt5) from glycoprotein__RABV__KR906738.1

SEQ ID NO: 223774 - RNA, 1575 nt, Artificial Sequence
  derived and/or modified CDS sequence (opt5) from glycoprotein__RABV__KR906739.1
auggugccccaggcccuucucuucgucccucugcuuguuuuuccgcugugcuucggcaaguuucccaucuacaccauuccugacaaacucgggcccuggagcccuaucgauauucaccaucuguccugucccaacaaucuugugguggaggacgaaggaugcacaaaccugucuggcuucagcuauauggagcucaaggucggguacaucuccgcuauuaaagugaauggauuuacguguaccggcguugugacagaagccgagaccuauacaaacuucgucggguacgugaccacaaccuuuaagagaaaacacuuccggccuaucccggaugcgugccgcgcugccuauaauuggaagauggccggagaccccagauacgaagagucucugcauaacccuuaucccgauuaccacuggcugcggacgguuaagaccacaaaagagagccucgugaucauuuccccuucugucgcugaccuggaucccuacgacaagacccuucauagccgcguguuuccguccggcaaauguagcggcaucacagugucuuccaccuauugcagcacgaaucacgauuacacaauuuggaugccugaaaaccccagacuggggaccucuugugacaucuucacaaauucccggggaaagcgcgccagcaaaggcgggaagaccugcggauuugucgaugagagaggccucuauaagucucugaaaggggcuuguaagcugaaacugugcggaguucucggccugcggcugauggacggcaccuggguggccaugcaaacauccgaugaaacgaagugguguccucccgaccgccucgugaacaugcacgacuucagaagcgaugagauugagcaucuggucguggaggaacuuguuaaaaagcgggaagagugccuggacgcgcucgaauccaucaugaccacaaaaucugugagcuuucgcagacugucccaccuucggaagcugguccccggguucggaaaggccuacaccauuuucaauaaaacacucauggaggcugaugcccauuauaagagcgugcgcaccuggaacgagaucaucccuucuaaaggcugccugagaguugggggacggugucacccgcacgugaauggcgucuuuuucaacgggauuauccugggacccgacggccaugugcucauuccugaaaugcaguccagccugcuucagcagcacauggagcugcucgaaucuagcgucaucccccugaugcauccucuugcugaucccuccacgguguuuaaggacggcgaugaggccgaagacuucguugaggugcaucugccggauguccacaaacaagugucugggguugaccucggacugccuaauuggggcaaguacgugcugcucagcgcggggacacugauugcccuuaugcugaucaucuuucucaugaccugcuguagacgcgucaaccggcccgagccuacccagagaucccugggaggcacagggcgcaaggugagcgugaccucucaguccggcaaaguuauuagcucuugggaauccuauaagagcggaggcgagacaaaacuguga

SEQ ID NO: 223775 - RNA, 1575 nt, Artificial Sequence
  derived and/or modified CDS sequence (opt5) from glycoprotein__RABV__KR906740.1
auggugccccaggccagacuguucgucccucuccugguuuuuccgcuuugcuucggcaaguuucccaucuacaccauuccugacaaacuggggcccuggagcccuaucgauauucaccaucucuccugucccaacaaucuggugguggaggacgaaggaugcacaaaccuuucuggcuucagcuauauggagcugaaggucggguacaucuccgcuauuaaagugaauggauuuacguguaccggcguugugacagaagccgagaccuauacaaacuucgucggguacgugaccacaaccuuuaagcggaaacacuuccgcccuaucccggaugcgugcagagcugccuauaauuggaagauggccggagacccccgguacgaagagucucuccauaacccuuaucccgauuaccacuggcugcgcacgguuaagaccacaaaagagagccuggugaucauuuccccuucugucgcugaccucgaucccuacgacagaagccugcauucccggguguuuaccggcggcaaguguagcgggaucacagugucuuccaccuauugcagcacgaaucacgauuacacaauuuggaugccggaaaacccucgccuuggaaccucuuguaauaucuucgccaacuccaaaggcaagagagcuagcaaagggggaaagacaugcggcuuugucgacgagcgggggcuguauaagucucucaaaggagccuguaagcugaaacuuugcggcguucugggccuccgccugauggaugggaccuggguggcgaugcaaaccuccgacgaaacaaaguggugucccccugaucagcuggugaauaugcacgacuucagaagcgacgagauugagcaucucgucguggaggaacugguuaaaaagcgggaagagugccuugaugcccuggaauccaucaugacgaccaaaucugugagcuuucgcagacucucccaccuucggaagcugguccccggauucggcaaggcuuacacaauuuucaacaaaacccugauggaggccgacgcucauuauaagagcgugcgcacauggaaugagaucauccccucuaaagggugccucagaguuggaggccggugucacccucacgugaacggggucuuuuucaauggaauuauccugggcccggauggccaugugcugauucccgaaaugcaguccagccuccugcagcaacacauggagcuucuggaaucuagcgucaucccucucaugcauccccuggccgacccuuccaccguguuuaaggauggggacgaggcggaagauuucguugaggugcaccuucccgacguccauaaacaggugucuggaguugaucugggccucccgaacugggggaaguacgugcugcugagcgccggaacgcucauugcucugaugcuuaucaucuuucugaugacaugcuguagacgcgucucccggccugagagcacccagagaucucucggccgcauugggcggaagguguccgugaccagccagucuggcaaaguuaucuccagcugggaauccuauaagucuggaggcgagacaagacuguga

SEQ ID NO: 223776 - RNA, 1575 nt, Artificial Sequence
  derived and/or modified CDS sequence (opt5) from glycoprotein__RABV__KR906741.1
auggugccccaggcccugcuguucgucccucugcuuguuuuuccgcugugcuucggcaaguuucccaucuacaccauuccugacaaacucgggcccuggagcccuaucgauauucaccaucuguccugucccaacaaucuugugguggaggacgaaggaugcacaaaccugucuggcuucagcuauauggagcucaaggucggguacaucuccgcuauuaaagugaauggauuuacguguaccggcguugugacagaagccgagaccuauacaaacuucgucggguacgugaccacaaccuuuaagagaaaacacuuccggccuaucccggaugcgugccgcgcugccuauaauuggaagauggccggagaccccagauacgaagagucucugcauaacccuuaucccgauuaccacuggcugcggacgguuaagaccacaaaagagagccucgugaucauuuccccuucugucgcugaccuggaucccuacgacaagagccuucauucccgcguguuuaccagcggcaaauguucuggcaucacaguguccagcaccuauugcucuacgaaucacgauuacacaauuuggaugccggaaaacccuagacuggggaccuccuguaauaucuucgccaacagcaagggaaaacgggcuucuaagggcgggaagacaugcggauuugucgacgagcgcggccucuauaaaucccugaagggggccuguaaacuuaagcugugcggaguucucggccugagacugauggauggcaccuggguggcgaugcaaaccagcgacgaaacaaaauggugucccccugaucagcucgugaauaugcacgacuuccgguccgacgagauugagcaucuggucguggaggaacuuguuaagaaacgcgaagagugccuggaugcccucgaaucuaucaugacgaccaagagcguguccuuuagacggcugagccaccuucgcaagcugguccccggguucggaaaggcuuacacaauuuucaacaagacccucauggaggccgacgcucauuauaaaucugugagaacauggaaugagaucauccccuccaagggcugccugcggguugggggacgcugucacccucacgugaacggcgucuuuuucaaugggauuauccugggaccggauggccaugugcucauucccgaaaugcagagcucucugcuucagcaacacauggagcugcucgaaagcuccgucaucccucugaugcauccccuugccgacccuucuaccguguuuaaagauggcgacgaggcggaagauuucguugaggugcaccuccccgacguccauaaacaggugagcgggguugaucucggacugccgaacuggggcaaguacgugcugcucuccgccgggacgcugauugcucuuaugcugauccucuuucugaugacaugcuguagacgggucaacagaccugagagcacccagcgcucucugggaggcaccgggcggaaaguguccgugacaagccagucuggcaagguuaucuccagcugggaauccuauaaaucuggaggcgagaccagacuuuga

SEQ ID NO: 223777 - RNA, 1575 nt, Artificial Sequence; identical to SEQ ID NO: 223564
  derived and/or modified CDS sequence (opt5) from glycoprotein__RABV__KR906742.1

SEQ ID NO: 223778 - RNA, 1575 nt, Artificial Sequence; identical to SEQ ID NO: 223769
  derived and/or modified CDS sequence (opt5) from glycoprotein__RABV__KR906743.1

SEQ ID NO: 223779 - RNA, 1575 nt, Artificial Sequence
  derived and/or modified CDS sequence (opt5) from glycoprotein__RABV__KR906744.1
auggugccccaggcccuucucuucgucccucugcuuguuuuuccgcugugcuucggcaaguuucccaucuacaccauuccugacaaacucgggcccuggagcccuaucgauauucaccaucuguccugucccaacaaucuugugguggaggacgaaggaugcacaaaccugucuggcuucagcuauauggagcucaaggucggguacaucuccgcuauuaaagugaauggauuuacguguaccggcguugugacagaagccgagaccuauacaaacuucgucggguacgugaccacaaccuuuaagagaaaacacuuccggccuaucccggaugcgugccgcgcugccuauaauuggaagauggccggagaccccagauacgaagagucucugcauaacccuuaucccgauuaccacuggcugcggacgguuaagaccacaaaagagagccucgugaucauuuccccuucugucgcugaccuggaucccuacgacaagacccuucauagccgcguguuuccguccggcaaauguagcggcaucacagugucuuccaccuauugcagcacgaaucacgauuacacaauuuggaugccugaaaaccccagacuggggaccucuugugacaucuucacaaauucccggggaaagcgcgccagcaaaggcgggaagaccugcggauuugucgaugagagaggccucuauaagucucugaaaggggcuuguaagcugaaacugugcggaguucucggccugcggcugauggacggcaccuggguggccaugcaaacauccgaugaaacgaagugguguccucccgaccagcucgugaacaugcacgacuuccgcagcgaugagauugagcaucuggucguggaggaacuuguuaaaaagagagaagagugccuggacgcgcucgaauccaucaugaccacaaaaucugugagcuuucggcgccugucccaccuuagaaagcugguccccggguucggaaaggccuacaccauuuucaauaaaacacucauggaggcugaugcccauuauaagagcgugcggaccuggaacgagaucaucccuucuaaaggcugccugcgcguugggggaagaugucacccgcacgugaauggcgucuuuuucaacgggauuauccugggacccgacggccaugugcucauuccugaaaugcaguccagccugcuucagcaacacauggagcugcucgaaucuagcgucaucccccugaugcauccucuugcugaucccuccacgguguuuaaggacggcgaugaggccgaagacuucguugaggugcaucugccggauguccacaaacaggugucugggguugaccucggacugccuaauuggggcaaguacgugcugcucagcgcggggacacugauugcccuuaugcugaucaucuuucucaugaccugcugucggagagucaaccgccccgagccuacccagcggucccugggaggcacagggagaaaggugagcgugaccucucaguccggcaaaguuauuagcucuugggaauccuauaagagcggaggcgagacaaaacuguga

SEQ ID NO: 223780 - RNA, 1575 nt, Artificial Sequence; identical to SEQ ID NO: 223772
  derived and/or modified CDS sequence (opt5) from glycoprotein__RABV__KR906745.1

SEQ ID NO: 223781 - RNA, 1575 nt, Artificial Sequence
  derived and/or modified CDS sequence (opt5) from glycoprotein__RABV__KR906746.1
auggugccccaggcccuucucuucgucacccugcuuguuuuuagccugugcuucggcaaguuuccuaucuacacaauuccggacaaacucgggcccugguccccuaucgauauucaccaucugucuugucccaacaaucuugugguggaggacgaaggaugcacgaaccugagcggcuucuccuauauggagcucaaggucggguacaucucugcuauuaaagugaauggauuuaccuguacaggcguugugaccgaagccgagacauauaccaacuucgucggguacgugacaaccacguuuaagagaaaacacuuccggccuauccccgaugcgugccgcgcugccuauaauuggaagauggccggagacccuagauacgaagagagccugcauaacccguaucccgauuaccacuggcugcggaccguuaagacaaccaaagagucccucgugaucauuucuccuagcgucgcugaccuggaucccuacgacaagucccuucauagccgcguguuuccuggcggcaaauguucugggaucacaguguccagcaccuucugcucuacgaaucacgauuauacaauuuggaugcccgaaaacccgagacugggaaccuccugugacaucuuugccaauagccggggcaagcgcgcuucuaaagggggaaagacaugcggcuucgucgaugagagagggcucuacaagucccugaaaggagccuguaagcugaaacugugcggcguucucggccugcggcugauggacgggaccuggguggcgaugcaaaccagcgaugaaacaaagugguguccucccgaccagcucgugaacaugcacgacuuucgcuccgaugagauugagcaucuggucguggaggaacuuguuaaaaagagagaagagugccuggacgcccucgaaucuaucaugacgaccaaaagcguguccuuccggcgccugagccaccuuagaaagcuggucccuggauucggcaaggcuuauacaauguuuaauaaaacccucauggaggccgaugcucauuacaagucugugcggacauggaacgagauuauccccuccaaagggugccugcgcguuggaggcagaugucacccccacgugaauggggucuucuuuaacggaaucauucugggcccugacggccaugugcucaucccggaaaugcagagcucucugcuucagcaacacauggagcugcucgaaagcuccgucauuccccugaugcauccucuugccgaucccucuaccguguucaaggacggggaugaggcggaagacuuuguugaggugcaucugccugauguccacaaacaggugagcggaguugaccucggccugcccaauugggggaaguaugugcugcucuccgccggaacgcugaucgcucuuaugcugauuaucuuccucaugacaugcugucggagagucaaccgcccggagagcaccgaucggucucugggcgggaccggcagaaagguguccgugacaagccagucuggaaaaguuaucuccagcugggaauccuacaagucuggcggggagacccgccuguga

SEQ ID NO: 223782 - RNA, 1575 nt, Artificial Sequence; identical to SEQ ID NO: 223781
  derived and/or modified CDS sequence (opt5) from glycoprotein__RABV__KR906747.1

SEQ ID NO: 223783 - RNA, 1575 nt, Artificial Sequence
  derived and/or modified CDS sequence (opt5) from glycoprotein__RABV__KR906748.1
auggugccccaggcccuucucuucgucccucugcuuguuuuuagccugugcuucggcaaguuuccgaucuacaccauucccgacaaacucgggccuuggucccccaucgauauucaccaucugucuuguccuaacaaucuugugguggaggacgaaggaugcacaaaccugagcggcuucuccuauauggagcucaaggucggguacaucucugcuauuaaagugaauggauuuacguguaccggcguugugacagaagccgagaccuauacaaacuucgucggguacgugaccacaaccuuuaagagaaaacacuuccggcccaucccugaugcgugccgcgcuacguauaauuggaagaucgccggagacccgagauacgaagagagccugcauaaccccuauccugauuaccacuggcugcggaccguuaagacaaccaaagagucccucgugauuaucucucccagcgucgccgaccuggauccuuacgacaagucccuucauagccgcguguuucccucuggcaaauguuccggcauuacagugagcucuacccacugcuccacgaaucacgauuauacaaucuggaugccggaaaacccuagacuggggaccagcugugacauuuucacaaauucucggggaaagcgcgcuuccaaaggcagcaagaccugcggguuugucgaugagagaggacucuacaagucccugaaaggcgccuguaagcugaaacugugcgggguucucggacugcggcugauggacggcaccuggguggcuaugcaaacaucugaugaaacgaaguggugucccccugaccagcucgugaaccugcaugacuuccgcagcgaugagaucgagcaccuugucguggaggaacugguuaaaaagagagaagagugccucgacgcccuggaauccauuaugaccacaaaaagcgugucuuuucggcgccuuucccaucugagaaagcucguccccggcuucgggaaggcguauaccaucuucaauaaaacacugauggaggccgaugcucacuacaagagcgugcggaccuggaacgagaucauucccucuaaaggaugccugcgcguuggcgggagaugucacccuccggugaauggagucuuuuucaacggcaucauucucgggcccgacggacaugugcugaucccugaaaugcagagcucccuucugcagcaacacauggagcuccuggaaucuagcgucauuccccuuaugcauccucuggccgaucccuccgcuguguuuaaggacggcgaugaggccgaagacuucguugaggugcaccucccggauguccauaaacaggugagcggcguugaccuggggcugccuaauuggggaaaguaugugcuccugucugcgggcacgcuuaucgcccugaugcucaucauuuuucugaugacaugcuguagaggggucaaccggcccgaguccaagcagugcagccugggaggcacccgccggaaagugucugugaccucccagagcgggaagguuaucuccucuugggaaagcuacaaauccggcggagagacaagacuuuga

SEQ ID NO: 223784 - RNA, 1575 nt, Artificial Sequence
  derived and/or modified CDS sequence (opt5) from glycoprotein__RABV__KR906749.1
auggugccccaggaccugcuguucgucccucugcuuguucugccgcucugcuuuggcaaguuccccaucuacaccauuccugauaaacuggggcccuggagcccuaucgacauucaccaucuuuccugucccaacaaucuggugguggaggaugaaggaugcacaaaccucucuggcuuuagcuauauggagcugaaggucggguacaucuccgccauuaaagugaauggauucacguguaccggcguugugacagaagcugagaccuauacaaacuuugucggguacgugaccacaaccuucaagagaaaacacuuucggccuaucccggacgccugccgcgcggcuuauaauuggaagauggccggagaucccagauacgaagagucucugcauaacccuuaucccgacuaccacuggcuccggacgguuaagaccacaaaagagagccuggugaucauuuccccuucugucgccgaucuugaccccuacgauaagagccugcauucccgcguguucaccagcggcaaauguucuggcaucacaguguccagcaccuauugcucuacgaaucacgacuacacaauuuggaugccggaaaacccuagacucgggaccuccuguaauaucuuugcuaacagcaagggaaaacgggccucuaagggcgggaagacaugcggauucgucgaugagcgcggccuguauaaaucccuuaagggggcuuguaaacugaagcucugcggaguucugggccugagacucauggacggcaccuggguggccaugcaaaccagcgaugaaacaaaauggugucccccugaccagcuggugaauaugcacgacuuucgguccgaugagauugagcaucuugucguggaggaacugguuaagaaacgcgaagagugccucgacgcgcuggaaucuaucaugacgaccaagagcguguccuucagacggcuuagccaccuccgcaagcucguccccggguuuggaaaagccuacacaauuuucaacaagacccugauggaggcugaugcccauuauaaaucugugagaacauggaaugagaucauccccuccaagggcugccugcggguugggggacgcugucacccucacgugaacggcgucuucuuuaaugggauuauccucggaccggacggccaugugcugauucccgaaaugcagagcucucuucugcagcaacacauggagcuccuggaaagcuccgucaucccucuuaugcauccccuggcugauccuucuaccguguucaaagacggcgaugaggccgaagacuuuguugaggugcaccuccccgauguccauaaacaggugagcgggguugaccugggacugccgaacuggggcaaguacgugcuccuguccgcggggacgcuuauugcccugaugcucaucaucuuccugacaaccugcuguagacgggucaacagaccugagagcacccagcgcucucugggaggcacagggcggaagguguccgugaccagccagucuggcaagguuauuuccagcugggaauccuauaaaucuggaggcgagacaagacuuuga

SEQ ID NO: 223785 - RNA, 1575 nt, Artificial Sequence; identical to SEQ ID NO: 223564
  derived and/or modified CDS sequence (opt5) from glycoprotein__RABV__KR906750.1

SEQ ID NO: 223786 - RNA, 1575 nt, Artificial Sequence
  derived and/or modified CDS sequence (opt5) from glycoprotein__RABV__KR906751.1
auggugccccaggcccugcuguucgucacccugcuuguuuuuagccugugcuucggcaaguuuccuaucuacacaauuccggacaaacucgggcccugguccccuaucgauauucaccaucugucuugucccaacaaucuugugguggaggacgaaggaugcacgaaccugagcggcuucuccuauauggagcucaaggucggguacaucucugcuauuaaagugaauggauuuaccuguacaggcguugugaccgaagccgagacauauaccaacuucgucggguacgugacaaccacguuuaagagaaaacacuuccggccuauccccgaugcgugccgcgcugccuauaauuggaagauggccggagacccuagauacgaagagagccugcauaacccguaucccgauuaccacuggcugcggaccguuaagacaaccaaagagucccucgugaucauuucuccuagcgucgcugaccuggaucccuacgacaagucccuucauagccgcguguuuccuggcggcaaauguucugggaucacaguguccagcaccuucugcucuacgaaucacgauuauacaauuuggaugcccgaaaacccgagacugggaaccuccugugacaucuuugccaauagcaagggcaaacgggcuucuaaagggggaaagacaugcggcuucgucgaugagcgcgggcucuacaaaucccugaagggagccuguaaacuuaagcugugcggcguucucggccugagacugauggacgggaccuggguggcgaugcaaaccagcgaugaaacaaaaugguguccucccgaccagcucgugaacaugcacgacuuucgguccgaugagauugagcaucuggucguggaggaacuuguuaagaaacgcgaagagugccuggacgcccucgaaucuaucaugacgaccaagagcguguccuucagacggcugagccaccuucgcaagcuggucccuggauucggcaaggcuuauacaauguuuaauaagacccucauggaggccgaugcucauuacaaaucugugagaacauggaacgagauuauccccuccaaggggugccugcggguuggaggccgcugucacccccacgugaauggggucuucuuuaacggaaucauucugggcccugacggccaugugcucaucccggaaaugcagagcucucugcuucagcaacacauggagcugcucgaaagcuccgucauuccccugaugcauccucuugccgaucccucuaccguguucaaagacggggaugaggcggaagacuuuguugaggugcaccucccugauguccauaaacaggugagcggaguugaccucggccugcccaauugggggaaguaugugcugcucuccgccggaacgcugaucgcucuuaugcugauuaucuuccucaugacaugcuguagacgggucaacagaccggagagcacccaccgcucucugggccggaccgggagaaagguguccgugacaagccagucuggcaagguuaucuccagcugggaauccuacaaaucuggaggcgagacccgccuguga

SEQ ID NO: 223787 - RNA, 1575 nt, Artificial Sequence; identical to SEQ ID NO: 223776
  derived and/or modified CDS sequence (opt5) from glycoprotein__RABV__KR906753.1

SEQ ID NO: 223788 - RNA, 1575 nt, Artificial Sequence
  derived and/or modified CDS sequence (opt5) from glycoprotein__RABV__KR906755.1
auggugccccaggcccugcuguucguccugcuucugguuuuuccucucugcuucggcaaguuuccgaucuacaccauucccgacaaacuggggccuuggagccccaucgauauucaccaucuuuccuguccuaacaaucuggugguggaggacgaaggaugcacaaaccucucuggcuucagcuauauggagcugaaggucggguacaucuccgcuauuaaagugaauggauuuacguguaccggcguugugacagaagccgagaccuauacaaacuucgucggguacgugaccacaaccuuuaagagaaaacacuuccggcccaucccugaugcgugccgcgcugccuauaauuggaagauggccggagacccgagauacgaagagucucugcauaaccccuauccugauuaccacuggcuccggacgguuaagaccacaaaagagagccuggugaucauuucccccucugucgcugaccuugauccuuacgacaagagccugcauucccgcguguuuaccagcggcaaauguucuggcaucacaguguccagcaccuauugcucuacgaaucacgauuacacaauuuggaugcccgaaaacccgagacucgggaccuccuguaauaucuucgucaacagcaagggaaaacgggccucuaagggcgggaagacaugcggauuuguugacgagcgcggccuguauaaaucccuuaagggggcuuguaaacugaagcucugcggagugcugggccugagacucauggauggcaccuggguggccaugcaaaccagcgacgaaacaaaaugguguuccccugaucagcuggucaauaugcacgacuuccggucugacgagauugagcaucuugugguugaggaacuggugaagaaacgcgaagagugccucgaugcgcuggaaagcaucaugacgaccaaguccgucagcuuuagacggcuuucucaccuccgcaagcucgugcccggguucggaaaagccuacacaauuuucaacaagacccugauggaggcugacgcccauuauaaauccguuagaacauggaaugagaucaucccuagcaagggcugccugcgggucgggggacgcugucacccccacgugaacggcguguuuuucaaugggauuauccucggacccgauggccauguccugauuccugaaaugcagucuagccuucugcagcaacacauggagcuccuggaauccucugugaucccgcuuaugcauccccuggcugacccuagcaccguuuuuaaagauggcgacgaggccgaagauuucguggagguccaccuccccgacgugcauaagcagguuuccgggguggaucugggacugccuaacuggggcaaguacguccuccugagcgcggggacgcuuauugcccugaugcucaucaucuuucugaugacaugcuguagacgggugaacagacccgagucuacccagcgcucccugggaggcaccgggcggaaagugagcguuacaucucaguccggcaaggucauuagcuccugggaaucuuauaaaagcggaggcgagaccagacuuuga

SEQ ID NO: 223789 - RNA, 1575 nt, Artificial Sequence
  derived and/or modified CDS sequence (opt5) from glycoprotein__RABV__KR906756.1
auggugccccaggcccugcuguucguccugcuucugguuuuuccucucugcuucggcaaguuuccgaucuacaccauucccgacaaacuggggccuuggagccccaucgauauucaccaucuuuccuguccuaacaaucuggugguggaggacgaaggaugcacaaaccucucuggcuucagcuauauggagcugaaggucggguacaucuccgcuauuaaagugaauggauuuacguguaccggcguugugacagaagccgagaccuauacaaacuucgucggguacgugaccacaaccuuuaagagaaaacacuuccggcccaucccugaugcgugccgcgcugccuauaauuggaagauggccggagacccgagauacgaagagucucugcauaaccccuauccugauuaccacuggcuccggacgguuaagaccacaaaagagagccugaucauuaucucccccucuguggcugaccuugauccuuacgacaagagccugcauucccgcgucuuuaccagcggcaaauguucuggcauuacaguguccagcaccuauugcucuacgaaucacgauuacacaaucuggaugcccgaaaacccgagacucgggaccuccuguaauauuuucgugaacagcaagggaaaacgggccucuaagggcgggaagacaugcggauuugucgacgagcgcggccuguauaaaucccuuaagggggcuuguaaacugaagcucugcggaguucugggccugagacucaucgauggcaccuggguggccaugcaaaccagcgacgaaacaaaaugguguuccccugaucagcuggugaauaugcacgacuuccggucugacgagauugagcaucuugucguggaggaacugguuaagaaacgcgaagagugccucgaugcgcuggaaagcaucaugacgaccaaguccgugagcuuuagacggcuuucucaccuccgcaagcucguccccggguucggaaaagccuacacaaucuucaacaagacccugauggaggcugacgcccauuauaaauccgugagaacauggaaugagauuaucccuagcaagggcugccugcggguugggggacgcugucacccccacgugaacggcgucuuuuucaaugggauuauccucggacccgauggccaugugcugauuccugaaaugcagucuagccuucugcagcaacacauggagcuccuggaauccucugucaucccgcuuaugcauccccuggcugacccuagcaccguguuuaaagauggcgacgaggccgaagauuucguugaggugcaccuccccgacguccauaaacagguguccgggguugaucugggacugccuaacuggggcaaguacgugcuccugagcgcggggacgcuuaucgcccugaugcucauuaucuuucugaugacaugcuguagacgggucaacagacccgagucuacccagcgcucccugggaggcaccgggcggaaggugagcgugacaucucaguccggcaagguuauuagcuccugggaaucuuauaaaagcggaggcgagaccagacuuuga

SEQ ID NO: 223790 - RNA, 1575 nt, Artificial Sequence; identical to SEQ ID NO: 223789
  derived and/or modified CDS sequence (opt5) from glycoprotein__RABV__KR906760.1

SEQ ID NO: 223791 - RNA, 1575 nt, Artificial Sequence
  derived and/or modified CDS sequence (opt5) from glycoprotein__RABV__KR906762.1
auggugccccaggccagacuguucgucccucuccugguuuuuccgcuuugcuucggcaaguuucccaucuacaccauuccugacaaacuggggcccuggagcccuaucgauauucaccaucucuccugucccaacaaucuggugguggaggacgaaggaugcacaaaccuuucuggcuucagcuauauggagcugaaggucggguacaucuccgcuauuaaagugaauggauuuacguguaccggcguugugacagaagccgagaccuauacaaacuucgucggguacgugaccacaaccuuuaagcggaaacacuuccgcccuaucccggaugcgugcagagcugccuauaauuggaagauggccggagacccccgguacgaagagucucuccauaacccuuaucccgauuaccacuggcugcgcacgguuaagaccacaaaagagagccuggugaucauuuccccuucugucgcugaccucgaucccuacgacaagagccugcauuccagaguguuuaccggcggcaaauguagcgggaucacagugucuuccaccuauugcagcacgaaucacgauuacacaauuuggaugccggaaaacccucggcuuggaaccucuuguaauaucuucgccaacuccaagggcaaacgcgcuagcaaagggggaaagacaugcggcuuugucgacgagagagggcuguauaaaucucucaagggagccuguaaacugaaacuuugcggcguucugggccuccggcugauggaugggaccuggguggcgaugcaaaccuccgacgaaacaaaguggugucccccugaucagcuggugaauaugcacgacuuccgcagcgacgagauugagcaucucgucguggaggaacugguuaagaaaagagaagagugccuugaugcccuggaauccaucaugacgaccaagucugugagcuuucggcgccucucccaccugagaaaacuuguccccggauucggcaaggcuuacacaauuuucaacaagacccugauggaggccgacgcucauuauaagagcgugcggacauggaaugagaucauccccucuaaggggugccuccgcguuggaggcagaugucacccucacgugaacggggucuuuuucaauggaauuauccugggcccggauggccaugugcugauucccgaaaugcaguccagccuccugcagcaacacauggagcuucuggaaucuagcgucaucccucucaugcauccccuggccgacccuuccaccguguuuaaagauggggacgaggcggaagauuucguugaggugcaccuucccgacguccauaaacaggugucuggaguugaucugggccucccgaacugggggaaguacauucugcugagcgccggaacgcucaucgcucugaugcuuaucauuuuucugaugacaugcugucggagagugucccgcccugagagcacccagcggucucucggcagaaccgggcgcaaggucuccgugacaagccagucuggcaaggugaucuccagcugggaauccuauaaaucuggaggcgagacccggcuguga

SEQ ID NO: 223792 - RNA, 1575 nt, Artificial Sequence; identical to SEQ ID NO: 223770
  derived and/or modified CDS sequence (opt5) from glycoprotein__RABV__KR906763.1

SEQ ID NO: 223793 - RNA, 1575 nt, Artificial Sequence
  derived and/or modified CDS sequence (opt5) from glycoprotein__RABV__KR906766.1
auggugccccagacccugcuguucgucccucugcuuguuuuuagccugugcuucggcaaguuuccgaucuacacaauucccgacaaacucgggccuuggucccccaucgauauucaccaucugucuuguccuaacaaucuugugguggaggacgaaggaugcacgaaccugagcggcuucuccuauauggagcucaaggucggguacaucucugccauuagagugaauggauuuaccuguacaggcguugugaccgaagcugagacauauaccaacuucgucggguacgugacaaccacguuuaaacggaagcacuuccgccccaucccugaugccugcagagcggcuuauaauuggaaaauggccggagacccgcgguacgaagagagccugcauaaccccuauccugauuaccacuggcugcgcaccguuaagacaaccaaggagucccucgugaucauuucucccagcgucgccgaccuggauccuuacgacaaaucccuucauagcagaguguuucccucuggcaaguguuccggcaucacagugagcucuaccuauugcuccacgaaucacgauuacacaauuuggaugccggaaaacccucggcuggggaccagcuguaauaucuucacaaacucucgcggaaaaagagcuuccaagggcgggaaaaccugcggauuugucgacgagcggggccucuauaagagccugaagggggccuguaaacuuaagcugugcggaguucucggccugcgccugauggauggcaccuggguggcuaugcaaacauccgacgaaacgaaauggugucccccugaucagcucgugaauaugcacgacuucagaucugacgagauugagcaucuggucguggaggaacuuguuaagaaacgggaagagugccuggaugcccucgaaagcaucaugaccacaaaguccgugagcuuucgcagacugucucaccuucggaaacugguccccggguucggaaaggcguacaccauuuucaacaagacacucauggaggccgacgcucauuauaaauccgugcgcaccuggaaugagaucauccccagcaagggcugccugagaguugggggacggugucacccucacgugaacggcgucuuuuucaaugggauuauccugggaccggauggccaugugcucauucccgaaaugcagucuagccugcuucagcaacacauggagcugcucgaauccucugucaucccucugaugcauccccuugccgacccuagcacgguguuuaaagauggcgacgaggcugaagauuucguugaggugcaccuccccgacguccauaaacagguguccgggguugaucucggacugccgaacuggggcaaguacgugcugcucagcgccgggacacugauugcgcuuaugcugaucaucuuucucaugaccugcuguagacgcgucaaccggccugagucuacccagagaucccugggaggcacacgccggaaggugagcgugaccucucaguccgggaagguuauuagcuccugggaaucuuauaaaagcggcggagagacaagacuguga

SEQ ID NO: 223794 - RNA, 1575 nt, Artificial Sequence
  derived and/or modified CDS sequence (opt5) from glycoprotein__RABV__KR906767.1
auggugccccaggcccuucucuucgucccucugcuuguuuuuccgcugugcuucggcaaguuucccaucuacaccauuccugacaaacucgggcccuggagcccuaucgauauucaccaucuguccugucccaacaaucuugugguggaggacgaaggaugcacaaaccugucuggcuucagcuauauggagcucaaggucggguacaucuccgcuauuaaagugaauggauuuacguguaccggcguugugacagaagccgagaccuauacaaacuucgucggguacgugaccacaaccuuuaagagaaaacacuuccggccuaucccggaugcgugccgcgcugccuauaauuggaagauggccggagaccccagauacgaagagucucugcauaacccuuaucccgauuaccacuggcugcggacgguuaagaccacaaaagagagccucgugaucauuuccccuucugucgcugaccuggaucccuacgacaagagccuucauucccgcguguuuaccagcggcaaauguucuggcaucacaguguccagcaccuauugcucuacgaaucacgauuacacaauuuggaugccggaaaacccuagacuggggaccuccuguaauaucuucgccaacagcaagggaaaacgggcuucuaagggcgggaagacaugcggauuugucgacgagcgcggccucuauaaaucccugagaggggccuguaagcugaaacugugcggaguucucggccugcggcugauggauggcaccuggguggcgaugcaaaccagcgacgaaacaaaguggugucccccugaucagcucgugaauaugcacgacuuccgcuccgacgagauugagcaucuggucguggaggaacuuguuaaaaagagagaagagugccuggaugcccucgaaucuaucaugacgaccaaaagcguguccuuucggcgccugagccaccuuagaaagcugguccccggguucggaaaggcuuacacaauuuucaacaaaacccucauggaggccgacgcucauuauaagucugugcggacauggaaugagaucauccccuccaaaggcugccugcgcguugggggaagaugucacccucacgugaacggcgucuuuuucaaugggauuauccugggaccggauggccaugugcucauucccgaaaugcagagcucucugcuucagcaacacauggagcugcucgaaagcuccgucaucccucugaugcauccccuugccgacccuucuaccguguuuaaggauggcgacgaggcggaagauuucguugaggugcaucugcccgacguccacaaacaggugagcgggguugaucucggacugccgaacuggggcaaguacgugcugcucuccgccgggacgcugauugcucuuaugcugaucaucuuucucaugacaugcugucggagagucagccgcccugagucuacccagcggucccugggaggcaccgggagaaaggugagcgugacaucucaguccggcaaaguuauuagcuccugggaaucuuauaagagcggaggcgagacccgccuguga

SEQ ID NO: 223795 - RNA, 1575 nt, Artificial Sequence; identical to SEQ ID NO: 223564
  derived and/or modified CDS sequence (opt5) from glycoprotein__RABV__KR906768.1

SEQ ID NO: 223796 - RNA, 1575 nt, Artificial Sequence
  derived and/or modified CDS sequence (opt5) from glycoprotein__RABV__KR906769.1
auggugccccaggcccugcuguucgucccucugcuuguuuuuccgcugugcuucggcaaguuucccaucuacaccauuccugacaaacucgggcccuggagcccuaucgauauucaccaucuguccugucccaacaaucuugugguggaggacgaaggaugcacaaaccugucuggcuucagcuauauggagcucaaggucggguacaucuccgcuauuaaagugaauggauuuacguguaccggcguugugacagaagccgagaccuauacaaacuucgucggguacgugaccacaaccuuuaagagaaaacacuuccggccuaucccggaugcgugccgcgcugccuauaauuggaagauggccggagaccccagauacgaagagucucugcauaacccuuaucccgauuaccacuggcugcggacgguuaagaccacaaaagagagccucgugaucauuuccccuucugucgcugaccuggaucccuacgacaagagccuucauucccgcguguuuccgagcggcaaauguucuggcaucaccguguccagcacauauugcucuaccaaucacgauuacacgauuuggaugccugaaaaccccagacuggggacauccuguaauaucuucgccaacagcaagggaaaacgggcuucuaagggcgggaagaccugcggauuugucgacgagcgcggccucuauaaaucccugaagggggccuguaaacuuaagcugugcggaguucucggccugagacugauggauggcacauggguggcgaugcaaaccagcgacgaaaccaaaugguguccucccgaucagcucgugaauaugcacgacuuccgguccgacgagauugagcaucuggucguggaggaacuuguuaagaaacgcgaagagugccuggaugcccucgaaucuaucaugacaaccaagagcguguccuuuagacggcugagccaccuucgcaagcugguccccggguucggaaaggcuuacacgauuuucaacaagacacucauggaggccgacgcucauuauaaaucugugagaaccuggaaugagaucaucccuuccaagggcugccugcggguugggggacgcugucacccgcacgugaacggcgucuuuuucaaugggauuauccugggacccgauggccaugugcucauuccugaaaugcagagcucucugcuucagcaacacauggagcugcucgaaagcuccgucaucccccugaugcauccucuugccgaccccucuacaguguuuaaagauggcgacgaggcggaagauuucguugaggugcaccucccggacguccauaaacaggugagcgggguugaucucggacugccuaacuggggcaaguacgugcugcucuccgccgggacccugauugcucuuaugcugaucaucuuucucaugacgugcuguagacgggucagcagacccgagucuacacagcgcucccugggacggaccggcagaaaagugagcgugaccucucaguccgggaagguuauuagcuccugggaaucuuauaaaagcggcggagagacacgccuguga

SEQ ID NO: 223797 - RNA, 1575 nt, Artificial Sequence; identical to SEQ ID NO: 223769
  derived and/or modified CDS sequence (opt5) from glycoprotein__RABV__KR906770.1

SEQ ID NO: 223798 - RNA, 1575 nt, Artificial Sequence
  derived and/or modified CDS sequence (opt5) from glycoprotein__RABV__KR906771.1
auggugccccaggcccugcuguucguccugcuucugguuuuuccucucugcuucggcaaguuuccgaucuacaccauucccgacaaacuggggccuuggagccccaucgauauucaccaucuuuccuguccuaacaaucuggugguggaggacgaaggaugcacaaaccucucuggcuucagcuauauggagcugaaggucggguacaucuccgcuauuaaagugaauggauuuacguguaccggcguugugacagaagccgagaccuauacaaacuucgucggguacgugaccacaaccuuuaagagaaaacacuuccggcccaucccugaugcgugccgcgcugccuauaauuggaagauggccggagacccgagauacgaagagucucugcauaaccccuauccugauuaccacuggcuccggacgguuaagaccacaaaagagagccuggugaucauuucccccucugucgcugaccuugauccuuacgacaagagccugcauucccgcguguuuaccagcggcaaauguucuggcaucacaguguccagcaccuauugcucuacgaaucacgauuacacaauuuggaugcccgaaaacccgagacucgggaccuccuguaauaucuucgucaacagcaagggaaaacgggccucuaagggcgggaagacaugcggauuuguugacgagcgcggccuguauaaaucccuuaagggggcuuguaaacugaagcucugcggagugcugggccugagacucauggauggcaccuggguggccaugcaaaccagcgacgaaacaaaaugguguuccccugaucagcuggucaauaugcacgacuuccggucugacgagauugagcaucuugugguugaggaacuggugaagaaacgcgaagagugccucgaugcgcuggaaagcaucaugacgaccaaguccgucagcuuuagacggcuuucucaccuccgcaagcucgugcccggguucggaaaagccuacacaauuuucaacaagacccugauggaggcugacgcccauuauaaauccguuagaacauggaaugagaucaucccuagcaagggcugccugcgggucgggggacgcugucacccccacgugaacggcguguuuuucaaugggauuauccucggacccaacggccauguccugauuccugaaaugcagucuagccuucugcagcaacacauggagcuccuggaauccucugugaucccgcuuaugcauccccuggcugauccuagcaccguuuuuaaagacggcgaugaggccgaagacuucguggagguccaccuccccgaugugcauaagcagguuuccgggguggaccugggacugccuaacuggggcaaguacguccuccugagcgcggggacgcuuauugcccugaugcucaucaucuuucugaugacaugcuguagacgggugaauagacccgagucuacccagcgcucccugggaggcaccgggcggaaagugagcguuacaucucaguccggcaaggucauuagcuccugggaaucuuauaaaagcggaggcgagaccagacuuuga

SEQ ID NO: 223799 - RNA, 1575 nt, Artificial Sequence; identical to SEQ ID NO: 223772
  derived and/or modified CDS sequence (opt5) from glycoprotein__RABV__KR906773.1

SEQ ID NO: 223800 - RNA, 1575 nt, Artificial Sequence; identical to SEQ ID NO: 223769
  derived and/or modified CDS sequence (opt5) from glycoprotein__RABV__KR906776.1

SEQ ID NO: 223801 - RNA, 1575 nt, Artificial Sequence; identical to SEQ ID NO: 223772
  derived and/or modified CDS sequence (opt5) from glycoprotein__RABV__KR906778.1

SEQ ID NO: 223802 - RNA, 1575 nt, Artificial Sequence
  derived and/or modified CDS sequence (opt5) from glycoprotein__RABV__KR906779.1
auggugccccaggcccuucucuucgucccucugcuuguuuuuccgcugugcuucggcaaguuucccaucuacaccauuccugacaaacucgggcccuggagcccuaucgauauucaccaucuguccugucccaacaaucuugugguggaggacgaaggaugcacaaaccugucuggcuucagcuauauggagcucaaggucggguacaucuccgcuauuaaagugaauggauuuacguguaccggcguugugacagaagccgagaccuauacaaacuucgucggguacgugaccacaaccuuuaagagaaaacacuuccggccuaucccggaugcgugccgcgcugccuauaauuggaagauggccggagaccccagauacgaagagucucugcauaacccuuaucccgauuaccacuggcugcggacgguuaagaccacaaaagagagccucgugaucauuuccccuucugucgcugaccuggaucccuacgacaagagccuucauucccgcguguuuccgagcggcaaauguucuggcaucaccguguccagcacauauugcucuaccaaucacgauuacacgauuuggaugccugaaaaccccagacuggggacauccugugacaucuucaccaauagccggggaaagcgcgccucuaaaggcgggaagacaugcggauuugucgaugagagaggccucuauaagucccugaaaggggcuuguaagcugaaacugugcggaguucucggccugcggcugauggacggcaccuggguggccaugcaaaccagcgaugaaacaaagugguguccucccgaccagcucgugaacaugcacgacuuccgcuccgaugagauugagcaucuggucguggaggaacuuguuaaaaagagagaagagugccuggacgcgcucgaaucuaucaugacgaccaaaagcguguccuuucggcgccugagccaccuuagaaagcugguccccggguucggaaaggccuacacaauuuucaauaaaacccucauggaggcugaugcccauuauaagucugugcggacauggaacgagaucaucccuuccaaaggcugccugcgcguugggggaagaugucacccgcacgugaauggcgucuuuuucaacgggauuauccugggacccgacggccaugugcucauuccugaaaugcagagcucucugcuucagcaacacauggagcugcucgaaagcuccgucaucccccugaugcauccucuugcugaucccucuaccguguuuaaggacggcgaugaggccgaagacuucguugaggugcaucugccggauguccacaaacaggugagcgggguugaccucggacugccuaauuggggcaaguacgugcugcucuccgcggggacgcugauugcccuuaugcugaucaucuuucucaugacaugcugucggagagucaaccgccccgagagcacccagcggucucugggaggcaccgggagaaagguguccgugacaagccagucuggcaaaguuauuuccagcugggaauccuauaagucuggaggcgagacccgccuguga

SEQ ID NO: 223803 - RNA, 1575 nt, Artificial Sequence; identical to SEQ ID NO: 223772
  derived and/or modified CDS sequence (opt5) from glycoprotein__RABV__KR906780.1

SEQ ID NO: 223804 - RNA, 1575 nt, Artificial Sequence; identical to SEQ ID NO: 223772
  derived and/or modified CDS sequence (opt5) from glycoprotein__RABV__KR906781.1

SEQ ID NO: 223805 - RNA, 1575 nt, Artificial Sequence; identical to SEQ ID NO: 223788
  derived and/or modified CDS sequence (opt5) from glycoprotein__RABV__KR906782.1

SEQ ID NO: 223806 - RNA, 1575 nt, Artificial Sequence; identical to SEQ ID NO: 223769
  derived and/or modified CDS sequence (opt5) from glycoprotein__RABV__KR906784.1

SEQ ID NO: 223807 - RNA, 1575 nt, Artificial Sequence
  derived and/or modified CDS sequence (opt5) from glycoprotein__RABV__KR906785.1
auggugccccaggcccugcuguucgucccucugcuuguuuuuccgcugugcuucggcaaguuucccaucuacaccauuccugacaaacucgggcccuggagcccuaucgauauucaccaucuguccugucccaacaaucuugugguggaggacgaaggaugcacaaaccugucuggcuucagcuauauggagcucaaggucggguacaucuccgcuauuaaagugaauggauuuacguguaccggcguugugacagaagccgagaccuauacaaacuucgucggguacgugaccacaaccuuuaagagaaaacacuuccggccuaucccggaugcgugccgcgcugccuauaauuggaagauggccggagaccccagauacgaagagucucugcauaacccuuaucccgauuaccacuggcugcggacgguuaagaccacaaaagagagccucgugaucauuuccccuucugucgcugaccuggaucccuacgacaagagccuucauucccgcguguuuccgagcggcaaauguucuggcaucaccguguccagcacauauugcucuaccaaucacgauuacacgauuuggaugccugaaaaccccagacuggggacauccugugacaucuucaccaauagccggggaaagcgcgccucuaaaggcgggaagacaugcggauuugucgaugagagaggccucuauaagucccugcgcggggcuuguaaacuuaagcugugcggaguucucggccugcggcugauggacggcaccuggguggccaugcaaaccagcgaugaaacaaaaugguguccucccgaccagcucgugaacaugcacgacuucagauccgaugagauugagcaucuggucguggaggaacuuguuaagaaacgggaagagugccuggacgcgcucgaaucuaucaugacgaccaagagcguguccuuucgcagacugagccaccuucggaaacugguccccggguucggaaaggccuacacaauuuucaauaagacccucauggaggcugaugcccauuauaaaucugugcgcacauggaacgagaucaucccuuccaagggcugccugagaguugggggacggugucacccgcacgugaauggcgucuuuuucaacgggauuauccugggacccgacggccaugugcucauuccugaaaugcagagcucucugcuucagcaacacauggagcugcucgaaagcuccgucaucccccugaugcauccucuugcugaucccucuaccguguuuaaagagggcgacgaagccgaggauuucguugaggugcaccucccggacguccauaaacaggugagcgggguugaucucggacugccuaauuggggcaaguacgugcugcucuccgcggggacgcugauugccagcaugcuuaucaucuuucugaugacaugcuguagacgcgucaaccggcccgaaccuacccagagaucucucggaggcaccgggcgcaagguguccgugacaagccagucuggcaagguuauuuccagcugggaguccuauaaaucuggaggcgaaacccggcuguga

SEQ ID NO: 223808 - RNA, 1575 nt, Artificial Sequence
  derived and/or modified CDS sequence (opt5) from glycoprotein__RABV__KR906787.1
auggugccccaggcccugcuguucguccugcuucugguuuuuccucucugcuucggcaaguuuccgaucuacaccauucccgacaaacuggggccuuggagccccaucgauauucaccaucuuuccuguccuaacaaucuggugguggaggacgaaggaugcacaaaccucucuggcuucagcuauauggagcugaaggucggguacaucuccgcuauuaaagugaauggauuuacguguaccggcguugugacagaagccgagaccuauacaaacuucgucggguacgugaccacaaccuuuaagagaaaacacuuccggcccaucccugaugcgugccgcgcugccuauaauuggaagauggccggagacccgagauacgaagagucucugcauaaccccuauccugauuaccacuggcuccggacgguuaagaccacaaaagagagccuggugaucauuucccccucugucgcugaccuugauccuuacgacaagagccugcauucccgcguguuuaccagcggcaaauguucuggcaucacaguguccagcaccuauugcucuacgaaucacgauuacacaauuuggaugcccgaaaacccgagacucgggaccuccuguaauaucuucgucaacagcaagggaaaacgggccucuaagggcgggaagacaugcggauuuguugacgagcgcggccuguauaaaucccuuaagggggcuuguaaacugaagcucugcggagugcugggccugagacucauggauggcaccuggguggccaugcaaaccagcgacgaaacaaaaugguguuccccugaucagcuggucaauaugcacgacuuccggucugacgagauugagcaucuugugguugaggaacuggugaagaaacgcgaagagugccucgaugcgcuggaaagcaucaugacgaccaaguccgucagcuuuagacggcuuucucaccuccgcaagcucgugcccggguucggaaaagccuacacaauuuucaacaagacccugauggaggcugacgcccauuauaaauccguuagaacauggaaugagaucaucccuagcaagggcugccugcgggucgggggacgcugucacccccacgugaacggcguguuuuucaaugggauuauccucggacccgauggccauguccugauuccugaaaugcagucuagccuucugcagcaacacauggagcuccuggaauccucugugaucccgcuuaugcauccccuggcugacccuagcaccguuuuuaaagauggcgacgaggccgaagauuucguggagguccaccuccccgacgugcauaagcagguuuccgggguggaucugggacugccuaacuggggcaaguacguccuccugagcgcggggacgcuuauugcccugaugcucaucaucuuucugaugacaugcuguagacgggugaacagacccgagucuacccagcgcucccugcggggaaccggcagaaaagugagcguuacaucucaguccgggaaggucauuagcuccugggaaucuuauaaaagcggcggagagacccgccuuuga

SEQ ID NO: 223809 - RNA, 1575 nt, Artificial Sequence
  derived and/or modified CDS sequence (opt5) from glycoprotein__RABV__KR906788.1
auggugccccaggcccugcuguucgucccucugcuuguuuuuccgcugugcuucggcaaguuucccaucuacaccauuccugacaaacucgggcccuggagcccuaucgauauucaccaucuguccugucccaacaaucuugugguggaggacgaaggaugcacaaaccugucuggcuucagcuauauggagcucaaggucggguacaucuccgcuauuaaagugaauggauuuacguguaccggcguugugacagaagccgagaccuauacaaacuucgucggguacgugaccacaaccuuuaagagaaaacacuuccggccuaucccggaugcgugccgcgcugccuauaauuggaagauggccggagaccccagauacgaagagucucugcauaacccuuaucccgauuaccacuggcugcggacgguuaagaccacaaaagagagccucgugaucauuuccccuucugucgcugaccuggaucccuacgacaagagccuucauucccgcguguuuaccagcggcaaauguucuggcaucacaguguccagcaccuauugcucuacgaaucacgauuacacaauuuggaugccggaaaacccuagacuggggaccuccuguaauaucuucgucaacagcaagggaaaacgggccucuaagggcgggaagacaugcggauuuguugacgagcgcggccucuauaaaucccugaagggggcuuguaaacuuaagcugugcggagugcucggccugagacugauggauggcaccuggguggccaugcaaaccagcgacgaaacaaaaugguguucccccgaucagcucgucaauaugcacgacuuccggucugacgagauugagcaucuggugguugaggaacuugugaagaaacgcgaagagugccuggaugcgcucgaaagcaucaugacgaccaaguccgucagcuuuagacggcugucucaccuucgcaagcuggugccuggguucggaaaagccuacacaauuuucaacaagacccucauggaggcugacgcccauuauaaauccguuagaacauggaaugagaucauccccagcaagggcugccugcgggucgggggacgcugucacccccacgugaacggcguguuuuucaaugggauuauccugggaccugauggccauguccucauuccggaaaugcagucuagccugcuucagcaacacauggagcugcucgaauccucugugaucccccugaugcauccucuugcugaccccagcaccguuuuuaaagauggcgacgaggccgaagauuucguggagguccaccucccugacgugcauaagcagguuuccgggguggaucucggacugcccaacuggggcaaguacguccugcucagcgcggggacgcugauugcccuuaugcugacaaucuuucucaugaccugcuguagacgggugaacagaccggagucuacccagcgcucccugggaggcacagggcggaaagugagcguuaccucucaguccggcaaggucaucagcuccugggaaucuuauaaaagcggaggcgagacaagacuguga

SEQ ID NO: 223810 - RNA, 1575 nt, Artificial Sequence; identical to SEQ ID NO: 223802
  derived and/or modified CDS sequence (opt5) from glycoprotein__RABV__KR906790.1

SEQ ID NO: 223811 - RNA, 1575 nt, Artificial Sequence; identical to SEQ ID NO: 223764
  derived and/or modified CDS sequence (opt5) from glycoprotein__RABV__KT023100.1

SEQ ID NO: 223812 - RNA, 1575 nt, Artificial Sequence
  derived and/or modified CDS sequence (opt5) from glycoprotein__RABV__KT221112.1
augaucccccaggcccuucucuucgugccucugcuugucuuuagccugugcuucggcaaguuuccgauuuacaccauccccgacaaacucgggccuuggucccccauugauauccaccaucugucuuguccuaacaaucuuguuguggaggacgaaggaugcacaaaccugagcggcuucuccuauauggagcucaaggugggguacauuucugcuaucaaagucaauggauuuacguguaccggcgugguuacagaagccgagaccuauacaaacuucgugggguacgucaccacaaccuuuaagagaaaacacuuccggcccacgccugaugcgugccgcgcugccuauaauuggaagauggccggagacccgagauacgaagagagccugaacaaucccuauccugauuaccauuggcugcggaccgugaagacaaccaaagagucccucguugugaucucucccagcgucgcugaccuggauccuuacgacaagucccuucacagccgcguguuucccucuggcaaauguuccggcauuacagugagcucuaccugcuguuccacgaaccaugauuauacaaucuggaugccggaaaauccuagacuggggaccagcugcgacauuuucgucaacucucggggaaagcgcgccuccaaaggcagcaagacauguggguuuguugaugagagaggacucuacaagucccugaaaggcgcuugcaagcugaaacuguguggggugcucggacugcggcugauggacggcaccuggguggccauccaaaccucugaugaaacaaaguggugucccccugaccagcucgucaaucugcacgacuuccgcagcgaugagauugagcaccuugugguugaggaacuggugaaaaagagagaagagugccucgacgcgcuggaauccaucaugacgaccaaaagcgucucuuuucggcgccuuucccaucugagaaagcucgugcccggcuucgggaaggccuauacaauuuucaacaaaacccugauggaggcugaugcccacuacaagagcguucggacauggaaugagaucauccccucuaaaggaugccugcgcgugggcgggagaugccauccucacgucaacggaguguuuuucaauggcauuauccucgggccggacggacacguccugauucccgaaaugcagagcucccuucugcagcaacauauggagcuccuggaaucuagcgugaucccucuuaugcacccccuggcugauccuuccaccauuuuuaaggacggcgaugaggccgaagacuucguugaggugcaucuccccgauguccacaaacaggugagcggcguugaccuggggcugccgaacuggggaaaguaugugcucaugucugcgggcgcccugaucgcucuuaugcugaugaucuuuuccaugacguguugccggaagacagauagaauugggagcacccaucacggaccuggcgagaccgggcgcaaagucucugugacaucccagaacggccgggugaucgccagcugggaauccuacaagucuggaggcgagaccaaacucuga

SEQ ID NO: 223813 - RNA, 1575 nt, Artificial Sequence
  derived and/or modified CDS sequence (opt5) from glycoprotein__RABV__KT221113.1
augaucccccaggcccuucucuucgugccucugcuugucuuuagccugugcuucggcaaguuuccgauuuacaccauccccgacaaacucgggccuuggucccccauugauauccaccaucugucuuguccuaacaaucuuguuguggaggacgaaggaugcacaaaccugagcggcuucuccuauauggagcucaaggugggguacauuucugcuaucaaagucaauggauuuacguguaccggcgugguuacagaagccgagaccuauacaaacuucgugggguacgucaccacaaccuuuaagagaaaacacuuccggcccacgccugaugcgugccgcgcugcccauaauuggaagauggccggagacccgagauaugaagagagccugcacaaccccuacccugauuaucauuggcugcggaccgugaagacaaccaaagagucccucguuaucauuucucccagcguggcugaccuggauccuuacgacaagucccuucacagccgcgucuuucccucuggcaaauguuccggcaucacagugagcucuaccuacugcuccacgaaucacgauuauacaauuuggaugccggaaaacccuagacuggggaccagcugugacaucuucgucaauucucggggaaagcgcgccuccaaaggcagcaagacaugcggguuuguggaugagagaggacucuacaagucccugaaaggcgcuuguaagcugaaacugugcgggguucucggacugcggcugauggacggcaccuggguggccauucaaaccucugaugaaacaaaguggugucccccugaccagcucgugaaccugcaugacuuccgcagcgaugagaucgagcaccuugucguggaggaacugguuaaaaagagagaagagugccucgacgcgcuggaauccauuaugacgaccaaaagcgugucuuuucggcgccuuucccaucugagaaagcucguccccggcuucgggaaggccuauacaaucuucaauaaaacccugauggaggcugaugcccacuacaagagcgugcggacauggaacgagaucauucccucuaaaggaugccugcgcguuggcgggagaugucacccucaugugaauggagucuuuuucaacggcaucauucucgggccggacggacacgugcugauccccgaaaugcagagcucccuucugcagcaacauauggagcuccuggaaucuagcgucauuccucuuaugcacccccuggcugauccuuccaccaucuuuaaggacggcgaugaggccgaagacuucguggagguucaucuccccgaugugcaccggcaggucagcggcguggaccuggggcugccgaauuggggaaaauauguucucaugucugcgggcgcccugguggcucuuaugcugaugaucuuucucaugacgugcugugucaagacagauagaaccggguccacccaccauagcccuggagagacaggccgcaaggugucugugaccucccagaacgggcggguuauugccagcugggaauccuacaaaucuggcggagagacaaagcuguga

SEQ ID NO: 223814 - RNA, 1575 nt, Artificial Sequence
  derived and/or modified CDS sequence (opt5) from glycoprotein__RABV__KT221114.1
augaucccccaggcccuucucuucgugccucugcuugucuuuagccugugcuucggcaaguuuccgauuuacaccauccccgacaaacucgggccuuggucccccauugauauccaccaucugucuuguccuaacaaucuuguuguggaggacgaaggaugcacaaaccugagcggcuucuccuauauggagcucaaggugggguacauuucugcuaucaaagucaauggauuuacguguaccggcgugguuacagaagccgagaccuauacaaacuucgugggguacgucaccacaaccuuuaagagaaaacacuuccggcccacgccugaugcgugccgcgcugcccauaauuggaagauggccggagacagcagauaugaagagucccugcacaacccguaccccgauuaucauuggcugcggaccgugaagacaaccaaagagucucucguuaucauuagcccuuccguggcugaccuggaucccuacgacaagagccuucacucucgcgucuuuccuuccggcaaauguagcggcaucacagugucuuccaccuacugcagcacgaaucacgauuauacaauuuggaugcccgaaaacccgagacuggggaccucuugugacaucuucgucaauucccggggaaagcgcgccagcaaaggcuccaagacaugcggguuuguggaugagagaggacucuacaagucucugaaaggcgcuuguaagcugaaacugugcgggguucucggacugcggcugauggacggcaccuggguggccauucaaaccagcgaugaaacaaagugguguccucccgaccagcucgugaaccugcaugacuuccgcuccgaugagaucgagcaccuugucguggaggaacugguuaaaaagagagaagagugccucgacgcgcuggaaagcauuaugacgaccaaaucuguguccuuucggcgccuuagccaucugagaaagcucgucccuggcuucgggaaggccuauacaaucuucaauaaaacccugauggaggcugaugcccacuacaagucugugcggacauggaacgagaucauucccagcaaaggaugccugcgcguuggcgggagaugucacccccaugugaauggagucuuuuucaacggcaucauucucgggccugacggacacgugcugaucccggaaaugcaguccucucuucugcagcaacauauggagcuccuggaaagcuccgucauuccccuuaugcacccucuggcugaucccagcaccaucuuuaaggacggcgaugaggccgaagacuucguggagguucaucucccugaugugcaccggcaggucucuggcguggaccuggggcugcccaauuggggaaaauauguucucauguccgcgggcgcccugguggcucuuaugcugaugaucuuucucaugacgugcugugucaagacagauagaaccgggagcacccaccauucuccgggagagacaggccgcaagguguccgugaccagccagaacgggcggguuauugccuccugggaaucuuacaaaagcggcggagagacaaagcuguga

SEQ ID NO: 223815 - RNA, 1575 nt, Artificial Sequence; identical to SEQ ID NO: 223813
  derived and/or modified CDS sequence (opt5) from glycoprotein__RABV__KT221115.1

SEQ ID NO: 223816 - RNA, 1575 nt, Artificial Sequence
  derived and/or modified CDS sequence (opt5) from glycoprotein__RABV__KT221117.1
augaucccccaggcccuucucuucgugccucugcuugucuuuagccugugcuucggcaaguuuccgauuuacaccauccccgacaaacucgggccuuggucccccauugauauccaccaucugucuuguccuaacaaucuuguuguggaggacgaaggaugcacaaaccugagcggcuucuccuauauggagcucaaggugggguacauuucugcuaucaaagucaauggauuuacguguaccggcgugguuacagaagccgagaccuauacaaacuucgugggguacgucaccacaaccuuuaagagaaaacacuuccggcccacgccugaugcgugccgcgcugccuauaauuggaagauggccggagacccgagauacgaagagagccugcauaaccccuauccugauuaccacuggcugcggaccgugaagacaaccaaagagucccucguugugaucucucccagcgucgcugaccuggauccuuacgacaagucccuucauagccgcguguuucccucuggcaaauguuccggcauuacagugagcucuaccuauugcuccacgaaucacgauuacacaaucuggaugccggaaaacccuagacuggggaccagcugugacauuuucgucaauucucggggaaagcgcgccuccaaaggcagcaagacaugcggguuuguugaugagagaggacucuauaagucccugaaaggcgcuuguaagcugaaacugugcggggugcucggacugcggcugauggacggcaccuggguggccauccaaaccucugaugaaacaaaguggugucccccugaccagcucgucaaccugcacgacuuccgcagcgaugagauugagcaucuugugguugaggaacuggugaaaaagagagaagagugccucgacgcgcuggaauccaucaugacgaccaaaagcgucucuuuucggcgccuuucccaccugagaaagcucgugcccggcuucgggaaggccuacacaauuuucaauaaaacccugauggaggcugaugcccauuauaagagcguucggacauggaacgagaucauccccucuaaaggaugccugcgcgugggcgggagaugucacccucacgucaauggaguguuuuucaacggcauuauccucgggccggacggacauguccugauucccgaaaugcagagcucccuucugcagcaacacauggagcuccuggaaucuagcgugaucccucuuaugcauccccuggcugauccuuccaccauuuuuaaggacggcgaugaggccgaagacuucguugaggugcaccuccccgauguccauaaacaggugagcggcguugaccuggggcugccgaauuggggaaaguacgugcucaugucugcgggcgcccugaucgcucuuaugcugauggucuuucucaugacgugcugucggaagacagauagaaccggguccacccaccacagcccuggagagacaggccgcaaagugucugugaccucccagaacgaacggguuaucgccagcugggaguccuauaagucugggggcgaaacaaaacuguga

SEQ ID NO: 223817 - RNA, 1575 nt, Artificial Sequence
  derived and/or modified CDS sequence (opt5) from glycoprotein__RABV__KT221118.1
auggugccccaggcccuccuguucgucccucugcuugcuguuccgcugugcuuuggcaaguuccccaucuacaccauuccugacaaacucgggcccuggagcccuaucgauauucaccaucuguccugucccaacaaucuugugguggaggacgaaggaugcacaaaccugucuggcuuuagcuauauggagcucaaggucggguacaucuccgccauuaaagugaauggauucacguguaccggcguugugacagaagcggagaccuauacaaacuuugucggguacgugaccacaaccuucaagagaaaacacuuucggccuacgccggaugcuugccgcucugccuauaauuggaagauggccggagaccccagauacgaagagagccugcauaacccuuaucccgauuaccacuggcugcggaccguuaagacaaccaaagaguccuucgugaucaucucuccuagcgucgcugaccucgaucccuacgacaagucccugcauagccgcguguuuccgagaggcaaauguucuggcauuacaguguccagcaccuauugcucuacgaaucacgauuacacaaucuggaugccugaaaacccccggcuugggaccuccugugacauuuucacaaauagccgcggaaagagagccucuaaaggcuccaagaccugcggguuugucgaugagcggggacuguauaagagccucaaaggcgcuuguaagcugaaacuuugcgggguucugggacuccgccugauggacggcaccuggguggccauccaaacauccgaugaaacgaagugguguccucccgaccagcuggugaaccuccacgacuuccauucugaugagauugagcaccuggucguggaaguucuugugaaaaagagagaggaaugccuggacgcgcucgagagcaucaugaccacaaaauccgucagcuuucggcgccugucucaucuuagaaagcuggugcccggcuucgggaaggccuacaccauuuucaauaaaacacucauggaagcugaugcccacuauaaguccguucggaccuggaacgagaucaucccuagcaaaggaugccugcgcgugggcgggagaugucacccgcaugucaauggaguguuuuucaacggcauuauccuggggcccgacggacacguccucauuccugagaugcagucuagccugcuucagcaacauauggaacugcucgaguccucugugaucccccugaugcacccucuugcugaucccagcacgguuuuuaaggacggcgaugaagccgaggacuucguggaaguccaucugccggaugugcacaaacagguuuccggcguggaccucgggcugccuagcuggggaaaguacguccugaugucugcgggcauucucacagcccugaugcuuaugaucuuucugaugaccugcugucggagaaccaaucgcgcugaguccauccagcacagccucggggagacaggacggaaggugucugugaccucccagaacggcagaguuauuagcuccugggaaucuuauaaaagcgggggcgagacaaagcuguga

SEQ ID NO: 223818 - RNA, 1575 nt, Artificial Sequence; identical to SEQ ID NO: 222899
  derived and/or modified CDS sequence (opt5) from glycoprotein__RABV__KT221120.1

SEQ ID NO: 223819 - RNA, 1575 nt, Artificial Sequence
  derived and/or modified CDS sequence (opt5) from glycoprotein__RABV__KT221122.1
augaucccccaggugcuucucuucgucccuuuucugguuuucagcuccugcuuuggcaaguucccgauuuacaccauccccgacaaacuugggccuuggucucccauugauauccaccaucugagcuguccuaacaaucucgugguggaggacgaaggaugcacaaaccuguccggcuuuucuuauauggagcuuaaggucggguacauuagcgccaucaaagugaauggauucacguguaccggcguugugacagaagcugagaccuauacaaacuuugucggguacgugaccacaaccuucaagagaaaacacuuucggcccacgccugaugccugccgcgcggcuuauaauuggaagauggccggagacccgagauacgaagagucccugcauaaccccuauccugauuaccacuggcuccggaccguuaagacaucuaaagagagccuggugaucauuucccccagcgucgccgaccuggauccuuacgacaagucucuccauucccgcguguuccccggcggcaaauguagcgggaucaccgugucuuccacaugcuguagcaccaaucacgauuauacgauuuggaugccggaaaacccuagacugggaacaucuugcgacaucuuuaccaauucccggggcaagcgcgcuagcaaagggggaaagacauguggcuucgucgaugagagagggcuuuacaagucccugaaaggagccugcaagcucaaacuguguggcguucuuggccugcggcucauggacgggaccuggguggcuauucaaaccucugaugaaaucaaguggugcagccccgaccagcuggugaaccugcacgacuuucauuccgaugagauugagcaccucgucguggaggaacugguuaaaaagcgcgaagagugccuugacgcccuggaaacaaucaugacgaccaaaagcgugucuuucagacggcucucccaucugcgcaagcuggucccuggauucggcaaggcguauacaaucuuuaauaaaacccugauggaggccgaugcucacuacaagagcauuagaacauggaacgagaucauucccucuaaagggugucuccgggugggaggccgcugccacccccauguuaaugggguguucuuuaacggaaucauucugggcccugacggccacguccugaucccggaaaugcagagcucccuccugcaucagcacauggagcuucuggaaucuagcgugaucccccucaugcauccucuggccgaucccuccaccgucuucaaggacggggaugaggcugaagacuuuguggagguucaccuuccugaugugcacaaacaaauuagcggagucgaccugggccuccccaauugggggaaguaugugcugguuucugccggagcgcugacggcccucaugcugaugaucuuccuuaugacauguugcagaaagaccaaccgggcugaguccauucagcauagcccgggcgaaaccgggagaaaagugucugucacaucccacaacggccgcgugaucagcuccugggagucuuacaagagcggaggcgaaaccaaacuguga

SEQ ID NO: 223820 - RNA, 1575 nt, Artificial Sequence; identical to SEQ ID NO: 223028
  derived and/or modified CDS sequence (opt5) from glycoprotein__RABV__KT221125.1

SEQ ID NO: 223821 - RNA, 1575 nt, Artificial Sequence; identical to SEQ ID NO: 223028
  derived and/or modified CDS sequence (opt5) from glycoprotein__RABV__KT221126.1

SEQ ID NO: 223822 - RNA, 1575 nt, Artificial Sequence; identical to SEQ ID NO: 223247
  derived and/or modified CDS sequence (opt5) from glycoprotein__RABV__KT221127.1

SEQ ID NO: 223823 - RNA, 1575 nt, Artificial Sequence; identical to SEQ ID NO: 222918
  derived and/or modified CDS sequence (opt5) from glycoprotein__RABV__KT221128.1

SEQ ID NO: 223824 - RNA, 1575 nt, Artificial Sequence; identical to SEQ ID NO: 222918
  derived and/or modified CDS sequence (opt5) from glycoprotein__RABV__KT221129.1

SEQ ID NO: 223825 - RNA, 1575 nt, Artificial Sequence
  derived and/or modified CDS sequence (opt5) from glycoprotein__RABV__KT221130.1
auggugcccccuguccuucucuucguuccgcugcuguuuuucagcuccugcuuuggcaaguuccccaucuacccuauucccgacaaacuggggccuuggucucccaucgauauucaccaucucaccuguccuaacaaucuggugguggagaacgaaggaugcacaauccuuagcggcuuuuccuauauggagcugaaggucggguacauuucuccgaucaaagugaauggauucacguguaccggcguugugacaaaggccaaaaccuauacaaacuuugucggguacgugaccacaaccuucaagaagaaacacuuucccccuaugcccgacgcuugcaaggccgcguauaauuggaaaauggcuggagauccuagauacgaaaagagccuccauaaccccuauccggacuaccacuggcugcagacgguuaaaaccacaaaggagucccuggugaucauuucuccuagcgucgccaaucucgaucccuacgacaagucccugcauagccggguguucccuggcggcaaauguucugggaucaccguguccagcacaugcuguucuaccaaccacgauuauacgauuuggaugcccgaaaaucccaaacuuggaacauccugcgacaucuuuaccaacagccgcggcaagagagccucuaaagggggaaagacauguggcuucgucgaugagcgggggcuguacaagucccucaaaggagcuugcaagcugaaacuuuguggcguucugggccuccgccugauggacgggaccuggguggccauucaaaccagcgaugagaucaaguggugcuccccugaccagcuggugaaucuccacgauuuucauucugacgaaauugagcaccuggucguggaggaacuuguuaagaaaagagaggaaugccuggacgcucucgagacaaucaugacgaccaagagcguguccuuccggcgccugagccaucuuagaaaacuggucccgggauucggcaaggccuauacaaucuuuaacaagacccucauggaagcggaugcccacuacaaaucuauucggacauggaaugagaucauucccuccaaggggugucugcgcgugggaggcagaugccacccucauguuaacgggguguucuuuaauggaaucauucugggccccgacggccacguccucaucccugaaaugcagagcucucugcuucaucagcacauggagcugcucgagagcuccgugaucccccugaugcauccgcuugcugauccuucuaccgucuucaaagacggggaugaagccgaggacuuuguggaaguucaucugcccgaugugcacaagcaaauuagcggagucgaccucggccugccuaacugggggaaauaugugcugaucuccgcuggagcccucacggcgcugaugcuuaugauuuuccugaugacauguugccggaaggccaaccgcgcugagagcauccagcacaaucccggcgaaaccgggagaaagguuucugugaccucccacaacggccgggucauuagcucuugggaguccuacaaaagcggaggcgagacaaagcucuga

SEQ ID NO: 223826 - RNA, 1575 nt, Artificial Sequence
  derived and/or modified CDS sequence (opt5) from glycoprotein__RABV__KT221132.1
augaucccccaggugcugcuguucguccaccuccuuguuuuuagcuccugcuucggcaaguuuccuauuuacaccaucccggacaaacuggggcccuggucuccuauugauauccaucaccucagcugucccaacaaucuggugguggaggacgaaggaugcacaaaccuuuccggcuucucuuauauggagcugaaggucggguacauuagcgccaucaaagugaauggauuuacguguaccggcguugugacagaagcugagaccuauacaaacuucgucggguacgugaccacaaccuuuaagagaaaacauuuccggccuaugcccgaugccugccgcgcggcuuauaauuggaagauggccggagacccuagauacgaagagucccuccacaacccguaucccgauuaccauuggcugcggacgguuaagaccacaaaagagucucuggugaucauuagcccuuccgucgccgaccucgaucccuacgacaagagccugcacucucgcguguuuccuggcggcaaauguuccgggaucaccgugagcucuacaugcuguuccaccaaucacgauuauacgauuuggaugcccgaaaacccgagacuuggaacaagcugcgacaucuucaccaauucucggggcaagcgcgcuuccaaagggggaaagacauguggcuuugucgaugagagagggcuguacaagagccucaaaggagccugcaagcugaaacuuuguggcguucugggccuccggcugauggacgggaccuggguggcuauucaaaccuccgaugaaaucaaguggugcucuccugaccagcuggugaaccuccaugacuuccacagcgaugagauugagcaucuggucguggaggaacuuguuaaaaagcgcgaagagugccuggacgcccucgaaacaaucaugacgaccaaauccgugagcuuuagacggcugucucaccuucgcaagcugguccccggauucggcaaggcguauacaaucuucaauaaaacccucauggaggccgaugcucacuacaaguccauuagaacauggaacgagaucauuccuagcaaagggugucugcgggugggaggccgcugccauccccacguuaaugggguguuuuucaacggaaucauucugggccccgacggccauguccucaucccugaaaugcagucuagccugcuucaccagcauauggagcugcucgaauccucugugaucccgcugaugcacccccuugccgauccuagcaccgucuuuaaggacggggaugaggcugaagacuucguggagguucaucugcccgaugugcacaaacaaauuuccggagucgaccucggccugccuaauugggggaaguaugugcugaucagcgccggagcgcucacggcccugaugcuuacaauuuuucugaugaccuguugcagaaagaccaaccgggcuggcucuauccagcacucccccggggagacaggcagaaaaguuagcgugaccucucauaacggacgcgucauuuccagcugggaauccuacaagucuggcagcgagacaaaacucuga

SEQ ID NO: 223827 - RNA, 1575 nt, Artificial Sequence; identical to SEQ ID NO: 222899
  derived and/or modified CDS sequence (opt5) from glycoprotein__RABV__KT221133.1

SEQ ID NO: 223828 - RNA, 1575 nt, Artificial Sequence; identical to SEQ ID NO: 222899
  derived and/or modified CDS sequence (opt5) from glycoprotein__RABV__KT221134.1

SEQ ID NO: 223829 - RNA, 1575 nt, Artificial Sequence
  derived and/or modified CDS sequence (opt5) from glycoprotein__RABV__KT221136.1
auggugccccaggcccuccuguucgucccucugcuugcuaucccgcugugcuuuggcaaguuccccauuuacaccaucccugacaaacucgggcccuggagcccuauugauauccaccaucuguccugucccaacaaucuuguuguggaggacgaaggaugcacaaaccugucuggcuuuagcuauauggagcucaaggugggguacauuuccgccaucaaagucaauggauucacguguaccggcgugguuacagaagcggagaccuauacaaacuuugugggguacgucaccacaaccuucaagagaaaacacuuucggccuacgccggaugcuugccgcucugccuauaauuggaagauggccggagaccccagauacgaagagagccugcauaacccuuaucccgauuaccacuggcugcggaccgugaagacaaccaaagaguccuucguuaucauuucuccuagcguggcugaccucgaucccuacgacaagucccugcauagccgcgucuuuccgagaggcaaauguucuggcaucacaguguccagcaccuauugcucuacgaaucacgauuacacaauuuggaugccugaaaacccccggcuugggaccuccugugacaucuucacaaauagccgcggaaagagagccucuaaaggcuccaagaccugcggguuuguggaugagcggggacuguauaagagccucaaaggcgcuuguaagcugaaacuuugcgggguccugggacuccgccugauggacggcaccuggguugccauucaaacauccgaugaaacgaagugguguccucccgaccagcuggugaaccuccacgacuuccauucugaugagaucgagcaccugguggucgaggaacuugugaaaaagagagaagagugccuggacgcgcucgaaagcauuaugaccacaaaauccguuagcuuucggcgccugucucaucuuagaaagcuggugcccggcuucgggaaggccuacaccaucuucaauaaaacacucauggaggcugaugcccacuauaaguccguccggaccuggaacgagaucauuccuagcaaaggaugccugcgcgugggcgggagaugucacccgcauguuaauggaguguuuuucaacggcaucauucuggggcccgacggacacguccucaucccugaaaugcagucuagccugcuucagcaacauauggagcugcucgaauccucugugauuccccugaugcacccucuugcugaucccagcacggucuuuaaggacggcgaugaggccgaagacuucguggagguucaucugccggaugugcacaaacaggucuccggcguggaccucgggcugccuagcuggggaaaguacguucugaugucugcgggcauccucacagcccugaugcuuaugaucuuucugaugaccugcugucggagaaccaaucgcgcugaguccauucagcggagccucggggaaacaggaagaaaggugucugucaccucccagagcggccgcgugaucuccucuugggagagcuauaaauccgggggcgaaacaaagcuguga

SEQ ID NO: 223830 - RNA, 1575 nt, Artificial Sequence; identical to SEQ ID NO: 223028
  derived and/or modified CDS sequence (opt5) from glycoprotein__RABV__KT221138.1

SEQ ID NO: 223831 - RNA, 1575 nt, Artificial Sequence
  derived and/or modified CDS sequence (opt5) from glycoprotein__RABV__KT221139.1
augaucccccaggugcugcuguucgucacccugcuuguuuuuagcuccugcuucggcaaguuuccuauuuacacaaucccggacaaacuggggcccuggucuccuauugauauccaccaucucagcugucccaacaaucuggugguggaggacgaaggaugcacgaaccuuuccggcuucucuuauauggagcugaaggucggguacauuagcgccaucaaagugaauggauuuaccuguacaggcguugugaccgaagcugagacauauaccaacuucgucggguacgugacaaccacguuuaagagaaaacacuuccggccuaugcccgaugccugccgcgcggcuuauaauuggaagauggccggagacccuagauacgaagagucccuccauaacccguaucccgauuaccacuggcugcggaccguuaagacaaccaaagagucucuggugaucauuagcccuuccgucgccgaccucgaucccuacgacaagagccugcauucucgcguguuuccuggcggcaaauguuccgggaucacagugagcucuaccugcuguuccacgaaucacgauuauacaauuuggaugcccgaaaacccgagacuuggaaccagcugcgacaucuucacaaauucucggggcaagcgcgcuuccaaagggggaaagaccuguggcuuugucgaugagagagggcuguacaagagccucaaaggagccugcaagcugaaacuuuguggcguucugggccuccggcugauggacgggaccuggguggcuauucaaacauccgaugaaaucaaguggugcccucccgaccagcuggugaaccuccacgacuuccauucugaugagauugagcaccuggucguggaggaacuuguuaaaaagcgcgaagagugccuggacgcccucgaaacgaucaugaccacaaaaagcguguccuuuagacggcugagccaucuucgcaagcuggucccuggauucggcaaggcguauaccaucuucaauaaaacacucauggaggccgaugcucacuacaagucuauuagaaccuggaacgagaucauucccuccaaagggugucugcgggugggaggccgcugccacccccauguuaaugggguguuuuucaacggaaucauucugggcccugacggccacguccucaucccggaaaugcagagcucucugcuucaucagcacauggagcugcucgaaagcuccgugaucccccugaugcauccucuugccgaucccucuacggucuuuaaggacggggaugaggcugaagacuucguggagguucaccucccugaugugcacaaacaaauuagcggagucgaccucggccugcccaauugggggaaguaugugcugaucuccgccggagcgcucacagcccugaugcuuaccauuuuucugaugaccuguugcagaaagacaaacggcgcugggagcauccagcauucuccgggcgagaccggacggaaaguuuccgugacaagccacaacggcagagucauuucuuccugggaaagcuacaaguccgggucugagacgaaacucuga

SEQ ID NO: 223832 - RNA, 1575 nt, Artificial Sequence; identical to SEQ ID NO: 223831
  derived and/or modified CDS sequence (opt5) from glycoprotein__RABV__KT221140.1

SEQ ID NO: 223833 - RNA, 1575 nt, Artificial Sequence
  derived and/or modified CDS sequence (opt5) from glycoprotein__RABV__KT276368.1
augauccugcaggcccuccuguucgugccccuucugauuagcucccucugccugggcaaguuuccuaucuacaccauuccggacaaacuugggcccuggucuccuaucgauauucaccaucugagcugucccaacaaucucgucguugaggacgaaggaugcacaaaccuguccggcuucucuuauauggagcugaaggugggguacaucagcgcuaucaaagugaauggauuuacguguaccggcgucgugacagaagccgagaccuauacaaacuucguuggguacgugaccacaaccuuuaagagaaaacacuuccggccuauucccgaugcgugccgcgcugccuauaauuggaagauggccggagacccuagauacgaagagucccuccaaaacccguaucccgauuaccauuggcugcggacggucaagaccacaaaagagucucuuaucauuaucagcccuuccguggcugaccuggaucccuacgacaagagccuccacucucgcguuuuuccuggcggcaaaugucuggggauuaccguguccagcacauauugcucuaccaaucaugauuacacgaucuggaugcccgaagaaccgagacuuggaacauccugugacauuuucaccagcucuaagggcaaaaaggccuccaaagggggaaagacaugcggcuuugucgaugaacgggggcuguauaagagccucaaaggagcuuguaagcugaaacugugcggcgugcucggccugcgccuuauggacgggaccuggguguccauccagaccucugaugacacaaagugguguccucccgaccagcuggucaaccuccacgauuuccacagcgacgagaucgagcaucugguuguggaggagcuugugaaaaagagagaagagugccuggaugcccucgaauccauuaugacgaccaagagcgucucuuuucggcgccuguccuaccugagaaaacucgugccuggauucggcaaggcguauacaaucuuuaauaaaacccugauggaggccgacgcucacuacaagagcguucggacauggaacgagauuauccccucuaaagggugccuuaaggugcgcgaaagaugucaucccccugucgauggaguguucuucaauggcauuauccuggggccggacggaaacguucucauccccgagaugcagagcucccugcuucaacagcacauggaacugcucgagucuagcgugauuccucugaugcacccccuggccgauccuuccaccgucuuuaaggaaggcgacgaggcugaggauuucguggaaguccaucuccccgacgugcacaaacagaucagcggcguugaucuggggcuuccgucuuggggaaaguaucugcucaugauugccggcgggcuggcgacgcuggugcuuaucauuugcuccauggccuguugccggcgcacaaaacagaccgagagcagacggagaggaucucgcgaauccgagaagaaagucaccgcugccccucaaacacggaaggugguuagcuccugggaacucuacaagucugagggcgacgcuagacuguga

SEQ ID NO: 223834 - RNA, 1575 nt, Artificial Sequence
  derived and/or modified CDS sequence (opt5) from glycoprotein__RABV__KT336432.1
auggugccccaggcccuccuguucgucccucugcuuguuuuuccgcugugcuucggcaaguuucccaucuacaccauuccugacaaacucgggcccuggagcccuaucgauauucaccaucuguccugucccaacaaucuugugguggaggacgaaggaugcacaaaccugucuggcuucagcuauauggagcucaaggucggguacaucuccgcuauuaaagugaauggauuuacguguaccggcguugugacagaagccgagaccuauacaaacuucgucggguacgugaccacaaccuuuaagagaaaacacuuccggccucugccggaugcgugccgcgcugccuauaauuggaagauggccggagaccccagauacgaagagucucugcauaacccuuaucccgauuaccacuggcuccggacgguuaagaccacaaaagagagccuggugaucaucuccccuucugucgcugaccuugaucccuacgacaagagccugcauucccgcguguuuccgagcggcaaauguucuggcauuaccguguccagcacauucugcucuaccaaucacgauuauacgaucuggaugccugaaaaccccagacucgggacauccugugacauuuuugccaauagccggggaaagcgcgcuucuaaaggcgggaagaccugcggauucgucgaugagagaggccuguacaagucccuuaaaggggccuguaagcugaaacucugcggaguucugggccugcggcucauggacggcacauggguggcgauccaaaccagcgaugaaaccaagugguguccucccgaccagcuggugaacaugcacgacuuucgcuccgaugagauugagcaucuugucguggaggaacugguuaaaaagagagaagagugccucgacgcccuggaaucuaucaugacaacgaaaagcguguccuuccggcgccuuagccaccugagaaagcucguccccggguucggaaaggcuuauaccauuuuuaauaaaacacugauggaggccgaugcucauuacaagucugugcggaccuggaacgagaucaucccuuccaaaggcugccugcgcguugggggaagaugucacccgcacgugaauggcgucuucuuuaacgggauuauccucggacccgacggccaugugcugauuccugaaaugcagagcucucuucugcagcaacacauggagcuccuggaaagcuccgucaucccccuuaugcauccucuggccgaucccucuacaguguucaaggacggcgaugaggcggaagacuuuguugaggugcaccucccggauguccauaaacaggugagcgggguugaccugggacugccuaauuggggcaaguaugugcuccuguccgccgggacccuuauugcucugaugcucaucacguuccugaugacaugcugucggagagucaaccgccccgagagcaccaagcggucucugggaggcaccgggagaaaaguguccgugacaagccagucuggcaagguuaucuccagcugggaauccuacaaaucuggaggcgagacccgccuuuga

SEQ ID NO: 223835 - RNA, 1575 nt, Artificial Sequence
  derived and/or modified CDS sequence (opt5) from glycoprotein__RABV__KT336433.1
auggugccccaggcccuucucuucgucccucugcuuguuuuuagccugugcuucggcaaguuuccgaucuacaccauucccgacaaacucgggccuuggucccccaucgauauucaccaucugucuuguccuaacaaucuugugguggaggacgaaggaugcacaaaccugagcggcuucuccuauauggagcucaaggucggguacaucucugcuauuaaagugaauggauuuacguguaccggcguugugacagaagccgagaccuauacaaacuucgucggguacgugaccacaaccuuuaagagaaaacacuuccggcccaucccugaugcgugccgcgcugccuauaauuggaagauggccggagacccgagauacgaagagagccugcauaaccccuauccugauuaccacuggcugcggacgguuaagaccacaaaagagucccucgugaucauuucucccagcgucgcugaccuggauccuuacgacaagucccuucauagccgcguguuucccucuggcaaauguuccggcaucaccgugagcucuacauauugcuccaccaaucacgauuacacgauuuggaugccggaaaacccuagacuggggacaagcugugacaucuucgccaauucucggggaaagcgcgcuuccaaaggcgggaagaccugcggauuugucgaugagagaggccucuauaagagccugaaaggggccuguaagcugaaacugugcggaguucucggccugcggcugauggacggcacauggguggcgaugcaaaccuccgaugaaaccaaguggugucccccugaccagcucgugaacaugcacgacuuccgcucugaugagauugagcaucuggucguggaggaacuuguuaaaaagagagaagagugccuggacgcccucgaaagcaucauuacaacgaaagcuguguccuuucggcgccugagccaccuuagaaagcugguccccggguucggaaaggccuacaccaucuucaauaaaacacucauggaggcugaugcccauuauaagucugugcggaccuggaacgagaucauucccuccaaaggcugccugcgcguugggggaagaugucacccucacgugaauggcgucuuuuucaacgggaucauucugggaccggacggccgggugcucauccccgaaaugcagagcucucugcuucagcaacauauggagcugcucgaaagcuccgucauuccucugaugcacccccuugcggauccuucuacaguguuuaaggacggcgaugaggccgaagacuucguugaggugcaucugcccgauguccacaaacaggugagcgggguugaccucggacugccgaauuggggcaaguacgugcugcucuccgcugggacccugaucgcccuuaugcugacgaucuuucucauuacaugcuguagacgcgucaaccggccugaguucacccagagaagccugggaggcaccgggcgcaaggugucugugacaucccagagcggcaaaguuaucucuuccugggaaagcuauaaguccggaggcgagacccggcuguga

SEQ ID NO: 223836 - RNA, 1575 nt, Artificial Sequence
  derived and/or modified CDS sequence (opt5) from glycoprotein__RABV__KT336434.1
auggugccccaggcccuucucuucgucccucugcuuguuuuuagccugugcuucggcaaguuuccgaucuacaccauucccgacaaacucgggccuuggucccccaucgauauucaccaucugucuuguccuaacaaucuugugguggaggacgaaggaugcacaaaccugagcggcuucuccuauauggagcucaaggucggguacaucucugcuauuaaagugaauggauuuacguguaccggcguugugacagaagccgagaccuauacaaacuucgucggguacgugaccacaaccuuuaagagaaaacacuuccggcccaucccugaugcgugccgcgcugccuauaauuggaagauggccggagacccgagauacgaagagagccugcauaaccccuauccugauuaccacuggcugcggacgguuaagaccacaaaagagucccucgugaucauuucucccagcgucgcugaccuggauccuuacgacaagucccuucauagccgcguguuucccucuggcaaauguuccggcaucaccgugagcucuacauucugcuccaccaaucacgauuauacgauuuggaugccggaaaacccuagacuggggacaagcugugacaucuuugccaauucucggggaaagcgcgcuuccaaaggcgggaagaccugcggauucgucgaugagagaggccucuacaagagccugaaaggggccuguaagcugaaacugugcggaguucucggccugcggcugauggacggcacauggguggcgaugcaaaccuccgaugaaaccaaguggugucccccugaccagcucgugaacaugcacgacuuucgcucugaugagauugagcaucuggucguggaggaacuuguuaaaaagagagaagagugccuggacgcccucgaaagcaucaugacaacgaaauccgugagcuuccggcgccugucucaccuuagaaagcugguccccggguucggaaaggcuuauaccauuuuuaauaaaacacucauggaggccgaugcucauuacaaguccgugcggaccuggaacgagaucauccccagcaaaggcugccugcgcguugggggaagaugucacccucacgugaauggcgucuucuuuaacgggauuauccugggaccggacggccaugugcucauucccgaaaugcagucuagccugcuucagcaacacauggagcugcucgaauccucugucaucccucugaugcauccccuugccgauccuagcacaguguucaaggacggcgaugaggcggaagacuuuguugaggugcaucugcccgauguccacaaacagguguccgggguugaccucggacugccgaauuggggcaaguaugugcugcucagcgccgggacccugauugcucuuaugcugaucaucuuccucaugacgugcugucggagagucaaccgcccugagucuacagaucggucccugggaggcaccgggagaaaggugagcgugaccucucaguccggcaaaguuauuagcuccugggaaucuuacaagagcggaggcgagacacgccuguga

SEQ ID NO: 223837 - RNA, 1575 nt, Artificial Sequence
  derived and/or modified CDS sequence (opt5) from glycoprotein__RABV__KT336435.1
auggugccccaggcccuccuguuccugccucuucuggucuuuccgcucugcuucggcaaguuucccaucuacaccauuccugacaaacuggggcccuggagcccuaucgauauucaccaucuuuccugucccaacaaucugguuguggaggacgaaggaugcacaaaccucucuggcuucagcuauauggagcugaaggugggguacaucuccgcuauuaaagucaauggauuuacguguaccggcgugguuacagaagccgagaccuauacaaacuucgugggguacgucaccacaaccuuuaagagaaaacacuuccggccuaucccggaugcgugccgcgcugccuauaauuggaagauggccggagaccccagauacgaagagucucugcauaacccuuaucccgauuaccacuggcuccggacggugaagaccacaaaagagagccugguuaucauuuccccuucuguggcugaccuugaucccuacgacaagagccugcauucccgcgucuuuccgagcggcaaauguucuggcaucaccguguccagcacauucugcucuaccaaucacgauuauacgauuuggaugccugaaaaccccagacucgggacauccugugacaucuuugccaauagccggggaaagcgcgcuucuaaaggcgggaagaccugcggauucguggaugagagaggccuguacaagucccuuaaaggggccuguaagcugaaacucugcggaguccugggccugcggcucauggacggcacauggguugcgaugcaaaccagcgaugaaaccaagugguguccucccgaccagcuggugaacauucacgacuuucgcuccgaugagaucgagcaucuuguggucgaggaacuggugaaaaagagagaagagugccucgacgcccuggaaucuauuaugacaacgaaaagcguuuccuuccggcgccuuagccaccugagaaagcucgugcccggguucggaaaggcuuauaccaucuuuaauaaaacacugauggaggccgaugcucauuacaagucuguccggaccuggaacgagaucauuccuuccaaaggcugccugcgcguugggggaagaugucacccgcacgugaauggcguguucuuuaacgggaucauucucggacccgacggccauguccugaucccugaaaugcagagcucucuucugcagcaacacauggagcuccuggaaagcuccgugauuccccuuaugcauccucuggccgaucccucuacagucuucaaggacggcgaugaggcggaagacuuuguggagguucaccucccggaugugcauaaacaggucagcgggguggaccugggacugccuaauuggggcaaguauguucuccuguccgccgggacccuuaucgcucugaugcucaucauuuuccugaugacgugcugucggagagugaaccgccccgagagcacagaacggucucugggaagaaccggccgcaaggucuccgugaccagccagucugggaaagugaucuccagcugggaguccuacaagucuggcggagaaacacggcuuuga

SEQ ID NO: 223838 - RNA, 1575 nt, Artificial Sequence
  derived and/or modified CDS sequence (opt5) from glycoprotein__RABV__KT336436.1
auggugccccaggcccuucucuucgucccucugcuuguuuuuccgcugugcuucggcaaguuucccaucuacaccauuccugacaaacucgggcccuggagcccuaucgauauucaccaucuguccugucccaacaaucuugugguggaggacgaaggaugcacaaaccugucuggcuucagcuauauggagcucaaggucggguacaucuccgcuauuaaagugaauggauuuacguguaccggcguugugacagaagccgagaccuauacaaacuucgucggguacgugaccacaaccuuuaagagaaaacacuuccggccuaucccggaugcgugccgcgcugccuauaauuggaagauggccggagaccccagauacgaagagucucugcauaacccuuaucccgauuaccacuggcugcggacgguuaagaccacaaaagagagccucgugaucauuuccccuucugucgcugaccuggaucccuacgacaagagccuucauucccgcguguuuccgagcggcaaauguucuggcaucaccguguccagcacauucugcucuaccaaucacgauuauacgauuuggaugccugaaaaccccagacuggggacauccugugacaucuuugccaauagccggggaaagcgcgcuucuaaaggcgggaagaccugcggauucgucgaugagagaggccucuacaagucccugaaaggggccuguaagcugaaacugugcggaguucucggccugcggcugauggacggcacauggguggcgaugcaaaccagcgaugaaaccaagugguguccucccgaccagcucgugaacaugcacgacuuucgcuccgaugagauugagcaucuggucguggaggaacuuguuaaaaagagagaagagugccuggacgcccucgaaucuaucaugacaacgaaaagcguguccuuccggcgccugagccaccuuagaaagcugguccccggguucggaaaggcuuauaccauuuuuaauaaaacacucauggaggccgaugcucauuacaagucugugcggaccuggaacgagaucaucccuuccaaaggcugccugcgcguugggggaagaugucacccgcacgugaauggcgucuucuuuaacgggauuauccugggacccgacggccaugugcucauuccugaaaugcagagcucucugcuucagcaacacauggagcugcucgaaagcuccgucaucccccugaugcauccucuugccgaucccucuacaguguucaaggacggcgaugaggcggaagacuuuguugaggugcaucugccggauguccacaaacaggugagcgggguugaccucggacugccuaauuggggcaaguaugugcugcucuccgccgggacccugauugcucuuaugcugaucacguuccucaugacaugcugucggagagucaaccgccccgagagcaccaagcggagacugggaggcaccgggcgcaaagugucugugacaucccagagcggcaagguuaucucuuccugggaaagcuacaaauccggaggcgagacccggcuguga

SEQ ID NO: 223839 - RNA, 1575 nt, Artificial Sequence
  derived and/or modified CDS sequence (opt5) from glycoprotein__RABV__KT336437.1
auggugccccaggcccuccuguuccugccucuucuggucuuuccgcucugcuucggcaaguuucccaucuacaccauuccugacaaacuggggcccuggagcccuaucgauauucaccaucuuaacugucccaauaaccugguuguggaggacgaaggaugcacaaaucucuccggcuucucuuauauggagcugaaggugggguacaucagcgcuauuaaagucaacggauuuacguguaccggcgugguuacagaagccgagaccuauacaaauuucgugggguacgucaccacaaccuuuaagagaaaacacuuccggccuaucccggaugcgugccgcgcugccuauaacuggaagauggccggagaccccagauacgaagagucccugcauaauccuuaucccgauuaccacuggcuccggacggugaagaccacaaaagagucucugguuaucauuagcccuuccguggcugaccuugaucccuacgacaagucucugcauagccgcgucuuuccguccggcaaauguagcggcaucaccgugucuuccacauucugcagcaccaaccacgauuauacgauuuggaugccugaaaaucccagacucgggacaucuugugacaucuuugccaacucccggggaaagcgcgcuagcaaaggcgggaagaccugcggauucguggaugagagaggccuguacaagucucuuaaaggggccuguaagcugaaacucugcggaguccugggccugcggcucauggacggcacauggguugcgaugcaaaccuccgaugaaaccaagugguguccucccgaccagcuggugaauauucacgacuuucgcagcgaugagaucgagcaucuuguggucgaggaacuggugaaaaagagagaagagugccucgacgcccuggaauccauuaugacaacgaaaucuguuagcuuccggcgccuuucccaccugagaaagcucgugcccggguucggaaaggcuuauaccaucuuuaacaaaacacugauggaggccgaugcucauuacaagagcguccggaccuggaaugagaucauuccuucuaaaggcugccugcgcguugggggaagaugucacccgcacgugaacggcguguucuuuaaugggaucauucucggacccgacggccauauccugauuccugaaaugcaguccagccuucugcagcaacacauggagcuccuggaaucuagcgucaucccccuuaugcauccucuggccgaucccuccacaguguucaaggacggcgaugaggcggaagacuuugucgaggugcaccucccggauguucauaaacaggugucuggggucgaccugggacugccuaacuggggcaaguaugugcuccugagcgccgggacccuuaucgcucugaugcucauuaucuuccugaugacgugcugucggagaguuaaccgccccgaguccacagaacggagccugggaggcaccgggagaaaggugucugucaccucccagagcggcaaagugauuucuuccugggagagcuacaaguccggaggcgaaacacgccuuuga

SEQ ID NO: 223840 - RNA, 1575 nt, Artificial Sequence
  derived and/or modified CDS sequence (opt5) from glycoprotein__RABV__KU198460.1
auggugccccaggcccugcuguucgucccucugcuugcuuuuccgaugugcuucggcaaguuucccaucuacaccauuccugacaaacuggggcccuggagcccuaucgauauucaccaucucuccugucccaacaaucugguuguggaggacgaaggaugcacaaaccuuucuggcuucagcuauauggagcugaaggugggguacaucuccgccauuaaagucaauggauuuacguguaccggcgugguuacagaagcggagaccuauacaaacuucgugggguacgucaccacaaccuuuaagagaaaacacuuccggccuacgccggaugcuugccgcgccgccuauaauuggaagauggcuggagaccccagauacgaagagucucuccauaacccuuaucccgauuaccacuggcugcggaccgugaagacaaccaaagagagccugaucaucauuuccccuucuguugccgaccucgaucccuacgacaagagccugcauucccgcguguuuccgagcggcaaaugucuuggcaucacaauuucuuccaccuauugcagcacgaaucacgauuacacaaucuggaugccugaaaaccugagacucgggaccucuugugacauuuucacaaauucccggggaaagcgcgcuagcaaaggcucuaagaccugcggguuugucgaugagagaggacuguauaagucccuuaaaggcgccuguaagcugaaacucugcggggugcugggacugcggcucauggacggcaccuggguggcgaugcaaacaagcgaugaaacgaagugguguucccccgaccagcuggucaaccuucacgacuuccgcucugaugagaucgagcaucugguuguggaggaacucgugaaaaagagagaagagugccuggacgcccuugaaagcauuaugaccacaaaauccgucagcuuucggcgccugucucaccucagaaagcuggugccuggcuucgggaaggcuuacaccaucuucaauaaaacacugauggaggccgaugcucauuauaaguccguucggaccuggagcgagaucauucccucuaaaggaugccuccgcgugggcgggagaugucacccccacgucaacggaguguuuuucaauggcaucauucuggggccugacggacauguucuuaucccggaaaugcagagcucccugcuccagcaacacauggagcugcuugaaucuagcgugauuccccugaugcauccucucgccgaucccuccacggucuuuaaggacggcgaugaggcggaagacuucguggagguccaccucccugaugugcauaaacagaucagcggcguugaccuggggcuccccaacuggggacgguacgugcugaucauugccggcguccuuaucgcuaugauucugacaaucuuucucaugaccugcugugggagaggaaaucgcccgaagucuacccagcacucccugggcgggauuggccggaaggugagcgccacaucucaguccggaaaaguuaucagcuccugggagucuuauaagagcggcggggaaaccagacuguga

SEQ ID NO: 223841 - RNA, 1575 nt, Artificial Sequence
  derived and/or modified CDS sequence (opt5) from glycoprotein__RABV__KU198461.1
auggugccgcaggcccugcuguucgucccucugcuugcuuuuccgaugugcuucggcaaguuucccaucuacaccauuccugacaaacuggggcccuggagcccuaucgauauucaccaucucuccugucccaacaaucugguuguggaggacgaaggaugcacaaaccuuucuggcuucagcuauauggagcugaaggugggguacaucuccgccauuaaagucaauggauuuacguguaccggcgugguuacagaagcggagaccuauacaaacuucgugggguacgucaccacaaccuuuaagagaaaacacuuccggccuacgccggaugcuugccgcgccgccuauaauuggaagauggcuggagaccccagauacgaagagucucuccauaacccuuaucccgauuaccacuggcugcggaccgugaagacaaccaaagagagccugaucaucauuuccccuucuguugccgaccucgaucccuacgacaagagccugcauucccgcguguuuccgagcggcaaaugucuuggcaucacaauuucuuccaccuauugcagcacgaaucacgauuacacaaucuggaugccugaaaaccugagacucgggaccucuugugacauuuucacaaauucccggggaaagcgcgcuagcaaaggcucuaagaccugcggguuugucgaugagagaggacuguauaagucccuuaaaggcgccuguaagcugaaacucugcggggugcugggacugcggcucauggacggcaccuggguggcgaugcaaacaagcgaugaaacgaagugguguucccccgaccagcuggucaaccuucacgacuuccgcucugaugagaucgagcaucugguuguggaggaacucgugaaaaagagagaagagugccuggacgcccuugaaagcauuaugaccacaaaauccgucagcuuucggcgccugucucaccucagaaagcuggugccuggcuucgggaaggcuuacaccaucuucaauaaaacacugauggaggccgaugcucauuauaaguccguucggaccuggaacgagaucauucccagcaaaggaugccuccgcgugggcgggagaugucacccccacgucaauggaguguuuuucaacggcaucauucuggggccugacggacauguucuuaucccggaaaugcagucuagccugcuccagcaacacauggagcugcuugaauccucugugauuccccugaugcauccucucgccgaucccagcacggucuuuaaggacggcgaugaggcggaagacuucguggagguccaccucccugaugugcauaaacagaucuccggcguugaccuggggcuccccaauuggggaaaguacgugcugaucauugccggcguccuuaucgcuaugauucugacaaucuuucucaugaccugcugugggcggggaaacagacccaagagcacccagcacucucugggcgggauuggccgcaaaguguccgccacaagccagucuggaaagguuaucuccagcugggaguccuauaaaucuggcggggaaacccggcuguga

SEQ ID NO: 223842 - RNA, 1575 nt, Artificial Sequence
  derived and/or modified CDS sequence (opt5) from glycoprotein__RABV__KU198462.1
auggugccccaggcccugcuguucgucccucugcuugcuuuuccgaugugcuucggcaaguuucccaucuacaccauuccugacaaacuggggcccuggagcccuaucgauauucaccaucucuccugucccaacaaucugguuguggaggacgaaggaugcacaaaccuuucuggcuucagcuauauggagcugaaggugggguacaucuccgccauuaaagucaauggauuuacguguaccggcgugguuacagaagcggagaccuauacaaacuucgugggguacgucaccacaaccuuuaagagaaaacacuuccggccuacgccggaugcuugccgcgccgccuauaauuggaagauggcuggagaccccagauacgaagagucucuccauaacccuuaucccgauuaccacuggcugcggaccgugaagacaaccaaagagagccugaucaucauuuccccuucuguugccgaccucgaucccuacgacaagagccugcauucccgcguguuuccgagcggcaaaugucuuggcaucacaauuucuuccaccuauugcagcacgaaucacgauuacacaaucuggaugccugaaaaccugagacucgggaccucuugugacauuuucacaaauucccggggaaagcgcgcuagcaaaggcucuaagaccugcggguuugucgaugagagaggacuguauaagucccuuaaaggcgccuguaagcugaaacucugcggggugcugggacugcggcucauggacggcaccuggguggcgaugcaaacaagcgaugaaacgaaguggugucccccugaccagcuggucaaccuucacgacuuccgcuccgaugagaucgagcaucugguuguggaggaacucgugaaaaagagagaagagugccuggacgcccuugaaucuauuaugaccacaaaaagcgucuccuuucggcgccugagccaccucagaaagcuggugcccggcuucgggaaggcuuacaccaucuucaauaaaacacugauggaggccgaugcucauuauaagucuguucggaccuggaacgagaucauucccuccaaaggaugccuccgcgugggcgggagaugucacccucacgucaauggaguguuuuucaacggcaucauucuggggccggacggacauguucuuauccccgaaaugcagagcucucugcuccagcaacacauggagcugcuugaaagcuccgugauuccucugaugcauccccucgccgauccuucuacggucuuuaaggacggcgaugaggcggaagacuucguggagguccaccuccccgaugugcauaaacagaucagcggcguugaccuggggcucccgaauuggggaaaguacgugcugaucauugccggcguccuuaucgcuaugauucugacaaucuuucucaugaccugcugugggcggggaaacagaccuaaguccacccagcacagccccggcgggauuggccgcaaagugucugccacaucccagagcggaaagguuaucucuuccugggagagcuauaaauccggcggggaaacccggcuguga

SEQ ID NO: 223843 - RNA, 1575 nt, Artificial Sequence
  derived and/or modified CDS sequence (opt5) from glycoprotein__RABV__KU198463.1
auggugccccaggcccugcuguucgucccucugcuugcuuuuccgaugugcuucggcaaguuucccaucuacaccauuccugacaaacuggggcccuggagcccuaucgauauucaccaucucuccugucccaacaaucugguuguggaggacgaaggaugcacaaaccuuucuggcuucagcuauauggagcugaaggugggguacaucuccgccauuaaagucaauggauuuacguguaccggcgugguuacagaagcggagaccuauacaaacuucgugggguacgucaccacaaccuuuaagagaaaacacuuccggccuacgccggaugcuugccgcgccgccuauaauuggaagauggcuggagaccccagauacgaagagucucuccauaacccuuaucccgauuaccacuggcugcggaccgugaagacaaccaaagagagccugaucaucauuuccccuucuguugccgaccucgaucccuacgacaagagccugcauucccgcguguuuccgagcggcaaaugucuuggcaucacaauuucuuccaccuauugcagcacgaaucacgauuacacaaucuggaugccugaaaaccugagacucgggaccucuugugacauuuucacaaauucccggggaaagcgcgcuagcaaaggcucuaagaccugcggguuugucgaugagagaggacuguauaagucccuuaaaggcgccuguaagcugaaacucugcggggugcugggacugcggcucaucgacggcaccuggguggcgaugcaaacaagcgaugaaacgaaguggugucccccugaccagcuggucaaccuucacgacuuccgcuccgaugagauugagcaucugguuguggaggaacucgugaaaaagagagaagagugccuggacgcccuugaaucuaucaugaccacaaaaagcgucuccuuucggcgccugagccaccucagaaagcuggugcccggcuucgggaaggcuuacaccaucuucaauaaaacacugauggaggccgaugcucauuauaagucuguucggaccuggaacgagauuauccccuccaaaggaugccuccgcgugggcgggagaugucacccucacgucaauggaguguuuuucaacggcauuauccuggggccggacggacauguucuuauucccgaaaugcagagcucucugcuccagcaacacauggagcugcuugaaagcuccgugaucccucugaugcauccccucgccgauccuucuacggucuuuaaggacggcgaugaggcggaagacuucguggagguccaccuccccgaugugcauaaacagaucagcggcguugaccuggggcucccgaauuggggaaaguacgugcugauuaucgccggcguccuuauugcuaugauccugacaauuuuucucaugaccugcugugggcggggaaacagaccuaaguccacccagcacagccugggcgggaucggccgcaaagugucugccacaucccagagcggaaagguuaucucuuccugggagagcuauaaauccggcggggaaacccggcuguga

SEQ ID NO: 223844 - RNA, 1575 nt, Artificial Sequence
  derived and/or modified CDS sequence (opt5) from glycoprotein__RABV__KU198464.1
auggugccccaggcccugcuguucgucccucugcuugcuuuuccgaugugcuucggcaaguuucccaucuacaccauuccugacaaacuggggcccuggagcccuaucgauauucaccaucucuccugucccaacaaucugguuguggaggacgaaggaugcacaaaccuuucuggcuucagcuauauggagcugaaggugggguacaucuccgccauuaaagucaauggauuuacguguaccggcgugguuacagaagcggagaccuauacaaacuucgugggguacgucaccacaaccuuuaagagaaaacacuuccggccuacgccggaugcuugccgcgccgccuauaauuggaagauggcuggagaccccagauacgaagagucucuccauaacccuuaucccgauuaccacuggcugcggaccgugaagacaaccaaagagagccugaucaucauuuccccuucuguugccgaccucgaucccuacgacaagagccugcauucccgcguguuuccgagcggcaaaugucuuggcaucacaauuucuuccaccuauugcagcacgaaucacgauuacacaaucuggaugccugaaaaccugagacucgggaccucuugugacauuuucacaaauucccggggaaagcgcgcuagcaaaggcucuaagaccugcggguuugucgaugagagaggacuguauaagucccuuaaaggcgccuguaagcugaaacucugcggggugcugggacugcggcucauggacggcaccuggguggcgaugcaaacaagcgaugaaacgaaguggugucccccugaccagcuggucaaccuucacgacuuccgcuccgaugagaucgagcaucugguuguggaggaacucgugaaaaagagagaagagugccuggacgcccuugaaucuauuaugaccacaaaaagcgucuccuuucggcgccugagccaccucagaaagcuggugcccggcuucgggaaggcuuacaccaucuucaauaaaacacugauggaggccgaugcucauuauaagucuguucggaccugguccgagaucauucccagcaaaggaugccuccgcgugggcgggagaugucacccucacgucaacggaguguuuuucaauggcaucauucuggggccggacggacauguucuuauccccgaaaugcagucuagccugcuccagcaacacauggagcugcuugaauccucugugauuccucugaugcauccccucgccgauccuagcacggucuuuaaggacggcgaugaggcggaagacuucguggagguccaccuccccgaugugcauaaacagaucuccggcguugaccuggggcucccgaacuggggaaaguacgugcugaucauugccggcguccuuaucgcuaugauucugacaaucuuucucaugaccugcugugggcggugcaauagaccuaagagcacccagcacucucugggaggcauugggcgcaaaguguccgccacaagccagucuggcaagguuaucuccagcugggaguccuauaaaucuggaggcgaaacccggcuguga

SEQ ID NO: 223845 - RNA, 1575 nt, Artificial Sequence
  derived and/or modified CDS sequence (opt5) from glycoprotein__RABV__KU198465.1
auggugccccaggcccugcuccuggucccucuucuggcuuucccgaugugcuuuggcaaguuccccaucuacaccauuccugacaaacucgggcccuggagcccuaucgauauucaccaucuguccugucccaacaaucuuguuguggaggacgaaggaugcacaaaccugucuggcuuuagcuauauggagcucaaggugggguacaucuccgccauuaaagucaauggauucacguguaccggcgugguuacagaagcggagaccuauacaaacuuugugggguacgucaccacaaccuucaagagaaaacacuuucggccuacgccggaugcuugccgcgccgccuauaauuggaagauggcuggagaccccagauacgaagagucucugcauaacccuuaucccgauuaccacuggcugcggaccgugaagacaaccaaagagagccucaucaucauuuccccuucuguugccgaccuggaucccuacgacaagagccuucauucccgcguguucccgagcggcaaaugucugggcaucacaauuucuuccaccuauugcagcacgaaucacgauuacacaaucuggaugccugaaaaccucagacuggggaccucuugugacauuuuuacaaauucccggggaaagcgcgcuagcaaaggcucuaagaccugcggguucgucgaugagagaggacuuuauaagucccugaaaggcgccuguaagcucaaacugugcggggugcugggacuccggcugauggacggcaccuggguggcgaugcaaacaagcgaugaaacgaaguggugucccccugaccagcuugucaaccugcacgacuuucgcuccgaugagaucgagcaucucguuguggaggaacuggugaaaaagagagaagagugccuugacgcccuggaaucuauuaugaccacaaaaagcgucuccuuccggcgccucagccaccugagaaagcuggugcccggcuuugggaaggcuuacaccaucuucaauaaaacacucauggaggccgaugcucauuauaagucuguucggaccugguccgagaucauucccagcaaaggaugccugcgcgugggcgggagaugucacccucacgucaacggaguguucuuuaauggcaucauucuugggccggacggacauguucugauccccgaaaugcagucuagccuccugcagcaacacauggagcuucuggaauccucugugauuccucucaugcauccccuggccgauccuagcacggucuucaaggacggcgaugaggcggaagacuuuguggagguccaucugcccgaugugcacaaacagaucuccggcguugaccucgggcugccgaacuggggaaaguacgugcuuaucauugccggcguccugaucgcuaugauucucacaaucuuccugaugaccugcugugggcggggaaauagaccuaagagcacccagcacucucugggcgggauuggccgcaaaguguccgccacaagccagucuggaaagguuaucuccagcugggaguccuauaaaucuggcagcgaaacccggcuuuga

SEQ ID NO: 223846 - RNA, 1575 nt, Artificial Sequence; identical to SEQ ID NO: 223556
  derived and/or modified CDS sequence (opt5) from glycoprotein__RABV__KU198466.1

SEQ ID NO: 223847 - RNA, 1575 nt, Artificial Sequence; identical to SEQ ID NO: 223556
  derived and/or modified CDS sequence (opt5) from glycoprotein__RABV__KU198467.1

SEQ ID NO: 223848 - RNA, 1575 nt, Artificial Sequence
  derived and/or modified CDS sequence (opt5) from glycoprotein__RABV__KU198468.1
auggugccccaggcccugcuguucgucccucugcuugcuuuuccgaugugcuucggcaaguuucccaucuacaccauuccugacaaacuggggcccuggagcccuaucgauauucaccaucucuccugucccaacaaucugaucguugaggacgaaggaugcacaaaccuuucuggcuucagcuauauggagcugaaggugggguacauuuccgccaucaaagugaauggauuuacguguaccggcgucgugacagaagcggagaccuauacaaacuucguuggguacgugaccacaaccuuuaagagaaaacacuuccggccuacgccggaugcuugccgcgccgccuauaauuggaagauggcuggagaccccagauacgaagagucucuccauaacccuuaucccgauuaccacuggcugcggaccgucaagacaaccaaagagagccugaucauuaucuccccuucuguggccgaccucgaucccuacgacaagagccugcauucccgcguuuuuccgagcggcaaaugucuuggcauuacaaucucuuccaccuauugcagcacgaaucacgauuacacaauuuggaugccugaaaaccugagacucgggaccucuugugacaucuucacaaauucccggggaaagcgcgcuagcaaaggcucuaagaccugcggguuuguggaugagagaggacuguauaagucccuuaaaggcgccuguaagcugaaacucugcgggguccugggacugcggcucauggacggcaccuggguggcgaugcaaacaagcgaugaaacgaaguggugucccccuaaccagcuggugaaucuucacgacuuccgcuccgacgagauugagcaucuggucguugaggaacucgugaaaaagagagaagagugccuggaugcccuugaaucuaucaugaccacaaaaagcguguccuuucggcgccugagccaccucagaaagcugguccccggcuucgggaaggcuuacaccaucuucaacaaaacacugauggaggccgacgcucauuauaagucugugcggaccuggaaugagauuauccccuccaaaggaugccuccgcguuggcgggagaugucacccucacgugaacggagucuuuuucaauggcauuauccuggggccggauggacaugugcuuauucccgaaaugcagagcucucugcuccagcaacacauggagcugcuugaaagcuccguuaucccucugaugcauccccucgccgacccuucuacgguguuuaaggauggcgacgaggcggaagauuucgucgaggugcaccuccccgacguccauaaacagaucagcggcguggaucuggggcucccgaacuggggaaaguacguucugauuaucgccggcgugcuuauugcuaugauccugacaauuuuucucaugaccugcugugggcggggaaacagaccuaaguccacccagcacagccugggcgggaucggccgcaaagucucugccacaucccagagcggaaaggugaucucuuccugggagagcuauaaauccggcggggaaacccggcuguga

SEQ ID NO: 223849 - RNA, 1575 nt, Artificial Sequence
  derived and/or modified CDS sequence (opt5) from glycoprotein__RABV__KU198469.1
auggugccccaggcccugcuguucgucccucugcuugcuuuuccgaugugcuucggcaaguuucccaucuacaccauuccugacaaacuggggcccuggagcccuaucgauauucaccaucucuccugucccaacaaucugguuguggaggacgaaggaugcacaaaccuuucuggcuucagcuauauggagcugaaggugggguacaucuccgccauuaaagucaauggauuuacguguaccggcgugguuacagaagcggagaccuauacaaacuucgugggguacgucaccacaaccuuuaagagaaaacacuuccggccuacgccggaugcuugccgcgccgccuauaauuggaagauggcuggagaccccagauacgaagagucucuccauaacccuuaucccgauuaccacuggcugcggaccgugaagacaaccaaagagagccugaucaucauuuccccuucuguugccgaccucgaucccuacgacaagagccugcauucccgcguguuuccgagcggcaaaugucuuggcaucacaauuucuuccaccuauugcagcacgaaucacgauuacacaaucuggaugccugaaaaccugagacucgggaccucuugugacauuuucacaaauucccggggaaagcgcgcuagcaaaggcucuaagaccugcggguuugucgaugagagaggacuguauaagucccuuaaaggcgccuguaagcugaaacucugcggggugcugggacugcggcucauggacggcaccuggguggcgaugcaaacaagcgaugaaacgaaguggugucccccugaccagcuggucaaccuucacgacuuccgcuccgaugagaucgagcaucugguuguggaggaacucgugaaaaagagagaagagugccuggacgcccuugaaucuauuaugaccacaaaaagcgucuccuuucggcgccugagccaccucagaaagcuggugcccggcuucgggaaggcuuacaccaucuucaauaaaacacugauggaggccgaugcucauuauaagucuguucggaccuggaacgagaucauucccuccaaaggaugccuccgcgugggcgggagaugucacccucacgucaauggaguguuuuucaacggcaucauucuggggccggacggacauguucuuauccccgaaaugcagagcucucugcuccagcaacacauggagcugcuugaaagcuccgugauuccucugaugcauccccucgccgauccuucuacggucuuuaaggacggcgaugaggcggaagacuucguggagguccaccuccccgaugugcauaaacagaucagcggcguugaccuggggcucccgaauuggggaaaguacgugcugaucauugccggcguccuuaucgcuaugauucugacaaccuuucucaugaccugcugugggcggggaaacagaccuaaguccacacagcacagccugggcgggaucggccgcaaagugucugccaccucccagagcggaaagguuauuucuuccugggagagcuauaaauccggcggggaaacacggcuguga

SEQ ID NO: 223850 - RNA, 1575 nt, Artificial Sequence; identical to SEQ ID NO: 223546
  derived and/or modified CDS sequence (opt5) from glycoprotein__RABV__KU198470.1

SEQ ID NO: 223851 - RNA, 1575 nt, Artificial Sequence; identical to SEQ ID NO: 223547
  derived and/or modified CDS sequence (opt5) from glycoprotein__RABV__KU198471.1

SEQ ID NO: 223852 - RNA, 1575 nt, Artificial Sequence
  derived and/or modified CDS sequence (opt5) from glycoprotein__RABV__KU198472.1
auggugccccaggcccugcucuuugucccucugcuugcuuuuccgaugugcuucggcaaguuucccaucuacaccauuccugacaaacuggggcccuggagcccuaucgauauucaccaucucuccugucccaacaaucugguuguggaggacgaaggaugcacaaaccuuucuggcuucagcuauauggagcugaaggugggguacaucuccgccauuaaagucaauggauuuacguguaccggcgugguuacagaagcggagaccuauacaaacuucgugggguacgucaccacaaccuuuaagagaaaacacuuccggccuacgccggaugcuugccgcgccgccuauaauuggaagauggcuggagaccccagauacgaagagucucuccauaacccuuaucccgauuaccacuggcugcggaccgugaagacaaccaaagagagccugaucaucauuuccccuucuguuagcgaccucgaucccuacgacaagucccugcauagccgcguguuuccgucuggcaaaugucuuggcaucacaauuuccagcaccuauugcucuacgaaucacgauuacacaaucuggaugccugaaaacgucagacuggggaccuccugugacauuuucacaaauagccggggaaagcgcgccucuaaaggcuccaagaccugcggguuuguggaugagagaggacucuauaagagccugaaaggcgcuuguaagcugaaacugugcggggugcucggacugcggcugauggacggcaccugggucuccaugcccacaucugaugaaacgaagugguguccucccgaccaacucguuaaccugcacgacuuccgcagcgaugagaucgagcaucuugugguggaggaacuggucagaaaacgggaagagugccucgacgcccuggaauccauuaugaccacaaagagcgugucuuuucgcagacuuucccaccuucggaaacucguucccggcuucgggaaggcguacaccaucuucaauaagacacugauggaggccgaugcucauuauaaaagcgugcgcaccuggucugagaucauuccuagcaagggaugccugagagucggcgggcggugucacccgcacgugaacggaguuuucuucaauggcaucauucucgggcccgacggacaugugcugaucccugaaaugcaguccucucuucugcagcagcacauggagcuccuggaaagcuccgucauuccccuuaugcauccucuggccgaucccagcacgguguuuaaagacggcgaugaggcugaagacuucgucgaggugcaccucccggauguucauaagcaaaucucuggcguggaccuggggcugccuaacuggggaaaauacguccucaucauugccggcgugcugaucgcgaugauucuuacaauccugcucaugaccugcugugggagaggaaaucgccccaaguccacccagcacagccugggcgggauuggccggaagguuucuuccacaagccaguccggaaaagugaucucuagcugggaguccuauaagucuggcggggaaaccagacuguga

SEQ ID NO: 223853 - RNA, 1575 nt, Artificial Sequence
  derived and/or modified CDS sequence (opt5) from glycoprotein__RABV__KU198473.1
auggugccccaggcccugcucuuugucccucugcuugcuuuuccgaugugcuucggcaaguuucccaucuacaccauuccugacaaacuggggcccuggagcccuaucgauauucaccaucucuccugucccaacaaucugguuguggaggacgaaggaugcacaaaccuuucuggcuucagcuauauggagcugaaggugggguacaucuccgccauuaaagucaauggauuuacguguaccggcgugguuacagaagcggagaccuauacaaacuucgugggguacgucaccacaaccuuuaagagaaaacacuuccggccuacgccggaugcuugccgcgccgccuauaauuggaagauggcuggagaccccagauacgaagagucucuccauaacccuuaucccgauuaccacuggcugcggaccgugaagacaaccaaagagagccugaucaucauuuccccuucuguugccgaccucgaucccuacgacaagagccugcauucccgcguguuuccgagcggcaaaugucuuggcaucacaauuucuuccaccuauugcagcacgaaucacgauuacacaaucuggaugccugaaaacgucagacuggggaccucuugugacauuuucacaaauucccggggaaagcgcgcuagcaaaggcucuaagaccugcggguuuguggaugagagaggacucuauaagucccugaaaggcgccuguaagcugaaacugugcggggugcucggacugcggcugauggacggcaccugggucagcaugcccacauccgaugaaacgaagugguguccucccgaccaacucguuaaccugcacgacuuccgcucugaugagaucgagcaucuugugguggaggaacuggucagaaaacgggaagagugccucgacgcgcuggaaagcauuaugaccacaaaguccgugagcuuucgcagacuuucucaccuucggaaacucguucccggcuucgggaaggccuacaccaucuucaauaagacacugauggaggcugaugcccauuauaaauccgugcgcaccuggaacgagaucauuccuagcaagggaugccugagagucggcgggcggugucacccgcacgugaauggaguuuucuucaacggcaucauucucgggcccgacggacaugugcugaucccugaaaugcagucuagccuucugcagcagcacauggagcuccuggaauccucugucauuccccuuaugcauccucuggcugaucccagcacgguguuuaaagacggcgaugaggccgaagacuucgucgaggugcaccucccggauguucauaagcaaaucuccggcguggaccuggggcugccuaauuggggaaaauacguccucaucauugcgggcgugcugaucgccaugauucuuacaaucuuucugaugaccugcugugggagaggaaaccgccccaagagcacccagcacucucucggcgggauuggccggaagguuuccagcacaucucaguccggaaaagugaucagcuccugggagucuuauaagagcggcggggaaaccagacuguga

SEQ ID NO: 223854 - RNA, 1575 nt, Artificial Sequence; identical to SEQ ID NO: 223853
  derived and/or modified CDS sequence (opt5) from glycoprotein__RABV__KU198474.1

SEQ ID NO: 223855 - RNA, 1575 nt, Artificial Sequence
  derived and/or modified CDS sequence (opt5) from glycoprotein__RABV__KU198475.1
auggugccccaggcccugcucuuugucccucugcuugcuuuuccgaugugcuucggcaaguuucccaucuacaccauuccugacaaacuggggcccuggagcccuaucgauauucaccaucucuccugucccaacaaucugguuguggaggacgaaggaugcacaaaccuuucuggcuucagcuauauggagcugaaggugggguacaucuccgccauuaaagucaauggauuuacguguaccggcgugguuacagaagcggagaccuauacaaacuucgugggguacgucaccacaaccuuuaagagaaaacacuuccggccuacgccggaugcuugccgcgccgccuauaauuggaagauggcuggagaccccagauacgaagagucucuccauaacccuuaucccgauuaccacuggcugcggaccgugaagacaaccaaagagagccugaucaucauuuccccuucuguuagcgaccucgaucccuacgacaagucccugcauagccgcguguuuccgucuggcaaaugucuuggcaucacaauuuccagcaccuauugcucuacgaaucacgauuacacaaucuggaugccugaaaacgucagacuggggaccuccugugacauuuucacaaauagccggggaaagcgcgccucuaaaggcuccaagaccugcggguuuguggaugagagaggacucuauaagagccugaaaggcgcuuguaagcugaaacugugcggggugcucggacugcggcugauggacggcaccugggucuccaugcccacaucugaugaaacgaagugguguccucccgaccaacucguuaaccugcacgacuuccgcagcgaugagaucgagcaucuugugguggaggaacuggucagaaaacgggaagagugccucgacgcccuggaauccauuaugaccacaaagagcgugucuuuucgcagacuuucccaccuucggaaacucguucccggcuucgggaaggcguacaccaucuucaauaagacacugauggaggccgaugcucauuauaaaagcgugcgcaccuggaacgagaucauuccuucuaagggaugccugagagucggcgggcggugucacccgcacgugaauggaguuuucuucaacggcaucauucucgggcccgacggacaugugcugaucccugaaaugcagagcucccuucugcagcagcacauggagcuccuggaaucuagcgucauuccccuuaugcauccucuggccgaucccuccacgguguuuaaagacggcgaugaggcugaagacuucgucgaggugcaccucccggauguucauaagcaaaucagcggcguggaccuggggcugccuaauuggggaaaauacguccucaucauugccggcgugcugaucgcgaugauucuuacaauccugcucaugaccugcugugggagaggaaaccgccccaagucuacccagcacucccugggcgggauuggccggaagguuagcucuacaucccagagcggaaaagugaucuccucuugggagagcuauaaguccggcggggaaaccagacuguga

SEQ ID NO: 223856 - RNA, 1575 nt, Artificial Sequence
  derived and/or modified CDS sequence (opt5) from glycoprotein__RABV__KU198476.1
auggugccccaggcccugcucuuugucccucugcuugcuuuuccgaugugcuucggcaaguuucccaucuacaccauuccugacaaacuggggcccuggagcccuaucgauauucaccaucucuccugucccaacaaucugguuguggaggacgaaggaugcacaaaccuuucuggcuucagcuauauggagcugaaggugggguacaucuccgccauuaaagucaauggauuuacguguaccggcgugguuacagaagcggagaccuauacaaacuucgugggguacgucaccacaaccuuuaagagaaaacacuuccggccuacgccggaugcuugccgcgccgccuauaauuggaagauggcuggagaccccagauacgaagagucucuccauaacccuuaucccgauuaccacuggcugcggaccgugaagacaaccaaagagagccugaucaucauuuccccuucuguugccgaccucgaucccuacgacaagagccugcauucccgcguguuuccgagcggcaaaugucuuggcaucacaauuucuuccaccuauugcagcacgaaucacgauuacacaaucuggaugccugaaaacgucagacuggggaccucuugugacauuuucacaaauucccggggaaagcgcgcuagcaaaggcucuaagaccugcggguuuguggaugagagaggacucuauaagucccugaaaggcgccuguaagcugaaacugugcggggugcucggacugcggcugauggacggcaccugggucgcgaugcccacaagcgaugaaacgaagugguguccucccgaccaacucguuaaccugcacgacuuccgcuccgaugagaucgagcaucuugugguggaggaacuggucagaaaacgggaagagugccucgacgcccuggaaucuauuaugaccacaaagagcguguccuuucgcagacuuagccaccuucggaaacucguucccggcuucgggaaggcuuacaccaucuucaauaagacacugauggaggccgaugcucauuauaaaucugugcgcaccuggaacgagaucauuccuuccaagggaugccugagagucggcgggcggugucacccgcacgugaauggaguuuucuucaacggcaucauucucgggcccgacggacaugugcugaucccugaaaugcagagcucucuucugcagcagcacauggagcuccuggaaagcuccgucauuccccuuaugcauccucuggccgaucccucuacgguguuuaaagacggcgaugaggcggaagacuucgucgaggugcaccucccggauguucauaagcaaaucagcggcguggaccuggggcugccuaauuggggaaaauacguccucaucauugccggcgugcugaucgcuaugauucuuacaaucuuucugaugaccugcugugggagaggaaaccgccucaaguccacccagcacagccugggcgggauuggccggaagguuucuuccacaagccagucuggaaaagugaucuccagcugggaguccuauaagucuggcggggaaaccagacuguga

SEQ ID NO: 223857 - RNA, 1575 nt, Artificial Sequence; identical to SEQ ID NO: 223546
  derived and/or modified CDS sequence (opt5) from glycoprotein__RABV__KU198478.1

SEQ ID NO: 223858 - RNA, 1575 nt, Artificial Sequence
  derived and/or modified CDS sequence (opt5) from glycoprotein__RABV__KU198479.1
auggugccccaggcccuucucuucgucccucugcuugcuuuuccgaugugcuucggcaaguuucccaucuacaccauuccugacaaacuggggcccuggagcccuaucgauauucaccaucucuccugucccaacaaucugguuguggaggacgaaggaugcacaaaccuuucuggcuucagcuauauggagcugaaggugggguacaucuccgccauuaaagucaauggauuuacguguaccggcgugguuacagaagcggagaccuauacaaacuucgugggguacgucaccacaaccuuuaagagaaaacacuuccggccuacgccggaugcuugccgcgccgccuauaauuggaagauggcuggagaccccagauacgaagagucucuccauaacccuuaucccgauuaccacuggcugcggaccgugaagacagccaaagagagccugaucaucauuuccccuucuguugcugaccucgaucccuacgacaagagccugcauucccgcguguuuccgagcggcaaaugucuuggcaucaccauuucuuccacauauugcagcaccaaucacgauuacacgaucuggaugccugaaaacgucagacuggggacaucuugugacauuuucaccaauucccggggaaagcgcgccagcaaaggcucuaagacaugcggguuuguggaugagagaggacucuauaagucccugaaaggcgcguguaagcugaaacugugcggggugcucggacugcggcugauggacggcaccugggucagcaugcccaccuccgaugaaacaaagugguguccucccgaccaacucguuaaccugcacgacuuccgcucugaugagaucgagcaucuugugguggaggaacuggucagaaaacgggaagagugccucgacgcccuggaaagcauuaugacgaccaaguccgugagcuuucgcagacuuucucaucugcggaaacucguucccggcuucgggaaggcuuacacaaucuucaauaagacccugauggaggccgaugcucacuauaaauccgugcgcacauggaacgagaucauuccuagcaagggaugccugagagucggcgggcggugucacccgcacaucaauggaguguuuuucaacggcauuauccucgggcccgacggacauguucugauuccugaaaugcagucuagccuucugcagcagcacauggagcuccuggaauccucugugaucccccuuaugcauccucuggccgaucccagcaccgucuuuaaagacggcgaugaggcggaagacuucguggagguccaccucccggaugugcauaagcaaaucuccggcguugaccuggggcugccuaauuggggaaaauacgugcucauuaucgccggcguccugauugcuaugauccuuacgauuuuucugaugacaugcugugggagaggaaaccgccccaagagcacccagcacucucucggcgggaucggccggaagguguccagcaccucucaguccggaaaaguuaucagcuccugggagucuuauaagagcggcggggaaacaagacuguga

SEQ ID NO: 223859 - RNA, 1575 nt, Artificial Sequence; identical to SEQ ID NO: 223409
  derived and/or modified CDS sequence (opt5) from glycoprotein__RABV__KU534939.1

SEQ ID NO: 223860 - RNA, 1575 nt, Artificial Sequence
  derived and/or modified CDS sequence (opt5) from glycoprotein__RABV__KU534940.1
auggugccccagguccugcuguucguuccucugcuuguguuuagcaugugcuucggcaaguuuccgaucuacaccauucccgacaaacuggggccuuggucccccaucgauauucaccaucucucuuguccuaacaaucugguggucgaggacgaaggaugcacaaaccuuagcggcuucuccuauauggagcugaaggugggguacaucucugccauuaaaguuaauggauuuacguguaccggcguggucacagaagcugagaccuauacaaacuucgugggguacguuaccacaaccuuuaagagaaaacacuuccggcccacgccugaugccugccgcgcggcuuauaauuggaagauggccggagacccgagauacgaagagagccuccauaaccccuauccugauuaccacuggcugcggaccgugaagacaaccaaagagucccuggucaucaucucucccagcguggccgaccucgauccuuacgacaagucccugcauagccgcguguuucccucuggcaaauguuccggcauuacaaucagcucuaccuauugcuccacgaaucacgauuacacaauuuggaugccggaaaacccuagacuugggaccagcugugacaucuucacaaauucucggggaaagcgcgcuuccaaaggcgggaagaccugcggauuugucgaugagagaggccuguauaagagccucaaaggggccuguaagcugaaacuuugcggaguucugggccuccggcugauggacggcaccuggguggcuaugcaaacauccgaugaaacgaaguggugucccccugaccagcuggugaaccuccacgacuuccgcucugaugagauugagcaucuggucguggaggaacuuguuaaaaagagagaagagugccuggacgcccucgaaagcaucaugaccacaaaauccgugagcuuucggcgccugucucaccuuagaaagcugguccccggguucggaaaggcguacaccauuuucaauaaaacacucauggaggccgaugcucauuauaaguccgugcggaccuggaacgagaucauccccagcaaaggcugccugcgcguugggggaagaugucacccucacgugaagggcgucuuuuucaaugggauuauccugggaccggacggccaugugcucauucccgaaaugcagucuagccugcuucagcaacacauggagcugcucgaauccucugucaucccucugaugcauccccuugccgauccuagcacgguguuuaaagacggcgaugaggcugaagacuucguugaggugcaucugcccgauguccacaagcagauuuccgggguggaccucggacugccgagcuggggcaaguacguucuggccucugcgggggugcucgucgugcugaugcuuacaaucuuuaucauuaccugcuguggacgggugcacagaccuaaauccacccagcacggccucgggggcacaggacgcaagguuagcgucaccucucaguccggcaaagugaucagcuccugggagucuuauaagagcgggggagaaacacggcucuga

SEQ ID NO: 223861 - RNA, 1575 nt, Artificial Sequence; identical to SEQ ID NO: 223410
  derived and/or modified CDS sequence (opt5) from glycoprotein__RABV__KU534941.1

SEQ ID NO: 223862 - RNA, 1575 nt, Artificial Sequence; identical to SEQ ID NO: 223196
  derived and/or modified CDS sequence (opt5) from glycoprotein__RABV__KU534942.1

SEQ ID NO: 223863 - RNA, 1575 nt, Artificial Sequence
  derived and/or modified CDS sequence (opt5) from glycoprotein__RABV__KU739036.1
auggugccccagguccugugguucguuccucuccugguguuuagcaugugcuucggcaaguuuccgaucuacaccauucccgacaaacuugggccuuggucccccaucgauauucaccaucugucuuguccuaacaaucucguggucgaggacgaaggaugcacaaaccugagcggcuucuccuauauggagcuuaaggugggguacaucucugccauuaaaguuaauggauuuacguguaccggcguggucacagaagcugagaccuauacaaacuucgugggguacguuaccacaaccuuuaagagaaaacacuuccggcccacgccugaugccugccgcgcggcuuauaauuggaagauggccggagacccgagauacgaagagagccugcauaaccccuauccugauuaccacuggcuccggaccgugaagacaaccaaagagucccuggucaucaucucucccagcguggccgaccuggauccuuacgacaagucccuccauagccgcguguuucccucuggcaaauguuccggcauuacaaucagcucuaccuauugcuccacgaaucacgauuacacaauuuggaugccggaaaacccuagacuggggaccagcugugacaucuucgcuaauucucggggaaagcgcgccuccaaaggcagcaagacaugcggguuugucgaugagagaggacuuuauaagucccugaaaggcgcuuguaagcucaaacugugcgggguucuuggacugcggcucauggacggcaccuggguggccaugcaaaccucugaugaaacaaaguggugucccccugaccagcuggugaaccugcacgacuuccgcagcgaugagauugagcaucucgucguggaggaacugguuaaaaagagagaagagugccuugacgcgcuggaauccaucaugacgaccaaaagcgugucuuuucggcgccucucccaccugagaaaacuuguccccggcuucgggaaggccuacacaauuuucaauaagacccugauggaggcugaugcccauuauaagagcgugcggacauggaacgagaucauccccucuaaaggaugccuccgcguuggcgggagaugucacccucacgugaauggagucuuuuucaacggcauuauccuggggccggacggacaugugcugauucccgaaaugcagagcucccuccugcagcaacacauggagcuucuggaaucuagcgucaucccucucaugcauccccuggcugauccuuccaccguguuuaaggacggcgaugaggccgaagacuucguugaggugcaccuucccgauguccauaaacagauuagcggcguggaccuggggcucccgaauuggggaaaguacguucuggugucugcgggcguccugguggugcucaugcuggccaucuuuaucaugacgugcugugggcggguuaacagaccuaaguccacacagcacagccuugagggaaccggccgcaaagucucugugaccucccagagcgggaaggugauuuccucuugggaaagcuauaaauccggcggagagacacggcuguga

SEQ ID NO: 223864 - RNA, 1575 nt, Artificial Sequence
  derived and/or modified CDS sequence (opt5) from glycoprotein__RABV__KU739037.1
auggugccccaggcccuccuguucgucccucugcuuguuuuuccgcugugcuucggcaaguuucccaucuacaccauuccugacaaacucgggcccuggagcccuaucgauauucaccaucuguccugucccaacaaucuugugguggaggacgaaggaugcacaaaccugucuggcuucagcuauauggagcucaaggucggguacaucuccgcuauuaaagugaauggauuuacguguaccggcguugugacagaagccgagaccuauacaaacuucgucggguacgugaccacaaccuuuagacggaagcacuuccgcccuacgccggaugcgugcagagcugccuauaauuggaaaauggccggagacccccgguacgaagagucucugcauaacccuuaucccgauuaccacuggcugcgcaccguuaagacaaccaaggagagccucgugaucaucuccccuucugucgcugaccuggaucccuacgacaaaagccuucauuccagaguguuuccgggcggcaaguguagcgggauuacagugucuuccaccuauugcagcacgaaucacgauuacacaaucuggcugccugaaaacccccggcucggaaccucuugugacauuuucacaaauucccgcggcaaaagagccagcaaggggucuaaaaccugcggauuugucgaugagcggggccuguauaagucccuuaagggggcuuguaaacugaagcucugcggaguucugggccugcgccucauggacggcaccuggguggccaugcaaacaagcgaugaaacgaaaugguguccucccgaccagcuggugaaccuucacgacuucagauccgaugagaucgagcaucuggucguggaggaacucguuaagaaacgggaagagugccuggacgcgcuugaaucuauuaugaccacaaagagcguguccuuucgcagacugagccaccuccggaaacugguccccggguucggaaaggccuacaccaucuucaauaagacacugauggaggcugaugcccauuauaaaucugugcgcaccuggaacgagauuaucccuuccaagggcugccucagaguugggggacggugucaccaccaugugaauggcgucuuuuucaacgggaucauucugggaccggacggccacgugcuuauccccgaaaugcagagcucucugcuccagcaacauauggagcugcuugaaagcuccgucauuccucugaugcacccccucgcugauccuucuacgguguuuaaagacggcgaugaggccgaagacuucguugaggugcaucugcccgauguccacaaacaggugagcgggguugaccugggacucccgaauuggggcaaguacgugcugcuuuccgcgggggcccugaucgcucucaugcugauuaucuuucugaugacaugcuguagacgcgucaaccggccugagagcacccagagaucuuucggaggcaccgaacgcgagguguccaucacaccccagagcgggaaggugauuucuuccugggaaagcuauaaguccggcggagagacccggcuuuga

SEQ ID NO: 223865 - RNA, 1575 nt, Artificial Sequence
  derived and/or modified CDS sequence (opt5) from glycoprotein__RABV__KU739038.1
auggugccccuggcccuccuggucguuccucuucuggugcucagccugugcuccggcaaguucccgaucuacaccauucccgacaaacuugggccuuggucucccaucgauauucaccaucugagcuguccuaacaaucucguggucgaggacgaaggaugcacaaaccuguccggcuuuucuuauauggagcugaaggugggguacaucagcgcuauuaaaguuaauggauucacguguaccggcguggucacagaagccgagaccuauacaaacuuugugggguacguuaccacaaccuucagacggaagcacuuucgccccacgccugaugcgugcagagcugccuauaauuggaaaauggccggagacccgcgguacgaagagucccuccauaaccccuauccugauuaccacuggcugcgcaccgugaagacaaccaaggagucucuugucaucaucagccccuccguggcugaccuggauccuuacgacagaagccuccauucucggguguuccccaauggcaaauguuccggcauuacagucagcucuaccuauugcccgacgaaccacgauuacacaaucuggaugccugaaaauccccgccuggggaccuccugugacauuuuuguuaacagcagaggaaagcgggccucuaaaggcuccaagacaugcggguucguggaugagcgcggacuuuauaaaagccugaagggcgcuuguaagcucaaacugugcggggugcugggacucagacugauggacggcaccugggucgccaugcggaccuccgaugaaacaaagugguguccucccgaccagcuugugaauauccacgacuuucgcucugaugagauugagcaucugguuguggaggaacucgucaaaaagagagaagagugccuggacgcgcuugaaagcaucaugacgaccaaauccgugagcuuccggcgccugucucaccucagaaagcugguucccggcuuugggaaagccuacacaauuuucaacaagacccugauggaggcugaugcccauuauaaguccgugcggacaugggacgagaucaucccuagcaaaggaugccucagagucggcgggcgcugucacccgcacgugcauggagucuuuuucaauggcauuauccuggggcccgauggacacgugcuuauuccugaaaugcaaucuagccugcuccagcagcauauggagcugcuugaauccucuguuaucccccugaugcacccucucgcugaccccagcaccguguucaaggauggcgacgaggccgaagauuuugucgaggugcaucugccggacguucacaaacagauuuccggcguggaucuggggcucccuaacuggggaaaguacguccugaugagcgcgggcgcccuuaucgcucugaugcucaucauuuuccugaugacgugcugucggaaaaucaagcaacccgagucuacacagcacucccugagagggaccggacgcaaggugagcgugaccucucagaauggcaaaguuauuuccagcugggaauccuauaagucugggggcgagacacggcuuuga

SEQ ID NO: 223866 - RNA, 1575 nt, Artificial Sequence
  derived and/or modified CDS sequence (opt5) from glycoprotein__RABV__KU739043.1
auggugccccugacccuccuggucguuccucuucuggugcucagccugugcuccggcaaguucccgaucuacacaauucccgacaaacuugggccuuggucucccaucgauauucaccaucugagcuguccuaacaaucucguggucgaggacgaaggaugcacgaaccuguccggcuuuucuuauauggagcugaaggugggguacaucagcgccauuaaaguuaauggauucaccuguacaggcguggucaccgaagcugagacauauaccaacuuugugggguacguuacaaccacguucagacggaagcacuuucgccccaccccugaugccugcagaacagcguauaauuggaaaauggcuggagacccgcgguacgaagagucccuccauaaccccuauccugauuaccacuggcugcgcaccgugaagacaaccaaggagucucuugucaucaucagccccuccguggccgaccuggauccuuacgacagaagccuccauucucggguguuccccaauggcaaauguuccggcauuacggucagcucuacauauugcccgaccaaccacgauuacacaaucuggaugccugaaaauccccgccuggggaccuccugugacauuuuuguuaacagcagaggaaagcgggccucuaaaggcuccaagaccugcggguucguggaugagcgcggacuuuauaaaagccugaagggcgcuuguaagcucaaacugugcggggugcugggacucagacugauggacggcacaugggucgccaugcggacguccgaugaaaccaagugguguccucccgaccagcuugugaauauccacgacuuucauucugaugagauugagcaccugguuguggaggaacucgucaaaaagcgcgaagagugccuggacgcucuugaaagcaucaugacaaccaaauccgugagcuucagacggcugucucaucuccgcaagcugguucccggcuuugggaaagccuacacaauuuucaacaagacccugauggaggcggaugcccacuauaaguccgugagaacgugggacgagaucaucccuagcaaaggaugccuccgggucggcgggagaugucacccgcaugugcacggagucuuuuucaauggcauuauccuggggcccgauggacaugugcuuauuccugaaaugcaaucuagccugcuccagcagcacauggagcugcuugaauccucuguuaucccccugaugcauccucucgcugaccccagcacaguguucaaggauggcgacgaggccgaagauuuugucgaggugcaucugccggacguucacaaacagauuuccggcguggaucuggggcucccuaacuggggaaaguacguccugaugagcgcuggcgcccuuaucgcgcugaugcucaucauuuuccugaugaccugcugucgcaaaaucaagcggcccgagucuacccaacacuccccuagagggacaggacgcaaggugagcgugaccucucagaauggcaaaguuauuuccagcugggaauccuauaagucugggggcgagacacggcuguga

SEQ ID NO: 223867 - RNA, 1575 nt, Artificial Sequence
  derived and/or modified CDS sequence (opt5) from glycoprotein__RABV__KU739044.1
auggugccccaggcccuucucuucgucccucugcuuguuuuuagccugugcuucggcaaguuuccgaucuacaccauucccgacaaacucgggccuuggucccccaucgauauucaccaucugucuuguccuaacaaucuugugguggaggacgaaggaugcacaaaccugagcggcuucuccuauauggagcucaaggucggguacaucucugcuauuaaagugaauggauuuacguguaccggcguugugacagaagccgagaccuauacaaacuucgucggguacgugaccacaaccuuuaagagaaaacacuuccggcccacgccugaugcgugccgcgcugccuauaauuggaagauggccggagacccgagauacgaagagagccugcauaaccccuauccugauuaccacuggcugcggaccguuaagacaaccaaagagucccucgugaucaucucucccagcgucgcugaccuggauccuuacgacaagucccuucauagccgcguguuucccucuggcaaauguuccggcauuacagugagcucuaccuauugcuccacgaaucacgauuacacaaucuggaugccggaaaacccuagacuggggaccagcugugacauuuucacaaauucucggggaaagcgcgccuccaaaggcagcaagaccugcggguuugucgaugagagaggacucuauaagucccugaaaggcgcuuguaagcugaaacugugcgggguucucggacugcggcugauggacggcaccuggguggccaugcaaacaucugaugaaacgaaguggugucccccugaccagcucgugaaccugcacgacuuccgcagcgaugagaucgagcaucuugucguggaggaacugguuaaaaagagagaagagugccucgacgcgcuggaauccauuaugaccacaaaaagcgugucuuuucggcgccuuucccaccugagaaagcucguccccggcuucgggaaggccuacaccaucuucaauaaaacacugauggaggcugaugcccauuauaagagcgugcggaccuggaacgagauuauccccucuaaaggaugccugcgcguuggcgggagaugucacccucacgugaauggagucuuuuucaacggcaucauucucgggccggacggacaugugcugauccccgaaaugcagagcucccuucugcagcaacacauggagcuccuggaaucuagcgucauuccucuuaugcauccccuggcugauccuuccacgguguuuaaggacggcgaugaggccgaagacuucguugaggugcaccuccccgauguccauaaacaggugagcggcguugaccuggggcugccgaauuggggaaaguacgugcuccugucugcgggcacacuuaucgcccugaugcucauuaucuuucugaugaccugcugucggagagucaaccgcccuaaguccacccagcgggggcccggagagacaggcagaaaagugagcgugaccucucaguccgggaagguuaucagcuccugggaaucuuauaaaagcggcggagagacacgccuguga

SEQ ID NO: 223868 - RNA, 1575 nt, Artificial Sequence; identical to SEQ ID NO: 222627
  derived and/or modified CDS sequence (opt5) from glycoprotein__RABV__KU739045.1

SEQ ID NO: 223869 - RNA, 1575 nt, Artificial Sequence; identical to SEQ ID NO: 223759
  derived and/or modified CDS sequence (opt5) from glycoprotein__RABV__KU739047.1

SEQ ID NO: 223870 - RNA, 1575 nt, Artificial Sequence
  derived and/or modified CDS sequence (opt5) from glycoprotein__RABV__KU739048.1
auggugccccaggcccuccuguucgucccucugcuuggcuuuagccugugcuucgggaaguuuccgaucuacaccauucccgacaaacucggaccuuggucccccaucgauauucaccaucugucuuguccuaacaaucuuguuguggaggacgaaggcugcacaaaccugagcggguucuccuauauggagcucaaggugggauacaucucugcuauuaaagucaauggcuuuacguguaccggggugguuacagaagccgagaccuauacaaacuucgugggauacgucaccacaaccuuuaagagaaaacacuuccggcccacgccugaugcgugccgcgcugccuauaauuggaagauggccggcgacccgagauacgaagagagccugcauaaccccuauccugauuaccacuggcugcggaccgugaagacaaccaaagagucccucguuaucaucucucccagcguggcugaccuggauccuuacgacaagucccuucauagccgcgucuuucccggcgggaaauguucuggaauuacaguguccagcaccuauugcucuacgaaucacgauuacacaaucuggcugccggaaaacccuagacucggcaccuccugugacauuuucacaaauagccgggggaagcgcgccucuaaaggauccaagaccugcggcuuuguggaugagagagggcuguauaagagccuuaaaggagcuuguaagcugaaacucugcggcguccugggccugcggcucauggacgggaccuggguugccaugcaaacauccgaugaaacgaagugguguucucccgaccagcuggugaaccuucacgacuuccgcagcgaugagaucgagcaucugguggucgaggaacucgugaaaaagagagaagagugccuggacacccuugaauccauuaugacaaccaaaagcguuucuuuucggcgccugucccaccucagaaagcuggugccuggauucggcaaggcguacacaaucuucaauaaaacccugauggaggccgaugcucauuauaagagcguccggacguggaacgagauuauccccucuaaagggugccuccgcgugggaggcagaugucaccaccauguuaaugggguguuuuucaacggaaucauucugggccccgacggccacguccuuaucccugaaaugcagagcucccugcuccagcaacauauggagcugcuugaaucuagcgugauuccgcugaugcacccccucgccgauccuuccacagucuuuaaggacggggaugaggcugaagacuucguggagguucaucugcccgaugugcacaaacaggucagcggaguggaccugggccucccuaauugggggaaguacguucugcuuucugccggagcgcugguggcccucaugcugaucauuuuucugaugaccugcugucggagagucaaccgccccgaguccacccagcggagcuucggcgggacagaaagaaaggugucuaucaccccgcaguccggcaaagugaucagcuccugggagucuuauaagagcggauccgaaacacgccuuuga

SEQ ID NO: 223871 - RNA, 1575 nt, Artificial Sequence
  derived and/or modified CDS sequence (opt5) from glycoprotein__RABV__KU739049.1
auggugccccaggcccugcuccuggucccucuucugggcuucagccucugcuuugggaaguucccgaucuacaccauucccgacaaacugggaccuuggucccccaucgauauucaccaucuuucuuguccuaacaaucugguuguggaggacgaaggcugcacaaaccucagcggguuuuccuauauggagcugaaggugggauacaucucuagcauuaaagucaauggcuucacguguaccggggugguuacagaagcugagaccuauacaaacuuugugggauacgucaccacaaccuucagacggaagcacuuucgccccacgccugaugccugcagagcggcuuauaauuggaaaauggccggcgacccgcgguacgaagagucccugcauaaccccuauccugauuaccacuggcuccgcaccgugaagacaaccaaggagucucugguuaucaucagccccuccguggccgaccuugauccuuacgacaaaagccugcauucuagagucuuccccuccggcaaguguagcgggauuacagugucuuccaccuauugcagcacgaaucacgauuacacaaucuggaugccggaaaaccuccggcugggaaccucuugugacauuuuuacaaauucccgcggcaaaagagcuagcaagggguccaaaaccugcggauucguggaugagcggggccuuuauaagucucugaagggggccuguaaacucaagcugugcggaguccugggccuccgccugauggacggcaccuggguugcuaugcaaacaagcgaugaaacgaaaugguguccucccgaccagcuugugaaccugcacgacuuuagauccgaugagaucgagcaucucguggucgaggaacuggugaagaaacgggaagagugccuugacgcccuggaaagcauuaugaccacaaagucuguuuccuuccgcagacucagccaucugcggaaacuggugccuggguuuggaaaggcguacaccaucuucaauaagacacucauggaggccgaugcucacuauaaaucuguccgcaccuggaacgaggugauucccagcagaggcugccugcggguugggggaagaugucacccccacgugaauggcgucuucuuuaacgggaucauccuuggaccugacggccaugugcugauuccggaaaugcaguccucucuccugcagcaacacaucgagcuucuggaaagcuccgucauuccccucacgcauccucuggccgaucccagcacaguguucaaggacggcgaugaggcugaagacuuuguugaggugcaucugccugauguccacaaacaggugucugggguugaccucggacugcccaauuggggcaaguacgugcuucuguccgccggggcgcucaucgcccugaugcugauuaucuuccuuauuaccugcugucgccgggucaacagaccggagagcacccagcgcucucuccggggagcuggcagaaaaguguccaucacaagccaguccgggaaggugaucucuagcugggaauccuauaagucuggcggagagacccgccuguga

SEQ ID NO: 223872 - RNA, 1575 nt, Artificial Sequence
  derived and/or modified CDS sequence (opt5) from glycoprotein__RABV__KU739050.1
auggugccccaggcccugcuguucgucccucugcuuguuuuuagccugugcuucggcaaguuuccgaucuacaccauucccgacaaacucgggccuuggucccccaucgauauucaccaucugucuuguccuaacaaucuugugguggaggacgaaggaugcacaaaccugagcggcuucuccuauauggagcucaaggucggguacaucucugcuauuaaagugaauggauuuacguguaccggcguugugacagaagccgagaccuauacaaacuucgucggguacgugaccacaaccuuuagacggaagcacuuccgccccacgccugaugcgugcagagcugccuauaauuggaaaauggccggagacccgcgguacgaagagagccugcauaaccccuauccugauuaccacuggcugcgcaccguuaagacaaccaaggagucccucgugaucaucucucccagcgucgcugaccuggauccuuacgacaaaucccuucauagcagaguguuucccucuggcaaguguuccggcauuacagugagcucuaccuauugcuccacgaaucacgauuacacaaucuggaugccggaaaacccucggcuggggaccagcugugacauuuucacaaauucucgcggaaaaagagccuccaagggcagcaaaaccugcggguuugucgaugagcggggacucuauaagucccugaagggcgcuuguaaacuuaagcugugcgggguucucggacugcgccugauggacggcaccuggguggccaugcaaacaacggaugaaaccaaauggugucccccugaccagcucgugaaccugcacgacuucagaucugaugagaucgagcaucuugucguggaggaacugguuaagaaacgggaagagugccucgacgcgcuggaaagcauuaugacaaccaaguccgugagcuuucgcagacuuucucaccuccggaaacucguccccggcuucgggaaggccuacacaaucuucaauaagacccugauggaggcugaugcccauuauaaauccgugcgcacguggaacgagauuauccccagcaagggaugccugagaguuggcgggcggugucacccucacgugaauggagucuuuuucaacggcaucauucucgggccggacggacaugugcugauccccgaaaugcagucuagccuucugcagcaacacauggagcuccuggaauccucugucauuccucuuaugcauccccuggcugauccuagcacaguguuuaaagacggcgaugaggccgaagacuucguugaggugcaccuccccgauguccauaaacagguguccggcguugaccuggggcugccgaauuggggaaaguacgugcuccugagcgcgggcacccuuaucgcccugaugcucauuaucuuucugaugaccugcuguagacgcgucaaccggccugagucuaugcagagaucccugggggaaacaggacgcaaggugagcgugaccucucaguccggcaagguuaucagcuccugggagucuuauaaaagcgggggcgaaacacggcuuuga

SEQ ID NO: 223873 - RNA, 1575 nt, Artificial Sequence
  derived and/or modified CDS sequence (opt5) from glycoprotein__RABV__KU888637.1
auggugccccaggcccuucucuucgucccucugcuuguuuuuagccugugcuucggcaaguuuccgaucuacaccauucccgacaaacucgggccuuggucccccaucgauauucaccaucugucuuguccuaacaaucuugugguggaggacgaaggaugcacaaaccugagcggcuucuccuauauggagcucaaggucggguacaucucugcuauuaaagugaauggauuuacguguaccggcguugugacagaagccgagaccuauacaaacuucgucggguacgugaccacaaccuuuaagagaaaacacuuccggcccacgccugaugcgugccgcgcugccuauaauuggaagauggccggagacccgagauacgaagagagccugcauaaccccuauccugauuaccacuggcugcggaccguuaagacaaccaaagagucccucgugaucaucucucccagcgucgcugaccuggauccuuacgacaagucccuucauagccgcguguuucccucuggcaaauguuccggcauuacagugagcucuaccuauugcuccacgaaucacgauuacacaaucuggaugccggaaaacccuagacuggggaccagcugugacauuuucgccaauucucggggaaagcgcgcuuccaaaggcagcaagacaugcggguuugucgaugagagaggacucuauaagucccugaaaggcgccuguaagcugaaacugugcgggguucucggacugcggcugauggacggcaccuggguggcgaugcaaaccucugaugaaacaaaguggugucccccugaccagcucgugaaccugcacgacuuccgcagcgaugagaucgagcaucuugucguggaggaacugguuaaaaagagagaagagugccucgacgcccuggaauccauuaugacgaccaaaagcgugucuuuucggcgccuuucccaccugagaaagcucguccccggcuucgggaaggcuuacacaaucuucaauaaaacccugauggaggccgaugcucauuauaagagcgugcggacauggaacgagauuauccccucuaaaggaugccugcgcguuggcgggagaugucacccucacgugaauggagucuuuuucaacggcaucauucucgggccggacggacaugugcugauccccgaaaugcagagcucccuucugcagcaacacauggagcuccuggaaucuagcgucauuccucuuaugcauccccuggccgauccuuccaccguguuuaaggacggcgaugaggcggaagacuucguugaggugcaccuccccgauguccauaaacaggugagcggcguugaccuggggcugccgggauggggcaaguacgugcuccugucugccggggcucuuaucgcccugaugcucauuaucuuucugaugacgugcugucggagagucaaucgcccugaguccacacagcggagccugggaggcaccgggagaaaggugucuaucaccucccagagcggcaaagugauuuccucuugggaaagcuauaaguccggaggcgagacacgccuuuga

SEQ ID NO: 223874 - RNA, 1575 nt, Artificial Sequence; identical to SEQ ID NO: 223410
  derived and/or modified CDS sequence (opt5) from glycoprotein__RABV__KU888639.1

SEQ ID NO: 223875 - RNA, 1575 nt, Artificial Sequence
  derived and/or modified CDS sequence (opt5) from glycoprotein__RABV__KU888640.1
auggugccccaggcccugcucuuugucccucugcuuggcuuuagccugugcuucgggaaguuuccgaucuacaccauucccgacaaacucggaccuuggucccccaucgauauucaccaucugucuuguccuaacaaucuuguuguggaggacgaaggcugcacaaaccugagcggguucuccuauauggagcucaaggugggauacaucucugcuauuaaagucaauggcuuuacguguaccggggugguuacagaagccgagaccuauacaaacuucgugggauacgucaccacaaccuuuaagagaaaacacuuccggcccacgccugaugcgugccgcgcugccuauaauuggaagauggccggcgacccgagauacgaagagagccugcauaaccccuauccugauuaccacuggcugcggaccgugaagacaaccaaagagucccucguuaucaucucucccagcguggcugaccuggauccuuacgacaagucccuucauagccgcgucuuucccucuggcaaauguuccgggauuacagugagcucuaccuauugcccgacgaaucacgauuacacaaucuggaugccugaaaaccccagacugggaaccuccugugacauuuucacaagcucuaagggcaaacgggccuccaaggggagcaagaccugcggauuuguggaugagcgcggccucuauaaaucccugaagggggcuuguaaacuuaagcugugcggaguccucggccugagacugauggacggcaccuggguugccaugcaaacaucugaugaaacgaaaugguguccucccgaccagcucgugaaucugcacgacuuccggagcgaugagaucgagcaucuuguggucgaggaacuggugaagaaacgcgaagagugccucgacgcgcuggaauccauuaugaccacaaagagcguuucuuuuagacggcuuucccaucugcgcaagcucgugcccggguucggaaaagccuacaccaucuucaacaagacacugauggaggcugaugcccacuauaaaagcgucagaaccuggaaugagauuaucccuucuaagggcugccugcggaucgggggacgcugucacccgcacgugaacggcguuuucuucaaugggauuauccucggacccgacggccaugugcugauuccugaaaugcagagcucccuucugcagcaacacauggagcuccuggaaucuagcgucaucccccuuaugcauccucuggcugaucccuccacggugcucaaagacggcgaugaggccgaagacuuugucgaggugcaucugccggauguucacaagcagauuagcgggguggaccugggacucccuaacuggggcaaguacguccugcuuucugcgggggcccugaucgcucucaugcugaucauuuuccugaugacaugcuguagacgggugaauagacaggaguccacccagcgcagccuuggaggcaccgggcggaaaguuucuaucacaucccaaagcggcaaggugauuuccucuugggaaagcuauaaauccggaggcgagaccagacucuga

SEQ ID NO: 223876 - RNA, 1575 nt, Artificial Sequence
  derived and/or modified CDS sequence (opt5) from glycoprotein__RABV__KU888641.1
auggugccccaggcccugcucgucaucccucugcuuggcuucagccugugcuuugggaaguucccgauuuacaccauccccgacaaacucggaccuuggucccccauugauauccaccaucugucuuguccuaacaaucuuauuguugaggacgaaggcugcacaaaccugagcggguuuuccuauauggagcucaaggugggauacaucucugcuaucaaagugaauggcuucacguguaccggggucgugacagaagccgagaccuauacaaacuuuguuggauacgugaccacaaccuucaagagaaaacacuuucggcccacgccugaugaaugccgcgcggcuuauaauuggaagauggccggcgacccgagauacgaggagagccugcauaaccccuauccugauuaccacuggcugcggaccgucaagacaaccaaagaaucccucgugauuaucucucccagcguugccgaccuggauccuuacgacaagucccuucauagccgcguguuccccucuggcaaauguuccgggauuacagucagcucuaccuauugcuccacgaaucacgauuacacaaucuggaugccggagaacccuagacugggaaccagcugugacauuuuuacaaauucucggggcaagcgcgcuuccaaagggagcaagaccugcggauucguggaugaaagaggccucuauaagucccugaaaggggccuguaagcugaaacugugcggagugcucggccugaagcugauggacggcaccugggucgcuaugcaagccucugaugagacaaaauggugucccccugaccagcucguuaaccugcacgaccuucggagcgaugagaucgaacaucuggugguggaggaacucgucaagaaacgcgaggaaugccuggacgcgcuugaguccauuaugacgaccaagagcgugucuuuuagacggcugucccaccuccgcaagcugguucccggguucggaaaagccuacacaaucuuuaauaagacccugauggaggcugaugcccauuauaaaagcgugagaacauggaacgaaaucauucccucuaagggcugccucaaagucgggggacggugucacccucacgugaauggcguuuucuucaacggggugauccugggaccggacggccauguccuuauucccgagaugcagagcucccugcuccagcaacacauggaacugcuugagucuagcgugaucccucugaugcauccccucgcugauccuuccaccgucuuuaaggacggcgaagaggccgaggauuucguggaaguucaccuucccgacgugcauaagcaggucagcgggguggaucugggacucccgaauuggggcaaauacguuucucugggggcgggagcccuuauugcucugaugcucacgauccugcugaucacaugcugucgcagagugaaccggccugagcccaccagacgcucccuugaaggcaaggagcggaaagucagcgugaccucucaguccgggaaggugauuagcuccugggaaucuuauaaaagcggcggagagacaagacucuga

SEQ ID NO: 223877 - RNA, 1575 nt, Artificial Sequence
  derived and/or modified CDS sequence (opt5) from glycoprotein__RABV__KU888642.1
auggugccccaggcccugcuguucgucccucugcuuggcuuuagccugugcuucgggaaguuuccgaucuacaccauucccgacaaacucggaccuuggucccccaucgauauucaccaucugucuuguccuaacaaucuuguuguggaggacgaaggcugcacaaaccugagcggguucuccuauauggagcucaaggugggauacaucucugcuauuaaagucaauggcuuuacguguaccggggugguuacagaagccgagaccuauacaaacuucgugggauacgucaccacaaccuuuaagagaaaacacuuccggcccacgccugaugcgugccgcgcugccuauaauuggaagauggccggcgacccgagauacgaagagagccugcauaaccccuauccugauuaccacuggcugcggaccgugaagacaaccaaagagucccucguuaucaucucucccagcguggcugaccuggauccuuacgacaagucccuucauagccgcgucuuucccucuggcaaauguuccgggauuacagugagcucuaccuauugcuccacgaaucacgauuacacaaucuggaugccggaaaacccuagacugggaaccagcugugacauuuucacaaauucuaagggcaaacgggccuccaaggggagcaagaccugcggauuuguggaugagcgcggccucuauaaaucccugaagggggcuuguaaacuuaagcugugcggaguccucggccugagacugauggacggcaccuggguugccaugcaaacaucugaugaaacgaaauggugucccccugaccagcucgugaaccugcacgacuuccggagcgaugagaucgagcaucuuguggucgaggaacuggugaagaaacgcgaagagugccucgacgcgcuggaauccauuaugaccacaaagagcguuucuuuuagacggcuuucccaccuccgcaagcucgugcccggguucggaaaagccuacaccaucuucaauaagacacugauggaggcugaugcccauuauaaaagcgucagaaccuggaacgagauuauccccucuaagggcugccugcggguugggggacgcugucacccucacgugaauggcguguuuuucaacgggaucauucucggaccggacggccauguccugauccccgaaaugcagagcucccuucugcagcaacacauggagcuccuggaaucuagcgugauuccucuuaugcauccccuggcugauccuuccacgguccucaaagacagcgaugaggccgaagacuuuguggagguucaucugcccgaugugcacaagcagaucucuggcgucgaccuggggcucccgaauuggggaaaguacgugcugcuuuccgcgggcgcccugauugcucucaugcugaucaucuuccugaugacaugcuguagacggguuaacagacaggagagcacccagcgcucucuugggggaaccggccggaaaguguccauuacaagccaauccgggaaggucaucucuagcugggaauccuauaaaucuggcggagagaccagacucuga

SEQ ID NO: 223878 - RNA, 1575 nt, Artificial Sequence; identical to SEQ ID NO: 222917
  derived and/or modified CDS sequence (opt5) from glycoprotein__RABV__KU888643.1

SEQ ID NO: 223879 - RNA, 1575 nt, Artificial Sequence
  derived and/or modified CDS sequence (opt5) from glycoprotein__RABV__KU946961.1
augaucccccaggcccuucucuucgugccucugcuugucuuuccgcugugcuucggcaaguuucccauuuacaccaucccugacaaacucgggcccuggagcccuauugauauccaccaucuguccugucccaacaaucuuguuguggaggacgaaggaugcacaaaccugucuggcuucagcuauauggagcucaaggugggguacauuuccgcuaucaaagucaauggauuuacguguaccggcgugguuacagaagccgagaccuauacaaacuucgugggguacgucaccacaaccuuuaagagaaaacacuuccggccuacgccggaugcgugccgcucugcuuauaauuggaagauggccggagaccccagauacgaagagagccugcauaacccuuaucccgauuaccacuggcugcggaccgugaagacaaccaaagaguccguugugaucauuucuccuagcgucgccgaccucgaucccuacgacaagucccugcauagccgcguguuuccgagaggcaaauguucuggcaucacaguguccagcgcuuauugcucuaccaaucacgauuacacgauuuggaugccugaaaacccccggcuugggacauccugugacaucuucaccaauagccgcggaaagagagccucuaaaggcuccaagacaugcggguuugucgaugagcggggacuguauaagagccucaaaggcgcuuguaagcugaaacuuugcgggguucugggacuccgccugauggacggcaccuggguggccauucaaaccuccaacgaaacaaagugguguccucccgaucagcuggugaaucuccacgacuuccauucugacgagaucgagcaccuggucguggaagagguugugaaaaagagagaagagugccuugaugcgcuggaaagcauuaugacgaccaaauccgucagcuuucggcgccucucucaucugagaaagcuggugcccggcuucgggaaggccuacacaaucuucaacaaaacccugauggaggcugacgcccacuauaaguccguucagacaugggaugagaucauuccuagcaaaggaugccuccgggugggcgggcgcugucacccgcaugucaauggaguguuuuucaacggcaucauucuggggcccgacggacacguccugaucccugaaaugcagucuagccuccugcaacagcauauggagcuucugaaguccucugugauuccccucaugcacccucuggcugaucccagcaccguuuuuaaagacggcgaugaaguggaggacuucgucgaagugcaucuuccggauguucacaaacagguguccggcgucgaccuggggcucccuaauuggggaaaggaugugcugaugggcgccggggugcugacggcgcucaugcugaugaucuuucuuaugacaugcuguagacggaccaacagagccgagagcauccagcacucucugggagagaccggccgcaagguuuccgucacaagccaaucugggcgggugauuuccagcugggaauccuacaagucuggcggagagaccaaacucuga

SEQ ID NO: 223880 - RNA, 1575 nt, Artificial Sequence; identical to SEQ ID NO: 223546
  derived and/or modified CDS sequence (opt5) from glycoprotein__RABV__KX036361.1

SEQ ID NO: 223881 - RNA, 1575 nt, Artificial Sequence
  derived and/or modified CDS sequence (opt5) from glycoprotein__RABV__KX036363.1
auggugccccaggcccugcucuuugucccucugcuugcuuuuccgaugugcuucggcaaguuucccaucuacaccauuccugacaaacuggggcccuggagcccuaucgauauucaccaucucuccugucccaacaaucugguuguggaggacgaaggaugcacaaaccuuucuggcuucagcuauauggagcugaaggugggguacaucuccgccauuaaagucaauggauuuacguguaccggcgugguuacagaagcggagaccuauacaaacuucgugggguacgucaccacaaccuuuaagagaaaacacuuccggccuacgccggaugcuugccgcgccgccuauaauuggaagauggcuggagaccccagauacgaagagucucuccauaacccuuaucccgauuaccacuggcugcggaccgugaagacaaccaaagagagccugaucaucauuuccccuucuguugccgaccucgaucccuacgacaagagccugcauucccgcguguuuccgagcggcaaaugucuuggcaucacaauuucuuccaccuauugcagcacgaaucacgauuacacaaucuggaugccugaaaacgucagacuggggaccucuugugacauuuucacaaauucccggggaaagcgcgcuagcaaaggcucuaagaccugcggguuuguggaugagagaggacucuauaagucccugaaaggcgccuguaagcugaaacugugcggggugcucggacugcggcugauggacggcaccugggucgcgaugcccacaagcgaugaaacgaagugguguccucccgaccaacucguuaaccugcacgacuuccgcuccgaugagaucgagcaucuugugguggaggaacuggucagaaaacgggaagagugccucgacgcccuggaaucuauuaugaccacaaagagcguguccuuucgcagacuuagccaccuucggaaacucguucccggcuucgggaaggcuuacaccaucuucaauaagacacugauggaggccgaugcucauuauaaaucugugcgcaccuggaacgagaucauuccuuccaagggaugccugagagucggcgggcggugucacccgcacgugaauggaguuuucuucaacggcaucauucucgggcccgacggacaugugcugaucccugaaaugcagagcucucuucugcagcagcacauggagcuccuggaaagcuccgucauuccccuuaugcauccucuggccgaucccucuacgguguuuaaagacggcgaugaggcggaagacuucgucgaggugcaccucccggauguucauaagcaaaucagcggcguggaccuggggcugccuaauuggggaaaauacguccucaucauugccggcgugcugaucgcuaugauucuuacaaucuuucugaugaccugcugugggagaggaaaccgccccaaguccaagcagcacagccucggcgggauuggccggaaaguuucuuccaccagccagucuggaaaggugaucuccagcugggaguccuauaaaucuggcggggaaacaagacuguga

SEQ ID NO: 223882 - RNA, 1575 nt, Artificial Sequence; identical to SEQ ID NO: 223881
  derived and/or modified CDS sequence (opt5) from glycoprotein__RABV__KX036364.1

SEQ ID NO: 223883 - RNA, 1575 nt, Artificial Sequence; identical to SEQ ID NO: 223881
  derived and/or modified CDS sequence (opt5) from glycoprotein__RABV__KX036365.1

SEQ ID NO: 223884 - RNA, 1575 nt, Artificial Sequence
  derived and/or modified CDS sequence (opt5) from glycoprotein__RABV__KX036366.1
auggugccccaggcccugcuguucgucccucugauggcuuuuccgaugugcuucggcaaguuucccaucuacaccauuccugacaaacuugggcccuggagcccuaucgauauucaccaucuguccugucccaacaaucucguuguggaggacgaaggaugcacaaaccugucuggcuucagcuauauggagcuuaaggugggguacaucuccgccauuaaagucaauggauuuacguguaccggcgugguuacagaagcggagaccuauacaaacuucgugggguacgucaccacaaccuuuaagagaaaacacuuccggccuacgccggaugcuugccgcgccgccuauaauuggaagauggcuggagaccccagauacgaagagucucugcauaacccuuaucccgauuaccacuggcuccggaccgugaagacaaccaaagagagccugaucaucauuuccccuucuguugccgaccuggaucccuacgacaagagccuccauucccgcguguuuccgagcggcaaaugucugggcaucacaauuucuuccaccuauugcagcacgaaucacgauuacacaaucuggaugccugacaacgucagacuugggaccucuugugauauuuucacaaauucccggggaaagcgcgcuagcaaaggcucuaagaccugcggguuuguggacgaaagaggacuguauaagucccucaaaggcgccuguaagcugaaacuuugcggggugcugggacuccggcugauggauggcaccugggucgcgaugcccacaagcgacgagacgaagugguguccucccgaccaacugguuaaccuccacgauuuccgccuggacgaaaucgagcaucuugugguggaggaacuggucagaaaacgggaggaaugccucgaugcccuggaguccauugugaccacaaagucuguuagcuuucgcagacuuucccaccuccggaaacucgugcccggcuucgggaaggcuuacaccaucuucaauaagacacugauggaagccgacgcucauuauaaaagcguccgcaccuggaacgagaucauuccuucuaagggaugccugagagugggcgggcggugucacccgcacguuaauggaguguuuuucaacggcaucauucucgggcccgauggacauguccugaucccugagaugcaguccagccuucugcagcagcacauggaacuccuggagucuagcgugauuccccuuaugcauccucuggccgaccccuccacggucuuuaaagauggcgacgaagcggaggauuucguggaaguucaccucccggacgugcauaagcaaaucucuggcgucgaucuggggcugccuaauuggggaaaauacgugcucaucauugccggcguucugaucgcuaugauucuuacaaucuuucugaugaccugcugugggagaggaaaccgccccaagagcacccagcacucccucggcgggauuggccggaaggugagcucuacaucccagagcggaaaagucaucucuuccugggagagcuauaaguccggcggggagaccagacuguga

SEQ ID NO: 223885 - RNA, 1575 nt, Artificial Sequence
  derived and/or modified CDS sequence (opt5) from glycoprotein__RABV__KX036367.1
auggugccccaggcccugcucuuugucccucugcuugcuuuuccgaugugcuucggcaaguuucccaucuacaccauuccugacaaacuggggcccuggagcccuaucgauauucaccaucucuccugucccaacaaucugguuguggaggacgaaggaugcacaaaccuuucuggcuucagcuauauggagcugaaggugggguacaucuccgccauuaaagucaauggauuuacguguaccggcgugguuacagaagcggagaccuauacaaacuucgugggguacgucaccacaaccuuuaagagaaaacacuuccggccuacgccggaugcuugccgcgccgccuauaauuggaagauggcuggagaccccagauacgaagagucucuccauaacccuuaucccgauuaccacuggcugcggaccgugaagacaaccaaagagagccugaucaucauuuccccuucuguugccgaccucgaucccuacgacaagagccugcauucccgcguguuuccgagcggcaaaugucuuggcaucacaauuucuuccaccuauugcagcacgaaucacgauuacacaaucuggaugccugaaaacgucagacuggggaccucuugugacauuuucacaaauucccggggaaagcgcgcuagcaaaggcucuaagaccugcggguuuguggaugagagaggacucuauaagucccugaaaggcgccuguaagcugaaacugugcggggugcucggacugcggcugauggacggcaccugggucgcgaugcccacaagcgaugaaacgaagugguguccucccgaccaacucguuaaccugcacgacuuccgcuccgaugagaucgagcaucuugugguggaggaacuggucagaaaacgggaagagugccucgacgcccuggaaucuauuaugaccacaaagagcguguccuuucgcagacuuagccaccuucggaaacucguucccggcuucgggaaggcuuacaccaucuucaauaagacacugauggaggccgaugcucauuauaaaucugugcgcaccuggaacgagaucauuccuuccaagggaugccugagagucggcgggcggugucacccgcacgugaauggaguuuucuucaacggcaucauucucgggcccgacggacaugugcugaucccugaaaugcagagcucucuucugcagcagcacauggagcuccuggaaagcuccgucauuccccuuaugcauccucuggccgaucccucuacgguguuuaaagacggcgaugaggcggaagacuucgucgaggugcaccucccggauguucauaagcaaaucagcggcguggaccuggggcugccuaauuggggaaaauacguccucaucauugccggcgugcugaucgcuaugauucuuacaaucuuucugaugaccugcugugggagaggaaaccgccccauguccaagcagcacagccucggcgggauuggccggaagguuucuuccaccagccagucuggaaaagugaucuccagcugggaguccuauaagucuggcggggaaacaagacuguga

SEQ ID NO: 223886 - RNA, 1575 nt, Artificial Sequence
  derived and/or modified CDS sequence (opt5) from glycoprotein__RABV__L40426.1
auggugccccagguccuccuguucguucugcuucugggcuuuagccucugcuucgggaaguuuccuaucuacaccauuccggacaaacugggacccugguccccuaucgauauucaccaucuuagaugucccaacaaucuggugguggaggacgaaggcugcacaaaccucucuggguucagcuauauggagcugaaggucggauacaucuccgccauuaaagugaauggcuuuacguguaccgggguugugacagaagcugagaccuauacaaacuucgucggauacgugaccacaaccuuuaagcggaaacacuuccgcccuacgcccgaugccugcagagcggcuuauaauuggaagauggccggcgacccucgguacgaagagucucugcaaaacccguaucccgauuaccauuggcuccgcaccguuagaacaaccaaggagagccugaucaucauuuccccuucugugacagaccuugaucccuacgacaaaagccugcacucccgggucuuuccuggcgggaaguguagcggaaucaccgugucuuccacguauugcagcacaaaucaugauuacaccauuuggaugcccgaaaacccgcgcccuggcacacccugugacaucuucaccaauucuagagggaaacgggccuccaacggaaauaagaccugcggcuuuguggaugagcgcgggcucuauaaaagccugaagggagcuuguagacuuaagcugugcggcguccucggccugcggcugauggacgggacauggguugccaugcagacgucugaugaaaccaaaugguguuccccugaccagcucgugaaccugcacgacuuccgcagcgaugagauugagcaccuuguggucgaggaacuggugaagaaaagagaagagugccucgacacacuggaauccaucaugaccacaaagucuguuagcuuucggcgccuuucccaucugagaaaacucgugcccggauucggcaaggcuuacaccauuuucaauaaaacgcugauggaggccgaugcgcacuauaagagcguccggacauggaacgagaucauccccucuaaggggugccugaaagugggaggcagaugucauccucacguuaaugggguguuuuucaacggaauuauccucggcccggacgaucgcguccugauucccgaaaugcaguccagccuucugcggcaacacauggagcuccuggaaucuagcgugaucccucuuaugcauccccuggccgacccuuccaccgucuuuaaggagggcgaugaagcugaggacuucguggagguucaccuccccgauguguacaaacagauuucuggggucgaccugggacugccgaacuggggcaaguaugugcucaugaccgccggggcuaugaucggacugguucuuaucuuuagccugaugacauggugcagacgcgccaaucggccugaauccaaacagcgcagcuucggcgggaccggcggaaacgugucugucacaucccagagcggcaaggugauucccucuugggaguccuacaagagcgggggagaaaucagacucuga

SEQ ID NO: 223887 - RNA, 1575 nt, Artificial Sequence; identical to SEQ ID NO: 222644
  derived and/or modified CDS sequence (opt5) from glycoprotein__RABV__LC009632.1

SEQ ID NO: 223888 - RNA, 1575 nt, Artificial Sequence
  derived and/or modified CDS sequence (opt5) from glycoprotein__RABV__LC009633.1
augaucccccaggcccuucucuucgugccucugcuugucuuuagccugugcuucggcaaguuuccgauuuacaccauccccgacaaacucgggccuuggucccccauugauauccaccaucugucuuguccuaacaaucuuguuguggaggacgaaggaugcacaaaccugagcggcuucuccuauauggagcucaaggugggguacauuucugcuaucaaagucaauggauuuacguguaccggcgugguuacagaagccgagaccuauacaaacuucgugggguacgucaccacaaccuuuaagagaaaacacuuccggcccacgccugaugcgugccgcgcugccuauaauuggaagauggccggagacccgagauacgaagagagccugcauaaccccuauccugauuaccacuggcugcggaccgugaagacaaccaaagagucccucguuaucauuucucccagcguggcugaccuggauccuuacgacaagucccuucauagccgcgucuuucccucuggcaaauguuccggcaucacagugagcucuaccuauugcuccacgaaucacgauuacacaauuuggaugccggaaaacccuagacuggggaccagcugugacaucuucacaaauucucggggaaagcgcgccuccaaaggcaacaagaccugcggguuuguggaugagagaggacucuauaagagccugaaaggcgcuuguaagcugaaacugugcgggguccucggacugcggcugauggacggcaccugggccgcgauucaaacauccgaugaaacgaaguggugucccccugaccagcucguuaaucugcacgacuuccgcucugaugagaucgagcaucuugugguggaggaacuggucaaaaagagagaagagugccucgacgcccuggaaagcauuaugaccacaaaauccgugagcuuucggcgccuuucucaccugagaaagcucguucccggcuucgggaaggcuuacaccaucuucaacaaaacacugauggaggccgaugcucauuauaaguccgugcggaccuggaaugagaucauucccagcaaaggaugccugcgcgucggcgggagaugucacccucacgugaacggaguguuuuucaauggcaucauucucgggccggacggacauguucugauccccgaaaugcagucuagccuucugcagcaacacauggagcuccuggaauccucugucauuccucuuaugcauccccuggccgauccuagcacgguguuuaaggacgaugacgaggcggaagauuucgucgaggugcaccuccccgacguucauaaacagguguccggcgucgaucugggccugccgagcugggggaaguacgugcucaugucugccggaguucugacagcucuuaugcugaugaucuuucucaugaccugcugucggagagccaaccgcgcugaguccgcccagcacagccugggcgaacgggggagaaaggugucugucaccucccagagcggacgcgugaucuccucuugggagagcuauaaauccggcggggaaacaaagcuguga

SEQ ID NO: 223889 - RNA, 1575 nt, Artificial Sequence
  derived and/or modified CDS sequence (opt5) from glycoprotein__RABV__LC009635.1
auggugccccagguccuccuguucguucugcuucugggcuuuagccucugcuucgggaaguuuccuaucuacaccauuccggacgagcugggacccugguccccuaucgauauucaccaucuuucuugucccaacaaucuggugguggaagacgagggcugcacaaaccucagcgaguucuccuauauggagcugaaagucggguacaucucugccauuaaggugaauggauuuacguguaccggcguugugacagaagcugagaccuauacaaacuucgucggguacgugaccacaaccuuuaaaagaaagcacuuccggccuacgcccgaugccugccgcgcggcuuauaauuggaaaauggccggagacccuagauacgaggaaagccugcauaacccguaucccgauuaccacuggcuccggaccguucgcacaaccaaggagucccugaucaucauuucuccuagcgugacagaccuugaucccuacgacaagucccugcauagcagagucuuuccuggcggcaaauguucugggaucaccguguccagcacguauugcucuacaaaucacgauuacaccauuuggaugcccgaaaacccgcggccucgcacacccugugacaucuucaccaauuccagaggaaagcgggccagcaacggcucuaaaaccugcggguuuguggaugagcgcggacucuauaagucccugaaaggcgcuuguagacuuaagcugugcgggguccucggacugcggcugauggacggcacauggguugccaugcaaacgagcgaugagaccaagugguguccucccgaccagcucgugaaucugcacgacuuccgcuccgaugaaauugagcaucuuguggucgaagaacuggugaaaaagagagaagagugccucgacgcucuggagucuaucaugacaaccaaaagcguuuccuuucggcgccuuagccaccugagaaagcucgugcccggcuucgggaaagccuacacaauuuucaacaagacccugauggaagcggaugcccauuauaaaucuguccggacguggaaugagaucaucccuuccaagggaugccugaaggugggcgggagaugucacccgcacguuaacggaguguuuuucaauggcauuauccucgggcccgacgaucauguccugauuccugaaaugcagagcucucuucugcagcaacacauggagcuccuggaaagcuccgugaucccccuuaugcauccucuggcugaccccucuacagucuuuaaagagggagaugaggccgaagacuucguggagguucaccucccggauguguacaagcagauuagcggcgucgaccugggccugccuaacugggggaaauaugugcucaugaccgcuggagccaugaucggccugguucuuaucuuuucccugaugaccuggugccgccgggcgaacagacccgaaagcaagcagcgcucuuucgggggaacaggcgggaauguguccgucaccagccagucuggcaaagugauuccuuccugggagagcuacaaguccggaggcgaaauccggcucuga

SEQ ID NO: 223890 - RNA, 1575 nt, Artificial Sequence; identical to SEQ ID NO: 222644
  derived and/or modified CDS sequence (opt5) from glycoprotein__RABV__LC018482.1

SEQ ID NO: 223891 - RNA, 1575 nt, Artificial Sequence; identical to SEQ ID NO: 222643
  derived and/or modified CDS sequence (opt5) from glycoprotein__RABV__LC018483.1

SEQ ID NO: 223892 - RNA, 1575 nt, Artificial Sequence; identical to SEQ ID NO: 222670
  derived and/or modified CDS sequence (opt5) from glycoprotein__RABV__LC018484.1

SEQ ID NO: 223893 - RNA, 1575 nt, Artificial Sequence; identical to SEQ ID NO: 222667
  derived and/or modified CDS sequence (opt5) from glycoprotein__RABV__LC018485.1

SEQ ID NO: 223894 - RNA, 1575 nt, Artificial Sequence; identical to SEQ ID NO: 222644
  derived and/or modified CDS sequence (opt5) from glycoprotein__RABV__LC018486.1

SEQ ID NO: 223895 - RNA, 1575 nt, Artificial Sequence; identical to SEQ ID NO: 222667
  derived and/or modified CDS sequence (opt5) from glycoprotein__RABV__LC018487.1

SEQ ID NO: 223896 - RNA, 1575 nt, Artificial Sequence; identical to SEQ ID NO: 222671
  derived and/or modified CDS sequence (opt5) from glycoprotein__RABV__LC018488.1

SEQ ID NO: 223897 - RNA, 1575 nt, Artificial Sequence; identical to SEQ ID NO: 222667
  derived and/or modified CDS sequence (opt5) from glycoprotein__RABV__LC018489.1

SEQ ID NO: 223898 - RNA, 1575 nt, Artificial Sequence; identical to SEQ ID NO: 222667
  derived and/or modified CDS sequence (opt5) from glycoprotein__RABV__LC018490.1

SEQ ID NO: 223899 - RNA, 1575 nt, Artificial Sequence; identical to SEQ ID NO: 222644
  derived and/or modified CDS sequence (opt5) from glycoprotein__RABV__LC018493.1

SEQ ID NO: 223900 - RNA, 1575 nt, Artificial Sequence; identical to SEQ ID NO: 222667
  derived and/or modified CDS sequence (opt5) from glycoprotein__RABV__LC018494.1

SEQ ID NO: 223901 - RNA, 1575 nt, Artificial Sequence; identical to SEQ ID NO: 222667
  derived and/or modified CDS sequence (opt5) from glycoprotein__RABV__LC018495.1

SEQ ID NO: 223902 - RNA, 1575 nt, Artificial Sequence; identical to SEQ ID NO: 222667
  derived and/or modified CDS sequence (opt5) from glycoprotein__RABV__LC018496.1

SEQ ID NO: 223903 - RNA, 1575 nt, Artificial Sequence
  derived and/or modified CDS sequence (opt5) from glycoprotein__RABV__LC018497.1
augaucccccaggcccuucucuucgugccucugcuugucuuuagccugugcuucggcaaguuuccgauuuacaccauccccgacaaacucgggccuuggucccccauugauauccaccaucugucuuguccuaacaaucuuguuguggaggacgaaggaugcacaaaccugagcggcuucuccuauauggagcucaaggugggguacauuucugcuaucaaagucaauggauuuacguguaccggcgugguuacagaagccgagaccuauacaaacuucgugggguacgucaccacaaccuuuaagagaaaacacuuccggcccacgccugaugcgugccgcagcgcuuauaauuggaagauggccggagacccgagauacgaagagucccugcauaaccccuauccugauuaccacuggcugcggaccgugaagacaaccaaagagucucucguuaucauuagccccuccguggccgaccuggauccuuacgacaagagccuucauucucgcgucuuucccuccggcaaauguagcggcaucacagugucuuccaccuauugcagcacgaaucacgauuacacaauuuggaugccggaaaacccuagacuggggaccucuugugacaucuucacaaauucccggggaaagcgcgcuagcaaaggcuccaagaccugcggguuuguggaugagagaggacucuauaagucucugaaaggcgccuguaagcugaaacugugcgggguccucggacugcggcugauggacggcaccugggcugccauucaaacaagcgaugaaacgaaguggugucccccugaccagcucguuaaccugcacgacuuccgcuccgaugagaucgagcaucuugugguggaggaacuggucaaaaagagagaagagugccucgacgcgcuggaaagcauuaugaccacaaaaucuguguccuuucggcgccuuagccaccugagaaagcucguucccggcuucgggaaggccuacaccaucuucaauaaaacacugauggaggcugaugcccauuauaagucugugcggaccuggaacgagaucauucccagcaaaggaugccugcgcgucggcgggagaugucacccucacgugaauggaguguuuuucaacggcaucauucucgggccggacggacauguucugauccccgaaaugcaguccucucuucugcagcaacacauggagcuccuggaaagcuccgucauuccucuuaugcauccccuggcugauccuagcacgguguuuaaggacgaugacgaggccgaagauuucgucgaggugcaccuccccgacguucauaaacaggugucuggcgucgaucugggccugccguccugggggaaguacgugcucaugagcgcgggaguucugacagcccuuaugcugaugaucuuucucacccggugcuguagacgcgcuaaucgggccgagucugcucagcacucccugggcgaaagagggcgcaaggugagcgucaccucccagucuggacgggugaucagcuccugggagucuuauaaaagcggcggggaaacaaagcuguga

SEQ ID NO: 223904 - RNA, 1575 nt, Artificial Sequence; identical to SEQ ID NO: 222667
  derived and/or modified CDS sequence (opt5) from glycoprotein__RABV__LC018498.1

SEQ ID NO: 223905 - RNA, 1575 nt, Artificial Sequence
  derived and/or modified CDS sequence (opt5) from glycoprotein__RABV__LC018501.1
augaucccccaggcccuucucuucgugccucugcuugucuuuagccugugcuucggcaaguuuccgauuuacaccauccccgacaaacucgggccuuggucccccauugauauccaccaucugucuuguccuaacaaucuuguuguggaggacgaaggaugcacaaaccugagcggcuucuccuauauggagcucaaggugggguacauuucugcuaucaaagucaauggauuuacguguaccggcgugguuacagaagccgagaccuauacaaacuucgugggguacgucaccacaaccuuuaagagaaaacacuuccggcccacgccugaugcgugccgcgcugccuauaauuggaagauggccggagacccgagauacgaagagagccugcauaaccccuauccugauuaccacuggcugcggaccgugaagacaaccaaagagucccucguuaucauuucucccagcguggcugaccuggauccuuacgacaagucccuucauagccgcgucuuucccucuggcaaauguuccggcaucacagugagcucuaccuauugcuccacgaaucacgauuacacaauuuggaugccggaaaacccuagacuggggaccagcugugacaucuucacaaauucucggggaaagcgcgccuccaaaggcagcaagaccugcggguuuguggaugagagaggacucuauaagucccugaaaggcgcuuguaagcugaaacugugcgggguccucggacugcggcugauggacggcaccugggccgcgauucaaacaucugaugaaacgaaguggugucccccugaccagcucguuaaccugcacgacuuccgcagcgaugagaucgagcaucuugugguggaggaacuggucaaaaagagagaagagugccucgacgcccuggaauccauuaugaccacaaaaagcgugucuuuucggcgccuuucccaccugagaaagcucguucccggcuucgggaaggcuuacaccaucuucaauaaaacacugauggaggccgaugcucauuauaagagcgugcggaccuggaacgagaucauucccucuaaaggaugccugcgcgucggcgggagaugucacccucacgugaauggaguguuuuucaacggcaucauucucgggccggacggacauguucugauccccgaaaugcagagcucccuucugcagcaacacauggagcuccuggaaucuagcgucauuccucuuaugcauccccuggccgauccuuccacgguguuuaaggacgaugacgaggcggaagauuucgucgaggugcaccuccccgacguucauaaacaggugagcggcgucgaucugggccugccgucuugggggaaguacgugcucauguccgccggaguucugacagcucuuaugcugaugaucuuucucaugaccugcugucggagaaccaaucgcgccgagagcgcucagcacucuccuggcgaacgggggagaaagguguccgucacaagccaguccggacgcgugaucucuagcugggaguccuauaaaucuggcggggaaaccaagcuguga

SEQ ID NO: 223906 - RNA, 1575 nt, Artificial Sequence; identical to SEQ ID NO: 222644
  derived and/or modified CDS sequence (opt5) from glycoprotein__RABV__LC018502.1

SEQ ID NO: 223907 - RNA, 1575 nt, Artificial Sequence
  derived and/or modified CDS sequence (opt5) from glycoprotein__RABV__LC018503.1
augaucccccaggcccugcucuuugugccucugcuugucuuuagccugugcuucggcaaguuuccgauuuacaccauccccgacaaacucgggccuuggucccccauugauauccaccaucugucuuguccuaacaaucuuguuguggaggacgaaggaugcacaaaccugagcggcuucuccuauauggagcucaaggugggguacauuucugcuaucaaagucaauggauuuacguguaccggcgugguuacagaagccgagaccuauacaaacuucgugggguacgucaccacaaccuuuaagagaaaacacuuccggcccacgccugaugcgugccgcgcugccuauaauuggaagauggccggagacccgagauacgaagagagccugcauaaccccuauccugauuaccacuggcugcggaccgugaagacaaccaaagagucccucguuaucauuucucccagcguggcugaccuggauccuuacgacaagucccuucauagccgcgucuuucugaauggcaaauguucuggcaucacaguguccagcaccuauugcucuacgaaccacgauuacacaauuuggaugcccgaaaauccgagacucgggaccuccugugacaucuucacaaacagccggggaaagcgcgccucuaaaggcuccaagaccugcggguuuguggaugagagaggacuguauaagagccuuaaaggcgcuuguaagcugaaacucugcgggguccugggacugcggcucauggacggcaccugggccgcgauucaaacauccgaugaaacgaagugguguccucccgaccagcugguuaaucuucacgacuuccgcucugaugagaucgagcaucuggugguggaggaacucgucaaaaagagagaagagugccuggacgcccuugaaagcauuaugaccacaaaauccgugagcuuucggcgccugucucaccucagaaagcugguuccuggcuucgggaaggcuuacaccaucuucaacaaaacacugauggaggccgaugcucauuauaaguccgugcggaccuggaaugagaucauucccagcaaaggaugccuccgcgucggcgggagaugucacccccacgugaacggaguuuucuucaauggcaucauucuggggccugacggacaugugcuuaucccggaaaugcagucuagccugcuccagcaacacgucgagcugcuugaauccucugugauuccccugaugcauccucucgccgaucccagcacggucuuuaaggacgaugacgaggcggaagauuucguggagguucaccuuccugacgugcauaaacaggucuccggcguggaucugggccuccccagcugggggaaguacguucugaugucugccggagugcuuacagcucugaugcucaugaucuuucugaugaccugcugucggagagccaaccgcgcugaguccgcccagcacagccugggcgaacgggggagaaaggucucugugaccucccagagcggacgcgugguuuccucuugggagagcuauaaauccggcggggaaacaaagcuguga

SEQ ID NO: 223908 - RNA, 1575 nt, Artificial Sequence; identical to SEQ ID NO: 222644
  derived and/or modified CDS sequence (opt5) from glycoprotein__RABV__LC018504.1

SEQ ID NO: 223909 - RNA, 1575 nt, Artificial Sequence
  derived and/or modified CDS sequence (opt5) from glycoprotein__RABV__LC018505.1
augaucccccaggcccuucucuucgugccucugcuugucuuuagccugugcuucggcaaguuuccgauuuacaccauccccgacaaacucgggccuuggucccccauugauauccaccaucugucuuguccuaacaaucuuguuguggaggacgaaggaugcacaaaccugagcggcuucuccuauauggagcucaaggugggguacauuucugcuaucaaagucaauggauuuacguguaccggcgugguuacagaagccgagaccuauacaaacuucgugggguacgucaccacaaccuuuaagagaaaacacuuccggcccacgccugaugcgugccgcgcugccuauaauuggaagauggccggagacccgagauacgaagagagccugcauaaccccuauccugauuaccacuggcugcggaccgugaagacaaccaaagagucccucguuaucauuucucccagcguggcugaccuggauccuuacgacaagucccuucauagccgcgucuuucccaauggcaaauguucuggcaucacaguguccagcaccuauugcucuacgaaccacgauuacacaauuuggaugccggaaaauccuagacuggggaccuccugugacaucuucacaaacagccggggaaagcgcgccucuaaaggcuccaagaccugcggguuuguggaugagagaggacucuauaagagccugaaaggcgcuuguaagcugaaacugugcgggguccucggacugcggcugauggacggcaccugggccgcgauucaaacauccgaugaaacgaaguggugucccccugaccagcucguuaaucugcacgacuuccgcucugaugagaucgagcaucuugugguggaggaacuggucaaaaagagagaagagugccucgacgcccuggaaagcauuaugaccacaaaauccgugagcuuucggcgccuuucucaccugagaaagcucguucccggcuucgggaaggcuuacaccaucuucaacaaaacacugauggaggccgaugcucauuauaaguccgugcggaccuggaaugagaucauucccagcaaaggaugccugcgcgucggcgggagaugucacccucacgugaacggaguguuuuucaauggcaucauucucgggccggacggacauguucugauccccgaaaugcagucuagccuucugcagcaacacauggagcuccuggaauccucugucauuccucuuaugcauccccuggccgauccuagcacgguguuuaaggacgaugacgaggcggaagauuucgucgaggugcaccuccccgacguucauaaacagguguccggcgucgaucugggccugccgagcugggggaaguacgugcucaugucugccggaguucugacagcucuuaugcugaugaucuuucucaugaccugcugucggagagccaaccgcgcugaguccgcccagcacagccugggcgaacgggggagaaaggugucugucaccucccagagcggacgcgugaucuccucuugggagagcuauaaauccggcggggaaacaaagcuguga

SEQ ID NO: 223910 - RNA, 1575 nt, Artificial Sequence
  derived and/or modified CDS sequence (opt5) from glycoprotein__RABV__LC018506.1
augaucccccaggcccuucucuucgugccucugcuugucuuuagccugugcuucggcaaguuuccgauuuacaccauccccgacaaacucgggccuuggucccccauugauauccaccaucugucuuguccuaacaaucuuguuguggaggacgaaggaugcacaaaccugagcggcuucuccuauauggagcucaaggugggguacauuucuacgaucaaagucaauggauuuaccuguacaggcgugguuaccgaagcugagacauauaccaacuucgugggguacgucacaaccacguuuaagagaaaacacuuccggcccaccccugaugccugccgcgcggcuuauaauuggaagauggccggagacccgagauacgaagagagccugcauaaccccuauccugauuaccacuggcugcggacagugaagaccacaaaagagucccucguuaucauuucucccagcguggccgaccuggauccuuacgacaagucccuucauagccgcgucuuucccaauggcaaauguucuggcaucaccguguccagcacguauugcucuacaaaccacgauuacaccauuuggaugccggaaaauccuagacuggggacauccugugacaucuucaccaacagccggggaaagcgcgcuucuaaaggcuccaagaccugcggguuuguggaugagagaggacucuauaagagccugaaaggcgccuguaagcugaaacugugcgggguccucggacugcggcugauggacggcacaugggcugccauucaaacguccgaugaaaccaaguggugucccccugaccagcucguuaaucugcacgacuuccgcucugaugagaucgagcaucuugugguggaggaacuggucaaaaagagagaagagugccucgacgcgcuggaaagcauuaugacaaccaaauccgugagcuuucggcgccuuucucaccugagaaagcucguucccggcuucgggaaggccuacacaaucuucaacaaaacccugauggaggcugaugcccauuauaaguccgugcggacguggaaugagaucauucccagcaaaggaugccugcgcgucggcgggagaugucacccucacgugaacggaguguuuuucaauggcaucauucucgggccggacggacauguucugauccccgaaaugcagucuagccuucugcagcaacacauggagcuccuggaauccucugucauuccucuuaugcauccccuggcugauccuagcacaguguuuaaggacgaugacgaggccgaagauuucgucgaggugcaccuccccgacguucauaaacagguguccggcgucgaucugggccugccgagcugggggaaguacgugcucaugucugcgggaguucugaccgcccuuaugcugaugaucuuucucaugaccugcugucggagagcuaaccgcgccgaguccgcucagcacagccugggcgaacgggggagaaaggugucugucacaucccagagcggacgcgugaucuccucuugggagagcuauaaauccggcggggaaaccaagcuguga

SEQ ID NO: 223911 - RNA, 1575 nt, Artificial Sequence; identical to SEQ ID NO: 222644
  derived and/or modified CDS sequence (opt5) from glycoprotein__RABV__LC018507.1

SEQ ID NO: 223912 - RNA, 1575 nt, Artificial Sequence; identical to SEQ ID NO: 222667
  derived and/or modified CDS sequence (opt5) from glycoprotein__RABV__LC018508.1

SEQ ID NO: 223913 - RNA, 1575 nt, Artificial Sequence; identical to SEQ ID NO: 222690
  derived and/or modified CDS sequence (opt5) from glycoprotein__RABV__LC018509.1

SEQ ID NO: 223914 - RNA, 1575 nt, Artificial Sequence; identical to SEQ ID NO: 222667
  derived and/or modified CDS sequence (opt5) from glycoprotein__RABV__LC018513.1

SEQ ID NO: 223915 - RNA, 1575 nt, Artificial Sequence; identical to SEQ ID NO: 222667
  derived and/or modified CDS sequence (opt5) from glycoprotein__RABV__LC018514.1

SEQ ID NO: 223916 - RNA, 1575 nt, Artificial Sequence; identical to SEQ ID NO: 222667
  derived and/or modified CDS sequence (opt5) from glycoprotein__RABV__LC018515.1

SEQ ID NO: 223917 - RNA, 1575 nt, Artificial Sequence
  derived and/or modified CDS sequence (opt5) from glycoprotein__RABV__LC018516.1
augaucccccaggcccugcuguucgugccucugcuugucuuuagccugugcuucggcaaguuuccgauuuacaccauccccgacaaacucgggccuuggucccccauugauauccaccaucugucuuguccuaacaaucuuguuguggaggacgaaggaugcacaaaccugagcggcuucuccuauauggagcucaaggugggguacauuucugcuaucaaagucaauggauuuacguguaccggcgugguuacagaagccgagaccuauacaaacuucgugggguacgucaccacaaccuuuaagagaaaacacuuccggcccacgccugaugcgugccgcgcugccuauaauuggaagauggccggagacccgagauacgaagagagccugcauaaccccuauccugauuaccacuggcugcggaccgugaagacaaccaaagagucccucguuaucauuucucccagcguggcugaccuggauccuuacgacaagucccuucauagccgcgucuuucccucuggcaaauguuccggcaucacagugagcucuaccuauugcuccacgaaucacgauuacacaauuuggaugccggaaaacccuagacuggggaccagcugugacaucuucacaaauucucggggaaagcgcgccuccaaaggcagcaagaccugcggguuuguggaugagagaggacucuaucggucccugaagggcgcuuguaaacuuaagcugugcgggguccucggacugcgccugauggacggcaccugggccgcgauucaaacaucugaugaaacgaaauggugucccccugaccagcucguuaaccugcacgacuucagaagcgaugagaucgagcaucuugugguggaggaacuggucaagaaacgggaagagugccucgacgcccuggaauccauuaugaccacaaagagcgugucuuuucgcagacuuucccaccuccggaaacucguucccggcuucgggaaggcuuacaccaucuucaauaagacacugauggaggccgaugcucauuauaaaagcgugcgcaccuggaacgagaucauucccucuaagggaugccugagagucggcgggcggugucacccucacgugaauggaguguuuuucaacggcaucauucucgggccggacggacaugugcugauccccgaaaugcagagcucccuucugcagcaacacauggagcuccuggaaucuagcgucauuccucuuaugcauccccuggccgauccuuccacgguguuuaaagacgaugacgaggcggaagauuucgucgaggugcaccuccccgacguucauaagcagguuagcggcgucgaucugggccugccgucuugggggaaauacgugcucauguccgccggaguucugacagcucuuaugcugaugaucuuucucaugaccugcuguagacgcaccaaucgggccgagagcgcucagcacucucugggcgaaagagggcgcaagguguccgucacaagccaguccggacgggugaucucuagcugggaguccuauaagucuggcggggaaaccaaacuguga

SEQ ID NO: 223918 - RNA, 1575 nt, Artificial Sequence
  derived and/or modified CDS sequence (opt5) from glycoprotein__RABV__LC018517.1
augaucccccaggcccuucucuucgugccucugcuugucuuuagccugugcuucggcaaguuuccgauuuacaccauccccgacaaacucgggccuuggucccccauugauauccaccaucugucuuguccuaacaaucuuguuguggaggacgaaggaugcacaaaccugagcggcuucuccuauauggagcucaaggugggguacauuucugcuaucaaagucaauggauuuacguguaccggcgugguuacagaagccgagaccuauacaaacuucgugggguacgucaccacaaccuuuaagagaaaacacuuccggcccacgccugaugcgugccgcgcugccuauaauuggaagauggccggagacccgagauacgaagagagccugcauaaccccuauccugauuaccacuggcugcggaccgugaagacaaccaaagagucccucguuaucauuucucccagcguggcugaccuggauccuuacgacaagucccuucauagccgcgucuuucccaauggcaaauguucuggcaucacaguguccagcaccuauugcucuacgaaccacgauuacacaauuuggaugccggaaaauccuagacuggggaccuccugugacaucuucacaaacagccggggaaagcgcgccucuaaaggcuccaagaccugcggguuuguggaugagagaggacucuauaagagccugaaaggcgcuuguaagcugaaacugugcgggguccucggacugcggcugauggacggcaccugggccgcgauucaaacauccgaugaaacgaaguggugucccccugaccagcucguuaaucugcacgacuuccgcucugaugagaucgagcaucuugugguggaggaacuggucaaaaagagagaagagugccucgacgcccuggaaagcauuaugaccacaaaauccgugagcuuucggcgccuuucucaccugagaaagcucguucccggcuucgggaaggcuuacaccaucuucaacaaaacacugauggaggccgaugcucauuauaaguccgugcggaccuggaaugagaucauucccagcaaaggaugccugcgcgucggcgggagaugucacccucacgugaacggaguguuuuucaauggcaucauucucgggccggacggacauguucugauccccgaaaugcagucuagccuucugcagcaacacauggagcuccuggaauccucugucauuccucuuaugcauccccuggccgauccuagcacgguguuuaaggacgaugacgaggcggaagauuucgucgaggugcaccuccccgacguucauaaacagguguccggcgucgaucugggccugccgagcugggggaaguacgugcucaugucugccggaguuuccacagcucugaugcuuaugaucuuucugaugaccugcugucggagagccaaccgcgcugagagcgcccagcacucucucggcgaacgggggagaaagguguccgucaccagccaguccggacgcgugaucucuagcugggaguccuauaaaucuggcggggaaacaaagcuguga

SEQ ID NO: 223919 - RNA, 1575 nt, Artificial Sequence; identical to SEQ ID NO: 222643
  derived and/or modified CDS sequence (opt5) from glycoprotein__RABV__LC018518.1

SEQ ID NO: 223920 - RNA, 1575 nt, Artificial Sequence; identical to SEQ ID NO: 222643
  derived and/or modified CDS sequence (opt5) from glycoprotein__RABV__LC018519.1

SEQ ID NO: 223921 - RNA, 1575 nt, Artificial Sequence; identical to SEQ ID NO: 222644
  derived and/or modified CDS sequence (opt5) from glycoprotein__RABV__LC018520.1

SEQ ID NO: 223922 - RNA, 1575 nt, Artificial Sequence
  derived and/or modified CDS sequence (opt5) from glycoprotein__RABV__LC018522.1
augaucccccaggcccugcuguucgugccucugcuugucuuuagccugugcuucggcaaguuuccgauuuacaccauccccgacaaacucgggccuuggucccccauugauauccaccaucugucuuguccuaacaaucuuguuguggaggacgaaggaugcacaaaccugagcggcuucuccuauauggagcucaaggugggguacauuucugcuaucaaagucaauggauuuacguguaccggcgugguuacagaagccgagaccuauacaaacuucgugggguacgucaccacaaccuuuaagagaaaacacuuccggcccacgccugaugcgugccgcgcugccuauaauuggaagauggccggagacccgagauacgaagagagccugcauaaccccuauccugauuaccacuggcugcggaccgugaagacaaccaaagagucccucguuaucauuucucccagcguggcugaccuggauccuuacgacaagucccuucauagccgcgucuuucccaauggcaaauguucuggcaucacaguguccagcaccuauugcucuacgaaccacgauuacacaauuuggaugccggaaaauccuagacuggggaccuccugugacaucuucacaaacagccggggaaagcgcgccucuaaaggcuccagaaccugcggguuuguggaugagcggggacucuauaagagccugaagggcgcuuguaaacuuaagcugugcgggguccucggacugcgccugauggacggcaccugggccgcgauucaaacauccgaugaaacgaaauggugucccccugaccagcucguuaaucugcacgacuucagaucugaugagaucgagcaucuugugguggaggaacuggucaagaaacgggaagagugccucgacgcccuggaaagcauuaugaccacaaaguccgugagcuuucgcagacuuucucaccuccggaaacucguucccggcuucgggaaggcuuacaccaucuucaacaagacacugauggaggccgaugcucauuauaaauccgugcgcaccuggaaugagaucauucccagcaagggaugccugagagucggcgggcggugucacccucacgugaacggaguguuuuucaauggcaucauucucgggccggacggacaugugcugauccccgaaaugcagucuagccuucugcagcaacacauggagcuccuggaauccucugucauuccucuuaugcauccccuggccgauccuagcacgguguuuaaagacgaugacgaggcggaagauuucgucgaggugcaccuccccgacguucauaagcagguuuccggcgucgaucugggccugccgagcugggggaaauacgugcucaugucugccggaguucugacagcucuuaugcugaugaucuuucucaugaccugcuguagacgcgccaaccgggcugaguccgcccagcacagccugggcgaaagagggcgcaaggugucugucaccucccagagcggacgggugaucuccucuugggagagcuauaaguccggcggggaaacaaaacuguga

SEQ ID NO: 223923 - RNA, 1575 nt, Artificial Sequence
  derived and/or modified CDS sequence (opt5) from glycoprotein__RABV__LC018523.1
augaucccccaggcccuucucuucgugccucugcuugucuuuagccugugcuucggcaaguuuccgauuuacaccauccccgacaaacucgggccuuggucccccauugauauccaccaucugucuuguccuaacaaucuuguuguggaggacgaaggaugcacaaaccugagcggcuucuccuauauggagcucaaggugggguacauuucugcuaucaaagucaauggauuuacguguaccggcgugguuacagaagccgagaccuauacaaacuucgugggguacgucaccacaaccuuuaagagaaaacacuuccggcccacgccugaugcgugccgcgcugccuauaauuggaagauggccggagacccgagauacgaagagagccugcauaaccccuauccugauuaccacuggcugcggaccgugaagacaaccaaagagucccucguuaucauuucucccagcguggcugaccuggauccuuacgacaagucccuucauagccgcgucuuucccucuggcaaauguuccggcaucacagugagcucuaccuauugcuccacgaaucacgauuacacaauuuggaugccggaaaacccuagacuggggaccagcugugacaucuucacaaauucucggggaaagcgcgccuccaaaggcagcaagaccugcggguuuguggaugagagaggacucuauaagucccugaaaggcgcuuguaagcugaaacugugcgggguccucggacugcggcugauggacggcaccugggccgcgauucaaacaucugaugaaacgaaguggugucccccugaccagcucguuaaccugcacgacuuccgcagcgaugagaucgagcaucuugugguggaggaacuggucaaaaagagagaagagugccucgacgcccuggaauccauuaugaccacaaaaagcgugucuuuucggcgccuuucccaccugagaaagcucguucccggcuucgggaaggcuuacaccaucuucaauaaaacacugauggaggccgaugcucauuauaagagcgugcggaccuggaacgagaucauucccucuaaaggaugccugcgcgucggcgggagaugucacccucacgugaauggaguguuuuucaacggcaucauucucgggccggacggacauguucugauccccgaaaugcagagcucccuucugcagcaacacauggagcuccuggaaucuagcgucauuccucuuaugcauccccuggccgauccuuccacgguguuuaaggacgaugacgaggcggaagauuucgucgaggugcaccuccccgacguucauaaacaggugagcggcgucgaucugggccugccgucuugggggaaguacgugcucauguccgccggaauccugacagcucuuaugcugaugaucuuucucaugaccugcugucggagagccaaucgcguugagagcgcucagcacucucugggcgaacgggggagaaagguguccgucaccagccaguccggacgcgugauuucuagcugggaguccuauaaaucuggcggggaaacaaagcuguga

SEQ ID NO: 223924 - RNA, 1575 nt, Artificial Sequence; identical to SEQ ID NO: 222643
  derived and/or modified CDS sequence (opt5) from glycoprotein__RABV__LC018524.1

SEQ ID NO: 223925 - RNA, 1575 nt, Artificial Sequence
  derived and/or modified CDS sequence (opt5) from glycoprotein__RABV__LC018525.1
augaucccccaggcccuucucuucgugccucugcuugucuuuagccugugcuucggcaaguuuccgauuuacaccauccccgacaaacucgggccuuggucccccauugauauccaccaucugucuuguccuaacaaucuuguuguggaggacgaaggaugcacaaaccugagcggcuucuccuauauggagcucaaggugggguacauuucugcuaucaaagucaauggauuuacguguaccggcgugguuacagaagccgagaccuauacaaacuucgugggguacgucaccacaaccuuuaagagaaaacacuuccggcccacgccugaugcgugccgcgcugccuauaauuggaagauggccggagacccgagauacgaagagagccugcauaaccccuauccugauuaccacuggcugcggaccgugaagacaaccaaagagucccucguuaucauuucucccagcguggcugaccuggauccuuacgacaagucccuucauagccgcgucuuucccucuggcaaauguuccggcaucacagugagcucuaccuauugcuccacgaaucacgauuacacaauuuggaugccggaaaacccuagacuggggaccagcugugacaucuucacaaauucucggggaaagcgcgccuccaaaggcagcaagaccugcggguuuguggaugagagaggacucuauaagucccugaaaggcgcuuguaagcugaaacugugcgggguccucggacugcggcugauggacggcaccugggccgcgauucaaacaucugaugaaacgaaguggugucccccugaccagcucguuaaccugcacgacuuccgcagcgaugagaucgagcauuuugugguggaggaacuugucaaaaagagagaagagugccuggacgcccucgaauccauuaucaccacaaaaagcgugucuuuccggcgccugucccaccuuagaaagcugguucccggcuucgggaaggcuuacaccaucuuuaauaaaacacucauggaggccgaugcucauuauaagagcgugcggaccuggaacgagauuauccccucuaaaggaugccugcgcgucggcgggagaugucacccucacgugaauggaguuuucuuuaacggcauuauccuggggccggacggacaugugcucauucccgaaaugcagagcucccugcuucagcaacacauggagcugcucgaaucuagcgucaucccucugaugcauccccuugccgauccuuccacgguguucaaggacgaugacgaggcggaagauuuugucgaggugcaucugcccgacguucacaaacaggugagcggcgucgaucucggccugccgucuugggggaaguacgugcugauguccgccggaguucucacagcucugaugcuuaugaucuuccugaugaccugcugucggagagccaaucgcgcugagagcgcccagcacucucucggcgaacgggggagaaagguguccgucaccagccaguccggacgcgugauuucuagcugggaguccuauaaaucuggcggggaaacaaagcuguga

SEQ ID NO: 223926 - RNA, 1575 nt, Artificial Sequence
  derived and/or modified CDS sequence (opt5) from glycoprotein__RABV__LC018526.1
augaucccccaggcccugcucuuugugccucugauggucuuuagccuuugcuucggcaaguuuccgauuuacaccauccccgacaaacuggggccuuggucccccauugauauccaccaucucucuuguccuaacaaucugguuguggaggacgaaggaugcacaaaccuuagcggcuucuccuauauggagcugaaggugggguacauuucugcuaucaaagucaauggauuuacguguaccggcgugguuacagaagccgagaccuauacaaacuucgugggguacgucaccacaaccuuuaagagaaaacacuuccggcccacgccugaugcgugccgcgcugccuauaauuggaagauggccggagacccgagauacgaagagagccuccauaaccccuauccugauuaccacuggcugcggaccgugaagacaaccaaagagucccugguuaucauuucucccagcguggcugaccucgauccuuacgacaagucccugcauagccgcgucuuucccucuggcaaauguuccggcaucacagugagcucuaccuauugcuccacgaaucacgauuacacaauuuggaugccggaaaacccuagacuugggaccagcugugacaucuucacaaauucucggggaaagcgcgccuccaaaggcagcaagaccugcggguuuguggaugagagaggacuguauaagucccucaaaggcgcuuguaagcugaaacuuugcgggguccugggacuccggcugauggacggcaccugggccgcgauucaaacaucugaugaaacgaaguggugucccccugaccagcugguuaaccuccacgacuuccgcagcgaugagaucgagcaucuggugguggaggaacuugucaaaaagagagaagagugccuggacgcccucgaauccauuaugaccacaaaaagcgugucuuuucggcgccugucccaccuuagaaagcugguucccggcuucgggaaggcuuacaccaucuucaauaaaacacucauggaggccgaugcucauuauaagagcgugcggaccuggaacgagaucauucccucuaaaggaugccugcgcgucggcgggagaugucacccucacgugaauggaguuuucuucaacggcaucauucuggggccggacggacaugugcucauccccgaaaugcagagcucccugcuucagcaacacauggagcugcucgaaucuagcgucauuccucugaugcauccccuugccgauccuuccacgguguuuaaggacgaugacgaggcggaagauuucgucgaggugcaucugcccgacguucacaaacaggugagcggcgucgaucucggccugccgucuugggggaaguacgugcugauguccgccggaguucucacagcucugaugcuuaugaucuuucugaugaccugcugucggagaaccaaucgcgccgagagcgcucagcacucucucggcgaacgggggagaaagguguccgucacaagccaguccggacgcgugaucucuagcugggaguccuauaaaucuggcggggaaaccaagcuguga

SEQ ID NO: 223927 - RNA, 1575 nt, Artificial Sequence
  derived and/or modified CDS sequence (opt5) from glycoprotein__RABV__LC018527.1
augaucccccaggcccuucucuucgugccucugcuugucuuuagccugugcuucggcaaguuuccgauuuacaccauccccgacaaacucgggccuuggucccccauugauauccaccaucugucuuguccuaacaaucuuauuguugaggacgaaggaugcacaaaccugagcggcuucuccuauauggagcucaaggugggguacaucucugcuaucaaagugaauggauuuacguguaccggcgucgugacagaagccgagaccuauacaaacuucguuggguacgugaccacaaccuuuaagagaaaacacuuccggcccacgccugaugcgugccgcgcugccuauaauuggaagauggccggagacccgagauacgaagagagccugcauaaccccuauccugauuaccacuggcugcggaccgucaagacaaccaaagagucccucgugauuaucucucccagcguugcugaccuggauccuuacgacaagucccuucauagccgcguguuucccucuggcaaauguuccggcauuacagucagcucuaccuauugcuccacgaaucacgauuacacaaucuggaugccggaaaacccuagacuggggaccagcugugacauuuucacaaauucucggggaaagcgcgccuccaaaggcagcaagaccugcggguuuguggaugagagaggacucuauaagucccugaaaggcgcuuguaagcugaaacugugcggggugcucggacugcggcugauggacggcaccugggccgcgauccaaacaucugaugaaacgaaguggugucccccugaccagcucgucaaccugcacgacuuccgcagcgaugagauugagcaucuuguuguggaggaacuggugaaaaagagagaagagugccucgacgcccuggaauccaucaugaccacaaaaagcgucucuuuucggcgccuuucccaccugagaaagcucgugcccggcuucgggaaggcuuacaccaucuucaauaaaacacugauggaggccgaugcucauuauaagagcguucggaccuggaacgagauuauccccucuaaaggaugccugcgcgugggcgggagaugucacccucacgucaauggaguguuuuucaacggcauuauccucgggccggacggacauguucugauucccgaaaugcagagcucccuucugcagcaacacauggagcuccuggaaucuagcgugaucccucuuaugcauccccuggccgauccuuccacggucuuuaaggacgaugacgaggcggaagauuucguggagguccaccuccccgacgugcauaaacagguuagcggcguggaucugggccugccgucuugggggaaguacguccucauguccgccggagugcugacagcucuuaugcugaugaucuuucucaugaccugcugucggagaaccaaucgcgccgagagcgcucagcacucucugggcgaacgggggagaaagguuuccgugacaagccaguccggacgcgucauuucuagcugggaguccuauaaaucuggcggggaaaccaagcuguga

SEQ ID NO: 223928 - RNA, 1575 nt, Artificial Sequence; identical to SEQ ID NO: 222667
  derived and/or modified CDS sequence (opt5) from glycoprotein__RABV__LC018529.1

SEQ ID NO: 223929 - RNA, 1575 nt, Artificial Sequence; identical to SEQ ID NO: 222667
  derived and/or modified CDS sequence (opt5) from glycoprotein__RABV__LC018531.1

SEQ ID NO: 223930 - RNA, 1575 nt, Artificial Sequence; identical to SEQ ID NO: 222643
  derived and/or modified CDS sequence (opt5) from glycoprotein__RABV__LC018532.1

SEQ ID NO: 223931 - RNA, 1575 nt, Artificial Sequence; identical to SEQ ID NO: 222667
  derived and/or modified CDS sequence (opt5) from glycoprotein__RABV__LC018534.1

SEQ ID NO: 223932 - RNA, 1575 nt, Artificial Sequence; identical to SEQ ID NO: 222667
  derived and/or modified CDS sequence (opt5) from glycoprotein__RABV__LC018535.1

SEQ ID NO: 223933 - RNA, 1575 nt, Artificial Sequence; identical to SEQ ID NO: 222643
  derived and/or modified CDS sequence (opt5) from glycoprotein__RABV__LC018536.1

SEQ ID NO: 223934 - RNA, 1575 nt, Artificial Sequence; identical to SEQ ID NO: 222667
  derived and/or modified CDS sequence (opt5) from glycoprotein__RABV__LC018539.1

SEQ ID NO: 223935 - RNA, 1575 nt, Artificial Sequence
  derived and/or modified CDS sequence (opt5) from glycoprotein__RABV__LC018540.1
augaucccccaggcccugcuguucgugccucugcuugucuuuagccugugcuucggcaaguuuccgauuuacaccauccccgacaaacucgggccuuggucccccauugauauccaccaucugucuuguccuaacaaucuuguuguggaggacgaaggaugcacaaaccugagcggcuucuccuauauggagcucaaggugggguacauuucugcuaucaaagucaauggauuuacguguaccggcgugguuacagaagccgagaccuauacaaacuucgugggguacgucaccacaaccuuuaagagaaaacacuuccggcccacgccugaugcgugccgcgcugccuauaauuggaagauggccggagacccgagauacgaagagagccugcauaaccccuauccugauuaccacuggcugcggaccgugaagacaaccaaagagucccucguuaucauuucucccagcguggcugaccuggauccuuacgaccgcucccuucauagcagagucuuucccucuggcaaguguuccggcaucacagugagcucuaccuauugcuccacgaaucacgauuacacaauuuggaugccggaaaacccucggcuggggaccagcugugacaucuucacaaauucucgcggaaaaagagccuccaagggcagcaaaaccugcggguuuguggaugagcggggacucuauaagucccugaagggcgcuuguaaacuuaagcugugcgggguccucggacugcgccugauggacggcaccugggccgcgauucaaacaucugaugaaacgaaauggugucccccugaccagcucguuaaccugcacgacuucagaagcgaugagaucgagcaucuugugguggaggaacuggucaagaaacgggaagagugccucgacgcccuggaauccauuaugaccacaaagagcgugucuuuucgcagacuuucccaccuccggaaacucguucccggcuucgggaaggcuuacaccaucuucaauaagacacugauggaggccgaugcucauuauaaaagcgugcgcaccuggaacgagaucauucccucuaagggaugccugagagucggcgggcggugucacccucacgugaauggaguguuuuucaacggcaucauucucgggccggacggacaugugcugauccccgaaaugcagagcucccuucugcagcaacacauggagcuccuggaaucuagcgucauuccucuuaugcauccccuggccgauccuuccacgguguuuaaagacgaugacgaggcggaagauuucgucgaggugcaccuccccgacguucauaagcagguuagcggcgucgaucugggccugccgucuugggggaaauacgugcucauguccgccggaguucugacagcucuuaugcugaugaucuuucucaugaccugcuguagacgcgccaaucggguggagagcgcucagcacucucugggcgaaagagggcgcaaggucuccgugaccagccaguccggacgggugaucucuagcugggaguccuauaagucuggcggggaaacaaaacuguga

SEQ ID NO: 223936 - RNA, 1575 nt, Artificial Sequence
  derived and/or modified CDS sequence (opt5) from glycoprotein__RABV__LC018542.1
augaucccccaggcccuucucuucgugccucugcuugucuuuagccugugcuucggcaaguuuccgauuuacaccauccccgacaaacucgggccuuggucccccauugauauccaccaucugucuuguccuaacaaucuuguuguggaggacgaaggaugcacaaaccugagcggcuucuccuauauggagcucaaggugggguacauuucugcuaucaaagucaauggauuuacguguaccggcgugguuacagaagccgagaccuauacaaacuucgugggguacgucaccacaaccuuuaagagaaaacacuuccggcccacgccugaugcgugccgcgcugccuauaauuggaagauggccggagacccgagauacgaagagagccugcauaaccccuauccugauuaccacuggcugcggaccgugaagacaaccaaagagucccucguuaucauuucucccagcguggcugaccuggauccuuacgacaagucccuucauagccgcgucuuucccucuggcaaauguuccggcaucacagugagcucuaccuauugcuccacgaaucacgauuacacaauuuggaugccggaaaacccuagacuggggaccagcugugacaucuucacaucuucccggggaaagcgcgccagcaaaggcuccaagaccugcggguuuguggaugagagaggacucuauaagucucugaaaggcgcuuguaagcugaaacugugcgggguccucggacugcggcugauggacggcaccugggccgcgauucaaacaagcgaugaaacgaaguggugucccccugaccagcucguuaaucugcacgacuuccgcuccgaugagaucgagcaucuugugguggaggaacuggucaaaaagagagaagagugccucgacgcccuggaaagcauuaugaccacaaaaucuguguccuuucggcgccuuagccaccugagaaagcucguucccggcuucgggaaggcuuacaccaucuucaacaaaacacugauggaggccgaugcucauuauaagucugugcggaccuggaaugagaucauucccagcaaaggaugccugcgcgucggcgggagaugucacccucacgugaacggaguguuuuucaauggcaucauucucgggccggacggacauguucugauccccgaaaugcaguccucucuucugcagcaacacauggagcuccuggaaagcuccgucauuccucuuaugcauccccuggccgauccuagcacgguguuuaaggacgaugacgaggcggaagauuucgucgaggugcaccuccccgacguucauaaacaggugucuggcgucgaucugggccugccguccugggggaaguacgugcucaugagcgccggaguucugacagcucuuaugcugaugaucuuucucaugaccugcugucggagagccaaccgcguggagucugcucagcacucccugggcgaacgggggagaaaggucagcgugaccucccagucuggacgcgugaucagcuccugggagucuuauaaaagcggcggggaaacaaagcuguga

SEQ ID NO: 223937 - RNA, 1575 nt, Artificial Sequence
  derived and/or modified CDS sequence (opt5) from glycoprotein__RABV__LC018544.1
augaucccccaggcccuucucuucgugccucugcuugucuuuagccugugcuucggcaaguuuccgauuuacaccauccccgacaaacucgggccuuggucccccauugauauccaccaucugucuuguccuaacaaucuuguuguggaggacgaaggaugcacaaaccugagcggcuucuccuauauggagcucaaggugggguacauuucugcuaucaaagucaauggauuuacguguaccggcgugguuacagaagccgagaccuauacaaacuucgugggguacgucaccacaaccuuuaagagaaaacacuuccggcccacgccugaugcgugccgcgcugccuauaauuggaagauggccggagacccgagauacgaagagagccugcauaaccccuauccugauuaccacuggcugcggaccgugaagacaaccaaagagucccucguuaucauuucucccagcguggcugaccuggauccuuacgacaagucccuucauagccgcgucuuucccucuggcaaauguuccggcaucacagugagcucuaccuauugcuccacgaaucacgauuacacaauuuggaugccggaaaacccuagacuggggaccagcugugacaucuucacaaauucucggggaaagcgcgccuccaaaggcagcaagaccugcggguuuguggaugagagaggacucuauaagucccugaaaggcgcuuguaagcugaaacugugcgggguccucggacugcggcugauggacggcaccugggccgcgauucaaacaucugaugaaacgaaguggugucccccugaccagcucguuaaccugcacgacuuccgcagcgaugagaucgagcaucuugugguggaggaacuggucaaaaagagagaagagugccucgacgcccuggaauccauuaugaccacaaaaagcgugucuuuucggcgccuuucccaccugagaaagcucguucccggcuucgggaaggcuuacaccaucuucaauaaaacacugauggaggccgaugcucauuauaagagcgugcggaccuggaacgagaucauucccucuaaaggaugccugcgcgucggcgggagaugucacccucacgugaauggaguguuuuucaacggcaucauucucgggccggacggacauguucugauccccgaaaugcagagcucccuucugcagcaacacauggagcuccuggaaucuagcgucauuccucuuaugcauccccuggccgauccuuccacgguguuuaaggacgaugacgaggcggaagauuucgucgaggugcaccuccccgacguucauaaacaggugagcggcgucgaucugggccugccgucuugggggaaguacgugcucauguccgccggaguucugacagcucuuaugcugaugaucuuucucaugaccugcugucggagagccaauaucguggagagcgcucagcacucucugggcgaacgcgggcggaaggucuccgugaccagccaguccggaagagugauuucuagcugggaguccuauaaaucuggcggggaaacaaagcuguga

SEQ ID NO: 223938 - RNA, 1575 nt, Artificial Sequence
  derived and/or modified CDS sequence (opt5) from glycoprotein__RABV__LC018545.1
augaucccccaggcccuucucuucgugccucugcuugucuuuagccugugcuucggcaaguuuccgauuuacaccauccccgacaaacucgggccuuggucccccauugauauccaccaucugucuuguccuaacaaucuuguuguggaggacgaaggaugcacaaaccugagcggcuucuccuauauggagcucaaggugggguacauuucugcuaucaaagucaauggauuuacguguaccggcgugguuacagaagccgagaccuauacaaacuucgugggguacgucaccacaaccuuuaagagaaaacacuuccggcccacgccugaugcgugccgcgcugccuauaauuggaagauggccggagacccgagauacgaagagagccugcauaaccccuauccugauuaccacuggcugcggaccgugaagacaaccaaagagucccucguuaucauuucucccagcguggcugaccuggauccuuacgacaagucccuucauagccgcgucuuucccucuggcaaauguuccggcaucacagugagcucuaccuauugcuccacgaaucacgauuacacaauuuggaugccggaaaacccuagacuggggaccagcugugacaucuucacaaauucucggggaaagcgcgccuccaaaggcagcaagaccugcggguuuguggaugagagaggacucuauaagucccugaaaggcgcuuguaagcugaaacugugcgggguccucggacugcggcugauggacggcaccugggccgcgauucaaacaucugaugaaacgaaguggugucccccugaccagcucguuaaccugcacgacuuccgcagcgaugagaucgagcaucuugugguggaggaacuggucaaaaagagagaagagugccucgacgcccuggaauccauuaugaccacaaaaagcgugucuuuucggcgccuuucccaccugagaaagcucguucccggcuucgggaaggcuuacaccaucuucaauaaaacacugauggaggccgaugcucauuauaaggccgugcggaccuggaacgagaucauucccagcaaaggaugccugcgcgucggcgggagaugucacccucacgugaauggaguguuuuucaacggcaucauucucgggccggacggacauguucugauccccgaaaugcagucuagccuucugcagcaacacauggagcuccuggaauccucugucauuccucuuaugcauccccuggcggauccuagcacgguguuuaaggacgaugacgaggccgaagauuucgucgaggugcaccuccccgacguucauaaacagguguccggcgucgaucugggccugccgagcugggggaaguacgugcucaugucugcuggaguucugacagcccuuaugcugaugaucuuucucaugaccugcugucggagagcuaaucgcgccgaguccgcccagcacagccugggcgaacgggggagaaaggugucugucaccucccagagcggacgcgugaucuccucuugggagagcuauaaauccggcggggaaacaaagcuguga

SEQ ID NO: 223939 - RNA, 1575 nt, Artificial Sequence
  derived and/or modified CDS sequence (opt5) from glycoprotein__RABV__LC018546.1
augaucccccaggcccuucucuucgugccucugcuugucagcucccugugcuuuggcaaguucccgauuuacaccauccccgacaaacucgggccuuggucucccauugauauccaccaucugagcuguccuaacaaucuuguuguggaggacgaaggaugcacaaaccuguccggcuuuucuuauauggagcucaaggugggguacauuagcgcuaucaaagucaauggauucacguguaccggcgugguuacagaagccgagaccuauacaaacuuugugggguacgucaccacaaccuucaagagaaaacacuuucggcccacgccugaugcgugccgcgcugccuauaauuggaagauggccggagacccgagauacgaagagucccugcauaaccccuauccugauuaccacuggcugcggaccgugaagacaaccaaagagucucucguuaucauuagccccuccguggcugaccuggauccuuacgacaagagccuucauucucgcgucuuccccuccggcaaauguagcggcaucacagugucuuccaccuauugcagcacgaaucacgauuacacaauuuggaugccggaaaacccuagacuggggaccucuugugacaucuuuacaaauucccggggaaagcgcgccagcaaaggcuccaagaccugcggguucguggaugagagaggacucuauaagucucugaaaggcgcuuguaagcugaaacugugcgggguccucggacugcggcugauggacggcaccugggccgcgauucaaacaagcgaugaaacgaaguggugucccccugaccagcucguuaaccugcacgacuuucgcuccgaugagaucgagcaucuugugguggaggaacuggucaaaaagagagaagagugccucgacgcccuggaaagcauuaugaccacaaaaucuguguccuuccggcgccuuagccaccugagaaagcucguucccggcuuugggaaggcuuacaccaucuucaauaaaacacugauggaggccgaugcucauuauaagucugugcggaccuggaacgagaucauucccagcaaaggaugccugcgcgucggcgggagaugucacccucacgugaauggaguuuucuuuaacggcaucauucucgggccggacggacaugugcugauccccgaaaugcaguccucucuucugcagcaacacauggagcuccuggaaagcuccgucauuccucuuaugcauccccuggccgauccuagcacgguguucaaggacgaugacgaggcggaagauuuugucgaggugcaccuccccgacguucauaaacaggugucuggcgucgaucugggccugccguccugggggaaguacgugcucacaagcgccggaguucugaccgcucuuaugcugaugaucuuccucaugaccugcugucggaaggccaauagagcugagucugcccagcacucccugggcgaacgcgggcggaaagugagcgucacaucccagucuggaagagugaucagcuccugggagucuuauaagagcggcggggaaaccaaacuguga

SEQ ID NO: 223940 - RNA, 1575 nt, Artificial Sequence
  derived and/or modified CDS sequence (opt5) from glycoprotein__RABV__LC018548.1
augaucccccaggcccugcucuuugugccucugcuugucuuuagccugugcuucggcaaguuuccgauuuacaccauccccgacaaacucgggccuuggucccccauugauauccaccaucugucuuguccuaacaaucuuguuguggaggacgaaggaugcacaaaccugagcggcuucuccuauauggagcucaaggugggguacauuucugcuaucaaagucaauggauuuacguguaccggcgugguuacagaagccgagaccuauacaaacuucgugggguacgucaccacaaccuuuaagagaaaacacuuccggcccacgccugaugcgugccgcgcugccuauaauuggaagauggccggagacccgagauacgaagagagccugcauaaccccuauccugauuaccacuggcugcggaccgugaagacaaccaaagagucccucguuaucauuucucccagcguggcugaccuggauccuuacgacaagucccuucauagccgcgucuuucccucuggcaaauguuccggcaucacagugagcucuaccuauugcuccacgaaucacgauuacacaauuuggaugccggaaaacccuagacuggggaccagcugugacaucuucacaaauucucggggaaagcgcgccuccaaaggcagcaagaccugcggguuuguggaugagagaggacucuauaagucccugaaaggcgcuuguaagcugaaacugugcgggguccccggacuccggcugauggacggcaccugggccgcgauucaaacaucugaugaaacgaagugguguccucccgaccagcugguuaaccuccacgacuuccgcagcgaugagaucgagcaucuggugguggaggaacuugucaaaaagagagaagagugccuggacgcccucgaauccauuaugaccacaaaaagcgugucuuuucggcgccugucccaccuuagaaagcugguucccggcuucgggaaggcuuacaccaucuucaauaaaacacucauggaggccgaugcucauuauaagagcgugcggaccuggaacgagaucauuccuucuaaaggaugccugcgcgucggcgggagaugucacccgcacgugaauggaguuuucuucaacggcaucauucuggggcccgacggacaugugcucaucccugaaaugcagagcucccugcuucagcaacacauggagcugcucgaaucuagcgucauuccccugaugcauccucuugccgaucccuccacgguguuuaaggacgaugacgaggcggaagauuucgucgaggugcaccuuccggacguucauaaacaggugagcggcgucgaucucggccugccuucuugggggaaguacgugcugauguccgccggaguucucacagcucugaugcuuaugaucuuucugaugaccugcugucggagagccaaucgcgcugagagcgcccagcacucucucggcgaacgggggagaaagguguccgucaccagccaguccggacgcgugaucucuagcugggaguccuauaaaucuggcggggaaacaaagcuguga

SEQ ID NO: 223941 - RNA, 1575 nt, Artificial Sequence; identical to SEQ ID NO: 222643
  derived and/or modified CDS sequence (opt5) from glycoprotein__RABV__LC018549.1

SEQ ID NO: 223942 - RNA, 1575 nt, Artificial Sequence; identical to SEQ ID NO: 223909
  derived and/or modified CDS sequence (opt5) from glycoprotein__RABV__LC018552.1

SEQ ID NO: 223943 - RNA, 1575 nt, Artificial Sequence; identical to SEQ ID NO: 222644
  derived and/or modified CDS sequence (opt5) from glycoprotein__RABV__LC018553.1

SEQ ID NO: 223944 - RNA, 1575 nt, Artificial Sequence
  derived and/or modified CDS sequence (opt5) from glycoprotein__RABV__LC018554.1
augaucccccaggcccuucucuucgugccucugcuugucuuuagccugugcuucggcaaguuuccgauuuacaccauccccgacaaacucgggccuuggucccccauugauauccaccaucugucuuguccuaacaaucuuguuguggaggacgaaggaugcacaaaccugagcggcuucuccuauauggagcucaaggugggguacauuucugcuaucaaagucaauggauuuacguguaccggcgugguuacagaagccgagaccuauacaaacuucgugggguacgucaccacaaccuuuaagagaaaacacuuccggcccacgccugaugcgugccgcgcugccuauaauuggaagauggccggagacccgagauacgaagagagccugcauaaccccuauccugauuaccacuggcugcggaccgugaagacaaccaaagagucccucguuaucauuucucccagcguggcugaccuggauccuuacgacaagucccuucauagccgcgucuuucccucuggcaaauguuccggcaucacagugagcucuaccuauugcuccacgaaucacgauuacacaauuuggaugccggaaaacccuagacuggggaccagcugugacaucuucacaaauucucggggaaagcgcgccuccaaaggcagcaagaccugcggguuuguggaugagagaggacucuauaagucccugaaaggcgcuuguaagcugaaacugugcgggguccucggacugcggcugauggacggcaccugggccgcgauucaaacaucugaugaaacgaaguggugucccccugaccagcucguuaaccugcacgacuuccgcagcgaugagaucgagcaucuugugguggaggaacuggucaaaaagagagaagagugccucgacgcccuggaauccauuaugaccacaaaaagcgugucuuuucggcgccuuucccaccugagaaagcucguucccggcuucgggaaggcuuacaccaucuucaauaaaacacugauggaggccgaugcucauuauaagagcgugcggaccuggaacgagaucauucccucuaaaggaugccugcgcgucggcgggagaugucacccucacgugaauggaguguuuuucaacggcaucauucucgggccggacggacauguucugauccccgaaaugcagagcucccuucugcagcaacacauggagcuccuggaaucuagcgucauuccucuuaugcauccccuggccgauccuuccacgguguuuaaggacgaugacgaggcggaagauuucgucgaggugcaccuccccgacguucauaaacaggugagcggcgucgaucugggcuuuccgucuugggggaaguacgugcugauguccgccggaguucucacaagccugaugcuuaugaucuuccugaugaccugcugucggagagcuaaucgcguggagucugcccagcacucccucggcgaacgggggagaaaggucagcgugaccucccagucuggacgcgugaucagcuccugggagucuuauaaaagcggcggggaaacaaagcuguga

SEQ ID NO: 223945 - RNA, 1575 nt, Artificial Sequence
  derived and/or modified CDS sequence (opt5) from glycoprotein__RABV__LC018555.1
augaucccccaggcccugcuguucgugccucugcuugucuuuagccugugcuucggcaaguuuccgauuuacaccauccccgacaaacucgggccuuggucccccauugauauccaccaucugucuuguccuaacaaucuuguuguggaggacgaaggaugcacaaaccugagcggcuucuccuauauggagcucaaggugggguacauuucugcuaucaaagucaauggauuuacguguaccggcgugguuacagaagccgagaccuauacaaacuucgugggguacgucaccacaaccuuuaagagaaaacacuuccggcccacgccugaugcgugccgcgcugccuauaauuggaagauggccggagacccgagauacgaagagagccugcauaaccccuauccugauuaccacuggcugcggaccgugaagacaaccaaagagucccucguuaucauuucucccagcguggcugaccuggauccuuacgacaagucccuucauagccgcgucuuucccucuggcagauguuccggcaucacagugagcucuaccuauugcuccacgaaucacgauuacacaauuuggaugccggaaaacccucggcuggggaccagcugugacaucuucacaaauucucgcggaaaaagagccuccaagggcagcaaaaccugcggguuuguggaugagcggggacucuauaagucccugaagggcgcuuguaaacuuaagcugugcgggguccucggacugcgccugauggacggcaccugggccgcgauucaaacaucugaugaaacgaaauggugucccccugaccagcucguuaaccugcacgacuucagaagcgaugagaucgagcaucuugugguggaggaacuggucaagaaacgggaagagugccucgacgcccuggaauccauuaugaccacaaagagcgugucuuuucgcagacuuucccaccuccggaaacucguucccggcuucgggaaggcuuacaccaucuucaauaagacacugauggaggccgaugcucauuauaaaagcgugcgcaccuggaacgagaucauucccucuaagggaugccugagagucggcgggcggugucacccucacgugaauggaguguuuuucaacggcaucauucucgggccggacggacaugugcugauccccgaaaugcagagcucccuucugcagcaacacauggagcuccuggaaucuagcgucauuccucuuaugcauccccuggccgauccuuccacgguguuuaaagacgaugacgaggcggaagauuucgucgaggugcaccuccccgacguucauaagcagguuagcggcgucgaucugggccugccgucuugggggaaauacgugcucauguccgccggaguucugacagcucuuaugcugaugaucuuucucaugaccugcuguagacgcgccaaucgggcugagagcgcccagcacucucugggcgaaagagggcgcaagguguccgucaccagccaguccggacgggugaucucuagcugggaguccuauaagucuggcggggaaacaaaacuguga

SEQ ID NO: 223946 - RNA, 1575 nt, Artificial Sequence; identical to SEQ ID NO: 222644
  derived and/or modified CDS sequence (opt5) from glycoprotein__RABV__LC018556.1

SEQ ID NO: 223947 - RNA, 1575 nt, Artificial Sequence
  derived and/or modified CDS sequence (opt5) from glycoprotein__RABV__LC018557.1
augaucccccaggcccuucucuucgugccucugcuugucuuuagccugugcuucggcaaguuuccgauuuacaccauccccgacaaacucgggccuuggucccccauugauauccaccaucugucuuguccuaacaaucuuguuguggaggacgaaggaugcacaaaccugagcggcuucuccuauauggagcucaaggugggguacauuucugcuaucaaagucaauggauuuacguguaccggcgugguuacagaagccgagaccuauacaaacuucgugggguacgucaccacaaccuuuaagagaaaacacuuccggcccacgccugaugcgugccgcgcugccuauaauuggaagauggccggagacccgagauacgaagagagccugcauaaccccuauccugauuaccacuggcugcggaccgugaagacaaccaaagagucccucguuaucauuucucccagcguggcugaccuggauccuuacgacaagucccuucauagccgcgucuuucccucuggcaaauguuccggcaucacagugagcucuaccuauugcuccacgaaucacgauuacacaauuuggaugccggaaaacccuagacuggggaccagcugugacaucuucacaaauucucggggaaagcgcgccuccaaaggcagcaagaccugcggguuuguggaugagagaggacucuauaagucccugaaaggcgcuuguaagcugaaacugugcgggguccucggacugcggcugauggacggcaccugggccgcgauucaaacaucugaugaaacgaaguggugucccccugaccagcucguuaaccugcacgacuuccgcagcgaugagaucgagcaucuugugguggaggaacuggucaaaaagagagaagagugccucgacgcccuggaauccauuaugaccacaaaaagcgugucuuuucggcgccuuucccaccugagaaagcucguucccggcuucgggaaggcuuacaccaucuucaauaaaacacugauggaggccgaugcucauuauaagagcgugcggaccuggaacgagaucauucccucuaaaggaugccugcgcgucggcgggagaugucacccucacgugaauggaguguuuuucaacggcaucauucucgggccggacggacauguucugauccccgaaaugcagagcucccuucugcagcaacacauggagcuccuggaaucuagcgucauuccucuuaugcauccccuggccgauccuuccacgguguuuaaggacgaugacgaggcggaagauuucgucgaggugcaccuccccgacguucauaaacaggugagcggcgucgaucugggccugccgucuugggggaaguacgugcucauguccgccugcguucugacagcucuuaugcugaugaucuuucucaugaccuguugccggagagccaaucgcgcugagagcgcccagcacucucugggagaacggggcagaaagguguccgucaccagccaguccgggcgcgugaucucuagcugggaguccuauaaaucuggaggcgaaacaaagcuguga

SEQ ID NO: 223948 - RNA, 1575 nt, Artificial Sequence; identical to SEQ ID NO: 222667
  derived and/or modified CDS sequence (opt5) from glycoprotein__RABV__LC018558.1

SEQ ID NO: 223949 - RNA, 1575 nt, Artificial Sequence; identical to SEQ ID NO: 222667
  derived and/or modified CDS sequence (opt5) from glycoprotein__RABV__LC018561.1

SEQ ID NO: 223950 - RNA, 1575 nt, Artificial Sequence; identical to SEQ ID NO: 222667
  derived and/or modified CDS sequence (opt5) from glycoprotein__RABV__LC018562.1

SEQ ID NO: 223951 - RNA, 1575 nt, Artificial Sequence; identical to SEQ ID NO: 222667
  derived and/or modified CDS sequence (opt5) from glycoprotein__RABV__LC018564.1

SEQ ID NO: 223952 - RNA, 1575 nt, Artificial Sequence
  derived and/or modified CDS sequence (opt5) from glycoprotein__RABV__LC018565.1
augaucccccaggcccuucucuucgugccucugcuugucuuuagccugugcuucggcaaguuuccgauuuacaccauccccgacaaacucgggccuuggucccccauugauauccaccaucugucuuguccuaacaaucuuguuguggaggacgaaggaugcacaaaccugagcggcuucuccuauauggagcucaaggugggguacauuucugcuaucaaagucaauggauuuacguguaccggcgugguuacagaagccgagaccuauacaaacuucgugggguacgucaccacaaccuuuaagagaaaacacuuccggcccacgccugaugcgugccgcgcugccuauaauuggaagauggccggagacccgagauacgaagagagccugcauaaccccuauccugauuaccacuggcugcggaccgugaagacaaccaaagagucccucguuaucauuucucccagcguggcugaccuggauccuuacgacaagucccuucauagccgcgucuuucccucuggcaaauguuccggcaucacagugagcucuaccuauugcuccacgaaucacgauuacacaauuuggaugccggaaaacccuagacuggggaccagcugugacaucuucacaaauucucggggaaagcgcgccuccaaaggcagcaagaccugcggguuuguggaugagagaggacucuauaagucccugaaaggcgcuuguaagcugaaacugugcgggguccucggacugcggcugauggacggcaccugggccgcgauucaaacaucugaugaaacgaaguggugucccccugaccagcucguuaaccugcacgacuuccgcagcgaugagaucgagcaucuugugguggaggaacuggucaaaaagagagaagagugccucgacgcccuggaauccauuaugaccacaaaaagcgugucuuuucggcgccuuucccaccugagaaagcucguucccggcuucgggaaggcuuacaccaucuucaauaaaacacugauggaggccgaugcucauuauaagagcgugcggaccuggaacgagaucauucccucuaaaggaugccugcgcgucggcgggagaugucacccucacgugaauggaguguuuuucaacggcaucauucucgggccggacggacauguucugauccccgaaaugcagagcucccuucugcagcaacacauggagcuccuggaaucuagcgucauuccucuuaugcauccccuggccgauccuuccacgguguuuaaggacgaugacgaggcggaagauuucgucgaggugcaccuccccgacguucauaaacaggugagcggcgucgaucugggccugccgucuugggggaauuacgugcucauguccgccggaguucugacagcucuuaugcugaugaucuuucucaugaccugcugucggagaaccaaccgcgccgagagcgcucagcacucucugggcgaacgggggagaaagguguccgucacaagccaguccggacgcgugaucucuagcugggaguccuauaagucuggcggggaaaccaaacuguga

SEQ ID NO: 223953 - RNA, 1575 nt, Artificial Sequence; identical to SEQ ID NO: 222667
  derived and/or modified CDS sequence (opt5) from glycoprotein__RABV__LC018567.1

SEQ ID NO: 223954 - RNA, 1575 nt, Artificial Sequence
  derived and/or modified CDS sequence (opt5) from glycoprotein__RABV__LC018569.1
augaucccccaggcccuucucuucgugccucugcuugucuuuagccugugcuucggcaaguuuccgauuuacaccauccccgacaaacucgggccuuggucccccauugauauccaccaucugucuuguccuaacaaucuuguuguggaggacgaaggaugcacaaaccugagcggcuucuccuauauggagcucaaggugggguacauuucugcuaucaaagucaauggauuuacguguaccggcgugguuacagaagccgagaccuauacaaacuucgugggguacgucaccacaaccuuuaagagaaaacacuuccggcccacgccugaugcgugccgcgcugccuauaauuggaagauggccggagacccgagauacgaagagagccugcauaaccccuauccugauuaccacuggcugcggaccgugaagacaaccaaagagucccucguuaucauuucucccagcguggcugaccuggauccuuacgacaagucccuucauagccgcgucuuucccucuggcaaauguuccggcaucacagugagcucuaccuauugcuccacgaaucacgauuacacaauuuggaugccggaaaacccuagacuggggaccagcugugacaucuucacaaauucucggggaaagcgcgccuccaaaggcagcaagaccugcggguuuguggaugagagaggacucuauaagucccugaaaggcgcuuguaagcugaaacugugcgggguccucggacugcggcugauggacggcaccugggccgcgauucaaacaucugaugaaacgaaguggugucccccugaccagcucguuaaccugcacgacuuccauagcgaugagaucgagcaccuugugguggaggaacuggucaaaaagcgcgaagagugccucgacgcccuggaauccauuaugaccacaaaaagcgugucuuuuagacggcuuucccaucugcgcaagcucguucccggcuucgggaaggcuuacaccaucuucaauaaaacacugauggaggccgaugcucacuauaagagcgugagaaccuggaacgagaucauucccucuaaaggaugccugcgggucggcgggcgcugucacccucaugugaauggaguguuuuucaacggcaucauucucgggccggacggacacguucugauccccgaaaugcagagcucccuucugcagcaacauauggagcuccuggaaucuagcgucauuccucuuaugcacccccuggccgauccuuccacgguguuuaaggacgaugacgaggcggaagauuucgucgaggugcaucuccccgacguucacaaacaggugagcggcgucgaucugggccugccgucuugggggaaguacgugcucauguccgccggaguucugacagcucuuaugcugaugaucuuucucaugaccugcuguagacggaccaauagagccgagagcgcucagcacucucugggcgaacgcgggcggaagguguccgucacaagccaguccggaagagugaucucuagcugggaguccuauaaaucuggcggggaaaccaagcuguga

SEQ ID NO: 223955 - RNA, 1575 nt, Artificial Sequence; identical to SEQ ID NO: 222667
  derived and/or modified CDS sequence (opt5) from glycoprotein__RABV__LC018570.1

SEQ ID NO: 223956 - RNA, 1575 nt, Artificial Sequence
  derived and/or modified CDS sequence (opt5) from glycoprotein__RABV__LC018571.1
augaucccccaggcccuucucuucgugccucugcuugucuuuagccugugcuucggcaaguuuccgauuuacaccauccccgacaaacucgggccuuggucccccauugauauccaccaucugucuuguccuaacaaucuuguuguggaggacgaaggaugcacaaaccugagcggcuucuccuauauggagcucaaggugggguacauuucugcuaucaaagucaauggauuuacguguaccggcgugguuacagaagccgagaccuauacaaacuucgugggguacgucaccacaaccuuuaagagaaaacacuuccggcccacgccugaugcgugccgcgcugccuauaauuggaagauggccggagacccgagauacgaagagagccugcauaaccccuauccugauuaccacuggcugcggaccgugaagacaaccaaagagucccucguuaucauuucucccagcguggcugaccuggauccuuacgacaagucccuucauagccgcgucuuuucuuccggcaaauguagcggcaucacagugucuuccaccuauugcagcacgaaucacgauuacacaauuuggaugcccgaaaacccgagacuggggaccucuugugacaucuucacaaauucccggggaaagcgcgccagcaaaggcuccaagaccugcggguuuguggaugagagaggacucuauaagucucugaaaggcgcuuguaagcugaaacugugcgggguccucggacugcggcugauggacggcaccugggccgcgauucaaacaagcgaugaaacgaagugguguccucccgaccagcucguuaaccugcacgacuuccgcuccgaugagaucgagcaucuugugguggaggaacuggucaaaaagagagaagagugccucgacgcccuggaaagcauuaugaccacaaaaucuguguccuuucggcgccuuagccaccugagaaagcucguuccuggcuucgggaaggcuuacaccaucuucaauaaaacacugauggaggccgaugcucauuauaagucugugcggaccuggaacgagaucauucccagcaaaggaugccugcgcgucggcgggagaugucacccccacgugaauggaguguuuuucaacggcaucauucucgggccugacggacauguucugaucccggaaaugcaguccucucuucugcagcaacacauggagcuccuggaaagcuccgucauuccccuuaugcauccucuggccgaucccagcacgguguuuaaggacgaugacgaggcggaagauuucgucgaggugcaccucccugacguucauaaacaggugucuggcgucgaucugggccugcccuccugggggaaguacgugcucaugagcgccggaguucugacagcucuuaugcugaugaucuuucucaugaccugcugucggagaaccaaucgcgccgagucugcucagcacucccugggcgaacgggggagaaaggugagcgucacaucccagucuggacgcgugaucagcuccugggagucuuauaaaagcggcggggaaaccaagcuguga

SEQ ID NO: 223957 - RNA, 1575 nt, Artificial Sequence; identical to SEQ ID NO: 222667
  derived and/or modified CDS sequence (opt5) from glycoprotein__RABV__LC018572.1

SEQ ID NO: 223958 - RNA, 1575 nt, Artificial Sequence; identical to SEQ ID NO: 222667
  derived and/or modified CDS sequence (opt5) from glycoprotein__RABV__LC018573.1

SEQ ID NO: 223959 - RNA, 1575 nt, Artificial Sequence; identical to SEQ ID NO: 222667
  derived and/or modified CDS sequence (opt5) from glycoprotein__RABV__LC018581.1

SEQ ID NO: 223960 - RNA, 1575 nt, Artificial Sequence
  derived and/or modified CDS sequence (opt5) from glycoprotein__RABV__LC018584.1
augaucccccaggcccugcucuuugugccucugcuugucuuuagccugugcuucggcaaguuuccgauuuacaccauccccgacaaacucgggccuuggucccccauugauauccaccaucugucuuguccuaacaaucuuguuguggaggacgaaggaugcacaaaccugagcggcuucuccuaucucgagcugaaggugggguacauuucugcuaucaaagucaauggauuuacguguaccggcgugguuacagaagccgagaccuauacaaacuucgugggguacgucaccacaaccuuuaagagaaaacacuuccggcccaugccugaugcgugccgcgcugccuauaauuggaagauggccggagacccgagauacgaagagagccugcauaaccccuauccugauuaccacuggcuccggacggugaagaccacaaaagagucccugguuaucauuucucccagcguggcugaccuugauccuuacaauaagucccugcauagccgcgucuuucccucuggcaaauguuccggcaucaccgugagcucuacauauugcuccaccaaccacgacuacacgauuuggaugccggaaaauccuagacucgggacaagcugugauaucuucaccaacucucggggaaagcgcgccuccaaaggcagcaagacaugcggguuuguggacgagagaggacuguauaagucccuuaaaggcgcuuguaagcugaaacucugcgggguccugggacugcggcucauggauggcaccugggccgcgauucaaaccucugacgaaacaaaguggugucccccugaucagcugguuaaucuucacgacuuccgcagcgacgagaucgagcaucuggugguggaggaacucgucaaaaagagagaagagugccuggaugcccuugaauccauuaugacgaccaaaagcgugucuuuucggcgccugucccaccucagaaagcugguucccggcuucgggaaggcuuacacaaucuucaacaaaacccugauggaggccgacgcucauuauaagagcgugcggacauggaaugagauccuccccucuaaaggaugccugcgcgucggcgggagaugucacccucacgugaacggaguuuucuucaauggcauuauccuugggccggauggacaugugcugauucccgaaaugcagagcucccuccugcagcaacacauggagcuucuggaaucuagcgucaucccucucaugcauccccuggccgacccuuccaccguguuuaaggaugacgaugaggcggaagacuucgucgaggugcaucugcccgauguucacaaacaggugagcggcgucgaccucggccugccgucuugggggaaguacgugcuuauguccgccggaguucugacggcucucaugcugaugauuuuucugaugacaugcugucggagaccuaaccgcgccgagagcgcucagcacucucuuggcgaacgggagaagaaaguguccgucaccagccaguccgggagagugaucucuagcugggaauccuauaagucuggaggcgagaccaaacucuga

SEQ ID NO: 223961 - RNA, 1575 nt, Artificial Sequence
  derived and/or modified CDS sequence (opt5) from glycoprotein__RABV__LC018585.1
augaucccccaggcccugcucuuugugccucugcuugucuuuagccugugcuucggcaaguuuccgauuuacaccauccccgacaaacucgggccuuggucccccauugauauccaccaucugucuuguccuaacaaucuuguuguggaggacgaaggaugcacaaaccugagcggcuucuccuaucucgagcugaaggugggguacauuucugcuaucaaagucaauggauuuacguguaccggcgugguuacagaagccgagaccuauacaaacuucgugggguacgucaccacaaccuuuaagagaaaacacuuccggcccaugccugaugcgugccgcgcugccuauaauuggaagauggccggagacccgagauacgaagagagccugcauaaccccuauccugauuaccacuggcuccggacggugaagaccacaaaagagucccugguuaucauuucucccagcguggcugaccuugauccuuacgacaagucccugcauagccgcgucuuucccucuggcaaauguuccggcaucaccgugagcucuacauauugcuccaccaaucacgauuacacgauuuggaugccggaaaacccuagacucgggacaagcugugacaucuucaccaauucucggggaaagcgcgccuccaaaggcagcaagacaugcggguuuguggaugagagaggacuguauaagucccuuaaaggcgcuuguaagcugaaacucugcgggguccugggacugcggcucauggacggcaccugggccgcgauucaaaccucugaugaaacaaaguggugucccccugaccagcugguuaaccuucacgacuuccgcagcgaugagaucgagcaucuggugguggaggaacucgucaaaaagagagaagagugccuggacgcccuugaauccauuaugacgaccaaaagcgugucuuuucggcgccugucccaccucagaaagcugguucccggcuucgggaaggcuuacacaaucuucaauaaaacccugauggaggccgaugcucauuauaagagcgugcggacauggaacgagaucauucccucuaaaggaugccuccgcgucggcgggagaugucacccucacgugaauggaguuuucuucaacggcaucauucuggggccggacggacaugugcuuauccccgaaaugcagagcucccugcuccagcaacacauggagcugcuugaaucuagcgucauuccucugaugcauccccucgccgauccuuccaccguguuuaaggacgaugacgaggcggaagauuucgucgaggugcaucugcccgacguucacaaacaggugagcggcgucgaucugggccucccgucuugggggaaguacgugcugauguccgccggaguucuuacggcucugaugcucaugaucuuucugaugacaugcugucggagaccuaaucgcgccgagagcgcucagcacucucugggcgaacgggagaagaaaguguccgucaccagccaguccgggagagugaucucuagcugggaauccuauaagucuggaggcgagaccaaacuuuga

SEQ ID NO: 223962 - RNA, 1575 nt, Artificial Sequence; identical to SEQ ID NO: 222644
  derived and/or modified CDS sequence (opt5) from glycoprotein__RABV__LC018586.1

SEQ ID NO: 223963 - RNA, 1575 nt, Artificial Sequence
  derived and/or modified CDS sequence (opt5) from glycoprotein__RABV__LC018587.1
augaucccccaggcccuucucuucgugccucugcuugucuuuagccugugcuucggcaaguuuccgauuuacaccauccccgacaaacucgggccuuggucccccauugauauccaccaucugucuuguccuaacaaucuuguuguggaggacgaaggaugcacaaaccugagcggcuucuccuauauggagcucaaggugggguacauuucugcuaucaaagucaauggauuuacguguaccggcgugguuacagaagccgagaccuauacaaacuucgugggguacgucaccacaaccuuuaagagaaaacacuuccggcccacgccugaugcgugccgcgcugccuauaauuggaagauggccggagacccgagauacgaagagagccugcauaaccccuauccugauuaccacuggcugcggaccgugaagacaaccaaagagucccucguuaucauuucucccagcguggcugaccuggauccuuacgacaagucccuucauagccgcgucuuucccucuggcaaauguuccggcaucacagugagcucuaccuauugcuccacgaaucacgauuacacaauuuggaugccggaaaacccuagacuggggaccagcugugacaucuucacaaauucucggggaaagcgcgccuccaaaggcagcaagaccugcggguuuguggaugagagaggacucuauaagucccugaaaggcgcuuguaagcugaaacugugcgggguccucggacugcggcugauggacggcaccuggguugccauucaaacaucugaugaaacgaaguggugucccccugaccagcucgugaaccugcacgacuuccgcagcgaugagaucgagcaucuuguggucgaggaacuggugaaaaagagagaagagugccucgacgcgcuggaauccauuaugaccacaaaaagcguuucuuuucggcgccuuucccaccugagaaagcucgugcccggcuucgggaaggccuacaccaucuucaauaaaacacugauggaggcugaugcccauuauaagagcguccggaccuggaacgagaucauucccucuaaaggaugccugcgcgugggcgggagaugucacccucacguuaauggaguguuuuucaacggcaucauucucgggccggacggacauguccugauccccgaaaugcagagcucccuucugcagcaacacauggagcuccuggaaucuagcgugauuccucuuaugcauccccuggcugauccuuccacggucuuuaaggacgaugacgaggccgaagauuucguggagguucaccuccccgacgugcauaaacaggucagcggcguggaucugggccugccgucuugggggaaguacguucucauguccgcgggagugcugacagcccuuaugcugaugaucuuucucaugaccugcugucggagagcuaaucgcgccgagagcgcucagcacucucugggcgaacgggggagaaaggucuccgugaccagccaguccggacgcgugaucucuagcugggaguccuauaaaucuggcggggaaacaaagcuguga

SEQ ID NO: 223964 - RNA, 1575 nt, Artificial Sequence; identical to SEQ ID NO: 222644
  derived and/or modified CDS sequence (opt5) from glycoprotein__RABV__LC018588.1

SEQ ID NO: 223965 - RNA, 1575 nt, Artificial Sequence
  derived and/or modified CDS sequence (opt5) from glycoprotein__RABV__LC018589.1
augaucccccaggcccuucucuucgugccucugcuugucuuuagccugugcuucggcaaguuuccgauuuacaccauccccgacaaacucgggccuuggucccccauugauauccaccaucugucuuguccuaacaaucuuguuguggaggacgaaggaugcacaaaccugagcggcuucuccuauauggagcucaaggugggguacauuucugcuaucaaagucaauggauuuacguguaccggcgugguuacagaagccgagaccuauacaaacuucgugggguacgucaccacaaccuuuaagagaaaacacuuccggcccacgccugaugcgugccgcgcugccuauaauuggaagauggccggagacccgagauacgaagagagccugcauaaccccuauccugauuaccacuggcugcggaccgugaagacaaccaaagagucccucguuaucauuucucccagcguggcugaccuggauccuuacgacaagucccuucauagccgcgucuuucccucuggcaaauguuccggcaucacagugagcucuaccuauugcuccacgaaucacgauuacacaauuuggaugccggaaaacccuagacuggggaccagcugugacaucuucacaaauucucggggaaagcgcgccuccaaaggcagcaagaccugcggguuuguggaugagagaggacucuauaagucccugaaaggcgcuuguaagcugaaacugugcgggguccucggacugcggcugauggacggcaccugggccgcgauucaaacaucugaugaaacgaaguggugucccccugaccagcucguuaaccugcacgacuuccgcagcgaugagaucgagcaucuugugguggaggaacuggucaaaaagagagaagagugccucgacgcccuggaauccauuaugaccacaaaaagcgugucuuuucggcgccuuucccaccugagaaagcucguucccggcuucgggaaggcuuacaccaucuucaauaaaacacugauggaggccgaugcucauuauaagagcgugcggaccuggaacgagaucauucccucuaaaggaugccugcgcgucggcgggagaugucacccucacgugaauggaguguuuuucaacggcaucauucucgggccggacggacauguucugauccccgaaaugcagagcucccuucugcagcaacacauggagcuccuggaaucuagcgucauuccucuuaugcauccccuggccgauccuuccacgguguuuaaggacgaugacgaggcggaagauuucgucgaggugcaccuccccgacguucauaaacaggugagcggcgucgaucugggccugccgucuugggggaaguacgugcucauguccgccggaguucugacagcucuuaugcugaugaucuuucucaugaccugcugucggagagccaaucgcgcugagagcgcccggcacucucugggcgaaagagggcgcaagguguccgucaccagccaguccggacgggugaucucuagcugggaguccuauaaaucuggcggggaaacaaagcuguga

SEQ ID NO: 223966 - RNA, 1575 nt, Artificial Sequence
  derived and/or modified CDS sequence (opt5) from glycoprotein__RABV__LC018590.1
augaucccccaggcccugcucuuugugccucugcuugucuuuagccugugcuucggcaaguuuccgauuuacaccauccccgacaaacucgggccuuggucccccauugauauccaccaucugucuuguccuaacaaucuuguuguggaggacgaaggaugcacaaaccugagcggcuucuccuauauggagcucaaggugggguacauuucugcuaucaaagucaauggauuuacguguaccggcgugguuacagaagccgagaccuauacaaacuucgugggguacgucaccacaaccuuuaagagaaaacacuuccggcccacgccugaugcgugccgcgcugccuauaauuggaagauggccggagacccgagauacgaagagagccugcauaaccccuauccugauuaccacuggcugcggaccgugaagacaaccaaagagucccucguuaucauuucucccagcguggcugaccuggauccuuacgacaagucccuucauagccgcgucuuucccucuggcaaauguuccggcaucacagugagcucuaccuauugcuccacgaaucacgauuacacaauuuggaugccggaaaacccuagacuggggaccagcugugacaucuucauuaauucucggggaaagcgcgccuccaaaggcagcaagacaugcggguuuguggaugagagaggacucuauaagucccugaaaggcgcuuguaagcugaaacugugcgggguccccggacuccggcugauggacggcaccugggccgcgauccaaaccucugaugaaacaaagugguguccucccgaccagcugguuaaccuccacgacuuccgcagcgaugagauugagcaucuggugguggaggaacuugucaaaaagagagaagagugccuggacgcccucgaauccaucaugacgaccaaaagcgugucuuuucggcgccugucccaccuuagaaagcugguucccggcuucgggaaggcuuacacaaucuucaauaaaacccucauggaggccgaugcucauuauaagagcgugcggacauggaacgagauuaucccuucuaaaggaugccugcgcgucggcgggagaugucacccgcacgugaauggaguuuucuucaacggcauuauccuggggcccgacggacaugugcucauuccugaaaugcagagcucccugcuucagcaacacauggagcugcucgaaucuagcgucaucccccugaugcauccucuugccgaucccuccaccguguuuaaggacgaugacgaggcggaagauuucgucgaggugcaccuuccggacguucauaaacaggugagcggcgucgaucucggccugccuucuugggggaaguacgugcugauguccgccggaguucucacggcucugaugcuuaugaucuuucugaugacaugcugucggagagccaaucgcgcugagagcgcccagcacucucucggcgaacgggggagaaagguguccgucaccagccaguccggacgcgugauuucuagcugggaguccuauaaaucuggcggggaaaccaagcuguga

SEQ ID NO: 223967 - RNA, 1575 nt, Artificial Sequence
  derived and/or modified CDS sequence (opt5) from glycoprotein__RABV__LC071936.1
augaucccccaggcccugcuccuggugccucuucuggucuucccgcucugcuuuggcaaguuccccauuuacaccaucccugacaaacuggggcccuggagcccuauugauauccaccaucuuuccugucccaacaaucugguuguggaggacgaaggaugcacaaaccucucuggcuuuagcuauauggagcugaaggugggguacauuuccgcuaucaaagucaauggauucacguguaccggcgugguuacagaagccgagaccuauacaaacuuugugggguacgucaccacaaccuucaagagaaaacacuuucggccuacgccggaugcgugccgcgcugccuauaauuggaagauggccggagaccccagauacgaagagucucugcauaacccuuaucccgauuaccacuggcuccggaccgugaaggcuacaaaagagagccugguuaucauuuccccuucugugagcgaccuugaucccuacgacaagucccugcauagccgcgucuucccgucuggcaaauguuccggcaucaccgugagcucuacauauugcccuaccucccacgauuacacgauuuggaugcccgaaaauccuagacucgggacaagcugugacaucuuuauuaacucucggggaaagcgcgccuccaaaggcagcaagaccugcggguucguggaugagagaggacuguauaagucccuuaaaggcgcuuguaagcugaaacucugcgggguccugggacugcggcucauggacggcacaugggccgcgauccaaaccucugaugaagccaagugguguccucccgaccagcugguuaauauucacgacuuucauagcgaugagaucgagcaccuugugguggaggaacuggucaaaaagcgcgaagagugccucgacgcucuggaauccaucaugaccacaaaaagcgugucuuucagacggcuuucccaucugcgcaagcucguucccggcuuugggaaggccuacacgauuuucaacaaaacccugauggaggcugaugcccacuauaagagcgugagaacauggaaugagaucauuccgucuaaaggaugccugcgggucggcgggcgcugucacccccaugugaacggaguuuucuuuaauggcaucauucucgggccugacggacacgugcugauccccgaaaugcagagcucccuucugcagcaacauauggagcuccuggaaucuagcgucaucccucuuaugcacccccuggcggauccguccaccguguucaaggacggcgaugaggccgaagacuuugucgaggugcaucucccugauguucacaaacaggugagcggcgucgaccuggggcugcccucuuggggaaaguacgugcucauguccguuggcacacugauugcucuuauggugaugaucuuccugaugaccugcuguagaaaggccaacggggucgagagcaugcggcacagacucggagaaacgggccgcaaagugucugugacaucccagagcgggcggguuauuuccucuugggagagcuauaaguccggcggagaaaccaaacuguga

SEQ ID NO: 223968 - RNA, 1575 nt, Artificial Sequence
  derived and/or modified CDS sequence (opt5) from glycoprotein__RABV__LC071937.1
augaucccccaggcccugcucuuugugccucugcuugucuuuagccugugcuucggcaaguuuccgauuuacaccauccccgacaaacucgggccuuggucccccauugauauccaccaucugucuuguccuaacaaucuuguuguggaggacgaaggaugcacaaaccugagcggcuucuccuauauggagcucaaggugggguacauuucugcuaucaaagucaauggauuuacguguaccggcgugguuacagaagccgagaccuauacaaacuucgugggguacgucaccacaaccuuuaagagaaaacacuuccggcccacgccugaugcgugccgcgcugccuauaauuggaagauggccggagacccgagauacgaagagagccugcauaaccccuauccugauuaccacuggcugcggaccgugaagacaaccaaagagucccucguuaucauuucucccagcguguccgaccuggauccuuacgacaagagccuucauucucgcgucuuucccuccggcaaauguagcggcaucacagugucuuccaccuauugcccgacgaaucacgauuacacaauuuggaugccugaaaaccccagacuggggaccagcugugacaucuucacaaccucucggggaaagcgcgcuuccaaaggcgggaagaccugcggauuuguggaugagagaggccucuauaagagccugaaaggggccuguaagcugaaacugugcggaguccucggccugcggcugauggacggcacaugggcugccauucaaacguccgaugaagcgaagugguguccucccgaccagcucguuaauauccacgacuuccgcucugaugagauugagcaucuggugguggaggaacuugucaaaaagagagaagagugccuggacgcccucgaaagcaucaugaccacaaaauccgugagcuuucggcgccugucucaccuuagaaagcugguucccggguucggaaaggcuuacaccaucuucaacaaaacacucauggaggccgaugcucauuauaaguccgugcggaccuggaaugagauuaucccuagcaaaggcugccugcgcgucgggggaagaugucacccgcacgugaacggcguuuucuucaaugggauuauccugggacccgacggccaugugcucauuccugaaaugcagucuagccugcuucagcaacacauggagcugcucgaauccucugucaucccccugaugcauccucuugccgaucccagcacgguguuuaaggacgaugacgaggcggaagauuucgucgaggugcaccuuccggacguucauaaacagguguccggcgucgaucucgggcugccuagcuggggaaaguacgugcugaugucuguuggcgccaugaucgcucucaugcugaugauuuuucuuacaaccugcugucggaaggccaacggggcugaguccacaccccacagacugggagaaaccggccgcaaagugagcgucaccucucaguccgggcgggugaucagcuccugggagucuuauaagagcggcggagaaacaaaacucuga

SEQ ID NO: 223969 - RNA, 1575 nt, Artificial Sequence; identical to SEQ ID NO: 223968
  derived and/or modified CDS sequence (opt5) from glycoprotein__RABV__LC071938.1

SEQ ID NO: 223970 - RNA, 1575 nt, Artificial Sequence; identical to SEQ ID NO: 223968
  derived and/or modified CDS sequence (opt5) from glycoprotein__RABV__LC071939.1

SEQ ID NO: 223971 - RNA, 1575 nt, Artificial Sequence
  derived and/or modified CDS sequence (opt5) from glycoprotein__RABV__LC071940.1
augaucccccaggcccugcucuuugugccucugcuugucuuuagccugugcuucggcaaguuuuccauuuacaccaucccggacaaacucgggcccuggucuccuauugauauccaccaucugagcugucccaacaaucuuguuguggaggacgaaggaugcacaaaccuguccggcuucucuuauauggagcucaaggugggguacauuagcgcuaucaaagucaauggauuuacguguaccggcgugguuacagaagccgagaccuauacaaacuucgugggguacgucaccacaaccuuuaagagaaaacacuuccggccuacgcccgaugcgugccgcgcugccuauaauuggaagauggccggagacccuagauacgaagagucccugcauaacccguaucccgauuaccacuggcugcggaccgugaagacaaccaaagagucucucguuaucauuagcccuuccgugagcgaccuggaucccuacgacaagucucuucauucccgcgucuuuccuagcggcaaauguucuggcaucacaguguccagcaccuauugccccacgaaucacgauuacacaauuuggaugccggaaaacccuagacuggggaccucuugugacaucuucacaaccucccggggaaagcgcgcuagcaaaggcgggaagaccugcggauuuguggaugagagaggccucuauaagucccugaaaggggccuguaagcugaaacugugcggaguccucggccugcggcugauggacggcacaugggcugccauucaaacgucugaugaagcgaaguggugucccccugaccagcucguuaauauccacgacuuccgcagcgaugagauugagcaucuggugguggaggaacuugucaaaaagagagaagagugccuggacgcccucgaauccaucaugaccacaaaaagcgugucuuuucggcgccugucccaccuuagaaagcugguucccggguucggaaaggcuuacaccaucuucaacaaaacacucauggaggccgaugcucauuauaagagcgugcggaccuggaaugagauuauccccucuaaaggcugccugcgcgucgggggaagaugucacccucacgugaacggcguuuucuucaaugggauuauccugggaccggacggccaugugcucauucccgaaaugcagagcucccugcuucagcaacacauggagcugcucgaaucuagcgucaucccucugaugcauccccuugccgauccuuccacgguguuuaaggacgaugacgaggcggaagauuucgucgaggugcaccuucccgacguucauaaacaggugagcggcgucgaucucgggcugccgucuuggggaaaguacgugcugauguccguuggcgccaugaucgcucucaugcugaugauuuuucuuacaaccugcugucggaaggccaacggggcugagagcacccagcacagacugggagaaacaggccgcaaagugucugucaccucccagagcgggcgggugaucuccucuagagagagcuauaaguccggcggagaaacaaaacucuga

SEQ ID NO: 223972 - RNA, 1575 nt, Artificial Sequence
  derived and/or modified CDS sequence (opt5) from glycoprotein__RABV__LC071941.1
augaucccccaggcccugcucuuugugccucugcuugucuuuagccugugcuucggcaaguuuccgauuuacaccauccccgacaaacucgggccuuggucccccauugauauccaccaucugucuuguccuaacaaucuuguuguggaggacgaaggaugcacaaaccugagcggcuucuccuauauggagcucaaggugggguacauuucugcuaucaaagucaauggauuuacguguaccggcgugguuacagaagccgagaccuauacaaacuucgugggguacgucaccacaaccuuuaagagaaaacacuuccggcccacgccugaugcgugccgcgcugccuauaauuggaagauggccggagacccgagauacgaagagagccugcauaaccccuauccugauuaccacuggcugcggaccgugaagacaaccaaagagucccucguuaucauuucucccagcguguccgaccuggaucuuuacgacaagagccugcauucucgcgucuuuccuuccggcaaauguagcggcaucacagugucuuccaccuauugccccacgaaucacgauuacacaauuuggaugccggaaaacccuagacucgggaccagcugugacaucuucacaaccucucggggaaagcgcgcuuccaaaggcgggaagaccugcggauuuguggaugagagaggccuguauaagagccuuaaaggggccuguaagcugaaacucugcggaguccugggccugcggcucauggacggcacaugggcugccauucaaacguccgaugaagcgaaguggugucccccugaccagcugguuaauauccacgacuuccgcucugaugagauugagcaucuugugguggaggaacuggucaaaaagagagaagagugccucgacgcccuggaaagcaucaugaccacaaaauccgugagcuuucggcgccuuucucaccugagaaagcucguucccggguucggaaaggcuuacaccaucuucaacaaaacacugauggaggccgaugcucauuauaaguccgugcggaccuggaaugagauuauccccagcaaaggcugccugcgcgucgggggaagaugucacccucacgugaacggcguuuucuucaaugggauuauccucggaccggacggccaugugcugauucccgaaaugcagucuagccuucugcagcaacacauggagcuccuggaauccucugucaucccucuuaugcauccccuggccgauccuagcacgguguuuaaggacgaugacgaggcggaagauuucgucgaggugcaccuccccgacguucauaaacagguguccggcgucgaucuggggcugccgagcuggggaaaguacgugcucaugucuguuggcgccaugaucgcucugaugcuuaugauuuuucugacaaccugcugucggaaggccaacggggcugaguccacccagcacagacucggagaaacaggccgcaaagugagcgucaccucucaguccgggcgggugaucagcuccugggagucuuauaagagcggcggagaaacaaaacuguga

SEQ ID NO: 223973 - RNA, 1575 nt, Artificial Sequence
  derived and/or modified CDS sequence (opt5) from glycoprotein__RABV__LC071943.1
augaucccccaggcccuucucuucgugccucugcuugucuuuagccugugcuucggcaaguuuccgauuuacaccauccccgacaaacucgggccuuggucccccauugauauccaccaucugucuuguccuaacaaucuuguuguggaggacgaaggaugcacaaaccugagcggcuucuccuauauggagcucaaggugggguacauuucugcuaucaaagucaauggauuuacguguaccggcgugguuacagaagccgagaccuauacaaacuucgugggguacgucaccacaaccuuuaagagaaaacacuuccggcccacgccugaugcgugcggagcugccuauaauuggaagauggccggcgacccgcgcuacgaagagagccugcauaaccccuauccugauuaccacuggcugagaaccgugaagacaaccaaagagucccucguuaucauuucucccagcguguccgaccuggauccuuacgacaagagccuucauucucgggucuuucccuccggcaaauguagcgggaucacagugucuuccaccuauugcccgacgaaucacgauuacacaauuuggaugccugaaaacccccgccugggaaccagcugugacaucuucacaaccucuagaggcaagcgggcuuccaaagggggaaagaccugcggcuuuguggaugagcgcgggcucuauaagagccugaaaggagccuguaagcugaaacugugcggcguccucggccugagacugauggacgggacaugggcugccauucaaacguccgaugaagcgaagugguguccucccgaccagcucguuaauauccacgacuuccggucugaugagauugagcaucuggugguggaggaacuugucaaaaagcgcgaagagugccuggacgcccucgaaagcaucaugaccacaaaauccgugagcuuuagacggcugucucaccuucgcaagcugguucccggauucggcaaggcuuacaccaucuucaacaaaacacucauggaggccgaugcucauuauaaguccgugcacaccuggaaugagauuaucccuagcaaagggugccugagagucggaggccggugucacccgcaugugaacgggguguuuuucaauggaauuauccugggccccgacggccacguucucauuccugaaaugcagucuagccugcuucagcaacauauggagcugcucgaauccucugucaucccccugaugcacccucuugccgaucccagcacgguguuuaaggacgaugacgaggcggaagauuucgucgaggugcaucugccggacguucacaaacagguguccggggucgaucucggacugccuagcuggggcaaguacgugcugaugucuguuggggccaugaucgcucucaugcugaugauuuuucuuacaaccugcugucgcaaggccaacggagcugaguccacccagcacagacugggcgaaacagggcggaaagugagcgucaccucucaguccggcagagugaucagcuccugggagucuuauaagagcggaggcgaaacaaaacucuga

SEQ ID NO: 223974 - RNA, 1575 nt, Artificial Sequence
  derived and/or modified CDS sequence (opt5) from glycoprotein__RABV__LC071944.1
augaucccccaggcccuucucuucgugccucugcuugucuuuagccugugcuucggcaaguuuccgauuuacaccauccccgacaaacucgggccuuggucccccauugauauccaccaucugucuuguccuaacaaucuuguuguggaggacgaaggaugcacaaaccugagcggcuucuccuauauggagcucaaggugggguacauuucugcuaucaaagucaauggauuuacguguaccggcgugguuacagaagccgagaccuauacaaacuucgugggguacgucaccacaaccuuuaagagaaaacacuuccggcccacgccugaugcgugccgcgcugccuauaauuggaagauggccggagacccgagauacgaagugagccugcauaaccccuauccugauuaccacuggcugcggaccguuaagacaaccaaagagucccucgugaucauuucucccagcgucuccgaccuggauccuuacgacaagagccuucauucucgcguguuucccuccggcaaauguagcggcaucacagugucuuccaccuauugcccgacgaaucacgauuacacaauuuggaugccugagaaccccagacuggggaccagcugugacaucuucacaaccucucggggaaagcgcgcuuccaaaggcgggaagaccugcggauuugucgaugaaagaggccucuauaagagccugaaaggggccuguaagcugaaacugugcggaguucucggccugcggcugauggacggcacaugggcugccauucaaacguccgaugaggcgaagugguguccucccgaccagcucgugaauauccacgacuuccgcucugaugaaauugagcaucugguggucgaggaacuugugaaaaagagagaggaaugccuggacgcccucgagagcaucaugaccacaaaauccguuagcuuucggcgccugucucaccuuagaaagcuggugcccggguucggaaaggcuuacaccaucuucaacaaaacacucauggaagccgaugcucauuauaaguccguccggaccuggaaugagauuaucccuagcaaaggcugccugcgcguugggggaagaugucacccgcacgugaacggcguguuuuucaaugggauuauccugggacccgacggccauguccucauuccugagaugcagucuagccugcuucagcaacacauggaacugcucgaguccucugugaucccccugaugcauccucuugccgaucccagcacggucuuuaaggacgaugacgaagcggaggauuucguggaaguucaucugccggacgugcacaaacaggucuccggcguggaucucgggcugccuagcuggggaaaguacguucugaugucugugggcgccaugaucgcucucaugcugaugauuuuucuuacaaccugcugucggaaggccaacggggcugaguccacccagcacagacugggagagacaggccgcaaagucagcgugaccucucaguccgggcgggugaucagcuccugggaaucuuauaagagcggcggagagacaaaacucuga

SEQ ID NO: 223975 - RNA, 1575 nt, Artificial Sequence
  derived and/or modified CDS sequence (opt5) from glycoprotein__RABV__LC071945.1
augaucccccaggcccuccuguucgugagccugcuugucuuuucccugugcuucggcaaguuuccuauuuacaccaucccggacaaacucgggcccuggucuccuauugauauccaccaucugagcugucccaacaaucuuguuguggaggacgaaggaugcacaaaccuguccggcuucucuuauauggagcucaaggugggguacauuagcgcuaucaaagucaauggauuuacguguaccggcgugguuacagaagccgagaccuauacaaacuucgugggguacgucaccacaaccuuuaagagaaaacacuuccggccuacgcccgaugcgugccgcgcugccuauaauuggaagauggccggagacccuagauacgaagagucccugcauaacccguaucccgauuaccacuggcugcggaccgugaagacaaccaaagagucucucguuaucauuagcccuuccgugagcgaccuggaucccuacgacaagucucuucauucccgcguccugccuggcggcaaauguagcgggaucacagugucuuccaccuauugccccacgaaucacgauuacacaauuuggaugccggaaaacccuagacucggaaccagcugugacaucuuuacaaccucucggggcaagcgcgcuuccaaagggggaaagaccugcggcuucguggaugagagagggcuguauaagagccuuaaaggagccuguaagcugaaacucugcggcguccugggccugcggcucauggacgggacaugggcugccauucaaacguccgaugaagcgaaguggugucccccugaccagcugguuaauauccacgacuuucgcucugaugagauugagcaucuugugguggaggaacuggucaaaaagagagaagagugccucgacgcccuggaaagcaucaugaccacaaaauccgugagcuuccggcgccuuucucaccugagaaagcucguucccggauuuggcaaggcuuacaccaucuucaacaaaacacugauggaggccgaugcucauuauaaguccgugcggaccuggaaugagauuauccccagcaaagggugccugcgcgucggaggcagaugucacccucacgugaacgggguuuucuuuaauggaauuauccucggcccggacggccaugugcugauucccgaaaugcagucuagccuucugcagcaacacauggagcuccuggaauccucugucaucccucuuaugcauccccuggccgauccuagcacgguguucaaggacgaugacgaggcggaagauuuugucgaggugcaccuccccgacguucauaaacagguguccggggucgaucugggacugccgagcuggggcaaguacgugcucaugucuguuggggccaugaucgcucugaugcuuaugauuuuccugacaaccugcugucggaaggccaacggagcugaguccacccagcacagacucggcgaaacagggcgcaaagugagcgucaccucucaguccggccgggugaucagcuccugggagucuuauaagagcggaggcgaaacaaaacuguga

SEQ ID NO: 223976 - RNA, 1575 nt, Artificial Sequence
  derived and/or modified CDS sequence (opt5) from glycoprotein__RABV__LC071946.1
augaucccccaggcccugcucuuugugccucugcuugucuuuagccugugcuucggcaaguuuccgauuuacaccauccccgacaaacucgggccuuggucccccauugauauccaccaucugucuuguccuaacaaucuuguuguggaggacgaaggaugcacaaaccugagcggcuucuccuauauggagcucaaggugggguacauuucugcuaucaaagucaauggauuuacguguaccggcgugguuacagaagccgagaccuauacaaacuucgugggguacgucaccacaaccuuuaagagaaaacacuuccggcccacgccugaugcgugccgcgcugccuauaauuggaagauggccggagacccgagauacgaagagagccugcauaaccccuauccugauuaccacuggcugcggaccgugaagacaaccaaagagucccucguuaucauuucucccagcguguccgaccuggauccuuacgacaagagccuucauucucgcgucuuucccggcggcaaauguuccgggaucacagugagcucuaccuauugcccgacgaaucacgauuacacaauuuggaugccugaaaaccccagacugggaaccuccugugacaucuucacaaccagccggggcaagcgcgcuucuaaagggggaaagaccugcggcuuuguggaugagagagggcucuauaagucccugaaaggagccuguaagcugaaacugugcggcguccucggccugcggcugauggacgggacaugggcugccauucaaacgagcgaugaagcgaagugguguccucccgaccagcucguuaauauccacgacuuccgcuccgaugagauugagcaucuggugguggaggaacuugucaaaaagagagaagagugccuggacgcccucgaaucuaucaugaccacaaaaagcguguccuuucggcgccugagccaccuuagaaagcugguucccggauucggcaaggcuuacaccaucuucaacaaaacacucauggaggccgaugcucauuauaagucugugcggaccuggaaugagauuaucccuuccaaagggugccugcgcgucggaggcagaugucacccgcacgugaacgggguuuucuucaauggaauuauccugggccccgacggccaugugcucauuccugaaaugcagagcucucugcuucagcaacacauggagcugcucgaaagcuccgucaucccccugaugcauccucuugccgaucccucuacgguguuuaaggacgaugacgaggcggaagauuucgucgaggugcaccuuccggacguucauaaacaggugagcggggucgaucucggacugccuuccuggggcaagcacgugcugaugagcguuggggccaugaucgcucucaugcugaugauuuuucuuacaaccugcugucggaaggccaacggagcugagucuacccagcacagacugggcgaaacagggcgcaaaguguccgucaccagccagucuggccgggugaucuccagcugggaguccuacaagucuggaggcgaaacaaaacucuga

SEQ ID NO: 223977 - RNA, 1575 nt, Artificial Sequence
  derived and/or modified CDS sequence (opt5) from glycoprotein__RABV__LC071947.1
augaucccccaggcccugcucuuugugccucugcuugucuuuagccugugcuucggcaaguuuccgauuuacaccauccccgacaaacucgggccuuggucccccauugauauccaccaucugucuuguccuaacaaucuuguuguggaggacgaaggaugcacaaaccugagcggcuucuccuauauggagcucaaggugggguacauuucugcuaucaaagucaauggauuuacguguaccggcgugguuacagaagccgagaccuauacaaacuucgugggguacgucaccacaaccuuuaagagaaaacacuuccggcccacgccugaugcgugccgcgcugccuauaauuggaagauggccggagacccgagauacgaagagagccugcauaaccccuauccugauuaccacuggcugcggaccgugaagacaaccaaagagucccucguuaucauuucucccagcguguccgaccuggauccuuacgacaagagccuucauucucgcgucuuucccuccggcaaauguagcggcaucacagugucuuccaccuauugcccgacgaaucacgauuacacaauuuggaugccugaaaaccccagacuggggaccagcugugacaucuucacaaccucucggggaaagcgcgcuuccaaaggcgggaagaccugcggauuuguggaugagagaggccucuauaagagccugaaaggggccuguaagcugaaacugugcggaguccucggccugcggcugauggacggcacaugggcugccauucaaacguccgaugaagcgaagugguguccucccgaccagcucguuaauauccacgacuuccgcucugaugagauugagcaucuggugguggaggaacuugucaaaaagagagaagagugccuggacgcccucgaaagcaucaugaccacaaaauccgugagcuuucggcgccugucucaccuuagaaagcugguucccggguucggaaaggcuuacaccaucuucaacaaaacacucauggaggccgaugcucauuauaaguccgugcggaccuggaaugagauuaucccuagcaaaggcugccugcgcgucgggggaagaugucacccgcacgugaacggcguuuucuucaaugggauuauccugggacccgacggccaugugcucauuccugaaaugcagucuagccugcuucagcaacacauggagcugcucgaauccucugucaucccccugaugcauccucuugccgaucccagcacgguguuuaaggacgaugacgaggcggaagauuucgucgaggugcaccuuccggacguucauaaacagguguccggcgucgaucucgggcugccuagcuggggaaaguacgugcugaugucuguuggcgccaugaucgcucucaugcugaugauuuuucuuacaaccugcugucggaaggccaacggggcugaguccacccagcacagacugggagaaacaggccgcaaagugagcgucaccucucaguccgggcgggugaucagcuccugggagucuuauaagagcggcggagaaacaaaacucuga

SEQ ID NO: 223978 - RNA, 1575 nt, Artificial Sequence
  derived and/or modified CDS sequence (opt5) from glycoprotein__RABV__LC071948.1
augaucccccaggcccugcucuuugugccucugcuugucuuuagccugugcuucggcaaguuuccgauuuacaccauccccgacaaacucgggccuuggucccccauugauauccaccaucugucuuguccuaacaaucuuguuguggaggacgaaggaugcacaaaccugagcggcuucuccuauauggagcucaaggugggguacauuucugcuaucaaagucaauggauuuacguguaccggcgugguuacagaagccgagaccuauacaaacuucgugggguacgucaccacaaccuuuaagagaaaacacuuccggcccacgccugaugcgugccgcgcugccuauaauuggaagauggccggagacccgagauacgaagagagccugcauaaccccuauccugauuaccacuggcugcggaccgugaagacaaccaaagagucccucguuaucauuucucccagcguguccgaccuggauccuuacgacaagagccuucauucucgcgucuuucccuccggcaaauguagcggcaucacagugucuuccaccuauugcccgacgaaucacgauuacacaauuuggaugccugaaaaccccagacuggggaccagcugugacaucuucacaaccucucggggaaagcgcgcuuccaaaggcgggaagaccugcggauuuguggaugagagaggccucuauaagagccugaaaggggccuguaagcugaaacugugcggaguccucggccugcggcugauggacggcacaugggcugccauucaaacguccgaugaagcgaagugguguccucccgaccagcucguuaauauccacgacuuccgcucugaugagauugagcaucuggugguggaggaacuugucaaaaagagagaagagugccuggacgcccucgaaagcaucaugaccacaaaauccgugagcuuucggcgccugucucaccuuagaaagcugguucccggguucggaaaggcuuacaccaucuucaacaaaacacucauggaggccgaugcucauuauaaguccgugcggaccuggaaugagauuaucccuagcaaaggcugccugcgcgucgggggaagaugucacccgcacgugaacggcguuuucuucaaugggauuauccugggacccgacggccaugugcucauuccugaaaugcagucuagccugcuucagcaacacauggagcugcucgaauccucugucaucccccugaugcauccucuugccgaucccagcacgguguuuaaggacgaugacgaggcggaagauuucgucgaggugcaccuuccggacguucauaaacagguguccggcgucgaucucgggcugccuagcuggggaaaguacgugcugaugucuguuggcgccaugaucgcucucaugcugaugauuuuucuuaugacaugcugucggaaggccaacggggcugaguccacccagcacagacugggagaaaccggccgcaaagugagcgucacaucucaguccgggcgggugaucagcuccugggagucuuauaagagcggcggagaaaccaaacucuga

SEQ ID NO: 223979 - RNA, 1575 nt, Artificial Sequence; identical to SEQ ID NO: 223977
  derived and/or modified CDS sequence (opt5) from glycoprotein__RABV__LC071949.1

SEQ ID NO: 223980 - RNA, 1575 nt, Artificial Sequence
  derived and/or modified CDS sequence (opt5) from glycoprotein__RABV__LC071950.1
augaucccccaggcccugcucuuugugccucugcuugucuuuagccugugcuucggcaaguuuccgauuuacaccauccccgacaaacucgggccuuggucccccauugauauccaccaucugucuuguccuaacaaucuuguuguggaggacgaaggaugcacaagccuguccggcuucucuuauauggagcucaaggugggguacauuagcgcuaucaaagucaacggauuuacguguaccggcgugguuacagaagccgagaccuauacaaauuucgugggguacgucaccacaaccuuuaagagaaaacacuuccggcccacgccugaugcgugccgcgcugccuauaacuggaagauggccggagacccgagauacgaagagucccugcauaaucccuauccugauuaccacuggcugcggaccgugaagacaaccaaagagucucucguuaucauuagccccuccgugagcgaccuggauccuuacgacaagucucuucauucccgcgucuuucccagcggcaaauguucuggcaucacaguguccagcaccuauugcccgacgaaccacgauuacacaauuuggaugccugaaaagcccagacuggggaccucuugugacaucuucacaaccucccggggaaaacgcgcuagcaagggcgggaagaccugcggauuuguggaugagagaggccucuauaaaucccugaagggggccuguaaacuuaagcugugcggaguccucggccugcggcugauggacggcacaugggcugccauucaaacgucugaugaagcgaaaugguguccucccgaccagcucguuaauauccacgacuuccgcagcgaugagauugagcaucuggugguggaggaacuugucaagaaaagagaagagugccuggacgcccucgaauccaucaugaccacaaagagcgugucuuuucggcgccugucccaccuuagaaagcugguucccggguucggaaaggcuuacaccaucuucaacaagacacucauggaggccgaugcucauuauaaaagcgugcggaccuggaaugagauuaucccuucuaagggcugccugcgcgucgggggaagaugucacccgcacgugaacggcguuuucuucaaugggauuauccugggacccgacggccaugugcucauuccugaaaugcagagcucccugcuucagcaacacauggagcugcucgaaucuagcgucaucccccugaugcauccucuugccgaucccuccacgguguuuaaagacgaugacgaggcggaagauuucgucgaggugcaucugccggacguucacaaacaggugagcggcgucgaucucgggcugccuucuuggggaaaguacgugcugauguccguuggcgccaugaucgcucucaugcugaugauuuuucuuacaaccugcugucggaaagccaacggggcugagagcacccagcacagacugggagaaacaggccgcaaggugucugucaccucccagagcgggcgggugaucuccucuugggagagcuauaaauccggcggagaaacaaagcucuga

SEQ ID NO: 223981 - RNA, 1575 nt, Artificial Sequence
  derived and/or modified CDS sequence (opt5) from glycoprotein__RABV__LC071951.1
augaucccccaggcccugcucuuugugccucugcuugucuuuagccugugcuucggcaaguuuccgauuuacaccauccccgacaaacucgggccuuggucccccauugauauccaccaucugucuuguccuaacaaucuuguuguggaggacgaaggaugcacaaaccugagcggcuucuccuauauggagcucaaggugggguacauuucugcuaucaaagucaauggauuuacguguaccggcgugguuacagaagccgagaccuauacaaacuucgugggguacgucaccacaaccuuuaagagaaaacacuuccggcccacgccugaugcgugccgcgcugccuauaauuggaagauggccggagacccgagauacgaagagagccugcauaaccccuauccugauuaccacuggcugcggaccgugaagacaaccaaagagucccucguuaucauuucucccagcguguccgaccuggauccuuacgacaagagccuucauucucgcgucuuucccuccggcaaauguagcggcaucacagugucuuccaccuauugcccgacgaaucacgauuacacaauuuggaugccugaaaaccccagacuggggaccagcugugacaucuucacaaccucucggggaaagcgcgcuuccaaaggcgggaagaccugcggauuuguggaugagagaggccucuauaagagccugaaaggggccuguaagcugaaacugugcggaguccucggccugcggcugauggacggcacaugggcugccauucaaacguccgaugaagcgaagugguguccucccgaccagcucguuaauauccacgacuuccgcucugaugagauugagcaucuggugguggaggaacuugucaaaaagagagaagagugccuggacgcccucgaaagcaucaugaccacaaaauccgugagcuuucggcgccugucucaccuuagacggcugguucccggguucggaaaggcuuacaccaucuucaacaagacacucauggaggccgaugcucauuauaaauccgugcgcaccuggaaugagauuaucccuagcaagggcugccugagagucgggggacggugucacccgcacgugaacggcguuuucuucaaugggauuauccugggacccgacggccaugugcucauuccugaaaugcagucuagccugcuucagcaacacauggagcugcucgaauccucugucaucccccugaugcauccucuugccgaucccagcacgguguuuaaagacgaugacgaggcggaagauuucgucgaggugcaccuuccggacguucauaaacagguguccggcgucgaucucgggcugccuagcuggggaaaguacgugcugaugucuguuggcgccaugaucgcucucaugcugaugauuuuucuuacaaccugcuguagaaaggccaacggggcugaguccacccagcaccgccugggagaaacaggccggaaggugagcgucaccucucaguccgggagagugaucagcuccugggagucuuauaaaagcggcggagaaacaaagcucuga

SEQ ID NO: 223982 - RNA, 1575 nt, Artificial Sequence; identical to SEQ ID NO: 223977
  derived and/or modified CDS sequence (opt5) from glycoprotein__RABV__LC071952.1

SEQ ID NO: 223983 - RNA, 1575 nt, Artificial Sequence
  derived and/or modified CDS sequence (opt5) from glycoprotein__RABV__LC071953.1
augaucccccaggcccugcucuuugugccucugcuugucuuuagccugugcuucggcaaguuuccgauuuacaccauccccgacaaacucgggccuuggucccccauugauauccaccaucugucuuguccuaacaaucuuguuguggaggacgaaggaugcacaaaccugagcggcuucuccuauauggagcucaaggugggguacauuucugcuaucaaagucaauggauuuacguguaccggcgugguuacagaagccgagaccuauacaaacuucgugggguacgucaccacaaccuuuaagagaaaacacuuccggcccacgccugaugcgugccgcgcugccuauaauuggaagauggccggagacccgagauacgaagagagccugcauaaccccuauccugauuaccacuggcugcggaccgugaagacaaccaaagagucccucguuaucauuucucccagcguguccgaccuggauccuuacgacaagagccuucauucucgcgucuuucccuccggcaaauguagcggcaucacagugucuuccaccuauugcccgacgaaucacgauuacacaauuuggaugccugaaaaccccagacuggggaccagcugugacaucuucacaaccucucggggaaagcgcgcuuccaaaggcgggaagaccugcggauuuguggaugagagaggccucuauaagagccugaaaggggccuguaagcugaaacugugcggaguccucggccugcggcugauggacggcacaugggcugccauucaaacguccgaugaagcgaagugguguccucccgaccagcucguuaauauccacgacuuccgcucugaugagauugagcaucuggugguggaggaacuugucaaaaagagagaagagugccuggacgcccucgaaagcaucaugaccacaaaauccgugagcuuucggcgccugucucaccuuagaaagcugguucccggguucggaaaggcuuacaccaucuucaacaaaacacucauggaggccgaugcucauuauaaguccgugcggaccuggaaugagauuaucccuagcaaaggcugccugcgcgucgggggaagaugucacccgcacgugaacggcguuuucuucaaugggauuauccugggacccgacggccaugugcucauuccugaaaugcagucuagccugcuucagcaacacauggagcugcucgaauccucugucaucccccugaugcauccucuugccgaucccagcacgguguuuaaggacgaugacgaggcggaagauuucgucgaggugcaccuuccggacguucauaaacagguguccggcgucgaucucgggcugccuagcuggggaaaguacgugcugaugucuguuggcgccaugaucgcucucacacugaugauuuuucuuacaaccugcugucggaaggccaacggggcugaguccacccagcacagacugggagaaaccggccgcaaagugagcgucacaucucaguccgggcgggugaucagcuccugggagucuuauaagagcggcggagaaacgaaacucuga

SEQ ID NO: 223984 - RNA, 1575 nt, Artificial Sequence
  derived and/or modified CDS sequence (opt5) from glycoprotein__RABV__LC071954.1
augaucccccaggcccuucucuucgugccucugcuugucuuuagccugugcuucggcaaguuuccgauuuacaccauccccgacaaacucgggccuuggucccccauugauauccaccaucugucuuguccuaacaaucuuguuguggaggacgaaggaugcacaaaccugagcggcuucuccuauauggagcucaaggugggguacauuucugcuaucaaagucaauggauuuacguguaccggcgugguugccgaagcggagacauauaccaacuucgugggguacgucacaaccacauuuaagagaaaacacuuccggcccaccccugaugcuugccgcgccgccuauaauuggaagauggcuggagacccgagauacgaagagagccugcauaaccccuauccugauuaccacuggcugcggacggugaagaccacaaaagagucccucguuaucauuucucccagcguguccgaccuggauccuuacgacaagagccuucauucucgcgucuuucccuccggcaaauguagcggcaucaccgugucuuccacauauugcccgaccaaucacgauuacacgauuuggaugccugaaaaccccagacuggggacaagcugugacaucuucaccacaucucggggaaagcgcgccuccaaaggcgggaagaccugcggauuuguggaugagagaggccucuauaagagccugaaaggggcuuguaagcugaaacugugcggaguccucggccugcggcugauggacggcaccugggccgcgauucaaacauccgaugaagccaagugguguccucccgaccagcucguuaauauccacgacuuccgcucugaugagauugagcaucuggugguggaggaacuugucaaaaagagagaagagugccuggacgcucucgaaagcaucaugacgaccaaauccgugagcuuucggcgccugucucaccuuagaaaguucguucccggguucggaaaggccuacacaaucuuuaacaaaacccugauggaggcugaugcccauuauaaguccgugcggacauggaaugagauuaucccuagcaaaggcugccuccgcgucgggggaagaugucacccgcacgugaacggcguuuucuuuaaugggauuauccugggacccgacggccaugugcugauuccugaaaugcagucuagccuccugcagcaacacauggagcuucuggaauccucugucaucccccucaugcauccucuggcggaucccagcaccguguucaaggacgaugacgaggccgaagauuuugucgaggugcaccuuccggacguucauaaacagguguccggcgucgaucuggggcucccuagcuggggaaaguacgugcugaugucuguuggcgcuaugaucgcccugaugcucaugauuuuccugacgacaugcugucggaaggcuaacggggccgaguccacccagcacagacuuggagaaaccggccgcaaagugagcgucacaucucaguccgggcgggugaucagcuccugggagucuuauaagagcggcggagaaaccaaacuguga

SEQ ID NO: 223985 - RNA, 1575 nt, Artificial Sequence
  derived and/or modified CDS sequence (opt5) from glycoprotein__RABV__LC071955.1
augaucccccaggcccugcucuuugugccucugcuugucuuuagccugugcuucggcaaguuuccgauuuacaccauccccgacaaacucgggccuuggucccccauugauauccaccaucugucuuguccuaacaaucuuguuguggaggacgaaggaugcacaaaccugagcggcuucuccuauauggagcucaaggugggguacauuucugcuaucaaagucaauggauuuacguguaccggcgugguuacagaagccgagaccuauacaaacuucgugggguacgucaccacaaccuuuaagagaaaacacuuccggcccacgccugaugcgugccgcgcugccuauaauuggaagauggccggagacccgagauacgaagagagccugcauaaccccuauccugauuaccacuggcugcggaccgugaagacaaccaaagagucccucguuaucauuucucccagcguguccgaccuggauccuuacgacaagagccuucauucucgcgucuuucccuccggcaaauguagcggcaucacagugucuuccaccuauugcccgacgaaucacgauuacacaauuuggaugccugaaaaccccagacuggggaccagcugugacaucuucacaaccucucggggaaagcgcgcuuccaaaggcgggaagaccugcggauuuguggaugagagaggccucuauaagagccugaaaggggccuguaagcugaaacugugcggaguccucggccugcggcugauggacggcacaugggcugccauucaaacguccgaugaagcgaagugguguccucccgaccagcucguuaauauccacgacuuccgcucugaugagauugagcaucuggugguggaggaacuugucaaaaagagagaagagugccuggacgcccucgaacccaucaugaccacaaaaagcguguccuuucggcgccugagccaccuuagaaagcugguuccuggguucggaaaggcuuacaccaucuucaacaaaacacucauggaggccgaugcucauuauaagucugugcggaccuggaaugagauuaucccguccaaaggcugccugcgcgucgggggaagaugucacccccacgugaacggcguuuucuucaaugggauuauccugggaccugacggccaugugcucauucccgaaaugcagagcucucugcuucagcaacacauggagcugcucgaaagcuccgucaucccucugaugcauccccuugccgauccgucuacgguguuuaaggacgaugacgaggcggaagauuucgucgaggugcaccuuccugacguucauaaacaggugagcggcgucgaucucgggcugcccuccuggggaaaguacgugcugaugagcguuggcgccaugaucgcucucaugcugaugauuuuucuuacaaccugcugucggaaggccaacggggcugagucuacccagcacagacugggagaaacaggccgcaaaguguccgucaccagccagucugggcgggugaucuccagcugggaguccuauaagucuggcggagaaacaaaacucuga

SEQ ID NO: 223986 - RNA, 1575 nt, Artificial Sequence
  derived and/or modified CDS sequence (opt5) from glycoprotein__RABV__LC071956.1
augaucccccaggcccugcucuuugugccucugcuugucuuuagccugugcuucggcaaguuuccgauuuacaccauccccgacaaacucgggccuuggucccccauugauauccaccaucugucuuguccuaacaaucuuguuguggaggacgaaggaugcacaaaccugagcggcuucuccuauauggagcucaaggugggguacauuucugcuaucaaagucaauggauuuacguguaccggcgugguuacagaagccgagaccuauacaaacuucgugggguacgucaccacaaccuuuaagagaaaacacuuccggcccacgccugaugcgugccgcgcugccuauaauuggaagauggccggagacccgagauacgaagagagccugcauaaccccuauccugauuaccacuggcugcggaccgugaagacaaccaaagagucccucguuaucauuucucccagcguguccgaccuggauccuuacgacaagagccuucauucuaaagucuuucccuccggcaaguguagcggcaucacagugucuuccaccuauugcccgacgaaucacgauuacacaauuuggaugccugaaaacccccgccuggggaccagcugugacaucuucacaaccucuagaggaaaacgggcuuccaagggcgggaagaccugcggauuuguggaugagcgcggccucuauaaaagccugaagggggccuguaaacuuaugcugugcggaguccucggccugagacugauggacggcacaugggcugccauucaaacguccgaugaagcgaagugguguccucccgaccagcucguuaauauccacgacuuccggucugaugagauugagcaucuggugguggaggaacuugucaaaaagcgcgaagagugccuggacgcccucgaaagcaucaugaccacaaaauccgugagcuuuagacggcugucucaccuucgcaagcugguucccggguucggaaaggcuuacaccaucuucaacaaaacacucauggaggccgaugcucauuauaaguccgugagaaccuggaaugagauuaucccuagcaaaggcugccugcgggucgggggacgcugucacccgcacgugaacggcguuuucuucaaugggauuauccugggacccgacggccaugugcucauuccugaaaugcagucuagccugcuucagcaacacauggagcugcucgaauccucugucaucccccugaugcauccucuugccgaucccagcacgguguuuaaggacgaugacgaggcggaagauuucgucgaggugcaucugccggacguucacaaacagguguccggcgucgaucucgggcugccuagcuggggaaaguacgugcugaugucuguuggcgccaugaucgcucucaugcugaugauuuuucuuacaaccugcuguagaaaggccaacggggcugaguccacccagcaccggcugggagaaacaggcagaaaagugagcgucaccucucaguccgggcgcgugaucagcuccugggagucuuauaagagcggcggagaaacaaaacucuga

SEQ ID NO: 223987 - RNA, 1575 nt, Artificial Sequence; identical to SEQ ID NO: 223986
  derived and/or modified CDS sequence (opt5) from glycoprotein__RABV__LC071957.1

SEQ ID NO: 223988 - RNA, 1575 nt, Artificial Sequence
  derived and/or modified CDS sequence (opt5) from glycoprotein__RABV__LC071958.1
augaucccccaggcccugcucuuugugccucugcuugucuuuagcuccugcuucggcaaguuuccgauuuacaccauccccgacaaacuggggccuuggucucccauugauauccaccaucucagcuguccuaacaaucugguugugggagacgagggcugcacaaaccuuuccggguucucuuauauggaacugaaggugggauacauuagcgcuaucaaagucaauggcuuuacguguaccggggugguuacagaggccgaaaccuauacaaacuucgugggauacgucaccacaaccuuuaagagaaaacacuuccggcccacgccugaugcgugccgcgcugccuauaauuggaagauggccggcgacccgagauacgaggaaucccuccauaaccccuauccugauuaccacuggcugcggaccgugaagacaaccaaagagucucugguuaucauuagccccuccgugagcgaccucgauccuuacgacaagucucugcauucccgcgucuuucccagcggcaaauguucugggaucacaguguccagcaccuauugcccgacgaaucacgauuacacaauuuggaugccugagaaccccagacuuggaaccucuugugacaucuucacaaccucccggggcaagcgcgcuagcaaagggggaaagaccugcggcuuuguggaugaaagagggcuguauaagucccucaaaggagccuguaagcugaugcuuugcggcguccugggccuccggcugacagacgggacgugggcugccauucaaaccucugaugaggcgaaaugguguccucccgaccagcugguuaauauccacgacuuccgcagcgaugaaauugagcaucucgugguggaggaacuggucaagaaaagagaggaaugccuugacgcccuggaguccaucaugacaaccaagagcgugucuuuucggcgccucucccaccugagaaaacuuguucccggauucggcaaggcuuacacaaucuucaacaagacccugauggaagccgaugcucauuauaaaagcgugcggacguggaaugagauuaucccuucuaaggggugccuccgcgucggaggcagaugucacccgcacgugaacgggguuuucuucaauggaauuauccugggccccgacggccaugugcugauuccugagauccagagcucccuccugcagcaacacauggaacuucuggagucuagcgucaucccccucaugcauccucuggccgaucccuccacaguguuuaaagacgaugacgaagcggaggauuucgucgaagugcaccuuccggacguucauaaacaggugagcggggucgaucugggacucccuucuuggggcaaguacgugcugauguccguuggggccaugauugcucugaugcucaugaucuuucugacaaccugcugucggaaggccaacggagcugagagcacccagcacagacuuggcgagaccgggcgcaaggugucugucacaucccagagcggccgggugauuuccucuugggaaagcuauaaauccggaggcgagacgaagcuguga

SEQ ID NO: 223989 - RNA, 1575 nt, Artificial Sequence; identical to SEQ ID NO: 223977
  derived and/or modified CDS sequence (opt5) from glycoprotein__RABV__LC071959.1

SEQ ID NO: 223990 - RNA, 1575 nt, Artificial Sequence
  derived and/or modified CDS sequence (opt5) from glycoprotein__RABV__LC071960.1
augaucccccaggcccugcucuuugugccucugcuugucuuuagccugugcuucggcaaguuuccgauuuacaccauccccgacaaacucgggccuuggucccccauugauauccaccaucugucuuguccuaacaaucuuguuguggaggacgaaggaugcacaaaccugagcggcuucuccuauauggagcucaaggugggguacauuucugcuaucaaagucaauggauuuacguguaccggcgugguuacagaagccgagaccuauacaaacuucgugggguacgucaccacaaccuuuaagagaaaacacuuccggcccacgccugaugcgugccgcgcugccuauaauuggaagauggccggagacccgagauacgaagagagccugcauaaccccuauccugauuaccacuggcugcggaccgugaagacaaccaaagagucccucguuaucauuucucccagcguguccgaccuggauccuuacgacaagagccuucauucucgcgucuuucccuccggcaaauguagcggcaucacagugucuuccaccuauugcccgacgaaucacgauuacacaauuuggaugccugaaaaccccagacuggggaccagcugugacaucuucacaaccucucggggaaagcgcgcuuccaaaggcgggaagaccugcggauuuguggaugagagaggccucuauaagagccugaaaggggccuguaagcugaaacugugcggaguccucggccugcggcugauggacggcacauggggagcuauucaaacguccgaugaagccaagugguguccucccgaccagcucguuaauauccacgacuuccgcucugaugagauugagcaucuggugguggaggaacuugucaaaaagagagaagagugccuggacgcgcucgaaagcaucaugaccacaaaauccgugagcuuucggcgccugucucaccuuagaaagcugguucccggguucggcaaggccuacaccaucuucaacaaaacacucauggaggcugaugcccauuauaaguccgugcggaccuggaaugagauuaucccuagcaaagggugccugcgcgucggaggcagaugucacccgcacgugaacgggguuuucuucaauggaauuauccugggccccgacggccaugugcucauuccugaaaugcagucuagccugcuucagcaacacauggagcugcucgaauccucugucaucccccugaugcauccucuugcugaucccagcacgguguuuaaggacgaugacgaggccgaagauuucgcggagguccaccuuccggacgugcauaaacagguuuccgggguggaucucggacugccuagcuggggcaaguacguccugaugucugugggggccaugaucgcucucaugcugaugauuuuucuuacaaccugcugucggaaggccaacggagcugaguccacccagcacagacugggcgaaacagggcgcaaaguuagcgugaccucucaguccggccgggucaucagcuccugggagucuuauaagagcggaggcgaaacaaaacucuga

SEQ ID NO: 223991 - RNA, 1575 nt, Artificial Sequence
  derived and/or modified CDS sequence (opt5) from glycoprotein__RABV__LC071961.1
augaucccccaggcccuucucuucgugccucugcuugucuuuagccugugcuucggcaaguuuccgauuuacaccauccccgacaaacucgggccuuggucccccauugauauccaccaucugucuuguccuaacaaucuuguuguggaggacgaaggaugcacaaaccugagcggcuucuccuauauggagcucaaggugggguacauuucugcuaucaaagucaauggauuuacguguaccggcgugguuacagaagccgagaccuauacaaacuucgugggguacgucaccacaaccuuuaagagaaaacacuuccggcccacgccugaugcgugccgcgcugccuauaauuggaagauggccggagacccgagauacgaagagagccugcauaaccccuauccugauuaccacuggcugcggaccgugaagacaaccaaagagucccucgacaucauuucucccagcguuuccgaucuggacccuuacgauaagagccuucauucucgcguguuucccuccggcaaauguagcggcaucacagucucuuccaccuauugcccgacgaaucacgacuacacaauuuggaugccugaaaaccccagacuggggaccagcugugauaucuucacaaccucucggggaaagcgcgcuuccaaaggcgggaagaccugcggauuuguggacgagagaggccucuauaagagccugaaaggggccuguaagcugaaacugugcggagugcucggccugcggcugauggauggcacaugggcugccauucaaacguccgacgaagcgaagugguguccucccgaccagcucgucaauauccacgauuuccgcucugacgagauugagcaucugguuguggaggaacuugugaaaaagagagaagagugccuggaugcccucgaaagcaucaugaccacaaaauccgucagcuuucggcgccugucucaccuuagaaagcuggugcccggguucggaaaggcuuacaccaucuucaacaaaacacucauggaggccgacgcucauuauaaguccguucggaccuggaaugagauuaucccuagcaaaggcugccugcgcgucgggggaagaugucacccgcacgugaacggcguguuuuucaaugggauuauccugggacccgauggccauguucucauuccugaaaugcagucuagccugcuucagcaacacauggagcugcucgaauccucugugaucccccugaugcauccucuugccgaccccagcacggucuuuaaggaugacgaugaggcggaagacuucguggagguccaucugccggaugugcacaaacagguuuccggcguggaccucgggcugccuagcuggggaaaguacguccugaugucugugggcgccaugaucgcucucaugcugaugauuuuucuuacaaccugcugucggaaggccaacggggcugaguccacccagcacagacugggagaaacaggccgcaaaguuagcgugaccucucaguccgggcgggucaucagcuccugggagucuuauaagagcggcggagaaacaaaacucuga

SEQ ID NO: 223992 - RNA, 1575 nt, Artificial Sequence; identical to SEQ ID NO: 223977
  derived and/or modified CDS sequence (opt5) from glycoprotein__RABV__LC071962.1

SEQ ID NO: 223993 - RNA, 1575 nt, Artificial Sequence; identical to SEQ ID NO: 223977
  derived and/or modified CDS sequence (opt5) from glycoprotein__RABV__LC071963.1

SEQ ID NO: 223994 - RNA, 1575 nt, Artificial Sequence
  derived and/or modified CDS sequence (opt5) from glycoprotein__RABV__LC071965.1
augaucccccaggcccugcucuuugugccucugcuugucuuuagccugugcuucggcaaguuuccgauuuacaccauccccgacaaacucgggccuuggucccccauugauauccaccaucugucuuguccuaacaaucuuguuguggaggacgaaggaugcacaaaccugagcggcuucuccuauauggagcucaaggugggguacauuucugcuaucaaagucaauggauuuacguguaccggcgugguuacagaagccgagaccuauacaaacuucgugggguacgucaccacaaccuuuaagagaaaacacuuccggcccacgccugaugcgugccgcgcugccuauaauuggaagauggccggagacccgagauacgaagagagccugcauaaccccuauccugauuaccacuggcugcggaccgugaagacaaccaaagagucccucguuaucauuucucccagcguguccgaccuggauccuuacgacaagagccuucauucucgcgucuuucccuccggcaaauguagcggcaucacagugucuuccaccuauugcccgacgaaucacgauuacacaauuuggaugccugaaaaccccagacuggggaccagcugugacaucuucacaaccucucggggaaagcgcgcuuccaaaggcgggaagaccugcggauuuguggaugagagaggccucuauaagagccugaaaggggccuguaagcugaaacugugcggaguccucggccugcggcugauggacggcacaugggcugccauucaaacguccgaugaagcgaagugguguccucccgaccagcucguuaauauccacgacuuccgcucugaugagauugagcaucuggugguggaggaacuugucaaaaagagagaagagugccuggacgcccucgaaagcaucaugaccacaaaauccgugagcuuucggcgccugucucaccuuagaaagcugguucccggguucggaaaggcuuacaccaucuucaacaaaacacucauggaggccgaugcucauuauaaguccgugcggaccuggaaugagauuaucccuagcaaaggcugccugcgcgucgggggaagaugucacccgcacgugaacggcguuuucuucaaugggauuauccugggacccgacggccaugugcucauuccugaaaugcagucuagccugcuucagcaacacauggagcugcucgaauccucugucaucccccugaugcauccucuugccgaucccagcacgguguuuaaggacgaugacgaggcggaagauuucgucgaggugcaccuuccggacguucauaaacagguguccggcgucgaucucgggcugccuagcuggggaaaguacgugcugaugucuguuggcgccaugaucgcucucaugcugaugauuuuucuuacaaugugcugucggaaggccaacggggcugaguccacccagcacagacugggagaaaccggccgcaaagugagcgucacaucucaguccgggcgggugaucagcuccugggagucuuauaagagcggcggagaaaccaaacucuga

SEQ ID NO: 223995 - RNA, 1575 nt, Artificial Sequence
  derived and/or modified CDS sequence (opt5) from glycoprotein__RABV__LC071966.1
augaucccccaggcccuucucuucgugccucugcuugucuuuagccugugcuucggcaaguuuccgauuuacaccauccccgacaaacucgggccuuggucccccauugauauccaccaucugucuuguccuaacaaucuuguuguggaggacgaaggaugcacaaaccugagcggcuucuccuauauggagcucaaggugggguacauuucugcuaucaaagucaauggauuuacguguaccggcgugguuacagaagccgagaccuauacaaacuucgugggguacgucaccacaaccuuuaagagaaaacacuuccggcccacgccugaugcgugcagcgcugccuauaauuggaagauggccggagacccgcgcuacgaagagucccugcauaaccccuauccugauuaccacuggcugagaaccgugaagacaaccaaagagucucucguuaucauuagccccuccgugagcgaccuggauccuuacgacaagucucuucauucccgggucuuucccagcggcaaauguucuggcaucacaguguccagcaccuauugcccgacgaaucacgauuacacaauuuggaugccugaaaacccccgccuggggaccucuugugacaucuucacaaccuccagaggaaagcgggcuagcaaaggcgggaagaccugcggauuugccgaugagcgcggccucuauaagucccugaaaggggcuuguaagcugaaacugugcggagugcucggccugagacugauggacggcacaugggccgcgauucaaacgucugaugaagccaagugguguccucccgaccagcucgucaauauccacgacuuccggagcgaugagauugagcaucugguuguggaggaacuugugaaaaagcgcgaagagugccuggacgcucucgaauccaucaugaccacaaaaagcgucucuuuuagacggcugucccaccuucgcaagcuggugcccggguucggaaaggccuacaccaucuucaacaaaacacucauggaggcugaugcccauuauaagagcguuagaaccuggaaugagauuaucccuucuaaaggcugccugcgggucgggggacgcugucacccgcacgugaacggcguguuuuucaaugggauuauccugggacccgacggccauguucucauuccugaaaugcagagcucccugcuucagcaacacauggagcugcucgaaucuagcgugaucccccugaugcauccucuugcggaucccuccacggucuuuaaggacgaugacgaggccgaagauuucguggagguccaucugccggacgugcacaaacagguuagcggcguggaucucgggcugccuucuuggggaaaguacguccugauguccgugggcgcuaugaucgcccucaugcugaugauuuuucuuacaaugugcuguagaaaggcuaacggggccgagagcacccagcaccggcugggagaaaccggcagaaaaguuucugugacaucccagagcgggcgcgucaucuccucuugggagagcuauaaguccggcggagaaaccaaacucuga

SEQ ID NO: 223996 - RNA, 1575 nt, Artificial Sequence
  derived and/or modified CDS sequence (opt5) from glycoprotein__RABV__LC071967.1
augaucccccaggcccuucucuucgugccucugcuugucuuuagccugugcuucggcaaguuuccgauuuacaccauccccgacaaacucgggccuuggucccccauugauauccaccaucugucuuguccuaacaaucuuguuguggaggacgaaggaugcacaaaccugagcggcuucuccuauauggagcucaaggugggguacauuucugcuaucaaagucaauggauuuacguguaccggcgugguuacagaagccgagaccuauacaaacuucgugggguacgucaccacaaccuuuaagagaaaacacuuccggcccacgccugaugcgugccgcgcugccuauaauuggaagauggccggagacccgagauacgaagagagccugcauaaccccuauccugauuaccacuggcugcggaccgugaagacaaccaaagagucccucguuaucauuucucccagcguguccgaccuggauccuuacgacaagagccuucauucucgcgucuuucccuccggcaaauguagcggcaucacagugucuuccaccuauugcccgacgaaucacgauuacacaauuuggaugccugaaaaccccagacuggggaccagcugugacaucuucacaaccucucggggaaagcgcgcuuccaaaggcgggaagaccugcggauuuguggaugagagaggccucuauaagagccugaaaggggccuguaagcugaaacugugcggaguccucggccugcggcugauggacggcacaugggcugccauucaaacguccgaugaagcgaagugguguccucccgaccagcucguuaauauccacgacuuccgcucugaugagauugagcaucuggugguggaggaacuugucaaaaagagagaagagugccuggacgcccucgaaagcaucaugaccacaaaauccgugagcuuucggcgcuucucucaccugagaaaacuuguucccggguucggaaaggcuuacaccaucuuuaacaagacacugauggaggccgaugcucauuauaaguccgugcggaccuggaaugagauuaucccuagcaaaggcugccuccgcgucgggggaagaugucacccgcacgugaacggcguuuucuuuaaugggauuauccugggacccgacggccaugugcugauuccugaaaugcagucuagccuccugcagcaacacauggagcuucuggaauccucugucaucccccucaugcauccucuggccgaucccagcacgguguucaaggacgaugacgaggcggaagauuuugucgaggugcaccuuccggacguucauaaacagguguccggcgucgaucuggggcucccuagcuggggaaaguacgugcugaugucuguuggcgccaugaucgcucugaugcucaugauuuuccugacaaugugcugucggaaggccaacggggcugaguccacccagcacagacuuggagaaaccggccgcaaagugagcgucacaucucaguccgggcgggugaucagcuccugggagucuuauaagagcggcggagaaaccaaacuguga

SEQ ID NO: 223997 - RNA, 1575 nt, Artificial Sequence; identical to SEQ ID NO: 223994
  derived and/or modified CDS sequence (opt5) from glycoprotein__RABV__LC071968.1

SEQ ID NO: 223998 - RNA, 1575 nt, Artificial Sequence
  derived and/or modified CDS sequence (opt5) from glycoprotein__RABV__LC071969.1
augaucccccaggcccuucucuucgugccucugcuugucuuuagcuccugcuucggcaaguuuccgauuuguaccauccccgacaaacuggggccuuggucucccauugauauccaccaucucagcugcccuaacaaucugguuguggaggacgaaggauguacaaaccuuuccggcuucucuuacauggagcugaaggugggguauauuagcgcuaucaaagucaauggauuuacgugcaccggcgugguuacagaagccgagaccuacacaaacuucgugggguaugucaccacaaccuuuaagagaaaacacuuccggcccacgccugaugcgugucgcgcugccuacaauuggaagauggccggagacccgagauaugaagagucccuccauaaccccuacccugauuaucacuggcugcggaccgugaagacaaccaaagagucucugguuaucauuagccccuccgugagcgaccucgauccuuacgacaagucucugcauucccgcgucuuucccagcggcaaaugcucuggcaucacaguguccagcaccuacuguccgacgaaucacgauuauacaguguggaugccugaaaaccccagacuugggaccucuugcgacauuuucacaaauucccggggaaagcgcgcuagcaaaggcgggaagaccuguggauuugucgaugagagaggccuguacaagucccucaaaggggccugcaagcugaaacuuuguggaguucugggccuccggcugauggacggcaccuggguggcuauccaaacaucugaugaagccaaguggugcccucccgaccagcuggugaacauucacgacuuccgcagcgaugagaucgagcaucucgucguggaggaacugguuaaaaagagagaagagugccuugacgcgcuggaauccauuaugacgaccaaaagcgugucuuuucggcgccucucccaccugagaaagcugguccccggguucggaaaggccuauacaaucuucaauaaaacccugauggaggcugaugcccauuacaagagcgugcggacauggaacgagaucauuccuucuaaaggcugucuccgcguugggggaagaugccacccgcacgugaauggcgucuuuuucaacgggaucauucugggacccgacggccaugugcugaucccugaaaugcagagcucccuccugcagcaacacauggagcuucuggaaucuagcgucauuccccucaugcauccucuggcugaucccuccaccguguuuaaggacggcgaugaggccgaagacuucguugaggugcaccuuccggauguccauaaacaggugagcgggguugaccugggacucccuucuuggggcaaguaugugcugauguccgucggggcgaugaucgcccugaugcucaugaucuuucugaugacguguugccggaaggcuaauggagccgagacaauucagcacagacuuggcgaaaccgggcgcaaagugagcgugaccucucaguccggccggguuaucagcuccugggagucuuacaagagcggaggcgaaacaaaacuguga

SEQ ID NO: 223999 - RNA, 1575 nt, Artificial Sequence
  derived and/or modified CDS sequence (opt5) from glycoprotein__RABV__LC071970.1
augaucccccaggcccugcuguucgugccucugcuugucuuuagcuccugcuucggcaaguuuccgauuuacaccauccccgacaaacuggggccuuggucucccauugauauccaccaucucagcuguccuaacaaucugguuguggaggacgaaggaugcacaaaccuuuccggcuucucuuauauggagcugaaggugggguacauuagcgcuaucaaagucaauggauuuacguguaccggcgugguuacagaagccgagaccuauacaaacuucgugggguacgucaccacaaccuuuaagagaaaacacuuccggcccacgccugaugcgugccgcgcugccuauaauuggaagauggccggagacccgagauacgaagagucccuccauaaccccuauccugauuaccacuggcugcggaccgugaagacaaccaaagagucucugguuaucauuagccccuccgugagcgaccucgauccuuacgacaagucuuuucauucccgcgucuuccccagcggcaaauguucuggcaucacaguguccagcaccuauugcccgacgaaucacgauuacacaauuuggaugccugaaaaccccagacuggggaccucuugugacaucuuuacaaauucccggggaaagcgcgcuagcaaaggcgggaagaccugcggauucguggaugagagaggccuuuauaagucccugaaaggggccuguaagcucaaacugugcggaguccuuggccugcggcucauggacggcaccuggguugcuauucaaacaucugaugaagccaagugguguccucccgaccagcuggugaacauccacgacuuucgcagcgaugagauugagcaucugguggucgaggaacucgugaaaaagagagaagagugccuggacgcgcuugaauccaucaugacgaccaaaagcguuucuuuccggcgccugucccaccucagaaagcuggugcccggguucggaaaggccuacacaaucuuuaauaaaacccuuauggaggcugaugcccauuauaagagcguccggacauggaacgagauuaucccuucuaaaggcugccugcgcguugggggaagaugucacccgcacgugaauggcguguucuuuaacgggauuauccucggacccgacggccauguccugauuccugaaaugcagagcucccugcuccagcaacacauggagcugcuugaaucuagcgugaucccccugaugcauccucucgcugaucccuccaccgucuucaaggacggcgaugaggccgaagacuuuguggagguucaccucccggaugugcauaaacaggucagcgggguggaccuuggacugccuucuuggggcaaguacguucucauguccgugggggcgaugaucgcccugaugcugaugauuuuccucaugacgugcugucggaaggcuaauggagccgagacaauccagcacagacugggcgaaaccgggcgcaaagucagcgugaccucucaguccggccgggugauuagcuccugggagucuuauaagagcggaggcgaaacaaaacuuuga

SEQ ID NO: 224000 - RNA, 1575 nt, Artificial Sequence
  derived and/or modified CDS sequence (opt5) from glycoprotein__RABV__LC071971.1
augaucccccaggcccuucucuucgugccucugcuugucuuuagcuccugcuucggcaaguuuccgauuuacaccauccccgacaaacuggggccuuggucucccauugauauccaccaucucagcuguccuaacaaucugguuguggaggacgaaggaugcacaaaccuuuccggcuucucuuauauggagcugaaggugggguacauuagcgcuaucaaagucaauggauuuacguguaccggcgugguuacagaagccgagaccuauacaaacuucgugggguacgucaccacaaccuuuaagagaaaacacuuccggcccacgccugaugcgugccgcgcugccuauaauuggaagauggccggagacccgagauacgaagagucccuccauaaccccuauccugauuaccacuggcugcggaccgugaagacaaccaaagagucucugguuaucauuagccccuccgugagcgaccucgauccuuacgacaagucucugcauucccgcgucuuucccagcggcaaauguucuggcaucacaguguccagcaccuauugcccgacgaauagagauuacacaauuuggaugccugaaaacccccggcuugggaccucuugugacaucuucacaaauucccgcggaaagagagcuagcaaaggcgggaagaccugcggauuuguggaugagcggggccuguauaagucccucaaaggggccuguaagcugaaacuuugcggaguccugggccuccgccugauggacggcaccuggguugcuauucaaacaucugaugaagccaagugguguccucccgaccagcuggugaacauccacgacuucagaagcgaugagauugagcaccucguggucgaggaacuggugaaaaagcgggaagagugccuugacgcgcuggaauccaucaugacgaccaaaagcguuucuuuucgcagacucucccaucugcggaagcuggugcccggguucggaaaggccuacacaaucuucaauaaaacccugauggaggcugaugcccacuauaagagcguccgcacauggaacgagauuaucccuucuaaaggcugccucagaguugggggacggugucauccgcacgugaauggcguguuuuucaacgggauuauccugggacccgacggccacguccugauuccugaaaugcagagcucccuccugcagcaacauauggagcuucuggaaucuagcgugaucccccucaugcacccucuggcugaucccuccaccgucuuuaaggacggcgaugaggccgaagacuucguggagguucaucuuccggaugugcacaaacaggucagcgggguggaccugggacucccuucuuggggcaaguacguucugauguccgugggggcgaugaucgcccugaugcucaugauuuuucugaugacgugcuguagaaaggcuaauggagccgagacaauccagcaucgccuuggcgaaaccgggcggaaagucagcgugaccucucaguccggcagagugauuagcuccugggagucuuauaagagcggaggcgaaacaaaacuguga

SEQ ID NO: 224001 - RNA, 1575 nt, Artificial Sequence; identical to SEQ ID NO: 223100
  derived and/or modified CDS sequence (opt5) from glycoprotein__RABV__LC071972.1

SEQ ID NO: 224002 - RNA, 1575 nt, Artificial Sequence
  derived and/or modified CDS sequence (opt5) from glycoprotein__RABV__LC071973.1
augaucccccaggcccuucucuucgugccucugcuugucuuuagcuccugcuucggcaaguuuccgauuuacaccauccccgacaaacuggggccuuggucucccauugauauccaccaucucagcuguccuaacaaucugguuguggaggacgaaggaugcacaaaccuuuccggcuucucuuauauggagcugaaggugggguacauuagcgcuaucaaagucaauggauuuacguguaccggcgugguuacagaagccgagaccuauacaaacuucgugggguacgucaccacaaccuuuaagagaaaacacuuccggcccacgccugaugcgugccgcgcugccuauaauuggaagauggccggagacccgagauacgaagagucccuccauaaccccuauccugauuaccacuggcugcggaccgugaagacaaccaaagagucucugguuaucauuagccccuccgugagcgaccucgauccuuacgacaagucucugcauucccgcgucuuucccagcggcaaauguucuggcaucacaguguccagcaccuauugcccgacgaaucacgauuacacaauuuggaugccugaaaaccccagacuugggaccucuugugacaucuucacaaauucccggggaaagcgcgcuagcaaaggcgggaagaccugcggauuuguggaugagagaggccuguauaagucccucaaaggggccuguaagcugaaacuuugcggaguccugggccuccggcugauggacggcaccuggguugcuauucaaacaucugaugaagccaagugguguccucccgaccagcuggugaacauccacgacuuccgcagcgaugagauugagcaucucguggucgaggaacuggugaaaaagagagaagagugccuugacgcgcuggaauccaucaugacgaccaaaagcguuucuuuucggcgccucucccaccugagaaagcuggugcccggguucggaaaggccuacacaaucuucaauaaaacccugauggaggcugaugcccauuauaagagcguccggacauggaacgagauuaucccuucuaaaggcugccuccgcguugggggaagaugucacccgcacgugaauggcguguuuuucaacgggauuauccugggacccgacggccauguccugauuccugaaaugcagagcucccuccugcagcaacacaugggccuucuggagucuagcgugaucccccucaugcauccucuggcugaucccuccaccgucuuuaaggacggggaugaagccgaggacuucguggaaguucaccuuccggaugugcauaaacaggucagcggaguggaccugggccucccuucuugggggaaguacguucugauguccgugggagcgaugaucgcccugaugcucaugauuuuucugaugacgugcugucggaaggcuaauggcgccgagacaauccagcacagacuuggggagaccggccgcaaagucagcgugaccucucaguccggacgggugauuagcuccugggaaucuuauaagagcggcggggagacaaaacuguga

SEQ ID NO: 224003 - RNA, 1575 nt, Artificial Sequence
  derived and/or modified CDS sequence (opt5) from glycoprotein__RABV__LC071974.1
augaucccccaggcccuucucuucgugccucugcuugucuuuagcuccugcuucggcaaguuuccgauuuacaccauccccgacaaacuggggccuuggucucccauugauauccaccaucucagcuguccuaacaaucugguuguggaggacgaaggaugcacaaaccuuuccggcuucucuuauauggagcugaaggugggguacauuagcgcuaucaaagucaauggauuuacguguaccggcgugguuacagaagccgagaccuauacaaacuucgugggguacgucaccacaaccuuuaagagaaaacacuuccggcccacgccugaugcgugccgcgcugccuauaauuggaagauggccggagacccgagauacgaagagucccuccauaaccccuauccugauuaccacuggcugcggaccgugaagacaaccaaagagucucugguuaucauuagccccuccgugagcgaccucgauccuuacgacaagucucugcauucccgcgucuuucccagcggcaaauguucuggcaucacaguguccagcaccuauugcccgacgaaucacgauuacacaauuuggaugccugaaaaccccagacuugggaccucuugugacaucuucacaaauucccggggaaagcgcgcuagcaaaggcgggaagaccugcggauuuguggaugagagaggccuguauaagucccucaaaggggccuguaagcugaaacuuugcggaguccugggccuccggcugauggacggcaccuggguugcuauucaaacaucugaugaagccaagugguguccucccgaccagcuggugaacauccacgacuuccgcagcgaugagauugagcaucucguggucgaggaacuggugaaaaagagagaagagugccuugacgcgcuggaauccaucaugacgaccaaaagcguuucuuuugggcggcucucccaucugcgcaagcuggugcccggauucggcaaggccuacacaaucuucaauaaaacccugauggaggcugaugcccacuauaagagcgucagaacauggaacgagauuaucccuucuaaagggugccuccgggugggaggccgcugucacccgcacguuaaugggguguuuuucaacggaauuauccugggccccgacggccauguccugauuccugaagugcagagcucccuccugcagcaacacauggagcuucuggaaucuagcgucaucccccucaugcauccucuggcugaucccuccaccguguuuaaggacggggaugaggccgaagacuucguugaggugcaccuuccggauguccauaaacaggugagcggaguugaccugggccucccuucuugggggaaguacgugcugauguccgucggagcgaugaucgcccugaugcucaugauuuuucugaugacgugcuguagaaaggcuaauggcgccgagacaauccagcaccggcuuggggaaaccggcagaaaagugagcgugaccucucaguccggacgcguuauuagcuccugggagucuuauaagagcggcggggaaacaaaacuguga

SEQ ID NO: 224004 - RNA, 1575 nt, Artificial Sequence
  derived and/or modified CDS sequence (opt5) from glycoprotein__RABV__LC071975.1
augaucccccaggcccuucucuucgugccucugcuugucuuuagcuccugcuucggcaaguuuccgauuuacaccauccccgacaaacuggggccuuggucucccauugauauccaccaucucagcuguccuaacaaucugguuguggaggacgaaggaugcacaaaccuuuccggcuucucuuauauggagcugaaggugggguacauuagcgcuaucaaagucaauggauuuacguguaccggcgugguuacagaagccgagaccuauacaaacuucgugggguacgucaccacaaccuuuaagagaaaacacuuccggcccacgccugaugcgugccgcgcugccuauaauuggaagauggccggagacccgagauacgaagagucccuccauaaccccuauccugauuaccacuggcugcggaccgugaagacaaccaaagagucucugguuaucauuagccccuccgugagcgaccucgauccuuacgacaagucucugcauucccgcgucuuucccagcggcaaauguucuggcaucacaguguccagcaccuauugcccgacgaaucacgauuacacaauuuggaugccugaaaaccccagacuugggaccucuugugacaucuucacaaauucccggggaaagcgcgcuagcaaaggcgggaagaccugcggauuuguggaugagagaggccuguauaagucccucaaaggggccuguaagcugaaacuuugcggaguccugggccuccggcugauggacggcaccuggguugcuauucaaacaucugaugaagccaagugguguccucccgaccagcuggugaacauccacgacuuccgcagcgaugagauugagcaucucguggucgaggaacuggugaaaaagagagaagagugccuugacgcgcuggaauccguuaugacgaccaaaagcgugucuuuucggcgccucucccaccugagaaagcugguccccggguucggaaaggccuacacaaucuucaauaaaacccugauggaggcugaugcccauuauaagagcgugcggacauggaacgagaucauuccuucuaaaggcugccuccgcguugggggaagaugucacccgcacgugaauggcgucuuuuucaacgggaucauucugggacccgacggccaugugcugaucccugaaaugcagagcucccuccugcagcaacacauggagcuucuggaaucuagcgucauuccccucaugcauccucuggcugaucccuccaccguguuuaaggacggcgaugaggccgaagacuucguugaggugcaccuuccggauguccauaaacaggugagcgggguugaccugggacucccuucuuggggcaaguacgugcugauguccgucggggcgaugaucgcccugaugcucaugaucuuucugaugacgugcugucggaaggcuaauggagccgagacaauucagcacagacuuggcgaaaccgggcgcaaagugagcgugaccucucaguccggccggguuaucagcuccugggagucuuauaagagcggaggcgaaacaaaacuguga

SEQ ID NO: 224005 - RNA, 1575 nt, Artificial Sequence; identical to SEQ ID NO: 223100
  derived and/or modified CDS sequence (opt5) from glycoprotein__RABV__LC071976.1

SEQ ID NO: 224006 - RNA, 1575 nt, Artificial Sequence
  derived and/or modified CDS sequence (opt5) from glycoprotein__RABV__LC071977.1
augaucccccaggcccuucucuucgugccucugcuugucuuuagcuccugcuucggcaaguuuccgauuuacaccauccccgacaaacuggggccuuggucucccauugauauccaccaucucagcuguccuaacaaucugguuguggaggacgaaggaugcacaaaccuuuccggcuucucuuauauggagcugaaggugggguacauuagcgcuaucaaagucaauggauuuacguguaccggcgugguuacagaagccgagaccuauacaaacuucgugggguacgucaccacaaccuuuaagagaaaacacuuccggcccacgccugaugcgugccgcgcugccuauaauuggaagauggccggagacccgagauacgaagagucccuccauaaccccuauccugauuaccacuggcugcgggcugugaagaccacaaaagagucucugguuaucauuagccccuccgugagcgaccucgauccuuacgacaagucucugcauucccgcgucuuucccagcggcaaauguucuggcaucaccguguccagcacauauugcccgaccaaucacgauuacacgauuuggaugccugaaaaccccagacuugggacaucuugugacaucuucaccaauucccggggaaagcgcgccagcaaaggcgggaagacaugcggauuuguggaugagagaggccuguauaagucccucaaaggggcuuguaagcugaaacuuugcggaguccugggccuccggcugauggacggcaccuggguugccauucaaaccucugaugaagcgaagugguguccucccgaccagcuggugaacauccacgacuuccgcagcgaugagauugagcaucucguggucgaggaacuggugaaaaagagagaagagugccuugacgcccuggaauccaucaugacaacgaaaagcguuucuuuucggcgccucucccaccugagaaagcuggugcccggguucggaaaggcuuacaccaucuucaauaaaacacugauggaggccgaugcucauuauaagagcguccggaccuggaacgagauuaucccuucuaaaggcugccuccgcguugggggaagaugucacccgcacgugaauggcguguuuuucaacgggauuauccugggacccgacggccauguccugauuccugaaaugcagagcucccuccugcagcaacacauggagcuucuggaaucuagcgugaucccccucaugcauccucuggccgaucccuccacagucuuuaaggacggcgaugaggcggaagacuucguggagguucaccuuccggaugugcauaaacaggucagcgggguggaccugggacucccuucuuggggcaaguacguucugauguccgugggggccaugaucgcucugaugcucaugauuuuucugaugaccugcugucggaaggccaauggagcugagacgauccagcacagacuuggcgaaacagggcgcaaagucagcgugaccucucaguccggccgggugauuagcuccugggagucuuauaagagcggaggcgaaaccaaacuguga

SEQ ID NO: 224007 - RNA, 1575 nt, Artificial Sequence; identical to SEQ ID NO: 223100
  derived and/or modified CDS sequence (opt5) from glycoprotein__RABV__LC071978.1

SEQ ID NO: 224008 - RNA, 1575 nt, Artificial Sequence
  derived and/or modified CDS sequence (opt5) from glycoprotein__RABV__LC071979.1
augaucccccaggcccuucucuucgugccucugcuugucuuuagcuccugcuucggcaaguuuccgauuuacaccauccccgacaaacuggggccuuggucucccauugauauccaccaucucagcuguccuaacaaucugguuguggaggacgaaggaugcacaaaccuuuccggcuucucuuauauggagcugaaggugggguacauuagcgcuaucaaagucaauggauuuacguguaccggcgugguuacagaagccgagaccuauacaaacuucgugggguacgucaccacaaccuuuaagagaaaacacuuccggcccacgccugaugcgugccgcgcugccuauaauuggaagauggccggagacccgagauacgaagagucccuccauaaccccuauccugauuaccacuggcugcggaccgugaagacaaccaaagagucucugguuaucauuagccccuccgugagcgaccucgauccuuacgacaagucucugcauucccgcgucuuucccagcggcaaauguucuggcaucacaguguccagcaccuauugcccgacgaaucacgauuacacaauuuggaugccugaaaaccccagacuugggaccucuugugacaucuucacaaauucccggggaaagcgcgcuagcaaaggcgggaagaccugcggauuuguggaugagagaggccuguauaagucccucaaaggggccuguaagcugaaacuuugcggaguccugggccuccggcugauggacggcaccuggguugcuauucaaacaucugaugaagccaagugguguccucccgaccagcuggugaacauccacgacuuccgcagcgaugagauugagcaucucguggucgaggaacuggugaaaaagagagaagagugccuugacgcgcuggaauccaucaugacgaccaaaagcguuucuuuucggcgccucucccaccugagaaagcuggugcccggguucggagaggccuacacaaucuucaauaagacccugauggaggcugaugcccauuauaaaagcguccggacauggaacgaaauuaucccuucuaagggcugccuccgcguugggggaagaugucacccgcacgugaauggcguguuuuucaacgggauuauccugggacccgacggccauguccugauuccugagaugcagagcucccuccugcagcaacacauggaacuucuggagucuagcgugaucccccucaugcauccucuggcugaucccuccaccgucuuuaaagacggcgaugaagccgaggacuucguggagguucaccuuccggaugugcauaagcaggucagcgggguggaccugggacucccuucuuggggcaaauacguucugauguccgugggggcgaugaucgcccugaugcucaugauuuuucugaugacgugcugucggaaggcuaauggagccgaaacaauccagcacagacuuggcgagaccgggcgcaaggucagcgugaccucucaguccggccgggugauuagcuccugggaaucuuauaaaagcggaggcgagacaaagcuguga

SEQ ID NO: 224009 - RNA, 1575 nt, Artificial Sequence; identical to SEQ ID NO: 223100
  derived and/or modified CDS sequence (opt5) from glycoprotein__RABV__LC071980.1

SEQ ID NO: 224010 - RNA, 1575 nt, Artificial Sequence
  derived and/or modified CDS sequence (opt5) from glycoprotein__RABV__LC071981.1
augaucccccaggcccuucucuucgugccucugcuugucuuuagcuccugcuucggcaaguuuccgauuuacaccauccccgacaaacuggggccuuggucucccauugauauccaccaucucagcuguccuaacaaucugguuguggaggacgaaggaugcacaaaccuuuccggcuucucuuauauggagcugaaggugggguacauuagcgcuaucaaagucaauggauuuacguguaccggcgugguuacagaagccgagaccuauacaaacuucgugggguacgucaccacaaccuuuaagagaaaacacuuccggcccacgccugaugcgugccgcgcugccuauaauuggaagauggccggagacccgagauacgaagagucccuccauaaccccuauccugauuaccacuggcugcggaccgugaagacaaccaaagagucucugguuaucauuagccccuccgugagcgaccucgauccuuacgacaagucucugcauucccgcgucuuucccagcggcaaaagaucuggcaucacaguguccagcaccuauuguccgacgaaucacgauuacacaauuuggaugccugaaaacccccggcuugggaccucuugcgacaucuucacaaauucccgcggaaagagagcuagcaaaggcgggaagaccuguggauuuguggaugagcggggccuguauaagucccucaaaggggccugcaagcugaaacuuuguggaguccugggccuccgccugauggacggcaccuggguugcuauucaaacaucugaugaagccaaguggugcccucccgaccagcuggugaacauccacgacuucagaagcgaugagauugagcaucucguggucgaggaacuggugaaaaagcgggaagagugucuugacgcgcuggaauccaucaugacgaccaaaagcguuucuuuucgcagacucucccaucugcggaagcuggugcccggguucggaaaggccuacacaaucuucaauaaaacccugauggaggcugaugcccacuauaagagcguccgcacauggaacgagauuaucccuucuaaaggcugccucagaguugggggacggugccacccgcacgugaauggcguguuuuucaacgggauuguccugggacccgacggccaugugcugaucccugaaaugcagagcucccuccugcagcaacacauggagcuucuggaaucuagcgucauuccccucaugcauccucuggcugaucccuccaccguguuuaaggacggcgaugaggccgaagacuucguugaggugcaccuuccggauguccauaaacaggugagcgggguugaccugggacucccuucuuggggcaaguacgcgcugauguccgugggggccaugaucgcucugaugcucaugaucuuucugaugacguguugcagaaaggccaauggagcugagacaaaacagcaccgccuuggcgaaaccgggcggaaggucagcgugaccucucaguccggcagagugauuagcuccugggagucuuauaaaagcggaggcgaaacaaagcuguga

SEQ ID NO: 224011 - RNA, 1575 nt, Artificial Sequence
  derived and/or modified CDS sequence (opt5) from glycoprotein__RABV__LC071983.1
augaucccccaggcccuucucuucauuccucugagcguguuuucccuuugcuucggcaaguuuccgaucuacaccauucccgacaaacuggggccuuggucucccaucgauauucaccaucucagcuguccuaacaaucuggucguugaggacgaaggaugcacaaaccuuuccggcuucucuuauauggagcugaaggugggguacaucagcgcuaucaaagugaauggauuuacguguaccggcgucgugacagaagccgagaccuauacaaacuucguuggguacgugaccacaaccuuuaagagaaaacacuuccggcccacgccugaugcgugccgcgcugccuauaauuggaagauggccggagacccgagauacgaagagucccuccauaaccccuauccugauuaccacuggcugcggaccgucaagacaaccaaagagucucuggugauuaucagccccuccguuagcgaccucgauccuuacgacaagucucugcauucccgcguguuucccagcggcaaauguucuggcauuacagucuccagcaccuauugcccgacgaaucacgauuacacaaucuggaugccugaaucucccagacuugggaccuccugugacauuuucacaaacagccggggaaagcgcgcuuccaaaggcucuaagaccugcggguuuguggaugagagaggacuguauaagagccucaaaggcgccuguaagcugaaacuuugcggggugcugggacuccggcugauggacggcaccugggcugccauccaaacaccugaugaagucaagugguguccucccgaccagcugguuaauauucacgacuuccgcuccgaugagaucgagcaucucgugguggaggaacuggucaaaaagagagaagagugccuugacgcgcuggaaagcaucaugacgaccaaaucuguguccuuucggcgccucagccaccugagaaagcugguucccggcuucgggaaggccuacacaauuuucaacaaaacccugauggaggcugaugcccauuauaagucugugcggacauggaaugagaucauuccgagcaaaggaugccuccgcgucggcgggagaugucacccccacgugaacggaguguuuuucaauggcaucauucuggggccugacggacauguucugauccccgaaaugcaguccucucuccugcagcaacacauggagcuucuggaaagcuccgucaucccucucaugcauccccuggcugauccgagcaccguguuuaaggacggcgaugaggccgaagacuucgucgaggugcaccuuccugauguucauaaacaggugucuggcgucgaccuggggcuccccuccuggggaaaguacgugcugaugagcguuggcgcgaugauugcccugaugcucaugaucuuucugacgacaugcugucggaaggcuaacggggccgagucuauucagcacagacgcggagaaaccggccggaaaguguccgucaccagccaguccgggagagugaucucuagcugggaguccuauaagucuggcggagaaacaaaacuuuga

SEQ ID NO: 224012 - RNA, 1575 nt, Artificial Sequence
  derived and/or modified CDS sequence (opt5) from glycoprotein__RABV__LM645015.1
auggugccccaggcccugcucuuugucccucugcuugcuuuuccgaugugcuucggcaaguuucccaucuacaccauuccugacaaacuggggcccuggagcccuaucgauauucaccaucucuccugucccaacaaucugguuguggaggacgaaggaugcacaaaccuuucuggcuucagcuauauggagcugaaggugggguacaucuccgccauuaaagucaauggauuuacguguaccggcgugguuacagaagcggagaccuauacaaacuucgugggguacgucaccacaaccuuuaagagaaaacacuuccggccuacgccggaugcuugccgcgccgccuauaauuggaagauggcuggagaccccagauacgaagagucucuccauaacccuuaucccgauuaccacuggcugcggaccgugaagacaaccaaagagagccugaucaucauuuccccuucuguugccgaccucgaucccuacgacaagagccugcauucccgcguguuuccgagcggcaaaugucuuggcaucacaauuucuuccaccuauugcagcacgaaucacgauuacacaaucuggaugccugaaaacgucagacuggggaccucuugugacauuuucacaaauucccggggaaagcgcgcuagcaaaggcucuaagaccugcggguuuguggaugagagaggacucuauaagucccugaaaggcgccuguaagcugaaacugugcggggugcucggacugcggcugauggacggcaccugggucgcgaugcccacaagcgaugaaacgaagugguguccucccgaccaacucguuaaccugcacgacuuccgcuccgaugagaucgagcaucuugugguggaggaacuggucagaaaacgggaagagugccucgacgcccuggaaucuauuaugaccacaaagagcguguccuuucgcagacuuagccaccuucggaaacucguucccggcuucgggaaggcuuacaccaucuucaauaagacacugauggaggccgaugcucauuauaaaucugugcgcaccuggaacgagaucauuccuuccaagggaugccugagagucggcgggcggugucacccgcacgugaauggaguuuucuucaacggcaucauucucgggcccgacggacaugugcugaucccugaaaugcagagcucucuucugcagcagcacauggagcuccuggaaagcuccgucauuccccuuaugcauccucuggccgaucccucuacgguguuuaaagacggcgaugaggcggaagacuucgucgaggugcaccucccggauguucauaagcaagugagcggcgucgaccuggggcugccuaauuggggaaaauacgugcucaucaucgccggcguucugauugcuaugauccuuacaauuuuucugaugaccugcugugggagaggaaaccgccccaaguccacccagcacagccucggcgggaucggccggaaggugucuuccacaagccagucuggaaaagucauuuccagcugggaguccuauaagucuggcggggaaaccagacuguga

SEQ ID NO: 224013 - RNA, 1575 nt, Artificial Sequence
  derived and/or modified CDS sequence (opt5) from glycoprotein__RABV__LM645016.1
auggugccccaggcccugcucuuugucccucugcuugcuuuuccgaugugcuucggcaaguuucccaucuacaccauuccugacaaacuggggcccuggagcccuaucgauauucaccaucucuccugucccaacaaucugguuguggaggacgaaggaugcacaaaccuuucuggcuucagcuauauggagcugaaggugggguacaucuccgccauuaaagucaauggauuuacguguaccggcgugguuacagaagcggagaccuauacaaacuucgugggguacgucaccacaaccuuuaagagaaaacacuuccggccuacgccggaugcuugccgcgccgccuauaauuggaagauggcuggagaccccagauacgaagagucucuccauaacccuuaucccgauuaccacuggcugcggaccgugaagacaaccaaagagagccugaucaucauuuccccuucuguugccgaccucgaucccuacgacaagagccugcauucccgcguguuuccgagcggcaaaugucuuggcaucacaauuucuuccaccuauugcagcacgaaucacgauuacacaaucuggaugccugaaaacgucagacuggggaccucuugugacauuuucacaaauucccggggaaagcgcgcuagcaaaggcucuaagaccugcggguuuguggaugagagaggacucuauaagucccugcggggcgccuguaaacuuaagcugugcggggugcucggacugcgccugauggacggcaccugggucgcgaugcccacaagcgaugaaacgaaaugguguccucccgaccaacucguuaaccugcacgacuucagauccgaugagaucgagcaucuugugguggaggaacugguccggaagcgcgaagagugccucgacgcccuggaaucuauuaugaccacaaaaagcguguccuuuagacggcuuagccaucugcgcaagcucguucccggcuucgggaaggcuuacaccaucuucaauaaaacacugauggaggccgaugcucacuauaagucugugagaaccuggaacgagaucauuccuuccaaaggaugccugcgggucggcgggagaugucacccgcacgugaauggaguuuucuucaacggcaucauucucgggcccgacggacaugugcugaucccugaaaugcagagcucucuucugcagcagcacauggagcuccuggaaagcuccgucauuccccuuaugcauccucuggccgaucccucuacgguguuuaaggacggcgaugaggcggaagacuucgucgaggugcaccucccggauguucauaaacaaaucagcggcguggaccuggggcugccuaauuggggaaaguacguccucaucauugccggcgugcugaucgcuaugauucuuacaaucuuucugaugaccugcugugggcgcggaaaccggcccaaauccacccagcacagccucggcgggauuggcagaaagguuucuuccacaagccagucuggaaaggugaucuccagcugggaguccuauaaaucuggcggggaaacccgccuguga

SEQ ID NO: 224014 - RNA, 1575 nt, Artificial Sequence
  derived and/or modified CDS sequence (opt5) from glycoprotein__RABV__LM645018.1
auggugccccaggcccugcucuuugucccucugcuugcuuuuccgaugugcuucggcaaguuucccaucuacaccauuccugacaaacuggggcccuggagcccuaucgauauucaccaucucuccugucccaacaaucugguuguggaggacgaaggaugcacaaaccuuucuggcuucagcuauauggagcugaaggugggguacaucuccgccauuaaagucaauggauuuacguguaccggcgugguuacagaagcggagaccuauacaaacuucgugggguacgucaccacaaccuuuaagagaaaacacuuccggccuacgccggaugcuugccgcgccgccuauaauuggaagauggcuggagaccccagauacgaagagucucuccauaacccuuaucccgauuaccacuggcugcggaccgugaagacaaccaaagagagccugaucaucauuuccccuucuguugccgaccucgaucccuacgacaagagccugcauucccgcguguuuccgagcggcaaaugucuuggcaucacaauuucuuccaccuauugcagcacgaaucacgauuacacaaucuggaugccugaaaacgucagacuggggaccucuugugacauuuucacaaauucccggggaaagcgcgcuagcaaaggcucuaagaccugcggguuuguggaugagagaggacucuauaagucccugaaaggcgccuguaagcugaaacugugcggggugcucggacugcggcugauggacggcaccugggucgcgaugcccacaagcgaugaaacgaagugguguccucccgaccaacucguuaaccugcacgacuuccgcuccgaugagaucgagcaucuugugguggaggaacuggucagaaaacgggaagagugccucgacgcccuggaaucuauuaugaccacaaagagcguguccuuucgcagacuuagccaccuucggaaacucguucccggcuucgggaaggcuuacaccaucuucaauaagacacugauggaggccgaugcucauuauaaaucugugcgcaccuggaacgagaucauuccuuccaagggaugccugagagucggcgggcggugucacccgcacgugaauggaguuuucuucaacggcaucauucucgggcccgacggacaugugcugaucccugaaaugcagagcucucuucugcagcagcacauggagcuccuggaaagcuccgucauuccccuuaugcauccucuggccgaucccucuacgguguuuaaagacggcgaugaggcggaagacuucgucgaggugcaccucccggauguucauaagcaaaucagcggcguggaccuggggcugccuaauuggggaaaauacguccucaucauuacaggcgugcugaucgccaugauucuuaccaucuuucugaugaccugcugugggagaggaaaccgccccaaguccaagcagcacagccucggcgggauuggccggaaaguuucuuccacaagccagucuggaaaggugaucuccagcugggaguccuauaaaucuggcggggaaaccagacuguga

SEQ ID NO: 224015 - RNA, 1575 nt, Artificial Sequence; identical to SEQ ID NO: 223881
  derived and/or modified CDS sequence (opt5) from glycoprotein__RABV__LM645019.1

SEQ ID NO: 224016 - RNA, 1575 nt, Artificial Sequence
  derived and/or modified CDS sequence (opt5) from glycoprotein__RABV__LM645021.1
auggugccccaggcccugcucuuugucccucugcuugcuuuuccgaugugcuucggcaaguuucccaucuacaccauuccugacaaacuggggcccuggagcccuaucgauauucaccaucucuccugucccaacaaucugguuguggaggacgaaggaugcacaaaccuuucuggcuucagcuauauggagcugaaggugggguacaucuccgccauuaaagucaauggauuuacguguaccggcgugguuacagaagcggagaccuauacaaacuucgugggguacgucaccacaaccuuuaagagaaaacacuuccggccuacgccggaugcuugccgcgccgccuauaauuggaagauggcuggagaccccagauacgaagagucucuccauaacccuuaucccgauuaccacuggcugcggaccgugaagacaaccaaagagagccugaucaucauuuccccuucuguugccgaccucgaucccuacgacaagagccugcauucccgcguguuuccgagcggcaaaugucuuggcaucacaauuucuuccaccuauugcagcacgaaucacgauuacacaaucuggaugccugaaaacgucagacuggggaccucuugugacauuuucacaaauucccggggaaagcgcgcuagcaaaggcucuaagaccugcggguuuguggaugagagaggacucuauaagucccugaaaggcgccuguaagcugaaacugugcggggugcucggacugcggcugauggacggcaccugggucgcgaugcccacaagcgaugaaacgaagugguguuccccugaccaacucguuaaccugcacgacuuccgcucugaugagaucgagcaucuugugguggaggaacuggucagaaaacgggaagagugccucgacgcccuggaaagcauuaugaccacaaaguccgugagcuuucgcagacuuucucaccuucggaaacucguucccggcuucgggaaggcuuacaccaucuucaauaagacacugauggaggccgaugcucauuauaaauccgugcgcaccuggaacgagaucauucccagcaagggaugccugagagucggcgggcggugucacccucacgugaauggaguuuucuucaacggcaucauucucgggccggacggacaugugcugauccccgaaaugcagucuagccuucugcagcagcacauggagcuccuggaauccucugucauuccucuuaugcauccccuggccgauccuagcacgguguuuaaagacggcgaugaggcggaagacuucgucgaggugcaccuccccgauguucauaagcaaaucuccggcguggaccuggggcugccgaauuggggaaaauacguccucaucauugccggcgugcugaucgcuaugauucuuacaaucuuucugaugaccugcugugggagaggaaaccgcccuaagagcaagcagcacucucucggcgggauuggccggaaaguuuccagcaccucucaguccggaaaggugaucagcuccugggagucuuauaaaagcggcggggaaacaagacuguga

SEQ ID NO: 224017 - RNA, 1575 nt, Artificial Sequence
  derived and/or modified CDS sequence (opt5) from glycoprotein__RABV__LM645022.1
auggugccccaggcccugcucuuugucccucugcuugcuuuuccgaugugcuucggcaaguuucccaucuacaccauuccugacaaacuggggcccuggagcccuaucgauauucaccaucucuccugucccaacaaucugguuguggaggacgaaggaugcacaaaccuuucuggcuucagcuauauggagcugaaggugggguacaucuccgccauuaaagucaauggauuuacguguaccggcgugguuacagaagcggagaccuauacaaacuucgugggguacgucaccacaaccuuuaagagaaaacacuuccggccuacgccggaugcuugccgcgccgccuauaauuggaagauggcuggagaccccagauacgaagagucucuccauaacccuuaucccgauuaccacuggcugcggaccgugaagacaaccaaagagagccugaucaucauuuccccuucuguugccgaccucgaucccuacgacaagagccugcauucccgcguguuuccgagcggcaaaugucuuggcaucacaauuucuuccaccuauugcagcacgaaucacgauuacacaaucuggaugccugaaaacgucagacugcggaccucuugugacauuuucacaaauucccgcgggaagagagcuagcaaaggaucuaagaccugcggcuuuguggaugagcgggggcucuauaagucccugaaaggagccuguaagcugaaacugugcggcgugcucgggcugcgccugauggacggaaccugggucgcgaugcccacaagcgaugaaacgaagugguguccucccgaccaacucguuaaccugcacgacuucagauccgaugagaucgagcaucuugugguggaggaacugguccggaaacgcgaagagugccucgacgcccuggaaucuauuaugaccacaaagagcguguccuuuagacggcuuagccaccuucgcaaacucguucccggcuucggcaaggcuuacaccaucuucaauaagacacugauggaggccgaugcucauuauaaaucugugagaaccuggaacgagaucauuccuuccaaggggugccugcgggucggaggcagaugucacccgcacgugaaugggguuuucuucaacggaaucauucucggccccgacgggcaugugcugaucccugaaaugcagagcucucuucugcagcagcacauggagcuccuggaaagcuccgucauuccccuuaugcauccucuggccgaucccucuacgguguuuaaagacggagaugaggcggaagacuucgucgaggugcaccucccggauguucauaagcaaaucagcggcguggaccugggccugccuaauugggggaaauacguccucaucauugccggagugcugaucgcuaugauucuuacaaucuuucugaugaccugcuguggccgcgggaaccggcccaaguccaagcagcacagccucggaggcauugggagaaaaguuucuuccaccagccagucuggcaaggugaucuccagcugggaguccuauaaaucuggaggcgaaacacgccuguga

SEQ ID NO: 224018 - RNA, 1575 nt, Artificial Sequence; identical to SEQ ID NO: 223881
  derived and/or modified CDS sequence (opt5) from glycoprotein__RABV__LM645024.1

SEQ ID NO: 224019 - RNA, 1575 nt, Artificial Sequence; identical to SEQ ID NO: 223881
  derived and/or modified CDS sequence (opt5) from glycoprotein__RABV__LM645026.1

SEQ ID NO: 224020 - RNA, 1575 nt, Artificial Sequence
  derived and/or modified CDS sequence (opt5) from glycoprotein__RABV__LM645027.1
auggugccccaggcccugcucuuugucccucugcuugcuuuuccgaugugcuucggcaaguuucccaucuacaccauuccugacaaacuggggcccuggagcccuaucgauauucaccaucucuccugucccaacaaucugguuguggaggacgaaggaugcacaaaccuuucuggcuucagcuauauggagcugaaggugggguacaucuccgccauuaaagucaauggauuuacguguaccggcgugguuacagaagcggagaccuauacaaacuucgugggguacgucaccacaaccuuuaagagaaaacacuuccggccuacgccggaugcuugccgcgccgccuauaauuggaagauggcuggagaccccagauacgaagagucucuccauaacccuuaucccgauuaccacuggcugcggaccgugaagacaaccaaagagagccugaucaucauuuccccuucuguugccgaccucgaucccuacgacaagagccugcauucccgcguguuuccgagcggcaaaugucuuggcaucacaauuucuuccaccuauugcagcacgaaucacgauuacacaaucuggaugccugaaaacgucagacuggggaccucuugugacauuuucacaaauucccggggaaagcgcgcuagcaaaggcucuaagaccugcggguuuguggaugagagaggacucuauaagucccugaaaggcgccuguaagcugaaacugugcggggugcucggacugcggcugauggacggcaccugggucgcgaugcccacaagcgaugaaacgaagugguguccucccgaccaacucguuaaccugcacgacuuccgcuccgaugagaucgagcaucuugugguggaggaacuggucagaaaacgggaagagugccucgacgcccuggaaucuauuaugaccacaaagagcguguccuuucgcagacuuagccaccuucggaaacucguucccggcuucgggaaggcuuacaccaucuucaauaagacacugauggaggccgaugcucauuauaaaucugugcgcaccuggaacgagaucauuccuuccaagggaugccugagagucggcgggcggugucacccgcacgugaauggaguuuucuucaacggcaucauucucgggcccgacggacaugugcugaucccugaaaugcagagcucucuucugcagcagcacauggagcuccuggaaagcuccgucauuccccuuaugcauccucuggccgaucccucuacgguguuuaaagacggcgaugaggcggaagacuucgucgaggugcaccucccggauguucauaagcaaaucagcggcguggaccuggggcugccuaauuggggaaaauacguccucaucauugccggccugcuuaucgcuaugauucugacaaucuuucucaugaccugcugugggagaggaaaccgccccaaguccacccagcacagccugggcgggauuggccggaaggugucuuccacaagccagucuggaaaaguuaucuccagcugggaguccuauaagucuggcggggaaaccagacuguga

SEQ ID NO: 224021 - RNA, 1575 nt, Artificial Sequence
  derived and/or modified CDS sequence (opt5) from glycoprotein__RABV__LM645029.1
auggugccccaggcccugcucuuugucccucugcuugcuuuuccgaugugcuucggcaaguuucccaucuacaccauuccugacaaacuggggcccuggagcccuaucgauauucaccaucucuccugucccaacaaucugguuguggaggacgaaggaugcacaaaccuuucuggcuucagcuauauggagcugaaggugggguacaucuccgccauuaaagucaauggauuuacguguaccggcgugguuacagaagcggagaccuauacaaacuucgugggguacgucaccacaaccuuuaagagaaaacacuuccggccuacgccggaugcuugccgcgccgccuauaauuggaagauggcuggagaccccagauacgaagagucucuccauaacccuuaucccgauuaccacuggcugcggaccgugaagacaaccaaagagagccugaucaucauuuccccuucuguugccgaccucgaucccuacgacaagagccugcauucccgcguguuuccgagcggcaaaugucuuggcaucacaauuucuuccaccuauugcagcacgaaucacgauuacacaaucuggaugccugaaaacgucagacuggggaccucuugugacauuuucacaaauucccggggaaagcgcgcuagcaaaggcucuaagaccugcggguuuguggaugagagaggacucuauaagucccugaaaggcgccuguaagcugaaacugugcggggugcucggacugcggcugauggacggcaccugggucgcgaugcccacaagcgaugaaacgaagugguguccucccgaccaacucguuaaccugcacgacuuccgcuccgaugagaucgagcaucuugugguggaggaacuggucagaaaacgggaagagugccucgacgcccuggaaucuauuaucaccacaaagagcguguccuuucgcagacuuagccaccuucggaaacucguucccggcuucgggaaggcuuacaccaucuucaauaagacacugauggaggccgaugcucauuauaaaucugugcgcaccuggaacgagauuaucccuuccaagggaugccugagagucggcgggcggugucacccgcacgugaauggaguuuucuucaacggcauuauccucgggcccgacggacaugugcugauuccugaaaugcagagcucucuucugcagcagcacauggagcuccuggaaagcuccgucaucccccuuaugcauccucuggccgaucccucuacgguguuuaaagacggcgaugaggcggaagacuucgucgaggugcaccucccggauguucauaagcaaaucagcggcguggaccuggggcugccuaauuggggaaaauacguccucauuaucgccggcgugcugauugcuaugauccuuacaauuuuucugaugaccugcugugggagaggaaaccgccccaaguccaagcagcacagccucggcgggaucggccggaaaguuucuuccaccagccagucuggaaaggugaucuccagcugggaguccuauaaaucuggcggggaaacaagacuguga

SEQ ID NO: 224022 - RNA, 1575 nt, Artificial Sequence
  derived and/or modified CDS sequence (opt5) from glycoprotein__RABV__LM645031.1
auggugccccaggcccugcucuuugucccucugcuugcuuuuccgaugugcuucggcaaguuucccaucuacaccauuccugacaaacuggggcccuggagcccuaucgauauucaccaucucuccugucccaacaaucugguuguggaggacgaaggaugcacaaaccuuucuggcuucagcuauauggagcugaaggugggguacaucuccgccauuaaagucaauggauuuacguguaccggcgugguuacagaagcggagaccuauacaaacuucgugggguacgucaccacaaccuuuaagagaaaacacuuccggccuacgccggaugcuugccgcgccgccuauaauuggaagauggcuggagaccccagauacgaagagucucuccauaacccuuaucccgauuaccacuggcugcggaccgugaagacaaccaaagagagccugaucaucauuuccccuucuguugccgaccucgaucccuacgacaagagccugcauucccgcguguuuccgagcggcaaaugucuuggcaucacaauuucuuccaccuauugcagcacgaaucacgauuacacaaucuggaugccugaaaacgucagacuggggaccucuugugacauuuucacaaauucccggggaaagcgcgcuagcagaggcucuaaaaccugcggguuuguggaugagcggggacucuauaagucccugaagggcgccuguaaacuuaagcugugcggggugcucggacugcgccugauggacggcaccugggucgcgaugcccacaagcgaugaaacgaaaugguguccucccgaccaacucguuaaccugcacgacuucagauccgaugagaucgagcaucuugugguggaggaacugguccggaagcgcgaagagugccucgacgcccuggaaucuauuaugaccacaaaaagcguguccuuuagacggcuuagccaucugcgcaagcucguucccggcuucgggaaggcuuacaccaucuucaauaaaacacugauggaggccgaugcucacuauaagucugugagaaccuggaacgagaucauuccuuccaaaggaugccugcgggucggcgggagaugucacccgcacgugaauggaguuuucuucaacggcaucauucucgggcccgacggacaugugcugaucccugaaaugcagagcucucuucugcagcagcacauggagcuccuggaaagcuccgucauuccccuuaugcauccucuggccgaucccucuacgguguuuaaggacggcgaugaggcggaagacuucgucgaggugcaccucccggauguucauaaacaaaucagcggcguggaccuggggcugccuaauuggggaaaguacguccucaucauugccggcgugcugaucgcuaugauucuuacaaucuuucugaugaccugcugugggcgcggaaaccggcccaaauccaagcagcacagccucggcgggauuggcagaaagguuucuuccaccagccagucuggaaaagugaucuccagcugggaguccuauaagucuggcggggaaacacgccuguga

SEQ ID NO: 224023 - RNA, 1575 nt, Artificial Sequence; identical to SEQ ID NO: 223881
  derived and/or modified CDS sequence (opt5) from glycoprotein__RABV__LM645034.1

SEQ ID NO: 224024 - RNA, 1575 nt, Artificial Sequence; identical to SEQ ID NO: 223881
  derived and/or modified CDS sequence (opt5) from glycoprotein__RABV__LM645035.1

SEQ ID NO: 224025 - RNA, 1575 nt, Artificial Sequence
  derived and/or modified CDS sequence (opt5) from glycoprotein__RABV__LM645036.1
auggugccccaggcccugcucuuugucccucugcuugcuuuuccgaugugcuucggcaaguuucccaucuacaccauuccugacaaacuggggcccuggagcccuaucgauauucaccaucucuccugucccaacaaucugguuguggaggacgaaggaugcacaaaccuuucuggcuucagcuauauggagcugaaggugggguacaucuccgccauuaaagucaauggauuuacguguaccggcgugguuacagaagcggagaccuauacaaacuucgugggguacgucaccacaaccuuuaagagaaaacacuuccggccuacgccggaugcuugccgcgccgccuauaauuggaagauggcuggagaccccagauacgaagagucucuccauaacccuuaucccgauuaccacuggcugcggaccgugaagacaaccaaagagagccugaucaucauuuccccuucuguugccgaccucgaucccuacgacaagagccugcauucccgcguguuuccgagcggcaaaugucuuggcaucacaauuucuuccaccuauugccugacgaaucacgauuacacaaucuggaugccugaaaacgucagacucgggaccagcugugacauuuucacaaauucucggggaaagcgcgcuuccaaaggcagcaagaccugcggguuuguggaugagagaggacuguauaagucucuuaaaggcgccuguaagcugaaacucugcggggugcugggacugcggcucauggacggcaccugggucgcgaugcccacauccgaugaaacgaagugguguccucccgaccaacugguuaaccuucacgacuuccgcagcgaugagaucgagcaucuggugguggaggaacucgucagaaaacgggaagagugccuggacgcccuugaauccauuaugaccacaaagucugugagcuuucgcagacugucccaccuccggaaacugguucccggcuucgggaaggcuuacaccaucuucaauaagacacugauggaggccgaugcucauuauaaaagcgugcgcaccuggaacgagaucauuccuucuaagggaugccucagagucggcgggcggugucacccgcacgugaauggaguuuucuucaacggcaucauucuggggcccgacggacaugugcuuaucccugaaaugcaguccagccugcuccagcagcacauggagcugcuugaaucuagcgucauuccccugaugcauccucucgccgaucccuccacgguguuuaaagacggcgaugaggcggaagacuucgucgaggugcaucugccggauguucacaagcaaaucucuggcguggaccuggggcucccuaauuggggaaaauacguccugaucauugccggcgugcuuaucgcuaugauucugacaaucuuucucaugaccugcugugggagaggaaaccgccccaagagcaagcagcacucccugggcgggauuggccggaaaguuagcucuaccccucaguccggaaaggugaucagcucuugggaguccuauaaaagcggcggggaaacaagacuguga

SEQ ID NO: 224026 - RNA, 1575 nt, Artificial Sequence; identical to SEQ ID NO: 223546
  derived and/or modified CDS sequence (opt5) from glycoprotein__RABV__LM645037.1

SEQ ID NO: 224027 - RNA, 1575 nt, Artificial Sequence
  derived and/or modified CDS sequence (opt5) from glycoprotein__RABV__LM645039.1
auggugccccaggcccugcucuuugucccucugcuugcuuuuccgaugugcuucggcaaguuucccaucuacaccauuccugacaaacuggggcccuggagcccuaucgauauucaccaucucuccugucccaacaaucugguuguggaggacgaaggaugcacaaaccuuucuggcuucagcuauauggagcugaaggugggguacaucuccgccauuaaagucaauggauuuacguguaccggcgugguuacagaagcggagaccuauacaaacuucgugggguacgucaccacaaccuuuaagagaaaacacuuccucccuacgccggaugcuugccgggccgccuauaauuggaagauggcuggagacccccgcuacgaagagucucugcauaacccuuaucccgauuaccacuggcugagaaccgugaagacaaccaaagagagccucaucaucauuuccccuucuguugccgaccuggaucccuacgacaagagccuucauucccggguguuuccgagcggcaaaugucugggcaucacaauuucuuccaccuauugcagcacgaaucacgauuacacaaucuggaugccugaaaacguccgccucgggaccucuugugacauuuucacaaauuccagaggaaagcgggcuagcaaaggcucuaagaccugcggguuuguggaugagcgcggacuguauaagucccuuaaaggcgccuguaagcugaaacucugcggggugcugggacugagacucauggacggcaccugggucgcgaugcccacaagcgaugaaacgaagugguguccucccgaccaacugguuaaccuucacgacuuccgguccgaugagaucgagcaucuggugguggaggaacucguccgcaaaagagaagagugccuggacgcccuugaaucuauuaugaccacaaagagcguguccuuucggcgccugagccaccucagaaaacugguucccggcuucgggaaggcuuacaccaucuucaauaagacacugauggaggccgaugcucauuauaaaucugugcggaccuggaacgagaucauuccuuccaagggaugccuccgcgucggcgggagaugucacccgcacgugaauggaguuuucuucaacggcaucauucuggggcccgacggacaugugcuuaucccugaaaugcagagcucucugcuccagcagcacauggagcugcuugaaagcuccgucauuccccugaugcauccucucgccgaucccucuacgguguuuaaagacggcgaugaggcggaagacuucgucgaggugcaucugccggauguucacaagcaaaucagcggcguggaccuggggcucccuaauuggggaaaauacguccugaucauugccggcgugcuuaucgcuaugauucugacaaucuuucucaugaccugcugugggcggggaaacagacccaaguccacccagcacagccugggcgggauuggccgcaagguuucuuccacaagccagucuggaaaagugaucuccagcugggaguccuauaagucuggcggggaaacccggcuguga

SEQ ID NO: 224028 - RNA, 1575 nt, Artificial Sequence; identical to SEQ ID NO: 223546
  derived and/or modified CDS sequence (opt5) from glycoprotein__RABV__LM645041.1

SEQ ID NO: 224029 - RNA, 1575 nt, Artificial Sequence
  derived and/or modified CDS sequence (opt5) from glycoprotein__RABV__LM645042.1
auggugccccaggcccugcucuuugucccucugcuugcuuuuccgaugugcuucggcaaguuucccaucuacaccauuccugacaaacuggggcccuggagcccuaucgauauucaccaucucuccugucccaacaaucugguuguggaggacgaaggaugcacaaaccuuucuggcuucagcuauauggagcugaaggugggguacaucuccgccauuaaagucaauggauuuacguguaccggcgugguuacagaagcggagaccuauacaaacuucgugggguacgucaccacaaccuuuaagagaaaacacuuccucccuacgccggaugcuugccgggccgccuauaauuggaagauggcuggagacccccgcuacgaagagucucugcauaacccuuaucccgauuaccacuggcugagaaccgugaagacaaccaaagagagccucaucaucauuuccccuucuguugccgaccuggaucccuacgacaagagccuucauucccggguguuuccgagcggcaaaugucugggcaucacaauuucuuccaccuauugcagcacgaaucacgauuacacaaucuggaugccugaaaacguccgccucgggaccucuugugacauuuucacaaauuccagaggaaagcgggcuagcaaaggcucuaagaccugcggguuuguggauaagcgcggacuguauaaaucccuuaagggcgccuguaaacugaagcucugcggggugcugggacugagacucauggacggcaccugggucgcgaugcccacaagcgaugagacgaaaugguguccucccgaccaacugguuaaccuucacgacuuccgguccgaugaaaucgagcaucuggugguggaggaacucguccgcaagagagaggaaugccuggacgcccuugagucuauuaugaccacaaaaagcguguccuuucggcgccugagccaccucagaaagcugguucccggcuucgggaaggcuuacaccaucuucaauaaaacacugauggaagccgaugcucauuauaagucugugcggaccuggaacgagaucauuccuuccaaaggaugccuccgcgucggcgggagaugucacccgcacgugaauggaguuuucuucaacggcaucauucuggggcccgacggacaugugcuuaucccugagaugcagagcucucugcuccagcagcacauggaacugcuugagagcuccgucauuccccugaugcauccucucgccgaucccucuacgguguuuaaggacggcgaugaagcggaggacuucgucgaagugcaucugccggauguucacaaacaaaucagcggcguggaccuggggcucccuaauuggggaaaguacguccugaucauugccggcgugcuuaucgcuaugauucugacaaucuuucucaugaccugcugugggcggggaaacagacccaaguccacccagcacagccugggcgggauuggccgcaaaguuucuuccacaagccagucuggaaaggugaucuccagcugggaguccuauaaaucuggcggggagacccggcuguga

SEQ ID NO: 224030 - RNA, 1575 nt, Artificial Sequence; identical to SEQ ID NO: 223546
  derived and/or modified CDS sequence (opt5) from glycoprotein__RABV__LM645043.1

SEQ ID NO: 224031 - RNA, 1575 nt, Artificial Sequence
  derived and/or modified CDS sequence (opt5) from glycoprotein__RABV__LM645045.1
auggugccccaggcccugcucuuugucccucugcuugcuuuuccgaugugcuucggcaaguuucccaucuacaccauuccugacaaacuggggcccuggagcccuaucgauauucaccaucucuccugucccaacaaucugguuguggaggacgaaggaugcacaaaccuuucuggcuucagcuauauggagcugaaggugggguacaucuccgccauuaaagucaauggauuuacguguaccggcgugguuacagaagcggagaccuauacaaacuucgugggguacgucaccacaaccuuuaagagaaaacacuuccggccuacgccggaugcuugccgcgccgccuauaauuggaagauggcuggagaccccagauacgaagagucucuccauaacccuuaucccgauuaccacuggcugcggaccgugaagacaaccaaagagagccugaucaucauuuccccuucuguugccgaccucgaucccuacgacaagagccugcauucccgcguguuuccgagcggcaaaugucuuggcaucacaauuucuuccaccuauugcagcacgaaucacgauuacacaaucuggaugccugaaaacgucagacuggggaccucuugugacauuuucacaaauucccggggaaagcgcgcuagcaaaggcucuaagaccugcggguuuguggaugagagaggacucuauaagucccugaaaggcgccuguaagcugaaacugugcggggugcucggacugcggcugauggacggcaccugggucgcgaugcccacaagcgaugaaacgaagugguguccucccgaccaacucguuaaccugcacgacuuccgcuccgaugagaucgagcaucuugugguggaggaacuggucagaaaacgggaagagugccucgacgcccuggaaucuauuaugaccacaaagagcguguccuuucgcagacuuagccaccuucggaaacucguucccggcuucgggaaggcuuacaccaucuucaauaagacacugauggaggccgaugcucauuauaaaucugugcgcaccuggaacgagaucauuccuuccaagggaugccugagagucggcgggcggugucacccgcacgugaauggaguuuucuucaacggcaucauucucgggcccgacggacaugugcugaucccugaaaugcagagcucucuucugcagcagcacauggagcuccuggaaagcuccgucauuccccuuaugcauccucuggccgaucccucuacgguguuuaaagacggcgaugaggcggaagacuucgucgaggugcacuuuccggauguucauaagcaaaucagcggcguggaccucgggcugccuaauuggggaaaauacguccugaucauugccggcgugcucaucgcuaugauucugacaaucuuccuuaugaccugcugugggagaggaaaccgccccaaguccacccagcacagccugggcgggauuggccggaagguuucuuccacaagccagucuggaaaagugaucuccagcugggaguccuauaagucuggcggggaaaccagacucuga

SEQ ID NO: 224032 - RNA, 1575 nt, Artificial Sequence; identical to SEQ ID NO: 224031
  derived and/or modified CDS sequence (opt5) from glycoprotein__RABV__LM645049.1

SEQ ID NO: 224033 - RNA, 1575 nt, Artificial Sequence; identical to SEQ ID NO: 223546
  derived and/or modified CDS sequence (opt5) from glycoprotein__RABV__LM645052.1

SEQ ID NO: 224034 - RNA, 1575 nt, Artificial Sequence; identical to SEQ ID NO: 223546
  derived and/or modified CDS sequence (opt5) from glycoprotein__RABV__LM645053.1

SEQ ID NO: 224035 - RNA, 1575 nt, Artificial Sequence; identical to SEQ ID NO: 223546
  derived and/or modified CDS sequence (opt5) from glycoprotein__RABV__LM645056.1

SEQ ID NO: 224036 - RNA, 1575 nt, Artificial Sequence
  derived and/or modified CDS sequence (opt5) from glycoprotein__RABV__LN713547.1
auggugccccaggcccuccuguucgucccucugcuuguuuuuccgcugugcuucggcaaguuucccaucuacaccauuccugacaaacucgggcccuggagcccuaucgauauucaccaucuguccugucccaacaaucuugugguggaggacgaaggaugcacaaaccugucuggcuucagcuauauggagcucaaggucgggaauauccuggcuauuaaaaugaacggauuuacguguaccggcgugguuacagaagccgagaccuacacaaauuucgugggguaugucaccacaaccuuuaagagaaaacacuuccggccuacgccggaugcgugccgcgcugccuacaacuggaagauggccggagaccccagauaugaagagucccugcauaauccuuaccccgauuaucgguggcuccgcaccgugaagacaaccaaagagucucugguuaucaucagcccuuccguggcugaccuugaucccuacgacagaucucugcacagccgggucuuuccguccggcaaguguagcggcguggccgugucuuccacauacugcagcaccaaccaugauuauacgauuuggaugccugaaucuccccgccucgggauguccugugacaucuucacaaauagcagaggaaaacgggcuucuaagggcuccgagaccugcggguuugucgaugaacgcggacuguacaaaagccuuaagggcgccuguaagcugaaacucugcgggguucugggacugagacucauggacggcacauggguguccaugcaaaccucuaacgagaccaagugguguccucccgaucagcuggugaaucuucacgacuuccggagcgacgagauugaacaccuggucguggaggaacucguucgcaaaagagaggaaugccuggaugcgcuugaguccaucaugacaaccaagagcgugucuuuucggcgccugucccaucucagaaaacugguccccggcuucgggaaggccuauacgauucugaacaaaacacucauggaggcugacgcccacuacaagagcgugcggaccuggaaugaaauccugccuucuaagggaugccuuagaguuggcgggcgcugucauccgcacgugaacggagucuucuuuaauggcauuauccuggggcccgauggaaacgugcucaucccugagaugcagagcucccugcuucagcaacacauggaacugcucgagucuagcgucauuccccuggugcauccucuggcugaccccuccacaguuuucaaagauggcgacgaagccgaggauuuuguggagguccaccucccggacgugcauaaccagguuagcggcguggaucuggggcuuccuaauuggggaaaguauguccugcucucugcgggcgcccugaccgcucugaugcuuaucauuuuccucaugacgugcugucggagagugaaccgcuccgaacccacacagcacaaucugcgggggaccggaagagaggugagcguuaccccucagucuggcaaaaucauuuccagcugggaaucccauaagucugggggcgagacacgccuguga

SEQ ID NO: 224037 - RNA, 1575 nt, Artificial Sequence; identical to SEQ ID NO: 224036
  derived and/or modified CDS sequence (opt5) from glycoprotein__RABV__LN713552.1

SEQ ID NO: 224038 - RNA, 1575 nt, Artificial Sequence
  derived and/or modified CDS sequence (opt5) from glycoprotein__RABV__LN713556.1
auggugccccaggcccuccuguucgucccucugcuuguuuuuccgcugugcuucggcaaguuucccaucuacaccauuccugacaaacucgggcccuggagcccuaucgauauucaccaucuguccugucccaacaaucuugugguggaggacgaaggaugcacaaaccugucuggcuucagcuauauggagcucaaggucgggaauauccuggcuauuaaaaugaacggauuuacguguaccggcgugguuacagaagccgagaccuacacaaauuucgugggguaugucaccacaaccuuuaagagaaaacacuuccggccuacgccggaugcgugccgcgcugccuacaacuggaagauggccggagaccccagauaugaagagucccugcauaauccuuaccccgauuaucgguggcuccgcaccgugaagacaaccaaagagucucugguuaucaucagcccuuccguggcugaccuugaucccuacgacagaucucugcacagccgggucuuuccguccggcaaguguagcggcguggccgugucuuccacauacugcagcaccaaccaugauuauacgauuuggaugccugaaaauccccgccucgggaugucuugugacaucuucacaaacuccagaggaaaacgggcuagcaagggcucugagaccugcggguuugucgaugaacgcggacuguacaaaucccuuaagggcgccuguaagcugaaacucugcgggguucugggacugagacucauggacggcacaugggugagcaugcaaaccuccaaugagaccaagugguguccucccgauaaacuggugaaccuucacgacuuccggucugacgagauugaacaccuggucguggaggaacucguucgcaagagagaggaaugccuggaugcgcuugagagcaucaugacaacgaaauccgugagcuuucggcgccugucucaucucagaaagcugguccccggcuucgggaaagccuauaccauucugaauaagacacucauggaggcugacgcccacuacaaguccgugcggaccuggaacgaaauccugccuagcaaaggaugccuuagaguuggcgggcgcugucauccgcacgugaauggagucuucuuuaacggcauuauccuggggcccgauggaaacgugcucaucccugagaugcagucuagccugcuucagcagcacauggaacugcucgaguccucugucauuccccuggugcauccucuggcugaccccagcacaguuuucaaggauggcgacgaagccgaggauuuuguggagguccaccucccggacgugcauaaucaaguuuccggcguggaucuggggcuuccuaacuggggaaaauauguccugcucagcgcgggcgcccugaccgcucugaugcuuaucauuuuccucaugacgugcugucggagagugaaucgcucugaacccacacagcacaaccugcgggggaccggaagagagguguccguuaccccucagagcggcaagaucauuucuuccugggaaagccauaaauccgggggcgagacacgccuguga

SEQ ID NO: 224039 - RNA, 1575 nt, Artificial Sequence; identical to SEQ ID NO: 224036
  derived and/or modified CDS sequence (opt5) from glycoprotein__RABV__LN713559.1

SEQ ID NO: 224040 - RNA, 1575 nt, Artificial Sequence
  derived and/or modified CDS sequence (opt5) from glycoprotein__RABV__LN713560.1
auggugccccaggcccuccuguucgucccucugcuuguuuuuccgcugugcuucggcaaguuucccaucuacaccauuccugacaaacucgggcccuggagcccuaucgauauucaccaucuguccugucccaacaaucuugugguggaggacgaaggaugcacaaaccugucuggcuucagcuauauggagcucaaggucgggaauauccuggcuauuaaagugaacggauuuacguguaccggcguugugacagaagccgagaccuacacaaauuucgucggguaugugaccacaaccuuuaagagaaaacacuuccggccuacgccggaugcgugccgcgcugccuacaacuggaagauggccggagaccccagauaugaagagucccugcauaauccuuaccccgauuaucgguggcuccgcaccguuaagacaaccaaagagucucuggugaucaucagcccuuccgucgcugaccuugaucccuacgacagaucucugcacagccggguguuuccguccggcaaguguagcggcguggccgucucuuccacauacugcagcaccaaccaugauuauacgauuuggaugccugaaucuccccgccucgggauguccugugacaucuucacaaauagcagaggaaaacgggcuucuaagggcuccgagaccugcggguuuguugaugaacgcggacuguacaaaagccuuaagggcgccuguaagcugaaacucugcggggugcugggacugagacucauggacggcacauggguguccaugcaaaccucuaacgagaccaagugguguccucccgaucagcuggucaaucuucacgacuuccggagcgacgagauugaacaccuggugguugaggaacucgugcgcaaaagagaggaaugccuggaugcgcuugaguccaucaugacaaccaagagcgucucuuuucggcgccugucccaucucagaaaacuggugcccggcuucgggaaggccuauacgauucugaacaaaacacucauggaggcugacgcccacuacaagagcguucggaccuggaaugaaauccugccuucuaagggaugccuuagagugggcgggcgcugucauccgcacgucaacggaguguucuuuaauggcauuauccuggggcccgauggaaacguccucaucccugagaugcagagcucccugcuucagcaacacauggaacugcucgagucuagcgugauuccccugguucauccucuggcugaccccuccacaguguucaaagauggcgacgaagccgaggauuuugucgaggugcaccucccggacguucauaaccaggugagcggcgucgaucuggggcuuccuaauuggggaaaguaugugcugcucucugcgggcgcccugaccgcucugaugcuuaucauuuuccucaugacgugcugucggagagugaaccgcuccgaacccacacagcacaaucugcgggggaccggaagagagguuagcgucaccccucagucuggcaaaaucauuuccagcugggaaucccauaagucugggggcgagacacgccuguga

SEQ ID NO: 224041 - RNA, 1575 nt, Artificial Sequence
  derived and/or modified CDS sequence (opt5) from glycoprotein__RABV__LN713572.1
auggugccccaggcccuccuguucgucccucugcuuguuuuuccgcugugcuucggcaaguuucccaucuacaccauuccugacaaacucgggcccuggagcccuaucgauauucaccaucuguccugucccaacaaucuugugguggaggacgaaggaugcacaaaccugucuggcuucagcuauauggagcucaaggucggguacauccuggcuauuaaagugaauggauuuacguguaccggcguugugacagaagccgagaccuauacaaacuucgucggguacgugaccacaaccuuuaagagaaaacacuuccggccuacgccggaugcgugccgcgcugccuauaauuggaagauggccggagaccccagauacgaagagucccugcauaacccuuaucccgauuaccgguggcuccgcaccguuaagacaaccaaagagucucuggugaucaucagcccuuccgucgcugaccuugaucccuacgacagaucucugcacagccggguguuuccguccggcaaguguagcggcguggccgucucuuccacauauugcagcaccaaucaugauuacacgauuuggaugccugaaaacccccgccucgggaugucuugugacaucuucacaaauuccagaggaaaacgggcuagcaagggcucugagaccugcggguuuguugaugaacgcggacuguauaaaucccuuaagggcgccuguaagcugaaacucugcggggugcugggacugagacucauggacggcacaugggugagcaugcaaaccuccaacgagaccaagugguguccucccgauaaacuggucaaucuucacgacuuccggucugacgagauugaacaccuggugguugaggaacucgugcgcaagagagaggaaugccuggaugcgcuugagagcaucaugacaacgaaauccgucagcuuucggcgccugucucaucucagaaagcuggugcccggcuucgggaaagccuacaccauucugaacaagacacucauggaggcugacgcccacuauaaguccguucggaccuggaaugaaauccugccuagcaaaggaugccuuagagugggcgggcgcugucauccgcacgucaacggaguguucuuuaauggcauuauccuggggcccgauggaaacguccucaucccugagaugcagucuagccugcuucagcagcacauggaacugcucgaguccucugugauuccccugguucauccucuggcugaccccagcacaguguucaaggauggcgacgaagccgaggauuuugucgaggugcaccucccggacguucauaaccaaguguccggcgucgaucuggggcuuccuaauuggggaaaauacgugcugcucagcgcgggcgcccugaccgcucugaugcuuaucauuuuccucaugacgugcugucggagagugaaccgcucugaacccacacagcacaaucugcgggggaccggaagagagguuuccgucaccccucagagcggcaagaucauuucuuccugggaaagccauaaauccgggggcgagacacgccuguga

SEQ ID NO: 224042 - RNA, 1575 nt, Artificial Sequence
  derived and/or modified CDS sequence (opt5) from glycoprotein__RABV__LN713578.1
auggugccccaggcccugcuguucgucccucugcuuguuuuuccgcugugcuucggcaaguuucccaucuacaccauuccugacaaacucgggcccuggagcccuaucgauauucaccaucuguccugucccaacaaucuugugguggaggacgaaggaugcacaaaccugucuggcuucagcuauauggagcucaaggucggguacauccuggcuauuaaaaugaauggauuuacguguaccggcgugguuacagaagccgagaccuauacaaacuucgugggguacgucaccacaaccuuuaagagaaaacacuuccggccuacgccggaugcgugccgcgcugccuauaauuggaagauggccggagaccccagauacgaagagucccugcauaacccuuaucccgauuaccgguggcuccgcaccgugaagacaaccaaagagucucugguuaucaucagcccuuccguggcugaccuugaucccuacgacagaucucugcacagccgggucuuuccguccggcaaguguagcggcguggccgugucuuccacauauugcagcaccaaucaugauuacacgauuuggaugccugaaaacccccgccucgggaugucuugugacaucuucacaaauuccagaggaaaacgggcuagcaagggcucugagaccugcggguuugucgaugaacgcggacuguauaaaucccuuaagggcgccuguaagcugaaacucugcgggguucugggacugagacucauggacggcacaugggugagcaugcaaaccuccaacgagaccaagugguguccucccgauaaacuggugaaucuucacgacuuccggucugacgagauugaacaccuggucguggaggaacucguucgcaagagagaggaaugccuggaugcgcuugagagcaucaugacaacgaaauccgugagcuuucggcgccugucucaucucagaaagcugguccccggcuucgggaaagccuacaccauuuucaacaagacacugauggaggcugacgcccacuauaaguccgugcggaccuggaaugaaauccucccuagcaaaggaugccugagaguuggcgggcgcugucauccgcacgugaacggagucuuuuucaauggcauuauccuugggcccgauggaaacgugcugaucccugagaugcagucuagccuccugcagcagcacauggaacuucuggaguccucugucauuccccucgugcauccucuggcugaccccagcacaguuuuuaaggauggcgacgaagccgaggauuucguggagguccaccucccggacgugcauaaccaaguuuccggcguggaucucgggcugccuaauuggggaaaauacguccuucugagcgcgggcgcccucaccgcucugaugcugaucauuuuucuuaugacgugcugucggagagugaaccgcucugaacccacacagcacaaucuccgggggaccggaagagagguguccguuaccccucagagcggcaagaucauuucuuccugggaaagccauaaauccgggggcgagacacgccuguga

SEQ ID NO: 224043 - RNA, 1575 nt, Artificial Sequence; identical to SEQ ID NO: 224040
  derived and/or modified CDS sequence (opt5) from glycoprotein__RABV__LN713589.1

SEQ ID NO: 224044 - RNA, 1575 nt, Artificial Sequence; identical to SEQ ID NO: 224036
  derived and/or modified CDS sequence (opt5) from glycoprotein__RABV__LN713600.1

SEQ ID NO: 224045 - RNA, 1575 nt, Artificial Sequence
  derived and/or modified CDS sequence (opt5) from glycoprotein__RABV__LN713602.1
auggugccccaggcccuccuguucgucccucugcuuguuuuuccgcugugcuucggcaaguuucccaucuacaccauuccugacaaacucgggcccuggagcccuaucgauauucaccaucuguccugucccaacaaucuugugguggaggacgaaggaugcacaaaccugucuggcuucagcuauauggagcucaaggucgggaauauccuggcuauuaaaaugaacggauuuacguguaccggcgugguuacagaagccgagaccuacacaaauuucgugggguaugucaccacaaccuuuaagagaaaacacuuccggccuacgccggaugcgugccgcgcugccuacaacuggaagauggccggagaccccagauaugaagagucccugcauaauccuuaccccgauuaucgguggcuccgcaccgugaagacaaccaaagagucucugguuaucaucagcccuuccguggcugaccuugaucccuacgacagaucucugcacagccgggucuuuccguccggcaaguguagcggcguggccgugucuuccacauacugcagcaccaaccaugauuauacgauuuggaugccugaaaauccccgccucgggaugucuugugacaucuucacaaacuccagaggaaaacgggcuagcaagggcucugagaccugcggguuugucgaugaacgcggacuguacaaaucccuuaagggcgccuguaagcugaaacucugcgggguucugggacugagacucauggacggcacaugggugagcaugcaaaccuccaaugagaccaagugguguccucccgaucagcuggugaaccuucacgacuuccggucugacgagauugaacaccuggucguggaggaacucguucgcaaaagagaggaaugccuggaugcgcuugagagcaucaugacaacgaaguccgugagcuuucggcgccugucucaucucagaaaacugguccccggcuucgggaaggccuauaccauucugaauaaaacacucauggaggcugacgcccacuacaaguccgugcggaccuggaacgaaauccugccuagcaagggaugccuuagaguuggcgggcgcugucauccgcacgugaauggagucuucuuuaacggcauuauccuggggcccgauggaaacgugcucaucccugagaugcagucuagccugcuucagcaacacauggaacugcucgaguccucugucauuccccuggugcauccucuggcugaccccagcacaguuuucaaagauggcgacgaagccgaggauuuuguggagguccaccucccggacgugcauaaucagguuuccggcguggaucuggggcuuccuaacuggggaaaguauguccugcucagcgcgggcgcccugaccgcucugaugcuuaucauuuuccucaugacgugcugucggagagugaaucgcucugaacccacacagcacaaccugcgggggaccggaagagagguguccguuaccccucagagcggcaaaaucauuucuuccugggaaagccauaaguccgggggcgagacacgccuguga

SEQ ID NO: 224046 - RNA, 1575 nt, Artificial Sequence
  derived and/or modified CDS sequence (opt5) from glycoprotein__RABV__LN713608.1
auggugccccaggcccugcuguucgucccucugcuuguuuuuccgcugugcuucggcaaguuucccaucuacaccauuccugacaaacucgggcccuggagcccuaucgauauucaccaucuguccugucccaacaaucuugugguggaggacgaaggaugcacaaaccugucuggcuucagcuauauggagcucaaggucggguacauccuggcuauuaaagugaauggauuuacguguaccggcguugugacagaagccgagaccuauacaaacuucgucggguacgugaccacaaccuuuaagagaaaacacuuccggccuacgccggaugcgugccgcgcugccuauaauuggaagauggccggagaccccagauacgaagagucccugcauaacccuuaucccgauuaccgguggcuccgcaccguuaagacaaccaaagagucucuggugaucaucagcccuuccgucgcugaccuugaucccuacgacagaucucugcacagccggguguuuccguccggcaaguguagcggcguggccgucucuuccacauauugcagcaccaaucaugauuacacgauuuggaugccugaaaacccccgccucgggaugucuugugacaucuucacaaauuccagaggaaaacgggcuagcaagggcucugagaccugcggguuuguugaugaacgcggacuguauaaaucccuuaagggcgccuguaagcugaaacucugcggggugcugggacugagacucauggacggcacaugggugagcaugcaaaccuccaacgagaccaagugguguccucccgaucagcuggucaaucuucacgacuuccggucugacgagauugaacaccuggugguugaggaacucgugcgcaaaagagaggaaugccuggaugcgcuugagagcaucaugacaacgaaguccgucagcuuucggcgccugucucaucucagaaaacuggugcccggcuucgggaaggccuacaccauuuucaacaaaacacugauggaggcugacgcccacuauaaguccguucggaccuggaaugaaauccucccuagcaagggaugccugagagugggcgggcgcugucauccgcacgucaacggaguguuuuucaauggcauuauccuugggcccgauggaaacguccugaucccugagaugcagucuagccuccugcagcaacacauggaacuucuggaguccucugugauuccccucguucauccucuggcugaccccagcacaguguuuaaagauggcgacgaagccgaggauuucgucgaggugcaccucccggacguucauaaccagguguccggcgucgaucucgggcugccuaauuggggaaaguacgugcuucugagcgcgggcgcccucaccgcucugaugcugaucauuuuucuuaugacgugcugucggagagugaaccgcucugaacccacacagcacaaucuccgggggaccggaagagagguuuccgucaccccucagagcggcaaaaucauuucuuccugggaaagccauaaguccgggggcgagacacgccuguga

SEQ ID NO: 224047 - RNA, 1575 nt, Artificial Sequence
  derived and/or modified CDS sequence (opt5) from glycoprotein__RABV__LN713628.1
auggugccccaggcccugcuguucgucccucugcuuguuuuuccgcugugcuucggcaaguuucccaucuacaccauuccugacaaacucgggcccuggagcccuaucgauauucaccaucuguccugucccaacaaucuugugguggaggacgaaggaugcacaaaccugucuggcuucagcuauauggagcucaaggucggguacauccuggcuauuaaaaugaauggauuuacguguaccggcgugguuacagaagccgagaccuauacaaacuucgugggguacgucaccacaaccuuuaagagaaaacacuuccggccuacgccggaugcgugccgcgcugccuauaauuggaagauggccggagaccccagauacgaagagucccugcauaacccuuaucccgauuaccgguggcuccgcaccgugaagacaaccaaagagucucugguuaucaucagcccuuccguggcugaccuugaucccuacgacagaucucugcacagccgggucuuuccguccggcaaguguagcggcguggccgugucuuccacauauugcagcaccaaucaugauuacacgauuuggaugccugaaaacccccgccucgggaugucuugugacaucuucacaaauuccagaggaaaacgggcuagcaagggcucugagaccugcggguuugucgaugaacgcggacuguauaaaucccuuaagggcgccuguaagcugaaacucugcgggguucugggacugagacucauggacggcacaugggugagcaugcaaaccuccaacgagaccaagugguguccucccgaucagcuggugaaucuucacgacuuccggucugacgagauugaacaccuggucguggaggaacucguucgcaaaagagaggaaugccuggaugcgcuugagagcaucaugacaacgaaguccgugagcuuucggcgccugucucaucucagaaaacugguccccggcuucgggaaggccuacaccauuuucaacaaaacacugauggaggcugacgcccacuauaaguccgugcggaccuggaaugaaauccucccuagcaagggaugccugagaguuggcgggcgcugucauccgcacgugaacggagucuuuuucaauggcauuauccuugggcccgauggaaacgugcugaucccugagaugcagucuagccuccugcagcaacacauggaacuucuggaguccucugucauuccccucgugcauccucuggcugaccccagcacaguuuuuaaagauggcgacgaagccgaggauuucguggagguccaccucccggacgugcauaaccagguuuccggcguggaucucgggcugccuaauuggggaaaguacguccuucugagcgcgggcgcccucaccgcucugaugcugaucauuuuucuuaugacgugcugucggagagugaaccgcucugaacccacacagcacaaucuccgggggaccggaagagagguguccguuaccccucagagcggcaaaaucauuucuuccugggaaagccauaaguccgggggcgagacacgccuguga

SEQ ID NO: 224048 - RNA, 1575 nt, Artificial Sequence
  derived and/or modified CDS sequence (opt5) from glycoprotein__RABV__LN713639.1
auggugccccaggcccuccuguucgucccucugcuuguuuuuccgcugugcuucggcaaguuucccaucuacaccauuccugacaaacucgggcccuggagcccuaucgauauucaccaucuguccugucccaacaaucuugugguggaggacgaaggaugcacaaaccugucuggcuucagcuauauggagcucaaggucggguacauccuggcuauuaaagugaauggauuuacguguaccggcguugugacagaagccgagaccuauacaaacuucgucggguacgugaccacaaccuuuaagagaaaacacuuccggccuacgccggaugcgugccgcgcugccuauaauuggaagauggccggagaccccagauacgaagagucccugcauaacccuuaucccgauuaccgguggcuccgcaccguuaagacaaccaaagagucucuggugaucaucagcccuuccgucgcugaccuugaucccuacgacagaucucugcacagccggguguuuccguccggcaaguguagcggcguggccgucucuuccacauauugcagcaccaaucaugauuacacgauuuggaugccugaaaacccccgccucgggaugucuugugacaucuucacaaauuccagaggaaaacgggcuagcaagggcucugagaccugcggguuuguugaugaacgcggacuguauaaaucccuuaagggcgccuguaagcugaaacucugcggggugcugggacugagacucauggacggcacaugggugagcaugcaaaccuccaacgagaccaagugguguccucccgaucagcuggucaaucuucacgacuuccggucugacgagauggaacaccuggugguugaggaacucgugcgcaaaagagaggaaugccuggaugcgcuugagagcauuaugacaacgaaguccgucagcuuucggcgccugucucaucucagaaaacuggugcccggcuucgggaaggccuacaccauccugaacaaaacacucauggaggcugacgcccacuauaaguccguucggaccuggaaugaaauucugccuagcaagggaugccuuagagugggcgggcgcugucauccgcacgucaacggaguguucuuuaauggcaucauucuggggcccgauggaaacguccucaucccugagaugcagucuagccugcuucagcaacacauggaacugcucgaguccucugugaucccccugguucauccucuggcugaccccagcacaguguucaaagauggcgacgaagccgaggauuuugucgaggugcaccucccggacguucauaaccagguguccggcgucgaucuggggcuuccuaauuggggaaaguacgugcugcucagcgcgggcgcccugaccgcucugaugcuuauuaucuuccucaugacgugcugucggagagugaaccgcucugaacccacacagcacaaucugcgggggaccggaagagagguuuccgucaccccucagagcggcaaaauuaucucuuccugggaaagccauaaguccgggggcgagacacgccuguga

SEQ ID NO: 224049 - RNA, 1575 nt, Artificial Sequence
  derived and/or modified CDS sequence (opt5) from glycoprotein__RABV__LN713660.1
auggugccccaggcccuucucuucgucccucugcuuguuuuuccgcugugcuucggcaaguuucccaucuacaccauuccugacaaacucgggcccuggagcccuaucgauauucaccaucuguccugucccaacaaucuugugguggaggacgaaggaugcacaaaccugucuggcuucagcuauauggagcucaaggucggguacaucuccgcuauuaaaaugaauggauuuacguguaccggcgugguuacagaagccgagaccuauacaaacuucgugggguacgucaccacaaccuuuaagagaaaacacuuccggccuacgccggaugcgugccgcgcugccuauaauuggaagauggccggagaccccagauacgaagagucucugcauaacccuuaucccgauuaccgguggcugcgcaccgugaagacaaccaaagagagccucguuaucaucuccccuucuguggcugaccuggaucccuacgacagaagccuucacucccgggucuuuccgagcggcaaguguucuggcguggccguguccagcacauauugcucuaccaaucaugauuacacgauuuggaugccugaaaacccccgccuggggauguccugugacaucuucacaaauagcagaggaaaacgggcuucuaagggcuccgagaccugcggguuugucgaugaacgcggacucuauaaaagccugaagggcgccuguaagcugaaacugugcgggguucucggacugagacugauggacggcacauggguggcgaugcaaaccuccaacgagaccaagugguguccucccgaucagcucgugaaucugcacgacuuccggucugacgagauugaacaccuugucguggaggaacugguucgcaaaagagaggaaugccucgaugcccuggagagcaucaugacaacgaaguccgugagcuuucggcgccuuucucaucugagaaaacucguccccggcuucgggaaggcuuacaccauuuucaacaaaacacugauggaggccgacgcucacuauaaguccgugcggaccuggaaugaaauccugccuagcaagggaugccucagaguuggcgggcgcugucauccgcacgugaacggagucuuuuucaauggcauuauccuggggcccgauggaaacgugcuuaucccugagaugcagucuagccugcuccagcaacacauggaacugcuugaguccucugucauuccccugaugcauccucucgccgaccccagcacaguguuuaaagauggcgacgaagcggaggauuucguugaggugcaucugccggacguccacgaacagguguccggcguugaucuggggcucccuaacuggggaaaguacgugcugcuuagcgccggcgcucugaccgcccucaugcugaucauuuuucugaugacgugcugucggagagucaaucgcucugagcccacacagcacaaccuucgggggaccggaagagaaguguccgugaccccucagagcggcaaaaucauuucuuccugggagagcuauaaguccgggggcgaaacacgccucuga

SEQ ID NO: 224050 - RNA, 1575 nt, Artificial Sequence
  derived and/or modified CDS sequence (opt5) from glycoprotein__RABV__LN713663.1
auggugccccaggcccugcuguucgucccucugcuuguuuuuccgcugugcuucggcaaguuucccaucuacaccauuccugacaaacucgggcccuggagcccuaucgauauucaccaucuguccugucccaacaaucuugugguggaggacgaaggaugcacaaaccugucuggcuucagcuauauggagcucaaggucggguacauccuggcuauuaaagugaauggauuuacguguaccggcguugugacagaagccgagaccuauacaaacuucgucggguacgugaccacaaccuuuaagagaaaacacuuccggccuacgccggaugcgugccgcgcugccuauaauuggaagauggccggagaccccagauacgaagagucccugcauaacccuuaucccgauuaccgguggcuccgcaccguuaagacaaccaaagagucucuggugaucaucagcccuuccgucgcugaccuugaucccuacgacagaucucugcacagccggguguuuccguccggcaaguguagcggcguggccgucucuuccacauauugcagcaccaaucaugauuacacgauuuggaugccugaaaacccccgccucgggaugucuugugacaucuucacaaauuccagaggaaaacgggcuagcaagggcucugagaccugcggguuuguugaugaacgcggacuguauaaaucccuuaagggcgccuguaagcugacacucugcggggugcugggacugagacucauggacggcaccugggugagcaugcaaaccuccaacgagacaaaaugguguccucccgauaagcuggucaaucuucacgacuuccggucugacgagauugaacaccuggugguugaggaacucgugcgcaaaagagaggaaugccuggaugcgcuugagagcaucaugacgaccaaguccgucagcuuucggcgccugucucaucucagaaaacuggugcccggcuucgggaaggccuacacaauuuucaacaaaacccugauggaggcugacgcccacuauaaguccguugaaacauggaaugagauccucccuagcaagggaugccugcgggugggcgggagaugucauccgcacgucaacggaguguuuuucaauggcauuauccuugggcccgauggaaacguccugaucccugaaaugcagucuagccuccugcagcagcacauggagcuucuggaauccucugugauuccccucguucauccucuggcugaccccagcaccguguuuaaagauggcgacgaggccgaggauuucgucgaagugcaccucccggacguucauaaccaaguguccggcgucgaucucgggcugccuaauuggggaaaguacgugcuucugagcgcgggcgcccucacggcucugaugcugaucauuuuucuuaugacaugcugucgccgggugaacagaucugagcccacccagcacaaucuccgcgggaccggacgggaaguuuccgucacaccucagagcggcaaaaucauuucuuccugggagagccauaaguccgggggcgaaaccauccuguga

SEQ ID NO: 224051 - RNA, 1575 nt, Artificial Sequence
  derived and/or modified CDS sequence (opt5) from glycoprotein__RABV__LN713666.1
auggugccccaggcccugcuguucgucccucugcuuguuuuuccgcugugcuucggcaaguuucccaucuacaccauuccugacaaacucgggcccuggagcccuaucgauauucaccaucuguccugucccaacaaucuugugguggaggacgaaggaugcacaaaccugucuggcuucagcuauauggagcucaaggucggguacauccuggcuauuaaagugaauggauuuacguguaccggcguugugacagaagccgagaccuauacaaacuucgucggguacgugaccacaaccuuuaagagaaaacacuuccggccuacgccggaugcgugccgcgcugccuauaauuggaagauggccggagaccccagauacgaagagucccugcauaacccuuaucccgauuaccgguggcuccgcaccguuaagacaaccaaagagucucuggugaucaucagcccuuccgucgcugaccuugaucccuacgacagaucucugcacagccggguguuuccguccggcaaguguagcggcguggccgucucuuccacauauugcagcaccaaucaugauuacacgauuuggaugccugaaaacccccgccucgggaugucuugugacaucuucacaaauuccagaggaaaacgggcuagcaagggcucugagaccugcggguuuguugaugaacgcggacuguauaaaucccuuaagggcgccuguaagcugaugcucugcggggugcugggacugagacucauggacggcacaugggugagcaugcaaaccuccaacgagaccaaaugguguccucccgauaagcuggucaaucuucacgacuuccggucugacgagauugaacaccuggugguugaggaacucgugcgcaaaagagaggaaugccuggaugcgcuugagagcaucaugacaacgaaguccgucagcuuucggcgccugucucaucucagaaaacuggugcccggcuucgggaaggccuacaccauuuucaacaaaacacugauggaggcugacgcccacuauaaguccguugaaaccuggaaugagauccucccuagcaagggaugccugcgggugggcgggagaugucauccgcacgucaacggaguguuuuucaauggcauuauccuugggcccgauggaaacguccugaucccugaaaugcagucuagccuccugcagcagcacauggagcuucuggaauccucugugauuccccucguucauccucuggcugaccccagcacaguguuuaaagauggcgacgaggccgaggauuucgucgaagugcaccucccggacguucauaaccaaguguccggcgucgaucucgggcugccuaauuggggaaaguacgugcuucugagcgcgggcgcccucaccgcucugaugcugaucauuuuucuuaugacgugcugucgccgggugaacagaucugagcccacacagcacaaucuccgcgggaccggacgggaaguuuccgucaccccucagagcggcaaaaucauuucuuccugggagagccauaaguccgggggcgaaacaauccuguga

SEQ ID NO: 224052 - RNA, 1575 nt, Artificial Sequence
  derived and/or modified CDS sequence (opt5) from glycoprotein__RABV__LN879481.2
auggugccccaggcccuccuguucgucccucugcuuggcuuuagccugugcguugggaaguucccgaucuacaccauucccgacaaacucggaccuuggucccccaucgauauucaccaucugucuuguccuaacaaucuugugguggaggacgaaggcugcacaaaccugagcggguuuuccuauauggagcucaaggucggauacaucucugcuauuaaagugaauggcuucacguguaccgggguugugacagaagccgagaccuauacaaacuuugucggauacgugaccacaaccuucaagagaaaacacuuucggcccacgccugaugcgugccgcgcugccuauaauuggaagauggccggcgacccgagauacgaagagagccugcauaaccccuauccugauuaccacuggcugcggaccguuaagacaaccaaagagucccucgugaucaucucucccagcgucgcugaccuggauccuuacgacaagucccuucauagccgcguguuccccggcgggaaauguucuggaauuacaguguccagcaccuauugcucuacgaaucacgauuacacaaucuggcugccggaaaacccuagacucggcaccuccugugacauuuuuacaaauagccgggggaagcgcgccucuaaaggauccaagaccugcggcuucgucgaugagagagggcuguauaagagccuuaaaggagcuuguaagcugaaacucugcggcguucugggccugcggcucaucgacgggaccuggguggccaugcaaacauccaacgaaacgaaguggugucccccugaucagcuggugaaucuucacgacuuucgcucugacgagauugagcaucuggucguggaggaacucguuaaaaagagagaagagugccuggaugcgcuugaaagcaucaugaccacaaaauccgugagcuuccggcgccugucucaccucagaaagcugguccccggauuuggcaaggccuacaccauuuucaacaaaacacugauggaggcugacgcccauuauaaguccgugcggaccuggaaugagaucauccccagcaaagggugccuccgcguuggaggcagaugucaccaccaugugaacggggucuucuuuaauggaauuauccugggcccugauggccacgugcuuauuccggaaaugcagucuagccugcuccagcaacauauggagcugcuugaauccucugucaucccccugaugcacccucucgcugaccccagcacgguguucaaggauggggacgaggccgaagauuuuguugaggugcaucugccugacguccacaaacagguguccggaguugaucugggccuccccaacugggggaaguacgugcugcuuagcgcgggagcccugauugcucucaugcugaucaucuuccugaugacaugcugucggagagucaaccgcccggagucuacccagccuuccuuucggggcaccgaaagaaaggugagcauuacaccccagucugggaaagugaucuccagcugggaguccuauaagucuggcggagaaacccgccuuuga

SEQ ID NO: 224053 - RNA, 1575 nt, Artificial Sequence; identical to SEQ ID NO: 223546
  derived and/or modified CDS sequence (opt5) from glycoprotein__RABV__LT598537.1

SEQ ID NO: 224054 - RNA, 1575 nt, Artificial Sequence; identical to SEQ ID NO: 223853
  derived and/or modified CDS sequence (opt5) from glycoprotein__RABV__LT598538.1

SEQ ID NO: 224055 - RNA, 1575 nt, Artificial Sequence
  derived and/or modified CDS sequence (opt5) from glycoprotein__RABV__LT598540.1
auggugccccaggcccugcucuuugucccucugcuugcuuuuccgaugugcuucggcaaguuucccaucuacaccauuccugacaaacuggggcccuggagcccuaucgauauucaccaucucuccugucccaacaaucugguuguggaggacgaaggaugcacaaaccuuucuggcuucagcuauauggagcugaaggugggguacaucuccgccauuaaagucaauggauuuacguguaccggcgugguuacagaagcggagaccuauacaaacuucgugggguacgucaccacaaccuuuaagagaaaacacuuccggccuacgccggaugcuugccgcgccgccuauaauuggaagauggcuggagaccccagauacgaagagucucuccauaacccuuaucccgauuaccacuggcugcggaccgugaagacaaccaaagagagccugaucaucauuuccccuucuguugccgaccucgaucccuacgacaagagccugcauucccgcguguuuccgagcggcaaaugucuuggcaucacaauuucuuccaccuauugcagcacgaaucacgauuacacaaucuggaugccugaaaacgucagacuggggaccucuugugacauuuucacaaauucccggggaaagcgcgcuagcaaaggcucuaagaccugcggguuuguggaugagagaggacucuauaagucccugaaaggcgccuguaagcugaaacugugcggggugcucggacugcggcugauggacggcaccugggucgcgaugcccacaagcgaugaaacgaagugguguccucccgaccaacucguuaaccugcacgacuuccgcuccgaugagaucgagcaucuugugguggaggaacuggucagaaaacgggaagagugccucgacgcccuggaaucuauuaugaccacaaagagcguguccuuucgcagacuuagccaccuucggaaacucguucccggcuucgggaaggcuuacaccaucuucaauaagacacugauggaggccgaugcucauuauaaaucugugcgcaccuggaacgagaucauuccuuccaagggaugccugagagucggcgggcggugucacccgcacgugaauggaguuuucuucaacggcaucauucucgggcccgacggacaugugcugaucccugaaaugcagagcucucuucugcagcagcacauggagcuccuggaaagcuccgucauuccccuuaugcauccucuggccgaucccucuacgguguuuaaagacggcgaugaggcggaagacuucgucgaggugcaccucccggauguucauaagcaaaucagcggcguggaccuggggcugccuaauuggggaaaauacguccucaugaucgccggcgugcugauugcuaugauccuuacaauuuuucugaugaccugcugugggagaggaaaccgccucaaguccacccagcacagccugggcgggaucggccggaagguuucuuccacaagccagucuggaaaagugauuuccagcugggaguccuauaagucuggcggggaaaccagacuguga

SEQ ID NO: 224056 - RNA, 1575 nt, Artificial Sequence
  derived and/or modified CDS sequence (opt5) from glycoprotein__RABV__LT598541.1
auggugccccaggcccugcucuuugucccucugcuugcuuuuccgaugugcuucggcaaguuucccaucuacaccauuccugacaaacuggggcccuggagcccuaucgauauucaccaucucuccugucccaacaaucugguuguggaggacgaaggaugcacaaaccuuucuggcuucagcuauauggagcugaaggugggguacaucuccgccauuaaagucaauggauuuacguguaccggcgugguuacagaagcggagaccuauacaaacuucgugggguacgucaccacaaccuuuaagagaaaacacuuccggccuacgccggaugcuugccgcgccgccuauaauuggaagauggcuggagaccccagauacgaagagucucuccauaacccuuaucccgauuaccacuggcugcggaccgugaagacaaccaaagagagccugaucaucauuuccccuucuguugccgaccucgaucccuacgacaagagccugcauucccgcguguuuccgagcggcaaaugucuuggcaucacaauuucuuccaccuauugcagcacgaaucacgauuacacaaucuggaugccugaaaacgucagacuggggaccucuugugacauuuucacaaauucccggggaaagcgcgcuagcaaaggcucuaagaccugcggguuuguggaugagagaggacucuauaagucccugaaaggcgccuguaagcugaaacugugcggggugcucggacugcggcugauggacggcaccugggucagcaugcccacauccgaugaaacgaagugguguccucccgaccaacucguuaaccugcacgacuuccgcucugaugagaucgagcaucuugugguggaggaacuggucagaaaacgggaagagugccucgacgcgcuggaaagcauuaugaccacaaaguccgugagcuuucgcagacuuucucaccuucggaaacucguucccggcuucgggaaggccuacaccaucuucaauaagacacugauggaggcugaugcccauuauaaauccgugcgcaccuggaacgagaucauuccuagcaagggaugccugagagucggcgggcggugucacccgcacgugaauggaguuuucuucaacggcaucauucucgggcccgacggacaugugcugaucccugaaaugcagucuagccuucugcagcagcacauggagcuccuggaauccucugucauuccccuuaugcauccucuggcugaucccagcacgguguuuaaagacggcgaugaggccgaagacuucgucgaggugcaccucccggauguucauaagcaaaucuccggcguggaccuggggcugccuaauuggggaaaauacguccucaucauugcgggcgugcugaucgccaugauucuuacaaucuuucugacaaccugcugugggagaggaaaccgccccaagagcacccagcacucucucggcgggauuggccggaagguuuccagcaccucucaguccggaaaagugaucagcuccugggagucuuauaagagcggcggggaaacaagacuguga

SEQ ID NO: 224057 - RNA, 1575 nt, Artificial Sequence; identical to SEQ ID NO: 223881
  derived and/or modified CDS sequence (opt5) from glycoprotein__RABV__LT598543.1

SEQ ID NO: 224058 - RNA, 1575 nt, Artificial Sequence; identical to SEQ ID NO: 223503
  derived and/or modified CDS sequence (opt5) from glycoprotein__RABV__M13215.1

SEQ ID NO: 224059 - RNA, 1575 nt, Artificial Sequence
  derived and/or modified CDS sequence (opt5) from glycoprotein__RABV__M32751.1
auggugccccagguccuccuguucgccccucugcuuguuuuuccgcugugcuucggcaaguuucccaucuacaccauuccugacaaacucgggcccuggagcccuaucgaucugcaccaucuuuccugucccaacaaucuggugguggaggacgaaggaugcacaaaccucucuggcuucagcuauauggagcugaaggucggguacauuuccgcuaucaaagugaauggauuuacguguaccggcguugugacagaagccgagaccuauacaaacuucgucggguacgugaccacaaccuuuaagagaaaacacuuccggccuacgccggaugcgugccgcgcugccuauaauuggaagauggccggagaccccagauacgaagagucucugcauaacccuuaucccgauuaccacuggcuccggaccguuaagacaaccaaagagagccuggugauuaucuccccuucugucacagaccuugaucccuacgacaagagccugcauucccgcguguuuccgggcggcaauuguagcgggaucaccgugucuuccacguauugcagcacaaaccacgauuacaccauuuggaugccugaaaaucucagacugggaacaucuugugacaucuucacccacucccggggcaaacgcgcuagcaagggggauaaaaccugcggauuugucgacgagagaggccuuuauaagucucugaagggggccuguaaacucaagcugugcggaguucugggccuccggcugauggauggcacauggguggcuaugcaaacguccgacgaaaccaaauggugucccccugggcagcuugugaaccugcaugacuuccgcagcgaugagauugagcaccucgucgaagaggaacuggugaagaaaagagaggaaugccuugacgcccuggaguccaucaugacaaccaagucuguuagcuuucggcgccucucccaucugagaaaacuggugcccggauucggcaaggcguacacaauuuucaauaagacccucauggaggccgaugcucacuauaaaagcguccagacguggaacgaaaucauucccucuaaggggugccugcgggugggagagcgcugucacccucauguuaauggcguguuuuucaacgggaucauccuuggauccgacggccacguccugauuccggaaaugcagagcucucuccugcaacagcauauggagcuucuggaaagcuccgugaucccccucaugcacccucuggccgaucccucuacagucuuuaaagacggcgaugagguggaggacuucguugaagugcaucugccugauguccacaaacaggugagcgggguugaccucggacugcccaaguggggcaaguacgugcuuaugauugcuggggcccugaucgcgcucaugcugauuaucuuucugaugaccugcuguagacgggucaauagaccggaguccacccagagcaaccuuggaggcacagggcgcaacgugucugugccuucccaaagcggcaagguuaucucuuccugggaaagcuauaaauccggaggcgagacccggcucuga

SEQ ID NO: 224060 - RNA, 1575 nt, Artificial Sequence
  derived and/or modified CDS sequence (opt5) from glycoprotein__RABV__M81058.1
auggugccccaggcccugcuguucgucccucugcuuguuuuuccgcugugcuucggcaaguuucccaucuacaccauuccugacaaacucgggcccuggagcccuaucgauauucaccaucugagaugucccaacaaucuugugguggaggacgaaggaugcacaaaccuguccggcuucucuuauauggagcucaaggucggguacaucagcgcuauuaaagugaauggauuuacguguaccggcguugugacagaagccgagaccuauacaaacuucgucggguacgugaccacaaccuuuaagcggaaacacuuccgcccuacgccggaugcgugcagagcugccuauaauuggaagauggccggagacccccgguacgaagagucccugcauaacccuuaucccgauuaccacuggcugcgcaccguuaagacaaccaaagagucucucgugaucaucagcccuuccgucgcugaccuggaucccuacgacaagucucuucauagcagaguguuuccguccggcaauuguagcggcauuacagugucuuccaccuauugcagcacgaaccacgauuacacaaucuggaugccugaaaauccccggcuggagaccucuugugacauuuucacaaacucccgcgggaaaagagccagcaagggaucuaaaaccugcggcuuugucgaugaacgggggcucuauaagucccugaagggagcuuguaaacuuaagcugugcggcguucucgggcugcgccugauggacggaaccuggguggccaugcaaacaagcgaugagacgaaaugguguccucccgaccagcucgugaaucugcacgacuucagauccgaugagaucgaacaucuugucguggaggaacugguuaagaaacgggaggaaugccucgacgcgcuggagucuauuaugaccacaaagagcguguccuuucgcagacuuagccaccuccggaaacucguccccggcuucggcaaggccuacaccaucuucaacaagacacugauggaggcugaugcccauuauaaaucugugcgcaccuggaaugaaauuaucccuuccaaggggugccugagaguuggaggccggugucacccgcacgugaacggggucuuuuucaauggaaucauucucggccccgacgggcaugugcugaucccugagaugcagagcucucuucugcagcaacacauggaacuccuggagagcuccgucauuccccuuaugcauccucuggcugaucccucuacgguguuuaaagacggagaugaagccgaggacuucguugaggugcaccucccggauguccauaaacaggugagcggcguugaccugggccugccuaacugggggaaguacgugcuccuguccgcgggaacacuuaucgcccugaugcucauuaucuuucugaugaccugcuguagacgcgucaaccggcccaagagcaccgaaagaucucugggcgagacagggcgcaagguguccgugaccagccagucuggaaaaguuaucuccagcugggaauccuauaagucuggcggggagacacggagauga

SEQ ID NO: 224061 - RNA, 1575 nt, Artificial Sequence
  derived and/or modified CDS sequence (opt5) from glycoprotein__RABV__M81059.1
auggugccccaggcccugcuguucgucccucugcuuguuuuuccgcugugcuucggcaaguuucccaucuacaccauuccugacaaacucgggcccuggagcccuaucgauauucaccaucugagaugucccaacaaucuugugguggaggacgaaggaugcacaaaccuguccggcuucucuuauauggagcucaaggucggguacaucagcgcuauuaaagugaauggauuuacguguaccggcguugugacagaagccgagaccuauacaaacuucgucggguacgugaccacaaccuuuaagcggaaacacuuccgcccuacgccggaugcgugcagagcugccuauaauuggaagauggccggagacccccgguacgaagagucccugcauaacccuuaucccgauuaccacuggcugcgcaccguuaagacaaccaaagagucucucgugaucaucagcccuuccgucgcugaccuggaucccuacgacaagucucuucauagcagaguguuuccguccggcaauuguagcggcauuacagugucuuccaccuauugcagcacgaaccacgauuacacaaucuggaugccugaaaauccccggcuggagaccucuugugacauuuucacaaacucccgcgggaaaagagccagcaagggaucuaaaaccugcggcuuugucgaugaacgggggcucuauaagucccugaagggagcuuguaaacuuaagcugugcggcguucucgggcugcgccugauggacggaaccuggguggccaugcaaacaagcgaugagacgaaaugguguccucccgaccagcucgugaaucugcacgacuucagauccgaugagaucgaacaucuugucguggaggaacugguuaagaaacgggaggaaugccucgacgcgcuggagucuauuaugaccacaaagagcgugucccuucgcagacugagccaccuccggaaacugguccccggcuuuggcaaggccuacaccaucuucaacaagacacugauggaggcugaagcccauuauaaaucugugcagaccuggaaugagauuaucccuuccaaggggugccuccgcguuggaggcagaugucacccgcacgugaacggggucuucuuuaauggaaucauucugggccccgaugggcaugugcuuaucccugaaaugcagagcucucugcuccaacagcacauggagcugcuugaaagcuccgucauuccccugaugcauccucucgcugaccccucuacgguguucaaagauggagacgaggccgaggauuuuguugaagugcaccucccggacguccauaaacaggugagcggcguugaucugggccucccuaacugggggaaguacgugcugcuuuccgcgggaacacugaucgcccucaugcugauuaucuuccugaugaccugcugucggagagucaaccgccccaagagcaccgagcggucucuuggcgaaacagggagaaagguguccgugaccagccagucuggaaaaguuaucuccagcugggaguccuauaagucuggcggggaaacacgccgguga

SEQ ID NO: 224062 - RNA, 1575 nt, Artificial Sequence
  derived and/or modified CDS sequence (opt5) from glycoprotein__RABV__M81060.1
auggugccccaggcccuccuguucgucccucugcuuguuuuuagccugugcuucggcaaguuuccgaucuacaccauucccgacaaacucgggccuuggucccccaucgauauucaccaucugucuuguccuaacaaucuugugguggaggacgaaggaugcacaaaccugagcggcuucuccuauauggagcucaaggucggguacaucucugcuauuaaagugaauggauuuacguguaccggcguugugacagaagccgagaccuauacaaacuucgucggguacgugaccacaaccuuuaagagaaaacacuuccggcccacgccugaugcgugccgcgcugccuauaauuggaagauggccggagacccgagauacgaagagagccugcauaaccccuauccugauuaccacuggcugcggaccguuaagacaaccaaagagucccucgugaucaucucucccagcgucgcugaccuggauccuuacgacaagucccuucauagccgcguguuucccucuggcaauuguuccggcauuacagugagcucuaccuauugcuccacgaaccacgauuacacaaucuggaugccggaaaauccuagacuggagaccagcugugacauuuucacaaacucucgggggaaacgcgccuccaagggaagcaaaaccugcggcuuugucgaugaaagagggcucuauaagucccugaagggagcuuguaaacuuaagcugugcggcguucucgggcugcggcugauggacggaaccuggguggccaugcaaacaucugaugagacgaaauggugucccccugaccagcucgugaaucugcacgacuuccgcagcgaugagaucgaacaucuugucguggaggaacugguuaagaaaagagaggaaugccucgacgcgcuggaguccauuaugaccacaaagagcgugucuuuucggcgccuuucccaccugagaaaacucguccccggcuucggcaaggccuacaccaucuucaacaagacacugauggaggcugaugcccauuauaaaagcgugcggaccuggaaugaaauuauccccucuaaggggugccugcgcguuggaggcagaugucacccucacgugaacggggucuuuuucaauggaaucauucucggcccggacgggcaugugcugauccccgagaugcagagcucccuucugcagcaacacauggaacuccuggagucuagcgucauuccucuuaugcauccccuggcugauccuuccacgguguuuaaagacggagaugaaggcgaggacuucguugaggugcaccuccccgauguccauaaacaggugagcggcguugaccuggggcugccgaacuggggaaaguacgugcuccugucugccggcacacuuaucgcgcugaugcucauuaucuuucugaugaccugcugucggagagucaaccgcccuaaguccaccgaacggagccugggggagacaggaagagaagugucugugaccucccagagcggcaagaucauuuccucuugggagagcuauaaauccgggggcgaaacacgccgguga

SEQ ID NO: 224063 - RNA, 1575 nt, Artificial Sequence
  derived and/or modified CDS sequence (opt5) from glycoprotein__RABV__S72465.1
auggugccccaggcccugcuccuggucccuauccuuggcuucagcuccugcuuugggaaguucccgauuuacaccauccccgacacacugggaccuuggucucccauugauauccaccaucucagcuguccuaacaaucugguuguggaggacgaaggcugcacgaaccuuuccggguuuucuuauauggagcugaaagugggacacauuagcgcuaucaaggucaauggcuucaccuguacaggggugguuaccgaagccgagacauacaccaacuuugugggauaugucacaaccacguucaaaagaaagcauuuucggcccaccccugaugcgugccgcgcugccuacaauuggaaaauggccggcgacccgagauaugaagagucccuccacucucccuacccugauuaucauuggcugcggacagugaagaccacaaaggagagccugguuaucauuucccccagcguggcugaccucgauccuuacgacaacucucugcacucccgcgucuuccccagcggcaaauguucugggaucaccguguccagcguguacugcucuacgaaucacgauuauacagucuggaugccggaaucccuuagacugggaaccagcugugacauuuuuacaaacucccggggcaagcgcguuucuaaagggagcaagaccugcggauucguggaugagagaggccucuacaaaucccugaagggggccuguaaacuuaagcugugcggagugcggggccuccgccugauggacggcaccugggucgcuaugcaaacaagcaaugaaacgaagugguguccucccgaucagcuggugaaccuccaugaccugagaucugacgagaucgagcaccuuguuauugaggaacuggugaaaaagcgggaagagugccucgaugcccuggaauccaucauuaccacaaaaagcgucucuuuucgcagacuuagcuaucugcggaagcucgugccuggguucggaaaagcguacaccaucuuuaauaagacacugauggaggccgaggcucauuauaaguccguucgcaccuggaacgaaaucauucccucuaaaggcugccugagagucgggggacggugucacccccacgugaauggcguguucuucaacgggaucauucucggaccugacggccauguccugaucccggagaugcagagcucccuucugcagcaacacauugaacuccuggagagcucugugaucccccuuaugcauccucuggccgaucccuuuacgguuuucaaggacggcgaugaaacagaggacuuuaucgaggugcaccucccugauguccaugaacagguguccgggguugaccugggacugcccaauuggggcgaguacgugcuccugagcgcugggacccuuauugcccugaugcucaucauuuuccugaugaccugcuguagaaaagucgaucgcccggaaucuacacagcggucccugagaggaaccggccgcaacgugagcgugacaucccagucugggaaguuuaucccuagcugggaguccuauaaaucuggcggagaaacgggccuuuga

SEQ ID NO: 224064 - RNA, 1575 nt, Artificial Sequence
  derived and/or modified CDS sequence (opt5) from glycoprotein__RABV__U03764.1
auggugccccaggcccugcuguucgucccucugcuugcuuuuccgaugugcuucggcaaguuucccaucuacaccauuccugacaaacuggggcccuggagcccuaucgauauucaccaucucuccugucccaacaaucugguuguggaggacgaaggaugcacaaaccuuucuggcuucagcuauauggagcugaaggugggguacaucuccgccauuaaagucaauggauuuacguguaccggcgugguuacagaagcggagaccuauacaaacuucgugggguacgucaccacaaccuuuaagagaaaacacuuccggccuacgccggaugcuugccgcgccgccuauaauuggaagauggcuggagaccccagauacgaagagucucuccauaacccuuaucccgauuaccacuggcugcggaccgugaagacaaccaaagagagccugaucaucauuuccccuucuguugccgaccucgaucccuacgacaagagccugcauucccgcguguuuccgagcggcaaaugucuuggcaucacaauuucuuccaccuauugcagcacgaaucacgauuacacaaucuggaugccugaaaaccugagacucgggaccucuugugacauuuucacaaauucccggggaaagcgcgcuagcaaaggcucuaagaccugcggguuugucgaugagagaggacuguauaagucccuuaaaggcgccuguaagcugaaacucugcggggugcugggacugcggcucauggacggcaccuggguggcgaugcaaacaagcgaugaaacgaaguggugucccccugaccagcuggucaaccuucacgacuuccgcuccgaugagaucgagcaucugguuguggaggaacucgugaaaaagagagaagagugccuggacgcccuugaaucuauuaugaccacaaaaagcgucuccuuucggcgccugagccaccucagaaagcuggugcccggcuucgggaaggcuuacaccaucuucaauaaaacacugauggaggccgaugcucauuauaagucuguucggaccuggaacgagaucauucccuccaaaggaugccuccgcgugggcgggagaugucacccucacgucaauggagugguuuuuaacggcaucauucuggggccggacggacaugugcuuauccccgaaaugcagagcucucugcuccagcaacacauggagcugcuugaaagcuccgucauuccucugaugcauccccucgccgauccuucuacgguguucaaggacggcgaugaggcggaagacuuugucgaggugcaccuccccgauguucauaaacagaucagcggcguggaccuggggcucccgaauuggggaaaguacguccugaucauugccggcgugcuuaucgcuaugauucugacaaucuuccucaugaccugcugugggcggggaaacagaccuaaguccacccagcacagccugggcgggauuggccgcaaaguuucugccacaucccagagcggaaaggugaucucuuccugggagagcuauaaauccggcggggaaacccggcuguga

SEQ ID NO: 224065 - RNA, 1575 nt, Artificial Sequence
  derived and/or modified CDS sequence (opt5) from glycoprotein__RABV__U03765.1
auggugccccaggcccuucucuucgucccucugcuugcuuuuccgaugugcuucggcaaguuucccaucuacaccauuccugacaaacuggggcccuggagcccuaucgauauucaccaucucuccugucccaacaaucugguuguggaggacgaaggaugcacaaaccuuucuggcuucagcuauauggagcugaaggugggguacaucuccgccauuaaagucaauggauuuacguguaccggcgugguuacagaagcggagaccuauacaaacuucgugggguacgucaccacaaccuuuaagagaaaacacuuccggccuacgccggaugcuugccgcgccgccuauaauuggaagauggcuggagaccccagauacgaagagucucuccauaacccuuaucccgauuaccacuggcugcggaccgugaagacaaccaaagagagccugaucaucauuuccccuucuguugccgaccucgaucccuacgacaagagccugcauucccgcguguuuccgagcggcaaaugucuuggcaucacaauuucuuccaccuauugcagcacgaaucacgauuacacaaucuggaugccugaaaacgucagacuggggaccucuugugacauuuucacaaauucccggggaaagcgcgcuagcaaaggcucuaagaccugcggguuuguggaugagagaggacucuauaagucccugaaaggcgccuguaagcugaaacugugcggggugcucggacugcggcugauggacggcaccugggucgcgaugcccacaagcgaugaaacgaagugguguccucccgaccaacucguuaaccugcacgacuuccgcuccgaugagaucgagcaucuugugguggaggaacuggucagaaaacgggaagagugccucgacgcccuggaaucuauuaugaccacaaagagcguguccuuucgcagacuuagccaucugcggaaacucguucccggcuucgggaaggcuuacaccaucuucaauaagacacugauggaggccgaugcucacuauaaaucugugcgcaccuggaacgagaucauuccuuccaagggaugccugagagucggcgggcggugucacccgcacgugaauggaguuguguuuaacggcaucauucucgggcccgacggacauguccugaucccugaaaugcagagcucucuucugcagcagcacauggagcuccuggaaagcuccgugauuccccuuaugcauccucuggccgaucccucuacggucuucaaagacggcgaugaggcggaagacuuuguggagguucaccucccggaugugcauaagcaaaucagcggcgucgaccuggggcugccuaauuggggaaaauacgugcucacaaucgccggcguucugauugcuaugauccuuaccauuuuccugaugaccugcugugggagaggaaaccgccccaaguccacacagcacagccucggcgggaucggccggaaggugucuuccaccagccagucuggaaaagucauuuccagcugggaguccuauaagucuggcggggaaacaagacuguga

SEQ ID NO: 224066 - RNA, 1575 nt, Artificial Sequence
  derived and/or modified CDS sequence (opt5) from glycoprotein__RABV__U03766.1
auggugccccaggcccuucucuucgucccucugcuugcuuuuccgaugugcuucggcaaguuucccaucuacaccauuccugacaaacuggggcccuggagcccuaucgauauucaccaucucuccugucccaacaaucugguuguggaggacgaaggaugcacaaaccuuucuggcuucagcuauauggagcugaaggugggguacaucuccgccauuaaagucaauggauuuacguguaccggcgugguuacagaagcggagaccuauacaaacuucgugggguacgucaccacaaccuuuaagagaaaacacuuccggccuacgccggaugcuugccgcgccgccuauaauuggaagauggcuggagaccccagauacgaagagucucuccauaacccuuaucccgauuaccacuggcugcggaccgugaagacaaccaaagagagccugaucaucauuuccccuucuguugccgaccucgaucccuacgacaagagccugcauucccgcguguuuccgagcggcaaaugucuuggcaucacaauuucuuccaccuauugcagcacgaaucacgauuacacaaucuggaugccugaaaacgucagacuggggaccucuugugacauuuucacaaauucccggggaaagcgcgcuagcaaaggcucuaagaccugcggguuuguggaugagagaggacucuauaagucccugaaaggcgccuguaagcugaaacugugcggggugcucggacugcggcugauggacggcaccugggucgcgaugcccacaagcgaugaaacgaagugguguccucccgaccaacucguuaaccugcacgacuuccgcuccgaugagaucgagcaucuugugguggaggaacuggucagaaaacgggaagagugccucgacgcccuggaaucuauuaugaccacaaagagcguguccuuucgcagacuuagccaucugcggaaacucguucccggcuucgggaaggcuuacaccaucuucaauaagacacugauggaggccgaugcucacuauaaaucugugcgcaccuggaacgagaucauuccuuccaagggaugccugagagucggcgggcggugucacccgcacgugaauggaguuguguuuaacggcaucauucucgggcccgacggacauguccugaucccugaaaugcagagcucucuucugcagcagcacauggagcuccuggaaagcuccgugauuccccuuaugcauccucuggccgaucccucuacggucuucaaagacggcgaugaggcggaagacuuuguggagguucaccucccggaugugcauaagcaaaucagcggcgucgaccuggggcugccuaauuggggaaaauacgugcucaucauugccggcguucugaucgcuaugauucuuacaaucuuccugaugaccugcugugggagaggaaaccgccccaaguccacccagcacagccucggcgggauuggccggaaggugucuuccacaagccagucuggaaaagucaucuccagcugggaguccuauaagucuggcggggaaaccagacuguga

SEQ ID NO: 224067 - RNA, 1575 nt, Artificial Sequence
  derived and/or modified CDS sequence (opt5) from glycoprotein__RABV__U03767.1
auggugccccaggcccuucucuucgucccucugcuugcuuuuccgaugugcuucggcaaguuucccaucuacaccauuccugacaaacuggggcccuggagcccuaucgauauucaccaucucuccugucccaacaaucugguuguggaggacgaaggaugcacaaaccuuucuggcuucagcuauauggagcugaaggugggguacaucuccgccauuaaagucaauggauuuacguguaccggcgugguuacagaagcggagaccuauacaaacuucgugggguacgucaccacaaccuuuaagagaaaacacuuccggccuacgccggaugcuugccgcgccgccuauaauuggaagauggcuggagaccccagauacgaagagucucuccauaacccuuaucccgauuaccacuggcugcggaccgugaagacaaccaaagagagccugaucaucauuuccccuucuguugccgaccucgaucccuacgacaagagccugcauucccgcguguuuccgagcggcaaaugucuuggcaucacaauuucuuccaccuauugcagcacgaaucacgauuacacaaucuggaugccugacaacgucagacuggggaccucuugugauauuuucacaaauucccggggaaagcgcgcuagcaaaggcucuaagaccugcggguuuguggacgaaagaggacucuauaagucccugaaaggcgccuguaagcugaaacugugcggggugcucggacugcggcugauggauggcaccugggucgcgaugcccacaagcgacgagacgaagugguguccucccggccaacucguuaaccugcacgacuuccgcuccgaugaaaucgagcaucuugugguggaggaacuggucagaaaacgggaggaaugccucgacgcccuggagucuauuaugaccacaaagagcguguccuuucgcagacuuagccaucugcggaaacucguucccggguucggaaaggcuuacaccaucuucaauaagacacugauggaagccgaugcucacuauaaaucugugcgcaccuggaacgagaucauuccuuccaagggcugccugagagucgggggacggugucacccgcacgugaauggcguuguguuuaacgggaucauucucggacccgacggccauguccugaucccugagaugcagagcucucuucugcagcagcacauggaacuccuggagagcuccgugauuccccuuaugcauccucuggccgaucccucuacggucuucaaagacggcgaugaagcggaggacuuuguggaaguucaccucccggaugugcauaagcaaaucagcggggucgaccugggacugccuaauuggggcaaauacgugcucaucauugccgggguucugaucgcuaugauucuuacaaucuuccugaugaccugcuguggaagaggcaaccgccccaaguccacccagcacagccucgggggcauuggacggaaggugucuuccacaagccagucuggcaaagucaucuccagcugggaguccuauaagucugggggagagaccagacuguga

SEQ ID NO: 224068 - RNA, 1575 nt, Artificial Sequence
  derived and/or modified CDS sequence (opt5) from glycoprotein__RABV__U11736.2
auggugccccaggcccugcuccuggucccucuucuggcuuucccgaugugcuuuggcaaguuccccaucuacaccauuccugacaaacucgggcccuggagcccuaucgauauucaccaucuguccugucccaacaaucuuguuguggaggacgaaggaugcacaaaccugucuggcuuuagcuauauggagcucaaggugggguacaucuccgccauuaaagucaauggauucacguguaccggcgugguuacagaagcggagaccuauacaaacuuugugggguacgucaccacaaccuucaagagaaaacacuuucggccuacgccggaugcuugccgcgccgccuauaauuggaagauggcuggagaccccagauacgaagagucucugcauaacccuuaucccgauuaccacuggcugcggaccgugaagacaaugaaagagagccucaucaucauuuccccuucuguugccgaccuggaucccuacgacaagagccuucauucccgcguguucccgagcggcaaaugucugggcaucaccauuucuuccacauauugcagcaccaaucacgauuacacgaucuggaugccugaaaaccucagacuggggacaucuugugacauuuuuaccaauucccggggaaagcgcgcuagcaaaggcucuaagacaugcggguucgucgaugagagaggacuuuauaagucccugaaaggcgccuguaagcucaaacugugcggggugcugggacuccggcugauggacggcaccuggguggcgaugcaaaccagcgaugaaacaaaguggugucccccugaccagcuugucaaccugcacgacuuucgcuccgaugagaucgagcaucucguuguggaggaacuggugaaaaagagagaagagugccuugacgcccuggaaucuauuaugacgaccaaaagcgucuccuuccggcgccucagccaccugagaaagcuggugcccggcuuugggaaggcuuacacaaucuucaauaaaacccucauggaggccgaugcucauuauaagucuguucggacauggaacgagaucauucccuccaaaggaugccugcgcgugggcgggagaugucacccucacgucaauggagugguuuucaacggcaucauucuugggccggacggacaugugcugauccccgaaaugcagagcucucuccugcagcaacacauggagcuucuggaaagcuccgucauuccucucaugcauccccuggccgauccuucuaccguguuuaaggacggcgaugaggcggaagacuucgucgaggugcaucugcccgauguucacaaacagaucagcggcguggaccucgggcugccgaauuggggaaaguacguccuuaucauugccggcgugcugaucgcuaugauucucacgaucuuucugaugacaugcugugggcggggaaacagauccaagagcacccagcacucucugggcgggauuggccgcaaaguuuccgccaccagccagucuggaaaggugaucuccagcugggaguccuauaaaucuggcagcgaaacacggcuuuga

SEQ ID NO: 224069 - RNA, 1575 nt, Artificial Sequence
  derived and/or modified CDS sequence (opt5) from glycoprotein__RABV__U11743.2
auggugccccaggcccugcuguucgucccucugcuugcuuuuccgaugugcuucggcaaguuucccaucuacaccauuccugacaaacuggggcccuggagcccuaucgauauucaccaucucuccugucccaacaaucugguuguggaggacgaaggaugcacaaaccuuucuggcuucagcuauauggagcugaaggugggguacaucuccgccauuaaagucaauggauuuacguguaccggcgugguuacagaagcggagaccuauacaaacuucgugggguacgucaccacaaccuuuaagagaaaacacuuccggccuacgccggaugcuugccgcgccgccuauaauuggaagauggcuggagaccccagauacgaagagucucuccauaacccuuaucccgauuaccacuggcugcggaccgugaagacaaccaaagagagccugaucaucauuuccccuucuguugccgaccucgaucccuacgacaagagccugcauucccgcguguuuccgagcggcaaaugucuuggcaucacaauuucuuccaccuauugcagcacgaaucacgauuacacaaucuggaugccugaaaaccugagacucgggaccucuugugacauuuucacaaauucccggggaaagcgcgcuagcaaaggcucuaagaccugcggguuugucgaugagagaggacuguauaagucccuuaaaggcgccuguaagcugaaacucugcggggugcugggacugcggcucauggacggcaccuggguggcgaugcaaacaagcgaugaaacgaaguggugucccccugaccagcuggucaaccuucacgacuuccgcuccgaugagaucgagcaucugguuguggaggaacucgugaaaaagagagaagagugccuggacgcccuugaaucuauuaugaccacaaaaagcgucuccuuucggcgccugagccaccucagaaagcuggugcccggcuucgggaaggcuuacaccaucuucaauaaaacacugauggaggccgaugcucauuauaagucuguucggaccuggaacgagaucauucccuccaaaggaugccuccgcgugggcgggagaugucacccucacgucaauggagugguuuuuaacggcaucauucuggggccggacggacaugugcuuauccccgaaaugcagagcucucugcuccagcaacacauggagcugcuugaaagcuccgucauuccucugaugcauccccucgccgauccuucuacgguguucaaggacggcgaugaggcggaagacuuugucgaggugcaccuccccgauguucauaaacagaucagcggcguggaccuggggcucccgaauuggggaaaguacguccugaucauugccggcgugcuuaucgcuaugauucugacaaucuuccucaugaccugcugugggcggggaaacagaccuaaguccacccagcacagccugggcgggauuggccgcaaaguuucugccacaucccagagccggaaggugaucucuuccugggagagcuauaaauccggaggcgaaaccagacuguga

SEQ ID NO: 224070 - RNA, 1575 nt, Artificial Sequence; identical to SEQ ID NO: 224069
  derived and/or modified CDS sequence (opt5) from glycoprotein__RABV__U11747.2

SEQ ID NO: 224071 - RNA, 1575 nt, Artificial Sequence; identical to SEQ ID NO: 224064
  derived and/or modified CDS sequence (opt5) from glycoprotein__RABV__U11748.2

SEQ ID NO: 224072 - RNA, 1575 nt, Artificial Sequence
  derived and/or modified CDS sequence (opt5) from glycoprotein__RABV__U11750.2
auggugccccaggcccuccuguucgucccucugcuugcuuuuccgaugugcuucggcaaguuucccaucuacaccauuccugacaaacuggggcccuggagcccuaucgauauucaccaucucuccugucccaacaaucugguuguggaggacgaaggaugcacaaaccuuucuggcuucagcuauauggagcugaaggugggguacaucuccgccauuaaagucaauggauuuacguguaccggcgugguuacagaagcggagaccuauacaaacuucgugggguacgucaccacaaccuuuaagagaaaacacuuccggccuacgccggaugcuugccgcgccgccuauaauuggaagauggcuggagaccccagauacgaagagucucuccauaacccuuaucccgauuaccacuggcugcggaccgugaagacaaccaaagagagccugaucaucauuuccccuucuguugccgaccucgaucccuacgacaagagccugcauucccgcguguuuccgagcggcaaaugucuuggcaucacaauuucuuccaccuauugcagcacgaaucacgauuacacaaucuggaugccugaaaaccugagacucgggaccucuugugacauuuucacaaauucccggggaaagcgcgcuagcaaaggcucuaagaccugcggguuugucgaugagagaggacuguauaagucccuuaaaggcgccuguaagcugaaacucugcggggugcugggacugcggcucauggacggcaccuggguggcgaugcaaacaagcgaagagacgaaguggugucccccugaucagcuggucaaccuucacgacuuccgcuccgacgagaucgaacaucugguuguggaggaacucgugaaaaagagagaggaaugccuggaugcccuugagucuauuaugaccacaaaaagcgucuccuuucggcgccugagccaccucagaaagcuggugcccggcuucgggaaggcuuacaccaucuucaauaaaacacugauggaggccgacgcucauuauaagucuguucggaccuggaacgaaaucauucccuccaaaggaugccuccgcgugggcgggagaugucacccucacgucaauggagugguuuuuaacggcaucauucuggggccggauggacgggugcuuauccccgagaugcagagcucucugcuccagcaacauauggaacugcuugagagcuccgucauuccucugaugcacccccucgccgacccuucuacgguguucaaggauggcgacgaagcggaggauuuugucgaggugcaucugcccgacguucacaaacagaucagcggcguggaucuggggcucccgaauuggggaaaguacguccugaucauugccggcgugcuuaucgcuacaauucugaccaucuuccucauggccugcugugggagaggaaaccgcccuaaguccacccagcauagccugggcgggauuggccggaaaguuucugcuacaucccagagcggaaaggugaucucuuccugggaaagcuauaaauccggcggggagaccagacuguga

SEQ ID NO: 224073 - RNA, 1575 nt, Artificial Sequence
  derived and/or modified CDS sequence (opt5) from glycoprotein__RABV__U11752.2
auggugccccaggcccugcuguucgucccucugcuugcuuuuccgaugugcuucggcaaguuucccaucuacaccauuccugacaaacuggggcccuggagcccuaucgauauucaccaucucuccugucccaacaaucugguuguggaggacgaaggaugcacaaaccuuucuggcuucagcuauauggagcugaaggugggguacaucuccgccauuaaagucaauggauuuacguguaccggcgugguuacagaagcggagaccuauacaaacuucgugggguacgucaccacaaccuuuaagagaaaacacuuccggccuacgccggaugcuugccgcgccgccuauaauuggaagauggcuggagaccccagauacgaagagucucuccauaacccuuaucccgauuaccacuggcugcggaccgugaagacaaccaaagagagccugaucaucauuuccccuucuguugccgaccucgaucccuacgacaagagccugcauucccgcguguuuccgagcggcaaaugucuuggcaucacaauuucuuccaccuauugcagcacgaaucacgauuacacaaucuggaugccugaaaaccugagacucgggaccucuugugacauuuucacaaauucccggggaaagcgcgcuagcaaaggcucuaagaccugcggguuugucgaugagagaggacuguauaagucccuuaaaggcgccuguaagcugaaacucugcggggugcugggacugcggcucauggacggcaccuggguggcgaugcaaacaagcgaugaaacgaaguggugucccccugaccagcuggucaaccuucacgacuuccgcuccgaugagaucgagcaucugguuguggaggaacucgugaaaaagagagaagagugccuggacgcccuugaaucuauuaugaccacaaaaagcgucuccuuucggcgccugagccaccucagaaagcuggugcccggcuucgggaaggcuuacaccaucuucaauaaaacacugauggaggccgaugcucauuauaagucuguucggaccuggaacgagaucauucccuccaaaggaugccuccgcgugggcgggagaugucacccucacgucaauggagugguuuuuaacggcaucauucuggggccggacggacaugugcuuauccccgaaaugcagagcucucugcuccagcaacacauggagcugcuugaaagcuccgucauuccucugaugcauccccucgccgauccuucuacgguguucaaggacggcgaugaggcggaagacuuugucgaggugcaccuccccgauguucauaaacagaucagcggcguggaccuggggcucccgaauuggggaaaguacguccugaucauugccggcgugcuuaucguuaugauucugacaaucuuccucaugaccugcugugggcggggaaacagaccuaaguccacccagcacagccugggcgggauuggccgcaaagugucugcuacaucccagagcggaaaggucaucucuuccugggagagcuauaaauccggcggggaaacccggcuguga

SEQ ID NO: 224074 - RNA, 1575 nt, Artificial Sequence
  derived and/or modified CDS sequence (opt5) from glycoprotein__RABV__U11753.1
auggugccccaggcccugcuguucgucccucugcuugcuuuuccgaugugcuucggcaaguuucccaucuacaccauuccugacaaacuggggcccuggagcccuaucgauauucaccaucucuccugucccaacaaucugguuguggaggacgaaggaugcacaaaccuuucuggcuucagcuauauggagcugaaggugggguacaucuccgccauuaaagucaauggauuuacguguaccggcgugguuacagaagcggagaccuauacaaacuucgugggguacgucaccacaaccuuuaagagaaaacacuuccggccuacgccggaugcuugccgcgccgccuauaauuggaagauggcuggagaccccagauacgaagagucucuccauaacccuuaucccgauuaccacuggcugcggaccgugaagacaaccaaagagagccugaucaucauuuccccuucuguugccgaccucgaucccuacgacaagagccugcauucccgcguguuuccgagcggcaaaugucuuggcaucacaauuucuuccaccuauugcagcacgaaucacgauuacacaaucuggaugccugaaaaccugagacucgggaccucuugugacauuuucacaaauucccggggaaagcgcgcuagcaaaggcucuaagaccugcggguuugucgaugagagaggacuguauaagucccuuaaaggcgccuguaagcugaaacucugcggggugcugggacugcggcucauggacggcaccuggguggcgaugcaaacaagcgaugaaacgaaguggugucccccugaccagcuggucaaccuucacgacuuccgcuccgaugagaucgagcaucugguuguggaggaacucgugaaaaagagagaagagugccuggacgcccuugaaucuauuaugaccacaaaaagcgucuccuuucggcgccugagccaccucagaaagcuggugcccggcuucgggaaggcuuacaccaucuucaauaaaacacugauggaggccgaugcucauuauaagucuguucggaccuggaacgagaucauucccuccaaaggaugccuccgcgugggcgggaagugucacccucacgucaauggaguguuuuucaacggcaucauucuggggccggacggacauguucuuauccccgaaaugcagagcucucugcuccagcaacacauggagcugcuugaaagcuccgugauuccucugaugcauccccucgccgauccuucuacggucuuuaaagacggcgaugaggcggaagacuucguggagguccaccuccccgaugugcauaagcagaucagcggcguugaccuggggcucccgaauuggggaaaguacgugcugaucauugccggcguccuuaucgcuaugauucugacaaucuuucucaugaccugcugugggagaggaaaccggccuaaauccacccagcacagccugggcgggauuggcagaaaggugucugccacaucccagagcggaaaaguuaucucuuccugggagagcuauaaguccggcggggaaacccgccuguga

SEQ ID NO: 224075 - RNA, 1575 nt, Artificial Sequence
  derived and/or modified CDS sequence (opt5) from glycoprotein__RABV__U11754.1
auggugccccaggcccugcuguucgucccucugcuugcuuuuccgaugugcuucggcaaguuucccaucuacaccauuccugacaaacuggggcccuggagcccuaucgauauucaccaucucuccugucccaacaaucugguuguggaggacgaaggaugcacaaaccuuucuggcuucagcuaucuggagcucaaggugggguacaucuccgccauuaaagucaauggauuuacguguaccggcgugguuacagaagcggagaccuauacaaacuucgugggguacgucaccacaaccuuuaagagaaaacacuuccggccuacgccggaugcuugccgcgccgccuauaauuggaagauggcuggagaccccagauacgaagagucucugcauaacccuuaucccgauuaccacuggcugcggaccgugaagacaaccaaagagagcccuaucaucauuucccccucuguugccgaccucgauccguacgacaagagccugcauucccgcguguuuccuagcggcaaaugucuuggcaucacaauuucuuccaccuauugcagcacgaaucacgauuacacaaucuggaugcccgaaaaccugagacucgggaccucuugugacauuuucacaaauucccggggaaagcgcgcuagcaaaggcucuaaggccugcggguuugucgaugagagaggacuguauaagucccuuaaaggcgcguguaagcugaaacucugcggggugcugggacugcggcucauggacggcaccuggguggccaugcaaaccagcgaugaaacaaagugguguccucccgaccagcuggucaaccuucacgacuuccgcuccgaugagaucgagcaucugguuguggaggaacucgugaaaaagagagaagagugccuggacgcucuugaaucuauuaugacgaccaaaagcgucuccuuucggcgccugagccaccucagaaagcuggugcccggcuucgggaaggccuacacaaucuucaauaaaacccugauggaggcugaugcccauuauaagucuguucggacauggaacgagaucauuccuuccaaaggaugccuccgcgugggcgggagaugucacccgcacgucaauggaguguuuuucaacggcaucauucuggggcccgacggacauguucuuaucccugaaaugcagagcucucugcuccagcaacacauggagcugcuugaaagcuccgugauuccccugaugcauccucucgcggaucccucuaccgucuuuaaggacggcgaugaggccgaagacuucguggagguccaccucccggaugugcauaaacagaucagcggcguugaccuggggcucccuaauuggggaaaguacgugcugaucauugcuggcguccuuaucgccaugcugcucacgguguuucugaugacaugcugugggaagggaaaccggcccaaauccauucagcacagccugggcgggaucggcagaaagguuucugcuaccucccagagcggaaaagugauuucuuccugggagagcuauaaguccggcggggaaacccgccuuuga

SEQ ID NO: 224076 - RNA, 1575 nt, Artificial Sequence
  derived and/or modified CDS sequence (opt5) from glycoprotein__RABV__U11755.1
auggugccccaggcccugcuccuggucccucuucuggcuuucccgaugugcuuuggcaaguuccccaucuacaccauuccugacaaacucgggcccuggagcccuaucgauauucaccaucuguccugucccaacaaucuuguuguggaggacgaaggaugcacaaaccugucuggcuuuagcuauauggagcucaaggugggguacaucuccgccauuaaagucaauggauucacguguaccggcgugguuacagaagcggagaccuauacaaacuuugugggguacgucaccacaaccuucaagagaaaacacuuucggccuacgccggaugcuugccgcgccgccuauaauuggaagauggcuggagaccccagauacgaagagucucugcauaacccuuaucccgauuaccacuggcugcggaccgugaagacaaccaaagagagccucaucaucauuuccccuucuguugccgaccuggaucccuacgacaagagccuucauucccgcguguucccgagcggcaaaugucugggcaucacaauuucuuccaccuauugcagcacgaaucacgauuacacaaucuggaugccugaaaaccucagacuggggaccucuugugacauuuuuacaaauucccggggaaagcgcgcuagcaaaggcucuaagaccugcggguucgucgaugagagaggacuuuauaagucccugaaaggcgccuguaagcucaaacugugcggggugcugggacuccggcugauggacggcaccuggguggcgaugcaaacaagcgaugaaacgaaguggugucccccugaccagcuugucaaccugcacgacuuucgcuccgaugagaucgagcaucucguuguggaggaacuggugaaaaagagagaagagugccuugacgcccuggaaucuauuaugaccacaaaaagcgucuccuuccggcgccucagccaccugagaaagcuggugcccggcuuugggaaggcuuacaccaucuucaauaaaacacucauggaggccgaugcucauuauaagucuguucggaccuggaacgagaucauucccuccaaaggaugccugcgcgugggcgggagaugucacccucacgucaauggagugguuuucaacggcaucauucuugggccggacggacaugugcugauccccgaaaugcagagcucucuccugcagcaacacauggagcuucuggaaagcuccgucauuccucucaugcauccccuggccgauccuucuacgguguuuaaggacggcgaugaggcggaagacuucgucgaggugcaucugcccgauguucacaaacagaucagcggcguggaccucgggcugccgaauuggggaaaguacguccuuaucauugccggcgugcugaucgcuaugauucucacaaucuuucugaugaccugcugugggcggggaaacagaccuaaguccacccagcacagccugggcgggauuggccgcaaaguuucugccacaucccagagcggaaaggugaucucuuccugggagagcuauaaauccggcucugaaacccggcuuuga

SEQ ID NO: 224077 - RNA, 1575 nt, Artificial Sequence
  derived and/or modified CDS sequence (opt5) from glycoprotein__RABV__U11756.1
auggugccccaggcccugcuguucgucccucugcuugcuuuuccgaugugcuucggcaaguuucccaucuacaccauuccugacaaacuggggcccuggagcccuaucgauauucaccaucucuccugucccaacaaucugguuguggaggacgaaggaugcacaaaccuuucuggcuucagcuauauggagcugaaggugggguacaucuccgccauuaaagucaauggauuuacguguaccggcgugguuacagaagcggagaccuauacaaacuucgugggguacgucaccacaaccuuuaagagaaaacacuuccggccuacgccggaugcuugccgcguggccuauaauuggaagauggccggagaccccagauacgaagagucucuccauaacccuuaucccgauuaccacuggcugcggaccguuaagacaaccaaagagagccugaucaucauuuccccuucuguggcugaccucgaucccuacgacaagagccugcauucccgcgucuuuccgagcggcaaaugucuuggcaucacaauuucuuccaccuauugcagcacgaaucacgauuacacaaucuggaugccugaaaaccugagacucgggaccucuugugacauuuucacaaauucccggggaaagcgcgccagcaaaggcucuaagaccugcggguuuguggaugagagaggacuguauaagucccuuaaaggcgcuuguaagcugaaacucugcggggugcugggacugcggcucauggacggcaccugggucgccaugcaaacaagcgaugaaacgaaguggugucccccugaccagcugguuaaccuucacgacuuccgcuccgaugagaucgagcaucuggugguggaggaacucgucaaaaagagagaagagugccuggacgcgcuugaaucuauuaugaccacaaaaagcguguccuuucggcgccugagccaccucagaaagcugguucccggcuucgggaaggccuacaccaucuucaauaaaacacugauggaggcugaugcccauuauaagucugugcggaccuggaacgagaucauucccuccaaaggaugccuccgcgucggcgggaagugucacccucacgugaauggaguuguguuuaacggcaucauucuggggccggacggacauguccuuauccccgaaaugcagagcucucugcuccagcaacacauggagcugcuugaaagcuccgugauuccucugaugcauccccucgcugauccuucuacggucuucaaagacggcgaugaggccgaagacuuuguggagguucaccuccccgaugugcauaagcagaucagcggcgucgaccuggggcucccgaauuggggaaaguacgugcugaucauugcgggcguucuuaucgccaugauucugacaaucuuccucaugaccugcugugggagaggaaaccggccuaaauccacccagcacagccugggcgggauuggcagaaaggugucugcuacaucccagagcggaaaagucaucucuuccugggagagcuauaaguccggcggggaaacccgccuguga

SEQ ID NO: 224078 - RNA, 1575 nt, Artificial Sequence
  derived and/or modified CDS sequence (opt5) from glycoprotein__RABV__U11757.1
auggugccccaggcccugcuguucgucccucugcuugcuuuuccgaugugcuucggcaaguuucccaucuacaccauuccugacaaacuggggcccuggagcccuaucgauauucaccaucucuccugucccaacaaucugguuguggaggacgaaggaugcacaaaccuuucuggcuucagcuauauggagcugaaggugggguacaucuccgccauuaaagucaauggauuuacguguaccggcgugguuacagaagcggagaccuauacaaacuucgugggguacgucaccacaaccuuuaagagaaaacacuuccggccuacgccggaugcuugccgcgccgccuauaauuggaagauggcuggagaccccagauacgaagagucucuccauaacccuuaucccgauuaccacuggcugcggaccgugaagacaaccaaagagagccugaucaucauuuccccuucuguugccgaccucgaucccuacgacaagagccugcauucccgcguguuuccgagcggcaaaugucuuggcaucacaauuucuuccaccuauugcagcacgaaucacgauuacacaaucuggaugccugaaaaccugagacucgggaccucuugugacauuuucacaaauucccggggaaagcgcgcuagcaaaggcucuaagaccugcggguuugucgaugagagaggacuguauaagucccuuaaaggcgccuguaagcugaaacucugcggggugcugggacugcggcucauggacggcaccuggguggcgaugcaaacaagcgaugaaacgaaguggugucccccugaccagcuggucaaccuucacgacuuccgcuccgaugagaucgagcaucugguuguggaggaacucgugaaaaagagagaagagugccuggacgcccuugaaucuauuaugaccacaaaaagcgucuccuuucggcgccugagccaccucagaaagcuggugcccggcuucgggaaggcuuacaccaucuucaauaaaacacugauggaggccgaugcucauuauaagucuguucggaccuggaacgagaucauucccuccaaaggaugccuccgcgugggcgggagaugucacccucacgucaauggagugguuuuuaacggcaucauucuggggccggacggacaugugcuuauccccgaaaugcagagcucucugcuccagcaacacauggagcugcuugaaagcuccgucauuccucugaugcauccccucgccgauccuucuacgguguucaaggacggcgaugaggcggaagacuuugucgaggugcaccuccccgauguucauaaacagaucagcggcguggaccuggggcucccgaauuggggaaaguacguccugaucauugccggcgugcuuaucgcuaugauucugacaguuuuccucaugaccugcugugggcggggaaacagaccuaaguccauccagcacagccugggcgggauuggccgcaaagugucugccaccucccagagcggaaaggucaucucuuccugggagagcuauaaauccggcggggaaacacggcuguga

SEQ ID NO: 224079 - RNA, 1575 nt, Artificial Sequence; identical to SEQ ID NO: 224064
  derived and/or modified CDS sequence (opt5) from glycoprotein__RABV__U11758.1

SEQ ID NO: 224080 - RNA, 1575 nt, Artificial Sequence
  derived and/or modified CDS sequence (opt5) from glycoprotein__RABV__U27214.1
auggugcccugggcccuucucuucgucccuuuucugaucagcucccuuugcuucggcaaguuuccgauuuacaccauccccgacaaacuggggccuuggucucccauugauauccaccaucucagcuguccuaacaaucugguuguggaggacgaaggaugcaacucccuuucuggcuucagcuauauggagcugaaggugggguacauuuccgcuaucaaagucaauggauuuacauguacgggcgugguuaccgaagccgagacauauaccaacuucgugggguacgucacaaccacauuuaagagaaaacacuucugccccaugccugaugcgugucggucugcuuauaauuggaagauggccggagacccgcgcuacgaagagagccuccauaaccccuauccugauuaccacuggcugagaaccgugaagacgaccaaagagucccugguuaucauuagccccucuguggccgaccucgauccuuacgacaagucccugcauagccggaucuuucccggcggcaaaugcacagggcuuaccgucucuuccacauauuguagcaccaaucacgauuacacgauuuggaugccggaaaaggcuggacugggcacaucuugcgacaucuucaccaacuccaaagggaagcgcgccagcaagggaggcaaaacauguggguuuguggaugagagaggacucuauaagucccugaaaggcgcuugcaagcugaaacuguguggcgugucugggcuccggcugauggacggaaccugggucgccauucagacccuggaugaaacaaaguggugcagcccugaccaacucguuaaucugcacgacuuccauuccgaugagcuugagcaccuggugguggaggaacucguccgcaaaagagaagagugccuggacgcgcuugaaagcaucaugacgaccaagucuguguccuuucggcgccugagccaucucagaaagcugguucccggcuucgggaaagccuacacaauuuucaacaagacccugauggaggcugaugcccacuauaaaucugugcggacauggagcgagaucaucccuuccaagggaugucuccgcgucggcgggagaugccacccccaugugaauggaguguuuuucaacggcauuauccugggccccgacgggcacguucuuauuccugaaaugcagucuagccugcuccagcagcaugucgagcugcuugaauccagcgugaucccgcugaugcacccccucgcugauccuucugccgucuuuaaagacggagaugaggcggaagacuucguggagguucaucugcccgaugugcacaagcaaauuuccggcgucgaccuggggcucccuagcuggggaaaguacaugcugaugaucgccggcgcucuuaccacgcugaugcucuuuaucuuccugaugacauguugcaaacgggugaaucgcaccaagucuauuagacaggggccccgggagaucgaaagaaaaguuuccuuuaccccgcagaacaagaaaguggucagcuccugggagucuuauaagagcggcggagaaacaaagcuguga

SEQ ID NO: 224081 - RNA, 1575 nt, Artificial Sequence
  derived and/or modified CDS sequence (opt5) from glycoprotein__RABV__U27215.1
auggugcccugggcccuucucuucgucccuuuucugaucagcucccuuugcuucggcaaguuuccgauuuacaccauccccgacaaacuggggccuuggucucccauugauauccaccaucucagcuguccuaacaaucugguuguggaggacgaaggaugcaacucccuuucuggcuucagcuauauggagcugaaggugggguacauuuccgcuaucaaagucaauggauuuacauguacgggcgugguuaccgaagccgagacauauaccaacuucgugggguacgucacaaccacauuuaagagaaaacacuucugccccaugccugaugcgugucggucugcuuauaauuggaagauggccggagacccgcgcuacgaagagagccuccauaaccccuauccugauuaccacuggcugagaaccgugaagacgaccaaagagucccugaucauuaucagccccucuguugccgaccucgauccuuacgacaagucccugcauagccggauuuuucccggcggcaaaugcacagggcuuaccgugucuuccacauauuguagcaccaaucacgauuacacgaucuggaugccggaaaaggcuggacugggcacaucuugcgacauuuucaccaacuccaaagggaagcgcgccagcaagggaggcaaaacauguggguuugucgaugagagaggacucuauaagucccugaaaggcgcuugcaagcugaaacuguguggcgugucugggcuccggcugauggacggaaccuggguggccauccagacccuggaugaaacaaaguggugcagcccugaccaacucgucaaucugcacgacuuccauuccgaugagcuugagcaccugguuguggaggaacucgugcgcaaaagagaagagugccuggacgcgcuugaaagcauuaugacgaccaagucugucuccuuucggcgccugagccaucucagaaagcuggugcccggcuucgggaaagccuacacaaucuucaacaagacccugauggaggcugaugcccacuauaaaucuguucggacauggagcgagaucauuccuuccaagggaugucuccgcgugggcgggagaugccacccccaugucaauggaguguuuuucaacggcaucauucugggccccgacgggcacguucuuaucccugaaaugcagucuagccugcuccagcagcauguggagcugcuugaauccagcgucauuccgcugaugcacccccucgcugauccuucugccguguuuaaagacggagaugaggcggaagacuucgucgaggugcaucugcccgauguucacaagcaaaucuccggcguggaccuggggcucccuagcuggggaaaguacaugcugaugaucgccggcgcucuuaccacgcugaugcucuuuauuuuccugaugacauguugcaaacgggucaaucgcaccaagucuaucagacaggggccccgggagauugaaagaaaaguguccuuuaccccgcagaacaagaaaguugugagcuccugggagucuuauaagagcggcggagaaacaaagcuguga

SEQ ID NO: 224082 - RNA, 1575 nt, Artificial Sequence
  derived and/or modified CDS sequence (opt5) from glycoprotein__RABV__U27216.1
auggugcccugggcccuccuguucgucccuuuucugaucagcucccuuugcuucggcaaguuuccgauuuacaccauccccgacaaacuggggccuuggucucccauugauauccaccaucucagcuguccuaacaaucugguuguggaggacgaaggaugcaacucccuuucuggcuucagcuauauggagcugaaggugggguacauuuccgcuaucaaagucaauggauuuacauguacgggcgugguuaccgaagccgagacauauaccaacuucgugggguacgucacaaccacauuuaagagaaaacacuucugccccaugccugaugcgugucggucugcuuauaauuggaagauggccggagacccgcgcuacgaagagagccuccauaaccccuauccugauuaccacuggcugagaaccgugaagacgaccaaagagucccugaucauuaucagccccucuguugccgaccucgauccuuacgaccggucccugcauagccgcauuuuucccggcggcaagugcacagggcuuaccgugucuuccacauauuguagcaccaaucacgauuacacgaucuggaugccggaaaaagcuggacugggcacaucuugcgacauuuucaccaacuccaaggggaaaagagccagcaagggaggcaagacauguggguuugucgaugagcggggacucuauaaaucccugaagggcgcuugcaaacuuaagcuguguggcgugucugggcuccgccugauggacggaaccuggguggccauccagacccuggaugaaacaaaauggugcagcccugaccaacucgucaaucugcacgacuuccauuccgaugagcuugagcaccugguuguggaggaacucgugagaaagcgggaagagugccuggacgcgcuugaaagcauuaugacgaccaaaucugucuccuuucgcagacugagccaucuccggaagcuggugcccggcuucgggaaggccuacacaaucuucaacaaaacccugauggaggcugaugcccacuauaagucuguucgcacauggagcgagaucauuccuuccaaaggaugucucagagugggcgggcggugccacccccaugucaauggaguguuuuucaacggcaucauucugggccccgacgggcacguucuuaucccugaaaugcagucuagccugcuccagcagcauguggagcugcuugaauccagcgucauuccgcugaugcacccccucgcugauccuucugccguguuuaaggacggagaugaggcggaagacuucgucgaggugcaucugcccgauguucacaaacaaaucuccggcguggaccuggggcucccuagcuggggaaaguacaugcugaugaucgccggcgcucuuaccacgcugaugcucuuuauuuuccugaugacauguugcaagcgcgucaauagaaccgagucuauccggcaggggcccagagaacuggaguccaaagugagcguuaccccgcagaacaagaaagugauuuccucuugggaaagcuauaaguccggcggagagacaaaacuuuga

SEQ ID NO: 224083 - RNA, 1575 nt, Artificial Sequence
  derived and/or modified CDS sequence (opt5) from glycoprotein__RABV__U27217.1
auggugcccugggcccuucucuucgucccuuuucugaucagcucccuuugcuucggcaaguuuccgauuuacaccauccccgacaaacuggggccuuggucucccauugauauccaccaucucagcuguccuaacaaucugguuguggaggacgaaggaugcaacucccuuucuggcuucagcuauauggagcugaaggugggguacauuuccgcuaucaaagucaauggauuuacauguacgggcgugguuaccgaagccgagacauauaccaacuucgugggguacgucacaaccacauuuaagagaaaacacuucugccccaugccugaugcgugucggucugcuuauaauuggaagauggccggagacccgcgcuacgaagagagccuccauaaccccuauccugauuaccacuggcugagaaccgugaagacgaccaaagagucccugaucauuaucagccccucuguugccgaacucgacccuuacgauaagucccugcauagccggauuuuucccggcggcaaaugcacagggcuuaccgugucuuccacauauuguagcaccaaucacgacuacacgaucuggaugccggagaaggcuggacugggcacaucuugcgauauuuucaccaacuccaaagggaagcgcgccagcaagggaggcaaaacauguggguuugucgacgaaagaggacucuauaagucccugaaaggcgcuugcaagcugaaacuguguggcgugucugggcuccggcugauggauggaaccuggguggccauccagacccuggacgagacaaaguggugcagcccugaucaacucgucaaucugcacgacuuccauuccgacgagcuugaacaccugguuguggaggaacucgugcgcaaaagagaggaaugccuggaugcgcuugagagcauuaugacgaccaagucugucuccuuucggcgccugagccaucucagaaagcuggugcccggcuucgggaaagccuacacaaucuucaacaagacccugauggaggcugacgcccacuauaaaucuguucggacauggagcgaaaucauuccuuccaagggaugucuccgcgugggcgggagaugccacccccaugucaauggaguguuuuucaacggcaucauucugggccccgaugggcacguucuuaucccugagaugcagucuagccugcuccagcagcauguggaacugcuugaguccagcgucauuccgcugaugcacccccucgcugacccuucugccguguuuaaagauggagacgaagcggaggauuucgucgaggugcaucugcccgacguucacaagcaaaucuccggcguggaucuggggcucccuagcuggggaaaguacaugcugaugaucgccggcgcucuuaccacgcugaugcucuuuauuuuccugaugacauguugcaaacgggucaaucgcaccaagucuaucagacaggggccccgggaaauugagagaaaaguguccuuuaccccgcagaacaagaaaguugugagcuccugggaaucuuauaagagcggcggagagacaaagcuguga

SEQ ID NO: 224084 - RNA, 1575 nt, Artificial Sequence
  derived and/or modified CDS sequence (opt5) from glycoprotein__RABV__X71879.1
auggugccccaggcccugcuguucgucccucugcuuguuuuuccgcugugcuucggcaaguuucccaucuacaccauuccugacaaacucgggcccuggagcccuaucgauauucaccaucuguccugucccaacaaucuugugguggaggacgaaggaugcacaaaccugucuggcuucagcuauauggagcucaaggucggguacauccuggcuauuaaaaugaauggauuuacguguaccggcgugguuacagaagccgagaacuauaccaauuucgugggguacgucacaaccacauuuaagagaaaacaccuccggccuaccccggaugcgugccgcgcugccuauaacuggaagauggccggagaccccagauacgaagagucccuccauaauccuuaucccgauuacucuuggcugcggacggugaagaccacaaaagagagccuuguuaucaucuccccuucuguggcugaccuggaucccuacgaccgcagccuccacuccagagucuucccgagcggcaaguguucuggcguggccguguccagcaccuauugcucuacaaaccaugauuacaccauuuggaugccugaaaauccccggcuggggaaauccugugacaucuuuacgaacagccgcggaaagagagcuucuaaaggcuccgagacaugcggguucgucgaugaacggggacuuuauaagagccugaagggcgccuguaaacucaagcugugcgggguucugggacuccgccugauggacggcaccuggguggcgaugcaaacauccaaugagaccaaaugguguccucccgaucagcuugugaaccugcacgacuuuagaucugacgagauugaacaccucgucguggaggaacugguucggaagcgcgaggaaugccuugaugcccuggagagcaucaugaccacaaaauccgugagcuucagacggcucucucaucugcgcaagcugguccccggcuuugggaaggcuuacacgauuuucaauaaaacccucauggaggccgacgcucacuauaaguccgugagaacauggaacgaaauccugccuagcaaaggaugccuucggguuggcgggagaugucauccgcacgugaauggagucuucuuuaacggcauuauccuggggcccgauggaaacgugcucaucccugagaugcagucuagccugcuucagcaacacauggaacugcucgaguccucugucauuccccuggugcauccucuggccgaccccagcaccguuuucaaggauggcgacgaagcggaggauuuuguggagguccaccucccggacgugcauaaucagguuuccggcguggaucuggggcuuccuaacuggggaaaauacguccugcucagcgccggcgcucugacagcccugaugcuuaucauuuuccucaugaccugcugucgccgggugaauagaucugaacccacgcagcacaaccugcgcgggacaggacgggagguguccguuaccccucagaccuggaagaucauuagcucuugggaaucccauaaaagcggcggggagacaagacuguga

SEQ ID NO: 224085 - RNA, 1698 nt, Artificial Sequence
  derived and/or modified CDS sequence (opt1) from hemagglutinin__InfluenzaA__ACA28844/m1
augaaggugaagcugcucguccugcugugcaccuucaccgccacguacgccgacaccaucugcaucggcuaccacgcgaacaacagcaccgacaccguggacacggugcucgagaagaacgucaccgugacccacuccgugaaccugcuggagaacagccacaacgggaagcucugccugcugaagggcaucgccccccuccagcuggggaacugcuccgucgccggcuggauccuggggaacccggagugcgagcuccugaucagcaaggaguccuggagcuacaucguggagaagcccaaccccgagaacggcaccugcuaccccggccacuucgccgacuacgaggagcugcgggagcagcucuccagcguguccagcuucgagcgcuucgagaucuucccgaaggaguccagcuggcccaaccacacggucaccgggguguccgccagcugcucccacaacggcgagagcuccuucuaccggaaccugcuguggcucaccgggaagaacggccuguaccccaaccugagcaaguccuacgcgaacaacaaggagaaggaggugcucguccuguggggcgugcaccacccgccgaacaucgggaaccagaaggcccuguaccacaccgagaacgccuacgugagcgucgugagcucccacuacagccgcaaguucacgcccgagaucgccaagcggcccaaggugcgcgaccaggagggccggaucaacuacuacuggacccuccuggagcccggggacaccaucaucuucgaggcgaacggcaaccugaucgccccgcgcuacgccuucgcccucucccggggguucggcagcggcaucaucaacuccaacgccccgauggacaagugcgacgcgaagugccagaccccccagggggccaucaacagcucccugcccuuccagaacguccacccggugacgaucggcgagugccccaaguacgugcgcagcgccaagcugcggauggucaccgggcuccgcaacauccccuccauccagagccggggccuguucggggccaucgccggcuucaucgagggcggguggaccggcaugguggacgggugguacggcuaccaccaccagaacgagcagggguccggcuacgcggccgaccagaagagcacccagaacgccaucaacggcaucacgaacaaggugaacuccgucaucgagaagaugaacacccaguucaccgccguggggaaggaguucaacaagcuggagcgccggauggagaaccucaacaagaaggucgacgacggcuucaucgacaucuggaccuacaacgccgagcugcuggugcuccuggagaacgagcgcacgcuggacuuccacgacagcaacgugaagaaccucuacgagaaggucaagucccagcugaagaacaacgcgaaggagaucgggaacggcugcuucgaguucuaccacaagugcaacgacgagugcauggagagcgugaagaacgggaccuacgacuaccccaaguacuccgaggagagcaagcugaaccgggagaagaucgacggcgugaagcucgaguccaugggcgucuaccagauccuggccaucuacagcaccguggccagcucccuggugcuccuggucagccugggggccaucuccuucuggaugugcagcaacggcucccugcagugccgcaucugcaucuga

SEQ ID NO: 224086 - RNA, 1701 nt, Artificial Sequence
  derived and/or modified CDS sequence (opt1) from hemagglutinin__InfluenzaA__ACV82259
augaaggccauccuggugguccuccuguacaccuucgccaccgcgaacgccgacacgcugugcaucggcuaccacgccaacaacagcaccgacaccguggacaccgugcucgagaagaacgucacggugacccacuccgugaaccugcuggaggacaagcacaacgggaagcucugcaagcugcggggcgucgccccgcugcaccucgggaagugcaacaucgccggcuggauccuggggaacccggagugcgagagccuguccaccgcgagcuccuggagcuacaucguggagacccccuccagcgacaacggcacgugcuaccccggcgacuucaucgacuacgaggagcuccgcgagcagcuguccagcguguccagcuucgagcgguucgagaucuuccccaagaccuccagcuggccgaaccacgacuccgacaagggggucaccgccgccugcccccacgccggcgcgaagagcuucuacaagaaccugaucuggcucgugaagaaggggaacuccuaccccaagcugagcaaguccuacaucaacgacaagggcaaggaggugcugguccucugggggauccaccaccccagcaccagcgccgaccagcagucccuguaccagaacgccgacgccuacguguucgugggcagcucccgcuacagcaagacguucaagccggagaucgccauccggcccaagguccgcgaccgggagggccgcaugaacuacuacuggacccugguggagcccggggacaagaucaccuucgaggcgaccggcaaccucguggucccccgguacgccuucgccauggagcgcaacgccggguccggcaucaucaucagcgacacgccggugcacgacugcaacaccaccugccagacccccaagggcgccaucaacacgucccugcccuuccagaacauccaccccaucaccaucgggaagugcccgaaguacgugaagagcaccaagcugcggcucgcgaccggccugcgcaacauccccuccauccagagccgggggcuguucggcgccaucgccggguucaucgagggcggcuggacggggauggucgacggcugguacggguaccaccaccagaacgagcagggcagcggguacgccgccgaccucaaguccacgcagaacgcgaucgacgagaucaccaacaaggugaacagcgucaucgagaagaugaacacccaguucaccgccgugggcaaggaguucaaccaccuggagaagcggaucgagaaccugaacaagaaggucgacgacggcuuccucgacaucuggacguacaacgccgagcugcuggugcuccuggagaacgagcgcacccuggacuaccacgacuccaacgugaagaaccucuacgagaagguccggagccagcugaagaacaacgccaaggagaucgggaacggcugcuucgaguucuaccacaagugcgacaacaccugcauggaguccgugaagaacgggaccuacgacuaccccaaguacagcgaggaggccaagcugaaccgcgaggagaucgacggcgugaagcucgaguccacgcggaucuaccagauccuggcgaucuacagcaccgucgccagcucccuggugcucguggucagccugggggccaucuccuucuggaugugcagcaacggcucccugcagugccgcaucugcaucuga

SEQ ID NO: 224087 - RNA, 1701 nt, Artificial Sequence
  derived and/or modified CDS sequence (opt1) from hemagglutinin__InfluenzaA__ACV82259/m2
augaaggccauccuggugguccuccuguacaccuucgccaccgcgaacgccgacacgcugugcaucggcuaccacgccaacaacagcaccgacaccguggacaccgugcucgagaagaacgucacggugacccacuccgugaaccugcuggaggacaagcacaacgggaagcucugcaagcugcggggcgucgccccgcugcaccucgggaagugcaacaucgccggcuggauccuggggaacccggagugcgagagccuguccaccgcgagcuccuggagcuacaucguggagacccccagcuccgacaacggcacgugcuaccccggcgacuucaucgacuacgaggagcuccgcgagcagcugagcuccgugagcuccuucgagcgguucgagaucuuccccaagaccagcuccuggcccaaccacgacagcgacaagggggucaccgccgccugcccgcacgccggcgcgaaguccuucuacaagaaccugaucuggcucgugaagaaggggaacagcuaccccaagcuguccaagagcuacaucaacgacaagggcaaggaggugcugguccucugggggauccaccaccccagcaccuccgccgaccagcagagccuguaccagaacgccgacgccuacguguucgugggcuccagccgcuacuccaagacguucaagcccgagaucgccauccggccgaagguccgcgaccgggagggccggaugaacuacuacuggacgcugguggagcccggggacaagaucaccuucgaggcgaccggcaaccucguggucccccgcuacgccuucgccauggagcggaacgccgggagcggcaucaucaucuccgacacccccgugcacgacugcaacacgaccugccagaccccgaagggcgccaucaacaccagccugcccuuccagaacauccaccccaucacgaucgggaagugccccaaguacgugaaguccaccaagcugcgccucgcgaccggccugcggaacaucccgagcauccagucccgcgggcuguucggcgccaucgccggguucaucgagggcggcuggaccgggaugguggacggcugguacggguaccaccaccagaacgagcagggcagcggguacgccgccgaccucaaguccacgcagaacgcgaucgacgagaucaccaacaaggugaacagcgucaucgagaagaugaacacccaguucaccgccgugggcaaggaguucaaccaccuggagaagcggaucgagaaccugaacaagaaggucgacgacggcuuccucgacaucuggacguacaacgccgagcugcuggugcuccuggagaacgagcgcacccuggacuaccacgacuccaacgugaagaaccucuacgagaagguccggagccagcugaagaacaacgccaaggagaucgggaacggcugcuucgaguucuaccacaagugcgacaacaccugcauggaguccgugaagaacgggaccuacgacuaccccaaguacagcgaggaggccaagcugaaccgcgaggagaucgacggcgugaagcucgaguccacgcggaucuaccagauccuggcgaucuacagcaccgucgccagcucccuggugcucguggucagccugggggccaucuccuucuggaugugcagcaacggcucccugcagugccgcaucugcaucuga

SEQ ID NO: 224088 - RNA, 1701 nt, Artificial Sequence
  derived and/or modified CDS sequence (opt1) from hemagglutinin__InfluenzaA__ACP41953
augaaggccauccuggugguccuccuguacaccuucgccaccgcgaacgccgacacgcugugcaucggcuaccacgccaacaacagcaccgacaccguggacaccgugcucgagaagaacgucacggugacccacuccgugaaccugcuggaggacaagcacaacgggaagcucugcaagcugcggggcgucgccccgcugcaccucgggaagugcaacaucgccggcuggauccuggggaacccggagugcgagagccuguccaccgcgagcuccuggagcuacaucguggagacccccuccagcgacaacggcacgugcuaccccggcgacuucaucgacuacgaggagcuccgcgagcagcuguccagcguguccagcuucgagcgguucgagaucuuccccaagaccuccagcuggccgaaccacgacuccaacaagggggucaccgccgccugcccccacgccggcgcgaagagcuucuacaagaaccugaucuggcucgugaagaaggggaacuccuaccccaagcugagcaaguccuacaucaacgacaagggcaaggaggugcugguccucugggggauccaccaccccagcaccagcgccgaccagcagucccuguaccagaacgccgacgccuacguguucgugggcagcucccgcuacagcaagaaguucaagccggagaucgccauccggcccaagguccgcgaccaggagggccgcaugaacuacuacuggacccugguggagcccggggacaagaucaccuucgaggcgaccggcaaccucguggucccccgguacgccuucgccauggagcgcaacgccggguccggcaucaucaucagcgacacgccggugcacgacugcaacaccaccugccagacccccaagggcgccaucaacacgucccugcccuuccagaacauccaccccaucaccaucgggaagugcccgaaguacgugaagagcaccaagcugcggcucgcgaccggccugcgcaacauccccuccauccagagccgggggcuguucggcgccaucgccggguucaucgagggcggcuggacggggauggucgacggcugguacggguaccaccaccagaacgagcagggcagcggguacgccgccgaccucaaguccacgcagaacgcgaucgacgagaucaccaacaaggugaacagcgucaucgagaagaugaacacccaguucaccgccgugggcaaggaguucaaccaccuggagaagcggaucgagaaccugaacaagaaggucgacgacggcuuccucgacaucuggacguacaacgccgagcugcuggugcuccuggagaacgagcgcacccuggacuaccacgacuccaacgugaagaaccucuacgagaagguccggagccagcugaagaacaacgccaaggagaucgggaacggcugcuucgaguucuaccacaagugcgacaacaccugcauggaguccgugaagaacgggaccuacgacuaccccaaguacagcgaggaggccaagcugaaccgcgaggagaucgacggcgugaagcucgaguccacgcggaucuaccagauccuggcgaucuacagcaccgucgccagcucccuggugcucguggucagccugggggccaucuccuucuggaugugcagcaacggcucccugcagugccgcaucugcaucuga

SEQ ID NO: 224089 - RNA, 1701 nt, Artificial Sequence
  derived and/or modified CDS sequence (opt1) from hemagglutinin__InfluenzaA__AFM72832
augaaggccauccuggugguccuccuguacaccuucgccaccgcgaacgccgacacgcugugcaucggcuaccacgccaacaacagcaccgacaccguggacaccgugcucgagaagaacgucacggugacccacuccgugaaccugcuggaggacaagcacaacgggaagcucugcaagcugcggggcgucgccccgcugcaccucgggaagugcaacaucgccggcuggauccuggggaacccggagugcgagagccuguccaccgcgagcuccuggagcuacaucguggagacccccuccagcgacaacggcacgugcuaccccggcgacuucaucgacuacgaggagcuccgcgagcagcuguccagcguguccagcuucgagcgguucgagaucuuccccaagaccuccagcuggccgaaccacgacuccaacaagggggucaccgccgccugcccccacgccggcgcgaagagcuucuacaagaaccugaucuggcucgugaagaaggggaacuccuaccccaagcugagcaaguccuacaucaacgacaagggcaaggaggugcugguccucugggggauccaccaccccagcaccagcgccgaccagcagucccuguaccagaacgccgacgccuacguguucgugggcagcucccgcuacagcaagaaguucaagccggagaucgccauccggcccaagguccgcgaccgggagggccgcaugaacuacuacuggacccugguggagcccggggacaagaucaccuucgaggcgaccggcaaccucguggucccccgguacgccuucgccauggagcgcaacgccggguccggcaucaucaucagcgacacgccggugcacgacugcaacaccaccugccagacccccaagggcgccaucaacacgucccugcccuuccagaacauccaccccaucaccaucgggaagugcccgaaguacgugaagagcaccaagcugcggcucgcgaccggccugcgcaacauccccuccauccagagccgggggcuguucggcgccaucgccggguucaucgagggcggcuggacggggauggucgacggcugguacggguaccaccaccagaacgagcagggcagcggguacgccgccgaccucaaguccacgcagaacgcgaucgacgagaucaccaacaaggugaacagcgucaucgagaagaugaacacccaguucaccgccgugggcaaggaguucaaccaccuggagaagcggaucgagaaccugaacaagaaggucgacgacggcuuccucgacaucuggacguacaacgccgagcugcuggugcuccuggagaacgagcgcacccuggacuaccacgacuccaacgugaagaaccucuacgagaagguccggagccagcugaagaacaacgccaaggagaucgggaacggcugcuucgaguucuaccacaagugcgacaacaccugcauggaguccgugaagaacgggaccuacgacuaccccaaguacagcgaggaggccaagcugaaccgcgaggagaucgacggcgugaagcucgaguccacgcggaucuaccagauccuggcgaucuacagcaccgucgccagcucccuggugcucguggucagccugggggccaucuccuucuggaugugcagcaacggcucccugcagugccgcaucugcaucuga

SEQ ID NO: 224090 - RNA, 1701 nt, Artificial Sequence
  derived and/or modified CDS sequence (opt1) from hemagglutinin__InfluenzaA__ACQ45338
augaaggccauccuggugguccuccuguacaccuucgccaccgcgaacgccgacacgcugugcaucggcuaccacgccaacaacagcaccgacaccguggacaccgugcucgagaagaacgucacggugacccacuccgugaaccugcuggaggacaagcacaacgggaagcucugcaagcugcggggcgucgccccgcugcaccucgggaagugcaacaucgccggcuggauccuggggaacccggagugcgagagccuguccaccgcgagcuccuggagcuacaucguggagaccuccagcuccgacaacggcacgugcuaccccggcgacuucaucgacuacgaggagcuccgcgagcagcugagcuccgugagcuccuucgagcgguucgagaucuuccccaagaccagcuccuggcccaaccacgacagcaacaagggggucaccgccgccugcccgcacgccggcgcgaaguccuucuacaagaaccugaucuggcucgugaagaaggggaacagcuaccccaagcuguccaagagcuacaucaacgacaagggcaaggaggugcugguccucugggggauccaccaccccagcaccuccgccgaccagcagagccuguaccagaacgccgacgccuacguguucgugggcuccagccgcuacuccaagaaguucaagcccgagaucgccauccggccgaagguccgcgaccaggagggccggaugaacuacuacuggacgcugguggagcccggggacaagaucaccuucgaggcgaccggcaaccucguggucccccgcuacgccuucgccauggagcggaacgccgggagcggcaucaucaucuccgacacccccgugcacgacugcaacacgaccugccagaccccgaagggcgccaucaacaccagccugcccuuccagaacauccaccccaucacgaucgggaagugccccaaguacgugaaguccaccaagcugcgccucgcgaccggccugcggaacgucccgagcauccagucccgcgggcuguucggcgccaucgccggguucaucgagggcggcuggaccgggaugguggacggcugguacggguaccaccaccagaacgagcagggcagcggguacgccgccgaccucaaguccacgcagaacgcgaucgacgagaucaccaacaaggugaacagcgucaucgagaagaugaacacccaguucaccgccgugggcaaggaguucaaccaccuggagaagcggaucgagaaccugaacaagaaggucgacgacggcuuccucgacaucuggacguacaacgccgagcugcuggugcuccuggagaacgagcgcacccuggacuaccacgacuccaacgugaagaaccucuacgagaagguccggagccagcugaagaacaacgccaaggagaucgggaacggcugcuucgaguucuaccacaagugcgacaacaccugcauggaguccgugaagaacgggaccuacgacuaccccaaguacagcgaggaggccaagcugaaccgcgaggagaucgacggcgugaagcucgaguccacgcggaucuaccagauccuggcgaucuacagcaccgucgccagcucccuggugcucguggucagccugggggccaucuccuucuggaugugcagcaacggcucccugcagugccgcaucugcaucuga

SEQ ID NO: 224091 - RNA, 1701 nt, Artificial Sequence
  derived and/or modified CDS sequence (opt1) from hemagglutinin__InfluenzaA__ACQ45338/m2
augaaggccauccuggugguccuccuguacaccuucgccaccgcgaacgccgacacgcugugcaucggcuaccacgccaacaacagcaccgacaccguggacaccgugcucgagaagaacgucacggugacccacuccgugaaccugcuggaggacaagcacaacgggaagcucugcaagcugcggggcgucgccccgcugcaccucgggaagugcaacaucgccggcuggauccuggggaacccggagugcgagagccuguccaccgcgagcuccuggagcuacaucguggagaccuccuccagcgacaacggcacgugcuaccccggcgacuucaucgacuacgaggagcuccgcgagcagcuguccagcguguccagcuucgagcgguucgagaucuuccccaagaccuccagcuggccgaaccacgacuccaacaagggggucaccgccgccugcccccacgccggcgcgaagagcuucuacaagaaccugaucuggcucgugaagaaggggaacuccuaccccaagcugagcaaguccuacaucaacgacaagggcaaggaggugcugguccucugggggauccaccaccccagcaccagcgccgaccagcagucccuguaccagaacgccgacgccuacguguucgugggcagcucccgcuacagcaagaaguucaagccggagaucgccauccggcccaagguccgcgaccaggagggccgcaugaacuacuacuggacccugguggagcccggggacaagaucaccuucgaggcgaccggcaaccucguggucccccgguacgccuucgccauggagcgcaacgccggguccggcaucaucaucagcgacacgccggugcacgacugcaacaccaccugccagacccccaagggcgccaucaacacgucccugcccuuccagaacauccaccccaucaccaucgggaagugcccgaaguacgugaagagcaccaagcugcggcucgcgaccggccugcgcaacguccccuccauccagagccgggggcuguucggcgccaucgccggguucaucgagggcggcuggacggggauggucgacggcugguacggguaccaccaccagaacgagcagggcagcggguacgccgccgaccucaaguccacgcagaacgcgaucgacgagaucaccaacaaggugaacagcgucaucgagaagaugaacacccaguucaccgccgugggcaaggaguucaaccaccuggagaagcggaucgagaaccugaacaagaaggucgacgacggcuuccucgacaucuggacguacaacgccgagcugcuggugcuccuggagaacgagcgcacccuggacuaccacgacuccaacgugaagaaccucuacgagaagguccggagccagcugaagaacaacgccaaggagaucgggaacggcugcuucgaguucuaccacaagugcgacaacaccugcauggaguccgugaagaacgggaccuacgacuaccccaaguacagcgaggaggccaagcugaaccgcgaggagaucgacggcgugaagcucgaguccacgcggaucuaccagauccuggcgaucuacagcaccgucgccagcucccuggugcucguggucagccugggggccaucuccuucuggaugugcagcaacggcucccugcagugccgcaucugcaucuga

SEQ ID NO: 224092 - RNA, 1701 nt, Artificial Sequence
  derived and/or modified CDS sequence (opt1) from hemagglutinin__InfluenzaA__ACU79871/m1
augaagaccaucaucgcccugagcuacaucuucugccucgcccugggccaggaccugcccgggaacgacaacuccaccgcgacgcucugccugggccaccacgccgugccgaacgggacccuggucaagaccaucaccgacgaccagaucgaggugacgaacgccaccgagcucgugcagagcuccagcaccggcaagaucugcaacaacccccaccggauccuggacgggaucgacugcacccugaucgacgcccuccugggcgacccccacugcgacgucuuccagaacgagacgugggaccuguucguggagcgcuccaaggccuucagcaacugcuaccccuacgacgugccggacuacgcgucccuccggagccuggucgccuccagcggcacccuggaguucaucaccgagggguucaccuggacgggcgugacccagaacgggggcuccaacgccugcaagcgcgggcccggcagcggcuucuucucccggcucaacuggcugaccaagagcggguccaccuaccccgugcugaacgucacgaugcccaacaacgacaacuucgacaagcucuacaucuggggcgugcaccacccgagcaccaaccaggagcagaccucccuguacgugcaggccagcgggcgcgucaccguguccacgcggcgcagccagcagaccaucauccccaacaucgagagccggcccugggugcgcggccaguccagccggaucuccaucuacuggaccaucgucaagcccggcgacgugcuggugaucaacagcaacgggaaccucaucgcgccgcgcggcuacuucaagaugcggaccgggaaguccagcaucaugcgcuccgacgcccccaucgacacgugcaucagcgagugcaucacccccaacggcuccauccccaacgacaagccguuccagaacgucaacaagaucaccuacggggccugccccaaguacgugaagcagaacacccugaagcuggccacgggcaugcggaacgugcccgagaagcagacccgcggccucuucggggccaucgcgggcuucaucgagaacgggugggagggcaugaucgacgggugguacggcuuccggcaccagaacagcgagggcaccgggcaggccgccgaccugaaguccacccaggccgccaucgaccagaucaacggcaaggucaaccgcaucaucgagaagacgaacgagaaguuccaccagaucgagaaggaguucagcgagguggaggggcggauccaggaccuggagaaguacguggaggacaccaagaucgaccucugguccuacaacgcggagcugcuggucgcccucgagaaccagcacaccaucgaccugaccgacagcgagaugaacaagcuguucgagaagacgcgccggcagcuccgcgagaacgccgaggacaugggcaacgggugcuucaagaucuaccacaagugcgacaacgccugcaucgaguccauccggagcggcaccuacgaccacgacguguaccgggacgaggcccugaacaaccgcuuccagaucaagggcgucgagcugaaguccggguacaaggacuggauccucuggaucagcuucgcgaucuccugcuuccugcugugcguggugcuccugggcuucaucaugugggccugccagcgggggaacauccgcugcaacaucugcaucuga

SEQ ID NO: 224093 - RNA, 1701 nt, Artificial Sequence
  derived and/or modified CDS sequence (opt1) from hemagglutinin__InfluenzaA__EPI643118
augaagaccaucaucgcccugagcuacauccucugccugguguucgcccagaagauccccggcaacgacaacuccaccgcgacgcugugccucgggcaccacgccgucccgaacggcaccaucgugaagaccaucaccaacgaccgcaucgaggugacgaacgccaccgagcugguccagaacagcuccaucggggagaucugcgacagcccccaccagauccuggacggcgagaacugcacccucaucgacgcccugcugggggacccccagugcgacggcuuccagaacaagaagugggaccucuucguggagcgguccaaggccuacagcaacugcuaccccuacgacgugccggacuacgcgucccugcgcagccuggucgccuccagcggcacccucgaguucaacaacgaguccuucaacuggacgggggugacccagaacggcaccagcuccgccugcauccggcgcagcuccagcuccuucuucagccggcugaacuggcugacccaccucaacuacaaguaccccgcccugaacgugacgaugcccaacaacgagcaguucgacaagcuguacaucuggggcguccaccaccccgggaccgacaaggaccagaucuucccguacgcgcaguccagcgggcgcaucaucgugagcaccaagcggucccagcaggccgugauccccaacaucggcagccgcccccggauccgcgacaucccgucccggaucagcaucuacuggaccaucgucaagccgggcgacauccuccugaucaacuccacggggaaccugaucgccccgcgcggcuacuucaagcuccggagcgggaaguccagcaucaugcgcuccgacgcccccaucggcaagugcaagagcgagugcaucacccccaacggcuccaucccgaacgacaagcccuuccagaacgugaaccggaucaccuacggggccugcccccgcuacgugaagcacagcacccugaagcuggcgacgggcaugcggaacguccccgagaagcagacccgcgggaucuucggcgccaucgccggguucaucgagaacggcugggagggcaugguggacgggugguacggcuuccggcaccagaacuccgaggggcgcggccaggccgccgaccucaagagcacccaggcggccaucgaccagaucaacgggaagcugaaccggcugaucggcaagaccaacgagaaguuccaccagaucgagaaggaguucuccgagguggagggccgcauccaggaccucgagaaguacgucgaggacacgaagaucgaccuguggagcuacaacgccgagcugcucguggcccuggagaaccagcacaccaucgaccugaccgacuccgagaugaacaagcucuucgagaagaccaagaagcagcugcgcgagaacgccgaggacauggggaacggcugcuucaagaucuaccacaagugcgacaacgcgugcaucgggagcauccggaacggcacguacgaccacaacguguaccgcgacgaggcccugaacaaccgguuccagaucaagggggucgagcucaaguccggcuacaaggacuggauccuguggaucagcuucgccaucagcugcuuccugcucugcguggcccugcugggcuucaucaugugggccugccagaaggggaacauccgcugcaacaucugcaucuga

SEQ ID NO: 224094 - RNA, 1701 nt, Artificial Sequence
  derived and/or modified CDS sequence (opt1) from hemagglutinin__InfluenzaA__EPI675798
augaagaccaucaucgcccugagcuacauccucugccugguguucgcccagaagauccccggcaacgacaacuccaccgcgacgcugugccucgggcaccacgccgucccgaacggcaccaucgugaagaccaucaccaacgaccgcaucgaggugacgaacgccaccgagcugguccagaacagcuccaucggggagaucugcgacagcccccaccagauccuggacggcgagaacugcacccucaucgacgcccugcugggggacccccagugcgacggcuuccagaacaagaagugggaccucuucguggagcgguccaaggccuacagcaacugcuaccccuacgacgugccggacuacgcgucccugcgcagccuggucgccuccagcggcacccucgaguucaacaacgaguccuucaacuggacgggggugacccagaacggcaccagcuccgccugcauccggcgcagcuccagcuccuucuucagccggcugaacuggcugacccaccucaacuacacguaccccgcccugaacgugaccaugcccaacaacgagcaguucgacaagcuguacaucuggggcguccaccaccccgggaccgacaaggaccagaucuuccucuacgcgcaguccagcgggcgcaucaccgugagcacgaagcggucccagcaggccgugaucccgaacaucggcagccgcccccggauccgcgacauccccucccggaucagcaucuacuggaccaucgucaagcccggcgacauccugcugaucaacuccaccgggaaccucaucgccccgcgcggcuacuucaagauccggagcgggaaguccagcaucaugcgcuccgacgcccccaucggcaagugcaagagcgagugcaucacccccaacggcuccauccccaacgacaagccguuccagaacgugaaccggaucacguacggggccugcccccgcuacgugaagcacagcacccugaagcuggcgaccggcaugcggaacguccccgagaagcagacccgcgggaucuucggcgccaucgccggguucaucgagaacggcugggagggcaugguggacgggugguacggcuuccggcaccagaacuccgaggggcgcggccaggccgccgaccucaagagcacgcaggcggccaucgaccagaucaacgggaagcugaaccggcugaucggcaagaccaacgagaaguuccaccagaucgagaaggaguucuccgagguggagggccgcauccaggaccucgagaaguacgucgaggacaccaagaucgaccuguggagcuacaacgccgagcugcucguggcccuggagaaccagcacaccaucgaccugacggacuccgagaugaacaagcucuucgagaagaccaagaagcagcugcgcgagaacgccgaggacauggggaacggcugcuucaagaucuaccacaagugcgacaacgcgugcaucgggagcauccggaacggcaccuacgaccacaacguguaccgcgacgaggcccugaacaaccgguuccagaucaagggggucgagcucaaguccggcuacaaggacuggauccuguggaucagcuucgccaucagcugcuuccugcucugcguggcccugcugggcuucaucaugugggccugccagaaggggaacauccgcugcaacaucugcaucuga

SEQ ID NO: 224095 - RNA, 1701 nt, Artificial Sequence
  derived and/or modified CDS sequence (opt1) from hemagglutinin__InfluenzaA__EPI578430
augaagaccaucaucgcccugagcuacauccucugccugguguucgcccagaagauccccggcaacgacaacuccaccgcgacgcugugccucgggcaccacgccgucccgaacggcaccaucgugaagaccaucaccaacgaccgcaucgaggugacgaacgccaccgagcugguccagaacagcuccaucggggagaucugcgacagcccccaccagauccuggacggcgagaacugcacccucaucgacgcccugcugggggacccccagugcgacggcuuccagaacaagaagugggaccucuucguggagcgguccaaggccuacagcuccugcuaccccuacgacgugccggacuacgcgagccugcgcucccuggucgccagcuccggcacccucgaguucaacaacgagagcuucaacuggacgggggugacccagaacggcaccuccagcgccugcauccggcgcuccagcuccagcuucuucucccggcugaacuggcugacccaccucaacuacaaguaccccgcccugaacgugacgaugcccaacaacgagcaguucgacaagcuguacaucuggggcguccaccaccccgggaccgacaaggaccagaucuucccguacgcgcagagcagcgggcgcaucaccguguccaccaagcggagccagcaggccgugauccccaacaucggcucccgcccccggauccgcgacaucccgagccggaucuccaucuacuggacgaucgucaagccgggcgacauccuccugaucaacagcaccgggaaccugaucgccccgcgcggcuacuucaagauccgguccgggaagagcuccaucaugcgcagcgacgcccccaucggcaagugcaaguccgagugcaucacccccaacggcagcaucccgaacgacaagcccuuccagaacgugaaccggaucaccuacggggccugcccccgcuacgugaagcacuccacgcucaagcuggcgaccggcaugcggaacguccccgagaagcagacccgcgggaucuucggcgccaucgccggguucaucgagaacggcugggagggcaugguggacgggugguacggcuuccggcaccagaacagcgaggggcgcggccaggccgccgaccugaaguccacccaggcggccaucgaccagaucaacgggaagcucaaccggcugaucggcaagacgaacgagaaguuccaccagaucgagaaggaguucagcgagguggagggccgcauccaggaccuggagaaguacgucgaggacaccaagaucgaccucugguccuacaacgccgagcugcugguggcccucgagaaccagcacaccaucgaccugaccgacagcgagaugaacaagcuguucgagaagacgaagaagcagcuccgcgagaacgccgaggacauggggaacggcugcuucaagaucuaccacaagugcgacaacgcgugcaucggguccauccggaacggcaccuacgaccacaacguguaccgcgacgaggcccugaacaaccgguuccagaucaagggggucgagcugaagagcggcuacaaggacuggauccucuggaucagcuucgccaucuccugcuuccugcugugcguggcccuccugggcuucaucaugugggccugccagaaggggaacauccgcugcaacaucugcaucuga

SEQ ID NO: 224096 - RNA, 1695 nt, Artificial Sequence
  derived and/or modified CDS sequence (opt1) from hemagglutinin__InfluenzaA__ACU65077/m2
auggagaagaucgugcugcucuucgccaucgucagccuggugaaguccgaccagaucugcaucggcuaccacgccaacaacagcaccgagcagguggacaccaucauggagaagaacgucacggugacccacgcgcaggacauccuggagaagacccacaacgggaagcucugcgaccuggacggcgugaagccccugauccuccgggacugcuccgucgccggguggcugcugggcaacccgaugugcgacgaguucaucaacgugcccgaguggagcuacaucguggagaaggccaaccccgucaacgaccucugcuaccccggggacuucaacgacuacgaggagcugaagcaccugcucucccgcaucaaccacuucgagaagauccagaucaucccgaagagcuccuggagcucccacgaggccagccugggcguguccagcgccugccccuaccagggcaaguccagcuucuuccggaacguggucuggcugaucaagaagaacuccaccuaccccacgaucaagcgcagcuacaacaacaccaaccaggaggaccuccuggugcugugggggauccaccaccccaacgacgcggccgagcagaccaagcucuaccagaacccgaccacguacaucuccgugggcaccagcacccugaaccagcggcuggucccccgcaucgccacccgguccaaggugaacgggcagagcggccgcauggaguucuucuggacgauccucaagcccaacgacgccaucaacuucgagagcaacgggaacuucaucgcgcccgaguacgccuacaagaucgugaagaagggcgacuccaccaucaugaagagcgagcuggaguacggcaacugcaacaccaagugccagaccccgaugggggccaucaacuccagcaugcccuuccacaacauccacccccugacgaucggcgagugccccaaguacgucaaguccaaccggcucgugcuggccaccgggcugcgcaacagcccgcagcgggagacccgcggccucuucggcgccaucgcgggguucaucgagggcggguggcagggcaugguggacgggugguacggcuaccaccacuccaacgagcagggcagcggguacgccgccgacaaggaguccacccagaaggccaucgacggcgucacgaacaaggugaacagcaucaucgacaagaugaacacccaguucgaggccguggggcgggaguucaacaaccuggagcgccggaucgagaaccugaacaagaagauggaggacggcuuccucgacgucuggaccuacaacgcggagcugcuggugcucauggagaacgagcgcacccuggacuuccacgacuccaacgucaagaaccuguacgacaaggugcggcuccagcugcgcgacaacgccaaggagcuggggaacggcugcuucgaguucuaccacaagugcgacaacgagugcauggagagcgugcggaacggcacguacgacuacccccaguacuccgaggaggcccgccucaagcgggaggagaucagcggggucaagcuggaguccaucggcaucuaccagauccugagcaucuacuccaccguggccagcucccucgcccuggcgaucaugguggccgggcugagccucuggaugugcagcaacggcucccugcagugccgcaucugcaucuga

SEQ ID NO: 224097 - RNA, 1707 nt, Artificial Sequence
  derived and/or modified CDS sequence (opt1) from hemagglutinin__InfluenzaA__ABP51976/m1
auggagaagaucgugcugcucuucgccaucgucagccuggugaaguccgaccagaucugcaucggcuaccacgccaacaacagcaccgagcagguggacaccaucauggagaagaacgucacggugacccacgcgcaggacauccuggagaagacccacaacgggaagcucugcgaccuggacggcgugaagccccugauccuccgggacugcuccgucgccggguggcugcugggcaacccgaugugcgacgaguucaucaacgugcccgaguggagcuacaucguggagaaggccaaccccgucaacgaccucugcuaccccggggacuucaacgacuacgaggagcugaagcaccugcucucccgcaucaaccacuucgagaagauccagaucaucccgaagagcuccuggagcucccacgaggccagccugggcguguccagcgccugccccuaccagggcaaguccagcuucuuccggaacguggucuggcugaucaagaagaacuccaccuaccccacgaucaagcgcagcuacaacaacaccaaccaggaggaccuccuggugcugugggggauccaccaccccaacgacgcggccgagcagaccaagcucuaccagaacccgaccacguacaucuccgugggcaccagcacccugaaccagcggcuggucccccgcaucgccacccgguccaaggugaacgggcagagcggccgcauggaguucuucuggacgauccucaagcccaacgacgccaucaacuucgagagcaacgggaacuucaucgcgcccgaguacgccuacaagaucgugaagaagggcgacuccaccaucaugaagagcgagcuggaguacggcaacugcaacaccaagugccagaccccgaugggggccaucaacuccagcaugcccuuccacaacauccacccccugacgaucggcgagugccccaaguacgucaaguccaaccggcucgugcuggccaccgggcugcgcaacagcccgcagcgggagcggcgccggaagaagcgcggccucuucggcgccaucgcgggguucaucgagggcggguggcagggcaugguggacgggugguacggcuaccaccacuccaacgagcagggcagcggguacgccgccgacaaggaguccacccagaaggccaucgacggcgucacgaacaaggugaacagcaucaucgacaagaugaacacccaguucgaggccguggggcgggaguucaacaaccuggagcgccggaucgagaaccugaacaagaagauggaggacggcuuccucgacgucuggaccuacaacgcggagcugcuggugcucauggagaacgagcgcacccuggacuuccacgacuccaacgucaagaaccuguacgacaaggugcggcuccagcugcgcgacaacgccaaggagcuggggaacggcugcuucgaguucuaccacaagugcgacaacgagugcauggagagcgugcggaacggcacguacgacuacccccaguacuccgaggaggcccgccucaagcgggaggagaucagcggggucaagcuggaguccaucggcaucuaccagauccugagcaucuacuccaccguggccagcucccucgcccuggcgaucaugguggccgggcugagccucuggaugugcagcaacggcucccugcagugccgcaucugcaucuga

SEQ ID NO: 224098 - RNA, 1683 nt, Artificial Sequence
  derived and/or modified CDS sequence (opt1) from hemagglutinin__InfluenzaA__EPI439507
augaacacccagauccugguguucgcccucaucgccaucauccccaccaacgcggacaagaucugccugggccaccacgccgucagcaacgggacgaaggugaacacccugaccgagcgcggcguggaggucgugaacgccaccgagacgguggagcggaccaacaucccgcgcaucugcuccaaggggaagcggaccgucgaccucggccagugcgggcugcugggcaccaucacgggcccgccccagugcgaccaguuccucgaguucagcgccgaccugaucaucgagcgccgggagggguccgacgugugcuaccccggcaaguucgugaacgaggaggcccugcgccagauccuccgggagagcgggggcaucgacaaggaggcgaugggguucaccuacuccggcauccgcaccaacggcgccaccagcgccugccggcgcuccgggagcuccuucuacgccgagaugaaguggcugcugagcaacacggacaacgcggccuucccgcagaugaccaaguccuacaagaacacccggaagagccccgcccucaucgucuggggcauccaccacuccgugagcaccgccgagcagacgaagcuguacggguccggcaacaagcuggugaccgucggcagcuccaacuaccagcagagcuucgugcccucccccggggcccgcccgcaggugaacggccucagcgggcggaucgacuuccacuggcugaugcugaaccccaacgacaccgucaccuucagcuucaacggcgcguucaucgcccccgaccgcgccuccuuccuccgggggaagagcaugggcauccaguccggcgugcagguggacgccaacugcgagggggacugcuaccacagcggcgggacgaucaucuccaaccugcccuuccagaacaucgacagccgcgccgucggcaagugcccgcgguacgugaagcagcgcucccugcuccuggcgaccgggaugaagaacgugcccgagauccccaagggccggggccuguucggggccaucgccggcuucaucgagaacgggugggagggccucaucgacgggugguacggcuuccgccaccagaacgcccagggcgaggggaccgccgcggacuacaagagcacccaguccgccaucgaccagaucacgggcaagcugaaccggcugaucgagaagaccaaccagcaguucgagcucaucgacaacgaguucaacgaggucgagaagcagaucgggaacgugaucaacuggacccgcgacagcaucaccgaggugugguccuacaacgccgagcugcuggucgccauggagaaccagcacacgaucgaccucgccgacagcgagauggacaagcuguacgagcgcgugaagcggcagcugcgcgagaacgcggaggaggacggcaccggcugcuucgagaucuuccacaagugcgacgacgacugcauggccuccauccggaacaacaccuacgaccacagcaaguaccgcgaggaggccaugcagaaccggauccagaucgaccccgucaagcucuccagcggguacaaggacgugauccugugguucuccuucggcgccagcugcuucauccugcucgcgaucgugauggggcuggucuucaucugcgugaagaacggcaacaugcgcugcaccaucugcaucuga

SEQ ID NO: 224099 - RNA, 1701 nt, Artificial Sequence
  derived and/or modified CDS sequence (opt1) from hemagglutinin__InfluenzaA__ABR29595
augaaggccauccugcucgugcugcuguacaccuucaccgccgcgaacgccgacacgcucugcaucggcuaccacgccaacaacagcaccgacaccgucgacaccgugcuggagaagaacgugacggucacccacuccgugaaccugcucgaggaccggcacaacgggaagcugugcaagcugcgcggcguggccccccuccaccuggggaagugcaacaucgccggcuggcugcucgggaacccggagugcgagcugcuguucaccgcgagcuccuggagcuacaucgucgagaccuccaacagcgacaacggcacgugcuaccccggcgacuucaucaacuacgaggagcuccgggagcagcuguccagcguguccagcuucgagcgcuucgagaucuuccccaaggccuccagcuggcccaaccacgagaccaaccggggcgugaccgccgccugcccguacgcgggggccaacuccuucuaccgcaaccugaucuggcucgucaagaaggggaacagcuaccccaagcuguccaagagcuacgugaacaacaaggagaaggaggugcugguccucuggggcauccaccacccgcccaccuccacggaccagcagagccuguaccagaacgccgacgccuacguguucgugggguccagcaaguacaacaagaaguucaagccggagaucgccacccggcccaagguccgcggccaggcgggccggaugaacuacuacuggacccugguggagcccggggacaccaucacguucgaggccaccggcaaccucguggucccccgcuacgccuucgccaugaagcgggggagcggcuccggcaucaucaucagcgacaccccggugcacgacugcaacaccacgugccagacccccaagggggccaucaacaccucccugcccuuccagaacauccaccccgugaccaucggcgagugcccgaaguacgucaagagcacgaagcugcgcauggcgaccgggcuccggaacauccccuccauccagagccgcggccuguucggggccaucgccggcuucaucgagggcggguggaccggcaugaucgacgggugguacggcuaccaccaccagaacgagcagggguccggcuacgccgccgaccggaagagcacccagaacgcgaucgacggcaucacgaacaaggugaacuccgugaucgagaagaugaacacccaguucaccgccgucgggaaggaguucaaccaccuggagaagcgcaucgagaaccucaacaagaagguggacgacggcuuccuggacgucuggaccuacaacgccgagcugcucgugcugcuggagaacgagcggacgcucgacuaccacgacagcaacgugaagaaccuguacgagaagguccgcucccagcugaagaacaacgccaaggagaucgggaacggcugcuucgaguucuaccacaagugcgacgacaccugcauggagagcgugaagaacgggaccuacgacuaccccaaguacuccgaggagagcaagcucaaccgggaggagaucgacggcgugaagcuggaguccacccgcaucuaccagauccuggccaucuacagcacggucgcguccagccucgugcugcuggugucccucggcgccaucagcuucuggaugugcagcaacgggucccugcagugccggaucugcaucuga

SEQ ID NO: 224100 - RNA, 1698 nt, Artificial Sequence
  derived and/or modified CDS sequence (opt1) from hemagglutinin__InfluenzaA__ABO21709
augaaggccaaccugcucgugcugcugugcgcccucgcggccgccgacgccgacaccaucugcaucggcuaccacgccaacaacagcaccgacacggucgacaccgugcuggagaagaacgugaccgucacccacuccgugaaccugcucgaggacagccacaacgggaagcugugccggcugaagggcaucgcgccccuccagcuggggaagugcaacaucgccggcuggcugcucgggaacccggagugcgacccccugcugcccgugcgcuccuggagcuacaucgucgagacgcccaacuccgagaacggcaucugcuacccgggcgacuucaucgacuacgaggagcuccgggagcagcugagcuccgugagcuccuucgagcgcuucgagaucuuccccaaggagagcuccuggcccaaccacaacaccaacggggugaccgccgccugcagccacgagggcaaguccagcuucuaccggaaccugcucuggcugaccgagaaggagggguccuaccccaagcugaagaacagcuacgucaacaagaagggcaaggaggugcucgugcugugggggauccaccacccgcccaacuccaaggagcagcagaaccuguaccagaacgagaacgcguacgucagcguggugacguccaacuacaaccgccgguucacccccgagaucgccgagcgccccaagguccgggaccaggccggccgcaugaacuacuacuggacccuccugaagccgggcgacaccaucaucuucgaggccaacgggaaccugaucgccccgauguacgcguucgcccucagccggggcuucgggagcggcaucaucacguccaacgccagcaugcacgagugcaacaccaagugccagaccccccugggcgccaucaacuccagccugcccuaccagaacauccacccggugaccaucggggagugccccaaguacgugcgcuccgccaagcuccggauggucacgggccugcgcaacaaccccagcauccagucccgggggcuguucggcgcgaucgccggguucaucgagggcggcuggaccgggaugaucgacggcugguacggguaccaccaccagaacgagcagggcagcggguacgccgccgaccagaaguccacccagaacgccaucaacggcaucaccaacaaggugaacacggugaucgagaagaugaacauccaguucaccgcggucggcaaggaguucaacaagcucgagaagcgcauggagaaccugaacaagaagguggacgacggguuccuggacaucuggaccuacaacgccgagcuccuggugcugcucgagaacgagcggacccuggacuuccacgacagcaacgucaagaaccuguacgagaaggugaagucccagcucaagaacaacgccaaggagaucggcaacgggugcuucgaguucuaccacaagugcgacaacgagugcauggagagcguccgcaacggcacguacgacuaccccaaguacuccgaggagagcaagcugaaccgggagaagguggacggggugaagcuggaguccaugggcaucuaccagauccucgccaucuacagcaccgucgccuccagccuggugcugcuggugucccucggcgcgaucagcuucuggaugugcagcaacgggucccugcagugccgcaucugcaucuga

SEQ ID NO: 224101 - RNA, 1689 nt, Artificial Sequence
  derived and/or modified CDS sequence (opt1) from hemagglutinin__InfluenzaA__ACV49600
auggccaucaucuaccugauccuccuguucaccgccgugcggggcgaccagaucugcaucggguaccacgcgaacaacagcaccgagaaggucgacacgauccuggagcgcaacgugaccgugacccacgccaaggacauccucgagaagacccacaacggcaagcugugcaagcugaacgggaucccgccgcucgagcugggcgacugcuccaucgccggguggcugcucggcaaccccgagugcgaccggcugcugagcguccccgagugguccuacaucauggagaaggagaacccccgcgacggccucugcuacccggggagcuucaacgacuacgaggagcugaagcaccugcucuccagcgugaagcacuucgagaaggugaagauccugcccaaggaccgguggacgcagcacaccaccaccggcgggucccgcgccugcgccgucagcggcaaccccuccuucuuccggaacaugguguggcugacggagaaggggagcaacuaccccguggcgaagggcuccuacaacaacaccagcggcgagcagaugcucaucaucuggggcguccaccacccgaacgacgagaccgagcagcgcacccuguaccagaacguggggacguacguguccgucgggaccagcacccugaacaagcgguccacccccgagaucgccacgcgccccaaggugaacggccagggcgggcggauggaguucagcuggacccuccuggacaugugggacaccaucaacuucgaguccaccggcaaccugaucgcccccgaguacggguucaagaucagcaagcgcggcuccagcgggaucaugaagacggagggcacccucgagaacugcgagaccaagugccagaccccgcugggcgccaucaacacgacccugcccuuccacaacgugcacccccucaccaucggggagugccccaaguacgucaagagcgagaagcuggugcuggcgaccggccuccggaacgugccgcagaucgagucccgcgggcuguucggcgccaucgccggguucaucgagggcggcuggcaggggauggucgacggcugguacggguaccaccacagcaacgaccagggcuccggguacgccgccgacaaggagagcacgcagaaggcguucgacggcaucaccaacaaggugaacuccgugaucgagaagaugaacacccaguucgaggccgucggcaaggaguucagcaaccuggagcggcgccucgagaaccugaacaagaagauggaggacggguuccuggacguguggaccuacaacgccgagcuccuggugcugauggagaacgagcggacgcucgacuuccacgacuccaacgucaagaaccuguacgacaaggugcgcaugcagcugcgggacaacgucaaggagcucggcaacgggugcuucgaguucuaccacaagugcgacgacgagugcaugaacagcgugaagaacggcaccuacgacuaccccaaguacgaggaggaguccaagcugaaccgcaacgagaucaagggcgugaagcugagcuccaugggggucuaccagauccucgccaucuacgccaccguggcgggcagccugucccuggccaucaugauggccgggaucagcuucuggaugugcuccaacggcagccugcagugccggaucugcaucuga

SEQ ID NO: 224102 - RNA, 1701 nt, Artificial Sequence
  derived and/or modified CDS sequence (opt1) from hemagglutinin__InfluenzaA__AAG01785
augaagaccaucaucgcccugagcuacauccucugccugguguucgcccagaagcugccgggcaacgacaacuccaccgcgacgcucugccuggggcaccacgccgucccgaacggcacccuggugaagaccaucaccaacgaccagaucgaggugacgaacgccaccgagcucguccagagcuccagcaccgggcggaucugcgacuccccccaccgcauccuggacggcaagaacugcacccugaucgacgcccuccugggggacccccacugcgacggcuuccagaacaaggagugggaccuguucaucgagcggagcaaggccuacuccaacugcuaccccuacgacgugccggacuacagcucccuccgcagccugguggcguccagcggcacgcuggaguucaccaacgaggacuucaacuggaccggggucgcccaggacggcggguccuacagcugcaagcgggaguccgugaagagcuucuucucccgccucaacuggcugcacaagcuggaguacaaguaccccgcccucaacgugaccaugcccaacaacgacaaguucgacaagcuguacaucuggggcguccaccaccccagcacggacuccgagcagaccagccuguacgugcaggccaucgggcgggugaccgucagcaccaaguccagccagcagacggugaucccgaacaucggcucccgccccugggugcggggcaucagcucccgcaucagcaucuacuggaccaucgucaagcccggggacauccuccugaucuccagcaccggcaaccugaucgcgccccggggguacuucaagauccgcaacggcaaguccagcaucaugcgguccgacgccccgaucgacaacugcuacagcgagugcaucacccccaacggcuccauccccaacgacaagcccuuccagaacgugaaccgcaucacguacggggccugcccgaaguacgugaagcagaagacccucaagcuggccaccggcaugcggaacguccccgagaagcagacccgcgggaucuucggcgccaucgcgggguucaucgagaacggcugggagggcaugguggacgggugguacggcuuccggcaccagaacagcgaggggacgggccaggccgccgaccugaaguccacccaggccgccaucgaccaggugaacgggaagcucaaccgccugaucgagaagaccaacgagaaguuccaccagaucgagaaggaguucagcgaggucgagggccggauccaggaccuggagaaguacguggaggacaccaagaucgaccucugguccuacaacgcggagcugcugguggcccucgagaaccagcacacgaucgaccugaccgacagcgagaugaacaagcuguucgagaagacccgcaagcagcuccgggagaacgccgaggacaugggcaacgggugcuucaagaucuaccacaagugcgacaacgccugcaucggcuccauccgcaacgggaccuacgaccacgacgucuaccgggacgaggcccugaacaaccgguuccagaucaagggcguggagcugaagagcggguacaaggacuggauccucuggaucagcuucgcgaucuccugcuuccugcugugcgucgugcuccugggcuucaucaugugggccugccagaagggcaacauccgcugcaacaucugcaucuga

SEQ ID NO: 224103 - RNA, 1701 nt, Artificial Sequence
  derived and/or modified CDS sequence (opt1) from hemagglutinin__InfluenzaA__EPI377499
augaagaccaucaucgcccugagcuacauccucugccugguguucgcccagaagcugcccggcaacgacaacuccaccgcgacgcucugccuggggcaccacgccgucccgaacggcaccaucgugaagaccaucaccaacgaccgcaucgaggugacgaacgccaccgagcugguccagaacagcuccaucggggagaucugcgacagcccccaccagauccucgacggcgagaacugcacccugaucgacgcccugcucggggacccccagugcgacggcuuccagaacaagaagugggaccuguucguggagcgguccaaggccuacagcaacugcuaccccuacgacgugccggacuacgcgucccugcgcagccucgucgccuccagcggcacccuggaguucaacaacgaguccuucaacuggaacggggugacgcagaacggcaccagcuccgccugcauccggcgcagcaacaacuccuucuucagccggcugaacuggcucacccaccugaacuucaaguaccccgcccugaacgugaccaugcccaacaacgagcaguucgacaagcucuacaucuggggcguccaccaccccgggacggacaaggaccagaucuuccuguacgcgcagccguccgggcgcaucaccgugagcaccaagcggucccagcaggccgugauccccaacaucggcagccgcccccggauccgcaacaucccgagccggaucuccaucuacuggaccaucgucaagcccggcgacauccugcucaucaacagcacggggaaccugaucgccccgcgcggcuacuucaagauccgguccgggaagagcuccaucaugcgcagcgacgcccccaucggcaagugcaaguccgagugcaucacccccaacggcagcaucccgaacgacaagcccuuccagaacgugaaccggaucaccuacggggccugcccccgcuacgugaagcaguccacccugaagcucgcgacgggcaugcggaacguccccgagaagcagacccgcgggaucuucggcgccaucgccggguucaucgagaacggcugggagggcaugguggacgggugguacggcuuccggcaccagaacagcgaggggcgcggccaggccgccgaccugaaguccacccaggcggccaucgaccagaucaacgggaagcugaaccggcucaucggcaagaccaacgagaaguuccaccagaucgagaaggaguucagcgagguggagggccgcauccaggaccuggagaaguacgucgaggacacgaagaucgaccugugguccuacaacgccgagcuccugguggcccuggagaaccagcacaccaucgaccucaccgacagcgagaugaacaagcuguucgagaagaccaagaagcagcugcgcgagaacgccgaggacauggggaacggcugcuucaagaucuaccacaagugcgacaacgcgugcaucggguccauccggaacggcacguacgaccacgacguguaccgcgacgaggcccucaacaaccgguuccagaucaagggggucgagcugaagagcggcuacaaggacuggauccuguggaucuccuucgccaucagcugcuuccuccugugcguggcccugcucggcuucaucaugugggccugccagaaggggaacauccgcugcaacaucugcaucuga

SEQ ID NO: 224104 - RNA, 1701 nt, Artificial Sequence
  derived and/or modified CDS sequence (opt1) from hemagglutinin__InfluenzaA__ACD47234
augaagaccaucaucgcccugagcuacauccucugccugguguucgcccagaagcugcccggcaacgacaacuccaccgcgacgcucugccuggggcaccacgccgucccgaacggcaccaucgugaagaccaucaccaacgaccagaucgaggugacgaacgccaccgagcugguccagagcuccagcaccggggagaucugcgacuccccccaccagauccucgacggcgagaacugcacccugaucgacgcccugcucggggacccccagugcgacggcuuccagaacaagaagugggaccuguucguggagcggagcaaggccuacuccaacugcuaccccuacgacgugccggacuacgcgagccugcgcucccucgucgccagcuccggcacgcuggaguucaacaacgagagcuucaacuggaccggggugacccagaacggcaccuccagcuccugcauccgggggagcaacaacuccuucuucagccgccugaacuggcucacgcaccugaaguucaaguaccccgcccugaacgugaccaugcccaacaacgagaaguucgacaagcucuacaucuggggcguccaccaccccgggaccgacaacgaccagaucuucccguacgcccaggcguccggccggaucaccgugagcacgaagcgcagccagcagaccgugauccccaacaucggcucccggccccgcguccggaacauccccagccgcaucuccaucuacuggaccaucgugaagccgggggacauccugcugaucaacagcaccggcaaccucaucgccccgcggggguacuucaagauccgcuccggcaagagcuccaucaugcggagcgacgcccccaucggcaagugcaacuccgagugcaucacgcccaacgggagcaucccgaacgacaagcccuuccagaacgugaaccgcaucaccuacggcgccugcccccgguacgucaagcagaacacccugaagcuggccaccgggaugcgcaacgugcccgagaagcagacgcggggcaucuucggggcgaucgccggcuucaucgagaacggcugggaggggaugguggacggcugguacggguuccgccaccagaacuccgagggcaucgggcaggccgccgaccucaagagcacccaggccgcgaucgaccagaucaacggcaagcugaaccggcugaucggcaagaccaacgagaaguuccaccagaucgagaaggaguucuccgaggucgaggggcgcauccaggaccucgagaaguacguggaggacaccaagaucgaccuguggagcuacaacgccgagcugcucguggcccuggagaaccagcacacgaucgaccugaccgacuccgagaugaacaagcucuucgagaagaccaagaagcagcugcgggagaacgccgaggacaugggcaacgggugcuucaagaucuaccacaagugcgacaacgccugcaucggcagcauccgcaacgggaccuacgaccacgacgucuaccgggacgaggcgcugaacaaccgguuccagaucaagggcguggagcucaaguccggcuacaaggacuggauccuguggaucagcuucgccaucuccugcuuccugcucugcguggcccugcugggguucaucaugugggccugccagaagggcaacauccgcugcaacaucugcaucuga

SEQ ID NO: 224105 - RNA, 1707 nt, Artificial Sequence
  derived and/or modified CDS sequence (opt1) from hemagglutinin__InfluenzaA__ABD95991
auggagaagaucaugcugcuccuggccaucgugagccuggucaaguccgaccagaucugcaucggcuaccacgccaacaacagcaccgagcagguggacaccaucauggagaagaacgugacggucacccacgcgcaggacauccucgagaagacccacaacgggaagcugugcgaccuggacggcgugaagccccucauccugcgggacugcuccguggccggguggcugcucggcaacccgaugugcgacgaguuccugaacguccccgaguggagcuacaucguggagaagaucaaccccgccaacgaccugugcuaccccgggaacuucaacgacuacgaggagcucaagcaccugcugucccgcaucaaccacuucgagaagauccagaucaucccgaagagcuccuggagcgaccacgaggccuccagcggcguguccagcgccugccccuaccagggccgguccagcuucuuccgcaacgucguguggcucaucaagaaggacaacgcguaccccaccaucaagcgguccuacaacaacacgaaccaggaggaccugcuggugcucugggggauccaccaccccaacgacgccgccgagcagacccgccuguaccagaacccgaccaccuacaucagcgucggcacguccacccugaaccagcggcucgugcccaagaucgccacccgcagcaaggugaacgggcaguccggccggauggaguucuucuggaccauccugaagcccaacgacgcgaucaacuucgagagcaacgggaacuucaucgcccccgagaacgccuacaagaucgucaagaagggcgacagcacgaucaugaaguccgagcuggaguacggcaacugcaacaccaagugccagaccccgaucggggccaucaacagcuccaugcccuuccacaacauccacccccucaccaucggcgagugccccaaguacgugaagagcaaccgccuggugcuggccacggggcuccggaacuccccgcagggcgagcgccggcgcaagaagcggggccuguucggggcgaucgccggcuucaucgagggcggguggcaggggauggucgacggcugguacggcuaccaccacagcaacgagcagggguccggcuacgccgccgacaaggagagcacccagaaggccaucgacggggugaccaacaaggugaacuccaucaucgacaagaugaacacccaguucgaggcggucggccgcgaguucaacaaccuggagcggcgcaucgagaaccucaacaagaagauggaggacggguuccuggacguguggacguacaacgccgagcugcucgugcugauggagaacgagcggacccuggacuuccacgacagcaacgucaagaaccucuacgacaaggugcgccugcagcugcgggacaacgccaaggagcucggcaacggcugcuucgaguucuaccaccgcugcgacaacgagugcauggaguccguccggaacgggaccuacgacuacccccaguacagcgaggaggcccggcugaagcgcgaggagaucuccggcgugaagcuggagagcaucgggaccuaccagauccucuccaucuacagcacgguggccuccagccuggcgcuggccaucauggucgccggccucucccuguggaugugcagcaacgggagccugcagugccggaucugcaucuga

SEQ ID NO: 224106 - RNA, 1704 nt, Artificial Sequence
  derived and/or modified CDS sequence (opt1) from hemagglutinin__InfluenzaA__EPI459855/m1
augaucgccaucguggucaucgccauccuggcgagcgccggcaaguccgacaagaucugcaucggguaccacgccaacaacagcaccacccagguggacacgcuccuggagaagaacgugaccgucacccacuccguggagcugcucgagaaccagaaggagaagcgcuucugcaagaucaugaacaaggccccgcuggaccugaaggacugcaccaucgagggcuggauccucgggaacccgaagugcgaccugcugcucggcgaccagagcugguccuacaucguggagcggcccaacgcccagaacgggaucugcuaccccggcguccugaacgagcuggaggagcucaaggcguucaucggcagcggggagcgcguggagcgguucgagauguuccccaaguccacgugggccggcguggacaccagccgcggggucaccaacgccugcccguccuacaccaucgacagcuccuucuaccggaaccugguguggaucgugaagacggacagcgccaccuaccccgucaucaagggcaccuacaacaacaccgggacgcagcccauccuguacuucuggggcgugcaccacccccucgacaccaccgugcaggacaaccuguacggcuccggggacaaguacguccgcaugggcaccgagagcaugaacuucgcgaaguccccggagaucgccgcccggcccgccgugaacgggcagcgcagccggaucgacuacuacugguccgugcugcgccccggcgagacgcucaacgucgagagcaacggcaaccugaucgcccccugguacgcguacaaguucguguccaccaacaagaagggggccguguucaagagcgaccugccgaucgagaacugcgacgccaccugccagaccaucacgggcguccuccggaccaacaagaccuuccagaacgugagcccccuguggaucggggagugccccaaguacgugaaguccgagagccugcgccucgccaccggccugcggaacgucccccagaucgccacgcgcgggaucuucggcgcgaucgccggcuucaucgagggcggguggaccgggaugaucgacggcugguacggguaccaccacgagaacucccagggcagcggcuacgccgccgaccgggaguccacccagaaggccaucgacgggaucaccaacaaggugaacagcaucaucaacaagaugaacacgcaguucgaggcggucgaccacgaguucuccaaccuggagcgccggaucggcaaccucaacaagcgcauggaggacggguuccuggacguguggaccuacaacgccgagcugcucgugcugcuggagaacgagcggacccucgaccugcacgacgccaacgucaagaaccuguacgagaaggugaagagccagcuccgcgacaacgccaacgaccugggcaacgggugcuucgaguucuggcacaagugcgacaacgagugcauggaguccgugaagaacggcaccuacgacuacccgaaguaccagaaggagagcaagcugaaccggcagggcaucgaguccgucaagcucgagaaccuggggguguaccagauccuggccaucuacagcacgguguccagcucccucguccuggugggccugaucauggcgaucgggcucuggaugugcagcaacggcuccaugcagugccgcaucugcaucuga

SEQ ID NO: 224107 - RNA, 1758 nt, Artificial Sequence
  derived and/or modified CDS sequence (opt1) from hemagglutinin__InfluenzaB__ACN29380
augaaggccaucaucgugcugcucauggucgugaccagcaacgccgaccggaucugcaccggcaucacguccagcaacuccccgcacguggucaagaccgcgacccagggggaggugaacgugaccggcgucaucccgcugacgaccacccccaccaagagccacuucgccaaccugaaggggacggagacccgcggcaagcucugccccaagugccugaacugcaccgaccuggacguggcccucgggcggcccaagugcaccggcaagaucccguccgcccgcgugagcauccugcacgagguccggcccgugacguccggcugcuuccccaucaugcacgaccgcaccaagauccggcagcugcccaaccuccugcgcggguacgagcacauccggcugagcacccacaacgugaucaacgccgagaacgcgccgggcgggcccuacaagaucggcaccuccgggagcugccccaacaucacgaacggcaacggcuucuucgccaccauggccugggccguccccaagaacgacaagaacaagaccgcgaccaacccgcucacgaucgaggugcccuacaucugcaccgagggggaggaccagaucaccguguggggcuuccacuccgacaacgagacccagauggccaagcuguacggggacagcaagccccagaaguucacguccagcgccaacggcgucaccacccacuacgugucccagaucggcggguuccccaaccagaccgaggacggcgggcugccgcagagcggccgcaucguggucgacuacauggugcagaaguccgggaagacgggcaccaucaccuaccagcggggcauccuccugccccagaagguguggugcgccagcgggcgcuccaaggucaucaagggcagccugccccucaucggggaggccgacugccugcacgagaaguacggcgggcugaacaagagcaagcccuacuacaccggcgagcacgcgaaggccaucggcaacugcccgaucugggugaagacgccccucaagcuggccaacgggaccaaguaccggccccccgccaagcugcucaaggagcgcggcuucuucggggccaucgcgggcuuccuggagggcgggugggagggcaugaucgccggguggcacggcuacaccucccacggggcccacggcguggccgucgccgcggaccugaagagcacccaggaggccaucaacaagaucacgaagaaccucaacucccugagcgagcuggaggugaagaaccuccagcggcuguccggcgccauggacgagcugcacaacgagauccucgagcuggacgagaaggucgacgaccugcgcgccgacaccaucagcucccagaucgagcucgccgugcugcugagcaacgaggggaucaucaacuccgaggacgagcaccuccuggcgcuggagcggaagcucaagaagaugcugggcccgagcgccguggagaucgggaacggcugcuucgagaccaagcacaagugcaaccagaccugccuggaccgcaucgccgccgggaccuucgacgcgggcgaguucucccuccccacguucgacagccugaacaucaccgccgccucccugaacgacgacggccuggacaaccacaccauccuccuguacuacagcaccgccgccuccagccuggcggucacgcucaugaucgccaucuucgugguguacauggucucccgggacaacgugagcugcuccaucugccuguga

SEQ ID NO: 224108 - RNA, 1755 nt, Artificial Sequence
  derived and/or modified CDS sequence (opt1) from hemagglutinin__InfluenzaB__EPI540671
augaaggccaucaucgugcugcucauggucgugaccagcaacgccgaccgcaucugcaccggcaucacguccagcaacuccccgcacguggucaagaccgcgacccagggggaggugaacgugaccggcgucaucccccugacgaccacccccaccaagagcuacuucgccaaccugaaggggacgcggacccgcggcaagcucugccccgacugccugaacugcaccgaccuggacguggcccucgggcggcccaugugcgugggcaccacgccguccgccaaggccagcauccugcacgagguccgccccgugaccuccggcugcuuccccaucaugcacgaccggaccaagauccgccagcugcccaaccuccugcggggguacgagaagauccgccugagcacccagaacgugaucgacgcggagaaggccccgggcgggcccuaccggcucggcacguccgggagcugccccaacgccaccuccaagaucggcuucuucgccaccauggcgugggccguccccaaggacaacuacaagaacgccaccaacccgcugacgguggaggugcccuacaucugcaccgagggcgaggaccagaucaccgucuggggguuccacagcgacaacaagacccagaugaagucccuguacggcgacagcaacccccagaaguucacguccagcgccaacggggugaccacccacuacgugucccagaucggcgacuuccccgaccagaccgaggacggcgggcucccgcagagcggccgcaucgucguggacuacaugaugcagaagcccgggaagacgggcaccaucguguaccagcggggcguccugcugccccagaagguguggugcgccuccgggcgcagcaaggugaucaagggcagccucccccugaucggggaggcggacugccugcacgaggaguacggcgggcucaacaaguccaagccguacuacaccggcaagcacgccaaggccaucgggaacugccccaucugggucaagaccccgcugaagcuggccaacggcacgaaguaccggcccccggccaagcuccugaaggagcgcggcuucuucggggcgaucgccggcuuccuggagggcgggugggaggggaugaucgccggcuggcacggcuacaccagccacggggcccacggcguggccgucgcggccgaccucaaguccacccaggaggccaucaacaagaucaccaagaaccugaacagccuguccgagcucgaggugaagaaccugcagcggcugagcggggccauggacgagcuccacaacgagauccuggagcuggacgagaagguggacgaccuccgcgccgacacgaucuccagccagaucgagcuggcgguccugcucuccaacgagggcaucaucaacagcgaggacgagcaccuccuggcccucgagcggaagcugaagaagaugcugggccccuccgccguggacaucgggaacggcugcuucgagaccaagcacaagugcaaccagaccugccucgaccgcaucgccgcggggaccuucaacgccggcgaguucagccugcccaccuucgacucccugaacaucacggccgccagccugaacgacgacgggcucgacaaccacaccauccugcuguacuacuccaccgccgcgagcucccucgccgugacccugaugcuggccaucuucaucgucuacauggugagccgggacaacguguccugcagcaucugccucuga

SEQ ID NO: 224109 - RNA, 1755 nt, Artificial Sequence
  derived and/or modified CDS sequence (opt1) from hemagglutinin__InfluenzaB__EPI573303
augaaggccaucaucgugcugcucauggucgugaccagcaacgccgaccgcaucugcaccggcaucacguccagcaacuccccgcacguggucaagaccgcgacccagggggaggugaacgugaccggcgucaucccccugacgaccacccccaccaagagcuacuucgccaaccugaaggggacgcggacccgcggcaagcucugccccgacugccugaacugcaccgaccuggacguggcccucgggcggcccaugugcgugggcaccacgccguccgccaaggccagcauccugcacgagguccgccccgugaccuccggcugcuuccccaucaugcacgaccggaccaagauccgccagcugcccaaccuccugcggggguacgagaagauccgccugagcacccagaacgugaucgacgcggagaaggccccgggcgggcccuaccggcucggcacguccgggagcugccccaacgccaccuccaagaucggcuucuucgccaccauggcgugggccguccccaaggacaacuacaagaacgccaccaacccgcugacgguggaggugcccuacaucugcaccgagggcgaggaccagaucaccgucuggggguuccacagcgacgacaagacccagaugaagucccuguacggcgacagcaacccccagaaguucacguccagcgccaacggggugaccacccacuacgugucccagaucggcgacuuccccgaccagaccgaggacggcgggcucccgcagagcggccgcaucgucguggacuacaugaugcagaagcccgggaagacgggcaccaucguguaccagcggggcguccugcugccccagaagguguggugcgccuccgggcgcagcaaggugaucaagggcagccucccccugaucggggaggcggacugccugcacgaggaguacggcgggcucaacaaguccaagccguacuacaccggcaagcacgccaaggccaucgggaacugccccaucugggucaagaccccgcugaagcuggccaacggcacgaaguaccggcccccggccaagcuccugaaggagcgcggcuucuucggggcgaucgccggcuuccuggagggcgggugggaggggaugaucgccggcuggcacggcuacaccagccacggggcccacggcguggccgucgcggccgaccucaaguccacccaggaggccaucaacaagaucaccaagaaccugaacagccuguccgagcucgaggugaagaaccugcagcggcugagcggggccauggacgagcuccacaacgagauccuggagcuggacgagaagguggacgaccuccgcgccgacacgaucuccagccagaucgagcuggcgguccugcucuccaacgagggcaucaucaacagcgaggacgagcaccuccuggcccucgagcggaagcugaagaagaugcugggccccuccgccguggacaucgggaacggcugcuucgagaccaagcacaagugcaaccagaccugccucgaccgcaucgccgcggggaccuucaacgccggcgaguucagccugcccaccuucgacucccugaacaucacggccgccagccugaacgacgacgggcucgacaaccacaccauccugcuguacuacuccaccgccgcgagcucccucgccgugacccugaugcuggccaucuucaucgucuacauggugagccgggacaacguguccugcagcaucugccucuga

SEQ ID NO: 224110 - RNA, 1755 nt, Artificial Sequence
  derived and/or modified CDS sequence (opt1) from hemagglutinin__InfluenzaB__NP_056660
augaaggccaucaucgugcugcucauggucgugaccagcaacgccgaccgcaucugcaccggcaucacguccagcaacuccccgcacguggucaagaccgcgacccagggggaggugaacgugaccggcgucaucccgcugacgaccacccccaccaagagccacuucgccaaccugaaggggacgcagacccggggcaagcucugccccaacugcuucaacugcaccgaccuggacguggcccuggggcgccccaagugcaugggcaacaccccguccgccaaggugagcauccuccacgaggucaagcccgccacguccggcugcuuccccaucaugcacgaccggaccaagauccgccagcugcccaaccugcuccggggguacgagaacauccgccugagcaccuccaacgugaucaacaccgagacggcgcccggcgggcccuacaaggugggcaccagcggguccugccccaacgucgccaacggcaacggcuucuucaacaccauggccugggugauccccaaggacaacaacaagaccgccaucaaccccgugacggucgaggugcccuacaucugcagcgagggggaggaccagaucaccguguggggcuuccacuccgacgacaagacccagauggagcggcuguacggggacagcaacccccagaaguucaccuccagcgcgaacggcgucacgacccacuacgugucccagaucggcggguuccccaaccagaccgaggacgagggccucaagcagagcgggcgcaucguggucgacuacauggugcagaagccgggcaagaccgggacgaucguguaccagcggggcauccugcugccccagaaggucuggugcgccuccggccgcagcaaggugaucaaggggagccucccccugaucggcgaggccgacugccugcacgagaaguacgggggccucaacaaguccaagcccuacuacaccggggagcacgccaaggccaucggcaacugcccgaucugggucaagaccccgcugaagcuggcgaacggcaccaaguaccggccgcccgccaagcuccugaaggagcgcggguucuucggcgccaucgccggguuccuggagggcgggugggagggcaugaucgccggcuggcacggguacacgagccacggcgcgcacgggguggccguggccgccgaccucaaguccacccaggaggccaucaacaagaucaccaagaaccugaacuaccugagcgagcucgaggucaagaaccugcagcggcuguccggcgcgaugaacgagcuccacgacgagauccuggagcuggacgagaagguggacgaccuccgcgccgacaccaucagcucccagaucgagcuggccgugcugcucagcaacgagggcaucaucaacuccgaggacgagcaccugcuggcccucgagcggaagcugaagaagaugcuggggccgagcgccgucgagaucggcaacgggugcuucgagacgaagcacaagugcaaccagaccugccucgaccgcaucgcggccggcaccuucaacgccggggacuucucccugcccaccuucgacagccugaacaucaccgccgcgucccucaacgacgacggccuggacaaccacacgauccugcuguacuacagcaccgccgccuccagccucgccgugacccugaugaucgccaucuucaucguguacauggucucccgggacaacgugagcugcuccaucugccuguga

SEQ ID NO: 224111 - RNA, 1755 nt, Artificial Sequence
  derived and/or modified CDS sequence (opt1) from hemagglutinin__InfluenzaB__ABG85167
augaaggccaucaucgugcugcucauggucgugaccagcaacgccgaccgcaucugcaccggcaucacguccagcaacuccccgcacguggucaagaccgcgacccagggggaggugaacgugaccggcgucaucccgcugacgaccacccccacccggagccacuucgccaaccugaaggggacgcagacccggggcaagcucugccccaacugcuucaacugcaccgaccuggacguggcccuggggcgccccaagugcaugggcaacaucccguccgccaaggugagcauccuccacgaggucaagcccgugacguccggcugcuuccccaucaugcacgaccggaccaagauccgccagcugcccaaccugcuccggggguacgagaacauccgccugagcaccuccaacgugaucaacgccgagacggcgcccggcgggcccuacaaggugggcaccagcggguccugccccaacgucgccaaccgcaacggcuucuucaacaccauggccugggugauccccaaggacaacaacaagaccgccaucaaccccgugacggucgaggugcccuacaucugcagcgagggggaggaccagaucaccguguggggcuuccacuccgacgacaagacccagauggagcggcuguacggggacagcaacccccagaaguucaccuccagcgcgaacggcgucacgacccacuacgugucccagaucggcggguuccccaaccagaccgaggacgagggccucaagcagagcgggcgcaucguggucgacuacauggugcagaagccgggcaagaccgggacgaucguguaccagcggggcauccugcugccccagaaggucuggugcgccuccggccgcagcaaggugaucaaggggagccucccccugaucggcgaggccgacugccugcacgagaaguacgggggccucaacaaguccaagcccuacuacaccggggagcacgccaaggccaucggcaacugcccgaucugggucaagaccccgcugaagcuggcgaacggcaccaaguaccggccgcccgccaagcuccugaaggagcgcggguucuucggcgccaucgccggguuccuggagggcgggugggagggcaugaucgccggcuggcacggguacacgagccacggcgcgcacgggguggccguggccgccgaccucaaguccacccaggaggccaucaacaagaucaccaagaaccugaacagccugagcgagcucgaggucaagaaccugcagcggcuguccggcgcgaugaacggccuccacgacgagauccuggagcuggacgagaagguggacgaccuccgcgccgacaccaucagcucccagaucgagcuggccgugcugcucagcaacgagggcaucaucaacuccgaggacgagcaccugcuggcccucgagcggaagcugaagaagaugcuggggccgagcgccgucgagaucggcaacgggugcuucgagacgaagcacaagugcaaccagaccugccucgaccgcaucgcggccggcaccuucaacgccggggacuucucccugcccaccuucgacagccugaacaucaccgccgcgucccucaacgacgacgaccuggacaaccacacgauccugcuguacuacagcaccgccgccuccagccucgccgugacccugaugaucgccaucuucaucguguacauggucucccgggacaacgugagcugcuccaucugccuguga

SEQ ID NO: 224112 - RNA, 1755 nt, Artificial Sequence
  derived and/or modified CDS sequence (opt1) from hemagglutinin__InfluenzaB__EPI376346
augaaggccaucaucgugcugcucauggucgugaccagcaacgccgaccgcaucugcaccggcaucacguccagcaacuccccgcacguggucaagaccgcgacccagggggaggugaacgugaccggcgucaucccccugacgaccacccccaccaagagcuacuucgccaaccugaaggggacgaagacccggggcaagcucugccccgacugccugaacugcaccgaccuggacguggcccucgggcgccccaugugcgugggcaccacgccguccgccaaggccagcauccugcacgagguccggcccgugaccuccggcugcuuccccaucaugcacgaccgcaccaagauccggcagcuggcgaaccuccugcgcggguacgagaacauccggcugagcacccagaacgugaucgacgccgagaaggcccccggcgggccguaccgccucggcacguccgggagcugccccaacgccaccuccaagagcggcuucuucgcgaccauggccugggccguccccaaggacaacaacaagaacgccaccaacccccugacgguggaggugccguacaucugcgccgagggcgaggaccagaucaccgucuggggguuccacuccgacgacaagacccagaugaagaaccuguacggcgacagcaacccccagaaguucaccuccagcgcgaacggggugacgacccacuacgugucccagaucggcggcuuccccgaccagaccgaggacgggggccucccccagagcgggcggaucgucguggacuacaugaugcagaagccgggcaagaccgggacgaucguguaccagcgcggcguccugcugccccagaagguguggugcgccuccggccggagcaaggugaucaaggggagccucccccugaucggcgaggccgacugccugcacgagaaguacgggggccucaacaaguccaagccguacuacaccggggagcacgccaaggccaucggcaacugccccaucugggucaagaccccgcugaagcuggcgaacggcaccaaguaccgcccgcccgccaagcuccugaaggagcggggguucuucggcgccaucgccggguuccuggagggcgggugggagggcaugaucgccggcuggcacggguacacgagccacggcgcgcacgggguggccgucgccgccgaccucaaguccacccaggaggccaucaacaagaucaccaagaaccugaacagccuguccgagcucgaggugaagaaccugcagcgccugagcggcgcgauggacgagcuccacaacgagauccuggagcuggacgagaagguggacgaccuccgggccgacaccaucuccagccagaucgagcuggccguccugcucuccaacgagggcaucaucaacagcgaggacgagcaccugcuggcccucgagcgcaagcugaagaagaugcuggggccguccgcgguggacaucggcaacgggugcuucgagacgaagcacaagugcaaccagaccugccucgaccggaucgccgccggcaccuucaacgccggggaguucagccugcccaccuucgacucccugaacaucaccgccgcgagccugaacgacgacggccucgacaaccacacgauccugcuguacuacuccaccgccgccagcucccucgccgugacccugaugcuggccaucuucaucgucuacauggugagccgcgacaacguguccugcagcaucugccucuga

SEQ ID NO: 224113 - RNA, 1365 nt, Artificial Sequence
  derived and/or modified CDS sequence (opt1) from neuraminidase__InfluenzaA__ABD77678/m1
augaaccccaaccagaagaucaucaccaucggcagcaucugccugguggucgggcucaucucccugauccugcagaucggcaacaucaucagcaucuggaucucccacagcauccagaccgggucccagaaccacacgggcaucugcaaccagaacaucaucaccuacaagaacagcaccugggugaaggacaccacguccgugauccucaccgggaacagcucccugugcccgauccggggcugggccaucuacagcaaggacaacuccauccgcaucggcagcaagggggacgucuucgugauccgggagcccuucaucuccugcagccaccuggagugccgcaccuucuuccucacccagggcgcccugcugaacgacaagcacuccagcgggacggugaaggaccggucccccuaccgcgcgcucaugagcugccccgucggcgaggccccgucccccuacaacagccgguucgagagcguggccugguccgccagcgccugccacgacgggaugggcuggcugaccaucggcaucuccgggcccgacaacggcgcgguggccguccugaaguacaacgggaucaucaccgagaccaucaagagcuggcgcaagaagauccuccggacgcaggaguccgagugcgccugcgugaacggcagcugcuucaccaucaugaccgacggccccuccgacgggcuggccagcuacaagaucuucaagaucgagaagggcaaggugaccaaguccaucgagcugaacgcgccgaacagccacuacgaggagugcuccugcuaccccgacacggggaaggucaugugcgugugccgcgacaacuggcacggcagcaaccggcccuggguguccuucgaccagaaccucgacuaccagaucggguacaucugcagcggcgucuucggcgacaacccccgcccggaggacgggaccggcuccugcgggcccguguacguggacggcgccaacggggucaagggcuucagcuaccgguacggcaacgggguguggaucggccgcaccaagucccacagcucccggcacggguucgagaugaucugggaccccaacggcuggaccgagacggacagcaaguucagcgugcgccaggacgucguggccaugaccgacugguccggguacagcggcuccuucgugcagcaccccgagcugaccggccuggacugcaugcggccgugcuucugggucgagcucauccgcgggcggcccaaggagaagaccaucuggacgagcgccuccagcaucuccuucugcggcgugaacagcgacaccgucgacugguccuggcccgacggggccgagcugcccuucagcaucgacaaguga

SEQ ID NO: 224114 - RNA, 1890 nt, Artificial Sequence
  mRNA product Design3 comprising derived and/or modified sequence from hemagglutinin__InfluenzaA__ACA28844/m1 (CDS opt1) R1425
gggagaaagcuuaccaugaaggugaagcugcucguccugcugugcaccuucaccgccacguacgccgacaccaucugcaucggcuaccacgcgaacaacagcaccgacaccguggacacggugcucgagaagaacgucaccgugacccacuccgugaaccugcuggagaacagccacaacgggaagcucugccugcugaagggcaucgccccccuccagcuggggaacugcuccgucgccggcuggauccuggggaacccggagugcgagcuccugaucagcaaggaguccuggagcuacaucguggagaagcccaaccccgagaacggcaccugcuaccccggccacuucgccgacuacgaggagcugcgggagcagcucuccagcguguccagcuucgagcgcuucgagaucuucccgaaggaguccagcuggcccaaccacacggucaccgggguguccgccagcugcucccacaacggcgagagcuccuucuaccggaaccugcuguggcucaccgggaagaacggccuguaccccaaccugagcaaguccuacgcgaacaacaaggagaaggaggugcucguccuguggggcgugcaccacccgccgaacaucgggaaccagaaggcccuguaccacaccgagaacgccuacgugagcgucgugagcucccacuacagccgcaaguucacgcccgagaucgccaagcggcccaaggugcgcgaccaggagggccggaucaacuacuacuggacccuccuggagcccggggacaccaucaucuucgaggcgaacggcaaccugaucgccccgcgcuacgccuucgcccucucccggggguucggcagcggcaucaucaacuccaacgccccgauggacaagugcgacgcgaagugccagaccccccagggggccaucaacagcucccugcccuuccagaacguccacccggugacgaucggcgagugccccaaguacgugcgcagcgccaagcugcggauggucaccgggcuccgcaacauccccuccauccagagccggggccuguucggggccaucgccggcuucaucgagggcggguggaccggcaugguggacgggugguacggcuaccaccaccagaacgagcagggguccggcuacgcggccgaccagaagagcacccagaacgccaucaacggcaucacgaacaaggugaacuccgucaucgagaagaugaacacccaguucaccgccguggggaaggaguucaacaagcuggagcgccggauggagaaccucaacaagaaggucgacgacggcuucaucgacaucuggaccuacaacgccgagcugcuggugcuccuggagaacgagcgcacgcuggacuuccacgacagcaacgugaagaaccucuacgagaaggucaagucccagcugaagaacaacgcgaaggagaucgggaacggcugcuucgaguucuaccacaagugcaacgacgagugcauggagagcgugaagaacgggaccuacgacuaccccaaguacuccgaggagagcaagcugaaccgggagaagaucgacggcgugaagcucgaguccaugggcgucuaccagauccuggccaucuacagcaccguggccagcucccuggugcuccuggucagccugggggccaucuccuucuggaugugcagcaacggcucccugcagugccgcaucugcaucugaggacuaguuauaagacugacuagcccgaugggccucccaacgggcccuccuccccuccuugcaccgagauuaauaaaaaaaaaaaaaaaaaaaaaaaaaaaaaaaaaaaaaaaaaaaaaaaaaaaaaaaaaaaaaaaauauuccccccccccccccccccccccccccccccucuag

SEQ ID NO: 224115 - RNA, 1915 nt, Artificial Sequence
  mRNA product Design1 comprising derived and/or modified sequence from hemagglutinin__InfluenzaA__ACA28844/m1 (CDS opt1) R1752
gggagaaagcuuaccaugaaggugaagcugcucguccugcugugcaccuucaccgccacguacgccgacaccaucugcaucggcuaccacgcgaacaacagcaccgacaccguggacacggugcucgagaagaacgucaccgugacccacuccgugaaccugcuggagaacagccacaacgggaagcucugccugcugaagggcaucgccccccuccagcuggggaacugcuccgucgccggcuggauccuggggaacccggagugcgagcuccugaucagcaaggaguccuggagcuacaucguggagaagcccaaccccgagaacggcaccugcuaccccggccacuucgccgacuacgaggagcugcgggagcagcucuccagcguguccagcuucgagcgcuucgagaucuucccgaaggaguccagcuggcccaaccacacggucaccgggguguccgccagcugcucccacaacggcgagagcuccuucuaccggaaccugcuguggcucaccgggaagaacggccuguaccccaaccugagcaaguccuacgcgaacaacaaggagaaggaggugcucguccuguggggcgugcaccacccgccgaacaucgggaaccagaaggcccuguaccacaccgagaacgccuacgugagcgucgugagcucccacuacagccgcaaguucacgcccgagaucgccaagcggcccaaggugcgcgaccaggagggccggaucaacuacuacuggacccuccuggagcccggggacaccaucaucuucgaggcgaacggcaaccugaucgccccgcgcuacgccuucgcccucucccggggguucggcagcggcaucaucaacuccaacgccccgauggacaagugcgacgcgaagugccagaccccccagggggccaucaacagcucccugcccuuccagaacguccacccggugacgaucggcgagugccccaaguacgugcgcagcgccaagcugcggauggucaccgggcuccgcaacauccccuccauccagagccggggccuguucggggccaucgccggcuucaucgagggcggguggaccggcaugguggacgggugguacggcuaccaccaccagaacgagcagggguccggcuacgcggccgaccagaagagcacccagaacgccaucaacggcaucacgaacaaggugaacuccgucaucgagaagaugaacacccaguucaccgccguggggaaggaguucaacaagcuggagcgccggauggagaaccucaacaagaaggucgacgacggcuucaucgacaucuggaccuacaacgccgagcugcuggugcuccuggagaacgagcgcacgcuggacuuccacgacagcaacgugaagaaccucuacgagaaggucaagucccagcugaagaacaacgcgaaggagaucgggaacggcugcuucgaguucuaccacaagugcaacgacgagugcauggagagcgugaagaacgggaccuacgacuaccccaaguacuccgaggagagcaagcugaaccgggagaagaucgacggcgugaagcucgaguccaugggcgucuaccagauccuggccaucuacagcaccguggccagcucccuggugcuccuggucagccugggggccaucuccuucuggaugugcagcaacggcucccugcagugccgcaucugcaucugaggacuaguuauaagacugacuagcccgaugggccucccaacgggcccuccuccccuccuugcaccgagauuaauaaaaaaaaaaaaaaaaaaaaaaaaaaaaaaaaaaaaaaaaaaaaaaaaaaaaaaaaaaaaaaaaugcaucccccccccccccccccccccccccccccccaaaggcucuuuucagagccaccagaauu

SEQ ID NO: 224116 - RNA, 2080 nt, Artificial Sequence
  mRNA product Design2 comprising derived and/or modified sequence from hemagglutinin__InfluenzaA__ACA28844/m1 (CDS opt1) R5069
ggggcgcugccuacggagguggcagccaucuccuucucggcaucaagcuuaccaugaaggugaagcugcucguccugcugugcaccuucaccgccacguacgccgacaccaucugcaucggcuaccacgcgaacaacagcaccgacaccguggacacggugcucgagaagaacgucaccgugacccacuccgugaaccugcuggagaacagccacaacgggaagcucugccugcugaagggcaucgccccccuccagcuggggaacugcuccgucgccggcuggauccuggggaacccggagugcgagcuccugaucagcaaggaguccuggagcuacaucguggagaagcccaaccccgagaacggcaccugcuaccccggccacuucgccgacuacgaggagcugcgggagcagcucuccagcguguccagcuucgagcgcuucgagaucuucccgaaggaguccagcuggcccaaccacacggucaccgggguguccgccagcugcucccacaacggcgagagcuccuucuaccggaaccugcuguggcucaccgggaagaacggccuguaccccaaccugagcaaguccuacgcgaacaacaaggagaaggaggugcucguccuguggggcgugcaccacccgccgaacaucgggaaccagaaggcccuguaccacaccgagaacgccuacgugagcgucgugagcucccacuacagccgcaaguucacgcccgagaucgccaagcggcccaaggugcgcgaccaggagggccggaucaacuacuacuggacccuccuggagcccggggacaccaucaucuucgaggcgaacggcaaccugaucgccccgcgcuacgccuucgcccucucccggggguucggcagcggcaucaucaacuccaacgccccgauggacaagugcgacgcgaagugccagaccccccagggggccaucaacagcucccugcccuuccagaacguccacccggugacgaucggcgagugccccaaguacgugcgcagcgccaagcugcggauggucaccgggcuccgcaacauccccuccauccagagccggggccuguucggggccaucgccggcuucaucgagggcggguggaccggcaugguggacgggugguacggcuaccaccaccagaacgagcagggguccggcuacgcggccgaccagaagagcacccagaacgccaucaacggcaucacgaacaaggugaacuccgucaucgagaagaugaacacccaguucaccgccguggggaaggaguucaacaagcuggagcgccggauggagaaccucaacaagaaggucgacgacggcuucaucgacaucuggaccuacaacgccgagcugcuggugcuccuggagaacgagcgcacgcuggacuuccacgacagcaacgugaagaaccucuacgagaaggucaagucccagcugaagaacaacgcgaaggagaucgggaacggcugcuucgaguucuaccacaagugcaacgacgagugcauggagagcgugaagaacgggaccuacgacuaccccaaguacuccgaggagagcaagcugaaccgggagaagaucgacggcgugaagcucgaguccaugggcgucuaccagauccuggccaucuacagcaccguggccagcucccuggugcuccuggucagccugggggccaucuccuucuggaugugcagcaacggcucccugcagugccgcaucugcaucugaggacuagugcaucacauuuaaaagcaucucagccuaccaugagaauaagagaaagaaaaugaagaucaauagcuuauucaucucuuuuucuuuuucguugguguaaagccaacacccugucuaaaaaacauaaauuucuuuaaucauuuugccucuuuucucugugcuucaauuaauaaaaaauggaaagaaccuagaucuaaaaaaaaaaaaaaaaaaaaaaaaaaaaaaaaaaaaaaaaaaaaaaaaaaaaaaaaaaaaaaaaugcaucccccccccccccccccccccccccccccccaaaggcucuuuucagagccaccagaauu

SEQ ID NO: 224117 - RNA, 1918 nt, Artificial Sequence
  mRNA product Design1 comprising derived and/or modified sequence from hemagglutinin__InfluenzaA__ACV82259 (CDS opt1) R1549/R2512
gggagaaagcuuaccaugaaggccauccuggugguccuccuguacaccuucgccaccgcgaacgccgacacgcugugcaucggcuaccacgccaacaacagcaccgacaccguggacaccgugcucgagaagaacgucacggugacccacuccgugaaccugcuggaggacaagcacaacgggaagcucugcaagcugcggggcgucgccccgcugcaccucgggaagugcaacaucgccggcuggauccuggggaacccggagugcgagagccuguccaccgcgagcuccuggagcuacaucguggagacccccuccagcgacaacggcacgugcuaccccggcgacuucaucgacuacgaggagcuccgcgagcagcuguccagcguguccagcuucgagcgguucgagaucuuccccaagaccuccagcuggccgaaccacgacuccgacaagggggucaccgccgccugcccccacgccggcgcgaagagcuucuacaagaaccugaucuggcucgugaagaaggggaacuccuaccccaagcugagcaaguccuacaucaacgacaagggcaaggaggugcugguccucugggggauccaccaccccagcaccagcgccgaccagcagucccuguaccagaacgccgacgccuacguguucgugggcagcucccgcuacagcaagacguucaagccggagaucgccauccggcccaagguccgcgaccgggagggccgcaugaacuacuacuggacccugguggagcccggggacaagaucaccuucgaggcgaccggcaaccucguggucccccgguacgccuucgccauggagcgcaacgccggguccggcaucaucaucagcgacacgccggugcacgacugcaacaccaccugccagacccccaagggcgccaucaacacgucccugcccuuccagaacauccaccccaucaccaucgggaagugcccgaaguacgugaagagcaccaagcugcggcucgcgaccggccugcgcaacauccccuccauccagagccgggggcuguucggcgccaucgccggguucaucgagggcggcuggacggggauggucgacggcugguacggguaccaccaccagaacgagcagggcagcggguacgccgccgaccucaaguccacgcagaacgcgaucgacgagaucaccaacaaggugaacagcgucaucgagaagaugaacacccaguucaccgccgugggcaaggaguucaaccaccuggagaagcggaucgagaaccugaacaagaaggucgacgacggcuuccucgacaucuggacguacaacgccgagcugcuggugcuccuggagaacgagcgcacccuggacuaccacgacuccaacgugaagaaccucuacgagaagguccggagccagcugaagaacaacgccaaggagaucgggaacggcugcuucgaguucuaccacaagugcgacaacaccugcauggaguccgugaagaacgggaccuacgacuaccccaaguacagcgaggaggccaagcugaaccgcgaggagaucgacggcgugaagcucgaguccacgcggaucuaccagauccuggcgaucuacagcaccgucgccagcucccuggugcucguggucagccugggggccaucuccuucuggaugugcagcaacggcucccugcagugccgcaucugcaucugaccacuaguuauaagacugacuagcccgaugggccucccaacgggcccuccuccccuccuugcaccgagauuaauaaaaaaaaaaaaaaaaaaaaaaaaaaaaaaaaaaaaaaaaaaaaaaaaaaaaaaaaaaaaaaaaugcaucccccccccccccccccccccccccccccccaaaggcucuuuucagagccaccagaauu

SEQ ID NO: 224118 - RNA, 2083 nt, Artificial Sequence
  mRNA product Design2 comprising derived and/or modified sequence from hemagglutinin__InfluenzaA__ACV82259 (CDS opt1) R3309/R3310
ggggcgcugccuacggagguggcagccaucuccuucucggcaucaagcuuaccaugaaggccauccuggugguccuccuguacaccuucgccaccgcgaacgccgacacgcugugcaucggcuaccacgccaacaacagcaccgacaccguggacaccgugcucgagaagaacgucacggugacccacuccgugaaccugcuggaggacaagcacaacgggaagcucugcaagcugcggggcgucgccccgcugcaccucgggaagugcaacaucgccggcuggauccuggggaacccggagugcgagagccuguccaccgcgagcuccuggagcuacaucguggagacccccuccagcgacaacggcacgugcuaccccggcgacuucaucgacuacgaggagcuccgcgagcagcuguccagcguguccagcuucgagcgguucgagaucuuccccaagaccuccagcuggccgaaccacgacuccgacaagggggucaccgccgccugcccccacgccggcgcgaagagcuucuacaagaaccugaucuggcucgugaagaaggggaacuccuaccccaagcugagcaaguccuacaucaacgacaagggcaaggaggugcugguccucugggggauccaccaccccagcaccagcgccgaccagcagucccuguaccagaacgccgacgccuacguguucgugggcagcucccgcuacagcaagacguucaagccggagaucgccauccggcccaagguccgcgaccgggagggccgcaugaacuacuacuggacccugguggagcccggggacaagaucaccuucgaggcgaccggcaaccucguggucccccgguacgccuucgccauggagcgcaacgccggguccggcaucaucaucagcgacacgccggugcacgacugcaacaccaccugccagacccccaagggcgccaucaacacgucccugcccuuccagaacauccaccccaucaccaucgggaagugcccgaaguacgugaagagcaccaagcugcggcucgcgaccggccugcgcaacauccccuccauccagagccgggggcuguucggcgccaucgccggguucaucgagggcggcuggacggggauggucgacggcugguacggguaccaccaccagaacgagcagggcagcggguacgccgccgaccucaaguccacgcagaacgcgaucgacgagaucaccaacaaggugaacagcgucaucgagaagaugaacacccaguucaccgccgugggcaaggaguucaaccaccuggagaagcggaucgagaaccugaacaagaaggucgacgacggcuuccucgacaucuggacguacaacgccgagcugcuggugcuccuggagaacgagcgcacccuggacuaccacgacuccaacgugaagaaccucuacgagaagguccggagccagcugaagaacaacgccaaggagaucgggaacggcugcuucgaguucuaccacaagugcgacaacaccugcauggaguccgugaagaacgggaccuacgacuaccccaaguacagcgaggaggccaagcugaaccgcgaggagaucgacggcgugaagcucgaguccacgcggaucuaccagauccuggcgaucuacagcaccgucgccagcucccuggugcucguggucagccugggggccaucuccuucuggaugugcagcaacggcucccugcagugccgcaucugcaucugaccacuagugcaucacauuuaaaagcaucucagccuaccaugagaauaagagaaagaaaaugaagaucaauagcuuauucaucucuuuuucuuuuucguugguguaaagccaacacccugucuaaaaaacauaaauuucuuuaaucauuuugccucuuuucucugugcuucaauuaauaaaaaauggaaagaaccuagaucuaaaaaaaaaaaaaaaaaaaaaaaaaaaaaaaaaaaaaaaaaaaaaaaaaaaaaaaaaaaaaaaaugcaucccccccccccccccccccccccccccccccaaaggcucuuuucagagccaccagaauu

SEQ ID NO: 224119 - RNA, 1921 nt, Artificial Sequence
  mRNA product Design1 comprising derived and/or modified sequence from hemagglutinin__InfluenzaA__ACV82259 HsALB(1-18)_H1N1(California2009)-HA (CDS opt1)
gggagaaagcuuaccaugaagugggugaccuucaucagccugcucuuccuguucuccagcgccuacuccgacacgcugugcaucggcuaccacgccaacaacagcaccgacaccguggacaccgugcucgagaagaacgucacggugacccacuccgugaaccugcuggaggacaagcacaacgggaagcucugcaagcugcggggcgucgccccgcugcaccucgggaagugcaacaucgccggcuggauccuggggaacccggagugcgagagccuguccaccgcgagcuccuggagcuacaucguggagacccccuccagcgacaacggcacgugcuaccccggcgacuucaucgacuacgaggagcuccgcgagcagcuguccagcguguccagcuucgagcgguucgagaucuuccccaagaccuccagcuggccgaaccacgacuccgacaagggggucaccgccgccugcccccacgccggcgcgaagagcuucuacaagaaccugaucuggcucgugaagaaggggaacuccuaccccaagcugagcaaguccuacaucaacgacaagggcaaggaggugcugguccucugggggauccaccaccccagcaccagcgccgaccagcagucccuguaccagaacgccgacgccuacguguucgugggcagcucccgcuacagcaagacguucaagccggagaucgccauccggcccaagguccgcgaccgggagggccgcaugaacuacuacuggacccugguggagcccggggacaagaucaccuucgaggcgaccggcaaccucguggucccccgguacgccuucgccauggagcgcaacgccggguccggcaucaucaucagcgacacgccggugcacgacugcaacaccaccugccagacccccaagggcgccaucaacacgucccugcccuuccagaacauccaccccaucaccaucgggaagugcccgaaguacgugaagagcaccaagcugcggcucgcgaccggccugcgcaacauccccuccauccagagccgggggcuguucggcgccaucgccggguucaucgagggcggcuggacggggauggucgacggcugguacggguaccaccaccagaacgagcagggcagcggguacgccgccgaccucaaguccacgcagaacgcgaucgacgagaucaccaacaaggugaacagcgucaucgagaagaugaacacccaguucaccgccgugggcaaggaguucaaccaccuggagaagcggaucgagaaccugaacaagaaggucgacgacggcuuccucgacaucuggacguacaacgccgagcugcuggugcuccuggagaacgagcgcacccuggacuaccacgacuccaacgugaagaaccucuacgagaagguccggagccagcugaagaacaacgccaaggagaucgggaacggcugcuucgaguucuaccacaagugcgacaacaccugcauggaguccgugaagaacgggaccuacgacuaccccaaguacagcgaggaggccaagcugaaccgcgaggagaucgacggcgugaagcucgaguccacgcggaucuaccagauccuggcgaucuacagcaccgucgccagcucccuggugcucguggucagccugggggccaucuccuucuggaugugcagcaacggcucccugcagugccgcaucugcaucugaccacuaguuauaagacugacuagcccgaugggccucccaacgggcccuccuccccuccuugcaccgagauuaauaaaaaaaaaaaaaaaaaaaaaaaaaaaaaaaaaaaaaaaaaaaaaaaaaaaaaaaaaaaaaaaaugcaucccccccccccccccccccccccccccccccaaaggcucuuuucagagccaccagaauu

SEQ ID NO: 224120 - RNA, 2086 nt, Artificial Sequence
  mRNA product Design2 comprising derived and/or modified sequence from hemagglutinin__InfluenzaA__ACV82259 HsALB(1-18)_H1N1(California2009)-HA (CDS opt1)
ggggcgcugccuacggagguggcagccaucuccuucucggcaucaagcuuaccaugaagugggugaccuucaucagccugcucuuccuguucuccagcgccuacuccgacacgcugugcaucggcuaccacgccaacaacagcaccgacaccguggacaccgugcucgagaagaacgucacggugacccacuccgugaaccugcuggaggacaagcacaacgggaagcucugcaagcugcggggcgucgccccgcugcaccucgggaagugcaacaucgccggcuggauccuggggaacccggagugcgagagccuguccaccgcgagcuccuggagcuacaucguggagacccccuccagcgacaacggcacgugcuaccccggcgacuucaucgacuacgaggagcuccgcgagcagcuguccagcguguccagcuucgagcgguucgagaucuuccccaagaccuccagcuggccgaaccacgacuccgacaagggggucaccgccgccugcccccacgccggcgcgaagagcuucuacaagaaccugaucuggcucgugaagaaggggaacuccuaccccaagcugagcaaguccuacaucaacgacaagggcaaggaggugcugguccucugggggauccaccaccccagcaccagcgccgaccagcagucccuguaccagaacgccgacgccuacguguucgugggcagcucccgcuacagcaagacguucaagccggagaucgccauccggcccaagguccgcgaccgggagggccgcaugaacuacuacuggacccugguggagcccggggacaagaucaccuucgaggcgaccggcaaccucguggucccccgguacgccuucgccauggagcgcaacgccggguccggcaucaucaucagcgacacgccggugcacgacugcaacaccaccugccagacccccaagggcgccaucaacacgucccugcccuuccagaacauccaccccaucaccaucgggaagugcccgaaguacgugaagagcaccaagcugcggcucgcgaccggccugcgcaacauccccuccauccagagccgggggcuguucggcgccaucgccggguucaucgagggcggcuggacggggauggucgacggcugguacggguaccaccaccagaacgagcagggcagcggguacgccgccgaccucaaguccacgcagaacgcgaucgacgagaucaccaacaaggugaacagcgucaucgagaagaugaacacccaguucaccgccgugggcaaggaguucaaccaccuggagaagcggaucgagaaccugaacaagaaggucgacgacggcuuccucgacaucuggacguacaacgccgagcugcuggugcuccuggagaacgagcgcacccuggacuaccacgacuccaacgugaagaaccucuacgagaagguccggagccagcugaagaacaacgccaaggagaucgggaacggcugcuucgaguucuaccacaagugcgacaacaccugcauggaguccgugaagaacgggaccuacgacuaccccaaguacagcgaggaggccaagcugaaccgcgaggagaucgacggcgugaagcucgaguccacgcggaucuaccagauccuggcgaucuacagcaccgucgccagcucccuggugcucguggucagccugggggccaucuccuucuggaugugcagcaacggcucccugcagugccgcaucugcaucugaccacuagugcaucacauuuaaaagcaucucagccuaccaugagaauaagagaaagaaaaugaagaucaauagcuuauucaucucuuuuucuuuuucguugguguaaagccaacacccugucuaaaaaacauaaauuucuuuaaucauuuugccucuuuucucugugcuucaauuaauaaaaaauggaaagaaccuagaucuaaaaaaaaaaaaaaaaaaaaaaaaaaaaaaaaaaaaaaaaaaaaaaaaaaaaaaaaaaaaaaaaugcaucccccccccccccccccccccccccccccccaaaggcucuuuucagagccaccagaauu

SEQ ID NO: 224121 - RNA, 1921 nt, Artificial Sequence
  mRNA product Design1 comprising derived and/or modified sequence from hemagglutinin__InfluenzaA__ACV82259 IgE-leader_H1N1(California2009)-HA (CDS opt1)
gggagaaagcuuaccauggacuggaccuggauccuguuccucguggccgccgcgacccgcguccacagcgacacgcugugcaucggcuaccacgccaacaacagcaccgacaccguggacaccgugcucgagaagaacgucacggugacccacuccgugaaccugcuggaggacaagcacaacgggaagcucugcaagcugcggggcgucgccccgcugcaccucgggaagugcaacaucgccggcuggauccuggggaacccggagugcgagagccuguccaccgcgagcuccuggagcuacaucguggagacccccuccagcgacaacggcacgugcuaccccggcgacuucaucgacuacgaggagcuccgcgagcagcuguccagcguguccagcuucgagcgguucgagaucuuccccaagaccuccagcuggccgaaccacgacuccgacaagggggucaccgccgccugcccccacgccggcgcgaagagcuucuacaagaaccugaucuggcucgugaagaaggggaacuccuaccccaagcugagcaaguccuacaucaacgacaagggcaaggaggugcugguccucugggggauccaccaccccagcaccagcgccgaccagcagucccuguaccagaacgccgacgccuacguguucgugggcagcucccgcuacagcaagacguucaagccggagaucgccauccggcccaagguccgcgaccgggagggccgcaugaacuacuacuggacccugguggagcccggggacaagaucaccuucgaggcgaccggcaaccucguggucccccgguacgccuucgccauggagcgcaacgccggguccggcaucaucaucagcgacacgccggugcacgacugcaacaccaccugccagacccccaagggcgccaucaacacgucccugcccuuccagaacauccaccccaucaccaucgggaagugcccgaaguacgugaagagcaccaagcugcggcucgcgaccggccugcgcaacauccccuccauccagagccgggggcuguucggcgccaucgccggguucaucgagggcggcuggacggggauggucgacggcugguacggguaccaccaccagaacgagcagggcagcggguacgccgccgaccucaaguccacgcagaacgcgaucgacgagaucaccaacaaggugaacagcgucaucgagaagaugaacacccaguucaccgccgugggcaaggaguucaaccaccuggagaagcggaucgagaaccugaacaagaaggucgacgacggcuuccucgacaucuggacguacaacgccgagcugcuggugcuccuggagaacgagcgcacccuggacuaccacgacuccaacgugaagaaccucuacgagaagguccggagccagcugaagaacaacgccaaggagaucgggaacggcugcuucgaguucuaccacaagugcgacaacaccugcauggaguccgugaagaacgggaccuacgacuaccccaaguacagcgaggaggccaagcugaaccgcgaggagaucgacggcgugaagcucgaguccacgcggaucuaccagauccuggcgaucuacagcaccgucgccagcucccuggugcucguggucagccugggggccaucuccuucuggaugugcagcaacggcucccugcagugccgcaucugcaucugaccacuaguuauaagacugacuagcccgaugggccucccaacgggcccuccuccccuccuugcaccgagauuaauaaaaaaaaaaaaaaaaaaaaaaaaaaaaaaaaaaaaaaaaaaaaaaaaaaaaaaaaaaaaaaaaugcaucccccccccccccccccccccccccccccccaaaggcucuuuucagagccaccagaauu

SEQ ID NO: 224122 - RNA, 2086 nt, Artificial Sequence
  mRNA product Design2 comprising derived and/or modified sequence from hemagglutinin__InfluenzaA__ACV82259 IgE-leader_H1N1(California2009)-HA (CDS opt1)
ggggcgcugccuacggagguggcagccaucuccuucucggcaucaagcuuaccauggacuggaccuggauccuguuccucguggccgccgcgacccgcguccacagcgacacgcugugcaucggcuaccacgccaacaacagcaccgacaccguggacaccgugcucgagaagaacgucacggugacccacuccgugaaccugcuggaggacaagcacaacgggaagcucugcaagcugcggggcgucgccccgcugcaccucgggaagugcaacaucgccggcuggauccuggggaacccggagugcgagagccuguccaccgcgagcuccuggagcuacaucguggagacccccuccagcgacaacggcacgugcuaccccggcgacuucaucgacuacgaggagcuccgcgagcagcuguccagcguguccagcuucgagcgguucgagaucuuccccaagaccuccagcuggccgaaccacgacuccgacaagggggucaccgccgccugcccccacgccggcgcgaagagcuucuacaagaaccugaucuggcucgugaagaaggggaacuccuaccccaagcugagcaaguccuacaucaacgacaagggcaaggaggugcugguccucugggggauccaccaccccagcaccagcgccgaccagcagucccuguaccagaacgccgacgccuacguguucgugggcagcucccgcuacagcaagacguucaagccggagaucgccauccggcccaagguccgcgaccgggagggccgcaugaacuacuacuggacccugguggagcccggggacaagaucaccuucgaggcgaccggcaaccucguggucccccgguacgccuucgccauggagcgcaacgccggguccggcaucaucaucagcgacacgccggugcacgacugcaacaccaccugccagacccccaagggcgccaucaacacgucccugcccuuccagaacauccaccccaucaccaucgggaagugcccgaaguacgugaagagcaccaagcugcggcucgcgaccggccugcgcaacauccccuccauccagagccgggggcuguucggcgccaucgccggguucaucgagggcggcuggacggggauggucgacggcugguacggguaccaccaccagaacgagcagggcagcggguacgccgccgaccucaaguccacgcagaacgcgaucgacgagaucaccaacaaggugaacagcgucaucgagaagaugaacacccaguucaccgccgugggcaaggaguucaaccaccuggagaagcggaucgagaaccugaacaagaaggucgacgacggcuuccucgacaucuggacguacaacgccgagcugcuggugcuccuggagaacgagcgcacccuggacuaccacgacuccaacgugaagaaccucuacgagaagguccggagccagcugaagaacaacgccaaggagaucgggaacggcugcuucgaguucuaccacaagugcgacaacaccugcauggaguccgugaagaacgggaccuacgacuaccccaaguacagcgaggaggccaagcugaaccgcgaggagaucgacggcgugaagcucgaguccacgcggaucuaccagauccuggcgaucuacagcaccgucgccagcucccuggugcucguggucagccugggggccaucuccuucuggaugugcagcaacggcucccugcagugccgcaucugcaucugaccacuagugcaucacauuuaaaagcaucucagccuaccaugagaauaagagaaagaaaaugaagaucaauagcuuauucaucucuuuuucuuuuucguugguguaaagccaacacccugucuaaaaaacauaaauuucuuuaaucauuuugccucuuuucucugugcuucaauuaauaaaaaauggaaagaaccuagaucuaaaaaaaaaaaaaaaaaaaaaaaaaaaaaaaaaaaaaaaaaaaaaaaaaaaaaaaaaaaaaaaaugcaucccccccccccccccccccccccccccccccaaaggcucuuuucagagccaccagaauu

SEQ ID NO: 224123 - RNA, 1939 nt, Artificial Sequence
  mRNA product Design1 comprising derived and/or modified sequence from hemagglutinin__InfluenzaA__ACV82259 HsCD5(1-24)_H1N1(California2009)-HA (CDS opt1)
gggagaaagcuuaccaugcccaugggcagccugcagccgcucgccacccuguaccugcucgggaugcugguggccuccugccugggcgacacgcugugcaucggcuaccacgccaacaacagcaccgacaccguggacaccgugcucgagaagaacgucacggugacccacuccgugaaccugcuggaggacaagcacaacgggaagcucugcaagcugcggggcgucgccccgcugcaccucgggaagugcaacaucgccggcuggauccuggggaacccggagugcgagagccuguccaccgcgagcuccuggagcuacaucguggagacccccuccagcgacaacggcacgugcuaccccggcgacuucaucgacuacgaggagcuccgcgagcagcuguccagcguguccagcuucgagcgguucgagaucuuccccaagaccuccagcuggccgaaccacgacuccgacaagggggucaccgccgccugcccccacgccggcgcgaagagcuucuacaagaaccugaucuggcucgugaagaaggggaacuccuaccccaagcugagcaaguccuacaucaacgacaagggcaaggaggugcugguccucugggggauccaccaccccagcaccagcgccgaccagcagucccuguaccagaacgccgacgccuacguguucgugggcagcucccgcuacagcaagacguucaagccggagaucgccauccggcccaagguccgcgaccgggagggccgcaugaacuacuacuggacccugguggagcccggggacaagaucaccuucgaggcgaccggcaaccucguggucccccgguacgccuucgccauggagcgcaacgccggguccggcaucaucaucagcgacacgccggugcacgacugcaacaccaccugccagacccccaagggcgccaucaacacgucccugcccuuccagaacauccaccccaucaccaucgggaagugcccgaaguacgugaagagcaccaagcugcggcucgcgaccggccugcgcaacauccccuccauccagagccgggggcuguucggcgccaucgccggguucaucgagggcggcuggacggggauggucgacggcugguacggguaccaccaccagaacgagcagggcagcggguacgccgccgaccucaaguccacgcagaacgcgaucgacgagaucaccaacaaggugaacagcgucaucgagaagaugaacacccaguucaccgccgugggcaaggaguucaaccaccuggagaagcggaucgagaaccugaacaagaaggucgacgacggcuuccucgacaucuggacguacaacgccgagcugcuggugcuccuggagaacgagcgcacccuggacuaccacgacuccaacgugaagaaccucuacgagaagguccggagccagcugaagaacaacgccaaggagaucgggaacggcugcuucgaguucuaccacaagugcgacaacaccugcauggaguccgugaagaacgggaccuacgacuaccccaaguacagcgaggaggccaagcugaaccgcgaggagaucgacggcgugaagcucgaguccacgcggaucuaccagauccuggcgaucuacagcaccgucgccagcucccuggugcucguggucagccugggggccaucuccuucuggaugugcagcaacggcucccugcagugccgcaucugcaucugaccacuaguuauaagacugacuagcccgaugggccucccaacgggcccuccuccccuccuugcaccgagauuaauaaaaaaaaaaaaaaaaaaaaaaaaaaaaaaaaaaaaaaaaaaaaaaaaaaaaaaaaaaaaaaaaugcaucccccccccccccccccccccccccccccccaaaggcucuuuucagagccaccagaauu

SEQ ID NO: 224124 - RNA, 2104 nt, Artificial Sequence
  mRNA product Design2 comprising derived and/or modified sequence from hemagglutinin__InfluenzaA__ACV82259 HsCD5(1-24)_H1N1(California2009)-HA (CDS opt1)
ggggcgcugccuacggagguggcagccaucuccuucucggcaucaagcuuaccaugcccaugggcagccugcagccgcucgccacccuguaccugcucgggaugcugguggccuccugccugggcgacacgcugugcaucggcuaccacgccaacaacagcaccgacaccguggacaccgugcucgagaagaacgucacggugacccacuccgugaaccugcuggaggacaagcacaacgggaagcucugcaagcugcggggcgucgccccgcugcaccucgggaagugcaacaucgccggcuggauccuggggaacccggagugcgagagccuguccaccgcgagcuccuggagcuacaucguggagacccccuccagcgacaacggcacgugcuaccccggcgacuucaucgacuacgaggagcuccgcgagcagcuguccagcguguccagcuucgagcgguucgagaucuuccccaagaccuccagcuggccgaaccacgacuccgacaagggggucaccgccgccugcccccacgccggcgcgaagagcuucuacaagaaccugaucuggcucgugaagaaggggaacuccuaccccaagcugagcaaguccuacaucaacgacaagggcaaggaggugcugguccucugggggauccaccaccccagcaccagcgccgaccagcagucccuguaccagaacgccgacgccuacguguucgugggcagcucccgcuacagcaagacguucaagccggagaucgccauccggcccaagguccgcgaccgggagggccgcaugaacuacuacuggacccugguggagcccggggacaagaucaccuucgaggcgaccggcaaccucguggucccccgguacgccuucgccauggagcgcaacgccggguccggcaucaucaucagcgacacgccggugcacgacugcaacaccaccugccagacccccaagggcgccaucaacacgucccugcccuuccagaacauccaccccaucaccaucgggaagugcccgaaguacgugaagagcaccaagcugcggcucgcgaccggccugcgcaacauccccuccauccagagccgggggcuguucggcgccaucgccggguucaucgagggcggcuggacggggauggucgacggcugguacggguaccaccaccagaacgagcagggcagcggguacgccgccgaccucaaguccacgcagaacgcgaucgacgagaucaccaacaaggugaacagcgucaucgagaagaugaacacccaguucaccgccgugggcaaggaguucaaccaccuggagaagcggaucgagaaccugaacaagaaggucgacgacggcuuccucgacaucuggacguacaacgccgagcugcuggugcuccuggagaacgagcgcacccuggacuaccacgacuccaacgugaagaaccucuacgagaagguccggagccagcugaagaacaacgccaaggagaucgggaacggcugcuucgaguucuaccacaagugcgacaacaccugcauggaguccgugaagaacgggaccuacgacuaccccaaguacagcgaggaggccaagcugaaccgcgaggagaucgacggcgugaagcucgaguccacgcggaucuaccagauccuggcgaucuacagcaccgucgccagcucccuggugcucguggucagccugggggccaucuccuucuggaugugcagcaacggcucccugcagugccgcaucugcaucugaccacuagugcaucacauuuaaaagcaucucagccuaccaugagaauaagagaaagaaaaugaagaucaauagcuuauucaucucuuuuucuuuuucguugguguaaagccaacacccugucuaaaaaacauaaauuucuuuaaucauuuugccucuuuucucugugcuucaauuaauaaaaaauggaaagaaccuagaucuaaaaaaaaaaaaaaaaaaaaaaaaaaaaaaaaaaaaaaaaaaaaaaaaaaaaaaaaaaaaaaaaugcaucccccccccccccccccccccccccccccccaaaggcucuuuucagagccaccagaauu

SEQ ID NO: 224125 - RNA, 1939 nt, Artificial Sequence
  mRNA product Design1 comprising derived and/or modified sequence from hemagglutinin__InfluenzaA__ACV82259 HLA-A2-SP_H1N1(California2009)-HA (CDS opt1)
gggagaaagcuuaccauggccgugauggccccgcggacccugguccuccugcugagcggcgcgcucgcccugacccagacgugggccgacacgcugugcaucggcuaccacgccaacaacagcaccgacaccguggacaccgugcucgagaagaacgucacggugacccacuccgugaaccugcuggaggacaagcacaacgggaagcucugcaagcugcggggcgucgccccgcugcaccucgggaagugcaacaucgccggcuggauccuggggaacccggagugcgagagccuguccaccgcgagcuccuggagcuacaucguggagacccccuccagcgacaacggcacgugcuaccccggcgacuucaucgacuacgaggagcuccgcgagcagcuguccagcguguccagcuucgagcgguucgagaucuuccccaagaccuccagcuggccgaaccacgacuccgacaagggggucaccgccgccugcccccacgccggcgcgaagagcuucuacaagaaccugaucuggcucgugaagaaggggaacuccuaccccaagcugagcaaguccuacaucaacgacaagggcaaggaggugcugguccucugggggauccaccaccccagcaccagcgccgaccagcagucccuguaccagaacgccgacgccuacguguucgugggcagcucccgcuacagcaagacguucaagccggagaucgccauccggcccaagguccgcgaccgggagggccgcaugaacuacuacuggacccugguggagcccggggacaagaucaccuucgaggcgaccggcaaccucguggucccccgguacgccuucgccauggagcgcaacgccggguccggcaucaucaucagcgacacgccggugcacgacugcaacaccaccugccagacccccaagggcgccaucaacacgucccugcccuuccagaacauccaccccaucaccaucgggaagugcccgaaguacgugaagagcaccaagcugcggcucgcgaccggccugcgcaacauccccuccauccagagccgggggcuguucggcgccaucgccggguucaucgagggcggcuggacggggauggucgacggcugguacggguaccaccaccagaacgagcagggcagcggguacgccgccgaccucaaguccacgcagaacgcgaucgacgagaucaccaacaaggugaacagcgucaucgagaagaugaacacccaguucaccgccgugggcaaggaguucaaccaccuggagaagcggaucgagaaccugaacaagaaggucgacgacggcuuccucgacaucuggacguacaacgccgagcugcuggugcuccuggagaacgagcgcacccuggacuaccacgacuccaacgugaagaaccucuacgagaagguccggagccagcugaagaacaacgccaaggagaucgggaacggcugcuucgaguucuaccacaagugcgacaacaccugcauggaguccgugaagaacgggaccuacgacuaccccaaguacagcgaggaggccaagcugaaccgcgaggagaucgacggcgugaagcucgaguccacgcggaucuaccagauccuggcgaucuacagcaccgucgccagcucccuggugcucguggucagccugggggccaucuccuucuggaugugcagcaacggcucccugcagugccgcaucugcaucugaccacuaguuauaagacugacuagcccgaugggccucccaacgggcccuccuccccuccuugcaccgagauuaauaaaaaaaaaaaaaaaaaaaaaaaaaaaaaaaaaaaaaaaaaaaaaaaaaaaaaaaaaaaaaaaaugcaucccccccccccccccccccccccccccccccaaaggcucuuuucagagccaccagaauu

SEQ ID NO: 224126 - RNA, 2104 nt, Artificial Sequence
  mRNA product Design2 comprising derived and/or modified sequence from hemagglutinin__InfluenzaA__ACV82259 HLA-A2-SP_H1N1(California2009)-HA (CDS opt1)
ggggcgcugccuacggagguggcagccaucuccuucucggcaucaagcuuaccauggccgugauggccccgcggacccugguccuccugcugagcggcgcgcucgcccugacccagacgugggccgacacgcugugcaucggcuaccacgccaacaacagcaccgacaccguggacaccgugcucgagaagaacgucacggugacccacuccgugaaccugcuggaggacaagcacaacgggaagcucugcaagcugcggggcgucgccccgcugcaccucgggaagugcaacaucgccggcuggauccuggggaacccggagugcgagagccuguccaccgcgagcuccuggagcuacaucguggagacccccuccagcgacaacggcacgugcuaccccggcgacuucaucgacuacgaggagcuccgcgagcagcuguccagcguguccagcuucgagcgguucgagaucuuccccaagaccuccagcuggccgaaccacgacuccgacaagggggucaccgccgccugcccccacgccggcgcgaagagcuucuacaagaaccugaucuggcucgugaagaaggggaacuccuaccccaagcugagcaaguccuacaucaacgacaagggcaaggaggugcugguccucugggggauccaccaccccagcaccagcgccgaccagcagucccuguaccagaacgccgacgccuacguguucgugggcagcucccgcuacagcaagacguucaagccggagaucgccauccggcccaagguccgcgaccgggagggccgcaugaacuacuacuggacccugguggagcccggggacaagaucaccuucgaggcgaccggcaaccucguggucccccgguacgccuucgccauggagcgcaacgccggguccggcaucaucaucagcgacacgccggugcacgacugcaacaccaccugccagacccccaagggcgccaucaacacgucccugcccuuccagaacauccaccccaucaccaucgggaagugcccgaaguacgugaagagcaccaagcugcggcucgcgaccggccugcgcaacauccccuccauccagagccgggggcuguucggcgccaucgccggguucaucgagggcggcuggacggggauggucgacggcugguacggguaccaccaccagaacgagcagggcagcggguacgccgccgaccucaaguccacgcagaacgcgaucgacgagaucaccaacaaggugaacagcgucaucgagaagaugaacacccaguucaccgccgugggcaaggaguucaaccaccuggagaagcggaucgagaaccugaacaagaaggucgacgacggcuuccucgacaucuggacguacaacgccgagcugcuggugcuccuggagaacgagcgcacccuggacuaccacgacuccaacgugaagaaccucuacgagaagguccggagccagcugaagaacaacgccaaggagaucgggaacggcugcuucgaguucuaccacaagugcgacaacaccugcauggaguccgugaagaacgggaccuacgacuaccccaaguacagcgaggaggccaagcugaaccgcgaggagaucgacggcgugaagcucgaguccacgcggaucuaccagauccuggcgaucuacagcaccgucgccagcucccuggugcucguggucagccugggggccaucuccuucuggaugugcagcaacggcucccugcagugccgcaucugcaucugaccacuagugcaucacauuuaaaagcaucucagccuaccaugagaauaagagaaagaaaaugaagaucaauagcuuauucaucucuuuuucuuuuucguugguguaaagccaacacccugucuaaaaaacauaaauuucuuuaaucauuuugccucuuuucucugugcuucaauuaauaaaaaauggaaagaaccuagaucuaaaaaaaaaaaaaaaaaaaaaaaaaaaaaaaaaaaaaaaaaaaaaaaaaaaaaaaaaaaaaaaaugcaucccccccccccccccccccccccccccccccaaaggcucuuuucagagccaccagaauu

SEQ ID NO: 224127 - RNA, 1918 nt, Artificial Sequence
  mRNA product Design1 comprising derived and/or modified sequence from hemagglutinin__InfluenzaA__ACV82259/m2 (CDS opt1) R2398/R2514
gggagaaagcuuaccaugaaggccauccuggugguccuccuguacaccuucgccaccgcgaacgccgacacgcugugcaucggcuaccacgccaacaacagcaccgacaccguggacaccgugcucgagaagaacgucacggugacccacuccgugaaccugcuggaggacaagcacaacgggaagcucugcaagcugcggggcgucgccccgcugcaccucgggaagugcaacaucgccggcuggauccuggggaacccggagugcgagagccuguccaccgcgagcuccuggagcuacaucguggagacccccagcuccgacaacggcacgugcuaccccggcgacuucaucgacuacgaggagcuccgcgagcagcugagcuccgugagcuccuucgagcgguucgagaucuuccccaagaccagcuccuggcccaaccacgacagcgacaagggggucaccgccgccugcccgcacgccggcgcgaaguccuucuacaagaaccugaucuggcucgugaagaaggggaacagcuaccccaagcuguccaagagcuacaucaacgacaagggcaaggaggugcugguccucugggggauccaccaccccagcaccuccgccgaccagcagagccuguaccagaacgccgacgccuacguguucgugggcuccagccgcuacuccaagacguucaagcccgagaucgccauccggccgaagguccgcgaccgggagggccggaugaacuacuacuggacgcugguggagcccggggacaagaucaccuucgaggcgaccggcaaccucguggucccccgcuacgccuucgccauggagcggaacgccgggagcggcaucaucaucuccgacacccccgugcacgacugcaacacgaccugccagaccccgaagggcgccaucaacaccagccugcccuuccagaacauccaccccaucacgaucgggaagugccccaaguacgugaaguccaccaagcugcgccucgcgaccggccugcggaacaucccgagcauccagucccgcgggcuguucggcgccaucgccggguucaucgagggcggcuggaccgggaugguggacggcugguacggguaccaccaccagaacgagcagggcagcggguacgccgccgaccucaaguccacgcagaacgcgaucgacgagaucaccaacaaggugaacagcgucaucgagaagaugaacacccaguucaccgccgugggcaaggaguucaaccaccuggagaagcggaucgagaaccugaacaagaaggucgacgacggcuuccucgacaucuggacguacaacgccgagcugcuggugcuccuggagaacgagcgcacccuggacuaccacgacuccaacgugaagaaccucuacgagaagguccggagccagcugaagaacaacgccaaggagaucgggaacggcugcuucgaguucuaccacaagugcgacaacaccugcauggaguccgugaagaacgggaccuacgacuaccccaaguacagcgaggaggccaagcugaaccgcgaggagaucgacggcgugaagcucgaguccacgcggaucuaccagauccuggcgaucuacagcaccgucgccagcucccuggugcucguggucagccugggggccaucuccuucuggaugugcagcaacggcucccugcagugccgcaucugcaucugaccacuaguuauaagacugacuagcccgaugggccucccaacgggcccuccuccccuccuugcaccgagauuaauaaaaaaaaaaaaaaaaaaaaaaaaaaaaaaaaaaaaaaaaaaaaaaaaaaaaaaaaaaaaaaaaugcaucccccccccccccccccccccccccccccccaaaggcucuuuucagagccaccagaauu

SEQ ID NO: 224128 - RNA, 2083 nt, Artificial Sequence
  mRNA product Design2 comprising derived and/or modified sequence from hemagglutinin__InfluenzaA__ACV82259/m2 (CDS opt1)
ggggcgcugccuacggagguggcagccaucuccuucucggcaucaagcuuaccaugaaggccauccuggugguccuccuguacaccuucgccaccgcgaacgccgacacgcugugcaucggcuaccacgccaacaacagcaccgacaccguggacaccgugcucgagaagaacgucacggugacccacuccgugaaccugcuggaggacaagcacaacgggaagcucugcaagcugcggggcgucgccccgcugcaccucgggaagugcaacaucgccggcuggauccuggggaacccggagugcgagagccuguccaccgcgagcuccuggagcuacaucguggagacccccagcuccgacaacggcacgugcuaccccggcgacuucaucgacuacgaggagcuccgcgagcagcugagcuccgugagcuccuucgagcgguucgagaucuuccccaagaccagcuccuggcccaaccacgacagcgacaagggggucaccgccgccugcccgcacgccggcgcgaaguccuucuacaagaaccugaucuggcucgugaagaaggggaacagcuaccccaagcuguccaagagcuacaucaacgacaagggcaaggaggugcugguccucugggggauccaccaccccagcaccuccgccgaccagcagagccuguaccagaacgccgacgccuacguguucgugggcuccagccgcuacuccaagacguucaagcccgagaucgccauccggccgaagguccgcgaccgggagggccggaugaacuacuacuggacgcugguggagcccggggacaagaucaccuucgaggcgaccggcaaccucguggucccccgcuacgccuucgccauggagcggaacgccgggagcggcaucaucaucuccgacacccccgugcacgacugcaacacgaccugccagaccccgaagggcgccaucaacaccagccugcccuuccagaacauccaccccaucacgaucgggaagugccccaaguacgugaaguccaccaagcugcgccucgcgaccggccugcggaacaucccgagcauccagucccgcgggcuguucggcgccaucgccggguucaucgagggcggcuggaccgggaugguggacggcugguacggguaccaccaccagaacgagcagggcagcggguacgccgccgaccucaaguccacgcagaacgcgaucgacgagaucaccaacaaggugaacagcgucaucgagaagaugaacacccaguucaccgccgugggcaaggaguucaaccaccuggagaagcggaucgagaaccugaacaagaaggucgacgacggcuuccucgacaucuggacguacaacgccgagcugcuggugcuccuggagaacgagcgcacccuggacuaccacgacuccaacgugaagaaccucuacgagaagguccggagccagcugaagaacaacgccaaggagaucgggaacggcugcuucgaguucuaccacaagugcgacaacaccugcauggaguccgugaagaacgggaccuacgacuaccccaaguacagcgaggaggccaagcugaaccgcgaggagaucgacggcgugaagcucgaguccacgcggaucuaccagauccuggcgaucuacagcaccgucgccagcucccuggugcucguggucagccugggggccaucuccuucuggaugugcagcaacggcucccugcagugccgcaucugcaucugaccacuagugcaucacauuuaaaagcaucucagccuaccaugagaauaagagaaagaaaaugaagaucaauagcuuauucaucucuuuuucuuuuucguugguguaaagccaacacccugucuaaaaaacauaaauuucuuuaaucauuuugccucuuuucucugugcuucaauuaauaaaaaauggaaagaaccuagaucuaaaaaaaaaaaaaaaaaaaaaaaaaaaaaaaaaaaaaaaaaaaaaaaaaaaaaaaaaaaaaaaaugcaucccccccccccccccccccccccccccccccaaaggcucuuuucagagccaccagaauu

SEQ ID NO: 224129 - RNA, 1918 nt, Artificial Sequence
  mRNA product Design1 comprising derived and/or modified sequence from hemagglutinin__InfluenzaA__ACP41953 (CDS opt1) R5218/R5437
gggagaaagcuuaccaugaaggccauccuggugguccuccuguacaccuucgccaccgcgaacgccgacacgcugugcaucggcuaccacgccaacaacagcaccgacaccguggacaccgugcucgagaagaacgucacggugacccacuccgugaaccugcuggaggacaagcacaacgggaagcucugcaagcugcggggcgucgccccgcugcaccucgggaagugcaacaucgccggcuggauccuggggaacccggagugcgagagccuguccaccgcgagcuccuggagcuacaucguggagacccccuccagcgacaacggcacgugcuaccccggcgacuucaucgacuacgaggagcuccgcgagcagcuguccagcguguccagcuucgagcgguucgagaucuuccccaagaccuccagcuggccgaaccacgacuccaacaagggggucaccgccgccugcccccacgccggcgcgaagagcuucuacaagaaccugaucuggcucgugaagaaggggaacuccuaccccaagcugagcaaguccuacaucaacgacaagggcaaggaggugcugguccucugggggauccaccaccccagcaccagcgccgaccagcagucccuguaccagaacgccgacgccuacguguucgugggcagcucccgcuacagcaagaaguucaagccggagaucgccauccggcccaagguccgcgaccaggagggccgcaugaacuacuacuggacccugguggagcccggggacaagaucaccuucgaggcgaccggcaaccucguggucccccgguacgccuucgccauggagcgcaacgccggguccggcaucaucaucagcgacacgccggugcacgacugcaacaccaccugccagacccccaagggcgccaucaacacgucccugcccuuccagaacauccaccccaucaccaucgggaagugcccgaaguacgugaagagcaccaagcugcggcucgcgaccggccugcgcaacauccccuccauccagagccgggggcuguucggcgccaucgccggguucaucgagggcggcuggacggggauggucgacggcugguacggguaccaccaccagaacgagcagggcagcggguacgccgccgaccucaaguccacgcagaacgcgaucgacgagaucaccaacaaggugaacagcgucaucgagaagaugaacacccaguucaccgccgugggcaaggaguucaaccaccuggagaagcggaucgagaaccugaacaagaaggucgacgacggcuuccucgacaucuggacguacaacgccgagcugcuggugcuccuggagaacgagcgcacccuggacuaccacgacuccaacgugaagaaccucuacgagaagguccggagccagcugaagaacaacgccaaggagaucgggaacggcugcuucgaguucuaccacaagugcgacaacaccugcauggaguccgugaagaacgggaccuacgacuaccccaaguacagcgaggaggccaagcugaaccgcgaggagaucgacggcgugaagcucgaguccacgcggaucuaccagauccuggcgaucuacagcaccgucgccagcucccuggugcucguggucagccugggggccaucuccuucuggaugugcagcaacggcucccugcagugccgcaucugcaucugaggacuaguuauaagacugacuagcccgaugggccucccaacgggcccuccuccccuccuugcaccgagauuaauaaaaaaaaaaaaaaaaaaaaaaaaaaaaaaaaaaaaaaaaaaaaaaaaaaaaaaaaaaaaaaaaugcaucccccccccccccccccccccccccccccccaaaggcucuuuucagagccaccagaauu

SEQ ID NO: 224130 - RNA, 2083 nt, Artificial Sequence
  mRNA product Design2 comprising derived and/or modified sequence from hemagglutinin__InfluenzaA__ACP41953 (CDS opt1)
ggggcgcugccuacggagguggcagccaucuccuucucggcaucaagcuuaccaugaaggccauccuggugguccuccuguacaccuucgccaccgcgaacgccgacacgcugugcaucggcuaccacgccaacaacagcaccgacaccguggacaccgugcucgagaagaacgucacggugacccacuccgugaaccugcuggaggacaagcacaacgggaagcucugcaagcugcggggcgucgccccgcugcaccucgggaagugcaacaucgccggcuggauccuggggaacccggagugcgagagccuguccaccgcgagcuccuggagcuacaucguggagacccccuccagcgacaacggcacgugcuaccccggcgacuucaucgacuacgaggagcuccgcgagcagcuguccagcguguccagcuucgagcgguucgagaucuuccccaagaccuccagcuggccgaaccacgacuccaacaagggggucaccgccgccugcccccacgccggcgcgaagagcuucuacaagaaccugaucuggcucgugaagaaggggaacuccuaccccaagcugagcaaguccuacaucaacgacaagggcaaggaggugcugguccucugggggauccaccaccccagcaccagcgccgaccagcagucccuguaccagaacgccgacgccuacguguucgugggcagcucccgcuacagcaagaaguucaagccggagaucgccauccggcccaagguccgcgaccaggagggccgcaugaacuacuacuggacccugguggagcccggggacaagaucaccuucgaggcgaccggcaaccucguggucccccgguacgccuucgccauggagcgcaacgccggguccggcaucaucaucagcgacacgccggugcacgacugcaacaccaccugccagacccccaagggcgccaucaacacgucccugcccuuccagaacauccaccccaucaccaucgggaagugcccgaaguacgugaagagcaccaagcugcggcucgcgaccggccugcgcaacauccccuccauccagagccgggggcuguucggcgccaucgccggguucaucgagggcggcuggacggggauggucgacggcugguacggguaccaccaccagaacgagcagggcagcggguacgccgccgaccucaaguccacgcagaacgcgaucgacgagaucaccaacaaggugaacagcgucaucgagaagaugaacacccaguucaccgccgugggcaaggaguucaaccaccuggagaagcggaucgagaaccugaacaagaaggucgacgacggcuuccucgacaucuggacguacaacgccgagcugcuggugcuccuggagaacgagcgcacccuggacuaccacgacuccaacgugaagaaccucuacgagaagguccggagccagcugaagaacaacgccaaggagaucgggaacggcugcuucgaguucuaccacaagugcgacaacaccugcauggaguccgugaagaacgggaccuacgacuaccccaaguacagcgaggaggccaagcugaaccgcgaggagaucgacggcgugaagcucgaguccacgcggaucuaccagauccuggcgaucuacagcaccgucgccagcucccuggugcucguggucagccugggggccaucuccuucuggaugugcagcaacggcucccugcagugccgcaucugcaucugaggacuagugcaucacauuuaaaagcaucucagccuaccaugagaauaagagaaagaaaaugaagaucaauagcuuauucaucucuuuuucuuuuucguugguguaaagccaacacccugucuaaaaaacauaaauuucuuuaaucauuuugccucuuuucucugugcuucaauuaauaaaaaauggaaagaaccuagaucuaaaaaaaaaaaaaaaaaaaaaaaaaaaaaaaaaaaaaaaaaaaaaaaaaaaaaaaaaaaaaaaaugcaucccccccccccccccccccccccccccccccaaaggcucuuuucagagccaccagaauu

SEQ ID NO: 224131 - RNA, 1918 nt, Artificial Sequence
  mRNA product Design1 comprising derived and/or modified sequence from hemagglutinin__InfluenzaA__AFM72832(CDS opt1) R5219
gggagaaagcuuaccaugaaggccauccuggugguccuccuguacaccuucgccaccgcgaacgccgacacgcugugcaucggcuaccacgccaacaacagcaccgacaccguggacaccgugcucgagaagaacgucacggugacccacuccgugaaccugcuggaggacaagcacaacgggaagcucugcaagcugcggggcgucgccccgcugcaccucgggaagugcaacaucgccggcuggauccuggggaacccggagugcgagagccuguccaccgcgagcuccuggagcuacaucguggagacccccuccagcgacaacggcacgugcuaccccggcgacuucaucgacuacgaggagcuccgcgagcagcuguccagcguguccagcuucgagcgguucgagaucuuccccaagaccuccagcuggccgaaccacgacuccaacaagggggucaccgccgccugcccccacgccggcgcgaagagcuucuacaagaaccugaucuggcucgugaagaaggggaacuccuaccccaagcugagcaaguccuacaucaacgacaagggcaaggaggugcugguccucugggggauccaccaccccagcaccagcgccgaccagcagucccuguaccagaacgccgacgccuacguguucgugggcagcucccgcuacagcaagaaguucaagccggagaucgccauccggcccaagguccgcgaccgggagggccgcaugaacuacuacuggacccugguggagcccggggacaagaucaccuucgaggcgaccggcaaccucguggucccccgguacgccuucgccauggagcgcaacgccggguccggcaucaucaucagcgacacgccggugcacgacugcaacaccaccugccagacccccaagggcgccaucaacacgucccugcccuuccagaacauccaccccaucaccaucgggaagugcccgaaguacgugaagagcaccaagcugcggcucgcgaccggccugcgcaacauccccuccauccagagccgggggcuguucggcgccaucgccggguucaucgagggcggcuggacggggauggucgacggcugguacggguaccaccaccagaacgagcagggcagcggguacgccgccgaccucaaguccacgcagaacgcgaucgacgagaucaccaacaaggugaacagcgucaucgagaagaugaacacccaguucaccgccgugggcaaggaguucaaccaccuggagaagcggaucgagaaccugaacaagaaggucgacgacggcuuccucgacaucuggacguacaacgccgagcugcuggugcuccuggagaacgagcgcacccuggacuaccacgacuccaacgugaagaaccucuacgagaagguccggagccagcugaagaacaacgccaaggagaucgggaacggcugcuucgaguucuaccacaagugcgacaacaccugcauggaguccgugaagaacgggaccuacgacuaccccaaguacagcgaggaggccaagcugaaccgcgaggagaucgacggcgugaagcucgaguccacgcggaucuaccagauccuggcgaucuacagcaccgucgccagcucccuggugcucguggucagccugggggccaucuccuucuggaugugcagcaacggcucccugcagugccgcaucugcaucugaggacuaguuauaagacugacuagcccgaugggccucccaacgggcccuccuccccuccuugcaccgagauuaauaaaaaaaaaaaaaaaaaaaaaaaaaaaaaaaaaaaaaaaaaaaaaaaaaaaaaaaaaaaaaaaaugcaucccccccccccccccccccccccccccccccaaaggcucuuuucagagccaccagaauu

SEQ ID NO: 224132 - RNA, 2083 nt, Artificial Sequence
  mRNA product Design2 comprising derived and/or modified sequence from hemagglutinin__InfluenzaA__AFM72832(CDS opt1)
ggggcgcugccuacggagguggcagccaucuccuucucggcaucaagcuuaccaugaaggccauccuggugguccuccuguacaccuucgccaccgcgaacgccgacacgcugugcaucggcuaccacgccaacaacagcaccgacaccguggacaccgugcucgagaagaacgucacggugacccacuccgugaaccugcuggaggacaagcacaacgggaagcucugcaagcugcggggcgucgccccgcugcaccucgggaagugcaacaucgccggcuggauccuggggaacccggagugcgagagccuguccaccgcgagcuccuggagcuacaucguggagacccccuccagcgacaacggcacgugcuaccccggcgacuucaucgacuacgaggagcuccgcgagcagcuguccagcguguccagcuucgagcgguucgagaucuuccccaagaccuccagcuggccgaaccacgacuccaacaagggggucaccgccgccugcccccacgccggcgcgaagagcuucuacaagaaccugaucuggcucgugaagaaggggaacuccuaccccaagcugagcaaguccuacaucaacgacaagggcaaggaggugcugguccucugggggauccaccaccccagcaccagcgccgaccagcagucccuguaccagaacgccgacgccuacguguucgugggcagcucccgcuacagcaagaaguucaagccggagaucgccauccggcccaagguccgcgaccgggagggccgcaugaacuacuacuggacccugguggagcccggggacaagaucaccuucgaggcgaccggcaaccucguggucccccgguacgccuucgccauggagcgcaacgccggguccggcaucaucaucagcgacacgccggugcacgacugcaacaccaccugccagacccccaagggcgccaucaacacgucccugcccuuccagaacauccaccccaucaccaucgggaagugcccgaaguacgugaagagcaccaagcugcggcucgcgaccggccugcgcaacauccccuccauccagagccgggggcuguucggcgccaucgccggguucaucgagggcggcuggacggggauggucgacggcugguacggguaccaccaccagaacgagcagggcagcggguacgccgccgaccucaaguccacgcagaacgcgaucgacgagaucaccaacaaggugaacagcgucaucgagaagaugaacacccaguucaccgccgugggcaaggaguucaaccaccuggagaagcggaucgagaaccugaacaagaaggucgacgacggcuuccucgacaucuggacguacaacgccgagcugcuggugcuccuggagaacgagcgcacccuggacuaccacgacuccaacgugaagaaccucuacgagaagguccggagccagcugaagaacaacgccaaggagaucgggaacggcugcuucgaguucuaccacaagugcgacaacaccugcauggaguccgugaagaacgggaccuacgacuaccccaaguacagcgaggaggccaagcugaaccgcgaggagaucgacggcgugaagcucgaguccacgcggaucuaccagauccuggcgaucuacagcaccgucgccagcucccuggugcucguggucagccugggggccaucuccuucuggaugugcagcaacggcucccugcagugccgcaucugcaucugaggacuagugcaucacauuuaaaagcaucucagccuaccaugagaauaagagaaagaaaaugaagaucaauagcuuauucaucucuuuuucuuuuucguugguguaaagccaacacccugucuaaaaaacauaaauuucuuuaaucauuuugccucuuuucucugugcuucaauuaauaaaaaauggaaagaaccuagaucuaaaaaaaaaaaaaaaaaaaaaaaaaaaaaaaaaaaaaaaaaaaaaaaaaaaaaaaaaaaaaaaaugcaucccccccccccccccccccccccccccccccaaaggcucuuuucagagccaccagaauu

SEQ ID NO: 224133 - RNA, 1918 nt, Artificial Sequence
  mRNA product Design1 comprising derived and/or modified sequence from hemagglutinin__InfluenzaA__EPI662594 (CDS opt1)
gggagaaagcuuaccaugaaggccauccuggugguccuccuguacaccuucaccacggccaacgcggacacccugugcaucggcuaccacgccaacaacagcaccgacaccguggacacggugcucgagaagaacgucaccgugacccacuccgugaaccugcuggaggacaagcacaacgggaagcucugcaagcugcgcggcgucgcgccccugcaccucgggaagugcaacaucgccggcuggauccuggggaacccggagugcgagagccuguccaccgccagcuccuggagcuacaucguggagacguccaacagcgacaacgggaccugcuaccccggcgacuucaucaacuacgaggagcuccgggagcagcuguccagcguguccagcuucgagcgcuucgagaucuuccccaagaccuccagcuggcccaaccacgacuccaacaagggcgucaccgccgccugcccgcacgccggcgccaagagcuucuacaagaaccugaucuggcucgugaagaaggggaacuccuaccccaagcugaaccagagcuacaucaacgacaagggcaaggaggugcugguccucugggggauccaccaccccuccacgaccgcggaccagcagagccuguaccagaacgccgacgccuacguguucgugggcaccagccgguacuccaagaaguucaagcccgagaucgccacccgcccgaagguccgggaccaggagggccgcaugaacuacuacuggacgcugguggagcccggggacaagaucaccuucgaggccaccggcaaccucguggucccccgguacgcguucaccauggagcgcaacgccgggagcggcaucaucaucuccgacacgcccgugcacgacugcaacacgaccugccagaccccggagggcgccaucaacaccagccugcccuuccagaacauccaccccaucaccaucgggaagugccccaaguacgugaaguccaccaagcugcggcucgccaccggccugcgcaacgucccgagcauccagucccgggggcuguucggcgccaucgcgggguucaucgagggcggcuggacggggaugguggacggcugguacggguaccaccaccagaacgagcagggcagcggguacgccgccgaccucaaguccacccagaacgccaucgacaagaucaccaacaaggugaacagcgucaucgagaagaugaacacccaguucacggccgugggcaaggaguucaaccaccuggagaagcgcaucgagaaccugaacaagaaggucgacgacggcuuccucgacaucuggaccuacaacgcggagcugcuggugcuccuggagaacgagcggacccuggacuaccacgacuccaacgugaagaaccucuacgagaagguccgcaaccagcugaagaacaacgccaaggagaucgggaacggcugcuucgaguucuaccacaagugcgacaacacgugcauggagagcgugaagaacgggaccuacgacuaccccaaguacuccgaggaggccaagcugaaccgggagaagaucgacggcgugaagcucgagagcacccgcaucuaccagauccuggccaucuacuccaccgucgccagcucccuggugcucguggucagccugggggcgaucuccuucuggaugugcagcaacggcagccugcagugccggaucugcaucugaggacuaguuauaagacugacuagcccgaugggccucccaacgggcccuccuccccuccuugcaccgagauuaauaaaaaaaaaaaaaaaaaaaaaaaaaaaaaaaaaaaaaaaaaaaaaaaaaaaaaaaaaaaaaaaaugcaucccccccccccccccccccccccccccccccaaaggcucuuuucagagccaccagaauu

SEQ ID NO: 224134 - RNA, 2083 nt, Artificial Sequence
  mRNA product Design2 comprising derived and/or modified sequence from hemagglutinin__InfluenzaA__EPI662594 (CDS opt1)
ggggcgcugccuacggagguggcagccaucuccuucucggcaucaagcuuaccaugaaggccauccuggugguccuccuguacaccuucaccacggccaacgcggacacccugugcaucggcuaccacgccaacaacagcaccgacaccguggacacggugcucgagaagaacgucaccgugacccacuccgugaaccugcuggaggacaagcacaacgggaagcucugcaagcugcgcggcgucgcgccccugcaccucgggaagugcaacaucgccggcuggauccuggggaacccggagugcgagagccuguccaccgccagcuccuggagcuacaucguggagacguccaacagcgacaacgggaccugcuaccccggcgacuucaucaacuacgaggagcuccgggagcagcuguccagcguguccagcuucgagcgcuucgagaucuuccccaagaccuccagcuggcccaaccacgacuccaacaagggcgucaccgccgccugcccgcacgccggcgccaagagcuucuacaagaaccugaucuggcucgugaagaaggggaacuccuaccccaagcugaaccagagcuacaucaacgacaagggcaaggaggugcugguccucugggggauccaccaccccuccacgaccgcggaccagcagagccuguaccagaacgccgacgccuacguguucgugggcaccagccgguacuccaagaaguucaagcccgagaucgccacccgcccgaagguccgggaccaggagggccgcaugaacuacuacuggacgcugguggagcccggggacaagaucaccuucgaggccaccggcaaccucguggucccccgguacgcguucaccauggagcgcaacgccgggagcggcaucaucaucuccgacacgcccgugcacgacugcaacacgaccugccagaccccggagggcgccaucaacaccagccugcccuuccagaacauccaccccaucaccaucgggaagugccccaaguacgugaaguccaccaagcugcggcucgccaccggccugcgcaacgucccgagcauccagucccgggggcuguucggcgccaucgcgggguucaucgagggcggcuggacggggaugguggacggcugguacggguaccaccaccagaacgagcagggcagcggguacgccgccgaccucaaguccacccagaacgccaucgacaagaucaccaacaaggugaacagcgucaucgagaagaugaacacccaguucacggccgugggcaaggaguucaaccaccuggagaagcgcaucgagaaccugaacaagaaggucgacgacggcuuccucgacaucuggaccuacaacgcggagcugcuggugcuccuggagaacgagcggacccuggacuaccacgacuccaacgugaagaaccucuacgagaagguccgcaaccagcugaagaacaacgccaaggagaucgggaacggcugcuucgaguucuaccacaagugcgacaacacgugcauggagagcgugaagaacgggaccuacgacuaccccaaguacuccgaggaggccaagcugaaccgggagaagaucgacggcgugaagcucgagagcacccgcaucuaccagauccuggccaucuacuccaccgucgccagcucccuggugcucguggucagccugggggcgaucuccuucuggaugugcagcaacggcagccugcagugccggaucugcaucugaggacuagugcaucacauuuaaaagcaucucagccuaccaugagaauaagagaaagaaaaugaagaucaauagcuuauucaucucuuuuucuuuuucguugguguaaagccaacacccugucuaaaaaacauaaauuucuuuaaucauuuugccucuuuucucugugcuucaauuaauaaaaaauggaaagaaccuagaucuaaaaaaaaaaaaaaaaaaaaaaaaaaaaaaaaaaaaaaaaaaaaaaaaaaaaaaaaaaaaaaaaugcaucccccccccccccccccccccccccccccccaaaggcucuuuucagagccaccagaauu

SEQ ID NO: 224135 - RNA, 1921 nt, Artificial Sequence
  mRNA product Design1 comprising derived and/or modified sequence from hemagglutinin__InfluenzaA__EPI662594 HsALB(1-18)_H1N1(Michigan2015_EPI662594)-HA (CDS opt1)
gggagaaagcuuaccaugaagugggugaccuucaucagccugcucuuccuguucuccagcgccuacuccgacacccugugcaucggcuaccacgccaacaacagcaccgacaccguggacacggugcucgagaagaacgucaccgugacccacuccgugaaccugcuggaggacaagcacaacgggaagcucugcaagcugcgcggcgucgcgccccugcaccucgggaagugcaacaucgccggcuggauccuggggaacccggagugcgagagccuguccaccgccagcuccuggagcuacaucguggagacguccaacagcgacaacgggaccugcuaccccggcgacuucaucaacuacgaggagcuccgggagcagcuguccagcguguccagcuucgagcgcuucgagaucuuccccaagaccuccagcuggcccaaccacgacuccaacaagggcgucaccgccgccugcccgcacgccggcgccaagagcuucuacaagaaccugaucuggcucgugaagaaggggaacuccuaccccaagcugaaccagagcuacaucaacgacaagggcaaggaggugcugguccucugggggauccaccaccccuccacgaccgcggaccagcagagccuguaccagaacgccgacgccuacguguucgugggcaccagccgguacuccaagaaguucaagcccgagaucgccacccgcccgaagguccgggaccaggagggccgcaugaacuacuacuggacgcugguggagcccggggacaagaucaccuucgaggccaccggcaaccucguggucccccgguacgcguucaccauggagcgcaacgccgggagcggcaucaucaucuccgacacgcccgugcacgacugcaacacgaccugccagaccccggagggcgccaucaacaccagccugcccuuccagaacauccaccccaucaccaucgggaagugccccaaguacgugaaguccaccaagcugcggcucgccaccggccugcgcaacgucccgagcauccagucccgggggcuguucggcgccaucgcgggguucaucgagggcggcuggacggggaugguggacggcugguacggguaccaccaccagaacgagcagggcagcggguacgccgccgaccucaaguccacccagaacgccaucgacaagaucaccaacaaggugaacagcgucaucgagaagaugaacacccaguucacggccgugggcaaggaguucaaccaccuggagaagcgcaucgagaaccugaacaagaaggucgacgacggcuuccucgacaucuggaccuacaacgcggagcugcuggugcuccuggagaacgagcggacccuggacuaccacgacuccaacgugaagaaccucuacgagaagguccgcaaccagcugaagaacaacgccaaggagaucgggaacggcugcuucgaguucuaccacaagugcgacaacacgugcauggagagcgugaagaacgggaccuacgacuaccccaaguacuccgaggaggccaagcugaaccgggagaagaucgacggcgugaagcucgagagcacccgcaucuaccagauccuggccaucuacuccaccgucgccagcucccuggugcucguggucagccugggggcgaucuccuucuggaugugcagcaacggcagccugcagugccggaucugcaucugaggacuaguuauaagacugacuagcccgaugggccucccaacgggcccuccuccccuccuugcaccgagauuaauaaaaaaaaaaaaaaaaaaaaaaaaaaaaaaaaaaaaaaaaaaaaaaaaaaaaaaaaaaaaaaaaugcaucccccccccccccccccccccccccccccccaaaggcucuuuucagagccaccagaauu

SEQ ID NO: 224136 - RNA, 2086 nt, Artificial Sequence
  mRNA product Design2 comprising derived and/or modified sequence from hemagglutinin__InfluenzaA__EPI662594 HsALB(1-18)_H1N1(Michigan2015_EPI662594)-HA (CDS opt1)
ggggcgcugccuacggagguggcagccaucuccuucucggcaucaagcuuaccaugaagugggugaccuucaucagccugcucuuccuguucuccagcgccuacuccgacacccugugcaucggcuaccacgccaacaacagcaccgacaccguggacacggugcucgagaagaacgucaccgugacccacuccgugaaccugcuggaggacaagcacaacgggaagcucugcaagcugcgcggcgucgcgccccugcaccucgggaagugcaacaucgccggcuggauccuggggaacccggagugcgagagccuguccaccgccagcuccuggagcuacaucguggagacguccaacagcgacaacgggaccugcuaccccggcgacuucaucaacuacgaggagcuccgggagcagcuguccagcguguccagcuucgagcgcuucgagaucuuccccaagaccuccagcuggcccaaccacgacuccaacaagggcgucaccgccgccugcccgcacgccggcgccaagagcuucuacaagaaccugaucuggcucgugaagaaggggaacuccuaccccaagcugaaccagagcuacaucaacgacaagggcaaggaggugcugguccucugggggauccaccaccccuccacgaccgcggaccagcagagccuguaccagaacgccgacgccuacguguucgugggcaccagccgguacuccaagaaguucaagcccgagaucgccacccgcccgaagguccgggaccaggagggccgcaugaacuacuacuggacgcugguggagcccggggacaagaucaccuucgaggccaccggcaaccucguggucccccgguacgcguucaccauggagcgcaacgccgggagcggcaucaucaucuccgacacgcccgugcacgacugcaacacgaccugccagaccccggagggcgccaucaacaccagccugcccuuccagaacauccaccccaucaccaucgggaagugccccaaguacgugaaguccaccaagcugcggcucgccaccggccugcgcaacgucccgagcauccagucccgggggcuguucggcgccaucgcgggguucaucgagggcggcuggacggggaugguggacggcugguacggguaccaccaccagaacgagcagggcagcggguacgccgccgaccucaaguccacccagaacgccaucgacaagaucaccaacaaggugaacagcgucaucgagaagaugaacacccaguucacggccgugggcaaggaguucaaccaccuggagaagcgcaucgagaaccugaacaagaaggucgacgacggcuuccucgacaucuggaccuacaacgcggagcugcuggugcuccuggagaacgagcggacccuggacuaccacgacuccaacgugaagaaccucuacgagaagguccgcaaccagcugaagaacaacgccaaggagaucgggaacggcugcuucgaguucuaccacaagugcgacaacacgugcauggagagcgugaagaacgggaccuacgacuaccccaaguacuccgaggaggccaagcugaaccgggagaagaucgacggcgugaagcucgagagcacccgcaucuaccagauccuggccaucuacuccaccgucgccagcucccuggugcucguggucagccugggggcgaucuccuucuggaugugcagcaacggcagccugcagugccggaucugcaucugaggacuagugcaucacauuuaaaagcaucucagccuaccaugagaauaagagaaagaaaaugaagaucaauagcuuauucaucucuuuuucuuuuucguugguguaaagccaacacccugucuaaaaaacauaaauuucuuuaaucauuuugccucuuuucucugugcuucaauuaauaaaaaauggaaagaaccuagaucuaaaaaaaaaaaaaaaaaaaaaaaaaaaaaaaaaaaaaaaaaaaaaaaaaaaaaaaaaaaaaaaaugcaucccccccccccccccccccccccccccccccaaaggcucuuuucagagccaccagaauu

SEQ ID NO: 224137 - RNA, 1921 nt, Artificial Sequence
  mRNA product Design1 comprising derived and/or modified sequence from hemagglutinin__InfluenzaA__EPI662594 IgE-leader_H1N1(Michigan2015_EPI662594)-HA (CDS opt1)
gggagaaagcuuaccauggacuggaccuggauccuguuccucguggccgccgcgacccgcguccacagcgacacccugugcaucggcuaccacgccaacaacagcaccgacaccguggacacggugcucgagaagaacgucaccgugacccacuccgugaaccugcuggaggacaagcacaacgggaagcucugcaagcugcgcggcgucgcgccccugcaccucgggaagugcaacaucgccggcuggauccuggggaacccggagugcgagagccuguccaccgccagcuccuggagcuacaucguggagacguccaacagcgacaacgggaccugcuaccccggcgacuucaucaacuacgaggagcuccgggagcagcuguccagcguguccagcuucgagcgcuucgagaucuuccccaagaccuccagcuggcccaaccacgacuccaacaagggcgucaccgccgccugcccgcacgccggcgccaagagcuucuacaagaaccugaucuggcucgugaagaaggggaacuccuaccccaagcugaaccagagcuacaucaacgacaagggcaaggaggugcugguccucugggggauccaccaccccuccacgaccgcggaccagcagagccuguaccagaacgccgacgccuacguguucgugggcaccagccgguacuccaagaaguucaagcccgagaucgccacccgcccgaagguccgggaccaggagggccgcaugaacuacuacuggacgcugguggagcccggggacaagaucaccuucgaggccaccggcaaccucguggucccccgguacgcguucaccauggagcgcaacgccgggagcggcaucaucaucuccgacacgcccgugcacgacugcaacacgaccugccagaccccggagggcgccaucaacaccagccugcccuuccagaacauccaccccaucaccaucgggaagugccccaaguacgugaaguccaccaagcugcggcucgccaccggccugcgcaacgucccgagcauccagucccgggggcuguucggcgccaucgcgggguucaucgagggcggcuggacggggaugguggacggcugguacggguaccaccaccagaacgagcagggcagcggguacgccgccgaccucaaguccacccagaacgccaucgacaagaucaccaacaaggugaacagcgucaucgagaagaugaacacccaguucacggccgugggcaaggaguucaaccaccuggagaagcgcaucgagaaccugaacaagaaggucgacgacggcuuccucgacaucuggaccuacaacgcggagcugcuggugcuccuggagaacgagcggacccuggacuaccacgacuccaacgugaagaaccucuacgagaagguccgcaaccagcugaagaacaacgccaaggagaucgggaacggcugcuucgaguucuaccacaagugcgacaacacgugcauggagagcgugaagaacgggaccuacgacuaccccaaguacuccgaggaggccaagcugaaccgggagaagaucgacggcgugaagcucgagagcacccgcaucuaccagauccuggccaucuacuccaccgucgccagcucccuggugcucguggucagccugggggcgaucuccuucuggaugugcagcaacggcagccugcagugccggaucugcaucugaggacuaguuauaagacugacuagcccgaugggccucccaacgggcccuccuccccuccuugcaccgagauuaauaaaaaaaaaaaaaaaaaaaaaaaaaaaaaaaaaaaaaaaaaaaaaaaaaaaaaaaaaaaaaaaaugcaucccccccccccccccccccccccccccccccaaaggcucuuuucagagccaccagaauu

SEQ ID NO: 224138 - RNA, 2086 nt, Artificial Sequence
  mRNA product Design2 comprising derived and/or modified sequence from hemagglutinin__InfluenzaA__EPI662594 IgE-leader_H1N1(Michigan2015_EPI662594)-HA (CDS opt1)
ggggcgcugccuacggagguggcagccaucuccuucucggcaucaagcuuaccauggacuggaccuggauccuguuccucguggccgccgcgacccgcguccacagcgacacccugugcaucggcuaccacgccaacaacagcaccgacaccguggacacggugcucgagaagaacgucaccgugacccacuccgugaaccugcuggaggacaagcacaacgggaagcucugcaagcugcgcggcgucgcgccccugcaccucgggaagugcaacaucgccggcuggauccuggggaacccggagugcgagagccuguccaccgccagcuccuggagcuacaucguggagacguccaacagcgacaacgggaccugcuaccccggcgacuucaucaacuacgaggagcuccgggagcagcuguccagcguguccagcuucgagcgcuucgagaucuuccccaagaccuccagcuggcccaaccacgacuccaacaagggcgucaccgccgccugcccgcacgccggcgccaagagcuucuacaagaaccugaucuggcucgugaagaaggggaacuccuaccccaagcugaaccagagcuacaucaacgacaagggcaaggaggugcugguccucugggggauccaccaccccuccacgaccgcggaccagcagagccuguaccagaacgccgacgccuacguguucgugggcaccagccgguacuccaagaaguucaagcccgagaucgccacccgcccgaagguccgggaccaggagggccgcaugaacuacuacuggacgcugguggagcccggggacaagaucaccuucgaggccaccggcaaccucguggucccccgguacgcguucaccauggagcgcaacgccgggagcggcaucaucaucuccgacacgcccgugcacgacugcaacacgaccugccagaccccggagggcgccaucaacaccagccugcccuuccagaacauccaccccaucaccaucgggaagugccccaaguacgugaaguccaccaagcugcggcucgccaccggccugcgcaacgucccgagcauccagucccgggggcuguucggcgccaucgcgggguucaucgagggcggcuggacggggaugguggacggcugguacggguaccaccaccagaacgagcagggcagcggguacgccgccgaccucaaguccacccagaacgccaucgacaagaucaccaacaaggugaacagcgucaucgagaagaugaacacccaguucacggccgugggcaaggaguucaaccaccuggagaagcgcaucgagaaccugaacaagaaggucgacgacggcuuccucgacaucuggaccuacaacgcggagcugcuggugcuccuggagaacgagcggacccuggacuaccacgacuccaacgugaagaaccucuacgagaagguccgcaaccagcugaagaacaacgccaaggagaucgggaacggcugcuucgaguucuaccacaagugcgacaacacgugcauggagagcgugaagaacgggaccuacgacuaccccaaguacuccgaggaggccaagcugaaccgggagaagaucgacggcgugaagcucgagagcacccgcaucuaccagauccuggccaucuacuccaccgucgccagcucccuggugcucguggucagccugggggcgaucuccuucuggaugugcagcaacggcagccugcagugccggaucugcaucugaggacuagugcaucacauuuaaaagcaucucagccuaccaugagaauaagagaaagaaaaugaagaucaauagcuuauucaucucuuuuucuuuuucguugguguaaagccaacacccugucuaaaaaacauaaauuucuuuaaucauuuugccucuuuucucugugcuucaauuaauaaaaaauggaaagaaccuagaucuaaaaaaaaaaaaaaaaaaaaaaaaaaaaaaaaaaaaaaaaaaaaaaaaaaaaaaaaaaaaaaaaugcaucccccccccccccccccccccccccccccccaaaggcucuuuucagagccaccagaauu

SEQ ID NO: 224139 - RNA, 1939 nt, Artificial Sequence
  mRNA product Design1 comprising derived and/or modified sequence from hemagglutinin__InfluenzaA__EPI662594 HsCD5(1-24)_H1N1(Michigan2015_EPI662594)-HA (CDS opt1)
gggagaaagcuuaccaugcccaugggcagccugcagccgcucgccacccuguaccugcucgggaugcugguggccuccugccugggcgacacccugugcaucggcuaccacgccaacaacagcaccgacaccguggacacggugcucgagaagaacgucaccgugacccacuccgugaaccugcuggaggacaagcacaacgggaagcucugcaagcugcgcggcgucgcgccccugcaccucgggaagugcaacaucgccggcuggauccuggggaacccggagugcgagagccuguccaccgccagcuccuggagcuacaucguggagacguccaacagcgacaacgggaccugcuaccccggcgacuucaucaacuacgaggagcuccgggagcagcuguccagcguguccagcuucgagcgcuucgagaucuuccccaagaccuccagcuggcccaaccacgacuccaacaagggcgucaccgccgccugcccgcacgccggcgccaagagcuucuacaagaaccugaucuggcucgugaagaaggggaacuccuaccccaagcugaaccagagcuacaucaacgacaagggcaaggaggugcugguccucugggggauccaccaccccuccacgaccgcggaccagcagagccuguaccagaacgccgacgccuacguguucgugggcaccagccgguacuccaagaaguucaagcccgagaucgccacccgcccgaagguccgggaccaggagggccgcaugaacuacuacuggacgcugguggagcccggggacaagaucaccuucgaggccaccggcaaccucguggucccccgguacgcguucaccauggagcgcaacgccgggagcggcaucaucaucuccgacacgcccgugcacgacugcaacacgaccugccagaccccggagggcgccaucaacaccagccugcccuuccagaacauccaccccaucaccaucgggaagugccccaaguacgugaaguccaccaagcugcggcucgccaccggccugcgcaacgucccgagcauccagucccgggggcuguucggcgccaucgcgggguucaucgagggcggcuggacggggaugguggacggcugguacggguaccaccaccagaacgagcagggcagcggguacgccgccgaccucaaguccacccagaacgccaucgacaagaucaccaacaaggugaacagcgucaucgagaagaugaacacccaguucacggccgugggcaaggaguucaaccaccuggagaagcgcaucgagaaccugaacaagaaggucgacgacggcuuccucgacaucuggaccuacaacgcggagcugcuggugcuccuggagaacgagcggacccuggacuaccacgacuccaacgugaagaaccucuacgagaagguccgcaaccagcugaagaacaacgccaaggagaucgggaacggcugcuucgaguucuaccacaagugcgacaacacgugcauggagagcgugaagaacgggaccuacgacuaccccaaguacuccgaggaggccaagcugaaccgggagaagaucgacggcgugaagcucgagagcacccgcaucuaccagauccuggccaucuacuccaccgucgccagcucccuggugcucguggucagccugggggcgaucuccuucuggaugugcagcaacggcagccugcagugccggaucugcaucugaggacuaguuauaagacugacuagcccgaugggccucccaacgggcccuccuccccuccuugcaccgagauuaauaaaaaaaaaaaaaaaaaaaaaaaaaaaaaaaaaaaaaaaaaaaaaaaaaaaaaaaaaaaaaaaaugcaucccccccccccccccccccccccccccccccaaaggcucuuuucagagccaccagaauu

SEQ ID NO: 224140 - RNA, 2104 nt, Artificial Sequence
  mRNA product Design2 comprising derived and/or modified sequence from hemagglutinin__InfluenzaA__EPI662594 HsCD5(1-24)_H1N1(Michigan2015_EPI662594)-HA (CDS opt1)
ggggcgcugccuacggagguggcagccaucuccuucucggcaucaagcuuaccaugcccaugggcagccugcagccgcucgccacccuguaccugcucgggaugcugguggccuccugccugggcgacacccugugcaucggcuaccacgccaacaacagcaccgacaccguggacacggugcucgagaagaacgucaccgugacccacuccgugaaccugcuggaggacaagcacaacgggaagcucugcaagcugcgcggcgucgcgccccugcaccucgggaagugcaacaucgccggcuggauccuggggaacccggagugcgagagccuguccaccgccagcuccuggagcuacaucguggagacguccaacagcgacaacgggaccugcuaccccggcgacuucaucaacuacgaggagcuccgggagcagcuguccagcguguccagcuucgagcgcuucgagaucuuccccaagaccuccagcuggcccaaccacgacuccaacaagggcgucaccgccgccugcccgcacgccggcgccaagagcuucuacaagaaccugaucuggcucgugaagaaggggaacuccuaccccaagcugaaccagagcuacaucaacgacaagggcaaggaggugcugguccucugggggauccaccaccccuccacgaccgcggaccagcagagccuguaccagaacgccgacgccuacguguucgugggcaccagccgguacuccaagaaguucaagcccgagaucgccacccgcccgaagguccgggaccaggagggccgcaugaacuacuacuggacgcugguggagcccggggacaagaucaccuucgaggccaccggcaaccucguggucccccgguacgcguucaccauggagcgcaacgccgggagcggcaucaucaucuccgacacgcccgugcacgacugcaacacgaccugccagaccccggagggcgccaucaacaccagccugcccuuccagaacauccaccccaucaccaucgggaagugccccaaguacgugaaguccaccaagcugcggcucgccaccggccugcgcaacgucccgagcauccagucccgggggcuguucggcgccaucgcgggguucaucgagggcggcuggacggggaugguggacggcugguacggguaccaccaccagaacgagcagggcagcggguacgccgccgaccucaaguccacccagaacgccaucgacaagaucaccaacaaggugaacagcgucaucgagaagaugaacacccaguucacggccgugggcaaggaguucaaccaccuggagaagcgcaucgagaaccugaacaagaaggucgacgacggcuuccucgacaucuggaccuacaacgcggagcugcuggugcuccuggagaacgagcggacccuggacuaccacgacuccaacgugaagaaccucuacgagaagguccgcaaccagcugaagaacaacgccaaggagaucgggaacggcugcuucgaguucuaccacaagugcgacaacacgugcauggagagcgugaagaacgggaccuacgacuaccccaaguacuccgaggaggccaagcugaaccgggagaagaucgacggcgugaagcucgagagcacccgcaucuaccagauccuggccaucuacuccaccgucgccagcucccuggugcucguggucagccugggggcgaucuccuucuggaugugcagcaacggcagccugcagugccggaucugcaucugaggacuagugcaucacauuuaaaagcaucucagccuaccaugagaauaagagaaagaaaaugaagaucaauagcuuauucaucucuuuuucuuuuucguugguguaaagccaacacccugucuaaaaaacauaaauuucuuuaaucauuuugccucuuuucucugugcuucaauuaauaaaaaauggaaagaaccuagaucuaaaaaaaaaaaaaaaaaaaaaaaaaaaaaaaaaaaaaaaaaaaaaaaaaaaaaaaaaaaaaaaaugcaucccccccccccccccccccccccccccccccaaaggcucuuuucagagccaccagaauu

SEQ ID NO: 224141 - RNA, 1939 nt, Artificial Sequence
  mRNA product Design1 comprising derived and/or modified sequence from hemagglutinin__InfluenzaA__EPI662594 HLA-A2-SP_H1N1(Michigan2015_EPI662594)-HA (CDS opt1)
gggagaaagcuuaccauggccgugauggccccgcggacccugguccuccugcugagcggcgcgcucgcccugacccagacgugggccgacacccugugcaucggcuaccacgccaacaacagcaccgacaccguggacacggugcucgagaagaacgucaccgugacccacuccgugaaccugcuggaggacaagcacaacgggaagcucugcaagcugcgcggcgucgcgccccugcaccucgggaagugcaacaucgccggcuggauccuggggaacccggagugcgagagccuguccaccgccagcuccuggagcuacaucguggagacguccaacagcgacaacgggaccugcuaccccggcgacuucaucaacuacgaggagcuccgggagcagcuguccagcguguccagcuucgagcgcuucgagaucuuccccaagaccuccagcuggcccaaccacgacuccaacaagggcgucaccgccgccugcccgcacgccggcgccaagagcuucuacaagaaccugaucuggcucgugaagaaggggaacuccuaccccaagcugaaccagagcuacaucaacgacaagggcaaggaggugcugguccucugggggauccaccaccccuccacgaccgcggaccagcagagccuguaccagaacgccgacgccuacguguucgugggcaccagccgguacuccaagaaguucaagcccgagaucgccacccgcccgaagguccgggaccaggagggccgcaugaacuacuacuggacgcugguggagcccggggacaagaucaccuucgaggccaccggcaaccucguggucccccgguacgcguucaccauggagcgcaacgccgggagcggcaucaucaucuccgacacgcccgugcacgacugcaacacgaccugccagaccccggagggcgccaucaacaccagccugcccuuccagaacauccaccccaucaccaucgggaagugccccaaguacgugaaguccaccaagcugcggcucgccaccggccugcgcaacgucccgagcauccagucccgggggcuguucggcgccaucgcgggguucaucgagggcggcuggacggggaugguggacggcugguacggguaccaccaccagaacgagcagggcagcggguacgccgccgaccucaaguccacccagaacgccaucgacaagaucaccaacaaggugaacagcgucaucgagaagaugaacacccaguucacggccgugggcaaggaguucaaccaccuggagaagcgcaucgagaaccugaacaagaaggucgacgacggcuuccucgacaucuggaccuacaacgcggagcugcuggugcuccuggagaacgagcggacccuggacuaccacgacuccaacgugaagaaccucuacgagaagguccgcaaccagcugaagaacaacgccaaggagaucgggaacggcugcuucgaguucuaccacaagugcgacaacacgugcauggagagcgugaagaacgggaccuacgacuaccccaaguacuccgaggaggccaagcugaaccgggagaagaucgacggcgugaagcucgagagcacccgcaucuaccagauccuggccaucuacuccaccgucgccagcucccuggugcucguggucagccugggggcgaucuccuucuggaugugcagcaacggcagccugcagugccggaucugcaucugaggacuaguuauaagacugacuagcccgaugggccucccaacgggcccuccuccccuccuugcaccgagauuaauaaaaaaaaaaaaaaaaaaaaaaaaaaaaaaaaaaaaaaaaaaaaaaaaaaaaaaaaaaaaaaaaugcaucccccccccccccccccccccccccccccccaaaggcucuuuucagagccaccagaauu

SEQ ID NO: 224142 - RNA, 2104 nt, Artificial Sequence
  mRNA product Design2 comprising derived and/or modified sequence from hemagglutinin__InfluenzaA__EPI662594 HLA-A2-SP_H1N1(Michigan2015_EPI662594)-HA (CDS opt1)
ggggcgcugccuacggagguggcagccaucuccuucucggcaucaagcuuaccauggccgugauggccccgcggacccugguccuccugcugagcggcgcgcucgcccugacccagacgugggccgacacccugugcaucggcuaccacgccaacaacagcaccgacaccguggacacggugcucgagaagaacgucaccgugacccacuccgugaaccugcuggaggacaagcacaacgggaagcucugcaagcugcgcggcgucgcgccccugcaccucgggaagugcaacaucgccggcuggauccuggggaacccggagugcgagagccuguccaccgccagcuccuggagcuacaucguggagacguccaacagcgacaacgggaccugcuaccccggcgacuucaucaacuacgaggagcuccgggagcagcuguccagcguguccagcuucgagcgcuucgagaucuuccccaagaccuccagcuggcccaaccacgacuccaacaagggcgucaccgccgccugcccgcacgccggcgccaagagcuucuacaagaaccugaucuggcucgugaagaaggggaacuccuaccccaagcugaaccagagcuacaucaacgacaagggcaaggaggugcugguccucugggggauccaccaccccuccacgaccgcggaccagcagagccuguaccagaacgccgacgccuacguguucgugggcaccagccgguacuccaagaaguucaagcccgagaucgccacccgcccgaagguccgggaccaggagggccgcaugaacuacuacuggacgcugguggagcccggggacaagaucaccuucgaggccaccggcaaccucguggucccccgguacgcguucaccauggagcgcaacgccgggagcggcaucaucaucuccgacacgcccgugcacgacugcaacacgaccugccagaccccggagggcgccaucaacaccagccugcccuuccagaacauccaccccaucaccaucgggaagugccccaaguacgugaaguccaccaagcugcggcucgccaccggccugcgcaacgucccgagcauccagucccgggggcuguucggcgccaucgcgggguucaucgagggcggcuggacggggaugguggacggcugguacggguaccaccaccagaacgagcagggcagcggguacgccgccgaccucaaguccacccagaacgccaucgacaagaucaccaacaaggugaacagcgucaucgagaagaugaacacccaguucacggccgugggcaaggaguucaaccaccuggagaagcgcaucgagaaccugaacaagaaggucgacgacggcuuccucgacaucuggaccuacaacgcggagcugcuggugcuccuggagaacgagcggacccuggacuaccacgacuccaacgugaagaaccucuacgagaagguccgcaaccagcugaagaacaacgccaaggagaucgggaacggcugcuucgaguucuaccacaagugcgacaacacgugcauggagagcgugaagaacgggaccuacgacuaccccaaguacuccgaggaggccaagcugaaccgggagaagaucgacggcgugaagcucgagagcacccgcaucuaccagauccuggccaucuacuccaccgucgccagcucccuggugcucguggucagccugggggcgaucuccuucuggaugugcagcaacggcagccugcagugccggaucugcaucugaggacuagugcaucacauuuaaaagcaucucagccuaccaugagaauaagagaaagaaaaugaagaucaauagcuuauucaucucuuuuucuuuuucguugguguaaagccaacacccugucuaaaaaacauaaauuucuuuaaucauuuugccucuuuucucugugcuucaauuaauaaaaaauggaaagaaccuagaucuaaaaaaaaaaaaaaaaaaaaaaaaaaaaaaaaaaaaaaaaaaaaaaaaaaaaaaaaaaaaaaaaugcaucccccccccccccccccccccccccccccccaaaggcucuuuucagagccaccagaauu

SEQ ID NO: 224143 - RNA, 1918 nt, Artificial Sequence
  mRNA product Design1 comprising derived and/or modified sequence from hemagglutinin__InfluenzaA__EPI685579 (CDS opt1)
gggagaaagcuuaccaugaaggccauccuggugguccuccuguacaccuucaccacggccaacgcggacacccugugcaucggcuaccacgccaacaacagcaccgacaccguggacacggugcucgagaagaacgucaccgugacccacuccgugaaccugcuggaggacaagcacaacgggaagcucugcaagcugcgcggcgucgcgccccugcaccucgggaagugcaacaucgccggcuggauccuggggaacccggagugcgagagccuguccaccgccagcuccuggagcuacaucguggagacguccaacagcgacaacgggaccugcuaccccggcgacuucaucaacuacgaggagcuccgggagcagcuguccagcguguccagcuucgagcgcuucgagaucuuccccaagaccuccagcuggcccaaccacgacuccaacaagggcgucaccgccgccugcccgcacgccggcgccaagagcuucuacaagaaccugaucuggcucgugaagaaggggaacuccuaccccaagcugaaccagagcuacaucaacgacaagggcaaggaggugcugguccucugggggauccaccaccccuccacgaccgcggaccagcagagccuguaccagaacgccgacgccuacguguucgugggcaccagccgguacuccaagaaguucaagcccgagaucgccacccgcccgaagguccgggaccgcgagggccggaugaacuacuacuggacgcugguggagcccggggacaagaucaccuucgaggccaccggcaaccucguggucccccgcuacgcguucaccauggagcggaacgccgggagcggcaucaucaucuccgacacgcccgugcacgacugcaacacgaccugccagaccccggagggcgccaucaacaccagccugcccuuccagaacauccaccccaucaccaucgggaagugccccaaguacgugaaguccaccaagcugcgccucgccaccggccugcggaacgucccgagcauccagucccgcgggcuguucggcgccaucgcgggguucaucgagggcggcuggacggggaugguggacggcugguacggguaccaccaccagaacgagcagggcagcggguacgccgccgaccucaaguccacccagaacgccaucgacaagaucaccaacaaggugaacagcgucaucgagaagaugaacacccaguucacggccgugggcaaggaguucaaccaccuggagaagcggaucgagaaccugaacaagaaggucgacgacggcuuccucgacaucuggaccuacaacgcggagcugcuggugcuccuggagaacgagcgcacccuggacuaccacgacuccaacgugaagaaccucuacgagaagguccggaaccagcugaagaacaacgccaaggagaucgggaacggcugcuucgaguucuaccacaagugcgacaacacgugcauggagagcgugaagaacgggaccuacgacuaccccaaguacuccgaggaggccaagcugaaccgcgagaagaucgacggcgugaagcucgagagcacccggaucuaccagauccuggccaucuacuccaccgucgccagcucccuggugcucguggucagccugggggcgaucuccuucuggaugugcagcaacggcagccugcagugccgcaucugcaucugaggacuaguuauaagacugacuagcccgaugggccucccaacgggcccuccuccccuccuugcaccgagauuaauaaaaaaaaaaaaaaaaaaaaaaaaaaaaaaaaaaaaaaaaaaaaaaaaaaaaaaaaaaaaaaaaugcaucccccccccccccccccccccccccccccccaaaggcucuuuucagagccaccagaauu

SEQ ID NO: 224144 - RNA, 2083 nt, Artificial Sequence
  mRNA product Design2 comprising derived and/or modified sequence from hemagglutinin__InfluenzaA__EPI685579 (CDS opt1)
ggggcgcugccuacggagguggcagccaucuccuucucggcaucaagcuuaccaugaaggccauccuggugguccuccuguacaccuucaccacggccaacgcggacacccugugcaucggcuaccacgccaacaacagcaccgacaccguggacacggugcucgagaagaacgucaccgugacccacuccgugaaccugcuggaggacaagcacaacgggaagcucugcaagcugcgcggcgucgcgccccugcaccucgggaagugcaacaucgccggcuggauccuggggaacccggagugcgagagccuguccaccgccagcuccuggagcuacaucguggagacguccaacagcgacaacgggaccugcuaccccggcgacuucaucaacuacgaggagcuccgggagcagcuguccagcguguccagcuucgagcgcuucgagaucuuccccaagaccuccagcuggcccaaccacgacuccaacaagggcgucaccgccgccugcccgcacgccggcgccaagagcuucuacaagaaccugaucuggcucgugaagaaggggaacuccuaccccaagcugaaccagagcuacaucaacgacaagggcaaggaggugcugguccucugggggauccaccaccccuccacgaccgcggaccagcagagccuguaccagaacgccgacgccuacguguucgugggcaccagccgguacuccaagaaguucaagcccgagaucgccacccgcccgaagguccgggaccgcgagggccggaugaacuacuacuggacgcugguggagcccggggacaagaucaccuucgaggccaccggcaaccucguggucccccgcuacgcguucaccauggagcggaacgccgggagcggcaucaucaucuccgacacgcccgugcacgacugcaacacgaccugccagaccccggagggcgccaucaacaccagccugcccuuccagaacauccaccccaucaccaucgggaagugccccaaguacgugaaguccaccaagcugcgccucgccaccggccugcggaacgucccgagcauccagucccgcgggcuguucggcgccaucgcgggguucaucgagggcggcuggacggggaugguggacggcugguacggguaccaccaccagaacgagcagggcagcggguacgccgccgaccucaaguccacccagaacgccaucgacaagaucaccaacaaggugaacagcgucaucgagaagaugaacacccaguucacggccgugggcaaggaguucaaccaccuggagaagcggaucgagaaccugaacaagaaggucgacgacggcuuccucgacaucuggaccuacaacgcggagcugcuggugcuccuggagaacgagcgcacccuggacuaccacgacuccaacgugaagaaccucuacgagaagguccggaaccagcugaagaacaacgccaaggagaucgggaacggcugcuucgaguucuaccacaagugcgacaacacgugcauggagagcgugaagaacgggaccuacgacuaccccaaguacuccgaggaggccaagcugaaccgcgagaagaucgacggcgugaagcucgagagcacccggaucuaccagauccuggccaucuacuccaccgucgccagcucccuggugcucguggucagccugggggcgaucuccuucuggaugugcagcaacggcagccugcagugccgcaucugcaucugaggacuagugcaucacauuuaaaagcaucucagccuaccaugagaauaagagaaagaaaaugaagaucaauagcuuauucaucucuuuuucuuuuucguugguguaaagccaacacccugucuaaaaaacauaaauuucuuuaaucauuuugccucuuuucucugugcuucaauuaauaaaaaauggaaagaaccuagaucuaaaaaaaaaaaaaaaaaaaaaaaaaaaaaaaaaaaaaaaaaaaaaaaaaaaaaaaaaaaaaaaaugcaucccccccccccccccccccccccccccccccaaaggcucuuuucagagccaccagaauu

SEQ ID NO: 224145 - RNA, 1921 nt, Artificial Sequence
  mRNA product Design1 comprising derived and/or modified sequence from hemagglutinin__InfluenzaA__EPI685579 HsALB(1-18)_H1N1(Michigan2015_EPI685579)-HA (CDS opt1)
gggagaaagcuuaccaugaagugggugaccuucaucagccugcucuuccuguucuccagcgccuacuccgacacccugugcaucggcuaccacgccaacaacagcaccgacaccguggacacggugcucgagaagaacgucaccgugacccacuccgugaaccugcuggaggacaagcacaacgggaagcucugcaagcugcgcggcgucgcgccccugcaccucgggaagugcaacaucgccggcuggauccuggggaacccggagugcgagagccuguccaccgccagcuccuggagcuacaucguggagacguccaacagcgacaacgggaccugcuaccccggcgacuucaucaacuacgaggagcuccgggagcagcuguccagcguguccagcuucgagcgcuucgagaucuuccccaagaccuccagcuggcccaaccacgacuccaacaagggcgucaccgccgccugcccgcacgccggcgccaagagcuucuacaagaaccugaucuggcucgugaagaaggggaacuccuaccccaagcugaaccagagcuacaucaacgacaagggcaaggaggugcugguccucugggggauccaccaccccuccacgaccgcggaccagcagagccuguaccagaacgccgacgccuacguguucgugggcaccagccgguacuccaagaaguucaagcccgagaucgccacccgcccgaagguccgggaccgcgagggccggaugaacuacuacuggacgcugguggagcccggggacaagaucaccuucgaggccaccggcaaccucguggucccccgcuacgcguucaccauggagcggaacgccgggagcggcaucaucaucuccgacacgcccgugcacgacugcaacacgaccugccagaccccggagggcgccaucaacaccagccugcccuuccagaacauccaccccaucaccaucgggaagugccccaaguacgugaaguccaccaagcugcgccucgccaccggccugcggaacgucccgagcauccagucccgcgggcuguucggcgccaucgcgggguucaucgagggcggcuggacggggaugguggacggcugguacggguaccaccaccagaacgagcagggcagcggguacgccgccgaccucaaguccacccagaacgccaucgacaagaucaccaacaaggugaacagcgucaucgagaagaugaacacccaguucacggccgugggcaaggaguucaaccaccuggagaagcggaucgagaaccugaacaagaaggucgacgacggcuuccucgacaucuggaccuacaacgcggagcugcuggugcuccuggagaacgagcgcacccuggacuaccacgacuccaacgugaagaaccucuacgagaagguccggaaccagcugaagaacaacgccaaggagaucgggaacggcugcuucgaguucuaccacaagugcgacaacacgugcauggagagcgugaagaacgggaccuacgacuaccccaaguacuccgaggaggccaagcugaaccgcgagaagaucgacggcgugaagcucgagagcacccggaucuaccagauccuggccaucuacuccaccgucgccagcucccuggugcucguggucagccugggggcgaucuccuucuggaugugcagcaacggcagccugcagugccgcaucugcaucugaggacuaguuauaagacugacuagcccgaugggccucccaacgggcccuccuccccuccuugcaccgagauuaauaaaaaaaaaaaaaaaaaaaaaaaaaaaaaaaaaaaaaaaaaaaaaaaaaaaaaaaaaaaaaaaaugcaucccccccccccccccccccccccccccccccaaaggcucuuuucagagccaccagaauu

SEQ ID NO: 224146 - RNA, 2086 nt, Artificial Sequence
  mRNA product Design2 comprising derived and/or modified sequence from hemagglutinin__InfluenzaA__EPI685579 HsALB(1-18)_H1N1(Michigan2015_EPI685579)-HA (CDS opt1)
ggggcgcugccuacggagguggcagccaucuccuucucggcaucaagcuuaccaugaagugggugaccuucaucagccugcucuuccuguucuccagcgccuacuccgacacccugugcaucggcuaccacgccaacaacagcaccgacaccguggacacggugcucgagaagaacgucaccgugacccacuccgugaaccugcuggaggacaagcacaacgggaagcucugcaagcugcgcggcgucgcgccccugcaccucgggaagugcaacaucgccggcuggauccuggggaacccggagugcgagagccuguccaccgccagcuccuggagcuacaucguggagacguccaacagcgacaacgggaccugcuaccccggcgacuucaucaacuacgaggagcuccgggagcagcuguccagcguguccagcuucgagcgcuucgagaucuuccccaagaccuccagcuggcccaaccacgacuccaacaagggcgucaccgccgccugcccgcacgccggcgccaagagcuucuacaagaaccugaucuggcucgugaagaaggggaacuccuaccccaagcugaaccagagcuacaucaacgacaagggcaaggaggugcugguccucugggggauccaccaccccuccacgaccgcggaccagcagagccuguaccagaacgccgacgccuacguguucgugggcaccagccgguacuccaagaaguucaagcccgagaucgccacccgcccgaagguccgggaccgcgagggccggaugaacuacuacuggacgcugguggagcccggggacaagaucaccuucgaggccaccggcaaccucguggucccccgcuacgcguucaccauggagcggaacgccgggagcggcaucaucaucuccgacacgcccgugcacgacugcaacacgaccugccagaccccggagggcgccaucaacaccagccugcccuuccagaacauccaccccaucaccaucgggaagugccccaaguacgugaaguccaccaagcugcgccucgccaccggccugcggaacgucccgagcauccagucccgcgggcuguucggcgccaucgcgggguucaucgagggcggcuggacggggaugguggacggcugguacggguaccaccaccagaacgagcagggcagcggguacgccgccgaccucaaguccacccagaacgccaucgacaagaucaccaacaaggugaacagcgucaucgagaagaugaacacccaguucacggccgugggcaaggaguucaaccaccuggagaagcggaucgagaaccugaacaagaaggucgacgacggcuuccucgacaucuggaccuacaacgcggagcugcuggugcuccuggagaacgagcgcacccuggacuaccacgacuccaacgugaagaaccucuacgagaagguccggaaccagcugaagaacaacgccaaggagaucgggaacggcugcuucgaguucuaccacaagugcgacaacacgugcauggagagcgugaagaacgggaccuacgacuaccccaaguacuccgaggaggccaagcugaaccgcgagaagaucgacggcgugaagcucgagagcacccggaucuaccagauccuggccaucuacuccaccgucgccagcucccuggugcucguggucagccugggggcgaucuccuucuggaugugcagcaacggcagccugcagugccgcaucugcaucugaggacuagugcaucacauuuaaaagcaucucagccuaccaugagaauaagagaaagaaaaugaagaucaauagcuuauucaucucuuuuucuuuuucguugguguaaagccaacacccugucuaaaaaacauaaauuucuuuaaucauuuugccucuuuucucugugcuucaauuaauaaaaaauggaaagaaccuagaucuaaaaaaaaaaaaaaaaaaaaaaaaaaaaaaaaaaaaaaaaaaaaaaaaaaaaaaaaaaaaaaaaugcaucccccccccccccccccccccccccccccccaaaggcucuuuucagagccaccagaauu

SEQ ID NO: 224147 - RNA, 1921 nt, Artificial Sequence
  mRNA product Design1 comprising derived and/or modified sequence from hemagglutinin__InfluenzaA__EPI685579 IgE-leader_H1N1(Michigan2015_EPI685579)-HA (CDS opt1)
gggagaaagcuuaccauggacuggaccuggauccuguuccucguggccgccgcgacccgcguccacagcgacacccugugcaucggcuaccacgccaacaacagcaccgacaccguggacacggugcucgagaagaacgucaccgugacccacuccgugaaccugcuggaggacaagcacaacgggaagcucugcaagcugcgcggcgucgcgccccugcaccucgggaagugcaacaucgccggcuggauccuggggaacccggagugcgagagccuguccaccgccagcuccuggagcuacaucguggagacguccaacagcgacaacgggaccugcuaccccggcgacuucaucaacuacgaggagcuccgggagcagcuguccagcguguccagcuucgagcgcuucgagaucuuccccaagaccuccagcuggcccaaccacgacuccaacaagggcgucaccgccgccugcccgcacgccggcgccaagagcuucuacaagaaccugaucuggcucgugaagaaggggaacuccuaccccaagcugaaccagagcuacaucaacgacaagggcaaggaggugcugguccucugggggauccaccaccccuccacgaccgcggaccagcagagccuguaccagaacgccgacgccuacguguucgugggcaccagccgguacuccaagaaguucaagcccgagaucgccacccgcccgaagguccgggaccgcgagggccggaugaacuacuacuggacgcugguggagcccggggacaagaucaccuucgaggccaccggcaaccucguggucccccgcuacgcguucaccauggagcggaacgccgggagcggcaucaucaucuccgacacgcccgugcacgacugcaacacgaccugccagaccccggagggcgccaucaacaccagccugcccuuccagaacauccaccccaucaccaucgggaagugccccaaguacgugaaguccaccaagcugcgccucgccaccggccugcggaacgucccgagcauccagucccgcgggcuguucggcgccaucgcgggguucaucgagggcggcuggacggggaugguggacggcugguacggguaccaccaccagaacgagcagggcagcggguacgccgccgaccucaaguccacccagaacgccaucgacaagaucaccaacaaggugaacagcgucaucgagaagaugaacacccaguucacggccgugggcaaggaguucaaccaccuggagaagcggaucgagaaccugaacaagaaggucgacgacggcuuccucgacaucuggaccuacaacgcggagcugcuggugcuccuggagaacgagcgcacccuggacuaccacgacuccaacgugaagaaccucuacgagaagguccggaaccagcugaagaacaacgccaaggagaucgggaacggcugcuucgaguucuaccacaagugcgacaacacgugcauggagagcgugaagaacgggaccuacgacuaccccaaguacuccgaggaggccaagcugaaccgcgagaagaucgacggcgugaagcucgagagcacccggaucuaccagauccuggccaucuacuccaccgucgccagcucccuggugcucguggucagccugggggcgaucuccuucuggaugugcagcaacggcagccugcagugccgcaucugcaucugaggacuaguuauaagacugacuagcccgaugggccucccaacgggcccuccuccccuccuugcaccgagauuaauaaaaaaaaaaaaaaaaaaaaaaaaaaaaaaaaaaaaaaaaaaaaaaaaaaaaaaaaaaaaaaaaugcaucccccccccccccccccccccccccccccccaaaggcucuuuucagagccaccagaauu

SEQ ID NO: 224148 - RNA, 2086 nt, Artificial Sequence
  mRNA product Design2 comprising derived and/or modified sequence from hemagglutinin__InfluenzaA__EPI685579 IgE-leader_H1N1(Michigan2015_EPI685579)-HA (CDS opt1)
ggggcgcugccuacggagguggcagccaucuccuucucggcaucaagcuuaccauggacuggaccuggauccuguuccucguggccgccgcgacccgcguccacagcgacacccugugcaucggcuaccacgccaacaacagcaccgacaccguggacacggugcucgagaagaacgucaccgugacccacuccgugaaccugcuggaggacaagcacaacgggaagcucugcaagcugcgcggcgucgcgccccugcaccucgggaagugcaacaucgccggcuggauccuggggaacccggagugcgagagccuguccaccgccagcuccuggagcuacaucguggagacguccaacagcgacaacgggaccugcuaccccggcgacuucaucaacuacgaggagcuccgggagcagcuguccagcguguccagcuucgagcgcuucgagaucuuccccaagaccuccagcuggcccaaccacgacuccaacaagggcgucaccgccgccugcccgcacgccggcgccaagagcuucuacaagaaccugaucuggcucgugaagaaggggaacuccuaccccaagcugaaccagagcuacaucaacgacaagggcaaggaggugcugguccucugggggauccaccaccccuccacgaccgcggaccagcagagccuguaccagaacgccgacgccuacguguucgugggcaccagccgguacuccaagaaguucaagcccgagaucgccacccgcccgaagguccgggaccgcgagggccggaugaacuacuacuggacgcugguggagcccggggacaagaucaccuucgaggccaccggcaaccucguggucccccgcuacgcguucaccauggagcggaacgccgggagcggcaucaucaucuccgacacgcccgugcacgacugcaacacgaccugccagaccccggagggcgccaucaacaccagccugcccuuccagaacauccaccccaucaccaucgggaagugccccaaguacgugaaguccaccaagcugcgccucgccaccggccugcggaacgucccgagcauccagucccgcgggcuguucggcgccaucgcgggguucaucgagggcggcuggacggggaugguggacggcugguacggguaccaccaccagaacgagcagggcagcggguacgccgccgaccucaaguccacccagaacgccaucgacaagaucaccaacaaggugaacagcgucaucgagaagaugaacacccaguucacggccgugggcaaggaguucaaccaccuggagaagcggaucgagaaccugaacaagaaggucgacgacggcuuccucgacaucuggaccuacaacgcggagcugcuggugcuccuggagaacgagcgcacccuggacuaccacgacuccaacgugaagaaccucuacgagaagguccggaaccagcugaagaacaacgccaaggagaucgggaacggcugcuucgaguucuaccacaagugcgacaacacgugcauggagagcgugaagaacgggaccuacgacuaccccaaguacuccgaggaggccaagcugaaccgcgagaagaucgacggcgugaagcucgagagcacccggaucuaccagauccuggccaucuacuccaccgucgccagcucccuggugcucguggucagccugggggcgaucuccuucuggaugugcagcaacggcagccugcagugccgcaucugcaucugaggacuagugcaucacauuuaaaagcaucucagccuaccaugagaauaagagaaagaaaaugaagaucaauagcuuauucaucucuuuuucuuuuucguugguguaaagccaacacccugucuaaaaaacauaaauuucuuuaaucauuuugccucuuuucucugugcuucaauuaauaaaaaauggaaagaaccuagaucuaaaaaaaaaaaaaaaaaaaaaaaaaaaaaaaaaaaaaaaaaaaaaaaaaaaaaaaaaaaaaaaaugcaucccccccccccccccccccccccccccccccaaaggcucuuuucagagccaccagaauu

SEQ ID NO: 224149 - RNA, 1939 nt, Artificial Sequence
  mRNA product Design1 comprising derived and/or modified sequence from hemagglutinin__InfluenzaA__EPI685579 HsCD5(1-24)_H1N1(Michigan2015_EPI685579)-HA (CDS opt1)
gggagaaagcuuaccaugcccaugggcagccugcagccgcucgccacccuguaccugcucgggaugcugguggccuccugccugggcgacacccugugcaucggcuaccacgccaacaacagcaccgacaccguggacacggugcucgagaagaacgucaccgugacccacuccgugaaccugcuggaggacaagcacaacgggaagcucugcaagcugcgcggcgucgcgccccugcaccucgggaagugcaacaucgccggcuggauccuggggaacccggagugcgagagccuguccaccgccagcuccuggagcuacaucguggagacguccaacagcgacaacgggaccugcuaccccggcgacuucaucaacuacgaggagcuccgggagcagcuguccagcguguccagcuucgagcgcuucgagaucuuccccaagaccuccagcuggcccaaccacgacuccaacaagggcgucaccgccgccugcccgcacgccggcgccaagagcuucuacaagaaccugaucuggcucgugaagaaggggaacuccuaccccaagcugaaccagagcuacaucaacgacaagggcaaggaggugcugguccucugggggauccaccaccccuccacgaccgcggaccagcagagccuguaccagaacgccgacgccuacguguucgugggcaccagccgguacuccaagaaguucaagcccgagaucgccacccgcccgaagguccgggaccgcgagggccggaugaacuacuacuggacgcugguggagcccggggacaagaucaccuucgaggccaccggcaaccucguggucccccgcuacgcguucaccauggagcggaacgccgggagcggcaucaucaucuccgacacgcccgugcacgacugcaacacgaccugccagaccccggagggcgccaucaacaccagccugcccuuccagaacauccaccccaucaccaucgggaagugccccaaguacgugaaguccaccaagcugcgccucgccaccggccugcggaacgucccgagcauccagucccgcgggcuguucggcgccaucgcgggguucaucgagggcggcuggacggggaugguggacggcugguacggguaccaccaccagaacgagcagggcagcggguacgccgccgaccucaaguccacccagaacgccaucgacaagaucaccaacaaggugaacagcgucaucgagaagaugaacacccaguucacggccgugggcaaggaguucaaccaccuggagaagcggaucgagaaccugaacaagaaggucgacgacggcuuccucgacaucuggaccuacaacgcggagcugcuggugcuccuggagaacgagcgcacccuggacuaccacgacuccaacgugaagaaccucuacgagaagguccggaaccagcugaagaacaacgccaaggagaucgggaacggcugcuucgaguucuaccacaagugcgacaacacgugcauggagagcgugaagaacgggaccuacgacuaccccaaguacuccgaggaggccaagcugaaccgcgagaagaucgacggcgugaagcucgagagcacccggaucuaccagauccuggccaucuacuccaccgucgccagcucccuggugcucguggucagccugggggcgaucuccuucuggaugugcagcaacggcagccugcagugccgcaucugcaucugaggacuaguuauaagacugacuagcccgaugggccucccaacgggcccuccuccccuccuugcaccgagauuaauaaaaaaaaaaaaaaaaaaaaaaaaaaaaaaaaaaaaaaaaaaaaaaaaaaaaaaaaaaaaaaaaugcaucccccccccccccccccccccccccccccccaaaggcucuuuucagagccaccagaauu

SEQ ID NO: 224150 - RNA, 2104 nt, Artificial Sequence
  mRNA product Design2 comprising derived and/or modified sequence from hemagglutinin__InfluenzaA__EPI685579 HsCD5(1-24)_H1N1(Michigan2015_EPI685579)-HA (CDS opt1)
ggggcgcugccuacggagguggcagccaucuccuucucggcaucaagcuuaccaugcccaugggcagccugcagccgcucgccacccuguaccugcucgggaugcugguggccuccugccugggcgacacccugugcaucggcuaccacgccaacaacagcaccgacaccguggacacggugcucgagaagaacgucaccgugacccacuccgugaaccugcuggaggacaagcacaacgggaagcucugcaagcugcgcggcgucgcgccccugcaccucgggaagugcaacaucgccggcuggauccuggggaacccggagugcgagagccuguccaccgccagcuccuggagcuacaucguggagacguccaacagcgacaacgggaccugcuaccccggcgacuucaucaacuacgaggagcuccgggagcagcuguccagcguguccagcuucgagcgcuucgagaucuuccccaagaccuccagcuggcccaaccacgacuccaacaagggcgucaccgccgccugcccgcacgccggcgccaagagcuucuacaagaaccugaucuggcucgugaagaaggggaacuccuaccccaagcugaaccagagcuacaucaacgacaagggcaaggaggugcugguccucugggggauccaccaccccuccacgaccgcggaccagcagagccuguaccagaacgccgacgccuacguguucgugggcaccagccgguacuccaagaaguucaagcccgagaucgccacccgcccgaagguccgggaccgcgagggccggaugaacuacuacuggacgcugguggagcccggggacaagaucaccuucgaggccaccggcaaccucguggucccccgcuacgcguucaccauggagcggaacgccgggagcggcaucaucaucuccgacacgcccgugcacgacugcaacacgaccugccagaccccggagggcgccaucaacaccagccugcccuuccagaacauccaccccaucaccaucgggaagugccccaaguacgugaaguccaccaagcugcgccucgccaccggccugcggaacgucccgagcauccagucccgcgggcuguucggcgccaucgcgggguucaucgagggcggcuggacggggaugguggacggcugguacggguaccaccaccagaacgagcagggcagcggguacgccgccgaccucaaguccacccagaacgccaucgacaagaucaccaacaaggugaacagcgucaucgagaagaugaacacccaguucacggccgugggcaaggaguucaaccaccuggagaagcggaucgagaaccugaacaagaaggucgacgacggcuuccucgacaucuggaccuacaacgcggagcugcuggugcuccuggagaacgagcgcacccuggacuaccacgacuccaacgugaagaaccucuacgagaagguccggaaccagcugaagaacaacgccaaggagaucgggaacggcugcuucgaguucuaccacaagugcgacaacacgugcauggagagcgugaagaacgggaccuacgacuaccccaaguacuccgaggaggccaagcugaaccgcgagaagaucgacggcgugaagcucgagagcacccggaucuaccagauccuggccaucuacuccaccgucgccagcucccuggugcucguggucagccugggggcgaucuccuucuggaugugcagcaacggcagccugcagugccgcaucugcaucugaggacuagugcaucacauuuaaaagcaucucagccuaccaugagaauaagagaaagaaaaugaagaucaauagcuuauucaucucuuuuucuuuuucguugguguaaagccaacacccugucuaaaaaacauaaauuucuuuaaucauuuugccucuuuucucugugcuucaauuaauaaaaaauggaaagaaccuagaucuaaaaaaaaaaaaaaaaaaaaaaaaaaaaaaaaaaaaaaaaaaaaaaaaaaaaaaaaaaaaaaaaugcaucccccccccccccccccccccccccccccccaaaggcucuuuucagagccaccagaauu

SEQ ID NO: 224151 - RNA, 1939 nt, Artificial Sequence
  mRNA product Design1 comprising derived and/or modified sequence from hemagglutinin__InfluenzaA__EPI685579 HLA-A2-SP_H1N1(Michigan2015_EPI685579)-HA (CDS opt1)
gggagaaagcuuaccauggccgugauggccccgcggacccugguccuccugcugagcggcgcgcucgcccugacccagacgugggccgacacccugugcaucggcuaccacgccaacaacagcaccgacaccguggacacggugcucgagaagaacgucaccgugacccacuccgugaaccugcuggaggacaagcacaacgggaagcucugcaagcugcgcggcgucgcgccccugcaccucgggaagugcaacaucgccggcuggauccuggggaacccggagugcgagagccuguccaccgccagcuccuggagcuacaucguggagacguccaacagcgacaacgggaccugcuaccccggcgacuucaucaacuacgaggagcuccgggagcagcuguccagcguguccagcuucgagcgcuucgagaucuuccccaagaccuccagcuggcccaaccacgacuccaacaagggcgucaccgccgccugcccgcacgccggcgccaagagcuucuacaagaaccugaucuggcucgugaagaaggggaacuccuaccccaagcugaaccagagcuacaucaacgacaagggcaaggaggugcugguccucugggggauccaccaccccuccacgaccgcggaccagcagagccuguaccagaacgccgacgccuacguguucgugggcaccagccgguacuccaagaaguucaagcccgagaucgccacccgcccgaagguccgggaccgcgagggccggaugaacuacuacuggacgcugguggagcccggggacaagaucaccuucgaggccaccggcaaccucguggucccccgcuacgcguucaccauggagcggaacgccgggagcggcaucaucaucuccgacacgcccgugcacgacugcaacacgaccugccagaccccggagggcgccaucaacaccagccugcccuuccagaacauccaccccaucaccaucgggaagugccccaaguacgugaaguccaccaagcugcgccucgccaccggccugcggaacgucccgagcauccagucccgcgggcuguucggcgccaucgcgggguucaucgagggcggcuggacggggaugguggacggcugguacggguaccaccaccagaacgagcagggcagcggguacgccgccgaccucaaguccacccagaacgccaucgacaagaucaccaacaaggugaacagcgucaucgagaagaugaacacccaguucacggccgugggcaaggaguucaaccaccuggagaagcggaucgagaaccugaacaagaaggucgacgacggcuuccucgacaucuggaccuacaacgcggagcugcuggugcuccuggagaacgagcgcacccuggacuaccacgacuccaacgugaagaaccucuacgagaagguccggaaccagcugaagaacaacgccaaggagaucgggaacggcugcuucgaguucuaccacaagugcgacaacacgugcauggagagcgugaagaacgggaccuacgacuaccccaaguacuccgaggaggccaagcugaaccgcgagaagaucgacggcgugaagcucgagagcacccggaucuaccagauccuggccaucuacuccaccgucgccagcucccuggugcucguggucagccugggggcgaucuccuucuggaugugcagcaacggcagccugcagugccgcaucugcaucugaggacuaguuauaagacugacuagcccgaugggccucccaacgggcccuccuccccuccuugcaccgagauuaauaaaaaaaaaaaaaaaaaaaaaaaaaaaaaaaaaaaaaaaaaaaaaaaaaaaaaaaaaaaaaaaaugcaucccccccccccccccccccccccccccccccaaaggcucuuuucagagccaccagaauu

SEQ ID NO: 224152 - RNA, 2104 nt, Artificial Sequence
  mRNA product Design2 comprising derived and/or modified sequence from hemagglutinin__InfluenzaA__EPI685579 HLA-A2-SP_H1N1(Michigan2015_EPI685579)-HA (CDS opt1)
ggggcgcugccuacggagguggcagccaucuccuucucggcaucaagcuuaccauggccgugauggccccgcggacccugguccuccugcugagcggcgcgcucgcccugacccagacgugggccgacacccugugcaucggcuaccacgccaacaacagcaccgacaccguggacacggugcucgagaagaacgucaccgugacccacuccgugaaccugcuggaggacaagcacaacgggaagcucugcaagcugcgcggcgucgcgccccugcaccucgggaagugcaacaucgccggcuggauccuggggaacccggagugcgagagccuguccaccgccagcuccuggagcuacaucguggagacguccaacagcgacaacgggaccugcuaccccggcgacuucaucaacuacgaggagcuccgggagcagcuguccagcguguccagcuucgagcgcuucgagaucuuccccaagaccuccagcuggcccaaccacgacuccaacaagggcgucaccgccgccugcccgcacgccggcgccaagagcuucuacaagaaccugaucuggcucgugaagaaggggaacuccuaccccaagcugaaccagagcuacaucaacgacaagggcaaggaggugcugguccucugggggauccaccaccccuccacgaccgcggaccagcagagccuguaccagaacgccgacgccuacguguucgugggcaccagccgguacuccaagaaguucaagcccgagaucgccacccgcccgaagguccgggaccgcgagggccggaugaacuacuacuggacgcugguggagcccggggacaagaucaccuucgaggccaccggcaaccucguggucccccgcuacgcguucaccauggagcggaacgccgggagcggcaucaucaucuccgacacgcccgugcacgacugcaacacgaccugccagaccccggagggcgccaucaacaccagccugcccuuccagaacauccaccccaucaccaucgggaagugccccaaguacgugaaguccaccaagcugcgccucgccaccggccugcggaacgucccgagcauccagucccgcgggcuguucggcgccaucgcgggguucaucgagggcggcuggacggggaugguggacggcugguacggguaccaccaccagaacgagcagggcagcggguacgccgccgaccucaaguccacccagaacgccaucgacaagaucaccaacaaggugaacagcgucaucgagaagaugaacacccaguucacggccgugggcaaggaguucaaccaccuggagaagcggaucgagaaccugaacaagaaggucgacgacggcuuccucgacaucuggaccuacaacgcggagcugcuggugcuccuggagaacgagcgcacccuggacuaccacgacuccaacgugaagaaccucuacgagaagguccggaaccagcugaagaacaacgccaaggagaucgggaacggcugcuucgaguucuaccacaagugcgacaacacgugcauggagagcgugaagaacgggaccuacgacuaccccaaguacuccgaggaggccaagcugaaccgcgagaagaucgacggcgugaagcucgagagcacccggaucuaccagauccuggccaucuacuccaccgucgccagcucccuggugcucguggucagccugggggcgaucuccuucuggaugugcagcaacggcagccugcagugccgcaucugcaucugaggacuagugcaucacauuuaaaagcaucucagccuaccaugagaauaagagaaagaaaaugaagaucaauagcuuauucaucucuuuuucuuuuucguugguguaaagccaacacccugucuaaaaaacauaaauuucuuuaaucauuuugccucuuuucucugugcuucaauuaauaaaaaauggaaagaaccuagaucuaaaaaaaaaaaaaaaaaaaaaaaaaaaaaaaaaaaaaaaaaaaaaaaaaaaaaaaaaaaaaaaaugcaucccccccccccccccccccccccccccccccaaaggcucuuuucagagccaccagaauu

SEQ ID NO: 224153 - RNA, 1918 nt, Artificial Sequence
  mRNA product Design1 comprising derived and/or modified sequence from hemagglutinin__InfluenzaA__EPI830230 (CDS opt1) R5705
gggagaaagcuuaccaugaaggccauccuggugguccuccuguacaccuucaccacggccaacgcggacacccugugcaucggcuaccacgccaacaacagcaccgacaccguggacacggugcucgagaagaacgucaccgugacccacuccgugaaccugcuggaggacaagcacaacgggaagcucugcaagcugcgcggcgucgcgccccugcaccucgggaagugcaacaucgccggcuggauccuggggaacccggagugcgagagccuguccaccgccagcuccuggagcuacaucguggagacguccaacagcgacaacgggaccugcuaccccggcgacuucaucaacuacgaggagcuccgggagcagcuguccagcguguccagcuucgagcgcuucgagaucuuccccaagaccuccagcuggcccaaccacgacuccaacaagggcgucaccgccgccugcccgcacgccggcgccaagagcuucuacaagaaccugaucuggcucgugaagaaggggaacuccuaccccaagcugaaccagagcuacaucaacgacaagggcaaggaggugcugguccucugggggauccaccaccccuccacgaccgcggaccagcagagccuguaccagaacgccgacgccuacguguucgugggcaccagccgguacuccaagauguucaagcccgagaucgccacccgcccgaagguccgggaccgcgagggccggaugaacuacuacuggacgcugguggagcccggggacaagaucaccuucgaggccaccggcaaccucguggucccccgcuacgcguucaccauggagcggaacgccgggagcggcaucaucaucuccgacacgcccgugcacgacugcaacacgaccugccagaccccggagggcgccaucaacaccagccugcccuuccagaacauccaccccaucaccaucgggaagugccccaaguacgugaaguccaccaagcugcgccucgccaccggccugcggaacgucccgagcauccagucccgcgggcuguucggcgccaucgcgggguucaucgagggcggcuggacggggaugguggacggcugguacggguaccaccaccagaacgagcagggcagcggguacgccgccgaccucaaguccacccagaacgccaucgacaagaucaccaacaaggugaacagcgucaucgagaagaugaacacccaguucacggccgugggcaaggaguucaaccaccuggagaagcggaucgagaaccugaacaagaaggucgacgacggcuuccucgacaucuggaccuacaacgcggagcugcuggugcuccuggagaacgagcgcacccuggacuaccacgacuccaacgugaagaaccucuacgagaagguccggaaccagcugaagaacaacgccaaggagaucgggaacggcugcuucgaguucuaccacaagugcgacaacacgugcauggagagcgugaagaacgggaccuacgacuaccccaaguacuccgaggaggccaagcugaaccgcgagaagaucgacggcgugaagcucgagagcacccggaucuaccagauccuggccaucuacuccaccgucgccagcucccuggugcucguggucagccugggggcgaucuccuucuggaugugcagcaacggcagccugcagugccgcaucugcaucugaggacuaguuauaagacugacuagcccgaugggccucccaacgggcccuccuccccuccuugcaccgagauuaauaaaaaaaaaaaaaaaaaaaaaaaaaaaaaaaaaaaaaaaaaaaaaaaaaaaaaaaaaaaaaaaaugcaucccccccccccccccccccccccccccccccaaaggcucuuuucagagccaccagaauu

SEQ ID NO: 224154 - RNA, 2083 nt, Artificial Sequence
  mRNA product Design2 comprising derived and/or modified sequence from hemagglutinin__InfluenzaA__EPI830230 (CDS opt1) R5706
ggggcgcugccuacggagguggcagccaucuccuucucggcaucaagcuuaccaugaaggccauccuggugguccuccuguacaccuucaccacggccaacgcggacacccugugcaucggcuaccacgccaacaacagcaccgacaccguggacacggugcucgagaagaacgucaccgugacccacuccgugaaccugcuggaggacaagcacaacgggaagcucugcaagcugcgcggcgucgcgccccugcaccucgggaagugcaacaucgccggcuggauccuggggaacccggagugcgagagccuguccaccgccagcuccuggagcuacaucguggagacguccaacagcgacaacgggaccugcuaccccggcgacuucaucaacuacgaggagcuccgggagcagcuguccagcguguccagcuucgagcgcuucgagaucuuccccaagaccuccagcuggcccaaccacgacuccaacaagggcgucaccgccgccugcccgcacgccggcgccaagagcuucuacaagaaccugaucuggcucgugaagaaggggaacuccuaccccaagcugaaccagagcuacaucaacgacaagggcaaggaggugcugguccucugggggauccaccaccccuccacgaccgcggaccagcagagccuguaccagaacgccgacgccuacguguucgugggcaccagccgguacuccaagauguucaagcccgagaucgccacccgcccgaagguccgggaccgcgagggccggaugaacuacuacuggacgcugguggagcccggggacaagaucaccuucgaggccaccggcaaccucguggucccccgcuacgcguucaccauggagcggaacgccgggagcggcaucaucaucuccgacacgcccgugcacgacugcaacacgaccugccagaccccggagggcgccaucaacaccagccugcccuuccagaacauccaccccaucaccaucgggaagugccccaaguacgugaaguccaccaagcugcgccucgccaccggccugcggaacgucccgagcauccagucccgcgggcuguucggcgccaucgcgggguucaucgagggcggcuggacggggaugguggacggcugguacggguaccaccaccagaacgagcagggcagcggguacgccgccgaccucaaguccacccagaacgccaucgacaagaucaccaacaaggugaacagcgucaucgagaagaugaacacccaguucacggccgugggcaaggaguucaaccaccuggagaagcggaucgagaaccugaacaagaaggucgacgacggcuuccucgacaucuggaccuacaacgcggagcugcuggugcuccuggagaacgagcgcacccuggacuaccacgacuccaacgugaagaaccucuacgagaagguccggaaccagcugaagaacaacgccaaggagaucgggaacggcugcuucgaguucuaccacaagugcgacaacacgugcauggagagcgugaagaacgggaccuacgacuaccccaaguacuccgaggaggccaagcugaaccgcgagaagaucgacggcgugaagcucgagagcacccggaucuaccagauccuggccaucuacuccaccgucgccagcucccuggugcucguggucagccugggggcgaucuccuucuggaugugcagcaacggcagccugcagugccgcaucugcaucugaggacuagugcaucacauuuaaaagcaucucagccuaccaugagaauaagagaaagaaaaugaagaucaauagcuuauucaucucuuuuucuuuuucguugguguaaagccaacacccugucuaaaaaacauaaauuucuuuaaucauuuugccucuuuucucugugcuucaauuaauaaaaaauggaaagaaccuagaucuaaaaaaaaaaaaaaaaaaaaaaaaaaaaaaaaaaaaaaaaaaaaaaaaaaaaaaaaaaaaaaaaugcaucccccccccccccccccccccccccccccccaaaggcucuuuucagagccaccagaauu

SEQ ID NO: 224155 - RNA, 1921 nt, Artificial Sequence
  mRNA product Design1 comprising derived and/or modified sequence from hemagglutinin__InfluenzaA__EPI830230 HsALB(1-18)_H1N1(Michigan2015_EPI830230)-HA (CDS opt1)
gggagaaagcuuaccaugaagugggugaccuucaucagccugcucuuccuguucuccagcgccuacuccgacacccugugcaucggcuaccacgccaacaacagcaccgacaccguggacacggugcucgagaagaacgucaccgugacccacuccgugaaccugcuggaggacaagcacaacgggaagcucugcaagcugcgcggcgucgcgccccugcaccucgggaagugcaacaucgccggcuggauccuggggaacccggagugcgagagccuguccaccgccagcuccuggagcuacaucguggagacguccaacagcgacaacgggaccugcuaccccggcgacuucaucaacuacgaggagcuccgggagcagcuguccagcguguccagcuucgagcgcuucgagaucuuccccaagaccuccagcuggcccaaccacgacuccaacaagggcgucaccgccgccugcccgcacgccggcgccaagagcuucuacaagaaccugaucuggcucgugaagaaggggaacuccuaccccaagcugaaccagagcuacaucaacgacaagggcaaggaggugcugguccucugggggauccaccaccccuccacgaccgcggaccagcagagccuguaccagaacgccgacgccuacguguucgugggcaccagccgguacuccaagauguucaagcccgagaucgccacccgcccgaagguccgggaccgcgagggccggaugaacuacuacuggacgcugguggagcccggggacaagaucaccuucgaggccaccggcaaccucguggucccccgcuacgcguucaccauggagcggaacgccgggagcggcaucaucaucuccgacacgcccgugcacgacugcaacacgaccugccagaccccggagggcgccaucaacaccagccugcccuuccagaacauccaccccaucaccaucgggaagugccccaaguacgugaaguccaccaagcugcgccucgccaccggccugcggaacgucccgagcauccagucccgcgggcuguucggcgccaucgcgggguucaucgagggcggcuggacggggaugguggacggcugguacggguaccaccaccagaacgagcagggcagcggguacgccgccgaccucaaguccacccagaacgccaucgacaagaucaccaacaaggugaacagcgucaucgagaagaugaacacccaguucacggccgugggcaaggaguucaaccaccuggagaagcggaucgagaaccugaacaagaaggucgacgacggcuuccucgacaucuggaccuacaacgcggagcugcuggugcuccuggagaacgagcgcacccuggacuaccacgacuccaacgugaagaaccucuacgagaagguccggaaccagcugaagaacaacgccaaggagaucgggaacggcugcuucgaguucuaccacaagugcgacaacacgugcauggagagcgugaagaacgggaccuacgacuaccccaaguacuccgaggaggccaagcugaaccgcgagaagaucgacggcgugaagcucgagagcacccggaucuaccagauccuggccaucuacuccaccgucgccagcucccuggugcucguggucagccugggggcgaucuccuucuggaugugcagcaacggcagccugcagugccgcaucugcaucugaggacuaguuauaagacugacuagcccgaugggccucccaacgggcccuccuccccuccuugcaccgagauuaauaaaaaaaaaaaaaaaaaaaaaaaaaaaaaaaaaaaaaaaaaaaaaaaaaaaaaaaaaaaaaaaaugcaucccccccccccccccccccccccccccccccaaaggcucuuuucagagccaccagaauu

SEQ ID NO: 224156 - RNA, 2086 nt, Artificial Sequence
  mRNA product Design2 comprising derived and/or modified sequence from hemagglutinin__InfluenzaA__EPI830230 HsALB(1-18)_H1N1(Michigan2015_EPI830230)-HA (CDS opt1)
ggggcgcugccuacggagguggcagccaucuccuucucggcaucaagcuuaccaugaagugggugaccuucaucagccugcucuuccuguucuccagcgccuacuccgacacccugugcaucggcuaccacgccaacaacagcaccgacaccguggacacggugcucgagaagaacgucaccgugacccacuccgugaaccugcuggaggacaagcacaacgggaagcucugcaagcugcgcggcgucgcgccccugcaccucgggaagugcaacaucgccggcuggauccuggggaacccggagugcgagagccuguccaccgccagcuccuggagcuacaucguggagacguccaacagcgacaacgggaccugcuaccccggcgacuucaucaacuacgaggagcuccgggagcagcuguccagcguguccagcuucgagcgcuucgagaucuuccccaagaccuccagcuggcccaaccacgacuccaacaagggcgucaccgccgccugcccgcacgccggcgccaagagcuucuacaagaaccugaucuggcucgugaagaaggggaacuccuaccccaagcugaaccagagcuacaucaacgacaagggcaaggaggugcugguccucugggggauccaccaccccuccacgaccgcggaccagcagagccuguaccagaacgccgacgccuacguguucgugggcaccagccgguacuccaagauguucaagcccgagaucgccacccgcccgaagguccgggaccgcgagggccggaugaacuacuacuggacgcugguggagcccggggacaagaucaccuucgaggccaccggcaaccucguggucccccgcuacgcguucaccauggagcggaacgccgggagcggcaucaucaucuccgacacgcccgugcacgacugcaacacgaccugccagaccccggagggcgccaucaacaccagccugcccuuccagaacauccaccccaucaccaucgggaagugccccaaguacgugaaguccaccaagcugcgccucgccaccggccugcggaacgucccgagcauccagucccgcgggcuguucggcgccaucgcgggguucaucgagggcggcuggacggggaugguggacggcugguacggguaccaccaccagaacgagcagggcagcggguacgccgccgaccucaaguccacccagaacgccaucgacaagaucaccaacaaggugaacagcgucaucgagaagaugaacacccaguucacggccgugggcaaggaguucaaccaccuggagaagcggaucgagaaccugaacaagaaggucgacgacggcuuccucgacaucuggaccuacaacgcggagcugcuggugcuccuggagaacgagcgcacccuggacuaccacgacuccaacgugaagaaccucuacgagaagguccggaaccagcugaagaacaacgccaaggagaucgggaacggcugcuucgaguucuaccacaagugcgacaacacgugcauggagagcgugaagaacgggaccuacgacuaccccaaguacuccgaggaggccaagcugaaccgcgagaagaucgacggcgugaagcucgagagcacccggaucuaccagauccuggccaucuacuccaccgucgccagcucccuggugcucguggucagccugggggcgaucuccuucuggaugugcagcaacggcagccugcagugccgcaucugcaucugaggacuagugcaucacauuuaaaagcaucucagccuaccaugagaauaagagaaagaaaaugaagaucaauagcuuauucaucucuuuuucuuuuucguugguguaaagccaacacccugucuaaaaaacauaaauuucuuuaaucauuuugccucuuuucucugugcuucaauuaauaaaaaauggaaagaaccuagaucuaaaaaaaaaaaaaaaaaaaaaaaaaaaaaaaaaaaaaaaaaaaaaaaaaaaaaaaaaaaaaaaaugcaucccccccccccccccccccccccccccccccaaaggcucuuuucagagccaccagaauu

SEQ ID NO: 224157 - RNA, 1921 nt, Artificial Sequence
  mRNA product Design1 comprising derived and/or modified sequence from hemagglutinin__InfluenzaA__EPI830230 IgE-leader_H1N1(Michigan2015_EPI830230)-HA (CDS opt1)
gggagaaagcuuaccauggacuggaccuggauccuguuccucguggccgccgcgacccgcguccacagcgacacccugugcaucggcuaccacgccaacaacagcaccgacaccguggacacggugcucgagaagaacgucaccgugacccacuccgugaaccugcuggaggacaagcacaacgggaagcucugcaagcugcgcggcgucgcgccccugcaccucgggaagugcaacaucgccggcuggauccuggggaacccggagugcgagagccuguccaccgccagcuccuggagcuacaucguggagacguccaacagcgacaacgggaccugcuaccccggcgacuucaucaacuacgaggagcuccgggagcagcuguccagcguguccagcuucgagcgcuucgagaucuuccccaagaccuccagcuggcccaaccacgacuccaacaagggcgucaccgccgccugcccgcacgccggcgccaagagcuucuacaagaaccugaucuggcucgugaagaaggggaacuccuaccccaagcugaaccagagcuacaucaacgacaagggcaaggaggugcugguccucugggggauccaccaccccuccacgaccgcggaccagcagagccuguaccagaacgccgacgccuacguguucgugggcaccagccgguacuccaagauguucaagcccgagaucgccacccgcccgaagguccgggaccgcgagggccggaugaacuacuacuggacgcugguggagcccggggacaagaucaccuucgaggccaccggcaaccucguggucccccgcuacgcguucaccauggagcggaacgccgggagcggcaucaucaucuccgacacgcccgugcacgacugcaacacgaccugccagaccccggagggcgccaucaacaccagccugcccuuccagaacauccaccccaucaccaucgggaagugccccaaguacgugaaguccaccaagcugcgccucgccaccggccugcggaacgucccgagcauccagucccgcgggcuguucggcgccaucgcgggguucaucgagggcggcuggacggggaugguggacggcugguacggguaccaccaccagaacgagcagggcagcggguacgccgccgaccucaaguccacccagaacgccaucgacaagaucaccaacaaggugaacagcgucaucgagaagaugaacacccaguucacggccgugggcaaggaguucaaccaccuggagaagcggaucgagaaccugaacaagaaggucgacgacggcuuccucgacaucuggaccuacaacgcggagcugcuggugcuccuggagaacgagcgcacccuggacuaccacgacuccaacgugaagaaccucuacgagaagguccggaaccagcugaagaacaacgccaaggagaucgggaacggcugcuucgaguucuaccacaagugcgacaacacgugcauggagagcgugaagaacgggaccuacgacuaccccaaguacuccgaggaggccaagcugaaccgcgagaagaucgacggcgugaagcucgagagcacccggaucuaccagauccuggccaucuacuccaccgucgccagcucccuggugcucguggucagccugggggcgaucuccuucuggaugugcagcaacggcagccugcagugccgcaucugcaucugaggacuaguuauaagacugacuagcccgaugggccucccaacgggcccuccuccccuccuugcaccgagauuaauaaaaaaaaaaaaaaaaaaaaaaaaaaaaaaaaaaaaaaaaaaaaaaaaaaaaaaaaaaaaaaaaugcaucccccccccccccccccccccccccccccccaaaggcucuuuucagagccaccagaauu

SEQ ID NO: 224158 - RNA, 2086 nt, Artificial Sequence
  mRNA product Design2 comprising derived and/or modified sequence from hemagglutinin__InfluenzaA__EPI830230 IgE-leader_H1N1(Michigan2015_EPI830230)-HA (CDS opt1)
ggggcgcugccuacggagguggcagccaucuccuucucggcaucaagcuuaccauggacuggaccuggauccuguuccucguggccgccgcgacccgcguccacagcgacacccugugcaucggcuaccacgccaacaacagcaccgacaccguggacacggugcucgagaagaacgucaccgugacccacuccgugaaccugcuggaggacaagcacaacgggaagcucugcaagcugcgcggcgucgcgccccugcaccucgggaagugcaacaucgccggcuggauccuggggaacccggagugcgagagccuguccaccgccagcuccuggagcuacaucguggagacguccaacagcgacaacgggaccugcuaccccggcgacuucaucaacuacgaggagcuccgggagcagcuguccagcguguccagcuucgagcgcuucgagaucuuccccaagaccuccagcuggcccaaccacgacuccaacaagggcgucaccgccgccugcccgcacgccggcgccaagagcuucuacaagaaccugaucuggcucgugaagaaggggaacuccuaccccaagcugaaccagagcuacaucaacgacaagggcaaggaggugcugguccucugggggauccaccaccccuccacgaccgcggaccagcagagccuguaccagaacgccgacgccuacguguucgugggcaccagccgguacuccaagauguucaagcccgagaucgccacccgcccgaagguccgggaccgcgagggccggaugaacuacuacuggacgcugguggagcccggggacaagaucaccuucgaggccaccggcaaccucguggucccccgcuacgcguucaccauggagcggaacgccgggagcggcaucaucaucuccgacacgcccgugcacgacugcaacacgaccugccagaccccggagggcgccaucaacaccagccugcccuuccagaacauccaccccaucaccaucgggaagugccccaaguacgugaaguccaccaagcugcgccucgccaccggccugcggaacgucccgagcauccagucccgcgggcuguucggcgccaucgcgggguucaucgagggcggcuggacggggaugguggacggcugguacggguaccaccaccagaacgagcagggcagcggguacgccgccgaccucaaguccacccagaacgccaucgacaagaucaccaacaaggugaacagcgucaucgagaagaugaacacccaguucacggccgugggcaaggaguucaaccaccuggagaagcggaucgagaaccugaacaagaaggucgacgacggcuuccucgacaucuggaccuacaacgcggagcugcuggugcuccuggagaacgagcgcacccuggacuaccacgacuccaacgugaagaaccucuacgagaagguccggaaccagcugaagaacaacgccaaggagaucgggaacggcugcuucgaguucuaccacaagugcgacaacacgugcauggagagcgugaagaacgggaccuacgacuaccccaaguacuccgaggaggccaagcugaaccgcgagaagaucgacggcgugaagcucgagagcacccggaucuaccagauccuggccaucuacuccaccgucgccagcucccuggugcucguggucagccugggggcgaucuccuucuggaugugcagcaacggcagccugcagugccgcaucugcaucugaggacuagugcaucacauuuaaaagcaucucagccuaccaugagaauaagagaaagaaaaugaagaucaauagcuuauucaucucuuuuucuuuuucguugguguaaagccaacacccugucuaaaaaacauaaauuucuuuaaucauuuugccucuuuucucugugcuucaauuaauaaaaaauggaaagaaccuagaucuaaaaaaaaaaaaaaaaaaaaaaaaaaaaaaaaaaaaaaaaaaaaaaaaaaaaaaaaaaaaaaaaugcaucccccccccccccccccccccccccccccccaaaggcucuuuucagagccaccagaauu

SEQ ID NO: 224159 - RNA, 1939 nt, Artificial Sequence
  mRNA product Design1 comprising derived and/or modified sequence from hemagglutinin__InfluenzaA__EPI830230 HsCD5(1-24)_H1N1(Michigan2015_EPI830230)-HA (CDS opt1)
gggagaaagcuuaccaugcccaugggcagccugcagccgcucgccacccuguaccugcucgggaugcugguggccuccugccugggcgacacccugugcaucggcuaccacgccaacaacagcaccgacaccguggacacggugcucgagaagaacgucaccgugacccacuccgugaaccugcuggaggacaagcacaacgggaagcucugcaagcugcgcggcgucgcgccccugcaccucgggaagugcaacaucgccggcuggauccuggggaacccggagugcgagagccuguccaccgccagcuccuggagcuacaucguggagacguccaacagcgacaacgggaccugcuaccccggcgacuucaucaacuacgaggagcuccgggagcagcuguccagcguguccagcuucgagcgcuucgagaucuuccccaagaccuccagcuggcccaaccacgacuccaacaagggcgucaccgccgccugcccgcacgccggcgccaagagcuucuacaagaaccugaucuggcucgugaagaaggggaacuccuaccccaagcugaaccagagcuacaucaacgacaagggcaaggaggugcugguccucugggggauccaccaccccuccacgaccgcggaccagcagagccuguaccagaacgccgacgccuacguguucgugggcaccagccgguacuccaagauguucaagcccgagaucgccacccgcccgaagguccgggaccgcgagggccggaugaacuacuacuggacgcugguggagcccggggacaagaucaccuucgaggccaccggcaaccucguggucccccgcuacgcguucaccauggagcggaacgccgggagcggcaucaucaucuccgacacgcccgugcacgacugcaacacgaccugccagaccccggagggcgccaucaacaccagccugcccuuccagaacauccaccccaucaccaucgggaagugccccaaguacgugaaguccaccaagcugcgccucgccaccggccugcggaacgucccgagcauccagucccgcgggcuguucggcgccaucgcgggguucaucgagggcggcuggacggggaugguggacggcugguacggguaccaccaccagaacgagcagggcagcggguacgccgccgaccucaaguccacccagaacgccaucgacaagaucaccaacaaggugaacagcgucaucgagaagaugaacacccaguucacggccgugggcaaggaguucaaccaccuggagaagcggaucgagaaccugaacaagaaggucgacgacggcuuccucgacaucuggaccuacaacgcggagcugcuggugcuccuggagaacgagcgcacccuggacuaccacgacuccaacgugaagaaccucuacgagaagguccggaaccagcugaagaacaacgccaaggagaucgggaacggcugcuucgaguucuaccacaagugcgacaacacgugcauggagagcgugaagaacgggaccuacgacuaccccaaguacuccgaggaggccaagcugaaccgcgagaagaucgacggcgugaagcucgagagcacccggaucuaccagauccuggccaucuacuccaccgucgccagcucccuggugcucguggucagccugggggcgaucuccuucuggaugugcagcaacggcagccugcagugccgcaucugcaucugaggacuaguuauaagacugacuagcccgaugggccucccaacgggcccuccuccccuccuugcaccgagauuaauaaaaaaaaaaaaaaaaaaaaaaaaaaaaaaaaaaaaaaaaaaaaaaaaaaaaaaaaaaaaaaaaugcaucccccccccccccccccccccccccccccccaaaggcucuuuucagagccaccagaauu

SEQ ID NO: 224160 - RNA, 2104 nt, Artificial Sequence
  mRNA product Design2 comprising derived and/or modified sequence from hemagglutinin__InfluenzaA__EPI830230 HsCD5(1-24)_H1N1(Michigan2015_EPI830230)-HA (CDS opt1)
ggggcgcugccuacggagguggcagccaucuccuucucggcaucaagcuuaccaugcccaugggcagccugcagccgcucgccacccuguaccugcucgggaugcugguggccuccugccugggcgacacccugugcaucggcuaccacgccaacaacagcaccgacaccguggacacggugcucgagaagaacgucaccgugacccacuccgugaaccugcuggaggacaagcacaacgggaagcucugcaagcugcgcggcgucgcgccccugcaccucgggaagugcaacaucgccggcuggauccuggggaacccggagugcgagagccuguccaccgccagcuccuggagcuacaucguggagacguccaacagcgacaacgggaccugcuaccccggcgacuucaucaacuacgaggagcuccgggagcagcuguccagcguguccagcuucgagcgcuucgagaucuuccccaagaccuccagcuggcccaaccacgacuccaacaagggcgucaccgccgccugcccgcacgccggcgccaagagcuucuacaagaaccugaucuggcucgugaagaaggggaacuccuaccccaagcugaaccagagcuacaucaacgacaagggcaaggaggugcugguccucugggggauccaccaccccuccacgaccgcggaccagcagagccuguaccagaacgccgacgccuacguguucgugggcaccagccgguacuccaagauguucaagcccgagaucgccacccgcccgaagguccgggaccgcgagggccggaugaacuacuacuggacgcugguggagcccggggacaagaucaccuucgaggccaccggcaaccucguggucccccgcuacgcguucaccauggagcggaacgccgggagcggcaucaucaucuccgacacgcccgugcacgacugcaacacgaccugccagaccccggagggcgccaucaacaccagccugcccuuccagaacauccaccccaucaccaucgggaagugccccaaguacgugaaguccaccaagcugcgccucgccaccggccugcggaacgucccgagcauccagucccgcgggcuguucggcgccaucgcgggguucaucgagggcggcuggacggggaugguggacggcugguacggguaccaccaccagaacgagcagggcagcggguacgccgccgaccucaaguccacccagaacgccaucgacaagaucaccaacaaggugaacagcgucaucgagaagaugaacacccaguucacggccgugggcaaggaguucaaccaccuggagaagcggaucgagaaccugaacaagaaggucgacgacggcuuccucgacaucuggaccuacaacgcggagcugcuggugcuccuggagaacgagcgcacccuggacuaccacgacuccaacgugaagaaccucuacgagaagguccggaaccagcugaagaacaacgccaaggagaucgggaacggcugcuucgaguucuaccacaagugcgacaacacgugcauggagagcgugaagaacgggaccuacgacuaccccaaguacuccgaggaggccaagcugaaccgcgagaagaucgacggcgugaagcucgagagcacccggaucuaccagauccuggccaucuacuccaccgucgccagcucccuggugcucguggucagccugggggcgaucuccuucuggaugugcagcaacggcagccugcagugccgcaucugcaucugaggacuagugcaucacauuuaaaagcaucucagccuaccaugagaauaagagaaagaaaaugaagaucaauagcuuauucaucucuuuuucuuuuucguugguguaaagccaacacccugucuaaaaaacauaaauuucuuuaaucauuuugccucuuuucucugugcuucaauuaauaaaaaauggaaagaaccuagaucuaaaaaaaaaaaaaaaaaaaaaaaaaaaaaaaaaaaaaaaaaaaaaaaaaaaaaaaaaaaaaaaaugcaucccccccccccccccccccccccccccccccaaaggcucuuuucagagccaccagaauu

SEQ ID NO: 224161 - RNA, 1939 nt, Artificial Sequence
  mRNA product Design1 comprising derived and/or modified sequence from hemagglutinin__InfluenzaA__EPI830230 HLA-A2-SP_H1N1(Michigan2015_EPI830230)-HA (CDS opt1)
gggagaaagcuuaccauggccgugauggccccgcggacccugguccuccugcugagcggcgcgcucgcccugacccagacgugggccgacacccugugcaucggcuaccacgccaacaacagcaccgacaccguggacacggugcucgagaagaacgucaccgugacccacuccgugaaccugcuggaggacaagcacaacgggaagcucugcaagcugcgcggcgucgcgccccugcaccucgggaagugcaacaucgccggcuggauccuggggaacccggagugcgagagccuguccaccgccagcuccuggagcuacaucguggagacguccaacagcgacaacgggaccugcuaccccggcgacuucaucaacuacgaggagcuccgggagcagcuguccagcguguccagcuucgagcgcuucgagaucuuccccaagaccuccagcuggcccaaccacgacuccaacaagggcgucaccgccgccugcccgcacgccggcgccaagagcuucuacaagaaccugaucuggcucgugaagaaggggaacuccuaccccaagcugaaccagagcuacaucaacgacaagggcaaggaggugcugguccucugggggauccaccaccccuccacgaccgcggaccagcagagccuguaccagaacgccgacgccuacguguucgugggcaccagccgguacuccaagauguucaagcccgagaucgccacccgcccgaagguccgggaccgcgagggccggaugaacuacuacuggacgcugguggagcccggggacaagaucaccuucgaggccaccggcaaccucguggucccccgcuacgcguucaccauggagcggaacgccgggagcggcaucaucaucuccgacacgcccgugcacgacugcaacacgaccugccagaccccggagggcgccaucaacaccagccugcccuuccagaacauccaccccaucaccaucgggaagugccccaaguacgugaaguccaccaagcugcgccucgccaccggccugcggaacgucccgagcauccagucccgcgggcuguucggcgccaucgcgggguucaucgagggcggcuggacggggaugguggacggcugguacggguaccaccaccagaacgagcagggcagcggguacgccgccgaccucaaguccacccagaacgccaucgacaagaucaccaacaaggugaacagcgucaucgagaagaugaacacccaguucacggccgugggcaaggaguucaaccaccuggagaagcggaucgagaaccugaacaagaaggucgacgacggcuuccucgacaucuggaccuacaacgcggagcugcuggugcuccuggagaacgagcgcacccuggacuaccacgacuccaacgugaagaaccucuacgagaagguccggaaccagcugaagaacaacgccaaggagaucgggaacggcugcuucgaguucuaccacaagugcgacaacacgugcauggagagcgugaagaacgggaccuacgacuaccccaaguacuccgaggaggccaagcugaaccgcgagaagaucgacggcgugaagcucgagagcacccggaucuaccagauccuggccaucuacuccaccgucgccagcucccuggugcucguggucagccugggggcgaucuccuucuggaugugcagcaacggcagccugcagugccgcaucugcaucugaggacuaguuauaagacugacuagcccgaugggccucccaacgggcccuccuccccuccuugcaccgagauuaauaaaaaaaaaaaaaaaaaaaaaaaaaaaaaaaaaaaaaaaaaaaaaaaaaaaaaaaaaaaaaaaaugcaucccccccccccccccccccccccccccccccaaaggcucuuuucagagccaccagaauu

SEQ ID NO: 224162 - RNA, 2104 nt, Artificial Sequence
  mRNA product Design2 comprising derived and/or modified sequence from hemagglutinin__InfluenzaA__EPI830230 HLA-A2-SP_H1N1(Michigan2015_EPI830230)-HA (CDS opt1)
ggggcgcugccuacggagguggcagccaucuccuucucggcaucaagcuuaccauggccgugauggccccgcggacccugguccuccugcugagcggcgcgcucgcccugacccagacgugggccgacacccugugcaucggcuaccacgccaacaacagcaccgacaccguggacacggugcucgagaagaacgucaccgugacccacuccgugaaccugcuggaggacaagcacaacgggaagcucugcaagcugcgcggcgucgcgccccugcaccucgggaagugcaacaucgccggcuggauccuggggaacccggagugcgagagccuguccaccgccagcuccuggagcuacaucguggagacguccaacagcgacaacgggaccugcuaccccggcgacuucaucaacuacgaggagcuccgggagcagcuguccagcguguccagcuucgagcgcuucgagaucuuccccaagaccuccagcuggcccaaccacgacuccaacaagggcgucaccgccgccugcccgcacgccggcgccaagagcuucuacaagaaccugaucuggcucgugaagaaggggaacuccuaccccaagcugaaccagagcuacaucaacgacaagggcaaggaggugcugguccucugggggauccaccaccccuccacgaccgcggaccagcagagccuguaccagaacgccgacgccuacguguucgugggcaccagccgguacuccaagauguucaagcccgagaucgccacccgcccgaagguccgggaccgcgagggccggaugaacuacuacuggacgcugguggagcccggggacaagaucaccuucgaggccaccggcaaccucguggucccccgcuacgcguucaccauggagcggaacgccgggagcggcaucaucaucuccgacacgcccgugcacgacugcaacacgaccugccagaccccggagggcgccaucaacaccagccugcccuuccagaacauccaccccaucaccaucgggaagugccccaaguacgugaaguccaccaagcugcgccucgccaccggccugcggaacgucccgagcauccagucccgcgggcuguucggcgccaucgcgggguucaucgagggcggcuggacggggaugguggacggcugguacggguaccaccaccagaacgagcagggcagcggguacgccgccgaccucaaguccacccagaacgccaucgacaagaucaccaacaaggugaacagcgucaucgagaagaugaacacccaguucacggccgugggcaaggaguucaaccaccuggagaagcggaucgagaaccugaacaagaaggucgacgacggcuuccucgacaucuggaccuacaacgcggagcugcuggugcuccuggagaacgagcgcacccuggacuaccacgacuccaacgugaagaaccucuacgagaagguccggaaccagcugaagaacaacgccaaggagaucgggaacggcugcuucgaguucuaccacaagugcgacaacacgugcauggagagcgugaagaacgggaccuacgacuaccccaaguacuccgaggaggccaagcugaaccgcgagaagaucgacggcgugaagcucgagagcacccggaucuaccagauccuggccaucuacuccaccgucgccagcucccuggugcucguggucagccugggggcgaucuccuucuggaugugcagcaacggcagccugcagugccgcaucugcaucugaggacuagugcaucacauuuaaaagcaucucagccuaccaugagaauaagagaaagaaaaugaagaucaauagcuuauucaucucuuuuucuuuuucguugguguaaagccaacacccugucuaaaaaacauaaauuucuuuaaucauuuugccucuuuucucugugcuucaauuaauaaaaaauggaaagaaccuagaucuaaaaaaaaaaaaaaaaaaaaaaaaaaaaaaaaaaaaaaaaaaaaaaaaaaaaaaaaaaaaaaaaugcaucccccccccccccccccccccccccccccccaaaggcucuuuucagagccaccagaauu

SEQ ID NO: 224163 - RNA, 1918 nt, Artificial Sequence
  mRNA product Design1 comprising derived and/or modified sequence from hemagglutinin__InfluenzaA__ACQ45338 (CDS wt) R4542/R4563
gggagaaagcuuaccaugaaggcaauacucguaguucugcuauauacauuugcaaccgcaaaugcagacacauuauguauagguuaucaugcgaacaauucaacagacacuguagacacaguacuagaaaagaauguaacaguaacacacucuguuaaccuucuagaagacaagcauaacgggaaacuaugcaaacuaagagggguagccccauugcauuuggguaaauguaacauugcuggcuggauccugggaaauccagagugugaaucacucuccacagcaagcucaugguccuacauuguggaaacaucuaguucagacaauggaacguguuacccaggagauuucaucgauuaugaggagcuaagagagcaauugagcucagugucaucauuugaaagguuugagauauuccccaagacaaguucauggcccaaucaugacucgaacaaagguguaacggcagcauguccucaugcuggagcaaagagcuucuacaaaaauuuaauauggcuaguuaagaaaggaaauucauacccaaagcucagcaaauccuacauuaaugauaaagggaaagaaguccucgugcuauggggcauucaccauccaucuaccagugcugaccaacaaagucucuaucagaaugcagaugcauauguuuuuguggggucaucaagauacagcaagaaguucaagccggaaauagcaauaagacccaaagugagggaucaagaagggagaaugaacuauuacuggacccuaguagagccgggagacaaaauaacauucgaagcaacuggaaaucuagugguaccgagauaugcauucgcaauggaaagaaaugcuggaucugguauuaucauuucagauacaccaguccacgauugcaauacaacuugucagacacccaagggugcuauaaacaccagccucccauuucagaauauacauccgaucacaauuggaaaauguccaaaauauguaaaaagcacaaaauugagacuggccacaggauugaggaaugucccgucuauucaaucuagaggccuauuuggggccauugccgguuucauugaaggcggguggacagggaugguagauggaugguacgguuaucaccaucaaaaugagcaggggucaggauaugcagccgaccucaagagcacacagaaugccauugacgagauuacuaacaaaguaaauucuguuauugaaaagaugaauacacaguucacagcaguagguaaagaguucaaccaccuggaaaagagaauagagaauuuaaauaagaaaguugaugaugguuuccuggacauuuggacuuacaaugccgaacuguugguucuauuggaaaaugaaagaacuuuggacuaccacgauucaaaugugaagaacuuauaugaaaagguaagaagccagcuaaagaacaaugccaaggaaauuggaaacggcugcuuugaauuuuaccacaaaugcgauaacacgugcauggaaagugucaaaaaugggacuuaugacuacccaaaauacucagaggaagcaaaauuaaacagagaagaaauagaugggguaaagcuggaaucaacaaggauuuaccagauuuuggcgaucuauucaacugucgccaguucauugguacugguagucucccugggggcaaucaguuucuggaugugcucuaaugggucucuacaguguagaauauguauuuaaggacuaguuauaagacugacuagcccgaugggccucccaacgggcccuccuccccuccuugcaccgagauuaauaaaaaaaaaaaaaaaaaaaaaaaaaaaaaaaaaaaaaaaaaaaaaaaaaaaaaaaaaaaaaaaaugcaucccccccccccccccccccccccccccccccaaaggcucuuuucagagccaccagaauu

SEQ ID NO: 224164 - RNA, 2083 nt, Artificial Sequence
  mRNA product Design2 comprising derived and/or modified sequence from hemagglutinin__InfluenzaA__ACQ45338 (CDS wt)
ggggcgcugccuacggagguggcagccaucuccuucucggcaucaagcuuaccaugaaggcaauacucguaguucugcuauauacauuugcaaccgcaaaugcagacacauuauguauagguuaucaugcgaacaauucaacagacacuguagacacaguacuagaaaagaauguaacaguaacacacucuguuaaccuucuagaagacaagcauaacgggaaacuaugcaaacuaagagggguagccccauugcauuuggguaaauguaacauugcuggcuggauccugggaaauccagagugugaaucacucuccacagcaagcucaugguccuacauuguggaaacaucuaguucagacaauggaacguguuacccaggagauuucaucgauuaugaggagcuaagagagcaauugagcucagugucaucauuugaaagguuugagauauuccccaagacaaguucauggcccaaucaugacucgaacaaagguguaacggcagcauguccucaugcuggagcaaagagcuucuacaaaaauuuaauauggcuaguuaagaaaggaaauucauacccaaagcucagcaaauccuacauuaaugauaaagggaaagaaguccucgugcuauggggcauucaccauccaucuaccagugcugaccaacaaagucucuaucagaaugcagaugcauauguuuuuguggggucaucaagauacagcaagaaguucaagccggaaauagcaauaagacccaaagugagggaucaagaagggagaaugaacuauuacuggacccuaguagagccgggagacaaaauaacauucgaagcaacuggaaaucuagugguaccgagauaugcauucgcaauggaaagaaaugcuggaucugguauuaucauuucagauacaccaguccacgauugcaauacaacuugucagacacccaagggugcuauaaacaccagccucccauuucagaauauacauccgaucacaauuggaaaauguccaaaauauguaaaaagcacaaaauugagacuggccacaggauugaggaaugucccgucuauucaaucuagaggccuauuuggggccauugccgguuucauugaaggcggguggacagggaugguagauggaugguacgguuaucaccaucaaaaugagcaggggucaggauaugcagccgaccucaagagcacacagaaugccauugacgagauuacuaacaaaguaaauucuguuauugaaaagaugaauacacaguucacagcaguagguaaagaguucaaccaccuggaaaagagaauagagaauuuaaauaagaaaguugaugaugguuuccuggacauuuggacuuacaaugccgaacuguugguucuauuggaaaaugaaagaacuuuggacuaccacgauucaaaugugaagaacuuauaugaaaagguaagaagccagcuaaagaacaaugccaaggaaauuggaaacggcugcuuugaauuuuaccacaaaugcgauaacacgugcauggaaagugucaaaaaugggacuuaugacuacccaaaauacucagaggaagcaaaauuaaacagagaagaaauagaugggguaaagcuggaaucaacaaggauuuaccagauuuuggcgaucuauucaacugucgccaguucauugguacugguagucucccugggggcaaucaguuucuggaugugcucuaaugggucucuacaguguagaauauguauuuaaggacuagugcaucacauuuaaaagcaucucagccuaccaugagaauaagagaaagaaaaugaagaucaauagcuuauucaucucuuuuucuuuuucguugguguaaagccaacacccugucuaaaaaacauaaauuucuuuaaucauuuugccucuuuucucugugcuucaauuaauaaaaaauggaaagaaccuagaucuaaaaaaaaaaaaaaaaaaaaaaaaaaaaaaaaaaaaaaaaaaaaaaaaaaaaaaaaaaaaaaaaugcaucccccccccccccccccccccccccccccccaaaggcucuuuucagagccaccagaauu

SEQ ID NO: 224165 - RNA, 1893 nt, Artificial Sequence
  mRNA product Design3 comprising derived and/or modified sequence from hemagglutinin__InfluenzaA__ACQ45338 (CDS opt1) R1444
gggagaaagcuuaccaugaaggccauccuggugguccuccuguacaccuucgccaccgcgaacgccgacacgcugugcaucggcuaccacgccaacaacagcaccgacaccguggacaccgugcucgagaagaacgucacggugacccacuccgugaaccugcuggaggacaagcacaacgggaagcucugcaagcugcggggcgucgccccgcugcaccucgggaagugcaacaucgccggcuggauccuggggaacccggagugcgagagccuguccaccgcgagcuccuggagcuacaucguggagaccuccagcuccgacaacggcacgugcuaccccggcgacuucaucgacuacgaggagcuccgcgagcagcugagcuccgugagcuccuucgagcgguucgagaucuuccccaagaccagcuccuggcccaaccacgacagcaacaagggggucaccgccgccugcccgcacgccggcgcgaaguccuucuacaagaaccugaucuggcucgugaagaaggggaacagcuaccccaagcuguccaagagcuacaucaacgacaagggcaaggaggugcugguccucugggggauccaccaccccagcaccuccgccgaccagcagagccuguaccagaacgccgacgccuacguguucgugggcuccagccgcuacuccaagaaguucaagcccgagaucgccauccggccgaagguccgcgaccaggagggccggaugaacuacuacuggacgcugguggagcccggggacaagaucaccuucgaggcgaccggcaaccucguggucccccgcuacgccuucgccauggagcggaacgccgggagcggcaucaucaucuccgacacccccgugcacgacugcaacacgaccugccagaccccgaagggcgccaucaacaccagccugcccuuccagaacauccaccccaucacgaucgggaagugccccaaguacgugaaguccaccaagcugcgccucgcgaccggccugcggaacgucccgagcauccagucccgcgggcuguucggcgccaucgccggguucaucgagggcggcuggaccgggaugguggacggcugguacggguaccaccaccagaacgagcagggcagcggguacgccgccgaccucaaguccacgcagaacgcgaucgacgagaucaccaacaaggugaacagcgucaucgagaagaugaacacccaguucaccgccgugggcaaggaguucaaccaccuggagaagcggaucgagaaccugaacaagaaggucgacgacggcuuccucgacaucuggacguacaacgccgagcugcuggugcuccuggagaacgagcgcacccuggacuaccacgacuccaacgugaagaaccucuacgagaagguccggagccagcugaagaacaacgccaaggagaucgggaacggcugcuucgaguucuaccacaagugcgacaacaccugcauggaguccgugaagaacgggaccuacgacuaccccaaguacagcgaggaggccaagcugaaccgcgaggagaucgacggcgugaagcucgaguccacgcggaucuaccagauccuggcgaucuacagcaccgucgccagcucccuggugcucguggucagccugggggccaucuccuucuggaugugcagcaacggcucccugcagugccgcaucugcaucugaccacuaguuauaagacugacuagcccgaugggccucccaacgggcccuccuccccuccuugcaccgagauuaauaaaaaaaaaaaaaaaaaaaaaaaaaaaaaaaaaaaaaaaaaaaaaaaaaaaaaaaaaaaaaaaauauuccccccccccccccccccccccccccccccucuag

SEQ ID NO: 224166 - RNA, 1918 nt, Artificial Sequence
  mRNA product Design1 comprising derived and/or modified sequence from hemagglutinin__InfluenzaA__ACQ45338 (CDS opt1) R1548/R2429
gggagaaagcuuaccaugaaggccauccuggugguccuccuguacaccuucgccaccgcgaacgccgacacgcugugcaucggcuaccacgccaacaacagcaccgacaccguggacaccgugcucgagaagaacgucacggugacccacuccgugaaccugcuggaggacaagcacaacgggaagcucugcaagcugcggggcgucgccccgcugcaccucgggaagugcaacaucgccggcuggauccuggggaacccggagugcgagagccuguccaccgcgagcuccuggagcuacaucguggagaccuccagcuccgacaacggcacgugcuaccccggcgacuucaucgacuacgaggagcuccgcgagcagcugagcuccgugagcuccuucgagcgguucgagaucuuccccaagaccagcuccuggcccaaccacgacagcaacaagggggucaccgccgccugcccgcacgccggcgcgaaguccuucuacaagaaccugaucuggcucgugaagaaggggaacagcuaccccaagcuguccaagagcuacaucaacgacaagggcaaggaggugcugguccucugggggauccaccaccccagcaccuccgccgaccagcagagccuguaccagaacgccgacgccuacguguucgugggcuccagccgcuacuccaagaaguucaagcccgagaucgccauccggccgaagguccgcgaccaggagggccggaugaacuacuacuggacgcugguggagcccggggacaagaucaccuucgaggcgaccggcaaccucguggucccccgcuacgccuucgccauggagcggaacgccgggagcggcaucaucaucuccgacacccccgugcacgacugcaacacgaccugccagaccccgaagggcgccaucaacaccagccugcccuuccagaacauccaccccaucacgaucgggaagugccccaaguacgugaaguccaccaagcugcgccucgcgaccggccugcggaacgucccgagcauccagucccgcgggcuguucggcgccaucgccggguucaucgagggcggcuggaccgggaugguggacggcugguacggguaccaccaccagaacgagcagggcagcggguacgccgccgaccucaaguccacgcagaacgcgaucgacgagaucaccaacaaggugaacagcgucaucgagaagaugaacacccaguucaccgccgugggcaaggaguucaaccaccuggagaagcggaucgagaaccugaacaagaaggucgacgacggcuuccucgacaucuggacguacaacgccgagcugcuggugcuccuggagaacgagcgcacccuggacuaccacgacuccaacgugaagaaccucuacgagaagguccggagccagcugaagaacaacgccaaggagaucgggaacggcugcuucgaguucuaccacaagugcgacaacaccugcauggaguccgugaagaacgggaccuacgacuaccccaaguacagcgaggaggccaagcugaaccgcgaggagaucgacggcgugaagcucgaguccacgcggaucuaccagauccuggcgaucuacagcaccgucgccagcucccuggugcucguggucagccugggggccaucuccuucuggaugugcagcaacggcucccugcagugccgcaucugcaucugaccacuaguuauaagacugacuagcccgaugggccucccaacgggcccuccuccccuccuugcaccgagauuaauaaaaaaaaaaaaaaaaaaaaaaaaaaaaaaaaaaaaaaaaaaaaaaaaaaaaaaaaaaaaaaaaugcaucccccccccccccccccccccccccccccccaaaggcucuuuucagagccaccagaauu

SEQ ID NO: 224167 - RNA, 2083 nt, Artificial Sequence
  mRNA product Design2 comprising derived and/or modified sequence from hemagglutinin__InfluenzaA__ACQ45338 (CDS opt1) R2564/R2630
ggggcgcugccuacggagguggcagccaucuccuucucggcaucaagcuuaccaugaaggccauccuggugguccuccuguacaccuucgccaccgcgaacgccgacacgcugugcaucggcuaccacgccaacaacagcaccgacaccguggacaccgugcucgagaagaacgucacggugacccacuccgugaaccugcuggaggacaagcacaacgggaagcucugcaagcugcggggcgucgccccgcugcaccucgggaagugcaacaucgccggcuggauccuggggaacccggagugcgagagccuguccaccgcgagcuccuggagcuacaucguggagaccuccagcuccgacaacggcacgugcuaccccggcgacuucaucgacuacgaggagcuccgcgagcagcugagcuccgugagcuccuucgagcgguucgagaucuuccccaagaccagcuccuggcccaaccacgacagcaacaagggggucaccgccgccugcccgcacgccggcgcgaaguccuucuacaagaaccugaucuggcucgugaagaaggggaacagcuaccccaagcuguccaagagcuacaucaacgacaagggcaaggaggugcugguccucugggggauccaccaccccagcaccuccgccgaccagcagagccuguaccagaacgccgacgccuacguguucgugggcuccagccgcuacuccaagaaguucaagcccgagaucgccauccggccgaagguccgcgaccaggagggccggaugaacuacuacuggacgcugguggagcccggggacaagaucaccuucgaggcgaccggcaaccucguggucccccgcuacgccuucgccauggagcggaacgccgggagcggcaucaucaucuccgacacccccgugcacgacugcaacacgaccugccagaccccgaagggcgccaucaacaccagccugcccuuccagaacauccaccccaucacgaucgggaagugccccaaguacgugaaguccaccaagcugcgccucgcgaccggccugcggaacgucccgagcauccagucccgcgggcuguucggcgccaucgccggguucaucgagggcggcuggaccgggaugguggacggcugguacggguaccaccaccagaacgagcagggcagcggguacgccgccgaccucaaguccacgcagaacgcgaucgacgagaucaccaacaaggugaacagcgucaucgagaagaugaacacccaguucaccgccgugggcaaggaguucaaccaccuggagaagcggaucgagaaccugaacaagaaggucgacgacggcuuccucgacaucuggacguacaacgccgagcugcuggugcuccuggagaacgagcgcacccuggacuaccacgacuccaacgugaagaaccucuacgagaagguccggagccagcugaagaacaacgccaaggagaucgggaacggcugcuucgaguucuaccacaagugcgacaacaccugcauggaguccgugaagaacgggaccuacgacuaccccaaguacagcgaggaggccaagcugaaccgcgaggagaucgacggcgugaagcucgaguccacgcggaucuaccagauccuggcgaucuacagcaccgucgccagcucccuggugcucguggucagccugggggccaucuccuucuggaugugcagcaacggcucccugcagugccgcaucugcaucugaccacuagugcaucacauuuaaaagcaucucagccuaccaugagaauaagagaaagaaaaugaagaucaauagcuuauucaucucuuuuucuuuuucguugguguaaagccaacacccugucuaaaaaacauaaauuucuuuaaucauuuugccucuuuucucugugcuucaauuaauaaaaaauggaaagaaccuagaucuaaaaaaaaaaaaaaaaaaaaaaaaaaaaaaaaaaaaaaaaaaaaaaaaaaaaaaaaaaaaaaaaugcaucccccccccccccccccccccccccccccccaaaggcucuuuucagagccaccagaauu

SEQ ID NO: 224168 - RNA, 1921 nt, Artificial Sequence
  mRNA product Design1 comprising derived and/or modified sequence from hemagglutinin__InfluenzaA__ACQ45338 HsALB(1-18)_H1N1(Netherlands2009)-HA (CDS opt1)
gggagaaagcuuaccaugaagugggugaccuucaucagccugcucuuccuguucuccagcgccuacuccgacacgcugugcaucggcuaccacgccaacaacagcaccgacaccguggacaccgugcucgagaagaacgucacggugacccacuccgugaaccugcuggaggacaagcacaacgggaagcucugcaagcugcggggcgucgccccgcugcaccucgggaagugcaacaucgccggcuggauccuggggaacccggagugcgagagccuguccaccgcgagcuccuggagcuacaucguggagaccuccagcuccgacaacggcacgugcuaccccggcgacuucaucgacuacgaggagcuccgcgagcagcugagcuccgugagcuccuucgagcgguucgagaucuuccccaagaccagcuccuggcccaaccacgacagcaacaagggggucaccgccgccugcccgcacgccggcgcgaaguccuucuacaagaaccugaucuggcucgugaagaaggggaacagcuaccccaagcuguccaagagcuacaucaacgacaagggcaaggaggugcugguccucugggggauccaccaccccagcaccuccgccgaccagcagagccuguaccagaacgccgacgccuacguguucgugggcuccagccgcuacuccaagaaguucaagcccgagaucgccauccggccgaagguccgcgaccaggagggccggaugaacuacuacuggacgcugguggagcccggggacaagaucaccuucgaggcgaccggcaaccucguggucccccgcuacgccuucgccauggagcggaacgccgggagcggcaucaucaucuccgacacccccgugcacgacugcaacacgaccugccagaccccgaagggcgccaucaacaccagccugcccuuccagaacauccaccccaucacgaucgggaagugccccaaguacgugaaguccaccaagcugcgccucgcgaccggccugcggaacgucccgagcauccagucccgcgggcuguucggcgccaucgccggguucaucgagggcggcuggaccgggaugguggacggcugguacggguaccaccaccagaacgagcagggcagcggguacgccgccgaccucaaguccacgcagaacgcgaucgacgagaucaccaacaaggugaacagcgucaucgagaagaugaacacccaguucaccgccgugggcaaggaguucaaccaccuggagaagcggaucgagaaccugaacaagaaggucgacgacggcuuccucgacaucuggacguacaacgccgagcugcuggugcuccuggagaacgagcgcacccuggacuaccacgacuccaacgugaagaaccucuacgagaagguccggagccagcugaagaacaacgccaaggagaucgggaacggcugcuucgaguucuaccacaagugcgacaacaccugcauggaguccgugaagaacgggaccuacgacuaccccaaguacagcgaggaggccaagcugaaccgcgaggagaucgacggcgugaagcucgaguccacgcggaucuaccagauccuggcgaucuacagcaccgucgccagcucccuggugcucguggucagccugggggccaucuccuucuggaugugcagcaacggcucccugcagugccgcaucugcaucugaccacuaguuauaagacugacuagcccgaugggccucccaacgggcccuccuccccuccuugcaccgagauuaauaaaaaaaaaaaaaaaaaaaaaaaaaaaaaaaaaaaaaaaaaaaaaaaaaaaaaaaaaaaaaaaaugcaucccccccccccccccccccccccccccccccaaaggcucuuuucagagccaccagaauu

SEQ ID NO: 224169 - RNA, 2086 nt, Artificial Sequence
  mRNA product Design2 comprising derived and/or modified sequence from hemagglutinin__InfluenzaA__ACQ45338 HsALB(1-18)_H1N1(Netherlands2009)-HA (CDS opt1)
ggggcgcugccuacggagguggcagccaucuccuucucggcaucaagcuuaccaugaagugggugaccuucaucagccugcucuuccuguucuccagcgccuacuccgacacgcugugcaucggcuaccacgccaacaacagcaccgacaccguggacaccgugcucgagaagaacgucacggugacccacuccgugaaccugcuggaggacaagcacaacgggaagcucugcaagcugcggggcgucgccccgcugcaccucgggaagugcaacaucgccggcuggauccuggggaacccggagugcgagagccuguccaccgcgagcuccuggagcuacaucguggagaccuccagcuccgacaacggcacgugcuaccccggcgacuucaucgacuacgaggagcuccgcgagcagcugagcuccgugagcuccuucgagcgguucgagaucuuccccaagaccagcuccuggcccaaccacgacagcaacaagggggucaccgccgccugcccgcacgccggcgcgaaguccuucuacaagaaccugaucuggcucgugaagaaggggaacagcuaccccaagcuguccaagagcuacaucaacgacaagggcaaggaggugcugguccucugggggauccaccaccccagcaccuccgccgaccagcagagccuguaccagaacgccgacgccuacguguucgugggcuccagccgcuacuccaagaaguucaagcccgagaucgccauccggccgaagguccgcgaccaggagggccggaugaacuacuacuggacgcugguggagcccggggacaagaucaccuucgaggcgaccggcaaccucguggucccccgcuacgccuucgccauggagcggaacgccgggagcggcaucaucaucuccgacacccccgugcacgacugcaacacgaccugccagaccccgaagggcgccaucaacaccagccugcccuuccagaacauccaccccaucacgaucgggaagugccccaaguacgugaaguccaccaagcugcgccucgcgaccggccugcggaacgucccgagcauccagucccgcgggcuguucggcgccaucgccggguucaucgagggcggcuggaccgggaugguggacggcugguacggguaccaccaccagaacgagcagggcagcggguacgccgccgaccucaaguccacgcagaacgcgaucgacgagaucaccaacaaggugaacagcgucaucgagaagaugaacacccaguucaccgccgugggcaaggaguucaaccaccuggagaagcggaucgagaaccugaacaagaaggucgacgacggcuuccucgacaucuggacguacaacgccgagcugcuggugcuccuggagaacgagcgcacccuggacuaccacgacuccaacgugaagaaccucuacgagaagguccggagccagcugaagaacaacgccaaggagaucgggaacggcugcuucgaguucuaccacaagugcgacaacaccugcauggaguccgugaagaacgggaccuacgacuaccccaaguacagcgaggaggccaagcugaaccgcgaggagaucgacggcgugaagcucgaguccacgcggaucuaccagauccuggcgaucuacagcaccgucgccagcucccuggugcucguggucagccugggggccaucuccuucuggaugugcagcaacggcucccugcagugccgcaucugcaucugaccacuagugcaucacauuuaaaagcaucucagccuaccaugagaauaagagaaagaaaaugaagaucaauagcuuauucaucucuuuuucuuuuucguugguguaaagccaacacccugucuaaaaaacauaaauuucuuuaaucauuuugccucuuuucucugugcuucaauuaauaaaaaauggaaagaaccuagaucuaaaaaaaaaaaaaaaaaaaaaaaaaaaaaaaaaaaaaaaaaaaaaaaaaaaaaaaaaaaaaaaaugcaucccccccccccccccccccccccccccccccaaaggcucuuuucagagccaccagaauu

SEQ ID NO: 224170 - RNA, 1921 nt, Artificial Sequence
  mRNA product Design1 comprising derived and/or modified sequence from hemagglutinin__InfluenzaA__ACQ45338 IgE-leader_H1N1(Netherlands2009)-HA (CDS opt1)
gggagaaagcuuaccauggacuggaccuggauccuguuccucguggccgccgcgacccgcguccacagcgacacgcugugcaucggcuaccacgccaacaacagcaccgacaccguggacaccgugcucgagaagaacgucacggugacccacuccgugaaccugcuggaggacaagcacaacgggaagcucugcaagcugcggggcgucgccccgcugcaccucgggaagugcaacaucgccggcuggauccuggggaacccggagugcgagagccuguccaccgcgagcuccuggagcuacaucguggagaccuccagcuccgacaacggcacgugcuaccccggcgacuucaucgacuacgaggagcuccgcgagcagcugagcuccgugagcuccuucgagcgguucgagaucuuccccaagaccagcuccuggcccaaccacgacagcaacaagggggucaccgccgccugcccgcacgccggcgcgaaguccuucuacaagaaccugaucuggcucgugaagaaggggaacagcuaccccaagcuguccaagagcuacaucaacgacaagggcaaggaggugcugguccucugggggauccaccaccccagcaccuccgccgaccagcagagccuguaccagaacgccgacgccuacguguucgugggcuccagccgcuacuccaagaaguucaagcccgagaucgccauccggccgaagguccgcgaccaggagggccggaugaacuacuacuggacgcugguggagcccggggacaagaucaccuucgaggcgaccggcaaccucguggucccccgcuacgccuucgccauggagcggaacgccgggagcggcaucaucaucuccgacacccccgugcacgacugcaacacgaccugccagaccccgaagggcgccaucaacaccagccugcccuuccagaacauccaccccaucacgaucgggaagugccccaaguacgugaaguccaccaagcugcgccucgcgaccggccugcggaacgucccgagcauccagucccgcgggcuguucggcgccaucgccggguucaucgagggcggcuggaccgggaugguggacggcugguacggguaccaccaccagaacgagcagggcagcggguacgccgccgaccucaaguccacgcagaacgcgaucgacgagaucaccaacaaggugaacagcgucaucgagaagaugaacacccaguucaccgccgugggcaaggaguucaaccaccuggagaagcggaucgagaaccugaacaagaaggucgacgacggcuuccucgacaucuggacguacaacgccgagcugcuggugcuccuggagaacgagcgcacccuggacuaccacgacuccaacgugaagaaccucuacgagaagguccggagccagcugaagaacaacgccaaggagaucgggaacggcugcuucgaguucuaccacaagugcgacaacaccugcauggaguccgugaagaacgggaccuacgacuaccccaaguacagcgaggaggccaagcugaaccgcgaggagaucgacggcgugaagcucgaguccacgcggaucuaccagauccuggcgaucuacagcaccgucgccagcucccuggugcucguggucagccugggggccaucuccuucuggaugugcagcaacggcucccugcagugccgcaucugcaucugaccacuaguuauaagacugacuagcccgaugggccucccaacgggcccuccuccccuccuugcaccgagauuaauaaaaaaaaaaaaaaaaaaaaaaaaaaaaaaaaaaaaaaaaaaaaaaaaaaaaaaaaaaaaaaaaugcaucccccccccccccccccccccccccccccccaaaggcucuuuucagagccaccagaauu

SEQ ID NO: 224171 - RNA, 2086 nt, Artificial Sequence
  mRNA product Design2 comprising derived and/or modified sequence from hemagglutinin__InfluenzaA__ACQ45338 IgE-leader_H1N1(Netherlands2009)-HA (CDS opt1)
ggggcgcugccuacggagguggcagccaucuccuucucggcaucaagcuuaccauggacuggaccuggauccuguuccucguggccgccgcgacccgcguccacagcgacacgcugugcaucggcuaccacgccaacaacagcaccgacaccguggacaccgugcucgagaagaacgucacggugacccacuccgugaaccugcuggaggacaagcacaacgggaagcucugcaagcugcggggcgucgccccgcugcaccucgggaagugcaacaucgccggcuggauccuggggaacccggagugcgagagccuguccaccgcgagcuccuggagcuacaucguggagaccuccagcuccgacaacggcacgugcuaccccggcgacuucaucgacuacgaggagcuccgcgagcagcugagcuccgugagcuccuucgagcgguucgagaucuuccccaagaccagcuccuggcccaaccacgacagcaacaagggggucaccgccgccugcccgcacgccggcgcgaaguccuucuacaagaaccugaucuggcucgugaagaaggggaacagcuaccccaagcuguccaagagcuacaucaacgacaagggcaaggaggugcugguccucugggggauccaccaccccagcaccuccgccgaccagcagagccuguaccagaacgccgacgccuacguguucgugggcuccagccgcuacuccaagaaguucaagcccgagaucgccauccggccgaagguccgcgaccaggagggccggaugaacuacuacuggacgcugguggagcccggggacaagaucaccuucgaggcgaccggcaaccucguggucccccgcuacgccuucgccauggagcggaacgccgggagcggcaucaucaucuccgacacccccgugcacgacugcaacacgaccugccagaccccgaagggcgccaucaacaccagccugcccuuccagaacauccaccccaucacgaucgggaagugccccaaguacgugaaguccaccaagcugcgccucgcgaccggccugcggaacgucccgagcauccagucccgcgggcuguucggcgccaucgccggguucaucgagggcggcuggaccgggaugguggacggcugguacggguaccaccaccagaacgagcagggcagcggguacgccgccgaccucaaguccacgcagaacgcgaucgacgagaucaccaacaaggugaacagcgucaucgagaagaugaacacccaguucaccgccgugggcaaggaguucaaccaccuggagaagcggaucgagaaccugaacaagaaggucgacgacggcuuccucgacaucuggacguacaacgccgagcugcuggugcuccuggagaacgagcgcacccuggacuaccacgacuccaacgugaagaaccucuacgagaagguccggagccagcugaagaacaacgccaaggagaucgggaacggcugcuucgaguucuaccacaagugcgacaacaccugcauggaguccgugaagaacgggaccuacgacuaccccaaguacagcgaggaggccaagcugaaccgcgaggagaucgacggcgugaagcucgaguccacgcggaucuaccagauccuggcgaucuacagcaccgucgccagcucccuggugcucguggucagccugggggccaucuccuucuggaugugcagcaacggcucccugcagugccgcaucugcaucugaccacuagugcaucacauuuaaaagcaucucagccuaccaugagaauaagagaaagaaaaugaagaucaauagcuuauucaucucuuuuucuuuuucguugguguaaagccaacacccugucuaaaaaacauaaauuucuuuaaucauuuugccucuuuucucugugcuucaauuaauaaaaaauggaaagaaccuagaucuaaaaaaaaaaaaaaaaaaaaaaaaaaaaaaaaaaaaaaaaaaaaaaaaaaaaaaaaaaaaaaaaugcaucccccccccccccccccccccccccccccccaaaggcucuuuucagagccaccagaauu

SEQ ID NO: 224172 - RNA, 1939 nt, Artificial Sequence
  mRNA product Design1 comprising derived and/or modified sequence from hemagglutinin__InfluenzaA__ACQ45338 HsCD5(1-24)_H1N1(Netherlands2009)-HA (CDS opt1)
gggagaaagcuuaccaugcccaugggcagccugcagccgcucgccacccuguaccugcucgggaugcugguggccuccugccugggcgacacgcugugcaucggcuaccacgccaacaacagcaccgacaccguggacaccgugcucgagaagaacgucacggugacccacuccgugaaccugcuggaggacaagcacaacgggaagcucugcaagcugcggggcgucgccccgcugcaccucgggaagugcaacaucgccggcuggauccuggggaacccggagugcgagagccuguccaccgcgagcuccuggagcuacaucguggagaccuccagcuccgacaacggcacgugcuaccccggcgacuucaucgacuacgaggagcuccgcgagcagcugagcuccgugagcuccuucgagcgguucgagaucuuccccaagaccagcuccuggcccaaccacgacagcaacaagggggucaccgccgccugcccgcacgccggcgcgaaguccuucuacaagaaccugaucuggcucgugaagaaggggaacagcuaccccaagcuguccaagagcuacaucaacgacaagggcaaggaggugcugguccucugggggauccaccaccccagcaccuccgccgaccagcagagccuguaccagaacgccgacgccuacguguucgugggcuccagccgcuacuccaagaaguucaagcccgagaucgccauccggccgaagguccgcgaccaggagggccggaugaacuacuacuggacgcugguggagcccggggacaagaucaccuucgaggcgaccggcaaccucguggucccccgcuacgccuucgccauggagcggaacgccgggagcggcaucaucaucuccgacacccccgugcacgacugcaacacgaccugccagaccccgaagggcgccaucaacaccagccugcccuuccagaacauccaccccaucacgaucgggaagugccccaaguacgugaaguccaccaagcugcgccucgcgaccggccugcggaacgucccgagcauccagucccgcgggcuguucggcgccaucgccggguucaucgagggcggcuggaccgggaugguggacggcugguacggguaccaccaccagaacgagcagggcagcggguacgccgccgaccucaaguccacgcagaacgcgaucgacgagaucaccaacaaggugaacagcgucaucgagaagaugaacacccaguucaccgccgugggcaaggaguucaaccaccuggagaagcggaucgagaaccugaacaagaaggucgacgacggcuuccucgacaucuggacguacaacgccgagcugcuggugcuccuggagaacgagcgcacccuggacuaccacgacuccaacgugaagaaccucuacgagaagguccggagccagcugaagaacaacgccaaggagaucgggaacggcugcuucgaguucuaccacaagugcgacaacaccugcauggaguccgugaagaacgggaccuacgacuaccccaaguacagcgaggaggccaagcugaaccgcgaggagaucgacggcgugaagcucgaguccacgcggaucuaccagauccuggcgaucuacagcaccgucgccagcucccuggugcucguggucagccugggggccaucuccuucuggaugugcagcaacggcucccugcagugccgcaucugcaucugaccacuaguuauaagacugacuagcccgaugggccucccaacgggcccuccuccccuccuugcaccgagauuaauaaaaaaaaaaaaaaaaaaaaaaaaaaaaaaaaaaaaaaaaaaaaaaaaaaaaaaaaaaaaaaaaugcaucccccccccccccccccccccccccccccccaaaggcucuuuucagagccaccagaauu

SEQ ID NO: 224173 - RNA, 2104 nt, Artificial Sequence
  mRNA product Design2 comprising derived and/or modified sequence from hemagglutinin__InfluenzaA__ACQ45338 HsCD5(1-24)_H1N1(Netherlands2009)-HA (CDS opt1)
ggggcgcugccuacggagguggcagccaucuccuucucggcaucaagcuuaccaugcccaugggcagccugcagccgcucgccacccuguaccugcucgggaugcugguggccuccugccugggcgacacgcugugcaucggcuaccacgccaacaacagcaccgacaccguggacaccgugcucgagaagaacgucacggugacccacuccgugaaccugcuggaggacaagcacaacgggaagcucugcaagcugcggggcgucgccccgcugcaccucgggaagugcaacaucgccggcuggauccuggggaacccggagugcgagagccuguccaccgcgagcuccuggagcuacaucguggagaccuccagcuccgacaacggcacgugcuaccccggcgacuucaucgacuacgaggagcuccgcgagcagcugagcuccgugagcuccuucgagcgguucgagaucuuccccaagaccagcuccuggcccaaccacgacagcaacaagggggucaccgccgccugcccgcacgccggcgcgaaguccuucuacaagaaccugaucuggcucgugaagaaggggaacagcuaccccaagcuguccaagagcuacaucaacgacaagggcaaggaggugcugguccucugggggauccaccaccccagcaccuccgccgaccagcagagccuguaccagaacgccgacgccuacguguucgugggcuccagccgcuacuccaagaaguucaagcccgagaucgccauccggccgaagguccgcgaccaggagggccggaugaacuacuacuggacgcugguggagcccggggacaagaucaccuucgaggcgaccggcaaccucguggucccccgcuacgccuucgccauggagcggaacgccgggagcggcaucaucaucuccgacacccccgugcacgacugcaacacgaccugccagaccccgaagggcgccaucaacaccagccugcccuuccagaacauccaccccaucacgaucgggaagugccccaaguacgugaaguccaccaagcugcgccucgcgaccggccugcggaacgucccgagcauccagucccgcgggcuguucggcgccaucgccggguucaucgagggcggcuggaccgggaugguggacggcugguacggguaccaccaccagaacgagcagggcagcggguacgccgccgaccucaaguccacgcagaacgcgaucgacgagaucaccaacaaggugaacagcgucaucgagaagaugaacacccaguucaccgccgugggcaaggaguucaaccaccuggagaagcggaucgagaaccugaacaagaaggucgacgacggcuuccucgacaucuggacguacaacgccgagcugcuggugcuccuggagaacgagcgcacccuggacuaccacgacuccaacgugaagaaccucuacgagaagguccggagccagcugaagaacaacgccaaggagaucgggaacggcugcuucgaguucuaccacaagugcgacaacaccugcauggaguccgugaagaacgggaccuacgacuaccccaaguacagcgaggaggccaagcugaaccgcgaggagaucgacggcgugaagcucgaguccacgcggaucuaccagauccuggcgaucuacagcaccgucgccagcucccuggugcucguggucagccugggggccaucuccuucuggaugugcagcaacggcucccugcagugccgcaucugcaucugaccacuagugcaucacauuuaaaagcaucucagccuaccaugagaauaagagaaagaaaaugaagaucaauagcuuauucaucucuuuuucuuuuucguugguguaaagccaacacccugucuaaaaaacauaaauuucuuuaaucauuuugccucuuuucucugugcuucaauuaauaaaaaauggaaagaaccuagaucuaaaaaaaaaaaaaaaaaaaaaaaaaaaaaaaaaaaaaaaaaaaaaaaaaaaaaaaaaaaaaaaaugcaucccccccccccccccccccccccccccccccaaaggcucuuuucagagccaccagaauu

SEQ ID NO: 224174 - RNA, 1939 nt, Artificial Sequence
  mRNA product Design1 comprising derived and/or modified sequence from hemagglutinin__InfluenzaA__ACQ45338 HLA-A2-SP_H1N1(Netherlands2009)-HA (CDS opt1)
gggagaaagcuuaccauggccgugauggccccgcggacccugguccuccugcugagcggcgcgcucgcccugacccagacgugggccgacacgcugugcaucggcuaccacgccaacaacagcaccgacaccguggacaccgugcucgagaagaacgucacggugacccacuccgugaaccugcuggaggacaagcacaacgggaagcucugcaagcugcggggcgucgccccgcugcaccucgggaagugcaacaucgccggcuggauccuggggaacccggagugcgagagccuguccaccgcgagcuccuggagcuacaucguggagaccuccagcuccgacaacggcacgugcuaccccggcgacuucaucgacuacgaggagcuccgcgagcagcugagcuccgugagcuccuucgagcgguucgagaucuuccccaagaccagcuccuggcccaaccacgacagcaacaagggggucaccgccgccugcccgcacgccggcgcgaaguccuucuacaagaaccugaucuggcucgugaagaaggggaacagcuaccccaagcuguccaagagcuacaucaacgacaagggcaaggaggugcugguccucugggggauccaccaccccagcaccuccgccgaccagcagagccuguaccagaacgccgacgccuacguguucgugggcuccagccgcuacuccaagaaguucaagcccgagaucgccauccggccgaagguccgcgaccaggagggccggaugaacuacuacuggacgcugguggagcccggggacaagaucaccuucgaggcgaccggcaaccucguggucccccgcuacgccuucgccauggagcggaacgccgggagcggcaucaucaucuccgacacccccgugcacgacugcaacacgaccugccagaccccgaagggcgccaucaacaccagccugcccuuccagaacauccaccccaucacgaucgggaagugccccaaguacgugaaguccaccaagcugcgccucgcgaccggccugcggaacgucccgagcauccagucccgcgggcuguucggcgccaucgccggguucaucgagggcggcuggaccgggaugguggacggcugguacggguaccaccaccagaacgagcagggcagcggguacgccgccgaccucaaguccacgcagaacgcgaucgacgagaucaccaacaaggugaacagcgucaucgagaagaugaacacccaguucaccgccgugggcaaggaguucaaccaccuggagaagcggaucgagaaccugaacaagaaggucgacgacggcuuccucgacaucuggacguacaacgccgagcugcuggugcuccuggagaacgagcgcacccuggacuaccacgacuccaacgugaagaaccucuacgagaagguccggagccagcugaagaacaacgccaaggagaucgggaacggcugcuucgaguucuaccacaagugcgacaacaccugcauggaguccgugaagaacgggaccuacgacuaccccaaguacagcgaggaggccaagcugaaccgcgaggagaucgacggcgugaagcucgaguccacgcggaucuaccagauccuggcgaucuacagcaccgucgccagcucccuggugcucguggucagccugggggccaucuccuucuggaugugcagcaacggcucccugcagugccgcaucugcaucugaccacuaguuauaagacugacuagcccgaugggccucccaacgggcccuccuccccuccuugcaccgagauuaauaaaaaaaaaaaaaaaaaaaaaaaaaaaaaaaaaaaaaaaaaaaaaaaaaaaaaaaaaaaaaaaaugcaucccccccccccccccccccccccccccccccaaaggcucuuuucagagccaccagaauu

SEQ ID NO: 224175 - RNA, 2104 nt, Artificial Sequence
  mRNA product Design2 comprising derived and/or modified sequence from hemagglutinin__InfluenzaA__ACQ45338 HLA-A2-SP_H1N1(Netherlands2009)-HA (CDS opt1)
ggggcgcugccuacggagguggcagccaucuccuucucggcaucaagcuuaccauggccgugauggccccgcggacccugguccuccugcugagcggcgcgcucgcccugacccagacgugggccgacacgcugugcaucggcuaccacgccaacaacagcaccgacaccguggacaccgugcucgagaagaacgucacggugacccacuccgugaaccugcuggaggacaagcacaacgggaagcucugcaagcugcggggcgucgccccgcugcaccucgggaagugcaacaucgccggcuggauccuggggaacccggagugcgagagccuguccaccgcgagcuccuggagcuacaucguggagaccuccagcuccgacaacggcacgugcuaccccggcgacuucaucgacuacgaggagcuccgcgagcagcugagcuccgugagcuccuucgagcgguucgagaucuuccccaagaccagcuccuggcccaaccacgacagcaacaagggggucaccgccgccugcccgcacgccggcgcgaaguccuucuacaagaaccugaucuggcucgugaagaaggggaacagcuaccccaagcuguccaagagcuacaucaacgacaagggcaaggaggugcugguccucugggggauccaccaccccagcaccuccgccgaccagcagagccuguaccagaacgccgacgccuacguguucgugggcuccagccgcuacuccaagaaguucaagcccgagaucgccauccggccgaagguccgcgaccaggagggccggaugaacuacuacuggacgcugguggagcccggggacaagaucaccuucgaggcgaccggcaaccucguggucccccgcuacgccuucgccauggagcggaacgccgggagcggcaucaucaucuccgacacccccgugcacgacugcaacacgaccugccagaccccgaagggcgccaucaacaccagccugcccuuccagaacauccaccccaucacgaucgggaagugccccaaguacgugaaguccaccaagcugcgccucgcgaccggccugcggaacgucccgagcauccagucccgcgggcuguucggcgccaucgccggguucaucgagggcggcuggaccgggaugguggacggcugguacggguaccaccaccagaacgagcagggcagcggguacgccgccgaccucaaguccacgcagaacgcgaucgacgagaucaccaacaaggugaacagcgucaucgagaagaugaacacccaguucaccgccgugggcaaggaguucaaccaccuggagaagcggaucgagaaccugaacaagaaggucgacgacggcuuccucgacaucuggacguacaacgccgagcugcuggugcuccuggagaacgagcgcacccuggacuaccacgacuccaacgugaagaaccucuacgagaagguccggagccagcugaagaacaacgccaaggagaucgggaacggcugcuucgaguucuaccacaagugcgacaacaccugcauggaguccgugaagaacgggaccuacgacuaccccaaguacagcgaggaggccaagcugaaccgcgaggagaucgacggcgugaagcucgaguccacgcggaucuaccagauccuggcgaucuacagcaccgucgccagcucccuggugcucguggucagccugggggccaucuccuucuggaugugcagcaacggcucccugcagugccgcaucugcaucugaccacuagugcaucacauuuaaaagcaucucagccuaccaugagaauaagagaaagaaaaugaagaucaauagcuuauucaucucuuuuucuuuuucguugguguaaagccaacacccugucuaaaaaacauaaauuucuuuaaucauuuugccucuuuucucugugcuucaauuaauaaaaaauggaaagaaccuagaucuaaaaaaaaaaaaaaaaaaaaaaaaaaaaaaaaaaaaaaaaaaaaaaaaaaaaaaaaaaaaaaaaugcaucccccccccccccccccccccccccccccccaaaggcucuuuucagagccaccagaauu

SEQ ID NO: 224176 - RNA, 1893 nt, Artificial Sequence
  mRNA product Design3 comprising derived and/or modified sequence from hemagglutinin__InfluenzaA__ACQ45338/m2 (CDS opt1) R2399
gggagaaagcuuaccaugaaggccauccuggugguccuccuguacaccuucgccaccgcgaacgccgacacgcugugcaucggcuaccacgccaacaacagcaccgacaccguggacaccgugcucgagaagaacgucacggugacccacuccgugaaccugcuggaggacaagcacaacgggaagcucugcaagcugcggggcgucgccccgcugcaccucgggaagugcaacaucgccggcuggauccuggggaacccggagugcgagagccuguccaccgcgagcuccuggagcuacaucguggagaccuccuccagcgacaacggcacgugcuaccccggcgacuucaucgacuacgaggagcuccgcgagcagcuguccagcguguccagcuucgagcgguucgagaucuuccccaagaccuccagcuggccgaaccacgacuccaacaagggggucaccgccgccugcccccacgccggcgcgaagagcuucuacaagaaccugaucuggcucgugaagaaggggaacuccuaccccaagcugagcaaguccuacaucaacgacaagggcaaggaggugcugguccucugggggauccaccaccccagcaccagcgccgaccagcagucccuguaccagaacgccgacgccuacguguucgugggcagcucccgcuacagcaagaaguucaagccggagaucgccauccggcccaagguccgcgaccaggagggccgcaugaacuacuacuggacccugguggagcccggggacaagaucaccuucgaggcgaccggcaaccucguggucccccgguacgccuucgccauggagcgcaacgccggguccggcaucaucaucagcgacacgccggugcacgacugcaacaccaccugccagacccccaagggcgccaucaacacgucccugcccuuccagaacauccaccccaucaccaucgggaagugcccgaaguacgugaagagcaccaagcugcggcucgcgaccggccugcgcaacguccccuccauccagagccgggggcuguucggcgccaucgccggguucaucgagggcggcuggacggggauggucgacggcugguacggguaccaccaccagaacgagcagggcagcggguacgccgccgaccucaaguccacgcagaacgcgaucgacgagaucaccaacaaggugaacagcgucaucgagaagaugaacacccaguucaccgccgugggcaaggaguucaaccaccuggagaagcggaucgagaaccugaacaagaaggucgacgacggcuuccucgacaucuggacguacaacgccgagcugcuggugcuccuggagaacgagcgcacccuggacuaccacgacuccaacgugaagaaccucuacgagaagguccggagccagcugaagaacaacgccaaggagaucgggaacggcugcuucgaguucuaccacaagugcgacaacaccugcauggaguccgugaagaacgggaccuacgacuaccccaaguacagcgaggaggccaagcugaaccgcgaggagaucgacggcgugaagcucgaguccacgcggaucuaccagauccuggcgaucuacagcaccgucgccagcucccuggugcucguggucagccugggggccaucuccuucuggaugugcagcaacggcucccugcagugccgcaucugcaucugaccacuaguuauaagacugacuagcccgaugggccucccaacgggcccuccuccccuccuugcaccgagauuaauaaaaaaaaaaaaaaaaaaaaaaaaaaaaaaaaaaaaaaaaaaaaaaaaaaaaaaaaaaaaaaaauauuccccccccccccccccccccccccccccccucuag

SEQ ID NO: 224177 - RNA, 1918 nt, Artificial Sequence
  mRNA product Design1 comprising derived and/or modified sequence from hemagglutinin__InfluenzaA__ACQ45338/m2 (CDS opt1) R2199/R2513
gggagaaagcuuaccaugaaggccauccuggugguccuccuguacaccuucgccaccgcgaacgccgacacgcugugcaucggcuaccacgccaacaacagcaccgacaccguggacaccgugcucgagaagaacgucacggugacccacuccgugaaccugcuggaggacaagcacaacgggaagcucugcaagcugcggggcgucgccccgcugcaccucgggaagugcaacaucgccggcuggauccuggggaacccggagugcgagagccuguccaccgcgagcuccuggagcuacaucguggagaccuccuccagcgacaacggcacgugcuaccccggcgacuucaucgacuacgaggagcuccgcgagcagcuguccagcguguccagcuucgagcgguucgagaucuuccccaagaccuccagcuggccgaaccacgacuccaacaagggggucaccgccgccugcccccacgccggcgcgaagagcuucuacaagaaccugaucuggcucgugaagaaggggaacuccuaccccaagcugagcaaguccuacaucaacgacaagggcaaggaggugcugguccucugggggauccaccaccccagcaccagcgccgaccagcagucccuguaccagaacgccgacgccuacguguucgugggcagcucccgcuacagcaagaaguucaagccggagaucgccauccggcccaagguccgcgaccaggagggccgcaugaacuacuacuggacccugguggagcccggggacaagaucaccuucgaggcgaccggcaaccucguggucccccgguacgccuucgccauggagcgcaacgccggguccggcaucaucaucagcgacacgccggugcacgacugcaacaccaccugccagacccccaagggcgccaucaacacgucccugcccuuccagaacauccaccccaucaccaucgggaagugcccgaaguacgugaagagcaccaagcugcggcucgcgaccggccugcgcaacguccccuccauccagagccgggggcuguucggcgccaucgccggguucaucgagggcggcuggacggggauggucgacggcugguacggguaccaccaccagaacgagcagggcagcggguacgccgccgaccucaaguccacgcagaacgcgaucgacgagaucaccaacaaggugaacagcgucaucgagaagaugaacacccaguucaccgccgugggcaaggaguucaaccaccuggagaagcggaucgagaaccugaacaagaaggucgacgacggcuuccucgacaucuggacguacaacgccgagcugcuggugcuccuggagaacgagcgcacccuggacuaccacgacuccaacgugaagaaccucuacgagaagguccggagccagcugaagaacaacgccaaggagaucgggaacggcugcuucgaguucuaccacaagugcgacaacaccugcauggaguccgugaagaacgggaccuacgacuaccccaaguacagcgaggaggccaagcugaaccgcgaggagaucgacggcgugaagcucgaguccacgcggaucuaccagauccuggcgaucuacagcaccgucgccagcucccuggugcucguggucagccugggggccaucuccuucuggaugugcagcaacggcucccugcagugccgcaucugcaucugaccacuaguuauaagacugacuagcccgaugggccucccaacgggcccuccuccccuccuugcaccgagauuaauaaaaaaaaaaaaaaaaaaaaaaaaaaaaaaaaaaaaaaaaaaaaaaaaaaaaaaaaaaaaaaaaugcaucccccccccccccccccccccccccccccccaaaggcucuuuucagagccaccagaauu

SEQ ID NO: 224178 - RNA, 2083 nt, Artificial Sequence
  mRNA product Design2 comprising derived and/or modified sequence from hemagglutinin__InfluenzaA__ACQ45338/m2 (CDS opt1)
ggggcgcugccuacggagguggcagccaucuccuucucggcaucaagcuuaccaugaaggccauccuggugguccuccuguacaccuucgccaccgcgaacgccgacacgcugugcaucggcuaccacgccaacaacagcaccgacaccguggacaccgugcucgagaagaacgucacggugacccacuccgugaaccugcuggaggacaagcacaacgggaagcucugcaagcugcggggcgucgccccgcugcaccucgggaagugcaacaucgccggcuggauccuggggaacccggagugcgagagccuguccaccgcgagcuccuggagcuacaucguggagaccuccuccagcgacaacggcacgugcuaccccggcgacuucaucgacuacgaggagcuccgcgagcagcuguccagcguguccagcuucgagcgguucgagaucuuccccaagaccuccagcuggccgaaccacgacuccaacaagggggucaccgccgccugcccccacgccggcgcgaagagcuucuacaagaaccugaucuggcucgugaagaaggggaacuccuaccccaagcugagcaaguccuacaucaacgacaagggcaaggaggugcugguccucugggggauccaccaccccagcaccagcgccgaccagcagucccuguaccagaacgccgacgccuacguguucgugggcagcucccgcuacagcaagaaguucaagccggagaucgccauccggcccaagguccgcgaccaggagggccgcaugaacuacuacuggacccugguggagcccggggacaagaucaccuucgaggcgaccggcaaccucguggucccccgguacgccuucgccauggagcgcaacgccggguccggcaucaucaucagcgacacgccggugcacgacugcaacaccaccugccagacccccaagggcgccaucaacacgucccugcccuuccagaacauccaccccaucaccaucgggaagugcccgaaguacgugaagagcaccaagcugcggcucgcgaccggccugcgcaacguccccuccauccagagccgggggcuguucggcgccaucgccggguucaucgagggcggcuggacggggauggucgacggcugguacggguaccaccaccagaacgagcagggcagcggguacgccgccgaccucaaguccacgcagaacgcgaucgacgagaucaccaacaaggugaacagcgucaucgagaagaugaacacccaguucaccgccgugggcaaggaguucaaccaccuggagaagcggaucgagaaccugaacaagaaggucgacgacggcuuccucgacaucuggacguacaacgccgagcugcuggugcuccuggagaacgagcgcacccuggacuaccacgacuccaacgugaagaaccucuacgagaagguccggagccagcugaagaacaacgccaaggagaucgggaacggcugcuucgaguucuaccacaagugcgacaacaccugcauggaguccgugaagaacgggaccuacgacuaccccaaguacagcgaggaggccaagcugaaccgcgaggagaucgacggcgugaagcucgaguccacgcggaucuaccagauccuggcgaucuacagcaccgucgccagcucccuggugcucguggucagccugggggccaucuccuucuggaugugcagcaacggcucccugcagugccgcaucugcaucugaccacuagugcaucacauuuaaaagcaucucagccuaccaugagaauaagagaaagaaaaugaagaucaauagcuuauucaucucuuuuucuuuuucguugguguaaagccaacacccugucuaaaaaacauaaauuucuuuaaucauuuugccucuuuucucugugcuucaauuaauaaaaaauggaaagaaccuagaucuaaaaaaaaaaaaaaaaaaaaaaaaaaaaaaaaaaaaaaaaaaaaaaaaaaaaaaaaaaaaaaaaugcaucccccccccccccccccccccccccccccccaaaggcucuuuucagagccaccagaauu

SEQ ID NO: 224179 - RNA, 1918 nt, Artificial Sequence
  mRNA product Design1 comprising derived and/or modified sequence from hemagglutinin__InfluenzaA__ACU79871/m1 (CDS opt1) R1805
gggagaaagcuuaccaugaagaccaucaucgcccugagcuacaucuucugccucgcccugggccaggaccugcccgggaacgacaacuccaccgcgacgcucugccugggccaccacgccgugccgaacgggacccuggucaagaccaucaccgacgaccagaucgaggugacgaacgccaccgagcucgugcagagcuccagcaccggcaagaucugcaacaacccccaccggauccuggacgggaucgacugcacccugaucgacgcccuccugggcgacccccacugcgacgucuuccagaacgagacgugggaccuguucguggagcgcuccaaggccuucagcaacugcuaccccuacgacgugccggacuacgcgucccuccggagccuggucgccuccagcggcacccuggaguucaucaccgagggguucaccuggacgggcgugacccagaacgggggcuccaacgccugcaagcgcgggcccggcagcggcuucuucucccggcucaacuggcugaccaagagcggguccaccuaccccgugcugaacgucacgaugcccaacaacgacaacuucgacaagcucuacaucuggggcgugcaccacccgagcaccaaccaggagcagaccucccuguacgugcaggccagcgggcgcgucaccguguccacgcggcgcagccagcagaccaucauccccaacaucgagagccggcccugggugcgcggccaguccagccggaucuccaucuacuggaccaucgucaagcccggcgacgugcuggugaucaacagcaacgggaaccucaucgcgccgcgcggcuacuucaagaugcggaccgggaaguccagcaucaugcgcuccgacgcccccaucgacacgugcaucagcgagugcaucacccccaacggcuccauccccaacgacaagccguuccagaacgucaacaagaucaccuacggggccugccccaaguacgugaagcagaacacccugaagcuggccacgggcaugcggaacgugcccgagaagcagacccgcggccucuucggggccaucgcgggcuucaucgagaacgggugggagggcaugaucgacgggugguacggcuuccggcaccagaacagcgagggcaccgggcaggccgccgaccugaaguccacccaggccgccaucgaccagaucaacggcaaggucaaccgcaucaucgagaagacgaacgagaaguuccaccagaucgagaaggaguucagcgagguggaggggcggauccaggaccuggagaaguacguggaggacaccaagaucgaccucugguccuacaacgcggagcugcuggucgcccucgagaaccagcacaccaucgaccugaccgacagcgagaugaacaagcuguucgagaagacgcgccggcagcuccgcgagaacgccgaggacaugggcaacgggugcuucaagaucuaccacaagugcgacaacgccugcaucgaguccauccggagcggcaccuacgaccacgacguguaccgggacgaggcccugaacaaccgcuuccagaucaagggcgucgagcugaaguccggguacaaggacuggauccucuggaucagcuucgcgaucuccugcuuccugcugugcguggugcuccugggcuucaucaugugggccugccagcgggggaacauccgcugcaacaucugcaucugaggacuaguuauaagacugacuagcccgaugggccucccaacgggcccuccuccccuccuugcaccgagauuaauaaaaaaaaaaaaaaaaaaaaaaaaaaaaaaaaaaaaaaaaaaaaaaaaaaaaaaaaaaaaaaaaugcaucccccccccccccccccccccccccccccccaaaggcucuuuucagagccaccagaauu

SEQ ID NO: 224180 - RNA, 2083 nt, Artificial Sequence
  mRNA product Design1 comprising derived and/or modified sequence from hemagglutinin__InfluenzaA__ACU79871/m1 (CDS opt1) R5071
ggggcgcugccuacggagguggcagccaucuccuucucggcaucaagcuuaccaugaagaccaucaucgcccugagcuacaucuucugccucgcccugggccaggaccugcccgggaacgacaacuccaccgcgacgcucugccugggccaccacgccgugccgaacgggacccuggucaagaccaucaccgacgaccagaucgaggugacgaacgccaccgagcucgugcagagcuccagcaccggcaagaucugcaacaacccccaccggauccuggacgggaucgacugcacccugaucgacgcccuccugggcgacccccacugcgacgucuuccagaacgagacgugggaccuguucguggagcgcuccaaggccuucagcaacugcuaccccuacgacgugccggacuacgcgucccuccggagccuggucgccuccagcggcacccuggaguucaucaccgagggguucaccuggacgggcgugacccagaacgggggcuccaacgccugcaagcgcgggcccggcagcggcuucuucucccggcucaacuggcugaccaagagcggguccaccuaccccgugcugaacgucacgaugcccaacaacgacaacuucgacaagcucuacaucuggggcgugcaccacccgagcaccaaccaggagcagaccucccuguacgugcaggccagcgggcgcgucaccguguccacgcggcgcagccagcagaccaucauccccaacaucgagagccggcccugggugcgcggccaguccagccggaucuccaucuacuggaccaucgucaagcccggcgacgugcuggugaucaacagcaacgggaaccucaucgcgccgcgcggcuacuucaagaugcggaccgggaaguccagcaucaugcgcuccgacgcccccaucgacacgugcaucagcgagugcaucacccccaacggcuccauccccaacgacaagccguuccagaacgucaacaagaucaccuacggggccugccccaaguacgugaagcagaacacccugaagcuggccacgggcaugcggaacgugcccgagaagcagacccgcggccucuucggggccaucgcgggcuucaucgagaacgggugggagggcaugaucgacgggugguacggcuuccggcaccagaacagcgagggcaccgggcaggccgccgaccugaaguccacccaggccgccaucgaccagaucaacggcaaggucaaccgcaucaucgagaagacgaacgagaaguuccaccagaucgagaaggaguucagcgagguggaggggcggauccaggaccuggagaaguacguggaggacaccaagaucgaccucugguccuacaacgcggagcugcuggucgcccucgagaaccagcacaccaucgaccugaccgacagcgagaugaacaagcuguucgagaagacgcgccggcagcuccgcgagaacgccgaggacaugggcaacgggugcuucaagaucuaccacaagugcgacaacgccugcaucgaguccauccggagcggcaccuacgaccacgacguguaccgggacgaggcccugaacaaccgcuuccagaucaagggcgucgagcugaaguccggguacaaggacuggauccucuggaucagcuucgcgaucuccugcuuccugcugugcguggugcuccugggcuucaucaugugggccugccagcgggggaacauccgcugcaacaucugcaucugaggacuagugcaucacauuuaaaagcaucucagccuaccaugagaauaagagaaagaaaaugaagaucaauagcuuauucaucucuuuuucuuuuucguugguguaaagccaacacccugucuaaaaaacauaaauuucuuuaaucauuuugccucuuuucucugugcuucaauuaauaaaaaauggaaagaaccuagaucuaaaaaaaaaaaaaaaaaaaaaaaaaaaaaaaaaaaaaaaaaaaaaaaaaaaaaaaaaaaaaaaaugcaucccccccccccccccccccccccccccccccaaaggcucuuuucagagccaccagaauu

SEQ ID NO: 224181 - RNA, 1918 nt, Artificial Sequence
  mRNA product Design1 comprising derived and/or modified sequence from hemagglutinin__InfluenzaA__EPI643118 (CDS opt1) R4936/R5226
gggagaaagcuuaccaugaagaccaucaucgcccugagcuacauccucugccugguguucgcccagaagauccccggcaacgacaacuccaccgcgacgcugugccucgggcaccacgccgucccgaacggcaccaucgugaagaccaucaccaacgaccgcaucgaggugacgaacgccaccgagcugguccagaacagcuccaucggggagaucugcgacagcccccaccagauccuggacggcgagaacugcacccucaucgacgcccugcugggggacccccagugcgacggcuuccagaacaagaagugggaccucuucguggagcgguccaaggccuacagcaacugcuaccccuacgacgugccggacuacgcgucccugcgcagccuggucgccuccagcggcacccucgaguucaacaacgaguccuucaacuggacgggggugacccagaacggcaccagcuccgccugcauccggcgcagcuccagcuccuucuucagccggcugaacuggcugacccaccucaacuacaaguaccccgcccugaacgugacgaugcccaacaacgagcaguucgacaagcuguacaucuggggcguccaccaccccgggaccgacaaggaccagaucuucccguacgcgcaguccagcgggcgcaucaucgugagcaccaagcggucccagcaggccgugauccccaacaucggcagccgcccccggauccgcgacaucccgucccggaucagcaucuacuggaccaucgucaagccgggcgacauccuccugaucaacuccacggggaaccugaucgccccgcgcggcuacuucaagcuccggagcgggaaguccagcaucaugcgcuccgacgcccccaucggcaagugcaagagcgagugcaucacccccaacggcuccaucccgaacgacaagcccuuccagaacgugaaccggaucaccuacggggccugcccccgcuacgugaagcacagcacccugaagcuggcgacgggcaugcggaacguccccgagaagcagacccgcgggaucuucggcgccaucgccggguucaucgagaacggcugggagggcaugguggacgggugguacggcuuccggcaccagaacuccgaggggcgcggccaggccgccgaccucaagagcacccaggcggccaucgaccagaucaacgggaagcugaaccggcugaucggcaagaccaacgagaaguuccaccagaucgagaaggaguucuccgagguggagggccgcauccaggaccucgagaaguacgucgaggacacgaagaucgaccuguggagcuacaacgccgagcugcucguggcccuggagaaccagcacaccaucgaccugaccgacuccgagaugaacaagcucuucgagaagaccaagaagcagcugcgcgagaacgccgaggacauggggaacggcugcuucaagaucuaccacaagugcgacaacgcgugcaucgggagcauccggaacggcacguacgaccacaacguguaccgcgacgaggcccugaacaaccgguuccagaucaagggggucgagcucaaguccggcuacaaggacuggauccuguggaucagcuucgccaucagcugcuuccugcucugcguggcccugcugggcuucaucaugugggccugccagaaggggaacauccgcugcaacaucugcaucugaggacuaguuauaagacugacuagcccgaugggccucccaacgggcccuccuccccuccuugcaccgagauuaauaaaaaaaaaaaaaaaaaaaaaaaaaaaaaaaaaaaaaaaaaaaaaaaaaaaaaaaaaaaaaaaaugcaucccccccccccccccccccccccccccccccaaaggcucuuuucagagccaccagaauu

SEQ ID NO: 224182 - RNA, 2083 nt, Artificial Sequence
  mRNA product Design2 comprising derived and/or modified sequence from hemagglutinin__InfluenzaA__EPI643118 (CDS opt1) R5072
ggggcgcugccuacggagguggcagccaucuccuucucggcaucaagcuuaccaugaagaccaucaucgcccugagcuacauccucugccugguguucgcccagaagauccccggcaacgacaacuccaccgcgacgcugugccucgggcaccacgccgucccgaacggcaccaucgugaagaccaucaccaacgaccgcaucgaggugacgaacgccaccgagcugguccagaacagcuccaucggggagaucugcgacagcccccaccagauccuggacggcgagaacugcacccucaucgacgcccugcugggggacccccagugcgacggcuuccagaacaagaagugggaccucuucguggagcgguccaaggccuacagcaacugcuaccccuacgacgugccggacuacgcgucccugcgcagccuggucgccuccagcggcacccucgaguucaacaacgaguccuucaacuggacgggggugacccagaacggcaccagcuccgccugcauccggcgcagcuccagcuccuucuucagccggcugaacuggcugacccaccucaacuacaaguaccccgcccugaacgugacgaugcccaacaacgagcaguucgacaagcuguacaucuggggcguccaccaccccgggaccgacaaggaccagaucuucccguacgcgcaguccagcgggcgcaucaucgugagcaccaagcggucccagcaggccgugauccccaacaucggcagccgcccccggauccgcgacaucccgucccggaucagcaucuacuggaccaucgucaagccgggcgacauccuccugaucaacuccacggggaaccugaucgccccgcgcggcuacuucaagcuccggagcgggaaguccagcaucaugcgcuccgacgcccccaucggcaagugcaagagcgagugcaucacccccaacggcuccaucccgaacgacaagcccuuccagaacgugaaccggaucaccuacggggccugcccccgcuacgugaagcacagcacccugaagcuggcgacgggcaugcggaacguccccgagaagcagacccgcgggaucuucggcgccaucgccggguucaucgagaacggcugggagggcaugguggacgggugguacggcuuccggcaccagaacuccgaggggcgcggccaggccgccgaccucaagagcacccaggcggccaucgaccagaucaacgggaagcugaaccggcugaucggcaagaccaacgagaaguuccaccagaucgagaaggaguucuccgagguggagggccgcauccaggaccucgagaaguacgucgaggacacgaagaucgaccuguggagcuacaacgccgagcugcucguggcccuggagaaccagcacaccaucgaccugaccgacuccgagaugaacaagcucuucgagaagaccaagaagcagcugcgcgagaacgccgaggacauggggaacggcugcuucaagaucuaccacaagugcgacaacgcgugcaucgggagcauccggaacggcacguacgaccacaacguguaccgcgacgaggcccugaacaaccgguuccagaucaagggggucgagcucaaguccggcuacaaggacuggauccuguggaucagcuucgccaucagcugcuuccugcucugcguggcccugcugggcuucaucaugugggccugccagaaggggaacauccgcugcaacaucugcaucugaggacuagugcaucacauuuaaaagcaucucagccuaccaugagaauaagagaaagaaaaugaagaucaauagcuuauucaucucuuuuucuuuuucguugguguaaagccaacacccugucuaaaaaacauaaauuucuuuaaucauuuugccucuuuucucugugcuucaauuaauaaaaaauggaaagaaccuagaucuaaaaaaaaaaaaaaaaaaaaaaaaaaaaaaaaaaaaaaaaaaaaaaaaaaaaaaaaaaaaaaaaugcaucccccccccccccccccccccccccccccccaaaggcucuuuucagagccaccagaauu

SEQ ID NO: 224183 - RNA, 1924 nt, Artificial Sequence
  mRNA product Design1 comprising derived and/or modified sequence from hemagglutinin__InfluenzaA__EPI643118 HsALB(1-18)_H3N2(Hongkong-4801-2014)-HA (CDS opt1)
gggagaaagcuuaccaugaagugggugaccuucaucagccugcucuuccuguucuccagcgccuacucccagaagauccccggcaacgacaacuccaccgcgacgcugugccucgggcaccacgccgucccgaacggcaccaucgugaagaccaucaccaacgaccgcaucgaggugacgaacgccaccgagcugguccagaacagcuccaucggggagaucugcgacagcccccaccagauccuggacggcgagaacugcacccucaucgacgcccugcugggggacccccagugcgacggcuuccagaacaagaagugggaccucuucguggagcgguccaaggccuacagcaacugcuaccccuacgacgugccggacuacgcgucccugcgcagccuggucgccuccagcggcacccucgaguucaacaacgaguccuucaacuggacgggggugacccagaacggcaccagcuccgccugcauccggcgcagcuccagcuccuucuucagccggcugaacuggcugacccaccucaacuacaaguaccccgcccugaacgugacgaugcccaacaacgagcaguucgacaagcuguacaucuggggcguccaccaccccgggaccgacaaggaccagaucuucccguacgcgcaguccagcgggcgcaucaucgugagcaccaagcggucccagcaggccgugauccccaacaucggcagccgcccccggauccgcgacaucccgucccggaucagcaucuacuggaccaucgucaagccgggcgacauccuccugaucaacuccacggggaaccugaucgccccgcgcggcuacuucaagcuccggagcgggaaguccagcaucaugcgcuccgacgcccccaucggcaagugcaagagcgagugcaucacccccaacggcuccaucccgaacgacaagcccuuccagaacgugaaccggaucaccuacggggccugcccccgcuacgugaagcacagcacccugaagcuggcgacgggcaugcggaacguccccgagaagcagacccgcgggaucuucggcgccaucgccggguucaucgagaacggcugggagggcaugguggacgggugguacggcuuccggcaccagaacuccgaggggcgcggccaggccgccgaccucaagagcacccaggcggccaucgaccagaucaacgggaagcugaaccggcugaucggcaagaccaacgagaaguuccaccagaucgagaaggaguucuccgagguggagggccgcauccaggaccucgagaaguacgucgaggacacgaagaucgaccuguggagcuacaacgccgagcugcucguggcccuggagaaccagcacaccaucgaccugaccgacuccgagaugaacaagcucuucgagaagaccaagaagcagcugcgcgagaacgccgaggacauggggaacggcugcuucaagaucuaccacaagugcgacaacgcgugcaucgggagcauccggaacggcacguacgaccacaacguguaccgcgacgaggcccugaacaaccgguuccagaucaagggggucgagcucaaguccggcuacaaggacuggauccuguggaucagcuucgccaucagcugcuuccugcucugcguggcccugcugggcuucaucaugugggccugccagaaggggaacauccgcugcaacaucugcaucugaggacuaguuauaagacugacuagcccgaugggccucccaacgggcccuccuccccuccuugcaccgagauuaauaaaaaaaaaaaaaaaaaaaaaaaaaaaaaaaaaaaaaaaaaaaaaaaaaaaaaaaaaaaaaaaaugcaucccccccccccccccccccccccccccccccaaaggcucuuuucagagccaccagaauu

SEQ ID NO: 224184 - RNA, 2089 nt, Artificial Sequence
  mRNA product Design2 comprising derived and/or modified sequence from hemagglutinin__InfluenzaA__EPI643118 HsALB(1-18)_H3N2(Hongkong-4801-2014)-HA (CDS opt1)
ggggcgcugccuacggagguggcagccaucuccuucucggcaucaagcuuaccaugaagugggugaccuucaucagccugcucuuccuguucuccagcgccuacucccagaagauccccggcaacgacaacuccaccgcgacgcugugccucgggcaccacgccgucccgaacggcaccaucgugaagaccaucaccaacgaccgcaucgaggugacgaacgccaccgagcugguccagaacagcuccaucggggagaucugcgacagcccccaccagauccuggacggcgagaacugcacccucaucgacgcccugcugggggacccccagugcgacggcuuccagaacaagaagugggaccucuucguggagcgguccaaggccuacagcaacugcuaccccuacgacgugccggacuacgcgucccugcgcagccuggucgccuccagcggcacccucgaguucaacaacgaguccuucaacuggacgggggugacccagaacggcaccagcuccgccugcauccggcgcagcuccagcuccuucuucagccggcugaacuggcugacccaccucaacuacaaguaccccgcccugaacgugacgaugcccaacaacgagcaguucgacaagcuguacaucuggggcguccaccaccccgggaccgacaaggaccagaucuucccguacgcgcaguccagcgggcgcaucaucgugagcaccaagcggucccagcaggccgugauccccaacaucggcagccgcccccggauccgcgacaucccgucccggaucagcaucuacuggaccaucgucaagccgggcgacauccuccugaucaacuccacggggaaccugaucgccccgcgcggcuacuucaagcuccggagcgggaaguccagcaucaugcgcuccgacgcccccaucggcaagugcaagagcgagugcaucacccccaacggcuccaucccgaacgacaagcccuuccagaacgugaaccggaucaccuacggggccugcccccgcuacgugaagcacagcacccugaagcuggcgacgggcaugcggaacguccccgagaagcagacccgcgggaucuucggcgccaucgccggguucaucgagaacggcugggagggcaugguggacgggugguacggcuuccggcaccagaacuccgaggggcgcggccaggccgccgaccucaagagcacccaggcggccaucgaccagaucaacgggaagcugaaccggcugaucggcaagaccaacgagaaguuccaccagaucgagaaggaguucuccgagguggagggccgcauccaggaccucgagaaguacgucgaggacacgaagaucgaccuguggagcuacaacgccgagcugcucguggcccuggagaaccagcacaccaucgaccugaccgacuccgagaugaacaagcucuucgagaagaccaagaagcagcugcgcgagaacgccgaggacauggggaacggcugcuucaagaucuaccacaagugcgacaacgcgugcaucgggagcauccggaacggcacguacgaccacaacguguaccgcgacgaggcccugaacaaccgguuccagaucaagggggucgagcucaaguccggcuacaaggacuggauccuguggaucagcuucgccaucagcugcuuccugcucugcguggcccugcugggcuucaucaugugggccugccagaaggggaacauccgcugcaacaucugcaucugaggacuagugcaucacauuuaaaagcaucucagccuaccaugagaauaagagaaagaaaaugaagaucaauagcuuauucaucucuuuuucuuuuucguugguguaaagccaacacccugucuaaaaaacauaaauuucuuuaaucauuuugccucuuuucucugugcuucaauuaauaaaaaauggaaagaaccuagaucuaaaaaaaaaaaaaaaaaaaaaaaaaaaaaaaaaaaaaaaaaaaaaaaaaaaaaaaaaaaaaaaaugcaucccccccccccccccccccccccccccccccaaaggcucuuuucagagccaccagaauu

SEQ ID NO: 224185 - RNA, 1924 nt, Artificial Sequence
  mRNA product Design1 comprising derived and/or modified sequence from hemagglutinin__InfluenzaA__EPI643118 IgE-leader_H3N2(Hongkong-4801-2014)-HA (CDS opt1)
gggagaaagcuuaccauggacuggaccuggauccuguuccucguggccgccgcgacccgcguccacagccagaagauccccggcaacgacaacuccaccgcgacgcugugccucgggcaccacgccgucccgaacggcaccaucgugaagaccaucaccaacgaccgcaucgaggugacgaacgccaccgagcugguccagaacagcuccaucggggagaucugcgacagcccccaccagauccuggacggcgagaacugcacccucaucgacgcccugcugggggacccccagugcgacggcuuccagaacaagaagugggaccucuucguggagcgguccaaggccuacagcaacugcuaccccuacgacgugccggacuacgcgucccugcgcagccuggucgccuccagcggcacccucgaguucaacaacgaguccuucaacuggacgggggugacccagaacggcaccagcuccgccugcauccggcgcagcuccagcuccuucuucagccggcugaacuggcugacccaccucaacuacaaguaccccgcccugaacgugacgaugcccaacaacgagcaguucgacaagcuguacaucuggggcguccaccaccccgggaccgacaaggaccagaucuucccguacgcgcaguccagcgggcgcaucaucgugagcaccaagcggucccagcaggccgugauccccaacaucggcagccgcccccggauccgcgacaucccgucccggaucagcaucuacuggaccaucgucaagccgggcgacauccuccugaucaacuccacggggaaccugaucgccccgcgcggcuacuucaagcuccggagcgggaaguccagcaucaugcgcuccgacgcccccaucggcaagugcaagagcgagugcaucacccccaacggcuccaucccgaacgacaagcccuuccagaacgugaaccggaucaccuacggggccugcccccgcuacgugaagcacagcacccugaagcuggcgacgggcaugcggaacguccccgagaagcagacccgcgggaucuucggcgccaucgccggguucaucgagaacggcugggagggcaugguggacgggugguacggcuuccggcaccagaacuccgaggggcgcggccaggccgccgaccucaagagcacccaggcggccaucgaccagaucaacgggaagcugaaccggcugaucggcaagaccaacgagaaguuccaccagaucgagaaggaguucuccgagguggagggccgcauccaggaccucgagaaguacgucgaggacacgaagaucgaccuguggagcuacaacgccgagcugcucguggcccuggagaaccagcacaccaucgaccugaccgacuccgagaugaacaagcucuucgagaagaccaagaagcagcugcgcgagaacgccgaggacauggggaacggcugcuucaagaucuaccacaagugcgacaacgcgugcaucgggagcauccggaacggcacguacgaccacaacguguaccgcgacgaggcccugaacaaccgguuccagaucaagggggucgagcucaaguccggcuacaaggacuggauccuguggaucagcuucgccaucagcugcuuccugcucugcguggcccugcugggcuucaucaugugggccugccagaaggggaacauccgcugcaacaucugcaucugaggacuaguuauaagacugacuagcccgaugggccucccaacgggcccuccuccccuccuugcaccgagauuaauaaaaaaaaaaaaaaaaaaaaaaaaaaaaaaaaaaaaaaaaaaaaaaaaaaaaaaaaaaaaaaaaugcaucccccccccccccccccccccccccccccccaaaggcucuuuucagagccaccagaauu

SEQ ID NO: 224186 - RNA, 2089 nt, Artificial Sequence
  mRNA product Design2 comprising derived and/or modified sequence from hemagglutinin__InfluenzaA__EPI643118 IgE-leader_H3N2(Hongkong-4801-2014)-HA (CDS opt1)
ggggcgcugccuacggagguggcagccaucuccuucucggcaucaagcuuaccauggacuggaccuggauccuguuccucguggccgccgcgacccgcguccacagccagaagauccccggcaacgacaacuccaccgcgacgcugugccucgggcaccacgccgucccgaacggcaccaucgugaagaccaucaccaacgaccgcaucgaggugacgaacgccaccgagcugguccagaacagcuccaucggggagaucugcgacagcccccaccagauccuggacggcgagaacugcacccucaucgacgcccugcugggggacccccagugcgacggcuuccagaacaagaagugggaccucuucguggagcgguccaaggccuacagcaacugcuaccccuacgacgugccggacuacgcgucccugcgcagccuggucgccuccagcggcacccucgaguucaacaacgaguccuucaacuggacgggggugacccagaacggcaccagcuccgccugcauccggcgcagcuccagcuccuucuucagccggcugaacuggcugacccaccucaacuacaaguaccccgcccugaacgugacgaugcccaacaacgagcaguucgacaagcuguacaucuggggcguccaccaccccgggaccgacaaggaccagaucuucccguacgcgcaguccagcgggcgcaucaucgugagcaccaagcggucccagcaggccgugauccccaacaucggcagccgcccccggauccgcgacaucccgucccggaucagcaucuacuggaccaucgucaagccgggcgacauccuccugaucaacuccacggggaaccugaucgccccgcgcggcuacuucaagcuccggagcgggaaguccagcaucaugcgcuccgacgcccccaucggcaagugcaagagcgagugcaucacccccaacggcuccaucccgaacgacaagcccuuccagaacgugaaccggaucaccuacggggccugcccccgcuacgugaagcacagcacccugaagcuggcgacgggcaugcggaacguccccgagaagcagacccgcgggaucuucggcgccaucgccggguucaucgagaacggcugggagggcaugguggacgggugguacggcuuccggcaccagaacuccgaggggcgcggccaggccgccgaccucaagagcacccaggcggccaucgaccagaucaacgggaagcugaaccggcugaucggcaagaccaacgagaaguuccaccagaucgagaaggaguucuccgagguggagggccgcauccaggaccucgagaaguacgucgaggacacgaagaucgaccuguggagcuacaacgccgagcugcucguggcccuggagaaccagcacaccaucgaccugaccgacuccgagaugaacaagcucuucgagaagaccaagaagcagcugcgcgagaacgccgaggacauggggaacggcugcuucaagaucuaccacaagugcgacaacgcgugcaucgggagcauccggaacggcacguacgaccacaacguguaccgcgacgaggcccugaacaaccgguuccagaucaagggggucgagcucaaguccggcuacaaggacuggauccuguggaucagcuucgccaucagcugcuuccugcucugcguggcccugcugggcuucaucaugugggccugccagaaggggaacauccgcugcaacaucugcaucugaggacuagugcaucacauuuaaaagcaucucagccuaccaugagaauaagagaaagaaaaugaagaucaauagcuuauucaucucuuuuucuuuuucguugguguaaagccaacacccugucuaaaaaacauaaauuucuuuaaucauuuugccucuuuucucugugcuucaauuaauaaaaaauggaaagaaccuagaucuaaaaaaaaaaaaaaaaaaaaaaaaaaaaaaaaaaaaaaaaaaaaaaaaaaaaaaaaaaaaaaaaugcaucccccccccccccccccccccccccccccccaaaggcucuuuucagagccaccagaauu

SEQ ID NO: 224187 - RNA, 1942 nt, Artificial Sequence
  mRNA product Design1 comprising derived and/or modified sequence from hemagglutinin__InfluenzaA__EPI643118 HsCD5(1-24)_H3N2(Hongkong-4801-2014)-HA (CDS opt1)
gggagaaagcuuaccaugcccaugggcagccugcagccgcucgccacccuguaccugcucgggaugcugguggccuccugccugggccagaagauccccggcaacgacaacuccaccgcgacgcugugccucgggcaccacgccgucccgaacggcaccaucgugaagaccaucaccaacgaccgcaucgaggugacgaacgccaccgagcugguccagaacagcuccaucggggagaucugcgacagcccccaccagauccuggacggcgagaacugcacccucaucgacgcccugcugggggacccccagugcgacggcuuccagaacaagaagugggaccucuucguggagcgguccaaggccuacagcaacugcuaccccuacgacgugccggacuacgcgucccugcgcagccuggucgccuccagcggcacccucgaguucaacaacgaguccuucaacuggacgggggugacccagaacggcaccagcuccgccugcauccggcgcagcuccagcuccuucuucagccggcugaacuggcugacccaccucaacuacaaguaccccgcccugaacgugacgaugcccaacaacgagcaguucgacaagcuguacaucuggggcguccaccaccccgggaccgacaaggaccagaucuucccguacgcgcaguccagcgggcgcaucaucgugagcaccaagcggucccagcaggccgugauccccaacaucggcagccgcccccggauccgcgacaucccgucccggaucagcaucuacuggaccaucgucaagccgggcgacauccuccugaucaacuccacggggaaccugaucgccccgcgcggcuacuucaagcuccggagcgggaaguccagcaucaugcgcuccgacgcccccaucggcaagugcaagagcgagugcaucacccccaacggcuccaucccgaacgacaagcccuuccagaacgugaaccggaucaccuacggggccugcccccgcuacgugaagcacagcacccugaagcuggcgacgggcaugcggaacguccccgagaagcagacccgcgggaucuucggcgccaucgccggguucaucgagaacggcugggagggcaugguggacgggugguacggcuuccggcaccagaacuccgaggggcgcggccaggccgccgaccucaagagcacccaggcggccaucgaccagaucaacgggaagcugaaccggcugaucggcaagaccaacgagaaguuccaccagaucgagaaggaguucuccgagguggagggccgcauccaggaccucgagaaguacgucgaggacacgaagaucgaccuguggagcuacaacgccgagcugcucguggcccuggagaaccagcacaccaucgaccugaccgacuccgagaugaacaagcucuucgagaagaccaagaagcagcugcgcgagaacgccgaggacauggggaacggcugcuucaagaucuaccacaagugcgacaacgcgugcaucgggagcauccggaacggcacguacgaccacaacguguaccgcgacgaggcccugaacaaccgguuccagaucaagggggucgagcucaaguccggcuacaaggacuggauccuguggaucagcuucgccaucagcugcuuccugcucugcguggcccugcugggcuucaucaugugggccugccagaaggggaacauccgcugcaacaucugcaucugaggacuaguuauaagacugacuagcccgaugggccucccaacgggcccuccuccccuccuugcaccgagauuaauaaaaaaaaaaaaaaaaaaaaaaaaaaaaaaaaaaaaaaaaaaaaaaaaaaaaaaaaaaaaaaaaugcaucccccccccccccccccccccccccccccccaaaggcucuuuucagagccaccagaauu

SEQ ID NO: 224188 - RNA, 2107 nt, Artificial Sequence
  mRNA product Design2 comprising derived and/or modified sequence from hemagglutinin__InfluenzaA__EPI643118 HsCD5(1-24)_H3N2(Hongkong-4801-2014)-HA (CDS opt1)
ggggcgcugccuacggagguggcagccaucuccuucucggcaucaagcuuaccaugcccaugggcagccugcagccgcucgccacccuguaccugcucgggaugcugguggccuccugccugggccagaagauccccggcaacgacaacuccaccgcgacgcugugccucgggcaccacgccgucccgaacggcaccaucgugaagaccaucaccaacgaccgcaucgaggugacgaacgccaccgagcugguccagaacagcuccaucggggagaucugcgacagcccccaccagauccuggacggcgagaacugcacccucaucgacgcccugcugggggacccccagugcgacggcuuccagaacaagaagugggaccucuucguggagcgguccaaggccuacagcaacugcuaccccuacgacgugccggacuacgcgucccugcgcagccuggucgccuccagcggcacccucgaguucaacaacgaguccuucaacuggacgggggugacccagaacggcaccagcuccgccugcauccggcgcagcuccagcuccuucuucagccggcugaacuggcugacccaccucaacuacaaguaccccgcccugaacgugacgaugcccaacaacgagcaguucgacaagcuguacaucuggggcguccaccaccccgggaccgacaaggaccagaucuucccguacgcgcaguccagcgggcgcaucaucgugagcaccaagcggucccagcaggccgugauccccaacaucggcagccgcccccggauccgcgacaucccgucccggaucagcaucuacuggaccaucgucaagccgggcgacauccuccugaucaacuccacggggaaccugaucgccccgcgcggcuacuucaagcuccggagcgggaaguccagcaucaugcgcuccgacgcccccaucggcaagugcaagagcgagugcaucacccccaacggcuccaucccgaacgacaagcccuuccagaacgugaaccggaucaccuacggggccugcccccgcuacgugaagcacagcacccugaagcuggcgacgggcaugcggaacguccccgagaagcagacccgcgggaucuucggcgccaucgccggguucaucgagaacggcugggagggcaugguggacgggugguacggcuuccggcaccagaacuccgaggggcgcggccaggccgccgaccucaagagcacccaggcggccaucgaccagaucaacgggaagcugaaccggcugaucggcaagaccaacgagaaguuccaccagaucgagaaggaguucuccgagguggagggccgcauccaggaccucgagaaguacgucgaggacacgaagaucgaccuguggagcuacaacgccgagcugcucguggcccuggagaaccagcacaccaucgaccugaccgacuccgagaugaacaagcucuucgagaagaccaagaagcagcugcgcgagaacgccgaggacauggggaacggcugcuucaagaucuaccacaagugcgacaacgcgugcaucgggagcauccggaacggcacguacgaccacaacguguaccgcgacgaggcccugaacaaccgguuccagaucaagggggucgagcucaaguccggcuacaaggacuggauccuguggaucagcuucgccaucagcugcuuccugcucugcguggcccugcugggcuucaucaugugggccugccagaaggggaacauccgcugcaacaucugcaucugaggacuagugcaucacauuuaaaagcaucucagccuaccaugagaauaagagaaagaaaaugaagaucaauagcuuauucaucucuuuuucuuuuucguugguguaaagccaacacccugucuaaaaaacauaaauuucuuuaaucauuuugccucuuuucucugugcuucaauuaauaaaaaauggaaagaaccuagaucuaaaaaaaaaaaaaaaaaaaaaaaaaaaaaaaaaaaaaaaaaaaaaaaaaaaaaaaaaaaaaaaaugcaucccccccccccccccccccccccccccccccaaaggcucuuuucagagccaccagaauu

SEQ ID NO: 224189 - RNA, 1942 nt, Artificial Sequence
  mRNA product Design1 comprising derived and/or modified sequence from hemagglutinin__InfluenzaA__EPI643118 HLA-A2-SP_H3N2(Hongkong-4801-2014)-HA (CDS opt1)
gggagaaagcuuaccauggccgugauggccccgcggacccugguccuccugcugagcggcgcgcucgcccugacccagacgugggcccagaagauccccggcaacgacaacuccaccgcgacgcugugccucgggcaccacgccgucccgaacggcaccaucgugaagaccaucaccaacgaccgcaucgaggugacgaacgccaccgagcugguccagaacagcuccaucggggagaucugcgacagcccccaccagauccuggacggcgagaacugcacccucaucgacgcccugcugggggacccccagugcgacggcuuccagaacaagaagugggaccucuucguggagcgguccaaggccuacagcaacugcuaccccuacgacgugccggacuacgcgucccugcgcagccuggucgccuccagcggcacccucgaguucaacaacgaguccuucaacuggacgggggugacccagaacggcaccagcuccgccugcauccggcgcagcuccagcuccuucuucagccggcugaacuggcugacccaccucaacuacaaguaccccgcccugaacgugacgaugcccaacaacgagcaguucgacaagcuguacaucuggggcguccaccaccccgggaccgacaaggaccagaucuucccguacgcgcaguccagcgggcgcaucaucgugagcaccaagcggucccagcaggccgugauccccaacaucggcagccgcccccggauccgcgacaucccgucccggaucagcaucuacuggaccaucgucaagccgggcgacauccuccugaucaacuccacggggaaccugaucgccccgcgcggcuacuucaagcuccggagcgggaaguccagcaucaugcgcuccgacgcccccaucggcaagugcaagagcgagugcaucacccccaacggcuccaucccgaacgacaagcccuuccagaacgugaaccggaucaccuacggggccugcccccgcuacgugaagcacagcacccugaagcuggcgacgggcaugcggaacguccccgagaagcagacccgcgggaucuucggcgccaucgccggguucaucgagaacggcugggagggcaugguggacgggugguacggcuuccggcaccagaacuccgaggggcgcggccaggccgccgaccucaagagcacccaggcggccaucgaccagaucaacgggaagcugaaccggcugaucggcaagaccaacgagaaguuccaccagaucgagaaggaguucuccgagguggagggccgcauccaggaccucgagaaguacgucgaggacacgaagaucgaccuguggagcuacaacgccgagcugcucguggcccuggagaaccagcacaccaucgaccugaccgacuccgagaugaacaagcucuucgagaagaccaagaagcagcugcgcgagaacgccgaggacauggggaacggcugcuucaagaucuaccacaagugcgacaacgcgugcaucgggagcauccggaacggcacguacgaccacaacguguaccgcgacgaggcccugaacaaccgguuccagaucaagggggucgagcucaaguccggcuacaaggacuggauccuguggaucagcuucgccaucagcugcuuccugcucugcguggcccugcugggcuucaucaugugggccugccagaaggggaacauccgcugcaacaucugcaucugaggacuaguuauaagacugacuagcccgaugggccucccaacgggcccuccuccccuccuugcaccgagauuaauaaaaaaaaaaaaaaaaaaaaaaaaaaaaaaaaaaaaaaaaaaaaaaaaaaaaaaaaaaaaaaaaugcaucccccccccccccccccccccccccccccccaaaggcucuuuucagagccaccagaauu

SEQ ID NO: 224190 - RNA, 2107 nt, Artificial Sequence
  mRNA product Design2 comprising derived and/or modified sequence from hemagglutinin__InfluenzaA__EPI643118 HLA-A2-SP_H3N2(Hongkong-4801-2014)-HA (CDS opt1)
ggggcgcugccuacggagguggcagccaucuccuucucggcaucaagcuuaccauggccgugauggccccgcggacccugguccuccugcugagcggcgcgcucgcccugacccagacgugggcccagaagauccccggcaacgacaacuccaccgcgacgcugugccucgggcaccacgccgucccgaacggcaccaucgugaagaccaucaccaacgaccgcaucgaggugacgaacgccaccgagcugguccagaacagcuccaucggggagaucugcgacagcccccaccagauccuggacggcgagaacugcacccucaucgacgcccugcugggggacccccagugcgacggcuuccagaacaagaagugggaccucuucguggagcgguccaaggccuacagcaacugcuaccccuacgacgugccggacuacgcgucccugcgcagccuggucgccuccagcggcacccucgaguucaacaacgaguccuucaacuggacgggggugacccagaacggcaccagcuccgccugcauccggcgcagcuccagcuccuucuucagccggcugaacuggcugacccaccucaacuacaaguaccccgcccugaacgugacgaugcccaacaacgagcaguucgacaagcuguacaucuggggcguccaccaccccgggaccgacaaggaccagaucuucccguacgcgcaguccagcgggcgcaucaucgugagcaccaagcggucccagcaggccgugauccccaacaucggcagccgcccccggauccgcgacaucccgucccggaucagcaucuacuggaccaucgucaagccgggcgacauccuccugaucaacuccacggggaaccugaucgccccgcgcggcuacuucaagcuccggagcgggaaguccagcaucaugcgcuccgacgcccccaucggcaagugcaagagcgagugcaucacccccaacggcuccaucccgaacgacaagcccuuccagaacgugaaccggaucaccuacggggccugcccccgcuacgugaagcacagcacccugaagcuggcgacgggcaugcggaacguccccgagaagcagacccgcgggaucuucggcgccaucgccggguucaucgagaacggcugggagggcaugguggacgggugguacggcuuccggcaccagaacuccgaggggcgcggccaggccgccgaccucaagagcacccaggcggccaucgaccagaucaacgggaagcugaaccggcugaucggcaagaccaacgagaaguuccaccagaucgagaaggaguucuccgagguggagggccgcauccaggaccucgagaaguacgucgaggacacgaagaucgaccuguggagcuacaacgccgagcugcucguggcccuggagaaccagcacaccaucgaccugaccgacuccgagaugaacaagcucuucgagaagaccaagaagcagcugcgcgagaacgccgaggacauggggaacggcugcuucaagaucuaccacaagugcgacaacgcgugcaucgggagcauccggaacggcacguacgaccacaacguguaccgcgacgaggcccugaacaaccgguuccagaucaagggggucgagcucaaguccggcuacaaggacuggauccuguggaucagcuucgccaucagcugcuuccugcucugcguggcccugcugggcuucaucaugugggccugccagaaggggaacauccgcugcaacaucugcaucugaggacuagugcaucacauuuaaaagcaucucagccuaccaugagaauaagagaaagaaaaugaagaucaauagcuuauucaucucuuuuucuuuuucguugguguaaagccaacacccugucuaaaaaacauaaauuucuuuaaucauuuugccucuuuucucugugcuucaauuaauaaaaaauggaaagaaccuagaucuaaaaaaaaaaaaaaaaaaaaaaaaaaaaaaaaaaaaaaaaaaaaaaaaaaaaaaaaaaaaaaaaugcaucccccccccccccccccccccccccccccccaaaggcucuuuucagagccaccagaauu

SEQ ID NO: 224191 - RNA, 1918 nt, Artificial Sequence
  mRNA product Design1 comprising derived and/or modified sequence from hemagglutinin__InfluenzaA__EPI675798 (CDS opt1) R4937
gggagaaagcuuaccaugaagaccaucaucgcccugagcuacauccucugccugguguucgcccagaagauccccggcaacgacaacuccaccgcgacgcugugccucgggcaccacgccgucccgaacggcaccaucgugaagaccaucaccaacgaccgcaucgaggugacgaacgccaccgagcugguccagaacagcuccaucggggagaucugcgacagcccccaccagauccuggacggcgagaacugcacccucaucgacgcccugcugggggacccccagugcgacggcuuccagaacaagaagugggaccucuucguggagcgguccaaggccuacagcaacugcuaccccuacgacgugccggacuacgcgucccugcgcagccuggucgccuccagcggcacccucgaguucaacaacgaguccuucaacuggacgggggugacccagaacggcaccagcuccgccugcauccggcgcagcuccagcuccuucuucagccggcugaacuggcugacccaccucaacuacacguaccccgcccugaacgugaccaugcccaacaacgagcaguucgacaagcuguacaucuggggcguccaccaccccgggaccgacaaggaccagaucuuccucuacgcgcaguccagcgggcgcaucaccgugagcacgaagcggucccagcaggccgugaucccgaacaucggcagccgcccccggauccgcgacauccccucccggaucagcaucuacuggaccaucgucaagcccggcgacauccugcugaucaacuccaccgggaaccucaucgccccgcgcggcuacuucaagauccggagcgggaaguccagcaucaugcgcuccgacgcccccaucggcaagugcaagagcgagugcaucacccccaacggcuccauccccaacgacaagccguuccagaacgugaaccggaucacguacggggccugcccccgcuacgugaagcacagcacccugaagcuggcgaccggcaugcggaacguccccgagaagcagacccgcgggaucuucggcgccaucgccggguucaucgagaacggcugggagggcaugguggacgggugguacggcuuccggcaccagaacuccgaggggcgcggccaggccgccgaccucaagagcacgcaggcggccaucgaccagaucaacgggaagcugaaccggcugaucggcaagaccaacgagaaguuccaccagaucgagaaggaguucuccgagguggagggccgcauccaggaccucgagaaguacgucgaggacaccaagaucgaccuguggagcuacaacgccgagcugcucguggcccuggagaaccagcacaccaucgaccugacggacuccgagaugaacaagcucuucgagaagaccaagaagcagcugcgcgagaacgccgaggacauggggaacggcugcuucaagaucuaccacaagugcgacaacgcgugcaucgggagcauccggaacggcaccuacgaccacaacguguaccgcgacgaggcccugaacaaccgguuccagaucaagggggucgagcucaaguccggcuacaaggacuggauccuguggaucagcuucgccaucagcugcuuccugcucugcguggcccugcugggcuucaucaugugggccugccagaaggggaacauccgcugcaacaucugcaucugaggacuaguuauaagacugacuagcccgaugggccucccaacgggcccuccuccccuccuugcaccgagauuaauaaaaaaaaaaaaaaaaaaaaaaaaaaaaaaaaaaaaaaaaaaaaaaaaaaaaaaaaaaaaaaaaugcaucccccccccccccccccccccccccccccccaaaggcucuuuucagagccaccagaauu

SEQ ID NO: 224192 - RNA, 2083 nt, Artificial Sequence
  mRNA product Design2 comprising derived and/or modified sequence from hemagglutinin__InfluenzaA__EPI675798 (CDS opt1) R5073
ggggcgcugccuacggagguggcagccaucuccuucucggcaucaagcuuaccaugaagaccaucaucgcccugagcuacauccucugccugguguucgcccagaagauccccggcaacgacaacuccaccgcgacgcugugccucgggcaccacgccgucccgaacggcaccaucgugaagaccaucaccaacgaccgcaucgaggugacgaacgccaccgagcugguccagaacagcuccaucggggagaucugcgacagcccccaccagauccuggacggcgagaacugcacccucaucgacgcccugcugggggacccccagugcgacggcuuccagaacaagaagugggaccucuucguggagcgguccaaggccuacagcaacugcuaccccuacgacgugccggacuacgcgucccugcgcagccuggucgccuccagcggcacccucgaguucaacaacgaguccuucaacuggacgggggugacccagaacggcaccagcuccgccugcauccggcgcagcuccagcuccuucuucagccggcugaacuggcugacccaccucaacuacacguaccccgcccugaacgugaccaugcccaacaacgagcaguucgacaagcuguacaucuggggcguccaccaccccgggaccgacaaggaccagaucuuccucuacgcgcaguccagcgggcgcaucaccgugagcacgaagcggucccagcaggccgugaucccgaacaucggcagccgcccccggauccgcgacauccccucccggaucagcaucuacuggaccaucgucaagcccggcgacauccugcugaucaacuccaccgggaaccucaucgccccgcgcggcuacuucaagauccggagcgggaaguccagcaucaugcgcuccgacgcccccaucggcaagugcaagagcgagugcaucacccccaacggcuccauccccaacgacaagccguuccagaacgugaaccggaucacguacggggccugcccccgcuacgugaagcacagcacccugaagcuggcgaccggcaugcggaacguccccgagaagcagacccgcgggaucuucggcgccaucgccggguucaucgagaacggcugggagggcaugguggacgggugguacggcuuccggcaccagaacuccgaggggcgcggccaggccgccgaccucaagagcacgcaggcggccaucgaccagaucaacgggaagcugaaccggcugaucggcaagaccaacgagaaguuccaccagaucgagaaggaguucuccgagguggagggccgcauccaggaccucgagaaguacgucgaggacaccaagaucgaccuguggagcuacaacgccgagcugcucguggcccuggagaaccagcacaccaucgaccugacggacuccgagaugaacaagcucuucgagaagaccaagaagcagcugcgcgagaacgccgaggacauggggaacggcugcuucaagaucuaccacaagugcgacaacgcgugcaucgggagcauccggaacggcaccuacgaccacaacguguaccgcgacgaggcccugaacaaccgguuccagaucaagggggucgagcucaaguccggcuacaaggacuggauccuguggaucagcuucgccaucagcugcuuccugcucugcguggcccugcugggcuucaucaugugggccugccagaaggggaacauccgcugcaacaucugcaucugaggacuagugcaucacauuuaaaagcaucucagccuaccaugagaauaagagaaagaaaaugaagaucaauagcuuauucaucucuuuuucuuuuucguugguguaaagccaacacccugucuaaaaaacauaaauuucuuuaaucauuuugccucuuuucucugugcuucaauuaauaaaaaauggaaagaaccuagaucuaaaaaaaaaaaaaaaaaaaaaaaaaaaaaaaaaaaaaaaaaaaaaaaaaaaaaaaaaaaaaaaaugcaucccccccccccccccccccccccccccccccaaaggcucuuuucagagccaccagaauu

SEQ ID NO: 224193 - RNA, 1918 nt, Artificial Sequence
  mRNA product Design1 comprising derived and/or modified sequence from hemagglutinin__InfluenzaA__EPI578430 (CDS opt1) R4938
gggagaaagcuuaccaugaagaccaucaucgcccugagcuacauccucugccugguguucgcccagaagauccccggcaacgacaacuccaccgcgacgcugugccucgggcaccacgccgucccgaacggcaccaucgugaagaccaucaccaacgaccgcaucgaggugacgaacgccaccgagcugguccagaacagcuccaucggggagaucugcgacagcccccaccagauccuggacggcgagaacugcacccucaucgacgcccugcugggggacccccagugcgacggcuuccagaacaagaagugggaccucuucguggagcgguccaaggccuacagcuccugcuaccccuacgacgugccggacuacgcgagccugcgcucccuggucgccagcuccggcacccucgaguucaacaacgagagcuucaacuggacgggggugacccagaacggcaccuccagcgccugcauccggcgcuccagcuccagcuucuucucccggcugaacuggcugacccaccucaacuacaaguaccccgcccugaacgugacgaugcccaacaacgagcaguucgacaagcuguacaucuggggcguccaccaccccgggaccgacaaggaccagaucuucccguacgcgcagagcagcgggcgcaucaccguguccaccaagcggagccagcaggccgugauccccaacaucggcucccgcccccggauccgcgacaucccgagccggaucuccaucuacuggacgaucgucaagccgggcgacauccuccugaucaacagcaccgggaaccugaucgccccgcgcggcuacuucaagauccgguccgggaagagcuccaucaugcgcagcgacgcccccaucggcaagugcaaguccgagugcaucacccccaacggcagcaucccgaacgacaagcccuuccagaacgugaaccggaucaccuacggggccugcccccgcuacgugaagcacuccacgcucaagcuggcgaccggcaugcggaacguccccgagaagcagacccgcgggaucuucggcgccaucgccggguucaucgagaacggcugggagggcaugguggacgggugguacggcuuccggcaccagaacagcgaggggcgcggccaggccgccgaccugaaguccacccaggcggccaucgaccagaucaacgggaagcucaaccggcugaucggcaagacgaacgagaaguuccaccagaucgagaaggaguucagcgagguggagggccgcauccaggaccuggagaaguacgucgaggacaccaagaucgaccucugguccuacaacgccgagcugcugguggcccucgagaaccagcacaccaucgaccugaccgacagcgagaugaacaagcuguucgagaagacgaagaagcagcuccgcgagaacgccgaggacauggggaacggcugcuucaagaucuaccacaagugcgacaacgcgugcaucggguccauccggaacggcaccuacgaccacaacguguaccgcgacgaggcccugaacaaccgguuccagaucaagggggucgagcugaagagcggcuacaaggacuggauccucuggaucagcuucgccaucuccugcuuccugcugugcguggcccuccugggcuucaucaugugggccugccagaaggggaacauccgcugcaacaucugcaucugaggacuaguuauaagacugacuagcccgaugggccucccaacgggcccuccuccccuccuugcaccgagauuaauaaaaaaaaaaaaaaaaaaaaaaaaaaaaaaaaaaaaaaaaaaaaaaaaaaaaaaaaaaaaaaaaugcaucccccccccccccccccccccccccccccccaaaggcucuuuucagagccaccagaauu

SEQ ID NO: 224194 - RNA, 2083 nt, Artificial Sequence
  mRNA product Design2 comprising derived and/or modified sequence from hemagglutinin__InfluenzaA__EPI578430 (CDS opt1) R5074
ggggcgcugccuacggagguggcagccaucuccuucucggcaucaagcuuaccaugaagaccaucaucgcccugagcuacauccucugccugguguucgcccagaagauccccggcaacgacaacuccaccgcgacgcugugccucgggcaccacgccgucccgaacggcaccaucgugaagaccaucaccaacgaccgcaucgaggugacgaacgccaccgagcugguccagaacagcuccaucggggagaucugcgacagcccccaccagauccuggacggcgagaacugcacccucaucgacgcccugcugggggacccccagugcgacggcuuccagaacaagaagugggaccucuucguggagcgguccaaggccuacagcuccugcuaccccuacgacgugccggacuacgcgagccugcgcucccuggucgccagcuccggcacccucgaguucaacaacgagagcuucaacuggacgggggugacccagaacggcaccuccagcgccugcauccggcgcuccagcuccagcuucuucucccggcugaacuggcugacccaccucaacuacaaguaccccgcccugaacgugacgaugcccaacaacgagcaguucgacaagcuguacaucuggggcguccaccaccccgggaccgacaaggaccagaucuucccguacgcgcagagcagcgggcgcaucaccguguccaccaagcggagccagcaggccgugauccccaacaucggcucccgcccccggauccgcgacaucccgagccggaucuccaucuacuggacgaucgucaagccgggcgacauccuccugaucaacagcaccgggaaccugaucgccccgcgcggcuacuucaagauccgguccgggaagagcuccaucaugcgcagcgacgcccccaucggcaagugcaaguccgagugcaucacccccaacggcagcaucccgaacgacaagcccuuccagaacgugaaccggaucaccuacggggccugcccccgcuacgugaagcacuccacgcucaagcuggcgaccggcaugcggaacguccccgagaagcagacccgcgggaucuucggcgccaucgccggguucaucgagaacggcugggagggcaugguggacgggugguacggcuuccggcaccagaacagcgaggggcgcggccaggccgccgaccugaaguccacccaggcggccaucgaccagaucaacgggaagcucaaccggcugaucggcaagacgaacgagaaguuccaccagaucgagaaggaguucagcgagguggagggccgcauccaggaccuggagaaguacgucgaggacaccaagaucgaccucugguccuacaacgccgagcugcugguggcccucgagaaccagcacaccaucgaccugaccgacagcgagaugaacaagcuguucgagaagacgaagaagcagcuccgcgagaacgccgaggacauggggaacggcugcuucaagaucuaccacaagugcgacaacgcgugcaucggguccauccggaacggcaccuacgaccacaacguguaccgcgacgaggcccugaacaaccgguuccagaucaagggggucgagcugaagagcggcuacaaggacuggauccucuggaucagcuucgccaucuccugcuuccugcugugcguggcccuccugggcuucaucaugugggccugccagaaggggaacauccgcugcaacaucugcaucugaggacuagugcaucacauuuaaaagcaucucagccuaccaugagaauaagagaaagaaaaugaagaucaauagcuuauucaucucuuuuucuuuuucguugguguaaagccaacacccugucuaaaaaacauaaauuucuuuaaucauuuugccucuuuucucugugcuucaauuaauaaaaaauggaaagaaccuagaucuaaaaaaaaaaaaaaaaaaaaaaaaaaaaaaaaaaaaaaaaaaaaaaaaaaaaaaaaaaaaaaaaugcaucccccccccccccccccccccccccccccccaaaggcucuuuucagagccaccagaauu

SEQ ID NO: 224195 - RNA, 1887 nt, Artificial Sequence
  mRNA product Design3 comprising derived and/or modified sequence from hemagglutinin__InfluenzaA__ACU65077/m2 (CDS opt1) R2256
gggagaaagcuuaccauggagaagaucgugcugcucuucgccaucgucagccuggugaaguccgaccagaucugcaucggcuaccacgccaacaacagcaccgagcagguggacaccaucauggagaagaacgucacggugacccacgcgcaggacauccuggagaagacccacaacgggaagcucugcgaccuggacggcgugaagccccugauccuccgggacugcuccgucgccggguggcugcugggcaacccgaugugcgacgaguucaucaacgugcccgaguggagcuacaucguggagaaggccaaccccgucaacgaccucugcuaccccggggacuucaacgacuacgaggagcugaagcaccugcucucccgcaucaaccacuucgagaagauccagaucaucccgaagagcuccuggagcucccacgaggccagccugggcguguccagcgccugccccuaccagggcaaguccagcuucuuccggaacguggucuggcugaucaagaagaacuccaccuaccccacgaucaagcgcagcuacaacaacaccaaccaggaggaccuccuggugcugugggggauccaccaccccaacgacgcggccgagcagaccaagcucuaccagaacccgaccacguacaucuccgugggcaccagcacccugaaccagcggcuggucccccgcaucgccacccgguccaaggugaacgggcagagcggccgcauggaguucuucuggacgauccucaagcccaacgacgccaucaacuucgagagcaacgggaacuucaucgcgcccgaguacgccuacaagaucgugaagaagggcgacuccaccaucaugaagagcgagcuggaguacggcaacugcaacaccaagugccagaccccgaugggggccaucaacuccagcaugcccuuccacaacauccacccccugacgaucggcgagugccccaaguacgucaaguccaaccggcucgugcuggccaccgggcugcgcaacagcccgcagcgggagacccgcggccucuucggcgccaucgcgggguucaucgagggcggguggcagggcaugguggacgggugguacggcuaccaccacuccaacgagcagggcagcggguacgccgccgacaaggaguccacccagaaggccaucgacggcgucacgaacaaggugaacagcaucaucgacaagaugaacacccaguucgaggccguggggcgggaguucaacaaccuggagcgccggaucgagaaccugaacaagaagauggaggacggcuuccucgacgucuggaccuacaacgcggagcugcuggugcucauggagaacgagcgcacccuggacuuccacgacuccaacgucaagaaccuguacgacaaggugcggcuccagcugcgcgacaacgccaaggagcuggggaacggcugcuucgaguucuaccacaagugcgacaacgagugcauggagagcgugcggaacggcacguacgacuacccccaguacuccgaggaggcccgccucaagcgggaggagaucagcggggucaagcuggaguccaucggcaucuaccagauccugagcaucuacuccaccguggccagcucccucgcccuggcgaucaugguggccgggcugagccucuggaugugcagcaacggcucccugcagugccgcaucugcaucugaggacuaguuauaagacugacuagcccgaugggccucccaacgggcccuccuccccuccuugcaccgagauuaauaaaaaaaaaaaaaaaaaaaaaaaaaaaaaaaaaaaaaaaaaaaaaaaaaaaaaaaaaaaaaaaauauuccccccccccccccccccccccccccccccucuag

SEQ ID NO: 224196 - RNA, 1912 nt, Artificial Sequence
  mRNA product Design1 comprising derived and/or modified sequence from hemagglutinin__InfluenzaA__ACU65077/m2 (CDS opt1) R1686/R2402
gggagaaagcuuaccauggagaagaucgugcugcucuucgccaucgucagccuggugaaguccgaccagaucugcaucggcuaccacgccaacaacagcaccgagcagguggacaccaucauggagaagaacgucacggugacccacgcgcaggacauccuggagaagacccacaacgggaagcucugcgaccuggacggcgugaagccccugauccuccgggacugcuccgucgccggguggcugcugggcaacccgaugugcgacgaguucaucaacgugcccgaguggagcuacaucguggagaaggccaaccccgucaacgaccucugcuaccccggggacuucaacgacuacgaggagcugaagcaccugcucucccgcaucaaccacuucgagaagauccagaucaucccgaagagcuccuggagcucccacgaggccagccugggcguguccagcgccugccccuaccagggcaaguccagcuucuuccggaacguggucuggcugaucaagaagaacuccaccuaccccacgaucaagcgcagcuacaacaacaccaaccaggaggaccuccuggugcugugggggauccaccaccccaacgacgcggccgagcagaccaagcucuaccagaacccgaccacguacaucuccgugggcaccagcacccugaaccagcggcuggucccccgcaucgccacccgguccaaggugaacgggcagagcggccgcauggaguucuucuggacgauccucaagcccaacgacgccaucaacuucgagagcaacgggaacuucaucgcgcccgaguacgccuacaagaucgugaagaagggcgacuccaccaucaugaagagcgagcuggaguacggcaacugcaacaccaagugccagaccccgaugggggccaucaacuccagcaugcccuuccacaacauccacccccugacgaucggcgagugccccaaguacgucaaguccaaccggcucgugcuggccaccgggcugcgcaacagcccgcagcgggagacccgcggccucuucggcgccaucgcgggguucaucgagggcggguggcagggcaugguggacgggugguacggcuaccaccacuccaacgagcagggcagcggguacgccgccgacaaggaguccacccagaaggccaucgacggcgucacgaacaaggugaacagcaucaucgacaagaugaacacccaguucgaggccguggggcgggaguucaacaaccuggagcgccggaucgagaaccugaacaagaagauggaggacggcuuccucgacgucuggaccuacaacgcggagcugcuggugcucauggagaacgagcgcacccuggacuuccacgacuccaacgucaagaaccuguacgacaaggugcggcuccagcugcgcgacaacgccaaggagcuggggaacggcugcuucgaguucuaccacaagugcgacaacgagugcauggagagcgugcggaacggcacguacgacuacccccaguacuccgaggaggcccgccucaagcgggaggagaucagcggggucaagcuggaguccaucggcaucuaccagauccugagcaucuacuccaccguggccagcucccucgcccuggcgaucaugguggccgggcugagccucuggaugugcagcaacggcucccugcagugccgcaucugcaucugaggacuaguuauaagacugacuagcccgaugggccucccaacgggcccuccuccccuccuugcaccgagauuaauaaaaaaaaaaaaaaaaaaaaaaaaaaaaaaaaaaaaaaaaaaaaaaaaaaaaaaaaaaaaaaaaugcaucccccccccccccccccccccccccccccccaaaggcucuuuucagagccaccagaauu

SEQ ID NO: 224197 - RNA, 2077 nt, Artificial Sequence
  mRNA product Design2 comprising derived and/or modified sequence from hemagglutinin__InfluenzaA__ACU65077/m2 (CDS opt1) R2284/R3096
ggggcgcugccuacggagguggcagccaucuccuucucggcaucaagcuuaccauggagaagaucgugcugcucuucgccaucgucagccuggugaaguccgaccagaucugcaucggcuaccacgccaacaacagcaccgagcagguggacaccaucauggagaagaacgucacggugacccacgcgcaggacauccuggagaagacccacaacgggaagcucugcgaccuggacggcgugaagccccugauccuccgggacugcuccgucgccggguggcugcugggcaacccgaugugcgacgaguucaucaacgugcccgaguggagcuacaucguggagaaggccaaccccgucaacgaccucugcuaccccggggacuucaacgacuacgaggagcugaagcaccugcucucccgcaucaaccacuucgagaagauccagaucaucccgaagagcuccuggagcucccacgaggccagccugggcguguccagcgccugccccuaccagggcaaguccagcuucuuccggaacguggucuggcugaucaagaagaacuccaccuaccccacgaucaagcgcagcuacaacaacaccaaccaggaggaccuccuggugcugugggggauccaccaccccaacgacgcggccgagcagaccaagcucuaccagaacccgaccacguacaucuccgugggcaccagcacccugaaccagcggcuggucccccgcaucgccacccgguccaaggugaacgggcagagcggccgcauggaguucuucuggacgauccucaagcccaacgacgccaucaacuucgagagcaacgggaacuucaucgcgcccgaguacgccuacaagaucgugaagaagggcgacuccaccaucaugaagagcgagcuggaguacggcaacugcaacaccaagugccagaccccgaugggggccaucaacuccagcaugcccuuccacaacauccacccccugacgaucggcgagugccccaaguacgucaaguccaaccggcucgugcuggccaccgggcugcgcaacagcccgcagcgggagacccgcggccucuucggcgccaucgcgggguucaucgagggcggguggcagggcaugguggacgggugguacggcuaccaccacuccaacgagcagggcagcggguacgccgccgacaaggaguccacccagaaggccaucgacggcgucacgaacaaggugaacagcaucaucgacaagaugaacacccaguucgaggccguggggcgggaguucaacaaccuggagcgccggaucgagaaccugaacaagaagauggaggacggcuuccucgacgucuggaccuacaacgcggagcugcuggugcucauggagaacgagcgcacccuggacuuccacgacuccaacgucaagaaccuguacgacaaggugcggcuccagcugcgcgacaacgccaaggagcuggggaacggcugcuucgaguucuaccacaagugcgacaacgagugcauggagagcgugcggaacggcacguacgacuacccccaguacuccgaggaggcccgccucaagcgggaggagaucagcggggucaagcuggaguccaucggcaucuaccagauccugagcaucuacuccaccguggccagcucccucgcccuggcgaucaugguggccgggcugagccucuggaugugcagcaacggcucccugcagugccgcaucugcaucugaggacuagugcaucacauuuaaaagcaucucagccuaccaugagaauaagagaaagaaaaugaagaucaauagcuuauucaucucuuuuucuuuuucguugguguaaagccaacacccugucuaaaaaacauaaauuucuuuaaucauuuugccucuuuucucugugcuucaauuaauaaaaaauggaaagaaccuagaucuaaaaaaaaaaaaaaaaaaaaaaaaaaaaaaaaaaaaaaaaaaaaaaaaaaaaaaaaaaaaaaaaugcaucccccccccccccccccccccccccccccccaaaggcucuuuucagagccaccagaauu

SEQ ID NO: 224198 - RNA, 1924 nt, Artificial Sequence
  mRNA product Design1 comprising derived and/or modified sequence from hemagglutinin__InfluenzaA__ABP51976/m1 (CDS wt) R2259
gggagaaagcuuaccauggagaaaauagugcuucuuuuugcaauagucagucuuguuaaaagugaucagauuugcauugguuaccaugcaaacaacucgacagagcagguugacacaauaauggaaaagaacguuacuguuacacaugcccaagacauacuggaaaagacacacaaugggaagcucugcgaucuagauggagugaagccucuaauuuugagagauuguaguguagcuggauggcuccucggaaacccaaugugugacgaauuuaucaaugugccggaauggucuuacauaguggagaaggccaauccagucaaugaccucuguuacccaggggauuucaaugacuaugaagaauugaaacaccuauugagcagaauaaaccauuuugagaaaauucagaucauccccaaaaguucuugguccagucaugaagccucauugggggugagcucagcauguccauaccagggaaaguccuccuuuuucagaaaugugguauggcuuaucaaaaagaacaguacauacccaacaauaaagaggagcuacaauaauaccaaccaagaagaucuuuugguacugugggggauucaccauccuaaugaugcggcagagcagacaaagcucuaucaaaacccaaccaccuauauuuccguugggacaucuacacuaaaccagagauugguaccaagaauagcuacuagauccaaaguaaacgggcaaaguggaaggauggaguucuucuggacaauuuuaaaaccgaaugaugcaaucaacuucgagaguaauggaaauuucauugcuccagaauaugcauacaaaauugucaagaaaggggacucaacaauuaugaaaagugaauuggaauaugguaacugcaacaccaagugucaaacuccaaugggggcgauaaacucuagcaugccauuccacaauauacacccucucaccaucggggaaugccccaaauaugugaaaucaaacagauuaguccuugcgacugggcucagaaauagcccucaaagagagagaagaagaaaaaagagaggauuauuuggagcuauagcagguuuuauagagggaggauggcagggaaugguagaugguugguauggguaccaccauagcaacgagcaggggaguggguacgcugcagacaaagaauccacucaaaaggcaauagauggagucaccaauaaggucaacucgauuauugacaaaaugaacacucaguuugaggccguuggaagggaauuuaacaacuuagaaaggagaauagagaauuuaaacaagaagauggaagacggguuccuagaugucuggacuuauaaugcugaacuucuaguucucauggaaaacgagagaacucuagacuuucaugacucaaaugucaagaaccuuuacgacaagguccgacuacagcuuagggauaaugcaaaggagcuggguaacgguuguuucgaguucuaucauaaaugugauaaugaauguauggaaaguguaagaaacggaacguaugacuacccgcaguauucagaagaagcaagacuaaaaagagaggaaauaaguggaguaaaauuggaaucaauaggaauuuaccaaauauugucaauuuauucuacaguggcgagcucccuagcacuggcaaucaugguagcuggucuauccuuauggaugugcuccaaugggucguuacaaugcagaauuugcauuuaaggacuaguuauaagacugacuagcccgaugggccucccaacgggcccuccuccccuccuugcaccgagauuaauaaaaaaaaaaaaaaaaaaaaaaaaaaaaaaaaaaaaaaaaaaaaaaaaaaaaaaaaaaaaaaaaugcaucccccccccccccccccccccccccccccccaaaggcucuuuucagagccaccagaauu

SEQ ID NO: 224199 - RNA, 2089 nt, Artificial Sequence
  mRNA product Design2 comprising derived and/or modified sequence from hemagglutinin__InfluenzaA__ABP51976/m1 (CDS wt)
ggggcgcugccuacggagguggcagccaucuccuucucggcaucaagcuuaccauggagaaaauagugcuucuuuuugcaauagucagucuuguuaaaagugaucagauuugcauugguuaccaugcaaacaacucgacagagcagguugacacaauaauggaaaagaacguuacuguuacacaugcccaagacauacuggaaaagacacacaaugggaagcucugcgaucuagauggagugaagccucuaauuuugagagauuguaguguagcuggauggcuccucggaaacccaaugugugacgaauuuaucaaugugccggaauggucuuacauaguggagaaggccaauccagucaaugaccucuguuacccaggggauuucaaugacuaugaagaauugaaacaccuauugagcagaauaaaccauuuugagaaaauucagaucauccccaaaaguucuugguccagucaugaagccucauugggggugagcucagcauguccauaccagggaaaguccuccuuuuucagaaaugugguauggcuuaucaaaaagaacaguacauacccaacaauaaagaggagcuacaauaauaccaaccaagaagaucuuuugguacugugggggauucaccauccuaaugaugcggcagagcagacaaagcucuaucaaaacccaaccaccuauauuuccguugggacaucuacacuaaaccagagauugguaccaagaauagcuacuagauccaaaguaaacgggcaaaguggaaggauggaguucuucuggacaauuuuaaaaccgaaugaugcaaucaacuucgagaguaauggaaauuucauugcuccagaauaugcauacaaaauugucaagaaaggggacucaacaauuaugaaaagugaauuggaauaugguaacugcaacaccaagugucaaacuccaaugggggcgauaaacucuagcaugccauuccacaauauacacccucucaccaucggggaaugccccaaauaugugaaaucaaacagauuaguccuugcgacugggcucagaaauagcccucaaagagagagaagaagaaaaaagagaggauuauuuggagcuauagcagguuuuauagagggaggauggcagggaaugguagaugguugguauggguaccaccauagcaacgagcaggggaguggguacgcugcagacaaagaauccacucaaaaggcaauagauggagucaccaauaaggucaacucgauuauugacaaaaugaacacucaguuugaggccguuggaagggaauuuaacaacuuagaaaggagaauagagaauuuaaacaagaagauggaagacggguuccuagaugucuggacuuauaaugcugaacuucuaguucucauggaaaacgagagaacucuagacuuucaugacucaaaugucaagaaccuuuacgacaagguccgacuacagcuuagggauaaugcaaaggagcuggguaacgguuguuucgaguucuaucauaaaugugauaaugaauguauggaaaguguaagaaacggaacguaugacuacccgcaguauucagaagaagcaagacuaaaaagagaggaaauaaguggaguaaaauuggaaucaauaggaauuuaccaaauauugucaauuuauucuacaguggcgagcucccuagcacuggcaaucaugguagcuggucuauccuuauggaugugcuccaaugggucguuacaaugcagaauuugcauuuaaggacuagugcaucacauuuaaaagcaucucagccuaccaugagaauaagagaaagaaaaugaagaucaauagcuuauucaucucuuuuucuuuuucguugguguaaagccaacacccugucuaaaaaacauaaauuucuuuaaucauuuugccucuuuucucugugcuucaauuaauaaaaaauggaaagaaccuagaucuaaaaaaaaaaaaaaaaaaaaaaaaaaaaaaaaaaaaaaaaaaaaaaaaaaaaaaaaaaaaaaaaugcaucccccccccccccccccccccccccccccccaaaggcucuuuucagagccaccagaauu

SEQ ID NO: 224200 - RNA, 1924 nt, Artificial Sequence
  mRNA product Design1 comprising derived and/or modified sequence from hemagglutinin__InfluenzaA__ABP51976/m1 (CDS opt1) R1688/R5227
gggagaaagcuuaccauggagaagaucgugcugcucuucgccaucgucagccuggugaaguccgaccagaucugcaucggcuaccacgccaacaacagcaccgagcagguggacaccaucauggagaagaacgucacggugacccacgcgcaggacauccuggagaagacccacaacgggaagcucugcgaccuggacggcgugaagccccugauccuccgggacugcuccgucgccggguggcugcugggcaacccgaugugcgacgaguucaucaacgugcccgaguggagcuacaucguggagaaggccaaccccgucaacgaccucugcuaccccggggacuucaacgacuacgaggagcugaagcaccugcucucccgcaucaaccacuucgagaagauccagaucaucccgaagagcuccuggagcucccacgaggccagccugggcguguccagcgccugccccuaccagggcaaguccagcuucuuccggaacguggucuggcugaucaagaagaacuccaccuaccccacgaucaagcgcagcuacaacaacaccaaccaggaggaccuccuggugcugugggggauccaccaccccaacgacgcggccgagcagaccaagcucuaccagaacccgaccacguacaucuccgugggcaccagcacccugaaccagcggcuggucccccgcaucgccacccgguccaaggugaacgggcagagcggccgcauggaguucuucuggacgauccucaagcccaacgacgccaucaacuucgagagcaacgggaacuucaucgcgcccgaguacgccuacaagaucgugaagaagggcgacuccaccaucaugaagagcgagcuggaguacggcaacugcaacaccaagugccagaccccgaugggggccaucaacuccagcaugcccuuccacaacauccacccccugacgaucggcgagugccccaaguacgucaaguccaaccggcucgugcuggccaccgggcugcgcaacagcccgcagcgggagcggcgccggaagaagcgcggccucuucggcgccaucgcgggguucaucgagggcggguggcagggcaugguggacgggugguacggcuaccaccacuccaacgagcagggcagcggguacgccgccgacaaggaguccacccagaaggccaucgacggcgucacgaacaaggugaacagcaucaucgacaagaugaacacccaguucgaggccguggggcgggaguucaacaaccuggagcgccggaucgagaaccugaacaagaagauggaggacggcuuccucgacgucuggaccuacaacgcggagcugcuggugcucauggagaacgagcgcacccuggacuuccacgacuccaacgucaagaaccuguacgacaaggugcggcuccagcugcgcgacaacgccaaggagcuggggaacggcugcuucgaguucuaccacaagugcgacaacgagugcauggagagcgugcggaacggcacguacgacuacccccaguacuccgaggaggcccgccucaagcgggaggagaucagcggggucaagcuggaguccaucggcaucuaccagauccugagcaucuacuccaccguggccagcucccucgcccuggcgaucaugguggccgggcugagccucuggaugugcagcaacggcucccugcagugccgcaucugcaucugaggacuaguuauaagacugacuagcccgaugggccucccaacgggcccuccuccccuccuugcaccgagauuaauaaaaaaaaaaaaaaaaaaaaaaaaaaaaaaaaaaaaaaaaaaaaaaaaaaaaaaaaaaaaaaaaugcaucccccccccccccccccccccccccccccccaaaggcucuuuucagagccaccagaauu

SEQ ID NO: 224201 - RNA, 2089 nt, Artificial Sequence
  mRNA product Design2 comprising derived and/or modified sequence from hemagglutinin__InfluenzaA__ABP51976/m1 (CDS opt1) R2292
ggggcgcugccuacggagguggcagccaucuccuucucggcaucaagcuuaccauggagaagaucgugcugcucuucgccaucgucagccuggugaaguccgaccagaucugcaucggcuaccacgccaacaacagcaccgagcagguggacaccaucauggagaagaacgucacggugacccacgcgcaggacauccuggagaagacccacaacgggaagcucugcgaccuggacggcgugaagccccugauccuccgggacugcuccgucgccggguggcugcugggcaacccgaugugcgacgaguucaucaacgugcccgaguggagcuacaucguggagaaggccaaccccgucaacgaccucugcuaccccggggacuucaacgacuacgaggagcugaagcaccugcucucccgcaucaaccacuucgagaagauccagaucaucccgaagagcuccuggagcucccacgaggccagccugggcguguccagcgccugccccuaccagggcaaguccagcuucuuccggaacguggucuggcugaucaagaagaacuccaccuaccccacgaucaagcgcagcuacaacaacaccaaccaggaggaccuccuggugcugugggggauccaccaccccaacgacgcggccgagcagaccaagcucuaccagaacccgaccacguacaucuccgugggcaccagcacccugaaccagcggcuggucccccgcaucgccacccgguccaaggugaacgggcagagcggccgcauggaguucuucuggacgauccucaagcccaacgacgccaucaacuucgagagcaacgggaacuucaucgcgcccgaguacgccuacaagaucgugaagaagggcgacuccaccaucaugaagagcgagcuggaguacggcaacugcaacaccaagugccagaccccgaugggggccaucaacuccagcaugcccuuccacaacauccacccccugacgaucggcgagugccccaaguacgucaaguccaaccggcucgugcuggccaccgggcugcgcaacagcccgcagcgggagcggcgccggaagaagcgcggccucuucggcgccaucgcgggguucaucgagggcggguggcagggcaugguggacgggugguacggcuaccaccacuccaacgagcagggcagcggguacgccgccgacaaggaguccacccagaaggccaucgacggcgucacgaacaaggugaacagcaucaucgacaagaugaacacccaguucgaggccguggggcgggaguucaacaaccuggagcgccggaucgagaaccugaacaagaagauggaggacggcuuccucgacgucuggaccuacaacgcggagcugcuggugcucauggagaacgagcgcacccuggacuuccacgacuccaacgucaagaaccuguacgacaaggugcggcuccagcugcgcgacaacgccaaggagcuggggaacggcugcuucgaguucuaccacaagugcgacaacgagugcauggagagcgugcggaacggcacguacgacuacccccaguacuccgaggaggcccgccucaagcgggaggagaucagcggggucaagcuggaguccaucggcaucuaccagauccugagcaucuacuccaccguggccagcucccucgcccuggcgaucaugguggccgggcugagccucuggaugugcagcaacggcucccugcagugccgcaucugcaucugaggacuagugcaucacauuuaaaagcaucucagccuaccaugagaauaagagaaagaaaaugaagaucaauagcuuauucaucucuuuuucuuuuucguugguguaaagccaacacccugucuaaaaaacauaaauuucuuuaaucauuuugccucuuuucucugugcuucaauuaauaaaaaauggaaagaaccuagaucuaaaaaaaaaaaaaaaaaaaaaaaaaaaaaaaaaaaaaaaaaaaaaaaaaaaaaaaaaaaaaaaaugcaucccccccccccccccccccccccccccccccaaaggcucuuuucagagccaccagaauu

SEQ ID NO: 224202 - RNA, 1900 nt, Artificial Sequence
  mRNA product Design1 comprising derived and/or modified sequence from hemagglutinin__InfluenzaA__EPI439507 (CDS opt1) R5224
gggagaaagcuuaccaugaacacccagauccugguguucgcccucaucgccaucauccccaccaacgcggacaagaucugccugggccaccacgccgucagcaacgggacgaaggugaacacccugaccgagcgcggcguggaggucgugaacgccaccgagacgguggagcggaccaacaucccgcgcaucugcuccaaggggaagcggaccgucgaccucggccagugcgggcugcugggcaccaucacgggcccgccccagugcgaccaguuccucgaguucagcgccgaccugaucaucgagcgccgggagggguccgacgugugcuaccccggcaaguucgugaacgaggaggcccugcgccagauccuccgggagagcgggggcaucgacaaggaggcgaugggguucaccuacuccggcauccgcaccaacggcgccaccagcgccugccggcgcuccgggagcuccuucuacgccgagaugaaguggcugcugagcaacacggacaacgcggccuucccgcagaugaccaaguccuacaagaacacccggaagagccccgcccucaucgucuggggcauccaccacuccgugagcaccgccgagcagacgaagcuguacggguccggcaacaagcuggugaccgucggcagcuccaacuaccagcagagcuucgugcccucccccggggcccgcccgcaggugaacggccucagcgggcggaucgacuuccacuggcugaugcugaaccccaacgacaccgucaccuucagcuucaacggcgcguucaucgcccccgaccgcgccuccuuccuccgggggaagagcaugggcauccaguccggcgugcagguggacgccaacugcgagggggacugcuaccacagcggcgggacgaucaucuccaaccugcccuuccagaacaucgacagccgcgccgucggcaagugcccgcgguacgugaagcagcgcucccugcuccuggcgaccgggaugaagaacgugcccgagauccccaagggccggggccuguucggggccaucgccggcuucaucgagaacgggugggagggccucaucgacgggugguacggcuuccgccaccagaacgcccagggcgaggggaccgccgcggacuacaagagcacccaguccgccaucgaccagaucacgggcaagcugaaccggcugaucgagaagaccaaccagcaguucgagcucaucgacaacgaguucaacgaggucgagaagcagaucgggaacgugaucaacuggacccgcgacagcaucaccgaggugugguccuacaacgccgagcugcuggucgccauggagaaccagcacacgaucgaccucgccgacagcgagauggacaagcuguacgagcgcgugaagcggcagcugcgcgagaacgcggaggaggacggcaccggcugcuucgagaucuuccacaagugcgacgacgacugcauggccuccauccggaacaacaccuacgaccacagcaaguaccgcgaggaggccaugcagaaccggauccagaucgaccccgucaagcucuccagcggguacaaggacgugauccugugguucuccuucggcgccagcugcuucauccugcucgcgaucgugauggggcuggucuucaucugcgugaagaacggcaacaugcgcugcaccaucugcaucugaggacuaguuauaagacugacuagcccgaugggccucccaacgggcccuccuccccuccuugcaccgagauuaauaaaaaaaaaaaaaaaaaaaaaaaaaaaaaaaaaaaaaaaaaaaaaaaaaaaaaaaaaaaaaaaaugcaucccccccccccccccccccccccccccccccaaaggcucuuuucagagccaccagaauu

SEQ ID NO: 224203 - RNA, 1930 nt, Artificial Sequence
  mRNA product Design1 comprising derived and/or modified sequence from hemagglutinin__InfluenzaA__ABP51976/m1 HsALB(1-18)_H5N1(Vietnam2004)-HA (CDS opt1)
gggagaaagcuuaccaugaagugggugaccuucaucagccugcucuuccuguucuccagcgccuacuccgaccagaucugcaucggcuaccacgccaacaacagcaccgagcagguggacaccaucauggagaagaacgucacggugacccacgcgcaggacauccuggagaagacccacaacgggaagcucugcgaccuggacggcgugaagccccugauccuccgggacugcuccgucgccggguggcugcugggcaacccgaugugcgacgaguucaucaacgugcccgaguggagcuacaucguggagaaggccaaccccgucaacgaccucugcuaccccggggacuucaacgacuacgaggagcugaagcaccugcucucccgcaucaaccacuucgagaagauccagaucaucccgaagagcuccuggagcucccacgaggccagccugggcguguccagcgccugccccuaccagggcaaguccagcuucuuccggaacguggucuggcugaucaagaagaacuccaccuaccccacgaucaagcgcagcuacaacaacaccaaccaggaggaccuccuggugcugugggggauccaccaccccaacgacgcggccgagcagaccaagcucuaccagaacccgaccacguacaucuccgugggcaccagcacccugaaccagcggcuggucccccgcaucgccacccgguccaaggugaacgggcagagcggccgcauggaguucuucuggacgauccucaagcccaacgacgccaucaacuucgagagcaacgggaacuucaucgcgcccgaguacgccuacaagaucgugaagaagggcgacuccaccaucaugaagagcgagcuggaguacggcaacugcaacaccaagugccagaccccgaugggggccaucaacuccagcaugcccuuccacaacauccacccccugacgaucggcgagugccccaaguacgucaaguccaaccggcucgugcuggccaccgggcugcgcaacagcccgcagcgggagcggcgccggaagaagcgcggccucuucggcgccaucgcgggguucaucgagggcggguggcagggcaugguggacgggugguacggcuaccaccacuccaacgagcagggcagcggguacgccgccgacaaggaguccacccagaaggccaucgacggcgucacgaacaaggugaacagcaucaucgacaagaugaacacccaguucgaggccguggggcgggaguucaacaaccuggagcgccggaucgagaaccugaacaagaagauggaggacggcuuccucgacgucuggaccuacaacgcggagcugcuggugcucauggagaacgagcgcacccuggacuuccacgacuccaacgucaagaaccuguacgacaaggugcggcuccagcugcgcgacaacgccaaggagcuggggaacggcugcuucgaguucuaccacaagugcgacaacgagugcauggagagcgugcggaacggcacguacgacuacccccaguacuccgaggaggcccgccucaagcgggaggagaucagcggggucaagcuggaguccaucggcaucuaccagauccugagcaucuacuccaccguggccagcucccucgcccuggcgaucaugguggccgggcugagccucuggaugugcagcaacggcucccugcagugccgcaucugcaucugaggacuaguuauaagacugacuagcccgaugggccucccaacgggcccuccuccccuccuugcaccgagauuaauaaaaaaaaaaaaaaaaaaaaaaaaaaaaaaaaaaaaaaaaaaaaaaaaaaaaaaaaaaaaaaaaugcaucccccccccccccccccccccccccccccccaaaggcucuuuucagagccaccagaauu

SEQ ID NO: 224204 - RNA, 2095 nt, Artificial Sequence
  mRNA product Design2 comprising derived and/or modified sequence from hemagglutinin__InfluenzaA__ABP51976/m1 HsALB(1-18)_H5N1(Vietnam2004)-HA (CDS opt1)
ggggcgcugccuacggagguggcagccaucuccuucucggcaucaagcuuaccaugaagugggugaccuucaucagccugcucuuccuguucuccagcgccuacuccgaccagaucugcaucggcuaccacgccaacaacagcaccgagcagguggacaccaucauggagaagaacgucacggugacccacgcgcaggacauccuggagaagacccacaacgggaagcucugcgaccuggacggcgugaagccccugauccuccgggacugcuccgucgccggguggcugcugggcaacccgaugugcgacgaguucaucaacgugcccgaguggagcuacaucguggagaaggccaaccccgucaacgaccucugcuaccccggggacuucaacgacuacgaggagcugaagcaccugcucucccgcaucaaccacuucgagaagauccagaucaucccgaagagcuccuggagcucccacgaggccagccugggcguguccagcgccugccccuaccagggcaaguccagcuucuuccggaacguggucuggcugaucaagaagaacuccaccuaccccacgaucaagcgcagcuacaacaacaccaaccaggaggaccuccuggugcugugggggauccaccaccccaacgacgcggccgagcagaccaagcucuaccagaacccgaccacguacaucuccgugggcaccagcacccugaaccagcggcuggucccccgcaucgccacccgguccaaggugaacgggcagagcggccgcauggaguucuucuggacgauccucaagcccaacgacgccaucaacuucgagagcaacgggaacuucaucgcgcccgaguacgccuacaagaucgugaagaagggcgacuccaccaucaugaagagcgagcuggaguacggcaacugcaacaccaagugccagaccccgaugggggccaucaacuccagcaugcccuuccacaacauccacccccugacgaucggcgagugccccaaguacgucaaguccaaccggcucgugcuggccaccgggcugcgcaacagcccgcagcgggagcggcgccggaagaagcgcggccucuucggcgccaucgcgggguucaucgagggcggguggcagggcaugguggacgggugguacggcuaccaccacuccaacgagcagggcagcggguacgccgccgacaaggaguccacccagaaggccaucgacggcgucacgaacaaggugaacagcaucaucgacaagaugaacacccaguucgaggccguggggcgggaguucaacaaccuggagcgccggaucgagaaccugaacaagaagauggaggacggcuuccucgacgucuggaccuacaacgcggagcugcuggugcucauggagaacgagcgcacccuggacuuccacgacuccaacgucaagaaccuguacgacaaggugcggcuccagcugcgcgacaacgccaaggagcuggggaacggcugcuucgaguucuaccacaagugcgacaacgagugcauggagagcgugcggaacggcacguacgacuacccccaguacuccgaggaggcccgccucaagcgggaggagaucagcggggucaagcuggaguccaucggcaucuaccagauccugagcaucuacuccaccguggccagcucccucgcccuggcgaucaugguggccgggcugagccucuggaugugcagcaacggcucccugcagugccgcaucugcaucugaggacuagugcaucacauuuaaaagcaucucagccuaccaugagaauaagagaaagaaaaugaagaucaauagcuuauucaucucuuuuucuuuuucguugguguaaagccaacacccugucuaaaaaacauaaauuucuuuaaucauuuugccucuuuucucugugcuucaauuaauaaaaaauggaaagaaccuagaucuaaaaaaaaaaaaaaaaaaaaaaaaaaaaaaaaaaaaaaaaaaaaaaaaaaaaaaaaaaaaaaaaugcaucccccccccccccccccccccccccccccccaaaggcucuuuucagagccaccagaauu

SEQ ID NO: 224205 - RNA, 1930 nt, Artificial Sequence
  mRNA product Design1 comprising derived and/or modified sequence from hemagglutinin__InfluenzaA__ABP51976/m1 IgE-leader_H5N1(Vietnam2004)-HA (CDS opt1)
gggagaaagcuuaccauggacuggaccuggauccuguuccucguggccgccgcgacccgcguccacagcgaccagaucugcaucggcuaccacgccaacaacagcaccgagcagguggacaccaucauggagaagaacgucacggugacccacgcgcaggacauccuggagaagacccacaacgggaagcucugcgaccuggacggcgugaagccccugauccuccgggacugcuccgucgccggguggcugcugggcaacccgaugugcgacgaguucaucaacgugcccgaguggagcuacaucguggagaaggccaaccccgucaacgaccucugcuaccccggggacuucaacgacuacgaggagcugaagcaccugcucucccgcaucaaccacuucgagaagauccagaucaucccgaagagcuccuggagcucccacgaggccagccugggcguguccagcgccugccccuaccagggcaaguccagcuucuuccggaacguggucuggcugaucaagaagaacuccaccuaccccacgaucaagcgcagcuacaacaacaccaaccaggaggaccuccuggugcugugggggauccaccaccccaacgacgcggccgagcagaccaagcucuaccagaacccgaccacguacaucuccgugggcaccagcacccugaaccagcggcuggucccccgcaucgccacccgguccaaggugaacgggcagagcggccgcauggaguucuucuggacgauccucaagcccaacgacgccaucaacuucgagagcaacgggaacuucaucgcgcccgaguacgccuacaagaucgugaagaagggcgacuccaccaucaugaagagcgagcuggaguacggcaacugcaacaccaagugccagaccccgaugggggccaucaacuccagcaugcccuuccacaacauccacccccugacgaucggcgagugccccaaguacgucaaguccaaccggcucgugcuggccaccgggcugcgcaacagcccgcagcgggagcggcgccggaagaagcgcggccucuucggcgccaucgcgggguucaucgagggcggguggcagggcaugguggacgggugguacggcuaccaccacuccaacgagcagggcagcggguacgccgccgacaaggaguccacccagaaggccaucgacggcgucacgaacaaggugaacagcaucaucgacaagaugaacacccaguucgaggccguggggcgggaguucaacaaccuggagcgccggaucgagaaccugaacaagaagauggaggacggcuuccucgacgucuggaccuacaacgcggagcugcuggugcucauggagaacgagcgcacccuggacuuccacgacuccaacgucaagaaccuguacgacaaggugcggcuccagcugcgcgacaacgccaaggagcuggggaacggcugcuucgaguucuaccacaagugcgacaacgagugcauggagagcgugcggaacggcacguacgacuacccccaguacuccgaggaggcccgccucaagcgggaggagaucagcggggucaagcuggaguccaucggcaucuaccagauccugagcaucuacuccaccguggccagcucccucgcccuggcgaucaugguggccgggcugagccucuggaugugcagcaacggcucccugcagugccgcaucugcaucugaggacuaguuauaagacugacuagcccgaugggccucccaacgggcccuccuccccuccuugcaccgagauuaauaaaaaaaaaaaaaaaaaaaaaaaaaaaaaaaaaaaaaaaaaaaaaaaaaaaaaaaaaaaaaaaaugcaucccccccccccccccccccccccccccccccaaaggcucuuuucagagccaccagaauu

SEQ ID NO: 224206 - RNA, 2095 nt, Artificial Sequence
  mRNA product Design2 comprising derived and/or modified sequence from hemagglutinin__InfluenzaA__ABP51976/m1 IgE-leader_H5N1(Vietnam2004)-HA (CDS opt1)
ggggcgcugccuacggagguggcagccaucuccuucucggcaucaagcuuaccauggacuggaccuggauccuguuccucguggccgccgcgacccgcguccacagcgaccagaucugcaucggcuaccacgccaacaacagcaccgagcagguggacaccaucauggagaagaacgucacggugacccacgcgcaggacauccuggagaagacccacaacgggaagcucugcgaccuggacggcgugaagccccugauccuccgggacugcuccgucgccggguggcugcugggcaacccgaugugcgacgaguucaucaacgugcccgaguggagcuacaucguggagaaggccaaccccgucaacgaccucugcuaccccggggacuucaacgacuacgaggagcugaagcaccugcucucccgcaucaaccacuucgagaagauccagaucaucccgaagagcuccuggagcucccacgaggccagccugggcguguccagcgccugccccuaccagggcaaguccagcuucuuccggaacguggucuggcugaucaagaagaacuccaccuaccccacgaucaagcgcagcuacaacaacaccaaccaggaggaccuccuggugcugugggggauccaccaccccaacgacgcggccgagcagaccaagcucuaccagaacccgaccacguacaucuccgugggcaccagcacccugaaccagcggcuggucccccgcaucgccacccgguccaaggugaacgggcagagcggccgcauggaguucuucuggacgauccucaagcccaacgacgccaucaacuucgagagcaacgggaacuucaucgcgcccgaguacgccuacaagaucgugaagaagggcgacuccaccaucaugaagagcgagcuggaguacggcaacugcaacaccaagugccagaccccgaugggggccaucaacuccagcaugcccuuccacaacauccacccccugacgaucggcgagugccccaaguacgucaaguccaaccggcucgugcuggccaccgggcugcgcaacagcccgcagcgggagcggcgccggaagaagcgcggccucuucggcgccaucgcgggguucaucgagggcggguggcagggcaugguggacgggugguacggcuaccaccacuccaacgagcagggcagcggguacgccgccgacaaggaguccacccagaaggccaucgacggcgucacgaacaaggugaacagcaucaucgacaagaugaacacccaguucgaggccguggggcgggaguucaacaaccuggagcgccggaucgagaaccugaacaagaagauggaggacggcuuccucgacgucuggaccuacaacgcggagcugcuggugcucauggagaacgagcgcacccuggacuuccacgacuccaacgucaagaaccuguacgacaaggugcggcuccagcugcgcgacaacgccaaggagcuggggaacggcugcuucgaguucuaccacaagugcgacaacgagugcauggagagcgugcggaacggcacguacgacuacccccaguacuccgaggaggcccgccucaagcgggaggagaucagcggggucaagcuggaguccaucggcaucuaccagauccugagcaucuacuccaccguggccagcucccucgcccuggcgaucaugguggccgggcugagccucuggaugugcagcaacggcucccugcagugccgcaucugcaucugaggacuagugcaucacauuuaaaagcaucucagccuaccaugagaauaagagaaagaaaaugaagaucaauagcuuauucaucucuuuuucuuuuucguugguguaaagccaacacccugucuaaaaaacauaaauuucuuuaaucauuuugccucuuuucucugugcuucaauuaauaaaaaauggaaagaaccuagaucuaaaaaaaaaaaaaaaaaaaaaaaaaaaaaaaaaaaaaaaaaaaaaaaaaaaaaaaaaaaaaaaaugcaucccccccccccccccccccccccccccccccaaaggcucuuuucagagccaccagaauu
